(19) United States
(12) Patent Application Publication
(10) Pub. No.: US 2023/0192864 A1
(43) Pub. Date: Jun. 22, 2023

(54) Treatment Of Lung Conditions With Integrin Subunit Alpha 1 (ITGA1) Inhibitors

(71) Applicant: Regeneron Pharmaceuticals, Inc., Tarrytown, NY (US)

(72) Inventors: Manuel Allen Revez Ferreira, Tarrytown, NY (US); Julie E. Horowitz, Tarrytown, NY (US); Katherine Siminovitch, Tarrytown, NY (US); Goncalo Abecasis, Tarrytown, NY (US); Aris Baras, Tarrytown, NY (US); Maria Cristina Suciu, Tarrytown, NY (US)

(21) Appl. No.: 18/067,085

(22) Filed: Dec. 16, 2022

Related U.S. Application Data
(60) Provisional application No. 63/291,194, filed on Dec. 17, 2021.

(51) Int. Cl. C07K 16/28; A61K 31/7105

(52) U.S. Cl. CPC C07K 16/2839; A61K 31/7105

(57) ABSTRACT

The present disclosure provides methods of treating subjects having a lung disease such as a fibrotic lung disease, pulmonary fibrosis, interstitial lung disease, chronic obstructive pulmonary disease (COPD), or asthma, or at risk of developing a lung disease, and methods of identifying subjects having an increased risk of developing a lung disease.

### REFERENCE TO SEQUENCE LISTING

[0001] This application includes a Sequence Listing submitted electronically as an XML file named 381203630SEQ, created on Nov. 30, 2022, with a size of 86,876 kilobytes. The Sequence Listing is incorporated herein by reference.

### FIELD

[0002] The present disclosure relates generally to the treatment of subjects having a lung disease, such as a fibrotic lung disease, pulmonary fibrosis, interstitial lung disease, chronic obstructive pulmonary disease (COPD), or asthma, or at risk of developing a lung disease, with Integrin Subunit Alpha 1 (ITGA1) inhibitors, and methods of identifying subjects having an increased risk of developing a lung disease.

### BACKGROUND

[0003] Fibrotic pulmonary diseases are progressive and irreversible. Standard therapies are mere palliative as they cannot address the underlying disease mechanism once the subject has progressed to a point at which symptoms are present. Thus, there is a long-felt but unmet need in the field for a method of treating asymptomatic subjects as well as those who are at risk of developing fibrotic pulmonary diseases to prevent onset of the disease, delay onset of the disease, or reduce the severity of disease symptoms, The methods of the disclosure provide a preventative or efficacious treatment, as opposed to a merely palliative treatment, for asymptomatic subjects as well as those subjects at risk of developing the disease.

[0004] Integrin Subunit Alpha 1 (ITGA1) is a component of cell surface integrin receptor that heterodimerizes with the beta 1 subunit to form a cell-surface receptor for collagen and laminin. It recognizes the proline-hydroxylated sequence G-F-P-G-E-R in collagen, and is involved in anchorage-dependent, negative regulation of EGF-stimulated cell growth. It acts on cell binding to laminin and collagen and neurite outgrowth, and peripheral nerve regeneration. Proper collagen-integrin interaction is important in fracture healing, suggesting that the ITGA1 gene is involved in mesenchymal stem cell proliferation and chondrogenesis. The heterodimeric receptor is also involved in cell-cell adhesion and may play a role in inflammation and fibrosis.

### SUMMARY

[0005] The present disclosure provides methods of treating a subject having a fibrotic lung disease or at risk of developing a fibrotic lung disease, the methods comprising administering an ITGA1 inhibitor to the subject.

[0006] The present disclosure also provides methods of treating a subject having pulmonary fibrosis or at risk of developing pulmonary fibrosis, the methods comprising administering an ITGA1 inhibitor to the subject.

[0007] The present disclosure also provides methods of treating a subject having interstitial lung disease or at risk of developing interstitial lung disease, the methods comprising administering an ITGA1 inhibitor to the subject.

[0008] The present disclosure also provides methods of treating a subject having chronic obstructive pulmonary disease (COPD) or at risk of developing COPD, the methods comprising administering an ITGA1 inhibitor to the subject.

[0009] The present disclosure also provides methods of treating a subject having asthma or at risk of developing asthma, the methods comprising administering an ITGA1 inhibitor to the subject.

[0010] The present disclosure also provides methods of treating a subject with a lung disease therapeutic agent, wherein the subject has a fibrotic lung disease, pulmonary fibrosis, interstitial lung disease, COPD, or asthma, or is at risk of developing a fibrotic lung disease, pulmonary fibrosis, interstitial lung disease, COPD, or asthma, the methods comprising: determining whether the subject has an ITGA1 variant nucleic acid molecule by: obtaining or having obtained a biological sample from the subject; and performing or having performed a sequence analysis on the biological sample to determine if the subject has a genotype comprising the ITGA1 variant nucleic acid molecule; and administering or continuing to administer the lung disease therapeutic agent in a standard dosage amount to a subject that is ITGA1 reference, and/or administering an ITGA1 inhibitor to the subject; and administering or continuing to administer the lung disease therapeutic agent in an amount that is the same as or less than a standard dosage amount to a subject that is heterozygous for the ITGA1 variant nucleic acid molecule, and/or administering an ITGA1 inhibitor to the subject; wherein the presence of a genotype having the ITGA1 variant nucleic acid molecule indicates the subject has a reduced risk of developing the fibrotic lung disease, pulmonary fibrosis, interstitial lung disease, COPD, or asthma.

[0011] The present disclosure also provides methods of identifying a subject having an increased risk of developing a fibrotic lung disease, pulmonary fibrosis, interstitial lung disease, COPD, or asthma, the methods comprising: determining or having determined the presence or absence of an ITGA1 variant nucleic acid molecule in a biological sample obtained from the subject; wherein: when the subject is ITGA1 reference, then the subject has an increased risk of developing a fibrotic lung disease, pulmonary fibrosis, interstitial lung disease, COPD, or asthma; and when the subject is heterozygous or homozygous for an ITGA1 variant nucleic acid molecule, then the subject has a decreased risk of developing a fibrotic lung disease, pulmonary fibrosis, interstitial lung disease, COPD, or asthma.

[0012] The present disclosure also provides lung disease therapeutic agents for use in the treatment of a lung disease in a subject identified as having an ITGA1 variant nucleic acid molecule, or the complement thereof, wherein the variant nucleic acid molecule has a nucleotide sequence that comprises a nucleotide at a position corresponding to the nucleotide at the variant position of an ITGA1 variant nucleic acid molecule, or the complement thereof.

[0013] The present disclosure also provides ITGA1 inhibitors for use in the treatment of a fibrotic lung disease, pulmonary fibrosis, interstitial lung disease, COPD, or asthma in a subject that: a) is reference for an ITGA1 genomic nucleic acid molecule, an ITGA1 mRNA molecule, or an ITGA1 cDNA molecule; or b) is heterozygous for an ITGA1 variant genomic nucleic acid molecule, or the complement thereof; an ITGA1 variant mRNA molecule, or the complement thereof; or an ITGA1 variant cDNA molecule, or the complement thereof.

### BRIEF DESCRIPTION OF THE DRAWINGS

[0014] The accompanying figures, which are incorporated in and constitute a part of this specification, illustrate several features of the present disclosure.

[0015] FIG. 1 shows association of rare pLoFs <1% (M1.1) in ITGA1 with various immune-related and respiratory-related quantitative traits.

[0016] FIG. 2 shows association of rare pLoFs <1% (M1.1) in ITGA1 with various immune-related and respiratory-related diseases. The red bar indicates burden of pLoFs results in better lung function, and a trend for protection against asthma and COPD.

### DESCRIPTION

[0017] Various terms relating to aspects of the present disclosure are used throughout the specification and claims. Such terms are to be given their ordinary meaning in the art, unless otherwise indicated. Other specifically defined terms are to be construed in a manner consistent with the definitions provided herein.

[0018] Unless otherwise expressly stated, it is in no way intended that any method or aspect set forth herein be construed as requiring that its steps be performed in a specific order. Accordingly, where a method claim does not specifically state in the claims or descriptions that the steps are to be limited to a specific order, it is in no way intended that an order be inferred, in any respect. This holds for any possible non-expressed basis for interpretation, including matters of logic with respect to arrangement of steps or operational flow, plain meaning derived from grammatical organization or punctuation, or the number or type of aspects described in the specification.

[0019] As used herein, the singular forms “a,” “an” and “the” include plural referents unless the context clearly dictates otherwise.

[0020] As used herein, the term “about” means that the recited numerical value is approximate and small variations would not significantly affect the practice of the disclosed embodiments. Where a numerical value is used, unless indicated otherwise by the context, the term “about” means the numerical value can vary by ±10% and remain within the scope of the disclosed embodiments.

[0021] As used herein, the term “comprising” may be replaced with “consisting” or “consisting essentially of” in particular embodiments as desired.

[0022] As used herein, the term “isolated”, in regard to a nucleic acid molecule or a polypeptide, means that the nucleic acid molecule or polypeptide is in a condition other than its native environment, such as apart from blood and/or animal tissue. In some embodiments, an isolated nucleic acid molecule or polypeptide is substantially free of other nucleic acid molecules or other polypeptides, particularly other nucleic acid molecules or polypeptides of animal origin. In some embodiments, the nucleic acid molecule or polypeptide can be in a highly purified form, i.e., greater than 95% pure or greater than 99% pure. When used in this context, the term “isolated” does not exclude the presence of the same nucleic acid molecule or polypeptide in alternative physical forms, such as dimers or alternatively phosphorylated or derivatized forms.

[0023] As used herein, the terms “nucleic acid”, “nucleic acid molecule”, “nucleic acid sequence”, “polynucleotide”, or “oligonucleotide” can comprise a polymeric form of nucleotides of any length, can comprise DNA and/or RNA, and can be single-stranded, double-stranded, or multiple stranded. One strand of a nucleic acid also refers to its complement.

[0024] As used herein, the term “subject” includes any animal, including mammals. Mammals include, but are not limited to, farm animals (such as, for example, horse, cow, pig), companion animals (such as, for example, dog, cat), laboratory animals (such as, for example, mouse, rat, rabbits), and non-human primates (such as, for example, apes and monkeys). In some embodiments, the subject is a human. In some embodiments, the subject is a patient under the care of a physician. In some embodiments, the subject is a smoker. In some embodiments, the subject is a smoker of a tobacco product.

[0025] Rare variants in the ITGA1 gene associated with a decreased risk of developing a lung disease in humans has been identified in accordance with the present disclosure. It has been further observed in accordance with the present disclosure that the burden of ITGA1 loss-of-function variant nucleic acid molecules (whether these variations are homozygous or heterozygous in a particular subject) associates with a decreased risk of developing a lung disease. Moreover, the identification by the present disclosure of the association between additional variants and gene burden masks indicates that ITGA1 itself (rather than linkage disequilibrium with variants in another gene) is responsible for a protective effect in lung disease. It is believed that no variants of the ITGA1 gene or protein have any known association with lung disease, such as pulmonary fibrosis, interstitial lung disease, chronic obstructive pulmonary disease, or asthma. Altogether, the genetic analyses described herein surprisingly indicate that the ITGA1 gene and, in particular, loss-of-function variants in the ITGA1 gene, associate with a decreased risk of developing a fibrotic lung disease. Therefore, subjects that are ITGA1 reference that have an increased risk of developing a fibrotic lung disease may be treated such that the fibrotic lung disease is prevented, the symptoms thereof are reduced, and/or development of symptoms is repressed. Accordingly, the present disclosure provides methods of leveraging the identification of such variants in subjects to identify or stratify risk in such subjects of developing a fibrotic lung disease, or to diagnose subjects as having an increased risk of developing a fibrotic lung disease, such that subjects at risk or subjects with active disease may be treated accordingly.

[0026] For purposes of the present disclosure, any particular human can be categorized as having one of three ITGA1 genotypes: i) ITGA1 reference; ii) heterozygous for an ITGA1 variant nucleic acid molecule; or iii) homozygous for an ITGA1 variant nucleic acid molecule. A human is ITGA1 reference when the human does not have a copy of an ITGA1 variant nucleic acid molecule. A human is heterozygous for an ITGA1 variant nucleic acid molecule when the human has a single copy of an ITGA1 variant nucleic acid molecule. A human is homozygous for an ITGA1 variant nucleic acid molecule when the human has two copies of an ITGA1 variant nucleic acid molecule. A human who has an ITGA1 polypeptide having a partial loss-of-function (or predicted partial loss-of-function) is hypomorphic for ITGA1.

[0027] As used herein, an ITGA1 variant nucleic acid molecule is any ITGA1 nucleic acid molecule (such as, a genomic nucleic acid molecule, an mRNA molecule, or a cDNA molecule) encoding an ITGA1 polypeptide having a partial loss-of-function, a complete loss-of-function, a predicted partial loss-of-function, or a predicted complete loss-of-function. The ITGA1 variant nucleic acid molecule can also be a missense variant, a splice-site variant, a stop-gain variant, a start-loss variant, a stop-loss variant, a frameshift variant, or an in-frame indel variant, or a variant that encodes a truncated ITGA1 predicted loss-of-function polypeptide. An ITGA1 variant nucleic acid molecule can also be any nucleic acid molecule (such as, a genomic nucleic acid molecule, an mRNA molecule, or a cDNA molecule) resulting in complete loss or decreased or aberrant expression of ITGA1 mRNA or polypeptide. An ITGA1 variant nucleic acid molecule can also be any missense variant nucleic acid molecule (such as, a genomic nucleic acid molecule, an mRNA molecule, or a cDNA molecule) resulting in a reduction of ITGA1 activity.

[0028] Suitable examples of ITGA1 variant nucleic acid molecules, such as ITGA1 loss-of-function variant nucleic acid molecules, include the following variations (Chromosome:Position(GRCh38.p13):Reference Allele:Alternate Allele): 5:52920430:C:T, 5:52944942:G:T, 5:52910243:G:T, 5:52918899:G:C, 5:52918730:A:T, 5:52952404:CA:C, 5:52861561:T:C, 5:52939693:T:C, 5:52910201:C:T, 5:52788416:T:C, 5:52788356:G:A, 5:52893783:G:T, 5:52920332:AT:A, 5:52952436:GA:G, 5:52939945:G:T, 5:52925371:C:T, 5:52939690:TG:T, 5:52898385:T:C, 5:52897529:GT:G, 5:52937490:C:G, 5:52947412:CT:C, 5:52882022:G:T, 5:52939946:T:A, 5:52861503:A:AT, 5:52881929:T:G, 5:52932134:C:A, 5:52939933:AC:A, 5:52933993:C:G, 5:52927645:TCCTG:T, 5:52939934:CT:C, 5:52893841:G:C, 5:52881939:G:T, 5:52932134:C:G, 5:52864814:GA:G, 5:52849381:C:A, 5:52922818:CT:C, 5:52925286:TG:T, 5:52865083:G:A, 5:52939606:C:CAT, 5:52915509:C:CGTGGTGA, 5:52865083:G:T, 5:52944999:ATC:A, 5:52910194:TA:T, 5:52947462:G:A, 5:52898323:C:T, 5:52945006:GT:G, 5:52910292:CT:C, 5:52861560:G:A, 5:52939642:G:GA, 5:52864979:GC:G, 5:52927590:CA:C, 5:52918814:G:T, 5:52788351:G:GC, 5:52920469:G:A, 5:52905808:A:AT, 5:52922876:GT:G, 5:52861501:C:CT, 5:52865771:T:A, 5:52947456:TGG:T, 5:52918736:C:T, 5:52920376:C:T, 5:52915496:G:GA, 5:52898346:GTC:G, 5:52947462:G:T, 5:52920444:C:A, 5:52882022:G:A, 5:52927640:TC:T, 5:52925470:G:GT, 5:52952430:GA:G, 5:52937516:T:C, 5:52915570:G:GC, 5:52861530:C:A, 5:52932046:G:A, 5:52893841:G:T, 5:52887965:TGTAA:T, 5:52937399:AG:A, 5:52887863:AG:A, 5:52905910:T:A, 5:52925304:TA:T, 5:52910222:C:T, 5:52887906:C:T, 5:52910199:AG:A, 5:52909042:G:A, 5:52898269:TA:T, 5:52939588:A:C, 5:52937515:G:GT, 5:52865745:C:A, 5:52937474:GT:G, 5:52925299:G:T, 5:52920367:CA:C, 5:52898296:CAG:C, 5:52925283:CT:C, 5:52893817:GAGAA:G, 5:52915565:TG:T, 5:52933892:A:T, 5:52915524:G:T, 5:52887846:C:T, 5:52937515:G:A, 5:52929670:GA:G, 5:52915463:G:A, 5:52905900:G:T, 5:52865688:AG:A, 5:52933993:C:A, 5:52932137:G:A, 5:52788355:T:C, 5:52897529:G:A, 5:52947344:G:A, 5:52910417:CAAGT:C, 5:52864772:C:A, 5:52939677:C:T, 5:52918807:C:A, 5:52915502:TTTTGG:T, 5:52893693:C:T, 5:52939855:A:T, 5:52925489:T:C, 5:52939673:C:CA, 5:52887966:G:T, 5:52918877:GA:G, and 5:52947463:T:C. The alternate allele(s) is/are a variant nucleotide(s). The position is a variant position.

[0029] For subjects that are genotyped or determined to be ITGA1 reference, such subjects have an increased risk of developing a fibrotic lung disease, pulmonary fibrosis, interstitial lung disease, COPD, or asthma. For subjects that are genotyped or determined to be either ITGA1 reference or heterozygous for an ITGA1 variant nucleic acid molecule, such subjects can be treated with an ITGA1 inhibitor.

[0030] In any of the embodiments described throughout the present disclosure, the lung disease is a fibrotic lung disease, pulmonary fibrosis, interstitial lung disease, COPD, or asthma. In any of the embodiments described throughout the present disclosure, the lung disease is a fibrotic lung disease. In any of the embodiments described throughout the present disclosure, the lung disease is a pulmonary fibrosis. In any of the embodiments described throughout the present disclosure, the lung disease is interstitial lung disease. In any of the embodiments described throughout the present disclosure, the lung disease is chronic obstructive pulmonary disease. In any of the embodiments described throughout the present disclosure, the lung disease is asthma.

[0031] Symptoms of a lung disease, such as a fibrotic lung disease, include, but are not limited to, shortness of breath (dyspnea)′ a dry cough, fatigue, unexplained weight loss, aching muscles and joints, and widening and rounding of the tips of the fingers or toes (clubbing).

[0032] The present disclosure provides methods of treating a subject having a fibrotic lung disease or at risk of developing a fibrotic lung disease, the methods comprising administering an ITGA1 inhibitor to the subject.

[0033] The present disclosure also provides methods of treating a subject having pulmonary fibrosis or at risk of developing pulmonary fibrosis, the methods comprising administering an ITGA1 inhibitor to the subject.

[0034] The present disclosure also provides methods of treating a subject having interstitial lung disease or at risk of developing interstitial lung disease, the methods comprising administering an ITGA1 inhibitor to the subject.

[0035] The present disclosure also provides methods of treating a subject having COPD or at risk of developing COPD, the methods comprising administering an ITGA1 inhibitor to the subject.

[0036] The present disclosure also provides methods of treating a subject having asthma or at risk of developing asthma, the methods comprising administering an ITGA1 inhibitor to the subject.

[0037] In some embodiments, the ITGA1 inhibitor comprises an inhibitory nucleic acid molecule. In some embodiments, the inhibitory nucleic acid molecule comprises an antisense molecule, a small interfering RNA (siRNA) molecule, or a short hairpin RNA (shRNA) molecule. In some embodiments, the inhibitory nucleic acid molecule comprises an antisense molecule. In some embodiments, the inhibitory nucleic acid molecule comprises an siRNA molecule. In some embodiments, the inhibitory nucleic acid molecule comprises an shRNA molecule. Such inhibitory nucleic acid molecules can be designed to target any region of an ITGA1 nucleic acid molecule, such as an mRNA molecule. In some embodiments, the inhibitory nucleic acid molecule hybridizes to a sequence within an ITGA1 genomic nucleic acid molecule or mRNA molecule and decreases expression of the ITGA1 polypeptide in a cell in the subject. In some embodiments, the ITGA1 inhibitor comprises an antisense molecule that hybridizes to an ITGA1 genomic nucleic acid molecule or mRNA molecule and decreases expression of the ITGA1 polypeptide in a cell in the subject. In some embodiments, the ITGA1 inhibitor comprises an siRNA that hybridizes to an ITGA1 genomic nucleic acid molecule or mRNA molecule and decreases expression of the ITGA1 polypeptide in a cell in the subject. In some embodiments, the ITGA1 inhibitor comprises an shRNA that hybridizes to an ITGA1 genomic nucleic acid molecule or mRNA molecule and decreases expression of the ITGA1 polypeptide in a cell in the subject.

[0038] In some embodiments, the antisense nucleic acid molecules comprise or consist of any of the nucleotide sequences represented by SEQ ID NOs: 32-18299. In some embodiments, the siRNA molecules comprise or consist of any of the nucleotide sequences (sense and antisense strands presented one after the other) represented by SEQ ID NOs: 18300-69677 (e.g., the sense strand is, for example, SEQ ID NO: 18300 and the corresponding antisense strand is SEQ ID NO: 18301; the sense strand is, for example, SEQ ID NO: 18302 and the corresponding antisense strand is SEQ ID NO: 18303; etc.).

[0039] The inhibitory nucleic acid molecules can comprise RNA, DNA, or both RNA and DNA. The inhibitory nucleic acid molecules can also be linked or fused to a heterologous nucleic acid sequence, such as in a vector, or a heterologous label. For example, the inhibitory nucleic acid molecules can be within a vector or as an exogenous donor sequence comprising the inhibitory nucleic acid molecule and a heterologous nucleic acid sequence. The inhibitory nucleic acid molecules can also be linked or fused to a heterologous label. The label can be directly detectable (such as, for example, fluorophore) or indirectly detectable (such as, for example, hapten, enzyme, or fluorophore quencher). Such labels can be detectable by spectroscopic, photochemical, biochemical, immunochemical, or chemical means. Such labels include, for example, radiolabels, pigments, dyes, chromogens, spin labels, and fluorescent labels. The label can also be, for example, a chemiluminescent substance; a metal-containing substance; or an enzyme, where there occurs an enzyme-dependent secondary generation of signal. The term “label” can also refer to a “tag” or hapten that can bind selectively to a conjugated molecule such that the conjugated molecule, when added subsequently along with a substrate, is used to generate a detectable signal. For example, biotin can be used as a tag along with an avidin or streptavidin conjugate of horseradish peroxidate (HRP) to bind to the tag, and examined using a calorimetric substrate (such as, for example, tetramethylbenzidine (TMB)) or a fluorogenic substrate to detect the presence of HRP. Exemplary labels that can be used as tags to facilitate purification include, but are not limited to, myc, HA, FLAG or 3XFLAG, 6XHis or polyhistidine, glutathione-S-transferase (GST), maltose binding protein, an epitope tag, or the Fc portion of immunoglobulin. Numerous labels include, for example, particles, fluorophores, haptens, enzymes and their calorimetric, fluorogenic and chemiluminescent substrates and other labels.

[0040] The inhibitory nucleic acid molecules can comprise, for example, nucleotides or non-natural or modified nucleotides, such as nucleotide analogs or nucleotide substitutes. Such nucleotides include a nucleotide that contains a modified base, sugar, or phosphate group, or that incorporates a non-natural moiety in its structure. Examples of non-natural nucleotides include, but are not limited to, dideoxynucleotides, biotinylated, aminated, deaminated, alkylated, benzylated, and fluorophor-labeled nucleotides.

[0041] The inhibitory nucleic acid molecules can also comprise one or more nucleotide analogs or substitutions. A nucleotide analog is a nucleotide which contains a modification to either the base, sugar, or phosphate moieties. Modifications to the base moiety include, but are not limited to, natural and synthetic modifications of A, C, G, and T/U, as well as different purine or pyrimidine bases such as, for example, pseudouridine, uracil-5-yl, hypoxanthin-9-yl (I), and 2-aminoadenin-9-yl. Modified bases include, but are not limited to, 5-methylcytosine (5-me-C), 5-hydroxymethyl cytosine, xanthine, hypoxanthine, 2-aminoadenine, 6-methyl and other alkyl derivatives of adenine and guanine, 2-propyl and other alkyl derivatives of adenine and guanine, 2-thiouracil, 2-thiothymine and 2-thiocytosine, 5-halouracil and cytosine, 5-propynyl uracil and cytosine, 6-azo uracil, cytosine and thymine, 5-uracil (pseudouracil), 4-thiouracil, 8-halo, 8-amino, 8-thiol, 8-thioalkyl, 8-hydroxyl and other 8-substituted adenines and guanines, 5-halo (such as, for example, 5-bromo), 5-trifluoromethyl and other 5-substituted uracils and cytosines, 7-methylguanine, 7-methyladenine, 8-azaguanine, 8-azaadenine, 7-deazaguanine, 7-deazaadenine, 3-deazaguanine, and 3-deazaadenine.

[0042] Nucleotide analogs can also include modifications of the sugar moiety. Modifications to the sugar moiety include, but are not limited to, natural modifications of the ribose and deoxy ribose as well as synthetic modifications. Sugar modifications include, but are not limited to, the following modifications at the 2′ position: OH; F; O—, S—, or N-alkyl; O—, S—, or N-alkenyl; O—, S— or N-alkynyl; or O-alkyl-O-alkyl, wherein the alkyl, alkenyl, and alkynyl may be substituted or unsubstituted C₁₋₁₀alkyl or C₂₋₁₀alkenyl, and C₂₋₁₀alkynyl. Exemplary 2′ sugar modifications also include, but are not limited to, —O[(CH₂)ₙO]ₘCH₃, —O(CH₂)ₙOCH₃, —O(CH₂)ₙNH₂, —O(CH₂)ₙCH₃, —O(CH₂)ₙ—ONH₂, and —O(CH₂)ₙON[(CH₂)ₙCH₃)]₂, where n and m, independently, are from 1 to about 10. Other modifications at the 2′ position include, but are not limited to, C₁₋₁₀alkyl, substituted lower alkyl, alkaryl, aralkyl, O-alkaryl or O-aralkyl, SH, SCH₃, OCN, Cl, Br, CN, CF₃, OCF₃, SOCH₃, SO₂CH₃, ONO₂, NO₂, N₃, NH₂, heterocycloalkyl, heterocycloalkaryl, aminoalkylamino, polyalkylamino, substituted silyl, an RNA cleaving group, a reporter group, an intercalator, a group for improving the pharmacokinetic properties of an oligonucleotide, or a group for improving the pharmacodynamic properties of an oligonucleotide, and other substituents having similar properties. Similar modifications may also be made at other positions on the sugar, particularly the 3′ position of the sugar on the 3′ terminal nucleotide or in 2′-5′ linked oligonucleotides and the 5′ position of 5′ terminal nucleotide. Modified sugars can also include those that contain modifications at the bridging ring oxygen, such as CH₂ and S. Nucleotide sugar analogs can also have sugar mimetics, such as cyclobutyl moieties in place of the pentofuranosyl sugar.

[0043] Nucleotide analogs can also be modified at the phosphate moiety. Modified phosphate moieties include, but are not limited to, those that can be modified so that the linkage between two nucleotides contains a phosphorothioate, chiral phosphorothioate, phosphorodithioate, phosphotriester, aminoalkylphosphotriester, methyl and other alkyl phosphonates including 3′-alkylene phosphonate and chiral phosphonates, phosphinates, phosphoramidates including 3′-amino phosphoramidate and aminoalkylphosphoramidates, thionophosphoramidates, thionoalkylphosphonates, thionoalkylphosphotriesters, and boranophosphates. These phosphate or modified phosphate linkage between two nucleotides can be through a 3′-5′ linkage or a 2′-5′ linkage, and the linkage can contain inverted polarity such as 3′-5′ to 5′-3′ or 2′-5′ to 5′-2′. Various salts, mixed salts, and free acid forms are also included. Nucleotide substitutes also include peptide nucleic acids (PNAs).

[0044] In some embodiments, the antisense nucleic acid molecules are gapmers, whereby the first one to seven nucleotides at the 5′ and 3′ ends each have 2′-methoxyethyl (2′-MOE) modifications. In some embodiments, the first five nucleotides at the 5′ and 3′ ends each have 2′-MOE modifications. In some embodiments, the first one to seven nucleotides at the 5′ and 3′ ends are RNA nucleotides. In some embodiments, the first five nucleotides at the 5′ and 3′ ends are RNA nucleotides. In some embodiments, each of the backbone linkages between the nucleotides is a phosphorothioate linkage.

[0045] In some embodiments, the siRNA molecules have termini modifications. In some embodiments, the 5′ end of the antisense strand is phosphorylated. In some embodiments, 5′-phosphate analogs that cannot be hydrolyzed, such as 5′-(E)-vinyl-phosphonate are used.

[0046] In some embodiments, the siRNA molecules have backbone modifications. In some embodiments, the modified phosphodiester groups that link consecutive ribose nucleosides have been shown to enhance the stability and in vivo bioavailability of siRNAs The non-ester groups (-OH, =O) of the phosphodiester linkage can be replaced with sulfur, boron, or acetate to give phosphorothioate, boranophosphate, and phosphonoacetate linkages. In addition, substituting the phosphodiester group with a phosphotriester can facilitate cellular uptake of siRNAs and retention on serum components by eliminating their negative charge. In some embodiments, the siRNA molecules have sugar modifications. In some embodiments, the sugars are deprotonated (reaction catalyzed by exo- and endonucleases) whereby the 2′-hydroxyl can act as a nucleophile and attack the adjacent phosphorous in the phosphodiester bond. Such alternatives include 2′-O-methyl, 2′-O-methoxyethyl, and 2′-fluoro modifications.

[0047] In some embodiments, the siRNA molecules have base modifications. In some embodiments, the bases can be substituted with modified bases such as pseudouridine, 5′-methylcytidine, N6-methyladenosine, inosine, and N7-methylguanosine.

[0048] In some embodiments, the siRNA molecules are conjugated to lipids. Lipids can be conjugated to the 5′ or 3′ termini of siRNA to improve their in vivo bioavailability by allowing them to associate with serum lipoproteins. Representative lipids include, but are not limited to, cholesterol and vitamin E, and fatty acids, such as palmitate and tocopherol.

[0049] In some embodiments, a representative siRNA has the following formula:
[0050] Sense: mN*mN*/i2FN/mN/i2FN/mN/i2FN/mN/i2FN/mN/i2FN/mN/i2FN/mN/i2FN/mN/i2FN/*mN*/32FN/
[0051] Antisense: /52FN/*/i2FN/*mN/i2FN/mN/i2FN/mN/i2FN/mN/i2FN/mN/i2FN/mN/i2FN/mN/i2FN/mN/i2FN/mN*N*N
[0052] wherein: “N” is the base; “2F” is a 2′—F modification; “m” is a 2′-O-methyl modification, “I” is an internal base; and “*” is a phosphorothioate backbone linkage.

[0053] In any of the embodiments described herein, the inhibitory nucleic acid molecules may be administered, for example, as one to two hour i.v. infusions or s.c. injections. In any of the embodiments described herein, the inhibitory nucleic acid molecules may be administered at dose levels that range from about 50 mg to about 900 mg, from about 100 mg to about 800 mg, from about 150 mg to about 700 mg, or from about 175 to about 640 mg (2.5 to 9.14 mg/kg; 92.5 to 338 mg/m² - based on an assumption of a body weight of 70 kg and a conversion of mg/kg to mg/m² dose levels based on a mg/kg dose multiplier value of 37 for humans).

[0054] The present disclosure also provides vectors comprising any one or more of the inhibitory nucleic acid molecules. In some embodiments, the vectors comprise any one or more of the inhibitory nucleic acid molecules and a heterologous nucleic acid. The vectors can be viral or nonviral vectors capable of transporting a nucleic acid molecule. In some embodiments, the vector is a plasmid or cosmid (such as, for example, a circular double-stranded DNA into which additional DNA segments can be ligated). In some embodiments, the vector is a viral vector, wherein additional DNA segments can be ligated into the viral genome. Expression vectors include, but are not limited to, plasmids, cosmids, retroviruses, adenoviruses, adeno-associated viruses (AAV), plant viruses such as cauliflower mosaic virus and tobacco mosaic virus, yeast artificial chromosomes (YACs), Epstein-Barr (EBV)-derived episomes, and other expression vectors known in the art.

[0055] The present disclosure also provides compositions comprising any one or more of the inhibitory nucleic acid molecules. In some embodiments, the composition is a pharmaceutical composition. In some embodiments, the compositions comprise a carrier and/or excipient. Examples of carriers include, but are not limited to, poly(lactic acid) (PLA) microspheres, poly(D,L-lactic-coglycolic-acid) (PLGA) microspheres, liposomes, micelles, inverse micelles, lipid cochleates, and lipid microtubules. A carrier may comprise a buffered salt solution such as PBS, HBSS, etc.

[0056] In some embodiments, the ITGA1 inhibitor comprises a nuclease agent that induces one or more nicks or double-strand breaks at a recognition sequence(s) or a DNA-binding protein that binds to a recognition sequence within an ITGA1 genomic nucleic acid molecule. The recognition sequence can be located within a coding region of the ITGA1 gene, or within regulatory regions that influence the expression of the gene. A recognition sequence of the DNA-binding protein or nuclease agent can be located in an intron, an exon, a promoter, an enhancer, a regulatory region, or any non-protein coding region. The recognition sequence can include or be proximate to the start codon of the ITGA1 gene. For example, the recognition sequence can be located about 10, about 20, about 30, about 40, about 50, about 100, about 200, about 300, about 400, about 500, or about 1,000 nucleotides from the start codon. As another example, two or more nuclease agents can be used, each targeting a nuclease recognition sequence including or proximate to the start codon. As another example, two nuclease agents can be used, one targeting a nuclease recognition sequence including or proximate to the start codon, and one targeting a nuclease recognition sequence including or proximate to the stop codon, wherein cleavage by the nuclease agents can result in deletion of the coding region between the two nuclease recognition sequences. Any nuclease agent that induces a nick or double-strand break into a desired recognition sequence can be used in the methods and compositions disclosed herein. Any DNA-binding protein that binds to a desired recognition sequence can be used in the methods and compositions disclosed herein.

[0057] Suitable nuclease agents and DNA-binding proteins for use herein include, but are not limited to, zinc finger protein or zinc finger nuclease (ZFN) pair, Transcription Activator-Like Effector (TALE) protein or Transcription Activator-Like Effector Nuclease (TALEN), or Clustered Regularly Interspersed Short Palindromic Repeats (CRISPR)/CRISPR-associated (Cas) systems. The length of the recognition sequence can vary, and includes, for example, recognition sequences that are about 30-36 bp for a zinc finger protein or ZFN pair, about 15-18 bp for each ZFN, about 36 bp for a TALE protein or TALEN, and about 20 bp for a CRISPR/Cas guide RNA.

[0058] In some embodiments, CRISPR/Cas systems can be used to modify an ITGA1 genomic nucleic acid molecule within a cell. The methods and compositions disclosed herein can employ CRISPR-Cas systems by utilizing CRISPR complexes (comprising a guide RNA (gRNA) complexed with a Cas protein) for site-directed cleavage of ITGA1 nucleic acid molecules.

[0059] Cas proteins generally comprise at least one RNA recognition or binding domain that can interact with gRNAs. Cas proteins can also comprise nuclease domains (such as, for example, DNase or RNase domains), DNA binding domains, helicase domains, protein-protein interaction domains, dimerization domains, and other domains. Suitable Cas proteins include, for example, a wild type Cas9 protein and a wild type Cpf1 protein (such as, for example, FnCpf1). A Cas protein can have full cleavage activity to create a double-strand break in an ITGA1 genomic nucleic acid molecule or it can be a nickase that creates a single-strand break in an ITGA1 genomic nucleic acid molecule. Additional examples of Cas proteins include, but are not limited to, Cas1, Cas1B, Cas2, Cas3, Cas4, Cas5, Cas5e (CasD), Cas6, Cas6e, Cas6f, Cas7, Cas8a1, Cas8a2, Cas8b, Cas8c, Cas9 (Csn1 or Csx12), Cas10, Cas10d, CasF, CasG, CasH, Csy1, Csy2, Csy3, Cse1 (CasA), Cse2 (CasB), Cse3 (CasE), Cse4 (CasC), Csc1, Csc2, Csa5, Csn2, Csm2, Csm3, Csm4, Csm5, Csm6, Cmr1 , Cmr3, Cmr4, Cmr5, Cmr6, Csb1, Csb2, Csb3, Csx17, Csx14, Csx10, Csx16, CsaX, Csx3, Csx1, Csx15, Csf1, Csf2, Csf3, Csf4, and Cu1966, and homologs or modified versions thereof. In some embodiments, a Cas system, such as Cas12a, can have multiple gRNAs encoded into a single crRNA. Cas proteins can also be operably linked to heterologous polypeptides as fusion proteins. For example, a Cas protein can be fused to a cleavage domain, an epigenetic modification domain, a transcriptional activation domain, or a transcriptional repressor domain. Cas proteins can be provided in any form. For example, a Cas protein can be provided in the form of a protein, such as a Cas protein complexed with a gRNA. Alternately, a Cas protein can be provided in the form of a nucleic acid molecule encoding the Cas protein, such as an RNA or DNA.

[0060] In some embodiments, targeted genetic modifications of an ITGA1 genomic nucleic acid molecules can be generated by contacting a cell with a Cas protein and one or more gRNAs that hybridize to one or more gRNA recognition sequences within a target genomic locus in the ITGA1 genomic nucleic acid molecule. For example, a gRNA recognition sequence can be located within a region of SEQ ID NO:1. The gRNA recognition sequence can also include or be proximate to a position corresponding to a variant position. For example, the gRNA recognition sequence can be located from about 1000, from about 500, from about 400, from about 300, from about 200, from about 100, from about 50, from about 45, from about 40, from about 35, from about 30, from about 25, from about 20, from about 15, from about 10, or from about 5 nucleotides of a variant position. The gRNA recognition sequence can include or be proximate to the start codon of an ITGA1 genomic nucleic acid molecule or the stop codon of an ITGA1 genomic nucleic acid molecule. For example, the gRNA recognition sequence can be located from about 10, from about 20, from about 30, from about 40, from about 50, from about 100, from about 200, from about 300, from about 400, from about 500, or from about 1,000 nucleotides of the start codon or the stop codon.

[0061] The gRNA recognition sequences within a target genomic locus in an ITGA1 genomic nucleic acid molecule are located near a Protospacer Adjacent Motif (PAM) sequence, which is a 2-6 base pair DNA sequence immediately following the DNA sequence targeted by the Cas9 nuclease. The canonical PAM is the sequence 5′-NGG-3′ where “N” is any nucleobase followed by two guanine (“G”) nucleobases. gRNAs can transport Cas9 to anywhere in the genome for gene editing, but no editing can occur at any site other than one at which Cas9 recognizes PAM. In addition, 5′-NGA-3′ can be a highly efficient non-canonical PAM for human cells. Generally, the PAM is about 2 to about 6 nucleotides downstream of the DNA sequence targeted by the gRNA. The PAM can flank the gRNA recognition sequence. In some embodiments, the gRNA recognition sequence can be flanked on the 3′ end by the PAM. In some embodiments, the gRNA recognition sequence can be flanked on the 5′ end by the PAM. For example, the cleavage site of Cas proteins can be about 1 to about 10 base pairs, about 2 to about 5 base pairs, or 3 base pairs upstream or downstream of the PAM sequence. In some embodiments (such as when Cas9 from S. pyogenes or a closely related Cas9 is used), the PAM sequence of the non-complementary strand can be 5′-NGG-3′, where N is any DNA nucleotide and is immediately 3′ of the gRNA recognition sequence of the non-complementary strand of the target DNA. As such, the PAM sequence of the complementary strand would be 5′—CCN—3′, where N is any DNA nucleotide and is immediately 5′ of the gRNA recognition sequence of the complementary strand of the target DNA.

[0062] A gRNA is an RNA molecule that binds to a Cas protein and targets the Cas protein to a specific location within an ITGA1 genomic nucleic acid molecule. An exemplary gRNA is a gRNA effective to direct a Cas enzyme to bind to or cleave an ITGA1 genomic nucleic acid molecule, wherein the gRNA comprises a DNA-targeting segment that hybridizes to a gRNA recognition sequence within the ITGA1 genomic nucleic acid molecule that includes or is proximate to a position corresponding to a variant position. For example, a gRNA can be selected such that it hybridizes to a gRNA recognition sequence that is located about 5, about 10, about 15, about 20, about 25, about 30, about 35, about 40, about 45, about 50, about 100, about 200, about 300, about 400, about 500, or about 1,000 nucleotides from a variant position. Other exemplary gRNAs comprise a DNA-targeting segment that hybridizes to a gRNA recognition sequence present within an ITGA1 genomic nucleic acid molecule that includes or is proximate to the start codon or the stop codon. For example, a gRNA can be selected such that it hybridizes to a gRNA recognition sequence that is located about 5, about 10, about 15, about 20, about 25, about 30, about 35, about 40, about 45, about 50, about 100, about 200, about 300, about 400, about 500, or about 1,000 nucleotides of the start codon or located about 5, about 10, about 15, about 20, about 25, about 30, about 35, about 40, about 45, about 50, about 100, about 200, about 300, about 400, about 500, or about 1,000 nucleotides of the stop codon. Suitable gRNAs can comprise from about 17 to about 25 nucleotides, from about 17 to about 23 nucleotides, from about 18 to about 22 nucleotides, or from about 19 to about 21 nucleotides. In some embodiments, the gRNAs can comprise 20 nucleotides.

[0063] Examples of suitable gRNA recognition sequences located within the ITGA1 reference gene are set forth in Table 1 as SEQ ID NOs:12-31.

TABLE 1

Guide RNA Recognition Sequences Near ITGA1 Variation(s)

| Strand | gRNA Recognition Sequence | SEQ ID NO: |
|---|---|---|
| - | TGGCCTGTATGATTGTACCG | 12 |
| - | TGCAACAAGTACCTCTTCGG | 13 |
| + | ACAGCGTATTCCATCAGGTG | 14 |
| + | CACAGCGTATTCCATCAGGT | 15 |
| + | TAAGTATTCTTCCACCGAAG | 16 |
| + | ATTCTTGGCAGCTATAACCG | 17 |
| + | TGTGTAAAGTTGGATCTACC | 18 |
| - | GGTAGATCCAACTTTACACA | 19 |
| + | GAAAACAAAAATGAGCCATG | 20 |
| + | TTCCAACAGTATTTACCCAT | 21 |
| + | AACAACAACTGACATTGACA | 22 |
| + | TAAGCACTCCTTCTACATGT | 23 |
| + | TCGGTACAATCATACAGGCC | 24 |
| - | TTAGTGAATCTAGGGTGACA | 25 |
| + | GAGGCATTCACGGAAGCCCG | 26 |
| - | AATTCACGACTTGAAATGTG | 27 |
| + | AAGAAAAACTGCCATATGGA | 28 |
| - | TAAAATCTGTACCTTGTACA | 29 |
| + | GAGCAGTAGGAGCCTATGAT | 30 |
| + | GTTTGAATATCAAATGAGCC | 31 |

[0064] The Cas protein and the gRNA form a complex, and the Cas protein cleaves the target ITGA1 genomic nucleic acid molecule. The Cas protein can cleave the nucleic acid molecule at a site within or outside of the nucleic acid sequence present in the target ITGA1 genomic nucleic acid molecule to which the DNA-targeting segment of a gRNA will bind. For example, formation of a CRISPR complex (comprising a gRNA hybridized to a gRNA recognition sequence and complexed with a Cas protein) can result in cleavage of one or both strands in or near (such as, for example, within 1, 2, 3, 4, 5, 6, 7, 8, 9, 10, 20, 50, or more base pairs from) the nucleic acid sequence present in the ITGA1 genomic nucleic acid molecule to which a DNA-targeting segment of a gRNA will bind.

[0065] Such methods can result, for example, in an ITGA1 genomic nucleic acid molecule in which a region of SEQ ID NO:1 is disrupted, the start codon is disrupted, the stop codon is disrupted, or the coding sequence is disrupted or deleted. Optionally, the cell can be further contacted with one or more additional gRNAs that hybridize to additional gRNA recognition sequences within the target genomic locus in the ITGA1 genomic nucleic acid molecule. By contacting the cell with one or more additional gRNAs (such as, for example, a second gRNA that hybridizes to a second gRNA recognition sequence), cleavage by the Cas protein can create two or more double-strand breaks or two or more single-strand breaks.

[0066] In some embodiments, the ITGA1 inhibitor comprises a small molecule. In some embodiments, the ITGA1 inhibitor is obtustatin.

[0067] In some embodiments, the methods of treatment further comprise detecting the presence or absence of an ITGA1 variant nucleic acid in a biological sample obtained from the subject.

[0068] The present disclosure also provides methods of treating a subject with a lung disease therapeutic agent. In some embodiments, the subject has a lung disease. In some embodiments, the subject has an increased risk of developing a lung disease. In some embodiments, the methods comprise determining whether the subject has an ITGA1 variant nucleic acid molecule by obtaining or having obtained a biological sample from the subject, and performing or having performed a sequence analysis on the biological sample to determine if the subject has a genotype comprising the ITGA1 variant nucleic acid molecule. When the subject is ITGA1 reference, the lung disease therapeutic agent is administered or continued to be administered to the subject in a standard dosage amount, and an ITGA1 inhibitor is administered to the subject. When the subject is heterozygous for an ITGA1 variant nucleic acid molecule, the lung disease therapeutic agent is administered or continued to be administered to the subject in an amount that is the same as or less than a standard dosage amount, and an ITGA1 inhibitor is administered to the subject. The presence of a genotype having the ITGA1 variant nucleic acid molecule indicates the subject has a decreased risk of developing a lung disease. In some embodiments, the subject is ITGA1 reference. In some embodiments, the subject is heterozygous for the ITGA1 variant nucleic acid molecule.

[0069] For subjects that are genotyped or determined to be either ITGA1 reference or heterozygous for the ITGA1 variant nucleic acid molecule, such subjects can be treated with an ITGA1 inhibitor, as described herein.

[0070] Detecting the presence or absence of an ITGA1 variant nucleic acid molecule in a biological sample from a subject and/or determining whether a subject has an ITGA1 variant nucleic acid molecule can be carried out by any of the methods described herein. In some embodiments, these methods can be carried out in vitro. In some embodiments, these methods can be carried out in situ. In some embodiments, these methods can be carried out in vivo. In any of these embodiments, the ITGA1 variant nucleic acid molecule can be present within a cell obtained from the subject.

[0071] In some embodiments, when the subject is ITGA1 reference, the subject is also administered a lung disease therapeutic agent in a standard dosage amount. In some embodiments, when the subject is heterozygous for an ITGA1 variant nucleic acid molecule, the subject is also administered a lung disease therapeutic agent in a dosage amount that is the same as or less than a standard dosage amount.

[0072] In some embodiments, the treatment methods further comprise detecting the presence or absence of an ITGA1 predicted loss-of-function polypeptide in a biological sample from the subject. In some embodiments, when the subject does not have an ITGA1 predicted loss-of-function polypeptide, the subject is also administered a lung disease therapeutic agent in a standard dosage amount. In some embodiments, when the subject has an ITGA1 predicted loss-of-function polypeptide, the subject is also administered a lung disease therapeutic agent in a dosage amount that is the same as or less than a standard dosage amount.

[0073] The present disclosure also provides methods of treating a subject with a lung disease therapeutic agent. In some embodiments, the subject has a lung disease. In some embodiments, the subject has an increased risk of developing a lung disease. In some embodiments, the method comprises determining whether the subject has an ITGA1 predicted loss-of-function polypeptide by obtaining or having obtained a biological sample from the subject, and performing or having performed an assay on the biological sample to determine if the subject has an ITGA1 predicted loss-of-function polypeptide. When the subject does not have an ITGA1 predicted loss-of-function polypeptide, the lung disease therapeutic agent is administered or continued to be administered to the subject in a standard dosage amount, and an ITGA1 inhibitor is administered to the subject. When the subject has an ITGA1 predicted loss-of-function polypeptide, the lung disease therapeutic agent is administered or continued to be administered to the subject in an amount that is the same as or less than a standard dosage amount, and an ITGA1 inhibitor is administered to the subject. The presence of an ITGA1 predicted loss-of-function polypeptide indicates the subject has a decreased risk of developing a lung disease. In some embodiments, the subject has an ITGA1 predicted loss-of-function polypeptide. In some embodiments, the subject does not have an ITGA1 predicted loss-of-function polypeptide.

[0074] Detecting the presence or absence of an ITGA1 predicted loss-of-function polypeptide in a biological sample from a subject and/or determining whether a subject has an ITGA1 predicted loss-of-function polypeptide can be carried out by any of the methods described herein. In some embodiments, these methods can be carried out in vitro. In some embodiments, these methods can be carried out in situ. In some embodiments, these methods can be carried out in vivo. In any of these embodiments, the ITGA1 predicted loss-of-function polypeptide can be present within a cell obtained from the subject.

[0075] Examples of lung disease therapeutic agents include, but are not limited to: nintedanib, pirfenidone, prednisone, azathioprine, cyclophosphamide, mycophenolate, mofetil, rituximab, tacrolimus, cotrimoxazole, lebrikizumab, nandrolone decanoate, sirolimus, thalidomide, and pomalidomide.

[0076] In some embodiments, the dose of the lung disease therapeutic agents can be reduced by about 10%, by about 20%, by about 30%, by about 40%, by about 50%, by about 60%, by about 70%, by about 80%, or by about 90% for subjects that are heterozygous for an ITGA1 variant nucleic acid molecule (i.e., a less than the standard dosage amount) compared to subjects that are ITGA1 reference (who may receive a standard dosage amount). In some embodiments, the dose of the lung disease therapeutic agent can be reduced by about 10%, by about 20%, by about 30%, by about 40%, or by about 50%. In addition, the dose of lung disease therapeutic agents in subjects that are heterozygous for an ITGA1 variant nucleic acid molecule can be administered less frequently compared to subjects that are ITGA1 reference.

[0077] Administration of the lung disease therapeutic agents and/or ITGA1 inhibitors can be repeated, for example, after one day, two days, three days, five days, one week, two weeks, three weeks, one month, five weeks, six weeks, seven weeks, eight weeks, two months, or three months. The repeated administration can be at the same dose or at a different dose. The administration can be repeated once, twice, three times, four times, five times, six times, seven times, eight times, nine times, ten times, or more. For example, according to certain dosage regimens a subject can receive therapy for a prolonged period of time such as, for example, 6 months, 1 year, or more. In addition, the lung disease therapeutic agents and/or ITGA1 inhibitors can be administered sequentially or at the same time. In addition, the lung disease therapeutic agents and/or ITGA1 inhibitors can be administered in separate compositions or can be administered together in the same composition.

[0078] Administration of the lung disease therapeutic agents and/or ITGA1 inhibitors can occur by any suitable route including, but not limited to, parenteral, intravenous, oral, subcutaneous, intra-arterial, intracranial, intrathecal, intraperitoneal, topical, intranasal, or intramuscular. Pharmaceutical compositions for administration are desirably sterile and substantially isotonic and manufactured under GMP conditions. Pharmaceutical compositions can be provided in unit dosage form (i.e., the dosage for a single administration). Pharmaceutical compositions can be formulated using one or more physiologically and pharmaceutically acceptable carriers, diluents, excipients or auxiliaries. The formulation depends on the route of administration chosen. The term “pharmaceutically acceptable” means that the carrier, diluent, excipient, or auxiliary is compatible with the other ingredients of the formulation and not substantially deleterious to the recipient thereof.

[0079] The terms “treat”, “treating”, and “treatment” and “prevent”, “preventing”, and “prevention” as used herein, refer to eliciting the desired biological response, such as a therapeutic and prophylactic effect, respectively. In some embodiments, a therapeutic effect comprises one or more of a decrease/reduction in a lung disease, a decrease/reduction in the severity of a lung disease (such as, for example, a reduction or inhibition of development of a lung disease), a decrease/reduction in symptoms and lung disease-related effects, delaying the onset of symptoms and lung disease-related effects, reducing the severity of symptoms of lung disease-related effects, reducing the severity of an acute episode, reducing the number of symptoms and lung disease-related effects, reducing the latency of symptoms and lung disease-related effects, an amelioration of symptoms and lung disease-related effects, reducing secondary symptoms, reducing secondary infections, preventing relapse to a lung disease, decreasing the number or frequency of relapse episodes, increasing latency between symptomatic episodes, increasing time to sustained progression, expediting remission, inducing remission, augmenting remission, speeding recovery, or increasing efficacy of or decreasing resistance to alternative therapeutics, and/or an increased survival time of the affected host animal, following administration of the agent or composition comprising the agent. A prophylactic effect may comprise a complete or partial avoidance/inhibition or a delay of a lung disease development/progression (such as, for example, a complete or partial avoidance/inhibition or a delay), and an increased survival time of the affected host animal, following administration of a therapeutic protocol. Treatment of a lung disease encompasses the treatment of subjects already diagnosed as having any form of a lung disease at any clinical stage or manifestation, the delay of the onset or evolution or aggravation or deterioration of the symptoms or signs of a lung disease, and/or preventing and/or reducing the severity of a lung disease.

[0080] The present disclosure also provides methods of identifying a subject having an increased risk of developing a fibrotic lung disease, pulmonary fibrosis, interstitial lung disease, COPD, or asthma. In some embodiments, the methods comprise determining or having determined the presence or absence of an ITGA1 variant nucleic acid molecule (such as a genomic nucleic acid molecule, mRNA molecule, and/or cDNA molecule) in a biological sample obtained from the subject. When the subject lacks an ITGA1 variant nucleic acid molecule (i.e., the subject is genotypically categorized as ITGA1 reference), then the subject has an increased risk of developing a fibrotic lung disease, pulmonary fibrosis, interstitial lung disease, COPD, or asthma. When the subject has an ITGA1 variant nucleic acid molecule (i.e., the subject is heterozygous or homozygous for an ITGA1 variant nucleic acid molecule), then the subject has a decreased risk of developing a fibrotic lung disease, pulmonary fibrosis, interstitial lung disease, COPD, or asthma compared to a subject that is ITGA1 reference.

[0081] Having a single copy of an ITGA1 variant nucleic acid molecule is more protective of a subject from developing a fibrotic lung disease, pulmonary fibrosis, interstitial lung disease, COPD, or asthma than having no copies of an ITGA1 variant nucleic acid molecule. Without intending to be limited to any particular theory or mechanism of action, it is believed that a single copy of an ITGA1 variant nucleic acid molecule (i.e., heterozygous for an ITGA1 variant nucleic acid molecule) is protective of a subject from developing a fibrotic lung disease, pulmonary fibrosis, interstitial lung disease, COPD, or asthma, and it is also believed that having two copies of an ITGA1 variant nucleic acid molecule (i.e., homozygous for an ITGA1 variant nucleic acid molecule) may be more protective of a subject from developing a fibrotic lung disease, pulmonary fibrosis, interstitial lung disease, COPD, or asthma, relative to a subject with a single copy. Thus, in some embodiments, a single copy of an ITGA1 variant nucleic acid molecule may not be completely protective, but instead, may be partially or incompletely protective of a subject from developing a fibrotic lung disease, pulmonary fibrosis, interstitial lung disease, COPD, or asthma. While not desiring to be bound by any particular theory, there may be additional factors or molecules involved in the development of a fibrotic lung disease, pulmonary fibrosis, interstitial lung disease, COPD, or asthma that are still present in a subject having a single copy of an ITGA1 variant nucleic acid molecule, thus resulting in less than complete protection from the development of a fibrotic lung disease, pulmonary fibrosis, interstitial lung disease, COPD, or asthma.

[0082] Detecting the presence or absence of an ITGA1 variant nucleic acid molecule in a biological sample from the subject and/or determining whether a subject has an ITGA1 variant nucleic acid molecule can be carried out by any of the methods described herein. In some embodiments, these methods can be carried out in vitro. In some embodiments, these methods can be carried out in situ. In some embodiments, these methods can be carried out in vivo. In any of these embodiments, the ITGA1 variant nucleic acid molecule can be present within a cell obtained from the subject.

[0083] In some embodiments, when a subject is identified as having an increased risk of developing a fibrotic lung disease, pulmonary fibrosis, interstitial lung disease, COPD, or asthma, the subject is further treated with a lung disease therapeutic agent and/or an ITGA1 inhibitor, as described herein. For example, when the subject is ITGA1 reference, and therefore has an increased risk of developing a fibrotic lung disease, pulmonary fibrosis, interstitial lung disease, COPD, or asthma, the subject is administered an ITGA1 inhibitor. In some embodiments, such a subject is also administered a lung disease therapeutic agent. In some embodiments, when the subject is heterozygous for an ITGA1 variant nucleic acid molecule, the subject is administered the lung disease therapeutic agent in a dosage amount that is the same as or less than a standard dosage amount, and is also administered an ITGA1 inhibitor. In some embodiments, the subject is ITGA1 reference. In some embodiments, the subject is heterozygous for an ITGA1 variant nucleic acid molecule.

[0084] The present disclosure also provides methods of detecting the presence or absence of an ITGA1 variant genomic nucleic acid molecule in a biological sample obtained from a subject, and/or an ITGA1 variant mRNA molecule in a biological sample obtained from a subject, and/or an ITGA1 variant cDNA molecule produced from an mRNA molecule in a biological sample obtained from a subject. It is understood that gene sequences within a population and mRNA molecules encoded by such genes can vary due to polymorphisms such as single-nucleotide polymorphisms. The sequences provided herein for the ITGA1 variant genomic nucleic acid molecule, ITGA1 variant mRNA molecule, and ITGA1 variant cDNA molecule are only exemplary sequences. Other sequences for the ITGA1 variant genomic nucleic acid molecule, variant mRNA molecule, and variant cDNA molecule are also possible.

[0085] The biological sample can be derived from any cell, tissue, or biological fluid from the subject. The biological sample may comprise any clinically relevant tissue such as, for example, a bone marrow sample, a tumor biopsy, a fine needle aspirate, or a sample of bodily fluid, such as blood, gingival crevicular fluid, plasma, serum, lymph, ascitic fluid, cystic fluid, or urine. In some embodiments, the biological sample comprises a buccal swab. The biological sample used in the methods disclosed herein can vary based on the assay format, nature of the detection method, and the tissues, cells, or extracts that are used as the sample. A biological sample can be processed differently depending on the assay being employed. For example, when detecting any ITGA1 variant nucleic acid molecule, preliminary processing designed to isolate or enrich the biological sample for the ITGA1 variant nucleic acid molecule can be employed. A variety of techniques may be used for this purpose. When detecting the level of any ITGA1 variant mRNA molecule, different techniques can be used enrich the biological sample with mRNA molecules. Various methods to detect the presence or level of an mRNA molecule or the presence of a particular variant genomic DNA locus can be used.

[0086] The present disclosure also provides methods of detecting an ITGA1 variant nucleic acid molecule, or the complement thereof, in a subject. The methods comprise assaying a biological sample obtained from the subject to determine whether a nucleic acid molecule in the biological sample is an ITGA1 variant nucleic acid molecule.

[0087] In some embodiments, the ITGA1 variant nucleic acid molecule, or the complement thereof, is a genomic nucleic acid molecule having a nucleotide sequence comprising a nucleotide at a position corresponding to the nucleotide at the variant position of an ITGA1 variant nucleic acid molecule, or the complement thereof. In some embodiments, the ITGA1 variant nucleic acid molecule, is an mRNA molecule having a nucleotide sequence comprising a nucleotide at a position corresponding to the nucleotide at the variant position of an ITGA1 variant nucleic acid molecule, or the complement thereof. In some embodiments, the ITGA1 variant nucleic acid molecule, is a cDNA molecule produced from an mRNA molecule in the biological sample having a nucleotide sequence comprising a nucleotide at a position corresponding to the nucleotide at the variant position of an ITGA1 variant nucleic acid molecule, or the complement thereof.

[0088] In some embodiments, the biological sample comprises a cell or cell lysate. Such methods can further comprise, for example, obtaining a biological sample from the subject comprising an ITGA1 genomic nucleic acid molecule or mRNA molecule, and if mRNA, optionally reverse transcribing the mRNA into cDNA. Such assays can comprise, for example determining the identity of these positions of the particular ITGA1 nucleic acid molecule. In some embodiments, the method is an in vitro method.

[0089] In some embodiments, the determining step, detecting step, or sequence analysis comprises sequencing at least a portion of the nucleotide sequence of the ITGA1 genomic nucleic acid molecule, the ITGA1 mRNA molecule, or the ITGA1 cDNA molecule produced from the mRNA molecule in the biological sample, wherein the sequenced portion comprises one or more variations that cause a loss-of-function (partial or complete) or are predicted to cause a loss-of-function (partial or complete).

[0090] In some embodiments, the determining step, detecting step, or sequence analysis comprises sequencing at least a portion of: i) the nucleotide sequence of the ITGA1 genomic nucleic acid molecule in the biological sample, wherein the sequenced portion comprises a position corresponding to the variant position of an ITGA1 variant nucleic acid molecule, or the complement thereof; ii) the nucleotide sequence of the ITGA1 mRNA molecule in the biological sample, wherein the sequenced portion comprises a position corresponding to the variant position of an ITGA1 variant nucleic acid molecule, or the complement thereof; and/or iii) the nucleotide sequence of the ITGA1 cDNA molecule produced from the mRNA in the biological sample, wherein the sequenced portion comprises a position corresponding to the variant position of an ITGA1 variant nucleic acid molecule, or the complement thereof. When the sequenced portion of the ITGA1 nucleic acid molecule in the biological sample comprises a nucleotide sequence that comprises a nucleotide at a position corresponding to the nucleotide at the variant position of an ITGA1 variant nucleic acid molecule, then the ITGA1 nucleic acid molecule in the biological sample is an ITGA1 variant nucleic acid molecule.

[0091] In some embodiments, the determining step, detecting step, or sequence analysis comprises sequencing at least a portion of the nucleotide sequence of the ITGA1 genomic nucleic acid molecule in the biological sample, wherein the sequenced portion comprises a position corresponding to the variant position of an ITGA1 variant nucleic acid molecule, or the complement thereof. When the sequenced portion of the ITGA1 nucleic acid molecule in the biological sample comprises a nucleotide sequence that comprises a nucleotide at a position corresponding to the nucleotide at the variant position of an ITGA1 variant nucleic acid molecule, then the ITGA1 nucleic acid molecule in the biological sample is an ITGA1 variant genomic nucleic acid molecule.

[0092] In some embodiments, the determining step, detecting step, or sequence analysis comprises sequencing at least a portion of the nucleotide sequence of the ITGA1 mRNA molecule in the biological sample, wherein the sequenced portion comprises a position corresponding to the variant position of an ITGA1 variant nucleic acid molecule, or the complement thereof. When the sequenced portion of the ITGA1 mRNA molecule in the biological sample comprises a nucleotide sequence that comprises a nucleotide at a position corresponding to the nucleotide at the variant position of an ITGA1 variant nucleic acid molecule, then the ITGA1 nucleic acid molecule in the biological sample is an ITGA1 variant mRNA molecule.

[0093] In some embodiments, the determining step, detecting step, or sequence analysis comprises sequencing at least a portion of the nucleotide sequence of the ITGA1 cDNA molecule produced from the mRNA molecule in the biological sample, wherein the sequenced portion comprises a position corresponding to the variant position of an ITGA1 variant nucleic acid molecule, or the complement thereof. When the sequenced portion of the ITGA1 cDNA molecule in the biological sample comprises a nucleotide sequence that comprises a nucleotide at a position corresponding to the nucleotide at the variant position of an ITGA1 variant nucleic acid molecule, then the ITGA1 nucleic acid molecule in the biological sample is an ITGA1 variant cDNA molecule.

[0094] In some embodiments, the determining step, detecting step, or sequence analysis comprises: a) contacting the biological sample with a primer hybridizing to a portion of the nucleotide sequence of the ITGA1: i) genomic nucleic acid molecule, or the complement thereof, that is proximate to a position corresponding to a variant position of an ITGA1 variant nucleic acid molecule, or the complement thereof; ii) mRNA molecule, or the complement thereof, that is proximate to a variant position of an ITGA1 variant nucleic acid molecule, or the complement thereof; and/or iii) cDNA molecule, or the complement thereof, that is proximate to a position corresponding to a variant position of an ITGA1 variant nucleic acid molecule, or the complement thereof; b) extending the primer at least through the position of the nucleotide sequence of the ITGA1: i) genomic nucleic acid molecule, or the complement thereof, corresponding to a variant position of an ITGA1 variant nucleic acid molecule, or the complement thereof; ii) mRNA molecule, or the complement thereof, corresponding to a variant position of an ITGA1 variant nucleic acid molecule, or the complement thereof; and/or iii) cDNA molecule, or the complement thereof, corresponding to a variant position of an ITGA1 variant nucleic acid molecule, or the complement thereof; and c) determining whether the extension product of the primer comprise a nucleotide at a position corresponding to the nucleotide at the variant position of an ITGA1 variant nucleic acid molecule, or the complement thereof.

[0095] In some embodiments, the determining step, detecting step, or sequence analysis comprises: a) contacting the biological sample with a primer hybridizing to a portion of the nucleotide sequence of the ITGA1 genomic nucleic acid molecule, or the complement thereof, that is proximate to a position corresponding to a variant position of an ITGA1 variant nucleic acid molecule, or the complement thereof; b) extending the primer at least through the position of the nucleotide sequence of the ITGA1 genomic nucleic acid molecule, or the complement thereof, corresponding to a variant position of an ITGA1 variant nucleic acid molecule, or the complement thereof; and c) determining whether the extension product of the primer comprises a nucleotide at a position corresponding to the nucleotide at the variant position of an ITGA1 variant nucleic acid molecule, or the complement thereof.

[0096] In some embodiments, the determining step, detecting step, or sequence analysis comprises: a) contacting the biological sample with a primer hybridizing to a portion of the nucleotide sequence of the ITGA1 mRNA molecule, or the complement thereof, that is proximate to a position corresponding to a variant position of an ITGA1 variant nucleic acid molecule, or the complement thereof; b) extending the primer at least through the position of the nucleotide sequence of the ITGA1 mRNA molecule corresponding to a variant position of an ITGA1 variant nucleic acid molecule, or the complement thereof; and c) determining whether the extension product of the primer comprises a nucleotide at a position corresponding to the nucleotide at the variant position of an ITGA1 variant nucleic acid molecule, or the complement thereof.

[0097] In some embodiments, the determining step, detecting step, or sequence analysis comprises: a) contacting the biological sample with a primer hybridizing to a portion of the nucleotide sequence of the ITGA1 cDNA molecule, or the complement thereof, that is proximate to a position corresponding to a variant position of an ITGA1 variant nucleic acid molecule, or the complement thereof; b) extending the primer at least through the position of the nucleotide sequence of the ITGA1 cDNA molecule corresponding to a variant position of an ITGA1 variant nucleic acid molecule, or the complement thereof; and c) determining whether the extension product of the primer comprises a nucleotide at a position corresponding to the nucleotide at the variant position of an ITGA1 variant nucleic acid molecule, or the complement thereof.

[0098] In some embodiments, the entire nucleic acid molecule is sequenced. In some embodiments, only an ITGA1 genomic nucleic acid molecule is analyzed. In some embodiments, only an ITGA1 mRNA is analyzed. In some embodiments, only an ITGA1 cDNA obtained from ITGA1 mRNA is analyzed.

[0099] In some embodiments, the determining step, detecting step, or sequence analysis comprises: a) amplifying at least a portion of the ITGA1 nucleic acid molecule, or the complement thereof, in the biological sample, wherein the amplified portion comprise a nucleotide at a position corresponding to the nucleotide at the variant position of an ITGA1 variant nucleic acid molecule, or the complement thereof; b) labeling the amplified nucleic acid molecule with a detectable label; c) contacting the labeled nucleic acid molecule with a support comprising an alteration-specific probe, wherein the alteration-specific probe comprises a nucleotide sequence which hybridizes under stringent conditions to the nucleic acid sequence of the amplified nucleic acid molecule comprising a nucleotide at a position corresponding to the nucleotide at the variant position of an ITGA1 variant nucleic acid molecule, or the complement thereof.

[0100] In some embodiments, the determining step, detecting step, or sequence analysis comprises: a) amplifying at least a portion of the ITGA1 genomic nucleic acid molecule, or the complement thereof, in the biological sample, wherein the portion comprises a nucleotide at a position corresponding to the nucleotide at the variant position of an ITGA1 variant nucleic acid molecule, or the complement thereof; b) labeling the amplified nucleic acid molecule with a detectable label; c) contacting the labeled nucleic acid molecule with a support comprising an alteration-specific probe, wherein the alteration-specific probe comprises a nucleotide sequence which hybridizes under stringent conditions to the nucleic acid sequence of the amplified nucleic acid molecule comprising a nucleotide at a position corresponding to the nucleotide at the variant position of an ITGA1 variant nucleic acid molecule, or the complement thereof; and d) detecting the detectable label.

[0101] In some embodiments, the determining step, detecting step, or sequence analysis comprises: a) amplifying at least a portion of the ITGA1 mRNA molecule, or the complement thereof, in the biological sample, wherein the portion comprises a nucleotide at a position corresponding to the nucleotide at the variant position of an ITGA1 variant nucleic acid molecule, or the complement thereof; b) labeling the amplified nucleic acid molecule with a detectable label; c) contacting the labeled nucleic acid molecule with a support comprising an alteration-specific probe, wherein the alteration-specific probe comprises a nucleotide sequence which hybridizes under stringent conditions to the nucleic acid sequence of the amplified nucleic acid molecule comprising a nucleotide at a position corresponding to the nucleotide at the variant position of an ITGA1 variant nucleic acid molecule, or the complement thereof; and d) detecting the detectable label.

[0102] In some embodiments, the determining step, detecting step, or sequence analysis comprises: a) amplifying at least a portion of the ITGA1 cDNA molecule, or the complement thereof, in the biological sample, wherein the portion comprises a nucleotide at a position corresponding to the nucleotide at the variant position of an ITGA1 variant nucleic acid molecule, or the complement thereof; b) labeling the amplified nucleic acid molecule with a detectable label; c) contacting the labeled nucleic acid molecule with a support comprising an alteration-specific probe, wherein the alteration-specific probe comprises a nucleotide sequence which hybridizes under stringent conditions to the nucleic acid sequence of the amplified nucleic acid molecule comprising a nucleotide at a position corresponding to the nucleotide at the variant position of an ITGA1 variant nucleic acid molecule, or the complement thereof; and d) detecting the detectable label.

[0103] In some embodiments, the nucleic acid molecule is mRNA and the determining step further comprises reverse-transcribing the mRNA into a cDNA prior to the amplifying step.

[0104] In some embodiments, the determining step, detecting step, or sequence analysis comprises: contacting the ITGA1 nucleic acid molecule, or the complement thereof, in the biological sample with an alteration-specific probe comprising a detectable label, wherein the alteration-specific probe comprises a nucleotide sequence which hybridizes under stringent conditions to the nucleotide sequence of the ITGA1 nucleic acid molecule, or the complement thereof, comprising a nucleotide at a position corresponding to the nucleotide at the variant position of an ITGA1 variant nucleic acid molecule, or the complement thereof; and detecting the detectable label.

[0105] In some embodiments, the determining step, detecting step, or sequence analysis comprises: contacting the ITGA1 genomic nucleic acid molecule, or the complement thereof, in the biological sample with an alteration-specific probe comprising a detectable label, wherein the alteration-specific probe comprises a nucleotide sequence which hybridizes under stringent conditions to the nucleotide sequence of the ITGA1 genomic nucleic acid molecule, or the complement thereof, comprising a nucleotide at a position corresponding to the nucleotide at the variant position of an ITGA1 variant nucleic acid molecule, or the complement thereof; and detecting the detectable label.

[0106] In some embodiments, the determining step, detecting step, or sequence analysis comprises: contacting the ITGA1 mRNA molecule, or the complement thereof, in the biological sample with an alteration-specific probe comprising a detectable label, wherein the alteration-specific probe comprises a nucleotide sequence which hybridizes under stringent conditions to the nucleotide sequence of the ITGA1 mRNA molecule, or the complement thereof, comprising a nucleotide at a position corresponding to the nucleotide at the variant position of an ITGA1 variant nucleic acid molecule, or the complement thereof; and detecting the detectable label.

[0107] In some embodiments, the determining step, detecting step, or sequence analysis comprises: contacting the ITGA1 cDNA molecule, or the complement thereof, produced from an mRNA molecule in the biological sample with an alteration-specific probe comprising a detectable label, wherein the alteration-specific probe comprises a nucleotide sequence which hybridizes under stringent conditions to the nucleotide sequence of the ITGA1 cDNA molecule, or the complement thereof, comprising a nucleotide at a position corresponding to the nucleotide at the variant position of an ITGA1 variant nucleic acid molecule, or the complement thereof; and detecting the detectable label.

[0108] In some embodiments, the ITGA1 nucleic acid molecule is present within a cell obtained from the subject.

[0109] Alteration-specific polymerase chain reaction techniques can be used to detect mutations such as SNPs in a nucleic acid sequence. Alteration-specific primers can be used because the DNA polymerase will not extend when a mismatch with the template is present.

[0110] In some embodiments, the determining step, detecting step, or sequence analysis comprises contacting the biological sample with a primer or probe, such as an alteration-specific primer or alteration-specific probe, that specifically hybridizes to an ITGA1 variant genomic sequence, variant mRNA sequence, or variant cDNA sequence and not the corresponding ITGA1 reference sequence under stringent conditions, and determining whether hybridization has occurred.

[0111] In some embodiments, the assay comprises RNA sequencing (RNA-Seq). In some embodiments, the assays also comprise reverse transcribing mRNA into cDNA, such as by the reverse transcriptase polymerase chain reaction (RT-PCR).

[0112] In some embodiments, the methods utilize probes and primers of sufficient nucleotide length to bind to the target nucleotide sequence and specifically detect and/or identify a polynucleotide comprising an ITGA1 variant genomic nucleic acid molecule, variant mRNA molecule, or variant cDNA molecule. The hybridization conditions or reaction conditions can be determined by the operator to achieve this result. The nucleotide length may be any length that is sufficient for use in a detection method of choice, including any assay described or exemplified herein. Such probes and primers can hybridize specifically to a target nucleotide sequence under high stringency hybridization conditions. Probes and primers may have complete nucleotide sequence identity of contiguous nucleotides within the target nucleotide sequence, although probes differing from the target nucleotide sequence and that retain the ability to specifically detect and/or identify a target nucleotide sequence may be designed by conventional methods. Probes and primers can have about 80%, about 85%, about 90%, about 91%, about 92%, about 93%, about 94%, about 95%, about 96%, about 97%, about 98%, about 99%, or 100% sequence identity or complementarity with the nucleotide sequence of the target nucleic acid molecule.

[0113] In some embodiments, to determine whether an ITGA1 nucleic acid molecule (genomic nucleic acid molecule, mRNA molecule, or cDNA molecule), or complement thereof, within a biological sample comprises a nucleotide sequence comprising a nucleotide at a position corresponding to the nucleotide at the variant position of an ITGA1 variant nucleic acid molecule, the biological sample can be subjected to an amplification method using a primer pair that includes a first primer derived from the 5′ flanking sequence adjacent to a nucleotide at a position corresponding to the nucleotide at the variant position of an ITGA1 variant nucleic acid molecule, and a second primer derived from the 3′ flanking sequence adjacent to a nucleotide at a position corresponding to the nucleotide at the variant position of an ITGA1 variant nucleic acid molecule to produce an amplicon that is indicative of the presence of the SNP at a position corresponding to the variant position of an ITGA1 variant nucleic acid molecule. In some embodiments, the amplicon may range in length from the combined length of the primer pairs plus one nucleotide base pair to any length of amplicon producible by a DNA amplification protocol. This distance can range from one nucleotide base pair up to the limits of the amplification reaction, or about twenty thousand nucleotide base pairs. Optionally, the primer pair flanks a region including a position corresponding to the variant position of an ITGA1 variant nucleic acid molecule and at least 1, 2, 3, 4, 5, 6, 7, 8, 9, 10, or more nucleotides on each side of a position corresponding to the variant position of an ITGA1 variant nucleic acid molecule.

[0114] Similar amplicons can be generated from the mRNA and/or cDNA sequences. PCR primer pairs can be derived from a known sequence, for example, by using computer programs intended for that purpose, such as the PCR primer analysis tool in Vector NTI version 10 (Informax Inc., Bethesda Md.); PrimerSelect (DNASTAR Inc., Madison, Wis.); and Primer3 (Version 0.4.0.COPYRGT., 1991, Whitehead Institute for Biomedical Research, Cambridge, Mass.). Additionally, the sequence can be visually scanned and primers manually identified using known guidelines.

[0115] Illustrative examples of nucleic acid sequencing techniques include, but are not limited to, chain terminator (Sanger) sequencing and dye terminator sequencing. Other methods involve nucleic acid hybridization methods other than sequencing, including using labeled primers or probes directed against purified DNA, amplified DNA, and fixed cell preparations (fluorescence in situ hybridization (FISH)). In some methods, a target nucleic acid molecule may be amplified prior to or simultaneous with detection. Illustrative examples of nucleic acid amplification techniques include, but are not limited to, polymerase chain reaction (PCR), ligase chain reaction (LCR), strand displacement amplification (SDA), and nucleic acid sequence based amplification (NASBA). Other methods include, but are not limited to, ligase chain reaction, strand displacement amplification, and thermophilic SDA (tSDA).

[0116] In hybridization techniques, stringent conditions can be employed such that a probe or primer will specifically hybridize to its target. In some embodiments, a polynucleotide primer or probe under stringent conditions will hybridize to its target sequence to a detectably greater degree than to other non-target sequences, such as, at least 2-fold, at least 3-fold, at least 4-fold, or more over background, including over 10-fold over background. In some embodiments, a polynucleotide primer or probe under stringent conditions will hybridize to its target nucleotide sequence to a detectably greater degree than to other nucleotide sequences by at least 2-fold. In some embodiments, a polynucleotide primer or probe under stringent conditions will hybridize to its target nucleotide sequence to a detectably greater degree than to other nucleotide sequences by at least 3-fold. In some embodiments, a polynucleotide primer or probe under stringent conditions will hybridize to its target nucleotide sequence to a detectably greater degree than to other nucleotide sequences by at least 4-fold. In some embodiments, a polynucleotide primer or probe under stringent conditions will hybridize to its target nucleotide sequence to a detectably greater degree than to other nucleotide sequences by over 10-fold over background. Stringent conditions are sequence-dependent and will be different in different circumstances.

[0117] Appropriate stringency conditions which promote DNA hybridization, for example, 6X sodium chloride/sodium citrate (SSC) at about 45° C., followed by a wash of 2× SSC at 50° C., are known or can be found in Current Protocols in Molecular Biology, John Wiley & Sons, N.Y. (1989), 6.3.1-6.3.6. Typically, stringent conditions for hybridization and detection will be those in which the salt concentration is less than about 1.5 M Na⁺ ion, typically about 0.01 to 1.0 M Na⁺ ion concentration (or other salts) at pH 7.0 to 8.3 and the temperature is at least about 30° C. for short probes (such as, for example, 10 to 50 nucleotides) and at least about 60° C. for longer probes (such as, for example, greater than 50 nucleotides). Stringent conditions may also be achieved with the addition of destabilizing agents such as formamide. Optionally, wash buffers may comprise about 0.1% to about 1% SDS. Duration of hybridization is generally less than about 24 hours, usually about 4 to about 12 hours. The duration of the wash time will be at least a length of time sufficient to reach equilibrium.

[0118] The present disclosure also provides methods of detecting the presence of an ITGA1 predicted loss-of-function polypeptide comprising performing an assay on a biological sample obtained from the subject to determine whether an ITGA1 polypeptide in the biological sample contains one or more variations that causes the polypeptide to have a loss-of-function (partial or complete) or predicted loss-of-function (partial or complete). The ITGA1 predicted loss-of-function polypeptide can be any of the ITGA1 predicted loss-of-function polypeptides described herein.

[0119] In some embodiments, the methods comprise performing an assay on a biological sample obtained from a subject to determine whether an ITGA1 polypeptide in the biological sample comprises an amino acid sequence comprising a variation encoded by any of the ITGA1 variant nucleic acid molecules described herein.

[0120] In some embodiments, the detecting step comprises sequencing at least a portion of the ITGA1 polypeptide that comprises an amino acid sequence comprising a variation encoded by any of the ITGA1 variant nucleic acid molecules described herein

[0121] In some embodiments, the detecting step comprises an immunoassay for detecting the presence of an ITGA1 polypeptide that comprises an amino acid sequence comprising a variation encoded by any of the ITGA1 variant nucleic acid molecules described herein.

[0122] In some embodiments, when the subject does not have an ITGA1 predicted loss-of-function polypeptide, the subject has an increased risk of developing a fibrotic lung disease, pulmonary fibrosis, interstitial lung disease, COPD, or asthma. In some embodiments, when the subject has an ITGA1 predicted loss-of-function polypeptide, the subject has a decreased risk of developing a fibrotic lung disease, pulmonary fibrosis, interstitial lung disease, COPD, or asthma.

[0123] The present disclosure also provides isolated nucleic acid molecules that hybridize to ITGA1 variant genomic nucleic acid molecules, ITGA1 variant mRNA molecules, and/or ITGA1 variant cDNA molecules (such as any of the genomic variant nucleic acid molecules, mRNA variant molecules, and cDNA variant molecules disclosed herein). In some embodiments, such isolated nucleic acid molecules hybridize to ITGA1 variant nucleic acid molecules under stringent conditions. Such nucleic acid molecules can be used, for example, as probes, primers, alteration-specific probes, or alteration-specific primers as described or exemplified herein.

[0124] In some embodiments, the isolated nucleic acid molecules hybridize to a portion of the ITGA1 nucleic acid molecule that comprises a nucleotide at a position corresponding to the nucleotide at the variant position of an ITGA1 variant nucleic acid molecule.

[0125] In some embodiments, such isolated nucleic acid molecules comprise or consist of at least about 5, at least about 8, at least about 10, at least about 11, at least about 12, at least about 13, at least about 14, at least about 15, at least about 16, at least about 17, at least about 18, at least about 19, at least about 20, at least about 21, at least about 22, at least about 23, at least about 24, at least about 25, at least about 30, at least about 35, at least about 40, at least about 45, at least about 50, at least about 55, at least about 60, at least about 65, at least about 70, at least about 75, at least about 80, at least about 85, at least about 90, at least about 95, at least about 100, at least about 200, at least about 300, at least about 400, at least about 500, at least about 600, at least about 700, at least about 800, at least about 900, at least about 1000, at least about 2000, at least about 3000, at least about 4000, or at least about 5000 nucleotides. In some embodiments, such isolated nucleic acid molecules comprise or consist of at least about 5, at least about 8, at least about 10, at least about 11, at least about 12, at least about 13, at least about 14, at least about 15, at least about 16, at least about 17, at least about 18, at least about 19, at least about 20, at least about 21, at least about 22, at least about 23, at least about 24, or at least about 25 nucleotides. In some embodiments, the isolated nucleic acid molecules comprise or consist of at least about 18 nucleotides. In some embodiments, the isolated nucleic acid molecules comprise or consists of at least about 15 nucleotides. In some embodiments, the isolated nucleic acid molecules consist of or comprise from about 10 to about 35, from about 10 to about 30, from about 10 to about 25, from about 12 to about 30, from about 12 to about 28, from about 12 to about 24, from about 15 to about 30, from about 15 to about 25, from about 18 to about 30, from about 18 to about 25, from about 18 to about 24, or from about 18 to about 22 nucleotides. In some embodiments, the isolated nucleic acid molecules consist of or comprise from about 18 to about 30 nucleotides. In some embodiments, the isolated nucleic acid molecules comprise or consist of at least about 15 nucleotides to at least about 35 nucleotides.

[0126] In some embodiments, the isolated nucleic acid molecules hybridize to at least about 15 contiguous nucleotides of a nucleic acid molecule that is at least about 70%, at least about 75%, at least about 80%, at least about 85%, at least about 90%, at least about 95%, at least about 96%, at least about 97%, at least about 98%, at least about 99%, or 100% identical to ITGA1 variant genomic nucleic acid molecules, ITGA1 variant mRNA molecules, and/or ITGA1 variant cDNA molecules. In some embodiments, the isolated nucleic acid molecules consist of or comprise from about 15 to about 100 nucleotides, or from about 15 to about 35 nucleotides. In some embodiments, the isolated nucleic acid molecules consist of or comprise from about 15 to about 100 nucleotides. In some embodiments, the isolated nucleic acid molecules consist of or comprise from about 15 to about 35 nucleotides.

[0127] In some embodiments, the isolated alteration-specific probes or alteration-specific primers comprise at least about 15 nucleotides, wherein the alteration-specific probe or alteration-specific primer comprises a nucleotide sequence which is complementary to the nucleotide sequence of a portion of an ITGA1 variant nucleic acid molecule, or the complement thereof. In some embodiments, the portion comprises a position corresponding to the variant position of an ITGA1 variant nucleic acid molecule, or the complement thereof.

[0128] In some embodiments, the alteration-specific probes and alteration-specific primers comprise DNA. In some embodiments, the alteration-specific probes and alteration-specific primers comprise RNA.

[0129] In some embodiments, the probes and primers described herein (including alteration-specific probes and alteration-specific primers) have a nucleotide sequence that specifically hybridizes to any of the nucleic acid molecules disclosed herein, or the complement thereof. In some embodiments, the probes and primers specifically hybridize to any of the nucleic acid molecules disclosed herein under stringent conditions.

[0130] In some embodiments, the primers, including alteration-specific primers, can be used in second generation sequencing or high throughput sequencing. In some instances, the primers, including alteration-specific primers, can be modified. In particular, the primers can comprise various modifications that are used at different steps of, for example, Massive Parallel Signature Sequencing (MPSS), Polony sequencing, and 454 Pyrosequencing. Modified primers can be used at several steps of the process, including biotinylated primers in the cloning step and fluorescently labeled primers used at the bead loading step and detection step. Polony sequencing is generally performed using a paired-end tags library wherein each molecule of DNA template is about 135 bp in length. Biotinylated primers are used at the bead loading step and emulsion PCR. Fluorescently labeled degenerate nonamer oligonucleotides are used at the detection step. An adaptor can contain a 5′-biotin tag for immobilization of the DNA library onto streptavidin-coated beads.

[0131] The probes and primers described herein can be used to detect a nucleotide variation within any of the ITGA1 variant genomic nucleic acid molecules, ITGA1 variant mRNA molecules, and/or ITGA1 variant cDNA molecules disclosed herein. The primers described herein can be used to amplify the ITGA1 variant genomic nucleic acid molecules, ITGA1 variant mRNA molecules, or ITGA1 variant cDNA molecules, or a fragment thereof.

[0132] The present disclosure also provides pairs of primers comprising any of the primers described above.

[0133] In the context of the present disclosure “specifically hybridizes” means that the probe or primer (such as, for example, the alteration-specific probe or alteration-specific primer) does not hybridize to a nucleic acid sequence encoding an ITGA1 reference genomic nucleic acid molecule, an ITGA1 reference mRNA molecule, and/or an ITGA1 reference cDNA molecule.

[0134] In any of the embodiments described throughout the present disclosure, the probes (such as, for example, an alteration-specific probe) can comprise a label. In some embodiments, the label is a fluorescent label, a radiolabel, or biotin.

[0135] The present disclosure also provides supports comprising a substrate to which any one or more of the probes disclosed herein is attached. Solid supports are solid-state substrates or supports with which molecules, such as any of the probes disclosed herein, can be associated. A form of solid support is an array. Another form of solid support is an array detector. An array detector is a solid support to which multiple different probes have been coupled in an array, grid, or other organized pattern. A form for a solid-state substrate is a microtiter dish, such as a standard 96-well type. In some embodiments, a multiwell glass slide can be employed that normally contains one array per well. In some embodiments, the support is a microarray.

[0136] In some embodiments, any of the methods described herein can further comprise determining the subject’s burden of having an ITGA1 variant nucleic acid molecule, and/or an ITGA1 predicted loss-of-function variant polypeptide associated with a decreased risk of developing a fibrotic lung disease, pulmonary fibrosis, interstitial lung disease, COPD, or asthma. The burden is the aggregate of all variants in the ITGA1 gene, which can be carried out in an association analysis with a lung disease, such as a fibrotic lung disease, pulmonary fibrosis, interstitial lung disease, COPD, or asthma. In some embodiments, the subject is homozygous for one or more ITGA1 variant nucleic acid molecules associated with a decreased risk of developing a fibrotic lung disease, pulmonary fibrosis, interstitial lung disease, COPD, or asthma. In some embodiments, the subject is heterozygous for one or more ITGA1 variant nucleic acid molecules associated with a decreased risk of developing a fibrotic lung disease, pulmonary fibrosis, interstitial lung disease, COPD, or asthma. The result of the association analysis suggests that ITGA1 variant nucleic acid molecules are associated with decreased risk of developing a fibrotic lung disease, pulmonary fibrosis, interstitial lung disease, COPD, or asthma. When the subject has a lower burden, the subject has an increased risk of developing a fibrotic lung disease, pulmonary fibrosis, interstitial lung disease, COPD, or asthma compared to subjects having a higher burden, and the subject is administered or continued to be administered the lung disease therapeutic agent in a standard dosage amount, and/or an ITGA1 inhibitor. When the subject has a higher burden, the subject has a decreased risk of developing a fibrotic lung disease, pulmonary fibrosis, interstitial lung disease, COPD, or asthma compared to subjects having a lower burden and the subject is administered or continued to be administered the lung disease therapeutic agent in an amount that is the same as or less than the standard dosage amount. The higher the burden, the lower the risk of developing a fibrotic lung disease, pulmonary fibrosis, interstitial lung disease, COPD, or asthma. The ITGA1 variant nucleic acid molecule can be any of the ITGA1 variant nucleic acid molecules having any of the variations described herein.

[0137] In some embodiments, the subject’s burden of having any one or more ITGA1 variant nucleic acid molecules represents a weighted aggregate of a plurality of ITGA1 variant nucleic acid molecules. In some embodiments, the burden is calculated using at least about 2, at least about 3, at least about 4, at least about 5, at least about 10, at least about 20, at least about 30, at least about 40, at least about 50, at least about 60, at least about 70, at least about 80, at least about 100, at least about 120, at least about 150, at least about 200, at least about 250, at least about 300, at least about 400, at least about 500, at least about 1,000, at least about 10,000, at least about 100,000, or at least about or more than 1,000,000 genetic variants present in or around (up to 10 Mb) the ITGA1 gene where the genetic burden is the number of alleles multiplied by the association estimate with fibrotic lung disease or related outcome for each allele (e.g., a weighted polygenic burden score). This can include any genetic variants, regardless of their genomic annotation, in proximity to the ITGA1 gene (up to 10 Mb around the gene) that show a non-zero association with fibrotic lung disease-related traits in a genetic association analysis. In some embodiments, when the subject has a burden higher than a desired threshold score, the subject has a decreased risk of developing a fibrotic lung disease, pulmonary fibrosis, interstitial lung disease, COPD, or asthma. In some embodiments, when the subject has a burden lower than a desired threshold score, the subject has an increased risk of developing a fibrotic lung disease, pulmonary fibrosis, interstitial lung disease, COPD, or asthma.

[0138] In some embodiments, the burden may be divided into quintiles, e.g., top quintile, intermediate quintile, and bottom quintile, wherein the top quintile of burden corresponds to the lowest risk group and the bottom quintile of burden corresponds to the highest risk group. In some embodiments, a subject having a greater burden comprises the highest weighted burdens, including, but not limited to the top 10%, top 20%, top 30%, top 40%, or top 50% of burdens from a subject population. In some embodiments, the genetic variants comprise the genetic variants having association with fibrotic lung disease in the top 10%, top 20%, top 30%, top 40%, or top 50% of p-value range for the association. In some embodiments, each of the identified genetic variants comprise the genetic variants having association with a fibrotic lung disease, pulmonary fibrosis, interstitial lung disease, COPD, or asthma with p-value of no more than about 10⁻², about 10⁻³, about 10⁻⁴, about 10⁻⁵, about 10⁻⁶, about 10⁻⁷, about 10⁻⁸, about 10⁻⁹, about 10⁻¹⁰, about 10⁻¹¹, about 10⁻¹², about 10⁻¹³, about 10⁻¹⁴, or about or 10⁻¹⁵. In some embodiments, the identified genetic variants comprise the genetic variants having association with a fibrotic lung disease, pulmonary fibrosis, interstitial lung disease, COPD, or asthma with p-value of less than 5×10⁻⁸. In some embodiments, the identified genetic variants comprise genetic variants having association with a fibrotic lung disease, pulmonary fibrosis, interstitial lung disease, COPD, or asthma in high-risk subjects as compared to the rest of the reference population with odds ratio (OR) about 1.5 or greater, about 1.75 or greater, about 2.0 or greater, or about 2.25 or greater for the top 20% of the distribution; or about 1.5 or greater, about 1.75 or greater, about 2.0 or greater, about 2.25 or greater, about 2.5 or greater, or about 2.75 or greater. In some embodiments, the odds ratio (OR) may range from about 1.0 to about 1.5, from about 1.5 to about 2.0, from about 2.0 to about 2.5, from about 2.5 to about 3.0, from about 3.0 to about 3.5, from about 3.5 to about 4.0, from about 4.0 to about 4.5, from about 4.5 to about 5.0, from about 5.0 to about 5.5, from about 5.5 to about 6.0, from about 6.0 to about 6.5, from about 6.5 to about 7.0, or greater than 7.0. In some embodiments, high-risk subjects comprise subjects having burdens in the bottom decile, quintile, or tertile in a reference population. The threshold of the burden is determined on the basis of the nature of the intended practical application and the risk difference that would be considered meaningful for that practical application.

[0139] In some embodiments, when a subject is identified as having an increased risk of developing a fibrotic lung disease, pulmonary fibrosis, interstitial lung disease, COPD, or asthma, the subject is further administered a lung disease therapeutic agent, and/or an ITGA1 inhibitor, as described herein. For example, when the subject is ITGA1 reference, and therefore has an increased risk of developing a fibrotic lung disease, pulmonary fibrosis, interstitial lung disease, COPD, or asthma, the subject is administered an ITGA1 inhibitor. In some embodiments, such a subject is also administered a lung disease therapeutic agent. In some embodiments, when the subject is heterozygous for an ITGA1 variant nucleic acid molecule, the subject is administered the lung disease therapeutic agent in a dosage amount that is the same as or less than a standard dosage amount, and is also administered an ITGA1 inhibitor. In some embodiments, the subject is ITGA1 reference. In some embodiments, the subject is heterozygous for an ITGA1 variant nucleic acid molecule. Furthermore, when the subject has a lower burden for having an ITGA1 variant nucleic acid molecule, and therefore has an increased risk of developing a fibrotic lung disease, pulmonary fibrosis, interstitial lung disease, COPD, or asthma, the subject is administered a lung disease therapeutic agent. In some embodiments, when the subject has a lower burden for having an ITGA1 variant nucleic acid molecule, the subject is administered the lung disease therapeutic agent in a dosage amount that is the same as or greater than the standard dosage amount administered to a subject who has a greater burden for having an ITGA1 variant nucleic acid molecule.

[0140] The nucleotide sequence of an ITGA1 reference genomic nucleic acid molecule is set forth in SEQ ID NO:1.

[0141] The nucleotide sequence of an ITGA1 reference mRNA molecule is set forth in SEQ ID NO:2. The nucleotide sequence of another ITGA1 reference mRNA molecule is set forth in SEQ ID NO:2. The nucleotide sequence of another ITGA1 reference mRNA molecule is set forth in SEQ ID NO:3. The nucleotide sequence of another ITGA1 reference mRNA molecule is set forth in SEQ ID NO:5.

[0142] The nucleotide sequence of an ITGA1 reference cDNA molecule is set forth in SEQ ID NO:6. The nucleotide sequence of another ITGA1 reference cDNA molecule is set forth in SEQ ID NO:7. The nucleotide sequence of another ITGA1 reference cDNA molecule is set forth in SEQ ID NO:8. The nucleotide sequence of another ITGA1 reference cDNA molecule is set forth in SEQ ID NO:9.

[0143] The genomic nucleic acid molecules, mRNA molecules, and cDNA molecules can be from any organism. For example, the genomic nucleic acid molecules, mRNA molecules, and cDNA molecules can be human or an ortholog from another organism, such as a non-human mammal, a rodent, a mouse, or a rat. It is understood that gene sequences within a population can vary due to polymorphisms such as single-nucleotide polymorphisms. The examples provided herein are only exemplary sequences. Other sequences are also possible.

[0144] Also provided herein are functional polynucleotides that can interact with the disclosed nucleic acid molecules. Examples of functional polynucleotides include, but are not limited to, antisense molecules, aptamers, ribozymes, triplex forming molecules, and external guide sequences. The functional polynucleotides can act as effectors, inhibitors, modulators, and stimulators of a specific activity possessed by a target molecule, or the functional polynucleotides can possess a de novo activity independent of any other molecules.

[0145] The isolated nucleic acid molecules, or the complement thereof, can also be present within a host cell. In some embodiments, the host cell can comprise the vector that comprises any of the nucleic acid molecules described herein, or the complement thereof. In some embodiments, the nucleic acid molecule is operably linked to a promoter active in the host cell. In some embodiments, the promoter is an exogenous promoter. In some embodiments, the promoter is an inducible promoter. In some embodiments, the host cell is a bacterial cell, a yeast cell, an insect cell, or a mammalian cell. In some embodiments, the host cell is a bacterial cell. In some embodiments, the host cell is a yeast cell. In some embodiments, the host cell is an insect cell. In some embodiments, the host cell is a mammalian cell.

[0146] Desired regulatory sequences for mammalian host cell expression can include, for example, viral elements that direct high levels of polypeptide expression in mammalian cells, such as promoters and/or enhancers derived from retroviral LTRs, cytomegalovirus (CMV) (such as, for example, CMV promoter/enhancer), Simian Virus 40 (SV40) (such as, for example, SV40 promoter/enhancer), adenovirus, (such as, for example, the adenovirus major late promoter (AdMLP)), polyoma and strong mammalian promoters such as native immunoglobulin and actin promoters. Methods of expressing polypeptides in bacterial cells or fungal cells (such as, for example, yeast cells) are also well known. A promoter can be, for example, a constitutively active promoter, a conditional promoter, an inducible promoter, a temporally restricted promoter (such as, for example, a developmentally regulated promoter), or a spatially restricted promoter (such as, for example, a cell-specific or tissue-specific promoter).

[0147] Percent identity (or percent complementarity) between particular stretches of nucleotide sequences within nucleic acid molecules or amino acid sequences within polypeptides can be determined routinely using BLAST programs (basic local alignment search tools) and PowerBLAST programs (Altschul et al., J. Mol. Biol., 1990, 215, 403-410; Zhang and Madden, Genome Res., 1997, 7, 649-656) or by using the Gap program (Wisconsin Sequence Analysis Package, Version 8 for Unix, Genetics Computer Group, University Research Park, Madison Wis.), using default settings, which uses the algorithm of Smith and Waterman (Adv. Appl. Math., 1981, 2, 482-489). Herein, if reference is made to percent sequence identity, the higher percentages of sequence identity are preferred over the lower ones.

[0148] As used herein, the phrase “corresponding to” or grammatical variations thereof when used in the context of the numbering of a particular nucleotide or nucleotide sequence or position refers to the numbering of a specified reference sequence when the particular nucleotide or nucleotide sequence is compared to a reference sequence (such as, for example, SEQ ID NO:1, SEQ ID NO:2, or SEQ ID NO:6). In other words, the residue (such as, for example, nucleotide or amino acid) number or residue (such as, for example, nucleotide or amino acid) position of a particular polymer is designated with respect to the reference sequence rather than by the actual numerical position of the residue within the particular nucleotide or nucleotide sequence. For example, a particular nucleotide sequence can be aligned to a reference sequence by introducing gaps to optimize residue matches between the two sequences. In these cases, although the gaps are present, the numbering of the residue in the particular nucleotide or nucleotide sequence is made with respect to the reference sequence to which it has been aligned.

[0149] As described herein, a position within an ITGA1 variant genomic nucleic acid molecule that corresponds to a variant position, for example, can be identified by performing a sequence alignment between the nucleotide sequence of a particular ITGA1 nucleic acid molecule and the nucleotide sequence of the variant nucleic acid molecule. A variety of computational algorithms exist that can be used for performing a sequence alignment to identify a nucleotide position that corresponds to, for example, the variant position of an ITGA1 variant nucleic acid molecule. For example, by using the NCBI BLAST algorithm (Altschul et al., Nucleic Acids Res., 1997, 25, 3389-3402) or CLUSTALW software (Sievers and Higgins, Methods Mol. Biol., 2014, 1079, 105-116) sequence alignments may be performed. However, sequences can also be aligned manually.

[0150] The amino acid sequences of ITGA1 reference polypeptides are set forth in SEQ ID NO:10 (Isoform 1) and SEQ ID NO:11 (Isoform 2). Referring to SEQ ID NO:10 (Isoform 1), the ITGA1 reference polypeptide is 1,179 amino acids in length. Referring to SEQ ID NO:11 (Isoform 2), the ITGA1 reference polypeptide is 1,173 amino acids in length.

[0151] The nucleotide and amino acid sequences listed in the accompanying sequence listing are shown using standard letter abbreviations for nucleotide bases, and three-letter code for amino acids. The nucleotide sequences follow the standard convention of beginning at the 5′ end of the sequence and proceeding forward (i.e., from left to right in each line) to the 3′ end. Only one strand of each nucleotide sequence is shown, but the complementary strand is understood to be included by any reference to the displayed strand. The amino acid sequence follows the standard convention of beginning at the amino terminus of the sequence and proceeding forward (i.e., from left to right in each line) to the carboxy terminus.

[0152] The present disclosure also provides lung disease therapeutic agents for use in the treatment of a fibrotic lung disease, pulmonary fibrosis, interstitial lung disease, COPD, or asthma (or for use in the preparation of a medicament for treating a fibrotic lung disease, pulmonary fibrosis, interstitial lung disease, COPD, or asthma) in a subject, wherein the subject has any of the ITGA1 variant genomic nucleic acid molecules, variant mRNA molecules, and/or variant cDNA molecules described herein. The lung disease therapeutic agents can be any of the lung disease therapeutic agents described herein.

[0153] In some embodiments, the subject is identified as having an ITGA1 variant genomic nucleic acid molecule, wherein the genomic nucleic acid molecule has a nucleotide sequence comprising a nucleotide at a position corresponding to the nucleotide at the variant position of an ITGA1 variant nucleic acid molecule, or the complement thereof.

[0154] In some embodiments, the subject is identified as having an ITGA1 variant mRNA molecule, wherein the mRNA molecule has a nucleotide sequence comprising a nucleotide at a position corresponding to the nucleotide at the variant position of an ITGA1 variant nucleic acid molecule, or the complement thereof.

[0155] In some embodiments, the subject is identified as having an ITGA1 variant cDNA molecule, wherein the cDNA molecule has a nucleotide sequence comprising a nucleotide at a position corresponding to the nucleotide at the variant position of an ITGA1 variant nucleic acid molecule, or the complement thereof.

[0156] In some embodiments, the subject is identified as having: i) an ITGA1 variant genomic nucleic acid molecule having a nucleotide sequence comprising a nucleotide at a position corresponding to the nucleotide at the variant position of an ITGA1 variant nucleic acid molecule, or the complement thereof; ii) an mRNA molecule having a nucleotide sequence comprising a nucleotide at a position corresponding to the nucleotide at the variant position of an ITGA1 variant nucleic acid molecule, or the complement thereof; or iii) a cDNA molecule having a nucleotide sequence comprising a nucleotide at a position corresponding to the nucleotide at the variant position of an ITGA1 variant nucleic acid molecule, or the complement thereof.

[0157] In some embodiments, the subject is identified as having an ITGA1 variant genomic nucleic acid molecule having a nucleotide sequence comprising a nucleotide at a position corresponding to the nucleotide at the variant position of an ITGA1 variant nucleic acid molecule, or the complement thereof.

[0158] In some embodiments, the subject is identified as having an ITGA1 variant mRNA molecule having a nucleotide sequence comprising a nucleotide at a position corresponding to the nucleotide at the variant position of an ITGA1 variant nucleic acid molecule, or the complement thereof.

[0159] In some embodiments, the subject is identified as having an ITGA1 variant cDNA molecule having a nucleotide sequence comprising a nucleotide at a position corresponding to the nucleotide at the variant position of an ITGA1 variant nucleic acid molecule, or the complement thereof.

[0160] In some embodiments, the subject is identified as having an ITGA1 predicted loss-of-function polypeptide that comprises an amino acid sequence comprising a variation encoded by any of the ITGA1 variant nucleic acid molecules described herein.

[0161] The present disclosure also provides ITGA1 inhibitors for use in the treatment of a fibrotic lung disease, pulmonary fibrosis, interstitial lung disease, COPD, or asthma (or for use in the preparation of a medicament for treating a fibrotic lung disease, pulmonary fibrosis, interstitial lung disease, COPD, or asthma) in a subject, wherein the subject is heterozygous for any of the ITGA1 variant genomic nucleic acid molecules, variant mRNA molecules, and/or variant cDNA molecules described herein, or wherein the subject is reference for an ITGA1 genomic nucleic acid molecule, mRNA molecule, or cDNA molecule. The ITGA1 inhibitors can be any of the ITGA1 inhibitors described herein.

[0162] In some embodiments, the subject is reference for an ITGA1 genomic nucleic acid molecule, an ITGA1 mRNA molecule, or an ITGA1 cDNA molecule. In some embodiments, the subject is reference for an ITGA1 genomic nucleic acid molecule. In some embodiments, the subject is reference for an ITGA1 mRNA molecule. In some embodiments, the subject is reference for an ITGA1 cDNA molecule.

[0163] In some embodiments, the subject is identified as being heterozygous for an ITGA1 variant genomic nucleic acid molecule, wherein the genomic nucleic acid molecule has a nucleotide sequence comprising a nucleotide at a position corresponding to the nucleotide at the variant position of an ITGA1 variant nucleic acid molecule, or the complement thereof.

[0164] In some embodiments, the subject is identified as being heterozygous for an ITGA1 variant mRNA molecule, wherein the mRNA molecule has a nucleotide sequence comprising a nucleotide at a position corresponding to the nucleotide at the variant position of an ITGA1 variant nucleic acid molecule, or the complement thereof.

[0165] In some embodiments, the subject is identified as being heterozygous for an ITGA1 variant cDNA molecule, wherein the cDNA molecule has a nucleotide sequence comprising a nucleotide at a position corresponding to the nucleotide at the variant position of an ITGA1 variant nucleic acid molecule, or the complement thereof.

[0166] In some embodiments, the subject is identified as being heterozygous for: i) an ITGA1 variant genomic nucleic acid molecule having a nucleotide sequence comprising a nucleotide at a position corresponding to the nucleotide at the variant position of an ITGA1 variant nucleic acid molecule, or the complement thereof; ii) an ITGA1 variant mRNA molecule having a nucleotide sequence comprising a nucleotide at a position corresponding to the nucleotide at the variant position of an ITGA1 variant nucleic acid molecule, or the complement thereof; or iii) an ITGA1 variant cDNA molecule having a nucleotide sequence comprising a nucleotide at a position corresponding to the nucleotide at the variant position of an ITGA1 variant nucleic acid molecule, or the complement thereof.

[0167] In some embodiments, the subject is identified as being heterozygous for an ITGA1 variant genomic nucleic acid molecule having a nucleotide sequence comprising a nucleotide at a position corresponding to the nucleotide at the variant position of an ITGA1 variant nucleic acid molecule, or the complement thereof.

[0168] In some embodiments, the subject is identified as being heterozygous for an ITGA1 variant mRNA molecule having a nucleotide sequence comprising a nucleotide at a position corresponding to the nucleotide at the variant position of an ITGA1 variant nucleic acid molecule, or the complement thereof.

[0169] In some embodiments, the subject is identified as being heterozygous for an ITGA1 variant cDNA molecule having a nucleotide sequence comprising a nucleotide at a position corresponding to the nucleotide at the variant position of an ITGA1 variant nucleic acid molecule, or the complement thereof.

[0170] All patent documents, websites, other publications, accession numbers and the like cited above or below are incorporated by reference in their entirety for all purposes to the same extent as if each individual item were specifically and individually indicated to be so incorporated by reference. If different versions of a sequence are associated with an accession number at different times, the version associated with the accession number at the effective filing date of this application is meant. The effective filing date means the earlier of the actual filing date or filing date of a priority application referring to the accession number if applicable. Likewise, if different versions of a publication, website or the like are published at different times, the version most recently published at the effective filing date of the application is meant unless otherwise indicated. Any feature, step, element, embodiment, or aspect of the present disclosure can be used in combination with any other feature, step, element, embodiment, or aspect unless specifically indicated otherwise. Although the present disclosure has been described in some detail by way of illustration and example for purposes of clarity and understanding, it will be apparent that certain changes and modifications may be practiced within the scope of the appended claims.

[0171] The following examples are provided to describe the embodiments in greater detail. They are intended to illustrate, not to limit, the claimed embodiments. The following examples provide those of ordinary skill in the art with a disclosure and description of how the compounds, compositions, articles, devices and/or methods described herein are made and evaluated, and are intended to be purely exemplary and are not intended to limit the scope of any claims. Efforts have been made to ensure accuracy with respect to numbers (such as, for example, amounts, temperature, etc.), but some errors and deviations may be accounted for. Unless indicated otherwise, parts are parts by weight, temperature is in °C or is at ambient temperature, and pressure is at or near atmospheric.

### EXAMPLES

### Example 1: Association Between Loss-of-Function Variants in ITGA1 and Improved Lung Function

[0172] The association between common and rare variants and three lung function traits was examined: forced expiratory volume in 1 second (FEV1), forced vital capacity (FVC), and the ratio FEV1/FVC, which is a measurement of airway obstruction. An association between rare (minor allele frequency <1%) predicted loss-of-function variants in ITGA1 and improved lung function (greater FEV1/FVC ratio; FIG. 1) was identified. Nominal associations trending toward protection from asthma and COPD was also observed, suggesting loss of ITGA1 improves lung function and may be protective in asthma/COPD or other fibrotic lung diseases (FIG. 2).

[0173] Various modifications of the described subject matter, in addition to those described herein, will be apparent to those skilled in the art from the foregoing description. Such modifications are also intended to fall within the scope of the appended claims. Each reference (including, but not limited to, journal articles, U.S. and non-U.S. patents, patent application publications, international patent application publications, gene bank accession numbers, and the like) cited in the present application is incorporated herein by reference in its entirety and for all purposes.

1. A method of treating a subject having a fibrotic lung disease or at risk of developing a fibrotic lung disease, having pulmonary fibrosis or at risk of developing pulmonary fibrosis, having interstitial lung disease or at risk of developing interstitial lung disease, having chronic obstructive pulmonary disease (COPD) or at risk of developing COPD, and/or having asthma or at risk of developing asthma, the method comprising administering an Integrin Subunit Alpha 1 (ITGA1) inhibitor to the subject.

2-5. (canceled)

6. The method according to claim 1, wherein the ITGA1 inhibitor comprises an inhibitory nucleic acid molecule.

7. The method according to claim 6, wherein the inhibitory nucleic acid molecule comprises an antisense nucleic acid molecule, a small interfering RNA (siRNA), or a short hairpin RNA (shRNA) that hybridizes to an ITGA1 nucleic acid molecule.

8-14. (canceled)

15. The method according to claim 1, further comprising detecting the presence or absence of an ITGA1 variant nucleic acid molecule in a biological sample obtained from the subject.

16. The method according to claim 15, further comprising administering a lung disease therapeutic agent in a standard dosage amount to a subject wherein the ITGA1 variant nucleic acid molecule is absent from the biological sample.

17. The method according to claim 15, further comprising administering a lung disease therapeutic agent in a dosage amount that is the same as or less than a standard dosage amount to a subject that is heterozygous for the ITGA1 variant nucleic acid molecule.

18. The method according to claim 15, wherein the ITGA1 variant nucleic acid molecule is chosen from 5:52920430:C:T, 5:52944942:G:T, 5:52910243:G:T, 5:52918899:G:C, 5:52918730:A:T, 5:52952404:CA:C, 5:52861561:T:C, 5:52939693:T:C, 5:52910201:C:T, 5:52788416:T:C, 5:52788356:G:A, 5:52893783:G:T, 5:52920332:AT:A, 5:52952436:GA:G, 5:52939945:G:T, 5:52925371:C:T, 5:52939690:TG:T, 5:52898385:T:C, 5:52897529:GT:G, 5:52937490:C:G, 5:52947412:CT:C, 5:52882022:G:T, 5:52939946:T:A, 5:52861503:A:AT, 5:52881929:T:G, 5:52932134:C:A, 5:52939933:AC:A, 5:52933993:C:G, 5:52927645:TCCTG:T, 5:52939934:CT:C, 5:52893841:G:C, 5:52881939:G:T, 5:52932134:C:G, 5:52864814:GA:G, 5:52849381:C:A, 5:52922818:CT:C, 5:52925286:TG:T, 5:52865083:G:A, 5:52939606:C:CAT, 5:52915509:C:CGTGGTGA, 5:52865083:G:T, 5:52944999:ATC:A, 5:52910194:TA:T, 5:52947462:G:A, 5:52898323:C:T, 5:52945006:GT:G, 5:52910292:CT:C, 5:52861560:G:A, 5:52939642:G:GA, 5:52864979:GC:G, 5:52927590:CA:C, 5:52918814:G:T, 5:52788351:G:GC, 5:52920469:G:A, 5:52905808:A:AT, 5:52922876:GT:G, 5:52861501:C:CT, 5:52865771:T:A, 5:52947456:TGG:T, 5:52918736:C:T, 5:52920376:C:T, 5:52915496:G:GA, 5:52898346:GTC:G, 5:52947462:G:T, 5:52920444:C:A, 5:52882022:G:A, 5:52927640:TC:T, 5:52925470:G:GT, 5:52952430:GA:G, 5:52937516:T:C, 5:52915570:G:GC, 5:52861530:C:A, 5:52932046:G:A, 5:52893841:G:T, 5:52887965:TGTAA:T, 5:52937399:AG:A, 5:52887863:AG:A, 5:52905910:T:A, 5:52925304:TA:T, 5:52910222:C:T, 5:52887906:C:T, 5:52910199:AG:A, 5:52909042:G:A, 5:52898269:TA:T, 5:52939588:A:C, 5:52937515:G:GT, 5:52865745:C:A, 5:52937474:GT:G, 5:52925299:G:T, 5:52920367:CA:C, 5:52898296:CAG:C, 5:52925283:CT:C, 5:52893817:GAGAA:G, 5:52915565:TG:T, 5:52933892:A:T, 5:52915524:G:T, 5:52887846:C:T, 5:52937515:G:A, 5:52929670:GA:G, 5:52915463:G:A, 5:52905900:G:T, 5:52865688:AG:A, 5:52933993:C:A, 5:52932137:G:A, 5:52788355:T:C, 5:52897529:G:A, 5:52947344:G:A, 5:52910417:CAAGT:C, 5:52864772:C:A, 5:52939677:C:T, 5:52918807:C:A, 5:52915502:TTTTGG:T, 5:52893693:C:T, 5:52939855:A:T, 5:52925489:T:C, 5:52939673:C:CA, 5:52887966:G:T, 5:52918877:GA:G, and 5:52947463:T:C.

19. The method according to claim 15, wherein the detecting step is carried out in vitro.

20. The method according to claim 15, wherein the detecting step comprises sequencing at least a portion of the nucleotide sequence of the ITGA1 genomic nucleic acid molecule, or the complement thereof, in the biological sample, wherein the sequenced portion comprises a position corresponding to the variant position of an ITGA1 variant nucleic acid molecule, or the complement thereof;
wherein when the sequenced portion of the ITGA1 genomic nucleic acid molecule in the biological sample comprises a nucleotide sequence that comprises a nucleotide at a position corresponding to the nucleotide at the variant position of an ITGA1 variant nucleic acid molecule, then the ITGA1 genomic nucleic acid molecule in the biological sample is an ITGA1 variant genomic nucleic acid molecule.

21. The method according to claim 15, wherein the detecting step comprises sequencing at least a portion of the nucleotide sequence of the ITGA1 mRNA molecule in the biological sample, wherein the sequenced portion comprises a position corresponding to the variant position of an ITGA1 variant nucleic acid molecule, or the complement thereof;
wherein when the sequenced portion of the ITGA1 mRNA molecule in the biological sample comprises a nucleotide sequence that comprises a nucleotide at a position corresponding to the nucleotide at the variant position of an ITGA1 variant nucleic acid molecule, then the ITGA1 mRNA molecule in the biological sample is an ITGA1 variant mRNA molecule.

22-33. (canceled)

34. A method of treating a subject with a lung disease therapeutic agent, wherein the subject has a fibrotic lung disease, pulmonary fibrosis, interstitial lung disease, chronic obstructive pulmonary disease (COPD), or asthma, or wherein the subject is at risk of developing a fibrotic lung disease, pulmonary fibrosis, interstitial lung disease, COPD, or asthma, the method comprising:
determining whether the subject has an Integrin Subunit Alpha 1 (ITGA1) variant nucleic acid molecule by:
obtaining or having obtained a biological sample from the subject; and
performing or having performed a sequence analysis on the biological sample to determine if the subject has a genotype comprising the ITGA1 variant nucleic acid molecule; and
administering or continuing to administer the lung disease therapeutic agent in a standard dosage amount to a subject that is ITGA1 reference, and/or administering an ITGA1 inhibitor to the subject; and
administering or continuing to administer the lung disease therapeutic agent in an amount that is the same as or less than a standard dosage amount to a subject that is heterozygous for the ITGA1 variant nucleic acid molecule, and/or administering an ITGA1 inhibitor to the subj ect;
wherein the presence of a genotype having the ITGA1 variant nucleic acid molecule indicates the subject has a reduced risk of developing the fibrotic lung disease, pulmonary fibrosis, interstitial lung disease, COPD, or asthma.

35. The method according to claim 34, wherein the subject is ITGA1 reference, and the subject is administered or continued to be administered the lung disease therapeutic agent in a standard dosage amount, and is administered an ITGA1 inhibitor.

36. The method according to claim 34, wherein the subject is heterozygous for an ITGA1 variant nucleic acid molecule, and the subject is administered or continued to be administered the lung disease therapeutic agent in an amount that is the same as or less than a standard dosage amount, and is administered an ITGA1 inhibitor.

37. The method according to claim 34, wherein the ITGA1 variant nucleic acid molecule is chosen from 5:52920430:C:T, 5:52944942:G:T, 5:52910243:G:T, 5:52918899:G:C, 5:52918730:A:T, 5:52952404:CA:C, 5:52861561:T:C, 5:52939693:T:C, 5:52910201:C:T, 5:52788416:T:C, 5:52788356:G:A, 5:52893783:G:T, 5:52920332:AT:A, 5:52952436:GA:G, 5:52939945:G:T, 5:52925371:C:T, 5:52939690:TG:T, 5:52898385:T:C, 5:52897529:GT:G, 5:52937490:C:G, 5:52947412:CT:C, 5:52882022:G:T, 5:52939946:T:A, 5:52861503:A:AT, 5:52881929:T:G, 5:52932134:C:A, 5:52939933:AC:A, 5:52933993:C:G, 5:52927645:TCCTG:T, 5:52939934:CT:C, 5:52893841:G:C, 5:52881939:G:T, 5:52932134:C:G, 5:52864814:GA:G, 5:52849381:C:A, 5:52922818:CT:C, 5:52925286:TG:T, 5:52865083:G:A, 5:52939606:C:CAT, 5:52915509:C:CGTGGTGA, 5:52865083:G:T, 5:52944999:ATC:A, 5:52910194:TA:T, 5:52947462:G:A, 5:52898323:C:T, 5:52945006:GT:G, 5:52910292:CT:C, 5:52861560:G:A, 5:52939642:G:GA, 5:52864979:GC:G, 5:52927590:CA:C, 5:52918814:G:T, 5:52788351:G:GC, 5:52920469:G:A, 5:52905808:A:AT, 5:52922876:GT:G, 5:52861501:C:CT, 5:52865771:T:A, 5:52947456:TGG:T, 5:52918736:C:T, 5:52920376:C:T, 5:52915496:G:GA, 5:52898346:GTC:G, 5:52947462:G:T, 5:52920444:C:A, 5:52882022:G:A, 5:52927640:TC:T, 5:52925470:G:GT, 5:52952430:GA:G, 5:52937516:T:C, 5:52915570:G:GC, 5:52861530:C:A, 5:52932046:G:A, 5:52893841:G:T, 5:52887965:TGTAA:T, 5:52937399:AG:A, 5:52887863:AG:A, 5:52905910:T:A, 5:52925304:TA:T, 5:52910222:C:T, 5:52887906:C:T, 5:52910199:AG:A, 5:52909042:G:A, 5:52898269:TA:T, 5:52939588:A:C, 5:52937515:G:GT, 5:52865745:C:A, 5:52937474:GT:G, 5:52925299:G:T, 5:52920367:CA:C, 5:52898296:CAG:C, 5:52925283:CT:C, 5:52893817:GAGAA:G, 5:52915565:TG:T, 5:52933892:A:T, 5:52915524:G:T, 5:52887846:C:T, 5:52937515:G:A, 5:52929670:GA:G, 5:52915463:G:A, 5:52905900:G:T, 5:52865688:AG:A, 5:52933993:C:A, 5:52932137:G:A, 5:52788355:T:C, 5:52897529:G:A, 5:52947344:G:A, 5:52910417:CAAGT:C, 5:52864772:C:A, 5:52939677:C:T, 5:52918807:C:A, 5:52915502:TTTTGG:T, 5:52893693:C:T, 5:52939855:A:T, 5:52925489:T:C, 5:52939673:C:CA, 5:52887966:G:T, 5:52918877:GA:G, and 5:52947463:T:C.

38. The method according to claim 34, wherein the sequence analysis comprises sequencing at least a portion of the nucleotide sequence of the ITGA1 genomic nucleic acid molecule, or the complement thereof, in the biological sample, wherein the sequenced portion comprises a position corresponding to the variant position of an ITGA1 variant nucleic acid molecule, or the complement thereof;
wherein when the sequenced portion of the ITGA1 genomic nucleic acid molecule, or the complement thereof, in the biological sample comprises a nucleotide sequence that comprises a nucleotide at a position corresponding to the nucleotide at the variant position of an ITGA1 variant nucleic acid molecule, then the ITGA1 genomic nucleic acid molecule in the biological sample is an ITGA1 variant genomic nucleic acid molecule.

39. The method according to claim 34, wherein the sequence analysis comprises sequencing at least a portion of the nucleotide sequence of the ITGA1 mRNA molecule, or the complement thereof, in the biological sample, wherein the sequenced portion comprises a position corresponding to the variant position of an ITGA1 variant nucleic acid molecule, or the complement thereof;
wherein when the sequenced portion of the ITGA1 mRNA molecule in the biological sample comprises a nucleotide sequence that comprises a nucleotide at a position corresponding to the nucleotide at the variant position of an ITGA1 variant nucleic acid molecule, then the ITGA1 mRNA molecule in the biological sample is an ITGA1 variant mRNA molecule.

40. The method according to claim 34, wherein the sequence analysis comprises sequencing at least a portion of the nucleotide sequence of the ITGA1 cDNA molecule, or the complement thereof, in the biological sample, wherein the sequenced portion comprises a position corresponding to the variant position of an ITGA1 variant nucleic acid molecule, or the complement thereof;
wherein when the sequenced portion of the ITGA1 cDNA molecule in the biological sample comprises a nucleotide sequence that comprises a nucleotide at a position corresponding to the nucleotide at the variant position of an ITGA1 variant nucleic acid molecule, then the ITGA1 cDNA molecule in the biological sample is an ITGA1 variant cDNA molecule.

41. The method according to claim 34, wherein the sequence analysis comprises:
a) contacting the biological sample with a primer hybridizing to a portion of the nucleotide sequence of the ITGA1 genomic nucleic acid molecule, or the complement thereof, that is proximate to a position corresponding to a variant position of an ITGA1 variant nucleic acid molecule;
b) extending the primer at least through the position of the nucleotide sequence of the ITGA1 genomic nucleic acid molecule, or the complement thereof, corresponding to the variant position of an ITGA1 variant nucleic acid molecule; and
c) determining whether the extension product of the primer comprises a nucleotide at a position corresponding to the nucleotide at the variant position of an ITGA1 variant nucleic acid molecule.

42-52. (canceled)

53. The method according to claim 34, wherein the ITGA1 inhibitor comprises an inhibitory nucleic acid molecule.

54. The method according to claim 53, wherein the inhibitory nucleic acid molecule comprises an antisense nucleic acid molecule, a small interfering RNA (siRNA), or a short hairpin RNA (shRNA) that hybridizes to an ITGA1 nucleic acid molecule.

55-91. (canceled)

The application's sequence listing, which the Patent Office published only in electronic form, follows.

SEQUENCE LISTING (69677 sequences)

SEQ ID NO: 1 - DNA, 171294 bp, Homo sapiens
  source 1..171294: mol_type = genomic DNA
acccgccttcctaccaccttaggggatttggcccggagaacgagatcaccctctcaatgaaaggcagatgtccctttaaggtttgcttctacagcccgtggactttagcctaaacacggacccgcgaagctggctttatttgtccatgtctcggacagagcctgggaagctgccagtgagatttcagagaccaagagcgcgaaggggcgggcgatgtggcaatccgtctgggatgtgaaaagcgtggagcgcatttagaggaattcgacgaaaacacaggaaatcactcctctcccgctcctgggcgccgctgccactggggcagaggactgggaaccgcggcagcgggataagtggcccagccagagagcgcagctcccgcgcccggtcctgccctgcgaaccagcgcggccccctggcgctgaggctgctccggccatggcccctcggccccgcgcccgcccaggggtcgctgtcgcctgctgctggctcctcactggtgagcgactcgcttttctctgagcatctcctgctcgcgggcttggggcttggagcggggagggaggtcctcagagccatgggccagataggaagagagagcgcccatccactttcgggcattccaggtactcaggccaggctacggggcaggcaggagtttcgcgttctggttttgatatgaattagttttcgtgtctctccaaagtccttcaccctaggagtaggagtgaggcagcactgaaaaccttagaaggtagaattcacttttaaaattaaagttgtttttacaatacacattgtatattaggactttgctgaatatttcctcccctccacccttttttatggcatgggatgggagggtgatgcttatagggcgcctgatacatatgcaaaattcctaccctcgggttgttccagagtggacattattgaattttcttgctgtctactatttaggcttttttcccatgcagaacaagaaaaggcagggatgcaagacgaaactgccacttgttccaaaatgatgtttctatgtcagcacccaagaggagggatattttgaaacgtagaaaggaatggtgaacattttctctgtaaatatcacagggcagtctacttttaagatgcaaaatatagtattgttatttgtacataaatgtgtatttttaaggaggggacttaaaaacatagtggaaatgcaaagttgtatccaatttagaaaaagcttgaaatatagcattttgtaagattttcccaataatgaactcatggtcagatcttttttaccagttactgattggggtgggggaaagttgaaatggtgaaaaatggaagaaggtggggggaaagtgtatcgatagaatctctgtgtgaaagaaaatcaccttattaatgggttaattaacagctggctttaacatatcattgatattcaattgttcagtgtttttactgctggcatggttattagtactagttaatttagcatttttaccactaaaaacagggtagagccagctagtttagacctgccttagatggccaagcattgttaagttttatgaagatgatttagaagttgattatcagcaagcagagcttttttcagaagggaggtaatgtaaagagagttaataattagctactggcttttcatccaaacatttcccactactcaggaaatgtccaataatccaaacagtggtaactgctgaacagcattatagccggtgagtggtttaacttaccagctactgccactactttttacacatatttgacctatgattcttctccaactcaaatttttttagattgtattttgttgtttttgtgcaaaatctgaatacagtagtttactatccaagttgtactttttcattctaccaaataagcagtctctagagtagaaatgatgaaatgaggtttgcgtatcctctaaaaagacaagagtgaaacttgaagtaacagagaagtttaacaagttacaatttcatatatatgttggtgaaatatacattggtgaatccaggaagagacttaaaatatttagaaaccttgtgtgcactatatttatgcccatttcgcaacacatgagggatctgaaattggactgctttcccatcagtcattatattctgtaggctcttctttagcaatctctttcagatttggaaacttctcatcaattcagagtccgtttgtaacctggggactcatcaccatacttatccatgcacactactgtagagcttatctttctgtcttcaatttgaacccaacttccagtctaccctcctaatacatcatttttactatatctgtttttagtcaaaaatctttggtggttctttgttgcctttaagataaaatccaaaattctcaactgactgccctaatccaacaccctctctctatctcctactactcctatgtcagtttcttattgctgttgtaacaacttgccatagatcaccagcttaaaacaacataaatttactattgtacagttctgtaggtcagaagtatcactgggctagaatcaagatgtcaccagggctgcatttcttctggaggttctaggggaaaatcagtttccctgttttcaccagcctctggccaccacctgcattcttggcctgtggcccctttctccatcttcaaccgagcagggtagaatcttcagatcttcccccatgactctgctttatcatcacatctccttctcagactctgaccctactaccttcctaaggatccttgtaattacaatgtgcctaccagaataatctcctcatctcaagatctttaatttaattacatcttccaagtcccttttaccatctaagataacatattcacaggttccaggcattaggtcatggatatctttgggagaccattattctgcctaccacaacccataagcataaactgtccattatagccaatcacttttctttactttctccataatcctcatgttcattttgccactgaagatatgaccttgttttatacatcgagaaaagaattccacctttccatcctaccaccctctgacatctaaataaactctctacagccttccaaactgggtttacatcagaacaacaagccaccagcatcccaataaacttcctatttgatttagactgtcttatattagctccttacaacgtttactaaaatgattcatcaaaaagatgtccttatgtccaaaggattgttattttatgtatgtcaaagtctcagcataaactgatgtcacatataaaggatttaactgaagacagtttcataaagtgacagtttagagaggccttaaaggaacaagaaaagagggtggagcatctagcgcaagcaacagtagggaaaaaagaacctgaagcaaggtgagaagaaaaaccatgaccattcctaggcctgaggaggtggcagtgttagtttgattatgaactctagttatgggagggtggccattagactggagttgtggtcataaaaaggaatgcagctagtgacaaaattgaagcccagcagagaaggagtaaggaaaataaatatacctcctttcctcccaccctctgatgtcttgctcagccttcccattggccatccccaaatggcaagatccaaccttccagagaacaaagggcaagacaatcaataacagaatagctagcacaacttaaccccgaaatgtattatgtgcaaggcactgtgccaagggctttgcatgtattatttcattttaatctaaaaaattaagtttactaattgatcacaagcagtcacagatttctttgttcttttttcactccctcagcttgttgattagccttgaaaaaaagaaaagaaaaaattaaaactttataactattatcaatattttagagatgaggaaatcaaaatatagtattaagaagttaatttcatttgtccaaagttgaagaactaatgacaaatctactcaattcatatctctgacctcaaattaaatgctctaaaataatatgctatattggctgcctaaagataagttcattctctcttgctcactcctctaaatgtgaaatccaaacatagttgtctaaaatacttggataaagacctaattaatgatacaagtcaatcttttatttccatgatttttaggtgtacagcattaagtgtaactcaagtaagactactatttctcgttattaagaatataaatatagaattagccctaattaaactatatgtctctcttccctagaaacattttggttggcctagaagcaagggtcttcttttcacaggcaagatttcctattcaaaatgaaatccagtgaggagatgggagatggctgaatatggggaggaagtcagccacttattcaaaacaaagaatgactcccaatggcagacaatgtattgtcaggaattgctgaagatggtgaaaattgtcttactcattgtgatgtttgtaaaggcagcaatgaattcacgggatttttgtttgtttagtaaacaggcaatgagagtaaccatgagacacatatatatgctatactagtttaactatttctcttccctcctgtcataacacttacccagctattttgaagcatgagctcttgggccacagcttatcactgatgttctgacttcagtagatagatgctcctctaacatgttcctccacttccaacccaataaacttcccactagatttagaacttgctgaatttccacatcttaacatattttagtagaataaagtagctcatgtttaaaatatatttagaaaagttggggactaaaatgctattctttacctacacttctcttctgttgtgtgaaatacaaaatagtgtactcaaattcatgttaagaaactgagatgaaagatattttgaaactgttgccacagtgctaaagtcagaatagattgcctattcagagcagtctgtgactggagaattgtattcgccctcaaagcaagtacagtagagtatcaagagatgcaaatgactgcatatatttctatcttcaagattattgagcttctttcagctcctttattatgccagctactctaaagtctccttggggactttgcataagtagttactcccactgctactgatctcaatccctgaataaacgtcatttccaagagataccctgaagtagattggaccctaccttaggacatgtgtatcccagcacctttgcttctattatataatgcaccacggtattataattaactatctaattgcctgtctttccagcttgctgtatgctctgtgagggtaggatctttaaccataacacctagaaataataggcactttttaattgaatgaatcgcaaaagaattgactattgacaaactcagaaaatacttaagggatcagattgtccctttattatatacctctgccttattttattatacctctgcctgaaatatttctgtctatccaaatttataaataatggaatggaagacaccatcagttgaaagatgcaccattattttatgtaccactaaaaaagacaagccactcccaatccaattataattgctagattgttagatagttcctagtttcagagatgtcaaaattgggaaaatgtgcgtctgaaaattacaatcaataatatacagtgtatggtactttttaccatggtacttttctatttgtttggacacttaaaaattgtgtcataagattttgaagaggctagtatgtgaaccccatctagatacagagatataacattgttcctctcagttctcttcaagtgccaagtttatatctgatttaggggataattgctcctctggcaccaacagcctcaccagatcccaaaaacagagctccctccaaatgctctatctttagaagagagcttcaggagaaaggtgacaataaagtaatcatataatgttccagttgcacaggattaatgactctagctttggcaaactcttaactttttgtcatgttggtggtaagctccagggttgtgtatataggaagaagactaattttaatcaaaactttcctatgatttaaaaggaagataaaaaagtcaactaagttttaaaaggaaattaaaatgcatatgctggttggtgttaggaattcactttatgtgttaaaaaaaatcaattttatccaaacaggagatccctattaacaagataagtaagagatctgaaatgagaaatcattgtaattcaaatatgcaaaggagtggatacacatactctttttgtatgaattatatgagatctcctaaaataaatgcaaattcttaaatttaaatatagcacctaagtcactttaaaacatcaatagttaagatggtttatatattttgttacaaatcatatatccttactacaaattaaatgtactttcaaaattattttattaattagacttttattttaccaaatactaaagtctagaaatacatgggtactggccaatccttaaaaatatctgtgtaacacattttacttataatatttttggtgaaatgatcttatgccgtataagaatacatgcaaatagaaatacacacacacacacacacacacacacacacacacacttctgttcataggattttgtttatttggtaggaggttttgtattattttgtgacaactgcaagtaagcactttccatcatgagaaatttagatagtgagtgagtacaagttccttaaaaaaaaaaacaaataaaacaaacaaaaaaaaccactttcccttttacccttttgtctatattagctaactaatcctcccagtcatccacttagctttgctggtggaggtcacatgggaacctttgcacaatctgaggtttgcacattctctctaaataaacaattgcgtttatcactagatattcataattggagctctggcttcttattttgtaaagttcactttccaaaccatgtataataaaactaattgccattatgtgttattctaaaatattttaagaacttttcctggggaagatgtattttaaattaccattttcttacctaagcacggctatctcaaatattgaaataggcttatacaaacttaccttaagagtaaccttctttttaagtttttagtaacattataaaacagaatgtgatttcctaattttagaatgtcagttacagacaagttaaaaactctgaattaaagaaaaattaataaccattaatttttgcatactaaaaatatgagtatgtgccacttgttatgctgtgttccaggagaacaaagacaaataaaaggtagtaagtctctgcctttactggtggaagaggtagtagacatggaaagacacaatggtgggagaggctcccaaggtgctttataaggaataacaaaaagattaggtttgtgttgcaggaaagtaagccttccaaaataaaatacaagatgaaaacaagaaaatttatacagccccgactgtttaagggtcacaagctaagcagagggtattaaaacaagatttccatctttcaggagcccataattccatttcatgtcatacaaaccatttcttttatattattataataggaaagatagtaattcaactcaccaatgaggtccatgaaccattttattcagtagagctgaataacataaataacataaataaatgtaccccaaagattatccatcagtcaactctaccaaaccagttatttttccaaggctgaataattatgatcatgttaaaatgagctcttgtcccttgttttgtctgatccagttttctagcttcaagccaggcatttttagagctctataatttattaatatcaagtatcataatatcactaggacctcataaggatggtcaaatgagagagcaggacaaataatcttatttatcatttagaatgaaaaataattagctttattgcggtctgggacttatttcaagttggtagaatccatccaggaaagaccatatttgaggtctgccaattcttggtccacaaacaagaaactttgaatcagtctttcacctctgaaatgggtcttagaaaaatcagatttgaaagatagcacgcaaaattgaaaacaaatatgttaggatgagattataggtgttgtttaaacacttaaaaaatattactgcagcataatttttagttagaaatttaattattgaattcaattccctcaattcttcagtgaaataaattgggttccagagagactgagtactgccaaaagttacagtaaaaacaattgaagagtaagagctacaatccaggatgcttgacttctagcccagttctcttcttgagacactggaagtgtctcaagagcaacaaattaaaaacttttggaggtaacaatacttttttccccttctggagagattaatataaataagacattgtagggaaaatagatataattaaagttactgatataaagatttatactgatataaagttactgatataaagttttctattttaaacagccaatacataagtataaaattagtatttaaagcaaaagagctaaaagccctggtatttttctcaatactttgctcatttggaaaaaaatgaaaataaatatataactacagcagtttctgaactaccattattaagtgaaatacagtcaataacaatataagtaagtgccttaagaaatgtcttgaaatgtctgtaataatgttaaaatagctgccatactttacatttgactcacctagcttatcattaatatatgagtgcctactatgtgcaaaggacctttaaaaggacaaaggagtataaagataaatccttccagagttcaacaaaaaagatacatgtttaaattaacatggattcaagtttacatggtttcaagtttgagataacatttaagctggactttaaagataggcagcactaaaggaagcagggatgaaaggaagtgacattttaaacagagaagttagtatgagttaaggtagcaaacgagaaagttcctagcatatgtagggaacaaaggttactttcaaggtggaatatagggtgccctgaggggaaaagtgggaagtaaatttgtaaggccagtgcaaattgggattgtagacgttaattcatagggaatgggaatccaaaatgaatcaaaataaaaatataatgattggtctagaaatactaagccataaacaaaatctgggtgaaaacatctaatagtcaactacaggcttaaattactaaggaaaaaaaaaagttcccaactattgcagttgtttcacatacaacagtaattctatgaaagattttatagtatactgaattatggaggcacactgatattttttaaaatggcccaaagtggtttgcctcataacttaaaaaaaaatttttttaaccatggatttaagagtcaataagggtttttcacaggtttctaatgtacagataaatatatgtatatttttctaaagtagaacattagatctttctctaagagtatgatgatgacctaggctggacagaaggaaaaaaaaaaactatgtagaagagaaaagtataataattttaagaggtgataaaagagcaggaaagggactagtgcctttcaaatcctctaggttggttcccaagctgtgagtttttgtttagctggtaaaggtgacagttgaggggaagtgacagtggataatagcacataatttgcagtgaaggagatgattacaaacattcataatataggatggtggtagtagaaagagagggtatggagttatgcaggcctgaatttcaatgctagtcatgtgatcttgaaaacatttcttaacttccccatagttgattttcttctataaaattaggataacaaatatttaccttacaggggagaattagagcataggaaagaacttgataaacattcaatacgtgatagctcttcaataaaaaccttttgttaagatcccactgtgtgcttaccactgtgattctgtggcttttaatctttggcagactatgggaaagataaattgtacttagaaagatgatcaaggagcacttcaaagccccagttcaaaattatctcctcattctctctctctttctctctcacaaatacacacacaagcacactttcaccctaccaattaggaattttaagttaacaagatactttttttaaaatacagtgtcctttggataggcaaatcaccttcacacttgagtgtgattagttctttgcttagtgaaaagttgctgggttctcctggaattggaagaaggcaatgtgaattaggaacttcttgagggtactcagtatgataggaaggtgggaagaaggaggaagtaaggggagacatagagagcgagaaacaaagagaaaagaggccacaaatattaataagtagtggttcttatttggactttccccttggaggggacctttccgtcccctgataatctcttaggaagataatgacacttaagtttaaattgtgaagcctgtcagttgagaaaaatgttgagacaagtctcaatcattttaggacgtttatttgccaaaattaaggacgtgcgcggggaagacaggtctatgcctttctgggaagatgattttgagggctccaaatttaaaggggaaagggtgggatactgagaaatacagttttcatgtgagagggtagcagggggaaaatagtcattcatgcctctgtctggcttagtcaatctgaatctgcatttttacgtaagataacatagacaaatggggcaggggaacaatcagatatgcatttgtgtcaggagggcagaggggtgactgtacctgaaaacagaagctatctatttacattgccatggtaaattttcatagaaacactttatggtaaagatcttggcgctcactgagaatttccttgtgggcaaaatatgagcgaggtgtgtagcttttcatctggtagccatctcatttaaaaaccaagaggcaaggcagttttgcgtgacccagttcccagcttaacttttccctttggcttaatgagtttggggatccgagatttattttccttccacacgcctatgccaaactcagattccttcctttcatccctgtttcatctgttcaggctggttagttcccctttccaatccacacagagaaagacagaaaagacagtgagaagctatgtgtgcaggacttctctgccctccactccatctaagctctcaagaaacttttagattcttttgttttttctattcatcggtctcttaaagaggcaatcccacttctccatttccacttcctaataaagaatgctaagtaacttaaggattttctttaaattatgtagctattcaatcagggtcagtcctagttaatagtttttccccacttcccatagcctcggcttttagcttagctttggcagtgaagatctggccctaagctcttgcgacccaacccccaacctaaacatttcacaggctactgggctgcggaaagctgaggctgccaactttggagcctaggattcccaggacatcaggtcaagcaactgagaggtccacccaggggtaaattccacacatagtttcttctctcttgggaccagcgctttaacatctgggtgaatcagatcgtgcagacacggtaactaggcgcagaaaacagctggacacgttgctgggagcccagacagaacgtgaccagtagttctcagaaaccgcttctaaataccagctccaacaggcttgtagcgtccgagtgcggataaggcaagagcaaaaacgagcatagtttgggccgttggggccaaatctgcacttctgagagctacttttactgctaagctttgaaattggatttacccagagggaagcgttgcagtggcagccgcaggcaggtaaaactagtatttgcactcacacactccccggattcttcacagacagggatggaagagaaaacttaggaagttgaagtttggcattaaaataaaggactcgccaccactctgtgcaccttcttgagggagttcattcgtccggagcgcctcacagcttagtgcgcctgcgcacgcgcgaactgcggccccgcctctcctttggggacgggagacgtgcgtcgggtcgcgggacgggggctgcgcatgcgccttcatttcgtcagcccgctgttgcgtgctgccagcgggaactgtgtaggggtagattttcgctgcagtgttccccgagcctgttagacgcagcgcgccgggagactgagagaggaaaggatagaggaagtgctgccctaggctgcatgagtcgaagcaagcgtgtttccttcccgccaggcaagtgcccttagaaaccgggccccgcccccttcctggcctgcattcccatcccctctcccggggcggaggtgaggacctccttggttcctttggttctgtcagtgagccccttccttggccatgaagctcgtgaggaagaacatcgagaaggacaatgcgggccaggtgaccctggtccccgaggagcctgaggacatgtggcacacttacaacctcgtgcaggtgggcgacagcctgcgcgcctccaccatccgcaaggtacagacagagtcctccacgggcagcgtgggcagcaaccgggtccgcactaccctcactctctgcgtggaggccatcgacttcgactctcaagcctgccagctgcgggttaaggggaccaacatccaagagaatgagtatgtcaagatgggggcttaccacaccatcgagctggagcccaaccgccagttcaccctggccaagaagcagtgggatagtgtggtactggagcgcatcgagcaggcctgtgacccagcctggagcgctgatgtggcggctgtggtcatgcaggaaggcctcgcccatatctgcttagtcactcccagcatgaccctcactcgggccaaggtggaggtgaacatccctaggaaaaggaaaggcaattgctctcagcatgaccgggccttggagcggttctatgaacaggtggtccaggctatccagcgccacatacactttgatgttgtaaagtgcatcctggtggccagcccaggatttgtgagggagcagttctgcgactacctgtttcaacaagcagtgaagaccgacaacaaactgctcctggaaaaccggtccaaatttcttcaggtaaaacaatcttacccagggataattaagaatgggcagagggattggtataaactactcctaaagttttagaactgggaaaaataagaagagaaagtctttacttagctgggattttcatgagataatgaaataaaaagagaatgttaaatgtctagcaaatttatggagtaaacttcgctgaaacatatgaagccttactagcgcttttggctttaagcctttgtgagctgattaatgggtgttctaggagattattttgcctaacttttgtaattgtgattctaggtacatgcctcctccggacacaagtactccctgaaagaggccctttgtgaccctactgtggctagccgcctttcagacactaaagctgctggggaagtcaaagccttggatgacttctataaaatgttacagcatgaaccggatcgagctttctatggactcaagcaggtggagaaggccaatgaagccatggcaattgacacattgctcatcagcgatgagctcttcaggcatcaggatgtagccacacggagccggtatgtgaggctggtggacagtgtgaaagagaatgcaggcaccgttaggatattctctagtcttcacgtttctggggaacagctcagccagttgactggggtagctgccattctccgcttccctgttcccgaactttctgaccaagagggtgattccagttctgaagaggattaatgattgaaacttaaaattgagacaatcttgtgtttcctaaactgttacagtacatttctcagcatccttgtgacagaaagctgcaagaatggcactttttgattcatacagggatttcttatgtctttggctacactagatattttgtgattggcaagacatgtatttaaacaataaactaaaaggaaataatctccacgtactaccatcttgattaaattgtgtaattttttataggaattatgagttatctgtagtacttggaaacagaaaatgtgtgtatttaaagacgatgcctatgcagtatattgtttgggatagattgcaaaatttcacactgcatgctttgaaacagttttccttagaaaaagcttttgctatcttatcctgtttacattatttctttattttaattctgcttggtgttcttgcattgcatttaatgatcccttttctccccacctccacacactacattttttttagatttaaatagttttactattttaaatgattgccgtacaattagtagacttgaagacaagttttaaatatttttcttcaaaggcttgttaaaccaatcatgttaaaaggaaattcttggttttggtttgttgttgttagcattagtcatatttgatttagagggtaacttaaatcagttatttttagctttttagaactttgatctgctagggattgtcaaaataatctccttgaggcatctttatttttaaaatgagattaaagtatgtgatttgcttgttatgtggctaattagtggcaaagctggaagtcattcccagtctggactttagttctttgcgccaaaacatgctatattatttatttatttttttgcttgtcaaagttatacttaattctgttttatatttgtatgtggcattaatttgggtttgcacatttttattggactattttagttgtgaagaagcctgttctaaagtttaagtcacatgactagtatgtggcagttgacttaaactccaatactctttactatcattgacttaaactctgatactctttactataattatggaattgtgcaaatacctctgagtttaaaatattatttttattatttttggtgcacattcctaaaagttaaggaaggagcctcagtaatggaattgcttcttgaccttttgcaaacctcaatttagcaaaataattaggaacgatctaatagtgatgatacagtttttaactgctggatcagcgacgcctatttcaagtagtgatactaactaaactttcgccggtctttcctgtgtctgtgggccttcctcctggtgtgacagacttggggatttcttgtaaacttcctaactagtctgaacctttttatttcttattgggaactgacacttccctatactttaaaactcacatatgtatatttttgtacatctatctcctaattcaaaagtaattgagattgtcatttcattataattccgtgagtatctttaaattactatcaaatatgttactaaataatttaataagaatatagaaatgaagccactgagatccttaaagttgaaacctgattgttattatattttcagtaaggatttggagatttttggacatttttactctcataatctatgcagtactgaaatgaggtctaataaatataaccaatacatgttaggccataggttcttaaatttagctacctgttcacctcaacttgagagctcttaaaaccctcagtgtccaggttgcagctcagactagttaaataacgttttatccctagaaatgttttttttaaagctacccagatgattccaataggcgtcaaggctaatagccactgattcaggccttgctattcaaaagtatggtccgtaaaccagcagcatccctgagagcttgttggaaactagaattcagggatcttttgtagacctactgagacaggcgctacctgtaccaacatctctagatgattcctgtgcataataaaatctgataaacaaaggcaataggttattcttcctgtgctggtaaatctctggcaggggtccccagtcaggaaaaagatttgagtattaaggtctttcaaaaaagttaactggccatactcaactgtctataaaacctctataaatttctgtttttatgtctatgaattattaaataaaatttaactcatttttaagaaattacattttctgttatcaagaatacaattcttactagatcataggtgaaaatgtcaataatgataggagcaaattaaaaattcagataattatttttgacttttctagaagacataattatctctggaaagcatatacagtagtctaattccaactgctactcattaagtattggatatgtgataaaaactctatcgataactccaatgtaccttctctaatgtactgtaaatttccatttcctatcatgtgcttgcaaacaaagatttcctatgccactaaactcaataagtgagaagcttgcacattatttcattttgctatagctacgatacatatcaaatgacagctactcctggtccctcatttgtatgttaaattccttgttaattttatgacaagattgttgatcttggatttcactttcattaccgtcttagaaacaaattggatttttctgctcccagatgccactagagtagctttgtaaagctcatttttcttatctttacttagtttctgtctctaactttagtttcctttttcagcttccctgactaattctcttaacctccaattatctttaacagaagttactaattctgcaattcatatattctggaactggaattatctttgttcctaagcaaccaagtatacatatgaaacggtctgtacattaatgcctcataatagcagctcttatttgggaaagggttatagtacatttaaaccatgtggttttccaagcaagttaagactggctatttgtgtttagtgtcagaatatgttgaattagaagttgaagagtttctaaagtgattttaagggcttgaggagagatgaacccttttgcttagagccagaacttagatatggggtgtaaatatttatattacactaatcattaagagtaatatatttaattttatccatttttttagtgccttttttgaaccaatcactgggctagatgtggggaggacaaacatgtaagcaaatcactgttagaagtaacttgtacaaagtgtgtaaaaggacacagtggtgaaaggggtgacttttaggagaaactttatagagcaaggaccagtaagtttacctaaaaggggaagaagaaatatggagaaattaagtgggaagatggggaggggaagtgtgctaatcacctaagaacctccgtgctacaagaaggagtttgggtttgaccattaggagaaacaattacaaagctgaagcagcatgctaaactgcatttcacaaataccactttggcagcatcaaggatcgattggaggaggcaagactggaggcaggaagactggttaaaaaaatgcatattaggaagatatgagagaaaaatgataatggccttatcaaaggcagcaataatgttccttgcaataggaatgaacagaagtcaacaggaaatattaagagatgggatcaaaaggacatgactgcagattgctgtttagagttatggaaaaaagtagaatccaaaggtaaatctcagatttcttgagtggtgggagagatgatgacacaaaatgtaactttaaaaatggtaattaaaaaaaaatgttttatgcagtggtggttaaatttactaaaagattttttcaggattcccatagtgcaggaattagcaagctatatctcattcaggccaatcagttactgctagcggaccccatggccttgtgctccccatcttaacatagtatctctgatttgtctcaccagacaaatcagagatacacttccccttttattccgtgaggaaccacaagagtctgaactgtggcatcaattttgcagttggatttacatctttcttaatgatttgaaaataatttgtttcaaaaattgattttgaccagcacacaattttgctggtatatcatgtttaagtaaatgaattctccagcagtgaagcacaactaaagtgaagagctgaagagcaacttaagaaagaacaattaattccaataaagttggtaaaatgctcagtaaaataattttcttccaatggatgtcagcatatttaaactttgtggtgtgattcagtttatatactctaagagattcagtattttagaaaagtgctcttcaagattttcctaatgtattatatgtatctctcatgaattgaattgatttagaaatttagtgtaaaagtgttacacacagccaacatgatttataaaggatctaggatgcaattataatatttttgtgaatcaattatgcctttttaggaaaagatttagaagttaaaaatgcagctaatgaagctgttagaaaataaaacctgtattagtagtcttggatttaacaaggagaacaatcaggagttgctaaatatggtcatcaagtagtaaacttcacgtagaaataaaaaaattgaccaagttcagtaaagagatatttatttaggttaaaaataccattcaaaaacattgggagaaggtatttattaatggagataccttcttcagtggcgatgataaagtctcattcattgtttttctttatatagtaagaattagtcctttttaggaagtgtgtgatatatatcaccatctgtattctcatccacatgttacactattatttctaaatttccaagaataatctgtaaaataactattttgcagtatttaatatctctattttcagtaacatgttattatattgtgttgagataaataacactgattaataaattggaatattatgaatgttttaatttaaattgagaaatgaatgagtttctgtaaggacaaacacctttgtgtgtagtattatagttgcatacaaatttgaggctacagtgtttgctttttacaatgaatattttaactctataataattgacattgatatgggaaggtcttaaattttcagatttcagtgctaaggatgataacatttatgataaattgtggagacttggatatcagtcttcttttaaatttcctttctttatttcctaaaattgcctacattaaaaccccattctttagaatgttagttcaatggaagtgcctgttttctataatgtcagagatttaaggaatttaaagcttatttctatttgggtgccacatttgttttcaaaacacccaatactgaggcaagagcagtatttgccaagtagcaaattcaagagcaaaatgttttggcagtcatattgcctggctttgcccagggttggtaccactgtccccactccaggaatggacaacctgttataacaaaagtaactgtgtgcttattaagtgtcaggtcttatggtaagtgctttaaaatgcattagtctttcaagaacccagtcagaagggttttgtcattactattttctgatgcaaaaaaaatgaaattaaagaagattaaataatttatccaaaataacagttagtgggtgtgatgaggtgctccctcagctatcaccctaaaaaatctaagaatgccagttcttctcagctttcagtttggagtaggcaaacatgtatctaaaaataaaaataaattatttgatgacactaaattttatataatcagccaaagtttatgcaatcatttttaatgtttttattctattattttgtcatcttatgaaaaatcaggaactcaattctgtggtcctctaatctacctggatcatagtggagaattagaaagcagagaaaatgtggcaaatctatgtattaaagcaatcccctcaagcactatccagcattcatttattgttatttcacacctagtttcagcaagctttttttgttgcttaattttaaacctacaattaagtcatgcactattacaataaacttttttttaatgactcaccttaagtagctagaactatgctacccctgggtatgcaaggatgaattaagacagttttccctgcctttaatctagaaattagatatcagcaggagatgaccacaagtggccaagttgacagaattgacagcagttaaaagtgacagctgatagtgggagtggattctgaaacactgtcaaaagaaaaaaagcctagagtattatagagtatttcactgggacttgaggatgttactgaggacaataccagtacctggtattcacactgaggaaaagattaaattacattcagtgtattctgttaaagaagtcaaataaatgtaatgtctttcaatgattttcatccaaaaatagtggtactttaaaaaatctttagctgtcatacctagaatgactgttccagataaccagagttttactatgccttaatagtctcagtaataaaactcaaataattgttgaaggatgaatttttgttaaggaaaaaaatcccaatagattttagttgtacaatttattcagagataggaggtccttctgagttcaagtctacgttccagaagttttatgtctggaatttttcatcaagtcctagtgtaaacattgactagaactttttgtttgacaccattgtgaaaaattgctctgtggatagaaaacattttaatcttgtgtttcagctcatttgatctgatgaccataatttatagtttatttttcctccccaagtgtgttgttgactatggtataattctttttttctttttctttctttctttctttttttttttttttttttttgtttgatgagtttgaagaggaagcttaaaatacatttcagtacatggctctgaatcacttaaaatcataagaggttaaagctgtaaggaactttatatatcatcggacctagttccttcatgttacagatttaagccagcccagagagggttggtaacttgctcaaacacaataggagtttttcacagggtccacattcctgtttgatatatctgattccaatgtcacctactttttgtcacctattcatattgagtcatttggggtagaggaacaaggaacaatgcaggattcaaaaatgccttaaaccctccttatttatcaaattatcatcttgtggcaaggcagtttttctctgagcagcattgctgagactcaaactcagttttgaagtcttgttcattccttggaggagtatttatatttccctatagggaactcttcctgcctttcttcttctgagaaccatttcatttttctgaaaatcatgtactaagtacctactatgtgacagggactctaatagcccccagtgatcagaagtaaagaaagatcacagtctcttccttgcaaaaaaacacagtctacaatggggaacgaatggtaaagcagtagtaatagcagtgcaatctggcacaggaacatgggagctcagagggctaactcagcctggctttagtgaggaggtattcccagagtttaaactggcaagttccagaagcccacactgatcttccattagtttctagagagatcaggtgaagggacctgagattattcctcttttaaggcctctcaactttactttttttttttttttttttggagacaagagtcttgctctataccccaggctggagtgcagtggcctgatcttggctcactgcccctctgcctcctgggttcaagcaattctcgtgcctcaccctccccagtagctggggattacaggtgcgtgccaccacacccagctaattgtcatatttttagtagagacggggtttcaccatgttggccaggttggtctcaaactcctgacctcaagtgatctgcccatcttgtcctccccaagtgggattacaggcgtgagtcactgcacctggcctcaacttcactttggtaatatttttcttctacagagtggtctctgtaatccctgatctctctaaatgttaaatatttactgtggagtcaacaaacctgagaggagacatcatggagaaggagattccattacctcctaccctcataagaaaatgaaaatcaaatacagaccagggaccatgactgaaaggactctgaaagattgtggaacctttgtataatagtatccatgtttttgttgtctcctctgcatttcttacatgactaagcactgactggttaaaccagaaaaggaagcttagcttctttcgtttttaggacagcaaagatggggatggtgacaggggagtttgagacattctgtccctttccatagccattcctggaagaaagaatgtccaggattaactggttggtggcacagccacctcagggaaagggaaactgacccctggggactgaagtcaggaataaagaagtgacaaggagctagctggggcctggggaaggccctggggctggacactagaaagacccaccggggtcttttctatttttatattcaacattttatctttcgttgtaaaactcaggaaaacacctttaacaaacaaaaataacttctctcttaagttgttcattttactaaatggccaacatggattggatatggtagaaggaaagaacattttctgcagaagggagaaaaaaaccacaatctattttatgaggaggaatgaactctgggaatagttctctgaccctttgtgtgtcagtgtgttctcagcctgaactggaagaaaatgggatagcatgtggaatgtgggaaagtgcgaagactgatgcaaaattcactatctgcctcattaaatacactagtaggttttcaagagaatgagtctgttatcaccacagtaaatttctcactctgggcctaactccttatctaaaacttaatagagcttaataagttcaaatttttcctgtctttctgggaatcattttcacctttatctctgatcctgtactttccctaggtcagagtaaaatataatgggaaacgggcaagtaggtaggaaatgtggagaaggtcaaggcctttttataatggttcattgtaaatttaaaattcttagatatgtatttcatacagattcacatatgttcttctggatgaattagaaattttaattgtgaggatcaataaagtagcgcaaccagctttcacatctgtatgaaatttaggactttgcaaaggatgttgcacaccaaaaattacaaaataattcaacgattatttgctacagttaccaaagattataatattaacatttgcaagaacattgcatttgtgaataaccaagtatgatacaaggaagaaatcatccatgtcattctcagaggatatggtgtaagaactggcccatgactcatgacaccaggccctgccactaggttgtgtgacttgaggaaataatttcatctttttgagagttggtttcttcatctgcagaatgagcaaagaagggtggctcttgacttcataatctctcttgcagatatctgattctacttggtgcagtaacaataattgcttgttatttttgcgatcatgtctttccagtaaaataaatctttagtgactctcaggtttaaaaagaatcttttttgcaccctattttaaaagctgccagatttggggtttggctgactactaaggagagcagcctgctagaaggagcaaattccagagctgagggtcatttatttggaatgctttgccaaacactcccctatttttaaagttgttgggggactttaaacttgaatatagggtggtaggacaattgtttgaaccactctgtaaatacgtgcatgaaaatcttgaggtttacaaatattttttaatagtttgccacatttcaatggcatgtcaagttgcagggtcctgccacttttcttcttgttattttcctcttctatcaactttgctcactctcccaaagaaataggcaatgagaaaaaacaggtcttaatttttactggaatgctctttccatttggctagaggtttctcaaaccaggcggcaccaatcacctagggagttttaaaatcatggtgatgcctgagccctacctcaactaagtcagaatatttgggaaaggagcccaggcatctgtacattttaaaagctcctcaggtgcttcttatctgcagccaggttaaaccaggagtgtcatcactgagtaggactattagctttaatgtgtcctgtgaccacaataccaatcagctctctggttaagaaaagagatgaacatagacattctgaaaaggcaactttataaagttgaggggaatgtatttctttagctttaatgcctcactgtgggatttgtctatacatttatgtatttttaaattactatcataaattcacaattagtaccaaaaccgatcaatttgtgaatatttattgatgccatttacatgcatatgtgttgctaaatacaatgggagggggcctacagaaaggtagagaacccagatcccacccacttcttgaagcttataatcattttggggtgcaaggattgtgtaaaacaagacacaaaaatcacacatgttacagaaattaaaagctaatatcactgagaacaggaagacattacaattggctagaatcacctcaggagatggtacttggatctgggcaccctttgaatgtttttcacttatccggtaggtaaggacattagctctggactagaaaatcttggatctcccacaggtgagctctgtgaccttgagcaagtaatgttacctttatgattctcaaacttagctttgtgagcttcaatttgtaaaatggaaaaaatgataaaactgctctcatagagttgcaaggaataaatgatatgatgtaagcaaaatatctgaaaattcctaagagcgcaatttaagttcattttgttccttcttatcgcttttttttttttttttttttttttttttgccaaatacaccacttgggcaacagatcagccatggaaatatgatgcagaagatctgcctcatgcctgttcctaacataaatctctctctaccaaagctgtctgtcagagattgtgttcaaaccagaacaagtggacccactcagtccagagttaccctcaacatgagacaggctacccagctggttctctgtctttataatatttttatttctttaaatttgatgaaagacccacttttgtgagttttacacacaaatgaagaggagtacagaagagcacatttcaattgtaatgttcatgccaggaatagtaacctcttcaaggataccactgagtgcacacagaatgctgggaggtcctgactctgcttatggaaaccacagaaactcatccctgaaactggttctatagcagccatgaccctcattaaacttccaatcaagtaaaattaatattagctattaggttagatgttaggtattgtctttgcctccatttaatcatcttacttcctatggtacctgttaattatgatttgaatctccttaactgctcagcctgggtgtttcagccatatataagtcataaacagactacaattatcttactatttctcagttacttgcaaacaacaggaaccaagtctgataatacaagaaatgaagaaattttctggaagaaggcaaagaggctcagataggaacaaagaggggaggcacagtcagaaccctgctatagaaatcacctgtgtaaggcaatgcagctgatggaatagccacccccagacaaccatcaccaatacactggggcttctgagagactcaaccagagcttctgagaataatctctgagtgtgaaaatcagattggctattgaaaggtcacatgcccacattctatgaaccaggagcaggataacggactattctatatgcctacatctcctcctctcattcacatctcctatgtaccttccccaaccaggaggaatttgtggattctaggtagccaaaacaaaagaaaatattcactaaccattttaaagaagttgaagtaagagaactaacatttaccaaataccttgcaaagccagccattgcattggtattaggggaactggtagactgtgctgttattagtaccttgcagtcagactggcattgttcaaatcccagctcagccacttgctggaagaaacaatggtcatgctgagcctggactggcaggactccagatcctgatgacatatcactgttttatgtagccctgttggactgatttcacttctttttagtctcaggatttaattcacaatgagttgttttttggtttgtttgtttgattttgagacagagtctcgctctgtcacccaggctggagtgcagtggcgcgatctcagctcactgcaacctcagcatcctgggttcaagcgattcttgttccttagcctcccaagtggctgggaccacaggcatgcaacccctcacccagctaatttttgtataggcgggttttcgccatgttgaccaggctggtctcaaacttctaacctcaggtgatctgcctaccccaggctcccaaagtgctgggattacaggtgtgagcactgtgcgagcccacaatgagtttttaacacttactgttcctcatcagagatgccaatttgttaggaaaacaaagtgcatccctttcaggcttcatatctgcttagaaaaaagcacaatcctataaattacgtaatcatataaattagttgagtaatacaaaattatttttccttttatctgacttttttttctgaataaattaccttaaacctggcttcagtttgctcataagctcctgatatttgaacaggtatctgcccaacaatcagagagaattagtcctctgcaccttctgagaggtattaaaaaaaaagggggggaaagaaaaagaatcagtccaattggtagattttaaatggctcatttaaatactacaagtttatcagtctctaaattttcagcctaggaaaatttcagccaggaatttgatattagtcctgatgcatcacgaaagtacggaaactcagtttctacagacccagggcttcctggggttacctcaggccacttatatctcttatctgtgcttttccttagctgacatttggttctagaatgaaatggaagtcaggaaagaggaaaatgatgatgtacttccccactcccaacacacacttgtctttagcctaaacattgttttccaatccagctgtcaaacttcaagtatggaagaggaggagaaaaatcagctagcaaatatatccagatttcctgctgggcaccaaatgctaagcagggtaggccaaaaacatttaatcaaaaaaacaagatccaccacggtttttactctcctaaagtaaaatataaatttggaggtgagccaaagttaaaaatataaaaatatagccagtgtttctctcctactttcctagggttgctaggttttgggagcctgggatgggggaaaacagtagaggagacatacttattataaaacattcaaaatagtgaatgggacatacttattctaaaaatttacttgctgtttatctgaaattcaaatgtaactgagtatctagcaaccctacatcctgatattcaactttcctactcccctggtcatgactggcttgggcaggagagatctttgcctgggtagatgttgggaggagcctggtgaatgtattccttcccaggattggtcttggctctagttctggagcctctgttggaagaatggagaagggctccattccaaaaaatggaatagggatctccttccctatgtttggaaaacactggtctaaggctttcaacaatagccttgaatatcaatgaatgtctacttagcaatcatcttttccagatgattcttatgtcttaaaataatgttacttcaagaaggtgcctaattgtaagacatacttacagtaatagtagttgggttgtgatgcaatttgataatgtgagattctcttagaaaataaaattagtaataaataactacagctgagtttataatcttaataaattaaggtagcttaatttaaaatgtataactaaacaaaaactaagtcacaaaaactccttgatgacatgaataacatacagcagggagacagtagtaagtagtggctaaggggaaaggctgtggaattacaccacctgagtctaatatctaacactgattattgaggtgacttactgaagtttcctcacctgcaaactaagttacaacctattgtgtttttttaattgattgagattattaacactttttataatgcctggtccagagtaatgctccaaacattttacctattttatatgctaaatttaaacttaatctttttgggacttaatatatatccatgcacatcgagcatattttaaattcagaaaggaaaccaatatgccagcagaaataaaacaaatattcttgttttcaaataaagatcatttctttatgagaaagatgaaaattaacgatcttttagagatagttcaatgttagccactcacagtcacaggtttaaaccgtgaagttagtgtttatttttatgaatctaaaaacaattgttcccagccatggcatgaagtcttcctattgccccaacccacataaacacactagaaattttcattcttagggagggatagggaggctgggggctactgaatggacattttgttagttaagagctcactcacaggctgaaggagtgtggaataggtccaccattagctattctggccatacctctcttagagattggggtcctggttaccaacgaaggaccatgtggccatatccagagggttggagcaggtctcagggcccattgcctggcacacctcctcccagaattcctgaggtataaccttctcaggaagatagcagagctcttttctaacactccgctatttctggagagtagtgagtatattcccctccaggccttttcacttttattcagaaacacagggaaaataataaaagtctgtctgtattatgactagctacaacaggtgggggttttctttgcagtaatattttcaagtggtatcacctagcagctggattcctttgccttaacagaattggcaccctaaaagcaaaagagatggaagcactgggagtgataaactttgtcagtttagaatcaatttagatcagtttaaaaccattcaaacttgacacattcaaaagctttcaatgctatccactaagaaatcatatttgaggaatttttttccattaaacatttagtctggcttaaatatagtaagatgctaatcttttcgaaacttgtttttctttctttttgtaaaagtcagttgagtttaatataacaaaagggctgaataccagaggtagagaaggaagtgtcccaggcttggtttcaagacaactaggtcctggattctacaactaagtgattttgtgaccttgagcattactagccattgtgagcctcatttataaaggagggataaagattaaaattatgaaatctttctgtaagtaattggcacacagaatagacgttcaataaatgttaactctgtagcctaggagtgatctggttacaagctttgttaaaactccttctttaaggaaatgtaaaaataaattggtactgtcaaagcttttatgcccaggccatgtagagattatcttccttccaaagaaactaaaatggattgagaagacaaatatcattccaaggaaaggctagaagtctgcaaaattatacaattgtactttagtgcaccaaagattaaaaataatgcagtcagaataacatttatttcatctaccagaatgttaccctatttcttgcctttgattagtttaagaataggaaactaagatagtacagacttataaagatataacgtatttataaatatgtatctttgcatatgcaaattataatatacatattttaaaagtttgcttcagtgaaatttagagcatgagcagacaacctatttttggtgaagagtcagagataataaagtttttagcttttgctggccacacaagctctgtagtgactacttgactctatcatggtatggcaaaagcaggtctcagggccacagacaatagtaaataataggatatgattgcgttcccataaaactttatttacataagcaggtagtgggcaggatttggtctgtaggacacagtttgttgaaccctggcctagagcatgatatagagtatgcttacaaactgggcataattaagataactattctagaggaaaaagaatgtatatgcttagattaactcagcaattacataaacacaactgtagtacatacatctattcttttagcatcaaggcttgctgagttgaaaaaaaaatggtatggttctctaactatattctgttgagttgctggtgtgtaaatcacattgtaactggccactattactttttggagttctaacatatgcttatttgcacattagggtttactgtttttctgtgatagacaaatactgaaatttgattcagatccattacacaaatggccaagacaggatattctgtgaatttcctgggaagtatattcaagtatcacttacctgacagcatctgagccattgtgttataaggaatttcctgcagggattgaattagttaggcttagccctcagtggttttgtaactatttcccgcattcaccttaaacaatgccttttagaagtggtttttgggtgattctttttctccaggaagagattataaataatgaaatgattagaccattagagaatttaaatcagtagagaatgctaatttctttttttgtcatagtaacagagcaagccaacttaatcagtgccctgacaaagcatccagcaccaacacatacattagaaaggtatctaattcctcaccattttggtattctaattttataaattttaattctattccattttgagagtatctagggatcagaacctttatggaagactaataactaggtaaacactattacctagcttaagagaccctaaaatgtcagtgacttcataccacaatggtttattttgctcatgtatctcattcctgtgtgagttagatgaccccaatccctcctgtactatgcccttgggaacacacatctctatggttacagtcaaaggagagagttgtagatagaaaacggcacacttccaagtctttgctattgtgaatagtgccgcaataaacacacgtgtgcatgtgtctttatagcagcatgatttataatcctttgggtatatacccagtaatgggatggtggggtcaaatggtatttctagttctagatccctgaggaatcaccacactgacttccacaatggttgaactagtttacagtcccaccaacagtgtaaaagtgttcctatttctccacatcctctccagcacctgttgtttcctgactttttaatgatcgccattctaactggtgtcagatggtatctcattgtggttttgatttgcatttctctgatggccagtgatgatgagcattttttcatgtgtcttttggctgcataaatgtcttcttttgagaagtgtctgttcatatcctctgcccactttttgatggagttgtttgcttttttcttgtaaatttgtttgtgttcattatagattctggatattagccctttgtcagatgagtagattgcaaatattttctcccattctgtaggttgcctattcactctgatggtagtttcttttgctgtgcagaagttctttagtttaattagatcccatttgtcaatgttggcttttgttgccattgctttcggtgttttagacatgaagtccttgcccatgcctatgtcctgaatggtattgcctaggttttcttctagggtttttatggttttagatctgacatttaagtctttaatccatcttgaattaatttttgtataaggtgtaaggaagggatccggtttcagctttctacatatggctagccagttttcccagcaccatttattaaatagggaatcctttccccattgcttgtttttctcaggtttgtcaaagatcagatggttagatatgtggcattatttctgaggcctctgttctgttccattggtctatatctctgttttggtaccagtaccatgctgttttggttactgtagccttgtagtataatttgaagtcaggtagcatgatgcctccagctttgttcttttggcttaggattgacttggcaatgcaggctcatttttggttccatatgaactttaatgtggcacatatacaccatggaatactatgcagtcataaaaaatgatgagttcatgtcctttgtagggacatggatgaagctggaaaccatcattctcagcaaactatcgcaaggacaaaaaaccaaacaccacatgttctcactcataggtgggaattaaacaatgagaacacttggacacaggaaggggaacatcacacatcagggcctgttgtgggtggggggaggggggagggatagcattaggagatacacctaatgctaaatgacgagttaatgggtgcagcacaccaacatggcacatgtatacatatgtaacaaacctgcacgttgtgcacatgtaccctaaaacttaaagtataataaaaaaaaaaaagaaaaagaaaatggcacacttgctcttgactcccttggccggaggtggaggtaatacattgttagttctgatccttgttcattgatgagaaccagcccacatggcttccacctactgctagggactctgggacatacagacaagcacataattatttggtgatatttggtgagccctaactgccgcagaaaaacttttgaagcatttagttctctcccgagaccagaaatcaatcaggtaaacatgaataagaaatttatagtattatctcagtttttttttattggctttaacaagagcatatgctgggaggatatttgctatattctgctagtttccccaatttaaggttgtctgttttgattaaaaccccttagcccagtggaaagatgaaactctcatctatttagtccttaatatctctatcactaaatggataggtttcatgtactcttcagtattgatagcctactttctaagtgtgtgtgtgtatgtgcatgtgtttctgccattacagtcattgtatgaaacaattatgtattctgacaacagctagcacagatttatctatttaataaatgttggttgattaatagataaaggcacgtttatatataccagcaaatacgaagacttggattcagtaaagtttgataccattcaatagcattaagattaaggatgactgtgacggcctttagtttgcatttttagactgcttaatttgggtcaatgtttctcaaagttatctccagtggtctaaactgttaaatctgttccgaagtctaggaacctatgtcagtcaaaaaagtatgtttttagacagctctcctcaccccattccgtgtgaagatggccccactgatattcataaaaaataagaatattccctcccaatgaatgttgctataaggaaatttgctcatacagaattggtaaatggaaaaatgatgtcactataatacataagtcactataattcagttttccctagcaccttaatgtttatactaccaatgccaccacttgaatgccaaatacactaagagttggacacagtaagcatatactcatacagtattgtaaggaattcccattctccttgtattcttcctctttgcctagttttgctgtgtgtgatttcttggaagggcttatataattggccccaaacttagttcattttgcccttgtccccacaactattcagccttaacattttcttacttcattccactgtaatcatttatttagtatagaatttattaggaatctaaatgcctttaaaattatgctagtatttttatttgagttgtttcgactttatgttttagctaaaaaggtgtatggactttgagttgactgccccaactctgtttttatcataagctgtatgatttttatgtgtgattttgtagaaaacacaagattgcttttaggaatgaatatatcacattataatagaaatatctgttttcttgcaacttaaattgcatatattttatgaatggaagaatgtcaacaacaaaattggcaatgggactatttgagaatttgccatgtggaggccgtttcctgaccttttatcctttatatgctagagtgctttagagtttccaaatggtgttcatatgtggaattttatgtcaatccttgaacaatactacaaggatcattattaacatttctacttgatagacttggaaatcaaggctcagaggagacaaatgttttgcctacagtagattggtgacaacattctggctataattagttactctattcaaataaacatatttgagcttcgattttacttagggcactggggatacaaagataattaaaatgaaactcagtcctcatccaaccagttgcctctcttcttcctcccactgattcagggacacttccgtttggactgggcagagctagacaatctcaaactcatagaggcatctgcattgctagtttcctagaagagctggaggctgagtatccggactgctctgcataggggatatgggacacttaggtggctcctggccaagtggcccaagcctgttgctgactggaagtctgtcacttggctctcctccctcgccagttcgtattgtagcctctacccttgacactgtctcacccagtggaaacacagctgcaagagctgcagaaggcctattacttctaatctttctgcttcgtatgatcggtaattacaccccagggacacataatgaagatggttcatcactgctttttatgtgcttcatagtgtgagatagtggactgggaacttgaatcagagcaagaaaattgttttctgctctaggtttggtcacttaaactagccacagtatattaggcaaaatatttcaactgcttgggcatcagtgttctcatcatttgaggacactgtctcattagatggtcgaatagggacttttccagctatagccttctgagattcctcaaggacacatcgagtttgtattgcatggtcaaaagagggctccaaggaaccaggtctaacaagctttaaggtgagtgagttctctcaatggtgccccgactttcctgacatccttctgaatcttagacaagcctcggagagagatactcatggaatgaccaaaatggtagcaccagatctgtatgaggtatttaatcattttattttattttaatttttagacagagttttgctctgttgcccaggctggagtgcagtggtacgatattggctcactgcaacctccgcctcccgggttcaagcaattctcctgcctcagcctcccgagtagctgggattataggcttgcgccaccatgcccagctaatttttgtattttttagtagagatggggttttgctctgttgaccaggctggtctcaaactcctggccttaagtgatccacccacctcagtctcccaaagtgctgggattgcaggtgtgagccatggcacctatccaaatcattttaaatggtgatgattatgtccaataagtccatcttattctcttgggcatctcaaccttttcctgccttaggaaaatggaggtcctctaactcctaagatcttgtcacatgatcctgctgtaggcagaacccacaccagttaaatgtttatttacttgatcaatgtttagcctgtggttggcttttaaatatcccaacggagactgagaaagcagtgcagagagtgctaaaatacagacaaaggaaaagaaagaattggaaactaggagaaaacaaggaaaaaagaaggggaaagtgctttcagcatttcttttcaacttcctctacatgcttagaaaacagaattgacttttgtatgtctgtggtagctttacaaataaattaaacatattatcaacgtttgccaatttattttacaagtatacggaatatcattagcacattctggtgatagtatgtcagatatttaaagagctctagcttgaagaaaatgggccttactttaagagtgctatatttgttttatgttctcatacttaatgatctgggacctaattttcttcagccctgattatgctttgtttcatgacctttaatatatatatatagtaatcattaaatcaaataattataagtcacttaccaaaggaattaaatatggaaaatgcatttgaatatgtacatgattcatccacattttaatatctatccttacttctgtttccttttgtctcccattaatgataaaatagctgagaagattgttctctcttttctttctttttttttttttttttagacggaatcttgctctgttgcccaggctggagcggaatggcatgatcccagcctatggtgacctctgcctcccgagttcaagagattctcctgcctcagggtcccgagtagctaggattaaaagcatgtgccaccacgccctgctaatttttgtatttttagtagagatggggtttcacatgttgctcaggctggtcttgaacttctgacctaaagtgatccgcctgccttggcctcccaaagtgctaggattacaagcatgagccactgtgcccggccagattgttctctcttaatgggctgataagtaaccaagtaaaacatattgtacttttaccccatgctagaggcagcaagcccaagctgcagaatgcccaattacacaatcctctattagccaccaaagagaagatacttttaaatttgtattacattatttaaatagaaaaaataaagacagaagatcctttaaaaagcaaactggataaatagtacttcagaattctatatattatttgttacaactgcatgtaaacctataattacctcaaaatgaaaagtttagtttttaaacaaagcctattattgtatgattaaggtggataattgagctgcttcttatttttattatagtaaaatatacataaaataaaatgtattattttaactgctttaaaattgtaattcagtggcattaagtacatttacaaggttgtgcaatattgtgaaccactgtctgtttcagaacttttgttactacatccagtggaaattctgtatctgttactcttattcctcccttccctctgctcctgggaactacagatctgttttctgttcctattaacatgccgctttaaataatatttcatataaatgaaatcagacaataaaaaggtattttgtgtctggcttctttcacttagtgtgatgttttcaagattcattcatgtcatagtatgtatcagtataggcccatcttgttttaatgcacttcactttattgtgcttcatagatactgcgtttttcacagattgaaggtttgtggcccactcttcacttgaacaagtaacagcaagtgctcattttgtgtctctatgtcacattttggtaattctcgcaatttcaaaatttttccttattattatatctgttatggggccttgtgatcagtggtgccaggaactgtgcctatataagatggaaattttgataagtgtgtgtgttctgacagctccactgaccagctgtttccttctctctctcccttttcttgggcctctctattgcctgaggcacaaaagtattgaaattagtctaaaataggcagggcacagtggctcatgcccgtaatcccagcactttggaaggccaacacaggcagatcacaaggtcaggagatcgagaccattctggtcaacatggtgaaaccccgtctctactgaaaatgcaaaaattagctgggcgtggtggcgcctgcctgtaatcccagctacttgggaggctgaggcaggagaatcgcttgaaccagggagtcagaggttgcagtcagctgagatcatgctactgcactccagcctgggtaacagagtgagactctgtcaaagaaaaaaaaaaaaaaaaggaaagaagttagtctaaaataaccttacagtggcctctaagtgttcaagtgaaaggaagtcacacatctctcactttaaatgaaaagctagaaatgactgcgcttagtgaggaaagcatattgaaagccaagataggccaaagctaggcctcttggtccagttagctgagtcatgaatgtaaaggagaagttcttgaagaaaattaagtgctactccagtgaacacatgaatgataagaaagcaaagcagccttattgctgatatatagaaagttgagtggtctgggaaggtcaaactagccacaacagtcacttaagccaaagcctaatccaaagcaagatcctaactctcttcagttctatgaaggctgagagaggggtggaagctgcagaagaaaagttggaagctagcagaggttggttcatgaggtttaaggaaataaaccatctgcataacataaaagtgcaaggtgaagcagcaagtgctgatgtagaagctgcagcaagttatccagaagatctagctaagataatttggtaaaagtagctacactgaacaacagatttttagtgtaaatgaaacagccttctagtgcaagaaggtgccatctaggactttcatagctagagagaagtcagtctggattcaaagcttcaaaggacaggctaactcttcttaggggctaatgtagctggtaactttaaggtgaagccaaagcttattccaaaaatcctagggcccttaagcactatgctaaatctacctacactctataaatggaacaacaaaacctgaatgacagcatatctgtttacagcatagttaactgcatattttaagcccattgttgagatttactgctgagaaaaagagattcctttcaaaatattactgctcattggtgatatacccagtcacccaagagctccagtggagatgtacagagataaatgttgtttcaatgacttctgatacaagattcattctgtacccatctatcaaaaagtaattttgactttcacgtctcattatttaagaaatacatttcataagactatagctgtcatagatagtgattcctctgatggatctaggaaaagtaaattgaaaacctcctggaaaggatttaccattatagatgccattaagaacttttttttttttttttttttggtttatgggaggaggtcaaaagatcaacattaacaggagtttagtagaaactgatttccaaccctcatggatgactttaaggaattcaagacttcagtggagatagtaactgcagatacggtgggaatagcaagagaactggaattagaaatagagcctgaaaatgtgactgaattgctgtgatctcatgataaaactttagtggatgagttgtttctcatgggtgagtagagaaagtggtgtcttgagatgaaatcaattcctgaaatcaactcctggtgaagatgctgtcaacattgttaaaatgacaacaaagaatttagaatattccataaacttagacgataaagcaatgtcaggatttgaggattgactctaattttgaaagaagtttttctgtgggtaaagtgtgatacaaaagatgctcaacagcattaatcattagatattcaaccgtgggtaaaattgcatgctacagagaaatattttgtaaaatgaagagtcaattgatgtggcaaacttcatggttttattctattctgagaaattgccagagccactgcagccttcagcaaccaccaccctgcccagtcagcaaccatcaccattgaggcaaaccctccacctgcaaaaagattatgactcactgaaggctcagatgattgttagcgtttttaatcaataaattattttaagactaaggtatgcatattgtttttgtagaaataatgctttgtgtacttaatagattacattgtagttcaaacacaacttttatatgcactggaagaccaaaaaatttgcatcacttgctttattgcagtggtctggaaccaaacccgcagtatctctgtgatgtgcctgtacttcattcctttttcatagctgaataatattctattgtatggatataccacatttcatgtatctatttagcagttgatggacatttgagtcatttccacctttttggctattgtgaatattactgctatgaacaattgtgaacaagttttctctgaacatatgttttcaattctttgggggtgatatacctaggaatagaattgttgacttgtagggcaactctatgtgtaactttttgaagaactgccaaactgttttccatagcaacattaccactttacattcccaccaacaatatatgagagttccaattactacacatccttgtcaatccttattttctgtttttgtgttttttttattatggccattctactggctgtgaagtgatatcccattggggttttaatttacctttccctaataattaatgctgttgagcatcttattatgtgcttattggccatttgtgtaacttatttggagaaatctctattaatatttactcattttttaattgggttgcttgcctttttgttgttgagttgcttcttattttaaaagaaatcagactcaagaggactttagttgcatgggaaatattctaggtctgggtgatggtttcatggatgtgttcactttgtgataatttgtgcacttatatatttctcaaaaatgagcatgtgtttcctttcttgaatgtattagtttcctagagctactgtaccaaattagtacaaacattagtggcttaaaacaatatattgtctcacatttctggaggccagaagtccaaaaccaagatgttggcagagccatactccttctgaagcctctatgggagaatcattccctgccttttccagtttctgatggttcctggcaatccttagcattgcatggcttcttgacacttgatactaatctctaactttgtcttcacatggtcttctttctccctcatgtttctgtttttgtatataggtatcttaaatactcctctcctttctcttataagattaccagtcattgaattttggccccaccataaaaaacaggatgatctcatttagacatccttaacttaaatacttctgtaaagaacctatttccaaataaggtcacatttacagataccgataccggggattaggacttagacaaatttgtgtgggggaacacaattcagcccactataatgaacatatattaggcttcagtttttaaaagatggctttaaaaaacaaaatggaaaacaattttactggtcagatgtggtggctcatgcctataatcccagcactttgggaggccgaggtgggtagatcactttaggccaggagttcaagatgagtttggtcaacatagtgaaacctgtctttaccaaaaaaaagtaataatgataataaacatttaacaaaaagaaaaaagaaaactactttagaaaaatgtggtagtctaggtttctgagtcaaaatatctgtaggttaaggaggaaaaaaaattcacgggatgctcaccaccataaaagttagaaattcttaatttttgaaaaatgatctcactgtttaaaaagcacagttagatggaaaaggggacttatataaaaaagactttcaaaggatatttatctgttgtgggtttttttttcattttttggagaggaagctaatgaaaacagttcaatactcatttatgtagagaatatctttcaagacattaaaaagcatatttttagtattgccaaatacagagatttctattaaaatttccagaagacatttttttgtgtgtgttcacactgttacccatggcacattcctggttttttgtttttgtttctgtccttaagtgatcaataatattggtatttggtcattttgaacattgtgatccttacctttggacttgttaacaactggctgaggattcaaggcataaaaggaatattatgcttactattgagcctcagcacctttgtattttaatatgacatgtggctgatgatcaaccttgctgggtctcatttcatatatcagttaaataaatatatgaatgaagtaatattttcttcccaagagtgatatttgattcaatagattaaaagttatttgagtccctaaacataaaaaagccagtagggtatagtagctctgtggcaagcaattttagtatcagaacacatgaatttaaaactttggacaatggccttattcagaacactaaaagcttagaagcctactctttagattgtagtgctattttggaggcatatcttttttctttttttctctcagtttttcttttttggatagtattccctgttaagaaacagatgatgaggctttaattcagtacattctcaaattgttcccactacaaaacttatttcaaagataaactttggaagttttcataggtaggactgtaagaatgttttaaataaatcctaatcattttaccagagagtataccttaaaacaaatttttctggctttatttgacaggttttttaaaaaaaataacttagtcatttttaagttgattgtagttcatccagaaagttactccatgttggtaaaaggttaaaaattaagagagtccaatttttgaaaattttcacaaagttctttttatacttttaaattagtcaaaggccaagtatttcataaagtgttgatgtaaattgtgttactgatctttgatcataatgtggaatagtagttgcactcaagatatgaaggaaaaatatgttacagggtttggctttgaaataactgacatacagcagaggcactcaccctaacatactttccatctatacgccaggcagggctgtcagtttgtggaaaggcaaactgggacctccctcagctctgccctcctaataagaccatcctgacacaaagcagcaattattctttgatgacatcaccaccgtcttgcccttatttttatgtgcataatggaagatttcaactttaaatctgacctagccatgaaagtcagtgtgagtcctgcatcatgttttcatcctgctatgtttttactttctggtagtgcttttaacacagagagtttccaacttgaaatatagagaccttttaggaagttttttacataggaatcacctgtctaatcaactacaagaggtcacacttttttttttcctttgagatggagtctcctctgttgcctagactgatgggcaataacgaaatcttggctcactgcaacctctgcctcctgggttcaagcgattctcatgcctcagtctcccgagtagctgggattacagacgtgcaccaccacacctcggctaatttttgtatttttagtagagatggggtttcaccatgttggccaggctggtctcgaactcctgacctcaagtgatctgcccacctcagcctcccaaagtgctgggattacaggagtgagccactgcacccagccagaaagtcacacagagggttacccaaactaagtctcaagatacctgtttctaatgacttttagatagcatagacctctttattgattaaataggaaagagaaaagaaaaaaaaactctagaatttttaggattcataaaattggcatcacaataacagtaatcacttatggctcctaagaattttttcttttttttttttaaccttaaagattagttaatttaattacatcttaaatacatctcgcaagtgactacaaattctttgagggcagagacaatatattttttttaccttttaatcccttaaagaccttctacctttcctttcacatgggacttttattaatgtccgctgaatgaatataacatattcataatatagtcatgtctatacattgattaacatatttgttatcaactgcagagtaggcccagtctttctcttttactctctgtccttttaagaattttaagagctttttggggaaaataaagtaagaagaaaacaatgagtcatgtctttgtagccatctagatttcttagctctgttgcctcattcttcctcctcattcttcccccagccacggtggagaaataaagttgtctgggggctcattactggactacccaatctcagttcccttctgtactttagaactctctccttccctcatcttgatttcactaggccacactataaccctgcttcctggagagaatcagacccatgtaagctcttgagcctcctgttccatggatctctccaccaagacaagagcctactccaggctgccaacctgagattagagagttcatactctgattggtccccatagaattaatcaacggtggccaagagtgtaggtaactagatggctcattcagatctgatactcattcctggacttgtcagctgtggcctgggtggcagagtcacttaaaaacattgcagcatcttcagaaatctttggttggagtagaatagatgccaaaaaaggtagttgttggcttctgatgaaatggaagggtcaaattaaataatagctgaggtctcatcccttctacccataagattctatgatttatcactaaaacaatcacatattaggaggtcataaataattctacacaagttcttctaatctccatattttcttacacctatggtcaaatacatctctcttgcaagaattatataaccaaatattacatacactatgttagaataaagaatgaacactatcactagaacttggaagcagatttaaatactgaaaaatattataggtatcgaaaagaccctttttattctggcagaaatatataaatctgtgtgtgtgtgtgtgtgtgtgtgtgtgtgtgtgtgtgtgtgtgtgtcttctggtgctatttctcaaaagagtttttttttggtagattttttttggttacttttttatttcattttgttaagccatcaaaagctttgagattgggctgggcatgatggctcatacctgtaatcccagcactttgggaagccaaggtgtgtagatcatttgagttcaagagctcgagaccagcctggccaacatggtgaaaacccatctctactaaaaatacaaaaattagctgggcatggtggtacacacttttaatcccagctacttgggaggctgatgtgggaggatcacttgaacccaggatgtggaggctgcagtgagccaagatagtgccactgcactccaacctgagtgacggaccgagactctgtctcaaaaaaaaaaaaatgctttgaaattagcctttacctgtgtgtactacaatttaaaaggccatctttgaaaagacagtaaaacagacttttactatgaaaagctaccatctggaacccttagtaaactgactgttgtctcataaagagtacaaccaagcctaatgcaacttaattgttcacacagttatgtaagatgtacttcttctataactctacaggacttaaaagaactcataatactatatgattgtattatgggttccataaaacattatgacaatgtattttctggaaaaatgtttcctagtgaacatgcataccccagacattttacctttctcttaaattattccatctgattttactaccttgctcttgctagagttaagagttttctgaaagcttattcagtgttaactaatgttacttttcctgggccatttttgttggtattgagttttttctttatgtgatcataaagttatagtttagaacaaggttattttgttgcaagagtctatttaggtgtaatattttttaagcaaattgaagttgttctgataaatgtttatctaaattaaaatataactccataaactatgatgtggccatttaaaggggaggtatattaactttgtggaattgtgccattaaagacaaagaaaaagaaaaaagaaaagcagttggctggatgaagtagtatagaattgcaaacttacatgagataataattagaatcaataagacacctaatggaaaaagaatattcatatgatatattcattcattcaacaaattttattaaacacatcatctaccaatgaatctatgaagatcaggtactttagcaatatagaacaatgtacaataacacataacataagacagtccatgtgaaggcagttcattcctggtgtggtggctctattgtcagcataaccctgtgttactttcatctttctgcttcagcacctagcacatcacttctgttcaagttcacttcatagtccaacagggcagttgaagcctgtcttagtctgcttagttgccatagcagaataccatagactgggtggctaatataacagaaatgtattctccctctgctctagaagctagaaggccaaaatcaagttgctttcagcttgatttttgatgaggcttcccttcctgtcttgtaaatggccatcttcttgccgtatcctcacacggccttatctctgtgtacatagtggagagagacagagagaaagggggtggagagagagagagggagagagagacagagagagaaaaagaaggaaggaaggaaaaagagagagaaagaagaaagggagaggaagaaagagaaagaaagagaaagagagagagaaagagagaagaaagaaagaaagagagagagagaagaaagagagagaaagaagaaagaaagggagagaaagaaagacagaaagaaagaaaaagaaagagaaagaaagaaagaaagagaaagaaagaaggggaaggaaggaaggggaaggaaggaaggagagaaagagagagagagatctggtatccctttcttttattataaggacaatggtcctatcagattagggccccagtggttgtgatttcatttaaccttaattacttccctaaaggccctatttccaaatgctgtcactttagcggttagggcttcaacatatgaatctcaggggacacaattcactctattgagtgaacgctaactattatacaagagttcataactgagagaaggacaaagaagaaaggtagaagaaggataaaagagaaagtagaaggacgtaaaaggcattctgagttgaatcagttctgcacaggggatttctgggatatcccatacaatacttccacttactttttttgggccagtatttagtcgtacagctatgctatctacctgttgtcttctggctgtgtacactgctgccccaagtaaagattttattactaatgaaaaaaacggatattaagagctaataagccttcttaatcatatccagaactgtgctaggcgttgagaatgagaatataagttcttatttttaagtactctaaggaattcccagtctaacaggagactagtacatgtaaaccagttacctttaatataaagcgatacatcctatgggataaatgtgtacaagttctgcaaaaacagaggaagaatgattatcaacgggggagttggggagagttcaccaggctaagaattgaagaaaggaatttccagaagtggggaaaactttagcagaagttcgattgagaatacaagatgtttcagggaactgcgcatattgaagggtggccattacttgacattctgagccagagtagtaatgagattggaaaggtcaaatgagccctcattttaatgggtctaaaatggtgcttaaaaagtgggacagcatttattgggtgatgaatttatagatgtgtgtgtgtatatattttgatacaagaaacccttctgaagaaattagttattagattccattgatgtcacaaggtgttctttttgttgttgttattggttcgtttgttctaatttctgcccttttcaagattcaaatcacaacttaaaagcaaggagttgcaagaatatatggaatggtgagaaatgattgatgttagaaagctttcgaaaattgcaatacataaggaaaattgtccaatgcacattcttatttatctgcatttatctttctatatcctgttgaactttgccgataattgtagaaacaccttggcatttctttcttccatctttatattttcttgatatcattagaaatagatgttcagtctacctcttgcatgctgaccaatcctaaattgggcgatgacctatttattttgcatcttccctgaatgcttaatcttcatgaactagaaatggccagtagaaagtcagtaagtgttacttaatttacttccgtatttattaaatttctcccagagtaaggaattatgagttcctggagcagcacatgtgtctctttcttacagaaaatttcagttccatggtgaggattatttgcacatctctgaagaggcaatggtccatccagacaaaatagcacagagccagtacataaaataagaaagtggactgtggacaagtcctgacaaaattatggaaagaggaactagtgaaaattctagcaagtcagtatcttttctggccagtacatttgtgtaagcaaattgaactttaatcataatatagtgccaatttgatttccaaaatctttgtctttttttggtcccgccttggaagttgaatctcagtcatgtacaccagaatatgaatgcgagatgacagctcccataacaaatcacccttggccagatttccgccacttggttgttcattttgcctacctctgaaattagcaaatctctgcctttgtctacttgtgccttctcagatctgctgctcctggcccattccttgatctcaatgtggctgaaagtattaagattttagagcatgtataaagataataaaggtcattcaatcaagctcttctattttgtgcattttttgcttctctaagaagcaagaatggcactgtgatttcattgttgaaatagttaagaaaataggggacaattttgataaaattagaaaatcttagagaagtatcctgttactacgtcttcaaatgtataatgataattatacaggaaaatttaaaggcatttttatcataaaatgcttcaagcaaacgagaaaattatgaggaataatatatcaaatagcaatgtgccctctacccagctttgcaaaatctaaacatttttctgtaattgtttatttttcataagaaataaaactttattaggatttttgagaaagtccagtaaagaccaaacctcttcctcacttgagatcagaaccaattgggaaatgacaaagaatcagactgatgaatcagcatggctgatgaattaaattcccactactgaaccgtagaggaggctgtctacactccagcgccagccgagagcctgacactggacgaacaaagcaaagcattttcttaacgtaggcaggctcagttctaaaagaaaatgagaaagagaggatggggctggccacacagtgtctccttccagactcaccaatcaattagtgtgaaggaagggcaggttgagaaatagccgagaagtattacaaccggtgaggcactcaccccatggaaggaaatgtcagaagtggaaagttagcatttccctctaaaaacatataaagttaaagccatgtttttattcccttttagaccctattttttcctccccttctcccatgcaaatgtaacctctaccctgaattttaagatccttatatataacaaatacttagtcactagtgttgtgattctaagtatcagaatgcttccatttaagggaaatattggctgccggttcttggggatattgactataacatctgcagttacttcagtttcaagatactcttgtagactaatggaaagaatgtaaaagatgatgctactagatagaaatagagtttggatcgaaggatgttactgcccaactaatgttctaagtgctgaaagatcatcctggtcttagcaacagcaattataactaagaaaacaaagtttagagttatctcaaaacagaaaagaaagcatcaaaaagttatctctttcctctgaaacaaaaataagcattctagtgacccttgccttctgaaatatttcaacattccaagctactgagacttttcttattttcttataaacaaactttaatgccctttaaaatactttctgatttcttttctaagcgttttcaggtgaataacaagttacattcgtttggcttattttctcttcataaaatggacaagtttttagttgagcagaggaaccgaaaaacttctgaatgaaggaaatatttggtagtgaatgatataatggaaaattgctataataagtagctgggaagaagcaaggaagggagagaaattatacagaatcattttagtttaagtggcagtgtatgattagaagcagtactgagacattgagaaaaatagtctattacataccataggaaaatcaacaatggcatctctgaatatggaattgctagttaaagctactaggtgactctaggatggacaattttttttaataggtttttggttttggttgaggtacactgtcagagtgtgcacagtatttcattttgttagttagcttcatgaagaccttaatttattaatgttaatgattgaccacttgtgtgttaaaccagaaagtatttagtcagttgaattccatcacaaaagaaatgttatgaatccgtatattttgcctcctgtttctgagaaatatggcaaataaaaaaagagaggtcaaactaaatctaatacctctttaagtcccacagcaaaataaaacataggtaggcctcattttatgttttgattatgtcttgaaaaccttgtatacaagttaaaacatttgtaaaagtctaggcatgcttcatttttgaaataatgtggtagataacttaaaatgccagtaattattttccagtctaaataatcacaacattgagtcaggtgtggtgactcacgcctgtaatcccagcacttcaggaggccgaggcaggcggatcactcgagcccaggagttcaaaaccagtctgggcaacgtgacgagcacttttctatacaaaaaatacaaaaattaaccaggcatggtggcatgtgcctctggtcttagctacttgggaggctgaggtggaagaatcacttgagctggcgaggccgaggctgcagtgagccatgattgcaccactgcatcctaggctgggtgactgagtgagaccctgcctcaaaacaaaaacaacaactacaacaacaacaacaaagtcacaacataatttaatagattttttcatatgttggaatttcactaagtgaagaatacctgttatatgttatatgttataggtgataccgtaaggcatatgaatgatcatatttctaaaaaactttttactttggctcctaaatttcaataatctaaataaatactttgaggtatatttgaatatgttttttgttttcattcatttctattttatttttatttacatctgaatgtgttttcacgaaacaattttagctccaaactccaaattgcactattagggaaagggagaatagcttttggctcttcttgtactatttgaacattaggtaactggttactgtcttctgcacacttttaggatgtcattggttcaatctcagggtcaagtcttacccaactgtcctatgtactctgtccattcatgccttaaaagaaagaacctgaagaaaaagttgtacctttattagcaggttcttttaaatgaattttattaattaacatataatttcttctcagtaagatatgtgagctggcaacacattgccaatcctatggttatttttgttagtatgcacaataggtagtttcatgggtcaggaaagcagaaatagtatacaaggttaaagaaatgattttcagttctctaatttccactggaattattaaacatataaataaacaaaaaagaagtaagataactcactgtccctaggtgaagcaatgaaagtaagtgaagtagtaactgtgtctcctgtttcaccctcatgcttggaacatgtgtatgccttcaaaagctcacatccaagtcatccagaaaaattagcctgttaaatagtataggagaatcaacaatggaatctcttagtgcctggaatttgcaattgccagttaaagctagtaggtaaattaaaaataatttattttacagtgtatactacctctttgctttactgaccctcaaaaacgcctgctgtgtatactaacaaaaatacctttataactggcaatatcttactgagaaaaagttataagtaaatgaataaaattcatggaaaatattccactaacgaaagtaccacttttattcagattcttatacatgcaaaggcttacaatatcatatttctgggtaaatacttaaataggatgccaccctgctttgttttgaagcgtagtacgcctttccgtatgcagtgctccatgctgtgcagtcacggaaattaatgagttcagcgttcaggatgccagggcagctggagaacagagttctgtgctcatgtggcttacacaaacacacgagttgtgtttcccacagtgggatccagggacccctgaggttctgcagcttttttatttggtgaaacatagatccgaaagatgatgctgatgtggtgaagggggttggtttctgaaactgtttaagaattttagagatcaagagtaggtctgagaggagctggcaaagcaggcatttatttgtggtgggaggatatggggaaagagcagatgtctgtagatactacaaaggaaaataaacaccatgaaagaacaaacttatgtagaaaaattttaaaggaagattttttaagaaaggatgtttgggaaacactctaggagttattctgggtagcacttataaaatgggacaacttcttacagccagaatgacctttatactgaaagtcttcatttcttttgatttattccatcctgtcccatttaacaaacttgtattaaacagctactttgtatcaagaactatacttccttgcctcctttccaccagacacagatatacacatatacacacactcactttgaagttcaaataccatttgtaataactggagacccacaggactttagcactaaaagtcaaaacaattcgcttgctatggcaagatgaagttaaaaagcagcttcccaggatgaaacttggaaaatgcttaaatactgaggtgtttatttggatttgcttttctaaacttgttgatggaggtaggtatcttgctgacatattacatcatttctgatgaaagaattttagtaagatttcttgagccagattttcttcttaacattaattgtattgggaagttccaattgtttgaaggagacactgagttggatatattattttttacatcaaatataaattttctgtatttgagattatgatgtcatttccaaatggttgtgttgcttctgtactcattggccaaggccctataattatttgtcatattttaattctctttgttccccatatctttaccactagaggtctgtggctcctccttctcaaggttatggtgctataaaaatactcatttcagatttcaaaccaactagaatgatgtagtactatagagtttttggattcagttatactttgagtcaaattttatcttttacagcaaccatatacatccacactgagatcaaactcacttaacctattaagagtaataaaactgattaaaatttccaacccataagactaatattataaagttgttatacattaaggaaaagggcttccaactttcacaaactcttattactaaaatgtttttcttccaacctcctgtattgcctcaaaatggaatatatttcatctgaatttagtaggtaaaagtaaatttggagttatagaaaatacttaatatatcaccttttagttacagtgagaatatatgactttaggagtttataccatgtgaatggggtgaattaactctttccaccaggaggctttggcaagaggtaagagctaccaagaatgtaccagggctcaggcttggggaagagaggggcctctccagctcttcattatagagctcatactttctagatatgctgtctgattctcaggtggttcaggtcggtgaattccttagtagaatattaatatactagaaagagtcactgcagggtcaccctgtccttgtaatagacttgcaacccttaaaataggttagaggggagtaaattttcattagagtgaaagaaggcccaacttgtgattggctcagatcctaggtggtatcacagatatgcatcatgttttgagcaactgagatgagaatccaaggactctaactgaatggaatggtgtcatctgtactcctcctccctggctagctcttccacttagaaggcctgacaccctcatcttagattttcttcatgtatgtcattgcagccaagtttagaaacaggagatttgctatgaaaataagtccatgaatctgctgtctcatccccactgatgtaacatacctgtattgtgtttcaagatacagtcatcaaaattagggaaaagtcctcttttgaaagaaaaatcaactgccaaatggtatactgattctttggattctacctacgaaatcagttagctcattttttgattattctcttttgctaaatgcataatttgtatttcttgcagcaattaatacctgaaagttatttgtaagctcatttcaaatgtgataaactgaggttcatagaggtgaaatcacttgcttttttttttcaggagcatcatcttttttttttttttttgagatgaagtctcactctgtcacccaggctggagtgcagtggcacgatctcggcttactgcaacttctgcctcccaggttcaagcaattctcctgcctcagcctcctgagtagctgggactacaggtgtgcacctctatgcccagctaattttttttaatgtacttttagtagagatggggtttcaccatattggccaggctgctcttgaactcctgaattgaggtgatccgcctgacttggcctcccaaagtgctgggatttcaagtgtgagccaccgtgcctggcttagcatcatctttttatgactgtatttccaggccctaccatatattcaattcagagtaaacacttggttatatttgtggagtagtggaatatatgaatgattgaataaataatatagatgaaaagattagttcctgtatctccagggatcactatctttctataccaccaaagaatttgccctaaaaccattcactgtaaaaacataattatgattatatcttgtcttaatcttatgtcattatttcattccttatgttaaaaataataaaaataatgttaattctatgatttctcctatttctaaattgcataaacatatgtaagaagctactgaaataaagcaatagcattttaatacattcccttgtcaccatttatttgataccctcttgccttggcttggaatttgcaatattcagaattgcatttgttgttgaatattcctatctggatattactagattgggatttctgacccacctagtccaaagacagaatttctttattaagaagccaacaactaaacaggctacagtaatactccttggaactcaaggatgcgtacaagagggtggcttccttcaatctgtcaacagcctctgtcacctccatttatcctttttctgccagtcctattctcaaatactccagagctacaagatgattaagagccatcatgagacttttgaggattgttgtgagctgggttgttatttttatttttatttttattaatcagaccaactcaatagcaccctagttacagaaatcctatgatttggcctcataagatcaatgttgaaatcttgcttctgtcattaatgcaacctggcttttggcaaatcactcaacctctctgagcttcagtttcttaatacacaaaaagaggggaatgtctgctgtcctgcctcacctcctcaaattattgaatagctcaatatcattactgttattattattattatattttaaaatgtttgtaagcagaaagcactgcagagctgtaggttgcttctccctctttctcacttagttttcttacatatcaaattccatcctggggtaaagtaattgctcacaatttctttttataagagatatccttcaacaccagcaatttcatctttctctttttttaactcttgcatatatagcatatataaccatatttgaatgggagcaagtcttttcatttcttttctacttggacctataagttctagctgaagtccttcaagaagttagatctggagctctgtggccaggacttttctccttactcagactttccagtcattccccaaatcctttccagcccattgctattgtagaaaagtcttctccccaaatttgcctctcaggagatgcagttatgcagactaatatgtggctgtcttctaagctcatcctcatatcactttgtactagccctttctagttttaggactaagatgtaaaaattgaattaatatgaatagtggttactactttggatttggaagcctgtggaaatgtgggcacatttctctgccttcccaagctttcttctccttattttcagaatgatgatagtaatggtatttaattatagagttgctggcaaattaaatgagagtaacacatggttagtacacaatatagttattatttataaggggaaaaattactggttttcaattgctggtacatgtgaaatcagaatttcttttgacatctgtcttatctatgtttatttcccattattttttgtattttttctatattgtctctgaagccacctctgtgttttgcttttctgggagtggaagtggaggctcggttgtgaataagtacaattttgctttacttctggtacataaaattccaagacaacttagtataacaaaattcacattgaactaaaagttatgaaaagctgcttttactgtttactcactcctttaaatcaaaagaactggatgtaaactatttttttatgtcatctcctgttcttcaggctcttcggtgcctcagaaaacataaaagagtctgatttacaatcattttgggcaaattgcctgtagaattctaaggacaggaaatgaaaaaagaagtacagcacacacccccagacattccacacaacatgtagaataaataaacagccccaaaaaggaaaccaaaactgcttggtcttatgttgaggagggggtaccacaaatggcttttggagaaaatgtattaaagatgatgacatgctagaaaaatccttcaggggggtgaaattgaccctgattaaagatgatccttttccccttttctctacagcatagtgagtattttttatttagataacttccattacctgtattgacattatgaaaaagaaataccacgttacagagctgtgctttccaaaccttaataggcagggctgccctggggatctcgtggaagcgtaggtagtgattcagggaatgtggatagggcctgaggttctgcattattcacaagctcccaggtgatacagatgctgctggtttatgagccgtggttggttttcggtcatcttcttcaacaaaataattggtggtgatgttcttgtcttcatctgttcaagagtggttttcaactggggacaattttggcctcatgggaatttggctgtgtctggagatttttgattatgacaactcatgaagtgctattggcttcatgtgggtaggggacaaggatgctgctaaacactctatagtataaaggatagccccttataacaagaattttctgacccaaatgtgaatagttccaaagttgagaaaccctgctgcagaagtattattttatgcatttcttgtatcaaaaaatactttcttgaaattgttcaaaaaataaatacacaaaacctgtgagagcaaagaataggagcatctactacagtcatgcatcacctagcactagggatgtgttctgcaaactgtgtccttaggtgattttatcattgtgcgaatatcatagagtatatttacacaaatctagatggtagagctacacatctaggctgtatatcgcctatgtcttctaggctacagacctctacaagtggttactatactgtatactgtaggtcacggaagcacaatggcggccgggcgcagtgactcacacctgtaatcccagcacttctggaggccaaggcaggtagatcatttaaggccagcagtttgagaccagcctggccaacatggcgaaactcagtctccactaaaaatataaaaaaattagccaaacgtggtgtcaggcacctgtaatctcagctactcaagaggctgaggcatgagaatagcttgaagccgggagacagaggttgcagtgaacagagattgtaccactgcacaccagcctgcacaacagagtgaggctcagccttaaaaaagaaaaaaaaagtaaagcattagtgtgtctaaacatatctaaacatagaaaaggtacactaaagctattgtattataatcttatgacaccaccattgtatatgcagtttgtcattaaccgaaacatcattatgcagtgcatgactatttagtttagagagtaagcagcatttaaaactgtcttcaaatatgtgaaagactattatgcagaagatggtaaccagctgttctctatcacgctggaagaatgaacaggaaatgtacataaaaggacccgtgcaattcacccattctttttctgcttccttcatgccagctagacaaatctcttcatgatcttgcaaccatatttgtcctggcctgtgtcttaatacttgcagagaccctcccaaatcctgggtacacattttcttttcactgccaaatctcatctctttctccctttaaaaatcttaattgaaaatttctatctccataaaatcttccttaactaagatgaaatagttgccagttcatctttaactagagctggcatacttcttccttcaacatgttatctgtcagtctgaaaatatgttactgcccatctgtgtacaaggagttgtgctagattttgataaaggattaaaaaaaggtaagtaagagagtcattgtttttaggaattttccaatttggggggaaaaatctgacacagataactatatagtatttaataattatctccatgagaggtttcttaaaaaataagaaaggaggttttagaagtttaaagattacttctaggtagggaggtcaagaaagactttacaaatagatatatgggtgtatctttttttttgtttctttgatgaatttattcttcaaggaaaaagcagttactattgtcgccaaaatttaaagattataaattagagtagtgtggatttaaagtatatttatgaaaaaagttcatagtgagcaagggttaaaatattagagtgatttaatccactcacaatttataagactaggaaagataatttttcaggatctatgtggctatatggtggttttaacaaagaagactgaatttagccacctctgaatgtacctgatgaggctctgtaattttataagacagtgctctttggaaataattttgtttgtttgtttgtttggtttgtttgagacagtctttctctgttgcccaggctggagtgcagtggcacaatcttggctcactgcaacctctgtctcccaggttcaagcggtgcccctgcctcagcctcccgattagctgggactacaggggcatgccaccacacctggctaatatttgtatatttttagtagagatgggatttcatcctgttgaccaggttagcctcaaactcctgacctcaggtgatccacccacctctcaaagtgctgggattacaggcatgagccatcatggccccctggaaagaattcttagttacatctaggagaagaatattttggaacttcacaagcatactttaaaaaccagtaccaaagcaggaatttggcaccatccatttgagatggtgattctagaacttctttaggagacagtcttacttactaagagtttccacaacctgtactatgagaaaattaaaaagaattaaccctcatcaaatatgtagtatgtgccaggcactgggtagaccctttagatatatcatgtgatttaatctggataacaactggtgaatttatcaacaccaacattataaggaggcttcagagaattagtataaatttccatccaattaaggaagggaaacagagcaaatctcaggcctgcataggaagccatctctgagtggagaccatcagcttgccttttccttttgaagcagcaaggacaacatctatttttataaagctttacatggtgatatgtgcattctctgtagttgaaatgggaaaatgagctgttcagagttcattgatggccatggttttctgcagggctcactgctggaaaactatctgcaactgtattagtcatatatgaatctgagtttctgcctgctcttttccacacattctgaaaacctcagctctaggaatggtacagatattaaattagtatggaatttttttgaatgttaatatttgtgttctttaaagtcattatggttttttattttttattgtattattattatttttttattacactttaagttctagggtacatgtgcacaatgtgcaagtttgttacatatgtatacatgtgccatgttggtgtgcggcacccattaactagtcatttacattaggtatatctcctaatgctttccctcccccctccccccaccacacaacaggctgcggtgtgtgatgttccccttcctgtgtccaggtgttctcattgttcaattcccacctatgagtgagaacatgcggtgtttggttttttgtccttgagatagtttgctgagaacgatggtttccagcttcatccatgtccctacaaaggacatgaactcatccttttttatggctgcatagtattccatggtgtatatgtactacattttcttaatccagtctatcgttgatggacatttgggttggttccaagtctttgctattgtgaacagtgccacaatagacatacgtgtgcatgtgtctttatagcagcatgatttataatcctttgcatatatacccagtaatgggatggctgggtcaaatggtatttctagttctagatccttgaggaatcgccacactgtcttccacaatggttgaactagtttatttggtttacagttagtaatacagttaagagtggagaccttccttgagttttcattctttgagcttctttttttttaatagaaacagctttcgatggtaaccttaaccatgccttccataactcaaaacatgatggactcttagttaactctatgtaactggattttgtttttctcctaaagttgttctacgctgctgcgtatcattcaatgttgatgtgaaaaattcaatgactttcagcggcccggtggaagacatgtttggatatactgttcaacaatatgaaaatgaagaaggaaaatggtaagccagtgggttttgttgttgttatttacttatttcacaaggtaatgagaaatattatttgactacagtttcttttatgaatgaaactttaacagaatgaattatttatggtagaaaatgcagtctagtcatttggcaatggaagctaacttaaagtaaaaaaaaaaaaattccttggcaatattagaggaagcgattagtgatttctgttgatgcctggattgacctcaaggaaggtctgtatccaaaaaagctattgttccataattatgttttttggcaagaattctttaattgttctcatttcagagtagcttaaatgcacttgtttgaaattcagtaggaaggattcggaggcaaatgagatggtgctctgaaagggtttaacacacttccgtgagtttggtctttactgatctactgagcttggtctaatgtttataatgaactttattgggtttctggtatctaccttcaaaccctttaatattggttaagttcattgtagataggattttttttttttttttctgagatggagtcttgctctgtcacccaggctggagtacagtggagcgatctcagctcactgcaacctccgcctcctgggttcaagtgattctcctgcctcagcctcctagtagctgggattacaggcgtgtaccaccatgcccggctaatttttgtatttctagtagagacacggtttcaccatgttggtcaggctggtcttgaatttttgacctcgtgatccacccacctcagcctccgaaagtgctgggattacaggcgtgagccatagcacctggccgtagatatgatttttaaagtatatttaacttgttgaaaattatataaactgaatattagagttcttttgcttaatatttaatagaatttttagtaaatgcaatttttgtttaattggacattctaggaaagaagagcagtagctaaactttagtttaataacttaaactaaacaagcctacatttttagtagctgtaataataagcaaaaagagatttatatctacttggataataaagatctatgaatcactataattatttcattaataaaaatatgtggattttctgcattttgttttatcttttagacttggttaatttgataataatgccctaaagactataaaaagtaatgagttctcacattttttaagtacattattttatgctaggtataaactagaatttgttgagatacttcactcttttattctccttacaaatatctcagatgacaaacccaatgctacatgctaaatttttaagttccctttccctccctcctatactctccacccatcccattccccaatttttaaggttaaatgagtacagccctccctctagacaccagctttattcttttaggaattataccttcaattcaggtacctctgggagaataatggtgagtagaccaactggtcagactttgtgcgtaagctataataaacagaaatgcagtacatgttattcttaaaaagcttaactttacataaacacatataaaagttaattttcactaattactaatagttacacaaattttaaagaggagtatagcaaatagcaagctttaagacttaaaccacctacttaaaatgaagtatctcttttaaggatggttaaatattgctaaaatattttatgaaattctcattttcaatttctgatatcagaaaaacctgtatgttttctttcttatccagtcctgtctctgtgattttagaaaaatctgatgtcagaagtccttaattatatgaatgaaccttagtagagtgaaaaggggttcatatttctttttagaagccttagtgcccccatttgatctctttagtcactgtttctcatgataagaacctatcctattgtgagatttccaccctctaaattctacagtccctcctttcaaggcaccagaagtcaaagcaatggaaaattgaaaaatcaggcctgaatgaagccttgatgtcatgaggaatgtccttcctaaggttattctatctttgtagaaagttaaggtatggatgaggaaaaagaaagacagccaacactggttaaggaacaaaagagtgcatagattggatagtaagaataaggttgcaagaacgatgttgctaatggtctgtctgaatgaatctacactggactgaaccatcacaattctacatacatttgtgaggtaatgttaataagagatcggggactatgccttatatcttggtttacccatgaagctgagttgaattgtctctgaaaatatttgttggtgggttaggttttttttatttagccatagcataaatgtgggtcagtcaatcaacatgtatttatgtaatacattttatgtgtctggcattatgctaaattccatgggaaatatttatacataaaacaaatataaaagctttaacctagtcaaggacatacatgaaatgtttaggaatagagaatagtgccaacaaccagtgcagaatagactataaattcaatgggaattcaaaacaggaggagatgattcttggttcttgacctaagtcttgaaagatgacttaactttcaatatgagaagaaaaatgtcactccaagcttgggaagccacaagagcaagggcccagacttgagaataagtgaggtgagtgtgttggtaagtaaacaggtctcatattgggatgaaaaaagagaaaaggatgatggcagatcttgaaagacaaacacaggagcttggacctaagatgaggacgttgagaagccatcataagttgtcattttatgaaacttaatttgggaatttacatataaattggattggagaatggagttcctgaaaactaggaaatatatagactcaagaactataatctggtacttaagggatgagccttcaggctgtattaggggcaactggaagaaaaaagaaaggtgtattcaagacaaatcaagatgaatcagtaaatcttggtggaagtttggaaatggtcaatgaaggtgtaggagaggtcagatagattccaaaatttctgtactggctcattgggaaatgggttgtcattgacagagaaagggaaattcacttatcaggaagtgggtaagtctatttttaaatagctccagttcaaggtgatttctaggtagttggaaacctcagactggaatgcaggtaagagggagaagttaatgtgttagtggaaatgcctagaaaacaaagactgattttgcagcccacttgcaaccctgggcactaccccacatctagcatgaggccttatacataatatgcactcaatcattatttgttggctgaacaactaaatctagtttaacactctgttatcatcaattaaaaaaaagctgcataaaaaataaagttaaatgtgactctcctagggaaatgcaactacttaggaccagagctgtaatagatttcatctctacactcagtcttgtgcctttttcttcattagaactatatttaaaagtaaatgttgttaaaaactatctttgtggtaggtaccagactttacatattaatatgtgtgtaagtttgtaagcatttgaatgtagatgatatcagaaacctaaatctcacgttgacatttattatttacaatgattttatggaaaagttgtgaaaaatcagagcaaccaaaaagatgtgggcaattgaatttaaaagtaagcaaattacaaatacctaaatttccaaacttttaaggatagcatggtagcagcatattgttctaaagaaatctgggatctggtagtgcaaaataacctgtagaaacatgtttggatgttctgtaagtgtctataaaaacagatagattgcagacttacttcgagaaatgtgctacagaataattgacatatttggaggaacatggattttgttatttaattatctctagaggtaggcaccttcataagtcatatttactgctcatgctttcgaatttcataaactcatatttaaaaaaatcatcctgacccatcttacgtcgtgactatagtacgcctatagaaggagcacttgttagcccatgacaagtacagtctgtgtatttgaaaaacatagctttaattctttcgaaagaaatataagttgacagaaaaggtagccttatgtcctctttactgttcagaagtttgctctgaagtgtaatttatatcttttgctcagaagccacatgctttctcagtagcagaacacatcatacatctgattaagatcagctgttgttcattatgtttagcatgagctggagcatccaagtaattgcaatgtggttcagaagaattcagaaagaatataattgccttcataattttgctttgaggaaaagaaattcaaacatgctcagcacagcacaagccttccagatttccagatttagtggtaaacatcagcatggccaggtctcagccgaacgggaaaatgtgagatgtctgtttggggctttccactctaatctgttgctgctttgcttcattccttccagcatgtgtgcctacccttttaactgcccttcaagcaacctttcttgggggtttcagtgacttcactggacctgtctgatctcaaagtagattttcaggatccacccttgccaaccttcaagccaatgtttatcaattatcttgacttcatgccttttctctagaggatcctgctttatgccaggtcagggtaccaatgggctcatgtgattgatgccctatttccaataagtctgtgttgtaaaagaaaaaagaatccctgctaatgtagagctattccagactggggaggagagacattttaagggtttacacaattttctgtaacagattttaatatgcttattttacattgcttctaacgccttttgaagttgaaatttcctcattgccaaacttgtcatttctttggctcccctcatttccacccctccaccttttatgagcaaatcactgcagttaatgggtcactgtgtaagtttcattctctaagatgaaaaaatgcttattccatttatttaaaaagaaattggcgagcagaatttgcttggcactctgagagtgactttggcttgaactatgtattagacatcaaggcagagttagttgaaaaggatgttaatgaaataatgtaaatataagacactcttttccaagaaactatcttttgcagggaagaaaacataaatatgaaacagagacatcagacaccacctactcttcaaataaatataataatgggcataataacaagataactattgtgaatagcaaatatttctgcttactaaatattattataattgtagcttattcatggagaaaagtgtttctctcactttgatgatccttgagttgatcagatgtttctccagaaatgagtaacgatatccagaacatgttttgatcttctcagtctgcatacaggtcattacaaaaatgccatataaaaagcaagatctaataggaataaaacgtaataagttaaaactaacttgcattaaattttaaaataatgattctcacagtttataaaacaatgtgcctgggccttcaccttgaccctgtgggtttgggcggatatcattgttatcatctgtattttctagacaggaaactgagacagagaatgaatgtccaaaggtttaatatagcaagtatgtcacagggtcaggatatggaacaccagccttctgactttttagccaattctccccctttagcaacaaggattctctagctgtttgacctggagaaatgcctctggtgtcactcaaaggcatgtatagcatcccacttaagctgaatatatattctctaaaatggaaaaaaaaagattttacaatccagacctcttggctggtcacataagtataaattctcaggtctgccttattcagatttttaagtacttgacacagtcgttaattcattcattcaatagatatttattgaatgcctattttgtgcttggtactagtatgagcactaaggatgtgtttgtgaacaaaatagaaaaaccaatccctactattgtggagcttatattctactggggaatagagaacaaaaattaaataatgaagttaataaacaggtaggttacatcaaatgccagaataggatcagtgttgtgagaaaaaactgagcaagagagtggattgagaatgctggagattcctgaaattctgtaaaccctatgctaatacttttctaggatcttgttattttgatgcagttggagaaaagtgaggcttccttaggattcaagtggtaagatacacgtactttcaagcttgttattaaaagtttcatgtttgttttcaaagaaaacagatactaggaaaatacagaaaattagcagtcctatgatctgctaacctggtctttactattggtcccaactcccaaactccctgtctcaatcctgggctcctacactctaccactttctaagttctcactccgcaatcttcacttatctcagaatatgcaataggccgtggttgagattgctgtatcaggtcagtttccaattatcaccatatcctaagtgctttctcttgccctagagatcaaacataaactccagaccttttcctccagagccaaatgcttgccaaatctcaagctctctgttcctgtctataagcaagctttattctgagttctagccacccatactttctcattatcttcccttttccatcttcattctcctgtctccacacttttccctgggctatccatatctccctttccttctgccttacaattcacaatagctctcctattagcatgctgtacaagactcacttttcatcagttatcctagattttcccccacttgatattacatgttttccaactagtgagtcagttcttctctacaaacttatatttgttctattcagatgatggaatcttagaactggaaaggactttgagggcctaactcccatccactataaaaacaccttccgaaacatccctggccagctgcaacccacctcatcttgaccagaggagctgcctgacagacctacgtatgccttatcagtttaaatcttcatcgctctctacaagcccaccacccttctacctcctctgtaaatctcactagacaactgcagctattattttccaaagaagaaaaagagacagagagagagagagagagagagagagagagagaagccactaggtcaaaatttaatcctcacttcctgtttcagttaactattgctgcataataagtcattccaatacttagtcacttaaagcagcaatggtctataaattctcaagatttttgaggattgaataggtattcccctattgcctgggctcatcatctggtccctcaactggggctggagtgtccaagctggctttcctcacacgagtggaagttcatgctgtcagctaaagcaccaattctgttccacgtggcctcttatcctctgttaagcaacactgggcttcttcacatcctgatgttctcagctttcaaaaacaggtaaaatggaatctgcaaaggccttttaaggcctagccttagaagtcatagtatcatttgtgctgcattctattcatcaaaacaaatcctagattcaatgggtggaaaaacagattctacctcatgaaataataaaagtcaaagtcgtgttgcaaaagtgtacacaattccaaaccatcgaccacccttgcaaactgctcaatactgggctgctcagcgtgctgcctagggaatggtcgctcttcctcatttttaagacaaacctctccttctggatccaccctgtctacctgctcagagattctactccctctcctgtgaaatcaggatttctcttgttactgtttctttcttgccatcatttagccatatgcagattgcctccatgataaatttggacacatctcaagcccttaatggtttgtcattgccctgaaaaaaaaaagccacatttattaacactgcccatctccctcatttttagccaagttacttgaaatgaaatctgccacaaacatgtacctctcattcttgcctcctattctttatattgtttccttctttggtttctgtgacactgctgttttctgattcttgctccctttctgattacccttgcctagttttcttcctttgctcattgaaaccttaagtgttatttcaccttcagatgtcaacatttagtgctcttctcactatatttcgaggtggtaatatttacttttagggcctcaaccatgctcatatcatgctcatacatgttccacatggtttctgagatgttccccagcaagactgagcccacttgcctacagaagtaactcattatcagtgcatcctttcttggcctttcttccttcccactcttcttttccccatctctatacttatgcatacttggaattgcctccaaaaaacttacctgaaccaaagtttttgtcttggatctacttttggagaaacccgaactaagacagcttatatcctaaatatttatagagttagtccttccatcctctgtacttcctgaatccaaatcctcatctggattactttaggaatccatatcttgtcatttgactctaattttgttcctcttcaatttacttatgacacttcaagcaaataagctttgtaaatcaaaaaggtgatcatgttacacccctctttaatagcttcattggttcccaacttccccctacatagaataaagccaaagttcttaaagctgactatgagaacattcatgatctggactctttttacctctctagcctcaacttctactgcagttatactgagctacttggcatttatcaaaggagtggtattcttacttctaagactttgctgaagttgcatcaagttcagacctattcaatattgcaatagtacatgtatagttgtgcttctctctctaagttataagcaaactaaaaattgtgttttattcacttttgtatcattttatatcctcaggacctggcataaatgcccagcatgtaaaatattgttaataaacattaattactccagcctcaaattaaatactttctaaaatcgtaggctcatttttttctctaaactgtttttaactgtaaaaccaatttattccattacgtattttacaactgaaaatattaggaaaaaataatcgtaacctcattaatataatttgttatattcttgatgtattcctgattaatctttcaacatcgatgttagttgtttattcatctgaaataaatacctaataataataagaactaacatttagatagcacatactataagccaaatactgttctaagcattttatatacattaacttatttatttttttgatgatcctctgaaatggatctccattttatagataaaaaaactaaatcacagatggagtaattgacttgtcctaaccatatagctaagtgaatggtaaagccataatttgaactcatataggctggcaccaaagttcatgctatatttcatggagaagattaaattatttaatacacagaaagcacttagaacagggcctagcacatggtataaattcaataaagcctagctgccattatcagtggtagtataatgaacatagtaatttggtgtctttcatgttaaattagggcacagattttcactaaattagataaattttcactttgagttcgatcataaataatttttcatcctaccatacaatgaatgtacaatatgctatagaatgatcctgaaataattagtttttatttaccatatttcttttactctttcataattatatataacactatgagcattatctttgtgcattaagcttttccctcttactttaggtcattttatttaggatagattcccagaagtaaaaattatgtattaaagggtttgagcatttttgtagttctttatacaaatcagaaattgctttccaaaggcattatattaaaaccatgttttagagtctcaatagcttaatatttacaattgttttataaaatttattttcattaatactagcatgcctatagggcctacacaaaataaatcccatttcttttcaatatgacagactttcaaatatttaaattttcaaaatgtgtgcctaatcaatttgtacttcaatgcaacttctcagttctcctgcagacattctttctccatgccgaacatccccaactttcccagcatcttttgtctgacaaatttaccagactcctaactatctgagtcatagtctcctaaatacattccattgtgcatatgtccctcttaatttagatatttcagacatggcctgaccagcacagaacacagggggactatcactgcttgaccagggcatctatttccagcactgcagactaaagtcacattagcatttttggcactaaaatacgctgttgctcatgtttatgtgctatcatctaaatcccccatgcctttttcacatgaactcccattaagtgagggctcccacatcctgcactgatataaataatagtatgcagctgagcgaagttatttatgtaggttctaagtaaactttagtttatttatgtttattgttccagaatgttgagattcatctgaattcctaagtatgtatattgatatacttgataagtatttttttcttgctctgtcttatggtgctgattgataactatatttatactttttatatcttgactaaagtcattaataaagttgtcatctggctgggcgtggtggctcatgcctgtaatcccagcactttgggaggccaaggtgggcggatcacgtggtcaagagaccgagactatcctggccaacatggtgaaaccctgtctttactaaaaatacaaaaattagtcgggcgtggtggcgtgcacctgtagtcccagctacttgggaggctgaggcaggagaatcgcttggacccaggaggcggaggttgcagtgggccaaggtcatgccactgcactccagtctggcaacagagcgagactccgtctcaaaaaataaaaataaaaaaataaaataaaaaaataaagttgtaatctaacacaatcccaagtacaaaatctcatactatgtaattaagtcctttgattgctagcagccagagtttttggatatggctactcagccagcaataaatcagcaactgtggatccacccaagtatcttactatttactttagttcatccgattcctgaagatatcatgggagacttaaatgacttgttggaactaaaatcagttgtgattatatgttttttccattaattactgttagaatggttttataattctgtctaaaaggaaagtaagtgattttaacctggatctcataaactatccttattttctaagcacttataaactagcacatgctaatattaaatcttatgatgttccaatgtttatatttcctgacttctctataaaattagcagttcatcataggaaaaagtcacttatacttccacatgtgttttataagttaatacagtagcagacttagccaataattattgattatttcagtaccccaataaaaaatatgataaagtaatataaacaaaataataaagcaaaatctctgaaatatctatcctacatatacacacacatatacatgtatatacacacatatatatgtatatacacacatgtatatgctatatatgtatattgtatatgtatgtgtgtgtgtgtatatatactttttaatccacatcaatatgcaagaggtaggctctctgcttagtttacataacattaaattactaatagcatgattattatctgattatgagtgttattgtcaattatcttaaaatcagtcataaaacaactcatataaactgtttctcaatgttcaaaaatgtttactgatttatttaacttccagggtgcttattggttctccgttagttggccaacccaaaaacagaactggagatgtctataagtgtccagttgggagaggtgaatcattaccttgtgtaaagttggatctaccaggtatgtaaaattaaaaaaatctggttttaggccaggtgcggtgagtcacgcctgtaatccccacactttaagaggtcaagacaggcatatcgtttgagcccaggagtttgagaccagcctgggcaacctgacgaaacctcatctctacaaaatatacaaaaatagctggatggggtggtgcactactgtagtcccagctactcaagaggatgaagtgtgaggatcgcttgagctcaggagtttgagactgcagtgaatggtaattgcgccactgcactccagcctgggtgacagagtgagaccctgtctcaaaaaaaaaaaaaaaaaaaatcaggtcttaaattatgcccagtattctcactgaaaacagattttgggctgggcgcagtgtctcacacctgtaatcccagcactttgggaggccgaggcaggcggatcacctgaggtcgggagttcgagaccagcctgaccaacatggagaaaccctgcctctactaaaaatacaaaattaagctgggcatagtggtacatgcctgtaatcccagctacttaggaggctgaggcaggagacctgcttgaacctgggaggcagaggttgtgttaaggcaacatcacgccattgcactccagcctgaggaacaagagcaaaactccatctcaaaaaaaaaaaaaaaaagaaaagaaaaaaaacagattttaatcaactcaagaaaatattagaagtaatctgtgtgtcagaatggtcgagcggtctaaggcgctgagttcaagaagtaatctataatcatttttcatataatcatttataatctataatcatttttctataatcatttatcttccagattgacatagaatgccattttgattccctctgtccttaatttgctttagaaagtcatcaaggagcatacataaattagaataccgtactaattttataacttttaactctctgcatttttcagaattctttctaattcagtggtaatgtgaaagaacttctccaaataaacctgcccaccacattccctccacaaaatttaacttagtgcctggttttcaagaggaaatagaatcagaggaattgtaatagataaatttaattttaaaaatagaatcacacaagataaatttatattgaaatagatgtatttgacataaatagtaggaatgtgaccggaaaattcctactaaaattatctagaaattagaaccctgtcaatgttctatacaatattacatactatggaaattatttatagccccacaagtttatttcacatattgtatttttcagttctcctttttttgaattttctatttgtttgtttttatgaactttttttctttacatgcataagcatacttataatagctgctttaatatccttgcctgataattccaacatctggaatatctcaacatcactttccatttattacctttccttgaggttgcatcacattttcctgtcttgtcttgtaattttggatcataacctggattatatttttgaattacaggtgtggagattctagattctgttatatgcctgtgaatagtcttaactttttttattagcaggaaatttacttggctcaactcaatttccaagcattgactttcttgcaatgacaagtagttaaaatctctattcaggttttatttcagctgggctatttgaaatatactctgcgcatttactattcaagtcatctagttatttggataaaatatatatgcatattatagaactgttgttttgtggctctttttctaagatatactactctcctcctcattttgcagctgctgtcattgccctcaatctctgttctctttttattcagtacagtaagactaggagttctatttgagttttagccactgaccagggccttccctaggttgggggtgggttaggggtgggggacaaaaacaaaacaaaacacaaaagcacaaaactcatttagtgccagtatcttcttccaagtatggattcccctccattttctgccacctttctagtgccttcaggtgattgtttcatgtattttttttaattcttcctagaatttatagttgtgatttgcagaggagctgttttgttaggagttactcctcccttactggaaattggaatagttttaaaattaggctagagattttagccacatcaagtacagtagggaagtttccactgtagtccctaattgtcccaggaatgctttttctgggtcaagctttgtatataaaactctaatccagattatacaagatcaatgcatacaatcgcccagctctaggtgctttcaaagcaaaccagactaaactcttggacaaaggccattgcgcagatcaggaagtctaactgaccattccagaatctctgcttccattccccactttaaatccacatacagtcttaacatgaaaacaacctctggaacaaacagtgagacaaatctttctcaacctgaattttgcctctttctaatattccactctactaagcagatttagaagttcttgtttttcctgtccagtctttttttcttttttagtgtgagaaagtgaaacttcttgccaatattgttaggctggcatgcttcatgcttcaggacccaacattcccttcagaatgtcaaatgcagtctctttactgtgtttcctttatcaaaactttctggacactgctctaatattcctctagtttcctttgtcacccaaaggatgtcctcatgattttggaagtcatggtcaaaaaactggtgtttgagttttcttttctgatcttctacccatttccccttttcttgccaaaaatcgtgtttcatcactggtcatttataacaaagttataagattacattatatctacagtattatgagattaaaaactttgctttaattagcaagaacgtgcaaaaagcaatcccacattctcattgccctgctagttctgcattctttcacagttcagcaaaactatctgaaatagtttctgggacatgagccaactcttcagccttagcttgttcattatattccttaagaagacttggaagactaattagttgaaccaaaagaagaatgtgctatgatatgagcaaaacaaatagaatgtcttaatgagagatgcttaaaatttcactttgtgaaacttttcctccctcataaaattttgttctatttttagttaatacatcaattcccaatgtcacagaagtaaaggagaacatgacatttggatcaactttagtcaccaacccaaatggaggatttctggtaagaatggagagaatgatatttattgacaacagatatgctatcattttaagtctttgtaagatctgttatataattttcagtctaatgatttctaattttaaaacaattttttaaaggcttgtgggcccttatatgcctatagatgtggacatttgcattacacaactggaatctgttctgacgtcagccccacatttcaagtcgtgaattccattgcccctgtacaaggtacagattttatgcaatgttcttgcatgtttgaaaagcctatgcaatgaatgagacgtatgtatacaaaggaacataccaaaaagcttaaagtattttcttagctaccagcattaccaatttaggtaaatgtttgctttgccagtatataacaaaatctgactgctatttttggaattgatattagtgtaaataactttacaaagtcatttttaaacatcatagataaagctgtcatgctgcttatatttaaagaatgagtctctttgaagaaagaagtaacttcatttgagatatgctcaaaaactgttttataaaaacttatataaaattcatattgagaaaatttgcaaagataactctcatacaatactaattaaaattcagtaggtatgaattttatcccacaccaattgttattgaaagcaatgaatatttttatcatctttactttttcgaaaactattttttattgctaaaacaatgtgtctactttggagaacatcagttcatcttttaaaatgaacttctttcagccatgaaagcacttcatatgcctctgaaaaaaatagattccaaatttgacaattgactccttttattgcagaatgcagcactcaactggacatagtcatagtgctggatggttccaacagtatttacccatgggacagtgttacagcttttttaaatgaccttcttgaaagaatggatattggtcctaaacagacacaggtatgtgactttgtgttttgatttctgttgttctaaagataaaaatgcacaaatttttaataaaaccaaatattctgaaagcaaattaatcaataaaactaaagttgagaatgaattttatatccatttcctgttcttatttctgataaaaaggacattactttaagctgtgttattttctatttttttcttttttcttttttctttttcttttttagacagagtctcactctgttgcccaggctggagtgcagtggtgcaatctcagctcactgcaaccttcacctcccaggctcaagcaattcatatttctcagcctctccagaagctggaattacaggcatgcgccatcacacctggctaattttttaaatttgtaatagagatggggtttcatcatgttggccaggctggtctcaaactcctagcctctggttgatacacctgtctctgcctctcaaagcattggtattacaggcgtgagccactgtgcccaacctaggctgtgttattttctaaacagaaaatattatgaaagctgccatttttaatgcacttgaaaaataactcctatagagttctataaactcatagtttaatttttacttaaaatggatatagccacttttggtaatgtcagagccgggtgtcagagtttgtaaaaactaatctgacatcccaaacaacccatcacattataatctctcctctcatattatacaaataagttagtaactgaccagaggatactacttaaagcctgttgtcctttctgttaataatttcttttccctaagttaaaagaaaatgcccctggctatctctgcataaaatcaaatagttgtttgtttatccccccaattaatatctatttctaaacacatctcctttattgccactaaatgaagtggaacttctcacacagcttttccactttagatactgagtttaatttaattacatttaattaaatacatttgactgatttaatgtttattaaactcatatgggcatatatattaaaatacagggcagacataatggataacaggcaaataaaatgtcaaaatgaagtcaatgcctcaggtcaggaattagccctagaatcagagcctaaaagattgttgtgtggtttggaggctgtagagagcataggagactttaagattatagtactgcaatcaatacagtgatcttccttttttttttttttttctgaggactttactttgggagaagtttctgaggcactgaaaaagcagactgactgcgttaatgtttgccacacctacattaaatttggaacataatatgtgcacatatatatacatacatgtgtcttcatgtgtctgtgtatatttatgtctctcttaatattttgatatctatgtatatataattttctaaaaggatggtggttgaaaatttcaaagttgaactcaaacttcaaagtgaaatgtattgctgcattccaaggctgaataggtctctgtagagagtgagtggaagggtaaggttataaatatcctgctggacaatagagaacttgttgaaatcagtgtaaaatcattaaaaatgaaatgggcttttacgtatcacaaaatgtaattttccctggaagtgacttatttgcaattgaccttctcaagtgaaattactagtggatggtaggggacctttttatcccgtcttgctacagggtacagggcagcctgcatcttaacagaccaactccaggatgtgacttgctcttccttctggcacctgttcctcatggacctccttttttcccttctgagaccactcttccttcctcctttcctcgcttcccctatcccttctctccttggccaataagatagcatagagtcataagattaaagctggaaagaatcttaaaggtcatttggcccccaacctcaatttatgaaggagacacgagaggctaactgatttgtttaaggtctttctgcttgctgatggcagattagaacacacacagctctctaattgtagcccagtttgctgttgttttttttctttctgagggctctacttctagagaagcttcagagccagtaccatctaatgcccctgaatagtagatttcaatccttttctatttcatgaggatgactgtcctcatccttcctcaggcagcctcttggctgaaaccgtgctaggcttggcaatgactcactgcctggactaataccttaaatgaaatggcttgtgttcccgctttctccacttttgcccatgatgtgctttctttccttcttcttgttttgtccatcccatttgatcttcttacctaactttttccttccaaagctaataacatgcttgaaatattttttacaatttattatacagccatctaaatattttattttacctttaaattcacttatgtatattactcttaaaaattaatttatttgtagctatttgtgaaaattagtgcagctgtgacatgtctgaagttggtccacaactttagaaagaaaatccatacggctcttttagaacaataattacagcttctgtgaagatctatgccagtgactccattttgtaaagaaataaataacagtcaattgcttatatgctcaagctattcttctgcaatttcgatgtttttcagttagaactataattaatttacatttctgtgttgagagtcctaaaagaggagctattctgcctgtccaccagaggaattctagcctgccagagtgggcaacatgaagttatatgtattttctggagggaacaatggctctattcagacaaattcaggagggcccttggggtccagatgctaccagtgaatgggaggaaaatgaacttaccctgcagcagaagagttcagttacatttaccaagatccaggacctcaatccacagagaagaatatttctgaatgaagcaccctgcacagtgtcgtttacattatcttctgacttcacccaagggaacctgatttttaaagagagaagctgattatatttctgaatttttatgtcacatcttgctttcatcattgattgtggagcttaaccatatacattcattcatttattcagatgtatgtactaagggcttactatgttccaagctctatgctatagcttgggtaatagtggggaagatgacagacaagggtgatgccttaatggtgcttctgtctaatgccatgtttctccaattatggctcatggaatttctgcttccaaatcactgggatgcttgaactataccccagattttcaaaatcagaatctctgagggtggggctataagcctgcattatatataagcaacccatatgattcttttctgtttgtttgtttttttgacaaggagtttcactcttgctacccaggctggagtgcaatggtacgatcttggctcactgcagcctccaccttctgggttcaagcaattctcgtgcctcagccttctgagtagctgggattacaggcatgtgctaccatgcccaactaatttttgtatttttagtagagatagggtttcgccatgttggccaggctggtcttgaactcccgaccacagatgatccgcctgcctcggcctcccaaggtgctgggattacaggcttgagccactgtgcctggccccatatgattcttaaacagattaaagtttgagaaacactggactaaggcataattattatattagtgtgcgtgagtgtgtgtctgtctatctgtgtttgctgcatactgtagataataggcacctcaagagcaaagtctgcatcatcttcttatcttcgtcagtggccagcccagtggtttactgtggcacagtaagtcctcaatgagcacttgttgagtaaatgtttgtatcatattgagtccagttttgtatttttctctgattattggacatttaatgagtcttttttctataactggtattttaaaaattattttaagtatattactttatactttattctctagtattcagtcttttctaatctttttttttctattttggcttatgttttatcagtgactaaattcataaataattctctaaaatgaagagattggaaaggacatatttaccaagccattgcttttgctaaataacatttaatagggttttaagtataatgcatgtgaactctttttaaagtttgatcatctttcagtggattcagaaaagaaatcctgtcatagaaaatttggaaagacatttccttttcaaagaaaatatgtgctgaaaagcatgcttatctttcatgtagtcttacagtaattctttccaaaaactgtttacttgacaatcaattctttttcttgattggttgctaatgtaatttaaatccatttgatttgtttgtttgtttgtttttagttttatttgtttcttttaatgaaagcattcaattccaccctatgattggcagaattaacttctggaatttattctcccctttatgtattctatctctgtttctgaaaggaacagatgtaaaaatgaattgtgagaaagattacccagaggagggtgcaaaagatagaaagctaagagctggacagagaacttttagactcctcatccataccaaatttctaaaagactatgaatgtagttgtaagatttgtagagaggatttctctgtagaaagagcctactcagaaaggcttcagtggggtcatacacatcttagtatgtgtatactggagttgggacacatagttgattgactaatgcctaactcctgtctgaattgtcagagcatgacagcagctgttatgtctagctgctgacagggaagtcggagcagaggtcactgcactggagtcagcctgcatccccagagattgttagaatgcatgtgttttcccaggattggcatgggtactcaaaagcaagagccagtgtgaggtcatgtcagggcctgtccttagggattactggaagtgagtggctgcctctgcagagaatgcagaagatctctgtaattcttaggaactgaggcagtgggatgcattcactcagggcaagggtgtaggtgagatatctcaatgaagggagttctccaaagaacccttgaaaaacttgtacatacctattaggacctgattcatcttaggataataccaatgcagtaataatttctctatccttatttatcttccctacctctgtccctggaaggtcagaaatcacagttagcactctaagtgaaaacaagtaggaaaacaaataaaagccagtcatgcatctttctcaactacaggcttcttacctcgtgtaagcccttagtagaagtaggagagaagatttaactacaaatgcgctttgatgtttcgccttgttggttttaatttagacagaaccatatgaaagtattgctgtttgatcttttttttcccaacctacaaatacagcaatttcatttggtacagcctaaattaaaatatataactttttaaattaacagacattttaaaactaagaataaaaaaaagtcataagatatttatctttccatctagggatagcaaaatacttcactttaaataaattttgaaggactggtgggccacaaataaaggttatattctaattacacctcctgtatttttgtttgctgtattgattagttacacatttggtacaatagatatagattgaatatgattcctattctctgcagtcatagatttgtcatttagtaattgcaagcaataaaaggcagagtcaaagatatggaatatttcccaaagtaactgttacctccaaaaaacaaaaataaaaaaaaagaaaaggaaagggggaaggaaggaaggaaacttacattaagttttccatgtgacaatttagtatacattagggaaatacaacacaacgatggaaacattcactctaaagagttactcaaaatccattctatgtttctgtgtggcccaattaagacttttgcaagcatagtcaaggaatttttgtcaaccaattttttacccaagacagagtaaaggctataaaattgccttttaaaaatcacctataaaaacaaacctgaaacactctgagcttgccattaaagatatgatggtgtaaacattatggaggtcttattgatcctcaatacctaaacataacattgcttttaataataaatgaagataatataaatatgtcaaataagtgtgcattaccctaaataaaaccagtaaattgtgaggcttgatataaaagtgaaatatactaacggaacaatgtctagattgttcacatcaaaagtgtagcatagcattaaaccaagcaaaatgaaacagagaaattaattaaattttaggaatattatttatctttctttttactgctgattttatggccatttccctagaagccttaaatctggggcctgattcattgtttgtaggtctgaaaagaagcctgagggagacatgcagccatacctttgtcagtctgcttacagtttccgaatgtggggtagggaatggggtgaatcttctctctcactagcctctagtctccattctcccacccctccagccatcaggcactagaataatcattccgaagtgagttcagaacatttccctaataacaaacaaaaaagaaacaaataactcttcttgttgcctgctaaataatatccaagctctctagtggactaactggcatctgaccacctggcccagccatttctcatgcatcctgcttccccttacacccgcctcagtcaattttttttttttttttttgtgggtggaggagatggagttttgctccgatctcagctcactgcaacctccgcctcccgggttcaagctattctcctgcctcaggctcccgagtagcttacccttcagccattcctgggcccttgccttccttgttcatgaagtgctgtgctcttgttacttgcttttcctgtgattccctgctccatctcaagcgctgtattctaggagaatttcaaatgtcactttctctgtaattttctatgattatcctacccactgttcttgagaaaaatgccttcctctcctatgttcccatagcagctgcaaccgtgagagcacatttccttactgctcttatcactcagtagcattgctctttgttttttgggtctgtctcttctagtagactgaattacatgacgacagaattgtgccttagtcttttcatttatggaagatagtctagggttttatgtttcctagcacatgacatgagccatttatgttgaaaaaatgggagtttttgaattttcaccttctcatgtataaaatcgttgtttttagtgacctctttcccttactttgcttcataaagtcatattgatccactgagctggaaggtacttgcttgtgggggattcccctggacaaccctttacattgtatttcagtcttttctttgcaggtgtttacccacctagccctattcccctcagccctaatttctcctatagcccttgcccttctccacaaacacagtgaattaactttgttttaacctctcctatctttgcatttttgagcctacgtcactttcattgtagcatcttccatgaagcaagagtccagataaagataccctttttctagaacctgtatctattatgtatcaactttattatgtttctgaacacttgtttccttaggaaataatcatctacctgtaaatcagtcccatttatatccctctttataatgacaaaatgttaaacctagcctctgctaacatagcttcagaatggtttgtgctaacagttaactgggattgtatcctgtattatcactacatttatatcctgacttagtcacactggaagcatgttgtagggtagggctttgtaccatagtttgataaaaggaaatatacattggccagacataaagcctgagctcttttcatattaggcaattgtgcatcttacaggaacacacaaaaacacctcattgtttcaccttgtcattacttctgtaaaggaacaattgacttggtaatattagttattgaatgaaagcccagaaacttagcttatgctgggcattaaaatttgggtgctggtgtaaccctgacttaacaagatagatatagaagataataatataattattaattaatagataactccattccttcataactctttgactaaatatacttatcctagttgagtttctgttgctataacaaaatacccaagactagacaatttgaaaaaaaaaaaaggtggattatttagctcatgattctggaggctgggagggccaagatagggtggctgcagctgttcagcttctggtgagggccttgcgcttgggtcataacatggtggagaaacaggaatggaagcagccacgtgcaaaaagaccaaacacaagaggcagcctcgctttgtaacaacctgttctcttgtagtaactaatccagccccacaagagtgagaactcactcctgtgataaagtccctcttgactcctctttttgcctcttaaaggcaccacctcccaacaccactccattggagaccaagcatcaacatgagttttggtgtctcggtggggacaaaccatattcaagctgtagcagaaacatagctactttagatacttctttttcttaaacactcttatcatttaagatagttgttaaaatcttaaacatgactttcagtttcataagagactaatccaaaaggccctcctttcagtgttttctgatagtgtccttcctttcatgttcacacactcacttttctccctctttcttctctgcacccaaaagaaatgaagtcattggataattaatttgctttaattgagcagatatttataaagtgtctggacgatcaagtattatgctaggtgtcaagagcaataaaaaaaatcactgaaatgttgttcctgattctaaaatcttccaatttagaaatgaggtaaaataatatattgggacagctacaatgcatgatggtatgtcataaatataatgaaggtgaatttaaaacacagaacaattagttgatcttgacaagtaagtaagtcttactgttgtagaacattgtttcccagtctgaggtgttgaatatgatcctcacaaaaaaatattactttaaataagaataaaatataccaggtcttccaattagtaatccacaatgcatgtttttaaagactctgagaaaactttcaaaagaatttgcttataagtctaaatagaacaagtagggataggagtaagagaaaaccttactcttttgcaccatttgcaatttgtgacagttttcatagtgataggagaaaggtagagatggggaggagtctgccgtaaagatatatatttaactttattttactcattgttttccaagattatttgaccatagaattcttttttaaatcaaacttagtaacatacaaagggatgctagtattcccaaaaaaaaaaaagtgagtggatatttgtgtgggggcttaccagaaaatatgattgtaaatctcatatttaagtggaatgttctaataagtgttacaaacctcttgttcatgtaacaaaattcatagccaattgtgtacctgatgtatgccatagcctgaatcagcctttaggtctctttggccttggattgtaattatctacccatctatttattttgttctacttaatcaagaggtttaaaccacatctccccaggaggtaaatgtatcctttccagttgtctctgaaaaggaattttccttctgcatgtgactccttatcccccgtgatattataagaaactgttctttctatattcatctactcttttactgataccacaaactgctctttacaatctctgggaaagaatgtccacatttaacccggttgcacctttttagctgtcatccctgcatacccatttctattcatcaaaatgcctaggatatttccacctccatgatttgttgtcatcagctctctatccaacttccaccatctgacttttgtatcatcccaacgtaattggctacttcaagtcaaatattaggattactggttttttttttcctttttcctctcaatttctaggatgacttaaactcctttaattatcatctttgacatattttccaggctgagggccactttgtttccttccatagtactttcataatctcttggctatttttgagctggctttcagattcaggaagctgaatcctccttcctccttgaggattttcacgtgggagagaataaatatgcttgtgattttctctcctcttgcttcctcacgatgttcatcacttggctcactttttaacttgctatttaattctcatactttatttgattctgctacatacatttacattatgcttgttttattagccttaaattataagctaaggtgaaatgggaactatctctgttgaattgaatctcaccaatattcagcacaacattacatttgtttgtttgtgatttgacccttgtctgtaatgaaaattaacactaggttagtgccaaagtaattgcggttttgccattatttttaataaatggtacccttttctggggaagactcacagcacaccttactctttctggttcctaagaaaacaagcaccccggtatcagccagggaactacattgaatgtcatttccctgagacttgagtttttccactgctccctcttcacatttcccagacttcgttgtatctctctttttctgcttatcattatttccctgctatctcggttttccatttgcttatgcgaaatgttacagtcatctagtaagaatgtcttagggtcagctgtgagcaaagcaaaacagcagtgaaggataagagaatatcaaaagccatgacatagtccatactctttacccctgcctgtccctctaaagttaggatgtacttgggaagatatagtgtgcactcaaacagttgagaagaatgcaatactcacagacaagtttgtttcagagttccaagaaggggaagctcaatatgggctatcctggcaacaaggtaagaaaagttttgcagagagagtggaactggaattaaatcttacaagattagcttagtaggagggacaaagaagtgcatttggtaggagtggagttcatattggggagtcctgaagatgggggtgaatggagaatttagcattggaatattaagggactgaaggtcaagaggagaaaactggattttaacatatggacctagtatttcaaggagtagcttgaagttttatctatttttaaaaaattagaataaaaatctatcttttaaagtatatttcgaagtcattgatacaggcaatggagagttattggaggtttttgaacaagtatgttataggatgaaagcagagtttcaggacagttagtctgccaggaatatgtagaaggatgtgaagagagtggaaatgaagagagggagatcagcagcaaagagactgaccattgccatggtccaagttcaaagcaatgatgtctggcctgagctaaggtaatgaggtaggaggcgagacttgactctggagtcgggctccaacaccagatcaaattgaggactagataaaacagggatgaggcagaagatgccttccataaacacgcccaccagggtgccatgttagtttaccattgacatggcaacaaccaggagttactgtcccattccatggcaatgacccaaggactcaaaagttattactccttccctagaaagttctgcatacaccacctcttaatgtacatgtgattaaagttaagtatgaatataactgcaaaactgccctgagcttctcctctctgcctgtgaggtagtcctgcctggcaggagcagtcacggagccgtaaggccaccagagctgtaacgctgcagcttcaaaataaagctgttttcttccacctctggcttgcccttgaattctttcctgagcaaagccaagaacccttgtgggctgagacccattttggggctcacctgtcctgcatgagtaggaatgcagggacacagttgacagctgccttagatccagctcccagaagcaaaccctgagaggacgattcacatgatagtgatatatttgtgaggaagcatttccaacagaaagcagatgaattggggaagcaaaacaaggtatcaacagaggacaaaggaaagtgtaatttcaagtggaatccaggcctcagcttgatatggaaggggagtttctacttgagtcaaggggctgatttctcattccctgcactcaccattgcctgtggatcagggtgatggggagctgaggaggacgggggactcccagacactcctggttttttcagtctttggggtaaagcagtctagtagctcaagtgcagtcatctgaagagagtctcaggtagagttgttagaagcaaagtatccagagcagataagggaataggcagttataactcatcttatattttaagatttacaaagaataagcttttagaagccaggcacatattggaggtggatagatggatgatagagatgtaaaatttaaagcactgatttctgacttaccaacattttgagttttttactattcctagtgtgaagataatttttccggacaatccaatggttcatagtaggttctttaagatatgtaaagtgtgttgtaaatgtaaagtattaacacacatgtggcaaaaagcagtcttgttaagttggcatctcttcagctcctctcatgtgagctcatccccacatgtaagtgagataaccctttttcccaaggagttggcagtttacgacaattagattaaaaccaataaatgagaacaacgtggactcattagtaaaaaatagttgtagtgtttgacagcgctcaaatatgcaacctcctttgagattcatggtcattcctttaaaaggagaccaggttacaatttgtgtgacttgtgtctagcagcattcaaagccacagaagcatatagagaggaggagataattggatttaacccgagttggaagttagccaagtgagtcattggagggaaaaaaaggttaaatgagttaaatgtttgcaaataaatgattatagtcattggaccatggaatctagtctaagtaccaaaaaaaaaaaaaaaaatggcagtattaatgaattagttggaggtcttgatatggtcagggaattagtgaaatgagccaaagttaatgttcaaaaagaaggacatttgaaattgggattgacctgctgacaaggtcttccaaatgacaaggtcaaggataagaccttgggagaagatggctagaggaaagattactgatgctggggaggtcaaagaaatgagagactagggtattccacagattatcagtggatactagattaatagattattaagtagatgccaaaattttcaagaaaaacaacaggagtaggagggaaaattttcaaagttctttagcctcttaatcaaataaaaacaaaggggaagaaaaacaaagcaaactgtaagatgtccttaattgatgagcaattaacttccacaacagtgtttgttcactttgatacctagaattagccataatgattatccaagtaacaaaaccattttgcttttatttacactgaacatttatatacccaaagacatgtgtatccatggatatgtcccttaataattattcagtgtttccaaggattactaatcaaaaactttagggtcattgaagaaaagaattttaaatttatgcagagggtaataaaaatgttcctcacattttattataaataaagaaaatatcctgaattgcagtcatagatgtgtctttatccactttattatttttgtgtaattagttggctgtatcctatcttgttcccaaagggtcttttggtcacctttattccaaatatagtagctctctcagaataggtggtaaaggatattgggtgaaagataaactcacagaacaaggctaacctggacatgaattgagcagagtgcatgttcattcagctgatgatgtaacctcatcttacaattacatatattctctagttatttcttatttatcttatacctaactaagcaactttaggagagaattcatatgttctattattttttacaaaatatgatatatgtatttatgtgtttgtttcatcatatactctaacatatctcagttaactagctagttaagcaaattcattgagtagccatgaagtggcagtggcactcagcagaagctagcaggttgaggtgactaaagaatggaggattttagatagatgcctttttactgagaggaaatagggtgattgaaagagcccttggataagggatacacatcttagactagaccccccttccaccacttcactatagggattgggtgttttcaactcagtttcctcacttatgaaacattatcatgtttctgttattataatttaaataattagagaagaaagttttaaaaagaccattaaatatatatcatagtattcttatttaagcataaggacataattgctccaacataaccagtgtactctagagggtaactcaaagatgataaaaattgctttaaatttgggcttctcttatttgtttctaaaaacacaccagaatatgcttttagtttccaaaaagacttagtgtgaaaatgtacatataaacagacatgaaattaagactaaagctttctgacatcagtgatttcagcagaggagcctggaaaccagttactgagccttcatgctacttaagaataaggttagactaagaaataggatttgctctaaagcaagtaacagaggcaacttcaccaacaggcaaagtaggcaattgccttggaaagaaggcaggcttgttgcaaattacctcccttacccaagtaatgaatcacctggaattcctgaattaaagagacattcctttgggcaaataattttctgagtctggattttgagataggatggttaaacaaaaagtcatcttcagtcacaatttttaatgcagattagtttattggttcacatcaacctttaaagggagatgtggaaaaagtgtaggagagatagccattactggggccaggaggcaggtgggaagaggaagaatatggagcaagggaaatcaaatctgggggcactttccctcctgtatttcactgcatgaaggctctgcagttagctgcctgcgttatccaatctgtggactaaagggaatgaaaggaggaaggcagtaggaaaggaagacaaaacaaggaaagaaggtggagttgggaagggctgatttgggagaaatgaggctgcagcaaggttagacaaagctcactgctcaagtgtgtaaccctgcaggctacataacctgattattcctccagcttcatggtgccctcttctttcctcacagccctggccatggctcactgcctttctttccattcttagggtagatctatctctttcccatcctggtcttcttcacatacacagtttcccctgtatggacgctctgcccttctagcactcactcttgaagtctcagcttctgagaagccttccctggacccccattttcagtctggcctctagattatattggctgattagggattttcccatacagtcctttccacagtttgcaattgttcatgtatttgaatgatcacgtgtttaatctctctctccttctagctttagagaagctccatgaaggcagagaccatatcagtgtgtttcatattctacccaccaaggcctaccagagttactctgtaaaatctgttgaattagataaaccaatcgtttgagaagtttagtaacagcatgtttgcttttgttctttggactacgaacagtcacagaatggctatgcttattactgtcaaaatagaagcatttgtgtactgataggtttgcaaactcatctgaaatgtattatatctgattcacatggttaacctgaagaaatctgaacaggaaatttggattgacgtataactcacagtggcttggtatttcaggttggaattgtacagtatggagaaaacgtgacccatgagttcaacctcaataagtattcttccaccgaagaggtacttgttgcagcaaagaaaatagtccagagaggtggccgccagactatgacagctcttggaatagacacagcaaggtatatggataaaaaaataaactaaagtaaaagactgcaaaaataactgctcatgatttagccttttggcatatcaattgaaagtttaatatgacaatatttaaagccattttgtttaaaatgagattcagaagattaaataatggttacaagatcagatgtttgtatgacacaatctcaccatccttcttatccttctcttgttacaagggtttaattgatagagaatccattttaaaatatcactgcatctatattttcatgttcttgggtactaagacaatattagttaatatttgtttcatttattttttgttttcaacttctaagagtctcaatctaaaagaacggattaaaaataggtctacctctactcaatatatatttatattctagaatgtccatgtattttcagtacttgatttaccgttatcgaagctactagataagaggtgttaaggcgccaaattaaatattgtctatttaaaatcatttttagtgcaaagtttgaaagaaatggaaaggatattatcatttgtaatcctctctccttttttactttctttagattccctccaatttacaacccttcctttcttccatctgcagttttccttatggtgaacacataactcagtctgtggttgaatttcattttataagaacgaacagaattgtcctctcttacaaatgtagaacactttatttcctgtgtgttctcttatctcattcattaaactagcaaacttctgaacaaattcaaaacaatacaaaaatcacaggaaatgtaataagtagtttgattaatgttaagaatccttctgttaaatgtcttcaacttctgaactcttgccttaggtggaaagctaattacccatgctctcacttcatctgcctgctaagatgactgttttaagaaggttaaaaaagttaataatgatcctgcaaagaatggattggatattcaaaattttataatttcatgtacagcttttgcctcatgaatattagaaaatcatctggctctagttatatggggcccaagagaaaataaccacaaacagatggaggtaattggacatttacctacctattggatcacctattggatcaccaatttgtatacacaaagagtgcacatgtttaggtgtaccgaatgcacccccattcaataatcaattaaatgtgactgcacattcgaagtaagtcaaagtgttctttgaaacctctgagcctgtagggagctgtacgttttccaaaggcaaccatttaagaatgaatattcatctctgaaaactaactgaagaaatattctggctgcttttgcttctgcataaatacggctctaaataccatgtccctatgtgttttttgcctctgtgtttcacaaagggtatagctgtgggacacagagtttattgaattttgattatacattaaaattctgtagtgatagtaccaagtatttttctcctacattaattaccttttcatgtttaagcacattttaattgttttttattcctttcaggcagaagttgcaaacaatatttttaatatttttagaattctttaccttcattttcagtaaatcccagttcaaagttttgtgtgtgtgtgttcccttcttcctatcccaaatttttacttttgtcaataaacttacagtatttaatcatgaggcctggattctcctgtcttgaagaaagggacactcttgatatattttaattttttaaagcatgcaggaaagtcaatgcttagtgccaagaaaggacactggatactggtactttgaggacaatgacaattttttaaggaatgtagttgaaacaggaaaggtgtactcaggagttctgtcaatgtctaatcttccaatattacataaagccagccctgagtttagaacagtcacattttatttatgaaaggccttttaatcatctccttcagctgatgttcattcaattcttttgtaaccctgatatttaagagaattaggaagttttagtgacctaaggaatttgaatttcaaaagtgattgaatctcatatgatattcgcatacaaagatctgttaaagactaacatgtaacgtctgttttcacctttgtttgtatactttaaaaagtcagaaaatcggctgggtgcagtggctcgtgcctgtaatcccagcactttgggagtctgaggcggctggatcacctgaggtcaggagttcgagagcagcctggccaacatggtgaaaccccatctctactaaaaatacaaaaaaaattagccgggcgtggtggtgggcgcctgtaatcccagctactcaggaggctgaggcaggagaagcgcctgaacccaggaggcggaggttgcagtgagccaagatcgtgccactgcacttcagcctgggcaacaagagcaaaactctgccttaaaaaaaaaaaaaaagccagaaaatctacttgtatagtatgttaaaaattattcatgatatttgttaaagattgtaaggaagacatcactcaagaggaacctttatgatgaaggtattgcagtaaggaagagagatagggctcagctttgactacagtgaggacaagtgggcatttatagtcaaggaacagggcagggattggcagtaacatcaaggctagggggattcttgctagactggctcaacaggattcttgctgaaggcagataaatagtaggaaaaataaactgtttttctctttctatattctaaacacttgacatgtcacttctgatgccagatgtgtgggatttttcccacatcgaccagttatctgacatcagctgcatgttctagaattcaattcagttctgacaccaactagagtttatgcaaacctcccacagattaacggctcagtccttcaagaattcattccaatttagagccagtaggtttccaggtacccacgatttgtccaacgtggctacaaattagaccccttacttgggtttgattatatgctagagtggatcacagaactcagtaaagtatcttacttactattattagtttattataaaaggatacaactcaggaacagcaagagatatgtagtgcaagctatgagggaaaggtgtcagagctgccattccctctcatggtgtacctccttccacctgttcagcaacctggaaactttctgaaccccgtagttcagaaagttttacagaggcttgatcacaggcatgattgattattaactgattctctagcccctcaatctttcctggagaatgagagctggggctgaacgtttcaagcttctgatcatggcctggtccttctagtgatcagctcccatttaggagcccaccaagagttacttcattagaacaaaagatactcctatcacctaggaaattcaacagattagaatatctatgtcagaaacccaggttaaagaccatatattagaacaaaagatacacctctcaccagtattgctcaggaagttatgagagttttaggagttctgcaccagaaaccagaggcagagaccaaatatatatttattatttgttaaaggaaaattttagacaaattaaatttgacagagtttatttgagcaaagaatgattcatgaatcaggcagcagtcagaaccataagaagttcggaaagatccattttagcagtgtgagcaatgggcttttacgagctgaatgcaaaatcaaattaaagaaatgacttgattggctatagctaggcatttaccttatttgggtatgatctggtggaaagttagaggttacttgccaggttctgattggtaaagtctctagttagaagttagttgcagtttctaattggtaatgtttaagttttgttttactgtttacattgaattggactttggtttgattatataggaacatacggcactggagctgtctcagcctaattgcctataaattcaattcttttaaaagataatatcatggaacagcgtaataagatttagagggtggggaatgaggaatgtgatcagataccaaggatgagggatttccactaaattgattaagccagattcttgcttaaactggactaagtgggtaaagaacacagcccagggtcagagcccagtctagaagaagatgtaaaggagcctgactcggttttggtcaaggagagggtctttgtcaagtatagagggcagagagactcaaagaaagtaaaaaattagtacaactatatcctgtatatccaccactcagaactgacagttgtcaacatcttgtcatatttgctttaagtccttcgaaaggaaaagtcatcacatagaatccttttccccatttcaccagaatcctctcttcctgcttaaagatatcagttatggtatatttagtgtgtatctgttgtgcaaactctttggaatgttagcttaagacaggcgtttccttggcaaatctatcccaaatggcagctgtttgtctgtacaaccaaatatctaaatggaccattcagtacaatgattgctgtactttgtaccaaaatcctagaaatatatgaagtcttttcattactttagtcctaaataaaatatactcatctcttccaagactccagagcgaaaaggtttgagtaaaaggaaataaagggggaggggagaagtgtgtgtatatatttatatagaatacatacaaaacaaaaattttccatttccctgtcttctgtttctttccataagtgctgttcaattaaattcaaattcggttttttgttttgttttgtttttgagacgggaaggtgtctcgctctgtcgcccaggctggaatgcagtggcgcgatcttggctcactgcaagctccgcctcccgggttcacgccattctcctgcctcagcctccagagtagctgggactacaggcgcccgccaccgcacccggctaattttttgtattttagtagagacggggtttcaccttcttagccaggatagtctcgatctcttgacctcgtgatctgcccgcctcggcctccctgaaattcagggtttttttgcagttaggttatagcattttcccctcctctccattgccatcttctcccatcctgctctcagcagcctgtgtgctaacacatagttcaggccaaatgttttgtaactccttcaaccactttttgctccctaaaacccaactgactactccatggactcagagcatcaccatctgcagtctattactcccatgtgaaagactgcagatgtccctatccccaggacactctcaagcactcacagccccactaatactctgttctctctcatctctcctccccagattagaggattttcgagccattctacaaatgtcagagtagctgtgggggaagcaaaatctcaagcaaaagtttctgctagacgcagaagaaaagaggcctgttaaatgagagaaggggtgtttacagagaaaggagcacctgggggagtgtttacagatctggccttctctgaccatgatgtatgcctcagtcacaccctccctttgaaatttccaaagaatgaaatactgctgcctttttatatataggatgtgtggtgattagcaaaacggagacctctccatcatctgaaataaatctaaaactattacaaacaaggctcattatgcctcccaacttgaatgatgggcattgatgctaattttggagggaagcaccaggctacctagagtagtcagtgtttttgtttagttttttactttgtctattgtaaagtggtgtcttatcaacctctcttttgtttgtgattactttagaaaggaggcattcacggaagcccggggtgcccgaagaggagttaaaaaagtcatggttattgtgacagatggagagtctcatgacaatcatcgactgaagaaggtcatccaagactgtgaagatgaaaacattcaacggttttccatagctgtaagtgtgttgccggagatattttcaaactcttaggtgtagagaagagctgtgtgcatattgggtaattttatgaaagtcacacaaaccaggttggaaaagagaaaggtctccatttgaaggtaagccctgggaggacagacttggatcttgctccctctgggtccttagtacccagcacaatgccaggccaaacagacactcaacaaacaatcattgaaaggaaggaaggaaggaagaaaataaggaaacatgaaaagaggaagaaggaagcaaaaacataagaaggaaggaagggtgagaaaaagaggactgaaaaaaagaagaggaaaagaagaggaggaaaggaagggaagagggtgggaaggcgggaaaaatgcctttgcctttaaataagagagaggatttgttcagtataacaagagcagtggccattgggcttcccttccccgtctgagcaattttcgactctctttttcattaattatcttcccccatcacttagctaaagtgggggaaagtgccagttgtctctgtttaaatattaacaacttctgacgtttgacacttgcttttcagcgaagtagacaggaattgaatttttgttttctgatgcaatttataagctcctggtatagacctttcgacctaaaatgtagacattctagtggggaacaagttctgaaataaaaagttacccaaatggtatgccaattacttcagagctagctctagttttaacagtgtgcttcttcaaaacagcttgcagttcttctcagacattagtgcattactcctgtaacctcattattcctatagcttcatggaacagcaggtgagggagctgagaaagaggcaagggcacccagtgacttgggtggtcccagaggacaggggcaaagtggcttaaagtcctctgatgagacgtgtggtatttcctctgggatggtcactgatactccccagggaaaaggatgagggctttactgaagcaaaagaaaagaattgagaataaatctgccactgccttctctctagtaaggaacattcaaaagccactgcactgccttcaagactcactttctcacattaacattgagtgtacattatagtatttcagttgctgctctaaactactatccatttttttttttaaatggagtctcgctctgtcacccaggctggagtgaagtggcacgatctcggctcactgcaacctccaacctcccaggatcaagcaattctcctgcctcagcctcccaagtagctgggaccacaggcgcacaccaccacacttggctaatttttttatttttagtagagatggggtttcaccatgttggtcgggccggtcttgaactactgacctcaggggatccacctgccttgacctcccaaagtgctgggattacaggcgtgagccaccgtgcccagcccactatgcatttaatgatacaaataaacaagtctttcgtagattataaacagcagcactttaaacagtaattttagttcttttctaactttctataagtgaaaaatctgtatccttcttaatcaaactatcagttttttaatctaccattctaaatctaactttaaaaaactacatgtagatgtgcagtgggggtgagctactcagatgggtagggggagcctcagacctggaggaaaggggtgggggcagccctcaagcccattgcccttgtgcccactatcctcccaggccacagtgcagaaccatggtcggaagggtgcttgaggtctgttttgtaacaggactttgaaggcagcaccatggagctcttcgtttttaatgatgccagacaaggctattattggaaaaagaaatgtgaagccaaaaaattcctgtaccttcatggtcactggaggccaagactctccttcttcttagaggatttggatattcttaaaaaaaaaaatcaagcaatagcaaagggctcagtgtctttcctttattttttggattccaggagcatagccttgaattaatccgatccttgcttcgttcaggccaaattgtaatcatttgttgaaacaaactttatttgtttctctgtttagaactatatctgtgtatttattttaataatattataagcatccatggacctaccacccaaattgagagctagctctcttttttggtaactacatctgagcacatttaccacctgccttcctccacctgggtaaccatcagtccactttctacattcctcaaccctggctctacttttcaaaataatatttaggcacccatacatatccaaaaaaataaattttaagaatatttcattgtttttaacattttaaaaagagtgtaatgctgtatataatattttggaacttttaaaacttaatactatattaagattcatccataatgttgcatatctgtatagttcattctgtttttaaaaattgaagtgatatttacaatacagtgaaatgcaaggtttcagtgtgaaaagtgtgcacgaagtgaacaatttggtgagttttgacaattacgtgcacccacataagacttaatcaagatatagagcaatttcatcactcccagaaagtttcctgtgctttcttttttaaaatgtatctttaatttttatggatacacgatagctgtacatatttacctggtacatgtgatattttgatacaggcatacagtggctaatgatcaaatctgggcaattggaatatccatcacctcagacacttatcatttctttgtgttgggaatattccaaatcttctcctgtagctattttgaaatatacaatatgtttactgtagttgtcctatagtgctactgaacactagctcttattccttccatctaattatagttttaaatccattaactaacccctcttcatccctgctcttccccactactctttccagcctttgataaccaccattctattcagtatgtctatgagatccacattttcagctcacacatttgagtgagaacgtagtgatatttgtccttcagtgcttggcttatttcatttaatataatgttcttcagttccatccatgttgctggaaatgacaaagttttgttctttttaatggataaataatattctgttgtgaagatataccatgtttttttaaatccattcatccattgatccatacttaaggttaattctatatcttgtctattgtaaacagtgctgcaataaacaggggagtgcagatatttcttcaatatactatttcctttctttgggatatatacccagcaatgttttttttttcttttttttttttcattttaaatacacacctcctgtagtaaccactgatgtgacataccaccatagctcacttagattgccaattcttgaatttcaaataaataaaactgtatagtatgtactgtgtgtttagcttttcactcaacataattattgcttgtgatattttgtgtactggggattcattttttgttattgttatctattttatagaccacaatttgtactctactgtttatagacattttgcttgtgtccagtttgagttattgttataaatgtatcatgaacactaaaaaaaaaaaaaaaaaaaaaccaaagtgataatcttcaggtaacacttgcaactatggtaaaaactaatttttttatttattacagaagtgattttttattataaagttttaaaaaaaatattgaagcaaatataaggaaacacctagtgtcctaatatacagaaatacaaaataatatattatgatacacattttttcacattttttatgcccatgtacttatgtgatttaaaaaatagaattaggtcatatctacatattggggatttttaaatttttttgcatgttaaattttacatattgttttaaaaatgttttcattatcttgaacatttttatattaaaaacagttttaacataaaaaatttttacattaaaaactaatttttttaggcagaaaaagtacaaacctcaacaaagctaattagttggacttcatcaaaatgtaaaacttctactcttcagatgacactgttgagaatatgaaaagacaatctacagacgggaagaaaacatctgcaaaacacataaaggacttgcatccagactatatacagaactcttacaacacatttaagggaaaataaacatctcgttttcttttaatgggaaaaagatttgaacagacactaactacaccgaggaagaaatactatagcaaataattgtatgaaagagtctcaacatcattagtcattagagaaatgcaaattaaataagacaccactatacgctaacacaattgctaaaactaacaagtgaacaaaaaaaactgacaataacaagtattgacacgcatgcaaagcagctggatctcttagacatttctgatgggaatagtaaaatggcaaaatgggacgattactgtggaaagcagtttggcagtttcttaaaaagttaatcattcacttattgtatgacccagcactttcatttctagttatttactcaagagaaaagaaaatatatgtctattacagagacctacatgtgaatatttacagcagcattattcataatatgttgaagctgcaaacaactcaaatgttctcattaagtaaattgtggtgcatccatacaatggaatgctactctgcaatagaaaggacccaactactgctacatgcagcaacacggatgactctgaaaagcattgtacaaagtcacagaagccagacacaaatggctacatactatatgattccttaaatctgacattctggaaaaatcaaagctataaggacagattatttatcggtggttgccagggttgaacgaggggaggaagggattgactataggggcaggagggaactttttggggtgatgtaaatattctacaccttgatgtggcagtaacacaactatattggtttgtcacactcatagaattgtacatctaaacagggtgaattttactgtatataatttattgcaataaaccttaccttaaaaaaaaactaaatgtttgagaaaacctgcttggacatctaaataattatagttaacaatcatatataactcctgcttctctctcctcttcataaaaaagaatgcccctgtctccagcatttggtttcaaacaagaatatctcaattgtttattttccagattgccaatttagattaccacttagtccagtatgtgtttaaaatatatatgtgctggactgtgccttggtaatagtttcaggaagaattgctcattcaaaagcaggcaactcacttgctgattgcctttgccagcagataatgacatcactagctggaataatatcaaagacattcagaaactatgaatataacattacttttgaactgtcagattttaaaaatacagctgttagtaacagggacacagagtacaagaggagaaattttcacagacatacaaaattgccctttatatttttctacaccaattgtggtgtttatataacagttaatattagggagtctacaaattttgaaaatcactcttccataaatatgaaagtacataaaaattccattatgctaaggtactctacactgttgtttactgacaaaatgcttgagatcctttatttaacacatagaatttaaaatatattcttgctgtttctgttgtgtcttagattcttggcagctataaccgaggaaatttaagcactgaaaaatttgtggaggaaataaaatcaattgcaagtgaacccactgaaaagcatttcttcaatgtctctgatgaattggctctagtcaccattgttaaaactctgggagaaagaatatttgccctggaaggtatgtctatttatcttattgctgcatgttctctctgcaattcaaaatcagtataatgggatttttgtatttattcctaatacatcagtaatactttttttttttttttactgtgtacaatatctagcatggaacaatgctcttttatataaatctgccattaagatggctgtttctcacaacactgtgtctgctagagactctctttgtaagggcatggtagggcagtgctgatgggacagccgatgaagacaatggtcaatgtagatgtgccaggacaaaaatgtttccatgtgctttgttccttttctgttacatagatttggaaaatgagggtactacctctggtttgggttttttttgtttgtttgtttcttcatttcatattgagctactacaagagtgctcttatgcaataacttctttgttcacttattttctctgtattttgctccttgcccattttaaaggtcttcatggaaatttgccttaaaatccatggcaatgaaacattggttcactgtatttgtctaaatcatgttacttctttgcagatttttccttgagttttcaatggtgactggctgttgaggataacgagttatggcattccctattctgccttaggtagaggatgtcaagtagctaattactttggaactcgatctttcctaaaaaacaaaaaaaaaaagtcttcagaattgttatgccaggcaaactggcaaagcttctttcttcacattctttgatgatctctagtctcagggaacatgcgccttttctccaactagggagagaaaccaccagagaattcttttccccttaggctacatccaaatccagttgaccctgtccttgtgaggacacactgaaagactgttgtttctacatcttaacaatagaaatttaaaagcactttctcagtttccctgatttgattgataataggaaacagaaagacaaaatgggaatgagacacaactgaaaaaaagtagaccattttgattgagcgtcaaggggctgggaaaatgcagaaaaattagaatatgaaaatgtacagaaaggaaagataattatttagagttatggctttcaaactttttttgagtgtgactcacgataataactacattttgctttttgacccagtgcacataaatatatacatataaaaataaggcaaagtttcacaagataattcttattacatgtgatgcactgtgatggtttctcatcaattccattctaccctaatctctttcaatgaaaaaaaaatgctggctatactcagtctgttgatttcatgactgggtcacaatccgtacttagaacatttgatttagaggtgataggaatctacaggccagccagactgaatttctgtgcctcccttttcccctggcctctttcccctgtgcctttagaaacagaacactctaattgtttatgagtctggagtcccagctgcttctgaagaactcagctgtcttgtgctctgtgtacaagtcatttttaagtggctttggtctctcaacagctctcccggtgtcatttaccaataaaccagattatgagcttggctggccttaaggaaaatacataaggtcttccaactaattgtgtacttttaatttttaataacatgggctaagatatgatagaaacaatctgtaaaaataatttaaaagaaaagttacatagttacatttgatagttcaacagaatacagtgtcatttctaaatctccttttaagtaagcaagtaacctaaaactggcaaaaatgaagcccacttcagctaggggagggggagatcaattgcctgaaatgacatttcagattatttctaacctaactacaccatggattaaaggtgacaggttgaagagcccaaacactccaagaagtctctatatttaaatatgacatcattttataaggaactttacagattacaaatgtcttctatatcatctttgttgctacactacaccaaaagcagtgttttgactagactatttcttatttttttcatgagatatttaaaaaggctttatttctttgttgctcgggaaatctccatttcctgtcaacatgtatcttaagatgacaagtagctgtgattatgaaatttctgtttgccaaggacagtgccatctattgaggcaagtatgccaaggacttgcttagtacatcagaaaatagtctactgtctccatttcccgttgagcactgggagaaaatgccaacatttctaaccagaggctgcacagtggttagagtggctggcccaaacacccatgaacagtccagggagaagtttgaagcaagaagcccaggagaatatagtggtctattaccatgatgccactgcagcaggaagaacatcacatagcgtccttctgtctgttctcagctgaaggcagaatagcggcagggcaggtgctgaaaataatgcaggtttccgttgctgcattcttattgatcttgcagataagtgagaaaacacctgaaagcattgtggactgaaaatacatgtttaaattaaagttaaaatgcatctcagtcatttaaattacagggcaattcacacaagagattaaaatgatatatttgaattcttcactgccgcgtctaatctagtcctacaaaggtaattactgatgtatttgttcacaattttatccatgtaaataactaacaaatagttacattcacaaatttgattattctcttgcctcaacgaaagggcagactgactttcttaagtgctatttttaacttatctgcaaggccaaataaatcagtaacccctagtgcaagcaaataaatcaacattccatcaattccctcaggaaattgtggctttgggtttgtgaatattttgagaataatttgagagtagcagactgccatggaatgctctgaattatctctgcatttcagtaaagagcttcaaaatgggtacaggatcttttaaaaatgtatgattgaatggcatgtgggcagccctatcacaaagacccctctggatctgtgagtgatacttaccaccagtaattagagcaaataaatgcatactaaaatacctaaaccctttatcacacaatgaaattctgacagaatctatggcctgaatatgggtgggactgatggagttgagaaacctctttaaatatgtgaatgaaatttttttcagtcccataacatattaagggagtttagcctaagggctcagcagggttcccaaggcatgaatttggacaggaatttcctactgtagtacatccaacttgagccttgtggacccaaagcaccataggatccacaacatgctacagtataagaatggagatttctcaacccctctggcgaggacagggctgctaatgaacaagaatttgagacatgagccctttgactatttttctctgtcttctacccaggcctacctagaaattttgggttgagaaatgtatggctgaaaatgccctaagatgtttgaagttctggttggtaagaccacaagctctaccaggtatctgtattctgcaagtcagtagtgcatgaaaaggcattgttacttatttacagtgatattttcctatgttatagccacagctgaccagtcagcagcttcatttgaaatggaaatgtctcagactggcttcagtgctcattattcacaggtatgttgaccagttggtgaaaaatgaaatatatgtttgcaagacttcccttcccaaaaccaacatctagccatcagtatgtaagtgcaacgtgcagttcatagcttgaacaattatgcaggctatgatgatgttttctaattcaaataggaaaatatcatttcacaagcttcttattaagaaaatatgttctctcacacagttcactacattgtactaatagttgtgaatcagacagtgtgagctttgccttgtaattatgtatctgtctaaatgaaataatttaacatatttgctacagatgtggaatatttttccacaggtcaaggaattcaagggtcttattagaattccatgttcaagacctaggatgctgggcacccagaataaagtagaaagacaagattagaaaatatatcatttgcagttaatgaaagaaaaggcataatggtccttgcaaaagaatattgacatttccatgtgcaattttactgtataacttgggtaagttatttgtgccttgatttccttttctgtaaaacaggtatggtagcaatagcatctaactcatagagttatcatgaggattatataagctaacaaatgtaaagcactttgaacagtatacctatacacattgttaatggtgtttaagtatttccccttattatttttattaaatattattatcttatttatttgcatgtaaggactgggtcatgcttggagcagtaggagcctatgattggaatggaacagttgtcatgcagaaggctagtcaaatcataatccctcgaaacacaacctttaatgttgagtctaccaaaaagaatgaaccgcttgcttcttatttaggtaaggtttggatataattataaaagagttgttttacttttccattttttacctttagcattatttgcttatgtttctataggcttgcaaccatatagcaggattatttcaacaagttgggtattttccagaacccatgcaaagttttaggcctctgagcagctttagttagtcaaaatgacatacatgggggtccttttttgttagtagggctgtctaatgcagggaatggtttaggttgatatgtgccctttctgatatgttcagtttctctgtgtctggtatcaactttaacttcaaggagaactttgaacctggtggacaagaaatgagagtagaaaaggaaacctcgacttctcctatatcctgaaaaccaaactcatattgtcttaaatgtcttctatcattaatttctctctatgggtcctaatttgggaaaagaaaaatgtattttgtcatgtaacttcttctttaatagctccattcacaatcagacaaatattgaacttaaacccagtgatataacatgatcttgtttcccagtgtcttgccagaaatgaggagttgtatgtctggtaccactttatttgggatctataccaagctgagcaacacctgggggatgccagggaactctcccctcactgaaaaaagatattcaccaacagttgggaggacctaaaataaaaaggaccatcaggatatggcttcccagctcttactcactcaacaaatatttgggggatcctcttttgccccaggcattgatcttagtgctgggaataaagtgataaagaaaacacataccttggcctggaagcattcacagcttcacgtgttagccttcctctctgggatctttctgtcccggagacaagtctttttctctctgtcccagttgctttctattttatcaggaaggtggcaggtctttactgcggtgtttatacatctccttattgaaggacacctattaaagctgtaggagcagcaggacttaagaagaataaaaggactagagttttagatgactaaaaatgtaacagtcaacagcagctgcactgtgactgctaaaatctcttaagacatgtagaactgcatgaatgaaagtccagtctgtttctcatagaaatcctgttacattccactctggtcagacaacagctagagtatctggttgttctaagtatcacatactacaaggagaaaatgacaaactaggatgtgccagtaaaatattacacagaaaagtcagctcccgaagcaattccctgctacaagtctcactctctcgaaaacttaaagaaattgaaggttagaaaacaaagtgtgcattgcatgtattttaggtatttggaggattgtgatataaaatataggggttaggcttaaaattcatttcaaattttagcattaaaagagatcctatggagcatgtagtcttaatttccaatcaagaaactgagagatagaacaattatgtcccagctgcctatggcaggtgtgaaaccacaattgaggcttcttgattcttatgtcagtgtttatatcacgataccaaaataactgattctgggttgattaagaaagcactgcacaaatattgagtaccagcaatgtgccaaacactgagtttatagggaataaaaagatagatggggcaggtcagttcctacactgataaaccttacttttttgggtgagagacaataatgaaacaagcaatcactatcagtatgatatgtgctatgacacagaatacctaaaaaagagggctggggattagattagatatcttctaaaagttcattacatcctaaggttctatgagactgtttatgtgaaataccttggaatcaagaaccagcttaacctgaggcttctgttatatgtagaataaatatagaacatttatcttcctatataatggatgacatataaattagtaaaactccttatgaaaggcatttgacaatgtgtttacagagctataaaaaatgttcgtaccacatttatacagaaatttcacttctgtggacctaacctagggaaaaaaatccaatatttaagaatgccaagtgaacaatgatttccattgtattattatttatgttattgggggaaatgccattatcctaaatgcccgaaaatatgcaggtagttaagtaaatagtaaatccacttaatgaatattacacacccataaaaataaaaattataaagctgctgattctatgatactaaagacttgaagcagttatggtacaaggtgtacaattagcgatagcgatgaggtcatagagacttgagcttgttttctgattctgcccctggctatggctttaggcaaattactctccccctcaaagcctcaattttcctatttctaaaatggaaataattacaccatatatatcatttgggttgttagattaagtaatgactatatttagtactgtgcctgacacacagttaacactcaatgggtgttgtctattattttattatgtaaatgttattatgtatttttttattgtgtaatgttatataataaacattcctcttattagtattgtggtaggcagaataatgatccccaaagatgtccatgtcctaatccctggacccatactttgcatggcaaaagggacttttcagatatgatgaaattaaggatcccgagttggaagattatcctcagatatctggctggacctgatacaatcaagcattctaaaaatcagagaacctctcctggatgtggccagagggagacagaactatggaaaaatggtcagagagatgcagtgttgttggctttaaagatggaggggggccacaagccaaaaactgtagatggctctagagctacaaagggcaagaaaaccgattctccttgataggctcccgaaaggaacactgacctgccaatatcctgatgtttagtccaggaagctctatgccagacttctaataaacagaatggtaagataaaaagttcatgatgctttaagccaccaacttgtggtaatttgttacagcagcagtagaaaactcatacataatacaaaataataatagtagctgacattagtactattactaataagtattgagtatttacaaatttaaagacactgtgtgaagtccacaaagatgtgtatgatattgttgccactcttaggaagcccacacattttaattgataacactgtagtttttggtattcttaattatatgtgattaaattcctttaaagtaaataaactcttaagaatcctaaatttgtcattcccaaaaacctttggttaaacgttgcttaaagcagatgtggagaattcaacttaaagatgccactgcaagtaagaaaatattaagaatcttatttctgagcacagtatttataatatatgacttctctctgtccaaaaaggaaatttttgggtatgttttctacagtgtgctgagattttcttttctgtttcagaaattatttcattagcttactcacaagtgagggtatatgacattttgccaacataaagtctaatacatgtaagatttctttcaaaatagaaaagcattcagaaaaggcaggacaaataccttgtgttttttttcacccaaaataatattctaaatctgaaatgaagttttcaaaatgtttctttgtgggggtcacaaattgagaagagactgagtgtattttttcataaactgtgtggattgcaagttgtaaggctatgaaaaatcttatgaaggaagcagaggcagaggctctgttagaaaaatcccatgcttatcaataaggatcaggaaactgtaagaactcaagctgtcaaacatctgtctcaggacatagtcctaccccatctttctattacccaaactgccttatgccaatacaggcattgcaagtgaatttggtggtgaaaatacagctgggattatgttcccctgcctcctccacccacagtttgctgaattctattcctgccatacagcttccaaaggagaaggaaagatgtgaggcaatgtcatggcatcaagacagatcatacctgtttcccattacctcactagatcctggcccttttcccaagaagtgaattatgagagctgacagaattcattcttcataaatccatgcaaagggctatgccatccattttagcctttttttcctcttttttttttctctttatttgagacagagtttctctcttattgcccaggctggagtgcagtggcatgatctctgctcactgcaacctccacctcctgggttcaagtgattctcctgcctcagcctcctgagtaactgggattacaggcgcctgctaccatccccggctaattttttatatttttggtagagaccgggtttcatcatgttggccagactggtctcgaactcctgacctcaggtgatccacctgcctcggattcccaaagtgctgggattacaggcatgcaccaccgcgcccagcccttttcttccatcttattcttttctttttcaggaaacactattaagcttaaatatttataattattttccttcttttaaaattaggctttacttggctctggctctctttttcttttcttctttcttgtctttagacacccaagcctcaattagtaactacgctaactggtagttactgtccctgagattatttcagctaatatttttagttatcaagtataagtcatcaaagagagttaactaaataatctcacaactcctagcctcaaacataatttttaactcatttttaaaggaggccttttatcaagttacattcacagctctgcaaattacacacacacacacacacacacaaacacacacgtactaacactctcattctactcccttctttatatttcttagcagagtggcatgaaataaaacagccttcattttgcacattcttcttttccattttatgtatgtataaacatggcctgaaagattcattttaaaacaatattgtggttagtaatacaaacatgtaacacattacatgttcgaaaaaatattttagattctattatgtataataataaaaaaccctcaaagaaagatgaaggaatgagaatgtgaggaatattcataaaggataatatgcctgaggaatagtgttcctttagcacttgtaagaataaacatactgtataaaaacttttgttcctttttaacatttttgaaagaaagtcaaacctactttacagtaaaatacttggtaagtgagttagaaaaatgatctttttctcagtgagaagtgctattctgtggcattttgaaaaataatcttacttctgctccactgaagaaatctggttattaaaagagttattccttttataaaatcaaaatctgcatgtggcaatttttattcattgatatggctctcttctcaaaacacaaagaacaaatctaacttttcactcaaaaattaatcttaaagacacaatttatgctcttcctgtaagcagcctgagatgatctcttaaaatggtttactattcacttgacccagaacaacccaaaaaatcattcaaatcaagagattgaaatcttcgtgttcactttaagaacatccatgaagctacccaggcaatcaagggttatgtatatctgaaaagccaccaagtatctgaaagatgtgactttacagaagcagtgtgtgccgttccatcattgcaatggtggagctggtagatgtgtccaaagccaaaccgtggagctggacagagggtttatggccccaaaagagtgctgaaagtttgttgcacatgcatacaaatgtaaaaagcagtgctgatcttaaaggtttgtatgtagagtctcttgatcattgtgtacatctaggtgggcgaagcacccaagatacactggctctgtttacagggctcatggtcagattaacccatacgtgacctccacccccactatcgcacccaccgcactgaaatgatgcttactgaaatagaacaaatttttctaagccagaggaggaggttgcatagaagaaaaaggtattccagaagaaaccgaagaaacaaaaataatgacccaggaataatttcaatataaaatatatgcaaataaaatcaaaagtagaaaaaagacaatcaaaattttaaagagcatggaagctcaattaaaatagaggagagaaccgggcacaatggctcacgcctgtaatcccagcacttcgggaggctgaggcgagtgcatcaggaggtcaggagattgagaccatcctggctaacacggtgaaaccccgtcttactaaaaatacaaaaaattagccaggcgtggtggcgggcgcctgtagtcccagctactcgggaggctgaggcaggagaatggcgtgaacccgggaggcggagcttgcagtgagccgagatcgcgccactgcactccaacctggacaacagagcaagactccatctcaaaaaaaaaaaaaaaaggaggaaagatcagatacgtgaaaaatgattcaagctctgtgttgaataaagtcacattaaaatcacagaaaggtactgttgttagacaatgtttaacacctattaaaacatacacaaatttaaataatagtgatgatacacaaagcctgggacagtttcatgaaattgtctttcatatggcggttcatagaacaaagtagtacaaattttctggaaacaattttctagacactataagaaccattaaaaacgtgatccagtgatctattccttgaaatgtactgtcaaaaaatccagaagagggacaaatttaaatgctccaaggtgtctttgaaatctgaagcataataccaaaaatattaaaaccacctgaattctagtgttttatcgggaaatggccatgtaatataaatgcaatgtctttatgctttaaccaagagaaatcatcttcaattatttaaaattacaattttaaaagctagtagcagcacagaaaaggtttacattttctatgattccaattatatgaaaagtgttaatttctgtagtgcagacacatatatccaaatgaaatacaattgatttattacaaattggggtggggatgtgcaattttttatgtgtgtcatcattgttatatcatttgtgattttaaataatgaaaaactcagattgggggaaaataacttctcaggagaaagcagttgtggtagatagagagcatattaaaagcttccaccaaaacaaattcttacgtgcattgaagaaaaaatattattttcaaaatataaccatataaaaatgattatcttggccatttaaaaagagtcttaatttattacatgaagcctttaagggtccaggtggtatacctggaatctttcttttgttaggttacactgtaaactctgctactgcttcttctggagatgtgctctatattgctggacagcctcggtacaatcatacaggccaggtcattatctacaggatggaagatggaaacatcaaaattctccagacgctcagtggagaacaggtaaacttgaaaaatattcttttatttaaattaatctattcatactctatgtatatttactgtctattgtcctaaacttaaaaatgcaatacccacatattcagtaacaactgggaacagggccctgtgttaggttctttggaaggatgtatagtgtctgtatctttgtcttcatgttggatgggtgtggaggtaagatatacaatagatgtggatacagatgtacaaatatatacacaagaaaagagatccaaaacattaagaggcatgaaattaccagtggcccagacaatacagtcagaatatgatgggattgctttaagctaggattggtgcagaaaagcttattagaagatgaaattcgggctgaatctacaagggatgatagaatgtggataggtagaaagagcagtgaaagagaaagttaaaaagataacatggacccatatgatgtgaggttttgaatggcaaattaagagcttggattttatcctggaggtaatgggaaattgtctgtaatatttaaaattgaaaaattcttattaggtagtattgaatattaaaagaagtttgggaaatgatacatgaaataacatttacatatgtatatataaaaactgaaagaaacatcgtaaatatgcaaacatttacacacacacatattaactgaaagaaagatctaacatgctttttgttgttgttatttttgaattgtgatagcttgggaacttttgtttctaaaaagttttctgtatttttcaacagttctacaaggaggatttattaactttattccacagtccttttacagagggtgggagaggggttcttcttagccttcactaaatattccaactctctagactagaggggcaggactgcatcagccctcctgctctgcaagagtccaagctgcagcccagcgcagcagtaaagctcaggtgcagggatactcacattaggcaggtccacaaactgcactcgctttaaagccccatgccctgcaggagcagtatcttttatgacaacaccatagacatagcttccagggtgtctacaaagggcaggccggctacaagagtaactgcactctgggaagtcaaaaatatgtcatcttcatcaggtacttataattcatttatagttccacacagcctgaatacaatattccagtaagaggttatttttacccctgtcagcgttgcttagccttagtggtaaagttgaaatcccagccacagcagattcccagggcaacagagttagagtagctaaaggtcagctcctcaagtatcaggtgaaagggttttattaactctttgcccacatttacgcttggaaaacgcataacagttagaaaaaggctattgttgtagctcaaactggaggtaagagaacgtaaaataagatgtcagcagtaaaaatggaaaaggaagggccatgacagatatcaataataggaagttgacaatagtaaaatgaagcattttagatgacgtctttgatccattatcactccattaattgtatacaagacaagaagtgtcaaattttatgaaaatttgcatatgaaagttgaggagagtatcatgaatgatttaaatcgtgaatgatttcagtttcaagcctgggaatctgaaagaaaggtggctccatgattagaatgtcaacacctcaagcaatttagatattttttaacaatgacgtttggcttttagacatgttccttgtaacagtaagcacaaattcagatatttgaaggtgccagtaaagtaaaatcaaaataggtaaagtcaatgagtaaagctgctgggcaaaaaaacacaggaagtggtgggaaccatggccctgggcagcttgtgagcttccactgagctccagttgacggttgccatgtggggaggaaagcccagagttgcaagatcttctattttatttatgtttataattaattcaacttttaaaaaaacctctcaaggccctcaaaagcctgtgagaaaagtgcattcaaaagtcagtgtcttttgcccacatgcctagaagcaatgtctaggactgtagaactgaagccttgagaaggaagacagaatgatgtttgcaattgccttagtagaaatttttaagaaggattggtcatctagggtaagagaatggaaaaaggctacaggtctgagctttagaagaggccaaaattcagaaaatgagagttggggaagaagccagtaaatatgaaaagggtggtctatgccacaggggcagaagcaagagagtaagagtaaaattgcagaagccagtacagggagatgtaccataagataattgttaagagcatcaaatattaaacatagaataatatttgaaaaaattaagcatttaggtaatgaagtataagttctctgcttttctctaaacagatttctatctttaaatgagaaaacatattgctacaagggatgatacccctgcaatccttccatatttttctatgtcccatagctgctgggataaggcttaaccatttcattgagaagacaatcttccaagactatgaggtgaaatatgccacaccagtattccaggacaactcagctccttataatgtatttaaacatatattcagccattgcagcatgcattctactgcttatctaattttatttccttaaaaaatcactatagtattactgaccttttctgatttgtggagaagaaagagaggttagagtgaaatctaaagaaattcattttgttactgtcaagcgatgaaatctgtaacagctgttcatcctcaaagatggaaccgactgatattctttatcctcatgaaagagccaataaataactttcagggagcatcaatttttatctttcatttcctttgccaactagctcctcttctagattgctagaagtaaaacaaatgtagatttcagtttccttgagaatttctgttgttcattgggctgttttgtttcattttgtgtcctagattggttcctactttggcagtattttaacaacaactgacattgacaaggattctaatactgacattcttctagtcggagcccctatgtacatgggaacagagaaggaggagcaaggaaaagtgtatgtgtatgctctcaatcaggtaatggtgtctgagtttggtagaaatccaggaaaatctcttccttctcttcattttttaataataaattccaatttttcactcactttgaaaaaacagagcaaagaagctatcaggattcattcactccaccaacccctcagttttgaaatgaccatttataattctaataaagtagctccaactcttagatattttctgcttggaaatgtgaattatgtttaacaatatataggataaaggaggtaaatataaatctcactaaactgctaaataaacccacaaggcttatttaggctgggaggcttatcagctctggcttggagatagataataacctcagcagttaaatcggatagggtggagggggagaagtcatgagtttcaaggcagcaacactgcaggcttccaggaaatacttcactgggctggagtgagattttgtcttctgttcctgactttagacatcattttttaagttaaataatttttaatttcttcattagaagagtgttttgctctttatagcaaagccagtgtttatctatttagcttttccaaatatgtacattctctcctaaattgattattttaaataataaatcatgtgtctttcttcctatcattttttggcttcctcctgtcaactttttttgtcctgggctgttttgtcctttttccaagaaagtgtattcttgattacctttgctagtactttctgtctgggttttttttttttttccttccactctaggcagctttagagaaagtttcctttctgagcagaataaattttcgctttgcacaatattgggtgaagaagggatagtggcacaaattaaggatataatattatttggcctgaaaaagatgctctgaattgtatactcaattgcattaaaaagagattccattaaagtatgtctcccacacttctaccatctgctctttggaatccctaactttactctcagataggcacactttttaagaaattttaccaactttaccactaatgtacaaatggctgttaatagcactgatttagtatactttaaaaattctactctgctgtagtaatgatggaaatacataaatatcctgtttatctttcttccagacaaggtttgaatatcaaatgagcctggaacctattaagcagacgtgctgttcatctcggcagcacaattcatgcacaacagaaaacaaaaatgagccatgcggggctcgttttggaactgcaattgctgctgtaaaagacctcaatcttgatggatttaatgacatcgtgataggagctccgctggaagatgatcacgggggagctgtgtacatttatcatggaagtggcaagactataaggaaagagtatgcacaagtaagaattgaaacctacagattcccacccttcagtgataagtcggttcaatgccaggcattacctgtctaacttcatgagttatttaatttcttcctcctgaccttattgggaaactggatttaattctctttaagtgttttttatagattagttactatatatatatacacacacaaacaaactataaatatacacatagtatgtatatagtatatatagtgtatatataatgtgtatatagtatatatatatacacactatatatactatatacacactatatactatatatggtatatatagtgtgtatatagtatgtatagtgttccttatagattaattactatatatacacactatatatacaaatagtataaatatatagtatatatagtgtatatgtagtgtgcatatggtatatatagtgtatatatacacactatatatagtatatatggtatgtatactatatatagtatatacggtatgtatactatatatagtatatatggtatgtatactgtatatagtatatacactatatatactatatatagtatgtatactatatatagtatgtatactgtatatactatatatagtatgtatactgtatatactatatatactatacatagtgtatatagtgtatatatagtatatatagtgtatatatagtgtatatatagtatatagtgtatatatagtttatatattgtatatagtgtatatatagtgtatatagagtacatattgtatatatagtgtacatatagtatatataatatatagtgtatatatagtatatgtagtgtatatatagtatatacagtgtatatatagtatatgtagtgtatatatagtatatacagtgtatatatagtatatagtgtatatatagtgtatatagtgtatatatagtatatagtgtatatatagtgtatatagtgagtatatagtatatatagtgtatatatagtatatagtgtatatacactatatagatactatatatagtatagatacactatatatagtgtatctagtatatagatacactatatatagtatatatagtagatacactatatatagtatatatatctatatattagatacatatactatatatagtgtatctactatatatactatatatatagtgtatctactatatatactatatatatagtgtatctactatatatactatatatagtgtatctactatatatactatacatatagtgtatctactatatatactatacatatagtgtatctactatatatactatacatatagtgtatctactatatatactatacatatagtgtatctactatatatactatatatatagtgtatctactatatatactatatatggtgtatctactatatatactatatatggtgtatctatatacacacactatatatagtatatagatacactatatatagcatatctaatatatagatatatatattatatatatagtgtatctactatatatactatatatactatatatagtgtatctactatatatactatatgtatagtgtgtatctactatatatactatatgtatagtgtgtatctactatatatactatatatggtgtacctatatacacacactatatatagtatatagatacactatatatagcgtatctagtatatagatacactatatatagcgtatctagtatatagatatgctatatatagcgtatctagtatatagatacgctatatatagtgtatctagtatatagatatgatatatatactgtatctagtgtatctacaatatatattatatatagtgtatctactatatactatatatattatctatatactatatatctactatatactatatatttcatatatagtgtatccagtatatgtattatatatagtgtatccagtatatgtattatatatagtgtatccagtgtatgtattatatatagtgtatccactataggtattatatatagtgtatccactataggtattatatatagtgtatccagtatatgtattatatatagtgtatccactataggtattatatatagtgtatccactataggtattatatatagtgtatccactataggtattatatatagtgtatccactataggtattatatatagtgtatccactatatattatatatagtgtatctatatactagatacactatatatagtgtatctataaactatatatagtgtgtgtatatagatacactatatatatagtgtgtgtgtgtgtgtgtgtgtgtgtgtgtatatatatatatattttttttttgagacggagtctcgctctgtcgcccaggctagactgcagtggcacgatctcagcttactgcacgctccacctcccaggttcacaccattctcctgctttagtctcccgaggaactgggactacaggctcccgccaccacgcccggctaattttttgcatttttagtagagacggggtttcaccgtgttagccaggatggttttgatctcctgacttcgtgatccgcccacctcggcctcccaaagtgttgggattacaggcgtgagccaccgtgcctggccgtaattactttatattttatacatttatctagtttcctttctgttgttattttccatatctccaggatttgactttttgaaacagttaaaaaaaagaatactttgtaacaatgctgtttaacatctgttaaatttagaatgggacatttagtgtgtcccgttctaaatagagggcactgctttctgaataaggcaaaaataattgtatgacttaaccaataaaggaaattagattcttgattttatatttaatgtccatgctgttataataaattgcattaaatttatatttatccattaagttgatatattttcgtcaagtgaattacgatttctaaaggtttataattttctcgcaagtaatccttagaaaaaataaatctgaatattaagtttaagctgcagggaacttctgttattcctgtttgtaatttgttgtcagttaacagctctaatccataagtgtattttttttccttcattagaaaaataacaagttacaaaagtgcttaatgcactacactataaaaacaaaagaatttaaaggagtttgaatgtaattgtctgctctcaagtaatcatagttggttagatattgaacaactacttacaaataaaacagaattcactaccttctagcttatataatttgaaaagaaattagaatattaattatttcattttctatttgagtgttctctttggttctgtagtcaacagagctctcaaaatctattcatgtaatgcaaacatgagtgatttttcataaaaccataatgacaatagtgaacagaataaagggcttatttcaataagagcacttgtatccatttgataaataatttgtttctgttgaaaatctttatggcattatttacttaacaagagacaggcaatattaatgactggggcatgatggaattaggaaatgcaggaagagagttctttcttatattctaatactttattccttcagcatcaatcctgtaaatttaatggggtagcatttgaagtagaaaaggaaagctaaatcattgtcagatgaaatagatttgtcataaacaacttgttttctaaatggtggtaaatcaagatgcaactttaaacaaaaacaacaaaaagaatattagagttggatttgtttaattactggcaaaatgtttttccaaggaataggtgaagatgtgcttactcatttccatgagaaccagagatgctgcttatgtatgggataatccagaatcaatcaagcccatagaaccaaggagtcagatatctcctgaattcttcacttaaaaaaatgaggaggattgctgggtgcggtggctcatgcctgtaatcccagcactttgggaggccgaggcaggcggatcatgaggccaggagttcgagaccagcctggccaatggtgaaaccccgtctctactaaaaatacaaaaaattagccgggcatggtggcgcgcacctgtaatcccagctattcgggaggcagaggcaggagaatcacttgaacctgggaagtgaaggttgcagtgagccgagatagcgtctcaaaaaaaaaaagggggggaaatactttcaaacgagcctcacctgtttaaggatgaaaaatgtttccatttggtttgccttagtaggcttcttattttatgttatttatgtggaaaacaagaggctcagaagacttgaagtttagggagggtttgtaagtcctgactgcttgccatgggcttctgttaaaagcattagcttaagcttgaaccaatgctaagtcaggaagtacagatatcaaacatactatgtatggtaatgtgcacagatcagtcttcaagacatactcatttgtgccatctcaacgttgtgaatacatctgagtggaattgagtctcttgtgccctcaacttttaggacaatttttgaaagacagtagagattacatattggaaaatgtatttgatgggatgtgttatttatacccagccacaaagttcagtgaactccaaattgacccctaggacaatattatactcccctcccccctttgctgatatgatatgttttcaagatttccagtacctttagatatgtctgtgtgatgggattggctaggaagcagaaagcacagaaccaattactcatactgtttcctttgaggattagacacaatgacactatataatttttccctctctctggtgtcagtgaccttgtaatgattttgtctgtactataaaaacagcaatatcctctgggaacatctgagtatttcctcttatctccacatgagggacctcttgggcggattcccaaattaacaaaactgattattttgttaaacaatttaaattctcagatttatttgaaactgttttgaacagactcttctcatatgaaactcttttttttggattctcacagcgtattccatcaggtggggatggtaagacactgaaattttttggccagtctatccacggagaaatggatttaaatggtgacggtctgacagatgtgactattgggggccttggtggtgctgccctcttctggtatgtattttaataacatcctgttaatctgagactgggtcacttgcagagctcccagtgtgattggagctcatgtcataccaaatatctatttccttttgtgttccactatgcaaatacaagttattcagttgagtgagctggaagagtcaatacatcttaagaacaaagaagctatatgaaagaaacaagtagaatgaactcttaatttggtgtgtctattatgtggtttacactaaaataggtattctgttttaggagaggtataggggaagagaagatcttatagaggatgtatataaacaagaaaatatccctaatatttggttgcttacaaggttttagagataatcgactttgtattcatttacctgatacatagaaacagataatcgcgtagcactctctgactctgtttatattgttggtcaagcctagaggcatcttaagtaatatcttcgctcagcctttaaaatgcctaaatccccaaattggcccagttctttcagatacatacattcataatgctttattaattatgaataaataataatttagtaggcaaaaataattattgcttactaaatatcctatctcaaaaactaaatatcctatttcaaaaactgttctgtttgaaagaaattactaggaagtcaagaatcaacttaatgagaaatccacatgataattttgaaaaatatataataaatttcattaagaaatataaaggaagggtttcataaataaaatctatttatgccaggtgactttatgggaagtccgcatgttgattctcctaaattaatgcattggtttactgtaattcgggtggaaacatacatcaatgctctttttcccaaaaatctacctagaagagtaataaagtataaaagaaaggtgaagatagagaggtgaaaatagatgactttgctataatttaagataatgcttaagaactaatggtcaaattaaaatggtacagtaaattgtgcacatacaataatcactatttaaaaaaaaaacctttacaatagaggggaaagaagactgaagggtgatacctaagaaaagggaatattaggcagcacagtggctgggactttggggaggactcaccagaagccaaggctcaaaaccagaagtcagcagtgtcagggacaatggatatacttcaattttgtttgaaatgttaatcctgaattagtttattatgctccctttagctcacaaatatttattgtattaattctcatattaaaaatatgttttcagggtttttatgctccagttttgtttcaaggctttcttgcaaagctttgcaaacttatttatggcctctcctgccccaaatcaaggcattgatggcccaaaatgatagtcatttccctatcatagtccaggctccactgacagcagaatggaccaaaccgatatactgggacacgaagactaagattcacaatgcctaacaagaagtgagagtggatacaagtgacagatgataggaaaaacgtttggaagcaaatagtgagagtcttgtcatgagacctggactgactcccaagaaagatctggctggggcagagaggatgtgtggggtggacaatggtcgaggcagcttcatgcctggagaatccatattactaagcaggaaactaggcatgttcattcattgctgatgaaagggtaaactggctaaaactcattcgaaggtctttatcaataagtgtttaaaagcattccaatgttcctactttttaccaaggatttaacttcctaaaaatgtaaagatacaatctagaagtacaattaaaggtgtcatcacagcactgtatgtaataccatcttttaataatgttaaatttaccactatactcagaaaccttttttttaaattaagctaaatatccaatgagatgggattgaatgcatagattatggtatgtgcatatgctggtatagtctgcttccattaaaaataataaatcccattaaaaataatgttctcagaaaaatgtaaatattggaaagctgttcattgtaatataatgttttaaaaatttgtaggcatacatatgaagatgtgcttttgtatatatgtatgtatgcatgtgtgtacgtgtatgcatgttttcttctgtaaagaaaaaaccactgagtgtactaaatgttaatgatgattattgctgagtggtagtataacaagttatttgtgttttctttatgcatttctatgatgtttatattttctatgagtccattgttttaacagaaaaaagaaaaccacctttttttaatgcaaaagcataagtagtgacctcattattcacaacatacacagttataaggggctagctctggccacaaggcagaaaccaggtaaaaatgtgcagtaattgttccggcttggatctaagacaatgacctcagtatccatatattctccatgtctgagatcttactctgatctcattttggattagtagacattactgggctttcgagttaaaacgactgagtttaaaatcccaggtttttcctcttaatagcttttgacctggcataaaatatttaacttttcagagccccagttatcaaacgtaaaacaaaaaaatgatgttgcttataattaaccttaagaattaaatgaaatagcatccatgtctagcacaatgcctcaaatgttattttgcttttccttcctagaaatagaggaagagctgaactcacaaggacagacaatattacagtccagacaagagatagcaggggtctacgggctgttcagggacctttagacttctttcaaatttggaacaaactcgtaaatccccaaaatacagttgattctggggtttcacctggacacttgattccatctcttttccatcacaggaaaaactagatctttggtgtttgaaccaaaagccccaaatggtttccaaatataacctacatgtcttagaacatcagatataatctcttctgtaacaatgattaattaaagaaatggagtcctgagcgctgtattatacatgaagcagaaccctcttccatgcactcactttgcactcccaagttgatgacattcattaaatgtaaaaatgtgtgagtaatcccattgtttttgtttgtaggtcccgagatgtggccgtagttaaagtgaccatgaattttgagccaaataaagtgaatattcaaaagaaaaactgccatatggagggaaaggaaacagtatgcataaatgctacagtgtgttttgatgtgaaattaaagtctaaagaagacacgatttatgaagctggtaagcaaaataattatagcaagtacttttgggtagaggacaatatatttgctctagcatgatgaagtccagtaggatattgtattttccccacatggtgagctgcacgtcatatttgccccagtgaagatgcagaaccttgaaaaaaaattctgttgcaaaaggaataggttatggaacccagtcaattctggagcagaaattacatgtttgtatgcagtgccctcaacactccatagtttctgtctggctctcctacttgctatgtacaatgagacgcttaagaaaaaaataccgattcagaggtagagtttagaaattgagctacaaatgggcccagttttccttcctgtaggtttctaccatgactcttctctcccttctcttgccccctcttgggaaagactgatattgcagagaaccctaatactttaccattcccacatttccgagatcctttgttccattgaggtgaccctagtttccgagagtcagacttgttctgtgtgtgtgttctcaggtgcatcaggtcagcctgtgcttcctcttcctccctccgttctccactttctaaggcagctttttaatgatgttgaaatatgctcgaatcaaagctataaaggccattggctaaagaagagaaatttactctgtaaccaaatacaagcagaatgagaaaagccattaatccttaaaatctgtttttcttgatttgttccatatgtgcatgtatatgctctgaaatagcctcctgactagaaagatcaatgaggtataagaacataaaataatgattttgagttttatatgtaactttatttcagtcttatttaatttttgcaaagtaattaagtgatcaaataaggaatattgtagccttcatatacagtgtaagatttcatttattttctttattgtggtatgcttattttattgaaccttaatagtggtttgaccataagctgagataatgtcattttatatataaatagattaaaatgtatatatttgtaaataaataactaaagtatatttttgtccctattgaaatataacataatcaatattctaagcagggttccaacatttctaaacttaaaaagaatgttttaagtgaaaatataataaatacagtggtggcctggcaattagatgataggcaggtgtgcatgtgtgtataagaattataaacaataaatgtaattagacactgaaagcacagtgaactcagagaccagttctatagagttcctcaaggttatcttcatgactgctaatatcattgttataacagtgtggatatgctgaacaatagaatcttttttgattgattgccaaagagatttttctataatgctaatttaataatctgtacaatatgagaatcacttcaaataaacatttccatcaattattttttaaaatttttgtagatttgcagtaccgtgtcaccctagattcactaagacaaatatcacgaagttttttctctggaactcaagagagaaaggttcaaaggaacatcacagttcgaaaatcagaatgcactaagcactccttctacatgttggcaagtaaatcatatatcgttgctgccttattccaaatcaagaatacagtagagatgtcttatttcaagtcaatcaaattcttactgttttatttcaaaatgcacttatgatgtcataaaggaaatcttgtttgttcatttttatcataaaatcgcaggtctaattttctcatttccaaatatttgtaaaactatctctagtcttccctgtctgcattatcagacatccatatattatggaacggcaggaaaagacacagtgttctagttgacaagaaaccttattcatgtcttcatttctttcactcattcatttattccttcaacttgaaaacatttaatttctgtgggccttgtctgtcagttgtggttggtaagtgattaactgctctgggggcagactgctgggctgtatgctttctgggatccatgtaactacatatctcgccgtttgattttagagcgaaggggaaaattatctggtattttctatcatctgtaggctttgtgctacttcagttttttttttttttaattttagtggatgagggagttttggaaatcaaactattaatgtttagagatggctggtaagccagtgtgaatcatttaaaatgtattttgttgggacactgtgtatatggggaatgttcccaacagagggcaggagtttcctaaacattttcttaaaatgtacatgagagtgataaaaacaagaagcagcatgaaggtaatgaggaaactgattttagtaactgacattaagacttagagacttgacggtaaacttggagctttaaaggaaccaggccaattttcctacttctgacttatttctgtattattgatatattcatagtctgtattttgaaaattgtagttcaggggcaggggagtgacagaaaatgtgcacccttttgtgccacatttgttcttcctcagtgattttcatgttgatatgcttcatgatacttatcatgaagcttattctgtcaggaccaagatcaatctattatttggtaaaataacactggagttgcccctcctatttagttaatcagaactgaacacttaggaattagaatgtggataaaatttgaatgggtatgaaaccagatatggcattgtctccaacctgctaaaaatcatctcagtctatgtttgtccacaaattcagtgtctaagttatgtccaggtactggtgtttaaaggactgaaatattttcaaaatttcgaaaattgttttggattttgaaagaagcactttgaaatttgttctggagtcagccagtgtagaatttgtatcccaaatattccacattctgagagactttggcaacgtcgtttggtctcttagagggtcaatctttcatctgtaaaataaggacaataatagttactcatcttagaggactgttgaaataatttgcaataatgtatataaagctcataattttgaatactataaatgattattgttattggtggcatgttaacagtattaatcatattcacatcctttccaaataattttacattataaaattcttggccaggcatggtggctcacgcctgtaatcccagcactttgggaggctgaggtgagtggatcacctgaggtcaggagttcgagaccagcctggccaacgtggtgaaaccccgtctctactaaaaacacaaaaattagctgggtgtggtggcacatgcctgtaatcccagctagtcgggaggctgaggcaggagaatcacttgaacctgggaagtggaggttgcagtgagccgagatcgtgccgctgtactccagcctgggtgacagagagagactctgtctcaaacaaacaaacaaacaaacaaacaaacaaaaacttatagctgtaggtatatattatattaatgaaatgtaactcattttatagaaagtttgcccttctgaagttgggaaatgttcccggaagtgttacataatgatctttggcttgaggtctcaagaaaaactatattgtgatgcaggtagctcctatgttgacacagccaagtgtgatgttgccatcactccagcagggccctctgaggaactggaagtgagtcaacaggtcatactctgaaacctccacattcccctatgccccttgtcagaatgccaatccctctccagggaagcaaaagcctgatgagatcatatgtcagattagatgcacaagaatgctgcagtaagcctgacccttgggaacagaagaaggagacataacaagatcagaacacccggtaaatatgataccagtgatatattttatgtttcaccctctaggacaagcatgactttcaggactctgtgagaataacgttggactttaatcttaccgatccagaaaatgggcctgttcttgatgattctctaccaaactcagtacatgaatatgtaagtcagatttctttaaaatacaaaataccaacttgtgaacattttaatgtcactagtaaactgtgttttttcactactctgcattgatcacaaagaacgaacaactaactggaagaaagaaaaaaaaggcaagcagattttattcctggtcaggaatggagaaagagggagctcttgctctaaagaccttctcttcaagctgtgaaaacctggggaattttaaggagttagatgtggggcagggaggtatatgtaagcatgtccagagaggaactccagatgtacaagtacagctcataaacatgcttccttatacaacatatgttcaagaaatggtggccattttcttctatggcagggactttagcattataatgacatgttaatgatctaaaggtaacaaggggttgctggttcttgtttgctccgttttctcaatggctttatcttcctctggtaattggcaaagggtcctgaagctcccaggccgtctatagttgtttttcagcaagcttacctacagataaatagactagaaaaaaaaaaactgtttaagaaaaaataatgcactttctcagctatctactgtttaacaaaataatgaactttctcagttatctactcttcaagaaaatagtaaactttctcagccatatctccaggtttgccctggtaacattaggaaaaagcttgaaacccatgcacacataaccctaaatcaatttaaaatgttttaaaaaagaattaggctcttctagactttttccaatccttctaatttcctattgttggagtttaagaaaactaataaatgacactcatttttacctcatttgaatttaggaccaatggaaagaaatctcccccattattctaataagcactggattgcagtgtatggtttaggtataaagggtgtcctcacgctgaagcatggacttagaccaccagtaaccacctaggtcatcagcagtgctgatccatctctgtccttcttcatggagcccaccttgtaaaacttgtcaaatggagtagagccaaatgtgtgcttcctgtgggtacagctgctctgagaatagaaatgagagaaagggactgagttgtgttcacttagttcctgttcccaaagttagagtccatgtgccacccctgagagtggagtgaggggagagaagagggagggtgtcactagcgtggctccaatggaagagatatgagggatggggaattctttttccccatacacctatcttccattctcccttccttcctaccagatatattgattgtcttatacataccaggcattggagcttacagtctaacactggaaacaggtattaagtagtaattagagcatatgctatggaggaggatttcagagctctctaggaacttccacctaggctgagaagtcaggacagccctcctgaagttgtgccatttcagtggagccctgaaggatagggtgatttccaccctatttaggggagtttggggagcagaggggatgctaagtgtgaaagtcctgagcatgaaggaaacaacgacattcgctagtgtggctgacgctaaagagcaagaaaggaggtgacgtgaggtgaggccggaggtaaaggcaggggccgggtcattcgggacttggtgccactgcacaaattctaaacttttgaaagagcagtgcagtgcttttgaaggtttttatttggttcagccacacgacaggatgcagcagagtgaagagtggttggagggaaacaggtggatgtgggagccccgtgggaagctattactttagttcagggaggaaatgagaatgcttgggtgtgaggtggtggtgggactgcagaagcaagaaaggattggagagatatttagaagaggagtagaatggacagggcttggtgagttacatatggtggtggtggagaggcggtcaatgaagaagaatcaagcaaaactcctagatttgtggcttgaccgttttccaccctctcaactgagctttatgatattcctaagtatttgattaattttaagagaaaaatctcatgattagagttgagtagatttagatcttgcagtacttgactttgtatttcaaaactgtccttccctggcagacaaaagccagtgcaaagcacccatgaaaattgtgcgttcttaaaaggacaagcacaatttacatttgtaagtaaatgtttactcttctcccctataaattacagggataaatataaaatcccttaagatttttgcagggaaattctccttatgagttgcttaacttactttggctgtatgccatttttgttacacaaattgatgggtaattttcaacaatgcgtagctaaattttgaaaaattctttcctgtcatcatttcagattccctttgccaaagattgtggaaataaggaaaaatgtatctcagacctcagcctgcatgtcgccaccactgaaaaggacctgctgattgtccgatcccagaatgataagttcaacgttagcctcacagtcaaaaatacaaaggacagtgcctataacaccaggacaatagtgcattattctccaaatctagttttttcaggaattgaggtaaacttccagtttttcatttatttgttctcttaacatcatttacctggcctacttttcatgctactgagataattgcttttattagattgattttgaaagaatagaaggaattttttacattagtcctcaccaatggtgaaagtattaagctttttaaaaaagttttgttttatttattcaaatatgtatgtcttttcttagattctgtgtgagaaaaggatagctcatgtataaaaactgtgtgtttcataaaatccttaaaccactgaaactgaaacagagtcaaggaaaataataacaatcaaagccaaaacagttaacagacgtacagagaggtacctctgtgttaagcaaaaaaaatttacctgcaggaaaatcaagataccatatctccctttctatgcaaaatccttactttggcaagatatttgtattaaataactgtgtcttattgatttgtaacagaggtttcttttattacattggcaataaaatatattaatctgtgtaagatgctatatcagaggtaatcagtgtttccaaatgtgaactttgctcttaattctgatctccaaatgaatcccactgagttaaaattttgtgtatatttatattaattaatattacatacaatttatattaaaagcaatgcacttattaatattatacatagtattaaaacactattgtctactttctgtaaactcagatttcatggacgtttctctctatctgttaggatatcacttagagacatgatgactaagacaaacctaaaaataatgtcatatattactatattttggattcaactaagaatattaattacaggctgggcatggtggctcatgcctgtaatcccagcactttgggagaccgaggcgggcaaatcacggggtcaggagatcgagaccatccaggctaacacggtgaaaccccctctctactaaaaatacaaaaaattagcaaggcatggtggcacacacctgtagtcccagctactcaggaggctgaggcaggagaatcacttgaacccgggaggtggaggttgcagtgagccgagattgcaccactgcactccagcctggtgacagagggagaacaagactctgtctcaaaaaattattattattattattattataaatacaaatgtacaaagtaatcttggggaaaatattaccacagaatttttctctagtaaaaattattgcctgtatcctcctatgctgacttaatggcctggcagagaggcatagctaaaaaatctgacagtgcatctcttctgtgtatattaacagtaacaacagtaataatgatggcaaccatttcttgagtcacatcatggtttaggccctgtactaaggatttcacttatttcattttcattaattcttttgtaagtaggtatgactgtactgcagagatgcgaagataaaacctttttttcatgtttcaacattcttgtaattgcattttacaattgataacatgtttatttacgtggcagtgttatttttacttcttatgggtatgtaaaaataatggcatatctcatgttcaatggcattttaaactggaaaaaatagagtatatgactaaaccacttgatagaaaatcagtcccagagaggtgaggaatcttaacaaggataaagctaacagtggtgcagtcagggtttaaattctggtggtcacgggtcagagcctatgctcttatccactgcactaaactcctccaatgactagcattcactgaagactgctctgcaccagtcttgggtgtctggattattttatccagccaccgcaatcactctgtgagggaggtgctattagtacttccattttacaactgaaaacttaggtaggattgtgagatatgctttgtctttcaggcacccacaagtgatgttttaggatttccatgagtgtagaacagctggtcccagaattctgtgcctcttccagctaaatcgagacaaaaatagtggcaaggcagtcaccaagacacatctgggaaaattctgaaagaacacgtatcaatatttcacctgcttgtccactctgattctgtttgctttctcttcctaggctatccaaaaagacagttgtgaatctaatcataatatcacatgtaaagttggatatcccttcctgagaagaggagagatggtgagcagatcatacaaaatacatgtagaaattgaatatgaaaagtaatatgtgcaaagacaaatatataaatccttccaatggtagtttaggataatacggatgaaaaatgttcagttcaaaattgtgacagattggaatatgctatggtcagaatgtttgtgccccaccaaaattcatatgttaatacttaatccccaatgtgatcgtagtaaaagatgaggcctttaggaggtcagtaggtccagagggtggagcccccatgagggattagtgtcctcatacgagaggcttgagggagactgctcaccccttctaccatgtcagaacacatagcaggtgccatctatgagaactgggtgtttccagacactgaatctgttggtgccttgatcttggacttcccaaccctcagaactgtgagcaatatatttctgttatttataaaatgcttggtataaggtattttgtacaaggtatttataaataacagaaacatatttaacaaccttgtaacaattcttacacaggcaaactcgaacaccaagacaagatttaaaatttatactacataacatatctaatttatactacataacatatctgataaaatggagctgggaaattctgttattggagtctcctaggtagtaggtgtctctggccttcaagaaaaagaatgcttcaaatagattggtttagaacttaatcagaaattctccttccatctctctctttctaaaaaaaaattgccttattgagatataattcacgtagcatggagttcactcgttgaaagtgtgtatttcagtgggttttagtatattcaccaaattataaattgtacagtcattacgacaattgattttagaacattttcacacaccacaaagaagccacgtatgcattggcagtcactctgtttttcctcaacagcctttctcccaagcccaggcaaccactaacctgctttctttttctatggaacaaattgaatttccaaatatcaattgacttttattggcaattctagaatcaggcaacaccttattctgtaaaataaaatgaatggtggatgagctgaggagaggaagttgactttatagagagaaaagggctgaagaaagcagaaacagaacgaaaagttgattggtcatttcaaagttattttccttgtaaaagtgaaagcagaggggattttcttatcatgctgtttgaaactggcttgattggggatttggtgattatctctcacttttctcatctcccaaaaagtcagacaaatgacttaatttcggctttgtggtgtggaacttaagcattatttagtctgttgggcctagagcaagagctgtccaaaccaatgacctcctatatgttttacttaacatgtttcttagtctattctggctgctataactaaatactataaactgagtagcttaaaagccagaagtttatttctcacagttctggaagctgggaagtccaaagtaaacacactggtagatctagtgtctggtgagggcccatttcatgcttcatagaagatgtcttttcaatgcatcctgagatagcagaaccaggaaggcagcattctgagttacaagggtactaatcccactcatgagggctctgcccttatgatctcatcacctgcccaaaggccccatctcctaatatcatcacattagtgtttaggtttcaacacatgaattttgaggggaaacattcacattatagcaatatgtaaaacatggtagacattcacattgaaaaagaatatgtatattatatgttattctatctattttgagatacaataaggtttcattttgtaagacaatgtttctcaaataacttcataatttgagtttaggtaatgtcatttatggaaattgaatattttagtcaaagtaaatttcttatctgttactaaagacatatttttattttataggtaactttcaaaatattgtttcagtttaacacatcctatctcatggaaaatgtgaccatttatttaagtgcaacaaggttggtttacatgtgtataaatgtatgtatatgaatgtatattgcttcttctgtgtatgtcgaatattttgctctataaactcactgacagtttcttccaggttgtaggagatcagtagaagtggaaggcaattaaccactttgcttcacaaaaacacccttaagaataattagcaaaataaagaaattttcatttaatagaaataattcacctagattaaagcaatggttctatgagctatagaagataccataatcacacatcatttatatctgccaaattgcatttaaattcataaaaaatttactgataatttaaaaactttcactggctgcccatcaaggtcaaatgaatcattagatggacttaaagttttatgatatccttttgtaatttaatatactttattcaaatcagtcagtacttctgaaaggtatcatagaacacacagactaacaacagcaaaggctcaataaggaaagtgaaatagtggtctaactttcttctaattgtaattatccactgacctgtctgcagtgagatggtgtcttttactgttttattcacagtgactagcattgtgcctgccatattataatcactacatagatgtagacgaaatgaataaattagagaaatgaattaatggattaattaattctgtatgttcaagtcaactcaacaaatatttatttgacatctattatgcacaagatattgagttagtcactgtaaggaatataaaaattactaagggcatgaaactcctcatagggtaagtattacagtagggggttgagtctagtataaaattattgtaacctgggatagaataaaaacactccattatagagatagaaagctttgtcagaaaattaatagaagctgaaataatatctacttggcaatgggaacccaagaaagctttatcaaggaacttataattgagaaagaccttgaagggtagatagcatttcacagagaggtcactgaatagcaccaggtggagcatttcaggcaaaatatatagcttgattaaaaaggttatcaattttagctgaaatataaagaatacataaagtagcaatgaaaataaacagggagtgtgcattctatcatattacgctaggtactgaatgtcagtcaaggtattatttcttaattgaacagaccttgaaaagccagtaaagtttttgagaggtaaagtcatctgtacagagctgctgcttatggagatgaatttaggaaggctgcagtgtggaatgggtgagagaaaaggggaccattcatgctaagagctgagtcacacaaatacctataatccaaggcagcatgctgctttctctgtcctgctgcttatgagccactttatacatttgggaataagcagagccattaaaaagtactcttatgcccattctgtgagacaatatgttaggtgcttggtcagttggtggaggggtatgtgtaaaataataatgaaagctaacacttactgaatatttcctatgtcctaggcacaatcttaagcactttatacttattactaatttaatcatcatttattactcatttgatatcccattttatagatgaagaaaccaaaacaaagacagataagtaatttgaccaaagtgtatcagtgtccaagaacaatctcattctctggccccagagccagtgttcattactcgttatatcatttgtatgtgttttctaatacgaggaagtatgtatatgtgtgtatgcacatatatacatgtgtttacataatatataatttaaatgataaccaaaatcaagagaataaatcagtgtttaacaaacaatatgatcatcaagtacttagtatggaaagactattaaagaagaaaacaaaagattttagatttactctcagctgtgtgaccctaatcacttatctttactaagtcctcatctgtgataaataagcatcacctgggggcagatatgtggttaaaaacagaaattcctgcaccccaagttggaacccctaaatccatatttctaagggaagcccagtaacctttgtattttaacaattaaactgagggattcttatcaatattgtcatagaattttgaaaaacataaatcagtgtgattgtcaagtctagtcgcacatcagaatcaacttgggaactttcaaccataccaatcatctctgatctccttcttcaccccaattaaaaaaatgattaaaaattatactcttacatgcttttatttagttgccaggataagcttctctttcaaacacttagaaatgtctttaaatagtcaagattttaatggtttgtctgaatgtgccgtgtattttctagtgacagcgaagaacctcctgaaaccctttctgataatgtagtaaacatttctatcccggtaaaatatgaagttggactacagttttacaggtaggagaaaactacatttttatgtggatgcctttctattaacccagtggttctgaaagtgtggtccctgcctggccaagggcatcagcatcacctggaaacttgttaggcaaattctctggccccaccagaaacctaccaaatcagaaactcggaggatggggttaaacaagccttccaggtaattctcatgcatcctaatgtttgagaaccattatactaaataacccaaagtgttaggtgttagtgataccggattgcatttgctgtccagtcttaattcccgaatgcaagttgaagacccagaagtccttcgcaaaacacgatattttcttagaggccgccagcatatttcttggtcatcgttctcatcctgtggaagctgatcagtcttctcaatctggacacacaagattaaagcatttctcattgataagagctgtttatttcttccaccattcataaaccattctttctcttaagaacttcttatctatcccaacacaaaccatgttgacaaactttccctctataatttcccctgcttaagcagaactccaagcttttgccaaataaacatgtgcaatatacttaaaaggataagaatcagtggcaagtaggtttattctaaaagtcttatcattttattaattttttaataatagtggctaacatttattgagcctttgtgttctgtcttatgtgatcctcatgataacactatggttcaaatacaactactatctccattttccagttgaagaatttgaggttcagagaggctaatttacccaaggttatatattcaggaagtgttagtttaaaccatttcacatgcttttttttttcttttaatttaaaaactgttttaaattgacacgtaataattgtacatatttataaggcgcttggagacgttgtgatgcaagtaatatatagcaactaaacagggtaattggaacatccattgtctcaaacatttatcttttttttgtattgggaacattcaatatcttctttctggcttaataatttattatctatggcactctctctttactaaatggagactacaaaaatggcatgattataggacatacatgtagattgtgctaatatttctcagcctttaaattctgtctccacttttctgtatttttctgtatccacttctattggtgcactgacttttccccaagagttttccatttacttaaaatcaaattttggcaaacacttataaatattttttgtcttcccttgactgaagtgctgcttaaaaacatactattttactctaccaagttcatccaaagaacatgatgaagctgtgtagagaagattgaacttttaagtttagcagtaaatataggactttaaattatgaaatggtaaaaatttttaatctatttagaattcagcattacattttagtttcatttttcactaggtataaatggtattagtgaatttacagaaacttttcacttgttaaccatgaaattttaacttttaaaactcatattctagcattttggggtcaaataagcatcagtgactattgaactaaattacataatccttctcactctcctcaaagatttaattttacgtttcaaggtaaatgaattcccctatgatttgaaatccctacaagtatttttgtggaattacatgatatggagaaagaaaataatgaggccaaataaaagttaaactttgttatgttttatttttcttctaattaattttttaagctctgcaagtgaataccacatttcaattgctgccaatgagacagtccctgaagttattaattctactgaggacattggaaatgaaattaatatcttctacttggtaagaaattacctctaaaatagtattctaaaggagttatttgtaaatatataaattaaagtattaacagacacataaaaatatgttgcttcaatgtttaatctctatattccagcatattttctttataatttcataaatataaatatagacatataatatataaatataattttcaatttatatttttctttataatttcactgaagatttaaatttgttgtaattatattttcacatcagtttagagatctaagcctctaatttcctcaaaataagataccactagaatgactttctagaaaaaaaaaataaactatgggactagatagatgctaccgataaacctgtagactttacttacattattttatcagtgtgactgagaaaagcactttttcattaattatgactatatcagaaatttgttatcacaattgtcttggcaattttttttacttaacaaataagtatgtatcacattctccttattgttacctttcacatgcattgtactataaattactcatgttggtactaccacctccttaaatgatgttttctattacatttatttttccttttaaatccttcataacaaactctataccactatagcaaacaatcacggaattttattttaggtaatgcctagttactgacacagactcaagttaaaatcactcaaggaaaaaagagagcacaattcaaataatggatttaaatatgtattcaaaaatatgagataatgcaacaaaattataaatgaagacagcctcaatccttttgggaattgccaaccacaaaaaaaagttctctcatagagtataaataaacgtatactcccaagattaatttcattttttaaaatttgtactctttgctagaattcctatgacaatttatgctaatttccctggaaattagcataaatgccaatcactctactggattctaggacagatttttggaattcaggctatcagatttctccagccctattcactttccctgaactagaaaattcagcaaaaaaagaaagaaaacaaaaagactttgttgcagaactttatatattgtaacttattagggtccagatttgaaataggtactctctcttataaaagtgttgatatgaattacattgctaagaatattcctgagcataaaactttgtgtgtatctctgattattttgctgaagtaaattctagaattggaataaaggagttttttaaaagaactttttttaaggtgaaacccggtaagtttactgctcggaattttccctaggaaatttttggtgatagaaacaaagatttcagggatgttcttaacaatattatttataatagtttaaaaattaaagcctgggcacaatctaaacacttaacacaatgaaattacttacattatcatatatttagtgaagagattatcatatattcaatggagagacaacgtaatattttagaaggcacattttggagtaagaaaccataatgctgctatttactagctttgtgatcttggaagttcttaattttcattccaaccttcttacctcatagataaaacaaagataatatgaggatctgcttcctgcagttgttaacagggttaaaagcaataatgcatataagaagattagcacagcatgtggcacatagtcaacaatattgatattgtggttgttatgaacagtcatattctcaataaacttatacatttaaaggaaaatgccatagcataatacattttacagacagggtacaaaactgtattttattgtgttacaaattttataaatatgcatatatgcaaataggacaggtaacctacactaaaatgttaccaaggtagttgaagtataggaaacgtttattttcagtattttccaatgtttctacaaggaacattttttaatcagaaaaaaatggtaattacagaacacaggatttcttttttttttttttttttttttttttttttttttttgagacggagtctcgctctgtcgcccaggctggagtgcagtggcgggatctcggctcactgcaagctccgcctcccgggttcacgccattctcctgcctcagcctcccaagtagctgggaccacaggcgcccgccactacgcccggctaattttttgtattttttagtagagacggggtttcaccgttttagccgggatggtctcgatctcctgacctcgtgatccgcccgcctcggcctcccaaagtgctgggattacaggcgtgagccaccgcgcccggccagaacacaggatttctaactgaatatcaggaaacagaatttgactggaaatcaagaagataagagttagggagcatgtttaagggtccaggtgcagctggtcaggaacctccagaattccagaattaaaggatgtatttcgtctttacaaacccaggaaactgcttcagatctgaggagctctcagtctggaaggctcagttgggtagatcactggctttccttgggtctatctatgtagatcaaggcgttccctacccagctaaagaagctgcacagggatgccataggtttcaggcctgcagattatgcttcagcagtaggaaggggacaactgcatctggttgtcccagttcagttgtaccttttaagcagggaaggacctctggatagtgagttcagtttcctgttgaactttatcctgcccacctttccctctgagctacactcactactggtagcagaacatgatactaagtggaaactttgggttagtggataaaatcgaatggagactgagatgaaagtaaatctgactctcataaaaccagattatcaacagccagtgtcacggtagccctagctgggggtagaattgtgaagggaagcagatgggagtctggttttcctgtatagtggtggcagatcccatctagccaggattagagatgatttatgggtttaaggaattatggcaaactgggtaaaggcaaccaaaaatctaaattgttccgtggtctcccttctttccagtttcaaaaagactggtatgttaaaaaaaaaaaaaagaaagaaaaagaaaagaatgagcatggcaagaacataataacagacaaaaacttccaattctggtcttctgttaatcctaggtctattaagagaatgggggatggaggaacaatatgattatagctgatacatacggctactgaccattaagtgtccatattttctgctggctgaattatgccaattctctgtacagcaccataaaggatctacatttgtttggggattcaaaatattacacaatttacttcatcagctagaaaacaaagccctacataagacagaagaattctattaaaagaggaagaaagattacatttccatttttttcttgtagattagaaaaagtggatcttttccaatgccagagcttaagctgtcaatttcattccccaatatgacatcaaatggttaccctgtgctgtacccaactggattgtcatcttctgaggtaagtcatgtgtgccttggaattatgtcattactgttatcttttccactttatgtttaagccttttgttctgcatgatacttgtaataaagaattttaccaaagtaacatggagaggtatttagataattaaaagcaaataataatagatgtattattccctagagctgctgtaacaaattatcacaaattgagtgacttaaaacaacacaaatttattctttcacggttctggagtccagaagtccaaaatcaaggtgttgacagtgttaattccctctggaggctccaagagagactctttctcatgctgttttcctagcttctggtgacaactggcaaccctagtcgttccttggcttgcggcagcatagctcctatctctgcctctgtcttcacctggccttctctgtgtttctatgtgttctccttctctctttgtgtttctgcacactcaccattagatttagggtccaccctaaatccagagtgatctcatctggagatccttaatataattatgtctgcaaagaccctatttccaagtaaagtcatatttactagttctagggagatttaggcatatctttggggaccactattcaatccactagagtagattttaaataattcattgttatgaaatgtttcttacacttttccttgatttgtggtaatcaaacaactctataaagtgacttcttaattgtacctaagcatgcacagctgcaaacaaaatagtataattgtatttactcacatcccaaataatagcaatattgcaccccctttatatttttagcttgaatgagactatatgatggttcattatggtttagtgcctaaaacaaaaaatcaccataagtattgaattaatgtgtgcatgatgtcagaatttggaaatctgtcttttcatgcattttttaaagtgttcccagaaatcaagaaatagcaacaatgctaattggcttgtgatcacttaaatgttttcctaagggcaaggaaaaaataagcctttggaatttccctctaatccaaaaaagcaggtttgtgaaaatccagaagagaaaaaaaaattgtacttttcatactgcttaggaaactttaatcttattaacttttgtcaaggatattgacagtactggggaagcaaaaggtttactaggttaagtctagaaccagctatcttataaatatagcattttaacataatatattaacatctatagggctgtctgcttacgtctacctcccatgtagactgagtgtcctatccttggtgtgtagggaatcaaaagtattactggatgaatacataaatacagatgaaggtctctcgcttttcaattgtttcatgagccataatattgaacaagtatttttgttgtttttgtttccttttttttgagacggaatctctctctgtcacccaggctggagtgcagtggcgcgatcttggcttactgcaacctcctcctcccatgtccaaatgattctcctgcctcagactcccaagtagctgggactacaggcgcctgccaccacacccaactaatttttgtatttctagtagagatggggcctcaccatgttggccaggctggtctcgaactcctgacctcaggtgatccacccacctcggcctcccagagtgctagaattacaggtgtgagccactgtggctggccgttgtttttgtttttatcagtagaatttaaatgcttttctctctctgtagtatagaatttataagcttatctttgattaaggtaataatgaatgtattaatcacgtaatagtaagttctattagcattctttcttttccattacaacctcactagtttccattacaattcaaaagtagcatggtaagagtacatattatcttggggtggatatatatgtatgtatggctggtgcataacaacctttcccatacagcacacttacaaagatggatctctaatatatggcaatggctgtcattcacagattctttacactactgcagcaagtcatgtttttcctctgatatctggcattgtctgataaatgtaatattttcatttctagaatgcaaactgcagaccccatatctttgaggatcctttcagtatcaactctggaaagaaaatgactacatcaactgaccatctcaaacgaggcacaattctggtaaattaagacaagtgctatttttaccttttgctttccaaatgaataaaattgatatcaatctagaaataaccatctgaagaatttaaatatagatatttgataaaacggcaagaatactgatatgtatctctggacatttaaacaggactgcaatacatgtaaatttgctaccatcacatgtaatctcacttcttctgacatcagccaagtcaatgtttcgcttatcttgtggaaaccaacttttataaaagtaagtaaatacatagttctatgcacttattgaataatatcaataaatattcatttaccacttagaatatgcaaggcactgtgctgcttttggaaagaatgtgcgactggaagtataagaggatgtgaccaagccccagctctacttaaccagctatgtgtgtctcatcttccttgtctgttaagaactaagatattaccaaggtcccctctggagagatatacttttttcaatctctcttatcctttttctttgtactttaagagataaatacctttccagtaccaaagcttgcacttatcttaatactttggaactcagttaatgtacagagtataataaagtggcaacccttgaccccagtaacaaaggaaagagctaacatataccatagacttactgtgttttatcagactgttattatatgtataattttataatatataggtatatatgaagccttttttcttttttttttttttgagacggagtgtctctctgtcgcccaggctggagtgcagtggcacgatctcagctcactgcaagctccacctcccgggttcacgccattctcctgcctcagcctcccgagtagctgggactacaggcgcccaccaccacgcccggctaatttttttttgtattttagtagagactatgaagacatttttaaccccttataaagccaaatctgtctgacaataagctactttaaaactttttattgtattttgtattatttatttctcaggaagtatttagttgaacatatgactttgccatttttgaatttgattatagtaagttgctatttttatgtcattaactgttaatattggcaatttcattttttaaatttcaactttaattttagatacagggagtatacatgcacgagtttgttacatgggtatatttgcaggatattgaggtttagggtacagattccatcgctcaggtagtgggcataatacccaataggtagtttgtcagctcctccaagtagtccatggtgtctactgttcccatctttatatccatgagtacccaaggcttaactctcacttatacgtgagaacatgtggtatttggttttctgttcctgtggaatttgcttaggattatggcctccatctgcatgtatgttgctgcaaaggacatgattttgttcttttttatggctgtgcagtgttccatggtgtatatgtacatattttctttatccaggccactgttgatgggcacctatgttaattccatgtctttgctgttgtgaatagcactgcaatgaagatatgaccgcacgtgtctttttggtaaacagtttctttcgggtatatacacccagtaatgggattgctgggttgaatggtagttctgttttaagttgtttgagaaatctccaaactgctttccactggctgaactaatttacatccccaccaacagtgtataagcttttccttttctctgctgcctcaccattttctgttattttttgacttcttaataatagccattctgactggagtgagatggtacctacctcattttggcttttatttgcatttctgtaatgattagtgataatgagagttttttcatatgtttgttggtcacctgtatgtcatgttttaaggagtctattcatgtccttcgcccattatttaatgtggttatttgttgattgattgcttgctgagttgttcaagttccttattctggatattagacctttgtcagatgcatagtttgcaattattttctcccattctgtaggttgtctgtttactctattgataatgtcttttgttgtgcagaagctctttagtttaattagatcccacttgtcaatttttgtttttgttgcaattgcttttagagacttagccaaaaattatttgccaagaccaatgtcagagagggtatttcctaggttttcttataatatttttatagttaaaggtcttatatttaaatctttaatttgtcttggttagtttttatatatggggaaagttaggggtccagtttcattcttctgcatatggctagccagttatcccaacaccattttttgactagggattcctttccccattgcttgtttttgttggctttatcaaagatcagacggctgtaggtatgtggctttatttctgaattctctattctgtttcactggtccatgtggctcttctgtaccagtatcatactgttttgattaccgtagccttatagtagagttcgaagtcaggcagtgtgatgggtctggctttgttctttttacttaggattgctttggctacctgagctctttttttagatccacatgaattttagaatagttttttctaattctgtgaaaaatgatgttggtactttaagagcaacagtgttaaatctatacattgctttgggcagtatggccatttaatgatattaaatgaaaggttttttcttttatttgtctcatctctgatttctttcagcagtgttttttaggtctccttttagagatctcttacctccttggttagctgtattcctggatatttcagtgttttttgtagcttctgtaaatggagttttttttttttttttgagacggagtctcgctctgtcgcccaggctggagtccagtggcgcgaccttggctcactgcaagctccgcctcccgggttcacgccattctcttgactcagcctcctgagcagctgggactacaggcacccaccaccatgcccggctaatttttttttttttttttgtatttttagtagagatggggtttcactgtgttagccaggatggtctcgatctcctgacctcatgatctgcccacctcagcctcccaaagtgctgggattacaggcgtgagccaccgcacccagccctgagttgtgttgtttatttgactctcaccttgaacattattggtgtatagaaatgctactaatttttgtacccctattttatattctgaaactttactaaagtcatttatgaattctaggagttttttggcagagtcttaagggttttctaggtataggatcatattaccagtggaaaaaagatagcttgacttcttctattcctatttggatgtctttatttctttatcttgccttattgctctggctaggacttagagtactaggttgaataggagtggtaagagtgggcatccttgtcttattccagttccccaggggaatggttccagcttttgcccattcagtatgatattggctaggattagttacagatgactcttattatttggaggtatgtttctttgatgcctgtctctacctagagttcttgtgctgattctttctcatcttgggggactgatgttcttcaactgtggtgtaagttgagtgtagtcatttgggtttgtttctggatgctttcagagggccaagtctctgtacaggatctttatttgtgggtgtatgctcacaggagtgtttattagcaaagtaatttttggtgttgttgtttgagctgtgatccagtagagggcaattaagggtaatgggcagtagataggctcttagtcttgccactcttgtatttgctcatgtttgcaggggtgctctgcagtgggtagggagaggcctcctccaatcactggcactgtacccatgtttcttttgttaggtgttctgggccacaggctctctcgggcagaggccatggcaggtagataggtgacaccttttccgaaccagccctgtggagggagtcatgccctactccagtgctggcccacgctggcccacgaatccatgtttgttacccatctcagtgctctgagatgggggctcctcccctacttgagtgccagccatagatctcagcttggtactcctgagacggacatgccatctctgggtctccaggacaccccgcagctcagagtcaggctctggttgctttggaggatccaaagtcctcccaggtcacagggaaagtactcaggtggggcgcagcacccaggctgggcggcagagactgcgctgtgcacatgctcctgtggggcagttaggcagggactctgggagggtctggcaggcgggagaggctgcagaacagacatgccccagtcccatggggaatgcctgctttctcctggcttgtggtcacctggggctagagcctctctgaaggagatggggagtccgaggggatgggcacctatgtctgtgctctgctcacaaaagctcctgggctccatgctagctgaagccctgtctctacctgctccctgggaaaatccacctgccagctcacacatccattggagatgttgggtactctgtagcttagatcccagatgtctgtggcaagagtgagctgtccctcagtcccctccctcaccccttctccaggagccatttagggccaggaagtagcccaagcattcaggtaccctacgcagggttcccagcttctccctcttcagcctcagcatctgtgttgcctctccacacacttgcggtgttttctccctagagatcagatctgcccaaattatattatttacttgataatttgggatctcttagtgggagagatggctgtgtctagttagccatcttgtccccctagatcatcaatttcatttttaatcctaaataagtgcctagataaacttcatcaccagaatgtagttgtttcatgtcttgctacattaaaggtaggcagagtttgaggtttgttttttctaatgataaatcaatacaaaatatttttaaaattttttttcattccataacgaggatctaagtaaggattttcagtggcaaatgagggaggacaagtgcacggttattatttgatactaccagttccatttggaagttaacaaaactggaatttttaatctctcagaaaaatcttagcttttataaatgtcctactcaaacatgactagctctcattttgattagcatcatatattaagaacaaatcctatttgcttttcagtcatatttttccagcttaaatcttactataaggggagaacttcggagtgaaaatgcatctctggttttaagtagcagcaatcaaaaaagagaggtaagtgcaacatgagttttgaaaacattatgcatttcactctgaattttgtgacataatgttttataattgttgatagtcccttaagcagtgactggtattgctctcggtaagtgacagacactatttgcttcaaattatacttcattagcttcaaatgtgattttagtcttattcatccttgtaagacactgggaaaatcatgatatttacaattcacatgccgcatttgactttatcacttataactatcacggtaaatggatgtttttactttcactttgataacaaatgatgcagttgtaactttcctccttaaaagctgacattataaaatgcagctgatatctgaagagcagccgcaaaaaacaacttctttataaaaagtgcctttatactgtacaggaaaacatgtacattttttaaagttttctttcaaatttcattgagaaatttgaaacaaaaaagtgatggtatttcctaatacaaattcagacttgagtcctcagtaaaaatagaaaggtttgagtttttaactcttgtcctttttataaattaataagccaaggtgacggagtaagaccccatctctaaaaaaataaaataaaataagtacttgttacacatgcaggcacttcagcatgatctccccccttctcatgggagactttaaatatcccatgtggataacagcaccatgtgaatcataaaattcaatttggaagctccctaactttcagatgttctttttaaattgcttatttcaaatttttccaatatcaatgacttctgataagtatacgcttttcaagaaaaaggaaaatacatgcatataatgtttacttatgtcataaagagcgcttagcataagcaatgcaaaatgcaaagttgttccttacatagaatagccaacatttcactaaaacctaaaaaatttgagtatggtttatgttggaaaagtacatatgattcctaaatttatgtgttaaaattttataatgagttttattttccctaaatattagttaaaaattcccctggaaatatttattctacattcatcctaaaggaaaaattatatctatattgataaaattactaaaagtgatcattttgtaattgtgtgatctgaggaaagtcactgatcttatctagattccggtttccatatctgtaagttcagggaattgttttacatatgtttaaaatctgccttgctgggcttagtggctcatgtctgtcatcccagcctactcgggagactgagatggaaggatcactttagcccaggagtttgagatcagcctgggcaaaatagtgaaaccccatctgtgttttgttttgttttgttttaagaaactgtcataatggtctgatgctgtatatgtctacattcttgccagctctgtcacctacctggagtgatttgagaggttttgattagtatcatgcatatacaaatctctcccctgttagtttctttttctaccctaatcttccctctaggtaaagaaattgaggtgttactgttaaaggcaaatacagggcttgaactattactagccattgatatctaccctaaattaatttttttcaaatcccccagggatgagacacagagcagataggtttcattgaggtttgagtgccaccctgagagagcttgagtagctggaacactaaaagcggtccattttacagctttgcttcagttaaaacctgatttatacatgtggacccagtgataagtcaagtagaagaaacattgtggtataatgaagagcacactgggagtgaatacatatgcaaacattcacttacccatacacttgacatgtatgcattatactttcaatttataaacaaaaaattatgcacactagaaataaaataaggagactttctcaggttcttatgacaacaaactgcgacattccaatctaaactaatgctattgtgataatacagtagtgtactaattaatctttaacacacataatactttggttctccctgagttaaacagaaattcactcctccccttgagcattccaatccattgacatttaaccctttatgtataaatttcagaaggataatattataaataccttttggtaataataaatttgacatagttagagatttagactagatgaagagcattttctaatgtaaatctaatgttttctcattatatagtaacgagattaatgcactggtagagaattgtagcctgcaagaactcaatgttccaggagttctaataggtgtttattatgttaacaatcttgtttaataattttcagcttgctattcaaatatccaaagatgggctaccgggcagagtgccattatgggtcatcctgctgagtgcttttgccggattgttgctgttaatgctgctcattttagcactgtggaaggtaaacaccaaaattcctttgactctctacttcaatcatcaacagcaaactggagaaataagctctgatatattcagactatgtaatatagtattattacagcaatgaaacaaacgttgaaatgatgactaagggaaagaaaaaagaaaaatgcgtatttcaaacactgcacacaacttgacccaatttttgtaaaggaaaaaaaacttattttaagttagaaatagtcaaaaattcacaaaagtatctttctagagtttagtatgataggggactttcacatgtgtaacaattaaaattttataataagtatgtatttcttttataaacagagaacaatgaaaactgtcttttatagagaaagaaaaaatgaattcctatgtcaatttaaggatatataagcagtagattcaaggttaaaataagccttgttttaatcacatctccatgtgtcttaaatatcaaataattctttaatgtttaaatatatatggcacattttatgtaataaattgtgtgcctgagtggaggataagggatcagctgatgtaggggagatcttaaagtttcacagactcctatttcaaattctgtggtaaatgtgagtaaccacctattttgtgtcaagtaactctggatatttatgtaatgttttgcttaggctgaaatagacatgatttttaaaactcttagcagctgtataattttcacattaagtagaattgagatgacagcttttgggataagttgaatagagaataacatcccatacagagttgaatgttttttcaattaaatatcaaataagcatttattctagcataatatccccctagattttacctattgttttgttaaatagttaaattatgttaaaaatataggttgtggctacatattaattgttctattacctgagcaacataattatttaatcaaatagtttaaatagcaagtttctctcccactgaaataccaactgttcctatcctttcttactctcctatgactcacttcctcttttgaggggcttagtctcagaggagatggtgaacaaagccagatgtaggtcagtggcatttaattcagtaaatagaatccatggcttttctctagcaaagttccccaaacaaaattctccactatagccaatgtccagctcttccttctactttataagggatcagtgttctctctgtaatacctagctttgccacactgtggtacccaaggcctggcttattggtgtcaaggttgtacttgaaatataggaagtggtttcttcatttctatgcacctctaatagagagtgttactgttgatttttttcagcatagtcttctgttctcagcactgcacttacctctatggttttagaacaccgctggcaggagaagaggaaaaccagagctgatatttggataggttctttcaggccttgtacctctgtttcagacaaacaaataggaaatttcagtcacctatttttcagtcagtagtctgaaaaagcataaatgtaaaactaagctcattgtttcatccagataatgatgtgttgatacattctgacagcttcttaggttattattaatattattattattgcaggcccaaaagaagatcatttgacaaactttgggctgtcttacccggtagaaatagttcagccacttcattgggaggcccagcaatcagaactgtgattctaaggtagaagggaagaaactagctcttatcgaatgcttactatgtgcagggagctattttaaacatttctgctttaagcattcccacttaatactcatatcaaccttatgaggtcgtatgaacctcctcttttaagtgaagaacataaaatttaagtatatttcccaaagacacatagtgagattcagagtaaggatctgaattctgtgccaaaaccactgactattatcactctgtgttctctcttgcttccattcactctggtgtccttgcaacaatcttttcgaccaagtattttaactacattttacacctgaggacattaaagcaaagggaggtaaagtgactctcccatgattactagctagtaaatgactggattcaaggaatgatctacagagctctttctttttccaatatatcctactgctgcaggctatagggtagggctctttactctggagctccaggagttgggttttgttcaagagagtcatgaactctcttaaacacataatactgtctttggttttggaatgagggtccctggttggattcagactttcggtagttccattatatcaagaaggctaatcccacttccccctactttaaagttctgttggaagctgcctgaagcatgagttcagttgcagtaggttcagaagagctactcttatcccagacatcttttttattctaactagatctggatcagacacctcaggactatcccttcttccttcctttcctgaatcccaccagtttggagttcattggaactcccaagtctgagtctctgtgtaagagacaggccaaaagtttctcttagagcagagattcactttcaaaagacacagtctttatatctttgtcttcatcatacacatggcaaaaattaaagcttgacaaagtgttagtagctgcttaatacacttcatgattgatgggaggaatcttgtaggggacgtaggtttaaataggtggagaaacttgtcctgaactgtggtaccacatgccgggggagatgccagcacaccaggagccatgagagactcagaacattcctctctcctaacttgatgtcataatgatgcctgaagttcctcaactgatgatttatttattaatcctaaagctttattcttcatccaatatacatgttctgggtgggtgtggatggggactggtgtctcaccactttttagtcttttatacattagtatgaatttattcattcagcaattattccatgttatattcattaagcacttacttttctgacagttatcacctcattagagcctttgccatagggttttgaacaagggatcatgaagcaaacacaggaaggaaaaaatgaaagccagtgctgcaaagaaagtgttggggctgaaaacaaactctattggtttcaaatttgggctaggattggcccagtccatcttgaagctataaactattttctcctaatctccactctttgccactcaacttctcttaaaaacccatgttaattggttgggtggagtgcttagataacagaagttattttaaaatagaacatttaatgtgtagaagccaaggagcattgtaaagaagcaaaaagagctgtgagagatcagaagcaaagcagagtgggaaggagaaaaagtcttagaatccaccacctgcttttgtgaaagccttgtctgtttatttttgactcaggacatgcaggcacaagttaagaagcctaatggtttgtgaatctggaacttttatacttggctcatatgaaaaagcctgagacgtgtaggagagctggcatttggggaagaaaaacttattgttttcatgtgtatttgttccgttaccgccttttcttcatctaccaccaactagatgatggcataatagaagacatgagccctgaataaaaattttccaacctaaaagtgcatatttttgagggtttatcccctctaagccctcagttgtttaataattattttataaacacatagttccctggcataatttgccataatttcgtgattaaaatgatgtagaggtgccacacttttaaagaattaactcattgcctttgctcgatctattatagccccctctcaaatttaaaaaatatatacaaatttgaaaaatcacttacctatgacccttaattttctttttttaaaaataagcattttaggttagataattgcaaagatcccttctatcccccatacttagttttgttattctataggatgggaaacaattgcagcacttataactttttatgatgccccaaattgcaaagcataatgaaatatggctcaccatccaccacgatgtgaaatttttcttatggtcaacaacttcattttttatttccaaatgatatagtgtgttttcaagaggctttttatatcaaatctatataagcagacgtcctgatgcatttaaagttaatacagacaactcagaaatctccctaacgccctagccataatatacctgtcagattccctaccatctctaatgacctcaacttatggtcatcgatcatttgatggaaatttctctgccacatccctgaaaaaaaagatgatggcaaagaagagacaatgctagctaattgcagtttgtctcccaaaatattttcccagaagcttttaattagttcaatgtgtatactatattttactaggggtcatggtgtatttaaccaatgaaaatattaaaaatgaaaccgcggcccggcgcgatggctcacgcctgtaatcccagcactttgggaggccgaggcaggcagatcatgaggtcaagagatagagaccatcctggccaacatggtgaaaccccgtctctactgaaaatacaaaaattagctgggcatggtggtgcatgcctgtagtcccagctacccaggaggctgaggcaggagaatcacttgaacccgggtggcggaggttgcagtgagcggagatcacgccactgcactccagcctggtgacagagtgagactgtctcaaaaaaaaaaaagaaaagaaaaaaaaagaaacagcaatttaataaatgtcattttttgacattgaatattaataggtcaatgagaaaatatttcttaattatattagttgtgtgcccagcattgccaatatactattaaatttaattctatccaaaggattaatatttgctacctaaattaaaatagttaattgtgttatgttttgtgttttctcaacagattggattcttcaaaagaccactgaaaaagaaaatggagaaatgaaatattttatgaaagaaaataataacaattattcaataatctatcctcaggtttgcctcaaatatgtgacaagaaatgtataattcatgacatagtcatgtaactatgtaatccatcagggattcattacttggaaaatgacaggtcatgcattatccaaaaacaataccaaaaagacatattttataaaatgacaaaaaatattttacataattactcatttttgttgagtaagcaaaattacaaagtgtttttaaaaaaacctgtacaaatatgtttatgtattaaatcaccatccaaaatatttaaggaatatataaaaagatttttatgatcatagaaacatctattttcaaaacaatataaattaagcttttccccttgattcctgttggatatccatgttcagcatgacagtcagcactcgtaaatgccaagaaaagaattacctgaaaaagatcatttctccctattcaaatgagaatattttcccttggtagaatccatatacaatatggattgaaaattaagtcaccaagaatacatttagcatctttgtgttgggttctatacctaaaaattttccctccctgcccaaggtgattggaaagtactgcaattgagctaaaattttatctaggatggaaaatcaggatagactcgtttaaaaacaagtatattaaatgggttaaattaagcttttacagaacatgcttaattttgatattgagctctaaatgcaaaactcttttatactgaaaaaacacttaaagtagttttgtgtggcatcacagtgatttgtcatgaaaagccatatatgggggacatgctaaaatggcttctgaatgaaatacgacagcagagaaagatgccactgaaatgctgaaattatctttgctgagcagcttttgaatgctaagggttccagtatgtgacccaaagaaagagttgtctcaactccttggtacagggttcattcaaacccccaagctgtgagagtgtgtttatttttaattttttaaaaggtatttaatttccaaccacacttcttatttttttgaaaagacaattttccatttcagtattacattttaccaagaagtcactgctttttaggtgtgttgcatcaatatttaaataaaatcccagaaatgtattttaaagaatttcaggtttgaaaactcaaaccaacaggaagatatcacacctttgtatgtgcttctttgttcttgaagtagtcattatggttcattggaatctactgtagcataagctcctaggttgctccatttcttaggaaaatagcaatgaatgaatgtatagtagctgcatgtgtgaactactgctgtaaagtttgctgacatttctgcaacaacatttctccatctgatttaccagaacctgtaacaagaccagaacatgtattcatccagaaactcctgggctctgctttgttcaaagaggagcaaatccacatagaaattaaatgttataaatttatttttttaaactaatttccaaagaatttagctgaagactcagagtcagcctacctcttgactctccacatccgcatctaagatcctgaaggccaaaggaatgcgcctgtgggatgccaaagccatcagtagctggaagaaagaatacctctttctagaggtttggtgtcctcttgctggcctgtcattatttggaaatacgcgcttttggaatttccttcattttcgctatttccaggttcagaaatcatacctaccacttgttctttctttgcccagtaaaactcagggtttctcttattcagagttaccatgttgcacacccccagtgctcagcctgcccagaagcccttctctgatctcagcaagatcttagtagtaaagctaacggatccattgaaattcatactcagcatctgtgactactagacaaagcccatttactgaaccataagtgtgcacttttaaactaaattgttaactgaaagggaaaaaatagaaatgagggcattttgaagtttttagaaaagagaggaagagctgttggccagatcaaagagatacttataagcccggcacaatttttaacataagtcattcctggctattaagtaaaatatttcatgaaccagaagtcctgtttctctaatattataatttgttgaggtttgtgtgtgtgtgtgtgtgcatgtgcagacacatgtacacatataaattgaatacaaaaatagctctataacaccaaaaaacagagtttacagaaaataaacacaaaagctatatctgcaagacaagtttgattcatctagtttcatatagtttcatatagtttcatttttattaatatttaggtttaacttatagttctgcaattatttaaaaaacaagtacagagcgtttgattaaaaaaagtcaacaaatgtttcaaaacagctttgtacaaatgttataaaacatatttaatgattaagaaatgtactagactctatcatttacttttaaaacatttaattagaaaaacaggtgatatttaagactatttataaacttattggccaaattgccaaaaagtttctttttctctaactttggtattctaaataattgattattgctcccattgtaaactgaaccatgtatgcactctcttttctgaccaaactacaatggtatattggtaaattatttaacaacacactgtccaggagggaaaaaaaaaacagtctctgatttgtatcatttgccaatttccatggtccaaatattctctctccattttcaaactaccaaagtgaccctaatcagcttacaaaattcctggaaatgtatctgccacctcttaccaaccagtgtgagctgacttcagcacaccactgagacagattacacgatagacagatagatagatagatagatagatagatagatagatagatagatagatattgatagagaacatgttgtgtctatatacatatccaatgacacacagtataatcatgttttaaattatgccaaaagtactgattatatcaagcccagtaaacataatgctacacagcacccattctttaattttgatttctaaaattataaccttcctttgatattaataaaatgttatgaacttgcaggagaaggaaggagttgaaagaaggaaaatataaagggtgatccacagtgaaaatcagacctacacaagccacaaaaaaattgtctcattttcccaaggaattcaaagtcctgtgatacacattacaaaagatgacactttgtaaatattttgaacttctatgatccaatttcaacttcattggtccaatttgtcaaactattttcctctgagcactagattcatgggcaatttaatctctgaatattttctgtgtcataagtgtgcttgaaaagaggcttgtagtaaacagatatttttacaaaatttgatgcttctgcaaccataataattttatctataaatgcgtatatacatatatatatatatatatatacacatacactcacatgcagatatttacatatatagatattctcttttccttttataaaatcaaagtctaggctcaattggaaaatggaaatatttgcaccaaaagaaaaaagtgccattgttgtgatcaatggagtaaagctggggtatagtagaggctggggaatccctgcccatgttctctccaaggccacagcttgcacaccgtgaatggtggccccactggctccatggagtgtgccttcacgcgggggaatgtccttgtccaacacgctgtaatctactccatgggaactgactgtcctgcttttcacaacattgagaaacaggcccagagcctgtctcatgtgccaggtgcagtcacattattgttaaaataaagtggcttctgacaaatcagtttttcaaaatagcatcctatgtacttttcatttcttccaacaaccctcaggcccccttttgccagttttctcccccaggggagattttcaagactactggagaaaaatctgttaataaaacatttgctctgagtaccagcttcagtgactcaatcatttatacaggatttcagtgttttgttctgcagcggtgttctaaagggttcacatagtataatggaggagggacaaagcagaatatacttccaagctggaacatctttaagacatttacaaactgttatgggacactatcagcaactacgcctggggaagctagcaggatttagctcttcaatggccctccaaatgcacccaacaatcgccaacctcacccatggaaatcatctaaaaaatgaaaagaagggccttaaagtcctcacatggatgctgtatttataactaaaatgtacagtttaattctaaatagcaggcttttaaatgcaaacagcttccaggtgagtcctctggctgccaatcagactgctgattctaaaccattctcacacagaatttctgaaaccaacaccaggtattaattgttaactgcagtgaaaggaaaccaaggcacattacaaaaggctaaatgctgctgtttctaagtggaagcactgttgaacaacactcttaggtggaataagaaaattagggttaaactgtaacattgtaatcggacgaacaaatcagcatctttgatcctcaggttaaaatttaatcttaaatttagaaattcaaagtaacagcctttaaccattaaccttgaggaaaatgtgaagtagcatctggagtctcttaagccccagccctgttgtcccctacagcatctccacccaggaagtccagttcctaactaatgggaatggatccttttcccattataaagggccgatgcttaacccttgaacccactactgttcttatgccccaagatctgcaccttacatcaggcacccgggaatgcttctcattgaaattttaccataccaaaaaatatgtaagggtgactcatcactcctaactttggactccttgctttgagatcggtatttttttctctctctttacatatagcaaaagctttccccagtagctgatgaatttagaactttatacaagactccctagcattttcctcctcccacaggctggagaatttcagtgctatgagactgggcagtaggagccagagccaatttgcaggatctcttttccttctgccttccagttggcttctcttctcagctgcgtggtggggatgatttggggtttcctcagcaaggccattctctgccttgtgcccatagcagggccttgggtggtgacatgttatctttgttggtgagcagacactcagagatcctttaattatctgacacaccagggaaatcttggcaatcaactaaggacctgtgacactcataactatgtttacatttggctttagcatatttcaggtaatatctttatgaaaaaaagatgaagtatggaattgtaggaactcttttgcaatagactgagatccaatgtttaaatctttttatttcagtttgatctgtgcctttagattggggacaaaattttaaaaacaaatcttccaaatgacaccacaatgaaagccagttgtggtcttgaaaaatctctctattgcattacttatcctcacccttgttttttaagaggtagagagagattactgggaagcagtgagccaacataattgtcctttcctctacagaatagctgtgcagaaggggaccaccacacttaggaccagtgccaggtgacaatctttccgtcatgctgctgcagcattttgcaccttgagagacaggaaaaaaaatgggggtgagggagtggaagatgatgaaactatttctcttttatgtctacatccttactcctcaaaatactttaagctcactcagaccccatataccctgcccacaatactaacacatgtactttgcataagtaaattgttgattaaataagagcaaaactatattcttatgtgtagattaaccaaggctaatttcctggagtttaatacactttggattcaagtaaaaacaatcacttaatgcagcaacatctcagaccctcttcactctagaaccgttttatacaagagaactcaacatttactgttttatttctgatattgcctgccattactcaggatgcaagagatgctctgcattccttattaggaaaaattggcctgtaaggagaatggtatactgcgtattactactgtgagactgtaaaattgttaatggacagtgtaaagaattgtattcattttattagcaagaaaaatattgcatacaagaactactgccctgaaatatccatcactccaatgaactgttctgcctgatctaacataaagttatatttcattgctcatttttttttgcctcactaaaatgactaacttaagggaatgtgcatttctacaagactttaattggataaactcattagaagaaaatgtttcgattgcattcaggaacaaagaagcataacctttgttgactcttgtaatttattatatgcttcatttaaacccattttgtaaagaaatcaggtaacagtcatttaatctgatataattagaaatagctgagagagtaaaaaagcattttgaatgtcctatgtatggcatatcctgtacaccaattgaaggtcagagctttggtatttttgtataattctgtcttatctggtgcatcagctgtgtattttacgtcaaggtaaatgagcatcctgttttatatgttaaattttaaaaatgactttttcaaagaa

SEQ ID NO: 2 - RNA, 10736 nt, Homo sapiens
  source 1..10736: mol_type = mRNA
acccgccttcctaccaccttaggggatttggcccggagaacgagatcaccctctcaatgaaaggcagatgtccctttaaggtttgcttctacagcccgtggactttagcctaaacacggacccgcgaagctggctttatttgtccatgtctcggacagagcctgggaagctgccagtgagatttcagagaccaagagcgcgaaggggcgggcgatgtggcaatccgtctgggatgtgaaaagcgtggagcgcatttagaggaattcgacgaaaacacaggaaatcactcctctcccgctcctgggcgccgctgccactggggcagaggactgggaaccgcggcagcgggataagtggcccagccagagagcgcagctcccgcgcccggtcctgccctgcgaaccagcgcggccccctggcgctgaggctgctccggccatggcccctcggccccgcgcccgcccaggggtcgctgtcgcctgctgctggctcctcactgttgttctacgctgctgcgtatcattcaatgttgatgtgaaaaattcaatgactttcagcggcccggtggaagacatgtttggatatactgttcaacaatatgaaaatgaagaaggaaaatgggtgcttattggttctccgttagttggccaacccaaaaacagaactggagatgtctataagtgtccagttgggagaggtgaatcattaccttgtgtaaagttggatctaccagttaatacatcaattcccaatgtcacagaagtaaaggagaacatgacatttggatcaactttagtcaccaacccaaatggaggatttctggcttgtgggcccttatatgcctatagatgtggacatttgcattacacaactggaatctgttctgacgtcagccccacatttcaagtcgtgaattccattgcccctgtacaagaatgcagcactcaactggacatagtcatagtgctggatggttccaacagtatttacccatgggacagtgttacagcttttttaaatgaccttcttgaaagaatggatattggtcctaaacagacacaggttggaattgtacagtatggagaaaacgtgacccatgagttcaacctcaataagtattcttccaccgaagaggtacttgttgcagcaaagaaaatagtccagagaggtggccgccagactatgacagctcttggaatagacacagcaagaaaggaggcattcacggaagcccggggtgcccgaagaggagttaaaaaagtcatggttattgtgacagatggagagtctcatgacaatcatcgactgaagaaggtcatccaagactgtgaagatgaaaacattcaacggttttccatagctattcttggcagctataaccgaggaaatttaagcactgaaaaatttgtggaggaaataaaatcaattgcaagtgaacccactgaaaagcatttcttcaatgtctctgatgaattggctctagtcaccattgttaaaactctgggagaaagaatatttgccctggaagccacagctgaccagtcagcagcttcatttgaaatggaaatgtctcagactggcttcagtgctcattattcacaggactgggtcatgcttggagcagtaggagcctatgattggaatggaacagttgtcatgcagaaggctagtcaaatcataatccctcgaaacacaacctttaatgttgagtctaccaaaaagaatgaaccgcttgcttcttatttaggttacactgtaaactctgctactgcttcttctggagatgtgctctatattgctggacagcctcggtacaatcatacaggccaggtcattatctacaggatggaagatggaaacatcaaaattctccagacgctcagtggagaacagattggttcctactttggcagtattttaacaacaactgacattgacaaggattctaatactgacattcttctagtcggagcccctatgtacatgggaacagagaaggaggagcaaggaaaagtgtatgtgtatgctctcaatcagacaaggtttgaatatcaaatgagcctggaacctattaagcagacgtgctgttcatctcggcagcacaattcatgcacaacagaaaacaaaaatgagccatgcggggctcgttttggaactgcaattgctgctgtaaaagacctcaatcttgatggatttaatgacatcgtgataggagctccgctggaagatgatcacgggggagctgtgtacatttatcatggaagtggcaagactataaggaaagagtatgcacaacgtattccatcaggtggggatggtaagacactgaaattttttggccagtctatccacggagaaatggatttaaatggtgacggtctgacagatgtgactattgggggccttggtggtgctgccctcttctggtcccgagatgtggccgtagttaaagtgaccatgaattttgagccaaataaagtgaatattcaaaagaaaaactgccatatggagggaaaggaaacagtatgcataaatgctacagtgtgttttgatgtgaaattaaagtctaaagaagacacgatttatgaagctgatttgcagtaccgtgtcaccctagattcactaagacaaatatcacgaagttttttctctggaactcaagagagaaaggttcaaaggaacatcacagttcgaaaatcagaatgcactaagcactccttctacatgttggacaagcatgactttcaggactctgtgagaataacgttggactttaatcttaccgatccagaaaatgggcctgttcttgatgattctctaccaaactcagtacatgaatatattccctttgccaaagattgtggaaataaggaaaaatgtatctcagacctcagcctgcatgtcgccaccactgaaaaggacctgctgattgtccgatcccagaatgataagttcaacgttagcctcacagtcaaaaatacaaaggacagtgcctataacaccaggacaatagtgcattattctccaaatctagttttttcaggaattgaggctatccaaaaagacagttgtgaatctaatcataatatcacatgtaaagttggatatcccttcctgagaagaggagagatggtaactttcaaaatattgtttcagtttaacacatcctatctcatggaaaatgtgaccatttatttaagtgcaacaagtgacagcgaagaacctcctgaaaccctttctgataatgtagtaaacatttctatcccggtaaaatatgaagttggactacagttttacagctctgcaagtgaataccacatttcaattgctgccaatgagacagtccctgaagttattaattctactgaggacattggaaatgaaattaatatcttctacttgattagaaaaagtggatcttttccaatgccagagcttaagctgtcaatttcattccccaatatgacatcaaatggttaccctgtgctgtacccaactggattgtcatcttctgagaatgcaaactgcagaccccatatctttgaggatcctttcagtatcaactctggaaagaaaatgactacatcaactgaccatctcaaacgaggcacaattctggactgcaatacatgtaaatttgctaccatcacatgtaatctcacttcttctgacatcagccaagtcaatgtttcgcttatcttgtggaaaccaacttttataaaatcatatttttccagcttaaatcttactataaggggagaacttcggagtgaaaatgcatctctggttttaagtagcagcaatcaaaaaagagagcttgctattcaaatatccaaagatgggctaccgggcagagtgccattatgggtcatcctgctgagtgcttttgccggattgttgctgttaatgctgctcattttagcactgtggaagattggattcttcaaaagaccactgaaaaagaaaatggagaaatgaaatattttatgaaagaaaataataacaattattcaataatctatcctcaggtttgcctcaaatatgtgacaagaaatgtataattcatgacatagtcatgtaactatgtaatccatcagggattcattacttggaaaatgacaggtcatgcattatccaaaaacaataccaaaaagacatattttataaaatgacaaaaaatattttacataattactcatttttgttgagtaagcaaaattacaaagtgtttttaaaaaaacctgtacaaatatgtttatgtattaaatcaccatccaaaatatttaaggaatatataaaaagatttttatgatcatagaaacatctattttcaaaacaatataaattaagcttttccccttgattcctgttggatatccatgttcagcatgacagtcagcactcgtaaatgccaagaaaagaattacctgaaaaagatcatttctccctattcaaatgagaatattttcccttggtagaatccatatacaatatggattgaaaattaagtcaccaagaatacatttagcatctttgtgttgggttctatacctaaaaattttccctccctgcccaaggtgattggaaagtactgcaattgagctaaaattttatctaggatggaaaatcaggatagactcgtttaaaaacaagtatattaaatgggttaaattaagcttttacagaacatgcttaattttgatattgagctctaaatgcaaaactcttttatactgaaaaaacacttaaagtagttttgtgtggcatcacagtgatttgtcatgaaaagccatatatgggggacatgctaaaatggcttctgaatgaaatacgacagcagagaaagatgccactgaaatgctgaaattatctttgctgagcagcttttgaatgctaagggttccagtatgtgacccaaagaaagagttgtctcaactccttggtacagggttcattcaaacccccaagctgtgagagtgtgtttatttttaattttttaaaaggtatttaatttccaaccacacttcttatttttttgaaaagacaattttccatttcagtattacattttaccaagaagtcactgctttttaggtgtgttgcatcaatatttaaataaaatcccagaaatgtattttaaagaatttcaggtttgaaaactcaaaccaacaggaagatatcacacctttgtatgtgcttctttgttcttgaagtagtcattatggttcattggaatctactgtagcataagctcctaggttgctccatttcttaggaaaatagcaatgaatgaatgtatagtagctgcatgtgtgaactactgctgtaaagtttgctgacatttctgcaacaacatttctccatctgatttaccagaacctgtaacaagaccagaacatgtattcatccagaaactcctgggctctgctttgttcaaagaggagcaaatccacatagaaattaaatgttataaatttatttttttaaactaatttccaaagaatttagctgaagactcagagtcagcctacctcttgactctccacatccgcatctaagatcctgaaggccaaaggaatgcgcctgtgggatgccaaagccatcagtagctggaagaaagaatacctctttctagaggtttggtgtcctcttgctggcctgtcattatttggaaatacgcgcttttggaatttccttcattttcgctatttccaggttcagaaatcatacctaccacttgttctttctttgcccagtaaaactcagggtttctcttattcagagttaccatgttgcacacccccagtgctcagcctgcccagaagcccttctctgatctcagcaagatcttagtagtaaagctaacggatccattgaaattcatactcagcatctgtgactactagacaaagcccatttactgaaccataagtgtgcacttttaaactaaattgttaactgaaagggaaaaaatagaaatgagggcattttgaagtttttagaaaagagaggaagagctgttggccagatcaaagagatacttataagcccggcacaatttttaacataagtcattcctggctattaagtaaaatatttcatgaaccagaagtcctgtttctctaatattataatttgttgaggtttgtgtgtgtgtgtgtgtgcatgtgcagacacatgtacacatataaattgaatacaaaaatagctctataacaccaaaaaacagagtttacagaaaataaacacaaaagctatatctgcaagacaagtttgattcatctagtttcatatagtttcatatagtttcatttttattaatatttaggtttaacttatagttctgcaattatttaaaaaacaagtacagagcgtttgattaaaaaaagtcaacaaatgtttcaaaacagctttgtacaaatgttataaaacatatttaatgattaagaaatgtactagactctatcatttacttttaaaacatttaattagaaaaacaggtgatatttaagactatttataaacttattggccaaattgccaaaaagtttctttttctctaactttggtattctaaataattgattattgctcccattgtaaactgaaccatgtatgcactctcttttctgaccaaactacaatggtatattggtaaattatttaacaacacactgtccaggagggaaaaaaaaaacagtctctgatttgtatcatttgccaatttccatggtccaaatattctctctccattttcaaactaccaaagtgaccctaatcagcttacaaaattcctggaaatgtatctgccacctcttaccaaccagtgtgagctgacttcagcacaccactgagacagattacacgatagacagatagatagatagatagatagatagatagatagatagatagatagatattgatagagaacatgttgtgtctatatacatatccaatgacacacagtataatcatgttttaaattatgccaaaagtactgattatatcaagcccagtaaacataatgctacacagcacccattctttaattttgatttctaaaattataaccttcctttgatattaataaaatgttatgaacttgcaggagaaggaaggagttgaaagaaggaaaatataaagggtgatccacagtgaaaatcagacctacacaagccacaaaaaaattgtctcattttcccaaggaattcaaagtcctgtgatacacattacaaaagatgacactttgtaaatattttgaacttctatgatccaatttcaacttcattggtccaatttgtcaaactattttcctctgagcactagattcatgggcaatttaatctctgaatattttctgtgtcataagtgtgcttgaaaagaggcttgtagtaaacagatatttttacaaaatttgatgcttctgcaaccataataattttatctataaatgcgtatatacatatatatatatatatatatacacatacactcacatgcagatatttacatatatagatattctcttttccttttataaaatcaaagtctaggctcaattggaaaatggaaatatttgcaccaaaagaaaaaagtgccattgttgtgatcaatggagtaaagctggggtatagtagaggctggggaatccctgcccatgttctctccaaggccacagcttgcacaccgtgaatggtggccccactggctccatggagtgtgccttcacgcgggggaatgtccttgtccaacacgctgtaatctactccatgggaactgactgtcctgcttttcacaacattgagaaacaggcccagagcctgtctcatgtgccaggtgcagtcacattattgttaaaataaagtggcttctgacaaatcagtttttcaaaatagcatcctatgtacttttcatttcttccaacaaccctcaggcccccttttgccagttttctcccccaggggagattttcaagactactggagaaaaatctgttaataaaacatttgctctgagtaccagcttcagtgactcaatcatttatacaggatttcagtgttttgttctgcagcggtgttctaaagggttcacatagtataatggaggagggacaaagcagaatatacttccaagctggaacatctttaagacatttacaaactgttatgggacactatcagcaactacgcctggggaagctagcaggatttagctcttcaatggccctccaaatgcacccaacaatcgccaacctcacccatggaaatcatctaaaaaatgaaaagaagggccttaaagtcctcacatggatgctgtatttataactaaaatgtacagtttaattctaaatagcaggcttttaaatgcaaacagcttccaggtgagtcctctggctgccaatcagactgctgattctaaaccattctcacacagaatttctgaaaccaacaccaggtattaattgttaactgcagtgaaaggaaaccaaggcacattacaaaaggctaaatgctgctgtttctaagtggaagcactgttgaacaacactcttaggtggaataagaaaattagggttaaactgtaacattgtaatcggacgaacaaatcagcatctttgatcctcaggttaaaatttaatcttaaatttagaaattcaaagtaacagcctttaaccattaaccttgaggaaaatgtgaagtagcatctggagtctcttaagccccagccctgttgtcccctacagcatctccacccaggaagtccagttcctaactaatgggaatggatccttttcccattataaagggccgatgcttaacccttgaacccactactgttcttatgccccaagatctgcaccttacatcaggcacccgggaatgcttctcattgaaattttaccataccaaaaaatatgtaagggtgactcatcactcctaactttggactccttgctttgagatcggtatttttttctctctctttacatatagcaaaagctttccccagtagctgatgaatttagaactttatacaagactccctagcattttcctcctcccacaggctggagaatttcagtgctatgagactgggcagtaggagccagagccaatttgcaggatctcttttccttctgccttccagttggcttctcttctcagctgcgtggtggggatgatttggggtttcctcagcaaggccattctctgccttgtgcccatagcagggccttgggtggtgacatgttatctttgttggtgagcagacactcagagatcctttaattatctgacacaccagggaaatcttggcaatcaactaaggacctgtgacactcataactatgtttacatttggctttagcatatttcaggtaatatctttatgaaaaaaagatgaagtatggaattgtaggaactcttttgcaatagactgagatccaatgtttaaatctttttatttcagtttgatctgtgcctttagattggggacaaaattttaaaaacaaatcttccaaatgacaccacaatgaaagccagttgtggtcttgaaaaatctctctattgcattacttatcctcacccttgttttttaagaggtagagagagattactgggaagcagtgagccaacataattgtcctttcctctacagaatagctgtgcagaaggggaccaccacacttaggaccagtgccaggtgacaatctttccgtcatgctgctgcagcattttgcaccttgagagacaggaaaaaaaatgggggtgagggagtggaagatgatgaaactatttctcttttatgtctacatccttactcctcaaaatactttaagctcactcagaccccatataccctgcccacaatactaacacatgtactttgcataagtaaattgttgattaaataagagcaaaactatattcttatgtgtagattaaccaaggctaatttcctggagtttaatacactttggattcaagtaaaaacaatcacttaatgcagcaacatctcagaccctcttcactctagaaccgttttatacaagagaactcaacatttactgttttatttctgatattgcctgccattactcaggatgcaagagatgctctgcattccttattaggaaaaattggcctgtaaggagaatggtatactgcgtattactactgtgagactgtaaaattgttaatggacagtgtaaagaattgtattcattttattagcaagaaaaatattgcatacaagaactactgccctgaaatatccatcactccaatgaactgttctgcctgatctaacataaagttatatttcattgctcatttttttttgcctcactaaaatgactaacttaagggaatgtgcatttctacaagactttaattggataaactcattagaagaaaatgtttcgattgcattcaggaacaaagaagcataacctttgttgactcttgtaatttattatatgcttcatttaaacccattttgtaaagaaatcaggtaacagtcatttaatctgatataattagaaatagctgagagagtaaaaaagcattttgaatgtcctatgtatggcatatcctgtacaccaattgaaggtcagagctttggtatttttgtataattctgtcttatctggtgcatcagctgtgtattttacgtcaaggtaaatgagcatcctgttttatatgttaaattttaaaaatgactttttcaaagaa

SEQ ID NO: 3 - RNA, 3736 nt, Homo sapiens
  source 1..3736: mol_type = mRNA
atccgtctgggatgtgaaaagcgtggagcgcatttagaggcattcgacgaaaacacaggaaatcactcctctcccgctcctgggcgccgctgccactggggcagaggactgggaaccgcggcagcgggataagtggcccagccagagagcgcagctcccgcgcccggtcctgccctgcgaaccagcgcggccccctggcgctgaggctgctccggccatggcccctcggccccgcgcccgcccaggggtcgctgtcgcctgctgctggctcctcactgttgttctacgctgctgcgtatcattcaatgttgatgtgaaaaattcaatgactttcagcggcccggtggaagacatgtttggatatactgttcaacaatatgaaaatgaagaaggaaaatgggtgcttattggttctccgttagttggccaacccaaaaacagaactggagatgtctataagtgtccagttgggagaggtgaatcattaccttgcgtaaagttggatctaccagttaatacatcaattcccaatgtcacagaagtaaaggagaacatgacatttggatcaactttagtcaccaacccaaatggaggatttctggcttgtgggcccttatatgcctatagatgtggacatttgcattacacaactggaatctgttctgacgtcagccccacatttcaagtcgtgaattccattgcccctgtacaagaatgcagcactcaactggacatagtcatagtgctggatggttccaacagtatttacccatgggacagtgttacagcttttttaaatgaccttcttgaaagaatggatattggtcctaaacagacacaggttggaattgtacagtatggagaaaacgtgacccatgagttcaacctcaataagtattcttccaccgaagaggtacttgttgcagcaaagaaaatagtccagagaggtggccgccagactatgacagctcttggaatagacacagcaagaaaggaggcattcacggaagcccggggtgcccgaagaggagttaaaaaagtcatggttattgtgacagatggagagtctcatgacaatcatcgactgaagaaggtcatccaagactgtgaagatgaaaacattcaacggttttccatagctattcttggcagctataaccgaggaaatttaagcactgaaaaatttgtggaggaaataaaatcaattgcaagtgaacccactgaaaagcatttcttcaatgtctctgatgaattggctctagtcaccattgttaaaactctgggagaaagaatatttgccctggaagccacagctgaccagtcagcagcttcatttgaaatggaaatgtctcagactggcttcagtgctcattattcacaggactgggtcatgcttggagcagtaggagcctatgattggaatggaacagttgtcatgcagaaggctagtcaaatcataatccctcgaaacacaacctttaatgttgagtctaccaaaaagaatgaaccgcttgcttcttatttaggttacactgtaaactctgctactgcttcttctggagatgtgctctatattgctggacagcctcggtacaatcatacaggccaggtcattatctacaggatggaagatggaaacatcaaaattctccagacgctcagtggagaacagattggttcctactttggcagtattttaacaacaactgacattgacaaggattctaatactgacattcttctagtcggagcccctatgtacatgggaacagagaaggaggagcaaggaaaagtgtatgtgtatgctctcaatcagacaaggtttgaatatcaaatgagcctggaacctattaagcagacgtgctgttcatctcggcagcacaattcatgcacaacagaaaacaaaaatgagccatgcggggctcgttttggaactgcaattgctgctgtaaaagacctcaatcttgatggatttaatgacatcgtgataggagctccgctggaagatgatcacgggggagctgtgtacatttatcatggaagtggcaagactataaggaaagagtatgcacaacgtattccatcaggtggggatggtaagacactgaaattttttggccagtctatccacggagaaatggatttaaatggtgacggtctgacagatgtgactattgggggccttggtggtgctgccctcttctggtcccgagatgtggccgtagttaaagtgaccatgaattttgagccaaataaagtgaatattcaaaagaaaaactgccatatggagggaaaggaaacagtatgcataaatgctacagtgtgttttgatgtgaaattaaagtctaaagaagacacgatttatgaagctgatttgcagtaccgtgtcaccctagattcactaagacaaatatcacgaagttttttctctggaactcaagagagaaaggttcaaaggaacatcacagttcgaaaatcagaatgcactaagcactccttctacatgttggacaagcatgactttcaggactctgtgagaataacgttggactttaatcttaccgatccagaaaatgggcctgttcttgatgattctctaccaaactcagtacatgaatatattccctttgccaaagattgtggaaataaggaaaaatgtatctcagacctcagcctgcatgtcgccaccactgaaaaggacctgctgattgtccgatcccagaatgataagttcaacgttagcctcacagtcaaaaatacaaaggacagtgcctataacaccaggacaatagtgcattattctccaaatctagttttttcaggaattgaggctatccaaaaagacagttgtgaatctaatcataatatcacatgtaaagttggatatcccttcctgagaagaggagagatggtaactttcaaaatattgtttcagtttaacacatcctatctcatggaaaatgtgaccatttatttaagtgcaacaagtgacagcgaagaacctcctgaaaccctttctgataatgtagtaaacatttctatcccggtaaaatatgaagttggactacagttttacagctctgcaagtgaataccacatttcaattgctgccaatgagacagtccctgaagttattaattctactgaggacattggaaatgaaattaatatcttctacttgattagaaaaagtggatcttttccaatgccagagcttaagctgtcaatttcattccccaatatgacatcaaatggttaccctgtgctgtacccaactggattgtcatcttctgagaatgcaaactgcagaccccatatctttgaggatcctttcagtatcaactctggaaagaaaatgactacatcaactgaccatctcaaacgaggcacaattctggactgcaatacatgtaaatttgctaccatcacatgtaatctcacttcttctgacatcagccaagtcaatgtttcgcttatcttgtggaaaccaacttttataaaatcatatttttccagcttaaatcttactataaggggaggacttcggagtgaaaatgcatctctggttttaagtagcagcaatcaaaaaagagagcttgctattcaaatatccaaagatgggctaccgggcagagtgccattatgggtcatcctgctgagtgcttttgccggattgttgctgttaatgctgctcattttagcactgtggaagattggattcttcaaaagaccactg

SEQ ID NO: 4 - RNA, 4587 nt, Homo sapiens
  source 1..4587: mol_type = mRNA
gtcctgccctgcgaaccagcgcggccccctggcgctgaggctgctccggccatggcccctcggccccgcgcccgcccaggggtcgctgtcgcctgctgctggctcctcactgttgttctacgctgctgcgtatcattcaatgttgatgtgaaaaattcaatgactttcagcggcccggtggaagacatgtttggatatactgttcaacaatatgaaaatgaagaaggaaaatgggtgcttattggttctccgttagttggccaacccaaaaacagaactggagatgtctataagtgtccagttgggagaggtgaatcattaccttgcgtaaagttggatctaccagttaatacatcaattcccaatgtcacagaagtaaaggagaacatgacatttggatcaactttagtcaccaacccaaatggaggatttctggcttgtgggcccttatatgcctatagatgtggacatttgcattacacaactggaatctgttctgacgtcagccccacatttcaagtcgtgaattccattgcccctgtacaagaatgcagcactcaactggacatagtcatagtgctggatggttccaacagtatttacccatgggacagtgttacagcttttttaaatgaccttcttgaaagaatggatattggtcctaaacagacacaggttggaattgtacagtatggagaaaacgtgacccatgagttcaacctcaataagtattcttccaccgaagaggtacttgttgcagcaaagaaaatagtccagagaggtggccgccagactatgacagctcttggaatagacacagcaagaaaggaggcattcacggaagcccggggtgcccgaagaggagttaaaaaagtcatggttattgtgacagatggagagtctcatgacaatcatcgactgaagaaggtcatccaagactgtgaagatgaaaacattcaacggttttccatagctattcttggcagctataaccgaggaaatttaagcactgaaaaatttgtggaggaaataaaatcaattgcaagtgaacccactgaaaagcatttcttcaatgtctctgatgaattggctctagtcaccattgttaaaactctgggagaaagaatatttgccctggaagccacagctgaccagtcagcagcttcatttgaaatggaaatgtctcagactggcttcagtgctcattattcacaggactgggtcatgcttggagcagtaggagcctatgattggaatggaacagttgtcatgcagaaggctagtcaaatcataatccctcgaaacacaacctttaatgttgagtctaccaaaaagaatgaaccgcttgcttcttatttaggttacactgtaaactctgctactgcttcttctggagatgtgctctatattgctggacagcctcggtacaatcatacaggccaggtcattatctacaggatggaagatggaaacatcaaaattctccagacgctcagtggagaacagattggttcctactttggcagtattttaacaacaactgacattgacaaggattctaatactgacattcttctagtcggagcccctatgtacatgggaacagagaaggaggagcaaggaaaagtgtatgtgtatgctctcaatcagacaaggtttgaatatcaaatgagcctggaacctattaagcagacgtgctgttcatctcggcagcacaattcatgcacaacagaaaacaaaaatgagccatgcggggctcgttttggaactgcaattgctgctgtaaaagacctcaatcttgatggatttaatgacatcgtgataggagctccgctggaagatgatcacgggggagctgtgtacatttatcatggaagtggcaagactataaggaaagagtatgcacaacgtattccatcaggtggggatggtaagacactgaaattttttggccagtctatccacggagaaatggatttaaatggtgacggtctgacagatgtgactattgggggccttggtggtgctgccctcttctggtcccgagatgtggccgtagttaaagtgaccatgaattttgagccaaataaagtgaatattcaaaagaaaaactgccatatggagggaaaggaaacagtatgcataaatgctacagtgtgttttgatgtgaaattaaagtctaaagaagacacgatttatgaagctgatttgcagtaccgtgtcaccctagattcactaagacaaatatcacgaagttttttctctggaactcaagagagaaaggttcaaaggaacatcacagttcgaaaatcagaatgcactaagcactccttctacatgttggacaagcatgactttcaggactctgtgagaataacgttggactttaatcttaccgatccagaaaatgggcctgttcttgatgattctctaccaaactcagtacatgaatatattccctttgccaaagattgtggaaataaggaaaaatgtatctcagacctcagcctgcatgtcgccaccactgaaaaggacctgctgattgtccgatcccagaatgataagttcaacgttagcctcacagtcaaaaatacaaaggacagtgcctataacaccaggacaatagtgcattattctccaaatctagttttttcaggaattgaggctatccaaaaagacagttgtgaatctaatcataatatcacatgtaaagttggatatcccttcctgagaagaggagagatggtaactttcaaaatattgtttcagtttaacacatcctatctcatggaaaatgtgaccatttatttaagtgcaacaagtgacagcgaagaacctcctgaaaccctttctgataatgtagtaaacatttctatcccggtaaaatatgaagttggactacagttttacagctctgcaagtgaataccacatttcaattgctgccaatgagacagtccctgaagttattaattctactgaggacattggaaatgaaattaatatcttctacttgattagaaaaagtggatcttttccaatgccagagcttaagctgtcaatttcattccccaatatgacatcaaatggttaccctgtgctgtacccaactggattgtcatcttctgagaatgcaaactgcagaccccatatctttgaggatcctttcagtatcaactctggaaagaaaatgactacatcaactgaccatctcaaacgaggcacaattctggactgcaatacatgtaaatttgctaccatcacatgtaatctcacttcttctgacatcagccaagtcaatgtttcgcttatcttgtggaaaccaacttttataaaatcatatttttccagcttaaatcttactataaggggagaacttcggagtgaaaatgcatctctggttttaagtagcagcaatcaaaaaagagagcttgctattcaaatatccaaagatgggctaccgggcagagtgccattatgggtcatcctgctgagtgcttttgccggattgttgctgttaatgctgctcattttagcactgtggaagattggattcttcaaaagaccactgaaaaagaaaatggagaaatgaaatattttacgaaagaaaataataacaattattcaataatctatcctcaggtttgcctcaaatatgtgacaagaaatgtataattcatgacatagtcatgtaactatgtaatccatcagggattcattacttggaaaatgacaggtcatgcattatccaaaaacaataccaaaaagacatattttataaaatgacaaaaaatattttacataattactcatttttgttgagtaagcaaaattacaaagtgtttttaaaaaaacctgtacaaatatgtttatgtattaaatcaccatccaaaatatttaaggaatatataaaaagatttttatgatcatagaaacatctattttcaaaacaatataaattaagcttttccccttgattcctgttggatatccatgttcagcatgacagtcagcactcgtaaatgccaagaaaagaattacctgaaaaagatcatttctccctattcaaatgagaatattttccctcggtagaatccatatacaatatggattgaaaattaagtcacgaagaatacatttagcatctttgtgttgggttctatacctaaaaattttccctcccggcccaaggtgattggaaagtactgcaattgggctaaaattttatctaggatggaaaatcaggatagactcgtttaaaaacaagtatattaaatgggttaaattaagcttttacagaacatgcttaattctgatattgagctctaaatgcaaaacccttttatactgaaaaaacacttaaagcagttttgtgtggcatcacagtgatttgtcatgaaaagccatatatgggggacatgctaaaatggcttctgaatgaaatacgacagcagagaaagatgccactgaaatgctgaaattatctttgctgagcagcttttgaatgctaagggttccagtatgtgacccaaagaaggagttgtctcaactccttggtacagggttcattcaaacccccaagctgtga

SEQ ID NO: 5 - RNA, 10757 nt, Homo sapiens
  source 1..10757: mol_type = mRNA
ctcccgaaggtccagcccttacccgccttcctaccaccttaggggatttggcccggagaacgagatcaccctctcaatgaaaggcagatgtccctttaaggtttgcttctacagcccgtggactttagcctaaacacggacccgcgaagctggctttatttgtccatgtctcggacagagcctgggaagctgccagtgagatttcagagaccaagagcgcgaaggggcgggcgatgtggcaatccgtctgggatgtgaaaagcgtggagcgcatttagaggaattcgacgaaaacacaggaaatcactcctctcccgctcctgggcgccgctgccactggggcagaggactgggaaccgcggcagcgggataagtggcccagccagagagcgcagctcccgcgcccggtcctgccctgcgaaccagcgcggccccctggcgctgaggctgctccggccatggcccctcggccccgcgcccgcccaggggtcgctgtcgcctgctgctggctcctcactgttgttctacgctgctgcgtatcattcaatgttgatgtgaaaaattcaatgactttcagcggcccggtggaagacatgtttggatatactgttcaacaatatgaaaatgaagaaggaaaatgggtgcttattggttctccgttagttggccaacccaaaaacagaactggagatgtctataagtgtccagttgggagaggtgaatcattaccttgtgtaaagttggatctaccagttaatacatcaattcccaatgtcacagaagtaaaggagaacatgacatttggatcaactttagtcaccaacccaaatggaggatttctggcttgtgggcccttatatgcctatagatgtggacatttgcattacacaactggaatctgttctgacgtcagccccacatttcaagtcgtgaattccattgcccctgtacaagaatgcagcactcaactggacatagtcatagtgctggatggttccaacagtatttacccatgggacagtgttacagcttttttaaatgaccttcttgaaagaatggatattggtcctaaacagacacaggttggaattgtacagtatggagaaaacgtgacccatgagttcaacctcaataagtattcttccaccgaagaggtacttgttgcagcaaagaaaatagtccagagaggtggccgccagactatgacagctcttggaatagacacagcaagaaaggaggcattcacggaagcccggggtgcccgaagaggagttaaaaaagtcatggttattgtgacagatggagagtctcatgacaatcatcgactgaagaaggtcatccaagactgtgaagatgaaaacattcaacggttttccatagctattcttggcagctataaccgaggaaatttaagcactgaaaaatttgtggaggaaataaaatcaattgcaagtgaacccactgaaaagcatttcttcaatgtctctgatgaattggctctagtcaccattgttaaaactctgggagaaagaatatttgccctggaagccacagctgaccagtcagcagcttcatttgaaatggaaatgtctcagactggcttcagtgctcattattcacaggactgggtcatgcttggagcagtaggagcctatgattggaatggaacagttgtcatgcagaaggctagtcaaatcataatccctcgaaacacaacctttaatgttgagtctaccaaaaagaatgaaccgcttgcttcttatttaggttacactgtaaactctgctactgcttcttctggagatgtgctctatattgctggacagcctcggtacaatcatacaggccaggtcattatctacaggatggaagatggaaacatcaaaattctccagacgctcagtggagaacagattggttcctactttggcagtattttaacaacaactgacattgacaaggattctaatactgacattcttctagtcggagcccctatgtacatgggaacagagaaggaggagcaaggaaaagtgtatgtgtatgctctcaatcagacaaggtttgaatatcaaatgagcctggaacctattaagcagacgtgctgttcatctcggcagcacaattcatgcacaacagaaaacaaaaatgagccatgcggggctcgttttggaactgcaattgctgctgtaaaagacctcaatcttgatggatttaatgacatcgtgataggagctccgctggaagatgatcacgggggagctgtgtacatttatcatggaagtggcaagactataaggaaagagtatgcacaacgtattccatcaggtggggatggtaagacactgaaattttttggccagtctatccacggagaaatggatttaaatggtgacggtctgacagatgtgactattgggggccttggtggtgctgccctcttctggtcccgagatgtggccgtagttaaagtgaccatgaattttgagccaaataaagtgaatattcaaaagaaaaactgccatatggagggaaaggaaacagtatgcataaatgctacagtgtgttttgatgtgaaattaaagtctaaagaagacacgatttatgaagctgatttgcagtaccgtgtcaccctagattcactaagacaaatatcacgaagttttttctctggaactcaagagagaaaggttcaaaggaacatcacagttcgaaaatcagaatgcactaagcactccttctacatgttggacaagcatgactttcaggactctgtgagaataacgttggactttaatcttaccgatccagaaaatgggcctgttcttgatgattctctaccaaactcagtacatgaatatattccctttgccaaagattgtggaaataaggaaaaatgtatctcagacctcagcctgcatgtcgccaccactgaaaaggacctgctgattgtccgatcccagaatgataagttcaacgttagcctcacagtcaaaaatacaaaggacagtgcctataacaccaggacaatagtgcattattctccaaatctagttttttcaggaattgaggctatccaaaaagacagttgtgaatctaatcataatatcacatgtaaagttggatatcccttcctgagaagaggagagatggtaactttcaaaatattgtttcagtttaacacatcctatctcatggaaaatgtgaccatttatttaagtgcaacaagtgacagcgaagaacctcctgaaaccctttctgataatgtagtaaacatttctatcccggtaaaatatgaagttggactacagttttacagctctgcaagtgaataccacatttcaattgctgccaatgagacagtccctgaagttattaattctactgaggacattggaaatgaaattaatatcttctacttgattagaaaaagtggatcttttccaatgccagagcttaagctgtcaatttcattccccaatatgacatcaaatggttaccctgtgctgtacccaactggattgtcatcttctgagaatgcaaactgcagaccccatatctttgaggatcctttcagtatcaactctggaaagaaaatgactacatcaactgaccatctcaaacgaggcacaattctggactgcaatacatgtaaatttgctaccatcacatgtaatctcacttcttctgacatcagccaagtcaatgtttcgcttatcttgtggaaaccaacttttataaaatcatatttttccagcttaaatcttactataaggggagaacttcggagtgaaaatgcatctctggttttaagtagcagcaatcaaaaaagagagcttgctattcaaatatccaaagatgggctaccgggcagagtgccattatgggtcatcctgctgagtgcttttgccggattgttgctgttaatgctgctcattttagcactgtggaagattggattcttcaaaagaccactgaaaaagaaaatggagaaatgaaatattttatgaaagaaaataataacaattattcaataatctatcctcaggtttgcctcaaatatgtgacaagaaatgtataattcatgacatagtcatgtaactatgtaatccatcagggattcattacttggaaaatgacaggtcatgcattatccaaaaacaataccaaaaagacatattttataaaatgacaaaaaatattttacataattactcatttttgttgagtaagcaaaattacaaagtgtttttaaaaaaacctgtacaaatatgtttatgtattaaatcaccatccaaaatatttaaggaatatataaaaagatttttatgatcatagaaacatctattttcaaaacaatataaattaagcttttccccttgattcctgttggatatccatgttcagcatgacagtcagcactcgtaaatgccaagaaaagaattacctgaaaaagatcatttctccctattcaaatgagaatattttcccttggtagaatccatatacaatatggattgaaaattaagtcaccaagaatacatttagcatctttgtgttgggttctatacctaaaaattttccctccctgcccaaggtgattggaaagtactgcaattgagctaaaattttatctaggatggaaaatcaggatagactcgtttaaaaacaagtatattaaatgggttaaattaagcttttacagaacatgcttaattttgatattgagctctaaatgcaaaactcttttatactgaaaaaacacttaaagtagttttgtgtggcatcacagtgatttgtcatgaaaagccatatatgggggacatgctaaaatggcttctgaatgaaatacgacagcagagaaagatgccactgaaatgctgaaattatctttgctgagcagcttttgaatgctaagggttccagtatgtgacccaaagaaagagttgtctcaactccttggtacagggttcattcaaacccccaagctgtgagagtgtgtttatttttaattttttaaaaggtatttaatttccaaccacacttcttatttttttgaaaagacaattttccatttcagtattacattttaccaagaagtcactgctttttaggtgtgttgcatcaatatttaaataaaatcccagaaatgtattttaaagaatttcaggtttgaaaactcaaaccaacaggaagatatcacacctttgtatgtgcttctttgttcttgaagtagtcattatggttcattggaatctactgtagcataagctcctaggttgctccatttcttaggaaaatagcaatgaatgaatgtatagtagctgcatgtgtgaactactgctgtaaagtttgctgacatttctgcaacaacatttctccatctgatttaccagaacctgtaacaagaccagaacatgtattcatccagaaactcctgggctctgctttgttcaaagaggagcaaatccacatagaaattaaatgttataaatttatttttttaaactaatttccaaagaatttagctgaagactcagagtcagcctacctcttgactctccacatccgcatctaagatcctgaaggccaaaggaatgcgcctgtgggatgccaaagccatcagtagctggaagaaagaatacctctttctagaggtttggtgtcctcttgctggcctgtcattatttggaaatacgcgcttttggaatttccttcattttcgctatttccaggttcagaaatcatacctaccacttgttctttctttgcccagtaaaactcagggtttctcttattcagagttaccatgttgcacacccccagtgctcagcctgcccagaagcccttctctgatctcagcaagatcttagtagtaaagctaacggatccattgaaattcatactcagcatctgtgactactagacaaagcccatttactgaaccataagtgtgcacttttaaactaaattgttaactgaaagggaaaaaatagaaatgagggcattttgaagtttttagaaaagagaggaagagctgttggccagatcaaagagatacttataagcccggcacaatttttaacataagtcattcctggctattaagtaaaatatttcatgaaccagaagtcctgtttctctaatattataatttgttgaggtttgtgtgtgtgtgtgtgtgcatgtgcagacacatgtacacatataaattgaatacaaaaatagctctataacaccaaaaaacagagtttacagaaaataaacacaaaagctatatctgcaagacaagtttgattcatctagtttcatatagtttcatatagtttcatttttattaatatttaggtttaacttatagttctgcaattatttaaaaaacaagtacagagcgtttgattaaaaaaagtcaacaaatgtttcaaaacagctttgtacaaatgttataaaacatatttaatgattaagaaatgtactagactctatcatttacttttaaaacatttaattagaaaaacaggtgatatttaagactatttataaacttattggccaaattgccaaaaagtttctttttctctaactttggtattctaaataattgattattgctcccattgtaaactgaaccatgtatgcactctcttttctgaccaaactacaatggtatattggtaaattatttaacaacacactgtccaggagggaaaaaaaaaacagtctctgatttgtatcatttgccaatttccatggtccaaatattctctctccattttcaaactaccaaagtgaccctaatcagcttacaaaattcctggaaatgtatctgccacctcttaccaaccagtgtgagctgacttcagcacaccactgagacagattacacgatagacagatagatagatagatagatagatagatagatagatagatagatagatattgatagagaacatgttgtgtctatatacatatccaatgacacacagtataatcatgttttaaattatgccaaaagtactgattatatcaagcccagtaaacataatgctacacagcacccattctttaattttgatttctaaaattataaccttcctttgatattaataaaatgttatgaacttgcaggagaaggaaggagttgaaagaaggaaaatataaagggtgatccacagtgaaaatcagacctacacaagccacaaaaaaattgtctcattttcccaaggaattcaaagtcctgtgatacacattacaaaagatgacactttgtaaatattttgaacttctatgatccaatttcaacttcattggtccaatttgtcaaactattttcctctgagcactagattcatgggcaatttaatctctgaatattttctgtgtcataagtgtgcttgaaaagaggcttgtagtaaacagatatttttacaaaatttgatgcttctgcaaccataataattttatctataaatgcgtatatacatatatatatatatatatatacacatacactcacatgcagatatttacatatatagatattctcttttccttttataaaatcaaagtctaggctcaattggaaaatggaaatatttgcaccaaaagaaaaaagtgccattgttgtgatcaatggagtaaagctggggtatagtagaggctggggaatccctgcccatgttctctccaaggccacagcttgcacaccgtgaatggtggccccactggctccatggagtgtgccttcacgcgggggaatgtccttgtccaacacgctgtaatctactccatgggaactgactgtcctgcttttcacaacattgagaaacaggcccagagcctgtctcatgtgccaggtgcagtcacattattgttaaaataaagtggcttctgacaaatcagtttttcaaaatagcatcctatgtacttttcatttcttccaacaaccctcaggcccccttttgccagttttctcccccaggggagattttcaagactactggagaaaaatctgttaataaaacatttgctctgagtaccagcttcagtgactcaatcatttatacaggatttcagtgttttgttctgcagcggtgttctaaagggttcacatagtataatggaggagggacaaagcagaatatacttccaagctggaacatctttaagacatttacaaactgttatgggacactatcagcaactacgcctggggaagctagcaggatttagctcttcaatggccctccaaatgcacccaacaatcgccaacctcacccatggaaatcatctaaaaaatgaaaagaagggccttaaagtcctcacatggatgctgtatttataactaaaatgtacagtttaattctaaatagcaggcttttaaatgcaaacagcttccaggtgagtcctctggctgccaatcagactgctgattctaaaccattctcacacagaatttctgaaaccaacaccaggtattaattgttaactgcagtgaaaggaaaccaaggcacattacaaaaggctaaatgctgctgtttctaagtggaagcactgttgaacaacactcttaggtggaataagaaaattagggttaaactgtaacattgtaatcggacgaacaaatcagcatctttgatcctcaggttaaaatttaatcttaaatttagaaattcaaagtaacagcctttaaccattaaccttgaggaaaatgtgaagtagcatctggagtctcttaagccccagccctgttgtcccctacagcatctccacccaggaagtccagttcctaactaatgggaatggatccttttcccattataaagggccgatgcttaacccttgaacccactactgttcttatgccccaagatctgcaccttacatcaggcacccgggaatgcttctcattgaaattttaccataccaaaaaatatgtaagggtgactcatcactcctaactttggactccttgctttgagatcggtatttttttctctctctttacatatagcaaaagctttccccagtagctgatgaatttagaactttatacaagactccctagcattttcctcctcccacaggctggagaatttcagtgctatgagactgggcagtaggagccagagccaatttgcaggatctcttttccttctgccttccagttggcttctcttctcagctgcgtggtggggatgatttggggtttcctcagcaaggccattctctgccttgtgcccatagcagggccttgggtggtgacatgttatctttgttggtgagcagacactcagagatcctttaattatctgacacaccagggaaatcttggcaatcaactaaggacctgtgacactcataactatgtttacatttggctttagcatatttcaggtaatatctttatgaaaaaaagatgaagtatggaattgtaggaactcttttgcaatagactgagatccaatgtttaaatctttttatttcagtttgatctgtgcctttagattggggacaaaattttaaaaacaaatcttccaaatgacaccacaatgaaagccagttgtggtcttgaaaaatctctctattgcattacttatcctcacccttgttttttaagaggtagagagagattactgggaagcagtgagccaacataattgtcctttcctctacagaatagctgtgcagaaggggaccaccacacttaggaccagtgccaggtgacaatctttccgtcatgctgctgcagcattttgcaccttgagagacaggaaaaaaaatgggggtgagggagtggaagatgatgaaactatttctcttttatgtctacatccttactcctcaaaatactttaagctcactcagaccccatataccctgcccacaatactaacacatgtactttgcataagtaaattgttgattaaataagagcaaaactatattcttatgtgtagattaaccaaggctaatttcctggagtttaatacactttggattcaagtaaaaacaatcacttaatgcagcaacatctcagaccctcttcactctagaaccgttttatacaagagaactcaacatttactgttttatttctgatattgcctgccattactcaggatgcaagagatgctctgcattccttattaggaaaaattggcctgtaaggagaatggtatactgcgtattactactgtgagactgtaaaattgttaatggacagtgtaaagaattgtattcattttattagcaagaaaaatattgcatacaagaactactgccctgaaatatccatcactccaatgaactgttctgcctgatctaacataaagttatatttcattgctcatttttttttgcctcactaaaatgactaacttaagggaatgtgcatttctacaagactttaattggataaactcattagaagaaaatgtttcgattgcattcaggaacaaagaagcataacctttgttgactcttgtaatttattatatgcttcatttaaacccattttgtaaagaaatcaggtaacagtcatttaatctgatataattagaaatagctgagagagtaaaaaagcattttgaatgtcctatgtatggcatatcctgtacaccaattgaaggtcagagctttggtatttttgtataattctgtcttatctggtgcatcagctgtgtattttacgtcaaggtaaatgagcatcctgttttatatgttaaattttaaaaatgactttttcaaagaag

SEQ ID NO: 6 - DNA, 10736 bp, Homo sapiens
  source 1..10736: mol_type = other DNA
acccgccttcctaccaccttaggggatttggcccggagaacgagatcaccctctcaatgaaaggcagatgtccctttaaggtttgcttctacagcccgtggactttagcctaaacacggacccgcgaagctggctttatttgtccatgtctcggacagagcctgggaagctgccagtgagatttcagagaccaagagcgcgaaggggcgggcgatgtggcaatccgtctgggatgtgaaaagcgtggagcgcatttagaggaattcgacgaaaacacaggaaatcactcctctcccgctcctgggcgccgctgccactggggcagaggactgggaaccgcggcagcgggataagtggcccagccagagagcgcagctcccgcgcccggtcctgccctgcgaaccagcgcggccccctggcgctgaggctgctccggccatggcccctcggccccgcgcccgcccaggggtcgctgtcgcctgctgctggctcctcactgttgttctacgctgctgcgtatcattcaatgttgatgtgaaaaattcaatgactttcagcggcccggtggaagacatgtttggatatactgttcaacaatatgaaaatgaagaaggaaaatgggtgcttattggttctccgttagttggccaacccaaaaacagaactggagatgtctataagtgtccagttgggagaggtgaatcattaccttgtgtaaagttggatctaccagttaatacatcaattcccaatgtcacagaagtaaaggagaacatgacatttggatcaactttagtcaccaacccaaatggaggatttctggcttgtgggcccttatatgcctatagatgtggacatttgcattacacaactggaatctgttctgacgtcagccccacatttcaagtcgtgaattccattgcccctgtacaagaatgcagcactcaactggacatagtcatagtgctggatggttccaacagtatttacccatgggacagtgttacagcttttttaaatgaccttcttgaaagaatggatattggtcctaaacagacacaggttggaattgtacagtatggagaaaacgtgacccatgagttcaacctcaataagtattcttccaccgaagaggtacttgttgcagcaaagaaaatagtccagagaggtggccgccagactatgacagctcttggaatagacacagcaagaaaggaggcattcacggaagcccggggtgcccgaagaggagttaaaaaagtcatggttattgtgacagatggagagtctcatgacaatcatcgactgaagaaggtcatccaagactgtgaagatgaaaacattcaacggttttccatagctattcttggcagctataaccgaggaaatttaagcactgaaaaatttgtggaggaaataaaatcaattgcaagtgaacccactgaaaagcatttcttcaatgtctctgatgaattggctctagtcaccattgttaaaactctgggagaaagaatatttgccctggaagccacagctgaccagtcagcagcttcatttgaaatggaaatgtctcagactggcttcagtgctcattattcacaggactgggtcatgcttggagcagtaggagcctatgattggaatggaacagttgtcatgcagaaggctagtcaaatcataatccctcgaaacacaacctttaatgttgagtctaccaaaaagaatgaaccgcttgcttcttatttaggttacactgtaaactctgctactgcttcttctggagatgtgctctatattgctggacagcctcggtacaatcatacaggccaggtcattatctacaggatggaagatggaaacatcaaaattctccagacgctcagtggagaacagattggttcctactttggcagtattttaacaacaactgacattgacaaggattctaatactgacattcttctagtcggagcccctatgtacatgggaacagagaaggaggagcaaggaaaagtgtatgtgtatgctctcaatcagacaaggtttgaatatcaaatgagcctggaacctattaagcagacgtgctgttcatctcggcagcacaattcatgcacaacagaaaacaaaaatgagccatgcggggctcgttttggaactgcaattgctgctgtaaaagacctcaatcttgatggatttaatgacatcgtgataggagctccgctggaagatgatcacgggggagctgtgtacatttatcatggaagtggcaagactataaggaaagagtatgcacaacgtattccatcaggtggggatggtaagacactgaaattttttggccagtctatccacggagaaatggatttaaatggtgacggtctgacagatgtgactattgggggccttggtggtgctgccctcttctggtcccgagatgtggccgtagttaaagtgaccatgaattttgagccaaataaagtgaatattcaaaagaaaaactgccatatggagggaaaggaaacagtatgcataaatgctacagtgtgttttgatgtgaaattaaagtctaaagaagacacgatttatgaagctgatttgcagtaccgtgtcaccctagattcactaagacaaatatcacgaagttttttctctggaactcaagagagaaaggttcaaaggaacatcacagttcgaaaatcagaatgcactaagcactccttctacatgttggacaagcatgactttcaggactctgtgagaataacgttggactttaatcttaccgatccagaaaatgggcctgttcttgatgattctctaccaaactcagtacatgaatatattccctttgccaaagattgtggaaataaggaaaaatgtatctcagacctcagcctgcatgtcgccaccactgaaaaggacctgctgattgtccgatcccagaatgataagttcaacgttagcctcacagtcaaaaatacaaaggacagtgcctataacaccaggacaatagtgcattattctccaaatctagttttttcaggaattgaggctatccaaaaagacagttgtgaatctaatcataatatcacatgtaaagttggatatcccttcctgagaagaggagagatggtaactttcaaaatattgtttcagtttaacacatcctatctcatggaaaatgtgaccatttatttaagtgcaacaagtgacagcgaagaacctcctgaaaccctttctgataatgtagtaaacatttctatcccggtaaaatatgaagttggactacagttttacagctctgcaagtgaataccacatttcaattgctgccaatgagacagtccctgaagttattaattctactgaggacattggaaatgaaattaatatcttctacttgattagaaaaagtggatcttttccaatgccagagcttaagctgtcaatttcattccccaatatgacatcaaatggttaccctgtgctgtacccaactggattgtcatcttctgagaatgcaaactgcagaccccatatctttgaggatcctttcagtatcaactctggaaagaaaatgactacatcaactgaccatctcaaacgaggcacaattctggactgcaatacatgtaaatttgctaccatcacatgtaatctcacttcttctgacatcagccaagtcaatgtttcgcttatcttgtggaaaccaacttttataaaatcatatttttccagcttaaatcttactataaggggagaacttcggagtgaaaatgcatctctggttttaagtagcagcaatcaaaaaagagagcttgctattcaaatatccaaagatgggctaccgggcagagtgccattatgggtcatcctgctgagtgcttttgccggattgttgctgttaatgctgctcattttagcactgtggaagattggattcttcaaaagaccactgaaaaagaaaatggagaaatgaaatattttatgaaagaaaataataacaattattcaataatctatcctcaggtttgcctcaaatatgtgacaagaaatgtataattcatgacatagtcatgtaactatgtaatccatcagggattcattacttggaaaatgacaggtcatgcattatccaaaaacaataccaaaaagacatattttataaaatgacaaaaaatattttacataattactcatttttgttgagtaagcaaaattacaaagtgtttttaaaaaaacctgtacaaatatgtttatgtattaaatcaccatccaaaatatttaaggaatatataaaaagatttttatgatcatagaaacatctattttcaaaacaatataaattaagcttttccccttgattcctgttggatatccatgttcagcatgacagtcagcactcgtaaatgccaagaaaagaattacctgaaaaagatcatttctccctattcaaatgagaatattttcccttggtagaatccatatacaatatggattgaaaattaagtcaccaagaatacatttagcatctttgtgttgggttctatacctaaaaattttccctccctgcccaaggtgattggaaagtactgcaattgagctaaaattttatctaggatggaaaatcaggatagactcgtttaaaaacaagtatattaaatgggttaaattaagcttttacagaacatgcttaattttgatattgagctctaaatgcaaaactcttttatactgaaaaaacacttaaagtagttttgtgtggcatcacagtgatttgtcatgaaaagccatatatgggggacatgctaaaatggcttctgaatgaaatacgacagcagagaaagatgccactgaaatgctgaaattatctttgctgagcagcttttgaatgctaagggttccagtatgtgacccaaagaaagagttgtctcaactccttggtacagggttcattcaaacccccaagctgtgagagtgtgtttatttttaattttttaaaaggtatttaatttccaaccacacttcttatttttttgaaaagacaattttccatttcagtattacattttaccaagaagtcactgctttttaggtgtgttgcatcaatatttaaataaaatcccagaaatgtattttaaagaatttcaggtttgaaaactcaaaccaacaggaagatatcacacctttgtatgtgcttctttgttcttgaagtagtcattatggttcattggaatctactgtagcataagctcctaggttgctccatttcttaggaaaatagcaatgaatgaatgtatagtagctgcatgtgtgaactactgctgtaaagtttgctgacatttctgcaacaacatttctccatctgatttaccagaacctgtaacaagaccagaacatgtattcatccagaaactcctgggctctgctttgttcaaagaggagcaaatccacatagaaattaaatgttataaatttatttttttaaactaatttccaaagaatttagctgaagactcagagtcagcctacctcttgactctccacatccgcatctaagatcctgaaggccaaaggaatgcgcctgtgggatgccaaagccatcagtagctggaagaaagaatacctctttctagaggtttggtgtcctcttgctggcctgtcattatttggaaatacgcgcttttggaatttccttcattttcgctatttccaggttcagaaatcatacctaccacttgttctttctttgcccagtaaaactcagggtttctcttattcagagttaccatgttgcacacccccagtgctcagcctgcccagaagcccttctctgatctcagcaagatcttagtagtaaagctaacggatccattgaaattcatactcagcatctgtgactactagacaaagcccatttactgaaccataagtgtgcacttttaaactaaattgttaactgaaagggaaaaaatagaaatgagggcattttgaagtttttagaaaagagaggaagagctgttggccagatcaaagagatacttataagcccggcacaatttttaacataagtcattcctggctattaagtaaaatatttcatgaaccagaagtcctgtttctctaatattataatttgttgaggtttgtgtgtgtgtgtgtgtgcatgtgcagacacatgtacacatataaattgaatacaaaaatagctctataacaccaaaaaacagagtttacagaaaataaacacaaaagctatatctgcaagacaagtttgattcatctagtttcatatagtttcatatagtttcatttttattaatatttaggtttaacttatagttctgcaattatttaaaaaacaagtacagagcgtttgattaaaaaaagtcaacaaatgtttcaaaacagctttgtacaaatgttataaaacatatttaatgattaagaaatgtactagactctatcatttacttttaaaacatttaattagaaaaacaggtgatatttaagactatttataaacttattggccaaattgccaaaaagtttctttttctctaactttggtattctaaataattgattattgctcccattgtaaactgaaccatgtatgcactctcttttctgaccaaactacaatggtatattggtaaattatttaacaacacactgtccaggagggaaaaaaaaaacagtctctgatttgtatcatttgccaatttccatggtccaaatattctctctccattttcaaactaccaaagtgaccctaatcagcttacaaaattcctggaaatgtatctgccacctcttaccaaccagtgtgagctgacttcagcacaccactgagacagattacacgatagacagatagatagatagatagatagatagatagatagatagatagatagatattgatagagaacatgttgtgtctatatacatatccaatgacacacagtataatcatgttttaaattatgccaaaagtactgattatatcaagcccagtaaacataatgctacacagcacccattctttaattttgatttctaaaattataaccttcctttgatattaataaaatgttatgaacttgcaggagaaggaaggagttgaaagaaggaaaatataaagggtgatccacagtgaaaatcagacctacacaagccacaaaaaaattgtctcattttcccaaggaattcaaagtcctgtgatacacattacaaaagatgacactttgtaaatattttgaacttctatgatccaatttcaacttcattggtccaatttgtcaaactattttcctctgagcactagattcatgggcaatttaatctctgaatattttctgtgtcataagtgtgcttgaaaagaggcttgtagtaaacagatatttttacaaaatttgatgcttctgcaaccataataattttatctataaatgcgtatatacatatatatatatatatatatacacatacactcacatgcagatatttacatatatagatattctcttttccttttataaaatcaaagtctaggctcaattggaaaatggaaatatttgcaccaaaagaaaaaagtgccattgttgtgatcaatggagtaaagctggggtatagtagaggctggggaatccctgcccatgttctctccaaggccacagcttgcacaccgtgaatggtggccccactggctccatggagtgtgccttcacgcgggggaatgtccttgtccaacacgctgtaatctactccatgggaactgactgtcctgcttttcacaacattgagaaacaggcccagagcctgtctcatgtgccaggtgcagtcacattattgttaaaataaagtggcttctgacaaatcagtttttcaaaatagcatcctatgtacttttcatttcttccaacaaccctcaggcccccttttgccagttttctcccccaggggagattttcaagactactggagaaaaatctgttaataaaacatttgctctgagtaccagcttcagtgactcaatcatttatacaggatttcagtgttttgttctgcagcggtgttctaaagggttcacatagtataatggaggagggacaaagcagaatatacttccaagctggaacatctttaagacatttacaaactgttatgggacactatcagcaactacgcctggggaagctagcaggatttagctcttcaatggccctccaaatgcacccaacaatcgccaacctcacccatggaaatcatctaaaaaatgaaaagaagggccttaaagtcctcacatggatgctgtatttataactaaaatgtacagtttaattctaaatagcaggcttttaaatgcaaacagcttccaggtgagtcctctggctgccaatcagactgctgattctaaaccattctcacacagaatttctgaaaccaacaccaggtattaattgttaactgcagtgaaaggaaaccaaggcacattacaaaaggctaaatgctgctgtttctaagtggaagcactgttgaacaacactcttaggtggaataagaaaattagggttaaactgtaacattgtaatcggacgaacaaatcagcatctttgatcctcaggttaaaatttaatcttaaatttagaaattcaaagtaacagcctttaaccattaaccttgaggaaaatgtgaagtagcatctggagtctcttaagccccagccctgttgtcccctacagcatctccacccaggaagtccagttcctaactaatgggaatggatccttttcccattataaagggccgatgcttaacccttgaacccactactgttcttatgccccaagatctgcaccttacatcaggcacccgggaatgcttctcattgaaattttaccataccaaaaaatatgtaagggtgactcatcactcctaactttggactccttgctttgagatcggtatttttttctctctctttacatatagcaaaagctttccccagtagctgatgaatttagaactttatacaagactccctagcattttcctcctcccacaggctggagaatttcagtgctatgagactgggcagtaggagccagagccaatttgcaggatctcttttccttctgccttccagttggcttctcttctcagctgcgtggtggggatgatttggggtttcctcagcaaggccattctctgccttgtgcccatagcagggccttgggtggtgacatgttatctttgttggtgagcagacactcagagatcctttaattatctgacacaccagggaaatcttggcaatcaactaaggacctgtgacactcataactatgtttacatttggctttagcatatttcaggtaatatctttatgaaaaaaagatgaagtatggaattgtaggaactcttttgcaatagactgagatccaatgtttaaatctttttatttcagtttgatctgtgcctttagattggggacaaaattttaaaaacaaatcttccaaatgacaccacaatgaaagccagttgtggtcttgaaaaatctctctattgcattacttatcctcacccttgttttttaagaggtagagagagattactgggaagcagtgagccaacataattgtcctttcctctacagaatagctgtgcagaaggggaccaccacacttaggaccagtgccaggtgacaatctttccgtcatgctgctgcagcattttgcaccttgagagacaggaaaaaaaatgggggtgagggagtggaagatgatgaaactatttctcttttatgtctacatccttactcctcaaaatactttaagctcactcagaccccatataccctgcccacaatactaacacatgtactttgcataagtaaattgttgattaaataagagcaaaactatattcttatgtgtagattaaccaaggctaatttcctggagtttaatacactttggattcaagtaaaaacaatcacttaatgcagcaacatctcagaccctcttcactctagaaccgttttatacaagagaactcaacatttactgttttatttctgatattgcctgccattactcaggatgcaagagatgctctgcattccttattaggaaaaattggcctgtaaggagaatggtatactgcgtattactactgtgagactgtaaaattgttaatggacagtgtaaagaattgtattcattttattagcaagaaaaatattgcatacaagaactactgccctgaaatatccatcactccaatgaactgttctgcctgatctaacataaagttatatttcattgctcatttttttttgcctcactaaaatgactaacttaagggaatgtgcatttctacaagactttaattggataaactcattagaagaaaatgtttcgattgcattcaggaacaaagaagcataacctttgttgactcttgtaatttattatatgcttcatttaaacccattttgtaaagaaatcaggtaacagtcatttaatctgatataattagaaatagctgagagagtaaaaaagcattttgaatgtcctatgtatggcatatcctgtacaccaattgaaggtcagagctttggtatttttgtataattctgtcttatctggtgcatcagctgtgtattttacgtcaaggtaaatgagcatcctgttttatatgttaaattttaaaaatgactttttcaaagaa

SEQ ID NO: 7 - DNA, 3736 bp, Homo sapiens
  source 1..3736: mol_type = other DNA
atccgtctgggatgtgaaaagcgtggagcgcatttagaggcattcgacgaaaacacaggaaatcactcctctcccgctcctgggcgccgctgccactggggcagaggactgggaaccgcggcagcgggataagtggcccagccagagagcgcagctcccgcgcccggtcctgccctgcgaaccagcgcggccccctggcgctgaggctgctccggccatggcccctcggccccgcgcccgcccaggggtcgctgtcgcctgctgctggctcctcactgttgttctacgctgctgcgtatcattcaatgttgatgtgaaaaattcaatgactttcagcggcccggtggaagacatgtttggatatactgttcaacaatatgaaaatgaagaaggaaaatgggtgcttattggttctccgttagttggccaacccaaaaacagaactggagatgtctataagtgtccagttgggagaggtgaatcattaccttgcgtaaagttggatctaccagttaatacatcaattcccaatgtcacagaagtaaaggagaacatgacatttggatcaactttagtcaccaacccaaatggaggatttctggcttgtgggcccttatatgcctatagatgtggacatttgcattacacaactggaatctgttctgacgtcagccccacatttcaagtcgtgaattccattgcccctgtacaagaatgcagcactcaactggacatagtcatagtgctggatggttccaacagtatttacccatgggacagtgttacagcttttttaaatgaccttcttgaaagaatggatattggtcctaaacagacacaggttggaattgtacagtatggagaaaacgtgacccatgagttcaacctcaataagtattcttccaccgaagaggtacttgttgcagcaaagaaaatagtccagagaggtggccgccagactatgacagctcttggaatagacacagcaagaaaggaggcattcacggaagcccggggtgcccgaagaggagttaaaaaagtcatggttattgtgacagatggagagtctcatgacaatcatcgactgaagaaggtcatccaagactgtgaagatgaaaacattcaacggttttccatagctattcttggcagctataaccgaggaaatttaagcactgaaaaatttgtggaggaaataaaatcaattgcaagtgaacccactgaaaagcatttcttcaatgtctctgatgaattggctctagtcaccattgttaaaactctgggagaaagaatatttgccctggaagccacagctgaccagtcagcagcttcatttgaaatggaaatgtctcagactggcttcagtgctcattattcacaggactgggtcatgcttggagcagtaggagcctatgattggaatggaacagttgtcatgcagaaggctagtcaaatcataatccctcgaaacacaacctttaatgttgagtctaccaaaaagaatgaaccgcttgcttcttatttaggttacactgtaaactctgctactgcttcttctggagatgtgctctatattgctggacagcctcggtacaatcatacaggccaggtcattatctacaggatggaagatggaaacatcaaaattctccagacgctcagtggagaacagattggttcctactttggcagtattttaacaacaactgacattgacaaggattctaatactgacattcttctagtcggagcccctatgtacatgggaacagagaaggaggagcaaggaaaagtgtatgtgtatgctctcaatcagacaaggtttgaatatcaaatgagcctggaacctattaagcagacgtgctgttcatctcggcagcacaattcatgcacaacagaaaacaaaaatgagccatgcggggctcgttttggaactgcaattgctgctgtaaaagacctcaatcttgatggatttaatgacatcgtgataggagctccgctggaagatgatcacgggggagctgtgtacatttatcatggaagtggcaagactataaggaaagagtatgcacaacgtattccatcaggtggggatggtaagacactgaaattttttggccagtctatccacggagaaatggatttaaatggtgacggtctgacagatgtgactattgggggccttggtggtgctgccctcttctggtcccgagatgtggccgtagttaaagtgaccatgaattttgagccaaataaagtgaatattcaaaagaaaaactgccatatggagggaaaggaaacagtatgcataaatgctacagtgtgttttgatgtgaaattaaagtctaaagaagacacgatttatgaagctgatttgcagtaccgtgtcaccctagattcactaagacaaatatcacgaagttttttctctggaactcaagagagaaaggttcaaaggaacatcacagttcgaaaatcagaatgcactaagcactccttctacatgttggacaagcatgactttcaggactctgtgagaataacgttggactttaatcttaccgatccagaaaatgggcctgttcttgatgattctctaccaaactcagtacatgaatatattccctttgccaaagattgtggaaataaggaaaaatgtatctcagacctcagcctgcatgtcgccaccactgaaaaggacctgctgattgtccgatcccagaatgataagttcaacgttagcctcacagtcaaaaatacaaaggacagtgcctataacaccaggacaatagtgcattattctccaaatctagttttttcaggaattgaggctatccaaaaagacagttgtgaatctaatcataatatcacatgtaaagttggatatcccttcctgagaagaggagagatggtaactttcaaaatattgtttcagtttaacacatcctatctcatggaaaatgtgaccatttatttaagtgcaacaagtgacagcgaagaacctcctgaaaccctttctgataatgtagtaaacatttctatcccggtaaaatatgaagttggactacagttttacagctctgcaagtgaataccacatttcaattgctgccaatgagacagtccctgaagttattaattctactgaggacattggaaatgaaattaatatcttctacttgattagaaaaagtggatcttttccaatgccagagcttaagctgtcaatttcattccccaatatgacatcaaatggttaccctgtgctgtacccaactggattgtcatcttctgagaatgcaaactgcagaccccatatctttgaggatcctttcagtatcaactctggaaagaaaatgactacatcaactgaccatctcaaacgaggcacaattctggactgcaatacatgtaaatttgctaccatcacatgtaatctcacttcttctgacatcagccaagtcaatgtttcgcttatcttgtggaaaccaacttttataaaatcatatttttccagcttaaatcttactataaggggaggacttcggagtgaaaatgcatctctggttttaagtagcagcaatcaaaaaagagagcttgctattcaaatatccaaagatgggctaccgggcagagtgccattatgggtcatcctgctgagtgcttttgccggattgttgctgttaatgctgctcattttagcactgtggaagattggattcttcaaaagaccactg

SEQ ID NO: 8 - DNA, 4587 bp, Homo sapiens
  source 1..4587: mol_type = other DNA
gtcctgccctgcgaaccagcgcggccccctggcgctgaggctgctccggccatggcccctcggccccgcgcccgcccaggggtcgctgtcgcctgctgctggctcctcactgttgttctacgctgctgcgtatcattcaatgttgatgtgaaaaattcaatgactttcagcggcccggtggaagacatgtttggatatactgttcaacaatatgaaaatgaagaaggaaaatgggtgcttattggttctccgttagttggccaacccaaaaacagaactggagatgtctataagtgtccagttgggagaggtgaatcattaccttgcgtaaagttggatctaccagttaatacatcaattcccaatgtcacagaagtaaaggagaacatgacatttggatcaactttagtcaccaacccaaatggaggatttctggcttgtgggcccttatatgcctatagatgtggacatttgcattacacaactggaatctgttctgacgtcagccccacatttcaagtcgtgaattccattgcccctgtacaagaatgcagcactcaactggacatagtcatagtgctggatggttccaacagtatttacccatgggacagtgttacagcttttttaaatgaccttcttgaaagaatggatattggtcctaaacagacacaggttggaattgtacagtatggagaaaacgtgacccatgagttcaacctcaataagtattcttccaccgaagaggtacttgttgcagcaaagaaaatagtccagagaggtggccgccagactatgacagctcttggaatagacacagcaagaaaggaggcattcacggaagcccggggtgcccgaagaggagttaaaaaagtcatggttattgtgacagatggagagtctcatgacaatcatcgactgaagaaggtcatccaagactgtgaagatgaaaacattcaacggttttccatagctattcttggcagctataaccgaggaaatttaagcactgaaaaatttgtggaggaaataaaatcaattgcaagtgaacccactgaaaagcatttcttcaatgtctctgatgaattggctctagtcaccattgttaaaactctgggagaaagaatatttgccctggaagccacagctgaccagtcagcagcttcatttgaaatggaaatgtctcagactggcttcagtgctcattattcacaggactgggtcatgcttggagcagtaggagcctatgattggaatggaacagttgtcatgcagaaggctagtcaaatcataatccctcgaaacacaacctttaatgttgagtctaccaaaaagaatgaaccgcttgcttcttatttaggttacactgtaaactctgctactgcttcttctggagatgtgctctatattgctggacagcctcggtacaatcatacaggccaggtcattatctacaggatggaagatggaaacatcaaaattctccagacgctcagtggagaacagattggttcctactttggcagtattttaacaacaactgacattgacaaggattctaatactgacattcttctagtcggagcccctatgtacatgggaacagagaaggaggagcaaggaaaagtgtatgtgtatgctctcaatcagacaaggtttgaatatcaaatgagcctggaacctattaagcagacgtgctgttcatctcggcagcacaattcatgcacaacagaaaacaaaaatgagccatgcggggctcgttttggaactgcaattgctgctgtaaaagacctcaatcttgatggatttaatgacatcgtgataggagctccgctggaagatgatcacgggggagctgtgtacatttatcatggaagtggcaagactataaggaaagagtatgcacaacgtattccatcaggtggggatggtaagacactgaaattttttggccagtctatccacggagaaatggatttaaatggtgacggtctgacagatgtgactattgggggccttggtggtgctgccctcttctggtcccgagatgtggccgtagttaaagtgaccatgaattttgagccaaataaagtgaatattcaaaagaaaaactgccatatggagggaaaggaaacagtatgcataaatgctacagtgtgttttgatgtgaaattaaagtctaaagaagacacgatttatgaagctgatttgcagtaccgtgtcaccctagattcactaagacaaatatcacgaagttttttctctggaactcaagagagaaaggttcaaaggaacatcacagttcgaaaatcagaatgcactaagcactccttctacatgttggacaagcatgactttcaggactctgtgagaataacgttggactttaatcttaccgatccagaaaatgggcctgttcttgatgattctctaccaaactcagtacatgaatatattccctttgccaaagattgtggaaataaggaaaaatgtatctcagacctcagcctgcatgtcgccaccactgaaaaggacctgctgattgtccgatcccagaatgataagttcaacgttagcctcacagtcaaaaatacaaaggacagtgcctataacaccaggacaatagtgcattattctccaaatctagttttttcaggaattgaggctatccaaaaagacagttgtgaatctaatcataatatcacatgtaaagttggatatcccttcctgagaagaggagagatggtaactttcaaaatattgtttcagtttaacacatcctatctcatggaaaatgtgaccatttatttaagtgcaacaagtgacagcgaagaacctcctgaaaccctttctgataatgtagtaaacatttctatcccggtaaaatatgaagttggactacagttttacagctctgcaagtgaataccacatttcaattgctgccaatgagacagtccctgaagttattaattctactgaggacattggaaatgaaattaatatcttctacttgattagaaaaagtggatcttttccaatgccagagcttaagctgtcaatttcattccccaatatgacatcaaatggttaccctgtgctgtacccaactggattgtcatcttctgagaatgcaaactgcagaccccatatctttgaggatcctttcagtatcaactctggaaagaaaatgactacatcaactgaccatctcaaacgaggcacaattctggactgcaatacatgtaaatttgctaccatcacatgtaatctcacttcttctgacatcagccaagtcaatgtttcgcttatcttgtggaaaccaacttttataaaatcatatttttccagcttaaatcttactataaggggagaacttcggagtgaaaatgcatctctggttttaagtagcagcaatcaaaaaagagagcttgctattcaaatatccaaagatgggctaccgggcagagtgccattatgggtcatcctgctgagtgcttttgccggattgttgctgttaatgctgctcattttagcactgtggaagattggattcttcaaaagaccactgaaaaagaaaatggagaaatgaaatattttacgaaagaaaataataacaattattcaataatctatcctcaggtttgcctcaaatatgtgacaagaaatgtataattcatgacatagtcatgtaactatgtaatccatcagggattcattacttggaaaatgacaggtcatgcattatccaaaaacaataccaaaaagacatattttataaaatgacaaaaaatattttacataattactcatttttgttgagtaagcaaaattacaaagtgtttttaaaaaaacctgtacaaatatgtttatgtattaaatcaccatccaaaatatttaaggaatatataaaaagatttttatgatcatagaaacatctattttcaaaacaatataaattaagcttttccccttgattcctgttggatatccatgttcagcatgacagtcagcactcgtaaatgccaagaaaagaattacctgaaaaagatcatttctccctattcaaatgagaatattttccctcggtagaatccatatacaatatggattgaaaattaagtcacgaagaatacatttagcatctttgtgttgggttctatacctaaaaattttccctcccggcccaaggtgattggaaagtactgcaattgggctaaaattttatctaggatggaaaatcaggatagactcgtttaaaaacaagtatattaaatgggttaaattaagcttttacagaacatgcttaattctgatattgagctctaaatgcaaaacccttttatactgaaaaaacacttaaagcagttttgtgtggcatcacagtgatttgtcatgaaaagccatatatgggggacatgctaaaatggcttctgaatgaaatacgacagcagagaaagatgccactgaaatgctgaaattatctttgctgagcagcttttgaatgctaagggttccagtatgtgacccaaagaaggagttgtctcaactccttggtacagggttcattcaaacccccaagctgtga

SEQ ID NO: 9 - DNA, 10757 bp, Homo sapiens
  source 1..10757: mol_type = other DNA
ctcccgaaggtccagcccttacccgccttcctaccaccttaggggatttggcccggagaacgagatcaccctctcaatgaaaggcagatgtccctttaaggtttgcttctacagcccgtggactttagcctaaacacggacccgcgaagctggctttatttgtccatgtctcggacagagcctgggaagctgccagtgagatttcagagaccaagagcgcgaaggggcgggcgatgtggcaatccgtctgggatgtgaaaagcgtggagcgcatttagaggaattcgacgaaaacacaggaaatcactcctctcccgctcctgggcgccgctgccactggggcagaggactgggaaccgcggcagcgggataagtggcccagccagagagcgcagctcccgcgcccggtcctgccctgcgaaccagcgcggccccctggcgctgaggctgctccggccatggcccctcggccccgcgcccgcccaggggtcgctgtcgcctgctgctggctcctcactgttgttctacgctgctgcgtatcattcaatgttgatgtgaaaaattcaatgactttcagcggcccggtggaagacatgtttggatatactgttcaacaatatgaaaatgaagaaggaaaatgggtgcttattggttctccgttagttggccaacccaaaaacagaactggagatgtctataagtgtccagttgggagaggtgaatcattaccttgtgtaaagttggatctaccagttaatacatcaattcccaatgtcacagaagtaaaggagaacatgacatttggatcaactttagtcaccaacccaaatggaggatttctggcttgtgggcccttatatgcctatagatgtggacatttgcattacacaactggaatctgttctgacgtcagccccacatttcaagtcgtgaattccattgcccctgtacaagaatgcagcactcaactggacatagtcatagtgctggatggttccaacagtatttacccatgggacagtgttacagcttttttaaatgaccttcttgaaagaatggatattggtcctaaacagacacaggttggaattgtacagtatggagaaaacgtgacccatgagttcaacctcaataagtattcttccaccgaagaggtacttgttgcagcaaagaaaatagtccagagaggtggccgccagactatgacagctcttggaatagacacagcaagaaaggaggcattcacggaagcccggggtgcccgaagaggagttaaaaaagtcatggttattgtgacagatggagagtctcatgacaatcatcgactgaagaaggtcatccaagactgtgaagatgaaaacattcaacggttttccatagctattcttggcagctataaccgaggaaatttaagcactgaaaaatttgtggaggaaataaaatcaattgcaagtgaacccactgaaaagcatttcttcaatgtctctgatgaattggctctagtcaccattgttaaaactctgggagaaagaatatttgccctggaagccacagctgaccagtcagcagcttcatttgaaatggaaatgtctcagactggcttcagtgctcattattcacaggactgggtcatgcttggagcagtaggagcctatgattggaatggaacagttgtcatgcagaaggctagtcaaatcataatccctcgaaacacaacctttaatgttgagtctaccaaaaagaatgaaccgcttgcttcttatttaggttacactgtaaactctgctactgcttcttctggagatgtgctctatattgctggacagcctcggtacaatcatacaggccaggtcattatctacaggatggaagatggaaacatcaaaattctccagacgctcagtggagaacagattggttcctactttggcagtattttaacaacaactgacattgacaaggattctaatactgacattcttctagtcggagcccctatgtacatgggaacagagaaggaggagcaaggaaaagtgtatgtgtatgctctcaatcagacaaggtttgaatatcaaatgagcctggaacctattaagcagacgtgctgttcatctcggcagcacaattcatgcacaacagaaaacaaaaatgagccatgcggggctcgttttggaactgcaattgctgctgtaaaagacctcaatcttgatggatttaatgacatcgtgataggagctccgctggaagatgatcacgggggagctgtgtacatttatcatggaagtggcaagactataaggaaagagtatgcacaacgtattccatcaggtggggatggtaagacactgaaattttttggccagtctatccacggagaaatggatttaaatggtgacggtctgacagatgtgactattgggggccttggtggtgctgccctcttctggtcccgagatgtggccgtagttaaagtgaccatgaattttgagccaaataaagtgaatattcaaaagaaaaactgccatatggagggaaaggaaacagtatgcataaatgctacagtgtgttttgatgtgaaattaaagtctaaagaagacacgatttatgaagctgatttgcagtaccgtgtcaccctagattcactaagacaaatatcacgaagttttttctctggaactcaagagagaaaggttcaaaggaacatcacagttcgaaaatcagaatgcactaagcactccttctacatgttggacaagcatgactttcaggactctgtgagaataacgttggactttaatcttaccgatccagaaaatgggcctgttcttgatgattctctaccaaactcagtacatgaatatattccctttgccaaagattgtggaaataaggaaaaatgtatctcagacctcagcctgcatgtcgccaccactgaaaaggacctgctgattgtccgatcccagaatgataagttcaacgttagcctcacagtcaaaaatacaaaggacagtgcctataacaccaggacaatagtgcattattctccaaatctagttttttcaggaattgaggctatccaaaaagacagttgtgaatctaatcataatatcacatgtaaagttggatatcccttcctgagaagaggagagatggtaactttcaaaatattgtttcagtttaacacatcctatctcatggaaaatgtgaccatttatttaagtgcaacaagtgacagcgaagaacctcctgaaaccctttctgataatgtagtaaacatttctatcccggtaaaatatgaagttggactacagttttacagctctgcaagtgaataccacatttcaattgctgccaatgagacagtccctgaagttattaattctactgaggacattggaaatgaaattaatatcttctacttgattagaaaaagtggatcttttccaatgccagagcttaagctgtcaatttcattccccaatatgacatcaaatggttaccctgtgctgtacccaactggattgtcatcttctgagaatgcaaactgcagaccccatatctttgaggatcctttcagtatcaactctggaaagaaaatgactacatcaactgaccatctcaaacgaggcacaattctggactgcaatacatgtaaatttgctaccatcacatgtaatctcacttcttctgacatcagccaagtcaatgtttcgcttatcttgtggaaaccaacttttataaaatcatatttttccagcttaaatcttactataaggggagaacttcggagtgaaaatgcatctctggttttaagtagcagcaatcaaaaaagagagcttgctattcaaatatccaaagatgggctaccgggcagagtgccattatgggtcatcctgctgagtgcttttgccggattgttgctgttaatgctgctcattttagcactgtggaagattggattcttcaaaagaccactgaaaaagaaaatggagaaatgaaatattttatgaaagaaaataataacaattattcaataatctatcctcaggtttgcctcaaatatgtgacaagaaatgtataattcatgacatagtcatgtaactatgtaatccatcagggattcattacttggaaaatgacaggtcatgcattatccaaaaacaataccaaaaagacatattttataaaatgacaaaaaatattttacataattactcatttttgttgagtaagcaaaattacaaagtgtttttaaaaaaacctgtacaaatatgtttatgtattaaatcaccatccaaaatatttaaggaatatataaaaagatttttatgatcatagaaacatctattttcaaaacaatataaattaagcttttccccttgattcctgttggatatccatgttcagcatgacagtcagcactcgtaaatgccaagaaaagaattacctgaaaaagatcatttctccctattcaaatgagaatattttcccttggtagaatccatatacaatatggattgaaaattaagtcaccaagaatacatttagcatctttgtgttgggttctatacctaaaaattttccctccctgcccaaggtgattggaaagtactgcaattgagctaaaattttatctaggatggaaaatcaggatagactcgtttaaaaacaagtatattaaatgggttaaattaagcttttacagaacatgcttaattttgatattgagctctaaatgcaaaactcttttatactgaaaaaacacttaaagtagttttgtgtggcatcacagtgatttgtcatgaaaagccatatatgggggacatgctaaaatggcttctgaatgaaatacgacagcagagaaagatgccactgaaatgctgaaattatctttgctgagcagcttttgaatgctaagggttccagtatgtgacccaaagaaagagttgtctcaactccttggtacagggttcattcaaacccccaagctgtgagagtgtgtttatttttaattttttaaaaggtatttaatttccaaccacacttcttatttttttgaaaagacaattttccatttcagtattacattttaccaagaagtcactgctttttaggtgtgttgcatcaatatttaaataaaatcccagaaatgtattttaaagaatttcaggtttgaaaactcaaaccaacaggaagatatcacacctttgtatgtgcttctttgttcttgaagtagtcattatggttcattggaatctactgtagcataagctcctaggttgctccatttcttaggaaaatagcaatgaatgaatgtatagtagctgcatgtgtgaactactgctgtaaagtttgctgacatttctgcaacaacatttctccatctgatttaccagaacctgtaacaagaccagaacatgtattcatccagaaactcctgggctctgctttgttcaaagaggagcaaatccacatagaaattaaatgttataaatttatttttttaaactaatttccaaagaatttagctgaagactcagagtcagcctacctcttgactctccacatccgcatctaagatcctgaaggccaaaggaatgcgcctgtgggatgccaaagccatcagtagctggaagaaagaatacctctttctagaggtttggtgtcctcttgctggcctgtcattatttggaaatacgcgcttttggaatttccttcattttcgctatttccaggttcagaaatcatacctaccacttgttctttctttgcccagtaaaactcagggtttctcttattcagagttaccatgttgcacacccccagtgctcagcctgcccagaagcccttctctgatctcagcaagatcttagtagtaaagctaacggatccattgaaattcatactcagcatctgtgactactagacaaagcccatttactgaaccataagtgtgcacttttaaactaaattgttaactgaaagggaaaaaatagaaatgagggcattttgaagtttttagaaaagagaggaagagctgttggccagatcaaagagatacttataagcccggcacaatttttaacataagtcattcctggctattaagtaaaatatttcatgaaccagaagtcctgtttctctaatattataatttgttgaggtttgtgtgtgtgtgtgtgtgcatgtgcagacacatgtacacatataaattgaatacaaaaatagctctataacaccaaaaaacagagtttacagaaaataaacacaaaagctatatctgcaagacaagtttgattcatctagtttcatatagtttcatatagtttcatttttattaatatttaggtttaacttatagttctgcaattatttaaaaaacaagtacagagcgtttgattaaaaaaagtcaacaaatgtttcaaaacagctttgtacaaatgttataaaacatatttaatgattaagaaatgtactagactctatcatttacttttaaaacatttaattagaaaaacaggtgatatttaagactatttataaacttattggccaaattgccaaaaagtttctttttctctaactttggtattctaaataattgattattgctcccattgtaaactgaaccatgtatgcactctcttttctgaccaaactacaatggtatattggtaaattatttaacaacacactgtccaggagggaaaaaaaaaacagtctctgatttgtatcatttgccaatttccatggtccaaatattctctctccattttcaaactaccaaagtgaccctaatcagcttacaaaattcctggaaatgtatctgccacctcttaccaaccagtgtgagctgacttcagcacaccactgagacagattacacgatagacagatagatagatagatagatagatagatagatagatagatagatagatattgatagagaacatgttgtgtctatatacatatccaatgacacacagtataatcatgttttaaattatgccaaaagtactgattatatcaagcccagtaaacataatgctacacagcacccattctttaattttgatttctaaaattataaccttcctttgatattaataaaatgttatgaacttgcaggagaaggaaggagttgaaagaaggaaaatataaagggtgatccacagtgaaaatcagacctacacaagccacaaaaaaattgtctcattttcccaaggaattcaaagtcctgtgatacacattacaaaagatgacactttgtaaatattttgaacttctatgatccaatttcaacttcattggtccaatttgtcaaactattttcctctgagcactagattcatgggcaatttaatctctgaatattttctgtgtcataagtgtgcttgaaaagaggcttgtagtaaacagatatttttacaaaatttgatgcttctgcaaccataataattttatctataaatgcgtatatacatatatatatatatatatatacacatacactcacatgcagatatttacatatatagatattctcttttccttttataaaatcaaagtctaggctcaattggaaaatggaaatatttgcaccaaaagaaaaaagtgccattgttgtgatcaatggagtaaagctggggtatagtagaggctggggaatccctgcccatgttctctccaaggccacagcttgcacaccgtgaatggtggccccactggctccatggagtgtgccttcacgcgggggaatgtccttgtccaacacgctgtaatctactccatgggaactgactgtcctgcttttcacaacattgagaaacaggcccagagcctgtctcatgtgccaggtgcagtcacattattgttaaaataaagtggcttctgacaaatcagtttttcaaaatagcatcctatgtacttttcatttcttccaacaaccctcaggcccccttttgccagttttctcccccaggggagattttcaagactactggagaaaaatctgttaataaaacatttgctctgagtaccagcttcagtgactcaatcatttatacaggatttcagtgttttgttctgcagcggtgttctaaagggttcacatagtataatggaggagggacaaagcagaatatacttccaagctggaacatctttaagacatttacaaactgttatgggacactatcagcaactacgcctggggaagctagcaggatttagctcttcaatggccctccaaatgcacccaacaatcgccaacctcacccatggaaatcatctaaaaaatgaaaagaagggccttaaagtcctcacatggatgctgtatttataactaaaatgtacagtttaattctaaatagcaggcttttaaatgcaaacagcttccaggtgagtcctctggctgccaatcagactgctgattctaaaccattctcacacagaatttctgaaaccaacaccaggtattaattgttaactgcagtgaaaggaaaccaaggcacattacaaaaggctaaatgctgctgtttctaagtggaagcactgttgaacaacactcttaggtggaataagaaaattagggttaaactgtaacattgtaatcggacgaacaaatcagcatctttgatcctcaggttaaaatttaatcttaaatttagaaattcaaagtaacagcctttaaccattaaccttgaggaaaatgtgaagtagcatctggagtctcttaagccccagccctgttgtcccctacagcatctccacccaggaagtccagttcctaactaatgggaatggatccttttcccattataaagggccgatgcttaacccttgaacccactactgttcttatgccccaagatctgcaccttacatcaggcacccgggaatgcttctcattgaaattttaccataccaaaaaatatgtaagggtgactcatcactcctaactttggactccttgctttgagatcggtatttttttctctctctttacatatagcaaaagctttccccagtagctgatgaatttagaactttatacaagactccctagcattttcctcctcccacaggctggagaatttcagtgctatgagactgggcagtaggagccagagccaatttgcaggatctcttttccttctgccttccagttggcttctcttctcagctgcgtggtggggatgatttggggtttcctcagcaaggccattctctgccttgtgcccatagcagggccttgggtggtgacatgttatctttgttggtgagcagacactcagagatcctttaattatctgacacaccagggaaatcttggcaatcaactaaggacctgtgacactcataactatgtttacatttggctttagcatatttcaggtaatatctttatgaaaaaaagatgaagtatggaattgtaggaactcttttgcaatagactgagatccaatgtttaaatctttttatttcagtttgatctgtgcctttagattggggacaaaattttaaaaacaaatcttccaaatgacaccacaatgaaagccagttgtggtcttgaaaaatctctctattgcattacttatcctcacccttgttttttaagaggtagagagagattactgggaagcagtgagccaacataattgtcctttcctctacagaatagctgtgcagaaggggaccaccacacttaggaccagtgccaggtgacaatctttccgtcatgctgctgcagcattttgcaccttgagagacaggaaaaaaaatgggggtgagggagtggaagatgatgaaactatttctcttttatgtctacatccttactcctcaaaatactttaagctcactcagaccccatataccctgcccacaatactaacacatgtactttgcataagtaaattgttgattaaataagagcaaaactatattcttatgtgtagattaaccaaggctaatttcctggagtttaatacactttggattcaagtaaaaacaatcacttaatgcagcaacatctcagaccctcttcactctagaaccgttttatacaagagaactcaacatttactgttttatttctgatattgcctgccattactcaggatgcaagagatgctctgcattccttattaggaaaaattggcctgtaaggagaatggtatactgcgtattactactgtgagactgtaaaattgttaatggacagtgtaaagaattgtattcattttattagcaagaaaaatattgcatacaagaactactgccctgaaatatccatcactccaatgaactgttctgcctgatctaacataaagttatatttcattgctcatttttttttgcctcactaaaatgactaacttaagggaatgtgcatttctacaagactttaattggataaactcattagaagaaaatgtttcgattgcattcaggaacaaagaagcataacctttgttgactcttgtaatttattatatgcttcatttaaacccattttgtaaagaaatcaggtaacagtcatttaatctgatataattagaaatagctgagagagtaaaaaagcattttgaatgtcctatgtatggcatatcctgtacaccaattgaaggtcagagctttggtatttttgtataattctgtcttatctggtgcatcagctgtgtattttacgtcaaggtaaatgagcatcctgttttatatgttaaattttaaaaatgactttttcaaagaag

SEQ ID NO: 10 - protein, 1179 aa, Homo sapiens
MAPRPRARPGVAVACCWLLTVVLRCCVSFNVDVKNSMTFSGPVEDMFGYTVQQYENEEGKWVLIGSPLVGQPKNRTGDVYKCPVGRGESLPCVKLDLPVNTSIPNVTEVKENMTFGSTLVTNPNGGFLACGPLYAYRCGHLHYTTGICSDVSPTFQVVNSIAPVQECSTQLDIVIVLDGSNSIYPWDSVTAFLNDLLERMDIGPKQTQVGIVQYGENVTHEFNLNKYSSTEEVLVAAKKIVQRGGRQTMTALGIDTARKEAFTEARGARRGVKKVMVIVTDGESHDNHRLKKVIQDCEDENIQRFSIAILGSYNRGNLSTEKFVEEIKSIASEPTEKHFFNVSDELALVTIVKTLGERIFALEATADQSAASFEMEMSQTGFSAHYSQDWVMLGAVGAYDWNGTVVMQKASQIIIPRNTTFNVESTKKNEPLASYLGYTVNSATASSGDVLYIAGQPRYNHTGQVIIYRMEDGNIKILQTLSGEQIGSYFGSILTTTDIDKDSNTDILLVGAPMYMGTEKEEQGKVYVYALNQTRFEYQMSLEPIKQTCCSSRQHNSCTTENKNEPCGARFGTAIAAVKDLNLDGFNDIVIGAPLEDDHGGAVYIYHGSGKTIRKEYAQRIPSGGDGKTLKFFGQSIHGEMDLNGDGLTDVTIGGLGGAALFWSRDVAVVKVTMNFEPNKVNIQKKNCHMEGKETVCINATVCFDVKLKSKEDTIYEADLQYRVTLDSLRQISRSFFSGTQERKVQRNITVRKSECTKHSFYMLDKHDFQDSVRITLDFNLTDPENGPVLDDSLPNSVHEYIPFAKDCGNKEKCISDLSLHVATTEKDLLIVRSQNDKFNVSLTVKNTKDSAYNTRTIVHYSPNLVFSGIEAIQKDSCESNHNITCKVGYPFLRRGEMVTFKILFQFNTSYLMENVTIYLSATSDSEEPPETLSDNVVNISIPVKYEVGLQFYSSASEYHISIAANETVPEVINSTEDIGNEINIFYLIRKSGSFPMPELKLSISFPNMTSNGYPVLYPTGLSSSENANCRPHIFEDPFSINSGKKMTTSTDHLKRGTILDCNTCKFATITCNLTSSDISQVNVSLILWKPTFIKSYFSSLNLTIRGELRSENASLVLSSSNQKRELAIQISKDGLPGRVPLWVILLSAFAGLLLLMLLILALWKIGFFKRPLKKKMEK

SEQ ID NO: 11 - protein, 1173 aa, Homo sapiens
MAPRPRARPGVAVACCWLLTVVLRCCVSFNVDVKNSMTFSGPVEDMFGYTVQQYENEEGKWVLIGSPLVGQPKNRTGDVYKCPVGRGESLPCVKLDLPVNTSIPNVTEVKENMTFGSTLVTNPNGGFLACGPLYAYRCGHLHYTTGICSDVSPTFQVVNSIAPVQECSTQLDIVIVLDGSNSIYPWDSVTAFLNDLLERMDIGPKQTQVGIVQYGENVTHEFNLNKYSSTEEVLVAAKKIVQRGGRQTMTALGIDTARKEAFTEARGARRGVKKVMVIVTDGESHDNHRLKKVIQDCEDENIQRFSIAILGSYNRGNLSTEKFVEEIKSIASEPTEKHFFNVSDELALVTIVKTLGERIFALEATADQSAASFEMEMSQTGFSAHYSQDWVMLGAVGAYDWNGTVVMQKASQIIIPRNTTFNVESTKKNEPLASYLGYTVNSATASSGDVLYIAGQPRYNHTGQVIIYRMEDGNIKILQTLSGEQIGSYFGSILTTTDIDKDSNTDILLVGAPMYMGTEKEEQGKVYVYALNQTRFEYQMSLEPIKQTCCSSRQHNSCTTENKNEPCGARFGTAIAAVKDLNLDGFNDIVIGAPLEDDHGGAVYIYHGSGKTIRKEYAQRIPSGGDGKTLKFFGQSIHGEMDLNGDGLTDVTIGGLGGAALFWSRDVAVVKVTMNFEPNKVNIQKKNCHMEGKETVCINATVCFDVKLKSKEDTIYEADLQYRVTLDSLRQISRSFFSGTQERKVQRNITVRKSECTKHSFYMLDKHDFQDSVRITLDFNLTDPENGPVLDDSLPNSVHEYIPFAKDCGNKEKCISDLSLHVATTEKDLLIVRSQNDKFNVSLTVKNTKDSAYNTRTIVHYSPNLVFSGIEAIQKDSCESNHNITCKVGYPFLRRGEMVTFKILFQFNTSYLMENVTIYLSATSDSEEPPETLSDNVVNISIPVKYEVGLQFYSSASEYHISIAANETVPEVINSTEDIGNEINIFYLIRKSGSFPMPELKLSISFPNMTSNGYPVLYPTGLSSSENANCRPHIFEDPFSINSGKKMTTSTDHLKRGTILDCNTCKFATITCNLTSSDISQVNVSLILWKPTFIKSYFSSLNLTIRGGLRSENASLVLSSSNQKRELAIQISKDGLPGRVPLWVILLSAFAGLLLLMLLILALWKIGFFKRPL

SEQ ID NO: 12 - DNA, 20 bp, synthetic construct
  misc_feature 1..20: note = Synthetic sequence; gRNA Recognition Sequence
  source 1..20: mol_type = other DNA
tggcctgtatgattgtaccg

SEQ ID NO: 13 - DNA, 20 bp, synthetic construct
  misc_feature 1..20: note = Synthetic sequence; gRNA Recognition Sequence
  source 1..20: mol_type = other DNA
tgcaacaagtacctcttcgg

SEQ ID NO: 14 - DNA, 20 bp, synthetic construct
  misc_feature 1..20: note = Synthetic sequence; gRNA Recognition Sequence
  source 1..20: mol_type = other DNA
acagcgtattccatcaggtg

SEQ ID NO: 15 - DNA, 20 bp, synthetic construct
  misc_feature 1..20: note = Synthetic sequence; gRNA Recognition Sequence
  source 1..20: mol_type = other DNA
cacagcgtattccatcaggt

SEQ ID NO: 16 - DNA, 20 bp, synthetic construct
  misc_feature 1..20: note = Synthetic sequence; gRNA Recognition Sequence
  source 1..20: mol_type = other DNA
taagtattcttccaccgaag

SEQ ID NO: 17 - DNA, 20 bp, synthetic construct
  misc_feature 1..20: note = Synthetic sequence; gRNA Recognition Sequence
  source 1..20: mol_type = other DNA
attcttggcagctataaccg

SEQ ID NO: 18 - DNA, 20 bp, synthetic construct
  misc_feature 1..20: note = Synthetic sequence; gRNA Recognition Sequence
  source 1..20: mol_type = other DNA
tgtgtaaagttggatctacc

SEQ ID NO: 19 - DNA, 20 bp, synthetic construct
  misc_feature 1..20: note = Synthetic sequence; gRNA Recognition Sequence
  source 1..20: mol_type = other DNA
ggtagatccaactttacaca

SEQ ID NO: 20 - DNA, 20 bp, synthetic construct
  misc_feature 1..20: note = Synthetic sequence; gRNA Recognition Sequence
  source 1..20: mol_type = other DNA
gaaaacaaaaatgagccatg

SEQ ID NO: 21 - DNA, 20 bp, synthetic construct
  misc_feature 1..20: note = Synthetic sequence; gRNA Recognition Sequence
  source 1..20: mol_type = other DNA
ttccaacagtatttacccat

SEQ ID NO: 22 - DNA, 20 bp, synthetic construct
  misc_feature 1..20: note = Synthetic sequence; gRNA Recognition Sequence
  source 1..20: mol_type = other DNA
aacaacaactgacattgaca

SEQ ID NO: 23 - DNA, 20 bp, synthetic construct
  misc_feature 1..20: note = Synthetic sequence; gRNA Recognition Sequence
  source 1..20: mol_type = other DNA
taagcactccttctacatgt

SEQ ID NO: 24 - DNA, 20 bp, synthetic construct
  misc_feature 1..20: note = Synthetic sequence; gRNA Recognition Sequence
  source 1..20: mol_type = other DNA
tcggtacaatcatacaggcc

SEQ ID NO: 25 - DNA, 20 bp, synthetic construct
  misc_feature 1..20: note = Synthetic sequence; gRNA Recognition Sequence
  source 1..20: mol_type = other DNA
ttagtgaatctagggtgaca

SEQ ID NO: 26 - DNA, 20 bp, synthetic construct
  misc_feature 1..20: note = Synthetic sequence; gRNA Recognition Sequence
  source 1..20: mol_type = other DNA
gaggcattcacggaagcccg

SEQ ID NO: 27 - DNA, 20 bp, synthetic construct
  misc_feature 1..20: note = Synthetic sequence; gRNA Recognition Sequence
  source 1..20: mol_type = other DNA
aattcacgacttgaaatgtg

SEQ ID NO: 28 - DNA, 20 bp, synthetic construct
  misc_feature 1..20: note = Synthetic sequence; gRNA Recognition Sequence
  source 1..20: mol_type = other DNA
aagaaaaactgccatatgga

SEQ ID NO: 29 - DNA, 20 bp, synthetic construct
  misc_feature 1..20: note = Synthetic sequence; gRNA Recognition Sequence
  source 1..20: mol_type = other DNA
taaaatctgtaccttgtaca

SEQ ID NO: 30 - DNA, 20 bp, synthetic construct
  misc_feature 1..20: note = Synthetic sequence; gRNA Recognition Sequence
  source 1..20: mol_type = other DNA
gagcagtaggagcctatgat

SEQ ID NO: 31 - DNA, 20 bp, synthetic construct
  misc_feature 1..20: note = Synthetic sequence; gRNA Recognition Sequence
  source 1..20: mol_type = other DNA
gtttgaatatcaaatgagcc

SEQ ID NO: 32 - RNA, 20 nt, synthetic construct
  misc_feature 1..20: note = antisense sequence
  source 1..20: mol_type = other RNA
agggtgatctcgttctccgg

SEQ ID NO: 33 - RNA, 20 nt, synthetic construct
  misc_feature 1..20: note = antisense sequence
  source 1..20: mol_type = other RNA
gagggtgatctcgttctccg

SEQ ID NO: 34 - RNA, 20 nt, synthetic construct
  misc_feature 1..20: note = antisense sequence
  source 1..20: mol_type = other RNA
agagggtgatctcgttctcc

SEQ ID NO: 35 - RNA, 20 nt, synthetic construct
  misc_feature 1..20: note = antisense sequence
  source 1..20: mol_type = other RNA
tttcattgagagggtgatct

SEQ ID NO: 36 - RNA, 20 nt, synthetic construct
  misc_feature 1..20: note = antisense sequence
  source 1..20: mol_type = other RNA
ctttcattgagagggtgatc

SEQ ID NO: 37 - RNA, 20 nt, synthetic construct
  misc_feature 1..20: note = antisense sequence
  source 1..20: mol_type = other RNA
cctttcattgagagggtgat

SEQ ID NO: 38 - RNA, 20 nt, synthetic construct
  misc_feature 1..20: note = antisense sequence
  source 1..20: mol_type = other RNA
gcctttcattgagagggtga

SEQ ID NO: 39 - RNA, 20 nt, synthetic construct
  misc_feature 1..20: note = antisense sequence
  source 1..20: mol_type = other RNA
tgcctttcattgagagggtg

SEQ ID NO: 40 - RNA, 20 nt, synthetic construct
  misc_feature 1..20: note = antisense sequence
  source 1..20: mol_type = other RNA
ctgcctttcattgagagggt

SEQ ID NO: 41 - RNA, 20 nt, synthetic construct
  misc_feature 1..20: note = antisense sequence
  source 1..20: mol_type = other RNA
atctgcctttcattgagagg

SEQ ID NO: 42 - RNA, 20 nt, synthetic construct
  misc_feature 1..20: note = antisense sequence
  source 1..20: mol_type = other RNA
gacatctgcctttcattgag

SEQ ID NO: 43 - RNA, 20 nt, synthetic construct
  misc_feature 1..20: note = antisense sequence
  source 1..20: mol_type = other RNA
ggacatctgcctttcattga

SEQ ID NO: 44 - RNA, 20 nt, synthetic construct
  misc_feature 1..20: note = antisense sequence
  source 1..20: mol_type = other RNA
gggacatctgcctttcattg

SEQ ID NO: 45 - RNA, 20 nt, synthetic construct
  misc_feature 1..20: note = antisense sequence
  source 1..20: mol_type = other RNA
accttaaagggacatctgcc

SEQ ID NO: 46 - RNA, 20 nt, synthetic construct
  misc_feature 1..20: note = antisense sequence
  source 1..20: mol_type = other RNA
aaaccttaaagggacatctg

SEQ ID NO: 47 - RNA, 20 nt, synthetic construct
  misc_feature 1..20: note = antisense sequence
  source 1..20: mol_type = other RNA
caaaccttaaagggacatct

SEQ ID NO: 48 - RNA, 20 nt, synthetic construct
  misc_feature 1..20: note = antisense sequence
  source 1..20: mol_type = other RNA
agaagcaaaccttaaaggga

SEQ ID NO: 49 - RNA, 20 nt, synthetic construct
  misc_feature 1..20: note = antisense sequence
  source 1..20: mol_type = other RNA
gtagaagcaaaccttaaagg

SEQ ID NO: 50 - RNA, 20 nt, synthetic construct
  misc_feature 1..20: note = antisense sequence
  source 1..20: mol_type = other RNA
ggctgtagaagcaaacctta

SEQ ID NO: 51 - RNA, 20 nt, synthetic construct
  misc_feature 1..20: note = antisense sequence
  source 1..20: mol_type = other RNA
cgggctgtagaagcaaacct

SEQ ID NO: 52 - RNA, 20 nt, synthetic construct
  misc_feature 1..20: note = antisense sequence
  source 1..20: mol_type = other RNA
acgggctgtagaagcaaacc

SEQ ID NO: 53 - RNA, 20 nt, synthetic construct
  misc_feature 1..20: note = antisense sequence
  source 1..20: mol_type = other RNA
cacgggctgtagaagcaaac

SEQ ID NO: 54 - RNA, 20 nt, synthetic construct
  misc_feature 1..20: note = antisense sequence
  source 1..20: mol_type = other RNA
ccacgggctgtagaagcaaa

SEQ ID NO: 55 - RNA, 20 nt, synthetic construct
  misc_feature 1..20: note = antisense sequence
  source 1..20: mol_type = other RNA
gtccacgggctgtagaagca

SEQ ID NO: 56 - RNA, 20 nt, synthetic construct
  misc_feature 1..20: note = antisense sequence
  source 1..20: mol_type = other RNA
aagtccacgggctgtagaag

SEQ ID NO: 57 - RNA, 20 nt, synthetic construct
  misc_feature 1..20: note = antisense sequence
  source 1..20: mol_type = other RNA
aaagtccacgggctgtagaa

SEQ ID NO: 58 - RNA, 20 nt, synthetic construct
  misc_feature 1..20: note = antisense sequence
  source 1..20: mol_type = other RNA
ctaaagtccacgggctgtag

SEQ ID NO: 59 - RNA, 20 nt, synthetic construct
  misc_feature 1..20: note = antisense sequence
  source 1..20: mol_type = other RNA
gctaaagtccacgggctgta

SEQ ID NO: 60 - RNA, 20 nt, synthetic construct
  misc_feature 1..20: note = antisense sequence
  source 1..20: mol_type = other RNA
ggctaaagtccacgggctgt

SEQ ID NO: 61 - RNA, 20 nt, synthetic construct
  misc_feature 1..20: note = antisense sequence
  source 1..20: mol_type = other RNA
aggctaaagtccacgggctg

SEQ ID NO: 62 - RNA, 20 nt, synthetic construct
  misc_feature 1..20: note = antisense sequence
  source 1..20: mol_type = other RNA
cgggtccgtgtttaggctaa

SEQ ID NO: 63 - RNA, 20 nt, synthetic construct
  misc_feature 1..20: note = antisense sequence
  source 1..20: mol_type = other RNA
gcgggtccgtgtttaggcta

SEQ ID NO: 64 - RNA, 20 nt, synthetic construct
  misc_feature 1..20: note = antisense sequence
  source 1..20: mol_type = other RNA
aaataaagccagcttcgcgg

SEQ ID NO: 65 - RNA, 20 nt, synthetic construct
  misc_feature 1..20: note = antisense sequence
  source 1..20: mol_type = other RNA
caaataaagccagcttcgcg

SEQ ID NO: 66 - RNA, 20 nt, synthetic construct
  misc_feature 1..20: note = antisense sequence
  source 1..20: mol_type = other RNA
gacaaataaagccagcttcg

SEQ ID NO: 67 - RNA, 20 nt, synthetic construct
  misc_feature 1..20: note = antisense sequence
  source 1..20: mol_type = other RNA
catggacaaataaagccagc

SEQ ID NO: 68 - RNA, 20 nt, synthetic construct
  misc_feature 1..20: note = antisense sequence
  source 1..20: mol_type = other RNA
gagacatggacaaataaagc

SEQ ID NO: 69 - RNA, 20 nt, synthetic construct
  misc_feature 1..20: note = antisense sequence
  source 1..20: mol_type = other RNA
cgagacatggacaaataaag

SEQ ID NO: 70 - RNA, 20 nt, synthetic construct
  misc_feature 1..20: note = antisense sequence
  source 1..20: mol_type = other RNA
ttcccaggctctgtccgaga

SEQ ID NO: 71 - RNA, 20 nt, synthetic construct
  misc_feature 1..20: note = antisense sequence
  source 1..20: mol_type = other RNA
aatctcactggcagcttccc

SEQ ID NO: 72 - RNA, 20 nt, synthetic construct
  misc_feature 1..20: note = antisense sequence
  source 1..20: mol_type = other RNA
gaaatctcactggcagcttc

SEQ ID NO: 73 - RNA, 20 nt, synthetic construct
  misc_feature 1..20: note = antisense sequence
  source 1..20: mol_type = other RNA
tgaaatctcactggcagctt

SEQ ID NO: 74 - RNA, 20 nt, synthetic construct
  misc_feature 1..20: note = antisense sequence
  source 1..20: mol_type = other RNA
gtctctgaaatctcactggc

SEQ ID NO: 75 - RNA, 20 nt, synthetic construct
  misc_feature 1..20: note = antisense sequence
  source 1..20: mol_type = other RNA
cttggtctctgaaatctcac

SEQ ID NO: 76 - RNA, 20 nt, synthetic construct
  misc_feature 1..20: note = antisense sequence
  source 1..20: mol_type = other RNA
cgctcttggtctctgaaatc

SEQ ID NO: 77 - RNA, 20 nt, synthetic construct
  misc_feature 1..20: note = antisense sequence
  source 1..20: mol_type = other RNA
gcgctcttggtctctgaaat

SEQ ID NO: 78 - RNA, 20 nt, synthetic construct
  misc_feature 1..20: note = antisense sequence
  source 1..20: mol_type = other RNA
ttcgcgctcttggtctctga

SEQ ID NO: 79 - RNA, 20 nt, synthetic construct
  misc_feature 1..20: note = antisense sequence
  source 1..20: mol_type = other RNA
cttcgcgctcttggtctctg

SEQ ID NO: 80 - RNA, 20 nt, synthetic construct
  misc_feature 1..20: note = antisense sequence
  source 1..20: mol_type = other RNA
ccttcgcgctcttggtctct

SEQ ID NO: 81 - RNA, 20 nt, synthetic construct
  misc_feature 1..20: note = antisense sequence
  source 1..20: mol_type = other RNA
agacggattgccacatcgcc

SEQ ID NO: 82 - RNA, 20 nt, synthetic construct
  misc_feature 1..20: note = antisense sequence
  source 1..20: mol_type = other RNA
cagacggattgccacatcgc

SEQ ID NO: 83 - RNA, 20 nt, synthetic construct
  misc_feature 1..20: note = antisense sequence
  source 1..20: mol_type = other RNA
ccagacggattgccacatcg

SEQ ID NO: 84 - RNA, 20 nt, synthetic construct
  misc_feature 1..20: note = antisense sequence
  source 1..20: mol_type = other RNA
cccagacggattgccacatc

SEQ ID NO: 85 - RNA, 20 nt, synthetic construct
  misc_feature 1..20: note = antisense sequence
  source 1..20: mol_type = other RNA
tcccagacggattgccacat

SEQ ID NO: 86 - RNA, 20 nt, synthetic construct
  misc_feature 1..20: note = antisense sequence
  source 1..20: mol_type = other RNA
cttttcacatcccagacgga

SEQ ID NO: 87 - RNA, 20 nt, synthetic construct
  misc_feature 1..20: note = antisense sequence
  source 1..20: mol_type = other RNA
cgcttttcacatcccagacg

SEQ ID NO: 88 - RNA, 20 nt, synthetic construct
  misc_feature 1..20: note = antisense sequence
  source 1..20: mol_type = other RNA
acgcttttcacatcccagac

SEQ ID NO: 89 - RNA, 20 nt, synthetic construct
  misc_feature 1..20: note = antisense sequence
  source 1..20: mol_type = other RNA
ctccacgcttttcacatccc

SEQ ID NO: 90 - RNA, 20 nt, synthetic construct
  misc_feature 1..20: note = antisense sequence
  source 1..20: mol_type = other RNA
gctccacgcttttcacatcc

SEQ ID NO: 91 - RNA, 20 nt, synthetic construct
  misc_feature 1..20: note = antisense sequence
  source 1..20: mol_type = other RNA
cgctccacgcttttcacatc

SEQ ID NO: 92 - RNA, 20 nt, synthetic construct
  misc_feature 1..20: note = antisense sequence
  source 1..20: mol_type = other RNA
gcgctccacgcttttcacat

SEQ ID NO: 93 - RNA, 20 nt, synthetic construct
  misc_feature 1..20: note = antisense sequence
  source 1..20: mol_type = other RNA
tgcgctccacgcttttcaca

SEQ ID NO: 94 - RNA, 20 nt, synthetic construct
  misc_feature 1..20: note = antisense sequence
  source 1..20: mol_type = other RNA
atgcgctccacgcttttcac

SEQ ID NO: 95 - RNA, 20 nt, synthetic construct
  misc_feature 1..20: note = antisense sequence
  source 1..20: mol_type = other RNA
aatgcgctccacgcttttca

SEQ ID NO: 96 - RNA, 20 nt, synthetic construct
  misc_feature 1..20: note = antisense sequence
  source 1..20: mol_type = other RNA
aaatgcgctccacgcttttc

SEQ ID NO: 97 - RNA, 20 nt, synthetic construct
  misc_feature 1..20: note = antisense sequence
  source 1..20: mol_type = other RNA
taaatgcgctccacgctttt

SEQ ID NO: 98 - RNA, 20 nt, synthetic construct
  misc_feature 1..20: note = antisense sequence
  source 1..20: mol_type = other RNA
ctaaatgcgctccacgcttt

SEQ ID NO: 99 - RNA, 20 nt, synthetic construct
  misc_feature 1..20: note = antisense sequence
  source 1..20: mol_type = other RNA
tctaaatgcgctccacgctt

SEQ ID NO: 100 - RNA, 20 nt, synthetic construct
  misc_feature 1..20: note = antisense sequence
  source 1..20: mol_type = other RNA
ctctaaatgcgctccacgct

SEQ ID NO: 101 - RNA, 20 nt, synthetic construct
  misc_feature 1..20: note = antisense sequence
  source 1..20: mol_type = other RNA
cctctaaatgcgctccacgc

SEQ ID NO: 102 - RNA, 20 nt, synthetic construct
  misc_feature 1..20: note = antisense sequence
  source 1..20: mol_type = other RNA
ttcctgtgttttcgtcgaat

SEQ ID NO: 103 - RNA, 20 nt, synthetic construct
  misc_feature 1..20: note = antisense sequence
  source 1..20: mol_type = other RNA
tttcctgtgttttcgtcgaa

SEQ ID NO: 104 - RNA, 20 nt, synthetic construct
  misc_feature 1..20: note = antisense sequence
  source 1..20: mol_type = other RNA
atttcctgtgttttcgtcga

SEQ ID NO: 105 - RNA, 20 nt, synthetic construct
  misc_feature 1..20: note = antisense sequence
  source 1..20: mol_type = other RNA
tgatttcctgtgttttcgtc

SEQ ID NO: 106 - RNA, 20 nt, synthetic construct
  misc_feature 1..20: note = antisense sequence
  source 1..20: mol_type = other RNA
agtgatttcctgtgttttcg

SEQ ID NO: 107 - RNA, 20 nt, synthetic construct
  misc_feature 1..20: note = antisense sequence
  source 1..20: mol_type = other RNA
ggagcgggagaggagtgatt

SEQ ID NO: 108 - RNA, 20 nt, synthetic construct
  misc_feature 1..20: note = antisense sequence
  source 1..20: mol_type = other RNA
aggagcgggagaggagtgat

SEQ ID NO: 109 - RNA, 20 nt, synthetic construct
  misc_feature 1..20: note = antisense sequence
  source 1..20: mol_type = other RNA
ctcagagaaaagcgagtcgc

SEQ ID NO: 110 - RNA, 20 nt, synthetic construct
  misc_feature 1..20: note = antisense sequence
  source 1..20: mol_type = other RNA
tgctcagagaaaagcgagtc

SEQ ID NO: 111 - RNA, 20 nt, synthetic construct
  misc_feature 1..20: note = antisense sequence
  source 1..20: mol_type = other RNA
atgctcagagaaaagcgagt

SEQ ID NO: 112 - RNA, 20 nt, synthetic construct
  misc_feature 1..20: note = antisense sequence
  source 1..20: mol_type = other RNA
gatgctcagagaaaagcgag

SEQ ID NO: 113 - RNA, 20 nt, synthetic construct
  misc_feature 1..20: note = antisense sequence
  source 1..20: mol_type = other RNA
gagatgctcagagaaaagcg

SEQ ID NO: 114 - RNA, 20 nt, synthetic construct
  misc_feature 1..20: note = antisense sequence
  source 1..20: mol_type = other RNA
ctcttcctatctggcccatg

SEQ ID NO: 115 - RNA, 20 nt, synthetic construct
  misc_feature 1..20: note = antisense sequence
  source 1..20: mol_type = other RNA
gctctctcttcctatctggc

SEQ ID NO: 116 - RNA, 20 nt, synthetic construct
  misc_feature 1..20: note = antisense sequence
  source 1..20: mol_type = other RNA
tagcctggcctgagtacctg

SEQ ID NO: 117 - RNA, 20 nt, synthetic construct
  misc_feature 1..20: note = antisense sequence
  source 1..20: mol_type = other RNA
aacgcgaaactcctgcctgc

SEQ ID NO: 118 - RNA, 20 nt, synthetic construct
  misc_feature 1..20: note = antisense sequence
  source 1..20: mol_type = other RNA
gaacgcgaaactcctgcctg

SEQ ID NO: 119 - RNA, 20 nt, synthetic construct
  misc_feature 1..20: note = antisense sequence
  source 1..20: mol_type = other RNA
agaacgcgaaactcctgcct

SEQ ID NO: 120 - RNA, 20 nt, synthetic construct
  misc_feature 1..20: note = antisense sequence
  source 1..20: mol_type = other RNA
cagaacgcgaaactcctgcc

SEQ ID NO: 121 - RNA, 20 nt, synthetic construct
  misc_feature 1..20: note = antisense sequence
  source 1..20: mol_type = other RNA
ccagaacgcgaaactcctgc

SEQ ID NO: 122 - RNA, 20 nt, synthetic construct
  misc_feature 1..20: note = antisense sequence
  source 1..20: mol_type = other RNA
accagaacgcgaaactcctg

SEQ ID NO: 123 - RNA, 20 nt, synthetic construct
  misc_feature 1..20: note = antisense sequence
  source 1..20: mol_type = other RNA
aaccagaacgcgaaactcct

SEQ ID NO: 124 - RNA, 20 nt, synthetic construct
  misc_feature 1..20: note = antisense sequence
  source 1..20: mol_type = other RNA
aaaccagaacgcgaaactcc

SEQ ID NO: 125 - RNA, 20 nt, synthetic construct
  misc_feature 1..20: note = antisense sequence
  source 1..20: mol_type = other RNA
aaaaccagaacgcgaaactc

SEQ ID NO: 126 - RNA, 20 nt, synthetic construct
  misc_feature 1..20: note = antisense sequence
  source 1..20: mol_type = other RNA
caaaaccagaacgcgaaact

SEQ ID NO: 127 - RNA, 20 nt, synthetic construct
  misc_feature 1..20: note = antisense sequence
  source 1..20: mol_type = other RNA
atcaaaaccagaacgcgaaa

SEQ ID NO: 128 - RNA, 20 nt, synthetic construct
  misc_feature 1..20: note = antisense sequence
  source 1..20: mol_type = other RNA
gaaggactttggagagacac

SEQ ID NO: 129 - RNA, 20 nt, synthetic construct
  misc_feature 1..20: note = antisense sequence
  source 1..20: mol_type = other RNA
tgaaggactttggagagaca

SEQ ID NO: 130 - RNA, 20 nt, synthetic construct
  misc_feature 1..20: note = antisense sequence
  source 1..20: mol_type = other RNA
ggtgaaggactttggagaga

SEQ ID NO: 131 - RNA, 20 nt, synthetic construct
  misc_feature 1..20: note = antisense sequence
  source 1..20: mol_type = other RNA
ctagggtgaaggactttgga

SEQ ID NO: 132 - RNA, 20 nt, synthetic construct
  misc_feature 1..20: note = antisense sequence
  source 1..20: mol_type = other RNA
tgcctcactcctactcctag

SEQ ID NO: 133 - RNA, 20 nt, synthetic construct
  misc_feature 1..20: note = antisense sequence
  source 1..20: mol_type = other RNA
ggttttcagtgctgcctcac

SEQ ID NO: 134 - RNA, 20 nt, synthetic construct
  misc_feature 1..20: note = antisense sequence
  source 1..20: mol_type = other RNA
aggttttcagtgctgcctca

SEQ ID NO: 135 - RNA, 20 nt, synthetic construct
  misc_feature 1..20: note = antisense sequence
  source 1..20: mol_type = other RNA
tcccatcccatgccataaaa

SEQ ID NO: 136 - RNA, 20 nt, synthetic construct
  misc_feature 1..20: note = antisense sequence
  source 1..20: mol_type = other RNA
atcaccctcccatcccatgc

SEQ ID NO: 137 - RNA, 20 nt, synthetic construct
  misc_feature 1..20: note = antisense sequence
  source 1..20: mol_type = other RNA
gcatcaccctcccatcccat

SEQ ID NO: 138 - RNA, 20 nt, synthetic construct
  misc_feature 1..20: note = antisense sequence
  source 1..20: mol_type = other RNA
agcatcaccctcccatccca

SEQ ID NO: 139 - RNA, 20 nt, synthetic construct
  misc_feature 1..20: note = antisense sequence
  source 1..20: mol_type = other RNA
aagcatcaccctcccatccc

SEQ ID NO: 140 - RNA, 20 nt, synthetic construct
  misc_feature 1..20: note = antisense sequence
  source 1..20: mol_type = other RNA
taagcatcaccctcccatcc

SEQ ID NO: 141 - RNA, 20 nt, synthetic construct
  misc_feature 1..20: note = antisense sequence
  source 1..20: mol_type = other RNA
ataagcatcaccctcccatc

SEQ ID NO: 142 - RNA, 20 nt, synthetic construct
  misc_feature 1..20: note = antisense sequence
  source 1..20: mol_type = other RNA
ctataagcatcaccctccca

SEQ ID NO: 143 - RNA, 20 nt, synthetic construct
  misc_feature 1..20: note = antisense sequence
  source 1..20: mol_type = other RNA
cctataagcatcaccctccc

SEQ ID NO: 144 - RNA, 20 nt, synthetic construct
  misc_feature 1..20: note = antisense sequence
  source 1..20: mol_type = other RNA
ccctataagcatcaccctcc

SEQ ID NO: 145 - RNA, 20 nt, synthetic construct
  misc_feature 1..20: note = antisense sequence
  source 1..20: mol_type = other RNA
gccctataagcatcaccctc

SEQ ID NO: 146 - RNA, 20 nt, synthetic construct
  misc_feature 1..20: note = antisense sequence
  source 1..20: mol_type = other RNA
cgccctataagcatcaccct

SEQ ID NO: 147 - RNA, 20 nt, synthetic construct
  misc_feature 1..20: note = antisense sequence
  source 1..20: mol_type = other RNA
cgagggtaggaattttgcat

SEQ ID NO: 148 - RNA, 20 nt, synthetic construct
  misc_feature 1..20: note = antisense sequence
  source 1..20: mol_type = other RNA
ccgagggtaggaattttgca

SEQ ID NO: 149 - RNA, 20 nt, synthetic construct
  misc_feature 1..20: note = antisense sequence
  source 1..20: mol_type = other RNA
cccgagggtaggaattttgc

SEQ ID NO: 150 - RNA, 20 nt, synthetic construct
  misc_feature 1..20: note = antisense sequence
  source 1..20: mol_type = other RNA
acccgagggtaggaattttg

SEQ ID NO: 151 - RNA, 20 nt, synthetic construct
  misc_feature 1..20: note = antisense sequence
  source 1..20: mol_type = other RNA
aacccgagggtaggaatttt

SEQ ID NO: 152 - RNA, 20 nt, synthetic construct
  misc_feature 1..20: note = antisense sequence
  source 1..20: mol_type = other RNA
caacccgagggtaggaattt

SEQ ID NO: 153 - RNA, 20 nt, synthetic construct
  misc_feature 1..20: note = antisense sequence
  source 1..20: mol_type = other RNA
acaacccgagggtaggaatt

SEQ ID NO: 154 - RNA, 20 nt, synthetic construct
  misc_feature 1..20: note = antisense sequence
  source 1..20: mol_type = other RNA
aacaacccgagggtaggaat

SEQ ID NO: 155 - RNA, 20 nt, synthetic construct
  misc_feature 1..20: note = antisense sequence
  source 1..20: mol_type = other RNA
gaacaacccgagggtaggaa

SEQ ID NO: 156 - RNA, 20 nt, synthetic construct
  misc_feature 1..20: note = antisense sequence
  source 1..20: mol_type = other RNA
ggaacaacccgagggtagga

SEQ ID NO: 157 - RNA, 20 nt, synthetic construct
  misc_feature 1..20: note = antisense sequence
  source 1..20: mol_type = other RNA
tggaacaacccgagggtagg

SEQ ID NO: 158 - RNA, 20 nt, synthetic construct
  misc_feature 1..20: note = antisense sequence
  source 1..20: mol_type = other RNA
ctggaacaacccgagggtag

SEQ ID NO: 159 - RNA, 20 nt, synthetic construct
  misc_feature 1..20: note = antisense sequence
  source 1..20: mol_type = other RNA
tctggaacaacccgagggta

SEQ ID NO: 160 - RNA, 20 nt, synthetic construct
  misc_feature 1..20: note = antisense sequence
  source 1..20: mol_type = other RNA
ctctggaacaacccgagggt

SEQ ID NO: 161 - RNA, 20 nt, synthetic construct
  misc_feature 1..20: note = antisense sequence
  source 1..20: mol_type = other RNA
actctggaacaacccgaggg

SEQ ID NO: 162 - RNA, 20 nt, synthetic construct
  misc_feature 1..20: note = antisense sequence
  source 1..20: mol_type = other RNA
ccactctggaacaacccgag

SEQ ID NO: 163 - RNA, 20 nt, synthetic construct
  misc_feature 1..20: note = antisense sequence
  source 1..20: mol_type = other RNA
ttcaataatgtccactctgg

SEQ ID NO: 164 - RNA, 20 nt, synthetic construct
  misc_feature 1..20: note = antisense sequence
  source 1..20: mol_type = other RNA
cctaaatagtagacagcaag

SEQ ID NO: 165 - RNA, 20 nt, synthetic construct
  misc_feature 1..20: note = antisense sequence
  source 1..20: mol_type = other RNA
gcctaaatagtagacagcaa

SEQ ID NO: 166 - RNA, 20 nt, synthetic construct
  misc_feature 1..20: note = antisense sequence
  source 1..20: mol_type = other RNA
aagcctaaatagtagacagc

SEQ ID NO: 167 - RNA, 20 nt, synthetic construct
  misc_feature 1..20: note = antisense sequence
  source 1..20: mol_type = other RNA
ttcgtcttgcatccctgcct

SEQ ID NO: 168 - RNA, 20 nt, synthetic construct
  misc_feature 1..20: note = antisense sequence
  source 1..20: mol_type = other RNA
agtttcgtcttgcatccctg

SEQ ID NO: 169 - RNA, 20 nt, synthetic construct
  misc_feature 1..20: note = antisense sequence
  source 1..20: mol_type = other RNA
cagtttcgtcttgcatccct

SEQ ID NO: 170 - RNA, 20 nt, synthetic construct
  misc_feature 1..20: note = antisense sequence
  source 1..20: mol_type = other RNA
gcagtttcgtcttgcatccc

SEQ ID NO: 171 - RNA, 20 nt, synthetic construct
  misc_feature 1..20: note = antisense sequence
  source 1..20: mol_type = other RNA
ggcagtttcgtcttgcatcc

SEQ ID NO: 172 - RNA, 20 nt, synthetic construct
  misc_feature 1..20: note = antisense sequence
  source 1..20: mol_type = other RNA
tggcagtttcgtcttgcatc

SEQ ID NO: 173 - RNA, 20 nt, synthetic construct
  misc_feature 1..20: note = antisense sequence
  source 1..20: mol_type = other RNA
gtggcagtttcgtcttgcat

SEQ ID NO: 174 - RNA, 20 nt, synthetic construct
  misc_feature 1..20: note = antisense sequence
  source 1..20: mol_type = other RNA
agtggcagtttcgtcttgca

SEQ ID NO: 175 - RNA, 20 nt, synthetic construct
  misc_feature 1..20: note = antisense sequence
  source 1..20: mol_type = other RNA
aagtggcagtttcgtcttgc

SEQ ID NO: 176 - RNA, 20 nt, synthetic construct
  misc_feature 1..20: note = antisense sequence
  source 1..20: mol_type = other RNA
acaagtggcagtttcgtctt

SEQ ID NO: 177 - RNA, 20 nt, synthetic construct
  misc_feature 1..20: note = antisense sequence
  source 1..20: mol_type = other RNA
aacaagtggcagtttcgtct

SEQ ID NO: 178 - RNA, 20 nt, synthetic construct
  misc_feature 1..20: note = antisense sequence
  source 1..20: mol_type = other RNA
gaacaagtggcagtttcgtc

SEQ ID NO: 179 - RNA, 20 nt, synthetic construct
  misc_feature 1..20: note = antisense sequence
  source 1..20: mol_type = other RNA
tggaacaagtggcagtttcg

SEQ ID NO: 180 - RNA, 20 nt, synthetic construct
  misc_feature 1..20: note = antisense sequence
  source 1..20: mol_type = other RNA
ttggaacaagtggcagtttc

SEQ ID NO: 181 - RNA, 20 nt, synthetic construct
  misc_feature 1..20: note = antisense sequence
  source 1..20: mol_type = other RNA
tttggaacaagtggcagttt

SEQ ID NO: 182 - RNA, 20 nt, synthetic construct
  misc_feature 1..20: note = antisense sequence
  source 1..20: mol_type = other RNA
ttttggaacaagtggcagtt

SEQ ID NO: 183 - RNA, 20 nt, synthetic construct
  misc_feature 1..20: note = antisense sequence
  source 1..20: mol_type = other RNA
cattttggaacaagtggcag

SEQ ID NO: 184 - RNA, 20 nt, synthetic construct
  misc_feature 1..20: note = antisense sequence
  source 1..20: mol_type = other RNA
tcattttggaacaagtggca

SEQ ID NO: 185 - RNA, 20 nt, synthetic construct
  misc_feature 1..20: note = antisense sequence
  source 1..20: mol_type = other RNA
ttgggtgctgacatagaaac

SEQ ID NO: 186 - RNA, 20 nt, synthetic construct
  misc_feature 1..20: note = antisense sequence
  source 1..20: mol_type = other RNA
cttgggtgctgacatagaaa

SEQ ID NO: 187 - RNA, 20 nt, synthetic construct
  misc_feature 1..20: note = antisense sequence
  source 1..20: mol_type = other RNA
tcttgggtgctgacatagaa

SEQ ID NO: 188 - RNA, 20 nt, synthetic construct
  misc_feature 1..20: note = antisense sequence
  source 1..20: mol_type = other RNA
cctcttgggtgctgacatag

SEQ ID NO: 189 - RNA, 20 nt, synthetic construct
  misc_feature 1..20: note = antisense sequence
  source 1..20: mol_type = other RNA
tcctcttgggtgctgacata

SEQ ID NO: 190 - RNA, 20 nt, synthetic construct
  misc_feature 1..20: note = antisense sequence
  source 1..20: mol_type = other RNA
ctcctcttgggtgctgacat

SEQ ID NO: 191 - RNA, 20 nt, synthetic construct
  misc_feature 1..20: note = antisense sequence
  source 1..20: mol_type = other RNA
tccctcctcttgggtgctga

SEQ ID NO: 192 - RNA, 20 nt, synthetic construct
  misc_feature 1..20: note = antisense sequence
  source 1..20: mol_type = other RNA
aatatccctcctcttgggtg

SEQ ID NO: 193 - RNA, 20 nt, synthetic construct
  misc_feature 1..20: note = antisense sequence
  source 1..20: mol_type = other RNA
caaaatatccctcctcttgg

SEQ ID NO: 194 - RNA, 20 nt, synthetic construct
  misc_feature 1..20: note = antisense sequence
  source 1..20: mol_type = other RNA
cgtttcaaaatatccctcct

SEQ ID NO: 195 - RNA, 20 nt, synthetic construct
  misc_feature 1..20: note = antisense sequence
  source 1..20: mol_type = other RNA
ccattcctttctacgtttca

SEQ ID NO: 196 - RNA, 20 nt, synthetic construct
  misc_feature 1..20: note = antisense sequence
  source 1..20: mol_type = other RNA
accattcctttctacgtttc

SEQ ID NO: 197 - RNA, 20 nt, synthetic construct
  misc_feature 1..20: note = antisense sequence
  source 1..20: mol_type = other RNA
caccattcctttctacgttt

SEQ ID NO: 198 - RNA, 20 nt, synthetic construct
  misc_feature 1..20: note = antisense sequence
  source 1..20: mol_type = other RNA
tcaccattcctttctacgtt

SEQ ID NO: 199 - RNA, 20 nt, synthetic construct
  misc_feature 1..20: note = antisense sequence
  source 1..20: mol_type = other RNA
ttcaccattcctttctacgt

SEQ ID NO: 200 - RNA, 20 nt, synthetic construct
  misc_feature 1..20: note = antisense sequence
  source 1..20: mol_type = other RNA
gttcaccattcctttctacg

SEQ ID NO: 201 - RNA, 20 nt, synthetic construct
  misc_feature 1..20: note = antisense sequence
  source 1..20: mol_type = other RNA
gactgccctgtgatatttac

SEQ ID NO: 202 - RNA, 20 nt, synthetic construct
  misc_feature 1..20: note = antisense sequence
  source 1..20: mol_type = other RNA
agactgccctgtgatattta

SEQ ID NO: 203 - RNA, 20 nt, synthetic construct
  misc_feature 1..20: note = antisense sequence
  source 1..20: mol_type = other RNA
aaagtagactgccctgtgat

SEQ ID NO: 204 - RNA, 20 nt, synthetic construct
  misc_feature 1..20: note = antisense sequence
  source 1..20: mol_type = other RNA
aaaagtagactgccctgtga

SEQ ID NO: 205 - RNA, 20 nt, synthetic construct
  misc_feature 1..20: note = antisense sequence
  source 1..20: mol_type = other RNA
atcttaaaagtagactgccc

SEQ ID NO: 206 - RNA, 20 nt, synthetic construct
  misc_feature 1..20: note = antisense sequence
  source 1..20: mol_type = other RNA
catcttaaaagtagactgcc

SEQ ID NO: 207 - RNA, 20 nt, synthetic construct
  misc_feature 1..20: note = antisense sequence
  source 1..20: mol_type = other RNA
gatctgaccatgagttcatt

SEQ ID NO: 208 - RNA, 20 nt, synthetic construct
  misc_feature 1..20: note = antisense sequence
  source 1..20: mol_type = other RNA
cccaatcagtaactggtaaa

SEQ ID NO: 209 - RNA, 20 nt, synthetic construct
  misc_feature 1..20: note = antisense sequence
  source 1..20: mol_type = other RNA
tcacacagagattctatcga

SEQ ID NO: 210 - RNA, 20 nt, synthetic construct
  misc_feature 1..20: note = antisense sequence
  source 1..20: mol_type = other RNA
ttcacacagagattctatcg

SEQ ID NO: 211 - RNA, 20 nt, synthetic construct
  misc_feature 1..20: note = antisense sequence
  source 1..20: mol_type = other RNA
aaggcaggtctaaactagct

SEQ ID NO: 212 - RNA, 20 nt, synthetic construct
  misc_feature 1..20: note = antisense sequence
  source 1..20: mol_type = other RNA
taaggcaggtctaaactagc

SEQ ID NO: 213 - RNA, 20 nt, synthetic construct
  misc_feature 1..20: note = antisense sequence
  source 1..20: mol_type = other RNA
tctaaggcaggtctaaacta

SEQ ID NO: 214 - RNA, 20 nt, synthetic construct
  misc_feature 1..20: note = antisense sequence
  source 1..20: mol_type = other RNA
atctaaggcaggtctaaact

SEQ ID NO: 215 - RNA, 20 nt, synthetic construct
  misc_feature 1..20: note = antisense sequence
  source 1..20: mol_type = other RNA
catctaaggcaggtctaaac

SEQ ID NO: 216 - RNA, 20 nt, synthetic construct
  misc_feature 1..20: note = antisense sequence
  source 1..20: mol_type = other RNA
ggccatctaaggcaggtcta

SEQ ID NO: 217 - RNA, 20 nt, synthetic construct
  misc_feature 1..20: note = antisense sequence
  source 1..20: mol_type = other RNA
ctgcttgctgataatcaact

SEQ ID NO: 218 - RNA, 20 nt, synthetic construct
  misc_feature 1..20: note = antisense sequence
  source 1..20: mol_type = other RNA
tctgcttgctgataatcaac

SEQ ID NO: 219 - RNA, 20 nt, synthetic construct
  misc_feature 1..20: note = antisense sequence
  source 1..20: mol_type = other RNA
gctctgcttgctgataatca

SEQ ID NO: 220 - RNA, 20 nt, synthetic construct
  misc_feature 1..20: note = antisense sequence
  source 1..20: mol_type = other RNA
agctctgcttgctgataatc

SEQ ID NO: 221 - RNA, 20 nt, synthetic construct
  misc_feature 1..20: note = antisense sequence
  source 1..20: mol_type = other RNA
ttacattacctcccttctga

SEQ ID NO: 222 - RNA, 20 nt, synthetic construct
  misc_feature 1..20: note = antisense sequence
  source 1..20: mol_type = other RNA
tttacattacctcccttctg

SEQ ID NO: 223 - RNA, 20 nt, synthetic construct
  misc_feature 1..20: note = antisense sequence
  source 1..20: mol_type = other RNA
ctctttacattacctccctt

SEQ ID NO: 224 - RNA, 20 nt, synthetic construct
  misc_feature 1..20: note = antisense sequence
  source 1..20: mol_type = other RNA
agtagtgggaaatgtttgga

SEQ ID NO: 225 - RNA, 20 nt, synthetic construct
  misc_feature 1..20: note = antisense sequence
  source 1..20: mol_type = other RNA
acatttcctgagtagtggga

SEQ ID NO: 226 - RNA, 20 nt, synthetic construct
  misc_feature 1..20: note = antisense sequence
  source 1..20: mol_type = other RNA
gacatttcctgagtagtggg

SEQ ID NO: 227 - RNA, 20 nt, synthetic construct
  misc_feature 1..20: note = antisense sequence
  source 1..20: mol_type = other RNA
tggacatttcctgagtagtg

SEQ ID NO: 228 - RNA, 20 nt, synthetic construct
  misc_feature 1..20: note = antisense sequence
  source 1..20: mol_type = other RNA
ttggacatttcctgagtagt

SEQ ID NO: 229 - RNA, 20 nt, synthetic construct
  misc_feature 1..20: note = antisense sequence
  source 1..20: mol_type = other RNA
attggacatttcctgagtag

SEQ ID NO: 230 - RNA, 20 nt, synthetic construct
  misc_feature 1..20: note = antisense sequence
  source 1..20: mol_type = other RNA
gctgttcagcagttaccact

SEQ ID NO: 231 - RNA, 20 nt, synthetic construct
  misc_feature 1..20: note = antisense sequence
  source 1..20: mol_type = other RNA
cggctataatgctgttcagc

SEQ ID NO: 232 - RNA, 20 nt, synthetic construct
  misc_feature 1..20: note = antisense sequence
  source 1..20: mol_type = other RNA
accggctataatgctgttca

SEQ ID NO: 233 - RNA, 20 nt, synthetic construct
  misc_feature 1..20: note = antisense sequence
  source 1..20: mol_type = other RNA
caccggctataatgctgttc

SEQ ID NO: 234 - RNA, 20 nt, synthetic construct
  misc_feature 1..20: note = antisense sequence
  source 1..20: mol_type = other RNA
tcaccggctataatgctgtt

SEQ ID NO: 235 - RNA, 20 nt, synthetic construct
  misc_feature 1..20: note = antisense sequence
  source 1..20: mol_type = other RNA
ctcaccggctataatgctgt

SEQ ID NO: 236 - RNA, 20 nt, synthetic construct
  misc_feature 1..20: note = antisense sequence
  source 1..20: mol_type = other RNA
actcaccggctataatgctg

SEQ ID NO: 237 - RNA, 20 nt, synthetic construct
  misc_feature 1..20: note = antisense sequence
  source 1..20: mol_type = other RNA
cactcaccggctataatgct

SEQ ID NO: 238 - RNA, 20 nt, synthetic construct
  misc_feature 1..20: note = antisense sequence
  source 1..20: mol_type = other RNA
ccactcaccggctataatgc

SEQ ID NO: 239 - RNA, 20 nt, synthetic construct
  misc_feature 1..20: note = antisense sequence
  source 1..20: mol_type = other RNA
accactcaccggctataatg

SEQ ID NO: 240 - RNA, 20 nt, synthetic construct
  misc_feature 1..20: note = antisense sequence
  source 1..20: mol_type = other RNA
aaccactcaccggctataat

SEQ ID NO: 241 - RNA, 20 nt, synthetic construct
  misc_feature 1..20: note = antisense sequence
  source 1..20: mol_type = other RNA
aaaccactcaccggctataa

SEQ ID NO: 242 - RNA, 20 nt, synthetic construct
  misc_feature 1..20: note = antisense sequence
  source 1..20: mol_type = other RNA
taaaccactcaccggctata

SEQ ID NO: 243 - RNA, 20 nt, synthetic construct
  misc_feature 1..20: note = antisense sequence
  source 1..20: mol_type = other RNA
ttaaaccactcaccggctat

SEQ ID NO: 244 - RNA, 20 nt, synthetic construct
  misc_feature 1..20: note = antisense sequence
  source 1..20: mol_type = other RNA
gttaaaccactcaccggcta

SEQ ID NO: 245 - RNA, 20 nt, synthetic construct
  misc_feature 1..20: note = antisense sequence
  source 1..20: mol_type = other RNA
agttaaaccactcaccggct

SEQ ID NO: 246 - RNA, 20 nt, synthetic construct
  misc_feature 1..20: note = antisense sequence
  source 1..20: mol_type = other RNA
aagttaaaccactcaccggc

SEQ ID NO: 247 - RNA, 20 nt, synthetic construct
  misc_feature 1..20: note = antisense sequence
  source 1..20: mol_type = other RNA
taagttaaaccactcaccgg

SEQ ID NO: 248 - RNA, 20 nt, synthetic construct
  misc_feature 1..20: note = antisense sequence
  source 1..20: mol_type = other RNA
gtaagttaaaccactcaccg

SEQ ID NO: 249 - RNA, 20 nt, synthetic construct
  misc_feature 1..20: note = antisense sequence
  source 1..20: mol_type = other RNA
ggtaagttaaaccactcacc

SEQ ID NO: 250 - RNA, 20 nt, synthetic construct
  misc_feature 1..20: note = antisense sequence
  source 1..20: mol_type = other RNA
agtagctggtaagttaaacc

SEQ ID NO: 251 - RNA, 20 nt, synthetic construct
  misc_feature 1..20: note = antisense sequence
  source 1..20: mol_type = other RNA
cagtagctggtaagttaaac

SEQ ID NO: 252 - RNA, 20 nt, synthetic construct
  misc_feature 1..20: note = antisense sequence
  source 1..20: mol_type = other RNA
agtggcagtagctggtaagt

SEQ ID NO: 253 - RNA, 20 nt, synthetic construct
  misc_feature 1..20: note = antisense sequence
  source 1..20: mol_type = other RNA
gtagtggcagtagctggtaa

SEQ ID NO: 254 - RNA, 20 nt, synthetic construct
  misc_feature 1..20: note = antisense sequence
  source 1..20: mol_type = other RNA
aagtagtggcagtagctggt

SEQ ID NO: 255 - RNA, 20 nt, synthetic construct
  misc_feature 1..20: note = antisense sequence
  source 1..20: mol_type = other RNA
aaaagtagtggcagtagctg

SEQ ID NO: 256 - RNA, 20 nt, synthetic construct
  misc_feature 1..20: note = antisense sequence
  source 1..20: mol_type = other RNA
ttggagaagaatcataggtc

SEQ ID NO: 257 - RNA, 20 nt, synthetic construct
  misc_feature 1..20: note = antisense sequence
  source 1..20: mol_type = other RNA
agttggagaagaatcatagg

SEQ ID NO: 258 - RNA, 20 nt, synthetic construct
  misc_feature 1..20: note = antisense sequence
  source 1..20: mol_type = other RNA
agagactgcttatttggtag

SEQ ID NO: 259 - RNA, 20 nt, synthetic construct
  misc_feature 1..20: note = antisense sequence
  source 1..20: mol_type = other RNA
acgcaaacctcatttcatca

SEQ ID NO: 260 - RNA, 20 nt, synthetic construct
  misc_feature 1..20: note = antisense sequence
  source 1..20: mol_type = other RNA
tacgcaaacctcatttcatc

SEQ ID NO: 261 - RNA, 20 nt, synthetic construct
  misc_feature 1..20: note = antisense sequence
  source 1..20: mol_type = other RNA
gatacgcaaacctcatttca

SEQ ID NO: 262 - RNA, 20 nt, synthetic construct
  misc_feature 1..20: note = antisense sequence
  source 1..20: mol_type = other RNA
ggatacgcaaacctcatttc

SEQ ID NO: 263 - RNA, 20 nt, synthetic construct
  misc_feature 1..20: note = antisense sequence
  source 1..20: mol_type = other RNA
aggatacgcaaacctcattt

SEQ ID NO: 264 - RNA, 20 nt, synthetic construct
  misc_feature 1..20: note = antisense sequence
  source 1..20: mol_type = other RNA
tttagaggatacgcaaacct

SEQ ID NO: 265 - RNA, 20 nt, synthetic construct
  misc_feature 1..20: note = antisense sequence
  source 1..20: mol_type = other RNA
ttttagaggatacgcaaacc

SEQ ID NO: 266 - RNA, 20 nt, synthetic construct
  misc_feature 1..20: note = antisense sequence
  source 1..20: mol_type = other RNA
cctggattcaccaatgtata

SEQ ID NO: 267 - RNA, 20 nt, synthetic construct
  misc_feature 1..20: note = antisense sequence
  source 1..20: mol_type = other RNA
tcctggattcaccaatgtat

SEQ ID NO: 268 - RNA, 20 nt, synthetic construct
  misc_feature 1..20: note = antisense sequence
  source 1..20: mol_type = other RNA
tcttcctggattcaccaatg

SEQ ID NO: 269 - RNA, 20 nt, synthetic construct
  misc_feature 1..20: note = antisense sequence
  source 1..20: mol_type = other RNA
gtctcttcctggattcacca

SEQ ID NO: 270 - RNA, 20 nt, synthetic construct
  misc_feature 1..20: note = antisense sequence
  source 1..20: mol_type = other RNA
taagtctcttcctggattca

SEQ ID NO: 271 - RNA, 20 nt, synthetic construct
  misc_feature 1..20: note = antisense sequence
  source 1..20: mol_type = other RNA
ttaagtctcttcctggattc

SEQ ID NO: 272 - RNA, 20 nt, synthetic construct
  misc_feature 1..20: note = antisense sequence
  source 1..20: mol_type = other RNA
gttgcgaaatgggcataaat

SEQ ID NO: 273 - RNA, 20 nt, synthetic construct
  misc_feature 1..20: note = antisense sequence
  source 1..20: mol_type = other RNA
tgttgcgaaatgggcataaa

SEQ ID NO: 274 - RNA, 20 nt, synthetic construct
  misc_feature 1..20: note = antisense sequence
  source 1..20: mol_type = other RNA
gtgttgcgaaatgggcataa

SEQ ID NO: 275 - RNA, 20 nt, synthetic construct
  misc_feature 1..20: note = antisense sequence
  source 1..20: mol_type = other RNA
tgtgttgcgaaatgggcata

SEQ ID NO: 276 - RNA, 20 nt, synthetic construct
  misc_feature 1..20: note = antisense sequence
  source 1..20: mol_type = other RNA
atgtgttgcgaaatgggcat

SEQ ID NO: 277 - RNA, 20 nt, synthetic construct
  misc_feature 1..20: note = antisense sequence
  source 1..20: mol_type = other RNA
catgtgttgcgaaatgggca

SEQ ID NO: 278 - RNA, 20 nt, synthetic construct
  misc_feature 1..20: note = antisense sequence
  source 1..20: mol_type = other RNA
tcatgtgttgcgaaatgggc

SEQ ID NO: 279 - RNA, 20 nt, synthetic construct
  misc_feature 1..20: note = antisense sequence
  source 1..20: mol_type = other RNA
ctcatgtgttgcgaaatggg

SEQ ID NO: 280 - RNA, 20 nt, synthetic construct
  misc_feature 1..20: note = antisense sequence
  source 1..20: mol_type = other RNA
cctcatgtgttgcgaaatgg

SEQ ID NO: 281 - RNA, 20 nt, synthetic construct
  misc_feature 1..20: note = antisense sequence
  source 1..20: mol_type = other RNA
ccctcatgtgttgcgaaatg

SEQ ID NO: 282 - RNA, 20 nt, synthetic construct
  misc_feature 1..20: note = antisense sequence
  source 1..20: mol_type = other RNA
tccctcatgtgttgcgaaat

SEQ ID NO: 283 - RNA, 20 nt, synthetic construct
  misc_feature 1..20: note = antisense sequence
  source 1..20: mol_type = other RNA
atccctcatgtgttgcgaaa

SEQ ID NO: 284 - RNA, 20 nt, synthetic construct
  misc_feature 1..20: note = antisense sequence
  source 1..20: mol_type = other RNA
gatccctcatgtgttgcgaa

SEQ ID NO: 285 - RNA, 20 nt, synthetic construct
  misc_feature 1..20: note = antisense sequence
  source 1..20: mol_type = other RNA
agatccctcatgtgttgcga

SEQ ID NO: 286 - RNA, 20 nt, synthetic construct
  misc_feature 1..20: note = antisense sequence
  source 1..20: mol_type = other RNA
cagatccctcatgtgttgcg

SEQ ID NO: 287 - RNA, 20 nt, synthetic construct
  misc_feature 1..20: note = antisense sequence
  source 1..20: mol_type = other RNA
tccaatttcagatccctcat

SEQ ID NO: 288 - RNA, 20 nt, synthetic construct
  misc_feature 1..20: note = antisense sequence
  source 1..20: mol_type = other RNA
gtccaatttcagatccctca

SEQ ID NO: 289 - RNA, 20 nt, synthetic construct
  misc_feature 1..20: note = antisense sequence
  source 1..20: mol_type = other RNA
agtccaatttcagatccctc

SEQ ID NO: 290 - RNA, 20 nt, synthetic construct
  misc_feature 1..20: note = antisense sequence
  source 1..20: mol_type = other RNA
cagtccaatttcagatccct

SEQ ID NO: 291 - RNA, 20 nt, synthetic construct
  misc_feature 1..20: note = antisense sequence
  source 1..20: mol_type = other RNA
aagcagtccaatttcagatc

SEQ ID NO: 292 - RNA, 20 nt, synthetic construct
  misc_feature 1..20: note = antisense sequence
  source 1..20: mol_type = other RNA
tgatgggaaagcagtccaat

SEQ ID NO: 293 - RNA, 20 nt, synthetic construct
  misc_feature 1..20: note = antisense sequence
  source 1..20: mol_type = other RNA
ctgatgggaaagcagtccaa

SEQ ID NO: 294 - RNA, 20 nt, synthetic construct
  misc_feature 1..20: note = antisense sequence
  source 1..20: mol_type = other RNA
ctaaagaagagcctacagaa

SEQ ID NO: 295 - RNA, 20 nt, synthetic construct
  misc_feature 1..20: note = antisense sequence
  source 1..20: mol_type = other RNA
gctaaagaagagcctacaga

SEQ ID NO: 296 - RNA, 20 nt, synthetic construct
  misc_feature 1..20: note = antisense sequence
  source 1..20: mol_type = other RNA
tgctaaagaagagcctacag

SEQ ID NO: 297 - RNA, 20 nt, synthetic construct
  misc_feature 1..20: note = antisense sequence
  source 1..20: mol_type = other RNA
gattgctaaagaagagccta

SEQ ID NO: 298 - RNA, 20 nt, synthetic construct
  misc_feature 1..20: note = antisense sequence
  source 1..20: mol_type = other RNA
agattgctaaagaagagcct

SEQ ID NO: 299 - RNA, 20 nt, synthetic construct
  misc_feature 1..20: note = antisense sequence
  source 1..20: mol_type = other RNA
gactctgaattgatgagaag

SEQ ID NO: 300 - RNA, 20 nt, synthetic construct
  misc_feature 1..20: note = antisense sequence
  source 1..20: mol_type = other RNA
cggactctgaattgatgaga

SEQ ID NO: 301 - RNA, 20 nt, synthetic construct
  misc_feature 1..20: note = antisense sequence
  source 1..20: mol_type = other RNA
acggactctgaattgatgag

SEQ ID NO: 302 - RNA, 20 nt, synthetic construct
  misc_feature 1..20: note = antisense sequence
  source 1..20: mol_type = other RNA
aacggactctgaattgatga

SEQ ID NO: 303 - RNA, 20 nt, synthetic construct
  misc_feature 1..20: note = antisense sequence
  source 1..20: mol_type = other RNA
aaacggactctgaattgatg

SEQ ID NO: 304 - RNA, 20 nt, synthetic construct
  misc_feature 1..20: note = antisense sequence
  source 1..20: mol_type = other RNA
caaacggactctgaattgat

SEQ ID NO: 305 - RNA, 20 nt, synthetic construct
  misc_feature 1..20: note = antisense sequence
  source 1..20: mol_type = other RNA
acaaacggactctgaattga

SEQ ID NO: 306 - RNA, 20 nt, synthetic construct
  misc_feature 1..20: note = antisense sequence
  source 1..20: mol_type = other RNA
tacaaacggactctgaattg

SEQ ID NO: 307 - RNA, 20 nt, synthetic construct
  misc_feature 1..20: note = antisense sequence
  source 1..20: mol_type = other RNA
gttacaaacggactctgaat

SEQ ID NO: 308 - RNA, 20 nt, synthetic construct
  misc_feature 1..20: note = antisense sequence
  source 1..20: mol_type = other RNA
ggttacaaacggactctgaa

SEQ ID NO: 309 - RNA, 20 nt, synthetic construct
  misc_feature 1..20: note = antisense sequence
  source 1..20: mol_type = other RNA
ccaggttacaaacggactct

SEQ ID NO: 310 - RNA, 20 nt, synthetic construct
  misc_feature 1..20: note = antisense sequence
  source 1..20: mol_type = other RNA
cagtagtgtgcatggataag

SEQ ID NO: 311 - RNA, 20 nt, synthetic construct
  misc_feature 1..20: note = antisense sequence
  source 1..20: mol_type = other RNA
gctctacagtagtgtgcatg

SEQ ID NO: 312 - RNA, 20 nt, synthetic construct
  misc_feature 1..20: note = antisense sequence
  source 1..20: mol_type = other RNA
agctctacagtagtgtgcat

SEQ ID NO: 313 - RNA, 20 nt, synthetic construct
  misc_feature 1..20: note = antisense sequence
  source 1..20: mol_type = other RNA
taagctctacagtagtgtgc

SEQ ID NO: 314 - RNA, 20 nt, synthetic construct
  misc_feature 1..20: note = antisense sequence
  source 1..20: mol_type = other RNA
ataagctctacagtagtgtg

SEQ ID NO: 315 - RNA, 20 nt, synthetic construct
  misc_feature 1..20: note = antisense sequence
  source 1..20: mol_type = other RNA
gataagctctacagtagtgt

SEQ ID NO: 316 - RNA, 20 nt, synthetic construct
  misc_feature 1..20: note = antisense sequence
  source 1..20: mol_type = other RNA
agataagctctacagtagtg

SEQ ID NO: 317 - RNA, 20 nt, synthetic construct
  misc_feature 1..20: note = antisense sequence
  source 1..20: mol_type = other RNA
cagaaagataagctctacag

SEQ ID NO: 318 - RNA, 20 nt, synthetic construct
  misc_feature 1..20: note = antisense sequence
  source 1..20: mol_type = other RNA
gacagaaagataagctctac

SEQ ID NO: 319 - RNA, 20 nt, synthetic construct
  misc_feature 1..20: note = antisense sequence
  source 1..20: mol_type = other RNA
tggaagttgggttcaaattg

SEQ ID NO: 320 - RNA, 20 nt, synthetic construct
  misc_feature 1..20: note = antisense sequence
  source 1..20: mol_type = other RNA
gactggaagttgggttcaaa

SEQ ID NO: 321 - RNA, 20 nt, synthetic construct
  misc_feature 1..20: note = antisense sequence
  source 1..20: mol_type = other RNA
agactggaagttgggttcaa

SEQ ID NO: 322 - RNA, 20 nt, synthetic construct
  misc_feature 1..20: note = antisense sequence
  source 1..20: mol_type = other RNA
gtagactggaagttgggttc

SEQ ID NO: 323 - RNA, 20 nt, synthetic construct
  misc_feature 1..20: note = antisense sequence
  source 1..20: mol_type = other RNA
ggtagactggaagttgggtt

SEQ ID NO: 324 - RNA, 20 nt, synthetic construct
  misc_feature 1..20: note = antisense sequence
  source 1..20: mol_type = other RNA
gggtagactggaagttgggt

SEQ ID NO: 325 - RNA, 20 nt, synthetic construct
  misc_feature 1..20: note = antisense sequence
  source 1..20: mol_type = other RNA
agggtagactggaagttggg

SEQ ID NO: 326 - RNA, 20 nt, synthetic construct
  misc_feature 1..20: note = antisense sequence
  source 1..20: mol_type = other RNA
aggagggtagactggaagtt

SEQ ID NO: 327 - RNA, 20 nt, synthetic construct
  misc_feature 1..20: note = antisense sequence
  source 1..20: mol_type = other RNA
taggagggtagactggaagt

SEQ ID NO: 328 - RNA, 20 nt, synthetic construct
  misc_feature 1..20: note = antisense sequence
  source 1..20: mol_type = other RNA
ttaggagggtagactggaag

SEQ ID NO: 329 - RNA, 20 nt, synthetic construct
  misc_feature 1..20: note = antisense sequence
  source 1..20: mol_type = other RNA
tattaggagggtagactgga

SEQ ID NO: 330 - RNA, 20 nt, synthetic construct
  misc_feature 1..20: note = antisense sequence
  source 1..20: mol_type = other RNA
tgtattaggagggtagactg

SEQ ID NO: 331 - RNA, 20 nt, synthetic construct
  misc_feature 1..20: note = antisense sequence
  source 1..20: mol_type = other RNA
atgtattaggagggtagact

SEQ ID NO: 332 - RNA, 20 nt, synthetic construct
  misc_feature 1..20: note = antisense sequence
  source 1..20: mol_type = other RNA
gatgtattaggagggtagac

SEQ ID NO: 333 - RNA, 20 nt, synthetic construct
  misc_feature 1..20: note = antisense sequence
  source 1..20: mol_type = other RNA
tgatgtattaggagggtaga

SEQ ID NO: 334 - RNA, 20 nt, synthetic construct
  misc_feature 1..20: note = antisense sequence
  source 1..20: mol_type = other RNA
aaggcaacaaagaaccacca

SEQ ID NO: 335 - RNA, 20 nt, synthetic construct
  misc_feature 1..20: note = antisense sequence
  source 1..20: mol_type = other RNA
tagggcagtcagttgagaat

SEQ ID NO: 336 - RNA, 20 nt, synthetic construct
  misc_feature 1..20: note = antisense sequence
  source 1..20: mol_type = other RNA
ggattagggcagtcagttga

SEQ ID NO: 337 - RNA, 20 nt, synthetic construct
  misc_feature 1..20: note = antisense sequence
  source 1..20: mol_type = other RNA
tggattagggcagtcagttg

SEQ ID NO: 338 - RNA, 20 nt, synthetic construct
  misc_feature 1..20: note = antisense sequence
  source 1..20: mol_type = other RNA
ttggattagggcagtcagtt

SEQ ID NO: 339 - RNA, 20 nt, synthetic construct
  misc_feature 1..20: note = antisense sequence
  source 1..20: mol_type = other RNA
gttggattagggcagtcagt

SEQ ID NO: 340 - RNA, 20 nt, synthetic construct
  misc_feature 1..20: note = antisense sequence
  source 1..20: mol_type = other RNA
tgttggattagggcagtcag

SEQ ID NO: 341 - RNA, 20 nt, synthetic construct
  misc_feature 1..20: note = antisense sequence
  source 1..20: mol_type = other RNA
gtgttggattagggcagtca

SEQ ID NO: 342 - RNA, 20 nt, synthetic construct
  misc_feature 1..20: note = antisense sequence
  source 1..20: mol_type = other RNA
ggtgttggattagggcagtc

SEQ ID NO: 343 - RNA, 20 nt, synthetic construct
  misc_feature 1..20: note = antisense sequence
  source 1..20: mol_type = other RNA
agggtgttggattagggcag

SEQ ID NO: 344 - RNA, 20 nt, synthetic construct
  misc_feature 1..20: note = antisense sequence
  source 1..20: mol_type = other RNA
gagggtgttggattagggca

SEQ ID NO: 345 - RNA, 20 nt, synthetic construct
  misc_feature 1..20: note = antisense sequence
  source 1..20: mol_type = other RNA
gagagggtgttggattaggg

SEQ ID NO: 346 - RNA, 20 nt, synthetic construct
  misc_feature 1..20: note = antisense sequence
  source 1..20: mol_type = other RNA
agagagggtgttggattagg

SEQ ID NO: 347 - RNA, 20 nt, synthetic construct
  misc_feature 1..20: note = antisense sequence
  source 1..20: mol_type = other RNA
acataggagtagtaggagat

SEQ ID NO: 348 - RNA, 20 nt, synthetic construct
  misc_feature 1..20: note = antisense sequence
  source 1..20: mol_type = other RNA
ctgacataggagtagtagga

SEQ ID NO: 349 - RNA, 20 nt, synthetic construct
  misc_feature 1..20: note = antisense sequence
  source 1..20: mol_type = other RNA
aactgacataggagtagtag

SEQ ID NO: 350 - RNA, 20 nt, synthetic construct
  misc_feature 1..20: note = antisense sequence
  source 1..20: mol_type = other RNA
gaaactgacataggagtagt

SEQ ID NO: 351 - RNA, 20 nt, synthetic construct
  misc_feature 1..20: note = antisense sequence
  source 1..20: mol_type = other RNA
agtgatacttctgacctaca

SEQ ID NO: 352 - RNA, 20 nt, synthetic construct
  misc_feature 1..20: note = antisense sequence
  source 1..20: mol_type = other RNA
cagtgatacttctgacctac

SEQ ID NO: 353 - RNA, 20 nt, synthetic construct
  misc_feature 1..20: note = antisense sequence
  source 1..20: mol_type = other RNA
ccagtgatacttctgaccta

SEQ ID NO: 354 - RNA, 20 nt, synthetic construct
  misc_feature 1..20: note = antisense sequence
  source 1..20: mol_type = other RNA
cccagtgatacttctgacct

SEQ ID NO: 355 - RNA, 20 nt, synthetic construct
  misc_feature 1..20: note = antisense sequence
  source 1..20: mol_type = other RNA
gcccagtgatacttctgacc

SEQ ID NO: 356 - RNA, 20 nt, synthetic construct
  misc_feature 1..20: note = antisense sequence
  source 1..20: mol_type = other RNA
agcccagtgatacttctgac

SEQ ID NO: 357 - RNA, 20 nt, synthetic construct
  misc_feature 1..20: note = antisense sequence
  source 1..20: mol_type = other RNA
tagcccagtgatacttctga

SEQ ID NO: 358 - RNA, 20 nt, synthetic construct
  misc_feature 1..20: note = antisense sequence
  source 1..20: mol_type = other RNA
ctagcccagtgatacttctg

SEQ ID NO: 359 - RNA, 20 nt, synthetic construct
  misc_feature 1..20: note = antisense sequence
  source 1..20: mol_type = other RNA
tctagcccagtgatacttct

SEQ ID NO: 360 - RNA, 20 nt, synthetic construct
  misc_feature 1..20: note = antisense sequence
  source 1..20: mol_type = other RNA
attctagcccagtgatactt

SEQ ID NO: 361 - RNA, 20 nt, synthetic construct
  misc_feature 1..20: note = antisense sequence
  source 1..20: mol_type = other RNA
tgattctagcccagtgatac

SEQ ID NO: 362 - RNA, 20 nt, synthetic construct
  misc_feature 1..20: note = antisense sequence
  source 1..20: mol_type = other RNA
ttgattctagcccagtgata

SEQ ID NO: 363 - RNA, 20 nt, synthetic construct
  misc_feature 1..20: note = antisense sequence
  source 1..20: mol_type = other RNA
acatcttgattctagcccag

SEQ ID NO: 364 - RNA, 20 nt, synthetic construct
  misc_feature 1..20: note = antisense sequence
  source 1..20: mol_type = other RNA
gtgacatcttgattctagcc

SEQ ID NO: 365 - RNA, 20 nt, synthetic construct
  misc_feature 1..20: note = antisense sequence
  source 1..20: mol_type = other RNA
ggtgacatcttgattctagc

SEQ ID NO: 366 - RNA, 20 nt, synthetic construct
  misc_feature 1..20: note = antisense sequence
  source 1..20: mol_type = other RNA
ccctggtgacatcttgattc

SEQ ID NO: 367 - RNA, 20 nt, synthetic construct
  misc_feature 1..20: note = antisense sequence
  source 1..20: mol_type = other RNA
ggctggtgaaaacagggaaa

SEQ ID NO: 368 - RNA, 20 nt, synthetic construct
  misc_feature 1..20: note = antisense sequence
  source 1..20: mol_type = other RNA
acaggccaagaatgcaggtg

SEQ ID NO: 369 - RNA, 20 nt, synthetic construct
  misc_feature 1..20: note = antisense sequence
  source 1..20: mol_type = other RNA
cacaggccaagaatgcaggt

SEQ ID NO: 370 - RNA, 20 nt, synthetic construct
  misc_feature 1..20: note = antisense sequence
  source 1..20: mol_type = other RNA
tgtgatgataaagcagagtc

SEQ ID NO: 371 - RNA, 20 nt, synthetic construct
  misc_feature 1..20: note = antisense sequence
  source 1..20: mol_type = other RNA
ggagatgtgatgataaagca

SEQ ID NO: 372 - RNA, 20 nt, synthetic construct
  misc_feature 1..20: note = antisense sequence
  source 1..20: mol_type = other RNA
ggtagtagggtcagagtctg

SEQ ID NO: 373 - RNA, 20 nt, synthetic construct
  misc_feature 1..20: note = antisense sequence
  source 1..20: mol_type = other RNA
aggtagtagggtcagagtct

SEQ ID NO: 374 - RNA, 20 nt, synthetic construct
  misc_feature 1..20: note = antisense sequence
  source 1..20: mol_type = other RNA
aaggtagtagggtcagagtc

SEQ ID NO: 375 - RNA, 20 nt, synthetic construct
  misc_feature 1..20: note = antisense sequence
  source 1..20: mol_type = other RNA
gaaggtagtagggtcagagt

SEQ ID NO: 376 - RNA, 20 nt, synthetic construct
  misc_feature 1..20: note = antisense sequence
  source 1..20: mol_type = other RNA
ggaaggtagtagggtcagag

SEQ ID NO: 377 - RNA, 20 nt, synthetic construct
  misc_feature 1..20: note = antisense sequence
  source 1..20: mol_type = other RNA
ctggtaggcacattgtaatt

SEQ ID NO: 378 - RNA, 20 nt, synthetic construct
  misc_feature 1..20: note = antisense sequence
  source 1..20: mol_type = other RNA
tctggtaggcacattgtaat

SEQ ID NO: 379 - RNA, 20 nt, synthetic construct
  misc_feature 1..20: note = antisense sequence
  source 1..20: mol_type = other RNA
ttctggtaggcacattgtaa

SEQ ID NO: 380 - RNA, 20 nt, synthetic construct
  misc_feature 1..20: note = antisense sequence
  source 1..20: mol_type = other RNA
gattattctggtaggcacat

SEQ ID NO: 381 - RNA, 20 nt, synthetic construct
  misc_feature 1..20: note = antisense sequence
  source 1..20: mol_type = other RNA
agattattctggtaggcaca

SEQ ID NO: 382 - RNA, 20 nt, synthetic construct
  misc_feature 1..20: note = antisense sequence
  source 1..20: mol_type = other RNA
agggacttggaagatgtaat

SEQ ID NO: 383 - RNA, 20 nt, synthetic construct
  misc_feature 1..20: note = antisense sequence
  source 1..20: mol_type = other RNA
catgacctaatgcctggaac

SEQ ID NO: 384 - RNA, 20 nt, synthetic construct
  misc_feature 1..20: note = antisense sequence
  source 1..20: mol_type = other RNA
ccatgacctaatgcctggaa

SEQ ID NO: 385 - RNA, 20 nt, synthetic construct
  misc_feature 1..20: note = antisense sequence
  source 1..20: mol_type = other RNA
atccatgacctaatgcctgg

SEQ ID NO: 386 - RNA, 20 nt, synthetic construct
  misc_feature 1..20: note = antisense sequence
  source 1..20: mol_type = other RNA
tatccatgacctaatgcctg

SEQ ID NO: 387 - RNA, 20 nt, synthetic construct
  misc_feature 1..20: note = antisense sequence
  source 1..20: mol_type = other RNA
atatccatgacctaatgcct

SEQ ID NO: 388 - RNA, 20 nt, synthetic construct
  misc_feature 1..20: note = antisense sequence
  source 1..20: mol_type = other RNA
atgggttgtggtaggcagaa

SEQ ID NO: 389 - RNA, 20 nt, synthetic construct
  misc_feature 1..20: note = antisense sequence
  source 1..20: mol_type = other RNA
tatgcttatgggttgtggta

SEQ ID NO: 390 - RNA, 20 nt, synthetic construct
  misc_feature 1..20: note = antisense sequence
  source 1..20: mol_type = other RNA
ttatgcttatgggttgtggt

SEQ ID NO: 391 - RNA, 20 nt, synthetic construct
  misc_feature 1..20: note = antisense sequence
  source 1..20: mol_type = other RNA
tttatgcttatgggttgtgg

SEQ ID NO: 392 - RNA, 20 nt, synthetic construct
  misc_feature 1..20: note = antisense sequence
  source 1..20: mol_type = other RNA
gtttatgcttatgggttgtg

SEQ ID NO: 393 - RNA, 20 nt, synthetic construct
  misc_feature 1..20: note = antisense sequence
  source 1..20: mol_type = other RNA
gacagtttatgcttatgggt

SEQ ID NO: 394 - RNA, 20 nt, synthetic construct
  misc_feature 1..20: note = antisense sequence
  source 1..20: mol_type = other RNA
ggacagtttatgcttatggg

SEQ ID NO: 395 - RNA, 20 nt, synthetic construct
  misc_feature 1..20: note = antisense sequence
  source 1..20: mol_type = other RNA
gattggctataatggacagt

SEQ ID NO: 396 - RNA, 20 nt, synthetic construct
  misc_feature 1..20: note = antisense sequence
  source 1..20: mol_type = other RNA
tgattggctataatggacag

SEQ ID NO: 397 - RNA, 20 nt, synthetic construct
  misc_feature 1..20: note = antisense sequence
  source 1..20: mol_type = other RNA
gtgattggctataatggaca

SEQ ID NO: 398 - RNA, 20 nt, synthetic construct
  misc_feature 1..20: note = antisense sequence
  source 1..20: mol_type = other RNA
ggtcatatcttcagtggcaa

SEQ ID NO: 399 - RNA, 20 nt, synthetic construct
  misc_feature 1..20: note = antisense sequence
  source 1..20: mol_type = other RNA
aggtcatatcttcagtggca

SEQ ID NO: 400 - RNA, 20 nt, synthetic construct
  misc_feature 1..20: note = antisense sequence
  source 1..20: mol_type = other RNA
aaggtcatatcttcagtggc

SEQ ID NO: 401 - RNA, 20 nt, synthetic construct
  misc_feature 1..20: note = antisense sequence
  source 1..20: mol_type = other RNA
ggtaggatggaaaggtggaa

SEQ ID NO: 402 - RNA, 20 nt, synthetic construct
  misc_feature 1..20: note = antisense sequence
  source 1..20: mol_type = other RNA
atgtcagagggtggtaggat

SEQ ID NO: 403 - RNA, 20 nt, synthetic construct
  misc_feature 1..20: note = antisense sequence
  source 1..20: mol_type = other RNA
ttagatgtcagagggtggta

SEQ ID NO: 404 - RNA, 20 nt, synthetic construct
  misc_feature 1..20: note = antisense sequence
  source 1..20: mol_type = other RNA
tttagatgtcagagggtggt

SEQ ID NO: 405 - RNA, 20 nt, synthetic construct
  misc_feature 1..20: note = antisense sequence
  source 1..20: mol_type = other RNA
tatttagatgtcagagggtg

SEQ ID NO: 406 - RNA, 20 nt, synthetic construct
  misc_feature 1..20: note = antisense sequence
  source 1..20: mol_type = other RNA
gaaggctgtagagagtttat

SEQ ID NO: 407 - RNA, 20 nt, synthetic construct
  misc_feature 1..20: note = antisense sequence
  source 1..20: mol_type = other RNA
ggaaggctgtagagagttta

SEQ ID NO: 408 - RNA, 20 nt, synthetic construct
  misc_feature 1..20: note = antisense sequence
  source 1..20: mol_type = other RNA
tggaaggctgtagagagttt

SEQ ID NO: 409 - RNA, 20 nt, synthetic construct
  misc_feature 1..20: note = antisense sequence
  source 1..20: mol_type = other RNA
ttggaaggctgtagagagtt

SEQ ID NO: 410 - RNA, 20 nt, synthetic construct
  misc_feature 1..20: note = antisense sequence
  source 1..20: mol_type = other RNA
gtttggaaggctgtagagag

SEQ ID NO: 411 - RNA, 20 nt, synthetic construct
  misc_feature 1..20: note = antisense sequence
  source 1..20: mol_type = other RNA
agtttggaaggctgtagaga

SEQ ID NO: 412 - RNA, 20 nt, synthetic construct
  misc_feature 1..20: note = antisense sequence
  source 1..20: mol_type = other RNA
acccagtttggaaggctgta

SEQ ID NO: 413 - RNA, 20 nt, synthetic construct
  misc_feature 1..20: note = antisense sequence
  source 1..20: mol_type = other RNA
aacccagtttggaaggctgt

SEQ ID NO: 414 - RNA, 20 nt, synthetic construct
  misc_feature 1..20: note = antisense sequence
  source 1..20: mol_type = other RNA
gttctgatgtaaacccagtt

SEQ ID NO: 415 - RNA, 20 nt, synthetic construct
  misc_feature 1..20: note = antisense sequence
  source 1..20: mol_type = other RNA
gttgttctgatgtaaaccca

SEQ ID NO: 416 - RNA, 20 nt, synthetic construct
  misc_feature 1..20: note = antisense sequence
  source 1..20: mol_type = other RNA
tggcttgttgttctgatgta

SEQ ID NO: 417 - RNA, 20 nt, synthetic construct
  misc_feature 1..20: note = antisense sequence
  source 1..20: mol_type = other RNA
ggtggcttgttgttctgatg

SEQ ID NO: 418 - RNA, 20 nt, synthetic construct
  misc_feature 1..20: note = antisense sequence
  source 1..20: mol_type = other RNA
tggtggcttgttgttctgat

SEQ ID NO: 419 - RNA, 20 nt, synthetic construct
  misc_feature 1..20: note = antisense sequence
  source 1..20: mol_type = other RNA
ctggtggcttgttgttctga

SEQ ID NO: 420 - RNA, 20 nt, synthetic construct
  misc_feature 1..20: note = antisense sequence
  source 1..20: mol_type = other RNA
tgctggtggcttgttgttct

SEQ ID NO: 421 - RNA, 20 nt, synthetic construct
  misc_feature 1..20: note = antisense sequence
  source 1..20: mol_type = other RNA
attgggatgctggtggcttg

SEQ ID NO: 422 - RNA, 20 nt, synthetic construct
  misc_feature 1..20: note = antisense sequence
  source 1..20: mol_type = other RNA
tattgggatgctggtggctt

SEQ ID NO: 423 - RNA, 20 nt, synthetic construct
  misc_feature 1..20: note = antisense sequence
  source 1..20: mol_type = other RNA
agtttattgggatgctggtg

SEQ ID NO: 424 - RNA, 20 nt, synthetic construct
  misc_feature 1..20: note = antisense sequence
  source 1..20: mol_type = other RNA
aagtttattgggatgctggt

SEQ ID NO: 425 - RNA, 20 nt, synthetic construct
  misc_feature 1..20: note = antisense sequence
  source 1..20: mol_type = other RNA
gaagtttattgggatgctgg

SEQ ID NO: 426 - RNA, 20 nt, synthetic construct
  misc_feature 1..20: note = antisense sequence
  source 1..20: mol_type = other RNA
ggaagtttattgggatgctg

SEQ ID NO: 427 - RNA, 20 nt, synthetic construct
  misc_feature 1..20: note = antisense sequence
  source 1..20: mol_type = other RNA
taggaagtttattgggatgc

SEQ ID NO: 428 - RNA, 20 nt, synthetic construct
  misc_feature 1..20: note = antisense sequence
  source 1..20: mol_type = other RNA
ctttggacataaggacatct

SEQ ID NO: 429 - RNA, 20 nt, synthetic construct
  misc_feature 1..20: note = antisense sequence
  source 1..20: mol_type = other RNA
gctgagactttgacatacat

SEQ ID NO: 430 - RNA, 20 nt, synthetic construct
  misc_feature 1..20: note = antisense sequence
  source 1..20: mol_type = other RNA
tgctgagactttgacataca

SEQ ID NO: 431 - RNA, 20 nt, synthetic construct
  misc_feature 1..20: note = antisense sequence
  source 1..20: mol_type = other RNA
atgctgagactttgacatac

SEQ ID NO: 432 - RNA, 20 nt, synthetic construct
  misc_feature 1..20: note = antisense sequence
  source 1..20: mol_type = other RNA
tgtgacatcagtttatgctg

SEQ ID NO: 433 - RNA, 20 nt, synthetic construct
  misc_feature 1..20: note = antisense sequence
  source 1..20: mol_type = other RNA
ttttccctactgttgcttgc

SEQ ID NO: 434 - RNA, 20 nt, synthetic construct
  misc_feature 1..20: note = antisense sequence
  source 1..20: mol_type = other RNA
ttcttctcaccttgcttcag

SEQ ID NO: 435 - RNA, 20 nt, synthetic construct
  misc_feature 1..20: note = antisense sequence
  source 1..20: mol_type = other RNA
aaactaacactgccacctcc

SEQ ID NO: 436 - RNA, 20 nt, synthetic construct
  misc_feature 1..20: note = antisense sequence
  source 1..20: mol_type = other RNA
caaactaacactgccacctc

SEQ ID NO: 437 - RNA, 20 nt, synthetic construct
  misc_feature 1..20: note = antisense sequence
  source 1..20: mol_type = other RNA
ctcccataactagagttcat

SEQ ID NO: 438 - RNA, 20 nt, synthetic construct
  misc_feature 1..20: note = antisense sequence
  source 1..20: mol_type = other RNA
cctcccataactagagttca

SEQ ID NO: 439 - RNA, 20 nt, synthetic construct
  misc_feature 1..20: note = antisense sequence
  source 1..20: mol_type = other RNA
ccctcccataactagagttc

SEQ ID NO: 440 - RNA, 20 nt, synthetic construct
  misc_feature 1..20: note = antisense sequence
  source 1..20: mol_type = other RNA
ccaccctcccataactagag

SEQ ID NO: 441 - RNA, 20 nt, synthetic construct
  misc_feature 1..20: note = antisense sequence
  source 1..20: mol_type = other RNA
ggccaccctcccataactag

SEQ ID NO: 442 - RNA, 20 nt, synthetic construct
  misc_feature 1..20: note = antisense sequence
  source 1..20: mol_type = other RNA
acaactccagtctaatggcc

SEQ ID NO: 443 - RNA, 20 nt, synthetic construct
  misc_feature 1..20: note = antisense sequence
  source 1..20: mol_type = other RNA
accacaactccagtctaatg

SEQ ID NO: 444 - RNA, 20 nt, synthetic construct
  misc_feature 1..20: note = antisense sequence
  source 1..20: mol_type = other RNA
tcactagctgcattcctttt

SEQ ID NO: 445 - RNA, 20 nt, synthetic construct
  misc_feature 1..20: note = antisense sequence
  source 1..20: mol_type = other RNA
ttgtcactagctgcattcct

SEQ ID NO: 446 - RNA, 20 nt, synthetic construct
  misc_feature 1..20: note = antisense sequence
  source 1..20: mol_type = other RNA
ttttgtcactagctgcattc

SEQ ID NO: 447 - RNA, 20 nt, synthetic construct
  misc_feature 1..20: note = antisense sequence
  source 1..20: mol_type = other RNA
ggaggaaaggaggtatattt

SEQ ID NO: 448 - RNA, 20 nt, synthetic construct
  misc_feature 1..20: note = antisense sequence
  source 1..20: mol_type = other RNA
caagacatcagagggtggga

SEQ ID NO: 449 - RNA, 20 nt, synthetic construct
  misc_feature 1..20: note = antisense sequence
  source 1..20: mol_type = other RNA
agcaagacatcagagggtgg

SEQ ID NO: 450 - RNA, 20 nt, synthetic construct
  misc_feature 1..20: note = antisense sequence
  source 1..20: mol_type = other RNA
gagcaagacatcagagggtg

SEQ ID NO: 451 - RNA, 20 nt, synthetic construct
  misc_feature 1..20: note = antisense sequence
  source 1..20: mol_type = other RNA
gggaaggctgagcaagacat

SEQ ID NO: 452 - RNA, 20 nt, synthetic construct
  misc_feature 1..20: note = antisense sequence
  source 1..20: mol_type = other RNA
tgggaaggctgagcaagaca

SEQ ID NO: 453 - RNA, 20 nt, synthetic construct
  misc_feature 1..20: note = antisense sequence
  source 1..20: mol_type = other RNA
aatgggaaggctgagcaaga

SEQ ID NO: 454 - RNA, 20 nt, synthetic construct
  misc_feature 1..20: note = antisense sequence
  source 1..20: mol_type = other RNA
caatgggaaggctgagcaag

SEQ ID NO: 455 - RNA, 20 nt, synthetic construct
  misc_feature 1..20: note = antisense sequence
  source 1..20: mol_type = other RNA
ccaatgggaaggctgagcaa

SEQ ID NO: 456 - RNA, 20 nt, synthetic construct
  misc_feature 1..20: note = antisense sequence
  source 1..20: mol_type = other RNA
gccaatgggaaggctgagca

SEQ ID NO: 457 - RNA, 20 nt, synthetic construct
  misc_feature 1..20: note = antisense sequence
  source 1..20: mol_type = other RNA
gttattgattgtcttgccct

SEQ ID NO: 458 - RNA, 20 nt, synthetic construct
  misc_feature 1..20: note = antisense sequence
  source 1..20: mol_type = other RNA
ctgttattgattgtcttgcc

SEQ ID NO: 459 - RNA, 20 nt, synthetic construct
  misc_feature 1..20: note = antisense sequence
  source 1..20: mol_type = other RNA
atctgtgactgcttgtgatc

SEQ ID NO: 460 - RNA, 20 nt, synthetic construct
  misc_feature 1..20: note = antisense sequence
  source 1..20: mol_type = other RNA
aatctgtgactgcttgtgat

SEQ ID NO: 461 - RNA, 20 nt, synthetic construct
  misc_feature 1..20: note = antisense sequence
  source 1..20: mol_type = other RNA
aaatctgtgactgcttgtga

SEQ ID NO: 462 - RNA, 20 nt, synthetic construct
  misc_feature 1..20: note = antisense sequence
  source 1..20: mol_type = other RNA
agaaatctgtgactgcttgt

SEQ ID NO: 463 - RNA, 20 nt, synthetic construct
  misc_feature 1..20: note = antisense sequence
  source 1..20: mol_type = other RNA
acaagctgagggagtgaaaa

SEQ ID NO: 464 - RNA, 20 nt, synthetic construct
  misc_feature 1..20: note = antisense sequence
  source 1..20: mol_type = other RNA
caacaagctgagggagtgaa

SEQ ID NO: 465 - RNA, 20 nt, synthetic construct
  misc_feature 1..20: note = antisense sequence
  source 1..20: mol_type = other RNA
tcaacaagctgagggagtga

SEQ ID NO: 466 - RNA, 20 nt, synthetic construct
  misc_feature 1..20: note = antisense sequence
  source 1..20: mol_type = other RNA
atcaacaagctgagggagtg

SEQ ID NO: 467 - RNA, 20 nt, synthetic construct
  misc_feature 1..20: note = antisense sequence
  source 1..20: mol_type = other RNA
aatcaacaagctgagggagt

SEQ ID NO: 468 - RNA, 20 nt, synthetic construct
  misc_feature 1..20: note = antisense sequence
  source 1..20: mol_type = other RNA
ctaatcaacaagctgaggga

SEQ ID NO: 469 - RNA, 20 nt, synthetic construct
  misc_feature 1..20: note = antisense sequence
  source 1..20: mol_type = other RNA
aggctaatcaacaagctgag

SEQ ID NO: 470 - RNA, 20 nt, synthetic construct
  misc_feature 1..20: note = antisense sequence
  source 1..20: mol_type = other RNA
aaggctaatcaacaagctga

SEQ ID NO: 471 - RNA, 20 nt, synthetic construct
  misc_feature 1..20: note = antisense sequence
  source 1..20: mol_type = other RNA
caaggctaatcaacaagctg

SEQ ID NO: 472 - RNA, 20 nt, synthetic construct
  misc_feature 1..20: note = antisense sequence
  source 1..20: mol_type = other RNA
tcaaggctaatcaacaagct

SEQ ID NO: 473 - RNA, 20 nt, synthetic construct
  misc_feature 1..20: note = antisense sequence
  source 1..20: mol_type = other RNA
ggtcagagatatgaattgag

SEQ ID NO: 474 - RNA, 20 nt, synthetic construct
  misc_feature 1..20: note = antisense sequence
  source 1..20: mol_type = other RNA
taggcagccaatatagcata

SEQ ID NO: 475 - RNA, 20 nt, synthetic construct
  misc_feature 1..20: note = antisense sequence
  source 1..20: mol_type = other RNA
ttaggcagccaatatagcat

SEQ ID NO: 476 - RNA, 20 nt, synthetic construct
  misc_feature 1..20: note = antisense sequence
  source 1..20: mol_type = other RNA
tttaggcagccaatatagca

SEQ ID NO: 477 - RNA, 20 nt, synthetic construct
  misc_feature 1..20: note = antisense sequence
  source 1..20: mol_type = other RNA
ctttaggcagccaatatagc

SEQ ID NO: 478 - RNA, 20 nt, synthetic construct
  misc_feature 1..20: note = antisense sequence
  source 1..20: mol_type = other RNA
tctttaggcagccaatatag

SEQ ID NO: 479 - RNA, 20 nt, synthetic construct
  misc_feature 1..20: note = antisense sequence
  source 1..20: mol_type = other RNA
aacttatctttaggcagcca

SEQ ID NO: 480 - RNA, 20 nt, synthetic construct
  misc_feature 1..20: note = antisense sequence
  source 1..20: mol_type = other RNA
gaacttatctttaggcagcc

SEQ ID NO: 481 - RNA, 20 nt, synthetic construct
  misc_feature 1..20: note = antisense sequence
  source 1..20: mol_type = other RNA
tgaacttatctttaggcagc

SEQ ID NO: 482 - RNA, 20 nt, synthetic construct
  misc_feature 1..20: note = antisense sequence
  source 1..20: mol_type = other RNA
catttagaggagtgagcaag

SEQ ID NO: 483 - RNA, 20 nt, synthetic construct
  misc_feature 1..20: note = antisense sequence
  source 1..20: mol_type = other RNA
acatttagaggagtgagcaa

SEQ ID NO: 484 - RNA, 20 nt, synthetic construct
  misc_feature 1..20: note = antisense sequence
  source 1..20: mol_type = other RNA
ggatttcacatttagaggag

SEQ ID NO: 485 - RNA, 20 nt, synthetic construct
  misc_feature 1..20: note = antisense sequence
  source 1..20: mol_type = other RNA
ccaaaatgtttctagggaag

SEQ ID NO: 486 - RNA, 20 nt, synthetic construct
  misc_feature 1..20: note = antisense sequence
  source 1..20: mol_type = other RNA
taggccaaccaaaatgtttc

SEQ ID NO: 487 - RNA, 20 nt, synthetic construct
  misc_feature 1..20: note = antisense sequence
  source 1..20: mol_type = other RNA
ctaggccaaccaaaatgttt

SEQ ID NO: 488 - RNA, 20 nt, synthetic construct
  misc_feature 1..20: note = antisense sequence
  source 1..20: mol_type = other RNA
tctaggccaaccaaaatgtt

SEQ ID NO: 489 - RNA, 20 nt, synthetic construct
  misc_feature 1..20: note = antisense sequence
  source 1..20: mol_type = other RNA
ttctaggccaaccaaaatgt

SEQ ID NO: 490 - RNA, 20 nt, synthetic construct
  misc_feature 1..20: note = antisense sequence
  source 1..20: mol_type = other RNA
cttctaggccaaccaaaatg

SEQ ID NO: 491 - RNA, 20 nt, synthetic construct
  misc_feature 1..20: note = antisense sequence
  source 1..20: mol_type = other RNA
gcttctaggccaaccaaaat

SEQ ID NO: 492 - RNA, 20 nt, synthetic construct
  misc_feature 1..20: note = antisense sequence
  source 1..20: mol_type = other RNA
tgcttctaggccaaccaaaa

SEQ ID NO: 493 - RNA, 20 nt, synthetic construct
  misc_feature 1..20: note = antisense sequence
  source 1..20: mol_type = other RNA
ttgcttctaggccaaccaaa

SEQ ID NO: 494 - RNA, 20 nt, synthetic construct
  misc_feature 1..20: note = antisense sequence
  source 1..20: mol_type = other RNA
cttgcttctaggccaaccaa

SEQ ID NO: 495 - RNA, 20 nt, synthetic construct
  misc_feature 1..20: note = antisense sequence
  source 1..20: mol_type = other RNA
ccttgcttctaggccaacca

SEQ ID NO: 496 - RNA, 20 nt, synthetic construct
  misc_feature 1..20: note = antisense sequence
  source 1..20: mol_type = other RNA
cccttgcttctaggccaacc

SEQ ID NO: 497 - RNA, 20 nt, synthetic construct
  misc_feature 1..20: note = antisense sequence
  source 1..20: mol_type = other RNA
acccttgcttctaggccaac

SEQ ID NO: 498 - RNA, 20 nt, synthetic construct
  misc_feature 1..20: note = antisense sequence
  source 1..20: mol_type = other RNA
gacccttgcttctaggccaa

SEQ ID NO: 499 - RNA, 20 nt, synthetic construct
  misc_feature 1..20: note = antisense sequence
  source 1..20: mol_type = other RNA
agacccttgcttctaggcca

SEQ ID NO: 500 - RNA, 20 nt, synthetic construct
  misc_feature 1..20: note = antisense sequence
  source 1..20: mol_type = other RNA
cctgtgaaaagaagaccctt

SEQ ID NO: 501 - RNA, 20 nt, synthetic construct
  misc_feature 1..20: note = antisense sequence
  source 1..20: mol_type = other RNA
gcctgtgaaaagaagaccct

SEQ ID NO: 502 - RNA, 20 nt, synthetic construct
  misc_feature 1..20: note = antisense sequence
  source 1..20: mol_type = other RNA
tgcctgtgaaaagaagaccc

SEQ ID NO: 503 - RNA, 20 nt, synthetic construct
  misc_feature 1..20: note = antisense sequence
  source 1..20: mol_type = other RNA
ttgcctgtgaaaagaagacc

SEQ ID NO: 504 - RNA, 20 nt, synthetic construct
  misc_feature 1..20: note = antisense sequence
  source 1..20: mol_type = other RNA
ggaaatcttgcctgtgaaaa

SEQ ID NO: 505 - RNA, 20 nt, synthetic construct
  misc_feature 1..20: note = antisense sequence
  source 1..20: mol_type = other RNA
taggaaatcttgcctgtgaa

SEQ ID NO: 506 - RNA, 20 nt, synthetic construct
  misc_feature 1..20: note = antisense sequence
  source 1..20: mol_type = other RNA
ataggaaatcttgcctgtga

SEQ ID NO: 507 - RNA, 20 nt, synthetic construct
  misc_feature 1..20: note = antisense sequence
  source 1..20: mol_type = other RNA
aataggaaatcttgcctgtg

SEQ ID NO: 508 - RNA, 20 nt, synthetic construct
  misc_feature 1..20: note = antisense sequence
  source 1..20: mol_type = other RNA
gaataggaaatcttgcctgt

SEQ ID NO: 509 - RNA, 20 nt, synthetic construct
  misc_feature 1..20: note = antisense sequence
  source 1..20: mol_type = other RNA
tgaataggaaatcttgcctg

SEQ ID NO: 510 - RNA, 20 nt, synthetic construct
  misc_feature 1..20: note = antisense sequence
  source 1..20: mol_type = other RNA
atctcctcactggatttcat

SEQ ID NO: 511 - RNA, 20 nt, synthetic construct
  misc_feature 1..20: note = antisense sequence
  source 1..20: mol_type = other RNA
catctcctcactggatttca

SEQ ID NO: 512 - RNA, 20 nt, synthetic construct
  misc_feature 1..20: note = antisense sequence
  source 1..20: mol_type = other RNA
ccatctcctcactggatttc

SEQ ID NO: 513 - RNA, 20 nt, synthetic construct
  misc_feature 1..20: note = antisense sequence
  source 1..20: mol_type = other RNA
cattgggagtcattctttgt

SEQ ID NO: 514 - RNA, 20 nt, synthetic construct
  misc_feature 1..20: note = antisense sequence
  source 1..20: mol_type = other RNA
gccattgggagtcattcttt

SEQ ID NO: 515 - RNA, 20 nt, synthetic construct
  misc_feature 1..20: note = antisense sequence
  source 1..20: mol_type = other RNA
tgccattgggagtcattctt

SEQ ID NO: 516 - RNA, 20 nt, synthetic construct
  misc_feature 1..20: note = antisense sequence
  source 1..20: mol_type = other RNA
ctgccattgggagtcattct

SEQ ID NO: 517 - RNA, 20 nt, synthetic construct
  misc_feature 1..20: note = antisense sequence
  source 1..20: mol_type = other RNA
tctgccattgggagtcattc

SEQ ID NO: 518 - RNA, 20 nt, synthetic construct
  misc_feature 1..20: note = antisense sequence
  source 1..20: mol_type = other RNA
gtctgccattgggagtcatt

SEQ ID NO: 519 - RNA, 20 nt, synthetic construct
  misc_feature 1..20: note = antisense sequence
  source 1..20: mol_type = other RNA
ttgtctgccattgggagtca

SEQ ID NO: 520 - RNA, 20 nt, synthetic construct
  misc_feature 1..20: note = antisense sequence
  source 1..20: mol_type = other RNA
attgtctgccattgggagtc

SEQ ID NO: 521 - RNA, 20 nt, synthetic construct
  misc_feature 1..20: note = antisense sequence
  source 1..20: mol_type = other RNA
cattgtctgccattgggagt

SEQ ID NO: 522 - RNA, 20 nt, synthetic construct
  misc_feature 1..20: note = antisense sequence
  source 1..20: mol_type = other RNA
acattgtctgccattgggag

SEQ ID NO: 523 - RNA, 20 nt, synthetic construct
  misc_feature 1..20: note = antisense sequence
  source 1..20: mol_type = other RNA
tacattgtctgccattggga

SEQ ID NO: 524 - RNA, 20 nt, synthetic construct
  misc_feature 1..20: note = antisense sequence
  source 1..20: mol_type = other RNA
atacattgtctgccattggg

SEQ ID NO: 525 - RNA, 20 nt, synthetic construct
  misc_feature 1..20: note = antisense sequence
  source 1..20: mol_type = other RNA
aatacattgtctgccattgg

SEQ ID NO: 526 - RNA, 20 nt, synthetic construct
  misc_feature 1..20: note = antisense sequence
  source 1..20: mol_type = other RNA
cagcaattcctgacaataca

SEQ ID NO: 527 - RNA, 20 nt, synthetic construct
  misc_feature 1..20: note = antisense sequence
  source 1..20: mol_type = other RNA
ctgcctttacaaacatcaca

SEQ ID NO: 528 - RNA, 20 nt, synthetic construct
  misc_feature 1..20: note = antisense sequence
  source 1..20: mol_type = other RNA
gctgcctttacaaacatcac

SEQ ID NO: 529 - RNA, 20 nt, synthetic construct
  misc_feature 1..20: note = antisense sequence
  source 1..20: mol_type = other RNA
tgctgcctttacaaacatca

SEQ ID NO: 530 - RNA, 20 nt, synthetic construct
  misc_feature 1..20: note = antisense sequence
  source 1..20: mol_type = other RNA
ttgctgcctttacaaacatc

SEQ ID NO: 531 - RNA, 20 nt, synthetic construct
  misc_feature 1..20: note = antisense sequence
  source 1..20: mol_type = other RNA
tcattgctgcctttacaaac

SEQ ID NO: 532 - RNA, 20 nt, synthetic construct
  misc_feature 1..20: note = antisense sequence
  source 1..20: mol_type = other RNA
ctcatggttactctcattgc

SEQ ID NO: 533 - RNA, 20 nt, synthetic construct
  misc_feature 1..20: note = antisense sequence
  source 1..20: mol_type = other RNA
tctcatggttactctcattg

SEQ ID NO: 534 - RNA, 20 nt, synthetic construct
  misc_feature 1..20: note = antisense sequence
  source 1..20: mol_type = other RNA
gtctcatggttactctcatt

SEQ ID NO: 535 - RNA, 20 nt, synthetic construct
  misc_feature 1..20: note = antisense sequence
  source 1..20: mol_type = other RNA
tgtctcatggttactctcat

SEQ ID NO: 536 - RNA, 20 nt, synthetic construct
  misc_feature 1..20: note = antisense sequence
  source 1..20: mol_type = other RNA
gtgtctcatggttactctca

SEQ ID NO: 537 - RNA, 20 nt, synthetic construct
  misc_feature 1..20: note = antisense sequence
  source 1..20: mol_type = other RNA
tgtgtctcatggttactctc

SEQ ID NO: 538 - RNA, 20 nt, synthetic construct
  misc_feature 1..20: note = antisense sequence
  source 1..20: mol_type = other RNA
tatgtgtctcatggttactc

SEQ ID NO: 539 - RNA, 20 nt, synthetic construct
  misc_feature 1..20: note = antisense sequence
  source 1..20: mol_type = other RNA
caaaatagctgggtaagtgt

SEQ ID NO: 540 - RNA, 20 nt, synthetic construct
  misc_feature 1..20: note = antisense sequence
  source 1..20: mol_type = other RNA
tcaaaatagctgggtaagtg

SEQ ID NO: 541 - RNA, 20 nt, synthetic construct
  misc_feature 1..20: note = antisense sequence
  source 1..20: mol_type = other RNA
gcttcaaaatagctgggtaa

SEQ ID NO: 542 - RNA, 20 nt, synthetic construct
  misc_feature 1..20: note = antisense sequence
  source 1..20: mol_type = other RNA
tgcttcaaaatagctgggta

SEQ ID NO: 543 - RNA, 20 nt, synthetic construct
  misc_feature 1..20: note = antisense sequence
  source 1..20: mol_type = other RNA
atgcttcaaaatagctgggt

SEQ ID NO: 544 - RNA, 20 nt, synthetic construct
  misc_feature 1..20: note = antisense sequence
  source 1..20: mol_type = other RNA
catgcttcaaaatagctggg

SEQ ID NO: 545 - RNA, 20 nt, synthetic construct
  misc_feature 1..20: note = antisense sequence
  source 1..20: mol_type = other RNA
ctcatgcttcaaaatagctg

SEQ ID NO: 546 - RNA, 20 nt, synthetic construct
  misc_feature 1..20: note = antisense sequence
  source 1..20: mol_type = other RNA
gctcatgcttcaaaatagct

SEQ ID NO: 547 - RNA, 20 nt, synthetic construct
  misc_feature 1..20: note = antisense sequence
  source 1..20: mol_type = other RNA
ataagctgtggcccaagagc

SEQ ID NO: 548 - RNA, 20 nt, synthetic construct
  misc_feature 1..20: note = antisense sequence
  source 1..20: mol_type = other RNA
gataagctgtggcccaagag

SEQ ID NO: 549 - RNA, 20 nt, synthetic construct
  misc_feature 1..20: note = antisense sequence
  source 1..20: mol_type = other RNA
agtgataagctgtggcccaa

SEQ ID NO: 550 - RNA, 20 nt, synthetic construct
  misc_feature 1..20: note = antisense sequence
  source 1..20: mol_type = other RNA
atcagtgataagctgtggcc

SEQ ID NO: 551 - RNA, 20 nt, synthetic construct
  misc_feature 1..20: note = antisense sequence
  source 1..20: mol_type = other RNA
catcagtgataagctgtggc

SEQ ID NO: 552 - RNA, 20 nt, synthetic construct
  misc_feature 1..20: note = antisense sequence
  source 1..20: mol_type = other RNA
aacatcagtgataagctgtg

SEQ ID NO: 553 - RNA, 20 nt, synthetic construct
  misc_feature 1..20: note = antisense sequence
  source 1..20: mol_type = other RNA
gaacatcagtgataagctgt

SEQ ID NO: 554 - RNA, 20 nt, synthetic construct
  misc_feature 1..20: note = antisense sequence
  source 1..20: mol_type = other RNA
gaagtcagaacatcagtgat

SEQ ID NO: 555 - RNA, 20 nt, synthetic construct
  misc_feature 1..20: note = antisense sequence
  source 1..20: mol_type = other RNA
tttattgggttggaagtgga

SEQ ID NO: 556 - RNA, 20 nt, synthetic construct
  misc_feature 1..20: note = antisense sequence
  source 1..20: mol_type = other RNA
gtttattgggttggaagtgg

SEQ ID NO: 557 - RNA, 20 nt, synthetic construct
  misc_feature 1..20: note = antisense sequence
  source 1..20: mol_type = other RNA
agtttattgggttggaagtg

SEQ ID NO: 558 - RNA, 20 nt, synthetic construct
  misc_feature 1..20: note = antisense sequence
  source 1..20: mol_type = other RNA
ggaagtttattgggttggaa

SEQ ID NO: 559 - RNA, 20 nt, synthetic construct
  misc_feature 1..20: note = antisense sequence
  source 1..20: mol_type = other RNA
gggaagtttattgggttgga

SEQ ID NO: 560 - RNA, 20 nt, synthetic construct
  misc_feature 1..20: note = antisense sequence
  source 1..20: mol_type = other RNA
tgggaagtttattgggttgg

SEQ ID NO: 561 - RNA, 20 nt, synthetic construct
  misc_feature 1..20: note = antisense sequence
  source 1..20: mol_type = other RNA
gtgggaagtttattgggttg

SEQ ID NO: 562 - RNA, 20 nt, synthetic construct
  misc_feature 1..20: note = antisense sequence
  source 1..20: mol_type = other RNA
agtgggaagtttattgggtt

SEQ ID NO: 563 - RNA, 20 nt, synthetic construct
  misc_feature 1..20: note = antisense sequence
  source 1..20: mol_type = other RNA
tagtgggaagtttattgggt

SEQ ID NO: 564 - RNA, 20 nt, synthetic construct
  misc_feature 1..20: note = antisense sequence
  source 1..20: mol_type = other RNA
gttctaaatctagtgggaag

SEQ ID NO: 565 - RNA, 20 nt, synthetic construct
  misc_feature 1..20: note = antisense sequence
  source 1..20: mol_type = other RNA
caagttctaaatctagtggg

SEQ ID NO: 566 - RNA, 20 nt, synthetic construct
  misc_feature 1..20: note = antisense sequence
  source 1..20: mol_type = other RNA
gcaagttctaaatctagtgg

SEQ ID NO: 567 - RNA, 20 nt, synthetic construct
  misc_feature 1..20: note = antisense sequence
  source 1..20: mol_type = other RNA
aacagaagagaagtgtaggt

SEQ ID NO: 568 - RNA, 20 nt, synthetic construct
  misc_feature 1..20: note = antisense sequence
  source 1..20: mol_type = other RNA
tcacacaacagaagagaagt

SEQ ID NO: 569 - RNA, 20 nt, synthetic construct
  misc_feature 1..20: note = antisense sequence
  source 1..20: mol_type = other RNA
gactttagcactgtggcaac

SEQ ID NO: 570 - RNA, 20 nt, synthetic construct
  misc_feature 1..20: note = antisense sequence
  source 1..20: mol_type = other RNA
ctgactttagcactgtggca

SEQ ID NO: 571 - RNA, 20 nt, synthetic construct
  misc_feature 1..20: note = antisense sequence
  source 1..20: mol_type = other RNA
tctgactttagcactgtggc

SEQ ID NO: 572 - RNA, 20 nt, synthetic construct
  misc_feature 1..20: note = antisense sequence
  source 1..20: mol_type = other RNA
ttctgactttagcactgtgg

SEQ ID NO: 573 - RNA, 20 nt, synthetic construct
  misc_feature 1..20: note = antisense sequence
  source 1..20: mol_type = other RNA
attctgactttagcactgtg

SEQ ID NO: 574 - RNA, 20 nt, synthetic construct
  misc_feature 1..20: note = antisense sequence
  source 1..20: mol_type = other RNA
tgctctgaataggcaatcta

SEQ ID NO: 575 - RNA, 20 nt, synthetic construct
  misc_feature 1..20: note = antisense sequence
  source 1..20: mol_type = other RNA
ctgctctgaataggcaatct

SEQ ID NO: 576 - RNA, 20 nt, synthetic construct
  misc_feature 1..20: note = antisense sequence
  source 1..20: mol_type = other RNA
actgctctgaataggcaatc

SEQ ID NO: 577 - RNA, 20 nt, synthetic construct
  misc_feature 1..20: note = antisense sequence
  source 1..20: mol_type = other RNA
gactgctctgaataggcaat

SEQ ID NO: 578 - RNA, 20 nt, synthetic construct
  misc_feature 1..20: note = antisense sequence
  source 1..20: mol_type = other RNA
atacaattctccagtcacag

SEQ ID NO: 579 - RNA, 20 nt, synthetic construct
  misc_feature 1..20: note = antisense sequence
  source 1..20: mol_type = other RNA
ctttgagggcgaatacaatt

SEQ ID NO: 580 - RNA, 20 nt, synthetic construct
  misc_feature 1..20: note = antisense sequence
  source 1..20: mol_type = other RNA
gctttgagggcgaatacaat

SEQ ID NO: 581 - RNA, 20 nt, synthetic construct
  misc_feature 1..20: note = antisense sequence
  source 1..20: mol_type = other RNA
tgctttgagggcgaatacaa

SEQ ID NO: 582 - RNA, 20 nt, synthetic construct
  misc_feature 1..20: note = antisense sequence
  source 1..20: mol_type = other RNA
ttgctttgagggcgaataca

SEQ ID NO: 583 - RNA, 20 nt, synthetic construct
  misc_feature 1..20: note = antisense sequence
  source 1..20: mol_type = other RNA
cttgctttgagggcgaatac

SEQ ID NO: 584 - RNA, 20 nt, synthetic construct
  misc_feature 1..20: note = antisense sequence
  source 1..20: mol_type = other RNA
acttgctttgagggcgaata

SEQ ID NO: 585 - RNA, 20 nt, synthetic construct
  misc_feature 1..20: note = antisense sequence
  source 1..20: mol_type = other RNA
tacttgctttgagggcgaat

SEQ ID NO: 586 - RNA, 20 nt, synthetic construct
  misc_feature 1..20: note = antisense sequence
  source 1..20: mol_type = other RNA
gtacttgctttgagggcgaa

SEQ ID NO: 587 - RNA, 20 nt, synthetic construct
  misc_feature 1..20: note = antisense sequence
  source 1..20: mol_type = other RNA
tgtacttgctttgagggcga

SEQ ID NO: 588 - RNA, 20 nt, synthetic construct
  misc_feature 1..20: note = antisense sequence
  source 1..20: mol_type = other RNA
ctgtacttgctttgagggcg

SEQ ID NO: 589 - RNA, 20 nt, synthetic construct
  misc_feature 1..20: note = antisense sequence
  source 1..20: mol_type = other RNA
actgtacttgctttgagggc

SEQ ID NO: 590 - RNA, 20 nt, synthetic construct
  misc_feature 1..20: note = antisense sequence
  source 1..20: mol_type = other RNA
ctactgtacttgctttgagg

SEQ ID NO: 591 - RNA, 20 nt, synthetic construct
  misc_feature 1..20: note = antisense sequence
  source 1..20: mol_type = other RNA
tctactgtacttgctttgag

SEQ ID NO: 592 - RNA, 20 nt, synthetic construct
  misc_feature 1..20: note = antisense sequence
  source 1..20: mol_type = other RNA
ctctactgtacttgctttga

SEQ ID NO: 593 - RNA, 20 nt, synthetic construct
  misc_feature 1..20: note = antisense sequence
  source 1..20: mol_type = other RNA
gatactctactgtacttgct

SEQ ID NO: 594 - RNA, 20 nt, synthetic construct
  misc_feature 1..20: note = antisense sequence
  source 1..20: mol_type = other RNA
tgatactctactgtacttgc

SEQ ID NO: 595 - RNA, 20 nt, synthetic construct
  misc_feature 1..20: note = antisense sequence
  source 1..20: mol_type = other RNA
ctcttgatactctactgtac

SEQ ID NO: 596 - RNA, 20 nt, synthetic construct
  misc_feature 1..20: note = antisense sequence
  source 1..20: mol_type = other RNA
catctcttgatactctactg

SEQ ID NO: 597 - RNA, 20 nt, synthetic construct
  misc_feature 1..20: note = antisense sequence
  source 1..20: mol_type = other RNA
gcatctcttgatactctact

SEQ ID NO: 598 - RNA, 20 nt, synthetic construct
  misc_feature 1..20: note = antisense sequence
  source 1..20: mol_type = other RNA
tgcatctcttgatactctac

SEQ ID NO: 599 - RNA, 20 nt, synthetic construct
  misc_feature 1..20: note = antisense sequence
  source 1..20: mol_type = other RNA
cagtcatttgcatctcttga

SEQ ID NO: 600 - RNA, 20 nt, synthetic construct
  misc_feature 1..20: note = antisense sequence
  source 1..20: mol_type = other RNA
ggcataataaaggagctgaa

SEQ ID NO: 601 - RNA, 20 nt, synthetic construct
  misc_feature 1..20: note = antisense sequence
  source 1..20: mol_type = other RNA
tggcataataaaggagctga

SEQ ID NO: 602 - RNA, 20 nt, synthetic construct
  misc_feature 1..20: note = antisense sequence
  source 1..20: mol_type = other RNA
gctggcataataaaggagct

SEQ ID NO: 603 - RNA, 20 nt, synthetic construct
  misc_feature 1..20: note = antisense sequence
  source 1..20: mol_type = other RNA
agctggcataataaaggagc

SEQ ID NO: 604 - RNA, 20 nt, synthetic construct
  misc_feature 1..20: note = antisense sequence
  source 1..20: mol_type = other RNA
gtagctggcataataaagga

SEQ ID NO: 605 - RNA, 20 nt, synthetic construct
  misc_feature 1..20: note = antisense sequence
  source 1..20: mol_type = other RNA
actttagagtagctggcata

SEQ ID NO: 606 - RNA, 20 nt, synthetic construct
  misc_feature 1..20: note = antisense sequence
  source 1..20: mol_type = other RNA
gactttagagtagctggcat

SEQ ID NO: 607 - RNA, 20 nt, synthetic construct
  misc_feature 1..20: note = antisense sequence
  source 1..20: mol_type = other RNA
agactttagagtagctggca

SEQ ID NO: 608 - RNA, 20 nt, synthetic construct
  misc_feature 1..20: note = antisense sequence
  source 1..20: mol_type = other RNA
aggagactttagagtagctg

SEQ ID NO: 609 - RNA, 20 nt, synthetic construct
  misc_feature 1..20: note = antisense sequence
  source 1..20: mol_type = other RNA
cccaaggagactttagagta

SEQ ID NO: 610 - RNA, 20 nt, synthetic construct
  misc_feature 1..20: note = antisense sequence
  source 1..20: mol_type = other RNA
gggagtaactacttatgcaa

SEQ ID NO: 611 - RNA, 20 nt, synthetic construct
  misc_feature 1..20: note = antisense sequence
  source 1..20: mol_type = other RNA
gtgggagtaactacttatgc

SEQ ID NO: 612 - RNA, 20 nt, synthetic construct
  misc_feature 1..20: note = antisense sequence
  source 1..20: mol_type = other RNA
agtgggagtaactacttatg

SEQ ID NO: 613 - RNA, 20 nt, synthetic construct
  misc_feature 1..20: note = antisense sequence
  source 1..20: mol_type = other RNA
cagtgggagtaactacttat

SEQ ID NO: 614 - RNA, 20 nt, synthetic construct
  misc_feature 1..20: note = antisense sequence
  source 1..20: mol_type = other RNA
gcagtgggagtaactactta

SEQ ID NO: 615 - RNA, 20 nt, synthetic construct
  misc_feature 1..20: note = antisense sequence
  source 1..20: mol_type = other RNA
agcagtgggagtaactactt

SEQ ID NO: 616 - RNA, 20 nt, synthetic construct
  misc_feature 1..20: note = antisense sequence
  source 1..20: mol_type = other RNA
tagcagtgggagtaactact

SEQ ID NO: 617 - RNA, 20 nt, synthetic construct
  misc_feature 1..20: note = antisense sequence
  source 1..20: mol_type = other RNA
agtagcagtgggagtaacta

SEQ ID NO: 618 - RNA, 20 nt, synthetic construct
  misc_feature 1..20: note = antisense sequence
  source 1..20: mol_type = other RNA
cagtagcagtgggagtaact

SEQ ID NO: 619 - RNA, 20 nt, synthetic construct
  misc_feature 1..20: note = antisense sequence
  source 1..20: mol_type = other RNA
atcagtagcagtgggagtaa

SEQ ID NO: 620 - RNA, 20 nt, synthetic construct
  misc_feature 1..20: note = antisense sequence
  source 1..20: mol_type = other RNA
gatcagtagcagtgggagta

SEQ ID NO: 621 - RNA, 20 nt, synthetic construct
  misc_feature 1..20: note = antisense sequence
  source 1..20: mol_type = other RNA
agatcagtagcagtgggagt

SEQ ID NO: 622 - RNA, 20 nt, synthetic construct
  misc_feature 1..20: note = antisense sequence
  source 1..20: mol_type = other RNA
gattgagatcagtagcagtg

SEQ ID NO: 623 - RNA, 20 nt, synthetic construct
  misc_feature 1..20: note = antisense sequence
  source 1..20: mol_type = other RNA
ggattgagatcagtagcagt

SEQ ID NO: 624 - RNA, 20 nt, synthetic construct
  misc_feature 1..20: note = antisense sequence
  source 1..20: mol_type = other RNA
gggattgagatcagtagcag

SEQ ID NO: 625 - RNA, 20 nt, synthetic construct
  misc_feature 1..20: note = antisense sequence
  source 1..20: mol_type = other RNA
agggattgagatcagtagca

SEQ ID NO: 626 - RNA, 20 nt, synthetic construct
  misc_feature 1..20: note = antisense sequence
  source 1..20: mol_type = other RNA
cagggattgagatcagtagc

SEQ ID NO: 627 - RNA, 20 nt, synthetic construct
  misc_feature 1..20: note = antisense sequence
  source 1..20: mol_type = other RNA
tcagggattgagatcagtag

SEQ ID NO: 628 - RNA, 20 nt, synthetic construct
  misc_feature 1..20: note = antisense sequence
  source 1..20: mol_type = other RNA
ttcagggattgagatcagta

SEQ ID NO: 629 - RNA, 20 nt, synthetic construct
  misc_feature 1..20: note = antisense sequence
  source 1..20: mol_type = other RNA
attcagggattgagatcagt

SEQ ID NO: 630 - RNA, 20 nt, synthetic construct
  misc_feature 1..20: note = antisense sequence
  source 1..20: mol_type = other RNA
cgtttattcagggattgaga

SEQ ID NO: 631 - RNA, 20 nt, synthetic construct
  misc_feature 1..20: note = antisense sequence
  source 1..20: mol_type = other RNA
acgtttattcagggattgag

SEQ ID NO: 632 - RNA, 20 nt, synthetic construct
  misc_feature 1..20: note = antisense sequence
  source 1..20: mol_type = other RNA
gacgtttattcagggattga

SEQ ID NO: 633 - RNA, 20 nt, synthetic construct
  misc_feature 1..20: note = antisense sequence
  source 1..20: mol_type = other RNA
tgacgtttattcagggattg

SEQ ID NO: 634 - RNA, 20 nt, synthetic construct
  misc_feature 1..20: note = antisense sequence
  source 1..20: mol_type = other RNA
gaaatgacgtttattcaggg

SEQ ID NO: 635 - RNA, 20 nt, synthetic construct
  misc_feature 1..20: note = antisense sequence
  source 1..20: mol_type = other RNA
ggaaatgacgtttattcagg

SEQ ID NO: 636 - RNA, 20 nt, synthetic construct
  misc_feature 1..20: note = antisense sequence
  source 1..20: mol_type = other RNA
gtatctcttggaaatgacgt

SEQ ID NO: 637 - RNA, 20 nt, synthetic construct
  misc_feature 1..20: note = antisense sequence
  source 1..20: mol_type = other RNA
ggtatctcttggaaatgacg

SEQ ID NO: 638 - RNA, 20 nt, synthetic construct
  misc_feature 1..20: note = antisense sequence
  source 1..20: mol_type = other RNA
gggtatctcttggaaatgac

SEQ ID NO: 639 - RNA, 20 nt, synthetic construct
  misc_feature 1..20: note = antisense sequence
  source 1..20: mol_type = other RNA
cagggtatctcttggaaatg

SEQ ID NO: 640 - RNA, 20 nt, synthetic construct
  misc_feature 1..20: note = antisense sequence
  source 1..20: mol_type = other RNA
tcagggtatctcttggaaat

SEQ ID NO: 641 - RNA, 20 nt, synthetic construct
  misc_feature 1..20: note = antisense sequence
  source 1..20: mol_type = other RNA
cttcagggtatctcttggaa

SEQ ID NO: 642 - RNA, 20 nt, synthetic construct
  misc_feature 1..20: note = antisense sequence
  source 1..20: mol_type = other RNA
acttcagggtatctcttgga

SEQ ID NO: 643 - RNA, 20 nt, synthetic construct
  misc_feature 1..20: note = antisense sequence
  source 1..20: mol_type = other RNA
tacttcagggtatctcttgg

SEQ ID NO: 644 - RNA, 20 nt, synthetic construct
  misc_feature 1..20: note = antisense sequence
  source 1..20: mol_type = other RNA
ctacttcagggtatctcttg

SEQ ID NO: 645 - RNA, 20 nt, synthetic construct
  misc_feature 1..20: note = antisense sequence
  source 1..20: mol_type = other RNA
tctacttcagggtatctctt

SEQ ID NO: 646 - RNA, 20 nt, synthetic construct
  misc_feature 1..20: note = antisense sequence
  source 1..20: mol_type = other RNA
atctacttcagggtatctct

SEQ ID NO: 647 - RNA, 20 nt, synthetic construct
  misc_feature 1..20: note = antisense sequence
  source 1..20: mol_type = other RNA
aatctacttcagggtatctc

SEQ ID NO: 648 - RNA, 20 nt, synthetic construct
  misc_feature 1..20: note = antisense sequence
  source 1..20: mol_type = other RNA
caatctacttcagggtatct

SEQ ID NO: 649 - RNA, 20 nt, synthetic construct
  misc_feature 1..20: note = antisense sequence
  source 1..20: mol_type = other RNA
ccaatctacttcagggtatc

SEQ ID NO: 650 - RNA, 20 nt, synthetic construct
  misc_feature 1..20: note = antisense sequence
  source 1..20: mol_type = other RNA
gtccaatctacttcagggta

SEQ ID NO: 651 - RNA, 20 nt, synthetic construct
  misc_feature 1..20: note = antisense sequence
  source 1..20: mol_type = other RNA
ggtccaatctacttcagggt

SEQ ID NO: 652 - RNA, 20 nt, synthetic construct
  misc_feature 1..20: note = antisense sequence
  source 1..20: mol_type = other RNA
gggtccaatctacttcaggg

SEQ ID NO: 653 - RNA, 20 nt, synthetic construct
  misc_feature 1..20: note = antisense sequence
  source 1..20: mol_type = other RNA
agggtccaatctacttcagg

SEQ ID NO: 654 - RNA, 20 nt, synthetic construct
  misc_feature 1..20: note = antisense sequence
  source 1..20: mol_type = other RNA
tagggtccaatctacttcag

SEQ ID NO: 655 - RNA, 20 nt, synthetic construct
  misc_feature 1..20: note = antisense sequence
  source 1..20: mol_type = other RNA
ctaaggtagggtccaatcta

SEQ ID NO: 656 - RNA, 20 nt, synthetic construct
  misc_feature 1..20: note = antisense sequence
  source 1..20: mol_type = other RNA
agatcctaccctcacagagc

SEQ ID NO: 657 - RNA, 20 nt, synthetic construct
  misc_feature 1..20: note = antisense sequence
  source 1..20: mol_type = other RNA
aagatcctaccctcacagag

SEQ ID NO: 658 - RNA, 20 nt, synthetic construct
  misc_feature 1..20: note = antisense sequence
  source 1..20: mol_type = other RNA
aaagatcctaccctcacaga

SEQ ID NO: 659 - RNA, 20 nt, synthetic construct
  misc_feature 1..20: note = antisense sequence
  source 1..20: mol_type = other RNA
taaagatcctaccctcacag

SEQ ID NO: 660 - RNA, 20 nt, synthetic construct
  misc_feature 1..20: note = antisense sequence
  source 1..20: mol_type = other RNA
ttaaagatcctaccctcaca

SEQ ID NO: 661 - RNA, 20 nt, synthetic construct
  misc_feature 1..20: note = antisense sequence
  source 1..20: mol_type = other RNA
gttaaagatcctaccctcac

SEQ ID NO: 662 - RNA, 20 nt, synthetic construct
  misc_feature 1..20: note = antisense sequence
  source 1..20: mol_type = other RNA
ggttaaagatcctaccctca

SEQ ID NO: 663 - RNA, 20 nt, synthetic construct
  misc_feature 1..20: note = antisense sequence
  source 1..20: mol_type = other RNA
tggttaaagatcctaccctc

SEQ ID NO: 664 - RNA, 20 nt, synthetic construct
  misc_feature 1..20: note = antisense sequence
  source 1..20: mol_type = other RNA
atggttaaagatcctaccct

SEQ ID NO: 665 - RNA, 20 nt, synthetic construct
  misc_feature 1..20: note = antisense sequence
  source 1..20: mol_type = other RNA
ttcaactgatggtgtcttcc

SEQ ID NO: 666 - RNA, 20 nt, synthetic construct
  misc_feature 1..20: note = antisense sequence
  source 1..20: mol_type = other RNA
tttcaactgatggtgtcttc

SEQ ID NO: 667 - RNA, 20 nt, synthetic construct
  misc_feature 1..20: note = antisense sequence
  source 1..20: mol_type = other RNA
atctttcaactgatggtgtc

SEQ ID NO: 668 - RNA, 20 nt, synthetic construct
  misc_feature 1..20: note = antisense sequence
  source 1..20: mol_type = other RNA
atggtgcatctttcaactga

SEQ ID NO: 669 - RNA, 20 nt, synthetic construct
  misc_feature 1..20: note = antisense sequence
  source 1..20: mol_type = other RNA
aatggtgcatctttcaactg

SEQ ID NO: 670 - RNA, 20 nt, synthetic construct
  misc_feature 1..20: note = antisense sequence
  source 1..20: mol_type = other RNA
attgggagtggcttgtcttt

SEQ ID NO: 671 - RNA, 20 nt, synthetic construct
  misc_feature 1..20: note = antisense sequence
  source 1..20: mol_type = other RNA
gattgggagtggcttgtctt

SEQ ID NO: 672 - RNA, 20 nt, synthetic construct
  misc_feature 1..20: note = antisense sequence
  source 1..20: mol_type = other RNA
ttggattgggagtggcttgt

SEQ ID NO: 673 - RNA, 20 nt, synthetic construct
  misc_feature 1..20: note = antisense sequence
  source 1..20: mol_type = other RNA
attggattgggagtggcttg

SEQ ID NO: 674 - RNA, 20 nt, synthetic construct
  misc_feature 1..20: note = antisense sequence
  source 1..20: mol_type = other RNA
aattggattgggagtggctt

SEQ ID NO: 675 - RNA, 20 nt, synthetic construct
  misc_feature 1..20: note = antisense sequence
  source 1..20: mol_type = other RNA
taattggattgggagtggct

SEQ ID NO: 676 - RNA, 20 nt, synthetic construct
  misc_feature 1..20: note = antisense sequence
  source 1..20: mol_type = other RNA
ataattggattgggagtggc

SEQ ID NO: 677 - RNA, 20 nt, synthetic construct
  misc_feature 1..20: note = antisense sequence
  source 1..20: mol_type = other RNA
tataattggattgggagtgg

SEQ ID NO: 678 - RNA, 20 nt, synthetic construct
  misc_feature 1..20: note = antisense sequence
  source 1..20: mol_type = other RNA
tcccaattttgacatctctg

SEQ ID NO: 679 - RNA, 20 nt, synthetic construct
  misc_feature 1..20: note = antisense sequence
  source 1..20: mol_type = other RNA
agacgcacattttcccaatt

SEQ ID NO: 680 - RNA, 20 nt, synthetic construct
  misc_feature 1..20: note = antisense sequence
  source 1..20: mol_type = other RNA
cagacgcacattttcccaat

SEQ ID NO: 681 - RNA, 20 nt, synthetic construct
  misc_feature 1..20: note = antisense sequence
  source 1..20: mol_type = other RNA
tcagacgcacattttcccaa

SEQ ID NO: 682 - RNA, 20 nt, synthetic construct
  misc_feature 1..20: note = antisense sequence
  source 1..20: mol_type = other RNA
ttcagacgcacattttccca

SEQ ID NO: 683 - RNA, 20 nt, synthetic construct
  misc_feature 1..20: note = antisense sequence
  source 1..20: mol_type = other RNA
tttcagacgcacattttccc

SEQ ID NO: 684 - RNA, 20 nt, synthetic construct
  misc_feature 1..20: note = antisense sequence
  source 1..20: mol_type = other RNA
ttttcagacgcacattttcc

SEQ ID NO: 685 - RNA, 20 nt, synthetic construct
  misc_feature 1..20: note = antisense sequence
  source 1..20: mol_type = other RNA
ttcacatactagcctcttca

SEQ ID NO: 686 - RNA, 20 nt, synthetic construct
  misc_feature 1..20: note = antisense sequence
  source 1..20: mol_type = other RNA
gttcacatactagcctcttc

SEQ ID NO: 687 - RNA, 20 nt, synthetic construct
  misc_feature 1..20: note = antisense sequence
  source 1..20: mol_type = other RNA
ggttcacatactagcctctt

SEQ ID NO: 688 - RNA, 20 nt, synthetic construct
  misc_feature 1..20: note = antisense sequence
  source 1..20: mol_type = other RNA
gaactgagaggaacaatgtt

SEQ ID NO: 689 - RNA, 20 nt, synthetic construct
  misc_feature 1..20: note = antisense sequence
  source 1..20: mol_type = other RNA
gagaactgagaggaacaatg

SEQ ID NO: 690 - RNA, 20 nt, synthetic construct
  misc_feature 1..20: note = antisense sequence
  source 1..20: mol_type = other RNA
cacttgaagagaactgagag

SEQ ID NO: 691 - RNA, 20 nt, synthetic construct
  misc_feature 1..20: note = antisense sequence
  source 1..20: mol_type = other RNA
ttggcacttgaagagaactg

SEQ ID NO: 692 - RNA, 20 nt, synthetic construct
  misc_feature 1..20: note = antisense sequence
  source 1..20: mol_type = other RNA
cttggcacttgaagagaact

SEQ ID NO: 693 - RNA, 20 nt, synthetic construct
  misc_feature 1..20: note = antisense sequence
  source 1..20: mol_type = other RNA
taaacttggcacttgaagag

SEQ ID NO: 694 - RNA, 20 nt, synthetic construct
  misc_feature 1..20: note = antisense sequence
  source 1..20: mol_type = other RNA
gccagaggagcaattatccc

SEQ ID NO: 695 - RNA, 20 nt, synthetic construct
  misc_feature 1..20: note = antisense sequence
  source 1..20: mol_type = other RNA
gtgccagaggagcaattatc

SEQ ID NO: 696 - RNA, 20 nt, synthetic construct
  misc_feature 1..20: note = antisense sequence
  source 1..20: mol_type = other RNA
tggtgccagaggagcaatta

SEQ ID NO: 697 - RNA, 20 nt, synthetic construct
  misc_feature 1..20: note = antisense sequence
  source 1..20: mol_type = other RNA
gttggtgccagaggagcaat

SEQ ID NO: 698 - RNA, 20 nt, synthetic construct
  misc_feature 1..20: note = antisense sequence
  source 1..20: mol_type = other RNA
tgttggtgccagaggagcaa

SEQ ID NO: 699 - RNA, 20 nt, synthetic construct
  misc_feature 1..20: note = antisense sequence
  source 1..20: mol_type = other RNA
ctgttggtgccagaggagca

SEQ ID NO: 700 - RNA, 20 nt, synthetic construct
  misc_feature 1..20: note = antisense sequence
  source 1..20: mol_type = other RNA
tgaggctgttggtgccagag

SEQ ID NO: 701 - RNA, 20 nt, synthetic construct
  misc_feature 1..20: note = antisense sequence
  source 1..20: mol_type = other RNA
gtgaggctgttggtgccaga

SEQ ID NO: 702 - RNA, 20 nt, synthetic construct
  misc_feature 1..20: note = antisense sequence
  source 1..20: mol_type = other RNA
gggatctggtgaggctgttg

SEQ ID NO: 703 - RNA, 20 nt, synthetic construct
  misc_feature 1..20: note = antisense sequence
  source 1..20: mol_type = other RNA
tgggatctggtgaggctgtt

SEQ ID NO: 704 - RNA, 20 nt, synthetic construct
  misc_feature 1..20: note = antisense sequence
  source 1..20: mol_type = other RNA
ttttgggatctggtgaggct

SEQ ID NO: 705 - RNA, 20 nt, synthetic construct
  misc_feature 1..20: note = antisense sequence
  source 1..20: mol_type = other RNA
atagagcatttggagggagc

SEQ ID NO: 706 - RNA, 20 nt, synthetic construct
  misc_feature 1..20: note = antisense sequence
  source 1..20: mol_type = other RNA
gatagagcatttggagggag

SEQ ID NO: 707 - RNA, 20 nt, synthetic construct
  misc_feature 1..20: note = antisense sequence
  source 1..20: mol_type = other RNA
agatagagcatttggaggga

SEQ ID NO: 708 - RNA, 20 nt, synthetic construct
  misc_feature 1..20: note = antisense sequence
  source 1..20: mol_type = other RNA
aagatagagcatttggaggg

SEQ ID NO: 709 - RNA, 20 nt, synthetic construct
  misc_feature 1..20: note = antisense sequence
  source 1..20: mol_type = other RNA
cctgtgcaactggaacatta

SEQ ID NO: 710 - RNA, 20 nt, synthetic construct
  misc_feature 1..20: note = antisense sequence
  source 1..20: mol_type = other RNA
tcctgtgcaactggaacatt

SEQ ID NO: 711 - RNA, 20 nt, synthetic construct
  misc_feature 1..20: note = antisense sequence
  source 1..20: mol_type = other RNA
atcctgtgcaactggaacat

SEQ ID NO: 712 - RNA, 20 nt, synthetic construct
  misc_feature 1..20: note = antisense sequence
  source 1..20: mol_type = other RNA
ttaatcctgtgcaactggaa

SEQ ID NO: 713 - RNA, 20 nt, synthetic construct
  misc_feature 1..20: note = antisense sequence
  source 1..20: mol_type = other RNA
ttgccaaagctagagtcatt

SEQ ID NO: 714 - RNA, 20 nt, synthetic construct
  misc_feature 1..20: note = antisense sequence
  source 1..20: mol_type = other RNA
gtttgccaaagctagagtca

SEQ ID NO: 715 - RNA, 20 nt, synthetic construct
  misc_feature 1..20: note = antisense sequence
  source 1..20: mol_type = other RNA
agtttgccaaagctagagtc

SEQ ID NO: 716 - RNA, 20 nt, synthetic construct
  misc_feature 1..20: note = antisense sequence
  source 1..20: mol_type = other RNA
gagtttgccaaagctagagt

SEQ ID NO: 717 - RNA, 20 nt, synthetic construct
  misc_feature 1..20: note = antisense sequence
  source 1..20: mol_type = other RNA
agagtttgccaaagctagag

SEQ ID NO: 718 - RNA, 20 nt, synthetic construct
  misc_feature 1..20: note = antisense sequence
  source 1..20: mol_type = other RNA
aagagtttgccaaagctaga

SEQ ID NO: 719 - RNA, 20 nt, synthetic construct
  misc_feature 1..20: note = antisense sequence
  source 1..20: mol_type = other RNA
taagagtttgccaaagctag

SEQ ID NO: 720 - RNA, 20 nt, synthetic construct
  misc_feature 1..20: note = antisense sequence
  source 1..20: mol_type = other RNA
gttaagagtttgccaaagct

SEQ ID NO: 721 - RNA, 20 nt, synthetic construct
  misc_feature 1..20: note = antisense sequence
  source 1..20: mol_type = other RNA
gagcttaccaccaacatgac

SEQ ID NO: 722 - RNA, 20 nt, synthetic construct
  misc_feature 1..20: note = antisense sequence
  source 1..20: mol_type = other RNA
ggagcttaccaccaacatga

SEQ ID NO: 723 - RNA, 20 nt, synthetic construct
  misc_feature 1..20: note = antisense sequence
  source 1..20: mol_type = other RNA
tggagcttaccaccaacatg

SEQ ID NO: 724 - RNA, 20 nt, synthetic construct
  misc_feature 1..20: note = antisense sequence
  source 1..20: mol_type = other RNA
ctggagcttaccaccaacat

SEQ ID NO: 725 - RNA, 20 nt, synthetic construct
  misc_feature 1..20: note = antisense sequence
  source 1..20: mol_type = other RNA
cctggagcttaccaccaaca

SEQ ID NO: 726 - RNA, 20 nt, synthetic construct
  misc_feature 1..20: note = antisense sequence
  source 1..20: mol_type = other RNA
ccctggagcttaccaccaac

SEQ ID NO: 727 - RNA, 20 nt, synthetic construct
  misc_feature 1..20: note = antisense sequence
  source 1..20: mol_type = other RNA
aaccctggagcttaccacca

SEQ ID NO: 728 - RNA, 20 nt, synthetic construct
  misc_feature 1..20: note = antisense sequence
  source 1..20: mol_type = other RNA
caaccctggagcttaccacc

SEQ ID NO: 729 - RNA, 20 nt, synthetic construct
  misc_feature 1..20: note = antisense sequence
  source 1..20: mol_type = other RNA
acaaccctggagcttaccac

SEQ ID NO: 730 - RNA, 20 nt, synthetic construct
  misc_feature 1..20: note = antisense sequence
  source 1..20: mol_type = other RNA
cacaaccctggagcttacca

SEQ ID NO: 731 - RNA, 20 nt, synthetic construct
  misc_feature 1..20: note = antisense sequence
  source 1..20: mol_type = other RNA
tacacaaccctggagcttac

SEQ ID NO: 732 - RNA, 20 nt, synthetic construct
  misc_feature 1..20: note = antisense sequence
  source 1..20: mol_type = other RNA
atacacaaccctggagctta

SEQ ID NO: 733 - RNA, 20 nt, synthetic construct
  misc_feature 1..20: note = antisense sequence
  source 1..20: mol_type = other RNA
tatacacaaccctggagctt

SEQ ID NO: 734 - RNA, 20 nt, synthetic construct
  misc_feature 1..20: note = antisense sequence
  source 1..20: mol_type = other RNA
atatacacaaccctggagct

SEQ ID NO: 735 - RNA, 20 nt, synthetic construct
  misc_feature 1..20: note = antisense sequence
  source 1..20: mol_type = other RNA
cctaacaccaaccagcatat

SEQ ID NO: 736 - RNA, 20 nt, synthetic construct
  misc_feature 1..20: note = antisense sequence
  source 1..20: mol_type = other RNA
attcctaacaccaaccagca

SEQ ID NO: 737 - RNA, 20 nt, synthetic construct
  misc_feature 1..20: note = antisense sequence
  source 1..20: mol_type = other RNA
ttgttaatagggatctcctg

SEQ ID NO: 738 - RNA, 20 nt, synthetic construct
  misc_feature 1..20: note = antisense sequence
  source 1..20: mol_type = other RNA
cttgttaatagggatctcct

SEQ ID NO: 739 - RNA, 20 nt, synthetic construct
  misc_feature 1..20: note = antisense sequence
  source 1..20: mol_type = other RNA
tcttgttaatagggatctcc

SEQ ID NO: 740 - RNA, 20 nt, synthetic construct
  misc_feature 1..20: note = antisense sequence
  source 1..20: mol_type = other RNA
ccactcctttgcatatttga

SEQ ID NO: 741 - RNA, 20 nt, synthetic construct
  misc_feature 1..20: note = antisense sequence
  source 1..20: mol_type = other RNA
tccactcctttgcatatttg

SEQ ID NO: 742 - RNA, 20 nt, synthetic construct
  misc_feature 1..20: note = antisense sequence
  source 1..20: mol_type = other RNA
gtatccactcctttgcatat

SEQ ID NO: 743 - RNA, 20 nt, synthetic construct
  misc_feature 1..20: note = antisense sequence
  source 1..20: mol_type = other RNA
tgtatccactcctttgcata

SEQ ID NO: 744 - RNA, 20 nt, synthetic construct
  misc_feature 1..20: note = antisense sequence
  source 1..20: mol_type = other RNA
gtgtatccactcctttgcat

SEQ ID NO: 745 - RNA, 20 nt, synthetic construct
  misc_feature 1..20: note = antisense sequence
  source 1..20: mol_type = other RNA
tgtgtatccactcctttgca

SEQ ID NO: 746 - RNA, 20 nt, synthetic construct
  misc_feature 1..20: note = antisense sequence
  source 1..20: mol_type = other RNA
atgtgtatccactcctttgc

SEQ ID NO: 747 - RNA, 20 nt, synthetic construct
  misc_feature 1..20: note = antisense sequence
  source 1..20: mol_type = other RNA
tatgtgtatccactcctttg

SEQ ID NO: 748 - RNA, 20 nt, synthetic construct
  misc_feature 1..20: note = antisense sequence
  source 1..20: mol_type = other RNA
gtatgtgtatccactccttt

SEQ ID NO: 749 - RNA, 20 nt, synthetic construct
  misc_feature 1..20: note = antisense sequence
  source 1..20: mol_type = other RNA
agtatgtgtatccactcctt

SEQ ID NO: 750 - RNA, 20 nt, synthetic construct
  misc_feature 1..20: note = antisense sequence
  source 1..20: mol_type = other RNA
gccagtacccatgtatttct

SEQ ID NO: 751 - RNA, 20 nt, synthetic construct
  misc_feature 1..20: note = antisense sequence
  source 1..20: mol_type = other RNA
ggccagtacccatgtatttc

SEQ ID NO: 752 - RNA, 20 nt, synthetic construct
  misc_feature 1..20: note = antisense sequence
  source 1..20: mol_type = other RNA
ggcataagatcatttcacca

SEQ ID NO: 753 - RNA, 20 nt, synthetic construct
  misc_feature 1..20: note = antisense sequence
  source 1..20: mol_type = other RNA
cggcataagatcatttcacc

SEQ ID NO: 754 - RNA, 20 nt, synthetic construct
  misc_feature 1..20: note = antisense sequence
  source 1..20: mol_type = other RNA
acggcataagatcatttcac

SEQ ID NO: 755 - RNA, 20 nt, synthetic construct
  misc_feature 1..20: note = antisense sequence
  source 1..20: mol_type = other RNA
gtgtgtgtgtgtgtatttct

SEQ ID NO: 756 - RNA, 20 nt, synthetic construct
  misc_feature 1..20: note = antisense sequence
  source 1..20: mol_type = other RNA
tgtgtgtgtgtgtgtatttc

SEQ ID NO: 757 - RNA, 20 nt, synthetic construct
  misc_feature 1..20: note = antisense sequence
  source 1..20: mol_type = other RNA
gtgtgtgtgtgtgtgtattt

SEQ ID NO: 758 - RNA, 20 nt, synthetic construct
  misc_feature 1..20: note = antisense sequence
  source 1..20: mol_type = other RNA
tgtgtgtgtgtgtgtgtatt

SEQ ID NO: 759 - RNA, 20 nt, synthetic construct
  misc_feature 1..20: note = antisense sequence
  source 1..20: mol_type = other RNA
gtgtgtgtgtgtgtgtgtat

SEQ ID NO: 760 - RNA, 20 nt, synthetic construct
  misc_feature 1..20: note = antisense sequence
  source 1..20: mol_type = other RNA
tgtgtgtgtgtgtgtgtgta

SEQ ID NO: 761 - RNA, 20 nt, synthetic construct
  misc_feature 1..20: note = antisense sequence
  source 1..20: mol_type = other RNA
gtgtgtgtgtgtgtgtgtgt

SEQ ID NO: 762 - RNA, 20 nt, synthetic construct
  misc_feature 1..20: note = antisense sequence
  source 1..20: mol_type = other RNA
tgtgtgtgtgtgtgtgtgtg

SEQ ID NO: 763 - RNA, 20 nt, synthetic construct
  misc_feature 1..20: note = antisense sequence
  source 1..20: mol_type = other RNA
gtgtgtgtgtgtgtgtgtgt

SEQ ID NO: 764 - RNA, 20 nt, synthetic construct
  misc_feature 1..20: note = antisense sequence
  source 1..20: mol_type = other RNA
tgtgtgtgtgtgtgtgtgtg

SEQ ID NO: 765 - RNA, 20 nt, synthetic construct
  misc_feature 1..20: note = antisense sequence
  source 1..20: mol_type = other RNA
gtgtgtgtgtgtgtgtgtgt

SEQ ID NO: 766 - RNA, 20 nt, synthetic construct
  misc_feature 1..20: note = antisense sequence
  source 1..20: mol_type = other RNA
tgtgtgtgtgtgtgtgtgtg

SEQ ID NO: 767 - RNA, 20 nt, synthetic construct
  misc_feature 1..20: note = antisense sequence
  source 1..20: mol_type = other RNA
gtgtgtgtgtgtgtgtgtgt

SEQ ID NO: 768 - RNA, 20 nt, synthetic construct
  misc_feature 1..20: note = antisense sequence
  source 1..20: mol_type = other RNA
tgtgtgtgtgtgtgtgtgtg

SEQ ID NO: 769 - RNA, 20 nt, synthetic construct
  misc_feature 1..20: note = antisense sequence
  source 1..20: mol_type = other RNA
gtgtgtgtgtgtgtgtgtgt

SEQ ID NO: 770 - RNA, 20 nt, synthetic construct
  misc_feature 1..20: note = antisense sequence
  source 1..20: mol_type = other RNA
tgtgtgtgtgtgtgtgtgtg

SEQ ID NO: 771 - RNA, 20 nt, synthetic construct
  misc_feature 1..20: note = antisense sequence
  source 1..20: mol_type = other RNA
gtgtgtgtgtgtgtgtgtgt

SEQ ID NO: 772 - RNA, 20 nt, synthetic construct
  misc_feature 1..20: note = antisense sequence
  source 1..20: mol_type = other RNA
tgtgtgtgtgtgtgtgtgtg

SEQ ID NO: 773 - RNA, 20 nt, synthetic construct
  misc_feature 1..20: note = antisense sequence
  source 1..20: mol_type = other RNA
gtgtgtgtgtgtgtgtgtgt

SEQ ID NO: 774 - RNA, 20 nt, synthetic construct
  misc_feature 1..20: note = antisense sequence
  source 1..20: mol_type = other RNA
tgtgtgtgtgtgtgtgtgtg

SEQ ID NO: 775 - RNA, 20 nt, synthetic construct
  misc_feature 1..20: note = antisense sequence
  source 1..20: mol_type = other RNA
gtgtgtgtgtgtgtgtgtgt

SEQ ID NO: 776 - RNA, 20 nt, synthetic construct
  misc_feature 1..20: note = antisense sequence
  source 1..20: mol_type = other RNA
tgtgtgtgtgtgtgtgtgtg

SEQ ID NO: 777 - RNA, 20 nt, synthetic construct
  misc_feature 1..20: note = antisense sequence
  source 1..20: mol_type = other RNA
gtgtgtgtgtgtgtgtgtgt

SEQ ID NO: 778 - RNA, 20 nt, synthetic construct
  misc_feature 1..20: note = antisense sequence
  source 1..20: mol_type = other RNA
agtgtgtgtgtgtgtgtgtg

SEQ ID NO: 779 - RNA, 20 nt, synthetic construct
  misc_feature 1..20: note = antisense sequence
  source 1..20: mol_type = other RNA
aagtgtgtgtgtgtgtgtgt

SEQ ID NO: 780 - RNA, 20 nt, synthetic construct
  misc_feature 1..20: note = antisense sequence
  source 1..20: mol_type = other RNA
gaagtgtgtgtgtgtgtgtg

SEQ ID NO: 781 - RNA, 20 nt, synthetic construct
  misc_feature 1..20: note = antisense sequence
  source 1..20: mol_type = other RNA
agaagtgtgtgtgtgtgtgt

SEQ ID NO: 782 - RNA, 20 nt, synthetic construct
  misc_feature 1..20: note = antisense sequence
  source 1..20: mol_type = other RNA
cagaagtgtgtgtgtgtgtg

SEQ ID NO: 783 - RNA, 20 nt, synthetic construct
  misc_feature 1..20: note = antisense sequence
  source 1..20: mol_type = other RNA
acagaagtgtgtgtgtgtgt

SEQ ID NO: 784 - RNA, 20 nt, synthetic construct
  misc_feature 1..20: note = antisense sequence
  source 1..20: mol_type = other RNA
ctatgaacagaagtgtgtgt

SEQ ID NO: 785 - RNA, 20 nt, synthetic construct
  misc_feature 1..20: note = antisense sequence
  source 1..20: mol_type = other RNA
atcctatgaacagaagtgtg

SEQ ID NO: 786 - RNA, 20 nt, synthetic construct
  misc_feature 1..20: note = antisense sequence
  source 1..20: mol_type = other RNA
cttacttgcagttgtcacaa

SEQ ID NO: 787 - RNA, 20 nt, synthetic construct
  misc_feature 1..20: note = antisense sequence
  source 1..20: mol_type = other RNA
gcttacttgcagttgtcaca

SEQ ID NO: 788 - RNA, 20 nt, synthetic construct
  misc_feature 1..20: note = antisense sequence
  source 1..20: mol_type = other RNA
tgcttacttgcagttgtcac

SEQ ID NO: 789 - RNA, 20 nt, synthetic construct
  misc_feature 1..20: note = antisense sequence
  source 1..20: mol_type = other RNA
gtgcttacttgcagttgtca

SEQ ID NO: 790 - RNA, 20 nt, synthetic construct
  misc_feature 1..20: note = antisense sequence
  source 1..20: mol_type = other RNA
agtgcttacttgcagttgtc

SEQ ID NO: 791 - RNA, 20 nt, synthetic construct
  misc_feature 1..20: note = antisense sequence
  source 1..20: mol_type = other RNA
ggaacttgtactcactcact

SEQ ID NO: 792 - RNA, 20 nt, synthetic construct
  misc_feature 1..20: note = antisense sequence
  source 1..20: mol_type = other RNA
aaggaacttgtactcactca

SEQ ID NO: 793 - RNA, 20 nt, synthetic construct
  misc_feature 1..20: note = antisense sequence
  source 1..20: mol_type = other RNA
taaggaacttgtactcactc

SEQ ID NO: 794 - RNA, 20 nt, synthetic construct
  misc_feature 1..20: note = antisense sequence
  source 1..20: mol_type = other RNA
tgactgggaggattagttag

SEQ ID NO: 795 - RNA, 20 nt, synthetic construct
  misc_feature 1..20: note = antisense sequence
  source 1..20: mol_type = other RNA
gatgactgggaggattagtt

SEQ ID NO: 796 - RNA, 20 nt, synthetic construct
  misc_feature 1..20: note = antisense sequence
  source 1..20: mol_type = other RNA
ggatgactgggaggattagt

SEQ ID NO: 797 - RNA, 20 nt, synthetic construct
  misc_feature 1..20: note = antisense sequence
  source 1..20: mol_type = other RNA
tggatgactgggaggattag

SEQ ID NO: 798 - RNA, 20 nt, synthetic construct
  misc_feature 1..20: note = antisense sequence
  source 1..20: mol_type = other RNA
ctaagtggatgactgggagg

SEQ ID NO: 799 - RNA, 20 nt, synthetic construct
  misc_feature 1..20: note = antisense sequence
  source 1..20: mol_type = other RNA
gctaagtggatgactgggag

SEQ ID NO: 800 - RNA, 20 nt, synthetic construct
  misc_feature 1..20: note = antisense sequence
  source 1..20: mol_type = other RNA
agctaagtggatgactggga

SEQ ID NO: 801 - RNA, 20 nt, synthetic construct
  misc_feature 1..20: note = antisense sequence
  source 1..20: mol_type = other RNA
aagctaagtggatgactggg

SEQ ID NO: 802 - RNA, 20 nt, synthetic construct
  misc_feature 1..20: note = antisense sequence
  source 1..20: mol_type = other RNA
caaagctaagtggatgactg

SEQ ID NO: 803 - RNA, 20 nt, synthetic construct
  misc_feature 1..20: note = antisense sequence
  source 1..20: mol_type = other RNA
gcaaagctaagtggatgact

SEQ ID NO: 804 - RNA, 20 nt, synthetic construct
  misc_feature 1..20: note = antisense sequence
  source 1..20: mol_type = other RNA
agcaaagctaagtggatgac

SEQ ID NO: 805 - RNA, 20 nt, synthetic construct
  misc_feature 1..20: note = antisense sequence
  source 1..20: mol_type = other RNA
cagcaaagctaagtggatga

SEQ ID NO: 806 - RNA, 20 nt, synthetic construct
  misc_feature 1..20: note = antisense sequence
  source 1..20: mol_type = other RNA
ccagcaaagctaagtggatg

SEQ ID NO: 807 - RNA, 20 nt, synthetic construct
  misc_feature 1..20: note = antisense sequence
  source 1..20: mol_type = other RNA
accagcaaagctaagtggat

SEQ ID NO: 808 - RNA, 20 nt, synthetic construct
  misc_feature 1..20: note = antisense sequence
  source 1..20: mol_type = other RNA
caccagcaaagctaagtgga

SEQ ID NO: 809 - RNA, 20 nt, synthetic construct
  misc_feature 1..20: note = antisense sequence
  source 1..20: mol_type = other RNA
tccaccagcaaagctaagtg

SEQ ID NO: 810 - RNA, 20 nt, synthetic construct
  misc_feature 1..20: note = antisense sequence
  source 1..20: mol_type = other RNA
ctccaccagcaaagctaagt

SEQ ID NO: 811 - RNA, 20 nt, synthetic construct
  misc_feature 1..20: note = antisense sequence
  source 1..20: mol_type = other RNA
acctccaccagcaaagctaa

SEQ ID NO: 812 - RNA, 20 nt, synthetic construct
  misc_feature 1..20: note = antisense sequence
  source 1..20: mol_type = other RNA
gacctccaccagcaaagcta

SEQ ID NO: 813 - RNA, 20 nt, synthetic construct
  misc_feature 1..20: note = antisense sequence
  source 1..20: mol_type = other RNA
catgtgacctccaccagcaa

SEQ ID NO: 814 - RNA, 20 nt, synthetic construct
  misc_feature 1..20: note = antisense sequence
  source 1..20: mol_type = other RNA
ccatgtgacctccaccagca

SEQ ID NO: 815 - RNA, 20 nt, synthetic construct
  misc_feature 1..20: note = antisense sequence
  source 1..20: mol_type = other RNA
ttgtgcaaaggttcccatgt

SEQ ID NO: 816 - RNA, 20 nt, synthetic construct
  misc_feature 1..20: note = antisense sequence
  source 1..20: mol_type = other RNA
attgtgcaaaggttcccatg

SEQ ID NO: 817 - RNA, 20 nt, synthetic construct
  misc_feature 1..20: note = antisense sequence
  source 1..20: mol_type = other RNA
agattgtgcaaaggttccca

SEQ ID NO: 818 - RNA, 20 nt, synthetic construct
  misc_feature 1..20: note = antisense sequence
  source 1..20: mol_type = other RNA
ctcagattgtgcaaaggttc

SEQ ID NO: 819 - RNA, 20 nt, synthetic construct
  misc_feature 1..20: note = antisense sequence
  source 1..20: mol_type = other RNA
cctcagattgtgcaaaggtt

SEQ ID NO: 820 - RNA, 20 nt, synthetic construct
  misc_feature 1..20: note = antisense sequence
  source 1..20: mol_type = other RNA
aacctcagattgtgcaaagg

SEQ ID NO: 821 - RNA, 20 nt, synthetic construct
  misc_feature 1..20: note = antisense sequence
  source 1..20: mol_type = other RNA
gcaaacctcagattgtgcaa

SEQ ID NO: 822 - RNA, 20 nt, synthetic construct
  misc_feature 1..20: note = antisense sequence
  source 1..20: mol_type = other RNA
gtgcaaacctcagattgtgc

SEQ ID NO: 823 - RNA, 20 nt, synthetic construct
  misc_feature 1..20: note = antisense sequence
  source 1..20: mol_type = other RNA
tgtgcaaacctcagattgtg

SEQ ID NO: 824 - RNA, 20 nt, synthetic construct
  misc_feature 1..20: note = antisense sequence
  source 1..20: mol_type = other RNA
atgtgcaaacctcagattgt

SEQ ID NO: 825 - RNA, 20 nt, synthetic construct
  misc_feature 1..20: note = antisense sequence
  source 1..20: mol_type = other RNA
gaatgtgcaaacctcagatt

SEQ ID NO: 826 - RNA, 20 nt, synthetic construct
  misc_feature 1..20: note = antisense sequence
  source 1..20: mol_type = other RNA
agaatgtgcaaacctcagat

SEQ ID NO: 827 - RNA, 20 nt, synthetic construct
  misc_feature 1..20: note = antisense sequence
  source 1..20: mol_type = other RNA
gagaatgtgcaaacctcaga

SEQ ID NO: 828 - RNA, 20 nt, synthetic construct
  misc_feature 1..20: note = antisense sequence
  source 1..20: mol_type = other RNA
agagaatgtgcaaacctcag

SEQ ID NO: 829 - RNA, 20 nt, synthetic construct
  misc_feature 1..20: note = antisense sequence
  source 1..20: mol_type = other RNA
caaaataagaagccagagct

SEQ ID NO: 830 - RNA, 20 nt, synthetic construct
  misc_feature 1..20: note = antisense sequence
  source 1..20: mol_type = other RNA
catggtttggaaagtgaact

SEQ ID NO: 831 - RNA, 20 nt, synthetic construct
  misc_feature 1..20: note = antisense sequence
  source 1..20: mol_type = other RNA
gtgcttaggtaagaaaatgg

SEQ ID NO: 832 - RNA, 20 nt, synthetic construct
  misc_feature 1..20: note = antisense sequence
  source 1..20: mol_type = other RNA
cgtgcttaggtaagaaaatg

SEQ ID NO: 833 - RNA, 20 nt, synthetic construct
  misc_feature 1..20: note = antisense sequence
  source 1..20: mol_type = other RNA
agccgtgcttaggtaagaaa

SEQ ID NO: 834 - RNA, 20 nt, synthetic construct
  misc_feature 1..20: note = antisense sequence
  source 1..20: mol_type = other RNA
tagccgtgcttaggtaagaa

SEQ ID NO: 835 - RNA, 20 nt, synthetic construct
  misc_feature 1..20: note = antisense sequence
  source 1..20: mol_type = other RNA
atagccgtgcttaggtaaga

SEQ ID NO: 836 - RNA, 20 nt, synthetic construct
  misc_feature 1..20: note = antisense sequence
  source 1..20: mol_type = other RNA
gatagccgtgcttaggtaag

SEQ ID NO: 837 - RNA, 20 nt, synthetic construct
  misc_feature 1..20: note = antisense sequence
  source 1..20: mol_type = other RNA
agatagccgtgcttaggtaa

SEQ ID NO: 838 - RNA, 20 nt, synthetic construct
  misc_feature 1..20: note = antisense sequence
  source 1..20: mol_type = other RNA
gagatagccgtgcttaggta

SEQ ID NO: 839 - RNA, 20 nt, synthetic construct
  misc_feature 1..20: note = antisense sequence
  source 1..20: mol_type = other RNA
tgagatagccgtgcttaggt

SEQ ID NO: 840 - RNA, 20 nt, synthetic construct
  misc_feature 1..20: note = antisense sequence
  source 1..20: mol_type = other RNA
ttgagatagccgtgcttagg

SEQ ID NO: 841 - RNA, 20 nt, synthetic construct
  misc_feature 1..20: note = antisense sequence
  source 1..20: mol_type = other RNA
tttgagatagccgtgcttag

SEQ ID NO: 842 - RNA, 20 nt, synthetic construct
  misc_feature 1..20: note = antisense sequence
  source 1..20: mol_type = other RNA
atttgagatagccgtgctta

SEQ ID NO: 843 - RNA, 20 nt, synthetic construct
  misc_feature 1..20: note = antisense sequence
  source 1..20: mol_type = other RNA
tatttgagatagccgtgctt

SEQ ID NO: 844 - RNA, 20 nt, synthetic construct
  misc_feature 1..20: note = antisense sequence
  source 1..20: mol_type = other RNA
atatttgagatagccgtgct

SEQ ID NO: 845 - RNA, 20 nt, synthetic construct
  misc_feature 1..20: note = antisense sequence
  source 1..20: mol_type = other RNA
caagtggcacatactcatat

SEQ ID NO: 846 - RNA, 20 nt, synthetic construct
  misc_feature 1..20: note = antisense sequence
  source 1..20: mol_type = other RNA
acaagtggcacatactcata

SEQ ID NO: 847 - RNA, 20 nt, synthetic construct
  misc_feature 1..20: note = antisense sequence
  source 1..20: mol_type = other RNA
cataacaagtggcacatact

SEQ ID NO: 848 - RNA, 20 nt, synthetic construct
  misc_feature 1..20: note = antisense sequence
  source 1..20: mol_type = other RNA
cagcataacaagtggcacat

SEQ ID NO: 849 - RNA, 20 nt, synthetic construct
  misc_feature 1..20: note = antisense sequence
  source 1..20: mol_type = other RNA
acagcataacaagtggcaca

SEQ ID NO: 850 - RNA, 20 nt, synthetic construct
  misc_feature 1..20: note = antisense sequence
  source 1..20: mol_type = other RNA
cacagcataacaagtggcac

SEQ ID NO: 851 - RNA, 20 nt, synthetic construct
  misc_feature 1..20: note = antisense sequence
  source 1..20: mol_type = other RNA
tggaacacagcataacaagt

SEQ ID NO: 852 - RNA, 20 nt, synthetic construct
  misc_feature 1..20: note = antisense sequence
  source 1..20: mol_type = other RNA
ggcagagacttactaccttt

SEQ ID NO: 853 - RNA, 20 nt, synthetic construct
  misc_feature 1..20: note = antisense sequence
  source 1..20: mol_type = other RNA
aggcagagacttactacctt

SEQ ID NO: 854 - RNA, 20 nt, synthetic construct
  misc_feature 1..20: note = antisense sequence
  source 1..20: mol_type = other RNA
taaaggcagagacttactac

SEQ ID NO: 855 - RNA, 20 nt, synthetic construct
  misc_feature 1..20: note = antisense sequence
  source 1..20: mol_type = other RNA
ccagtaaaggcagagactta

SEQ ID NO: 856 - RNA, 20 nt, synthetic construct
  misc_feature 1..20: note = antisense sequence
  source 1..20: mol_type = other RNA
accagtaaaggcagagactt

SEQ ID NO: 857 - RNA, 20 nt, synthetic construct
  misc_feature 1..20: note = antisense sequence
  source 1..20: mol_type = other RNA
caccagtaaaggcagagact

SEQ ID NO: 858 - RNA, 20 nt, synthetic construct
  misc_feature 1..20: note = antisense sequence
  source 1..20: mol_type = other RNA
ccaccagtaaaggcagagac

SEQ ID NO: 859 - RNA, 20 nt, synthetic construct
  misc_feature 1..20: note = antisense sequence
  source 1..20: mol_type = other RNA
tccaccagtaaaggcagaga

SEQ ID NO: 860 - RNA, 20 nt, synthetic construct
  misc_feature 1..20: note = antisense sequence
  source 1..20: mol_type = other RNA
ttccaccagtaaaggcagag

SEQ ID NO: 861 - RNA, 20 nt, synthetic construct
  misc_feature 1..20: note = antisense sequence
  source 1..20: mol_type = other RNA
tcttccaccagtaaaggcag

SEQ ID NO: 862 - RNA, 20 nt, synthetic construct
  misc_feature 1..20: note = antisense sequence
  source 1..20: mol_type = other RNA
ctcttccaccagtaaaggca

SEQ ID NO: 863 - RNA, 20 nt, synthetic construct
  misc_feature 1..20: note = antisense sequence
  source 1..20: mol_type = other RNA
ttgtgtctttccatgtctac

SEQ ID NO: 864 - RNA, 20 nt, synthetic construct
  misc_feature 1..20: note = antisense sequence
  source 1..20: mol_type = other RNA
cattgtgtctttccatgtct

SEQ ID NO: 865 - RNA, 20 nt, synthetic construct
  misc_feature 1..20: note = antisense sequence
  source 1..20: mol_type = other RNA
ccattgtgtctttccatgtc

SEQ ID NO: 866 - RNA, 20 nt, synthetic construct
  misc_feature 1..20: note = antisense sequence
  source 1..20: mol_type = other RNA
accattgtgtctttccatgt

SEQ ID NO: 867 - RNA, 20 nt, synthetic construct
  misc_feature 1..20: note = antisense sequence
  source 1..20: mol_type = other RNA
caccattgtgtctttccatg

SEQ ID NO: 868 - RNA, 20 nt, synthetic construct
  misc_feature 1..20: note = antisense sequence
  source 1..20: mol_type = other RNA
ctcccaccattgtgtctttc

SEQ ID NO: 869 - RNA, 20 nt, synthetic construct
  misc_feature 1..20: note = antisense sequence
  source 1..20: mol_type = other RNA
gagcctctcccaccattgtg

SEQ ID NO: 870 - RNA, 20 nt, synthetic construct
  misc_feature 1..20: note = antisense sequence
  source 1..20: mol_type = other RNA
aagcaccttgggagcctctc

SEQ ID NO: 871 - RNA, 20 nt, synthetic construct
  misc_feature 1..20: note = antisense sequence
  source 1..20: mol_type = other RNA
taaagcaccttgggagcctc

SEQ ID NO: 872 - RNA, 20 nt, synthetic construct
  misc_feature 1..20: note = antisense sequence
  source 1..20: mol_type = other RNA
ataaagcaccttgggagcct

SEQ ID NO: 873 - RNA, 20 nt, synthetic construct
  misc_feature 1..20: note = antisense sequence
  source 1..20: mol_type = other RNA
tataaagcaccttgggagcc

SEQ ID NO: 874 - RNA, 20 nt, synthetic construct
  misc_feature 1..20: note = antisense sequence
  source 1..20: mol_type = other RNA
ctgcaacacaaacctaatct

SEQ ID NO: 875 - RNA, 20 nt, synthetic construct
  misc_feature 1..20: note = antisense sequence
  source 1..20: mol_type = other RNA
cctgcaacacaaacctaatc

SEQ ID NO: 876 - RNA, 20 nt, synthetic construct
  misc_feature 1..20: note = antisense sequence
  source 1..20: mol_type = other RNA
ttcctgcaacacaaacctaa

SEQ ID NO: 877 - RNA, 20 nt, synthetic construct
  misc_feature 1..20: note = antisense sequence
  source 1..20: mol_type = other RNA
tttcctgcaacacaaaccta

SEQ ID NO: 878 - RNA, 20 nt, synthetic construct
  misc_feature 1..20: note = antisense sequence
  source 1..20: mol_type = other RNA
ctttcctgcaacacaaacct

SEQ ID NO: 879 - RNA, 20 nt, synthetic construct
  misc_feature 1..20: note = antisense sequence
  source 1..20: mol_type = other RNA
actttcctgcaacacaaacc

SEQ ID NO: 880 - RNA, 20 nt, synthetic construct
  misc_feature 1..20: note = antisense sequence
  source 1..20: mol_type = other RNA
tactttcctgcaacacaaac

SEQ ID NO: 881 - RNA, 20 nt, synthetic construct
  misc_feature 1..20: note = antisense sequence
  source 1..20: mol_type = other RNA
cttgtgacccttaaacagtc

SEQ ID NO: 882 - RNA, 20 nt, synthetic construct
  misc_feature 1..20: note = antisense sequence
  source 1..20: mol_type = other RNA
gcttgtgacccttaaacagt

SEQ ID NO: 883 - RNA, 20 nt, synthetic construct
  misc_feature 1..20: note = antisense sequence
  source 1..20: mol_type = other RNA
agcttgtgacccttaaacag

SEQ ID NO: 884 - RNA, 20 nt, synthetic construct
  misc_feature 1..20: note = antisense sequence
  source 1..20: mol_type = other RNA
tagcttgtgacccttaaaca

SEQ ID NO: 885 - RNA, 20 nt, synthetic construct
  misc_feature 1..20: note = antisense sequence
  source 1..20: mol_type = other RNA
ttagcttgtgacccttaaac

SEQ ID NO: 886 - RNA, 20 nt, synthetic construct
  misc_feature 1..20: note = antisense sequence
  source 1..20: mol_type = other RNA
gcttagcttgtgacccttaa

SEQ ID NO: 887 - RNA, 20 nt, synthetic construct
  misc_feature 1..20: note = antisense sequence
  source 1..20: mol_type = other RNA
tatgggctcctgaaagatgg

SEQ ID NO: 888 - RNA, 20 nt, synthetic construct
  misc_feature 1..20: note = antisense sequence
  source 1..20: mol_type = other RNA
ttatgggctcctgaaagatg

SEQ ID NO: 889 - RNA, 20 nt, synthetic construct
  misc_feature 1..20: note = antisense sequence
  source 1..20: mol_type = other RNA
ggaattatgggctcctgaaa

SEQ ID NO: 890 - RNA, 20 nt, synthetic construct
  misc_feature 1..20: note = antisense sequence
  source 1..20: mol_type = other RNA
tggaattatgggctcctgaa

SEQ ID NO: 891 - RNA, 20 nt, synthetic construct
  misc_feature 1..20: note = antisense sequence
  source 1..20: mol_type = other RNA
atggaattatgggctcctga

SEQ ID NO: 892 - RNA, 20 nt, synthetic construct
  misc_feature 1..20: note = antisense sequence
  source 1..20: mol_type = other RNA
aatggaattatgggctcctg

SEQ ID NO: 893 - RNA, 20 nt, synthetic construct
  misc_feature 1..20: note = antisense sequence
  source 1..20: mol_type = other RNA
ttcatggacctcattggtga

SEQ ID NO: 894 - RNA, 20 nt, synthetic construct
  misc_feature 1..20: note = antisense sequence
  source 1..20: mol_type = other RNA
gttcatggacctcattggtg

SEQ ID NO: 895 - RNA, 20 nt, synthetic construct
  misc_feature 1..20: note = antisense sequence
  source 1..20: mol_type = other RNA
aaatggttcatggacctcat

SEQ ID NO: 896 - RNA, 20 nt, synthetic construct
  misc_feature 1..20: note = antisense sequence
  source 1..20: mol_type = other RNA
taaaatggttcatggacctc

SEQ ID NO: 897 - RNA, 20 nt, synthetic construct
  misc_feature 1..20: note = antisense sequence
  source 1..20: mol_type = other RNA
actgatggataatctttggg

SEQ ID NO: 898 - RNA, 20 nt, synthetic construct
  misc_feature 1..20: note = antisense sequence
  source 1..20: mol_type = other RNA
gactgatggataatctttgg

SEQ ID NO: 899 - RNA, 20 nt, synthetic construct
  misc_feature 1..20: note = antisense sequence
  source 1..20: mol_type = other RNA
gacaaaacaagggacaagag

SEQ ID NO: 900 - RNA, 20 nt, synthetic construct
  misc_feature 1..20: note = antisense sequence
  source 1..20: mol_type = other RNA
agacaaaacaagggacaaga

SEQ ID NO: 901 - RNA, 20 nt, synthetic construct
  misc_feature 1..20: note = antisense sequence
  source 1..20: mol_type = other RNA
tggatcagacaaaacaaggg

SEQ ID NO: 902 - RNA, 20 nt, synthetic construct
  misc_feature 1..20: note = antisense sequence
  source 1..20: mol_type = other RNA
ctggatcagacaaaacaagg

SEQ ID NO: 903 - RNA, 20 nt, synthetic construct
  misc_feature 1..20: note = antisense sequence
  source 1..20: mol_type = other RNA
tgaagctagaaaactggatc

SEQ ID NO: 904 - RNA, 20 nt, synthetic construct
  misc_feature 1..20: note = antisense sequence
  source 1..20: mol_type = other RNA
cttgaagctagaaaactgga

SEQ ID NO: 905 - RNA, 20 nt, synthetic construct
  misc_feature 1..20: note = antisense sequence
  source 1..20: mol_type = other RNA
gcttgaagctagaaaactgg

SEQ ID NO: 906 - RNA, 20 nt, synthetic construct
  misc_feature 1..20: note = antisense sequence
  source 1..20: mol_type = other RNA
tggcttgaagctagaaaact

SEQ ID NO: 907 - RNA, 20 nt, synthetic construct
  misc_feature 1..20: note = antisense sequence
  source 1..20: mol_type = other RNA
cctggcttgaagctagaaaa

SEQ ID NO: 908 - RNA, 20 nt, synthetic construct
  misc_feature 1..20: note = antisense sequence
  source 1..20: mol_type = other RNA
gcctggcttgaagctagaaa

SEQ ID NO: 909 - RNA, 20 nt, synthetic construct
  misc_feature 1..20: note = antisense sequence
  source 1..20: mol_type = other RNA
aaatgcctggcttgaagcta

SEQ ID NO: 910 - RNA, 20 nt, synthetic construct
  misc_feature 1..20: note = antisense sequence
  source 1..20: mol_type = other RNA
gaggtcctagtgatattatg

SEQ ID NO: 911 - RNA, 20 nt, synthetic construct
  misc_feature 1..20: note = antisense sequence
  source 1..20: mol_type = other RNA
cttatgaggtcctagtgata

SEQ ID NO: 912 - RNA, 20 nt, synthetic construct
  misc_feature 1..20: note = antisense sequence
  source 1..20: mol_type = other RNA
ccttatgaggtcctagtgat

SEQ ID NO: 913 - RNA, 20 nt, synthetic construct
  misc_feature 1..20: note = antisense sequence
  source 1..20: mol_type = other RNA
tccttatgaggtcctagtga

SEQ ID NO: 914 - RNA, 20 nt, synthetic construct
  misc_feature 1..20: note = antisense sequence
  source 1..20: mol_type = other RNA
ccatccttatgaggtcctag

SEQ ID NO: 915 - RNA, 20 nt, synthetic construct
  misc_feature 1..20: note = antisense sequence
  source 1..20: mol_type = other RNA
accatccttatgaggtccta

SEQ ID NO: 916 - RNA, 20 nt, synthetic construct
  misc_feature 1..20: note = antisense sequence
  source 1..20: mol_type = other RNA
ctctcatttgaccatcctta

SEQ ID NO: 917 - RNA, 20 nt, synthetic construct
  misc_feature 1..20: note = antisense sequence
  source 1..20: mol_type = other RNA
cagaccgcaataaagctaat

SEQ ID NO: 918 - RNA, 20 nt, synthetic construct
  misc_feature 1..20: note = antisense sequence
  source 1..20: mol_type = other RNA
ccagaccgcaataaagctaa

SEQ ID NO: 919 - RNA, 20 nt, synthetic construct
  misc_feature 1..20: note = antisense sequence
  source 1..20: mol_type = other RNA
cccagaccgcaataaagcta

SEQ ID NO: 920 - RNA, 20 nt, synthetic construct
  misc_feature 1..20: note = antisense sequence
  source 1..20: mol_type = other RNA
tcccagaccgcaataaagct

SEQ ID NO: 921 - RNA, 20 nt, synthetic construct
  misc_feature 1..20: note = antisense sequence
  source 1..20: mol_type = other RNA
gtcccagaccgcaataaagc

SEQ ID NO: 922 - RNA, 20 nt, synthetic construct
  misc_feature 1..20: note = antisense sequence
  source 1..20: mol_type = other RNA
agtcccagaccgcaataaag

SEQ ID NO: 923 - RNA, 20 nt, synthetic construct
  misc_feature 1..20: note = antisense sequence
  source 1..20: mol_type = other RNA
aagtcccagaccgcaataaa

SEQ ID NO: 924 - RNA, 20 nt, synthetic construct
  misc_feature 1..20: note = antisense sequence
  source 1..20: mol_type = other RNA
taagtcccagaccgcaataa

SEQ ID NO: 925 - RNA, 20 nt, synthetic construct
  misc_feature 1..20: note = antisense sequence
  source 1..20: mol_type = other RNA
ataagtcccagaccgcaata

SEQ ID NO: 926 - RNA, 20 nt, synthetic construct
  misc_feature 1..20: note = antisense sequence
  source 1..20: mol_type = other RNA
aataagtcccagaccgcaat

SEQ ID NO: 927 - RNA, 20 nt, synthetic construct
  misc_feature 1..20: note = antisense sequence
  source 1..20: mol_type = other RNA
aaataagtcccagaccgcaa

SEQ ID NO: 928 - RNA, 20 nt, synthetic construct
  misc_feature 1..20: note = antisense sequence
  source 1..20: mol_type = other RNA
gaaataagtcccagaccgca

SEQ ID NO: 929 - RNA, 20 nt, synthetic construct
  misc_feature 1..20: note = antisense sequence
  source 1..20: mol_type = other RNA
tgaaataagtcccagaccgc

SEQ ID NO: 930 - RNA, 20 nt, synthetic construct
  misc_feature 1..20: note = antisense sequence
  source 1..20: mol_type = other RNA
ttgaaataagtcccagaccg

SEQ ID NO: 931 - RNA, 20 nt, synthetic construct
  misc_feature 1..20: note = antisense sequence
  source 1..20: mol_type = other RNA
cttgaaataagtcccagacc

SEQ ID NO: 932 - RNA, 20 nt, synthetic construct
  misc_feature 1..20: note = antisense sequence
  source 1..20: mol_type = other RNA
tggcagacctcaaatatggt

SEQ ID NO: 933 - RNA, 20 nt, synthetic construct
  misc_feature 1..20: note = antisense sequence
  source 1..20: mol_type = other RNA
ttggcagacctcaaatatgg

SEQ ID NO: 934 - RNA, 20 nt, synthetic construct
  misc_feature 1..20: note = antisense sequence
  source 1..20: mol_type = other RNA
attggcagacctcaaatatg

SEQ ID NO: 935 - RNA, 20 nt, synthetic construct
  misc_feature 1..20: note = antisense sequence
  source 1..20: mol_type = other RNA
gaattggcagacctcaaata

SEQ ID NO: 936 - RNA, 20 nt, synthetic construct
  misc_feature 1..20: note = antisense sequence
  source 1..20: mol_type = other RNA
agaattggcagacctcaaat

SEQ ID NO: 937 - RNA, 20 nt, synthetic construct
  misc_feature 1..20: note = antisense sequence
  source 1..20: mol_type = other RNA
caagaattggcagacctcaa

SEQ ID NO: 938 - RNA, 20 nt, synthetic construct
  misc_feature 1..20: note = antisense sequence
  source 1..20: mol_type = other RNA
agtttcttgtttgtggacca

SEQ ID NO: 939 - RNA, 20 nt, synthetic construct
  misc_feature 1..20: note = antisense sequence
  source 1..20: mol_type = other RNA
cagaggtgaaagactgattc

SEQ ID NO: 940 - RNA, 20 nt, synthetic construct
  misc_feature 1..20: note = antisense sequence
  source 1..20: mol_type = other RNA
ttcactgaagaattgaggga

SEQ ID NO: 941 - RNA, 20 nt, synthetic construct
  misc_feature 1..20: note = antisense sequence
  source 1..20: mol_type = other RNA
tggattgtagctcttactct

SEQ ID NO: 942 - RNA, 20 nt, synthetic construct
  misc_feature 1..20: note = antisense sequence
  source 1..20: mol_type = other RNA
cctggattgtagctcttact

SEQ ID NO: 943 - RNA, 20 nt, synthetic construct
  misc_feature 1..20: note = antisense sequence
  source 1..20: mol_type = other RNA
tcctggattgtagctcttac

SEQ ID NO: 944 - RNA, 20 nt, synthetic construct
  misc_feature 1..20: note = antisense sequence
  source 1..20: mol_type = other RNA
atcctggattgtagctctta

SEQ ID NO: 945 - RNA, 20 nt, synthetic construct
  misc_feature 1..20: note = antisense sequence
  source 1..20: mol_type = other RNA
catcctggattgtagctctt

SEQ ID NO: 946 - RNA, 20 nt, synthetic construct
  misc_feature 1..20: note = antisense sequence
  source 1..20: mol_type = other RNA
aagcatcctggattgtagct

SEQ ID NO: 947 - RNA, 20 nt, synthetic construct
  misc_feature 1..20: note = antisense sequence
  source 1..20: mol_type = other RNA
caagcatcctggattgtagc

SEQ ID NO: 948 - RNA, 20 nt, synthetic construct
  misc_feature 1..20: note = antisense sequence
  source 1..20: mol_type = other RNA
tcaagcatcctggattgtag

SEQ ID NO: 949 - RNA, 20 nt, synthetic construct
  misc_feature 1..20: note = antisense sequence
  source 1..20: mol_type = other RNA
gtcaagcatcctggattgta

SEQ ID NO: 950 - RNA, 20 nt, synthetic construct
  misc_feature 1..20: note = antisense sequence
  source 1..20: mol_type = other RNA
agtcaagcatcctggattgt

SEQ ID NO: 951 - RNA, 20 nt, synthetic construct
  misc_feature 1..20: note = antisense sequence
  source 1..20: mol_type = other RNA
agaagtcaagcatcctggat

SEQ ID NO: 952 - RNA, 20 nt, synthetic construct
  misc_feature 1..20: note = antisense sequence
  source 1..20: mol_type = other RNA
tagaagtcaagcatcctgga

SEQ ID NO: 953 - RNA, 20 nt, synthetic construct
  misc_feature 1..20: note = antisense sequence
  source 1..20: mol_type = other RNA
ctagaagtcaagcatcctgg

SEQ ID NO: 954 - RNA, 20 nt, synthetic construct
  misc_feature 1..20: note = antisense sequence
  source 1..20: mol_type = other RNA
gggctagaagtcaagcatcc

SEQ ID NO: 955 - RNA, 20 nt, synthetic construct
  misc_feature 1..20: note = antisense sequence
  source 1..20: mol_type = other RNA
tgggctagaagtcaagcatc

SEQ ID NO: 956 - RNA, 20 nt, synthetic construct
  misc_feature 1..20: note = antisense sequence
  source 1..20: mol_type = other RNA
gaagagaactgggctagaag

SEQ ID NO: 957 - RNA, 20 nt, synthetic construct
  misc_feature 1..20: note = antisense sequence
  source 1..20: mol_type = other RNA
ttgctcttgagacacttcca

SEQ ID NO: 958 - RNA, 20 nt, synthetic construct
  misc_feature 1..20: note = antisense sequence
  source 1..20: mol_type = other RNA
gttgctcttgagacacttcc

SEQ ID NO: 959 - RNA, 20 nt, synthetic construct
  misc_feature 1..20: note = antisense sequence
  source 1..20: mol_type = other RNA
tgttgctcttgagacacttc

SEQ ID NO: 960 - RNA, 20 nt, synthetic construct
  misc_feature 1..20: note = antisense sequence
  source 1..20: mol_type = other RNA
gggcttttagctcttttgct

SEQ ID NO: 961 - RNA, 20 nt, synthetic construct
  misc_feature 1..20: note = antisense sequence
  source 1..20: mol_type = other RNA
agggcttttagctcttttgc

SEQ ID NO: 962 - RNA, 20 nt, synthetic construct
  misc_feature 1..20: note = antisense sequence
  source 1..20: mol_type = other RNA
cagggcttttagctcttttg

SEQ ID NO: 963 - RNA, 20 nt, synthetic construct
  misc_feature 1..20: note = antisense sequence
  source 1..20: mol_type = other RNA
taccagggcttttagctctt

SEQ ID NO: 964 - RNA, 20 nt, synthetic construct
  misc_feature 1..20: note = antisense sequence
  source 1..20: mol_type = other RNA
taagctaggtgagtcaaatg

SEQ ID NO: 965 - RNA, 20 nt, synthetic construct
  misc_feature 1..20: note = antisense sequence
  source 1..20: mol_type = other RNA
gataagctaggtgagtcaaa

SEQ ID NO: 966 - RNA, 20 nt, synthetic construct
  misc_feature 1..20: note = antisense sequence
  source 1..20: mol_type = other RNA
tgataagctaggtgagtcaa

SEQ ID NO: 967 - RNA, 20 nt, synthetic construct
  misc_feature 1..20: note = antisense sequence
  source 1..20: mol_type = other RNA
atgataagctaggtgagtca

SEQ ID NO: 968 - RNA, 20 nt, synthetic construct
  misc_feature 1..20: note = antisense sequence
  source 1..20: mol_type = other RNA
aatgataagctaggtgagtc

SEQ ID NO: 969 - RNA, 20 nt, synthetic construct
  misc_feature 1..20: note = antisense sequence
  source 1..20: mol_type = other RNA
gttgaactctggaaggattt

SEQ ID NO: 970 - RNA, 20 nt, synthetic construct
  misc_feature 1..20: note = antisense sequence
  source 1..20: mol_type = other RNA
tgttgaactctggaaggatt

SEQ ID NO: 971 - RNA, 20 nt, synthetic construct
  misc_feature 1..20: note = antisense sequence
  source 1..20: mol_type = other RNA
ttgttgaactctggaaggat

SEQ ID NO: 972 - RNA, 20 nt, synthetic construct
  misc_feature 1..20: note = antisense sequence
  source 1..20: mol_type = other RNA
ctttagtgctgcctatcttt

SEQ ID NO: 973 - RNA, 20 nt, synthetic construct
  misc_feature 1..20: note = antisense sequence
  source 1..20: mol_type = other RNA
cctttagtgctgcctatctt

SEQ ID NO: 974 - RNA, 20 nt, synthetic construct
  misc_feature 1..20: note = antisense sequence
  source 1..20: mol_type = other RNA
tcctttagtgctgcctatct

SEQ ID NO: 975 - RNA, 20 nt, synthetic construct
  misc_feature 1..20: note = antisense sequence
  source 1..20: mol_type = other RNA
cttcctttagtgctgcctat

SEQ ID NO: 976 - RNA, 20 nt, synthetic construct
  misc_feature 1..20: note = antisense sequence
  source 1..20: mol_type = other RNA
gcttcctttagtgctgccta

SEQ ID NO: 977 - RNA, 20 nt, synthetic construct
  misc_feature 1..20: note = antisense sequence
  source 1..20: mol_type = other RNA
tgcttcctttagtgctgcct

SEQ ID NO: 978 - RNA, 20 nt, synthetic construct
  misc_feature 1..20: note = antisense sequence
  source 1..20: mol_type = other RNA
tccctgcttcctttagtgct

SEQ ID NO: 979 - RNA, 20 nt, synthetic construct
  misc_feature 1..20: note = antisense sequence
  source 1..20: mol_type = other RNA
atccctgcttcctttagtgc

SEQ ID NO: 980 - RNA, 20 nt, synthetic construct
  misc_feature 1..20: note = antisense sequence
  source 1..20: mol_type = other RNA
tttcatccctgcttccttta

SEQ ID NO: 981 - RNA, 20 nt, synthetic construct
  misc_feature 1..20: note = antisense sequence
  source 1..20: mol_type = other RNA
aggaactttctcgtttgcta

SEQ ID NO: 982 - RNA, 20 nt, synthetic construct
  misc_feature 1..20: note = antisense sequence
  source 1..20: mol_type = other RNA
taggaactttctcgtttgct

SEQ ID NO: 983 - RNA, 20 nt, synthetic construct
  misc_feature 1..20: note = antisense sequence
  source 1..20: mol_type = other RNA
ctaggaactttctcgtttgc

SEQ ID NO: 984 - RNA, 20 nt, synthetic construct
  misc_feature 1..20: note = antisense sequence
  source 1..20: mol_type = other RNA
gctaggaactttctcgtttg

SEQ ID NO: 985 - RNA, 20 nt, synthetic construct
  misc_feature 1..20: note = antisense sequence
  source 1..20: mol_type = other RNA
atgctaggaactttctcgtt

SEQ ID NO: 986 - RNA, 20 nt, synthetic construct
  misc_feature 1..20: note = antisense sequence
  source 1..20: mol_type = other RNA
tatgctaggaactttctcgt

SEQ ID NO: 987 - RNA, 20 nt, synthetic construct
  misc_feature 1..20: note = antisense sequence
  source 1..20: mol_type = other RNA
agtaacctttgttccctaca

SEQ ID NO: 988 - RNA, 20 nt, synthetic construct
  misc_feature 1..20: note = antisense sequence
  source 1..20: mol_type = other RNA
aagtaacctttgttccctac

SEQ ID NO: 989 - RNA, 20 nt, synthetic construct
  misc_feature 1..20: note = antisense sequence
  source 1..20: mol_type = other RNA
cctatattccaccttgaaag

SEQ ID NO: 990 - RNA, 20 nt, synthetic construct
  misc_feature 1..20: note = antisense sequence
  source 1..20: mol_type = other RNA
ccctatattccaccttgaaa

SEQ ID NO: 991 - RNA, 20 nt, synthetic construct
  misc_feature 1..20: note = antisense sequence
  source 1..20: mol_type = other RNA
ggcaccctatattccacctt

SEQ ID NO: 992 - RNA, 20 nt, synthetic construct
  misc_feature 1..20: note = antisense sequence
  source 1..20: mol_type = other RNA
agggcaccctatattccacc

SEQ ID NO: 993 - RNA, 20 nt, synthetic construct
  misc_feature 1..20: note = antisense sequence
  source 1..20: mol_type = other RNA
cagggcaccctatattccac

SEQ ID NO: 994 - RNA, 20 nt, synthetic construct
  misc_feature 1..20: note = antisense sequence
  source 1..20: mol_type = other RNA
tcagggcaccctatattcca

SEQ ID NO: 995 - RNA, 20 nt, synthetic construct
  misc_feature 1..20: note = antisense sequence
  source 1..20: mol_type = other RNA
ctcagggcaccctatattcc

SEQ ID NO: 996 - RNA, 20 nt, synthetic construct
  misc_feature 1..20: note = antisense sequence
  source 1..20: mol_type = other RNA
cctcagggcaccctatattc

SEQ ID NO: 997 - RNA, 20 nt, synthetic construct
  misc_feature 1..20: note = antisense sequence
  source 1..20: mol_type = other RNA
ccctcagggcaccctatatt

SEQ ID NO: 998 - RNA, 20 nt, synthetic construct
  misc_feature 1..20: note = antisense sequence
  source 1..20: mol_type = other RNA
aatttgcactggccttacaa

SEQ ID NO: 999 - RNA, 20 nt, synthetic construct
  misc_feature 1..20: note = antisense sequence
  source 1..20: mol_type = other RNA
caatttgcactggccttaca

SEQ ID NO: 1000 - RNA, 20 nt, synthetic construct
  misc_feature 1..20: note = antisense sequence
  source 1..20: mol_type = other RNA
ccaatttgcactggccttac

SEQ ID NO: 1001 - RNA, 20 nt, synthetic construct
  misc_feature 1..20: note = antisense sequence
  source 1..20: mol_type = other RNA
aatcccaatttgcactggcc

SEQ ID NO: 1002 - RNA, 20 nt, synthetic construct
  misc_feature 1..20: note = antisense sequence
  source 1..20: mol_type = other RNA
caatcccaatttgcactggc

SEQ ID NO: 1003 - RNA, 20 nt, synthetic construct
  misc_feature 1..20: note = antisense sequence
  source 1..20: mol_type = other RNA
acaatcccaatttgcactgg

SEQ ID NO: 1004 - RNA, 20 nt, synthetic construct
  misc_feature 1..20: note = antisense sequence
  source 1..20: mol_type = other RNA
tacaatcccaatttgcactg

SEQ ID NO: 1005 - RNA, 20 nt, synthetic construct
  misc_feature 1..20: note = antisense sequence
  source 1..20: mol_type = other RNA
ctacaatcccaatttgcact

SEQ ID NO: 1006 - RNA, 20 nt, synthetic construct
  misc_feature 1..20: note = antisense sequence
  source 1..20: mol_type = other RNA
gtctacaatcccaatttgca

SEQ ID NO: 1007 - RNA, 20 nt, synthetic construct
  misc_feature 1..20: note = antisense sequence
  source 1..20: mol_type = other RNA
cgtctacaatcccaatttgc

SEQ ID NO: 1008 - RNA, 20 nt, synthetic construct
  misc_feature 1..20: note = antisense sequence
  source 1..20: mol_type = other RNA
gaattaacgtctacaatccc

SEQ ID NO: 1009 - RNA, 20 nt, synthetic construct
  misc_feature 1..20: note = antisense sequence
  source 1..20: mol_type = other RNA
ccctatgaattaacgtctac

SEQ ID NO: 1010 - RNA, 20 nt, synthetic construct
  misc_feature 1..20: note = antisense sequence
  source 1..20: mol_type = other RNA
tttggattcccattccctat

SEQ ID NO: 1011 - RNA, 20 nt, synthetic construct
  misc_feature 1..20: note = antisense sequence
  source 1..20: mol_type = other RNA
ttttggattcccattcccta

SEQ ID NO: 1012 - RNA, 20 nt, synthetic construct
  misc_feature 1..20: note = antisense sequence
  source 1..20: mol_type = other RNA
attttggattcccattccct

SEQ ID NO: 1013 - RNA, 20 nt, synthetic construct
  misc_feature 1..20: note = antisense sequence
  source 1..20: mol_type = other RNA
gtgcctccataattcagtat

SEQ ID NO: 1014 - RNA, 20 nt, synthetic construct
  misc_feature 1..20: note = antisense sequence
  source 1..20: mol_type = other RNA
agtgtgcctccataattcag

SEQ ID NO: 1015 - RNA, 20 nt, synthetic construct
  misc_feature 1..20: note = antisense sequence
  source 1..20: mol_type = other RNA
cagtgtgcctccataattca

SEQ ID NO: 1016 - RNA, 20 nt, synthetic construct
  misc_feature 1..20: note = antisense sequence
  source 1..20: mol_type = other RNA
atcagtgtgcctccataatt

SEQ ID NO: 1017 - RNA, 20 nt, synthetic construct
  misc_feature 1..20: note = antisense sequence
  source 1..20: mol_type = other RNA
tatcagtgtgcctccataat

SEQ ID NO: 1018 - RNA, 20 nt, synthetic construct
  misc_feature 1..20: note = antisense sequence
  source 1..20: mol_type = other RNA
atatcagtgtgcctccataa

SEQ ID NO: 1019 - RNA, 20 nt, synthetic construct
  misc_feature 1..20: note = antisense sequence
  source 1..20: mol_type = other RNA
aatatcagtgtgcctccata

SEQ ID NO: 1020 - RNA, 20 nt, synthetic construct
  misc_feature 1..20: note = antisense sequence
  source 1..20: mol_type = other RNA
aaatatcagtgtgcctccat

SEQ ID NO: 1021 - RNA, 20 nt, synthetic construct
  misc_feature 1..20: note = antisense sequence
  source 1..20: mol_type = other RNA
aaaatatcagtgtgcctcca

SEQ ID NO: 1022 - RNA, 20 nt, synthetic construct
  misc_feature 1..20: note = antisense sequence
  source 1..20: mol_type = other RNA
aaccactttgggccatttta

SEQ ID NO: 1023 - RNA, 20 nt, synthetic construct
  misc_feature 1..20: note = antisense sequence
  source 1..20: mol_type = other RNA
aagttatgaggcaaaccact

SEQ ID NO: 1024 - RNA, 20 nt, synthetic construct
  misc_feature 1..20: note = antisense sequence
  source 1..20: mol_type = other RNA
taagttatgaggcaaaccac

SEQ ID NO: 1025 - RNA, 20 nt, synthetic construct
  misc_feature 1..20: note = antisense sequence
  source 1..20: mol_type = other RNA
ctaggtcatcatcatactct

SEQ ID NO: 1026 - RNA, 20 nt, synthetic construct
  misc_feature 1..20: note = antisense sequence
  source 1..20: mol_type = other RNA
tttccttctgtccagcctag

SEQ ID NO: 1027 - RNA, 20 nt, synthetic construct
  misc_feature 1..20: note = antisense sequence
  source 1..20: mol_type = other RNA
tcctgctcttttatcacctc

SEQ ID NO: 1028 - RNA, 20 nt, synthetic construct
  misc_feature 1..20: note = antisense sequence
  source 1..20: mol_type = other RNA
tttcctgctcttttatcacc

SEQ ID NO: 1029 - RNA, 20 nt, synthetic construct
  misc_feature 1..20: note = antisense sequence
  source 1..20: mol_type = other RNA
gtccctttcctgctctttta

SEQ ID NO: 1030 - RNA, 20 nt, synthetic construct
  misc_feature 1..20: note = antisense sequence
  source 1..20: mol_type = other RNA
aacctagaggatttgaaagg

SEQ ID NO: 1031 - RNA, 20 nt, synthetic construct
  misc_feature 1..20: note = antisense sequence
  source 1..20: mol_type = other RNA
caacctagaggatttgaaag

SEQ ID NO: 1032 - RNA, 20 nt, synthetic construct
  misc_feature 1..20: note = antisense sequence
  source 1..20: mol_type = other RNA
ccaacctagaggatttgaaa

SEQ ID NO: 1033 - RNA, 20 nt, synthetic construct
  misc_feature 1..20: note = antisense sequence
  source 1..20: mol_type = other RNA
accaacctagaggatttgaa

SEQ ID NO: 1034 - RNA, 20 nt, synthetic construct
  misc_feature 1..20: note = antisense sequence
  source 1..20: mol_type = other RNA
aaccaacctagaggatttga

SEQ ID NO: 1035 - RNA, 20 nt, synthetic construct
  misc_feature 1..20: note = antisense sequence
  source 1..20: mol_type = other RNA
gaaccaacctagaggatttg

SEQ ID NO: 1036 - RNA, 20 nt, synthetic construct
  misc_feature 1..20: note = antisense sequence
  source 1..20: mol_type = other RNA
ggaaccaacctagaggattt

SEQ ID NO: 1037 - RNA, 20 nt, synthetic construct
  misc_feature 1..20: note = antisense sequence
  source 1..20: mol_type = other RNA
gggaaccaacctagaggatt

SEQ ID NO: 1038 - RNA, 20 nt, synthetic construct
  misc_feature 1..20: note = antisense sequence
  source 1..20: mol_type = other RNA
aaactcacagcttgggaacc

SEQ ID NO: 1039 - RNA, 20 nt, synthetic construct
  misc_feature 1..20: note = antisense sequence
  source 1..20: mol_type = other RNA
ctattatccactgtcacttc

SEQ ID NO: 1040 - RNA, 20 nt, synthetic construct
  misc_feature 1..20: note = antisense sequence
  source 1..20: mol_type = other RNA
gctattatccactgtcactt

SEQ ID NO: 1041 - RNA, 20 nt, synthetic construct
  misc_feature 1..20: note = antisense sequence
  source 1..20: mol_type = other RNA
tgctattatccactgtcact

SEQ ID NO: 1042 - RNA, 20 nt, synthetic construct
  misc_feature 1..20: note = antisense sequence
  source 1..20: mol_type = other RNA
gtgctattatccactgtcac

SEQ ID NO: 1043 - RNA, 20 nt, synthetic construct
  misc_feature 1..20: note = antisense sequence
  source 1..20: mol_type = other RNA
tgtgctattatccactgtca

SEQ ID NO: 1044 - RNA, 20 nt, synthetic construct
  misc_feature 1..20: note = antisense sequence
  source 1..20: mol_type = other RNA
atgtgctattatccactgtc

SEQ ID NO: 1045 - RNA, 20 nt, synthetic construct
  misc_feature 1..20: note = antisense sequence
  source 1..20: mol_type = other RNA
ctactaccaccatcctatat

SEQ ID NO: 1046 - RNA, 20 nt, synthetic construct
  misc_feature 1..20: note = antisense sequence
  source 1..20: mol_type = other RNA
ttctactaccaccatcctat

SEQ ID NO: 1047 - RNA, 20 nt, synthetic construct
  misc_feature 1..20: note = antisense sequence
  source 1..20: mol_type = other RNA
tctttctactaccaccatcc

SEQ ID NO: 1048 - RNA, 20 nt, synthetic construct
  misc_feature 1..20: note = antisense sequence
  source 1..20: mol_type = other RNA
ctctttctactaccaccatc

SEQ ID NO: 1049 - RNA, 20 nt, synthetic construct
  misc_feature 1..20: note = antisense sequence
  source 1..20: mol_type = other RNA
cctctctttctactaccacc

SEQ ID NO: 1050 - RNA, 20 nt, synthetic construct
  misc_feature 1..20: note = antisense sequence
  source 1..20: mol_type = other RNA
ccctctctttctactaccac

SEQ ID NO: 1051 - RNA, 20 nt, synthetic construct
  misc_feature 1..20: note = antisense sequence
  source 1..20: mol_type = other RNA
taccctctctttctactacc

SEQ ID NO: 1052 - RNA, 20 nt, synthetic construct
  misc_feature 1..20: note = antisense sequence
  source 1..20: mol_type = other RNA
tccataccctctctttctac

SEQ ID NO: 1053 - RNA, 20 nt, synthetic construct
  misc_feature 1..20: note = antisense sequence
  source 1..20: mol_type = other RNA
ctccataccctctctttcta

SEQ ID NO: 1054 - RNA, 20 nt, synthetic construct
  misc_feature 1..20: note = antisense sequence
  source 1..20: mol_type = other RNA
actccataccctctctttct

SEQ ID NO: 1055 - RNA, 20 nt, synthetic construct
  misc_feature 1..20: note = antisense sequence
  source 1..20: mol_type = other RNA
aactccataccctctctttc

SEQ ID NO: 1056 - RNA, 20 nt, synthetic construct
  misc_feature 1..20: note = antisense sequence
  source 1..20: mol_type = other RNA
taactccataccctctcttt

SEQ ID NO: 1057 - RNA, 20 nt, synthetic construct
  misc_feature 1..20: note = antisense sequence
  source 1..20: mol_type = other RNA
ataactccataccctctctt

SEQ ID NO: 1058 - RNA, 20 nt, synthetic construct
  misc_feature 1..20: note = antisense sequence
  source 1..20: mol_type = other RNA
gcctgcataactccataccc

SEQ ID NO: 1059 - RNA, 20 nt, synthetic construct
  misc_feature 1..20: note = antisense sequence
  source 1..20: mol_type = other RNA
ggcctgcataactccatacc

SEQ ID NO: 1060 - RNA, 20 nt, synthetic construct
  misc_feature 1..20: note = antisense sequence
  source 1..20: mol_type = other RNA
gagctatcacgtattgaatg

SEQ ID NO: 1061 - RNA, 20 nt, synthetic construct
  misc_feature 1..20: note = antisense sequence
  source 1..20: mol_type = other RNA
gaagagctatcacgtattga

SEQ ID NO: 1062 - RNA, 20 nt, synthetic construct
  misc_feature 1..20: note = antisense sequence
  source 1..20: mol_type = other RNA
tgaagagctatcacgtattg

SEQ ID NO: 1063 - RNA, 20 nt, synthetic construct
  misc_feature 1..20: note = antisense sequence
  source 1..20: mol_type = other RNA
acacagtgggatcttaacaa

SEQ ID NO: 1064 - RNA, 20 nt, synthetic construct
  misc_feature 1..20: note = antisense sequence
  source 1..20: mol_type = other RNA
gtaagcacacagtgggatct

SEQ ID NO: 1065 - RNA, 20 nt, synthetic construct
  misc_feature 1..20: note = antisense sequence
  source 1..20: mol_type = other RNA
tggtaagcacacagtgggat

SEQ ID NO: 1066 - RNA, 20 nt, synthetic construct
  misc_feature 1..20: note = antisense sequence
  source 1..20: mol_type = other RNA
gtggtaagcacacagtggga

SEQ ID NO: 1067 - RNA, 20 nt, synthetic construct
  misc_feature 1..20: note = antisense sequence
  source 1..20: mol_type = other RNA
cagtggtaagcacacagtgg

SEQ ID NO: 1068 - RNA, 20 nt, synthetic construct
  misc_feature 1..20: note = antisense sequence
  source 1..20: mol_type = other RNA
acagtggtaagcacacagtg

SEQ ID NO: 1069 - RNA, 20 nt, synthetic construct
  misc_feature 1..20: note = antisense sequence
  source 1..20: mol_type = other RNA
cacagtggtaagcacacagt

SEQ ID NO: 1070 - RNA, 20 nt, synthetic construct
  misc_feature 1..20: note = antisense sequence
  source 1..20: mol_type = other RNA
tcacagtggtaagcacacag

SEQ ID NO: 1071 - RNA, 20 nt, synthetic construct
  misc_feature 1..20: note = antisense sequence
  source 1..20: mol_type = other RNA
aaaagccacagaatcacagt

SEQ ID NO: 1072 - RNA, 20 nt, synthetic construct
  misc_feature 1..20: note = antisense sequence
  source 1..20: mol_type = other RNA
ctgccaaagattaaaagcca

SEQ ID NO: 1073 - RNA, 20 nt, synthetic construct
  misc_feature 1..20: note = antisense sequence
  source 1..20: mol_type = other RNA
tctgccaaagattaaaagcc

SEQ ID NO: 1074 - RNA, 20 nt, synthetic construct
  misc_feature 1..20: note = antisense sequence
  source 1..20: mol_type = other RNA
gtctgccaaagattaaaagc

SEQ ID NO: 1075 - RNA, 20 nt, synthetic construct
  misc_feature 1..20: note = antisense sequence
  source 1..20: mol_type = other RNA
ttcccatagtctgccaaaga

SEQ ID NO: 1076 - RNA, 20 nt, synthetic construct
  misc_feature 1..20: note = antisense sequence
  source 1..20: mol_type = other RNA
tttcccatagtctgccaaag

SEQ ID NO: 1077 - RNA, 20 nt, synthetic construct
  misc_feature 1..20: note = antisense sequence
  source 1..20: mol_type = other RNA
ctttcccatagtctgccaaa

SEQ ID NO: 1078 - RNA, 20 nt, synthetic construct
  misc_feature 1..20: note = antisense sequence
  source 1..20: mol_type = other RNA
tctttcccatagtctgccaa

SEQ ID NO: 1079 - RNA, 20 nt, synthetic construct
  misc_feature 1..20: note = antisense sequence
  source 1..20: mol_type = other RNA
atctttcccatagtctgcca

SEQ ID NO: 1080 - RNA, 20 nt, synthetic construct
  misc_feature 1..20: note = antisense sequence
  source 1..20: mol_type = other RNA
tatctttcccatagtctgcc

SEQ ID NO: 1081 - RNA, 20 nt, synthetic construct
  misc_feature 1..20: note = antisense sequence
  source 1..20: mol_type = other RNA
ttatctttcccatagtctgc

SEQ ID NO: 1082 - RNA, 20 nt, synthetic construct
  misc_feature 1..20: note = antisense sequence
  source 1..20: mol_type = other RNA
ctttgaagtgctccttgatc

SEQ ID NO: 1083 - RNA, 20 nt, synthetic construct
  misc_feature 1..20: note = antisense sequence
  source 1..20: mol_type = other RNA
gaaagagagagagaatgagg

SEQ ID NO: 1084 - RNA, 20 nt, synthetic construct
  misc_feature 1..20: note = antisense sequence
  source 1..20: mol_type = other RNA
agaaagagagagagaatgag

SEQ ID NO: 1085 - RNA, 20 nt, synthetic construct
  misc_feature 1..20: note = antisense sequence
  source 1..20: mol_type = other RNA
gagaaagagagagagaatga

SEQ ID NO: 1086 - RNA, 20 nt, synthetic construct
  misc_feature 1..20: note = antisense sequence
  source 1..20: mol_type = other RNA
agagaaagagagagagaatg

SEQ ID NO: 1087 - RNA, 20 nt, synthetic construct
  misc_feature 1..20: note = antisense sequence
  source 1..20: mol_type = other RNA
gagagaaagagagagagaat

SEQ ID NO: 1088 - RNA, 20 nt, synthetic construct
  misc_feature 1..20: note = antisense sequence
  source 1..20: mol_type = other RNA
agagagaaagagagagagaa

SEQ ID NO: 1089 - RNA, 20 nt, synthetic construct
  misc_feature 1..20: note = antisense sequence
  source 1..20: mol_type = other RNA
gagagagaaagagagagaga

SEQ ID NO: 1090 - RNA, 20 nt, synthetic construct
  misc_feature 1..20: note = antisense sequence
  source 1..20: mol_type = other RNA
tgagagagaaagagagagag

SEQ ID NO: 1091 - RNA, 20 nt, synthetic construct
  misc_feature 1..20: note = antisense sequence
  source 1..20: mol_type = other RNA
gtgagagagaaagagagaga

SEQ ID NO: 1092 - RNA, 20 nt, synthetic construct
  misc_feature 1..20: note = antisense sequence
  source 1..20: mol_type = other RNA
tgtgagagagaaagagagag

SEQ ID NO: 1093 - RNA, 20 nt, synthetic construct
  misc_feature 1..20: note = antisense sequence
  source 1..20: mol_type = other RNA
ttgtgagagagaaagagaga

SEQ ID NO: 1094 - RNA, 20 nt, synthetic construct
  misc_feature 1..20: note = antisense sequence
  source 1..20: mol_type = other RNA
tttgtgagagagaaagagag

SEQ ID NO: 1095 - RNA, 20 nt, synthetic construct
  misc_feature 1..20: note = antisense sequence
  source 1..20: mol_type = other RNA
gtgaaagtgtgcttgtgtgt

SEQ ID NO: 1096 - RNA, 20 nt, synthetic construct
  misc_feature 1..20: note = antisense sequence
  source 1..20: mol_type = other RNA
ggtgaaagtgtgcttgtgtg

SEQ ID NO: 1097 - RNA, 20 nt, synthetic construct
  misc_feature 1..20: note = antisense sequence
  source 1..20: mol_type = other RNA
gggtgaaagtgtgcttgtgt

SEQ ID NO: 1098 - RNA, 20 nt, synthetic construct
  misc_feature 1..20: note = antisense sequence
  source 1..20: mol_type = other RNA
agggtgaaagtgtgcttgtg

SEQ ID NO: 1099 - RNA, 20 nt, synthetic construct
  misc_feature 1..20: note = antisense sequence
  source 1..20: mol_type = other RNA
tagggtgaaagtgtgcttgt

SEQ ID NO: 1100 - RNA, 20 nt, synthetic construct
  misc_feature 1..20: note = antisense sequence
  source 1..20: mol_type = other RNA
gtagggtgaaagtgtgcttg

SEQ ID NO: 1101 - RNA, 20 nt, synthetic construct
  misc_feature 1..20: note = antisense sequence
  source 1..20: mol_type = other RNA
ggtagggtgaaagtgtgctt

SEQ ID NO: 1102 - RNA, 20 nt, synthetic construct
  misc_feature 1..20: note = antisense sequence
  source 1..20: mol_type = other RNA
tggtagggtgaaagtgtgct

SEQ ID NO: 1103 - RNA, 20 nt, synthetic construct
  misc_feature 1..20: note = antisense sequence
  source 1..20: mol_type = other RNA
ttggtagggtgaaagtgtgc

SEQ ID NO: 1104 - RNA, 20 nt, synthetic construct
  misc_feature 1..20: note = antisense sequence
  source 1..20: mol_type = other RNA
attggtagggtgaaagtgtg

SEQ ID NO: 1105 - RNA, 20 nt, synthetic construct
  misc_feature 1..20: note = antisense sequence
  source 1..20: mol_type = other RNA
aattggtagggtgaaagtgt

SEQ ID NO: 1106 - RNA, 20 nt, synthetic construct
  misc_feature 1..20: note = antisense sequence
  source 1..20: mol_type = other RNA
taattggtagggtgaaagtg

SEQ ID NO: 1107 - RNA, 20 nt, synthetic construct
  misc_feature 1..20: note = antisense sequence
  source 1..20: mol_type = other RNA
ctaattggtagggtgaaagt

SEQ ID NO: 1108 - RNA, 20 nt, synthetic construct
  misc_feature 1..20: note = antisense sequence
  source 1..20: mol_type = other RNA
gcctatccaaaggacactgt

SEQ ID NO: 1109 - RNA, 20 nt, synthetic construct
  misc_feature 1..20: note = antisense sequence
  source 1..20: mol_type = other RNA
tgcctatccaaaggacactg

SEQ ID NO: 1110 - RNA, 20 nt, synthetic construct
  misc_feature 1..20: note = antisense sequence
  source 1..20: mol_type = other RNA
ttgcctatccaaaggacact

SEQ ID NO: 1111 - RNA, 20 nt, synthetic construct
  misc_feature 1..20: note = antisense sequence
  source 1..20: mol_type = other RNA
aaggtgatttgcctatccaa

SEQ ID NO: 1112 - RNA, 20 nt, synthetic construct
  misc_feature 1..20: note = antisense sequence
  source 1..20: mol_type = other RNA
gaaggtgatttgcctatcca

SEQ ID NO: 1113 - RNA, 20 nt, synthetic construct
  misc_feature 1..20: note = antisense sequence
  source 1..20: mol_type = other RNA
tgaaggtgatttgcctatcc

SEQ ID NO: 1114 - RNA, 20 nt, synthetic construct
  misc_feature 1..20: note = antisense sequence
  source 1..20: mol_type = other RNA
gtgaaggtgatttgcctatc

SEQ ID NO: 1115 - RNA, 20 nt, synthetic construct
  misc_feature 1..20: note = antisense sequence
  source 1..20: mol_type = other RNA
tgtgaaggtgatttgcctat

SEQ ID NO: 1116 - RNA, 20 nt, synthetic construct
  misc_feature 1..20: note = antisense sequence
  source 1..20: mol_type = other RNA
gtgtgaaggtgatttgccta

SEQ ID NO: 1117 - RNA, 20 nt, synthetic construct
  misc_feature 1..20: note = antisense sequence
  source 1..20: mol_type = other RNA
agtgtgaaggtgatttgcct

SEQ ID NO: 1118 - RNA, 20 nt, synthetic construct
  misc_feature 1..20: note = antisense sequence
  source 1..20: mol_type = other RNA
aagtgtgaaggtgatttgcc

SEQ ID NO: 1119 - RNA, 20 nt, synthetic construct
  misc_feature 1..20: note = antisense sequence
  source 1..20: mol_type = other RNA
caagtgtgaaggtgatttgc

SEQ ID NO: 1120 - RNA, 20 nt, synthetic construct
  misc_feature 1..20: note = antisense sequence
  source 1..20: mol_type = other RNA
tcaagtgtgaaggtgatttg

SEQ ID NO: 1121 - RNA, 20 nt, synthetic construct
  misc_feature 1..20: note = antisense sequence
  source 1..20: mol_type = other RNA
ctcaagtgtgaaggtgattt

SEQ ID NO: 1122 - RNA, 20 nt, synthetic construct
  misc_feature 1..20: note = antisense sequence
  source 1..20: mol_type = other RNA
actcaagtgtgaaggtgatt

SEQ ID NO: 1123 - RNA, 20 nt, synthetic construct
  misc_feature 1..20: note = antisense sequence
  source 1..20: mol_type = other RNA
cactcaagtgtgaaggtgat

SEQ ID NO: 1124 - RNA, 20 nt, synthetic construct
  misc_feature 1..20: note = antisense sequence
  source 1..20: mol_type = other RNA
gaactaatcacactcaagtg

SEQ ID NO: 1125 - RNA, 20 nt, synthetic construct
  misc_feature 1..20: note = antisense sequence
  source 1..20: mol_type = other RNA
cagcaacttttcactaagca

SEQ ID NO: 1126 - RNA, 20 nt, synthetic construct
  misc_feature 1..20: note = antisense sequence
  source 1..20: mol_type = other RNA
ccagcaacttttcactaagc

SEQ ID NO: 1127 - RNA, 20 nt, synthetic construct
  misc_feature 1..20: note = antisense sequence
  source 1..20: mol_type = other RNA
acccagcaacttttcactaa

SEQ ID NO: 1128 - RNA, 20 nt, synthetic construct
  misc_feature 1..20: note = antisense sequence
  source 1..20: mol_type = other RNA
agaacccagcaacttttcac

SEQ ID NO: 1129 - RNA, 20 nt, synthetic construct
  misc_feature 1..20: note = antisense sequence
  source 1..20: mol_type = other RNA
gagaacccagcaacttttca

SEQ ID NO: 1130 - RNA, 20 nt, synthetic construct
  misc_feature 1..20: note = antisense sequence
  source 1..20: mol_type = other RNA
aggagaacccagcaactttt

SEQ ID NO: 1131 - RNA, 20 nt, synthetic construct
  misc_feature 1..20: note = antisense sequence
  source 1..20: mol_type = other RNA
caggagaacccagcaacttt

SEQ ID NO: 1132 - RNA, 20 nt, synthetic construct
  misc_feature 1..20: note = antisense sequence
  source 1..20: mol_type = other RNA
ccaggagaacccagcaactt

SEQ ID NO: 1133 - RNA, 20 nt, synthetic construct
  misc_feature 1..20: note = antisense sequence
  source 1..20: mol_type = other RNA
attccaggagaacccagcaa

SEQ ID NO: 1134 - RNA, 20 nt, synthetic construct
  misc_feature 1..20: note = antisense sequence
  source 1..20: mol_type = other RNA
ccaattccaggagaacccag

SEQ ID NO: 1135 - RNA, 20 nt, synthetic construct
  misc_feature 1..20: note = antisense sequence
  source 1..20: mol_type = other RNA
ttccaattccaggagaaccc

SEQ ID NO: 1136 - RNA, 20 nt, synthetic construct
  misc_feature 1..20: note = antisense sequence
  source 1..20: mol_type = other RNA
cttccaattccaggagaacc

SEQ ID NO: 1137 - RNA, 20 nt, synthetic construct
  misc_feature 1..20: note = antisense sequence
  source 1..20: mol_type = other RNA
tgccttcttccaattccagg

SEQ ID NO: 1138 - RNA, 20 nt, synthetic construct
  misc_feature 1..20: note = antisense sequence
  source 1..20: mol_type = other RNA
attcacattgccttcttcca

SEQ ID NO: 1139 - RNA, 20 nt, synthetic construct
  misc_feature 1..20: note = antisense sequence
  source 1..20: mol_type = other RNA
cctaattcacattgccttct

SEQ ID NO: 1140 - RNA, 20 nt, synthetic construct
  misc_feature 1..20: note = antisense sequence
  source 1..20: mol_type = other RNA
gttcctaattcacattgcct

SEQ ID NO: 1141 - RNA, 20 nt, synthetic construct
  misc_feature 1..20: note = antisense sequence
  source 1..20: mol_type = other RNA
agttcctaattcacattgcc

SEQ ID NO: 1142 - RNA, 20 nt, synthetic construct
  misc_feature 1..20: note = antisense sequence
  source 1..20: mol_type = other RNA
ccctcaagaagttcctaatt

SEQ ID NO: 1143 - RNA, 20 nt, synthetic construct
  misc_feature 1..20: note = antisense sequence
  source 1..20: mol_type = other RNA
accctcaagaagttcctaat

SEQ ID NO: 1144 - RNA, 20 nt, synthetic construct
  misc_feature 1..20: note = antisense sequence
  source 1..20: mol_type = other RNA
gtaccctcaagaagttccta

SEQ ID NO: 1145 - RNA, 20 nt, synthetic construct
  misc_feature 1..20: note = antisense sequence
  source 1..20: mol_type = other RNA
agtaccctcaagaagttcct

SEQ ID NO: 1146 - RNA, 20 nt, synthetic construct
  misc_feature 1..20: note = antisense sequence
  source 1..20: mol_type = other RNA
ctatcatactgagtaccctc

SEQ ID NO: 1147 - RNA, 20 nt, synthetic construct
  misc_feature 1..20: note = antisense sequence
  source 1..20: mol_type = other RNA
cctatcatactgagtaccct

SEQ ID NO: 1148 - RNA, 20 nt, synthetic construct
  misc_feature 1..20: note = antisense sequence
  source 1..20: mol_type = other RNA
tcctatcatactgagtaccc

SEQ ID NO: 1149 - RNA, 20 nt, synthetic construct
  misc_feature 1..20: note = antisense sequence
  source 1..20: mol_type = other RNA
ttcctatcatactgagtacc

SEQ ID NO: 1150 - RNA, 20 nt, synthetic construct
  misc_feature 1..20: note = antisense sequence
  source 1..20: mol_type = other RNA
cttcctatcatactgagtac

SEQ ID NO: 1151 - RNA, 20 nt, synthetic construct
  misc_feature 1..20: note = antisense sequence
  source 1..20: mol_type = other RNA
ccttcctatcatactgagta

SEQ ID NO: 1152 - RNA, 20 nt, synthetic construct
  misc_feature 1..20: note = antisense sequence
  source 1..20: mol_type = other RNA
accttcctatcatactgagt

SEQ ID NO: 1153 - RNA, 20 nt, synthetic construct
  misc_feature 1..20: note = antisense sequence
  source 1..20: mol_type = other RNA
caccttcctatcatactgag

SEQ ID NO: 1154 - RNA, 20 nt, synthetic construct
  misc_feature 1..20: note = antisense sequence
  source 1..20: mol_type = other RNA
ccaccttcctatcatactga

SEQ ID NO: 1155 - RNA, 20 nt, synthetic construct
  misc_feature 1..20: note = antisense sequence
  source 1..20: mol_type = other RNA
cccaccttcctatcatactg

SEQ ID NO: 1156 - RNA, 20 nt, synthetic construct
  misc_feature 1..20: note = antisense sequence
  source 1..20: mol_type = other RNA
tcccaccttcctatcatact

SEQ ID NO: 1157 - RNA, 20 nt, synthetic construct
  misc_feature 1..20: note = antisense sequence
  source 1..20: mol_type = other RNA
cttcccaccttcctatcata

SEQ ID NO: 1158 - RNA, 20 nt, synthetic construct
  misc_feature 1..20: note = antisense sequence
  source 1..20: mol_type = other RNA
tttctcgctctctatgtctc

SEQ ID NO: 1159 - RNA, 20 nt, synthetic construct
  misc_feature 1..20: note = antisense sequence
  source 1..20: mol_type = other RNA
gtttctcgctctctatgtct

SEQ ID NO: 1160 - RNA, 20 nt, synthetic construct
  misc_feature 1..20: note = antisense sequence
  source 1..20: mol_type = other RNA
tgtttctcgctctctatgtc

SEQ ID NO: 1161 - RNA, 20 nt, synthetic construct
  misc_feature 1..20: note = antisense sequence
  source 1..20: mol_type = other RNA
ttgtttctcgctctctatgt

SEQ ID NO: 1162 - RNA, 20 nt, synthetic construct
  misc_feature 1..20: note = antisense sequence
  source 1..20: mol_type = other RNA
tttgtttctcgctctctatg

SEQ ID NO: 1163 - RNA, 20 nt, synthetic construct
  misc_feature 1..20: note = antisense sequence
  source 1..20: mol_type = other RNA
ctctttgtttctcgctctct

SEQ ID NO: 1164 - RNA, 20 nt, synthetic construct
  misc_feature 1..20: note = antisense sequence
  source 1..20: mol_type = other RNA
tctctttgtttctcgctctc

SEQ ID NO: 1165 - RNA, 20 nt, synthetic construct
  misc_feature 1..20: note = antisense sequence
  source 1..20: mol_type = other RNA
tttgtggcctcttttctctt

SEQ ID NO: 1166 - RNA, 20 nt, synthetic construct
  misc_feature 1..20: note = antisense sequence
  source 1..20: mol_type = other RNA
ggaaagtccaaataagaacc

SEQ ID NO: 1167 - RNA, 20 nt, synthetic construct
  misc_feature 1..20: note = antisense sequence
  source 1..20: mol_type = other RNA
gggaaagtccaaataagaac

SEQ ID NO: 1168 - RNA, 20 nt, synthetic construct
  misc_feature 1..20: note = antisense sequence
  source 1..20: mol_type = other RNA
ttcctaagagattatcaggg

SEQ ID NO: 1169 - RNA, 20 nt, synthetic construct
  misc_feature 1..20: note = antisense sequence
  source 1..20: mol_type = other RNA
tcaactgacaggcttcacaa

SEQ ID NO: 1170 - RNA, 20 nt, synthetic construct
  misc_feature 1..20: note = antisense sequence
  source 1..20: mol_type = other RNA
tctcaactgacaggcttcac

SEQ ID NO: 1171 - RNA, 20 nt, synthetic construct
  misc_feature 1..20: note = antisense sequence
  source 1..20: mol_type = other RNA
ttctcaactgacaggcttca

SEQ ID NO: 1172 - RNA, 20 nt, synthetic construct
  misc_feature 1..20: note = antisense sequence
  source 1..20: mol_type = other RNA
tttctcaactgacaggcttc

SEQ ID NO: 1173 - RNA, 20 nt, synthetic construct
  misc_feature 1..20: note = antisense sequence
  source 1..20: mol_type = other RNA
ttttctcaactgacaggctt

SEQ ID NO: 1174 - RNA, 20 nt, synthetic construct
  misc_feature 1..20: note = antisense sequence
  source 1..20: mol_type = other RNA
gcgcacgtccttaattttgg

SEQ ID NO: 1175 - RNA, 20 nt, synthetic construct
  misc_feature 1..20: note = antisense sequence
  source 1..20: mol_type = other RNA
cgcgcacgtccttaattttg

SEQ ID NO: 1176 - RNA, 20 nt, synthetic construct
  misc_feature 1..20: note = antisense sequence
  source 1..20: mol_type = other RNA
ttcccagaaaggcatagacc

SEQ ID NO: 1177 - RNA, 20 nt, synthetic construct
  misc_feature 1..20: note = antisense sequence
  source 1..20: mol_type = other RNA
catcttcccagaaaggcata

SEQ ID NO: 1178 - RNA, 20 nt, synthetic construct
  misc_feature 1..20: note = antisense sequence
  source 1..20: mol_type = other RNA
tcatcttcccagaaaggcat

SEQ ID NO: 1179 - RNA, 20 nt, synthetic construct
  misc_feature 1..20: note = antisense sequence
  source 1..20: mol_type = other RNA
tctcagtatcccaccctttc

SEQ ID NO: 1180 - RNA, 20 nt, synthetic construct
  misc_feature 1..20: note = antisense sequence
  source 1..20: mol_type = other RNA
ttctcagtatcccacccttt

SEQ ID NO: 1181 - RNA, 20 nt, synthetic construct
  misc_feature 1..20: note = antisense sequence
  source 1..20: mol_type = other RNA
tttctcagtatcccaccctt

SEQ ID NO: 1182 - RNA, 20 nt, synthetic construct
  misc_feature 1..20: note = antisense sequence
  source 1..20: mol_type = other RNA
atttctcagtatcccaccct

SEQ ID NO: 1183 - RNA, 20 nt, synthetic construct
  misc_feature 1..20: note = antisense sequence
  source 1..20: mol_type = other RNA
tatttctcagtatcccaccc

SEQ ID NO: 1184 - RNA, 20 nt, synthetic construct
  misc_feature 1..20: note = antisense sequence
  source 1..20: mol_type = other RNA
gtatttctcagtatcccacc

SEQ ID NO: 1185 - RNA, 20 nt, synthetic construct
  misc_feature 1..20: note = antisense sequence
  source 1..20: mol_type = other RNA
ctgctaccctctcacatgaa

SEQ ID NO: 1186 - RNA, 20 nt, synthetic construct
  misc_feature 1..20: note = antisense sequence
  source 1..20: mol_type = other RNA
cctgctaccctctcacatga

SEQ ID NO: 1187 - RNA, 20 nt, synthetic construct
  misc_feature 1..20: note = antisense sequence
  source 1..20: mol_type = other RNA
ccctgctaccctctcacatg

SEQ ID NO: 1188 - RNA, 20 nt, synthetic construct
  misc_feature 1..20: note = antisense sequence
  source 1..20: mol_type = other RNA
attgactaagccagacagag

SEQ ID NO: 1189 - RNA, 20 nt, synthetic construct
  misc_feature 1..20: note = antisense sequence
  source 1..20: mol_type = other RNA
gattgactaagccagacaga

SEQ ID NO: 1190 - RNA, 20 nt, synthetic construct
  misc_feature 1..20: note = antisense sequence
  source 1..20: mol_type = other RNA
agattgactaagccagacag

SEQ ID NO: 1191 - RNA, 20 nt, synthetic construct
  misc_feature 1..20: note = antisense sequence
  source 1..20: mol_type = other RNA
cagattgactaagccagaca

SEQ ID NO: 1192 - RNA, 20 nt, synthetic construct
  misc_feature 1..20: note = antisense sequence
  source 1..20: mol_type = other RNA
tcagattgactaagccagac

SEQ ID NO: 1193 - RNA, 20 nt, synthetic construct
  misc_feature 1..20: note = antisense sequence
  source 1..20: mol_type = other RNA
ttcagattgactaagccaga

SEQ ID NO: 1194 - RNA, 20 nt, synthetic construct
  misc_feature 1..20: note = antisense sequence
  source 1..20: mol_type = other RNA
attcagattgactaagccag

SEQ ID NO: 1195 - RNA, 20 nt, synthetic construct
  misc_feature 1..20: note = antisense sequence
  source 1..20: mol_type = other RNA
gattcagattgactaagcca

SEQ ID NO: 1196 - RNA, 20 nt, synthetic construct
  misc_feature 1..20: note = antisense sequence
  source 1..20: mol_type = other RNA
cagattcagattgactaagc

SEQ ID NO: 1197 - RNA, 20 nt, synthetic construct
  misc_feature 1..20: note = antisense sequence
  source 1..20: mol_type = other RNA
gttttcaggtacagtcaccc

SEQ ID NO: 1198 - RNA, 20 nt, synthetic construct
  misc_feature 1..20: note = antisense sequence
  source 1..20: mol_type = other RNA
agcttctgttttcaggtaca

SEQ ID NO: 1199 - RNA, 20 nt, synthetic construct
  misc_feature 1..20: note = antisense sequence
  source 1..20: mol_type = other RNA
tctcagtgagcgccaagatc

SEQ ID NO: 1200 - RNA, 20 nt, synthetic construct
  misc_feature 1..20: note = antisense sequence
  source 1..20: mol_type = other RNA
ttctcagtgagcgccaagat

SEQ ID NO: 1201 - RNA, 20 nt, synthetic construct
  misc_feature 1..20: note = antisense sequence
  source 1..20: mol_type = other RNA
attctcagtgagcgccaaga

SEQ ID NO: 1202 - RNA, 20 nt, synthetic construct
  misc_feature 1..20: note = antisense sequence
  source 1..20: mol_type = other RNA
aattctcagtgagcgccaag

SEQ ID NO: 1203 - RNA, 20 nt, synthetic construct
  misc_feature 1..20: note = antisense sequence
  source 1..20: mol_type = other RNA
aaattctcagtgagcgccaa

SEQ ID NO: 1204 - RNA, 20 nt, synthetic construct
  misc_feature 1..20: note = antisense sequence
  source 1..20: mol_type = other RNA
gaaattctcagtgagcgcca

SEQ ID NO: 1205 - RNA, 20 nt, synthetic construct
  misc_feature 1..20: note = antisense sequence
  source 1..20: mol_type = other RNA
ggaaattctcagtgagcgcc

SEQ ID NO: 1206 - RNA, 20 nt, synthetic construct
  misc_feature 1..20: note = antisense sequence
  source 1..20: mol_type = other RNA
aaggaaattctcagtgagcg

SEQ ID NO: 1207 - RNA, 20 nt, synthetic construct
  misc_feature 1..20: note = antisense sequence
  source 1..20: mol_type = other RNA
cctcgctcatattttgccca

SEQ ID NO: 1208 - RNA, 20 nt, synthetic construct
  misc_feature 1..20: note = antisense sequence
  source 1..20: mol_type = other RNA
acacacctcgctcatatttt

SEQ ID NO: 1209 - RNA, 20 nt, synthetic construct
  misc_feature 1..20: note = antisense sequence
  source 1..20: mol_type = other RNA
tacacacctcgctcatattt

SEQ ID NO: 1210 - RNA, 20 nt, synthetic construct
  misc_feature 1..20: note = antisense sequence
  source 1..20: mol_type = other RNA
ctacacacctcgctcatatt

SEQ ID NO: 1211 - RNA, 20 nt, synthetic construct
  misc_feature 1..20: note = antisense sequence
  source 1..20: mol_type = other RNA
gctacacacctcgctcatat

SEQ ID NO: 1212 - RNA, 20 nt, synthetic construct
  misc_feature 1..20: note = antisense sequence
  source 1..20: mol_type = other RNA
agctacacacctcgctcata

SEQ ID NO: 1213 - RNA, 20 nt, synthetic construct
  misc_feature 1..20: note = antisense sequence
  source 1..20: mol_type = other RNA
aagctacacacctcgctcat

SEQ ID NO: 1214 - RNA, 20 nt, synthetic construct
  misc_feature 1..20: note = antisense sequence
  source 1..20: mol_type = other RNA
aaagctacacacctcgctca

SEQ ID NO: 1215 - RNA, 20 nt, synthetic construct
  misc_feature 1..20: note = antisense sequence
  source 1..20: mol_type = other RNA
ctaccagatgaaaagctaca

SEQ ID NO: 1216 - RNA, 20 nt, synthetic construct
  misc_feature 1..20: note = antisense sequence
  source 1..20: mol_type = other RNA
gctaccagatgaaaagctac

SEQ ID NO: 1217 - RNA, 20 nt, synthetic construct
  misc_feature 1..20: note = antisense sequence
  source 1..20: mol_type = other RNA
agatggctaccagatgaaaa

SEQ ID NO: 1218 - RNA, 20 nt, synthetic construct
  misc_feature 1..20: note = antisense sequence
  source 1..20: mol_type = other RNA
actgccttgcctcttggttt

SEQ ID NO: 1219 - RNA, 20 nt, synthetic construct
  misc_feature 1..20: note = antisense sequence
  source 1..20: mol_type = other RNA
aactgccttgcctcttggtt

SEQ ID NO: 1220 - RNA, 20 nt, synthetic construct
  misc_feature 1..20: note = antisense sequence
  source 1..20: mol_type = other RNA
aaaactgccttgcctcttgg

SEQ ID NO: 1221 - RNA, 20 nt, synthetic construct
  misc_feature 1..20: note = antisense sequence
  source 1..20: mol_type = other RNA
caaaactgccttgcctcttg

SEQ ID NO: 1222 - RNA, 20 nt, synthetic construct
  misc_feature 1..20: note = antisense sequence
  source 1..20: mol_type = other RNA
ggtcacgcaaaactgccttg

SEQ ID NO: 1223 - RNA, 20 nt, synthetic construct
  misc_feature 1..20: note = antisense sequence
  source 1..20: mol_type = other RNA
gcgtgtggaaggaaaataaa

SEQ ID NO: 1224 - RNA, 20 nt, synthetic construct
  misc_feature 1..20: note = antisense sequence
  source 1..20: mol_type = other RNA
taggcgtgtggaaggaaaat

SEQ ID NO: 1225 - RNA, 20 nt, synthetic construct
  misc_feature 1..20: note = antisense sequence
  source 1..20: mol_type = other RNA
cataggcgtgtggaaggaaa

SEQ ID NO: 1226 - RNA, 20 nt, synthetic construct
  misc_feature 1..20: note = antisense sequence
  source 1..20: mol_type = other RNA
gcataggcgtgtggaaggaa

SEQ ID NO: 1227 - RNA, 20 nt, synthetic construct
  misc_feature 1..20: note = antisense sequence
  source 1..20: mol_type = other RNA
ggcataggcgtgtggaagga

SEQ ID NO: 1228 - RNA, 20 nt, synthetic construct
  misc_feature 1..20: note = antisense sequence
  source 1..20: mol_type = other RNA
tggcataggcgtgtggaagg

SEQ ID NO: 1229 - RNA, 20 nt, synthetic construct
  misc_feature 1..20: note = antisense sequence
  source 1..20: mol_type = other RNA
ttggcataggcgtgtggaag

SEQ ID NO: 1230 - RNA, 20 nt, synthetic construct
  misc_feature 1..20: note = antisense sequence
  source 1..20: mol_type = other RNA
tttggcataggcgtgtggaa

SEQ ID NO: 1231 - RNA, 20 nt, synthetic construct
  misc_feature 1..20: note = antisense sequence
  source 1..20: mol_type = other RNA
gtttggcataggcgtgtgga

SEQ ID NO: 1232 - RNA, 20 nt, synthetic construct
  misc_feature 1..20: note = antisense sequence
  source 1..20: mol_type = other RNA
agtttggcataggcgtgtgg

SEQ ID NO: 1233 - RNA, 20 nt, synthetic construct
  misc_feature 1..20: note = antisense sequence
  source 1..20: mol_type = other RNA
gagtttggcataggcgtgtg

SEQ ID NO: 1234 - RNA, 20 nt, synthetic construct
  misc_feature 1..20: note = antisense sequence
  source 1..20: mol_type = other RNA
tgagtttggcataggcgtgt

SEQ ID NO: 1235 - RNA, 20 nt, synthetic construct
  misc_feature 1..20: note = antisense sequence
  source 1..20: mol_type = other RNA
ctgagtttggcataggcgtg

SEQ ID NO: 1236 - RNA, 20 nt, synthetic construct
  misc_feature 1..20: note = antisense sequence
  source 1..20: mol_type = other RNA
tctgagtttggcataggcgt

SEQ ID NO: 1237 - RNA, 20 nt, synthetic construct
  misc_feature 1..20: note = antisense sequence
  source 1..20: mol_type = other RNA
atctgagtttggcataggcg

SEQ ID NO: 1238 - RNA, 20 nt, synthetic construct
  misc_feature 1..20: note = antisense sequence
  source 1..20: mol_type = other RNA
aatctgagtttggcataggc

SEQ ID NO: 1239 - RNA, 20 nt, synthetic construct
  misc_feature 1..20: note = antisense sequence
  source 1..20: mol_type = other RNA
gaatctgagtttggcatagg

SEQ ID NO: 1240 - RNA, 20 nt, synthetic construct
  misc_feature 1..20: note = antisense sequence
  source 1..20: mol_type = other RNA
ggaatctgagtttggcatag

SEQ ID NO: 1241 - RNA, 20 nt, synthetic construct
  misc_feature 1..20: note = antisense sequence
  source 1..20: mol_type = other RNA
aggaatctgagtttggcata

SEQ ID NO: 1242 - RNA, 20 nt, synthetic construct
  misc_feature 1..20: note = antisense sequence
  source 1..20: mol_type = other RNA
aaggaatctgagtttggcat

SEQ ID NO: 1243 - RNA, 20 nt, synthetic construct
  misc_feature 1..20: note = antisense sequence
  source 1..20: mol_type = other RNA
gaaggaatctgagtttggca

SEQ ID NO: 1244 - RNA, 20 nt, synthetic construct
  misc_feature 1..20: note = antisense sequence
  source 1..20: mol_type = other RNA
ggatgaaaggaaggaatctg

SEQ ID NO: 1245 - RNA, 20 nt, synthetic construct
  misc_feature 1..20: note = antisense sequence
  source 1..20: mol_type = other RNA
cagggatgaaaggaaggaat

SEQ ID NO: 1246 - RNA, 20 nt, synthetic construct
  misc_feature 1..20: note = antisense sequence
  source 1..20: mol_type = other RNA
tgaaacagggatgaaaggaa

SEQ ID NO: 1247 - RNA, 20 nt, synthetic construct
  misc_feature 1..20: note = antisense sequence
  source 1..20: mol_type = other RNA
gatgaaacagggatgaaagg

SEQ ID NO: 1248 - RNA, 20 nt, synthetic construct
  misc_feature 1..20: note = antisense sequence
  source 1..20: mol_type = other RNA
gaacagatgaaacagggatg

SEQ ID NO: 1249 - RNA, 20 nt, synthetic construct
  misc_feature 1..20: note = antisense sequence
  source 1..20: mol_type = other RNA
tgaacagatgaaacagggat

SEQ ID NO: 1250 - RNA, 20 nt, synthetic construct
  misc_feature 1..20: note = antisense sequence
  source 1..20: mol_type = other RNA
taaccagcctgaacagatga

SEQ ID NO: 1251 - RNA, 20 nt, synthetic construct
  misc_feature 1..20: note = antisense sequence
  source 1..20: mol_type = other RNA
ctaaccagcctgaacagatg

SEQ ID NO: 1252 - RNA, 20 nt, synthetic construct
  misc_feature 1..20: note = antisense sequence
  source 1..20: mol_type = other RNA
cacacatagcttctcactgt

SEQ ID NO: 1253 - RNA, 20 nt, synthetic construct
  misc_feature 1..20: note = antisense sequence
  source 1..20: mol_type = other RNA
tgcacacatagcttctcact

SEQ ID NO: 1254 - RNA, 20 nt, synthetic construct
  misc_feature 1..20: note = antisense sequence
  source 1..20: mol_type = other RNA
ctgcacacatagcttctcac

SEQ ID NO: 1255 - RNA, 20 nt, synthetic construct
  misc_feature 1..20: note = antisense sequence
  source 1..20: mol_type = other RNA
cctgcacacatagcttctca

SEQ ID NO: 1256 - RNA, 20 nt, synthetic construct
  misc_feature 1..20: note = antisense sequence
  source 1..20: mol_type = other RNA
tcctgcacacatagcttctc

SEQ ID NO: 1257 - RNA, 20 nt, synthetic construct
  misc_feature 1..20: note = antisense sequence
  source 1..20: mol_type = other RNA
agtcctgcacacatagcttc

SEQ ID NO: 1258 - RNA, 20 nt, synthetic construct
  misc_feature 1..20: note = antisense sequence
  source 1..20: mol_type = other RNA
aagtcctgcacacatagctt

SEQ ID NO: 1259 - RNA, 20 nt, synthetic construct
  misc_feature 1..20: note = antisense sequence
  source 1..20: mol_type = other RNA
agaagtcctgcacacatagc

SEQ ID NO: 1260 - RNA, 20 nt, synthetic construct
  misc_feature 1..20: note = antisense sequence
  source 1..20: mol_type = other RNA
gagaagtcctgcacacatag

SEQ ID NO: 1261 - RNA, 20 nt, synthetic construct
  misc_feature 1..20: note = antisense sequence
  source 1..20: mol_type = other RNA
agagaagtcctgcacacata

SEQ ID NO: 1262 - RNA, 20 nt, synthetic construct
  misc_feature 1..20: note = antisense sequence
  source 1..20: mol_type = other RNA
cagagaagtcctgcacacat

SEQ ID NO: 1263 - RNA, 20 nt, synthetic construct
  misc_feature 1..20: note = antisense sequence
  source 1..20: mol_type = other RNA
gagcttagatggagtggagg

SEQ ID NO: 1264 - RNA, 20 nt, synthetic construct
  misc_feature 1..20: note = antisense sequence
  source 1..20: mol_type = other RNA
agagcttagatggagtggag

SEQ ID NO: 1265 - RNA, 20 nt, synthetic construct
  misc_feature 1..20: note = antisense sequence
  source 1..20: mol_type = other RNA
gagagcttagatggagtgga

SEQ ID NO: 1266 - RNA, 20 nt, synthetic construct
  misc_feature 1..20: note = antisense sequence
  source 1..20: mol_type = other RNA
tgagagcttagatggagtgg

SEQ ID NO: 1267 - RNA, 20 nt, synthetic construct
  misc_feature 1..20: note = antisense sequence
  source 1..20: mol_type = other RNA
ttgagagcttagatggagtg

SEQ ID NO: 1268 - RNA, 20 nt, synthetic construct
  misc_feature 1..20: note = antisense sequence
  source 1..20: mol_type = other RNA
cttgagagcttagatggagt

SEQ ID NO: 1269 - RNA, 20 nt, synthetic construct
  misc_feature 1..20: note = antisense sequence
  source 1..20: mol_type = other RNA
tcttgagagcttagatggag

SEQ ID NO: 1270 - RNA, 20 nt, synthetic construct
  misc_feature 1..20: note = antisense sequence
  source 1..20: mol_type = other RNA
ttcttgagagcttagatgga

SEQ ID NO: 1271 - RNA, 20 nt, synthetic construct
  misc_feature 1..20: note = antisense sequence
  source 1..20: mol_type = other RNA
tttcttgagagcttagatgg

SEQ ID NO: 1272 - RNA, 20 nt, synthetic construct
  misc_feature 1..20: note = antisense sequence
  source 1..20: mol_type = other RNA
gtttcttgagagcttagatg

SEQ ID NO: 1273 - RNA, 20 nt, synthetic construct
  misc_feature 1..20: note = antisense sequence
  source 1..20: mol_type = other RNA
gagaagtgggattgcctctt

SEQ ID NO: 1274 - RNA, 20 nt, synthetic construct
  misc_feature 1..20: note = antisense sequence
  source 1..20: mol_type = other RNA
ggagaagtgggattgcctct

SEQ ID NO: 1275 - RNA, 20 nt, synthetic construct
  misc_feature 1..20: note = antisense sequence
  source 1..20: mol_type = other RNA
ctgaccctgattgaatagct

SEQ ID NO: 1276 - RNA, 20 nt, synthetic construct
  misc_feature 1..20: note = antisense sequence
  source 1..20: mol_type = other RNA
actgaccctgattgaatagc

SEQ ID NO: 1277 - RNA, 20 nt, synthetic construct
  misc_feature 1..20: note = antisense sequence
  source 1..20: mol_type = other RNA
gactgaccctgattgaatag

SEQ ID NO: 1278 - RNA, 20 nt, synthetic construct
  misc_feature 1..20: note = antisense sequence
  source 1..20: mol_type = other RNA
ggactgaccctgattgaata

SEQ ID NO: 1279 - RNA, 20 nt, synthetic construct
  misc_feature 1..20: note = antisense sequence
  source 1..20: mol_type = other RNA
aactaggactgaccctgatt

SEQ ID NO: 1280 - RNA, 20 nt, synthetic construct
  misc_feature 1..20: note = antisense sequence
  source 1..20: mol_type = other RNA
taactaggactgaccctgat

SEQ ID NO: 1281 - RNA, 20 nt, synthetic construct
  misc_feature 1..20: note = antisense sequence
  source 1..20: mol_type = other RNA
attaactaggactgaccctg

SEQ ID NO: 1282 - RNA, 20 nt, synthetic construct
  misc_feature 1..20: note = antisense sequence
  source 1..20: mol_type = other RNA
tattaactaggactgaccct

SEQ ID NO: 1283 - RNA, 20 nt, synthetic construct
  misc_feature 1..20: note = antisense sequence
  source 1..20: mol_type = other RNA
ctattaactaggactgaccc

SEQ ID NO: 1284 - RNA, 20 nt, synthetic construct
  misc_feature 1..20: note = antisense sequence
  source 1..20: mol_type = other RNA
agccgaggctatgggaagtg

SEQ ID NO: 1285 - RNA, 20 nt, synthetic construct
  misc_feature 1..20: note = antisense sequence
  source 1..20: mol_type = other RNA
aagccgaggctatgggaagt

SEQ ID NO: 1286 - RNA, 20 nt, synthetic construct
  misc_feature 1..20: note = antisense sequence
  source 1..20: mol_type = other RNA
aaagccgaggctatgggaag

SEQ ID NO: 1287 - RNA, 20 nt, synthetic construct
  misc_feature 1..20: note = antisense sequence
  source 1..20: mol_type = other RNA
aaaagccgaggctatgggaa

SEQ ID NO: 1288 - RNA, 20 nt, synthetic construct
  misc_feature 1..20: note = antisense sequence
  source 1..20: mol_type = other RNA
taaaagccgaggctatggga

SEQ ID NO: 1289 - RNA, 20 nt, synthetic construct
  misc_feature 1..20: note = antisense sequence
  source 1..20: mol_type = other RNA
ctaaaagccgaggctatggg

SEQ ID NO: 1290 - RNA, 20 nt, synthetic construct
  misc_feature 1..20: note = antisense sequence
  source 1..20: mol_type = other RNA
gctaaaagccgaggctatgg

SEQ ID NO: 1291 - RNA, 20 nt, synthetic construct
  misc_feature 1..20: note = antisense sequence
  source 1..20: mol_type = other RNA
agctaaaagccgaggctatg

SEQ ID NO: 1292 - RNA, 20 nt, synthetic construct
  misc_feature 1..20: note = antisense sequence
  source 1..20: mol_type = other RNA
aagctaaaagccgaggctat

SEQ ID NO: 1293 - RNA, 20 nt, synthetic construct
  misc_feature 1..20: note = antisense sequence
  source 1..20: mol_type = other RNA
taagctaaaagccgaggcta

SEQ ID NO: 1294 - RNA, 20 nt, synthetic construct
  misc_feature 1..20: note = antisense sequence
  source 1..20: mol_type = other RNA
ctaagctaaaagccgaggct

SEQ ID NO: 1295 - RNA, 20 nt, synthetic construct
  misc_feature 1..20: note = antisense sequence
  source 1..20: mol_type = other RNA
gctaagctaaaagccgaggc

SEQ ID NO: 1296 - RNA, 20 nt, synthetic construct
  misc_feature 1..20: note = antisense sequence
  source 1..20: mol_type = other RNA
agctaagctaaaagccgagg

SEQ ID NO: 1297 - RNA, 20 nt, synthetic construct
  misc_feature 1..20: note = antisense sequence
  source 1..20: mol_type = other RNA
aagctaagctaaaagccgag

SEQ ID NO: 1298 - RNA, 20 nt, synthetic construct
  misc_feature 1..20: note = antisense sequence
  source 1..20: mol_type = other RNA
caaagctaagctaaaagccg

SEQ ID NO: 1299 - RNA, 20 nt, synthetic construct
  misc_feature 1..20: note = antisense sequence
  source 1..20: mol_type = other RNA
gccaaagctaagctaaaagc

SEQ ID NO: 1300 - RNA, 20 nt, synthetic construct
  misc_feature 1..20: note = antisense sequence
  source 1..20: mol_type = other RNA
actgccaaagctaagctaaa

SEQ ID NO: 1301 - RNA, 20 nt, synthetic construct
  misc_feature 1..20: note = antisense sequence
  source 1..20: mol_type = other RNA
tcactgccaaagctaagcta

SEQ ID NO: 1302 - RNA, 20 nt, synthetic construct
  misc_feature 1..20: note = antisense sequence
  source 1..20: mol_type = other RNA
ttcactgccaaagctaagct

SEQ ID NO: 1303 - RNA, 20 nt, synthetic construct
  misc_feature 1..20: note = antisense sequence
  source 1..20: mol_type = other RNA
cttcactgccaaagctaagc

SEQ ID NO: 1304 - RNA, 20 nt, synthetic construct
  misc_feature 1..20: note = antisense sequence
  source 1..20: mol_type = other RNA
tcttcactgccaaagctaag

SEQ ID NO: 1305 - RNA, 20 nt, synthetic construct
  misc_feature 1..20: note = antisense sequence
  source 1..20: mol_type = other RNA
atcttcactgccaaagctaa

SEQ ID NO: 1306 - RNA, 20 nt, synthetic construct
  misc_feature 1..20: note = antisense sequence
  source 1..20: mol_type = other RNA
gatcttcactgccaaagcta

SEQ ID NO: 1307 - RNA, 20 nt, synthetic construct
  misc_feature 1..20: note = antisense sequence
  source 1..20: mol_type = other RNA
caagagcttagggccagatc

SEQ ID NO: 1308 - RNA, 20 nt, synthetic construct
  misc_feature 1..20: note = antisense sequence
  source 1..20: mol_type = other RNA
cgcaagagcttagggccaga

SEQ ID NO: 1309 - RNA, 20 nt, synthetic construct
  misc_feature 1..20: note = antisense sequence
  source 1..20: mol_type = other RNA
tcgcaagagcttagggccag

SEQ ID NO: 1310 - RNA, 20 nt, synthetic construct
  misc_feature 1..20: note = antisense sequence
  source 1..20: mol_type = other RNA
gtcgcaagagcttagggcca

SEQ ID NO: 1311 - RNA, 20 nt, synthetic construct
  misc_feature 1..20: note = antisense sequence
  source 1..20: mol_type = other RNA
tgggtcgcaagagcttaggg

SEQ ID NO: 1312 - RNA, 20 nt, synthetic construct
  misc_feature 1..20: note = antisense sequence
  source 1..20: mol_type = other RNA
ttgggtcgcaagagcttagg

SEQ ID NO: 1313 - RNA, 20 nt, synthetic construct
  misc_feature 1..20: note = antisense sequence
  source 1..20: mol_type = other RNA
gttgggtcgcaagagcttag

SEQ ID NO: 1314 - RNA, 20 nt, synthetic construct
  misc_feature 1..20: note = antisense sequence
  source 1..20: mol_type = other RNA
ggttgggtcgcaagagctta

SEQ ID NO: 1315 - RNA, 20 nt, synthetic construct
  misc_feature 1..20: note = antisense sequence
  source 1..20: mol_type = other RNA
gggttgggtcgcaagagctt

SEQ ID NO: 1316 - RNA, 20 nt, synthetic construct
  misc_feature 1..20: note = antisense sequence
  source 1..20: mol_type = other RNA
cagtagcctgtgaaatgttt

SEQ ID NO: 1317 - RNA, 20 nt, synthetic construct
  misc_feature 1..20: note = antisense sequence
  source 1..20: mol_type = other RNA
ccagtagcctgtgaaatgtt

SEQ ID NO: 1318 - RNA, 20 nt, synthetic construct
  misc_feature 1..20: note = antisense sequence
  source 1..20: mol_type = other RNA
cccagtagcctgtgaaatgt

SEQ ID NO: 1319 - RNA, 20 nt, synthetic construct
  misc_feature 1..20: note = antisense sequence
  source 1..20: mol_type = other RNA
gcccagtagcctgtgaaatg

SEQ ID NO: 1320 - RNA, 20 nt, synthetic construct
  misc_feature 1..20: note = antisense sequence
  source 1..20: mol_type = other RNA
gcagcccagtagcctgtgaa

SEQ ID NO: 1321 - RNA, 20 nt, synthetic construct
  misc_feature 1..20: note = antisense sequence
  source 1..20: mol_type = other RNA
tttccgcagcccagtagcct

SEQ ID NO: 1322 - RNA, 20 nt, synthetic construct
  misc_feature 1..20: note = antisense sequence
  source 1..20: mol_type = other RNA
agctttccgcagcccagtag

SEQ ID NO: 1323 - RNA, 20 nt, synthetic construct
  misc_feature 1..20: note = antisense sequence
  source 1..20: mol_type = other RNA
cagctttccgcagcccagta

SEQ ID NO: 1324 - RNA, 20 nt, synthetic construct
  misc_feature 1..20: note = antisense sequence
  source 1..20: mol_type = other RNA
tcagctttccgcagcccagt

SEQ ID NO: 1325 - RNA, 20 nt, synthetic construct
  misc_feature 1..20: note = antisense sequence
  source 1..20: mol_type = other RNA
ttggcagcctcagctttccg

SEQ ID NO: 1326 - RNA, 20 nt, synthetic construct
  misc_feature 1..20: note = antisense sequence
  source 1..20: mol_type = other RNA
gttggcagcctcagctttcc

SEQ ID NO: 1327 - RNA, 20 nt, synthetic construct
  misc_feature 1..20: note = antisense sequence
  source 1..20: mol_type = other RNA
agttggcagcctcagctttc

SEQ ID NO: 1328 - RNA, 20 nt, synthetic construct
  misc_feature 1..20: note = antisense sequence
  source 1..20: mol_type = other RNA
aaagttggcagcctcagctt

SEQ ID NO: 1329 - RNA, 20 nt, synthetic construct
  misc_feature 1..20: note = antisense sequence
  source 1..20: mol_type = other RNA
caaagttggcagcctcagct

SEQ ID NO: 1330 - RNA, 20 nt, synthetic construct
  misc_feature 1..20: note = antisense sequence
  source 1..20: mol_type = other RNA
ctccaaagttggcagcctca

SEQ ID NO: 1331 - RNA, 20 nt, synthetic construct
  misc_feature 1..20: note = antisense sequence
  source 1..20: mol_type = other RNA
taggctccaaagttggcagc

SEQ ID NO: 1332 - RNA, 20 nt, synthetic construct
  misc_feature 1..20: note = antisense sequence
  source 1..20: mol_type = other RNA
tgatgtcctgggaatcctag

SEQ ID NO: 1333 - RNA, 20 nt, synthetic construct
  misc_feature 1..20: note = antisense sequence
  source 1..20: mol_type = other RNA
acctgatgtcctgggaatcc

SEQ ID NO: 1334 - RNA, 20 nt, synthetic construct
  misc_feature 1..20: note = antisense sequence
  source 1..20: mol_type = other RNA
gacctgatgtcctgggaatc

SEQ ID NO: 1335 - RNA, 20 nt, synthetic construct
  misc_feature 1..20: note = antisense sequence
  source 1..20: mol_type = other RNA
cttgacctgatgtcctggga

SEQ ID NO: 1336 - RNA, 20 nt, synthetic construct
  misc_feature 1..20: note = antisense sequence
  source 1..20: mol_type = other RNA
gcttgacctgatgtcctggg

SEQ ID NO: 1337 - RNA, 20 nt, synthetic construct
  misc_feature 1..20: note = antisense sequence
  source 1..20: mol_type = other RNA
tgcttgacctgatgtcctgg

SEQ ID NO: 1338 - RNA, 20 nt, synthetic construct
  misc_feature 1..20: note = antisense sequence
  source 1..20: mol_type = other RNA
agttgcttgacctgatgtcc

SEQ ID NO: 1339 - RNA, 20 nt, synthetic construct
  misc_feature 1..20: note = antisense sequence
  source 1..20: mol_type = other RNA
cagttgcttgacctgatgtc

SEQ ID NO: 1340 - RNA, 20 nt, synthetic construct
  misc_feature 1..20: note = antisense sequence
  source 1..20: mol_type = other RNA
cctctcagttgcttgacctg

SEQ ID NO: 1341 - RNA, 20 nt, synthetic construct
  misc_feature 1..20: note = antisense sequence
  source 1..20: mol_type = other RNA
acctctcagttgcttgacct

SEQ ID NO: 1342 - RNA, 20 nt, synthetic construct
  misc_feature 1..20: note = antisense sequence
  source 1..20: mol_type = other RNA
gacctctcagttgcttgacc

SEQ ID NO: 1343 - RNA, 20 nt, synthetic construct
  misc_feature 1..20: note = antisense sequence
  source 1..20: mol_type = other RNA
tggacctctcagttgcttga

SEQ ID NO: 1344 - RNA, 20 nt, synthetic construct
  misc_feature 1..20: note = antisense sequence
  source 1..20: mol_type = other RNA
gtggacctctcagttgcttg

SEQ ID NO: 1345 - RNA, 20 nt, synthetic construct
  misc_feature 1..20: note = antisense sequence
  source 1..20: mol_type = other RNA
ggtggacctctcagttgctt

SEQ ID NO: 1346 - RNA, 20 nt, synthetic construct
  misc_feature 1..20: note = antisense sequence
  source 1..20: mol_type = other RNA
gggtggacctctcagttgct

SEQ ID NO: 1347 - RNA, 20 nt, synthetic construct
  misc_feature 1..20: note = antisense sequence
  source 1..20: mol_type = other RNA
cctgggtggacctctcagtt

SEQ ID NO: 1348 - RNA, 20 nt, synthetic construct
  misc_feature 1..20: note = antisense sequence
  source 1..20: mol_type = other RNA
gagaagaaactatgtgtgga

SEQ ID NO: 1349 - RNA, 20 nt, synthetic construct
  misc_feature 1..20: note = antisense sequence
  source 1..20: mol_type = other RNA
tcccaagagagaagaaacta

SEQ ID NO: 1350 - RNA, 20 nt, synthetic construct
  misc_feature 1..20: note = antisense sequence
  source 1..20: mol_type = other RNA
ggtcccaagagagaagaaac

SEQ ID NO: 1351 - RNA, 20 nt, synthetic construct
  misc_feature 1..20: note = antisense sequence
  source 1..20: mol_type = other RNA
ctggtcccaagagagaagaa

SEQ ID NO: 1352 - RNA, 20 nt, synthetic construct
  misc_feature 1..20: note = antisense sequence
  source 1..20: mol_type = other RNA
gctggtcccaagagagaaga

SEQ ID NO: 1353 - RNA, 20 nt, synthetic construct
  misc_feature 1..20: note = antisense sequence
  source 1..20: mol_type = other RNA
cgctggtcccaagagagaag

SEQ ID NO: 1354 - RNA, 20 nt, synthetic construct
  misc_feature 1..20: note = antisense sequence
  source 1..20: mol_type = other RNA
gcgctggtcccaagagagaa

SEQ ID NO: 1355 - RNA, 20 nt, synthetic construct
  misc_feature 1..20: note = antisense sequence
  source 1..20: mol_type = other RNA
ttcacccagatgttaaagcg

SEQ ID NO: 1356 - RNA, 20 nt, synthetic construct
  misc_feature 1..20: note = antisense sequence
  source 1..20: mol_type = other RNA
attcacccagatgttaaagc

SEQ ID NO: 1357 - RNA, 20 nt, synthetic construct
  misc_feature 1..20: note = antisense sequence
  source 1..20: mol_type = other RNA
ctgattcacccagatgttaa

SEQ ID NO: 1358 - RNA, 20 nt, synthetic construct
  misc_feature 1..20: note = antisense sequence
  source 1..20: mol_type = other RNA
gcacgatctgattcacccag

SEQ ID NO: 1359 - RNA, 20 nt, synthetic construct
  misc_feature 1..20: note = antisense sequence
  source 1..20: mol_type = other RNA
tgcacgatctgattcaccca

SEQ ID NO: 1360 - RNA, 20 nt, synthetic construct
  misc_feature 1..20: note = antisense sequence
  source 1..20: mol_type = other RNA
ctgcacgatctgattcaccc

SEQ ID NO: 1361 - RNA, 20 nt, synthetic construct
  misc_feature 1..20: note = antisense sequence
  source 1..20: mol_type = other RNA
tctgcacgatctgattcacc

SEQ ID NO: 1362 - RNA, 20 nt, synthetic construct
  misc_feature 1..20: note = antisense sequence
  source 1..20: mol_type = other RNA
gtctgcacgatctgattcac

SEQ ID NO: 1363 - RNA, 20 nt, synthetic construct
  misc_feature 1..20: note = antisense sequence
  source 1..20: mol_type = other RNA
tgtctgcacgatctgattca

SEQ ID NO: 1364 - RNA, 20 nt, synthetic construct
  misc_feature 1..20: note = antisense sequence
  source 1..20: mol_type = other RNA
gtgtctgcacgatctgattc

SEQ ID NO: 1365 - RNA, 20 nt, synthetic construct
  misc_feature 1..20: note = antisense sequence
  source 1..20: mol_type = other RNA
cctagttaccgtgtctgcac

SEQ ID NO: 1366 - RNA, 20 nt, synthetic construct
  misc_feature 1..20: note = antisense sequence
  source 1..20: mol_type = other RNA
tcccagcaacgtgtccagct

SEQ ID NO: 1367 - RNA, 20 nt, synthetic construct
  misc_feature 1..20: note = antisense sequence
  source 1..20: mol_type = other RNA
tcacgttctgtctgggctcc

SEQ ID NO: 1368 - RNA, 20 nt, synthetic construct
  misc_feature 1..20: note = antisense sequence
  source 1..20: mol_type = other RNA
gtcacgttctgtctgggctc

SEQ ID NO: 1369 - RNA, 20 nt, synthetic construct
  misc_feature 1..20: note = antisense sequence
  source 1..20: mol_type = other RNA
ggtcacgttctgtctgggct

SEQ ID NO: 1370 - RNA, 20 nt, synthetic construct
  misc_feature 1..20: note = antisense sequence
  source 1..20: mol_type = other RNA
tggtcacgttctgtctgggc

SEQ ID NO: 1371 - RNA, 20 nt, synthetic construct
  misc_feature 1..20: note = antisense sequence
  source 1..20: mol_type = other RNA
ctggtcacgttctgtctggg

SEQ ID NO: 1372 - RNA, 20 nt, synthetic construct
  misc_feature 1..20: note = antisense sequence
  source 1..20: mol_type = other RNA
actggtcacgttctgtctgg

SEQ ID NO: 1373 - RNA, 20 nt, synthetic construct
  misc_feature 1..20: note = antisense sequence
  source 1..20: mol_type = other RNA
tactggtcacgttctgtctg

SEQ ID NO: 1374 - RNA, 20 nt, synthetic construct
  misc_feature 1..20: note = antisense sequence
  source 1..20: mol_type = other RNA
ctactggtcacgttctgtct

SEQ ID NO: 1375 - RNA, 20 nt, synthetic construct
  misc_feature 1..20: note = antisense sequence
  source 1..20: mol_type = other RNA
aactactggtcacgttctgt

SEQ ID NO: 1376 - RNA, 20 nt, synthetic construct
  misc_feature 1..20: note = antisense sequence
  source 1..20: mol_type = other RNA
tgagaactactggtcacgtt

SEQ ID NO: 1377 - RNA, 20 nt, synthetic construct
  misc_feature 1..20: note = antisense sequence
  source 1..20: mol_type = other RNA
ttctgagaactactggtcac

SEQ ID NO: 1378 - RNA, 20 nt, synthetic construct
  misc_feature 1..20: note = antisense sequence
  source 1..20: mol_type = other RNA
ggtttctgagaactactggt

SEQ ID NO: 1379 - RNA, 20 nt, synthetic construct
  misc_feature 1..20: note = antisense sequence
  source 1..20: mol_type = other RNA
ctggtatttagaagcggttt

SEQ ID NO: 1380 - RNA, 20 nt, synthetic construct
  misc_feature 1..20: note = antisense sequence
  source 1..20: mol_type = other RNA
gctggtatttagaagcggtt

SEQ ID NO: 1381 - RNA, 20 nt, synthetic construct
  misc_feature 1..20: note = antisense sequence
  source 1..20: mol_type = other RNA
agctggtatttagaagcggt

SEQ ID NO: 1382 - RNA, 20 nt, synthetic construct
  misc_feature 1..20: note = antisense sequence
  source 1..20: mol_type = other RNA
gagctggtatttagaagcgg

SEQ ID NO: 1383 - RNA, 20 nt, synthetic construct
  misc_feature 1..20: note = antisense sequence
  source 1..20: mol_type = other RNA
ggagctggtatttagaagcg

SEQ ID NO: 1384 - RNA, 20 nt, synthetic construct
  misc_feature 1..20: note = antisense sequence
  source 1..20: mol_type = other RNA
tggagctggtatttagaagc

SEQ ID NO: 1385 - RNA, 20 nt, synthetic construct
  misc_feature 1..20: note = antisense sequence
  source 1..20: mol_type = other RNA
tgttggagctggtatttaga

SEQ ID NO: 1386 - RNA, 20 nt, synthetic construct
  misc_feature 1..20: note = antisense sequence
  source 1..20: mol_type = other RNA
ctgttggagctggtatttag

SEQ ID NO: 1387 - RNA, 20 nt, synthetic construct
  misc_feature 1..20: note = antisense sequence
  source 1..20: mol_type = other RNA
gcctgttggagctggtattt

SEQ ID NO: 1388 - RNA, 20 nt, synthetic construct
  misc_feature 1..20: note = antisense sequence
  source 1..20: mol_type = other RNA
agcctgttggagctggtatt

SEQ ID NO: 1389 - RNA, 20 nt, synthetic construct
  misc_feature 1..20: note = antisense sequence
  source 1..20: mol_type = other RNA
aagcctgttggagctggtat

SEQ ID NO: 1390 - RNA, 20 nt, synthetic construct
  misc_feature 1..20: note = antisense sequence
  source 1..20: mol_type = other RNA
caagcctgttggagctggta

SEQ ID NO: 1391 - RNA, 20 nt, synthetic construct
  misc_feature 1..20: note = antisense sequence
  source 1..20: mol_type = other RNA
acaagcctgttggagctggt

SEQ ID NO: 1392 - RNA, 20 nt, synthetic construct
  misc_feature 1..20: note = antisense sequence
  source 1..20: mol_type = other RNA
tacaagcctgttggagctgg

SEQ ID NO: 1393 - RNA, 20 nt, synthetic construct
  misc_feature 1..20: note = antisense sequence
  source 1..20: mol_type = other RNA
ctacaagcctgttggagctg

SEQ ID NO: 1394 - RNA, 20 nt, synthetic construct
  misc_feature 1..20: note = antisense sequence
  source 1..20: mol_type = other RNA
gctacaagcctgttggagct

SEQ ID NO: 1395 - RNA, 20 nt, synthetic construct
  misc_feature 1..20: note = antisense sequence
  source 1..20: mol_type = other RNA
cgctacaagcctgttggagc

SEQ ID NO: 1396 - RNA, 20 nt, synthetic construct
  misc_feature 1..20: note = antisense sequence
  source 1..20: mol_type = other RNA
acgctacaagcctgttggag

SEQ ID NO: 1397 - RNA, 20 nt, synthetic construct
  misc_feature 1..20: note = antisense sequence
  source 1..20: mol_type = other RNA
gacgctacaagcctgttgga

SEQ ID NO: 1398 - RNA, 20 nt, synthetic construct
  misc_feature 1..20: note = antisense sequence
  source 1..20: mol_type = other RNA
ggacgctacaagcctgttgg

SEQ ID NO: 1399 - RNA, 20 nt, synthetic construct
  misc_feature 1..20: note = antisense sequence
  source 1..20: mol_type = other RNA
cggacgctacaagcctgttg

SEQ ID NO: 1400 - RNA, 20 nt, synthetic construct
  misc_feature 1..20: note = antisense sequence
  source 1..20: mol_type = other RNA
tcggacgctacaagcctgtt

SEQ ID NO: 1401 - RNA, 20 nt, synthetic construct
  misc_feature 1..20: note = antisense sequence
  source 1..20: mol_type = other RNA
ctcggacgctacaagcctgt

SEQ ID NO: 1402 - RNA, 20 nt, synthetic construct
  misc_feature 1..20: note = antisense sequence
  source 1..20: mol_type = other RNA
actcggacgctacaagcctg

SEQ ID NO: 1403 - RNA, 20 nt, synthetic construct
  misc_feature 1..20: note = antisense sequence
  source 1..20: mol_type = other RNA
cactcggacgctacaagcct

SEQ ID NO: 1404 - RNA, 20 nt, synthetic construct
  misc_feature 1..20: note = antisense sequence
  source 1..20: mol_type = other RNA
cttgccttatccgcactcgg

SEQ ID NO: 1405 - RNA, 20 nt, synthetic construct
  misc_feature 1..20: note = antisense sequence
  source 1..20: mol_type = other RNA
tcttgccttatccgcactcg

SEQ ID NO: 1406 - RNA, 20 nt, synthetic construct
  misc_feature 1..20: note = antisense sequence
  source 1..20: mol_type = other RNA
ctcttgccttatccgcactc

SEQ ID NO: 1407 - RNA, 20 nt, synthetic construct
  misc_feature 1..20: note = antisense sequence
  source 1..20: mol_type = other RNA
gctcttgccttatccgcact

SEQ ID NO: 1408 - RNA, 20 nt, synthetic construct
  misc_feature 1..20: note = antisense sequence
  source 1..20: mol_type = other RNA
tgctcttgccttatccgcac

SEQ ID NO: 1409 - RNA, 20 nt, synthetic construct
  misc_feature 1..20: note = antisense sequence
  source 1..20: mol_type = other RNA
ttgctcttgccttatccgca

SEQ ID NO: 1410 - RNA, 20 nt, synthetic construct
  misc_feature 1..20: note = antisense sequence
  source 1..20: mol_type = other RNA
tttgctcttgccttatccgc

SEQ ID NO: 1411 - RNA, 20 nt, synthetic construct
  misc_feature 1..20: note = antisense sequence
  source 1..20: mol_type = other RNA
ttttgctcttgccttatccg

SEQ ID NO: 1412 - RNA, 20 nt, synthetic construct
  misc_feature 1..20: note = antisense sequence
  source 1..20: mol_type = other RNA
cagaagtgcagatttggccc

SEQ ID NO: 1413 - RNA, 20 nt, synthetic construct
  misc_feature 1..20: note = antisense sequence
  source 1..20: mol_type = other RNA
tcagaagtgcagatttggcc

SEQ ID NO: 1414 - RNA, 20 nt, synthetic construct
  misc_feature 1..20: note = antisense sequence
  source 1..20: mol_type = other RNA
ctctcagaagtgcagatttg

SEQ ID NO: 1415 - RNA, 20 nt, synthetic construct
  misc_feature 1..20: note = antisense sequence
  source 1..20: mol_type = other RNA
agctctcagaagtgcagatt

SEQ ID NO: 1416 - RNA, 20 nt, synthetic construct
  misc_feature 1..20: note = antisense sequence
  source 1..20: mol_type = other RNA
tagctctcagaagtgcagat

SEQ ID NO: 1417 - RNA, 20 nt, synthetic construct
  misc_feature 1..20: note = antisense sequence
  source 1..20: mol_type = other RNA
gtagctctcagaagtgcaga

SEQ ID NO: 1418 - RNA, 20 nt, synthetic construct
  misc_feature 1..20: note = antisense sequence
  source 1..20: mol_type = other RNA
agtagctctcagaagtgcag

SEQ ID NO: 1419 - RNA, 20 nt, synthetic construct
  misc_feature 1..20: note = antisense sequence
  source 1..20: mol_type = other RNA
aaagtagctctcagaagtgc

SEQ ID NO: 1420 - RNA, 20 nt, synthetic construct
  misc_feature 1..20: note = antisense sequence
  source 1..20: mol_type = other RNA
aaaagtagctctcagaagtg

SEQ ID NO: 1421 - RNA, 20 nt, synthetic construct
  misc_feature 1..20: note = antisense sequence
  source 1..20: mol_type = other RNA
cttagcagtaaaagtagctc

SEQ ID NO: 1422 - RNA, 20 nt, synthetic construct
  misc_feature 1..20: note = antisense sequence
  source 1..20: mol_type = other RNA
gcttagcagtaaaagtagct

SEQ ID NO: 1423 - RNA, 20 nt, synthetic construct
  misc_feature 1..20: note = antisense sequence
  source 1..20: mol_type = other RNA
agcttagcagtaaaagtagc

SEQ ID NO: 1424 - RNA, 20 nt, synthetic construct
  misc_feature 1..20: note = antisense sequence
  source 1..20: mol_type = other RNA
cttccctctgggtaaatcca

SEQ ID NO: 1425 - RNA, 20 nt, synthetic construct
  misc_feature 1..20: note = antisense sequence
  source 1..20: mol_type = other RNA
cgcttccctctgggtaaatc

SEQ ID NO: 1426 - RNA, 20 nt, synthetic construct
  misc_feature 1..20: note = antisense sequence
  source 1..20: mol_type = other RNA
aacgcttccctctgggtaaa

SEQ ID NO: 1427 - RNA, 20 nt, synthetic construct
  misc_feature 1..20: note = antisense sequence
  source 1..20: mol_type = other RNA
caacgcttccctctgggtaa

SEQ ID NO: 1428 - RNA, 20 nt, synthetic construct
  misc_feature 1..20: note = antisense sequence
  source 1..20: mol_type = other RNA
gcaacgcttccctctgggta

SEQ ID NO: 1429 - RNA, 20 nt, synthetic construct
  misc_feature 1..20: note = antisense sequence
  source 1..20: mol_type = other RNA
tgcaacgcttccctctgggt

SEQ ID NO: 1430 - RNA, 20 nt, synthetic construct
  misc_feature 1..20: note = antisense sequence
  source 1..20: mol_type = other RNA
actgcaacgcttccctctgg

SEQ ID NO: 1431 - RNA, 20 nt, synthetic construct
  misc_feature 1..20: note = antisense sequence
  source 1..20: mol_type = other RNA
cactgcaacgcttccctctg

SEQ ID NO: 1432 - RNA, 20 nt, synthetic construct
  misc_feature 1..20: note = antisense sequence
  source 1..20: mol_type = other RNA
ccactgcaacgcttccctct

SEQ ID NO: 1433 - RNA, 20 nt, synthetic construct
  misc_feature 1..20: note = antisense sequence
  source 1..20: mol_type = other RNA
tgccactgcaacgcttccct

SEQ ID NO: 1434 - RNA, 20 nt, synthetic construct
  misc_feature 1..20: note = antisense sequence
  source 1..20: mol_type = other RNA
gttttacctgcctgcggctg

SEQ ID NO: 1435 - RNA, 20 nt, synthetic construct
  misc_feature 1..20: note = antisense sequence
  source 1..20: mol_type = other RNA
ctagttttacctgcctgcgg

SEQ ID NO: 1436 - RNA, 20 nt, synthetic construct
  misc_feature 1..20: note = antisense sequence
  source 1..20: mol_type = other RNA
tgtgtgagtgcaaatactag

SEQ ID NO: 1437 - RNA, 20 nt, synthetic construct
  misc_feature 1..20: note = antisense sequence
  source 1..20: mol_type = other RNA
ctgtctgtgaagaatccggg

SEQ ID NO: 1438 - RNA, 20 nt, synthetic construct
  misc_feature 1..20: note = antisense sequence
  source 1..20: mol_type = other RNA
tccctgtctgtgaagaatcc

SEQ ID NO: 1439 - RNA, 20 nt, synthetic construct
  misc_feature 1..20: note = antisense sequence
  source 1..20: mol_type = other RNA
atccctgtctgtgaagaatc

SEQ ID NO: 1440 - RNA, 20 nt, synthetic construct
  misc_feature 1..20: note = antisense sequence
  source 1..20: mol_type = other RNA
ccatccctgtctgtgaagaa

SEQ ID NO: 1441 - RNA, 20 nt, synthetic construct
  misc_feature 1..20: note = antisense sequence
  source 1..20: mol_type = other RNA
tccatccctgtctgtgaaga

SEQ ID NO: 1442 - RNA, 20 nt, synthetic construct
  misc_feature 1..20: note = antisense sequence
  source 1..20: mol_type = other RNA
tcttccatccctgtctgtga

SEQ ID NO: 1443 - RNA, 20 nt, synthetic construct
  misc_feature 1..20: note = antisense sequence
  source 1..20: mol_type = other RNA
ccaaacttcaacttcctaag

SEQ ID NO: 1444 - RNA, 20 nt, synthetic construct
  misc_feature 1..20: note = antisense sequence
  source 1..20: mol_type = other RNA
aatgccaaacttcaacttcc

SEQ ID NO: 1445 - RNA, 20 nt, synthetic construct
  misc_feature 1..20: note = antisense sequence
  source 1..20: mol_type = other RNA
gtggcgagtcctttatttta

SEQ ID NO: 1446 - RNA, 20 nt, synthetic construct
  misc_feature 1..20: note = antisense sequence
  source 1..20: mol_type = other RNA
ggtggcgagtcctttatttt

SEQ ID NO: 1447 - RNA, 20 nt, synthetic construct
  misc_feature 1..20: note = antisense sequence
  source 1..20: mol_type = other RNA
tggtggcgagtcctttattt

SEQ ID NO: 1448 - RNA, 20 nt, synthetic construct
  misc_feature 1..20: note = antisense sequence
  source 1..20: mol_type = other RNA
gtggtggcgagtcctttatt

SEQ ID NO: 1449 - RNA, 20 nt, synthetic construct
  misc_feature 1..20: note = antisense sequence
  source 1..20: mol_type = other RNA
agtggtggcgagtcctttat

SEQ ID NO: 1450 - RNA, 20 nt, synthetic construct
  misc_feature 1..20: note = antisense sequence
  source 1..20: mol_type = other RNA
gagtggtggcgagtccttta

SEQ ID NO: 1451 - RNA, 20 nt, synthetic construct
  misc_feature 1..20: note = antisense sequence
  source 1..20: mol_type = other RNA
agagtggtggcgagtccttt

SEQ ID NO: 1452 - RNA, 20 nt, synthetic construct
  misc_feature 1..20: note = antisense sequence
  source 1..20: mol_type = other RNA
cagagtggtggcgagtcctt

SEQ ID NO: 1453 - RNA, 20 nt, synthetic construct
  misc_feature 1..20: note = antisense sequence
  source 1..20: mol_type = other RNA
acagagtggtggcgagtcct

SEQ ID NO: 1454 - RNA, 20 nt, synthetic construct
  misc_feature 1..20: note = antisense sequence
  source 1..20: mol_type = other RNA
aactccctcaagaaggtgca

SEQ ID NO: 1455 - RNA, 20 nt, synthetic construct
  misc_feature 1..20: note = antisense sequence
  source 1..20: mol_type = other RNA
gaactccctcaagaaggtgc

SEQ ID NO: 1456 - RNA, 20 nt, synthetic construct
  misc_feature 1..20: note = antisense sequence
  source 1..20: mol_type = other RNA
actaagctgtgaggcgctcc

SEQ ID NO: 1457 - RNA, 20 nt, synthetic construct
  misc_feature 1..20: note = antisense sequence
  source 1..20: mol_type = other RNA
tacacagttcccgctggcag

SEQ ID NO: 1458 - RNA, 20 nt, synthetic construct
  misc_feature 1..20: note = antisense sequence
  source 1..20: mol_type = other RNA
ctacacagttcccgctggca

SEQ ID NO: 1459 - RNA, 20 nt, synthetic construct
  misc_feature 1..20: note = antisense sequence
  source 1..20: mol_type = other RNA
cagcacttcctctatccttt

SEQ ID NO: 1460 - RNA, 20 nt, synthetic construct
  misc_feature 1..20: note = antisense sequence
  source 1..20: mol_type = other RNA
agggcagcacttcctctatc

SEQ ID NO: 1461 - RNA, 20 nt, synthetic construct
  misc_feature 1..20: note = antisense sequence
  source 1..20: mol_type = other RNA
tagggcagcacttcctctat

SEQ ID NO: 1462 - RNA, 20 nt, synthetic construct
  misc_feature 1..20: note = antisense sequence
  source 1..20: mol_type = other RNA
cttcgactcatgcagcctag

SEQ ID NO: 1463 - RNA, 20 nt, synthetic construct
  misc_feature 1..20: note = antisense sequence
  source 1..20: mol_type = other RNA
gcttcgactcatgcagccta

SEQ ID NO: 1464 - RNA, 20 nt, synthetic construct
  misc_feature 1..20: note = antisense sequence
  source 1..20: mol_type = other RNA
tgcttcgactcatgcagcct

SEQ ID NO: 1465 - RNA, 20 nt, synthetic construct
  misc_feature 1..20: note = antisense sequence
  source 1..20: mol_type = other RNA
ttgcttcgactcatgcagcc

SEQ ID NO: 1466 - RNA, 20 nt, synthetic construct
  misc_feature 1..20: note = antisense sequence
  source 1..20: mol_type = other RNA
cttgcttcgactcatgcagc

SEQ ID NO: 1467 - RNA, 20 nt, synthetic construct
  misc_feature 1..20: note = antisense sequence
  source 1..20: mol_type = other RNA
gcttgcttcgactcatgcag

SEQ ID NO: 1468 - RNA, 20 nt, synthetic construct
  misc_feature 1..20: note = antisense sequence
  source 1..20: mol_type = other RNA
cgcttgcttcgactcatgca

SEQ ID NO: 1469 - RNA, 20 nt, synthetic construct
  misc_feature 1..20: note = antisense sequence
  source 1..20: mol_type = other RNA
acgcttgcttcgactcatgc

SEQ ID NO: 1470 - RNA, 20 nt, synthetic construct
  misc_feature 1..20: note = antisense sequence
  source 1..20: mol_type = other RNA
cacgcttgcttcgactcatg

SEQ ID NO: 1471 - RNA, 20 nt, synthetic construct
  misc_feature 1..20: note = antisense sequence
  source 1..20: mol_type = other RNA
acacgcttgcttcgactcat

SEQ ID NO: 1472 - RNA, 20 nt, synthetic construct
  misc_feature 1..20: note = antisense sequence
  source 1..20: mol_type = other RNA
aacacgcttgcttcgactca

SEQ ID NO: 1473 - RNA, 20 nt, synthetic construct
  misc_feature 1..20: note = antisense sequence
  source 1..20: mol_type = other RNA
aaacacgcttgcttcgactc

SEQ ID NO: 1474 - RNA, 20 nt, synthetic construct
  misc_feature 1..20: note = antisense sequence
  source 1..20: mol_type = other RNA
gaaacacgcttgcttcgact

SEQ ID NO: 1475 - RNA, 20 nt, synthetic construct
  misc_feature 1..20: note = antisense sequence
  source 1..20: mol_type = other RNA
ggaaacacgcttgcttcgac

SEQ ID NO: 1476 - RNA, 20 nt, synthetic construct
  misc_feature 1..20: note = antisense sequence
  source 1..20: mol_type = other RNA
aggaaacacgcttgcttcga

SEQ ID NO: 1477 - RNA, 20 nt, synthetic construct
  misc_feature 1..20: note = antisense sequence
  source 1..20: mol_type = other RNA
aaggaaacacgcttgcttcg

SEQ ID NO: 1478 - RNA, 20 nt, synthetic construct
  misc_feature 1..20: note = antisense sequence
  source 1..20: mol_type = other RNA
ggaaggaaacacgcttgctt

SEQ ID NO: 1479 - RNA, 20 nt, synthetic construct
  misc_feature 1..20: note = antisense sequence
  source 1..20: mol_type = other RNA
gcgggaaggaaacacgcttg

SEQ ID NO: 1480 - RNA, 20 nt, synthetic construct
  misc_feature 1..20: note = antisense sequence
  source 1..20: mol_type = other RNA
tctaagggcacttgcctggc

SEQ ID NO: 1481 - RNA, 20 nt, synthetic construct
  misc_feature 1..20: note = antisense sequence
  source 1..20: mol_type = other RNA
ttctaagggcacttgcctgg

SEQ ID NO: 1482 - RNA, 20 nt, synthetic construct
  misc_feature 1..20: note = antisense sequence
  source 1..20: mol_type = other RNA
tttctaagggcacttgcctg

SEQ ID NO: 1483 - RNA, 20 nt, synthetic construct
  misc_feature 1..20: note = antisense sequence
  source 1..20: mol_type = other RNA
gatgggaatgcaggccagga

SEQ ID NO: 1484 - RNA, 20 nt, synthetic construct
  misc_feature 1..20: note = antisense sequence
  source 1..20: mol_type = other RNA
agaaccaaaggaaccaagga

SEQ ID NO: 1485 - RNA, 20 nt, synthetic construct
  misc_feature 1..20: note = antisense sequence
  source 1..20: mol_type = other RNA
cactgacagaaccaaaggaa

SEQ ID NO: 1486 - RNA, 20 nt, synthetic construct
  misc_feature 1..20: note = antisense sequence
  source 1..20: mol_type = other RNA
ctcactgacagaaccaaagg

SEQ ID NO: 1487 - RNA, 20 nt, synthetic construct
  misc_feature 1..20: note = antisense sequence
  source 1..20: mol_type = other RNA
gctcactgacagaaccaaag

SEQ ID NO: 1488 - RNA, 20 nt, synthetic construct
  misc_feature 1..20: note = antisense sequence
  source 1..20: mol_type = other RNA
ggctcactgacagaaccaaa

SEQ ID NO: 1489 - RNA, 20 nt, synthetic construct
  misc_feature 1..20: note = antisense sequence
  source 1..20: mol_type = other RNA
gggctcactgacagaaccaa

SEQ ID NO: 1490 - RNA, 20 nt, synthetic construct
  misc_feature 1..20: note = antisense sequence
  source 1..20: mol_type = other RNA
tcctcacgagcttcatggcc

SEQ ID NO: 1491 - RNA, 20 nt, synthetic construct
  misc_feature 1..20: note = antisense sequence
  source 1..20: mol_type = other RNA
ttcctcacgagcttcatggc

SEQ ID NO: 1492 - RNA, 20 nt, synthetic construct
  misc_feature 1..20: note = antisense sequence
  source 1..20: mol_type = other RNA
cttcctcacgagcttcatgg

SEQ ID NO: 1493 - RNA, 20 nt, synthetic construct
  misc_feature 1..20: note = antisense sequence
  source 1..20: mol_type = other RNA
tcttcctcacgagcttcatg

SEQ ID NO: 1494 - RNA, 20 nt, synthetic construct
  misc_feature 1..20: note = antisense sequence
  source 1..20: mol_type = other RNA
ttcttcctcacgagcttcat

SEQ ID NO: 1495 - RNA, 20 nt, synthetic construct
  misc_feature 1..20: note = antisense sequence
  source 1..20: mol_type = other RNA
gttcttcctcacgagcttca

SEQ ID NO: 1496 - RNA, 20 nt, synthetic construct
  misc_feature 1..20: note = antisense sequence
  source 1..20: mol_type = other RNA
tgttcttcctcacgagcttc

SEQ ID NO: 1497 - RNA, 20 nt, synthetic construct
  misc_feature 1..20: note = antisense sequence
  source 1..20: mol_type = other RNA
atgttcttcctcacgagctt

SEQ ID NO: 1498 - RNA, 20 nt, synthetic construct
  misc_feature 1..20: note = antisense sequence
  source 1..20: mol_type = other RNA
gatgttcttcctcacgagct

SEQ ID NO: 1499 - RNA, 20 nt, synthetic construct
  misc_feature 1..20: note = antisense sequence
  source 1..20: mol_type = other RNA
cgatgttcttcctcacgagc

SEQ ID NO: 1500 - RNA, 20 nt, synthetic construct
  misc_feature 1..20: note = antisense sequence
  source 1..20: mol_type = other RNA
tcgatgttcttcctcacgag

SEQ ID NO: 1501 - RNA, 20 nt, synthetic construct
  misc_feature 1..20: note = antisense sequence
  source 1..20: mol_type = other RNA
ctcgatgttcttcctcacga

SEQ ID NO: 1502 - RNA, 20 nt, synthetic construct
  misc_feature 1..20: note = antisense sequence
  source 1..20: mol_type = other RNA
tctcgatgttcttcctcacg

SEQ ID NO: 1503 - RNA, 20 nt, synthetic construct
  misc_feature 1..20: note = antisense sequence
  source 1..20: mol_type = other RNA
ttctcgatgttcttcctcac

SEQ ID NO: 1504 - RNA, 20 nt, synthetic construct
  misc_feature 1..20: note = antisense sequence
  source 1..20: mol_type = other RNA
cttctcgatgttcttcctca

SEQ ID NO: 1505 - RNA, 20 nt, synthetic construct
  misc_feature 1..20: note = antisense sequence
  source 1..20: mol_type = other RNA
ccttctcgatgttcttcctc

SEQ ID NO: 1506 - RNA, 20 nt, synthetic construct
  misc_feature 1..20: note = antisense sequence
  source 1..20: mol_type = other RNA
gtccttctcgatgttcttcc

SEQ ID NO: 1507 - RNA, 20 nt, synthetic construct
  misc_feature 1..20: note = antisense sequence
  source 1..20: mol_type = other RNA
tgtccttctcgatgttcttc

SEQ ID NO: 1508 - RNA, 20 nt, synthetic construct
  misc_feature 1..20: note = antisense sequence
  source 1..20: mol_type = other RNA
ttgtccttctcgatgttctt

SEQ ID NO: 1509 - RNA, 20 nt, synthetic construct
  misc_feature 1..20: note = antisense sequence
  source 1..20: mol_type = other RNA
attgtccttctcgatgttct

SEQ ID NO: 1510 - RNA, 20 nt, synthetic construct
  misc_feature 1..20: note = antisense sequence
  source 1..20: mol_type = other RNA
cattgtccttctcgatgttc

SEQ ID NO: 1511 - RNA, 20 nt, synthetic construct
  misc_feature 1..20: note = antisense sequence
  source 1..20: mol_type = other RNA
gcattgtccttctcgatgtt

SEQ ID NO: 1512 - RNA, 20 nt, synthetic construct
  misc_feature 1..20: note = antisense sequence
  source 1..20: mol_type = other RNA
cgcattgtccttctcgatgt

SEQ ID NO: 1513 - RNA, 20 nt, synthetic construct
  misc_feature 1..20: note = antisense sequence
  source 1..20: mol_type = other RNA
ccgcattgtccttctcgatg

SEQ ID NO: 1514 - RNA, 20 nt, synthetic construct
  misc_feature 1..20: note = antisense sequence
  source 1..20: mol_type = other RNA
cccgcattgtccttctcgat

SEQ ID NO: 1515 - RNA, 20 nt, synthetic construct
  misc_feature 1..20: note = antisense sequence
  source 1..20: mol_type = other RNA
ggttgtaagtgtgccacatg

SEQ ID NO: 1516 - RNA, 20 nt, synthetic construct
  misc_feature 1..20: note = antisense sequence
  source 1..20: mol_type = other RNA
aggttgtaagtgtgccacat

SEQ ID NO: 1517 - RNA, 20 nt, synthetic construct
  misc_feature 1..20: note = antisense sequence
  source 1..20: mol_type = other RNA
gaggttgtaagtgtgccaca

SEQ ID NO: 1518 - RNA, 20 nt, synthetic construct
  misc_feature 1..20: note = antisense sequence
  source 1..20: mol_type = other RNA
acgaggttgtaagtgtgcca

SEQ ID NO: 1519 - RNA, 20 nt, synthetic construct
  misc_feature 1..20: note = antisense sequence
  source 1..20: mol_type = other RNA
cacgaggttgtaagtgtgcc

SEQ ID NO: 1520 - RNA, 20 nt, synthetic construct
  misc_feature 1..20: note = antisense sequence
  source 1..20: mol_type = other RNA
tgcacgaggttgtaagtgtg

SEQ ID NO: 1521 - RNA, 20 nt, synthetic construct
  misc_feature 1..20: note = antisense sequence
  source 1..20: mol_type = other RNA
ctgcacgaggttgtaagtgt

SEQ ID NO: 1522 - RNA, 20 nt, synthetic construct
  misc_feature 1..20: note = antisense sequence
  source 1..20: mol_type = other RNA
cctgcacgaggttgtaagtg

SEQ ID NO: 1523 - RNA, 20 nt, synthetic construct
  misc_feature 1..20: note = antisense sequence
  source 1..20: mol_type = other RNA
taccttgcggatggtggagg

SEQ ID NO: 1524 - RNA, 20 nt, synthetic construct
  misc_feature 1..20: note = antisense sequence
  source 1..20: mol_type = other RNA
gtaccttgcggatggtggag

SEQ ID NO: 1525 - RNA, 20 nt, synthetic construct
  misc_feature 1..20: note = antisense sequence
  source 1..20: mol_type = other RNA
tgtaccttgcggatggtgga

SEQ ID NO: 1526 - RNA, 20 nt, synthetic construct
  misc_feature 1..20: note = antisense sequence
  source 1..20: mol_type = other RNA
ctgtaccttgcggatggtgg

SEQ ID NO: 1527 - RNA, 20 nt, synthetic construct
  misc_feature 1..20: note = antisense sequence
  source 1..20: mol_type = other RNA
tctgtaccttgcggatggtg

SEQ ID NO: 1528 - RNA, 20 nt, synthetic construct
  misc_feature 1..20: note = antisense sequence
  source 1..20: mol_type = other RNA
gtctgtaccttgcggatggt

SEQ ID NO: 1529 - RNA, 20 nt, synthetic construct
  misc_feature 1..20: note = antisense sequence
  source 1..20: mol_type = other RNA
tgtctgtaccttgcggatgg

SEQ ID NO: 1530 - RNA, 20 nt, synthetic construct
  misc_feature 1..20: note = antisense sequence
  source 1..20: mol_type = other RNA
ctgtctgtaccttgcggatg

SEQ ID NO: 1531 - RNA, 20 nt, synthetic construct
  misc_feature 1..20: note = antisense sequence
  source 1..20: mol_type = other RNA
tctgtctgtaccttgcggat

SEQ ID NO: 1532 - RNA, 20 nt, synthetic construct
  misc_feature 1..20: note = antisense sequence
  source 1..20: mol_type = other RNA
actctgtctgtaccttgcgg

SEQ ID NO: 1533 - RNA, 20 nt, synthetic construct
  misc_feature 1..20: note = antisense sequence
  source 1..20: mol_type = other RNA
gactctgtctgtaccttgcg

SEQ ID NO: 1534 - RNA, 20 nt, synthetic construct
  misc_feature 1..20: note = antisense sequence
  source 1..20: mol_type = other RNA
ggactctgtctgtaccttgc

SEQ ID NO: 1535 - RNA, 20 nt, synthetic construct
  misc_feature 1..20: note = antisense sequence
  source 1..20: mol_type = other RNA
gaggactctgtctgtacctt

SEQ ID NO: 1536 - RNA, 20 nt, synthetic construct
  misc_feature 1..20: note = antisense sequence
  source 1..20: mol_type = other RNA
ggaggactctgtctgtacct

SEQ ID NO: 1537 - RNA, 20 nt, synthetic construct
  misc_feature 1..20: note = antisense sequence
  source 1..20: mol_type = other RNA
tggaggactctgtctgtacc

SEQ ID NO: 1538 - RNA, 20 nt, synthetic construct
  misc_feature 1..20: note = antisense sequence
  source 1..20: mol_type = other RNA
gtggaggactctgtctgtac

SEQ ID NO: 1539 - RNA, 20 nt, synthetic construct
  misc_feature 1..20: note = antisense sequence
  source 1..20: mol_type = other RNA
ccgtggaggactctgtctgt

SEQ ID NO: 1540 - RNA, 20 nt, synthetic construct
  misc_feature 1..20: note = antisense sequence
  source 1..20: mol_type = other RNA
agagtgagggtagtgcggac

SEQ ID NO: 1541 - RNA, 20 nt, synthetic construct
  misc_feature 1..20: note = antisense sequence
  source 1..20: mol_type = other RNA
gagagtgagggtagtgcgga

SEQ ID NO: 1542 - RNA, 20 nt, synthetic construct
  misc_feature 1..20: note = antisense sequence
  source 1..20: mol_type = other RNA
cagagagtgagggtagtgcg

SEQ ID NO: 1543 - RNA, 20 nt, synthetic construct
  misc_feature 1..20: note = antisense sequence
  source 1..20: mol_type = other RNA
gcagagagtgagggtagtgc

SEQ ID NO: 1544 - RNA, 20 nt, synthetic construct
  misc_feature 1..20: note = antisense sequence
  source 1..20: mol_type = other RNA
tccacgcagagagtgagggt

SEQ ID NO: 1545 - RNA, 20 nt, synthetic construct
  misc_feature 1..20: note = antisense sequence
  source 1..20: mol_type = other RNA
atggcctccacgcagagagt

SEQ ID NO: 1546 - RNA, 20 nt, synthetic construct
  misc_feature 1..20: note = antisense sequence
  source 1..20: mol_type = other RNA
aagtcgatggcctccacgca

SEQ ID NO: 1547 - RNA, 20 nt, synthetic construct
  misc_feature 1..20: note = antisense sequence
  source 1..20: mol_type = other RNA
tcgaagtcgatggcctccac

SEQ ID NO: 1548 - RNA, 20 nt, synthetic construct
  misc_feature 1..20: note = antisense sequence
  source 1..20: mol_type = other RNA
gtcgaagtcgatggcctcca

SEQ ID NO: 1549 - RNA, 20 nt, synthetic construct
  misc_feature 1..20: note = antisense sequence
  source 1..20: mol_type = other RNA
agtcgaagtcgatggcctcc

SEQ ID NO: 1550 - RNA, 20 nt, synthetic construct
  misc_feature 1..20: note = antisense sequence
  source 1..20: mol_type = other RNA
gagtcgaagtcgatggcctc

SEQ ID NO: 1551 - RNA, 20 nt, synthetic construct
  misc_feature 1..20: note = antisense sequence
  source 1..20: mol_type = other RNA
agagtcgaagtcgatggcct

SEQ ID NO: 1552 - RNA, 20 nt, synthetic construct
  misc_feature 1..20: note = antisense sequence
  source 1..20: mol_type = other RNA
gagagtcgaagtcgatggcc

SEQ ID NO: 1553 - RNA, 20 nt, synthetic construct
  misc_feature 1..20: note = antisense sequence
  source 1..20: mol_type = other RNA
tgagagtcgaagtcgatggc

SEQ ID NO: 1554 - RNA, 20 nt, synthetic construct
  misc_feature 1..20: note = antisense sequence
  source 1..20: mol_type = other RNA
cttgagagtcgaagtcgatg

SEQ ID NO: 1555 - RNA, 20 nt, synthetic construct
  misc_feature 1..20: note = antisense sequence
  source 1..20: mol_type = other RNA
gcttgagagtcgaagtcgat

SEQ ID NO: 1556 - RNA, 20 nt, synthetic construct
  misc_feature 1..20: note = antisense sequence
  source 1..20: mol_type = other RNA
ggcttgagagtcgaagtcga

SEQ ID NO: 1557 - RNA, 20 nt, synthetic construct
  misc_feature 1..20: note = antisense sequence
  source 1..20: mol_type = other RNA
aggcttgagagtcgaagtcg

SEQ ID NO: 1558 - RNA, 20 nt, synthetic construct
  misc_feature 1..20: note = antisense sequence
  source 1..20: mol_type = other RNA
caggcttgagagtcgaagtc

SEQ ID NO: 1559 - RNA, 20 nt, synthetic construct
  misc_feature 1..20: note = antisense sequence
  source 1..20: mol_type = other RNA
gcaggcttgagagtcgaagt

SEQ ID NO: 1560 - RNA, 20 nt, synthetic construct
  misc_feature 1..20: note = antisense sequence
  source 1..20: mol_type = other RNA
ggcaggcttgagagtcgaag

SEQ ID NO: 1561 - RNA, 20 nt, synthetic construct
  misc_feature 1..20: note = antisense sequence
  source 1..20: mol_type = other RNA
tggcaggcttgagagtcgaa

SEQ ID NO: 1562 - RNA, 20 nt, synthetic construct
  misc_feature 1..20: note = antisense sequence
  source 1..20: mol_type = other RNA
attctcttggatgttggtcc

SEQ ID NO: 1563 - RNA, 20 nt, synthetic construct
  misc_feature 1..20: note = antisense sequence
  source 1..20: mol_type = other RNA
tcattctcttggatgttggt

SEQ ID NO: 1564 - RNA, 20 nt, synthetic construct
  misc_feature 1..20: note = antisense sequence
  source 1..20: mol_type = other RNA
ctcattctcttggatgttgg

SEQ ID NO: 1565 - RNA, 20 nt, synthetic construct
  misc_feature 1..20: note = antisense sequence
  source 1..20: mol_type = other RNA
ccatcttgacatactcattc

SEQ ID NO: 1566 - RNA, 20 nt, synthetic construct
  misc_feature 1..20: note = antisense sequence
  source 1..20: mol_type = other RNA
ctcgatggtgtggtaagccc

SEQ ID NO: 1567 - RNA, 20 nt, synthetic construct
  misc_feature 1..20: note = antisense sequence
  source 1..20: mol_type = other RNA
gctcgatggtgtggtaagcc

SEQ ID NO: 1568 - RNA, 20 nt, synthetic construct
  misc_feature 1..20: note = antisense sequence
  source 1..20: mol_type = other RNA
agctcgatggtgtggtaagc

SEQ ID NO: 1569 - RNA, 20 nt, synthetic construct
  misc_feature 1..20: note = antisense sequence
  source 1..20: mol_type = other RNA
cagctcgatggtgtggtaag

SEQ ID NO: 1570 - RNA, 20 nt, synthetic construct
  misc_feature 1..20: note = antisense sequence
  source 1..20: mol_type = other RNA
ccagctcgatggtgtggtaa

SEQ ID NO: 1571 - RNA, 20 nt, synthetic construct
  misc_feature 1..20: note = antisense sequence
  source 1..20: mol_type = other RNA
tccagctcgatggtgtggta

SEQ ID NO: 1572 - RNA, 20 nt, synthetic construct
  misc_feature 1..20: note = antisense sequence
  source 1..20: mol_type = other RNA
ctccagctcgatggtgtggt

SEQ ID NO: 1573 - RNA, 20 nt, synthetic construct
  misc_feature 1..20: note = antisense sequence
  source 1..20: mol_type = other RNA
ttgggctccagctcgatggt

SEQ ID NO: 1574 - RNA, 20 nt, synthetic construct
  misc_feature 1..20: note = antisense sequence
  source 1..20: mol_type = other RNA
tatcccactgcttcttggcc

SEQ ID NO: 1575 - RNA, 20 nt, synthetic construct
  misc_feature 1..20: note = antisense sequence
  source 1..20: mol_type = other RNA
ctatcccactgcttcttggc

SEQ ID NO: 1576 - RNA, 20 nt, synthetic construct
  misc_feature 1..20: note = antisense sequence
  source 1..20: mol_type = other RNA
actatcccactgcttcttgg

SEQ ID NO: 1577 - RNA, 20 nt, synthetic construct
  misc_feature 1..20: note = antisense sequence
  source 1..20: mol_type = other RNA
cactatcccactgcttcttg

SEQ ID NO: 1578 - RNA, 20 nt, synthetic construct
  misc_feature 1..20: note = antisense sequence
  source 1..20: mol_type = other RNA
acactatcccactgcttctt

SEQ ID NO: 1579 - RNA, 20 nt, synthetic construct
  misc_feature 1..20: note = antisense sequence
  source 1..20: mol_type = other RNA
cacactatcccactgcttct

SEQ ID NO: 1580 - RNA, 20 nt, synthetic construct
  misc_feature 1..20: note = antisense sequence
  source 1..20: mol_type = other RNA
accacactatcccactgctt

SEQ ID NO: 1581 - RNA, 20 nt, synthetic construct
  misc_feature 1..20: note = antisense sequence
  source 1..20: mol_type = other RNA
taccacactatcccactgct

SEQ ID NO: 1582 - RNA, 20 nt, synthetic construct
  misc_feature 1..20: note = antisense sequence
  source 1..20: mol_type = other RNA
gtaccacactatcccactgc

SEQ ID NO: 1583 - RNA, 20 nt, synthetic construct
  misc_feature 1..20: note = antisense sequence
  source 1..20: mol_type = other RNA
agtaccacactatcccactg

SEQ ID NO: 1584 - RNA, 20 nt, synthetic construct
  misc_feature 1..20: note = antisense sequence
  source 1..20: mol_type = other RNA
cagtaccacactatcccact

SEQ ID NO: 1585 - RNA, 20 nt, synthetic construct
  misc_feature 1..20: note = antisense sequence
  source 1..20: mol_type = other RNA
ctccagtaccacactatccc

SEQ ID NO: 1586 - RNA, 20 nt, synthetic construct
  misc_feature 1..20: note = antisense sequence
  source 1..20: mol_type = other RNA
gctccagtaccacactatcc

SEQ ID NO: 1587 - RNA, 20 nt, synthetic construct
  misc_feature 1..20: note = antisense sequence
  source 1..20: mol_type = other RNA
gcgctccagtaccacactat

SEQ ID NO: 1588 - RNA, 20 nt, synthetic construct
  misc_feature 1..20: note = antisense sequence
  source 1..20: mol_type = other RNA
tgcgctccagtaccacacta

SEQ ID NO: 1589 - RNA, 20 nt, synthetic construct
  misc_feature 1..20: note = antisense sequence
  source 1..20: mol_type = other RNA
atgcgctccagtaccacact

SEQ ID NO: 1590 - RNA, 20 nt, synthetic construct
  misc_feature 1..20: note = antisense sequence
  source 1..20: mol_type = other RNA
gatgcgctccagtaccacac

SEQ ID NO: 1591 - RNA, 20 nt, synthetic construct
  misc_feature 1..20: note = antisense sequence
  source 1..20: mol_type = other RNA
cgatgcgctccagtaccaca

SEQ ID NO: 1592 - RNA, 20 nt, synthetic construct
  misc_feature 1..20: note = antisense sequence
  source 1..20: mol_type = other RNA
tcgatgcgctccagtaccac

SEQ ID NO: 1593 - RNA, 20 nt, synthetic construct
  misc_feature 1..20: note = antisense sequence
  source 1..20: mol_type = other RNA
ctcgatgcgctccagtacca

SEQ ID NO: 1594 - RNA, 20 nt, synthetic construct
  misc_feature 1..20: note = antisense sequence
  source 1..20: mol_type = other RNA
tgctcgatgcgctccagtac

SEQ ID NO: 1595 - RNA, 20 nt, synthetic construct
  misc_feature 1..20: note = antisense sequence
  source 1..20: mol_type = other RNA
ctgctcgatgcgctccagta

SEQ ID NO: 1596 - RNA, 20 nt, synthetic construct
  misc_feature 1..20: note = antisense sequence
  source 1..20: mol_type = other RNA
cttcctgcatgaccacagcc

SEQ ID NO: 1597 - RNA, 20 nt, synthetic construct
  misc_feature 1..20: note = antisense sequence
  source 1..20: mol_type = other RNA
ccttcctgcatgaccacagc

SEQ ID NO: 1598 - RNA, 20 nt, synthetic construct
  misc_feature 1..20: note = antisense sequence
  source 1..20: mol_type = other RNA
aagcagatatgggcgaggcc

SEQ ID NO: 1599 - RNA, 20 nt, synthetic construct
  misc_feature 1..20: note = antisense sequence
  source 1..20: mol_type = other RNA
taagcagatatgggcgaggc

SEQ ID NO: 1600 - RNA, 20 nt, synthetic construct
  misc_feature 1..20: note = antisense sequence
  source 1..20: mol_type = other RNA
ctaagcagatatgggcgagg

SEQ ID NO: 1601 - RNA, 20 nt, synthetic construct
  misc_feature 1..20: note = antisense sequence
  source 1..20: mol_type = other RNA
actaagcagatatgggcgag

SEQ ID NO: 1602 - RNA, 20 nt, synthetic construct
  misc_feature 1..20: note = antisense sequence
  source 1..20: mol_type = other RNA
gactaagcagatatgggcga

SEQ ID NO: 1603 - RNA, 20 nt, synthetic construct
  misc_feature 1..20: note = antisense sequence
  source 1..20: mol_type = other RNA
tgactaagcagatatgggcg

SEQ ID NO: 1604 - RNA, 20 nt, synthetic construct
  misc_feature 1..20: note = antisense sequence
  source 1..20: mol_type = other RNA
gtgactaagcagatatgggc

SEQ ID NO: 1605 - RNA, 20 nt, synthetic construct
  misc_feature 1..20: note = antisense sequence
  source 1..20: mol_type = other RNA
agtgactaagcagatatggg

SEQ ID NO: 1606 - RNA, 20 nt, synthetic construct
  misc_feature 1..20: note = antisense sequence
  source 1..20: mol_type = other RNA
gagtgactaagcagatatgg

SEQ ID NO: 1607 - RNA, 20 nt, synthetic construct
  misc_feature 1..20: note = antisense sequence
  source 1..20: mol_type = other RNA
ggagtgactaagcagatatg

SEQ ID NO: 1608 - RNA, 20 nt, synthetic construct
  misc_feature 1..20: note = antisense sequence
  source 1..20: mol_type = other RNA
gggagtgactaagcagatat

SEQ ID NO: 1609 - RNA, 20 nt, synthetic construct
  misc_feature 1..20: note = antisense sequence
  source 1..20: mol_type = other RNA
tgggagtgactaagcagata

SEQ ID NO: 1610 - RNA, 20 nt, synthetic construct
  misc_feature 1..20: note = antisense sequence
  source 1..20: mol_type = other RNA
ctgggagtgactaagcagat

SEQ ID NO: 1611 - RNA, 20 nt, synthetic construct
  misc_feature 1..20: note = antisense sequence
  source 1..20: mol_type = other RNA
tcatgctgggagtgactaag

SEQ ID NO: 1612 - RNA, 20 nt, synthetic construct
  misc_feature 1..20: note = antisense sequence
  source 1..20: mol_type = other RNA
gagggtcatgctgggagtga

SEQ ID NO: 1613 - RNA, 20 nt, synthetic construct
  misc_feature 1..20: note = antisense sequence
  source 1..20: mol_type = other RNA
tgagggtcatgctgggagtg

SEQ ID NO: 1614 - RNA, 20 nt, synthetic construct
  misc_feature 1..20: note = antisense sequence
  source 1..20: mol_type = other RNA
gtgagggtcatgctgggagt

SEQ ID NO: 1615 - RNA, 20 nt, synthetic construct
  misc_feature 1..20: note = antisense sequence
  source 1..20: mol_type = other RNA
tgttcacctccaccttggcc

SEQ ID NO: 1616 - RNA, 20 nt, synthetic construct
  misc_feature 1..20: note = antisense sequence
  source 1..20: mol_type = other RNA
gatgttcacctccaccttgg

SEQ ID NO: 1617 - RNA, 20 nt, synthetic construct
  misc_feature 1..20: note = antisense sequence
  source 1..20: mol_type = other RNA
ggatgttcacctccaccttg

SEQ ID NO: 1618 - RNA, 20 nt, synthetic construct
  misc_feature 1..20: note = antisense sequence
  source 1..20: mol_type = other RNA
agggatgttcacctccacct

SEQ ID NO: 1619 - RNA, 20 nt, synthetic construct
  misc_feature 1..20: note = antisense sequence
  source 1..20: mol_type = other RNA
tagggatgttcacctccacc

SEQ ID NO: 1620 - RNA, 20 nt, synthetic construct
  misc_feature 1..20: note = antisense sequence
  source 1..20: mol_type = other RNA
ctagggatgttcacctccac

SEQ ID NO: 1621 - RNA, 20 nt, synthetic construct
  misc_feature 1..20: note = antisense sequence
  source 1..20: mol_type = other RNA
atagaaccgctccaaggccc

SEQ ID NO: 1622 - RNA, 20 nt, synthetic construct
  misc_feature 1..20: note = antisense sequence
  source 1..20: mol_type = other RNA
catagaaccgctccaaggcc

SEQ ID NO: 1623 - RNA, 20 nt, synthetic construct
  misc_feature 1..20: note = antisense sequence
  source 1..20: mol_type = other RNA
tcatagaaccgctccaaggc

SEQ ID NO: 1624 - RNA, 20 nt, synthetic construct
  misc_feature 1..20: note = antisense sequence
  source 1..20: mol_type = other RNA
ttcatagaaccgctccaagg

SEQ ID NO: 1625 - RNA, 20 nt, synthetic construct
  misc_feature 1..20: note = antisense sequence
  source 1..20: mol_type = other RNA
cctggaccacctgttcatag

SEQ ID NO: 1626 - RNA, 20 nt, synthetic construct
  misc_feature 1..20: note = antisense sequence
  source 1..20: mol_type = other RNA
ggatagcctggaccacctgt

SEQ ID NO: 1627 - RNA, 20 nt, synthetic construct
  misc_feature 1..20: note = antisense sequence
  source 1..20: mol_type = other RNA
tggatagcctggaccacctg

SEQ ID NO: 1628 - RNA, 20 nt, synthetic construct
  misc_feature 1..20: note = antisense sequence
  source 1..20: mol_type = other RNA
ctggatagcctggaccacct

SEQ ID NO: 1629 - RNA, 20 nt, synthetic construct
  misc_feature 1..20: note = antisense sequence
  source 1..20: mol_type = other RNA
atgtggcgctggatagcctg

SEQ ID NO: 1630 - RNA, 20 nt, synthetic construct
  misc_feature 1..20: note = antisense sequence
  source 1..20: mol_type = other RNA
tatgtggcgctggatagcct

SEQ ID NO: 1631 - RNA, 20 nt, synthetic construct
  misc_feature 1..20: note = antisense sequence
  source 1..20: mol_type = other RNA
gtatgtggcgctggatagcc

SEQ ID NO: 1632 - RNA, 20 nt, synthetic construct
  misc_feature 1..20: note = antisense sequence
  source 1..20: mol_type = other RNA
tgtatgtggcgctggatagc

SEQ ID NO: 1633 - RNA, 20 nt, synthetic construct
  misc_feature 1..20: note = antisense sequence
  source 1..20: mol_type = other RNA
gtgtatgtggcgctggatag

SEQ ID NO: 1634 - RNA, 20 nt, synthetic construct
  misc_feature 1..20: note = antisense sequence
  source 1..20: mol_type = other RNA
agtgtatgtggcgctggata

SEQ ID NO: 1635 - RNA, 20 nt, synthetic construct
  misc_feature 1..20: note = antisense sequence
  source 1..20: mol_type = other RNA
aagtgtatgtggcgctggat

SEQ ID NO: 1636 - RNA, 20 nt, synthetic construct
  misc_feature 1..20: note = antisense sequence
  source 1..20: mol_type = other RNA
aaagtgtatgtggcgctgga

SEQ ID NO: 1637 - RNA, 20 nt, synthetic construct
  misc_feature 1..20: note = antisense sequence
  source 1..20: mol_type = other RNA
caaagtgtatgtggcgctgg

SEQ ID NO: 1638 - RNA, 20 nt, synthetic construct
  misc_feature 1..20: note = antisense sequence
  source 1..20: mol_type = other RNA
tcaaagtgtatgtggcgctg

SEQ ID NO: 1639 - RNA, 20 nt, synthetic construct
  misc_feature 1..20: note = antisense sequence
  source 1..20: mol_type = other RNA
atcaaagtgtatgtggcgct

SEQ ID NO: 1640 - RNA, 20 nt, synthetic construct
  misc_feature 1..20: note = antisense sequence
  source 1..20: mol_type = other RNA
catcaaagtgtatgtggcgc

SEQ ID NO: 1641 - RNA, 20 nt, synthetic construct
  misc_feature 1..20: note = antisense sequence
  source 1..20: mol_type = other RNA
caggatgcactttacaacat

SEQ ID NO: 1642 - RNA, 20 nt, synthetic construct
  misc_feature 1..20: note = antisense sequence
  source 1..20: mol_type = other RNA
ccaggatgcactttacaaca

SEQ ID NO: 1643 - RNA, 20 nt, synthetic construct
  misc_feature 1..20: note = antisense sequence
  source 1..20: mol_type = other RNA
accaggatgcactttacaac

SEQ ID NO: 1644 - RNA, 20 nt, synthetic construct
  misc_feature 1..20: note = antisense sequence
  source 1..20: mol_type = other RNA
ccaccaggatgcactttaca

SEQ ID NO: 1645 - RNA, 20 nt, synthetic construct
  misc_feature 1..20: note = antisense sequence
  source 1..20: mol_type = other RNA
ggccaccaggatgcacttta

SEQ ID NO: 1646 - RNA, 20 nt, synthetic construct
  misc_feature 1..20: note = antisense sequence
  source 1..20: mol_type = other RNA
cctcacaaatcctgggctgg

SEQ ID NO: 1647 - RNA, 20 nt, synthetic construct
  misc_feature 1..20: note = antisense sequence
  source 1..20: mol_type = other RNA
tgctccctcacaaatcctgg

SEQ ID NO: 1648 - RNA, 20 nt, synthetic construct
  misc_feature 1..20: note = antisense sequence
  source 1..20: mol_type = other RNA
gaactgctccctcacaaatc

SEQ ID NO: 1649 - RNA, 20 nt, synthetic construct
  misc_feature 1..20: note = antisense sequence
  source 1..20: mol_type = other RNA
agaactgctccctcacaaat

SEQ ID NO: 1650 - RNA, 20 nt, synthetic construct
  misc_feature 1..20: note = antisense sequence
  source 1..20: mol_type = other RNA
gcagaactgctccctcacaa

SEQ ID NO: 1651 - RNA, 20 nt, synthetic construct
  misc_feature 1..20: note = antisense sequence
  source 1..20: mol_type = other RNA
cgcagaactgctccctcaca

SEQ ID NO: 1652 - RNA, 20 nt, synthetic construct
  misc_feature 1..20: note = antisense sequence
  source 1..20: mol_type = other RNA
tcgcagaactgctccctcac

SEQ ID NO: 1653 - RNA, 20 nt, synthetic construct
  misc_feature 1..20: note = antisense sequence
  source 1..20: mol_type = other RNA
gtcgcagaactgctccctca

SEQ ID NO: 1654 - RNA, 20 nt, synthetic construct
  misc_feature 1..20: note = antisense sequence
  source 1..20: mol_type = other RNA
tagtcgcagaactgctccct

SEQ ID NO: 1655 - RNA, 20 nt, synthetic construct
  misc_feature 1..20: note = antisense sequence
  source 1..20: mol_type = other RNA
gtagtcgcagaactgctccc

SEQ ID NO: 1656 - RNA, 20 nt, synthetic construct
  misc_feature 1..20: note = antisense sequence
  source 1..20: mol_type = other RNA
cggtcttcactgcttgttga

SEQ ID NO: 1657 - RNA, 20 nt, synthetic construct
  misc_feature 1..20: note = antisense sequence
  source 1..20: mol_type = other RNA
tcggtcttcactgcttgttg

SEQ ID NO: 1658 - RNA, 20 nt, synthetic construct
  misc_feature 1..20: note = antisense sequence
  source 1..20: mol_type = other RNA
gtcggtcttcactgcttgtt

SEQ ID NO: 1659 - RNA, 20 nt, synthetic construct
  misc_feature 1..20: note = antisense sequence
  source 1..20: mol_type = other RNA
tgtcggtcttcactgcttgt

SEQ ID NO: 1660 - RNA, 20 nt, synthetic construct
  misc_feature 1..20: note = antisense sequence
  source 1..20: mol_type = other RNA
ttgtcggtcttcactgcttg

SEQ ID NO: 1661 - RNA, 20 nt, synthetic construct
  misc_feature 1..20: note = antisense sequence
  source 1..20: mol_type = other RNA
gttgtcggtcttcactgctt

SEQ ID NO: 1662 - RNA, 20 nt, synthetic construct
  misc_feature 1..20: note = antisense sequence
  source 1..20: mol_type = other RNA
tgttgtcggtcttcactgct

SEQ ID NO: 1663 - RNA, 20 nt, synthetic construct
  misc_feature 1..20: note = antisense sequence
  source 1..20: mol_type = other RNA
ttgttgtcggtcttcactgc

SEQ ID NO: 1664 - RNA, 20 nt, synthetic construct
  misc_feature 1..20: note = antisense sequence
  source 1..20: mol_type = other RNA
tttgttgtcggtcttcactg

SEQ ID NO: 1665 - RNA, 20 nt, synthetic construct
  misc_feature 1..20: note = antisense sequence
  source 1..20: mol_type = other RNA
gtttgttgtcggtcttcact

SEQ ID NO: 1666 - RNA, 20 nt, synthetic construct
  misc_feature 1..20: note = antisense sequence
  source 1..20: mol_type = other RNA
agtttgttgtcggtcttcac

SEQ ID NO: 1667 - RNA, 20 nt, synthetic construct
  misc_feature 1..20: note = antisense sequence
  source 1..20: mol_type = other RNA
cagtttgttgtcggtcttca

SEQ ID NO: 1668 - RNA, 20 nt, synthetic construct
  misc_feature 1..20: note = antisense sequence
  source 1..20: mol_type = other RNA
gcagtttgttgtcggtcttc

SEQ ID NO: 1669 - RNA, 20 nt, synthetic construct
  misc_feature 1..20: note = antisense sequence
  source 1..20: mol_type = other RNA
agcagtttgttgtcggtctt

SEQ ID NO: 1670 - RNA, 20 nt, synthetic construct
  misc_feature 1..20: note = antisense sequence
  source 1..20: mol_type = other RNA
gagcagtttgttgtcggtct

SEQ ID NO: 1671 - RNA, 20 nt, synthetic construct
  misc_feature 1..20: note = antisense sequence
  source 1..20: mol_type = other RNA
ccctgggtaagattgtttta

SEQ ID NO: 1672 - RNA, 20 nt, synthetic construct
  misc_feature 1..20: note = antisense sequence
  source 1..20: mol_type = other RNA
atccctgggtaagattgttt

SEQ ID NO: 1673 - RNA, 20 nt, synthetic construct
  misc_feature 1..20: note = antisense sequence
  source 1..20: mol_type = other RNA
tatccctgggtaagattgtt

SEQ ID NO: 1674 - RNA, 20 nt, synthetic construct
  misc_feature 1..20: note = antisense sequence
  source 1..20: mol_type = other RNA
ttatccctgggtaagattgt

SEQ ID NO: 1675 - RNA, 20 nt, synthetic construct
  misc_feature 1..20: note = antisense sequence
  source 1..20: mol_type = other RNA
attatccctgggtaagattg

SEQ ID NO: 1676 - RNA, 20 nt, synthetic construct
  misc_feature 1..20: note = antisense sequence
  source 1..20: mol_type = other RNA
aatccctctgcccattctta

SEQ ID NO: 1677 - RNA, 20 nt, synthetic construct
  misc_feature 1..20: note = antisense sequence
  source 1..20: mol_type = other RNA
accaatccctctgcccattc

SEQ ID NO: 1678 - RNA, 20 nt, synthetic construct
  misc_feature 1..20: note = antisense sequence
  source 1..20: mol_type = other RNA
taccaatccctctgcccatt

SEQ ID NO: 1679 - RNA, 20 nt, synthetic construct
  misc_feature 1..20: note = antisense sequence
  source 1..20: mol_type = other RNA
ataccaatccctctgcccat

SEQ ID NO: 1680 - RNA, 20 nt, synthetic construct
  misc_feature 1..20: note = antisense sequence
  source 1..20: mol_type = other RNA
ttataccaatccctctgccc

SEQ ID NO: 1681 - RNA, 20 nt, synthetic construct
  misc_feature 1..20: note = antisense sequence
  source 1..20: mol_type = other RNA
gtttataccaatccctctgc

SEQ ID NO: 1682 - RNA, 20 nt, synthetic construct
  misc_feature 1..20: note = antisense sequence
  source 1..20: mol_type = other RNA
agtttataccaatccctctg

SEQ ID NO: 1683 - RNA, 20 nt, synthetic construct
  misc_feature 1..20: note = antisense sequence
  source 1..20: mol_type = other RNA
gagtagtttataccaatccc

SEQ ID NO: 1684 - RNA, 20 nt, synthetic construct
  misc_feature 1..20: note = antisense sequence
  source 1..20: mol_type = other RNA
atcccagctaagtaaagact

SEQ ID NO: 1685 - RNA, 20 nt, synthetic construct
  misc_feature 1..20: note = antisense sequence
  source 1..20: mol_type = other RNA
aatcccagctaagtaaagac

SEQ ID NO: 1686 - RNA, 20 nt, synthetic construct
  misc_feature 1..20: note = antisense sequence
  source 1..20: mol_type = other RNA
cagcgaagtttactccataa

SEQ ID NO: 1687 - RNA, 20 nt, synthetic construct
  misc_feature 1..20: note = antisense sequence
  source 1..20: mol_type = other RNA
tcagcgaagtttactccata

SEQ ID NO: 1688 - RNA, 20 nt, synthetic construct
  misc_feature 1..20: note = antisense sequence
  source 1..20: mol_type = other RNA
ttcagcgaagtttactccat

SEQ ID NO: 1689 - RNA, 20 nt, synthetic construct
  misc_feature 1..20: note = antisense sequence
  source 1..20: mol_type = other RNA
tttcagcgaagtttactcca

SEQ ID NO: 1690 - RNA, 20 nt, synthetic construct
  misc_feature 1..20: note = antisense sequence
  source 1..20: mol_type = other RNA
gtttcagcgaagtttactcc

SEQ ID NO: 1691 - RNA, 20 nt, synthetic construct
  misc_feature 1..20: note = antisense sequence
  source 1..20: mol_type = other RNA
tgtttcagcgaagtttactc

SEQ ID NO: 1692 - RNA, 20 nt, synthetic construct
  misc_feature 1..20: note = antisense sequence
  source 1..20: mol_type = other RNA
gcatgtacctagaatcacaa

SEQ ID NO: 1693 - RNA, 20 nt, synthetic construct
  misc_feature 1..20: note = antisense sequence
  source 1..20: mol_type = other RNA
ggcatgtacctagaatcaca

SEQ ID NO: 1694 - RNA, 20 nt, synthetic construct
  misc_feature 1..20: note = antisense sequence
  source 1..20: mol_type = other RNA
aggcatgtacctagaatcac

SEQ ID NO: 1695 - RNA, 20 nt, synthetic construct
  misc_feature 1..20: note = antisense sequence
  source 1..20: mol_type = other RNA
gaggcatgtacctagaatca

SEQ ID NO: 1696 - RNA, 20 nt, synthetic construct
  misc_feature 1..20: note = antisense sequence
  source 1..20: mol_type = other RNA
ggaggcatgtacctagaatc

SEQ ID NO: 1697 - RNA, 20 nt, synthetic construct
  misc_feature 1..20: note = antisense sequence
  source 1..20: mol_type = other RNA
aggaggcatgtacctagaat

SEQ ID NO: 1698 - RNA, 20 nt, synthetic construct
  misc_feature 1..20: note = antisense sequence
  source 1..20: mol_type = other RNA
ggaggaggcatgtacctaga

SEQ ID NO: 1699 - RNA, 20 nt, synthetic construct
  misc_feature 1..20: note = antisense sequence
  source 1..20: mol_type = other RNA
cggaggaggcatgtacctag

SEQ ID NO: 1700 - RNA, 20 nt, synthetic construct
  misc_feature 1..20: note = antisense sequence
  source 1..20: mol_type = other RNA
ccggaggaggcatgtaccta

SEQ ID NO: 1701 - RNA, 20 nt, synthetic construct
  misc_feature 1..20: note = antisense sequence
  source 1..20: mol_type = other RNA
gggcctctttcagggagtac

SEQ ID NO: 1702 - RNA, 20 nt, synthetic construct
  misc_feature 1..20: note = antisense sequence
  source 1..20: mol_type = other RNA
agggcctctttcagggagta

SEQ ID NO: 1703 - RNA, 20 nt, synthetic construct
  misc_feature 1..20: note = antisense sequence
  source 1..20: mol_type = other RNA
tagggtcacaaagggcctct

SEQ ID NO: 1704 - RNA, 20 nt, synthetic construct
  misc_feature 1..20: note = antisense sequence
  source 1..20: mol_type = other RNA
gtagggtcacaaagggcctc

SEQ ID NO: 1705 - RNA, 20 nt, synthetic construct
  misc_feature 1..20: note = antisense sequence
  source 1..20: mol_type = other RNA
agtagggtcacaaagggcct

SEQ ID NO: 1706 - RNA, 20 nt, synthetic construct
  misc_feature 1..20: note = antisense sequence
  source 1..20: mol_type = other RNA
cagtagggtcacaaagggcc

SEQ ID NO: 1707 - RNA, 20 nt, synthetic construct
  misc_feature 1..20: note = antisense sequence
  source 1..20: mol_type = other RNA
gccacagtagggtcacaaag

SEQ ID NO: 1708 - RNA, 20 nt, synthetic construct
  misc_feature 1..20: note = antisense sequence
  source 1..20: mol_type = other RNA
agccacagtagggtcacaaa

SEQ ID NO: 1709 - RNA, 20 nt, synthetic construct
  misc_feature 1..20: note = antisense sequence
  source 1..20: mol_type = other RNA
tagccacagtagggtcacaa

SEQ ID NO: 1710 - RNA, 20 nt, synthetic construct
  misc_feature 1..20: note = antisense sequence
  source 1..20: mol_type = other RNA
ctagccacagtagggtcaca

SEQ ID NO: 1711 - RNA, 20 nt, synthetic construct
  misc_feature 1..20: note = antisense sequence
  source 1..20: mol_type = other RNA
agcagctttagtgtctgaaa

SEQ ID NO: 1712 - RNA, 20 nt, synthetic construct
  misc_feature 1..20: note = antisense sequence
  source 1..20: mol_type = other RNA
atccaaggctttgacttccc

SEQ ID NO: 1713 - RNA, 20 nt, synthetic construct
  misc_feature 1..20: note = antisense sequence
  source 1..20: mol_type = other RNA
catccaaggctttgacttcc

SEQ ID NO: 1714 - RNA, 20 nt, synthetic construct
  misc_feature 1..20: note = antisense sequence
  source 1..20: mol_type = other RNA
tcatccaaggctttgacttc

SEQ ID NO: 1715 - RNA, 20 nt, synthetic construct
  misc_feature 1..20: note = antisense sequence
  source 1..20: mol_type = other RNA
tagaagtcatccaaggcttt

SEQ ID NO: 1716 - RNA, 20 nt, synthetic construct
  misc_feature 1..20: note = antisense sequence
  source 1..20: mol_type = other RNA
atagaagtcatccaaggctt

SEQ ID NO: 1717 - RNA, 20 nt, synthetic construct
  misc_feature 1..20: note = antisense sequence
  source 1..20: mol_type = other RNA
tatagaagtcatccaaggct

SEQ ID NO: 1718 - RNA, 20 nt, synthetic construct
  misc_feature 1..20: note = antisense sequence
  source 1..20: mol_type = other RNA
cggttcatgctgtaacattt

SEQ ID NO: 1719 - RNA, 20 nt, synthetic construct
  misc_feature 1..20: note = antisense sequence
  source 1..20: mol_type = other RNA
tccggttcatgctgtaacat

SEQ ID NO: 1720 - RNA, 20 nt, synthetic construct
  misc_feature 1..20: note = antisense sequence
  source 1..20: mol_type = other RNA
atccggttcatgctgtaaca

SEQ ID NO: 1721 - RNA, 20 nt, synthetic construct
  misc_feature 1..20: note = antisense sequence
  source 1..20: mol_type = other RNA
gatccggttcatgctgtaac

SEQ ID NO: 1722 - RNA, 20 nt, synthetic construct
  misc_feature 1..20: note = antisense sequence
  source 1..20: mol_type = other RNA
cgatccggttcatgctgtaa

SEQ ID NO: 1723 - RNA, 20 nt, synthetic construct
  misc_feature 1..20: note = antisense sequence
  source 1..20: mol_type = other RNA
tcgatccggttcatgctgta

SEQ ID NO: 1724 - RNA, 20 nt, synthetic construct
  misc_feature 1..20: note = antisense sequence
  source 1..20: mol_type = other RNA
ctcgatccggttcatgctgt

SEQ ID NO: 1725 - RNA, 20 nt, synthetic construct
  misc_feature 1..20: note = antisense sequence
  source 1..20: mol_type = other RNA
gctcgatccggttcatgctg

SEQ ID NO: 1726 - RNA, 20 nt, synthetic construct
  misc_feature 1..20: note = antisense sequence
  source 1..20: mol_type = other RNA
agctcgatccggttcatgct

SEQ ID NO: 1727 - RNA, 20 nt, synthetic construct
  misc_feature 1..20: note = antisense sequence
  source 1..20: mol_type = other RNA
aagctcgatccggttcatgc

SEQ ID NO: 1728 - RNA, 20 nt, synthetic construct
  misc_feature 1..20: note = antisense sequence
  source 1..20: mol_type = other RNA
aaagctcgatccggttcatg

SEQ ID NO: 1729 - RNA, 20 nt, synthetic construct
  misc_feature 1..20: note = antisense sequence
  source 1..20: mol_type = other RNA
gaaagctcgatccggttcat

SEQ ID NO: 1730 - RNA, 20 nt, synthetic construct
  misc_feature 1..20: note = antisense sequence
  source 1..20: mol_type = other RNA
agaaagctcgatccggttca

SEQ ID NO: 1731 - RNA, 20 nt, synthetic construct
  misc_feature 1..20: note = antisense sequence
  source 1..20: mol_type = other RNA
tagaaagctcgatccggttc

SEQ ID NO: 1732 - RNA, 20 nt, synthetic construct
  misc_feature 1..20: note = antisense sequence
  source 1..20: mol_type = other RNA
atagaaagctcgatccggtt

SEQ ID NO: 1733 - RNA, 20 nt, synthetic construct
  misc_feature 1..20: note = antisense sequence
  source 1..20: mol_type = other RNA
catagaaagctcgatccggt

SEQ ID NO: 1734 - RNA, 20 nt, synthetic construct
  misc_feature 1..20: note = antisense sequence
  source 1..20: mol_type = other RNA
ccatagaaagctcgatccgg

SEQ ID NO: 1735 - RNA, 20 nt, synthetic construct
  misc_feature 1..20: note = antisense sequence
  source 1..20: mol_type = other RNA
tccatagaaagctcgatccg

SEQ ID NO: 1736 - RNA, 20 nt, synthetic construct
  misc_feature 1..20: note = antisense sequence
  source 1..20: mol_type = other RNA
gtccatagaaagctcgatcc

SEQ ID NO: 1737 - RNA, 20 nt, synthetic construct
  misc_feature 1..20: note = antisense sequence
  source 1..20: mol_type = other RNA
gagtccatagaaagctcgat

SEQ ID NO: 1738 - RNA, 20 nt, synthetic construct
  misc_feature 1..20: note = antisense sequence
  source 1..20: mol_type = other RNA
tgagtccatagaaagctcga

SEQ ID NO: 1739 - RNA, 20 nt, synthetic construct
  misc_feature 1..20: note = antisense sequence
  source 1..20: mol_type = other RNA
ttgagtccatagaaagctcg

SEQ ID NO: 1740 - RNA, 20 nt, synthetic construct
  misc_feature 1..20: note = antisense sequence
  source 1..20: mol_type = other RNA
cttgagtccatagaaagctc

SEQ ID NO: 1741 - RNA, 20 nt, synthetic construct
  misc_feature 1..20: note = antisense sequence
  source 1..20: mol_type = other RNA
ctgcttgagtccatagaaag

SEQ ID NO: 1742 - RNA, 20 nt, synthetic construct
  misc_feature 1..20: note = antisense sequence
  source 1..20: mol_type = other RNA
cctgcttgagtccatagaaa

SEQ ID NO: 1743 - RNA, 20 nt, synthetic construct
  misc_feature 1..20: note = antisense sequence
  source 1..20: mol_type = other RNA
acctgcttgagtccatagaa

SEQ ID NO: 1744 - RNA, 20 nt, synthetic construct
  misc_feature 1..20: note = antisense sequence
  source 1..20: mol_type = other RNA
cacctgcttgagtccataga

SEQ ID NO: 1745 - RNA, 20 nt, synthetic construct
  misc_feature 1..20: note = antisense sequence
  source 1..20: mol_type = other RNA
ctccacctgcttgagtccat

SEQ ID NO: 1746 - RNA, 20 nt, synthetic construct
  misc_feature 1..20: note = antisense sequence
  source 1..20: mol_type = other RNA
ttctccacctgcttgagtcc

SEQ ID NO: 1747 - RNA, 20 nt, synthetic construct
  misc_feature 1..20: note = antisense sequence
  source 1..20: mol_type = other RNA
cttctccacctgcttgagtc

SEQ ID NO: 1748 - RNA, 20 nt, synthetic construct
  misc_feature 1..20: note = antisense sequence
  source 1..20: mol_type = other RNA
ccttctccacctgcttgagt

SEQ ID NO: 1749 - RNA, 20 nt, synthetic construct
  misc_feature 1..20: note = antisense sequence
  source 1..20: mol_type = other RNA
attggccttctccacctgct

SEQ ID NO: 1750 - RNA, 20 nt, synthetic construct
  misc_feature 1..20: note = antisense sequence
  source 1..20: mol_type = other RNA
gcttcattggccttctccac

SEQ ID NO: 1751 - RNA, 20 nt, synthetic construct
  misc_feature 1..20: note = antisense sequence
  source 1..20: mol_type = other RNA
ggcttcattggccttctcca

SEQ ID NO: 1752 - RNA, 20 nt, synthetic construct
  misc_feature 1..20: note = antisense sequence
  source 1..20: mol_type = other RNA
tggcttcattggccttctcc

SEQ ID NO: 1753 - RNA, 20 nt, synthetic construct
  misc_feature 1..20: note = antisense sequence
  source 1..20: mol_type = other RNA
ctgatgagcaatgtgtcaat

SEQ ID NO: 1754 - RNA, 20 nt, synthetic construct
  misc_feature 1..20: note = antisense sequence
  source 1..20: mol_type = other RNA
gctgatgagcaatgtgtcaa

SEQ ID NO: 1755 - RNA, 20 nt, synthetic construct
  misc_feature 1..20: note = antisense sequence
  source 1..20: mol_type = other RNA
cgctgatgagcaatgtgtca

SEQ ID NO: 1756 - RNA, 20 nt, synthetic construct
  misc_feature 1..20: note = antisense sequence
  source 1..20: mol_type = other RNA
tcgctgatgagcaatgtgtc

SEQ ID NO: 1757 - RNA, 20 nt, synthetic construct
  misc_feature 1..20: note = antisense sequence
  source 1..20: mol_type = other RNA
atcgctgatgagcaatgtgt

SEQ ID NO: 1758 - RNA, 20 nt, synthetic construct
  misc_feature 1..20: note = antisense sequence
  source 1..20: mol_type = other RNA
atcctgatgcctgaagagct

SEQ ID NO: 1759 - RNA, 20 nt, synthetic construct
  misc_feature 1..20: note = antisense sequence
  source 1..20: mol_type = other RNA
gtggctacatcctgatgcct

SEQ ID NO: 1760 - RNA, 20 nt, synthetic construct
  misc_feature 1..20: note = antisense sequence
  source 1..20: mol_type = other RNA
tgtggctacatcctgatgcc

SEQ ID NO: 1761 - RNA, 20 nt, synthetic construct
  misc_feature 1..20: note = antisense sequence
  source 1..20: mol_type = other RNA
gtgtggctacatcctgatgc

SEQ ID NO: 1762 - RNA, 20 nt, synthetic construct
  misc_feature 1..20: note = antisense sequence
  source 1..20: mol_type = other RNA
ccgtgtggctacatcctgat

SEQ ID NO: 1763 - RNA, 20 nt, synthetic construct
  misc_feature 1..20: note = antisense sequence
  source 1..20: mol_type = other RNA
tccgtgtggctacatcctga

SEQ ID NO: 1764 - RNA, 20 nt, synthetic construct
  misc_feature 1..20: note = antisense sequence
  source 1..20: mol_type = other RNA
ctccgtgtggctacatcctg

SEQ ID NO: 1765 - RNA, 20 nt, synthetic construct
  misc_feature 1..20: note = antisense sequence
  source 1..20: mol_type = other RNA
gctccgtgtggctacatcct

SEQ ID NO: 1766 - RNA, 20 nt, synthetic construct
  misc_feature 1..20: note = antisense sequence
  source 1..20: mol_type = other RNA
ataccggctccgtgtggcta

SEQ ID NO: 1767 - RNA, 20 nt, synthetic construct
  misc_feature 1..20: note = antisense sequence
  source 1..20: mol_type = other RNA
ctcacataccggctccgtgt

SEQ ID NO: 1768 - RNA, 20 nt, synthetic construct
  misc_feature 1..20: note = antisense sequence
  source 1..20: mol_type = other RNA
tgtccaccagcctcacatac

SEQ ID NO: 1769 - RNA, 20 nt, synthetic construct
  misc_feature 1..20: note = antisense sequence
  source 1..20: mol_type = other RNA
ctgtccaccagcctcacata

SEQ ID NO: 1770 - RNA, 20 nt, synthetic construct
  misc_feature 1..20: note = antisense sequence
  source 1..20: mol_type = other RNA
cactgtccaccagcctcaca

SEQ ID NO: 1771 - RNA, 20 nt, synthetic construct
  misc_feature 1..20: note = antisense sequence
  source 1..20: mol_type = other RNA
acactgtccaccagcctcac

SEQ ID NO: 1772 - RNA, 20 nt, synthetic construct
  misc_feature 1..20: note = antisense sequence
  source 1..20: mol_type = other RNA
cacactgtccaccagcctca

SEQ ID NO: 1773 - RNA, 20 nt, synthetic construct
  misc_feature 1..20: note = antisense sequence
  source 1..20: mol_type = other RNA
ttcacactgtccaccagcct

SEQ ID NO: 1774 - RNA, 20 nt, synthetic construct
  misc_feature 1..20: note = antisense sequence
  source 1..20: mol_type = other RNA
tctttcacactgtccaccag

SEQ ID NO: 1775 - RNA, 20 nt, synthetic construct
  misc_feature 1..20: note = antisense sequence
  source 1..20: mol_type = other RNA
ggtgcctgcattctctttca

SEQ ID NO: 1776 - RNA, 20 nt, synthetic construct
  misc_feature 1..20: note = antisense sequence
  source 1..20: mol_type = other RNA
ctaacggtgcctgcattctc

SEQ ID NO: 1777 - RNA, 20 nt, synthetic construct
  misc_feature 1..20: note = antisense sequence
  source 1..20: mol_type = other RNA
cctaacggtgcctgcattct

SEQ ID NO: 1778 - RNA, 20 nt, synthetic construct
  misc_feature 1..20: note = antisense sequence
  source 1..20: mol_type = other RNA
tcctaacggtgcctgcattc

SEQ ID NO: 1779 - RNA, 20 nt, synthetic construct
  misc_feature 1..20: note = antisense sequence
  source 1..20: mol_type = other RNA
atcctaacggtgcctgcatt

SEQ ID NO: 1780 - RNA, 20 nt, synthetic construct
  misc_feature 1..20: note = antisense sequence
  source 1..20: mol_type = other RNA
atatcctaacggtgcctgca

SEQ ID NO: 1781 - RNA, 20 nt, synthetic construct
  misc_feature 1..20: note = antisense sequence
  source 1..20: mol_type = other RNA
aatatcctaacggtgcctgc

SEQ ID NO: 1782 - RNA, 20 nt, synthetic construct
  misc_feature 1..20: note = antisense sequence
  source 1..20: mol_type = other RNA
gaatatcctaacggtgcctg

SEQ ID NO: 1783 - RNA, 20 nt, synthetic construct
  misc_feature 1..20: note = antisense sequence
  source 1..20: mol_type = other RNA
agaatatcctaacggtgcct

SEQ ID NO: 1784 - RNA, 20 nt, synthetic construct
  misc_feature 1..20: note = antisense sequence
  source 1..20: mol_type = other RNA
gagaatatcctaacggtgcc

SEQ ID NO: 1785 - RNA, 20 nt, synthetic construct
  misc_feature 1..20: note = antisense sequence
  source 1..20: mol_type = other RNA
agagaatatcctaacggtgc

SEQ ID NO: 1786 - RNA, 20 nt, synthetic construct
  misc_feature 1..20: note = antisense sequence
  source 1..20: mol_type = other RNA
tagagaatatcctaacggtg

SEQ ID NO: 1787 - RNA, 20 nt, synthetic construct
  misc_feature 1..20: note = antisense sequence
  source 1..20: mol_type = other RNA
ctagagaatatcctaacggt

SEQ ID NO: 1788 - RNA, 20 nt, synthetic construct
  misc_feature 1..20: note = antisense sequence
  source 1..20: mol_type = other RNA
actagagaatatcctaacgg

SEQ ID NO: 1789 - RNA, 20 nt, synthetic construct
  misc_feature 1..20: note = antisense sequence
  source 1..20: mol_type = other RNA
gactagagaatatcctaacg

SEQ ID NO: 1790 - RNA, 20 nt, synthetic construct
  misc_feature 1..20: note = antisense sequence
  source 1..20: mol_type = other RNA
gaaacgtgaagactagagaa

SEQ ID NO: 1791 - RNA, 20 nt, synthetic construct
  misc_feature 1..20: note = antisense sequence
  source 1..20: mol_type = other RNA
agaaacgtgaagactagaga

SEQ ID NO: 1792 - RNA, 20 nt, synthetic construct
  misc_feature 1..20: note = antisense sequence
  source 1..20: mol_type = other RNA
cagaaacgtgaagactagag

SEQ ID NO: 1793 - RNA, 20 nt, synthetic construct
  misc_feature 1..20: note = antisense sequence
  source 1..20: mol_type = other RNA
ccagaaacgtgaagactaga

SEQ ID NO: 1794 - RNA, 20 nt, synthetic construct
  misc_feature 1..20: note = antisense sequence
  source 1..20: mol_type = other RNA
cccagaaacgtgaagactag

SEQ ID NO: 1795 - RNA, 20 nt, synthetic construct
  misc_feature 1..20: note = antisense sequence
  source 1..20: mol_type = other RNA
agtcaactggctgagctgtt

SEQ ID NO: 1796 - RNA, 20 nt, synthetic construct
  misc_feature 1..20: note = antisense sequence
  source 1..20: mol_type = other RNA
cagtcaactggctgagctgt

SEQ ID NO: 1797 - RNA, 20 nt, synthetic construct
  misc_feature 1..20: note = antisense sequence
  source 1..20: mol_type = other RNA
agcggagaatggcagctacc

SEQ ID NO: 1798 - RNA, 20 nt, synthetic construct
  misc_feature 1..20: note = antisense sequence
  source 1..20: mol_type = other RNA
aagcggagaatggcagctac

SEQ ID NO: 1799 - RNA, 20 nt, synthetic construct
  misc_feature 1..20: note = antisense sequence
  source 1..20: mol_type = other RNA
gaagcggagaatggcagcta

SEQ ID NO: 1800 - RNA, 20 nt, synthetic construct
  misc_feature 1..20: note = antisense sequence
  source 1..20: mol_type = other RNA
ggaagcggagaatggcagct

SEQ ID NO: 1801 - RNA, 20 nt, synthetic construct
  misc_feature 1..20: note = antisense sequence
  source 1..20: mol_type = other RNA
agggaagcggagaatggcag

SEQ ID NO: 1802 - RNA, 20 nt, synthetic construct
  misc_feature 1..20: note = antisense sequence
  source 1..20: mol_type = other RNA
cagggaagcggagaatggca

SEQ ID NO: 1803 - RNA, 20 nt, synthetic construct
  misc_feature 1..20: note = antisense sequence
  source 1..20: mol_type = other RNA
aacagggaagcggagaatgg

SEQ ID NO: 1804 - RNA, 20 nt, synthetic construct
  misc_feature 1..20: note = antisense sequence
  source 1..20: mol_type = other RNA
gaacagggaagcggagaatg

SEQ ID NO: 1805 - RNA, 20 nt, synthetic construct
  misc_feature 1..20: note = antisense sequence
  source 1..20: mol_type = other RNA
ggaacagggaagcggagaat

SEQ ID NO: 1806 - RNA, 20 nt, synthetic construct
  misc_feature 1..20: note = antisense sequence
  source 1..20: mol_type = other RNA
gggaacagggaagcggagaa

SEQ ID NO: 1807 - RNA, 20 nt, synthetic construct
  misc_feature 1..20: note = antisense sequence
  source 1..20: mol_type = other RNA
ttcgggaacagggaagcgga

SEQ ID NO: 1808 - RNA, 20 nt, synthetic construct
  misc_feature 1..20: note = antisense sequence
  source 1..20: mol_type = other RNA
agttcgggaacagggaagcg

SEQ ID NO: 1809 - RNA, 20 nt, synthetic construct
  misc_feature 1..20: note = antisense sequence
  source 1..20: mol_type = other RNA
aagttcgggaacagggaagc

SEQ ID NO: 1810 - RNA, 20 nt, synthetic construct
  misc_feature 1..20: note = antisense sequence
  source 1..20: mol_type = other RNA
aaagttcgggaacagggaag

SEQ ID NO: 1811 - RNA, 20 nt, synthetic construct
  misc_feature 1..20: note = antisense sequence
  source 1..20: mol_type = other RNA
gaaagttcgggaacagggaa

SEQ ID NO: 1812 - RNA, 20 nt, synthetic construct
  misc_feature 1..20: note = antisense sequence
  source 1..20: mol_type = other RNA
agaaagttcgggaacaggga

SEQ ID NO: 1813 - RNA, 20 nt, synthetic construct
  misc_feature 1..20: note = antisense sequence
  source 1..20: mol_type = other RNA
cagaaagttcgggaacaggg

SEQ ID NO: 1814 - RNA, 20 nt, synthetic construct
  misc_feature 1..20: note = antisense sequence
  source 1..20: mol_type = other RNA
tcagaaagttcgggaacagg

SEQ ID NO: 1815 - RNA, 20 nt, synthetic construct
  misc_feature 1..20: note = antisense sequence
  source 1..20: mol_type = other RNA
gtcagaaagttcgggaacag

SEQ ID NO: 1816 - RNA, 20 nt, synthetic construct
  misc_feature 1..20: note = antisense sequence
  source 1..20: mol_type = other RNA
ggtcagaaagttcgggaaca

SEQ ID NO: 1817 - RNA, 20 nt, synthetic construct
  misc_feature 1..20: note = antisense sequence
  source 1..20: mol_type = other RNA
tggtcagaaagttcgggaac

SEQ ID NO: 1818 - RNA, 20 nt, synthetic construct
  misc_feature 1..20: note = antisense sequence
  source 1..20: mol_type = other RNA
ttggtcagaaagttcgggaa

SEQ ID NO: 1819 - RNA, 20 nt, synthetic construct
  misc_feature 1..20: note = antisense sequence
  source 1..20: mol_type = other RNA
tcttggtcagaaagttcggg

SEQ ID NO: 1820 - RNA, 20 nt, synthetic construct
  misc_feature 1..20: note = antisense sequence
  source 1..20: mol_type = other RNA
ctcttggtcagaaagttcgg

SEQ ID NO: 1821 - RNA, 20 nt, synthetic construct
  misc_feature 1..20: note = antisense sequence
  source 1..20: mol_type = other RNA
cctcttggtcagaaagttcg

SEQ ID NO: 1822 - RNA, 20 nt, synthetic construct
  misc_feature 1..20: note = antisense sequence
  source 1..20: mol_type = other RNA
accctcttggtcagaaagtt

SEQ ID NO: 1823 - RNA, 20 nt, synthetic construct
  misc_feature 1..20: note = antisense sequence
  source 1..20: mol_type = other RNA
caccctcttggtcagaaagt

SEQ ID NO: 1824 - RNA, 20 nt, synthetic construct
  misc_feature 1..20: note = antisense sequence
  source 1..20: mol_type = other RNA
atcaccctcttggtcagaaa

SEQ ID NO: 1825 - RNA, 20 nt, synthetic construct
  misc_feature 1..20: note = antisense sequence
  source 1..20: mol_type = other RNA
aatcaccctcttggtcagaa

SEQ ID NO: 1826 - RNA, 20 nt, synthetic construct
  misc_feature 1..20: note = antisense sequence
  source 1..20: mol_type = other RNA
gaatcaccctcttggtcaga

SEQ ID NO: 1827 - RNA, 20 nt, synthetic construct
  misc_feature 1..20: note = antisense sequence
  source 1..20: mol_type = other RNA
aactggaatcaccctcttgg

SEQ ID NO: 1828 - RNA, 20 nt, synthetic construct
  misc_feature 1..20: note = antisense sequence
  source 1..20: mol_type = other RNA
gaactggaatcaccctcttg

SEQ ID NO: 1829 - RNA, 20 nt, synthetic construct
  misc_feature 1..20: note = antisense sequence
  source 1..20: mol_type = other RNA
cttcagaactggaatcaccc

SEQ ID NO: 1830 - RNA, 20 nt, synthetic construct
  misc_feature 1..20: note = antisense sequence
  source 1..20: mol_type = other RNA
tttctgtcacaaggatgctg

SEQ ID NO: 1831 - RNA, 20 nt, synthetic construct
  misc_feature 1..20: note = antisense sequence
  source 1..20: mol_type = other RNA
gctttctgtcacaaggatgc

SEQ ID NO: 1832 - RNA, 20 nt, synthetic construct
  misc_feature 1..20: note = antisense sequence
  source 1..20: mol_type = other RNA
agctttctgtcacaaggatg

SEQ ID NO: 1833 - RNA, 20 nt, synthetic construct
  misc_feature 1..20: note = antisense sequence
  source 1..20: mol_type = other RNA
cagctttctgtcacaaggat

SEQ ID NO: 1834 - RNA, 20 nt, synthetic construct
  misc_feature 1..20: note = antisense sequence
  source 1..20: mol_type = other RNA
gcagctttctgtcacaagga

SEQ ID NO: 1835 - RNA, 20 nt, synthetic construct
  misc_feature 1..20: note = antisense sequence
  source 1..20: mol_type = other RNA
ttgcagctttctgtcacaag

SEQ ID NO: 1836 - RNA, 20 nt, synthetic construct
  misc_feature 1..20: note = antisense sequence
  source 1..20: mol_type = other RNA
gtgtagccaaagacataaga

SEQ ID NO: 1837 - RNA, 20 nt, synthetic construct
  misc_feature 1..20: note = antisense sequence
  source 1..20: mol_type = other RNA
agtgtagccaaagacataag

SEQ ID NO: 1838 - RNA, 20 nt, synthetic construct
  misc_feature 1..20: note = antisense sequence
  source 1..20: mol_type = other RNA
ggtagtacgtggagattatt

SEQ ID NO: 1839 - RNA, 20 nt, synthetic construct
  misc_feature 1..20: note = antisense sequence
  source 1..20: mol_type = other RNA
tggtagtacgtggagattat

SEQ ID NO: 1840 - RNA, 20 nt, synthetic construct
  misc_feature 1..20: note = antisense sequence
  source 1..20: mol_type = other RNA
atggtagtacgtggagatta

SEQ ID NO: 1841 - RNA, 20 nt, synthetic construct
  misc_feature 1..20: note = antisense sequence
  source 1..20: mol_type = other RNA
gatggtagtacgtggagatt

SEQ ID NO: 1842 - RNA, 20 nt, synthetic construct
  misc_feature 1..20: note = antisense sequence
  source 1..20: mol_type = other RNA
agatggtagtacgtggagat

SEQ ID NO: 1843 - RNA, 20 nt, synthetic construct
  misc_feature 1..20: note = antisense sequence
  source 1..20: mol_type = other RNA
aagatggtagtacgtggaga

SEQ ID NO: 1844 - RNA, 20 nt, synthetic construct
  misc_feature 1..20: note = antisense sequence
  source 1..20: mol_type = other RNA
caagatggtagtacgtggag

SEQ ID NO: 1845 - RNA, 20 nt, synthetic construct
  misc_feature 1..20: note = antisense sequence
  source 1..20: mol_type = other RNA
tcaagatggtagtacgtgga

SEQ ID NO: 1846 - RNA, 20 nt, synthetic construct
  misc_feature 1..20: note = antisense sequence
  source 1..20: mol_type = other RNA
atcaagatggtagtacgtgg

SEQ ID NO: 1847 - RNA, 20 nt, synthetic construct
  misc_feature 1..20: note = antisense sequence
  source 1..20: mol_type = other RNA
aatcaagatggtagtacgtg

SEQ ID NO: 1848 - RNA, 20 nt, synthetic construct
  misc_feature 1..20: note = antisense sequence
  source 1..20: mol_type = other RNA
tgcataggcatcgtctttaa

SEQ ID NO: 1849 - RNA, 20 nt, synthetic construct
  misc_feature 1..20: note = antisense sequence
  source 1..20: mol_type = other RNA
ctgcataggcatcgtcttta

SEQ ID NO: 1850 - RNA, 20 nt, synthetic construct
  misc_feature 1..20: note = antisense sequence
  source 1..20: mol_type = other RNA
atactgcataggcatcgtct

SEQ ID NO: 1851 - RNA, 20 nt, synthetic construct
  misc_feature 1..20: note = antisense sequence
  source 1..20: mol_type = other RNA
tatactgcataggcatcgtc

SEQ ID NO: 1852 - RNA, 20 nt, synthetic construct
  misc_feature 1..20: note = antisense sequence
  source 1..20: mol_type = other RNA
atatactgcataggcatcgt

SEQ ID NO: 1853 - RNA, 20 nt, synthetic construct
  misc_feature 1..20: note = antisense sequence
  source 1..20: mol_type = other RNA
aatatactgcataggcatcg

SEQ ID NO: 1854 - RNA, 20 nt, synthetic construct
  misc_feature 1..20: note = antisense sequence
  source 1..20: mol_type = other RNA
caatatactgcataggcatc

SEQ ID NO: 1855 - RNA, 20 nt, synthetic construct
  misc_feature 1..20: note = antisense sequence
  source 1..20: mol_type = other RNA
caggataagatagcaaaagc

SEQ ID NO: 1856 - RNA, 20 nt, synthetic construct
  misc_feature 1..20: note = antisense sequence
  source 1..20: mol_type = other RNA
caatgcaagaacaccaagca

SEQ ID NO: 1857 - RNA, 20 nt, synthetic construct
  misc_feature 1..20: note = antisense sequence
  source 1..20: mol_type = other RNA
tgcaatgcaagaacaccaag

SEQ ID NO: 1858 - RNA, 20 nt, synthetic construct
  misc_feature 1..20: note = antisense sequence
  source 1..20: mol_type = other RNA
atgcaatgcaagaacaccaa

SEQ ID NO: 1859 - RNA, 20 nt, synthetic construct
  misc_feature 1..20: note = antisense sequence
  source 1..20: mol_type = other RNA
aatgcaatgcaagaacacca

SEQ ID NO: 1860 - RNA, 20 nt, synthetic construct
  misc_feature 1..20: note = antisense sequence
  source 1..20: mol_type = other RNA
aaaatgtagtgtgtggaggt

SEQ ID NO: 1861 - RNA, 20 nt, synthetic construct
  misc_feature 1..20: note = antisense sequence
  source 1..20: mol_type = other RNA
gtctactaattgtacggcaa

SEQ ID NO: 1862 - RNA, 20 nt, synthetic construct
  misc_feature 1..20: note = antisense sequence
  source 1..20: mol_type = other RNA
agtctactaattgtacggca

SEQ ID NO: 1863 - RNA, 20 nt, synthetic construct
  misc_feature 1..20: note = antisense sequence
  source 1..20: mol_type = other RNA
aagtctactaattgtacggc

SEQ ID NO: 1864 - RNA, 20 nt, synthetic construct
  misc_feature 1..20: note = antisense sequence
  source 1..20: mol_type = other RNA
caagtctactaattgtacgg

SEQ ID NO: 1865 - RNA, 20 nt, synthetic construct
  misc_feature 1..20: note = antisense sequence
  source 1..20: mol_type = other RNA
cctagcagatcaaagttcta

SEQ ID NO: 1866 - RNA, 20 nt, synthetic construct
  misc_feature 1..20: note = antisense sequence
  source 1..20: mol_type = other RNA
ccctagcagatcaaagttct

SEQ ID NO: 1867 - RNA, 20 nt, synthetic construct
  misc_feature 1..20: note = antisense sequence
  source 1..20: mol_type = other RNA
tccctagcagatcaaagttc

SEQ ID NO: 1868 - RNA, 20 nt, synthetic construct
  misc_feature 1..20: note = antisense sequence
  source 1..20: mol_type = other RNA
caatccctagcagatcaaag

SEQ ID NO: 1869 - RNA, 20 nt, synthetic construct
  misc_feature 1..20: note = antisense sequence
  source 1..20: mol_type = other RNA
acaatccctagcagatcaaa

SEQ ID NO: 1870 - RNA, 20 nt, synthetic construct
  misc_feature 1..20: note = antisense sequence
  source 1..20: mol_type = other RNA
gacaatccctagcagatcaa

SEQ ID NO: 1871 - RNA, 20 nt, synthetic construct
  misc_feature 1..20: note = antisense sequence
  source 1..20: mol_type = other RNA
ttgacaatccctagcagatc

SEQ ID NO: 1872 - RNA, 20 nt, synthetic construct
  misc_feature 1..20: note = antisense sequence
  source 1..20: mol_type = other RNA
tttgacaatccctagcagat

SEQ ID NO: 1873 - RNA, 20 nt, synthetic construct
  misc_feature 1..20: note = antisense sequence
  source 1..20: mol_type = other RNA
ttttgacaatccctagcaga

SEQ ID NO: 1874 - RNA, 20 nt, synthetic construct
  misc_feature 1..20: note = antisense sequence
  source 1..20: mol_type = other RNA
attttgacaatccctagcag

SEQ ID NO: 1875 - RNA, 20 nt, synthetic construct
  misc_feature 1..20: note = antisense sequence
  source 1..20: mol_type = other RNA
aagatgcctcaaggagatta

SEQ ID NO: 1876 - RNA, 20 nt, synthetic construct
  misc_feature 1..20: note = antisense sequence
  source 1..20: mol_type = other RNA
taaagatgcctcaaggagat

SEQ ID NO: 1877 - RNA, 20 nt, synthetic construct
  misc_feature 1..20: note = antisense sequence
  source 1..20: mol_type = other RNA
tccagactgggaatgacttc

SEQ ID NO: 1878 - RNA, 20 nt, synthetic construct
  misc_feature 1..20: note = antisense sequence
  source 1..20: mol_type = other RNA
taaagtccagactgggaatg

SEQ ID NO: 1879 - RNA, 20 nt, synthetic construct
  misc_feature 1..20: note = antisense sequence
  source 1..20: mol_type = other RNA
ctaaagtccagactgggaat

SEQ ID NO: 1880 - RNA, 20 nt, synthetic construct
  misc_feature 1..20: note = antisense sequence
  source 1..20: mol_type = other RNA
actaaagtccagactgggaa

SEQ ID NO: 1881 - RNA, 20 nt, synthetic construct
  misc_feature 1..20: note = antisense sequence
  source 1..20: mol_type = other RNA
aactaaagtccagactggga

SEQ ID NO: 1882 - RNA, 20 nt, synthetic construct
  misc_feature 1..20: note = antisense sequence
  source 1..20: mol_type = other RNA
gcaaagaactaaagtccaga

SEQ ID NO: 1883 - RNA, 20 nt, synthetic construct
  misc_feature 1..20: note = antisense sequence
  source 1..20: mol_type = other RNA
cgcaaagaactaaagtccag

SEQ ID NO: 1884 - RNA, 20 nt, synthetic construct
  misc_feature 1..20: note = antisense sequence
  source 1..20: mol_type = other RNA
gcgcaaagaactaaagtcca

SEQ ID NO: 1885 - RNA, 20 nt, synthetic construct
  misc_feature 1..20: note = antisense sequence
  source 1..20: mol_type = other RNA
ggcgcaaagaactaaagtcc

SEQ ID NO: 1886 - RNA, 20 nt, synthetic construct
  misc_feature 1..20: note = antisense sequence
  source 1..20: mol_type = other RNA
tggcgcaaagaactaaagtc

SEQ ID NO: 1887 - RNA, 20 nt, synthetic construct
  misc_feature 1..20: note = antisense sequence
  source 1..20: mol_type = other RNA
tatagcatgttttggcgcaa

SEQ ID NO: 1888 - RNA, 20 nt, synthetic construct
  misc_feature 1..20: note = antisense sequence
  source 1..20: mol_type = other RNA
atatagcatgttttggcgca

SEQ ID NO: 1889 - RNA, 20 nt, synthetic construct
  misc_feature 1..20: note = antisense sequence
  source 1..20: mol_type = other RNA
acaggcttcttcacaactaa

SEQ ID NO: 1890 - RNA, 20 nt, synthetic construct
  misc_feature 1..20: note = antisense sequence
  source 1..20: mol_type = other RNA
agtcaactgccacatactag

SEQ ID NO: 1891 - RNA, 20 nt, synthetic construct
  misc_feature 1..20: note = antisense sequence
  source 1..20: mol_type = other RNA
taagtcaactgccacatact

SEQ ID NO: 1892 - RNA, 20 nt, synthetic construct
  misc_feature 1..20: note = antisense sequence
  source 1..20: mol_type = other RNA
ttaagtcaactgccacatac

SEQ ID NO: 1893 - RNA, 20 nt, synthetic construct
  misc_feature 1..20: note = antisense sequence
  source 1..20: mol_type = other RNA
gaggtatttgcacaattcca

SEQ ID NO: 1894 - RNA, 20 nt, synthetic construct
  misc_feature 1..20: note = antisense sequence
  source 1..20: mol_type = other RNA
gctccttccttaacttttag

SEQ ID NO: 1895 - RNA, 20 nt, synthetic construct
  misc_feature 1..20: note = antisense sequence
  source 1..20: mol_type = other RNA
ggctccttccttaactttta

SEQ ID NO: 1896 - RNA, 20 nt, synthetic construct
  misc_feature 1..20: note = antisense sequence
  source 1..20: mol_type = other RNA
aggctccttccttaactttt

SEQ ID NO: 1897 - RNA, 20 nt, synthetic construct
  misc_feature 1..20: note = antisense sequence
  source 1..20: mol_type = other RNA
tactgaggctccttccttaa

SEQ ID NO: 1898 - RNA, 20 nt, synthetic construct
  misc_feature 1..20: note = antisense sequence
  source 1..20: mol_type = other RNA
ttactgaggctccttcctta

SEQ ID NO: 1899 - RNA, 20 nt, synthetic construct
  misc_feature 1..20: note = antisense sequence
  source 1..20: mol_type = other RNA
attactgaggctccttcctt

SEQ ID NO: 1900 - RNA, 20 nt, synthetic construct
  misc_feature 1..20: note = antisense sequence
  source 1..20: mol_type = other RNA
cattactgaggctccttcct

SEQ ID NO: 1901 - RNA, 20 nt, synthetic construct
  misc_feature 1..20: note = antisense sequence
  source 1..20: mol_type = other RNA
ccattactgaggctccttcc

SEQ ID NO: 1902 - RNA, 20 nt, synthetic construct
  misc_feature 1..20: note = antisense sequence
  source 1..20: mol_type = other RNA
tccattactgaggctccttc

SEQ ID NO: 1903 - RNA, 20 nt, synthetic construct
  misc_feature 1..20: note = antisense sequence
  source 1..20: mol_type = other RNA
ttccattactgaggctcctt

SEQ ID NO: 1904 - RNA, 20 nt, synthetic construct
  misc_feature 1..20: note = antisense sequence
  source 1..20: mol_type = other RNA
aattccattactgaggctcc

SEQ ID NO: 1905 - RNA, 20 nt, synthetic construct
  misc_feature 1..20: note = antisense sequence
  source 1..20: mol_type = other RNA
catcactattagatcgttcc

SEQ ID NO: 1906 - RNA, 20 nt, synthetic construct
  misc_feature 1..20: note = antisense sequence
  source 1..20: mol_type = other RNA
cggcgaaagtttagttagta

SEQ ID NO: 1907 - RNA, 20 nt, synthetic construct
  misc_feature 1..20: note = antisense sequence
  source 1..20: mol_type = other RNA
cacagacacaggaaagaccg

SEQ ID NO: 1908 - RNA, 20 nt, synthetic construct
  misc_feature 1..20: note = antisense sequence
  source 1..20: mol_type = other RNA
aggaaggcccacagacacag

SEQ ID NO: 1909 - RNA, 20 nt, synthetic construct
  misc_feature 1..20: note = antisense sequence
  source 1..20: mol_type = other RNA
aggaggaaggcccacagaca

SEQ ID NO: 1910 - RNA, 20 nt, synthetic construct
  misc_feature 1..20: note = antisense sequence
  source 1..20: mol_type = other RNA
ctgtcacaccaggaggaagg

SEQ ID NO: 1911 - RNA, 20 nt, synthetic construct
  misc_feature 1..20: note = antisense sequence
  source 1..20: mol_type = other RNA
tctgtcacaccaggaggaag

SEQ ID NO: 1912 - RNA, 20 nt, synthetic construct
  misc_feature 1..20: note = antisense sequence
  source 1..20: mol_type = other RNA
aagtctgtcacaccaggagg

SEQ ID NO: 1913 - RNA, 20 nt, synthetic construct
  misc_feature 1..20: note = antisense sequence
  source 1..20: mol_type = other RNA
caagtctgtcacaccaggag

SEQ ID NO: 1914 - RNA, 20 nt, synthetic construct
  misc_feature 1..20: note = antisense sequence
  source 1..20: mol_type = other RNA
ccaagtctgtcacaccagga

SEQ ID NO: 1915 - RNA, 20 nt, synthetic construct
  misc_feature 1..20: note = antisense sequence
  source 1..20: mol_type = other RNA
cccaagtctgtcacaccagg

SEQ ID NO: 1916 - RNA, 20 nt, synthetic construct
  misc_feature 1..20: note = antisense sequence
  source 1..20: mol_type = other RNA
gtgtcagttcccaataagaa

SEQ ID NO: 1917 - RNA, 20 nt, synthetic construct
  misc_feature 1..20: note = antisense sequence
  source 1..20: mol_type = other RNA
agtgtcagttcccaataaga

SEQ ID NO: 1918 - RNA, 20 nt, synthetic construct
  misc_feature 1..20: note = antisense sequence
  source 1..20: mol_type = other RNA
gtatagggaagtgtcagttc

SEQ ID NO: 1919 - RNA, 20 nt, synthetic construct
  misc_feature 1..20: note = antisense sequence
  source 1..20: mol_type = other RNA
agtatagggaagtgtcagtt

SEQ ID NO: 1920 - RNA, 20 nt, synthetic construct
  misc_feature 1..20: note = antisense sequence
  source 1..20: mol_type = other RNA
aagtatagggaagtgtcagt

SEQ ID NO: 1921 - RNA, 20 nt, synthetic construct
  misc_feature 1..20: note = antisense sequence
  source 1..20: mol_type = other RNA
ttaaggatctcagtggcttc

SEQ ID NO: 1922 - RNA, 20 nt, synthetic construct
  misc_feature 1..20: note = antisense sequence
  source 1..20: mol_type = other RNA
tttaaggatctcagtggctt

SEQ ID NO: 1923 - RNA, 20 nt, synthetic construct
  misc_feature 1..20: note = antisense sequence
  source 1..20: mol_type = other RNA
actttaaggatctcagtggc

SEQ ID NO: 1924 - RNA, 20 nt, synthetic construct
  misc_feature 1..20: note = antisense sequence
  source 1..20: mol_type = other RNA
agaacctatggcctaacatg

SEQ ID NO: 1925 - RNA, 20 nt, synthetic construct
  misc_feature 1..20: note = antisense sequence
  source 1..20: mol_type = other RNA
aagaacctatggcctaacat

SEQ ID NO: 1926 - RNA, 20 nt, synthetic construct
  misc_feature 1..20: note = antisense sequence
  source 1..20: mol_type = other RNA
taagaacctatggcctaaca

SEQ ID NO: 1927 - RNA, 20 nt, synthetic construct
  misc_feature 1..20: note = antisense sequence
  source 1..20: mol_type = other RNA
ttaagaacctatggcctaac

SEQ ID NO: 1928 - RNA, 20 nt, synthetic construct
  misc_feature 1..20: note = antisense sequence
  source 1..20: mol_type = other RNA
agttgaggtgaacaggtagc

SEQ ID NO: 1929 - RNA, 20 nt, synthetic construct
  misc_feature 1..20: note = antisense sequence
  source 1..20: mol_type = other RNA
caagttgaggtgaacaggta

SEQ ID NO: 1930 - RNA, 20 nt, synthetic construct
  misc_feature 1..20: note = antisense sequence
  source 1..20: mol_type = other RNA
tcaagttgaggtgaacaggt

SEQ ID NO: 1931 - RNA, 20 nt, synthetic construct
  misc_feature 1..20: note = antisense sequence
  source 1..20: mol_type = other RNA
gacactgagggttttaagag

SEQ ID NO: 1932 - RNA, 20 nt, synthetic construct
  misc_feature 1..20: note = antisense sequence
  source 1..20: mol_type = other RNA
ctggacactgagggttttaa

SEQ ID NO: 1933 - RNA, 20 nt, synthetic construct
  misc_feature 1..20: note = antisense sequence
  source 1..20: mol_type = other RNA
acctggacactgagggtttt

SEQ ID NO: 1934 - RNA, 20 nt, synthetic construct
  misc_feature 1..20: note = antisense sequence
  source 1..20: mol_type = other RNA
gcaacctggacactgagggt

SEQ ID NO: 1935 - RNA, 20 nt, synthetic construct
  misc_feature 1..20: note = antisense sequence
  source 1..20: mol_type = other RNA
tgcaacctggacactgaggg

SEQ ID NO: 1936 - RNA, 20 nt, synthetic construct
  misc_feature 1..20: note = antisense sequence
  source 1..20: mol_type = other RNA
cctattggaatcatctgggt

SEQ ID NO: 1937 - RNA, 20 nt, synthetic construct
  misc_feature 1..20: note = antisense sequence
  source 1..20: mol_type = other RNA
acgcctattggaatcatctg

SEQ ID NO: 1938 - RNA, 20 nt, synthetic construct
  misc_feature 1..20: note = antisense sequence
  source 1..20: mol_type = other RNA
gacgcctattggaatcatct

SEQ ID NO: 1939 - RNA, 20 nt, synthetic construct
  misc_feature 1..20: note = antisense sequence
  source 1..20: mol_type = other RNA
tgacgcctattggaatcatc

SEQ ID NO: 1940 - RNA, 20 nt, synthetic construct
  misc_feature 1..20: note = antisense sequence
  source 1..20: mol_type = other RNA
ttgacgcctattggaatcat

SEQ ID NO: 1941 - RNA, 20 nt, synthetic construct
  misc_feature 1..20: note = antisense sequence
  source 1..20: mol_type = other RNA
cttgacgcctattggaatca

SEQ ID NO: 1942 - RNA, 20 nt, synthetic construct
  misc_feature 1..20: note = antisense sequence
  source 1..20: mol_type = other RNA
ccttgacgcctattggaatc

SEQ ID NO: 1943 - RNA, 20 nt, synthetic construct
  misc_feature 1..20: note = antisense sequence
  source 1..20: mol_type = other RNA
gccttgacgcctattggaat

SEQ ID NO: 1944 - RNA, 20 nt, synthetic construct
  misc_feature 1..20: note = antisense sequence
  source 1..20: mol_type = other RNA
agccttgacgcctattggaa

SEQ ID NO: 1945 - RNA, 20 nt, synthetic construct
  misc_feature 1..20: note = antisense sequence
  source 1..20: mol_type = other RNA
tagccttgacgcctattgga

SEQ ID NO: 1946 - RNA, 20 nt, synthetic construct
  misc_feature 1..20: note = antisense sequence
  source 1..20: mol_type = other RNA
ttagccttgacgcctattgg

SEQ ID NO: 1947 - RNA, 20 nt, synthetic construct
  misc_feature 1..20: note = antisense sequence
  source 1..20: mol_type = other RNA
attagccttgacgcctattg

SEQ ID NO: 1948 - RNA, 20 nt, synthetic construct
  misc_feature 1..20: note = antisense sequence
  source 1..20: mol_type = other RNA
tattagccttgacgcctatt

SEQ ID NO: 1949 - RNA, 20 nt, synthetic construct
  misc_feature 1..20: note = antisense sequence
  source 1..20: mol_type = other RNA
ctattagccttgacgcctat

SEQ ID NO: 1950 - RNA, 20 nt, synthetic construct
  misc_feature 1..20: note = antisense sequence
  source 1..20: mol_type = other RNA
gctattagccttgacgccta

SEQ ID NO: 1951 - RNA, 20 nt, synthetic construct
  misc_feature 1..20: note = antisense sequence
  source 1..20: mol_type = other RNA
ctgaatcagtggctattagc

SEQ ID NO: 1952 - RNA, 20 nt, synthetic construct
  misc_feature 1..20: note = antisense sequence
  source 1..20: mol_type = other RNA
gcctgaatcagtggctatta

SEQ ID NO: 1953 - RNA, 20 nt, synthetic construct
  misc_feature 1..20: note = antisense sequence
  source 1..20: mol_type = other RNA
ggaccatacttttgaatagc

SEQ ID NO: 1954 - RNA, 20 nt, synthetic construct
  misc_feature 1..20: note = antisense sequence
  source 1..20: mol_type = other RNA
gtttacggaccatacttttg

SEQ ID NO: 1955 - RNA, 20 nt, synthetic construct
  misc_feature 1..20: note = antisense sequence
  source 1..20: mol_type = other RNA
ggtttacggaccatactttt

SEQ ID NO: 1956 - RNA, 20 nt, synthetic construct
  misc_feature 1..20: note = antisense sequence
  source 1..20: mol_type = other RNA
atgctgctggtttacggacc

SEQ ID NO: 1957 - RNA, 20 nt, synthetic construct
  misc_feature 1..20: note = antisense sequence
  source 1..20: mol_type = other RNA
gatgctgctggtttacggac

SEQ ID NO: 1958 - RNA, 20 nt, synthetic construct
  misc_feature 1..20: note = antisense sequence
  source 1..20: mol_type = other RNA
ctctcagggatgctgctggt

SEQ ID NO: 1959 - RNA, 20 nt, synthetic construct
  misc_feature 1..20: note = antisense sequence
  source 1..20: mol_type = other RNA
caagctctcagggatgctgc

SEQ ID NO: 1960 - RNA, 20 nt, synthetic construct
  misc_feature 1..20: note = antisense sequence
  source 1..20: mol_type = other RNA
ggtctacaaaagatccctga

SEQ ID NO: 1961 - RNA, 20 nt, synthetic construct
  misc_feature 1..20: note = antisense sequence
  source 1..20: mol_type = other RNA
aggtctacaaaagatccctg

SEQ ID NO: 1962 - RNA, 20 nt, synthetic construct
  misc_feature 1..20: note = antisense sequence
  source 1..20: mol_type = other RNA
taggtctacaaaagatccct

SEQ ID NO: 1963 - RNA, 20 nt, synthetic construct
  misc_feature 1..20: note = antisense sequence
  source 1..20: mol_type = other RNA
gtaggtctacaaaagatccc

SEQ ID NO: 1964 - RNA, 20 nt, synthetic construct
  misc_feature 1..20: note = antisense sequence
  source 1..20: mol_type = other RNA
agtaggtctacaaaagatcc

SEQ ID NO: 1965 - RNA, 20 nt, synthetic construct
  misc_feature 1..20: note = antisense sequence
  source 1..20: mol_type = other RNA
cagtaggtctacaaaagatc

SEQ ID NO: 1966 - RNA, 20 nt, synthetic construct
  misc_feature 1..20: note = antisense sequence
  source 1..20: mol_type = other RNA
ctcagtaggtctacaaaaga

SEQ ID NO: 1967 - RNA, 20 nt, synthetic construct
  misc_feature 1..20: note = antisense sequence
  source 1..20: mol_type = other RNA
tctcagtaggtctacaaaag

SEQ ID NO: 1968 - RNA, 20 nt, synthetic construct
  misc_feature 1..20: note = antisense sequence
  source 1..20: mol_type = other RNA
gtctcagtaggtctacaaaa

SEQ ID NO: 1969 - RNA, 20 nt, synthetic construct
  misc_feature 1..20: note = antisense sequence
  source 1..20: mol_type = other RNA
tgtctcagtaggtctacaaa

SEQ ID NO: 1970 - RNA, 20 nt, synthetic construct
  misc_feature 1..20: note = antisense sequence
  source 1..20: mol_type = other RNA
cctgtctcagtaggtctaca

SEQ ID NO: 1971 - RNA, 20 nt, synthetic construct
  misc_feature 1..20: note = antisense sequence
  source 1..20: mol_type = other RNA
gcctgtctcagtaggtctac

SEQ ID NO: 1972 - RNA, 20 nt, synthetic construct
  misc_feature 1..20: note = antisense sequence
  source 1..20: mol_type = other RNA
gcgcctgtctcagtaggtct

SEQ ID NO: 1973 - RNA, 20 nt, synthetic construct
  misc_feature 1..20: note = antisense sequence
  source 1..20: mol_type = other RNA
agcgcctgtctcagtaggtc

SEQ ID NO: 1974 - RNA, 20 nt, synthetic construct
  misc_feature 1..20: note = antisense sequence
  source 1..20: mol_type = other RNA
tagcgcctgtctcagtaggt

SEQ ID NO: 1975 - RNA, 20 nt, synthetic construct
  misc_feature 1..20: note = antisense sequence
  source 1..20: mol_type = other RNA
gtagcgcctgtctcagtagg

SEQ ID NO: 1976 - RNA, 20 nt, synthetic construct
  misc_feature 1..20: note = antisense sequence
  source 1..20: mol_type = other RNA
ggtagcgcctgtctcagtag

SEQ ID NO: 1977 - RNA, 20 nt, synthetic construct
  misc_feature 1..20: note = antisense sequence
  source 1..20: mol_type = other RNA
aggtagcgcctgtctcagta

SEQ ID NO: 1978 - RNA, 20 nt, synthetic construct
  misc_feature 1..20: note = antisense sequence
  source 1..20: mol_type = other RNA
tatgcacaggaatcatctag

SEQ ID NO: 1979 - RNA, 20 nt, synthetic construct
  misc_feature 1..20: note = antisense sequence
  source 1..20: mol_type = other RNA
gcacaggaagaataacctat

SEQ ID NO: 1980 - RNA, 20 nt, synthetic construct
  misc_feature 1..20: note = antisense sequence
  source 1..20: mol_type = other RNA
agcacaggaagaataaccta

SEQ ID NO: 1981 - RNA, 20 nt, synthetic construct
  misc_feature 1..20: note = antisense sequence
  source 1..20: mol_type = other RNA
cagcacaggaagaataacct

SEQ ID NO: 1982 - RNA, 20 nt, synthetic construct
  misc_feature 1..20: note = antisense sequence
  source 1..20: mol_type = other RNA
ccagcacaggaagaataacc

SEQ ID NO: 1983 - RNA, 20 nt, synthetic construct
  misc_feature 1..20: note = antisense sequence
  source 1..20: mol_type = other RNA
atttaccagcacaggaagaa

SEQ ID NO: 1984 - RNA, 20 nt, synthetic construct
  misc_feature 1..20: note = antisense sequence
  source 1..20: mol_type = other RNA
gatttaccagcacaggaaga

SEQ ID NO: 1985 - RNA, 20 nt, synthetic construct
  misc_feature 1..20: note = antisense sequence
  source 1..20: mol_type = other RNA
agatttaccagcacaggaag

SEQ ID NO: 1986 - RNA, 20 nt, synthetic construct
  misc_feature 1..20: note = antisense sequence
  source 1..20: mol_type = other RNA
gagatttaccagcacaggaa

SEQ ID NO: 1987 - RNA, 20 nt, synthetic construct
  misc_feature 1..20: note = antisense sequence
  source 1..20: mol_type = other RNA
cagagatttaccagcacagg

SEQ ID NO: 1988 - RNA, 20 nt, synthetic construct
  misc_feature 1..20: note = antisense sequence
  source 1..20: mol_type = other RNA
gccagagatttaccagcaca

SEQ ID NO: 1989 - RNA, 20 nt, synthetic construct
  misc_feature 1..20: note = antisense sequence
  source 1..20: mol_type = other RNA
tgccagagatttaccagcac

SEQ ID NO: 1990 - RNA, 20 nt, synthetic construct
  misc_feature 1..20: note = antisense sequence
  source 1..20: mol_type = other RNA
ctgccagagatttaccagca

SEQ ID NO: 1991 - RNA, 20 nt, synthetic construct
  misc_feature 1..20: note = antisense sequence
  source 1..20: mol_type = other RNA
cctgccagagatttaccagc

SEQ ID NO: 1992 - RNA, 20 nt, synthetic construct
  misc_feature 1..20: note = antisense sequence
  source 1..20: mol_type = other RNA
ccctgccagagatttaccag

SEQ ID NO: 1993 - RNA, 20 nt, synthetic construct
  misc_feature 1..20: note = antisense sequence
  source 1..20: mol_type = other RNA
ctgtatatgctttccagaga

SEQ ID NO: 1994 - RNA, 20 nt, synthetic construct
  misc_feature 1..20: note = antisense sequence
  source 1..20: mol_type = other RNA
actgtatatgctttccagag

SEQ ID NO: 1995 - RNA, 20 nt, synthetic construct
  misc_feature 1..20: note = antisense sequence
  source 1..20: mol_type = other RNA
gcagttggaattagactact

SEQ ID NO: 1996 - RNA, 20 nt, synthetic construct
  misc_feature 1..20: note = antisense sequence
  source 1..20: mol_type = other RNA
agcagttggaattagactac

SEQ ID NO: 1997 - RNA, 20 nt, synthetic construct
  misc_feature 1..20: note = antisense sequence
  source 1..20: mol_type = other RNA
gtagcagttggaattagact

SEQ ID NO: 1998 - RNA, 20 nt, synthetic construct
  misc_feature 1..20: note = antisense sequence
  source 1..20: mol_type = other RNA
gagtagcagttggaattaga

SEQ ID NO: 1999 - RNA, 20 nt, synthetic construct
  misc_feature 1..20: note = antisense sequence
  source 1..20: mol_type = other RNA
tgagtagcagttggaattag

SEQ ID NO: 2000 - RNA, 20 nt, synthetic construct
  misc_feature 1..20: note = antisense sequence
  source 1..20: mol_type = other RNA
cttaatgagtagcagttgga

SEQ ID NO: 2001 - RNA, 20 nt, synthetic construct
  misc_feature 1..20: note = antisense sequence
  source 1..20: mol_type = other RNA
acttaatgagtagcagttgg

SEQ ID NO: 2002 - RNA, 20 nt, synthetic construct
  misc_feature 1..20: note = antisense sequence
  source 1..20: mol_type = other RNA
aggtacattggagttatcga

SEQ ID NO: 2003 - RNA, 20 nt, synthetic construct
  misc_feature 1..20: note = antisense sequence
  source 1..20: mol_type = other RNA
aaggtacattggagttatcg

SEQ ID NO: 2004 - RNA, 20 nt, synthetic construct
  misc_feature 1..20: note = antisense sequence
  source 1..20: mol_type = other RNA
gaaggtacattggagttatc

SEQ ID NO: 2005 - RNA, 20 nt, synthetic construct
  misc_feature 1..20: note = antisense sequence
  source 1..20: mol_type = other RNA
gagaaggtacattggagtta

SEQ ID NO: 2006 - RNA, 20 nt, synthetic construct
  misc_feature 1..20: note = antisense sequence
  source 1..20: mol_type = other RNA
agagaaggtacattggagtt

SEQ ID NO: 2007 - RNA, 20 nt, synthetic construct
  misc_feature 1..20: note = antisense sequence
  source 1..20: mol_type = other RNA
aagcacatgataggaaatgg

SEQ ID NO: 2008 - RNA, 20 nt, synthetic construct
  misc_feature 1..20: note = antisense sequence
  source 1..20: mol_type = other RNA
caagcacatgataggaaatg

SEQ ID NO: 2009 - RNA, 20 nt, synthetic construct
  misc_feature 1..20: note = antisense sequence
  source 1..20: mol_type = other RNA
tgcaagcacatgataggaaa

SEQ ID NO: 2010 - RNA, 20 nt, synthetic construct
  misc_feature 1..20: note = antisense sequence
  source 1..20: mol_type = other RNA
tgagtttagtggcataggaa

SEQ ID NO: 2011 - RNA, 20 nt, synthetic construct
  misc_feature 1..20: note = antisense sequence
  source 1..20: mol_type = other RNA
ttgagtttagtggcatagga

SEQ ID NO: 2012 - RNA, 20 nt, synthetic construct
  misc_feature 1..20: note = antisense sequence
  source 1..20: mol_type = other RNA
attgagtttagtggcatagg

SEQ ID NO: 2013 - RNA, 20 nt, synthetic construct
  misc_feature 1..20: note = antisense sequence
  source 1..20: mol_type = other RNA
aggagtagctgtcatttgat

SEQ ID NO: 2014 - RNA, 20 nt, synthetic construct
  misc_feature 1..20: note = antisense sequence
  source 1..20: mol_type = other RNA
caggagtagctgtcatttga

SEQ ID NO: 2015 - RNA, 20 nt, synthetic construct
  misc_feature 1..20: note = antisense sequence
  source 1..20: mol_type = other RNA
ccaggagtagctgtcatttg

SEQ ID NO: 2016 - RNA, 20 nt, synthetic construct
  misc_feature 1..20: note = antisense sequence
  source 1..20: mol_type = other RNA
accaggagtagctgtcattt

SEQ ID NO: 2017 - RNA, 20 nt, synthetic construct
  misc_feature 1..20: note = antisense sequence
  source 1..20: mol_type = other RNA
gagggaccaggagtagctgt

SEQ ID NO: 2018 - RNA, 20 nt, synthetic construct
  misc_feature 1..20: note = antisense sequence
  source 1..20: mol_type = other RNA
tgagggaccaggagtagctg

SEQ ID NO: 2019 - RNA, 20 nt, synthetic construct
  misc_feature 1..20: note = antisense sequence
  source 1..20: mol_type = other RNA
aatgagggaccaggagtagc

SEQ ID NO: 2020 - RNA, 20 nt, synthetic construct
  misc_feature 1..20: note = antisense sequence
  source 1..20: mol_type = other RNA
caaatgagggaccaggagta

SEQ ID NO: 2021 - RNA, 20 nt, synthetic construct
  misc_feature 1..20: note = antisense sequence
  source 1..20: mol_type = other RNA
acaaatgagggaccaggagt

SEQ ID NO: 2022 - RNA, 20 nt, synthetic construct
  misc_feature 1..20: note = antisense sequence
  source 1..20: mol_type = other RNA
tacaaatgagggaccaggag

SEQ ID NO: 2023 - RNA, 20 nt, synthetic construct
  misc_feature 1..20: note = antisense sequence
  source 1..20: mol_type = other RNA
atacaaatgagggaccagga

SEQ ID NO: 2024 - RNA, 20 nt, synthetic construct
  misc_feature 1..20: note = antisense sequence
  source 1..20: mol_type = other RNA
catacaaatgagggaccagg

SEQ ID NO: 2025 - RNA, 20 nt, synthetic construct
  misc_feature 1..20: note = antisense sequence
  source 1..20: mol_type = other RNA
taacatacaaatgagggacc

SEQ ID NO: 2026 - RNA, 20 nt, synthetic construct
  misc_feature 1..20: note = antisense sequence
  source 1..20: mol_type = other RNA
ctaagacggtaatgaaagtg

SEQ ID NO: 2027 - RNA, 20 nt, synthetic construct
  misc_feature 1..20: note = antisense sequence
  source 1..20: mol_type = other RNA
ccaatttgtttctaagacgg

SEQ ID NO: 2028 - RNA, 20 nt, synthetic construct
  misc_feature 1..20: note = antisense sequence
  source 1..20: mol_type = other RNA
actctagtggcatctgggag

SEQ ID NO: 2029 - RNA, 20 nt, synthetic construct
  misc_feature 1..20: note = antisense sequence
  source 1..20: mol_type = other RNA
tactctagtggcatctggga

SEQ ID NO: 2030 - RNA, 20 nt, synthetic construct
  misc_feature 1..20: note = antisense sequence
  source 1..20: mol_type = other RNA
ctactctagtggcatctggg

SEQ ID NO: 2031 - RNA, 20 nt, synthetic construct
  misc_feature 1..20: note = antisense sequence
  source 1..20: mol_type = other RNA
gctactctagtggcatctgg

SEQ ID NO: 2032 - RNA, 20 nt, synthetic construct
  misc_feature 1..20: note = antisense sequence
  source 1..20: mol_type = other RNA
agctactctagtggcatctg

SEQ ID NO: 2033 - RNA, 20 nt, synthetic construct
  misc_feature 1..20: note = antisense sequence
  source 1..20: mol_type = other RNA
aagctactctagtggcatct

SEQ ID NO: 2034 - RNA, 20 nt, synthetic construct
  misc_feature 1..20: note = antisense sequence
  source 1..20: mol_type = other RNA
aaagctactctagtggcatc

SEQ ID NO: 2035 - RNA, 20 nt, synthetic construct
  misc_feature 1..20: note = antisense sequence
  source 1..20: mol_type = other RNA
caaagctactctagtggcat

SEQ ID NO: 2036 - RNA, 20 nt, synthetic construct
  misc_feature 1..20: note = antisense sequence
  source 1..20: mol_type = other RNA
acaaagctactctagtggca

SEQ ID NO: 2037 - RNA, 20 nt, synthetic construct
  misc_feature 1..20: note = antisense sequence
  source 1..20: mol_type = other RNA
tacaaagctactctagtggc

SEQ ID NO: 2038 - RNA, 20 nt, synthetic construct
  misc_feature 1..20: note = antisense sequence
  source 1..20: mol_type = other RNA
ttacaaagctactctagtgg

SEQ ID NO: 2039 - RNA, 20 nt, synthetic construct
  misc_feature 1..20: note = antisense sequence
  source 1..20: mol_type = other RNA
atacttggttgcttaggaac

SEQ ID NO: 2040 - RNA, 20 nt, synthetic construct
  misc_feature 1..20: note = antisense sequence
  source 1..20: mol_type = other RNA
gagctgctattatgaggcat

SEQ ID NO: 2041 - RNA, 20 nt, synthetic construct
  misc_feature 1..20: note = antisense sequence
  source 1..20: mol_type = other RNA
agagctgctattatgaggca

SEQ ID NO: 2042 - RNA, 20 nt, synthetic construct
  misc_feature 1..20: note = antisense sequence
  source 1..20: mol_type = other RNA
aagagctgctattatgaggc

SEQ ID NO: 2043 - RNA, 20 nt, synthetic construct
  misc_feature 1..20: note = antisense sequence
  source 1..20: mol_type = other RNA
taagagctgctattatgagg

SEQ ID NO: 2044 - RNA, 20 nt, synthetic construct
  misc_feature 1..20: note = antisense sequence
  source 1..20: mol_type = other RNA
aaccctttcccaaataagag

SEQ ID NO: 2045 - RNA, 20 nt, synthetic construct
  misc_feature 1..20: note = antisense sequence
  source 1..20: mol_type = other RNA
gtactataaccctttcccaa

SEQ ID NO: 2046 - RNA, 20 nt, synthetic construct
  misc_feature 1..20: note = antisense sequence
  source 1..20: mol_type = other RNA
tgtactataaccctttccca

SEQ ID NO: 2047 - RNA, 20 nt, synthetic construct
  misc_feature 1..20: note = antisense sequence
  source 1..20: mol_type = other RNA
atgtactataaccctttccc

SEQ ID NO: 2048 - RNA, 20 nt, synthetic construct
  misc_feature 1..20: note = antisense sequence
  source 1..20: mol_type = other RNA
cttgcttggaaaaccacatg

SEQ ID NO: 2049 - RNA, 20 nt, synthetic construct
  misc_feature 1..20: note = antisense sequence
  source 1..20: mol_type = other RNA
acttgcttggaaaaccacat

SEQ ID NO: 2050 - RNA, 20 nt, synthetic construct
  misc_feature 1..20: note = antisense sequence
  source 1..20: mol_type = other RNA
aacttgcttggaaaaccaca

SEQ ID NO: 2051 - RNA, 20 nt, synthetic construct
  misc_feature 1..20: note = antisense sequence
  source 1..20: mol_type = other RNA
cttaacttgcttggaaaacc

SEQ ID NO: 2052 - RNA, 20 nt, synthetic construct
  misc_feature 1..20: note = antisense sequence
  source 1..20: mol_type = other RNA
cagtcttaacttgcttggaa

SEQ ID NO: 2053 - RNA, 20 nt, synthetic construct
  misc_feature 1..20: note = antisense sequence
  source 1..20: mol_type = other RNA
ctctcctcaagcccttaaaa

SEQ ID NO: 2054 - RNA, 20 nt, synthetic construct
  misc_feature 1..20: note = antisense sequence
  source 1..20: mol_type = other RNA
tctctcctcaagcccttaaa

SEQ ID NO: 2055 - RNA, 20 nt, synthetic construct
  misc_feature 1..20: note = antisense sequence
  source 1..20: mol_type = other RNA
gggttcatctctcctcaagc

SEQ ID NO: 2056 - RNA, 20 nt, synthetic construct
  misc_feature 1..20: note = antisense sequence
  source 1..20: mol_type = other RNA
agggttcatctctcctcaag

SEQ ID NO: 2057 - RNA, 20 nt, synthetic construct
  misc_feature 1..20: note = antisense sequence
  source 1..20: mol_type = other RNA
aaaagggttcatctctcctc

SEQ ID NO: 2058 - RNA, 20 nt, synthetic construct
  misc_feature 1..20: note = antisense sequence
  source 1..20: mol_type = other RNA
caaaagggttcatctctcct

SEQ ID NO: 2059 - RNA, 20 nt, synthetic construct
  misc_feature 1..20: note = antisense sequence
  source 1..20: mol_type = other RNA
gcaaaagggttcatctctcc

SEQ ID NO: 2060 - RNA, 20 nt, synthetic construct
  misc_feature 1..20: note = antisense sequence
  source 1..20: mol_type = other RNA
agcaaaagggttcatctctc

SEQ ID NO: 2061 - RNA, 20 nt, synthetic construct
  misc_feature 1..20: note = antisense sequence
  source 1..20: mol_type = other RNA
ctaagcaaaagggttcatct

SEQ ID NO: 2062 - RNA, 20 nt, synthetic construct
  misc_feature 1..20: note = antisense sequence
  source 1..20: mol_type = other RNA
tctaagcaaaagggttcatc

SEQ ID NO: 2063 - RNA, 20 nt, synthetic construct
  misc_feature 1..20: note = antisense sequence
  source 1..20: mol_type = other RNA
ctctaagcaaaagggttcat

SEQ ID NO: 2064 - RNA, 20 nt, synthetic construct
  misc_feature 1..20: note = antisense sequence
  source 1..20: mol_type = other RNA
gctctaagcaaaagggttca

SEQ ID NO: 2065 - RNA, 20 nt, synthetic construct
  misc_feature 1..20: note = antisense sequence
  source 1..20: mol_type = other RNA
ggctctaagcaaaagggttc

SEQ ID NO: 2066 - RNA, 20 nt, synthetic construct
  misc_feature 1..20: note = antisense sequence
  source 1..20: mol_type = other RNA
tggctctaagcaaaagggtt

SEQ ID NO: 2067 - RNA, 20 nt, synthetic construct
  misc_feature 1..20: note = antisense sequence
  source 1..20: mol_type = other RNA
ctggctctaagcaaaagggt

SEQ ID NO: 2068 - RNA, 20 nt, synthetic construct
  misc_feature 1..20: note = antisense sequence
  source 1..20: mol_type = other RNA
tctggctctaagcaaaaggg

SEQ ID NO: 2069 - RNA, 20 nt, synthetic construct
  misc_feature 1..20: note = antisense sequence
  source 1..20: mol_type = other RNA
aagttctggctctaagcaaa

SEQ ID NO: 2070 - RNA, 20 nt, synthetic construct
  misc_feature 1..20: note = antisense sequence
  source 1..20: mol_type = other RNA
taagttctggctctaagcaa

SEQ ID NO: 2071 - RNA, 20 nt, synthetic construct
  misc_feature 1..20: note = antisense sequence
  source 1..20: mol_type = other RNA
ctaagttctggctctaagca

SEQ ID NO: 2072 - RNA, 20 nt, synthetic construct
  misc_feature 1..20: note = antisense sequence
  source 1..20: mol_type = other RNA
tctaagttctggctctaagc

SEQ ID NO: 2073 - RNA, 20 nt, synthetic construct
  misc_feature 1..20: note = antisense sequence
  source 1..20: mol_type = other RNA
atctaagttctggctctaag

SEQ ID NO: 2074 - RNA, 20 nt, synthetic construct
  misc_feature 1..20: note = antisense sequence
  source 1..20: mol_type = other RNA
catatctaagttctggctct

SEQ ID NO: 2075 - RNA, 20 nt, synthetic construct
  misc_feature 1..20: note = antisense sequence
  source 1..20: mol_type = other RNA
cccatatctaagttctggct

SEQ ID NO: 2076 - RNA, 20 nt, synthetic construct
  misc_feature 1..20: note = antisense sequence
  source 1..20: mol_type = other RNA
gtttctcctaaaagtcaccc

SEQ ID NO: 2077 - RNA, 20 nt, synthetic construct
  misc_feature 1..20: note = antisense sequence
  source 1..20: mol_type = other RNA
acttactggtccttgctcta

SEQ ID NO: 2078 - RNA, 20 nt, synthetic construct
  misc_feature 1..20: note = antisense sequence
  source 1..20: mol_type = other RNA
aacttactggtccttgctct

SEQ ID NO: 2079 - RNA, 20 nt, synthetic construct
  misc_feature 1..20: note = antisense sequence
  source 1..20: mol_type = other RNA
gtaaacttactggtccttgc

SEQ ID NO: 2080 - RNA, 20 nt, synthetic construct
  misc_feature 1..20: note = antisense sequence
  source 1..20: mol_type = other RNA
ggtaaacttactggtccttg

SEQ ID NO: 2081 - RNA, 20 nt, synthetic construct
  misc_feature 1..20: note = antisense sequence
  source 1..20: mol_type = other RNA
aggtaaacttactggtcctt

SEQ ID NO: 2082 - RNA, 20 nt, synthetic construct
  misc_feature 1..20: note = antisense sequence
  source 1..20: mol_type = other RNA
taggtaaacttactggtcct

SEQ ID NO: 2083 - RNA, 20 nt, synthetic construct
  misc_feature 1..20: note = antisense sequence
  source 1..20: mol_type = other RNA
ttaggtaaacttactggtcc

SEQ ID NO: 2084 - RNA, 20 nt, synthetic construct
  misc_feature 1..20: note = antisense sequence
  source 1..20: mol_type = other RNA
cttcccacttaatttctcca

SEQ ID NO: 2085 - RNA, 20 nt, synthetic construct
  misc_feature 1..20: note = antisense sequence
  source 1..20: mol_type = other RNA
aggtgattagcacacttccc

SEQ ID NO: 2086 - RNA, 20 nt, synthetic construct
  misc_feature 1..20: note = antisense sequence
  source 1..20: mol_type = other RNA
taggtgattagcacacttcc

SEQ ID NO: 2087 - RNA, 20 nt, synthetic construct
  misc_feature 1..20: note = antisense sequence
  source 1..20: mol_type = other RNA
ttaggtgattagcacacttc

SEQ ID NO: 2088 - RNA, 20 nt, synthetic construct
  misc_feature 1..20: note = antisense sequence
  source 1..20: mol_type = other RNA
cttaggtgattagcacactt

SEQ ID NO: 2089 - RNA, 20 nt, synthetic construct
  misc_feature 1..20: note = antisense sequence
  source 1..20: mol_type = other RNA
tcttaggtgattagcacact

SEQ ID NO: 2090 - RNA, 20 nt, synthetic construct
  misc_feature 1..20: note = antisense sequence
  source 1..20: mol_type = other RNA
gttcttaggtgattagcaca

SEQ ID NO: 2091 - RNA, 20 nt, synthetic construct
  misc_feature 1..20: note = antisense sequence
  source 1..20: mol_type = other RNA
ggttcttaggtgattagcac

SEQ ID NO: 2092 - RNA, 20 nt, synthetic construct
  misc_feature 1..20: note = antisense sequence
  source 1..20: mol_type = other RNA
gaggttcttaggtgattagc

SEQ ID NO: 2093 - RNA, 20 nt, synthetic construct
  misc_feature 1..20: note = antisense sequence
  source 1..20: mol_type = other RNA
ggaggttcttaggtgattag

SEQ ID NO: 2094 - RNA, 20 nt, synthetic construct
  misc_feature 1..20: note = antisense sequence
  source 1..20: mol_type = other RNA
cggaggttcttaggtgatta

SEQ ID NO: 2095 - RNA, 20 nt, synthetic construct
  misc_feature 1..20: note = antisense sequence
  source 1..20: mol_type = other RNA
acggaggttcttaggtgatt

SEQ ID NO: 2096 - RNA, 20 nt, synthetic construct
  misc_feature 1..20: note = antisense sequence
  source 1..20: mol_type = other RNA
cacggaggttcttaggtgat

SEQ ID NO: 2097 - RNA, 20 nt, synthetic construct
  misc_feature 1..20: note = antisense sequence
  source 1..20: mol_type = other RNA
tagcacggaggttcttaggt

SEQ ID NO: 2098 - RNA, 20 nt, synthetic construct
  misc_feature 1..20: note = antisense sequence
  source 1..20: mol_type = other RNA
gtagcacggaggttcttagg

SEQ ID NO: 2099 - RNA, 20 nt, synthetic construct
  misc_feature 1..20: note = antisense sequence
  source 1..20: mol_type = other RNA
tgtagcacggaggttcttag

SEQ ID NO: 2100 - RNA, 20 nt, synthetic construct
  misc_feature 1..20: note = antisense sequence
  source 1..20: mol_type = other RNA
ttgtagcacggaggttctta

SEQ ID NO: 2101 - RNA, 20 nt, synthetic construct
  misc_feature 1..20: note = antisense sequence
  source 1..20: mol_type = other RNA
cttgtagcacggaggttctt

SEQ ID NO: 2102 - RNA, 20 nt, synthetic construct
  misc_feature 1..20: note = antisense sequence
  source 1..20: mol_type = other RNA
tcttgtagcacggaggttct

SEQ ID NO: 2103 - RNA, 20 nt, synthetic construct
  misc_feature 1..20: note = antisense sequence
  source 1..20: mol_type = other RNA
ttcttgtagcacggaggttc

SEQ ID NO: 2104 - RNA, 20 nt, synthetic construct
  misc_feature 1..20: note = antisense sequence
  source 1..20: mol_type = other RNA
cttcttgtagcacggaggtt

SEQ ID NO: 2105 - RNA, 20 nt, synthetic construct
  misc_feature 1..20: note = antisense sequence
  source 1..20: mol_type = other RNA
ccttcttgtagcacggaggt

SEQ ID NO: 2106 - RNA, 20 nt, synthetic construct
  misc_feature 1..20: note = antisense sequence
  source 1..20: mol_type = other RNA
tccttcttgtagcacggagg

SEQ ID NO: 2107 - RNA, 20 nt, synthetic construct
  misc_feature 1..20: note = antisense sequence
  source 1..20: mol_type = other RNA
actccttcttgtagcacgga

SEQ ID NO: 2108 - RNA, 20 nt, synthetic construct
  misc_feature 1..20: note = antisense sequence
  source 1..20: mol_type = other RNA
aactccttcttgtagcacgg

SEQ ID NO: 2109 - RNA, 20 nt, synthetic construct
  misc_feature 1..20: note = antisense sequence
  source 1..20: mol_type = other RNA
aaactccttcttgtagcacg

SEQ ID NO: 2110 - RNA, 20 nt, synthetic construct
  misc_feature 1..20: note = antisense sequence
  source 1..20: mol_type = other RNA
ccaaactccttcttgtagca

SEQ ID NO: 2111 - RNA, 20 nt, synthetic construct
  misc_feature 1..20: note = antisense sequence
  source 1..20: mol_type = other RNA
cccaaactccttcttgtagc

SEQ ID NO: 2112 - RNA, 20 nt, synthetic construct
  misc_feature 1..20: note = antisense sequence
  source 1..20: mol_type = other RNA
caaacccaaactccttcttg

SEQ ID NO: 2113 - RNA, 20 nt, synthetic construct
  misc_feature 1..20: note = antisense sequence
  source 1..20: mol_type = other RNA
tcaaacccaaactccttctt

SEQ ID NO: 2114 - RNA, 20 nt, synthetic construct
  misc_feature 1..20: note = antisense sequence
  source 1..20: mol_type = other RNA
aatggtcaaacccaaactcc

SEQ ID NO: 2115 - RNA, 20 nt, synthetic construct
  misc_feature 1..20: note = antisense sequence
  source 1..20: mol_type = other RNA
taatggtcaaacccaaactc

SEQ ID NO: 2116 - RNA, 20 nt, synthetic construct
  misc_feature 1..20: note = antisense sequence
  source 1..20: mol_type = other RNA
ctaatggtcaaacccaaact

SEQ ID NO: 2117 - RNA, 20 nt, synthetic construct
  misc_feature 1..20: note = antisense sequence
  source 1..20: mol_type = other RNA
cctaatggtcaaacccaaac

SEQ ID NO: 2118 - RNA, 20 nt, synthetic construct
  misc_feature 1..20: note = antisense sequence
  source 1..20: mol_type = other RNA
tcctaatggtcaaacccaaa

SEQ ID NO: 2119 - RNA, 20 nt, synthetic construct
  misc_feature 1..20: note = antisense sequence
  source 1..20: mol_type = other RNA
ctcctaatggtcaaacccaa

SEQ ID NO: 2120 - RNA, 20 nt, synthetic construct
  misc_feature 1..20: note = antisense sequence
  source 1..20: mol_type = other RNA
tctcctaatggtcaaaccca

SEQ ID NO: 2121 - RNA, 20 nt, synthetic construct
  misc_feature 1..20: note = antisense sequence
  source 1..20: mol_type = other RNA
ttctcctaatggtcaaaccc

SEQ ID NO: 2122 - RNA, 20 nt, synthetic construct
  misc_feature 1..20: note = antisense sequence
  source 1..20: mol_type = other RNA
tttctcctaatggtcaaacc

SEQ ID NO: 2123 - RNA, 20 nt, synthetic construct
  misc_feature 1..20: note = antisense sequence
  source 1..20: mol_type = other RNA
gatgctgccaaagtggtatt

SEQ ID NO: 2124 - RNA, 20 nt, synthetic construct
  misc_feature 1..20: note = antisense sequence
  source 1..20: mol_type = other RNA
tgatgctgccaaagtggtat

SEQ ID NO: 2125 - RNA, 20 nt, synthetic construct
  misc_feature 1..20: note = antisense sequence
  source 1..20: mol_type = other RNA
gttgacttctgttcattcct

SEQ ID NO: 2126 - RNA, 20 nt, synthetic construct
  misc_feature 1..20: note = antisense sequence
  source 1..20: mol_type = other RNA
ctgttgacttctgttcattc

SEQ ID NO: 2127 - RNA, 20 nt, synthetic construct
  misc_feature 1..20: note = antisense sequence
  source 1..20: mol_type = other RNA
gtccttttgatcccatctct

SEQ ID NO: 2128 - RNA, 20 nt, synthetic construct
  misc_feature 1..20: note = antisense sequence
  source 1..20: mol_type = other RNA
tgtccttttgatcccatctc

SEQ ID NO: 2129 - RNA, 20 nt, synthetic construct
  misc_feature 1..20: note = antisense sequence
  source 1..20: mol_type = other RNA
tcatgtccttttgatcccat

SEQ ID NO: 2130 - RNA, 20 nt, synthetic construct
  misc_feature 1..20: note = antisense sequence
  source 1..20: mol_type = other RNA
gtcatgtccttttgatccca

SEQ ID NO: 2131 - RNA, 20 nt, synthetic construct
  misc_feature 1..20: note = antisense sequence
  source 1..20: mol_type = other RNA
agtcatgtccttttgatccc

SEQ ID NO: 2132 - RNA, 20 nt, synthetic construct
  misc_feature 1..20: note = antisense sequence
  source 1..20: mol_type = other RNA
cagtcatgtccttttgatcc

SEQ ID NO: 2133 - RNA, 20 nt, synthetic construct
  misc_feature 1..20: note = antisense sequence
  source 1..20: mol_type = other RNA
gcagtcatgtccttttgatc

SEQ ID NO: 2134 - RNA, 20 nt, synthetic construct
  misc_feature 1..20: note = antisense sequence
  source 1..20: mol_type = other RNA
tgcagtcatgtccttttgat

SEQ ID NO: 2135 - RNA, 20 nt, synthetic construct
  misc_feature 1..20: note = antisense sequence
  source 1..20: mol_type = other RNA
aactctaaacagcaatctgc

SEQ ID NO: 2136 - RNA, 20 nt, synthetic construct
  misc_feature 1..20: note = antisense sequence
  source 1..20: mol_type = other RNA
cccaccactcaagaaatctg

SEQ ID NO: 2137 - RNA, 20 nt, synthetic construct
  misc_feature 1..20: note = antisense sequence
  source 1..20: mol_type = other RNA
ctctcccaccactcaagaaa

SEQ ID NO: 2138 - RNA, 20 nt, synthetic construct
  misc_feature 1..20: note = antisense sequence
  source 1..20: mol_type = other RNA
tctctcccaccactcaagaa

SEQ ID NO: 2139 - RNA, 20 nt, synthetic construct
  misc_feature 1..20: note = antisense sequence
  source 1..20: mol_type = other RNA
atctctcccaccactcaaga

SEQ ID NO: 2140 - RNA, 20 nt, synthetic construct
  misc_feature 1..20: note = antisense sequence
  source 1..20: mol_type = other RNA
ttgtgtcatcatctctccca

SEQ ID NO: 2141 - RNA, 20 nt, synthetic construct
  misc_feature 1..20: note = antisense sequence
  source 1..20: mol_type = other RNA
tttgtgtcatcatctctccc

SEQ ID NO: 2142 - RNA, 20 nt, synthetic construct
  misc_feature 1..20: note = antisense sequence
  source 1..20: mol_type = other RNA
ttttgtgtcatcatctctcc

SEQ ID NO: 2143 - RNA, 20 nt, synthetic construct
  misc_feature 1..20: note = antisense sequence
  source 1..20: mol_type = other RNA
accaccactgcataaaacat

SEQ ID NO: 2144 - RNA, 20 nt, synthetic construct
  misc_feature 1..20: note = antisense sequence
  source 1..20: mol_type = other RNA
aaccaccactgcataaaaca

SEQ ID NO: 2145 - RNA, 20 nt, synthetic construct
  misc_feature 1..20: note = antisense sequence
  source 1..20: mol_type = other RNA
taaccaccactgcataaaac

SEQ ID NO: 2146 - RNA, 20 nt, synthetic construct
  misc_feature 1..20: note = antisense sequence
  source 1..20: mol_type = other RNA
ctgcactatgggaatcctga

SEQ ID NO: 2147 - RNA, 20 nt, synthetic construct
  misc_feature 1..20: note = antisense sequence
  source 1..20: mol_type = other RNA
tcctgcactatgggaatcct

SEQ ID NO: 2148 - RNA, 20 nt, synthetic construct
  misc_feature 1..20: note = antisense sequence
  source 1..20: mol_type = other RNA
cttgctaattcctgcactat

SEQ ID NO: 2149 - RNA, 20 nt, synthetic construct
  misc_feature 1..20: note = antisense sequence
  source 1..20: mol_type = other RNA
gcttgctaattcctgcacta

SEQ ID NO: 2150 - RNA, 20 nt, synthetic construct
  misc_feature 1..20: note = antisense sequence
  source 1..20: mol_type = other RNA
agcttgctaattcctgcact

SEQ ID NO: 2151 - RNA, 20 nt, synthetic construct
  misc_feature 1..20: note = antisense sequence
  source 1..20: mol_type = other RNA
tagcttgctaattcctgcac

SEQ ID NO: 2152 - RNA, 20 nt, synthetic construct
  misc_feature 1..20: note = antisense sequence
  source 1..20: mol_type = other RNA
ctgaatgagatatagcttgc

SEQ ID NO: 2153 - RNA, 20 nt, synthetic construct
  misc_feature 1..20: note = antisense sequence
  source 1..20: mol_type = other RNA
ggcctgaatgagatatagct

SEQ ID NO: 2154 - RNA, 20 nt, synthetic construct
  misc_feature 1..20: note = antisense sequence
  source 1..20: mol_type = other RNA
ttggcctgaatgagatatag

SEQ ID NO: 2155 - RNA, 20 nt, synthetic construct
  misc_feature 1..20: note = antisense sequence
  source 1..20: mol_type = other RNA
tgattggcctgaatgagata

SEQ ID NO: 2156 - RNA, 20 nt, synthetic construct
  misc_feature 1..20: note = antisense sequence
  source 1..20: mol_type = other RNA
ctgattggcctgaatgagat

SEQ ID NO: 2157 - RNA, 20 nt, synthetic construct
  misc_feature 1..20: note = antisense sequence
  source 1..20: mol_type = other RNA
actgattggcctgaatgaga

SEQ ID NO: 2158 - RNA, 20 nt, synthetic construct
  misc_feature 1..20: note = antisense sequence
  source 1..20: mol_type = other RNA
aactgattggcctgaatgag

SEQ ID NO: 2159 - RNA, 20 nt, synthetic construct
  misc_feature 1..20: note = antisense sequence
  source 1..20: mol_type = other RNA
taactgattggcctgaatga

SEQ ID NO: 2160 - RNA, 20 nt, synthetic construct
  misc_feature 1..20: note = antisense sequence
  source 1..20: mol_type = other RNA
gtaactgattggcctgaatg

SEQ ID NO: 2161 - RNA, 20 nt, synthetic construct
  misc_feature 1..20: note = antisense sequence
  source 1..20: mol_type = other RNA
agtaactgattggcctgaat

SEQ ID NO: 2162 - RNA, 20 nt, synthetic construct
  misc_feature 1..20: note = antisense sequence
  source 1..20: mol_type = other RNA
cagtaactgattggcctgaa

SEQ ID NO: 2163 - RNA, 20 nt, synthetic construct
  misc_feature 1..20: note = antisense sequence
  source 1..20: mol_type = other RNA
gcagtaactgattggcctga

SEQ ID NO: 2164 - RNA, 20 nt, synthetic construct
  misc_feature 1..20: note = antisense sequence
  source 1..20: mol_type = other RNA
agcagtaactgattggcctg

SEQ ID NO: 2165 - RNA, 20 nt, synthetic construct
  misc_feature 1..20: note = antisense sequence
  source 1..20: mol_type = other RNA
tagcagtaactgattggcct

SEQ ID NO: 2166 - RNA, 20 nt, synthetic construct
  misc_feature 1..20: note = antisense sequence
  source 1..20: mol_type = other RNA
ctagcagtaactgattggcc

SEQ ID NO: 2167 - RNA, 20 nt, synthetic construct
  misc_feature 1..20: note = antisense sequence
  source 1..20: mol_type = other RNA
gtgagacaaatcagagatac

SEQ ID NO: 2168 - RNA, 20 nt, synthetic construct
  misc_feature 1..20: note = antisense sequence
  source 1..20: mol_type = other RNA
ggtgagacaaatcagagata

SEQ ID NO: 2169 - RNA, 20 nt, synthetic construct
  misc_feature 1..20: note = antisense sequence
  source 1..20: mol_type = other RNA
ctctgatttgtctggtgaga

SEQ ID NO: 2170 - RNA, 20 nt, synthetic construct
  misc_feature 1..20: note = antisense sequence
  source 1..20: mol_type = other RNA
tctctgatttgtctggtgag

SEQ ID NO: 2171 - RNA, 20 nt, synthetic construct
  misc_feature 1..20: note = antisense sequence
  source 1..20: mol_type = other RNA
tgtatctctgatttgtctgg

SEQ ID NO: 2172 - RNA, 20 nt, synthetic construct
  misc_feature 1..20: note = antisense sequence
  source 1..20: mol_type = other RNA
gtgtatctctgatttgtctg

SEQ ID NO: 2173 - RNA, 20 nt, synthetic construct
  misc_feature 1..20: note = antisense sequence
  source 1..20: mol_type = other RNA
ggaagtgtatctctgatttg

SEQ ID NO: 2174 - RNA, 20 nt, synthetic construct
  misc_feature 1..20: note = antisense sequence
  source 1..20: mol_type = other RNA
ctcttgtggttcctcacgga

SEQ ID NO: 2175 - RNA, 20 nt, synthetic construct
  misc_feature 1..20: note = antisense sequence
  source 1..20: mol_type = other RNA
actcttgtggttcctcacgg

SEQ ID NO: 2176 - RNA, 20 nt, synthetic construct
  misc_feature 1..20: note = antisense sequence
  source 1..20: mol_type = other RNA
gactcttgtggttcctcacg

SEQ ID NO: 2177 - RNA, 20 nt, synthetic construct
  misc_feature 1..20: note = antisense sequence
  source 1..20: mol_type = other RNA
agactcttgtggttcctcac

SEQ ID NO: 2178 - RNA, 20 nt, synthetic construct
  misc_feature 1..20: note = antisense sequence
  source 1..20: mol_type = other RNA
cagactcttgtggttcctca

SEQ ID NO: 2179 - RNA, 20 nt, synthetic construct
  misc_feature 1..20: note = antisense sequence
  source 1..20: mol_type = other RNA
gttcagactcttgtggttcc

SEQ ID NO: 2180 - RNA, 20 nt, synthetic construct
  misc_feature 1..20: note = antisense sequence
  source 1..20: mol_type = other RNA
agttcagactcttgtggttc

SEQ ID NO: 2181 - RNA, 20 nt, synthetic construct
  misc_feature 1..20: note = antisense sequence
  source 1..20: mol_type = other RNA
cagttcagactcttgtggtt

SEQ ID NO: 2182 - RNA, 20 nt, synthetic construct
  misc_feature 1..20: note = antisense sequence
  source 1..20: mol_type = other RNA
acagttcagactcttgtggt

SEQ ID NO: 2183 - RNA, 20 nt, synthetic construct
  misc_feature 1..20: note = antisense sequence
  source 1..20: mol_type = other RNA
gtgtgctggtcaaaatcaat

SEQ ID NO: 2184 - RNA, 20 nt, synthetic construct
  misc_feature 1..20: note = antisense sequence
  source 1..20: mol_type = other RNA
tgtgtgctggtcaaaatcaa

SEQ ID NO: 2185 - RNA, 20 nt, synthetic construct
  misc_feature 1..20: note = antisense sequence
  source 1..20: mol_type = other RNA
ttgtgtgctggtcaaaatca

SEQ ID NO: 2186 - RNA, 20 nt, synthetic construct
  misc_feature 1..20: note = antisense sequence
  source 1..20: mol_type = other RNA
attgtgtgctggtcaaaatc

SEQ ID NO: 2187 - RNA, 20 nt, synthetic construct
  misc_feature 1..20: note = antisense sequence
  source 1..20: mol_type = other RNA
caaaattgtgtgctggtcaa

SEQ ID NO: 2188 - RNA, 20 nt, synthetic construct
  misc_feature 1..20: note = antisense sequence
  source 1..20: mol_type = other RNA
gcaaaattgtgtgctggtca

SEQ ID NO: 2189 - RNA, 20 nt, synthetic construct
  misc_feature 1..20: note = antisense sequence
  source 1..20: mol_type = other RNA
ataccagcaaaattgtgtgc

SEQ ID NO: 2190 - RNA, 20 nt, synthetic construct
  misc_feature 1..20: note = antisense sequence
  source 1..20: mol_type = other RNA
tgcttcactgctggagaatt

SEQ ID NO: 2191 - RNA, 20 nt, synthetic construct
  misc_feature 1..20: note = antisense sequence
  source 1..20: mol_type = other RNA
tagttgtgcttcactgctgg

SEQ ID NO: 2192 - RNA, 20 nt, synthetic construct
  misc_feature 1..20: note = antisense sequence
  source 1..20: mol_type = other RNA
ttagttgtgcttcactgctg

SEQ ID NO: 2193 - RNA, 20 nt, synthetic construct
  misc_feature 1..20: note = antisense sequence
  source 1..20: mol_type = other RNA
tttagttgtgcttcactgct

SEQ ID NO: 2194 - RNA, 20 nt, synthetic construct
  misc_feature 1..20: note = antisense sequence
  source 1..20: mol_type = other RNA
ctttagttgtgcttcactgc

SEQ ID NO: 2195 - RNA, 20 nt, synthetic construct
  misc_feature 1..20: note = antisense sequence
  source 1..20: mol_type = other RNA
actttagttgtgcttcactg

SEQ ID NO: 2196 - RNA, 20 nt, synthetic construct
  misc_feature 1..20: note = antisense sequence
  source 1..20: mol_type = other RNA
cttcactttagttgtgcttc

SEQ ID NO: 2197 - RNA, 20 nt, synthetic construct
  misc_feature 1..20: note = antisense sequence
  source 1..20: mol_type = other RNA
ctcttcactttagttgtgct

SEQ ID NO: 2198 - RNA, 20 nt, synthetic construct
  misc_feature 1..20: note = antisense sequence
  source 1..20: mol_type = other RNA
gctcttcactttagttgtgc

SEQ ID NO: 2199 - RNA, 20 nt, synthetic construct
  misc_feature 1..20: note = antisense sequence
  source 1..20: mol_type = other RNA
cagctcttcactttagttgt

SEQ ID NO: 2200 - RNA, 20 nt, synthetic construct
  misc_feature 1..20: note = antisense sequence
  source 1..20: mol_type = other RNA
tcagctcttcactttagttg

SEQ ID NO: 2201 - RNA, 20 nt, synthetic construct
  misc_feature 1..20: note = antisense sequence
  source 1..20: mol_type = other RNA
cttcagctcttcactttagt

SEQ ID NO: 2202 - RNA, 20 nt, synthetic construct
  misc_feature 1..20: note = antisense sequence
  source 1..20: mol_type = other RNA
ctcttcagctcttcacttta

SEQ ID NO: 2203 - RNA, 20 nt, synthetic construct
  misc_feature 1..20: note = antisense sequence
  source 1..20: mol_type = other RNA
ctgacatccattggaagaaa

SEQ ID NO: 2204 - RNA, 20 nt, synthetic construct
  misc_feature 1..20: note = antisense sequence
  source 1..20: mol_type = other RNA
gctgacatccattggaagaa

SEQ ID NO: 2205 - RNA, 20 nt, synthetic construct
  misc_feature 1..20: note = antisense sequence
  source 1..20: mol_type = other RNA
tgctgacatccattggaaga

SEQ ID NO: 2206 - RNA, 20 nt, synthetic construct
  misc_feature 1..20: note = antisense sequence
  source 1..20: mol_type = other RNA
atgctgacatccattggaag

SEQ ID NO: 2207 - RNA, 20 nt, synthetic construct
  misc_feature 1..20: note = antisense sequence
  source 1..20: mol_type = other RNA
tatgctgacatccattggaa

SEQ ID NO: 2208 - RNA, 20 nt, synthetic construct
  misc_feature 1..20: note = antisense sequence
  source 1..20: mol_type = other RNA
atatgctgacatccattgga

SEQ ID NO: 2209 - RNA, 20 nt, synthetic construct
  misc_feature 1..20: note = antisense sequence
  source 1..20: mol_type = other RNA
aatatgctgacatccattgg

SEQ ID NO: 2210 - RNA, 20 nt, synthetic construct
  misc_feature 1..20: note = antisense sequence
  source 1..20: mol_type = other RNA
actgaatcacaccacaaagt

SEQ ID NO: 2211 - RNA, 20 nt, synthetic construct
  misc_feature 1..20: note = antisense sequence
  source 1..20: mol_type = other RNA
ccaagactactaatacaggt

SEQ ID NO: 2212 - RNA, 20 nt, synthetic construct
  misc_feature 1..20: note = antisense sequence
  source 1..20: mol_type = other RNA
tccaagactactaatacagg

SEQ ID NO: 2213 - RNA, 20 nt, synthetic construct
  misc_feature 1..20: note = antisense sequence
  source 1..20: mol_type = other RNA
ctcctgattgttctccttgt

SEQ ID NO: 2214 - RNA, 20 nt, synthetic construct
  misc_feature 1..20: note = antisense sequence
  source 1..20: mol_type = other RNA
gcaactcctgattgttctcc

SEQ ID NO: 2215 - RNA, 20 nt, synthetic construct
  misc_feature 1..20: note = antisense sequence
  source 1..20: mol_type = other RNA
agcaactcctgattgttctc

SEQ ID NO: 2216 - RNA, 20 nt, synthetic construct
  misc_feature 1..20: note = antisense sequence
  source 1..20: mol_type = other RNA
tagcaactcctgattgttct

SEQ ID NO: 2217 - RNA, 20 nt, synthetic construct
  misc_feature 1..20: note = antisense sequence
  source 1..20: mol_type = other RNA
ttagcaactcctgattgttc

SEQ ID NO: 2218 - RNA, 20 nt, synthetic construct
  misc_feature 1..20: note = antisense sequence
  source 1..20: mol_type = other RNA
actgaagaaggtatctccat

SEQ ID NO: 2219 - RNA, 20 nt, synthetic construct
  misc_feature 1..20: note = antisense sequence
  source 1..20: mol_type = other RNA
cactgaagaaggtatctcca

SEQ ID NO: 2220 - RNA, 20 nt, synthetic construct
  misc_feature 1..20: note = antisense sequence
  source 1..20: mol_type = other RNA
ccactgaagaaggtatctcc

SEQ ID NO: 2221 - RNA, 20 nt, synthetic construct
  misc_feature 1..20: note = antisense sequence
  source 1..20: mol_type = other RNA
atcgccactgaagaaggtat

SEQ ID NO: 2222 - RNA, 20 nt, synthetic construct
  misc_feature 1..20: note = antisense sequence
  source 1..20: mol_type = other RNA
catcgccactgaagaaggta

SEQ ID NO: 2223 - RNA, 20 nt, synthetic construct
  misc_feature 1..20: note = antisense sequence
  source 1..20: mol_type = other RNA
tcatcgccactgaagaaggt

SEQ ID NO: 2224 - RNA, 20 nt, synthetic construct
  misc_feature 1..20: note = antisense sequence
  source 1..20: mol_type = other RNA
atcatcgccactgaagaagg

SEQ ID NO: 2225 - RNA, 20 nt, synthetic construct
  misc_feature 1..20: note = antisense sequence
  source 1..20: mol_type = other RNA
tatcatcgccactgaagaag

SEQ ID NO: 2226 - RNA, 20 nt, synthetic construct
  misc_feature 1..20: note = antisense sequence
  source 1..20: mol_type = other RNA
ttatcatcgccactgaagaa

SEQ ID NO: 2227 - RNA, 20 nt, synthetic construct
  misc_feature 1..20: note = antisense sequence
  source 1..20: mol_type = other RNA
tttatcatcgccactgaaga

SEQ ID NO: 2228 - RNA, 20 nt, synthetic construct
  misc_feature 1..20: note = antisense sequence
  source 1..20: mol_type = other RNA
ctttatcatcgccactgaag

SEQ ID NO: 2229 - RNA, 20 nt, synthetic construct
  misc_feature 1..20: note = antisense sequence
  source 1..20: mol_type = other RNA
actttatcatcgccactgaa

SEQ ID NO: 2230 - RNA, 20 nt, synthetic construct
  misc_feature 1..20: note = antisense sequence
  source 1..20: mol_type = other RNA
gactttatcatcgccactga

SEQ ID NO: 2231 - RNA, 20 nt, synthetic construct
  misc_feature 1..20: note = antisense sequence
  source 1..20: mol_type = other RNA
agactttatcatcgccactg

SEQ ID NO: 2232 - RNA, 20 nt, synthetic construct
  misc_feature 1..20: note = antisense sequence
  source 1..20: mol_type = other RNA
gagactttatcatcgccact

SEQ ID NO: 2233 - RNA, 20 nt, synthetic construct
  misc_feature 1..20: note = antisense sequence
  source 1..20: mol_type = other RNA
tgagactttatcatcgccac

SEQ ID NO: 2234 - RNA, 20 nt, synthetic construct
  misc_feature 1..20: note = antisense sequence
  source 1..20: mol_type = other RNA
ggtgtttgtccttacagaaa

SEQ ID NO: 2235 - RNA, 20 nt, synthetic construct
  misc_feature 1..20: note = antisense sequence
  source 1..20: mol_type = other RNA
aggtgtttgtccttacagaa

SEQ ID NO: 2236 - RNA, 20 nt, synthetic construct
  misc_feature 1..20: note = antisense sequence
  source 1..20: mol_type = other RNA
accttcccatatcaatgtca

SEQ ID NO: 2237 - RNA, 20 nt, synthetic construct
  misc_feature 1..20: note = antisense sequence
  source 1..20: mol_type = other RNA
gaccttcccatatcaatgtc

SEQ ID NO: 2238 - RNA, 20 nt, synthetic construct
  misc_feature 1..20: note = antisense sequence
  source 1..20: mol_type = other RNA
atccttagcactgaaatctg

SEQ ID NO: 2239 - RNA, 20 nt, synthetic construct
  misc_feature 1..20: note = antisense sequence
  source 1..20: mol_type = other RNA
tcatccttagcactgaaatc

SEQ ID NO: 2240 - RNA, 20 nt, synthetic construct
  misc_feature 1..20: note = antisense sequence
  source 1..20: mol_type = other RNA
atagaaaacaggcacttcca

SEQ ID NO: 2241 - RNA, 20 nt, synthetic construct
  misc_feature 1..20: note = antisense sequence
  source 1..20: mol_type = other RNA
tatagaaaacaggcacttcc

SEQ ID NO: 2242 - RNA, 20 nt, synthetic construct
  misc_feature 1..20: note = antisense sequence
  source 1..20: mol_type = other RNA
gtggcacccaaatagaaata

SEQ ID NO: 2243 - RNA, 20 nt, synthetic construct
  misc_feature 1..20: note = antisense sequence
  source 1..20: mol_type = other RNA
tgtggcacccaaatagaaat

SEQ ID NO: 2244 - RNA, 20 nt, synthetic construct
  misc_feature 1..20: note = antisense sequence
  source 1..20: mol_type = other RNA
aaatgtggcacccaaataga

SEQ ID NO: 2245 - RNA, 20 nt, synthetic construct
  misc_feature 1..20: note = antisense sequence
  source 1..20: mol_type = other RNA
caaatgtggcacccaaatag

SEQ ID NO: 2246 - RNA, 20 nt, synthetic construct
  misc_feature 1..20: note = antisense sequence
  source 1..20: mol_type = other RNA
aaacaaatgtggcacccaaa

SEQ ID NO: 2247 - RNA, 20 nt, synthetic construct
  misc_feature 1..20: note = antisense sequence
  source 1..20: mol_type = other RNA
aaaacaaatgtggcacccaa

SEQ ID NO: 2248 - RNA, 20 nt, synthetic construct
  misc_feature 1..20: note = antisense sequence
  source 1..20: mol_type = other RNA
ttgaaaacaaatgtggcacc

SEQ ID NO: 2249 - RNA, 20 nt, synthetic construct
  misc_feature 1..20: note = antisense sequence
  source 1..20: mol_type = other RNA
ctcagtattgggtgttttga

SEQ ID NO: 2250 - RNA, 20 nt, synthetic construct
  misc_feature 1..20: note = antisense sequence
  source 1..20: mol_type = other RNA
cctcagtattgggtgttttg

SEQ ID NO: 2251 - RNA, 20 nt, synthetic construct
  misc_feature 1..20: note = antisense sequence
  source 1..20: mol_type = other RNA
gcctcagtattgggtgtttt

SEQ ID NO: 2252 - RNA, 20 nt, synthetic construct
  misc_feature 1..20: note = antisense sequence
  source 1..20: mol_type = other RNA
tgcctcagtattgggtgttt

SEQ ID NO: 2253 - RNA, 20 nt, synthetic construct
  misc_feature 1..20: note = antisense sequence
  source 1..20: mol_type = other RNA
ttgcctcagtattgggtgtt

SEQ ID NO: 2254 - RNA, 20 nt, synthetic construct
  misc_feature 1..20: note = antisense sequence
  source 1..20: mol_type = other RNA
cttgcctcagtattgggtgt

SEQ ID NO: 2255 - RNA, 20 nt, synthetic construct
  misc_feature 1..20: note = antisense sequence
  source 1..20: mol_type = other RNA
tcttgcctcagtattgggtg

SEQ ID NO: 2256 - RNA, 20 nt, synthetic construct
  misc_feature 1..20: note = antisense sequence
  source 1..20: mol_type = other RNA
ctcttgcctcagtattgggt

SEQ ID NO: 2257 - RNA, 20 nt, synthetic construct
  misc_feature 1..20: note = antisense sequence
  source 1..20: mol_type = other RNA
gctcttgcctcagtattggg

SEQ ID NO: 2258 - RNA, 20 nt, synthetic construct
  misc_feature 1..20: note = antisense sequence
  source 1..20: mol_type = other RNA
aaatactgctcttgcctcag

SEQ ID NO: 2259 - RNA, 20 nt, synthetic construct
  misc_feature 1..20: note = antisense sequence
  source 1..20: mol_type = other RNA
caaatactgctcttgcctca

SEQ ID NO: 2260 - RNA, 20 nt, synthetic construct
  misc_feature 1..20: note = antisense sequence
  source 1..20: mol_type = other RNA
aagccaggcaatatgactgc

SEQ ID NO: 2261 - RNA, 20 nt, synthetic construct
  misc_feature 1..20: note = antisense sequence
  source 1..20: mol_type = other RNA
aaagccaggcaatatgactg

SEQ ID NO: 2262 - RNA, 20 nt, synthetic construct
  misc_feature 1..20: note = antisense sequence
  source 1..20: mol_type = other RNA
ggcaaagccaggcaatatga

SEQ ID NO: 2263 - RNA, 20 nt, synthetic construct
  misc_feature 1..20: note = antisense sequence
  source 1..20: mol_type = other RNA
gggcaaagccaggcaatatg

SEQ ID NO: 2264 - RNA, 20 nt, synthetic construct
  misc_feature 1..20: note = antisense sequence
  source 1..20: mol_type = other RNA
tgggcaaagccaggcaatat

SEQ ID NO: 2265 - RNA, 20 nt, synthetic construct
  misc_feature 1..20: note = antisense sequence
  source 1..20: mol_type = other RNA
gtaccaaccctgggcaaagc

SEQ ID NO: 2266 - RNA, 20 nt, synthetic construct
  misc_feature 1..20: note = antisense sequence
  source 1..20: mol_type = other RNA
taccataagacctgacactt

SEQ ID NO: 2267 - RNA, 20 nt, synthetic construct
  misc_feature 1..20: note = antisense sequence
  source 1..20: mol_type = other RNA
actgggttcttgaaagacta

SEQ ID NO: 2268 - RNA, 20 nt, synthetic construct
  misc_feature 1..20: note = antisense sequence
  source 1..20: mol_type = other RNA
ctgactgggttcttgaaaga

SEQ ID NO: 2269 - RNA, 20 nt, synthetic construct
  misc_feature 1..20: note = antisense sequence
  source 1..20: mol_type = other RNA
tctgactgggttcttgaaag

SEQ ID NO: 2270 - RNA, 20 nt, synthetic construct
  misc_feature 1..20: note = antisense sequence
  source 1..20: mol_type = other RNA
ttctgactgggttcttgaaa

SEQ ID NO: 2271 - RNA, 20 nt, synthetic construct
  misc_feature 1..20: note = antisense sequence
  source 1..20: mol_type = other RNA
cccttctgactgggttcttg

SEQ ID NO: 2272 - RNA, 20 nt, synthetic construct
  misc_feature 1..20: note = antisense sequence
  source 1..20: mol_type = other RNA
acaaaacccttctgactggg

SEQ ID NO: 2273 - RNA, 20 nt, synthetic construct
  misc_feature 1..20: note = antisense sequence
  source 1..20: mol_type = other RNA
cacacccactaactgttatt

SEQ ID NO: 2274 - RNA, 20 nt, synthetic construct
  misc_feature 1..20: note = antisense sequence
  source 1..20: mol_type = other RNA
tcacacccactaactgttat

SEQ ID NO: 2275 - RNA, 20 nt, synthetic construct
  misc_feature 1..20: note = antisense sequence
  source 1..20: mol_type = other RNA
atcacacccactaactgtta

SEQ ID NO: 2276 - RNA, 20 nt, synthetic construct
  misc_feature 1..20: note = antisense sequence
  source 1..20: mol_type = other RNA
catcacacccactaactgtt

SEQ ID NO: 2277 - RNA, 20 nt, synthetic construct
  misc_feature 1..20: note = antisense sequence
  source 1..20: mol_type = other RNA
tcatcacacccactaactgt

SEQ ID NO: 2278 - RNA, 20 nt, synthetic construct
  misc_feature 1..20: note = antisense sequence
  source 1..20: mol_type = other RNA
ctcatcacacccactaactg

SEQ ID NO: 2279 - RNA, 20 nt, synthetic construct
  misc_feature 1..20: note = antisense sequence
  source 1..20: mol_type = other RNA
cctcatcacacccactaact

SEQ ID NO: 2280 - RNA, 20 nt, synthetic construct
  misc_feature 1..20: note = antisense sequence
  source 1..20: mol_type = other RNA
acctcatcacacccactaac

SEQ ID NO: 2281 - RNA, 20 nt, synthetic construct
  misc_feature 1..20: note = antisense sequence
  source 1..20: mol_type = other RNA
gagcacctcatcacacccac

SEQ ID NO: 2282 - RNA, 20 nt, synthetic construct
  misc_feature 1..20: note = antisense sequence
  source 1..20: mol_type = other RNA
ggagcacctcatcacaccca

SEQ ID NO: 2283 - RNA, 20 nt, synthetic construct
  misc_feature 1..20: note = antisense sequence
  source 1..20: mol_type = other RNA
tgatagctgagggagcacct

SEQ ID NO: 2284 - RNA, 20 nt, synthetic construct
  misc_feature 1..20: note = antisense sequence
  source 1..20: mol_type = other RNA
gtgatagctgagggagcacc

SEQ ID NO: 2285 - RNA, 20 nt, synthetic construct
  misc_feature 1..20: note = antisense sequence
  source 1..20: mol_type = other RNA
ggtgatagctgagggagcac

SEQ ID NO: 2286 - RNA, 20 nt, synthetic construct
  misc_feature 1..20: note = antisense sequence
  source 1..20: mol_type = other RNA
tagggtgatagctgagggag

SEQ ID NO: 2287 - RNA, 20 nt, synthetic construct
  misc_feature 1..20: note = antisense sequence
  source 1..20: mol_type = other RNA
ttagggtgatagctgaggga

SEQ ID NO: 2288 - RNA, 20 nt, synthetic construct
  misc_feature 1..20: note = antisense sequence
  source 1..20: mol_type = other RNA
tttagggtgatagctgaggg

SEQ ID NO: 2289 - RNA, 20 nt, synthetic construct
  misc_feature 1..20: note = antisense sequence
  source 1..20: mol_type = other RNA
ttttagggtgatagctgagg

SEQ ID NO: 2290 - RNA, 20 nt, synthetic construct
  misc_feature 1..20: note = antisense sequence
  source 1..20: mol_type = other RNA
aaagctgagaagaactggca

SEQ ID NO: 2291 - RNA, 20 nt, synthetic construct
  misc_feature 1..20: note = antisense sequence
  source 1..20: mol_type = other RNA
ctccaaactgaaagctgaga

SEQ ID NO: 2292 - RNA, 20 nt, synthetic construct
  misc_feature 1..20: note = antisense sequence
  source 1..20: mol_type = other RNA
tactccaaactgaaagctga

SEQ ID NO: 2293 - RNA, 20 nt, synthetic construct
  misc_feature 1..20: note = antisense sequence
  source 1..20: mol_type = other RNA
gcctactccaaactgaaagc

SEQ ID NO: 2294 - RNA, 20 nt, synthetic construct
  misc_feature 1..20: note = antisense sequence
  source 1..20: mol_type = other RNA
gattgcataaactttggctg

SEQ ID NO: 2295 - RNA, 20 nt, synthetic construct
  misc_feature 1..20: note = antisense sequence
  source 1..20: mol_type = other RNA
ccacagaattgagttcctga

SEQ ID NO: 2296 - RNA, 20 nt, synthetic construct
  misc_feature 1..20: note = antisense sequence
  source 1..20: mol_type = other RNA
tagaggaccacagaattgag

SEQ ID NO: 2297 - RNA, 20 nt, synthetic construct
  misc_feature 1..20: note = antisense sequence
  source 1..20: mol_type = other RNA
ttagaggaccacagaattga

SEQ ID NO: 2298 - RNA, 20 nt, synthetic construct
  misc_feature 1..20: note = antisense sequence
  source 1..20: mol_type = other RNA
attagaggaccacagaattg

SEQ ID NO: 2299 - RNA, 20 nt, synthetic construct
  misc_feature 1..20: note = antisense sequence
  source 1..20: mol_type = other RNA
agattagaggaccacagaat

SEQ ID NO: 2300 - RNA, 20 nt, synthetic construct
  misc_feature 1..20: note = antisense sequence
  source 1..20: mol_type = other RNA
tagattagaggaccacagaa

SEQ ID NO: 2301 - RNA, 20 nt, synthetic construct
  misc_feature 1..20: note = antisense sequence
  source 1..20: mol_type = other RNA
gtagattagaggaccacaga

SEQ ID NO: 2302 - RNA, 20 nt, synthetic construct
  misc_feature 1..20: note = antisense sequence
  source 1..20: mol_type = other RNA
ggtagattagaggaccacag

SEQ ID NO: 2303 - RNA, 20 nt, synthetic construct
  misc_feature 1..20: note = antisense sequence
  source 1..20: mol_type = other RNA
aggtagattagaggaccaca

SEQ ID NO: 2304 - RNA, 20 nt, synthetic construct
  misc_feature 1..20: note = antisense sequence
  source 1..20: mol_type = other RNA
caggtagattagaggaccac

SEQ ID NO: 2305 - RNA, 20 nt, synthetic construct
  misc_feature 1..20: note = antisense sequence
  source 1..20: mol_type = other RNA
ccaggtagattagaggacca

SEQ ID NO: 2306 - RNA, 20 nt, synthetic construct
  misc_feature 1..20: note = antisense sequence
  source 1..20: mol_type = other RNA
atccaggtagattagaggac

SEQ ID NO: 2307 - RNA, 20 nt, synthetic construct
  misc_feature 1..20: note = antisense sequence
  source 1..20: mol_type = other RNA
tgatccaggtagattagagg

SEQ ID NO: 2308 - RNA, 20 nt, synthetic construct
  misc_feature 1..20: note = antisense sequence
  source 1..20: mol_type = other RNA
ctatgatccaggtagattag

SEQ ID NO: 2309 - RNA, 20 nt, synthetic construct
  misc_feature 1..20: note = antisense sequence
  source 1..20: mol_type = other RNA
ccactatgatccaggtagat

SEQ ID NO: 2310 - RNA, 20 nt, synthetic construct
  misc_feature 1..20: note = antisense sequence
  source 1..20: mol_type = other RNA
tccactatgatccaggtaga

SEQ ID NO: 2311 - RNA, 20 nt, synthetic construct
  misc_feature 1..20: note = antisense sequence
  source 1..20: mol_type = other RNA
ctccactatgatccaggtag

SEQ ID NO: 2312 - RNA, 20 nt, synthetic construct
  misc_feature 1..20: note = antisense sequence
  source 1..20: mol_type = other RNA
tctccactatgatccaggta

SEQ ID NO: 2313 - RNA, 20 nt, synthetic construct
  misc_feature 1..20: note = antisense sequence
  source 1..20: mol_type = other RNA
ttctccactatgatccaggt

SEQ ID NO: 2314 - RNA, 20 nt, synthetic construct
  misc_feature 1..20: note = antisense sequence
  source 1..20: mol_type = other RNA
attctccactatgatccagg

SEQ ID NO: 2315 - RNA, 20 nt, synthetic construct
  misc_feature 1..20: note = antisense sequence
  source 1..20: mol_type = other RNA
aattctccactatgatccag

SEQ ID NO: 2316 - RNA, 20 nt, synthetic construct
  misc_feature 1..20: note = antisense sequence
  source 1..20: mol_type = other RNA
ctaattctccactatgatcc

SEQ ID NO: 2317 - RNA, 20 nt, synthetic construct
  misc_feature 1..20: note = antisense sequence
  source 1..20: mol_type = other RNA
tctctgctttctaattctcc

SEQ ID NO: 2318 - RNA, 20 nt, synthetic construct
  misc_feature 1..20: note = antisense sequence
  source 1..20: mol_type = other RNA
gatttgccacattttctctg

SEQ ID NO: 2319 - RNA, 20 nt, synthetic construct
  misc_feature 1..20: note = antisense sequence
  source 1..20: mol_type = other RNA
gctgaaactaggtgtgaaat

SEQ ID NO: 2320 - RNA, 20 nt, synthetic construct
  misc_feature 1..20: note = antisense sequence
  source 1..20: mol_type = other RNA
tgctgaaactaggtgtgaaa

SEQ ID NO: 2321 - RNA, 20 nt, synthetic construct
  misc_feature 1..20: note = antisense sequence
  source 1..20: mol_type = other RNA
ttgctgaaactaggtgtgaa

SEQ ID NO: 2322 - RNA, 20 nt, synthetic construct
  misc_feature 1..20: note = antisense sequence
  source 1..20: mol_type = other RNA
cttgctgaaactaggtgtga

SEQ ID NO: 2323 - RNA, 20 nt, synthetic construct
  misc_feature 1..20: note = antisense sequence
  source 1..20: mol_type = other RNA
gcttgctgaaactaggtgtg

SEQ ID NO: 2324 - RNA, 20 nt, synthetic construct
  misc_feature 1..20: note = antisense sequence
  source 1..20: mol_type = other RNA
gtgcatgacttaattgtagg

SEQ ID NO: 2325 - RNA, 20 nt, synthetic construct
  misc_feature 1..20: note = antisense sequence
  source 1..20: mol_type = other RNA
tcatccttgcatacccaggg

SEQ ID NO: 2326 - RNA, 20 nt, synthetic construct
  misc_feature 1..20: note = antisense sequence
  source 1..20: mol_type = other RNA
attcatccttgcatacccag

SEQ ID NO: 2327 - RNA, 20 nt, synthetic construct
  misc_feature 1..20: note = antisense sequence
  source 1..20: mol_type = other RNA
aattcatccttgcataccca

SEQ ID NO: 2328 - RNA, 20 nt, synthetic construct
  misc_feature 1..20: note = antisense sequence
  source 1..20: mol_type = other RNA
ggcagggaaaactgtcttaa

SEQ ID NO: 2329 - RNA, 20 nt, synthetic construct
  misc_feature 1..20: note = antisense sequence
  source 1..20: mol_type = other RNA
attaaaggcagggaaaactg

SEQ ID NO: 2330 - RNA, 20 nt, synthetic construct
  misc_feature 1..20: note = antisense sequence
  source 1..20: mol_type = other RNA
gattaaaggcagggaaaact

SEQ ID NO: 2331 - RNA, 20 nt, synthetic construct
  misc_feature 1..20: note = antisense sequence
  source 1..20: mol_type = other RNA
ctagattaaaggcagggaaa

SEQ ID NO: 2332 - RNA, 20 nt, synthetic construct
  misc_feature 1..20: note = antisense sequence
  source 1..20: mol_type = other RNA
gtggtcatctcctgctgata

SEQ ID NO: 2333 - RNA, 20 nt, synthetic construct
  misc_feature 1..20: note = antisense sequence
  source 1..20: mol_type = other RNA
tgtggtcatctcctgctgat

SEQ ID NO: 2334 - RNA, 20 nt, synthetic construct
  misc_feature 1..20: note = antisense sequence
  source 1..20: mol_type = other RNA
ttgtggtcatctcctgctga

SEQ ID NO: 2335 - RNA, 20 nt, synthetic construct
  misc_feature 1..20: note = antisense sequence
  source 1..20: mol_type = other RNA
cttgtggtcatctcctgctg

SEQ ID NO: 2336 - RNA, 20 nt, synthetic construct
  misc_feature 1..20: note = antisense sequence
  source 1..20: mol_type = other RNA
acttgtggtcatctcctgct

SEQ ID NO: 2337 - RNA, 20 nt, synthetic construct
  misc_feature 1..20: note = antisense sequence
  source 1..20: mol_type = other RNA
cacttgtggtcatctcctgc

SEQ ID NO: 2338 - RNA, 20 nt, synthetic construct
  misc_feature 1..20: note = antisense sequence
  source 1..20: mol_type = other RNA
ggccacttgtggtcatctcc

SEQ ID NO: 2339 - RNA, 20 nt, synthetic construct
  misc_feature 1..20: note = antisense sequence
  source 1..20: mol_type = other RNA
gtcaattctgtcaacttggc

SEQ ID NO: 2340 - RNA, 20 nt, synthetic construct
  misc_feature 1..20: note = antisense sequence
  source 1..20: mol_type = other RNA
ctgtcaattctgtcaacttg

SEQ ID NO: 2341 - RNA, 20 nt, synthetic construct
  misc_feature 1..20: note = antisense sequence
  source 1..20: mol_type = other RNA
gctgtcaattctgtcaactt

SEQ ID NO: 2342 - RNA, 20 nt, synthetic construct
  misc_feature 1..20: note = antisense sequence
  source 1..20: mol_type = other RNA
tgctgtcaattctgtcaact

SEQ ID NO: 2343 - RNA, 20 nt, synthetic construct
  misc_feature 1..20: note = antisense sequence
  source 1..20: mol_type = other RNA
ctgctgtcaattctgtcaac

SEQ ID NO: 2344 - RNA, 20 nt, synthetic construct
  misc_feature 1..20: note = antisense sequence
  source 1..20: mol_type = other RNA
agctgtcacttttaactgct

SEQ ID NO: 2345 - RNA, 20 nt, synthetic construct
  misc_feature 1..20: note = antisense sequence
  source 1..20: mol_type = other RNA
gaatccactcccactatcag

SEQ ID NO: 2346 - RNA, 20 nt, synthetic construct
  misc_feature 1..20: note = antisense sequence
  source 1..20: mol_type = other RNA
agaatccactcccactatca

SEQ ID NO: 2347 - RNA, 20 nt, synthetic construct
  misc_feature 1..20: note = antisense sequence
  source 1..20: mol_type = other RNA
cagaatccactcccactatc

SEQ ID NO: 2348 - RNA, 20 nt, synthetic construct
  misc_feature 1..20: note = antisense sequence
  source 1..20: mol_type = other RNA
tcagaatccactcccactat

SEQ ID NO: 2349 - RNA, 20 nt, synthetic construct
  misc_feature 1..20: note = antisense sequence
  source 1..20: mol_type = other RNA
ttcagaatccactcccacta

SEQ ID NO: 2350 - RNA, 20 nt, synthetic construct
  misc_feature 1..20: note = antisense sequence
  source 1..20: mol_type = other RNA
tttcagaatccactcccact

SEQ ID NO: 2351 - RNA, 20 nt, synthetic construct
  misc_feature 1..20: note = antisense sequence
  source 1..20: mol_type = other RNA
gtttcagaatccactcccac

SEQ ID NO: 2352 - RNA, 20 nt, synthetic construct
  misc_feature 1..20: note = antisense sequence
  source 1..20: mol_type = other RNA
tgtttcagaatccactccca

SEQ ID NO: 2353 - RNA, 20 nt, synthetic construct
  misc_feature 1..20: note = antisense sequence
  source 1..20: mol_type = other RNA
gtgtttcagaatccactccc

SEQ ID NO: 2354 - RNA, 20 nt, synthetic construct
  misc_feature 1..20: note = antisense sequence
  source 1..20: mol_type = other RNA
gacagtgtttcagaatccac

SEQ ID NO: 2355 - RNA, 20 nt, synthetic construct
  misc_feature 1..20: note = antisense sequence
  source 1..20: mol_type = other RNA
ttgacagtgtttcagaatcc

SEQ ID NO: 2356 - RNA, 20 nt, synthetic construct
  misc_feature 1..20: note = antisense sequence
  source 1..20: mol_type = other RNA
atcctcaagtcccagtgaaa

SEQ ID NO: 2357 - RNA, 20 nt, synthetic construct
  misc_feature 1..20: note = antisense sequence
  source 1..20: mol_type = other RNA
aacatcctcaagtcccagtg

SEQ ID NO: 2358 - RNA, 20 nt, synthetic construct
  misc_feature 1..20: note = antisense sequence
  source 1..20: mol_type = other RNA
taacatcctcaagtcccagt

SEQ ID NO: 2359 - RNA, 20 nt, synthetic construct
  misc_feature 1..20: note = antisense sequence
  source 1..20: mol_type = other RNA
gtaacatcctcaagtcccag

SEQ ID NO: 2360 - RNA, 20 nt, synthetic construct
  misc_feature 1..20: note = antisense sequence
  source 1..20: mol_type = other RNA
agtaacatcctcaagtccca

SEQ ID NO: 2361 - RNA, 20 nt, synthetic construct
  misc_feature 1..20: note = antisense sequence
  source 1..20: mol_type = other RNA
tcagtgtgaataccaggtac

SEQ ID NO: 2362 - RNA, 20 nt, synthetic construct
  misc_feature 1..20: note = antisense sequence
  source 1..20: mol_type = other RNA
ctcagtgtgaataccaggta

SEQ ID NO: 2363 - RNA, 20 nt, synthetic construct
  misc_feature 1..20: note = antisense sequence
  source 1..20: mol_type = other RNA
cctcagtgtgaataccaggt

SEQ ID NO: 2364 - RNA, 20 nt, synthetic construct
  misc_feature 1..20: note = antisense sequence
  source 1..20: mol_type = other RNA
ttcctcagtgtgaataccag

SEQ ID NO: 2365 - RNA, 20 nt, synthetic construct
  misc_feature 1..20: note = antisense sequence
  source 1..20: mol_type = other RNA
tttcctcagtgtgaatacca

SEQ ID NO: 2366 - RNA, 20 nt, synthetic construct
  misc_feature 1..20: note = antisense sequence
  source 1..20: mol_type = other RNA
ttttcctcagtgtgaatacc

SEQ ID NO: 2367 - RNA, 20 nt, synthetic construct
  misc_feature 1..20: note = antisense sequence
  source 1..20: mol_type = other RNA
cttttcctcagtgtgaatac

SEQ ID NO: 2368 - RNA, 20 nt, synthetic construct
  misc_feature 1..20: note = antisense sequence
  source 1..20: mol_type = other RNA
ggaacagtcattctaggtat

SEQ ID NO: 2369 - RNA, 20 nt, synthetic construct
  misc_feature 1..20: note = antisense sequence
  source 1..20: mol_type = other RNA
tggaacagtcattctaggta

SEQ ID NO: 2370 - RNA, 20 nt, synthetic construct
  misc_feature 1..20: note = antisense sequence
  source 1..20: mol_type = other RNA
tctggaacagtcattctagg

SEQ ID NO: 2371 - RNA, 20 nt, synthetic construct
  misc_feature 1..20: note = antisense sequence
  source 1..20: mol_type = other RNA
ggttatctggaacagtcatt

SEQ ID NO: 2372 - RNA, 20 nt, synthetic construct
  misc_feature 1..20: note = antisense sequence
  source 1..20: mol_type = other RNA
ctggttatctggaacagtca

SEQ ID NO: 2373 - RNA, 20 nt, synthetic construct
  misc_feature 1..20: note = antisense sequence
  source 1..20: mol_type = other RNA
tctggttatctggaacagtc

SEQ ID NO: 2374 - RNA, 20 nt, synthetic construct
  misc_feature 1..20: note = antisense sequence
  source 1..20: mol_type = other RNA
ctctggttatctggaacagt

SEQ ID NO: 2375 - RNA, 20 nt, synthetic construct
  misc_feature 1..20: note = antisense sequence
  source 1..20: mol_type = other RNA
actctggttatctggaacag

SEQ ID NO: 2376 - RNA, 20 nt, synthetic construct
  misc_feature 1..20: note = antisense sequence
  source 1..20: mol_type = other RNA
aaactctggttatctggaac

SEQ ID NO: 2377 - RNA, 20 nt, synthetic construct
  misc_feature 1..20: note = antisense sequence
  source 1..20: mol_type = other RNA
gtaaaactctggttatctgg

SEQ ID NO: 2378 - RNA, 20 nt, synthetic construct
  misc_feature 1..20: note = antisense sequence
  source 1..20: mol_type = other RNA
aaggcatagtaaaactctgg

SEQ ID NO: 2379 - RNA, 20 nt, synthetic construct
  misc_feature 1..20: note = antisense sequence
  source 1..20: mol_type = other RNA
gacctcctatctctgaataa

SEQ ID NO: 2380 - RNA, 20 nt, synthetic construct
  misc_feature 1..20: note = antisense sequence
  source 1..20: mol_type = other RNA
aggacctcctatctctgaat

SEQ ID NO: 2381 - RNA, 20 nt, synthetic construct
  misc_feature 1..20: note = antisense sequence
  source 1..20: mol_type = other RNA
aaggacctcctatctctgaa

SEQ ID NO: 2382 - RNA, 20 nt, synthetic construct
  misc_feature 1..20: note = antisense sequence
  source 1..20: mol_type = other RNA
gaaggacctcctatctctga

SEQ ID NO: 2383 - RNA, 20 nt, synthetic construct
  misc_feature 1..20: note = antisense sequence
  source 1..20: mol_type = other RNA
agaaggacctcctatctctg

SEQ ID NO: 2384 - RNA, 20 nt, synthetic construct
  misc_feature 1..20: note = antisense sequence
  source 1..20: mol_type = other RNA
cagaaggacctcctatctct

SEQ ID NO: 2385 - RNA, 20 nt, synthetic construct
  misc_feature 1..20: note = antisense sequence
  source 1..20: mol_type = other RNA
tcagaaggacctcctatctc

SEQ ID NO: 2386 - RNA, 20 nt, synthetic construct
  misc_feature 1..20: note = antisense sequence
  source 1..20: mol_type = other RNA
ctcagaaggacctcctatct

SEQ ID NO: 2387 - RNA, 20 nt, synthetic construct
  misc_feature 1..20: note = antisense sequence
  source 1..20: mol_type = other RNA
actcagaaggacctcctatc

SEQ ID NO: 2388 - RNA, 20 nt, synthetic construct
  misc_feature 1..20: note = antisense sequence
  source 1..20: mol_type = other RNA
aactcagaaggacctcctat

SEQ ID NO: 2389 - RNA, 20 nt, synthetic construct
  misc_feature 1..20: note = antisense sequence
  source 1..20: mol_type = other RNA
gaactcagaaggacctccta

SEQ ID NO: 2390 - RNA, 20 nt, synthetic construct
  misc_feature 1..20: note = antisense sequence
  source 1..20: mol_type = other RNA
tgaactcagaaggacctcct

SEQ ID NO: 2391 - RNA, 20 nt, synthetic construct
  misc_feature 1..20: note = antisense sequence
  source 1..20: mol_type = other RNA
ttgaactcagaaggacctcc

SEQ ID NO: 2392 - RNA, 20 nt, synthetic construct
  misc_feature 1..20: note = antisense sequence
  source 1..20: mol_type = other RNA
aacgtagacttgaactcaga

SEQ ID NO: 2393 - RNA, 20 nt, synthetic construct
  misc_feature 1..20: note = antisense sequence
  source 1..20: mol_type = other RNA
gaacgtagacttgaactcag

SEQ ID NO: 2394 - RNA, 20 nt, synthetic construct
  misc_feature 1..20: note = antisense sequence
  source 1..20: mol_type = other RNA
ggaacgtagacttgaactca

SEQ ID NO: 2395 - RNA, 20 nt, synthetic construct
  misc_feature 1..20: note = antisense sequence
  source 1..20: mol_type = other RNA
tggaacgtagacttgaactc

SEQ ID NO: 2396 - RNA, 20 nt, synthetic construct
  misc_feature 1..20: note = antisense sequence
  source 1..20: mol_type = other RNA
ctggaacgtagacttgaact

SEQ ID NO: 2397 - RNA, 20 nt, synthetic construct
  misc_feature 1..20: note = antisense sequence
  source 1..20: mol_type = other RNA
tctggaacgtagacttgaac

SEQ ID NO: 2398 - RNA, 20 nt, synthetic construct
  misc_feature 1..20: note = antisense sequence
  source 1..20: mol_type = other RNA
ttctggaacgtagacttgaa

SEQ ID NO: 2399 - RNA, 20 nt, synthetic construct
  misc_feature 1..20: note = antisense sequence
  source 1..20: mol_type = other RNA
cttctggaacgtagacttga

SEQ ID NO: 2400 - RNA, 20 nt, synthetic construct
  misc_feature 1..20: note = antisense sequence
  source 1..20: mol_type = other RNA
acttctggaacgtagacttg

SEQ ID NO: 2401 - RNA, 20 nt, synthetic construct
  misc_feature 1..20: note = antisense sequence
  source 1..20: mol_type = other RNA
aacttctggaacgtagactt

SEQ ID NO: 2402 - RNA, 20 nt, synthetic construct
  misc_feature 1..20: note = antisense sequence
  source 1..20: mol_type = other RNA
aaacttctggaacgtagact

SEQ ID NO: 2403 - RNA, 20 nt, synthetic construct
  misc_feature 1..20: note = antisense sequence
  source 1..20: mol_type = other RNA
aaaacttctggaacgtagac

SEQ ID NO: 2404 - RNA, 20 nt, synthetic construct
  misc_feature 1..20: note = antisense sequence
  source 1..20: mol_type = other RNA
gtttacactaggacttgatg

SEQ ID NO: 2405 - RNA, 20 nt, synthetic construct
  misc_feature 1..20: note = antisense sequence
  source 1..20: mol_type = other RNA
atgttttctatccacagagc

SEQ ID NO: 2406 - RNA, 20 nt, synthetic construct
  misc_feature 1..20: note = antisense sequence
  source 1..20: mol_type = other RNA
cagatcaaatgagctgaaac

SEQ ID NO: 2407 - RNA, 20 nt, synthetic construct
  misc_feature 1..20: note = antisense sequence
  source 1..20: mol_type = other RNA
gagccatgtactgaaatgta

SEQ ID NO: 2408 - RNA, 20 nt, synthetic construct
  misc_feature 1..20: note = antisense sequence
  source 1..20: mol_type = other RNA
cagagccatgtactgaaatg

SEQ ID NO: 2409 - RNA, 20 nt, synthetic construct
  misc_feature 1..20: note = antisense sequence
  source 1..20: mol_type = other RNA
tgattcagagccatgtactg

SEQ ID NO: 2410 - RNA, 20 nt, synthetic construct
  misc_feature 1..20: note = antisense sequence
  source 1..20: mol_type = other RNA
agtgattcagagccatgtac

SEQ ID NO: 2411 - RNA, 20 nt, synthetic construct
  misc_feature 1..20: note = antisense sequence
  source 1..20: mol_type = other RNA
aagtgattcagagccatgta

SEQ ID NO: 2412 - RNA, 20 nt, synthetic construct
  misc_feature 1..20: note = antisense sequence
  source 1..20: mol_type = other RNA
ccttacagctttaacctctt

SEQ ID NO: 2413 - RNA, 20 nt, synthetic construct
  misc_feature 1..20: note = antisense sequence
  source 1..20: mol_type = other RNA
tccttacagctttaacctct

SEQ ID NO: 2414 - RNA, 20 nt, synthetic construct
  misc_feature 1..20: note = antisense sequence
  source 1..20: mol_type = other RNA
gttccttacagctttaacct

SEQ ID NO: 2415 - RNA, 20 nt, synthetic construct
  misc_feature 1..20: note = antisense sequence
  source 1..20: mol_type = other RNA
gaactaggtccgatgatata

SEQ ID NO: 2416 - RNA, 20 nt, synthetic construct
  misc_feature 1..20: note = antisense sequence
  source 1..20: mol_type = other RNA
ggaactaggtccgatgatat

SEQ ID NO: 2417 - RNA, 20 nt, synthetic construct
  misc_feature 1..20: note = antisense sequence
  source 1..20: mol_type = other RNA
aggaactaggtccgatgata

SEQ ID NO: 2418 - RNA, 20 nt, synthetic construct
  misc_feature 1..20: note = antisense sequence
  source 1..20: mol_type = other RNA
aaggaactaggtccgatgat

SEQ ID NO: 2419 - RNA, 20 nt, synthetic construct
  misc_feature 1..20: note = antisense sequence
  source 1..20: mol_type = other RNA
gaaggaactaggtccgatga

SEQ ID NO: 2420 - RNA, 20 nt, synthetic construct
  misc_feature 1..20: note = antisense sequence
  source 1..20: mol_type = other RNA
tgaaggaactaggtccgatg

SEQ ID NO: 2421 - RNA, 20 nt, synthetic construct
  misc_feature 1..20: note = antisense sequence
  source 1..20: mol_type = other RNA
atgaaggaactaggtccgat

SEQ ID NO: 2422 - RNA, 20 nt, synthetic construct
  misc_feature 1..20: note = antisense sequence
  source 1..20: mol_type = other RNA
catgaaggaactaggtccga

SEQ ID NO: 2423 - RNA, 20 nt, synthetic construct
  misc_feature 1..20: note = antisense sequence
  source 1..20: mol_type = other RNA
gctggcttaaatctgtaaca

SEQ ID NO: 2424 - RNA, 20 nt, synthetic construct
  misc_feature 1..20: note = antisense sequence
  source 1..20: mol_type = other RNA
gggctggcttaaatctgtaa

SEQ ID NO: 2425 - RNA, 20 nt, synthetic construct
  misc_feature 1..20: note = antisense sequence
  source 1..20: mol_type = other RNA
tgggctggcttaaatctgta

SEQ ID NO: 2426 - RNA, 20 nt, synthetic construct
  misc_feature 1..20: note = antisense sequence
  source 1..20: mol_type = other RNA
ctgggctggcttaaatctgt

SEQ ID NO: 2427 - RNA, 20 nt, synthetic construct
  misc_feature 1..20: note = antisense sequence
  source 1..20: mol_type = other RNA
tctgggctggcttaaatctg

SEQ ID NO: 2428 - RNA, 20 nt, synthetic construct
  misc_feature 1..20: note = antisense sequence
  source 1..20: mol_type = other RNA
ctctgggctggcttaaatct

SEQ ID NO: 2429 - RNA, 20 nt, synthetic construct
  misc_feature 1..20: note = antisense sequence
  source 1..20: mol_type = other RNA
taccaaccctctctgggctg

SEQ ID NO: 2430 - RNA, 20 nt, synthetic construct
  misc_feature 1..20: note = antisense sequence
  source 1..20: mol_type = other RNA
agttaccaaccctctctggg

SEQ ID NO: 2431 - RNA, 20 nt, synthetic construct
  misc_feature 1..20: note = antisense sequence
  source 1..20: mol_type = other RNA
aagttaccaaccctctctgg

SEQ ID NO: 2432 - RNA, 20 nt, synthetic construct
  misc_feature 1..20: note = antisense sequence
  source 1..20: mol_type = other RNA
caagttaccaaccctctctg

SEQ ID NO: 2433 - RNA, 20 nt, synthetic construct
  misc_feature 1..20: note = antisense sequence
  source 1..20: mol_type = other RNA
gcaagttaccaaccctctct

SEQ ID NO: 2434 - RNA, 20 nt, synthetic construct
  misc_feature 1..20: note = antisense sequence
  source 1..20: mol_type = other RNA
agcaagttaccaaccctctc

SEQ ID NO: 2435 - RNA, 20 nt, synthetic construct
  misc_feature 1..20: note = antisense sequence
  source 1..20: mol_type = other RNA
gagcaagttaccaaccctct

SEQ ID NO: 2436 - RNA, 20 nt, synthetic construct
  misc_feature 1..20: note = antisense sequence
  source 1..20: mol_type = other RNA
tgagcaagttaccaaccctc

SEQ ID NO: 2437 - RNA, 20 nt, synthetic construct
  misc_feature 1..20: note = antisense sequence
  source 1..20: mol_type = other RNA
gaatgtggaccctgtgaaaa

SEQ ID NO: 2438 - RNA, 20 nt, synthetic construct
  misc_feature 1..20: note = antisense sequence
  source 1..20: mol_type = other RNA
aggaatgtggaccctgtgaa

SEQ ID NO: 2439 - RNA, 20 nt, synthetic construct
  misc_feature 1..20: note = antisense sequence
  source 1..20: mol_type = other RNA
tcaaacaggaatgtggaccc

SEQ ID NO: 2440 - RNA, 20 nt, synthetic construct
  misc_feature 1..20: note = antisense sequence
  source 1..20: mol_type = other RNA
aggagggtttaaggcatttt

SEQ ID NO: 2441 - RNA, 20 nt, synthetic construct
  misc_feature 1..20: note = antisense sequence
  source 1..20: mol_type = other RNA
aaggagggtttaaggcattt

SEQ ID NO: 2442 - RNA, 20 nt, synthetic construct
  misc_feature 1..20: note = antisense sequence
  source 1..20: mol_type = other RNA
aataaggagggtttaaggca

SEQ ID NO: 2443 - RNA, 20 nt, synthetic construct
  misc_feature 1..20: note = antisense sequence
  source 1..20: mol_type = other RNA
aaataaggagggtttaaggc

SEQ ID NO: 2444 - RNA, 20 nt, synthetic construct
  misc_feature 1..20: note = antisense sequence
  source 1..20: mol_type = other RNA
tagagtccctgtcacatagt

SEQ ID NO: 2445 - RNA, 20 nt, synthetic construct
  misc_feature 1..20: note = antisense sequence
  source 1..20: mol_type = other RNA
ttagagtccctgtcacatag

SEQ ID NO: 2446 - RNA, 20 nt, synthetic construct
  misc_feature 1..20: note = antisense sequence
  source 1..20: mol_type = other RNA
attagagtccctgtcacata

SEQ ID NO: 2447 - RNA, 20 nt, synthetic construct
  misc_feature 1..20: note = antisense sequence
  source 1..20: mol_type = other RNA
tattagagtccctgtcacat

SEQ ID NO: 2448 - RNA, 20 nt, synthetic construct
  misc_feature 1..20: note = antisense sequence
  source 1..20: mol_type = other RNA
ctattagagtccctgtcaca

SEQ ID NO: 2449 - RNA, 20 nt, synthetic construct
  misc_feature 1..20: note = antisense sequence
  source 1..20: mol_type = other RNA
gctattagagtccctgtcac

SEQ ID NO: 2450 - RNA, 20 nt, synthetic construct
  misc_feature 1..20: note = antisense sequence
  source 1..20: mol_type = other RNA
ggctattagagtccctgtca

SEQ ID NO: 2451 - RNA, 20 nt, synthetic construct
  misc_feature 1..20: note = antisense sequence
  source 1..20: mol_type = other RNA
gggctattagagtccctgtc

SEQ ID NO: 2452 - RNA, 20 nt, synthetic construct
  misc_feature 1..20: note = antisense sequence
  source 1..20: mol_type = other RNA
tgcaaggaagagactgtgat

SEQ ID NO: 2453 - RNA, 20 nt, synthetic construct
  misc_feature 1..20: note = antisense sequence
  source 1..20: mol_type = other RNA
ttgcactgctattactactg

SEQ ID NO: 2454 - RNA, 20 nt, synthetic construct
  misc_feature 1..20: note = antisense sequence
  source 1..20: mol_type = other RNA
cagattgcactgctattact

SEQ ID NO: 2455 - RNA, 20 nt, synthetic construct
  misc_feature 1..20: note = antisense sequence
  source 1..20: mol_type = other RNA
gccagattgcactgctatta

SEQ ID NO: 2456 - RNA, 20 nt, synthetic construct
  misc_feature 1..20: note = antisense sequence
  source 1..20: mol_type = other RNA
tgttcctgtgccagattgca

SEQ ID NO: 2457 - RNA, 20 nt, synthetic construct
  misc_feature 1..20: note = antisense sequence
  source 1..20: mol_type = other RNA
gctcccatgttcctgtgcca

SEQ ID NO: 2458 - RNA, 20 nt, synthetic construct
  misc_feature 1..20: note = antisense sequence
  source 1..20: mol_type = other RNA
agctcccatgttcctgtgcc

SEQ ID NO: 2459 - RNA, 20 nt, synthetic construct
  misc_feature 1..20: note = antisense sequence
  source 1..20: mol_type = other RNA
ctgagttagccctctgagct

SEQ ID NO: 2460 - RNA, 20 nt, synthetic construct
  misc_feature 1..20: note = antisense sequence
  source 1..20: mol_type = other RNA
gctgagttagccctctgagc

SEQ ID NO: 2461 - RNA, 20 nt, synthetic construct
  misc_feature 1..20: note = antisense sequence
  source 1..20: mol_type = other RNA
taaagccaggctgagttagc

SEQ ID NO: 2462 - RNA, 20 nt, synthetic construct
  misc_feature 1..20: note = antisense sequence
  source 1..20: mol_type = other RNA
cactaaagccaggctgagtt

SEQ ID NO: 2463 - RNA, 20 nt, synthetic construct
  misc_feature 1..20: note = antisense sequence
  source 1..20: mol_type = other RNA
tcactaaagccaggctgagt

SEQ ID NO: 2464 - RNA, 20 nt, synthetic construct
  misc_feature 1..20: note = antisense sequence
  source 1..20: mol_type = other RNA
ctcctcactaaagccaggct

SEQ ID NO: 2465 - RNA, 20 nt, synthetic construct
  misc_feature 1..20: note = antisense sequence
  source 1..20: mol_type = other RNA
cctcctcactaaagccaggc

SEQ ID NO: 2466 - RNA, 20 nt, synthetic construct
  misc_feature 1..20: note = antisense sequence
  source 1..20: mol_type = other RNA
tacctcctcactaaagccag

SEQ ID NO: 2467 - RNA, 20 nt, synthetic construct
  misc_feature 1..20: note = antisense sequence
  source 1..20: mol_type = other RNA
atacctcctcactaaagcca

SEQ ID NO: 2468 - RNA, 20 nt, synthetic construct
  misc_feature 1..20: note = antisense sequence
  source 1..20: mol_type = other RNA
gaatacctcctcactaaagc

SEQ ID NO: 2469 - RNA, 20 nt, synthetic construct
  misc_feature 1..20: note = antisense sequence
  source 1..20: mol_type = other RNA
ggaatacctcctcactaaag

SEQ ID NO: 2470 - RNA, 20 nt, synthetic construct
  misc_feature 1..20: note = antisense sequence
  source 1..20: mol_type = other RNA
gggaatacctcctcactaaa

SEQ ID NO: 2471 - RNA, 20 nt, synthetic construct
  misc_feature 1..20: note = antisense sequence
  source 1..20: mol_type = other RNA
tgggaatacctcctcactaa

SEQ ID NO: 2472 - RNA, 20 nt, synthetic construct
  misc_feature 1..20: note = antisense sequence
  source 1..20: mol_type = other RNA
ctgggaatacctcctcacta

SEQ ID NO: 2473 - RNA, 20 nt, synthetic construct
  misc_feature 1..20: note = antisense sequence
  source 1..20: mol_type = other RNA
tctgggaatacctcctcact

SEQ ID NO: 2474 - RNA, 20 nt, synthetic construct
  misc_feature 1..20: note = antisense sequence
  source 1..20: mol_type = other RNA
actctgggaatacctcctca

SEQ ID NO: 2475 - RNA, 20 nt, synthetic construct
  misc_feature 1..20: note = antisense sequence
  source 1..20: mol_type = other RNA
aactctgggaatacctcctc

SEQ ID NO: 2476 - RNA, 20 nt, synthetic construct
  misc_feature 1..20: note = antisense sequence
  source 1..20: mol_type = other RNA
aaactctgggaatacctcct

SEQ ID NO: 2477 - RNA, 20 nt, synthetic construct
  misc_feature 1..20: note = antisense sequence
  source 1..20: mol_type = other RNA
taaactctgggaatacctcc

SEQ ID NO: 2478 - RNA, 20 nt, synthetic construct
  misc_feature 1..20: note = antisense sequence
  source 1..20: mol_type = other RNA
cagtgtgggcttctggaact

SEQ ID NO: 2479 - RNA, 20 nt, synthetic construct
  misc_feature 1..20: note = antisense sequence
  source 1..20: mol_type = other RNA
atcagtgtgggcttctggaa

SEQ ID NO: 2480 - RNA, 20 nt, synthetic construct
  misc_feature 1..20: note = antisense sequence
  source 1..20: mol_type = other RNA
aagatcagtgtgggcttctg

SEQ ID NO: 2481 - RNA, 20 nt, synthetic construct
  misc_feature 1..20: note = antisense sequence
  source 1..20: mol_type = other RNA
aatggaagatcagtgtgggc

SEQ ID NO: 2482 - RNA, 20 nt, synthetic construct
  misc_feature 1..20: note = antisense sequence
  source 1..20: mol_type = other RNA
taatggaagatcagtgtggg

SEQ ID NO: 2483 - RNA, 20 nt, synthetic construct
  misc_feature 1..20: note = antisense sequence
  source 1..20: mol_type = other RNA
ctaatggaagatcagtgtgg

SEQ ID NO: 2484 - RNA, 20 nt, synthetic construct
  misc_feature 1..20: note = antisense sequence
  source 1..20: mol_type = other RNA
cccttcacctgatctctcta

SEQ ID NO: 2485 - RNA, 20 nt, synthetic construct
  misc_feature 1..20: note = antisense sequence
  source 1..20: mol_type = other RNA
tcccttcacctgatctctct

SEQ ID NO: 2486 - RNA, 20 nt, synthetic construct
  misc_feature 1..20: note = antisense sequence
  source 1..20: mol_type = other RNA
ggtcccttcacctgatctct

SEQ ID NO: 2487 - RNA, 20 nt, synthetic construct
  misc_feature 1..20: note = antisense sequence
  source 1..20: mol_type = other RNA
agtgagccaagatcaggcca

SEQ ID NO: 2488 - RNA, 20 nt, synthetic construct
  misc_feature 1..20: note = antisense sequence
  source 1..20: mol_type = other RNA
cagtgagccaagatcaggcc

SEQ ID NO: 2489 - RNA, 20 nt, synthetic construct
  misc_feature 1..20: note = antisense sequence
  source 1..20: mol_type = other RNA
gcagtgagccaagatcaggc

SEQ ID NO: 2490 - RNA, 20 nt, synthetic construct
  misc_feature 1..20: note = antisense sequence
  source 1..20: mol_type = other RNA
ggcagtgagccaagatcagg

SEQ ID NO: 2491 - RNA, 20 nt, synthetic construct
  misc_feature 1..20: note = antisense sequence
  source 1..20: mol_type = other RNA
gggcagtgagccaagatcag

SEQ ID NO: 2492 - RNA, 20 nt, synthetic construct
  misc_feature 1..20: note = antisense sequence
  source 1..20: mol_type = other RNA
ttgaacccaggaggcagagg

SEQ ID NO: 2493 - RNA, 20 nt, synthetic construct
  misc_feature 1..20: note = antisense sequence
  source 1..20: mol_type = other RNA
cttgaacccaggaggcagag

SEQ ID NO: 2494 - RNA, 20 nt, synthetic construct
  misc_feature 1..20: note = antisense sequence
  source 1..20: mol_type = other RNA
gcttgaacccaggaggcaga

SEQ ID NO: 2495 - RNA, 20 nt, synthetic construct
  misc_feature 1..20: note = antisense sequence
  source 1..20: mol_type = other RNA
tgcttgaacccaggaggcag

SEQ ID NO: 2496 - RNA, 20 nt, synthetic construct
  misc_feature 1..20: note = antisense sequence
  source 1..20: mol_type = other RNA
ttgcttgaacccaggaggca

SEQ ID NO: 2497 - RNA, 20 nt, synthetic construct
  misc_feature 1..20: note = antisense sequence
  source 1..20: mol_type = other RNA
attgcttgaacccaggaggc

SEQ ID NO: 2498 - RNA, 20 nt, synthetic construct
  misc_feature 1..20: note = antisense sequence
  source 1..20: mol_type = other RNA
aattgcttgaacccaggagg

SEQ ID NO: 2499 - RNA, 20 nt, synthetic construct
  misc_feature 1..20: note = antisense sequence
  source 1..20: mol_type = other RNA
gaattgcttgaacccaggag

SEQ ID NO: 2500 - RNA, 20 nt, synthetic construct
  misc_feature 1..20: note = antisense sequence
  source 1..20: mol_type = other RNA
agaattgcttgaacccagga

SEQ ID NO: 2501 - RNA, 20 nt, synthetic construct
  misc_feature 1..20: note = antisense sequence
  source 1..20: mol_type = other RNA
gagaattgcttgaacccagg

SEQ ID NO: 2502 - RNA, 20 nt, synthetic construct
  misc_feature 1..20: note = antisense sequence
  source 1..20: mol_type = other RNA
cgagaattgcttgaacccag

SEQ ID NO: 2503 - RNA, 20 nt, synthetic construct
  misc_feature 1..20: note = antisense sequence
  source 1..20: mol_type = other RNA
acgagaattgcttgaaccca

SEQ ID NO: 2504 - RNA, 20 nt, synthetic construct
  misc_feature 1..20: note = antisense sequence
  source 1..20: mol_type = other RNA
cacgagaattgcttgaaccc

SEQ ID NO: 2505 - RNA, 20 nt, synthetic construct
  misc_feature 1..20: note = antisense sequence
  source 1..20: mol_type = other RNA
gcacgagaattgcttgaacc

SEQ ID NO: 2506 - RNA, 20 nt, synthetic construct
  misc_feature 1..20: note = antisense sequence
  source 1..20: mol_type = other RNA
ggcacgagaattgcttgaac

SEQ ID NO: 2507 - RNA, 20 nt, synthetic construct
  misc_feature 1..20: note = antisense sequence
  source 1..20: mol_type = other RNA
gggcagatcacttgaggtca

SEQ ID NO: 2508 - RNA, 20 nt, synthetic construct
  misc_feature 1..20: note = antisense sequence
  source 1..20: mol_type = other RNA
tgggcagatcacttgaggtc

SEQ ID NO: 2509 - RNA, 20 nt, synthetic construct
  misc_feature 1..20: note = antisense sequence
  source 1..20: mol_type = other RNA
atgggcagatcacttgaggt

SEQ ID NO: 2510 - RNA, 20 nt, synthetic construct
  misc_feature 1..20: note = antisense sequence
  source 1..20: mol_type = other RNA
gatgggcagatcacttgagg

SEQ ID NO: 2511 - RNA, 20 nt, synthetic construct
  misc_feature 1..20: note = antisense sequence
  source 1..20: mol_type = other RNA
agatgggcagatcacttgag

SEQ ID NO: 2512 - RNA, 20 nt, synthetic construct
  misc_feature 1..20: note = antisense sequence
  source 1..20: mol_type = other RNA
aagatgggcagatcacttga

SEQ ID NO: 2513 - RNA, 20 nt, synthetic construct
  misc_feature 1..20: note = antisense sequence
  source 1..20: mol_type = other RNA
gacaagatgggcagatcact

SEQ ID NO: 2514 - RNA, 20 nt, synthetic construct
  misc_feature 1..20: note = antisense sequence
  source 1..20: mol_type = other RNA
aaagtgaagttgaggccagg

SEQ ID NO: 2515 - RNA, 20 nt, synthetic construct
  misc_feature 1..20: note = antisense sequence
  source 1..20: mol_type = other RNA
caaagtgaagttgaggccag

SEQ ID NO: 2516 - RNA, 20 nt, synthetic construct
  misc_feature 1..20: note = antisense sequence
  source 1..20: mol_type = other RNA
accaaagtgaagttgaggcc

SEQ ID NO: 2517 - RNA, 20 nt, synthetic construct
  misc_feature 1..20: note = antisense sequence
  source 1..20: mol_type = other RNA
taccaaagtgaagttgaggc

SEQ ID NO: 2518 - RNA, 20 nt, synthetic construct
  misc_feature 1..20: note = antisense sequence
  source 1..20: mol_type = other RNA
ttaccaaagtgaagttgagg

SEQ ID NO: 2519 - RNA, 20 nt, synthetic construct
  misc_feature 1..20: note = antisense sequence
  source 1..20: mol_type = other RNA
tcaggtttgttgactccaca

SEQ ID NO: 2520 - RNA, 20 nt, synthetic construct
  misc_feature 1..20: note = antisense sequence
  source 1..20: mol_type = other RNA
ctcaggtttgttgactccac

SEQ ID NO: 2521 - RNA, 20 nt, synthetic construct
  misc_feature 1..20: note = antisense sequence
  source 1..20: mol_type = other RNA
catgatgtctcctctcaggt

SEQ ID NO: 2522 - RNA, 20 nt, synthetic construct
  misc_feature 1..20: note = antisense sequence
  source 1..20: mol_type = other RNA
ccatgatgtctcctctcagg

SEQ ID NO: 2523 - RNA, 20 nt, synthetic construct
  misc_feature 1..20: note = antisense sequence
  source 1..20: mol_type = other RNA
cttctccatgatgtctcctc

SEQ ID NO: 2524 - RNA, 20 nt, synthetic construct
  misc_feature 1..20: note = antisense sequence
  source 1..20: mol_type = other RNA
tctccttctccatgatgtct

SEQ ID NO: 2525 - RNA, 20 nt, synthetic construct
  misc_feature 1..20: note = antisense sequence
  source 1..20: mol_type = other RNA
aatctccttctccatgatgt

SEQ ID NO: 2526 - RNA, 20 nt, synthetic construct
  misc_feature 1..20: note = antisense sequence
  source 1..20: mol_type = other RNA
gaatctccttctccatgatg

SEQ ID NO: 2527 - RNA, 20 nt, synthetic construct
  misc_feature 1..20: note = antisense sequence
  source 1..20: mol_type = other RNA
gaggtaatggaatctccttc

SEQ ID NO: 2528 - RNA, 20 nt, synthetic construct
  misc_feature 1..20: note = antisense sequence
  source 1..20: mol_type = other RNA
catggtccctggtctgtatt

SEQ ID NO: 2529 - RNA, 20 nt, synthetic construct
  misc_feature 1..20: note = antisense sequence
  source 1..20: mol_type = other RNA
tcatggtccctggtctgtat

SEQ ID NO: 2530 - RNA, 20 nt, synthetic construct
  misc_feature 1..20: note = antisense sequence
  source 1..20: mol_type = other RNA
tccacaatctttcagagtcc

SEQ ID NO: 2531 - RNA, 20 nt, synthetic construct
  misc_feature 1..20: note = antisense sequence
  source 1..20: mol_type = other RNA
ttccacaatctttcagagtc

SEQ ID NO: 2532 - RNA, 20 nt, synthetic construct
  misc_feature 1..20: note = antisense sequence
  source 1..20: mol_type = other RNA
gttccacaatctttcagagt

SEQ ID NO: 2533 - RNA, 20 nt, synthetic construct
  misc_feature 1..20: note = antisense sequence
  source 1..20: mol_type = other RNA
ggttccacaatctttcagag

SEQ ID NO: 2534 - RNA, 20 nt, synthetic construct
  misc_feature 1..20: note = antisense sequence
  source 1..20: mol_type = other RNA
aaggttccacaatctttcag

SEQ ID NO: 2535 - RNA, 20 nt, synthetic construct
  misc_feature 1..20: note = antisense sequence
  source 1..20: mol_type = other RNA
cagtcagtgcttagtcatgt

SEQ ID NO: 2536 - RNA, 20 nt, synthetic construct
  misc_feature 1..20: note = antisense sequence
  source 1..20: mol_type = other RNA
ccagtcagtgcttagtcatg

SEQ ID NO: 2537 - RNA, 20 nt, synthetic construct
  misc_feature 1..20: note = antisense sequence
  source 1..20: mol_type = other RNA
accagtcagtgcttagtcat

SEQ ID NO: 2538 - RNA, 20 nt, synthetic construct
  misc_feature 1..20: note = antisense sequence
  source 1..20: mol_type = other RNA
aaccagtcagtgcttagtca

SEQ ID NO: 2539 - RNA, 20 nt, synthetic construct
  misc_feature 1..20: note = antisense sequence
  source 1..20: mol_type = other RNA
ttaaccagtcagtgcttagt

SEQ ID NO: 2540 - RNA, 20 nt, synthetic construct
  misc_feature 1..20: note = antisense sequence
  source 1..20: mol_type = other RNA
tttaaccagtcagtgcttag

SEQ ID NO: 2541 - RNA, 20 nt, synthetic construct
  misc_feature 1..20: note = antisense sequence
  source 1..20: mol_type = other RNA
gaatggctatggaaagggac

SEQ ID NO: 2542 - RNA, 20 nt, synthetic construct
  misc_feature 1..20: note = antisense sequence
  source 1..20: mol_type = other RNA
ggaatggctatggaaaggga

SEQ ID NO: 2543 - RNA, 20 nt, synthetic construct
  misc_feature 1..20: note = antisense sequence
  source 1..20: mol_type = other RNA
tcttccaggaatggctatgg

SEQ ID NO: 2544 - RNA, 20 nt, synthetic construct
  misc_feature 1..20: note = antisense sequence
  source 1..20: mol_type = other RNA
ttcttccaggaatggctatg

SEQ ID NO: 2545 - RNA, 20 nt, synthetic construct
  misc_feature 1..20: note = antisense sequence
  source 1..20: mol_type = other RNA
tttcttccaggaatggctat

SEQ ID NO: 2546 - RNA, 20 nt, synthetic construct
  misc_feature 1..20: note = antisense sequence
  source 1..20: mol_type = other RNA
tcctggacattctttcttcc

SEQ ID NO: 2547 - RNA, 20 nt, synthetic construct
  misc_feature 1..20: note = antisense sequence
  source 1..20: mol_type = other RNA
atcctggacattctttcttc

SEQ ID NO: 2548 - RNA, 20 nt, synthetic construct
  misc_feature 1..20: note = antisense sequence
  source 1..20: mol_type = other RNA
cagttaatcctggacattct

SEQ ID NO: 2549 - RNA, 20 nt, synthetic construct
  misc_feature 1..20: note = antisense sequence
  source 1..20: mol_type = other RNA
tccctttccctgaggtggct

SEQ ID NO: 2550 - RNA, 20 nt, synthetic construct
  misc_feature 1..20: note = antisense sequence
  source 1..20: mol_type = other RNA
ttccctttccctgaggtggc

SEQ ID NO: 2551 - RNA, 20 nt, synthetic construct
  misc_feature 1..20: note = antisense sequence
  source 1..20: mol_type = other RNA
ttattcctgacttcagtccc

SEQ ID NO: 2552 - RNA, 20 nt, synthetic construct
  misc_feature 1..20: note = antisense sequence
  source 1..20: mol_type = other RNA
ccttgtcacttctttattcc

SEQ ID NO: 2553 - RNA, 20 nt, synthetic construct
  misc_feature 1..20: note = antisense sequence
  source 1..20: mol_type = other RNA
gtctttctagtgtccagccc

SEQ ID NO: 2554 - RNA, 20 nt, synthetic construct
  misc_feature 1..20: note = antisense sequence
  source 1..20: mol_type = other RNA
gagttcattcctcctcataa

SEQ ID NO: 2555 - RNA, 20 nt, synthetic construct
  misc_feature 1..20: note = antisense sequence
  source 1..20: mol_type = other RNA
agagttcattcctcctcata

SEQ ID NO: 2556 - RNA, 20 nt, synthetic construct
  misc_feature 1..20: note = antisense sequence
  source 1..20: mol_type = other RNA
ccagagttcattcctcctca

SEQ ID NO: 2557 - RNA, 20 nt, synthetic construct
  misc_feature 1..20: note = antisense sequence
  source 1..20: mol_type = other RNA
tcagagaactattcccagag

SEQ ID NO: 2558 - RNA, 20 nt, synthetic construct
  misc_feature 1..20: note = antisense sequence
  source 1..20: mol_type = other RNA
gtcagagaactattcccaga

SEQ ID NO: 2559 - RNA, 20 nt, synthetic construct
  misc_feature 1..20: note = antisense sequence
  source 1..20: mol_type = other RNA
ggtcagagaactattcccag

SEQ ID NO: 2560 - RNA, 20 nt, synthetic construct
  misc_feature 1..20: note = antisense sequence
  source 1..20: mol_type = other RNA
agggtcagagaactattccc

SEQ ID NO: 2561 - RNA, 20 nt, synthetic construct
  misc_feature 1..20: note = antisense sequence
  source 1..20: mol_type = other RNA
aagggtcagagaactattcc

SEQ ID NO: 2562 - RNA, 20 nt, synthetic construct
  misc_feature 1..20: note = antisense sequence
  source 1..20: mol_type = other RNA
aaagggtcagagaactattc

SEQ ID NO: 2563 - RNA, 20 nt, synthetic construct
  misc_feature 1..20: note = antisense sequence
  source 1..20: mol_type = other RNA
caaagggtcagagaactatt

SEQ ID NO: 2564 - RNA, 20 nt, synthetic construct
  misc_feature 1..20: note = antisense sequence
  source 1..20: mol_type = other RNA
acacaaagggtcagagaact

SEQ ID NO: 2565 - RNA, 20 nt, synthetic construct
  misc_feature 1..20: note = antisense sequence
  source 1..20: mol_type = other RNA
cacacaaagggtcagagaac

SEQ ID NO: 2566 - RNA, 20 nt, synthetic construct
  misc_feature 1..20: note = antisense sequence
  source 1..20: mol_type = other RNA
ctgagaacacactgacacac

SEQ ID NO: 2567 - RNA, 20 nt, synthetic construct
  misc_feature 1..20: note = antisense sequence
  source 1..20: mol_type = other RNA
aggctgagaacacactgaca

SEQ ID NO: 2568 - RNA, 20 nt, synthetic construct
  misc_feature 1..20: note = antisense sequence
  source 1..20: mol_type = other RNA
ttcttccagttcaggctgag

SEQ ID NO: 2569 - RNA, 20 nt, synthetic construct
  misc_feature 1..20: note = antisense sequence
  source 1..20: mol_type = other RNA
ggcagatagtgaattttgca

SEQ ID NO: 2570 - RNA, 20 nt, synthetic construct
  misc_feature 1..20: note = antisense sequence
  source 1..20: mol_type = other RNA
aggcagatagtgaattttgc

SEQ ID NO: 2571 - RNA, 20 nt, synthetic construct
  misc_feature 1..20: note = antisense sequence
  source 1..20: mol_type = other RNA
gaggcagatagtgaattttg

SEQ ID NO: 2572 - RNA, 20 nt, synthetic construct
  misc_feature 1..20: note = antisense sequence
  source 1..20: mol_type = other RNA
gtgataacagactcattctc

SEQ ID NO: 2573 - RNA, 20 nt, synthetic construct
  misc_feature 1..20: note = antisense sequence
  source 1..20: mol_type = other RNA
tgtggtgataacagactcat

SEQ ID NO: 2574 - RNA, 20 nt, synthetic construct
  misc_feature 1..20: note = antisense sequence
  source 1..20: mol_type = other RNA
taggcccagagtgagaaatt

SEQ ID NO: 2575 - RNA, 20 nt, synthetic construct
  misc_feature 1..20: note = antisense sequence
  source 1..20: mol_type = other RNA
ttaggcccagagtgagaaat

SEQ ID NO: 2576 - RNA, 20 nt, synthetic construct
  misc_feature 1..20: note = antisense sequence
  source 1..20: mol_type = other RNA
gttaggcccagagtgagaaa

SEQ ID NO: 2577 - RNA, 20 nt, synthetic construct
  misc_feature 1..20: note = antisense sequence
  source 1..20: mol_type = other RNA
gagttaggcccagagtgaga

SEQ ID NO: 2578 - RNA, 20 nt, synthetic construct
  misc_feature 1..20: note = antisense sequence
  source 1..20: mol_type = other RNA
ggagttaggcccagagtgag

SEQ ID NO: 2579 - RNA, 20 nt, synthetic construct
  misc_feature 1..20: note = antisense sequence
  source 1..20: mol_type = other RNA
aatgattcccagaaagacag

SEQ ID NO: 2580 - RNA, 20 nt, synthetic construct
  misc_feature 1..20: note = antisense sequence
  source 1..20: mol_type = other RNA
acaggatcagagataaaggt

SEQ ID NO: 2581 - RNA, 20 nt, synthetic construct
  misc_feature 1..20: note = antisense sequence
  source 1..20: mol_type = other RNA
tacaggatcagagataaagg

SEQ ID NO: 2582 - RNA, 20 nt, synthetic construct
  misc_feature 1..20: note = antisense sequence
  source 1..20: mol_type = other RNA
gtacaggatcagagataaag

SEQ ID NO: 2583 - RNA, 20 nt, synthetic construct
  misc_feature 1..20: note = antisense sequence
  source 1..20: mol_type = other RNA
tagggaaagtacaggatcag

SEQ ID NO: 2584 - RNA, 20 nt, synthetic construct
  misc_feature 1..20: note = antisense sequence
  source 1..20: mol_type = other RNA
ctagggaaagtacaggatca

SEQ ID NO: 2585 - RNA, 20 nt, synthetic construct
  misc_feature 1..20: note = antisense sequence
  source 1..20: mol_type = other RNA
tgcccgtttcccattatatt

SEQ ID NO: 2586 - RNA, 20 nt, synthetic construct
  misc_feature 1..20: note = antisense sequence
  source 1..20: mol_type = other RNA
ttgcccgtttcccattatat

SEQ ID NO: 2587 - RNA, 20 nt, synthetic construct
  misc_feature 1..20: note = antisense sequence
  source 1..20: mol_type = other RNA
cttgcccgtttcccattata

SEQ ID NO: 2588 - RNA, 20 nt, synthetic construct
  misc_feature 1..20: note = antisense sequence
  source 1..20: mol_type = other RNA
acttgcccgtttcccattat

SEQ ID NO: 2589 - RNA, 20 nt, synthetic construct
  misc_feature 1..20: note = antisense sequence
  source 1..20: mol_type = other RNA
tacttgcccgtttcccatta

SEQ ID NO: 2590 - RNA, 20 nt, synthetic construct
  misc_feature 1..20: note = antisense sequence
  source 1..20: mol_type = other RNA
ctacttgcccgtttcccatt

SEQ ID NO: 2591 - RNA, 20 nt, synthetic construct
  misc_feature 1..20: note = antisense sequence
  source 1..20: mol_type = other RNA
acctacttgcccgtttccca

SEQ ID NO: 2592 - RNA, 20 nt, synthetic construct
  misc_feature 1..20: note = antisense sequence
  source 1..20: mol_type = other RNA
tacctacttgcccgtttccc

SEQ ID NO: 2593 - RNA, 20 nt, synthetic construct
  misc_feature 1..20: note = antisense sequence
  source 1..20: mol_type = other RNA
ctacctacttgcccgtttcc

SEQ ID NO: 2594 - RNA, 20 nt, synthetic construct
  misc_feature 1..20: note = antisense sequence
  source 1..20: mol_type = other RNA
cctacctacttgcccgtttc

SEQ ID NO: 2595 - RNA, 20 nt, synthetic construct
  misc_feature 1..20: note = antisense sequence
  source 1..20: mol_type = other RNA
tcctacctacttgcccgttt

SEQ ID NO: 2596 - RNA, 20 nt, synthetic construct
  misc_feature 1..20: note = antisense sequence
  source 1..20: mol_type = other RNA
tttcctacctacttgcccgt

SEQ ID NO: 2597 - RNA, 20 nt, synthetic construct
  misc_feature 1..20: note = antisense sequence
  source 1..20: mol_type = other RNA
atttcctacctacttgcccg

SEQ ID NO: 2598 - RNA, 20 nt, synthetic construct
  misc_feature 1..20: note = antisense sequence
  source 1..20: mol_type = other RNA
acatttcctacctacttgcc

SEQ ID NO: 2599 - RNA, 20 nt, synthetic construct
  misc_feature 1..20: note = antisense sequence
  source 1..20: mol_type = other RNA
cacatttcctacctacttgc

SEQ ID NO: 2600 - RNA, 20 nt, synthetic construct
  misc_feature 1..20: note = antisense sequence
  source 1..20: mol_type = other RNA
tccacatttcctacctactt

SEQ ID NO: 2601 - RNA, 20 nt, synthetic construct
  misc_feature 1..20: note = antisense sequence
  source 1..20: mol_type = other RNA
ctccacatttcctacctact

SEQ ID NO: 2602 - RNA, 20 nt, synthetic construct
  misc_feature 1..20: note = antisense sequence
  source 1..20: mol_type = other RNA
tctccacatttcctacctac

SEQ ID NO: 2603 - RNA, 20 nt, synthetic construct
  misc_feature 1..20: note = antisense sequence
  source 1..20: mol_type = other RNA
gaccttctccacatttccta

SEQ ID NO: 2604 - RNA, 20 nt, synthetic construct
  misc_feature 1..20: note = antisense sequence
  source 1..20: mol_type = other RNA
ggccttgaccttctccacat

SEQ ID NO: 2605 - RNA, 20 nt, synthetic construct
  misc_feature 1..20: note = antisense sequence
  source 1..20: mol_type = other RNA
ttggtgtgcaacatcctttg

SEQ ID NO: 2606 - RNA, 20 nt, synthetic construct
  misc_feature 1..20: note = antisense sequence
  source 1..20: mol_type = other RNA
tttggtgtgcaacatccttt

SEQ ID NO: 2607 - RNA, 20 nt, synthetic construct
  misc_feature 1..20: note = antisense sequence
  source 1..20: mol_type = other RNA
cttccttgtatcatacttgg

SEQ ID NO: 2608 - RNA, 20 nt, synthetic construct
  misc_feature 1..20: note = antisense sequence
  source 1..20: mol_type = other RNA
catggatgatttcttccttg

SEQ ID NO: 2609 - RNA, 20 nt, synthetic construct
  misc_feature 1..20: note = antisense sequence
  source 1..20: mol_type = other RNA
gacatggatgatttcttcct

SEQ ID NO: 2610 - RNA, 20 nt, synthetic construct
  misc_feature 1..20: note = antisense sequence
  source 1..20: mol_type = other RNA
gttcttacaccatatcctct

SEQ ID NO: 2611 - RNA, 20 nt, synthetic construct
  misc_feature 1..20: note = antisense sequence
  source 1..20: mol_type = other RNA
agttcttacaccatatcctc

SEQ ID NO: 2612 - RNA, 20 nt, synthetic construct
  misc_feature 1..20: note = antisense sequence
  source 1..20: mol_type = other RNA
cagttcttacaccatatcct

SEQ ID NO: 2613 - RNA, 20 nt, synthetic construct
  misc_feature 1..20: note = antisense sequence
  source 1..20: mol_type = other RNA
gccagttcttacaccatatc

SEQ ID NO: 2614 - RNA, 20 nt, synthetic construct
  misc_feature 1..20: note = antisense sequence
  source 1..20: mol_type = other RNA
ggccagttcttacaccatat

SEQ ID NO: 2615 - RNA, 20 nt, synthetic construct
  misc_feature 1..20: note = antisense sequence
  source 1..20: mol_type = other RNA
gggccagttcttacaccata

SEQ ID NO: 2616 - RNA, 20 nt, synthetic construct
  misc_feature 1..20: note = antisense sequence
  source 1..20: mol_type = other RNA
tgggccagttcttacaccat

SEQ ID NO: 2617 - RNA, 20 nt, synthetic construct
  misc_feature 1..20: note = antisense sequence
  source 1..20: mol_type = other RNA
atgggccagttcttacacca

SEQ ID NO: 2618 - RNA, 20 nt, synthetic construct
  misc_feature 1..20: note = antisense sequence
  source 1..20: mol_type = other RNA
tcatgggccagttcttacac

SEQ ID NO: 2619 - RNA, 20 nt, synthetic construct
  misc_feature 1..20: note = antisense sequence
  source 1..20: mol_type = other RNA
gtcatgggccagttcttaca

SEQ ID NO: 2620 - RNA, 20 nt, synthetic construct
  misc_feature 1..20: note = antisense sequence
  source 1..20: mol_type = other RNA
agtcatgggccagttcttac

SEQ ID NO: 2621 - RNA, 20 nt, synthetic construct
  misc_feature 1..20: note = antisense sequence
  source 1..20: mol_type = other RNA
gagtcatgggccagttctta

SEQ ID NO: 2622 - RNA, 20 nt, synthetic construct
  misc_feature 1..20: note = antisense sequence
  source 1..20: mol_type = other RNA
acacaacctagtggcagggc

SEQ ID NO: 2623 - RNA, 20 nt, synthetic construct
  misc_feature 1..20: note = antisense sequence
  source 1..20: mol_type = other RNA
cacacaacctagtggcaggg

SEQ ID NO: 2624 - RNA, 20 nt, synthetic construct
  misc_feature 1..20: note = antisense sequence
  source 1..20: mol_type = other RNA
tcacacaacctagtggcagg

SEQ ID NO: 2625 - RNA, 20 nt, synthetic construct
  misc_feature 1..20: note = antisense sequence
  source 1..20: mol_type = other RNA
gtcacacaacctagtggcag

SEQ ID NO: 2626 - RNA, 20 nt, synthetic construct
  misc_feature 1..20: note = antisense sequence
  source 1..20: mol_type = other RNA
aagtcacacaacctagtggc

SEQ ID NO: 2627 - RNA, 20 nt, synthetic construct
  misc_feature 1..20: note = antisense sequence
  source 1..20: mol_type = other RNA
caagtcacacaacctagtgg

SEQ ID NO: 2628 - RNA, 20 nt, synthetic construct
  misc_feature 1..20: note = antisense sequence
  source 1..20: mol_type = other RNA
ctcaagtcacacaacctagt

SEQ ID NO: 2629 - RNA, 20 nt, synthetic construct
  misc_feature 1..20: note = antisense sequence
  source 1..20: mol_type = other RNA
cctcaagtcacacaacctag

SEQ ID NO: 2630 - RNA, 20 nt, synthetic construct
  misc_feature 1..20: note = antisense sequence
  source 1..20: mol_type = other RNA
tttcctcaagtcacacaacc

SEQ ID NO: 2631 - RNA, 20 nt, synthetic construct
  misc_feature 1..20: note = antisense sequence
  source 1..20: mol_type = other RNA
agccacccttctttgctcat

SEQ ID NO: 2632 - RNA, 20 nt, synthetic construct
  misc_feature 1..20: note = antisense sequence
  source 1..20: mol_type = other RNA
aagtcaagagccacccttct

SEQ ID NO: 2633 - RNA, 20 nt, synthetic construct
  misc_feature 1..20: note = antisense sequence
  source 1..20: mol_type = other RNA
tgaagtcaagagccaccctt

SEQ ID NO: 2634 - RNA, 20 nt, synthetic construct
  misc_feature 1..20: note = antisense sequence
  source 1..20: mol_type = other RNA
atgaagtcaagagccaccct

SEQ ID NO: 2635 - RNA, 20 nt, synthetic construct
  misc_feature 1..20: note = antisense sequence
  source 1..20: mol_type = other RNA
tatgaagtcaagagccaccc

SEQ ID NO: 2636 - RNA, 20 nt, synthetic construct
  misc_feature 1..20: note = antisense sequence
  source 1..20: mol_type = other RNA
ttatgaagtcaagagccacc

SEQ ID NO: 2637 - RNA, 20 nt, synthetic construct
  misc_feature 1..20: note = antisense sequence
  source 1..20: mol_type = other RNA
attatgaagtcaagagccac

SEQ ID NO: 2638 - RNA, 20 nt, synthetic construct
  misc_feature 1..20: note = antisense sequence
  source 1..20: mol_type = other RNA
gcaccaagtagaatcagata

SEQ ID NO: 2639 - RNA, 20 nt, synthetic construct
  misc_feature 1..20: note = antisense sequence
  source 1..20: mol_type = other RNA
ctgcaccaagtagaatcaga

SEQ ID NO: 2640 - RNA, 20 nt, synthetic construct
  misc_feature 1..20: note = antisense sequence
  source 1..20: mol_type = other RNA
actgcaccaagtagaatcag

SEQ ID NO: 2641 - RNA, 20 nt, synthetic construct
  misc_feature 1..20: note = antisense sequence
  source 1..20: mol_type = other RNA
gcaattattgttactgcacc

SEQ ID NO: 2642 - RNA, 20 nt, synthetic construct
  misc_feature 1..20: note = antisense sequence
  source 1..20: mol_type = other RNA
ggaaagacatgatcgcaaaa

SEQ ID NO: 2643 - RNA, 20 nt, synthetic construct
  misc_feature 1..20: note = antisense sequence
  source 1..20: mol_type = other RNA
tggaaagacatgatcgcaaa

SEQ ID NO: 2644 - RNA, 20 nt, synthetic construct
  misc_feature 1..20: note = antisense sequence
  source 1..20: mol_type = other RNA
tactggaaagacatgatcgc

SEQ ID NO: 2645 - RNA, 20 nt, synthetic construct
  misc_feature 1..20: note = antisense sequence
  source 1..20: mol_type = other RNA
ttactggaaagacatgatcg

SEQ ID NO: 2646 - RNA, 20 nt, synthetic construct
  misc_feature 1..20: note = antisense sequence
  source 1..20: mol_type = other RNA
acctgagagtcactaaagat

SEQ ID NO: 2647 - RNA, 20 nt, synthetic construct
  misc_feature 1..20: note = antisense sequence
  source 1..20: mol_type = other RNA
aacctgagagtcactaaaga

SEQ ID NO: 2648 - RNA, 20 nt, synthetic construct
  misc_feature 1..20: note = antisense sequence
  source 1..20: mol_type = other RNA
aaacctgagagtcactaaag

SEQ ID NO: 2649 - RNA, 20 nt, synthetic construct
  misc_feature 1..20: note = antisense sequence
  source 1..20: mol_type = other RNA
tccttagtagtcagccaaac

SEQ ID NO: 2650 - RNA, 20 nt, synthetic construct
  misc_feature 1..20: note = antisense sequence
  source 1..20: mol_type = other RNA
ctctccttagtagtcagcca

SEQ ID NO: 2651 - RNA, 20 nt, synthetic construct
  misc_feature 1..20: note = antisense sequence
  source 1..20: mol_type = other RNA
gctctccttagtagtcagcc

SEQ ID NO: 2652 - RNA, 20 nt, synthetic construct
  misc_feature 1..20: note = antisense sequence
  source 1..20: mol_type = other RNA
tgctctccttagtagtcagc

SEQ ID NO: 2653 - RNA, 20 nt, synthetic construct
  misc_feature 1..20: note = antisense sequence
  source 1..20: mol_type = other RNA
gaccctcagctctggaattt

SEQ ID NO: 2654 - RNA, 20 nt, synthetic construct
  misc_feature 1..20: note = antisense sequence
  source 1..20: mol_type = other RNA
tgaccctcagctctggaatt

SEQ ID NO: 2655 - RNA, 20 nt, synthetic construct
  misc_feature 1..20: note = antisense sequence
  source 1..20: mol_type = other RNA
atgaccctcagctctggaat

SEQ ID NO: 2656 - RNA, 20 nt, synthetic construct
  misc_feature 1..20: note = antisense sequence
  source 1..20: mol_type = other RNA
aatgaccctcagctctggaa

SEQ ID NO: 2657 - RNA, 20 nt, synthetic construct
  misc_feature 1..20: note = antisense sequence
  source 1..20: mol_type = other RNA
taaatgaccctcagctctgg

SEQ ID NO: 2658 - RNA, 20 nt, synthetic construct
  misc_feature 1..20: note = antisense sequence
  source 1..20: mol_type = other RNA
tccaaataaatgaccctcag

SEQ ID NO: 2659 - RNA, 20 nt, synthetic construct
  misc_feature 1..20: note = antisense sequence
  source 1..20: mol_type = other RNA
ctaccaccctatattcaagt

SEQ ID NO: 2660 - RNA, 20 nt, synthetic construct
  misc_feature 1..20: note = antisense sequence
  source 1..20: mol_type = other RNA
cctaccaccctatattcaag

SEQ ID NO: 2661 - RNA, 20 nt, synthetic construct
  misc_feature 1..20: note = antisense sequence
  source 1..20: mol_type = other RNA
tcctaccaccctatattcaa

SEQ ID NO: 2662 - RNA, 20 nt, synthetic construct
  misc_feature 1..20: note = antisense sequence
  source 1..20: mol_type = other RNA
gtcctaccaccctatattca

SEQ ID NO: 2663 - RNA, 20 nt, synthetic construct
  misc_feature 1..20: note = antisense sequence
  source 1..20: mol_type = other RNA
tgtcctaccaccctatattc

SEQ ID NO: 2664 - RNA, 20 nt, synthetic construct
  misc_feature 1..20: note = antisense sequence
  source 1..20: mol_type = other RNA
ttgtcctaccaccctatatt

SEQ ID NO: 2665 - RNA, 20 nt, synthetic construct
  misc_feature 1..20: note = antisense sequence
  source 1..20: mol_type = other RNA
aattgtcctaccaccctata

SEQ ID NO: 2666 - RNA, 20 nt, synthetic construct
  misc_feature 1..20: note = antisense sequence
  source 1..20: mol_type = other RNA
caacttgacatgccattgaa

SEQ ID NO: 2667 - RNA, 20 nt, synthetic construct
  misc_feature 1..20: note = antisense sequence
  source 1..20: mol_type = other RNA
gcaacttgacatgccattga

SEQ ID NO: 2668 - RNA, 20 nt, synthetic construct
  misc_feature 1..20: note = antisense sequence
  source 1..20: mol_type = other RNA
tgcaacttgacatgccattg

SEQ ID NO: 2669 - RNA, 20 nt, synthetic construct
  misc_feature 1..20: note = antisense sequence
  source 1..20: mol_type = other RNA
ctgcaacttgacatgccatt

SEQ ID NO: 2670 - RNA, 20 nt, synthetic construct
  misc_feature 1..20: note = antisense sequence
  source 1..20: mol_type = other RNA
cctgcaacttgacatgccat

SEQ ID NO: 2671 - RNA, 20 nt, synthetic construct
  misc_feature 1..20: note = antisense sequence
  source 1..20: mol_type = other RNA
ccctgcaacttgacatgcca

SEQ ID NO: 2672 - RNA, 20 nt, synthetic construct
  misc_feature 1..20: note = antisense sequence
  source 1..20: mol_type = other RNA
accctgcaacttgacatgcc

SEQ ID NO: 2673 - RNA, 20 nt, synthetic construct
  misc_feature 1..20: note = antisense sequence
  source 1..20: mol_type = other RNA
gaccctgcaacttgacatgc

SEQ ID NO: 2674 - RNA, 20 nt, synthetic construct
  misc_feature 1..20: note = antisense sequence
  source 1..20: mol_type = other RNA
gaagaaaagtggcaggaccc

SEQ ID NO: 2675 - RNA, 20 nt, synthetic construct
  misc_feature 1..20: note = antisense sequence
  source 1..20: mol_type = other RNA
agaagaaaagtggcaggacc

SEQ ID NO: 2676 - RNA, 20 nt, synthetic construct
  misc_feature 1..20: note = antisense sequence
  source 1..20: mol_type = other RNA
aagaagaaaagtggcaggac

SEQ ID NO: 2677 - RNA, 20 nt, synthetic construct
  misc_feature 1..20: note = antisense sequence
  source 1..20: mol_type = other RNA
aacaagaagaaaagtggcag

SEQ ID NO: 2678 - RNA, 20 nt, synthetic construct
  misc_feature 1..20: note = antisense sequence
  source 1..20: mol_type = other RNA
agcaaagttgatagaagagg

SEQ ID NO: 2679 - RNA, 20 nt, synthetic construct
  misc_feature 1..20: note = antisense sequence
  source 1..20: mol_type = other RNA
gtgagcaaagttgatagaag

SEQ ID NO: 2680 - RNA, 20 nt, synthetic construct
  misc_feature 1..20: note = antisense sequence
  source 1..20: mol_type = other RNA
gagtgagcaaagttgataga

SEQ ID NO: 2681 - RNA, 20 nt, synthetic construct
  misc_feature 1..20: note = antisense sequence
  source 1..20: mol_type = other RNA
agagtgagcaaagttgatag

SEQ ID NO: 2682 - RNA, 20 nt, synthetic construct
  misc_feature 1..20: note = antisense sequence
  source 1..20: mol_type = other RNA
gagagtgagcaaagttgata

SEQ ID NO: 2683 - RNA, 20 nt, synthetic construct
  misc_feature 1..20: note = antisense sequence
  source 1..20: mol_type = other RNA
ggagagtgagcaaagttgat

SEQ ID NO: 2684 - RNA, 20 nt, synthetic construct
  misc_feature 1..20: note = antisense sequence
  source 1..20: mol_type = other RNA
gggagagtgagcaaagttga

SEQ ID NO: 2685 - RNA, 20 nt, synthetic construct
  misc_feature 1..20: note = antisense sequence
  source 1..20: mol_type = other RNA
ttctttgggagagtgagcaa

SEQ ID NO: 2686 - RNA, 20 nt, synthetic construct
  misc_feature 1..20: note = antisense sequence
  source 1..20: mol_type = other RNA
atttctttgggagagtgagc

SEQ ID NO: 2687 - RNA, 20 nt, synthetic construct
  misc_feature 1..20: note = antisense sequence
  source 1..20: mol_type = other RNA
tatttctttgggagagtgag

SEQ ID NO: 2688 - RNA, 20 nt, synthetic construct
  misc_feature 1..20: note = antisense sequence
  source 1..20: mol_type = other RNA
tcattgcctatttctttggg

SEQ ID NO: 2689 - RNA, 20 nt, synthetic construct
  misc_feature 1..20: note = antisense sequence
  source 1..20: mol_type = other RNA
gaaacctctagccaaatgga

SEQ ID NO: 2690 - RNA, 20 nt, synthetic construct
  misc_feature 1..20: note = antisense sequence
  source 1..20: mol_type = other RNA
agaaacctctagccaaatgg

SEQ ID NO: 2691 - RNA, 20 nt, synthetic construct
  misc_feature 1..20: note = antisense sequence
  source 1..20: mol_type = other RNA
gggctcaggcatcaccatga

SEQ ID NO: 2692 - RNA, 20 nt, synthetic construct
  misc_feature 1..20: note = antisense sequence
  source 1..20: mol_type = other RNA
tgacttagttgaggtagggc

SEQ ID NO: 2693 - RNA, 20 nt, synthetic construct
  misc_feature 1..20: note = antisense sequence
  source 1..20: mol_type = other RNA
ttctgacttagttgaggtag

SEQ ID NO: 2694 - RNA, 20 nt, synthetic construct
  misc_feature 1..20: note = antisense sequence
  source 1..20: mol_type = other RNA
gataagaagcacctgaggag

SEQ ID NO: 2695 - RNA, 20 nt, synthetic construct
  misc_feature 1..20: note = antisense sequence
  source 1..20: mol_type = other RNA
tgcagataagaagcacctga

SEQ ID NO: 2696 - RNA, 20 nt, synthetic construct
  misc_feature 1..20: note = antisense sequence
  source 1..20: mol_type = other RNA
cctggtttaacctggctgca

SEQ ID NO: 2697 - RNA, 20 nt, synthetic construct
  misc_feature 1..20: note = antisense sequence
  source 1..20: mol_type = other RNA
tcctggtttaacctggctgc

SEQ ID NO: 2698 - RNA, 20 nt, synthetic construct
  misc_feature 1..20: note = antisense sequence
  source 1..20: mol_type = other RNA
ctcctggtttaacctggctg

SEQ ID NO: 2699 - RNA, 20 nt, synthetic construct
  misc_feature 1..20: note = antisense sequence
  source 1..20: mol_type = other RNA
actcctggtttaacctggct

SEQ ID NO: 2700 - RNA, 20 nt, synthetic construct
  misc_feature 1..20: note = antisense sequence
  source 1..20: mol_type = other RNA
cactcctggtttaacctggc

SEQ ID NO: 2701 - RNA, 20 nt, synthetic construct
  misc_feature 1..20: note = antisense sequence
  source 1..20: mol_type = other RNA
acactcctggtttaacctgg

SEQ ID NO: 2702 - RNA, 20 nt, synthetic construct
  misc_feature 1..20: note = antisense sequence
  source 1..20: mol_type = other RNA
gacactcctggtttaacctg

SEQ ID NO: 2703 - RNA, 20 nt, synthetic construct
  misc_feature 1..20: note = antisense sequence
  source 1..20: mol_type = other RNA
atgacactcctggtttaacc

SEQ ID NO: 2704 - RNA, 20 nt, synthetic construct
  misc_feature 1..20: note = antisense sequence
  source 1..20: mol_type = other RNA
gtgatgacactcctggttta

SEQ ID NO: 2705 - RNA, 20 nt, synthetic construct
  misc_feature 1..20: note = antisense sequence
  source 1..20: mol_type = other RNA
agtcctactcagtgatgaca

SEQ ID NO: 2706 - RNA, 20 nt, synthetic construct
  misc_feature 1..20: note = antisense sequence
  source 1..20: mol_type = other RNA
atagtcctactcagtgatga

SEQ ID NO: 2707 - RNA, 20 nt, synthetic construct
  misc_feature 1..20: note = antisense sequence
  source 1..20: mol_type = other RNA
aatagtcctactcagtgatg

SEQ ID NO: 2708 - RNA, 20 nt, synthetic construct
  misc_feature 1..20: note = antisense sequence
  source 1..20: mol_type = other RNA
ctaatagtcctactcagtga

SEQ ID NO: 2709 - RNA, 20 nt, synthetic construct
  misc_feature 1..20: note = antisense sequence
  source 1..20: mol_type = other RNA
gctaatagtcctactcagtg

SEQ ID NO: 2710 - RNA, 20 nt, synthetic construct
  misc_feature 1..20: note = antisense sequence
  source 1..20: mol_type = other RNA
agctaatagtcctactcagt

SEQ ID NO: 2711 - RNA, 20 nt, synthetic construct
  misc_feature 1..20: note = antisense sequence
  source 1..20: mol_type = other RNA
tcacaggacacattaaagct

SEQ ID NO: 2712 - RNA, 20 nt, synthetic construct
  misc_feature 1..20: note = antisense sequence
  source 1..20: mol_type = other RNA
tggtcacaggacacattaaa

SEQ ID NO: 2713 - RNA, 20 nt, synthetic construct
  misc_feature 1..20: note = antisense sequence
  source 1..20: mol_type = other RNA
gtggtcacaggacacattaa

SEQ ID NO: 2714 - RNA, 20 nt, synthetic construct
  misc_feature 1..20: note = antisense sequence
  source 1..20: mol_type = other RNA
tggtattgtggtcacaggac

SEQ ID NO: 2715 - RNA, 20 nt, synthetic construct
  misc_feature 1..20: note = antisense sequence
  source 1..20: mol_type = other RNA
ttggtattgtggtcacagga

SEQ ID NO: 2716 - RNA, 20 nt, synthetic construct
  misc_feature 1..20: note = antisense sequence
  source 1..20: mol_type = other RNA
attggtattgtggtcacagg

SEQ ID NO: 2717 - RNA, 20 nt, synthetic construct
  misc_feature 1..20: note = antisense sequence
  source 1..20: mol_type = other RNA
gattggtattgtggtcacag

SEQ ID NO: 2718 - RNA, 20 nt, synthetic construct
  misc_feature 1..20: note = antisense sequence
  source 1..20: mol_type = other RNA
tgattggtattgtggtcaca

SEQ ID NO: 2719 - RNA, 20 nt, synthetic construct
  misc_feature 1..20: note = antisense sequence
  source 1..20: mol_type = other RNA
ctgattggtattgtggtcac

SEQ ID NO: 2720 - RNA, 20 nt, synthetic construct
  misc_feature 1..20: note = antisense sequence
  source 1..20: mol_type = other RNA
agctgattggtattgtggtc

SEQ ID NO: 2721 - RNA, 20 nt, synthetic construct
  misc_feature 1..20: note = antisense sequence
  source 1..20: mol_type = other RNA
gagctgattggtattgtggt

SEQ ID NO: 2722 - RNA, 20 nt, synthetic construct
  misc_feature 1..20: note = antisense sequence
  source 1..20: mol_type = other RNA
agagctgattggtattgtgg

SEQ ID NO: 2723 - RNA, 20 nt, synthetic construct
  misc_feature 1..20: note = antisense sequence
  source 1..20: mol_type = other RNA
gagagctgattggtattgtg

SEQ ID NO: 2724 - RNA, 20 nt, synthetic construct
  misc_feature 1..20: note = antisense sequence
  source 1..20: mol_type = other RNA
gtgaggcattaaagctaaag

SEQ ID NO: 2725 - RNA, 20 nt, synthetic construct
  misc_feature 1..20: note = antisense sequence
  source 1..20: mol_type = other RNA
cagtgaggcattaaagctaa

SEQ ID NO: 2726 - RNA, 20 nt, synthetic construct
  misc_feature 1..20: note = antisense sequence
  source 1..20: mol_type = other RNA
acagtgaggcattaaagcta

SEQ ID NO: 2727 - RNA, 20 nt, synthetic construct
  misc_feature 1..20: note = antisense sequence
  source 1..20: mol_type = other RNA
ccacagtgaggcattaaagc

SEQ ID NO: 2728 - RNA, 20 nt, synthetic construct
  misc_feature 1..20: note = antisense sequence
  source 1..20: mol_type = other RNA
tcccacagtgaggcattaaa

SEQ ID NO: 2729 - RNA, 20 nt, synthetic construct
  misc_feature 1..20: note = antisense sequence
  source 1..20: mol_type = other RNA
cccattgtatttagcaacac

SEQ ID NO: 2730 - RNA, 20 nt, synthetic construct
  misc_feature 1..20: note = antisense sequence
  source 1..20: mol_type = other RNA
ctcccattgtatttagcaac

SEQ ID NO: 2731 - RNA, 20 nt, synthetic construct
  misc_feature 1..20: note = antisense sequence
  source 1..20: mol_type = other RNA
ctgggttctctacctttctg

SEQ ID NO: 2732 - RNA, 20 nt, synthetic construct
  misc_feature 1..20: note = antisense sequence
  source 1..20: mol_type = other RNA
tctgggttctctacctttct

SEQ ID NO: 2733 - RNA, 20 nt, synthetic construct
  misc_feature 1..20: note = antisense sequence
  source 1..20: mol_type = other RNA
atctgggttctctacctttc

SEQ ID NO: 2734 - RNA, 20 nt, synthetic construct
  misc_feature 1..20: note = antisense sequence
  source 1..20: mol_type = other RNA
gatctgggttctctaccttt

SEQ ID NO: 2735 - RNA, 20 nt, synthetic construct
  misc_feature 1..20: note = antisense sequence
  source 1..20: mol_type = other RNA
ggatctgggttctctacctt

SEQ ID NO: 2736 - RNA, 20 nt, synthetic construct
  misc_feature 1..20: note = antisense sequence
  source 1..20: mol_type = other RNA
gggatctgggttctctacct

SEQ ID NO: 2737 - RNA, 20 nt, synthetic construct
  misc_feature 1..20: note = antisense sequence
  source 1..20: mol_type = other RNA
tgggatctgggttctctacc

SEQ ID NO: 2738 - RNA, 20 nt, synthetic construct
  misc_feature 1..20: note = antisense sequence
  source 1..20: mol_type = other RNA
gtgggatctgggttctctac

SEQ ID NO: 2739 - RNA, 20 nt, synthetic construct
  misc_feature 1..20: note = antisense sequence
  source 1..20: mol_type = other RNA
gggtgggatctgggttctct

SEQ ID NO: 2740 - RNA, 20 nt, synthetic construct
  misc_feature 1..20: note = antisense sequence
  source 1..20: mol_type = other RNA
gaagtgggtgggatctgggt

SEQ ID NO: 2741 - RNA, 20 nt, synthetic construct
  misc_feature 1..20: note = antisense sequence
  source 1..20: mol_type = other RNA
agaagtgggtgggatctggg

SEQ ID NO: 2742 - RNA, 20 nt, synthetic construct
  misc_feature 1..20: note = antisense sequence
  source 1..20: mol_type = other RNA
aagaagtgggtgggatctgg

SEQ ID NO: 2743 - RNA, 20 nt, synthetic construct
  misc_feature 1..20: note = antisense sequence
  source 1..20: mol_type = other RNA
caagaagtgggtgggatctg

SEQ ID NO: 2744 - RNA, 20 nt, synthetic construct
  misc_feature 1..20: note = antisense sequence
  source 1..20: mol_type = other RNA
tcaagaagtgggtgggatct

SEQ ID NO: 2745 - RNA, 20 nt, synthetic construct
  misc_feature 1..20: note = antisense sequence
  source 1..20: mol_type = other RNA
ttcaagaagtgggtgggatc

SEQ ID NO: 2746 - RNA, 20 nt, synthetic construct
  misc_feature 1..20: note = antisense sequence
  source 1..20: mol_type = other RNA
cttcaagaagtgggtgggat

SEQ ID NO: 2747 - RNA, 20 nt, synthetic construct
  misc_feature 1..20: note = antisense sequence
  source 1..20: mol_type = other RNA
agcttcaagaagtgggtggg

SEQ ID NO: 2748 - RNA, 20 nt, synthetic construct
  misc_feature 1..20: note = antisense sequence
  source 1..20: mol_type = other RNA
gtcttcctgttctcagtgat

SEQ ID NO: 2749 - RNA, 20 nt, synthetic construct
  misc_feature 1..20: note = antisense sequence
  source 1..20: mol_type = other RNA
tgaggtgattctagccaatt

SEQ ID NO: 2750 - RNA, 20 nt, synthetic construct
  misc_feature 1..20: note = antisense sequence
  source 1..20: mol_type = other RNA
ctgaggtgattctagccaat

SEQ ID NO: 2751 - RNA, 20 nt, synthetic construct
  misc_feature 1..20: note = antisense sequence
  source 1..20: mol_type = other RNA
cctgaggtgattctagccaa

SEQ ID NO: 2752 - RNA, 20 nt, synthetic construct
  misc_feature 1..20: note = antisense sequence
  source 1..20: mol_type = other RNA
tctcctgaggtgattctagc

SEQ ID NO: 2753 - RNA, 20 nt, synthetic construct
  misc_feature 1..20: note = antisense sequence
  source 1..20: mol_type = other RNA
atctcctgaggtgattctag

SEQ ID NO: 2754 - RNA, 20 nt, synthetic construct
  misc_feature 1..20: note = antisense sequence
  source 1..20: mol_type = other RNA
catctcctgaggtgattcta

SEQ ID NO: 2755 - RNA, 20 nt, synthetic construct
  misc_feature 1..20: note = antisense sequence
  source 1..20: mol_type = other RNA
ccatctcctgaggtgattct

SEQ ID NO: 2756 - RNA, 20 nt, synthetic construct
  misc_feature 1..20: note = antisense sequence
  source 1..20: mol_type = other RNA
accatctcctgaggtgattc

SEQ ID NO: 2757 - RNA, 20 nt, synthetic construct
  misc_feature 1..20: note = antisense sequence
  source 1..20: mol_type = other RNA
taccatctcctgaggtgatt

SEQ ID NO: 2758 - RNA, 20 nt, synthetic construct
  misc_feature 1..20: note = antisense sequence
  source 1..20: mol_type = other RNA
gtaccatctcctgaggtgat

SEQ ID NO: 2759 - RNA, 20 nt, synthetic construct
  misc_feature 1..20: note = antisense sequence
  source 1..20: mol_type = other RNA
agtaccatctcctgaggtga

SEQ ID NO: 2760 - RNA, 20 nt, synthetic construct
  misc_feature 1..20: note = antisense sequence
  source 1..20: mol_type = other RNA
aagtaccatctcctgaggtg

SEQ ID NO: 2761 - RNA, 20 nt, synthetic construct
  misc_feature 1..20: note = antisense sequence
  source 1..20: mol_type = other RNA
caagtaccatctcctgaggt

SEQ ID NO: 2762 - RNA, 20 nt, synthetic construct
  misc_feature 1..20: note = antisense sequence
  source 1..20: mol_type = other RNA
ccaagtaccatctcctgagg

SEQ ID NO: 2763 - RNA, 20 nt, synthetic construct
  misc_feature 1..20: note = antisense sequence
  source 1..20: mol_type = other RNA
tccaagtaccatctcctgag

SEQ ID NO: 2764 - RNA, 20 nt, synthetic construct
  misc_feature 1..20: note = antisense sequence
  source 1..20: mol_type = other RNA
atccaagtaccatctcctga

SEQ ID NO: 2765 - RNA, 20 nt, synthetic construct
  misc_feature 1..20: note = antisense sequence
  source 1..20: mol_type = other RNA
gatccaagtaccatctcctg

SEQ ID NO: 2766 - RNA, 20 nt, synthetic construct
  misc_feature 1..20: note = antisense sequence
  source 1..20: mol_type = other RNA
gcccagatccaagtaccatc

SEQ ID NO: 2767 - RNA, 20 nt, synthetic construct
  misc_feature 1..20: note = antisense sequence
  source 1..20: mol_type = other RNA
tgcccagatccaagtaccat

SEQ ID NO: 2768 - RNA, 20 nt, synthetic construct
  misc_feature 1..20: note = antisense sequence
  source 1..20: mol_type = other RNA
gtgcccagatccaagtacca

SEQ ID NO: 2769 - RNA, 20 nt, synthetic construct
  misc_feature 1..20: note = antisense sequence
  source 1..20: mol_type = other RNA
ggtgcccagatccaagtacc

SEQ ID NO: 2770 - RNA, 20 nt, synthetic construct
  misc_feature 1..20: note = antisense sequence
  source 1..20: mol_type = other RNA
gggtgcccagatccaagtac

SEQ ID NO: 2771 - RNA, 20 nt, synthetic construct
  misc_feature 1..20: note = antisense sequence
  source 1..20: mol_type = other RNA
aagggtgcccagatccaagt

SEQ ID NO: 2772 - RNA, 20 nt, synthetic construct
  misc_feature 1..20: note = antisense sequence
  source 1..20: mol_type = other RNA
aaagggtgcccagatccaag

SEQ ID NO: 2773 - RNA, 20 nt, synthetic construct
  misc_feature 1..20: note = antisense sequence
  source 1..20: mol_type = other RNA
attcaaagggtgcccagatc

SEQ ID NO: 2774 - RNA, 20 nt, synthetic construct
  misc_feature 1..20: note = antisense sequence
  source 1..20: mol_type = other RNA
acattcaaagggtgcccaga

SEQ ID NO: 2775 - RNA, 20 nt, synthetic construct
  misc_feature 1..20: note = antisense sequence
  source 1..20: mol_type = other RNA
aacattcaaagggtgcccag

SEQ ID NO: 2776 - RNA, 20 nt, synthetic construct
  misc_feature 1..20: note = antisense sequence
  source 1..20: mol_type = other RNA
acctaccggataagtgaaaa

SEQ ID NO: 2777 - RNA, 20 nt, synthetic construct
  misc_feature 1..20: note = antisense sequence
  source 1..20: mol_type = other RNA
tacctaccggataagtgaaa

SEQ ID NO: 2778 - RNA, 20 nt, synthetic construct
  misc_feature 1..20: note = antisense sequence
  source 1..20: mol_type = other RNA
ttacctaccggataagtgaa

SEQ ID NO: 2779 - RNA, 20 nt, synthetic construct
  misc_feature 1..20: note = antisense sequence
  source 1..20: mol_type = other RNA
tgtccttacctaccggataa

SEQ ID NO: 2780 - RNA, 20 nt, synthetic construct
  misc_feature 1..20: note = antisense sequence
  source 1..20: mol_type = other RNA
atgtccttacctaccggata

SEQ ID NO: 2781 - RNA, 20 nt, synthetic construct
  misc_feature 1..20: note = antisense sequence
  source 1..20: mol_type = other RNA
aatgtccttacctaccggat

SEQ ID NO: 2782 - RNA, 20 nt, synthetic construct
  misc_feature 1..20: note = antisense sequence
  source 1..20: mol_type = other RNA
taatgtccttacctaccgga

SEQ ID NO: 2783 - RNA, 20 nt, synthetic construct
  misc_feature 1..20: note = antisense sequence
  source 1..20: mol_type = other RNA
ctaatgtccttacctaccgg

SEQ ID NO: 2784 - RNA, 20 nt, synthetic construct
  misc_feature 1..20: note = antisense sequence
  source 1..20: mol_type = other RNA
agctaatgtccttacctacc

SEQ ID NO: 2785 - RNA, 20 nt, synthetic construct
  misc_feature 1..20: note = antisense sequence
  source 1..20: mol_type = other RNA
gagctaatgtccttacctac

SEQ ID NO: 2786 - RNA, 20 nt, synthetic construct
  misc_feature 1..20: note = antisense sequence
  source 1..20: mol_type = other RNA
agagctaatgtccttaccta

SEQ ID NO: 2787 - RNA, 20 nt, synthetic construct
  misc_feature 1..20: note = antisense sequence
  source 1..20: mol_type = other RNA
cagagctaatgtccttacct

SEQ ID NO: 2788 - RNA, 20 nt, synthetic construct
  misc_feature 1..20: note = antisense sequence
  source 1..20: mol_type = other RNA
tccagagctaatgtccttac

SEQ ID NO: 2789 - RNA, 20 nt, synthetic construct
  misc_feature 1..20: note = antisense sequence
  source 1..20: mol_type = other RNA
tagtccagagctaatgtcct

SEQ ID NO: 2790 - RNA, 20 nt, synthetic construct
  misc_feature 1..20: note = antisense sequence
  source 1..20: mol_type = other RNA
acctgtgggagatccaagat

SEQ ID NO: 2791 - RNA, 20 nt, synthetic construct
  misc_feature 1..20: note = antisense sequence
  source 1..20: mol_type = other RNA
ctcacctgtgggagatccaa

SEQ ID NO: 2792 - RNA, 20 nt, synthetic construct
  misc_feature 1..20: note = antisense sequence
  source 1..20: mol_type = other RNA
gtaacattacttgctcaagg

SEQ ID NO: 2793 - RNA, 20 nt, synthetic construct
  misc_feature 1..20: note = antisense sequence
  source 1..20: mol_type = other RNA
caaattgaagctcacaaagc

SEQ ID NO: 2794 - RNA, 20 nt, synthetic construct
  misc_feature 1..20: note = antisense sequence
  source 1..20: mol_type = other RNA
gcgctcttaggaattttcag

SEQ ID NO: 2795 - RNA, 20 nt, synthetic construct
  misc_feature 1..20: note = antisense sequence
  source 1..20: mol_type = other RNA
caagtggtgtatttggcaaa

SEQ ID NO: 2796 - RNA, 20 nt, synthetic construct
  misc_feature 1..20: note = antisense sequence
  source 1..20: mol_type = other RNA
ttgcccaagtggtgtatttg

SEQ ID NO: 2797 - RNA, 20 nt, synthetic construct
  misc_feature 1..20: note = antisense sequence
  source 1..20: mol_type = other RNA
tgttgcccaagtggtgtatt

SEQ ID NO: 2798 - RNA, 20 nt, synthetic construct
  misc_feature 1..20: note = antisense sequence
  source 1..20: mol_type = other RNA
gaacaggcatgaggcagatc

SEQ ID NO: 2799 - RNA, 20 nt, synthetic construct
  misc_feature 1..20: note = antisense sequence
  source 1..20: mol_type = other RNA
ggaacaggcatgaggcagat

SEQ ID NO: 2800 - RNA, 20 nt, synthetic construct
  misc_feature 1..20: note = antisense sequence
  source 1..20: mol_type = other RNA
aggaacaggcatgaggcaga

SEQ ID NO: 2801 - RNA, 20 nt, synthetic construct
  misc_feature 1..20: note = antisense sequence
  source 1..20: mol_type = other RNA
taggaacaggcatgaggcag

SEQ ID NO: 2802 - RNA, 20 nt, synthetic construct
  misc_feature 1..20: note = antisense sequence
  source 1..20: mol_type = other RNA
gttaggaacaggcatgaggc

SEQ ID NO: 2803 - RNA, 20 nt, synthetic construct
  misc_feature 1..20: note = antisense sequence
  source 1..20: mol_type = other RNA
agctttggtagagagagatt

SEQ ID NO: 2804 - RNA, 20 nt, synthetic construct
  misc_feature 1..20: note = antisense sequence
  source 1..20: mol_type = other RNA
cagctttggtagagagagat

SEQ ID NO: 2805 - RNA, 20 nt, synthetic construct
  misc_feature 1..20: note = antisense sequence
  source 1..20: mol_type = other RNA
agacagctttggtagagaga

SEQ ID NO: 2806 - RNA, 20 nt, synthetic construct
  misc_feature 1..20: note = antisense sequence
  source 1..20: mol_type = other RNA
cagacagctttggtagagag

SEQ ID NO: 2807 - RNA, 20 nt, synthetic construct
  misc_feature 1..20: note = antisense sequence
  source 1..20: mol_type = other RNA
acagacagctttggtagaga

SEQ ID NO: 2808 - RNA, 20 nt, synthetic construct
  misc_feature 1..20: note = antisense sequence
  source 1..20: mol_type = other RNA
tgacagacagctttggtaga

SEQ ID NO: 2809 - RNA, 20 nt, synthetic construct
  misc_feature 1..20: note = antisense sequence
  source 1..20: mol_type = other RNA
atctctgacagacagctttg

SEQ ID NO: 2810 - RNA, 20 nt, synthetic construct
  misc_feature 1..20: note = antisense sequence
  source 1..20: mol_type = other RNA
aatctctgacagacagcttt

SEQ ID NO: 2811 - RNA, 20 nt, synthetic construct
  misc_feature 1..20: note = antisense sequence
  source 1..20: mol_type = other RNA
caatctctgacagacagctt

SEQ ID NO: 2812 - RNA, 20 nt, synthetic construct
  misc_feature 1..20: note = antisense sequence
  source 1..20: mol_type = other RNA
acaatctctgacagacagct

SEQ ID NO: 2813 - RNA, 20 nt, synthetic construct
  misc_feature 1..20: note = antisense sequence
  source 1..20: mol_type = other RNA
cacaatctctgacagacagc

SEQ ID NO: 2814 - RNA, 20 nt, synthetic construct
  misc_feature 1..20: note = antisense sequence
  source 1..20: mol_type = other RNA
gaacacaatctctgacagac

SEQ ID NO: 2815 - RNA, 20 nt, synthetic construct
  misc_feature 1..20: note = antisense sequence
  source 1..20: mol_type = other RNA
ggtttgaacacaatctctga

SEQ ID NO: 2816 - RNA, 20 nt, synthetic construct
  misc_feature 1..20: note = antisense sequence
  source 1..20: mol_type = other RNA
ctggtttgaacacaatctct

SEQ ID NO: 2817 - RNA, 20 nt, synthetic construct
  misc_feature 1..20: note = antisense sequence
  source 1..20: mol_type = other RNA
tctggtttgaacacaatctc

SEQ ID NO: 2818 - RNA, 20 nt, synthetic construct
  misc_feature 1..20: note = antisense sequence
  source 1..20: mol_type = other RNA
tccacttgttctggtttgaa

SEQ ID NO: 2819 - RNA, 20 nt, synthetic construct
  misc_feature 1..20: note = antisense sequence
  source 1..20: mol_type = other RNA
gtccacttgttctggtttga

SEQ ID NO: 2820 - RNA, 20 nt, synthetic construct
  misc_feature 1..20: note = antisense sequence
  source 1..20: mol_type = other RNA
tgggtccacttgttctggtt

SEQ ID NO: 2821 - RNA, 20 nt, synthetic construct
  misc_feature 1..20: note = antisense sequence
  source 1..20: mol_type = other RNA
gtgggtccacttgttctggt

SEQ ID NO: 2822 - RNA, 20 nt, synthetic construct
  misc_feature 1..20: note = antisense sequence
  source 1..20: mol_type = other RNA
ttgagggtaactctggactg

SEQ ID NO: 2823 - RNA, 20 nt, synthetic construct
  misc_feature 1..20: note = antisense sequence
  source 1..20: mol_type = other RNA
gttgagggtaactctggact

SEQ ID NO: 2824 - RNA, 20 nt, synthetic construct
  misc_feature 1..20: note = antisense sequence
  source 1..20: mol_type = other RNA
tgttgagggtaactctggac

SEQ ID NO: 2825 - RNA, 20 nt, synthetic construct
  misc_feature 1..20: note = antisense sequence
  source 1..20: mol_type = other RNA
atgttgagggtaactctgga

SEQ ID NO: 2826 - RNA, 20 nt, synthetic construct
  misc_feature 1..20: note = antisense sequence
  source 1..20: mol_type = other RNA
catgttgagggtaactctgg

SEQ ID NO: 2827 - RNA, 20 nt, synthetic construct
  misc_feature 1..20: note = antisense sequence
  source 1..20: mol_type = other RNA
tcatgttgagggtaactctg

SEQ ID NO: 2828 - RNA, 20 nt, synthetic construct
  misc_feature 1..20: note = antisense sequence
  source 1..20: mol_type = other RNA
gtactcctcttcatttgtgt

SEQ ID NO: 2829 - RNA, 20 nt, synthetic construct
  misc_feature 1..20: note = antisense sequence
  source 1..20: mol_type = other RNA
tgtactcctcttcatttgtg

SEQ ID NO: 2830 - RNA, 20 nt, synthetic construct
  misc_feature 1..20: note = antisense sequence
  source 1..20: mol_type = other RNA
ctgtactcctcttcatttgt

SEQ ID NO: 2831 - RNA, 20 nt, synthetic construct
  misc_feature 1..20: note = antisense sequence
  source 1..20: mol_type = other RNA
tctgtactcctcttcatttg

SEQ ID NO: 2832 - RNA, 20 nt, synthetic construct
  misc_feature 1..20: note = antisense sequence
  source 1..20: mol_type = other RNA
cttctgtactcctcttcatt

SEQ ID NO: 2833 - RNA, 20 nt, synthetic construct
  misc_feature 1..20: note = antisense sequence
  source 1..20: mol_type = other RNA
tcttctgtactcctcttcat

SEQ ID NO: 2834 - RNA, 20 nt, synthetic construct
  misc_feature 1..20: note = antisense sequence
  source 1..20: mol_type = other RNA
aatgtgctcttctgtactcc

SEQ ID NO: 2835 - RNA, 20 nt, synthetic construct
  misc_feature 1..20: note = antisense sequence
  source 1..20: mol_type = other RNA
aaatgtgctcttctgtactc

SEQ ID NO: 2836 - RNA, 20 nt, synthetic construct
  misc_feature 1..20: note = antisense sequence
  source 1..20: mol_type = other RNA
ttcctggcatgaacattaca

SEQ ID NO: 2837 - RNA, 20 nt, synthetic construct
  misc_feature 1..20: note = antisense sequence
  source 1..20: mol_type = other RNA
attcctggcatgaacattac

SEQ ID NO: 2838 - RNA, 20 nt, synthetic construct
  misc_feature 1..20: note = antisense sequence
  source 1..20: mol_type = other RNA
ctattcctggcatgaacatt

SEQ ID NO: 2839 - RNA, 20 nt, synthetic construct
  misc_feature 1..20: note = antisense sequence
  source 1..20: mol_type = other RNA
actattcctggcatgaacat

SEQ ID NO: 2840 - RNA, 20 nt, synthetic construct
  misc_feature 1..20: note = antisense sequence
  source 1..20: mol_type = other RNA
tactattcctggcatgaaca

SEQ ID NO: 2841 - RNA, 20 nt, synthetic construct
  misc_feature 1..20: note = antisense sequence
  source 1..20: mol_type = other RNA
ttactattcctggcatgaac

SEQ ID NO: 2842 - RNA, 20 nt, synthetic construct
  misc_feature 1..20: note = antisense sequence
  source 1..20: mol_type = other RNA
gttactattcctggcatgaa

SEQ ID NO: 2843 - RNA, 20 nt, synthetic construct
  misc_feature 1..20: note = antisense sequence
  source 1..20: mol_type = other RNA
ggttactattcctggcatga

SEQ ID NO: 2844 - RNA, 20 nt, synthetic construct
  misc_feature 1..20: note = antisense sequence
  source 1..20: mol_type = other RNA
aagaggttactattcctggc

SEQ ID NO: 2845 - RNA, 20 nt, synthetic construct
  misc_feature 1..20: note = antisense sequence
  source 1..20: mol_type = other RNA
tgaagaggttactattcctg

SEQ ID NO: 2846 - RNA, 20 nt, synthetic construct
  misc_feature 1..20: note = antisense sequence
  source 1..20: mol_type = other RNA
cttgaagaggttactattcc

SEQ ID NO: 2847 - RNA, 20 nt, synthetic construct
  misc_feature 1..20: note = antisense sequence
  source 1..20: mol_type = other RNA
ccttgaagaggttactattc

SEQ ID NO: 2848 - RNA, 20 nt, synthetic construct
  misc_feature 1..20: note = antisense sequence
  source 1..20: mol_type = other RNA
agtggtatccttgaagaggt

SEQ ID NO: 2849 - RNA, 20 nt, synthetic construct
  misc_feature 1..20: note = antisense sequence
  source 1..20: mol_type = other RNA
cagtggtatccttgaagagg

SEQ ID NO: 2850 - RNA, 20 nt, synthetic construct
  misc_feature 1..20: note = antisense sequence
  source 1..20: mol_type = other RNA
tcagtggtatccttgaagag

SEQ ID NO: 2851 - RNA, 20 nt, synthetic construct
  misc_feature 1..20: note = antisense sequence
  source 1..20: mol_type = other RNA
ctcagtggtatccttgaaga

SEQ ID NO: 2852 - RNA, 20 nt, synthetic construct
  misc_feature 1..20: note = antisense sequence
  source 1..20: mol_type = other RNA
actcagtggtatccttgaag

SEQ ID NO: 2853 - RNA, 20 nt, synthetic construct
  misc_feature 1..20: note = antisense sequence
  source 1..20: mol_type = other RNA
cactcagtggtatccttgaa

SEQ ID NO: 2854 - RNA, 20 nt, synthetic construct
  misc_feature 1..20: note = antisense sequence
  source 1..20: mol_type = other RNA
gcactcagtggtatccttga

SEQ ID NO: 2855 - RNA, 20 nt, synthetic construct
  misc_feature 1..20: note = antisense sequence
  source 1..20: mol_type = other RNA
tgcactcagtggtatccttg

SEQ ID NO: 2856 - RNA, 20 nt, synthetic construct
  misc_feature 1..20: note = antisense sequence
  source 1..20: mol_type = other RNA
acctcccagcattctgtgtg

SEQ ID NO: 2857 - RNA, 20 nt, synthetic construct
  misc_feature 1..20: note = antisense sequence
  source 1..20: mol_type = other RNA
gacctcccagcattctgtgt

SEQ ID NO: 2858 - RNA, 20 nt, synthetic construct
  misc_feature 1..20: note = antisense sequence
  source 1..20: mol_type = other RNA
ggacctcccagcattctgtg

SEQ ID NO: 2859 - RNA, 20 nt, synthetic construct
  misc_feature 1..20: note = antisense sequence
  source 1..20: mol_type = other RNA
gagtcaggacctcccagcat

SEQ ID NO: 2860 - RNA, 20 nt, synthetic construct
  misc_feature 1..20: note = antisense sequence
  source 1..20: mol_type = other RNA
cataagcagagtcaggacct

SEQ ID NO: 2861 - RNA, 20 nt, synthetic construct
  misc_feature 1..20: note = antisense sequence
  source 1..20: mol_type = other RNA
tccataagcagagtcaggac

SEQ ID NO: 2862 - RNA, 20 nt, synthetic construct
  misc_feature 1..20: note = antisense sequence
  source 1..20: mol_type = other RNA
tgtggtttccataagcagag

SEQ ID NO: 2863 - RNA, 20 nt, synthetic construct
  misc_feature 1..20: note = antisense sequence
  source 1..20: mol_type = other RNA
gtttctgtggtttccataag

SEQ ID NO: 2864 - RNA, 20 nt, synthetic construct
  misc_feature 1..20: note = antisense sequence
  source 1..20: mol_type = other RNA
cagggatgagtttctgtggt

SEQ ID NO: 2865 - RNA, 20 nt, synthetic construct
  misc_feature 1..20: note = antisense sequence
  source 1..20: mol_type = other RNA
tggaagtttaatgagggtca

SEQ ID NO: 2866 - RNA, 20 nt, synthetic construct
  misc_feature 1..20: note = antisense sequence
  source 1..20: mol_type = other RNA
gattggaagtttaatgaggg

SEQ ID NO: 2867 - RNA, 20 nt, synthetic construct
  misc_feature 1..20: note = antisense sequence
  source 1..20: mol_type = other RNA
gtaccataggaagtaagatg

SEQ ID NO: 2868 - RNA, 20 nt, synthetic construct
  misc_feature 1..20: note = antisense sequence
  source 1..20: mol_type = other RNA
gagcagttaaggagattcaa

SEQ ID NO: 2869 - RNA, 20 nt, synthetic construct
  misc_feature 1..20: note = antisense sequence
  source 1..20: mol_type = other RNA
tgagcagttaaggagattca

SEQ ID NO: 2870 - RNA, 20 nt, synthetic construct
  misc_feature 1..20: note = antisense sequence
  source 1..20: mol_type = other RNA
acacccaggctgagcagtta

SEQ ID NO: 2871 - RNA, 20 nt, synthetic construct
  misc_feature 1..20: note = antisense sequence
  source 1..20: mol_type = other RNA
ctgaaacacccaggctgagc

SEQ ID NO: 2872 - RNA, 20 nt, synthetic construct
  misc_feature 1..20: note = antisense sequence
  source 1..20: mol_type = other RNA
ggctgaaacacccaggctga

SEQ ID NO: 2873 - RNA, 20 nt, synthetic construct
  misc_feature 1..20: note = antisense sequence
  source 1..20: mol_type = other RNA
atatggctgaaacacccagg

SEQ ID NO: 2874 - RNA, 20 nt, synthetic construct
  misc_feature 1..20: note = antisense sequence
  source 1..20: mol_type = other RNA
tatatggctgaaacacccag

SEQ ID NO: 2875 - RNA, 20 nt, synthetic construct
  misc_feature 1..20: note = antisense sequence
  source 1..20: mol_type = other RNA
acttggttcctgttgtttgc

SEQ ID NO: 2876 - RNA, 20 nt, synthetic construct
  misc_feature 1..20: note = antisense sequence
  source 1..20: mol_type = other RNA
gacttggttcctgttgtttg

SEQ ID NO: 2877 - RNA, 20 nt, synthetic construct
  misc_feature 1..20: note = antisense sequence
  source 1..20: mol_type = other RNA
agacttggttcctgttgttt

SEQ ID NO: 2878 - RNA, 20 nt, synthetic construct
  misc_feature 1..20: note = antisense sequence
  source 1..20: mol_type = other RNA
atcagacttggttcctgttg

SEQ ID NO: 2879 - RNA, 20 nt, synthetic construct
  misc_feature 1..20: note = antisense sequence
  source 1..20: mol_type = other RNA
tatcagacttggttcctgtt

SEQ ID NO: 2880 - RNA, 20 nt, synthetic construct
  misc_feature 1..20: note = antisense sequence
  source 1..20: mol_type = other RNA
ttatcagacttggttcctgt

SEQ ID NO: 2881 - RNA, 20 nt, synthetic construct
  misc_feature 1..20: note = antisense sequence
  source 1..20: mol_type = other RNA
attatcagacttggttcctg

SEQ ID NO: 2882 - RNA, 20 nt, synthetic construct
  misc_feature 1..20: note = antisense sequence
  source 1..20: mol_type = other RNA
gtattatcagacttggttcc

SEQ ID NO: 2883 - RNA, 20 nt, synthetic construct
  misc_feature 1..20: note = antisense sequence
  source 1..20: mol_type = other RNA
ctatctgagcctctttgcct

SEQ ID NO: 2884 - RNA, 20 nt, synthetic construct
  misc_feature 1..20: note = antisense sequence
  source 1..20: mol_type = other RNA
cctatctgagcctctttgcc

SEQ ID NO: 2885 - RNA, 20 nt, synthetic construct
  misc_feature 1..20: note = antisense sequence
  source 1..20: mol_type = other RNA
tgttcctatctgagcctctt

SEQ ID NO: 2886 - RNA, 20 nt, synthetic construct
  misc_feature 1..20: note = antisense sequence
  source 1..20: mol_type = other RNA
ttgttcctatctgagcctct

SEQ ID NO: 2887 - RNA, 20 nt, synthetic construct
  misc_feature 1..20: note = antisense sequence
  source 1..20: mol_type = other RNA
ctttgttcctatctgagcct

SEQ ID NO: 2888 - RNA, 20 nt, synthetic construct
  misc_feature 1..20: note = antisense sequence
  source 1..20: mol_type = other RNA
ctctttgttcctatctgagc

SEQ ID NO: 2889 - RNA, 20 nt, synthetic construct
  misc_feature 1..20: note = antisense sequence
  source 1..20: mol_type = other RNA
cctctttgttcctatctgag

SEQ ID NO: 2890 - RNA, 20 nt, synthetic construct
  misc_feature 1..20: note = antisense sequence
  source 1..20: mol_type = other RNA
gcagggttctgactgtgcct

SEQ ID NO: 2891 - RNA, 20 nt, synthetic construct
  misc_feature 1..20: note = antisense sequence
  source 1..20: mol_type = other RNA
agcagggttctgactgtgcc

SEQ ID NO: 2892 - RNA, 20 nt, synthetic construct
  misc_feature 1..20: note = antisense sequence
  source 1..20: mol_type = other RNA
tagcagggttctgactgtgc

SEQ ID NO: 2893 - RNA, 20 nt, synthetic construct
  misc_feature 1..20: note = antisense sequence
  source 1..20: mol_type = other RNA
atagcagggttctgactgtg

SEQ ID NO: 2894 - RNA, 20 nt, synthetic construct
  misc_feature 1..20: note = antisense sequence
  source 1..20: mol_type = other RNA
tatagcagggttctgactgt

SEQ ID NO: 2895 - RNA, 20 nt, synthetic construct
  misc_feature 1..20: note = antisense sequence
  source 1..20: mol_type = other RNA
gccttacacaggtgatttct

SEQ ID NO: 2896 - RNA, 20 nt, synthetic construct
  misc_feature 1..20: note = antisense sequence
  source 1..20: mol_type = other RNA
tgccttacacaggtgatttc

SEQ ID NO: 2897 - RNA, 20 nt, synthetic construct
  misc_feature 1..20: note = antisense sequence
  source 1..20: mol_type = other RNA
ttgccttacacaggtgattt

SEQ ID NO: 2898 - RNA, 20 nt, synthetic construct
  misc_feature 1..20: note = antisense sequence
  source 1..20: mol_type = other RNA
attgccttacacaggtgatt

SEQ ID NO: 2899 - RNA, 20 nt, synthetic construct
  misc_feature 1..20: note = antisense sequence
  source 1..20: mol_type = other RNA
cattgccttacacaggtgat

SEQ ID NO: 2900 - RNA, 20 nt, synthetic construct
  misc_feature 1..20: note = antisense sequence
  source 1..20: mol_type = other RNA
gaagctctggttgagtctct

SEQ ID NO: 2901 - RNA, 20 nt, synthetic construct
  misc_feature 1..20: note = antisense sequence
  source 1..20: mol_type = other RNA
agaagctctggttgagtctc

SEQ ID NO: 2902 - RNA, 20 nt, synthetic construct
  misc_feature 1..20: note = antisense sequence
  source 1..20: mol_type = other RNA
ccaatctgattttcacactc

SEQ ID NO: 2903 - RNA, 20 nt, synthetic construct
  misc_feature 1..20: note = antisense sequence
  source 1..20: mol_type = other RNA
gccaatctgattttcacact

SEQ ID NO: 2904 - RNA, 20 nt, synthetic construct
  misc_feature 1..20: note = antisense sequence
  source 1..20: mol_type = other RNA
agccaatctgattttcacac

SEQ ID NO: 2905 - RNA, 20 nt, synthetic construct
  misc_feature 1..20: note = antisense sequence
  source 1..20: mol_type = other RNA
cctttcaatagccaatctga

SEQ ID NO: 2906 - RNA, 20 nt, synthetic construct
  misc_feature 1..20: note = antisense sequence
  source 1..20: mol_type = other RNA
acctttcaatagccaatctg

SEQ ID NO: 2907 - RNA, 20 nt, synthetic construct
  misc_feature 1..20: note = antisense sequence
  source 1..20: mol_type = other RNA
gtgacctttcaatagccaat

SEQ ID NO: 2908 - RNA, 20 nt, synthetic construct
  misc_feature 1..20: note = antisense sequence
  source 1..20: mol_type = other RNA
ctcctggttcatagaatgtg

SEQ ID NO: 2909 - RNA, 20 nt, synthetic construct
  misc_feature 1..20: note = antisense sequence
  source 1..20: mol_type = other RNA
gctcctggttcatagaatgt

SEQ ID NO: 2910 - RNA, 20 nt, synthetic construct
  misc_feature 1..20: note = antisense sequence
  source 1..20: mol_type = other RNA
ctgctcctggttcatagaat

SEQ ID NO: 2911 - RNA, 20 nt, synthetic construct
  misc_feature 1..20: note = antisense sequence
  source 1..20: mol_type = other RNA
cctgctcctggttcatagaa

SEQ ID NO: 2912 - RNA, 20 nt, synthetic construct
  misc_feature 1..20: note = antisense sequence
  source 1..20: mol_type = other RNA
tcctgctcctggttcataga

SEQ ID NO: 2913 - RNA, 20 nt, synthetic construct
  misc_feature 1..20: note = antisense sequence
  source 1..20: mol_type = other RNA
gttatcctgctcctggttca

SEQ ID NO: 2914 - RNA, 20 nt, synthetic construct
  misc_feature 1..20: note = antisense sequence
  source 1..20: mol_type = other RNA
ggagatgtaggcatatagaa

SEQ ID NO: 2915 - RNA, 20 nt, synthetic construct
  misc_feature 1..20: note = antisense sequence
  source 1..20: mol_type = other RNA
aggagatgtaggcatataga

SEQ ID NO: 2916 - RNA, 20 nt, synthetic construct
  misc_feature 1..20: note = antisense sequence
  source 1..20: mol_type = other RNA
gaggagatgtaggcatatag

SEQ ID NO: 2917 - RNA, 20 nt, synthetic construct
  misc_feature 1..20: note = antisense sequence
  source 1..20: mol_type = other RNA
ggaggagatgtaggcatata

SEQ ID NO: 2918 - RNA, 20 nt, synthetic construct
  misc_feature 1..20: note = antisense sequence
  source 1..20: mol_type = other RNA
aggaggagatgtaggcatat

SEQ ID NO: 2919 - RNA, 20 nt, synthetic construct
  misc_feature 1..20: note = antisense sequence
  source 1..20: mol_type = other RNA
atgagaggaggagatgtagg

SEQ ID NO: 2920 - RNA, 20 nt, synthetic construct
  misc_feature 1..20: note = antisense sequence
  source 1..20: mol_type = other RNA
gaatgagaggaggagatgta

SEQ ID NO: 2921 - RNA, 20 nt, synthetic construct
  misc_feature 1..20: note = antisense sequence
  source 1..20: mol_type = other RNA
gatgtgaatgagaggaggag

SEQ ID NO: 2922 - RNA, 20 nt, synthetic construct
  misc_feature 1..20: note = antisense sequence
  source 1..20: mol_type = other RNA
ataggagatgtgaatgagag

SEQ ID NO: 2923 - RNA, 20 nt, synthetic construct
  misc_feature 1..20: note = antisense sequence
  source 1..20: mol_type = other RNA
gggaaggtacataggagatg

SEQ ID NO: 2924 - RNA, 20 nt, synthetic construct
  misc_feature 1..20: note = antisense sequence
  source 1..20: mol_type = other RNA
gctacctagaatccacaaat

SEQ ID NO: 2925 - RNA, 20 nt, synthetic construct
  misc_feature 1..20: note = antisense sequence
  source 1..20: mol_type = other RNA
ttttggctacctagaatcca

SEQ ID NO: 2926 - RNA, 20 nt, synthetic construct
  misc_feature 1..20: note = antisense sequence
  source 1..20: mol_type = other RNA
gttttggctacctagaatcc

SEQ ID NO: 2927 - RNA, 20 nt, synthetic construct
  misc_feature 1..20: note = antisense sequence
  source 1..20: mol_type = other RNA
tgttttggctacctagaatc

SEQ ID NO: 2928 - RNA, 20 nt, synthetic construct
  misc_feature 1..20: note = antisense sequence
  source 1..20: mol_type = other RNA
caatgcaatggctggctttg

SEQ ID NO: 2929 - RNA, 20 nt, synthetic construct
  misc_feature 1..20: note = antisense sequence
  source 1..20: mol_type = other RNA
ccaatgcaatggctggcttt

SEQ ID NO: 2930 - RNA, 20 nt, synthetic construct
  misc_feature 1..20: note = antisense sequence
  source 1..20: mol_type = other RNA
accaatgcaatggctggctt

SEQ ID NO: 2931 - RNA, 20 nt, synthetic construct
  misc_feature 1..20: note = antisense sequence
  source 1..20: mol_type = other RNA
taccaatgcaatggctggct

SEQ ID NO: 2932 - RNA, 20 nt, synthetic construct
  misc_feature 1..20: note = antisense sequence
  source 1..20: mol_type = other RNA
ataccaatgcaatggctggc

SEQ ID NO: 2933 - RNA, 20 nt, synthetic construct
  misc_feature 1..20: note = antisense sequence
  source 1..20: mol_type = other RNA
aataccaatgcaatggctgg

SEQ ID NO: 2934 - RNA, 20 nt, synthetic construct
  misc_feature 1..20: note = antisense sequence
  source 1..20: mol_type = other RNA
taataccaatgcaatggctg

SEQ ID NO: 2935 - RNA, 20 nt, synthetic construct
  misc_feature 1..20: note = antisense sequence
  source 1..20: mol_type = other RNA
ctaataccaatgcaatggct

SEQ ID NO: 2936 - RNA, 20 nt, synthetic construct
  misc_feature 1..20: note = antisense sequence
  source 1..20: mol_type = other RNA
cctaataccaatgcaatggc

SEQ ID NO: 2937 - RNA, 20 nt, synthetic construct
  misc_feature 1..20: note = antisense sequence
  source 1..20: mol_type = other RNA
ccctaataccaatgcaatgg

SEQ ID NO: 2938 - RNA, 20 nt, synthetic construct
  misc_feature 1..20: note = antisense sequence
  source 1..20: mol_type = other RNA
ggtactaataacagcacagt

SEQ ID NO: 2939 - RNA, 20 nt, synthetic construct
  misc_feature 1..20: note = antisense sequence
  source 1..20: mol_type = other RNA
aggtactaataacagcacag

SEQ ID NO: 2940 - RNA, 20 nt, synthetic construct
  misc_feature 1..20: note = antisense sequence
  source 1..20: mol_type = other RNA
gcaaggtactaataacagca

SEQ ID NO: 2941 - RNA, 20 nt, synthetic construct
  misc_feature 1..20: note = antisense sequence
  source 1..20: mol_type = other RNA
tgcaaggtactaataacagc

SEQ ID NO: 2942 - RNA, 20 nt, synthetic construct
  misc_feature 1..20: note = antisense sequence
  source 1..20: mol_type = other RNA
ctgcaaggtactaataacag

SEQ ID NO: 2943 - RNA, 20 nt, synthetic construct
  misc_feature 1..20: note = antisense sequence
  source 1..20: mol_type = other RNA
gactgcaaggtactaataac

SEQ ID NO: 2944 - RNA, 20 nt, synthetic construct
  misc_feature 1..20: note = antisense sequence
  source 1..20: mol_type = other RNA
ctgactgcaaggtactaata

SEQ ID NO: 2945 - RNA, 20 nt, synthetic construct
  misc_feature 1..20: note = antisense sequence
  source 1..20: mol_type = other RNA
tctgactgcaaggtactaat

SEQ ID NO: 2946 - RNA, 20 nt, synthetic construct
  misc_feature 1..20: note = antisense sequence
  source 1..20: mol_type = other RNA
tgaacaatgccagtctgact

SEQ ID NO: 2947 - RNA, 20 nt, synthetic construct
  misc_feature 1..20: note = antisense sequence
  source 1..20: mol_type = other RNA
ttgaacaatgccagtctgac

SEQ ID NO: 2948 - RNA, 20 nt, synthetic construct
  misc_feature 1..20: note = antisense sequence
  source 1..20: mol_type = other RNA
atttgaacaatgccagtctg

SEQ ID NO: 2949 - RNA, 20 nt, synthetic construct
  misc_feature 1..20: note = antisense sequence
  source 1..20: mol_type = other RNA
ggatttgaacaatgccagtc

SEQ ID NO: 2950 - RNA, 20 nt, synthetic construct
  misc_feature 1..20: note = antisense sequence
  source 1..20: mol_type = other RNA
gggatttgaacaatgccagt

SEQ ID NO: 2951 - RNA, 20 nt, synthetic construct
  misc_feature 1..20: note = antisense sequence
  source 1..20: mol_type = other RNA
gctgggatttgaacaatgcc

SEQ ID NO: 2952 - RNA, 20 nt, synthetic construct
  misc_feature 1..20: note = antisense sequence
  source 1..20: mol_type = other RNA
tgtttcttccagcaagtggc

SEQ ID NO: 2953 - RNA, 20 nt, synthetic construct
  misc_feature 1..20: note = antisense sequence
  source 1..20: mol_type = other RNA
gcatgaccattgtttcttcc

SEQ ID NO: 2954 - RNA, 20 nt, synthetic construct
  misc_feature 1..20: note = antisense sequence
  source 1..20: mol_type = other RNA
agcatgaccattgtttcttc

SEQ ID NO: 2955 - RNA, 20 nt, synthetic construct
  misc_feature 1..20: note = antisense sequence
  source 1..20: mol_type = other RNA
ggctcagcatgaccattgtt

SEQ ID NO: 2956 - RNA, 20 nt, synthetic construct
  misc_feature 1..20: note = antisense sequence
  source 1..20: mol_type = other RNA
aggctcagcatgaccattgt

SEQ ID NO: 2957 - RNA, 20 nt, synthetic construct
  misc_feature 1..20: note = antisense sequence
  source 1..20: mol_type = other RNA
caggctcagcatgaccattg

SEQ ID NO: 2958 - RNA, 20 nt, synthetic construct
  misc_feature 1..20: note = antisense sequence
  source 1..20: mol_type = other RNA
ccaggctcagcatgaccatt

SEQ ID NO: 2959 - RNA, 20 nt, synthetic construct
  misc_feature 1..20: note = antisense sequence
  source 1..20: mol_type = other RNA
gtccaggctcagcatgacca

SEQ ID NO: 2960 - RNA, 20 nt, synthetic construct
  misc_feature 1..20: note = antisense sequence
  source 1..20: mol_type = other RNA
tgccagtccaggctcagcat

SEQ ID NO: 2961 - RNA, 20 nt, synthetic construct
  misc_feature 1..20: note = antisense sequence
  source 1..20: mol_type = other RNA
atgtcatcaggatctggagt

SEQ ID NO: 2962 - RNA, 20 nt, synthetic construct
  misc_feature 1..20: note = antisense sequence
  source 1..20: mol_type = other RNA
tatgtcatcaggatctggag

SEQ ID NO: 2963 - RNA, 20 nt, synthetic construct
  misc_feature 1..20: note = antisense sequence
  source 1..20: mol_type = other RNA
atatgtcatcaggatctgga

SEQ ID NO: 2964 - RNA, 20 nt, synthetic construct
  misc_feature 1..20: note = antisense sequence
  source 1..20: mol_type = other RNA
tgggtgacagagcgagactc

SEQ ID NO: 2965 - RNA, 20 nt, synthetic construct
  misc_feature 1..20: note = antisense sequence
  source 1..20: mol_type = other RNA
ctgggtgacagagcgagact

SEQ ID NO: 2966 - RNA, 20 nt, synthetic construct
  misc_feature 1..20: note = antisense sequence
  source 1..20: mol_type = other RNA
actccagcctgggtgacaga

SEQ ID NO: 2967 - RNA, 20 nt, synthetic construct
  misc_feature 1..20: note = antisense sequence
  source 1..20: mol_type = other RNA
tgctgaggttgcagtgagct

SEQ ID NO: 2968 - RNA, 20 nt, synthetic construct
  misc_feature 1..20: note = antisense sequence
  source 1..20: mol_type = other RNA
atgctgaggttgcagtgagc

SEQ ID NO: 2969 - RNA, 20 nt, synthetic construct
  misc_feature 1..20: note = antisense sequence
  source 1..20: mol_type = other RNA
ctgtaatcccagcactttgg

SEQ ID NO: 2970 - RNA, 20 nt, synthetic construct
  misc_feature 1..20: note = antisense sequence
  source 1..20: mol_type = other RNA
cctgtaatcccagcactttg

SEQ ID NO: 2971 - RNA, 20 nt, synthetic construct
  misc_feature 1..20: note = antisense sequence
  source 1..20: mol_type = other RNA
acctgtaatcccagcacttt

SEQ ID NO: 2972 - RNA, 20 nt, synthetic construct
  misc_feature 1..20: note = antisense sequence
  source 1..20: mol_type = other RNA
cacctgtaatcccagcactt

SEQ ID NO: 2973 - RNA, 20 nt, synthetic construct
  misc_feature 1..20: note = antisense sequence
  source 1..20: mol_type = other RNA
acacctgtaatcccagcact

SEQ ID NO: 2974 - RNA, 20 nt, synthetic construct
  misc_feature 1..20: note = antisense sequence
  source 1..20: mol_type = other RNA
cacacctgtaatcccagcac

SEQ ID NO: 2975 - RNA, 20 nt, synthetic construct
  misc_feature 1..20: note = antisense sequence
  source 1..20: mol_type = other RNA
tcacacctgtaatcccagca

SEQ ID NO: 2976 - RNA, 20 nt, synthetic construct
  misc_feature 1..20: note = antisense sequence
  source 1..20: mol_type = other RNA
ctcacacctgtaatcccagc

SEQ ID NO: 2977 - RNA, 20 nt, synthetic construct
  misc_feature 1..20: note = antisense sequence
  source 1..20: mol_type = other RNA
gctcacacctgtaatcccag

SEQ ID NO: 2978 - RNA, 20 nt, synthetic construct
  misc_feature 1..20: note = antisense sequence
  source 1..20: mol_type = other RNA
tgctcacacctgtaatccca

SEQ ID NO: 2979 - RNA, 20 nt, synthetic construct
  misc_feature 1..20: note = antisense sequence
  source 1..20: mol_type = other RNA
gtgctcacacctgtaatccc

SEQ ID NO: 2980 - RNA, 20 nt, synthetic construct
  misc_feature 1..20: note = antisense sequence
  source 1..20: mol_type = other RNA
agtgctcacacctgtaatcc

SEQ ID NO: 2981 - RNA, 20 nt, synthetic construct
  misc_feature 1..20: note = antisense sequence
  source 1..20: mol_type = other RNA
cagtgctcacacctgtaatc

SEQ ID NO: 2982 - RNA, 20 nt, synthetic construct
  misc_feature 1..20: note = antisense sequence
  source 1..20: mol_type = other RNA
aactcattgtgggctcgcac

SEQ ID NO: 2983 - RNA, 20 nt, synthetic construct
  misc_feature 1..20: note = antisense sequence
  source 1..20: mol_type = other RNA
aaactcattgtgggctcgca

SEQ ID NO: 2984 - RNA, 20 nt, synthetic construct
  misc_feature 1..20: note = antisense sequence
  source 1..20: mol_type = other RNA
aaaactcattgtgggctcgc

SEQ ID NO: 2985 - RNA, 20 nt, synthetic construct
  misc_feature 1..20: note = antisense sequence
  source 1..20: mol_type = other RNA
ctgatgaggaacagtaagtg

SEQ ID NO: 2986 - RNA, 20 nt, synthetic construct
  misc_feature 1..20: note = antisense sequence
  source 1..20: mol_type = other RNA
ctctgatgaggaacagtaag

SEQ ID NO: 2987 - RNA, 20 nt, synthetic construct
  misc_feature 1..20: note = antisense sequence
  source 1..20: mol_type = other RNA
tctctgatgaggaacagtaa

SEQ ID NO: 2988 - RNA, 20 nt, synthetic construct
  misc_feature 1..20: note = antisense sequence
  source 1..20: mol_type = other RNA
atctctgatgaggaacagta

SEQ ID NO: 2989 - RNA, 20 nt, synthetic construct
  misc_feature 1..20: note = antisense sequence
  source 1..20: mol_type = other RNA
tcctaacaaattggcatctc

SEQ ID NO: 2990 - RNA, 20 nt, synthetic construct
  misc_feature 1..20: note = antisense sequence
  source 1..20: mol_type = other RNA
aagcctgaaagggatgcact

SEQ ID NO: 2991 - RNA, 20 nt, synthetic construct
  misc_feature 1..20: note = antisense sequence
  source 1..20: mol_type = other RNA
gaagcctgaaagggatgcac

SEQ ID NO: 2992 - RNA, 20 nt, synthetic construct
  misc_feature 1..20: note = antisense sequence
  source 1..20: mol_type = other RNA
atgaagcctgaaagggatgc

SEQ ID NO: 2993 - RNA, 20 nt, synthetic construct
  misc_feature 1..20: note = antisense sequence
  source 1..20: mol_type = other RNA
tatgaagcctgaaagggatg

SEQ ID NO: 2994 - RNA, 20 nt, synthetic construct
  misc_feature 1..20: note = antisense sequence
  source 1..20: mol_type = other RNA
cagatatgaagcctgaaagg

SEQ ID NO: 2995 - RNA, 20 nt, synthetic construct
  misc_feature 1..20: note = antisense sequence
  source 1..20: mol_type = other RNA
gcagatatgaagcctgaaag

SEQ ID NO: 2996 - RNA, 20 nt, synthetic construct
  misc_feature 1..20: note = antisense sequence
  source 1..20: mol_type = other RNA
gaagccaggtttaaggtaat

SEQ ID NO: 2997 - RNA, 20 nt, synthetic construct
  misc_feature 1..20: note = antisense sequence
  source 1..20: mol_type = other RNA
tgaagccaggtttaaggtaa

SEQ ID NO: 2998 - RNA, 20 nt, synthetic construct
  misc_feature 1..20: note = antisense sequence
  source 1..20: mol_type = other RNA
ctgaagccaggtttaaggta

SEQ ID NO: 2999 - RNA, 20 nt, synthetic construct
  misc_feature 1..20: note = antisense sequence
  source 1..20: mol_type = other RNA
gggcagatacctgttcaaat

SEQ ID NO: 3000 - RNA, 20 nt, synthetic construct
  misc_feature 1..20: note = antisense sequence
  source 1..20: mol_type = other RNA
tgggcagatacctgttcaaa

SEQ ID NO: 3001 - RNA, 20 nt, synthetic construct
  misc_feature 1..20: note = antisense sequence
  source 1..20: mol_type = other RNA
tgttgggcagatacctgttc

SEQ ID NO: 3002 - RNA, 20 nt, synthetic construct
  misc_feature 1..20: note = antisense sequence
  source 1..20: mol_type = other RNA
ttgttgggcagatacctgtt

SEQ ID NO: 3003 - RNA, 20 nt, synthetic construct
  misc_feature 1..20: note = antisense sequence
  source 1..20: mol_type = other RNA
attgttgggcagatacctgt

SEQ ID NO: 3004 - RNA, 20 nt, synthetic construct
  misc_feature 1..20: note = antisense sequence
  source 1..20: mol_type = other RNA
gattgttgggcagatacctg

SEQ ID NO: 3005 - RNA, 20 nt, synthetic construct
  misc_feature 1..20: note = antisense sequence
  source 1..20: mol_type = other RNA
tgattgttgggcagatacct

SEQ ID NO: 3006 - RNA, 20 nt, synthetic construct
  misc_feature 1..20: note = antisense sequence
  source 1..20: mol_type = other RNA
ctgattgttgggcagatacc

SEQ ID NO: 3007 - RNA, 20 nt, synthetic construct
  misc_feature 1..20: note = antisense sequence
  source 1..20: mol_type = other RNA
tctctctgattgttgggcag

SEQ ID NO: 3008 - RNA, 20 nt, synthetic construct
  misc_feature 1..20: note = antisense sequence
  source 1..20: mol_type = other RNA
attctctctgattgttgggc

SEQ ID NO: 3009 - RNA, 20 nt, synthetic construct
  misc_feature 1..20: note = antisense sequence
  source 1..20: mol_type = other RNA
aggtgcagaggactaattct

SEQ ID NO: 3010 - RNA, 20 nt, synthetic construct
  misc_feature 1..20: note = antisense sequence
  source 1..20: mol_type = other RNA
aaggtgcagaggactaattc

SEQ ID NO: 3011 - RNA, 20 nt, synthetic construct
  misc_feature 1..20: note = antisense sequence
  source 1..20: mol_type = other RNA
gaaggtgcagaggactaatt

SEQ ID NO: 3012 - RNA, 20 nt, synthetic construct
  misc_feature 1..20: note = antisense sequence
  source 1..20: mol_type = other RNA
agaaggtgcagaggactaat

SEQ ID NO: 3013 - RNA, 20 nt, synthetic construct
  misc_feature 1..20: note = antisense sequence
  source 1..20: mol_type = other RNA
ctcagaaggtgcagaggact

SEQ ID NO: 3014 - RNA, 20 nt, synthetic construct
  misc_feature 1..20: note = antisense sequence
  source 1..20: mol_type = other RNA
gggtctgtagaaactgagtt

SEQ ID NO: 3015 - RNA, 20 nt, synthetic construct
  misc_feature 1..20: note = antisense sequence
  source 1..20: mol_type = other RNA
ctgggtctgtagaaactgag

SEQ ID NO: 3016 - RNA, 20 nt, synthetic construct
  misc_feature 1..20: note = antisense sequence
  source 1..20: mol_type = other RNA
ccctgggtctgtagaaactg

SEQ ID NO: 3017 - RNA, 20 nt, synthetic construct
  misc_feature 1..20: note = antisense sequence
  source 1..20: mol_type = other RNA
gccctgggtctgtagaaact

SEQ ID NO: 3018 - RNA, 20 nt, synthetic construct
  misc_feature 1..20: note = antisense sequence
  source 1..20: mol_type = other RNA
agccctgggtctgtagaaac

SEQ ID NO: 3019 - RNA, 20 nt, synthetic construct
  misc_feature 1..20: note = antisense sequence
  source 1..20: mol_type = other RNA
aagccctgggtctgtagaaa

SEQ ID NO: 3020 - RNA, 20 nt, synthetic construct
  misc_feature 1..20: note = antisense sequence
  source 1..20: mol_type = other RNA
gaagccctgggtctgtagaa

SEQ ID NO: 3021 - RNA, 20 nt, synthetic construct
  misc_feature 1..20: note = antisense sequence
  source 1..20: mol_type = other RNA
tataagtggcctgaggtaac

SEQ ID NO: 3022 - RNA, 20 nt, synthetic construct
  misc_feature 1..20: note = antisense sequence
  source 1..20: mol_type = other RNA
gatataagtggcctgaggta

SEQ ID NO: 3023 - RNA, 20 nt, synthetic construct
  misc_feature 1..20: note = antisense sequence
  source 1..20: mol_type = other RNA
agatataagtggcctgaggt

SEQ ID NO: 3024 - RNA, 20 nt, synthetic construct
  misc_feature 1..20: note = antisense sequence
  source 1..20: mol_type = other RNA
gagatataagtggcctgagg

SEQ ID NO: 3025 - RNA, 20 nt, synthetic construct
  misc_feature 1..20: note = antisense sequence
  source 1..20: mol_type = other RNA
agagatataagtggcctgag

SEQ ID NO: 3026 - RNA, 20 nt, synthetic construct
  misc_feature 1..20: note = antisense sequence
  source 1..20: mol_type = other RNA
aagagatataagtggcctga

SEQ ID NO: 3027 - RNA, 20 nt, synthetic construct
  misc_feature 1..20: note = antisense sequence
  source 1..20: mol_type = other RNA
taagagatataagtggcctg

SEQ ID NO: 3028 - RNA, 20 nt, synthetic construct
  misc_feature 1..20: note = antisense sequence
  source 1..20: mol_type = other RNA
gataagagatataagtggcc

SEQ ID NO: 3029 - RNA, 20 nt, synthetic construct
  misc_feature 1..20: note = antisense sequence
  source 1..20: mol_type = other RNA
tcagctaaggaaaagcacag

SEQ ID NO: 3030 - RNA, 20 nt, synthetic construct
  misc_feature 1..20: note = antisense sequence
  source 1..20: mol_type = other RNA
aatgtcagctaaggaaaagc

SEQ ID NO: 3031 - RNA, 20 nt, synthetic construct
  misc_feature 1..20: note = antisense sequence
  source 1..20: mol_type = other RNA
gaaccaaatgtcagctaagg

SEQ ID NO: 3032 - RNA, 20 nt, synthetic construct
  misc_feature 1..20: note = antisense sequence
  source 1..20: mol_type = other RNA
ctagaaccaaatgtcagcta

SEQ ID NO: 3033 - RNA, 20 nt, synthetic construct
  misc_feature 1..20: note = antisense sequence
  source 1..20: mol_type = other RNA
aagacaagtgtgtgttggga

SEQ ID NO: 3034 - RNA, 20 nt, synthetic construct
  misc_feature 1..20: note = antisense sequence
  source 1..20: mol_type = other RNA
aaagacaagtgtgtgttggg

SEQ ID NO: 3035 - RNA, 20 nt, synthetic construct
  misc_feature 1..20: note = antisense sequence
  source 1..20: mol_type = other RNA
taaagacaagtgtgtgttgg

SEQ ID NO: 3036 - RNA, 20 nt, synthetic construct
  misc_feature 1..20: note = antisense sequence
  source 1..20: mol_type = other RNA
ctaaagacaagtgtgtgttg

SEQ ID NO: 3037 - RNA, 20 nt, synthetic construct
  misc_feature 1..20: note = antisense sequence
  source 1..20: mol_type = other RNA
aggctaaagacaagtgtgtg

SEQ ID NO: 3038 - RNA, 20 nt, synthetic construct
  misc_feature 1..20: note = antisense sequence
  source 1..20: mol_type = other RNA
taggctaaagacaagtgtgt

SEQ ID NO: 3039 - RNA, 20 nt, synthetic construct
  misc_feature 1..20: note = antisense sequence
  source 1..20: mol_type = other RNA
ttaggctaaagacaagtgtg

SEQ ID NO: 3040 - RNA, 20 nt, synthetic construct
  misc_feature 1..20: note = antisense sequence
  source 1..20: mol_type = other RNA
cctcctcttccatacttgaa

SEQ ID NO: 3041 - RNA, 20 nt, synthetic construct
  misc_feature 1..20: note = antisense sequence
  source 1..20: mol_type = other RNA
cagcaggaaatctggatata

SEQ ID NO: 3042 - RNA, 20 nt, synthetic construct
  misc_feature 1..20: note = antisense sequence
  source 1..20: mol_type = other RNA
ttggtgcccagcaggaaatc

SEQ ID NO: 3043 - RNA, 20 nt, synthetic construct
  misc_feature 1..20: note = antisense sequence
  source 1..20: mol_type = other RNA
ttggcctaccctgcttagca

SEQ ID NO: 3044 - RNA, 20 nt, synthetic construct
  misc_feature 1..20: note = antisense sequence
  source 1..20: mol_type = other RNA
ttttggcctaccctgcttag

SEQ ID NO: 3045 - RNA, 20 nt, synthetic construct
  misc_feature 1..20: note = antisense sequence
  source 1..20: mol_type = other RNA
aaccgtggtggatcttgttt

SEQ ID NO: 3046 - RNA, 20 nt, synthetic construct
  misc_feature 1..20: note = antisense sequence
  source 1..20: mol_type = other RNA
aaaccgtggtggatcttgtt

SEQ ID NO: 3047 - RNA, 20 nt, synthetic construct
  misc_feature 1..20: note = antisense sequence
  source 1..20: mol_type = other RNA
aaaaccgtggtggatcttgt

SEQ ID NO: 3048 - RNA, 20 nt, synthetic construct
  misc_feature 1..20: note = antisense sequence
  source 1..20: mol_type = other RNA
ttaactttggctcacctcca

SEQ ID NO: 3049 - RNA, 20 nt, synthetic construct
  misc_feature 1..20: note = antisense sequence
  source 1..20: mol_type = other RNA
tttaactttggctcacctcc

SEQ ID NO: 3050 - RNA, 20 nt, synthetic construct
  misc_feature 1..20: note = antisense sequence
  source 1..20: mol_type = other RNA
cccaaaacctagcaacccta

SEQ ID NO: 3051 - RNA, 20 nt, synthetic construct
  misc_feature 1..20: note = antisense sequence
  source 1..20: mol_type = other RNA
tcccaaaacctagcaaccct

SEQ ID NO: 3052 - RNA, 20 nt, synthetic construct
  misc_feature 1..20: note = antisense sequence
  source 1..20: mol_type = other RNA
ctcccaaaacctagcaaccc

SEQ ID NO: 3053 - RNA, 20 nt, synthetic construct
  misc_feature 1..20: note = antisense sequence
  source 1..20: mol_type = other RNA
gctcccaaaacctagcaacc

SEQ ID NO: 3054 - RNA, 20 nt, synthetic construct
  misc_feature 1..20: note = antisense sequence
  source 1..20: mol_type = other RNA
ggctcccaaaacctagcaac

SEQ ID NO: 3055 - RNA, 20 nt, synthetic construct
  misc_feature 1..20: note = antisense sequence
  source 1..20: mol_type = other RNA
aggctcccaaaacctagcaa

SEQ ID NO: 3056 - RNA, 20 nt, synthetic construct
  misc_feature 1..20: note = antisense sequence
  source 1..20: mol_type = other RNA
ccaggctcccaaaacctagc

SEQ ID NO: 3057 - RNA, 20 nt, synthetic construct
  misc_feature 1..20: note = antisense sequence
  source 1..20: mol_type = other RNA
cccaggctcccaaaacctag

SEQ ID NO: 3058 - RNA, 20 nt, synthetic construct
  misc_feature 1..20: note = antisense sequence
  source 1..20: mol_type = other RNA
gttgctagatactcagttac

SEQ ID NO: 3059 - RNA, 20 nt, synthetic construct
  misc_feature 1..20: note = antisense sequence
  source 1..20: mol_type = other RNA
gggagtaggaaagttgaata

SEQ ID NO: 3060 - RNA, 20 nt, synthetic construct
  misc_feature 1..20: note = antisense sequence
  source 1..20: mol_type = other RNA
aacatctacccaggcaaaga

SEQ ID NO: 3061 - RNA, 20 nt, synthetic construct
  misc_feature 1..20: note = antisense sequence
  source 1..20: mol_type = other RNA
caacatctacccaggcaaag

SEQ ID NO: 3062 - RNA, 20 nt, synthetic construct
  misc_feature 1..20: note = antisense sequence
  source 1..20: mol_type = other RNA
ccaacatctacccaggcaaa

SEQ ID NO: 3063 - RNA, 20 nt, synthetic construct
  misc_feature 1..20: note = antisense sequence
  source 1..20: mol_type = other RNA
tcccaacatctacccaggca

SEQ ID NO: 3064 - RNA, 20 nt, synthetic construct
  misc_feature 1..20: note = antisense sequence
  source 1..20: mol_type = other RNA
ctcccaacatctacccaggc

SEQ ID NO: 3065 - RNA, 20 nt, synthetic construct
  misc_feature 1..20: note = antisense sequence
  source 1..20: mol_type = other RNA
gctcctcccaacatctaccc

SEQ ID NO: 3066 - RNA, 20 nt, synthetic construct
  misc_feature 1..20: note = antisense sequence
  source 1..20: mol_type = other RNA
ggctcctcccaacatctacc

SEQ ID NO: 3067 - RNA, 20 nt, synthetic construct
  misc_feature 1..20: note = antisense sequence
  source 1..20: mol_type = other RNA
ccaggctcctcccaacatct

SEQ ID NO: 3068 - RNA, 20 nt, synthetic construct
  misc_feature 1..20: note = antisense sequence
  source 1..20: mol_type = other RNA
aatacattcaccaggctcct

SEQ ID NO: 3069 - RNA, 20 nt, synthetic construct
  misc_feature 1..20: note = antisense sequence
  source 1..20: mol_type = other RNA
gaatacattcaccaggctcc

SEQ ID NO: 3070 - RNA, 20 nt, synthetic construct
  misc_feature 1..20: note = antisense sequence
  source 1..20: mol_type = other RNA
ggaatacattcaccaggctc

SEQ ID NO: 3071 - RNA, 20 nt, synthetic construct
  misc_feature 1..20: note = antisense sequence
  source 1..20: mol_type = other RNA
aggaatacattcaccaggct

SEQ ID NO: 3072 - RNA, 20 nt, synthetic construct
  misc_feature 1..20: note = antisense sequence
  source 1..20: mol_type = other RNA
aaggaatacattcaccaggc

SEQ ID NO: 3073 - RNA, 20 nt, synthetic construct
  misc_feature 1..20: note = antisense sequence
  source 1..20: mol_type = other RNA
gaaggaatacattcaccagg

SEQ ID NO: 3074 - RNA, 20 nt, synthetic construct
  misc_feature 1..20: note = antisense sequence
  source 1..20: mol_type = other RNA
caagaccaatcctgggaagg

SEQ ID NO: 3075 - RNA, 20 nt, synthetic construct
  misc_feature 1..20: note = antisense sequence
  source 1..20: mol_type = other RNA
gagccaagaccaatcctggg

SEQ ID NO: 3076 - RNA, 20 nt, synthetic construct
  misc_feature 1..20: note = antisense sequence
  source 1..20: mol_type = other RNA
tagagccaagaccaatcctg

SEQ ID NO: 3077 - RNA, 20 nt, synthetic construct
  misc_feature 1..20: note = antisense sequence
  source 1..20: mol_type = other RNA
ctagagccaagaccaatcct

SEQ ID NO: 3078 - RNA, 20 nt, synthetic construct
  misc_feature 1..20: note = antisense sequence
  source 1..20: mol_type = other RNA
agaactagagccaagaccaa

SEQ ID NO: 3079 - RNA, 20 nt, synthetic construct
  misc_feature 1..20: note = antisense sequence
  source 1..20: mol_type = other RNA
ccagaactagagccaagacc

SEQ ID NO: 3080 - RNA, 20 nt, synthetic construct
  misc_feature 1..20: note = antisense sequence
  source 1..20: mol_type = other RNA
tccagaactagagccaagac

SEQ ID NO: 3081 - RNA, 20 nt, synthetic construct
  misc_feature 1..20: note = antisense sequence
  source 1..20: mol_type = other RNA
acagaggctccagaactaga

SEQ ID NO: 3082 - RNA, 20 nt, synthetic construct
  misc_feature 1..20: note = antisense sequence
  source 1..20: mol_type = other RNA
ccaacagaggctccagaact

SEQ ID NO: 3083 - RNA, 20 nt, synthetic construct
  misc_feature 1..20: note = antisense sequence
  source 1..20: mol_type = other RNA
ttcttccaacagaggctcca

SEQ ID NO: 3084 - RNA, 20 nt, synthetic construct
  misc_feature 1..20: note = antisense sequence
  source 1..20: mol_type = other RNA
attcttccaacagaggctcc

SEQ ID NO: 3085 - RNA, 20 nt, synthetic construct
  misc_feature 1..20: note = antisense sequence
  source 1..20: mol_type = other RNA
ccttctccattcttccaaca

SEQ ID NO: 3086 - RNA, 20 nt, synthetic construct
  misc_feature 1..20: note = antisense sequence
  source 1..20: mol_type = other RNA
caaacatagggaaggagatc

SEQ ID NO: 3087 - RNA, 20 nt, synthetic construct
  misc_feature 1..20: note = antisense sequence
  source 1..20: mol_type = other RNA
ccttagaccagtgttttcca

SEQ ID NO: 3088 - RNA, 20 nt, synthetic construct
  misc_feature 1..20: note = antisense sequence
  source 1..20: mol_type = other RNA
gccttagaccagtgttttcc

SEQ ID NO: 3089 - RNA, 20 nt, synthetic construct
  misc_feature 1..20: note = antisense sequence
  source 1..20: mol_type = other RNA
agccttagaccagtgttttc

SEQ ID NO: 3090 - RNA, 20 nt, synthetic construct
  misc_feature 1..20: note = antisense sequence
  source 1..20: mol_type = other RNA
aagccttagaccagtgtttt

SEQ ID NO: 3091 - RNA, 20 nt, synthetic construct
  misc_feature 1..20: note = antisense sequence
  source 1..20: mol_type = other RNA
aaagccttagaccagtgttt

SEQ ID NO: 3092 - RNA, 20 nt, synthetic construct
  misc_feature 1..20: note = antisense sequence
  source 1..20: mol_type = other RNA
gttgaaagccttagaccagt

SEQ ID NO: 3093 - RNA, 20 nt, synthetic construct
  misc_feature 1..20: note = antisense sequence
  source 1..20: mol_type = other RNA
attgttgaaagccttagacc

SEQ ID NO: 3094 - RNA, 20 nt, synthetic construct
  misc_feature 1..20: note = antisense sequence
  source 1..20: mol_type = other RNA
gctattgttgaaagccttag

SEQ ID NO: 3095 - RNA, 20 nt, synthetic construct
  misc_feature 1..20: note = antisense sequence
  source 1..20: mol_type = other RNA
caacccaactactattactg

SEQ ID NO: 3096 - RNA, 20 nt, synthetic construct
  misc_feature 1..20: note = antisense sequence
  source 1..20: mol_type = other RNA
cacaacccaactactattac

SEQ ID NO: 3097 - RNA, 20 nt, synthetic construct
  misc_feature 1..20: note = antisense sequence
  source 1..20: mol_type = other RNA
catcacaacccaactactat

SEQ ID NO: 3098 - RNA, 20 nt, synthetic construct
  misc_feature 1..20: note = antisense sequence
  source 1..20: mol_type = other RNA
ttgcatcacaacccaactac

SEQ ID NO: 3099 - RNA, 20 nt, synthetic construct
  misc_feature 1..20: note = antisense sequence
  source 1..20: mol_type = other RNA
attgcatcacaacccaacta

SEQ ID NO: 3100 - RNA, 20 nt, synthetic construct
  misc_feature 1..20: note = antisense sequence
  source 1..20: mol_type = other RNA
caaattgcatcacaacccaa

SEQ ID NO: 3101 - RNA, 20 nt, synthetic construct
  misc_feature 1..20: note = antisense sequence
  source 1..20: mol_type = other RNA
atcaaattgcatcacaaccc

SEQ ID NO: 3102 - RNA, 20 nt, synthetic construct
  misc_feature 1..20: note = antisense sequence
  source 1..20: mol_type = other RNA
actactgtctccctgctgta

SEQ ID NO: 3103 - RNA, 20 nt, synthetic construct
  misc_feature 1..20: note = antisense sequence
  source 1..20: mol_type = other RNA
ttactactgtctccctgctg

SEQ ID NO: 3104 - RNA, 20 nt, synthetic construct
  misc_feature 1..20: note = antisense sequence
  source 1..20: mol_type = other RNA
ctacttactactgtctccct

SEQ ID NO: 3105 - RNA, 20 nt, synthetic construct
  misc_feature 1..20: note = antisense sequence
  source 1..20: mol_type = other RNA
actacttactactgtctccc

SEQ ID NO: 3106 - RNA, 20 nt, synthetic construct
  misc_feature 1..20: note = antisense sequence
  source 1..20: mol_type = other RNA
cactacttactactgtctcc

SEQ ID NO: 3107 - RNA, 20 nt, synthetic construct
  misc_feature 1..20: note = antisense sequence
  source 1..20: mol_type = other RNA
ccactacttactactgtctc

SEQ ID NO: 3108 - RNA, 20 nt, synthetic construct
  misc_feature 1..20: note = antisense sequence
  source 1..20: mol_type = other RNA
gccactacttactactgtct

SEQ ID NO: 3109 - RNA, 20 nt, synthetic construct
  misc_feature 1..20: note = antisense sequence
  source 1..20: mol_type = other RNA
agccactacttactactgtc

SEQ ID NO: 3110 - RNA, 20 nt, synthetic construct
  misc_feature 1..20: note = antisense sequence
  source 1..20: mol_type = other RNA
tagccactacttactactgt

SEQ ID NO: 3111 - RNA, 20 nt, synthetic construct
  misc_feature 1..20: note = antisense sequence
  source 1..20: mol_type = other RNA
ttagccactacttactactg

SEQ ID NO: 3112 - RNA, 20 nt, synthetic construct
  misc_feature 1..20: note = antisense sequence
  source 1..20: mol_type = other RNA
cttagccactacttactact

SEQ ID NO: 3113 - RNA, 20 nt, synthetic construct
  misc_feature 1..20: note = antisense sequence
  source 1..20: mol_type = other RNA
ccttagccactacttactac

SEQ ID NO: 3114 - RNA, 20 nt, synthetic construct
  misc_feature 1..20: note = antisense sequence
  source 1..20: mol_type = other RNA
gtaattccacagcctttccc

SEQ ID NO: 3115 - RNA, 20 nt, synthetic construct
  misc_feature 1..20: note = antisense sequence
  source 1..20: mol_type = other RNA
ggtgtaattccacagccttt

SEQ ID NO: 3116 - RNA, 20 nt, synthetic construct
  misc_feature 1..20: note = antisense sequence
  source 1..20: mol_type = other RNA
actcaggtggtgtaattcca

SEQ ID NO: 3117 - RNA, 20 nt, synthetic construct
  misc_feature 1..20: note = antisense sequence
  source 1..20: mol_type = other RNA
gactcaggtggtgtaattcc

SEQ ID NO: 3118 - RNA, 20 nt, synthetic construct
  misc_feature 1..20: note = antisense sequence
  source 1..20: mol_type = other RNA
tagactcaggtggtgtaatt

SEQ ID NO: 3119 - RNA, 20 nt, synthetic construct
  misc_feature 1..20: note = antisense sequence
  source 1..20: mol_type = other RNA
ttagactcaggtggtgtaat

SEQ ID NO: 3120 - RNA, 20 nt, synthetic construct
  misc_feature 1..20: note = antisense sequence
  source 1..20: mol_type = other RNA
attagactcaggtggtgtaa

SEQ ID NO: 3121 - RNA, 20 nt, synthetic construct
  misc_feature 1..20: note = antisense sequence
  source 1..20: mol_type = other RNA
tattagactcaggtggtgta

SEQ ID NO: 3122 - RNA, 20 nt, synthetic construct
  misc_feature 1..20: note = antisense sequence
  source 1..20: mol_type = other RNA
agatattagactcaggtggt

SEQ ID NO: 3123 - RNA, 20 nt, synthetic construct
  misc_feature 1..20: note = antisense sequence
  source 1..20: mol_type = other RNA
tagatattagactcaggtgg

SEQ ID NO: 3124 - RNA, 20 nt, synthetic construct
  misc_feature 1..20: note = antisense sequence
  source 1..20: mol_type = other RNA
gtcacctcaataatcagtgt

SEQ ID NO: 3125 - RNA, 20 nt, synthetic construct
  misc_feature 1..20: note = antisense sequence
  source 1..20: mol_type = other RNA
agtcacctcaataatcagtg

SEQ ID NO: 3126 - RNA, 20 nt, synthetic construct
  misc_feature 1..20: note = antisense sequence
  source 1..20: mol_type = other RNA
cttcagtaagtcacctcaat

SEQ ID NO: 3127 - RNA, 20 nt, synthetic construct
  misc_feature 1..20: note = antisense sequence
  source 1..20: mol_type = other RNA
cttagtttgcaggtgaggaa

SEQ ID NO: 3128 - RNA, 20 nt, synthetic construct
  misc_feature 1..20: note = antisense sequence
  source 1..20: mol_type = other RNA
acttagtttgcaggtgagga

SEQ ID NO: 3129 - RNA, 20 nt, synthetic construct
  misc_feature 1..20: note = antisense sequence
  source 1..20: mol_type = other RNA
aacttagtttgcaggtgagg

SEQ ID NO: 3130 - RNA, 20 nt, synthetic construct
  misc_feature 1..20: note = antisense sequence
  source 1..20: mol_type = other RNA
tgtaacttagtttgcaggtg

SEQ ID NO: 3131 - RNA, 20 nt, synthetic construct
  misc_feature 1..20: note = antisense sequence
  source 1..20: mol_type = other RNA
gagcattactctggaccagg

SEQ ID NO: 3132 - RNA, 20 nt, synthetic construct
  misc_feature 1..20: note = antisense sequence
  source 1..20: mol_type = other RNA
ttggagcattactctggacc

SEQ ID NO: 3133 - RNA, 20 nt, synthetic construct
  misc_feature 1..20: note = antisense sequence
  source 1..20: mol_type = other RNA
tttggagcattactctggac

SEQ ID NO: 3134 - RNA, 20 nt, synthetic construct
  misc_feature 1..20: note = antisense sequence
  source 1..20: mol_type = other RNA
gtttggagcattactctgga

SEQ ID NO: 3135 - RNA, 20 nt, synthetic construct
  misc_feature 1..20: note = antisense sequence
  source 1..20: mol_type = other RNA
tgtttggagcattactctgg

SEQ ID NO: 3136 - RNA, 20 nt, synthetic construct
  misc_feature 1..20: note = antisense sequence
  source 1..20: mol_type = other RNA
atgtttggagcattactctg

SEQ ID NO: 3137 - RNA, 20 nt, synthetic construct
  misc_feature 1..20: note = antisense sequence
  source 1..20: mol_type = other RNA
gctcgatgtgcatggatata

SEQ ID NO: 3138 - RNA, 20 nt, synthetic construct
  misc_feature 1..20: note = antisense sequence
  source 1..20: mol_type = other RNA
tgctcgatgtgcatggatat

SEQ ID NO: 3139 - RNA, 20 nt, synthetic construct
  misc_feature 1..20: note = antisense sequence
  source 1..20: mol_type = other RNA
ggcatattggtttcctttct

SEQ ID NO: 3140 - RNA, 20 nt, synthetic construct
  misc_feature 1..20: note = antisense sequence
  source 1..20: mol_type = other RNA
tctgctggcatattggtttc

SEQ ID NO: 3141 - RNA, 20 nt, synthetic construct
  misc_feature 1..20: note = antisense sequence
  source 1..20: mol_type = other RNA
gtgactgtgagtggctaaca

SEQ ID NO: 3142 - RNA, 20 nt, synthetic construct
  misc_feature 1..20: note = antisense sequence
  source 1..20: mol_type = other RNA
tgtgactgtgagtggctaac

SEQ ID NO: 3143 - RNA, 20 nt, synthetic construct
  misc_feature 1..20: note = antisense sequence
  source 1..20: mol_type = other RNA
ctgtgactgtgagtggctaa

SEQ ID NO: 3144 - RNA, 20 nt, synthetic construct
  misc_feature 1..20: note = antisense sequence
  source 1..20: mol_type = other RNA
cctgtgactgtgagtggcta

SEQ ID NO: 3145 - RNA, 20 nt, synthetic construct
  misc_feature 1..20: note = antisense sequence
  source 1..20: mol_type = other RNA
taaacctgtgactgtgagtg

SEQ ID NO: 3146 - RNA, 20 nt, synthetic construct
  misc_feature 1..20: note = antisense sequence
  source 1..20: mol_type = other RNA
tccctccctaagaatgaaaa

SEQ ID NO: 3147 - RNA, 20 nt, synthetic construct
  misc_feature 1..20: note = antisense sequence
  source 1..20: mol_type = other RNA
atccctccctaagaatgaaa

SEQ ID NO: 3148 - RNA, 20 nt, synthetic construct
  misc_feature 1..20: note = antisense sequence
  source 1..20: mol_type = other RNA
tatccctccctaagaatgaa

SEQ ID NO: 3149 - RNA, 20 nt, synthetic construct
  misc_feature 1..20: note = antisense sequence
  source 1..20: mol_type = other RNA
ctatccctccctaagaatga

SEQ ID NO: 3150 - RNA, 20 nt, synthetic construct
  misc_feature 1..20: note = antisense sequence
  source 1..20: mol_type = other RNA
cctatccctccctaagaatg

SEQ ID NO: 3151 - RNA, 20 nt, synthetic construct
  misc_feature 1..20: note = antisense sequence
  source 1..20: mol_type = other RNA
tccctatccctccctaagaa

SEQ ID NO: 3152 - RNA, 20 nt, synthetic construct
  misc_feature 1..20: note = antisense sequence
  source 1..20: mol_type = other RNA
cctccctatccctccctaag

SEQ ID NO: 3153 - RNA, 20 nt, synthetic construct
  misc_feature 1..20: note = antisense sequence
  source 1..20: mol_type = other RNA
caaaatgtccattcagtagc

SEQ ID NO: 3154 - RNA, 20 nt, synthetic construct
  misc_feature 1..20: note = antisense sequence
  source 1..20: mol_type = other RNA
cttcagcctgtgagtgagct

SEQ ID NO: 3155 - RNA, 20 nt, synthetic construct
  misc_feature 1..20: note = antisense sequence
  source 1..20: mol_type = other RNA
ctccttcagcctgtgagtga

SEQ ID NO: 3156 - RNA, 20 nt, synthetic construct
  misc_feature 1..20: note = antisense sequence
  source 1..20: mol_type = other RNA
tccacactccttcagcctgt

SEQ ID NO: 3157 - RNA, 20 nt, synthetic construct
  misc_feature 1..20: note = antisense sequence
  source 1..20: mol_type = other RNA
tattccacactccttcagcc

SEQ ID NO: 3158 - RNA, 20 nt, synthetic construct
  misc_feature 1..20: note = antisense sequence
  source 1..20: mol_type = other RNA
ctattccacactccttcagc

SEQ ID NO: 3159 - RNA, 20 nt, synthetic construct
  misc_feature 1..20: note = antisense sequence
  source 1..20: mol_type = other RNA
cctattccacactccttcag

SEQ ID NO: 3160 - RNA, 20 nt, synthetic construct
  misc_feature 1..20: note = antisense sequence
  source 1..20: mol_type = other RNA
acctattccacactccttca

SEQ ID NO: 3161 - RNA, 20 nt, synthetic construct
  misc_feature 1..20: note = antisense sequence
  source 1..20: mol_type = other RNA
gacctattccacactccttc

SEQ ID NO: 3162 - RNA, 20 nt, synthetic construct
  misc_feature 1..20: note = antisense sequence
  source 1..20: mol_type = other RNA
ggacctattccacactcctt

SEQ ID NO: 3163 - RNA, 20 nt, synthetic construct
  misc_feature 1..20: note = antisense sequence
  source 1..20: mol_type = other RNA
gctaatggtggacctattcc

SEQ ID NO: 3164 - RNA, 20 nt, synthetic construct
  misc_feature 1..20: note = antisense sequence
  source 1..20: mol_type = other RNA
agctaatggtggacctattc

SEQ ID NO: 3165 - RNA, 20 nt, synthetic construct
  misc_feature 1..20: note = antisense sequence
  source 1..20: mol_type = other RNA
ccaaccctctggatatggcc

SEQ ID NO: 3166 - RNA, 20 nt, synthetic construct
  misc_feature 1..20: note = antisense sequence
  source 1..20: mol_type = other RNA
agacctgctccaaccctctg

SEQ ID NO: 3167 - RNA, 20 nt, synthetic construct
  misc_feature 1..20: note = antisense sequence
  source 1..20: mol_type = other RNA
ctgagacctgctccaaccct

SEQ ID NO: 3168 - RNA, 20 nt, synthetic construct
  misc_feature 1..20: note = antisense sequence
  source 1..20: mol_type = other RNA
gaggaggtgtgccaggcaat

SEQ ID NO: 3169 - RNA, 20 nt, synthetic construct
  misc_feature 1..20: note = antisense sequence
  source 1..20: mol_type = other RNA
ttctgggaggaggtgtgcca

SEQ ID NO: 3170 - RNA, 20 nt, synthetic construct
  misc_feature 1..20: note = antisense sequence
  source 1..20: mol_type = other RNA
aattctgggaggaggtgtgc

SEQ ID NO: 3171 - RNA, 20 nt, synthetic construct
  misc_feature 1..20: note = antisense sequence
  source 1..20: mol_type = other RNA
agctctgctatcttcctgag

SEQ ID NO: 3172 - RNA, 20 nt, synthetic construct
  misc_feature 1..20: note = antisense sequence
  source 1..20: mol_type = other RNA
tcactactctccagaaatag

SEQ ID NO: 3173 - RNA, 20 nt, synthetic construct
  misc_feature 1..20: note = antisense sequence
  source 1..20: mol_type = other RNA
actcactactctccagaaat

SEQ ID NO: 3174 - RNA, 20 nt, synthetic construct
  misc_feature 1..20: note = antisense sequence
  source 1..20: mol_type = other RNA
tactcactactctccagaaa

SEQ ID NO: 3175 - RNA, 20 nt, synthetic construct
  misc_feature 1..20: note = antisense sequence
  source 1..20: mol_type = other RNA
atactcactactctccagaa

SEQ ID NO: 3176 - RNA, 20 nt, synthetic construct
  misc_feature 1..20: note = antisense sequence
  source 1..20: mol_type = other RNA
atatactcactactctccag

SEQ ID NO: 3177 - RNA, 20 nt, synthetic construct
  misc_feature 1..20: note = antisense sequence
  source 1..20: mol_type = other RNA
ggaatatactcactactctc

SEQ ID NO: 3178 - RNA, 20 nt, synthetic construct
  misc_feature 1..20: note = antisense sequence
  source 1..20: mol_type = other RNA
gggaatatactcactactct

SEQ ID NO: 3179 - RNA, 20 nt, synthetic construct
  misc_feature 1..20: note = antisense sequence
  source 1..20: mol_type = other RNA
ctaggtgataccacttgaaa

SEQ ID NO: 3180 - RNA, 20 nt, synthetic construct
  misc_feature 1..20: note = antisense sequence
  source 1..20: mol_type = other RNA
tgctaggtgataccacttga

SEQ ID NO: 3181 - RNA, 20 nt, synthetic construct
  misc_feature 1..20: note = antisense sequence
  source 1..20: mol_type = other RNA
ctgctaggtgataccacttg

SEQ ID NO: 3182 - RNA, 20 nt, synthetic construct
  misc_feature 1..20: note = antisense sequence
  source 1..20: mol_type = other RNA
gctgctaggtgataccactt

SEQ ID NO: 3183 - RNA, 20 nt, synthetic construct
  misc_feature 1..20: note = antisense sequence
  source 1..20: mol_type = other RNA
agctgctaggtgataccact

SEQ ID NO: 3184 - RNA, 20 nt, synthetic construct
  misc_feature 1..20: note = antisense sequence
  source 1..20: mol_type = other RNA
ttaaggcaaaggaatccagc

SEQ ID NO: 3185 - RNA, 20 nt, synthetic construct
  misc_feature 1..20: note = antisense sequence
  source 1..20: mol_type = other RNA
ctgttaaggcaaaggaatcc

SEQ ID NO: 3186 - RNA, 20 nt, synthetic construct
  misc_feature 1..20: note = antisense sequence
  source 1..20: mol_type = other RNA
tctgttaaggcaaaggaatc

SEQ ID NO: 3187 - RNA, 20 nt, synthetic construct
  misc_feature 1..20: note = antisense sequence
  source 1..20: mol_type = other RNA
caattctgttaaggcaaagg

SEQ ID NO: 3188 - RNA, 20 nt, synthetic construct
  misc_feature 1..20: note = antisense sequence
  source 1..20: mol_type = other RNA
ccaattctgttaaggcaaag

SEQ ID NO: 3189 - RNA, 20 nt, synthetic construct
  misc_feature 1..20: note = antisense sequence
  source 1..20: mol_type = other RNA
gccaattctgttaaggcaaa

SEQ ID NO: 3190 - RNA, 20 nt, synthetic construct
  misc_feature 1..20: note = antisense sequence
  source 1..20: mol_type = other RNA
agtggatagcattgaaagct

SEQ ID NO: 3191 - RNA, 20 nt, synthetic construct
  misc_feature 1..20: note = antisense sequence
  source 1..20: mol_type = other RNA
tagtggatagcattgaaagc

SEQ ID NO: 3192 - RNA, 20 nt, synthetic construct
  misc_feature 1..20: note = antisense sequence
  source 1..20: mol_type = other RNA
aagcctgggacacttccttc

SEQ ID NO: 3193 - RNA, 20 nt, synthetic construct
  misc_feature 1..20: note = antisense sequence
  source 1..20: mol_type = other RNA
ccaagcctgggacacttcct

SEQ ID NO: 3194 - RNA, 20 nt, synthetic construct
  misc_feature 1..20: note = antisense sequence
  source 1..20: mol_type = other RNA
acctagttgtcttgaaacca

SEQ ID NO: 3195 - RNA, 20 nt, synthetic construct
  misc_feature 1..20: note = antisense sequence
  source 1..20: mol_type = other RNA
gacctagttgtcttgaaacc

SEQ ID NO: 3196 - RNA, 20 nt, synthetic construct
  misc_feature 1..20: note = antisense sequence
  source 1..20: mol_type = other RNA
ggacctagttgtcttgaaac

SEQ ID NO: 3197 - RNA, 20 nt, synthetic construct
  misc_feature 1..20: note = antisense sequence
  source 1..20: mol_type = other RNA
caggacctagttgtcttgaa

SEQ ID NO: 3198 - RNA, 20 nt, synthetic construct
  misc_feature 1..20: note = antisense sequence
  source 1..20: mol_type = other RNA
tccaggacctagttgtcttg

SEQ ID NO: 3199 - RNA, 20 nt, synthetic construct
  misc_feature 1..20: note = antisense sequence
  source 1..20: mol_type = other RNA
atccaggacctagttgtctt

SEQ ID NO: 3200 - RNA, 20 nt, synthetic construct
  misc_feature 1..20: note = antisense sequence
  source 1..20: mol_type = other RNA
aatccaggacctagttgtct

SEQ ID NO: 3201 - RNA, 20 nt, synthetic construct
  misc_feature 1..20: note = antisense sequence
  source 1..20: mol_type = other RNA
gaatccaggacctagttgtc

SEQ ID NO: 3202 - RNA, 20 nt, synthetic construct
  misc_feature 1..20: note = antisense sequence
  source 1..20: mol_type = other RNA
gtagaatccaggacctagtt

SEQ ID NO: 3203 - RNA, 20 nt, synthetic construct
  misc_feature 1..20: note = antisense sequence
  source 1..20: mol_type = other RNA
tgtagaatccaggacctagt

SEQ ID NO: 3204 - RNA, 20 nt, synthetic construct
  misc_feature 1..20: note = antisense sequence
  source 1..20: mol_type = other RNA
ttgtagaatccaggacctag

SEQ ID NO: 3205 - RNA, 20 nt, synthetic construct
  misc_feature 1..20: note = antisense sequence
  source 1..20: mol_type = other RNA
gttgtagaatccaggaccta

SEQ ID NO: 3206 - RNA, 20 nt, synthetic construct
  misc_feature 1..20: note = antisense sequence
  source 1..20: mol_type = other RNA
tagttgtagaatccaggacc

SEQ ID NO: 3207 - RNA, 20 nt, synthetic construct
  misc_feature 1..20: note = antisense sequence
  source 1..20: mol_type = other RNA
cttagttgtagaatccagga

SEQ ID NO: 3208 - RNA, 20 nt, synthetic construct
  misc_feature 1..20: note = antisense sequence
  source 1..20: mol_type = other RNA
acttagttgtagaatccagg

SEQ ID NO: 3209 - RNA, 20 nt, synthetic construct
  misc_feature 1..20: note = antisense sequence
  source 1..20: mol_type = other RNA
cacttagttgtagaatccag

SEQ ID NO: 3210 - RNA, 20 nt, synthetic construct
  misc_feature 1..20: note = antisense sequence
  source 1..20: mol_type = other RNA
agtaatgctcaaggtcacaa

SEQ ID NO: 3211 - RNA, 20 nt, synthetic construct
  misc_feature 1..20: note = antisense sequence
  source 1..20: mol_type = other RNA
ctagtaatgctcaaggtcac

SEQ ID NO: 3212 - RNA, 20 nt, synthetic construct
  misc_feature 1..20: note = antisense sequence
  source 1..20: mol_type = other RNA
gctagtaatgctcaaggtca

SEQ ID NO: 3213 - RNA, 20 nt, synthetic construct
  misc_feature 1..20: note = antisense sequence
  source 1..20: mol_type = other RNA
ggctagtaatgctcaaggtc

SEQ ID NO: 3214 - RNA, 20 nt, synthetic construct
  misc_feature 1..20: note = antisense sequence
  source 1..20: mol_type = other RNA
tggctagtaatgctcaaggt

SEQ ID NO: 3215 - RNA, 20 nt, synthetic construct
  misc_feature 1..20: note = antisense sequence
  source 1..20: mol_type = other RNA
atggctagtaatgctcaagg

SEQ ID NO: 3216 - RNA, 20 nt, synthetic construct
  misc_feature 1..20: note = antisense sequence
  source 1..20: mol_type = other RNA
aatggctagtaatgctcaag

SEQ ID NO: 3217 - RNA, 20 nt, synthetic construct
  misc_feature 1..20: note = antisense sequence
  source 1..20: mol_type = other RNA
caatggctagtaatgctcaa

SEQ ID NO: 3218 - RNA, 20 nt, synthetic construct
  misc_feature 1..20: note = antisense sequence
  source 1..20: mol_type = other RNA
cacaatggctagtaatgctc

SEQ ID NO: 3219 - RNA, 20 nt, synthetic construct
  misc_feature 1..20: note = antisense sequence
  source 1..20: mol_type = other RNA
tcacaatggctagtaatgct

SEQ ID NO: 3220 - RNA, 20 nt, synthetic construct
  misc_feature 1..20: note = antisense sequence
  source 1..20: mol_type = other RNA
ctcacaatggctagtaatgc

SEQ ID NO: 3221 - RNA, 20 nt, synthetic construct
  misc_feature 1..20: note = antisense sequence
  source 1..20: mol_type = other RNA
ggctcacaatggctagtaat

SEQ ID NO: 3222 - RNA, 20 nt, synthetic construct
  misc_feature 1..20: note = antisense sequence
  source 1..20: mol_type = other RNA
aggctcacaatggctagtaa

SEQ ID NO: 3223 - RNA, 20 nt, synthetic construct
  misc_feature 1..20: note = antisense sequence
  source 1..20: mol_type = other RNA
gaggctcacaatggctagta

SEQ ID NO: 3224 - RNA, 20 nt, synthetic construct
  misc_feature 1..20: note = antisense sequence
  source 1..20: mol_type = other RNA
aatgaggctcacaatggcta

SEQ ID NO: 3225 - RNA, 20 nt, synthetic construct
  misc_feature 1..20: note = antisense sequence
  source 1..20: mol_type = other RNA
taaatgaggctcacaatggc

SEQ ID NO: 3226 - RNA, 20 nt, synthetic construct
  misc_feature 1..20: note = antisense sequence
  source 1..20: mol_type = other RNA
gtgtgccaattacttacaga

SEQ ID NO: 3227 - RNA, 20 nt, synthetic construct
  misc_feature 1..20: note = antisense sequence
  source 1..20: mol_type = other RNA
ctgtgtgccaattacttaca

SEQ ID NO: 3228 - RNA, 20 nt, synthetic construct
  misc_feature 1..20: note = antisense sequence
  source 1..20: mol_type = other RNA
tctgtgtgccaattacttac

SEQ ID NO: 3229 - RNA, 20 nt, synthetic construct
  misc_feature 1..20: note = antisense sequence
  source 1..20: mol_type = other RNA
ctattctgtgtgccaattac

SEQ ID NO: 3230 - RNA, 20 nt, synthetic construct
  misc_feature 1..20: note = antisense sequence
  source 1..20: mol_type = other RNA
tgtaaccagatcactcctag

SEQ ID NO: 3231 - RNA, 20 nt, synthetic construct
  misc_feature 1..20: note = antisense sequence
  source 1..20: mol_type = other RNA
ttgtaaccagatcactccta

SEQ ID NO: 3232 - RNA, 20 nt, synthetic construct
  misc_feature 1..20: note = antisense sequence
  source 1..20: mol_type = other RNA
cttgtaaccagatcactcct

SEQ ID NO: 3233 - RNA, 20 nt, synthetic construct
  misc_feature 1..20: note = antisense sequence
  source 1..20: mol_type = other RNA
gcttgtaaccagatcactcc

SEQ ID NO: 3234 - RNA, 20 nt, synthetic construct
  misc_feature 1..20: note = antisense sequence
  source 1..20: mol_type = other RNA
agcttgtaaccagatcactc

SEQ ID NO: 3235 - RNA, 20 nt, synthetic construct
  misc_feature 1..20: note = antisense sequence
  source 1..20: mol_type = other RNA
catggcctgggcataaaagc

SEQ ID NO: 3236 - RNA, 20 nt, synthetic construct
  misc_feature 1..20: note = antisense sequence
  source 1..20: mol_type = other RNA
tctacatggcctgggcataa

SEQ ID NO: 3237 - RNA, 20 nt, synthetic construct
  misc_feature 1..20: note = antisense sequence
  source 1..20: mol_type = other RNA
tctctacatggcctgggcat

SEQ ID NO: 3238 - RNA, 20 nt, synthetic construct
  misc_feature 1..20: note = antisense sequence
  source 1..20: mol_type = other RNA
atctctacatggcctgggca

SEQ ID NO: 3239 - RNA, 20 nt, synthetic construct
  misc_feature 1..20: note = antisense sequence
  source 1..20: mol_type = other RNA
aatctctacatggcctgggc

SEQ ID NO: 3240 - RNA, 20 nt, synthetic construct
  misc_feature 1..20: note = antisense sequence
  source 1..20: mol_type = other RNA
taatctctacatggcctggg

SEQ ID NO: 3241 - RNA, 20 nt, synthetic construct
  misc_feature 1..20: note = antisense sequence
  source 1..20: mol_type = other RNA
ataatctctacatggcctgg

SEQ ID NO: 3242 - RNA, 20 nt, synthetic construct
  misc_feature 1..20: note = antisense sequence
  source 1..20: mol_type = other RNA
gataatctctacatggcctg

SEQ ID NO: 3243 - RNA, 20 nt, synthetic construct
  misc_feature 1..20: note = antisense sequence
  source 1..20: mol_type = other RNA
agataatctctacatggcct

SEQ ID NO: 3244 - RNA, 20 nt, synthetic construct
  misc_feature 1..20: note = antisense sequence
  source 1..20: mol_type = other RNA
gcctttccttggaatgatat

SEQ ID NO: 3245 - RNA, 20 nt, synthetic construct
  misc_feature 1..20: note = antisense sequence
  source 1..20: mol_type = other RNA
agcctttccttggaatgata

SEQ ID NO: 3246 - RNA, 20 nt, synthetic construct
  misc_feature 1..20: note = antisense sequence
  source 1..20: mol_type = other RNA
tagcctttccttggaatgat

SEQ ID NO: 3247 - RNA, 20 nt, synthetic construct
  misc_feature 1..20: note = antisense sequence
  source 1..20: mol_type = other RNA
ctagcctttccttggaatga

SEQ ID NO: 3248 - RNA, 20 nt, synthetic construct
  misc_feature 1..20: note = antisense sequence
  source 1..20: mol_type = other RNA
tctagcctttccttggaatg

SEQ ID NO: 3249 - RNA, 20 nt, synthetic construct
  misc_feature 1..20: note = antisense sequence
  source 1..20: mol_type = other RNA
acttctagcctttccttgga

SEQ ID NO: 3250 - RNA, 20 nt, synthetic construct
  misc_feature 1..20: note = antisense sequence
  source 1..20: mol_type = other RNA
ttttgcagacttctagcctt

SEQ ID NO: 3251 - RNA, 20 nt, synthetic construct
  misc_feature 1..20: note = antisense sequence
  source 1..20: mol_type = other RNA
gtctgctcatgctctaaatt

SEQ ID NO: 3252 - RNA, 20 nt, synthetic construct
  misc_feature 1..20: note = antisense sequence
  source 1..20: mol_type = other RNA
ttgtctgctcatgctctaaa

SEQ ID NO: 3253 - RNA, 20 nt, synthetic construct
  misc_feature 1..20: note = antisense sequence
  source 1..20: mol_type = other RNA
gttgtctgctcatgctctaa

SEQ ID NO: 3254 - RNA, 20 nt, synthetic construct
  misc_feature 1..20: note = antisense sequence
  source 1..20: mol_type = other RNA
ggttgtctgctcatgctcta

SEQ ID NO: 3255 - RNA, 20 nt, synthetic construct
  misc_feature 1..20: note = antisense sequence
  source 1..20: mol_type = other RNA
aggttgtctgctcatgctct

SEQ ID NO: 3256 - RNA, 20 nt, synthetic construct
  misc_feature 1..20: note = antisense sequence
  source 1..20: mol_type = other RNA
ataggttgtctgctcatgct

SEQ ID NO: 3257 - RNA, 20 nt, synthetic construct
  misc_feature 1..20: note = antisense sequence
  source 1..20: mol_type = other RNA
cactacagagcttgtgtggc

SEQ ID NO: 3258 - RNA, 20 nt, synthetic construct
  misc_feature 1..20: note = antisense sequence
  source 1..20: mol_type = other RNA
tcactacagagcttgtgtgg

SEQ ID NO: 3259 - RNA, 20 nt, synthetic construct
  misc_feature 1..20: note = antisense sequence
  source 1..20: mol_type = other RNA
gtcactacagagcttgtgtg

SEQ ID NO: 3260 - RNA, 20 nt, synthetic construct
  misc_feature 1..20: note = antisense sequence
  source 1..20: mol_type = other RNA
agtcactacagagcttgtgt

SEQ ID NO: 3261 - RNA, 20 nt, synthetic construct
  misc_feature 1..20: note = antisense sequence
  source 1..20: mol_type = other RNA
gatagagtcaagtagtcact

SEQ ID NO: 3262 - RNA, 20 nt, synthetic construct
  misc_feature 1..20: note = antisense sequence
  source 1..20: mol_type = other RNA
catgatagagtcaagtagtc

SEQ ID NO: 3263 - RNA, 20 nt, synthetic construct
  misc_feature 1..20: note = antisense sequence
  source 1..20: mol_type = other RNA
ccatgatagagtcaagtagt

SEQ ID NO: 3264 - RNA, 20 nt, synthetic construct
  misc_feature 1..20: note = antisense sequence
  source 1..20: mol_type = other RNA
accatgatagagtcaagtag

SEQ ID NO: 3265 - RNA, 20 nt, synthetic construct
  misc_feature 1..20: note = antisense sequence
  source 1..20: mol_type = other RNA
cataccatgatagagtcaag

SEQ ID NO: 3266 - RNA, 20 nt, synthetic construct
  misc_feature 1..20: note = antisense sequence
  source 1..20: mol_type = other RNA
ccataccatgatagagtcaa

SEQ ID NO: 3267 - RNA, 20 nt, synthetic construct
  misc_feature 1..20: note = antisense sequence
  source 1..20: mol_type = other RNA
gccataccatgatagagtca

SEQ ID NO: 3268 - RNA, 20 nt, synthetic construct
  misc_feature 1..20: note = antisense sequence
  source 1..20: mol_type = other RNA
tgccataccatgatagagtc

SEQ ID NO: 3269 - RNA, 20 nt, synthetic construct
  misc_feature 1..20: note = antisense sequence
  source 1..20: mol_type = other RNA
ttgccataccatgatagagt

SEQ ID NO: 3270 - RNA, 20 nt, synthetic construct
  misc_feature 1..20: note = antisense sequence
  source 1..20: mol_type = other RNA
tttgccataccatgatagag

SEQ ID NO: 3271 - RNA, 20 nt, synthetic construct
  misc_feature 1..20: note = antisense sequence
  source 1..20: mol_type = other RNA
cttttgccataccatgatag

SEQ ID NO: 3272 - RNA, 20 nt, synthetic construct
  misc_feature 1..20: note = antisense sequence
  source 1..20: mol_type = other RNA
gcttttgccataccatgata

SEQ ID NO: 3273 - RNA, 20 nt, synthetic construct
  misc_feature 1..20: note = antisense sequence
  source 1..20: mol_type = other RNA
gacctgcttttgccatacca

SEQ ID NO: 3274 - RNA, 20 nt, synthetic construct
  misc_feature 1..20: note = antisense sequence
  source 1..20: mol_type = other RNA
agacctgcttttgccatacc

SEQ ID NO: 3275 - RNA, 20 nt, synthetic construct
  misc_feature 1..20: note = antisense sequence
  source 1..20: mol_type = other RNA
gagacctgcttttgccatac

SEQ ID NO: 3276 - RNA, 20 nt, synthetic construct
  misc_feature 1..20: note = antisense sequence
  source 1..20: mol_type = other RNA
tgagacctgcttttgccata

SEQ ID NO: 3277 - RNA, 20 nt, synthetic construct
  misc_feature 1..20: note = antisense sequence
  source 1..20: mol_type = other RNA
tattgtctgtggccctgaga

SEQ ID NO: 3278 - RNA, 20 nt, synthetic construct
  misc_feature 1..20: note = antisense sequence
  source 1..20: mol_type = other RNA
ctattgtctgtggccctgag

SEQ ID NO: 3279 - RNA, 20 nt, synthetic construct
  misc_feature 1..20: note = antisense sequence
  source 1..20: mol_type = other RNA
tactattgtctgtggccctg

SEQ ID NO: 3280 - RNA, 20 nt, synthetic construct
  misc_feature 1..20: note = antisense sequence
  source 1..20: mol_type = other RNA
ttactattgtctgtggccct

SEQ ID NO: 3281 - RNA, 20 nt, synthetic construct
  misc_feature 1..20: note = antisense sequence
  source 1..20: mol_type = other RNA
ccactacctgcttatgtaaa

SEQ ID NO: 3282 - RNA, 20 nt, synthetic construct
  misc_feature 1..20: note = antisense sequence
  source 1..20: mol_type = other RNA
gcccactacctgcttatgta

SEQ ID NO: 3283 - RNA, 20 nt, synthetic construct
  misc_feature 1..20: note = antisense sequence
  source 1..20: mol_type = other RNA
tgcccactacctgcttatgt

SEQ ID NO: 3284 - RNA, 20 nt, synthetic construct
  misc_feature 1..20: note = antisense sequence
  source 1..20: mol_type = other RNA
ctgcccactacctgcttatg

SEQ ID NO: 3285 - RNA, 20 nt, synthetic construct
  misc_feature 1..20: note = antisense sequence
  source 1..20: mol_type = other RNA
tcctgcccactacctgctta

SEQ ID NO: 3286 - RNA, 20 nt, synthetic construct
  misc_feature 1..20: note = antisense sequence
  source 1..20: mol_type = other RNA
aatcctgcccactacctgct

SEQ ID NO: 3287 - RNA, 20 nt, synthetic construct
  misc_feature 1..20: note = antisense sequence
  source 1..20: mol_type = other RNA
ccaaatcctgcccactacct

SEQ ID NO: 3288 - RNA, 20 nt, synthetic construct
  misc_feature 1..20: note = antisense sequence
  source 1..20: mol_type = other RNA
gaccaaatcctgcccactac

SEQ ID NO: 3289 - RNA, 20 nt, synthetic construct
  misc_feature 1..20: note = antisense sequence
  source 1..20: mol_type = other RNA
cagaccaaatcctgcccact

SEQ ID NO: 3290 - RNA, 20 nt, synthetic construct
  misc_feature 1..20: note = antisense sequence
  source 1..20: mol_type = other RNA
gtcctacagaccaaatcctg

SEQ ID NO: 3291 - RNA, 20 nt, synthetic construct
  misc_feature 1..20: note = antisense sequence
  source 1..20: mol_type = other RNA
tgtcctacagaccaaatcct

SEQ ID NO: 3292 - RNA, 20 nt, synthetic construct
  misc_feature 1..20: note = antisense sequence
  source 1..20: mol_type = other RNA
gtgtcctacagaccaaatcc

SEQ ID NO: 3293 - RNA, 20 nt, synthetic construct
  misc_feature 1..20: note = antisense sequence
  source 1..20: mol_type = other RNA
tcaacaaactgtgtcctaca

SEQ ID NO: 3294 - RNA, 20 nt, synthetic construct
  misc_feature 1..20: note = antisense sequence
  source 1..20: mol_type = other RNA
ttcaacaaactgtgtcctac

SEQ ID NO: 3295 - RNA, 20 nt, synthetic construct
  misc_feature 1..20: note = antisense sequence
  source 1..20: mol_type = other RNA
gttcaacaaactgtgtccta

SEQ ID NO: 3296 - RNA, 20 nt, synthetic construct
  misc_feature 1..20: note = antisense sequence
  source 1..20: mol_type = other RNA
ccagggttcaacaaactgtg

SEQ ID NO: 3297 - RNA, 20 nt, synthetic construct
  misc_feature 1..20: note = antisense sequence
  source 1..20: mol_type = other RNA
gccagggttcaacaaactgt

SEQ ID NO: 3298 - RNA, 20 nt, synthetic construct
  misc_feature 1..20: note = antisense sequence
  source 1..20: mol_type = other RNA
ggccagggttcaacaaactg

SEQ ID NO: 3299 - RNA, 20 nt, synthetic construct
  misc_feature 1..20: note = antisense sequence
  source 1..20: mol_type = other RNA
ctaggccagggttcaacaaa

SEQ ID NO: 3300 - RNA, 20 nt, synthetic construct
  misc_feature 1..20: note = antisense sequence
  source 1..20: mol_type = other RNA
ctctaggccagggttcaaca

SEQ ID NO: 3301 - RNA, 20 nt, synthetic construct
  misc_feature 1..20: note = antisense sequence
  source 1..20: mol_type = other RNA
gctctaggccagggttcaac

SEQ ID NO: 3302 - RNA, 20 nt, synthetic construct
  misc_feature 1..20: note = antisense sequence
  source 1..20: mol_type = other RNA
atgctctaggccagggttca

SEQ ID NO: 3303 - RNA, 20 nt, synthetic construct
  misc_feature 1..20: note = antisense sequence
  source 1..20: mol_type = other RNA
tcatgctctaggccagggtt

SEQ ID NO: 3304 - RNA, 20 nt, synthetic construct
  misc_feature 1..20: note = antisense sequence
  source 1..20: mol_type = other RNA
tatcatgctctaggccaggg

SEQ ID NO: 3305 - RNA, 20 nt, synthetic construct
  misc_feature 1..20: note = antisense sequence
  source 1..20: mol_type = other RNA
atatcatgctctaggccagg

SEQ ID NO: 3306 - RNA, 20 nt, synthetic construct
  misc_feature 1..20: note = antisense sequence
  source 1..20: mol_type = other RNA
tctatatcatgctctaggcc

SEQ ID NO: 3307 - RNA, 20 nt, synthetic construct
  misc_feature 1..20: note = antisense sequence
  source 1..20: mol_type = other RNA
ccagtttgtaagcatactct

SEQ ID NO: 3308 - RNA, 20 nt, synthetic construct
  misc_feature 1..20: note = antisense sequence
  source 1..20: mol_type = other RNA
cccagtttgtaagcatactc

SEQ ID NO: 3309 - RNA, 20 nt, synthetic construct
  misc_feature 1..20: note = antisense sequence
  source 1..20: mol_type = other RNA
gcccagtttgtaagcatact

SEQ ID NO: 3310 - RNA, 20 nt, synthetic construct
  misc_feature 1..20: note = antisense sequence
  source 1..20: mol_type = other RNA
caactcagcaagccttgatg

SEQ ID NO: 3311 - RNA, 20 nt, synthetic construct
  misc_feature 1..20: note = antisense sequence
  source 1..20: mol_type = other RNA
tttcaactcagcaagccttg

SEQ ID NO: 3312 - RNA, 20 nt, synthetic construct
  misc_feature 1..20: note = antisense sequence
  source 1..20: mol_type = other RNA
ttttcaactcagcaagcctt

SEQ ID NO: 3313 - RNA, 20 nt, synthetic construct
  misc_feature 1..20: note = antisense sequence
  source 1..20: mol_type = other RNA
accagcaactcaacagaata

SEQ ID NO: 3314 - RNA, 20 nt, synthetic construct
  misc_feature 1..20: note = antisense sequence
  source 1..20: mol_type = other RNA
caccagcaactcaacagaat

SEQ ID NO: 3315 - RNA, 20 nt, synthetic construct
  misc_feature 1..20: note = antisense sequence
  source 1..20: mol_type = other RNA
acacaccagcaactcaacag

SEQ ID NO: 3316 - RNA, 20 nt, synthetic construct
  misc_feature 1..20: note = antisense sequence
  source 1..20: mol_type = other RNA
tacacaccagcaactcaaca

SEQ ID NO: 3317 - RNA, 20 nt, synthetic construct
  misc_feature 1..20: note = antisense sequence
  source 1..20: mol_type = other RNA
ttacacaccagcaactcaac

SEQ ID NO: 3318 - RNA, 20 nt, synthetic construct
  misc_feature 1..20: note = antisense sequence
  source 1..20: mol_type = other RNA
tgatttacacaccagcaact

SEQ ID NO: 3319 - RNA, 20 nt, synthetic construct
  misc_feature 1..20: note = antisense sequence
  source 1..20: mol_type = other RNA
gtgatttacacaccagcaac

SEQ ID NO: 3320 - RNA, 20 nt, synthetic construct
  misc_feature 1..20: note = antisense sequence
  source 1..20: mol_type = other RNA
ggccagttacaatgtgattt

SEQ ID NO: 3321 - RNA, 20 nt, synthetic construct
  misc_feature 1..20: note = antisense sequence
  source 1..20: mol_type = other RNA
ccctaatgtgcaaataagca

SEQ ID NO: 3322 - RNA, 20 nt, synthetic construct
  misc_feature 1..20: note = antisense sequence
  source 1..20: mol_type = other RNA
accctaatgtgcaaataagc

SEQ ID NO: 3323 - RNA, 20 nt, synthetic construct
  misc_feature 1..20: note = antisense sequence
  source 1..20: mol_type = other RNA
cagtaaaccctaatgtgcaa

SEQ ID NO: 3324 - RNA, 20 nt, synthetic construct
  misc_feature 1..20: note = antisense sequence
  source 1..20: mol_type = other RNA
acagtaaaccctaatgtgca

SEQ ID NO: 3325 - RNA, 20 nt, synthetic construct
  misc_feature 1..20: note = antisense sequence
  source 1..20: mol_type = other RNA
gctgtcaggtaagtgatact

SEQ ID NO: 3326 - RNA, 20 nt, synthetic construct
  misc_feature 1..20: note = antisense sequence
  source 1..20: mol_type = other RNA
atgctgtcaggtaagtgata

SEQ ID NO: 3327 - RNA, 20 nt, synthetic construct
  misc_feature 1..20: note = antisense sequence
  source 1..20: mol_type = other RNA
cagatgctgtcaggtaagtg

SEQ ID NO: 3328 - RNA, 20 nt, synthetic construct
  misc_feature 1..20: note = antisense sequence
  source 1..20: mol_type = other RNA
tcagatgctgtcaggtaagt

SEQ ID NO: 3329 - RNA, 20 nt, synthetic construct
  misc_feature 1..20: note = antisense sequence
  source 1..20: mol_type = other RNA
ctcagatgctgtcaggtaag

SEQ ID NO: 3330 - RNA, 20 nt, synthetic construct
  misc_feature 1..20: note = antisense sequence
  source 1..20: mol_type = other RNA
gctcagatgctgtcaggtaa

SEQ ID NO: 3331 - RNA, 20 nt, synthetic construct
  misc_feature 1..20: note = antisense sequence
  source 1..20: mol_type = other RNA
ggctcagatgctgtcaggta

SEQ ID NO: 3332 - RNA, 20 nt, synthetic construct
  misc_feature 1..20: note = antisense sequence
  source 1..20: mol_type = other RNA
tggctcagatgctgtcaggt

SEQ ID NO: 3333 - RNA, 20 nt, synthetic construct
  misc_feature 1..20: note = antisense sequence
  source 1..20: mol_type = other RNA
atggctcagatgctgtcagg

SEQ ID NO: 3334 - RNA, 20 nt, synthetic construct
  misc_feature 1..20: note = antisense sequence
  source 1..20: mol_type = other RNA
caatggctcagatgctgtca

SEQ ID NO: 3335 - RNA, 20 nt, synthetic construct
  misc_feature 1..20: note = antisense sequence
  source 1..20: mol_type = other RNA
acaatggctcagatgctgtc

SEQ ID NO: 3336 - RNA, 20 nt, synthetic construct
  misc_feature 1..20: note = antisense sequence
  source 1..20: mol_type = other RNA
aacacaatggctcagatgct

SEQ ID NO: 3337 - RNA, 20 nt, synthetic construct
  misc_feature 1..20: note = antisense sequence
  source 1..20: mol_type = other RNA
taacacaatggctcagatgc

SEQ ID NO: 3338 - RNA, 20 nt, synthetic construct
  misc_feature 1..20: note = antisense sequence
  source 1..20: mol_type = other RNA
ataacacaatggctcagatg

SEQ ID NO: 3339 - RNA, 20 nt, synthetic construct
  misc_feature 1..20: note = antisense sequence
  source 1..20: mol_type = other RNA
accactgagggctaagccta

SEQ ID NO: 3340 - RNA, 20 nt, synthetic construct
  misc_feature 1..20: note = antisense sequence
  source 1..20: mol_type = other RNA
aaaccactgagggctaagcc

SEQ ID NO: 3341 - RNA, 20 nt, synthetic construct
  misc_feature 1..20: note = antisense sequence
  source 1..20: mol_type = other RNA
aaaaccactgagggctaagc

SEQ ID NO: 3342 - RNA, 20 nt, synthetic construct
  misc_feature 1..20: note = antisense sequence
  source 1..20: mol_type = other RNA
acaaaaccactgagggctaa

SEQ ID NO: 3343 - RNA, 20 nt, synthetic construct
  misc_feature 1..20: note = antisense sequence
  source 1..20: mol_type = other RNA
tacaaaaccactgagggcta

SEQ ID NO: 3344 - RNA, 20 nt, synthetic construct
  misc_feature 1..20: note = antisense sequence
  source 1..20: mol_type = other RNA
ccacttctaaaaggcattgt

SEQ ID NO: 3345 - RNA, 20 nt, synthetic construct
  misc_feature 1..20: note = antisense sequence
  source 1..20: mol_type = other RNA
accacttctaaaaggcattg

SEQ ID NO: 3346 - RNA, 20 nt, synthetic construct
  misc_feature 1..20: note = antisense sequence
  source 1..20: mol_type = other RNA
agttggcttgctctgttact

SEQ ID NO: 3347 - RNA, 20 nt, synthetic construct
  misc_feature 1..20: note = antisense sequence
  source 1..20: mol_type = other RNA
aagttggcttgctctgttac

SEQ ID NO: 3348 - RNA, 20 nt, synthetic construct
  misc_feature 1..20: note = antisense sequence
  source 1..20: mol_type = other RNA
taagttggcttgctctgtta

SEQ ID NO: 3349 - RNA, 20 nt, synthetic construct
  misc_feature 1..20: note = antisense sequence
  source 1..20: mol_type = other RNA
ttaagttggcttgctctgtt

SEQ ID NO: 3350 - RNA, 20 nt, synthetic construct
  misc_feature 1..20: note = antisense sequence
  source 1..20: mol_type = other RNA
tgattaagttggcttgctct

SEQ ID NO: 3351 - RNA, 20 nt, synthetic construct
  misc_feature 1..20: note = antisense sequence
  source 1..20: mol_type = other RNA
cactgattaagttggcttgc

SEQ ID NO: 3352 - RNA, 20 nt, synthetic construct
  misc_feature 1..20: note = antisense sequence
  source 1..20: mol_type = other RNA
gcactgattaagttggcttg

SEQ ID NO: 3353 - RNA, 20 nt, synthetic construct
  misc_feature 1..20: note = antisense sequence
  source 1..20: mol_type = other RNA
ggcactgattaagttggctt

SEQ ID NO: 3354 - RNA, 20 nt, synthetic construct
  misc_feature 1..20: note = antisense sequence
  source 1..20: mol_type = other RNA
gggcactgattaagttggct

SEQ ID NO: 3355 - RNA, 20 nt, synthetic construct
  misc_feature 1..20: note = antisense sequence
  source 1..20: mol_type = other RNA
cagggcactgattaagttgg

SEQ ID NO: 3356 - RNA, 20 nt, synthetic construct
  misc_feature 1..20: note = antisense sequence
  source 1..20: mol_type = other RNA
gatgctttgtcagggcactg

SEQ ID NO: 3357 - RNA, 20 nt, synthetic construct
  misc_feature 1..20: note = antisense sequence
  source 1..20: mol_type = other RNA
ggatgctttgtcagggcact

SEQ ID NO: 3358 - RNA, 20 nt, synthetic construct
  misc_feature 1..20: note = antisense sequence
  source 1..20: mol_type = other RNA
tggatgctttgtcagggcac

SEQ ID NO: 3359 - RNA, 20 nt, synthetic construct
  misc_feature 1..20: note = antisense sequence
  source 1..20: mol_type = other RNA
gctggatgctttgtcagggc

SEQ ID NO: 3360 - RNA, 20 nt, synthetic construct
  misc_feature 1..20: note = antisense sequence
  source 1..20: mol_type = other RNA
gtgctggatgctttgtcagg

SEQ ID NO: 3361 - RNA, 20 nt, synthetic construct
  misc_feature 1..20: note = antisense sequence
  source 1..20: mol_type = other RNA
tgttggtgctggatgctttg

SEQ ID NO: 3362 - RNA, 20 nt, synthetic construct
  misc_feature 1..20: note = antisense sequence
  source 1..20: mol_type = other RNA
gtgttggtgctggatgcttt

SEQ ID NO: 3363 - RNA, 20 nt, synthetic construct
  misc_feature 1..20: note = antisense sequence
  source 1..20: mol_type = other RNA
tgtgttggtgctggatgctt

SEQ ID NO: 3364 - RNA, 20 nt, synthetic construct
  misc_feature 1..20: note = antisense sequence
  source 1..20: mol_type = other RNA
atgtgttggtgctggatgct

SEQ ID NO: 3365 - RNA, 20 nt, synthetic construct
  misc_feature 1..20: note = antisense sequence
  source 1..20: mol_type = other RNA
tatgtgttggtgctggatgc

SEQ ID NO: 3366 - RNA, 20 nt, synthetic construct
  misc_feature 1..20: note = antisense sequence
  source 1..20: mol_type = other RNA
gtatgtgttggtgctggatg

SEQ ID NO: 3367 - RNA, 20 nt, synthetic construct
  misc_feature 1..20: note = antisense sequence
  source 1..20: mol_type = other RNA
atgtatgtgttggtgctgga

SEQ ID NO: 3368 - RNA, 20 nt, synthetic construct
  misc_feature 1..20: note = antisense sequence
  source 1..20: mol_type = other RNA
ctaatgtatgtgttggtgct

SEQ ID NO: 3369 - RNA, 20 nt, synthetic construct
  misc_feature 1..20: note = antisense sequence
  source 1..20: mol_type = other RNA
tctaatgtatgtgttggtgc

SEQ ID NO: 3370 - RNA, 20 nt, synthetic construct
  misc_feature 1..20: note = antisense sequence
  source 1..20: mol_type = other RNA
cctagatactctcaaaatgg

SEQ ID NO: 3371 - RNA, 20 nt, synthetic construct
  misc_feature 1..20: note = antisense sequence
  source 1..20: mol_type = other RNA
gatccctagatactctcaaa

SEQ ID NO: 3372 - RNA, 20 nt, synthetic construct
  misc_feature 1..20: note = antisense sequence
  source 1..20: mol_type = other RNA
tgatccctagatactctcaa

SEQ ID NO: 3373 - RNA, 20 nt, synthetic construct
  misc_feature 1..20: note = antisense sequence
  source 1..20: mol_type = other RNA
ctgatccctagatactctca

SEQ ID NO: 3374 - RNA, 20 nt, synthetic construct
  misc_feature 1..20: note = antisense sequence
  source 1..20: mol_type = other RNA
tctgatccctagatactctc

SEQ ID NO: 3375 - RNA, 20 nt, synthetic construct
  misc_feature 1..20: note = antisense sequence
  source 1..20: mol_type = other RNA
ttctgatccctagatactct

SEQ ID NO: 3376 - RNA, 20 nt, synthetic construct
  misc_feature 1..20: note = antisense sequence
  source 1..20: mol_type = other RNA
gttctgatccctagatactc

SEQ ID NO: 3377 - RNA, 20 nt, synthetic construct
  misc_feature 1..20: note = antisense sequence
  source 1..20: mol_type = other RNA
ggttctgatccctagatact

SEQ ID NO: 3378 - RNA, 20 nt, synthetic construct
  misc_feature 1..20: note = antisense sequence
  source 1..20: mol_type = other RNA
aggttctgatccctagatac

SEQ ID NO: 3379 - RNA, 20 nt, synthetic construct
  misc_feature 1..20: note = antisense sequence
  source 1..20: mol_type = other RNA
aaggttctgatccctagata

SEQ ID NO: 3380 - RNA, 20 nt, synthetic construct
  misc_feature 1..20: note = antisense sequence
  source 1..20: mol_type = other RNA
aaaggttctgatccctagat

SEQ ID NO: 3381 - RNA, 20 nt, synthetic construct
  misc_feature 1..20: note = antisense sequence
  source 1..20: mol_type = other RNA
cataaaggttctgatcccta

SEQ ID NO: 3382 - RNA, 20 nt, synthetic construct
  misc_feature 1..20: note = antisense sequence
  source 1..20: mol_type = other RNA
cttccataaaggttctgatc

SEQ ID NO: 3383 - RNA, 20 nt, synthetic construct
  misc_feature 1..20: note = antisense sequence
  source 1..20: mol_type = other RNA
tctaactcacacaggaatga

SEQ ID NO: 3384 - RNA, 20 nt, synthetic construct
  misc_feature 1..20: note = antisense sequence
  source 1..20: mol_type = other RNA
catctaactcacacaggaat

SEQ ID NO: 3385 - RNA, 20 nt, synthetic construct
  misc_feature 1..20: note = antisense sequence
  source 1..20: mol_type = other RNA
ggtcatctaactcacacagg

SEQ ID NO: 3386 - RNA, 20 nt, synthetic construct
  misc_feature 1..20: note = antisense sequence
  source 1..20: mol_type = other RNA
gggtcatctaactcacacag

SEQ ID NO: 3387 - RNA, 20 nt, synthetic construct
  misc_feature 1..20: note = antisense sequence
  source 1..20: mol_type = other RNA
caagggcatagtacaggagg

SEQ ID NO: 3388 - RNA, 20 nt, synthetic construct
  misc_feature 1..20: note = antisense sequence
  source 1..20: mol_type = other RNA
ccaagggcatagtacaggag

SEQ ID NO: 3389 - RNA, 20 nt, synthetic construct
  misc_feature 1..20: note = antisense sequence
  source 1..20: mol_type = other RNA
cccaagggcatagtacagga

SEQ ID NO: 3390 - RNA, 20 nt, synthetic construct
  misc_feature 1..20: note = antisense sequence
  source 1..20: mol_type = other RNA
tcccaagggcatagtacagg

SEQ ID NO: 3391 - RNA, 20 nt, synthetic construct
  misc_feature 1..20: note = antisense sequence
  source 1..20: mol_type = other RNA
ttcccaagggcatagtacag

SEQ ID NO: 3392 - RNA, 20 nt, synthetic construct
  misc_feature 1..20: note = antisense sequence
  source 1..20: mol_type = other RNA
tgttcccaagggcatagtac

SEQ ID NO: 3393 - RNA, 20 nt, synthetic construct
  misc_feature 1..20: note = antisense sequence
  source 1..20: mol_type = other RNA
gtgttcccaagggcatagta

SEQ ID NO: 3394 - RNA, 20 nt, synthetic construct
  misc_feature 1..20: note = antisense sequence
  source 1..20: mol_type = other RNA
gatgtgtgttcccaagggca

SEQ ID NO: 3395 - RNA, 20 nt, synthetic construct
  misc_feature 1..20: note = antisense sequence
  source 1..20: mol_type = other RNA
agatgtgtgttcccaagggc

SEQ ID NO: 3396 - RNA, 20 nt, synthetic construct
  misc_feature 1..20: note = antisense sequence
  source 1..20: mol_type = other RNA
agagatgtgtgttcccaagg

SEQ ID NO: 3397 - RNA, 20 nt, synthetic construct
  misc_feature 1..20: note = antisense sequence
  source 1..20: mol_type = other RNA
tagagatgtgtgttcccaag

SEQ ID NO: 3398 - RNA, 20 nt, synthetic construct
  misc_feature 1..20: note = antisense sequence
  source 1..20: mol_type = other RNA
atagagatgtgtgttcccaa

SEQ ID NO: 3399 - RNA, 20 nt, synthetic construct
  misc_feature 1..20: note = antisense sequence
  source 1..20: mol_type = other RNA
catagagatgtgtgttccca

SEQ ID NO: 3400 - RNA, 20 nt, synthetic construct
  misc_feature 1..20: note = antisense sequence
  source 1..20: mol_type = other RNA
tgtaaccatagagatgtgtg

SEQ ID NO: 3401 - RNA, 20 nt, synthetic construct
  misc_feature 1..20: note = antisense sequence
  source 1..20: mol_type = other RNA
actgtaaccatagagatgtg

SEQ ID NO: 3402 - RNA, 20 nt, synthetic construct
  misc_feature 1..20: note = antisense sequence
  source 1..20: mol_type = other RNA
gactgtaaccatagagatgt

SEQ ID NO: 3403 - RNA, 20 nt, synthetic construct
  misc_feature 1..20: note = antisense sequence
  source 1..20: mol_type = other RNA
tgactgtaaccatagagatg

SEQ ID NO: 3404 - RNA, 20 nt, synthetic construct
  misc_feature 1..20: note = antisense sequence
  source 1..20: mol_type = other RNA
ctttgactgtaaccatagag

SEQ ID NO: 3405 - RNA, 20 nt, synthetic construct
  misc_feature 1..20: note = antisense sequence
  source 1..20: mol_type = other RNA
ctcctttgactgtaaccata

SEQ ID NO: 3406 - RNA, 20 nt, synthetic construct
  misc_feature 1..20: note = antisense sequence
  source 1..20: mol_type = other RNA
tctcctttgactgtaaccat

SEQ ID NO: 3407 - RNA, 20 nt, synthetic construct
  misc_feature 1..20: note = antisense sequence
  source 1..20: mol_type = other RNA
ctctcctttgactgtaacca

SEQ ID NO: 3408 - RNA, 20 nt, synthetic construct
  misc_feature 1..20: note = antisense sequence
  source 1..20: mol_type = other RNA
aactctctcctttgactgta

SEQ ID NO: 3409 - RNA, 20 nt, synthetic construct
  misc_feature 1..20: note = antisense sequence
  source 1..20: mol_type = other RNA
tacaactctctcctttgact

SEQ ID NO: 3410 - RNA, 20 nt, synthetic construct
  misc_feature 1..20: note = antisense sequence
  source 1..20: mol_type = other RNA
tctacaactctctcctttga

SEQ ID NO: 3411 - RNA, 20 nt, synthetic construct
  misc_feature 1..20: note = antisense sequence
  source 1..20: mol_type = other RNA
atctacaactctctcctttg

SEQ ID NO: 3412 - RNA, 20 nt, synthetic construct
  misc_feature 1..20: note = antisense sequence
  source 1..20: mol_type = other RNA
ctatctacaactctctcctt

SEQ ID NO: 3413 - RNA, 20 nt, synthetic construct
  misc_feature 1..20: note = antisense sequence
  source 1..20: mol_type = other RNA
ttctatctacaactctctcc

SEQ ID NO: 3414 - RNA, 20 nt, synthetic construct
  misc_feature 1..20: note = antisense sequence
  source 1..20: mol_type = other RNA
ccgttttctatctacaactc

SEQ ID NO: 3415 - RNA, 20 nt, synthetic construct
  misc_feature 1..20: note = antisense sequence
  source 1..20: mol_type = other RNA
tgccgttttctatctacaac

SEQ ID NO: 3416 - RNA, 20 nt, synthetic construct
  misc_feature 1..20: note = antisense sequence
  source 1..20: mol_type = other RNA
gtgccgttttctatctacaa

SEQ ID NO: 3417 - RNA, 20 nt, synthetic construct
  misc_feature 1..20: note = antisense sequence
  source 1..20: mol_type = other RNA
tgtgccgttttctatctaca

SEQ ID NO: 3418 - RNA, 20 nt, synthetic construct
  misc_feature 1..20: note = antisense sequence
  source 1..20: mol_type = other RNA
gtgtgccgttttctatctac

SEQ ID NO: 3419 - RNA, 20 nt, synthetic construct
  misc_feature 1..20: note = antisense sequence
  source 1..20: mol_type = other RNA
agtgtgccgttttctatcta

SEQ ID NO: 3420 - RNA, 20 nt, synthetic construct
  misc_feature 1..20: note = antisense sequence
  source 1..20: mol_type = other RNA
ttggaagtgtgccgttttct

SEQ ID NO: 3421 - RNA, 20 nt, synthetic construct
  misc_feature 1..20: note = antisense sequence
  source 1..20: mol_type = other RNA
cttggaagtgtgccgttttc

SEQ ID NO: 3422 - RNA, 20 nt, synthetic construct
  misc_feature 1..20: note = antisense sequence
  source 1..20: mol_type = other RNA
acttggaagtgtgccgtttt

SEQ ID NO: 3423 - RNA, 20 nt, synthetic construct
  misc_feature 1..20: note = antisense sequence
  source 1..20: mol_type = other RNA
gacttggaagtgtgccgttt

SEQ ID NO: 3424 - RNA, 20 nt, synthetic construct
  misc_feature 1..20: note = antisense sequence
  source 1..20: mol_type = other RNA
agacttggaagtgtgccgtt

SEQ ID NO: 3425 - RNA, 20 nt, synthetic construct
  misc_feature 1..20: note = antisense sequence
  source 1..20: mol_type = other RNA
aagacttggaagtgtgccgt

SEQ ID NO: 3426 - RNA, 20 nt, synthetic construct
  misc_feature 1..20: note = antisense sequence
  source 1..20: mol_type = other RNA
aaagacttggaagtgtgccg

SEQ ID NO: 3427 - RNA, 20 nt, synthetic construct
  misc_feature 1..20: note = antisense sequence
  source 1..20: mol_type = other RNA
caaagacttggaagtgtgcc

SEQ ID NO: 3428 - RNA, 20 nt, synthetic construct
  misc_feature 1..20: note = antisense sequence
  source 1..20: mol_type = other RNA
gcaaagacttggaagtgtgc

SEQ ID NO: 3429 - RNA, 20 nt, synthetic construct
  misc_feature 1..20: note = antisense sequence
  source 1..20: mol_type = other RNA
agcaaagacttggaagtgtg

SEQ ID NO: 3430 - RNA, 20 nt, synthetic construct
  misc_feature 1..20: note = antisense sequence
  source 1..20: mol_type = other RNA
tagcaaagacttggaagtgt

SEQ ID NO: 3431 - RNA, 20 nt, synthetic construct
  misc_feature 1..20: note = antisense sequence
  source 1..20: mol_type = other RNA
atagcaaagacttggaagtg

SEQ ID NO: 3432 - RNA, 20 nt, synthetic construct
  misc_feature 1..20: note = antisense sequence
  source 1..20: mol_type = other RNA
caatagcaaagacttggaag

SEQ ID NO: 3433 - RNA, 20 nt, synthetic construct
  misc_feature 1..20: note = antisense sequence
  source 1..20: mol_type = other RNA
cacaatagcaaagacttgga

SEQ ID NO: 3434 - RNA, 20 nt, synthetic construct
  misc_feature 1..20: note = antisense sequence
  source 1..20: mol_type = other RNA
tcacaatagcaaagacttgg

SEQ ID NO: 3435 - RNA, 20 nt, synthetic construct
  misc_feature 1..20: note = antisense sequence
  source 1..20: mol_type = other RNA
ctataaagacacatgcacac

SEQ ID NO: 3436 - RNA, 20 nt, synthetic construct
  misc_feature 1..20: note = antisense sequence
  source 1..20: mol_type = other RNA
gctataaagacacatgcaca

SEQ ID NO: 3437 - RNA, 20 nt, synthetic construct
  misc_feature 1..20: note = antisense sequence
  source 1..20: mol_type = other RNA
tgctataaagacacatgcac

SEQ ID NO: 3438 - RNA, 20 nt, synthetic construct
  misc_feature 1..20: note = antisense sequence
  source 1..20: mol_type = other RNA
ctgctataaagacacatgca

SEQ ID NO: 3439 - RNA, 20 nt, synthetic construct
  misc_feature 1..20: note = antisense sequence
  source 1..20: mol_type = other RNA
gctgctataaagacacatgc

SEQ ID NO: 3440 - RNA, 20 nt, synthetic construct
  misc_feature 1..20: note = antisense sequence
  source 1..20: mol_type = other RNA
tgctgctataaagacacatg

SEQ ID NO: 3441 - RNA, 20 nt, synthetic construct
  misc_feature 1..20: note = antisense sequence
  source 1..20: mol_type = other RNA
caaccattgtggaagtcagt

SEQ ID NO: 3442 - RNA, 20 nt, synthetic construct
  misc_feature 1..20: note = antisense sequence
  source 1..20: mol_type = other RNA
tcaaccattgtggaagtcag

SEQ ID NO: 3443 - RNA, 20 nt, synthetic construct
  misc_feature 1..20: note = antisense sequence
  source 1..20: mol_type = other RNA
ttcaaccattgtggaagtca

SEQ ID NO: 3444 - RNA, 20 nt, synthetic construct
  misc_feature 1..20: note = antisense sequence
  source 1..20: mol_type = other RNA
gttcaaccattgtggaagtc

SEQ ID NO: 3445 - RNA, 20 nt, synthetic construct
  misc_feature 1..20: note = antisense sequence
  source 1..20: mol_type = other RNA
agttcaaccattgtggaagt

SEQ ID NO: 3446 - RNA, 20 nt, synthetic construct
  misc_feature 1..20: note = antisense sequence
  source 1..20: mol_type = other RNA
tagttcaaccattgtggaag

SEQ ID NO: 3447 - RNA, 20 nt, synthetic construct
  misc_feature 1..20: note = antisense sequence
  source 1..20: mol_type = other RNA
ctagttcaaccattgtggaa

SEQ ID NO: 3448 - RNA, 20 nt, synthetic construct
  misc_feature 1..20: note = antisense sequence
  source 1..20: mol_type = other RNA
gtggagaaataggaacactt

SEQ ID NO: 3449 - RNA, 20 nt, synthetic construct
  misc_feature 1..20: note = antisense sequence
  source 1..20: mol_type = other RNA
tgtggagaaataggaacact

SEQ ID NO: 3450 - RNA, 20 nt, synthetic construct
  misc_feature 1..20: note = antisense sequence
  source 1..20: mol_type = other RNA
atgtggagaaataggaacac

SEQ ID NO: 3451 - RNA, 20 nt, synthetic construct
  misc_feature 1..20: note = antisense sequence
  source 1..20: mol_type = other RNA
gatgtggagaaataggaaca

SEQ ID NO: 3452 - RNA, 20 nt, synthetic construct
  misc_feature 1..20: note = antisense sequence
  source 1..20: mol_type = other RNA
ggatgtggagaaataggaac

SEQ ID NO: 3453 - RNA, 20 nt, synthetic construct
  misc_feature 1..20: note = antisense sequence
  source 1..20: mol_type = other RNA
aggatgtggagaaataggaa

SEQ ID NO: 3454 - RNA, 20 nt, synthetic construct
  misc_feature 1..20: note = antisense sequence
  source 1..20: mol_type = other RNA
gaggatgtggagaaatagga

SEQ ID NO: 3455 - RNA, 20 nt, synthetic construct
  misc_feature 1..20: note = antisense sequence
  source 1..20: mol_type = other RNA
agaggatgtggagaaatagg

SEQ ID NO: 3456 - RNA, 20 nt, synthetic construct
  misc_feature 1..20: note = antisense sequence
  source 1..20: mol_type = other RNA
gagaggatgtggagaaatag

SEQ ID NO: 3457 - RNA, 20 nt, synthetic construct
  misc_feature 1..20: note = antisense sequence
  source 1..20: mol_type = other RNA
ggagaggatgtggagaaata

SEQ ID NO: 3458 - RNA, 20 nt, synthetic construct
  misc_feature 1..20: note = antisense sequence
  source 1..20: mol_type = other RNA
tggagaggatgtggagaaat

SEQ ID NO: 3459 - RNA, 20 nt, synthetic construct
  misc_feature 1..20: note = antisense sequence
  source 1..20: mol_type = other RNA
ctggagaggatgtggagaaa

SEQ ID NO: 3460 - RNA, 20 nt, synthetic construct
  misc_feature 1..20: note = antisense sequence
  source 1..20: mol_type = other RNA
gctggagaggatgtggagaa

SEQ ID NO: 3461 - RNA, 20 nt, synthetic construct
  misc_feature 1..20: note = antisense sequence
  source 1..20: mol_type = other RNA
tgctggagaggatgtggaga

SEQ ID NO: 3462 - RNA, 20 nt, synthetic construct
  misc_feature 1..20: note = antisense sequence
  source 1..20: mol_type = other RNA
gtgctggagaggatgtggag

SEQ ID NO: 3463 - RNA, 20 nt, synthetic construct
  misc_feature 1..20: note = antisense sequence
  source 1..20: mol_type = other RNA
ggtgctggagaggatgtgga

SEQ ID NO: 3464 - RNA, 20 nt, synthetic construct
  misc_feature 1..20: note = antisense sequence
  source 1..20: mol_type = other RNA
aggtgctggagaggatgtgg

SEQ ID NO: 3465 - RNA, 20 nt, synthetic construct
  misc_feature 1..20: note = antisense sequence
  source 1..20: mol_type = other RNA
caggtgctggagaggatgtg

SEQ ID NO: 3466 - RNA, 20 nt, synthetic construct
  misc_feature 1..20: note = antisense sequence
  source 1..20: mol_type = other RNA
acaggtgctggagaggatgt

SEQ ID NO: 3467 - RNA, 20 nt, synthetic construct
  misc_feature 1..20: note = antisense sequence
  source 1..20: mol_type = other RNA
gtcaggaaacaacaggtgct

SEQ ID NO: 3468 - RNA, 20 nt, synthetic construct
  misc_feature 1..20: note = antisense sequence
  source 1..20: mol_type = other RNA
agtcaggaaacaacaggtgc

SEQ ID NO: 3469 - RNA, 20 nt, synthetic construct
  misc_feature 1..20: note = antisense sequence
  source 1..20: mol_type = other RNA
aagtcaggaaacaacaggtg

SEQ ID NO: 3470 - RNA, 20 nt, synthetic construct
  misc_feature 1..20: note = antisense sequence
  source 1..20: mol_type = other RNA
aaagtcaggaaacaacaggt

SEQ ID NO: 3471 - RNA, 20 nt, synthetic construct
  misc_feature 1..20: note = antisense sequence
  source 1..20: mol_type = other RNA
aaaagtcaggaaacaacagg

SEQ ID NO: 3472 - RNA, 20 nt, synthetic construct
  misc_feature 1..20: note = antisense sequence
  source 1..20: mol_type = other RNA
ccatcagagaaatgcaaatc

SEQ ID NO: 3473 - RNA, 20 nt, synthetic construct
  misc_feature 1..20: note = antisense sequence
  source 1..20: mol_type = other RNA
gccatcagagaaatgcaaat

SEQ ID NO: 3474 - RNA, 20 nt, synthetic construct
  misc_feature 1..20: note = antisense sequence
  source 1..20: mol_type = other RNA
ggccatcagagaaatgcaaa

SEQ ID NO: 3475 - RNA, 20 nt, synthetic construct
  misc_feature 1..20: note = antisense sequence
  source 1..20: mol_type = other RNA
gaagacatttatgcagccaa

SEQ ID NO: 3476 - RNA, 20 nt, synthetic construct
  misc_feature 1..20: note = antisense sequence
  source 1..20: mol_type = other RNA
agaagacatttatgcagcca

SEQ ID NO: 3477 - RNA, 20 nt, synthetic construct
  misc_feature 1..20: note = antisense sequence
  source 1..20: mol_type = other RNA
aagaagacatttatgcagcc

SEQ ID NO: 3478 - RNA, 20 nt, synthetic construct
  misc_feature 1..20: note = antisense sequence
  source 1..20: mol_type = other RNA
gaacagacacttctcaaaag

SEQ ID NO: 3479 - RNA, 20 nt, synthetic construct
  misc_feature 1..20: note = antisense sequence
  source 1..20: mol_type = other RNA
gatatgaacagacacttctc

SEQ ID NO: 3480 - RNA, 20 nt, synthetic construct
  misc_feature 1..20: note = antisense sequence
  source 1..20: mol_type = other RNA
ggatatgaacagacacttct

SEQ ID NO: 3481 - RNA, 20 nt, synthetic construct
  misc_feature 1..20: note = antisense sequence
  source 1..20: mol_type = other RNA
aggatatgaacagacacttc

SEQ ID NO: 3482 - RNA, 20 nt, synthetic construct
  misc_feature 1..20: note = antisense sequence
  source 1..20: mol_type = other RNA
gggctaatatccagaatcta

SEQ ID NO: 3483 - RNA, 20 nt, synthetic construct
  misc_feature 1..20: note = antisense sequence
  source 1..20: mol_type = other RNA
agggctaatatccagaatct

SEQ ID NO: 3484 - RNA, 20 nt, synthetic construct
  misc_feature 1..20: note = antisense sequence
  source 1..20: mol_type = other RNA
aagggctaatatccagaatc

SEQ ID NO: 3485 - RNA, 20 nt, synthetic construct
  misc_feature 1..20: note = antisense sequence
  source 1..20: mol_type = other RNA
gaaactaccatcagagtgaa

SEQ ID NO: 3486 - RNA, 20 nt, synthetic construct
  misc_feature 1..20: note = antisense sequence
  source 1..20: mol_type = other RNA
agaaactaccatcagagtga

SEQ ID NO: 3487 - RNA, 20 nt, synthetic construct
  misc_feature 1..20: note = antisense sequence
  source 1..20: mol_type = other RNA
aagaaactaccatcagagtg

SEQ ID NO: 3488 - RNA, 20 nt, synthetic construct
  misc_feature 1..20: note = antisense sequence
  source 1..20: mol_type = other RNA
gcaaaagaaactaccatcag

SEQ ID NO: 3489 - RNA, 20 nt, synthetic construct
  misc_feature 1..20: note = antisense sequence
  source 1..20: mol_type = other RNA
cagcaaaagaaactaccatc

SEQ ID NO: 3490 - RNA, 20 nt, synthetic construct
  misc_feature 1..20: note = antisense sequence
  source 1..20: mol_type = other RNA
cacagcaaaagaaactacca

SEQ ID NO: 3491 - RNA, 20 nt, synthetic construct
  misc_feature 1..20: note = antisense sequence
  source 1..20: mol_type = other RNA
gcacagcaaaagaaactacc

SEQ ID NO: 3492 - RNA, 20 nt, synthetic construct
  misc_feature 1..20: note = antisense sequence
  source 1..20: mol_type = other RNA
tgcacagcaaaagaaactac

SEQ ID NO: 3493 - RNA, 20 nt, synthetic construct
  misc_feature 1..20: note = antisense sequence
  source 1..20: mol_type = other RNA
ctgcacagcaaaagaaacta

SEQ ID NO: 3494 - RNA, 20 nt, synthetic construct
  misc_feature 1..20: note = antisense sequence
  source 1..20: mol_type = other RNA
tctgcacagcaaaagaaact

SEQ ID NO: 3495 - RNA, 20 nt, synthetic construct
  misc_feature 1..20: note = antisense sequence
  source 1..20: mol_type = other RNA
aacttctgcacagcaaaaga

SEQ ID NO: 3496 - RNA, 20 nt, synthetic construct
  misc_feature 1..20: note = antisense sequence
  source 1..20: mol_type = other RNA
gaacttctgcacagcaaaag

SEQ ID NO: 3497 - RNA, 20 nt, synthetic construct
  misc_feature 1..20: note = antisense sequence
  source 1..20: mol_type = other RNA
agaacttctgcacagcaaaa

SEQ ID NO: 3498 - RNA, 20 nt, synthetic construct
  misc_feature 1..20: note = antisense sequence
  source 1..20: mol_type = other RNA
aagaacttctgcacagcaaa

SEQ ID NO: 3499 - RNA, 20 nt, synthetic construct
  misc_feature 1..20: note = antisense sequence
  source 1..20: mol_type = other RNA
gtgctgggaaaactggctag

SEQ ID NO: 3500 - RNA, 20 nt, synthetic construct
  misc_feature 1..20: note = antisense sequence
  source 1..20: mol_type = other RNA
ggtgctgggaaaactggcta

SEQ ID NO: 3501 - RNA, 20 nt, synthetic construct
  misc_feature 1..20: note = antisense sequence
  source 1..20: mol_type = other RNA
tggtgctgggaaaactggct

SEQ ID NO: 3502 - RNA, 20 nt, synthetic construct
  misc_feature 1..20: note = antisense sequence
  source 1..20: mol_type = other RNA
atggtgctgggaaaactggc

SEQ ID NO: 3503 - RNA, 20 nt, synthetic construct
  misc_feature 1..20: note = antisense sequence
  source 1..20: mol_type = other RNA
aatggtgctgggaaaactgg

SEQ ID NO: 3504 - RNA, 20 nt, synthetic construct
  misc_feature 1..20: note = antisense sequence
  source 1..20: mol_type = other RNA
aaatggtgctgggaaaactg

SEQ ID NO: 3505 - RNA, 20 nt, synthetic construct
  misc_feature 1..20: note = antisense sequence
  source 1..20: mol_type = other RNA
taaatggtgctgggaaaact

SEQ ID NO: 3506 - RNA, 20 nt, synthetic construct
  misc_feature 1..20: note = antisense sequence
  source 1..20: mol_type = other RNA
ataaatggtgctgggaaaac

SEQ ID NO: 3507 - RNA, 20 nt, synthetic construct
  misc_feature 1..20: note = antisense sequence
  source 1..20: mol_type = other RNA
ctgatctttgacaaacctga

SEQ ID NO: 3508 - RNA, 20 nt, synthetic construct
  misc_feature 1..20: note = antisense sequence
  source 1..20: mol_type = other RNA
tctgatctttgacaaacctg

SEQ ID NO: 3509 - RNA, 20 nt, synthetic construct
  misc_feature 1..20: note = antisense sequence
  source 1..20: mol_type = other RNA
catctgatctttgacaaacc

SEQ ID NO: 3510 - RNA, 20 nt, synthetic construct
  misc_feature 1..20: note = antisense sequence
  source 1..20: mol_type = other RNA
ccatctgatctttgacaaac

SEQ ID NO: 3511 - RNA, 20 nt, synthetic construct
  misc_feature 1..20: note = antisense sequence
  source 1..20: mol_type = other RNA
gccacatatctaaccatctg

SEQ ID NO: 3512 - RNA, 20 nt, synthetic construct
  misc_feature 1..20: note = antisense sequence
  source 1..20: mol_type = other RNA
tgccacatatctaaccatct

SEQ ID NO: 3513 - RNA, 20 nt, synthetic construct
  misc_feature 1..20: note = antisense sequence
  source 1..20: mol_type = other RNA
atgccacatatctaaccatc

SEQ ID NO: 3514 - RNA, 20 nt, synthetic construct
  misc_feature 1..20: note = antisense sequence
  source 1..20: mol_type = other RNA
aaacagcatggtactggtac

SEQ ID NO: 3515 - RNA, 20 nt, synthetic construct
  misc_feature 1..20: note = antisense sequence
  source 1..20: mol_type = other RNA
aaaacagcatggtactggta

SEQ ID NO: 3516 - RNA, 20 nt, synthetic construct
  misc_feature 1..20: note = antisense sequence
  source 1..20: mol_type = other RNA
caaaacagcatggtactggt

SEQ ID NO: 3517 - RNA, 20 nt, synthetic construct
  misc_feature 1..20: note = antisense sequence
  source 1..20: mol_type = other RNA
ccaaaacagcatggtactgg

SEQ ID NO: 3518 - RNA, 20 nt, synthetic construct
  misc_feature 1..20: note = antisense sequence
  source 1..20: mol_type = other RNA
cagtaaccaaaacagcatgg

SEQ ID NO: 3519 - RNA, 20 nt, synthetic construct
  misc_feature 1..20: note = antisense sequence
  source 1..20: mol_type = other RNA
acagtaaccaaaacagcatg

SEQ ID NO: 3520 - RNA, 20 nt, synthetic construct
  misc_feature 1..20: note = antisense sequence
  source 1..20: mol_type = other RNA
ctacagtaaccaaaacagca

SEQ ID NO: 3521 - RNA, 20 nt, synthetic construct
  misc_feature 1..20: note = antisense sequence
  source 1..20: mol_type = other RNA
gctacagtaaccaaaacagc

SEQ ID NO: 3522 - RNA, 20 nt, synthetic construct
  misc_feature 1..20: note = antisense sequence
  source 1..20: mol_type = other RNA
ggctacagtaaccaaaacag

SEQ ID NO: 3523 - RNA, 20 nt, synthetic construct
  misc_feature 1..20: note = antisense sequence
  source 1..20: mol_type = other RNA
gaacaaagctggaggcatca

SEQ ID NO: 3524 - RNA, 20 nt, synthetic construct
  misc_feature 1..20: note = antisense sequence
  source 1..20: mol_type = other RNA
agaacaaagctggaggcatc

SEQ ID NO: 3525 - RNA, 20 nt, synthetic construct
  misc_feature 1..20: note = antisense sequence
  source 1..20: mol_type = other RNA
aagaacaaagctggaggcat

SEQ ID NO: 3526 - RNA, 20 nt, synthetic construct
  misc_feature 1..20: note = antisense sequence
  source 1..20: mol_type = other RNA
aaagaacaaagctggaggca

SEQ ID NO: 3527 - RNA, 20 nt, synthetic construct
  misc_feature 1..20: note = antisense sequence
  source 1..20: mol_type = other RNA
aaaagaacaaagctggaggc

SEQ ID NO: 3528 - RNA, 20 nt, synthetic construct
  misc_feature 1..20: note = antisense sequence
  source 1..20: mol_type = other RNA
caaaagaacaaagctggagg

SEQ ID NO: 3529 - RNA, 20 nt, synthetic construct
  misc_feature 1..20: note = antisense sequence
  source 1..20: mol_type = other RNA
catggtgtatatgtgccaca

SEQ ID NO: 3530 - RNA, 20 nt, synthetic construct
  misc_feature 1..20: note = antisense sequence
  source 1..20: mol_type = other RNA
tgactgcatagtattccatg

SEQ ID NO: 3531 - RNA, 20 nt, synthetic construct
  misc_feature 1..20: note = antisense sequence
  source 1..20: mol_type = other RNA
caaaggacatgaactcatca

SEQ ID NO: 3532 - RNA, 20 nt, synthetic construct
  misc_feature 1..20: note = antisense sequence
  source 1..20: mol_type = other RNA
acaaaggacatgaactcatc

SEQ ID NO: 3533 - RNA, 20 nt, synthetic construct
  misc_feature 1..20: note = antisense sequence
  source 1..20: mol_type = other RNA
ctacaaaggacatgaactca

SEQ ID NO: 3534 - RNA, 20 nt, synthetic construct
  misc_feature 1..20: note = antisense sequence
  source 1..20: mol_type = other RNA
cctacaaaggacatgaactc

SEQ ID NO: 3535 - RNA, 20 nt, synthetic construct
  misc_feature 1..20: note = antisense sequence
  source 1..20: mol_type = other RNA
ccctacaaaggacatgaact

SEQ ID NO: 3536 - RNA, 20 nt, synthetic construct
  misc_feature 1..20: note = antisense sequence
  source 1..20: mol_type = other RNA
tccctacaaaggacatgaac

SEQ ID NO: 3537 - RNA, 20 nt, synthetic construct
  misc_feature 1..20: note = antisense sequence
  source 1..20: mol_type = other RNA
tcatccatgtccctacaaag

SEQ ID NO: 3538 - RNA, 20 nt, synthetic construct
  misc_feature 1..20: note = antisense sequence
  source 1..20: mol_type = other RNA
ttcatccatgtccctacaaa

SEQ ID NO: 3539 - RNA, 20 nt, synthetic construct
  misc_feature 1..20: note = antisense sequence
  source 1..20: mol_type = other RNA
cttcatccatgtccctacaa

SEQ ID NO: 3540 - RNA, 20 nt, synthetic construct
  misc_feature 1..20: note = antisense sequence
  source 1..20: mol_type = other RNA
gcttcatccatgtccctaca

SEQ ID NO: 3541 - RNA, 20 nt, synthetic construct
  misc_feature 1..20: note = antisense sequence
  source 1..20: mol_type = other RNA
agcttcatccatgtccctac

SEQ ID NO: 3542 - RNA, 20 nt, synthetic construct
  misc_feature 1..20: note = antisense sequence
  source 1..20: mol_type = other RNA
cagcttcatccatgtcccta

SEQ ID NO: 3543 - RNA, 20 nt, synthetic construct
  misc_feature 1..20: note = antisense sequence
  source 1..20: mol_type = other RNA
ccagcttcatccatgtccct

SEQ ID NO: 3544 - RNA, 20 nt, synthetic construct
  misc_feature 1..20: note = antisense sequence
  source 1..20: mol_type = other RNA
tccagcttcatccatgtccc

SEQ ID NO: 3545 - RNA, 20 nt, synthetic construct
  misc_feature 1..20: note = antisense sequence
  source 1..20: mol_type = other RNA
ttccagcttcatccatgtcc

SEQ ID NO: 3546 - RNA, 20 nt, synthetic construct
  misc_feature 1..20: note = antisense sequence
  source 1..20: mol_type = other RNA
tttccagcttcatccatgtc

SEQ ID NO: 3547 - RNA, 20 nt, synthetic construct
  misc_feature 1..20: note = antisense sequence
  source 1..20: mol_type = other RNA
gtttccagcttcatccatgt

SEQ ID NO: 3548 - RNA, 20 nt, synthetic construct
  misc_feature 1..20: note = antisense sequence
  source 1..20: mol_type = other RNA
ggtttccagcttcatccatg

SEQ ID NO: 3549 - RNA, 20 nt, synthetic construct
  misc_feature 1..20: note = antisense sequence
  source 1..20: mol_type = other RNA
tggtttccagcttcatccat

SEQ ID NO: 3550 - RNA, 20 nt, synthetic construct
  misc_feature 1..20: note = antisense sequence
  source 1..20: mol_type = other RNA
atggtttccagcttcatcca

SEQ ID NO: 3551 - RNA, 20 nt, synthetic construct
  misc_feature 1..20: note = antisense sequence
  source 1..20: mol_type = other RNA
aatgatggtttccagcttca

SEQ ID NO: 3552 - RNA, 20 nt, synthetic construct
  misc_feature 1..20: note = antisense sequence
  source 1..20: mol_type = other RNA
gaatgatggtttccagcttc

SEQ ID NO: 3553 - RNA, 20 nt, synthetic construct
  misc_feature 1..20: note = antisense sequence
  source 1..20: mol_type = other RNA
agaatgatggtttccagctt

SEQ ID NO: 3554 - RNA, 20 nt, synthetic construct
  misc_feature 1..20: note = antisense sequence
  source 1..20: mol_type = other RNA
gagaatgatggtttccagct

SEQ ID NO: 3555 - RNA, 20 nt, synthetic construct
  misc_feature 1..20: note = antisense sequence
  source 1..20: mol_type = other RNA
tgagaatgatggtttccagc

SEQ ID NO: 3556 - RNA, 20 nt, synthetic construct
  misc_feature 1..20: note = antisense sequence
  source 1..20: mol_type = other RNA
ctgagaatgatggtttccag

SEQ ID NO: 3557 - RNA, 20 nt, synthetic construct
  misc_feature 1..20: note = antisense sequence
  source 1..20: mol_type = other RNA
gctgagaatgatggtttcca

SEQ ID NO: 3558 - RNA, 20 nt, synthetic construct
  misc_feature 1..20: note = antisense sequence
  source 1..20: mol_type = other RNA
tgctgagaatgatggtttcc

SEQ ID NO: 3559 - RNA, 20 nt, synthetic construct
  misc_feature 1..20: note = antisense sequence
  source 1..20: mol_type = other RNA
ttgctgagaatgatggtttc

SEQ ID NO: 3560 - RNA, 20 nt, synthetic construct
  misc_feature 1..20: note = antisense sequence
  source 1..20: mol_type = other RNA
gtttgctgagaatgatggtt

SEQ ID NO: 3561 - RNA, 20 nt, synthetic construct
  misc_feature 1..20: note = antisense sequence
  source 1..20: mol_type = other RNA
agtttgctgagaatgatggt

SEQ ID NO: 3562 - RNA, 20 nt, synthetic construct
  misc_feature 1..20: note = antisense sequence
  source 1..20: mol_type = other RNA
tagtttgctgagaatgatgg

SEQ ID NO: 3563 - RNA, 20 nt, synthetic construct
  misc_feature 1..20: note = antisense sequence
  source 1..20: mol_type = other RNA
cgatagtttgctgagaatga

SEQ ID NO: 3564 - RNA, 20 nt, synthetic construct
  misc_feature 1..20: note = antisense sequence
  source 1..20: mol_type = other RNA
gcgatagtttgctgagaatg

SEQ ID NO: 3565 - RNA, 20 nt, synthetic construct
  misc_feature 1..20: note = antisense sequence
  source 1..20: mol_type = other RNA
tgcgatagtttgctgagaat

SEQ ID NO: 3566 - RNA, 20 nt, synthetic construct
  misc_feature 1..20: note = antisense sequence
  source 1..20: mol_type = other RNA
cacctatgagtgagaacatg

SEQ ID NO: 3567 - RNA, 20 nt, synthetic construct
  misc_feature 1..20: note = antisense sequence
  source 1..20: mol_type = other RNA
ccacctatgagtgagaacat

SEQ ID NO: 3568 - RNA, 20 nt, synthetic construct
  misc_feature 1..20: note = antisense sequence
  source 1..20: mol_type = other RNA
cccacctatgagtgagaaca

SEQ ID NO: 3569 - RNA, 20 nt, synthetic construct
  misc_feature 1..20: note = antisense sequence
  source 1..20: mol_type = other RNA
tcccacctatgagtgagaac

SEQ ID NO: 3570 - RNA, 20 nt, synthetic construct
  misc_feature 1..20: note = antisense sequence
  source 1..20: mol_type = other RNA
ttcccacctatgagtgagaa

SEQ ID NO: 3571 - RNA, 20 nt, synthetic construct
  misc_feature 1..20: note = antisense sequence
  source 1..20: mol_type = other RNA
attcccacctatgagtgaga

SEQ ID NO: 3572 - RNA, 20 nt, synthetic construct
  misc_feature 1..20: note = antisense sequence
  source 1..20: mol_type = other RNA
aattcccacctatgagtgag

SEQ ID NO: 3573 - RNA, 20 nt, synthetic construct
  misc_feature 1..20: note = antisense sequence
  source 1..20: mol_type = other RNA
taattcccacctatgagtga

SEQ ID NO: 3574 - RNA, 20 nt, synthetic construct
  misc_feature 1..20: note = antisense sequence
  source 1..20: mol_type = other RNA
ttaattcccacctatgagtg

SEQ ID NO: 3575 - RNA, 20 nt, synthetic construct
  misc_feature 1..20: note = antisense sequence
  source 1..20: mol_type = other RNA
cccttcctgtgtccaagtgt

SEQ ID NO: 3576 - RNA, 20 nt, synthetic construct
  misc_feature 1..20: note = antisense sequence
  source 1..20: mol_type = other RNA
ctcctaatgctatccctccc

SEQ ID NO: 3577 - RNA, 20 nt, synthetic construct
  misc_feature 1..20: note = antisense sequence
  source 1..20: mol_type = other RNA
tctcctaatgctatccctcc

SEQ ID NO: 3578 - RNA, 20 nt, synthetic construct
  misc_feature 1..20: note = antisense sequence
  source 1..20: mol_type = other RNA
atctcctaatgctatccctc

SEQ ID NO: 3579 - RNA, 20 nt, synthetic construct
  misc_feature 1..20: note = antisense sequence
  source 1..20: mol_type = other RNA
tatctcctaatgctatccct

SEQ ID NO: 3580 - RNA, 20 nt, synthetic construct
  misc_feature 1..20: note = antisense sequence
  source 1..20: mol_type = other RNA
gtatctcctaatgctatccc

SEQ ID NO: 3581 - RNA, 20 nt, synthetic construct
  misc_feature 1..20: note = antisense sequence
  source 1..20: mol_type = other RNA
tgtatctcctaatgctatcc

SEQ ID NO: 3582 - RNA, 20 nt, synthetic construct
  misc_feature 1..20: note = antisense sequence
  source 1..20: mol_type = other RNA
gtgtatctcctaatgctatc

SEQ ID NO: 3583 - RNA, 20 nt, synthetic construct
  misc_feature 1..20: note = antisense sequence
  source 1..20: mol_type = other RNA
aagagcaagtgtgccatttt

SEQ ID NO: 3584 - RNA, 20 nt, synthetic construct
  misc_feature 1..20: note = antisense sequence
  source 1..20: mol_type = other RNA
caagagcaagtgtgccattt

SEQ ID NO: 3585 - RNA, 20 nt, synthetic construct
  misc_feature 1..20: note = antisense sequence
  source 1..20: mol_type = other RNA
tcaagagcaagtgtgccatt

SEQ ID NO: 3586 - RNA, 20 nt, synthetic construct
  misc_feature 1..20: note = antisense sequence
  source 1..20: mol_type = other RNA
gtcaagagcaagtgtgccat

SEQ ID NO: 3587 - RNA, 20 nt, synthetic construct
  misc_feature 1..20: note = antisense sequence
  source 1..20: mol_type = other RNA
agtcaagagcaagtgtgcca

SEQ ID NO: 3588 - RNA, 20 nt, synthetic construct
  misc_feature 1..20: note = antisense sequence
  source 1..20: mol_type = other RNA
ggagtcaagagcaagtgtgc

SEQ ID NO: 3589 - RNA, 20 nt, synthetic construct
  misc_feature 1..20: note = antisense sequence
  source 1..20: mol_type = other RNA
gggagtcaagagcaagtgtg

SEQ ID NO: 3590 - RNA, 20 nt, synthetic construct
  misc_feature 1..20: note = antisense sequence
  source 1..20: mol_type = other RNA
agggagtcaagagcaagtgt

SEQ ID NO: 3591 - RNA, 20 nt, synthetic construct
  misc_feature 1..20: note = antisense sequence
  source 1..20: mol_type = other RNA
aagggagtcaagagcaagtg

SEQ ID NO: 3592 - RNA, 20 nt, synthetic construct
  misc_feature 1..20: note = antisense sequence
  source 1..20: mol_type = other RNA
caagggagtcaagagcaagt

SEQ ID NO: 3593 - RNA, 20 nt, synthetic construct
  misc_feature 1..20: note = antisense sequence
  source 1..20: mol_type = other RNA
ccaagggagtcaagagcaag

SEQ ID NO: 3594 - RNA, 20 nt, synthetic construct
  misc_feature 1..20: note = antisense sequence
  source 1..20: mol_type = other RNA
gccaagggagtcaagagcaa

SEQ ID NO: 3595 - RNA, 20 nt, synthetic construct
  misc_feature 1..20: note = antisense sequence
  source 1..20: mol_type = other RNA
ggccaagggagtcaagagca

SEQ ID NO: 3596 - RNA, 20 nt, synthetic construct
  misc_feature 1..20: note = antisense sequence
  source 1..20: mol_type = other RNA
gtattacctccacctccggc

SEQ ID NO: 3597 - RNA, 20 nt, synthetic construct
  misc_feature 1..20: note = antisense sequence
  source 1..20: mol_type = other RNA
tgtattacctccacctccgg

SEQ ID NO: 3598 - RNA, 20 nt, synthetic construct
  misc_feature 1..20: note = antisense sequence
  source 1..20: mol_type = other RNA
atgtattacctccacctccg

SEQ ID NO: 3599 - RNA, 20 nt, synthetic construct
  misc_feature 1..20: note = antisense sequence
  source 1..20: mol_type = other RNA
aatgtattacctccacctcc

SEQ ID NO: 3600 - RNA, 20 nt, synthetic construct
  misc_feature 1..20: note = antisense sequence
  source 1..20: mol_type = other RNA
caatgtattacctccacctc

SEQ ID NO: 3601 - RNA, 20 nt, synthetic construct
  misc_feature 1..20: note = antisense sequence
  source 1..20: mol_type = other RNA
acaatgtattacctccacct

SEQ ID NO: 3602 - RNA, 20 nt, synthetic construct
  misc_feature 1..20: note = antisense sequence
  source 1..20: mol_type = other RNA
catcaatgaacaaggatcag

SEQ ID NO: 3603 - RNA, 20 nt, synthetic construct
  misc_feature 1..20: note = antisense sequence
  source 1..20: mol_type = other RNA
ggctggttctcatcaatgaa

SEQ ID NO: 3604 - RNA, 20 nt, synthetic construct
  misc_feature 1..20: note = antisense sequence
  source 1..20: mol_type = other RNA
gggctggttctcatcaatga

SEQ ID NO: 3605 - RNA, 20 nt, synthetic construct
  misc_feature 1..20: note = antisense sequence
  source 1..20: mol_type = other RNA
tgggctggttctcatcaatg

SEQ ID NO: 3606 - RNA, 20 nt, synthetic construct
  misc_feature 1..20: note = antisense sequence
  source 1..20: mol_type = other RNA
gtgggctggttctcatcaat

SEQ ID NO: 3607 - RNA, 20 nt, synthetic construct
  misc_feature 1..20: note = antisense sequence
  source 1..20: mol_type = other RNA
tgtgggctggttctcatcaa

SEQ ID NO: 3608 - RNA, 20 nt, synthetic construct
  misc_feature 1..20: note = antisense sequence
  source 1..20: mol_type = other RNA
atgtgggctggttctcatca

SEQ ID NO: 3609 - RNA, 20 nt, synthetic construct
  misc_feature 1..20: note = antisense sequence
  source 1..20: mol_type = other RNA
taggtggaagccatgtgggc

SEQ ID NO: 3610 - RNA, 20 nt, synthetic construct
  misc_feature 1..20: note = antisense sequence
  source 1..20: mol_type = other RNA
gcagtaggtggaagccatgt

SEQ ID NO: 3611 - RNA, 20 nt, synthetic construct
  misc_feature 1..20: note = antisense sequence
  source 1..20: mol_type = other RNA
ctagcagtaggtggaagcca

SEQ ID NO: 3612 - RNA, 20 nt, synthetic construct
  misc_feature 1..20: note = antisense sequence
  source 1..20: mol_type = other RNA
cccagagtccctagcagtag

SEQ ID NO: 3613 - RNA, 20 nt, synthetic construct
  misc_feature 1..20: note = antisense sequence
  source 1..20: mol_type = other RNA
tcccagagtccctagcagta

SEQ ID NO: 3614 - RNA, 20 nt, synthetic construct
  misc_feature 1..20: note = antisense sequence
  source 1..20: mol_type = other RNA
tgtcccagagtccctagcag

SEQ ID NO: 3615 - RNA, 20 nt, synthetic construct
  misc_feature 1..20: note = antisense sequence
  source 1..20: mol_type = other RNA
atgtcccagagtccctagca

SEQ ID NO: 3616 - RNA, 20 nt, synthetic construct
  misc_feature 1..20: note = antisense sequence
  source 1..20: mol_type = other RNA
tatgtcccagagtccctagc

SEQ ID NO: 3617 - RNA, 20 nt, synthetic construct
  misc_feature 1..20: note = antisense sequence
  source 1..20: mol_type = other RNA
gtatgtcccagagtccctag

SEQ ID NO: 3618 - RNA, 20 nt, synthetic construct
  misc_feature 1..20: note = antisense sequence
  source 1..20: mol_type = other RNA
tgtatgtcccagagtcccta

SEQ ID NO: 3619 - RNA, 20 nt, synthetic construct
  misc_feature 1..20: note = antisense sequence
  source 1..20: mol_type = other RNA
gtgcttgtctgtatgtccca

SEQ ID NO: 3620 - RNA, 20 nt, synthetic construct
  misc_feature 1..20: note = antisense sequence
  source 1..20: mol_type = other RNA
tatgtgcttgtctgtatgtc

SEQ ID NO: 3621 - RNA, 20 nt, synthetic construct
  misc_feature 1..20: note = antisense sequence
  source 1..20: mol_type = other RNA
gctcaccaaatatcaccaaa

SEQ ID NO: 3622 - RNA, 20 nt, synthetic construct
  misc_feature 1..20: note = antisense sequence
  source 1..20: mol_type = other RNA
gggctcaccaaatatcacca

SEQ ID NO: 3623 - RNA, 20 nt, synthetic construct
  misc_feature 1..20: note = antisense sequence
  source 1..20: mol_type = other RNA
tagggctcaccaaatatcac

SEQ ID NO: 3624 - RNA, 20 nt, synthetic construct
  misc_feature 1..20: note = antisense sequence
  source 1..20: mol_type = other RNA
ttagggctcaccaaatatca

SEQ ID NO: 3625 - RNA, 20 nt, synthetic construct
  misc_feature 1..20: note = antisense sequence
  source 1..20: mol_type = other RNA
cagttagggctcaccaaata

SEQ ID NO: 3626 - RNA, 20 nt, synthetic construct
  misc_feature 1..20: note = antisense sequence
  source 1..20: mol_type = other RNA
gcagttagggctcaccaaat

SEQ ID NO: 3627 - RNA, 20 nt, synthetic construct
  misc_feature 1..20: note = antisense sequence
  source 1..20: mol_type = other RNA
gggagagaactaaatgcttc

SEQ ID NO: 3628 - RNA, 20 nt, synthetic construct
  misc_feature 1..20: note = antisense sequence
  source 1..20: mol_type = other RNA
tagcaaatatcctcccagca

SEQ ID NO: 3629 - RNA, 20 nt, synthetic construct
  misc_feature 1..20: note = antisense sequence
  source 1..20: mol_type = other RNA
atagcaaatatcctcccagc

SEQ ID NO: 3630 - RNA, 20 nt, synthetic construct
  misc_feature 1..20: note = antisense sequence
  source 1..20: mol_type = other RNA
tatagcaaatatcctcccag

SEQ ID NO: 3631 - RNA, 20 nt, synthetic construct
  misc_feature 1..20: note = antisense sequence
  source 1..20: mol_type = other RNA
gggaaactagcagaatatag

SEQ ID NO: 3632 - RNA, 20 nt, synthetic construct
  misc_feature 1..20: note = antisense sequence
  source 1..20: mol_type = other RNA
gagagtttcatctttccact

SEQ ID NO: 3633 - RNA, 20 nt, synthetic construct
  misc_feature 1..20: note = antisense sequence
  source 1..20: mol_type = other RNA
tgagagtttcatctttccac

SEQ ID NO: 3634 - RNA, 20 nt, synthetic construct
  misc_feature 1..20: note = antisense sequence
  source 1..20: mol_type = other RNA
gagtacatgaaacctatcca

SEQ ID NO: 3635 - RNA, 20 nt, synthetic construct
  misc_feature 1..20: note = antisense sequence
  source 1..20: mol_type = other RNA
catacacacacacacttaga

SEQ ID NO: 3636 - RNA, 20 nt, synthetic construct
  misc_feature 1..20: note = antisense sequence
  source 1..20: mol_type = other RNA
acatacacacacacacttag

SEQ ID NO: 3637 - RNA, 20 nt, synthetic construct
  misc_feature 1..20: note = antisense sequence
  source 1..20: mol_type = other RNA
cacatacacacacacactta

SEQ ID NO: 3638 - RNA, 20 nt, synthetic construct
  misc_feature 1..20: note = antisense sequence
  source 1..20: mol_type = other RNA
gcacatacacacacacactt

SEQ ID NO: 3639 - RNA, 20 nt, synthetic construct
  misc_feature 1..20: note = antisense sequence
  source 1..20: mol_type = other RNA
tgcacatacacacacacact

SEQ ID NO: 3640 - RNA, 20 nt, synthetic construct
  misc_feature 1..20: note = antisense sequence
  source 1..20: mol_type = other RNA
atgcacatacacacacacac

SEQ ID NO: 3641 - RNA, 20 nt, synthetic construct
  misc_feature 1..20: note = antisense sequence
  source 1..20: mol_type = other RNA
catgcacatacacacacaca

SEQ ID NO: 3642 - RNA, 20 nt, synthetic construct
  misc_feature 1..20: note = antisense sequence
  source 1..20: mol_type = other RNA
acatgcacatacacacacac

SEQ ID NO: 3643 - RNA, 20 nt, synthetic construct
  misc_feature 1..20: note = antisense sequence
  source 1..20: mol_type = other RNA
gtcttcgtatttgctggtat

SEQ ID NO: 3644 - RNA, 20 nt, synthetic construct
  misc_feature 1..20: note = antisense sequence
  source 1..20: mol_type = other RNA
agtcttcgtatttgctggta

SEQ ID NO: 3645 - RNA, 20 nt, synthetic construct
  misc_feature 1..20: note = antisense sequence
  source 1..20: mol_type = other RNA
aagtcttcgtatttgctggt

SEQ ID NO: 3646 - RNA, 20 nt, synthetic construct
  misc_feature 1..20: note = antisense sequence
  source 1..20: mol_type = other RNA
caagtcttcgtatttgctgg

SEQ ID NO: 3647 - RNA, 20 nt, synthetic construct
  misc_feature 1..20: note = antisense sequence
  source 1..20: mol_type = other RNA
ccaagtcttcgtatttgctg

SEQ ID NO: 3648 - RNA, 20 nt, synthetic construct
  misc_feature 1..20: note = antisense sequence
  source 1..20: mol_type = other RNA
tccaagtcttcgtatttgct

SEQ ID NO: 3649 - RNA, 20 nt, synthetic construct
  misc_feature 1..20: note = antisense sequence
  source 1..20: mol_type = other RNA
atccaagtcttcgtatttgc

SEQ ID NO: 3650 - RNA, 20 nt, synthetic construct
  misc_feature 1..20: note = antisense sequence
  source 1..20: mol_type = other RNA
ctgaatccaagtcttcgtat

SEQ ID NO: 3651 - RNA, 20 nt, synthetic construct
  misc_feature 1..20: note = antisense sequence
  source 1..20: mol_type = other RNA
actgaatccaagtcttcgta

SEQ ID NO: 3652 - RNA, 20 nt, synthetic construct
  misc_feature 1..20: note = antisense sequence
  source 1..20: mol_type = other RNA
tactgaatccaagtcttcgt

SEQ ID NO: 3653 - RNA, 20 nt, synthetic construct
  misc_feature 1..20: note = antisense sequence
  source 1..20: mol_type = other RNA
ttactgaatccaagtcttcg

SEQ ID NO: 3654 - RNA, 20 nt, synthetic construct
  misc_feature 1..20: note = antisense sequence
  source 1..20: mol_type = other RNA
ccactggagataactttgag

SEQ ID NO: 3655 - RNA, 20 nt, synthetic construct
  misc_feature 1..20: note = antisense sequence
  source 1..20: mol_type = other RNA
accactggagataactttga

SEQ ID NO: 3656 - RNA, 20 nt, synthetic construct
  misc_feature 1..20: note = antisense sequence
  source 1..20: mol_type = other RNA
tgacataggttcctagactt

SEQ ID NO: 3657 - RNA, 20 nt, synthetic construct
  misc_feature 1..20: note = antisense sequence
  source 1..20: mol_type = other RNA
ctgacataggttcctagact

SEQ ID NO: 3658 - RNA, 20 nt, synthetic construct
  misc_feature 1..20: note = antisense sequence
  source 1..20: mol_type = other RNA
actgacataggttcctagac

SEQ ID NO: 3659 - RNA, 20 nt, synthetic construct
  misc_feature 1..20: note = antisense sequence
  source 1..20: mol_type = other RNA
gactgacataggttcctaga

SEQ ID NO: 3660 - RNA, 20 nt, synthetic construct
  misc_feature 1..20: note = antisense sequence
  source 1..20: mol_type = other RNA
ttgactgacataggttccta

SEQ ID NO: 3661 - RNA, 20 nt, synthetic construct
  misc_feature 1..20: note = antisense sequence
  source 1..20: mol_type = other RNA
tttgactgacataggttcct

SEQ ID NO: 3662 - RNA, 20 nt, synthetic construct
  misc_feature 1..20: note = antisense sequence
  source 1..20: mol_type = other RNA
ttttgactgacataggttcc

SEQ ID NO: 3663 - RNA, 20 nt, synthetic construct
  misc_feature 1..20: note = antisense sequence
  source 1..20: mol_type = other RNA
attaaggtgctagggaaaac

SEQ ID NO: 3664 - RNA, 20 nt, synthetic construct
  misc_feature 1..20: note = antisense sequence
  source 1..20: mol_type = other RNA
cattaaggtgctagggaaaa

SEQ ID NO: 3665 - RNA, 20 nt, synthetic construct
  misc_feature 1..20: note = antisense sequence
  source 1..20: mol_type = other RNA
acattaaggtgctagggaaa

SEQ ID NO: 3666 - RNA, 20 nt, synthetic construct
  misc_feature 1..20: note = antisense sequence
  source 1..20: mol_type = other RNA
aacattaaggtgctagggaa

SEQ ID NO: 3667 - RNA, 20 nt, synthetic construct
  misc_feature 1..20: note = antisense sequence
  source 1..20: mol_type = other RNA
aaacattaaggtgctaggga

SEQ ID NO: 3668 - RNA, 20 nt, synthetic construct
  misc_feature 1..20: note = antisense sequence
  source 1..20: mol_type = other RNA
taaacattaaggtgctaggg

SEQ ID NO: 3669 - RNA, 20 nt, synthetic construct
  misc_feature 1..20: note = antisense sequence
  source 1..20: mol_type = other RNA
gtggcattggtagtataaac

SEQ ID NO: 3670 - RNA, 20 nt, synthetic construct
  misc_feature 1..20: note = antisense sequence
  source 1..20: mol_type = other RNA
ggtggcattggtagtataaa

SEQ ID NO: 3671 - RNA, 20 nt, synthetic construct
  misc_feature 1..20: note = antisense sequence
  source 1..20: mol_type = other RNA
tggtggcattggtagtataa

SEQ ID NO: 3672 - RNA, 20 nt, synthetic construct
  misc_feature 1..20: note = antisense sequence
  source 1..20: mol_type = other RNA
tcaagtggtggcattggtag

SEQ ID NO: 3673 - RNA, 20 nt, synthetic construct
  misc_feature 1..20: note = antisense sequence
  source 1..20: mol_type = other RNA
ttcaagtggtggcattggta

SEQ ID NO: 3674 - RNA, 20 nt, synthetic construct
  misc_feature 1..20: note = antisense sequence
  source 1..20: mol_type = other RNA
attcaagtggtggcattggt

SEQ ID NO: 3675 - RNA, 20 nt, synthetic construct
  misc_feature 1..20: note = antisense sequence
  source 1..20: mol_type = other RNA
cattcaagtggtggcattgg

SEQ ID NO: 3676 - RNA, 20 nt, synthetic construct
  misc_feature 1..20: note = antisense sequence
  source 1..20: mol_type = other RNA
gcattcaagtggtggcattg

SEQ ID NO: 3677 - RNA, 20 nt, synthetic construct
  misc_feature 1..20: note = antisense sequence
  source 1..20: mol_type = other RNA
ttggcattcaagtggtggca

SEQ ID NO: 3678 - RNA, 20 nt, synthetic construct
  misc_feature 1..20: note = antisense sequence
  source 1..20: mol_type = other RNA
gtatttggcattcaagtggt

SEQ ID NO: 3679 - RNA, 20 nt, synthetic construct
  misc_feature 1..20: note = antisense sequence
  source 1..20: mol_type = other RNA
gtgtccaactcttagtgtat

SEQ ID NO: 3680 - RNA, 20 nt, synthetic construct
  misc_feature 1..20: note = antisense sequence
  source 1..20: mol_type = other RNA
tgtgtccaactcttagtgta

SEQ ID NO: 3681 - RNA, 20 nt, synthetic construct
  misc_feature 1..20: note = antisense sequence
  source 1..20: mol_type = other RNA
ctgtgtccaactcttagtgt

SEQ ID NO: 3682 - RNA, 20 nt, synthetic construct
  misc_feature 1..20: note = antisense sequence
  source 1..20: mol_type = other RNA
actgtgtccaactcttagtg

SEQ ID NO: 3683 - RNA, 20 nt, synthetic construct
  misc_feature 1..20: note = antisense sequence
  source 1..20: mol_type = other RNA
cttactgtgtccaactctta

SEQ ID NO: 3684 - RNA, 20 nt, synthetic construct
  misc_feature 1..20: note = antisense sequence
  source 1..20: mol_type = other RNA
gcttactgtgtccaactctt

SEQ ID NO: 3685 - RNA, 20 nt, synthetic construct
  misc_feature 1..20: note = antisense sequence
  source 1..20: mol_type = other RNA
tatgcttactgtgtccaact

SEQ ID NO: 3686 - RNA, 20 nt, synthetic construct
  misc_feature 1..20: note = antisense sequence
  source 1..20: mol_type = other RNA
gtatatgcttactgtgtcca

SEQ ID NO: 3687 - RNA, 20 nt, synthetic construct
  misc_feature 1..20: note = antisense sequence
  source 1..20: mol_type = other RNA
agaatacaaggagaatggga

SEQ ID NO: 3688 - RNA, 20 nt, synthetic construct
  misc_feature 1..20: note = antisense sequence
  source 1..20: mol_type = other RNA
aagaatacaaggagaatggg

SEQ ID NO: 3689 - RNA, 20 nt, synthetic construct
  misc_feature 1..20: note = antisense sequence
  source 1..20: mol_type = other RNA
gaagaatacaaggagaatgg

SEQ ID NO: 3690 - RNA, 20 nt, synthetic construct
  misc_feature 1..20: note = antisense sequence
  source 1..20: mol_type = other RNA
ggaagaatacaaggagaatg

SEQ ID NO: 3691 - RNA, 20 nt, synthetic construct
  misc_feature 1..20: note = antisense sequence
  source 1..20: mol_type = other RNA
cagcaaaactaggcaaagag

SEQ ID NO: 3692 - RNA, 20 nt, synthetic construct
  misc_feature 1..20: note = antisense sequence
  source 1..20: mol_type = other RNA
acagcaaaactaggcaaaga

SEQ ID NO: 3693 - RNA, 20 nt, synthetic construct
  misc_feature 1..20: note = antisense sequence
  source 1..20: mol_type = other RNA
cacacacagcaaaactaggc

SEQ ID NO: 3694 - RNA, 20 nt, synthetic construct
  misc_feature 1..20: note = antisense sequence
  source 1..20: mol_type = other RNA
tccaagaaatcacacacagc

SEQ ID NO: 3695 - RNA, 20 nt, synthetic construct
  misc_feature 1..20: note = antisense sequence
  source 1..20: mol_type = other RNA
cccttccaagaaatcacaca

SEQ ID NO: 3696 - RNA, 20 nt, synthetic construct
  misc_feature 1..20: note = antisense sequence
  source 1..20: mol_type = other RNA
gcccttccaagaaatcacac

SEQ ID NO: 3697 - RNA, 20 nt, synthetic construct
  misc_feature 1..20: note = antisense sequence
  source 1..20: mol_type = other RNA
aagcccttccaagaaatcac

SEQ ID NO: 3698 - RNA, 20 nt, synthetic construct
  misc_feature 1..20: note = antisense sequence
  source 1..20: mol_type = other RNA
taagcccttccaagaaatca

SEQ ID NO: 3699 - RNA, 20 nt, synthetic construct
  misc_feature 1..20: note = antisense sequence
  source 1..20: mol_type = other RNA
ataagcccttccaagaaatc

SEQ ID NO: 3700 - RNA, 20 nt, synthetic construct
  misc_feature 1..20: note = antisense sequence
  source 1..20: mol_type = other RNA
actcaaagtccatacacctt

SEQ ID NO: 3701 - RNA, 20 nt, synthetic construct
  misc_feature 1..20: note = antisense sequence
  source 1..20: mol_type = other RNA
aactcaaagtccatacacct

SEQ ID NO: 3702 - RNA, 20 nt, synthetic construct
  misc_feature 1..20: note = antisense sequence
  source 1..20: mol_type = other RNA
caactcaaagtccatacacc

SEQ ID NO: 3703 - RNA, 20 nt, synthetic construct
  misc_feature 1..20: note = antisense sequence
  source 1..20: mol_type = other RNA
tcaactcaaagtccatacac

SEQ ID NO: 3704 - RNA, 20 nt, synthetic construct
  misc_feature 1..20: note = antisense sequence
  source 1..20: mol_type = other RNA
agtcaactcaaagtccatac

SEQ ID NO: 3705 - RNA, 20 nt, synthetic construct
  misc_feature 1..20: note = antisense sequence
  source 1..20: mol_type = other RNA
gggcagtcaactcaaagtcc

SEQ ID NO: 3706 - RNA, 20 nt, synthetic construct
  misc_feature 1..20: note = antisense sequence
  source 1..20: mol_type = other RNA
ggcaaattctcaaatagtcc

SEQ ID NO: 3707 - RNA, 20 nt, synthetic construct
  misc_feature 1..20: note = antisense sequence
  source 1..20: mol_type = other RNA
gcactctagcatataaagga

SEQ ID NO: 3708 - RNA, 20 nt, synthetic construct
  misc_feature 1..20: note = antisense sequence
  source 1..20: mol_type = other RNA
agcactctagcatataaagg

SEQ ID NO: 3709 - RNA, 20 nt, synthetic construct
  misc_feature 1..20: note = antisense sequence
  source 1..20: mol_type = other RNA
ctctaaagcactctagcata

SEQ ID NO: 3710 - RNA, 20 nt, synthetic construct
  misc_feature 1..20: note = antisense sequence
  source 1..20: mol_type = other RNA
actctaaagcactctagcat

SEQ ID NO: 3711 - RNA, 20 nt, synthetic construct
  misc_feature 1..20: note = antisense sequence
  source 1..20: mol_type = other RNA
aactctaaagcactctagca

SEQ ID NO: 3712 - RNA, 20 nt, synthetic construct
  misc_feature 1..20: note = antisense sequence
  source 1..20: mol_type = other RNA
caccaatctactgtaggcaa

SEQ ID NO: 3713 - RNA, 20 nt, synthetic construct
  misc_feature 1..20: note = antisense sequence
  source 1..20: mol_type = other RNA
tcaccaatctactgtaggca

SEQ ID NO: 3714 - RNA, 20 nt, synthetic construct
  misc_feature 1..20: note = antisense sequence
  source 1..20: mol_type = other RNA
gtcaccaatctactgtaggc

SEQ ID NO: 3715 - RNA, 20 nt, synthetic construct
  misc_feature 1..20: note = antisense sequence
  source 1..20: mol_type = other RNA
tgtcaccaatctactgtagg

SEQ ID NO: 3716 - RNA, 20 nt, synthetic construct
  misc_feature 1..20: note = antisense sequence
  source 1..20: mol_type = other RNA
ttgtcaccaatctactgtag

SEQ ID NO: 3717 - RNA, 20 nt, synthetic construct
  misc_feature 1..20: note = antisense sequence
  source 1..20: mol_type = other RNA
gttgtcaccaatctactgta

SEQ ID NO: 3718 - RNA, 20 nt, synthetic construct
  misc_feature 1..20: note = antisense sequence
  source 1..20: mol_type = other RNA
tgttgtcaccaatctactgt

SEQ ID NO: 3719 - RNA, 20 nt, synthetic construct
  misc_feature 1..20: note = antisense sequence
  source 1..20: mol_type = other RNA
atgttgtcaccaatctactg

SEQ ID NO: 3720 - RNA, 20 nt, synthetic construct
  misc_feature 1..20: note = antisense sequence
  source 1..20: mol_type = other RNA
gaatgttgtcaccaatctac

SEQ ID NO: 3721 - RNA, 20 nt, synthetic construct
  misc_feature 1..20: note = antisense sequence
  source 1..20: mol_type = other RNA
cagaatgttgtcaccaatct

SEQ ID NO: 3722 - RNA, 20 nt, synthetic construct
  misc_feature 1..20: note = antisense sequence
  source 1..20: mol_type = other RNA
ccagaatgttgtcaccaatc

SEQ ID NO: 3723 - RNA, 20 nt, synthetic construct
  misc_feature 1..20: note = antisense sequence
  source 1..20: mol_type = other RNA
cctaagtaaaatcgaagctc

SEQ ID NO: 3724 - RNA, 20 nt, synthetic construct
  misc_feature 1..20: note = antisense sequence
  source 1..20: mol_type = other RNA
ccctaagtaaaatcgaagct

SEQ ID NO: 3725 - RNA, 20 nt, synthetic construct
  misc_feature 1..20: note = antisense sequence
  source 1..20: mol_type = other RNA
gccctaagtaaaatcgaagc

SEQ ID NO: 3726 - RNA, 20 nt, synthetic construct
  misc_feature 1..20: note = antisense sequence
  source 1..20: mol_type = other RNA
tgccctaagtaaaatcgaag

SEQ ID NO: 3727 - RNA, 20 nt, synthetic construct
  misc_feature 1..20: note = antisense sequence
  source 1..20: mol_type = other RNA
gtgccctaagtaaaatcgaa

SEQ ID NO: 3728 - RNA, 20 nt, synthetic construct
  misc_feature 1..20: note = antisense sequence
  source 1..20: mol_type = other RNA
agtgccctaagtaaaatcga

SEQ ID NO: 3729 - RNA, 20 nt, synthetic construct
  misc_feature 1..20: note = antisense sequence
  source 1..20: mol_type = other RNA
cagtgccctaagtaaaatcg

SEQ ID NO: 3730 - RNA, 20 nt, synthetic construct
  misc_feature 1..20: note = antisense sequence
  source 1..20: mol_type = other RNA
cccagtgccctaagtaaaat

SEQ ID NO: 3731 - RNA, 20 nt, synthetic construct
  misc_feature 1..20: note = antisense sequence
  source 1..20: mol_type = other RNA
ggttggatgaggactgagtt

SEQ ID NO: 3732 - RNA, 20 nt, synthetic construct
  misc_feature 1..20: note = antisense sequence
  source 1..20: mol_type = other RNA
tggttggatgaggactgagt

SEQ ID NO: 3733 - RNA, 20 nt, synthetic construct
  misc_feature 1..20: note = antisense sequence
  source 1..20: mol_type = other RNA
ctggttggatgaggactgag

SEQ ID NO: 3734 - RNA, 20 nt, synthetic construct
  misc_feature 1..20: note = antisense sequence
  source 1..20: mol_type = other RNA
actggttggatgaggactga

SEQ ID NO: 3735 - RNA, 20 nt, synthetic construct
  misc_feature 1..20: note = antisense sequence
  source 1..20: mol_type = other RNA
gcaactggttggatgaggac

SEQ ID NO: 3736 - RNA, 20 nt, synthetic construct
  misc_feature 1..20: note = antisense sequence
  source 1..20: mol_type = other RNA
ggcaactggttggatgagga

SEQ ID NO: 3737 - RNA, 20 nt, synthetic construct
  misc_feature 1..20: note = antisense sequence
  source 1..20: mol_type = other RNA
gaggcaactggttggatgag

SEQ ID NO: 3738 - RNA, 20 nt, synthetic construct
  misc_feature 1..20: note = antisense sequence
  source 1..20: mol_type = other RNA
agaggcaactggttggatga

SEQ ID NO: 3739 - RNA, 20 nt, synthetic construct
  misc_feature 1..20: note = antisense sequence
  source 1..20: mol_type = other RNA
agagaggcaactggttggat

SEQ ID NO: 3740 - RNA, 20 nt, synthetic construct
  misc_feature 1..20: note = antisense sequence
  source 1..20: mol_type = other RNA
gaagagaggcaactggttgg

SEQ ID NO: 3741 - RNA, 20 nt, synthetic construct
  misc_feature 1..20: note = antisense sequence
  source 1..20: mol_type = other RNA
agaagagaggcaactggttg

SEQ ID NO: 3742 - RNA, 20 nt, synthetic construct
  misc_feature 1..20: note = antisense sequence
  source 1..20: mol_type = other RNA
aagaagagaggcaactggtt

SEQ ID NO: 3743 - RNA, 20 nt, synthetic construct
  misc_feature 1..20: note = antisense sequence
  source 1..20: mol_type = other RNA
tgaatcagtgggaggaagaa

SEQ ID NO: 3744 - RNA, 20 nt, synthetic construct
  misc_feature 1..20: note = antisense sequence
  source 1..20: mol_type = other RNA
cctgaatcagtgggaggaag

SEQ ID NO: 3745 - RNA, 20 nt, synthetic construct
  misc_feature 1..20: note = antisense sequence
  source 1..20: mol_type = other RNA
ccctgaatcagtgggaggaa

SEQ ID NO: 3746 - RNA, 20 nt, synthetic construct
  misc_feature 1..20: note = antisense sequence
  source 1..20: mol_type = other RNA
gaagtgtccctgaatcagtg

SEQ ID NO: 3747 - RNA, 20 nt, synthetic construct
  misc_feature 1..20: note = antisense sequence
  source 1..20: mol_type = other RNA
cggaagtgtccctgaatcag

SEQ ID NO: 3748 - RNA, 20 nt, synthetic construct
  misc_feature 1..20: note = antisense sequence
  source 1..20: mol_type = other RNA
aacggaagtgtccctgaatc

SEQ ID NO: 3749 - RNA, 20 nt, synthetic construct
  misc_feature 1..20: note = antisense sequence
  source 1..20: mol_type = other RNA
aaacggaagtgtccctgaat

SEQ ID NO: 3750 - RNA, 20 nt, synthetic construct
  misc_feature 1..20: note = antisense sequence
  source 1..20: mol_type = other RNA
caaacggaagtgtccctgaa

SEQ ID NO: 3751 - RNA, 20 nt, synthetic construct
  misc_feature 1..20: note = antisense sequence
  source 1..20: mol_type = other RNA
ccaaacggaagtgtccctga

SEQ ID NO: 3752 - RNA, 20 nt, synthetic construct
  misc_feature 1..20: note = antisense sequence
  source 1..20: mol_type = other RNA
tccaaacggaagtgtccctg

SEQ ID NO: 3753 - RNA, 20 nt, synthetic construct
  misc_feature 1..20: note = antisense sequence
  source 1..20: mol_type = other RNA
agtccaaacggaagtgtccc

SEQ ID NO: 3754 - RNA, 20 nt, synthetic construct
  misc_feature 1..20: note = antisense sequence
  source 1..20: mol_type = other RNA
cagtccaaacggaagtgtcc

SEQ ID NO: 3755 - RNA, 20 nt, synthetic construct
  misc_feature 1..20: note = antisense sequence
  source 1..20: mol_type = other RNA
ccagtccaaacggaagtgtc

SEQ ID NO: 3756 - RNA, 20 nt, synthetic construct
  misc_feature 1..20: note = antisense sequence
  source 1..20: mol_type = other RNA
cccagtccaaacggaagtgt

SEQ ID NO: 3757 - RNA, 20 nt, synthetic construct
  misc_feature 1..20: note = antisense sequence
  source 1..20: mol_type = other RNA
gcccagtccaaacggaagtg

SEQ ID NO: 3758 - RNA, 20 nt, synthetic construct
  misc_feature 1..20: note = antisense sequence
  source 1..20: mol_type = other RNA
tgcccagtccaaacggaagt

SEQ ID NO: 3759 - RNA, 20 nt, synthetic construct
  misc_feature 1..20: note = antisense sequence
  source 1..20: mol_type = other RNA
ctgcccagtccaaacggaag

SEQ ID NO: 3760 - RNA, 20 nt, synthetic construct
  misc_feature 1..20: note = antisense sequence
  source 1..20: mol_type = other RNA
gtctagctctgcccagtcca

SEQ ID NO: 3761 - RNA, 20 nt, synthetic construct
  misc_feature 1..20: note = antisense sequence
  source 1..20: mol_type = other RNA
ttgtctagctctgcccagtc

SEQ ID NO: 3762 - RNA, 20 nt, synthetic construct
  misc_feature 1..20: note = antisense sequence
  source 1..20: mol_type = other RNA
agattgtctagctctgccca

SEQ ID NO: 3763 - RNA, 20 nt, synthetic construct
  misc_feature 1..20: note = antisense sequence
  source 1..20: mol_type = other RNA
gagattgtctagctctgccc

SEQ ID NO: 3764 - RNA, 20 nt, synthetic construct
  misc_feature 1..20: note = antisense sequence
  source 1..20: mol_type = other RNA
tgagattgtctagctctgcc

SEQ ID NO: 3765 - RNA, 20 nt, synthetic construct
  misc_feature 1..20: note = antisense sequence
  source 1..20: mol_type = other RNA
gagtttgagattgtctagct

SEQ ID NO: 3766 - RNA, 20 nt, synthetic construct
  misc_feature 1..20: note = antisense sequence
  source 1..20: mol_type = other RNA
tgagtttgagattgtctagc

SEQ ID NO: 3767 - RNA, 20 nt, synthetic construct
  misc_feature 1..20: note = antisense sequence
  source 1..20: mol_type = other RNA
atgcctctatgagtttgaga

SEQ ID NO: 3768 - RNA, 20 nt, synthetic construct
  misc_feature 1..20: note = antisense sequence
  source 1..20: mol_type = other RNA
gatgcctctatgagtttgag

SEQ ID NO: 3769 - RNA, 20 nt, synthetic construct
  misc_feature 1..20: note = antisense sequence
  source 1..20: mol_type = other RNA
tgcagatgcctctatgagtt

SEQ ID NO: 3770 - RNA, 20 nt, synthetic construct
  misc_feature 1..20: note = antisense sequence
  source 1..20: mol_type = other RNA
atgcagatgcctctatgagt

SEQ ID NO: 3771 - RNA, 20 nt, synthetic construct
  misc_feature 1..20: note = antisense sequence
  source 1..20: mol_type = other RNA
caatgcagatgcctctatga

SEQ ID NO: 3772 - RNA, 20 nt, synthetic construct
  misc_feature 1..20: note = antisense sequence
  source 1..20: mol_type = other RNA
gcaatgcagatgcctctatg

SEQ ID NO: 3773 - RNA, 20 nt, synthetic construct
  misc_feature 1..20: note = antisense sequence
  source 1..20: mol_type = other RNA
actagcaatgcagatgcctc

SEQ ID NO: 3774 - RNA, 20 nt, synthetic construct
  misc_feature 1..20: note = antisense sequence
  source 1..20: mol_type = other RNA
ggaaactagcaatgcagatg

SEQ ID NO: 3775 - RNA, 20 nt, synthetic construct
  misc_feature 1..20: note = antisense sequence
  source 1..20: mol_type = other RNA
aggaaactagcaatgcagat

SEQ ID NO: 3776 - RNA, 20 nt, synthetic construct
  misc_feature 1..20: note = antisense sequence
  source 1..20: mol_type = other RNA
ctccagctcttctaggaaac

SEQ ID NO: 3777 - RNA, 20 nt, synthetic construct
  misc_feature 1..20: note = antisense sequence
  source 1..20: mol_type = other RNA
cctccagctcttctaggaaa

SEQ ID NO: 3778 - RNA, 20 nt, synthetic construct
  misc_feature 1..20: note = antisense sequence
  source 1..20: mol_type = other RNA
tcagcctccagctcttctag

SEQ ID NO: 3779 - RNA, 20 nt, synthetic construct
  misc_feature 1..20: note = antisense sequence
  source 1..20: mol_type = other RNA
ctcagcctccagctcttcta

SEQ ID NO: 3780 - RNA, 20 nt, synthetic construct
  misc_feature 1..20: note = antisense sequence
  source 1..20: mol_type = other RNA
tactcagcctccagctcttc

SEQ ID NO: 3781 - RNA, 20 nt, synthetic construct
  misc_feature 1..20: note = antisense sequence
  source 1..20: mol_type = other RNA
atactcagcctccagctctt

SEQ ID NO: 3782 - RNA, 20 nt, synthetic construct
  misc_feature 1..20: note = antisense sequence
  source 1..20: mol_type = other RNA
gatactcagcctccagctct

SEQ ID NO: 3783 - RNA, 20 nt, synthetic construct
  misc_feature 1..20: note = antisense sequence
  source 1..20: mol_type = other RNA
ggatactcagcctccagctc

SEQ ID NO: 3784 - RNA, 20 nt, synthetic construct
  misc_feature 1..20: note = antisense sequence
  source 1..20: mol_type = other RNA
acctaagtgtcccatatccc

SEQ ID NO: 3785 - RNA, 20 nt, synthetic construct
  misc_feature 1..20: note = antisense sequence
  source 1..20: mol_type = other RNA
cacctaagtgtcccatatcc

SEQ ID NO: 3786 - RNA, 20 nt, synthetic construct
  misc_feature 1..20: note = antisense sequence
  source 1..20: mol_type = other RNA
ccacctaagtgtcccatatc

SEQ ID NO: 3787 - RNA, 20 nt, synthetic construct
  misc_feature 1..20: note = antisense sequence
  source 1..20: mol_type = other RNA
gccacctaagtgtcccatat

SEQ ID NO: 3788 - RNA, 20 nt, synthetic construct
  misc_feature 1..20: note = antisense sequence
  source 1..20: mol_type = other RNA
gagccacctaagtgtcccat

SEQ ID NO: 3789 - RNA, 20 nt, synthetic construct
  misc_feature 1..20: note = antisense sequence
  source 1..20: mol_type = other RNA
ggagccacctaagtgtccca

SEQ ID NO: 3790 - RNA, 20 nt, synthetic construct
  misc_feature 1..20: note = antisense sequence
  source 1..20: mol_type = other RNA
aggagccacctaagtgtccc

SEQ ID NO: 3791 - RNA, 20 nt, synthetic construct
  misc_feature 1..20: note = antisense sequence
  source 1..20: mol_type = other RNA
gccaggagccacctaagtgt

SEQ ID NO: 3792 - RNA, 20 nt, synthetic construct
  misc_feature 1..20: note = antisense sequence
  source 1..20: mol_type = other RNA
aacaggcttgggccacttgg

SEQ ID NO: 3793 - RNA, 20 nt, synthetic construct
  misc_feature 1..20: note = antisense sequence
  source 1..20: mol_type = other RNA
gcaacaggcttgggccactt

SEQ ID NO: 3794 - RNA, 20 nt, synthetic construct
  misc_feature 1..20: note = antisense sequence
  source 1..20: mol_type = other RNA
tcagcaacaggcttgggcca

SEQ ID NO: 3795 - RNA, 20 nt, synthetic construct
  misc_feature 1..20: note = antisense sequence
  source 1..20: mol_type = other RNA
cagtcagcaacaggcttggg

SEQ ID NO: 3796 - RNA, 20 nt, synthetic construct
  misc_feature 1..20: note = antisense sequence
  source 1..20: mol_type = other RNA
ccagtcagcaacaggcttgg

SEQ ID NO: 3797 - RNA, 20 nt, synthetic construct
  misc_feature 1..20: note = antisense sequence
  source 1..20: mol_type = other RNA
tccagtcagcaacaggcttg

SEQ ID NO: 3798 - RNA, 20 nt, synthetic construct
  misc_feature 1..20: note = antisense sequence
  source 1..20: mol_type = other RNA
ttccagtcagcaacaggctt

SEQ ID NO: 3799 - RNA, 20 nt, synthetic construct
  misc_feature 1..20: note = antisense sequence
  source 1..20: mol_type = other RNA
cttccagtcagcaacaggct

SEQ ID NO: 3800 - RNA, 20 nt, synthetic construct
  misc_feature 1..20: note = antisense sequence
  source 1..20: mol_type = other RNA
acttccagtcagcaacaggc

SEQ ID NO: 3801 - RNA, 20 nt, synthetic construct
  misc_feature 1..20: note = antisense sequence
  source 1..20: mol_type = other RNA
aggctacaatacgaactggc

SEQ ID NO: 3802 - RNA, 20 nt, synthetic construct
  misc_feature 1..20: note = antisense sequence
  source 1..20: mol_type = other RNA
gtgagacagtgtcaagggta

SEQ ID NO: 3803 - RNA, 20 nt, synthetic construct
  misc_feature 1..20: note = antisense sequence
  source 1..20: mol_type = other RNA
ggtgagacagtgtcaagggt

SEQ ID NO: 3804 - RNA, 20 nt, synthetic construct
  misc_feature 1..20: note = antisense sequence
  source 1..20: mol_type = other RNA
gggtgagacagtgtcaaggg

SEQ ID NO: 3805 - RNA, 20 nt, synthetic construct
  misc_feature 1..20: note = antisense sequence
  source 1..20: mol_type = other RNA
ctgggtgagacagtgtcaag

SEQ ID NO: 3806 - RNA, 20 nt, synthetic construct
  misc_feature 1..20: note = antisense sequence
  source 1..20: mol_type = other RNA
tgtttccactgggtgagaca

SEQ ID NO: 3807 - RNA, 20 nt, synthetic construct
  misc_feature 1..20: note = antisense sequence
  source 1..20: mol_type = other RNA
gctgtgtttccactgggtga

SEQ ID NO: 3808 - RNA, 20 nt, synthetic construct
  misc_feature 1..20: note = antisense sequence
  source 1..20: mol_type = other RNA
cgaagcagaaagattagaag

SEQ ID NO: 3809 - RNA, 20 nt, synthetic construct
  misc_feature 1..20: note = antisense sequence
  source 1..20: mol_type = other RNA
cgatcatacgaagcagaaag

SEQ ID NO: 3810 - RNA, 20 nt, synthetic construct
  misc_feature 1..20: note = antisense sequence
  source 1..20: mol_type = other RNA
ccgatcatacgaagcagaaa

SEQ ID NO: 3811 - RNA, 20 nt, synthetic construct
  misc_feature 1..20: note = antisense sequence
  source 1..20: mol_type = other RNA
accgatcatacgaagcagaa

SEQ ID NO: 3812 - RNA, 20 nt, synthetic construct
  misc_feature 1..20: note = antisense sequence
  source 1..20: mol_type = other RNA
taccgatcatacgaagcaga

SEQ ID NO: 3813 - RNA, 20 nt, synthetic construct
  misc_feature 1..20: note = antisense sequence
  source 1..20: mol_type = other RNA
ttaccgatcatacgaagcag

SEQ ID NO: 3814 - RNA, 20 nt, synthetic construct
  misc_feature 1..20: note = antisense sequence
  source 1..20: mol_type = other RNA
attaccgatcatacgaagca

SEQ ID NO: 3815 - RNA, 20 nt, synthetic construct
  misc_feature 1..20: note = antisense sequence
  source 1..20: mol_type = other RNA
aattaccgatcatacgaagc

SEQ ID NO: 3816 - RNA, 20 nt, synthetic construct
  misc_feature 1..20: note = antisense sequence
  source 1..20: mol_type = other RNA
catcttcattatgtgtccct

SEQ ID NO: 3817 - RNA, 20 nt, synthetic construct
  misc_feature 1..20: note = antisense sequence
  source 1..20: mol_type = other RNA
ccatcttcattatgtgtccc

SEQ ID NO: 3818 - RNA, 20 nt, synthetic construct
  misc_feature 1..20: note = antisense sequence
  source 1..20: mol_type = other RNA
accatcttcattatgtgtcc

SEQ ID NO: 3819 - RNA, 20 nt, synthetic construct
  misc_feature 1..20: note = antisense sequence
  source 1..20: mol_type = other RNA
tctcacactatgaagcacat

SEQ ID NO: 3820 - RNA, 20 nt, synthetic construct
  misc_feature 1..20: note = antisense sequence
  source 1..20: mol_type = other RNA
atctcacactatgaagcaca

SEQ ID NO: 3821 - RNA, 20 nt, synthetic construct
  misc_feature 1..20: note = antisense sequence
  source 1..20: mol_type = other RNA
tatctcacactatgaagcac

SEQ ID NO: 3822 - RNA, 20 nt, synthetic construct
  misc_feature 1..20: note = antisense sequence
  source 1..20: mol_type = other RNA
ctatctcacactatgaagca

SEQ ID NO: 3823 - RNA, 20 nt, synthetic construct
  misc_feature 1..20: note = antisense sequence
  source 1..20: mol_type = other RNA
ccactatctcacactatgaa

SEQ ID NO: 3824 - RNA, 20 nt, synthetic construct
  misc_feature 1..20: note = antisense sequence
  source 1..20: mol_type = other RNA
gtccactatctcacactatg

SEQ ID NO: 3825 - RNA, 20 nt, synthetic construct
  misc_feature 1..20: note = antisense sequence
  source 1..20: mol_type = other RNA
agtccactatctcacactat

SEQ ID NO: 3826 - RNA, 20 nt, synthetic construct
  misc_feature 1..20: note = antisense sequence
  source 1..20: mol_type = other RNA
ccagtccactatctcacact

SEQ ID NO: 3827 - RNA, 20 nt, synthetic construct
  misc_feature 1..20: note = antisense sequence
  source 1..20: mol_type = other RNA
cccagtccactatctcacac

SEQ ID NO: 3828 - RNA, 20 nt, synthetic construct
  misc_feature 1..20: note = antisense sequence
  source 1..20: mol_type = other RNA
tcccagtccactatctcaca

SEQ ID NO: 3829 - RNA, 20 nt, synthetic construct
  misc_feature 1..20: note = antisense sequence
  source 1..20: mol_type = other RNA
ttcccagtccactatctcac

SEQ ID NO: 3830 - RNA, 20 nt, synthetic construct
  misc_feature 1..20: note = antisense sequence
  source 1..20: mol_type = other RNA
gttcccagtccactatctca

SEQ ID NO: 3831 - RNA, 20 nt, synthetic construct
  misc_feature 1..20: note = antisense sequence
  source 1..20: mol_type = other RNA
caagttcccagtccactatc

SEQ ID NO: 3832 - RNA, 20 nt, synthetic construct
  misc_feature 1..20: note = antisense sequence
  source 1..20: mol_type = other RNA
tcaagttcccagtccactat

SEQ ID NO: 3833 - RNA, 20 nt, synthetic construct
  misc_feature 1..20: note = antisense sequence
  source 1..20: mol_type = other RNA
ttcaagttcccagtccacta

SEQ ID NO: 3834 - RNA, 20 nt, synthetic construct
  misc_feature 1..20: note = antisense sequence
  source 1..20: mol_type = other RNA
attcaagttcccagtccact

SEQ ID NO: 3835 - RNA, 20 nt, synthetic construct
  misc_feature 1..20: note = antisense sequence
  source 1..20: mol_type = other RNA
tgattcaagttcccagtcca

SEQ ID NO: 3836 - RNA, 20 nt, synthetic construct
  misc_feature 1..20: note = antisense sequence
  source 1..20: mol_type = other RNA
ctgattcaagttcccagtcc

SEQ ID NO: 3837 - RNA, 20 nt, synthetic construct
  misc_feature 1..20: note = antisense sequence
  source 1..20: mol_type = other RNA
tctgattcaagttcccagtc

SEQ ID NO: 3838 - RNA, 20 nt, synthetic construct
  misc_feature 1..20: note = antisense sequence
  source 1..20: mol_type = other RNA
gctctgattcaagttcccag

SEQ ID NO: 3839 - RNA, 20 nt, synthetic construct
  misc_feature 1..20: note = antisense sequence
  source 1..20: mol_type = other RNA
tgctctgattcaagttccca

SEQ ID NO: 3840 - RNA, 20 nt, synthetic construct
  misc_feature 1..20: note = antisense sequence
  source 1..20: mol_type = other RNA
ttgctctgattcaagttccc

SEQ ID NO: 3841 - RNA, 20 nt, synthetic construct
  misc_feature 1..20: note = antisense sequence
  source 1..20: mol_type = other RNA
ggctagtttaagtgaccaaa

SEQ ID NO: 3842 - RNA, 20 nt, synthetic construct
  misc_feature 1..20: note = antisense sequence
  source 1..20: mol_type = other RNA
tgtggctagtttaagtgacc

SEQ ID NO: 3843 - RNA, 20 nt, synthetic construct
  misc_feature 1..20: note = antisense sequence
  source 1..20: mol_type = other RNA
tactgtggctagtttaagtg

SEQ ID NO: 3844 - RNA, 20 nt, synthetic construct
  misc_feature 1..20: note = antisense sequence
  source 1..20: mol_type = other RNA
gcctaatatactgtggctag

SEQ ID NO: 3845 - RNA, 20 nt, synthetic construct
  misc_feature 1..20: note = antisense sequence
  source 1..20: mol_type = other RNA
ttgcctaatatactgtggct

SEQ ID NO: 3846 - RNA, 20 nt, synthetic construct
  misc_feature 1..20: note = antisense sequence
  source 1..20: mol_type = other RNA
tttgcctaatatactgtggc

SEQ ID NO: 3847 - RNA, 20 nt, synthetic construct
  misc_feature 1..20: note = antisense sequence
  source 1..20: mol_type = other RNA
tgcccaagcagttgaaatat

SEQ ID NO: 3848 - RNA, 20 nt, synthetic construct
  misc_feature 1..20: note = antisense sequence
  source 1..20: mol_type = other RNA
atgcccaagcagttgaaata

SEQ ID NO: 3849 - RNA, 20 nt, synthetic construct
  misc_feature 1..20: note = antisense sequence
  source 1..20: mol_type = other RNA
gatgcccaagcagttgaaat

SEQ ID NO: 3850 - RNA, 20 nt, synthetic construct
  misc_feature 1..20: note = antisense sequence
  source 1..20: mol_type = other RNA
tgatgcccaagcagttgaaa

SEQ ID NO: 3851 - RNA, 20 nt, synthetic construct
  misc_feature 1..20: note = antisense sequence
  source 1..20: mol_type = other RNA
ctgatgcccaagcagttgaa

SEQ ID NO: 3852 - RNA, 20 nt, synthetic construct
  misc_feature 1..20: note = antisense sequence
  source 1..20: mol_type = other RNA
gaacactgatgcccaagcag

SEQ ID NO: 3853 - RNA, 20 nt, synthetic construct
  misc_feature 1..20: note = antisense sequence
  source 1..20: mol_type = other RNA
tgagaacactgatgcccaag

SEQ ID NO: 3854 - RNA, 20 nt, synthetic construct
  misc_feature 1..20: note = antisense sequence
  source 1..20: mol_type = other RNA
atgatgagaacactgatgcc

SEQ ID NO: 3855 - RNA, 20 nt, synthetic construct
  misc_feature 1..20: note = antisense sequence
  source 1..20: mol_type = other RNA
acagtgtcctcaaatgatga

SEQ ID NO: 3856 - RNA, 20 nt, synthetic construct
  misc_feature 1..20: note = antisense sequence
  source 1..20: mol_type = other RNA
gagacagtgtcctcaaatga

SEQ ID NO: 3857 - RNA, 20 nt, synthetic construct
  misc_feature 1..20: note = antisense sequence
  source 1..20: mol_type = other RNA
tctaatgagacagtgtcctc

SEQ ID NO: 3858 - RNA, 20 nt, synthetic construct
  misc_feature 1..20: note = antisense sequence
  source 1..20: mol_type = other RNA
atctaatgagacagtgtcct

SEQ ID NO: 3859 - RNA, 20 nt, synthetic construct
  misc_feature 1..20: note = antisense sequence
  source 1..20: mol_type = other RNA
catctaatgagacagtgtcc

SEQ ID NO: 3860 - RNA, 20 nt, synthetic construct
  misc_feature 1..20: note = antisense sequence
  source 1..20: mol_type = other RNA
gaccatctaatgagacagtg

SEQ ID NO: 3861 - RNA, 20 nt, synthetic construct
  misc_feature 1..20: note = antisense sequence
  source 1..20: mol_type = other RNA
cgaccatctaatgagacagt

SEQ ID NO: 3862 - RNA, 20 nt, synthetic construct
  misc_feature 1..20: note = antisense sequence
  source 1..20: mol_type = other RNA
tcgaccatctaatgagacag

SEQ ID NO: 3863 - RNA, 20 nt, synthetic construct
  misc_feature 1..20: note = antisense sequence
  source 1..20: mol_type = other RNA
ttcgaccatctaatgagaca

SEQ ID NO: 3864 - RNA, 20 nt, synthetic construct
  misc_feature 1..20: note = antisense sequence
  source 1..20: mol_type = other RNA
attcgaccatctaatgagac

SEQ ID NO: 3865 - RNA, 20 nt, synthetic construct
  misc_feature 1..20: note = antisense sequence
  source 1..20: mol_type = other RNA
ctattcgaccatctaatgag

SEQ ID NO: 3866 - RNA, 20 nt, synthetic construct
  misc_feature 1..20: note = antisense sequence
  source 1..20: mol_type = other RNA
cctattcgaccatctaatga

SEQ ID NO: 3867 - RNA, 20 nt, synthetic construct
  misc_feature 1..20: note = antisense sequence
  source 1..20: mol_type = other RNA
ccctattcgaccatctaatg

SEQ ID NO: 3868 - RNA, 20 nt, synthetic construct
  misc_feature 1..20: note = antisense sequence
  source 1..20: mol_type = other RNA
tccctattcgaccatctaat

SEQ ID NO: 3869 - RNA, 20 nt, synthetic construct
  misc_feature 1..20: note = antisense sequence
  source 1..20: mol_type = other RNA
gtccctattcgaccatctaa

SEQ ID NO: 3870 - RNA, 20 nt, synthetic construct
  misc_feature 1..20: note = antisense sequence
  source 1..20: mol_type = other RNA
agtccctattcgaccatcta

SEQ ID NO: 3871 - RNA, 20 nt, synthetic construct
  misc_feature 1..20: note = antisense sequence
  source 1..20: mol_type = other RNA
aagtccctattcgaccatct

SEQ ID NO: 3872 - RNA, 20 nt, synthetic construct
  misc_feature 1..20: note = antisense sequence
  source 1..20: mol_type = other RNA
aaagtccctattcgaccatc

SEQ ID NO: 3873 - RNA, 20 nt, synthetic construct
  misc_feature 1..20: note = antisense sequence
  source 1..20: mol_type = other RNA
aaaagtccctattcgaccat

SEQ ID NO: 3874 - RNA, 20 nt, synthetic construct
  misc_feature 1..20: note = antisense sequence
  source 1..20: mol_type = other RNA
gaaaagtccctattcgacca

SEQ ID NO: 3875 - RNA, 20 nt, synthetic construct
  misc_feature 1..20: note = antisense sequence
  source 1..20: mol_type = other RNA
ggaaaagtccctattcgacc

SEQ ID NO: 3876 - RNA, 20 nt, synthetic construct
  misc_feature 1..20: note = antisense sequence
  source 1..20: mol_type = other RNA
tggaaaagtccctattcgac

SEQ ID NO: 3877 - RNA, 20 nt, synthetic construct
  misc_feature 1..20: note = antisense sequence
  source 1..20: mol_type = other RNA
ctggaaaagtccctattcga

SEQ ID NO: 3878 - RNA, 20 nt, synthetic construct
  misc_feature 1..20: note = antisense sequence
  source 1..20: mol_type = other RNA
gctggaaaagtccctattcg

SEQ ID NO: 3879 - RNA, 20 nt, synthetic construct
  misc_feature 1..20: note = antisense sequence
  source 1..20: mol_type = other RNA
tagctggaaaagtccctatt

SEQ ID NO: 3880 - RNA, 20 nt, synthetic construct
  misc_feature 1..20: note = antisense sequence
  source 1..20: mol_type = other RNA
tatagctggaaaagtcccta

SEQ ID NO: 3881 - RNA, 20 nt, synthetic construct
  misc_feature 1..20: note = antisense sequence
  source 1..20: mol_type = other RNA
gaggaatctcagaaggctat

SEQ ID NO: 3882 - RNA, 20 nt, synthetic construct
  misc_feature 1..20: note = antisense sequence
  source 1..20: mol_type = other RNA
tcgatgtgtccttgaggaat

SEQ ID NO: 3883 - RNA, 20 nt, synthetic construct
  misc_feature 1..20: note = antisense sequence
  source 1..20: mol_type = other RNA
ctcgatgtgtccttgaggaa

SEQ ID NO: 3884 - RNA, 20 nt, synthetic construct
  misc_feature 1..20: note = antisense sequence
  source 1..20: mol_type = other RNA
actcgatgtgtccttgagga

SEQ ID NO: 3885 - RNA, 20 nt, synthetic construct
  misc_feature 1..20: note = antisense sequence
  source 1..20: mol_type = other RNA
aactcgatgtgtccttgagg

SEQ ID NO: 3886 - RNA, 20 nt, synthetic construct
  misc_feature 1..20: note = antisense sequence
  source 1..20: mol_type = other RNA
aaactcgatgtgtccttgag

SEQ ID NO: 3887 - RNA, 20 nt, synthetic construct
  misc_feature 1..20: note = antisense sequence
  source 1..20: mol_type = other RNA
caaactcgatgtgtccttga

SEQ ID NO: 3888 - RNA, 20 nt, synthetic construct
  misc_feature 1..20: note = antisense sequence
  source 1..20: mol_type = other RNA
acaaactcgatgtgtccttg

SEQ ID NO: 3889 - RNA, 20 nt, synthetic construct
  misc_feature 1..20: note = antisense sequence
  source 1..20: mol_type = other RNA
tacaaactcgatgtgtcctt

SEQ ID NO: 3890 - RNA, 20 nt, synthetic construct
  misc_feature 1..20: note = antisense sequence
  source 1..20: mol_type = other RNA
atacaaactcgatgtgtcct

SEQ ID NO: 3891 - RNA, 20 nt, synthetic construct
  misc_feature 1..20: note = antisense sequence
  source 1..20: mol_type = other RNA
aatacaaactcgatgtgtcc

SEQ ID NO: 3892 - RNA, 20 nt, synthetic construct
  misc_feature 1..20: note = antisense sequence
  source 1..20: mol_type = other RNA
caatacaaactcgatgtgtc

SEQ ID NO: 3893 - RNA, 20 nt, synthetic construct
  misc_feature 1..20: note = antisense sequence
  source 1..20: mol_type = other RNA
gcaatacaaactcgatgtgt

SEQ ID NO: 3894 - RNA, 20 nt, synthetic construct
  misc_feature 1..20: note = antisense sequence
  source 1..20: mol_type = other RNA
tgcaatacaaactcgatgtg

SEQ ID NO: 3895 - RNA, 20 nt, synthetic construct
  misc_feature 1..20: note = antisense sequence
  source 1..20: mol_type = other RNA
ccatgcaatacaaactcgat

SEQ ID NO: 3896 - RNA, 20 nt, synthetic construct
  misc_feature 1..20: note = antisense sequence
  source 1..20: mol_type = other RNA
accatgcaatacaaactcga

SEQ ID NO: 3897 - RNA, 20 nt, synthetic construct
  misc_feature 1..20: note = antisense sequence
  source 1..20: mol_type = other RNA
gaccatgcaatacaaactcg

SEQ ID NO: 3898 - RNA, 20 nt, synthetic construct
  misc_feature 1..20: note = antisense sequence
  source 1..20: mol_type = other RNA
tgaccatgcaatacaaactc

SEQ ID NO: 3899 - RNA, 20 nt, synthetic construct
  misc_feature 1..20: note = antisense sequence
  source 1..20: mol_type = other RNA
cctcttttgaccatgcaata

SEQ ID NO: 3900 - RNA, 20 nt, synthetic construct
  misc_feature 1..20: note = antisense sequence
  source 1..20: mol_type = other RNA
ggagccctcttttgaccatg

SEQ ID NO: 3901 - RNA, 20 nt, synthetic construct
  misc_feature 1..20: note = antisense sequence
  source 1..20: mol_type = other RNA
ttccttggagccctcttttg

SEQ ID NO: 3902 - RNA, 20 nt, synthetic construct
  misc_feature 1..20: note = antisense sequence
  source 1..20: mol_type = other RNA
gttccttggagccctctttt

SEQ ID NO: 3903 - RNA, 20 nt, synthetic construct
  misc_feature 1..20: note = antisense sequence
  source 1..20: mol_type = other RNA
ggttccttggagccctcttt

SEQ ID NO: 3904 - RNA, 20 nt, synthetic construct
  misc_feature 1..20: note = antisense sequence
  source 1..20: mol_type = other RNA
tggttccttggagccctctt

SEQ ID NO: 3905 - RNA, 20 nt, synthetic construct
  misc_feature 1..20: note = antisense sequence
  source 1..20: mol_type = other RNA
acctggttccttggagccct

SEQ ID NO: 3906 - RNA, 20 nt, synthetic construct
  misc_feature 1..20: note = antisense sequence
  source 1..20: mol_type = other RNA
tagacctggttccttggagc

SEQ ID NO: 3907 - RNA, 20 nt, synthetic construct
  misc_feature 1..20: note = antisense sequence
  source 1..20: mol_type = other RNA
ttagacctggttccttggag

SEQ ID NO: 3908 - RNA, 20 nt, synthetic construct
  misc_feature 1..20: note = antisense sequence
  source 1..20: mol_type = other RNA
gttagacctggttccttgga

SEQ ID NO: 3909 - RNA, 20 nt, synthetic construct
  misc_feature 1..20: note = antisense sequence
  source 1..20: mol_type = other RNA
ttgttagacctggttccttg

SEQ ID NO: 3910 - RNA, 20 nt, synthetic construct
  misc_feature 1..20: note = antisense sequence
  source 1..20: mol_type = other RNA
cttgttagacctggttcctt

SEQ ID NO: 3911 - RNA, 20 nt, synthetic construct
  misc_feature 1..20: note = antisense sequence
  source 1..20: mol_type = other RNA
gcttgttagacctggttcct

SEQ ID NO: 3912 - RNA, 20 nt, synthetic construct
  misc_feature 1..20: note = antisense sequence
  source 1..20: mol_type = other RNA
aactcactcaccttaaagct

SEQ ID NO: 3913 - RNA, 20 nt, synthetic construct
  misc_feature 1..20: note = antisense sequence
  source 1..20: mol_type = other RNA
gaactcactcaccttaaagc

SEQ ID NO: 3914 - RNA, 20 nt, synthetic construct
  misc_feature 1..20: note = antisense sequence
  source 1..20: mol_type = other RNA
gggcaccattgagagaactc

SEQ ID NO: 3915 - RNA, 20 nt, synthetic construct
  misc_feature 1..20: note = antisense sequence
  source 1..20: mol_type = other RNA
aggatgtcaggaaagtcggg

SEQ ID NO: 3916 - RNA, 20 nt, synthetic construct
  misc_feature 1..20: note = antisense sequence
  source 1..20: mol_type = other RNA
aaggatgtcaggaaagtcgg

SEQ ID NO: 3917 - RNA, 20 nt, synthetic construct
  misc_feature 1..20: note = antisense sequence
  source 1..20: mol_type = other RNA
gaaggatgtcaggaaagtcg

SEQ ID NO: 3918 - RNA, 20 nt, synthetic construct
  misc_feature 1..20: note = antisense sequence
  source 1..20: mol_type = other RNA
agaaggatgtcaggaaagtc

SEQ ID NO: 3919 - RNA, 20 nt, synthetic construct
  misc_feature 1..20: note = antisense sequence
  source 1..20: mol_type = other RNA
cagaaggatgtcaggaaagt

SEQ ID NO: 3920 - RNA, 20 nt, synthetic construct
  misc_feature 1..20: note = antisense sequence
  source 1..20: mol_type = other RNA
ctaagattcagaaggatgtc

SEQ ID NO: 3921 - RNA, 20 nt, synthetic construct
  misc_feature 1..20: note = antisense sequence
  source 1..20: mol_type = other RNA
gtctaagattcagaaggatg

SEQ ID NO: 3922 - RNA, 20 nt, synthetic construct
  misc_feature 1..20: note = antisense sequence
  source 1..20: mol_type = other RNA
cttgtctaagattcagaagg

SEQ ID NO: 3923 - RNA, 20 nt, synthetic construct
  misc_feature 1..20: note = antisense sequence
  source 1..20: mol_type = other RNA
gcttgtctaagattcagaag

SEQ ID NO: 3924 - RNA, 20 nt, synthetic construct
  misc_feature 1..20: note = antisense sequence
  source 1..20: mol_type = other RNA
aggcttgtctaagattcaga

SEQ ID NO: 3925 - RNA, 20 nt, synthetic construct
  misc_feature 1..20: note = antisense sequence
  source 1..20: mol_type = other RNA
gaggcttgtctaagattcag

SEQ ID NO: 3926 - RNA, 20 nt, synthetic construct
  misc_feature 1..20: note = antisense sequence
  source 1..20: mol_type = other RNA
cgaggcttgtctaagattca

SEQ ID NO: 3927 - RNA, 20 nt, synthetic construct
  misc_feature 1..20: note = antisense sequence
  source 1..20: mol_type = other RNA
ccgaggcttgtctaagattc

SEQ ID NO: 3928 - RNA, 20 nt, synthetic construct
  misc_feature 1..20: note = antisense sequence
  source 1..20: mol_type = other RNA
tccgaggcttgtctaagatt

SEQ ID NO: 3929 - RNA, 20 nt, synthetic construct
  misc_feature 1..20: note = antisense sequence
  source 1..20: mol_type = other RNA
ctccgaggcttgtctaagat

SEQ ID NO: 3930 - RNA, 20 nt, synthetic construct
  misc_feature 1..20: note = antisense sequence
  source 1..20: mol_type = other RNA
tctccgaggcttgtctaaga

SEQ ID NO: 3931 - RNA, 20 nt, synthetic construct
  misc_feature 1..20: note = antisense sequence
  source 1..20: mol_type = other RNA
ctctccgaggcttgtctaag

SEQ ID NO: 3932 - RNA, 20 nt, synthetic construct
  misc_feature 1..20: note = antisense sequence
  source 1..20: mol_type = other RNA
tctctccgaggcttgtctaa

SEQ ID NO: 3933 - RNA, 20 nt, synthetic construct
  misc_feature 1..20: note = antisense sequence
  source 1..20: mol_type = other RNA
tctctctccgaggcttgtct

SEQ ID NO: 3934 - RNA, 20 nt, synthetic construct
  misc_feature 1..20: note = antisense sequence
  source 1..20: mol_type = other RNA
atctctctccgaggcttgtc

SEQ ID NO: 3935 - RNA, 20 nt, synthetic construct
  misc_feature 1..20: note = antisense sequence
  source 1..20: mol_type = other RNA
tatctctctccgaggcttgt

SEQ ID NO: 3936 - RNA, 20 nt, synthetic construct
  misc_feature 1..20: note = antisense sequence
  source 1..20: mol_type = other RNA
gtatctctctccgaggcttg

SEQ ID NO: 3937 - RNA, 20 nt, synthetic construct
  misc_feature 1..20: note = antisense sequence
  source 1..20: mol_type = other RNA
gagtatctctctccgaggct

SEQ ID NO: 3938 - RNA, 20 nt, synthetic construct
  misc_feature 1..20: note = antisense sequence
  source 1..20: mol_type = other RNA
tgagtatctctctccgaggc

SEQ ID NO: 3939 - RNA, 20 nt, synthetic construct
  misc_feature 1..20: note = antisense sequence
  source 1..20: mol_type = other RNA
atgagtatctctctccgagg

SEQ ID NO: 3940 - RNA, 20 nt, synthetic construct
  misc_feature 1..20: note = antisense sequence
  source 1..20: mol_type = other RNA
catgagtatctctctccgag

SEQ ID NO: 3941 - RNA, 20 nt, synthetic construct
  misc_feature 1..20: note = antisense sequence
  source 1..20: mol_type = other RNA
ccatgagtatctctctccga

SEQ ID NO: 3942 - RNA, 20 nt, synthetic construct
  misc_feature 1..20: note = antisense sequence
  source 1..20: mol_type = other RNA
tccatgagtatctctctccg

SEQ ID NO: 3943 - RNA, 20 nt, synthetic construct
  misc_feature 1..20: note = antisense sequence
  source 1..20: mol_type = other RNA
attccatgagtatctctctc

SEQ ID NO: 3944 - RNA, 20 nt, synthetic construct
  misc_feature 1..20: note = antisense sequence
  source 1..20: mol_type = other RNA
actccagcctgggcaacaga

SEQ ID NO: 3945 - RNA, 20 nt, synthetic construct
  misc_feature 1..20: note = antisense sequence
  source 1..20: mol_type = other RNA
taccactgcactccagcctg

SEQ ID NO: 3946 - RNA, 20 nt, synthetic construct
  misc_feature 1..20: note = antisense sequence
  source 1..20: mol_type = other RNA
gtaccactgcactccagcct

SEQ ID NO: 3947 - RNA, 20 nt, synthetic construct
  misc_feature 1..20: note = antisense sequence
  source 1..20: mol_type = other RNA
tcgtaccactgcactccagc

SEQ ID NO: 3948 - RNA, 20 nt, synthetic construct
  misc_feature 1..20: note = antisense sequence
  source 1..20: mol_type = other RNA
atcgtaccactgcactccag

SEQ ID NO: 3949 - RNA, 20 nt, synthetic construct
  misc_feature 1..20: note = antisense sequence
  source 1..20: mol_type = other RNA
gttgcagtgagccaatatcg

SEQ ID NO: 3950 - RNA, 20 nt, synthetic construct
  misc_feature 1..20: note = antisense sequence
  source 1..20: mol_type = other RNA
ggttgcagtgagccaatatc

SEQ ID NO: 3951 - RNA, 20 nt, synthetic construct
  misc_feature 1..20: note = antisense sequence
  source 1..20: mol_type = other RNA
aggttgcagtgagccaatat

SEQ ID NO: 3952 - RNA, 20 nt, synthetic construct
  misc_feature 1..20: note = antisense sequence
  source 1..20: mol_type = other RNA
gaggttgcagtgagccaata

SEQ ID NO: 3953 - RNA, 20 nt, synthetic construct
  misc_feature 1..20: note = antisense sequence
  source 1..20: mol_type = other RNA
ggaggttgcagtgagccaat

SEQ ID NO: 3954 - RNA, 20 nt, synthetic construct
  misc_feature 1..20: note = antisense sequence
  source 1..20: mol_type = other RNA
cggaggttgcagtgagccaa

SEQ ID NO: 3955 - RNA, 20 nt, synthetic construct
  misc_feature 1..20: note = antisense sequence
  source 1..20: mol_type = other RNA
gaggctgaggcaggagaatt

SEQ ID NO: 3956 - RNA, 20 nt, synthetic construct
  misc_feature 1..20: note = antisense sequence
  source 1..20: mol_type = other RNA
ggaggctgaggcaggagaat

SEQ ID NO: 3957 - RNA, 20 nt, synthetic construct
  misc_feature 1..20: note = antisense sequence
  source 1..20: mol_type = other RNA
tataatcccagctactcggg

SEQ ID NO: 3958 - RNA, 20 nt, synthetic construct
  misc_feature 1..20: note = antisense sequence
  source 1..20: mol_type = other RNA
ctataatcccagctactcgg

SEQ ID NO: 3959 - RNA, 20 nt, synthetic construct
  misc_feature 1..20: note = antisense sequence
  source 1..20: mol_type = other RNA
cctataatcccagctactcg

SEQ ID NO: 3960 - RNA, 20 nt, synthetic construct
  misc_feature 1..20: note = antisense sequence
  source 1..20: mol_type = other RNA
gcctataatcccagctactc

SEQ ID NO: 3961 - RNA, 20 nt, synthetic construct
  misc_feature 1..20: note = antisense sequence
  source 1..20: mol_type = other RNA
agcctataatcccagctact

SEQ ID NO: 3962 - RNA, 20 nt, synthetic construct
  misc_feature 1..20: note = antisense sequence
  source 1..20: mol_type = other RNA
aagcctataatcccagctac

SEQ ID NO: 3963 - RNA, 20 nt, synthetic construct
  misc_feature 1..20: note = antisense sequence
  source 1..20: mol_type = other RNA
caagcctataatcccagcta

SEQ ID NO: 3964 - RNA, 20 nt, synthetic construct
  misc_feature 1..20: note = antisense sequence
  source 1..20: mol_type = other RNA
gcaagcctataatcccagct

SEQ ID NO: 3965 - RNA, 20 nt, synthetic construct
  misc_feature 1..20: note = antisense sequence
  source 1..20: mol_type = other RNA
cgcaagcctataatcccagc

SEQ ID NO: 3966 - RNA, 20 nt, synthetic construct
  misc_feature 1..20: note = antisense sequence
  source 1..20: mol_type = other RNA
attagctgggcatggtggcg

SEQ ID NO: 3967 - RNA, 20 nt, synthetic construct
  misc_feature 1..20: note = antisense sequence
  source 1..20: mol_type = other RNA
aattagctgggcatggtggc

SEQ ID NO: 3968 - RNA, 20 nt, synthetic construct
  misc_feature 1..20: note = antisense sequence
  source 1..20: mol_type = other RNA
aaattagctgggcatggtgg

SEQ ID NO: 3969 - RNA, 20 nt, synthetic construct
  misc_feature 1..20: note = antisense sequence
  source 1..20: mol_type = other RNA
aaaattagctgggcatggtg

SEQ ID NO: 3970 - RNA, 20 nt, synthetic construct
  misc_feature 1..20: note = antisense sequence
  source 1..20: mol_type = other RNA
ggagtttgagaccagcctgg

SEQ ID NO: 3971 - RNA, 20 nt, synthetic construct
  misc_feature 1..20: note = antisense sequence
  source 1..20: mol_type = other RNA
aggagtttgagaccagcctg

SEQ ID NO: 3972 - RNA, 20 nt, synthetic construct
  misc_feature 1..20: note = antisense sequence
  source 1..20: mol_type = other RNA
caggagtttgagaccagcct

SEQ ID NO: 3973 - RNA, 20 nt, synthetic construct
  misc_feature 1..20: note = antisense sequence
  source 1..20: mol_type = other RNA
ccaggagtttgagaccagcc

SEQ ID NO: 3974 - RNA, 20 nt, synthetic construct
  misc_feature 1..20: note = antisense sequence
  source 1..20: mol_type = other RNA
gccaggagtttgagaccagc

SEQ ID NO: 3975 - RNA, 20 nt, synthetic construct
  misc_feature 1..20: note = antisense sequence
  source 1..20: mol_type = other RNA
ggccaggagtttgagaccag

SEQ ID NO: 3976 - RNA, 20 nt, synthetic construct
  misc_feature 1..20: note = antisense sequence
  source 1..20: mol_type = other RNA
aggccaggagtttgagacca

SEQ ID NO: 3977 - RNA, 20 nt, synthetic construct
  misc_feature 1..20: note = antisense sequence
  source 1..20: mol_type = other RNA
aaggccaggagtttgagacc

SEQ ID NO: 3978 - RNA, 20 nt, synthetic construct
  misc_feature 1..20: note = antisense sequence
  source 1..20: mol_type = other RNA
taaggccaggagtttgagac

SEQ ID NO: 3979 - RNA, 20 nt, synthetic construct
  misc_feature 1..20: note = antisense sequence
  source 1..20: mol_type = other RNA
ttaaggccaggagtttgaga

SEQ ID NO: 3980 - RNA, 20 nt, synthetic construct
  misc_feature 1..20: note = antisense sequence
  source 1..20: mol_type = other RNA
gaggtgggtggatcacttaa

SEQ ID NO: 3981 - RNA, 20 nt, synthetic construct
  misc_feature 1..20: note = antisense sequence
  source 1..20: mol_type = other RNA
tgaggtgggtggatcactta

SEQ ID NO: 3982 - RNA, 20 nt, synthetic construct
  misc_feature 1..20: note = antisense sequence
  source 1..20: mol_type = other RNA
ctgaggtgggtggatcactt

SEQ ID NO: 3983 - RNA, 20 nt, synthetic construct
  misc_feature 1..20: note = antisense sequence
  source 1..20: mol_type = other RNA
actgaggtgggtggatcact

SEQ ID NO: 3984 - RNA, 20 nt, synthetic construct
  misc_feature 1..20: note = antisense sequence
  source 1..20: mol_type = other RNA
gactgaggtgggtggatcac

SEQ ID NO: 3985 - RNA, 20 nt, synthetic construct
  misc_feature 1..20: note = antisense sequence
  source 1..20: mol_type = other RNA
agactgaggtgggtggatca

SEQ ID NO: 3986 - RNA, 20 nt, synthetic construct
  misc_feature 1..20: note = antisense sequence
  source 1..20: mol_type = other RNA
gagactgaggtgggtggatc

SEQ ID NO: 3987 - RNA, 20 nt, synthetic construct
  misc_feature 1..20: note = antisense sequence
  source 1..20: mol_type = other RNA
ggagactgaggtgggtggat

SEQ ID NO: 3988 - RNA, 20 nt, synthetic construct
  misc_feature 1..20: note = antisense sequence
  source 1..20: mol_type = other RNA
agcactttgggagactgagg

SEQ ID NO: 3989 - RNA, 20 nt, synthetic construct
  misc_feature 1..20: note = antisense sequence
  source 1..20: mol_type = other RNA
cagcactttgggagactgag

SEQ ID NO: 3990 - RNA, 20 nt, synthetic construct
  misc_feature 1..20: note = antisense sequence
  source 1..20: mol_type = other RNA
ccagcactttgggagactga

SEQ ID NO: 3991 - RNA, 20 nt, synthetic construct
  misc_feature 1..20: note = antisense sequence
  source 1..20: mol_type = other RNA
ctgcaatcccagcactttgg

SEQ ID NO: 3992 - RNA, 20 nt, synthetic construct
  misc_feature 1..20: note = antisense sequence
  source 1..20: mol_type = other RNA
cctgcaatcccagcactttg

SEQ ID NO: 3993 - RNA, 20 nt, synthetic construct
  misc_feature 1..20: note = antisense sequence
  source 1..20: mol_type = other RNA
tgatttggataggtgccatg

SEQ ID NO: 3994 - RNA, 20 nt, synthetic construct
  misc_feature 1..20: note = antisense sequence
  source 1..20: mol_type = other RNA
atgatttggataggtgccat

SEQ ID NO: 3995 - RNA, 20 nt, synthetic construct
  misc_feature 1..20: note = antisense sequence
  source 1..20: mol_type = other RNA
aatgatttggataggtgcca

SEQ ID NO: 3996 - RNA, 20 nt, synthetic construct
  misc_feature 1..20: note = antisense sequence
  source 1..20: mol_type = other RNA
aaatgatttggataggtgcc

SEQ ID NO: 3997 - RNA, 20 nt, synthetic construct
  misc_feature 1..20: note = antisense sequence
  source 1..20: mol_type = other RNA
ccaagagaataagatggact

SEQ ID NO: 3998 - RNA, 20 nt, synthetic construct
  misc_feature 1..20: note = antisense sequence
  source 1..20: mol_type = other RNA
cccaagagaataagatggac

SEQ ID NO: 3999 - RNA, 20 nt, synthetic construct
  misc_feature 1..20: note = antisense sequence
  source 1..20: mol_type = other RNA
gatgcccaagagaataagat

SEQ ID NO: 4000 - RNA, 20 nt, synthetic construct
  misc_feature 1..20: note = antisense sequence
  source 1..20: mol_type = other RNA
gagatgcccaagagaataag

SEQ ID NO: 4001 - RNA, 20 nt, synthetic construct
  misc_feature 1..20: note = antisense sequence
  source 1..20: mol_type = other RNA
ggttgagatgcccaagagaa

SEQ ID NO: 4002 - RNA, 20 nt, synthetic construct
  misc_feature 1..20: note = antisense sequence
  source 1..20: mol_type = other RNA
aggttgagatgcccaagaga

SEQ ID NO: 4003 - RNA, 20 nt, synthetic construct
  misc_feature 1..20: note = antisense sequence
  source 1..20: mol_type = other RNA
aaaaggttgagatgcccaag

SEQ ID NO: 4004 - RNA, 20 nt, synthetic construct
  misc_feature 1..20: note = antisense sequence
  source 1..20: mol_type = other RNA
gaaaaggttgagatgcccaa

SEQ ID NO: 4005 - RNA, 20 nt, synthetic construct
  misc_feature 1..20: note = antisense sequence
  source 1..20: mol_type = other RNA
ggaaaaggttgagatgccca

SEQ ID NO: 4006 - RNA, 20 nt, synthetic construct
  misc_feature 1..20: note = antisense sequence
  source 1..20: mol_type = other RNA
caggaaaaggttgagatgcc

SEQ ID NO: 4007 - RNA, 20 nt, synthetic construct
  misc_feature 1..20: note = antisense sequence
  source 1..20: mol_type = other RNA
ctccattttcctaaggcagg

SEQ ID NO: 4008 - RNA, 20 nt, synthetic construct
  misc_feature 1..20: note = antisense sequence
  source 1..20: mol_type = other RNA
gacctccattttcctaaggc

SEQ ID NO: 4009 - RNA, 20 nt, synthetic construct
  misc_feature 1..20: note = antisense sequence
  source 1..20: mol_type = other RNA
ttagaggacctccattttcc

SEQ ID NO: 4010 - RNA, 20 nt, synthetic construct
  misc_feature 1..20: note = antisense sequence
  source 1..20: mol_type = other RNA
gttagaggacctccattttc

SEQ ID NO: 4011 - RNA, 20 nt, synthetic construct
  misc_feature 1..20: note = antisense sequence
  source 1..20: mol_type = other RNA
agttagaggacctccatttt

SEQ ID NO: 4012 - RNA, 20 nt, synthetic construct
  misc_feature 1..20: note = antisense sequence
  source 1..20: mol_type = other RNA
gagttagaggacctccattt

SEQ ID NO: 4013 - RNA, 20 nt, synthetic construct
  misc_feature 1..20: note = antisense sequence
  source 1..20: mol_type = other RNA
gcaggatcatgtgacaagat

SEQ ID NO: 4014 - RNA, 20 nt, synthetic construct
  misc_feature 1..20: note = antisense sequence
  source 1..20: mol_type = other RNA
acagcaggatcatgtgacaa

SEQ ID NO: 4015 - RNA, 20 nt, synthetic construct
  misc_feature 1..20: note = antisense sequence
  source 1..20: mol_type = other RNA
ctacagcaggatcatgtgac

SEQ ID NO: 4016 - RNA, 20 nt, synthetic construct
  misc_feature 1..20: note = antisense sequence
  source 1..20: mol_type = other RNA
gcctacagcaggatcatgtg

SEQ ID NO: 4017 - RNA, 20 nt, synthetic construct
  misc_feature 1..20: note = antisense sequence
  source 1..20: mol_type = other RNA
tgcctacagcaggatcatgt

SEQ ID NO: 4018 - RNA, 20 nt, synthetic construct
  misc_feature 1..20: note = antisense sequence
  source 1..20: mol_type = other RNA
tgtgggttctgcctacagca

SEQ ID NO: 4019 - RNA, 20 nt, synthetic construct
  misc_feature 1..20: note = antisense sequence
  source 1..20: mol_type = other RNA
gtgtgggttctgcctacagc

SEQ ID NO: 4020 - RNA, 20 nt, synthetic construct
  misc_feature 1..20: note = antisense sequence
  source 1..20: mol_type = other RNA
ttaactggtgtgggttctgc

SEQ ID NO: 4021 - RNA, 20 nt, synthetic construct
  misc_feature 1..20: note = antisense sequence
  source 1..20: mol_type = other RNA
catttaactggtgtgggttc

SEQ ID NO: 4022 - RNA, 20 nt, synthetic construct
  misc_feature 1..20: note = antisense sequence
  source 1..20: mol_type = other RNA
aacatttaactggtgtgggt

SEQ ID NO: 4023 - RNA, 20 nt, synthetic construct
  misc_feature 1..20: note = antisense sequence
  source 1..20: mol_type = other RNA
aaacatttaactggtgtggg

SEQ ID NO: 4024 - RNA, 20 nt, synthetic construct
  misc_feature 1..20: note = antisense sequence
  source 1..20: mol_type = other RNA
ccaaccacaggctaaacatt

SEQ ID NO: 4025 - RNA, 20 nt, synthetic construct
  misc_feature 1..20: note = antisense sequence
  source 1..20: mol_type = other RNA
gccaaccacaggctaaacat

SEQ ID NO: 4026 - RNA, 20 nt, synthetic construct
  misc_feature 1..20: note = antisense sequence
  source 1..20: mol_type = other RNA
cactctctgcactgctttct

SEQ ID NO: 4027 - RNA, 20 nt, synthetic construct
  misc_feature 1..20: note = antisense sequence
  source 1..20: mol_type = other RNA
gcactctctgcactgctttc

SEQ ID NO: 4028 - RNA, 20 nt, synthetic construct
  misc_feature 1..20: note = antisense sequence
  source 1..20: mol_type = other RNA
attttagcactctctgcact

SEQ ID NO: 4029 - RNA, 20 nt, synthetic construct
  misc_feature 1..20: note = antisense sequence
  source 1..20: mol_type = other RNA
tattttagcactctctgcac

SEQ ID NO: 4030 - RNA, 20 nt, synthetic construct
  misc_feature 1..20: note = antisense sequence
  source 1..20: mol_type = other RNA
gtctgtattttagcactctc

SEQ ID NO: 4031 - RNA, 20 nt, synthetic construct
  misc_feature 1..20: note = antisense sequence
  source 1..20: mol_type = other RNA
gcatgtagaggaagttgaaa

SEQ ID NO: 4032 - RNA, 20 nt, synthetic construct
  misc_feature 1..20: note = antisense sequence
  source 1..20: mol_type = other RNA
agcatgtagaggaagttgaa

SEQ ID NO: 4033 - RNA, 20 nt, synthetic construct
  misc_feature 1..20: note = antisense sequence
  source 1..20: mol_type = other RNA
aagcatgtagaggaagttga

SEQ ID NO: 4034 - RNA, 20 nt, synthetic construct
  misc_feature 1..20: note = antisense sequence
  source 1..20: mol_type = other RNA
taaagctaccacagacatac

SEQ ID NO: 4035 - RNA, 20 nt, synthetic construct
  misc_feature 1..20: note = antisense sequence
  source 1..20: mol_type = other RNA
ttgtaaagctaccacagaca

SEQ ID NO: 4036 - RNA, 20 nt, synthetic construct
  misc_feature 1..20: note = antisense sequence
  source 1..20: mol_type = other RNA
tttgtaaagctaccacagac

SEQ ID NO: 4037 - RNA, 20 nt, synthetic construct
  misc_feature 1..20: note = antisense sequence
  source 1..20: mol_type = other RNA
tcaccagaatgtgctaatga

SEQ ID NO: 4038 - RNA, 20 nt, synthetic construct
  misc_feature 1..20: note = antisense sequence
  source 1..20: mol_type = other RNA
atcaccagaatgtgctaatg

SEQ ID NO: 4039 - RNA, 20 nt, synthetic construct
  misc_feature 1..20: note = antisense sequence
  source 1..20: mol_type = other RNA
catactatcaccagaatgtg

SEQ ID NO: 4040 - RNA, 20 nt, synthetic construct
  misc_feature 1..20: note = antisense sequence
  source 1..20: mol_type = other RNA
gacatactatcaccagaatg

SEQ ID NO: 4041 - RNA, 20 nt, synthetic construct
  misc_feature 1..20: note = antisense sequence
  source 1..20: mol_type = other RNA
atctgacatactatcaccag

SEQ ID NO: 4042 - RNA, 20 nt, synthetic construct
  misc_feature 1..20: note = antisense sequence
  source 1..20: mol_type = other RNA
ccattttcttcaagctagag

SEQ ID NO: 4043 - RNA, 20 nt, synthetic construct
  misc_feature 1..20: note = antisense sequence
  source 1..20: mol_type = other RNA
cccattttcttcaagctaga

SEQ ID NO: 4044 - RNA, 20 nt, synthetic construct
  misc_feature 1..20: note = antisense sequence
  source 1..20: mol_type = other RNA
aaggcccattttcttcaagc

SEQ ID NO: 4045 - RNA, 20 nt, synthetic construct
  misc_feature 1..20: note = antisense sequence
  source 1..20: mol_type = other RNA
gtaaggcccattttcttcaa

SEQ ID NO: 4046 - RNA, 20 nt, synthetic construct
  misc_feature 1..20: note = antisense sequence
  source 1..20: mol_type = other RNA
agtaaggcccattttcttca

SEQ ID NO: 4047 - RNA, 20 nt, synthetic construct
  misc_feature 1..20: note = antisense sequence
  source 1..20: mol_type = other RNA
gtcccagatcattaagtatg

SEQ ID NO: 4048 - RNA, 20 nt, synthetic construct
  misc_feature 1..20: note = antisense sequence
  source 1..20: mol_type = other RNA
ttaggtcccagatcattaag

SEQ ID NO: 4049 - RNA, 20 nt, synthetic construct
  misc_feature 1..20: note = antisense sequence
  source 1..20: mol_type = other RNA
gaagaaaattaggtcccaga

SEQ ID NO: 4050 - RNA, 20 nt, synthetic construct
  misc_feature 1..20: note = antisense sequence
  source 1..20: mol_type = other RNA
agggctgaagaaaattaggt

SEQ ID NO: 4051 - RNA, 20 nt, synthetic construct
  misc_feature 1..20: note = antisense sequence
  source 1..20: mol_type = other RNA
cagggctgaagaaaattagg

SEQ ID NO: 4052 - RNA, 20 nt, synthetic construct
  misc_feature 1..20: note = antisense sequence
  source 1..20: mol_type = other RNA
agcataatcagggctgaaga

SEQ ID NO: 4053 - RNA, 20 nt, synthetic construct
  misc_feature 1..20: note = antisense sequence
  source 1..20: mol_type = other RNA
aaagcataatcagggctgaa

SEQ ID NO: 4054 - RNA, 20 nt, synthetic construct
  misc_feature 1..20: note = antisense sequence
  source 1..20: mol_type = other RNA
caaagcataatcagggctga

SEQ ID NO: 4055 - RNA, 20 nt, synthetic construct
  misc_feature 1..20: note = antisense sequence
  source 1..20: mol_type = other RNA
acaaagcataatcagggctg

SEQ ID NO: 4056 - RNA, 20 nt, synthetic construct
  misc_feature 1..20: note = antisense sequence
  source 1..20: mol_type = other RNA
aacaaagcataatcagggct

SEQ ID NO: 4057 - RNA, 20 nt, synthetic construct
  misc_feature 1..20: note = antisense sequence
  source 1..20: mol_type = other RNA
aaacaaagcataatcagggc

SEQ ID NO: 4058 - RNA, 20 nt, synthetic construct
  misc_feature 1..20: note = antisense sequence
  source 1..20: mol_type = other RNA
gaaacaaagcataatcaggg

SEQ ID NO: 4059 - RNA, 20 nt, synthetic construct
  misc_feature 1..20: note = antisense sequence
  source 1..20: mol_type = other RNA
ggcaacagagcaagattccg

SEQ ID NO: 4060 - RNA, 20 nt, synthetic construct
  misc_feature 1..20: note = antisense sequence
  source 1..20: mol_type = other RNA
gggcaacagagcaagattcc

SEQ ID NO: 4061 - RNA, 20 nt, synthetic construct
  misc_feature 1..20: note = antisense sequence
  source 1..20: mol_type = other RNA
tgggcaacagagcaagattc

SEQ ID NO: 4062 - RNA, 20 nt, synthetic construct
  misc_feature 1..20: note = antisense sequence
  source 1..20: mol_type = other RNA
ctgggcaacagagcaagatt

SEQ ID NO: 4063 - RNA, 20 nt, synthetic construct
  misc_feature 1..20: note = antisense sequence
  source 1..20: mol_type = other RNA
cctgggcaacagagcaagat

SEQ ID NO: 4064 - RNA, 20 nt, synthetic construct
  misc_feature 1..20: note = antisense sequence
  source 1..20: mol_type = other RNA
gcctgggcaacagagcaaga

SEQ ID NO: 4065 - RNA, 20 nt, synthetic construct
  misc_feature 1..20: note = antisense sequence
  source 1..20: mol_type = other RNA
agcctgggcaacagagcaag

SEQ ID NO: 4066 - RNA, 20 nt, synthetic construct
  misc_feature 1..20: note = antisense sequence
  source 1..20: mol_type = other RNA
cagcctgggcaacagagcaa

SEQ ID NO: 4067 - RNA, 20 nt, synthetic construct
  misc_feature 1..20: note = antisense sequence
  source 1..20: mol_type = other RNA
tcatgccattccgctccagc

SEQ ID NO: 4068 - RNA, 20 nt, synthetic construct
  misc_feature 1..20: note = antisense sequence
  source 1..20: mol_type = other RNA
atcatgccattccgctccag

SEQ ID NO: 4069 - RNA, 20 nt, synthetic construct
  misc_feature 1..20: note = antisense sequence
  source 1..20: mol_type = other RNA
gatcatgccattccgctcca

SEQ ID NO: 4070 - RNA, 20 nt, synthetic construct
  misc_feature 1..20: note = antisense sequence
  source 1..20: mol_type = other RNA
ggatcatgccattccgctcc

SEQ ID NO: 4071 - RNA, 20 nt, synthetic construct
  misc_feature 1..20: note = antisense sequence
  source 1..20: mol_type = other RNA
gggatcatgccattccgctc

SEQ ID NO: 4072 - RNA, 20 nt, synthetic construct
  misc_feature 1..20: note = antisense sequence
  source 1..20: mol_type = other RNA
tgggatcatgccattccgct

SEQ ID NO: 4073 - RNA, 20 nt, synthetic construct
  misc_feature 1..20: note = antisense sequence
  source 1..20: mol_type = other RNA
ggctgggatcatgccattcc

SEQ ID NO: 4074 - RNA, 20 nt, synthetic construct
  misc_feature 1..20: note = antisense sequence
  source 1..20: mol_type = other RNA
accataggctgggatcatgc

SEQ ID NO: 4075 - RNA, 20 nt, synthetic construct
  misc_feature 1..20: note = antisense sequence
  source 1..20: mol_type = other RNA
caccataggctgggatcatg

SEQ ID NO: 4076 - RNA, 20 nt, synthetic construct
  misc_feature 1..20: note = antisense sequence
  source 1..20: mol_type = other RNA
tcaccataggctgggatcat

SEQ ID NO: 4077 - RNA, 20 nt, synthetic construct
  misc_feature 1..20: note = antisense sequence
  source 1..20: mol_type = other RNA
gtcaccataggctgggatca

SEQ ID NO: 4078 - RNA, 20 nt, synthetic construct
  misc_feature 1..20: note = antisense sequence
  source 1..20: mol_type = other RNA
aggtcaccataggctgggat

SEQ ID NO: 4079 - RNA, 20 nt, synthetic construct
  misc_feature 1..20: note = antisense sequence
  source 1..20: mol_type = other RNA
gaggtcaccataggctggga

SEQ ID NO: 4080 - RNA, 20 nt, synthetic construct
  misc_feature 1..20: note = antisense sequence
  source 1..20: mol_type = other RNA
gcagaggtcaccataggctg

SEQ ID NO: 4081 - RNA, 20 nt, synthetic construct
  misc_feature 1..20: note = antisense sequence
  source 1..20: mol_type = other RNA
ggcagaggtcaccataggct

SEQ ID NO: 4082 - RNA, 20 nt, synthetic construct
  misc_feature 1..20: note = antisense sequence
  source 1..20: mol_type = other RNA
gggaggcagaggtcaccata

SEQ ID NO: 4083 - RNA, 20 nt, synthetic construct
  misc_feature 1..20: note = antisense sequence
  source 1..20: mol_type = other RNA
tgaggcaggagaatctcttg

SEQ ID NO: 4084 - RNA, 20 nt, synthetic construct
  misc_feature 1..20: note = antisense sequence
  source 1..20: mol_type = other RNA
ctgaggcaggagaatctctt

SEQ ID NO: 4085 - RNA, 20 nt, synthetic construct
  misc_feature 1..20: note = antisense sequence
  source 1..20: mol_type = other RNA
tcaagaccagcctgagcaac

SEQ ID NO: 4086 - RNA, 20 nt, synthetic construct
  misc_feature 1..20: note = antisense sequence
  source 1..20: mol_type = other RNA
ttcaagaccagcctgagcaa

SEQ ID NO: 4087 - RNA, 20 nt, synthetic construct
  misc_feature 1..20: note = antisense sequence
  source 1..20: mol_type = other RNA
cctagcactttgggaggcca

SEQ ID NO: 4088 - RNA, 20 nt, synthetic construct
  misc_feature 1..20: note = antisense sequence
  source 1..20: mol_type = other RNA
tcctagcactttgggaggcc

SEQ ID NO: 4089 - RNA, 20 nt, synthetic construct
  misc_feature 1..20: note = antisense sequence
  source 1..20: mol_type = other RNA
atcctagcactttgggaggc

SEQ ID NO: 4090 - RNA, 20 nt, synthetic construct
  misc_feature 1..20: note = antisense sequence
  source 1..20: mol_type = other RNA
aatcctagcactttgggagg

SEQ ID NO: 4091 - RNA, 20 nt, synthetic construct
  misc_feature 1..20: note = antisense sequence
  source 1..20: mol_type = other RNA
taatcctagcactttgggag

SEQ ID NO: 4092 - RNA, 20 nt, synthetic construct
  misc_feature 1..20: note = antisense sequence
  source 1..20: mol_type = other RNA
gtaatcctagcactttggga

SEQ ID NO: 4093 - RNA, 20 nt, synthetic construct
  misc_feature 1..20: note = antisense sequence
  source 1..20: mol_type = other RNA
tgtaatcctagcactttggg

SEQ ID NO: 4094 - RNA, 20 nt, synthetic construct
  misc_feature 1..20: note = antisense sequence
  source 1..20: mol_type = other RNA
ttgtaatcctagcactttgg

SEQ ID NO: 4095 - RNA, 20 nt, synthetic construct
  misc_feature 1..20: note = antisense sequence
  source 1..20: mol_type = other RNA
cttgtaatcctagcactttg

SEQ ID NO: 4096 - RNA, 20 nt, synthetic construct
  misc_feature 1..20: note = antisense sequence
  source 1..20: mol_type = other RNA
gcttgtaatcctagcacttt

SEQ ID NO: 4097 - RNA, 20 nt, synthetic construct
  misc_feature 1..20: note = antisense sequence
  source 1..20: mol_type = other RNA
cacagtggctcatgcttgta

SEQ ID NO: 4098 - RNA, 20 nt, synthetic construct
  misc_feature 1..20: note = antisense sequence
  source 1..20: mol_type = other RNA
gcacagtggctcatgcttgt

SEQ ID NO: 4099 - RNA, 20 nt, synthetic construct
  misc_feature 1..20: note = antisense sequence
  source 1..20: mol_type = other RNA
ggcacagtggctcatgcttg

SEQ ID NO: 4100 - RNA, 20 nt, synthetic construct
  misc_feature 1..20: note = antisense sequence
  source 1..20: mol_type = other RNA
gggcacagtggctcatgctt

SEQ ID NO: 4101 - RNA, 20 nt, synthetic construct
  misc_feature 1..20: note = antisense sequence
  source 1..20: mol_type = other RNA
ttaagagagaacaatctggc

SEQ ID NO: 4102 - RNA, 20 nt, synthetic construct
  misc_feature 1..20: note = antisense sequence
  source 1..20: mol_type = other RNA
cccattaagagagaacaatc

SEQ ID NO: 4103 - RNA, 20 nt, synthetic construct
  misc_feature 1..20: note = antisense sequence
  source 1..20: mol_type = other RNA
gcccattaagagagaacaat

SEQ ID NO: 4104 - RNA, 20 nt, synthetic construct
  misc_feature 1..20: note = antisense sequence
  source 1..20: mol_type = other RNA
agcccattaagagagaacaa

SEQ ID NO: 4105 - RNA, 20 nt, synthetic construct
  misc_feature 1..20: note = antisense sequence
  source 1..20: mol_type = other RNA
cagcccattaagagagaaca

SEQ ID NO: 4106 - RNA, 20 nt, synthetic construct
  misc_feature 1..20: note = antisense sequence
  source 1..20: mol_type = other RNA
tcagcccattaagagagaac

SEQ ID NO: 4107 - RNA, 20 nt, synthetic construct
  misc_feature 1..20: note = antisense sequence
  source 1..20: mol_type = other RNA
atcagcccattaagagagaa

SEQ ID NO: 4108 - RNA, 20 nt, synthetic construct
  misc_feature 1..20: note = antisense sequence
  source 1..20: mol_type = other RNA
tatcagcccattaagagaga

SEQ ID NO: 4109 - RNA, 20 nt, synthetic construct
  misc_feature 1..20: note = antisense sequence
  source 1..20: mol_type = other RNA
ttatcagcccattaagagag

SEQ ID NO: 4110 - RNA, 20 nt, synthetic construct
  misc_feature 1..20: note = antisense sequence
  source 1..20: mol_type = other RNA
ggttacttatcagcccatta

SEQ ID NO: 4111 - RNA, 20 nt, synthetic construct
  misc_feature 1..20: note = antisense sequence
  source 1..20: mol_type = other RNA
tggttacttatcagcccatt

SEQ ID NO: 4112 - RNA, 20 nt, synthetic construct
  misc_feature 1..20: note = antisense sequence
  source 1..20: mol_type = other RNA
cttggttacttatcagccca

SEQ ID NO: 4113 - RNA, 20 nt, synthetic construct
  misc_feature 1..20: note = antisense sequence
  source 1..20: mol_type = other RNA
ttgggcttgctgcctctagc

SEQ ID NO: 4114 - RNA, 20 nt, synthetic construct
  misc_feature 1..20: note = antisense sequence
  source 1..20: mol_type = other RNA
gcttgggcttgctgcctcta

SEQ ID NO: 4115 - RNA, 20 nt, synthetic construct
  misc_feature 1..20: note = antisense sequence
  source 1..20: mol_type = other RNA
agcttgggcttgctgcctct

SEQ ID NO: 4116 - RNA, 20 nt, synthetic construct
  misc_feature 1..20: note = antisense sequence
  source 1..20: mol_type = other RNA
tgtgtaattgggcattctgc

SEQ ID NO: 4117 - RNA, 20 nt, synthetic construct
  misc_feature 1..20: note = antisense sequence
  source 1..20: mol_type = other RNA
ttgtgtaattgggcattctg

SEQ ID NO: 4118 - RNA, 20 nt, synthetic construct
  misc_feature 1..20: note = antisense sequence
  source 1..20: mol_type = other RNA
gattgtgtaattgggcattc

SEQ ID NO: 4119 - RNA, 20 nt, synthetic construct
  misc_feature 1..20: note = antisense sequence
  source 1..20: mol_type = other RNA
ggattgtgtaattgggcatt

SEQ ID NO: 4120 - RNA, 20 nt, synthetic construct
  misc_feature 1..20: note = antisense sequence
  source 1..20: mol_type = other RNA
aggattgtgtaattgggcat

SEQ ID NO: 4121 - RNA, 20 nt, synthetic construct
  misc_feature 1..20: note = antisense sequence
  source 1..20: mol_type = other RNA
gaggattgtgtaattgggca

SEQ ID NO: 4122 - RNA, 20 nt, synthetic construct
  misc_feature 1..20: note = antisense sequence
  source 1..20: mol_type = other RNA
agaggattgtgtaattgggc

SEQ ID NO: 4123 - RNA, 20 nt, synthetic construct
  misc_feature 1..20: note = antisense sequence
  source 1..20: mol_type = other RNA
tagaggattgtgtaattggg

SEQ ID NO: 4124 - RNA, 20 nt, synthetic construct
  misc_feature 1..20: note = antisense sequence
  source 1..20: mol_type = other RNA
gtggctaatagaggattgtg

SEQ ID NO: 4125 - RNA, 20 nt, synthetic construct
  misc_feature 1..20: note = antisense sequence
  source 1..20: mol_type = other RNA
ggtggctaatagaggattgt

SEQ ID NO: 4126 - RNA, 20 nt, synthetic construct
  misc_feature 1..20: note = antisense sequence
  source 1..20: mol_type = other RNA
tggtggctaatagaggattg

SEQ ID NO: 4127 - RNA, 20 nt, synthetic construct
  misc_feature 1..20: note = antisense sequence
  source 1..20: mol_type = other RNA
ttggtggctaatagaggatt

SEQ ID NO: 4128 - RNA, 20 nt, synthetic construct
  misc_feature 1..20: note = antisense sequence
  source 1..20: mol_type = other RNA
tttggtggctaatagaggat

SEQ ID NO: 4129 - RNA, 20 nt, synthetic construct
  misc_feature 1..20: note = antisense sequence
  source 1..20: mol_type = other RNA
ctttggtggctaatagagga

SEQ ID NO: 4130 - RNA, 20 nt, synthetic construct
  misc_feature 1..20: note = antisense sequence
  source 1..20: mol_type = other RNA
tctctttggtggctaataga

SEQ ID NO: 4131 - RNA, 20 nt, synthetic construct
  misc_feature 1..20: note = antisense sequence
  source 1..20: mol_type = other RNA
ttctctttggtggctaatag

SEQ ID NO: 4132 - RNA, 20 nt, synthetic construct
  misc_feature 1..20: note = antisense sequence
  source 1..20: mol_type = other RNA
cttctctttggtggctaata

SEQ ID NO: 4133 - RNA, 20 nt, synthetic construct
  misc_feature 1..20: note = antisense sequence
  source 1..20: mol_type = other RNA
atcttctctttggtggctaa

SEQ ID NO: 4134 - RNA, 20 nt, synthetic construct
  misc_feature 1..20: note = antisense sequence
  source 1..20: mol_type = other RNA
tatcttctctttggtggcta

SEQ ID NO: 4135 - RNA, 20 nt, synthetic construct
  misc_feature 1..20: note = antisense sequence
  source 1..20: mol_type = other RNA
cagctcaattatccacctta

SEQ ID NO: 4136 - RNA, 20 nt, synthetic construct
  misc_feature 1..20: note = antisense sequence
  source 1..20: mol_type = other RNA
agcagctcaattatccacct

SEQ ID NO: 4137 - RNA, 20 nt, synthetic construct
  misc_feature 1..20: note = antisense sequence
  source 1..20: mol_type = other RNA
aagcagctcaattatccacc

SEQ ID NO: 4138 - RNA, 20 nt, synthetic construct
  misc_feature 1..20: note = antisense sequence
  source 1..20: mol_type = other RNA
gaagcagctcaattatccac

SEQ ID NO: 4139 - RNA, 20 nt, synthetic construct
  misc_feature 1..20: note = antisense sequence
  source 1..20: mol_type = other RNA
tccactggatgtagtaacaa

SEQ ID NO: 4140 - RNA, 20 nt, synthetic construct
  misc_feature 1..20: note = antisense sequence
  source 1..20: mol_type = other RNA
ttccactggatgtagtaaca

SEQ ID NO: 4141 - RNA, 20 nt, synthetic construct
  misc_feature 1..20: note = antisense sequence
  source 1..20: mol_type = other RNA
tttccactggatgtagtaac

SEQ ID NO: 4142 - RNA, 20 nt, synthetic construct
  misc_feature 1..20: note = antisense sequence
  source 1..20: mol_type = other RNA
gaatttccactggatgtagt

SEQ ID NO: 4143 - RNA, 20 nt, synthetic construct
  misc_feature 1..20: note = antisense sequence
  source 1..20: mol_type = other RNA
agaatttccactggatgtag

SEQ ID NO: 4144 - RNA, 20 nt, synthetic construct
  misc_feature 1..20: note = antisense sequence
  source 1..20: mol_type = other RNA
acagaatttccactggatgt

SEQ ID NO: 4145 - RNA, 20 nt, synthetic construct
  misc_feature 1..20: note = antisense sequence
  source 1..20: mol_type = other RNA
ggaggaataagagtaacaga

SEQ ID NO: 4146 - RNA, 20 nt, synthetic construct
  misc_feature 1..20: note = antisense sequence
  source 1..20: mol_type = other RNA
gggaggaataagagtaacag

SEQ ID NO: 4147 - RNA, 20 nt, synthetic construct
  misc_feature 1..20: note = antisense sequence
  source 1..20: mol_type = other RNA
agggaggaataagagtaaca

SEQ ID NO: 4148 - RNA, 20 nt, synthetic construct
  misc_feature 1..20: note = antisense sequence
  source 1..20: mol_type = other RNA
gaagggaggaataagagtaa

SEQ ID NO: 4149 - RNA, 20 nt, synthetic construct
  misc_feature 1..20: note = antisense sequence
  source 1..20: mol_type = other RNA
tgtagttcccaggagcagag

SEQ ID NO: 4150 - RNA, 20 nt, synthetic construct
  misc_feature 1..20: note = antisense sequence
  source 1..20: mol_type = other RNA
atctgtagttcccaggagca

SEQ ID NO: 4151 - RNA, 20 nt, synthetic construct
  misc_feature 1..20: note = antisense sequence
  source 1..20: mol_type = other RNA
agcggcatgttaataggaac

SEQ ID NO: 4152 - RNA, 20 nt, synthetic construct
  misc_feature 1..20: note = antisense sequence
  source 1..20: mol_type = other RNA
aagcggcatgttaataggaa

SEQ ID NO: 4153 - RNA, 20 nt, synthetic construct
  misc_feature 1..20: note = antisense sequence
  source 1..20: mol_type = other RNA
aaagcggcatgttaatagga

SEQ ID NO: 4154 - RNA, 20 nt, synthetic construct
  misc_feature 1..20: note = antisense sequence
  source 1..20: mol_type = other RNA
taaagcggcatgttaatagg

SEQ ID NO: 4155 - RNA, 20 nt, synthetic construct
  misc_feature 1..20: note = antisense sequence
  source 1..20: mol_type = other RNA
gggcctatactgatacatac

SEQ ID NO: 4156 - RNA, 20 nt, synthetic construct
  misc_feature 1..20: note = antisense sequence
  source 1..20: mol_type = other RNA
tgggcctatactgatacata

SEQ ID NO: 4157 - RNA, 20 nt, synthetic construct
  misc_feature 1..20: note = antisense sequence
  source 1..20: mol_type = other RNA
gatgggcctatactgataca

SEQ ID NO: 4158 - RNA, 20 nt, synthetic construct
  misc_feature 1..20: note = antisense sequence
  source 1..20: mol_type = other RNA
agatgggcctatactgatac

SEQ ID NO: 4159 - RNA, 20 nt, synthetic construct
  misc_feature 1..20: note = antisense sequence
  source 1..20: mol_type = other RNA
aagatgggcctatactgata

SEQ ID NO: 4160 - RNA, 20 nt, synthetic construct
  misc_feature 1..20: note = antisense sequence
  source 1..20: mol_type = other RNA
acaagatgggcctatactga

SEQ ID NO: 4161 - RNA, 20 nt, synthetic construct
  misc_feature 1..20: note = antisense sequence
  source 1..20: mol_type = other RNA
gcattaaaacaagatgggcc

SEQ ID NO: 4162 - RNA, 20 nt, synthetic construct
  misc_feature 1..20: note = antisense sequence
  source 1..20: mol_type = other RNA
gtgcattaaaacaagatggg

SEQ ID NO: 4163 - RNA, 20 nt, synthetic construct
  misc_feature 1..20: note = antisense sequence
  source 1..20: mol_type = other RNA
aagagtgggccacaaacctt

SEQ ID NO: 4164 - RNA, 20 nt, synthetic construct
  misc_feature 1..20: note = antisense sequence
  source 1..20: mol_type = other RNA
gaagagtgggccacaaacct

SEQ ID NO: 4165 - RNA, 20 nt, synthetic construct
  misc_feature 1..20: note = antisense sequence
  source 1..20: mol_type = other RNA
tgaagagtgggccacaaacc

SEQ ID NO: 4166 - RNA, 20 nt, synthetic construct
  misc_feature 1..20: note = antisense sequence
  source 1..20: mol_type = other RNA
agtgaagagtgggccacaaa

SEQ ID NO: 4167 - RNA, 20 nt, synthetic construct
  misc_feature 1..20: note = antisense sequence
  source 1..20: mol_type = other RNA
caagtgaagagtgggccaca

SEQ ID NO: 4168 - RNA, 20 nt, synthetic construct
  misc_feature 1..20: note = antisense sequence
  source 1..20: mol_type = other RNA
ttcaagtgaagagtgggcca

SEQ ID NO: 4169 - RNA, 20 nt, synthetic construct
  misc_feature 1..20: note = antisense sequence
  source 1..20: mol_type = other RNA
gttcaagtgaagagtgggcc

SEQ ID NO: 4170 - RNA, 20 nt, synthetic construct
  misc_feature 1..20: note = antisense sequence
  source 1..20: mol_type = other RNA
tgttcaagtgaagagtgggc

SEQ ID NO: 4171 - RNA, 20 nt, synthetic construct
  misc_feature 1..20: note = antisense sequence
  source 1..20: mol_type = other RNA
ttgttcaagtgaagagtggg

SEQ ID NO: 4172 - RNA, 20 nt, synthetic construct
  misc_feature 1..20: note = antisense sequence
  source 1..20: mol_type = other RNA
cttgttcaagtgaagagtgg

SEQ ID NO: 4173 - RNA, 20 nt, synthetic construct
  misc_feature 1..20: note = antisense sequence
  source 1..20: mol_type = other RNA
cacttgctgttacttgttca

SEQ ID NO: 4174 - RNA, 20 nt, synthetic construct
  misc_feature 1..20: note = antisense sequence
  source 1..20: mol_type = other RNA
gcacttgctgttacttgttc

SEQ ID NO: 4175 - RNA, 20 nt, synthetic construct
  misc_feature 1..20: note = antisense sequence
  source 1..20: mol_type = other RNA
gagcacttgctgttacttgt

SEQ ID NO: 4176 - RNA, 20 nt, synthetic construct
  misc_feature 1..20: note = antisense sequence
  source 1..20: mol_type = other RNA
tgagcacttgctgttacttg

SEQ ID NO: 4177 - RNA, 20 nt, synthetic construct
  misc_feature 1..20: note = antisense sequence
  source 1..20: mol_type = other RNA
aaatgagcacttgctgttac

SEQ ID NO: 4178 - RNA, 20 nt, synthetic construct
  misc_feature 1..20: note = antisense sequence
  source 1..20: mol_type = other RNA
agttcctggcaccactgatc

SEQ ID NO: 4179 - RNA, 20 nt, synthetic construct
  misc_feature 1..20: note = antisense sequence
  source 1..20: mol_type = other RNA
caggcaatagagaggcccaa

SEQ ID NO: 4180 - RNA, 20 nt, synthetic construct
  misc_feature 1..20: note = antisense sequence
  source 1..20: mol_type = other RNA
tcaggcaatagagaggccca

SEQ ID NO: 4181 - RNA, 20 nt, synthetic construct
  misc_feature 1..20: note = antisense sequence
  source 1..20: mol_type = other RNA
ctcaggcaatagagaggccc

SEQ ID NO: 4182 - RNA, 20 nt, synthetic construct
  misc_feature 1..20: note = antisense sequence
  source 1..20: mol_type = other RNA
caatacttttgtgcctcagg

SEQ ID NO: 4183 - RNA, 20 nt, synthetic construct
  misc_feature 1..20: note = antisense sequence
  source 1..20: mol_type = other RNA
tcaatacttttgtgcctcag

SEQ ID NO: 4184 - RNA, 20 nt, synthetic construct
  misc_feature 1..20: note = antisense sequence
  source 1..20: mol_type = other RNA
ccctgcctattttagactaa

SEQ ID NO: 4185 - RNA, 20 nt, synthetic construct
  misc_feature 1..20: note = antisense sequence
  source 1..20: mol_type = other RNA
gccctgcctattttagacta

SEQ ID NO: 4186 - RNA, 20 nt, synthetic construct
  misc_feature 1..20: note = antisense sequence
  source 1..20: mol_type = other RNA
ctgaccttgtgatctgcctg

SEQ ID NO: 4187 - RNA, 20 nt, synthetic construct
  misc_feature 1..20: note = antisense sequence
  source 1..20: mol_type = other RNA
cctgaccttgtgatctgcct

SEQ ID NO: 4188 - RNA, 20 nt, synthetic construct
  misc_feature 1..20: note = antisense sequence
  source 1..20: mol_type = other RNA
tcctgaccttgtgatctgcc

SEQ ID NO: 4189 - RNA, 20 nt, synthetic construct
  misc_feature 1..20: note = antisense sequence
  source 1..20: mol_type = other RNA
ctcctgaccttgtgatctgc

SEQ ID NO: 4190 - RNA, 20 nt, synthetic construct
  misc_feature 1..20: note = antisense sequence
  source 1..20: mol_type = other RNA
tctcctgaccttgtgatctg

SEQ ID NO: 4191 - RNA, 20 nt, synthetic construct
  misc_feature 1..20: note = antisense sequence
  source 1..20: mol_type = other RNA
atctcctgaccttgtgatct

SEQ ID NO: 4192 - RNA, 20 nt, synthetic construct
  misc_feature 1..20: note = antisense sequence
  source 1..20: mol_type = other RNA
cgatctcctgaccttgtgat

SEQ ID NO: 4193 - RNA, 20 nt, synthetic construct
  misc_feature 1..20: note = antisense sequence
  source 1..20: mol_type = other RNA
tcgatctcctgaccttgtga

SEQ ID NO: 4194 - RNA, 20 nt, synthetic construct
  misc_feature 1..20: note = antisense sequence
  source 1..20: mol_type = other RNA
ctcgatctcctgaccttgtg

SEQ ID NO: 4195 - RNA, 20 nt, synthetic construct
  misc_feature 1..20: note = antisense sequence
  source 1..20: mol_type = other RNA
tctcgatctcctgaccttgt

SEQ ID NO: 4196 - RNA, 20 nt, synthetic construct
  misc_feature 1..20: note = antisense sequence
  source 1..20: mol_type = other RNA
gtctcgatctcctgaccttg

SEQ ID NO: 4197 - RNA, 20 nt, synthetic construct
  misc_feature 1..20: note = antisense sequence
  source 1..20: mol_type = other RNA
aatggtctcgatctcctgac

SEQ ID NO: 4198 - RNA, 20 nt, synthetic construct
  misc_feature 1..20: note = antisense sequence
  source 1..20: mol_type = other RNA
gaatggtctcgatctcctga

SEQ ID NO: 4199 - RNA, 20 nt, synthetic construct
  misc_feature 1..20: note = antisense sequence
  source 1..20: mol_type = other RNA
agaatggtctcgatctcctg

SEQ ID NO: 4200 - RNA, 20 nt, synthetic construct
  misc_feature 1..20: note = antisense sequence
  source 1..20: mol_type = other RNA
cagaatggtctcgatctcct

SEQ ID NO: 4201 - RNA, 20 nt, synthetic construct
  misc_feature 1..20: note = antisense sequence
  source 1..20: mol_type = other RNA
ccagaatggtctcgatctcc

SEQ ID NO: 4202 - RNA, 20 nt, synthetic construct
  misc_feature 1..20: note = antisense sequence
  source 1..20: mol_type = other RNA
ggtttcaccatgttgaccag

SEQ ID NO: 4203 - RNA, 20 nt, synthetic construct
  misc_feature 1..20: note = antisense sequence
  source 1..20: mol_type = other RNA
gggtttcaccatgttgacca

SEQ ID NO: 4204 - RNA, 20 nt, synthetic construct
  misc_feature 1..20: note = antisense sequence
  source 1..20: mol_type = other RNA
attctcctgcctcagcctcc

SEQ ID NO: 4205 - RNA, 20 nt, synthetic construct
  misc_feature 1..20: note = antisense sequence
  source 1..20: mol_type = other RNA
gattctcctgcctcagcctc

SEQ ID NO: 4206 - RNA, 20 nt, synthetic construct
  misc_feature 1..20: note = antisense sequence
  source 1..20: mol_type = other RNA
cgattctcctgcctcagcct

SEQ ID NO: 4207 - RNA, 20 nt, synthetic construct
  misc_feature 1..20: note = antisense sequence
  source 1..20: mol_type = other RNA
agcgattctcctgcctcagc

SEQ ID NO: 4208 - RNA, 20 nt, synthetic construct
  misc_feature 1..20: note = antisense sequence
  source 1..20: mol_type = other RNA
aagcgattctcctgcctcag

SEQ ID NO: 4209 - RNA, 20 nt, synthetic construct
  misc_feature 1..20: note = antisense sequence
  source 1..20: mol_type = other RNA
caagcgattctcctgcctca

SEQ ID NO: 4210 - RNA, 20 nt, synthetic construct
  misc_feature 1..20: note = antisense sequence
  source 1..20: mol_type = other RNA
tcaagcgattctcctgcctc

SEQ ID NO: 4211 - RNA, 20 nt, synthetic construct
  misc_feature 1..20: note = antisense sequence
  source 1..20: mol_type = other RNA
ttcaagcgattctcctgcct

SEQ ID NO: 4212 - RNA, 20 nt, synthetic construct
  misc_feature 1..20: note = antisense sequence
  source 1..20: mol_type = other RNA
gttcaagcgattctcctgcc

SEQ ID NO: 4213 - RNA, 20 nt, synthetic construct
  misc_feature 1..20: note = antisense sequence
  source 1..20: mol_type = other RNA
ggttcaagcgattctcctgc

SEQ ID NO: 4214 - RNA, 20 nt, synthetic construct
  misc_feature 1..20: note = antisense sequence
  source 1..20: mol_type = other RNA
tggttcaagcgattctcctg

SEQ ID NO: 4215 - RNA, 20 nt, synthetic construct
  misc_feature 1..20: note = antisense sequence
  source 1..20: mol_type = other RNA
ctggttcaagcgattctcct

SEQ ID NO: 4216 - RNA, 20 nt, synthetic construct
  misc_feature 1..20: note = antisense sequence
  source 1..20: mol_type = other RNA
cctggttcaagcgattctcc

SEQ ID NO: 4217 - RNA, 20 nt, synthetic construct
  misc_feature 1..20: note = antisense sequence
  source 1..20: mol_type = other RNA
ccctggttcaagcgattctc

SEQ ID NO: 4218 - RNA, 20 nt, synthetic construct
  misc_feature 1..20: note = antisense sequence
  source 1..20: mol_type = other RNA
tccctggttcaagcgattct

SEQ ID NO: 4219 - RNA, 20 nt, synthetic construct
  misc_feature 1..20: note = antisense sequence
  source 1..20: mol_type = other RNA
aggctggagtgcagtagcat

SEQ ID NO: 4220 - RNA, 20 nt, synthetic construct
  misc_feature 1..20: note = antisense sequence
  source 1..20: mol_type = other RNA
caggctggagtgcagtagca

SEQ ID NO: 4221 - RNA, 20 nt, synthetic construct
  misc_feature 1..20: note = antisense sequence
  source 1..20: mol_type = other RNA
acccaggctggagtgcagta

SEQ ID NO: 4222 - RNA, 20 nt, synthetic construct
  misc_feature 1..20: note = antisense sequence
  source 1..20: mol_type = other RNA
tacccaggctggagtgcagt

SEQ ID NO: 4223 - RNA, 20 nt, synthetic construct
  misc_feature 1..20: note = antisense sequence
  source 1..20: mol_type = other RNA
ttacccaggctggagtgcag

SEQ ID NO: 4224 - RNA, 20 nt, synthetic construct
  misc_feature 1..20: note = antisense sequence
  source 1..20: mol_type = other RNA
gttacccaggctggagtgca

SEQ ID NO: 4225 - RNA, 20 nt, synthetic construct
  misc_feature 1..20: note = antisense sequence
  source 1..20: mol_type = other RNA
tgttacccaggctggagtgc

SEQ ID NO: 4226 - RNA, 20 nt, synthetic construct
  misc_feature 1..20: note = antisense sequence
  source 1..20: mol_type = other RNA
ctgttacccaggctggagtg

SEQ ID NO: 4227 - RNA, 20 nt, synthetic construct
  misc_feature 1..20: note = antisense sequence
  source 1..20: mol_type = other RNA
agatgtgtgacttcctttca

SEQ ID NO: 4228 - RNA, 20 nt, synthetic construct
  misc_feature 1..20: note = antisense sequence
  source 1..20: mol_type = other RNA
gagatgtgtgacttcctttc

SEQ ID NO: 4229 - RNA, 20 nt, synthetic construct
  misc_feature 1..20: note = antisense sequence
  source 1..20: mol_type = other RNA
taagcgcagtcatttctagc

SEQ ID NO: 4230 - RNA, 20 nt, synthetic construct
  misc_feature 1..20: note = antisense sequence
  source 1..20: mol_type = other RNA
ctaagcgcagtcatttctag

SEQ ID NO: 4231 - RNA, 20 nt, synthetic construct
  misc_feature 1..20: note = antisense sequence
  source 1..20: mol_type = other RNA
actaagcgcagtcatttcta

SEQ ID NO: 4232 - RNA, 20 nt, synthetic construct
  misc_feature 1..20: note = antisense sequence
  source 1..20: mol_type = other RNA
cactaagcgcagtcatttct

SEQ ID NO: 4233 - RNA, 20 nt, synthetic construct
  misc_feature 1..20: note = antisense sequence
  source 1..20: mol_type = other RNA
tcactaagcgcagtcatttc

SEQ ID NO: 4234 - RNA, 20 nt, synthetic construct
  misc_feature 1..20: note = antisense sequence
  source 1..20: mol_type = other RNA
ctcactaagcgcagtcattt

SEQ ID NO: 4235 - RNA, 20 nt, synthetic construct
  misc_feature 1..20: note = antisense sequence
  source 1..20: mol_type = other RNA
cctcactaagcgcagtcatt

SEQ ID NO: 4236 - RNA, 20 nt, synthetic construct
  misc_feature 1..20: note = antisense sequence
  source 1..20: mol_type = other RNA
tcctcactaagcgcagtcat

SEQ ID NO: 4237 - RNA, 20 nt, synthetic construct
  misc_feature 1..20: note = antisense sequence
  source 1..20: mol_type = other RNA
ttcctcactaagcgcagtca

SEQ ID NO: 4238 - RNA, 20 nt, synthetic construct
  misc_feature 1..20: note = antisense sequence
  source 1..20: mol_type = other RNA
tttcctcactaagcgcagtc

SEQ ID NO: 4239 - RNA, 20 nt, synthetic construct
  misc_feature 1..20: note = antisense sequence
  source 1..20: mol_type = other RNA
ctttcctcactaagcgcagt

SEQ ID NO: 4240 - RNA, 20 nt, synthetic construct
  misc_feature 1..20: note = antisense sequence
  source 1..20: mol_type = other RNA
gctaactggaccaagaggcc

SEQ ID NO: 4241 - RNA, 20 nt, synthetic construct
  misc_feature 1..20: note = antisense sequence
  source 1..20: mol_type = other RNA
cagctaactggaccaagagg

SEQ ID NO: 4242 - RNA, 20 nt, synthetic construct
  misc_feature 1..20: note = antisense sequence
  source 1..20: mol_type = other RNA
tcagctaactggaccaagag

SEQ ID NO: 4243 - RNA, 20 nt, synthetic construct
  misc_feature 1..20: note = antisense sequence
  source 1..20: mol_type = other RNA
tgactcagctaactggacca

SEQ ID NO: 4244 - RNA, 20 nt, synthetic construct
  misc_feature 1..20: note = antisense sequence
  source 1..20: mol_type = other RNA
tttgaccttcccagaccact

SEQ ID NO: 4245 - RNA, 20 nt, synthetic construct
  misc_feature 1..20: note = antisense sequence
  source 1..20: mol_type = other RNA
tagtttgaccttcccagacc

SEQ ID NO: 4246 - RNA, 20 nt, synthetic construct
  misc_feature 1..20: note = antisense sequence
  source 1..20: mol_type = other RNA
gtgactgttgtggctagttt

SEQ ID NO: 4247 - RNA, 20 nt, synthetic construct
  misc_feature 1..20: note = antisense sequence
  source 1..20: mol_type = other RNA
agtgactgttgtggctagtt

SEQ ID NO: 4248 - RNA, 20 nt, synthetic construct
  misc_feature 1..20: note = antisense sequence
  source 1..20: mol_type = other RNA
aagtgactgttgtggctagt

SEQ ID NO: 4249 - RNA, 20 nt, synthetic construct
  misc_feature 1..20: note = antisense sequence
  source 1..20: mol_type = other RNA
taagtgactgttgtggctag

SEQ ID NO: 4250 - RNA, 20 nt, synthetic construct
  misc_feature 1..20: note = antisense sequence
  source 1..20: mol_type = other RNA
ttaagtgactgttgtggcta

SEQ ID NO: 4251 - RNA, 20 nt, synthetic construct
  misc_feature 1..20: note = antisense sequence
  source 1..20: mol_type = other RNA
ttgcactagaaggctgtttc

SEQ ID NO: 4252 - RNA, 20 nt, synthetic construct
  misc_feature 1..20: note = antisense sequence
  source 1..20: mol_type = other RNA
tggcaccttcttgcactaga

SEQ ID NO: 4253 - RNA, 20 nt, synthetic construct
  misc_feature 1..20: note = antisense sequence
  source 1..20: mol_type = other RNA
tccagactgacttctctcta

SEQ ID NO: 4254 - RNA, 20 nt, synthetic construct
  misc_feature 1..20: note = antisense sequence
  source 1..20: mol_type = other RNA
aatccagactgacttctctc

SEQ ID NO: 4255 - RNA, 20 nt, synthetic construct
  misc_feature 1..20: note = antisense sequence
  source 1..20: mol_type = other RNA
taagaagagttagcctgtcc

SEQ ID NO: 4256 - RNA, 20 nt, synthetic construct
  misc_feature 1..20: note = antisense sequence
  source 1..20: mol_type = other RNA
gcttcaccttaaagttacca

SEQ ID NO: 4257 - RNA, 20 nt, synthetic construct
  misc_feature 1..20: note = antisense sequence
  source 1..20: mol_type = other RNA
gagtgtaggtagatttagca

SEQ ID NO: 4258 - RNA, 20 nt, synthetic construct
  misc_feature 1..20: note = antisense sequence
  source 1..20: mol_type = other RNA
agagtgtaggtagatttagc

SEQ ID NO: 4259 - RNA, 20 nt, synthetic construct
  misc_feature 1..20: note = antisense sequence
  source 1..20: mol_type = other RNA
gtatatcaccaatgagcagt

SEQ ID NO: 4260 - RNA, 20 nt, synthetic construct
  misc_feature 1..20: note = antisense sequence
  source 1..20: mol_type = other RNA
ggtatatcaccaatgagcag

SEQ ID NO: 4261 - RNA, 20 nt, synthetic construct
  misc_feature 1..20: note = antisense sequence
  source 1..20: mol_type = other RNA
gggtatatcaccaatgagca

SEQ ID NO: 4262 - RNA, 20 nt, synthetic construct
  misc_feature 1..20: note = antisense sequence
  source 1..20: mol_type = other RNA
tgggtatatcaccaatgagc

SEQ ID NO: 4263 - RNA, 20 nt, synthetic construct
  misc_feature 1..20: note = antisense sequence
  source 1..20: mol_type = other RNA
tgactgggtatatcaccaat

SEQ ID NO: 4264 - RNA, 20 nt, synthetic construct
  misc_feature 1..20: note = antisense sequence
  source 1..20: mol_type = other RNA
ttgggtgactgggtatatca

SEQ ID NO: 4265 - RNA, 20 nt, synthetic construct
  misc_feature 1..20: note = antisense sequence
  source 1..20: mol_type = other RNA
cttgggtgactgggtatatc

SEQ ID NO: 4266 - RNA, 20 nt, synthetic construct
  misc_feature 1..20: note = antisense sequence
  source 1..20: mol_type = other RNA
gggtacagaatgaatcttgt

SEQ ID NO: 4267 - RNA, 20 nt, synthetic construct
  misc_feature 1..20: note = antisense sequence
  source 1..20: mol_type = other RNA
gatgggtacagaatgaatct

SEQ ID NO: 4268 - RNA, 20 nt, synthetic construct
  misc_feature 1..20: note = antisense sequence
  source 1..20: mol_type = other RNA
agatgggtacagaatgaatc

SEQ ID NO: 4269 - RNA, 20 nt, synthetic construct
  misc_feature 1..20: note = antisense sequence
  source 1..20: mol_type = other RNA
gatagatgggtacagaatga

SEQ ID NO: 4270 - RNA, 20 nt, synthetic construct
  misc_feature 1..20: note = antisense sequence
  source 1..20: mol_type = other RNA
tgatagatgggtacagaatg

SEQ ID NO: 4271 - RNA, 20 nt, synthetic construct
  misc_feature 1..20: note = antisense sequence
  source 1..20: mol_type = other RNA
cctcctcccataaaccaaaa

SEQ ID NO: 4272 - RNA, 20 nt, synthetic construct
  misc_feature 1..20: note = antisense sequence
  source 1..20: mol_type = other RNA
tgagggttggaaatcagttt

SEQ ID NO: 4273 - RNA, 20 nt, synthetic construct
  misc_feature 1..20: note = antisense sequence
  source 1..20: mol_type = other RNA
atgagggttggaaatcagtt

SEQ ID NO: 4274 - RNA, 20 nt, synthetic construct
  misc_feature 1..20: note = antisense sequence
  source 1..20: mol_type = other RNA
catgagggttggaaatcagt

SEQ ID NO: 4275 - RNA, 20 nt, synthetic construct
  misc_feature 1..20: note = antisense sequence
  source 1..20: mol_type = other RNA
gttactatctccactgaagt

SEQ ID NO: 4276 - RNA, 20 nt, synthetic construct
  misc_feature 1..20: note = antisense sequence
  source 1..20: mol_type = other RNA
tcacccatgagaaacaactc

SEQ ID NO: 4277 - RNA, 20 nt, synthetic construct
  misc_feature 1..20: note = antisense sequence
  source 1..20: mol_type = other RNA
ctttctctactcacccatga

SEQ ID NO: 4278 - RNA, 20 nt, synthetic construct
  misc_feature 1..20: note = antisense sequence
  source 1..20: mol_type = other RNA
caccactttctctactcacc

SEQ ID NO: 4279 - RNA, 20 nt, synthetic construct
  misc_feature 1..20: note = antisense sequence
  source 1..20: mol_type = other RNA
agacaccactttctctactc

SEQ ID NO: 4280 - RNA, 20 nt, synthetic construct
  misc_feature 1..20: note = antisense sequence
  source 1..20: mol_type = other RNA
caggagttgatttcaggaat

SEQ ID NO: 4281 - RNA, 20 nt, synthetic construct
  misc_feature 1..20: note = antisense sequence
  source 1..20: mol_type = other RNA
accaggagttgatttcagga

SEQ ID NO: 4282 - RNA, 20 nt, synthetic construct
  misc_feature 1..20: note = antisense sequence
  source 1..20: mol_type = other RNA
cctgacattgctttatcgtc

SEQ ID NO: 4283 - RNA, 20 nt, synthetic construct
  misc_feature 1..20: note = antisense sequence
  source 1..20: mol_type = other RNA
tcctgacattgctttatcgt

SEQ ID NO: 4284 - RNA, 20 nt, synthetic construct
  misc_feature 1..20: note = antisense sequence
  source 1..20: mol_type = other RNA
atcctgacattgctttatcg

SEQ ID NO: 4285 - RNA, 20 nt, synthetic construct
  misc_feature 1..20: note = antisense sequence
  source 1..20: mol_type = other RNA
ctcaaatcctgacattgctt

SEQ ID NO: 4286 - RNA, 20 nt, synthetic construct
  misc_feature 1..20: note = antisense sequence
  source 1..20: mol_type = other RNA
agagtcaatcctcaaatcct

SEQ ID NO: 4287 - RNA, 20 nt, synthetic construct
  misc_feature 1..20: note = antisense sequence
  source 1..20: mol_type = other RNA
agtggctctggcaatttctc

SEQ ID NO: 4288 - RNA, 20 nt, synthetic construct
  misc_feature 1..20: note = antisense sequence
  source 1..20: mol_type = other RNA
gatggttgctgactgggcag

SEQ ID NO: 4289 - RNA, 20 nt, synthetic construct
  misc_feature 1..20: note = antisense sequence
  source 1..20: mol_type = other RNA
ggtgatggttgctgactggg

SEQ ID NO: 4290 - RNA, 20 nt, synthetic construct
  misc_feature 1..20: note = antisense sequence
  source 1..20: mol_type = other RNA
ggcacatcacagagatactg

SEQ ID NO: 4291 - RNA, 20 nt, synthetic construct
  misc_feature 1..20: note = antisense sequence
  source 1..20: mol_type = other RNA
aggcacatcacagagatact

SEQ ID NO: 4292 - RNA, 20 nt, synthetic construct
  misc_feature 1..20: note = antisense sequence
  source 1..20: mol_type = other RNA
caggcacatcacagagatac

SEQ ID NO: 4293 - RNA, 20 nt, synthetic construct
  misc_feature 1..20: note = antisense sequence
  source 1..20: mol_type = other RNA
aagtacaggcacatcacaga

SEQ ID NO: 4294 - RNA, 20 nt, synthetic construct
  misc_feature 1..20: note = antisense sequence
  source 1..20: mol_type = other RNA
gaagtacaggcacatcacag

SEQ ID NO: 4295 - RNA, 20 nt, synthetic construct
  misc_feature 1..20: note = antisense sequence
  source 1..20: mol_type = other RNA
aatgaagtacaggcacatca

SEQ ID NO: 4296 - RNA, 20 nt, synthetic construct
  misc_feature 1..20: note = antisense sequence
  source 1..20: mol_type = other RNA
gaatgaagtacaggcacatc

SEQ ID NO: 4297 - RNA, 20 nt, synthetic construct
  misc_feature 1..20: note = antisense sequence
  source 1..20: mol_type = other RNA
ggaatgaagtacaggcacat

SEQ ID NO: 4298 - RNA, 20 nt, synthetic construct
  misc_feature 1..20: note = antisense sequence
  source 1..20: mol_type = other RNA
aggaatgaagtacaggcaca

SEQ ID NO: 4299 - RNA, 20 nt, synthetic construct
  misc_feature 1..20: note = antisense sequence
  source 1..20: mol_type = other RNA
gtccatcaactgctaaatag

SEQ ID NO: 4300 - RNA, 20 nt, synthetic construct
  misc_feature 1..20: note = antisense sequence
  source 1..20: mol_type = other RNA
ccctacaagtcaacaattct

SEQ ID NO: 4301 - RNA, 20 nt, synthetic construct
  misc_feature 1..20: note = antisense sequence
  source 1..20: mol_type = other RNA
gccctacaagtcaacaattc

SEQ ID NO: 4302 - RNA, 20 nt, synthetic construct
  misc_feature 1..20: note = antisense sequence
  source 1..20: mol_type = other RNA
tgccctacaagtcaacaatt

SEQ ID NO: 4303 - RNA, 20 nt, synthetic construct
  misc_feature 1..20: note = antisense sequence
  source 1..20: mol_type = other RNA
ttgccctacaagtcaacaat

SEQ ID NO: 4304 - RNA, 20 nt, synthetic construct
  misc_feature 1..20: note = antisense sequence
  source 1..20: mol_type = other RNA
agagttgccctacaagtcaa

SEQ ID NO: 4305 - RNA, 20 nt, synthetic construct
  misc_feature 1..20: note = antisense sequence
  source 1..20: mol_type = other RNA
acatagagttgccctacaag

SEQ ID NO: 4306 - RNA, 20 nt, synthetic construct
  misc_feature 1..20: note = antisense sequence
  source 1..20: mol_type = other RNA
acacatagagttgccctaca

SEQ ID NO: 4307 - RNA, 20 nt, synthetic construct
  misc_feature 1..20: note = antisense sequence
  source 1..20: mol_type = other RNA
tacacatagagttgccctac

SEQ ID NO: 4308 - RNA, 20 nt, synthetic construct
  misc_feature 1..20: note = antisense sequence
  source 1..20: mol_type = other RNA
ttacacatagagttgcccta

SEQ ID NO: 4309 - RNA, 20 nt, synthetic construct
  misc_feature 1..20: note = antisense sequence
  source 1..20: mol_type = other RNA
gttacacatagagttgccct

SEQ ID NO: 4310 - RNA, 20 nt, synthetic construct
  misc_feature 1..20: note = antisense sequence
  source 1..20: mol_type = other RNA
gtggtaatgttgctatggaa

SEQ ID NO: 4311 - RNA, 20 nt, synthetic construct
  misc_feature 1..20: note = antisense sequence
  source 1..20: mol_type = other RNA
agtggtaatgttgctatgga

SEQ ID NO: 4312 - RNA, 20 nt, synthetic construct
  misc_feature 1..20: note = antisense sequence
  source 1..20: mol_type = other RNA
aagtggtaatgttgctatgg

SEQ ID NO: 4313 - RNA, 20 nt, synthetic construct
  misc_feature 1..20: note = antisense sequence
  source 1..20: mol_type = other RNA
ggatgtgtagtaattggaac

SEQ ID NO: 4314 - RNA, 20 nt, synthetic construct
  misc_feature 1..20: note = antisense sequence
  source 1..20: mol_type = other RNA
aaggattgacaaggatgtgt

SEQ ID NO: 4315 - RNA, 20 nt, synthetic construct
  misc_feature 1..20: note = antisense sequence
  source 1..20: mol_type = other RNA
taaggattgacaaggatgtg

SEQ ID NO: 4316 - RNA, 20 nt, synthetic construct
  misc_feature 1..20: note = antisense sequence
  source 1..20: mol_type = other RNA
cttcacagccagtagaatgg

SEQ ID NO: 4317 - RNA, 20 nt, synthetic construct
  misc_feature 1..20: note = antisense sequence
  source 1..20: mol_type = other RNA
acttcacagccagtagaatg

SEQ ID NO: 4318 - RNA, 20 nt, synthetic construct
  misc_feature 1..20: note = antisense sequence
  source 1..20: mol_type = other RNA
cacttcacagccagtagaat

SEQ ID NO: 4319 - RNA, 20 nt, synthetic construct
  misc_feature 1..20: note = antisense sequence
  source 1..20: mol_type = other RNA
atcacttcacagccagtaga

SEQ ID NO: 4320 - RNA, 20 nt, synthetic construct
  misc_feature 1..20: note = antisense sequence
  source 1..20: mol_type = other RNA
tatcacttcacagccagtag

SEQ ID NO: 4321 - RNA, 20 nt, synthetic construct
  misc_feature 1..20: note = antisense sequence
  source 1..20: mol_type = other RNA
atatcacttcacagccagta

SEQ ID NO: 4322 - RNA, 20 nt, synthetic construct
  misc_feature 1..20: note = antisense sequence
  source 1..20: mol_type = other RNA
aactaaagtcctcttgagtc

SEQ ID NO: 4323 - RNA, 20 nt, synthetic construct
  misc_feature 1..20: note = antisense sequence
  source 1..20: mol_type = other RNA
caactaaagtcctcttgagt

SEQ ID NO: 4324 - RNA, 20 nt, synthetic construct
  misc_feature 1..20: note = antisense sequence
  source 1..20: mol_type = other RNA
tgcaactaaagtcctcttga

SEQ ID NO: 4325 - RNA, 20 nt, synthetic construct
  misc_feature 1..20: note = antisense sequence
  source 1..20: mol_type = other RNA
atgcaactaaagtcctcttg

SEQ ID NO: 4326 - RNA, 20 nt, synthetic construct
  misc_feature 1..20: note = antisense sequence
  source 1..20: mol_type = other RNA
catgcaactaaagtcctctt

SEQ ID NO: 4327 - RNA, 20 nt, synthetic construct
  misc_feature 1..20: note = antisense sequence
  source 1..20: mol_type = other RNA
ccatgcaactaaagtcctct

SEQ ID NO: 4328 - RNA, 20 nt, synthetic construct
  misc_feature 1..20: note = antisense sequence
  source 1..20: mol_type = other RNA
cccatgcaactaaagtcctc

SEQ ID NO: 4329 - RNA, 20 nt, synthetic construct
  misc_feature 1..20: note = antisense sequence
  source 1..20: mol_type = other RNA
tcccatgcaactaaagtcct

SEQ ID NO: 4330 - RNA, 20 nt, synthetic construct
  misc_feature 1..20: note = antisense sequence
  source 1..20: mol_type = other RNA
ttcccatgcaactaaagtcc

SEQ ID NO: 4331 - RNA, 20 nt, synthetic construct
  misc_feature 1..20: note = antisense sequence
  source 1..20: mol_type = other RNA
tttcccatgcaactaaagtc

SEQ ID NO: 4332 - RNA, 20 nt, synthetic construct
  misc_feature 1..20: note = antisense sequence
  source 1..20: mol_type = other RNA
atcacccagacctagaatat

SEQ ID NO: 4333 - RNA, 20 nt, synthetic construct
  misc_feature 1..20: note = antisense sequence
  source 1..20: mol_type = other RNA
accatcacccagacctagaa

SEQ ID NO: 4334 - RNA, 20 nt, synthetic construct
  misc_feature 1..20: note = antisense sequence
  source 1..20: mol_type = other RNA
aaccatcacccagacctaga

SEQ ID NO: 4335 - RNA, 20 nt, synthetic construct
  misc_feature 1..20: note = antisense sequence
  source 1..20: mol_type = other RNA
gaaaccatcacccagaccta

SEQ ID NO: 4336 - RNA, 20 nt, synthetic construct
  misc_feature 1..20: note = antisense sequence
  source 1..20: mol_type = other RNA
tgaaaccatcacccagacct

SEQ ID NO: 4337 - RNA, 20 nt, synthetic construct
  misc_feature 1..20: note = antisense sequence
  source 1..20: mol_type = other RNA
catgaaaccatcacccagac

SEQ ID NO: 4338 - RNA, 20 nt, synthetic construct
  misc_feature 1..20: note = antisense sequence
  source 1..20: mol_type = other RNA
gaaaggaaacacatgctcat

SEQ ID NO: 4339 - RNA, 20 nt, synthetic construct
  misc_feature 1..20: note = antisense sequence
  source 1..20: mol_type = other RNA
aagaaaggaaacacatgctc

SEQ ID NO: 4340 - RNA, 20 nt, synthetic construct
  misc_feature 1..20: note = antisense sequence
  source 1..20: mol_type = other RNA
tttggtacagtagctctagg

SEQ ID NO: 4341 - RNA, 20 nt, synthetic construct
  misc_feature 1..20: note = antisense sequence
  source 1..20: mol_type = other RNA
atttggtacagtagctctag

SEQ ID NO: 4342 - RNA, 20 nt, synthetic construct
  misc_feature 1..20: note = antisense sequence
  source 1..20: mol_type = other RNA
ctaatttggtacagtagctc

SEQ ID NO: 4343 - RNA, 20 nt, synthetic construct
  misc_feature 1..20: note = antisense sequence
  source 1..20: mol_type = other RNA
agaaggagtatggctctgcc

SEQ ID NO: 4344 - RNA, 20 nt, synthetic construct
  misc_feature 1..20: note = antisense sequence
  source 1..20: mol_type = other RNA
ttcagaaggagtatggctct

SEQ ID NO: 4345 - RNA, 20 nt, synthetic construct
  misc_feature 1..20: note = antisense sequence
  source 1..20: mol_type = other RNA
atagaggcttcagaaggagt

SEQ ID NO: 4346 - RNA, 20 nt, synthetic construct
  misc_feature 1..20: note = antisense sequence
  source 1..20: mol_type = other RNA
tcccatagaggcttcagaag

SEQ ID NO: 4347 - RNA, 20 nt, synthetic construct
  misc_feature 1..20: note = antisense sequence
  source 1..20: mol_type = other RNA
ctcccatagaggcttcagaa

SEQ ID NO: 4348 - RNA, 20 nt, synthetic construct
  misc_feature 1..20: note = antisense sequence
  source 1..20: mol_type = other RNA
tgattctcccatagaggctt

SEQ ID NO: 4349 - RNA, 20 nt, synthetic construct
  misc_feature 1..20: note = antisense sequence
  source 1..20: mol_type = other RNA
atgattctcccatagaggct

SEQ ID NO: 4350 - RNA, 20 nt, synthetic construct
  misc_feature 1..20: note = antisense sequence
  source 1..20: mol_type = other RNA
aatgattctcccatagaggc

SEQ ID NO: 4351 - RNA, 20 nt, synthetic construct
  misc_feature 1..20: note = antisense sequence
  source 1..20: mol_type = other RNA
ggaatgattctcccatagag

SEQ ID NO: 4352 - RNA, 20 nt, synthetic construct
  misc_feature 1..20: note = antisense sequence
  source 1..20: mol_type = other RNA
ggaaaaggcagggaatgatt

SEQ ID NO: 4353 - RNA, 20 nt, synthetic construct
  misc_feature 1..20: note = antisense sequence
  source 1..20: mol_type = other RNA
aggaaccatcagaaactgga

SEQ ID NO: 4354 - RNA, 20 nt, synthetic construct
  misc_feature 1..20: note = antisense sequence
  source 1..20: mol_type = other RNA
taaggattgccaggaaccat

SEQ ID NO: 4355 - RNA, 20 nt, synthetic construct
  misc_feature 1..20: note = antisense sequence
  source 1..20: mol_type = other RNA
tgctaaggattgccaggaac

SEQ ID NO: 4356 - RNA, 20 nt, synthetic construct
  misc_feature 1..20: note = antisense sequence
  source 1..20: mol_type = other RNA
gccatgcaatgctaaggatt

SEQ ID NO: 4357 - RNA, 20 nt, synthetic construct
  misc_feature 1..20: note = antisense sequence
  source 1..20: mol_type = other RNA
agccatgcaatgctaaggat

SEQ ID NO: 4358 - RNA, 20 nt, synthetic construct
  misc_feature 1..20: note = antisense sequence
  source 1..20: mol_type = other RNA
aagccatgcaatgctaagga

SEQ ID NO: 4359 - RNA, 20 nt, synthetic construct
  misc_feature 1..20: note = antisense sequence
  source 1..20: mol_type = other RNA
gaagccatgcaatgctaagg

SEQ ID NO: 4360 - RNA, 20 nt, synthetic construct
  misc_feature 1..20: note = antisense sequence
  source 1..20: mol_type = other RNA
agaagccatgcaatgctaag

SEQ ID NO: 4361 - RNA, 20 nt, synthetic construct
  misc_feature 1..20: note = antisense sequence
  source 1..20: mol_type = other RNA
gtgtcaagaagccatgcaat

SEQ ID NO: 4362 - RNA, 20 nt, synthetic construct
  misc_feature 1..20: note = antisense sequence
  source 1..20: mol_type = other RNA
agtgtcaagaagccatgcaa

SEQ ID NO: 4363 - RNA, 20 nt, synthetic construct
  misc_feature 1..20: note = antisense sequence
  source 1..20: mol_type = other RNA
aagtgtcaagaagccatgca

SEQ ID NO: 4364 - RNA, 20 nt, synthetic construct
  misc_feature 1..20: note = antisense sequence
  source 1..20: mol_type = other RNA
caagtgtcaagaagccatgc

SEQ ID NO: 4365 - RNA, 20 nt, synthetic construct
  misc_feature 1..20: note = antisense sequence
  source 1..20: mol_type = other RNA
tcaagtgtcaagaagccatg

SEQ ID NO: 4366 - RNA, 20 nt, synthetic construct
  misc_feature 1..20: note = antisense sequence
  source 1..20: mol_type = other RNA
atcaagtgtcaagaagccat

SEQ ID NO: 4367 - RNA, 20 nt, synthetic construct
  misc_feature 1..20: note = antisense sequence
  source 1..20: mol_type = other RNA
tatcaagtgtcaagaagcca

SEQ ID NO: 4368 - RNA, 20 nt, synthetic construct
  misc_feature 1..20: note = antisense sequence
  source 1..20: mol_type = other RNA
acatgagggagaaagaagac

SEQ ID NO: 4369 - RNA, 20 nt, synthetic construct
  misc_feature 1..20: note = antisense sequence
  source 1..20: mol_type = other RNA
ttatagtgggctgaattgtg

SEQ ID NO: 4370 - RNA, 20 nt, synthetic construct
  misc_feature 1..20: note = antisense sequence
  source 1..20: mol_type = other RNA
cattatagtgggctgaattg

SEQ ID NO: 4371 - RNA, 20 nt, synthetic construct
  misc_feature 1..20: note = antisense sequence
  source 1..20: mol_type = other RNA
tgttcattatagtgggctga

SEQ ID NO: 4372 - RNA, 20 nt, synthetic construct
  misc_feature 1..20: note = antisense sequence
  source 1..20: mol_type = other RNA
atgttcattatagtgggctg

SEQ ID NO: 4373 - RNA, 20 nt, synthetic construct
  misc_feature 1..20: note = antisense sequence
  source 1..20: mol_type = other RNA
ccacatctgaccagtaaaat

SEQ ID NO: 4374 - RNA, 20 nt, synthetic construct
  misc_feature 1..20: note = antisense sequence
  source 1..20: mol_type = other RNA
accacatctgaccagtaaaa

SEQ ID NO: 4375 - RNA, 20 nt, synthetic construct
  misc_feature 1..20: note = antisense sequence
  source 1..20: mol_type = other RNA
agtgctgggattataggcat

SEQ ID NO: 4376 - RNA, 20 nt, synthetic construct
  misc_feature 1..20: note = antisense sequence
  source 1..20: mol_type = other RNA
aagtgctgggattataggca

SEQ ID NO: 4377 - RNA, 20 nt, synthetic construct
  misc_feature 1..20: note = antisense sequence
  source 1..20: mol_type = other RNA
aaagtgctgggattataggc

SEQ ID NO: 4378 - RNA, 20 nt, synthetic construct
  misc_feature 1..20: note = antisense sequence
  source 1..20: mol_type = other RNA
caaagtgctgggattatagg

SEQ ID NO: 4379 - RNA, 20 nt, synthetic construct
  misc_feature 1..20: note = antisense sequence
  source 1..20: mol_type = other RNA
tcatcttgaactcctggcct

SEQ ID NO: 4380 - RNA, 20 nt, synthetic construct
  misc_feature 1..20: note = antisense sequence
  source 1..20: mol_type = other RNA
ctcatcttgaactcctggcc

SEQ ID NO: 4381 - RNA, 20 nt, synthetic construct
  misc_feature 1..20: note = antisense sequence
  source 1..20: mol_type = other RNA
actcatcttgaactcctggc

SEQ ID NO: 4382 - RNA, 20 nt, synthetic construct
  misc_feature 1..20: note = antisense sequence
  source 1..20: mol_type = other RNA
aactcatcttgaactcctgg

SEQ ID NO: 4383 - RNA, 20 nt, synthetic construct
  misc_feature 1..20: note = antisense sequence
  source 1..20: mol_type = other RNA
caaactcatcttgaactcct

SEQ ID NO: 4384 - RNA, 20 nt, synthetic construct
  misc_feature 1..20: note = antisense sequence
  source 1..20: mol_type = other RNA
tgaccaaactcatcttgaac

SEQ ID NO: 4385 - RNA, 20 nt, synthetic construct
  misc_feature 1..20: note = antisense sequence
  source 1..20: mol_type = other RNA
gttgaccaaactcatcttga

SEQ ID NO: 4386 - RNA, 20 nt, synthetic construct
  misc_feature 1..20: note = antisense sequence
  source 1..20: mol_type = other RNA
ctatgttgaccaaactcatc

SEQ ID NO: 4387 - RNA, 20 nt, synthetic construct
  misc_feature 1..20: note = antisense sequence
  source 1..20: mol_type = other RNA
ggtttcactatgttgaccaa

SEQ ID NO: 4388 - RNA, 20 nt, synthetic construct
  misc_feature 1..20: note = antisense sequence
  source 1..20: mol_type = other RNA
aggtttcactatgttgacca

SEQ ID NO: 4389 - RNA, 20 nt, synthetic construct
  misc_feature 1..20: note = antisense sequence
  source 1..20: mol_type = other RNA
ttgactcagaaacctagact

SEQ ID NO: 4390 - RNA, 20 nt, synthetic construct
  misc_feature 1..20: note = antisense sequence
  source 1..20: mol_type = other RNA
tttgactcagaaacctagac

SEQ ID NO: 4391 - RNA, 20 nt, synthetic construct
  misc_feature 1..20: note = antisense sequence
  source 1..20: mol_type = other RNA
gtgagcatcccgtgaatttt

SEQ ID NO: 4392 - RNA, 20 nt, synthetic construct
  misc_feature 1..20: note = antisense sequence
  source 1..20: mol_type = other RNA
ggtgagcatcccgtgaattt

SEQ ID NO: 4393 - RNA, 20 nt, synthetic construct
  misc_feature 1..20: note = antisense sequence
  source 1..20: mol_type = other RNA
tggtgagcatcccgtgaatt

SEQ ID NO: 4394 - RNA, 20 nt, synthetic construct
  misc_feature 1..20: note = antisense sequence
  source 1..20: mol_type = other RNA
gtggtgagcatcccgtgaat

SEQ ID NO: 4395 - RNA, 20 nt, synthetic construct
  misc_feature 1..20: note = antisense sequence
  source 1..20: mol_type = other RNA
ggtggtgagcatcccgtgaa

SEQ ID NO: 4396 - RNA, 20 nt, synthetic construct
  misc_feature 1..20: note = antisense sequence
  source 1..20: mol_type = other RNA
tggtggtgagcatcccgtga

SEQ ID NO: 4397 - RNA, 20 nt, synthetic construct
  misc_feature 1..20: note = antisense sequence
  source 1..20: mol_type = other RNA
atggtggtgagcatcccgtg

SEQ ID NO: 4398 - RNA, 20 nt, synthetic construct
  misc_feature 1..20: note = antisense sequence
  source 1..20: mol_type = other RNA
tatggtggtgagcatcccgt

SEQ ID NO: 4399 - RNA, 20 nt, synthetic construct
  misc_feature 1..20: note = antisense sequence
  source 1..20: mol_type = other RNA
ttatggtggtgagcatcccg

SEQ ID NO: 4400 - RNA, 20 nt, synthetic construct
  misc_feature 1..20: note = antisense sequence
  source 1..20: mol_type = other RNA
acttttatggtggtgagcat

SEQ ID NO: 4401 - RNA, 20 nt, synthetic construct
  misc_feature 1..20: note = antisense sequence
  source 1..20: mol_type = other RNA
aacttttatggtggtgagca

SEQ ID NO: 4402 - RNA, 20 nt, synthetic construct
  misc_feature 1..20: note = antisense sequence
  source 1..20: mol_type = other RNA
ctaacttttatggtggtgag

SEQ ID NO: 4403 - RNA, 20 nt, synthetic construct
  misc_feature 1..20: note = antisense sequence
  source 1..20: mol_type = other RNA
cccttttccatctaactgtg

SEQ ID NO: 4404 - RNA, 20 nt, synthetic construct
  misc_feature 1..20: note = antisense sequence
  source 1..20: mol_type = other RNA
gttttcattagcttcctctc

SEQ ID NO: 4405 - RNA, 20 nt, synthetic construct
  misc_feature 1..20: note = antisense sequence
  source 1..20: mol_type = other RNA
atgggtaacagtgtgaacac

SEQ ID NO: 4406 - RNA, 20 nt, synthetic construct
  misc_feature 1..20: note = antisense sequence
  source 1..20: mol_type = other RNA
catgggtaacagtgtgaaca

SEQ ID NO: 4407 - RNA, 20 nt, synthetic construct
  misc_feature 1..20: note = antisense sequence
  source 1..20: mol_type = other RNA
aggtaaggatcacaatgttc

SEQ ID NO: 4408 - RNA, 20 nt, synthetic construct
  misc_feature 1..20: note = antisense sequence
  source 1..20: mol_type = other RNA
caaaggtaaggatcacaatg

SEQ ID NO: 4409 - RNA, 20 nt, synthetic construct
  misc_feature 1..20: note = antisense sequence
  source 1..20: mol_type = other RNA
ccaaaggtaaggatcacaat

SEQ ID NO: 4410 - RNA, 20 nt, synthetic construct
  misc_feature 1..20: note = antisense sequence
  source 1..20: mol_type = other RNA
gtccaaaggtaaggatcaca

SEQ ID NO: 4411 - RNA, 20 nt, synthetic construct
  misc_feature 1..20: note = antisense sequence
  source 1..20: mol_type = other RNA
agtccaaaggtaaggatcac

SEQ ID NO: 4412 - RNA, 20 nt, synthetic construct
  misc_feature 1..20: note = antisense sequence
  source 1..20: mol_type = other RNA
aagtccaaaggtaaggatca

SEQ ID NO: 4413 - RNA, 20 nt, synthetic construct
  misc_feature 1..20: note = antisense sequence
  source 1..20: mol_type = other RNA
aatcctcagccagttgttaa

SEQ ID NO: 4414 - RNA, 20 nt, synthetic construct
  misc_feature 1..20: note = antisense sequence
  source 1..20: mol_type = other RNA
gaatcctcagccagttgtta

SEQ ID NO: 4415 - RNA, 20 nt, synthetic construct
  misc_feature 1..20: note = antisense sequence
  source 1..20: mol_type = other RNA
tgaatcctcagccagttgtt

SEQ ID NO: 4416 - RNA, 20 nt, synthetic construct
  misc_feature 1..20: note = antisense sequence
  source 1..20: mol_type = other RNA
ttgaatcctcagccagttgt

SEQ ID NO: 4417 - RNA, 20 nt, synthetic construct
  misc_feature 1..20: note = antisense sequence
  source 1..20: mol_type = other RNA
ccttgaatcctcagccagtt

SEQ ID NO: 4418 - RNA, 20 nt, synthetic construct
  misc_feature 1..20: note = antisense sequence
  source 1..20: mol_type = other RNA
gccttgaatcctcagccagt

SEQ ID NO: 4419 - RNA, 20 nt, synthetic construct
  misc_feature 1..20: note = antisense sequence
  source 1..20: mol_type = other RNA
tatgccttgaatcctcagcc

SEQ ID NO: 4420 - RNA, 20 nt, synthetic construct
  misc_feature 1..20: note = antisense sequence
  source 1..20: mol_type = other RNA
tttatgccttgaatcctcag

SEQ ID NO: 4421 - RNA, 20 nt, synthetic construct
  misc_feature 1..20: note = antisense sequence
  source 1..20: mol_type = other RNA
gaggctcaatagtaagcata

SEQ ID NO: 4422 - RNA, 20 nt, synthetic construct
  misc_feature 1..20: note = antisense sequence
  source 1..20: mol_type = other RNA
tgaggctcaatagtaagcat

SEQ ID NO: 4423 - RNA, 20 nt, synthetic construct
  misc_feature 1..20: note = antisense sequence
  source 1..20: mol_type = other RNA
ctgaggctcaatagtaagca

SEQ ID NO: 4424 - RNA, 20 nt, synthetic construct
  misc_feature 1..20: note = antisense sequence
  source 1..20: mol_type = other RNA
gctgaggctcaatagtaagc

SEQ ID NO: 4425 - RNA, 20 nt, synthetic construct
  misc_feature 1..20: note = antisense sequence
  source 1..20: mol_type = other RNA
tgctgaggctcaatagtaag

SEQ ID NO: 4426 - RNA, 20 nt, synthetic construct
  misc_feature 1..20: note = antisense sequence
  source 1..20: mol_type = other RNA
ggtgctgaggctcaatagta

SEQ ID NO: 4427 - RNA, 20 nt, synthetic construct
  misc_feature 1..20: note = antisense sequence
  source 1..20: mol_type = other RNA
caaaggtgctgaggctcaat

SEQ ID NO: 4428 - RNA, 20 nt, synthetic construct
  misc_feature 1..20: note = antisense sequence
  source 1..20: mol_type = other RNA
atgagacccagcaaggttga

SEQ ID NO: 4429 - RNA, 20 nt, synthetic construct
  misc_feature 1..20: note = antisense sequence
  source 1..20: mol_type = other RNA
aatgagacccagcaaggttg

SEQ ID NO: 4430 - RNA, 20 nt, synthetic construct
  misc_feature 1..20: note = antisense sequence
  source 1..20: mol_type = other RNA
caaatatcactcttgggaag

SEQ ID NO: 4431 - RNA, 20 nt, synthetic construct
  misc_feature 1..20: note = antisense sequence
  source 1..20: mol_type = other RNA
actataccctactggctttt

SEQ ID NO: 4432 - RNA, 20 nt, synthetic construct
  misc_feature 1..20: note = antisense sequence
  source 1..20: mol_type = other RNA
ctactataccctactggctt

SEQ ID NO: 4433 - RNA, 20 nt, synthetic construct
  misc_feature 1..20: note = antisense sequence
  source 1..20: mol_type = other RNA
gctactataccctactggct

SEQ ID NO: 4434 - RNA, 20 nt, synthetic construct
  misc_feature 1..20: note = antisense sequence
  source 1..20: mol_type = other RNA
agctactataccctactggc

SEQ ID NO: 4435 - RNA, 20 nt, synthetic construct
  misc_feature 1..20: note = antisense sequence
  source 1..20: mol_type = other RNA
taaggccattgtccaaagtt

SEQ ID NO: 4436 - RNA, 20 nt, synthetic construct
  misc_feature 1..20: note = antisense sequence
  source 1..20: mol_type = other RNA
ataaggccattgtccaaagt

SEQ ID NO: 4437 - RNA, 20 nt, synthetic construct
  misc_feature 1..20: note = antisense sequence
  source 1..20: mol_type = other RNA
aataaggccattgtccaaag

SEQ ID NO: 4438 - RNA, 20 nt, synthetic construct
  misc_feature 1..20: note = antisense sequence
  source 1..20: mol_type = other RNA
gaataaggccattgtccaaa

SEQ ID NO: 4439 - RNA, 20 nt, synthetic construct
  misc_feature 1..20: note = antisense sequence
  source 1..20: mol_type = other RNA
tgaataaggccattgtccaa

SEQ ID NO: 4440 - RNA, 20 nt, synthetic construct
  misc_feature 1..20: note = antisense sequence
  source 1..20: mol_type = other RNA
ctgaataaggccattgtcca

SEQ ID NO: 4441 - RNA, 20 nt, synthetic construct
  misc_feature 1..20: note = antisense sequence
  source 1..20: mol_type = other RNA
tctgaataaggccattgtcc

SEQ ID NO: 4442 - RNA, 20 nt, synthetic construct
  misc_feature 1..20: note = antisense sequence
  source 1..20: mol_type = other RNA
gttctgaataaggccattgt

SEQ ID NO: 4443 - RNA, 20 nt, synthetic construct
  misc_feature 1..20: note = antisense sequence
  source 1..20: mol_type = other RNA
tgttctgaataaggccattg

SEQ ID NO: 4444 - RNA, 20 nt, synthetic construct
  misc_feature 1..20: note = antisense sequence
  source 1..20: mol_type = other RNA
gtgttctgaataaggccatt

SEQ ID NO: 4445 - RNA, 20 nt, synthetic construct
  misc_feature 1..20: note = antisense sequence
  source 1..20: mol_type = other RNA
agtgttctgaataaggccat

SEQ ID NO: 4446 - RNA, 20 nt, synthetic construct
  misc_feature 1..20: note = antisense sequence
  source 1..20: mol_type = other RNA
tagtgttctgaataaggcca

SEQ ID NO: 4447 - RNA, 20 nt, synthetic construct
  misc_feature 1..20: note = antisense sequence
  source 1..20: mol_type = other RNA
ttagtgttctgaataaggcc

SEQ ID NO: 4448 - RNA, 20 nt, synthetic construct
  misc_feature 1..20: note = antisense sequence
  source 1..20: mol_type = other RNA
aaagagtaggcttctaagct

SEQ ID NO: 4449 - RNA, 20 nt, synthetic construct
  misc_feature 1..20: note = antisense sequence
  source 1..20: mol_type = other RNA
taaagagtaggcttctaagc

SEQ ID NO: 4450 - RNA, 20 nt, synthetic construct
  misc_feature 1..20: note = antisense sequence
  source 1..20: mol_type = other RNA
ctaaagagtaggcttctaag

SEQ ID NO: 4451 - RNA, 20 nt, synthetic construct
  misc_feature 1..20: note = antisense sequence
  source 1..20: mol_type = other RNA
caatctaaagagtaggcttc

SEQ ID NO: 4452 - RNA, 20 nt, synthetic construct
  misc_feature 1..20: note = antisense sequence
  source 1..20: mol_type = other RNA
cctccaaaatagcactacaa

SEQ ID NO: 4453 - RNA, 20 nt, synthetic construct
  misc_feature 1..20: note = antisense sequence
  source 1..20: mol_type = other RNA
gcctccaaaatagcactaca

SEQ ID NO: 4454 - RNA, 20 nt, synthetic construct
  misc_feature 1..20: note = antisense sequence
  source 1..20: mol_type = other RNA
tgcctccaaaatagcactac

SEQ ID NO: 4455 - RNA, 20 nt, synthetic construct
  misc_feature 1..20: note = antisense sequence
  source 1..20: mol_type = other RNA
atgcctccaaaatagcacta

SEQ ID NO: 4456 - RNA, 20 nt, synthetic construct
  misc_feature 1..20: note = antisense sequence
  source 1..20: mol_type = other RNA
tatgcctccaaaatagcact

SEQ ID NO: 4457 - RNA, 20 nt, synthetic construct
  misc_feature 1..20: note = antisense sequence
  source 1..20: mol_type = other RNA
atatgcctccaaaatagcac

SEQ ID NO: 4458 - RNA, 20 nt, synthetic construct
  misc_feature 1..20: note = antisense sequence
  source 1..20: mol_type = other RNA
gtagtgggaacaatttgaga

SEQ ID NO: 4459 - RNA, 20 nt, synthetic construct
  misc_feature 1..20: note = antisense sequence
  source 1..20: mol_type = other RNA
cctacctatgaaaacttcca

SEQ ID NO: 4460 - RNA, 20 nt, synthetic construct
  misc_feature 1..20: note = antisense sequence
  source 1..20: mol_type = other RNA
tcctacctatgaaaacttcc

SEQ ID NO: 4461 - RNA, 20 nt, synthetic construct
  misc_feature 1..20: note = antisense sequence
  source 1..20: mol_type = other RNA
cagtcctacctatgaaaact

SEQ ID NO: 4462 - RNA, 20 nt, synthetic construct
  misc_feature 1..20: note = antisense sequence
  source 1..20: mol_type = other RNA
cttacagtcctacctatgaa

SEQ ID NO: 4463 - RNA, 20 nt, synthetic construct
  misc_feature 1..20: note = antisense sequence
  source 1..20: mol_type = other RNA
cctgtcaaataaagccagaa

SEQ ID NO: 4464 - RNA, 20 nt, synthetic construct
  misc_feature 1..20: note = antisense sequence
  source 1..20: mol_type = other RNA
aacctgtcaaataaagccag

SEQ ID NO: 4465 - RNA, 20 nt, synthetic construct
  misc_feature 1..20: note = antisense sequence
  source 1..20: mol_type = other RNA
ctggatgaactacaatcaac

SEQ ID NO: 4466 - RNA, 20 nt, synthetic construct
  misc_feature 1..20: note = antisense sequence
  source 1..20: mol_type = other RNA
ggagtaactttctggatgaa

SEQ ID NO: 4467 - RNA, 20 nt, synthetic construct
  misc_feature 1..20: note = antisense sequence
  source 1..20: mol_type = other RNA
ccaacatggagtaactttct

SEQ ID NO: 4468 - RNA, 20 nt, synthetic construct
  misc_feature 1..20: note = antisense sequence
  source 1..20: mol_type = other RNA
accaacatggagtaactttc

SEQ ID NO: 4469 - RNA, 20 nt, synthetic construct
  misc_feature 1..20: note = antisense sequence
  source 1..20: mol_type = other RNA
ccttttaccaacatggagta

SEQ ID NO: 4470 - RNA, 20 nt, synthetic construct
  misc_feature 1..20: note = antisense sequence
  source 1..20: mol_type = other RNA
aaccttttaccaacatggag

SEQ ID NO: 4471 - RNA, 20 nt, synthetic construct
  misc_feature 1..20: note = antisense sequence
  source 1..20: mol_type = other RNA
tgaaatacttggcctttgac

SEQ ID NO: 4472 - RNA, 20 nt, synthetic construct
  misc_feature 1..20: note = antisense sequence
  source 1..20: mol_type = other RNA
gtgcaactactattccacat

SEQ ID NO: 4473 - RNA, 20 nt, synthetic construct
  misc_feature 1..20: note = antisense sequence
  source 1..20: mol_type = other RNA
agtgcaactactattccaca

SEQ ID NO: 4474 - RNA, 20 nt, synthetic construct
  misc_feature 1..20: note = antisense sequence
  source 1..20: mol_type = other RNA
gagtgcaactactattccac

SEQ ID NO: 4475 - RNA, 20 nt, synthetic construct
  misc_feature 1..20: note = antisense sequence
  source 1..20: mol_type = other RNA
tgagtgcaactactattcca

SEQ ID NO: 4476 - RNA, 20 nt, synthetic construct
  misc_feature 1..20: note = antisense sequence
  source 1..20: mol_type = other RNA
ttgagtgcaactactattcc

SEQ ID NO: 4477 - RNA, 20 nt, synthetic construct
  misc_feature 1..20: note = antisense sequence
  source 1..20: mol_type = other RNA
gccaaaccctgtaacatatt

SEQ ID NO: 4478 - RNA, 20 nt, synthetic construct
  misc_feature 1..20: note = antisense sequence
  source 1..20: mol_type = other RNA
agccaaaccctgtaacatat

SEQ ID NO: 4479 - RNA, 20 nt, synthetic construct
  misc_feature 1..20: note = antisense sequence
  source 1..20: mol_type = other RNA
agtgcctctgctgtatgtca

SEQ ID NO: 4480 - RNA, 20 nt, synthetic construct
  misc_feature 1..20: note = antisense sequence
  source 1..20: mol_type = other RNA
tgagtgcctctgctgtatgt

SEQ ID NO: 4481 - RNA, 20 nt, synthetic construct
  misc_feature 1..20: note = antisense sequence
  source 1..20: mol_type = other RNA
ttagggtgagtgcctctgct

SEQ ID NO: 4482 - RNA, 20 nt, synthetic construct
  misc_feature 1..20: note = antisense sequence
  source 1..20: mol_type = other RNA
gttagggtgagtgcctctgc

SEQ ID NO: 4483 - RNA, 20 nt, synthetic construct
  misc_feature 1..20: note = antisense sequence
  source 1..20: mol_type = other RNA
tgttagggtgagtgcctctg

SEQ ID NO: 4484 - RNA, 20 nt, synthetic construct
  misc_feature 1..20: note = antisense sequence
  source 1..20: mol_type = other RNA
atgttagggtgagtgcctct

SEQ ID NO: 4485 - RNA, 20 nt, synthetic construct
  misc_feature 1..20: note = antisense sequence
  source 1..20: mol_type = other RNA
tatgttagggtgagtgcctc

SEQ ID NO: 4486 - RNA, 20 nt, synthetic construct
  misc_feature 1..20: note = antisense sequence
  source 1..20: mol_type = other RNA
gtatgttagggtgagtgcct

SEQ ID NO: 4487 - RNA, 20 nt, synthetic construct
  misc_feature 1..20: note = antisense sequence
  source 1..20: mol_type = other RNA
agtatgttagggtgagtgcc

SEQ ID NO: 4488 - RNA, 20 nt, synthetic construct
  misc_feature 1..20: note = antisense sequence
  source 1..20: mol_type = other RNA
aagtatgttagggtgagtgc

SEQ ID NO: 4489 - RNA, 20 nt, synthetic construct
  misc_feature 1..20: note = antisense sequence
  source 1..20: mol_type = other RNA
atggaaagtatgttagggtg

SEQ ID NO: 4490 - RNA, 20 nt, synthetic construct
  misc_feature 1..20: note = antisense sequence
  source 1..20: mol_type = other RNA
gatggaaagtatgttagggt

SEQ ID NO: 4491 - RNA, 20 nt, synthetic construct
  misc_feature 1..20: note = antisense sequence
  source 1..20: mol_type = other RNA
ggcgtatagatggaaagtat

SEQ ID NO: 4492 - RNA, 20 nt, synthetic construct
  misc_feature 1..20: note = antisense sequence
  source 1..20: mol_type = other RNA
tggcgtatagatggaaagta

SEQ ID NO: 4493 - RNA, 20 nt, synthetic construct
  misc_feature 1..20: note = antisense sequence
  source 1..20: mol_type = other RNA
gctgagggaggtcccagttt

SEQ ID NO: 4494 - RNA, 20 nt, synthetic construct
  misc_feature 1..20: note = antisense sequence
  source 1..20: mol_type = other RNA
agctgagggaggtcccagtt

SEQ ID NO: 4495 - RNA, 20 nt, synthetic construct
  misc_feature 1..20: note = antisense sequence
  source 1..20: mol_type = other RNA
attaggagggcagagctgag

SEQ ID NO: 4496 - RNA, 20 nt, synthetic construct
  misc_feature 1..20: note = antisense sequence
  source 1..20: mol_type = other RNA
gtcttattaggagggcagag

SEQ ID NO: 4497 - RNA, 20 nt, synthetic construct
  misc_feature 1..20: note = antisense sequence
  source 1..20: mol_type = other RNA
ggtcttattaggagggcaga

SEQ ID NO: 4498 - RNA, 20 nt, synthetic construct
  misc_feature 1..20: note = antisense sequence
  source 1..20: mol_type = other RNA
tggtcttattaggagggcag

SEQ ID NO: 4499 - RNA, 20 nt, synthetic construct
  misc_feature 1..20: note = antisense sequence
  source 1..20: mol_type = other RNA
atggtcttattaggagggca

SEQ ID NO: 4500 - RNA, 20 nt, synthetic construct
  misc_feature 1..20: note = antisense sequence
  source 1..20: mol_type = other RNA
gatggtcttattaggagggc

SEQ ID NO: 4501 - RNA, 20 nt, synthetic construct
  misc_feature 1..20: note = antisense sequence
  source 1..20: mol_type = other RNA
ggatggtcttattaggaggg

SEQ ID NO: 4502 - RNA, 20 nt, synthetic construct
  misc_feature 1..20: note = antisense sequence
  source 1..20: mol_type = other RNA
aggatggtcttattaggagg

SEQ ID NO: 4503 - RNA, 20 nt, synthetic construct
  misc_feature 1..20: note = antisense sequence
  source 1..20: mol_type = other RNA
caggatggtcttattaggag

SEQ ID NO: 4504 - RNA, 20 nt, synthetic construct
  misc_feature 1..20: note = antisense sequence
  source 1..20: mol_type = other RNA
tcaggatggtcttattagga

SEQ ID NO: 4505 - RNA, 20 nt, synthetic construct
  misc_feature 1..20: note = antisense sequence
  source 1..20: mol_type = other RNA
gtcaggatggtcttattagg

SEQ ID NO: 4506 - RNA, 20 nt, synthetic construct
  misc_feature 1..20: note = antisense sequence
  source 1..20: mol_type = other RNA
tgtcaggatggtcttattag

SEQ ID NO: 4507 - RNA, 20 nt, synthetic construct
  misc_feature 1..20: note = antisense sequence
  source 1..20: mol_type = other RNA
gtgtcaggatggtcttatta

SEQ ID NO: 4508 - RNA, 20 nt, synthetic construct
  misc_feature 1..20: note = antisense sequence
  source 1..20: mol_type = other RNA
aagacggtggtgatgtcatc

SEQ ID NO: 4509 - RNA, 20 nt, synthetic construct
  misc_feature 1..20: note = antisense sequence
  source 1..20: mol_type = other RNA
caagacggtggtgatgtcat

SEQ ID NO: 4510 - RNA, 20 nt, synthetic construct
  misc_feature 1..20: note = antisense sequence
  source 1..20: mol_type = other RNA
gcaagacggtggtgatgtca

SEQ ID NO: 4511 - RNA, 20 nt, synthetic construct
  misc_feature 1..20: note = antisense sequence
  source 1..20: mol_type = other RNA
catggctaggtcagatttaa

SEQ ID NO: 4512 - RNA, 20 nt, synthetic construct
  misc_feature 1..20: note = antisense sequence
  source 1..20: mol_type = other RNA
tcatggctaggtcagattta

SEQ ID NO: 4513 - RNA, 20 nt, synthetic construct
  misc_feature 1..20: note = antisense sequence
  source 1..20: mol_type = other RNA
ttcatggctaggtcagattt

SEQ ID NO: 4514 - RNA, 20 nt, synthetic construct
  misc_feature 1..20: note = antisense sequence
  source 1..20: mol_type = other RNA
tttcatggctaggtcagatt

SEQ ID NO: 4515 - RNA, 20 nt, synthetic construct
  misc_feature 1..20: note = antisense sequence
  source 1..20: mol_type = other RNA
ctttcatggctaggtcagat

SEQ ID NO: 4516 - RNA, 20 nt, synthetic construct
  misc_feature 1..20: note = antisense sequence
  source 1..20: mol_type = other RNA
actttcatggctaggtcaga

SEQ ID NO: 4517 - RNA, 20 nt, synthetic construct
  misc_feature 1..20: note = antisense sequence
  source 1..20: mol_type = other RNA
gactttcatggctaggtcag

SEQ ID NO: 4518 - RNA, 20 nt, synthetic construct
  misc_feature 1..20: note = antisense sequence
  source 1..20: mol_type = other RNA
ctgactttcatggctaggtc

SEQ ID NO: 4519 - RNA, 20 nt, synthetic construct
  misc_feature 1..20: note = antisense sequence
  source 1..20: mol_type = other RNA
cactgactttcatggctagg

SEQ ID NO: 4520 - RNA, 20 nt, synthetic construct
  misc_feature 1..20: note = antisense sequence
  source 1..20: mol_type = other RNA
gactcacactgactttcatg

SEQ ID NO: 4521 - RNA, 20 nt, synthetic construct
  misc_feature 1..20: note = antisense sequence
  source 1..20: mol_type = other RNA
ggactcacactgactttcat

SEQ ID NO: 4522 - RNA, 20 nt, synthetic construct
  misc_feature 1..20: note = antisense sequence
  source 1..20: mol_type = other RNA
aggactcacactgactttca

SEQ ID NO: 4523 - RNA, 20 nt, synthetic construct
  misc_feature 1..20: note = antisense sequence
  source 1..20: mol_type = other RNA
caggactcacactgactttc

SEQ ID NO: 4524 - RNA, 20 nt, synthetic construct
  misc_feature 1..20: note = antisense sequence
  source 1..20: mol_type = other RNA
gcaggactcacactgacttt

SEQ ID NO: 4525 - RNA, 20 nt, synthetic construct
  misc_feature 1..20: note = antisense sequence
  source 1..20: mol_type = other RNA
tgcaggactcacactgactt

SEQ ID NO: 4526 - RNA, 20 nt, synthetic construct
  misc_feature 1..20: note = antisense sequence
  source 1..20: mol_type = other RNA
atgcaggactcacactgact

SEQ ID NO: 4527 - RNA, 20 nt, synthetic construct
  misc_feature 1..20: note = antisense sequence
  source 1..20: mol_type = other RNA
gatgcaggactcacactgac

SEQ ID NO: 4528 - RNA, 20 nt, synthetic construct
  misc_feature 1..20: note = antisense sequence
  source 1..20: mol_type = other RNA
catgatgcaggactcacact

SEQ ID NO: 4529 - RNA, 20 nt, synthetic construct
  misc_feature 1..20: note = antisense sequence
  source 1..20: mol_type = other RNA
acatgatgcaggactcacac

SEQ ID NO: 4530 - RNA, 20 nt, synthetic construct
  misc_feature 1..20: note = antisense sequence
  source 1..20: mol_type = other RNA
atgaaaacatgatgcaggac

SEQ ID NO: 4531 - RNA, 20 nt, synthetic construct
  misc_feature 1..20: note = antisense sequence
  source 1..20: mol_type = other RNA
gatgaaaacatgatgcagga

SEQ ID NO: 4532 - RNA, 20 nt, synthetic construct
  misc_feature 1..20: note = antisense sequence
  source 1..20: mol_type = other RNA
gtgttaaaagcactaccaga

SEQ ID NO: 4533 - RNA, 20 nt, synthetic construct
  misc_feature 1..20: note = antisense sequence
  source 1..20: mol_type = other RNA
tgtgttaaaagcactaccag

SEQ ID NO: 4534 - RNA, 20 nt, synthetic construct
  misc_feature 1..20: note = antisense sequence
  source 1..20: mol_type = other RNA
ctgtgttaaaagcactacca

SEQ ID NO: 4535 - RNA, 20 nt, synthetic construct
  misc_feature 1..20: note = antisense sequence
  source 1..20: mol_type = other RNA
tctgtgttaaaagcactacc

SEQ ID NO: 4536 - RNA, 20 nt, synthetic construct
  misc_feature 1..20: note = antisense sequence
  source 1..20: mol_type = other RNA
actctctgtgttaaaagcac

SEQ ID NO: 4537 - RNA, 20 nt, synthetic construct
  misc_feature 1..20: note = antisense sequence
  source 1..20: mol_type = other RNA
gacaggtgattcctatgtaa

SEQ ID NO: 4538 - RNA, 20 nt, synthetic construct
  misc_feature 1..20: note = antisense sequence
  source 1..20: mol_type = other RNA
ttagacaggtgattcctatg

SEQ ID NO: 4539 - RNA, 20 nt, synthetic construct
  misc_feature 1..20: note = antisense sequence
  source 1..20: mol_type = other RNA
gtagttgattagacaggtga

SEQ ID NO: 4540 - RNA, 20 nt, synthetic construct
  misc_feature 1..20: note = antisense sequence
  source 1..20: mol_type = other RNA
tgtagttgattagacaggtg

SEQ ID NO: 4541 - RNA, 20 nt, synthetic construct
  misc_feature 1..20: note = antisense sequence
  source 1..20: mol_type = other RNA
cttgtagttgattagacagg

SEQ ID NO: 4542 - RNA, 20 nt, synthetic construct
  misc_feature 1..20: note = antisense sequence
  source 1..20: mol_type = other RNA
gacctcttgtagttgattag

SEQ ID NO: 4543 - RNA, 20 nt, synthetic construct
  misc_feature 1..20: note = antisense sequence
  source 1..20: mol_type = other RNA
gtgacctcttgtagttgatt

SEQ ID NO: 4544 - RNA, 20 nt, synthetic construct
  misc_feature 1..20: note = antisense sequence
  source 1..20: mol_type = other RNA
tgtgacctcttgtagttgat

SEQ ID NO: 4545 - RNA, 20 nt, synthetic construct
  misc_feature 1..20: note = antisense sequence
  source 1..20: mol_type = other RNA
gtgtgacctcttgtagttga

SEQ ID NO: 4546 - RNA, 20 nt, synthetic construct
  misc_feature 1..20: note = antisense sequence
  source 1..20: mol_type = other RNA
agtgtgacctcttgtagttg

SEQ ID NO: 4547 - RNA, 20 nt, synthetic construct
  misc_feature 1..20: note = antisense sequence
  source 1..20: mol_type = other RNA
aagtgtgacctcttgtagtt

SEQ ID NO: 4548 - RNA, 20 nt, synthetic construct
  misc_feature 1..20: note = antisense sequence
  source 1..20: mol_type = other RNA
aaagtgtgacctcttgtagt

SEQ ID NO: 4549 - RNA, 20 nt, synthetic construct
  misc_feature 1..20: note = antisense sequence
  source 1..20: mol_type = other RNA
aaaagtgtgacctcttgtag

SEQ ID NO: 4550 - RNA, 20 nt, synthetic construct
  misc_feature 1..20: note = antisense sequence
  source 1..20: mol_type = other RNA
agactccatctcaaaggaaa

SEQ ID NO: 4551 - RNA, 20 nt, synthetic construct
  misc_feature 1..20: note = antisense sequence
  source 1..20: mol_type = other RNA
cccatcagtctaggcaacag

SEQ ID NO: 4552 - RNA, 20 nt, synthetic construct
  misc_feature 1..20: note = antisense sequence
  source 1..20: mol_type = other RNA
tattgcccatcagtctaggc

SEQ ID NO: 4553 - RNA, 20 nt, synthetic construct
  misc_feature 1..20: note = antisense sequence
  source 1..20: mol_type = other RNA
ttattgcccatcagtctagg

SEQ ID NO: 4554 - RNA, 20 nt, synthetic construct
  misc_feature 1..20: note = antisense sequence
  source 1..20: mol_type = other RNA
cgttattgcccatcagtcta

SEQ ID NO: 4555 - RNA, 20 nt, synthetic construct
  misc_feature 1..20: note = antisense sequence
  source 1..20: mol_type = other RNA
tcgttattgcccatcagtct

SEQ ID NO: 4556 - RNA, 20 nt, synthetic construct
  misc_feature 1..20: note = antisense sequence
  source 1..20: mol_type = other RNA
ttcgttattgcccatcagtc

SEQ ID NO: 4557 - RNA, 20 nt, synthetic construct
  misc_feature 1..20: note = antisense sequence
  source 1..20: mol_type = other RNA
tttcgttattgcccatcagt

SEQ ID NO: 4558 - RNA, 20 nt, synthetic construct
  misc_feature 1..20: note = antisense sequence
  source 1..20: mol_type = other RNA
atttcgttattgcccatcag

SEQ ID NO: 4559 - RNA, 20 nt, synthetic construct
  misc_feature 1..20: note = antisense sequence
  source 1..20: mol_type = other RNA
gatttcgttattgcccatca

SEQ ID NO: 4560 - RNA, 20 nt, synthetic construct
  misc_feature 1..20: note = antisense sequence
  source 1..20: mol_type = other RNA
agatttcgttattgcccatc

SEQ ID NO: 4561 - RNA, 20 nt, synthetic construct
  misc_feature 1..20: note = antisense sequence
  source 1..20: mol_type = other RNA
caagatttcgttattgccca

SEQ ID NO: 4562 - RNA, 20 nt, synthetic construct
  misc_feature 1..20: note = antisense sequence
  source 1..20: mol_type = other RNA
ccaagatttcgttattgccc

SEQ ID NO: 4563 - RNA, 20 nt, synthetic construct
  misc_feature 1..20: note = antisense sequence
  source 1..20: mol_type = other RNA
gccaagatttcgttattgcc

SEQ ID NO: 4564 - RNA, 20 nt, synthetic construct
  misc_feature 1..20: note = antisense sequence
  source 1..20: mol_type = other RNA
agccaagatttcgttattgc

SEQ ID NO: 4565 - RNA, 20 nt, synthetic construct
  misc_feature 1..20: note = antisense sequence
  source 1..20: mol_type = other RNA
gagccaagatttcgttattg

SEQ ID NO: 4566 - RNA, 20 nt, synthetic construct
  misc_feature 1..20: note = antisense sequence
  source 1..20: mol_type = other RNA
gtgagccaagatttcgttat

SEQ ID NO: 4567 - RNA, 20 nt, synthetic construct
  misc_feature 1..20: note = antisense sequence
  source 1..20: mol_type = other RNA
agtgagccaagatttcgtta

SEQ ID NO: 4568 - RNA, 20 nt, synthetic construct
  misc_feature 1..20: note = antisense sequence
  source 1..20: mol_type = other RNA
cagtgagccaagatttcgtt

SEQ ID NO: 4569 - RNA, 20 nt, synthetic construct
  misc_feature 1..20: note = antisense sequence
  source 1..20: mol_type = other RNA
gcagtgagccaagatttcgt

SEQ ID NO: 4570 - RNA, 20 nt, synthetic construct
  misc_feature 1..20: note = antisense sequence
  source 1..20: mol_type = other RNA
tgcagtgagccaagatttcg

SEQ ID NO: 4571 - RNA, 20 nt, synthetic construct
  misc_feature 1..20: note = antisense sequence
  source 1..20: mol_type = other RNA
ttgcagtgagccaagatttc

SEQ ID NO: 4572 - RNA, 20 nt, synthetic construct
  misc_feature 1..20: note = antisense sequence
  source 1..20: mol_type = other RNA
gttgcagtgagccaagattt

SEQ ID NO: 4573 - RNA, 20 nt, synthetic construct
  misc_feature 1..20: note = antisense sequence
  source 1..20: mol_type = other RNA
ggttgcagtgagccaagatt

SEQ ID NO: 4574 - RNA, 20 nt, synthetic construct
  misc_feature 1..20: note = antisense sequence
  source 1..20: mol_type = other RNA
aggttgcagtgagccaagat

SEQ ID NO: 4575 - RNA, 20 nt, synthetic construct
  misc_feature 1..20: note = antisense sequence
  source 1..20: mol_type = other RNA
gaggttgcagtgagccaaga

SEQ ID NO: 4576 - RNA, 20 nt, synthetic construct
  misc_feature 1..20: note = antisense sequence
  source 1..20: mol_type = other RNA
agaggttgcagtgagccaag

SEQ ID NO: 4577 - RNA, 20 nt, synthetic construct
  misc_feature 1..20: note = antisense sequence
  source 1..20: mol_type = other RNA
cagaggttgcagtgagccaa

SEQ ID NO: 4578 - RNA, 20 nt, synthetic construct
  misc_feature 1..20: note = antisense sequence
  source 1..20: mol_type = other RNA
gcagaggttgcagtgagcca

SEQ ID NO: 4579 - RNA, 20 nt, synthetic construct
  misc_feature 1..20: note = antisense sequence
  source 1..20: mol_type = other RNA
aggcagaggttgcagtgagc

SEQ ID NO: 4580 - RNA, 20 nt, synthetic construct
  misc_feature 1..20: note = antisense sequence
  source 1..20: mol_type = other RNA
gaggcagaggttgcagtgag

SEQ ID NO: 4581 - RNA, 20 nt, synthetic construct
  misc_feature 1..20: note = antisense sequence
  source 1..20: mol_type = other RNA
ggaggcagaggttgcagtga

SEQ ID NO: 4582 - RNA, 20 nt, synthetic construct
  misc_feature 1..20: note = antisense sequence
  source 1..20: mol_type = other RNA
aggaggcagaggttgcagtg

SEQ ID NO: 4583 - RNA, 20 nt, synthetic construct
  misc_feature 1..20: note = antisense sequence
  source 1..20: mol_type = other RNA
caggaggcagaggttgcagt

SEQ ID NO: 4584 - RNA, 20 nt, synthetic construct
  misc_feature 1..20: note = antisense sequence
  source 1..20: mol_type = other RNA
tgaacccaggaggcagaggt

SEQ ID NO: 4585 - RNA, 20 nt, synthetic construct
  misc_feature 1..20: note = antisense sequence
  source 1..20: mol_type = other RNA
ttgaacccaggaggcagagg

SEQ ID NO: 4586 - RNA, 20 nt, synthetic construct
  misc_feature 1..20: note = antisense sequence
  source 1..20: mol_type = other RNA
cttgaacccaggaggcagag

SEQ ID NO: 4587 - RNA, 20 nt, synthetic construct
  misc_feature 1..20: note = antisense sequence
  source 1..20: mol_type = other RNA
gcttgaacccaggaggcaga

SEQ ID NO: 4588 - RNA, 20 nt, synthetic construct
  misc_feature 1..20: note = antisense sequence
  source 1..20: mol_type = other RNA
tcgcttgaacccaggaggca

SEQ ID NO: 4589 - RNA, 20 nt, synthetic construct
  misc_feature 1..20: note = antisense sequence
  source 1..20: mol_type = other RNA
atcgcttgaacccaggaggc

SEQ ID NO: 4590 - RNA, 20 nt, synthetic construct
  misc_feature 1..20: note = antisense sequence
  source 1..20: mol_type = other RNA
aatcgcttgaacccaggagg

SEQ ID NO: 4591 - RNA, 20 nt, synthetic construct
  misc_feature 1..20: note = antisense sequence
  source 1..20: mol_type = other RNA
gaatcgcttgaacccaggag

SEQ ID NO: 4592 - RNA, 20 nt, synthetic construct
  misc_feature 1..20: note = antisense sequence
  source 1..20: mol_type = other RNA
agaatcgcttgaacccagga

SEQ ID NO: 4593 - RNA, 20 nt, synthetic construct
  misc_feature 1..20: note = antisense sequence
  source 1..20: mol_type = other RNA
gagaatcgcttgaacccagg

SEQ ID NO: 4594 - RNA, 20 nt, synthetic construct
  misc_feature 1..20: note = antisense sequence
  source 1..20: mol_type = other RNA
tgagaatcgcttgaacccag

SEQ ID NO: 4595 - RNA, 20 nt, synthetic construct
  misc_feature 1..20: note = antisense sequence
  source 1..20: mol_type = other RNA
atgagaatcgcttgaaccca

SEQ ID NO: 4596 - RNA, 20 nt, synthetic construct
  misc_feature 1..20: note = antisense sequence
  source 1..20: mol_type = other RNA
catgagaatcgcttgaaccc

SEQ ID NO: 4597 - RNA, 20 nt, synthetic construct
  misc_feature 1..20: note = antisense sequence
  source 1..20: mol_type = other RNA
gcatgagaatcgcttgaacc

SEQ ID NO: 4598 - RNA, 20 nt, synthetic construct
  misc_feature 1..20: note = antisense sequence
  source 1..20: mol_type = other RNA
ggcatgagaatcgcttgaac

SEQ ID NO: 4599 - RNA, 20 nt, synthetic construct
  misc_feature 1..20: note = antisense sequence
  source 1..20: mol_type = other RNA
ctactcgggagactgaggca

SEQ ID NO: 4600 - RNA, 20 nt, synthetic construct
  misc_feature 1..20: note = antisense sequence
  source 1..20: mol_type = other RNA
agctactcgggagactgagg

SEQ ID NO: 4601 - RNA, 20 nt, synthetic construct
  misc_feature 1..20: note = antisense sequence
  source 1..20: mol_type = other RNA
cagctactcgggagactgag

SEQ ID NO: 4602 - RNA, 20 nt, synthetic construct
  misc_feature 1..20: note = antisense sequence
  source 1..20: mol_type = other RNA
ccagctactcgggagactga

SEQ ID NO: 4603 - RNA, 20 nt, synthetic construct
  misc_feature 1..20: note = antisense sequence
  source 1..20: mol_type = other RNA
attagccgaggtgtggtggt

SEQ ID NO: 4604 - RNA, 20 nt, synthetic construct
  misc_feature 1..20: note = antisense sequence
  source 1..20: mol_type = other RNA
aattagccgaggtgtggtgg

SEQ ID NO: 4605 - RNA, 20 nt, synthetic construct
  misc_feature 1..20: note = antisense sequence
  source 1..20: mol_type = other RNA
aaattagccgaggtgtggtg

SEQ ID NO: 4606 - RNA, 20 nt, synthetic construct
  misc_feature 1..20: note = antisense sequence
  source 1..20: mol_type = other RNA
aaaattagccgaggtgtggt

SEQ ID NO: 4607 - RNA, 20 nt, synthetic construct
  misc_feature 1..20: note = antisense sequence
  source 1..20: mol_type = other RNA
aggagttcgagaccagcctg

SEQ ID NO: 4608 - RNA, 20 nt, synthetic construct
  misc_feature 1..20: note = antisense sequence
  source 1..20: mol_type = other RNA
caggagttcgagaccagcct

SEQ ID NO: 4609 - RNA, 20 nt, synthetic construct
  misc_feature 1..20: note = antisense sequence
  source 1..20: mol_type = other RNA
tcaggagttcgagaccagcc

SEQ ID NO: 4610 - RNA, 20 nt, synthetic construct
  misc_feature 1..20: note = antisense sequence
  source 1..20: mol_type = other RNA
gtcaggagttcgagaccagc

SEQ ID NO: 4611 - RNA, 20 nt, synthetic construct
  misc_feature 1..20: note = antisense sequence
  source 1..20: mol_type = other RNA
tgaggtcaggagttcgagac

SEQ ID NO: 4612 - RNA, 20 nt, synthetic construct
  misc_feature 1..20: note = antisense sequence
  source 1..20: mol_type = other RNA
ttgaggtcaggagttcgaga

SEQ ID NO: 4613 - RNA, 20 nt, synthetic construct
  misc_feature 1..20: note = antisense sequence
  source 1..20: mol_type = other RNA
cttgaggtcaggagttcgag

SEQ ID NO: 4614 - RNA, 20 nt, synthetic construct
  misc_feature 1..20: note = antisense sequence
  source 1..20: mol_type = other RNA
acttgaggtcaggagttcga

SEQ ID NO: 4615 - RNA, 20 nt, synthetic construct
  misc_feature 1..20: note = antisense sequence
  source 1..20: mol_type = other RNA
cacttgaggtcaggagttcg

SEQ ID NO: 4616 - RNA, 20 nt, synthetic construct
  misc_feature 1..20: note = antisense sequence
  source 1..20: mol_type = other RNA
tcacttgaggtcaggagttc

SEQ ID NO: 4617 - RNA, 20 nt, synthetic construct
  misc_feature 1..20: note = antisense sequence
  source 1..20: mol_type = other RNA
atcacttgaggtcaggagtt

SEQ ID NO: 4618 - RNA, 20 nt, synthetic construct
  misc_feature 1..20: note = antisense sequence
  source 1..20: mol_type = other RNA
gatcacttgaggtcaggagt

SEQ ID NO: 4619 - RNA, 20 nt, synthetic construct
  misc_feature 1..20: note = antisense sequence
  source 1..20: mol_type = other RNA
agatcacttgaggtcaggag

SEQ ID NO: 4620 - RNA, 20 nt, synthetic construct
  misc_feature 1..20: note = antisense sequence
  source 1..20: mol_type = other RNA
cagatcacttgaggtcagga

SEQ ID NO: 4621 - RNA, 20 nt, synthetic construct
  misc_feature 1..20: note = antisense sequence
  source 1..20: mol_type = other RNA
gcagatcacttgaggtcagg

SEQ ID NO: 4622 - RNA, 20 nt, synthetic construct
  misc_feature 1..20: note = antisense sequence
  source 1..20: mol_type = other RNA
ggcagatcacttgaggtcag

SEQ ID NO: 4623 - RNA, 20 nt, synthetic construct
  misc_feature 1..20: note = antisense sequence
  source 1..20: mol_type = other RNA
gggcagatcacttgaggtca

SEQ ID NO: 4624 - RNA, 20 nt, synthetic construct
  misc_feature 1..20: note = antisense sequence
  source 1..20: mol_type = other RNA
tgggcagatcacttgaggtc

SEQ ID NO: 4625 - RNA, 20 nt, synthetic construct
  misc_feature 1..20: note = antisense sequence
  source 1..20: mol_type = other RNA
gtgggcagatcacttgaggt

SEQ ID NO: 4626 - RNA, 20 nt, synthetic construct
  misc_feature 1..20: note = antisense sequence
  source 1..20: mol_type = other RNA
ggtgggcagatcacttgagg

SEQ ID NO: 4627 - RNA, 20 nt, synthetic construct
  misc_feature 1..20: note = antisense sequence
  source 1..20: mol_type = other RNA
aggtgggcagatcacttgag

SEQ ID NO: 4628 - RNA, 20 nt, synthetic construct
  misc_feature 1..20: note = antisense sequence
  source 1..20: mol_type = other RNA
gaggtgggcagatcacttga

SEQ ID NO: 4629 - RNA, 20 nt, synthetic construct
  misc_feature 1..20: note = antisense sequence
  source 1..20: mol_type = other RNA
tgaggtgggcagatcacttg

SEQ ID NO: 4630 - RNA, 20 nt, synthetic construct
  misc_feature 1..20: note = antisense sequence
  source 1..20: mol_type = other RNA
ctgaggtgggcagatcactt

SEQ ID NO: 4631 - RNA, 20 nt, synthetic construct
  misc_feature 1..20: note = antisense sequence
  source 1..20: mol_type = other RNA
gctgaggtgggcagatcact

SEQ ID NO: 4632 - RNA, 20 nt, synthetic construct
  misc_feature 1..20: note = antisense sequence
  source 1..20: mol_type = other RNA
aggctgaggtgggcagatca

SEQ ID NO: 4633 - RNA, 20 nt, synthetic construct
  misc_feature 1..20: note = antisense sequence
  source 1..20: mol_type = other RNA
actttgggaggctgaggtgg

SEQ ID NO: 4634 - RNA, 20 nt, synthetic construct
  misc_feature 1..20: note = antisense sequence
  source 1..20: mol_type = other RNA
cactttgggaggctgaggtg

SEQ ID NO: 4635 - RNA, 20 nt, synthetic construct
  misc_feature 1..20: note = antisense sequence
  source 1..20: mol_type = other RNA
gcactttgggaggctgaggt

SEQ ID NO: 4636 - RNA, 20 nt, synthetic construct
  misc_feature 1..20: note = antisense sequence
  source 1..20: mol_type = other RNA
agcactttgggaggctgagg

SEQ ID NO: 4637 - RNA, 20 nt, synthetic construct
  misc_feature 1..20: note = antisense sequence
  source 1..20: mol_type = other RNA
ctgtaatcccagcactttgg

SEQ ID NO: 4638 - RNA, 20 nt, synthetic construct
  misc_feature 1..20: note = antisense sequence
  source 1..20: mol_type = other RNA
cctgtaatcccagcactttg

SEQ ID NO: 4639 - RNA, 20 nt, synthetic construct
  misc_feature 1..20: note = antisense sequence
  source 1..20: mol_type = other RNA
tcctgtaatcccagcacttt

SEQ ID NO: 4640 - RNA, 20 nt, synthetic construct
  misc_feature 1..20: note = antisense sequence
  source 1..20: mol_type = other RNA
ctcctgtaatcccagcactt

SEQ ID NO: 4641 - RNA, 20 nt, synthetic construct
  misc_feature 1..20: note = antisense sequence
  source 1..20: mol_type = other RNA
actcctgtaatcccagcact

SEQ ID NO: 4642 - RNA, 20 nt, synthetic construct
  misc_feature 1..20: note = antisense sequence
  source 1..20: mol_type = other RNA
cactcctgtaatcccagcac

SEQ ID NO: 4643 - RNA, 20 nt, synthetic construct
  misc_feature 1..20: note = antisense sequence
  source 1..20: mol_type = other RNA
tcactcctgtaatcccagca

SEQ ID NO: 4644 - RNA, 20 nt, synthetic construct
  misc_feature 1..20: note = antisense sequence
  source 1..20: mol_type = other RNA
ctgtgtgactttctggctgg

SEQ ID NO: 4645 - RNA, 20 nt, synthetic construct
  misc_feature 1..20: note = antisense sequence
  source 1..20: mol_type = other RNA
tctgtgtgactttctggctg

SEQ ID NO: 4646 - RNA, 20 nt, synthetic construct
  misc_feature 1..20: note = antisense sequence
  source 1..20: mol_type = other RNA
aaccctctgtgtgactttct

SEQ ID NO: 4647 - RNA, 20 nt, synthetic construct
  misc_feature 1..20: note = antisense sequence
  source 1..20: mol_type = other RNA
taaccctctgtgtgactttc

SEQ ID NO: 4648 - RNA, 20 nt, synthetic construct
  misc_feature 1..20: note = antisense sequence
  source 1..20: mol_type = other RNA
ttgggtaaccctctgtgtga

SEQ ID NO: 4649 - RNA, 20 nt, synthetic construct
  misc_feature 1..20: note = antisense sequence
  source 1..20: mol_type = other RNA
tttgggtaaccctctgtgtg

SEQ ID NO: 4650 - RNA, 20 nt, synthetic construct
  misc_feature 1..20: note = antisense sequence
  source 1..20: mol_type = other RNA
gtttgggtaaccctctgtgt

SEQ ID NO: 4651 - RNA, 20 nt, synthetic construct
  misc_feature 1..20: note = antisense sequence
  source 1..20: mol_type = other RNA
agtttgggtaaccctctgtg

SEQ ID NO: 4652 - RNA, 20 nt, synthetic construct
  misc_feature 1..20: note = antisense sequence
  source 1..20: mol_type = other RNA
tagtttgggtaaccctctgt

SEQ ID NO: 4653 - RNA, 20 nt, synthetic construct
  misc_feature 1..20: note = antisense sequence
  source 1..20: mol_type = other RNA
ttagtttgggtaaccctctg

SEQ ID NO: 4654 - RNA, 20 nt, synthetic construct
  misc_feature 1..20: note = antisense sequence
  source 1..20: mol_type = other RNA
cttagtttgggtaaccctct

SEQ ID NO: 4655 - RNA, 20 nt, synthetic construct
  misc_feature 1..20: note = antisense sequence
  source 1..20: mol_type = other RNA
acttagtttgggtaaccctc

SEQ ID NO: 4656 - RNA, 20 nt, synthetic construct
  misc_feature 1..20: note = antisense sequence
  source 1..20: mol_type = other RNA
gacttagtttgggtaaccct

SEQ ID NO: 4657 - RNA, 20 nt, synthetic construct
  misc_feature 1..20: note = antisense sequence
  source 1..20: mol_type = other RNA
agacttagtttgggtaaccc

SEQ ID NO: 4658 - RNA, 20 nt, synthetic construct
  misc_feature 1..20: note = antisense sequence
  source 1..20: mol_type = other RNA
gagacttagtttgggtaacc

SEQ ID NO: 4659 - RNA, 20 nt, synthetic construct
  misc_feature 1..20: note = antisense sequence
  source 1..20: mol_type = other RNA
tgagacttagtttgggtaac

SEQ ID NO: 4660 - RNA, 20 nt, synthetic construct
  misc_feature 1..20: note = antisense sequence
  source 1..20: mol_type = other RNA
tcttgagacttagtttgggt

SEQ ID NO: 4661 - RNA, 20 nt, synthetic construct
  misc_feature 1..20: note = antisense sequence
  source 1..20: mol_type = other RNA
atcttgagacttagtttggg

SEQ ID NO: 4662 - RNA, 20 nt, synthetic construct
  misc_feature 1..20: note = antisense sequence
  source 1..20: mol_type = other RNA
caggtatcttgagacttagt

SEQ ID NO: 4663 - RNA, 20 nt, synthetic construct
  misc_feature 1..20: note = antisense sequence
  source 1..20: mol_type = other RNA
acaggtatcttgagacttag

SEQ ID NO: 4664 - RNA, 20 nt, synthetic construct
  misc_feature 1..20: note = antisense sequence
  source 1..20: mol_type = other RNA
gaaacaggtatcttgagact

SEQ ID NO: 4665 - RNA, 20 nt, synthetic construct
  misc_feature 1..20: note = antisense sequence
  source 1..20: mol_type = other RNA
agaaacaggtatcttgagac

SEQ ID NO: 4666 - RNA, 20 nt, synthetic construct
  misc_feature 1..20: note = antisense sequence
  source 1..20: mol_type = other RNA
gagccataagtgattactgt

SEQ ID NO: 4667 - RNA, 20 nt, synthetic construct
  misc_feature 1..20: note = antisense sequence
  source 1..20: mol_type = other RNA
gtagaaggtctttaagggat

SEQ ID NO: 4668 - RNA, 20 nt, synthetic construct
  misc_feature 1..20: note = antisense sequence
  source 1..20: mol_type = other RNA
aggtagaaggtctttaaggg

SEQ ID NO: 4669 - RNA, 20 nt, synthetic construct
  misc_feature 1..20: note = antisense sequence
  source 1..20: mol_type = other RNA
aaggtagaaggtctttaagg

SEQ ID NO: 4670 - RNA, 20 nt, synthetic construct
  misc_feature 1..20: note = antisense sequence
  source 1..20: mol_type = other RNA
aaggaaaggtagaaggtctt

SEQ ID NO: 4671 - RNA, 20 nt, synthetic construct
  misc_feature 1..20: note = antisense sequence
  source 1..20: mol_type = other RNA
gtcccatgtgaaaggaaagg

SEQ ID NO: 4672 - RNA, 20 nt, synthetic construct
  misc_feature 1..20: note = antisense sequence
  source 1..20: mol_type = other RNA
agtcccatgtgaaaggaaag

SEQ ID NO: 4673 - RNA, 20 nt, synthetic construct
  misc_feature 1..20: note = antisense sequence
  source 1..20: mol_type = other RNA
aaaagtcccatgtgaaagga

SEQ ID NO: 4674 - RNA, 20 nt, synthetic construct
  misc_feature 1..20: note = antisense sequence
  source 1..20: mol_type = other RNA
taaaagtcccatgtgaaagg

SEQ ID NO: 4675 - RNA, 20 nt, synthetic construct
  misc_feature 1..20: note = antisense sequence
  source 1..20: mol_type = other RNA
aagactgggcctactctgca

SEQ ID NO: 4676 - RNA, 20 nt, synthetic construct
  misc_feature 1..20: note = antisense sequence
  source 1..20: mol_type = other RNA
gagaaagactgggcctactc

SEQ ID NO: 4677 - RNA, 20 nt, synthetic construct
  misc_feature 1..20: note = antisense sequence
  source 1..20: mol_type = other RNA
aagagaaagactgggcctac

SEQ ID NO: 4678 - RNA, 20 nt, synthetic construct
  misc_feature 1..20: note = antisense sequence
  source 1..20: mol_type = other RNA
aaagagaaagactgggccta

SEQ ID NO: 4679 - RNA, 20 nt, synthetic construct
  misc_feature 1..20: note = antisense sequence
  source 1..20: mol_type = other RNA
aaaagagaaagactgggcct

SEQ ID NO: 4680 - RNA, 20 nt, synthetic construct
  misc_feature 1..20: note = antisense sequence
  source 1..20: mol_type = other RNA
agtaaaagagaaagactggg

SEQ ID NO: 4681 - RNA, 20 nt, synthetic construct
  misc_feature 1..20: note = antisense sequence
  source 1..20: mol_type = other RNA
gagtaaaagagaaagactgg

SEQ ID NO: 4682 - RNA, 20 nt, synthetic construct
  misc_feature 1..20: note = antisense sequence
  source 1..20: mol_type = other RNA
gctacaaagacatgactcat

SEQ ID NO: 4683 - RNA, 20 nt, synthetic construct
  misc_feature 1..20: note = antisense sequence
  source 1..20: mol_type = other RNA
ggctacaaagacatgactca

SEQ ID NO: 4684 - RNA, 20 nt, synthetic construct
  misc_feature 1..20: note = antisense sequence
  source 1..20: mol_type = other RNA
gatggctacaaagacatgac

SEQ ID NO: 4685 - RNA, 20 nt, synthetic construct
  misc_feature 1..20: note = antisense sequence
  source 1..20: mol_type = other RNA
gaatgaggcaacagagctaa

SEQ ID NO: 4686 - RNA, 20 nt, synthetic construct
  misc_feature 1..20: note = antisense sequence
  source 1..20: mol_type = other RNA
agaatgaggcaacagagcta

SEQ ID NO: 4687 - RNA, 20 nt, synthetic construct
  misc_feature 1..20: note = antisense sequence
  source 1..20: mol_type = other RNA
gaagaatgaggcaacagagc

SEQ ID NO: 4688 - RNA, 20 nt, synthetic construct
  misc_feature 1..20: note = antisense sequence
  source 1..20: mol_type = other RNA
ggaagaatgaggcaacagag

SEQ ID NO: 4689 - RNA, 20 nt, synthetic construct
  misc_feature 1..20: note = antisense sequence
  source 1..20: mol_type = other RNA
tttatttctccaccgtggct

SEQ ID NO: 4690 - RNA, 20 nt, synthetic construct
  misc_feature 1..20: note = antisense sequence
  source 1..20: mol_type = other RNA
aactttatttctccaccgtg

SEQ ID NO: 4691 - RNA, 20 nt, synthetic construct
  misc_feature 1..20: note = antisense sequence
  source 1..20: mol_type = other RNA
ttgggtagtccagtaatgag

SEQ ID NO: 4692 - RNA, 20 nt, synthetic construct
  misc_feature 1..20: note = antisense sequence
  source 1..20: mol_type = other RNA
attgggtagtccagtaatga

SEQ ID NO: 4693 - RNA, 20 nt, synthetic construct
  misc_feature 1..20: note = antisense sequence
  source 1..20: mol_type = other RNA
gattgggtagtccagtaatg

SEQ ID NO: 4694 - RNA, 20 nt, synthetic construct
  misc_feature 1..20: note = antisense sequence
  source 1..20: mol_type = other RNA
agattgggtagtccagtaat

SEQ ID NO: 4695 - RNA, 20 nt, synthetic construct
  misc_feature 1..20: note = antisense sequence
  source 1..20: mol_type = other RNA
gagattgggtagtccagtaa

SEQ ID NO: 4696 - RNA, 20 nt, synthetic construct
  misc_feature 1..20: note = antisense sequence
  source 1..20: mol_type = other RNA
tgagattgggtagtccagta

SEQ ID NO: 4697 - RNA, 20 nt, synthetic construct
  misc_feature 1..20: note = antisense sequence
  source 1..20: mol_type = other RNA
ctgagattgggtagtccagt

SEQ ID NO: 4698 - RNA, 20 nt, synthetic construct
  misc_feature 1..20: note = antisense sequence
  source 1..20: mol_type = other RNA
actgagattgggtagtccag

SEQ ID NO: 4699 - RNA, 20 nt, synthetic construct
  misc_feature 1..20: note = antisense sequence
  source 1..20: mol_type = other RNA
gaactgagattgggtagtcc

SEQ ID NO: 4700 - RNA, 20 nt, synthetic construct
  misc_feature 1..20: note = antisense sequence
  source 1..20: mol_type = other RNA
ggaactgagattgggtagtc

SEQ ID NO: 4701 - RNA, 20 nt, synthetic construct
  misc_feature 1..20: note = antisense sequence
  source 1..20: mol_type = other RNA
agggaactgagattgggtag

SEQ ID NO: 4702 - RNA, 20 nt, synthetic construct
  misc_feature 1..20: note = antisense sequence
  source 1..20: mol_type = other RNA
acagaagggaactgagattg

SEQ ID NO: 4703 - RNA, 20 nt, synthetic construct
  misc_feature 1..20: note = antisense sequence
  source 1..20: mol_type = other RNA
tacagaagggaactgagatt

SEQ ID NO: 4704 - RNA, 20 nt, synthetic construct
  misc_feature 1..20: note = antisense sequence
  source 1..20: mol_type = other RNA
gtacagaagggaactgagat

SEQ ID NO: 4705 - RNA, 20 nt, synthetic construct
  misc_feature 1..20: note = antisense sequence
  source 1..20: mol_type = other RNA
aaagtacagaagggaactga

SEQ ID NO: 4706 - RNA, 20 nt, synthetic construct
  misc_feature 1..20: note = antisense sequence
  source 1..20: mol_type = other RNA
taaagtacagaagggaactg

SEQ ID NO: 4707 - RNA, 20 nt, synthetic construct
  misc_feature 1..20: note = antisense sequence
  source 1..20: mol_type = other RNA
ctaaagtacagaagggaact

SEQ ID NO: 4708 - RNA, 20 nt, synthetic construct
  misc_feature 1..20: note = antisense sequence
  source 1..20: mol_type = other RNA
gagagagttctaaagtacag

SEQ ID NO: 4709 - RNA, 20 nt, synthetic construct
  misc_feature 1..20: note = antisense sequence
  source 1..20: mol_type = other RNA
aggagagagttctaaagtac

SEQ ID NO: 4710 - RNA, 20 nt, synthetic construct
  misc_feature 1..20: note = antisense sequence
  source 1..20: mol_type = other RNA
aaatcaagatgagggaagga

SEQ ID NO: 4711 - RNA, 20 nt, synthetic construct
  misc_feature 1..20: note = antisense sequence
  source 1..20: mol_type = other RNA
gaaatcaagatgagggaagg

SEQ ID NO: 4712 - RNA, 20 nt, synthetic construct
  misc_feature 1..20: note = antisense sequence
  source 1..20: mol_type = other RNA
gtgaaatcaagatgagggaa

SEQ ID NO: 4713 - RNA, 20 nt, synthetic construct
  misc_feature 1..20: note = antisense sequence
  source 1..20: mol_type = other RNA
agtgaaatcaagatgaggga

SEQ ID NO: 4714 - RNA, 20 nt, synthetic construct
  misc_feature 1..20: note = antisense sequence
  source 1..20: mol_type = other RNA
cctagtgaaatcaagatgag

SEQ ID NO: 4715 - RNA, 20 nt, synthetic construct
  misc_feature 1..20: note = antisense sequence
  source 1..20: mol_type = other RNA
ggcctagtgaaatcaagatg

SEQ ID NO: 4716 - RNA, 20 nt, synthetic construct
  misc_feature 1..20: note = antisense sequence
  source 1..20: mol_type = other RNA
tggcctagtgaaatcaagat

SEQ ID NO: 4717 - RNA, 20 nt, synthetic construct
  misc_feature 1..20: note = antisense sequence
  source 1..20: mol_type = other RNA
gtggcctagtgaaatcaaga

SEQ ID NO: 4718 - RNA, 20 nt, synthetic construct
  misc_feature 1..20: note = antisense sequence
  source 1..20: mol_type = other RNA
tgtggcctagtgaaatcaag

SEQ ID NO: 4719 - RNA, 20 nt, synthetic construct
  misc_feature 1..20: note = antisense sequence
  source 1..20: mol_type = other RNA
gtgtggcctagtgaaatcaa

SEQ ID NO: 4720 - RNA, 20 nt, synthetic construct
  misc_feature 1..20: note = antisense sequence
  source 1..20: mol_type = other RNA
agtgtggcctagtgaaatca

SEQ ID NO: 4721 - RNA, 20 nt, synthetic construct
  misc_feature 1..20: note = antisense sequence
  source 1..20: mol_type = other RNA
tagtgtggcctagtgaaatc

SEQ ID NO: 4722 - RNA, 20 nt, synthetic construct
  misc_feature 1..20: note = antisense sequence
  source 1..20: mol_type = other RNA
atagtgtggcctagtgaaat

SEQ ID NO: 4723 - RNA, 20 nt, synthetic construct
  misc_feature 1..20: note = antisense sequence
  source 1..20: mol_type = other RNA
ttatagtgtggcctagtgaa

SEQ ID NO: 4724 - RNA, 20 nt, synthetic construct
  misc_feature 1..20: note = antisense sequence
  source 1..20: mol_type = other RNA
gttatagtgtggcctagtga

SEQ ID NO: 4725 - RNA, 20 nt, synthetic construct
  misc_feature 1..20: note = antisense sequence
  source 1..20: mol_type = other RNA
ggttatagtgtggcctagtg

SEQ ID NO: 4726 - RNA, 20 nt, synthetic construct
  misc_feature 1..20: note = antisense sequence
  source 1..20: mol_type = other RNA
agggttatagtgtggcctag

SEQ ID NO: 4727 - RNA, 20 nt, synthetic construct
  misc_feature 1..20: note = antisense sequence
  source 1..20: mol_type = other RNA
cagggttatagtgtggccta

SEQ ID NO: 4728 - RNA, 20 nt, synthetic construct
  misc_feature 1..20: note = antisense sequence
  source 1..20: mol_type = other RNA
ggtctgattctctccaggaa

SEQ ID NO: 4729 - RNA, 20 nt, synthetic construct
  misc_feature 1..20: note = antisense sequence
  source 1..20: mol_type = other RNA
atgggtctgattctctccag

SEQ ID NO: 4730 - RNA, 20 nt, synthetic construct
  misc_feature 1..20: note = antisense sequence
  source 1..20: mol_type = other RNA
catgggtctgattctctcca

SEQ ID NO: 4731 - RNA, 20 nt, synthetic construct
  misc_feature 1..20: note = antisense sequence
  source 1..20: mol_type = other RNA
acatgggtctgattctctcc

SEQ ID NO: 4732 - RNA, 20 nt, synthetic construct
  misc_feature 1..20: note = antisense sequence
  source 1..20: mol_type = other RNA
gaacaggaggctcaagagct

SEQ ID NO: 4733 - RNA, 20 nt, synthetic construct
  misc_feature 1..20: note = antisense sequence
  source 1..20: mol_type = other RNA
ggaacaggaggctcaagagc

SEQ ID NO: 4734 - RNA, 20 nt, synthetic construct
  misc_feature 1..20: note = antisense sequence
  source 1..20: mol_type = other RNA
ttgtcttggtggagagatcc

SEQ ID NO: 4735 - RNA, 20 nt, synthetic construct
  misc_feature 1..20: note = antisense sequence
  source 1..20: mol_type = other RNA
tcttgtcttggtggagagat

SEQ ID NO: 4736 - RNA, 20 nt, synthetic construct
  misc_feature 1..20: note = antisense sequence
  source 1..20: mol_type = other RNA
aggctcttgtcttggtggag

SEQ ID NO: 4737 - RNA, 20 nt, synthetic construct
  misc_feature 1..20: note = antisense sequence
  source 1..20: mol_type = other RNA
gagtaggctcttgtcttggt

SEQ ID NO: 4738 - RNA, 20 nt, synthetic construct
  misc_feature 1..20: note = antisense sequence
  source 1..20: mol_type = other RNA
ggagtaggctcttgtcttgg

SEQ ID NO: 4739 - RNA, 20 nt, synthetic construct
  misc_feature 1..20: note = antisense sequence
  source 1..20: mol_type = other RNA
tggagtaggctcttgtcttg

SEQ ID NO: 4740 - RNA, 20 nt, synthetic construct
  misc_feature 1..20: note = antisense sequence
  source 1..20: mol_type = other RNA
ctggagtaggctcttgtctt

SEQ ID NO: 4741 - RNA, 20 nt, synthetic construct
  misc_feature 1..20: note = antisense sequence
  source 1..20: mol_type = other RNA
taatctcaggttggcagcct

SEQ ID NO: 4742 - RNA, 20 nt, synthetic construct
  misc_feature 1..20: note = antisense sequence
  source 1..20: mol_type = other RNA
ctaatctcaggttggcagcc

SEQ ID NO: 4743 - RNA, 20 nt, synthetic construct
  misc_feature 1..20: note = antisense sequence
  source 1..20: mol_type = other RNA
tctaatctcaggttggcagc

SEQ ID NO: 4744 - RNA, 20 nt, synthetic construct
  misc_feature 1..20: note = antisense sequence
  source 1..20: mol_type = other RNA
ctctaatctcaggttggcag

SEQ ID NO: 4745 - RNA, 20 nt, synthetic construct
  misc_feature 1..20: note = antisense sequence
  source 1..20: mol_type = other RNA
actctctaatctcaggttgg

SEQ ID NO: 4746 - RNA, 20 nt, synthetic construct
  misc_feature 1..20: note = antisense sequence
  source 1..20: mol_type = other RNA
aactctctaatctcaggttg

SEQ ID NO: 4747 - RNA, 20 nt, synthetic construct
  misc_feature 1..20: note = antisense sequence
  source 1..20: mol_type = other RNA
gaactctctaatctcaggtt

SEQ ID NO: 4748 - RNA, 20 nt, synthetic construct
  misc_feature 1..20: note = antisense sequence
  source 1..20: mol_type = other RNA
agttacctacactcttggcc

SEQ ID NO: 4749 - RNA, 20 nt, synthetic construct
  misc_feature 1..20: note = antisense sequence
  source 1..20: mol_type = other RNA
tagttacctacactcttggc

SEQ ID NO: 4750 - RNA, 20 nt, synthetic construct
  misc_feature 1..20: note = antisense sequence
  source 1..20: mol_type = other RNA
ctagttacctacactcttgg

SEQ ID NO: 4751 - RNA, 20 nt, synthetic construct
  misc_feature 1..20: note = antisense sequence
  source 1..20: mol_type = other RNA
tctagttacctacactcttg

SEQ ID NO: 4752 - RNA, 20 nt, synthetic construct
  misc_feature 1..20: note = antisense sequence
  source 1..20: mol_type = other RNA
catctagttacctacactct

SEQ ID NO: 4753 - RNA, 20 nt, synthetic construct
  misc_feature 1..20: note = antisense sequence
  source 1..20: mol_type = other RNA
ccatctagttacctacactc

SEQ ID NO: 4754 - RNA, 20 nt, synthetic construct
  misc_feature 1..20: note = antisense sequence
  source 1..20: mol_type = other RNA
agccatctagttacctacac

SEQ ID NO: 4755 - RNA, 20 nt, synthetic construct
  misc_feature 1..20: note = antisense sequence
  source 1..20: mol_type = other RNA
gagccatctagttacctaca

SEQ ID NO: 4756 - RNA, 20 nt, synthetic construct
  misc_feature 1..20: note = antisense sequence
  source 1..20: mol_type = other RNA
tgagccatctagttacctac

SEQ ID NO: 4757 - RNA, 20 nt, synthetic construct
  misc_feature 1..20: note = antisense sequence
  source 1..20: mol_type = other RNA
atgagccatctagttaccta

SEQ ID NO: 4758 - RNA, 20 nt, synthetic construct
  misc_feature 1..20: note = antisense sequence
  source 1..20: mol_type = other RNA
aatgagccatctagttacct

SEQ ID NO: 4759 - RNA, 20 nt, synthetic construct
  misc_feature 1..20: note = antisense sequence
  source 1..20: mol_type = other RNA
gaatgagccatctagttacc

SEQ ID NO: 4760 - RNA, 20 nt, synthetic construct
  misc_feature 1..20: note = antisense sequence
  source 1..20: mol_type = other RNA
tgaatgagccatctagttac

SEQ ID NO: 4761 - RNA, 20 nt, synthetic construct
  misc_feature 1..20: note = antisense sequence
  source 1..20: mol_type = other RNA
atctgaatgagccatctagt

SEQ ID NO: 4762 - RNA, 20 nt, synthetic construct
  misc_feature 1..20: note = antisense sequence
  source 1..20: mol_type = other RNA
gatctgaatgagccatctag

SEQ ID NO: 4763 - RNA, 20 nt, synthetic construct
  misc_feature 1..20: note = antisense sequence
  source 1..20: mol_type = other RNA
ccaggaatgagtatcagatc

SEQ ID NO: 4764 - RNA, 20 nt, synthetic construct
  misc_feature 1..20: note = antisense sequence
  source 1..20: mol_type = other RNA
gtccaggaatgagtatcaga

SEQ ID NO: 4765 - RNA, 20 nt, synthetic construct
  misc_feature 1..20: note = antisense sequence
  source 1..20: mol_type = other RNA
agtccaggaatgagtatcag

SEQ ID NO: 4766 - RNA, 20 nt, synthetic construct
  misc_feature 1..20: note = antisense sequence
  source 1..20: mol_type = other RNA
aagtccaggaatgagtatca

SEQ ID NO: 4767 - RNA, 20 nt, synthetic construct
  misc_feature 1..20: note = antisense sequence
  source 1..20: mol_type = other RNA
acaagtccaggaatgagtat

SEQ ID NO: 4768 - RNA, 20 nt, synthetic construct
  misc_feature 1..20: note = antisense sequence
  source 1..20: mol_type = other RNA
gacaagtccaggaatgagta

SEQ ID NO: 4769 - RNA, 20 nt, synthetic construct
  misc_feature 1..20: note = antisense sequence
  source 1..20: mol_type = other RNA
agctgacaagtccaggaatg

SEQ ID NO: 4770 - RNA, 20 nt, synthetic construct
  misc_feature 1..20: note = antisense sequence
  source 1..20: mol_type = other RNA
ttaagtgactctgccaccca

SEQ ID NO: 4771 - RNA, 20 nt, synthetic construct
  misc_feature 1..20: note = antisense sequence
  source 1..20: mol_type = other RNA
tttaagtgactctgccaccc

SEQ ID NO: 4772 - RNA, 20 nt, synthetic construct
  misc_feature 1..20: note = antisense sequence
  source 1..20: mol_type = other RNA
ttttaagtgactctgccacc

SEQ ID NO: 4773 - RNA, 20 nt, synthetic construct
  misc_feature 1..20: note = antisense sequence
  source 1..20: mol_type = other RNA
tctgaagatgctgcaatgtt

SEQ ID NO: 4774 - RNA, 20 nt, synthetic construct
  misc_feature 1..20: note = antisense sequence
  source 1..20: mol_type = other RNA
ttctgaagatgctgcaatgt

SEQ ID NO: 4775 - RNA, 20 nt, synthetic construct
  misc_feature 1..20: note = antisense sequence
  source 1..20: mol_type = other RNA
tttctgaagatgctgcaatg

SEQ ID NO: 4776 - RNA, 20 nt, synthetic construct
  misc_feature 1..20: note = antisense sequence
  source 1..20: mol_type = other RNA
ccaaagatttctgaagatgc

SEQ ID NO: 4777 - RNA, 20 nt, synthetic construct
  misc_feature 1..20: note = antisense sequence
  source 1..20: mol_type = other RNA
ccaaccaaagatttctgaag

SEQ ID NO: 4778 - RNA, 20 nt, synthetic construct
  misc_feature 1..20: note = antisense sequence
  source 1..20: mol_type = other RNA
actccaaccaaagatttctg

SEQ ID NO: 4779 - RNA, 20 nt, synthetic construct
  misc_feature 1..20: note = antisense sequence
  source 1..20: mol_type = other RNA
gcatctattctactccaacc

SEQ ID NO: 4780 - RNA, 20 nt, synthetic construct
  misc_feature 1..20: note = antisense sequence
  source 1..20: mol_type = other RNA
ttggcatctattctactcca

SEQ ID NO: 4781 - RNA, 20 nt, synthetic construct
  misc_feature 1..20: note = antisense sequence
  source 1..20: mol_type = other RNA
agaagccaacaactaccttt

SEQ ID NO: 4782 - RNA, 20 nt, synthetic construct
  misc_feature 1..20: note = antisense sequence
  source 1..20: mol_type = other RNA
cagaagccaacaactacctt

SEQ ID NO: 4783 - RNA, 20 nt, synthetic construct
  misc_feature 1..20: note = antisense sequence
  source 1..20: mol_type = other RNA
atcagaagccaacaactacc

SEQ ID NO: 4784 - RNA, 20 nt, synthetic construct
  misc_feature 1..20: note = antisense sequence
  source 1..20: mol_type = other RNA
catcagaagccaacaactac

SEQ ID NO: 4785 - RNA, 20 nt, synthetic construct
  misc_feature 1..20: note = antisense sequence
  source 1..20: mol_type = other RNA
tcatcagaagccaacaacta

SEQ ID NO: 4786 - RNA, 20 nt, synthetic construct
  misc_feature 1..20: note = antisense sequence
  source 1..20: mol_type = other RNA
tttcatcagaagccaacaac

SEQ ID NO: 4787 - RNA, 20 nt, synthetic construct
  misc_feature 1..20: note = antisense sequence
  source 1..20: mol_type = other RNA
catttcatcagaagccaaca

SEQ ID NO: 4788 - RNA, 20 nt, synthetic construct
  misc_feature 1..20: note = antisense sequence
  source 1..20: mol_type = other RNA
gacccttccatttcatcaga

SEQ ID NO: 4789 - RNA, 20 nt, synthetic construct
  misc_feature 1..20: note = antisense sequence
  source 1..20: mol_type = other RNA
tgacccttccatttcatcag

SEQ ID NO: 4790 - RNA, 20 nt, synthetic construct
  misc_feature 1..20: note = antisense sequence
  source 1..20: mol_type = other RNA
ttgacccttccatttcatca

SEQ ID NO: 4791 - RNA, 20 nt, synthetic construct
  misc_feature 1..20: note = antisense sequence
  source 1..20: mol_type = other RNA
tttgacccttccatttcatc

SEQ ID NO: 4792 - RNA, 20 nt, synthetic construct
  misc_feature 1..20: note = antisense sequence
  source 1..20: mol_type = other RNA
gatgagacctcagctattat

SEQ ID NO: 4793 - RNA, 20 nt, synthetic construct
  misc_feature 1..20: note = antisense sequence
  source 1..20: mol_type = other RNA
gaagggatgagacctcagct

SEQ ID NO: 4794 - RNA, 20 nt, synthetic construct
  misc_feature 1..20: note = antisense sequence
  source 1..20: mol_type = other RNA
agaagggatgagacctcagc

SEQ ID NO: 4795 - RNA, 20 nt, synthetic construct
  misc_feature 1..20: note = antisense sequence
  source 1..20: mol_type = other RNA
tagaagggatgagacctcag

SEQ ID NO: 4796 - RNA, 20 nt, synthetic construct
  misc_feature 1..20: note = antisense sequence
  source 1..20: mol_type = other RNA
gtagaagggatgagacctca

SEQ ID NO: 4797 - RNA, 20 nt, synthetic construct
  misc_feature 1..20: note = antisense sequence
  source 1..20: mol_type = other RNA
atgggtagaagggatgagac

SEQ ID NO: 4798 - RNA, 20 nt, synthetic construct
  misc_feature 1..20: note = antisense sequence
  source 1..20: mol_type = other RNA
cttatgggtagaagggatga

SEQ ID NO: 4799 - RNA, 20 nt, synthetic construct
  misc_feature 1..20: note = antisense sequence
  source 1..20: mol_type = other RNA
tcttatgggtagaagggatg

SEQ ID NO: 4800 - RNA, 20 nt, synthetic construct
  misc_feature 1..20: note = antisense sequence
  source 1..20: mol_type = other RNA
atcttatgggtagaagggat

SEQ ID NO: 4801 - RNA, 20 nt, synthetic construct
  misc_feature 1..20: note = antisense sequence
  source 1..20: mol_type = other RNA
ggagattagaagaacttgtg

SEQ ID NO: 4802 - RNA, 20 nt, synthetic construct
  misc_feature 1..20: note = antisense sequence
  source 1..20: mol_type = other RNA
gcaagagagatgtatttgac

SEQ ID NO: 4803 - RNA, 20 nt, synthetic construct
  misc_feature 1..20: note = antisense sequence
  source 1..20: mol_type = other RNA
gcttccaagttctagtgata

SEQ ID NO: 4804 - RNA, 20 nt, synthetic construct
  misc_feature 1..20: note = antisense sequence
  source 1..20: mol_type = other RNA
tctgcttccaagttctagtg

SEQ ID NO: 4805 - RNA, 20 nt, synthetic construct
  misc_feature 1..20: note = antisense sequence
  source 1..20: mol_type = other RNA
gggtcttttcgatacctata

SEQ ID NO: 4806 - RNA, 20 nt, synthetic construct
  misc_feature 1..20: note = antisense sequence
  source 1..20: mol_type = other RNA
aagggtcttttcgataccta

SEQ ID NO: 4807 - RNA, 20 nt, synthetic construct
  misc_feature 1..20: note = antisense sequence
  source 1..20: mol_type = other RNA
cacacacacacacagattta

SEQ ID NO: 4808 - RNA, 20 nt, synthetic construct
  misc_feature 1..20: note = antisense sequence
  source 1..20: mol_type = other RNA
acacacacacacacagattt

SEQ ID NO: 4809 - RNA, 20 nt, synthetic construct
  misc_feature 1..20: note = antisense sequence
  source 1..20: mol_type = other RNA
cacacacacacacacagatt

SEQ ID NO: 4810 - RNA, 20 nt, synthetic construct
  misc_feature 1..20: note = antisense sequence
  source 1..20: mol_type = other RNA
acacacacacacacacagat

SEQ ID NO: 4811 - RNA, 20 nt, synthetic construct
  misc_feature 1..20: note = antisense sequence
  source 1..20: mol_type = other RNA
cacacacacacacacacaga

SEQ ID NO: 4812 - RNA, 20 nt, synthetic construct
  misc_feature 1..20: note = antisense sequence
  source 1..20: mol_type = other RNA
acacacacacacacacacag

SEQ ID NO: 4813 - RNA, 20 nt, synthetic construct
  misc_feature 1..20: note = antisense sequence
  source 1..20: mol_type = other RNA
cacacacacacacacacaca

SEQ ID NO: 4814 - RNA, 20 nt, synthetic construct
  misc_feature 1..20: note = antisense sequence
  source 1..20: mol_type = other RNA
acacacacacacacacacac

SEQ ID NO: 4815 - RNA, 20 nt, synthetic construct
  misc_feature 1..20: note = antisense sequence
  source 1..20: mol_type = other RNA
cacacacacacacacacaca

SEQ ID NO: 4816 - RNA, 20 nt, synthetic construct
  misc_feature 1..20: note = antisense sequence
  source 1..20: mol_type = other RNA
acacacacacacacacacac

SEQ ID NO: 4817 - RNA, 20 nt, synthetic construct
  misc_feature 1..20: note = antisense sequence
  source 1..20: mol_type = other RNA
cacacacacacacacacaca

SEQ ID NO: 4818 - RNA, 20 nt, synthetic construct
  misc_feature 1..20: note = antisense sequence
  source 1..20: mol_type = other RNA
acacacacacacacacacac

SEQ ID NO: 4819 - RNA, 20 nt, synthetic construct
  misc_feature 1..20: note = antisense sequence
  source 1..20: mol_type = other RNA
cacacacacacacacacaca

SEQ ID NO: 4820 - RNA, 20 nt, synthetic construct
  misc_feature 1..20: note = antisense sequence
  source 1..20: mol_type = other RNA
acacacacacacacacacac

SEQ ID NO: 4821 - RNA, 20 nt, synthetic construct
  misc_feature 1..20: note = antisense sequence
  source 1..20: mol_type = other RNA
gacacacacacacacacaca

SEQ ID NO: 4822 - RNA, 20 nt, synthetic construct
  misc_feature 1..20: note = antisense sequence
  source 1..20: mol_type = other RNA
agacacacacacacacacac

SEQ ID NO: 4823 - RNA, 20 nt, synthetic construct
  misc_feature 1..20: note = antisense sequence
  source 1..20: mol_type = other RNA
aagacacacacacacacaca

SEQ ID NO: 4824 - RNA, 20 nt, synthetic construct
  misc_feature 1..20: note = antisense sequence
  source 1..20: mol_type = other RNA
gaagacacacacacacacac

SEQ ID NO: 4825 - RNA, 20 nt, synthetic construct
  misc_feature 1..20: note = antisense sequence
  source 1..20: mol_type = other RNA
agaagacacacacacacaca

SEQ ID NO: 4826 - RNA, 20 nt, synthetic construct
  misc_feature 1..20: note = antisense sequence
  source 1..20: mol_type = other RNA
cagaagacacacacacacac

SEQ ID NO: 4827 - RNA, 20 nt, synthetic construct
  misc_feature 1..20: note = antisense sequence
  source 1..20: mol_type = other RNA
ccagaagacacacacacaca

SEQ ID NO: 4828 - RNA, 20 nt, synthetic construct
  misc_feature 1..20: note = antisense sequence
  source 1..20: mol_type = other RNA
accagaagacacacacacac

SEQ ID NO: 4829 - RNA, 20 nt, synthetic construct
  misc_feature 1..20: note = antisense sequence
  source 1..20: mol_type = other RNA
caccagaagacacacacaca

SEQ ID NO: 4830 - RNA, 20 nt, synthetic construct
  misc_feature 1..20: note = antisense sequence
  source 1..20: mol_type = other RNA
gcaccagaagacacacacac

SEQ ID NO: 4831 - RNA, 20 nt, synthetic construct
  misc_feature 1..20: note = antisense sequence
  source 1..20: mol_type = other RNA
agcaccagaagacacacaca

SEQ ID NO: 4832 - RNA, 20 nt, synthetic construct
  misc_feature 1..20: note = antisense sequence
  source 1..20: mol_type = other RNA
tagcaccagaagacacacac

SEQ ID NO: 4833 - RNA, 20 nt, synthetic construct
  misc_feature 1..20: note = antisense sequence
  source 1..20: mol_type = other RNA
atagcaccagaagacacaca

SEQ ID NO: 4834 - RNA, 20 nt, synthetic construct
  misc_feature 1..20: note = antisense sequence
  source 1..20: mol_type = other RNA
gaaatagcaccagaagacac

SEQ ID NO: 4835 - RNA, 20 nt, synthetic construct
  misc_feature 1..20: note = antisense sequence
  source 1..20: mol_type = other RNA
agaaatagcaccagaagaca

SEQ ID NO: 4836 - RNA, 20 nt, synthetic construct
  misc_feature 1..20: note = antisense sequence
  source 1..20: mol_type = other RNA
gagaaatagcaccagaagac

SEQ ID NO: 4837 - RNA, 20 nt, synthetic construct
  misc_feature 1..20: note = antisense sequence
  source 1..20: mol_type = other RNA
tgagaaatagcaccagaaga

SEQ ID NO: 4838 - RNA, 20 nt, synthetic construct
  misc_feature 1..20: note = antisense sequence
  source 1..20: mol_type = other RNA
ttgagaaatagcaccagaag

SEQ ID NO: 4839 - RNA, 20 nt, synthetic construct
  misc_feature 1..20: note = antisense sequence
  source 1..20: mol_type = other RNA
cccagcccaatctcaaagct

SEQ ID NO: 4840 - RNA, 20 nt, synthetic construct
  misc_feature 1..20: note = antisense sequence
  source 1..20: mol_type = other RNA
gcccagcccaatctcaaagc

SEQ ID NO: 4841 - RNA, 20 nt, synthetic construct
  misc_feature 1..20: note = antisense sequence
  source 1..20: mol_type = other RNA
tgcccagcccaatctcaaag

SEQ ID NO: 4842 - RNA, 20 nt, synthetic construct
  misc_feature 1..20: note = antisense sequence
  source 1..20: mol_type = other RNA
gctgggattacaggtatgag

SEQ ID NO: 4843 - RNA, 20 nt, synthetic construct
  misc_feature 1..20: note = antisense sequence
  source 1..20: mol_type = other RNA
tgctgggattacaggtatga

SEQ ID NO: 4844 - RNA, 20 nt, synthetic construct
  misc_feature 1..20: note = antisense sequence
  source 1..20: mol_type = other RNA
gtgctgggattacaggtatg

SEQ ID NO: 4845 - RNA, 20 nt, synthetic construct
  misc_feature 1..20: note = antisense sequence
  source 1..20: mol_type = other RNA
agtgctgggattacaggtat

SEQ ID NO: 4846 - RNA, 20 nt, synthetic construct
  misc_feature 1..20: note = antisense sequence
  source 1..20: mol_type = other RNA
aagtgctgggattacaggta

SEQ ID NO: 4847 - RNA, 20 nt, synthetic construct
  misc_feature 1..20: note = antisense sequence
  source 1..20: mol_type = other RNA
aaagtgctgggattacaggt

SEQ ID NO: 4848 - RNA, 20 nt, synthetic construct
  misc_feature 1..20: note = antisense sequence
  source 1..20: mol_type = other RNA
caaagtgctgggattacagg

SEQ ID NO: 4849 - RNA, 20 nt, synthetic construct
  misc_feature 1..20: note = antisense sequence
  source 1..20: mol_type = other RNA
ccaaagtgctgggattacag

SEQ ID NO: 4850 - RNA, 20 nt, synthetic construct
  misc_feature 1..20: note = antisense sequence
  source 1..20: mol_type = other RNA
atctacacaccttggcttcc

SEQ ID NO: 4851 - RNA, 20 nt, synthetic construct
  misc_feature 1..20: note = antisense sequence
  source 1..20: mol_type = other RNA
gatctacacaccttggcttc

SEQ ID NO: 4852 - RNA, 20 nt, synthetic construct
  misc_feature 1..20: note = antisense sequence
  source 1..20: mol_type = other RNA
tgatctacacaccttggctt

SEQ ID NO: 4853 - RNA, 20 nt, synthetic construct
  misc_feature 1..20: note = antisense sequence
  source 1..20: mol_type = other RNA
atgatctacacaccttggct

SEQ ID NO: 4854 - RNA, 20 nt, synthetic construct
  misc_feature 1..20: note = antisense sequence
  source 1..20: mol_type = other RNA
gggttttcaccatgttggcc

SEQ ID NO: 4855 - RNA, 20 nt, synthetic construct
  misc_feature 1..20: note = antisense sequence
  source 1..20: mol_type = other RNA
tgggttttcaccatgttggc

SEQ ID NO: 4856 - RNA, 20 nt, synthetic construct
  misc_feature 1..20: note = antisense sequence
  source 1..20: mol_type = other RNA
caccatgcccagctaatttt

SEQ ID NO: 4857 - RNA, 20 nt, synthetic construct
  misc_feature 1..20: note = antisense sequence
  source 1..20: mol_type = other RNA
ccaccatgcccagctaattt

SEQ ID NO: 4858 - RNA, 20 nt, synthetic construct
  misc_feature 1..20: note = antisense sequence
  source 1..20: mol_type = other RNA
accaccatgcccagctaatt

SEQ ID NO: 4859 - RNA, 20 nt, synthetic construct
  misc_feature 1..20: note = antisense sequence
  source 1..20: mol_type = other RNA
taccaccatgcccagctaat

SEQ ID NO: 4860 - RNA, 20 nt, synthetic construct
  misc_feature 1..20: note = antisense sequence
  source 1..20: mol_type = other RNA
gtaccaccatgcccagctaa

SEQ ID NO: 4861 - RNA, 20 nt, synthetic construct
  misc_feature 1..20: note = antisense sequence
  source 1..20: mol_type = other RNA
tgtaccaccatgcccagcta

SEQ ID NO: 4862 - RNA, 20 nt, synthetic construct
  misc_feature 1..20: note = antisense sequence
  source 1..20: mol_type = other RNA
gtgtaccaccatgcccagct

SEQ ID NO: 4863 - RNA, 20 nt, synthetic construct
  misc_feature 1..20: note = antisense sequence
  source 1..20: mol_type = other RNA
tgtgtaccaccatgcccagc

SEQ ID NO: 4864 - RNA, 20 nt, synthetic construct
  misc_feature 1..20: note = antisense sequence
  source 1..20: mol_type = other RNA
caagtagctgggattaaaag

SEQ ID NO: 4865 - RNA, 20 nt, synthetic construct
  misc_feature 1..20: note = antisense sequence
  source 1..20: mol_type = other RNA
ccaagtagctgggattaaaa

SEQ ID NO: 4866 - RNA, 20 nt, synthetic construct
  misc_feature 1..20: note = antisense sequence
  source 1..20: mol_type = other RNA
catcagcctcccaagtagct

SEQ ID NO: 4867 - RNA, 20 nt, synthetic construct
  misc_feature 1..20: note = antisense sequence
  source 1..20: mol_type = other RNA
acatcagcctcccaagtagc

SEQ ID NO: 4868 - RNA, 20 nt, synthetic construct
  misc_feature 1..20: note = antisense sequence
  source 1..20: mol_type = other RNA
cacatcagcctcccaagtag

SEQ ID NO: 4869 - RNA, 20 nt, synthetic construct
  misc_feature 1..20: note = antisense sequence
  source 1..20: mol_type = other RNA
ccacatcagcctcccaagta

SEQ ID NO: 4870 - RNA, 20 nt, synthetic construct
  misc_feature 1..20: note = antisense sequence
  source 1..20: mol_type = other RNA
cacatcctgggttcaagtga

SEQ ID NO: 4871 - RNA, 20 nt, synthetic construct
  misc_feature 1..20: note = antisense sequence
  source 1..20: mol_type = other RNA
ccacatcctgggttcaagtg

SEQ ID NO: 4872 - RNA, 20 nt, synthetic construct
  misc_feature 1..20: note = antisense sequence
  source 1..20: mol_type = other RNA
cactatcttggctcactgca

SEQ ID NO: 4873 - RNA, 20 nt, synthetic construct
  misc_feature 1..20: note = antisense sequence
  source 1..20: mol_type = other RNA
gcactatcttggctcactgc

SEQ ID NO: 4874 - RNA, 20 nt, synthetic construct
  misc_feature 1..20: note = antisense sequence
  source 1..20: mol_type = other RNA
caggttggagtgcagtggca

SEQ ID NO: 4875 - RNA, 20 nt, synthetic construct
  misc_feature 1..20: note = antisense sequence
  source 1..20: mol_type = other RNA
cacaggtaaaggctaatttc

SEQ ID NO: 4876 - RNA, 20 nt, synthetic construct
  misc_feature 1..20: note = antisense sequence
  source 1..20: mol_type = other RNA
cacacaggtaaaggctaatt

SEQ ID NO: 4877 - RNA, 20 nt, synthetic construct
  misc_feature 1..20: note = antisense sequence
  source 1..20: mol_type = other RNA
acacacaggtaaaggctaat

SEQ ID NO: 4878 - RNA, 20 nt, synthetic construct
  misc_feature 1..20: note = antisense sequence
  source 1..20: mol_type = other RNA
tagtacacacaggtaaaggc

SEQ ID NO: 4879 - RNA, 20 nt, synthetic construct
  misc_feature 1..20: note = antisense sequence
  source 1..20: mol_type = other RNA
gtagtacacacaggtaaagg

SEQ ID NO: 4880 - RNA, 20 nt, synthetic construct
  misc_feature 1..20: note = antisense sequence
  source 1..20: mol_type = other RNA
tgtagtacacacaggtaaag

SEQ ID NO: 4881 - RNA, 20 nt, synthetic construct
  misc_feature 1..20: note = antisense sequence
  source 1..20: mol_type = other RNA
ccagatggtagcttttcata

SEQ ID NO: 4882 - RNA, 20 nt, synthetic construct
  misc_feature 1..20: note = antisense sequence
  source 1..20: mol_type = other RNA
gttccagatggtagcttttc

SEQ ID NO: 4883 - RNA, 20 nt, synthetic construct
  misc_feature 1..20: note = antisense sequence
  source 1..20: mol_type = other RNA
ggttccagatggtagctttt

SEQ ID NO: 4884 - RNA, 20 nt, synthetic construct
  misc_feature 1..20: note = antisense sequence
  source 1..20: mol_type = other RNA
gggttccagatggtagcttt

SEQ ID NO: 4885 - RNA, 20 nt, synthetic construct
  misc_feature 1..20: note = antisense sequence
  source 1..20: mol_type = other RNA
agggttccagatggtagctt

SEQ ID NO: 4886 - RNA, 20 nt, synthetic construct
  misc_feature 1..20: note = antisense sequence
  source 1..20: mol_type = other RNA
aagggttccagatggtagct

SEQ ID NO: 4887 - RNA, 20 nt, synthetic construct
  misc_feature 1..20: note = antisense sequence
  source 1..20: mol_type = other RNA
taagggttccagatggtagc

SEQ ID NO: 4888 - RNA, 20 nt, synthetic construct
  misc_feature 1..20: note = antisense sequence
  source 1..20: mol_type = other RNA
actaagggttccagatggta

SEQ ID NO: 4889 - RNA, 20 nt, synthetic construct
  misc_feature 1..20: note = antisense sequence
  source 1..20: mol_type = other RNA
tactaagggttccagatggt

SEQ ID NO: 4890 - RNA, 20 nt, synthetic construct
  misc_feature 1..20: note = antisense sequence
  source 1..20: mol_type = other RNA
ttactaagggttccagatgg

SEQ ID NO: 4891 - RNA, 20 nt, synthetic construct
  misc_feature 1..20: note = antisense sequence
  source 1..20: mol_type = other RNA
tttactaagggttccagatg

SEQ ID NO: 4892 - RNA, 20 nt, synthetic construct
  misc_feature 1..20: note = antisense sequence
  source 1..20: mol_type = other RNA
gtttactaagggttccagat

SEQ ID NO: 4893 - RNA, 20 nt, synthetic construct
  misc_feature 1..20: note = antisense sequence
  source 1..20: mol_type = other RNA
agtttactaagggttccaga

SEQ ID NO: 4894 - RNA, 20 nt, synthetic construct
  misc_feature 1..20: note = antisense sequence
  source 1..20: mol_type = other RNA
cagtttactaagggttccag

SEQ ID NO: 4895 - RNA, 20 nt, synthetic construct
  misc_feature 1..20: note = antisense sequence
  source 1..20: mol_type = other RNA
tcagtttactaagggttcca

SEQ ID NO: 4896 - RNA, 20 nt, synthetic construct
  misc_feature 1..20: note = antisense sequence
  source 1..20: mol_type = other RNA
gtcagtttactaagggttcc

SEQ ID NO: 4897 - RNA, 20 nt, synthetic construct
  misc_feature 1..20: note = antisense sequence
  source 1..20: mol_type = other RNA
agtcagtttactaagggttc

SEQ ID NO: 4898 - RNA, 20 nt, synthetic construct
  misc_feature 1..20: note = antisense sequence
  source 1..20: mol_type = other RNA
cagtcagtttactaagggtt

SEQ ID NO: 4899 - RNA, 20 nt, synthetic construct
  misc_feature 1..20: note = antisense sequence
  source 1..20: mol_type = other RNA
acagtcagtttactaagggt

SEQ ID NO: 4900 - RNA, 20 nt, synthetic construct
  misc_feature 1..20: note = antisense sequence
  source 1..20: mol_type = other RNA
caacagtcagtttactaagg

SEQ ID NO: 4901 - RNA, 20 nt, synthetic construct
  misc_feature 1..20: note = antisense sequence
  source 1..20: mol_type = other RNA
gagacaacagtcagtttact

SEQ ID NO: 4902 - RNA, 20 nt, synthetic construct
  misc_feature 1..20: note = antisense sequence
  source 1..20: mol_type = other RNA
ctttatgagacaacagtcag

SEQ ID NO: 4903 - RNA, 20 nt, synthetic construct
  misc_feature 1..20: note = antisense sequence
  source 1..20: mol_type = other RNA
ttgcattaggcttggttgta

SEQ ID NO: 4904 - RNA, 20 nt, synthetic construct
  misc_feature 1..20: note = antisense sequence
  source 1..20: mol_type = other RNA
gttgcattaggcttggttgt

SEQ ID NO: 4905 - RNA, 20 nt, synthetic construct
  misc_feature 1..20: note = antisense sequence
  source 1..20: mol_type = other RNA
agttgcattaggcttggttg

SEQ ID NO: 4906 - RNA, 20 nt, synthetic construct
  misc_feature 1..20: note = antisense sequence
  source 1..20: mol_type = other RNA
aagttgcattaggcttggtt

SEQ ID NO: 4907 - RNA, 20 nt, synthetic construct
  misc_feature 1..20: note = antisense sequence
  source 1..20: mol_type = other RNA
taagttgcattaggcttggt

SEQ ID NO: 4908 - RNA, 20 nt, synthetic construct
  misc_feature 1..20: note = antisense sequence
  source 1..20: mol_type = other RNA
ttaagttgcattaggcttgg

SEQ ID NO: 4909 - RNA, 20 nt, synthetic construct
  misc_feature 1..20: note = antisense sequence
  source 1..20: mol_type = other RNA
gtcctgtagagttatagaag

SEQ ID NO: 4910 - RNA, 20 nt, synthetic construct
  misc_feature 1..20: note = antisense sequence
  source 1..20: mol_type = other RNA
gcaagagcaaggtagtaaaa

SEQ ID NO: 4911 - RNA, 20 nt, synthetic construct
  misc_feature 1..20: note = antisense sequence
  source 1..20: mol_type = other RNA
agcaagagcaaggtagtaaa

SEQ ID NO: 4912 - RNA, 20 nt, synthetic construct
  misc_feature 1..20: note = antisense sequence
  source 1..20: mol_type = other RNA
tagcaagagcaaggtagtaa

SEQ ID NO: 4913 - RNA, 20 nt, synthetic construct
  misc_feature 1..20: note = antisense sequence
  source 1..20: mol_type = other RNA
ctagcaagagcaaggtagta

SEQ ID NO: 4914 - RNA, 20 nt, synthetic construct
  misc_feature 1..20: note = antisense sequence
  source 1..20: mol_type = other RNA
tctagcaagagcaaggtagt

SEQ ID NO: 4915 - RNA, 20 nt, synthetic construct
  misc_feature 1..20: note = antisense sequence
  source 1..20: mol_type = other RNA
gcccaggaaaagtaacatta

SEQ ID NO: 4916 - RNA, 20 nt, synthetic construct
  misc_feature 1..20: note = antisense sequence
  source 1..20: mol_type = other RNA
ggcacaattccacaaagtta

SEQ ID NO: 4917 - RNA, 20 nt, synthetic construct
  misc_feature 1..20: note = antisense sequence
  source 1..20: mol_type = other RNA
tggcacaattccacaaagtt

SEQ ID NO: 4918 - RNA, 20 nt, synthetic construct
  misc_feature 1..20: note = antisense sequence
  source 1..20: mol_type = other RNA
atggcacaattccacaaagt

SEQ ID NO: 4919 - RNA, 20 nt, synthetic construct
  misc_feature 1..20: note = antisense sequence
  source 1..20: mol_type = other RNA
aatggcacaattccacaaag

SEQ ID NO: 4920 - RNA, 20 nt, synthetic construct
  misc_feature 1..20: note = antisense sequence
  source 1..20: mol_type = other RNA
gtctttaatggcacaattcc

SEQ ID NO: 4921 - RNA, 20 nt, synthetic construct
  misc_feature 1..20: note = antisense sequence
  source 1..20: mol_type = other RNA
catccagccaactgcttttc

SEQ ID NO: 4922 - RNA, 20 nt, synthetic construct
  misc_feature 1..20: note = antisense sequence
  source 1..20: mol_type = other RNA
ttcatccagccaactgcttt

SEQ ID NO: 4923 - RNA, 20 nt, synthetic construct
  misc_feature 1..20: note = antisense sequence
  source 1..20: mol_type = other RNA
tactacttcatccagccaac

SEQ ID NO: 4924 - RNA, 20 nt, synthetic construct
  misc_feature 1..20: note = antisense sequence
  source 1..20: mol_type = other RNA
atactacttcatccagccaa

SEQ ID NO: 4925 - RNA, 20 nt, synthetic construct
  misc_feature 1..20: note = antisense sequence
  source 1..20: mol_type = other RNA
tatactacttcatccagcca

SEQ ID NO: 4926 - RNA, 20 nt, synthetic construct
  misc_feature 1..20: note = antisense sequence
  source 1..20: mol_type = other RNA
ctatactacttcatccagcc

SEQ ID NO: 4927 - RNA, 20 nt, synthetic construct
  misc_feature 1..20: note = antisense sequence
  source 1..20: mol_type = other RNA
gctaaagtacctgatcttca

SEQ ID NO: 4928 - RNA, 20 nt, synthetic construct
  misc_feature 1..20: note = antisense sequence
  source 1..20: mol_type = other RNA
cttcacatggactgtcttat

SEQ ID NO: 4929 - RNA, 20 nt, synthetic construct
  misc_feature 1..20: note = antisense sequence
  source 1..20: mol_type = other RNA
actgccttcacatggactgt

SEQ ID NO: 4930 - RNA, 20 nt, synthetic construct
  misc_feature 1..20: note = antisense sequence
  source 1..20: mol_type = other RNA
aactgccttcacatggactg

SEQ ID NO: 4931 - RNA, 20 nt, synthetic construct
  misc_feature 1..20: note = antisense sequence
  source 1..20: mol_type = other RNA
gaactgccttcacatggact

SEQ ID NO: 4932 - RNA, 20 nt, synthetic construct
  misc_feature 1..20: note = antisense sequence
  source 1..20: mol_type = other RNA
acaccaggaatgaactgcct

SEQ ID NO: 4933 - RNA, 20 nt, synthetic construct
  misc_feature 1..20: note = antisense sequence
  source 1..20: mol_type = other RNA
cacaccaggaatgaactgcc

SEQ ID NO: 4934 - RNA, 20 nt, synthetic construct
  misc_feature 1..20: note = antisense sequence
  source 1..20: mol_type = other RNA
caccacaccaggaatgaact

SEQ ID NO: 4935 - RNA, 20 nt, synthetic construct
  misc_feature 1..20: note = antisense sequence
  source 1..20: mol_type = other RNA
agccaccacaccaggaatga

SEQ ID NO: 4936 - RNA, 20 nt, synthetic construct
  misc_feature 1..20: note = antisense sequence
  source 1..20: mol_type = other RNA
gagccaccacaccaggaatg

SEQ ID NO: 4937 - RNA, 20 nt, synthetic construct
  misc_feature 1..20: note = antisense sequence
  source 1..20: mol_type = other RNA
agagccaccacaccaggaat

SEQ ID NO: 4938 - RNA, 20 nt, synthetic construct
  misc_feature 1..20: note = antisense sequence
  source 1..20: mol_type = other RNA
acacagggttatgctgacaa

SEQ ID NO: 4939 - RNA, 20 nt, synthetic construct
  misc_feature 1..20: note = antisense sequence
  source 1..20: mol_type = other RNA
aacacagggttatgctgaca

SEQ ID NO: 4940 - RNA, 20 nt, synthetic construct
  misc_feature 1..20: note = antisense sequence
  source 1..20: mol_type = other RNA
gatgaaagtaacacagggtt

SEQ ID NO: 4941 - RNA, 20 nt, synthetic construct
  misc_feature 1..20: note = antisense sequence
  source 1..20: mol_type = other RNA
agatgaaagtaacacagggt

SEQ ID NO: 4942 - RNA, 20 nt, synthetic construct
  misc_feature 1..20: note = antisense sequence
  source 1..20: mol_type = other RNA
aagatgaaagtaacacaggg

SEQ ID NO: 4943 - RNA, 20 nt, synthetic construct
  misc_feature 1..20: note = antisense sequence
  source 1..20: mol_type = other RNA
agaagtgatgtgctaggtgc

SEQ ID NO: 4944 - RNA, 20 nt, synthetic construct
  misc_feature 1..20: note = antisense sequence
  source 1..20: mol_type = other RNA
gaagtgaacttgaacagaag

SEQ ID NO: 4945 - RNA, 20 nt, synthetic construct
  misc_feature 1..20: note = antisense sequence
  source 1..20: mol_type = other RNA
ggactatgaagtgaacttga

SEQ ID NO: 4946 - RNA, 20 nt, synthetic construct
  misc_feature 1..20: note = antisense sequence
  source 1..20: mol_type = other RNA
tggactatgaagtgaacttg

SEQ ID NO: 4947 - RNA, 20 nt, synthetic construct
  misc_feature 1..20: note = antisense sequence
  source 1..20: mol_type = other RNA
gttggactatgaagtgaact

SEQ ID NO: 4948 - RNA, 20 nt, synthetic construct
  misc_feature 1..20: note = antisense sequence
  source 1..20: mol_type = other RNA
tgttggactatgaagtgaac

SEQ ID NO: 4949 - RNA, 20 nt, synthetic construct
  misc_feature 1..20: note = antisense sequence
  source 1..20: mol_type = other RNA
ctgttggactatgaagtgaa

SEQ ID NO: 4950 - RNA, 20 nt, synthetic construct
  misc_feature 1..20: note = antisense sequence
  source 1..20: mol_type = other RNA
cctgttggactatgaagtga

SEQ ID NO: 4951 - RNA, 20 nt, synthetic construct
  misc_feature 1..20: note = antisense sequence
  source 1..20: mol_type = other RNA
ccctgttggactatgaagtg

SEQ ID NO: 4952 - RNA, 20 nt, synthetic construct
  misc_feature 1..20: note = antisense sequence
  source 1..20: mol_type = other RNA
tgccctgttggactatgaag

SEQ ID NO: 4953 - RNA, 20 nt, synthetic construct
  misc_feature 1..20: note = antisense sequence
  source 1..20: mol_type = other RNA
ctgccctgttggactatgaa

SEQ ID NO: 4954 - RNA, 20 nt, synthetic construct
  misc_feature 1..20: note = antisense sequence
  source 1..20: mol_type = other RNA
aagacaggcttcaactgccc

SEQ ID NO: 4955 - RNA, 20 nt, synthetic construct
  misc_feature 1..20: note = antisense sequence
  source 1..20: mol_type = other RNA
taagacaggcttcaactgcc

SEQ ID NO: 4956 - RNA, 20 nt, synthetic construct
  misc_feature 1..20: note = antisense sequence
  source 1..20: mol_type = other RNA
ctaagacaggcttcaactgc

SEQ ID NO: 4957 - RNA, 20 nt, synthetic construct
  misc_feature 1..20: note = antisense sequence
  source 1..20: mol_type = other RNA
gactaagacaggcttcaact

SEQ ID NO: 4958 - RNA, 20 nt, synthetic construct
  misc_feature 1..20: note = antisense sequence
  source 1..20: mol_type = other RNA
tggcaactaagcagactaag

SEQ ID NO: 4959 - RNA, 20 nt, synthetic construct
  misc_feature 1..20: note = antisense sequence
  source 1..20: mol_type = other RNA
atggcaactaagcagactaa

SEQ ID NO: 4960 - RNA, 20 nt, synthetic construct
  misc_feature 1..20: note = antisense sequence
  source 1..20: mol_type = other RNA
tatggcaactaagcagacta

SEQ ID NO: 4961 - RNA, 20 nt, synthetic construct
  misc_feature 1..20: note = antisense sequence
  source 1..20: mol_type = other RNA
ctatggcaactaagcagact

SEQ ID NO: 4962 - RNA, 20 nt, synthetic construct
  misc_feature 1..20: note = antisense sequence
  source 1..20: mol_type = other RNA
gctatggcaactaagcagac

SEQ ID NO: 4963 - RNA, 20 nt, synthetic construct
  misc_feature 1..20: note = antisense sequence
  source 1..20: mol_type = other RNA
ttctgctatggcaactaagc

SEQ ID NO: 4964 - RNA, 20 nt, synthetic construct
  misc_feature 1..20: note = antisense sequence
  source 1..20: mol_type = other RNA
attctgctatggcaactaag

SEQ ID NO: 4965 - RNA, 20 nt, synthetic construct
  misc_feature 1..20: note = antisense sequence
  source 1..20: mol_type = other RNA
tgttatattagccacccagt

SEQ ID NO: 4966 - RNA, 20 nt, synthetic construct
  misc_feature 1..20: note = antisense sequence
  source 1..20: mol_type = other RNA
ctgttatattagccacccag

SEQ ID NO: 4967 - RNA, 20 nt, synthetic construct
  misc_feature 1..20: note = antisense sequence
  source 1..20: mol_type = other RNA
tctgttatattagccaccca

SEQ ID NO: 4968 - RNA, 20 nt, synthetic construct
  misc_feature 1..20: note = antisense sequence
  source 1..20: mol_type = other RNA
ttctgttatattagccaccc

SEQ ID NO: 4969 - RNA, 20 nt, synthetic construct
  misc_feature 1..20: note = antisense sequence
  source 1..20: mol_type = other RNA
gagcagagggagaatacatt

SEQ ID NO: 4970 - RNA, 20 nt, synthetic construct
  misc_feature 1..20: note = antisense sequence
  source 1..20: mol_type = other RNA
tagagcagagggagaataca

SEQ ID NO: 4971 - RNA, 20 nt, synthetic construct
  misc_feature 1..20: note = antisense sequence
  source 1..20: mol_type = other RNA
ctagagcagagggagaatac

SEQ ID NO: 4972 - RNA, 20 nt, synthetic construct
  misc_feature 1..20: note = antisense sequence
  source 1..20: mol_type = other RNA
ttttggccttctagcttcta

SEQ ID NO: 4973 - RNA, 20 nt, synthetic construct
  misc_feature 1..20: note = antisense sequence
  source 1..20: mol_type = other RNA
attttggccttctagcttct

SEQ ID NO: 4974 - RNA, 20 nt, synthetic construct
  misc_feature 1..20: note = antisense sequence
  source 1..20: mol_type = other RNA
ggatacggcaagaagatggc

SEQ ID NO: 4975 - RNA, 20 nt, synthetic construct
  misc_feature 1..20: note = antisense sequence
  source 1..20: mol_type = other RNA
aggatacggcaagaagatgg

SEQ ID NO: 4976 - RNA, 20 nt, synthetic construct
  misc_feature 1..20: note = antisense sequence
  source 1..20: mol_type = other RNA
gaggatacggcaagaagatg

SEQ ID NO: 4977 - RNA, 20 nt, synthetic construct
  misc_feature 1..20: note = antisense sequence
  source 1..20: mol_type = other RNA
tgaggatacggcaagaagat

SEQ ID NO: 4978 - RNA, 20 nt, synthetic construct
  misc_feature 1..20: note = antisense sequence
  source 1..20: mol_type = other RNA
gtgaggatacggcaagaaga

SEQ ID NO: 4979 - RNA, 20 nt, synthetic construct
  misc_feature 1..20: note = antisense sequence
  source 1..20: mol_type = other RNA
tgtctctctccactatgtac

SEQ ID NO: 4980 - RNA, 20 nt, synthetic construct
  misc_feature 1..20: note = antisense sequence
  source 1..20: mol_type = other RNA
ctgtctctctccactatgta

SEQ ID NO: 4981 - RNA, 20 nt, synthetic construct
  misc_feature 1..20: note = antisense sequence
  source 1..20: mol_type = other RNA
tctgtctctctccactatgt

SEQ ID NO: 4982 - RNA, 20 nt, synthetic construct
  misc_feature 1..20: note = antisense sequence
  source 1..20: mol_type = other RNA
ctctgtctctctccactatg

SEQ ID NO: 4983 - RNA, 20 nt, synthetic construct
  misc_feature 1..20: note = antisense sequence
  source 1..20: mol_type = other RNA
tctctgtctctctccactat

SEQ ID NO: 4984 - RNA, 20 nt, synthetic construct
  misc_feature 1..20: note = antisense sequence
  source 1..20: mol_type = other RNA
ctctctgtctctctccacta

SEQ ID NO: 4985 - RNA, 20 nt, synthetic construct
  misc_feature 1..20: note = antisense sequence
  source 1..20: mol_type = other RNA
tctctctgtctctctccact

SEQ ID NO: 4986 - RNA, 20 nt, synthetic construct
  misc_feature 1..20: note = antisense sequence
  source 1..20: mol_type = other RNA
ttctctctgtctctctccac

SEQ ID NO: 4987 - RNA, 20 nt, synthetic construct
  misc_feature 1..20: note = antisense sequence
  source 1..20: mol_type = other RNA
tttctctctgtctctctcca

SEQ ID NO: 4988 - RNA, 20 nt, synthetic construct
  misc_feature 1..20: note = antisense sequence
  source 1..20: mol_type = other RNA
ctttctctctgtctctctcc

SEQ ID NO: 4989 - RNA, 20 nt, synthetic construct
  misc_feature 1..20: note = antisense sequence
  source 1..20: mol_type = other RNA
cctttctctctgtctctctc

SEQ ID NO: 4990 - RNA, 20 nt, synthetic construct
  misc_feature 1..20: note = antisense sequence
  source 1..20: mol_type = other RNA
ccctttctctctgtctctct

SEQ ID NO: 4991 - RNA, 20 nt, synthetic construct
  misc_feature 1..20: note = antisense sequence
  source 1..20: mol_type = other RNA
tctccctctctctctctcca

SEQ ID NO: 4992 - RNA, 20 nt, synthetic construct
  misc_feature 1..20: note = antisense sequence
  source 1..20: mol_type = other RNA
ctctccctctctctctctcc

SEQ ID NO: 4993 - RNA, 20 nt, synthetic construct
  misc_feature 1..20: note = antisense sequence
  source 1..20: mol_type = other RNA
tctctgtctctctctccctc

SEQ ID NO: 4994 - RNA, 20 nt, synthetic construct
  misc_feature 1..20: note = antisense sequence
  source 1..20: mol_type = other RNA
ctctctgtctctctctccct

SEQ ID NO: 4995 - RNA, 20 nt, synthetic construct
  misc_feature 1..20: note = antisense sequence
  source 1..20: mol_type = other RNA
tctctctgtctctctctccc

SEQ ID NO: 4996 - RNA, 20 nt, synthetic construct
  misc_feature 1..20: note = antisense sequence
  source 1..20: mol_type = other RNA
ctctctctgtctctctctcc

SEQ ID NO: 4997 - RNA, 20 nt, synthetic construct
  misc_feature 1..20: note = antisense sequence
  source 1..20: mol_type = other RNA
tctctctctgtctctctctc

SEQ ID NO: 4998 - RNA, 20 nt, synthetic construct
  misc_feature 1..20: note = antisense sequence
  source 1..20: mol_type = other RNA
ttctctctctgtctctctct

SEQ ID NO: 4999 - RNA, 20 nt, synthetic construct
  misc_feature 1..20: note = antisense sequence
  source 1..20: mol_type = other RNA
tttctctctctgtctctctc

SEQ ID NO: 5000 - RNA, 20 nt, synthetic construct
  misc_feature 1..20: note = antisense sequence
  source 1..20: mol_type = other RNA
ttttctctctctgtctctct

SEQ ID NO: 5001 - RNA, 20 nt, synthetic construct
  misc_feature 1..20: note = antisense sequence
  source 1..20: mol_type = other RNA
ctctctctctttctctttct

SEQ ID NO: 5002 - RNA, 20 nt, synthetic construct
  misc_feature 1..20: note = antisense sequence
  source 1..20: mol_type = other RNA
tctctctctctttctctttc

SEQ ID NO: 5003 - RNA, 20 nt, synthetic construct
  misc_feature 1..20: note = antisense sequence
  source 1..20: mol_type = other RNA
ctttctctctctctttctct

SEQ ID NO: 5004 - RNA, 20 nt, synthetic construct
  misc_feature 1..20: note = antisense sequence
  source 1..20: mol_type = other RNA
tctttctctctctctttctc

SEQ ID NO: 5005 - RNA, 20 nt, synthetic construct
  misc_feature 1..20: note = antisense sequence
  source 1..20: mol_type = other RNA
ctctttctctctctctttct

SEQ ID NO: 5006 - RNA, 20 nt, synthetic construct
  misc_feature 1..20: note = antisense sequence
  source 1..20: mol_type = other RNA
tctctttctctctctctttc

SEQ ID NO: 5007 - RNA, 20 nt, synthetic construct
  misc_feature 1..20: note = antisense sequence
  source 1..20: mol_type = other RNA
ctctctttctctctctcttt

SEQ ID NO: 5008 - RNA, 20 nt, synthetic construct
  misc_feature 1..20: note = antisense sequence
  source 1..20: mol_type = other RNA
tctctctttctctctctctt

SEQ ID NO: 5009 - RNA, 20 nt, synthetic construct
  misc_feature 1..20: note = antisense sequence
  source 1..20: mol_type = other RNA
ttctctctttctctctctct

SEQ ID NO: 5010 - RNA, 20 nt, synthetic construct
  misc_feature 1..20: note = antisense sequence
  source 1..20: mol_type = other RNA
cttctctctttctctctctc

SEQ ID NO: 5011 - RNA, 20 nt, synthetic construct
  misc_feature 1..20: note = antisense sequence
  source 1..20: mol_type = other RNA
tcttctctctttctctctct

SEQ ID NO: 5012 - RNA, 20 nt, synthetic construct
  misc_feature 1..20: note = antisense sequence
  source 1..20: mol_type = other RNA
ttcttctctctttctctctc

SEQ ID NO: 5013 - RNA, 20 nt, synthetic construct
  misc_feature 1..20: note = antisense sequence
  source 1..20: mol_type = other RNA
ctctctctctctttctttct

SEQ ID NO: 5014 - RNA, 20 nt, synthetic construct
  misc_feature 1..20: note = antisense sequence
  source 1..20: mol_type = other RNA
tctctctctctctttctttc

SEQ ID NO: 5015 - RNA, 20 nt, synthetic construct
  misc_feature 1..20: note = antisense sequence
  source 1..20: mol_type = other RNA
cttctctctctctctttctt

SEQ ID NO: 5016 - RNA, 20 nt, synthetic construct
  misc_feature 1..20: note = antisense sequence
  source 1..20: mol_type = other RNA
tcttctctctctctctttct

SEQ ID NO: 5017 - RNA, 20 nt, synthetic construct
  misc_feature 1..20: note = antisense sequence
  source 1..20: mol_type = other RNA
ttcttctctctctctctttc

SEQ ID NO: 5018 - RNA, 20 nt, synthetic construct
  misc_feature 1..20: note = antisense sequence
  source 1..20: mol_type = other RNA
ctttcttctctctctctctt

SEQ ID NO: 5019 - RNA, 20 nt, synthetic construct
  misc_feature 1..20: note = antisense sequence
  source 1..20: mol_type = other RNA
tctctctctttcttctctct

SEQ ID NO: 5020 - RNA, 20 nt, synthetic construct
  misc_feature 1..20: note = antisense sequence
  source 1..20: mol_type = other RNA
ttctctctctttcttctctc

SEQ ID NO: 5021 - RNA, 20 nt, synthetic construct
  misc_feature 1..20: note = antisense sequence
  source 1..20: mol_type = other RNA
ctttctctctctttcttctc

SEQ ID NO: 5022 - RNA, 20 nt, synthetic construct
  misc_feature 1..20: note = antisense sequence
  source 1..20: mol_type = other RNA
ccctttctttcttctttctc

SEQ ID NO: 5023 - RNA, 20 nt, synthetic construct
  misc_feature 1..20: note = antisense sequence
  source 1..20: mol_type = other RNA
ctccctttctttcttctttc

SEQ ID NO: 5024 - RNA, 20 nt, synthetic construct
  misc_feature 1..20: note = antisense sequence
  source 1..20: mol_type = other RNA
ctctccctttctttcttctt

SEQ ID NO: 5025 - RNA, 20 nt, synthetic construct
  misc_feature 1..20: note = antisense sequence
  source 1..20: mol_type = other RNA
tgtctttctttctctccctt

SEQ ID NO: 5026 - RNA, 20 nt, synthetic construct
  misc_feature 1..20: note = antisense sequence
  source 1..20: mol_type = other RNA
ctgtctttctttctctccct

SEQ ID NO: 5027 - RNA, 20 nt, synthetic construct
  misc_feature 1..20: note = antisense sequence
  source 1..20: mol_type = other RNA
tctgtctttctttctctccc

SEQ ID NO: 5028 - RNA, 20 nt, synthetic construct
  misc_feature 1..20: note = antisense sequence
  source 1..20: mol_type = other RNA
tctctccttccttccttccc

SEQ ID NO: 5029 - RNA, 20 nt, synthetic construct
  misc_feature 1..20: note = antisense sequence
  source 1..20: mol_type = other RNA
ttctctccttccttccttcc

SEQ ID NO: 5030 - RNA, 20 nt, synthetic construct
  misc_feature 1..20: note = antisense sequence
  source 1..20: mol_type = other RNA
ctctctctttctctccttcc

SEQ ID NO: 5031 - RNA, 20 nt, synthetic construct
  misc_feature 1..20: note = antisense sequence
  source 1..20: mol_type = other RNA
tctctctctttctctccttc

SEQ ID NO: 5032 - RNA, 20 nt, synthetic construct
  misc_feature 1..20: note = antisense sequence
  source 1..20: mol_type = other RNA
ctctctctctttctctcctt

SEQ ID NO: 5033 - RNA, 20 nt, synthetic construct
  misc_feature 1..20: note = antisense sequence
  source 1..20: mol_type = other RNA
tctctctctctttctctcct

SEQ ID NO: 5034 - RNA, 20 nt, synthetic construct
  misc_feature 1..20: note = antisense sequence
  source 1..20: mol_type = other RNA
ctctctctctctttctctcc

SEQ ID NO: 5035 - RNA, 20 nt, synthetic construct
  misc_feature 1..20: note = antisense sequence
  source 1..20: mol_type = other RNA
tctctctctctctttctctc

SEQ ID NO: 5036 - RNA, 20 nt, synthetic construct
  misc_feature 1..20: note = antisense sequence
  source 1..20: mol_type = other RNA
atctctctctctctttctct

SEQ ID NO: 5037 - RNA, 20 nt, synthetic construct
  misc_feature 1..20: note = antisense sequence
  source 1..20: mol_type = other RNA
gatctctctctctctttctc

SEQ ID NO: 5038 - RNA, 20 nt, synthetic construct
  misc_feature 1..20: note = antisense sequence
  source 1..20: mol_type = other RNA
aaagaaagggataccagatc

SEQ ID NO: 5039 - RNA, 20 nt, synthetic construct
  misc_feature 1..20: note = antisense sequence
  source 1..20: mol_type = other RNA
atgaaatcacaaccactggg

SEQ ID NO: 5040 - RNA, 20 nt, synthetic construct
  misc_feature 1..20: note = antisense sequence
  source 1..20: mol_type = other RNA
aatgaaatcacaaccactgg

SEQ ID NO: 5041 - RNA, 20 nt, synthetic construct
  misc_feature 1..20: note = antisense sequence
  source 1..20: mol_type = other RNA
cgctaaagtgacagcatttg

SEQ ID NO: 5042 - RNA, 20 nt, synthetic construct
  misc_feature 1..20: note = antisense sequence
  source 1..20: mol_type = other RNA
accgctaaagtgacagcatt

SEQ ID NO: 5043 - RNA, 20 nt, synthetic construct
  misc_feature 1..20: note = antisense sequence
  source 1..20: mol_type = other RNA
aaccgctaaagtgacagcat

SEQ ID NO: 5044 - RNA, 20 nt, synthetic construct
  misc_feature 1..20: note = antisense sequence
  source 1..20: mol_type = other RNA
taaccgctaaagtgacagca

SEQ ID NO: 5045 - RNA, 20 nt, synthetic construct
  misc_feature 1..20: note = antisense sequence
  source 1..20: mol_type = other RNA
ctaaccgctaaagtgacagc

SEQ ID NO: 5046 - RNA, 20 nt, synthetic construct
  misc_feature 1..20: note = antisense sequence
  source 1..20: mol_type = other RNA
cctaaccgctaaagtgacag

SEQ ID NO: 5047 - RNA, 20 nt, synthetic construct
  misc_feature 1..20: note = antisense sequence
  source 1..20: mol_type = other RNA
ccctaaccgctaaagtgaca

SEQ ID NO: 5048 - RNA, 20 nt, synthetic construct
  misc_feature 1..20: note = antisense sequence
  source 1..20: mol_type = other RNA
gccctaaccgctaaagtgac

SEQ ID NO: 5049 - RNA, 20 nt, synthetic construct
  misc_feature 1..20: note = antisense sequence
  source 1..20: mol_type = other RNA
agccctaaccgctaaagtga

SEQ ID NO: 5050 - RNA, 20 nt, synthetic construct
  misc_feature 1..20: note = antisense sequence
  source 1..20: mol_type = other RNA
aagccctaaccgctaaagtg

SEQ ID NO: 5051 - RNA, 20 nt, synthetic construct
  misc_feature 1..20: note = antisense sequence
  source 1..20: mol_type = other RNA
gaagccctaaccgctaaagt

SEQ ID NO: 5052 - RNA, 20 nt, synthetic construct
  misc_feature 1..20: note = antisense sequence
  source 1..20: mol_type = other RNA
tgaagccctaaccgctaaag

SEQ ID NO: 5053 - RNA, 20 nt, synthetic construct
  misc_feature 1..20: note = antisense sequence
  source 1..20: mol_type = other RNA
ttgaagccctaaccgctaaa

SEQ ID NO: 5054 - RNA, 20 nt, synthetic construct
  misc_feature 1..20: note = antisense sequence
  source 1..20: mol_type = other RNA
ttagcgttcactcaatagag

SEQ ID NO: 5055 - RNA, 20 nt, synthetic construct
  misc_feature 1..20: note = antisense sequence
  source 1..20: mol_type = other RNA
gttagcgttcactcaataga

SEQ ID NO: 5056 - RNA, 20 nt, synthetic construct
  misc_feature 1..20: note = antisense sequence
  source 1..20: mol_type = other RNA
agttagcgttcactcaatag

SEQ ID NO: 5057 - RNA, 20 nt, synthetic construct
  misc_feature 1..20: note = antisense sequence
  source 1..20: mol_type = other RNA
tgtccttctctcagttatga

SEQ ID NO: 5058 - RNA, 20 nt, synthetic construct
  misc_feature 1..20: note = antisense sequence
  source 1..20: mol_type = other RNA
ttgtccttctctcagttatg

SEQ ID NO: 5059 - RNA, 20 nt, synthetic construct
  misc_feature 1..20: note = antisense sequence
  source 1..20: mol_type = other RNA
tgcagaactgattcaactca

SEQ ID NO: 5060 - RNA, 20 nt, synthetic construct
  misc_feature 1..20: note = antisense sequence
  source 1..20: mol_type = other RNA
gtgcagaactgattcaactc

SEQ ID NO: 5061 - RNA, 20 nt, synthetic construct
  misc_feature 1..20: note = antisense sequence
  source 1..20: mol_type = other RNA
tgtgcagaactgattcaact

SEQ ID NO: 5062 - RNA, 20 nt, synthetic construct
  misc_feature 1..20: note = antisense sequence
  source 1..20: mol_type = other RNA
ccctgtgcagaactgattca

SEQ ID NO: 5063 - RNA, 20 nt, synthetic construct
  misc_feature 1..20: note = antisense sequence
  source 1..20: mol_type = other RNA
gtggaagtattgtatgggat

SEQ ID NO: 5064 - RNA, 20 nt, synthetic construct
  misc_feature 1..20: note = antisense sequence
  source 1..20: mol_type = other RNA
agtggaagtattgtatggga

SEQ ID NO: 5065 - RNA, 20 nt, synthetic construct
  misc_feature 1..20: note = antisense sequence
  source 1..20: mol_type = other RNA
aagtggaagtattgtatggg

SEQ ID NO: 5066 - RNA, 20 nt, synthetic construct
  misc_feature 1..20: note = antisense sequence
  source 1..20: mol_type = other RNA
tagatagcatagctgtacga

SEQ ID NO: 5067 - RNA, 20 nt, synthetic construct
  misc_feature 1..20: note = antisense sequence
  source 1..20: mol_type = other RNA
ggtagatagcatagctgtac

SEQ ID NO: 5068 - RNA, 20 nt, synthetic construct
  misc_feature 1..20: note = antisense sequence
  source 1..20: mol_type = other RNA
aggtagatagcatagctgta

SEQ ID NO: 5069 - RNA, 20 nt, synthetic construct
  misc_feature 1..20: note = antisense sequence
  source 1..20: mol_type = other RNA
caggtagatagcatagctgt

SEQ ID NO: 5070 - RNA, 20 nt, synthetic construct
  misc_feature 1..20: note = antisense sequence
  source 1..20: mol_type = other RNA
acaggtagatagcatagctg

SEQ ID NO: 5071 - RNA, 20 nt, synthetic construct
  misc_feature 1..20: note = antisense sequence
  source 1..20: mol_type = other RNA
caacaggtagatagcatagc

SEQ ID NO: 5072 - RNA, 20 nt, synthetic construct
  misc_feature 1..20: note = antisense sequence
  source 1..20: mol_type = other RNA
acaacaggtagatagcatag

SEQ ID NO: 5073 - RNA, 20 nt, synthetic construct
  misc_feature 1..20: note = antisense sequence
  source 1..20: mol_type = other RNA
gacaacaggtagatagcata

SEQ ID NO: 5074 - RNA, 20 nt, synthetic construct
  misc_feature 1..20: note = antisense sequence
  source 1..20: mol_type = other RNA
agacaacaggtagatagcat

SEQ ID NO: 5075 - RNA, 20 nt, synthetic construct
  misc_feature 1..20: note = antisense sequence
  source 1..20: mol_type = other RNA
gaagacaacaggtagatagc

SEQ ID NO: 5076 - RNA, 20 nt, synthetic construct
  misc_feature 1..20: note = antisense sequence
  source 1..20: mol_type = other RNA
agaagacaacaggtagatag

SEQ ID NO: 5077 - RNA, 20 nt, synthetic construct
  misc_feature 1..20: note = antisense sequence
  source 1..20: mol_type = other RNA
cagaagacaacaggtagata

SEQ ID NO: 5078 - RNA, 20 nt, synthetic construct
  misc_feature 1..20: note = antisense sequence
  source 1..20: mol_type = other RNA
ccagaagacaacaggtagat

SEQ ID NO: 5079 - RNA, 20 nt, synthetic construct
  misc_feature 1..20: note = antisense sequence
  source 1..20: mol_type = other RNA
cagccagaagacaacaggta

SEQ ID NO: 5080 - RNA, 20 nt, synthetic construct
  misc_feature 1..20: note = antisense sequence
  source 1..20: mol_type = other RNA
cacagccagaagacaacagg

SEQ ID NO: 5081 - RNA, 20 nt, synthetic construct
  misc_feature 1..20: note = antisense sequence
  source 1..20: mol_type = other RNA
tacacagccagaagacaaca

SEQ ID NO: 5082 - RNA, 20 nt, synthetic construct
  misc_feature 1..20: note = antisense sequence
  source 1..20: mol_type = other RNA
gtacacagccagaagacaac

SEQ ID NO: 5083 - RNA, 20 nt, synthetic construct
  misc_feature 1..20: note = antisense sequence
  source 1..20: mol_type = other RNA
gcacagttctggatatgatt

SEQ ID NO: 5084 - RNA, 20 nt, synthetic construct
  misc_feature 1..20: note = antisense sequence
  source 1..20: mol_type = other RNA
agcacagttctggatatgat

SEQ ID NO: 5085 - RNA, 20 nt, synthetic construct
  misc_feature 1..20: note = antisense sequence
  source 1..20: mol_type = other RNA
tagcacagttctggatatga

SEQ ID NO: 5086 - RNA, 20 nt, synthetic construct
  misc_feature 1..20: note = antisense sequence
  source 1..20: mol_type = other RNA
acgcctagcacagttctgga

SEQ ID NO: 5087 - RNA, 20 nt, synthetic construct
  misc_feature 1..20: note = antisense sequence
  source 1..20: mol_type = other RNA
tcaacgcctagcacagttct

SEQ ID NO: 5088 - RNA, 20 nt, synthetic construct
  misc_feature 1..20: note = antisense sequence
  source 1..20: mol_type = other RNA
tctcaacgcctagcacagtt

SEQ ID NO: 5089 - RNA, 20 nt, synthetic construct
  misc_feature 1..20: note = antisense sequence
  source 1..20: mol_type = other RNA
ttctcattctcaacgcctag

SEQ ID NO: 5090 - RNA, 20 nt, synthetic construct
  misc_feature 1..20: note = antisense sequence
  source 1..20: mol_type = other RNA
attctcattctcaacgccta

SEQ ID NO: 5091 - RNA, 20 nt, synthetic construct
  misc_feature 1..20: note = antisense sequence
  source 1..20: mol_type = other RNA
cccataggatgtatcgcttt

SEQ ID NO: 5092 - RNA, 20 nt, synthetic construct
  misc_feature 1..20: note = antisense sequence
  source 1..20: mol_type = other RNA
tcccataggatgtatcgctt

SEQ ID NO: 5093 - RNA, 20 nt, synthetic construct
  misc_feature 1..20: note = antisense sequence
  source 1..20: mol_type = other RNA
tcttagcctggtgaactctc

SEQ ID NO: 5094 - RNA, 20 nt, synthetic construct
  misc_feature 1..20: note = antisense sequence
  source 1..20: mol_type = other RNA
ttcttagcctggtgaactct

SEQ ID NO: 5095 - RNA, 20 nt, synthetic construct
  misc_feature 1..20: note = antisense sequence
  source 1..20: mol_type = other RNA
aattcttagcctggtgaact

SEQ ID NO: 5096 - RNA, 20 nt, synthetic construct
  misc_feature 1..20: note = antisense sequence
  source 1..20: mol_type = other RNA
caattcttagcctggtgaac

SEQ ID NO: 5097 - RNA, 20 nt, synthetic construct
  misc_feature 1..20: note = antisense sequence
  source 1..20: mol_type = other RNA
ttcaattcttagcctggtga

SEQ ID NO: 5098 - RNA, 20 nt, synthetic construct
  misc_feature 1..20: note = antisense sequence
  source 1..20: mol_type = other RNA
cttcaattcttagcctggtg

SEQ ID NO: 5099 - RNA, 20 nt, synthetic construct
  misc_feature 1..20: note = antisense sequence
  source 1..20: mol_type = other RNA
tcttcaattcttagcctggt

SEQ ID NO: 5100 - RNA, 20 nt, synthetic construct
  misc_feature 1..20: note = antisense sequence
  source 1..20: mol_type = other RNA
cctttcttcaattcttagcc

SEQ ID NO: 5101 - RNA, 20 nt, synthetic construct
  misc_feature 1..20: note = antisense sequence
  source 1..20: mol_type = other RNA
agttccctgaaacatcttgt

SEQ ID NO: 5102 - RNA, 20 nt, synthetic construct
  misc_feature 1..20: note = antisense sequence
  source 1..20: mol_type = other RNA
cagttccctgaaacatcttg

SEQ ID NO: 5103 - RNA, 20 nt, synthetic construct
  misc_feature 1..20: note = antisense sequence
  source 1..20: mol_type = other RNA
gcagttccctgaaacatctt

SEQ ID NO: 5104 - RNA, 20 nt, synthetic construct
  misc_feature 1..20: note = antisense sequence
  source 1..20: mol_type = other RNA
cgcagttccctgaaacatct

SEQ ID NO: 5105 - RNA, 20 nt, synthetic construct
  misc_feature 1..20: note = antisense sequence
  source 1..20: mol_type = other RNA
gcgcagttccctgaaacatc

SEQ ID NO: 5106 - RNA, 20 nt, synthetic construct
  misc_feature 1..20: note = antisense sequence
  source 1..20: mol_type = other RNA
ggccacccttcaatatgcgc

SEQ ID NO: 5107 - RNA, 20 nt, synthetic construct
  misc_feature 1..20: note = antisense sequence
  source 1..20: mol_type = other RNA
tcagaatgtcaagtaatggc

SEQ ID NO: 5108 - RNA, 20 nt, synthetic construct
  misc_feature 1..20: note = antisense sequence
  source 1..20: mol_type = other RNA
gctcagaatgtcaagtaatg

SEQ ID NO: 5109 - RNA, 20 nt, synthetic construct
  misc_feature 1..20: note = antisense sequence
  source 1..20: mol_type = other RNA
ggctcagaatgtcaagtaat

SEQ ID NO: 5110 - RNA, 20 nt, synthetic construct
  misc_feature 1..20: note = antisense sequence
  source 1..20: mol_type = other RNA
tggctcagaatgtcaagtaa

SEQ ID NO: 5111 - RNA, 20 nt, synthetic construct
  misc_feature 1..20: note = antisense sequence
  source 1..20: mol_type = other RNA
tcattactactctggctcag

SEQ ID NO: 5112 - RNA, 20 nt, synthetic construct
  misc_feature 1..20: note = antisense sequence
  source 1..20: mol_type = other RNA
tctcattactactctggctc

SEQ ID NO: 5113 - RNA, 20 nt, synthetic construct
  misc_feature 1..20: note = antisense sequence
  source 1..20: mol_type = other RNA
atctcattactactctggct

SEQ ID NO: 5114 - RNA, 20 nt, synthetic construct
  misc_feature 1..20: note = antisense sequence
  source 1..20: mol_type = other RNA
ccaatctcattactactctg

SEQ ID NO: 5115 - RNA, 20 nt, synthetic construct
  misc_feature 1..20: note = antisense sequence
  source 1..20: mol_type = other RNA
gacctttccaatctcattac

SEQ ID NO: 5116 - RNA, 20 nt, synthetic construct
  misc_feature 1..20: note = antisense sequence
  source 1..20: mol_type = other RNA
gggctcatttgacctttcca

SEQ ID NO: 5117 - RNA, 20 nt, synthetic construct
  misc_feature 1..20: note = antisense sequence
  source 1..20: mol_type = other RNA
cccattaaaatgagggctca

SEQ ID NO: 5118 - RNA, 20 nt, synthetic construct
  misc_feature 1..20: note = antisense sequence
  source 1..20: mol_type = other RNA
acccattaaaatgagggctc

SEQ ID NO: 5119 - RNA, 20 nt, synthetic construct
  misc_feature 1..20: note = antisense sequence
  source 1..20: mol_type = other RNA
gcaccattttagacccatta

SEQ ID NO: 5120 - RNA, 20 nt, synthetic construct
  misc_feature 1..20: note = antisense sequence
  source 1..20: mol_type = other RNA
agcaccattttagacccatt

SEQ ID NO: 5121 - RNA, 20 nt, synthetic construct
  misc_feature 1..20: note = antisense sequence
  source 1..20: mol_type = other RNA
aagcaccattttagacccat

SEQ ID NO: 5122 - RNA, 20 nt, synthetic construct
  misc_feature 1..20: note = antisense sequence
  source 1..20: mol_type = other RNA
taagcaccattttagaccca

SEQ ID NO: 5123 - RNA, 20 nt, synthetic construct
  misc_feature 1..20: note = antisense sequence
  source 1..20: mol_type = other RNA
ttaagcaccattttagaccc

SEQ ID NO: 5124 - RNA, 20 nt, synthetic construct
  misc_feature 1..20: note = antisense sequence
  source 1..20: mol_type = other RNA
caataaatgctgtcccactt

SEQ ID NO: 5125 - RNA, 20 nt, synthetic construct
  misc_feature 1..20: note = antisense sequence
  source 1..20: mol_type = other RNA
ccaataaatgctgtcccact

SEQ ID NO: 5126 - RNA, 20 nt, synthetic construct
  misc_feature 1..20: note = antisense sequence
  source 1..20: mol_type = other RNA
cccaataaatgctgtcccac

SEQ ID NO: 5127 - RNA, 20 nt, synthetic construct
  misc_feature 1..20: note = antisense sequence
  source 1..20: mol_type = other RNA
tcacccaataaatgctgtcc

SEQ ID NO: 5128 - RNA, 20 nt, synthetic construct
  misc_feature 1..20: note = antisense sequence
  source 1..20: mol_type = other RNA
tcatcacccaataaatgctg

SEQ ID NO: 5129 - RNA, 20 nt, synthetic construct
  misc_feature 1..20: note = antisense sequence
  source 1..20: mol_type = other RNA
cttgtgacatcaatggaatc

SEQ ID NO: 5130 - RNA, 20 nt, synthetic construct
  misc_feature 1..20: note = antisense sequence
  source 1..20: mol_type = other RNA
ccttgtgacatcaatggaat

SEQ ID NO: 5131 - RNA, 20 nt, synthetic construct
  misc_feature 1..20: note = antisense sequence
  source 1..20: mol_type = other RNA
accttgtgacatcaatggaa

SEQ ID NO: 5132 - RNA, 20 nt, synthetic construct
  misc_feature 1..20: note = antisense sequence
  source 1..20: mol_type = other RNA
caccttgtgacatcaatgga

SEQ ID NO: 5133 - RNA, 20 nt, synthetic construct
  misc_feature 1..20: note = antisense sequence
  source 1..20: mol_type = other RNA
aacaccttgtgacatcaatg

SEQ ID NO: 5134 - RNA, 20 nt, synthetic construct
  misc_feature 1..20: note = antisense sequence
  source 1..20: mol_type = other RNA
agaacaccttgtgacatcaa

SEQ ID NO: 5135 - RNA, 20 nt, synthetic construct
  misc_feature 1..20: note = antisense sequence
  source 1..20: mol_type = other RNA
aagaacaccttgtgacatca

SEQ ID NO: 5136 - RNA, 20 nt, synthetic construct
  misc_feature 1..20: note = antisense sequence
  source 1..20: mol_type = other RNA
aaagaacaccttgtgacatc

SEQ ID NO: 5137 - RNA, 20 nt, synthetic construct
  misc_feature 1..20: note = antisense sequence
  source 1..20: mol_type = other RNA
gaatcttgaaaagggcagaa

SEQ ID NO: 5138 - RNA, 20 nt, synthetic construct
  misc_feature 1..20: note = antisense sequence
  source 1..20: mol_type = other RNA
ttgaatcttgaaaagggcag

SEQ ID NO: 5139 - RNA, 20 nt, synthetic construct
  misc_feature 1..20: note = antisense sequence
  source 1..20: mol_type = other RNA
gtgcattggacaattttcct

SEQ ID NO: 5140 - RNA, 20 nt, synthetic construct
  misc_feature 1..20: note = antisense sequence
  source 1..20: mol_type = other RNA
tgtgcattggacaattttcc

SEQ ID NO: 5141 - RNA, 20 nt, synthetic construct
  misc_feature 1..20: note = antisense sequence
  source 1..20: mol_type = other RNA
tatcggcaaagttcaacagg

SEQ ID NO: 5142 - RNA, 20 nt, synthetic construct
  misc_feature 1..20: note = antisense sequence
  source 1..20: mol_type = other RNA
ttatcggcaaagttcaacag

SEQ ID NO: 5143 - RNA, 20 nt, synthetic construct
  misc_feature 1..20: note = antisense sequence
  source 1..20: mol_type = other RNA
gtgtttctacaattatcggc

SEQ ID NO: 5144 - RNA, 20 nt, synthetic construct
  misc_feature 1..20: note = antisense sequence
  source 1..20: mol_type = other RNA
ggtgtttctacaattatcgg

SEQ ID NO: 5145 - RNA, 20 nt, synthetic construct
  misc_feature 1..20: note = antisense sequence
  source 1..20: mol_type = other RNA
gccaaggtgtttctacaatt

SEQ ID NO: 5146 - RNA, 20 nt, synthetic construct
  misc_feature 1..20: note = antisense sequence
  source 1..20: mol_type = other RNA
aatgccaaggtgtttctaca

SEQ ID NO: 5147 - RNA, 20 nt, synthetic construct
  misc_feature 1..20: note = antisense sequence
  source 1..20: mol_type = other RNA
gaagaaagaaatgccaaggt

SEQ ID NO: 5148 - RNA, 20 nt, synthetic construct
  misc_feature 1..20: note = antisense sequence
  source 1..20: mol_type = other RNA
gatggaagaaagaaatgcca

SEQ ID NO: 5149 - RNA, 20 nt, synthetic construct
  misc_feature 1..20: note = antisense sequence
  source 1..20: mol_type = other RNA
agatggaagaaagaaatgcc

SEQ ID NO: 5150 - RNA, 20 nt, synthetic construct
  misc_feature 1..20: note = antisense sequence
  source 1..20: mol_type = other RNA
caagaggtagactgaacatc

SEQ ID NO: 5151 - RNA, 20 nt, synthetic construct
  misc_feature 1..20: note = antisense sequence
  source 1..20: mol_type = other RNA
gcaagaggtagactgaacat

SEQ ID NO: 5152 - RNA, 20 nt, synthetic construct
  misc_feature 1..20: note = antisense sequence
  source 1..20: mol_type = other RNA
tgcaagaggtagactgaaca

SEQ ID NO: 5153 - RNA, 20 nt, synthetic construct
  misc_feature 1..20: note = antisense sequence
  source 1..20: mol_type = other RNA
atgcaagaggtagactgaac

SEQ ID NO: 5154 - RNA, 20 nt, synthetic construct
  misc_feature 1..20: note = antisense sequence
  source 1..20: mol_type = other RNA
atttaggattggtcagcatg

SEQ ID NO: 5155 - RNA, 20 nt, synthetic construct
  misc_feature 1..20: note = antisense sequence
  source 1..20: mol_type = other RNA
tcatcgcccaatttaggatt

SEQ ID NO: 5156 - RNA, 20 nt, synthetic construct
  misc_feature 1..20: note = antisense sequence
  source 1..20: mol_type = other RNA
gtcatcgcccaatttaggat

SEQ ID NO: 5157 - RNA, 20 nt, synthetic construct
  misc_feature 1..20: note = antisense sequence
  source 1..20: mol_type = other RNA
ggtcatcgcccaatttagga

SEQ ID NO: 5158 - RNA, 20 nt, synthetic construct
  misc_feature 1..20: note = antisense sequence
  source 1..20: mol_type = other RNA
aggtcatcgcccaatttagg

SEQ ID NO: 5159 - RNA, 20 nt, synthetic construct
  misc_feature 1..20: note = antisense sequence
  source 1..20: mol_type = other RNA
taggtcatcgcccaatttag

SEQ ID NO: 5160 - RNA, 20 nt, synthetic construct
  misc_feature 1..20: note = antisense sequence
  source 1..20: mol_type = other RNA
ataggtcatcgcccaattta

SEQ ID NO: 5161 - RNA, 20 nt, synthetic construct
  misc_feature 1..20: note = antisense sequence
  source 1..20: mol_type = other RNA
aataggtcatcgcccaattt

SEQ ID NO: 5162 - RNA, 20 nt, synthetic construct
  misc_feature 1..20: note = antisense sequence
  source 1..20: mol_type = other RNA
aaataggtcatcgcccaatt

SEQ ID NO: 5163 - RNA, 20 nt, synthetic construct
  misc_feature 1..20: note = antisense sequence
  source 1..20: mol_type = other RNA
taaataggtcatcgcccaat

SEQ ID NO: 5164 - RNA, 20 nt, synthetic construct
  misc_feature 1..20: note = antisense sequence
  source 1..20: mol_type = other RNA
ataaataggtcatcgcccaa

SEQ ID NO: 5165 - RNA, 20 nt, synthetic construct
  misc_feature 1..20: note = antisense sequence
  source 1..20: mol_type = other RNA
aataaataggtcatcgccca

SEQ ID NO: 5166 - RNA, 20 nt, synthetic construct
  misc_feature 1..20: note = antisense sequence
  source 1..20: mol_type = other RNA
cattcagggaagatgcaaaa

SEQ ID NO: 5167 - RNA, 20 nt, synthetic construct
  misc_feature 1..20: note = antisense sequence
  source 1..20: mol_type = other RNA
ttaagcattcagggaagatg

SEQ ID NO: 5168 - RNA, 20 nt, synthetic construct
  misc_feature 1..20: note = antisense sequence
  source 1..20: mol_type = other RNA
agattaagcattcagggaag

SEQ ID NO: 5169 - RNA, 20 nt, synthetic construct
  misc_feature 1..20: note = antisense sequence
  source 1..20: mol_type = other RNA
gaagattaagcattcaggga

SEQ ID NO: 5170 - RNA, 20 nt, synthetic construct
  misc_feature 1..20: note = antisense sequence
  source 1..20: mol_type = other RNA
ttactgactttctactggcc

SEQ ID NO: 5171 - RNA, 20 nt, synthetic construct
  misc_feature 1..20: note = antisense sequence
  source 1..20: mol_type = other RNA
cttactgactttctactggc

SEQ ID NO: 5172 - RNA, 20 nt, synthetic construct
  misc_feature 1..20: note = antisense sequence
  source 1..20: mol_type = other RNA
acttactgactttctactgg

SEQ ID NO: 5173 - RNA, 20 nt, synthetic construct
  misc_feature 1..20: note = antisense sequence
  source 1..20: mol_type = other RNA
tccttactctgggagaaatt

SEQ ID NO: 5174 - RNA, 20 nt, synthetic construct
  misc_feature 1..20: note = antisense sequence
  source 1..20: mol_type = other RNA
ttccttactctgggagaaat

SEQ ID NO: 5175 - RNA, 20 nt, synthetic construct
  misc_feature 1..20: note = antisense sequence
  source 1..20: mol_type = other RNA
taattccttactctgggaga

SEQ ID NO: 5176 - RNA, 20 nt, synthetic construct
  misc_feature 1..20: note = antisense sequence
  source 1..20: mol_type = other RNA
ataattccttactctgggag

SEQ ID NO: 5177 - RNA, 20 nt, synthetic construct
  misc_feature 1..20: note = antisense sequence
  source 1..20: mol_type = other RNA
gctccaggaactcataattc

SEQ ID NO: 5178 - RNA, 20 nt, synthetic construct
  misc_feature 1..20: note = antisense sequence
  source 1..20: mol_type = other RNA
tgctccaggaactcataatt

SEQ ID NO: 5179 - RNA, 20 nt, synthetic construct
  misc_feature 1..20: note = antisense sequence
  source 1..20: mol_type = other RNA
gtgctgctccaggaactcat

SEQ ID NO: 5180 - RNA, 20 nt, synthetic construct
  misc_feature 1..20: note = antisense sequence
  source 1..20: mol_type = other RNA
atgtgctgctccaggaactc

SEQ ID NO: 5181 - RNA, 20 nt, synthetic construct
  misc_feature 1..20: note = antisense sequence
  source 1..20: mol_type = other RNA
atggaccattgcctcttcag

SEQ ID NO: 5182 - RNA, 20 nt, synthetic construct
  misc_feature 1..20: note = antisense sequence
  source 1..20: mol_type = other RNA
gatggaccattgcctcttca

SEQ ID NO: 5183 - RNA, 20 nt, synthetic construct
  misc_feature 1..20: note = antisense sequence
  source 1..20: mol_type = other RNA
ggatggaccattgcctcttc

SEQ ID NO: 5184 - RNA, 20 nt, synthetic construct
  misc_feature 1..20: note = antisense sequence
  source 1..20: mol_type = other RNA
tggatggaccattgcctctt

SEQ ID NO: 5185 - RNA, 20 nt, synthetic construct
  misc_feature 1..20: note = antisense sequence
  source 1..20: mol_type = other RNA
ctggatggaccattgcctct

SEQ ID NO: 5186 - RNA, 20 nt, synthetic construct
  misc_feature 1..20: note = antisense sequence
  source 1..20: mol_type = other RNA
tctggatggaccattgcctc

SEQ ID NO: 5187 - RNA, 20 nt, synthetic construct
  misc_feature 1..20: note = antisense sequence
  source 1..20: mol_type = other RNA
gtctggatggaccattgcct

SEQ ID NO: 5188 - RNA, 20 nt, synthetic construct
  misc_feature 1..20: note = antisense sequence
  source 1..20: mol_type = other RNA
tttgtctggatggaccattg

SEQ ID NO: 5189 - RNA, 20 nt, synthetic construct
  misc_feature 1..20: note = antisense sequence
  source 1..20: mol_type = other RNA
ttttgtctggatggaccatt

SEQ ID NO: 5190 - RNA, 20 nt, synthetic construct
  misc_feature 1..20: note = antisense sequence
  source 1..20: mol_type = other RNA
attttgtctggatggaccat

SEQ ID NO: 5191 - RNA, 20 nt, synthetic construct
  misc_feature 1..20: note = antisense sequence
  source 1..20: mol_type = other RNA
tattttgtctggatggacca

SEQ ID NO: 5192 - RNA, 20 nt, synthetic construct
  misc_feature 1..20: note = antisense sequence
  source 1..20: mol_type = other RNA
ctattttgtctggatggacc

SEQ ID NO: 5193 - RNA, 20 nt, synthetic construct
  misc_feature 1..20: note = antisense sequence
  source 1..20: mol_type = other RNA
gctattttgtctggatggac

SEQ ID NO: 5194 - RNA, 20 nt, synthetic construct
  misc_feature 1..20: note = antisense sequence
  source 1..20: mol_type = other RNA
gtgctattttgtctggatgg

SEQ ID NO: 5195 - RNA, 20 nt, synthetic construct
  misc_feature 1..20: note = antisense sequence
  source 1..20: mol_type = other RNA
tgtgctattttgtctggatg

SEQ ID NO: 5196 - RNA, 20 nt, synthetic construct
  misc_feature 1..20: note = antisense sequence
  source 1..20: mol_type = other RNA
ggctctgtgctattttgtct

SEQ ID NO: 5197 - RNA, 20 nt, synthetic construct
  misc_feature 1..20: note = antisense sequence
  source 1..20: mol_type = other RNA
gtactggctctgtgctattt

SEQ ID NO: 5198 - RNA, 20 nt, synthetic construct
  misc_feature 1..20: note = antisense sequence
  source 1..20: mol_type = other RNA
tgtactggctctgtgctatt

SEQ ID NO: 5199 - RNA, 20 nt, synthetic construct
  misc_feature 1..20: note = antisense sequence
  source 1..20: mol_type = other RNA
tatgtactggctctgtgcta

SEQ ID NO: 5200 - RNA, 20 nt, synthetic construct
  misc_feature 1..20: note = antisense sequence
  source 1..20: mol_type = other RNA
tttatgtactggctctgtgc

SEQ ID NO: 5201 - RNA, 20 nt, synthetic construct
  misc_feature 1..20: note = antisense sequence
  source 1..20: mol_type = other RNA
ttttatgtactggctctgtg

SEQ ID NO: 5202 - RNA, 20 nt, synthetic construct
  misc_feature 1..20: note = antisense sequence
  source 1..20: mol_type = other RNA
ccacagtccactttcttatt

SEQ ID NO: 5203 - RNA, 20 nt, synthetic construct
  misc_feature 1..20: note = antisense sequence
  source 1..20: mol_type = other RNA
gtccacagtccactttctta

SEQ ID NO: 5204 - RNA, 20 nt, synthetic construct
  misc_feature 1..20: note = antisense sequence
  source 1..20: mol_type = other RNA
tgtccacagtccactttctt

SEQ ID NO: 5205 - RNA, 20 nt, synthetic construct
  misc_feature 1..20: note = antisense sequence
  source 1..20: mol_type = other RNA
cttgtccacagtccactttc

SEQ ID NO: 5206 - RNA, 20 nt, synthetic construct
  misc_feature 1..20: note = antisense sequence
  source 1..20: mol_type = other RNA
tgtcaggacttgtccacagt

SEQ ID NO: 5207 - RNA, 20 nt, synthetic construct
  misc_feature 1..20: note = antisense sequence
  source 1..20: mol_type = other RNA
ttgtcaggacttgtccacag

SEQ ID NO: 5208 - RNA, 20 nt, synthetic construct
  misc_feature 1..20: note = antisense sequence
  source 1..20: mol_type = other RNA
tttgtcaggacttgtccaca

SEQ ID NO: 5209 - RNA, 20 nt, synthetic construct
  misc_feature 1..20: note = antisense sequence
  source 1..20: mol_type = other RNA
ttttgtcaggacttgtccac

SEQ ID NO: 5210 - RNA, 20 nt, synthetic construct
  misc_feature 1..20: note = antisense sequence
  source 1..20: mol_type = other RNA
aattttgtcaggacttgtcc

SEQ ID NO: 5211 - RNA, 20 nt, synthetic construct
  misc_feature 1..20: note = antisense sequence
  source 1..20: mol_type = other RNA
cagaaaagatactgacttgc

SEQ ID NO: 5212 - RNA, 20 nt, synthetic construct
  misc_feature 1..20: note = antisense sequence
  source 1..20: mol_type = other RNA
agattcaacttccaaggcgg

SEQ ID NO: 5213 - RNA, 20 nt, synthetic construct
  misc_feature 1..20: note = antisense sequence
  source 1..20: mol_type = other RNA
gagattcaacttccaaggcg

SEQ ID NO: 5214 - RNA, 20 nt, synthetic construct
  misc_feature 1..20: note = antisense sequence
  source 1..20: mol_type = other RNA
actgagattcaacttccaag

SEQ ID NO: 5215 - RNA, 20 nt, synthetic construct
  misc_feature 1..20: note = antisense sequence
  source 1..20: mol_type = other RNA
gactgagattcaacttccaa

SEQ ID NO: 5216 - RNA, 20 nt, synthetic construct
  misc_feature 1..20: note = antisense sequence
  source 1..20: mol_type = other RNA
tgactgagattcaacttcca

SEQ ID NO: 5217 - RNA, 20 nt, synthetic construct
  misc_feature 1..20: note = antisense sequence
  source 1..20: mol_type = other RNA
catgactgagattcaacttc

SEQ ID NO: 5218 - RNA, 20 nt, synthetic construct
  misc_feature 1..20: note = antisense sequence
  source 1..20: mol_type = other RNA
gtacatgactgagattcaac

SEQ ID NO: 5219 - RNA, 20 nt, synthetic construct
  misc_feature 1..20: note = antisense sequence
  source 1..20: mol_type = other RNA
caagggtgatttgttatggg

SEQ ID NO: 5220 - RNA, 20 nt, synthetic construct
  misc_feature 1..20: note = antisense sequence
  source 1..20: mol_type = other RNA
ggccaagggtgatttgttat

SEQ ID NO: 5221 - RNA, 20 nt, synthetic construct
  misc_feature 1..20: note = antisense sequence
  source 1..20: mol_type = other RNA
agaggtaggcaaaatgaaca

SEQ ID NO: 5222 - RNA, 20 nt, synthetic construct
  misc_feature 1..20: note = antisense sequence
  source 1..20: mol_type = other RNA
cagaggtaggcaaaatgaac

SEQ ID NO: 5223 - RNA, 20 nt, synthetic construct
  misc_feature 1..20: note = antisense sequence
  source 1..20: mol_type = other RNA
ttcagaggtaggcaaaatga

SEQ ID NO: 5224 - RNA, 20 nt, synthetic construct
  misc_feature 1..20: note = antisense sequence
  source 1..20: mol_type = other RNA
tttcagaggtaggcaaaatg

SEQ ID NO: 5225 - RNA, 20 nt, synthetic construct
  misc_feature 1..20: note = antisense sequence
  source 1..20: mol_type = other RNA
gctaatttcagaggtaggca

SEQ ID NO: 5226 - RNA, 20 nt, synthetic construct
  misc_feature 1..20: note = antisense sequence
  source 1..20: mol_type = other RNA
tgctaatttcagaggtaggc

SEQ ID NO: 5227 - RNA, 20 nt, synthetic construct
  misc_feature 1..20: note = antisense sequence
  source 1..20: mol_type = other RNA
ggcagagatttgctaatttc

SEQ ID NO: 5228 - RNA, 20 nt, synthetic construct
  misc_feature 1..20: note = antisense sequence
  source 1..20: mol_type = other RNA
tgagaaggcacaagtagaca

SEQ ID NO: 5229 - RNA, 20 nt, synthetic construct
  misc_feature 1..20: note = antisense sequence
  source 1..20: mol_type = other RNA
ctgagaaggcacaagtagac

SEQ ID NO: 5230 - RNA, 20 nt, synthetic construct
  misc_feature 1..20: note = antisense sequence
  source 1..20: mol_type = other RNA
tctgagaaggcacaagtaga

SEQ ID NO: 5231 - RNA, 20 nt, synthetic construct
  misc_feature 1..20: note = antisense sequence
  source 1..20: mol_type = other RNA
atctgagaaggcacaagtag

SEQ ID NO: 5232 - RNA, 20 nt, synthetic construct
  misc_feature 1..20: note = antisense sequence
  source 1..20: mol_type = other RNA
gatctgagaaggcacaagta

SEQ ID NO: 5233 - RNA, 20 nt, synthetic construct
  misc_feature 1..20: note = antisense sequence
  source 1..20: mol_type = other RNA
caaggaatgggccaggagca

SEQ ID NO: 5234 - RNA, 20 nt, synthetic construct
  misc_feature 1..20: note = antisense sequence
  source 1..20: mol_type = other RNA
tcaaggaatgggccaggagc

SEQ ID NO: 5235 - RNA, 20 nt, synthetic construct
  misc_feature 1..20: note = antisense sequence
  source 1..20: mol_type = other RNA
gagatcaaggaatgggccag

SEQ ID NO: 5236 - RNA, 20 nt, synthetic construct
  misc_feature 1..20: note = antisense sequence
  source 1..20: mol_type = other RNA
gagcttgattgaatgacctt

SEQ ID NO: 5237 - RNA, 20 nt, synthetic construct
  misc_feature 1..20: note = antisense sequence
  source 1..20: mol_type = other RNA
agagcttgattgaatgacct

SEQ ID NO: 5238 - RNA, 20 nt, synthetic construct
  misc_feature 1..20: note = antisense sequence
  source 1..20: mol_type = other RNA
gcacaaaatagaagagcttg

SEQ ID NO: 5239 - RNA, 20 nt, synthetic construct
  misc_feature 1..20: note = antisense sequence
  source 1..20: mol_type = other RNA
agtgccattcttgcttctta

SEQ ID NO: 5240 - RNA, 20 nt, synthetic construct
  misc_feature 1..20: note = antisense sequence
  source 1..20: mol_type = other RNA
acagtgccattcttgcttct

SEQ ID NO: 5241 - RNA, 20 nt, synthetic construct
  misc_feature 1..20: note = antisense sequence
  source 1..20: mol_type = other RNA
cacagtgccattcttgcttc

SEQ ID NO: 5242 - RNA, 20 nt, synthetic construct
  misc_feature 1..20: note = antisense sequence
  source 1..20: mol_type = other RNA
tcacagtgccattcttgctt

SEQ ID NO: 5243 - RNA, 20 nt, synthetic construct
  misc_feature 1..20: note = antisense sequence
  source 1..20: mol_type = other RNA
atcacagtgccattcttgct

SEQ ID NO: 5244 - RNA, 20 nt, synthetic construct
  misc_feature 1..20: note = antisense sequence
  source 1..20: mol_type = other RNA
aatcacagtgccattcttgc

SEQ ID NO: 5245 - RNA, 20 nt, synthetic construct
  misc_feature 1..20: note = antisense sequence
  source 1..20: mol_type = other RNA
caacaatgaaatcacagtgc

SEQ ID NO: 5246 - RNA, 20 nt, synthetic construct
  misc_feature 1..20: note = antisense sequence
  source 1..20: mol_type = other RNA
aagacgtagtaacaggatac

SEQ ID NO: 5247 - RNA, 20 nt, synthetic construct
  misc_feature 1..20: note = antisense sequence
  source 1..20: mol_type = other RNA
gaagacgtagtaacaggata

SEQ ID NO: 5248 - RNA, 20 nt, synthetic construct
  misc_feature 1..20: note = antisense sequence
  source 1..20: mol_type = other RNA
tgaagacgtagtaacaggat

SEQ ID NO: 5249 - RNA, 20 nt, synthetic construct
  misc_feature 1..20: note = antisense sequence
  source 1..20: mol_type = other RNA
ttgaagacgtagtaacagga

SEQ ID NO: 5250 - RNA, 20 nt, synthetic construct
  misc_feature 1..20: note = antisense sequence
  source 1..20: mol_type = other RNA
tttgaagacgtagtaacagg

SEQ ID NO: 5251 - RNA, 20 nt, synthetic construct
  misc_feature 1..20: note = antisense sequence
  source 1..20: mol_type = other RNA
gggcacattgctatttgata

SEQ ID NO: 5252 - RNA, 20 nt, synthetic construct
  misc_feature 1..20: note = antisense sequence
  source 1..20: mol_type = other RNA
tagagggcacattgctattt

SEQ ID NO: 5253 - RNA, 20 nt, synthetic construct
  misc_feature 1..20: note = antisense sequence
  source 1..20: mol_type = other RNA
gtagagggcacattgctatt

SEQ ID NO: 5254 - RNA, 20 nt, synthetic construct
  misc_feature 1..20: note = antisense sequence
  source 1..20: mol_type = other RNA
ggtagagggcacattgctat

SEQ ID NO: 5255 - RNA, 20 nt, synthetic construct
  misc_feature 1..20: note = antisense sequence
  source 1..20: mol_type = other RNA
gggtagagggcacattgcta

SEQ ID NO: 5256 - RNA, 20 nt, synthetic construct
  misc_feature 1..20: note = antisense sequence
  source 1..20: mol_type = other RNA
tgggtagagggcacattgct

SEQ ID NO: 5257 - RNA, 20 nt, synthetic construct
  misc_feature 1..20: note = antisense sequence
  source 1..20: mol_type = other RNA
ctgggtagagggcacattgc

SEQ ID NO: 5258 - RNA, 20 nt, synthetic construct
  misc_feature 1..20: note = antisense sequence
  source 1..20: mol_type = other RNA
gctgggtagagggcacattg

SEQ ID NO: 5259 - RNA, 20 nt, synthetic construct
  misc_feature 1..20: note = antisense sequence
  source 1..20: mol_type = other RNA
aagctgggtagagggcacat

SEQ ID NO: 5260 - RNA, 20 nt, synthetic construct
  misc_feature 1..20: note = antisense sequence
  source 1..20: mol_type = other RNA
ggtctttactggactttctc

SEQ ID NO: 5261 - RNA, 20 nt, synthetic construct
  misc_feature 1..20: note = antisense sequence
  source 1..20: mol_type = other RNA
tggtctttactggactttct

SEQ ID NO: 5262 - RNA, 20 nt, synthetic construct
  misc_feature 1..20: note = antisense sequence
  source 1..20: mol_type = other RNA
ttggtctttactggactttc

SEQ ID NO: 5263 - RNA, 20 nt, synthetic construct
  misc_feature 1..20: note = antisense sequence
  source 1..20: mol_type = other RNA
gtttggtctttactggactt

SEQ ID NO: 5264 - RNA, 20 nt, synthetic construct
  misc_feature 1..20: note = antisense sequence
  source 1..20: mol_type = other RNA
ggtttggtctttactggact

SEQ ID NO: 5265 - RNA, 20 nt, synthetic construct
  misc_feature 1..20: note = antisense sequence
  source 1..20: mol_type = other RNA
aggtttggtctttactggac

SEQ ID NO: 5266 - RNA, 20 nt, synthetic construct
  misc_feature 1..20: note = antisense sequence
  source 1..20: mol_type = other RNA
gaggtttggtctttactgga

SEQ ID NO: 5267 - RNA, 20 nt, synthetic construct
  misc_feature 1..20: note = antisense sequence
  source 1..20: mol_type = other RNA
gtgaggaagaggtttggtct

SEQ ID NO: 5268 - RNA, 20 nt, synthetic construct
  misc_feature 1..20: note = antisense sequence
  source 1..20: mol_type = other RNA
agtgaggaagaggtttggtc

SEQ ID NO: 5269 - RNA, 20 nt, synthetic construct
  misc_feature 1..20: note = antisense sequence
  source 1..20: mol_type = other RNA
aagtgaggaagaggtttggt

SEQ ID NO: 5270 - RNA, 20 nt, synthetic construct
  misc_feature 1..20: note = antisense sequence
  source 1..20: mol_type = other RNA
tcaagtgaggaagaggtttg

SEQ ID NO: 5271 - RNA, 20 nt, synthetic construct
  misc_feature 1..20: note = antisense sequence
  source 1..20: mol_type = other RNA
gatctcaagtgaggaagagg

SEQ ID NO: 5272 - RNA, 20 nt, synthetic construct
  misc_feature 1..20: note = antisense sequence
  source 1..20: mol_type = other RNA
tgatctcaagtgaggaagag

SEQ ID NO: 5273 - RNA, 20 nt, synthetic construct
  misc_feature 1..20: note = antisense sequence
  source 1..20: mol_type = other RNA
ctgatctcaagtgaggaaga

SEQ ID NO: 5274 - RNA, 20 nt, synthetic construct
  misc_feature 1..20: note = antisense sequence
  source 1..20: mol_type = other RNA
tctgatctcaagtgaggaag

SEQ ID NO: 5275 - RNA, 20 nt, synthetic construct
  misc_feature 1..20: note = antisense sequence
  source 1..20: mol_type = other RNA
gttctgatctcaagtgagga

SEQ ID NO: 5276 - RNA, 20 nt, synthetic construct
  misc_feature 1..20: note = antisense sequence
  source 1..20: mol_type = other RNA
ggttctgatctcaagtgagg

SEQ ID NO: 5277 - RNA, 20 nt, synthetic construct
  misc_feature 1..20: note = antisense sequence
  source 1..20: mol_type = other RNA
tggttctgatctcaagtgag

SEQ ID NO: 5278 - RNA, 20 nt, synthetic construct
  misc_feature 1..20: note = antisense sequence
  source 1..20: mol_type = other RNA
attggttctgatctcaagtg

SEQ ID NO: 5279 - RNA, 20 nt, synthetic construct
  misc_feature 1..20: note = antisense sequence
  source 1..20: mol_type = other RNA
ggttcagtagtgggaattta

SEQ ID NO: 5280 - RNA, 20 nt, synthetic construct
  misc_feature 1..20: note = antisense sequence
  source 1..20: mol_type = other RNA
cggttcagtagtgggaattt

SEQ ID NO: 5281 - RNA, 20 nt, synthetic construct
  misc_feature 1..20: note = antisense sequence
  source 1..20: mol_type = other RNA
acggttcagtagtgggaatt

SEQ ID NO: 5282 - RNA, 20 nt, synthetic construct
  misc_feature 1..20: note = antisense sequence
  source 1..20: mol_type = other RNA
tacggttcagtagtgggaat

SEQ ID NO: 5283 - RNA, 20 nt, synthetic construct
  misc_feature 1..20: note = antisense sequence
  source 1..20: mol_type = other RNA
gcctcctctacggttcagta

SEQ ID NO: 5284 - RNA, 20 nt, synthetic construct
  misc_feature 1..20: note = antisense sequence
  source 1..20: mol_type = other RNA
agcctcctctacggttcagt

SEQ ID NO: 5285 - RNA, 20 nt, synthetic construct
  misc_feature 1..20: note = antisense sequence
  source 1..20: mol_type = other RNA
cagcctcctctacggttcag

SEQ ID NO: 5286 - RNA, 20 nt, synthetic construct
  misc_feature 1..20: note = antisense sequence
  source 1..20: mol_type = other RNA
acagcctcctctacggttca

SEQ ID NO: 5287 - RNA, 20 nt, synthetic construct
  misc_feature 1..20: note = antisense sequence
  source 1..20: mol_type = other RNA
gacagcctcctctacggttc

SEQ ID NO: 5288 - RNA, 20 nt, synthetic construct
  misc_feature 1..20: note = antisense sequence
  source 1..20: mol_type = other RNA
agacagcctcctctacggtt

SEQ ID NO: 5289 - RNA, 20 nt, synthetic construct
  misc_feature 1..20: note = antisense sequence
  source 1..20: mol_type = other RNA
gagtgtagacagcctcctct

SEQ ID NO: 5290 - RNA, 20 nt, synthetic construct
  misc_feature 1..20: note = antisense sequence
  source 1..20: mol_type = other RNA
tggcgctggagtgtagacag

SEQ ID NO: 5291 - RNA, 20 nt, synthetic construct
  misc_feature 1..20: note = antisense sequence
  source 1..20: mol_type = other RNA
ctggcgctggagtgtagaca

SEQ ID NO: 5292 - RNA, 20 nt, synthetic construct
  misc_feature 1..20: note = antisense sequence
  source 1..20: mol_type = other RNA
ttcgtccagtgtcaggctct

SEQ ID NO: 5293 - RNA, 20 nt, synthetic construct
  misc_feature 1..20: note = antisense sequence
  source 1..20: mol_type = other RNA
gttcgtccagtgtcaggctc

SEQ ID NO: 5294 - RNA, 20 nt, synthetic construct
  misc_feature 1..20: note = antisense sequence
  source 1..20: mol_type = other RNA
tgttcgtccagtgtcaggct

SEQ ID NO: 5295 - RNA, 20 nt, synthetic construct
  misc_feature 1..20: note = antisense sequence
  source 1..20: mol_type = other RNA
ttgttcgtccagtgtcaggc

SEQ ID NO: 5296 - RNA, 20 nt, synthetic construct
  misc_feature 1..20: note = antisense sequence
  source 1..20: mol_type = other RNA
tttgttcgtccagtgtcagg

SEQ ID NO: 5297 - RNA, 20 nt, synthetic construct
  misc_feature 1..20: note = antisense sequence
  source 1..20: mol_type = other RNA
ttgctttgttcgtccagtgt

SEQ ID NO: 5298 - RNA, 20 nt, synthetic construct
  misc_feature 1..20: note = antisense sequence
  source 1..20: mol_type = other RNA
tttgctttgttcgtccagtg

SEQ ID NO: 5299 - RNA, 20 nt, synthetic construct
  misc_feature 1..20: note = antisense sequence
  source 1..20: mol_type = other RNA
ctttgctttgttcgtccagt

SEQ ID NO: 5300 - RNA, 20 nt, synthetic construct
  misc_feature 1..20: note = antisense sequence
  source 1..20: mol_type = other RNA
gctttgctttgttcgtccag

SEQ ID NO: 5301 - RNA, 20 nt, synthetic construct
  misc_feature 1..20: note = antisense sequence
  source 1..20: mol_type = other RNA
tgctttgctttgttcgtcca

SEQ ID NO: 5302 - RNA, 20 nt, synthetic construct
  misc_feature 1..20: note = antisense sequence
  source 1..20: mol_type = other RNA
atgctttgctttgttcgtcc

SEQ ID NO: 5303 - RNA, 20 nt, synthetic construct
  misc_feature 1..20: note = antisense sequence
  source 1..20: mol_type = other RNA
ttagaactgagcctgcctac

SEQ ID NO: 5304 - RNA, 20 nt, synthetic construct
  misc_feature 1..20: note = antisense sequence
  source 1..20: mol_type = other RNA
tttagaactgagcctgccta

SEQ ID NO: 5305 - RNA, 20 nt, synthetic construct
  misc_feature 1..20: note = antisense sequence
  source 1..20: mol_type = other RNA
tcttttagaactgagcctgc

SEQ ID NO: 5306 - RNA, 20 nt, synthetic construct
  misc_feature 1..20: note = antisense sequence
  source 1..20: mol_type = other RNA
ggaaggagacactgtgtggc

SEQ ID NO: 5307 - RNA, 20 nt, synthetic construct
  misc_feature 1..20: note = antisense sequence
  source 1..20: mol_type = other RNA
gattggtgagtctggaagga

SEQ ID NO: 5308 - RNA, 20 nt, synthetic construct
  misc_feature 1..20: note = antisense sequence
  source 1..20: mol_type = other RNA
tgattggtgagtctggaagg

SEQ ID NO: 5309 - RNA, 20 nt, synthetic construct
  misc_feature 1..20: note = antisense sequence
  source 1..20: mol_type = other RNA
gctatttctcaacctgccct

SEQ ID NO: 5310 - RNA, 20 nt, synthetic construct
  misc_feature 1..20: note = antisense sequence
  source 1..20: mol_type = other RNA
ggctatttctcaacctgccc

SEQ ID NO: 5311 - RNA, 20 nt, synthetic construct
  misc_feature 1..20: note = antisense sequence
  source 1..20: mol_type = other RNA
ctcggctatttctcaacctg

SEQ ID NO: 5312 - RNA, 20 nt, synthetic construct
  misc_feature 1..20: note = antisense sequence
  source 1..20: mol_type = other RNA
tctcggctatttctcaacct

SEQ ID NO: 5313 - RNA, 20 nt, synthetic construct
  misc_feature 1..20: note = antisense sequence
  source 1..20: mol_type = other RNA
ttctcggctatttctcaacc

SEQ ID NO: 5314 - RNA, 20 nt, synthetic construct
  misc_feature 1..20: note = antisense sequence
  source 1..20: mol_type = other RNA
cttctcggctatttctcaac

SEQ ID NO: 5315 - RNA, 20 nt, synthetic construct
  misc_feature 1..20: note = antisense sequence
  source 1..20: mol_type = other RNA
acttctcggctatttctcaa

SEQ ID NO: 5316 - RNA, 20 nt, synthetic construct
  misc_feature 1..20: note = antisense sequence
  source 1..20: mol_type = other RNA
tacttctcggctatttctca

SEQ ID NO: 5317 - RNA, 20 nt, synthetic construct
  misc_feature 1..20: note = antisense sequence
  source 1..20: mol_type = other RNA
gttgtaatacttctcggcta

SEQ ID NO: 5318 - RNA, 20 nt, synthetic construct
  misc_feature 1..20: note = antisense sequence
  source 1..20: mol_type = other RNA
ggttgtaatacttctcggct

SEQ ID NO: 5319 - RNA, 20 nt, synthetic construct
  misc_feature 1..20: note = antisense sequence
  source 1..20: mol_type = other RNA
cggttgtaatacttctcggc

SEQ ID NO: 5320 - RNA, 20 nt, synthetic construct
  misc_feature 1..20: note = antisense sequence
  source 1..20: mol_type = other RNA
ccggttgtaatacttctcgg

SEQ ID NO: 5321 - RNA, 20 nt, synthetic construct
  misc_feature 1..20: note = antisense sequence
  source 1..20: mol_type = other RNA
gctaactttccacttctgac

SEQ ID NO: 5322 - RNA, 20 nt, synthetic construct
  misc_feature 1..20: note = antisense sequence
  source 1..20: mol_type = other RNA
agaggttacatttgcatggg

SEQ ID NO: 5323 - RNA, 20 nt, synthetic construct
  misc_feature 1..20: note = antisense sequence
  source 1..20: mol_type = other RNA
gtagaggttacatttgcatg

SEQ ID NO: 5324 - RNA, 20 nt, synthetic construct
  misc_feature 1..20: note = antisense sequence
  source 1..20: mol_type = other RNA
gggtagaggttacatttgca

SEQ ID NO: 5325 - RNA, 20 nt, synthetic construct
  misc_feature 1..20: note = antisense sequence
  source 1..20: mol_type = other RNA
agggtagaggttacatttgc

SEQ ID NO: 5326 - RNA, 20 nt, synthetic construct
  misc_feature 1..20: note = antisense sequence
  source 1..20: mol_type = other RNA
cagggtagaggttacatttg

SEQ ID NO: 5327 - RNA, 20 nt, synthetic construct
  misc_feature 1..20: note = antisense sequence
  source 1..20: mol_type = other RNA
tcagggtagaggttacattt

SEQ ID NO: 5328 - RNA, 20 nt, synthetic construct
  misc_feature 1..20: note = antisense sequence
  source 1..20: mol_type = other RNA
attcagggtagaggttacat

SEQ ID NO: 5329 - RNA, 20 nt, synthetic construct
  misc_feature 1..20: note = antisense sequence
  source 1..20: mol_type = other RNA
aattcagggtagaggttaca

SEQ ID NO: 5330 - RNA, 20 nt, synthetic construct
  misc_feature 1..20: note = antisense sequence
  source 1..20: mol_type = other RNA
cttaaaattcagggtagagg

SEQ ID NO: 5331 - RNA, 20 nt, synthetic construct
  misc_feature 1..20: note = antisense sequence
  source 1..20: mol_type = other RNA
ggaagcattctgatacttag

SEQ ID NO: 5332 - RNA, 20 nt, synthetic construct
  misc_feature 1..20: note = antisense sequence
  source 1..20: mol_type = other RNA
ccttcgatccaaactctatt

SEQ ID NO: 5333 - RNA, 20 nt, synthetic construct
  misc_feature 1..20: note = antisense sequence
  source 1..20: mol_type = other RNA
tccttcgatccaaactctat

SEQ ID NO: 5334 - RNA, 20 nt, synthetic construct
  misc_feature 1..20: note = antisense sequence
  source 1..20: mol_type = other RNA
atccttcgatccaaactcta

SEQ ID NO: 5335 - RNA, 20 nt, synthetic construct
  misc_feature 1..20: note = antisense sequence
  source 1..20: mol_type = other RNA
catccttcgatccaaactct

SEQ ID NO: 5336 - RNA, 20 nt, synthetic construct
  misc_feature 1..20: note = antisense sequence
  source 1..20: mol_type = other RNA
agtaacatccttcgatccaa

SEQ ID NO: 5337 - RNA, 20 nt, synthetic construct
  misc_feature 1..20: note = antisense sequence
  source 1..20: mol_type = other RNA
ggcagtaacatccttcgatc

SEQ ID NO: 5338 - RNA, 20 nt, synthetic construct
  misc_feature 1..20: note = antisense sequence
  source 1..20: mol_type = other RNA
gggcagtaacatccttcgat

SEQ ID NO: 5339 - RNA, 20 nt, synthetic construct
  misc_feature 1..20: note = antisense sequence
  source 1..20: mol_type = other RNA
tgggcagtaacatccttcga

SEQ ID NO: 5340 - RNA, 20 nt, synthetic construct
  misc_feature 1..20: note = antisense sequence
  source 1..20: mol_type = other RNA
ttgggcagtaacatccttcg

SEQ ID NO: 5341 - RNA, 20 nt, synthetic construct
  misc_feature 1..20: note = antisense sequence
  source 1..20: mol_type = other RNA
gttgggcagtaacatccttc

SEQ ID NO: 5342 - RNA, 20 nt, synthetic construct
  misc_feature 1..20: note = antisense sequence
  source 1..20: mol_type = other RNA
agttgggcagtaacatcctt

SEQ ID NO: 5343 - RNA, 20 nt, synthetic construct
  misc_feature 1..20: note = antisense sequence
  source 1..20: mol_type = other RNA
ttagttgggcagtaacatcc

SEQ ID NO: 5344 - RNA, 20 nt, synthetic construct
  misc_feature 1..20: note = antisense sequence
  source 1..20: mol_type = other RNA
attagttgggcagtaacatc

SEQ ID NO: 5345 - RNA, 20 nt, synthetic construct
  misc_feature 1..20: note = antisense sequence
  source 1..20: mol_type = other RNA
cattagttgggcagtaacat

SEQ ID NO: 5346 - RNA, 20 nt, synthetic construct
  misc_feature 1..20: note = antisense sequence
  source 1..20: mol_type = other RNA
acattagttgggcagtaaca

SEQ ID NO: 5347 - RNA, 20 nt, synthetic construct
  misc_feature 1..20: note = antisense sequence
  source 1..20: mol_type = other RNA
agaacattagttgggcagta

SEQ ID NO: 5348 - RNA, 20 nt, synthetic construct
  misc_feature 1..20: note = antisense sequence
  source 1..20: mol_type = other RNA
tagaacattagttgggcagt

SEQ ID NO: 5349 - RNA, 20 nt, synthetic construct
  misc_feature 1..20: note = antisense sequence
  source 1..20: mol_type = other RNA
ttagaacattagttgggcag

SEQ ID NO: 5350 - RNA, 20 nt, synthetic construct
  misc_feature 1..20: note = antisense sequence
  source 1..20: mol_type = other RNA
cttagaacattagttgggca

SEQ ID NO: 5351 - RNA, 20 nt, synthetic construct
  misc_feature 1..20: note = antisense sequence
  source 1..20: mol_type = other RNA
acttagaacattagttgggc

SEQ ID NO: 5352 - RNA, 20 nt, synthetic construct
  misc_feature 1..20: note = antisense sequence
  source 1..20: mol_type = other RNA
cacttagaacattagttggg

SEQ ID NO: 5353 - RNA, 20 nt, synthetic construct
  misc_feature 1..20: note = antisense sequence
  source 1..20: mol_type = other RNA
gcacttagaacattagttgg

SEQ ID NO: 5354 - RNA, 20 nt, synthetic construct
  misc_feature 1..20: note = antisense sequence
  source 1..20: mol_type = other RNA
gatctttcagcacttagaac

SEQ ID NO: 5355 - RNA, 20 nt, synthetic construct
  misc_feature 1..20: note = antisense sequence
  source 1..20: mol_type = other RNA
accaggatgatctttcagca

SEQ ID NO: 5356 - RNA, 20 nt, synthetic construct
  misc_feature 1..20: note = antisense sequence
  source 1..20: mol_type = other RNA
gaccaggatgatctttcagc

SEQ ID NO: 5357 - RNA, 20 nt, synthetic construct
  misc_feature 1..20: note = antisense sequence
  source 1..20: mol_type = other RNA
ttgctaagaccaggatgatc

SEQ ID NO: 5358 - RNA, 20 nt, synthetic construct
  misc_feature 1..20: note = antisense sequence
  source 1..20: mol_type = other RNA
gttgctaagaccaggatgat

SEQ ID NO: 5359 - RNA, 20 nt, synthetic construct
  misc_feature 1..20: note = antisense sequence
  source 1..20: mol_type = other RNA
tgttgctaagaccaggatga

SEQ ID NO: 5360 - RNA, 20 nt, synthetic construct
  misc_feature 1..20: note = antisense sequence
  source 1..20: mol_type = other RNA
ctgttgctaagaccaggatg

SEQ ID NO: 5361 - RNA, 20 nt, synthetic construct
  misc_feature 1..20: note = antisense sequence
  source 1..20: mol_type = other RNA
gctgttgctaagaccaggat

SEQ ID NO: 5362 - RNA, 20 nt, synthetic construct
  misc_feature 1..20: note = antisense sequence
  source 1..20: mol_type = other RNA
tgctgttgctaagaccagga

SEQ ID NO: 5363 - RNA, 20 nt, synthetic construct
  misc_feature 1..20: note = antisense sequence
  source 1..20: mol_type = other RNA
ttgctgttgctaagaccagg

SEQ ID NO: 5364 - RNA, 20 nt, synthetic construct
  misc_feature 1..20: note = antisense sequence
  source 1..20: mol_type = other RNA
attgctgttgctaagaccag

SEQ ID NO: 5365 - RNA, 20 nt, synthetic construct
  misc_feature 1..20: note = antisense sequence
  source 1..20: mol_type = other RNA
cagtagcttggaatgttgaa

SEQ ID NO: 5366 - RNA, 20 nt, synthetic construct
  misc_feature 1..20: note = antisense sequence
  source 1..20: mol_type = other RNA
agtctcagtagcttggaatg

SEQ ID NO: 5367 - RNA, 20 nt, synthetic construct
  misc_feature 1..20: note = antisense sequence
  source 1..20: mol_type = other RNA
aaagtctcagtagcttggaa

SEQ ID NO: 5368 - RNA, 20 nt, synthetic construct
  misc_feature 1..20: note = antisense sequence
  source 1..20: mol_type = other RNA
aaaagtctcagtagcttgga

SEQ ID NO: 5369 - RNA, 20 nt, synthetic construct
  misc_feature 1..20: note = antisense sequence
  source 1..20: mol_type = other RNA
gaaaagtctcagtagcttgg

SEQ ID NO: 5370 - RNA, 20 nt, synthetic construct
  misc_feature 1..20: note = antisense sequence
  source 1..20: mol_type = other RNA
agaaaagtctcagtagcttg

SEQ ID NO: 5371 - RNA, 20 nt, synthetic construct
  misc_feature 1..20: note = antisense sequence
  source 1..20: mol_type = other RNA
cacctgaaaacgcttagaaa

SEQ ID NO: 5372 - RNA, 20 nt, synthetic construct
  misc_feature 1..20: note = antisense sequence
  source 1..20: mol_type = other RNA
tcacctgaaaacgcttagaa

SEQ ID NO: 5373 - RNA, 20 nt, synthetic construct
  misc_feature 1..20: note = antisense sequence
  source 1..20: mol_type = other RNA
ttcacctgaaaacgcttaga

SEQ ID NO: 5374 - RNA, 20 nt, synthetic construct
  misc_feature 1..20: note = antisense sequence
  source 1..20: mol_type = other RNA
attcacctgaaaacgcttag

SEQ ID NO: 5375 - RNA, 20 nt, synthetic construct
  misc_feature 1..20: note = antisense sequence
  source 1..20: mol_type = other RNA
gttattcacctgaaaacgct

SEQ ID NO: 5376 - RNA, 20 nt, synthetic construct
  misc_feature 1..20: note = antisense sequence
  source 1..20: mol_type = other RNA
tgttattcacctgaaaacgc

SEQ ID NO: 5377 - RNA, 20 nt, synthetic construct
  misc_feature 1..20: note = antisense sequence
  source 1..20: mol_type = other RNA
ttcggttcctctgctcaact

SEQ ID NO: 5378 - RNA, 20 nt, synthetic construct
  misc_feature 1..20: note = antisense sequence
  source 1..20: mol_type = other RNA
tttcggttcctctgctcaac

SEQ ID NO: 5379 - RNA, 20 nt, synthetic construct
  misc_feature 1..20: note = antisense sequence
  source 1..20: mol_type = other RNA
ttttcggttcctctgctcaa

SEQ ID NO: 5380 - RNA, 20 nt, synthetic construct
  misc_feature 1..20: note = antisense sequence
  source 1..20: mol_type = other RNA
cttcttcccagctacttatt

SEQ ID NO: 5381 - RNA, 20 nt, synthetic construct
  misc_feature 1..20: note = antisense sequence
  source 1..20: mol_type = other RNA
gcttcttcccagctacttat

SEQ ID NO: 5382 - RNA, 20 nt, synthetic construct
  misc_feature 1..20: note = antisense sequence
  source 1..20: mol_type = other RNA
tgcttcttcccagctactta

SEQ ID NO: 5383 - RNA, 20 nt, synthetic construct
  misc_feature 1..20: note = antisense sequence
  source 1..20: mol_type = other RNA
ttgcttcttcccagctactt

SEQ ID NO: 5384 - RNA, 20 nt, synthetic construct
  misc_feature 1..20: note = antisense sequence
  source 1..20: mol_type = other RNA
catacactgccacttaaact

SEQ ID NO: 5385 - RNA, 20 nt, synthetic construct
  misc_feature 1..20: note = antisense sequence
  source 1..20: mol_type = other RNA
tcatacactgccacttaaac

SEQ ID NO: 5386 - RNA, 20 nt, synthetic construct
  misc_feature 1..20: note = antisense sequence
  source 1..20: mol_type = other RNA
tctaatcatacactgccact

SEQ ID NO: 5387 - RNA, 20 nt, synthetic construct
  misc_feature 1..20: note = antisense sequence
  source 1..20: mol_type = other RNA
cttctaatcatacactgcca

SEQ ID NO: 5388 - RNA, 20 nt, synthetic construct
  misc_feature 1..20: note = antisense sequence
  source 1..20: mol_type = other RNA
gcttctaatcatacactgcc

SEQ ID NO: 5389 - RNA, 20 nt, synthetic construct
  misc_feature 1..20: note = antisense sequence
  source 1..20: mol_type = other RNA
ctgcttctaatcatacactg

SEQ ID NO: 5390 - RNA, 20 nt, synthetic construct
  misc_feature 1..20: note = antisense sequence
  source 1..20: mol_type = other RNA
agtcacctagtagctttaac

SEQ ID NO: 5391 - RNA, 20 nt, synthetic construct
  misc_feature 1..20: note = antisense sequence
  source 1..20: mol_type = other RNA
gagtcacctagtagctttaa

SEQ ID NO: 5392 - RNA, 20 nt, synthetic construct
  misc_feature 1..20: note = antisense sequence
  source 1..20: mol_type = other RNA
agagtcacctagtagcttta

SEQ ID NO: 5393 - RNA, 20 nt, synthetic construct
  misc_feature 1..20: note = antisense sequence
  source 1..20: mol_type = other RNA
tagagtcacctagtagcttt

SEQ ID NO: 5394 - RNA, 20 nt, synthetic construct
  misc_feature 1..20: note = antisense sequence
  source 1..20: mol_type = other RNA
gtccatcctagagtcaccta

SEQ ID NO: 5395 - RNA, 20 nt, synthetic construct
  misc_feature 1..20: note = antisense sequence
  source 1..20: mol_type = other RNA
tgtccatcctagagtcacct

SEQ ID NO: 5396 - RNA, 20 nt, synthetic construct
  misc_feature 1..20: note = antisense sequence
  source 1..20: mol_type = other RNA
ttgtccatcctagagtcacc

SEQ ID NO: 5397 - RNA, 20 nt, synthetic construct
  misc_feature 1..20: note = antisense sequence
  source 1..20: mol_type = other RNA
attgtccatcctagagtcac

SEQ ID NO: 5398 - RNA, 20 nt, synthetic construct
  misc_feature 1..20: note = antisense sequence
  source 1..20: mol_type = other RNA
aattgtccatcctagagtca

SEQ ID NO: 5399 - RNA, 20 nt, synthetic construct
  misc_feature 1..20: note = antisense sequence
  source 1..20: mol_type = other RNA
aaattgtccatcctagagtc

SEQ ID NO: 5400 - RNA, 20 nt, synthetic construct
  misc_feature 1..20: note = antisense sequence
  source 1..20: mol_type = other RNA
gtacctcaaccaaaaccaaa

SEQ ID NO: 5401 - RNA, 20 nt, synthetic construct
  misc_feature 1..20: note = antisense sequence
  source 1..20: mol_type = other RNA
tgtacctcaaccaaaaccaa

SEQ ID NO: 5402 - RNA, 20 nt, synthetic construct
  misc_feature 1..20: note = antisense sequence
  source 1..20: mol_type = other RNA
agtgtacctcaaccaaaacc

SEQ ID NO: 5403 - RNA, 20 nt, synthetic construct
  misc_feature 1..20: note = antisense sequence
  source 1..20: mol_type = other RNA
cagtgtacctcaaccaaaac

SEQ ID NO: 5404 - RNA, 20 nt, synthetic construct
  misc_feature 1..20: note = antisense sequence
  source 1..20: mol_type = other RNA
acagtgtacctcaaccaaaa

SEQ ID NO: 5405 - RNA, 20 nt, synthetic construct
  misc_feature 1..20: note = antisense sequence
  source 1..20: mol_type = other RNA
gacagtgtacctcaaccaaa

SEQ ID NO: 5406 - RNA, 20 nt, synthetic construct
  misc_feature 1..20: note = antisense sequence
  source 1..20: mol_type = other RNA
tgacagtgtacctcaaccaa

SEQ ID NO: 5407 - RNA, 20 nt, synthetic construct
  misc_feature 1..20: note = antisense sequence
  source 1..20: mol_type = other RNA
ctgacagtgtacctcaacca

SEQ ID NO: 5408 - RNA, 20 nt, synthetic construct
  misc_feature 1..20: note = antisense sequence
  source 1..20: mol_type = other RNA
tctgacagtgtacctcaacc

SEQ ID NO: 5409 - RNA, 20 nt, synthetic construct
  misc_feature 1..20: note = antisense sequence
  source 1..20: mol_type = other RNA
ctctgacagtgtacctcaac

SEQ ID NO: 5410 - RNA, 20 nt, synthetic construct
  misc_feature 1..20: note = antisense sequence
  source 1..20: mol_type = other RNA
actctgacagtgtacctcaa

SEQ ID NO: 5411 - RNA, 20 nt, synthetic construct
  misc_feature 1..20: note = antisense sequence
  source 1..20: mol_type = other RNA
aacacacaagtggtcaatca

SEQ ID NO: 5412 - RNA, 20 nt, synthetic construct
  misc_feature 1..20: note = antisense sequence
  source 1..20: mol_type = other RNA
taacacacaagtggtcaatc

SEQ ID NO: 5413 - RNA, 20 nt, synthetic construct
  misc_feature 1..20: note = antisense sequence
  source 1..20: mol_type = other RNA
gtttaacacacaagtggtca

SEQ ID NO: 5414 - RNA, 20 nt, synthetic construct
  misc_feature 1..20: note = antisense sequence
  source 1..20: mol_type = other RNA
gaggcaaaatatacggattc

SEQ ID NO: 5415 - RNA, 20 nt, synthetic construct
  misc_feature 1..20: note = antisense sequence
  source 1..20: mol_type = other RNA
ggaggcaaaatatacggatt

SEQ ID NO: 5416 - RNA, 20 nt, synthetic construct
  misc_feature 1..20: note = antisense sequence
  source 1..20: mol_type = other RNA
aggaggcaaaatatacggat

SEQ ID NO: 5417 - RNA, 20 nt, synthetic construct
  misc_feature 1..20: note = antisense sequence
  source 1..20: mol_type = other RNA
gattacaggcgtgagtcacc

SEQ ID NO: 5418 - RNA, 20 nt, synthetic construct
  misc_feature 1..20: note = antisense sequence
  source 1..20: mol_type = other RNA
ggattacaggcgtgagtcac

SEQ ID NO: 5419 - RNA, 20 nt, synthetic construct
  misc_feature 1..20: note = antisense sequence
  source 1..20: mol_type = other RNA
gggattacaggcgtgagtca

SEQ ID NO: 5420 - RNA, 20 nt, synthetic construct
  misc_feature 1..20: note = antisense sequence
  source 1..20: mol_type = other RNA
tgggattacaggcgtgagtc

SEQ ID NO: 5421 - RNA, 20 nt, synthetic construct
  misc_feature 1..20: note = antisense sequence
  source 1..20: mol_type = other RNA
ctgggattacaggcgtgagt

SEQ ID NO: 5422 - RNA, 20 nt, synthetic construct
  misc_feature 1..20: note = antisense sequence
  source 1..20: mol_type = other RNA
gctgggattacaggcgtgag

SEQ ID NO: 5423 - RNA, 20 nt, synthetic construct
  misc_feature 1..20: note = antisense sequence
  source 1..20: mol_type = other RNA
tgctgggattacaggcgtga

SEQ ID NO: 5424 - RNA, 20 nt, synthetic construct
  misc_feature 1..20: note = antisense sequence
  source 1..20: mol_type = other RNA
gtgctgggattacaggcgtg

SEQ ID NO: 5425 - RNA, 20 nt, synthetic construct
  misc_feature 1..20: note = antisense sequence
  source 1..20: mol_type = other RNA
agtgctgggattacaggcgt

SEQ ID NO: 5426 - RNA, 20 nt, synthetic construct
  misc_feature 1..20: note = antisense sequence
  source 1..20: mol_type = other RNA
aagtgctgggattacaggcg

SEQ ID NO: 5427 - RNA, 20 nt, synthetic construct
  misc_feature 1..20: note = antisense sequence
  source 1..20: mol_type = other RNA
gaagtgctgggattacaggc

SEQ ID NO: 5428 - RNA, 20 nt, synthetic construct
  misc_feature 1..20: note = antisense sequence
  source 1..20: mol_type = other RNA
tgaagtgctgggattacagg

SEQ ID NO: 5429 - RNA, 20 nt, synthetic construct
  misc_feature 1..20: note = antisense sequence
  source 1..20: mol_type = other RNA
ctgaagtgctgggattacag

SEQ ID NO: 5430 - RNA, 20 nt, synthetic construct
  misc_feature 1..20: note = antisense sequence
  source 1..20: mol_type = other RNA
cctgaagtgctgggattaca

SEQ ID NO: 5431 - RNA, 20 nt, synthetic construct
  misc_feature 1..20: note = antisense sequence
  source 1..20: mol_type = other RNA
tcctgaagtgctgggattac

SEQ ID NO: 5432 - RNA, 20 nt, synthetic construct
  misc_feature 1..20: note = antisense sequence
  source 1..20: mol_type = other RNA
ttttgaactcctgggctcga

SEQ ID NO: 5433 - RNA, 20 nt, synthetic construct
  misc_feature 1..20: note = antisense sequence
  source 1..20: mol_type = other RNA
gttttgaactcctgggctcg

SEQ ID NO: 5434 - RNA, 20 nt, synthetic construct
  misc_feature 1..20: note = antisense sequence
  source 1..20: mol_type = other RNA
ggttttgaactcctgggctc

SEQ ID NO: 5435 - RNA, 20 nt, synthetic construct
  misc_feature 1..20: note = antisense sequence
  source 1..20: mol_type = other RNA
tggttttgaactcctgggct

SEQ ID NO: 5436 - RNA, 20 nt, synthetic construct
  misc_feature 1..20: note = antisense sequence
  source 1..20: mol_type = other RNA
tgctcgtcacgttgcccaga

SEQ ID NO: 5437 - RNA, 20 nt, synthetic construct
  misc_feature 1..20: note = antisense sequence
  source 1..20: mol_type = other RNA
aagtgctcgtcacgttgccc

SEQ ID NO: 5438 - RNA, 20 nt, synthetic construct
  misc_feature 1..20: note = antisense sequence
  source 1..20: mol_type = other RNA
aaagtgctcgtcacgttgcc

SEQ ID NO: 5439 - RNA, 20 nt, synthetic construct
  misc_feature 1..20: note = antisense sequence
  source 1..20: mol_type = other RNA
aaaagtgctcgtcacgttgc

SEQ ID NO: 5440 - RNA, 20 nt, synthetic construct
  misc_feature 1..20: note = antisense sequence
  source 1..20: mol_type = other RNA
gaaaagtgctcgtcacgttg

SEQ ID NO: 5441 - RNA, 20 nt, synthetic construct
  misc_feature 1..20: note = antisense sequence
  source 1..20: mol_type = other RNA
agaaaagtgctcgtcacgtt

SEQ ID NO: 5442 - RNA, 20 nt, synthetic construct
  misc_feature 1..20: note = antisense sequence
  source 1..20: mol_type = other RNA
tagaaaagtgctcgtcacgt

SEQ ID NO: 5443 - RNA, 20 nt, synthetic construct
  misc_feature 1..20: note = antisense sequence
  source 1..20: mol_type = other RNA
atagaaaagtgctcgtcacg

SEQ ID NO: 5444 - RNA, 20 nt, synthetic construct
  misc_feature 1..20: note = antisense sequence
  source 1..20: mol_type = other RNA
tatagaaaagtgctcgtcac

SEQ ID NO: 5445 - RNA, 20 nt, synthetic construct
  misc_feature 1..20: note = antisense sequence
  source 1..20: mol_type = other RNA
gtatagaaaagtgctcgtca

SEQ ID NO: 5446 - RNA, 20 nt, synthetic construct
  misc_feature 1..20: note = antisense sequence
  source 1..20: mol_type = other RNA
tgtatagaaaagtgctcgtc

SEQ ID NO: 5447 - RNA, 20 nt, synthetic construct
  misc_feature 1..20: note = antisense sequence
  source 1..20: mol_type = other RNA
gtgcaatcatggctcactgc

SEQ ID NO: 5448 - RNA, 20 nt, synthetic construct
  misc_feature 1..20: note = antisense sequence
  source 1..20: mol_type = other RNA
caggtattcttcacttagtg

SEQ ID NO: 5449 - RNA, 20 nt, synthetic construct
  misc_feature 1..20: note = antisense sequence
  source 1..20: mol_type = other RNA
cttacggtatcacctataac

SEQ ID NO: 5450 - RNA, 20 nt, synthetic construct
  misc_feature 1..20: note = antisense sequence
  source 1..20: mol_type = other RNA
ccttacggtatcacctataa

SEQ ID NO: 5451 - RNA, 20 nt, synthetic construct
  misc_feature 1..20: note = antisense sequence
  source 1..20: mol_type = other RNA
gccttacggtatcacctata

SEQ ID NO: 5452 - RNA, 20 nt, synthetic construct
  misc_feature 1..20: note = antisense sequence
  source 1..20: mol_type = other RNA
tgccttacggtatcacctat

SEQ ID NO: 5453 - RNA, 20 nt, synthetic construct
  misc_feature 1..20: note = antisense sequence
  source 1..20: mol_type = other RNA
atgccttacggtatcaccta

SEQ ID NO: 5454 - RNA, 20 nt, synthetic construct
  misc_feature 1..20: note = antisense sequence
  source 1..20: mol_type = other RNA
tatgccttacggtatcacct

SEQ ID NO: 5455 - RNA, 20 nt, synthetic construct
  misc_feature 1..20: note = antisense sequence
  source 1..20: mol_type = other RNA
atatgccttacggtatcacc

SEQ ID NO: 5456 - RNA, 20 nt, synthetic construct
  misc_feature 1..20: note = antisense sequence
  source 1..20: mol_type = other RNA
gcaatttggagtttggagct

SEQ ID NO: 5457 - RNA, 20 nt, synthetic construct
  misc_feature 1..20: note = antisense sequence
  source 1..20: mol_type = other RNA
gtgcaatttggagtttggag

SEQ ID NO: 5458 - RNA, 20 nt, synthetic construct
  misc_feature 1..20: note = antisense sequence
  source 1..20: mol_type = other RNA
agtgcaatttggagtttgga

SEQ ID NO: 5459 - RNA, 20 nt, synthetic construct
  misc_feature 1..20: note = antisense sequence
  source 1..20: mol_type = other RNA
tagtgcaatttggagtttgg

SEQ ID NO: 5460 - RNA, 20 nt, synthetic construct
  misc_feature 1..20: note = antisense sequence
  source 1..20: mol_type = other RNA
ccctaatagtgcaatttgga

SEQ ID NO: 5461 - RNA, 20 nt, synthetic construct
  misc_feature 1..20: note = antisense sequence
  source 1..20: mol_type = other RNA
tccctaatagtgcaatttgg

SEQ ID NO: 5462 - RNA, 20 nt, synthetic construct
  misc_feature 1..20: note = antisense sequence
  source 1..20: mol_type = other RNA
tccctttccctaatagtgca

SEQ ID NO: 5463 - RNA, 20 nt, synthetic construct
  misc_feature 1..20: note = antisense sequence
  source 1..20: mol_type = other RNA
ctccctttccctaatagtgc

SEQ ID NO: 5464 - RNA, 20 nt, synthetic construct
  misc_feature 1..20: note = antisense sequence
  source 1..20: mol_type = other RNA
tctccctttccctaatagtg

SEQ ID NO: 5465 - RNA, 20 nt, synthetic construct
  misc_feature 1..20: note = antisense sequence
  source 1..20: mol_type = other RNA
attctccctttccctaatag

SEQ ID NO: 5466 - RNA, 20 nt, synthetic construct
  misc_feature 1..20: note = antisense sequence
  source 1..20: mol_type = other RNA
agctattctccctttcccta

SEQ ID NO: 5467 - RNA, 20 nt, synthetic construct
  misc_feature 1..20: note = antisense sequence
  source 1..20: mol_type = other RNA
aagctattctccctttccct

SEQ ID NO: 5468 - RNA, 20 nt, synthetic construct
  misc_feature 1..20: note = antisense sequence
  source 1..20: mol_type = other RNA
aagagccaaaagctattctc

SEQ ID NO: 5469 - RNA, 20 nt, synthetic construct
  misc_feature 1..20: note = antisense sequence
  source 1..20: mol_type = other RNA
acaagaagagccaaaagcta

SEQ ID NO: 5470 - RNA, 20 nt, synthetic construct
  misc_feature 1..20: note = antisense sequence
  source 1..20: mol_type = other RNA
agtacaagaagagccaaaag

SEQ ID NO: 5471 - RNA, 20 nt, synthetic construct
  misc_feature 1..20: note = antisense sequence
  source 1..20: mol_type = other RNA
caaatagtacaagaagagcc

SEQ ID NO: 5472 - RNA, 20 nt, synthetic construct
  misc_feature 1..20: note = antisense sequence
  source 1..20: mol_type = other RNA
cagaagacagtaaccagtta

SEQ ID NO: 5473 - RNA, 20 nt, synthetic construct
  misc_feature 1..20: note = antisense sequence
  source 1..20: mol_type = other RNA
gcagaagacagtaaccagtt

SEQ ID NO: 5474 - RNA, 20 nt, synthetic construct
  misc_feature 1..20: note = antisense sequence
  source 1..20: mol_type = other RNA
tgcagaagacagtaaccagt

SEQ ID NO: 5475 - RNA, 20 nt, synthetic construct
  misc_feature 1..20: note = antisense sequence
  source 1..20: mol_type = other RNA
gtgcagaagacagtaaccag

SEQ ID NO: 5476 - RNA, 20 nt, synthetic construct
  misc_feature 1..20: note = antisense sequence
  source 1..20: mol_type = other RNA
gtgtgcagaagacagtaacc

SEQ ID NO: 5477 - RNA, 20 nt, synthetic construct
  misc_feature 1..20: note = antisense sequence
  source 1..20: mol_type = other RNA
aagtgtgcagaagacagtaa

SEQ ID NO: 5478 - RNA, 20 nt, synthetic construct
  misc_feature 1..20: note = antisense sequence
  source 1..20: mol_type = other RNA
acatcctaaaagtgtgcaga

SEQ ID NO: 5479 - RNA, 20 nt, synthetic construct
  misc_feature 1..20: note = antisense sequence
  source 1..20: mol_type = other RNA
gacatcctaaaagtgtgcag

SEQ ID NO: 5480 - RNA, 20 nt, synthetic construct
  misc_feature 1..20: note = antisense sequence
  source 1..20: mol_type = other RNA
tgacatcctaaaagtgtgca

SEQ ID NO: 5481 - RNA, 20 nt, synthetic construct
  misc_feature 1..20: note = antisense sequence
  source 1..20: mol_type = other RNA
atgacatcctaaaagtgtgc

SEQ ID NO: 5482 - RNA, 20 nt, synthetic construct
  misc_feature 1..20: note = antisense sequence
  source 1..20: mol_type = other RNA
ccaatgacatcctaaaagtg

SEQ ID NO: 5483 - RNA, 20 nt, synthetic construct
  misc_feature 1..20: note = antisense sequence
  source 1..20: mol_type = other RNA
tgaccctgagattgaaccaa

SEQ ID NO: 5484 - RNA, 20 nt, synthetic construct
  misc_feature 1..20: note = antisense sequence
  source 1..20: mol_type = other RNA
ttgaccctgagattgaacca

SEQ ID NO: 5485 - RNA, 20 nt, synthetic construct
  misc_feature 1..20: note = antisense sequence
  source 1..20: mol_type = other RNA
cttgaccctgagattgaacc

SEQ ID NO: 5486 - RNA, 20 nt, synthetic construct
  misc_feature 1..20: note = antisense sequence
  source 1..20: mol_type = other RNA
acttgaccctgagattgaac

SEQ ID NO: 5487 - RNA, 20 nt, synthetic construct
  misc_feature 1..20: note = antisense sequence
  source 1..20: mol_type = other RNA
agacttgaccctgagattga

SEQ ID NO: 5488 - RNA, 20 nt, synthetic construct
  misc_feature 1..20: note = antisense sequence
  source 1..20: mol_type = other RNA
aagacttgaccctgagattg

SEQ ID NO: 5489 - RNA, 20 nt, synthetic construct
  misc_feature 1..20: note = antisense sequence
  source 1..20: mol_type = other RNA
taagacttgaccctgagatt

SEQ ID NO: 5490 - RNA, 20 nt, synthetic construct
  misc_feature 1..20: note = antisense sequence
  source 1..20: mol_type = other RNA
gtaagacttgaccctgagat

SEQ ID NO: 5491 - RNA, 20 nt, synthetic construct
  misc_feature 1..20: note = antisense sequence
  source 1..20: mol_type = other RNA
ggtaagacttgaccctgaga

SEQ ID NO: 5492 - RNA, 20 nt, synthetic construct
  misc_feature 1..20: note = antisense sequence
  source 1..20: mol_type = other RNA
cagttgggtaagacttgacc

SEQ ID NO: 5493 - RNA, 20 nt, synthetic construct
  misc_feature 1..20: note = antisense sequence
  source 1..20: mol_type = other RNA
acagttgggtaagacttgac

SEQ ID NO: 5494 - RNA, 20 nt, synthetic construct
  misc_feature 1..20: note = antisense sequence
  source 1..20: mol_type = other RNA
gacagttgggtaagacttga

SEQ ID NO: 5495 - RNA, 20 nt, synthetic construct
  misc_feature 1..20: note = antisense sequence
  source 1..20: mol_type = other RNA
ggacagttgggtaagacttg

SEQ ID NO: 5496 - RNA, 20 nt, synthetic construct
  misc_feature 1..20: note = antisense sequence
  source 1..20: mol_type = other RNA
aggacagttgggtaagactt

SEQ ID NO: 5497 - RNA, 20 nt, synthetic construct
  misc_feature 1..20: note = antisense sequence
  source 1..20: mol_type = other RNA
taggacagttgggtaagact

SEQ ID NO: 5498 - RNA, 20 nt, synthetic construct
  misc_feature 1..20: note = antisense sequence
  source 1..20: mol_type = other RNA
ataggacagttgggtaagac

SEQ ID NO: 5499 - RNA, 20 nt, synthetic construct
  misc_feature 1..20: note = antisense sequence
  source 1..20: mol_type = other RNA
cataggacagttgggtaaga

SEQ ID NO: 5500 - RNA, 20 nt, synthetic construct
  misc_feature 1..20: note = antisense sequence
  source 1..20: mol_type = other RNA
acataggacagttgggtaag

SEQ ID NO: 5501 - RNA, 20 nt, synthetic construct
  misc_feature 1..20: note = antisense sequence
  source 1..20: mol_type = other RNA
tacataggacagttgggtaa

SEQ ID NO: 5502 - RNA, 20 nt, synthetic construct
  misc_feature 1..20: note = antisense sequence
  source 1..20: mol_type = other RNA
gtacataggacagttgggta

SEQ ID NO: 5503 - RNA, 20 nt, synthetic construct
  misc_feature 1..20: note = antisense sequence
  source 1..20: mol_type = other RNA
agtacataggacagttgggt

SEQ ID NO: 5504 - RNA, 20 nt, synthetic construct
  misc_feature 1..20: note = antisense sequence
  source 1..20: mol_type = other RNA
gagtacataggacagttggg

SEQ ID NO: 5505 - RNA, 20 nt, synthetic construct
  misc_feature 1..20: note = antisense sequence
  source 1..20: mol_type = other RNA
cagagtacataggacagttg

SEQ ID NO: 5506 - RNA, 20 nt, synthetic construct
  misc_feature 1..20: note = antisense sequence
  source 1..20: mol_type = other RNA
acagagtacataggacagtt

SEQ ID NO: 5507 - RNA, 20 nt, synthetic construct
  misc_feature 1..20: note = antisense sequence
  source 1..20: mol_type = other RNA
ggacagagtacataggacag

SEQ ID NO: 5508 - RNA, 20 nt, synthetic construct
  misc_feature 1..20: note = antisense sequence
  source 1..20: mol_type = other RNA
tggacagagtacataggaca

SEQ ID NO: 5509 - RNA, 20 nt, synthetic construct
  misc_feature 1..20: note = antisense sequence
  source 1..20: mol_type = other RNA
atggacagagtacataggac

SEQ ID NO: 5510 - RNA, 20 nt, synthetic construct
  misc_feature 1..20: note = antisense sequence
  source 1..20: mol_type = other RNA
aatggacagagtacatagga

SEQ ID NO: 5511 - RNA, 20 nt, synthetic construct
  misc_feature 1..20: note = antisense sequence
  source 1..20: mol_type = other RNA
tgaatggacagagtacatag

SEQ ID NO: 5512 - RNA, 20 nt, synthetic construct
  misc_feature 1..20: note = antisense sequence
  source 1..20: mol_type = other RNA
catgaatggacagagtacat

SEQ ID NO: 5513 - RNA, 20 nt, synthetic construct
  misc_feature 1..20: note = antisense sequence
  source 1..20: mol_type = other RNA
ggcatgaatggacagagtac

SEQ ID NO: 5514 - RNA, 20 nt, synthetic construct
  misc_feature 1..20: note = antisense sequence
  source 1..20: mol_type = other RNA
taaggcatgaatggacagag

SEQ ID NO: 5515 - RNA, 20 nt, synthetic construct
  misc_feature 1..20: note = antisense sequence
  source 1..20: mol_type = other RNA
ccagctcacatatcttactg

SEQ ID NO: 5516 - RNA, 20 nt, synthetic construct
  misc_feature 1..20: note = antisense sequence
  source 1..20: mol_type = other RNA
gccagctcacatatcttact

SEQ ID NO: 5517 - RNA, 20 nt, synthetic construct
  misc_feature 1..20: note = antisense sequence
  source 1..20: mol_type = other RNA
ttgccagctcacatatctta

SEQ ID NO: 5518 - RNA, 20 nt, synthetic construct
  misc_feature 1..20: note = antisense sequence
  source 1..20: mol_type = other RNA
gttgccagctcacatatctt

SEQ ID NO: 5519 - RNA, 20 nt, synthetic construct
  misc_feature 1..20: note = antisense sequence
  source 1..20: mol_type = other RNA
tgttgccagctcacatatct

SEQ ID NO: 5520 - RNA, 20 nt, synthetic construct
  misc_feature 1..20: note = antisense sequence
  source 1..20: mol_type = other RNA
gtgttgccagctcacatatc

SEQ ID NO: 5521 - RNA, 20 nt, synthetic construct
  misc_feature 1..20: note = antisense sequence
  source 1..20: mol_type = other RNA
cataggattggcaatgtgtt

SEQ ID NO: 5522 - RNA, 20 nt, synthetic construct
  misc_feature 1..20: note = antisense sequence
  source 1..20: mol_type = other RNA
ccataggattggcaatgtgt

SEQ ID NO: 5523 - RNA, 20 nt, synthetic construct
  misc_feature 1..20: note = antisense sequence
  source 1..20: mol_type = other RNA
accataggattggcaatgtg

SEQ ID NO: 5524 - RNA, 20 nt, synthetic construct
  misc_feature 1..20: note = antisense sequence
  source 1..20: mol_type = other RNA
aaccataggattggcaatgt

SEQ ID NO: 5525 - RNA, 20 nt, synthetic construct
  misc_feature 1..20: note = antisense sequence
  source 1..20: mol_type = other RNA
taaccataggattggcaatg

SEQ ID NO: 5526 - RNA, 20 nt, synthetic construct
  misc_feature 1..20: note = antisense sequence
  source 1..20: mol_type = other RNA
cccatgaaactacctattgt

SEQ ID NO: 5527 - RNA, 20 nt, synthetic construct
  misc_feature 1..20: note = antisense sequence
  source 1..20: mol_type = other RNA
acccatgaaactacctattg

SEQ ID NO: 5528 - RNA, 20 nt, synthetic construct
  misc_feature 1..20: note = antisense sequence
  source 1..20: mol_type = other RNA
ctgacccatgaaactaccta

SEQ ID NO: 5529 - RNA, 20 nt, synthetic construct
  misc_feature 1..20: note = antisense sequence
  source 1..20: mol_type = other RNA
ggacagtgagttatcttact

SEQ ID NO: 5530 - RNA, 20 nt, synthetic construct
  misc_feature 1..20: note = antisense sequence
  source 1..20: mol_type = other RNA
tagggacagtgagttatctt

SEQ ID NO: 5531 - RNA, 20 nt, synthetic construct
  misc_feature 1..20: note = antisense sequence
  source 1..20: mol_type = other RNA
ctagggacagtgagttatct

SEQ ID NO: 5532 - RNA, 20 nt, synthetic construct
  misc_feature 1..20: note = antisense sequence
  source 1..20: mol_type = other RNA
cttactttcattgcttcacc

SEQ ID NO: 5533 - RNA, 20 nt, synthetic construct
  misc_feature 1..20: note = antisense sequence
  source 1..20: mol_type = other RNA
agacacagttactacttcac

SEQ ID NO: 5534 - RNA, 20 nt, synthetic construct
  misc_feature 1..20: note = antisense sequence
  source 1..20: mol_type = other RNA
gagacacagttactacttca

SEQ ID NO: 5535 - RNA, 20 nt, synthetic construct
  misc_feature 1..20: note = antisense sequence
  source 1..20: mol_type = other RNA
ggagacacagttactacttc

SEQ ID NO: 5536 - RNA, 20 nt, synthetic construct
  misc_feature 1..20: note = antisense sequence
  source 1..20: mol_type = other RNA
aggagacacagttactactt

SEQ ID NO: 5537 - RNA, 20 nt, synthetic construct
  misc_feature 1..20: note = antisense sequence
  source 1..20: mol_type = other RNA
tgaaacaggagacacagtta

SEQ ID NO: 5538 - RNA, 20 nt, synthetic construct
  misc_feature 1..20: note = antisense sequence
  source 1..20: mol_type = other RNA
gtgaaacaggagacacagtt

SEQ ID NO: 5539 - RNA, 20 nt, synthetic construct
  misc_feature 1..20: note = antisense sequence
  source 1..20: mol_type = other RNA
atgagggtgaaacaggagac

SEQ ID NO: 5540 - RNA, 20 nt, synthetic construct
  misc_feature 1..20: note = antisense sequence
  source 1..20: mol_type = other RNA
caagcatgagggtgaaacag

SEQ ID NO: 5541 - RNA, 20 nt, synthetic construct
  misc_feature 1..20: note = antisense sequence
  source 1..20: mol_type = other RNA
ccaagcatgagggtgaaaca

SEQ ID NO: 5542 - RNA, 20 nt, synthetic construct
  misc_feature 1..20: note = antisense sequence
  source 1..20: mol_type = other RNA
tccaagcatgagggtgaaac

SEQ ID NO: 5543 - RNA, 20 nt, synthetic construct
  misc_feature 1..20: note = antisense sequence
  source 1..20: mol_type = other RNA
ttccaagcatgagggtgaaa

SEQ ID NO: 5544 - RNA, 20 nt, synthetic construct
  misc_feature 1..20: note = antisense sequence
  source 1..20: mol_type = other RNA
gttccaagcatgagggtgaa

SEQ ID NO: 5545 - RNA, 20 nt, synthetic construct
  misc_feature 1..20: note = antisense sequence
  source 1..20: mol_type = other RNA
tgttccaagcatgagggtga

SEQ ID NO: 5546 - RNA, 20 nt, synthetic construct
  misc_feature 1..20: note = antisense sequence
  source 1..20: mol_type = other RNA
atgttccaagcatgagggtg

SEQ ID NO: 5547 - RNA, 20 nt, synthetic construct
  misc_feature 1..20: note = antisense sequence
  source 1..20: mol_type = other RNA
gcttttgaaggcatacacat

SEQ ID NO: 5548 - RNA, 20 nt, synthetic construct
  misc_feature 1..20: note = antisense sequence
  source 1..20: mol_type = other RNA
agcttttgaaggcatacaca

SEQ ID NO: 5549 - RNA, 20 nt, synthetic construct
  misc_feature 1..20: note = antisense sequence
  source 1..20: mol_type = other RNA
gagcttttgaaggcatacac

SEQ ID NO: 5550 - RNA, 20 nt, synthetic construct
  misc_feature 1..20: note = antisense sequence
  source 1..20: mol_type = other RNA
atgtgagcttttgaaggcat

SEQ ID NO: 5551 - RNA, 20 nt, synthetic construct
  misc_feature 1..20: note = antisense sequence
  source 1..20: mol_type = other RNA
gatgtgagcttttgaaggca

SEQ ID NO: 5552 - RNA, 20 nt, synthetic construct
  misc_feature 1..20: note = antisense sequence
  source 1..20: mol_type = other RNA
ggatgtgagcttttgaaggc

SEQ ID NO: 5553 - RNA, 20 nt, synthetic construct
  misc_feature 1..20: note = antisense sequence
  source 1..20: mol_type = other RNA
cttggatgtgagcttttgaa

SEQ ID NO: 5554 - RNA, 20 nt, synthetic construct
  misc_feature 1..20: note = antisense sequence
  source 1..20: mol_type = other RNA
acttggatgtgagcttttga

SEQ ID NO: 5555 - RNA, 20 nt, synthetic construct
  misc_feature 1..20: note = antisense sequence
  source 1..20: mol_type = other RNA
gacttggatgtgagcttttg

SEQ ID NO: 5556 - RNA, 20 nt, synthetic construct
  misc_feature 1..20: note = antisense sequence
  source 1..20: mol_type = other RNA
tgacttggatgtgagctttt

SEQ ID NO: 5557 - RNA, 20 nt, synthetic construct
  misc_feature 1..20: note = antisense sequence
  source 1..20: mol_type = other RNA
atgacttggatgtgagcttt

SEQ ID NO: 5558 - RNA, 20 nt, synthetic construct
  misc_feature 1..20: note = antisense sequence
  source 1..20: mol_type = other RNA
gatgacttggatgtgagctt

SEQ ID NO: 5559 - RNA, 20 nt, synthetic construct
  misc_feature 1..20: note = antisense sequence
  source 1..20: mol_type = other RNA
tggatgacttggatgtgagc

SEQ ID NO: 5560 - RNA, 20 nt, synthetic construct
  misc_feature 1..20: note = antisense sequence
  source 1..20: mol_type = other RNA
tttctggatgacttggatgt

SEQ ID NO: 5561 - RNA, 20 nt, synthetic construct
  misc_feature 1..20: note = antisense sequence
  source 1..20: mol_type = other RNA
gcactaagagattccattgt

SEQ ID NO: 5562 - RNA, 20 nt, synthetic construct
  misc_feature 1..20: note = antisense sequence
  source 1..20: mol_type = other RNA
ggcactaagagattccattg

SEQ ID NO: 5563 - RNA, 20 nt, synthetic construct
  misc_feature 1..20: note = antisense sequence
  source 1..20: mol_type = other RNA
tccaggcactaagagattcc

SEQ ID NO: 5564 - RNA, 20 nt, synthetic construct
  misc_feature 1..20: note = antisense sequence
  source 1..20: mol_type = other RNA
aaattccaggcactaagaga

SEQ ID NO: 5565 - RNA, 20 nt, synthetic construct
  misc_feature 1..20: note = antisense sequence
  source 1..20: mol_type = other RNA
tgcaaattccaggcactaag

SEQ ID NO: 5566 - RNA, 20 nt, synthetic construct
  misc_feature 1..20: note = antisense sequence
  source 1..20: mol_type = other RNA
ctactagctttaactggcaa

SEQ ID NO: 5567 - RNA, 20 nt, synthetic construct
  misc_feature 1..20: note = antisense sequence
  source 1..20: mol_type = other RNA
cctactagctttaactggca

SEQ ID NO: 5568 - RNA, 20 nt, synthetic construct
  misc_feature 1..20: note = antisense sequence
  source 1..20: mol_type = other RNA
acctactagctttaactggc

SEQ ID NO: 5569 - RNA, 20 nt, synthetic construct
  misc_feature 1..20: note = antisense sequence
  source 1..20: mol_type = other RNA
tacctactagctttaactgg

SEQ ID NO: 5570 - RNA, 20 nt, synthetic construct
  misc_feature 1..20: note = antisense sequence
  source 1..20: mol_type = other RNA
cagtaaagcaaagaggtagt

SEQ ID NO: 5571 - RNA, 20 nt, synthetic construct
  misc_feature 1..20: note = antisense sequence
  source 1..20: mol_type = other RNA
ctcagtaagatattgccagt

SEQ ID NO: 5572 - RNA, 20 nt, synthetic construct
  misc_feature 1..20: note = antisense sequence
  source 1..20: mol_type = other RNA
tctcagtaagatattgccag

SEQ ID NO: 5573 - RNA, 20 nt, synthetic construct
  misc_feature 1..20: note = antisense sequence
  source 1..20: mol_type = other RNA
ggtactttcgttagtggaat

SEQ ID NO: 5574 - RNA, 20 nt, synthetic construct
  misc_feature 1..20: note = antisense sequence
  source 1..20: mol_type = other RNA
tggtactttcgttagtggaa

SEQ ID NO: 5575 - RNA, 20 nt, synthetic construct
  misc_feature 1..20: note = antisense sequence
  source 1..20: mol_type = other RNA
gtggtactttcgttagtgga

SEQ ID NO: 5576 - RNA, 20 nt, synthetic construct
  misc_feature 1..20: note = antisense sequence
  source 1..20: mol_type = other RNA
agtggtactttcgttagtgg

SEQ ID NO: 5577 - RNA, 20 nt, synthetic construct
  misc_feature 1..20: note = antisense sequence
  source 1..20: mol_type = other RNA
ggtggcatcctatttaagta

SEQ ID NO: 5578 - RNA, 20 nt, synthetic construct
  misc_feature 1..20: note = antisense sequence
  source 1..20: mol_type = other RNA
gggtggcatcctatttaagt

SEQ ID NO: 5579 - RNA, 20 nt, synthetic construct
  misc_feature 1..20: note = antisense sequence
  source 1..20: mol_type = other RNA
agggtggcatcctatttaag

SEQ ID NO: 5580 - RNA, 20 nt, synthetic construct
  misc_feature 1..20: note = antisense sequence
  source 1..20: mol_type = other RNA
gcagggtggcatcctattta

SEQ ID NO: 5581 - RNA, 20 nt, synthetic construct
  misc_feature 1..20: note = antisense sequence
  source 1..20: mol_type = other RNA
agcagggtggcatcctattt

SEQ ID NO: 5582 - RNA, 20 nt, synthetic construct
  misc_feature 1..20: note = antisense sequence
  source 1..20: mol_type = other RNA
aagcagggtggcatcctatt

SEQ ID NO: 5583 - RNA, 20 nt, synthetic construct
  misc_feature 1..20: note = antisense sequence
  source 1..20: mol_type = other RNA
aaagcagggtggcatcctat

SEQ ID NO: 5584 - RNA, 20 nt, synthetic construct
  misc_feature 1..20: note = antisense sequence
  source 1..20: mol_type = other RNA
caaagcagggtggcatccta

SEQ ID NO: 5585 - RNA, 20 nt, synthetic construct
  misc_feature 1..20: note = antisense sequence
  source 1..20: mol_type = other RNA
acaaagcagggtggcatcct

SEQ ID NO: 5586 - RNA, 20 nt, synthetic construct
  misc_feature 1..20: note = antisense sequence
  source 1..20: mol_type = other RNA
aacaaagcagggtggcatcc

SEQ ID NO: 5587 - RNA, 20 nt, synthetic construct
  misc_feature 1..20: note = antisense sequence
  source 1..20: mol_type = other RNA
cactgcatacggaaaggcgt

SEQ ID NO: 5588 - RNA, 20 nt, synthetic construct
  misc_feature 1..20: note = antisense sequence
  source 1..20: mol_type = other RNA
gcactgcatacggaaaggcg

SEQ ID NO: 5589 - RNA, 20 nt, synthetic construct
  misc_feature 1..20: note = antisense sequence
  source 1..20: mol_type = other RNA
gagcactgcatacggaaagg

SEQ ID NO: 5590 - RNA, 20 nt, synthetic construct
  misc_feature 1..20: note = antisense sequence
  source 1..20: mol_type = other RNA
ggagcactgcatacggaaag

SEQ ID NO: 5591 - RNA, 20 nt, synthetic construct
  misc_feature 1..20: note = antisense sequence
  source 1..20: mol_type = other RNA
tggagcactgcatacggaaa

SEQ ID NO: 5592 - RNA, 20 nt, synthetic construct
  misc_feature 1..20: note = antisense sequence
  source 1..20: mol_type = other RNA
atggagcactgcatacggaa

SEQ ID NO: 5593 - RNA, 20 nt, synthetic construct
  misc_feature 1..20: note = antisense sequence
  source 1..20: mol_type = other RNA
catggagcactgcatacgga

SEQ ID NO: 5594 - RNA, 20 nt, synthetic construct
  misc_feature 1..20: note = antisense sequence
  source 1..20: mol_type = other RNA
gcatggagcactgcatacgg

SEQ ID NO: 5595 - RNA, 20 nt, synthetic construct
  misc_feature 1..20: note = antisense sequence
  source 1..20: mol_type = other RNA
agcatggagcactgcatacg

SEQ ID NO: 5596 - RNA, 20 nt, synthetic construct
  misc_feature 1..20: note = antisense sequence
  source 1..20: mol_type = other RNA
cagcatggagcactgcatac

SEQ ID NO: 5597 - RNA, 20 nt, synthetic construct
  misc_feature 1..20: note = antisense sequence
  source 1..20: mol_type = other RNA
acagcatggagcactgcata

SEQ ID NO: 5598 - RNA, 20 nt, synthetic construct
  misc_feature 1..20: note = antisense sequence
  source 1..20: mol_type = other RNA
cacagcatggagcactgcat

SEQ ID NO: 5599 - RNA, 20 nt, synthetic construct
  misc_feature 1..20: note = antisense sequence
  source 1..20: mol_type = other RNA
actgcacagcatggagcact

SEQ ID NO: 5600 - RNA, 20 nt, synthetic construct
  misc_feature 1..20: note = antisense sequence
  source 1..20: mol_type = other RNA
tgactgcacagcatggagca

SEQ ID NO: 5601 - RNA, 20 nt, synthetic construct
  misc_feature 1..20: note = antisense sequence
  source 1..20: mol_type = other RNA
gtgactgcacagcatggagc

SEQ ID NO: 5602 - RNA, 20 nt, synthetic construct
  misc_feature 1..20: note = antisense sequence
  source 1..20: mol_type = other RNA
ccgtgactgcacagcatgga

SEQ ID NO: 5603 - RNA, 20 nt, synthetic construct
  misc_feature 1..20: note = antisense sequence
  source 1..20: mol_type = other RNA
tccgtgactgcacagcatgg

SEQ ID NO: 5604 - RNA, 20 nt, synthetic construct
  misc_feature 1..20: note = antisense sequence
  source 1..20: mol_type = other RNA
ttccgtgactgcacagcatg

SEQ ID NO: 5605 - RNA, 20 nt, synthetic construct
  misc_feature 1..20: note = antisense sequence
  source 1..20: mol_type = other RNA
tttccgtgactgcacagcat

SEQ ID NO: 5606 - RNA, 20 nt, synthetic construct
  misc_feature 1..20: note = antisense sequence
  source 1..20: mol_type = other RNA
atttccgtgactgcacagca

SEQ ID NO: 5607 - RNA, 20 nt, synthetic construct
  misc_feature 1..20: note = antisense sequence
  source 1..20: mol_type = other RNA
aatttccgtgactgcacagc

SEQ ID NO: 5608 - RNA, 20 nt, synthetic construct
  misc_feature 1..20: note = antisense sequence
  source 1..20: mol_type = other RNA
taatttccgtgactgcacag

SEQ ID NO: 5609 - RNA, 20 nt, synthetic construct
  misc_feature 1..20: note = antisense sequence
  source 1..20: mol_type = other RNA
ttaatttccgtgactgcaca

SEQ ID NO: 5610 - RNA, 20 nt, synthetic construct
  misc_feature 1..20: note = antisense sequence
  source 1..20: mol_type = other RNA
ctgaacgctgaactcattaa

SEQ ID NO: 5611 - RNA, 20 nt, synthetic construct
  misc_feature 1..20: note = antisense sequence
  source 1..20: mol_type = other RNA
cctgaacgctgaactcatta

SEQ ID NO: 5612 - RNA, 20 nt, synthetic construct
  misc_feature 1..20: note = antisense sequence
  source 1..20: mol_type = other RNA
catcctgaacgctgaactca

SEQ ID NO: 5613 - RNA, 20 nt, synthetic construct
  misc_feature 1..20: note = antisense sequence
  source 1..20: mol_type = other RNA
gcatcctgaacgctgaactc

SEQ ID NO: 5614 - RNA, 20 nt, synthetic construct
  misc_feature 1..20: note = antisense sequence
  source 1..20: mol_type = other RNA
tggcatcctgaacgctgaac

SEQ ID NO: 5615 - RNA, 20 nt, synthetic construct
  misc_feature 1..20: note = antisense sequence
  source 1..20: mol_type = other RNA
cctggcatcctgaacgctga

SEQ ID NO: 5616 - RNA, 20 nt, synthetic construct
  misc_feature 1..20: note = antisense sequence
  source 1..20: mol_type = other RNA
ccacatgagcacagaactct

SEQ ID NO: 5617 - RNA, 20 nt, synthetic construct
  misc_feature 1..20: note = antisense sequence
  source 1..20: mol_type = other RNA
gccacatgagcacagaactc

SEQ ID NO: 5618 - RNA, 20 nt, synthetic construct
  misc_feature 1..20: note = antisense sequence
  source 1..20: mol_type = other RNA
agccacatgagcacagaact

SEQ ID NO: 5619 - RNA, 20 nt, synthetic construct
  misc_feature 1..20: note = antisense sequence
  source 1..20: mol_type = other RNA
tgtaagccacatgagcacag

SEQ ID NO: 5620 - RNA, 20 nt, synthetic construct
  misc_feature 1..20: note = antisense sequence
  source 1..20: mol_type = other RNA
tcgtgtgtttgtgtaagcca

SEQ ID NO: 5621 - RNA, 20 nt, synthetic construct
  misc_feature 1..20: note = antisense sequence
  source 1..20: mol_type = other RNA
ctcgtgtgtttgtgtaagcc

SEQ ID NO: 5622 - RNA, 20 nt, synthetic construct
  misc_feature 1..20: note = antisense sequence
  source 1..20: mol_type = other RNA
caactcgtgtgtttgtgtaa

SEQ ID NO: 5623 - RNA, 20 nt, synthetic construct
  misc_feature 1..20: note = antisense sequence
  source 1..20: mol_type = other RNA
cggatctatgtttcaccaaa

SEQ ID NO: 5624 - RNA, 20 nt, synthetic construct
  misc_feature 1..20: note = antisense sequence
  source 1..20: mol_type = other RNA
tcggatctatgtttcaccaa

SEQ ID NO: 5625 - RNA, 20 nt, synthetic construct
  misc_feature 1..20: note = antisense sequence
  source 1..20: mol_type = other RNA
ttcggatctatgtttcacca

SEQ ID NO: 5626 - RNA, 20 nt, synthetic construct
  misc_feature 1..20: note = antisense sequence
  source 1..20: mol_type = other RNA
tttcggatctatgtttcacc

SEQ ID NO: 5627 - RNA, 20 nt, synthetic construct
  misc_feature 1..20: note = antisense sequence
  source 1..20: mol_type = other RNA
ctttcggatctatgtttcac

SEQ ID NO: 5628 - RNA, 20 nt, synthetic construct
  misc_feature 1..20: note = antisense sequence
  source 1..20: mol_type = other RNA
catcatctttcggatctatg

SEQ ID NO: 5629 - RNA, 20 nt, synthetic construct
  misc_feature 1..20: note = antisense sequence
  source 1..20: mol_type = other RNA
gcatcatctttcggatctat

SEQ ID NO: 5630 - RNA, 20 nt, synthetic construct
  misc_feature 1..20: note = antisense sequence
  source 1..20: mol_type = other RNA
agcatcatctttcggatcta

SEQ ID NO: 5631 - RNA, 20 nt, synthetic construct
  misc_feature 1..20: note = antisense sequence
  source 1..20: mol_type = other RNA
cagcatcatctttcggatct

SEQ ID NO: 5632 - RNA, 20 nt, synthetic construct
  misc_feature 1..20: note = antisense sequence
  source 1..20: mol_type = other RNA
tcagcatcatctttcggatc

SEQ ID NO: 5633 - RNA, 20 nt, synthetic construct
  misc_feature 1..20: note = antisense sequence
  source 1..20: mol_type = other RNA
catcagcatcatctttcgga

SEQ ID NO: 5634 - RNA, 20 nt, synthetic construct
  misc_feature 1..20: note = antisense sequence
  source 1..20: mol_type = other RNA
caccacatcagcatcatctt

SEQ ID NO: 5635 - RNA, 20 nt, synthetic construct
  misc_feature 1..20: note = antisense sequence
  source 1..20: mol_type = other RNA
cttcaccacatcagcatcat

SEQ ID NO: 5636 - RNA, 20 nt, synthetic construct
  misc_feature 1..20: note = antisense sequence
  source 1..20: mol_type = other RNA
ccttcaccacatcagcatca

SEQ ID NO: 5637 - RNA, 20 nt, synthetic construct
  misc_feature 1..20: note = antisense sequence
  source 1..20: mol_type = other RNA
cccttcaccacatcagcatc

SEQ ID NO: 5638 - RNA, 20 nt, synthetic construct
  misc_feature 1..20: note = antisense sequence
  source 1..20: mol_type = other RNA
tctcagacctactcttgatc

SEQ ID NO: 5639 - RNA, 20 nt, synthetic construct
  misc_feature 1..20: note = antisense sequence
  source 1..20: mol_type = other RNA
ctctcagacctactcttgat

SEQ ID NO: 5640 - RNA, 20 nt, synthetic construct
  misc_feature 1..20: note = antisense sequence
  source 1..20: mol_type = other RNA
agctcctctcagacctactc

SEQ ID NO: 5641 - RNA, 20 nt, synthetic construct
  misc_feature 1..20: note = antisense sequence
  source 1..20: mol_type = other RNA
cagctcctctcagacctact

SEQ ID NO: 5642 - RNA, 20 nt, synthetic construct
  misc_feature 1..20: note = antisense sequence
  source 1..20: mol_type = other RNA
tttgccagctcctctcagac

SEQ ID NO: 5643 - RNA, 20 nt, synthetic construct
  misc_feature 1..20: note = antisense sequence
  source 1..20: mol_type = other RNA
cctgctttgccagctcctct

SEQ ID NO: 5644 - RNA, 20 nt, synthetic construct
  misc_feature 1..20: note = antisense sequence
  source 1..20: mol_type = other RNA
ccatatcctcccaccacaaa

SEQ ID NO: 5645 - RNA, 20 nt, synthetic construct
  misc_feature 1..20: note = antisense sequence
  source 1..20: mol_type = other RNA
cccatatcctcccaccacaa

SEQ ID NO: 5646 - RNA, 20 nt, synthetic construct
  misc_feature 1..20: note = antisense sequence
  source 1..20: mol_type = other RNA
tacagacatctgctctttcc

SEQ ID NO: 5647 - RNA, 20 nt, synthetic construct
  misc_feature 1..20: note = antisense sequence
  source 1..20: mol_type = other RNA
tctacagacatctgctcttt

SEQ ID NO: 5648 - RNA, 20 nt, synthetic construct
  misc_feature 1..20: note = antisense sequence
  source 1..20: mol_type = other RNA
tatctacagacatctgctct

SEQ ID NO: 5649 - RNA, 20 nt, synthetic construct
  misc_feature 1..20: note = antisense sequence
  source 1..20: mol_type = other RNA
gtatctacagacatctgctc

SEQ ID NO: 5650 - RNA, 20 nt, synthetic construct
  misc_feature 1..20: note = antisense sequence
  source 1..20: mol_type = other RNA
agtatctacagacatctgct

SEQ ID NO: 5651 - RNA, 20 nt, synthetic construct
  misc_feature 1..20: note = antisense sequence
  source 1..20: mol_type = other RNA
tagtatctacagacatctgc

SEQ ID NO: 5652 - RNA, 20 nt, synthetic construct
  misc_feature 1..20: note = antisense sequence
  source 1..20: mol_type = other RNA
ctcctagagtgtttcccaaa

SEQ ID NO: 5653 - RNA, 20 nt, synthetic construct
  misc_feature 1..20: note = antisense sequence
  source 1..20: mol_type = other RNA
ctacccagaataactcctag

SEQ ID NO: 5654 - RNA, 20 nt, synthetic construct
  misc_feature 1..20: note = antisense sequence
  source 1..20: mol_type = other RNA
gctacccagaataactccta

SEQ ID NO: 5655 - RNA, 20 nt, synthetic construct
  misc_feature 1..20: note = antisense sequence
  source 1..20: mol_type = other RNA
tgctacccagaataactcct

SEQ ID NO: 5656 - RNA, 20 nt, synthetic construct
  misc_feature 1..20: note = antisense sequence
  source 1..20: mol_type = other RNA
aagtgctacccagaataact

SEQ ID NO: 5657 - RNA, 20 nt, synthetic construct
  misc_feature 1..20: note = antisense sequence
  source 1..20: mol_type = other RNA
taagtgctacccagaataac

SEQ ID NO: 5658 - RNA, 20 nt, synthetic construct
  misc_feature 1..20: note = antisense sequence
  source 1..20: mol_type = other RNA
ctgtaagaagttgtcccatt

SEQ ID NO: 5659 - RNA, 20 nt, synthetic construct
  misc_feature 1..20: note = antisense sequence
  source 1..20: mol_type = other RNA
gctgtaagaagttgtcccat

SEQ ID NO: 5660 - RNA, 20 nt, synthetic construct
  misc_feature 1..20: note = antisense sequence
  source 1..20: mol_type = other RNA
ggctgtaagaagttgtccca

SEQ ID NO: 5661 - RNA, 20 nt, synthetic construct
  misc_feature 1..20: note = antisense sequence
  source 1..20: mol_type = other RNA
tggctgtaagaagttgtccc

SEQ ID NO: 5662 - RNA, 20 nt, synthetic construct
  misc_feature 1..20: note = antisense sequence
  source 1..20: mol_type = other RNA
ctggctgtaagaagttgtcc

SEQ ID NO: 5663 - RNA, 20 nt, synthetic construct
  misc_feature 1..20: note = antisense sequence
  source 1..20: mol_type = other RNA
tctggctgtaagaagttgtc

SEQ ID NO: 5664 - RNA, 20 nt, synthetic construct
  misc_feature 1..20: note = antisense sequence
  source 1..20: mol_type = other RNA
aggaggcaaggaagtatagt

SEQ ID NO: 5665 - RNA, 20 nt, synthetic construct
  misc_feature 1..20: note = antisense sequence
  source 1..20: mol_type = other RNA
tgtgtctggtggaaaggagg

SEQ ID NO: 5666 - RNA, 20 nt, synthetic construct
  misc_feature 1..20: note = antisense sequence
  source 1..20: mol_type = other RNA
tctgtgtctggtggaaagga

SEQ ID NO: 5667 - RNA, 20 nt, synthetic construct
  misc_feature 1..20: note = antisense sequence
  source 1..20: mol_type = other RNA
tatctgtgtctggtggaaag

SEQ ID NO: 5668 - RNA, 20 nt, synthetic construct
  misc_feature 1..20: note = antisense sequence
  source 1..20: mol_type = other RNA
aacttcaaagtgagtgtgtg

SEQ ID NO: 5669 - RNA, 20 nt, synthetic construct
  misc_feature 1..20: note = antisense sequence
  source 1..20: mol_type = other RNA
gggtctccagttattacaaa

SEQ ID NO: 5670 - RNA, 20 nt, synthetic construct
  misc_feature 1..20: note = antisense sequence
  source 1..20: mol_type = other RNA
tgggtctccagttattacaa

SEQ ID NO: 5671 - RNA, 20 nt, synthetic construct
  misc_feature 1..20: note = antisense sequence
  source 1..20: mol_type = other RNA
gtgggtctccagttattaca

SEQ ID NO: 5672 - RNA, 20 nt, synthetic construct
  misc_feature 1..20: note = antisense sequence
  source 1..20: mol_type = other RNA
tgtgggtctccagttattac

SEQ ID NO: 5673 - RNA, 20 nt, synthetic construct
  misc_feature 1..20: note = antisense sequence
  source 1..20: mol_type = other RNA
ctgtgggtctccagttatta

SEQ ID NO: 5674 - RNA, 20 nt, synthetic construct
  misc_feature 1..20: note = antisense sequence
  source 1..20: mol_type = other RNA
gtcctgtgggtctccagtta

SEQ ID NO: 5675 - RNA, 20 nt, synthetic construct
  misc_feature 1..20: note = antisense sequence
  source 1..20: mol_type = other RNA
aagtcctgtgggtctccagt

SEQ ID NO: 5676 - RNA, 20 nt, synthetic construct
  misc_feature 1..20: note = antisense sequence
  source 1..20: mol_type = other RNA
aaagtcctgtgggtctccag

SEQ ID NO: 5677 - RNA, 20 nt, synthetic construct
  misc_feature 1..20: note = antisense sequence
  source 1..20: mol_type = other RNA
gctaaagtcctgtgggtctc

SEQ ID NO: 5678 - RNA, 20 nt, synthetic construct
  misc_feature 1..20: note = antisense sequence
  source 1..20: mol_type = other RNA
gtgctaaagtcctgtgggtc

SEQ ID NO: 5679 - RNA, 20 nt, synthetic construct
  misc_feature 1..20: note = antisense sequence
  source 1..20: mol_type = other RNA
agtgctaaagtcctgtgggt

SEQ ID NO: 5680 - RNA, 20 nt, synthetic construct
  misc_feature 1..20: note = antisense sequence
  source 1..20: mol_type = other RNA
tagtgctaaagtcctgtggg

SEQ ID NO: 5681 - RNA, 20 nt, synthetic construct
  misc_feature 1..20: note = antisense sequence
  source 1..20: mol_type = other RNA
ttagtgctaaagtcctgtgg

SEQ ID NO: 5682 - RNA, 20 nt, synthetic construct
  misc_feature 1..20: note = antisense sequence
  source 1..20: mol_type = other RNA
ccatagcaagcgaattgttt

SEQ ID NO: 5683 - RNA, 20 nt, synthetic construct
  misc_feature 1..20: note = antisense sequence
  source 1..20: mol_type = other RNA
gccatagcaagcgaattgtt

SEQ ID NO: 5684 - RNA, 20 nt, synthetic construct
  misc_feature 1..20: note = antisense sequence
  source 1..20: mol_type = other RNA
tgccatagcaagcgaattgt

SEQ ID NO: 5685 - RNA, 20 nt, synthetic construct
  misc_feature 1..20: note = antisense sequence
  source 1..20: mol_type = other RNA
aacttcatcttgccatagca

SEQ ID NO: 5686 - RNA, 20 nt, synthetic construct
  misc_feature 1..20: note = antisense sequence
  source 1..20: mol_type = other RNA
taacttcatcttgccatagc

SEQ ID NO: 5687 - RNA, 20 nt, synthetic construct
  misc_feature 1..20: note = antisense sequence
  source 1..20: mol_type = other RNA
gtttcatcctgggaagctgc

SEQ ID NO: 5688 - RNA, 20 nt, synthetic construct
  misc_feature 1..20: note = antisense sequence
  source 1..20: mol_type = other RNA
ttttccaagtttcatcctgg

SEQ ID NO: 5689 - RNA, 20 nt, synthetic construct
  misc_feature 1..20: note = antisense sequence
  source 1..20: mol_type = other RNA
cctccatcaacaagtttaga

SEQ ID NO: 5690 - RNA, 20 nt, synthetic construct
  misc_feature 1..20: note = antisense sequence
  source 1..20: mol_type = other RNA
acctccatcaacaagtttag

SEQ ID NO: 5691 - RNA, 20 nt, synthetic construct
  misc_feature 1..20: note = antisense sequence
  source 1..20: mol_type = other RNA
ctacctccatcaacaagttt

SEQ ID NO: 5692 - RNA, 20 nt, synthetic construct
  misc_feature 1..20: note = antisense sequence
  source 1..20: mol_type = other RNA
cctacctccatcaacaagtt

SEQ ID NO: 5693 - RNA, 20 nt, synthetic construct
  misc_feature 1..20: note = antisense sequence
  source 1..20: mol_type = other RNA
acctacctccatcaacaagt

SEQ ID NO: 5694 - RNA, 20 nt, synthetic construct
  misc_feature 1..20: note = antisense sequence
  source 1..20: mol_type = other RNA
tacctacctccatcaacaag

SEQ ID NO: 5695 - RNA, 20 nt, synthetic construct
  misc_feature 1..20: note = antisense sequence
  source 1..20: mol_type = other RNA
atacctacctccatcaacaa

SEQ ID NO: 5696 - RNA, 20 nt, synthetic construct
  misc_feature 1..20: note = antisense sequence
  source 1..20: mol_type = other RNA
gatacctacctccatcaaca

SEQ ID NO: 5697 - RNA, 20 nt, synthetic construct
  misc_feature 1..20: note = antisense sequence
  source 1..20: mol_type = other RNA
agatacctacctccatcaac

SEQ ID NO: 5698 - RNA, 20 nt, synthetic construct
  misc_feature 1..20: note = antisense sequence
  source 1..20: mol_type = other RNA
aagatacctacctccatcaa

SEQ ID NO: 5699 - RNA, 20 nt, synthetic construct
  misc_feature 1..20: note = antisense sequence
  source 1..20: mol_type = other RNA
caagatacctacctccatca

SEQ ID NO: 5700 - RNA, 20 nt, synthetic construct
  misc_feature 1..20: note = antisense sequence
  source 1..20: mol_type = other RNA
cagcaagatacctacctcca

SEQ ID NO: 5701 - RNA, 20 nt, synthetic construct
  misc_feature 1..20: note = antisense sequence
  source 1..20: mol_type = other RNA
tcagcaagatacctacctcc

SEQ ID NO: 5702 - RNA, 20 nt, synthetic construct
  misc_feature 1..20: note = antisense sequence
  source 1..20: mol_type = other RNA
gtcagcaagatacctacctc

SEQ ID NO: 5703 - RNA, 20 nt, synthetic construct
  misc_feature 1..20: note = antisense sequence
  source 1..20: mol_type = other RNA
tgtcagcaagatacctacct

SEQ ID NO: 5704 - RNA, 20 nt, synthetic construct
  misc_feature 1..20: note = antisense sequence
  source 1..20: mol_type = other RNA
atgtcagcaagatacctacc

SEQ ID NO: 5705 - RNA, 20 nt, synthetic construct
  misc_feature 1..20: note = antisense sequence
  source 1..20: mol_type = other RNA
tatgtcagcaagatacctac

SEQ ID NO: 5706 - RNA, 20 nt, synthetic construct
  misc_feature 1..20: note = antisense sequence
  source 1..20: mol_type = other RNA
tcagtgtctccttcaaacaa

SEQ ID NO: 5707 - RNA, 20 nt, synthetic construct
  misc_feature 1..20: note = antisense sequence
  source 1..20: mol_type = other RNA
actcagtgtctccttcaaac

SEQ ID NO: 5708 - RNA, 20 nt, synthetic construct
  misc_feature 1..20: note = antisense sequence
  source 1..20: mol_type = other RNA
ccaactcagtgtctccttca

SEQ ID NO: 5709 - RNA, 20 nt, synthetic construct
  misc_feature 1..20: note = antisense sequence
  source 1..20: mol_type = other RNA
gcaacacaaccatttggaaa

SEQ ID NO: 5710 - RNA, 20 nt, synthetic construct
  misc_feature 1..20: note = antisense sequence
  source 1..20: mol_type = other RNA
agcaacacaaccatttggaa

SEQ ID NO: 5711 - RNA, 20 nt, synthetic construct
  misc_feature 1..20: note = antisense sequence
  source 1..20: mol_type = other RNA
aagcaacacaaccatttgga

SEQ ID NO: 5712 - RNA, 20 nt, synthetic construct
  misc_feature 1..20: note = antisense sequence
  source 1..20: mol_type = other RNA
gaagcaacacaaccatttgg

SEQ ID NO: 5713 - RNA, 20 nt, synthetic construct
  misc_feature 1..20: note = antisense sequence
  source 1..20: mol_type = other RNA
acagaagcaacacaaccatt

SEQ ID NO: 5714 - RNA, 20 nt, synthetic construct
  misc_feature 1..20: note = antisense sequence
  source 1..20: mol_type = other RNA
tacagaagcaacacaaccat

SEQ ID NO: 5715 - RNA, 20 nt, synthetic construct
  misc_feature 1..20: note = antisense sequence
  source 1..20: mol_type = other RNA
aatgagtacagaagcaacac

SEQ ID NO: 5716 - RNA, 20 nt, synthetic construct
  misc_feature 1..20: note = antisense sequence
  source 1..20: mol_type = other RNA
ggccaatgagtacagaagca

SEQ ID NO: 5717 - RNA, 20 nt, synthetic construct
  misc_feature 1..20: note = antisense sequence
  source 1..20: mol_type = other RNA
agacctctagtggtaaagat

SEQ ID NO: 5718 - RNA, 20 nt, synthetic construct
  misc_feature 1..20: note = antisense sequence
  source 1..20: mol_type = other RNA
cagacctctagtggtaaaga

SEQ ID NO: 5719 - RNA, 20 nt, synthetic construct
  misc_feature 1..20: note = antisense sequence
  source 1..20: mol_type = other RNA
acagacctctagtggtaaag

SEQ ID NO: 5720 - RNA, 20 nt, synthetic construct
  misc_feature 1..20: note = antisense sequence
  source 1..20: mol_type = other RNA
cacagacctctagtggtaaa

SEQ ID NO: 5721 - RNA, 20 nt, synthetic construct
  misc_feature 1..20: note = antisense sequence
  source 1..20: mol_type = other RNA
aggagccacagacctctagt

SEQ ID NO: 5722 - RNA, 20 nt, synthetic construct
  misc_feature 1..20: note = antisense sequence
  source 1..20: mol_type = other RNA
agcaccataaccttgagaag

SEQ ID NO: 5723 - RNA, 20 nt, synthetic construct
  misc_feature 1..20: note = antisense sequence
  source 1..20: mol_type = other RNA
atagcaccataaccttgaga

SEQ ID NO: 5724 - RNA, 20 nt, synthetic construct
  misc_feature 1..20: note = antisense sequence
  source 1..20: mol_type = other RNA
tatagcaccataaccttgag

SEQ ID NO: 5725 - RNA, 20 nt, synthetic construct
  misc_feature 1..20: note = antisense sequence
  source 1..20: mol_type = other RNA
gtggatgtatatggttgctg

SEQ ID NO: 5726 - RNA, 20 nt, synthetic construct
  misc_feature 1..20: note = antisense sequence
  source 1..20: mol_type = other RNA
tgtggatgtatatggttgct

SEQ ID NO: 5727 - RNA, 20 nt, synthetic construct
  misc_feature 1..20: note = antisense sequence
  source 1..20: mol_type = other RNA
agtgtggatgtatatggttg

SEQ ID NO: 5728 - RNA, 20 nt, synthetic construct
  misc_feature 1..20: note = antisense sequence
  source 1..20: mol_type = other RNA
cagtgtggatgtatatggtt

SEQ ID NO: 5729 - RNA, 20 nt, synthetic construct
  misc_feature 1..20: note = antisense sequence
  source 1..20: mol_type = other RNA
tcagtgtggatgtatatggt

SEQ ID NO: 5730 - RNA, 20 nt, synthetic construct
  misc_feature 1..20: note = antisense sequence
  source 1..20: mol_type = other RNA
tgatctcagtgtggatgtat

SEQ ID NO: 5731 - RNA, 20 nt, synthetic construct
  misc_feature 1..20: note = antisense sequence
  source 1..20: mol_type = other RNA
ttgatctcagtgtggatgta

SEQ ID NO: 5732 - RNA, 20 nt, synthetic construct
  misc_feature 1..20: note = antisense sequence
  source 1..20: mol_type = other RNA
gtttgatctcagtgtggatg

SEQ ID NO: 5733 - RNA, 20 nt, synthetic construct
  misc_feature 1..20: note = antisense sequence
  source 1..20: mol_type = other RNA
agtttgatctcagtgtggat

SEQ ID NO: 5734 - RNA, 20 nt, synthetic construct
  misc_feature 1..20: note = antisense sequence
  source 1..20: mol_type = other RNA
gagtttgatctcagtgtgga

SEQ ID NO: 5735 - RNA, 20 nt, synthetic construct
  misc_feature 1..20: note = antisense sequence
  source 1..20: mol_type = other RNA
ggttaagtgagtttgatctc

SEQ ID NO: 5736 - RNA, 20 nt, synthetic construct
  misc_feature 1..20: note = antisense sequence
  source 1..20: mol_type = other RNA
tttgtgaaagttggaagccc

SEQ ID NO: 5737 - RNA, 20 nt, synthetic construct
  misc_feature 1..20: note = antisense sequence
  source 1..20: mol_type = other RNA
gagtttgtgaaagttggaag

SEQ ID NO: 5738 - RNA, 20 nt, synthetic construct
  misc_feature 1..20: note = antisense sequence
  source 1..20: mol_type = other RNA
tgaggcaatacaggaggttg

SEQ ID NO: 5739 - RNA, 20 nt, synthetic construct
  misc_feature 1..20: note = antisense sequence
  source 1..20: mol_type = other RNA
ttgaggcaatacaggaggtt

SEQ ID NO: 5740 - RNA, 20 nt, synthetic construct
  misc_feature 1..20: note = antisense sequence
  source 1..20: mol_type = other RNA
tttgaggcaatacaggaggt

SEQ ID NO: 5741 - RNA, 20 nt, synthetic construct
  misc_feature 1..20: note = antisense sequence
  source 1..20: mol_type = other RNA
cattttgaggcaatacagga

SEQ ID NO: 5742 - RNA, 20 nt, synthetic construct
  misc_feature 1..20: note = antisense sequence
  source 1..20: mol_type = other RNA
tcctggtggaaagagttaat

SEQ ID NO: 5743 - RNA, 20 nt, synthetic construct
  misc_feature 1..20: note = antisense sequence
  source 1..20: mol_type = other RNA
cctcctggtggaaagagtta

SEQ ID NO: 5744 - RNA, 20 nt, synthetic construct
  misc_feature 1..20: note = antisense sequence
  source 1..20: mol_type = other RNA
agcctcctggtggaaagagt

SEQ ID NO: 5745 - RNA, 20 nt, synthetic construct
  misc_feature 1..20: note = antisense sequence
  source 1..20: mol_type = other RNA
aagcctcctggtggaaagag

SEQ ID NO: 5746 - RNA, 20 nt, synthetic construct
  misc_feature 1..20: note = antisense sequence
  source 1..20: mol_type = other RNA
gccaaagcctcctggtggaa

SEQ ID NO: 5747 - RNA, 20 nt, synthetic construct
  misc_feature 1..20: note = antisense sequence
  source 1..20: mol_type = other RNA
cttgccaaagcctcctggtg

SEQ ID NO: 5748 - RNA, 20 nt, synthetic construct
  misc_feature 1..20: note = antisense sequence
  source 1..20: mol_type = other RNA
tcttgccaaagcctcctggt

SEQ ID NO: 5749 - RNA, 20 nt, synthetic construct
  misc_feature 1..20: note = antisense sequence
  source 1..20: mol_type = other RNA
tacctcttgccaaagcctcc

SEQ ID NO: 5750 - RNA, 20 nt, synthetic construct
  misc_feature 1..20: note = antisense sequence
  source 1..20: mol_type = other RNA
tagctcttacctcttgccaa

SEQ ID NO: 5751 - RNA, 20 nt, synthetic construct
  misc_feature 1..20: note = antisense sequence
  source 1..20: mol_type = other RNA
gtagctcttacctcttgcca

SEQ ID NO: 5752 - RNA, 20 nt, synthetic construct
  misc_feature 1..20: note = antisense sequence
  source 1..20: mol_type = other RNA
acattcttggtagctcttac

SEQ ID NO: 5753 - RNA, 20 nt, synthetic construct
  misc_feature 1..20: note = antisense sequence
  source 1..20: mol_type = other RNA
gtacattcttggtagctctt

SEQ ID NO: 5754 - RNA, 20 nt, synthetic construct
  misc_feature 1..20: note = antisense sequence
  source 1..20: mol_type = other RNA
ggtacattcttggtagctct

SEQ ID NO: 5755 - RNA, 20 nt, synthetic construct
  misc_feature 1..20: note = antisense sequence
  source 1..20: mol_type = other RNA
tggtacattcttggtagctc

SEQ ID NO: 5756 - RNA, 20 nt, synthetic construct
  misc_feature 1..20: note = antisense sequence
  source 1..20: mol_type = other RNA
ctggtacattcttggtagct

SEQ ID NO: 5757 - RNA, 20 nt, synthetic construct
  misc_feature 1..20: note = antisense sequence
  source 1..20: mol_type = other RNA
ctgagccctggtacattctt

SEQ ID NO: 5758 - RNA, 20 nt, synthetic construct
  misc_feature 1..20: note = antisense sequence
  source 1..20: mol_type = other RNA
cctgagccctggtacattct

SEQ ID NO: 5759 - RNA, 20 nt, synthetic construct
  misc_feature 1..20: note = antisense sequence
  source 1..20: mol_type = other RNA
agcctgagccctggtacatt

SEQ ID NO: 5760 - RNA, 20 nt, synthetic construct
  misc_feature 1..20: note = antisense sequence
  source 1..20: mol_type = other RNA
aagcctgagccctggtacat

SEQ ID NO: 5761 - RNA, 20 nt, synthetic construct
  misc_feature 1..20: note = antisense sequence
  source 1..20: mol_type = other RNA
gacctgaaccacctgagaat

SEQ ID NO: 5762 - RNA, 20 nt, synthetic construct
  misc_feature 1..20: note = antisense sequence
  source 1..20: mol_type = other RNA
cgacctgaaccacctgagaa

SEQ ID NO: 5763 - RNA, 20 nt, synthetic construct
  misc_feature 1..20: note = antisense sequence
  source 1..20: mol_type = other RNA
accgacctgaaccacctgag

SEQ ID NO: 5764 - RNA, 20 nt, synthetic construct
  misc_feature 1..20: note = antisense sequence
  source 1..20: mol_type = other RNA
caccgacctgaaccacctga

SEQ ID NO: 5765 - RNA, 20 nt, synthetic construct
  misc_feature 1..20: note = antisense sequence
  source 1..20: mol_type = other RNA
tcaccgacctgaaccacctg

SEQ ID NO: 5766 - RNA, 20 nt, synthetic construct
  misc_feature 1..20: note = antisense sequence
  source 1..20: mol_type = other RNA
gcagtgactctttctagtat

SEQ ID NO: 5767 - RNA, 20 nt, synthetic construct
  misc_feature 1..20: note = antisense sequence
  source 1..20: mol_type = other RNA
tgcagtgactctttctagta

SEQ ID NO: 5768 - RNA, 20 nt, synthetic construct
  misc_feature 1..20: note = antisense sequence
  source 1..20: mol_type = other RNA
attacaaggacagggtgacc

SEQ ID NO: 5769 - RNA, 20 nt, synthetic construct
  misc_feature 1..20: note = antisense sequence
  source 1..20: mol_type = other RNA
tattacaaggacagggtgac

SEQ ID NO: 5770 - RNA, 20 nt, synthetic construct
  misc_feature 1..20: note = antisense sequence
  source 1..20: mol_type = other RNA
ccctctaacctattttaagg

SEQ ID NO: 5771 - RNA, 20 nt, synthetic construct
  misc_feature 1..20: note = antisense sequence
  source 1..20: mol_type = other RNA
gccttctttcactctaatga

SEQ ID NO: 5772 - RNA, 20 nt, synthetic construct
  misc_feature 1..20: note = antisense sequence
  source 1..20: mol_type = other RNA
tctgagccaatcacaagttg

SEQ ID NO: 5773 - RNA, 20 nt, synthetic construct
  misc_feature 1..20: note = antisense sequence
  source 1..20: mol_type = other RNA
atctgagccaatcacaagtt

SEQ ID NO: 5774 - RNA, 20 nt, synthetic construct
  misc_feature 1..20: note = antisense sequence
  source 1..20: mol_type = other RNA
gatctgagccaatcacaagt

SEQ ID NO: 5775 - RNA, 20 nt, synthetic construct
  misc_feature 1..20: note = antisense sequence
  source 1..20: mol_type = other RNA
cagttgctcaaaacatgatg

SEQ ID NO: 5776 - RNA, 20 nt, synthetic construct
  misc_feature 1..20: note = antisense sequence
  source 1..20: mol_type = other RNA
catctcagttgctcaaaaca

SEQ ID NO: 5777 - RNA, 20 nt, synthetic construct
  misc_feature 1..20: note = antisense sequence
  source 1..20: mol_type = other RNA
tcatctcagttgctcaaaac

SEQ ID NO: 5778 - RNA, 20 nt, synthetic construct
  misc_feature 1..20: note = antisense sequence
  source 1..20: mol_type = other RNA
ctcatctcagttgctcaaaa

SEQ ID NO: 5779 - RNA, 20 nt, synthetic construct
  misc_feature 1..20: note = antisense sequence
  source 1..20: mol_type = other RNA
gattctcatctcagttgctc

SEQ ID NO: 5780 - RNA, 20 nt, synthetic construct
  misc_feature 1..20: note = antisense sequence
  source 1..20: mol_type = other RNA
ttggattctcatctcagttg

SEQ ID NO: 5781 - RNA, 20 nt, synthetic construct
  misc_feature 1..20: note = antisense sequence
  source 1..20: mol_type = other RNA
ccttggattctcatctcagt

SEQ ID NO: 5782 - RNA, 20 nt, synthetic construct
  misc_feature 1..20: note = antisense sequence
  source 1..20: mol_type = other RNA
tccttggattctcatctcag

SEQ ID NO: 5783 - RNA, 20 nt, synthetic construct
  misc_feature 1..20: note = antisense sequence
  source 1..20: mol_type = other RNA
ttagagtccttggattctca

SEQ ID NO: 5784 - RNA, 20 nt, synthetic construct
  misc_feature 1..20: note = antisense sequence
  source 1..20: mol_type = other RNA
gttagagtccttggattctc

SEQ ID NO: 5785 - RNA, 20 nt, synthetic construct
  misc_feature 1..20: note = antisense sequence
  source 1..20: mol_type = other RNA
cagttagagtccttggattc

SEQ ID NO: 5786 - RNA, 20 nt, synthetic construct
  misc_feature 1..20: note = antisense sequence
  source 1..20: mol_type = other RNA
attcagttagagtccttgga

SEQ ID NO: 5787 - RNA, 20 nt, synthetic construct
  misc_feature 1..20: note = antisense sequence
  source 1..20: mol_type = other RNA
cattcagttagagtccttgg

SEQ ID NO: 5788 - RNA, 20 nt, synthetic construct
  misc_feature 1..20: note = antisense sequence
  source 1..20: mol_type = other RNA
ccattcagttagagtccttg

SEQ ID NO: 5789 - RNA, 20 nt, synthetic construct
  misc_feature 1..20: note = antisense sequence
  source 1..20: mol_type = other RNA
tccattcagttagagtcctt

SEQ ID NO: 5790 - RNA, 20 nt, synthetic construct
  misc_feature 1..20: note = antisense sequence
  source 1..20: mol_type = other RNA
ttccattcagttagagtcct

SEQ ID NO: 5791 - RNA, 20 nt, synthetic construct
  misc_feature 1..20: note = antisense sequence
  source 1..20: mol_type = other RNA
caccattccattcagttaga

SEQ ID NO: 5792 - RNA, 20 nt, synthetic construct
  misc_feature 1..20: note = antisense sequence
  source 1..20: mol_type = other RNA
acaccattccattcagttag

SEQ ID NO: 5793 - RNA, 20 nt, synthetic construct
  misc_feature 1..20: note = antisense sequence
  source 1..20: mol_type = other RNA
gacaccattccattcagtta

SEQ ID NO: 5794 - RNA, 20 nt, synthetic construct
  misc_feature 1..20: note = antisense sequence
  source 1..20: mol_type = other RNA
tgacaccattccattcagtt

SEQ ID NO: 5795 - RNA, 20 nt, synthetic construct
  misc_feature 1..20: note = antisense sequence
  source 1..20: mol_type = other RNA
gatgacaccattccattcag

SEQ ID NO: 5796 - RNA, 20 nt, synthetic construct
  misc_feature 1..20: note = antisense sequence
  source 1..20: mol_type = other RNA
agatgacaccattccattca

SEQ ID NO: 5797 - RNA, 20 nt, synthetic construct
  misc_feature 1..20: note = antisense sequence
  source 1..20: mol_type = other RNA
gtacagatgacaccattcca

SEQ ID NO: 5798 - RNA, 20 nt, synthetic construct
  misc_feature 1..20: note = antisense sequence
  source 1..20: mol_type = other RNA
gagtacagatgacaccattc

SEQ ID NO: 5799 - RNA, 20 nt, synthetic construct
  misc_feature 1..20: note = antisense sequence
  source 1..20: mol_type = other RNA
ggagtacagatgacaccatt

SEQ ID NO: 5800 - RNA, 20 nt, synthetic construct
  misc_feature 1..20: note = antisense sequence
  source 1..20: mol_type = other RNA
gaggaggagtacagatgaca

SEQ ID NO: 5801 - RNA, 20 nt, synthetic construct
  misc_feature 1..20: note = antisense sequence
  source 1..20: mol_type = other RNA
agggaggaggagtacagatg

SEQ ID NO: 5802 - RNA, 20 nt, synthetic construct
  misc_feature 1..20: note = antisense sequence
  source 1..20: mol_type = other RNA
tagccagggaggaggagtac

SEQ ID NO: 5803 - RNA, 20 nt, synthetic construct
  misc_feature 1..20: note = antisense sequence
  source 1..20: mol_type = other RNA
ctagccagggaggaggagta

SEQ ID NO: 5804 - RNA, 20 nt, synthetic construct
  misc_feature 1..20: note = antisense sequence
  source 1..20: mol_type = other RNA
taagatgagggtgtcaggcc

SEQ ID NO: 5805 - RNA, 20 nt, synthetic construct
  misc_feature 1..20: note = antisense sequence
  source 1..20: mol_type = other RNA
ctaagatgagggtgtcaggc

SEQ ID NO: 5806 - RNA, 20 nt, synthetic construct
  misc_feature 1..20: note = antisense sequence
  source 1..20: mol_type = other RNA
gctgcaatgacatacatgaa

SEQ ID NO: 5807 - RNA, 20 nt, synthetic construct
  misc_feature 1..20: note = antisense sequence
  source 1..20: mol_type = other RNA
ggctgcaatgacatacatga

SEQ ID NO: 5808 - RNA, 20 nt, synthetic construct
  misc_feature 1..20: note = antisense sequence
  source 1..20: mol_type = other RNA
tggctgcaatgacatacatg

SEQ ID NO: 5809 - RNA, 20 nt, synthetic construct
  misc_feature 1..20: note = antisense sequence
  source 1..20: mol_type = other RNA
tctaaacttggctgcaatga

SEQ ID NO: 5810 - RNA, 20 nt, synthetic construct
  misc_feature 1..20: note = antisense sequence
  source 1..20: mol_type = other RNA
ctgtttctaaacttggctgc

SEQ ID NO: 5811 - RNA, 20 nt, synthetic construct
  misc_feature 1..20: note = antisense sequence
  source 1..20: mol_type = other RNA
ggtagaatccaaagaatcag

SEQ ID NO: 5812 - RNA, 20 nt, synthetic construct
  misc_feature 1..20: note = antisense sequence
  source 1..20: mol_type = other RNA
tgacagagtgagacttcatc

SEQ ID NO: 5813 - RNA, 20 nt, synthetic construct
  misc_feature 1..20: note = antisense sequence
  source 1..20: mol_type = other RNA
gtgacagagtgagacttcat

SEQ ID NO: 5814 - RNA, 20 nt, synthetic construct
  misc_feature 1..20: note = antisense sequence
  source 1..20: mol_type = other RNA
ggtgacagagtgagacttca

SEQ ID NO: 5815 - RNA, 20 nt, synthetic construct
  misc_feature 1..20: note = antisense sequence
  source 1..20: mol_type = other RNA
gggtgacagagtgagacttc

SEQ ID NO: 5816 - RNA, 20 nt, synthetic construct
  misc_feature 1..20: note = antisense sequence
  source 1..20: mol_type = other RNA
tgggtgacagagtgagactt

SEQ ID NO: 5817 - RNA, 20 nt, synthetic construct
  misc_feature 1..20: note = antisense sequence
  source 1..20: mol_type = other RNA
ctgggtgacagagtgagact

SEQ ID NO: 5818 - RNA, 20 nt, synthetic construct
  misc_feature 1..20: note = antisense sequence
  source 1..20: mol_type = other RNA
cctgggtgacagagtgagac

SEQ ID NO: 5819 - RNA, 20 nt, synthetic construct
  misc_feature 1..20: note = antisense sequence
  source 1..20: mol_type = other RNA
gcctgggtgacagagtgaga

SEQ ID NO: 5820 - RNA, 20 nt, synthetic construct
  misc_feature 1..20: note = antisense sequence
  source 1..20: mol_type = other RNA
agcctgggtgacagagtgag

SEQ ID NO: 5821 - RNA, 20 nt, synthetic construct
  misc_feature 1..20: note = antisense sequence
  source 1..20: mol_type = other RNA
cagcctgggtgacagagtga

SEQ ID NO: 5822 - RNA, 20 nt, synthetic construct
  misc_feature 1..20: note = antisense sequence
  source 1..20: mol_type = other RNA
tccagcctgggtgacagagt

SEQ ID NO: 5823 - RNA, 20 nt, synthetic construct
  misc_feature 1..20: note = antisense sequence
  source 1..20: mol_type = other RNA
aagccgagatcgtgccactg

SEQ ID NO: 5824 - RNA, 20 nt, synthetic construct
  misc_feature 1..20: note = antisense sequence
  source 1..20: mol_type = other RNA
taagccgagatcgtgccact

SEQ ID NO: 5825 - RNA, 20 nt, synthetic construct
  misc_feature 1..20: note = antisense sequence
  source 1..20: mol_type = other RNA
gtaagccgagatcgtgccac

SEQ ID NO: 5826 - RNA, 20 nt, synthetic construct
  misc_feature 1..20: note = antisense sequence
  source 1..20: mol_type = other RNA
agtaagccgagatcgtgcca

SEQ ID NO: 5827 - RNA, 20 nt, synthetic construct
  misc_feature 1..20: note = antisense sequence
  source 1..20: mol_type = other RNA
cagtaagccgagatcgtgcc

SEQ ID NO: 5828 - RNA, 20 nt, synthetic construct
  misc_feature 1..20: note = antisense sequence
  source 1..20: mol_type = other RNA
aacctgggaggcagaagttg

SEQ ID NO: 5829 - RNA, 20 nt, synthetic construct
  misc_feature 1..20: note = antisense sequence
  source 1..20: mol_type = other RNA
gaacctgggaggcagaagtt

SEQ ID NO: 5830 - RNA, 20 nt, synthetic construct
  misc_feature 1..20: note = antisense sequence
  source 1..20: mol_type = other RNA
tgaacctgggaggcagaagt

SEQ ID NO: 5831 - RNA, 20 nt, synthetic construct
  misc_feature 1..20: note = antisense sequence
  source 1..20: mol_type = other RNA
ttgaacctgggaggcagaag

SEQ ID NO: 5832 - RNA, 20 nt, synthetic construct
  misc_feature 1..20: note = antisense sequence
  source 1..20: mol_type = other RNA
aggaggctgaggcaggagaa

SEQ ID NO: 5833 - RNA, 20 nt, synthetic construct
  misc_feature 1..20: note = antisense sequence
  source 1..20: mol_type = other RNA
tcccagctactcaggaggct

SEQ ID NO: 5834 - RNA, 20 nt, synthetic construct
  misc_feature 1..20: note = antisense sequence
  source 1..20: mol_type = other RNA
agtcccagctactcaggagg

SEQ ID NO: 5835 - RNA, 20 nt, synthetic construct
  misc_feature 1..20: note = antisense sequence
  source 1..20: mol_type = other RNA
tagtcccagctactcaggag

SEQ ID NO: 5836 - RNA, 20 nt, synthetic construct
  misc_feature 1..20: note = antisense sequence
  source 1..20: mol_type = other RNA
cacacctgtagtcccagcta

SEQ ID NO: 5837 - RNA, 20 nt, synthetic construct
  misc_feature 1..20: note = antisense sequence
  source 1..20: mol_type = other RNA
gcacacctgtagtcccagct

SEQ ID NO: 5838 - RNA, 20 nt, synthetic construct
  misc_feature 1..20: note = antisense sequence
  source 1..20: mol_type = other RNA
tgcacacctgtagtcccagc

SEQ ID NO: 5839 - RNA, 20 nt, synthetic construct
  misc_feature 1..20: note = antisense sequence
  source 1..20: mol_type = other RNA
acctcaattcaggagttcaa

SEQ ID NO: 5840 - RNA, 20 nt, synthetic construct
  misc_feature 1..20: note = antisense sequence
  source 1..20: mol_type = other RNA
cacctcaattcaggagttca

SEQ ID NO: 5841 - RNA, 20 nt, synthetic construct
  misc_feature 1..20: note = antisense sequence
  source 1..20: mol_type = other RNA
tcacctcaattcaggagttc

SEQ ID NO: 5842 - RNA, 20 nt, synthetic construct
  misc_feature 1..20: note = antisense sequence
  source 1..20: mol_type = other RNA
gcggatcacctcaattcagg

SEQ ID NO: 5843 - RNA, 20 nt, synthetic construct
  misc_feature 1..20: note = antisense sequence
  source 1..20: mol_type = other RNA
ggcggatcacctcaattcag

SEQ ID NO: 5844 - RNA, 20 nt, synthetic construct
  misc_feature 1..20: note = antisense sequence
  source 1..20: mol_type = other RNA
aggcggatcacctcaattca

SEQ ID NO: 5845 - RNA, 20 nt, synthetic construct
  misc_feature 1..20: note = antisense sequence
  source 1..20: mol_type = other RNA
caggcggatcacctcaattc

SEQ ID NO: 5846 - RNA, 20 nt, synthetic construct
  misc_feature 1..20: note = antisense sequence
  source 1..20: mol_type = other RNA
tcaggcggatcacctcaatt

SEQ ID NO: 5847 - RNA, 20 nt, synthetic construct
  misc_feature 1..20: note = antisense sequence
  source 1..20: mol_type = other RNA
gtcaggcggatcacctcaat

SEQ ID NO: 5848 - RNA, 20 nt, synthetic construct
  misc_feature 1..20: note = antisense sequence
  source 1..20: mol_type = other RNA
agtcaggcggatcacctcaa

SEQ ID NO: 5849 - RNA, 20 nt, synthetic construct
  misc_feature 1..20: note = antisense sequence
  source 1..20: mol_type = other RNA
aagtcaggcggatcacctca

SEQ ID NO: 5850 - RNA, 20 nt, synthetic construct
  misc_feature 1..20: note = antisense sequence
  source 1..20: mol_type = other RNA
caagtcaggcggatcacctc

SEQ ID NO: 5851 - RNA, 20 nt, synthetic construct
  misc_feature 1..20: note = antisense sequence
  source 1..20: mol_type = other RNA
ttgaaatcccagcactttgg

SEQ ID NO: 5852 - RNA, 20 nt, synthetic construct
  misc_feature 1..20: note = antisense sequence
  source 1..20: mol_type = other RNA
cttgaaatcccagcactttg

SEQ ID NO: 5853 - RNA, 20 nt, synthetic construct
  misc_feature 1..20: note = antisense sequence
  source 1..20: mol_type = other RNA
cacggtggctcacacttgaa

SEQ ID NO: 5854 - RNA, 20 nt, synthetic construct
  misc_feature 1..20: note = antisense sequence
  source 1..20: mol_type = other RNA
gcacggtggctcacacttga

SEQ ID NO: 5855 - RNA, 20 nt, synthetic construct
  misc_feature 1..20: note = antisense sequence
  source 1..20: mol_type = other RNA
aggcacggtggctcacactt

SEQ ID NO: 5856 - RNA, 20 nt, synthetic construct
  misc_feature 1..20: note = antisense sequence
  source 1..20: mol_type = other RNA
atgatgctaagccaggcacg

SEQ ID NO: 5857 - RNA, 20 nt, synthetic construct
  misc_feature 1..20: note = antisense sequence
  source 1..20: mol_type = other RNA
agatgatgctaagccaggca

SEQ ID NO: 5858 - RNA, 20 nt, synthetic construct
  misc_feature 1..20: note = antisense sequence
  source 1..20: mol_type = other RNA
aagatgatgctaagccaggc

SEQ ID NO: 5859 - RNA, 20 nt, synthetic construct
  misc_feature 1..20: note = antisense sequence
  source 1..20: mol_type = other RNA
aaagatgatgctaagccagg

SEQ ID NO: 5860 - RNA, 20 nt, synthetic construct
  misc_feature 1..20: note = antisense sequence
  source 1..20: mol_type = other RNA
tagggcctggaaatacagtc

SEQ ID NO: 5861 - RNA, 20 nt, synthetic construct
  misc_feature 1..20: note = antisense sequence
  source 1..20: mol_type = other RNA
tggtagggcctggaaataca

SEQ ID NO: 5862 - RNA, 20 nt, synthetic construct
  misc_feature 1..20: note = antisense sequence
  source 1..20: mol_type = other RNA
atggtagggcctggaaatac

SEQ ID NO: 5863 - RNA, 20 nt, synthetic construct
  misc_feature 1..20: note = antisense sequence
  source 1..20: mol_type = other RNA
tatggtagggcctggaaata

SEQ ID NO: 5864 - RNA, 20 nt, synthetic construct
  misc_feature 1..20: note = antisense sequence
  source 1..20: mol_type = other RNA
atatggtagggcctggaaat

SEQ ID NO: 5865 - RNA, 20 nt, synthetic construct
  misc_feature 1..20: note = antisense sequence
  source 1..20: mol_type = other RNA
tatatggtagggcctggaaa

SEQ ID NO: 5866 - RNA, 20 nt, synthetic construct
  misc_feature 1..20: note = antisense sequence
  source 1..20: mol_type = other RNA
tggagatacaggaactaatc

SEQ ID NO: 5867 - RNA, 20 nt, synthetic construct
  misc_feature 1..20: note = antisense sequence
  source 1..20: mol_type = other RNA
tagtgatccctggagataca

SEQ ID NO: 5868 - RNA, 20 nt, synthetic construct
  misc_feature 1..20: note = antisense sequence
  source 1..20: mol_type = other RNA
atagtgatccctggagatac

SEQ ID NO: 5869 - RNA, 20 nt, synthetic construct
  misc_feature 1..20: note = antisense sequence
  source 1..20: mol_type = other RNA
agatagtgatccctggagat

SEQ ID NO: 5870 - RNA, 20 nt, synthetic construct
  misc_feature 1..20: note = antisense sequence
  source 1..20: mol_type = other RNA
agaaagatagtgatccctgg

SEQ ID NO: 5871 - RNA, 20 nt, synthetic construct
  misc_feature 1..20: note = antisense sequence
  source 1..20: mol_type = other RNA
tagaaagatagtgatccctg

SEQ ID NO: 5872 - RNA, 20 nt, synthetic construct
  misc_feature 1..20: note = antisense sequence
  source 1..20: mol_type = other RNA
acagtgaatggttttagggc

SEQ ID NO: 5873 - RNA, 20 nt, synthetic construct
  misc_feature 1..20: note = antisense sequence
  source 1..20: mol_type = other RNA
atggtgacaagggaatgtat

SEQ ID NO: 5874 - RNA, 20 nt, synthetic construct
  misc_feature 1..20: note = antisense sequence
  source 1..20: mol_type = other RNA
aatggtgacaagggaatgta

SEQ ID NO: 5875 - RNA, 20 nt, synthetic construct
  misc_feature 1..20: note = antisense sequence
  source 1..20: mol_type = other RNA
taaatggtgacaagggaatg

SEQ ID NO: 5876 - RNA, 20 nt, synthetic construct
  misc_feature 1..20: note = antisense sequence
  source 1..20: mol_type = other RNA
caaataaatggtgacaaggg

SEQ ID NO: 5877 - RNA, 20 nt, synthetic construct
  misc_feature 1..20: note = antisense sequence
  source 1..20: mol_type = other RNA
ggcaagagggtatcaaataa

SEQ ID NO: 5878 - RNA, 20 nt, synthetic construct
  misc_feature 1..20: note = antisense sequence
  source 1..20: mol_type = other RNA
aggcaagagggtatcaaata

SEQ ID NO: 5879 - RNA, 20 nt, synthetic construct
  misc_feature 1..20: note = antisense sequence
  source 1..20: mol_type = other RNA
aaggcaagagggtatcaaat

SEQ ID NO: 5880 - RNA, 20 nt, synthetic construct
  misc_feature 1..20: note = antisense sequence
  source 1..20: mol_type = other RNA
caaggcaagagggtatcaaa

SEQ ID NO: 5881 - RNA, 20 nt, synthetic construct
  misc_feature 1..20: note = antisense sequence
  source 1..20: mol_type = other RNA
ccaaggcaagagggtatcaa

SEQ ID NO: 5882 - RNA, 20 nt, synthetic construct
  misc_feature 1..20: note = antisense sequence
  source 1..20: mol_type = other RNA
aattccaagccaaggcaaga

SEQ ID NO: 5883 - RNA, 20 nt, synthetic construct
  misc_feature 1..20: note = antisense sequence
  source 1..20: mol_type = other RNA
caaattccaagccaaggcaa

SEQ ID NO: 5884 - RNA, 20 nt, synthetic construct
  misc_feature 1..20: note = antisense sequence
  source 1..20: mol_type = other RNA
gtcagaaatcccaatctagt

SEQ ID NO: 5885 - RNA, 20 nt, synthetic construct
  misc_feature 1..20: note = antisense sequence
  source 1..20: mol_type = other RNA
ggtcagaaatcccaatctag

SEQ ID NO: 5886 - RNA, 20 nt, synthetic construct
  misc_feature 1..20: note = antisense sequence
  source 1..20: mol_type = other RNA
gggtcagaaatcccaatcta

SEQ ID NO: 5887 - RNA, 20 nt, synthetic construct
  misc_feature 1..20: note = antisense sequence
  source 1..20: mol_type = other RNA
ctaggtgggtcagaaatccc

SEQ ID NO: 5888 - RNA, 20 nt, synthetic construct
  misc_feature 1..20: note = antisense sequence
  source 1..20: mol_type = other RNA
actaggtgggtcagaaatcc

SEQ ID NO: 5889 - RNA, 20 nt, synthetic construct
  misc_feature 1..20: note = antisense sequence
  source 1..20: mol_type = other RNA
gactaggtgggtcagaaatc

SEQ ID NO: 5890 - RNA, 20 nt, synthetic construct
  misc_feature 1..20: note = antisense sequence
  source 1..20: mol_type = other RNA
ggactaggtgggtcagaaat

SEQ ID NO: 5891 - RNA, 20 nt, synthetic construct
  misc_feature 1..20: note = antisense sequence
  source 1..20: mol_type = other RNA
tttggactaggtgggtcaga

SEQ ID NO: 5892 - RNA, 20 nt, synthetic construct
  misc_feature 1..20: note = antisense sequence
  source 1..20: mol_type = other RNA
tctttggactaggtgggtca

SEQ ID NO: 5893 - RNA, 20 nt, synthetic construct
  misc_feature 1..20: note = antisense sequence
  source 1..20: mol_type = other RNA
tgtctttggactaggtgggt

SEQ ID NO: 5894 - RNA, 20 nt, synthetic construct
  misc_feature 1..20: note = antisense sequence
  source 1..20: mol_type = other RNA
tctgtctttggactaggtgg

SEQ ID NO: 5895 - RNA, 20 nt, synthetic construct
  misc_feature 1..20: note = antisense sequence
  source 1..20: mol_type = other RNA
aattctgtctttggactagg

SEQ ID NO: 5896 - RNA, 20 nt, synthetic construct
  misc_feature 1..20: note = antisense sequence
  source 1..20: mol_type = other RNA
ctgtttagttgttggcttct

SEQ ID NO: 5897 - RNA, 20 nt, synthetic construct
  misc_feature 1..20: note = antisense sequence
  source 1..20: mol_type = other RNA
cctgtttagttgttggcttc

SEQ ID NO: 5898 - RNA, 20 nt, synthetic construct
  misc_feature 1..20: note = antisense sequence
  source 1..20: mol_type = other RNA
gcctgtttagttgttggctt

SEQ ID NO: 5899 - RNA, 20 nt, synthetic construct
  misc_feature 1..20: note = antisense sequence
  source 1..20: mol_type = other RNA
tagcctgtttagttgttggc

SEQ ID NO: 5900 - RNA, 20 nt, synthetic construct
  misc_feature 1..20: note = antisense sequence
  source 1..20: mol_type = other RNA
gtagcctgtttagttgttgg

SEQ ID NO: 5901 - RNA, 20 nt, synthetic construct
  misc_feature 1..20: note = antisense sequence
  source 1..20: mol_type = other RNA
tgtagcctgtttagttgttg

SEQ ID NO: 5902 - RNA, 20 nt, synthetic construct
  misc_feature 1..20: note = antisense sequence
  source 1..20: mol_type = other RNA
ctgtagcctgtttagttgtt

SEQ ID NO: 5903 - RNA, 20 nt, synthetic construct
  misc_feature 1..20: note = antisense sequence
  source 1..20: mol_type = other RNA
actgtagcctgtttagttgt

SEQ ID NO: 5904 - RNA, 20 nt, synthetic construct
  misc_feature 1..20: note = antisense sequence
  source 1..20: mol_type = other RNA
gagtattactgtagcctgtt

SEQ ID NO: 5905 - RNA, 20 nt, synthetic construct
  misc_feature 1..20: note = antisense sequence
  source 1..20: mol_type = other RNA
ggagtattactgtagcctgt

SEQ ID NO: 5906 - RNA, 20 nt, synthetic construct
  misc_feature 1..20: note = antisense sequence
  source 1..20: mol_type = other RNA
caaggagtattactgtagcc

SEQ ID NO: 5907 - RNA, 20 nt, synthetic construct
  misc_feature 1..20: note = antisense sequence
  source 1..20: mol_type = other RNA
ccaaggagtattactgtagc

SEQ ID NO: 5908 - RNA, 20 nt, synthetic construct
  misc_feature 1..20: note = antisense sequence
  source 1..20: mol_type = other RNA
tccaaggagtattactgtag

SEQ ID NO: 5909 - RNA, 20 nt, synthetic construct
  misc_feature 1..20: note = antisense sequence
  source 1..20: mol_type = other RNA
gagttccaaggagtattact

SEQ ID NO: 5910 - RNA, 20 nt, synthetic construct
  misc_feature 1..20: note = antisense sequence
  source 1..20: mol_type = other RNA
tgagttccaaggagtattac

SEQ ID NO: 5911 - RNA, 20 nt, synthetic construct
  misc_feature 1..20: note = antisense sequence
  source 1..20: mol_type = other RNA
aaggaagccaccctcttgta

SEQ ID NO: 5912 - RNA, 20 nt, synthetic construct
  misc_feature 1..20: note = antisense sequence
  source 1..20: mol_type = other RNA
taaatggaggtgacagaggc

SEQ ID NO: 5913 - RNA, 20 nt, synthetic construct
  misc_feature 1..20: note = antisense sequence
  source 1..20: mol_type = other RNA
gataaatggaggtgacagag

SEQ ID NO: 5914 - RNA, 20 nt, synthetic construct
  misc_feature 1..20: note = antisense sequence
  source 1..20: mol_type = other RNA
ggataaatggaggtgacaga

SEQ ID NO: 5915 - RNA, 20 nt, synthetic construct
  misc_feature 1..20: note = antisense sequence
  source 1..20: mol_type = other RNA
aggataaatggaggtgacag

SEQ ID NO: 5916 - RNA, 20 nt, synthetic construct
  misc_feature 1..20: note = antisense sequence
  source 1..20: mol_type = other RNA
aaggataaatggaggtgaca

SEQ ID NO: 5917 - RNA, 20 nt, synthetic construct
  misc_feature 1..20: note = antisense sequence
  source 1..20: mol_type = other RNA
aaaggataaatggaggtgac

SEQ ID NO: 5918 - RNA, 20 nt, synthetic construct
  misc_feature 1..20: note = antisense sequence
  source 1..20: mol_type = other RNA
agctctggagtatttgagaa

SEQ ID NO: 5919 - RNA, 20 nt, synthetic construct
  misc_feature 1..20: note = antisense sequence
  source 1..20: mol_type = other RNA
tagctctggagtatttgaga

SEQ ID NO: 5920 - RNA, 20 nt, synthetic construct
  misc_feature 1..20: note = antisense sequence
  source 1..20: mol_type = other RNA
gtagctctggagtatttgag

SEQ ID NO: 5921 - RNA, 20 nt, synthetic construct
  misc_feature 1..20: note = antisense sequence
  source 1..20: mol_type = other RNA
tgtagctctggagtatttga

SEQ ID NO: 5922 - RNA, 20 nt, synthetic construct
  misc_feature 1..20: note = antisense sequence
  source 1..20: mol_type = other RNA
aatcatcttgtagctctgga

SEQ ID NO: 5923 - RNA, 20 nt, synthetic construct
  misc_feature 1..20: note = antisense sequence
  source 1..20: mol_type = other RNA
taatcatcttgtagctctgg

SEQ ID NO: 5924 - RNA, 20 nt, synthetic construct
  misc_feature 1..20: note = antisense sequence
  source 1..20: mol_type = other RNA
gctcttaatcatcttgtagc

SEQ ID NO: 5925 - RNA, 20 nt, synthetic construct
  misc_feature 1..20: note = antisense sequence
  source 1..20: mol_type = other RNA
caacaatcctcaaaagtctc

SEQ ID NO: 5926 - RNA, 20 nt, synthetic construct
  misc_feature 1..20: note = antisense sequence
  source 1..20: mol_type = other RNA
gctcacaacaatcctcaaaa

SEQ ID NO: 5927 - RNA, 20 nt, synthetic construct
  misc_feature 1..20: note = antisense sequence
  source 1..20: mol_type = other RNA
agctcacaacaatcctcaaa

SEQ ID NO: 5928 - RNA, 20 nt, synthetic construct
  misc_feature 1..20: note = antisense sequence
  source 1..20: mol_type = other RNA
cagctcacaacaatcctcaa

SEQ ID NO: 5929 - RNA, 20 nt, synthetic construct
  misc_feature 1..20: note = antisense sequence
  source 1..20: mol_type = other RNA
ccagctcacaacaatcctca

SEQ ID NO: 5930 - RNA, 20 nt, synthetic construct
  misc_feature 1..20: note = antisense sequence
  source 1..20: mol_type = other RNA
taacaacccagctcacaaca

SEQ ID NO: 5931 - RNA, 20 nt, synthetic construct
  misc_feature 1..20: note = antisense sequence
  source 1..20: mol_type = other RNA
ataacaacccagctcacaac

SEQ ID NO: 5932 - RNA, 20 nt, synthetic construct
  misc_feature 1..20: note = antisense sequence
  source 1..20: mol_type = other RNA
aaataacaacccagctcaca

SEQ ID NO: 5933 - RNA, 20 nt, synthetic construct
  misc_feature 1..20: note = antisense sequence
  source 1..20: mol_type = other RNA
aaaataacaacccagctcac

SEQ ID NO: 5934 - RNA, 20 nt, synthetic construct
  misc_feature 1..20: note = antisense sequence
  source 1..20: mol_type = other RNA
gtgctattgagttggtctga

SEQ ID NO: 5935 - RNA, 20 nt, synthetic construct
  misc_feature 1..20: note = antisense sequence
  source 1..20: mol_type = other RNA
ggtgctattgagttggtctg

SEQ ID NO: 5936 - RNA, 20 nt, synthetic construct
  misc_feature 1..20: note = antisense sequence
  source 1..20: mol_type = other RNA
gggtgctattgagttggtct

SEQ ID NO: 5937 - RNA, 20 nt, synthetic construct
  misc_feature 1..20: note = antisense sequence
  source 1..20: mol_type = other RNA
tagggtgctattgagttggt

SEQ ID NO: 5938 - RNA, 20 nt, synthetic construct
  misc_feature 1..20: note = antisense sequence
  source 1..20: mol_type = other RNA
ctagggtgctattgagttgg

SEQ ID NO: 5939 - RNA, 20 nt, synthetic construct
  misc_feature 1..20: note = antisense sequence
  source 1..20: mol_type = other RNA
actagggtgctattgagttg

SEQ ID NO: 5940 - RNA, 20 nt, synthetic construct
  misc_feature 1..20: note = antisense sequence
  source 1..20: mol_type = other RNA
taactagggtgctattgagt

SEQ ID NO: 5941 - RNA, 20 nt, synthetic construct
  misc_feature 1..20: note = antisense sequence
  source 1..20: mol_type = other RNA
gtaactagggtgctattgag

SEQ ID NO: 5942 - RNA, 20 nt, synthetic construct
  misc_feature 1..20: note = antisense sequence
  source 1..20: mol_type = other RNA
ctgtaactagggtgctattg

SEQ ID NO: 5943 - RNA, 20 nt, synthetic construct
  misc_feature 1..20: note = antisense sequence
  source 1..20: mol_type = other RNA
atttctgtaactagggtgct

SEQ ID NO: 5944 - RNA, 20 nt, synthetic construct
  misc_feature 1..20: note = antisense sequence
  source 1..20: mol_type = other RNA
gatcttatgaggccaaatca

SEQ ID NO: 5945 - RNA, 20 nt, synthetic construct
  misc_feature 1..20: note = antisense sequence
  source 1..20: mol_type = other RNA
tgatcttatgaggccaaatc

SEQ ID NO: 5946 - RNA, 20 nt, synthetic construct
  misc_feature 1..20: note = antisense sequence
  source 1..20: mol_type = other RNA
cattgatcttatgaggccaa

SEQ ID NO: 5947 - RNA, 20 nt, synthetic construct
  misc_feature 1..20: note = antisense sequence
  source 1..20: mol_type = other RNA
aacattgatcttatgaggcc

SEQ ID NO: 5948 - RNA, 20 nt, synthetic construct
  misc_feature 1..20: note = antisense sequence
  source 1..20: mol_type = other RNA
caacattgatcttatgaggc

SEQ ID NO: 5949 - RNA, 20 nt, synthetic construct
  misc_feature 1..20: note = antisense sequence
  source 1..20: mol_type = other RNA
atttgccaaaagccaggttg

SEQ ID NO: 5950 - RNA, 20 nt, synthetic construct
  misc_feature 1..20: note = antisense sequence
  source 1..20: mol_type = other RNA
gatttgccaaaagccaggtt

SEQ ID NO: 5951 - RNA, 20 nt, synthetic construct
  misc_feature 1..20: note = antisense sequence
  source 1..20: mol_type = other RNA
tgatttgccaaaagccaggt

SEQ ID NO: 5952 - RNA, 20 nt, synthetic construct
  misc_feature 1..20: note = antisense sequence
  source 1..20: mol_type = other RNA
agtgatttgccaaaagccag

SEQ ID NO: 5953 - RNA, 20 nt, synthetic construct
  misc_feature 1..20: note = antisense sequence
  source 1..20: mol_type = other RNA
ttgagtgatttgccaaaagc

SEQ ID NO: 5954 - RNA, 20 nt, synthetic construct
  misc_feature 1..20: note = antisense sequence
  source 1..20: mol_type = other RNA
aggcaggacagcagacattc

SEQ ID NO: 5955 - RNA, 20 nt, synthetic construct
  misc_feature 1..20: note = antisense sequence
  source 1..20: mol_type = other RNA
gaggcaggacagcagacatt

SEQ ID NO: 5956 - RNA, 20 nt, synthetic construct
  misc_feature 1..20: note = antisense sequence
  source 1..20: mol_type = other RNA
tgaggcaggacagcagacat

SEQ ID NO: 5957 - RNA, 20 nt, synthetic construct
  misc_feature 1..20: note = antisense sequence
  source 1..20: mol_type = other RNA
gtgaggcaggacagcagaca

SEQ ID NO: 5958 - RNA, 20 nt, synthetic construct
  misc_feature 1..20: note = antisense sequence
  source 1..20: mol_type = other RNA
ataatttgaggaggtgaggc

SEQ ID NO: 5959 - RNA, 20 nt, synthetic construct
  misc_feature 1..20: note = antisense sequence
  source 1..20: mol_type = other RNA
agtgctttctgcttacaaac

SEQ ID NO: 5960 - RNA, 20 nt, synthetic construct
  misc_feature 1..20: note = antisense sequence
  source 1..20: mol_type = other RNA
aagcaacctacagctctgca

SEQ ID NO: 5961 - RNA, 20 nt, synthetic construct
  misc_feature 1..20: note = antisense sequence
  source 1..20: mol_type = other RNA
gagaagcaacctacagctct

SEQ ID NO: 5962 - RNA, 20 nt, synthetic construct
  misc_feature 1..20: note = antisense sequence
  source 1..20: mol_type = other RNA
ggagaagcaacctacagctc

SEQ ID NO: 5963 - RNA, 20 nt, synthetic construct
  misc_feature 1..20: note = antisense sequence
  source 1..20: mol_type = other RNA
gggagaagcaacctacagct

SEQ ID NO: 5964 - RNA, 20 nt, synthetic construct
  misc_feature 1..20: note = antisense sequence
  source 1..20: mol_type = other RNA
agggagaagcaacctacagc

SEQ ID NO: 5965 - RNA, 20 nt, synthetic construct
  misc_feature 1..20: note = antisense sequence
  source 1..20: mol_type = other RNA
gagggagaagcaacctacag

SEQ ID NO: 5966 - RNA, 20 nt, synthetic construct
  misc_feature 1..20: note = antisense sequence
  source 1..20: mol_type = other RNA
agagggagaagcaacctaca

SEQ ID NO: 5967 - RNA, 20 nt, synthetic construct
  misc_feature 1..20: note = antisense sequence
  source 1..20: mol_type = other RNA
ccaggatggaatttgatatg

SEQ ID NO: 5968 - RNA, 20 nt, synthetic construct
  misc_feature 1..20: note = antisense sequence
  source 1..20: mol_type = other RNA
tgtgagcaattactttaccc

SEQ ID NO: 5969 - RNA, 20 nt, synthetic construct
  misc_feature 1..20: note = antisense sequence
  source 1..20: mol_type = other RNA
ctagaacttataggtccaag

SEQ ID NO: 5970 - RNA, 20 nt, synthetic construct
  misc_feature 1..20: note = antisense sequence
  source 1..20: mol_type = other RNA
gctagaacttataggtccaa

SEQ ID NO: 5971 - RNA, 20 nt, synthetic construct
  misc_feature 1..20: note = antisense sequence
  source 1..20: mol_type = other RNA
agctagaacttataggtcca

SEQ ID NO: 5972 - RNA, 20 nt, synthetic construct
  misc_feature 1..20: note = antisense sequence
  source 1..20: mol_type = other RNA
cagctagaacttataggtcc

SEQ ID NO: 5973 - RNA, 20 nt, synthetic construct
  misc_feature 1..20: note = antisense sequence
  source 1..20: mol_type = other RNA
tcagctagaacttataggtc

SEQ ID NO: 5974 - RNA, 20 nt, synthetic construct
  misc_feature 1..20: note = antisense sequence
  source 1..20: mol_type = other RNA
gaaggacttcagctagaact

SEQ ID NO: 5975 - RNA, 20 nt, synthetic construct
  misc_feature 1..20: note = antisense sequence
  source 1..20: mol_type = other RNA
ctgagtaaggagaaaagtcc

SEQ ID NO: 5976 - RNA, 20 nt, synthetic construct
  misc_feature 1..20: note = antisense sequence
  source 1..20: mol_type = other RNA
gtctgagtaaggagaaaagt

SEQ ID NO: 5977 - RNA, 20 nt, synthetic construct
  misc_feature 1..20: note = antisense sequence
  source 1..20: mol_type = other RNA
gaaagtctgagtaaggagaa

SEQ ID NO: 5978 - RNA, 20 nt, synthetic construct
  misc_feature 1..20: note = antisense sequence
  source 1..20: mol_type = other RNA
ggaaagtctgagtaaggaga

SEQ ID NO: 5979 - RNA, 20 nt, synthetic construct
  misc_feature 1..20: note = antisense sequence
  source 1..20: mol_type = other RNA
tggaaagtctgagtaaggag

SEQ ID NO: 5980 - RNA, 20 nt, synthetic construct
  misc_feature 1..20: note = antisense sequence
  source 1..20: mol_type = other RNA
tgcatctcctgagaggcaaa

SEQ ID NO: 5981 - RNA, 20 nt, synthetic construct
  misc_feature 1..20: note = antisense sequence
  source 1..20: mol_type = other RNA
ctgcatctcctgagaggcaa

SEQ ID NO: 5982 - RNA, 20 nt, synthetic construct
  misc_feature 1..20: note = antisense sequence
  source 1..20: mol_type = other RNA
aactgcatctcctgagaggc

SEQ ID NO: 5983 - RNA, 20 nt, synthetic construct
  misc_feature 1..20: note = antisense sequence
  source 1..20: mol_type = other RNA
ataactgcatctcctgagag

SEQ ID NO: 5984 - RNA, 20 nt, synthetic construct
  misc_feature 1..20: note = antisense sequence
  source 1..20: mol_type = other RNA
agccacatattagtctgcat

SEQ ID NO: 5985 - RNA, 20 nt, synthetic construct
  misc_feature 1..20: note = antisense sequence
  source 1..20: mol_type = other RNA
cagccacatattagtctgca

SEQ ID NO: 5986 - RNA, 20 nt, synthetic construct
  misc_feature 1..20: note = antisense sequence
  source 1..20: mol_type = other RNA
acagccacatattagtctgc

SEQ ID NO: 5987 - RNA, 20 nt, synthetic construct
  misc_feature 1..20: note = antisense sequence
  source 1..20: mol_type = other RNA
gacagccacatattagtctg

SEQ ID NO: 5988 - RNA, 20 nt, synthetic construct
  misc_feature 1..20: note = antisense sequence
  source 1..20: mol_type = other RNA
aagacagccacatattagtc

SEQ ID NO: 5989 - RNA, 20 nt, synthetic construct
  misc_feature 1..20: note = antisense sequence
  source 1..20: mol_type = other RNA
gaagacagccacatattagt

SEQ ID NO: 5990 - RNA, 20 nt, synthetic construct
  misc_feature 1..20: note = antisense sequence
  source 1..20: mol_type = other RNA
cttagaagacagccacatat

SEQ ID NO: 5991 - RNA, 20 nt, synthetic construct
  misc_feature 1..20: note = antisense sequence
  source 1..20: mol_type = other RNA
gcttagaagacagccacata

SEQ ID NO: 5992 - RNA, 20 nt, synthetic construct
  misc_feature 1..20: note = antisense sequence
  source 1..20: mol_type = other RNA
agcttagaagacagccacat

SEQ ID NO: 5993 - RNA, 20 nt, synthetic construct
  misc_feature 1..20: note = antisense sequence
  source 1..20: mol_type = other RNA
aggatgagcttagaagacag

SEQ ID NO: 5994 - RNA, 20 nt, synthetic construct
  misc_feature 1..20: note = antisense sequence
  source 1..20: mol_type = other RNA
gaggatgagcttagaagaca

SEQ ID NO: 5995 - RNA, 20 nt, synthetic construct
  misc_feature 1..20: note = antisense sequence
  source 1..20: mol_type = other RNA
tgaggatgagcttagaagac

SEQ ID NO: 5996 - RNA, 20 nt, synthetic construct
  misc_feature 1..20: note = antisense sequence
  source 1..20: mol_type = other RNA
atgaggatgagcttagaaga

SEQ ID NO: 5997 - RNA, 20 nt, synthetic construct
  misc_feature 1..20: note = antisense sequence
  source 1..20: mol_type = other RNA
tgatatgaggatgagcttag

SEQ ID NO: 5998 - RNA, 20 nt, synthetic construct
  misc_feature 1..20: note = antisense sequence
  source 1..20: mol_type = other RNA
gtgatatgaggatgagctta

SEQ ID NO: 5999 - RNA, 20 nt, synthetic construct
  misc_feature 1..20: note = antisense sequence
  source 1..20: mol_type = other RNA
agtgatatgaggatgagctt

SEQ ID NO: 6000 - RNA, 20 nt, synthetic construct
  misc_feature 1..20: note = antisense sequence
  source 1..20: mol_type = other RNA
aagtgatatgaggatgagct

SEQ ID NO: 6001 - RNA, 20 nt, synthetic construct
  misc_feature 1..20: note = antisense sequence
  source 1..20: mol_type = other RNA
aaagtgatatgaggatgagc

SEQ ID NO: 6002 - RNA, 20 nt, synthetic construct
  misc_feature 1..20: note = antisense sequence
  source 1..20: mol_type = other RNA
ggctagtacaaagtgatatg

SEQ ID NO: 6003 - RNA, 20 nt, synthetic construct
  misc_feature 1..20: note = antisense sequence
  source 1..20: mol_type = other RNA
agggctagtacaaagtgata

SEQ ID NO: 6004 - RNA, 20 nt, synthetic construct
  misc_feature 1..20: note = antisense sequence
  source 1..20: mol_type = other RNA
agaaagggctagtacaaagt

SEQ ID NO: 6005 - RNA, 20 nt, synthetic construct
  misc_feature 1..20: note = antisense sequence
  source 1..20: mol_type = other RNA
tagaaagggctagtacaaag

SEQ ID NO: 6006 - RNA, 20 nt, synthetic construct
  misc_feature 1..20: note = antisense sequence
  source 1..20: mol_type = other RNA
ggcttccaaatccaaagtag

SEQ ID NO: 6007 - RNA, 20 nt, synthetic construct
  misc_feature 1..20: note = antisense sequence
  source 1..20: mol_type = other RNA
aggcttccaaatccaaagta

SEQ ID NO: 6008 - RNA, 20 nt, synthetic construct
  misc_feature 1..20: note = antisense sequence
  source 1..20: mol_type = other RNA
caggcttccaaatccaaagt

SEQ ID NO: 6009 - RNA, 20 nt, synthetic construct
  misc_feature 1..20: note = antisense sequence
  source 1..20: mol_type = other RNA
acaggcttccaaatccaaag

SEQ ID NO: 6010 - RNA, 20 nt, synthetic construct
  misc_feature 1..20: note = antisense sequence
  source 1..20: mol_type = other RNA
ccacatttccacaggcttcc

SEQ ID NO: 6011 - RNA, 20 nt, synthetic construct
  misc_feature 1..20: note = antisense sequence
  source 1..20: mol_type = other RNA
gtggcttcagagacaatata

SEQ ID NO: 6012 - RNA, 20 nt, synthetic construct
  misc_feature 1..20: note = antisense sequence
  source 1..20: mol_type = other RNA
ggtggcttcagagacaatat

SEQ ID NO: 6013 - RNA, 20 nt, synthetic construct
  misc_feature 1..20: note = antisense sequence
  source 1..20: mol_type = other RNA
acacagaggtggcttcagag

SEQ ID NO: 6014 - RNA, 20 nt, synthetic construct
  misc_feature 1..20: note = antisense sequence
  source 1..20: mol_type = other RNA
caaaacacagaggtggcttc

SEQ ID NO: 6015 - RNA, 20 nt, synthetic construct
  misc_feature 1..20: note = antisense sequence
  source 1..20: mol_type = other RNA
gaaaagcaaaacacagaggt

SEQ ID NO: 6016 - RNA, 20 nt, synthetic construct
  misc_feature 1..20: note = antisense sequence
  source 1..20: mol_type = other RNA
cactcccagaaaagcaaaac

SEQ ID NO: 6017 - RNA, 20 nt, synthetic construct
  misc_feature 1..20: note = antisense sequence
  source 1..20: mol_type = other RNA
acttccactcccagaaaagc

SEQ ID NO: 6018 - RNA, 20 nt, synthetic construct
  misc_feature 1..20: note = antisense sequence
  source 1..20: mol_type = other RNA
cacttccactcccagaaaag

SEQ ID NO: 6019 - RNA, 20 nt, synthetic construct
  misc_feature 1..20: note = antisense sequence
  source 1..20: mol_type = other RNA
ccacttccactcccagaaaa

SEQ ID NO: 6020 - RNA, 20 nt, synthetic construct
  misc_feature 1..20: note = antisense sequence
  source 1..20: mol_type = other RNA
gagtaaacagtaaaagcagc

SEQ ID NO: 6021 - RNA, 20 nt, synthetic construct
  misc_feature 1..20: note = antisense sequence
  source 1..20: mol_type = other RNA
ctgaagaacaggagatgaca

SEQ ID NO: 6022 - RNA, 20 nt, synthetic construct
  misc_feature 1..20: note = antisense sequence
  source 1..20: mol_type = other RNA
gcaccgaagagcctgaagaa

SEQ ID NO: 6023 - RNA, 20 nt, synthetic construct
  misc_feature 1..20: note = antisense sequence
  source 1..20: mol_type = other RNA
ggcaccgaagagcctgaaga

SEQ ID NO: 6024 - RNA, 20 nt, synthetic construct
  misc_feature 1..20: note = antisense sequence
  source 1..20: mol_type = other RNA
ttctgaggcaccgaagagcc

SEQ ID NO: 6025 - RNA, 20 nt, synthetic construct
  misc_feature 1..20: note = antisense sequence
  source 1..20: mol_type = other RNA
tttctgaggcaccgaagagc

SEQ ID NO: 6026 - RNA, 20 nt, synthetic construct
  misc_feature 1..20: note = antisense sequence
  source 1..20: mol_type = other RNA
ttttctgaggcaccgaagag

SEQ ID NO: 6027 - RNA, 20 nt, synthetic construct
  misc_feature 1..20: note = antisense sequence
  source 1..20: mol_type = other RNA
gttttctgaggcaccgaaga

SEQ ID NO: 6028 - RNA, 20 nt, synthetic construct
  misc_feature 1..20: note = antisense sequence
  source 1..20: mol_type = other RNA
tgttttctgaggcaccgaag

SEQ ID NO: 6029 - RNA, 20 nt, synthetic construct
  misc_feature 1..20: note = antisense sequence
  source 1..20: mol_type = other RNA
atgttttctgaggcaccgaa

SEQ ID NO: 6030 - RNA, 20 nt, synthetic construct
  misc_feature 1..20: note = antisense sequence
  source 1..20: mol_type = other RNA
ggtgtgtgctgtacttcttt

SEQ ID NO: 6031 - RNA, 20 nt, synthetic construct
  misc_feature 1..20: note = antisense sequence
  source 1..20: mol_type = other RNA
gggtgtgtgctgtacttctt

SEQ ID NO: 6032 - RNA, 20 nt, synthetic construct
  misc_feature 1..20: note = antisense sequence
  source 1..20: mol_type = other RNA
cataagaccaagcagttttg

SEQ ID NO: 6033 - RNA, 20 nt, synthetic construct
  misc_feature 1..20: note = antisense sequence
  source 1..20: mol_type = other RNA
caacataagaccaagcagtt

SEQ ID NO: 6034 - RNA, 20 nt, synthetic construct
  misc_feature 1..20: note = antisense sequence
  source 1..20: mol_type = other RNA
tcaacataagaccaagcagt

SEQ ID NO: 6035 - RNA, 20 nt, synthetic construct
  misc_feature 1..20: note = antisense sequence
  source 1..20: mol_type = other RNA
ctcaacataagaccaagcag

SEQ ID NO: 6036 - RNA, 20 nt, synthetic construct
  misc_feature 1..20: note = antisense sequence
  source 1..20: mol_type = other RNA
tcctcaacataagaccaagc

SEQ ID NO: 6037 - RNA, 20 nt, synthetic construct
  misc_feature 1..20: note = antisense sequence
  source 1..20: mol_type = other RNA
ctcctcaacataagaccaag

SEQ ID NO: 6038 - RNA, 20 nt, synthetic construct
  misc_feature 1..20: note = antisense sequence
  source 1..20: mol_type = other RNA
cctcctcaacataagaccaa

SEQ ID NO: 6039 - RNA, 20 nt, synthetic construct
  misc_feature 1..20: note = antisense sequence
  source 1..20: mol_type = other RNA
ccctcctcaacataagacca

SEQ ID NO: 6040 - RNA, 20 nt, synthetic construct
  misc_feature 1..20: note = antisense sequence
  source 1..20: mol_type = other RNA
ctcactatgctgtagagaaa

SEQ ID NO: 6041 - RNA, 20 nt, synthetic construct
  misc_feature 1..20: note = antisense sequence
  source 1..20: mol_type = other RNA
actcactatgctgtagagaa

SEQ ID NO: 6042 - RNA, 20 nt, synthetic construct
  misc_feature 1..20: note = antisense sequence
  source 1..20: mol_type = other RNA
atactcactatgctgtagag

SEQ ID NO: 6043 - RNA, 20 nt, synthetic construct
  misc_feature 1..20: note = antisense sequence
  source 1..20: mol_type = other RNA
cagctctgtaacgtggtatt

SEQ ID NO: 6044 - RNA, 20 nt, synthetic construct
  misc_feature 1..20: note = antisense sequence
  source 1..20: mol_type = other RNA
acagctctgtaacgtggtat

SEQ ID NO: 6045 - RNA, 20 nt, synthetic construct
  misc_feature 1..20: note = antisense sequence
  source 1..20: mol_type = other RNA
cacagctctgtaacgtggta

SEQ ID NO: 6046 - RNA, 20 nt, synthetic construct
  misc_feature 1..20: note = antisense sequence
  source 1..20: mol_type = other RNA
gcacagctctgtaacgtggt

SEQ ID NO: 6047 - RNA, 20 nt, synthetic construct
  misc_feature 1..20: note = antisense sequence
  source 1..20: mol_type = other RNA
agcacagctctgtaacgtgg

SEQ ID NO: 6048 - RNA, 20 nt, synthetic construct
  misc_feature 1..20: note = antisense sequence
  source 1..20: mol_type = other RNA
gccctgcctattaaggtttg

SEQ ID NO: 6049 - RNA, 20 nt, synthetic construct
  misc_feature 1..20: note = antisense sequence
  source 1..20: mol_type = other RNA
agccctgcctattaaggttt

SEQ ID NO: 6050 - RNA, 20 nt, synthetic construct
  misc_feature 1..20: note = antisense sequence
  source 1..20: mol_type = other RNA
gcagccctgcctattaaggt

SEQ ID NO: 6051 - RNA, 20 nt, synthetic construct
  misc_feature 1..20: note = antisense sequence
  source 1..20: mol_type = other RNA
aggccctatccacattccct

SEQ ID NO: 6052 - RNA, 20 nt, synthetic construct
  misc_feature 1..20: note = antisense sequence
  source 1..20: mol_type = other RNA
caggccctatccacattccc

SEQ ID NO: 6053 - RNA, 20 nt, synthetic construct
  misc_feature 1..20: note = antisense sequence
  source 1..20: mol_type = other RNA
tcaggccctatccacattcc

SEQ ID NO: 6054 - RNA, 20 nt, synthetic construct
  misc_feature 1..20: note = antisense sequence
  source 1..20: mol_type = other RNA
ctcaggccctatccacattc

SEQ ID NO: 6055 - RNA, 20 nt, synthetic construct
  misc_feature 1..20: note = antisense sequence
  source 1..20: mol_type = other RNA
cctcaggccctatccacatt

SEQ ID NO: 6056 - RNA, 20 nt, synthetic construct
  misc_feature 1..20: note = antisense sequence
  source 1..20: mol_type = other RNA
acctcaggccctatccacat

SEQ ID NO: 6057 - RNA, 20 nt, synthetic construct
  misc_feature 1..20: note = antisense sequence
  source 1..20: mol_type = other RNA
aacctcaggccctatccaca

SEQ ID NO: 6058 - RNA, 20 nt, synthetic construct
  misc_feature 1..20: note = antisense sequence
  source 1..20: mol_type = other RNA
gaacctcaggccctatccac

SEQ ID NO: 6059 - RNA, 20 nt, synthetic construct
  misc_feature 1..20: note = antisense sequence
  source 1..20: mol_type = other RNA
tgaataatgcagaacctcag

SEQ ID NO: 6060 - RNA, 20 nt, synthetic construct
  misc_feature 1..20: note = antisense sequence
  source 1..20: mol_type = other RNA
gtgaataatgcagaacctca

SEQ ID NO: 6061 - RNA, 20 nt, synthetic construct
  misc_feature 1..20: note = antisense sequence
  source 1..20: mol_type = other RNA
tgtgaataatgcagaacctc

SEQ ID NO: 6062 - RNA, 20 nt, synthetic construct
  misc_feature 1..20: note = antisense sequence
  source 1..20: mol_type = other RNA
gcttgtgaataatgcagaac

SEQ ID NO: 6063 - RNA, 20 nt, synthetic construct
  misc_feature 1..20: note = antisense sequence
  source 1..20: mol_type = other RNA
gggagcttgtgaataatgca

SEQ ID NO: 6064 - RNA, 20 nt, synthetic construct
  misc_feature 1..20: note = antisense sequence
  source 1..20: mol_type = other RNA
tgggagcttgtgaataatgc

SEQ ID NO: 6065 - RNA, 20 nt, synthetic construct
  misc_feature 1..20: note = antisense sequence
  source 1..20: mol_type = other RNA
cggctcataaaccagcagca

SEQ ID NO: 6066 - RNA, 20 nt, synthetic construct
  misc_feature 1..20: note = antisense sequence
  source 1..20: mol_type = other RNA
acggctcataaaccagcagc

SEQ ID NO: 6067 - RNA, 20 nt, synthetic construct
  misc_feature 1..20: note = antisense sequence
  source 1..20: mol_type = other RNA
cacggctcataaaccagcag

SEQ ID NO: 6068 - RNA, 20 nt, synthetic construct
  misc_feature 1..20: note = antisense sequence
  source 1..20: mol_type = other RNA
ccacggctcataaaccagca

SEQ ID NO: 6069 - RNA, 20 nt, synthetic construct
  misc_feature 1..20: note = antisense sequence
  source 1..20: mol_type = other RNA
accacggctcataaaccagc

SEQ ID NO: 6070 - RNA, 20 nt, synthetic construct
  misc_feature 1..20: note = antisense sequence
  source 1..20: mol_type = other RNA
aaccacggctcataaaccag

SEQ ID NO: 6071 - RNA, 20 nt, synthetic construct
  misc_feature 1..20: note = antisense sequence
  source 1..20: mol_type = other RNA
caaccacggctcataaacca

SEQ ID NO: 6072 - RNA, 20 nt, synthetic construct
  misc_feature 1..20: note = antisense sequence
  source 1..20: mol_type = other RNA
ccaaccacggctcataaacc

SEQ ID NO: 6073 - RNA, 20 nt, synthetic construct
  misc_feature 1..20: note = antisense sequence
  source 1..20: mol_type = other RNA
accaaccacggctcataaac

SEQ ID NO: 6074 - RNA, 20 nt, synthetic construct
  misc_feature 1..20: note = antisense sequence
  source 1..20: mol_type = other RNA
aaccaaccacggctcataaa

SEQ ID NO: 6075 - RNA, 20 nt, synthetic construct
  misc_feature 1..20: note = antisense sequence
  source 1..20: mol_type = other RNA
aaaccaaccacggctcataa

SEQ ID NO: 6076 - RNA, 20 nt, synthetic construct
  misc_feature 1..20: note = antisense sequence
  source 1..20: mol_type = other RNA
aaaaccaaccacggctcata

SEQ ID NO: 6077 - RNA, 20 nt, synthetic construct
  misc_feature 1..20: note = antisense sequence
  source 1..20: mol_type = other RNA
gaaaaccaaccacggctcat

SEQ ID NO: 6078 - RNA, 20 nt, synthetic construct
  misc_feature 1..20: note = antisense sequence
  source 1..20: mol_type = other RNA
cgaaaaccaaccacggctca

SEQ ID NO: 6079 - RNA, 20 nt, synthetic construct
  misc_feature 1..20: note = antisense sequence
  source 1..20: mol_type = other RNA
ccgaaaaccaaccacggctc

SEQ ID NO: 6080 - RNA, 20 nt, synthetic construct
  misc_feature 1..20: note = antisense sequence
  source 1..20: mol_type = other RNA
accgaaaaccaaccacggct

SEQ ID NO: 6081 - RNA, 20 nt, synthetic construct
  misc_feature 1..20: note = antisense sequence
  source 1..20: mol_type = other RNA
gaccgaaaaccaaccacggc

SEQ ID NO: 6082 - RNA, 20 nt, synthetic construct
  misc_feature 1..20: note = antisense sequence
  source 1..20: mol_type = other RNA
tgaccgaaaaccaaccacgg

SEQ ID NO: 6083 - RNA, 20 nt, synthetic construct
  misc_feature 1..20: note = antisense sequence
  source 1..20: mol_type = other RNA
atgaccgaaaaccaaccacg

SEQ ID NO: 6084 - RNA, 20 nt, synthetic construct
  misc_feature 1..20: note = antisense sequence
  source 1..20: mol_type = other RNA
gatgaccgaaaaccaaccac

SEQ ID NO: 6085 - RNA, 20 nt, synthetic construct
  misc_feature 1..20: note = antisense sequence
  source 1..20: mol_type = other RNA
agatgaccgaaaaccaacca

SEQ ID NO: 6086 - RNA, 20 nt, synthetic construct
  misc_feature 1..20: note = antisense sequence
  source 1..20: mol_type = other RNA
aagatgaccgaaaaccaacc

SEQ ID NO: 6087 - RNA, 20 nt, synthetic construct
  misc_feature 1..20: note = antisense sequence
  source 1..20: mol_type = other RNA
gaagatgaccgaaaaccaac

SEQ ID NO: 6088 - RNA, 20 nt, synthetic construct
  misc_feature 1..20: note = antisense sequence
  source 1..20: mol_type = other RNA
agaagatgaccgaaaaccaa

SEQ ID NO: 6089 - RNA, 20 nt, synthetic construct
  misc_feature 1..20: note = antisense sequence
  source 1..20: mol_type = other RNA
aagaagatgaccgaaaacca

SEQ ID NO: 6090 - RNA, 20 nt, synthetic construct
  misc_feature 1..20: note = antisense sequence
  source 1..20: mol_type = other RNA
gaagaagatgaccgaaaacc

SEQ ID NO: 6091 - RNA, 20 nt, synthetic construct
  misc_feature 1..20: note = antisense sequence
  source 1..20: mol_type = other RNA
tgaagaagatgaccgaaaac

SEQ ID NO: 6092 - RNA, 20 nt, synthetic construct
  misc_feature 1..20: note = antisense sequence
  source 1..20: mol_type = other RNA
ttgttgaagaagatgaccga

SEQ ID NO: 6093 - RNA, 20 nt, synthetic construct
  misc_feature 1..20: note = antisense sequence
  source 1..20: mol_type = other RNA
acaagaacatcaccaccaat

SEQ ID NO: 6094 - RNA, 20 nt, synthetic construct
  misc_feature 1..20: note = antisense sequence
  source 1..20: mol_type = other RNA
gacaagaacatcaccaccaa

SEQ ID NO: 6095 - RNA, 20 nt, synthetic construct
  misc_feature 1..20: note = antisense sequence
  source 1..20: mol_type = other RNA
gaacagatgaagacaagaac

SEQ ID NO: 6096 - RNA, 20 nt, synthetic construct
  misc_feature 1..20: note = antisense sequence
  source 1..20: mol_type = other RNA
accactcttgaacagatgaa

SEQ ID NO: 6097 - RNA, 20 nt, synthetic construct
  misc_feature 1..20: note = antisense sequence
  source 1..20: mol_type = other RNA
gaaaaccactcttgaacaga

SEQ ID NO: 6098 - RNA, 20 nt, synthetic construct
  misc_feature 1..20: note = antisense sequence
  source 1..20: mol_type = other RNA
tgaaaaccactcttgaacag

SEQ ID NO: 6099 - RNA, 20 nt, synthetic construct
  misc_feature 1..20: note = antisense sequence
  source 1..20: mol_type = other RNA
gttgaaaaccactcttgaac

SEQ ID NO: 6100 - RNA, 20 nt, synthetic construct
  misc_feature 1..20: note = antisense sequence
  source 1..20: mol_type = other RNA
cagttgaaaaccactcttga

SEQ ID NO: 6101 - RNA, 20 nt, synthetic construct
  misc_feature 1..20: note = antisense sequence
  source 1..20: mol_type = other RNA
catgaggccaaaattgtccc

SEQ ID NO: 6102 - RNA, 20 nt, synthetic construct
  misc_feature 1..20: note = antisense sequence
  source 1..20: mol_type = other RNA
cccatgaggccaaaattgtc

SEQ ID NO: 6103 - RNA, 20 nt, synthetic construct
  misc_feature 1..20: note = antisense sequence
  source 1..20: mol_type = other RNA
tcccatgaggccaaaattgt

SEQ ID NO: 6104 - RNA, 20 nt, synthetic construct
  misc_feature 1..20: note = antisense sequence
  source 1..20: mol_type = other RNA
attcccatgaggccaaaatt

SEQ ID NO: 6105 - RNA, 20 nt, synthetic construct
  misc_feature 1..20: note = antisense sequence
  source 1..20: mol_type = other RNA
cagccaaattcccatgaggc

SEQ ID NO: 6106 - RNA, 20 nt, synthetic construct
  misc_feature 1..20: note = antisense sequence
  source 1..20: mol_type = other RNA
acacagccaaattcccatga

SEQ ID NO: 6107 - RNA, 20 nt, synthetic construct
  misc_feature 1..20: note = antisense sequence
  source 1..20: mol_type = other RNA
agacacagccaaattcccat

SEQ ID NO: 6108 - RNA, 20 nt, synthetic construct
  misc_feature 1..20: note = antisense sequence
  source 1..20: mol_type = other RNA
cagacacagccaaattccca

SEQ ID NO: 6109 - RNA, 20 nt, synthetic construct
  misc_feature 1..20: note = antisense sequence
  source 1..20: mol_type = other RNA
ccagacacagccaaattccc

SEQ ID NO: 6110 - RNA, 20 nt, synthetic construct
  misc_feature 1..20: note = antisense sequence
  source 1..20: mol_type = other RNA
cctacccacatgaagccaat

SEQ ID NO: 6111 - RNA, 20 nt, synthetic construct
  misc_feature 1..20: note = antisense sequence
  source 1..20: mol_type = other RNA
tttgctctcacaggttttgt

SEQ ID NO: 6112 - RNA, 20 nt, synthetic construct
  misc_feature 1..20: note = antisense sequence
  source 1..20: mol_type = other RNA
ttctttgctctcacaggttt

SEQ ID NO: 6113 - RNA, 20 nt, synthetic construct
  misc_feature 1..20: note = antisense sequence
  source 1..20: mol_type = other RNA
tattctttgctctcacaggt

SEQ ID NO: 6114 - RNA, 20 nt, synthetic construct
  misc_feature 1..20: note = antisense sequence
  source 1..20: mol_type = other RNA
ctattctttgctctcacagg

SEQ ID NO: 6115 - RNA, 20 nt, synthetic construct
  misc_feature 1..20: note = antisense sequence
  source 1..20: mol_type = other RNA
cctattctttgctctcacag

SEQ ID NO: 6116 - RNA, 20 nt, synthetic construct
  misc_feature 1..20: note = antisense sequence
  source 1..20: mol_type = other RNA
gctcctattctttgctctca

SEQ ID NO: 6117 - RNA, 20 nt, synthetic construct
  misc_feature 1..20: note = antisense sequence
  source 1..20: mol_type = other RNA
atgctcctattctttgctct

SEQ ID NO: 6118 - RNA, 20 nt, synthetic construct
  misc_feature 1..20: note = antisense sequence
  source 1..20: mol_type = other RNA
agatgctcctattctttgct

SEQ ID NO: 6119 - RNA, 20 nt, synthetic construct
  misc_feature 1..20: note = antisense sequence
  source 1..20: mol_type = other RNA
tagatgctcctattctttgc

SEQ ID NO: 6120 - RNA, 20 nt, synthetic construct
  misc_feature 1..20: note = antisense sequence
  source 1..20: mol_type = other RNA
gtagatgctcctattctttg

SEQ ID NO: 6121 - RNA, 20 nt, synthetic construct
  misc_feature 1..20: note = antisense sequence
  source 1..20: mol_type = other RNA
tgtagtagatgctcctattc

SEQ ID NO: 6122 - RNA, 20 nt, synthetic construct
  misc_feature 1..20: note = antisense sequence
  source 1..20: mol_type = other RNA
ctgtagtagatgctcctatt

SEQ ID NO: 6123 - RNA, 20 nt, synthetic construct
  misc_feature 1..20: note = antisense sequence
  source 1..20: mol_type = other RNA
catgactgtagtagatgctc

SEQ ID NO: 6124 - RNA, 20 nt, synthetic construct
  misc_feature 1..20: note = antisense sequence
  source 1..20: mol_type = other RNA
gaacacatccctagtgctag

SEQ ID NO: 6125 - RNA, 20 nt, synthetic construct
  misc_feature 1..20: note = antisense sequence
  source 1..20: mol_type = other RNA
agaacacatccctagtgcta

SEQ ID NO: 6126 - RNA, 20 nt, synthetic construct
  misc_feature 1..20: note = antisense sequence
  source 1..20: mol_type = other RNA
cagaacacatccctagtgct

SEQ ID NO: 6127 - RNA, 20 nt, synthetic construct
  misc_feature 1..20: note = antisense sequence
  source 1..20: mol_type = other RNA
gcagaacacatccctagtgc

SEQ ID NO: 6128 - RNA, 20 nt, synthetic construct
  misc_feature 1..20: note = antisense sequence
  source 1..20: mol_type = other RNA
tgcagaacacatccctagtg

SEQ ID NO: 6129 - RNA, 20 nt, synthetic construct
  misc_feature 1..20: note = antisense sequence
  source 1..20: mol_type = other RNA
ttgcagaacacatccctagt

SEQ ID NO: 6130 - RNA, 20 nt, synthetic construct
  misc_feature 1..20: note = antisense sequence
  source 1..20: mol_type = other RNA
tttgcagaacacatccctag

SEQ ID NO: 6131 - RNA, 20 nt, synthetic construct
  misc_feature 1..20: note = antisense sequence
  source 1..20: mol_type = other RNA
acagtttgcagaacacatcc

SEQ ID NO: 6132 - RNA, 20 nt, synthetic construct
  misc_feature 1..20: note = antisense sequence
  source 1..20: mol_type = other RNA
cacagtttgcagaacacatc

SEQ ID NO: 6133 - RNA, 20 nt, synthetic construct
  misc_feature 1..20: note = antisense sequence
  source 1..20: mol_type = other RNA
gacacagtttgcagaacaca

SEQ ID NO: 6134 - RNA, 20 nt, synthetic construct
  misc_feature 1..20: note = antisense sequence
  source 1..20: mol_type = other RNA
ggacacagtttgcagaacac

SEQ ID NO: 6135 - RNA, 20 nt, synthetic construct
  misc_feature 1..20: note = antisense sequence
  source 1..20: mol_type = other RNA
taaggacacagtttgcagaa

SEQ ID NO: 6136 - RNA, 20 nt, synthetic construct
  misc_feature 1..20: note = antisense sequence
  source 1..20: mol_type = other RNA
ctaaggacacagtttgcaga

SEQ ID NO: 6137 - RNA, 20 nt, synthetic construct
  misc_feature 1..20: note = antisense sequence
  source 1..20: mol_type = other RNA
acctaaggacacagtttgca

SEQ ID NO: 6138 - RNA, 20 nt, synthetic construct
  misc_feature 1..20: note = antisense sequence
  source 1..20: mol_type = other RNA
tgtgtagctctaccatctag

SEQ ID NO: 6139 - RNA, 20 nt, synthetic construct
  misc_feature 1..20: note = antisense sequence
  source 1..20: mol_type = other RNA
gcgatatacagcctagatgt

SEQ ID NO: 6140 - RNA, 20 nt, synthetic construct
  misc_feature 1..20: note = antisense sequence
  source 1..20: mol_type = other RNA
ggcgatatacagcctagatg

SEQ ID NO: 6141 - RNA, 20 nt, synthetic construct
  misc_feature 1..20: note = antisense sequence
  source 1..20: mol_type = other RNA
gacataggcgatatacagcc

SEQ ID NO: 6142 - RNA, 20 nt, synthetic construct
  misc_feature 1..20: note = antisense sequence
  source 1..20: mol_type = other RNA
agacataggcgatatacagc

SEQ ID NO: 6143 - RNA, 20 nt, synthetic construct
  misc_feature 1..20: note = antisense sequence
  source 1..20: mol_type = other RNA
aagacataggcgatatacag

SEQ ID NO: 6144 - RNA, 20 nt, synthetic construct
  misc_feature 1..20: note = antisense sequence
  source 1..20: mol_type = other RNA
gaagacataggcgatataca

SEQ ID NO: 6145 - RNA, 20 nt, synthetic construct
  misc_feature 1..20: note = antisense sequence
  source 1..20: mol_type = other RNA
agaagacataggcgatatac

SEQ ID NO: 6146 - RNA, 20 nt, synthetic construct
  misc_feature 1..20: note = antisense sequence
  source 1..20: mol_type = other RNA
ctagaagacataggcgatat

SEQ ID NO: 6147 - RNA, 20 nt, synthetic construct
  misc_feature 1..20: note = antisense sequence
  source 1..20: mol_type = other RNA
ctgtagcctagaagacatag

SEQ ID NO: 6148 - RNA, 20 nt, synthetic construct
  misc_feature 1..20: note = antisense sequence
  source 1..20: mol_type = other RNA
tctgtagcctagaagacata

SEQ ID NO: 6149 - RNA, 20 nt, synthetic construct
  misc_feature 1..20: note = antisense sequence
  source 1..20: mol_type = other RNA
gaggtctgtagcctagaaga

SEQ ID NO: 6150 - RNA, 20 nt, synthetic construct
  misc_feature 1..20: note = antisense sequence
  source 1..20: mol_type = other RNA
agaggtctgtagcctagaag

SEQ ID NO: 6151 - RNA, 20 nt, synthetic construct
  misc_feature 1..20: note = antisense sequence
  source 1..20: mol_type = other RNA
cacttgtagaggtctgtagc

SEQ ID NO: 6152 - RNA, 20 nt, synthetic construct
  misc_feature 1..20: note = antisense sequence
  source 1..20: mol_type = other RNA
tagtaaccacttgtagaggt

SEQ ID NO: 6153 - RNA, 20 nt, synthetic construct
  misc_feature 1..20: note = antisense sequence
  source 1..20: mol_type = other RNA
atagtaaccacttgtagagg

SEQ ID NO: 6154 - RNA, 20 nt, synthetic construct
  misc_feature 1..20: note = antisense sequence
  source 1..20: mol_type = other RNA
gattacaggtgtgagtcact

SEQ ID NO: 6155 - RNA, 20 nt, synthetic construct
  misc_feature 1..20: note = antisense sequence
  source 1..20: mol_type = other RNA
ggattacaggtgtgagtcac

SEQ ID NO: 6156 - RNA, 20 nt, synthetic construct
  misc_feature 1..20: note = antisense sequence
  source 1..20: mol_type = other RNA
gggattacaggtgtgagtca

SEQ ID NO: 6157 - RNA, 20 nt, synthetic construct
  misc_feature 1..20: note = antisense sequence
  source 1..20: mol_type = other RNA
tgggattacaggtgtgagtc

SEQ ID NO: 6158 - RNA, 20 nt, synthetic construct
  misc_feature 1..20: note = antisense sequence
  source 1..20: mol_type = other RNA
ctgggattacaggtgtgagt

SEQ ID NO: 6159 - RNA, 20 nt, synthetic construct
  misc_feature 1..20: note = antisense sequence
  source 1..20: mol_type = other RNA
gctgggattacaggtgtgag

SEQ ID NO: 6160 - RNA, 20 nt, synthetic construct
  misc_feature 1..20: note = antisense sequence
  source 1..20: mol_type = other RNA
tgctgggattacaggtgtga

SEQ ID NO: 6161 - RNA, 20 nt, synthetic construct
  misc_feature 1..20: note = antisense sequence
  source 1..20: mol_type = other RNA
gtgctgggattacaggtgtg

SEQ ID NO: 6162 - RNA, 20 nt, synthetic construct
  misc_feature 1..20: note = antisense sequence
  source 1..20: mol_type = other RNA
agtgctgggattacaggtgt

SEQ ID NO: 6163 - RNA, 20 nt, synthetic construct
  misc_feature 1..20: note = antisense sequence
  source 1..20: mol_type = other RNA
aagtgctgggattacaggtg

SEQ ID NO: 6164 - RNA, 20 nt, synthetic construct
  misc_feature 1..20: note = antisense sequence
  source 1..20: mol_type = other RNA
gaagtgctgggattacaggt

SEQ ID NO: 6165 - RNA, 20 nt, synthetic construct
  misc_feature 1..20: note = antisense sequence
  source 1..20: mol_type = other RNA
agaagtgctgggattacagg

SEQ ID NO: 6166 - RNA, 20 nt, synthetic construct
  misc_feature 1..20: note = antisense sequence
  source 1..20: mol_type = other RNA
cagaagtgctgggattacag

SEQ ID NO: 6167 - RNA, 20 nt, synthetic construct
  misc_feature 1..20: note = antisense sequence
  source 1..20: mol_type = other RNA
acctgccttggcctccagaa

SEQ ID NO: 6168 - RNA, 20 nt, synthetic construct
  misc_feature 1..20: note = antisense sequence
  source 1..20: mol_type = other RNA
tacctgccttggcctccaga

SEQ ID NO: 6169 - RNA, 20 nt, synthetic construct
  misc_feature 1..20: note = antisense sequence
  source 1..20: mol_type = other RNA
tctacctgccttggcctcca

SEQ ID NO: 6170 - RNA, 20 nt, synthetic construct
  misc_feature 1..20: note = antisense sequence
  source 1..20: mol_type = other RNA
atctacctgccttggcctcc

SEQ ID NO: 6171 - RNA, 20 nt, synthetic construct
  misc_feature 1..20: note = antisense sequence
  source 1..20: mol_type = other RNA
gatctacctgccttggcctc

SEQ ID NO: 6172 - RNA, 20 nt, synthetic construct
  misc_feature 1..20: note = antisense sequence
  source 1..20: mol_type = other RNA
ggctggtctcaaactgctgg

SEQ ID NO: 6173 - RNA, 20 nt, synthetic construct
  misc_feature 1..20: note = antisense sequence
  source 1..20: mol_type = other RNA
aggctggtctcaaactgctg

SEQ ID NO: 6174 - RNA, 20 nt, synthetic construct
  misc_feature 1..20: note = antisense sequence
  source 1..20: mol_type = other RNA
caggctggtctcaaactgct

SEQ ID NO: 6175 - RNA, 20 nt, synthetic construct
  misc_feature 1..20: note = antisense sequence
  source 1..20: mol_type = other RNA
ccaggctggtctcaaactgc

SEQ ID NO: 6176 - RNA, 20 nt, synthetic construct
  misc_feature 1..20: note = antisense sequence
  source 1..20: mol_type = other RNA
gccaggctggtctcaaactg

SEQ ID NO: 6177 - RNA, 20 nt, synthetic construct
  misc_feature 1..20: note = antisense sequence
  source 1..20: mol_type = other RNA
ggccaggctggtctcaaact

SEQ ID NO: 6178 - RNA, 20 nt, synthetic construct
  misc_feature 1..20: note = antisense sequence
  source 1..20: mol_type = other RNA
actgagtttcgccatgttgg

SEQ ID NO: 6179 - RNA, 20 nt, synthetic construct
  misc_feature 1..20: note = antisense sequence
  source 1..20: mol_type = other RNA
cctgacaccacgtttggcta

SEQ ID NO: 6180 - RNA, 20 nt, synthetic construct
  misc_feature 1..20: note = antisense sequence
  source 1..20: mol_type = other RNA
gtgcctgacaccacgtttgg

SEQ ID NO: 6181 - RNA, 20 nt, synthetic construct
  misc_feature 1..20: note = antisense sequence
  source 1..20: mol_type = other RNA
agattacaggtgcctgacac

SEQ ID NO: 6182 - RNA, 20 nt, synthetic construct
  misc_feature 1..20: note = antisense sequence
  source 1..20: mol_type = other RNA
gagattacaggtgcctgaca

SEQ ID NO: 6183 - RNA, 20 nt, synthetic construct
  misc_feature 1..20: note = antisense sequence
  source 1..20: mol_type = other RNA
tgagattacaggtgcctgac

SEQ ID NO: 6184 - RNA, 20 nt, synthetic construct
  misc_feature 1..20: note = antisense sequence
  source 1..20: mol_type = other RNA
ctgagattacaggtgcctga

SEQ ID NO: 6185 - RNA, 20 nt, synthetic construct
  misc_feature 1..20: note = antisense sequence
  source 1..20: mol_type = other RNA
gctgagattacaggtgcctg

SEQ ID NO: 6186 - RNA, 20 nt, synthetic construct
  misc_feature 1..20: note = antisense sequence
  source 1..20: mol_type = other RNA
agctgagattacaggtgcct

SEQ ID NO: 6187 - RNA, 20 nt, synthetic construct
  misc_feature 1..20: note = antisense sequence
  source 1..20: mol_type = other RNA
tagctgagattacaggtgcc

SEQ ID NO: 6188 - RNA, 20 nt, synthetic construct
  misc_feature 1..20: note = antisense sequence
  source 1..20: mol_type = other RNA
gtagctgagattacaggtgc

SEQ ID NO: 6189 - RNA, 20 nt, synthetic construct
  misc_feature 1..20: note = antisense sequence
  source 1..20: mol_type = other RNA
agtagctgagattacaggtg

SEQ ID NO: 6190 - RNA, 20 nt, synthetic construct
  misc_feature 1..20: note = antisense sequence
  source 1..20: mol_type = other RNA
gagtagctgagattacaggt

SEQ ID NO: 6191 - RNA, 20 nt, synthetic construct
  misc_feature 1..20: note = antisense sequence
  source 1..20: mol_type = other RNA
tgagtagctgagattacagg

SEQ ID NO: 6192 - RNA, 20 nt, synthetic construct
  misc_feature 1..20: note = antisense sequence
  source 1..20: mol_type = other RNA
cactgcaacctctgtctccc

SEQ ID NO: 6193 - RNA, 20 nt, synthetic construct
  misc_feature 1..20: note = antisense sequence
  source 1..20: mol_type = other RNA
tcactgcaacctctgtctcc

SEQ ID NO: 6194 - RNA, 20 nt, synthetic construct
  misc_feature 1..20: note = antisense sequence
  source 1..20: mol_type = other RNA
ttcactgcaacctctgtctc

SEQ ID NO: 6195 - RNA, 20 nt, synthetic construct
  misc_feature 1..20: note = antisense sequence
  source 1..20: mol_type = other RNA
gttcactgcaacctctgtct

SEQ ID NO: 6196 - RNA, 20 nt, synthetic construct
  misc_feature 1..20: note = antisense sequence
  source 1..20: mol_type = other RNA
tgttcactgcaacctctgtc

SEQ ID NO: 6197 - RNA, 20 nt, synthetic construct
  misc_feature 1..20: note = antisense sequence
  source 1..20: mol_type = other RNA
ctgttcactgcaacctctgt

SEQ ID NO: 6198 - RNA, 20 nt, synthetic construct
  misc_feature 1..20: note = antisense sequence
  source 1..20: mol_type = other RNA
tctgttcactgcaacctctg

SEQ ID NO: 6199 - RNA, 20 nt, synthetic construct
  misc_feature 1..20: note = antisense sequence
  source 1..20: mol_type = other RNA
tgagcctcactctgttgtgc

SEQ ID NO: 6200 - RNA, 20 nt, synthetic construct
  misc_feature 1..20: note = antisense sequence
  source 1..20: mol_type = other RNA
cggttaatgacaaactgcat

SEQ ID NO: 6201 - RNA, 20 nt, synthetic construct
  misc_feature 1..20: note = antisense sequence
  source 1..20: mol_type = other RNA
tcggttaatgacaaactgca

SEQ ID NO: 6202 - RNA, 20 nt, synthetic construct
  misc_feature 1..20: note = antisense sequence
  source 1..20: mol_type = other RNA
ttcggttaatgacaaactgc

SEQ ID NO: 6203 - RNA, 20 nt, synthetic construct
  misc_feature 1..20: note = antisense sequence
  source 1..20: mol_type = other RNA
gctgcttactctctaaacta

SEQ ID NO: 6204 - RNA, 20 nt, synthetic construct
  misc_feature 1..20: note = antisense sequence
  source 1..20: mol_type = other RNA
ggttaccatcttctgcataa

SEQ ID NO: 6205 - RNA, 20 nt, synthetic construct
  misc_feature 1..20: note = antisense sequence
  source 1..20: mol_type = other RNA
ctggttaccatcttctgcat

SEQ ID NO: 6206 - RNA, 20 nt, synthetic construct
  misc_feature 1..20: note = antisense sequence
  source 1..20: mol_type = other RNA
gctggttaccatcttctgca

SEQ ID NO: 6207 - RNA, 20 nt, synthetic construct
  misc_feature 1..20: note = antisense sequence
  source 1..20: mol_type = other RNA
cagcgtgatagagaacagct

SEQ ID NO: 6208 - RNA, 20 nt, synthetic construct
  misc_feature 1..20: note = antisense sequence
  source 1..20: mol_type = other RNA
ccagcgtgatagagaacagc

SEQ ID NO: 6209 - RNA, 20 nt, synthetic construct
  misc_feature 1..20: note = antisense sequence
  source 1..20: mol_type = other RNA
tccagcgtgatagagaacag

SEQ ID NO: 6210 - RNA, 20 nt, synthetic construct
  misc_feature 1..20: note = antisense sequence
  source 1..20: mol_type = other RNA
ttccagcgtgatagagaaca

SEQ ID NO: 6211 - RNA, 20 nt, synthetic construct
  misc_feature 1..20: note = antisense sequence
  source 1..20: mol_type = other RNA
cttccagcgtgatagagaac

SEQ ID NO: 6212 - RNA, 20 nt, synthetic construct
  misc_feature 1..20: note = antisense sequence
  source 1..20: mol_type = other RNA
tcttccagcgtgatagagaa

SEQ ID NO: 6213 - RNA, 20 nt, synthetic construct
  misc_feature 1..20: note = antisense sequence
  source 1..20: mol_type = other RNA
ttcttccagcgtgatagaga

SEQ ID NO: 6214 - RNA, 20 nt, synthetic construct
  misc_feature 1..20: note = antisense sequence
  source 1..20: mol_type = other RNA
attcttccagcgtgatagag

SEQ ID NO: 6215 - RNA, 20 nt, synthetic construct
  misc_feature 1..20: note = antisense sequence
  source 1..20: mol_type = other RNA
cattcttccagcgtgataga

SEQ ID NO: 6216 - RNA, 20 nt, synthetic construct
  misc_feature 1..20: note = antisense sequence
  source 1..20: mol_type = other RNA
tcattcttccagcgtgatag

SEQ ID NO: 6217 - RNA, 20 nt, synthetic construct
  misc_feature 1..20: note = antisense sequence
  source 1..20: mol_type = other RNA
ttcattcttccagcgtgata

SEQ ID NO: 6218 - RNA, 20 nt, synthetic construct
  misc_feature 1..20: note = antisense sequence
  source 1..20: mol_type = other RNA
gttcattcttccagcgtgat

SEQ ID NO: 6219 - RNA, 20 nt, synthetic construct
  misc_feature 1..20: note = antisense sequence
  source 1..20: mol_type = other RNA
cctgttcattcttccagcgt

SEQ ID NO: 6220 - RNA, 20 nt, synthetic construct
  misc_feature 1..20: note = antisense sequence
  source 1..20: mol_type = other RNA
catttcctgttcattcttcc

SEQ ID NO: 6221 - RNA, 20 nt, synthetic construct
  misc_feature 1..20: note = antisense sequence
  source 1..20: mol_type = other RNA
gcacgggtccttttatgtac

SEQ ID NO: 6222 - RNA, 20 nt, synthetic construct
  misc_feature 1..20: note = antisense sequence
  source 1..20: mol_type = other RNA
tgcacgggtccttttatgta

SEQ ID NO: 6223 - RNA, 20 nt, synthetic construct
  misc_feature 1..20: note = antisense sequence
  source 1..20: mol_type = other RNA
ttgcacgggtccttttatgt

SEQ ID NO: 6224 - RNA, 20 nt, synthetic construct
  misc_feature 1..20: note = antisense sequence
  source 1..20: mol_type = other RNA
attgcacgggtccttttatg

SEQ ID NO: 6225 - RNA, 20 nt, synthetic construct
  misc_feature 1..20: note = antisense sequence
  source 1..20: mol_type = other RNA
aattgcacgggtccttttat

SEQ ID NO: 6226 - RNA, 20 nt, synthetic construct
  misc_feature 1..20: note = antisense sequence
  source 1..20: mol_type = other RNA
gaattgcacgggtcctttta

SEQ ID NO: 6227 - RNA, 20 nt, synthetic construct
  misc_feature 1..20: note = antisense sequence
  source 1..20: mol_type = other RNA
tgaattgcacgggtcctttt

SEQ ID NO: 6228 - RNA, 20 nt, synthetic construct
  misc_feature 1..20: note = antisense sequence
  source 1..20: mol_type = other RNA
gtgaattgcacgggtccttt

SEQ ID NO: 6229 - RNA, 20 nt, synthetic construct
  misc_feature 1..20: note = antisense sequence
  source 1..20: mol_type = other RNA
ggtgaattgcacgggtcctt

SEQ ID NO: 6230 - RNA, 20 nt, synthetic construct
  misc_feature 1..20: note = antisense sequence
  source 1..20: mol_type = other RNA
gggtgaattgcacgggtcct

SEQ ID NO: 6231 - RNA, 20 nt, synthetic construct
  misc_feature 1..20: note = antisense sequence
  source 1..20: mol_type = other RNA
tgggtgaattgcacgggtcc

SEQ ID NO: 6232 - RNA, 20 nt, synthetic construct
  misc_feature 1..20: note = antisense sequence
  source 1..20: mol_type = other RNA
atgggtgaattgcacgggtc

SEQ ID NO: 6233 - RNA, 20 nt, synthetic construct
  misc_feature 1..20: note = antisense sequence
  source 1..20: mol_type = other RNA
gaatgggtgaattgcacggg

SEQ ID NO: 6234 - RNA, 20 nt, synthetic construct
  misc_feature 1..20: note = antisense sequence
  source 1..20: mol_type = other RNA
agaatgggtgaattgcacgg

SEQ ID NO: 6235 - RNA, 20 nt, synthetic construct
  misc_feature 1..20: note = antisense sequence
  source 1..20: mol_type = other RNA
aagaatgggtgaattgcacg

SEQ ID NO: 6236 - RNA, 20 nt, synthetic construct
  misc_feature 1..20: note = antisense sequence
  source 1..20: mol_type = other RNA
ttgtctagctggcatgaagg

SEQ ID NO: 6237 - RNA, 20 nt, synthetic construct
  misc_feature 1..20: note = antisense sequence
  source 1..20: mol_type = other RNA
tttgtctagctggcatgaag

SEQ ID NO: 6238 - RNA, 20 nt, synthetic construct
  misc_feature 1..20: note = antisense sequence
  source 1..20: mol_type = other RNA
atttgtctagctggcatgaa

SEQ ID NO: 6239 - RNA, 20 nt, synthetic construct
  misc_feature 1..20: note = antisense sequence
  source 1..20: mol_type = other RNA
gatttgtctagctggcatga

SEQ ID NO: 6240 - RNA, 20 nt, synthetic construct
  misc_feature 1..20: note = antisense sequence
  source 1..20: mol_type = other RNA
agatttgtctagctggcatg

SEQ ID NO: 6241 - RNA, 20 nt, synthetic construct
  misc_feature 1..20: note = antisense sequence
  source 1..20: mol_type = other RNA
gagatttgtctagctggcat

SEQ ID NO: 6242 - RNA, 20 nt, synthetic construct
  misc_feature 1..20: note = antisense sequence
  source 1..20: mol_type = other RNA
agagatttgtctagctggca

SEQ ID NO: 6243 - RNA, 20 nt, synthetic construct
  misc_feature 1..20: note = antisense sequence
  source 1..20: mol_type = other RNA
aagagatttgtctagctggc

SEQ ID NO: 6244 - RNA, 20 nt, synthetic construct
  misc_feature 1..20: note = antisense sequence
  source 1..20: mol_type = other RNA
gaagagatttgtctagctgg

SEQ ID NO: 6245 - RNA, 20 nt, synthetic construct
  misc_feature 1..20: note = antisense sequence
  source 1..20: mol_type = other RNA
tgaagagatttgtctagctg

SEQ ID NO: 6246 - RNA, 20 nt, synthetic construct
  misc_feature 1..20: note = antisense sequence
  source 1..20: mol_type = other RNA
ccaggacaaatatggttgca

SEQ ID NO: 6247 - RNA, 20 nt, synthetic construct
  misc_feature 1..20: note = antisense sequence
  source 1..20: mol_type = other RNA
gccaggacaaatatggttgc

SEQ ID NO: 6248 - RNA, 20 nt, synthetic construct
  misc_feature 1..20: note = antisense sequence
  source 1..20: mol_type = other RNA
ggccaggacaaatatggttg

SEQ ID NO: 6249 - RNA, 20 nt, synthetic construct
  misc_feature 1..20: note = antisense sequence
  source 1..20: mol_type = other RNA
aggccaggacaaatatggtt

SEQ ID NO: 6250 - RNA, 20 nt, synthetic construct
  misc_feature 1..20: note = antisense sequence
  source 1..20: mol_type = other RNA
caggccaggacaaatatggt

SEQ ID NO: 6251 - RNA, 20 nt, synthetic construct
  misc_feature 1..20: note = antisense sequence
  source 1..20: mol_type = other RNA
agacacaggccaggacaaat

SEQ ID NO: 6252 - RNA, 20 nt, synthetic construct
  misc_feature 1..20: note = antisense sequence
  source 1..20: mol_type = other RNA
attaagacacaggccaggac

SEQ ID NO: 6253 - RNA, 20 nt, synthetic construct
  misc_feature 1..20: note = antisense sequence
  source 1..20: mol_type = other RNA
tattaagacacaggccagga

SEQ ID NO: 6254 - RNA, 20 nt, synthetic construct
  misc_feature 1..20: note = antisense sequence
  source 1..20: mol_type = other RNA
caagtattaagacacaggcc

SEQ ID NO: 6255 - RNA, 20 nt, synthetic construct
  misc_feature 1..20: note = antisense sequence
  source 1..20: mol_type = other RNA
gcaagtattaagacacaggc

SEQ ID NO: 6256 - RNA, 20 nt, synthetic construct
  misc_feature 1..20: note = antisense sequence
  source 1..20: mol_type = other RNA
tgcaagtattaagacacagg

SEQ ID NO: 6257 - RNA, 20 nt, synthetic construct
  misc_feature 1..20: note = antisense sequence
  source 1..20: mol_type = other RNA
ctctgcaagtattaagacac

SEQ ID NO: 6258 - RNA, 20 nt, synthetic construct
  misc_feature 1..20: note = antisense sequence
  source 1..20: mol_type = other RNA
ggtctctgcaagtattaaga

SEQ ID NO: 6259 - RNA, 20 nt, synthetic construct
  misc_feature 1..20: note = antisense sequence
  source 1..20: mol_type = other RNA
gagggtctctgcaagtatta

SEQ ID NO: 6260 - RNA, 20 nt, synthetic construct
  misc_feature 1..20: note = antisense sequence
  source 1..20: mol_type = other RNA
ggagggtctctgcaagtatt

SEQ ID NO: 6261 - RNA, 20 nt, synthetic construct
  misc_feature 1..20: note = antisense sequence
  source 1..20: mol_type = other RNA
ttgggagggtctctgcaagt

SEQ ID NO: 6262 - RNA, 20 nt, synthetic construct
  misc_feature 1..20: note = antisense sequence
  source 1..20: mol_type = other RNA
aggatttgggagggtctctg

SEQ ID NO: 6263 - RNA, 20 nt, synthetic construct
  misc_feature 1..20: note = antisense sequence
  source 1..20: mol_type = other RNA
gaaaatgtgtacccaggatt

SEQ ID NO: 6264 - RNA, 20 nt, synthetic construct
  misc_feature 1..20: note = antisense sequence
  source 1..20: mol_type = other RNA
agaaaatgtgtacccaggat

SEQ ID NO: 6265 - RNA, 20 nt, synthetic construct
  misc_feature 1..20: note = antisense sequence
  source 1..20: mol_type = other RNA
aagaaaatgtgtacccagga

SEQ ID NO: 6266 - RNA, 20 nt, synthetic construct
  misc_feature 1..20: note = antisense sequence
  source 1..20: mol_type = other RNA
aaagaaaatgtgtacccagg

SEQ ID NO: 6267 - RNA, 20 nt, synthetic construct
  misc_feature 1..20: note = antisense sequence
  source 1..20: mol_type = other RNA
ggcagtgaaaagaaaatgtg

SEQ ID NO: 6268 - RNA, 20 nt, synthetic construct
  misc_feature 1..20: note = antisense sequence
  source 1..20: mol_type = other RNA
gagatttggcagtgaaaaga

SEQ ID NO: 6269 - RNA, 20 nt, synthetic construct
  misc_feature 1..20: note = antisense sequence
  source 1..20: mol_type = other RNA
aagagatgagatttggcagt

SEQ ID NO: 6270 - RNA, 20 nt, synthetic construct
  misc_feature 1..20: note = antisense sequence
  source 1..20: mol_type = other RNA
aaagagatgagatttggcag

SEQ ID NO: 6271 - RNA, 20 nt, synthetic construct
  misc_feature 1..20: note = antisense sequence
  source 1..20: mol_type = other RNA
gaaagagatgagatttggca

SEQ ID NO: 6272 - RNA, 20 nt, synthetic construct
  misc_feature 1..20: note = antisense sequence
  source 1..20: mol_type = other RNA
gttaaagatgaactggcaac

SEQ ID NO: 6273 - RNA, 20 nt, synthetic construct
  misc_feature 1..20: note = antisense sequence
  source 1..20: mol_type = other RNA
gccagctctagttaaagatg

SEQ ID NO: 6274 - RNA, 20 nt, synthetic construct
  misc_feature 1..20: note = antisense sequence
  source 1..20: mol_type = other RNA
atgccagctctagttaaaga

SEQ ID NO: 6275 - RNA, 20 nt, synthetic construct
  misc_feature 1..20: note = antisense sequence
  source 1..20: mol_type = other RNA
gtatgccagctctagttaaa

SEQ ID NO: 6276 - RNA, 20 nt, synthetic construct
  misc_feature 1..20: note = antisense sequence
  source 1..20: mol_type = other RNA
agtatgccagctctagttaa

SEQ ID NO: 6277 - RNA, 20 nt, synthetic construct
  misc_feature 1..20: note = antisense sequence
  source 1..20: mol_type = other RNA
aagtatgccagctctagtta

SEQ ID NO: 6278 - RNA, 20 nt, synthetic construct
  misc_feature 1..20: note = antisense sequence
  source 1..20: mol_type = other RNA
gaagtatgccagctctagtt

SEQ ID NO: 6279 - RNA, 20 nt, synthetic construct
  misc_feature 1..20: note = antisense sequence
  source 1..20: mol_type = other RNA
agaagtatgccagctctagt

SEQ ID NO: 6280 - RNA, 20 nt, synthetic construct
  misc_feature 1..20: note = antisense sequence
  source 1..20: mol_type = other RNA
aagaagtatgccagctctag

SEQ ID NO: 6281 - RNA, 20 nt, synthetic construct
  misc_feature 1..20: note = antisense sequence
  source 1..20: mol_type = other RNA
gaagaagtatgccagctcta

SEQ ID NO: 6282 - RNA, 20 nt, synthetic construct
  misc_feature 1..20: note = antisense sequence
  source 1..20: mol_type = other RNA
ggaagaagtatgccagctct

SEQ ID NO: 6283 - RNA, 20 nt, synthetic construct
  misc_feature 1..20: note = antisense sequence
  source 1..20: mol_type = other RNA
gttgaaggaagaagtatgcc

SEQ ID NO: 6284 - RNA, 20 nt, synthetic construct
  misc_feature 1..20: note = antisense sequence
  source 1..20: mol_type = other RNA
cagatgggcagtaacatatt

SEQ ID NO: 6285 - RNA, 20 nt, synthetic construct
  misc_feature 1..20: note = antisense sequence
  source 1..20: mol_type = other RNA
acagatgggcagtaacatat

SEQ ID NO: 6286 - RNA, 20 nt, synthetic construct
  misc_feature 1..20: note = antisense sequence
  source 1..20: mol_type = other RNA
tacacagatgggcagtaaca

SEQ ID NO: 6287 - RNA, 20 nt, synthetic construct
  misc_feature 1..20: note = antisense sequence
  source 1..20: mol_type = other RNA
gtacacagatgggcagtaac

SEQ ID NO: 6288 - RNA, 20 nt, synthetic construct
  misc_feature 1..20: note = antisense sequence
  source 1..20: mol_type = other RNA
aaatctagcacaactccttg

SEQ ID NO: 6289 - RNA, 20 nt, synthetic construct
  misc_feature 1..20: note = antisense sequence
  source 1..20: mol_type = other RNA
tcaaaatctagcacaactcc

SEQ ID NO: 6290 - RNA, 20 nt, synthetic construct
  misc_feature 1..20: note = antisense sequence
  source 1..20: mol_type = other RNA
tccctacctagaagtaatct

SEQ ID NO: 6291 - RNA, 20 nt, synthetic construct
  misc_feature 1..20: note = antisense sequence
  source 1..20: mol_type = other RNA
acctccctacctagaagtaa

SEQ ID NO: 6292 - RNA, 20 nt, synthetic construct
  misc_feature 1..20: note = antisense sequence
  source 1..20: mol_type = other RNA
gacctccctacctagaagta

SEQ ID NO: 6293 - RNA, 20 nt, synthetic construct
  misc_feature 1..20: note = antisense sequence
  source 1..20: mol_type = other RNA
tgacctccctacctagaagt

SEQ ID NO: 6294 - RNA, 20 nt, synthetic construct
  misc_feature 1..20: note = antisense sequence
  source 1..20: mol_type = other RNA
ttgacctccctacctagaag

SEQ ID NO: 6295 - RNA, 20 nt, synthetic construct
  misc_feature 1..20: note = antisense sequence
  source 1..20: mol_type = other RNA
tcttgacctccctacctaga

SEQ ID NO: 6296 - RNA, 20 nt, synthetic construct
  misc_feature 1..20: note = antisense sequence
  source 1..20: mol_type = other RNA
ttcttgacctccctacctag

SEQ ID NO: 6297 - RNA, 20 nt, synthetic construct
  misc_feature 1..20: note = antisense sequence
  source 1..20: mol_type = other RNA
agtctttcttgacctcccta

SEQ ID NO: 6298 - RNA, 20 nt, synthetic construct
  misc_feature 1..20: note = antisense sequence
  source 1..20: mol_type = other RNA
gcgacaatagtaactgcttt

SEQ ID NO: 6299 - RNA, 20 nt, synthetic construct
  misc_feature 1..20: note = antisense sequence
  source 1..20: mol_type = other RNA
tggcgacaatagtaactgct

SEQ ID NO: 6300 - RNA, 20 nt, synthetic construct
  misc_feature 1..20: note = antisense sequence
  source 1..20: mol_type = other RNA
ttggcgacaatagtaactgc

SEQ ID NO: 6301 - RNA, 20 nt, synthetic construct
  misc_feature 1..20: note = antisense sequence
  source 1..20: mol_type = other RNA
tttggcgacaatagtaactg

SEQ ID NO: 6302 - RNA, 20 nt, synthetic construct
  misc_feature 1..20: note = antisense sequence
  source 1..20: mol_type = other RNA
ccttgctcactatgaacttt

SEQ ID NO: 6303 - RNA, 20 nt, synthetic construct
  misc_feature 1..20: note = antisense sequence
  source 1..20: mol_type = other RNA
cccttgctcactatgaactt

SEQ ID NO: 6304 - RNA, 20 nt, synthetic construct
  misc_feature 1..20: note = antisense sequence
  source 1..20: mol_type = other RNA
ttaacccttgctcactatga

SEQ ID NO: 6305 - RNA, 20 nt, synthetic construct
  misc_feature 1..20: note = antisense sequence
  source 1..20: mol_type = other RNA
tttaacccttgctcactatg

SEQ ID NO: 6306 - RNA, 20 nt, synthetic construct
  misc_feature 1..20: note = antisense sequence
  source 1..20: mol_type = other RNA
agccacatagatcctgaaaa

SEQ ID NO: 6307 - RNA, 20 nt, synthetic construct
  misc_feature 1..20: note = antisense sequence
  source 1..20: mol_type = other RNA
tagccacatagatcctgaaa

SEQ ID NO: 6308 - RNA, 20 nt, synthetic construct
  misc_feature 1..20: note = antisense sequence
  source 1..20: mol_type = other RNA
atagccacatagatcctgaa

SEQ ID NO: 6309 - RNA, 20 nt, synthetic construct
  misc_feature 1..20: note = antisense sequence
  source 1..20: mol_type = other RNA
tatagccacatagatcctga

SEQ ID NO: 6310 - RNA, 20 nt, synthetic construct
  misc_feature 1..20: note = antisense sequence
  source 1..20: mol_type = other RNA
atatagccacatagatcctg

SEQ ID NO: 6311 - RNA, 20 nt, synthetic construct
  misc_feature 1..20: note = antisense sequence
  source 1..20: mol_type = other RNA
catatagccacatagatcct

SEQ ID NO: 6312 - RNA, 20 nt, synthetic construct
  misc_feature 1..20: note = antisense sequence
  source 1..20: mol_type = other RNA
ccatatagccacatagatcc

SEQ ID NO: 6313 - RNA, 20 nt, synthetic construct
  misc_feature 1..20: note = antisense sequence
  source 1..20: mol_type = other RNA
ggtggctaaattcagtcttc

SEQ ID NO: 6314 - RNA, 20 nt, synthetic construct
  misc_feature 1..20: note = antisense sequence
  source 1..20: mol_type = other RNA
aggtggctaaattcagtctt

SEQ ID NO: 6315 - RNA, 20 nt, synthetic construct
  misc_feature 1..20: note = antisense sequence
  source 1..20: mol_type = other RNA
gaggtggctaaattcagtct

SEQ ID NO: 6316 - RNA, 20 nt, synthetic construct
  misc_feature 1..20: note = antisense sequence
  source 1..20: mol_type = other RNA
agaggtggctaaattcagtc

SEQ ID NO: 6317 - RNA, 20 nt, synthetic construct
  misc_feature 1..20: note = antisense sequence
  source 1..20: mol_type = other RNA
cagaggtggctaaattcagt

SEQ ID NO: 6318 - RNA, 20 nt, synthetic construct
  misc_feature 1..20: note = antisense sequence
  source 1..20: mol_type = other RNA
tcagaggtggctaaattcag

SEQ ID NO: 6319 - RNA, 20 nt, synthetic construct
  misc_feature 1..20: note = antisense sequence
  source 1..20: mol_type = other RNA
ttcagaggtggctaaattca

SEQ ID NO: 6320 - RNA, 20 nt, synthetic construct
  misc_feature 1..20: note = antisense sequence
  source 1..20: mol_type = other RNA
cattcagaggtggctaaatt

SEQ ID NO: 6321 - RNA, 20 nt, synthetic construct
  misc_feature 1..20: note = antisense sequence
  source 1..20: mol_type = other RNA
acattcagaggtggctaaat

SEQ ID NO: 6322 - RNA, 20 nt, synthetic construct
  misc_feature 1..20: note = antisense sequence
  source 1..20: mol_type = other RNA
ggtacattcagaggtggcta

SEQ ID NO: 6323 - RNA, 20 nt, synthetic construct
  misc_feature 1..20: note = antisense sequence
  source 1..20: mol_type = other RNA
aggtacattcagaggtggct

SEQ ID NO: 6324 - RNA, 20 nt, synthetic construct
  misc_feature 1..20: note = antisense sequence
  source 1..20: mol_type = other RNA
caggtacattcagaggtggc

SEQ ID NO: 6325 - RNA, 20 nt, synthetic construct
  misc_feature 1..20: note = antisense sequence
  source 1..20: mol_type = other RNA
tcaggtacattcagaggtgg

SEQ ID NO: 6326 - RNA, 20 nt, synthetic construct
  misc_feature 1..20: note = antisense sequence
  source 1..20: mol_type = other RNA
atcaggtacattcagaggtg

SEQ ID NO: 6327 - RNA, 20 nt, synthetic construct
  misc_feature 1..20: note = antisense sequence
  source 1..20: mol_type = other RNA
catcaggtacattcagaggt

SEQ ID NO: 6328 - RNA, 20 nt, synthetic construct
  misc_feature 1..20: note = antisense sequence
  source 1..20: mol_type = other RNA
tcatcaggtacattcagagg

SEQ ID NO: 6329 - RNA, 20 nt, synthetic construct
  misc_feature 1..20: note = antisense sequence
  source 1..20: mol_type = other RNA
ctcatcaggtacattcagag

SEQ ID NO: 6330 - RNA, 20 nt, synthetic construct
  misc_feature 1..20: note = antisense sequence
  source 1..20: mol_type = other RNA
cctcatcaggtacattcaga

SEQ ID NO: 6331 - RNA, 20 nt, synthetic construct
  misc_feature 1..20: note = antisense sequence
  source 1..20: mol_type = other RNA
agcctcatcaggtacattca

SEQ ID NO: 6332 - RNA, 20 nt, synthetic construct
  misc_feature 1..20: note = antisense sequence
  source 1..20: mol_type = other RNA
gagcctcatcaggtacattc

SEQ ID NO: 6333 - RNA, 20 nt, synthetic construct
  misc_feature 1..20: note = antisense sequence
  source 1..20: mol_type = other RNA
agagcctcatcaggtacatt

SEQ ID NO: 6334 - RNA, 20 nt, synthetic construct
  misc_feature 1..20: note = antisense sequence
  source 1..20: mol_type = other RNA
cagagcctcatcaggtacat

SEQ ID NO: 6335 - RNA, 20 nt, synthetic construct
  misc_feature 1..20: note = antisense sequence
  source 1..20: mol_type = other RNA
atttccaaagagcactgtct

SEQ ID NO: 6336 - RNA, 20 nt, synthetic construct
  misc_feature 1..20: note = antisense sequence
  source 1..20: mol_type = other RNA
ggttgcagtgagccaagatt

SEQ ID NO: 6337 - RNA, 20 nt, synthetic construct
  misc_feature 1..20: note = antisense sequence
  source 1..20: mol_type = other RNA
aggttgcagtgagccaagat

SEQ ID NO: 6338 - RNA, 20 nt, synthetic construct
  misc_feature 1..20: note = antisense sequence
  source 1..20: mol_type = other RNA
gaggttgcagtgagccaaga

SEQ ID NO: 6339 - RNA, 20 nt, synthetic construct
  misc_feature 1..20: note = antisense sequence
  source 1..20: mol_type = other RNA
agaggttgcagtgagccaag

SEQ ID NO: 6340 - RNA, 20 nt, synthetic construct
  misc_feature 1..20: note = antisense sequence
  source 1..20: mol_type = other RNA
cagaggttgcagtgagccaa

SEQ ID NO: 6341 - RNA, 20 nt, synthetic construct
  misc_feature 1..20: note = antisense sequence
  source 1..20: mol_type = other RNA
acagaggttgcagtgagcca

SEQ ID NO: 6342 - RNA, 20 nt, synthetic construct
  misc_feature 1..20: note = antisense sequence
  source 1..20: mol_type = other RNA
gacagaggttgcagtgagcc

SEQ ID NO: 6343 - RNA, 20 nt, synthetic construct
  misc_feature 1..20: note = antisense sequence
  source 1..20: mol_type = other RNA
agacagaggttgcagtgagc

SEQ ID NO: 6344 - RNA, 20 nt, synthetic construct
  misc_feature 1..20: note = antisense sequence
  source 1..20: mol_type = other RNA
gagacagaggttgcagtgag

SEQ ID NO: 6345 - RNA, 20 nt, synthetic construct
  misc_feature 1..20: note = antisense sequence
  source 1..20: mol_type = other RNA
ggagacagaggttgcagtga

SEQ ID NO: 6346 - RNA, 20 nt, synthetic construct
  misc_feature 1..20: note = antisense sequence
  source 1..20: mol_type = other RNA
gggagacagaggttgcagtg

SEQ ID NO: 6347 - RNA, 20 nt, synthetic construct
  misc_feature 1..20: note = antisense sequence
  source 1..20: mol_type = other RNA
tgggagacagaggttgcagt

SEQ ID NO: 6348 - RNA, 20 nt, synthetic construct
  misc_feature 1..20: note = antisense sequence
  source 1..20: mol_type = other RNA
cttgaacctgggagacagag

SEQ ID NO: 6349 - RNA, 20 nt, synthetic construct
  misc_feature 1..20: note = antisense sequence
  source 1..20: mol_type = other RNA
gcttgaacctgggagacaga

SEQ ID NO: 6350 - RNA, 20 nt, synthetic construct
  misc_feature 1..20: note = antisense sequence
  source 1..20: mol_type = other RNA
cgcttgaacctgggagacag

SEQ ID NO: 6351 - RNA, 20 nt, synthetic construct
  misc_feature 1..20: note = antisense sequence
  source 1..20: mol_type = other RNA
ccgcttgaacctgggagaca

SEQ ID NO: 6352 - RNA, 20 nt, synthetic construct
  misc_feature 1..20: note = antisense sequence
  source 1..20: mol_type = other RNA
accgcttgaacctgggagac

SEQ ID NO: 6353 - RNA, 20 nt, synthetic construct
  misc_feature 1..20: note = antisense sequence
  source 1..20: mol_type = other RNA
caccgcttgaacctgggaga

SEQ ID NO: 6354 - RNA, 20 nt, synthetic construct
  misc_feature 1..20: note = antisense sequence
  source 1..20: mol_type = other RNA
atattagccaggtgtggtgg

SEQ ID NO: 6355 - RNA, 20 nt, synthetic construct
  misc_feature 1..20: note = antisense sequence
  source 1..20: mol_type = other RNA
tgaggctaacctggtcaaca

SEQ ID NO: 6356 - RNA, 20 nt, synthetic construct
  misc_feature 1..20: note = antisense sequence
  source 1..20: mol_type = other RNA
tcaggagtttgaggctaacc

SEQ ID NO: 6357 - RNA, 20 nt, synthetic construct
  misc_feature 1..20: note = antisense sequence
  source 1..20: mol_type = other RNA
gtcaggagtttgaggctaac

SEQ ID NO: 6358 - RNA, 20 nt, synthetic construct
  misc_feature 1..20: note = antisense sequence
  source 1..20: mol_type = other RNA
ggtcaggagtttgaggctaa

SEQ ID NO: 6359 - RNA, 20 nt, synthetic construct
  misc_feature 1..20: note = antisense sequence
  source 1..20: mol_type = other RNA
aggtcaggagtttgaggcta

SEQ ID NO: 6360 - RNA, 20 nt, synthetic construct
  misc_feature 1..20: note = antisense sequence
  source 1..20: mol_type = other RNA
gaggtcaggagtttgaggct

SEQ ID NO: 6361 - RNA, 20 nt, synthetic construct
  misc_feature 1..20: note = antisense sequence
  source 1..20: mol_type = other RNA
tgaggtcaggagtttgaggc

SEQ ID NO: 6362 - RNA, 20 nt, synthetic construct
  misc_feature 1..20: note = antisense sequence
  source 1..20: mol_type = other RNA
ctgaggtcaggagtttgagg

SEQ ID NO: 6363 - RNA, 20 nt, synthetic construct
  misc_feature 1..20: note = antisense sequence
  source 1..20: mol_type = other RNA
ttgagaggtgggtggatcac

SEQ ID NO: 6364 - RNA, 20 nt, synthetic construct
  misc_feature 1..20: note = antisense sequence
  source 1..20: mol_type = other RNA
tttgagaggtgggtggatca

SEQ ID NO: 6365 - RNA, 20 nt, synthetic construct
  misc_feature 1..20: note = antisense sequence
  source 1..20: mol_type = other RNA
actttgagaggtgggtggat

SEQ ID NO: 6366 - RNA, 20 nt, synthetic construct
  misc_feature 1..20: note = antisense sequence
  source 1..20: mol_type = other RNA
cactttgagaggtgggtgga

SEQ ID NO: 6367 - RNA, 20 nt, synthetic construct
  misc_feature 1..20: note = antisense sequence
  source 1..20: mol_type = other RNA
gcactttgagaggtgggtgg

SEQ ID NO: 6368 - RNA, 20 nt, synthetic construct
  misc_feature 1..20: note = antisense sequence
  source 1..20: mol_type = other RNA
cagcactttgagaggtgggt

SEQ ID NO: 6369 - RNA, 20 nt, synthetic construct
  misc_feature 1..20: note = antisense sequence
  source 1..20: mol_type = other RNA
ccagcactttgagaggtggg

SEQ ID NO: 6370 - RNA, 20 nt, synthetic construct
  misc_feature 1..20: note = antisense sequence
  source 1..20: mol_type = other RNA
cccagcactttgagaggtgg

SEQ ID NO: 6371 - RNA, 20 nt, synthetic construct
  misc_feature 1..20: note = antisense sequence
  source 1..20: mol_type = other RNA
tcccagcactttgagaggtg

SEQ ID NO: 6372 - RNA, 20 nt, synthetic construct
  misc_feature 1..20: note = antisense sequence
  source 1..20: mol_type = other RNA
atcccagcactttgagaggt

SEQ ID NO: 6373 - RNA, 20 nt, synthetic construct
  misc_feature 1..20: note = antisense sequence
  source 1..20: mol_type = other RNA
aatcccagcactttgagagg

SEQ ID NO: 6374 - RNA, 20 nt, synthetic construct
  misc_feature 1..20: note = antisense sequence
  source 1..20: mol_type = other RNA
taatcccagcactttgagag

SEQ ID NO: 6375 - RNA, 20 nt, synthetic construct
  misc_feature 1..20: note = antisense sequence
  source 1..20: mol_type = other RNA
gtaatcccagcactttgaga

SEQ ID NO: 6376 - RNA, 20 nt, synthetic construct
  misc_feature 1..20: note = antisense sequence
  source 1..20: mol_type = other RNA
gtatgcttgtgaagttccaa

SEQ ID NO: 6377 - RNA, 20 nt, synthetic construct
  misc_feature 1..20: note = antisense sequence
  source 1..20: mol_type = other RNA
aagtatgcttgtgaagttcc

SEQ ID NO: 6378 - RNA, 20 nt, synthetic construct
  misc_feature 1..20: note = antisense sequence
  source 1..20: mol_type = other RNA
cctgctttggtactggtttt

SEQ ID NO: 6379 - RNA, 20 nt, synthetic construct
  misc_feature 1..20: note = antisense sequence
  source 1..20: mol_type = other RNA
tcctgctttggtactggttt

SEQ ID NO: 6380 - RNA, 20 nt, synthetic construct
  misc_feature 1..20: note = antisense sequence
  source 1..20: mol_type = other RNA
ttcctgctttggtactggtt

SEQ ID NO: 6381 - RNA, 20 nt, synthetic construct
  misc_feature 1..20: note = antisense sequence
  source 1..20: mol_type = other RNA
attcctgctttggtactggt

SEQ ID NO: 6382 - RNA, 20 nt, synthetic construct
  misc_feature 1..20: note = antisense sequence
  source 1..20: mol_type = other RNA
aattcctgctttggtactgg

SEQ ID NO: 6383 - RNA, 20 nt, synthetic construct
  misc_feature 1..20: note = antisense sequence
  source 1..20: mol_type = other RNA
aaattcctgctttggtactg

SEQ ID NO: 6384 - RNA, 20 nt, synthetic construct
  misc_feature 1..20: note = antisense sequence
  source 1..20: mol_type = other RNA
aatggatggtgccaaattcc

SEQ ID NO: 6385 - RNA, 20 nt, synthetic construct
  misc_feature 1..20: note = antisense sequence
  source 1..20: mol_type = other RNA
aaatggatggtgccaaattc

SEQ ID NO: 6386 - RNA, 20 nt, synthetic construct
  misc_feature 1..20: note = antisense sequence
  source 1..20: mol_type = other RNA
tcaaatggatggtgccaaat

SEQ ID NO: 6387 - RNA, 20 nt, synthetic construct
  misc_feature 1..20: note = antisense sequence
  source 1..20: mol_type = other RNA
atctcaaatggatggtgcca

SEQ ID NO: 6388 - RNA, 20 nt, synthetic construct
  misc_feature 1..20: note = antisense sequence
  source 1..20: mol_type = other RNA
gtctcctaaagaagttctag

SEQ ID NO: 6389 - RNA, 20 nt, synthetic construct
  misc_feature 1..20: note = antisense sequence
  source 1..20: mol_type = other RNA
ctgtctcctaaagaagttct

SEQ ID NO: 6390 - RNA, 20 nt, synthetic construct
  misc_feature 1..20: note = antisense sequence
  source 1..20: mol_type = other RNA
actgtctcctaaagaagttc

SEQ ID NO: 6391 - RNA, 20 nt, synthetic construct
  misc_feature 1..20: note = antisense sequence
  source 1..20: mol_type = other RNA
agactgtctcctaaagaagt

SEQ ID NO: 6392 - RNA, 20 nt, synthetic construct
  misc_feature 1..20: note = antisense sequence
  source 1..20: mol_type = other RNA
acaggttgtggaaactctta

SEQ ID NO: 6393 - RNA, 20 nt, synthetic construct
  misc_feature 1..20: note = antisense sequence
  source 1..20: mol_type = other RNA
agtacaggttgtggaaactc

SEQ ID NO: 6394 - RNA, 20 nt, synthetic construct
  misc_feature 1..20: note = antisense sequence
  source 1..20: mol_type = other RNA
tagtacaggttgtggaaact

SEQ ID NO: 6395 - RNA, 20 nt, synthetic construct
  misc_feature 1..20: note = antisense sequence
  source 1..20: mol_type = other RNA
catagtacaggttgtggaaa

SEQ ID NO: 6396 - RNA, 20 nt, synthetic construct
  misc_feature 1..20: note = antisense sequence
  source 1..20: mol_type = other RNA
ctcatagtacaggttgtgga

SEQ ID NO: 6397 - RNA, 20 nt, synthetic construct
  misc_feature 1..20: note = antisense sequence
  source 1..20: mol_type = other RNA
tctcatagtacaggttgtgg

SEQ ID NO: 6398 - RNA, 20 nt, synthetic construct
  misc_feature 1..20: note = antisense sequence
  source 1..20: mol_type = other RNA
ttctcatagtacaggttgtg

SEQ ID NO: 6399 - RNA, 20 nt, synthetic construct
  misc_feature 1..20: note = antisense sequence
  source 1..20: mol_type = other RNA
aagggtctacccagtgcctg

SEQ ID NO: 6400 - RNA, 20 nt, synthetic construct
  misc_feature 1..20: note = antisense sequence
  source 1..20: mol_type = other RNA
aaagggtctacccagtgcct

SEQ ID NO: 6401 - RNA, 20 nt, synthetic construct
  misc_feature 1..20: note = antisense sequence
  source 1..20: mol_type = other RNA
ctaaagggtctacccagtgc

SEQ ID NO: 6402 - RNA, 20 nt, synthetic construct
  misc_feature 1..20: note = antisense sequence
  source 1..20: mol_type = other RNA
tctaaagggtctacccagtg

SEQ ID NO: 6403 - RNA, 20 nt, synthetic construct
  misc_feature 1..20: note = antisense sequence
  source 1..20: mol_type = other RNA
tatctaaagggtctacccag

SEQ ID NO: 6404 - RNA, 20 nt, synthetic construct
  misc_feature 1..20: note = antisense sequence
  source 1..20: mol_type = other RNA
atatctaaagggtctaccca

SEQ ID NO: 6405 - RNA, 20 nt, synthetic construct
  misc_feature 1..20: note = antisense sequence
  source 1..20: mol_type = other RNA
tatatctaaagggtctaccc

SEQ ID NO: 6406 - RNA, 20 nt, synthetic construct
  misc_feature 1..20: note = antisense sequence
  source 1..20: mol_type = other RNA
caccagttgttatccagatt

SEQ ID NO: 6407 - RNA, 20 nt, synthetic construct
  misc_feature 1..20: note = antisense sequence
  source 1..20: mol_type = other RNA
attcaccagttgttatccag

SEQ ID NO: 6408 - RNA, 20 nt, synthetic construct
  misc_feature 1..20: note = antisense sequence
  source 1..20: mol_type = other RNA
ttctctgaagcctccttata

SEQ ID NO: 6409 - RNA, 20 nt, synthetic construct
  misc_feature 1..20: note = antisense sequence
  source 1..20: mol_type = other RNA
attctctgaagcctccttat

SEQ ID NO: 6410 - RNA, 20 nt, synthetic construct
  misc_feature 1..20: note = antisense sequence
  source 1..20: mol_type = other RNA
taattctctgaagcctcctt

SEQ ID NO: 6411 - RNA, 20 nt, synthetic construct
  misc_feature 1..20: note = antisense sequence
  source 1..20: mol_type = other RNA
cccttccttaattggatgga

SEQ ID NO: 6412 - RNA, 20 nt, synthetic construct
  misc_feature 1..20: note = antisense sequence
  source 1..20: mol_type = other RNA
tcccttccttaattggatgg

SEQ ID NO: 6413 - RNA, 20 nt, synthetic construct
  misc_feature 1..20: note = antisense sequence
  source 1..20: mol_type = other RNA
gtttcccttccttaattgga

SEQ ID NO: 6414 - RNA, 20 nt, synthetic construct
  misc_feature 1..20: note = antisense sequence
  source 1..20: mol_type = other RNA
tgtttcccttccttaattgg

SEQ ID NO: 6415 - RNA, 20 nt, synthetic construct
  misc_feature 1..20: note = antisense sequence
  source 1..20: mol_type = other RNA
cctgagatttgctctgtttc

SEQ ID NO: 6416 - RNA, 20 nt, synthetic construct
  misc_feature 1..20: note = antisense sequence
  source 1..20: mol_type = other RNA
ggcctgagatttgctctgtt

SEQ ID NO: 6417 - RNA, 20 nt, synthetic construct
  misc_feature 1..20: note = antisense sequence
  source 1..20: mol_type = other RNA
gagatggcttcctatgcagg

SEQ ID NO: 6418 - RNA, 20 nt, synthetic construct
  misc_feature 1..20: note = antisense sequence
  source 1..20: mol_type = other RNA
agagatggcttcctatgcag

SEQ ID NO: 6419 - RNA, 20 nt, synthetic construct
  misc_feature 1..20: note = antisense sequence
  source 1..20: mol_type = other RNA
aagctgatggtctccactca

SEQ ID NO: 6420 - RNA, 20 nt, synthetic construct
  misc_feature 1..20: note = antisense sequence
  source 1..20: mol_type = other RNA
gcaagctgatggtctccact

SEQ ID NO: 6421 - RNA, 20 nt, synthetic construct
  misc_feature 1..20: note = antisense sequence
  source 1..20: mol_type = other RNA
ggcaagctgatggtctccac

SEQ ID NO: 6422 - RNA, 20 nt, synthetic construct
  misc_feature 1..20: note = antisense sequence
  source 1..20: mol_type = other RNA
cttgctgcttcaaaaggaaa

SEQ ID NO: 6423 - RNA, 20 nt, synthetic construct
  misc_feature 1..20: note = antisense sequence
  source 1..20: mol_type = other RNA
gttgtccttgctgcttcaaa

SEQ ID NO: 6424 - RNA, 20 nt, synthetic construct
  misc_feature 1..20: note = antisense sequence
  source 1..20: mol_type = other RNA
tgttgtccttgctgcttcaa

SEQ ID NO: 6425 - RNA, 20 nt, synthetic construct
  misc_feature 1..20: note = antisense sequence
  source 1..20: mol_type = other RNA
atgttgtccttgctgcttca

SEQ ID NO: 6426 - RNA, 20 nt, synthetic construct
  misc_feature 1..20: note = antisense sequence
  source 1..20: mol_type = other RNA
aatagatgttgtccttgctg

SEQ ID NO: 6427 - RNA, 20 nt, synthetic construct
  misc_feature 1..20: note = antisense sequence
  source 1..20: mol_type = other RNA
ctacagagaatgcacatatc

SEQ ID NO: 6428 - RNA, 20 nt, synthetic construct
  misc_feature 1..20: note = antisense sequence
  source 1..20: mol_type = other RNA
caactacagagaatgcacat

SEQ ID NO: 6429 - RNA, 20 nt, synthetic construct
  misc_feature 1..20: note = antisense sequence
  source 1..20: mol_type = other RNA
ttcaactacagagaatgcac

SEQ ID NO: 6430 - RNA, 20 nt, synthetic construct
  misc_feature 1..20: note = antisense sequence
  source 1..20: mol_type = other RNA
cccatttcaactacagagaa

SEQ ID NO: 6431 - RNA, 20 nt, synthetic construct
  misc_feature 1..20: note = antisense sequence
  source 1..20: mol_type = other RNA
aatgaactctgaacagctca

SEQ ID NO: 6432 - RNA, 20 nt, synthetic construct
  misc_feature 1..20: note = antisense sequence
  source 1..20: mol_type = other RNA
atcaatgaactctgaacagc

SEQ ID NO: 6433 - RNA, 20 nt, synthetic construct
  misc_feature 1..20: note = antisense sequence
  source 1..20: mol_type = other RNA
catcaatgaactctgaacag

SEQ ID NO: 6434 - RNA, 20 nt, synthetic construct
  misc_feature 1..20: note = antisense sequence
  source 1..20: mol_type = other RNA
ccatcaatgaactctgaaca

SEQ ID NO: 6435 - RNA, 20 nt, synthetic construct
  misc_feature 1..20: note = antisense sequence
  source 1..20: mol_type = other RNA
gccatcaatgaactctgaac

SEQ ID NO: 6436 - RNA, 20 nt, synthetic construct
  misc_feature 1..20: note = antisense sequence
  source 1..20: mol_type = other RNA
ttttccagcagtgagccctg

SEQ ID NO: 6437 - RNA, 20 nt, synthetic construct
  misc_feature 1..20: note = antisense sequence
  source 1..20: mol_type = other RNA
agttttccagcagtgagccc

SEQ ID NO: 6438 - RNA, 20 nt, synthetic construct
  misc_feature 1..20: note = antisense sequence
  source 1..20: mol_type = other RNA
atagttttccagcagtgagc

SEQ ID NO: 6439 - RNA, 20 nt, synthetic construct
  misc_feature 1..20: note = antisense sequence
  source 1..20: mol_type = other RNA
gatagttttccagcagtgag

SEQ ID NO: 6440 - RNA, 20 nt, synthetic construct
  misc_feature 1..20: note = antisense sequence
  source 1..20: mol_type = other RNA
gcagatagttttccagcagt

SEQ ID NO: 6441 - RNA, 20 nt, synthetic construct
  misc_feature 1..20: note = antisense sequence
  source 1..20: mol_type = other RNA
tgcagatagttttccagcag

SEQ ID NO: 6442 - RNA, 20 nt, synthetic construct
  misc_feature 1..20: note = antisense sequence
  source 1..20: mol_type = other RNA
agttgcagatagttttccag

SEQ ID NO: 6443 - RNA, 20 nt, synthetic construct
  misc_feature 1..20: note = antisense sequence
  source 1..20: mol_type = other RNA
acagttgcagatagttttcc

SEQ ID NO: 6444 - RNA, 20 nt, synthetic construct
  misc_feature 1..20: note = antisense sequence
  source 1..20: mol_type = other RNA
ggcagaaactcagattcata

SEQ ID NO: 6445 - RNA, 20 nt, synthetic construct
  misc_feature 1..20: note = antisense sequence
  source 1..20: mol_type = other RNA
agagcaggcagaaactcaga

SEQ ID NO: 6446 - RNA, 20 nt, synthetic construct
  misc_feature 1..20: note = antisense sequence
  source 1..20: mol_type = other RNA
aagagcaggcagaaactcag

SEQ ID NO: 6447 - RNA, 20 nt, synthetic construct
  misc_feature 1..20: note = antisense sequence
  source 1..20: mol_type = other RNA
aaagagcaggcagaaactca

SEQ ID NO: 6448 - RNA, 20 nt, synthetic construct
  misc_feature 1..20: note = antisense sequence
  source 1..20: mol_type = other RNA
gaatgtgtggaaaagagcag

SEQ ID NO: 6449 - RNA, 20 nt, synthetic construct
  misc_feature 1..20: note = antisense sequence
  source 1..20: mol_type = other RNA
tcctagagctgaggttttca

SEQ ID NO: 6450 - RNA, 20 nt, synthetic construct
  misc_feature 1..20: note = antisense sequence
  source 1..20: mol_type = other RNA
ttcctagagctgaggttttc

SEQ ID NO: 6451 - RNA, 20 nt, synthetic construct
  misc_feature 1..20: note = antisense sequence
  source 1..20: mol_type = other RNA
attcctagagctgaggtttt

SEQ ID NO: 6452 - RNA, 20 nt, synthetic construct
  misc_feature 1..20: note = antisense sequence
  source 1..20: mol_type = other RNA
cattcctagagctgaggttt

SEQ ID NO: 6453 - RNA, 20 nt, synthetic construct
  misc_feature 1..20: note = antisense sequence
  source 1..20: mol_type = other RNA
ccattcctagagctgaggtt

SEQ ID NO: 6454 - RNA, 20 nt, synthetic construct
  misc_feature 1..20: note = antisense sequence
  source 1..20: mol_type = other RNA
taccattcctagagctgagg

SEQ ID NO: 6455 - RNA, 20 nt, synthetic construct
  misc_feature 1..20: note = antisense sequence
  source 1..20: mol_type = other RNA
gtaccattcctagagctgag

SEQ ID NO: 6456 - RNA, 20 nt, synthetic construct
  misc_feature 1..20: note = antisense sequence
  source 1..20: mol_type = other RNA
ctgtaccattcctagagctg

SEQ ID NO: 6457 - RNA, 20 nt, synthetic construct
  misc_feature 1..20: note = antisense sequence
  source 1..20: mol_type = other RNA
tatctgtaccattcctagag

SEQ ID NO: 6458 - RNA, 20 nt, synthetic construct
  misc_feature 1..20: note = antisense sequence
  source 1..20: mol_type = other RNA
cacacaccgcagcctgttgt

SEQ ID NO: 6459 - RNA, 20 nt, synthetic construct
  misc_feature 1..20: note = antisense sequence
  source 1..20: mol_type = other RNA
gggaacatcacacaccgcag

SEQ ID NO: 6460 - RNA, 20 nt, synthetic construct
  misc_feature 1..20: note = antisense sequence
  source 1..20: mol_type = other RNA
ctcactcataggtgggaatt

SEQ ID NO: 6461 - RNA, 20 nt, synthetic construct
  misc_feature 1..20: note = antisense sequence
  source 1..20: mol_type = other RNA
tctcactcataggtgggaat

SEQ ID NO: 6462 - RNA, 20 nt, synthetic construct
  misc_feature 1..20: note = antisense sequence
  source 1..20: mol_type = other RNA
ttctcactcataggtgggaa

SEQ ID NO: 6463 - RNA, 20 nt, synthetic construct
  misc_feature 1..20: note = antisense sequence
  source 1..20: mol_type = other RNA
gttctcactcataggtggga

SEQ ID NO: 6464 - RNA, 20 nt, synthetic construct
  misc_feature 1..20: note = antisense sequence
  source 1..20: mol_type = other RNA
tgttctcactcataggtggg

SEQ ID NO: 6465 - RNA, 20 nt, synthetic construct
  misc_feature 1..20: note = antisense sequence
  source 1..20: mol_type = other RNA
atgttctcactcataggtgg

SEQ ID NO: 6466 - RNA, 20 nt, synthetic construct
  misc_feature 1..20: note = antisense sequence
  source 1..20: mol_type = other RNA
catgttctcactcataggtg

SEQ ID NO: 6467 - RNA, 20 nt, synthetic construct
  misc_feature 1..20: note = antisense sequence
  source 1..20: mol_type = other RNA
gcatgttctcactcataggt

SEQ ID NO: 6468 - RNA, 20 nt, synthetic construct
  misc_feature 1..20: note = antisense sequence
  source 1..20: mol_type = other RNA
tggatgaagctggaaaccat

SEQ ID NO: 6469 - RNA, 20 nt, synthetic construct
  misc_feature 1..20: note = antisense sequence
  source 1..20: mol_type = other RNA
atggatgaagctggaaacca

SEQ ID NO: 6470 - RNA, 20 nt, synthetic construct
  misc_feature 1..20: note = antisense sequence
  source 1..20: mol_type = other RNA
catggatgaagctggaaacc

SEQ ID NO: 6471 - RNA, 20 nt, synthetic construct
  misc_feature 1..20: note = antisense sequence
  source 1..20: mol_type = other RNA
acatggatgaagctggaaac

SEQ ID NO: 6472 - RNA, 20 nt, synthetic construct
  misc_feature 1..20: note = antisense sequence
  source 1..20: mol_type = other RNA
gacatggatgaagctggaaa

SEQ ID NO: 6473 - RNA, 20 nt, synthetic construct
  misc_feature 1..20: note = antisense sequence
  source 1..20: mol_type = other RNA
ggacatggatgaagctggaa

SEQ ID NO: 6474 - RNA, 20 nt, synthetic construct
  misc_feature 1..20: note = antisense sequence
  source 1..20: mol_type = other RNA
gggacatggatgaagctgga

SEQ ID NO: 6475 - RNA, 20 nt, synthetic construct
  misc_feature 1..20: note = antisense sequence
  source 1..20: mol_type = other RNA
agggacatggatgaagctgg

SEQ ID NO: 6476 - RNA, 20 nt, synthetic construct
  misc_feature 1..20: note = antisense sequence
  source 1..20: mol_type = other RNA
tagggacatggatgaagctg

SEQ ID NO: 6477 - RNA, 20 nt, synthetic construct
  misc_feature 1..20: note = antisense sequence
  source 1..20: mol_type = other RNA
gtagggacatggatgaagct

SEQ ID NO: 6478 - RNA, 20 nt, synthetic construct
  misc_feature 1..20: note = antisense sequence
  source 1..20: mol_type = other RNA
tgtagggacatggatgaagc

SEQ ID NO: 6479 - RNA, 20 nt, synthetic construct
  misc_feature 1..20: note = antisense sequence
  source 1..20: mol_type = other RNA
ttgtagggacatggatgaag

SEQ ID NO: 6480 - RNA, 20 nt, synthetic construct
  misc_feature 1..20: note = antisense sequence
  source 1..20: mol_type = other RNA
tttgtagggacatggatgaa

SEQ ID NO: 6481 - RNA, 20 nt, synthetic construct
  misc_feature 1..20: note = antisense sequence
  source 1..20: mol_type = other RNA
ctttgtagggacatggatga

SEQ ID NO: 6482 - RNA, 20 nt, synthetic construct
  misc_feature 1..20: note = antisense sequence
  source 1..20: mol_type = other RNA
gttcatgtcctttgtaggga

SEQ ID NO: 6483 - RNA, 20 nt, synthetic construct
  misc_feature 1..20: note = antisense sequence
  source 1..20: mol_type = other RNA
agttcatgtcctttgtaggg

SEQ ID NO: 6484 - RNA, 20 nt, synthetic construct
  misc_feature 1..20: note = antisense sequence
  source 1..20: mol_type = other RNA
gagttcatgtcctttgtagg

SEQ ID NO: 6485 - RNA, 20 nt, synthetic construct
  misc_feature 1..20: note = antisense sequence
  source 1..20: mol_type = other RNA
tgagttcatgtcctttgtag

SEQ ID NO: 6486 - RNA, 20 nt, synthetic construct
  misc_feature 1..20: note = antisense sequence
  source 1..20: mol_type = other RNA
gatgagttcatgtcctttgt

SEQ ID NO: 6487 - RNA, 20 nt, synthetic construct
  misc_feature 1..20: note = antisense sequence
  source 1..20: mol_type = other RNA
ggatgagttcatgtcctttg

SEQ ID NO: 6488 - RNA, 20 nt, synthetic construct
  misc_feature 1..20: note = antisense sequence
  source 1..20: mol_type = other RNA
aaaaggatgagttcatgtcc

SEQ ID NO: 6489 - RNA, 20 nt, synthetic construct
  misc_feature 1..20: note = antisense sequence
  source 1..20: mol_type = other RNA
catggaatactatgcagcca

SEQ ID NO: 6490 - RNA, 20 nt, synthetic construct
  misc_feature 1..20: note = antisense sequence
  source 1..20: mol_type = other RNA
caacgatagactggattaag

SEQ ID NO: 6491 - RNA, 20 nt, synthetic construct
  misc_feature 1..20: note = antisense sequence
  source 1..20: mol_type = other RNA
caacccaaatgtccatcaac

SEQ ID NO: 6492 - RNA, 20 nt, synthetic construct
  misc_feature 1..20: note = antisense sequence
  source 1..20: mol_type = other RNA
ccaacccaaatgtccatcaa

SEQ ID NO: 6493 - RNA, 20 nt, synthetic construct
  misc_feature 1..20: note = antisense sequence
  source 1..20: mol_type = other RNA
accaacccaaatgtccatca

SEQ ID NO: 6494 - RNA, 20 nt, synthetic construct
  misc_feature 1..20: note = antisense sequence
  source 1..20: mol_type = other RNA
aaccaacccaaatgtccatc

SEQ ID NO: 6495 - RNA, 20 nt, synthetic construct
  misc_feature 1..20: note = antisense sequence
  source 1..20: mol_type = other RNA
gaaccaacccaaatgtccat

SEQ ID NO: 6496 - RNA, 20 nt, synthetic construct
  misc_feature 1..20: note = antisense sequence
  source 1..20: mol_type = other RNA
ggaaccaacccaaatgtcca

SEQ ID NO: 6497 - RNA, 20 nt, synthetic construct
  misc_feature 1..20: note = antisense sequence
  source 1..20: mol_type = other RNA
tggaaccaacccaaatgtcc

SEQ ID NO: 6498 - RNA, 20 nt, synthetic construct
  misc_feature 1..20: note = antisense sequence
  source 1..20: mol_type = other RNA
aaagacttggaaccaaccca

SEQ ID NO: 6499 - RNA, 20 nt, synthetic construct
  misc_feature 1..20: note = antisense sequence
  source 1..20: mol_type = other RNA
caaagacttggaaccaaccc

SEQ ID NO: 6500 - RNA, 20 nt, synthetic construct
  misc_feature 1..20: note = antisense sequence
  source 1..20: mol_type = other RNA
gcaaagacttggaaccaacc

SEQ ID NO: 6501 - RNA, 20 nt, synthetic construct
  misc_feature 1..20: note = antisense sequence
  source 1..20: mol_type = other RNA
agcaaagacttggaaccaac

SEQ ID NO: 6502 - RNA, 20 nt, synthetic construct
  misc_feature 1..20: note = antisense sequence
  source 1..20: mol_type = other RNA
tagcaaagacttggaaccaa

SEQ ID NO: 6503 - RNA, 20 nt, synthetic construct
  misc_feature 1..20: note = antisense sequence
  source 1..20: mol_type = other RNA
atagcaaagacttggaacca

SEQ ID NO: 6504 - RNA, 20 nt, synthetic construct
  misc_feature 1..20: note = antisense sequence
  source 1..20: mol_type = other RNA
aatagcaaagacttggaacc

SEQ ID NO: 6505 - RNA, 20 nt, synthetic construct
  misc_feature 1..20: note = antisense sequence
  source 1..20: mol_type = other RNA
caatagcaaagacttggaac

SEQ ID NO: 6506 - RNA, 20 nt, synthetic construct
  misc_feature 1..20: note = antisense sequence
  source 1..20: mol_type = other RNA
cacaatagcaaagacttgga

SEQ ID NO: 6507 - RNA, 20 nt, synthetic construct
  misc_feature 1..20: note = antisense sequence
  source 1..20: mol_type = other RNA
tcacaatagcaaagacttgg

SEQ ID NO: 6508 - RNA, 20 nt, synthetic construct
  misc_feature 1..20: note = antisense sequence
  source 1..20: mol_type = other RNA
ctgttcacaatagcaaagac

SEQ ID NO: 6509 - RNA, 20 nt, synthetic construct
  misc_feature 1..20: note = antisense sequence
  source 1..20: mol_type = other RNA
cactgttcacaatagcaaag

SEQ ID NO: 6510 - RNA, 20 nt, synthetic construct
  misc_feature 1..20: note = antisense sequence
  source 1..20: mol_type = other RNA
gctataaagacacatgcaca

SEQ ID NO: 6511 - RNA, 20 nt, synthetic construct
  misc_feature 1..20: note = antisense sequence
  source 1..20: mol_type = other RNA
tgctataaagacacatgcac

SEQ ID NO: 6512 - RNA, 20 nt, synthetic construct
  misc_feature 1..20: note = antisense sequence
  source 1..20: mol_type = other RNA
ctgctataaagacacatgca

SEQ ID NO: 6513 - RNA, 20 nt, synthetic construct
  misc_feature 1..20: note = antisense sequence
  source 1..20: mol_type = other RNA
gctgctataaagacacatgc

SEQ ID NO: 6514 - RNA, 20 nt, synthetic construct
  misc_feature 1..20: note = antisense sequence
  source 1..20: mol_type = other RNA
tgctgctataaagacacatg

SEQ ID NO: 6515 - RNA, 20 nt, synthetic construct
  misc_feature 1..20: note = antisense sequence
  source 1..20: mol_type = other RNA
accatttgacccagccatcc

SEQ ID NO: 6516 - RNA, 20 nt, synthetic construct
  misc_feature 1..20: note = antisense sequence
  source 1..20: mol_type = other RNA
taccatttgacccagccatc

SEQ ID NO: 6517 - RNA, 20 nt, synthetic construct
  misc_feature 1..20: note = antisense sequence
  source 1..20: mol_type = other RNA
ataccatttgacccagccat

SEQ ID NO: 6518 - RNA, 20 nt, synthetic construct
  misc_feature 1..20: note = antisense sequence
  source 1..20: mol_type = other RNA
aataccatttgacccagcca

SEQ ID NO: 6519 - RNA, 20 nt, synthetic construct
  misc_feature 1..20: note = antisense sequence
  source 1..20: mol_type = other RNA
caaccattgtggaagacagt

SEQ ID NO: 6520 - RNA, 20 nt, synthetic construct
  misc_feature 1..20: note = antisense sequence
  source 1..20: mol_type = other RNA
tcaaccattgtggaagacag

SEQ ID NO: 6521 - RNA, 20 nt, synthetic construct
  misc_feature 1..20: note = antisense sequence
  source 1..20: mol_type = other RNA
ttcaaccattgtggaagaca

SEQ ID NO: 6522 - RNA, 20 nt, synthetic construct
  misc_feature 1..20: note = antisense sequence
  source 1..20: mol_type = other RNA
gttcaaccattgtggaagac

SEQ ID NO: 6523 - RNA, 20 nt, synthetic construct
  misc_feature 1..20: note = antisense sequence
  source 1..20: mol_type = other RNA
agttcaaccattgtggaaga

SEQ ID NO: 6524 - RNA, 20 nt, synthetic construct
  misc_feature 1..20: note = antisense sequence
  source 1..20: mol_type = other RNA
tagttcaaccattgtggaag

SEQ ID NO: 6525 - RNA, 20 nt, synthetic construct
  misc_feature 1..20: note = antisense sequence
  source 1..20: mol_type = other RNA
ctagttcaaccattgtggaa

SEQ ID NO: 6526 - RNA, 20 nt, synthetic construct
  misc_feature 1..20: note = antisense sequence
  source 1..20: mol_type = other RNA
gtctccactcttaactgtat

SEQ ID NO: 6527 - RNA, 20 nt, synthetic construct
  misc_feature 1..20: note = antisense sequence
  source 1..20: mol_type = other RNA
ggtctccactcttaactgta

SEQ ID NO: 6528 - RNA, 20 nt, synthetic construct
  misc_feature 1..20: note = antisense sequence
  source 1..20: mol_type = other RNA
ggaaggtctccactcttaac

SEQ ID NO: 6529 - RNA, 20 nt, synthetic construct
  misc_feature 1..20: note = antisense sequence
  source 1..20: mol_type = other RNA
aggaaggtctccactcttaa

SEQ ID NO: 6530 - RNA, 20 nt, synthetic construct
  misc_feature 1..20: note = antisense sequence
  source 1..20: mol_type = other RNA
caaggaaggtctccactctt

SEQ ID NO: 6531 - RNA, 20 nt, synthetic construct
  misc_feature 1..20: note = antisense sequence
  source 1..20: mol_type = other RNA
tcaaggaaggtctccactct

SEQ ID NO: 6532 - RNA, 20 nt, synthetic construct
  misc_feature 1..20: note = antisense sequence
  source 1..20: mol_type = other RNA
ctcaaggaaggtctccactc

SEQ ID NO: 6533 - RNA, 20 nt, synthetic construct
  misc_feature 1..20: note = antisense sequence
  source 1..20: mol_type = other RNA
actcaaggaaggtctccact

SEQ ID NO: 6534 - RNA, 20 nt, synthetic construct
  misc_feature 1..20: note = antisense sequence
  source 1..20: mol_type = other RNA
aactcaaggaaggtctccac

SEQ ID NO: 6535 - RNA, 20 nt, synthetic construct
  misc_feature 1..20: note = antisense sequence
  source 1..20: mol_type = other RNA
aaactcaaggaaggtctcca

SEQ ID NO: 6536 - RNA, 20 nt, synthetic construct
  misc_feature 1..20: note = antisense sequence
  source 1..20: mol_type = other RNA
aaaactcaaggaaggtctcc

SEQ ID NO: 6537 - RNA, 20 nt, synthetic construct
  misc_feature 1..20: note = antisense sequence
  source 1..20: mol_type = other RNA
gttaccatcgaaagctgttt

SEQ ID NO: 6538 - RNA, 20 nt, synthetic construct
  misc_feature 1..20: note = antisense sequence
  source 1..20: mol_type = other RNA
ggttaccatcgaaagctgtt

SEQ ID NO: 6539 - RNA, 20 nt, synthetic construct
  misc_feature 1..20: note = antisense sequence
  source 1..20: mol_type = other RNA
aggttaccatcgaaagctgt

SEQ ID NO: 6540 - RNA, 20 nt, synthetic construct
  misc_feature 1..20: note = antisense sequence
  source 1..20: mol_type = other RNA
aaggttaccatcgaaagctg

SEQ ID NO: 6541 - RNA, 20 nt, synthetic construct
  misc_feature 1..20: note = antisense sequence
  source 1..20: mol_type = other RNA
taaggttaccatcgaaagct

SEQ ID NO: 6542 - RNA, 20 nt, synthetic construct
  misc_feature 1..20: note = antisense sequence
  source 1..20: mol_type = other RNA
ttaaggttaccatcgaaagc

SEQ ID NO: 6543 - RNA, 20 nt, synthetic construct
  misc_feature 1..20: note = antisense sequence
  source 1..20: mol_type = other RNA
gttaaggttaccatcgaaag

SEQ ID NO: 6544 - RNA, 20 nt, synthetic construct
  misc_feature 1..20: note = antisense sequence
  source 1..20: mol_type = other RNA
ggttaaggttaccatcgaaa

SEQ ID NO: 6545 - RNA, 20 nt, synthetic construct
  misc_feature 1..20: note = antisense sequence
  source 1..20: mol_type = other RNA
aaggcatggttaaggttacc

SEQ ID NO: 6546 - RNA, 20 nt, synthetic construct
  misc_feature 1..20: note = antisense sequence
  source 1..20: mol_type = other RNA
ggaaggcatggttaaggtta

SEQ ID NO: 6547 - RNA, 20 nt, synthetic construct
  misc_feature 1..20: note = antisense sequence
  source 1..20: mol_type = other RNA
cgtagaacaactttaggaga

SEQ ID NO: 6548 - RNA, 20 nt, synthetic construct
  misc_feature 1..20: note = antisense sequence
  source 1..20: mol_type = other RNA
gcgtagaacaactttaggag

SEQ ID NO: 6549 - RNA, 20 nt, synthetic construct
  misc_feature 1..20: note = antisense sequence
  source 1..20: mol_type = other RNA
agcgtagaacaactttagga

SEQ ID NO: 6550 - RNA, 20 nt, synthetic construct
  misc_feature 1..20: note = antisense sequence
  source 1..20: mol_type = other RNA
cagcgtagaacaactttagg

SEQ ID NO: 6551 - RNA, 20 nt, synthetic construct
  misc_feature 1..20: note = antisense sequence
  source 1..20: mol_type = other RNA
gcagcgtagaacaactttag

SEQ ID NO: 6552 - RNA, 20 nt, synthetic construct
  misc_feature 1..20: note = antisense sequence
  source 1..20: mol_type = other RNA
agcagcgtagaacaacttta

SEQ ID NO: 6553 - RNA, 20 nt, synthetic construct
  misc_feature 1..20: note = antisense sequence
  source 1..20: mol_type = other RNA
cagcagcgtagaacaacttt

SEQ ID NO: 6554 - RNA, 20 nt, synthetic construct
  misc_feature 1..20: note = antisense sequence
  source 1..20: mol_type = other RNA
gcagcagcgtagaacaactt

SEQ ID NO: 6555 - RNA, 20 nt, synthetic construct
  misc_feature 1..20: note = antisense sequence
  source 1..20: mol_type = other RNA
cgcagcagcgtagaacaact

SEQ ID NO: 6556 - RNA, 20 nt, synthetic construct
  misc_feature 1..20: note = antisense sequence
  source 1..20: mol_type = other RNA
caacattgaatgatacgcag

SEQ ID NO: 6557 - RNA, 20 nt, synthetic construct
  misc_feature 1..20: note = antisense sequence
  source 1..20: mol_type = other RNA
gccgctgaaagtcattgaat

SEQ ID NO: 6558 - RNA, 20 nt, synthetic construct
  misc_feature 1..20: note = antisense sequence
  source 1..20: mol_type = other RNA
gcttaccattttccttcttc

SEQ ID NO: 6559 - RNA, 20 nt, synthetic construct
  misc_feature 1..20: note = antisense sequence
  source 1..20: mol_type = other RNA
ggcttaccattttccttctt

SEQ ID NO: 6560 - RNA, 20 nt, synthetic construct
  misc_feature 1..20: note = antisense sequence
  source 1..20: mol_type = other RNA
actggcttaccattttcctt

SEQ ID NO: 6561 - RNA, 20 nt, synthetic construct
  misc_feature 1..20: note = antisense sequence
  source 1..20: mol_type = other RNA
cactggcttaccattttcct

SEQ ID NO: 6562 - RNA, 20 nt, synthetic construct
  misc_feature 1..20: note = antisense sequence
  source 1..20: mol_type = other RNA
ccactggcttaccattttcc

SEQ ID NO: 6563 - RNA, 20 nt, synthetic construct
  misc_feature 1..20: note = antisense sequence
  source 1..20: mol_type = other RNA
cccactggcttaccattttc

SEQ ID NO: 6564 - RNA, 20 nt, synthetic construct
  misc_feature 1..20: note = antisense sequence
  source 1..20: mol_type = other RNA
acccactggcttaccatttt

SEQ ID NO: 6565 - RNA, 20 nt, synthetic construct
  misc_feature 1..20: note = antisense sequence
  source 1..20: mol_type = other RNA
aacccactggcttaccattt

SEQ ID NO: 6566 - RNA, 20 nt, synthetic construct
  misc_feature 1..20: note = antisense sequence
  source 1..20: mol_type = other RNA
aaacccactggcttaccatt

SEQ ID NO: 6567 - RNA, 20 nt, synthetic construct
  misc_feature 1..20: note = antisense sequence
  source 1..20: mol_type = other RNA
acaaaacccactggcttacc

SEQ ID NO: 6568 - RNA, 20 nt, synthetic construct
  misc_feature 1..20: note = antisense sequence
  source 1..20: mol_type = other RNA
aacaaaacccactggcttac

SEQ ID NO: 6569 - RNA, 20 nt, synthetic construct
  misc_feature 1..20: note = antisense sequence
  source 1..20: mol_type = other RNA
gccaaatgactagactgcat

SEQ ID NO: 6570 - RNA, 20 nt, synthetic construct
  misc_feature 1..20: note = antisense sequence
  source 1..20: mol_type = other RNA
ttgccaaatgactagactgc

SEQ ID NO: 6571 - RNA, 20 nt, synthetic construct
  misc_feature 1..20: note = antisense sequence
  source 1..20: mol_type = other RNA
attgccaaatgactagactg

SEQ ID NO: 6572 - RNA, 20 nt, synthetic construct
  misc_feature 1..20: note = antisense sequence
  source 1..20: mol_type = other RNA
gttagcttccattgccaaat

SEQ ID NO: 6573 - RNA, 20 nt, synthetic construct
  misc_feature 1..20: note = antisense sequence
  source 1..20: mol_type = other RNA
ttaagttagcttccattgcc

SEQ ID NO: 6574 - RNA, 20 nt, synthetic construct
  misc_feature 1..20: note = antisense sequence
  source 1..20: mol_type = other RNA
cactaatcgcttcctctaat

SEQ ID NO: 6575 - RNA, 20 nt, synthetic construct
  misc_feature 1..20: note = antisense sequence
  source 1..20: mol_type = other RNA
tcactaatcgcttcctctaa

SEQ ID NO: 6576 - RNA, 20 nt, synthetic construct
  misc_feature 1..20: note = antisense sequence
  source 1..20: mol_type = other RNA
atcactaatcgcttcctcta

SEQ ID NO: 6577 - RNA, 20 nt, synthetic construct
  misc_feature 1..20: note = antisense sequence
  source 1..20: mol_type = other RNA
aatcactaatcgcttcctct

SEQ ID NO: 6578 - RNA, 20 nt, synthetic construct
  misc_feature 1..20: note = antisense sequence
  source 1..20: mol_type = other RNA
aaatcactaatcgcttcctc

SEQ ID NO: 6579 - RNA, 20 nt, synthetic construct
  misc_feature 1..20: note = antisense sequence
  source 1..20: mol_type = other RNA
gaaatcactaatcgcttcct

SEQ ID NO: 6580 - RNA, 20 nt, synthetic construct
  misc_feature 1..20: note = antisense sequence
  source 1..20: mol_type = other RNA
agaaatcactaatcgcttcc

SEQ ID NO: 6581 - RNA, 20 nt, synthetic construct
  misc_feature 1..20: note = antisense sequence
  source 1..20: mol_type = other RNA
cagaaatcactaatcgcttc

SEQ ID NO: 6582 - RNA, 20 nt, synthetic construct
  misc_feature 1..20: note = antisense sequence
  source 1..20: mol_type = other RNA
caacagaaatcactaatcgc

SEQ ID NO: 6583 - RNA, 20 nt, synthetic construct
  misc_feature 1..20: note = antisense sequence
  source 1..20: mol_type = other RNA
aggcatcaacagaaatcact

SEQ ID NO: 6584 - RNA, 20 nt, synthetic construct
  misc_feature 1..20: note = antisense sequence
  source 1..20: mol_type = other RNA
caggcatcaacagaaatcac

SEQ ID NO: 6585 - RNA, 20 nt, synthetic construct
  misc_feature 1..20: note = antisense sequence
  source 1..20: mol_type = other RNA
tccaggcatcaacagaaatc

SEQ ID NO: 6586 - RNA, 20 nt, synthetic construct
  misc_feature 1..20: note = antisense sequence
  source 1..20: mol_type = other RNA
caatccaggcatcaacagaa

SEQ ID NO: 6587 - RNA, 20 nt, synthetic construct
  misc_feature 1..20: note = antisense sequence
  source 1..20: mol_type = other RNA
tcaatccaggcatcaacaga

SEQ ID NO: 6588 - RNA, 20 nt, synthetic construct
  misc_feature 1..20: note = antisense sequence
  source 1..20: mol_type = other RNA
aggtcaatccaggcatcaac

SEQ ID NO: 6589 - RNA, 20 nt, synthetic construct
  misc_feature 1..20: note = antisense sequence
  source 1..20: mol_type = other RNA
gaggtcaatccaggcatcaa

SEQ ID NO: 6590 - RNA, 20 nt, synthetic construct
  misc_feature 1..20: note = antisense sequence
  source 1..20: mol_type = other RNA
tgaggtcaatccaggcatca

SEQ ID NO: 6591 - RNA, 20 nt, synthetic construct
  misc_feature 1..20: note = antisense sequence
  source 1..20: mol_type = other RNA
ttgaggtcaatccaggcatc

SEQ ID NO: 6592 - RNA, 20 nt, synthetic construct
  misc_feature 1..20: note = antisense sequence
  source 1..20: mol_type = other RNA
cttgaggtcaatccaggcat

SEQ ID NO: 6593 - RNA, 20 nt, synthetic construct
  misc_feature 1..20: note = antisense sequence
  source 1..20: mol_type = other RNA
ccttgaggtcaatccaggca

SEQ ID NO: 6594 - RNA, 20 nt, synthetic construct
  misc_feature 1..20: note = antisense sequence
  source 1..20: mol_type = other RNA
tccttgaggtcaatccaggc

SEQ ID NO: 6595 - RNA, 20 nt, synthetic construct
  misc_feature 1..20: note = antisense sequence
  source 1..20: mol_type = other RNA
gatacagaccttccttgagg

SEQ ID NO: 6596 - RNA, 20 nt, synthetic construct
  misc_feature 1..20: note = antisense sequence
  source 1..20: mol_type = other RNA
tttggatacagaccttcctt

SEQ ID NO: 6597 - RNA, 20 nt, synthetic construct
  misc_feature 1..20: note = antisense sequence
  source 1..20: mol_type = other RNA
ttttggatacagaccttcct

SEQ ID NO: 6598 - RNA, 20 nt, synthetic construct
  misc_feature 1..20: note = antisense sequence
  source 1..20: mol_type = other RNA
gctactctgaaatgagaaca

SEQ ID NO: 6599 - RNA, 20 nt, synthetic construct
  misc_feature 1..20: note = antisense sequence
  source 1..20: mol_type = other RNA
agctactctgaaatgagaac

SEQ ID NO: 6600 - RNA, 20 nt, synthetic construct
  misc_feature 1..20: note = antisense sequence
  source 1..20: mol_type = other RNA
ccgaatccttcctactgaat

SEQ ID NO: 6601 - RNA, 20 nt, synthetic construct
  misc_feature 1..20: note = antisense sequence
  source 1..20: mol_type = other RNA
tccgaatccttcctactgaa

SEQ ID NO: 6602 - RNA, 20 nt, synthetic construct
  misc_feature 1..20: note = antisense sequence
  source 1..20: mol_type = other RNA
ctccgaatccttcctactga

SEQ ID NO: 6603 - RNA, 20 nt, synthetic construct
  misc_feature 1..20: note = antisense sequence
  source 1..20: mol_type = other RNA
cctccgaatccttcctactg

SEQ ID NO: 6604 - RNA, 20 nt, synthetic construct
  misc_feature 1..20: note = antisense sequence
  source 1..20: mol_type = other RNA
gcctccgaatccttcctact

SEQ ID NO: 6605 - RNA, 20 nt, synthetic construct
  misc_feature 1..20: note = antisense sequence
  source 1..20: mol_type = other RNA
tgcctccgaatccttcctac

SEQ ID NO: 6606 - RNA, 20 nt, synthetic construct
  misc_feature 1..20: note = antisense sequence
  source 1..20: mol_type = other RNA
ttgcctccgaatccttccta

SEQ ID NO: 6607 - RNA, 20 nt, synthetic construct
  misc_feature 1..20: note = antisense sequence
  source 1..20: mol_type = other RNA
tttgcctccgaatccttcct

SEQ ID NO: 6608 - RNA, 20 nt, synthetic construct
  misc_feature 1..20: note = antisense sequence
  source 1..20: mol_type = other RNA
atttgcctccgaatccttcc

SEQ ID NO: 6609 - RNA, 20 nt, synthetic construct
  misc_feature 1..20: note = antisense sequence
  source 1..20: mol_type = other RNA
catttgcctccgaatccttc

SEQ ID NO: 6610 - RNA, 20 nt, synthetic construct
  misc_feature 1..20: note = antisense sequence
  source 1..20: mol_type = other RNA
tcatttgcctccgaatcctt

SEQ ID NO: 6611 - RNA, 20 nt, synthetic construct
  misc_feature 1..20: note = antisense sequence
  source 1..20: mol_type = other RNA
ctcatttgcctccgaatcct

SEQ ID NO: 6612 - RNA, 20 nt, synthetic construct
  misc_feature 1..20: note = antisense sequence
  source 1..20: mol_type = other RNA
tctcatttgcctccgaatcc

SEQ ID NO: 6613 - RNA, 20 nt, synthetic construct
  misc_feature 1..20: note = antisense sequence
  source 1..20: mol_type = other RNA
atctcatttgcctccgaatc

SEQ ID NO: 6614 - RNA, 20 nt, synthetic construct
  misc_feature 1..20: note = antisense sequence
  source 1..20: mol_type = other RNA
catctcatttgcctccgaat

SEQ ID NO: 6615 - RNA, 20 nt, synthetic construct
  misc_feature 1..20: note = antisense sequence
  source 1..20: mol_type = other RNA
ccatctcatttgcctccgaa

SEQ ID NO: 6616 - RNA, 20 nt, synthetic construct
  misc_feature 1..20: note = antisense sequence
  source 1..20: mol_type = other RNA
caccatctcatttgcctccg

SEQ ID NO: 6617 - RNA, 20 nt, synthetic construct
  misc_feature 1..20: note = antisense sequence
  source 1..20: mol_type = other RNA
agagcaccatctcatttgcc

SEQ ID NO: 6618 - RNA, 20 nt, synthetic construct
  misc_feature 1..20: note = antisense sequence
  source 1..20: mol_type = other RNA
cagagcaccatctcatttgc

SEQ ID NO: 6619 - RNA, 20 nt, synthetic construct
  misc_feature 1..20: note = antisense sequence
  source 1..20: mol_type = other RNA
tcagagcaccatctcatttg

SEQ ID NO: 6620 - RNA, 20 nt, synthetic construct
  misc_feature 1..20: note = antisense sequence
  source 1..20: mol_type = other RNA
tttcagagcaccatctcatt

SEQ ID NO: 6621 - RNA, 20 nt, synthetic construct
  misc_feature 1..20: note = antisense sequence
  source 1..20: mol_type = other RNA
ctttcagagcaccatctcat

SEQ ID NO: 6622 - RNA, 20 nt, synthetic construct
  misc_feature 1..20: note = antisense sequence
  source 1..20: mol_type = other RNA
cctttcagagcaccatctca

SEQ ID NO: 6623 - RNA, 20 nt, synthetic construct
  misc_feature 1..20: note = antisense sequence
  source 1..20: mol_type = other RNA
ccctttcagagcaccatctc

SEQ ID NO: 6624 - RNA, 20 nt, synthetic construct
  misc_feature 1..20: note = antisense sequence
  source 1..20: mol_type = other RNA
accctttcagagcaccatct

SEQ ID NO: 6625 - RNA, 20 nt, synthetic construct
  misc_feature 1..20: note = antisense sequence
  source 1..20: mol_type = other RNA
aaccctttcagagcaccatc

SEQ ID NO: 6626 - RNA, 20 nt, synthetic construct
  misc_feature 1..20: note = antisense sequence
  source 1..20: mol_type = other RNA
tgttaaaccctttcagagca

SEQ ID NO: 6627 - RNA, 20 nt, synthetic construct
  misc_feature 1..20: note = antisense sequence
  source 1..20: mol_type = other RNA
gtgttaaaccctttcagagc

SEQ ID NO: 6628 - RNA, 20 nt, synthetic construct
  misc_feature 1..20: note = antisense sequence
  source 1..20: mol_type = other RNA
tgtgttaaaccctttcagag

SEQ ID NO: 6629 - RNA, 20 nt, synthetic construct
  misc_feature 1..20: note = antisense sequence
  source 1..20: mol_type = other RNA
gtgtgttaaaccctttcaga

SEQ ID NO: 6630 - RNA, 20 nt, synthetic construct
  misc_feature 1..20: note = antisense sequence
  source 1..20: mol_type = other RNA
agtgtgttaaaccctttcag

SEQ ID NO: 6631 - RNA, 20 nt, synthetic construct
  misc_feature 1..20: note = antisense sequence
  source 1..20: mol_type = other RNA
gaagtgtgttaaaccctttc

SEQ ID NO: 6632 - RNA, 20 nt, synthetic construct
  misc_feature 1..20: note = antisense sequence
  source 1..20: mol_type = other RNA
ggaagtgtgttaaacccttt

SEQ ID NO: 6633 - RNA, 20 nt, synthetic construct
  misc_feature 1..20: note = antisense sequence
  source 1..20: mol_type = other RNA
cggaagtgtgttaaaccctt

SEQ ID NO: 6634 - RNA, 20 nt, synthetic construct
  misc_feature 1..20: note = antisense sequence
  source 1..20: mol_type = other RNA
acggaagtgtgttaaaccct

SEQ ID NO: 6635 - RNA, 20 nt, synthetic construct
  misc_feature 1..20: note = antisense sequence
  source 1..20: mol_type = other RNA
cacggaagtgtgttaaaccc

SEQ ID NO: 6636 - RNA, 20 nt, synthetic construct
  misc_feature 1..20: note = antisense sequence
  source 1..20: mol_type = other RNA
tcacggaagtgtgttaaacc

SEQ ID NO: 6637 - RNA, 20 nt, synthetic construct
  misc_feature 1..20: note = antisense sequence
  source 1..20: mol_type = other RNA
ctcacggaagtgtgttaaac

SEQ ID NO: 6638 - RNA, 20 nt, synthetic construct
  misc_feature 1..20: note = antisense sequence
  source 1..20: mol_type = other RNA
actcacggaagtgtgttaaa

SEQ ID NO: 6639 - RNA, 20 nt, synthetic construct
  misc_feature 1..20: note = antisense sequence
  source 1..20: mol_type = other RNA
aactcacggaagtgtgttaa

SEQ ID NO: 6640 - RNA, 20 nt, synthetic construct
  misc_feature 1..20: note = antisense sequence
  source 1..20: mol_type = other RNA
aaactcacggaagtgtgtta

SEQ ID NO: 6641 - RNA, 20 nt, synthetic construct
  misc_feature 1..20: note = antisense sequence
  source 1..20: mol_type = other RNA
caaactcacggaagtgtgtt

SEQ ID NO: 6642 - RNA, 20 nt, synthetic construct
  misc_feature 1..20: note = antisense sequence
  source 1..20: mol_type = other RNA
ccaaactcacggaagtgtgt

SEQ ID NO: 6643 - RNA, 20 nt, synthetic construct
  misc_feature 1..20: note = antisense sequence
  source 1..20: mol_type = other RNA
accaaactcacggaagtgtg

SEQ ID NO: 6644 - RNA, 20 nt, synthetic construct
  misc_feature 1..20: note = antisense sequence
  source 1..20: mol_type = other RNA
gaccaaactcacggaagtgt

SEQ ID NO: 6645 - RNA, 20 nt, synthetic construct
  misc_feature 1..20: note = antisense sequence
  source 1..20: mol_type = other RNA
agaccaaactcacggaagtg

SEQ ID NO: 6646 - RNA, 20 nt, synthetic construct
  misc_feature 1..20: note = antisense sequence
  source 1..20: mol_type = other RNA
aagaccaaactcacggaagt

SEQ ID NO: 6647 - RNA, 20 nt, synthetic construct
  misc_feature 1..20: note = antisense sequence
  source 1..20: mol_type = other RNA
aaagaccaaactcacggaag

SEQ ID NO: 6648 - RNA, 20 nt, synthetic construct
  misc_feature 1..20: note = antisense sequence
  source 1..20: mol_type = other RNA
taaagaccaaactcacggaa

SEQ ID NO: 6649 - RNA, 20 nt, synthetic construct
  misc_feature 1..20: note = antisense sequence
  source 1..20: mol_type = other RNA
agtaaagaccaaactcacgg

SEQ ID NO: 6650 - RNA, 20 nt, synthetic construct
  misc_feature 1..20: note = antisense sequence
  source 1..20: mol_type = other RNA
gatcagtaaagaccaaactc

SEQ ID NO: 6651 - RNA, 20 nt, synthetic construct
  misc_feature 1..20: note = antisense sequence
  source 1..20: mol_type = other RNA
ctcagtagatcagtaaagac

SEQ ID NO: 6652 - RNA, 20 nt, synthetic construct
  misc_feature 1..20: note = antisense sequence
  source 1..20: mol_type = other RNA
gctcagtagatcagtaaaga

SEQ ID NO: 6653 - RNA, 20 nt, synthetic construct
  misc_feature 1..20: note = antisense sequence
  source 1..20: mol_type = other RNA
agctcagtagatcagtaaag

SEQ ID NO: 6654 - RNA, 20 nt, synthetic construct
  misc_feature 1..20: note = antisense sequence
  source 1..20: mol_type = other RNA
caagctcagtagatcagtaa

SEQ ID NO: 6655 - RNA, 20 nt, synthetic construct
  misc_feature 1..20: note = antisense sequence
  source 1..20: mol_type = other RNA
ccaagctcagtagatcagta

SEQ ID NO: 6656 - RNA, 20 nt, synthetic construct
  misc_feature 1..20: note = antisense sequence
  source 1..20: mol_type = other RNA
accaagctcagtagatcagt

SEQ ID NO: 6657 - RNA, 20 nt, synthetic construct
  misc_feature 1..20: note = antisense sequence
  source 1..20: mol_type = other RNA
gaccaagctcagtagatcag

SEQ ID NO: 6658 - RNA, 20 nt, synthetic construct
  misc_feature 1..20: note = antisense sequence
  source 1..20: mol_type = other RNA
tagaccaagctcagtagatc

SEQ ID NO: 6659 - RNA, 20 nt, synthetic construct
  misc_feature 1..20: note = antisense sequence
  source 1..20: mol_type = other RNA
ttagaccaagctcagtagat

SEQ ID NO: 6660 - RNA, 20 nt, synthetic construct
  misc_feature 1..20: note = antisense sequence
  source 1..20: mol_type = other RNA
attagaccaagctcagtaga

SEQ ID NO: 6661 - RNA, 20 nt, synthetic construct
  misc_feature 1..20: note = antisense sequence
  source 1..20: mol_type = other RNA
cattagaccaagctcagtag

SEQ ID NO: 6662 - RNA, 20 nt, synthetic construct
  misc_feature 1..20: note = antisense sequence
  source 1..20: mol_type = other RNA
acattagaccaagctcagta

SEQ ID NO: 6663 - RNA, 20 nt, synthetic construct
  misc_feature 1..20: note = antisense sequence
  source 1..20: mol_type = other RNA
ccagaaacccaataaagttc

SEQ ID NO: 6664 - RNA, 20 nt, synthetic construct
  misc_feature 1..20: note = antisense sequence
  source 1..20: mol_type = other RNA
caagactccatctcagaaaa

SEQ ID NO: 6665 - RNA, 20 nt, synthetic construct
  misc_feature 1..20: note = antisense sequence
  source 1..20: mol_type = other RNA
gcaagactccatctcagaaa

SEQ ID NO: 6666 - RNA, 20 nt, synthetic construct
  misc_feature 1..20: note = antisense sequence
  source 1..20: mol_type = other RNA
agcaagactccatctcagaa

SEQ ID NO: 6667 - RNA, 20 nt, synthetic construct
  misc_feature 1..20: note = antisense sequence
  source 1..20: mol_type = other RNA
gagcaagactccatctcaga

SEQ ID NO: 6668 - RNA, 20 nt, synthetic construct
  misc_feature 1..20: note = antisense sequence
  source 1..20: mol_type = other RNA
agagcaagactccatctcag

SEQ ID NO: 6669 - RNA, 20 nt, synthetic construct
  misc_feature 1..20: note = antisense sequence
  source 1..20: mol_type = other RNA
cagagcaagactccatctca

SEQ ID NO: 6670 - RNA, 20 nt, synthetic construct
  misc_feature 1..20: note = antisense sequence
  source 1..20: mol_type = other RNA
acagagcaagactccatctc

SEQ ID NO: 6671 - RNA, 20 nt, synthetic construct
  misc_feature 1..20: note = antisense sequence
  source 1..20: mol_type = other RNA
gacagagcaagactccatct

SEQ ID NO: 6672 - RNA, 20 nt, synthetic construct
  misc_feature 1..20: note = antisense sequence
  source 1..20: mol_type = other RNA
tgacagagcaagactccatc

SEQ ID NO: 6673 - RNA, 20 nt, synthetic construct
  misc_feature 1..20: note = antisense sequence
  source 1..20: mol_type = other RNA
gtgacagagcaagactccat

SEQ ID NO: 6674 - RNA, 20 nt, synthetic construct
  misc_feature 1..20: note = antisense sequence
  source 1..20: mol_type = other RNA
ggtgacagagcaagactcca

SEQ ID NO: 6675 - RNA, 20 nt, synthetic construct
  misc_feature 1..20: note = antisense sequence
  source 1..20: mol_type = other RNA
gggtgacagagcaagactcc

SEQ ID NO: 6676 - RNA, 20 nt, synthetic construct
  misc_feature 1..20: note = antisense sequence
  source 1..20: mol_type = other RNA
tgggtgacagagcaagactc

SEQ ID NO: 6677 - RNA, 20 nt, synthetic construct
  misc_feature 1..20: note = antisense sequence
  source 1..20: mol_type = other RNA
ctgggtgacagagcaagact

SEQ ID NO: 6678 - RNA, 20 nt, synthetic construct
  misc_feature 1..20: note = antisense sequence
  source 1..20: mol_type = other RNA
cctgggtgacagagcaagac

SEQ ID NO: 6679 - RNA, 20 nt, synthetic construct
  misc_feature 1..20: note = antisense sequence
  source 1..20: mol_type = other RNA
gcctgggtgacagagcaaga

SEQ ID NO: 6680 - RNA, 20 nt, synthetic construct
  misc_feature 1..20: note = antisense sequence
  source 1..20: mol_type = other RNA
agcctgggtgacagagcaag

SEQ ID NO: 6681 - RNA, 20 nt, synthetic construct
  misc_feature 1..20: note = antisense sequence
  source 1..20: mol_type = other RNA
cagcctgggtgacagagcaa

SEQ ID NO: 6682 - RNA, 20 nt, synthetic construct
  misc_feature 1..20: note = antisense sequence
  source 1..20: mol_type = other RNA
actccagcctgggtgacaga

SEQ ID NO: 6683 - RNA, 20 nt, synthetic construct
  misc_feature 1..20: note = antisense sequence
  source 1..20: mol_type = other RNA
tactccagcctgggtgacag

SEQ ID NO: 6684 - RNA, 20 nt, synthetic construct
  misc_feature 1..20: note = antisense sequence
  source 1..20: mol_type = other RNA
gtactccagcctgggtgaca

SEQ ID NO: 6685 - RNA, 20 nt, synthetic construct
  misc_feature 1..20: note = antisense sequence
  source 1..20: mol_type = other RNA
tgtactccagcctgggtgac

SEQ ID NO: 6686 - RNA, 20 nt, synthetic construct
  misc_feature 1..20: note = antisense sequence
  source 1..20: mol_type = other RNA
ctgtactccagcctgggtga

SEQ ID NO: 6687 - RNA, 20 nt, synthetic construct
  misc_feature 1..20: note = antisense sequence
  source 1..20: mol_type = other RNA
actgtactccagcctgggtg

SEQ ID NO: 6688 - RNA, 20 nt, synthetic construct
  misc_feature 1..20: note = antisense sequence
  source 1..20: mol_type = other RNA
cactgtactccagcctgggt

SEQ ID NO: 6689 - RNA, 20 nt, synthetic construct
  misc_feature 1..20: note = antisense sequence
  source 1..20: mol_type = other RNA
tccactgtactccagcctgg

SEQ ID NO: 6690 - RNA, 20 nt, synthetic construct
  misc_feature 1..20: note = antisense sequence
  source 1..20: mol_type = other RNA
ctccactgtactccagcctg

SEQ ID NO: 6691 - RNA, 20 nt, synthetic construct
  misc_feature 1..20: note = antisense sequence
  source 1..20: mol_type = other RNA
gctccactgtactccagcct

SEQ ID NO: 6692 - RNA, 20 nt, synthetic construct
  misc_feature 1..20: note = antisense sequence
  source 1..20: mol_type = other RNA
tcgctccactgtactccagc

SEQ ID NO: 6693 - RNA, 20 nt, synthetic construct
  misc_feature 1..20: note = antisense sequence
  source 1..20: mol_type = other RNA
gaggctgaggcaggagaatc

SEQ ID NO: 6694 - RNA, 20 nt, synthetic construct
  misc_feature 1..20: note = antisense sequence
  source 1..20: mol_type = other RNA
ggaggctgaggcaggagaat

SEQ ID NO: 6695 - RNA, 20 nt, synthetic construct
  misc_feature 1..20: note = antisense sequence
  source 1..20: mol_type = other RNA
aggaggctgaggcaggagaa

SEQ ID NO: 6696 - RNA, 20 nt, synthetic construct
  misc_feature 1..20: note = antisense sequence
  source 1..20: mol_type = other RNA
taggaggctgaggcaggaga

SEQ ID NO: 6697 - RNA, 20 nt, synthetic construct
  misc_feature 1..20: note = antisense sequence
  source 1..20: mol_type = other RNA
actaggaggctgaggcagga

SEQ ID NO: 6698 - RNA, 20 nt, synthetic construct
  misc_feature 1..20: note = antisense sequence
  source 1..20: mol_type = other RNA
tactaggaggctgaggcagg

SEQ ID NO: 6699 - RNA, 20 nt, synthetic construct
  misc_feature 1..20: note = antisense sequence
  source 1..20: mol_type = other RNA
ctactaggaggctgaggcag

SEQ ID NO: 6700 - RNA, 20 nt, synthetic construct
  misc_feature 1..20: note = antisense sequence
  source 1..20: mol_type = other RNA
gtaatcccagctactaggag

SEQ ID NO: 6701 - RNA, 20 nt, synthetic construct
  misc_feature 1..20: note = antisense sequence
  source 1..20: mol_type = other RNA
tgtaatcccagctactagga

SEQ ID NO: 6702 - RNA, 20 nt, synthetic construct
  misc_feature 1..20: note = antisense sequence
  source 1..20: mol_type = other RNA
ctgtaatcccagctactagg

SEQ ID NO: 6703 - RNA, 20 nt, synthetic construct
  misc_feature 1..20: note = antisense sequence
  source 1..20: mol_type = other RNA
cctgtaatcccagctactag

SEQ ID NO: 6704 - RNA, 20 nt, synthetic construct
  misc_feature 1..20: note = antisense sequence
  source 1..20: mol_type = other RNA
gcctgtaatcccagctacta

SEQ ID NO: 6705 - RNA, 20 nt, synthetic construct
  misc_feature 1..20: note = antisense sequence
  source 1..20: mol_type = other RNA
cgcctgtaatcccagctact

SEQ ID NO: 6706 - RNA, 20 nt, synthetic construct
  misc_feature 1..20: note = antisense sequence
  source 1..20: mol_type = other RNA
acgcctgtaatcccagctac

SEQ ID NO: 6707 - RNA, 20 nt, synthetic construct
  misc_feature 1..20: note = antisense sequence
  source 1..20: mol_type = other RNA
cacgcctgtaatcccagcta

SEQ ID NO: 6708 - RNA, 20 nt, synthetic construct
  misc_feature 1..20: note = antisense sequence
  source 1..20: mol_type = other RNA
acacgcctgtaatcccagct

SEQ ID NO: 6709 - RNA, 20 nt, synthetic construct
  misc_feature 1..20: note = antisense sequence
  source 1..20: mol_type = other RNA
caacatggtgaaaccgtgtc

SEQ ID NO: 6710 - RNA, 20 nt, synthetic construct
  misc_feature 1..20: note = antisense sequence
  source 1..20: mol_type = other RNA
ccaacatggtgaaaccgtgt

SEQ ID NO: 6711 - RNA, 20 nt, synthetic construct
  misc_feature 1..20: note = antisense sequence
  source 1..20: mol_type = other RNA
gaccagcctgaccaacatgg

SEQ ID NO: 6712 - RNA, 20 nt, synthetic construct
  misc_feature 1..20: note = antisense sequence
  source 1..20: mol_type = other RNA
agaccagcctgaccaacatg

SEQ ID NO: 6713 - RNA, 20 nt, synthetic construct
  misc_feature 1..20: note = antisense sequence
  source 1..20: mol_type = other RNA
aagaccagcctgaccaacat

SEQ ID NO: 6714 - RNA, 20 nt, synthetic construct
  misc_feature 1..20: note = antisense sequence
  source 1..20: mol_type = other RNA
caagaccagcctgaccaaca

SEQ ID NO: 6715 - RNA, 20 nt, synthetic construct
  misc_feature 1..20: note = antisense sequence
  source 1..20: mol_type = other RNA
tcaagaccagcctgaccaac

SEQ ID NO: 6716 - RNA, 20 nt, synthetic construct
  misc_feature 1..20: note = antisense sequence
  source 1..20: mol_type = other RNA
ttcaagaccagcctgaccaa

SEQ ID NO: 6717 - RNA, 20 nt, synthetic construct
  misc_feature 1..20: note = antisense sequence
  source 1..20: mol_type = other RNA
attcaagaccagcctgacca

SEQ ID NO: 6718 - RNA, 20 nt, synthetic construct
  misc_feature 1..20: note = antisense sequence
  source 1..20: mol_type = other RNA
aattcaagaccagcctgacc

SEQ ID NO: 6719 - RNA, 20 nt, synthetic construct
  misc_feature 1..20: note = antisense sequence
  source 1..20: mol_type = other RNA
aaattcaagaccagcctgac

SEQ ID NO: 6720 - RNA, 20 nt, synthetic construct
  misc_feature 1..20: note = antisense sequence
  source 1..20: mol_type = other RNA
aaaattcaagaccagcctga

SEQ ID NO: 6721 - RNA, 20 nt, synthetic construct
  misc_feature 1..20: note = antisense sequence
  source 1..20: mol_type = other RNA
ggtggatcacgaggtcaaaa

SEQ ID NO: 6722 - RNA, 20 nt, synthetic construct
  misc_feature 1..20: note = antisense sequence
  source 1..20: mol_type = other RNA
gggtggatcacgaggtcaaa

SEQ ID NO: 6723 - RNA, 20 nt, synthetic construct
  misc_feature 1..20: note = antisense sequence
  source 1..20: mol_type = other RNA
tgggtggatcacgaggtcaa

SEQ ID NO: 6724 - RNA, 20 nt, synthetic construct
  misc_feature 1..20: note = antisense sequence
  source 1..20: mol_type = other RNA
gtgggtggatcacgaggtca

SEQ ID NO: 6725 - RNA, 20 nt, synthetic construct
  misc_feature 1..20: note = antisense sequence
  source 1..20: mol_type = other RNA
aggtgggtggatcacgaggt

SEQ ID NO: 6726 - RNA, 20 nt, synthetic construct
  misc_feature 1..20: note = antisense sequence
  source 1..20: mol_type = other RNA
tgaggtgggtggatcacgag

SEQ ID NO: 6727 - RNA, 20 nt, synthetic construct
  misc_feature 1..20: note = antisense sequence
  source 1..20: mol_type = other RNA
ctgaggtgggtggatcacga

SEQ ID NO: 6728 - RNA, 20 nt, synthetic construct
  misc_feature 1..20: note = antisense sequence
  source 1..20: mol_type = other RNA
aggctgaggtgggtggatca

SEQ ID NO: 6729 - RNA, 20 nt, synthetic construct
  misc_feature 1..20: note = antisense sequence
  source 1..20: mol_type = other RNA
gcctgtaatcccagcacttt

SEQ ID NO: 6730 - RNA, 20 nt, synthetic construct
  misc_feature 1..20: note = antisense sequence
  source 1..20: mol_type = other RNA
cgcctgtaatcccagcactt

SEQ ID NO: 6731 - RNA, 20 nt, synthetic construct
  misc_feature 1..20: note = antisense sequence
  source 1..20: mol_type = other RNA
acgcctgtaatcccagcact

SEQ ID NO: 6732 - RNA, 20 nt, synthetic construct
  misc_feature 1..20: note = antisense sequence
  source 1..20: mol_type = other RNA
cacgcctgtaatcccagcac

SEQ ID NO: 6733 - RNA, 20 nt, synthetic construct
  misc_feature 1..20: note = antisense sequence
  source 1..20: mol_type = other RNA
tcacgcctgtaatcccagca

SEQ ID NO: 6734 - RNA, 20 nt, synthetic construct
  misc_feature 1..20: note = antisense sequence
  source 1..20: mol_type = other RNA
ctcacgcctgtaatcccagc

SEQ ID NO: 6735 - RNA, 20 nt, synthetic construct
  misc_feature 1..20: note = antisense sequence
  source 1..20: mol_type = other RNA
gctcacgcctgtaatcccag

SEQ ID NO: 6736 - RNA, 20 nt, synthetic construct
  misc_feature 1..20: note = antisense sequence
  source 1..20: mol_type = other RNA
ggctcacgcctgtaatccca

SEQ ID NO: 6737 - RNA, 20 nt, synthetic construct
  misc_feature 1..20: note = antisense sequence
  source 1..20: mol_type = other RNA
tggctcacgcctgtaatccc

SEQ ID NO: 6738 - RNA, 20 nt, synthetic construct
  misc_feature 1..20: note = antisense sequence
  source 1..20: mol_type = other RNA
atggctcacgcctgtaatcc

SEQ ID NO: 6739 - RNA, 20 nt, synthetic construct
  misc_feature 1..20: note = antisense sequence
  source 1..20: mol_type = other RNA
tatggctcacgcctgtaatc

SEQ ID NO: 6740 - RNA, 20 nt, synthetic construct
  misc_feature 1..20: note = antisense sequence
  source 1..20: mol_type = other RNA
ctatggctcacgcctgtaat

SEQ ID NO: 6741 - RNA, 20 nt, synthetic construct
  misc_feature 1..20: note = antisense sequence
  source 1..20: mol_type = other RNA
gctatggctcacgcctgtaa

SEQ ID NO: 6742 - RNA, 20 nt, synthetic construct
  misc_feature 1..20: note = antisense sequence
  source 1..20: mol_type = other RNA
tgctatggctcacgcctgta

SEQ ID NO: 6743 - RNA, 20 nt, synthetic construct
  misc_feature 1..20: note = antisense sequence
  source 1..20: mol_type = other RNA
atctacggccaggtgctatg

SEQ ID NO: 6744 - RNA, 20 nt, synthetic construct
  misc_feature 1..20: note = antisense sequence
  source 1..20: mol_type = other RNA
tatctacggccaggtgctat

SEQ ID NO: 6745 - RNA, 20 nt, synthetic construct
  misc_feature 1..20: note = antisense sequence
  source 1..20: mol_type = other RNA
atatctacggccaggtgcta

SEQ ID NO: 6746 - RNA, 20 nt, synthetic construct
  misc_feature 1..20: note = antisense sequence
  source 1..20: mol_type = other RNA
catatctacggccaggtgct

SEQ ID NO: 6747 - RNA, 20 nt, synthetic construct
  misc_feature 1..20: note = antisense sequence
  source 1..20: mol_type = other RNA
tcatatctacggccaggtgc

SEQ ID NO: 6748 - RNA, 20 nt, synthetic construct
  misc_feature 1..20: note = antisense sequence
  source 1..20: mol_type = other RNA
atcatatctacggccaggtg

SEQ ID NO: 6749 - RNA, 20 nt, synthetic construct
  misc_feature 1..20: note = antisense sequence
  source 1..20: mol_type = other RNA
aatcatatctacggccaggt

SEQ ID NO: 6750 - RNA, 20 nt, synthetic construct
  misc_feature 1..20: note = antisense sequence
  source 1..20: mol_type = other RNA
aaatcatatctacggccagg

SEQ ID NO: 6751 - RNA, 20 nt, synthetic construct
  misc_feature 1..20: note = antisense sequence
  source 1..20: mol_type = other RNA
aaaatcatatctacggccag

SEQ ID NO: 6752 - RNA, 20 nt, synthetic construct
  misc_feature 1..20: note = antisense sequence
  source 1..20: mol_type = other RNA
attgggtttgtcatctgaga

SEQ ID NO: 6753 - RNA, 20 nt, synthetic construct
  misc_feature 1..20: note = antisense sequence
  source 1..20: mol_type = other RNA
cattgggtttgtcatctgag

SEQ ID NO: 6754 - RNA, 20 nt, synthetic construct
  misc_feature 1..20: note = antisense sequence
  source 1..20: mol_type = other RNA
tagcattgggtttgtcatct

SEQ ID NO: 6755 - RNA, 20 nt, synthetic construct
  misc_feature 1..20: note = antisense sequence
  source 1..20: mol_type = other RNA
gagagtataggagggaggga

SEQ ID NO: 6756 - RNA, 20 nt, synthetic construct
  misc_feature 1..20: note = antisense sequence
  source 1..20: mol_type = other RNA
ggagagtataggagggaggg

SEQ ID NO: 6757 - RNA, 20 nt, synthetic construct
  misc_feature 1..20: note = antisense sequence
  source 1..20: mol_type = other RNA
tggagagtataggagggagg

SEQ ID NO: 6758 - RNA, 20 nt, synthetic construct
  misc_feature 1..20: note = antisense sequence
  source 1..20: mol_type = other RNA
gtggagagtataggagggag

SEQ ID NO: 6759 - RNA, 20 nt, synthetic construct
  misc_feature 1..20: note = antisense sequence
  source 1..20: mol_type = other RNA
ggtggagagtataggaggga

SEQ ID NO: 6760 - RNA, 20 nt, synthetic construct
  misc_feature 1..20: note = antisense sequence
  source 1..20: mol_type = other RNA
tgggtggagagtataggagg

SEQ ID NO: 6761 - RNA, 20 nt, synthetic construct
  misc_feature 1..20: note = antisense sequence
  source 1..20: mol_type = other RNA
atgggtggagagtataggag

SEQ ID NO: 6762 - RNA, 20 nt, synthetic construct
  misc_feature 1..20: note = antisense sequence
  source 1..20: mol_type = other RNA
gatgggtggagagtatagga

SEQ ID NO: 6763 - RNA, 20 nt, synthetic construct
  misc_feature 1..20: note = antisense sequence
  source 1..20: mol_type = other RNA
ggatgggtggagagtatagg

SEQ ID NO: 6764 - RNA, 20 nt, synthetic construct
  misc_feature 1..20: note = antisense sequence
  source 1..20: mol_type = other RNA
gagggctgtactcatttaac

SEQ ID NO: 6765 - RNA, 20 nt, synthetic construct
  misc_feature 1..20: note = antisense sequence
  source 1..20: mol_type = other RNA
gggagggctgtactcattta

SEQ ID NO: 6766 - RNA, 20 nt, synthetic construct
  misc_feature 1..20: note = antisense sequence
  source 1..20: mol_type = other RNA
agggagggctgtactcattt

SEQ ID NO: 6767 - RNA, 20 nt, synthetic construct
  misc_feature 1..20: note = antisense sequence
  source 1..20: mol_type = other RNA
agaataaagctggtgtctag

SEQ ID NO: 6768 - RNA, 20 nt, synthetic construct
  misc_feature 1..20: note = antisense sequence
  source 1..20: mol_type = other RNA
actcaccattattctcccag

SEQ ID NO: 6769 - RNA, 20 nt, synthetic construct
  misc_feature 1..20: note = antisense sequence
  source 1..20: mol_type = other RNA
ctactcaccattattctccc

SEQ ID NO: 6770 - RNA, 20 nt, synthetic construct
  misc_feature 1..20: note = antisense sequence
  source 1..20: mol_type = other RNA
tctactcaccattattctcc

SEQ ID NO: 6771 - RNA, 20 nt, synthetic construct
  misc_feature 1..20: note = antisense sequence
  source 1..20: mol_type = other RNA
gtctactcaccattattctc

SEQ ID NO: 6772 - RNA, 20 nt, synthetic construct
  misc_feature 1..20: note = antisense sequence
  source 1..20: mol_type = other RNA
ggtctactcaccattattct

SEQ ID NO: 6773 - RNA, 20 nt, synthetic construct
  misc_feature 1..20: note = antisense sequence
  source 1..20: mol_type = other RNA
acaaagtctgaccagttggt

SEQ ID NO: 6774 - RNA, 20 nt, synthetic construct
  misc_feature 1..20: note = antisense sequence
  source 1..20: mol_type = other RNA
cacaaagtctgaccagttgg

SEQ ID NO: 6775 - RNA, 20 nt, synthetic construct
  misc_feature 1..20: note = antisense sequence
  source 1..20: mol_type = other RNA
gcacaaagtctgaccagttg

SEQ ID NO: 6776 - RNA, 20 nt, synthetic construct
  misc_feature 1..20: note = antisense sequence
  source 1..20: mol_type = other RNA
cgcacaaagtctgaccagtt

SEQ ID NO: 6777 - RNA, 20 nt, synthetic construct
  misc_feature 1..20: note = antisense sequence
  source 1..20: mol_type = other RNA
acgcacaaagtctgaccagt

SEQ ID NO: 6778 - RNA, 20 nt, synthetic construct
  misc_feature 1..20: note = antisense sequence
  source 1..20: mol_type = other RNA
tacgcacaaagtctgaccag

SEQ ID NO: 6779 - RNA, 20 nt, synthetic construct
  misc_feature 1..20: note = antisense sequence
  source 1..20: mol_type = other RNA
ttacgcacaaagtctgacca

SEQ ID NO: 6780 - RNA, 20 nt, synthetic construct
  misc_feature 1..20: note = antisense sequence
  source 1..20: mol_type = other RNA
cttacgcacaaagtctgacc

SEQ ID NO: 6781 - RNA, 20 nt, synthetic construct
  misc_feature 1..20: note = antisense sequence
  source 1..20: mol_type = other RNA
gcttacgcacaaagtctgac

SEQ ID NO: 6782 - RNA, 20 nt, synthetic construct
  misc_feature 1..20: note = antisense sequence
  source 1..20: mol_type = other RNA
agcttacgcacaaagtctga

SEQ ID NO: 6783 - RNA, 20 nt, synthetic construct
  misc_feature 1..20: note = antisense sequence
  source 1..20: mol_type = other RNA
tagcttacgcacaaagtctg

SEQ ID NO: 6784 - RNA, 20 nt, synthetic construct
  misc_feature 1..20: note = antisense sequence
  source 1..20: mol_type = other RNA
atagcttacgcacaaagtct

SEQ ID NO: 6785 - RNA, 20 nt, synthetic construct
  misc_feature 1..20: note = antisense sequence
  source 1..20: mol_type = other RNA
tatagcttacgcacaaagtc

SEQ ID NO: 6786 - RNA, 20 nt, synthetic construct
  misc_feature 1..20: note = antisense sequence
  source 1..20: mol_type = other RNA
gctatttgctatactcctct

SEQ ID NO: 6787 - RNA, 20 nt, synthetic construct
  misc_feature 1..20: note = antisense sequence
  source 1..20: mol_type = other RNA
tgctatttgctatactcctc

SEQ ID NO: 6788 - RNA, 20 nt, synthetic construct
  misc_feature 1..20: note = antisense sequence
  source 1..20: mol_type = other RNA
cttgctatttgctatactcc

SEQ ID NO: 6789 - RNA, 20 nt, synthetic construct
  misc_feature 1..20: note = antisense sequence
  source 1..20: mol_type = other RNA
gcttgctatttgctatactc

SEQ ID NO: 6790 - RNA, 20 nt, synthetic construct
  misc_feature 1..20: note = antisense sequence
  source 1..20: mol_type = other RNA
caggactggataagaaagaa

SEQ ID NO: 6791 - RNA, 20 nt, synthetic construct
  misc_feature 1..20: note = antisense sequence
  source 1..20: mol_type = other RNA
acaggactggataagaaaga

SEQ ID NO: 6792 - RNA, 20 nt, synthetic construct
  misc_feature 1..20: note = antisense sequence
  source 1..20: mol_type = other RNA
ctcacaataggataggttct

SEQ ID NO: 6793 - RNA, 20 nt, synthetic construct
  misc_feature 1..20: note = antisense sequence
  source 1..20: mol_type = other RNA
tctcacaataggataggttc

SEQ ID NO: 6794 - RNA, 20 nt, synthetic construct
  misc_feature 1..20: note = antisense sequence
  source 1..20: mol_type = other RNA
gtggaaatctcacaatagga

SEQ ID NO: 6795 - RNA, 20 nt, synthetic construct
  misc_feature 1..20: note = antisense sequence
  source 1..20: mol_type = other RNA
ggtggaaatctcacaatagg

SEQ ID NO: 6796 - RNA, 20 nt, synthetic construct
  misc_feature 1..20: note = antisense sequence
  source 1..20: mol_type = other RNA
gggtggaaatctcacaatag

SEQ ID NO: 6797 - RNA, 20 nt, synthetic construct
  misc_feature 1..20: note = antisense sequence
  source 1..20: mol_type = other RNA
agggtggaaatctcacaata

SEQ ID NO: 6798 - RNA, 20 nt, synthetic construct
  misc_feature 1..20: note = antisense sequence
  source 1..20: mol_type = other RNA
gagggtggaaatctcacaat

SEQ ID NO: 6799 - RNA, 20 nt, synthetic construct
  misc_feature 1..20: note = antisense sequence
  source 1..20: mol_type = other RNA
agagggtggaaatctcacaa

SEQ ID NO: 6800 - RNA, 20 nt, synthetic construct
  misc_feature 1..20: note = antisense sequence
  source 1..20: mol_type = other RNA
tagagggtggaaatctcaca

SEQ ID NO: 6801 - RNA, 20 nt, synthetic construct
  misc_feature 1..20: note = antisense sequence
  source 1..20: mol_type = other RNA
ttagagggtggaaatctcac

SEQ ID NO: 6802 - RNA, 20 nt, synthetic construct
  misc_feature 1..20: note = antisense sequence
  source 1..20: mol_type = other RNA
gtagaatttagagggtggaa

SEQ ID NO: 6803 - RNA, 20 nt, synthetic construct
  misc_feature 1..20: note = antisense sequence
  source 1..20: mol_type = other RNA
tgtagaatttagagggtgga

SEQ ID NO: 6804 - RNA, 20 nt, synthetic construct
  misc_feature 1..20: note = antisense sequence
  source 1..20: mol_type = other RNA
gactgtagaatttagagggt

SEQ ID NO: 6805 - RNA, 20 nt, synthetic construct
  misc_feature 1..20: note = antisense sequence
  source 1..20: mol_type = other RNA
ggactgtagaatttagaggg

SEQ ID NO: 6806 - RNA, 20 nt, synthetic construct
  misc_feature 1..20: note = antisense sequence
  source 1..20: mol_type = other RNA
gggactgtagaatttagagg

SEQ ID NO: 6807 - RNA, 20 nt, synthetic construct
  misc_feature 1..20: note = antisense sequence
  source 1..20: mol_type = other RNA
ggagggactgtagaatttag

SEQ ID NO: 6808 - RNA, 20 nt, synthetic construct
  misc_feature 1..20: note = antisense sequence
  source 1..20: mol_type = other RNA
ttgaaaggagggactgtaga

SEQ ID NO: 6809 - RNA, 20 nt, synthetic construct
  misc_feature 1..20: note = antisense sequence
  source 1..20: mol_type = other RNA
cttgaaaggagggactgtag

SEQ ID NO: 6810 - RNA, 20 nt, synthetic construct
  misc_feature 1..20: note = antisense sequence
  source 1..20: mol_type = other RNA
gccttgaaaggagggactgt

SEQ ID NO: 6811 - RNA, 20 nt, synthetic construct
  misc_feature 1..20: note = antisense sequence
  source 1..20: mol_type = other RNA
tggtgccttgaaaggaggga

SEQ ID NO: 6812 - RNA, 20 nt, synthetic construct
  misc_feature 1..20: note = antisense sequence
  source 1..20: mol_type = other RNA
tctggtgccttgaaaggagg

SEQ ID NO: 6813 - RNA, 20 nt, synthetic construct
  misc_feature 1..20: note = antisense sequence
  source 1..20: mol_type = other RNA
ttctggtgccttgaaaggag

SEQ ID NO: 6814 - RNA, 20 nt, synthetic construct
  misc_feature 1..20: note = antisense sequence
  source 1..20: mol_type = other RNA
cttctggtgccttgaaagga

SEQ ID NO: 6815 - RNA, 20 nt, synthetic construct
  misc_feature 1..20: note = antisense sequence
  source 1..20: mol_type = other RNA
acttctggtgccttgaaagg

SEQ ID NO: 6816 - RNA, 20 nt, synthetic construct
  misc_feature 1..20: note = antisense sequence
  source 1..20: mol_type = other RNA
tttgacttctggtgccttga

SEQ ID NO: 6817 - RNA, 20 nt, synthetic construct
  misc_feature 1..20: note = antisense sequence
  source 1..20: mol_type = other RNA
gctttgacttctggtgcctt

SEQ ID NO: 6818 - RNA, 20 nt, synthetic construct
  misc_feature 1..20: note = antisense sequence
  source 1..20: mol_type = other RNA
tgctttgacttctggtgcct

SEQ ID NO: 6819 - RNA, 20 nt, synthetic construct
  misc_feature 1..20: note = antisense sequence
  source 1..20: mol_type = other RNA
ttgctttgacttctggtgcc

SEQ ID NO: 6820 - RNA, 20 nt, synthetic construct
  misc_feature 1..20: note = antisense sequence
  source 1..20: mol_type = other RNA
tccattgctttgacttctgg

SEQ ID NO: 6821 - RNA, 20 nt, synthetic construct
  misc_feature 1..20: note = antisense sequence
  source 1..20: mol_type = other RNA
ttccattgctttgacttctg

SEQ ID NO: 6822 - RNA, 20 nt, synthetic construct
  misc_feature 1..20: note = antisense sequence
  source 1..20: mol_type = other RNA
gacatcaaggcttcattcag

SEQ ID NO: 6823 - RNA, 20 nt, synthetic construct
  misc_feature 1..20: note = antisense sequence
  source 1..20: mol_type = other RNA
tgacatcaaggcttcattca

SEQ ID NO: 6824 - RNA, 20 nt, synthetic construct
  misc_feature 1..20: note = antisense sequence
  source 1..20: mol_type = other RNA
cctcatccataccttaactt

SEQ ID NO: 6825 - RNA, 20 nt, synthetic construct
  misc_feature 1..20: note = antisense sequence
  source 1..20: mol_type = other RNA
ttcctcatccataccttaac

SEQ ID NO: 6826 - RNA, 20 nt, synthetic construct
  misc_feature 1..20: note = antisense sequence
  source 1..20: mol_type = other RNA
taaccagtgttggctgtctt

SEQ ID NO: 6827 - RNA, 20 nt, synthetic construct
  misc_feature 1..20: note = antisense sequence
  source 1..20: mol_type = other RNA
ttaaccagtgttggctgtct

SEQ ID NO: 6828 - RNA, 20 nt, synthetic construct
  misc_feature 1..20: note = antisense sequence
  source 1..20: mol_type = other RNA
ttccttaaccagtgttggct

SEQ ID NO: 6829 - RNA, 20 nt, synthetic construct
  misc_feature 1..20: note = antisense sequence
  source 1..20: mol_type = other RNA
ttgttccttaaccagtgttg

SEQ ID NO: 6830 - RNA, 20 nt, synthetic construct
  misc_feature 1..20: note = antisense sequence
  source 1..20: mol_type = other RNA
cttttgttccttaaccagtg

SEQ ID NO: 6831 - RNA, 20 nt, synthetic construct
  misc_feature 1..20: note = antisense sequence
  source 1..20: mol_type = other RNA
ccaatctatgcactcttttg

SEQ ID NO: 6832 - RNA, 20 nt, synthetic construct
  misc_feature 1..20: note = antisense sequence
  source 1..20: mol_type = other RNA
ctatccaatctatgcactct

SEQ ID NO: 6833 - RNA, 20 nt, synthetic construct
  misc_feature 1..20: note = antisense sequence
  source 1..20: mol_type = other RNA
actatccaatctatgcactc

SEQ ID NO: 6834 - RNA, 20 nt, synthetic construct
  misc_feature 1..20: note = antisense sequence
  source 1..20: mol_type = other RNA
cattagcaacatcgttcttg

SEQ ID NO: 6835 - RNA, 20 nt, synthetic construct
  misc_feature 1..20: note = antisense sequence
  source 1..20: mol_type = other RNA
ccattagcaacatcgttctt

SEQ ID NO: 6836 - RNA, 20 nt, synthetic construct
  misc_feature 1..20: note = antisense sequence
  source 1..20: mol_type = other RNA
accattagcaacatcgttct

SEQ ID NO: 6837 - RNA, 20 nt, synthetic construct
  misc_feature 1..20: note = antisense sequence
  source 1..20: mol_type = other RNA
gaccattagcaacatcgttc

SEQ ID NO: 6838 - RNA, 20 nt, synthetic construct
  misc_feature 1..20: note = antisense sequence
  source 1..20: mol_type = other RNA
cagaccattagcaacatcgt

SEQ ID NO: 6839 - RNA, 20 nt, synthetic construct
  misc_feature 1..20: note = antisense sequence
  source 1..20: mol_type = other RNA
attcagacagaccattagca

SEQ ID NO: 6840 - RNA, 20 nt, synthetic construct
  misc_feature 1..20: note = antisense sequence
  source 1..20: mol_type = other RNA
gattcattcagacagaccat

SEQ ID NO: 6841 - RNA, 20 nt, synthetic construct
  misc_feature 1..20: note = antisense sequence
  source 1..20: mol_type = other RNA
agattcattcagacagacca

SEQ ID NO: 6842 - RNA, 20 nt, synthetic construct
  misc_feature 1..20: note = antisense sequence
  source 1..20: mol_type = other RNA
cagtgtagattcattcagac

SEQ ID NO: 6843 - RNA, 20 nt, synthetic construct
  misc_feature 1..20: note = antisense sequence
  source 1..20: mol_type = other RNA
ccagtgtagattcattcaga

SEQ ID NO: 6844 - RNA, 20 nt, synthetic construct
  misc_feature 1..20: note = antisense sequence
  source 1..20: mol_type = other RNA
agtccagtgtagattcattc

SEQ ID NO: 6845 - RNA, 20 nt, synthetic construct
  misc_feature 1..20: note = antisense sequence
  source 1..20: mol_type = other RNA
cagtccagtgtagattcatt

SEQ ID NO: 6846 - RNA, 20 nt, synthetic construct
  misc_feature 1..20: note = antisense sequence
  source 1..20: mol_type = other RNA
tcagtccagtgtagattcat

SEQ ID NO: 6847 - RNA, 20 nt, synthetic construct
  misc_feature 1..20: note = antisense sequence
  source 1..20: mol_type = other RNA
ttcagtccagtgtagattca

SEQ ID NO: 6848 - RNA, 20 nt, synthetic construct
  misc_feature 1..20: note = antisense sequence
  source 1..20: mol_type = other RNA
gttcagtccagtgtagattc

SEQ ID NO: 6849 - RNA, 20 nt, synthetic construct
  misc_feature 1..20: note = antisense sequence
  source 1..20: mol_type = other RNA
ggttcagtccagtgtagatt

SEQ ID NO: 6850 - RNA, 20 nt, synthetic construct
  misc_feature 1..20: note = antisense sequence
  source 1..20: mol_type = other RNA
tggttcagtccagtgtagat

SEQ ID NO: 6851 - RNA, 20 nt, synthetic construct
  misc_feature 1..20: note = antisense sequence
  source 1..20: mol_type = other RNA
atggttcagtccagtgtaga

SEQ ID NO: 6852 - RNA, 20 nt, synthetic construct
  misc_feature 1..20: note = antisense sequence
  source 1..20: mol_type = other RNA
gatggttcagtccagtgtag

SEQ ID NO: 6853 - RNA, 20 nt, synthetic construct
  misc_feature 1..20: note = antisense sequence
  source 1..20: mol_type = other RNA
tgatggttcagtccagtgta

SEQ ID NO: 6854 - RNA, 20 nt, synthetic construct
  misc_feature 1..20: note = antisense sequence
  source 1..20: mol_type = other RNA
gtgatggttcagtccagtgt

SEQ ID NO: 6855 - RNA, 20 nt, synthetic construct
  misc_feature 1..20: note = antisense sequence
  source 1..20: mol_type = other RNA
tgtgatggttcagtccagtg

SEQ ID NO: 6856 - RNA, 20 nt, synthetic construct
  misc_feature 1..20: note = antisense sequence
  source 1..20: mol_type = other RNA
ttgtgatggttcagtccagt

SEQ ID NO: 6857 - RNA, 20 nt, synthetic construct
  misc_feature 1..20: note = antisense sequence
  source 1..20: mol_type = other RNA
attgtgatggttcagtccag

SEQ ID NO: 6858 - RNA, 20 nt, synthetic construct
  misc_feature 1..20: note = antisense sequence
  source 1..20: mol_type = other RNA
gtagaattgtgatggttcag

SEQ ID NO: 6859 - RNA, 20 nt, synthetic construct
  misc_feature 1..20: note = antisense sequence
  source 1..20: mol_type = other RNA
caagatataaggcatagtcc

SEQ ID NO: 6860 - RNA, 20 nt, synthetic construct
  misc_feature 1..20: note = antisense sequence
  source 1..20: mol_type = other RNA
ccaagatataaggcatagtc

SEQ ID NO: 6861 - RNA, 20 nt, synthetic construct
  misc_feature 1..20: note = antisense sequence
  source 1..20: mol_type = other RNA
ggtaaaccaagatataaggc

SEQ ID NO: 6862 - RNA, 20 nt, synthetic construct
  misc_feature 1..20: note = antisense sequence
  source 1..20: mol_type = other RNA
gggtaaaccaagatataagg

SEQ ID NO: 6863 - RNA, 20 nt, synthetic construct
  misc_feature 1..20: note = antisense sequence
  source 1..20: mol_type = other RNA
cttcatgggtaaaccaagat

SEQ ID NO: 6864 - RNA, 20 nt, synthetic construct
  misc_feature 1..20: note = antisense sequence
  source 1..20: mol_type = other RNA
agcttcatgggtaaaccaag

SEQ ID NO: 6865 - RNA, 20 nt, synthetic construct
  misc_feature 1..20: note = antisense sequence
  source 1..20: mol_type = other RNA
cagcttcatgggtaaaccaa

SEQ ID NO: 6866 - RNA, 20 nt, synthetic construct
  misc_feature 1..20: note = antisense sequence
  source 1..20: mol_type = other RNA
tcagcttcatgggtaaacca

SEQ ID NO: 6867 - RNA, 20 nt, synthetic construct
  misc_feature 1..20: note = antisense sequence
  source 1..20: mol_type = other RNA
actcagcttcatgggtaaac

SEQ ID NO: 6868 - RNA, 20 nt, synthetic construct
  misc_feature 1..20: note = antisense sequence
  source 1..20: mol_type = other RNA
aactcagcttcatgggtaaa

SEQ ID NO: 6869 - RNA, 20 nt, synthetic construct
  misc_feature 1..20: note = antisense sequence
  source 1..20: mol_type = other RNA
caactcagcttcatgggtaa

SEQ ID NO: 6870 - RNA, 20 nt, synthetic construct
  misc_feature 1..20: note = antisense sequence
  source 1..20: mol_type = other RNA
attcaactcagcttcatggg

SEQ ID NO: 6871 - RNA, 20 nt, synthetic construct
  misc_feature 1..20: note = antisense sequence
  source 1..20: mol_type = other RNA
aattcaactcagcttcatgg

SEQ ID NO: 6872 - RNA, 20 nt, synthetic construct
  misc_feature 1..20: note = antisense sequence
  source 1..20: mol_type = other RNA
caattcaactcagcttcatg

SEQ ID NO: 6873 - RNA, 20 nt, synthetic construct
  misc_feature 1..20: note = antisense sequence
  source 1..20: mol_type = other RNA
gacaattcaactcagcttca

SEQ ID NO: 6874 - RNA, 20 nt, synthetic construct
  misc_feature 1..20: note = antisense sequence
  source 1..20: mol_type = other RNA
agacaattcaactcagcttc

SEQ ID NO: 6875 - RNA, 20 nt, synthetic construct
  misc_feature 1..20: note = antisense sequence
  source 1..20: mol_type = other RNA
tcagagacaattcaactcag

SEQ ID NO: 6876 - RNA, 20 nt, synthetic construct
  misc_feature 1..20: note = antisense sequence
  source 1..20: mol_type = other RNA
cctaacccaccaacaaatat

SEQ ID NO: 6877 - RNA, 20 nt, synthetic construct
  misc_feature 1..20: note = antisense sequence
  source 1..20: mol_type = other RNA
acctaacccaccaacaaata

SEQ ID NO: 6878 - RNA, 20 nt, synthetic construct
  misc_feature 1..20: note = antisense sequence
  source 1..20: mol_type = other RNA
aacctaacccaccaacaaat

SEQ ID NO: 6879 - RNA, 20 nt, synthetic construct
  misc_feature 1..20: note = antisense sequence
  source 1..20: mol_type = other RNA
aaaacctaacccaccaacaa

SEQ ID NO: 6880 - RNA, 20 nt, synthetic construct
  misc_feature 1..20: note = antisense sequence
  source 1..20: mol_type = other RNA
ccacatttatgctatggcta

SEQ ID NO: 6881 - RNA, 20 nt, synthetic construct
  misc_feature 1..20: note = antisense sequence
  source 1..20: mol_type = other RNA
cccacatttatgctatggct

SEQ ID NO: 6882 - RNA, 20 nt, synthetic construct
  misc_feature 1..20: note = antisense sequence
  source 1..20: mol_type = other RNA
acccacatttatgctatggc

SEQ ID NO: 6883 - RNA, 20 nt, synthetic construct
  misc_feature 1..20: note = antisense sequence
  source 1..20: mol_type = other RNA
gacccacatttatgctatgg

SEQ ID NO: 6884 - RNA, 20 nt, synthetic construct
  misc_feature 1..20: note = antisense sequence
  source 1..20: mol_type = other RNA
tgacccacatttatgctatg

SEQ ID NO: 6885 - RNA, 20 nt, synthetic construct
  misc_feature 1..20: note = antisense sequence
  source 1..20: mol_type = other RNA
tgattgactgacccacattt

SEQ ID NO: 6886 - RNA, 20 nt, synthetic construct
  misc_feature 1..20: note = antisense sequence
  source 1..20: mol_type = other RNA
ttgattgactgacccacatt

SEQ ID NO: 6887 - RNA, 20 nt, synthetic construct
  misc_feature 1..20: note = antisense sequence
  source 1..20: mol_type = other RNA
gttgattgactgacccacat

SEQ ID NO: 6888 - RNA, 20 nt, synthetic construct
  misc_feature 1..20: note = antisense sequence
  source 1..20: mol_type = other RNA
tgttgattgactgacccaca

SEQ ID NO: 6889 - RNA, 20 nt, synthetic construct
  misc_feature 1..20: note = antisense sequence
  source 1..20: mol_type = other RNA
atgttgattgactgacccac

SEQ ID NO: 6890 - RNA, 20 nt, synthetic construct
  misc_feature 1..20: note = antisense sequence
  source 1..20: mol_type = other RNA
tttagcataatgccagacac

SEQ ID NO: 6891 - RNA, 20 nt, synthetic construct
  misc_feature 1..20: note = antisense sequence
  source 1..20: mol_type = other RNA
gtatgtccttgactaggtta

SEQ ID NO: 6892 - RNA, 20 nt, synthetic construct
  misc_feature 1..20: note = antisense sequence
  source 1..20: mol_type = other RNA
tgtatgtccttgactaggtt

SEQ ID NO: 6893 - RNA, 20 nt, synthetic construct
  misc_feature 1..20: note = antisense sequence
  source 1..20: mol_type = other RNA
atgtatgtccttgactaggt

SEQ ID NO: 6894 - RNA, 20 nt, synthetic construct
  misc_feature 1..20: note = antisense sequence
  source 1..20: mol_type = other RNA
catgtatgtccttgactagg

SEQ ID NO: 6895 - RNA, 20 nt, synthetic construct
  misc_feature 1..20: note = antisense sequence
  source 1..20: mol_type = other RNA
tcatgtatgtccttgactag

SEQ ID NO: 6896 - RNA, 20 nt, synthetic construct
  misc_feature 1..20: note = antisense sequence
  source 1..20: mol_type = other RNA
tggcactattctctattcct

SEQ ID NO: 6897 - RNA, 20 nt, synthetic construct
  misc_feature 1..20: note = antisense sequence
  source 1..20: mol_type = other RNA
ttggcactattctctattcc

SEQ ID NO: 6898 - RNA, 20 nt, synthetic construct
  misc_feature 1..20: note = antisense sequence
  source 1..20: mol_type = other RNA
gttggcactattctctattc

SEQ ID NO: 6899 - RNA, 20 nt, synthetic construct
  misc_feature 1..20: note = antisense sequence
  source 1..20: mol_type = other RNA
gttgttggcactattctcta

SEQ ID NO: 6900 - RNA, 20 nt, synthetic construct
  misc_feature 1..20: note = antisense sequence
  source 1..20: mol_type = other RNA
ggttgttggcactattctct

SEQ ID NO: 6901 - RNA, 20 nt, synthetic construct
  misc_feature 1..20: note = antisense sequence
  source 1..20: mol_type = other RNA
tggttgttggcactattctc

SEQ ID NO: 6902 - RNA, 20 nt, synthetic construct
  misc_feature 1..20: note = antisense sequence
  source 1..20: mol_type = other RNA
ctggttgttggcactattct

SEQ ID NO: 6903 - RNA, 20 nt, synthetic construct
  misc_feature 1..20: note = antisense sequence
  source 1..20: mol_type = other RNA
cactggttgttggcactatt

SEQ ID NO: 6904 - RNA, 20 nt, synthetic construct
  misc_feature 1..20: note = antisense sequence
  source 1..20: mol_type = other RNA
gcactggttgttggcactat

SEQ ID NO: 6905 - RNA, 20 nt, synthetic construct
  misc_feature 1..20: note = antisense sequence
  source 1..20: mol_type = other RNA
tgcactggttgttggcacta

SEQ ID NO: 6906 - RNA, 20 nt, synthetic construct
  misc_feature 1..20: note = antisense sequence
  source 1..20: mol_type = other RNA
ctgcactggttgttggcact

SEQ ID NO: 6907 - RNA, 20 nt, synthetic construct
  misc_feature 1..20: note = antisense sequence
  source 1..20: mol_type = other RNA
tctgcactggttgttggcac

SEQ ID NO: 6908 - RNA, 20 nt, synthetic construct
  misc_feature 1..20: note = antisense sequence
  source 1..20: mol_type = other RNA
attctgcactggttgttggc

SEQ ID NO: 6909 - RNA, 20 nt, synthetic construct
  misc_feature 1..20: note = antisense sequence
  source 1..20: mol_type = other RNA
tattctgcactggttgttgg

SEQ ID NO: 6910 - RNA, 20 nt, synthetic construct
  misc_feature 1..20: note = antisense sequence
  source 1..20: mol_type = other RNA
ctattctgcactggttgttg

SEQ ID NO: 6911 - RNA, 20 nt, synthetic construct
  misc_feature 1..20: note = antisense sequence
  source 1..20: mol_type = other RNA
tctattctgcactggttgtt

SEQ ID NO: 6912 - RNA, 20 nt, synthetic construct
  misc_feature 1..20: note = antisense sequence
  source 1..20: mol_type = other RNA
gtctattctgcactggttgt

SEQ ID NO: 6913 - RNA, 20 nt, synthetic construct
  misc_feature 1..20: note = antisense sequence
  source 1..20: mol_type = other RNA
catctcctcctgttttgaat

SEQ ID NO: 6914 - RNA, 20 nt, synthetic construct
  misc_feature 1..20: note = antisense sequence
  source 1..20: mol_type = other RNA
ccaagaatcatctcctcctg

SEQ ID NO: 6915 - RNA, 20 nt, synthetic construct
  misc_feature 1..20: note = antisense sequence
  source 1..20: mol_type = other RNA
accaagaatcatctcctcct

SEQ ID NO: 6916 - RNA, 20 nt, synthetic construct
  misc_feature 1..20: note = antisense sequence
  source 1..20: mol_type = other RNA
caagaaccaagaatcatctc

SEQ ID NO: 6917 - RNA, 20 nt, synthetic construct
  misc_feature 1..20: note = antisense sequence
  source 1..20: mol_type = other RNA
gtcaagaaccaagaatcatc

SEQ ID NO: 6918 - RNA, 20 nt, synthetic construct
  misc_feature 1..20: note = antisense sequence
  source 1..20: mol_type = other RNA
aagacttaggtcaagaacca

SEQ ID NO: 6919 - RNA, 20 nt, synthetic construct
  misc_feature 1..20: note = antisense sequence
  source 1..20: mol_type = other RNA
caagacttaggtcaagaacc

SEQ ID NO: 6920 - RNA, 20 nt, synthetic construct
  misc_feature 1..20: note = antisense sequence
  source 1..20: mol_type = other RNA
catctttcaagacttaggtc

SEQ ID NO: 6921 - RNA, 20 nt, synthetic construct
  misc_feature 1..20: note = antisense sequence
  source 1..20: mol_type = other RNA
gtcatctttcaagacttagg

SEQ ID NO: 6922 - RNA, 20 nt, synthetic construct
  misc_feature 1..20: note = antisense sequence
  source 1..20: mol_type = other RNA
acactcacctcacttattct

SEQ ID NO: 6923 - RNA, 20 nt, synthetic construct
  misc_feature 1..20: note = antisense sequence
  source 1..20: mol_type = other RNA
cacactcacctcacttattc

SEQ ID NO: 6924 - RNA, 20 nt, synthetic construct
  misc_feature 1..20: note = antisense sequence
  source 1..20: mol_type = other RNA
caacacactcacctcactta

SEQ ID NO: 6925 - RNA, 20 nt, synthetic construct
  misc_feature 1..20: note = antisense sequence
  source 1..20: mol_type = other RNA
taccaacacactcacctcac

SEQ ID NO: 6926 - RNA, 20 nt, synthetic construct
  misc_feature 1..20: note = antisense sequence
  source 1..20: mol_type = other RNA
ttaccaacacactcacctca

SEQ ID NO: 6927 - RNA, 20 nt, synthetic construct
  misc_feature 1..20: note = antisense sequence
  source 1..20: mol_type = other RNA
acttaccaacacactcacct

SEQ ID NO: 6928 - RNA, 20 nt, synthetic construct
  misc_feature 1..20: note = antisense sequence
  source 1..20: mol_type = other RNA
gtttacttaccaacacactc

SEQ ID NO: 6929 - RNA, 20 nt, synthetic construct
  misc_feature 1..20: note = antisense sequence
  source 1..20: mol_type = other RNA
agacctgtttacttaccaac

SEQ ID NO: 6930 - RNA, 20 nt, synthetic construct
  misc_feature 1..20: note = antisense sequence
  source 1..20: mol_type = other RNA
gagacctgtttacttaccaa

SEQ ID NO: 6931 - RNA, 20 nt, synthetic construct
  misc_feature 1..20: note = antisense sequence
  source 1..20: mol_type = other RNA
tgagacctgtttacttacca

SEQ ID NO: 6932 - RNA, 20 nt, synthetic construct
  misc_feature 1..20: note = antisense sequence
  source 1..20: mol_type = other RNA
atgagacctgtttacttacc

SEQ ID NO: 6933 - RNA, 20 nt, synthetic construct
  misc_feature 1..20: note = antisense sequence
  source 1..20: mol_type = other RNA
ccaatatgagacctgtttac

SEQ ID NO: 6934 - RNA, 20 nt, synthetic construct
  misc_feature 1..20: note = antisense sequence
  source 1..20: mol_type = other RNA
cccaatatgagacctgttta

SEQ ID NO: 6935 - RNA, 20 nt, synthetic construct
  misc_feature 1..20: note = antisense sequence
  source 1..20: mol_type = other RNA
tcccaatatgagacctgttt

SEQ ID NO: 6936 - RNA, 20 nt, synthetic construct
  misc_feature 1..20: note = antisense sequence
  source 1..20: mol_type = other RNA
atcccaatatgagacctgtt

SEQ ID NO: 6937 - RNA, 20 nt, synthetic construct
  misc_feature 1..20: note = antisense sequence
  source 1..20: mol_type = other RNA
gatctgccatcatccttttc

SEQ ID NO: 6938 - RNA, 20 nt, synthetic construct
  misc_feature 1..20: note = antisense sequence
  source 1..20: mol_type = other RNA
ctcctgtgtttgtctttcaa

SEQ ID NO: 6939 - RNA, 20 nt, synthetic construct
  misc_feature 1..20: note = antisense sequence
  source 1..20: mol_type = other RNA
ttaggtccaagctcctgtgt

SEQ ID NO: 6940 - RNA, 20 nt, synthetic construct
  misc_feature 1..20: note = antisense sequence
  source 1..20: mol_type = other RNA
cttaggtccaagctcctgtg

SEQ ID NO: 6941 - RNA, 20 nt, synthetic construct
  misc_feature 1..20: note = antisense sequence
  source 1..20: mol_type = other RNA
atcttaggtccaagctcctg

SEQ ID NO: 6942 - RNA, 20 nt, synthetic construct
  misc_feature 1..20: note = antisense sequence
  source 1..20: mol_type = other RNA
catcttaggtccaagctcct

SEQ ID NO: 6943 - RNA, 20 nt, synthetic construct
  misc_feature 1..20: note = antisense sequence
  source 1..20: mol_type = other RNA
tcatcttaggtccaagctcc

SEQ ID NO: 6944 - RNA, 20 nt, synthetic construct
  misc_feature 1..20: note = antisense sequence
  source 1..20: mol_type = other RNA
ctcatcttaggtccaagctc

SEQ ID NO: 6945 - RNA, 20 nt, synthetic construct
  misc_feature 1..20: note = antisense sequence
  source 1..20: mol_type = other RNA
cctcatcttaggtccaagct

SEQ ID NO: 6946 - RNA, 20 nt, synthetic construct
  misc_feature 1..20: note = antisense sequence
  source 1..20: mol_type = other RNA
tcctcatcttaggtccaagc

SEQ ID NO: 6947 - RNA, 20 nt, synthetic construct
  misc_feature 1..20: note = antisense sequence
  source 1..20: mol_type = other RNA
gtcctcatcttaggtccaag

SEQ ID NO: 6948 - RNA, 20 nt, synthetic construct
  misc_feature 1..20: note = antisense sequence
  source 1..20: mol_type = other RNA
cgtcctcatcttaggtccaa

SEQ ID NO: 6949 - RNA, 20 nt, synthetic construct
  misc_feature 1..20: note = antisense sequence
  source 1..20: mol_type = other RNA
acgtcctcatcttaggtcca

SEQ ID NO: 6950 - RNA, 20 nt, synthetic construct
  misc_feature 1..20: note = antisense sequence
  source 1..20: mol_type = other RNA
aacgtcctcatcttaggtcc

SEQ ID NO: 6951 - RNA, 20 nt, synthetic construct
  misc_feature 1..20: note = antisense sequence
  source 1..20: mol_type = other RNA
caacgtcctcatcttaggtc

SEQ ID NO: 6952 - RNA, 20 nt, synthetic construct
  misc_feature 1..20: note = antisense sequence
  source 1..20: mol_type = other RNA
tcaacgtcctcatcttaggt

SEQ ID NO: 6953 - RNA, 20 nt, synthetic construct
  misc_feature 1..20: note = antisense sequence
  source 1..20: mol_type = other RNA
ctcaacgtcctcatcttagg

SEQ ID NO: 6954 - RNA, 20 nt, synthetic construct
  misc_feature 1..20: note = antisense sequence
  source 1..20: mol_type = other RNA
tctcaacgtcctcatcttag

SEQ ID NO: 6955 - RNA, 20 nt, synthetic construct
  misc_feature 1..20: note = antisense sequence
  source 1..20: mol_type = other RNA
ttctcaacgtcctcatctta

SEQ ID NO: 6956 - RNA, 20 nt, synthetic construct
  misc_feature 1..20: note = antisense sequence
  source 1..20: mol_type = other RNA
cttctcaacgtcctcatctt

SEQ ID NO: 6957 - RNA, 20 nt, synthetic construct
  misc_feature 1..20: note = antisense sequence
  source 1..20: mol_type = other RNA
gcttctcaacgtcctcatct

SEQ ID NO: 6958 - RNA, 20 nt, synthetic construct
  misc_feature 1..20: note = antisense sequence
  source 1..20: mol_type = other RNA
ggcttctcaacgtcctcatc

SEQ ID NO: 6959 - RNA, 20 nt, synthetic construct
  misc_feature 1..20: note = antisense sequence
  source 1..20: mol_type = other RNA
tggcttctcaacgtcctcat

SEQ ID NO: 6960 - RNA, 20 nt, synthetic construct
  misc_feature 1..20: note = antisense sequence
  source 1..20: mol_type = other RNA
atggcttctcaacgtcctca

SEQ ID NO: 6961 - RNA, 20 nt, synthetic construct
  misc_feature 1..20: note = antisense sequence
  source 1..20: mol_type = other RNA
gatggcttctcaacgtcctc

SEQ ID NO: 6962 - RNA, 20 nt, synthetic construct
  misc_feature 1..20: note = antisense sequence
  source 1..20: mol_type = other RNA
tgatggcttctcaacgtcct

SEQ ID NO: 6963 - RNA, 20 nt, synthetic construct
  misc_feature 1..20: note = antisense sequence
  source 1..20: mol_type = other RNA
atgatggcttctcaacgtcc

SEQ ID NO: 6964 - RNA, 20 nt, synthetic construct
  misc_feature 1..20: note = antisense sequence
  source 1..20: mol_type = other RNA
tatgatggcttctcaacgtc

SEQ ID NO: 6965 - RNA, 20 nt, synthetic construct
  misc_feature 1..20: note = antisense sequence
  source 1..20: mol_type = other RNA
ttatgatggcttctcaacgt

SEQ ID NO: 6966 - RNA, 20 nt, synthetic construct
  misc_feature 1..20: note = antisense sequence
  source 1..20: mol_type = other RNA
cttatgatggcttctcaacg

SEQ ID NO: 6967 - RNA, 20 nt, synthetic construct
  misc_feature 1..20: note = antisense sequence
  source 1..20: mol_type = other RNA
gacaacttatgatggcttct

SEQ ID NO: 6968 - RNA, 20 nt, synthetic construct
  misc_feature 1..20: note = antisense sequence
  source 1..20: mol_type = other RNA
tgacaacttatgatggcttc

SEQ ID NO: 6969 - RNA, 20 nt, synthetic construct
  misc_feature 1..20: note = antisense sequence
  source 1..20: mol_type = other RNA
aggaactccattctccaatc

SEQ ID NO: 6970 - RNA, 20 nt, synthetic construct
  misc_feature 1..20: note = antisense sequence
  source 1..20: mol_type = other RNA
caggaactccattctccaat

SEQ ID NO: 6971 - RNA, 20 nt, synthetic construct
  misc_feature 1..20: note = antisense sequence
  source 1..20: mol_type = other RNA
tttcaggaactccattctcc

SEQ ID NO: 6972 - RNA, 20 nt, synthetic construct
  misc_feature 1..20: note = antisense sequence
  source 1..20: mol_type = other RNA
gttttcaggaactccattct

SEQ ID NO: 6973 - RNA, 20 nt, synthetic construct
  misc_feature 1..20: note = antisense sequence
  source 1..20: mol_type = other RNA
ccaccaagatttactgattc

SEQ ID NO: 6974 - RNA, 20 nt, synthetic construct
  misc_feature 1..20: note = antisense sequence
  source 1..20: mol_type = other RNA
acttccaccaagatttactg

SEQ ID NO: 6975 - RNA, 20 nt, synthetic construct
  misc_feature 1..20: note = antisense sequence
  source 1..20: mol_type = other RNA
atttccaaacttccaccaag

SEQ ID NO: 6976 - RNA, 20 nt, synthetic construct
  misc_feature 1..20: note = antisense sequence
  source 1..20: mol_type = other RNA
catttccaaacttccaccaa

SEQ ID NO: 6977 - RNA, 20 nt, synthetic construct
  misc_feature 1..20: note = antisense sequence
  source 1..20: mol_type = other RNA
acaccttcattgaccatttc

SEQ ID NO: 6978 - RNA, 20 nt, synthetic construct
  misc_feature 1..20: note = antisense sequence
  source 1..20: mol_type = other RNA
ctacaccttcattgaccatt

SEQ ID NO: 6979 - RNA, 20 nt, synthetic construct
  misc_feature 1..20: note = antisense sequence
  source 1..20: mol_type = other RNA
cctacaccttcattgaccat

SEQ ID NO: 6980 - RNA, 20 nt, synthetic construct
  misc_feature 1..20: note = antisense sequence
  source 1..20: mol_type = other RNA
tcctacaccttcattgacca

SEQ ID NO: 6981 - RNA, 20 nt, synthetic construct
  misc_feature 1..20: note = antisense sequence
  source 1..20: mol_type = other RNA
gacctctcctacaccttcat

SEQ ID NO: 6982 - RNA, 20 nt, synthetic construct
  misc_feature 1..20: note = antisense sequence
  source 1..20: mol_type = other RNA
tgacctctcctacaccttca

SEQ ID NO: 6983 - RNA, 20 nt, synthetic construct
  misc_feature 1..20: note = antisense sequence
  source 1..20: mol_type = other RNA
ctgacctctcctacaccttc

SEQ ID NO: 6984 - RNA, 20 nt, synthetic construct
  misc_feature 1..20: note = antisense sequence
  source 1..20: mol_type = other RNA
ctatctgacctctcctacac

SEQ ID NO: 6985 - RNA, 20 nt, synthetic construct
  misc_feature 1..20: note = antisense sequence
  source 1..20: mol_type = other RNA
atctatctgacctctcctac

SEQ ID NO: 6986 - RNA, 20 nt, synthetic construct
  misc_feature 1..20: note = antisense sequence
  source 1..20: mol_type = other RNA
aatctatctgacctctccta

SEQ ID NO: 6987 - RNA, 20 nt, synthetic construct
  misc_feature 1..20: note = antisense sequence
  source 1..20: mol_type = other RNA
gaatctatctgacctctcct

SEQ ID NO: 6988 - RNA, 20 nt, synthetic construct
  misc_feature 1..20: note = antisense sequence
  source 1..20: mol_type = other RNA
tggaatctatctgacctctc

SEQ ID NO: 6989 - RNA, 20 nt, synthetic construct
  misc_feature 1..20: note = antisense sequence
  source 1..20: mol_type = other RNA
caatgagccagtacagaaat

SEQ ID NO: 6990 - RNA, 20 nt, synthetic construct
  misc_feature 1..20: note = antisense sequence
  source 1..20: mol_type = other RNA
atttcccaatgagccagtac

SEQ ID NO: 6991 - RNA, 20 nt, synthetic construct
  misc_feature 1..20: note = antisense sequence
  source 1..20: mol_type = other RNA
atgacaacccatttcccaat

SEQ ID NO: 6992 - RNA, 20 nt, synthetic construct
  misc_feature 1..20: note = antisense sequence
  source 1..20: mol_type = other RNA
tccctttctctgtcaatgac

SEQ ID NO: 6993 - RNA, 20 nt, synthetic construct
  misc_feature 1..20: note = antisense sequence
  source 1..20: mol_type = other RNA
aaatagacttacccacttcc

SEQ ID NO: 6994 - RNA, 20 nt, synthetic construct
  misc_feature 1..20: note = antisense sequence
  source 1..20: mol_type = other RNA
ccttgaactggagctattta

SEQ ID NO: 6995 - RNA, 20 nt, synthetic construct
  misc_feature 1..20: note = antisense sequence
  source 1..20: mol_type = other RNA
accttgaactggagctattt

SEQ ID NO: 6996 - RNA, 20 nt, synthetic construct
  misc_feature 1..20: note = antisense sequence
  source 1..20: mol_type = other RNA
caccttgaactggagctatt

SEQ ID NO: 6997 - RNA, 20 nt, synthetic construct
  misc_feature 1..20: note = antisense sequence
  source 1..20: mol_type = other RNA
tcaccttgaactggagctat

SEQ ID NO: 6998 - RNA, 20 nt, synthetic construct
  misc_feature 1..20: note = antisense sequence
  source 1..20: mol_type = other RNA
atcaccttgaactggagcta

SEQ ID NO: 6999 - RNA, 20 nt, synthetic construct
  misc_feature 1..20: note = antisense sequence
  source 1..20: mol_type = other RNA
aatcaccttgaactggagct

SEQ ID NO: 7000 - RNA, 20 nt, synthetic construct
  misc_feature 1..20: note = antisense sequence
  source 1..20: mol_type = other RNA
tagaaatcaccttgaactgg

SEQ ID NO: 7001 - RNA, 20 nt, synthetic construct
  misc_feature 1..20: note = antisense sequence
  source 1..20: mol_type = other RNA
ctacctagaaatcaccttga

SEQ ID NO: 7002 - RNA, 20 nt, synthetic construct
  misc_feature 1..20: note = antisense sequence
  source 1..20: mol_type = other RNA
actacctagaaatcaccttg

SEQ ID NO: 7003 - RNA, 20 nt, synthetic construct
  misc_feature 1..20: note = antisense sequence
  source 1..20: mol_type = other RNA
caactacctagaaatcacct

SEQ ID NO: 7004 - RNA, 20 nt, synthetic construct
  misc_feature 1..20: note = antisense sequence
  source 1..20: mol_type = other RNA
ccaactacctagaaatcacc

SEQ ID NO: 7005 - RNA, 20 nt, synthetic construct
  misc_feature 1..20: note = antisense sequence
  source 1..20: mol_type = other RNA
tccaactacctagaaatcac

SEQ ID NO: 7006 - RNA, 20 nt, synthetic construct
  misc_feature 1..20: note = antisense sequence
  source 1..20: mol_type = other RNA
gtctgaggtttccaactacc

SEQ ID NO: 7007 - RNA, 20 nt, synthetic construct
  misc_feature 1..20: note = antisense sequence
  source 1..20: mol_type = other RNA
ttccagtctgaggtttccaa

SEQ ID NO: 7008 - RNA, 20 nt, synthetic construct
  misc_feature 1..20: note = antisense sequence
  source 1..20: mol_type = other RNA
ttacctgcattccagtctga

SEQ ID NO: 7009 - RNA, 20 nt, synthetic construct
  misc_feature 1..20: note = antisense sequence
  source 1..20: mol_type = other RNA
tcttacctgcattccagtct

SEQ ID NO: 7010 - RNA, 20 nt, synthetic construct
  misc_feature 1..20: note = antisense sequence
  source 1..20: mol_type = other RNA
ctcttacctgcattccagtc

SEQ ID NO: 7011 - RNA, 20 nt, synthetic construct
  misc_feature 1..20: note = antisense sequence
  source 1..20: mol_type = other RNA
cctcttacctgcattccagt

SEQ ID NO: 7012 - RNA, 20 nt, synthetic construct
  misc_feature 1..20: note = antisense sequence
  source 1..20: mol_type = other RNA
ccctcttacctgcattccag

SEQ ID NO: 7013 - RNA, 20 nt, synthetic construct
  misc_feature 1..20: note = antisense sequence
  source 1..20: mol_type = other RNA
tccctcttacctgcattcca

SEQ ID NO: 7014 - RNA, 20 nt, synthetic construct
  misc_feature 1..20: note = antisense sequence
  source 1..20: mol_type = other RNA
attaacttctccctcttacc

SEQ ID NO: 7015 - RNA, 20 nt, synthetic construct
  misc_feature 1..20: note = antisense sequence
  source 1..20: mol_type = other RNA
cattaacttctccctcttac

SEQ ID NO: 7016 - RNA, 20 nt, synthetic construct
  misc_feature 1..20: note = antisense sequence
  source 1..20: mol_type = other RNA
ctaacacattaacttctccc

SEQ ID NO: 7017 - RNA, 20 nt, synthetic construct
  misc_feature 1..20: note = antisense sequence
  source 1..20: mol_type = other RNA
ggcatttccactaacacatt

SEQ ID NO: 7018 - RNA, 20 nt, synthetic construct
  misc_feature 1..20: note = antisense sequence
  source 1..20: mol_type = other RNA
aggcatttccactaacacat

SEQ ID NO: 7019 - RNA, 20 nt, synthetic construct
  misc_feature 1..20: note = antisense sequence
  source 1..20: mol_type = other RNA
gggctgcaaaatcagtcttt

SEQ ID NO: 7020 - RNA, 20 nt, synthetic construct
  misc_feature 1..20: note = antisense sequence
  source 1..20: mol_type = other RNA
gtgggctgcaaaatcagtct

SEQ ID NO: 7021 - RNA, 20 nt, synthetic construct
  misc_feature 1..20: note = antisense sequence
  source 1..20: mol_type = other RNA
agtgggctgcaaaatcagtc

SEQ ID NO: 7022 - RNA, 20 nt, synthetic construct
  misc_feature 1..20: note = antisense sequence
  source 1..20: mol_type = other RNA
caagtgggctgcaaaatcag

SEQ ID NO: 7023 - RNA, 20 nt, synthetic construct
  misc_feature 1..20: note = antisense sequence
  source 1..20: mol_type = other RNA
gcaagtgggctgcaaaatca

SEQ ID NO: 7024 - RNA, 20 nt, synthetic construct
  misc_feature 1..20: note = antisense sequence
  source 1..20: mol_type = other RNA
ggcctcatgctagatgtggg

SEQ ID NO: 7025 - RNA, 20 nt, synthetic construct
  misc_feature 1..20: note = antisense sequence
  source 1..20: mol_type = other RNA
ctagatttagttgttcagcc

SEQ ID NO: 7026 - RNA, 20 nt, synthetic construct
  misc_feature 1..20: note = antisense sequence
  source 1..20: mol_type = other RNA
gtcctaagtagttgcatttc

SEQ ID NO: 7027 - RNA, 20 nt, synthetic construct
  misc_feature 1..20: note = antisense sequence
  source 1..20: mol_type = other RNA
ggtcctaagtagttgcattt

SEQ ID NO: 7028 - RNA, 20 nt, synthetic construct
  misc_feature 1..20: note = antisense sequence
  source 1..20: mol_type = other RNA
tggtcctaagtagttgcatt

SEQ ID NO: 7029 - RNA, 20 nt, synthetic construct
  misc_feature 1..20: note = antisense sequence
  source 1..20: mol_type = other RNA
ctggtcctaagtagttgcat

SEQ ID NO: 7030 - RNA, 20 nt, synthetic construct
  misc_feature 1..20: note = antisense sequence
  source 1..20: mol_type = other RNA
tctggtcctaagtagttgca

SEQ ID NO: 7031 - RNA, 20 nt, synthetic construct
  misc_feature 1..20: note = antisense sequence
  source 1..20: mol_type = other RNA
ctctggtcctaagtagttgc

SEQ ID NO: 7032 - RNA, 20 nt, synthetic construct
  misc_feature 1..20: note = antisense sequence
  source 1..20: mol_type = other RNA
gctctggtcctaagtagttg

SEQ ID NO: 7033 - RNA, 20 nt, synthetic construct
  misc_feature 1..20: note = antisense sequence
  source 1..20: mol_type = other RNA
agctctggtcctaagtagtt

SEQ ID NO: 7034 - RNA, 20 nt, synthetic construct
  misc_feature 1..20: note = antisense sequence
  source 1..20: mol_type = other RNA
cagctctggtcctaagtagt

SEQ ID NO: 7035 - RNA, 20 nt, synthetic construct
  misc_feature 1..20: note = antisense sequence
  source 1..20: mol_type = other RNA
acagctctggtcctaagtag

SEQ ID NO: 7036 - RNA, 20 nt, synthetic construct
  misc_feature 1..20: note = antisense sequence
  source 1..20: mol_type = other RNA
tacagctctggtcctaagta

SEQ ID NO: 7037 - RNA, 20 nt, synthetic construct
  misc_feature 1..20: note = antisense sequence
  source 1..20: mol_type = other RNA
ttacagctctggtcctaagt

SEQ ID NO: 7038 - RNA, 20 nt, synthetic construct
  misc_feature 1..20: note = antisense sequence
  source 1..20: mol_type = other RNA
attacagctctggtcctaag

SEQ ID NO: 7039 - RNA, 20 nt, synthetic construct
  misc_feature 1..20: note = antisense sequence
  source 1..20: mol_type = other RNA
tattacagctctggtcctaa

SEQ ID NO: 7040 - RNA, 20 nt, synthetic construct
  misc_feature 1..20: note = antisense sequence
  source 1..20: mol_type = other RNA
ctattacagctctggtccta

SEQ ID NO: 7041 - RNA, 20 nt, synthetic construct
  misc_feature 1..20: note = antisense sequence
  source 1..20: mol_type = other RNA
tctattacagctctggtcct

SEQ ID NO: 7042 - RNA, 20 nt, synthetic construct
  misc_feature 1..20: note = antisense sequence
  source 1..20: mol_type = other RNA
atctattacagctctggtcc

SEQ ID NO: 7043 - RNA, 20 nt, synthetic construct
  misc_feature 1..20: note = antisense sequence
  source 1..20: mol_type = other RNA
aatctattacagctctggtc

SEQ ID NO: 7044 - RNA, 20 nt, synthetic construct
  misc_feature 1..20: note = antisense sequence
  source 1..20: mol_type = other RNA
gaaatctattacagctctgg

SEQ ID NO: 7045 - RNA, 20 nt, synthetic construct
  misc_feature 1..20: note = antisense sequence
  source 1..20: mol_type = other RNA
cacaagactgagtgtagaga

SEQ ID NO: 7046 - RNA, 20 nt, synthetic construct
  misc_feature 1..20: note = antisense sequence
  source 1..20: mol_type = other RNA
aggcacaagactgagtgtag

SEQ ID NO: 7047 - RNA, 20 nt, synthetic construct
  misc_feature 1..20: note = antisense sequence
  source 1..20: mol_type = other RNA
aaaggcacaagactgagtgt

SEQ ID NO: 7048 - RNA, 20 nt, synthetic construct
  misc_feature 1..20: note = antisense sequence
  source 1..20: mol_type = other RNA
aaaaggcacaagactgagtg

SEQ ID NO: 7049 - RNA, 20 nt, synthetic construct
  misc_feature 1..20: note = antisense sequence
  source 1..20: mol_type = other RNA
gtcaacgtgagatttaggtt

SEQ ID NO: 7050 - RNA, 20 nt, synthetic construct
  misc_feature 1..20: note = antisense sequence
  source 1..20: mol_type = other RNA
gctaccatgctatccttaaa

SEQ ID NO: 7051 - RNA, 20 nt, synthetic construct
  misc_feature 1..20: note = antisense sequence
  source 1..20: mol_type = other RNA
tgctaccatgctatccttaa

SEQ ID NO: 7052 - RNA, 20 nt, synthetic construct
  misc_feature 1..20: note = antisense sequence
  source 1..20: mol_type = other RNA
ctgctaccatgctatcctta

SEQ ID NO: 7053 - RNA, 20 nt, synthetic construct
  misc_feature 1..20: note = antisense sequence
  source 1..20: mol_type = other RNA
gctgctaccatgctatcctt

SEQ ID NO: 7054 - RNA, 20 nt, synthetic construct
  misc_feature 1..20: note = antisense sequence
  source 1..20: mol_type = other RNA
atgctgctaccatgctatcc

SEQ ID NO: 7055 - RNA, 20 nt, synthetic construct
  misc_feature 1..20: note = antisense sequence
  source 1..20: mol_type = other RNA
tatgctgctaccatgctatc

SEQ ID NO: 7056 - RNA, 20 nt, synthetic construct
  misc_feature 1..20: note = antisense sequence
  source 1..20: mol_type = other RNA
acaatatgctgctaccatgc

SEQ ID NO: 7057 - RNA, 20 nt, synthetic construct
  misc_feature 1..20: note = antisense sequence
  source 1..20: mol_type = other RNA
gaacaatatgctgctaccat

SEQ ID NO: 7058 - RNA, 20 nt, synthetic construct
  misc_feature 1..20: note = antisense sequence
  source 1..20: mol_type = other RNA
agaacaatatgctgctacca

SEQ ID NO: 7059 - RNA, 20 nt, synthetic construct
  misc_feature 1..20: note = antisense sequence
  source 1..20: mol_type = other RNA
tagaacaatatgctgctacc

SEQ ID NO: 7060 - RNA, 20 nt, synthetic construct
  misc_feature 1..20: note = antisense sequence
  source 1..20: mol_type = other RNA
ctaccagatcccagatttct

SEQ ID NO: 7061 - RNA, 20 nt, synthetic construct
  misc_feature 1..20: note = antisense sequence
  source 1..20: mol_type = other RNA
actaccagatcccagatttc

SEQ ID NO: 7062 - RNA, 20 nt, synthetic construct
  misc_feature 1..20: note = antisense sequence
  source 1..20: mol_type = other RNA
cactaccagatcccagattt

SEQ ID NO: 7063 - RNA, 20 nt, synthetic construct
  misc_feature 1..20: note = antisense sequence
  source 1..20: mol_type = other RNA
gcactaccagatcccagatt

SEQ ID NO: 7064 - RNA, 20 nt, synthetic construct
  misc_feature 1..20: note = antisense sequence
  source 1..20: mol_type = other RNA
tgcactaccagatcccagat

SEQ ID NO: 7065 - RNA, 20 nt, synthetic construct
  misc_feature 1..20: note = antisense sequence
  source 1..20: mol_type = other RNA
ttgcactaccagatcccaga

SEQ ID NO: 7066 - RNA, 20 nt, synthetic construct
  misc_feature 1..20: note = antisense sequence
  source 1..20: mol_type = other RNA
tttgcactaccagatcccag

SEQ ID NO: 7067 - RNA, 20 nt, synthetic construct
  misc_feature 1..20: note = antisense sequence
  source 1..20: mol_type = other RNA
ttttgcactaccagatccca

SEQ ID NO: 7068 - RNA, 20 nt, synthetic construct
  misc_feature 1..20: note = antisense sequence
  source 1..20: mol_type = other RNA
attttgcactaccagatccc

SEQ ID NO: 7069 - RNA, 20 nt, synthetic construct
  misc_feature 1..20: note = antisense sequence
  source 1..20: mol_type = other RNA
tattttgcactaccagatcc

SEQ ID NO: 7070 - RNA, 20 nt, synthetic construct
  misc_feature 1..20: note = antisense sequence
  source 1..20: mol_type = other RNA
ggttattttgcactaccaga

SEQ ID NO: 7071 - RNA, 20 nt, synthetic construct
  misc_feature 1..20: note = antisense sequence
  source 1..20: mol_type = other RNA
aggttattttgcactaccag

SEQ ID NO: 7072 - RNA, 20 nt, synthetic construct
  misc_feature 1..20: note = antisense sequence
  source 1..20: mol_type = other RNA
caggttattttgcactacca

SEQ ID NO: 7073 - RNA, 20 nt, synthetic construct
  misc_feature 1..20: note = antisense sequence
  source 1..20: mol_type = other RNA
gtaagtctgcaatctatctg

SEQ ID NO: 7074 - RNA, 20 nt, synthetic construct
  misc_feature 1..20: note = antisense sequence
  source 1..20: mol_type = other RNA
cgaagtaagtctgcaatcta

SEQ ID NO: 7075 - RNA, 20 nt, synthetic construct
  misc_feature 1..20: note = antisense sequence
  source 1..20: mol_type = other RNA
tcgaagtaagtctgcaatct

SEQ ID NO: 7076 - RNA, 20 nt, synthetic construct
  misc_feature 1..20: note = antisense sequence
  source 1..20: mol_type = other RNA
ctcgaagtaagtctgcaatc

SEQ ID NO: 7077 - RNA, 20 nt, synthetic construct
  misc_feature 1..20: note = antisense sequence
  source 1..20: mol_type = other RNA
tctcgaagtaagtctgcaat

SEQ ID NO: 7078 - RNA, 20 nt, synthetic construct
  misc_feature 1..20: note = antisense sequence
  source 1..20: mol_type = other RNA
ttctcgaagtaagtctgcaa

SEQ ID NO: 7079 - RNA, 20 nt, synthetic construct
  misc_feature 1..20: note = antisense sequence
  source 1..20: mol_type = other RNA
tttctcgaagtaagtctgca

SEQ ID NO: 7080 - RNA, 20 nt, synthetic construct
  misc_feature 1..20: note = antisense sequence
  source 1..20: mol_type = other RNA
atttctcgaagtaagtctgc

SEQ ID NO: 7081 - RNA, 20 nt, synthetic construct
  misc_feature 1..20: note = antisense sequence
  source 1..20: mol_type = other RNA
catttctcgaagtaagtctg

SEQ ID NO: 7082 - RNA, 20 nt, synthetic construct
  misc_feature 1..20: note = antisense sequence
  source 1..20: mol_type = other RNA
cacatttctcgaagtaagtc

SEQ ID NO: 7083 - RNA, 20 nt, synthetic construct
  misc_feature 1..20: note = antisense sequence
  source 1..20: mol_type = other RNA
gcacatttctcgaagtaagt

SEQ ID NO: 7084 - RNA, 20 nt, synthetic construct
  misc_feature 1..20: note = antisense sequence
  source 1..20: mol_type = other RNA
agcacatttctcgaagtaag

SEQ ID NO: 7085 - RNA, 20 nt, synthetic construct
  misc_feature 1..20: note = antisense sequence
  source 1..20: mol_type = other RNA
gtagcacatttctcgaagta

SEQ ID NO: 7086 - RNA, 20 nt, synthetic construct
  misc_feature 1..20: note = antisense sequence
  source 1..20: mol_type = other RNA
tgtagcacatttctcgaagt

SEQ ID NO: 7087 - RNA, 20 nt, synthetic construct
  misc_feature 1..20: note = antisense sequence
  source 1..20: mol_type = other RNA
catgttcctccaaatatgtc

SEQ ID NO: 7088 - RNA, 20 nt, synthetic construct
  misc_feature 1..20: note = antisense sequence
  source 1..20: mol_type = other RNA
ccatgttcctccaaatatgt

SEQ ID NO: 7089 - RNA, 20 nt, synthetic construct
  misc_feature 1..20: note = antisense sequence
  source 1..20: mol_type = other RNA
acaaaatccatgttcctcca

SEQ ID NO: 7090 - RNA, 20 nt, synthetic construct
  misc_feature 1..20: note = antisense sequence
  source 1..20: mol_type = other RNA
atgacttatgaaggtgccta

SEQ ID NO: 7091 - RNA, 20 nt, synthetic construct
  misc_feature 1..20: note = antisense sequence
  source 1..20: mol_type = other RNA
tatgacttatgaaggtgcct

SEQ ID NO: 7092 - RNA, 20 nt, synthetic construct
  misc_feature 1..20: note = antisense sequence
  source 1..20: mol_type = other RNA
atatgacttatgaaggtgcc

SEQ ID NO: 7093 - RNA, 20 nt, synthetic construct
  misc_feature 1..20: note = antisense sequence
  source 1..20: mol_type = other RNA
gcatgagcagtaaatatgac

SEQ ID NO: 7094 - RNA, 20 nt, synthetic construct
  misc_feature 1..20: note = antisense sequence
  source 1..20: mol_type = other RNA
cgaaagcatgagcagtaaat

SEQ ID NO: 7095 - RNA, 20 nt, synthetic construct
  misc_feature 1..20: note = antisense sequence
  source 1..20: mol_type = other RNA
tcgaaagcatgagcagtaaa

SEQ ID NO: 7096 - RNA, 20 nt, synthetic construct
  misc_feature 1..20: note = antisense sequence
  source 1..20: mol_type = other RNA
agatgggtcaggatgatttt

SEQ ID NO: 7097 - RNA, 20 nt, synthetic construct
  misc_feature 1..20: note = antisense sequence
  source 1..20: mol_type = other RNA
aagatgggtcaggatgattt

SEQ ID NO: 7098 - RNA, 20 nt, synthetic construct
  misc_feature 1..20: note = antisense sequence
  source 1..20: mol_type = other RNA
ctaacaagtgctccttctat

SEQ ID NO: 7099 - RNA, 20 nt, synthetic construct
  misc_feature 1..20: note = antisense sequence
  source 1..20: mol_type = other RNA
gctaacaagtgctccttcta

SEQ ID NO: 7100 - RNA, 20 nt, synthetic construct
  misc_feature 1..20: note = antisense sequence
  source 1..20: mol_type = other RNA
ggctaacaagtgctccttct

SEQ ID NO: 7101 - RNA, 20 nt, synthetic construct
  misc_feature 1..20: note = antisense sequence
  source 1..20: mol_type = other RNA
atgggctaacaagtgctcct

SEQ ID NO: 7102 - RNA, 20 nt, synthetic construct
  misc_feature 1..20: note = antisense sequence
  source 1..20: mol_type = other RNA
catgggctaacaagtgctcc

SEQ ID NO: 7103 - RNA, 20 nt, synthetic construct
  misc_feature 1..20: note = antisense sequence
  source 1..20: mol_type = other RNA
tcatgggctaacaagtgctc

SEQ ID NO: 7104 - RNA, 20 nt, synthetic construct
  misc_feature 1..20: note = antisense sequence
  source 1..20: mol_type = other RNA
gtcatgggctaacaagtgct

SEQ ID NO: 7105 - RNA, 20 nt, synthetic construct
  misc_feature 1..20: note = antisense sequence
  source 1..20: mol_type = other RNA
tgtcatgggctaacaagtgc

SEQ ID NO: 7106 - RNA, 20 nt, synthetic construct
  misc_feature 1..20: note = antisense sequence
  source 1..20: mol_type = other RNA
gtacttgtcatgggctaaca

SEQ ID NO: 7107 - RNA, 20 nt, synthetic construct
  misc_feature 1..20: note = antisense sequence
  source 1..20: mol_type = other RNA
tgtacttgtcatgggctaac

SEQ ID NO: 7108 - RNA, 20 nt, synthetic construct
  misc_feature 1..20: note = antisense sequence
  source 1..20: mol_type = other RNA
ctgtacttgtcatgggctaa

SEQ ID NO: 7109 - RNA, 20 nt, synthetic construct
  misc_feature 1..20: note = antisense sequence
  source 1..20: mol_type = other RNA
actgtacttgtcatgggcta

SEQ ID NO: 7110 - RNA, 20 nt, synthetic construct
  misc_feature 1..20: note = antisense sequence
  source 1..20: mol_type = other RNA
cagactgtacttgtcatggg

SEQ ID NO: 7111 - RNA, 20 nt, synthetic construct
  misc_feature 1..20: note = antisense sequence
  source 1..20: mol_type = other RNA
acagactgtacttgtcatgg

SEQ ID NO: 7112 - RNA, 20 nt, synthetic construct
  misc_feature 1..20: note = antisense sequence
  source 1..20: mol_type = other RNA
aggctaccttttctgtcaac

SEQ ID NO: 7113 - RNA, 20 nt, synthetic construct
  misc_feature 1..20: note = antisense sequence
  source 1..20: mol_type = other RNA
aagaggacataaggctacct

SEQ ID NO: 7114 - RNA, 20 nt, synthetic construct
  misc_feature 1..20: note = antisense sequence
  source 1..20: mol_type = other RNA
aaagaggacataaggctacc

SEQ ID NO: 7115 - RNA, 20 nt, synthetic construct
  misc_feature 1..20: note = antisense sequence
  source 1..20: mol_type = other RNA
taaagaggacataaggctac

SEQ ID NO: 7116 - RNA, 20 nt, synthetic construct
  misc_feature 1..20: note = antisense sequence
  source 1..20: mol_type = other RNA
gtaaagaggacataaggcta

SEQ ID NO: 7117 - RNA, 20 nt, synthetic construct
  misc_feature 1..20: note = antisense sequence
  source 1..20: mol_type = other RNA
acagtaaagaggacataagg

SEQ ID NO: 7118 - RNA, 20 nt, synthetic construct
  misc_feature 1..20: note = antisense sequence
  source 1..20: mol_type = other RNA
ctgaacagtaaagaggacat

SEQ ID NO: 7119 - RNA, 20 nt, synthetic construct
  misc_feature 1..20: note = antisense sequence
  source 1..20: mol_type = other RNA
tctgaacagtaaagaggaca

SEQ ID NO: 7120 - RNA, 20 nt, synthetic construct
  misc_feature 1..20: note = antisense sequence
  source 1..20: mol_type = other RNA
acttctgaacagtaaagagg

SEQ ID NO: 7121 - RNA, 20 nt, synthetic construct
  misc_feature 1..20: note = antisense sequence
  source 1..20: mol_type = other RNA
gagcaaacttctgaacagta

SEQ ID NO: 7122 - RNA, 20 nt, synthetic construct
  misc_feature 1..20: note = antisense sequence
  source 1..20: mol_type = other RNA
acacttcagagcaaacttct

SEQ ID NO: 7123 - RNA, 20 nt, synthetic construct
  misc_feature 1..20: note = antisense sequence
  source 1..20: mol_type = other RNA
ccagctcatgctaaacataa

SEQ ID NO: 7124 - RNA, 20 nt, synthetic construct
  misc_feature 1..20: note = antisense sequence
  source 1..20: mol_type = other RNA
tccagctcatgctaaacata

SEQ ID NO: 7125 - RNA, 20 nt, synthetic construct
  misc_feature 1..20: note = antisense sequence
  source 1..20: mol_type = other RNA
ctccagctcatgctaaacat

SEQ ID NO: 7126 - RNA, 20 nt, synthetic construct
  misc_feature 1..20: note = antisense sequence
  source 1..20: mol_type = other RNA
gctccagctcatgctaaaca

SEQ ID NO: 7127 - RNA, 20 nt, synthetic construct
  misc_feature 1..20: note = antisense sequence
  source 1..20: mol_type = other RNA
tgcaattacttggatgctcc

SEQ ID NO: 7128 - RNA, 20 nt, synthetic construct
  misc_feature 1..20: note = antisense sequence
  source 1..20: mol_type = other RNA
attcttctgaaccacattgc

SEQ ID NO: 7129 - RNA, 20 nt, synthetic construct
  misc_feature 1..20: note = antisense sequence
  source 1..20: mol_type = other RNA
aggcttgtgctgtgctgagc

SEQ ID NO: 7130 - RNA, 20 nt, synthetic construct
  misc_feature 1..20: note = antisense sequence
  source 1..20: mol_type = other RNA
gaaggcttgtgctgtgctga

SEQ ID NO: 7131 - RNA, 20 nt, synthetic construct
  misc_feature 1..20: note = antisense sequence
  source 1..20: mol_type = other RNA
ggaaggcttgtgctgtgctg

SEQ ID NO: 7132 - RNA, 20 nt, synthetic construct
  misc_feature 1..20: note = antisense sequence
  source 1..20: mol_type = other RNA
tggaaggcttgtgctgtgct

SEQ ID NO: 7133 - RNA, 20 nt, synthetic construct
  misc_feature 1..20: note = antisense sequence
  source 1..20: mol_type = other RNA
ctggaaggcttgtgctgtgc

SEQ ID NO: 7134 - RNA, 20 nt, synthetic construct
  misc_feature 1..20: note = antisense sequence
  source 1..20: mol_type = other RNA
cactaaatctggaaatctgg

SEQ ID NO: 7135 - RNA, 20 nt, synthetic construct
  misc_feature 1..20: note = antisense sequence
  source 1..20: mol_type = other RNA
ccactaaatctggaaatctg

SEQ ID NO: 7136 - RNA, 20 nt, synthetic construct
  misc_feature 1..20: note = antisense sequence
  source 1..20: mol_type = other RNA
gccatgctgatgtttaccac

SEQ ID NO: 7137 - RNA, 20 nt, synthetic construct
  misc_feature 1..20: note = antisense sequence
  source 1..20: mol_type = other RNA
ttcccgttcggctgagacct

SEQ ID NO: 7138 - RNA, 20 nt, synthetic construct
  misc_feature 1..20: note = antisense sequence
  source 1..20: mol_type = other RNA
tttcccgttcggctgagacc

SEQ ID NO: 7139 - RNA, 20 nt, synthetic construct
  misc_feature 1..20: note = antisense sequence
  source 1..20: mol_type = other RNA
ttttcccgttcggctgagac

SEQ ID NO: 7140 - RNA, 20 nt, synthetic construct
  misc_feature 1..20: note = antisense sequence
  source 1..20: mol_type = other RNA
attttcccgttcggctgaga

SEQ ID NO: 7141 - RNA, 20 nt, synthetic construct
  misc_feature 1..20: note = antisense sequence
  source 1..20: mol_type = other RNA
cattttcccgttcggctgag

SEQ ID NO: 7142 - RNA, 20 nt, synthetic construct
  misc_feature 1..20: note = antisense sequence
  source 1..20: mol_type = other RNA
acattttcccgttcggctga

SEQ ID NO: 7143 - RNA, 20 nt, synthetic construct
  misc_feature 1..20: note = antisense sequence
  source 1..20: mol_type = other RNA
cacattttcccgttcggctg

SEQ ID NO: 7144 - RNA, 20 nt, synthetic construct
  misc_feature 1..20: note = antisense sequence
  source 1..20: mol_type = other RNA
tcacattttcccgttcggct

SEQ ID NO: 7145 - RNA, 20 nt, synthetic construct
  misc_feature 1..20: note = antisense sequence
  source 1..20: mol_type = other RNA
ctcacattttcccgttcggc

SEQ ID NO: 7146 - RNA, 20 nt, synthetic construct
  misc_feature 1..20: note = antisense sequence
  source 1..20: mol_type = other RNA
tctcacattttcccgttcgg

SEQ ID NO: 7147 - RNA, 20 nt, synthetic construct
  misc_feature 1..20: note = antisense sequence
  source 1..20: mol_type = other RNA
atctcacattttcccgttcg

SEQ ID NO: 7148 - RNA, 20 nt, synthetic construct
  misc_feature 1..20: note = antisense sequence
  source 1..20: mol_type = other RNA
acatctcacattttcccgtt

SEQ ID NO: 7149 - RNA, 20 nt, synthetic construct
  misc_feature 1..20: note = antisense sequence
  source 1..20: mol_type = other RNA
gacatctcacattttcccgt

SEQ ID NO: 7150 - RNA, 20 nt, synthetic construct
  misc_feature 1..20: note = antisense sequence
  source 1..20: mol_type = other RNA
agacatctcacattttcccg

SEQ ID NO: 7151 - RNA, 20 nt, synthetic construct
  misc_feature 1..20: note = antisense sequence
  source 1..20: mol_type = other RNA
acagattagagtggaaagcc

SEQ ID NO: 7152 - RNA, 20 nt, synthetic construct
  misc_feature 1..20: note = antisense sequence
  source 1..20: mol_type = other RNA
aacagattagagtggaaagc

SEQ ID NO: 7153 - RNA, 20 nt, synthetic construct
  misc_feature 1..20: note = antisense sequence
  source 1..20: mol_type = other RNA
caacagattagagtggaaag

SEQ ID NO: 7154 - RNA, 20 nt, synthetic construct
  misc_feature 1..20: note = antisense sequence
  source 1..20: mol_type = other RNA
catgctggaaggaatgaagc

SEQ ID NO: 7155 - RNA, 20 nt, synthetic construct
  misc_feature 1..20: note = antisense sequence
  source 1..20: mol_type = other RNA
acatgctggaaggaatgaag

SEQ ID NO: 7156 - RNA, 20 nt, synthetic construct
  misc_feature 1..20: note = antisense sequence
  source 1..20: mol_type = other RNA
ggcacacatgctggaaggaa

SEQ ID NO: 7157 - RNA, 20 nt, synthetic construct
  misc_feature 1..20: note = antisense sequence
  source 1..20: mol_type = other RNA
aggcacacatgctggaagga

SEQ ID NO: 7158 - RNA, 20 nt, synthetic construct
  misc_feature 1..20: note = antisense sequence
  source 1..20: mol_type = other RNA
gggtaggcacacatgctgga

SEQ ID NO: 7159 - RNA, 20 nt, synthetic construct
  misc_feature 1..20: note = antisense sequence
  source 1..20: mol_type = other RNA
aagggtaggcacacatgctg

SEQ ID NO: 7160 - RNA, 20 nt, synthetic construct
  misc_feature 1..20: note = antisense sequence
  source 1..20: mol_type = other RNA
ttaaaagggtaggcacacat

SEQ ID NO: 7161 - RNA, 20 nt, synthetic construct
  misc_feature 1..20: note = antisense sequence
  source 1..20: mol_type = other RNA
gttaaaagggtaggcacaca

SEQ ID NO: 7162 - RNA, 20 nt, synthetic construct
  misc_feature 1..20: note = antisense sequence
  source 1..20: mol_type = other RNA
agttaaaagggtaggcacac

SEQ ID NO: 7163 - RNA, 20 nt, synthetic construct
  misc_feature 1..20: note = antisense sequence
  source 1..20: mol_type = other RNA
cagttaaaagggtaggcaca

SEQ ID NO: 7164 - RNA, 20 nt, synthetic construct
  misc_feature 1..20: note = antisense sequence
  source 1..20: mol_type = other RNA
ggcagttaaaagggtaggca

SEQ ID NO: 7165 - RNA, 20 nt, synthetic construct
  misc_feature 1..20: note = antisense sequence
  source 1..20: mol_type = other RNA
gggcagttaaaagggtaggc

SEQ ID NO: 7166 - RNA, 20 nt, synthetic construct
  misc_feature 1..20: note = antisense sequence
  source 1..20: mol_type = other RNA
gcttgaagggcagttaaaag

SEQ ID NO: 7167 - RNA, 20 nt, synthetic construct
  misc_feature 1..20: note = antisense sequence
  source 1..20: mol_type = other RNA
gatcagacaggtccagtgaa

SEQ ID NO: 7168 - RNA, 20 nt, synthetic construct
  misc_feature 1..20: note = antisense sequence
  source 1..20: mol_type = other RNA
agatcagacaggtccagtga

SEQ ID NO: 7169 - RNA, 20 nt, synthetic construct
  misc_feature 1..20: note = antisense sequence
  source 1..20: mol_type = other RNA
gagatcagacaggtccagtg

SEQ ID NO: 7170 - RNA, 20 nt, synthetic construct
  misc_feature 1..20: note = antisense sequence
  source 1..20: mol_type = other RNA
tgagatcagacaggtccagt

SEQ ID NO: 7171 - RNA, 20 nt, synthetic construct
  misc_feature 1..20: note = antisense sequence
  source 1..20: mol_type = other RNA
ctactttgagatcagacagg

SEQ ID NO: 7172 - RNA, 20 nt, synthetic construct
  misc_feature 1..20: note = antisense sequence
  source 1..20: mol_type = other RNA
tctactttgagatcagacag

SEQ ID NO: 7173 - RNA, 20 nt, synthetic construct
  misc_feature 1..20: note = antisense sequence
  source 1..20: mol_type = other RNA
aaggttggcaagggtggatc

SEQ ID NO: 7174 - RNA, 20 nt, synthetic construct
  misc_feature 1..20: note = antisense sequence
  source 1..20: mol_type = other RNA
gaaggttggcaagggtggat

SEQ ID NO: 7175 - RNA, 20 nt, synthetic construct
  misc_feature 1..20: note = antisense sequence
  source 1..20: mol_type = other RNA
tgaaggttggcaagggtgga

SEQ ID NO: 7176 - RNA, 20 nt, synthetic construct
  misc_feature 1..20: note = antisense sequence
  source 1..20: mol_type = other RNA
acattggcttgaaggttggc

SEQ ID NO: 7177 - RNA, 20 nt, synthetic construct
  misc_feature 1..20: note = antisense sequence
  source 1..20: mol_type = other RNA
gaaaaggcatgaagtcaaga

SEQ ID NO: 7178 - RNA, 20 nt, synthetic construct
  misc_feature 1..20: note = antisense sequence
  source 1..20: mol_type = other RNA
tagagaaaaggcatgaagtc

SEQ ID NO: 7179 - RNA, 20 nt, synthetic construct
  misc_feature 1..20: note = antisense sequence
  source 1..20: mol_type = other RNA
cctgacctggcataaagcag

SEQ ID NO: 7180 - RNA, 20 nt, synthetic construct
  misc_feature 1..20: note = antisense sequence
  source 1..20: mol_type = other RNA
ccctgacctggcataaagca

SEQ ID NO: 7181 - RNA, 20 nt, synthetic construct
  misc_feature 1..20: note = antisense sequence
  source 1..20: mol_type = other RNA
tcacatgagcccattggtac

SEQ ID NO: 7182 - RNA, 20 nt, synthetic construct
  misc_feature 1..20: note = antisense sequence
  source 1..20: mol_type = other RNA
gggcatcaatcacatgagcc

SEQ ID NO: 7183 - RNA, 20 nt, synthetic construct
  misc_feature 1..20: note = antisense sequence
  source 1..20: mol_type = other RNA
agggcatcaatcacatgagc

SEQ ID NO: 7184 - RNA, 20 nt, synthetic construct
  misc_feature 1..20: note = antisense sequence
  source 1..20: mol_type = other RNA
tagggcatcaatcacatgag

SEQ ID NO: 7185 - RNA, 20 nt, synthetic construct
  misc_feature 1..20: note = antisense sequence
  source 1..20: mol_type = other RNA
atagggcatcaatcacatga

SEQ ID NO: 7186 - RNA, 20 nt, synthetic construct
  misc_feature 1..20: note = antisense sequence
  source 1..20: mol_type = other RNA
aatagggcatcaatcacatg

SEQ ID NO: 7187 - RNA, 20 nt, synthetic construct
  misc_feature 1..20: note = antisense sequence
  source 1..20: mol_type = other RNA
gaaatagggcatcaatcaca

SEQ ID NO: 7188 - RNA, 20 nt, synthetic construct
  misc_feature 1..20: note = antisense sequence
  source 1..20: mol_type = other RNA
ttggaaatagggcatcaatc

SEQ ID NO: 7189 - RNA, 20 nt, synthetic construct
  misc_feature 1..20: note = antisense sequence
  source 1..20: mol_type = other RNA
ctacattagcagggattctt

SEQ ID NO: 7190 - RNA, 20 nt, synthetic construct
  misc_feature 1..20: note = antisense sequence
  source 1..20: mol_type = other RNA
ctctacattagcagggattc

SEQ ID NO: 7191 - RNA, 20 nt, synthetic construct
  misc_feature 1..20: note = antisense sequence
  source 1..20: mol_type = other RNA
tagctctacattagcaggga

SEQ ID NO: 7192 - RNA, 20 nt, synthetic construct
  misc_feature 1..20: note = antisense sequence
  source 1..20: mol_type = other RNA
atagctctacattagcaggg

SEQ ID NO: 7193 - RNA, 20 nt, synthetic construct
  misc_feature 1..20: note = antisense sequence
  source 1..20: mol_type = other RNA
aatagctctacattagcagg

SEQ ID NO: 7194 - RNA, 20 nt, synthetic construct
  misc_feature 1..20: note = antisense sequence
  source 1..20: mol_type = other RNA
ggaatagctctacattagca

SEQ ID NO: 7195 - RNA, 20 nt, synthetic construct
  misc_feature 1..20: note = antisense sequence
  source 1..20: mol_type = other RNA
tggaatagctctacattagc

SEQ ID NO: 7196 - RNA, 20 nt, synthetic construct
  misc_feature 1..20: note = antisense sequence
  source 1..20: mol_type = other RNA
gtctggaatagctctacatt

SEQ ID NO: 7197 - RNA, 20 nt, synthetic construct
  misc_feature 1..20: note = antisense sequence
  source 1..20: mol_type = other RNA
ggcgttagaagcaatgtaaa

SEQ ID NO: 7198 - RNA, 20 nt, synthetic construct
  misc_feature 1..20: note = antisense sequence
  source 1..20: mol_type = other RNA
aggcgttagaagcaatgtaa

SEQ ID NO: 7199 - RNA, 20 nt, synthetic construct
  misc_feature 1..20: note = antisense sequence
  source 1..20: mol_type = other RNA
aaggcgttagaagcaatgta

SEQ ID NO: 7200 - RNA, 20 nt, synthetic construct
  misc_feature 1..20: note = antisense sequence
  source 1..20: mol_type = other RNA
aaaggcgttagaagcaatgt

SEQ ID NO: 7201 - RNA, 20 nt, synthetic construct
  misc_feature 1..20: note = antisense sequence
  source 1..20: mol_type = other RNA
aaaaggcgttagaagcaatg

SEQ ID NO: 7202 - RNA, 20 nt, synthetic construct
  misc_feature 1..20: note = antisense sequence
  source 1..20: mol_type = other RNA
caaaaggcgttagaagcaat

SEQ ID NO: 7203 - RNA, 20 nt, synthetic construct
  misc_feature 1..20: note = antisense sequence
  source 1..20: mol_type = other RNA
tcaaaaggcgttagaagcaa

SEQ ID NO: 7204 - RNA, 20 nt, synthetic construct
  misc_feature 1..20: note = antisense sequence
  source 1..20: mol_type = other RNA
ttcaaaaggcgttagaagca

SEQ ID NO: 7205 - RNA, 20 nt, synthetic construct
  misc_feature 1..20: note = antisense sequence
  source 1..20: mol_type = other RNA
caagtttggcaatgaggaaa

SEQ ID NO: 7206 - RNA, 20 nt, synthetic construct
  misc_feature 1..20: note = antisense sequence
  source 1..20: mol_type = other RNA
gacaagtttggcaatgagga

SEQ ID NO: 7207 - RNA, 20 nt, synthetic construct
  misc_feature 1..20: note = antisense sequence
  source 1..20: mol_type = other RNA
tgacaagtttggcaatgagg

SEQ ID NO: 7208 - RNA, 20 nt, synthetic construct
  misc_feature 1..20: note = antisense sequence
  source 1..20: mol_type = other RNA
atgacaagtttggcaatgag

SEQ ID NO: 7209 - RNA, 20 nt, synthetic construct
  misc_feature 1..20: note = antisense sequence
  source 1..20: mol_type = other RNA
tgctcataaaaggtggaggg

SEQ ID NO: 7210 - RNA, 20 nt, synthetic construct
  misc_feature 1..20: note = antisense sequence
  source 1..20: mol_type = other RNA
ttgctcataaaaggtggagg

SEQ ID NO: 7211 - RNA, 20 nt, synthetic construct
  misc_feature 1..20: note = antisense sequence
  source 1..20: mol_type = other RNA
acttacacagtgacccatta

SEQ ID NO: 7212 - RNA, 20 nt, synthetic construct
  misc_feature 1..20: note = antisense sequence
  source 1..20: mol_type = other RNA
aaacttacacagtgacccat

SEQ ID NO: 7213 - RNA, 20 nt, synthetic construct
  misc_feature 1..20: note = antisense sequence
  source 1..20: mol_type = other RNA
atgaaacttacacagtgacc

SEQ ID NO: 7214 - RNA, 20 nt, synthetic construct
  misc_feature 1..20: note = antisense sequence
  source 1..20: mol_type = other RNA
tctgctcgccaatttctttt

SEQ ID NO: 7215 - RNA, 20 nt, synthetic construct
  misc_feature 1..20: note = antisense sequence
  source 1..20: mol_type = other RNA
ttctgctcgccaatttcttt

SEQ ID NO: 7216 - RNA, 20 nt, synthetic construct
  misc_feature 1..20: note = antisense sequence
  source 1..20: mol_type = other RNA
attctgctcgccaatttctt

SEQ ID NO: 7217 - RNA, 20 nt, synthetic construct
  misc_feature 1..20: note = antisense sequence
  source 1..20: mol_type = other RNA
tcagagtgccaagcaaattc

SEQ ID NO: 7218 - RNA, 20 nt, synthetic construct
  misc_feature 1..20: note = antisense sequence
  source 1..20: mol_type = other RNA
ctcagagtgccaagcaaatt

SEQ ID NO: 7219 - RNA, 20 nt, synthetic construct
  misc_feature 1..20: note = antisense sequence
  source 1..20: mol_type = other RNA
ctctcagagtgccaagcaaa

SEQ ID NO: 7220 - RNA, 20 nt, synthetic construct
  misc_feature 1..20: note = antisense sequence
  source 1..20: mol_type = other RNA
ctgccttgatgtctaataca

SEQ ID NO: 7221 - RNA, 20 nt, synthetic construct
  misc_feature 1..20: note = antisense sequence
  source 1..20: mol_type = other RNA
tctgccttgatgtctaatac

SEQ ID NO: 7222 - RNA, 20 nt, synthetic construct
  misc_feature 1..20: note = antisense sequence
  source 1..20: mol_type = other RNA
ctctgccttgatgtctaata

SEQ ID NO: 7223 - RNA, 20 nt, synthetic construct
  misc_feature 1..20: note = antisense sequence
  source 1..20: mol_type = other RNA
actctgccttgatgtctaat

SEQ ID NO: 7224 - RNA, 20 nt, synthetic construct
  misc_feature 1..20: note = antisense sequence
  source 1..20: mol_type = other RNA
aactctgccttgatgtctaa

SEQ ID NO: 7225 - RNA, 20 nt, synthetic construct
  misc_feature 1..20: note = antisense sequence
  source 1..20: mol_type = other RNA
taactctgccttgatgtcta

SEQ ID NO: 7226 - RNA, 20 nt, synthetic construct
  misc_feature 1..20: note = antisense sequence
  source 1..20: mol_type = other RNA
aactaactctgccttgatgt

SEQ ID NO: 7227 - RNA, 20 nt, synthetic construct
  misc_feature 1..20: note = antisense sequence
  source 1..20: mol_type = other RNA
caactaactctgccttgatg

SEQ ID NO: 7228 - RNA, 20 nt, synthetic construct
  misc_feature 1..20: note = antisense sequence
  source 1..20: mol_type = other RNA
tttcaactaactctgccttg

SEQ ID NO: 7229 - RNA, 20 nt, synthetic construct
  misc_feature 1..20: note = antisense sequence
  source 1..20: mol_type = other RNA
cttttcaactaactctgcct

SEQ ID NO: 7230 - RNA, 20 nt, synthetic construct
  misc_feature 1..20: note = antisense sequence
  source 1..20: mol_type = other RNA
ccctgcaaaagatagtttct

SEQ ID NO: 7231 - RNA, 20 nt, synthetic construct
  misc_feature 1..20: note = antisense sequence
  source 1..20: mol_type = other RNA
ggtgtctgatgtctctgttt

SEQ ID NO: 7232 - RNA, 20 nt, synthetic construct
  misc_feature 1..20: note = antisense sequence
  source 1..20: mol_type = other RNA
gtaggtggtgtctgatgtct

SEQ ID NO: 7233 - RNA, 20 nt, synthetic construct
  misc_feature 1..20: note = antisense sequence
  source 1..20: mol_type = other RNA
agtaggtggtgtctgatgtc

SEQ ID NO: 7234 - RNA, 20 nt, synthetic construct
  misc_feature 1..20: note = antisense sequence
  source 1..20: mol_type = other RNA
gagtaggtggtgtctgatgt

SEQ ID NO: 7235 - RNA, 20 nt, synthetic construct
  misc_feature 1..20: note = antisense sequence
  source 1..20: mol_type = other RNA
aagagtaggtggtgtctgat

SEQ ID NO: 7236 - RNA, 20 nt, synthetic construct
  misc_feature 1..20: note = antisense sequence
  source 1..20: mol_type = other RNA
tgaagagtaggtggtgtctg

SEQ ID NO: 7237 - RNA, 20 nt, synthetic construct
  misc_feature 1..20: note = antisense sequence
  source 1..20: mol_type = other RNA
tttgaagagtaggtggtgtc

SEQ ID NO: 7238 - RNA, 20 nt, synthetic construct
  misc_feature 1..20: note = antisense sequence
  source 1..20: mol_type = other RNA
atttgaagagtaggtggtgt

SEQ ID NO: 7239 - RNA, 20 nt, synthetic construct
  misc_feature 1..20: note = antisense sequence
  source 1..20: mol_type = other RNA
tatttgaagagtaggtggtg

SEQ ID NO: 7240 - RNA, 20 nt, synthetic construct
  misc_feature 1..20: note = antisense sequence
  source 1..20: mol_type = other RNA
catcaaagtgagagaaacac

SEQ ID NO: 7241 - RNA, 20 nt, synthetic construct
  misc_feature 1..20: note = antisense sequence
  source 1..20: mol_type = other RNA
aggatcatcaaagtgagaga

SEQ ID NO: 7242 - RNA, 20 nt, synthetic construct
  misc_feature 1..20: note = antisense sequence
  source 1..20: mol_type = other RNA
caaggatcatcaaagtgaga

SEQ ID NO: 7243 - RNA, 20 nt, synthetic construct
  misc_feature 1..20: note = antisense sequence
  source 1..20: mol_type = other RNA
ctcaaggatcatcaaagtga

SEQ ID NO: 7244 - RNA, 20 nt, synthetic construct
  misc_feature 1..20: note = antisense sequence
  source 1..20: mol_type = other RNA
actcaaggatcatcaaagtg

SEQ ID NO: 7245 - RNA, 20 nt, synthetic construct
  misc_feature 1..20: note = antisense sequence
  source 1..20: mol_type = other RNA
cgttactcatttctggagaa

SEQ ID NO: 7246 - RNA, 20 nt, synthetic construct
  misc_feature 1..20: note = antisense sequence
  source 1..20: mol_type = other RNA
atcgttactcatttctggag

SEQ ID NO: 7247 - RNA, 20 nt, synthetic construct
  misc_feature 1..20: note = antisense sequence
  source 1..20: mol_type = other RNA
tgcagactgagaagatcaaa

SEQ ID NO: 7248 - RNA, 20 nt, synthetic construct
  misc_feature 1..20: note = antisense sequence
  source 1..20: mol_type = other RNA
tatgcagactgagaagatca

SEQ ID NO: 7249 - RNA, 20 nt, synthetic construct
  misc_feature 1..20: note = antisense sequence
  source 1..20: mol_type = other RNA
gtatgcagactgagaagatc

SEQ ID NO: 7250 - RNA, 20 nt, synthetic construct
  misc_feature 1..20: note = antisense sequence
  source 1..20: mol_type = other RNA
tgtatgcagactgagaagat

SEQ ID NO: 7251 - RNA, 20 nt, synthetic construct
  misc_feature 1..20: note = antisense sequence
  source 1..20: mol_type = other RNA
tgacctgtatgcagactgag

SEQ ID NO: 7252 - RNA, 20 nt, synthetic construct
  misc_feature 1..20: note = antisense sequence
  source 1..20: mol_type = other RNA
atgacctgtatgcagactga

SEQ ID NO: 7253 - RNA, 20 nt, synthetic construct
  misc_feature 1..20: note = antisense sequence
  source 1..20: mol_type = other RNA
taatgacctgtatgcagact

SEQ ID NO: 7254 - RNA, 20 nt, synthetic construct
  misc_feature 1..20: note = antisense sequence
  source 1..20: mol_type = other RNA
gtaatgacctgtatgcagac

SEQ ID NO: 7255 - RNA, 20 nt, synthetic construct
  misc_feature 1..20: note = antisense sequence
  source 1..20: mol_type = other RNA
tgtaatgacctgtatgcaga

SEQ ID NO: 7256 - RNA, 20 nt, synthetic construct
  misc_feature 1..20: note = antisense sequence
  source 1..20: mol_type = other RNA
ttgtaatgacctgtatgcag

SEQ ID NO: 7257 - RNA, 20 nt, synthetic construct
  misc_feature 1..20: note = antisense sequence
  source 1..20: mol_type = other RNA
cccaggcacattgttttata

SEQ ID NO: 7258 - RNA, 20 nt, synthetic construct
  misc_feature 1..20: note = antisense sequence
  source 1..20: mol_type = other RNA
gcccaggcacattgttttat

SEQ ID NO: 7259 - RNA, 20 nt, synthetic construct
  misc_feature 1..20: note = antisense sequence
  source 1..20: mol_type = other RNA
ggcccaggcacattgtttta

SEQ ID NO: 7260 - RNA, 20 nt, synthetic construct
  misc_feature 1..20: note = antisense sequence
  source 1..20: mol_type = other RNA
aggcccaggcacattgtttt

SEQ ID NO: 7261 - RNA, 20 nt, synthetic construct
  misc_feature 1..20: note = antisense sequence
  source 1..20: mol_type = other RNA
aaggcccaggcacattgttt

SEQ ID NO: 7262 - RNA, 20 nt, synthetic construct
  misc_feature 1..20: note = antisense sequence
  source 1..20: mol_type = other RNA
gaaggcccaggcacattgtt

SEQ ID NO: 7263 - RNA, 20 nt, synthetic construct
  misc_feature 1..20: note = antisense sequence
  source 1..20: mol_type = other RNA
cacagggtcaaggtgaaggc

SEQ ID NO: 7264 - RNA, 20 nt, synthetic construct
  misc_feature 1..20: note = antisense sequence
  source 1..20: mol_type = other RNA
ccacagggtcaaggtgaagg

SEQ ID NO: 7265 - RNA, 20 nt, synthetic construct
  misc_feature 1..20: note = antisense sequence
  source 1..20: mol_type = other RNA
cccacagggtcaaggtgaag

SEQ ID NO: 7266 - RNA, 20 nt, synthetic construct
  misc_feature 1..20: note = antisense sequence
  source 1..20: mol_type = other RNA
acctttggacattcattctc

SEQ ID NO: 7267 - RNA, 20 nt, synthetic construct
  misc_feature 1..20: note = antisense sequence
  source 1..20: mol_type = other RNA
cctgtgacatacttgctata

SEQ ID NO: 7268 - RNA, 20 nt, synthetic construct
  misc_feature 1..20: note = antisense sequence
  source 1..20: mol_type = other RNA
ccctgtgacatacttgctat

SEQ ID NO: 7269 - RNA, 20 nt, synthetic construct
  misc_feature 1..20: note = antisense sequence
  source 1..20: mol_type = other RNA
accctgtgacatacttgcta

SEQ ID NO: 7270 - RNA, 20 nt, synthetic construct
  misc_feature 1..20: note = antisense sequence
  source 1..20: mol_type = other RNA
gaccctgtgacatacttgct

SEQ ID NO: 7271 - RNA, 20 nt, synthetic construct
  misc_feature 1..20: note = antisense sequence
  source 1..20: mol_type = other RNA
tgaccctgtgacatacttgc

SEQ ID NO: 7272 - RNA, 20 nt, synthetic construct
  misc_feature 1..20: note = antisense sequence
  source 1..20: mol_type = other RNA
ctgaccctgtgacatacttg

SEQ ID NO: 7273 - RNA, 20 nt, synthetic construct
  misc_feature 1..20: note = antisense sequence
  source 1..20: mol_type = other RNA
cctgaccctgtgacatactt

SEQ ID NO: 7274 - RNA, 20 nt, synthetic construct
  misc_feature 1..20: note = antisense sequence
  source 1..20: mol_type = other RNA
tcctgaccctgtgacatact

SEQ ID NO: 7275 - RNA, 20 nt, synthetic construct
  misc_feature 1..20: note = antisense sequence
  source 1..20: mol_type = other RNA
atcctgaccctgtgacatac

SEQ ID NO: 7276 - RNA, 20 nt, synthetic construct
  misc_feature 1..20: note = antisense sequence
  source 1..20: mol_type = other RNA
catatcctgaccctgtgaca

SEQ ID NO: 7277 - RNA, 20 nt, synthetic construct
  misc_feature 1..20: note = antisense sequence
  source 1..20: mol_type = other RNA
tccatatcctgaccctgtga

SEQ ID NO: 7278 - RNA, 20 nt, synthetic construct
  misc_feature 1..20: note = antisense sequence
  source 1..20: mol_type = other RNA
ttccatatcctgaccctgtg

SEQ ID NO: 7279 - RNA, 20 nt, synthetic construct
  misc_feature 1..20: note = antisense sequence
  source 1..20: mol_type = other RNA
gttccatatcctgaccctgt

SEQ ID NO: 7280 - RNA, 20 nt, synthetic construct
  misc_feature 1..20: note = antisense sequence
  source 1..20: mol_type = other RNA
tgttccatatcctgaccctg

SEQ ID NO: 7281 - RNA, 20 nt, synthetic construct
  misc_feature 1..20: note = antisense sequence
  source 1..20: mol_type = other RNA
gtgttccatatcctgaccct

SEQ ID NO: 7282 - RNA, 20 nt, synthetic construct
  misc_feature 1..20: note = antisense sequence
  source 1..20: mol_type = other RNA
tggtgttccatatcctgacc

SEQ ID NO: 7283 - RNA, 20 nt, synthetic construct
  misc_feature 1..20: note = antisense sequence
  source 1..20: mol_type = other RNA
ctggtgttccatatcctgac

SEQ ID NO: 7284 - RNA, 20 nt, synthetic construct
  misc_feature 1..20: note = antisense sequence
  source 1..20: mol_type = other RNA
gctggtgttccatatcctga

SEQ ID NO: 7285 - RNA, 20 nt, synthetic construct
  misc_feature 1..20: note = antisense sequence
  source 1..20: mol_type = other RNA
aggctggtgttccatatcct

SEQ ID NO: 7286 - RNA, 20 nt, synthetic construct
  misc_feature 1..20: note = antisense sequence
  source 1..20: mol_type = other RNA
gaaggctggtgttccatatc

SEQ ID NO: 7287 - RNA, 20 nt, synthetic construct
  misc_feature 1..20: note = antisense sequence
  source 1..20: mol_type = other RNA
agaaggctggtgttccatat

SEQ ID NO: 7288 - RNA, 20 nt, synthetic construct
  misc_feature 1..20: note = antisense sequence
  source 1..20: mol_type = other RNA
ctagagaatccttgttgcta

SEQ ID NO: 7289 - RNA, 20 nt, synthetic construct
  misc_feature 1..20: note = antisense sequence
  source 1..20: mol_type = other RNA
agctagagaatccttgttgc

SEQ ID NO: 7290 - RNA, 20 nt, synthetic construct
  misc_feature 1..20: note = antisense sequence
  source 1..20: mol_type = other RNA
cagctagagaatccttgttg

SEQ ID NO: 7291 - RNA, 20 nt, synthetic construct
  misc_feature 1..20: note = antisense sequence
  source 1..20: mol_type = other RNA
acagctagagaatccttgtt

SEQ ID NO: 7292 - RNA, 20 nt, synthetic construct
  misc_feature 1..20: note = antisense sequence
  source 1..20: mol_type = other RNA
aacagctagagaatccttgt

SEQ ID NO: 7293 - RNA, 20 nt, synthetic construct
  misc_feature 1..20: note = antisense sequence
  source 1..20: mol_type = other RNA
aaacagctagagaatccttg

SEQ ID NO: 7294 - RNA, 20 nt, synthetic construct
  misc_feature 1..20: note = antisense sequence
  source 1..20: mol_type = other RNA
ggtcaaacagctagagaatc

SEQ ID NO: 7295 - RNA, 20 nt, synthetic construct
  misc_feature 1..20: note = antisense sequence
  source 1..20: mol_type = other RNA
tctccaggtcaaacagctag

SEQ ID NO: 7296 - RNA, 20 nt, synthetic construct
  misc_feature 1..20: note = antisense sequence
  source 1..20: mol_type = other RNA
ggcatttctccaggtcaaac

SEQ ID NO: 7297 - RNA, 20 nt, synthetic construct
  misc_feature 1..20: note = antisense sequence
  source 1..20: mol_type = other RNA
gaggcatttctccaggtcaa

SEQ ID NO: 7298 - RNA, 20 nt, synthetic construct
  misc_feature 1..20: note = antisense sequence
  source 1..20: mol_type = other RNA
accagaggcatttctccagg

SEQ ID NO: 7299 - RNA, 20 nt, synthetic construct
  misc_feature 1..20: note = antisense sequence
  source 1..20: mol_type = other RNA
tgacaccagaggcatttctc

SEQ ID NO: 7300 - RNA, 20 nt, synthetic construct
  misc_feature 1..20: note = antisense sequence
  source 1..20: mol_type = other RNA
cctttgagtgacaccagagg

SEQ ID NO: 7301 - RNA, 20 nt, synthetic construct
  misc_feature 1..20: note = antisense sequence
  source 1..20: mol_type = other RNA
tatacatgcctttgagtgac

SEQ ID NO: 7302 - RNA, 20 nt, synthetic construct
  misc_feature 1..20: note = antisense sequence
  source 1..20: mol_type = other RNA
ctatacatgcctttgagtga

SEQ ID NO: 7303 - RNA, 20 nt, synthetic construct
  misc_feature 1..20: note = antisense sequence
  source 1..20: mol_type = other RNA
gctatacatgcctttgagtg

SEQ ID NO: 7304 - RNA, 20 nt, synthetic construct
  misc_feature 1..20: note = antisense sequence
  source 1..20: mol_type = other RNA
tgctatacatgcctttgagt

SEQ ID NO: 7305 - RNA, 20 nt, synthetic construct
  misc_feature 1..20: note = antisense sequence
  source 1..20: mol_type = other RNA
atgctatacatgcctttgag

SEQ ID NO: 7306 - RNA, 20 nt, synthetic construct
  misc_feature 1..20: note = antisense sequence
  source 1..20: mol_type = other RNA
gatgctatacatgcctttga

SEQ ID NO: 7307 - RNA, 20 nt, synthetic construct
  misc_feature 1..20: note = antisense sequence
  source 1..20: mol_type = other RNA
ggatgctatacatgcctttg

SEQ ID NO: 7308 - RNA, 20 nt, synthetic construct
  misc_feature 1..20: note = antisense sequence
  source 1..20: mol_type = other RNA
gggatgctatacatgccttt

SEQ ID NO: 7309 - RNA, 20 nt, synthetic construct
  misc_feature 1..20: note = antisense sequence
  source 1..20: mol_type = other RNA
gtgggatgctatacatgcct

SEQ ID NO: 7310 - RNA, 20 nt, synthetic construct
  misc_feature 1..20: note = antisense sequence
  source 1..20: mol_type = other RNA
agtgggatgctatacatgcc

SEQ ID NO: 7311 - RNA, 20 nt, synthetic construct
  misc_feature 1..20: note = antisense sequence
  source 1..20: mol_type = other RNA
aagtgggatgctatacatgc

SEQ ID NO: 7312 - RNA, 20 nt, synthetic construct
  misc_feature 1..20: note = antisense sequence
  source 1..20: mol_type = other RNA
taagtgggatgctatacatg

SEQ ID NO: 7313 - RNA, 20 nt, synthetic construct
  misc_feature 1..20: note = antisense sequence
  source 1..20: mol_type = other RNA
ccaagaggtctggattgtaa

SEQ ID NO: 7314 - RNA, 20 nt, synthetic construct
  misc_feature 1..20: note = antisense sequence
  source 1..20: mol_type = other RNA
gccaagaggtctggattgta

SEQ ID NO: 7315 - RNA, 20 nt, synthetic construct
  misc_feature 1..20: note = antisense sequence
  source 1..20: mol_type = other RNA
agccaagaggtctggattgt

SEQ ID NO: 7316 - RNA, 20 nt, synthetic construct
  misc_feature 1..20: note = antisense sequence
  source 1..20: mol_type = other RNA
ttatgtgaccagccaagagg

SEQ ID NO: 7317 - RNA, 20 nt, synthetic construct
  misc_feature 1..20: note = antisense sequence
  source 1..20: mol_type = other RNA
atacttatgtgaccagccaa

SEQ ID NO: 7318 - RNA, 20 nt, synthetic construct
  misc_feature 1..20: note = antisense sequence
  source 1..20: mol_type = other RNA
ttatacttatgtgaccagcc

SEQ ID NO: 7319 - RNA, 20 nt, synthetic construct
  misc_feature 1..20: note = antisense sequence
  source 1..20: mol_type = other RNA
ggcagacctgagaatttata

SEQ ID NO: 7320 - RNA, 20 nt, synthetic construct
  misc_feature 1..20: note = antisense sequence
  source 1..20: mol_type = other RNA
aggcagacctgagaatttat

SEQ ID NO: 7321 - RNA, 20 nt, synthetic construct
  misc_feature 1..20: note = antisense sequence
  source 1..20: mol_type = other RNA
ataaggcagacctgagaatt

SEQ ID NO: 7322 - RNA, 20 nt, synthetic construct
  misc_feature 1..20: note = antisense sequence
  source 1..20: mol_type = other RNA
gaataaggcagacctgagaa

SEQ ID NO: 7323 - RNA, 20 nt, synthetic construct
  misc_feature 1..20: note = antisense sequence
  source 1..20: mol_type = other RNA
ttaacgactgtgtcaagtac

SEQ ID NO: 7324 - RNA, 20 nt, synthetic construct
  misc_feature 1..20: note = antisense sequence
  source 1..20: mol_type = other RNA
gaattaacgactgtgtcaag

SEQ ID NO: 7325 - RNA, 20 nt, synthetic construct
  misc_feature 1..20: note = antisense sequence
  source 1..20: mol_type = other RNA
ccaagcacaaaataggcatt

SEQ ID NO: 7326 - RNA, 20 nt, synthetic construct
  misc_feature 1..20: note = antisense sequence
  source 1..20: mol_type = other RNA
accaagcacaaaataggcat

SEQ ID NO: 7327 - RNA, 20 nt, synthetic construct
  misc_feature 1..20: note = antisense sequence
  source 1..20: mol_type = other RNA
acatccttagtgctcatact

SEQ ID NO: 7328 - RNA, 20 nt, synthetic construct
  misc_feature 1..20: note = antisense sequence
  source 1..20: mol_type = other RNA
cacatccttagtgctcatac

SEQ ID NO: 7329 - RNA, 20 nt, synthetic construct
  misc_feature 1..20: note = antisense sequence
  source 1..20: mol_type = other RNA
acacatccttagtgctcata

SEQ ID NO: 7330 - RNA, 20 nt, synthetic construct
  misc_feature 1..20: note = antisense sequence
  source 1..20: mol_type = other RNA
aacacatccttagtgctcat

SEQ ID NO: 7331 - RNA, 20 nt, synthetic construct
  misc_feature 1..20: note = antisense sequence
  source 1..20: mol_type = other RNA
aaacacatccttagtgctca

SEQ ID NO: 7332 - RNA, 20 nt, synthetic construct
  misc_feature 1..20: note = antisense sequence
  source 1..20: mol_type = other RNA
acaaacacatccttagtgct

SEQ ID NO: 7333 - RNA, 20 nt, synthetic construct
  misc_feature 1..20: note = antisense sequence
  source 1..20: mol_type = other RNA
cacaaacacatccttagtgc

SEQ ID NO: 7334 - RNA, 20 nt, synthetic construct
  misc_feature 1..20: note = antisense sequence
  source 1..20: mol_type = other RNA
gttcacaaacacatccttag

SEQ ID NO: 7335 - RNA, 20 nt, synthetic construct
  misc_feature 1..20: note = antisense sequence
  source 1..20: mol_type = other RNA
gctccacaatagtagggatt

SEQ ID NO: 7336 - RNA, 20 nt, synthetic construct
  misc_feature 1..20: note = antisense sequence
  source 1..20: mol_type = other RNA
agctccacaatagtagggat

SEQ ID NO: 7337 - RNA, 20 nt, synthetic construct
  misc_feature 1..20: note = antisense sequence
  source 1..20: mol_type = other RNA
aagctccacaatagtaggga

SEQ ID NO: 7338 - RNA, 20 nt, synthetic construct
  misc_feature 1..20: note = antisense sequence
  source 1..20: mol_type = other RNA
ataagctccacaatagtagg

SEQ ID NO: 7339 - RNA, 20 nt, synthetic construct
  misc_feature 1..20: note = antisense sequence
  source 1..20: mol_type = other RNA
catttgatgtaacctacctg

SEQ ID NO: 7340 - RNA, 20 nt, synthetic construct
  misc_feature 1..20: note = antisense sequence
  source 1..20: mol_type = other RNA
gcatttgatgtaacctacct

SEQ ID NO: 7341 - RNA, 20 nt, synthetic construct
  misc_feature 1..20: note = antisense sequence
  source 1..20: mol_type = other RNA
ggcatttgatgtaacctacc

SEQ ID NO: 7342 - RNA, 20 nt, synthetic construct
  misc_feature 1..20: note = antisense sequence
  source 1..20: mol_type = other RNA
tctggcatttgatgtaacct

SEQ ID NO: 7343 - RNA, 20 nt, synthetic construct
  misc_feature 1..20: note = antisense sequence
  source 1..20: mol_type = other RNA
ttctggcatttgatgtaacc

SEQ ID NO: 7344 - RNA, 20 nt, synthetic construct
  misc_feature 1..20: note = antisense sequence
  source 1..20: mol_type = other RNA
tgatcctattctggcatttg

SEQ ID NO: 7345 - RNA, 20 nt, synthetic construct
  misc_feature 1..20: note = antisense sequence
  source 1..20: mol_type = other RNA
ctgatcctattctggcattt

SEQ ID NO: 7346 - RNA, 20 nt, synthetic construct
  misc_feature 1..20: note = antisense sequence
  source 1..20: mol_type = other RNA
actgatcctattctggcatt

SEQ ID NO: 7347 - RNA, 20 nt, synthetic construct
  misc_feature 1..20: note = antisense sequence
  source 1..20: mol_type = other RNA
cactgatcctattctggcat

SEQ ID NO: 7348 - RNA, 20 nt, synthetic construct
  misc_feature 1..20: note = antisense sequence
  source 1..20: mol_type = other RNA
acactgatcctattctggca

SEQ ID NO: 7349 - RNA, 20 nt, synthetic construct
  misc_feature 1..20: note = antisense sequence
  source 1..20: mol_type = other RNA
aacactgatcctattctggc

SEQ ID NO: 7350 - RNA, 20 nt, synthetic construct
  misc_feature 1..20: note = antisense sequence
  source 1..20: mol_type = other RNA
caacactgatcctattctgg

SEQ ID NO: 7351 - RNA, 20 nt, synthetic construct
  misc_feature 1..20: note = antisense sequence
  source 1..20: mol_type = other RNA
acaacactgatcctattctg

SEQ ID NO: 7352 - RNA, 20 nt, synthetic construct
  misc_feature 1..20: note = antisense sequence
  source 1..20: mol_type = other RNA
cacaacactgatcctattct

SEQ ID NO: 7353 - RNA, 20 nt, synthetic construct
  misc_feature 1..20: note = antisense sequence
  source 1..20: mol_type = other RNA
tcacaacactgatcctattc

SEQ ID NO: 7354 - RNA, 20 nt, synthetic construct
  misc_feature 1..20: note = antisense sequence
  source 1..20: mol_type = other RNA
ctcacaacactgatcctatt

SEQ ID NO: 7355 - RNA, 20 nt, synthetic construct
  misc_feature 1..20: note = antisense sequence
  source 1..20: mol_type = other RNA
tctcacaacactgatcctat

SEQ ID NO: 7356 - RNA, 20 nt, synthetic construct
  misc_feature 1..20: note = antisense sequence
  source 1..20: mol_type = other RNA
ttctcacaacactgatccta

SEQ ID NO: 7357 - RNA, 20 nt, synthetic construct
  misc_feature 1..20: note = antisense sequence
  source 1..20: mol_type = other RNA
tttctcacaacactgatcct

SEQ ID NO: 7358 - RNA, 20 nt, synthetic construct
  misc_feature 1..20: note = antisense sequence
  source 1..20: mol_type = other RNA
ctcaatccactctcttgctc

SEQ ID NO: 7359 - RNA, 20 nt, synthetic construct
  misc_feature 1..20: note = antisense sequence
  source 1..20: mol_type = other RNA
attctcaatccactctcttg

SEQ ID NO: 7360 - RNA, 20 nt, synthetic construct
  misc_feature 1..20: note = antisense sequence
  source 1..20: mol_type = other RNA
cattctcaatccactctctt

SEQ ID NO: 7361 - RNA, 20 nt, synthetic construct
  misc_feature 1..20: note = antisense sequence
  source 1..20: mol_type = other RNA
gcattctcaatccactctct

SEQ ID NO: 7362 - RNA, 20 nt, synthetic construct
  misc_feature 1..20: note = antisense sequence
  source 1..20: mol_type = other RNA
agcattctcaatccactctc

SEQ ID NO: 7363 - RNA, 20 nt, synthetic construct
  misc_feature 1..20: note = antisense sequence
  source 1..20: mol_type = other RNA
cagcattctcaatccactct

SEQ ID NO: 7364 - RNA, 20 nt, synthetic construct
  misc_feature 1..20: note = antisense sequence
  source 1..20: mol_type = other RNA
ccagcattctcaatccactc

SEQ ID NO: 7365 - RNA, 20 nt, synthetic construct
  misc_feature 1..20: note = antisense sequence
  source 1..20: mol_type = other RNA
tccagcattctcaatccact

SEQ ID NO: 7366 - RNA, 20 nt, synthetic construct
  misc_feature 1..20: note = antisense sequence
  source 1..20: mol_type = other RNA
ctccagcattctcaatccac

SEQ ID NO: 7367 - RNA, 20 nt, synthetic construct
  misc_feature 1..20: note = antisense sequence
  source 1..20: mol_type = other RNA
atctccagcattctcaatcc

SEQ ID NO: 7368 - RNA, 20 nt, synthetic construct
  misc_feature 1..20: note = antisense sequence
  source 1..20: mol_type = other RNA
tttcaggaatctccagcatt

SEQ ID NO: 7369 - RNA, 20 nt, synthetic construct
  misc_feature 1..20: note = antisense sequence
  source 1..20: mol_type = other RNA
atttcaggaatctccagcat

SEQ ID NO: 7370 - RNA, 20 nt, synthetic construct
  misc_feature 1..20: note = antisense sequence
  source 1..20: mol_type = other RNA
aatttcaggaatctccagca

SEQ ID NO: 7371 - RNA, 20 nt, synthetic construct
  misc_feature 1..20: note = antisense sequence
  source 1..20: mol_type = other RNA
agggtttacagaatttcagg

SEQ ID NO: 7372 - RNA, 20 nt, synthetic construct
  misc_feature 1..20: note = antisense sequence
  source 1..20: mol_type = other RNA
gaatcctaaggaagcctcac

SEQ ID NO: 7373 - RNA, 20 nt, synthetic construct
  misc_feature 1..20: note = antisense sequence
  source 1..20: mol_type = other RNA
tgaatcctaaggaagcctca

SEQ ID NO: 7374 - RNA, 20 nt, synthetic construct
  misc_feature 1..20: note = antisense sequence
  source 1..20: mol_type = other RNA
ttgaatcctaaggaagcctc

SEQ ID NO: 7375 - RNA, 20 nt, synthetic construct
  misc_feature 1..20: note = antisense sequence
  source 1..20: mol_type = other RNA
cttgaatcctaaggaagcct

SEQ ID NO: 7376 - RNA, 20 nt, synthetic construct
  misc_feature 1..20: note = antisense sequence
  source 1..20: mol_type = other RNA
acttgaatcctaaggaagcc

SEQ ID NO: 7377 - RNA, 20 nt, synthetic construct
  misc_feature 1..20: note = antisense sequence
  source 1..20: mol_type = other RNA
cacttgaatcctaaggaagc

SEQ ID NO: 7378 - RNA, 20 nt, synthetic construct
  misc_feature 1..20: note = antisense sequence
  source 1..20: mol_type = other RNA
ccacttgaatcctaaggaag

SEQ ID NO: 7379 - RNA, 20 nt, synthetic construct
  misc_feature 1..20: note = antisense sequence
  source 1..20: mol_type = other RNA
accacttgaatcctaaggaa

SEQ ID NO: 7380 - RNA, 20 nt, synthetic construct
  misc_feature 1..20: note = antisense sequence
  source 1..20: mol_type = other RNA
taccacttgaatcctaagga

SEQ ID NO: 7381 - RNA, 20 nt, synthetic construct
  misc_feature 1..20: note = antisense sequence
  source 1..20: mol_type = other RNA
ttaccacttgaatcctaagg

SEQ ID NO: 7382 - RNA, 20 nt, synthetic construct
  misc_feature 1..20: note = antisense sequence
  source 1..20: mol_type = other RNA
gtatcttaccacttgaatcc

SEQ ID NO: 7383 - RNA, 20 nt, synthetic construct
  misc_feature 1..20: note = antisense sequence
  source 1..20: mol_type = other RNA
gttagcagatcataggactg

SEQ ID NO: 7384 - RNA, 20 nt, synthetic construct
  misc_feature 1..20: note = antisense sequence
  source 1..20: mol_type = other RNA
aggttagcagatcataggac

SEQ ID NO: 7385 - RNA, 20 nt, synthetic construct
  misc_feature 1..20: note = antisense sequence
  source 1..20: mol_type = other RNA
caggttagcagatcatagga

SEQ ID NO: 7386 - RNA, 20 nt, synthetic construct
  misc_feature 1..20: note = antisense sequence
  source 1..20: mol_type = other RNA
accaggttagcagatcatag

SEQ ID NO: 7387 - RNA, 20 nt, synthetic construct
  misc_feature 1..20: note = antisense sequence
  source 1..20: mol_type = other RNA
agaccaggttagcagatcat

SEQ ID NO: 7388 - RNA, 20 nt, synthetic construct
  misc_feature 1..20: note = antisense sequence
  source 1..20: mol_type = other RNA
aagaccaggttagcagatca

SEQ ID NO: 7389 - RNA, 20 nt, synthetic construct
  misc_feature 1..20: note = antisense sequence
  source 1..20: mol_type = other RNA
aaagaccaggttagcagatc

SEQ ID NO: 7390 - RNA, 20 nt, synthetic construct
  misc_feature 1..20: note = antisense sequence
  source 1..20: mol_type = other RNA
gtaaagaccaggttagcaga

SEQ ID NO: 7391 - RNA, 20 nt, synthetic construct
  misc_feature 1..20: note = antisense sequence
  source 1..20: mol_type = other RNA
agtaaagaccaggttagcag

SEQ ID NO: 7392 - RNA, 20 nt, synthetic construct
  misc_feature 1..20: note = antisense sequence
  source 1..20: mol_type = other RNA
accaatagtaaagaccaggt

SEQ ID NO: 7393 - RNA, 20 nt, synthetic construct
  misc_feature 1..20: note = antisense sequence
  source 1..20: mol_type = other RNA
gaccaatagtaaagaccagg

SEQ ID NO: 7394 - RNA, 20 nt, synthetic construct
  misc_feature 1..20: note = antisense sequence
  source 1..20: mol_type = other RNA
ggaccaatagtaaagaccag

SEQ ID NO: 7395 - RNA, 20 nt, synthetic construct
  misc_feature 1..20: note = antisense sequence
  source 1..20: mol_type = other RNA
tgggaccaatagtaaagacc

SEQ ID NO: 7396 - RNA, 20 nt, synthetic construct
  misc_feature 1..20: note = antisense sequence
  source 1..20: mol_type = other RNA
gttgggaccaatagtaaaga

SEQ ID NO: 7397 - RNA, 20 nt, synthetic construct
  misc_feature 1..20: note = antisense sequence
  source 1..20: mol_type = other RNA
agttgggaccaatagtaaag

SEQ ID NO: 7398 - RNA, 20 nt, synthetic construct
  misc_feature 1..20: note = antisense sequence
  source 1..20: mol_type = other RNA
gagttgggaccaatagtaaa

SEQ ID NO: 7399 - RNA, 20 nt, synthetic construct
  misc_feature 1..20: note = antisense sequence
  source 1..20: mol_type = other RNA
ggagttgggaccaatagtaa

SEQ ID NO: 7400 - RNA, 20 nt, synthetic construct
  misc_feature 1..20: note = antisense sequence
  source 1..20: mol_type = other RNA
tgggagttgggaccaatagt

SEQ ID NO: 7401 - RNA, 20 nt, synthetic construct
  misc_feature 1..20: note = antisense sequence
  source 1..20: mol_type = other RNA
agggagtttgggagttggga

SEQ ID NO: 7402 - RNA, 20 nt, synthetic construct
  misc_feature 1..20: note = antisense sequence
  source 1..20: mol_type = other RNA
acagggagtttgggagttgg

SEQ ID NO: 7403 - RNA, 20 nt, synthetic construct
  misc_feature 1..20: note = antisense sequence
  source 1..20: mol_type = other RNA
ttgagacagggagtttggga

SEQ ID NO: 7404 - RNA, 20 nt, synthetic construct
  misc_feature 1..20: note = antisense sequence
  source 1..20: mol_type = other RNA
attgagacagggagtttggg

SEQ ID NO: 7405 - RNA, 20 nt, synthetic construct
  misc_feature 1..20: note = antisense sequence
  source 1..20: mol_type = other RNA
gattgagacagggagtttgg

SEQ ID NO: 7406 - RNA, 20 nt, synthetic construct
  misc_feature 1..20: note = antisense sequence
  source 1..20: mol_type = other RNA
ggattgagacagggagtttg

SEQ ID NO: 7407 - RNA, 20 nt, synthetic construct
  misc_feature 1..20: note = antisense sequence
  source 1..20: mol_type = other RNA
gcccaggattgagacaggga

SEQ ID NO: 7408 - RNA, 20 nt, synthetic construct
  misc_feature 1..20: note = antisense sequence
  source 1..20: mol_type = other RNA
aggagcccaggattgagaca

SEQ ID NO: 7409 - RNA, 20 nt, synthetic construct
  misc_feature 1..20: note = antisense sequence
  source 1..20: mol_type = other RNA
agtgtaggagcccaggattg

SEQ ID NO: 7410 - RNA, 20 nt, synthetic construct
  misc_feature 1..20: note = antisense sequence
  source 1..20: mol_type = other RNA
gagtgtaggagcccaggatt

SEQ ID NO: 7411 - RNA, 20 nt, synthetic construct
  misc_feature 1..20: note = antisense sequence
  source 1..20: mol_type = other RNA
gtagagtgtaggagcccagg

SEQ ID NO: 7412 - RNA, 20 nt, synthetic construct
  misc_feature 1..20: note = antisense sequence
  source 1..20: mol_type = other RNA
ggtagagtgtaggagcccag

SEQ ID NO: 7413 - RNA, 20 nt, synthetic construct
  misc_feature 1..20: note = antisense sequence
  source 1..20: mol_type = other RNA
tggtagagtgtaggagccca

SEQ ID NO: 7414 - RNA, 20 nt, synthetic construct
  misc_feature 1..20: note = antisense sequence
  source 1..20: mol_type = other RNA
gtggtagagtgtaggagccc

SEQ ID NO: 7415 - RNA, 20 nt, synthetic construct
  misc_feature 1..20: note = antisense sequence
  source 1..20: mol_type = other RNA
tgcggagtgagaacttagaa

SEQ ID NO: 7416 - RNA, 20 nt, synthetic construct
  misc_feature 1..20: note = antisense sequence
  source 1..20: mol_type = other RNA
gattgcggagtgagaactta

SEQ ID NO: 7417 - RNA, 20 nt, synthetic construct
  misc_feature 1..20: note = antisense sequence
  source 1..20: mol_type = other RNA
aagattgcggagtgagaact

SEQ ID NO: 7418 - RNA, 20 nt, synthetic construct
  misc_feature 1..20: note = antisense sequence
  source 1..20: mol_type = other RNA
gaagattgcggagtgagaac

SEQ ID NO: 7419 - RNA, 20 nt, synthetic construct
  misc_feature 1..20: note = antisense sequence
  source 1..20: mol_type = other RNA
tgaagattgcggagtgagaa

SEQ ID NO: 7420 - RNA, 20 nt, synthetic construct
  misc_feature 1..20: note = antisense sequence
  source 1..20: mol_type = other RNA
gtgaagattgcggagtgaga

SEQ ID NO: 7421 - RNA, 20 nt, synthetic construct
  misc_feature 1..20: note = antisense sequence
  source 1..20: mol_type = other RNA
agtgaagattgcggagtgag

SEQ ID NO: 7422 - RNA, 20 nt, synthetic construct
  misc_feature 1..20: note = antisense sequence
  source 1..20: mol_type = other RNA
aagtgaagattgcggagtga

SEQ ID NO: 7423 - RNA, 20 nt, synthetic construct
  misc_feature 1..20: note = antisense sequence
  source 1..20: mol_type = other RNA
taagtgaagattgcggagtg

SEQ ID NO: 7424 - RNA, 20 nt, synthetic construct
  misc_feature 1..20: note = antisense sequence
  source 1..20: mol_type = other RNA
ataagtgaagattgcggagt

SEQ ID NO: 7425 - RNA, 20 nt, synthetic construct
  misc_feature 1..20: note = antisense sequence
  source 1..20: mol_type = other RNA
gataagtgaagattgcggag

SEQ ID NO: 7426 - RNA, 20 nt, synthetic construct
  misc_feature 1..20: note = antisense sequence
  source 1..20: mol_type = other RNA
gagataagtgaagattgcgg

SEQ ID NO: 7427 - RNA, 20 nt, synthetic construct
  misc_feature 1..20: note = antisense sequence
  source 1..20: mol_type = other RNA
tgagataagtgaagattgcg

SEQ ID NO: 7428 - RNA, 20 nt, synthetic construct
  misc_feature 1..20: note = antisense sequence
  source 1..20: mol_type = other RNA
gcctattgcatattctgaga

SEQ ID NO: 7429 - RNA, 20 nt, synthetic construct
  misc_feature 1..20: note = antisense sequence
  source 1..20: mol_type = other RNA
ggcctattgcatattctgag

SEQ ID NO: 7430 - RNA, 20 nt, synthetic construct
  misc_feature 1..20: note = antisense sequence
  source 1..20: mol_type = other RNA
cggcctattgcatattctga

SEQ ID NO: 7431 - RNA, 20 nt, synthetic construct
  misc_feature 1..20: note = antisense sequence
  source 1..20: mol_type = other RNA
acggcctattgcatattctg

SEQ ID NO: 7432 - RNA, 20 nt, synthetic construct
  misc_feature 1..20: note = antisense sequence
  source 1..20: mol_type = other RNA
cacggcctattgcatattct

SEQ ID NO: 7433 - RNA, 20 nt, synthetic construct
  misc_feature 1..20: note = antisense sequence
  source 1..20: mol_type = other RNA
ccacggcctattgcatattc

SEQ ID NO: 7434 - RNA, 20 nt, synthetic construct
  misc_feature 1..20: note = antisense sequence
  source 1..20: mol_type = other RNA
accacggcctattgcatatt

SEQ ID NO: 7435 - RNA, 20 nt, synthetic construct
  misc_feature 1..20: note = antisense sequence
  source 1..20: mol_type = other RNA
aaccacggcctattgcatat

SEQ ID NO: 7436 - RNA, 20 nt, synthetic construct
  misc_feature 1..20: note = antisense sequence
  source 1..20: mol_type = other RNA
caaccacggcctattgcata

SEQ ID NO: 7437 - RNA, 20 nt, synthetic construct
  misc_feature 1..20: note = antisense sequence
  source 1..20: mol_type = other RNA
tcaaccacggcctattgcat

SEQ ID NO: 7438 - RNA, 20 nt, synthetic construct
  misc_feature 1..20: note = antisense sequence
  source 1..20: mol_type = other RNA
ctcaaccacggcctattgca

SEQ ID NO: 7439 - RNA, 20 nt, synthetic construct
  misc_feature 1..20: note = antisense sequence
  source 1..20: mol_type = other RNA
tctcaaccacggcctattgc

SEQ ID NO: 7440 - RNA, 20 nt, synthetic construct
  misc_feature 1..20: note = antisense sequence
  source 1..20: mol_type = other RNA
aatctcaaccacggcctatt

SEQ ID NO: 7441 - RNA, 20 nt, synthetic construct
  misc_feature 1..20: note = antisense sequence
  source 1..20: mol_type = other RNA
caatctcaaccacggcctat

SEQ ID NO: 7442 - RNA, 20 nt, synthetic construct
  misc_feature 1..20: note = antisense sequence
  source 1..20: mol_type = other RNA
gcaatctcaaccacggccta

SEQ ID NO: 7443 - RNA, 20 nt, synthetic construct
  misc_feature 1..20: note = antisense sequence
  source 1..20: mol_type = other RNA
agcaatctcaaccacggcct

SEQ ID NO: 7444 - RNA, 20 nt, synthetic construct
  misc_feature 1..20: note = antisense sequence
  source 1..20: mol_type = other RNA
cagcaatctcaaccacggcc

SEQ ID NO: 7445 - RNA, 20 nt, synthetic construct
  misc_feature 1..20: note = antisense sequence
  source 1..20: mol_type = other RNA
acagcaatctcaaccacggc

SEQ ID NO: 7446 - RNA, 20 nt, synthetic construct
  misc_feature 1..20: note = antisense sequence
  source 1..20: mol_type = other RNA
tacagcaatctcaaccacgg

SEQ ID NO: 7447 - RNA, 20 nt, synthetic construct
  misc_feature 1..20: note = antisense sequence
  source 1..20: mol_type = other RNA
atacagcaatctcaaccacg

SEQ ID NO: 7448 - RNA, 20 nt, synthetic construct
  misc_feature 1..20: note = antisense sequence
  source 1..20: mol_type = other RNA
gatacagcaatctcaaccac

SEQ ID NO: 7449 - RNA, 20 nt, synthetic construct
  misc_feature 1..20: note = antisense sequence
  source 1..20: mol_type = other RNA
ctgatacagcaatctcaacc

SEQ ID NO: 7450 - RNA, 20 nt, synthetic construct
  misc_feature 1..20: note = antisense sequence
  source 1..20: mol_type = other RNA
cctgatacagcaatctcaac

SEQ ID NO: 7451 - RNA, 20 nt, synthetic construct
  misc_feature 1..20: note = antisense sequence
  source 1..20: mol_type = other RNA
acctgatacagcaatctcaa

SEQ ID NO: 7452 - RNA, 20 nt, synthetic construct
  misc_feature 1..20: note = antisense sequence
  source 1..20: mol_type = other RNA
aaactgacctgatacagcaa

SEQ ID NO: 7453 - RNA, 20 nt, synthetic construct
  misc_feature 1..20: note = antisense sequence
  source 1..20: mol_type = other RNA
tggaaactgacctgatacag

SEQ ID NO: 7454 - RNA, 20 nt, synthetic construct
  misc_feature 1..20: note = antisense sequence
  source 1..20: mol_type = other RNA
ttggaaactgacctgataca

SEQ ID NO: 7455 - RNA, 20 nt, synthetic construct
  misc_feature 1..20: note = antisense sequence
  source 1..20: mol_type = other RNA
attggaaactgacctgatac

SEQ ID NO: 7456 - RNA, 20 nt, synthetic construct
  misc_feature 1..20: note = antisense sequence
  source 1..20: mol_type = other RNA
gataattggaaactgacctg

SEQ ID NO: 7457 - RNA, 20 nt, synthetic construct
  misc_feature 1..20: note = antisense sequence
  source 1..20: mol_type = other RNA
gcacttaggatatggtgata

SEQ ID NO: 7458 - RNA, 20 nt, synthetic construct
  misc_feature 1..20: note = antisense sequence
  source 1..20: mol_type = other RNA
gaaagcacttaggatatggt

SEQ ID NO: 7459 - RNA, 20 nt, synthetic construct
  misc_feature 1..20: note = antisense sequence
  source 1..20: mol_type = other RNA
agaaagcacttaggatatgg

SEQ ID NO: 7460 - RNA, 20 nt, synthetic construct
  misc_feature 1..20: note = antisense sequence
  source 1..20: mol_type = other RNA
gggcaagagaaagcacttag

SEQ ID NO: 7461 - RNA, 20 nt, synthetic construct
  misc_feature 1..20: note = antisense sequence
  source 1..20: mol_type = other RNA
agggcaagagaaagcactta

SEQ ID NO: 7462 - RNA, 20 nt, synthetic construct
  misc_feature 1..20: note = antisense sequence
  source 1..20: mol_type = other RNA
gtttgatctctagggcaaga

SEQ ID NO: 7463 - RNA, 20 nt, synthetic construct
  misc_feature 1..20: note = antisense sequence
  source 1..20: mol_type = other RNA
tgtttgatctctagggcaag

SEQ ID NO: 7464 - RNA, 20 nt, synthetic construct
  misc_feature 1..20: note = antisense sequence
  source 1..20: mol_type = other RNA
atgtttgatctctagggcaa

SEQ ID NO: 7465 - RNA, 20 nt, synthetic construct
  misc_feature 1..20: note = antisense sequence
  source 1..20: mol_type = other RNA
tatgtttgatctctagggca

SEQ ID NO: 7466 - RNA, 20 nt, synthetic construct
  misc_feature 1..20: note = antisense sequence
  source 1..20: mol_type = other RNA
ggtctggagtttatgtttga

SEQ ID NO: 7467 - RNA, 20 nt, synthetic construct
  misc_feature 1..20: note = antisense sequence
  source 1..20: mol_type = other RNA
aggtctggagtttatgtttg

SEQ ID NO: 7468 - RNA, 20 nt, synthetic construct
  misc_feature 1..20: note = antisense sequence
  source 1..20: mol_type = other RNA
gaaaaggtctggagtttatg

SEQ ID NO: 7469 - RNA, 20 nt, synthetic construct
  misc_feature 1..20: note = antisense sequence
  source 1..20: mol_type = other RNA
ggaggaaaaggtctggagtt

SEQ ID NO: 7470 - RNA, 20 nt, synthetic construct
  misc_feature 1..20: note = antisense sequence
  source 1..20: mol_type = other RNA
cagagagcttgagatttggc

SEQ ID NO: 7471 - RNA, 20 nt, synthetic construct
  misc_feature 1..20: note = antisense sequence
  source 1..20: mol_type = other RNA
acagagagcttgagatttgg

SEQ ID NO: 7472 - RNA, 20 nt, synthetic construct
  misc_feature 1..20: note = antisense sequence
  source 1..20: mol_type = other RNA
gaacagagagcttgagattt

SEQ ID NO: 7473 - RNA, 20 nt, synthetic construct
  misc_feature 1..20: note = antisense sequence
  source 1..20: mol_type = other RNA
caggaacagagagcttgaga

SEQ ID NO: 7474 - RNA, 20 nt, synthetic construct
  misc_feature 1..20: note = antisense sequence
  source 1..20: mol_type = other RNA
agacaggaacagagagcttg

SEQ ID NO: 7475 - RNA, 20 nt, synthetic construct
  misc_feature 1..20: note = antisense sequence
  source 1..20: mol_type = other RNA
tagacaggaacagagagctt

SEQ ID NO: 7476 - RNA, 20 nt, synthetic construct
  misc_feature 1..20: note = antisense sequence
  source 1..20: mol_type = other RNA
tgcttatagacaggaacaga

SEQ ID NO: 7477 - RNA, 20 nt, synthetic construct
  misc_feature 1..20: note = antisense sequence
  source 1..20: mol_type = other RNA
gcttgcttatagacaggaac

SEQ ID NO: 7478 - RNA, 20 nt, synthetic construct
  misc_feature 1..20: note = antisense sequence
  source 1..20: mol_type = other RNA
gtggctagaactcagaataa

SEQ ID NO: 7479 - RNA, 20 nt, synthetic construct
  misc_feature 1..20: note = antisense sequence
  source 1..20: mol_type = other RNA
ggtggctagaactcagaata

SEQ ID NO: 7480 - RNA, 20 nt, synthetic construct
  misc_feature 1..20: note = antisense sequence
  source 1..20: mol_type = other RNA
gggtggctagaactcagaat

SEQ ID NO: 7481 - RNA, 20 nt, synthetic construct
  misc_feature 1..20: note = antisense sequence
  source 1..20: mol_type = other RNA
tgggtggctagaactcagaa

SEQ ID NO: 7482 - RNA, 20 nt, synthetic construct
  misc_feature 1..20: note = antisense sequence
  source 1..20: mol_type = other RNA
tatgggtggctagaactcag

SEQ ID NO: 7483 - RNA, 20 nt, synthetic construct
  misc_feature 1..20: note = antisense sequence
  source 1..20: mol_type = other RNA
gtatgggtggctagaactca

SEQ ID NO: 7484 - RNA, 20 nt, synthetic construct
  misc_feature 1..20: note = antisense sequence
  source 1..20: mol_type = other RNA
agtatgggtggctagaactc

SEQ ID NO: 7485 - RNA, 20 nt, synthetic construct
  misc_feature 1..20: note = antisense sequence
  source 1..20: mol_type = other RNA
aagtatgggtggctagaact

SEQ ID NO: 7486 - RNA, 20 nt, synthetic construct
  misc_feature 1..20: note = antisense sequence
  source 1..20: mol_type = other RNA
aaagtatgggtggctagaac

SEQ ID NO: 7487 - RNA, 20 nt, synthetic construct
  misc_feature 1..20: note = antisense sequence
  source 1..20: mol_type = other RNA
gaaagtatgggtggctagaa

SEQ ID NO: 7488 - RNA, 20 nt, synthetic construct
  misc_feature 1..20: note = antisense sequence
  source 1..20: mol_type = other RNA
agaaagtatgggtggctaga

SEQ ID NO: 7489 - RNA, 20 nt, synthetic construct
  misc_feature 1..20: note = antisense sequence
  source 1..20: mol_type = other RNA
gagaaagtatgggtggctag

SEQ ID NO: 7490 - RNA, 20 nt, synthetic construct
  misc_feature 1..20: note = antisense sequence
  source 1..20: mol_type = other RNA
atgagaaagtatgggtggct

SEQ ID NO: 7491 - RNA, 20 nt, synthetic construct
  misc_feature 1..20: note = antisense sequence
  source 1..20: mol_type = other RNA
aatgagaaagtatgggtggc

SEQ ID NO: 7492 - RNA, 20 nt, synthetic construct
  misc_feature 1..20: note = antisense sequence
  source 1..20: mol_type = other RNA
tggagacaggagaatgaaga

SEQ ID NO: 7493 - RNA, 20 nt, synthetic construct
  misc_feature 1..20: note = antisense sequence
  source 1..20: mol_type = other RNA
aagtgtggagacaggagaat

SEQ ID NO: 7494 - RNA, 20 nt, synthetic construct
  misc_feature 1..20: note = antisense sequence
  source 1..20: mol_type = other RNA
aaagtgtggagacaggagaa

SEQ ID NO: 7495 - RNA, 20 nt, synthetic construct
  misc_feature 1..20: note = antisense sequence
  source 1..20: mol_type = other RNA
aaaagtgtggagacaggaga

SEQ ID NO: 7496 - RNA, 20 nt, synthetic construct
  misc_feature 1..20: note = antisense sequence
  source 1..20: mol_type = other RNA
agggaaaagtgtggagacag

SEQ ID NO: 7497 - RNA, 20 nt, synthetic construct
  misc_feature 1..20: note = antisense sequence
  source 1..20: mol_type = other RNA
gcccagggaaaagtgtggag

SEQ ID NO: 7498 - RNA, 20 nt, synthetic construct
  misc_feature 1..20: note = antisense sequence
  source 1..20: mol_type = other RNA
tagcccagggaaaagtgtgg

SEQ ID NO: 7499 - RNA, 20 nt, synthetic construct
  misc_feature 1..20: note = antisense sequence
  source 1..20: mol_type = other RNA
atagcccagggaaaagtgtg

SEQ ID NO: 7500 - RNA, 20 nt, synthetic construct
  misc_feature 1..20: note = antisense sequence
  source 1..20: mol_type = other RNA
ggatagcccagggaaaagtg

SEQ ID NO: 7501 - RNA, 20 nt, synthetic construct
  misc_feature 1..20: note = antisense sequence
  source 1..20: mol_type = other RNA
tggatagcccagggaaaagt

SEQ ID NO: 7502 - RNA, 20 nt, synthetic construct
  misc_feature 1..20: note = antisense sequence
  source 1..20: mol_type = other RNA
atggatagcccagggaaaag

SEQ ID NO: 7503 - RNA, 20 nt, synthetic construct
  misc_feature 1..20: note = antisense sequence
  source 1..20: mol_type = other RNA
tatggatagcccagggaaaa

SEQ ID NO: 7504 - RNA, 20 nt, synthetic construct
  misc_feature 1..20: note = antisense sequence
  source 1..20: mol_type = other RNA
atatggatagcccagggaaa

SEQ ID NO: 7505 - RNA, 20 nt, synthetic construct
  misc_feature 1..20: note = antisense sequence
  source 1..20: mol_type = other RNA
agatatggatagcccaggga

SEQ ID NO: 7506 - RNA, 20 nt, synthetic construct
  misc_feature 1..20: note = antisense sequence
  source 1..20: mol_type = other RNA
gagatatggatagcccaggg

SEQ ID NO: 7507 - RNA, 20 nt, synthetic construct
  misc_feature 1..20: note = antisense sequence
  source 1..20: mol_type = other RNA
ggagatatggatagcccagg

SEQ ID NO: 7508 - RNA, 20 nt, synthetic construct
  misc_feature 1..20: note = antisense sequence
  source 1..20: mol_type = other RNA
gggagatatggatagcccag

SEQ ID NO: 7509 - RNA, 20 nt, synthetic construct
  misc_feature 1..20: note = antisense sequence
  source 1..20: mol_type = other RNA
agggagatatggatagccca

SEQ ID NO: 7510 - RNA, 20 nt, synthetic construct
  misc_feature 1..20: note = antisense sequence
  source 1..20: mol_type = other RNA
aagggagatatggatagccc

SEQ ID NO: 7511 - RNA, 20 nt, synthetic construct
  misc_feature 1..20: note = antisense sequence
  source 1..20: mol_type = other RNA
gtgaattgtaaggcagaagg

SEQ ID NO: 7512 - RNA, 20 nt, synthetic construct
  misc_feature 1..20: note = antisense sequence
  source 1..20: mol_type = other RNA
gctattgtgaattgtaaggc

SEQ ID NO: 7513 - RNA, 20 nt, synthetic construct
  misc_feature 1..20: note = antisense sequence
  source 1..20: mol_type = other RNA
aggagagctattgtgaattg

SEQ ID NO: 7514 - RNA, 20 nt, synthetic construct
  misc_feature 1..20: note = antisense sequence
  source 1..20: mol_type = other RNA
gggaaaatctaggataactg

SEQ ID NO: 7515 - RNA, 20 nt, synthetic construct
  misc_feature 1..20: note = antisense sequence
  source 1..20: mol_type = other RNA
gagaagaactgactcactag

SEQ ID NO: 7516 - RNA, 20 nt, synthetic construct
  misc_feature 1..20: note = antisense sequence
  source 1..20: mol_type = other RNA
tagagaagaactgactcact

SEQ ID NO: 7517 - RNA, 20 nt, synthetic construct
  misc_feature 1..20: note = antisense sequence
  source 1..20: mol_type = other RNA
tgtagagaagaactgactca

SEQ ID NO: 7518 - RNA, 20 nt, synthetic construct
  misc_feature 1..20: note = antisense sequence
  source 1..20: mol_type = other RNA
gtttgtagagaagaactgac

SEQ ID NO: 7519 - RNA, 20 nt, synthetic construct
  misc_feature 1..20: note = antisense sequence
  source 1..20: mol_type = other RNA
aggccctcaaagtcctttcc

SEQ ID NO: 7520 - RNA, 20 nt, synthetic construct
  misc_feature 1..20: note = antisense sequence
  source 1..20: mol_type = other RNA
ttaggccctcaaagtccttt

SEQ ID NO: 7521 - RNA, 20 nt, synthetic construct
  misc_feature 1..20: note = antisense sequence
  source 1..20: mol_type = other RNA
gttaggccctcaaagtcctt

SEQ ID NO: 7522 - RNA, 20 nt, synthetic construct
  misc_feature 1..20: note = antisense sequence
  source 1..20: mol_type = other RNA
agttaggccctcaaagtcct

SEQ ID NO: 7523 - RNA, 20 nt, synthetic construct
  misc_feature 1..20: note = antisense sequence
  source 1..20: mol_type = other RNA
gagttaggccctcaaagtcc

SEQ ID NO: 7524 - RNA, 20 nt, synthetic construct
  misc_feature 1..20: note = antisense sequence
  source 1..20: mol_type = other RNA
ggagttaggccctcaaagtc

SEQ ID NO: 7525 - RNA, 20 nt, synthetic construct
  misc_feature 1..20: note = antisense sequence
  source 1..20: mol_type = other RNA
gggagttaggccctcaaagt

SEQ ID NO: 7526 - RNA, 20 nt, synthetic construct
  misc_feature 1..20: note = antisense sequence
  source 1..20: mol_type = other RNA
tggatgggagttaggccctc

SEQ ID NO: 7527 - RNA, 20 nt, synthetic construct
  misc_feature 1..20: note = antisense sequence
  source 1..20: mol_type = other RNA
gtggatgggagttaggccct

SEQ ID NO: 7528 - RNA, 20 nt, synthetic construct
  misc_feature 1..20: note = antisense sequence
  source 1..20: mol_type = other RNA
agtggatgggagttaggccc

SEQ ID NO: 7529 - RNA, 20 nt, synthetic construct
  misc_feature 1..20: note = antisense sequence
  source 1..20: mol_type = other RNA
tagtggatgggagttaggcc

SEQ ID NO: 7530 - RNA, 20 nt, synthetic construct
  misc_feature 1..20: note = antisense sequence
  source 1..20: mol_type = other RNA
atagtggatgggagttaggc

SEQ ID NO: 7531 - RNA, 20 nt, synthetic construct
  misc_feature 1..20: note = antisense sequence
  source 1..20: mol_type = other RNA
tatagtggatgggagttagg

SEQ ID NO: 7532 - RNA, 20 nt, synthetic construct
  misc_feature 1..20: note = antisense sequence
  source 1..20: mol_type = other RNA
ttatagtggatgggagttag

SEQ ID NO: 7533 - RNA, 20 nt, synthetic construct
  misc_feature 1..20: note = antisense sequence
  source 1..20: mol_type = other RNA
gatgtttcggaaggtgtttt

SEQ ID NO: 7534 - RNA, 20 nt, synthetic construct
  misc_feature 1..20: note = antisense sequence
  source 1..20: mol_type = other RNA
ggatgtttcggaaggtgttt

SEQ ID NO: 7535 - RNA, 20 nt, synthetic construct
  misc_feature 1..20: note = antisense sequence
  source 1..20: mol_type = other RNA
gggatgtttcggaaggtgtt

SEQ ID NO: 7536 - RNA, 20 nt, synthetic construct
  misc_feature 1..20: note = antisense sequence
  source 1..20: mol_type = other RNA
agggatgtttcggaaggtgt

SEQ ID NO: 7537 - RNA, 20 nt, synthetic construct
  misc_feature 1..20: note = antisense sequence
  source 1..20: mol_type = other RNA
cagggatgtttcggaaggtg

SEQ ID NO: 7538 - RNA, 20 nt, synthetic construct
  misc_feature 1..20: note = antisense sequence
  source 1..20: mol_type = other RNA
ccagggatgtttcggaaggt

SEQ ID NO: 7539 - RNA, 20 nt, synthetic construct
  misc_feature 1..20: note = antisense sequence
  source 1..20: mol_type = other RNA
ggccagggatgtttcggaag

SEQ ID NO: 7540 - RNA, 20 nt, synthetic construct
  misc_feature 1..20: note = antisense sequence
  source 1..20: mol_type = other RNA
aagatgaggtgggttgcagc

SEQ ID NO: 7541 - RNA, 20 nt, synthetic construct
  misc_feature 1..20: note = antisense sequence
  source 1..20: mol_type = other RNA
caagatgaggtgggttgcag

SEQ ID NO: 7542 - RNA, 20 nt, synthetic construct
  misc_feature 1..20: note = antisense sequence
  source 1..20: mol_type = other RNA
tcaagatgaggtgggttgca

SEQ ID NO: 7543 - RNA, 20 nt, synthetic construct
  misc_feature 1..20: note = antisense sequence
  source 1..20: mol_type = other RNA
gtcaagatgaggtgggttgc

SEQ ID NO: 7544 - RNA, 20 nt, synthetic construct
  misc_feature 1..20: note = antisense sequence
  source 1..20: mol_type = other RNA
ggtcaagatgaggtgggttg

SEQ ID NO: 7545 - RNA, 20 nt, synthetic construct
  misc_feature 1..20: note = antisense sequence
  source 1..20: mol_type = other RNA
tggtcaagatgaggtgggtt

SEQ ID NO: 7546 - RNA, 20 nt, synthetic construct
  misc_feature 1..20: note = antisense sequence
  source 1..20: mol_type = other RNA
ctggtcaagatgaggtgggt

SEQ ID NO: 7547 - RNA, 20 nt, synthetic construct
  misc_feature 1..20: note = antisense sequence
  source 1..20: mol_type = other RNA
tctggtcaagatgaggtggg

SEQ ID NO: 7548 - RNA, 20 nt, synthetic construct
  misc_feature 1..20: note = antisense sequence
  source 1..20: mol_type = other RNA
ctctggtcaagatgaggtgg

SEQ ID NO: 7549 - RNA, 20 nt, synthetic construct
  misc_feature 1..20: note = antisense sequence
  source 1..20: mol_type = other RNA
gctcctctggtcaagatgag

SEQ ID NO: 7550 - RNA, 20 nt, synthetic construct
  misc_feature 1..20: note = antisense sequence
  source 1..20: mol_type = other RNA
gtagagagcgatgaagattt

SEQ ID NO: 7551 - RNA, 20 nt, synthetic construct
  misc_feature 1..20: note = antisense sequence
  source 1..20: mol_type = other RNA
tgtagagagcgatgaagatt

SEQ ID NO: 7552 - RNA, 20 nt, synthetic construct
  misc_feature 1..20: note = antisense sequence
  source 1..20: mol_type = other RNA
ttgtagagagcgatgaagat

SEQ ID NO: 7553 - RNA, 20 nt, synthetic construct
  misc_feature 1..20: note = antisense sequence
  source 1..20: mol_type = other RNA
cttgtagagagcgatgaaga

SEQ ID NO: 7554 - RNA, 20 nt, synthetic construct
  misc_feature 1..20: note = antisense sequence
  source 1..20: mol_type = other RNA
gcttgtagagagcgatgaag

SEQ ID NO: 7555 - RNA, 20 nt, synthetic construct
  misc_feature 1..20: note = antisense sequence
  source 1..20: mol_type = other RNA
ggcttgtagagagcgatgaa

SEQ ID NO: 7556 - RNA, 20 nt, synthetic construct
  misc_feature 1..20: note = antisense sequence
  source 1..20: mol_type = other RNA
gggcttgtagagagcgatga

SEQ ID NO: 7557 - RNA, 20 nt, synthetic construct
  misc_feature 1..20: note = antisense sequence
  source 1..20: mol_type = other RNA
tgggcttgtagagagcgatg

SEQ ID NO: 7558 - RNA, 20 nt, synthetic construct
  misc_feature 1..20: note = antisense sequence
  source 1..20: mol_type = other RNA
gtgggcttgtagagagcgat

SEQ ID NO: 7559 - RNA, 20 nt, synthetic construct
  misc_feature 1..20: note = antisense sequence
  source 1..20: mol_type = other RNA
ggtgggcttgtagagagcga

SEQ ID NO: 7560 - RNA, 20 nt, synthetic construct
  misc_feature 1..20: note = antisense sequence
  source 1..20: mol_type = other RNA
tggtgggcttgtagagagcg

SEQ ID NO: 7561 - RNA, 20 nt, synthetic construct
  misc_feature 1..20: note = antisense sequence
  source 1..20: mol_type = other RNA
gtggtgggcttgtagagagc

SEQ ID NO: 7562 - RNA, 20 nt, synthetic construct
  misc_feature 1..20: note = antisense sequence
  source 1..20: mol_type = other RNA
gggtggtgggcttgtagaga

SEQ ID NO: 7563 - RNA, 20 nt, synthetic construct
  misc_feature 1..20: note = antisense sequence
  source 1..20: mol_type = other RNA
aagggtggtgggcttgtaga

SEQ ID NO: 7564 - RNA, 20 nt, synthetic construct
  misc_feature 1..20: note = antisense sequence
  source 1..20: mol_type = other RNA
gaagggtggtgggcttgtag

SEQ ID NO: 7565 - RNA, 20 nt, synthetic construct
  misc_feature 1..20: note = antisense sequence
  source 1..20: mol_type = other RNA
agaagggtggtgggcttgta

SEQ ID NO: 7566 - RNA, 20 nt, synthetic construct
  misc_feature 1..20: note = antisense sequence
  source 1..20: mol_type = other RNA
gtagaagggtggtgggcttg

SEQ ID NO: 7567 - RNA, 20 nt, synthetic construct
  misc_feature 1..20: note = antisense sequence
  source 1..20: mol_type = other RNA
tctctctctctgtctctttt

SEQ ID NO: 7568 - RNA, 20 nt, synthetic construct
  misc_feature 1..20: note = antisense sequence
  source 1..20: mol_type = other RNA
ctctctctctctgtctcttt

SEQ ID NO: 7569 - RNA, 20 nt, synthetic construct
  misc_feature 1..20: note = antisense sequence
  source 1..20: mol_type = other RNA
tctctctctctctgtctctt

SEQ ID NO: 7570 - RNA, 20 nt, synthetic construct
  misc_feature 1..20: note = antisense sequence
  source 1..20: mol_type = other RNA
ctctctctctctctgtctct

SEQ ID NO: 7571 - RNA, 20 nt, synthetic construct
  misc_feature 1..20: note = antisense sequence
  source 1..20: mol_type = other RNA
tctctctctctctctgtctc

SEQ ID NO: 7572 - RNA, 20 nt, synthetic construct
  misc_feature 1..20: note = antisense sequence
  source 1..20: mol_type = other RNA
ctctctctctctctctgtct

SEQ ID NO: 7573 - RNA, 20 nt, synthetic construct
  misc_feature 1..20: note = antisense sequence
  source 1..20: mol_type = other RNA
tctctctctctctctctgtc

SEQ ID NO: 7574 - RNA, 20 nt, synthetic construct
  misc_feature 1..20: note = antisense sequence
  source 1..20: mol_type = other RNA
ctctctctctctctctctgt

SEQ ID NO: 7575 - RNA, 20 nt, synthetic construct
  misc_feature 1..20: note = antisense sequence
  source 1..20: mol_type = other RNA
tctctctctctctctctctg

SEQ ID NO: 7576 - RNA, 20 nt, synthetic construct
  misc_feature 1..20: note = antisense sequence
  source 1..20: mol_type = other RNA
ctctctctctctctctctct

SEQ ID NO: 7577 - RNA, 20 nt, synthetic construct
  misc_feature 1..20: note = antisense sequence
  source 1..20: mol_type = other RNA
tctctctctctctctctctc

SEQ ID NO: 7578 - RNA, 20 nt, synthetic construct
  misc_feature 1..20: note = antisense sequence
  source 1..20: mol_type = other RNA
ctctctctctctctctctct

SEQ ID NO: 7579 - RNA, 20 nt, synthetic construct
  misc_feature 1..20: note = antisense sequence
  source 1..20: mol_type = other RNA
tctctctctctctctctctc

SEQ ID NO: 7580 - RNA, 20 nt, synthetic construct
  misc_feature 1..20: note = antisense sequence
  source 1..20: mol_type = other RNA
ctctctctctctctctctct

SEQ ID NO: 7581 - RNA, 20 nt, synthetic construct
  misc_feature 1..20: note = antisense sequence
  source 1..20: mol_type = other RNA
tctctctctctctctctctc

SEQ ID NO: 7582 - RNA, 20 nt, synthetic construct
  misc_feature 1..20: note = antisense sequence
  source 1..20: mol_type = other RNA
ctctctctctctctctctct

SEQ ID NO: 7583 - RNA, 20 nt, synthetic construct
  misc_feature 1..20: note = antisense sequence
  source 1..20: mol_type = other RNA
tctctctctctctctctctc

SEQ ID NO: 7584 - RNA, 20 nt, synthetic construct
  misc_feature 1..20: note = antisense sequence
  source 1..20: mol_type = other RNA
ctctctctctctctctctct

SEQ ID NO: 7585 - RNA, 20 nt, synthetic construct
  misc_feature 1..20: note = antisense sequence
  source 1..20: mol_type = other RNA
tctctctctctctctctctc

SEQ ID NO: 7586 - RNA, 20 nt, synthetic construct
  misc_feature 1..20: note = antisense sequence
  source 1..20: mol_type = other RNA
ctctctctctctctctctct

SEQ ID NO: 7587 - RNA, 20 nt, synthetic construct
  misc_feature 1..20: note = antisense sequence
  source 1..20: mol_type = other RNA
tctctctctctctctctctc

SEQ ID NO: 7588 - RNA, 20 nt, synthetic construct
  misc_feature 1..20: note = antisense sequence
  source 1..20: mol_type = other RNA
ctctctctctctctctctct

SEQ ID NO: 7589 - RNA, 20 nt, synthetic construct
  misc_feature 1..20: note = antisense sequence
  source 1..20: mol_type = other RNA
tctctctctctctctctctc

SEQ ID NO: 7590 - RNA, 20 nt, synthetic construct
  misc_feature 1..20: note = antisense sequence
  source 1..20: mol_type = other RNA
ttctctctctctctctctct

SEQ ID NO: 7591 - RNA, 20 nt, synthetic construct
  misc_feature 1..20: note = antisense sequence
  source 1..20: mol_type = other RNA
cttctctctctctctctctc

SEQ ID NO: 7592 - RNA, 20 nt, synthetic construct
  misc_feature 1..20: note = antisense sequence
  source 1..20: mol_type = other RNA
gcttctctctctctctctct

SEQ ID NO: 7593 - RNA, 20 nt, synthetic construct
  misc_feature 1..20: note = antisense sequence
  source 1..20: mol_type = other RNA
tgatgagcccaggcaatagg

SEQ ID NO: 7594 - RNA, 20 nt, synthetic construct
  misc_feature 1..20: note = antisense sequence
  source 1..20: mol_type = other RNA
atgatgagcccaggcaatag

SEQ ID NO: 7595 - RNA, 20 nt, synthetic construct
  misc_feature 1..20: note = antisense sequence
  source 1..20: mol_type = other RNA
gatgatgagcccaggcaata

SEQ ID NO: 7596 - RNA, 20 nt, synthetic construct
  misc_feature 1..20: note = antisense sequence
  source 1..20: mol_type = other RNA
cagatgatgagcccaggcaa

SEQ ID NO: 7597 - RNA, 20 nt, synthetic construct
  misc_feature 1..20: note = antisense sequence
  source 1..20: mol_type = other RNA
gggaccagatgatgagccca

SEQ ID NO: 7598 - RNA, 20 nt, synthetic construct
  misc_feature 1..20: note = antisense sequence
  source 1..20: mol_type = other RNA
ccagttgagggaccagatga

SEQ ID NO: 7599 - RNA, 20 nt, synthetic construct
  misc_feature 1..20: note = antisense sequence
  source 1..20: mol_type = other RNA
cccagttgagggaccagatg

SEQ ID NO: 7600 - RNA, 20 nt, synthetic construct
  misc_feature 1..20: note = antisense sequence
  source 1..20: mol_type = other RNA
gaaagccagcttggacactc

SEQ ID NO: 7601 - RNA, 20 nt, synthetic construct
  misc_feature 1..20: note = antisense sequence
  source 1..20: mol_type = other RNA
ggaaagccagcttggacact

SEQ ID NO: 7602 - RNA, 20 nt, synthetic construct
  misc_feature 1..20: note = antisense sequence
  source 1..20: mol_type = other RNA
aggaaagccagcttggacac

SEQ ID NO: 7603 - RNA, 20 nt, synthetic construct
  misc_feature 1..20: note = antisense sequence
  source 1..20: mol_type = other RNA
gtgaggaaagccagcttgga

SEQ ID NO: 7604 - RNA, 20 nt, synthetic construct
  misc_feature 1..20: note = antisense sequence
  source 1..20: mol_type = other RNA
gtgtgaggaaagccagcttg

SEQ ID NO: 7605 - RNA, 20 nt, synthetic construct
  misc_feature 1..20: note = antisense sequence
  source 1..20: mol_type = other RNA
ctcgtgtgaggaaagccagc

SEQ ID NO: 7606 - RNA, 20 nt, synthetic construct
  misc_feature 1..20: note = antisense sequence
  source 1..20: mol_type = other RNA
actcgtgtgaggaaagccag

SEQ ID NO: 7607 - RNA, 20 nt, synthetic construct
  misc_feature 1..20: note = antisense sequence
  source 1..20: mol_type = other RNA
cactcgtgtgaggaaagcca

SEQ ID NO: 7608 - RNA, 20 nt, synthetic construct
  misc_feature 1..20: note = antisense sequence
  source 1..20: mol_type = other RNA
ccactcgtgtgaggaaagcc

SEQ ID NO: 7609 - RNA, 20 nt, synthetic construct
  misc_feature 1..20: note = antisense sequence
  source 1..20: mol_type = other RNA
tccactcgtgtgaggaaagc

SEQ ID NO: 7610 - RNA, 20 nt, synthetic construct
  misc_feature 1..20: note = antisense sequence
  source 1..20: mol_type = other RNA
aacttccactcgtgtgagga

SEQ ID NO: 7611 - RNA, 20 nt, synthetic construct
  misc_feature 1..20: note = antisense sequence
  source 1..20: mol_type = other RNA
gaacttccactcgtgtgagg

SEQ ID NO: 7612 - RNA, 20 nt, synthetic construct
  misc_feature 1..20: note = antisense sequence
  source 1..20: mol_type = other RNA
tgaacttccactcgtgtgag

SEQ ID NO: 7613 - RNA, 20 nt, synthetic construct
  misc_feature 1..20: note = antisense sequence
  source 1..20: mol_type = other RNA
atgaacttccactcgtgtga

SEQ ID NO: 7614 - RNA, 20 nt, synthetic construct
  misc_feature 1..20: note = antisense sequence
  source 1..20: mol_type = other RNA
catgaacttccactcgtgtg

SEQ ID NO: 7615 - RNA, 20 nt, synthetic construct
  misc_feature 1..20: note = antisense sequence
  source 1..20: mol_type = other RNA
gcatgaacttccactcgtgt

SEQ ID NO: 7616 - RNA, 20 nt, synthetic construct
  misc_feature 1..20: note = antisense sequence
  source 1..20: mol_type = other RNA
agcatgaacttccactcgtg

SEQ ID NO: 7617 - RNA, 20 nt, synthetic construct
  misc_feature 1..20: note = antisense sequence
  source 1..20: mol_type = other RNA
cagcatgaacttccactcgt

SEQ ID NO: 7618 - RNA, 20 nt, synthetic construct
  misc_feature 1..20: note = antisense sequence
  source 1..20: mol_type = other RNA
acagcatgaacttccactcg

SEQ ID NO: 7619 - RNA, 20 nt, synthetic construct
  misc_feature 1..20: note = antisense sequence
  source 1..20: mol_type = other RNA
tgacagcatgaacttccact

SEQ ID NO: 7620 - RNA, 20 nt, synthetic construct
  misc_feature 1..20: note = antisense sequence
  source 1..20: mol_type = other RNA
agctgacagcatgaacttcc

SEQ ID NO: 7621 - RNA, 20 nt, synthetic construct
  misc_feature 1..20: note = antisense sequence
  source 1..20: mol_type = other RNA
ttagctgacagcatgaactt

SEQ ID NO: 7622 - RNA, 20 nt, synthetic construct
  misc_feature 1..20: note = antisense sequence
  source 1..20: mol_type = other RNA
tttagctgacagcatgaact

SEQ ID NO: 7623 - RNA, 20 nt, synthetic construct
  misc_feature 1..20: note = antisense sequence
  source 1..20: mol_type = other RNA
ctttagctgacagcatgaac

SEQ ID NO: 7624 - RNA, 20 nt, synthetic construct
  misc_feature 1..20: note = antisense sequence
  source 1..20: mol_type = other RNA
gctttagctgacagcatgaa

SEQ ID NO: 7625 - RNA, 20 nt, synthetic construct
  misc_feature 1..20: note = antisense sequence
  source 1..20: mol_type = other RNA
ttggtgctttagctgacagc

SEQ ID NO: 7626 - RNA, 20 nt, synthetic construct
  misc_feature 1..20: note = antisense sequence
  source 1..20: mol_type = other RNA
aattggtgctttagctgaca

SEQ ID NO: 7627 - RNA, 20 nt, synthetic construct
  misc_feature 1..20: note = antisense sequence
  source 1..20: mol_type = other RNA
cagaattggtgctttagctg

SEQ ID NO: 7628 - RNA, 20 nt, synthetic construct
  misc_feature 1..20: note = antisense sequence
  source 1..20: mol_type = other RNA
aacagaattggtgctttagc

SEQ ID NO: 7629 - RNA, 20 nt, synthetic construct
  misc_feature 1..20: note = antisense sequence
  source 1..20: mol_type = other RNA
gtggaacagaattggtgctt

SEQ ID NO: 7630 - RNA, 20 nt, synthetic construct
  misc_feature 1..20: note = antisense sequence
  source 1..20: mol_type = other RNA
taacagaggataagaggcca

SEQ ID NO: 7631 - RNA, 20 nt, synthetic construct
  misc_feature 1..20: note = antisense sequence
  source 1..20: mol_type = other RNA
ggcctttgcagattccattt

SEQ ID NO: 7632 - RNA, 20 nt, synthetic construct
  misc_feature 1..20: note = antisense sequence
  source 1..20: mol_type = other RNA
ccacccattgaatctaggat

SEQ ID NO: 7633 - RNA, 20 nt, synthetic construct
  misc_feature 1..20: note = antisense sequence
  source 1..20: mol_type = other RNA
tccacccattgaatctagga

SEQ ID NO: 7634 - RNA, 20 nt, synthetic construct
  misc_feature 1..20: note = antisense sequence
  source 1..20: mol_type = other RNA
ttccacccattgaatctagg

SEQ ID NO: 7635 - RNA, 20 nt, synthetic construct
  misc_feature 1..20: note = antisense sequence
  source 1..20: mol_type = other RNA
tttccacccattgaatctag

SEQ ID NO: 7636 - RNA, 20 nt, synthetic construct
  misc_feature 1..20: note = antisense sequence
  source 1..20: mol_type = other RNA
gcaacacgactttgactttt

SEQ ID NO: 7637 - RNA, 20 nt, synthetic construct
  misc_feature 1..20: note = antisense sequence
  source 1..20: mol_type = other RNA
tgcaacacgactttgacttt

SEQ ID NO: 7638 - RNA, 20 nt, synthetic construct
  misc_feature 1..20: note = antisense sequence
  source 1..20: mol_type = other RNA
gatggtttggaattgtgtac

SEQ ID NO: 7639 - RNA, 20 nt, synthetic construct
  misc_feature 1..20: note = antisense sequence
  source 1..20: mol_type = other RNA
cgatggtttggaattgtgta

SEQ ID NO: 7640 - RNA, 20 nt, synthetic construct
  misc_feature 1..20: note = antisense sequence
  source 1..20: mol_type = other RNA
tggtcgatggtttggaattg

SEQ ID NO: 7641 - RNA, 20 nt, synthetic construct
  misc_feature 1..20: note = antisense sequence
  source 1..20: mol_type = other RNA
gtggtcgatggtttggaatt

SEQ ID NO: 7642 - RNA, 20 nt, synthetic construct
  misc_feature 1..20: note = antisense sequence
  source 1..20: mol_type = other RNA
ggtggtcgatggtttggaat

SEQ ID NO: 7643 - RNA, 20 nt, synthetic construct
  misc_feature 1..20: note = antisense sequence
  source 1..20: mol_type = other RNA
gggtggtcgatggtttggaa

SEQ ID NO: 7644 - RNA, 20 nt, synthetic construct
  misc_feature 1..20: note = antisense sequence
  source 1..20: mol_type = other RNA
agggtggtcgatggtttgga

SEQ ID NO: 7645 - RNA, 20 nt, synthetic construct
  misc_feature 1..20: note = antisense sequence
  source 1..20: mol_type = other RNA
aagggtggtcgatggtttgg

SEQ ID NO: 7646 - RNA, 20 nt, synthetic construct
  misc_feature 1..20: note = antisense sequence
  source 1..20: mol_type = other RNA
caagggtggtcgatggtttg

SEQ ID NO: 7647 - RNA, 20 nt, synthetic construct
  misc_feature 1..20: note = antisense sequence
  source 1..20: mol_type = other RNA
gcaagggtggtcgatggttt

SEQ ID NO: 7648 - RNA, 20 nt, synthetic construct
  misc_feature 1..20: note = antisense sequence
  source 1..20: mol_type = other RNA
tgcaagggtggtcgatggtt

SEQ ID NO: 7649 - RNA, 20 nt, synthetic construct
  misc_feature 1..20: note = antisense sequence
  source 1..20: mol_type = other RNA
gagcagcccagtattgagca

SEQ ID NO: 7650 - RNA, 20 nt, synthetic construct
  misc_feature 1..20: note = antisense sequence
  source 1..20: mol_type = other RNA
tgagcagcccagtattgagc

SEQ ID NO: 7651 - RNA, 20 nt, synthetic construct
  misc_feature 1..20: note = antisense sequence
  source 1..20: mol_type = other RNA
ctgagcagcccagtattgag

SEQ ID NO: 7652 - RNA, 20 nt, synthetic construct
  misc_feature 1..20: note = antisense sequence
  source 1..20: mol_type = other RNA
gaagagcgaccattccctag

SEQ ID NO: 7653 - RNA, 20 nt, synthetic construct
  misc_feature 1..20: note = antisense sequence
  source 1..20: mol_type = other RNA
atgaggaagagcgaccattc

SEQ ID NO: 7654 - RNA, 20 nt, synthetic construct
  misc_feature 1..20: note = antisense sequence
  source 1..20: mol_type = other RNA
aaatgaggaagagcgaccat

SEQ ID NO: 7655 - RNA, 20 nt, synthetic construct
  misc_feature 1..20: note = antisense sequence
  source 1..20: mol_type = other RNA
aaaatgaggaagagcgacca

SEQ ID NO: 7656 - RNA, 20 nt, synthetic construct
  misc_feature 1..20: note = antisense sequence
  source 1..20: mol_type = other RNA
gaaggagaggtttgtcttaa

SEQ ID NO: 7657 - RNA, 20 nt, synthetic construct
  misc_feature 1..20: note = antisense sequence
  source 1..20: mol_type = other RNA
agaaggagaggtttgtctta

SEQ ID NO: 7658 - RNA, 20 nt, synthetic construct
  misc_feature 1..20: note = antisense sequence
  source 1..20: mol_type = other RNA
ccagaaggagaggtttgtct

SEQ ID NO: 7659 - RNA, 20 nt, synthetic construct
  misc_feature 1..20: note = antisense sequence
  source 1..20: mol_type = other RNA
tccagaaggagaggtttgtc

SEQ ID NO: 7660 - RNA, 20 nt, synthetic construct
  misc_feature 1..20: note = antisense sequence
  source 1..20: mol_type = other RNA
gcaggtagacagggtggatc

SEQ ID NO: 7661 - RNA, 20 nt, synthetic construct
  misc_feature 1..20: note = antisense sequence
  source 1..20: mol_type = other RNA
agcaggtagacagggtggat

SEQ ID NO: 7662 - RNA, 20 nt, synthetic construct
  misc_feature 1..20: note = antisense sequence
  source 1..20: mol_type = other RNA
ctgagcaggtagacagggtg

SEQ ID NO: 7663 - RNA, 20 nt, synthetic construct
  misc_feature 1..20: note = antisense sequence
  source 1..20: mol_type = other RNA
tctgagcaggtagacagggt

SEQ ID NO: 7664 - RNA, 20 nt, synthetic construct
  misc_feature 1..20: note = antisense sequence
  source 1..20: mol_type = other RNA
tctctgagcaggtagacagg

SEQ ID NO: 7665 - RNA, 20 nt, synthetic construct
  misc_feature 1..20: note = antisense sequence
  source 1..20: mol_type = other RNA
atctctgagcaggtagacag

SEQ ID NO: 7666 - RNA, 20 nt, synthetic construct
  misc_feature 1..20: note = antisense sequence
  source 1..20: mol_type = other RNA
aatctctgagcaggtagaca

SEQ ID NO: 7667 - RNA, 20 nt, synthetic construct
  misc_feature 1..20: note = antisense sequence
  source 1..20: mol_type = other RNA
gtagaatctctgagcaggta

SEQ ID NO: 7668 - RNA, 20 nt, synthetic construct
  misc_feature 1..20: note = antisense sequence
  source 1..20: mol_type = other RNA
agtagaatctctgagcaggt

SEQ ID NO: 7669 - RNA, 20 nt, synthetic construct
  misc_feature 1..20: note = antisense sequence
  source 1..20: mol_type = other RNA
agggagtagaatctctgagc

SEQ ID NO: 7670 - RNA, 20 nt, synthetic construct
  misc_feature 1..20: note = antisense sequence
  source 1..20: mol_type = other RNA
gagggagtagaatctctgag

SEQ ID NO: 7671 - RNA, 20 nt, synthetic construct
  misc_feature 1..20: note = antisense sequence
  source 1..20: mol_type = other RNA
caggagagggagtagaatct

SEQ ID NO: 7672 - RNA, 20 nt, synthetic construct
  misc_feature 1..20: note = antisense sequence
  source 1..20: mol_type = other RNA
acaggagagggagtagaatc

SEQ ID NO: 7673 - RNA, 20 nt, synthetic construct
  misc_feature 1..20: note = antisense sequence
  source 1..20: mol_type = other RNA
tcacaggagagggagtagaa

SEQ ID NO: 7674 - RNA, 20 nt, synthetic construct
  misc_feature 1..20: note = antisense sequence
  source 1..20: mol_type = other RNA
caaaccattaagggcttgag

SEQ ID NO: 7675 - RNA, 20 nt, synthetic construct
  misc_feature 1..20: note = antisense sequence
  source 1..20: mol_type = other RNA
acaaaccattaagggcttga

SEQ ID NO: 7676 - RNA, 20 nt, synthetic construct
  misc_feature 1..20: note = antisense sequence
  source 1..20: mol_type = other RNA
gacaaaccattaagggcttg

SEQ ID NO: 7677 - RNA, 20 nt, synthetic construct
  misc_feature 1..20: note = antisense sequence
  source 1..20: mol_type = other RNA
tgacaaaccattaagggctt

SEQ ID NO: 7678 - RNA, 20 nt, synthetic construct
  misc_feature 1..20: note = antisense sequence
  source 1..20: mol_type = other RNA
atgacaaaccattaagggct

SEQ ID NO: 7679 - RNA, 20 nt, synthetic construct
  misc_feature 1..20: note = antisense sequence
  source 1..20: mol_type = other RNA
tcagggcaatgacaaaccat

SEQ ID NO: 7680 - RNA, 20 nt, synthetic construct
  misc_feature 1..20: note = antisense sequence
  source 1..20: mol_type = other RNA
ttcagggcaatgacaaacca

SEQ ID NO: 7681 - RNA, 20 nt, synthetic construct
  misc_feature 1..20: note = antisense sequence
  source 1..20: mol_type = other RNA
gagatgggcagtgttaataa

SEQ ID NO: 7682 - RNA, 20 nt, synthetic construct
  misc_feature 1..20: note = antisense sequence
  source 1..20: mol_type = other RNA
ggagatgggcagtgttaata

SEQ ID NO: 7683 - RNA, 20 nt, synthetic construct
  misc_feature 1..20: note = antisense sequence
  source 1..20: mol_type = other RNA
atgagggagatgggcagtgt

SEQ ID NO: 7684 - RNA, 20 nt, synthetic construct
  misc_feature 1..20: note = antisense sequence
  source 1..20: mol_type = other RNA
aaatgagggagatgggcagt

SEQ ID NO: 7685 - RNA, 20 nt, synthetic construct
  misc_feature 1..20: note = antisense sequence
  source 1..20: mol_type = other RNA
aaaatgagggagatgggcag

SEQ ID NO: 7686 - RNA, 20 nt, synthetic construct
  misc_feature 1..20: note = antisense sequence
  source 1..20: mol_type = other RNA
aagaataggaggcaagaatg

SEQ ID NO: 7687 - RNA, 20 nt, synthetic construct
  misc_feature 1..20: note = antisense sequence
  source 1..20: mol_type = other RNA
tcagaaagggagcaagaatc

SEQ ID NO: 7688 - RNA, 20 nt, synthetic construct
  misc_feature 1..20: note = antisense sequence
  source 1..20: mol_type = other RNA
ggtaatcagaaagggagcaa

SEQ ID NO: 7689 - RNA, 20 nt, synthetic construct
  misc_feature 1..20: note = antisense sequence
  source 1..20: mol_type = other RNA
gggtaatcagaaagggagca

SEQ ID NO: 7690 - RNA, 20 nt, synthetic construct
  misc_feature 1..20: note = antisense sequence
  source 1..20: mol_type = other RNA
agggtaatcagaaagggagc

SEQ ID NO: 7691 - RNA, 20 nt, synthetic construct
  misc_feature 1..20: note = antisense sequence
  source 1..20: mol_type = other RNA
aagggtaatcagaaagggag

SEQ ID NO: 7692 - RNA, 20 nt, synthetic construct
  misc_feature 1..20: note = antisense sequence
  source 1..20: mol_type = other RNA
ggcaagggtaatcagaaagg

SEQ ID NO: 7693 - RNA, 20 nt, synthetic construct
  misc_feature 1..20: note = antisense sequence
  source 1..20: mol_type = other RNA
aggcaagggtaatcagaaag

SEQ ID NO: 7694 - RNA, 20 nt, synthetic construct
  misc_feature 1..20: note = antisense sequence
  source 1..20: mol_type = other RNA
taggcaagggtaatcagaaa

SEQ ID NO: 7695 - RNA, 20 nt, synthetic construct
  misc_feature 1..20: note = antisense sequence
  source 1..20: mol_type = other RNA
ctaggcaagggtaatcagaa

SEQ ID NO: 7696 - RNA, 20 nt, synthetic construct
  misc_feature 1..20: note = antisense sequence
  source 1..20: mol_type = other RNA
actaggcaagggtaatcaga

SEQ ID NO: 7697 - RNA, 20 nt, synthetic construct
  misc_feature 1..20: note = antisense sequence
  source 1..20: mol_type = other RNA
aactaggcaagggtaatcag

SEQ ID NO: 7698 - RNA, 20 nt, synthetic construct
  misc_feature 1..20: note = antisense sequence
  source 1..20: mol_type = other RNA
aaactaggcaagggtaatca

SEQ ID NO: 7699 - RNA, 20 nt, synthetic construct
  misc_feature 1..20: note = antisense sequence
  source 1..20: mol_type = other RNA
aaaactaggcaagggtaatc

SEQ ID NO: 7700 - RNA, 20 nt, synthetic construct
  misc_feature 1..20: note = antisense sequence
  source 1..20: mol_type = other RNA
agaaaactaggcaagggtaa

SEQ ID NO: 7701 - RNA, 20 nt, synthetic construct
  misc_feature 1..20: note = antisense sequence
  source 1..20: mol_type = other RNA
aagaaaactaggcaagggta

SEQ ID NO: 7702 - RNA, 20 nt, synthetic construct
  misc_feature 1..20: note = antisense sequence
  source 1..20: mol_type = other RNA
aaggaagaaaactaggcaag

SEQ ID NO: 7703 - RNA, 20 nt, synthetic construct
  misc_feature 1..20: note = antisense sequence
  source 1..20: mol_type = other RNA
gagcaaaggaagaaaactag

SEQ ID NO: 7704 - RNA, 20 nt, synthetic construct
  misc_feature 1..20: note = antisense sequence
  source 1..20: mol_type = other RNA
tgttgacatctgaaggtgaa

SEQ ID NO: 7705 - RNA, 20 nt, synthetic construct
  misc_feature 1..20: note = antisense sequence
  source 1..20: mol_type = other RNA
aatgttgacatctgaaggtg

SEQ ID NO: 7706 - RNA, 20 nt, synthetic construct
  misc_feature 1..20: note = antisense sequence
  source 1..20: mol_type = other RNA
gaagagcactaaatgttgac

SEQ ID NO: 7707 - RNA, 20 nt, synthetic construct
  misc_feature 1..20: note = antisense sequence
  source 1..20: mol_type = other RNA
cctcgaaatatagtgagaag

SEQ ID NO: 7708 - RNA, 20 nt, synthetic construct
  misc_feature 1..20: note = antisense sequence
  source 1..20: mol_type = other RNA
cacctcgaaatatagtgaga

SEQ ID NO: 7709 - RNA, 20 nt, synthetic construct
  misc_feature 1..20: note = antisense sequence
  source 1..20: mol_type = other RNA
ccacctcgaaatatagtgag

SEQ ID NO: 7710 - RNA, 20 nt, synthetic construct
  misc_feature 1..20: note = antisense sequence
  source 1..20: mol_type = other RNA
accacctcgaaatatagtga

SEQ ID NO: 7711 - RNA, 20 nt, synthetic construct
  misc_feature 1..20: note = antisense sequence
  source 1..20: mol_type = other RNA
taccacctcgaaatatagtg

SEQ ID NO: 7712 - RNA, 20 nt, synthetic construct
  misc_feature 1..20: note = antisense sequence
  source 1..20: mol_type = other RNA
gttgaggccctaaaagtaaa

SEQ ID NO: 7713 - RNA, 20 nt, synthetic construct
  misc_feature 1..20: note = antisense sequence
  source 1..20: mol_type = other RNA
gtatgagcatgatatgagca

SEQ ID NO: 7714 - RNA, 20 nt, synthetic construct
  misc_feature 1..20: note = antisense sequence
  source 1..20: mol_type = other RNA
tgtatgagcatgatatgagc

SEQ ID NO: 7715 - RNA, 20 nt, synthetic construct
  misc_feature 1..20: note = antisense sequence
  source 1..20: mol_type = other RNA
aggcaagtgggctcagtctt

SEQ ID NO: 7716 - RNA, 20 nt, synthetic construct
  misc_feature 1..20: note = antisense sequence
  source 1..20: mol_type = other RNA
gtaggcaagtgggctcagtc

SEQ ID NO: 7717 - RNA, 20 nt, synthetic construct
  misc_feature 1..20: note = antisense sequence
  source 1..20: mol_type = other RNA
ctgtaggcaagtgggctcag

SEQ ID NO: 7718 - RNA, 20 nt, synthetic construct
  misc_feature 1..20: note = antisense sequence
  source 1..20: mol_type = other RNA
ttctgtaggcaagtgggctc

SEQ ID NO: 7719 - RNA, 20 nt, synthetic construct
  misc_feature 1..20: note = antisense sequence
  source 1..20: mol_type = other RNA
gagttacttctgtaggcaag

SEQ ID NO: 7720 - RNA, 20 nt, synthetic construct
  misc_feature 1..20: note = antisense sequence
  source 1..20: mol_type = other RNA
aatgagttacttctgtaggc

SEQ ID NO: 7721 - RNA, 20 nt, synthetic construct
  misc_feature 1..20: note = antisense sequence
  source 1..20: mol_type = other RNA
ggatgcactgataatgagtt

SEQ ID NO: 7722 - RNA, 20 nt, synthetic construct
  misc_feature 1..20: note = antisense sequence
  source 1..20: mol_type = other RNA
aggatgcactgataatgagt

SEQ ID NO: 7723 - RNA, 20 nt, synthetic construct
  misc_feature 1..20: note = antisense sequence
  source 1..20: mol_type = other RNA
aaggatgcactgataatgag

SEQ ID NO: 7724 - RNA, 20 nt, synthetic construct
  misc_feature 1..20: note = antisense sequence
  source 1..20: mol_type = other RNA
gaaaggatgcactgataatg

SEQ ID NO: 7725 - RNA, 20 nt, synthetic construct
  misc_feature 1..20: note = antisense sequence
  source 1..20: mol_type = other RNA
aaggccaagaaaggatgcac

SEQ ID NO: 7726 - RNA, 20 nt, synthetic construct
  misc_feature 1..20: note = antisense sequence
  source 1..20: mol_type = other RNA
agtgggaaggaagaaaggcc

SEQ ID NO: 7727 - RNA, 20 nt, synthetic construct
  misc_feature 1..20: note = antisense sequence
  source 1..20: mol_type = other RNA
gggtttctccaaaagtagat

SEQ ID NO: 7728 - RNA, 20 nt, synthetic construct
  misc_feature 1..20: note = antisense sequence
  source 1..20: mol_type = other RNA
ttcgggtttctccaaaagta

SEQ ID NO: 7729 - RNA, 20 nt, synthetic construct
  misc_feature 1..20: note = antisense sequence
  source 1..20: mol_type = other RNA
gttcgggtttctccaaaagt

SEQ ID NO: 7730 - RNA, 20 nt, synthetic construct
  misc_feature 1..20: note = antisense sequence
  source 1..20: mol_type = other RNA
agttcgggtttctccaaaag

SEQ ID NO: 7731 - RNA, 20 nt, synthetic construct
  misc_feature 1..20: note = antisense sequence
  source 1..20: mol_type = other RNA
tagttcgggtttctccaaaa

SEQ ID NO: 7732 - RNA, 20 nt, synthetic construct
  misc_feature 1..20: note = antisense sequence
  source 1..20: mol_type = other RNA
ttagttcgggtttctccaaa

SEQ ID NO: 7733 - RNA, 20 nt, synthetic construct
  misc_feature 1..20: note = antisense sequence
  source 1..20: mol_type = other RNA
cttagttcgggtttctccaa

SEQ ID NO: 7734 - RNA, 20 nt, synthetic construct
  misc_feature 1..20: note = antisense sequence
  source 1..20: mol_type = other RNA
tcttagttcgggtttctcca

SEQ ID NO: 7735 - RNA, 20 nt, synthetic construct
  misc_feature 1..20: note = antisense sequence
  source 1..20: mol_type = other RNA
gtcttagttcgggtttctcc

SEQ ID NO: 7736 - RNA, 20 nt, synthetic construct
  misc_feature 1..20: note = antisense sequence
  source 1..20: mol_type = other RNA
gctgtcttagttcgggtttc

SEQ ID NO: 7737 - RNA, 20 nt, synthetic construct
  misc_feature 1..20: note = antisense sequence
  source 1..20: mol_type = other RNA
agctgtcttagttcgggttt

SEQ ID NO: 7738 - RNA, 20 nt, synthetic construct
  misc_feature 1..20: note = antisense sequence
  source 1..20: mol_type = other RNA
aagctgtcttagttcgggtt

SEQ ID NO: 7739 - RNA, 20 nt, synthetic construct
  misc_feature 1..20: note = antisense sequence
  source 1..20: mol_type = other RNA
gatggaaggactaactctat

SEQ ID NO: 7740 - RNA, 20 nt, synthetic construct
  misc_feature 1..20: note = antisense sequence
  source 1..20: mol_type = other RNA
ggatggaaggactaactcta

SEQ ID NO: 7741 - RNA, 20 nt, synthetic construct
  misc_feature 1..20: note = antisense sequence
  source 1..20: mol_type = other RNA
aggatggaaggactaactct

SEQ ID NO: 7742 - RNA, 20 nt, synthetic construct
  misc_feature 1..20: note = antisense sequence
  source 1..20: mol_type = other RNA
gaggatggaaggactaactc

SEQ ID NO: 7743 - RNA, 20 nt, synthetic construct
  misc_feature 1..20: note = antisense sequence
  source 1..20: mol_type = other RNA
tacagaggatggaaggacta

SEQ ID NO: 7744 - RNA, 20 nt, synthetic construct
  misc_feature 1..20: note = antisense sequence
  source 1..20: mol_type = other RNA
gtacagaggatggaaggact

SEQ ID NO: 7745 - RNA, 20 nt, synthetic construct
  misc_feature 1..20: note = antisense sequence
  source 1..20: mol_type = other RNA
agtacagaggatggaaggac

SEQ ID NO: 7746 - RNA, 20 nt, synthetic construct
  misc_feature 1..20: note = antisense sequence
  source 1..20: mol_type = other RNA
aagtacagaggatggaagga

SEQ ID NO: 7747 - RNA, 20 nt, synthetic construct
  misc_feature 1..20: note = antisense sequence
  source 1..20: mol_type = other RNA
aggaagtacagaggatggaa

SEQ ID NO: 7748 - RNA, 20 nt, synthetic construct
  misc_feature 1..20: note = antisense sequence
  source 1..20: mol_type = other RNA
ggatttggattcaggaagta

SEQ ID NO: 7749 - RNA, 20 nt, synthetic construct
  misc_feature 1..20: note = antisense sequence
  source 1..20: mol_type = other RNA
tgaggatttggattcaggaa

SEQ ID NO: 7750 - RNA, 20 nt, synthetic construct
  misc_feature 1..20: note = antisense sequence
  source 1..20: mol_type = other RNA
gatgaggatttggattcagg

SEQ ID NO: 7751 - RNA, 20 nt, synthetic construct
  misc_feature 1..20: note = antisense sequence
  source 1..20: mol_type = other RNA
agatgaggatttggattcag

SEQ ID NO: 7752 - RNA, 20 nt, synthetic construct
  misc_feature 1..20: note = antisense sequence
  source 1..20: mol_type = other RNA
ccagatgaggatttggattc

SEQ ID NO: 7753 - RNA, 20 nt, synthetic construct
  misc_feature 1..20: note = antisense sequence
  source 1..20: mol_type = other RNA
cctaaagtaatccagatgag

SEQ ID NO: 7754 - RNA, 20 nt, synthetic construct
  misc_feature 1..20: note = antisense sequence
  source 1..20: mol_type = other RNA
tagaagttgaggctagagag

SEQ ID NO: 7755 - RNA, 20 nt, synthetic construct
  misc_feature 1..20: note = antisense sequence
  source 1..20: mol_type = other RNA
gtagaagttgaggctagaga

SEQ ID NO: 7756 - RNA, 20 nt, synthetic construct
  misc_feature 1..20: note = antisense sequence
  source 1..20: mol_type = other RNA
tgcagtagaagttgaggcta

SEQ ID NO: 7757 - RNA, 20 nt, synthetic construct
  misc_feature 1..20: note = antisense sequence
  source 1..20: mol_type = other RNA
aatgccaagtagctcagtat

SEQ ID NO: 7758 - RNA, 20 nt, synthetic construct
  misc_feature 1..20: note = antisense sequence
  source 1..20: mol_type = other RNA
aaatgccaagtagctcagta

SEQ ID NO: 7759 - RNA, 20 nt, synthetic construct
  misc_feature 1..20: note = antisense sequence
  source 1..20: mol_type = other RNA
taaatgccaagtagctcagt

SEQ ID NO: 7760 - RNA, 20 nt, synthetic construct
  misc_feature 1..20: note = antisense sequence
  source 1..20: mol_type = other RNA
ccactcctttgataaatgcc

SEQ ID NO: 7761 - RNA, 20 nt, synthetic construct
  misc_feature 1..20: note = antisense sequence
  source 1..20: mol_type = other RNA
accactcctttgataaatgc

SEQ ID NO: 7762 - RNA, 20 nt, synthetic construct
  misc_feature 1..20: note = antisense sequence
  source 1..20: mol_type = other RNA
acttgatgcaacttcagcaa

SEQ ID NO: 7763 - RNA, 20 nt, synthetic construct
  misc_feature 1..20: note = antisense sequence
  source 1..20: mol_type = other RNA
gaacttgatgcaacttcagc

SEQ ID NO: 7764 - RNA, 20 nt, synthetic construct
  misc_feature 1..20: note = antisense sequence
  source 1..20: mol_type = other RNA
ggtctgaacttgatgcaact

SEQ ID NO: 7765 - RNA, 20 nt, synthetic construct
  misc_feature 1..20: note = antisense sequence
  source 1..20: mol_type = other RNA
aggtctgaacttgatgcaac

SEQ ID NO: 7766 - RNA, 20 nt, synthetic construct
  misc_feature 1..20: note = antisense sequence
  source 1..20: mol_type = other RNA
ataggtctgaacttgatgca

SEQ ID NO: 7767 - RNA, 20 nt, synthetic construct
  misc_feature 1..20: note = antisense sequence
  source 1..20: mol_type = other RNA
aataggtctgaacttgatgc

SEQ ID NO: 7768 - RNA, 20 nt, synthetic construct
  misc_feature 1..20: note = antisense sequence
  source 1..20: mol_type = other RNA
gaataggtctgaacttgatg

SEQ ID NO: 7769 - RNA, 20 nt, synthetic construct
  misc_feature 1..20: note = antisense sequence
  source 1..20: mol_type = other RNA
ttagagagagaagcacaact

SEQ ID NO: 7770 - RNA, 20 nt, synthetic construct
  misc_feature 1..20: note = antisense sequence
  source 1..20: mol_type = other RNA
cttagagagagaagcacaac

SEQ ID NO: 7771 - RNA, 20 nt, synthetic construct
  misc_feature 1..20: note = antisense sequence
  source 1..20: mol_type = other RNA
aacttagagagagaagcaca

SEQ ID NO: 7772 - RNA, 20 nt, synthetic construct
  misc_feature 1..20: note = antisense sequence
  source 1..20: mol_type = other RNA
taacttagagagagaagcac

SEQ ID NO: 7773 - RNA, 20 nt, synthetic construct
  misc_feature 1..20: note = antisense sequence
  source 1..20: mol_type = other RNA
atgccaggtcctgaggatat

SEQ ID NO: 7774 - RNA, 20 nt, synthetic construct
  misc_feature 1..20: note = antisense sequence
  source 1..20: mol_type = other RNA
ttatgccaggtcctgaggat

SEQ ID NO: 7775 - RNA, 20 nt, synthetic construct
  misc_feature 1..20: note = antisense sequence
  source 1..20: mol_type = other RNA
atttatgccaggtcctgagg

SEQ ID NO: 7776 - RNA, 20 nt, synthetic construct
  misc_feature 1..20: note = antisense sequence
  source 1..20: mol_type = other RNA
gcatttatgccaggtcctga

SEQ ID NO: 7777 - RNA, 20 nt, synthetic construct
  misc_feature 1..20: note = antisense sequence
  source 1..20: mol_type = other RNA
ccatttcagaggatcatcaa

SEQ ID NO: 7778 - RNA, 20 nt, synthetic construct
  misc_feature 1..20: note = antisense sequence
  source 1..20: mol_type = other RNA
gacaagtcaattactccatc

SEQ ID NO: 7779 - RNA, 20 nt, synthetic construct
  misc_feature 1..20: note = antisense sequence
  source 1..20: mol_type = other RNA
ggacaagtcaattactccat

SEQ ID NO: 7780 - RNA, 20 nt, synthetic construct
  misc_feature 1..20: note = antisense sequence
  source 1..20: mol_type = other RNA
aggacaagtcaattactcca

SEQ ID NO: 7781 - RNA, 20 nt, synthetic construct
  misc_feature 1..20: note = antisense sequence
  source 1..20: mol_type = other RNA
taggacaagtcaattactcc

SEQ ID NO: 7782 - RNA, 20 nt, synthetic construct
  misc_feature 1..20: note = antisense sequence
  source 1..20: mol_type = other RNA
ggttaggacaagtcaattac

SEQ ID NO: 7783 - RNA, 20 nt, synthetic construct
  misc_feature 1..20: note = antisense sequence
  source 1..20: mol_type = other RNA
gctttaccattcacttagct

SEQ ID NO: 7784 - RNA, 20 nt, synthetic construct
  misc_feature 1..20: note = antisense sequence
  source 1..20: mol_type = other RNA
atttataccatgtgctaggc

SEQ ID NO: 7785 - RNA, 20 nt, synthetic construct
  misc_feature 1..20: note = antisense sequence
  source 1..20: mol_type = other RNA
gcagctaggctttattgaat

SEQ ID NO: 7786 - RNA, 20 nt, synthetic construct
  misc_feature 1..20: note = antisense sequence
  source 1..20: mol_type = other RNA
ggcagctaggctttattgaa

SEQ ID NO: 7787 - RNA, 20 nt, synthetic construct
  misc_feature 1..20: note = antisense sequence
  source 1..20: mol_type = other RNA
atggcagctaggctttattg

SEQ ID NO: 7788 - RNA, 20 nt, synthetic construct
  misc_feature 1..20: note = antisense sequence
  source 1..20: mol_type = other RNA
aatggcagctaggctttatt

SEQ ID NO: 7789 - RNA, 20 nt, synthetic construct
  misc_feature 1..20: note = antisense sequence
  source 1..20: mol_type = other RNA
taatggcagctaggctttat

SEQ ID NO: 7790 - RNA, 20 nt, synthetic construct
  misc_feature 1..20: note = antisense sequence
  source 1..20: mol_type = other RNA
ataatggcagctaggcttta

SEQ ID NO: 7791 - RNA, 20 nt, synthetic construct
  misc_feature 1..20: note = antisense sequence
  source 1..20: mol_type = other RNA
gataatggcagctaggcttt

SEQ ID NO: 7792 - RNA, 20 nt, synthetic construct
  misc_feature 1..20: note = antisense sequence
  source 1..20: mol_type = other RNA
tgataatggcagctaggctt

SEQ ID NO: 7793 - RNA, 20 nt, synthetic construct
  misc_feature 1..20: note = antisense sequence
  source 1..20: mol_type = other RNA
ctgataatggcagctaggct

SEQ ID NO: 7794 - RNA, 20 nt, synthetic construct
  misc_feature 1..20: note = antisense sequence
  source 1..20: mol_type = other RNA
actgataatggcagctaggc

SEQ ID NO: 7795 - RNA, 20 nt, synthetic construct
  misc_feature 1..20: note = antisense sequence
  source 1..20: mol_type = other RNA
cactgataatggcagctagg

SEQ ID NO: 7796 - RNA, 20 nt, synthetic construct
  misc_feature 1..20: note = antisense sequence
  source 1..20: mol_type = other RNA
ccactgataatggcagctag

SEQ ID NO: 7797 - RNA, 20 nt, synthetic construct
  misc_feature 1..20: note = antisense sequence
  source 1..20: mol_type = other RNA
accactgataatggcagcta

SEQ ID NO: 7798 - RNA, 20 nt, synthetic construct
  misc_feature 1..20: note = antisense sequence
  source 1..20: mol_type = other RNA
taccactgataatggcagct

SEQ ID NO: 7799 - RNA, 20 nt, synthetic construct
  misc_feature 1..20: note = antisense sequence
  source 1..20: mol_type = other RNA
actaccactgataatggcag

SEQ ID NO: 7800 - RNA, 20 nt, synthetic construct
  misc_feature 1..20: note = antisense sequence
  source 1..20: mol_type = other RNA
atactaccactgataatggc

SEQ ID NO: 7801 - RNA, 20 nt, synthetic construct
  misc_feature 1..20: note = antisense sequence
  source 1..20: mol_type = other RNA
agtgaaaatctgtgccctaa

SEQ ID NO: 7802 - RNA, 20 nt, synthetic construct
  misc_feature 1..20: note = antisense sequence
  source 1..20: mol_type = other RNA
tagtgaaaatctgtgcccta

SEQ ID NO: 7803 - RNA, 20 nt, synthetic construct
  misc_feature 1..20: note = antisense sequence
  source 1..20: mol_type = other RNA
tttagtgaaaatctgtgccc

SEQ ID NO: 7804 - RNA, 20 nt, synthetic construct
  misc_feature 1..20: note = antisense sequence
  source 1..20: mol_type = other RNA
gacctaaagtaagagggaaa

SEQ ID NO: 7805 - RNA, 20 nt, synthetic construct
  misc_feature 1..20: note = antisense sequence
  source 1..20: mol_type = other RNA
tgacctaaagtaagagggaa

SEQ ID NO: 7806 - RNA, 20 nt, synthetic construct
  misc_feature 1..20: note = antisense sequence
  source 1..20: mol_type = other RNA
atgacctaaagtaagaggga

SEQ ID NO: 7807 - RNA, 20 nt, synthetic construct
  misc_feature 1..20: note = antisense sequence
  source 1..20: mol_type = other RNA
aatgacctaaagtaagaggg

SEQ ID NO: 7808 - RNA, 20 nt, synthetic construct
  misc_feature 1..20: note = antisense sequence
  source 1..20: mol_type = other RNA
gagaagttgcattgaagtac

SEQ ID NO: 7809 - RNA, 20 nt, synthetic construct
  misc_feature 1..20: note = antisense sequence
  source 1..20: mol_type = other RNA
actgagaagttgcattgaag

SEQ ID NO: 7810 - RNA, 20 nt, synthetic construct
  misc_feature 1..20: note = antisense sequence
  source 1..20: mol_type = other RNA
atggagaaagaatgtctgca

SEQ ID NO: 7811 - RNA, 20 nt, synthetic construct
  misc_feature 1..20: note = antisense sequence
  source 1..20: mol_type = other RNA
tcggcatggagaaagaatgt

SEQ ID NO: 7812 - RNA, 20 nt, synthetic construct
  misc_feature 1..20: note = antisense sequence
  source 1..20: mol_type = other RNA
ttcggcatggagaaagaatg

SEQ ID NO: 7813 - RNA, 20 nt, synthetic construct
  misc_feature 1..20: note = antisense sequence
  source 1..20: mol_type = other RNA
tgttcggcatggagaaagaa

SEQ ID NO: 7814 - RNA, 20 nt, synthetic construct
  misc_feature 1..20: note = antisense sequence
  source 1..20: mol_type = other RNA
atgttcggcatggagaaaga

SEQ ID NO: 7815 - RNA, 20 nt, synthetic construct
  misc_feature 1..20: note = antisense sequence
  source 1..20: mol_type = other RNA
gacaaaagatgctgggaaag

SEQ ID NO: 7816 - RNA, 20 nt, synthetic construct
  misc_feature 1..20: note = antisense sequence
  source 1..20: mol_type = other RNA
cagacaaaagatgctgggaa

SEQ ID NO: 7817 - RNA, 20 nt, synthetic construct
  misc_feature 1..20: note = antisense sequence
  source 1..20: mol_type = other RNA
gtcagacaaaagatgctggg

SEQ ID NO: 7818 - RNA, 20 nt, synthetic construct
  misc_feature 1..20: note = antisense sequence
  source 1..20: mol_type = other RNA
tgtcagacaaaagatgctgg

SEQ ID NO: 7819 - RNA, 20 nt, synthetic construct
  misc_feature 1..20: note = antisense sequence
  source 1..20: mol_type = other RNA
gatagttaggagtctggtaa

SEQ ID NO: 7820 - RNA, 20 nt, synthetic construct
  misc_feature 1..20: note = antisense sequence
  source 1..20: mol_type = other RNA
agatagttaggagtctggta

SEQ ID NO: 7821 - RNA, 20 nt, synthetic construct
  misc_feature 1..20: note = antisense sequence
  source 1..20: mol_type = other RNA
atgactcagatagttaggag

SEQ ID NO: 7822 - RNA, 20 nt, synthetic construct
  misc_feature 1..20: note = antisense sequence
  source 1..20: mol_type = other RNA
aggagactatgactcagata

SEQ ID NO: 7823 - RNA, 20 nt, synthetic construct
  misc_feature 1..20: note = antisense sequence
  source 1..20: mol_type = other RNA
taggagactatgactcagat

SEQ ID NO: 7824 - RNA, 20 nt, synthetic construct
  misc_feature 1..20: note = antisense sequence
  source 1..20: mol_type = other RNA
ttaggagactatgactcaga

SEQ ID NO: 7825 - RNA, 20 nt, synthetic construct
  misc_feature 1..20: note = antisense sequence
  source 1..20: mol_type = other RNA
ggccatgtctgaaatatcta

SEQ ID NO: 7826 - RNA, 20 nt, synthetic construct
  misc_feature 1..20: note = antisense sequence
  source 1..20: mol_type = other RNA
aggccatgtctgaaatatct

SEQ ID NO: 7827 - RNA, 20 nt, synthetic construct
  misc_feature 1..20: note = antisense sequence
  source 1..20: mol_type = other RNA
caggccatgtctgaaatatc

SEQ ID NO: 7828 - RNA, 20 nt, synthetic construct
  misc_feature 1..20: note = antisense sequence
  source 1..20: mol_type = other RNA
tgctggtcaggccatgtctg

SEQ ID NO: 7829 - RNA, 20 nt, synthetic construct
  misc_feature 1..20: note = antisense sequence
  source 1..20: mol_type = other RNA
gtgctggtcaggccatgtct

SEQ ID NO: 7830 - RNA, 20 nt, synthetic construct
  misc_feature 1..20: note = antisense sequence
  source 1..20: mol_type = other RNA
tgtgttctgtgctggtcagg

SEQ ID NO: 7831 - RNA, 20 nt, synthetic construct
  misc_feature 1..20: note = antisense sequence
  source 1..20: mol_type = other RNA
ctgtgttctgtgctggtcag

SEQ ID NO: 7832 - RNA, 20 nt, synthetic construct
  misc_feature 1..20: note = antisense sequence
  source 1..20: mol_type = other RNA
cctgtgttctgtgctggtca

SEQ ID NO: 7833 - RNA, 20 nt, synthetic construct
  misc_feature 1..20: note = antisense sequence
  source 1..20: mol_type = other RNA
tggtcaagcagtgatagtcc

SEQ ID NO: 7834 - RNA, 20 nt, synthetic construct
  misc_feature 1..20: note = antisense sequence
  source 1..20: mol_type = other RNA
ctggtcaagcagtgatagtc

SEQ ID NO: 7835 - RNA, 20 nt, synthetic construct
  misc_feature 1..20: note = antisense sequence
  source 1..20: mol_type = other RNA
cctggtcaagcagtgatagt

SEQ ID NO: 7836 - RNA, 20 nt, synthetic construct
  misc_feature 1..20: note = antisense sequence
  source 1..20: mol_type = other RNA
ccctggtcaagcagtgatag

SEQ ID NO: 7837 - RNA, 20 nt, synthetic construct
  misc_feature 1..20: note = antisense sequence
  source 1..20: mol_type = other RNA
gatagcacataaacatgagc

SEQ ID NO: 7838 - RNA, 20 nt, synthetic construct
  misc_feature 1..20: note = antisense sequence
  source 1..20: mol_type = other RNA
cttaatgggagttcatgtga

SEQ ID NO: 7839 - RNA, 20 nt, synthetic construct
  misc_feature 1..20: note = antisense sequence
  source 1..20: mol_type = other RNA
acttaatgggagttcatgtg

SEQ ID NO: 7840 - RNA, 20 nt, synthetic construct
  misc_feature 1..20: note = antisense sequence
  source 1..20: mol_type = other RNA
cacttaatgggagttcatgt

SEQ ID NO: 7841 - RNA, 20 nt, synthetic construct
  misc_feature 1..20: note = antisense sequence
  source 1..20: mol_type = other RNA
ctcacttaatgggagttcat

SEQ ID NO: 7842 - RNA, 20 nt, synthetic construct
  misc_feature 1..20: note = antisense sequence
  source 1..20: mol_type = other RNA
cctcacttaatgggagttca

SEQ ID NO: 7843 - RNA, 20 nt, synthetic construct
  misc_feature 1..20: note = antisense sequence
  source 1..20: mol_type = other RNA
ccctcacttaatgggagttc

SEQ ID NO: 7844 - RNA, 20 nt, synthetic construct
  misc_feature 1..20: note = antisense sequence
  source 1..20: mol_type = other RNA
gccctcacttaatgggagtt

SEQ ID NO: 7845 - RNA, 20 nt, synthetic construct
  misc_feature 1..20: note = antisense sequence
  source 1..20: mol_type = other RNA
agccctcacttaatgggagt

SEQ ID NO: 7846 - RNA, 20 nt, synthetic construct
  misc_feature 1..20: note = antisense sequence
  source 1..20: mol_type = other RNA
gagccctcacttaatgggag

SEQ ID NO: 7847 - RNA, 20 nt, synthetic construct
  misc_feature 1..20: note = antisense sequence
  source 1..20: mol_type = other RNA
gggagccctcacttaatggg

SEQ ID NO: 7848 - RNA, 20 nt, synthetic construct
  misc_feature 1..20: note = antisense sequence
  source 1..20: mol_type = other RNA
tgggagccctcacttaatgg

SEQ ID NO: 7849 - RNA, 20 nt, synthetic construct
  misc_feature 1..20: note = antisense sequence
  source 1..20: mol_type = other RNA
gtgggagccctcacttaatg

SEQ ID NO: 7850 - RNA, 20 nt, synthetic construct
  misc_feature 1..20: note = antisense sequence
  source 1..20: mol_type = other RNA
tgtgggagccctcacttaat

SEQ ID NO: 7851 - RNA, 20 nt, synthetic construct
  misc_feature 1..20: note = antisense sequence
  source 1..20: mol_type = other RNA
atgtgggagccctcacttaa

SEQ ID NO: 7852 - RNA, 20 nt, synthetic construct
  misc_feature 1..20: note = antisense sequence
  source 1..20: mol_type = other RNA
tcagtgcaggatgtgggagc

SEQ ID NO: 7853 - RNA, 20 nt, synthetic construct
  misc_feature 1..20: note = antisense sequence
  source 1..20: mol_type = other RNA
atcagtgcaggatgtgggag

SEQ ID NO: 7854 - RNA, 20 nt, synthetic construct
  misc_feature 1..20: note = antisense sequence
  source 1..20: mol_type = other RNA
tatcagtgcaggatgtggga

SEQ ID NO: 7855 - RNA, 20 nt, synthetic construct
  misc_feature 1..20: note = antisense sequence
  source 1..20: mol_type = other RNA
atatcagtgcaggatgtggg

SEQ ID NO: 7856 - RNA, 20 nt, synthetic construct
  misc_feature 1..20: note = antisense sequence
  source 1..20: mol_type = other RNA
tatatcagtgcaggatgtgg

SEQ ID NO: 7857 - RNA, 20 nt, synthetic construct
  misc_feature 1..20: note = antisense sequence
  source 1..20: mol_type = other RNA
ttatatcagtgcaggatgtg

SEQ ID NO: 7858 - RNA, 20 nt, synthetic construct
  misc_feature 1..20: note = antisense sequence
  source 1..20: mol_type = other RNA
cataaataacttcgctcagc

SEQ ID NO: 7859 - RNA, 20 nt, synthetic construct
  misc_feature 1..20: note = antisense sequence
  source 1..20: mol_type = other RNA
acgcccagccagatgacaac

SEQ ID NO: 7860 - RNA, 20 nt, synthetic construct
  misc_feature 1..20: note = antisense sequence
  source 1..20: mol_type = other RNA
tacaggcatgagccaccacg

SEQ ID NO: 7861 - RNA, 20 nt, synthetic construct
  misc_feature 1..20: note = antisense sequence
  source 1..20: mol_type = other RNA
ttacaggcatgagccaccac

SEQ ID NO: 7862 - RNA, 20 nt, synthetic construct
  misc_feature 1..20: note = antisense sequence
  source 1..20: mol_type = other RNA
attacaggcatgagccacca

SEQ ID NO: 7863 - RNA, 20 nt, synthetic construct
  misc_feature 1..20: note = antisense sequence
  source 1..20: mol_type = other RNA
gattacaggcatgagccacc

SEQ ID NO: 7864 - RNA, 20 nt, synthetic construct
  misc_feature 1..20: note = antisense sequence
  source 1..20: mol_type = other RNA
ggattacaggcatgagccac

SEQ ID NO: 7865 - RNA, 20 nt, synthetic construct
  misc_feature 1..20: note = antisense sequence
  source 1..20: mol_type = other RNA
gggattacaggcatgagcca

SEQ ID NO: 7866 - RNA, 20 nt, synthetic construct
  misc_feature 1..20: note = antisense sequence
  source 1..20: mol_type = other RNA
tgggattacaggcatgagcc

SEQ ID NO: 7867 - RNA, 20 nt, synthetic construct
  misc_feature 1..20: note = antisense sequence
  source 1..20: mol_type = other RNA
ctgggattacaggcatgagc

SEQ ID NO: 7868 - RNA, 20 nt, synthetic construct
  misc_feature 1..20: note = antisense sequence
  source 1..20: mol_type = other RNA
gctgggattacaggcatgag

SEQ ID NO: 7869 - RNA, 20 nt, synthetic construct
  misc_feature 1..20: note = antisense sequence
  source 1..20: mol_type = other RNA
tgctgggattacaggcatga

SEQ ID NO: 7870 - RNA, 20 nt, synthetic construct
  misc_feature 1..20: note = antisense sequence
  source 1..20: mol_type = other RNA
gtgctgggattacaggcatg

SEQ ID NO: 7871 - RNA, 20 nt, synthetic construct
  misc_feature 1..20: note = antisense sequence
  source 1..20: mol_type = other RNA
agtgctgggattacaggcat

SEQ ID NO: 7872 - RNA, 20 nt, synthetic construct
  misc_feature 1..20: note = antisense sequence
  source 1..20: mol_type = other RNA
aagtgctgggattacaggca

SEQ ID NO: 7873 - RNA, 20 nt, synthetic construct
  misc_feature 1..20: note = antisense sequence
  source 1..20: mol_type = other RNA
aaagtgctgggattacaggc

SEQ ID NO: 7874 - RNA, 20 nt, synthetic construct
  misc_feature 1..20: note = antisense sequence
  source 1..20: mol_type = other RNA
caaagtgctgggattacagg

SEQ ID NO: 7875 - RNA, 20 nt, synthetic construct
  misc_feature 1..20: note = antisense sequence
  source 1..20: mol_type = other RNA
ccaaagtgctgggattacag

SEQ ID NO: 7876 - RNA, 20 nt, synthetic construct
  misc_feature 1..20: note = antisense sequence
  source 1..20: mol_type = other RNA
agggtttcaccatgttggcc

SEQ ID NO: 7877 - RNA, 20 nt, synthetic construct
  misc_feature 1..20: note = antisense sequence
  source 1..20: mol_type = other RNA
cagggtttcaccatgttggc

SEQ ID NO: 7878 - RNA, 20 nt, synthetic construct
  misc_feature 1..20: note = antisense sequence
  source 1..20: mol_type = other RNA
acagggtttcaccatgttgg

SEQ ID NO: 7879 - RNA, 20 nt, synthetic construct
  misc_feature 1..20: note = antisense sequence
  source 1..20: mol_type = other RNA
gacagggtttcaccatgttg

SEQ ID NO: 7880 - RNA, 20 nt, synthetic construct
  misc_feature 1..20: note = antisense sequence
  source 1..20: mol_type = other RNA
agacagggtttcaccatgtt

SEQ ID NO: 7881 - RNA, 20 nt, synthetic construct
  misc_feature 1..20: note = antisense sequence
  source 1..20: mol_type = other RNA
aagacagggtttcaccatgt

SEQ ID NO: 7882 - RNA, 20 nt, synthetic construct
  misc_feature 1..20: note = antisense sequence
  source 1..20: mol_type = other RNA
aaagacagggtttcaccatg

SEQ ID NO: 7883 - RNA, 20 nt, synthetic construct
  misc_feature 1..20: note = antisense sequence
  source 1..20: mol_type = other RNA
taaagacagggtttcaccat

SEQ ID NO: 7884 - RNA, 20 nt, synthetic construct
  misc_feature 1..20: note = antisense sequence
  source 1..20: mol_type = other RNA
gtaaagacagggtttcacca

SEQ ID NO: 7885 - RNA, 20 nt, synthetic construct
  misc_feature 1..20: note = antisense sequence
  source 1..20: mol_type = other RNA
agtaaagacagggtttcacc

SEQ ID NO: 7886 - RNA, 20 nt, synthetic construct
  misc_feature 1..20: note = antisense sequence
  source 1..20: mol_type = other RNA
tagctgggactacaggtgca

SEQ ID NO: 7887 - RNA, 20 nt, synthetic construct
  misc_feature 1..20: note = antisense sequence
  source 1..20: mol_type = other RNA
cctcagcctcccaagtagct

SEQ ID NO: 7888 - RNA, 20 nt, synthetic construct
  misc_feature 1..20: note = antisense sequence
  source 1..20: mol_type = other RNA
tgcctcagcctcccaagtag

SEQ ID NO: 7889 - RNA, 20 nt, synthetic construct
  misc_feature 1..20: note = antisense sequence
  source 1..20: mol_type = other RNA
ctgcctcagcctcccaagta

SEQ ID NO: 7890 - RNA, 20 nt, synthetic construct
  misc_feature 1..20: note = antisense sequence
  source 1..20: mol_type = other RNA
attctcctgcctcagcctcc

SEQ ID NO: 7891 - RNA, 20 nt, synthetic construct
  misc_feature 1..20: note = antisense sequence
  source 1..20: mol_type = other RNA
gattctcctgcctcagcctc

SEQ ID NO: 7892 - RNA, 20 nt, synthetic construct
  misc_feature 1..20: note = antisense sequence
  source 1..20: mol_type = other RNA
cgattctcctgcctcagcct

SEQ ID NO: 7893 - RNA, 20 nt, synthetic construct
  misc_feature 1..20: note = antisense sequence
  source 1..20: mol_type = other RNA
agcgattctcctgcctcagc

SEQ ID NO: 7894 - RNA, 20 nt, synthetic construct
  misc_feature 1..20: note = antisense sequence
  source 1..20: mol_type = other RNA
aagcgattctcctgcctcag

SEQ ID NO: 7895 - RNA, 20 nt, synthetic construct
  misc_feature 1..20: note = antisense sequence
  source 1..20: mol_type = other RNA
caagcgattctcctgcctca

SEQ ID NO: 7896 - RNA, 20 nt, synthetic construct
  misc_feature 1..20: note = antisense sequence
  source 1..20: mol_type = other RNA
ccaagcgattctcctgcctc

SEQ ID NO: 7897 - RNA, 20 nt, synthetic construct
  misc_feature 1..20: note = antisense sequence
  source 1..20: mol_type = other RNA
tccaagcgattctcctgcct

SEQ ID NO: 7898 - RNA, 20 nt, synthetic construct
  misc_feature 1..20: note = antisense sequence
  source 1..20: mol_type = other RNA
gtccaagcgattctcctgcc

SEQ ID NO: 7899 - RNA, 20 nt, synthetic construct
  misc_feature 1..20: note = antisense sequence
  source 1..20: mol_type = other RNA
ggtccaagcgattctcctgc

SEQ ID NO: 7900 - RNA, 20 nt, synthetic construct
  misc_feature 1..20: note = antisense sequence
  source 1..20: mol_type = other RNA
gggtccaagcgattctcctg

SEQ ID NO: 7901 - RNA, 20 nt, synthetic construct
  misc_feature 1..20: note = antisense sequence
  source 1..20: mol_type = other RNA
tgtacttgggattgtgttag

SEQ ID NO: 7902 - RNA, 20 nt, synthetic construct
  misc_feature 1..20: note = antisense sequence
  source 1..20: mol_type = other RNA
ctgagtagccatatccaaaa

SEQ ID NO: 7903 - RNA, 20 nt, synthetic construct
  misc_feature 1..20: note = antisense sequence
  source 1..20: mol_type = other RNA
gctgagtagccatatccaaa

SEQ ID NO: 7904 - RNA, 20 nt, synthetic construct
  misc_feature 1..20: note = antisense sequence
  source 1..20: mol_type = other RNA
tttattgctggctgagtagc

SEQ ID NO: 7905 - RNA, 20 nt, synthetic construct
  misc_feature 1..20: note = antisense sequence
  source 1..20: mol_type = other RNA
atttattgctggctgagtag

SEQ ID NO: 7906 - RNA, 20 nt, synthetic construct
  misc_feature 1..20: note = antisense sequence
  source 1..20: mol_type = other RNA
gatttattgctggctgagta

SEQ ID NO: 7907 - RNA, 20 nt, synthetic construct
  misc_feature 1..20: note = antisense sequence
  source 1..20: mol_type = other RNA
tgatttattgctggctgagt

SEQ ID NO: 7908 - RNA, 20 nt, synthetic construct
  misc_feature 1..20: note = antisense sequence
  source 1..20: mol_type = other RNA
ttgctgatttattgctggct

SEQ ID NO: 7909 - RNA, 20 nt, synthetic construct
  misc_feature 1..20: note = antisense sequence
  source 1..20: mol_type = other RNA
gttgctgatttattgctggc

SEQ ID NO: 7910 - RNA, 20 nt, synthetic construct
  misc_feature 1..20: note = antisense sequence
  source 1..20: mol_type = other RNA
agttgctgatttattgctgg

SEQ ID NO: 7911 - RNA, 20 nt, synthetic construct
  misc_feature 1..20: note = antisense sequence
  source 1..20: mol_type = other RNA
cacagttgctgatttattgc

SEQ ID NO: 7912 - RNA, 20 nt, synthetic construct
  misc_feature 1..20: note = antisense sequence
  source 1..20: mol_type = other RNA
ggaatcggatgaactaaagt

SEQ ID NO: 7913 - RNA, 20 nt, synthetic construct
  misc_feature 1..20: note = antisense sequence
  source 1..20: mol_type = other RNA
aggaatcggatgaactaaag

SEQ ID NO: 7914 - RNA, 20 nt, synthetic construct
  misc_feature 1..20: note = antisense sequence
  source 1..20: mol_type = other RNA
caggaatcggatgaactaaa

SEQ ID NO: 7915 - RNA, 20 nt, synthetic construct
  misc_feature 1..20: note = antisense sequence
  source 1..20: mol_type = other RNA
tcaggaatcggatgaactaa

SEQ ID NO: 7916 - RNA, 20 nt, synthetic construct
  misc_feature 1..20: note = antisense sequence
  source 1..20: mol_type = other RNA
tatcttcaggaatcggatga

SEQ ID NO: 7917 - RNA, 20 nt, synthetic construct
  misc_feature 1..20: note = antisense sequence
  source 1..20: mol_type = other RNA
atatcttcaggaatcggatg

SEQ ID NO: 7918 - RNA, 20 nt, synthetic construct
  misc_feature 1..20: note = antisense sequence
  source 1..20: mol_type = other RNA
gatagtttatgagatccagg

SEQ ID NO: 7919 - RNA, 20 nt, synthetic construct
  misc_feature 1..20: note = antisense sequence
  source 1..20: mol_type = other RNA
gctaagtctgctactgtatt

SEQ ID NO: 7920 - RNA, 20 nt, synthetic construct
  misc_feature 1..20: note = antisense sequence
  source 1..20: mol_type = other RNA
ggctaagtctgctactgtat

SEQ ID NO: 7921 - RNA, 20 nt, synthetic construct
  misc_feature 1..20: note = antisense sequence
  source 1..20: mol_type = other RNA
tggctaagtctgctactgta

SEQ ID NO: 7922 - RNA, 20 nt, synthetic construct
  misc_feature 1..20: note = antisense sequence
  source 1..20: mol_type = other RNA
attggctaagtctgctactg

SEQ ID NO: 7923 - RNA, 20 nt, synthetic construct
  misc_feature 1..20: note = antisense sequence
  source 1..20: mol_type = other RNA
tattggctaagtctgctact

SEQ ID NO: 7924 - RNA, 20 nt, synthetic construct
  misc_feature 1..20: note = antisense sequence
  source 1..20: mol_type = other RNA
ttattggctaagtctgctac

SEQ ID NO: 7925 - RNA, 20 nt, synthetic construct
  misc_feature 1..20: note = antisense sequence
  source 1..20: mol_type = other RNA
cctcttgcatattgatgtgg

SEQ ID NO: 7926 - RNA, 20 nt, synthetic construct
  misc_feature 1..20: note = antisense sequence
  source 1..20: mol_type = other RNA
cctacctcttgcatattgat

SEQ ID NO: 7927 - RNA, 20 nt, synthetic construct
  misc_feature 1..20: note = antisense sequence
  source 1..20: mol_type = other RNA
gcctacctcttgcatattga

SEQ ID NO: 7928 - RNA, 20 nt, synthetic construct
  misc_feature 1..20: note = antisense sequence
  source 1..20: mol_type = other RNA
ctaagcagagagcctacctc

SEQ ID NO: 7929 - RNA, 20 nt, synthetic construct
  misc_feature 1..20: note = antisense sequence
  source 1..20: mol_type = other RNA
actaagcagagagcctacct

SEQ ID NO: 7930 - RNA, 20 nt, synthetic construct
  misc_feature 1..20: note = antisense sequence
  source 1..20: mol_type = other RNA
tgtaaactaagcagagagcc

SEQ ID NO: 7931 - RNA, 20 nt, synthetic construct
  misc_feature 1..20: note = antisense sequence
  source 1..20: mol_type = other RNA
atgtaaactaagcagagagc

SEQ ID NO: 7932 - RNA, 20 nt, synthetic construct
  misc_feature 1..20: note = antisense sequence
  source 1..20: mol_type = other RNA
accaataagcaccctggaag

SEQ ID NO: 7933 - RNA, 20 nt, synthetic construct
  misc_feature 1..20: note = antisense sequence
  source 1..20: mol_type = other RNA
aaccaataagcaccctggaa

SEQ ID NO: 7934 - RNA, 20 nt, synthetic construct
  misc_feature 1..20: note = antisense sequence
  source 1..20: mol_type = other RNA
gaaccaataagcaccctgga

SEQ ID NO: 7935 - RNA, 20 nt, synthetic construct
  misc_feature 1..20: note = antisense sequence
  source 1..20: mol_type = other RNA
agaaccaataagcaccctgg

SEQ ID NO: 7936 - RNA, 20 nt, synthetic construct
  misc_feature 1..20: note = antisense sequence
  source 1..20: mol_type = other RNA
ggagaaccaataagcaccct

SEQ ID NO: 7937 - RNA, 20 nt, synthetic construct
  misc_feature 1..20: note = antisense sequence
  source 1..20: mol_type = other RNA
cggagaaccaataagcaccc

SEQ ID NO: 7938 - RNA, 20 nt, synthetic construct
  misc_feature 1..20: note = antisense sequence
  source 1..20: mol_type = other RNA
aacggagaaccaataagcac

SEQ ID NO: 7939 - RNA, 20 nt, synthetic construct
  misc_feature 1..20: note = antisense sequence
  source 1..20: mol_type = other RNA
taacggagaaccaataagca

SEQ ID NO: 7940 - RNA, 20 nt, synthetic construct
  misc_feature 1..20: note = antisense sequence
  source 1..20: mol_type = other RNA
ctaacggagaaccaataagc

SEQ ID NO: 7941 - RNA, 20 nt, synthetic construct
  misc_feature 1..20: note = antisense sequence
  source 1..20: mol_type = other RNA
actaacggagaaccaataag

SEQ ID NO: 7942 - RNA, 20 nt, synthetic construct
  misc_feature 1..20: note = antisense sequence
  source 1..20: mol_type = other RNA
caactaacggagaaccaata

SEQ ID NO: 7943 - RNA, 20 nt, synthetic construct
  misc_feature 1..20: note = antisense sequence
  source 1..20: mol_type = other RNA
ccaactaacggagaaccaat

SEQ ID NO: 7944 - RNA, 20 nt, synthetic construct
  misc_feature 1..20: note = antisense sequence
  source 1..20: mol_type = other RNA
gccaactaacggagaaccaa

SEQ ID NO: 7945 - RNA, 20 nt, synthetic construct
  misc_feature 1..20: note = antisense sequence
  source 1..20: mol_type = other RNA
ggccaactaacggagaacca

SEQ ID NO: 7946 - RNA, 20 nt, synthetic construct
  misc_feature 1..20: note = antisense sequence
  source 1..20: mol_type = other RNA
cttatagacatctccagttc

SEQ ID NO: 7947 - RNA, 20 nt, synthetic construct
  misc_feature 1..20: note = antisense sequence
  source 1..20: mol_type = other RNA
cacttatagacatctccagt

SEQ ID NO: 7948 - RNA, 20 nt, synthetic construct
  misc_feature 1..20: note = antisense sequence
  source 1..20: mol_type = other RNA
acacttatagacatctccag

SEQ ID NO: 7949 - RNA, 20 nt, synthetic construct
  misc_feature 1..20: note = antisense sequence
  source 1..20: mol_type = other RNA
taatgattcacctctcccaa

SEQ ID NO: 7950 - RNA, 20 nt, synthetic construct
  misc_feature 1..20: note = antisense sequence
  source 1..20: mol_type = other RNA
gtaatgattcacctctccca

SEQ ID NO: 7951 - RNA, 20 nt, synthetic construct
  misc_feature 1..20: note = antisense sequence
  source 1..20: mol_type = other RNA
ggtaatgattcacctctccc

SEQ ID NO: 7952 - RNA, 20 nt, synthetic construct
  misc_feature 1..20: note = antisense sequence
  source 1..20: mol_type = other RNA
acctggtagatccaacttta

SEQ ID NO: 7953 - RNA, 20 nt, synthetic construct
  misc_feature 1..20: note = antisense sequence
  source 1..20: mol_type = other RNA
tacctggtagatccaacttt

SEQ ID NO: 7954 - RNA, 20 nt, synthetic construct
  misc_feature 1..20: note = antisense sequence
  source 1..20: mol_type = other RNA
atacctggtagatccaactt

SEQ ID NO: 7955 - RNA, 20 nt, synthetic construct
  misc_feature 1..20: note = antisense sequence
  source 1..20: mol_type = other RNA
catacctggtagatccaact

SEQ ID NO: 7956 - RNA, 20 nt, synthetic construct
  misc_feature 1..20: note = antisense sequence
  source 1..20: mol_type = other RNA
acatacctggtagatccaac

SEQ ID NO: 7957 - RNA, 20 nt, synthetic construct
  misc_feature 1..20: note = antisense sequence
  source 1..20: mol_type = other RNA
tacatacctggtagatccaa

SEQ ID NO: 7958 - RNA, 20 nt, synthetic construct
  misc_feature 1..20: note = antisense sequence
  source 1..20: mol_type = other RNA
ggattacaggcgtgactcac

SEQ ID NO: 7959 - RNA, 20 nt, synthetic construct
  misc_feature 1..20: note = antisense sequence
  source 1..20: mol_type = other RNA
gggattacaggcgtgactca

SEQ ID NO: 7960 - RNA, 20 nt, synthetic construct
  misc_feature 1..20: note = antisense sequence
  source 1..20: mol_type = other RNA
gtcttgacctcttaaagtgt

SEQ ID NO: 7961 - RNA, 20 nt, synthetic construct
  misc_feature 1..20: note = antisense sequence
  source 1..20: mol_type = other RNA
gcctgtcttgacctcttaaa

SEQ ID NO: 7962 - RNA, 20 nt, synthetic construct
  misc_feature 1..20: note = antisense sequence
  source 1..20: mol_type = other RNA
atgcctgtcttgacctctta

SEQ ID NO: 7963 - RNA, 20 nt, synthetic construct
  misc_feature 1..20: note = antisense sequence
  source 1..20: mol_type = other RNA
cgatatgcctgtcttgacct

SEQ ID NO: 7964 - RNA, 20 nt, synthetic construct
  misc_feature 1..20: note = antisense sequence
  source 1..20: mol_type = other RNA
acgatatgcctgtcttgacc

SEQ ID NO: 7965 - RNA, 20 nt, synthetic construct
  misc_feature 1..20: note = antisense sequence
  source 1..20: mol_type = other RNA
aacgatatgcctgtcttgac

SEQ ID NO: 7966 - RNA, 20 nt, synthetic construct
  misc_feature 1..20: note = antisense sequence
  source 1..20: mol_type = other RNA
aaacgatatgcctgtcttga

SEQ ID NO: 7967 - RNA, 20 nt, synthetic construct
  misc_feature 1..20: note = antisense sequence
  source 1..20: mol_type = other RNA
caaacgatatgcctgtcttg

SEQ ID NO: 7968 - RNA, 20 nt, synthetic construct
  misc_feature 1..20: note = antisense sequence
  source 1..20: mol_type = other RNA
tcaaacgatatgcctgtctt

SEQ ID NO: 7969 - RNA, 20 nt, synthetic construct
  misc_feature 1..20: note = antisense sequence
  source 1..20: mol_type = other RNA
ctcaaacgatatgcctgtct

SEQ ID NO: 7970 - RNA, 20 nt, synthetic construct
  misc_feature 1..20: note = antisense sequence
  source 1..20: mol_type = other RNA
gctcaaacgatatgcctgtc

SEQ ID NO: 7971 - RNA, 20 nt, synthetic construct
  misc_feature 1..20: note = antisense sequence
  source 1..20: mol_type = other RNA
ggctcaaacgatatgcctgt

SEQ ID NO: 7972 - RNA, 20 nt, synthetic construct
  misc_feature 1..20: note = antisense sequence
  source 1..20: mol_type = other RNA
tgggctcaaacgatatgcct

SEQ ID NO: 7973 - RNA, 20 nt, synthetic construct
  misc_feature 1..20: note = antisense sequence
  source 1..20: mol_type = other RNA
ctcctgggctcaaacgatat

SEQ ID NO: 7974 - RNA, 20 nt, synthetic construct
  misc_feature 1..20: note = antisense sequence
  source 1..20: mol_type = other RNA
actcctgggctcaaacgata

SEQ ID NO: 7975 - RNA, 20 nt, synthetic construct
  misc_feature 1..20: note = antisense sequence
  source 1..20: mol_type = other RNA
aactcctgggctcaaacgat

SEQ ID NO: 7976 - RNA, 20 nt, synthetic construct
  misc_feature 1..20: note = antisense sequence
  source 1..20: mol_type = other RNA
aaactcctgggctcaaacga

SEQ ID NO: 7977 - RNA, 20 nt, synthetic construct
  misc_feature 1..20: note = antisense sequence
  source 1..20: mol_type = other RNA
caaactcctgggctcaaacg

SEQ ID NO: 7978 - RNA, 20 nt, synthetic construct
  misc_feature 1..20: note = antisense sequence
  source 1..20: mol_type = other RNA
tcaaactcctgggctcaaac

SEQ ID NO: 7979 - RNA, 20 nt, synthetic construct
  misc_feature 1..20: note = antisense sequence
  source 1..20: mol_type = other RNA
ctcaaactcctgggctcaaa

SEQ ID NO: 7980 - RNA, 20 nt, synthetic construct
  misc_feature 1..20: note = antisense sequence
  source 1..20: mol_type = other RNA
tctcaaactcctgggctcaa

SEQ ID NO: 7981 - RNA, 20 nt, synthetic construct
  misc_feature 1..20: note = antisense sequence
  source 1..20: mol_type = other RNA
gtctcaaactcctgggctca

SEQ ID NO: 7982 - RNA, 20 nt, synthetic construct
  misc_feature 1..20: note = antisense sequence
  source 1..20: mol_type = other RNA
ggtctcaaactcctgggctc

SEQ ID NO: 7983 - RNA, 20 nt, synthetic construct
  misc_feature 1..20: note = antisense sequence
  source 1..20: mol_type = other RNA
tggtctcaaactcctgggct

SEQ ID NO: 7984 - RNA, 20 nt, synthetic construct
  misc_feature 1..20: note = antisense sequence
  source 1..20: mol_type = other RNA
ctggtctcaaactcctgggc

SEQ ID NO: 7985 - RNA, 20 nt, synthetic construct
  misc_feature 1..20: note = antisense sequence
  source 1..20: mol_type = other RNA
gctggtctcaaactcctggg

SEQ ID NO: 7986 - RNA, 20 nt, synthetic construct
  misc_feature 1..20: note = antisense sequence
  source 1..20: mol_type = other RNA
ggctggtctcaaactcctgg

SEQ ID NO: 7987 - RNA, 20 nt, synthetic construct
  misc_feature 1..20: note = antisense sequence
  source 1..20: mol_type = other RNA
aggctggtctcaaactcctg

SEQ ID NO: 7988 - RNA, 20 nt, synthetic construct
  misc_feature 1..20: note = antisense sequence
  source 1..20: mol_type = other RNA
caggctggtctcaaactcct

SEQ ID NO: 7989 - RNA, 20 nt, synthetic construct
  misc_feature 1..20: note = antisense sequence
  source 1..20: mol_type = other RNA
ccaggctggtctcaaactcc

SEQ ID NO: 7990 - RNA, 20 nt, synthetic construct
  misc_feature 1..20: note = antisense sequence
  source 1..20: mol_type = other RNA
cccaggctggtctcaaactc

SEQ ID NO: 7991 - RNA, 20 nt, synthetic construct
  misc_feature 1..20: note = antisense sequence
  source 1..20: mol_type = other RNA
gcccaggctggtctcaaact

SEQ ID NO: 7992 - RNA, 20 nt, synthetic construct
  misc_feature 1..20: note = antisense sequence
  source 1..20: mol_type = other RNA
tgcccaggctggtctcaaac

SEQ ID NO: 7993 - RNA, 20 nt, synthetic construct
  misc_feature 1..20: note = antisense sequence
  source 1..20: mol_type = other RNA
ttgcccaggctggtctcaaa

SEQ ID NO: 7994 - RNA, 20 nt, synthetic construct
  misc_feature 1..20: note = antisense sequence
  source 1..20: mol_type = other RNA
gttgcccaggctggtctcaa

SEQ ID NO: 7995 - RNA, 20 nt, synthetic construct
  misc_feature 1..20: note = antisense sequence
  source 1..20: mol_type = other RNA
gatgaggtttcgtcaggttg

SEQ ID NO: 7996 - RNA, 20 nt, synthetic construct
  misc_feature 1..20: note = antisense sequence
  source 1..20: mol_type = other RNA
ctcttgagtagctgggacta

SEQ ID NO: 7997 - RNA, 20 nt, synthetic construct
  misc_feature 1..20: note = antisense sequence
  source 1..20: mol_type = other RNA
cctcttgagtagctgggact

SEQ ID NO: 7998 - RNA, 20 nt, synthetic construct
  misc_feature 1..20: note = antisense sequence
  source 1..20: mol_type = other RNA
cctcacacttcatcctcttg

SEQ ID NO: 7999 - RNA, 20 nt, synthetic construct
  misc_feature 1..20: note = antisense sequence
  source 1..20: mol_type = other RNA
gctcaagcgatcctcacact

SEQ ID NO: 8000 - RNA, 20 nt, synthetic construct
  misc_feature 1..20: note = antisense sequence
  source 1..20: mol_type = other RNA
agctcaagcgatcctcacac

SEQ ID NO: 8001 - RNA, 20 nt, synthetic construct
  misc_feature 1..20: note = antisense sequence
  source 1..20: mol_type = other RNA
cgcaattaccattcactgca

SEQ ID NO: 8002 - RNA, 20 nt, synthetic construct
  misc_feature 1..20: note = antisense sequence
  source 1..20: mol_type = other RNA
gcgcaattaccattcactgc

SEQ ID NO: 8003 - RNA, 20 nt, synthetic construct
  misc_feature 1..20: note = antisense sequence
  source 1..20: mol_type = other RNA
ggcgcaattaccattcactg

SEQ ID NO: 8004 - RNA, 20 nt, synthetic construct
  misc_feature 1..20: note = antisense sequence
  source 1..20: mol_type = other RNA
gtggcgcaattaccattcac

SEQ ID NO: 8005 - RNA, 20 nt, synthetic construct
  misc_feature 1..20: note = antisense sequence
  source 1..20: mol_type = other RNA
agtggcgcaattaccattca

SEQ ID NO: 8006 - RNA, 20 nt, synthetic construct
  misc_feature 1..20: note = antisense sequence
  source 1..20: mol_type = other RNA
cagtggcgcaattaccattc

SEQ ID NO: 8007 - RNA, 20 nt, synthetic construct
  misc_feature 1..20: note = antisense sequence
  source 1..20: mol_type = other RNA
gcagtggcgcaattaccatt

SEQ ID NO: 8008 - RNA, 20 nt, synthetic construct
  misc_feature 1..20: note = antisense sequence
  source 1..20: mol_type = other RNA
tgcagtggcgcaattaccat

SEQ ID NO: 8009 - RNA, 20 nt, synthetic construct
  misc_feature 1..20: note = antisense sequence
  source 1..20: mol_type = other RNA
actctgtcacccaggctgga

SEQ ID NO: 8010 - RNA, 20 nt, synthetic construct
  misc_feature 1..20: note = antisense sequence
  source 1..20: mol_type = other RNA
tcactctgtcacccaggctg

SEQ ID NO: 8011 - RNA, 20 nt, synthetic construct
  misc_feature 1..20: note = antisense sequence
  source 1..20: mol_type = other RNA
ctcactctgtcacccaggct

SEQ ID NO: 8012 - RNA, 20 nt, synthetic construct
  misc_feature 1..20: note = antisense sequence
  source 1..20: mol_type = other RNA
tctcactctgtcacccaggc

SEQ ID NO: 8013 - RNA, 20 nt, synthetic construct
  misc_feature 1..20: note = antisense sequence
  source 1..20: mol_type = other RNA
gtctcactctgtcacccagg

SEQ ID NO: 8014 - RNA, 20 nt, synthetic construct
  misc_feature 1..20: note = antisense sequence
  source 1..20: mol_type = other RNA
ggtctcactctgtcacccag

SEQ ID NO: 8015 - RNA, 20 nt, synthetic construct
  misc_feature 1..20: note = antisense sequence
  source 1..20: mol_type = other RNA
cagggtctcactctgtcacc

SEQ ID NO: 8016 - RNA, 20 nt, synthetic construct
  misc_feature 1..20: note = antisense sequence
  source 1..20: mol_type = other RNA
gggcataatttaagacctga

SEQ ID NO: 8017 - RNA, 20 nt, synthetic construct
  misc_feature 1..20: note = antisense sequence
  source 1..20: mol_type = other RNA
tgggcataatttaagacctg

SEQ ID NO: 8018 - RNA, 20 nt, synthetic construct
  misc_feature 1..20: note = antisense sequence
  source 1..20: mol_type = other RNA
ctgggcataatttaagacct

SEQ ID NO: 8019 - RNA, 20 nt, synthetic construct
  misc_feature 1..20: note = antisense sequence
  source 1..20: mol_type = other RNA
actgggcataatttaagacc

SEQ ID NO: 8020 - RNA, 20 nt, synthetic construct
  misc_feature 1..20: note = antisense sequence
  source 1..20: mol_type = other RNA
agtgagaatactgggcataa

SEQ ID NO: 8021 - RNA, 20 nt, synthetic construct
  misc_feature 1..20: note = antisense sequence
  source 1..20: mol_type = other RNA
tcaggctggtctcgaactcc

SEQ ID NO: 8022 - RNA, 20 nt, synthetic construct
  misc_feature 1..20: note = antisense sequence
  source 1..20: mol_type = other RNA
gtcaggctggtctcgaactc

SEQ ID NO: 8023 - RNA, 20 nt, synthetic construct
  misc_feature 1..20: note = antisense sequence
  source 1..20: mol_type = other RNA
ggtcaggctggtctcgaact

SEQ ID NO: 8024 - RNA, 20 nt, synthetic construct
  misc_feature 1..20: note = antisense sequence
  source 1..20: mol_type = other RNA
tggtcaggctggtctcgaac

SEQ ID NO: 8025 - RNA, 20 nt, synthetic construct
  misc_feature 1..20: note = antisense sequence
  source 1..20: mol_type = other RNA
ttggtcaggctggtctcgaa

SEQ ID NO: 8026 - RNA, 20 nt, synthetic construct
  misc_feature 1..20: note = antisense sequence
  source 1..20: mol_type = other RNA
gttggtcaggctggtctcga

SEQ ID NO: 8027 - RNA, 20 nt, synthetic construct
  misc_feature 1..20: note = antisense sequence
  source 1..20: mol_type = other RNA
tgttggtcaggctggtctcg

SEQ ID NO: 8028 - RNA, 20 nt, synthetic construct
  misc_feature 1..20: note = antisense sequence
  source 1..20: mol_type = other RNA
atgttggtcaggctggtctc

SEQ ID NO: 8029 - RNA, 20 nt, synthetic construct
  misc_feature 1..20: note = antisense sequence
  source 1..20: mol_type = other RNA
catgttggtcaggctggtct

SEQ ID NO: 8030 - RNA, 20 nt, synthetic construct
  misc_feature 1..20: note = antisense sequence
  source 1..20: mol_type = other RNA
ccatgttggtcaggctggtc

SEQ ID NO: 8031 - RNA, 20 nt, synthetic construct
  misc_feature 1..20: note = antisense sequence
  source 1..20: mol_type = other RNA
tccatgttggtcaggctggt

SEQ ID NO: 8032 - RNA, 20 nt, synthetic construct
  misc_feature 1..20: note = antisense sequence
  source 1..20: mol_type = other RNA
ctccatgttggtcaggctgg

SEQ ID NO: 8033 - RNA, 20 nt, synthetic construct
  misc_feature 1..20: note = antisense sequence
  source 1..20: mol_type = other RNA
tctccatgttggtcaggctg

SEQ ID NO: 8034 - RNA, 20 nt, synthetic construct
  misc_feature 1..20: note = antisense sequence
  source 1..20: mol_type = other RNA
ttctccatgttggtcaggct

SEQ ID NO: 8035 - RNA, 20 nt, synthetic construct
  misc_feature 1..20: note = antisense sequence
  source 1..20: mol_type = other RNA
tttctccatgttggtcaggc

SEQ ID NO: 8036 - RNA, 20 nt, synthetic construct
  misc_feature 1..20: note = antisense sequence
  source 1..20: mol_type = other RNA
gtttctccatgttggtcagg

SEQ ID NO: 8037 - RNA, 20 nt, synthetic construct
  misc_feature 1..20: note = antisense sequence
  source 1..20: mol_type = other RNA
ggtttctccatgttggtcag

SEQ ID NO: 8038 - RNA, 20 nt, synthetic construct
  misc_feature 1..20: note = antisense sequence
  source 1..20: mol_type = other RNA
gggtttctccatgttggtca

SEQ ID NO: 8039 - RNA, 20 nt, synthetic construct
  misc_feature 1..20: note = antisense sequence
  source 1..20: mol_type = other RNA
agggtttctccatgttggtc

SEQ ID NO: 8040 - RNA, 20 nt, synthetic construct
  misc_feature 1..20: note = antisense sequence
  source 1..20: mol_type = other RNA
cagggtttctccatgttggt

SEQ ID NO: 8041 - RNA, 20 nt, synthetic construct
  misc_feature 1..20: note = antisense sequence
  source 1..20: mol_type = other RNA
gcagggtttctccatgttgg

SEQ ID NO: 8042 - RNA, 20 nt, synthetic construct
  misc_feature 1..20: note = antisense sequence
  source 1..20: mol_type = other RNA
ggcagggtttctccatgttg

SEQ ID NO: 8043 - RNA, 20 nt, synthetic construct
  misc_feature 1..20: note = antisense sequence
  source 1..20: mol_type = other RNA
aggcagggtttctccatgtt

SEQ ID NO: 8044 - RNA, 20 nt, synthetic construct
  misc_feature 1..20: note = antisense sequence
  source 1..20: mol_type = other RNA
agctgggattacaggcatgt

SEQ ID NO: 8045 - RNA, 20 nt, synthetic construct
  misc_feature 1..20: note = antisense sequence
  source 1..20: mol_type = other RNA
tagctgggattacaggcatg

SEQ ID NO: 8046 - RNA, 20 nt, synthetic construct
  misc_feature 1..20: note = antisense sequence
  source 1..20: mol_type = other RNA
gtagctgggattacaggcat

SEQ ID NO: 8047 - RNA, 20 nt, synthetic construct
  misc_feature 1..20: note = antisense sequence
  source 1..20: mol_type = other RNA
agtagctgggattacaggca

SEQ ID NO: 8048 - RNA, 20 nt, synthetic construct
  misc_feature 1..20: note = antisense sequence
  source 1..20: mol_type = other RNA
aagtagctgggattacaggc

SEQ ID NO: 8049 - RNA, 20 nt, synthetic construct
  misc_feature 1..20: note = antisense sequence
  source 1..20: mol_type = other RNA
taagtagctgggattacagg

SEQ ID NO: 8050 - RNA, 20 nt, synthetic construct
  misc_feature 1..20: note = antisense sequence
  source 1..20: mol_type = other RNA
ctaagtagctgggattacag

SEQ ID NO: 8051 - RNA, 20 nt, synthetic construct
  misc_feature 1..20: note = antisense sequence
  source 1..20: mol_type = other RNA
cctaagtagctgggattaca

SEQ ID NO: 8052 - RNA, 20 nt, synthetic construct
  misc_feature 1..20: note = antisense sequence
  source 1..20: mol_type = other RNA
tcctaagtagctgggattac

SEQ ID NO: 8053 - RNA, 20 nt, synthetic construct
  misc_feature 1..20: note = antisense sequence
  source 1..20: mol_type = other RNA
ctcctaagtagctgggatta

SEQ ID NO: 8054 - RNA, 20 nt, synthetic construct
  misc_feature 1..20: note = antisense sequence
  source 1..20: mol_type = other RNA
ctgcctcagcctcctaagta

SEQ ID NO: 8055 - RNA, 20 nt, synthetic construct
  misc_feature 1..20: note = antisense sequence
  source 1..20: mol_type = other RNA
cctgcctcagcctcctaagt

SEQ ID NO: 8056 - RNA, 20 nt, synthetic construct
  misc_feature 1..20: note = antisense sequence
  source 1..20: mol_type = other RNA
tcctgcctcagcctcctaag

SEQ ID NO: 8057 - RNA, 20 nt, synthetic construct
  misc_feature 1..20: note = antisense sequence
  source 1..20: mol_type = other RNA
ctcctgcctcagcctcctaa

SEQ ID NO: 8058 - RNA, 20 nt, synthetic construct
  misc_feature 1..20: note = antisense sequence
  source 1..20: mol_type = other RNA
tctcctgcctcagcctccta

SEQ ID NO: 8059 - RNA, 20 nt, synthetic construct
  misc_feature 1..20: note = antisense sequence
  source 1..20: mol_type = other RNA
tgcctcccaggttcaagcag

SEQ ID NO: 8060 - RNA, 20 nt, synthetic construct
  misc_feature 1..20: note = antisense sequence
  source 1..20: mol_type = other RNA
ctgcctcccaggttcaagca

SEQ ID NO: 8061 - RNA, 20 nt, synthetic construct
  misc_feature 1..20: note = antisense sequence
  source 1..20: mol_type = other RNA
tctgcctcccaggttcaagc

SEQ ID NO: 8062 - RNA, 20 nt, synthetic construct
  misc_feature 1..20: note = antisense sequence
  source 1..20: mol_type = other RNA
ctctgcctcccaggttcaag

SEQ ID NO: 8063 - RNA, 20 nt, synthetic construct
  misc_feature 1..20: note = antisense sequence
  source 1..20: mol_type = other RNA
cctctgcctcccaggttcaa

SEQ ID NO: 8064 - RNA, 20 nt, synthetic construct
  misc_feature 1..20: note = antisense sequence
  source 1..20: mol_type = other RNA
acacaacctctgcctcccag

SEQ ID NO: 8065 - RNA, 20 nt, synthetic construct
  misc_feature 1..20: note = antisense sequence
  source 1..20: mol_type = other RNA
aacacaacctctgcctccca

SEQ ID NO: 8066 - RNA, 20 nt, synthetic construct
  misc_feature 1..20: note = antisense sequence
  source 1..20: mol_type = other RNA
taacacaacctctgcctccc

SEQ ID NO: 8067 - RNA, 20 nt, synthetic construct
  misc_feature 1..20: note = antisense sequence
  source 1..20: mol_type = other RNA
ttaacacaacctctgcctcc

SEQ ID NO: 8068 - RNA, 20 nt, synthetic construct
  misc_feature 1..20: note = antisense sequence
  source 1..20: mol_type = other RNA
cttaacacaacctctgcctc

SEQ ID NO: 8069 - RNA, 20 nt, synthetic construct
  misc_feature 1..20: note = antisense sequence
  source 1..20: mol_type = other RNA
ccttaacacaacctctgcct

SEQ ID NO: 8070 - RNA, 20 nt, synthetic construct
  misc_feature 1..20: note = antisense sequence
  source 1..20: mol_type = other RNA
gccttaacacaacctctgcc

SEQ ID NO: 8071 - RNA, 20 nt, synthetic construct
  misc_feature 1..20: note = antisense sequence
  source 1..20: mol_type = other RNA
tgccttaacacaacctctgc

SEQ ID NO: 8072 - RNA, 20 nt, synthetic construct
  misc_feature 1..20: note = antisense sequence
  source 1..20: mol_type = other RNA
ttgccttaacacaacctctg

SEQ ID NO: 8073 - RNA, 20 nt, synthetic construct
  misc_feature 1..20: note = antisense sequence
  source 1..20: mol_type = other RNA
tggcgtgatgttgccttaac

SEQ ID NO: 8074 - RNA, 20 nt, synthetic construct
  misc_feature 1..20: note = antisense sequence
  source 1..20: mol_type = other RNA
atggcgtgatgttgccttaa

SEQ ID NO: 8075 - RNA, 20 nt, synthetic construct
  misc_feature 1..20: note = antisense sequence
  source 1..20: mol_type = other RNA
aatggcgtgatgttgcctta

SEQ ID NO: 8076 - RNA, 20 nt, synthetic construct
  misc_feature 1..20: note = antisense sequence
  source 1..20: mol_type = other RNA
tggagtgcaatggcgtgatg

SEQ ID NO: 8077 - RNA, 20 nt, synthetic construct
  misc_feature 1..20: note = antisense sequence
  source 1..20: mol_type = other RNA
ctggagtgcaatggcgtgat

SEQ ID NO: 8078 - RNA, 20 nt, synthetic construct
  misc_feature 1..20: note = antisense sequence
  source 1..20: mol_type = other RNA
gctggagtgcaatggcgtga

SEQ ID NO: 8079 - RNA, 20 nt, synthetic construct
  misc_feature 1..20: note = antisense sequence
  source 1..20: mol_type = other RNA
aggctggagtgcaatggcgt

SEQ ID NO: 8080 - RNA, 20 nt, synthetic construct
  misc_feature 1..20: note = antisense sequence
  source 1..20: mol_type = other RNA
tcaggctggagtgcaatggc

SEQ ID NO: 8081 - RNA, 20 nt, synthetic construct
  misc_feature 1..20: note = antisense sequence
  source 1..20: mol_type = other RNA
ctcaggctggagtgcaatgg

SEQ ID NO: 8082 - RNA, 20 nt, synthetic construct
  misc_feature 1..20: note = antisense sequence
  source 1..20: mol_type = other RNA
cctcaggctggagtgcaatg

SEQ ID NO: 8083 - RNA, 20 nt, synthetic construct
  misc_feature 1..20: note = antisense sequence
  source 1..20: mol_type = other RNA
tcctcaggctggagtgcaat

SEQ ID NO: 8084 - RNA, 20 nt, synthetic construct
  misc_feature 1..20: note = antisense sequence
  source 1..20: mol_type = other RNA
ttcctcaggctggagtgcaa

SEQ ID NO: 8085 - RNA, 20 nt, synthetic construct
  misc_feature 1..20: note = antisense sequence
  source 1..20: mol_type = other RNA
gttcctcaggctggagtgca

SEQ ID NO: 8086 - RNA, 20 nt, synthetic construct
  misc_feature 1..20: note = antisense sequence
  source 1..20: mol_type = other RNA
tgttcctcaggctggagtgc

SEQ ID NO: 8087 - RNA, 20 nt, synthetic construct
  misc_feature 1..20: note = antisense sequence
  source 1..20: mol_type = other RNA
ctgacacacagattacttct

SEQ ID NO: 8088 - RNA, 20 nt, synthetic construct
  misc_feature 1..20: note = antisense sequence
  source 1..20: mol_type = other RNA
taaggacagagggaatcaaa

SEQ ID NO: 8089 - RNA, 20 nt, synthetic construct
  misc_feature 1..20: note = antisense sequence
  source 1..20: mol_type = other RNA
gctccttgatgactttctaa

SEQ ID NO: 8090 - RNA, 20 nt, synthetic construct
  misc_feature 1..20: note = antisense sequence
  source 1..20: mol_type = other RNA
tatgctccttgatgactttc

SEQ ID NO: 8091 - RNA, 20 nt, synthetic construct
  misc_feature 1..20: note = antisense sequence
  source 1..20: mol_type = other RNA
atgtatgctccttgatgact

SEQ ID NO: 8092 - RNA, 20 nt, synthetic construct
  misc_feature 1..20: note = antisense sequence
  source 1..20: mol_type = other RNA
tgtggtgggcaggtttattt

SEQ ID NO: 8093 - RNA, 20 nt, synthetic construct
  misc_feature 1..20: note = antisense sequence
  source 1..20: mol_type = other RNA
atgtggtgggcaggtttatt

SEQ ID NO: 8094 - RNA, 20 nt, synthetic construct
  misc_feature 1..20: note = antisense sequence
  source 1..20: mol_type = other RNA
aatgtggtgggcaggtttat

SEQ ID NO: 8095 - RNA, 20 nt, synthetic construct
  misc_feature 1..20: note = antisense sequence
  source 1..20: mol_type = other RNA
ggaatgtggtgggcaggttt

SEQ ID NO: 8096 - RNA, 20 nt, synthetic construct
  misc_feature 1..20: note = antisense sequence
  source 1..20: mol_type = other RNA
gggaatgtggtgggcaggtt

SEQ ID NO: 8097 - RNA, 20 nt, synthetic construct
  misc_feature 1..20: note = antisense sequence
  source 1..20: mol_type = other RNA
agggaatgtggtgggcaggt

SEQ ID NO: 8098 - RNA, 20 nt, synthetic construct
  misc_feature 1..20: note = antisense sequence
  source 1..20: mol_type = other RNA
tgaaaaccaggcactaagtt

SEQ ID NO: 8099 - RNA, 20 nt, synthetic construct
  misc_feature 1..20: note = antisense sequence
  source 1..20: mol_type = other RNA
ttgaaaaccaggcactaagt

SEQ ID NO: 8100 - RNA, 20 nt, synthetic construct
  misc_feature 1..20: note = antisense sequence
  source 1..20: mol_type = other RNA
cttgaaaaccaggcactaag

SEQ ID NO: 8101 - RNA, 20 nt, synthetic construct
  misc_feature 1..20: note = antisense sequence
  source 1..20: mol_type = other RNA
tcttgaaaaccaggcactaa

SEQ ID NO: 8102 - RNA, 20 nt, synthetic construct
  misc_feature 1..20: note = antisense sequence
  source 1..20: mol_type = other RNA
ctcttgaaaaccaggcacta

SEQ ID NO: 8103 - RNA, 20 nt, synthetic construct
  misc_feature 1..20: note = antisense sequence
  source 1..20: mol_type = other RNA
cctcttgaaaaccaggcact

SEQ ID NO: 8104 - RNA, 20 nt, synthetic construct
  misc_feature 1..20: note = antisense sequence
  source 1..20: mol_type = other RNA
cggtcacattcctactattt

SEQ ID NO: 8105 - RNA, 20 nt, synthetic construct
  misc_feature 1..20: note = antisense sequence
  source 1..20: mol_type = other RNA
tccggtcacattcctactat

SEQ ID NO: 8106 - RNA, 20 nt, synthetic construct
  misc_feature 1..20: note = antisense sequence
  source 1..20: mol_type = other RNA
ttccggtcacattcctacta

SEQ ID NO: 8107 - RNA, 20 nt, synthetic construct
  misc_feature 1..20: note = antisense sequence
  source 1..20: mol_type = other RNA
tttccggtcacattcctact

SEQ ID NO: 8108 - RNA, 20 nt, synthetic construct
  misc_feature 1..20: note = antisense sequence
  source 1..20: mol_type = other RNA
ttttccggtcacattcctac

SEQ ID NO: 8109 - RNA, 20 nt, synthetic construct
  misc_feature 1..20: note = antisense sequence
  source 1..20: mol_type = other RNA
attttccggtcacattccta

SEQ ID NO: 8110 - RNA, 20 nt, synthetic construct
  misc_feature 1..20: note = antisense sequence
  source 1..20: mol_type = other RNA
aattttccggtcacattcct

SEQ ID NO: 8111 - RNA, 20 nt, synthetic construct
  misc_feature 1..20: note = antisense sequence
  source 1..20: mol_type = other RNA
aggaattttccggtcacatt

SEQ ID NO: 8112 - RNA, 20 nt, synthetic construct
  misc_feature 1..20: note = antisense sequence
  source 1..20: mol_type = other RNA
taggaattttccggtcacat

SEQ ID NO: 8113 - RNA, 20 nt, synthetic construct
  misc_feature 1..20: note = antisense sequence
  source 1..20: mol_type = other RNA
gtaggaattttccggtcaca

SEQ ID NO: 8114 - RNA, 20 nt, synthetic construct
  misc_feature 1..20: note = antisense sequence
  source 1..20: mol_type = other RNA
agtaggaattttccggtcac

SEQ ID NO: 8115 - RNA, 20 nt, synthetic construct
  misc_feature 1..20: note = antisense sequence
  source 1..20: mol_type = other RNA
tagtaggaattttccggtca

SEQ ID NO: 8116 - RNA, 20 nt, synthetic construct
  misc_feature 1..20: note = antisense sequence
  source 1..20: mol_type = other RNA
gtatagaacattgacagggt

SEQ ID NO: 8117 - RNA, 20 nt, synthetic construct
  misc_feature 1..20: note = antisense sequence
  source 1..20: mol_type = other RNA
gatgcaacctcaaggaaagg

SEQ ID NO: 8118 - RNA, 20 nt, synthetic construct
  misc_feature 1..20: note = antisense sequence
  source 1..20: mol_type = other RNA
tgatgcaacctcaaggaaag

SEQ ID NO: 8119 - RNA, 20 nt, synthetic construct
  misc_feature 1..20: note = antisense sequence
  source 1..20: mol_type = other RNA
caagacaggaaaatgtgatg

SEQ ID NO: 8120 - RNA, 20 nt, synthetic construct
  misc_feature 1..20: note = antisense sequence
  source 1..20: mol_type = other RNA
ctccacacctgtaattcaaa

SEQ ID NO: 8121 - RNA, 20 nt, synthetic construct
  misc_feature 1..20: note = antisense sequence
  source 1..20: mol_type = other RNA
tctccacacctgtaattcaa

SEQ ID NO: 8122 - RNA, 20 nt, synthetic construct
  misc_feature 1..20: note = antisense sequence
  source 1..20: mol_type = other RNA
atctccacacctgtaattca

SEQ ID NO: 8123 - RNA, 20 nt, synthetic construct
  misc_feature 1..20: note = antisense sequence
  source 1..20: mol_type = other RNA
gaatctccacacctgtaatt

SEQ ID NO: 8124 - RNA, 20 nt, synthetic construct
  misc_feature 1..20: note = antisense sequence
  source 1..20: mol_type = other RNA
agaatctccacacctgtaat

SEQ ID NO: 8125 - RNA, 20 nt, synthetic construct
  misc_feature 1..20: note = antisense sequence
  source 1..20: mol_type = other RNA
tagaatctccacacctgtaa

SEQ ID NO: 8126 - RNA, 20 nt, synthetic construct
  misc_feature 1..20: note = antisense sequence
  source 1..20: mol_type = other RNA
ctagaatctccacacctgta

SEQ ID NO: 8127 - RNA, 20 nt, synthetic construct
  misc_feature 1..20: note = antisense sequence
  source 1..20: mol_type = other RNA
agttaagactattcacaggc

SEQ ID NO: 8128 - RNA, 20 nt, synthetic construct
  misc_feature 1..20: note = antisense sequence
  source 1..20: mol_type = other RNA
gaaattgagttgagccaagt

SEQ ID NO: 8129 - RNA, 20 nt, synthetic construct
  misc_feature 1..20: note = antisense sequence
  source 1..20: mol_type = other RNA
ggaaattgagttgagccaag

SEQ ID NO: 8130 - RNA, 20 nt, synthetic construct
  misc_feature 1..20: note = antisense sequence
  source 1..20: mol_type = other RNA
tggaaattgagttgagccaa

SEQ ID NO: 8131 - RNA, 20 nt, synthetic construct
  misc_feature 1..20: note = antisense sequence
  source 1..20: mol_type = other RNA
ttggaaattgagttgagcca

SEQ ID NO: 8132 - RNA, 20 nt, synthetic construct
  misc_feature 1..20: note = antisense sequence
  source 1..20: mol_type = other RNA
cttggaaattgagttgagcc

SEQ ID NO: 8133 - RNA, 20 nt, synthetic construct
  misc_feature 1..20: note = antisense sequence
  source 1..20: mol_type = other RNA
gccacaaaacaacagttcta

SEQ ID NO: 8134 - RNA, 20 nt, synthetic construct
  misc_feature 1..20: note = antisense sequence
  source 1..20: mol_type = other RNA
agccacaaaacaacagttct

SEQ ID NO: 8135 - RNA, 20 nt, synthetic construct
  misc_feature 1..20: note = antisense sequence
  source 1..20: mol_type = other RNA
gagccacaaaacaacagttc

SEQ ID NO: 8136 - RNA, 20 nt, synthetic construct
  misc_feature 1..20: note = antisense sequence
  source 1..20: mol_type = other RNA
agagccacaaaacaacagtt

SEQ ID NO: 8137 - RNA, 20 nt, synthetic construct
  misc_feature 1..20: note = antisense sequence
  source 1..20: mol_type = other RNA
ggaggagagtagtatatctt

SEQ ID NO: 8138 - RNA, 20 nt, synthetic construct
  misc_feature 1..20: note = antisense sequence
  source 1..20: mol_type = other RNA
aggaggagagtagtatatct

SEQ ID NO: 8139 - RNA, 20 nt, synthetic construct
  misc_feature 1..20: note = antisense sequence
  source 1..20: mol_type = other RNA
gaggaggagagtagtatatc

SEQ ID NO: 8140 - RNA, 20 nt, synthetic construct
  misc_feature 1..20: note = antisense sequence
  source 1..20: mol_type = other RNA
tgaggaggagagtagtatat

SEQ ID NO: 8141 - RNA, 20 nt, synthetic construct
  misc_feature 1..20: note = antisense sequence
  source 1..20: mol_type = other RNA
aatgaggaggagagtagtat

SEQ ID NO: 8142 - RNA, 20 nt, synthetic construct
  misc_feature 1..20: note = antisense sequence
  source 1..20: mol_type = other RNA
aaatgaggaggagagtagta

SEQ ID NO: 8143 - RNA, 20 nt, synthetic construct
  misc_feature 1..20: note = antisense sequence
  source 1..20: mol_type = other RNA
caaaatgaggaggagagtag

SEQ ID NO: 8144 - RNA, 20 nt, synthetic construct
  misc_feature 1..20: note = antisense sequence
  source 1..20: mol_type = other RNA
gcaaaatgaggaggagagta

SEQ ID NO: 8145 - RNA, 20 nt, synthetic construct
  misc_feature 1..20: note = antisense sequence
  source 1..20: mol_type = other RNA
agagaacagagattgagggc

SEQ ID NO: 8146 - RNA, 20 nt, synthetic construct
  misc_feature 1..20: note = antisense sequence
  source 1..20: mol_type = other RNA
aagagaacagagattgaggg

SEQ ID NO: 8147 - RNA, 20 nt, synthetic construct
  misc_feature 1..20: note = antisense sequence
  source 1..20: mol_type = other RNA
tcctagtcttactgtactga

SEQ ID NO: 8148 - RNA, 20 nt, synthetic construct
  misc_feature 1..20: note = antisense sequence
  source 1..20: mol_type = other RNA
aactcctagtcttactgtac

SEQ ID NO: 8149 - RNA, 20 nt, synthetic construct
  misc_feature 1..20: note = antisense sequence
  source 1..20: mol_type = other RNA
gaactcctagtcttactgta

SEQ ID NO: 8150 - RNA, 20 nt, synthetic construct
  misc_feature 1..20: note = antisense sequence
  source 1..20: mol_type = other RNA
agaactcctagtcttactgt

SEQ ID NO: 8151 - RNA, 20 nt, synthetic construct
  misc_feature 1..20: note = antisense sequence
  source 1..20: mol_type = other RNA
ctcaaatagaactcctagtc

SEQ ID NO: 8152 - RNA, 20 nt, synthetic construct
  misc_feature 1..20: note = antisense sequence
  source 1..20: mol_type = other RNA
gtcagtggctaaaactcaaa

SEQ ID NO: 8153 - RNA, 20 nt, synthetic construct
  misc_feature 1..20: note = antisense sequence
  source 1..20: mol_type = other RNA
ggtcagtggctaaaactcaa

SEQ ID NO: 8154 - RNA, 20 nt, synthetic construct
  misc_feature 1..20: note = antisense sequence
  source 1..20: mol_type = other RNA
tggtcagtggctaaaactca

SEQ ID NO: 8155 - RNA, 20 nt, synthetic construct
  misc_feature 1..20: note = antisense sequence
  source 1..20: mol_type = other RNA
ctggtcagtggctaaaactc

SEQ ID NO: 8156 - RNA, 20 nt, synthetic construct
  misc_feature 1..20: note = antisense sequence
  source 1..20: mol_type = other RNA
cctggtcagtggctaaaact

SEQ ID NO: 8157 - RNA, 20 nt, synthetic construct
  misc_feature 1..20: note = antisense sequence
  source 1..20: mol_type = other RNA
ccctggtcagtggctaaaac

SEQ ID NO: 8158 - RNA, 20 nt, synthetic construct
  misc_feature 1..20: note = antisense sequence
  source 1..20: mol_type = other RNA
gccctggtcagtggctaaaa

SEQ ID NO: 8159 - RNA, 20 nt, synthetic construct
  misc_feature 1..20: note = antisense sequence
  source 1..20: mol_type = other RNA
ctggcactaaatgagttttg

SEQ ID NO: 8160 - RNA, 20 nt, synthetic construct
  misc_feature 1..20: note = antisense sequence
  source 1..20: mol_type = other RNA
agatactggcactaaatgag

SEQ ID NO: 8161 - RNA, 20 nt, synthetic construct
  misc_feature 1..20: note = antisense sequence
  source 1..20: mol_type = other RNA
gaagatactggcactaaatg

SEQ ID NO: 8162 - RNA, 20 nt, synthetic construct
  misc_feature 1..20: note = antisense sequence
  source 1..20: mol_type = other RNA
cttggaagaagatactggca

SEQ ID NO: 8163 - RNA, 20 nt, synthetic construct
  misc_feature 1..20: note = antisense sequence
  source 1..20: mol_type = other RNA
ccatacttggaagaagatac

SEQ ID NO: 8164 - RNA, 20 nt, synthetic construct
  misc_feature 1..20: note = antisense sequence
  source 1..20: mol_type = other RNA
gcactagaaaggtggcagaa

SEQ ID NO: 8165 - RNA, 20 nt, synthetic construct
  misc_feature 1..20: note = antisense sequence
  source 1..20: mol_type = other RNA
ggcactagaaaggtggcaga

SEQ ID NO: 8166 - RNA, 20 nt, synthetic construct
  misc_feature 1..20: note = antisense sequence
  source 1..20: mol_type = other RNA
gaaggcactagaaaggtggc

SEQ ID NO: 8167 - RNA, 20 nt, synthetic construct
  misc_feature 1..20: note = antisense sequence
  source 1..20: mol_type = other RNA
tgaaggcactagaaaggtgg

SEQ ID NO: 8168 - RNA, 20 nt, synthetic construct
  misc_feature 1..20: note = antisense sequence
  source 1..20: mol_type = other RNA
caatcacctgaaggcactag

SEQ ID NO: 8169 - RNA, 20 nt, synthetic construct
  misc_feature 1..20: note = antisense sequence
  source 1..20: mol_type = other RNA
acaatcacctgaaggcacta

SEQ ID NO: 8170 - RNA, 20 nt, synthetic construct
  misc_feature 1..20: note = antisense sequence
  source 1..20: mol_type = other RNA
catgaaacaatcacctgaag

SEQ ID NO: 8171 - RNA, 20 nt, synthetic construct
  misc_feature 1..20: note = antisense sequence
  source 1..20: mol_type = other RNA
ctcctctgcaaatcacaact

SEQ ID NO: 8172 - RNA, 20 nt, synthetic construct
  misc_feature 1..20: note = antisense sequence
  source 1..20: mol_type = other RNA
gctcctctgcaaatcacaac

SEQ ID NO: 8173 - RNA, 20 nt, synthetic construct
  misc_feature 1..20: note = antisense sequence
  source 1..20: mol_type = other RNA
acagctcctctgcaaatcac

SEQ ID NO: 8174 - RNA, 20 nt, synthetic construct
  misc_feature 1..20: note = antisense sequence
  source 1..20: mol_type = other RNA
acaaaacagctcctctgcaa

SEQ ID NO: 8175 - RNA, 20 nt, synthetic construct
  misc_feature 1..20: note = antisense sequence
  source 1..20: mol_type = other RNA
ctaacaaaacagctcctctg

SEQ ID NO: 8176 - RNA, 20 nt, synthetic construct
  misc_feature 1..20: note = antisense sequence
  source 1..20: mol_type = other RNA
cctaacaaaacagctcctct

SEQ ID NO: 8177 - RNA, 20 nt, synthetic construct
  misc_feature 1..20: note = antisense sequence
  source 1..20: mol_type = other RNA
aactcctaacaaaacagctc

SEQ ID NO: 8178 - RNA, 20 nt, synthetic construct
  misc_feature 1..20: note = antisense sequence
  source 1..20: mol_type = other RNA
cagtaagggaggagtaactc

SEQ ID NO: 8179 - RNA, 20 nt, synthetic construct
  misc_feature 1..20: note = antisense sequence
  source 1..20: mol_type = other RNA
ccagtaagggaggagtaact

SEQ ID NO: 8180 - RNA, 20 nt, synthetic construct
  misc_feature 1..20: note = antisense sequence
  source 1..20: mol_type = other RNA
tccagtaagggaggagtaac

SEQ ID NO: 8181 - RNA, 20 nt, synthetic construct
  misc_feature 1..20: note = antisense sequence
  source 1..20: mol_type = other RNA
tttccagtaagggaggagta

SEQ ID NO: 8182 - RNA, 20 nt, synthetic construct
  misc_feature 1..20: note = antisense sequence
  source 1..20: mol_type = other RNA
atttccagtaagggaggagt

SEQ ID NO: 8183 - RNA, 20 nt, synthetic construct
  misc_feature 1..20: note = antisense sequence
  source 1..20: mol_type = other RNA
aatttccagtaagggaggag

SEQ ID NO: 8184 - RNA, 20 nt, synthetic construct
  misc_feature 1..20: note = antisense sequence
  source 1..20: mol_type = other RNA
ccaatttccagtaagggagg

SEQ ID NO: 8185 - RNA, 20 nt, synthetic construct
  misc_feature 1..20: note = antisense sequence
  source 1..20: mol_type = other RNA
gatgtggctaaaatctctag

SEQ ID NO: 8186 - RNA, 20 nt, synthetic construct
  misc_feature 1..20: note = antisense sequence
  source 1..20: mol_type = other RNA
cctactgtacttgatgtggc

SEQ ID NO: 8187 - RNA, 20 nt, synthetic construct
  misc_feature 1..20: note = antisense sequence
  source 1..20: mol_type = other RNA
cttccctactgtacttgatg

SEQ ID NO: 8188 - RNA, 20 nt, synthetic construct
  misc_feature 1..20: note = antisense sequence
  source 1..20: mol_type = other RNA
acttccctactgtacttgat

SEQ ID NO: 8189 - RNA, 20 nt, synthetic construct
  misc_feature 1..20: note = antisense sequence
  source 1..20: mol_type = other RNA
aacttccctactgtacttga

SEQ ID NO: 8190 - RNA, 20 nt, synthetic construct
  misc_feature 1..20: note = antisense sequence
  source 1..20: mol_type = other RNA
aaacttccctactgtacttg

SEQ ID NO: 8191 - RNA, 20 nt, synthetic construct
  misc_feature 1..20: note = antisense sequence
  source 1..20: mol_type = other RNA
actacagtggaaacttccct

SEQ ID NO: 8192 - RNA, 20 nt, synthetic construct
  misc_feature 1..20: note = antisense sequence
  source 1..20: mol_type = other RNA
gactacagtggaaacttccc

SEQ ID NO: 8193 - RNA, 20 nt, synthetic construct
  misc_feature 1..20: note = antisense sequence
  source 1..20: mol_type = other RNA
agggactacagtggaaactt

SEQ ID NO: 8194 - RNA, 20 nt, synthetic construct
  misc_feature 1..20: note = antisense sequence
  source 1..20: mol_type = other RNA
tagggactacagtggaaact

SEQ ID NO: 8195 - RNA, 20 nt, synthetic construct
  misc_feature 1..20: note = antisense sequence
  source 1..20: mol_type = other RNA
aattagggactacagtggaa

SEQ ID NO: 8196 - RNA, 20 nt, synthetic construct
  misc_feature 1..20: note = antisense sequence
  source 1..20: mol_type = other RNA
acaattagggactacagtgg

SEQ ID NO: 8197 - RNA, 20 nt, synthetic construct
  misc_feature 1..20: note = antisense sequence
  source 1..20: mol_type = other RNA
ggacaattagggactacagt

SEQ ID NO: 8198 - RNA, 20 nt, synthetic construct
  misc_feature 1..20: note = antisense sequence
  source 1..20: mol_type = other RNA
gggacaattagggactacag

SEQ ID NO: 8199 - RNA, 20 nt, synthetic construct
  misc_feature 1..20: note = antisense sequence
  source 1..20: mol_type = other RNA
cctgggacaattagggacta

SEQ ID NO: 8200 - RNA, 20 nt, synthetic construct
  misc_feature 1..20: note = antisense sequence
  source 1..20: mol_type = other RNA
ttcctgggacaattagggac

SEQ ID NO: 8201 - RNA, 20 nt, synthetic construct
  misc_feature 1..20: note = antisense sequence
  source 1..20: mol_type = other RNA
attcctgggacaattaggga

SEQ ID NO: 8202 - RNA, 20 nt, synthetic construct
  misc_feature 1..20: note = antisense sequence
  source 1..20: mol_type = other RNA
cattcctgggacaattaggg

SEQ ID NO: 8203 - RNA, 20 nt, synthetic construct
  misc_feature 1..20: note = antisense sequence
  source 1..20: mol_type = other RNA
aagcattcctgggacaatta

SEQ ID NO: 8204 - RNA, 20 nt, synthetic construct
  misc_feature 1..20: note = antisense sequence
  source 1..20: mol_type = other RNA
gagctgggcgattgtatgca

SEQ ID NO: 8205 - RNA, 20 nt, synthetic construct
  misc_feature 1..20: note = antisense sequence
  source 1..20: mol_type = other RNA
agagctgggcgattgtatgc

SEQ ID NO: 8206 - RNA, 20 nt, synthetic construct
  misc_feature 1..20: note = antisense sequence
  source 1..20: mol_type = other RNA
tagagctgggcgattgtatg

SEQ ID NO: 8207 - RNA, 20 nt, synthetic construct
  misc_feature 1..20: note = antisense sequence
  source 1..20: mol_type = other RNA
ctagagctgggcgattgtat

SEQ ID NO: 8208 - RNA, 20 nt, synthetic construct
  misc_feature 1..20: note = antisense sequence
  source 1..20: mol_type = other RNA
cctagagctgggcgattgta

SEQ ID NO: 8209 - RNA, 20 nt, synthetic construct
  misc_feature 1..20: note = antisense sequence
  source 1..20: mol_type = other RNA
acctagagctgggcgattgt

SEQ ID NO: 8210 - RNA, 20 nt, synthetic construct
  misc_feature 1..20: note = antisense sequence
  source 1..20: mol_type = other RNA
cacctagagctgggcgattg

SEQ ID NO: 8211 - RNA, 20 nt, synthetic construct
  misc_feature 1..20: note = antisense sequence
  source 1..20: mol_type = other RNA
aagcacctagagctgggcga

SEQ ID NO: 8212 - RNA, 20 nt, synthetic construct
  misc_feature 1..20: note = antisense sequence
  source 1..20: mol_type = other RNA
gaaagcacctagagctgggc

SEQ ID NO: 8213 - RNA, 20 nt, synthetic construct
  misc_feature 1..20: note = antisense sequence
  source 1..20: mol_type = other RNA
tgaaagcacctagagctggg

SEQ ID NO: 8214 - RNA, 20 nt, synthetic construct
  misc_feature 1..20: note = antisense sequence
  source 1..20: mol_type = other RNA
agtctggtttgctttgaaag

SEQ ID NO: 8215 - RNA, 20 nt, synthetic construct
  misc_feature 1..20: note = antisense sequence
  source 1..20: mol_type = other RNA
gtttagtctggtttgctttg

SEQ ID NO: 8216 - RNA, 20 nt, synthetic construct
  misc_feature 1..20: note = antisense sequence
  source 1..20: mol_type = other RNA
gagtttagtctggtttgctt

SEQ ID NO: 8217 - RNA, 20 nt, synthetic construct
  misc_feature 1..20: note = antisense sequence
  source 1..20: mol_type = other RNA
agagtttagtctggtttgct

SEQ ID NO: 8218 - RNA, 20 nt, synthetic construct
  misc_feature 1..20: note = antisense sequence
  source 1..20: mol_type = other RNA
aagagtttagtctggtttgc

SEQ ID NO: 8219 - RNA, 20 nt, synthetic construct
  misc_feature 1..20: note = antisense sequence
  source 1..20: mol_type = other RNA
caagagtttagtctggtttg

SEQ ID NO: 8220 - RNA, 20 nt, synthetic construct
  misc_feature 1..20: note = antisense sequence
  source 1..20: mol_type = other RNA
tccaagagtttagtctggtt

SEQ ID NO: 8221 - RNA, 20 nt, synthetic construct
  misc_feature 1..20: note = antisense sequence
  source 1..20: mol_type = other RNA
gtccaagagtttagtctggt

SEQ ID NO: 8222 - RNA, 20 nt, synthetic construct
  misc_feature 1..20: note = antisense sequence
  source 1..20: mol_type = other RNA
tgtccaagagtttagtctgg

SEQ ID NO: 8223 - RNA, 20 nt, synthetic construct
  misc_feature 1..20: note = antisense sequence
  source 1..20: mol_type = other RNA
ttgtccaagagtttagtctg

SEQ ID NO: 8224 - RNA, 20 nt, synthetic construct
  misc_feature 1..20: note = antisense sequence
  source 1..20: mol_type = other RNA
gcctttgtccaagagtttag

SEQ ID NO: 8225 - RNA, 20 nt, synthetic construct
  misc_feature 1..20: note = antisense sequence
  source 1..20: mol_type = other RNA
ggcctttgtccaagagttta

SEQ ID NO: 8226 - RNA, 20 nt, synthetic construct
  misc_feature 1..20: note = antisense sequence
  source 1..20: mol_type = other RNA
cgcaatggcctttgtccaag

SEQ ID NO: 8227 - RNA, 20 nt, synthetic construct
  misc_feature 1..20: note = antisense sequence
  source 1..20: mol_type = other RNA
gcgcaatggcctttgtccaa

SEQ ID NO: 8228 - RNA, 20 nt, synthetic construct
  misc_feature 1..20: note = antisense sequence
  source 1..20: mol_type = other RNA
gttagacttcctgatctgcg

SEQ ID NO: 8229 - RNA, 20 nt, synthetic construct
  misc_feature 1..20: note = antisense sequence
  source 1..20: mol_type = other RNA
agttagacttcctgatctgc

SEQ ID NO: 8230 - RNA, 20 nt, synthetic construct
  misc_feature 1..20: note = antisense sequence
  source 1..20: mol_type = other RNA
atggtcagttagacttcctg

SEQ ID NO: 8231 - RNA, 20 nt, synthetic construct
  misc_feature 1..20: note = antisense sequence
  source 1..20: mol_type = other RNA
gaatggtcagttagacttcc

SEQ ID NO: 8232 - RNA, 20 nt, synthetic construct
  misc_feature 1..20: note = antisense sequence
  source 1..20: mol_type = other RNA
ggaatggtcagttagacttc

SEQ ID NO: 8233 - RNA, 20 nt, synthetic construct
  misc_feature 1..20: note = antisense sequence
  source 1..20: mol_type = other RNA
tggaatggtcagttagactt

SEQ ID NO: 8234 - RNA, 20 nt, synthetic construct
  misc_feature 1..20: note = antisense sequence
  source 1..20: mol_type = other RNA
ctggaatggtcagttagact

SEQ ID NO: 8235 - RNA, 20 nt, synthetic construct
  misc_feature 1..20: note = antisense sequence
  source 1..20: mol_type = other RNA
attctggaatggtcagttag

SEQ ID NO: 8236 - RNA, 20 nt, synthetic construct
  misc_feature 1..20: note = antisense sequence
  source 1..20: mol_type = other RNA
gattctggaatggtcagtta

SEQ ID NO: 8237 - RNA, 20 nt, synthetic construct
  misc_feature 1..20: note = antisense sequence
  source 1..20: mol_type = other RNA
agattctggaatggtcagtt

SEQ ID NO: 8238 - RNA, 20 nt, synthetic construct
  misc_feature 1..20: note = antisense sequence
  source 1..20: mol_type = other RNA
catgttaagactgtatgtgg

SEQ ID NO: 8239 - RNA, 20 nt, synthetic construct
  misc_feature 1..20: note = antisense sequence
  source 1..20: mol_type = other RNA
tgttccagaggttgttttca

SEQ ID NO: 8240 - RNA, 20 nt, synthetic construct
  misc_feature 1..20: note = antisense sequence
  source 1..20: mol_type = other RNA
ttgttccagaggttgttttc

SEQ ID NO: 8241 - RNA, 20 nt, synthetic construct
  misc_feature 1..20: note = antisense sequence
  source 1..20: mol_type = other RNA
aggcaaaattcaggttgaga

SEQ ID NO: 8242 - RNA, 20 nt, synthetic construct
  misc_feature 1..20: note = antisense sequence
  source 1..20: mol_type = other RNA
gaggcaaaattcaggttgag

SEQ ID NO: 8243 - RNA, 20 nt, synthetic construct
  misc_feature 1..20: note = antisense sequence
  source 1..20: mol_type = other RNA
agaggcaaaattcaggttga

SEQ ID NO: 8244 - RNA, 20 nt, synthetic construct
  misc_feature 1..20: note = antisense sequence
  source 1..20: mol_type = other RNA
tgggtcctgaagcatgaagc

SEQ ID NO: 8245 - RNA, 20 nt, synthetic construct
  misc_feature 1..20: note = antisense sequence
  source 1..20: mol_type = other RNA
gttgggtcctgaagcatgaa

SEQ ID NO: 8246 - RNA, 20 nt, synthetic construct
  misc_feature 1..20: note = antisense sequence
  source 1..20: mol_type = other RNA
tgttgggtcctgaagcatga

SEQ ID NO: 8247 - RNA, 20 nt, synthetic construct
  misc_feature 1..20: note = antisense sequence
  source 1..20: mol_type = other RNA
atgttgggtcctgaagcatg

SEQ ID NO: 8248 - RNA, 20 nt, synthetic construct
  misc_feature 1..20: note = antisense sequence
  source 1..20: mol_type = other RNA
aatgttgggtcctgaagcat

SEQ ID NO: 8249 - RNA, 20 nt, synthetic construct
  misc_feature 1..20: note = antisense sequence
  source 1..20: mol_type = other RNA
gaatgttgggtcctgaagca

SEQ ID NO: 8250 - RNA, 20 nt, synthetic construct
  misc_feature 1..20: note = antisense sequence
  source 1..20: mol_type = other RNA
ggaatgttgggtcctgaagc

SEQ ID NO: 8251 - RNA, 20 nt, synthetic construct
  misc_feature 1..20: note = antisense sequence
  source 1..20: mol_type = other RNA
agggaatgttgggtcctgaa

SEQ ID NO: 8252 - RNA, 20 nt, synthetic construct
  misc_feature 1..20: note = antisense sequence
  source 1..20: mol_type = other RNA
cagtgtccagaaagttttga

SEQ ID NO: 8253 - RNA, 20 nt, synthetic construct
  misc_feature 1..20: note = antisense sequence
  source 1..20: mol_type = other RNA
gcagtgtccagaaagttttg

SEQ ID NO: 8254 - RNA, 20 nt, synthetic construct
  misc_feature 1..20: note = antisense sequence
  source 1..20: mol_type = other RNA
gagcagtgtccagaaagttt

SEQ ID NO: 8255 - RNA, 20 nt, synthetic construct
  misc_feature 1..20: note = antisense sequence
  source 1..20: mol_type = other RNA
agagcagtgtccagaaagtt

SEQ ID NO: 8256 - RNA, 20 nt, synthetic construct
  misc_feature 1..20: note = antisense sequence
  source 1..20: mol_type = other RNA
ttagagcagtgtccagaaag

SEQ ID NO: 8257 - RNA, 20 nt, synthetic construct
  misc_feature 1..20: note = antisense sequence
  source 1..20: mol_type = other RNA
attagagcagtgtccagaaa

SEQ ID NO: 8258 - RNA, 20 nt, synthetic construct
  misc_feature 1..20: note = antisense sequence
  source 1..20: mol_type = other RNA
gtgacaaaggaaactagagg

SEQ ID NO: 8259 - RNA, 20 nt, synthetic construct
  misc_feature 1..20: note = antisense sequence
  source 1..20: mol_type = other RNA
ggtgacaaaggaaactagag

SEQ ID NO: 8260 - RNA, 20 nt, synthetic construct
  misc_feature 1..20: note = antisense sequence
  source 1..20: mol_type = other RNA
gggtgacaaaggaaactaga

SEQ ID NO: 8261 - RNA, 20 nt, synthetic construct
  misc_feature 1..20: note = antisense sequence
  source 1..20: mol_type = other RNA
tgggtgacaaaggaaactag

SEQ ID NO: 8262 - RNA, 20 nt, synthetic construct
  misc_feature 1..20: note = antisense sequence
  source 1..20: mol_type = other RNA
ggacatcctttgggtgacaa

SEQ ID NO: 8263 - RNA, 20 nt, synthetic construct
  misc_feature 1..20: note = antisense sequence
  source 1..20: mol_type = other RNA
aggacatcctttgggtgaca

SEQ ID NO: 8264 - RNA, 20 nt, synthetic construct
  misc_feature 1..20: note = antisense sequence
  source 1..20: mol_type = other RNA
tgaggacatcctttgggtga

SEQ ID NO: 8265 - RNA, 20 nt, synthetic construct
  misc_feature 1..20: note = antisense sequence
  source 1..20: mol_type = other RNA
atgaggacatcctttgggtg

SEQ ID NO: 8266 - RNA, 20 nt, synthetic construct
  misc_feature 1..20: note = antisense sequence
  source 1..20: mol_type = other RNA
gaccatgacttccaaaatca

SEQ ID NO: 8267 - RNA, 20 nt, synthetic construct
  misc_feature 1..20: note = antisense sequence
  source 1..20: mol_type = other RNA
tgaccatgacttccaaaatc

SEQ ID NO: 8268 - RNA, 20 nt, synthetic construct
  misc_feature 1..20: note = antisense sequence
  source 1..20: mol_type = other RNA
ccagtgatgaaacacgattt

SEQ ID NO: 8269 - RNA, 20 nt, synthetic construct
  misc_feature 1..20: note = antisense sequence
  source 1..20: mol_type = other RNA
atgaccagtgatgaaacacg

SEQ ID NO: 8270 - RNA, 20 nt, synthetic construct
  misc_feature 1..20: note = antisense sequence
  source 1..20: mol_type = other RNA
atgagaatgtgggattgctt

SEQ ID NO: 8271 - RNA, 20 nt, synthetic construct
  misc_feature 1..20: note = antisense sequence
  source 1..20: mol_type = other RNA
aatgagaatgtgggattgct

SEQ ID NO: 8272 - RNA, 20 nt, synthetic construct
  misc_feature 1..20: note = antisense sequence
  source 1..20: mol_type = other RNA
agggcaatgagaatgtggga

SEQ ID NO: 8273 - RNA, 20 nt, synthetic construct
  misc_feature 1..20: note = antisense sequence
  source 1..20: mol_type = other RNA
cagggcaatgagaatgtggg

SEQ ID NO: 8274 - RNA, 20 nt, synthetic construct
  misc_feature 1..20: note = antisense sequence
  source 1..20: mol_type = other RNA
agcagggcaatgagaatgtg

SEQ ID NO: 8275 - RNA, 20 nt, synthetic construct
  misc_feature 1..20: note = antisense sequence
  source 1..20: mol_type = other RNA
tagcagggcaatgagaatgt

SEQ ID NO: 8276 - RNA, 20 nt, synthetic construct
  misc_feature 1..20: note = antisense sequence
  source 1..20: mol_type = other RNA
agaactagcagggcaatgag

SEQ ID NO: 8277 - RNA, 20 nt, synthetic construct
  misc_feature 1..20: note = antisense sequence
  source 1..20: mol_type = other RNA
cagaactagcagggcaatga

SEQ ID NO: 8278 - RNA, 20 nt, synthetic construct
  misc_feature 1..20: note = antisense sequence
  source 1..20: mol_type = other RNA
tgcagaactagcagggcaat

SEQ ID NO: 8279 - RNA, 20 nt, synthetic construct
  misc_feature 1..20: note = antisense sequence
  source 1..20: mol_type = other RNA
atgcagaactagcagggcaa

SEQ ID NO: 8280 - RNA, 20 nt, synthetic construct
  misc_feature 1..20: note = antisense sequence
  source 1..20: mol_type = other RNA
aatgcagaactagcagggca

SEQ ID NO: 8281 - RNA, 20 nt, synthetic construct
  misc_feature 1..20: note = antisense sequence
  source 1..20: mol_type = other RNA
gaatgcagaactagcagggc

SEQ ID NO: 8282 - RNA, 20 nt, synthetic construct
  misc_feature 1..20: note = antisense sequence
  source 1..20: mol_type = other RNA
agaatgcagaactagcaggg

SEQ ID NO: 8283 - RNA, 20 nt, synthetic construct
  misc_feature 1..20: note = antisense sequence
  source 1..20: mol_type = other RNA
aagaatgcagaactagcagg

SEQ ID NO: 8284 - RNA, 20 nt, synthetic construct
  misc_feature 1..20: note = antisense sequence
  source 1..20: mol_type = other RNA
tgaaagaatgcagaactagc

SEQ ID NO: 8285 - RNA, 20 nt, synthetic construct
  misc_feature 1..20: note = antisense sequence
  source 1..20: mol_type = other RNA
ctgtgaaagaatgcagaact

SEQ ID NO: 8286 - RNA, 20 nt, synthetic construct
  misc_feature 1..20: note = antisense sequence
  source 1..20: mol_type = other RNA
gctcatgtcccagaaactat

SEQ ID NO: 8287 - RNA, 20 nt, synthetic construct
  misc_feature 1..20: note = antisense sequence
  source 1..20: mol_type = other RNA
ggctcatgtcccagaaacta

SEQ ID NO: 8288 - RNA, 20 nt, synthetic construct
  misc_feature 1..20: note = antisense sequence
  source 1..20: mol_type = other RNA
tggctcatgtcccagaaact

SEQ ID NO: 8289 - RNA, 20 nt, synthetic construct
  misc_feature 1..20: note = antisense sequence
  source 1..20: mol_type = other RNA
gttggctcatgtcccagaaa

SEQ ID NO: 8290 - RNA, 20 nt, synthetic construct
  misc_feature 1..20: note = antisense sequence
  source 1..20: mol_type = other RNA
gagttggctcatgtcccaga

SEQ ID NO: 8291 - RNA, 20 nt, synthetic construct
  misc_feature 1..20: note = antisense sequence
  source 1..20: mol_type = other RNA
gctgaagagttggctcatgt

SEQ ID NO: 8292 - RNA, 20 nt, synthetic construct
  misc_feature 1..20: note = antisense sequence
  source 1..20: mol_type = other RNA
ggctgaagagttggctcatg

SEQ ID NO: 8293 - RNA, 20 nt, synthetic construct
  misc_feature 1..20: note = antisense sequence
  source 1..20: mol_type = other RNA
aggctgaagagttggctcat

SEQ ID NO: 8294 - RNA, 20 nt, synthetic construct
  misc_feature 1..20: note = antisense sequence
  source 1..20: mol_type = other RNA
aaggctgaagagttggctca

SEQ ID NO: 8295 - RNA, 20 nt, synthetic construct
  misc_feature 1..20: note = antisense sequence
  source 1..20: mol_type = other RNA
taaggctgaagagttggctc

SEQ ID NO: 8296 - RNA, 20 nt, synthetic construct
  misc_feature 1..20: note = antisense sequence
  source 1..20: mol_type = other RNA
gctaaggctgaagagttggc

SEQ ID NO: 8297 - RNA, 20 nt, synthetic construct
  misc_feature 1..20: note = antisense sequence
  source 1..20: mol_type = other RNA
aagctaaggctgaagagttg

SEQ ID NO: 8298 - RNA, 20 nt, synthetic construct
  misc_feature 1..20: note = antisense sequence
  source 1..20: mol_type = other RNA
acaagctaaggctgaagagt

SEQ ID NO: 8299 - RNA, 20 nt, synthetic construct
  misc_feature 1..20: note = antisense sequence
  source 1..20: mol_type = other RNA
aacaagctaaggctgaagag

SEQ ID NO: 8300 - RNA, 20 nt, synthetic construct
  misc_feature 1..20: note = antisense sequence
  source 1..20: mol_type = other RNA
tgaacaagctaaggctgaag

SEQ ID NO: 8301 - RNA, 20 nt, synthetic construct
  misc_feature 1..20: note = antisense sequence
  source 1..20: mol_type = other RNA
aatgaacaagctaaggctga

SEQ ID NO: 8302 - RNA, 20 nt, synthetic construct
  misc_feature 1..20: note = antisense sequence
  source 1..20: mol_type = other RNA
gctcatatcatagcacattc

SEQ ID NO: 8303 - RNA, 20 nt, synthetic construct
  misc_feature 1..20: note = antisense sequence
  source 1..20: mol_type = other RNA
tgtgacattgggaattgatg

SEQ ID NO: 8304 - RNA, 20 nt, synthetic construct
  misc_feature 1..20: note = antisense sequence
  source 1..20: mol_type = other RNA
ctgtgacattgggaattgat

SEQ ID NO: 8305 - RNA, 20 nt, synthetic construct
  misc_feature 1..20: note = antisense sequence
  source 1..20: mol_type = other RNA
cttctgtgacattgggaatt

SEQ ID NO: 8306 - RNA, 20 nt, synthetic construct
  misc_feature 1..20: note = antisense sequence
  source 1..20: mol_type = other RNA
acttctgtgacattgggaat

SEQ ID NO: 8307 - RNA, 20 nt, synthetic construct
  misc_feature 1..20: note = antisense sequence
  source 1..20: mol_type = other RNA
ctttacttctgtgacattgg

SEQ ID NO: 8308 - RNA, 20 nt, synthetic construct
  misc_feature 1..20: note = antisense sequence
  source 1..20: mol_type = other RNA
catgttctcctttacttctg

SEQ ID NO: 8309 - RNA, 20 nt, synthetic construct
  misc_feature 1..20: note = antisense sequence
  source 1..20: mol_type = other RNA
ccaaatgtcatgttctcctt

SEQ ID NO: 8310 - RNA, 20 nt, synthetic construct
  misc_feature 1..20: note = antisense sequence
  source 1..20: mol_type = other RNA
tggtgactaaagttgatcca

SEQ ID NO: 8311 - RNA, 20 nt, synthetic construct
  misc_feature 1..20: note = antisense sequence
  source 1..20: mol_type = other RNA
ttggtgactaaagttgatcc

SEQ ID NO: 8312 - RNA, 20 nt, synthetic construct
  misc_feature 1..20: note = antisense sequence
  source 1..20: mol_type = other RNA
gttggtgactaaagttgatc

SEQ ID NO: 8313 - RNA, 20 nt, synthetic construct
  misc_feature 1..20: note = antisense sequence
  source 1..20: mol_type = other RNA
ggttggtgactaaagttgat

SEQ ID NO: 8314 - RNA, 20 nt, synthetic construct
  misc_feature 1..20: note = antisense sequence
  source 1..20: mol_type = other RNA
ttgggttggtgactaaagtt

SEQ ID NO: 8315 - RNA, 20 nt, synthetic construct
  misc_feature 1..20: note = antisense sequence
  source 1..20: mol_type = other RNA
tttgggttggtgactaaagt

SEQ ID NO: 8316 - RNA, 20 nt, synthetic construct
  misc_feature 1..20: note = antisense sequence
  source 1..20: mol_type = other RNA
atttgggttggtgactaaag

SEQ ID NO: 8317 - RNA, 20 nt, synthetic construct
  misc_feature 1..20: note = antisense sequence
  source 1..20: mol_type = other RNA
catttgggttggtgactaaa

SEQ ID NO: 8318 - RNA, 20 nt, synthetic construct
  misc_feature 1..20: note = antisense sequence
  source 1..20: mol_type = other RNA
ccatttgggttggtgactaa

SEQ ID NO: 8319 - RNA, 20 nt, synthetic construct
  misc_feature 1..20: note = antisense sequence
  source 1..20: mol_type = other RNA
ctccatttgggttggtgact

SEQ ID NO: 8320 - RNA, 20 nt, synthetic construct
  misc_feature 1..20: note = antisense sequence
  source 1..20: mol_type = other RNA
attctctccattcttaccag

SEQ ID NO: 8321 - RNA, 20 nt, synthetic construct
  misc_feature 1..20: note = antisense sequence
  source 1..20: mol_type = other RNA
gttgtgtaatgcaaatgtcc

SEQ ID NO: 8322 - RNA, 20 nt, synthetic construct
  misc_feature 1..20: note = antisense sequence
  source 1..20: mol_type = other RNA
aggcttttcaaacatgcaag

SEQ ID NO: 8323 - RNA, 20 nt, synthetic construct
  misc_feature 1..20: note = antisense sequence
  source 1..20: mol_type = other RNA
tctcattcattgcataggct

SEQ ID NO: 8324 - RNA, 20 nt, synthetic construct
  misc_feature 1..20: note = antisense sequence
  source 1..20: mol_type = other RNA
cgtctcattcattgcatagg

SEQ ID NO: 8325 - RNA, 20 nt, synthetic construct
  misc_feature 1..20: note = antisense sequence
  source 1..20: mol_type = other RNA
acgtctcattcattgcatag

SEQ ID NO: 8326 - RNA, 20 nt, synthetic construct
  misc_feature 1..20: note = antisense sequence
  source 1..20: mol_type = other RNA
catacgtctcattcattgca

SEQ ID NO: 8327 - RNA, 20 nt, synthetic construct
  misc_feature 1..20: note = antisense sequence
  source 1..20: mol_type = other RNA
aattggtaatgctggtagct

SEQ ID NO: 8328 - RNA, 20 nt, synthetic construct
  misc_feature 1..20: note = antisense sequence
  source 1..20: mol_type = other RNA
aaattggtaatgctggtagc

SEQ ID NO: 8329 - RNA, 20 nt, synthetic construct
  misc_feature 1..20: note = antisense sequence
  source 1..20: mol_type = other RNA
acctaaattggtaatgctgg

SEQ ID NO: 8330 - RNA, 20 nt, synthetic construct
  misc_feature 1..20: note = antisense sequence
  source 1..20: mol_type = other RNA
ggcaaagcaaacatttacct

SEQ ID NO: 8331 - RNA, 20 nt, synthetic construct
  misc_feature 1..20: note = antisense sequence
  source 1..20: mol_type = other RNA
gcatgacagctttatctatg

SEQ ID NO: 8332 - RNA, 20 nt, synthetic construct
  misc_feature 1..20: note = antisense sequence
  source 1..20: mol_type = other RNA
tctccaaagtagacacattg

SEQ ID NO: 8333 - RNA, 20 nt, synthetic construct
  misc_feature 1..20: note = antisense sequence
  source 1..20: mol_type = other RNA
gttctccaaagtagacacat

SEQ ID NO: 8334 - RNA, 20 nt, synthetic construct
  misc_feature 1..20: note = antisense sequence
  source 1..20: mol_type = other RNA
gatgttctccaaagtagaca

SEQ ID NO: 8335 - RNA, 20 nt, synthetic construct
  misc_feature 1..20: note = antisense sequence
  source 1..20: mol_type = other RNA
tgatgttctccaaagtagac

SEQ ID NO: 8336 - RNA, 20 nt, synthetic construct
  misc_feature 1..20: note = antisense sequence
  source 1..20: mol_type = other RNA
gcattctgcaataaaaggag

SEQ ID NO: 8337 - RNA, 20 nt, synthetic construct
  misc_feature 1..20: note = antisense sequence
  source 1..20: mol_type = other RNA
tccagttgagtgctgcattc

SEQ ID NO: 8338 - RNA, 20 nt, synthetic construct
  misc_feature 1..20: note = antisense sequence
  source 1..20: mol_type = other RNA
gtccagttgagtgctgcatt

SEQ ID NO: 8339 - RNA, 20 nt, synthetic construct
  misc_feature 1..20: note = antisense sequence
  source 1..20: mol_type = other RNA
tgtccagttgagtgctgcat

SEQ ID NO: 8340 - RNA, 20 nt, synthetic construct
  misc_feature 1..20: note = antisense sequence
  source 1..20: mol_type = other RNA
atgtccagttgagtgctgca

SEQ ID NO: 8341 - RNA, 20 nt, synthetic construct
  misc_feature 1..20: note = antisense sequence
  source 1..20: mol_type = other RNA
tatgtccagttgagtgctgc

SEQ ID NO: 8342 - RNA, 20 nt, synthetic construct
  misc_feature 1..20: note = antisense sequence
  source 1..20: mol_type = other RNA
ctatgtccagttgagtgctg

SEQ ID NO: 8343 - RNA, 20 nt, synthetic construct
  misc_feature 1..20: note = antisense sequence
  source 1..20: mol_type = other RNA
actatgtccagttgagtgct

SEQ ID NO: 8344 - RNA, 20 nt, synthetic construct
  misc_feature 1..20: note = antisense sequence
  source 1..20: mol_type = other RNA
gactatgtccagttgagtgc

SEQ ID NO: 8345 - RNA, 20 nt, synthetic construct
  misc_feature 1..20: note = antisense sequence
  source 1..20: mol_type = other RNA
tgactatgtccagttgagtg

SEQ ID NO: 8346 - RNA, 20 nt, synthetic construct
  misc_feature 1..20: note = antisense sequence
  source 1..20: mol_type = other RNA
ctatgactatgtccagttga

SEQ ID NO: 8347 - RNA, 20 nt, synthetic construct
  misc_feature 1..20: note = antisense sequence
  source 1..20: mol_type = other RNA
actatgactatgtccagttg

SEQ ID NO: 8348 - RNA, 20 nt, synthetic construct
  misc_feature 1..20: note = antisense sequence
  source 1..20: mol_type = other RNA
cactatgactatgtccagtt

SEQ ID NO: 8349 - RNA, 20 nt, synthetic construct
  misc_feature 1..20: note = antisense sequence
  source 1..20: mol_type = other RNA
gcactatgactatgtccagt

SEQ ID NO: 8350 - RNA, 20 nt, synthetic construct
  misc_feature 1..20: note = antisense sequence
  source 1..20: mol_type = other RNA
cagcactatgactatgtcca

SEQ ID NO: 8351 - RNA, 20 nt, synthetic construct
  misc_feature 1..20: note = antisense sequence
  source 1..20: mol_type = other RNA
ccagcactatgactatgtcc

SEQ ID NO: 8352 - RNA, 20 nt, synthetic construct
  misc_feature 1..20: note = antisense sequence
  source 1..20: mol_type = other RNA
tccagcactatgactatgtc

SEQ ID NO: 8353 - RNA, 20 nt, synthetic construct
  misc_feature 1..20: note = antisense sequence
  source 1..20: mol_type = other RNA
atccagcactatgactatgt

SEQ ID NO: 8354 - RNA, 20 nt, synthetic construct
  misc_feature 1..20: note = antisense sequence
  source 1..20: mol_type = other RNA
catccagcactatgactatg

SEQ ID NO: 8355 - RNA, 20 nt, synthetic construct
  misc_feature 1..20: note = antisense sequence
  source 1..20: mol_type = other RNA
ccatccagcactatgactat

SEQ ID NO: 8356 - RNA, 20 nt, synthetic construct
  misc_feature 1..20: note = antisense sequence
  source 1..20: mol_type = other RNA
accatccagcactatgacta

SEQ ID NO: 8357 - RNA, 20 nt, synthetic construct
  misc_feature 1..20: note = antisense sequence
  source 1..20: mol_type = other RNA
aaccatccagcactatgact

SEQ ID NO: 8358 - RNA, 20 nt, synthetic construct
  misc_feature 1..20: note = antisense sequence
  source 1..20: mol_type = other RNA
gaaccatccagcactatgac

SEQ ID NO: 8359 - RNA, 20 nt, synthetic construct
  misc_feature 1..20: note = antisense sequence
  source 1..20: mol_type = other RNA
ggaaccatccagcactatga

SEQ ID NO: 8360 - RNA, 20 nt, synthetic construct
  misc_feature 1..20: note = antisense sequence
  source 1..20: mol_type = other RNA
aaatactgttggaaccatcc

SEQ ID NO: 8361 - RNA, 20 nt, synthetic construct
  misc_feature 1..20: note = antisense sequence
  source 1..20: mol_type = other RNA
ggtaaatactgttggaacca

SEQ ID NO: 8362 - RNA, 20 nt, synthetic construct
  misc_feature 1..20: note = antisense sequence
  source 1..20: mol_type = other RNA
catgggtaaatactgttgga

SEQ ID NO: 8363 - RNA, 20 nt, synthetic construct
  misc_feature 1..20: note = antisense sequence
  source 1..20: mol_type = other RNA
agctgtaacactgtcccatg

SEQ ID NO: 8364 - RNA, 20 nt, synthetic construct
  misc_feature 1..20: note = antisense sequence
  source 1..20: mol_type = other RNA
aagctgtaacactgtcccat

SEQ ID NO: 8365 - RNA, 20 nt, synthetic construct
  misc_feature 1..20: note = antisense sequence
  source 1..20: mol_type = other RNA
ctgtttaggaccaatatcca

SEQ ID NO: 8366 - RNA, 20 nt, synthetic construct
  misc_feature 1..20: note = antisense sequence
  source 1..20: mol_type = other RNA
tctgtttaggaccaatatcc

SEQ ID NO: 8367 - RNA, 20 nt, synthetic construct
  misc_feature 1..20: note = antisense sequence
  source 1..20: mol_type = other RNA
gtgtctgtttaggaccaata

SEQ ID NO: 8368 - RNA, 20 nt, synthetic construct
  misc_feature 1..20: note = antisense sequence
  source 1..20: mol_type = other RNA
tgtgtctgtttaggaccaat

SEQ ID NO: 8369 - RNA, 20 nt, synthetic construct
  misc_feature 1..20: note = antisense sequence
  source 1..20: mol_type = other RNA
ctgtgtctgtttaggaccaa

SEQ ID NO: 8370 - RNA, 20 nt, synthetic construct
  misc_feature 1..20: note = antisense sequence
  source 1..20: mol_type = other RNA
acctgtgtctgtttaggacc

SEQ ID NO: 8371 - RNA, 20 nt, synthetic construct
  misc_feature 1..20: note = antisense sequence
  source 1..20: mol_type = other RNA
catacctgtgtctgtttagg

SEQ ID NO: 8372 - RNA, 20 nt, synthetic construct
  misc_feature 1..20: note = antisense sequence
  source 1..20: mol_type = other RNA
acatacctgtgtctgtttag

SEQ ID NO: 8373 - RNA, 20 nt, synthetic construct
  misc_feature 1..20: note = antisense sequence
  source 1..20: mol_type = other RNA
acacaaagtcacatacctgt

SEQ ID NO: 8374 - RNA, 20 nt, synthetic construct
  misc_feature 1..20: note = antisense sequence
  source 1..20: mol_type = other RNA
cacagcttaaagtaatgtcc

SEQ ID NO: 8375 - RNA, 20 nt, synthetic construct
  misc_feature 1..20: note = antisense sequence
  source 1..20: mol_type = other RNA
ctgggcaacagagtgagact

SEQ ID NO: 8376 - RNA, 20 nt, synthetic construct
  misc_feature 1..20: note = antisense sequence
  source 1..20: mol_type = other RNA
cctgggcaacagagtgagac

SEQ ID NO: 8377 - RNA, 20 nt, synthetic construct
  misc_feature 1..20: note = antisense sequence
  source 1..20: mol_type = other RNA
gcctgggcaacagagtgaga

SEQ ID NO: 8378 - RNA, 20 nt, synthetic construct
  misc_feature 1..20: note = antisense sequence
  source 1..20: mol_type = other RNA
agcctgggcaacagagtgag

SEQ ID NO: 8379 - RNA, 20 nt, synthetic construct
  misc_feature 1..20: note = antisense sequence
  source 1..20: mol_type = other RNA
cagcctgggcaacagagtga

SEQ ID NO: 8380 - RNA, 20 nt, synthetic construct
  misc_feature 1..20: note = antisense sequence
  source 1..20: mol_type = other RNA
tccagcctgggcaacagagt

SEQ ID NO: 8381 - RNA, 20 nt, synthetic construct
  misc_feature 1..20: note = antisense sequence
  source 1..20: mol_type = other RNA
actccagcctgggcaacaga

SEQ ID NO: 8382 - RNA, 20 nt, synthetic construct
  misc_feature 1..20: note = antisense sequence
  source 1..20: mol_type = other RNA
agctgagattgcaccactgc

SEQ ID NO: 8383 - RNA, 20 nt, synthetic construct
  misc_feature 1..20: note = antisense sequence
  source 1..20: mol_type = other RNA
gagctgagattgcaccactg

SEQ ID NO: 8384 - RNA, 20 nt, synthetic construct
  misc_feature 1..20: note = antisense sequence
  source 1..20: mol_type = other RNA
tgagctgagattgcaccact

SEQ ID NO: 8385 - RNA, 20 nt, synthetic construct
  misc_feature 1..20: note = antisense sequence
  source 1..20: mol_type = other RNA
gtgagctgagattgcaccac

SEQ ID NO: 8386 - RNA, 20 nt, synthetic construct
  misc_feature 1..20: note = antisense sequence
  source 1..20: mol_type = other RNA
agtgagctgagattgcacca

SEQ ID NO: 8387 - RNA, 20 nt, synthetic construct
  misc_feature 1..20: note = antisense sequence
  source 1..20: mol_type = other RNA
cagtgagctgagattgcacc

SEQ ID NO: 8388 - RNA, 20 nt, synthetic construct
  misc_feature 1..20: note = antisense sequence
  source 1..20: mol_type = other RNA
gcagtgagctgagattgcac

SEQ ID NO: 8389 - RNA, 20 nt, synthetic construct
  misc_feature 1..20: note = antisense sequence
  source 1..20: mol_type = other RNA
ttgcagtgagctgagattgc

SEQ ID NO: 8390 - RNA, 20 nt, synthetic construct
  misc_feature 1..20: note = antisense sequence
  source 1..20: mol_type = other RNA
gttgcagtgagctgagattg

SEQ ID NO: 8391 - RNA, 20 nt, synthetic construct
  misc_feature 1..20: note = antisense sequence
  source 1..20: mol_type = other RNA
ggttgcagtgagctgagatt

SEQ ID NO: 8392 - RNA, 20 nt, synthetic construct
  misc_feature 1..20: note = antisense sequence
  source 1..20: mol_type = other RNA
aggttgcagtgagctgagat

SEQ ID NO: 8393 - RNA, 20 nt, synthetic construct
  misc_feature 1..20: note = antisense sequence
  source 1..20: mol_type = other RNA
aaggttgcagtgagctgaga

SEQ ID NO: 8394 - RNA, 20 nt, synthetic construct
  misc_feature 1..20: note = antisense sequence
  source 1..20: mol_type = other RNA
gaaggttgcagtgagctgag

SEQ ID NO: 8395 - RNA, 20 nt, synthetic construct
  misc_feature 1..20: note = antisense sequence
  source 1..20: mol_type = other RNA
tgaaggttgcagtgagctga

SEQ ID NO: 8396 - RNA, 20 nt, synthetic construct
  misc_feature 1..20: note = antisense sequence
  source 1..20: mol_type = other RNA
gtgaaggttgcagtgagctg

SEQ ID NO: 8397 - RNA, 20 nt, synthetic construct
  misc_feature 1..20: note = antisense sequence
  source 1..20: mol_type = other RNA
ggtgaaggttgcagtgagct

SEQ ID NO: 8398 - RNA, 20 nt, synthetic construct
  misc_feature 1..20: note = antisense sequence
  source 1..20: mol_type = other RNA
cttgagcctgggaggtgaag

SEQ ID NO: 8399 - RNA, 20 nt, synthetic construct
  misc_feature 1..20: note = antisense sequence
  source 1..20: mol_type = other RNA
gcttgagcctgggaggtgaa

SEQ ID NO: 8400 - RNA, 20 nt, synthetic construct
  misc_feature 1..20: note = antisense sequence
  source 1..20: mol_type = other RNA
tgcttgagcctgggaggtga

SEQ ID NO: 8401 - RNA, 20 nt, synthetic construct
  misc_feature 1..20: note = antisense sequence
  source 1..20: mol_type = other RNA
ttgcttgagcctgggaggtg

SEQ ID NO: 8402 - RNA, 20 nt, synthetic construct
  misc_feature 1..20: note = antisense sequence
  source 1..20: mol_type = other RNA
attgcttgagcctgggaggt

SEQ ID NO: 8403 - RNA, 20 nt, synthetic construct
  misc_feature 1..20: note = antisense sequence
  source 1..20: mol_type = other RNA
aattgcttgagcctgggagg

SEQ ID NO: 8404 - RNA, 20 nt, synthetic construct
  misc_feature 1..20: note = antisense sequence
  source 1..20: mol_type = other RNA
gaattgcttgagcctgggag

SEQ ID NO: 8405 - RNA, 20 nt, synthetic construct
  misc_feature 1..20: note = antisense sequence
  source 1..20: mol_type = other RNA
ggctgagaaatatgaattgc

SEQ ID NO: 8406 - RNA, 20 nt, synthetic construct
  misc_feature 1..20: note = antisense sequence
  source 1..20: mol_type = other RNA
gcctgtaattccagcttctg

SEQ ID NO: 8407 - RNA, 20 nt, synthetic construct
  misc_feature 1..20: note = antisense sequence
  source 1..20: mol_type = other RNA
tgcctgtaattccagcttct

SEQ ID NO: 8408 - RNA, 20 nt, synthetic construct
  misc_feature 1..20: note = antisense sequence
  source 1..20: mol_type = other RNA
atgcctgtaattccagcttc

SEQ ID NO: 8409 - RNA, 20 nt, synthetic construct
  misc_feature 1..20: note = antisense sequence
  source 1..20: mol_type = other RNA
catgcctgtaattccagctt

SEQ ID NO: 8410 - RNA, 20 nt, synthetic construct
  misc_feature 1..20: note = antisense sequence
  source 1..20: mol_type = other RNA
aaattagccaggtgtgatgg

SEQ ID NO: 8411 - RNA, 20 nt, synthetic construct
  misc_feature 1..20: note = antisense sequence
  source 1..20: mol_type = other RNA
aaaattagccaggtgtgatg

SEQ ID NO: 8412 - RNA, 20 nt, synthetic construct
  misc_feature 1..20: note = antisense sequence
  source 1..20: mol_type = other RNA
agtttgagaccagcctggcc

SEQ ID NO: 8413 - RNA, 20 nt, synthetic construct
  misc_feature 1..20: note = antisense sequence
  source 1..20: mol_type = other RNA
gagtttgagaccagcctggc

SEQ ID NO: 8414 - RNA, 20 nt, synthetic construct
  misc_feature 1..20: note = antisense sequence
  source 1..20: mol_type = other RNA
ggagtttgagaccagcctgg

SEQ ID NO: 8415 - RNA, 20 nt, synthetic construct
  misc_feature 1..20: note = antisense sequence
  source 1..20: mol_type = other RNA
aggagtttgagaccagcctg

SEQ ID NO: 8416 - RNA, 20 nt, synthetic construct
  misc_feature 1..20: note = antisense sequence
  source 1..20: mol_type = other RNA
taggagtttgagaccagcct

SEQ ID NO: 8417 - RNA, 20 nt, synthetic construct
  misc_feature 1..20: note = antisense sequence
  source 1..20: mol_type = other RNA
ctaggagtttgagaccagcc

SEQ ID NO: 8418 - RNA, 20 nt, synthetic construct
  misc_feature 1..20: note = antisense sequence
  source 1..20: mol_type = other RNA
gctaggagtttgagaccagc

SEQ ID NO: 8419 - RNA, 20 nt, synthetic construct
  misc_feature 1..20: note = antisense sequence
  source 1..20: mol_type = other RNA
ggctaggagtttgagaccag

SEQ ID NO: 8420 - RNA, 20 nt, synthetic construct
  misc_feature 1..20: note = antisense sequence
  source 1..20: mol_type = other RNA
aggctaggagtttgagacca

SEQ ID NO: 8421 - RNA, 20 nt, synthetic construct
  misc_feature 1..20: note = antisense sequence
  source 1..20: mol_type = other RNA
ctcacgcctgtaataccaat

SEQ ID NO: 8422 - RNA, 20 nt, synthetic construct
  misc_feature 1..20: note = antisense sequence
  source 1..20: mol_type = other RNA
gctcacgcctgtaataccaa

SEQ ID NO: 8423 - RNA, 20 nt, synthetic construct
  misc_feature 1..20: note = antisense sequence
  source 1..20: mol_type = other RNA
ggctcacgcctgtaatacca

SEQ ID NO: 8424 - RNA, 20 nt, synthetic construct
  misc_feature 1..20: note = antisense sequence
  source 1..20: mol_type = other RNA
tggctcacgcctgtaatacc

SEQ ID NO: 8425 - RNA, 20 nt, synthetic construct
  misc_feature 1..20: note = antisense sequence
  source 1..20: mol_type = other RNA
gtggctcacgcctgtaatac

SEQ ID NO: 8426 - RNA, 20 nt, synthetic construct
  misc_feature 1..20: note = antisense sequence
  source 1..20: mol_type = other RNA
agtggctcacgcctgtaata

SEQ ID NO: 8427 - RNA, 20 nt, synthetic construct
  misc_feature 1..20: note = antisense sequence
  source 1..20: mol_type = other RNA
cagtggctcacgcctgtaat

SEQ ID NO: 8428 - RNA, 20 nt, synthetic construct
  misc_feature 1..20: note = antisense sequence
  source 1..20: mol_type = other RNA
aggttgggcacagtggctca

SEQ ID NO: 8429 - RNA, 20 nt, synthetic construct
  misc_feature 1..20: note = antisense sequence
  source 1..20: mol_type = other RNA
taggttgggcacagtggctc

SEQ ID NO: 8430 - RNA, 20 nt, synthetic construct
  misc_feature 1..20: note = antisense sequence
  source 1..20: mol_type = other RNA
ccaaaagtggctatatccat

SEQ ID NO: 8431 - RNA, 20 nt, synthetic construct
  misc_feature 1..20: note = antisense sequence
  source 1..20: mol_type = other RNA
accaaaagtggctatatcca

SEQ ID NO: 8432 - RNA, 20 nt, synthetic construct
  misc_feature 1..20: note = antisense sequence
  source 1..20: mol_type = other RNA
taccaaaagtggctatatcc

SEQ ID NO: 8433 - RNA, 20 nt, synthetic construct
  misc_feature 1..20: note = antisense sequence
  source 1..20: mol_type = other RNA
gctctgacattaccaaaagt

SEQ ID NO: 8434 - RNA, 20 nt, synthetic construct
  misc_feature 1..20: note = antisense sequence
  source 1..20: mol_type = other RNA
ggctctgacattaccaaaag

SEQ ID NO: 8435 - RNA, 20 nt, synthetic construct
  misc_feature 1..20: note = antisense sequence
  source 1..20: mol_type = other RNA
cggctctgacattaccaaaa

SEQ ID NO: 8436 - RNA, 20 nt, synthetic construct
  misc_feature 1..20: note = antisense sequence
  source 1..20: mol_type = other RNA
ccggctctgacattaccaaa

SEQ ID NO: 8437 - RNA, 20 nt, synthetic construct
  misc_feature 1..20: note = antisense sequence
  source 1..20: mol_type = other RNA
ttacaaactctgacacccgg

SEQ ID NO: 8438 - RNA, 20 nt, synthetic construct
  misc_feature 1..20: note = antisense sequence
  source 1..20: mol_type = other RNA
ttttacaaactctgacaccc

SEQ ID NO: 8439 - RNA, 20 nt, synthetic construct
  misc_feature 1..20: note = antisense sequence
  source 1..20: mol_type = other RNA
gtttgggatgtcagattagt

SEQ ID NO: 8440 - RNA, 20 nt, synthetic construct
  misc_feature 1..20: note = antisense sequence
  source 1..20: mol_type = other RNA
tgtttgggatgtcagattag

SEQ ID NO: 8441 - RNA, 20 nt, synthetic construct
  misc_feature 1..20: note = antisense sequence
  source 1..20: mol_type = other RNA
gttgtttgggatgtcagatt

SEQ ID NO: 8442 - RNA, 20 nt, synthetic construct
  misc_feature 1..20: note = antisense sequence
  source 1..20: mol_type = other RNA
ggttgtttgggatgtcagat

SEQ ID NO: 8443 - RNA, 20 nt, synthetic construct
  misc_feature 1..20: note = antisense sequence
  source 1..20: mol_type = other RNA
gatgggttgtttgggatgtc

SEQ ID NO: 8444 - RNA, 20 nt, synthetic construct
  misc_feature 1..20: note = antisense sequence
  source 1..20: mol_type = other RNA
tgatgggttgtttgggatgt

SEQ ID NO: 8445 - RNA, 20 nt, synthetic construct
  misc_feature 1..20: note = antisense sequence
  source 1..20: mol_type = other RNA
aatgtgatgggttgtttggg

SEQ ID NO: 8446 - RNA, 20 nt, synthetic construct
  misc_feature 1..20: note = antisense sequence
  source 1..20: mol_type = other RNA
tcctctggtcagttactaac

SEQ ID NO: 8447 - RNA, 20 nt, synthetic construct
  misc_feature 1..20: note = antisense sequence
  source 1..20: mol_type = other RNA
atcctctggtcagttactaa

SEQ ID NO: 8448 - RNA, 20 nt, synthetic construct
  misc_feature 1..20: note = antisense sequence
  source 1..20: mol_type = other RNA
tatcctctggtcagttacta

SEQ ID NO: 8449 - RNA, 20 nt, synthetic construct
  misc_feature 1..20: note = antisense sequence
  source 1..20: mol_type = other RNA
gtatcctctggtcagttact

SEQ ID NO: 8450 - RNA, 20 nt, synthetic construct
  misc_feature 1..20: note = antisense sequence
  source 1..20: mol_type = other RNA
agtatcctctggtcagttac

SEQ ID NO: 8451 - RNA, 20 nt, synthetic construct
  misc_feature 1..20: note = antisense sequence
  source 1..20: mol_type = other RNA
tagtatcctctggtcagtta

SEQ ID NO: 8452 - RNA, 20 nt, synthetic construct
  misc_feature 1..20: note = antisense sequence
  source 1..20: mol_type = other RNA
gtagtatcctctggtcagtt

SEQ ID NO: 8453 - RNA, 20 nt, synthetic construct
  misc_feature 1..20: note = antisense sequence
  source 1..20: mol_type = other RNA
agtagtatcctctggtcagt

SEQ ID NO: 8454 - RNA, 20 nt, synthetic construct
  misc_feature 1..20: note = antisense sequence
  source 1..20: mol_type = other RNA
taagtagtatcctctggtca

SEQ ID NO: 8455 - RNA, 20 nt, synthetic construct
  misc_feature 1..20: note = antisense sequence
  source 1..20: mol_type = other RNA
ttaagtagtatcctctggtc

SEQ ID NO: 8456 - RNA, 20 nt, synthetic construct
  misc_feature 1..20: note = antisense sequence
  source 1..20: mol_type = other RNA
ctttaagtagtatcctctgg

SEQ ID NO: 8457 - RNA, 20 nt, synthetic construct
  misc_feature 1..20: note = antisense sequence
  source 1..20: mol_type = other RNA
gctttaagtagtatcctctg

SEQ ID NO: 8458 - RNA, 20 nt, synthetic construct
  misc_feature 1..20: note = antisense sequence
  source 1..20: mol_type = other RNA
caggctttaagtagtatcct

SEQ ID NO: 8459 - RNA, 20 nt, synthetic construct
  misc_feature 1..20: note = antisense sequence
  source 1..20: mol_type = other RNA
acaggctttaagtagtatcc

SEQ ID NO: 8460 - RNA, 20 nt, synthetic construct
  misc_feature 1..20: note = antisense sequence
  source 1..20: mol_type = other RNA
gacaacaggctttaagtagt

SEQ ID NO: 8461 - RNA, 20 nt, synthetic construct
  misc_feature 1..20: note = antisense sequence
  source 1..20: mol_type = other RNA
aggacaacaggctttaagta

SEQ ID NO: 8462 - RNA, 20 nt, synthetic construct
  misc_feature 1..20: note = antisense sequence
  source 1..20: mol_type = other RNA
ttttatgcagagatagccag

SEQ ID NO: 8463 - RNA, 20 nt, synthetic construct
  misc_feature 1..20: note = antisense sequence
  source 1..20: mol_type = other RNA
agctgtgtgagaagttccac

SEQ ID NO: 8464 - RNA, 20 nt, synthetic construct
  misc_feature 1..20: note = antisense sequence
  source 1..20: mol_type = other RNA
ggaaaagctgtgtgagaagt

SEQ ID NO: 8465 - RNA, 20 nt, synthetic construct
  misc_feature 1..20: note = antisense sequence
  source 1..20: mol_type = other RNA
agtggaaaagctgtgtgaga

SEQ ID NO: 8466 - RNA, 20 nt, synthetic construct
  misc_feature 1..20: note = antisense sequence
  source 1..20: mol_type = other RNA
cattatgtctgccctgtatt

SEQ ID NO: 8467 - RNA, 20 nt, synthetic construct
  misc_feature 1..20: note = antisense sequence
  source 1..20: mol_type = other RNA
ccattatgtctgccctgtat

SEQ ID NO: 8468 - RNA, 20 nt, synthetic construct
  misc_feature 1..20: note = antisense sequence
  source 1..20: mol_type = other RNA
tccattatgtctgccctgta

SEQ ID NO: 8469 - RNA, 20 nt, synthetic construct
  misc_feature 1..20: note = antisense sequence
  source 1..20: mol_type = other RNA
atccattatgtctgccctgt

SEQ ID NO: 8470 - RNA, 20 nt, synthetic construct
  misc_feature 1..20: note = antisense sequence
  source 1..20: mol_type = other RNA
gttatccattatgtctgccc

SEQ ID NO: 8471 - RNA, 20 nt, synthetic construct
  misc_feature 1..20: note = antisense sequence
  source 1..20: mol_type = other RNA
tgttatccattatgtctgcc

SEQ ID NO: 8472 - RNA, 20 nt, synthetic construct
  misc_feature 1..20: note = antisense sequence
  source 1..20: mol_type = other RNA
ctgttatccattatgtctgc

SEQ ID NO: 8473 - RNA, 20 nt, synthetic construct
  misc_feature 1..20: note = antisense sequence
  source 1..20: mol_type = other RNA
cctgttatccattatgtctg

SEQ ID NO: 8474 - RNA, 20 nt, synthetic construct
  misc_feature 1..20: note = antisense sequence
  source 1..20: mol_type = other RNA
gcctgttatccattatgtct

SEQ ID NO: 8475 - RNA, 20 nt, synthetic construct
  misc_feature 1..20: note = antisense sequence
  source 1..20: mol_type = other RNA
tgcctgttatccattatgtc

SEQ ID NO: 8476 - RNA, 20 nt, synthetic construct
  misc_feature 1..20: note = antisense sequence
  source 1..20: mol_type = other RNA
ctagggctaattcctgacct

SEQ ID NO: 8477 - RNA, 20 nt, synthetic construct
  misc_feature 1..20: note = antisense sequence
  source 1..20: mol_type = other RNA
tctagggctaattcctgacc

SEQ ID NO: 8478 - RNA, 20 nt, synthetic construct
  misc_feature 1..20: note = antisense sequence
  source 1..20: mol_type = other RNA
gattctagggctaattcctg

SEQ ID NO: 8479 - RNA, 20 nt, synthetic construct
  misc_feature 1..20: note = antisense sequence
  source 1..20: mol_type = other RNA
ctgattctagggctaattcc

SEQ ID NO: 8480 - RNA, 20 nt, synthetic construct
  misc_feature 1..20: note = antisense sequence
  source 1..20: mol_type = other RNA
tctgattctagggctaattc

SEQ ID NO: 8481 - RNA, 20 nt, synthetic construct
  misc_feature 1..20: note = antisense sequence
  source 1..20: mol_type = other RNA
ctctgattctagggctaatt

SEQ ID NO: 8482 - RNA, 20 nt, synthetic construct
  misc_feature 1..20: note = antisense sequence
  source 1..20: mol_type = other RNA
gctctgattctagggctaat

SEQ ID NO: 8483 - RNA, 20 nt, synthetic construct
  misc_feature 1..20: note = antisense sequence
  source 1..20: mol_type = other RNA
aggctctgattctagggcta

SEQ ID NO: 8484 - RNA, 20 nt, synthetic construct
  misc_feature 1..20: note = antisense sequence
  source 1..20: mol_type = other RNA
taggctctgattctagggct

SEQ ID NO: 8485 - RNA, 20 nt, synthetic construct
  misc_feature 1..20: note = antisense sequence
  source 1..20: mol_type = other RNA
ttaggctctgattctagggc

SEQ ID NO: 8486 - RNA, 20 nt, synthetic construct
  misc_feature 1..20: note = antisense sequence
  source 1..20: mol_type = other RNA
cacacaacaatcttttaggc

SEQ ID NO: 8487 - RNA, 20 nt, synthetic construct
  misc_feature 1..20: note = antisense sequence
  source 1..20: mol_type = other RNA
ccacacaacaatcttttagg

SEQ ID NO: 8488 - RNA, 20 nt, synthetic construct
  misc_feature 1..20: note = antisense sequence
  source 1..20: mol_type = other RNA
gcctccaaaccacacaacaa

SEQ ID NO: 8489 - RNA, 20 nt, synthetic construct
  misc_feature 1..20: note = antisense sequence
  source 1..20: mol_type = other RNA
agcctccaaaccacacaaca

SEQ ID NO: 8490 - RNA, 20 nt, synthetic construct
  misc_feature 1..20: note = antisense sequence
  source 1..20: mol_type = other RNA
acagcctccaaaccacacaa

SEQ ID NO: 8491 - RNA, 20 nt, synthetic construct
  misc_feature 1..20: note = antisense sequence
  source 1..20: mol_type = other RNA
tacagcctccaaaccacaca

SEQ ID NO: 8492 - RNA, 20 nt, synthetic construct
  misc_feature 1..20: note = antisense sequence
  source 1..20: mol_type = other RNA
tgctctctacagcctccaaa

SEQ ID NO: 8493 - RNA, 20 nt, synthetic construct
  misc_feature 1..20: note = antisense sequence
  source 1..20: mol_type = other RNA
atgctctctacagcctccaa

SEQ ID NO: 8494 - RNA, 20 nt, synthetic construct
  misc_feature 1..20: note = antisense sequence
  source 1..20: mol_type = other RNA
tatgctctctacagcctcca

SEQ ID NO: 8495 - RNA, 20 nt, synthetic construct
  misc_feature 1..20: note = antisense sequence
  source 1..20: mol_type = other RNA
ctatgctctctacagcctcc

SEQ ID NO: 8496 - RNA, 20 nt, synthetic construct
  misc_feature 1..20: note = antisense sequence
  source 1..20: mol_type = other RNA
tcctatgctctctacagcct

SEQ ID NO: 8497 - RNA, 20 nt, synthetic construct
  misc_feature 1..20: note = antisense sequence
  source 1..20: mol_type = other RNA
agtctcctatgctctctaca

SEQ ID NO: 8498 - RNA, 20 nt, synthetic construct
  misc_feature 1..20: note = antisense sequence
  source 1..20: mol_type = other RNA
aagtctcctatgctctctac

SEQ ID NO: 8499 - RNA, 20 nt, synthetic construct
  misc_feature 1..20: note = antisense sequence
  source 1..20: mol_type = other RNA
taaagtctcctatgctctct

SEQ ID NO: 8500 - RNA, 20 nt, synthetic construct
  misc_feature 1..20: note = antisense sequence
  source 1..20: mol_type = other RNA
tcttaaagtctcctatgctc

SEQ ID NO: 8501 - RNA, 20 nt, synthetic construct
  misc_feature 1..20: note = antisense sequence
  source 1..20: mol_type = other RNA
acattaacgcagtcagtctg

SEQ ID NO: 8502 - RNA, 20 nt, synthetic construct
  misc_feature 1..20: note = antisense sequence
  source 1..20: mol_type = other RNA
aacattaacgcagtcagtct

SEQ ID NO: 8503 - RNA, 20 nt, synthetic construct
  misc_feature 1..20: note = antisense sequence
  source 1..20: mol_type = other RNA
aaacattaacgcagtcagtc

SEQ ID NO: 8504 - RNA, 20 nt, synthetic construct
  misc_feature 1..20: note = antisense sequence
  source 1..20: mol_type = other RNA
gcaaacattaacgcagtcag

SEQ ID NO: 8505 - RNA, 20 nt, synthetic construct
  misc_feature 1..20: note = antisense sequence
  source 1..20: mol_type = other RNA
ggcaaacattaacgcagtca

SEQ ID NO: 8506 - RNA, 20 nt, synthetic construct
  misc_feature 1..20: note = antisense sequence
  source 1..20: mol_type = other RNA
tggcaaacattaacgcagtc

SEQ ID NO: 8507 - RNA, 20 nt, synthetic construct
  misc_feature 1..20: note = antisense sequence
  source 1..20: mol_type = other RNA
gtggcaaacattaacgcagt

SEQ ID NO: 8508 - RNA, 20 nt, synthetic construct
  misc_feature 1..20: note = antisense sequence
  source 1..20: mol_type = other RNA
tgtaggtgtggcaaacatta

SEQ ID NO: 8509 - RNA, 20 nt, synthetic construct
  misc_feature 1..20: note = antisense sequence
  source 1..20: mol_type = other RNA
taatgtaggtgtggcaaaca

SEQ ID NO: 8510 - RNA, 20 nt, synthetic construct
  misc_feature 1..20: note = antisense sequence
  source 1..20: mol_type = other RNA
ttaatgtaggtgtggcaaac

SEQ ID NO: 8511 - RNA, 20 nt, synthetic construct
  misc_feature 1..20: note = antisense sequence
  source 1..20: mol_type = other RNA
acacagacacatgaagacac

SEQ ID NO: 8512 - RNA, 20 nt, synthetic construct
  misc_feature 1..20: note = antisense sequence
  source 1..20: mol_type = other RNA
caaccaccatccttttagaa

SEQ ID NO: 8513 - RNA, 20 nt, synthetic construct
  misc_feature 1..20: note = antisense sequence
  source 1..20: mol_type = other RNA
tcaaccaccatccttttaga

SEQ ID NO: 8514 - RNA, 20 nt, synthetic construct
  misc_feature 1..20: note = antisense sequence
  source 1..20: mol_type = other RNA
ttcaaccaccatccttttag

SEQ ID NO: 8515 - RNA, 20 nt, synthetic construct
  misc_feature 1..20: note = antisense sequence
  source 1..20: mol_type = other RNA
ttcagccttggaatgcagca

SEQ ID NO: 8516 - RNA, 20 nt, synthetic construct
  misc_feature 1..20: note = antisense sequence
  source 1..20: mol_type = other RNA
agacctattcagccttggaa

SEQ ID NO: 8517 - RNA, 20 nt, synthetic construct
  misc_feature 1..20: note = antisense sequence
  source 1..20: mol_type = other RNA
gagacctattcagccttgga

SEQ ID NO: 8518 - RNA, 20 nt, synthetic construct
  misc_feature 1..20: note = antisense sequence
  source 1..20: mol_type = other RNA
agagacctattcagccttgg

SEQ ID NO: 8519 - RNA, 20 nt, synthetic construct
  misc_feature 1..20: note = antisense sequence
  source 1..20: mol_type = other RNA
acagagacctattcagcctt

SEQ ID NO: 8520 - RNA, 20 nt, synthetic construct
  misc_feature 1..20: note = antisense sequence
  source 1..20: mol_type = other RNA
tacagagacctattcagcct

SEQ ID NO: 8521 - RNA, 20 nt, synthetic construct
  misc_feature 1..20: note = antisense sequence
  source 1..20: mol_type = other RNA
ctacagagacctattcagcc

SEQ ID NO: 8522 - RNA, 20 nt, synthetic construct
  misc_feature 1..20: note = antisense sequence
  source 1..20: mol_type = other RNA
tctacagagacctattcagc

SEQ ID NO: 8523 - RNA, 20 nt, synthetic construct
  misc_feature 1..20: note = antisense sequence
  source 1..20: mol_type = other RNA
accttacccttccactcact

SEQ ID NO: 8524 - RNA, 20 nt, synthetic construct
  misc_feature 1..20: note = antisense sequence
  source 1..20: mol_type = other RNA
aaccttacccttccactcac

SEQ ID NO: 8525 - RNA, 20 nt, synthetic construct
  misc_feature 1..20: note = antisense sequence
  source 1..20: mol_type = other RNA
ataaccttacccttccactc

SEQ ID NO: 8526 - RNA, 20 nt, synthetic construct
  misc_feature 1..20: note = antisense sequence
  source 1..20: mol_type = other RNA
tataaccttacccttccact

SEQ ID NO: 8527 - RNA, 20 nt, synthetic construct
  misc_feature 1..20: note = antisense sequence
  source 1..20: mol_type = other RNA
ctattgtccagcaggatatt

SEQ ID NO: 8528 - RNA, 20 nt, synthetic construct
  misc_feature 1..20: note = antisense sequence
  source 1..20: mol_type = other RNA
tctattgtccagcaggatat

SEQ ID NO: 8529 - RNA, 20 nt, synthetic construct
  misc_feature 1..20: note = antisense sequence
  source 1..20: mol_type = other RNA
ctctattgtccagcaggata

SEQ ID NO: 8530 - RNA, 20 nt, synthetic construct
  misc_feature 1..20: note = antisense sequence
  source 1..20: mol_type = other RNA
tctctattgtccagcaggat

SEQ ID NO: 8531 - RNA, 20 nt, synthetic construct
  misc_feature 1..20: note = antisense sequence
  source 1..20: mol_type = other RNA
gttctctattgtccagcagg

SEQ ID NO: 8532 - RNA, 20 nt, synthetic construct
  misc_feature 1..20: note = antisense sequence
  source 1..20: mol_type = other RNA
agttctctattgtccagcag

SEQ ID NO: 8533 - RNA, 20 nt, synthetic construct
  misc_feature 1..20: note = antisense sequence
  source 1..20: mol_type = other RNA
aagttctctattgtccagca

SEQ ID NO: 8534 - RNA, 20 nt, synthetic construct
  misc_feature 1..20: note = antisense sequence
  source 1..20: mol_type = other RNA
caagttctctattgtccagc

SEQ ID NO: 8535 - RNA, 20 nt, synthetic construct
  misc_feature 1..20: note = antisense sequence
  source 1..20: mol_type = other RNA
ataagtcacttccagggaaa

SEQ ID NO: 8536 - RNA, 20 nt, synthetic construct
  misc_feature 1..20: note = antisense sequence
  source 1..20: mol_type = other RNA
aataagtcacttccagggaa

SEQ ID NO: 8537 - RNA, 20 nt, synthetic construct
  misc_feature 1..20: note = antisense sequence
  source 1..20: mol_type = other RNA
aaataagtcacttccaggga

SEQ ID NO: 8538 - RNA, 20 nt, synthetic construct
  misc_feature 1..20: note = antisense sequence
  source 1..20: mol_type = other RNA
caaataagtcacttccaggg

SEQ ID NO: 8539 - RNA, 20 nt, synthetic construct
  misc_feature 1..20: note = antisense sequence
  source 1..20: mol_type = other RNA
gcaaataagtcacttccagg

SEQ ID NO: 8540 - RNA, 20 nt, synthetic construct
  misc_feature 1..20: note = antisense sequence
  source 1..20: mol_type = other RNA
tgtagcaagacgggataaaa

SEQ ID NO: 8541 - RNA, 20 nt, synthetic construct
  misc_feature 1..20: note = antisense sequence
  source 1..20: mol_type = other RNA
ctgtagcaagacgggataaa

SEQ ID NO: 8542 - RNA, 20 nt, synthetic construct
  misc_feature 1..20: note = antisense sequence
  source 1..20: mol_type = other RNA
cctgtagcaagacgggataa

SEQ ID NO: 8543 - RNA, 20 nt, synthetic construct
  misc_feature 1..20: note = antisense sequence
  source 1..20: mol_type = other RNA
gttaagatgcaggctgccct

SEQ ID NO: 8544 - RNA, 20 nt, synthetic construct
  misc_feature 1..20: note = antisense sequence
  source 1..20: mol_type = other RNA
caagtcacatcctggagttg

SEQ ID NO: 8545 - RNA, 20 nt, synthetic construct
  misc_feature 1..20: note = antisense sequence
  source 1..20: mol_type = other RNA
aggaacaggtgccagaagga

SEQ ID NO: 8546 - RNA, 20 nt, synthetic construct
  misc_feature 1..20: note = antisense sequence
  source 1..20: mol_type = other RNA
gaggaacaggtgccagaagg

SEQ ID NO: 8547 - RNA, 20 nt, synthetic construct
  misc_feature 1..20: note = antisense sequence
  source 1..20: mol_type = other RNA
atgaggaacaggtgccagaa

SEQ ID NO: 8548 - RNA, 20 nt, synthetic construct
  misc_feature 1..20: note = antisense sequence
  source 1..20: mol_type = other RNA
gtccatgaggaacaggtgcc

SEQ ID NO: 8549 - RNA, 20 nt, synthetic construct
  misc_feature 1..20: note = antisense sequence
  source 1..20: mol_type = other RNA
ggaggtccatgaggaacagg

SEQ ID NO: 8550 - RNA, 20 nt, synthetic construct
  misc_feature 1..20: note = antisense sequence
  source 1..20: mol_type = other RNA
aaaggaggtccatgaggaac

SEQ ID NO: 8551 - RNA, 20 nt, synthetic construct
  misc_feature 1..20: note = antisense sequence
  source 1..20: mol_type = other RNA
aaaaggaggtccatgaggaa

SEQ ID NO: 8552 - RNA, 20 nt, synthetic construct
  misc_feature 1..20: note = antisense sequence
  source 1..20: mol_type = other RNA
ggaagcgaggaaaggaggaa

SEQ ID NO: 8553 - RNA, 20 nt, synthetic construct
  misc_feature 1..20: note = antisense sequence
  source 1..20: mol_type = other RNA
gggaagcgaggaaaggagga

SEQ ID NO: 8554 - RNA, 20 nt, synthetic construct
  misc_feature 1..20: note = antisense sequence
  source 1..20: mol_type = other RNA
tctatgctatcttattggcc

SEQ ID NO: 8555 - RNA, 20 nt, synthetic construct
  misc_feature 1..20: note = antisense sequence
  source 1..20: mol_type = other RNA
ctctatgctatcttattggc

SEQ ID NO: 8556 - RNA, 20 nt, synthetic construct
  misc_feature 1..20: note = antisense sequence
  source 1..20: mol_type = other RNA
ccttcataaattgaggttgg

SEQ ID NO: 8557 - RNA, 20 nt, synthetic construct
  misc_feature 1..20: note = antisense sequence
  source 1..20: mol_type = other RNA
gtctccttcataaattgagg

SEQ ID NO: 8558 - RNA, 20 nt, synthetic construct
  misc_feature 1..20: note = antisense sequence
  source 1..20: mol_type = other RNA
ctctcgtgtctccttcataa

SEQ ID NO: 8559 - RNA, 20 nt, synthetic construct
  misc_feature 1..20: note = antisense sequence
  source 1..20: mol_type = other RNA
gcctctcgtgtctccttcat

SEQ ID NO: 8560 - RNA, 20 nt, synthetic construct
  misc_feature 1..20: note = antisense sequence
  source 1..20: mol_type = other RNA
agcctctcgtgtctccttca

SEQ ID NO: 8561 - RNA, 20 nt, synthetic construct
  misc_feature 1..20: note = antisense sequence
  source 1..20: mol_type = other RNA
tagcctctcgtgtctccttc

SEQ ID NO: 8562 - RNA, 20 nt, synthetic construct
  misc_feature 1..20: note = antisense sequence
  source 1..20: mol_type = other RNA
agttagcctctcgtgtctcc

SEQ ID NO: 8563 - RNA, 20 nt, synthetic construct
  misc_feature 1..20: note = antisense sequence
  source 1..20: mol_type = other RNA
cagttagcctctcgtgtctc

SEQ ID NO: 8564 - RNA, 20 nt, synthetic construct
  misc_feature 1..20: note = antisense sequence
  source 1..20: mol_type = other RNA
tcagttagcctctcgtgtct

SEQ ID NO: 8565 - RNA, 20 nt, synthetic construct
  misc_feature 1..20: note = antisense sequence
  source 1..20: mol_type = other RNA
atcagttagcctctcgtgtc

SEQ ID NO: 8566 - RNA, 20 nt, synthetic construct
  misc_feature 1..20: note = antisense sequence
  source 1..20: mol_type = other RNA
aatcagttagcctctcgtgt

SEQ ID NO: 8567 - RNA, 20 nt, synthetic construct
  misc_feature 1..20: note = antisense sequence
  source 1..20: mol_type = other RNA
aaatcagttagcctctcgtg

SEQ ID NO: 8568 - RNA, 20 nt, synthetic construct
  misc_feature 1..20: note = antisense sequence
  source 1..20: mol_type = other RNA
caaatcagttagcctctcgt

SEQ ID NO: 8569 - RNA, 20 nt, synthetic construct
  misc_feature 1..20: note = antisense sequence
  source 1..20: mol_type = other RNA
acaaatcagttagcctctcg

SEQ ID NO: 8570 - RNA, 20 nt, synthetic construct
  misc_feature 1..20: note = antisense sequence
  source 1..20: mol_type = other RNA
caagcagaaagaccttaaac

SEQ ID NO: 8571 - RNA, 20 nt, synthetic construct
  misc_feature 1..20: note = antisense sequence
  source 1..20: mol_type = other RNA
cagcaagcagaaagacctta

SEQ ID NO: 8572 - RNA, 20 nt, synthetic construct
  misc_feature 1..20: note = antisense sequence
  source 1..20: mol_type = other RNA
ccatcagcaagcagaaagac

SEQ ID NO: 8573 - RNA, 20 nt, synthetic construct
  misc_feature 1..20: note = antisense sequence
  source 1..20: mol_type = other RNA
gccatcagcaagcagaaaga

SEQ ID NO: 8574 - RNA, 20 nt, synthetic construct
  misc_feature 1..20: note = antisense sequence
  source 1..20: mol_type = other RNA
agagagctgtgtgtgttcta

SEQ ID NO: 8575 - RNA, 20 nt, synthetic construct
  misc_feature 1..20: note = antisense sequence
  source 1..20: mol_type = other RNA
tagagagctgtgtgtgttct

SEQ ID NO: 8576 - RNA, 20 nt, synthetic construct
  misc_feature 1..20: note = antisense sequence
  source 1..20: mol_type = other RNA
caattagagagctgtgtgtg

SEQ ID NO: 8577 - RNA, 20 nt, synthetic construct
  misc_feature 1..20: note = antisense sequence
  source 1..20: mol_type = other RNA
acaattagagagctgtgtgt

SEQ ID NO: 8578 - RNA, 20 nt, synthetic construct
  misc_feature 1..20: note = antisense sequence
  source 1..20: mol_type = other RNA
ctacaattagagagctgtgt

SEQ ID NO: 8579 - RNA, 20 nt, synthetic construct
  misc_feature 1..20: note = antisense sequence
  source 1..20: mol_type = other RNA
gctacaattagagagctgtg

SEQ ID NO: 8580 - RNA, 20 nt, synthetic construct
  misc_feature 1..20: note = antisense sequence
  source 1..20: mol_type = other RNA
ggctacaattagagagctgt

SEQ ID NO: 8581 - RNA, 20 nt, synthetic construct
  misc_feature 1..20: note = antisense sequence
  source 1..20: mol_type = other RNA
gggctacaattagagagctg

SEQ ID NO: 8582 - RNA, 20 nt, synthetic construct
  misc_feature 1..20: note = antisense sequence
  source 1..20: mol_type = other RNA
actgggctacaattagagag

SEQ ID NO: 8583 - RNA, 20 nt, synthetic construct
  misc_feature 1..20: note = antisense sequence
  source 1..20: mol_type = other RNA
aactgggctacaattagaga

SEQ ID NO: 8584 - RNA, 20 nt, synthetic construct
  misc_feature 1..20: note = antisense sequence
  source 1..20: mol_type = other RNA
aaactgggctacaattagag

SEQ ID NO: 8585 - RNA, 20 nt, synthetic construct
  misc_feature 1..20: note = antisense sequence
  source 1..20: mol_type = other RNA
gaagtagagccctcagaaag

SEQ ID NO: 8586 - RNA, 20 nt, synthetic construct
  misc_feature 1..20: note = antisense sequence
  source 1..20: mol_type = other RNA
tagaagtagagccctcagaa

SEQ ID NO: 8587 - RNA, 20 nt, synthetic construct
  misc_feature 1..20: note = antisense sequence
  source 1..20: mol_type = other RNA
ctagaagtagagccctcaga

SEQ ID NO: 8588 - RNA, 20 nt, synthetic construct
  misc_feature 1..20: note = antisense sequence
  source 1..20: mol_type = other RNA
atggtactggctctgaagct

SEQ ID NO: 8589 - RNA, 20 nt, synthetic construct
  misc_feature 1..20: note = antisense sequence
  source 1..20: mol_type = other RNA
gatggtactggctctgaagc

SEQ ID NO: 8590 - RNA, 20 nt, synthetic construct
  misc_feature 1..20: note = antisense sequence
  source 1..20: mol_type = other RNA
agatggtactggctctgaag

SEQ ID NO: 8591 - RNA, 20 nt, synthetic construct
  misc_feature 1..20: note = antisense sequence
  source 1..20: mol_type = other RNA
tagatggtactggctctgaa

SEQ ID NO: 8592 - RNA, 20 nt, synthetic construct
  misc_feature 1..20: note = antisense sequence
  source 1..20: mol_type = other RNA
ttagatggtactggctctga

SEQ ID NO: 8593 - RNA, 20 nt, synthetic construct
  misc_feature 1..20: note = antisense sequence
  source 1..20: mol_type = other RNA
attagatggtactggctctg

SEQ ID NO: 8594 - RNA, 20 nt, synthetic construct
  misc_feature 1..20: note = antisense sequence
  source 1..20: mol_type = other RNA
cattagatggtactggctct

SEQ ID NO: 8595 - RNA, 20 nt, synthetic construct
  misc_feature 1..20: note = antisense sequence
  source 1..20: mol_type = other RNA
gcattagatggtactggctc

SEQ ID NO: 8596 - RNA, 20 nt, synthetic construct
  misc_feature 1..20: note = antisense sequence
  source 1..20: mol_type = other RNA
ggcattagatggtactggct

SEQ ID NO: 8597 - RNA, 20 nt, synthetic construct
  misc_feature 1..20: note = antisense sequence
  source 1..20: mol_type = other RNA
gctgcctgaggaaggatgag

SEQ ID NO: 8598 - RNA, 20 nt, synthetic construct
  misc_feature 1..20: note = antisense sequence
  source 1..20: mol_type = other RNA
agcacggtttcagccaagag

SEQ ID NO: 8599 - RNA, 20 nt, synthetic construct
  misc_feature 1..20: note = antisense sequence
  source 1..20: mol_type = other RNA
tagcacggtttcagccaaga

SEQ ID NO: 8600 - RNA, 20 nt, synthetic construct
  misc_feature 1..20: note = antisense sequence
  source 1..20: mol_type = other RNA
ctagcacggtttcagccaag

SEQ ID NO: 8601 - RNA, 20 nt, synthetic construct
  misc_feature 1..20: note = antisense sequence
  source 1..20: mol_type = other RNA
cctagcacggtttcagccaa

SEQ ID NO: 8602 - RNA, 20 nt, synthetic construct
  misc_feature 1..20: note = antisense sequence
  source 1..20: mol_type = other RNA
gcctagcacggtttcagcca

SEQ ID NO: 8603 - RNA, 20 nt, synthetic construct
  misc_feature 1..20: note = antisense sequence
  source 1..20: mol_type = other RNA
agcctagcacggtttcagcc

SEQ ID NO: 8604 - RNA, 20 nt, synthetic construct
  misc_feature 1..20: note = antisense sequence
  source 1..20: mol_type = other RNA
aagcctagcacggtttcagc

SEQ ID NO: 8605 - RNA, 20 nt, synthetic construct
  misc_feature 1..20: note = antisense sequence
  source 1..20: mol_type = other RNA
caagcctagcacggtttcag

SEQ ID NO: 8606 - RNA, 20 nt, synthetic construct
  misc_feature 1..20: note = antisense sequence
  source 1..20: mol_type = other RNA
ccaagcctagcacggtttca

SEQ ID NO: 8607 - RNA, 20 nt, synthetic construct
  misc_feature 1..20: note = antisense sequence
  source 1..20: mol_type = other RNA
gccaagcctagcacggtttc

SEQ ID NO: 8608 - RNA, 20 nt, synthetic construct
  misc_feature 1..20: note = antisense sequence
  source 1..20: mol_type = other RNA
tgccaagcctagcacggttt

SEQ ID NO: 8609 - RNA, 20 nt, synthetic construct
  misc_feature 1..20: note = antisense sequence
  source 1..20: mol_type = other RNA
ttgccaagcctagcacggtt

SEQ ID NO: 8610 - RNA, 20 nt, synthetic construct
  misc_feature 1..20: note = antisense sequence
  source 1..20: mol_type = other RNA
attgccaagcctagcacggt

SEQ ID NO: 8611 - RNA, 20 nt, synthetic construct
  misc_feature 1..20: note = antisense sequence
  source 1..20: mol_type = other RNA
cattgccaagcctagcacgg

SEQ ID NO: 8612 - RNA, 20 nt, synthetic construct
  misc_feature 1..20: note = antisense sequence
  source 1..20: mol_type = other RNA
tcattgccaagcctagcacg

SEQ ID NO: 8613 - RNA, 20 nt, synthetic construct
  misc_feature 1..20: note = antisense sequence
  source 1..20: mol_type = other RNA
gtcattgccaagcctagcac

SEQ ID NO: 8614 - RNA, 20 nt, synthetic construct
  misc_feature 1..20: note = antisense sequence
  source 1..20: mol_type = other RNA
agtcattgccaagcctagca

SEQ ID NO: 8615 - RNA, 20 nt, synthetic construct
  misc_feature 1..20: note = antisense sequence
  source 1..20: mol_type = other RNA
gagtcattgccaagcctagc

SEQ ID NO: 8616 - RNA, 20 nt, synthetic construct
  misc_feature 1..20: note = antisense sequence
  source 1..20: mol_type = other RNA
tgagtcattgccaagcctag

SEQ ID NO: 8617 - RNA, 20 nt, synthetic construct
  misc_feature 1..20: note = antisense sequence
  source 1..20: mol_type = other RNA
agtgagtcattgccaagcct

SEQ ID NO: 8618 - RNA, 20 nt, synthetic construct
  misc_feature 1..20: note = antisense sequence
  source 1..20: mol_type = other RNA
cagtgagtcattgccaagcc

SEQ ID NO: 8619 - RNA, 20 nt, synthetic construct
  misc_feature 1..20: note = antisense sequence
  source 1..20: mol_type = other RNA
gcagtgagtcattgccaagc

SEQ ID NO: 8620 - RNA, 20 nt, synthetic construct
  misc_feature 1..20: note = antisense sequence
  source 1..20: mol_type = other RNA
tccaggcagtgagtcattgc

SEQ ID NO: 8621 - RNA, 20 nt, synthetic construct
  misc_feature 1..20: note = antisense sequence
  source 1..20: mol_type = other RNA
gtccaggcagtgagtcattg

SEQ ID NO: 8622 - RNA, 20 nt, synthetic construct
  misc_feature 1..20: note = antisense sequence
  source 1..20: mol_type = other RNA
agtccaggcagtgagtcatt

SEQ ID NO: 8623 - RNA, 20 nt, synthetic construct
  misc_feature 1..20: note = antisense sequence
  source 1..20: mol_type = other RNA
tagtccaggcagtgagtcat

SEQ ID NO: 8624 - RNA, 20 nt, synthetic construct
  misc_feature 1..20: note = antisense sequence
  source 1..20: mol_type = other RNA
gtattagtccaggcagtgag

SEQ ID NO: 8625 - RNA, 20 nt, synthetic construct
  misc_feature 1..20: note = antisense sequence
  source 1..20: mol_type = other RNA
ggtattagtccaggcagtga

SEQ ID NO: 8626 - RNA, 20 nt, synthetic construct
  misc_feature 1..20: note = antisense sequence
  source 1..20: mol_type = other RNA
aggtattagtccaggcagtg

SEQ ID NO: 8627 - RNA, 20 nt, synthetic construct
  misc_feature 1..20: note = antisense sequence
  source 1..20: mol_type = other RNA
aaggtattagtccaggcagt

SEQ ID NO: 8628 - RNA, 20 nt, synthetic construct
  misc_feature 1..20: note = antisense sequence
  source 1..20: mol_type = other RNA
ttaaggtattagtccaggca

SEQ ID NO: 8629 - RNA, 20 nt, synthetic construct
  misc_feature 1..20: note = antisense sequence
  source 1..20: mol_type = other RNA
tttaaggtattagtccaggc

SEQ ID NO: 8630 - RNA, 20 nt, synthetic construct
  misc_feature 1..20: note = antisense sequence
  source 1..20: mol_type = other RNA
aagcgggaacacaagccatt

SEQ ID NO: 8631 - RNA, 20 nt, synthetic construct
  misc_feature 1..20: note = antisense sequence
  source 1..20: mol_type = other RNA
aaagcgggaacacaagccat

SEQ ID NO: 8632 - RNA, 20 nt, synthetic construct
  misc_feature 1..20: note = antisense sequence
  source 1..20: mol_type = other RNA
gaaagcgggaacacaagcca

SEQ ID NO: 8633 - RNA, 20 nt, synthetic construct
  misc_feature 1..20: note = antisense sequence
  source 1..20: mol_type = other RNA
agaaagcgggaacacaagcc

SEQ ID NO: 8634 - RNA, 20 nt, synthetic construct
  misc_feature 1..20: note = antisense sequence
  source 1..20: mol_type = other RNA
gagaaagcgggaacacaagc

SEQ ID NO: 8635 - RNA, 20 nt, synthetic construct
  misc_feature 1..20: note = antisense sequence
  source 1..20: mol_type = other RNA
agtggagaaagcgggaacac

SEQ ID NO: 8636 - RNA, 20 nt, synthetic construct
  misc_feature 1..20: note = antisense sequence
  source 1..20: mol_type = other RNA
aagtggagaaagcgggaaca

SEQ ID NO: 8637 - RNA, 20 nt, synthetic construct
  misc_feature 1..20: note = antisense sequence
  source 1..20: mol_type = other RNA
aaagtggagaaagcgggaac

SEQ ID NO: 8638 - RNA, 20 nt, synthetic construct
  misc_feature 1..20: note = antisense sequence
  source 1..20: mol_type = other RNA
aaaagtggagaaagcgggaa

SEQ ID NO: 8639 - RNA, 20 nt, synthetic construct
  misc_feature 1..20: note = antisense sequence
  source 1..20: mol_type = other RNA
caaaagtggagaaagcggga

SEQ ID NO: 8640 - RNA, 20 nt, synthetic construct
  misc_feature 1..20: note = antisense sequence
  source 1..20: mol_type = other RNA
gcaaaagtggagaaagcggg

SEQ ID NO: 8641 - RNA, 20 nt, synthetic construct
  misc_feature 1..20: note = antisense sequence
  source 1..20: mol_type = other RNA
gggcaaaagtggagaaagcg

SEQ ID NO: 8642 - RNA, 20 nt, synthetic construct
  misc_feature 1..20: note = antisense sequence
  source 1..20: mol_type = other RNA
cacatcatgggcaaaagtgg

SEQ ID NO: 8643 - RNA, 20 nt, synthetic construct
  misc_feature 1..20: note = antisense sequence
  source 1..20: mol_type = other RNA
gcacatcatgggcaaaagtg

SEQ ID NO: 8644 - RNA, 20 nt, synthetic construct
  misc_feature 1..20: note = antisense sequence
  source 1..20: mol_type = other RNA
atgggatggacaaaacaaga

SEQ ID NO: 8645 - RNA, 20 nt, synthetic construct
  misc_feature 1..20: note = antisense sequence
  source 1..20: mol_type = other RNA
aatgggatggacaaaacaag

SEQ ID NO: 8646 - RNA, 20 nt, synthetic construct
  misc_feature 1..20: note = antisense sequence
  source 1..20: mol_type = other RNA
caaatgggatggacaaaaca

SEQ ID NO: 8647 - RNA, 20 nt, synthetic construct
  misc_feature 1..20: note = antisense sequence
  source 1..20: mol_type = other RNA
tcaaatgggatggacaaaac

SEQ ID NO: 8648 - RNA, 20 nt, synthetic construct
  misc_feature 1..20: note = antisense sequence
  source 1..20: mol_type = other RNA
agatcaaatgggatggacaa

SEQ ID NO: 8649 - RNA, 20 nt, synthetic construct
  misc_feature 1..20: note = antisense sequence
  source 1..20: mol_type = other RNA
gtggaccaacttcagacatg

SEQ ID NO: 8650 - RNA, 20 nt, synthetic construct
  misc_feature 1..20: note = antisense sequence
  source 1..20: mol_type = other RNA
ttgtggaccaacttcagaca

SEQ ID NO: 8651 - RNA, 20 nt, synthetic construct
  misc_feature 1..20: note = antisense sequence
  source 1..20: mol_type = other RNA
gccgtatggattttctttct

SEQ ID NO: 8652 - RNA, 20 nt, synthetic construct
  misc_feature 1..20: note = antisense sequence
  source 1..20: mol_type = other RNA
agagccgtatggattttctt

SEQ ID NO: 8653 - RNA, 20 nt, synthetic construct
  misc_feature 1..20: note = antisense sequence
  source 1..20: mol_type = other RNA
aagagccgtatggattttct

SEQ ID NO: 8654 - RNA, 20 nt, synthetic construct
  misc_feature 1..20: note = antisense sequence
  source 1..20: mol_type = other RNA
aaagagccgtatggattttc

SEQ ID NO: 8655 - RNA, 20 nt, synthetic construct
  misc_feature 1..20: note = antisense sequence
  source 1..20: mol_type = other RNA
ctaaaagagccgtatggatt

SEQ ID NO: 8656 - RNA, 20 nt, synthetic construct
  misc_feature 1..20: note = antisense sequence
  source 1..20: mol_type = other RNA
tctaaaagagccgtatggat

SEQ ID NO: 8657 - RNA, 20 nt, synthetic construct
  misc_feature 1..20: note = antisense sequence
  source 1..20: mol_type = other RNA
ttctaaaagagccgtatgga

SEQ ID NO: 8658 - RNA, 20 nt, synthetic construct
  misc_feature 1..20: note = antisense sequence
  source 1..20: mol_type = other RNA
gttctaaaagagccgtatgg

SEQ ID NO: 8659 - RNA, 20 nt, synthetic construct
  misc_feature 1..20: note = antisense sequence
  source 1..20: mol_type = other RNA
tgttctaaaagagccgtatg

SEQ ID NO: 8660 - RNA, 20 nt, synthetic construct
  misc_feature 1..20: note = antisense sequence
  source 1..20: mol_type = other RNA
atggagtcactggcatagat

SEQ ID NO: 8661 - RNA, 20 nt, synthetic construct
  misc_feature 1..20: note = antisense sequence
  source 1..20: mol_type = other RNA
aatggagtcactggcataga

SEQ ID NO: 8662 - RNA, 20 nt, synthetic construct
  misc_feature 1..20: note = antisense sequence
  source 1..20: mol_type = other RNA
gactctcaacacagaaatgt

SEQ ID NO: 8663 - RNA, 20 nt, synthetic construct
  misc_feature 1..20: note = antisense sequence
  source 1..20: mol_type = other RNA
ggactctcaacacagaaatg

SEQ ID NO: 8664 - RNA, 20 nt, synthetic construct
  misc_feature 1..20: note = antisense sequence
  source 1..20: mol_type = other RNA
aggactctcaacacagaaat

SEQ ID NO: 8665 - RNA, 20 nt, synthetic construct
  misc_feature 1..20: note = antisense sequence
  source 1..20: mol_type = other RNA
taggactctcaacacagaaa

SEQ ID NO: 8666 - RNA, 20 nt, synthetic construct
  misc_feature 1..20: note = antisense sequence
  source 1..20: mol_type = other RNA
ttaggactctcaacacagaa

SEQ ID NO: 8667 - RNA, 20 nt, synthetic construct
  misc_feature 1..20: note = antisense sequence
  source 1..20: mol_type = other RNA
tttaggactctcaacacaga

SEQ ID NO: 8668 - RNA, 20 nt, synthetic construct
  misc_feature 1..20: note = antisense sequence
  source 1..20: mol_type = other RNA
ttttaggactctcaacacag

SEQ ID NO: 8669 - RNA, 20 nt, synthetic construct
  misc_feature 1..20: note = antisense sequence
  source 1..20: mol_type = other RNA
cttttaggactctcaacaca

SEQ ID NO: 8670 - RNA, 20 nt, synthetic construct
  misc_feature 1..20: note = antisense sequence
  source 1..20: mol_type = other RNA
tcttttaggactctcaacac

SEQ ID NO: 8671 - RNA, 20 nt, synthetic construct
  misc_feature 1..20: note = antisense sequence
  source 1..20: mol_type = other RNA
gcagaatagctcctctttta

SEQ ID NO: 8672 - RNA, 20 nt, synthetic construct
  misc_feature 1..20: note = antisense sequence
  source 1..20: mol_type = other RNA
ggcagaatagctcctctttt

SEQ ID NO: 8673 - RNA, 20 nt, synthetic construct
  misc_feature 1..20: note = antisense sequence
  source 1..20: mol_type = other RNA
aggcagaatagctcctcttt

SEQ ID NO: 8674 - RNA, 20 nt, synthetic construct
  misc_feature 1..20: note = antisense sequence
  source 1..20: mol_type = other RNA
caggcagaatagctcctctt

SEQ ID NO: 8675 - RNA, 20 nt, synthetic construct
  misc_feature 1..20: note = antisense sequence
  source 1..20: mol_type = other RNA
acaggcagaatagctcctct

SEQ ID NO: 8676 - RNA, 20 nt, synthetic construct
  misc_feature 1..20: note = antisense sequence
  source 1..20: mol_type = other RNA
gacaggcagaatagctcctc

SEQ ID NO: 8677 - RNA, 20 nt, synthetic construct
  misc_feature 1..20: note = antisense sequence
  source 1..20: mol_type = other RNA
ggacaggcagaatagctcct

SEQ ID NO: 8678 - RNA, 20 nt, synthetic construct
  misc_feature 1..20: note = antisense sequence
  source 1..20: mol_type = other RNA
tggtggacaggcagaatagc

SEQ ID NO: 8679 - RNA, 20 nt, synthetic construct
  misc_feature 1..20: note = antisense sequence
  source 1..20: mol_type = other RNA
cactctggcaggctagaatt

SEQ ID NO: 8680 - RNA, 20 nt, synthetic construct
  misc_feature 1..20: note = antisense sequence
  source 1..20: mol_type = other RNA
ccactctggcaggctagaat

SEQ ID NO: 8681 - RNA, 20 nt, synthetic construct
  misc_feature 1..20: note = antisense sequence
  source 1..20: mol_type = other RNA
ttgttccctccagaaaatac

SEQ ID NO: 8682 - RNA, 20 nt, synthetic construct
  misc_feature 1..20: note = antisense sequence
  source 1..20: mol_type = other RNA
cattgttccctccagaaaat

SEQ ID NO: 8683 - RNA, 20 nt, synthetic construct
  misc_feature 1..20: note = antisense sequence
  source 1..20: mol_type = other RNA
agccattgttccctccagaa

SEQ ID NO: 8684 - RNA, 20 nt, synthetic construct
  misc_feature 1..20: note = antisense sequence
  source 1..20: mol_type = other RNA
tagagccattgttccctcca

SEQ ID NO: 8685 - RNA, 20 nt, synthetic construct
  misc_feature 1..20: note = antisense sequence
  source 1..20: mol_type = other RNA
aatagagccattgttccctc

SEQ ID NO: 8686 - RNA, 20 nt, synthetic construct
  misc_feature 1..20: note = antisense sequence
  source 1..20: mol_type = other RNA
gaatagagccattgttccct

SEQ ID NO: 8687 - RNA, 20 nt, synthetic construct
  misc_feature 1..20: note = antisense sequence
  source 1..20: mol_type = other RNA
gtctgaatagagccattgtt

SEQ ID NO: 8688 - RNA, 20 nt, synthetic construct
  misc_feature 1..20: note = antisense sequence
  source 1..20: mol_type = other RNA
tgtctgaatagagccattgt

SEQ ID NO: 8689 - RNA, 20 nt, synthetic construct
  misc_feature 1..20: note = antisense sequence
  source 1..20: mol_type = other RNA
gaatttgtctgaatagagcc

SEQ ID NO: 8690 - RNA, 20 nt, synthetic construct
  misc_feature 1..20: note = antisense sequence
  source 1..20: mol_type = other RNA
ccctcctgaatttgtctgaa

SEQ ID NO: 8691 - RNA, 20 nt, synthetic construct
  misc_feature 1..20: note = antisense sequence
  source 1..20: mol_type = other RNA
ggccctcctgaatttgtctg

SEQ ID NO: 8692 - RNA, 20 nt, synthetic construct
  misc_feature 1..20: note = antisense sequence
  source 1..20: mol_type = other RNA
cactggtagcatctggaccc

SEQ ID NO: 8693 - RNA, 20 nt, synthetic construct
  misc_feature 1..20: note = antisense sequence
  source 1..20: mol_type = other RNA
tcactggtagcatctggacc

SEQ ID NO: 8694 - RNA, 20 nt, synthetic construct
  misc_feature 1..20: note = antisense sequence
  source 1..20: mol_type = other RNA
attcactggtagcatctgga

SEQ ID NO: 8695 - RNA, 20 nt, synthetic construct
  misc_feature 1..20: note = antisense sequence
  source 1..20: mol_type = other RNA
cattcactggtagcatctgg

SEQ ID NO: 8696 - RNA, 20 nt, synthetic construct
  misc_feature 1..20: note = antisense sequence
  source 1..20: mol_type = other RNA
ccattcactggtagcatctg

SEQ ID NO: 8697 - RNA, 20 nt, synthetic construct
  misc_feature 1..20: note = antisense sequence
  source 1..20: mol_type = other RNA
tcccattcactggtagcatc

SEQ ID NO: 8698 - RNA, 20 nt, synthetic construct
  misc_feature 1..20: note = antisense sequence
  source 1..20: mol_type = other RNA
ctcccattcactggtagcat

SEQ ID NO: 8699 - RNA, 20 nt, synthetic construct
  misc_feature 1..20: note = antisense sequence
  source 1..20: mol_type = other RNA
cctcccattcactggtagca

SEQ ID NO: 8700 - RNA, 20 nt, synthetic construct
  misc_feature 1..20: note = antisense sequence
  source 1..20: mol_type = other RNA
gtaagttcattttcctccca

SEQ ID NO: 8701 - RNA, 20 nt, synthetic construct
  misc_feature 1..20: note = antisense sequence
  source 1..20: mol_type = other RNA
atgtaactgaactcttctgc

SEQ ID NO: 8702 - RNA, 20 nt, synthetic construct
  misc_feature 1..20: note = antisense sequence
  source 1..20: mol_type = other RNA
atgtaaacgacactgtgcag

SEQ ID NO: 8703 - RNA, 20 nt, synthetic construct
  misc_feature 1..20: note = antisense sequence
  source 1..20: mol_type = other RNA
aatgtaaacgacactgtgca

SEQ ID NO: 8704 - RNA, 20 nt, synthetic construct
  misc_feature 1..20: note = antisense sequence
  source 1..20: mol_type = other RNA
taatgtaaacgacactgtgc

SEQ ID NO: 8705 - RNA, 20 nt, synthetic construct
  misc_feature 1..20: note = antisense sequence
  source 1..20: mol_type = other RNA
ggtgaagtcagaagataatg

SEQ ID NO: 8706 - RNA, 20 nt, synthetic construct
  misc_feature 1..20: note = antisense sequence
  source 1..20: mol_type = other RNA
gggtgaagtcagaagataat

SEQ ID NO: 8707 - RNA, 20 nt, synthetic construct
  misc_feature 1..20: note = antisense sequence
  source 1..20: mol_type = other RNA
tgggtgaagtcagaagataa

SEQ ID NO: 8708 - RNA, 20 nt, synthetic construct
  misc_feature 1..20: note = antisense sequence
  source 1..20: mol_type = other RNA
tcccttgggtgaagtcagaa

SEQ ID NO: 8709 - RNA, 20 nt, synthetic construct
  misc_feature 1..20: note = antisense sequence
  source 1..20: mol_type = other RNA
ttcccttgggtgaagtcaga

SEQ ID NO: 8710 - RNA, 20 nt, synthetic construct
  misc_feature 1..20: note = antisense sequence
  source 1..20: mol_type = other RNA
gttcccttgggtgaagtcag

SEQ ID NO: 8711 - RNA, 20 nt, synthetic construct
  misc_feature 1..20: note = antisense sequence
  source 1..20: mol_type = other RNA
ggttcccttgggtgaagtca

SEQ ID NO: 8712 - RNA, 20 nt, synthetic construct
  misc_feature 1..20: note = antisense sequence
  source 1..20: mol_type = other RNA
aggttcccttgggtgaagtc

SEQ ID NO: 8713 - RNA, 20 nt, synthetic construct
  misc_feature 1..20: note = antisense sequence
  source 1..20: mol_type = other RNA
caggttcccttgggtgaagt

SEQ ID NO: 8714 - RNA, 20 nt, synthetic construct
  misc_feature 1..20: note = antisense sequence
  source 1..20: mol_type = other RNA
tcaggttcccttgggtgaag

SEQ ID NO: 8715 - RNA, 20 nt, synthetic construct
  misc_feature 1..20: note = antisense sequence
  source 1..20: mol_type = other RNA
atcaggttcccttgggtgaa

SEQ ID NO: 8716 - RNA, 20 nt, synthetic construct
  misc_feature 1..20: note = antisense sequence
  source 1..20: mol_type = other RNA
aatcaggttcccttgggtga

SEQ ID NO: 8717 - RNA, 20 nt, synthetic construct
  misc_feature 1..20: note = antisense sequence
  source 1..20: mol_type = other RNA
gctccacaatcaatgatgaa

SEQ ID NO: 8718 - RNA, 20 nt, synthetic construct
  misc_feature 1..20: note = antisense sequence
  source 1..20: mol_type = other RNA
agctccacaatcaatgatga

SEQ ID NO: 8719 - RNA, 20 nt, synthetic construct
  misc_feature 1..20: note = antisense sequence
  source 1..20: mol_type = other RNA
aagctccacaatcaatgatg

SEQ ID NO: 8720 - RNA, 20 nt, synthetic construct
  misc_feature 1..20: note = antisense sequence
  source 1..20: mol_type = other RNA
gttaagctccacaatcaatg

SEQ ID NO: 8721 - RNA, 20 nt, synthetic construct
  misc_feature 1..20: note = antisense sequence
  source 1..20: mol_type = other RNA
ggttaagctccacaatcaat

SEQ ID NO: 8722 - RNA, 20 nt, synthetic construct
  misc_feature 1..20: note = antisense sequence
  source 1..20: mol_type = other RNA
gtatatggttaagctccaca

SEQ ID NO: 8723 - RNA, 20 nt, synthetic construct
  misc_feature 1..20: note = antisense sequence
  source 1..20: mol_type = other RNA
tgtatatggttaagctccac

SEQ ID NO: 8724 - RNA, 20 nt, synthetic construct
  misc_feature 1..20: note = antisense sequence
  source 1..20: mol_type = other RNA
gcccttagtacatacatctg

SEQ ID NO: 8725 - RNA, 20 nt, synthetic construct
  misc_feature 1..20: note = antisense sequence
  source 1..20: mol_type = other RNA
agcccttagtacatacatct

SEQ ID NO: 8726 - RNA, 20 nt, synthetic construct
  misc_feature 1..20: note = antisense sequence
  source 1..20: mol_type = other RNA
aagcccttagtacatacatc

SEQ ID NO: 8727 - RNA, 20 nt, synthetic construct
  misc_feature 1..20: note = antisense sequence
  source 1..20: mol_type = other RNA
gtaagcccttagtacataca

SEQ ID NO: 8728 - RNA, 20 nt, synthetic construct
  misc_feature 1..20: note = antisense sequence
  source 1..20: mol_type = other RNA
agtaagcccttagtacatac

SEQ ID NO: 8729 - RNA, 20 nt, synthetic construct
  misc_feature 1..20: note = antisense sequence
  source 1..20: mol_type = other RNA
acatagtaagcccttagtac

SEQ ID NO: 8730 - RNA, 20 nt, synthetic construct
  misc_feature 1..20: note = antisense sequence
  source 1..20: mol_type = other RNA
gcatagagcttggaacatag

SEQ ID NO: 8731 - RNA, 20 nt, synthetic construct
  misc_feature 1..20: note = antisense sequence
  source 1..20: mol_type = other RNA
atagcatagagcttggaaca

SEQ ID NO: 8732 - RNA, 20 nt, synthetic construct
  misc_feature 1..20: note = antisense sequence
  source 1..20: mol_type = other RNA
tatagcatagagcttggaac

SEQ ID NO: 8733 - RNA, 20 nt, synthetic construct
  misc_feature 1..20: note = antisense sequence
  source 1..20: mol_type = other RNA
ccactattacccaagctata

SEQ ID NO: 8734 - RNA, 20 nt, synthetic construct
  misc_feature 1..20: note = antisense sequence
  source 1..20: mol_type = other RNA
cccactattacccaagctat

SEQ ID NO: 8735 - RNA, 20 nt, synthetic construct
  misc_feature 1..20: note = antisense sequence
  source 1..20: mol_type = other RNA
tcacccttgtctgtcatctt

SEQ ID NO: 8736 - RNA, 20 nt, synthetic construct
  misc_feature 1..20: note = antisense sequence
  source 1..20: mol_type = other RNA
atcacccttgtctgtcatct

SEQ ID NO: 8737 - RNA, 20 nt, synthetic construct
  misc_feature 1..20: note = antisense sequence
  source 1..20: mol_type = other RNA
catcacccttgtctgtcatc

SEQ ID NO: 8738 - RNA, 20 nt, synthetic construct
  misc_feature 1..20: note = antisense sequence
  source 1..20: mol_type = other RNA
gcatcacccttgtctgtcat

SEQ ID NO: 8739 - RNA, 20 nt, synthetic construct
  misc_feature 1..20: note = antisense sequence
  source 1..20: mol_type = other RNA
ggcatcacccttgtctgtca

SEQ ID NO: 8740 - RNA, 20 nt, synthetic construct
  misc_feature 1..20: note = antisense sequence
  source 1..20: mol_type = other RNA
caccattaaggcatcaccct

SEQ ID NO: 8741 - RNA, 20 nt, synthetic construct
  misc_feature 1..20: note = antisense sequence
  source 1..20: mol_type = other RNA
gcaccattaaggcatcaccc

SEQ ID NO: 8742 - RNA, 20 nt, synthetic construct
  misc_feature 1..20: note = antisense sequence
  source 1..20: mol_type = other RNA
agcaccattaaggcatcacc

SEQ ID NO: 8743 - RNA, 20 nt, synthetic construct
  misc_feature 1..20: note = antisense sequence
  source 1..20: mol_type = other RNA
aagcaccattaaggcatcac

SEQ ID NO: 8744 - RNA, 20 nt, synthetic construct
  misc_feature 1..20: note = antisense sequence
  source 1..20: mol_type = other RNA
agaagcaccattaaggcatc

SEQ ID NO: 8745 - RNA, 20 nt, synthetic construct
  misc_feature 1..20: note = antisense sequence
  source 1..20: mol_type = other RNA
agacagaagcaccattaagg

SEQ ID NO: 8746 - RNA, 20 nt, synthetic construct
  misc_feature 1..20: note = antisense sequence
  source 1..20: mol_type = other RNA
tagacagaagcaccattaag

SEQ ID NO: 8747 - RNA, 20 nt, synthetic construct
  misc_feature 1..20: note = antisense sequence
  source 1..20: mol_type = other RNA
cattagacagaagcaccatt

SEQ ID NO: 8748 - RNA, 20 nt, synthetic construct
  misc_feature 1..20: note = antisense sequence
  source 1..20: mol_type = other RNA
gccataattggagaaacatg

SEQ ID NO: 8749 - RNA, 20 nt, synthetic construct
  misc_feature 1..20: note = antisense sequence
  source 1..20: mol_type = other RNA
ccatgagccataattggaga

SEQ ID NO: 8750 - RNA, 20 nt, synthetic construct
  misc_feature 1..20: note = antisense sequence
  source 1..20: mol_type = other RNA
cagaaattccatgagccata

SEQ ID NO: 8751 - RNA, 20 nt, synthetic construct
  misc_feature 1..20: note = antisense sequence
  source 1..20: mol_type = other RNA
agcagaaattccatgagcca

SEQ ID NO: 8752 - RNA, 20 nt, synthetic construct
  misc_feature 1..20: note = antisense sequence
  source 1..20: mol_type = other RNA
gaagcagaaattccatgagc

SEQ ID NO: 8753 - RNA, 20 nt, synthetic construct
  misc_feature 1..20: note = antisense sequence
  source 1..20: mol_type = other RNA
ccagtgatttggaagcagaa

SEQ ID NO: 8754 - RNA, 20 nt, synthetic construct
  misc_feature 1..20: note = antisense sequence
  source 1..20: mol_type = other RNA
tcccagtgatttggaagcag

SEQ ID NO: 8755 - RNA, 20 nt, synthetic construct
  misc_feature 1..20: note = antisense sequence
  source 1..20: mol_type = other RNA
aagcatcccagtgatttgga

SEQ ID NO: 8756 - RNA, 20 nt, synthetic construct
  misc_feature 1..20: note = antisense sequence
  source 1..20: mol_type = other RNA
caagcatcccagtgatttgg

SEQ ID NO: 8757 - RNA, 20 nt, synthetic construct
  misc_feature 1..20: note = antisense sequence
  source 1..20: mol_type = other RNA
tcaagcatcccagtgatttg

SEQ ID NO: 8758 - RNA, 20 nt, synthetic construct
  misc_feature 1..20: note = antisense sequence
  source 1..20: mol_type = other RNA
ttcaagcatcccagtgattt

SEQ ID NO: 8759 - RNA, 20 nt, synthetic construct
  misc_feature 1..20: note = antisense sequence
  source 1..20: mol_type = other RNA
gttcaagcatcccagtgatt

SEQ ID NO: 8760 - RNA, 20 nt, synthetic construct
  misc_feature 1..20: note = antisense sequence
  source 1..20: mol_type = other RNA
gtatagttcaagcatcccag

SEQ ID NO: 8761 - RNA, 20 nt, synthetic construct
  misc_feature 1..20: note = antisense sequence
  source 1..20: mol_type = other RNA
ggtatagttcaagcatccca

SEQ ID NO: 8762 - RNA, 20 nt, synthetic construct
  misc_feature 1..20: note = antisense sequence
  source 1..20: mol_type = other RNA
gggtatagttcaagcatccc

SEQ ID NO: 8763 - RNA, 20 nt, synthetic construct
  misc_feature 1..20: note = antisense sequence
  source 1..20: mol_type = other RNA
cactccagcctgggtagcaa

SEQ ID NO: 8764 - RNA, 20 nt, synthetic construct
  misc_feature 1..20: note = antisense sequence
  source 1..20: mol_type = other RNA
ttgcactccagcctgggtag

SEQ ID NO: 8765 - RNA, 20 nt, synthetic construct
  misc_feature 1..20: note = antisense sequence
  source 1..20: mol_type = other RNA
attgcactccagcctgggta

SEQ ID NO: 8766 - RNA, 20 nt, synthetic construct
  misc_feature 1..20: note = antisense sequence
  source 1..20: mol_type = other RNA
cattgcactccagcctgggt

SEQ ID NO: 8767 - RNA, 20 nt, synthetic construct
  misc_feature 1..20: note = antisense sequence
  source 1..20: mol_type = other RNA
accattgcactccagcctgg

SEQ ID NO: 8768 - RNA, 20 nt, synthetic construct
  misc_feature 1..20: note = antisense sequence
  source 1..20: mol_type = other RNA
taccattgcactccagcctg

SEQ ID NO: 8769 - RNA, 20 nt, synthetic construct
  misc_feature 1..20: note = antisense sequence
  source 1..20: mol_type = other RNA
gtaccattgcactccagcct

SEQ ID NO: 8770 - RNA, 20 nt, synthetic construct
  misc_feature 1..20: note = antisense sequence
  source 1..20: mol_type = other RNA
cgtaccattgcactccagcc

SEQ ID NO: 8771 - RNA, 20 nt, synthetic construct
  misc_feature 1..20: note = antisense sequence
  source 1..20: mol_type = other RNA
tcgtaccattgcactccagc

SEQ ID NO: 8772 - RNA, 20 nt, synthetic construct
  misc_feature 1..20: note = antisense sequence
  source 1..20: mol_type = other RNA
atcgtaccattgcactccag

SEQ ID NO: 8773 - RNA, 20 nt, synthetic construct
  misc_feature 1..20: note = antisense sequence
  source 1..20: mol_type = other RNA
agtgagccaagatcgtacca

SEQ ID NO: 8774 - RNA, 20 nt, synthetic construct
  misc_feature 1..20: note = antisense sequence
  source 1..20: mol_type = other RNA
cagtgagccaagatcgtacc

SEQ ID NO: 8775 - RNA, 20 nt, synthetic construct
  misc_feature 1..20: note = antisense sequence
  source 1..20: mol_type = other RNA
gcagtgagccaagatcgtac

SEQ ID NO: 8776 - RNA, 20 nt, synthetic construct
  misc_feature 1..20: note = antisense sequence
  source 1..20: mol_type = other RNA
tgcagtgagccaagatcgta

SEQ ID NO: 8777 - RNA, 20 nt, synthetic construct
  misc_feature 1..20: note = antisense sequence
  source 1..20: mol_type = other RNA
attgcttgaacccagaaggt

SEQ ID NO: 8778 - RNA, 20 nt, synthetic construct
  misc_feature 1..20: note = antisense sequence
  source 1..20: mol_type = other RNA
aattgcttgaacccagaagg

SEQ ID NO: 8779 - RNA, 20 nt, synthetic construct
  misc_feature 1..20: note = antisense sequence
  source 1..20: mol_type = other RNA
gaattgcttgaacccagaag

SEQ ID NO: 8780 - RNA, 20 nt, synthetic construct
  misc_feature 1..20: note = antisense sequence
  source 1..20: mol_type = other RNA
agaattgcttgaacccagaa

SEQ ID NO: 8781 - RNA, 20 nt, synthetic construct
  misc_feature 1..20: note = antisense sequence
  source 1..20: mol_type = other RNA
gagaattgcttgaacccaga

SEQ ID NO: 8782 - RNA, 20 nt, synthetic construct
  misc_feature 1..20: note = antisense sequence
  source 1..20: mol_type = other RNA
cgagaattgcttgaacccag

SEQ ID NO: 8783 - RNA, 20 nt, synthetic construct
  misc_feature 1..20: note = antisense sequence
  source 1..20: mol_type = other RNA
acgagaattgcttgaaccca

SEQ ID NO: 8784 - RNA, 20 nt, synthetic construct
  misc_feature 1..20: note = antisense sequence
  source 1..20: mol_type = other RNA
cacgagaattgcttgaaccc

SEQ ID NO: 8785 - RNA, 20 nt, synthetic construct
  misc_feature 1..20: note = antisense sequence
  source 1..20: mol_type = other RNA
gcacgagaattgcttgaacc

SEQ ID NO: 8786 - RNA, 20 nt, synthetic construct
  misc_feature 1..20: note = antisense sequence
  source 1..20: mol_type = other RNA
ggcacgagaattgcttgaac

SEQ ID NO: 8787 - RNA, 20 nt, synthetic construct
  misc_feature 1..20: note = antisense sequence
  source 1..20: mol_type = other RNA
atcccagctactcagaaggc

SEQ ID NO: 8788 - RNA, 20 nt, synthetic construct
  misc_feature 1..20: note = antisense sequence
  source 1..20: mol_type = other RNA
aatcccagctactcagaagg

SEQ ID NO: 8789 - RNA, 20 nt, synthetic construct
  misc_feature 1..20: note = antisense sequence
  source 1..20: mol_type = other RNA
taatcccagctactcagaag

SEQ ID NO: 8790 - RNA, 20 nt, synthetic construct
  misc_feature 1..20: note = antisense sequence
  source 1..20: mol_type = other RNA
gtaatcccagctactcagaa

SEQ ID NO: 8791 - RNA, 20 nt, synthetic construct
  misc_feature 1..20: note = antisense sequence
  source 1..20: mol_type = other RNA
tgtaatcccagctactcaga

SEQ ID NO: 8792 - RNA, 20 nt, synthetic construct
  misc_feature 1..20: note = antisense sequence
  source 1..20: mol_type = other RNA
ctgtaatcccagctactcag

SEQ ID NO: 8793 - RNA, 20 nt, synthetic construct
  misc_feature 1..20: note = antisense sequence
  source 1..20: mol_type = other RNA
cctgtaatcccagctactca

SEQ ID NO: 8794 - RNA, 20 nt, synthetic construct
  misc_feature 1..20: note = antisense sequence
  source 1..20: mol_type = other RNA
gcctgtaatcccagctactc

SEQ ID NO: 8795 - RNA, 20 nt, synthetic construct
  misc_feature 1..20: note = antisense sequence
  source 1..20: mol_type = other RNA
tgcctgtaatcccagctact

SEQ ID NO: 8796 - RNA, 20 nt, synthetic construct
  misc_feature 1..20: note = antisense sequence
  source 1..20: mol_type = other RNA
atgcctgtaatcccagctac

SEQ ID NO: 8797 - RNA, 20 nt, synthetic construct
  misc_feature 1..20: note = antisense sequence
  source 1..20: mol_type = other RNA
catgcctgtaatcccagcta

SEQ ID NO: 8798 - RNA, 20 nt, synthetic construct
  misc_feature 1..20: note = antisense sequence
  source 1..20: mol_type = other RNA
acatgcctgtaatcccagct

SEQ ID NO: 8799 - RNA, 20 nt, synthetic construct
  misc_feature 1..20: note = antisense sequence
  source 1..20: mol_type = other RNA
cacatgcctgtaatcccagc

SEQ ID NO: 8800 - RNA, 20 nt, synthetic construct
  misc_feature 1..20: note = antisense sequence
  source 1..20: mol_type = other RNA
gcacatgcctgtaatcccag

SEQ ID NO: 8801 - RNA, 20 nt, synthetic construct
  misc_feature 1..20: note = antisense sequence
  source 1..20: mol_type = other RNA
agcacatgcctgtaatccca

SEQ ID NO: 8802 - RNA, 20 nt, synthetic construct
  misc_feature 1..20: note = antisense sequence
  source 1..20: mol_type = other RNA
tagcacatgcctgtaatccc

SEQ ID NO: 8803 - RNA, 20 nt, synthetic construct
  misc_feature 1..20: note = antisense sequence
  source 1..20: mol_type = other RNA
gtagcacatgcctgtaatcc

SEQ ID NO: 8804 - RNA, 20 nt, synthetic construct
  misc_feature 1..20: note = antisense sequence
  source 1..20: mol_type = other RNA
ggtagcacatgcctgtaatc

SEQ ID NO: 8805 - RNA, 20 nt, synthetic construct
  misc_feature 1..20: note = antisense sequence
  source 1..20: mol_type = other RNA
tggtagcacatgcctgtaat

SEQ ID NO: 8806 - RNA, 20 nt, synthetic construct
  misc_feature 1..20: note = antisense sequence
  source 1..20: mol_type = other RNA
aacatggcgaaaccctatct

SEQ ID NO: 8807 - RNA, 20 nt, synthetic construct
  misc_feature 1..20: note = antisense sequence
  source 1..20: mol_type = other RNA
caacatggcgaaaccctatc

SEQ ID NO: 8808 - RNA, 20 nt, synthetic construct
  misc_feature 1..20: note = antisense sequence
  source 1..20: mol_type = other RNA
ccaacatggcgaaaccctat

SEQ ID NO: 8809 - RNA, 20 nt, synthetic construct
  misc_feature 1..20: note = antisense sequence
  source 1..20: mol_type = other RNA
agttcaagaccagcctggcc

SEQ ID NO: 8810 - RNA, 20 nt, synthetic construct
  misc_feature 1..20: note = antisense sequence
  source 1..20: mol_type = other RNA
gagttcaagaccagcctggc

SEQ ID NO: 8811 - RNA, 20 nt, synthetic construct
  misc_feature 1..20: note = antisense sequence
  source 1..20: mol_type = other RNA
ggagttcaagaccagcctgg

SEQ ID NO: 8812 - RNA, 20 nt, synthetic construct
  misc_feature 1..20: note = antisense sequence
  source 1..20: mol_type = other RNA
gggagttcaagaccagcctg

SEQ ID NO: 8813 - RNA, 20 nt, synthetic construct
  misc_feature 1..20: note = antisense sequence
  source 1..20: mol_type = other RNA
aggcaggcggatcatctgtg

SEQ ID NO: 8814 - RNA, 20 nt, synthetic construct
  misc_feature 1..20: note = antisense sequence
  source 1..20: mol_type = other RNA
gaggcaggcggatcatctgt

SEQ ID NO: 8815 - RNA, 20 nt, synthetic construct
  misc_feature 1..20: note = antisense sequence
  source 1..20: mol_type = other RNA
tgccttagtccagtgtttct

SEQ ID NO: 8816 - RNA, 20 nt, synthetic construct
  misc_feature 1..20: note = antisense sequence
  source 1..20: mol_type = other RNA
atgccttagtccagtgtttc

SEQ ID NO: 8817 - RNA, 20 nt, synthetic construct
  misc_feature 1..20: note = antisense sequence
  source 1..20: mol_type = other RNA
tatgccttagtccagtgttt

SEQ ID NO: 8818 - RNA, 20 nt, synthetic construct
  misc_feature 1..20: note = antisense sequence
  source 1..20: mol_type = other RNA
ttatgccttagtccagtgtt

SEQ ID NO: 8819 - RNA, 20 nt, synthetic construct
  misc_feature 1..20: note = antisense sequence
  source 1..20: mol_type = other RNA
attatgccttagtccagtgt

SEQ ID NO: 8820 - RNA, 20 nt, synthetic construct
  misc_feature 1..20: note = antisense sequence
  source 1..20: mol_type = other RNA
aattatgccttagtccagtg

SEQ ID NO: 8821 - RNA, 20 nt, synthetic construct
  misc_feature 1..20: note = antisense sequence
  source 1..20: mol_type = other RNA
gcaaacacagatagacagac

SEQ ID NO: 8822 - RNA, 20 nt, synthetic construct
  misc_feature 1..20: note = antisense sequence
  source 1..20: mol_type = other RNA
tgcagcaaacacagatagac

SEQ ID NO: 8823 - RNA, 20 nt, synthetic construct
  misc_feature 1..20: note = antisense sequence
  source 1..20: mol_type = other RNA
agtatgcagcaaacacagat

SEQ ID NO: 8824 - RNA, 20 nt, synthetic construct
  misc_feature 1..20: note = antisense sequence
  source 1..20: mol_type = other RNA
cagtatgcagcaaacacaga

SEQ ID NO: 8825 - RNA, 20 nt, synthetic construct
  misc_feature 1..20: note = antisense sequence
  source 1..20: mol_type = other RNA
tacagtatgcagcaaacaca

SEQ ID NO: 8826 - RNA, 20 nt, synthetic construct
  misc_feature 1..20: note = antisense sequence
  source 1..20: mol_type = other RNA
gctcttgaggtgcctattat

SEQ ID NO: 8827 - RNA, 20 nt, synthetic construct
  misc_feature 1..20: note = antisense sequence
  source 1..20: mol_type = other RNA
ttgctcttgaggtgcctatt

SEQ ID NO: 8828 - RNA, 20 nt, synthetic construct
  misc_feature 1..20: note = antisense sequence
  source 1..20: mol_type = other RNA
tttgctcttgaggtgcctat

SEQ ID NO: 8829 - RNA, 20 nt, synthetic construct
  misc_feature 1..20: note = antisense sequence
  source 1..20: mol_type = other RNA
ctttgctcttgaggtgccta

SEQ ID NO: 8830 - RNA, 20 nt, synthetic construct
  misc_feature 1..20: note = antisense sequence
  source 1..20: mol_type = other RNA
gactttgctcttgaggtgcc

SEQ ID NO: 8831 - RNA, 20 nt, synthetic construct
  misc_feature 1..20: note = antisense sequence
  source 1..20: mol_type = other RNA
tgcagactttgctcttgagg

SEQ ID NO: 8832 - RNA, 20 nt, synthetic construct
  misc_feature 1..20: note = antisense sequence
  source 1..20: mol_type = other RNA
atgcagactttgctcttgag

SEQ ID NO: 8833 - RNA, 20 nt, synthetic construct
  misc_feature 1..20: note = antisense sequence
  source 1..20: mol_type = other RNA
gatgatgcagactttgctct

SEQ ID NO: 8834 - RNA, 20 nt, synthetic construct
  misc_feature 1..20: note = antisense sequence
  source 1..20: mol_type = other RNA
cgaagataagaagatgatgc

SEQ ID NO: 8835 - RNA, 20 nt, synthetic construct
  misc_feature 1..20: note = antisense sequence
  source 1..20: mol_type = other RNA
cactgacgaagataagaaga

SEQ ID NO: 8836 - RNA, 20 nt, synthetic construct
  misc_feature 1..20: note = antisense sequence
  source 1..20: mol_type = other RNA
ccactgacgaagataagaag

SEQ ID NO: 8837 - RNA, 20 nt, synthetic construct
  misc_feature 1..20: note = antisense sequence
  source 1..20: mol_type = other RNA
gccactgacgaagataagaa

SEQ ID NO: 8838 - RNA, 20 nt, synthetic construct
  misc_feature 1..20: note = antisense sequence
  source 1..20: mol_type = other RNA
ggccactgacgaagataaga

SEQ ID NO: 8839 - RNA, 20 nt, synthetic construct
  misc_feature 1..20: note = antisense sequence
  source 1..20: mol_type = other RNA
agtaaaccactgggctggcc

SEQ ID NO: 8840 - RNA, 20 nt, synthetic construct
  misc_feature 1..20: note = antisense sequence
  source 1..20: mol_type = other RNA
ttgaggacttactgtgccac

SEQ ID NO: 8841 - RNA, 20 nt, synthetic construct
  misc_feature 1..20: note = antisense sequence
  source 1..20: mol_type = other RNA
agtgctcattgaggacttac

SEQ ID NO: 8842 - RNA, 20 nt, synthetic construct
  misc_feature 1..20: note = antisense sequence
  source 1..20: mol_type = other RNA
acaagtgctcattgaggact

SEQ ID NO: 8843 - RNA, 20 nt, synthetic construct
  misc_feature 1..20: note = antisense sequence
  source 1..20: mol_type = other RNA
aacaagtgctcattgaggac

SEQ ID NO: 8844 - RNA, 20 nt, synthetic construct
  misc_feature 1..20: note = antisense sequence
  source 1..20: mol_type = other RNA
caacaagtgctcattgagga

SEQ ID NO: 8845 - RNA, 20 nt, synthetic construct
  misc_feature 1..20: note = antisense sequence
  source 1..20: mol_type = other RNA
tactcaacaagtgctcattg

SEQ ID NO: 8846 - RNA, 20 nt, synthetic construct
  misc_feature 1..20: note = antisense sequence
  source 1..20: mol_type = other RNA
ggcttggtaaatatgtcctt

SEQ ID NO: 8847 - RNA, 20 nt, synthetic construct
  misc_feature 1..20: note = antisense sequence
  source 1..20: mol_type = other RNA
tggcttggtaaatatgtcct

SEQ ID NO: 8848 - RNA, 20 nt, synthetic construct
  misc_feature 1..20: note = antisense sequence
  source 1..20: mol_type = other RNA
atggcttggtaaatatgtcc

SEQ ID NO: 8849 - RNA, 20 nt, synthetic construct
  misc_feature 1..20: note = antisense sequence
  source 1..20: mol_type = other RNA
gcaatggcttggtaaatatg

SEQ ID NO: 8850 - RNA, 20 nt, synthetic construct
  misc_feature 1..20: note = antisense sequence
  source 1..20: mol_type = other RNA
ctgaatccactgaaagatga

SEQ ID NO: 8851 - RNA, 20 nt, synthetic construct
  misc_feature 1..20: note = antisense sequence
  source 1..20: mol_type = other RNA
tctgaatccactgaaagatg

SEQ ID NO: 8852 - RNA, 20 nt, synthetic construct
  misc_feature 1..20: note = antisense sequence
  source 1..20: mol_type = other RNA
gggtggaattgaatgctttc

SEQ ID NO: 8853 - RNA, 20 nt, synthetic construct
  misc_feature 1..20: note = antisense sequence
  source 1..20: mol_type = other RNA
agggtggaattgaatgcttt

SEQ ID NO: 8854 - RNA, 20 nt, synthetic construct
  misc_feature 1..20: note = antisense sequence
  source 1..20: mol_type = other RNA
tagggtggaattgaatgctt

SEQ ID NO: 8855 - RNA, 20 nt, synthetic construct
  misc_feature 1..20: note = antisense sequence
  source 1..20: mol_type = other RNA
catagggtggaattgaatgc

SEQ ID NO: 8856 - RNA, 20 nt, synthetic construct
  misc_feature 1..20: note = antisense sequence
  source 1..20: mol_type = other RNA
tcatagggtggaattgaatg

SEQ ID NO: 8857 - RNA, 20 nt, synthetic construct
  misc_feature 1..20: note = antisense sequence
  source 1..20: mol_type = other RNA
gccaatcatagggtggaatt

SEQ ID NO: 8858 - RNA, 20 nt, synthetic construct
  misc_feature 1..20: note = antisense sequence
  source 1..20: mol_type = other RNA
tgccaatcatagggtggaat

SEQ ID NO: 8859 - RNA, 20 nt, synthetic construct
  misc_feature 1..20: note = antisense sequence
  source 1..20: mol_type = other RNA
ctgccaatcatagggtggaa

SEQ ID NO: 8860 - RNA, 20 nt, synthetic construct
  misc_feature 1..20: note = antisense sequence
  source 1..20: mol_type = other RNA
ttctgccaatcatagggtgg

SEQ ID NO: 8861 - RNA, 20 nt, synthetic construct
  misc_feature 1..20: note = antisense sequence
  source 1..20: mol_type = other RNA
taattctgccaatcataggg

SEQ ID NO: 8862 - RNA, 20 nt, synthetic construct
  misc_feature 1..20: note = antisense sequence
  source 1..20: mol_type = other RNA
gttcctttcagaaacagaga

SEQ ID NO: 8863 - RNA, 20 nt, synthetic construct
  misc_feature 1..20: note = antisense sequence
  source 1..20: mol_type = other RNA
ctgggtaatctttctcacaa

SEQ ID NO: 8864 - RNA, 20 nt, synthetic construct
  misc_feature 1..20: note = antisense sequence
  source 1..20: mol_type = other RNA
tctgggtaatctttctcaca

SEQ ID NO: 8865 - RNA, 20 nt, synthetic construct
  misc_feature 1..20: note = antisense sequence
  source 1..20: mol_type = other RNA
tcctctgggtaatctttctc

SEQ ID NO: 8866 - RNA, 20 nt, synthetic construct
  misc_feature 1..20: note = antisense sequence
  source 1..20: mol_type = other RNA
ctcctctgggtaatctttct

SEQ ID NO: 8867 - RNA, 20 nt, synthetic construct
  misc_feature 1..20: note = antisense sequence
  source 1..20: mol_type = other RNA
cctcctctgggtaatctttc

SEQ ID NO: 8868 - RNA, 20 nt, synthetic construct
  misc_feature 1..20: note = antisense sequence
  source 1..20: mol_type = other RNA
ccctcctctgggtaatcttt

SEQ ID NO: 8869 - RNA, 20 nt, synthetic construct
  misc_feature 1..20: note = antisense sequence
  source 1..20: mol_type = other RNA
tcttttgcaccctcctctgg

SEQ ID NO: 8870 - RNA, 20 nt, synthetic construct
  misc_feature 1..20: note = antisense sequence
  source 1..20: mol_type = other RNA
ctatcttttgcaccctcctc

SEQ ID NO: 8871 - RNA, 20 nt, synthetic construct
  misc_feature 1..20: note = antisense sequence
  source 1..20: mol_type = other RNA
agttctctgtccagctctta

SEQ ID NO: 8872 - RNA, 20 nt, synthetic construct
  misc_feature 1..20: note = antisense sequence
  source 1..20: mol_type = other RNA
gatgaggagtctaaaagttc

SEQ ID NO: 8873 - RNA, 20 nt, synthetic construct
  misc_feature 1..20: note = antisense sequence
  source 1..20: mol_type = other RNA
gtatggatgaggagtctaaa

SEQ ID NO: 8874 - RNA, 20 nt, synthetic construct
  misc_feature 1..20: note = antisense sequence
  source 1..20: mol_type = other RNA
tggtatggatgaggagtcta

SEQ ID NO: 8875 - RNA, 20 nt, synthetic construct
  misc_feature 1..20: note = antisense sequence
  source 1..20: mol_type = other RNA
tttggtatggatgaggagtc

SEQ ID NO: 8876 - RNA, 20 nt, synthetic construct
  misc_feature 1..20: note = antisense sequence
  source 1..20: mol_type = other RNA
atttggtatggatgaggagt

SEQ ID NO: 8877 - RNA, 20 nt, synthetic construct
  misc_feature 1..20: note = antisense sequence
  source 1..20: mol_type = other RNA
aatttggtatggatgaggag

SEQ ID NO: 8878 - RNA, 20 nt, synthetic construct
  misc_feature 1..20: note = antisense sequence
  source 1..20: mol_type = other RNA
ttctgagtaggctctttcta

SEQ ID NO: 8879 - RNA, 20 nt, synthetic construct
  misc_feature 1..20: note = antisense sequence
  source 1..20: mol_type = other RNA
cctttctgagtaggctcttt

SEQ ID NO: 8880 - RNA, 20 nt, synthetic construct
  misc_feature 1..20: note = antisense sequence
  source 1..20: mol_type = other RNA
ctgaagcctttctgagtagg

SEQ ID NO: 8881 - RNA, 20 nt, synthetic construct
  misc_feature 1..20: note = antisense sequence
  source 1..20: mol_type = other RNA
actgaagcctttctgagtag

SEQ ID NO: 8882 - RNA, 20 nt, synthetic construct
  misc_feature 1..20: note = antisense sequence
  source 1..20: mol_type = other RNA
cactgaagcctttctgagta

SEQ ID NO: 8883 - RNA, 20 nt, synthetic construct
  misc_feature 1..20: note = antisense sequence
  source 1..20: mol_type = other RNA
tactaagatgtgtatgaccc

SEQ ID NO: 8884 - RNA, 20 nt, synthetic construct
  misc_feature 1..20: note = antisense sequence
  source 1..20: mol_type = other RNA
tgtgtcccaactccagtata

SEQ ID NO: 8885 - RNA, 20 nt, synthetic construct
  misc_feature 1..20: note = antisense sequence
  source 1..20: mol_type = other RNA
ctatgtgtcccaactccagt

SEQ ID NO: 8886 - RNA, 20 nt, synthetic construct
  misc_feature 1..20: note = antisense sequence
  source 1..20: mol_type = other RNA
aactatgtgtcccaactcca

SEQ ID NO: 8887 - RNA, 20 nt, synthetic construct
  misc_feature 1..20: note = antisense sequence
  source 1..20: mol_type = other RNA
caactatgtgtcccaactcc

SEQ ID NO: 8888 - RNA, 20 nt, synthetic construct
  misc_feature 1..20: note = antisense sequence
  source 1..20: mol_type = other RNA
tcaactatgtgtcccaactc

SEQ ID NO: 8889 - RNA, 20 nt, synthetic construct
  misc_feature 1..20: note = antisense sequence
  source 1..20: mol_type = other RNA
atcaactatgtgtcccaact

SEQ ID NO: 8890 - RNA, 20 nt, synthetic construct
  misc_feature 1..20: note = antisense sequence
  source 1..20: mol_type = other RNA
aatcaactatgtgtcccaac

SEQ ID NO: 8891 - RNA, 20 nt, synthetic construct
  misc_feature 1..20: note = antisense sequence
  source 1..20: mol_type = other RNA
caatcaactatgtgtcccaa

SEQ ID NO: 8892 - RNA, 20 nt, synthetic construct
  misc_feature 1..20: note = antisense sequence
  source 1..20: mol_type = other RNA
tcaatcaactatgtgtccca

SEQ ID NO: 8893 - RNA, 20 nt, synthetic construct
  misc_feature 1..20: note = antisense sequence
  source 1..20: mol_type = other RNA
gtcaatcaactatgtgtccc

SEQ ID NO: 8894 - RNA, 20 nt, synthetic construct
  misc_feature 1..20: note = antisense sequence
  source 1..20: mol_type = other RNA
agtcaatcaactatgtgtcc

SEQ ID NO: 8895 - RNA, 20 nt, synthetic construct
  misc_feature 1..20: note = antisense sequence
  source 1..20: mol_type = other RNA
gagttaggcattagtcaatc

SEQ ID NO: 8896 - RNA, 20 nt, synthetic construct
  misc_feature 1..20: note = antisense sequence
  source 1..20: mol_type = other RNA
ggagttaggcattagtcaat

SEQ ID NO: 8897 - RNA, 20 nt, synthetic construct
  misc_feature 1..20: note = antisense sequence
  source 1..20: mol_type = other RNA
aggagttaggcattagtcaa

SEQ ID NO: 8898 - RNA, 20 nt, synthetic construct
  misc_feature 1..20: note = antisense sequence
  source 1..20: mol_type = other RNA
gacaggagttaggcattagt

SEQ ID NO: 8899 - RNA, 20 nt, synthetic construct
  misc_feature 1..20: note = antisense sequence
  source 1..20: mol_type = other RNA
attcagacaggagttaggca

SEQ ID NO: 8900 - RNA, 20 nt, synthetic construct
  misc_feature 1..20: note = antisense sequence
  source 1..20: mol_type = other RNA
aattcagacaggagttaggc

SEQ ID NO: 8901 - RNA, 20 nt, synthetic construct
  misc_feature 1..20: note = antisense sequence
  source 1..20: mol_type = other RNA
caattcagacaggagttagg

SEQ ID NO: 8902 - RNA, 20 nt, synthetic construct
  misc_feature 1..20: note = antisense sequence
  source 1..20: mol_type = other RNA
cagcagctagacataacagc

SEQ ID NO: 8903 - RNA, 20 nt, synthetic construct
  misc_feature 1..20: note = antisense sequence
  source 1..20: mol_type = other RNA
ttccctgtcagcagctagac

SEQ ID NO: 8904 - RNA, 20 nt, synthetic construct
  misc_feature 1..20: note = antisense sequence
  source 1..20: mol_type = other RNA
cttccctgtcagcagctaga

SEQ ID NO: 8905 - RNA, 20 nt, synthetic construct
  misc_feature 1..20: note = antisense sequence
  source 1..20: mol_type = other RNA
acttccctgtcagcagctag

SEQ ID NO: 8906 - RNA, 20 nt, synthetic construct
  misc_feature 1..20: note = antisense sequence
  source 1..20: mol_type = other RNA
tccgacttccctgtcagcag

SEQ ID NO: 8907 - RNA, 20 nt, synthetic construct
  misc_feature 1..20: note = antisense sequence
  source 1..20: mol_type = other RNA
tgctccgacttccctgtcag

SEQ ID NO: 8908 - RNA, 20 nt, synthetic construct
  misc_feature 1..20: note = antisense sequence
  source 1..20: mol_type = other RNA
ctgctccgacttccctgtca

SEQ ID NO: 8909 - RNA, 20 nt, synthetic construct
  misc_feature 1..20: note = antisense sequence
  source 1..20: mol_type = other RNA
tctgctccgacttccctgtc

SEQ ID NO: 8910 - RNA, 20 nt, synthetic construct
  misc_feature 1..20: note = antisense sequence
  source 1..20: mol_type = other RNA
ctctgctccgacttccctgt

SEQ ID NO: 8911 - RNA, 20 nt, synthetic construct
  misc_feature 1..20: note = antisense sequence
  source 1..20: mol_type = other RNA
acctctgctccgacttccct

SEQ ID NO: 8912 - RNA, 20 nt, synthetic construct
  misc_feature 1..20: note = antisense sequence
  source 1..20: mol_type = other RNA
tgacctctgctccgacttcc

SEQ ID NO: 8913 - RNA, 20 nt, synthetic construct
  misc_feature 1..20: note = antisense sequence
  source 1..20: mol_type = other RNA
gtgacctctgctccgacttc

SEQ ID NO: 8914 - RNA, 20 nt, synthetic construct
  misc_feature 1..20: note = antisense sequence
  source 1..20: mol_type = other RNA
cagtgacctctgctccgact

SEQ ID NO: 8915 - RNA, 20 nt, synthetic construct
  misc_feature 1..20: note = antisense sequence
  source 1..20: mol_type = other RNA
actccagtgcagtgacctct

SEQ ID NO: 8916 - RNA, 20 nt, synthetic construct
  misc_feature 1..20: note = antisense sequence
  source 1..20: mol_type = other RNA
tgactccagtgcagtgacct

SEQ ID NO: 8917 - RNA, 20 nt, synthetic construct
  misc_feature 1..20: note = antisense sequence
  source 1..20: mol_type = other RNA
ctgactccagtgcagtgacc

SEQ ID NO: 8918 - RNA, 20 nt, synthetic construct
  misc_feature 1..20: note = antisense sequence
  source 1..20: mol_type = other RNA
caggctgactccagtgcagt

SEQ ID NO: 8919 - RNA, 20 nt, synthetic construct
  misc_feature 1..20: note = antisense sequence
  source 1..20: mol_type = other RNA
atgcaggctgactccagtgc

SEQ ID NO: 8920 - RNA, 20 nt, synthetic construct
  misc_feature 1..20: note = antisense sequence
  source 1..20: mol_type = other RNA
gcattctaacaatctctggg

SEQ ID NO: 8921 - RNA, 20 nt, synthetic construct
  misc_feature 1..20: note = antisense sequence
  source 1..20: mol_type = other RNA
atgccaatcctgggaaaaca

SEQ ID NO: 8922 - RNA, 20 nt, synthetic construct
  misc_feature 1..20: note = antisense sequence
  source 1..20: mol_type = other RNA
agtacccatgccaatcctgg

SEQ ID NO: 8923 - RNA, 20 nt, synthetic construct
  misc_feature 1..20: note = antisense sequence
  source 1..20: mol_type = other RNA
gagtacccatgccaatcctg

SEQ ID NO: 8924 - RNA, 20 nt, synthetic construct
  misc_feature 1..20: note = antisense sequence
  source 1..20: mol_type = other RNA
tgagtacccatgccaatcct

SEQ ID NO: 8925 - RNA, 20 nt, synthetic construct
  misc_feature 1..20: note = antisense sequence
  source 1..20: mol_type = other RNA
ttgagtacccatgccaatcc

SEQ ID NO: 8926 - RNA, 20 nt, synthetic construct
  misc_feature 1..20: note = antisense sequence
  source 1..20: mol_type = other RNA
tttgagtacccatgccaatc

SEQ ID NO: 8927 - RNA, 20 nt, synthetic construct
  misc_feature 1..20: note = antisense sequence
  source 1..20: mol_type = other RNA
ttttgagtacccatgccaat

SEQ ID NO: 8928 - RNA, 20 nt, synthetic construct
  misc_feature 1..20: note = antisense sequence
  source 1..20: mol_type = other RNA
cttttgagtacccatgccaa

SEQ ID NO: 8929 - RNA, 20 nt, synthetic construct
  misc_feature 1..20: note = antisense sequence
  source 1..20: mol_type = other RNA
gcttttgagtacccatgcca

SEQ ID NO: 8930 - RNA, 20 nt, synthetic construct
  misc_feature 1..20: note = antisense sequence
  source 1..20: mol_type = other RNA
tgcttttgagtacccatgcc

SEQ ID NO: 8931 - RNA, 20 nt, synthetic construct
  misc_feature 1..20: note = antisense sequence
  source 1..20: mol_type = other RNA
ttgcttttgagtacccatgc

SEQ ID NO: 8932 - RNA, 20 nt, synthetic construct
  misc_feature 1..20: note = antisense sequence
  source 1..20: mol_type = other RNA
tcttgcttttgagtacccat

SEQ ID NO: 8933 - RNA, 20 nt, synthetic construct
  misc_feature 1..20: note = antisense sequence
  source 1..20: mol_type = other RNA
ctcttgcttttgagtaccca

SEQ ID NO: 8934 - RNA, 20 nt, synthetic construct
  misc_feature 1..20: note = antisense sequence
  source 1..20: mol_type = other RNA
gctcttgcttttgagtaccc

SEQ ID NO: 8935 - RNA, 20 nt, synthetic construct
  misc_feature 1..20: note = antisense sequence
  source 1..20: mol_type = other RNA
ggctcttgcttttgagtacc

SEQ ID NO: 8936 - RNA, 20 nt, synthetic construct
  misc_feature 1..20: note = antisense sequence
  source 1..20: mol_type = other RNA
gacctcacactggctcttgc

SEQ ID NO: 8937 - RNA, 20 nt, synthetic construct
  misc_feature 1..20: note = antisense sequence
  source 1..20: mol_type = other RNA
tgacctcacactggctcttg

SEQ ID NO: 8938 - RNA, 20 nt, synthetic construct
  misc_feature 1..20: note = antisense sequence
  source 1..20: mol_type = other RNA
catgacctcacactggctct

SEQ ID NO: 8939 - RNA, 20 nt, synthetic construct
  misc_feature 1..20: note = antisense sequence
  source 1..20: mol_type = other RNA
acatgacctcacactggctc

SEQ ID NO: 8940 - RNA, 20 nt, synthetic construct
  misc_feature 1..20: note = antisense sequence
  source 1..20: mol_type = other RNA
ctgacatgacctcacactgg

SEQ ID NO: 8941 - RNA, 20 nt, synthetic construct
  misc_feature 1..20: note = antisense sequence
  source 1..20: mol_type = other RNA
cctgacatgacctcacactg

SEQ ID NO: 8942 - RNA, 20 nt, synthetic construct
  misc_feature 1..20: note = antisense sequence
  source 1..20: mol_type = other RNA
ccctgacatgacctcacact

SEQ ID NO: 8943 - RNA, 20 nt, synthetic construct
  misc_feature 1..20: note = antisense sequence
  source 1..20: mol_type = other RNA
gccctgacatgacctcacac

SEQ ID NO: 8944 - RNA, 20 nt, synthetic construct
  misc_feature 1..20: note = antisense sequence
  source 1..20: mol_type = other RNA
ggccctgacatgacctcaca

SEQ ID NO: 8945 - RNA, 20 nt, synthetic construct
  misc_feature 1..20: note = antisense sequence
  source 1..20: mol_type = other RNA
aggccctgacatgacctcac

SEQ ID NO: 8946 - RNA, 20 nt, synthetic construct
  misc_feature 1..20: note = antisense sequence
  source 1..20: mol_type = other RNA
caggccctgacatgacctca

SEQ ID NO: 8947 - RNA, 20 nt, synthetic construct
  misc_feature 1..20: note = antisense sequence
  source 1..20: mol_type = other RNA
acaggccctgacatgacctc

SEQ ID NO: 8948 - RNA, 20 nt, synthetic construct
  misc_feature 1..20: note = antisense sequence
  source 1..20: mol_type = other RNA
gacaggccctgacatgacct

SEQ ID NO: 8949 - RNA, 20 nt, synthetic construct
  misc_feature 1..20: note = antisense sequence
  source 1..20: mol_type = other RNA
aaggacaggccctgacatga

SEQ ID NO: 8950 - RNA, 20 nt, synthetic construct
  misc_feature 1..20: note = antisense sequence
  source 1..20: mol_type = other RNA
atccctaaggacaggccctg

SEQ ID NO: 8951 - RNA, 20 nt, synthetic construct
  misc_feature 1..20: note = antisense sequence
  source 1..20: mol_type = other RNA
aatccctaaggacaggccct

SEQ ID NO: 8952 - RNA, 20 nt, synthetic construct
  misc_feature 1..20: note = antisense sequence
  source 1..20: mol_type = other RNA
taatccctaaggacaggccc

SEQ ID NO: 8953 - RNA, 20 nt, synthetic construct
  misc_feature 1..20: note = antisense sequence
  source 1..20: mol_type = other RNA
gtaatccctaaggacaggcc

SEQ ID NO: 8954 - RNA, 20 nt, synthetic construct
  misc_feature 1..20: note = antisense sequence
  source 1..20: mol_type = other RNA
agtaatccctaaggacaggc

SEQ ID NO: 8955 - RNA, 20 nt, synthetic construct
  misc_feature 1..20: note = antisense sequence
  source 1..20: mol_type = other RNA
ccagtaatccctaaggacag

SEQ ID NO: 8956 - RNA, 20 nt, synthetic construct
  misc_feature 1..20: note = antisense sequence
  source 1..20: mol_type = other RNA
tccagtaatccctaaggaca

SEQ ID NO: 8957 - RNA, 20 nt, synthetic construct
  misc_feature 1..20: note = antisense sequence
  source 1..20: mol_type = other RNA
ttccagtaatccctaaggac

SEQ ID NO: 8958 - RNA, 20 nt, synthetic construct
  misc_feature 1..20: note = antisense sequence
  source 1..20: mol_type = other RNA
acttccagtaatccctaagg

SEQ ID NO: 8959 - RNA, 20 nt, synthetic construct
  misc_feature 1..20: note = antisense sequence
  source 1..20: mol_type = other RNA
cacttccagtaatccctaag

SEQ ID NO: 8960 - RNA, 20 nt, synthetic construct
  misc_feature 1..20: note = antisense sequence
  source 1..20: mol_type = other RNA
tcacttccagtaatccctaa

SEQ ID NO: 8961 - RNA, 20 nt, synthetic construct
  misc_feature 1..20: note = antisense sequence
  source 1..20: mol_type = other RNA
ctcacttccagtaatcccta

SEQ ID NO: 8962 - RNA, 20 nt, synthetic construct
  misc_feature 1..20: note = antisense sequence
  source 1..20: mol_type = other RNA
actcacttccagtaatccct

SEQ ID NO: 8963 - RNA, 20 nt, synthetic construct
  misc_feature 1..20: note = antisense sequence
  source 1..20: mol_type = other RNA
cactcacttccagtaatccc

SEQ ID NO: 8964 - RNA, 20 nt, synthetic construct
  misc_feature 1..20: note = antisense sequence
  source 1..20: mol_type = other RNA
ccactcacttccagtaatcc

SEQ ID NO: 8965 - RNA, 20 nt, synthetic construct
  misc_feature 1..20: note = antisense sequence
  source 1..20: mol_type = other RNA
gcagccactcacttccagta

SEQ ID NO: 8966 - RNA, 20 nt, synthetic construct
  misc_feature 1..20: note = antisense sequence
  source 1..20: mol_type = other RNA
ggcagccactcacttccagt

SEQ ID NO: 8967 - RNA, 20 nt, synthetic construct
  misc_feature 1..20: note = antisense sequence
  source 1..20: mol_type = other RNA
agaggcagccactcacttcc

SEQ ID NO: 8968 - RNA, 20 nt, synthetic construct
  misc_feature 1..20: note = antisense sequence
  source 1..20: mol_type = other RNA
gcagaggcagccactcactt

SEQ ID NO: 8969 - RNA, 20 nt, synthetic construct
  misc_feature 1..20: note = antisense sequence
  source 1..20: mol_type = other RNA
tacacccttgccctgagtga

SEQ ID NO: 8970 - RNA, 20 nt, synthetic construct
  misc_feature 1..20: note = antisense sequence
  source 1..20: mol_type = other RNA
tcacctacacccttgccctg

SEQ ID NO: 8971 - RNA, 20 nt, synthetic construct
  misc_feature 1..20: note = antisense sequence
  source 1..20: mol_type = other RNA
ctcacctacacccttgccct

SEQ ID NO: 8972 - RNA, 20 nt, synthetic construct
  misc_feature 1..20: note = antisense sequence
  source 1..20: mol_type = other RNA
tctcacctacacccttgccc

SEQ ID NO: 8973 - RNA, 20 nt, synthetic construct
  misc_feature 1..20: note = antisense sequence
  source 1..20: mol_type = other RNA
atctcacctacacccttgcc

SEQ ID NO: 8974 - RNA, 20 nt, synthetic construct
  misc_feature 1..20: note = antisense sequence
  source 1..20: mol_type = other RNA
tatctcacctacacccttgc

SEQ ID NO: 8975 - RNA, 20 nt, synthetic construct
  misc_feature 1..20: note = antisense sequence
  source 1..20: mol_type = other RNA
atatctcacctacacccttg

SEQ ID NO: 8976 - RNA, 20 nt, synthetic construct
  misc_feature 1..20: note = antisense sequence
  source 1..20: mol_type = other RNA
gaactcccttcattgagata

SEQ ID NO: 8977 - RNA, 20 nt, synthetic construct
  misc_feature 1..20: note = antisense sequence
  source 1..20: mol_type = other RNA
agaactcccttcattgagat

SEQ ID NO: 8978 - RNA, 20 nt, synthetic construct
  misc_feature 1..20: note = antisense sequence
  source 1..20: mol_type = other RNA
aggtcctaataggtatgtac

SEQ ID NO: 8979 - RNA, 20 nt, synthetic construct
  misc_feature 1..20: note = antisense sequence
  source 1..20: mol_type = other RNA
tcaggtcctaataggtatgt

SEQ ID NO: 8980 - RNA, 20 nt, synthetic construct
  misc_feature 1..20: note = antisense sequence
  source 1..20: mol_type = other RNA
atcaggtcctaataggtatg

SEQ ID NO: 8981 - RNA, 20 nt, synthetic construct
  misc_feature 1..20: note = antisense sequence
  source 1..20: mol_type = other RNA
gaatcaggtcctaataggta

SEQ ID NO: 8982 - RNA, 20 nt, synthetic construct
  misc_feature 1..20: note = antisense sequence
  source 1..20: mol_type = other RNA
tgaatcaggtcctaataggt

SEQ ID NO: 8983 - RNA, 20 nt, synthetic construct
  misc_feature 1..20: note = antisense sequence
  source 1..20: mol_type = other RNA
atgaatcaggtcctaatagg

SEQ ID NO: 8984 - RNA, 20 nt, synthetic construct
  misc_feature 1..20: note = antisense sequence
  source 1..20: mol_type = other RNA
ctaagatgaatcaggtccta

SEQ ID NO: 8985 - RNA, 20 nt, synthetic construct
  misc_feature 1..20: note = antisense sequence
  source 1..20: mol_type = other RNA
cctaagatgaatcaggtcct

SEQ ID NO: 8986 - RNA, 20 nt, synthetic construct
  misc_feature 1..20: note = antisense sequence
  source 1..20: mol_type = other RNA
tcctaagatgaatcaggtcc

SEQ ID NO: 8987 - RNA, 20 nt, synthetic construct
  misc_feature 1..20: note = antisense sequence
  source 1..20: mol_type = other RNA
atcctaagatgaatcaggtc

SEQ ID NO: 8988 - RNA, 20 nt, synthetic construct
  misc_feature 1..20: note = antisense sequence
  source 1..20: mol_type = other RNA
acagaggtagggaagataaa

SEQ ID NO: 8989 - RNA, 20 nt, synthetic construct
  misc_feature 1..20: note = antisense sequence
  source 1..20: mol_type = other RNA
gacagaggtagggaagataa

SEQ ID NO: 8990 - RNA, 20 nt, synthetic construct
  misc_feature 1..20: note = antisense sequence
  source 1..20: mol_type = other RNA
ggacagaggtagggaagata

SEQ ID NO: 8991 - RNA, 20 nt, synthetic construct
  misc_feature 1..20: note = antisense sequence
  source 1..20: mol_type = other RNA
agggacagaggtagggaaga

SEQ ID NO: 8992 - RNA, 20 nt, synthetic construct
  misc_feature 1..20: note = antisense sequence
  source 1..20: mol_type = other RNA
ttctgaccttccagggacag

SEQ ID NO: 8993 - RNA, 20 nt, synthetic construct
  misc_feature 1..20: note = antisense sequence
  source 1..20: mol_type = other RNA
tgatttctgaccttccaggg

SEQ ID NO: 8994 - RNA, 20 nt, synthetic construct
  misc_feature 1..20: note = antisense sequence
  source 1..20: mol_type = other RNA
ctgtgatttctgaccttcca

SEQ ID NO: 8995 - RNA, 20 nt, synthetic construct
  misc_feature 1..20: note = antisense sequence
  source 1..20: mol_type = other RNA
aactgtgatttctgaccttc

SEQ ID NO: 8996 - RNA, 20 nt, synthetic construct
  misc_feature 1..20: note = antisense sequence
  source 1..20: mol_type = other RNA
ctaactgtgatttctgacct

SEQ ID NO: 8997 - RNA, 20 nt, synthetic construct
  misc_feature 1..20: note = antisense sequence
  source 1..20: mol_type = other RNA
gctaactgtgatttctgacc

SEQ ID NO: 8998 - RNA, 20 nt, synthetic construct
  misc_feature 1..20: note = antisense sequence
  source 1..20: mol_type = other RNA
agtgctaactgtgatttctg

SEQ ID NO: 8999 - RNA, 20 nt, synthetic construct
  misc_feature 1..20: note = antisense sequence
  source 1..20: mol_type = other RNA
gagtgctaactgtgatttct

SEQ ID NO: 9000 - RNA, 20 nt, synthetic construct
  misc_feature 1..20: note = antisense sequence
  source 1..20: mol_type = other RNA
agagtgctaactgtgatttc

SEQ ID NO: 9001 - RNA, 20 nt, synthetic construct
  misc_feature 1..20: note = antisense sequence
  source 1..20: mol_type = other RNA
gcctgtagttgagaaagatg

SEQ ID NO: 9002 - RNA, 20 nt, synthetic construct
  misc_feature 1..20: note = antisense sequence
  source 1..20: mol_type = other RNA
agcctgtagttgagaaagat

SEQ ID NO: 9003 - RNA, 20 nt, synthetic construct
  misc_feature 1..20: note = antisense sequence
  source 1..20: mol_type = other RNA
gaagcctgtagttgagaaag

SEQ ID NO: 9004 - RNA, 20 nt, synthetic construct
  misc_feature 1..20: note = antisense sequence
  source 1..20: mol_type = other RNA
aagaagcctgtagttgagaa

SEQ ID NO: 9005 - RNA, 20 nt, synthetic construct
  misc_feature 1..20: note = antisense sequence
  source 1..20: mol_type = other RNA
ggtaagaagcctgtagttga

SEQ ID NO: 9006 - RNA, 20 nt, synthetic construct
  misc_feature 1..20: note = antisense sequence
  source 1..20: mol_type = other RNA
aggtaagaagcctgtagttg

SEQ ID NO: 9007 - RNA, 20 nt, synthetic construct
  misc_feature 1..20: note = antisense sequence
  source 1..20: mol_type = other RNA
gaggtaagaagcctgtagtt

SEQ ID NO: 9008 - RNA, 20 nt, synthetic construct
  misc_feature 1..20: note = antisense sequence
  source 1..20: mol_type = other RNA
cgaggtaagaagcctgtagt

SEQ ID NO: 9009 - RNA, 20 nt, synthetic construct
  misc_feature 1..20: note = antisense sequence
  source 1..20: mol_type = other RNA
acgaggtaagaagcctgtag

SEQ ID NO: 9010 - RNA, 20 nt, synthetic construct
  misc_feature 1..20: note = antisense sequence
  source 1..20: mol_type = other RNA
cacgaggtaagaagcctgta

SEQ ID NO: 9011 - RNA, 20 nt, synthetic construct
  misc_feature 1..20: note = antisense sequence
  source 1..20: mol_type = other RNA
acacgaggtaagaagcctgt

SEQ ID NO: 9012 - RNA, 20 nt, synthetic construct
  misc_feature 1..20: note = antisense sequence
  source 1..20: mol_type = other RNA
tacacgaggtaagaagcctg

SEQ ID NO: 9013 - RNA, 20 nt, synthetic construct
  misc_feature 1..20: note = antisense sequence
  source 1..20: mol_type = other RNA
ctaagggcttacacgaggta

SEQ ID NO: 9014 - RNA, 20 nt, synthetic construct
  misc_feature 1..20: note = antisense sequence
  source 1..20: mol_type = other RNA
actaagggcttacacgaggt

SEQ ID NO: 9015 - RNA, 20 nt, synthetic construct
  misc_feature 1..20: note = antisense sequence
  source 1..20: mol_type = other RNA
tactaagggcttacacgagg

SEQ ID NO: 9016 - RNA, 20 nt, synthetic construct
  misc_feature 1..20: note = antisense sequence
  source 1..20: mol_type = other RNA
ctactaagggcttacacgag

SEQ ID NO: 9017 - RNA, 20 nt, synthetic construct
  misc_feature 1..20: note = antisense sequence
  source 1..20: mol_type = other RNA
tctactaagggcttacacga

SEQ ID NO: 9018 - RNA, 20 nt, synthetic construct
  misc_feature 1..20: note = antisense sequence
  source 1..20: mol_type = other RNA
ttctactaagggcttacacg

SEQ ID NO: 9019 - RNA, 20 nt, synthetic construct
  misc_feature 1..20: note = antisense sequence
  source 1..20: mol_type = other RNA
cttctactaagggcttacac

SEQ ID NO: 9020 - RNA, 20 nt, synthetic construct
  misc_feature 1..20: note = antisense sequence
  source 1..20: mol_type = other RNA
acttctactaagggcttaca

SEQ ID NO: 9021 - RNA, 20 nt, synthetic construct
  misc_feature 1..20: note = antisense sequence
  source 1..20: mol_type = other RNA
tacttctactaagggcttac

SEQ ID NO: 9022 - RNA, 20 nt, synthetic construct
  misc_feature 1..20: note = antisense sequence
  source 1..20: mol_type = other RNA
ctacttctactaagggctta

SEQ ID NO: 9023 - RNA, 20 nt, synthetic construct
  misc_feature 1..20: note = antisense sequence
  source 1..20: mol_type = other RNA
tctcctacttctactaaggg

SEQ ID NO: 9024 - RNA, 20 nt, synthetic construct
  misc_feature 1..20: note = antisense sequence
  source 1..20: mol_type = other RNA
ctctcctacttctactaagg

SEQ ID NO: 9025 - RNA, 20 nt, synthetic construct
  misc_feature 1..20: note = antisense sequence
  source 1..20: mol_type = other RNA
tctctcctacttctactaag

SEQ ID NO: 9026 - RNA, 20 nt, synthetic construct
  misc_feature 1..20: note = antisense sequence
  source 1..20: mol_type = other RNA
tcttctctcctacttctact

SEQ ID NO: 9027 - RNA, 20 nt, synthetic construct
  misc_feature 1..20: note = antisense sequence
  source 1..20: mol_type = other RNA
aaaccaacaaggcgaaacat

SEQ ID NO: 9028 - RNA, 20 nt, synthetic construct
  misc_feature 1..20: note = antisense sequence
  source 1..20: mol_type = other RNA
ctatccctagatggaaagat

SEQ ID NO: 9029 - RNA, 20 nt, synthetic construct
  misc_feature 1..20: note = antisense sequence
  source 1..20: mol_type = other RNA
tgctatccctagatggaaag

SEQ ID NO: 9030 - RNA, 20 nt, synthetic construct
  misc_feature 1..20: note = antisense sequence
  source 1..20: mol_type = other RNA
ttgctatccctagatggaaa

SEQ ID NO: 9031 - RNA, 20 nt, synthetic construct
  misc_feature 1..20: note = antisense sequence
  source 1..20: mol_type = other RNA
tttgctatccctagatggaa

SEQ ID NO: 9032 - RNA, 20 nt, synthetic construct
  misc_feature 1..20: note = antisense sequence
  source 1..20: mol_type = other RNA
ttttgctatccctagatgga

SEQ ID NO: 9033 - RNA, 20 nt, synthetic construct
  misc_feature 1..20: note = antisense sequence
  source 1..20: mol_type = other RNA
attttgctatccctagatgg

SEQ ID NO: 9034 - RNA, 20 nt, synthetic construct
  misc_feature 1..20: note = antisense sequence
  source 1..20: mol_type = other RNA
gtgaagtattttgctatccc

SEQ ID NO: 9035 - RNA, 20 nt, synthetic construct
  misc_feature 1..20: note = antisense sequence
  source 1..20: mol_type = other RNA
ggcccaccagtccttcaaaa

SEQ ID NO: 9036 - RNA, 20 nt, synthetic construct
  misc_feature 1..20: note = antisense sequence
  source 1..20: mol_type = other RNA
tggcccaccagtccttcaaa

SEQ ID NO: 9037 - RNA, 20 nt, synthetic construct
  misc_feature 1..20: note = antisense sequence
  source 1..20: mol_type = other RNA
tgtggcccaccagtccttca

SEQ ID NO: 9038 - RNA, 20 nt, synthetic construct
  misc_feature 1..20: note = antisense sequence
  source 1..20: mol_type = other RNA
ttgtggcccaccagtccttc

SEQ ID NO: 9039 - RNA, 20 nt, synthetic construct
  misc_feature 1..20: note = antisense sequence
  source 1..20: mol_type = other RNA
tttgtggcccaccagtcctt

SEQ ID NO: 9040 - RNA, 20 nt, synthetic construct
  misc_feature 1..20: note = antisense sequence
  source 1..20: mol_type = other RNA
atttgtggcccaccagtcct

SEQ ID NO: 9041 - RNA, 20 nt, synthetic construct
  misc_feature 1..20: note = antisense sequence
  source 1..20: mol_type = other RNA
tatttgtggcccaccagtcc

SEQ ID NO: 9042 - RNA, 20 nt, synthetic construct
  misc_feature 1..20: note = antisense sequence
  source 1..20: mol_type = other RNA
ttatttgtggcccaccagtc

SEQ ID NO: 9043 - RNA, 20 nt, synthetic construct
  misc_feature 1..20: note = antisense sequence
  source 1..20: mol_type = other RNA
ctttatttgtggcccaccag

SEQ ID NO: 9044 - RNA, 20 nt, synthetic construct
  misc_feature 1..20: note = antisense sequence
  source 1..20: mol_type = other RNA
cctttatttgtggcccacca

SEQ ID NO: 9045 - RNA, 20 nt, synthetic construct
  misc_feature 1..20: note = antisense sequence
  source 1..20: mol_type = other RNA
acctttatttgtggcccacc

SEQ ID NO: 9046 - RNA, 20 nt, synthetic construct
  misc_feature 1..20: note = antisense sequence
  source 1..20: mol_type = other RNA
aacctttatttgtggcccac

SEQ ID NO: 9047 - RNA, 20 nt, synthetic construct
  misc_feature 1..20: note = antisense sequence
  source 1..20: mol_type = other RNA
ccatatctttgactctgcct

SEQ ID NO: 9048 - RNA, 20 nt, synthetic construct
  misc_feature 1..20: note = antisense sequence
  source 1..20: mol_type = other RNA
ttccatatctttgactctgc

SEQ ID NO: 9049 - RNA, 20 nt, synthetic construct
  misc_feature 1..20: note = antisense sequence
  source 1..20: mol_type = other RNA
gccacacagaaacatagaat

SEQ ID NO: 9050 - RNA, 20 nt, synthetic construct
  misc_feature 1..20: note = antisense sequence
  source 1..20: mol_type = other RNA
cttaattgggccacacagaa

SEQ ID NO: 9051 - RNA, 20 nt, synthetic construct
  misc_feature 1..20: note = antisense sequence
  source 1..20: mol_type = other RNA
gtcttaattgggccacacag

SEQ ID NO: 9052 - RNA, 20 nt, synthetic construct
  misc_feature 1..20: note = antisense sequence
  source 1..20: mol_type = other RNA
agtcttaattgggccacaca

SEQ ID NO: 9053 - RNA, 20 nt, synthetic construct
  misc_feature 1..20: note = antisense sequence
  source 1..20: mol_type = other RNA
aagtcttaattgggccacac

SEQ ID NO: 9054 - RNA, 20 nt, synthetic construct
  misc_feature 1..20: note = antisense sequence
  source 1..20: mol_type = other RNA
aaagtcttaattgggccaca

SEQ ID NO: 9055 - RNA, 20 nt, synthetic construct
  misc_feature 1..20: note = antisense sequence
  source 1..20: mol_type = other RNA
aaaagtcttaattgggccac

SEQ ID NO: 9056 - RNA, 20 nt, synthetic construct
  misc_feature 1..20: note = antisense sequence
  source 1..20: mol_type = other RNA
caaaagtcttaattgggcca

SEQ ID NO: 9057 - RNA, 20 nt, synthetic construct
  misc_feature 1..20: note = antisense sequence
  source 1..20: mol_type = other RNA
attccttgactatgcttgca

SEQ ID NO: 9058 - RNA, 20 nt, synthetic construct
  misc_feature 1..20: note = antisense sequence
  source 1..20: mol_type = other RNA
agcctttactctgtcttggg

SEQ ID NO: 9059 - RNA, 20 nt, synthetic construct
  misc_feature 1..20: note = antisense sequence
  source 1..20: mol_type = other RNA
tagcctttactctgtcttgg

SEQ ID NO: 9060 - RNA, 20 nt, synthetic construct
  misc_feature 1..20: note = antisense sequence
  source 1..20: mol_type = other RNA
atagcctttactctgtcttg

SEQ ID NO: 9061 - RNA, 20 nt, synthetic construct
  misc_feature 1..20: note = antisense sequence
  source 1..20: mol_type = other RNA
tcagagtgtttcaggtttgt

SEQ ID NO: 9062 - RNA, 20 nt, synthetic construct
  misc_feature 1..20: note = antisense sequence
  source 1..20: mol_type = other RNA
ctcagagtgtttcaggtttg

SEQ ID NO: 9063 - RNA, 20 nt, synthetic construct
  misc_feature 1..20: note = antisense sequence
  source 1..20: mol_type = other RNA
agctcagagtgtttcaggtt

SEQ ID NO: 9064 - RNA, 20 nt, synthetic construct
  misc_feature 1..20: note = antisense sequence
  source 1..20: mol_type = other RNA
aagctcagagtgtttcaggt

SEQ ID NO: 9065 - RNA, 20 nt, synthetic construct
  misc_feature 1..20: note = antisense sequence
  source 1..20: mol_type = other RNA
gcaagctcagagtgtttcag

SEQ ID NO: 9066 - RNA, 20 nt, synthetic construct
  misc_feature 1..20: note = antisense sequence
  source 1..20: mol_type = other RNA
ggcaagctcagagtgtttca

SEQ ID NO: 9067 - RNA, 20 nt, synthetic construct
  misc_feature 1..20: note = antisense sequence
  source 1..20: mol_type = other RNA
tggcaagctcagagtgtttc

SEQ ID NO: 9068 - RNA, 20 nt, synthetic construct
  misc_feature 1..20: note = antisense sequence
  source 1..20: mol_type = other RNA
aatggcaagctcagagtgtt

SEQ ID NO: 9069 - RNA, 20 nt, synthetic construct
  misc_feature 1..20: note = antisense sequence
  source 1..20: mol_type = other RNA
ttaatggcaagctcagagtg

SEQ ID NO: 9070 - RNA, 20 nt, synthetic construct
  misc_feature 1..20: note = antisense sequence
  source 1..20: mol_type = other RNA
tttaatggcaagctcagagt

SEQ ID NO: 9071 - RNA, 20 nt, synthetic construct
  misc_feature 1..20: note = antisense sequence
  source 1..20: mol_type = other RNA
ctttaatggcaagctcagag

SEQ ID NO: 9072 - RNA, 20 nt, synthetic construct
  misc_feature 1..20: note = antisense sequence
  source 1..20: mol_type = other RNA
atctttaatggcaagctcag

SEQ ID NO: 9073 - RNA, 20 nt, synthetic construct
  misc_feature 1..20: note = antisense sequence
  source 1..20: mol_type = other RNA
cctccataatgtttacacca

SEQ ID NO: 9074 - RNA, 20 nt, synthetic construct
  misc_feature 1..20: note = antisense sequence
  source 1..20: mol_type = other RNA
acctccataatgtttacacc

SEQ ID NO: 9075 - RNA, 20 nt, synthetic construct
  misc_feature 1..20: note = antisense sequence
  source 1..20: mol_type = other RNA
gacctccataatgtttacac

SEQ ID NO: 9076 - RNA, 20 nt, synthetic construct
  misc_feature 1..20: note = antisense sequence
  source 1..20: mol_type = other RNA
ggatcaataagacctccata

SEQ ID NO: 9077 - RNA, 20 nt, synthetic construct
  misc_feature 1..20: note = antisense sequence
  source 1..20: mol_type = other RNA
ctagacattgttccgttagt

SEQ ID NO: 9078 - RNA, 20 nt, synthetic construct
  misc_feature 1..20: note = antisense sequence
  source 1..20: mol_type = other RNA
gctacacttttgatgtgaac

SEQ ID NO: 9079 - RNA, 20 nt, synthetic construct
  misc_feature 1..20: note = antisense sequence
  source 1..20: mol_type = other RNA
gctatgctacacttttgatg

SEQ ID NO: 9080 - RNA, 20 nt, synthetic construct
  misc_feature 1..20: note = antisense sequence
  source 1..20: mol_type = other RNA
ggccataaaatcagcagtaa

SEQ ID NO: 9081 - RNA, 20 nt, synthetic construct
  misc_feature 1..20: note = antisense sequence
  source 1..20: mol_type = other RNA
aggcttctagggaaatggcc

SEQ ID NO: 9082 - RNA, 20 nt, synthetic construct
  misc_feature 1..20: note = antisense sequence
  source 1..20: mol_type = other RNA
taaggcttctagggaaatgg

SEQ ID NO: 9083 - RNA, 20 nt, synthetic construct
  misc_feature 1..20: note = antisense sequence
  source 1..20: mol_type = other RNA
gatttaaggcttctagggaa

SEQ ID NO: 9084 - RNA, 20 nt, synthetic construct
  misc_feature 1..20: note = antisense sequence
  source 1..20: mol_type = other RNA
agatttaaggcttctaggga

SEQ ID NO: 9085 - RNA, 20 nt, synthetic construct
  misc_feature 1..20: note = antisense sequence
  source 1..20: mol_type = other RNA
ccagatttaaggcttctagg

SEQ ID NO: 9086 - RNA, 20 nt, synthetic construct
  misc_feature 1..20: note = antisense sequence
  source 1..20: mol_type = other RNA
cccagatttaaggcttctag

SEQ ID NO: 9087 - RNA, 20 nt, synthetic construct
  misc_feature 1..20: note = antisense sequence
  source 1..20: mol_type = other RNA
cctacaaacaatgaatcagg

SEQ ID NO: 9088 - RNA, 20 nt, synthetic construct
  misc_feature 1..20: note = antisense sequence
  source 1..20: mol_type = other RNA
aggcttcttttcagacctac

SEQ ID NO: 9089 - RNA, 20 nt, synthetic construct
  misc_feature 1..20: note = antisense sequence
  source 1..20: mol_type = other RNA
ctcaggcttcttttcagacc

SEQ ID NO: 9090 - RNA, 20 nt, synthetic construct
  misc_feature 1..20: note = antisense sequence
  source 1..20: mol_type = other RNA
catgtctccctcaggcttct

SEQ ID NO: 9091 - RNA, 20 nt, synthetic construct
  misc_feature 1..20: note = antisense sequence
  source 1..20: mol_type = other RNA
gcatgtctccctcaggcttc

SEQ ID NO: 9092 - RNA, 20 nt, synthetic construct
  misc_feature 1..20: note = antisense sequence
  source 1..20: mol_type = other RNA
tggctgcatgtctccctcag

SEQ ID NO: 9093 - RNA, 20 nt, synthetic construct
  misc_feature 1..20: note = antisense sequence
  source 1..20: mol_type = other RNA
gtatggctgcatgtctccct

SEQ ID NO: 9094 - RNA, 20 nt, synthetic construct
  misc_feature 1..20: note = antisense sequence
  source 1..20: mol_type = other RNA
ggtatggctgcatgtctccc

SEQ ID NO: 9095 - RNA, 20 nt, synthetic construct
  misc_feature 1..20: note = antisense sequence
  source 1..20: mol_type = other RNA
caaaggtatggctgcatgtc

SEQ ID NO: 9096 - RNA, 20 nt, synthetic construct
  misc_feature 1..20: note = antisense sequence
  source 1..20: mol_type = other RNA
acaaaggtatggctgcatgt

SEQ ID NO: 9097 - RNA, 20 nt, synthetic construct
  misc_feature 1..20: note = antisense sequence
  source 1..20: mol_type = other RNA
tgacaaaggtatggctgcat

SEQ ID NO: 9098 - RNA, 20 nt, synthetic construct
  misc_feature 1..20: note = antisense sequence
  source 1..20: mol_type = other RNA
ctgacaaaggtatggctgca

SEQ ID NO: 9099 - RNA, 20 nt, synthetic construct
  misc_feature 1..20: note = antisense sequence
  source 1..20: mol_type = other RNA
actgacaaaggtatggctgc

SEQ ID NO: 9100 - RNA, 20 nt, synthetic construct
  misc_feature 1..20: note = antisense sequence
  source 1..20: mol_type = other RNA
gactgacaaaggtatggctg

SEQ ID NO: 9101 - RNA, 20 nt, synthetic construct
  misc_feature 1..20: note = antisense sequence
  source 1..20: mol_type = other RNA
agactgacaaaggtatggct

SEQ ID NO: 9102 - RNA, 20 nt, synthetic construct
  misc_feature 1..20: note = antisense sequence
  source 1..20: mol_type = other RNA
cagactgacaaaggtatggc

SEQ ID NO: 9103 - RNA, 20 nt, synthetic construct
  misc_feature 1..20: note = antisense sequence
  source 1..20: mol_type = other RNA
gcagactgacaaaggtatgg

SEQ ID NO: 9104 - RNA, 20 nt, synthetic construct
  misc_feature 1..20: note = antisense sequence
  source 1..20: mol_type = other RNA
agcagactgacaaaggtatg

SEQ ID NO: 9105 - RNA, 20 nt, synthetic construct
  misc_feature 1..20: note = antisense sequence
  source 1..20: mol_type = other RNA
gtaagcagactgacaaaggt

SEQ ID NO: 9106 - RNA, 20 nt, synthetic construct
  misc_feature 1..20: note = antisense sequence
  source 1..20: mol_type = other RNA
ctgtaagcagactgacaaag

SEQ ID NO: 9107 - RNA, 20 nt, synthetic construct
  misc_feature 1..20: note = antisense sequence
  source 1..20: mol_type = other RNA
actgtaagcagactgacaaa

SEQ ID NO: 9108 - RNA, 20 nt, synthetic construct
  misc_feature 1..20: note = antisense sequence
  source 1..20: mol_type = other RNA
aactgtaagcagactgacaa

SEQ ID NO: 9109 - RNA, 20 nt, synthetic construct
  misc_feature 1..20: note = antisense sequence
  source 1..20: mol_type = other RNA
gaaactgtaagcagactgac

SEQ ID NO: 9110 - RNA, 20 nt, synthetic construct
  misc_feature 1..20: note = antisense sequence
  source 1..20: mol_type = other RNA
ggaaactgtaagcagactga

SEQ ID NO: 9111 - RNA, 20 nt, synthetic construct
  misc_feature 1..20: note = antisense sequence
  source 1..20: mol_type = other RNA
cggaaactgtaagcagactg

SEQ ID NO: 9112 - RNA, 20 nt, synthetic construct
  misc_feature 1..20: note = antisense sequence
  source 1..20: mol_type = other RNA
ttcggaaactgtaagcagac

SEQ ID NO: 9113 - RNA, 20 nt, synthetic construct
  misc_feature 1..20: note = antisense sequence
  source 1..20: mol_type = other RNA
attcggaaactgtaagcaga

SEQ ID NO: 9114 - RNA, 20 nt, synthetic construct
  misc_feature 1..20: note = antisense sequence
  source 1..20: mol_type = other RNA
cattcggaaactgtaagcag

SEQ ID NO: 9115 - RNA, 20 nt, synthetic construct
  misc_feature 1..20: note = antisense sequence
  source 1..20: mol_type = other RNA
acattcggaaactgtaagca

SEQ ID NO: 9116 - RNA, 20 nt, synthetic construct
  misc_feature 1..20: note = antisense sequence
  source 1..20: mol_type = other RNA
cacattcggaaactgtaagc

SEQ ID NO: 9117 - RNA, 20 nt, synthetic construct
  misc_feature 1..20: note = antisense sequence
  source 1..20: mol_type = other RNA
ccacattcggaaactgtaag

SEQ ID NO: 9118 - RNA, 20 nt, synthetic construct
  misc_feature 1..20: note = antisense sequence
  source 1..20: mol_type = other RNA
gagaatggagactagaggct

SEQ ID NO: 9119 - RNA, 20 nt, synthetic construct
  misc_feature 1..20: note = antisense sequence
  source 1..20: mol_type = other RNA
gggagaatggagactagagg

SEQ ID NO: 9120 - RNA, 20 nt, synthetic construct
  misc_feature 1..20: note = antisense sequence
  source 1..20: mol_type = other RNA
gtgggagaatggagactaga

SEQ ID NO: 9121 - RNA, 20 nt, synthetic construct
  misc_feature 1..20: note = antisense sequence
  source 1..20: mol_type = other RNA
tagtgcctgatggctggagg

SEQ ID NO: 9122 - RNA, 20 nt, synthetic construct
  misc_feature 1..20: note = antisense sequence
  source 1..20: mol_type = other RNA
attctagtgcctgatggctg

SEQ ID NO: 9123 - RNA, 20 nt, synthetic construct
  misc_feature 1..20: note = antisense sequence
  source 1..20: mol_type = other RNA
tattctagtgcctgatggct

SEQ ID NO: 9124 - RNA, 20 nt, synthetic construct
  misc_feature 1..20: note = antisense sequence
  source 1..20: mol_type = other RNA
ttattctagtgcctgatggc

SEQ ID NO: 9125 - RNA, 20 nt, synthetic construct
  misc_feature 1..20: note = antisense sequence
  source 1..20: mol_type = other RNA
attattctagtgcctgatgg

SEQ ID NO: 9126 - RNA, 20 nt, synthetic construct
  misc_feature 1..20: note = antisense sequence
  source 1..20: mol_type = other RNA
gattattctagtgcctgatg

SEQ ID NO: 9127 - RNA, 20 nt, synthetic construct
  misc_feature 1..20: note = antisense sequence
  source 1..20: mol_type = other RNA
gaactcacttcggaatgatt

SEQ ID NO: 9128 - RNA, 20 nt, synthetic construct
  misc_feature 1..20: note = antisense sequence
  source 1..20: mol_type = other RNA
tgaactcacttcggaatgat

SEQ ID NO: 9129 - RNA, 20 nt, synthetic construct
  misc_feature 1..20: note = antisense sequence
  source 1..20: mol_type = other RNA
ctgaactcacttcggaatga

SEQ ID NO: 9130 - RNA, 20 nt, synthetic construct
  misc_feature 1..20: note = antisense sequence
  source 1..20: mol_type = other RNA
tctgaactcacttcggaatg

SEQ ID NO: 9131 - RNA, 20 nt, synthetic construct
  misc_feature 1..20: note = antisense sequence
  source 1..20: mol_type = other RNA
ttctgaactcacttcggaat

SEQ ID NO: 9132 - RNA, 20 nt, synthetic construct
  misc_feature 1..20: note = antisense sequence
  source 1..20: mol_type = other RNA
gttctgaactcacttcggaa

SEQ ID NO: 9133 - RNA, 20 nt, synthetic construct
  misc_feature 1..20: note = antisense sequence
  source 1..20: mol_type = other RNA
tgttctgaactcacttcgga

SEQ ID NO: 9134 - RNA, 20 nt, synthetic construct
  misc_feature 1..20: note = antisense sequence
  source 1..20: mol_type = other RNA
atgttctgaactcacttcgg

SEQ ID NO: 9135 - RNA, 20 nt, synthetic construct
  misc_feature 1..20: note = antisense sequence
  source 1..20: mol_type = other RNA
aatgttctgaactcacttcg

SEQ ID NO: 9136 - RNA, 20 nt, synthetic construct
  misc_feature 1..20: note = antisense sequence
  source 1..20: mol_type = other RNA
cactagagagcttggatatt

SEQ ID NO: 9137 - RNA, 20 nt, synthetic construct
  misc_feature 1..20: note = antisense sequence
  source 1..20: mol_type = other RNA
ccactagagagcttggatat

SEQ ID NO: 9138 - RNA, 20 nt, synthetic construct
  misc_feature 1..20: note = antisense sequence
  source 1..20: mol_type = other RNA
tagtccactagagagcttgg

SEQ ID NO: 9139 - RNA, 20 nt, synthetic construct
  misc_feature 1..20: note = antisense sequence
  source 1..20: mol_type = other RNA
ttagtccactagagagcttg

SEQ ID NO: 9140 - RNA, 20 nt, synthetic construct
  misc_feature 1..20: note = antisense sequence
  source 1..20: mol_type = other RNA
gttagtccactagagagctt

SEQ ID NO: 9141 - RNA, 20 nt, synthetic construct
  misc_feature 1..20: note = antisense sequence
  source 1..20: mol_type = other RNA
agttagtccactagagagct

SEQ ID NO: 9142 - RNA, 20 nt, synthetic construct
  misc_feature 1..20: note = antisense sequence
  source 1..20: mol_type = other RNA
gcatgagaaatggctgggcc

SEQ ID NO: 9143 - RNA, 20 nt, synthetic construct
  misc_feature 1..20: note = antisense sequence
  source 1..20: mol_type = other RNA
ccatctcctccacccacaaa

SEQ ID NO: 9144 - RNA, 20 nt, synthetic construct
  misc_feature 1..20: note = antisense sequence
  source 1..20: mol_type = other RNA
ctgagatcggagcaaaactc

SEQ ID NO: 9145 - RNA, 20 nt, synthetic construct
  misc_feature 1..20: note = antisense sequence
  source 1..20: mol_type = other RNA
gctgagatcggagcaaaact

SEQ ID NO: 9146 - RNA, 20 nt, synthetic construct
  misc_feature 1..20: note = antisense sequence
  source 1..20: mol_type = other RNA
agctgagatcggagcaaaac

SEQ ID NO: 9147 - RNA, 20 nt, synthetic construct
  misc_feature 1..20: note = antisense sequence
  source 1..20: mol_type = other RNA
gagctgagatcggagcaaaa

SEQ ID NO: 9148 - RNA, 20 nt, synthetic construct
  misc_feature 1..20: note = antisense sequence
  source 1..20: mol_type = other RNA
tgagctgagatcggagcaaa

SEQ ID NO: 9149 - RNA, 20 nt, synthetic construct
  misc_feature 1..20: note = antisense sequence
  source 1..20: mol_type = other RNA
gtgagctgagatcggagcaa

SEQ ID NO: 9150 - RNA, 20 nt, synthetic construct
  misc_feature 1..20: note = antisense sequence
  source 1..20: mol_type = other RNA
agtgagctgagatcggagca

SEQ ID NO: 9151 - RNA, 20 nt, synthetic construct
  misc_feature 1..20: note = antisense sequence
  source 1..20: mol_type = other RNA
cagtgagctgagatcggagc

SEQ ID NO: 9152 - RNA, 20 nt, synthetic construct
  misc_feature 1..20: note = antisense sequence
  source 1..20: mol_type = other RNA
gcagtgagctgagatcggag

SEQ ID NO: 9153 - RNA, 20 nt, synthetic construct
  misc_feature 1..20: note = antisense sequence
  source 1..20: mol_type = other RNA
tgcagtgagctgagatcgga

SEQ ID NO: 9154 - RNA, 20 nt, synthetic construct
  misc_feature 1..20: note = antisense sequence
  source 1..20: mol_type = other RNA
ttgcagtgagctgagatcgg

SEQ ID NO: 9155 - RNA, 20 nt, synthetic construct
  misc_feature 1..20: note = antisense sequence
  source 1..20: mol_type = other RNA
gttgcagtgagctgagatcg

SEQ ID NO: 9156 - RNA, 20 nt, synthetic construct
  misc_feature 1..20: note = antisense sequence
  source 1..20: mol_type = other RNA
ggttgcagtgagctgagatc

SEQ ID NO: 9157 - RNA, 20 nt, synthetic construct
  misc_feature 1..20: note = antisense sequence
  source 1..20: mol_type = other RNA
aggttgcagtgagctgagat

SEQ ID NO: 9158 - RNA, 20 nt, synthetic construct
  misc_feature 1..20: note = antisense sequence
  source 1..20: mol_type = other RNA
gaggttgcagtgagctgaga

SEQ ID NO: 9159 - RNA, 20 nt, synthetic construct
  misc_feature 1..20: note = antisense sequence
  source 1..20: mol_type = other RNA
ggaggttgcagtgagctgag

SEQ ID NO: 9160 - RNA, 20 nt, synthetic construct
  misc_feature 1..20: note = antisense sequence
  source 1..20: mol_type = other RNA
cggaggttgcagtgagctga

SEQ ID NO: 9161 - RNA, 20 nt, synthetic construct
  misc_feature 1..20: note = antisense sequence
  source 1..20: mol_type = other RNA
ctgaggcaggagaatagctt

SEQ ID NO: 9162 - RNA, 20 nt, synthetic construct
  misc_feature 1..20: note = antisense sequence
  source 1..20: mol_type = other RNA
taagctactcgggagcctga

SEQ ID NO: 9163 - RNA, 20 nt, synthetic construct
  misc_feature 1..20: note = antisense sequence
  source 1..20: mol_type = other RNA
gtaagctactcgggagcctg

SEQ ID NO: 9164 - RNA, 20 nt, synthetic construct
  misc_feature 1..20: note = antisense sequence
  source 1..20: mol_type = other RNA
ggtaagctactcgggagcct

SEQ ID NO: 9165 - RNA, 20 nt, synthetic construct
  misc_feature 1..20: note = antisense sequence
  source 1..20: mol_type = other RNA
agggtaagctactcgggagc

SEQ ID NO: 9166 - RNA, 20 nt, synthetic construct
  misc_feature 1..20: note = antisense sequence
  source 1..20: mol_type = other RNA
aagggtaagctactcgggag

SEQ ID NO: 9167 - RNA, 20 nt, synthetic construct
  misc_feature 1..20: note = antisense sequence
  source 1..20: mol_type = other RNA
gaagggtaagctactcggga

SEQ ID NO: 9168 - RNA, 20 nt, synthetic construct
  misc_feature 1..20: note = antisense sequence
  source 1..20: mol_type = other RNA
tgaagggtaagctactcggg

SEQ ID NO: 9169 - RNA, 20 nt, synthetic construct
  misc_feature 1..20: note = antisense sequence
  source 1..20: mol_type = other RNA
ctgaagggtaagctactcgg

SEQ ID NO: 9170 - RNA, 20 nt, synthetic construct
  misc_feature 1..20: note = antisense sequence
  source 1..20: mol_type = other RNA
gctgaagggtaagctactcg

SEQ ID NO: 9171 - RNA, 20 nt, synthetic construct
  misc_feature 1..20: note = antisense sequence
  source 1..20: mol_type = other RNA
agggaatcacaggaaaagca

SEQ ID NO: 9172 - RNA, 20 nt, synthetic construct
  misc_feature 1..20: note = antisense sequence
  source 1..20: mol_type = other RNA
tggagcagggaatcacagga

SEQ ID NO: 9173 - RNA, 20 nt, synthetic construct
  misc_feature 1..20: note = antisense sequence
  source 1..20: mol_type = other RNA
atggagcagggaatcacagg

SEQ ID NO: 9174 - RNA, 20 nt, synthetic construct
  misc_feature 1..20: note = antisense sequence
  source 1..20: mol_type = other RNA
agatggagcagggaatcaca

SEQ ID NO: 9175 - RNA, 20 nt, synthetic construct
  misc_feature 1..20: note = antisense sequence
  source 1..20: mol_type = other RNA
gagatggagcagggaatcac

SEQ ID NO: 9176 - RNA, 20 nt, synthetic construct
  misc_feature 1..20: note = antisense sequence
  source 1..20: mol_type = other RNA
ttgagatggagcagggaatc

SEQ ID NO: 9177 - RNA, 20 nt, synthetic construct
  misc_feature 1..20: note = antisense sequence
  source 1..20: mol_type = other RNA
gcttgagatggagcagggaa

SEQ ID NO: 9178 - RNA, 20 nt, synthetic construct
  misc_feature 1..20: note = antisense sequence
  source 1..20: mol_type = other RNA
gtgggtaggataatcataga

SEQ ID NO: 9179 - RNA, 20 nt, synthetic construct
  misc_feature 1..20: note = antisense sequence
  source 1..20: mol_type = other RNA
agtgggtaggataatcatag

SEQ ID NO: 9180 - RNA, 20 nt, synthetic construct
  misc_feature 1..20: note = antisense sequence
  source 1..20: mol_type = other RNA
cagtgggtaggataatcata

SEQ ID NO: 9181 - RNA, 20 nt, synthetic construct
  misc_feature 1..20: note = antisense sequence
  source 1..20: mol_type = other RNA
acagtgggtaggataatcat

SEQ ID NO: 9182 - RNA, 20 nt, synthetic construct
  misc_feature 1..20: note = antisense sequence
  source 1..20: mol_type = other RNA
aacagtgggtaggataatca

SEQ ID NO: 9183 - RNA, 20 nt, synthetic construct
  misc_feature 1..20: note = antisense sequence
  source 1..20: mol_type = other RNA
gaacagtgggtaggataatc

SEQ ID NO: 9184 - RNA, 20 nt, synthetic construct
  misc_feature 1..20: note = antisense sequence
  source 1..20: mol_type = other RNA
agaacagtgggtaggataat

SEQ ID NO: 9185 - RNA, 20 nt, synthetic construct
  misc_feature 1..20: note = antisense sequence
  source 1..20: mol_type = other RNA
aagaacagtgggtaggataa

SEQ ID NO: 9186 - RNA, 20 nt, synthetic construct
  misc_feature 1..20: note = antisense sequence
  source 1..20: mol_type = other RNA
ttctcaagaacagtgggtag

SEQ ID NO: 9187 - RNA, 20 nt, synthetic construct
  misc_feature 1..20: note = antisense sequence
  source 1..20: mol_type = other RNA
gtgctctcacggttgcagct

SEQ ID NO: 9188 - RNA, 20 nt, synthetic construct
  misc_feature 1..20: note = antisense sequence
  source 1..20: mol_type = other RNA
tgtgctctcacggttgcagc

SEQ ID NO: 9189 - RNA, 20 nt, synthetic construct
  misc_feature 1..20: note = antisense sequence
  source 1..20: mol_type = other RNA
atgtgctctcacggttgcag

SEQ ID NO: 9190 - RNA, 20 nt, synthetic construct
  misc_feature 1..20: note = antisense sequence
  source 1..20: mol_type = other RNA
aatgtgctctcacggttgca

SEQ ID NO: 9191 - RNA, 20 nt, synthetic construct
  misc_feature 1..20: note = antisense sequence
  source 1..20: mol_type = other RNA
aaatgtgctctcacggttgc

SEQ ID NO: 9192 - RNA, 20 nt, synthetic construct
  misc_feature 1..20: note = antisense sequence
  source 1..20: mol_type = other RNA
gaaatgtgctctcacggttg

SEQ ID NO: 9193 - RNA, 20 nt, synthetic construct
  misc_feature 1..20: note = antisense sequence
  source 1..20: mol_type = other RNA
ggaaatgtgctctcacggtt

SEQ ID NO: 9194 - RNA, 20 nt, synthetic construct
  misc_feature 1..20: note = antisense sequence
  source 1..20: mol_type = other RNA
aggaaatgtgctctcacggt

SEQ ID NO: 9195 - RNA, 20 nt, synthetic construct
  misc_feature 1..20: note = antisense sequence
  source 1..20: mol_type = other RNA
gtaaggaaatgtgctctcac

SEQ ID NO: 9196 - RNA, 20 nt, synthetic construct
  misc_feature 1..20: note = antisense sequence
  source 1..20: mol_type = other RNA
agtaaggaaatgtgctctca

SEQ ID NO: 9197 - RNA, 20 nt, synthetic construct
  misc_feature 1..20: note = antisense sequence
  source 1..20: mol_type = other RNA
cagtaaggaaatgtgctctc

SEQ ID NO: 9198 - RNA, 20 nt, synthetic construct
  misc_feature 1..20: note = antisense sequence
  source 1..20: mol_type = other RNA
gcagtaaggaaatgtgctct

SEQ ID NO: 9199 - RNA, 20 nt, synthetic construct
  misc_feature 1..20: note = antisense sequence
  source 1..20: mol_type = other RNA
gagtgataagagcagtaagg

SEQ ID NO: 9200 - RNA, 20 nt, synthetic construct
  misc_feature 1..20: note = antisense sequence
  source 1..20: mol_type = other RNA
ctgagtgataagagcagtaa

SEQ ID NO: 9201 - RNA, 20 nt, synthetic construct
  misc_feature 1..20: note = antisense sequence
  source 1..20: mol_type = other RNA
caatgctactgagtgataag

SEQ ID NO: 9202 - RNA, 20 nt, synthetic construct
  misc_feature 1..20: note = antisense sequence
  source 1..20: mol_type = other RNA
gcaatgctactgagtgataa

SEQ ID NO: 9203 - RNA, 20 nt, synthetic construct
  misc_feature 1..20: note = antisense sequence
  source 1..20: mol_type = other RNA
gagcaatgctactgagtgat

SEQ ID NO: 9204 - RNA, 20 nt, synthetic construct
  misc_feature 1..20: note = antisense sequence
  source 1..20: mol_type = other RNA
agagcaatgctactgagtga

SEQ ID NO: 9205 - RNA, 20 nt, synthetic construct
  misc_feature 1..20: note = antisense sequence
  source 1..20: mol_type = other RNA
aagagcaatgctactgagtg

SEQ ID NO: 9206 - RNA, 20 nt, synthetic construct
  misc_feature 1..20: note = antisense sequence
  source 1..20: mol_type = other RNA
aaagagcaatgctactgagt

SEQ ID NO: 9207 - RNA, 20 nt, synthetic construct
  misc_feature 1..20: note = antisense sequence
  source 1..20: mol_type = other RNA
gactaaggcacaattctgtc

SEQ ID NO: 9208 - RNA, 20 nt, synthetic construct
  misc_feature 1..20: note = antisense sequence
  source 1..20: mol_type = other RNA
agactaaggcacaattctgt

SEQ ID NO: 9209 - RNA, 20 nt, synthetic construct
  misc_feature 1..20: note = antisense sequence
  source 1..20: mol_type = other RNA
aagactaaggcacaattctg

SEQ ID NO: 9210 - RNA, 20 nt, synthetic construct
  misc_feature 1..20: note = antisense sequence
  source 1..20: mol_type = other RNA
taagggaaagaggtcactaa

SEQ ID NO: 9211 - RNA, 20 nt, synthetic construct
  misc_feature 1..20: note = antisense sequence
  source 1..20: mol_type = other RNA
gtaagggaaagaggtcacta

SEQ ID NO: 9212 - RNA, 20 nt, synthetic construct
  misc_feature 1..20: note = antisense sequence
  source 1..20: mol_type = other RNA
aagtaagggaaagaggtcac

SEQ ID NO: 9213 - RNA, 20 nt, synthetic construct
  misc_feature 1..20: note = antisense sequence
  source 1..20: mol_type = other RNA
cagctcagtggatcaatatg

SEQ ID NO: 9214 - RNA, 20 nt, synthetic construct
  misc_feature 1..20: note = antisense sequence
  source 1..20: mol_type = other RNA
caagtaccttccagctcagt

SEQ ID NO: 9215 - RNA, 20 nt, synthetic construct
  misc_feature 1..20: note = antisense sequence
  source 1..20: mol_type = other RNA
gcaagtaccttccagctcag

SEQ ID NO: 9216 - RNA, 20 nt, synthetic construct
  misc_feature 1..20: note = antisense sequence
  source 1..20: mol_type = other RNA
caagcaagtaccttccagct

SEQ ID NO: 9217 - RNA, 20 nt, synthetic construct
  misc_feature 1..20: note = antisense sequence
  source 1..20: mol_type = other RNA
acaagcaagtaccttccagc

SEQ ID NO: 9218 - RNA, 20 nt, synthetic construct
  misc_feature 1..20: note = antisense sequence
  source 1..20: mol_type = other RNA
cacaagcaagtaccttccag

SEQ ID NO: 9219 - RNA, 20 nt, synthetic construct
  misc_feature 1..20: note = antisense sequence
  source 1..20: mol_type = other RNA
ccacaagcaagtaccttcca

SEQ ID NO: 9220 - RNA, 20 nt, synthetic construct
  misc_feature 1..20: note = antisense sequence
  source 1..20: mol_type = other RNA
cccacaagcaagtaccttcc

SEQ ID NO: 9221 - RNA, 20 nt, synthetic construct
  misc_feature 1..20: note = antisense sequence
  source 1..20: mol_type = other RNA
aacacctgcaaagaaaagac

SEQ ID NO: 9222 - RNA, 20 nt, synthetic construct
  misc_feature 1..20: note = antisense sequence
  source 1..20: mol_type = other RNA
tgggtaaacacctgcaaaga

SEQ ID NO: 9223 - RNA, 20 nt, synthetic construct
  misc_feature 1..20: note = antisense sequence
  source 1..20: mol_type = other RNA
gtgggtaaacacctgcaaag

SEQ ID NO: 9224 - RNA, 20 nt, synthetic construct
  misc_feature 1..20: note = antisense sequence
  source 1..20: mol_type = other RNA
agggctaggtgggtaaacac

SEQ ID NO: 9225 - RNA, 20 nt, synthetic construct
  misc_feature 1..20: note = antisense sequence
  source 1..20: mol_type = other RNA
tagggctaggtgggtaaaca

SEQ ID NO: 9226 - RNA, 20 nt, synthetic construct
  misc_feature 1..20: note = antisense sequence
  source 1..20: mol_type = other RNA
atagggctaggtgggtaaac

SEQ ID NO: 9227 - RNA, 20 nt, synthetic construct
  misc_feature 1..20: note = antisense sequence
  source 1..20: mol_type = other RNA
aatagggctaggtgggtaaa

SEQ ID NO: 9228 - RNA, 20 nt, synthetic construct
  misc_feature 1..20: note = antisense sequence
  source 1..20: mol_type = other RNA
gaatagggctaggtgggtaa

SEQ ID NO: 9229 - RNA, 20 nt, synthetic construct
  misc_feature 1..20: note = antisense sequence
  source 1..20: mol_type = other RNA
ggaatagggctaggtgggta

SEQ ID NO: 9230 - RNA, 20 nt, synthetic construct
  misc_feature 1..20: note = antisense sequence
  source 1..20: mol_type = other RNA
gggaatagggctaggtgggt

SEQ ID NO: 9231 - RNA, 20 nt, synthetic construct
  misc_feature 1..20: note = antisense sequence
  source 1..20: mol_type = other RNA
aggagaaattagggctgagg

SEQ ID NO: 9232 - RNA, 20 nt, synthetic construct
  misc_feature 1..20: note = antisense sequence
  source 1..20: mol_type = other RNA
taggagaaattagggctgag

SEQ ID NO: 9233 - RNA, 20 nt, synthetic construct
  misc_feature 1..20: note = antisense sequence
  source 1..20: mol_type = other RNA
ataggagaaattagggctga

SEQ ID NO: 9234 - RNA, 20 nt, synthetic construct
  misc_feature 1..20: note = antisense sequence
  source 1..20: mol_type = other RNA
tggagaagggcaagggctat

SEQ ID NO: 9235 - RNA, 20 nt, synthetic construct
  misc_feature 1..20: note = antisense sequence
  source 1..20: mol_type = other RNA
gcaaagataggagaggttaa

SEQ ID NO: 9236 - RNA, 20 nt, synthetic construct
  misc_feature 1..20: note = antisense sequence
  source 1..20: mol_type = other RNA
atgcaaagataggagaggtt

SEQ ID NO: 9237 - RNA, 20 nt, synthetic construct
  misc_feature 1..20: note = antisense sequence
  source 1..20: mol_type = other RNA
aaagtgacgtaggctcaaaa

SEQ ID NO: 9238 - RNA, 20 nt, synthetic construct
  misc_feature 1..20: note = antisense sequence
  source 1..20: mol_type = other RNA
gaaagtgacgtaggctcaaa

SEQ ID NO: 9239 - RNA, 20 nt, synthetic construct
  misc_feature 1..20: note = antisense sequence
  source 1..20: mol_type = other RNA
tgaaagtgacgtaggctcaa

SEQ ID NO: 9240 - RNA, 20 nt, synthetic construct
  misc_feature 1..20: note = antisense sequence
  source 1..20: mol_type = other RNA
atgaaagtgacgtaggctca

SEQ ID NO: 9241 - RNA, 20 nt, synthetic construct
  misc_feature 1..20: note = antisense sequence
  source 1..20: mol_type = other RNA
aatgaaagtgacgtaggctc

SEQ ID NO: 9242 - RNA, 20 nt, synthetic construct
  misc_feature 1..20: note = antisense sequence
  source 1..20: mol_type = other RNA
caatgaaagtgacgtaggct

SEQ ID NO: 9243 - RNA, 20 nt, synthetic construct
  misc_feature 1..20: note = antisense sequence
  source 1..20: mol_type = other RNA
acaatgaaagtgacgtaggc

SEQ ID NO: 9244 - RNA, 20 nt, synthetic construct
  misc_feature 1..20: note = antisense sequence
  source 1..20: mol_type = other RNA
tacaatgaaagtgacgtagg

SEQ ID NO: 9245 - RNA, 20 nt, synthetic construct
  misc_feature 1..20: note = antisense sequence
  source 1..20: mol_type = other RNA
gctacaatgaaagtgacgta

SEQ ID NO: 9246 - RNA, 20 nt, synthetic construct
  misc_feature 1..20: note = antisense sequence
  source 1..20: mol_type = other RNA
tgctacaatgaaagtgacgt

SEQ ID NO: 9247 - RNA, 20 nt, synthetic construct
  misc_feature 1..20: note = antisense sequence
  source 1..20: mol_type = other RNA
atgctacaatgaaagtgacg

SEQ ID NO: 9248 - RNA, 20 nt, synthetic construct
  misc_feature 1..20: note = antisense sequence
  source 1..20: mol_type = other RNA
gatgctacaatgaaagtgac

SEQ ID NO: 9249 - RNA, 20 nt, synthetic construct
  misc_feature 1..20: note = antisense sequence
  source 1..20: mol_type = other RNA
tctttatctggactcttgct

SEQ ID NO: 9250 - RNA, 20 nt, synthetic construct
  misc_feature 1..20: note = antisense sequence
  source 1..20: mol_type = other RNA
atctttatctggactcttgc

SEQ ID NO: 9251 - RNA, 20 nt, synthetic construct
  misc_feature 1..20: note = antisense sequence
  source 1..20: mol_type = other RNA
ggtatctttatctggactct

SEQ ID NO: 9252 - RNA, 20 nt, synthetic construct
  misc_feature 1..20: note = antisense sequence
  source 1..20: mol_type = other RNA
gggtatctttatctggactc

SEQ ID NO: 9253 - RNA, 20 nt, synthetic construct
  misc_feature 1..20: note = antisense sequence
  source 1..20: mol_type = other RNA
agggtatctttatctggact

SEQ ID NO: 9254 - RNA, 20 nt, synthetic construct
  misc_feature 1..20: note = antisense sequence
  source 1..20: mol_type = other RNA
ggaaacaagtgttcagaaac

SEQ ID NO: 9255 - RNA, 20 nt, synthetic construct
  misc_feature 1..20: note = antisense sequence
  source 1..20: mol_type = other RNA
gactgatttacaggtagatg

SEQ ID NO: 9256 - RNA, 20 nt, synthetic construct
  misc_feature 1..20: note = antisense sequence
  source 1..20: mol_type = other RNA
ggactgatttacaggtagat

SEQ ID NO: 9257 - RNA, 20 nt, synthetic construct
  misc_feature 1..20: note = antisense sequence
  source 1..20: mol_type = other RNA
gggactgatttacaggtaga

SEQ ID NO: 9258 - RNA, 20 nt, synthetic construct
  misc_feature 1..20: note = antisense sequence
  source 1..20: mol_type = other RNA
tgggactgatttacaggtag

SEQ ID NO: 9259 - RNA, 20 nt, synthetic construct
  misc_feature 1..20: note = antisense sequence
  source 1..20: mol_type = other RNA
atgggactgatttacaggta

SEQ ID NO: 9260 - RNA, 20 nt, synthetic construct
  misc_feature 1..20: note = antisense sequence
  source 1..20: mol_type = other RNA
aatgggactgatttacaggt

SEQ ID NO: 9261 - RNA, 20 nt, synthetic construct
  misc_feature 1..20: note = antisense sequence
  source 1..20: mol_type = other RNA
gagggatataaatgggactg

SEQ ID NO: 9262 - RNA, 20 nt, synthetic construct
  misc_feature 1..20: note = antisense sequence
  source 1..20: mol_type = other RNA
agagggatataaatgggact

SEQ ID NO: 9263 - RNA, 20 nt, synthetic construct
  misc_feature 1..20: note = antisense sequence
  source 1..20: mol_type = other RNA
aagagggatataaatgggac

SEQ ID NO: 9264 - RNA, 20 nt, synthetic construct
  misc_feature 1..20: note = antisense sequence
  source 1..20: mol_type = other RNA
cagaggctaggtttaacatt

SEQ ID NO: 9265 - RNA, 20 nt, synthetic construct
  misc_feature 1..20: note = antisense sequence
  source 1..20: mol_type = other RNA
gcagaggctaggtttaacat

SEQ ID NO: 9266 - RNA, 20 nt, synthetic construct
  misc_feature 1..20: note = antisense sequence
  source 1..20: mol_type = other RNA
agcagaggctaggtttaaca

SEQ ID NO: 9267 - RNA, 20 nt, synthetic construct
  misc_feature 1..20: note = antisense sequence
  source 1..20: mol_type = other RNA
ccattctgaagctatgttag

SEQ ID NO: 9268 - RNA, 20 nt, synthetic construct
  misc_feature 1..20: note = antisense sequence
  source 1..20: mol_type = other RNA
caaaccattctgaagctatg

SEQ ID NO: 9269 - RNA, 20 nt, synthetic construct
  misc_feature 1..20: note = antisense sequence
  source 1..20: mol_type = other RNA
agcacaaaccattctgaagc

SEQ ID NO: 9270 - RNA, 20 nt, synthetic construct
  misc_feature 1..20: note = antisense sequence
  source 1..20: mol_type = other RNA
tagcacaaaccattctgaag

SEQ ID NO: 9271 - RNA, 20 nt, synthetic construct
  misc_feature 1..20: note = antisense sequence
  source 1..20: mol_type = other RNA
tgttagcacaaaccattctg

SEQ ID NO: 9272 - RNA, 20 nt, synthetic construct
  misc_feature 1..20: note = antisense sequence
  source 1..20: mol_type = other RNA
ctgttagcacaaaccattct

SEQ ID NO: 9273 - RNA, 20 nt, synthetic construct
  misc_feature 1..20: note = antisense sequence
  source 1..20: mol_type = other RNA
actgttagcacaaaccattc

SEQ ID NO: 9274 - RNA, 20 nt, synthetic construct
  misc_feature 1..20: note = antisense sequence
  source 1..20: mol_type = other RNA
tgcttccagtgtgactaagt

SEQ ID NO: 9275 - RNA, 20 nt, synthetic construct
  misc_feature 1..20: note = antisense sequence
  source 1..20: mol_type = other RNA
aacatgcttccagtgtgact

SEQ ID NO: 9276 - RNA, 20 nt, synthetic construct
  misc_feature 1..20: note = antisense sequence
  source 1..20: mol_type = other RNA
caacatgcttccagtgtgac

SEQ ID NO: 9277 - RNA, 20 nt, synthetic construct
  misc_feature 1..20: note = antisense sequence
  source 1..20: mol_type = other RNA
acaacatgcttccagtgtga

SEQ ID NO: 9278 - RNA, 20 nt, synthetic construct
  misc_feature 1..20: note = antisense sequence
  source 1..20: mol_type = other RNA
tacaacatgcttccagtgtg

SEQ ID NO: 9279 - RNA, 20 nt, synthetic construct
  misc_feature 1..20: note = antisense sequence
  source 1..20: mol_type = other RNA
ctacaacatgcttccagtgt

SEQ ID NO: 9280 - RNA, 20 nt, synthetic construct
  misc_feature 1..20: note = antisense sequence
  source 1..20: mol_type = other RNA
cctacaacatgcttccagtg

SEQ ID NO: 9281 - RNA, 20 nt, synthetic construct
  misc_feature 1..20: note = antisense sequence
  source 1..20: mol_type = other RNA
ccctacaacatgcttccagt

SEQ ID NO: 9282 - RNA, 20 nt, synthetic construct
  misc_feature 1..20: note = antisense sequence
  source 1..20: mol_type = other RNA
accctacaacatgcttccag

SEQ ID NO: 9283 - RNA, 20 nt, synthetic construct
  misc_feature 1..20: note = antisense sequence
  source 1..20: mol_type = other RNA
taccctacaacatgcttcca

SEQ ID NO: 9284 - RNA, 20 nt, synthetic construct
  misc_feature 1..20: note = antisense sequence
  source 1..20: mol_type = other RNA
ctaccctacaacatgcttcc

SEQ ID NO: 9285 - RNA, 20 nt, synthetic construct
  misc_feature 1..20: note = antisense sequence
  source 1..20: mol_type = other RNA
cctaccctacaacatgcttc

SEQ ID NO: 9286 - RNA, 20 nt, synthetic construct
  misc_feature 1..20: note = antisense sequence
  source 1..20: mol_type = other RNA
ccctaccctacaacatgctt

SEQ ID NO: 9287 - RNA, 20 nt, synthetic construct
  misc_feature 1..20: note = antisense sequence
  source 1..20: mol_type = other RNA
gccctaccctacaacatgct

SEQ ID NO: 9288 - RNA, 20 nt, synthetic construct
  misc_feature 1..20: note = antisense sequence
  source 1..20: mol_type = other RNA
gtacaaagccctaccctaca

SEQ ID NO: 9289 - RNA, 20 nt, synthetic construct
  misc_feature 1..20: note = antisense sequence
  source 1..20: mol_type = other RNA
actatggtacaaagccctac

SEQ ID NO: 9290 - RNA, 20 nt, synthetic construct
  misc_feature 1..20: note = antisense sequence
  source 1..20: mol_type = other RNA
aactatggtacaaagcccta

SEQ ID NO: 9291 - RNA, 20 nt, synthetic construct
  misc_feature 1..20: note = antisense sequence
  source 1..20: mol_type = other RNA
aaactatggtacaaagccct

SEQ ID NO: 9292 - RNA, 20 nt, synthetic construct
  misc_feature 1..20: note = antisense sequence
  source 1..20: mol_type = other RNA
caaactatggtacaaagccc

SEQ ID NO: 9293 - RNA, 20 nt, synthetic construct
  misc_feature 1..20: note = antisense sequence
  source 1..20: mol_type = other RNA
tcaaactatggtacaaagcc

SEQ ID NO: 9294 - RNA, 20 nt, synthetic construct
  misc_feature 1..20: note = antisense sequence
  source 1..20: mol_type = other RNA
ctcaggctttatgtctggcc

SEQ ID NO: 9295 - RNA, 20 nt, synthetic construct
  misc_feature 1..20: note = antisense sequence
  source 1..20: mol_type = other RNA
gttcctgtaagatgcacaat

SEQ ID NO: 9296 - RNA, 20 nt, synthetic construct
  misc_feature 1..20: note = antisense sequence
  source 1..20: mol_type = other RNA
tgttcctgtaagatgcacaa

SEQ ID NO: 9297 - RNA, 20 nt, synthetic construct
  misc_feature 1..20: note = antisense sequence
  source 1..20: mol_type = other RNA
gtgttcctgtaagatgcaca

SEQ ID NO: 9298 - RNA, 20 nt, synthetic construct
  misc_feature 1..20: note = antisense sequence
  source 1..20: mol_type = other RNA
tgtgttcctgtaagatgcac

SEQ ID NO: 9299 - RNA, 20 nt, synthetic construct
  misc_feature 1..20: note = antisense sequence
  source 1..20: mol_type = other RNA
ttgtgtgttcctgtaagatg

SEQ ID NO: 9300 - RNA, 20 nt, synthetic construct
  misc_feature 1..20: note = antisense sequence
  source 1..20: mol_type = other RNA
caaggtgaaacaatgaggtg

SEQ ID NO: 9301 - RNA, 20 nt, synthetic construct
  misc_feature 1..20: note = antisense sequence
  source 1..20: mol_type = other RNA
acaaggtgaaacaatgaggt

SEQ ID NO: 9302 - RNA, 20 nt, synthetic construct
  misc_feature 1..20: note = antisense sequence
  source 1..20: mol_type = other RNA
tgacaaggtgaaacaatgag

SEQ ID NO: 9303 - RNA, 20 nt, synthetic construct
  misc_feature 1..20: note = antisense sequence
  source 1..20: mol_type = other RNA
gtttctgggctttcattcaa

SEQ ID NO: 9304 - RNA, 20 nt, synthetic construct
  misc_feature 1..20: note = antisense sequence
  source 1..20: mol_type = other RNA
ataagctaagtttctgggct

SEQ ID NO: 9305 - RNA, 20 nt, synthetic construct
  misc_feature 1..20: note = antisense sequence
  source 1..20: mol_type = other RNA
gttacaccagcacccaaatt

SEQ ID NO: 9306 - RNA, 20 nt, synthetic construct
  misc_feature 1..20: note = antisense sequence
  source 1..20: mol_type = other RNA
gtcagggttacaccagcacc

SEQ ID NO: 9307 - RNA, 20 nt, synthetic construct
  misc_feature 1..20: note = antisense sequence
  source 1..20: mol_type = other RNA
agtcagggttacaccagcac

SEQ ID NO: 9308 - RNA, 20 nt, synthetic construct
  misc_feature 1..20: note = antisense sequence
  source 1..20: mol_type = other RNA
taagtcagggttacaccagc

SEQ ID NO: 9309 - RNA, 20 nt, synthetic construct
  misc_feature 1..20: note = antisense sequence
  source 1..20: mol_type = other RNA
ttaagtcagggttacaccag

SEQ ID NO: 9310 - RNA, 20 nt, synthetic construct
  misc_feature 1..20: note = antisense sequence
  source 1..20: mol_type = other RNA
cttgttaagtcagggttaca

SEQ ID NO: 9311 - RNA, 20 nt, synthetic construct
  misc_feature 1..20: note = antisense sequence
  source 1..20: mol_type = other RNA
tcttgttaagtcagggttac

SEQ ID NO: 9312 - RNA, 20 nt, synthetic construct
  misc_feature 1..20: note = antisense sequence
  source 1..20: mol_type = other RNA
ctatcttgttaagtcagggt

SEQ ID NO: 9313 - RNA, 20 nt, synthetic construct
  misc_feature 1..20: note = antisense sequence
  source 1..20: mol_type = other RNA
tctatcttgttaagtcaggg

SEQ ID NO: 9314 - RNA, 20 nt, synthetic construct
  misc_feature 1..20: note = antisense sequence
  source 1..20: mol_type = other RNA
gagttatgaaggaatggagt

SEQ ID NO: 9315 - RNA, 20 nt, synthetic construct
  misc_feature 1..20: note = antisense sequence
  source 1..20: mol_type = other RNA
gcaacagaaactcaactagg

SEQ ID NO: 9316 - RNA, 20 nt, synthetic construct
  misc_feature 1..20: note = antisense sequence
  source 1..20: mol_type = other RNA
catgagctaaataatccacc

SEQ ID NO: 9317 - RNA, 20 nt, synthetic construct
  misc_feature 1..20: note = antisense sequence
  source 1..20: mol_type = other RNA
accctatcttggccctccca

SEQ ID NO: 9318 - RNA, 20 nt, synthetic construct
  misc_feature 1..20: note = antisense sequence
  source 1..20: mol_type = other RNA
tatgacccaagcgcaaggcc

SEQ ID NO: 9319 - RNA, 20 nt, synthetic construct
  misc_feature 1..20: note = antisense sequence
  source 1..20: mol_type = other RNA
ttatgacccaagcgcaaggc

SEQ ID NO: 9320 - RNA, 20 nt, synthetic construct
  misc_feature 1..20: note = antisense sequence
  source 1..20: mol_type = other RNA
gttatgacccaagcgcaagg

SEQ ID NO: 9321 - RNA, 20 nt, synthetic construct
  misc_feature 1..20: note = antisense sequence
  source 1..20: mol_type = other RNA
tgttatgacccaagcgcaag

SEQ ID NO: 9322 - RNA, 20 nt, synthetic construct
  misc_feature 1..20: note = antisense sequence
  source 1..20: mol_type = other RNA
atgttatgacccaagcgcaa

SEQ ID NO: 9323 - RNA, 20 nt, synthetic construct
  misc_feature 1..20: note = antisense sequence
  source 1..20: mol_type = other RNA
catgttatgacccaagcgca

SEQ ID NO: 9324 - RNA, 20 nt, synthetic construct
  misc_feature 1..20: note = antisense sequence
  source 1..20: mol_type = other RNA
ccatgttatgacccaagcgc

SEQ ID NO: 9325 - RNA, 20 nt, synthetic construct
  misc_feature 1..20: note = antisense sequence
  source 1..20: mol_type = other RNA
accatgttatgacccaagcg

SEQ ID NO: 9326 - RNA, 20 nt, synthetic construct
  misc_feature 1..20: note = antisense sequence
  source 1..20: mol_type = other RNA
acgtggctgcttccattcct

SEQ ID NO: 9327 - RNA, 20 nt, synthetic construct
  misc_feature 1..20: note = antisense sequence
  source 1..20: mol_type = other RNA
gttacaaagcgaggctgcct

SEQ ID NO: 9328 - RNA, 20 nt, synthetic construct
  misc_feature 1..20: note = antisense sequence
  source 1..20: mol_type = other RNA
tgttacaaagcgaggctgcc

SEQ ID NO: 9329 - RNA, 20 nt, synthetic construct
  misc_feature 1..20: note = antisense sequence
  source 1..20: mol_type = other RNA
ttgttacaaagcgaggctgc

SEQ ID NO: 9330 - RNA, 20 nt, synthetic construct
  misc_feature 1..20: note = antisense sequence
  source 1..20: mol_type = other RNA
gttgttacaaagcgaggctg

SEQ ID NO: 9331 - RNA, 20 nt, synthetic construct
  misc_feature 1..20: note = antisense sequence
  source 1..20: mol_type = other RNA
ggttgttacaaagcgaggct

SEQ ID NO: 9332 - RNA, 20 nt, synthetic construct
  misc_feature 1..20: note = antisense sequence
  source 1..20: mol_type = other RNA
aggttgttacaaagcgaggc

SEQ ID NO: 9333 - RNA, 20 nt, synthetic construct
  misc_feature 1..20: note = antisense sequence
  source 1..20: mol_type = other RNA
caggttgttacaaagcgagg

SEQ ID NO: 9334 - RNA, 20 nt, synthetic construct
  misc_feature 1..20: note = antisense sequence
  source 1..20: mol_type = other RNA
acaggttgttacaaagcgag

SEQ ID NO: 9335 - RNA, 20 nt, synthetic construct
  misc_feature 1..20: note = antisense sequence
  source 1..20: mol_type = other RNA
tactacaagagaacaggttg

SEQ ID NO: 9336 - RNA, 20 nt, synthetic construct
  misc_feature 1..20: note = antisense sequence
  source 1..20: mol_type = other RNA
gttactacaagagaacaggt

SEQ ID NO: 9337 - RNA, 20 nt, synthetic construct
  misc_feature 1..20: note = antisense sequence
  source 1..20: mol_type = other RNA
agttactacaagagaacagg

SEQ ID NO: 9338 - RNA, 20 nt, synthetic construct
  misc_feature 1..20: note = antisense sequence
  source 1..20: mol_type = other RNA
gctggattagttactacaag

SEQ ID NO: 9339 - RNA, 20 nt, synthetic construct
  misc_feature 1..20: note = antisense sequence
  source 1..20: mol_type = other RNA
ggctggattagttactacaa

SEQ ID NO: 9340 - RNA, 20 nt, synthetic construct
  misc_feature 1..20: note = antisense sequence
  source 1..20: mol_type = other RNA
gggctggattagttactaca

SEQ ID NO: 9341 - RNA, 20 nt, synthetic construct
  misc_feature 1..20: note = antisense sequence
  source 1..20: mol_type = other RNA
gggactttatcacaggagtg

SEQ ID NO: 9342 - RNA, 20 nt, synthetic construct
  misc_feature 1..20: note = antisense sequence
  source 1..20: mol_type = other RNA
agggactttatcacaggagt

SEQ ID NO: 9343 - RNA, 20 nt, synthetic construct
  misc_feature 1..20: note = antisense sequence
  source 1..20: mol_type = other RNA
gagggactttatcacaggag

SEQ ID NO: 9344 - RNA, 20 nt, synthetic construct
  misc_feature 1..20: note = antisense sequence
  source 1..20: mol_type = other RNA
agagggactttatcacagga

SEQ ID NO: 9345 - RNA, 20 nt, synthetic construct
  misc_feature 1..20: note = antisense sequence
  source 1..20: mol_type = other RNA
aagagggactttatcacagg

SEQ ID NO: 9346 - RNA, 20 nt, synthetic construct
  misc_feature 1..20: note = antisense sequence
  source 1..20: mol_type = other RNA
caagagggactttatcacag

SEQ ID NO: 9347 - RNA, 20 nt, synthetic construct
  misc_feature 1..20: note = antisense sequence
  source 1..20: mol_type = other RNA
tcaagagggactttatcaca

SEQ ID NO: 9348 - RNA, 20 nt, synthetic construct
  misc_feature 1..20: note = antisense sequence
  source 1..20: mol_type = other RNA
gtcaagagggactttatcac

SEQ ID NO: 9349 - RNA, 20 nt, synthetic construct
  misc_feature 1..20: note = antisense sequence
  source 1..20: mol_type = other RNA
tctgctacagcttgaatatg

SEQ ID NO: 9350 - RNA, 20 nt, synthetic construct
  misc_feature 1..20: note = antisense sequence
  source 1..20: mol_type = other RNA
gtttctgctacagcttgaat

SEQ ID NO: 9351 - RNA, 20 nt, synthetic construct
  misc_feature 1..20: note = antisense sequence
  source 1..20: mol_type = other RNA
atgtttctgctacagcttga

SEQ ID NO: 9352 - RNA, 20 nt, synthetic construct
  misc_feature 1..20: note = antisense sequence
  source 1..20: mol_type = other RNA
tatgtttctgctacagcttg

SEQ ID NO: 9353 - RNA, 20 nt, synthetic construct
  misc_feature 1..20: note = antisense sequence
  source 1..20: mol_type = other RNA
gctatgtttctgctacagct

SEQ ID NO: 9354 - RNA, 20 nt, synthetic construct
  misc_feature 1..20: note = antisense sequence
  source 1..20: mol_type = other RNA
agctatgtttctgctacagc

SEQ ID NO: 9355 - RNA, 20 nt, synthetic construct
  misc_feature 1..20: note = antisense sequence
  source 1..20: mol_type = other RNA
gccttttggattagtctctt

SEQ ID NO: 9356 - RNA, 20 nt, synthetic construct
  misc_feature 1..20: note = antisense sequence
  source 1..20: mol_type = other RNA
ggccttttggattagtctct

SEQ ID NO: 9357 - RNA, 20 nt, synthetic construct
  misc_feature 1..20: note = antisense sequence
  source 1..20: mol_type = other RNA
gggccttttggattagtctc

SEQ ID NO: 9358 - RNA, 20 nt, synthetic construct
  misc_feature 1..20: note = antisense sequence
  source 1..20: mol_type = other RNA
gagggccttttggattagtc

SEQ ID NO: 9359 - RNA, 20 nt, synthetic construct
  misc_feature 1..20: note = antisense sequence
  source 1..20: mol_type = other RNA
ggagggccttttggattagt

SEQ ID NO: 9360 - RNA, 20 nt, synthetic construct
  misc_feature 1..20: note = antisense sequence
  source 1..20: mol_type = other RNA
aggagggccttttggattag

SEQ ID NO: 9361 - RNA, 20 nt, synthetic construct
  misc_feature 1..20: note = antisense sequence
  source 1..20: mol_type = other RNA
aaacactgaaaggagggcct

SEQ ID NO: 9362 - RNA, 20 nt, synthetic construct
  misc_feature 1..20: note = antisense sequence
  source 1..20: mol_type = other RNA
gacactatcagaaaacactg

SEQ ID NO: 9363 - RNA, 20 nt, synthetic construct
  misc_feature 1..20: note = antisense sequence
  source 1..20: mol_type = other RNA
gaaggacactatcagaaaac

SEQ ID NO: 9364 - RNA, 20 nt, synthetic construct
  misc_feature 1..20: note = antisense sequence
  source 1..20: mol_type = other RNA
ggaaggacactatcagaaaa

SEQ ID NO: 9365 - RNA, 20 nt, synthetic construct
  misc_feature 1..20: note = antisense sequence
  source 1..20: mol_type = other RNA
aaggaaggacactatcagaa

SEQ ID NO: 9366 - RNA, 20 nt, synthetic construct
  misc_feature 1..20: note = antisense sequence
  source 1..20: mol_type = other RNA
aaaggaaggacactatcaga

SEQ ID NO: 9367 - RNA, 20 nt, synthetic construct
  misc_feature 1..20: note = antisense sequence
  source 1..20: mol_type = other RNA
gaaaggaaggacactatcag

SEQ ID NO: 9368 - RNA, 20 nt, synthetic construct
  misc_feature 1..20: note = antisense sequence
  source 1..20: mol_type = other RNA
tgaaaggaaggacactatca

SEQ ID NO: 9369 - RNA, 20 nt, synthetic construct
  misc_feature 1..20: note = antisense sequence
  source 1..20: mol_type = other RNA
atgaaaggaaggacactatc

SEQ ID NO: 9370 - RNA, 20 nt, synthetic construct
  misc_feature 1..20: note = antisense sequence
  source 1..20: mol_type = other RNA
agtgtgtgaacatgaaagga

SEQ ID NO: 9371 - RNA, 20 nt, synthetic construct
  misc_feature 1..20: note = antisense sequence
  source 1..20: mol_type = other RNA
gagtgtgtgaacatgaaagg

SEQ ID NO: 9372 - RNA, 20 nt, synthetic construct
  misc_feature 1..20: note = antisense sequence
  source 1..20: mol_type = other RNA
gagaaaagtgagtgtgtgaa

SEQ ID NO: 9373 - RNA, 20 nt, synthetic construct
  misc_feature 1..20: note = antisense sequence
  source 1..20: mol_type = other RNA
ggagaaaagtgagtgtgtga

SEQ ID NO: 9374 - RNA, 20 nt, synthetic construct
  misc_feature 1..20: note = antisense sequence
  source 1..20: mol_type = other RNA
agggagaaaagtgagtgtgt

SEQ ID NO: 9375 - RNA, 20 nt, synthetic construct
  misc_feature 1..20: note = antisense sequence
  source 1..20: mol_type = other RNA
gatcgtccagacactttata

SEQ ID NO: 9376 - RNA, 20 nt, synthetic construct
  misc_feature 1..20: note = antisense sequence
  source 1..20: mol_type = other RNA
tgatcgtccagacactttat

SEQ ID NO: 9377 - RNA, 20 nt, synthetic construct
  misc_feature 1..20: note = antisense sequence
  source 1..20: mol_type = other RNA
ttgatcgtccagacacttta

SEQ ID NO: 9378 - RNA, 20 nt, synthetic construct
  misc_feature 1..20: note = antisense sequence
  source 1..20: mol_type = other RNA
cttgatcgtccagacacttt

SEQ ID NO: 9379 - RNA, 20 nt, synthetic construct
  misc_feature 1..20: note = antisense sequence
  source 1..20: mol_type = other RNA
acttgatcgtccagacactt

SEQ ID NO: 9380 - RNA, 20 nt, synthetic construct
  misc_feature 1..20: note = antisense sequence
  source 1..20: mol_type = other RNA
tacttgatcgtccagacact

SEQ ID NO: 9381 - RNA, 20 nt, synthetic construct
  misc_feature 1..20: note = antisense sequence
  source 1..20: mol_type = other RNA
atacttgatcgtccagacac

SEQ ID NO: 9382 - RNA, 20 nt, synthetic construct
  misc_feature 1..20: note = antisense sequence
  source 1..20: mol_type = other RNA
aatacttgatcgtccagaca

SEQ ID NO: 9383 - RNA, 20 nt, synthetic construct
  misc_feature 1..20: note = antisense sequence
  source 1..20: mol_type = other RNA
taatacttgatcgtccagac

SEQ ID NO: 9384 - RNA, 20 nt, synthetic construct
  misc_feature 1..20: note = antisense sequence
  source 1..20: mol_type = other RNA
cataatacttgatcgtccag

SEQ ID NO: 9385 - RNA, 20 nt, synthetic construct
  misc_feature 1..20: note = antisense sequence
  source 1..20: mol_type = other RNA
gcataatacttgatcgtcca

SEQ ID NO: 9386 - RNA, 20 nt, synthetic construct
  misc_feature 1..20: note = antisense sequence
  source 1..20: mol_type = other RNA
agcataatacttgatcgtcc

SEQ ID NO: 9387 - RNA, 20 nt, synthetic construct
  misc_feature 1..20: note = antisense sequence
  source 1..20: mol_type = other RNA
cctagcataatacttgatcg

SEQ ID NO: 9388 - RNA, 20 nt, synthetic construct
  misc_feature 1..20: note = antisense sequence
  source 1..20: mol_type = other RNA
gacacctagcataatacttg

SEQ ID NO: 9389 - RNA, 20 nt, synthetic construct
  misc_feature 1..20: note = antisense sequence
  source 1..20: mol_type = other RNA
cttgacacctagcataatac

SEQ ID NO: 9390 - RNA, 20 nt, synthetic construct
  misc_feature 1..20: note = antisense sequence
  source 1..20: mol_type = other RNA
ctcttgacacctagcataat

SEQ ID NO: 9391 - RNA, 20 nt, synthetic construct
  misc_feature 1..20: note = antisense sequence
  source 1..20: mol_type = other RNA
gctcttgacacctagcataa

SEQ ID NO: 9392 - RNA, 20 nt, synthetic construct
  misc_feature 1..20: note = antisense sequence
  source 1..20: mol_type = other RNA
tattgctcttgacacctagc

SEQ ID NO: 9393 - RNA, 20 nt, synthetic construct
  misc_feature 1..20: note = antisense sequence
  source 1..20: mol_type = other RNA
ttattgctcttgacacctag

SEQ ID NO: 9394 - RNA, 20 nt, synthetic construct
  misc_feature 1..20: note = antisense sequence
  source 1..20: mol_type = other RNA
tcaggaacaacatttcagtg

SEQ ID NO: 9395 - RNA, 20 nt, synthetic construct
  misc_feature 1..20: note = antisense sequence
  source 1..20: mol_type = other RNA
gggaaacaatgttctacaac

SEQ ID NO: 9396 - RNA, 20 nt, synthetic construct
  misc_feature 1..20: note = antisense sequence
  source 1..20: mol_type = other RNA
actgggaaacaatgttctac

SEQ ID NO: 9397 - RNA, 20 nt, synthetic construct
  misc_feature 1..20: note = antisense sequence
  source 1..20: mol_type = other RNA
ttcaacacctcagactggga

SEQ ID NO: 9398 - RNA, 20 nt, synthetic construct
  misc_feature 1..20: note = antisense sequence
  source 1..20: mol_type = other RNA
tattcaacacctcagactgg

SEQ ID NO: 9399 - RNA, 20 nt, synthetic construct
  misc_feature 1..20: note = antisense sequence
  source 1..20: mol_type = other RNA
atattcaacacctcagactg

SEQ ID NO: 9400 - RNA, 20 nt, synthetic construct
  misc_feature 1..20: note = antisense sequence
  source 1..20: mol_type = other RNA
tcatattcaacacctcagac

SEQ ID NO: 9401 - RNA, 20 nt, synthetic construct
  misc_feature 1..20: note = antisense sequence
  source 1..20: mol_type = other RNA
aggatcatattcaacacctc

SEQ ID NO: 9402 - RNA, 20 nt, synthetic construct
  misc_feature 1..20: note = antisense sequence
  source 1..20: mol_type = other RNA
gaggatcatattcaacacct

SEQ ID NO: 9403 - RNA, 20 nt, synthetic construct
  misc_feature 1..20: note = antisense sequence
  source 1..20: mol_type = other RNA
tgaggatcatattcaacacc

SEQ ID NO: 9404 - RNA, 20 nt, synthetic construct
  misc_feature 1..20: note = antisense sequence
  source 1..20: mol_type = other RNA
gtgaggatcatattcaacac

SEQ ID NO: 9405 - RNA, 20 nt, synthetic construct
  misc_feature 1..20: note = antisense sequence
  source 1..20: mol_type = other RNA
ggattactaattggaagacc

SEQ ID NO: 9406 - RNA, 20 nt, synthetic construct
  misc_feature 1..20: note = antisense sequence
  source 1..20: mol_type = other RNA
cctatccctacttgttctat

SEQ ID NO: 9407 - RNA, 20 nt, synthetic construct
  misc_feature 1..20: note = antisense sequence
  source 1..20: mol_type = other RNA
actcctatccctacttgttc

SEQ ID NO: 9408 - RNA, 20 nt, synthetic construct
  misc_feature 1..20: note = antisense sequence
  source 1..20: mol_type = other RNA
tactcctatccctacttgtt

SEQ ID NO: 9409 - RNA, 20 nt, synthetic construct
  misc_feature 1..20: note = antisense sequence
  source 1..20: mol_type = other RNA
ttactcctatccctacttgt

SEQ ID NO: 9410 - RNA, 20 nt, synthetic construct
  misc_feature 1..20: note = antisense sequence
  source 1..20: mol_type = other RNA
cttactcctatccctacttg

SEQ ID NO: 9411 - RNA, 20 nt, synthetic construct
  misc_feature 1..20: note = antisense sequence
  source 1..20: mol_type = other RNA
ttctcttactcctatcccta

SEQ ID NO: 9412 - RNA, 20 nt, synthetic construct
  misc_feature 1..20: note = antisense sequence
  source 1..20: mol_type = other RNA
ggtgcaaaagagtaaggttt

SEQ ID NO: 9413 - RNA, 20 nt, synthetic construct
  misc_feature 1..20: note = antisense sequence
  source 1..20: mol_type = other RNA
acctttctcctatcactatg

SEQ ID NO: 9414 - RNA, 20 nt, synthetic construct
  misc_feature 1..20: note = antisense sequence
  source 1..20: mol_type = other RNA
ctacctttctcctatcacta

SEQ ID NO: 9415 - RNA, 20 nt, synthetic construct
  misc_feature 1..20: note = antisense sequence
  source 1..20: mol_type = other RNA
gcatccctttgtatgttact

SEQ ID NO: 9416 - RNA, 20 nt, synthetic construct
  misc_feature 1..20: note = antisense sequence
  source 1..20: mol_type = other RNA
ctagcatccctttgtatgtt

SEQ ID NO: 9417 - RNA, 20 nt, synthetic construct
  misc_feature 1..20: note = antisense sequence
  source 1..20: mol_type = other RNA
actagcatccctttgtatgt

SEQ ID NO: 9418 - RNA, 20 nt, synthetic construct
  misc_feature 1..20: note = antisense sequence
  source 1..20: mol_type = other RNA
gaatactagcatccctttgt

SEQ ID NO: 9419 - RNA, 20 nt, synthetic construct
  misc_feature 1..20: note = antisense sequence
  source 1..20: mol_type = other RNA
ggaatactagcatccctttg

SEQ ID NO: 9420 - RNA, 20 nt, synthetic construct
  misc_feature 1..20: note = antisense sequence
  source 1..20: mol_type = other RNA
cacacaaatatccactcact

SEQ ID NO: 9421 - RNA, 20 nt, synthetic construct
  misc_feature 1..20: note = antisense sequence
  source 1..20: mol_type = other RNA
tcatattttctggtaagccc

SEQ ID NO: 9422 - RNA, 20 nt, synthetic construct
  misc_feature 1..20: note = antisense sequence
  source 1..20: mol_type = other RNA
gcatacatcaggtacacaat

SEQ ID NO: 9423 - RNA, 20 nt, synthetic construct
  misc_feature 1..20: note = antisense sequence
  source 1..20: mol_type = other RNA
ggcatacatcaggtacacaa

SEQ ID NO: 9424 - RNA, 20 nt, synthetic construct
  misc_feature 1..20: note = antisense sequence
  source 1..20: mol_type = other RNA
atggcatacatcaggtacac

SEQ ID NO: 9425 - RNA, 20 nt, synthetic construct
  misc_feature 1..20: note = antisense sequence
  source 1..20: mol_type = other RNA
tatggcatacatcaggtaca

SEQ ID NO: 9426 - RNA, 20 nt, synthetic construct
  misc_feature 1..20: note = antisense sequence
  source 1..20: mol_type = other RNA
ctatggcatacatcaggtac

SEQ ID NO: 9427 - RNA, 20 nt, synthetic construct
  misc_feature 1..20: note = antisense sequence
  source 1..20: mol_type = other RNA
gctatggcatacatcaggta

SEQ ID NO: 9428 - RNA, 20 nt, synthetic construct
  misc_feature 1..20: note = antisense sequence
  source 1..20: mol_type = other RNA
aggctatggcatacatcagg

SEQ ID NO: 9429 - RNA, 20 nt, synthetic construct
  misc_feature 1..20: note = antisense sequence
  source 1..20: mol_type = other RNA
caggctatggcatacatcag

SEQ ID NO: 9430 - RNA, 20 nt, synthetic construct
  misc_feature 1..20: note = antisense sequence
  source 1..20: mol_type = other RNA
tcaggctatggcatacatca

SEQ ID NO: 9431 - RNA, 20 nt, synthetic construct
  misc_feature 1..20: note = antisense sequence
  source 1..20: mol_type = other RNA
attcaggctatggcatacat

SEQ ID NO: 9432 - RNA, 20 nt, synthetic construct
  misc_feature 1..20: note = antisense sequence
  source 1..20: mol_type = other RNA
gattcaggctatggcataca

SEQ ID NO: 9433 - RNA, 20 nt, synthetic construct
  misc_feature 1..20: note = antisense sequence
  source 1..20: mol_type = other RNA
tgattcaggctatggcatac

SEQ ID NO: 9434 - RNA, 20 nt, synthetic construct
  misc_feature 1..20: note = antisense sequence
  source 1..20: mol_type = other RNA
ctgattcaggctatggcata

SEQ ID NO: 9435 - RNA, 20 nt, synthetic construct
  misc_feature 1..20: note = antisense sequence
  source 1..20: mol_type = other RNA
gctgattcaggctatggcat

SEQ ID NO: 9436 - RNA, 20 nt, synthetic construct
  misc_feature 1..20: note = antisense sequence
  source 1..20: mol_type = other RNA
ggctgattcaggctatggca

SEQ ID NO: 9437 - RNA, 20 nt, synthetic construct
  misc_feature 1..20: note = antisense sequence
  source 1..20: mol_type = other RNA
aggctgattcaggctatggc

SEQ ID NO: 9438 - RNA, 20 nt, synthetic construct
  misc_feature 1..20: note = antisense sequence
  source 1..20: mol_type = other RNA
aaggctgattcaggctatgg

SEQ ID NO: 9439 - RNA, 20 nt, synthetic construct
  misc_feature 1..20: note = antisense sequence
  source 1..20: mol_type = other RNA
aaaggctgattcaggctatg

SEQ ID NO: 9440 - RNA, 20 nt, synthetic construct
  misc_feature 1..20: note = antisense sequence
  source 1..20: mol_type = other RNA
taaaggctgattcaggctat

SEQ ID NO: 9441 - RNA, 20 nt, synthetic construct
  misc_feature 1..20: note = antisense sequence
  source 1..20: mol_type = other RNA
ctaaaggctgattcaggcta

SEQ ID NO: 9442 - RNA, 20 nt, synthetic construct
  misc_feature 1..20: note = antisense sequence
  source 1..20: mol_type = other RNA
acctaaaggctgattcaggc

SEQ ID NO: 9443 - RNA, 20 nt, synthetic construct
  misc_feature 1..20: note = antisense sequence
  source 1..20: mol_type = other RNA
agagacctaaaggctgattc

SEQ ID NO: 9444 - RNA, 20 nt, synthetic construct
  misc_feature 1..20: note = antisense sequence
  source 1..20: mol_type = other RNA
aagagacctaaaggctgatt

SEQ ID NO: 9445 - RNA, 20 nt, synthetic construct
  misc_feature 1..20: note = antisense sequence
  source 1..20: mol_type = other RNA
aaagagacctaaaggctgat

SEQ ID NO: 9446 - RNA, 20 nt, synthetic construct
  misc_feature 1..20: note = antisense sequence
  source 1..20: mol_type = other RNA
ccaaagagacctaaaggctg

SEQ ID NO: 9447 - RNA, 20 nt, synthetic construct
  misc_feature 1..20: note = antisense sequence
  source 1..20: mol_type = other RNA
gccaaagagacctaaaggct

SEQ ID NO: 9448 - RNA, 20 nt, synthetic construct
  misc_feature 1..20: note = antisense sequence
  source 1..20: mol_type = other RNA
aaggccaaagagacctaaag

SEQ ID NO: 9449 - RNA, 20 nt, synthetic construct
  misc_feature 1..20: note = antisense sequence
  source 1..20: mol_type = other RNA
caaggccaaagagacctaaa

SEQ ID NO: 9450 - RNA, 20 nt, synthetic construct
  misc_feature 1..20: note = antisense sequence
  source 1..20: mol_type = other RNA
ccaaggccaaagagacctaa

SEQ ID NO: 9451 - RNA, 20 nt, synthetic construct
  misc_feature 1..20: note = antisense sequence
  source 1..20: mol_type = other RNA
tccaaggccaaagagaccta

SEQ ID NO: 9452 - RNA, 20 nt, synthetic construct
  misc_feature 1..20: note = antisense sequence
  source 1..20: mol_type = other RNA
aatccaaggccaaagagacc

SEQ ID NO: 9453 - RNA, 20 nt, synthetic construct
  misc_feature 1..20: note = antisense sequence
  source 1..20: mol_type = other RNA
caatccaaggccaaagagac

SEQ ID NO: 9454 - RNA, 20 nt, synthetic construct
  misc_feature 1..20: note = antisense sequence
  source 1..20: mol_type = other RNA
acaatccaaggccaaagaga

SEQ ID NO: 9455 - RNA, 20 nt, synthetic construct
  misc_feature 1..20: note = antisense sequence
  source 1..20: mol_type = other RNA
tacaatccaaggccaaagag

SEQ ID NO: 9456 - RNA, 20 nt, synthetic construct
  misc_feature 1..20: note = antisense sequence
  source 1..20: mol_type = other RNA
ttacaatccaaggccaaaga

SEQ ID NO: 9457 - RNA, 20 nt, synthetic construct
  misc_feature 1..20: note = antisense sequence
  source 1..20: mol_type = other RNA
attacaatccaaggccaaag

SEQ ID NO: 9458 - RNA, 20 nt, synthetic construct
  misc_feature 1..20: note = antisense sequence
  source 1..20: mol_type = other RNA
gaaaggatacatttacctcc

SEQ ID NO: 9459 - RNA, 20 nt, synthetic construct
  misc_feature 1..20: note = antisense sequence
  source 1..20: mol_type = other RNA
cacatgcagaaggaaaattc

SEQ ID NO: 9460 - RNA, 20 nt, synthetic construct
  misc_feature 1..20: note = antisense sequence
  source 1..20: mol_type = other RNA
ggagtcacatgcagaaggaa

SEQ ID NO: 9461 - RNA, 20 nt, synthetic construct
  misc_feature 1..20: note = antisense sequence
  source 1..20: mol_type = other RNA
ataaggagtcacatgcagaa

SEQ ID NO: 9462 - RNA, 20 nt, synthetic construct
  misc_feature 1..20: note = antisense sequence
  source 1..20: mol_type = other RNA
gataaggagtcacatgcaga

SEQ ID NO: 9463 - RNA, 20 nt, synthetic construct
  misc_feature 1..20: note = antisense sequence
  source 1..20: mol_type = other RNA
ggataaggagtcacatgcag

SEQ ID NO: 9464 - RNA, 20 nt, synthetic construct
  misc_feature 1..20: note = antisense sequence
  source 1..20: mol_type = other RNA
gggataaggagtcacatgca

SEQ ID NO: 9465 - RNA, 20 nt, synthetic construct
  misc_feature 1..20: note = antisense sequence
  source 1..20: mol_type = other RNA
agcagtttgtggtatcagta

SEQ ID NO: 9466 - RNA, 20 nt, synthetic construct
  misc_feature 1..20: note = antisense sequence
  source 1..20: mol_type = other RNA
gagcagtttgtggtatcagt

SEQ ID NO: 9467 - RNA, 20 nt, synthetic construct
  misc_feature 1..20: note = antisense sequence
  source 1..20: mol_type = other RNA
agagcagtttgtggtatcag

SEQ ID NO: 9468 - RNA, 20 nt, synthetic construct
  misc_feature 1..20: note = antisense sequence
  source 1..20: mol_type = other RNA
aagagcagtttgtggtatca

SEQ ID NO: 9469 - RNA, 20 nt, synthetic construct
  misc_feature 1..20: note = antisense sequence
  source 1..20: mol_type = other RNA
aaagagcagtttgtggtatc

SEQ ID NO: 9470 - RNA, 20 nt, synthetic construct
  misc_feature 1..20: note = antisense sequence
  source 1..20: mol_type = other RNA
tgtaaagagcagtttgtggt

SEQ ID NO: 9471 - RNA, 20 nt, synthetic construct
  misc_feature 1..20: note = antisense sequence
  source 1..20: mol_type = other RNA
ttgtaaagagcagtttgtgg

SEQ ID NO: 9472 - RNA, 20 nt, synthetic construct
  misc_feature 1..20: note = antisense sequence
  source 1..20: mol_type = other RNA
cagagattgtaaagagcagt

SEQ ID NO: 9473 - RNA, 20 nt, synthetic construct
  misc_feature 1..20: note = antisense sequence
  source 1..20: mol_type = other RNA
cccagagattgtaaagagca

SEQ ID NO: 9474 - RNA, 20 nt, synthetic construct
  misc_feature 1..20: note = antisense sequence
  source 1..20: mol_type = other RNA
tcccagagattgtaaagagc

SEQ ID NO: 9475 - RNA, 20 nt, synthetic construct
  misc_feature 1..20: note = antisense sequence
  source 1..20: mol_type = other RNA
ttcccagagattgtaaagag

SEQ ID NO: 9476 - RNA, 20 nt, synthetic construct
  misc_feature 1..20: note = antisense sequence
  source 1..20: mol_type = other RNA
tggacattctttcccagaga

SEQ ID NO: 9477 - RNA, 20 nt, synthetic construct
  misc_feature 1..20: note = antisense sequence
  source 1..20: mol_type = other RNA
gtggacattctttcccagag

SEQ ID NO: 9478 - RNA, 20 nt, synthetic construct
  misc_feature 1..20: note = antisense sequence
  source 1..20: mol_type = other RNA
tgtggacattctttcccaga

SEQ ID NO: 9479 - RNA, 20 nt, synthetic construct
  misc_feature 1..20: note = antisense sequence
  source 1..20: mol_type = other RNA
ggtatgcagggatgacagct

SEQ ID NO: 9480 - RNA, 20 nt, synthetic construct
  misc_feature 1..20: note = antisense sequence
  source 1..20: mol_type = other RNA
gggtatgcagggatgacagc

SEQ ID NO: 9481 - RNA, 20 nt, synthetic construct
  misc_feature 1..20: note = antisense sequence
  source 1..20: mol_type = other RNA
atgggtatgcagggatgaca

SEQ ID NO: 9482 - RNA, 20 nt, synthetic construct
  misc_feature 1..20: note = antisense sequence
  source 1..20: mol_type = other RNA
aatgggtatgcagggatgac

SEQ ID NO: 9483 - RNA, 20 nt, synthetic construct
  misc_feature 1..20: note = antisense sequence
  source 1..20: mol_type = other RNA
aaatgggtatgcagggatga

SEQ ID NO: 9484 - RNA, 20 nt, synthetic construct
  misc_feature 1..20: note = antisense sequence
  source 1..20: mol_type = other RNA
gaaatgggtatgcagggatg

SEQ ID NO: 9485 - RNA, 20 nt, synthetic construct
  misc_feature 1..20: note = antisense sequence
  source 1..20: mol_type = other RNA
agaaatgggtatgcagggat

SEQ ID NO: 9486 - RNA, 20 nt, synthetic construct
  misc_feature 1..20: note = antisense sequence
  source 1..20: mol_type = other RNA
tagaaatgggtatgcaggga

SEQ ID NO: 9487 - RNA, 20 nt, synthetic construct
  misc_feature 1..20: note = antisense sequence
  source 1..20: mol_type = other RNA
atagaaatgggtatgcaggg

SEQ ID NO: 9488 - RNA, 20 nt, synthetic construct
  misc_feature 1..20: note = antisense sequence
  source 1..20: mol_type = other RNA
aatagaaatgggtatgcagg

SEQ ID NO: 9489 - RNA, 20 nt, synthetic construct
  misc_feature 1..20: note = antisense sequence
  source 1..20: mol_type = other RNA
gaatagaaatgggtatgcag

SEQ ID NO: 9490 - RNA, 20 nt, synthetic construct
  misc_feature 1..20: note = antisense sequence
  source 1..20: mol_type = other RNA
atggaggtggaaatatccta

SEQ ID NO: 9491 - RNA, 20 nt, synthetic construct
  misc_feature 1..20: note = antisense sequence
  source 1..20: mol_type = other RNA
tggaagttggatagagagct

SEQ ID NO: 9492 - RNA, 20 nt, synthetic construct
  misc_feature 1..20: note = antisense sequence
  source 1..20: mol_type = other RNA
gtggaagttggatagagagc

SEQ ID NO: 9493 - RNA, 20 nt, synthetic construct
  misc_feature 1..20: note = antisense sequence
  source 1..20: mol_type = other RNA
ggtggaagttggatagagag

SEQ ID NO: 9494 - RNA, 20 nt, synthetic construct
  misc_feature 1..20: note = antisense sequence
  source 1..20: mol_type = other RNA
atggtggaagttggatagag

SEQ ID NO: 9495 - RNA, 20 nt, synthetic construct
  misc_feature 1..20: note = antisense sequence
  source 1..20: mol_type = other RNA
agatggtggaagttggatag

SEQ ID NO: 9496 - RNA, 20 nt, synthetic construct
  misc_feature 1..20: note = antisense sequence
  source 1..20: mol_type = other RNA
cagatggtggaagttggata

SEQ ID NO: 9497 - RNA, 20 nt, synthetic construct
  misc_feature 1..20: note = antisense sequence
  source 1..20: mol_type = other RNA
tcagatggtggaagttggat

SEQ ID NO: 9498 - RNA, 20 nt, synthetic construct
  misc_feature 1..20: note = antisense sequence
  source 1..20: mol_type = other RNA
gtcagatggtggaagttgga

SEQ ID NO: 9499 - RNA, 20 nt, synthetic construct
  misc_feature 1..20: note = antisense sequence
  source 1..20: mol_type = other RNA
acaaaagtcagatggtggaa

SEQ ID NO: 9500 - RNA, 20 nt, synthetic construct
  misc_feature 1..20: note = antisense sequence
  source 1..20: mol_type = other RNA
gatacaaaagtcagatggtg

SEQ ID NO: 9501 - RNA, 20 nt, synthetic construct
  misc_feature 1..20: note = antisense sequence
  source 1..20: mol_type = other RNA
gggatgatacaaaagtcaga

SEQ ID NO: 9502 - RNA, 20 nt, synthetic construct
  misc_feature 1..20: note = antisense sequence
  source 1..20: mol_type = other RNA
cgttgggatgatacaaaagt

SEQ ID NO: 9503 - RNA, 20 nt, synthetic construct
  misc_feature 1..20: note = antisense sequence
  source 1..20: mol_type = other RNA
acgttgggatgatacaaaag

SEQ ID NO: 9504 - RNA, 20 nt, synthetic construct
  misc_feature 1..20: note = antisense sequence
  source 1..20: mol_type = other RNA
caattacgttgggatgatac

SEQ ID NO: 9505 - RNA, 20 nt, synthetic construct
  misc_feature 1..20: note = antisense sequence
  source 1..20: mol_type = other RNA
tgaagtagccaattacgttg

SEQ ID NO: 9506 - RNA, 20 nt, synthetic construct
  misc_feature 1..20: note = antisense sequence
  source 1..20: mol_type = other RNA
cttgaagtagccaattacgt

SEQ ID NO: 9507 - RNA, 20 nt, synthetic construct
  misc_feature 1..20: note = antisense sequence
  source 1..20: mol_type = other RNA
gacttgaagtagccaattac

SEQ ID NO: 9508 - RNA, 20 nt, synthetic construct
  misc_feature 1..20: note = antisense sequence
  source 1..20: mol_type = other RNA
tcatcctagaaattgagagg

SEQ ID NO: 9509 - RNA, 20 nt, synthetic construct
  misc_feature 1..20: note = antisense sequence
  source 1..20: mol_type = other RNA
gtcatcctagaaattgagag

SEQ ID NO: 9510 - RNA, 20 nt, synthetic construct
  misc_feature 1..20: note = antisense sequence
  source 1..20: mol_type = other RNA
ggagtttaagtcatcctaga

SEQ ID NO: 9511 - RNA, 20 nt, synthetic construct
  misc_feature 1..20: note = antisense sequence
  source 1..20: mol_type = other RNA
aagtggccctcagcctggaa

SEQ ID NO: 9512 - RNA, 20 nt, synthetic construct
  misc_feature 1..20: note = antisense sequence
  source 1..20: mol_type = other RNA
aaagtggccctcagcctgga

SEQ ID NO: 9513 - RNA, 20 nt, synthetic construct
  misc_feature 1..20: note = antisense sequence
  source 1..20: mol_type = other RNA
aacaaagtggccctcagcct

SEQ ID NO: 9514 - RNA, 20 nt, synthetic construct
  misc_feature 1..20: note = antisense sequence
  source 1..20: mol_type = other RNA
ggaaacaaagtggccctcag

SEQ ID NO: 9515 - RNA, 20 nt, synthetic construct
  misc_feature 1..20: note = antisense sequence
  source 1..20: mol_type = other RNA
aggaaacaaagtggccctca

SEQ ID NO: 9516 - RNA, 20 nt, synthetic construct
  misc_feature 1..20: note = antisense sequence
  source 1..20: mol_type = other RNA
aaggaaacaaagtggccctc

SEQ ID NO: 9517 - RNA, 20 nt, synthetic construct
  misc_feature 1..20: note = antisense sequence
  source 1..20: mol_type = other RNA
gaaggaaacaaagtggccct

SEQ ID NO: 9518 - RNA, 20 nt, synthetic construct
  misc_feature 1..20: note = antisense sequence
  source 1..20: mol_type = other RNA
atctgaaagccagctcaaaa

SEQ ID NO: 9519 - RNA, 20 nt, synthetic construct
  misc_feature 1..20: note = antisense sequence
  source 1..20: mol_type = other RNA
aatctgaaagccagctcaaa

SEQ ID NO: 9520 - RNA, 20 nt, synthetic construct
  misc_feature 1..20: note = antisense sequence
  source 1..20: mol_type = other RNA
gaatctgaaagccagctcaa

SEQ ID NO: 9521 - RNA, 20 nt, synthetic construct
  misc_feature 1..20: note = antisense sequence
  source 1..20: mol_type = other RNA
tgaatctgaaagccagctca

SEQ ID NO: 9522 - RNA, 20 nt, synthetic construct
  misc_feature 1..20: note = antisense sequence
  source 1..20: mol_type = other RNA
ctgaatctgaaagccagctc

SEQ ID NO: 9523 - RNA, 20 nt, synthetic construct
  misc_feature 1..20: note = antisense sequence
  source 1..20: mol_type = other RNA
tcctgaatctgaaagccagc

SEQ ID NO: 9524 - RNA, 20 nt, synthetic construct
  misc_feature 1..20: note = antisense sequence
  source 1..20: mol_type = other RNA
cttcctgaatctgaaagcca

SEQ ID NO: 9525 - RNA, 20 nt, synthetic construct
  misc_feature 1..20: note = antisense sequence
  source 1..20: mol_type = other RNA
ctcaaggaggaaggaggatt

SEQ ID NO: 9526 - RNA, 20 nt, synthetic construct
  misc_feature 1..20: note = antisense sequence
  source 1..20: mol_type = other RNA
catatttattctctcccacg

SEQ ID NO: 9527 - RNA, 20 nt, synthetic construct
  misc_feature 1..20: note = antisense sequence
  source 1..20: mol_type = other RNA
aaagtgagccaagtgatgaa

SEQ ID NO: 9528 - RNA, 20 nt, synthetic construct
  misc_feature 1..20: note = antisense sequence
  source 1..20: mol_type = other RNA
cccatttcaccttagcttat

SEQ ID NO: 9529 - RNA, 20 nt, synthetic construct
  misc_feature 1..20: note = antisense sequence
  source 1..20: mol_type = other RNA
gttcccatttcaccttagct

SEQ ID NO: 9530 - RNA, 20 nt, synthetic construct
  misc_feature 1..20: note = antisense sequence
  source 1..20: mol_type = other RNA
tagttcccatttcaccttag

SEQ ID NO: 9531 - RNA, 20 nt, synthetic construct
  misc_feature 1..20: note = antisense sequence
  source 1..20: mol_type = other RNA
agagatagttcccatttcac

SEQ ID NO: 9532 - RNA, 20 nt, synthetic construct
  misc_feature 1..20: note = antisense sequence
  source 1..20: mol_type = other RNA
cagagatagttcccatttca

SEQ ID NO: 9533 - RNA, 20 nt, synthetic construct
  misc_feature 1..20: note = antisense sequence
  source 1..20: mol_type = other RNA
tcaacagagatagttcccat

SEQ ID NO: 9534 - RNA, 20 nt, synthetic construct
  misc_feature 1..20: note = antisense sequence
  source 1..20: mol_type = other RNA
tacagacaagggtcaaatca

SEQ ID NO: 9535 - RNA, 20 nt, synthetic construct
  misc_feature 1..20: note = antisense sequence
  source 1..20: mol_type = other RNA
tcattacagacaagggtcaa

SEQ ID NO: 9536 - RNA, 20 nt, synthetic construct
  misc_feature 1..20: note = antisense sequence
  source 1..20: mol_type = other RNA
ttcattacagacaagggtca

SEQ ID NO: 9537 - RNA, 20 nt, synthetic construct
  misc_feature 1..20: note = antisense sequence
  source 1..20: mol_type = other RNA
tttcattacagacaagggtc

SEQ ID NO: 9538 - RNA, 20 nt, synthetic construct
  misc_feature 1..20: note = antisense sequence
  source 1..20: mol_type = other RNA
caattactttggcactaacc

SEQ ID NO: 9539 - RNA, 20 nt, synthetic construct
  misc_feature 1..20: note = antisense sequence
  source 1..20: mol_type = other RNA
aggtgtgctgtgagtcttcc

SEQ ID NO: 9540 - RNA, 20 nt, synthetic construct
  misc_feature 1..20: note = antisense sequence
  source 1..20: mol_type = other RNA
taaggtgtgctgtgagtctt

SEQ ID NO: 9541 - RNA, 20 nt, synthetic construct
  misc_feature 1..20: note = antisense sequence
  source 1..20: mol_type = other RNA
agtaaggtgtgctgtgagtc

SEQ ID NO: 9542 - RNA, 20 nt, synthetic construct
  misc_feature 1..20: note = antisense sequence
  source 1..20: mol_type = other RNA
gagtaaggtgtgctgtgagt

SEQ ID NO: 9543 - RNA, 20 nt, synthetic construct
  misc_feature 1..20: note = antisense sequence
  source 1..20: mol_type = other RNA
agagtaaggtgtgctgtgag

SEQ ID NO: 9544 - RNA, 20 nt, synthetic construct
  misc_feature 1..20: note = antisense sequence
  source 1..20: mol_type = other RNA
aagagtaaggtgtgctgtga

SEQ ID NO: 9545 - RNA, 20 nt, synthetic construct
  misc_feature 1..20: note = antisense sequence
  source 1..20: mol_type = other RNA
aaagagtaaggtgtgctgtg

SEQ ID NO: 9546 - RNA, 20 nt, synthetic construct
  misc_feature 1..20: note = antisense sequence
  source 1..20: mol_type = other RNA
agttccctggctgataccgg

SEQ ID NO: 9547 - RNA, 20 nt, synthetic construct
  misc_feature 1..20: note = antisense sequence
  source 1..20: mol_type = other RNA
tagttccctggctgataccg

SEQ ID NO: 9548 - RNA, 20 nt, synthetic construct
  misc_feature 1..20: note = antisense sequence
  source 1..20: mol_type = other RNA
gtagttccctggctgatacc

SEQ ID NO: 9549 - RNA, 20 nt, synthetic construct
  misc_feature 1..20: note = antisense sequence
  source 1..20: mol_type = other RNA
atgtagttccctggctgata

SEQ ID NO: 9550 - RNA, 20 nt, synthetic construct
  misc_feature 1..20: note = antisense sequence
  source 1..20: mol_type = other RNA
aatgtagttccctggctgat

SEQ ID NO: 9551 - RNA, 20 nt, synthetic construct
  misc_feature 1..20: note = antisense sequence
  source 1..20: mol_type = other RNA
caatgtagttccctggctga

SEQ ID NO: 9552 - RNA, 20 nt, synthetic construct
  misc_feature 1..20: note = antisense sequence
  source 1..20: mol_type = other RNA
ttcaatgtagttccctggct

SEQ ID NO: 9553 - RNA, 20 nt, synthetic construct
  misc_feature 1..20: note = antisense sequence
  source 1..20: mol_type = other RNA
cattcaatgtagttccctgg

SEQ ID NO: 9554 - RNA, 20 nt, synthetic construct
  misc_feature 1..20: note = antisense sequence
  source 1..20: mol_type = other RNA
agtctcagggaaatgacatt

SEQ ID NO: 9555 - RNA, 20 nt, synthetic construct
  misc_feature 1..20: note = antisense sequence
  source 1..20: mol_type = other RNA
aactcaagtctcagggaaat

SEQ ID NO: 9556 - RNA, 20 nt, synthetic construct
  misc_feature 1..20: note = antisense sequence
  source 1..20: mol_type = other RNA
aaaactcaagtctcagggaa

SEQ ID NO: 9557 - RNA, 20 nt, synthetic construct
  misc_feature 1..20: note = antisense sequence
  source 1..20: mol_type = other RNA
gaagagggagcagtggaaaa

SEQ ID NO: 9558 - RNA, 20 nt, synthetic construct
  misc_feature 1..20: note = antisense sequence
  source 1..20: mol_type = other RNA
acaacgaagtctgggaaatg

SEQ ID NO: 9559 - RNA, 20 nt, synthetic construct
  misc_feature 1..20: note = antisense sequence
  source 1..20: mol_type = other RNA
tacaacgaagtctgggaaat

SEQ ID NO: 9560 - RNA, 20 nt, synthetic construct
  misc_feature 1..20: note = antisense sequence
  source 1..20: mol_type = other RNA
atacaacgaagtctgggaaa

SEQ ID NO: 9561 - RNA, 20 nt, synthetic construct
  misc_feature 1..20: note = antisense sequence
  source 1..20: mol_type = other RNA
gatacaacgaagtctgggaa

SEQ ID NO: 9562 - RNA, 20 nt, synthetic construct
  misc_feature 1..20: note = antisense sequence
  source 1..20: mol_type = other RNA
agatacaacgaagtctggga

SEQ ID NO: 9563 - RNA, 20 nt, synthetic construct
  misc_feature 1..20: note = antisense sequence
  source 1..20: mol_type = other RNA
gagatacaacgaagtctggg

SEQ ID NO: 9564 - RNA, 20 nt, synthetic construct
  misc_feature 1..20: note = antisense sequence
  source 1..20: mol_type = other RNA
gagagatacaacgaagtctg

SEQ ID NO: 9565 - RNA, 20 nt, synthetic construct
  misc_feature 1..20: note = antisense sequence
  source 1..20: mol_type = other RNA
agagagatacaacgaagtct

SEQ ID NO: 9566 - RNA, 20 nt, synthetic construct
  misc_feature 1..20: note = antisense sequence
  source 1..20: mol_type = other RNA
aagagagatacaacgaagtc

SEQ ID NO: 9567 - RNA, 20 nt, synthetic construct
  misc_feature 1..20: note = antisense sequence
  source 1..20: mol_type = other RNA
gcagggaaataatgataagc

SEQ ID NO: 9568 - RNA, 20 nt, synthetic construct
  misc_feature 1..20: note = antisense sequence
  source 1..20: mol_type = other RNA
accgagatagcagggaaata

SEQ ID NO: 9569 - RNA, 20 nt, synthetic construct
  misc_feature 1..20: note = antisense sequence
  source 1..20: mol_type = other RNA
aaaccgagatagcagggaaa

SEQ ID NO: 9570 - RNA, 20 nt, synthetic construct
  misc_feature 1..20: note = antisense sequence
  source 1..20: mol_type = other RNA
aaaaccgagatagcagggaa

SEQ ID NO: 9571 - RNA, 20 nt, synthetic construct
  misc_feature 1..20: note = antisense sequence
  source 1..20: mol_type = other RNA
gaaaaccgagatagcaggga

SEQ ID NO: 9572 - RNA, 20 nt, synthetic construct
  misc_feature 1..20: note = antisense sequence
  source 1..20: mol_type = other RNA
ggaaaaccgagatagcaggg

SEQ ID NO: 9573 - RNA, 20 nt, synthetic construct
  misc_feature 1..20: note = antisense sequence
  source 1..20: mol_type = other RNA
tggaaaaccgagatagcagg

SEQ ID NO: 9574 - RNA, 20 nt, synthetic construct
  misc_feature 1..20: note = antisense sequence
  source 1..20: mol_type = other RNA
atggaaaaccgagatagcag

SEQ ID NO: 9575 - RNA, 20 nt, synthetic construct
  misc_feature 1..20: note = antisense sequence
  source 1..20: mol_type = other RNA
aatggaaaaccgagatagca

SEQ ID NO: 9576 - RNA, 20 nt, synthetic construct
  misc_feature 1..20: note = antisense sequence
  source 1..20: mol_type = other RNA
aaatggaaaaccgagatagc

SEQ ID NO: 9577 - RNA, 20 nt, synthetic construct
  misc_feature 1..20: note = antisense sequence
  source 1..20: mol_type = other RNA
caaatggaaaaccgagatag

SEQ ID NO: 9578 - RNA, 20 nt, synthetic construct
  misc_feature 1..20: note = antisense sequence
  source 1..20: mol_type = other RNA
ctgtaacatttcgcataagc

SEQ ID NO: 9579 - RNA, 20 nt, synthetic construct
  misc_feature 1..20: note = antisense sequence
  source 1..20: mol_type = other RNA
gatgactgtaacatttcgca

SEQ ID NO: 9580 - RNA, 20 nt, synthetic construct
  misc_feature 1..20: note = antisense sequence
  source 1..20: mol_type = other RNA
agatgactgtaacatttcgc

SEQ ID NO: 9581 - RNA, 20 nt, synthetic construct
  misc_feature 1..20: note = antisense sequence
  source 1..20: mol_type = other RNA
ccttcactgctgttttgctt

SEQ ID NO: 9582 - RNA, 20 nt, synthetic construct
  misc_feature 1..20: note = antisense sequence
  source 1..20: mol_type = other RNA
tatccttcactgctgttttg

SEQ ID NO: 9583 - RNA, 20 nt, synthetic construct
  misc_feature 1..20: note = antisense sequence
  source 1..20: mol_type = other RNA
cttatccttcactgctgttt

SEQ ID NO: 9584 - RNA, 20 nt, synthetic construct
  misc_feature 1..20: note = antisense sequence
  source 1..20: mol_type = other RNA
tcttatccttcactgctgtt

SEQ ID NO: 9585 - RNA, 20 nt, synthetic construct
  misc_feature 1..20: note = antisense sequence
  source 1..20: mol_type = other RNA
tctcttatccttcactgctg

SEQ ID NO: 9586 - RNA, 20 nt, synthetic construct
  misc_feature 1..20: note = antisense sequence
  source 1..20: mol_type = other RNA
ttctcttatccttcactgct

SEQ ID NO: 9587 - RNA, 20 nt, synthetic construct
  misc_feature 1..20: note = antisense sequence
  source 1..20: mol_type = other RNA
attctcttatccttcactgc

SEQ ID NO: 9588 - RNA, 20 nt, synthetic construct
  misc_feature 1..20: note = antisense sequence
  source 1..20: mol_type = other RNA
gtatggactatgtcatggct

SEQ ID NO: 9589 - RNA, 20 nt, synthetic construct
  misc_feature 1..20: note = antisense sequence
  source 1..20: mol_type = other RNA
agtatggactatgtcatggc

SEQ ID NO: 9590 - RNA, 20 nt, synthetic construct
  misc_feature 1..20: note = antisense sequence
  source 1..20: mol_type = other RNA
gagtatggactatgtcatgg

SEQ ID NO: 9591 - RNA, 20 nt, synthetic construct
  misc_feature 1..20: note = antisense sequence
  source 1..20: mol_type = other RNA
agagtatggactatgtcatg

SEQ ID NO: 9592 - RNA, 20 nt, synthetic construct
  misc_feature 1..20: note = antisense sequence
  source 1..20: mol_type = other RNA
actttagagggacaggcagg

SEQ ID NO: 9593 - RNA, 20 nt, synthetic construct
  misc_feature 1..20: note = antisense sequence
  source 1..20: mol_type = other RNA
aactttagagggacaggcag

SEQ ID NO: 9594 - RNA, 20 nt, synthetic construct
  misc_feature 1..20: note = antisense sequence
  source 1..20: mol_type = other RNA
taactttagagggacaggca

SEQ ID NO: 9595 - RNA, 20 nt, synthetic construct
  misc_feature 1..20: note = antisense sequence
  source 1..20: mol_type = other RNA
ctaactttagagggacaggc

SEQ ID NO: 9596 - RNA, 20 nt, synthetic construct
  misc_feature 1..20: note = antisense sequence
  source 1..20: mol_type = other RNA
cctaactttagagggacagg

SEQ ID NO: 9597 - RNA, 20 nt, synthetic construct
  misc_feature 1..20: note = antisense sequence
  source 1..20: mol_type = other RNA
tcctaactttagagggacag

SEQ ID NO: 9598 - RNA, 20 nt, synthetic construct
  misc_feature 1..20: note = antisense sequence
  source 1..20: mol_type = other RNA
catcctaactttagagggac

SEQ ID NO: 9599 - RNA, 20 nt, synthetic construct
  misc_feature 1..20: note = antisense sequence
  source 1..20: mol_type = other RNA
acatcctaactttagaggga

SEQ ID NO: 9600 - RNA, 20 nt, synthetic construct
  misc_feature 1..20: note = antisense sequence
  source 1..20: mol_type = other RNA
tacatcctaactttagaggg

SEQ ID NO: 9601 - RNA, 20 nt, synthetic construct
  misc_feature 1..20: note = antisense sequence
  source 1..20: mol_type = other RNA
gtacatcctaactttagagg

SEQ ID NO: 9602 - RNA, 20 nt, synthetic construct
  misc_feature 1..20: note = antisense sequence
  source 1..20: mol_type = other RNA
atcttcccaagtacatccta

SEQ ID NO: 9603 - RNA, 20 nt, synthetic construct
  misc_feature 1..20: note = antisense sequence
  source 1..20: mol_type = other RNA
atatcttcccaagtacatcc

SEQ ID NO: 9604 - RNA, 20 nt, synthetic construct
  misc_feature 1..20: note = antisense sequence
  source 1..20: mol_type = other RNA
cactatatcttcccaagtac

SEQ ID NO: 9605 - RNA, 20 nt, synthetic construct
  misc_feature 1..20: note = antisense sequence
  source 1..20: mol_type = other RNA
cacactatatcttcccaagt

SEQ ID NO: 9606 - RNA, 20 nt, synthetic construct
  misc_feature 1..20: note = antisense sequence
  source 1..20: mol_type = other RNA
gcacactatatcttcccaag

SEQ ID NO: 9607 - RNA, 20 nt, synthetic construct
  misc_feature 1..20: note = antisense sequence
  source 1..20: mol_type = other RNA
tgcacactatatcttcccaa

SEQ ID NO: 9608 - RNA, 20 nt, synthetic construct
  misc_feature 1..20: note = antisense sequence
  source 1..20: mol_type = other RNA
cttcttggaactctgaaaca

SEQ ID NO: 9609 - RNA, 20 nt, synthetic construct
  misc_feature 1..20: note = antisense sequence
  source 1..20: mol_type = other RNA
ccttcttggaactctgaaac

SEQ ID NO: 9610 - RNA, 20 nt, synthetic construct
  misc_feature 1..20: note = antisense sequence
  source 1..20: mol_type = other RNA
cccttcttggaactctgaaa

SEQ ID NO: 9611 - RNA, 20 nt, synthetic construct
  misc_feature 1..20: note = antisense sequence
  source 1..20: mol_type = other RNA
tagcccatattgagcttccc

SEQ ID NO: 9612 - RNA, 20 nt, synthetic construct
  misc_feature 1..20: note = antisense sequence
  source 1..20: mol_type = other RNA
ggatagcccatattgagctt

SEQ ID NO: 9613 - RNA, 20 nt, synthetic construct
  misc_feature 1..20: note = antisense sequence
  source 1..20: mol_type = other RNA
aggatagcccatattgagct

SEQ ID NO: 9614 - RNA, 20 nt, synthetic construct
  misc_feature 1..20: note = antisense sequence
  source 1..20: mol_type = other RNA
gccaggatagcccatattga

SEQ ID NO: 9615 - RNA, 20 nt, synthetic construct
  misc_feature 1..20: note = antisense sequence
  source 1..20: mol_type = other RNA
tgttgccaggatagcccata

SEQ ID NO: 9616 - RNA, 20 nt, synthetic construct
  misc_feature 1..20: note = antisense sequence
  source 1..20: mol_type = other RNA
accttgttgccaggatagcc

SEQ ID NO: 9617 - RNA, 20 nt, synthetic construct
  misc_feature 1..20: note = antisense sequence
  source 1..20: mol_type = other RNA
taccttgttgccaggatagc

SEQ ID NO: 9618 - RNA, 20 nt, synthetic construct
  misc_feature 1..20: note = antisense sequence
  source 1..20: mol_type = other RNA
ttaccttgttgccaggatag

SEQ ID NO: 9619 - RNA, 20 nt, synthetic construct
  misc_feature 1..20: note = antisense sequence
  source 1..20: mol_type = other RNA
cttaccttgttgccaggata

SEQ ID NO: 9620 - RNA, 20 nt, synthetic construct
  misc_feature 1..20: note = antisense sequence
  source 1..20: mol_type = other RNA
tcttaccttgttgccaggat

SEQ ID NO: 9621 - RNA, 20 nt, synthetic construct
  misc_feature 1..20: note = antisense sequence
  source 1..20: mol_type = other RNA
cttttcttaccttgttgcca

SEQ ID NO: 9622 - RNA, 20 nt, synthetic construct
  misc_feature 1..20: note = antisense sequence
  source 1..20: mol_type = other RNA
acttttcttaccttgttgcc

SEQ ID NO: 9623 - RNA, 20 nt, synthetic construct
  misc_feature 1..20: note = antisense sequence
  source 1..20: mol_type = other RNA
tccactctctctgcaaaact

SEQ ID NO: 9624 - RNA, 20 nt, synthetic construct
  misc_feature 1..20: note = antisense sequence
  source 1..20: mol_type = other RNA
ccagttccactctctctgca

SEQ ID NO: 9625 - RNA, 20 nt, synthetic construct
  misc_feature 1..20: note = antisense sequence
  source 1..20: mol_type = other RNA
taattccagttccactctct

SEQ ID NO: 9626 - RNA, 20 nt, synthetic construct
  misc_feature 1..20: note = antisense sequence
  source 1..20: mol_type = other RNA
ttaattccagttccactctc

SEQ ID NO: 9627 - RNA, 20 nt, synthetic construct
  misc_feature 1..20: note = antisense sequence
  source 1..20: mol_type = other RNA
cctcctactaagctaatctt

SEQ ID NO: 9628 - RNA, 20 nt, synthetic construct
  misc_feature 1..20: note = antisense sequence
  source 1..20: mol_type = other RNA
ccctcctactaagctaatct

SEQ ID NO: 9629 - RNA, 20 nt, synthetic construct
  misc_feature 1..20: note = antisense sequence
  source 1..20: mol_type = other RNA
gtccctcctactaagctaat

SEQ ID NO: 9630 - RNA, 20 nt, synthetic construct
  misc_feature 1..20: note = antisense sequence
  source 1..20: mol_type = other RNA
tgtccctcctactaagctaa

SEQ ID NO: 9631 - RNA, 20 nt, synthetic construct
  misc_feature 1..20: note = antisense sequence
  source 1..20: mol_type = other RNA
ttgtccctcctactaagcta

SEQ ID NO: 9632 - RNA, 20 nt, synthetic construct
  misc_feature 1..20: note = antisense sequence
  source 1..20: mol_type = other RNA
tttgtccctcctactaagct

SEQ ID NO: 9633 - RNA, 20 nt, synthetic construct
  misc_feature 1..20: note = antisense sequence
  source 1..20: mol_type = other RNA
ctttgtccctcctactaagc

SEQ ID NO: 9634 - RNA, 20 nt, synthetic construct
  misc_feature 1..20: note = antisense sequence
  source 1..20: mol_type = other RNA
tctttgtccctcctactaag

SEQ ID NO: 9635 - RNA, 20 nt, synthetic construct
  misc_feature 1..20: note = antisense sequence
  source 1..20: mol_type = other RNA
atgaactccactcctaccaa

SEQ ID NO: 9636 - RNA, 20 nt, synthetic construct
  misc_feature 1..20: note = antisense sequence
  source 1..20: mol_type = other RNA
tatgaactccactcctacca

SEQ ID NO: 9637 - RNA, 20 nt, synthetic construct
  misc_feature 1..20: note = antisense sequence
  source 1..20: mol_type = other RNA
atatgaactccactcctacc

SEQ ID NO: 9638 - RNA, 20 nt, synthetic construct
  misc_feature 1..20: note = antisense sequence
  source 1..20: mol_type = other RNA
aatatgaactccactcctac

SEQ ID NO: 9639 - RNA, 20 nt, synthetic construct
  misc_feature 1..20: note = antisense sequence
  source 1..20: mol_type = other RNA
caatatgaactccactccta

SEQ ID NO: 9640 - RNA, 20 nt, synthetic construct
  misc_feature 1..20: note = antisense sequence
  source 1..20: mol_type = other RNA
ccaatatgaactccactcct

SEQ ID NO: 9641 - RNA, 20 nt, synthetic construct
  misc_feature 1..20: note = antisense sequence
  source 1..20: mol_type = other RNA
cccaatatgaactccactcc

SEQ ID NO: 9642 - RNA, 20 nt, synthetic construct
  misc_feature 1..20: note = antisense sequence
  source 1..20: mol_type = other RNA
ctccttgaaatactaggtcc

SEQ ID NO: 9643 - RNA, 20 nt, synthetic construct
  misc_feature 1..20: note = antisense sequence
  source 1..20: mol_type = other RNA
actccttgaaatactaggtc

SEQ ID NO: 9644 - RNA, 20 nt, synthetic construct
  misc_feature 1..20: note = antisense sequence
  source 1..20: mol_type = other RNA
ctactccttgaaatactagg

SEQ ID NO: 9645 - RNA, 20 nt, synthetic construct
  misc_feature 1..20: note = antisense sequence
  source 1..20: mol_type = other RNA
acctccaataactctccatt

SEQ ID NO: 9646 - RNA, 20 nt, synthetic construct
  misc_feature 1..20: note = antisense sequence
  source 1..20: mol_type = other RNA
aaaacctccaataactctcc

SEQ ID NO: 9647 - RNA, 20 nt, synthetic construct
  misc_feature 1..20: note = antisense sequence
  source 1..20: mol_type = other RNA
taactgtcctgaaactctgc

SEQ ID NO: 9648 - RNA, 20 nt, synthetic construct
  misc_feature 1..20: note = antisense sequence
  source 1..20: mol_type = other RNA
ctaactgtcctgaaactctg

SEQ ID NO: 9649 - RNA, 20 nt, synthetic construct
  misc_feature 1..20: note = antisense sequence
  source 1..20: mol_type = other RNA
actaactgtcctgaaactct

SEQ ID NO: 9650 - RNA, 20 nt, synthetic construct
  misc_feature 1..20: note = antisense sequence
  source 1..20: mol_type = other RNA
gactaactgtcctgaaactc

SEQ ID NO: 9651 - RNA, 20 nt, synthetic construct
  misc_feature 1..20: note = antisense sequence
  source 1..20: mol_type = other RNA
agactaactgtcctgaaact

SEQ ID NO: 9652 - RNA, 20 nt, synthetic construct
  misc_feature 1..20: note = antisense sequence
  source 1..20: mol_type = other RNA
cagactaactgtcctgaaac

SEQ ID NO: 9653 - RNA, 20 nt, synthetic construct
  misc_feature 1..20: note = antisense sequence
  source 1..20: mol_type = other RNA
tggcagactaactgtcctga

SEQ ID NO: 9654 - RNA, 20 nt, synthetic construct
  misc_feature 1..20: note = antisense sequence
  source 1..20: mol_type = other RNA
ctggcagactaactgtcctg

SEQ ID NO: 9655 - RNA, 20 nt, synthetic construct
  misc_feature 1..20: note = antisense sequence
  source 1..20: mol_type = other RNA
cctggcagactaactgtcct

SEQ ID NO: 9656 - RNA, 20 nt, synthetic construct
  misc_feature 1..20: note = antisense sequence
  source 1..20: mol_type = other RNA
tcctggcagactaactgtcc

SEQ ID NO: 9657 - RNA, 20 nt, synthetic construct
  misc_feature 1..20: note = antisense sequence
  source 1..20: mol_type = other RNA
ttcctggcagactaactgtc

SEQ ID NO: 9658 - RNA, 20 nt, synthetic construct
  misc_feature 1..20: note = antisense sequence
  source 1..20: mol_type = other RNA
attcctggcagactaactgt

SEQ ID NO: 9659 - RNA, 20 nt, synthetic construct
  misc_feature 1..20: note = antisense sequence
  source 1..20: mol_type = other RNA
tattcctggcagactaactg

SEQ ID NO: 9660 - RNA, 20 nt, synthetic construct
  misc_feature 1..20: note = antisense sequence
  source 1..20: mol_type = other RNA
tacatattcctggcagacta

SEQ ID NO: 9661 - RNA, 20 nt, synthetic construct
  misc_feature 1..20: note = antisense sequence
  source 1..20: mol_type = other RNA
ctacatattcctggcagact

SEQ ID NO: 9662 - RNA, 20 nt, synthetic construct
  misc_feature 1..20: note = antisense sequence
  source 1..20: mol_type = other RNA
tctacatattcctggcagac

SEQ ID NO: 9663 - RNA, 20 nt, synthetic construct
  misc_feature 1..20: note = antisense sequence
  source 1..20: mol_type = other RNA
ctcttcacatccttctacat

SEQ ID NO: 9664 - RNA, 20 nt, synthetic construct
  misc_feature 1..20: note = antisense sequence
  source 1..20: mol_type = other RNA
tctcttcacatccttctaca

SEQ ID NO: 9665 - RNA, 20 nt, synthetic construct
  misc_feature 1..20: note = antisense sequence
  source 1..20: mol_type = other RNA
ctctcttcacatccttctac

SEQ ID NO: 9666 - RNA, 20 nt, synthetic construct
  misc_feature 1..20: note = antisense sequence
  source 1..20: mol_type = other RNA
ttccactctcttcacatcct

SEQ ID NO: 9667 - RNA, 20 nt, synthetic construct
  misc_feature 1..20: note = antisense sequence
  source 1..20: mol_type = other RNA
tttccactctcttcacatcc

SEQ ID NO: 9668 - RNA, 20 nt, synthetic construct
  misc_feature 1..20: note = antisense sequence
  source 1..20: mol_type = other RNA
tcttcatttccactctcttc

SEQ ID NO: 9669 - RNA, 20 nt, synthetic construct
  misc_feature 1..20: note = antisense sequence
  source 1..20: mol_type = other RNA
tgctgatctccctctcttca

SEQ ID NO: 9670 - RNA, 20 nt, synthetic construct
  misc_feature 1..20: note = antisense sequence
  source 1..20: mol_type = other RNA
ttgctgctgatctccctctc

SEQ ID NO: 9671 - RNA, 20 nt, synthetic construct
  misc_feature 1..20: note = antisense sequence
  source 1..20: mol_type = other RNA
tttgctgctgatctccctct

SEQ ID NO: 9672 - RNA, 20 nt, synthetic construct
  misc_feature 1..20: note = antisense sequence
  source 1..20: mol_type = other RNA
ctctttgctgctgatctccc

SEQ ID NO: 9673 - RNA, 20 nt, synthetic construct
  misc_feature 1..20: note = antisense sequence
  source 1..20: mol_type = other RNA
gtctctttgctgctgatctc

SEQ ID NO: 9674 - RNA, 20 nt, synthetic construct
  misc_feature 1..20: note = antisense sequence
  source 1..20: mol_type = other RNA
ggtcagtctctttgctgctg

SEQ ID NO: 9675 - RNA, 20 nt, synthetic construct
  misc_feature 1..20: note = antisense sequence
  source 1..20: mol_type = other RNA
caatggtcagtctctttgct

SEQ ID NO: 9676 - RNA, 20 nt, synthetic construct
  misc_feature 1..20: note = antisense sequence
  source 1..20: mol_type = other RNA
atggcaatggtcagtctctt

SEQ ID NO: 9677 - RNA, 20 nt, synthetic construct
  misc_feature 1..20: note = antisense sequence
  source 1..20: mol_type = other RNA
catggcaatggtcagtctct

SEQ ID NO: 9678 - RNA, 20 nt, synthetic construct
  misc_feature 1..20: note = antisense sequence
  source 1..20: mol_type = other RNA
tgctttgaacttggaccatg

SEQ ID NO: 9679 - RNA, 20 nt, synthetic construct
  misc_feature 1..20: note = antisense sequence
  source 1..20: mol_type = other RNA
catcattgctttgaacttgg

SEQ ID NO: 9680 - RNA, 20 nt, synthetic construct
  misc_feature 1..20: note = antisense sequence
  source 1..20: mol_type = other RNA
ccagacatcattgctttgaa

SEQ ID NO: 9681 - RNA, 20 nt, synthetic construct
  misc_feature 1..20: note = antisense sequence
  source 1..20: mol_type = other RNA
gccagacatcattgctttga

SEQ ID NO: 9682 - RNA, 20 nt, synthetic construct
  misc_feature 1..20: note = antisense sequence
  source 1..20: mol_type = other RNA
caggccagacatcattgctt

SEQ ID NO: 9683 - RNA, 20 nt, synthetic construct
  misc_feature 1..20: note = antisense sequence
  source 1..20: mol_type = other RNA
tcaggccagacatcattgct

SEQ ID NO: 9684 - RNA, 20 nt, synthetic construct
  misc_feature 1..20: note = antisense sequence
  source 1..20: mol_type = other RNA
cttagctcaggccagacatc

SEQ ID NO: 9685 - RNA, 20 nt, synthetic construct
  misc_feature 1..20: note = antisense sequence
  source 1..20: mol_type = other RNA
ccttagctcaggccagacat

SEQ ID NO: 9686 - RNA, 20 nt, synthetic construct
  misc_feature 1..20: note = antisense sequence
  source 1..20: mol_type = other RNA
accttagctcaggccagaca

SEQ ID NO: 9687 - RNA, 20 nt, synthetic construct
  misc_feature 1..20: note = antisense sequence
  source 1..20: mol_type = other RNA
tcattaccttagctcaggcc

SEQ ID NO: 9688 - RNA, 20 nt, synthetic construct
  misc_feature 1..20: note = antisense sequence
  source 1..20: mol_type = other RNA
ctcattaccttagctcaggc

SEQ ID NO: 9689 - RNA, 20 nt, synthetic construct
  misc_feature 1..20: note = antisense sequence
  source 1..20: mol_type = other RNA
tcctacctcattaccttagc

SEQ ID NO: 9690 - RNA, 20 nt, synthetic construct
  misc_feature 1..20: note = antisense sequence
  source 1..20: mol_type = other RNA
ctcctacctcattaccttag

SEQ ID NO: 9691 - RNA, 20 nt, synthetic construct
  misc_feature 1..20: note = antisense sequence
  source 1..20: mol_type = other RNA
tcgcctcctacctcattacc

SEQ ID NO: 9692 - RNA, 20 nt, synthetic construct
  misc_feature 1..20: note = antisense sequence
  source 1..20: mol_type = other RNA
gtctcgcctcctacctcatt

SEQ ID NO: 9693 - RNA, 20 nt, synthetic construct
  misc_feature 1..20: note = antisense sequence
  source 1..20: mol_type = other RNA
agtctcgcctcctacctcat

SEQ ID NO: 9694 - RNA, 20 nt, synthetic construct
  misc_feature 1..20: note = antisense sequence
  source 1..20: mol_type = other RNA
aagtctcgcctcctacctca

SEQ ID NO: 9695 - RNA, 20 nt, synthetic construct
  misc_feature 1..20: note = antisense sequence
  source 1..20: mol_type = other RNA
caagtctcgcctcctacctc

SEQ ID NO: 9696 - RNA, 20 nt, synthetic construct
  misc_feature 1..20: note = antisense sequence
  source 1..20: mol_type = other RNA
tcaagtctcgcctcctacct

SEQ ID NO: 9697 - RNA, 20 nt, synthetic construct
  misc_feature 1..20: note = antisense sequence
  source 1..20: mol_type = other RNA
gtcaagtctcgcctcctacc

SEQ ID NO: 9698 - RNA, 20 nt, synthetic construct
  misc_feature 1..20: note = antisense sequence
  source 1..20: mol_type = other RNA
agtcaagtctcgcctcctac

SEQ ID NO: 9699 - RNA, 20 nt, synthetic construct
  misc_feature 1..20: note = antisense sequence
  source 1..20: mol_type = other RNA
gagtcaagtctcgcctccta

SEQ ID NO: 9700 - RNA, 20 nt, synthetic construct
  misc_feature 1..20: note = antisense sequence
  source 1..20: mol_type = other RNA
agagtcaagtctcgcctcct

SEQ ID NO: 9701 - RNA, 20 nt, synthetic construct
  misc_feature 1..20: note = antisense sequence
  source 1..20: mol_type = other RNA
cagagtcaagtctcgcctcc

SEQ ID NO: 9702 - RNA, 20 nt, synthetic construct
  misc_feature 1..20: note = antisense sequence
  source 1..20: mol_type = other RNA
ccagagtcaagtctcgcctc

SEQ ID NO: 9703 - RNA, 20 nt, synthetic construct
  misc_feature 1..20: note = antisense sequence
  source 1..20: mol_type = other RNA
tccagagtcaagtctcgcct

SEQ ID NO: 9704 - RNA, 20 nt, synthetic construct
  misc_feature 1..20: note = antisense sequence
  source 1..20: mol_type = other RNA
actccagagtcaagtctcgc

SEQ ID NO: 9705 - RNA, 20 nt, synthetic construct
  misc_feature 1..20: note = antisense sequence
  source 1..20: mol_type = other RNA
tctggtgttggagcccgact

SEQ ID NO: 9706 - RNA, 20 nt, synthetic construct
  misc_feature 1..20: note = antisense sequence
  source 1..20: mol_type = other RNA
atctggtgttggagcccgac

SEQ ID NO: 9707 - RNA, 20 nt, synthetic construct
  misc_feature 1..20: note = antisense sequence
  source 1..20: mol_type = other RNA
gatctggtgttggagcccga

SEQ ID NO: 9708 - RNA, 20 nt, synthetic construct
  misc_feature 1..20: note = antisense sequence
  source 1..20: mol_type = other RNA
tgatctggtgttggagcccg

SEQ ID NO: 9709 - RNA, 20 nt, synthetic construct
  misc_feature 1..20: note = antisense sequence
  source 1..20: mol_type = other RNA
ttgatctggtgttggagccc

SEQ ID NO: 9710 - RNA, 20 nt, synthetic construct
  misc_feature 1..20: note = antisense sequence
  source 1..20: mol_type = other RNA
aatttgatctggtgttggag

SEQ ID NO: 9711 - RNA, 20 nt, synthetic construct
  misc_feature 1..20: note = antisense sequence
  source 1..20: mol_type = other RNA
tgcctcatccctgttttatc

SEQ ID NO: 9712 - RNA, 20 nt, synthetic construct
  misc_feature 1..20: note = antisense sequence
  source 1..20: mol_type = other RNA
tggttgttgccatgtcaatg

SEQ ID NO: 9713 - RNA, 20 nt, synthetic construct
  misc_feature 1..20: note = antisense sequence
  source 1..20: mol_type = other RNA
ctggttgttgccatgtcaat

SEQ ID NO: 9714 - RNA, 20 nt, synthetic construct
  misc_feature 1..20: note = antisense sequence
  source 1..20: mol_type = other RNA
cctggttgttgccatgtcaa

SEQ ID NO: 9715 - RNA, 20 nt, synthetic construct
  misc_feature 1..20: note = antisense sequence
  source 1..20: mol_type = other RNA
actcctggttgttgccatgt

SEQ ID NO: 9716 - RNA, 20 nt, synthetic construct
  misc_feature 1..20: note = antisense sequence
  source 1..20: mol_type = other RNA
agtaactcctggttgttgcc

SEQ ID NO: 9717 - RNA, 20 nt, synthetic construct
  misc_feature 1..20: note = antisense sequence
  source 1..20: mol_type = other RNA
cagtaactcctggttgttgc

SEQ ID NO: 9718 - RNA, 20 nt, synthetic construct
  misc_feature 1..20: note = antisense sequence
  source 1..20: mol_type = other RNA
acagtaactcctggttgttg

SEQ ID NO: 9719 - RNA, 20 nt, synthetic construct
  misc_feature 1..20: note = antisense sequence
  source 1..20: mol_type = other RNA
gacagtaactcctggttgtt

SEQ ID NO: 9720 - RNA, 20 nt, synthetic construct
  misc_feature 1..20: note = antisense sequence
  source 1..20: mol_type = other RNA
ggacagtaactcctggttgt

SEQ ID NO: 9721 - RNA, 20 nt, synthetic construct
  misc_feature 1..20: note = antisense sequence
  source 1..20: mol_type = other RNA
gggacagtaactcctggttg

SEQ ID NO: 9722 - RNA, 20 nt, synthetic construct
  misc_feature 1..20: note = antisense sequence
  source 1..20: mol_type = other RNA
tgggacagtaactcctggtt

SEQ ID NO: 9723 - RNA, 20 nt, synthetic construct
  misc_feature 1..20: note = antisense sequence
  source 1..20: mol_type = other RNA
atgggacagtaactcctggt

SEQ ID NO: 9724 - RNA, 20 nt, synthetic construct
  misc_feature 1..20: note = antisense sequence
  source 1..20: mol_type = other RNA
aatgggacagtaactcctgg

SEQ ID NO: 9725 - RNA, 20 nt, synthetic construct
  misc_feature 1..20: note = antisense sequence
  source 1..20: mol_type = other RNA
gaatgggacagtaactcctg

SEQ ID NO: 9726 - RNA, 20 nt, synthetic construct
  misc_feature 1..20: note = antisense sequence
  source 1..20: mol_type = other RNA
ggaatgggacagtaactcct

SEQ ID NO: 9727 - RNA, 20 nt, synthetic construct
  misc_feature 1..20: note = antisense sequence
  source 1..20: mol_type = other RNA
tggaatgggacagtaactcc

SEQ ID NO: 9728 - RNA, 20 nt, synthetic construct
  misc_feature 1..20: note = antisense sequence
  source 1..20: mol_type = other RNA
catggaatgggacagtaact

SEQ ID NO: 9729 - RNA, 20 nt, synthetic construct
  misc_feature 1..20: note = antisense sequence
  source 1..20: mol_type = other RNA
gagtccttgggtcattgcca

SEQ ID NO: 9730 - RNA, 20 nt, synthetic construct
  misc_feature 1..20: note = antisense sequence
  source 1..20: mol_type = other RNA
tgagtccttgggtcattgcc

SEQ ID NO: 9731 - RNA, 20 nt, synthetic construct
  misc_feature 1..20: note = antisense sequence
  source 1..20: mol_type = other RNA
ttgagtccttgggtcattgc

SEQ ID NO: 9732 - RNA, 20 nt, synthetic construct
  misc_feature 1..20: note = antisense sequence
  source 1..20: mol_type = other RNA
ttttgagtccttgggtcatt

SEQ ID NO: 9733 - RNA, 20 nt, synthetic construct
  misc_feature 1..20: note = antisense sequence
  source 1..20: mol_type = other RNA
acttttgagtccttgggtca

SEQ ID NO: 9734 - RNA, 20 nt, synthetic construct
  misc_feature 1..20: note = antisense sequence
  source 1..20: mol_type = other RNA
aacttttgagtccttgggtc

SEQ ID NO: 9735 - RNA, 20 nt, synthetic construct
  misc_feature 1..20: note = antisense sequence
  source 1..20: mol_type = other RNA
ataacttttgagtccttggg

SEQ ID NO: 9736 - RNA, 20 nt, synthetic construct
  misc_feature 1..20: note = antisense sequence
  source 1..20: mol_type = other RNA
ctagggaaggagtaataact

SEQ ID NO: 9737 - RNA, 20 nt, synthetic construct
  misc_feature 1..20: note = antisense sequence
  source 1..20: mol_type = other RNA
ctttctagggaaggagtaat

SEQ ID NO: 9738 - RNA, 20 nt, synthetic construct
  misc_feature 1..20: note = antisense sequence
  source 1..20: mol_type = other RNA
tggtgtatgcagaactttct

SEQ ID NO: 9739 - RNA, 20 nt, synthetic construct
  misc_feature 1..20: note = antisense sequence
  source 1..20: mol_type = other RNA
gtggtgtatgcagaactttc

SEQ ID NO: 9740 - RNA, 20 nt, synthetic construct
  misc_feature 1..20: note = antisense sequence
  source 1..20: mol_type = other RNA
ggtggtgtatgcagaacttt

SEQ ID NO: 9741 - RNA, 20 nt, synthetic construct
  misc_feature 1..20: note = antisense sequence
  source 1..20: mol_type = other RNA
aggtggtgtatgcagaactt

SEQ ID NO: 9742 - RNA, 20 nt, synthetic construct
  misc_feature 1..20: note = antisense sequence
  source 1..20: mol_type = other RNA
gaggtggtgtatgcagaact

SEQ ID NO: 9743 - RNA, 20 nt, synthetic construct
  misc_feature 1..20: note = antisense sequence
  source 1..20: mol_type = other RNA
agaggtggtgtatgcagaac

SEQ ID NO: 9744 - RNA, 20 nt, synthetic construct
  misc_feature 1..20: note = antisense sequence
  source 1..20: mol_type = other RNA
aagaggtggtgtatgcagaa

SEQ ID NO: 9745 - RNA, 20 nt, synthetic construct
  misc_feature 1..20: note = antisense sequence
  source 1..20: mol_type = other RNA
taagaggtggtgtatgcaga

SEQ ID NO: 9746 - RNA, 20 nt, synthetic construct
  misc_feature 1..20: note = antisense sequence
  source 1..20: mol_type = other RNA
acattaagaggtggtgtatg

SEQ ID NO: 9747 - RNA, 20 nt, synthetic construct
  misc_feature 1..20: note = antisense sequence
  source 1..20: mol_type = other RNA
ggagaagctcagggcagttt

SEQ ID NO: 9748 - RNA, 20 nt, synthetic construct
  misc_feature 1..20: note = antisense sequence
  source 1..20: mol_type = other RNA
ggactacctcacaggcagag

SEQ ID NO: 9749 - RNA, 20 nt, synthetic construct
  misc_feature 1..20: note = antisense sequence
  source 1..20: mol_type = other RNA
aggactacctcacaggcaga

SEQ ID NO: 9750 - RNA, 20 nt, synthetic construct
  misc_feature 1..20: note = antisense sequence
  source 1..20: mol_type = other RNA
aggcaggactacctcacagg

SEQ ID NO: 9751 - RNA, 20 nt, synthetic construct
  misc_feature 1..20: note = antisense sequence
  source 1..20: mol_type = other RNA
caggcaggactacctcacag

SEQ ID NO: 9752 - RNA, 20 nt, synthetic construct
  misc_feature 1..20: note = antisense sequence
  source 1..20: mol_type = other RNA
tgccaggcaggactacctca

SEQ ID NO: 9753 - RNA, 20 nt, synthetic construct
  misc_feature 1..20: note = antisense sequence
  source 1..20: mol_type = other RNA
tacagctctggtggccttac

SEQ ID NO: 9754 - RNA, 20 nt, synthetic construct
  misc_feature 1..20: note = antisense sequence
  source 1..20: mol_type = other RNA
cgttacagctctggtggcct

SEQ ID NO: 9755 - RNA, 20 nt, synthetic construct
  misc_feature 1..20: note = antisense sequence
  source 1..20: mol_type = other RNA
agcgttacagctctggtggc

SEQ ID NO: 9756 - RNA, 20 nt, synthetic construct
  misc_feature 1..20: note = antisense sequence
  source 1..20: mol_type = other RNA
gcagcgttacagctctggtg

SEQ ID NO: 9757 - RNA, 20 nt, synthetic construct
  misc_feature 1..20: note = antisense sequence
  source 1..20: mol_type = other RNA
tgcagcgttacagctctggt

SEQ ID NO: 9758 - RNA, 20 nt, synthetic construct
  misc_feature 1..20: note = antisense sequence
  source 1..20: mol_type = other RNA
actgtgtccctgcattccta

SEQ ID NO: 9759 - RNA, 20 nt, synthetic construct
  misc_feature 1..20: note = antisense sequence
  source 1..20: mol_type = other RNA
aactgtgtccctgcattcct

SEQ ID NO: 9760 - RNA, 20 nt, synthetic construct
  misc_feature 1..20: note = antisense sequence
  source 1..20: mol_type = other RNA
caactgtgtccctgcattcc

SEQ ID NO: 9761 - RNA, 20 nt, synthetic construct
  misc_feature 1..20: note = antisense sequence
  source 1..20: mol_type = other RNA
gtcaactgtgtccctgcatt

SEQ ID NO: 9762 - RNA, 20 nt, synthetic construct
  misc_feature 1..20: note = antisense sequence
  source 1..20: mol_type = other RNA
gctgtcaactgtgtccctgc

SEQ ID NO: 9763 - RNA, 20 nt, synthetic construct
  misc_feature 1..20: note = antisense sequence
  source 1..20: mol_type = other RNA
agctgtcaactgtgtccctg

SEQ ID NO: 9764 - RNA, 20 nt, synthetic construct
  misc_feature 1..20: note = antisense sequence
  source 1..20: mol_type = other RNA
gggagctggatctaaggcag

SEQ ID NO: 9765 - RNA, 20 nt, synthetic construct
  misc_feature 1..20: note = antisense sequence
  source 1..20: mol_type = other RNA
tgggagctggatctaaggca

SEQ ID NO: 9766 - RNA, 20 nt, synthetic construct
  misc_feature 1..20: note = antisense sequence
  source 1..20: mol_type = other RNA
ctgggagctggatctaaggc

SEQ ID NO: 9767 - RNA, 20 nt, synthetic construct
  misc_feature 1..20: note = antisense sequence
  source 1..20: mol_type = other RNA
tgcttctgggagctggatct

SEQ ID NO: 9768 - RNA, 20 nt, synthetic construct
  misc_feature 1..20: note = antisense sequence
  source 1..20: mol_type = other RNA
cgtcctctcagggtttgctt

SEQ ID NO: 9769 - RNA, 20 nt, synthetic construct
  misc_feature 1..20: note = antisense sequence
  source 1..20: mol_type = other RNA
atcgtcctctcagggtttgc

SEQ ID NO: 9770 - RNA, 20 nt, synthetic construct
  misc_feature 1..20: note = antisense sequence
  source 1..20: mol_type = other RNA
aatcgtcctctcagggtttg

SEQ ID NO: 9771 - RNA, 20 nt, synthetic construct
  misc_feature 1..20: note = antisense sequence
  source 1..20: mol_type = other RNA
gaatcgtcctctcagggttt

SEQ ID NO: 9772 - RNA, 20 nt, synthetic construct
  misc_feature 1..20: note = antisense sequence
  source 1..20: mol_type = other RNA
tgaatcgtcctctcagggtt

SEQ ID NO: 9773 - RNA, 20 nt, synthetic construct
  misc_feature 1..20: note = antisense sequence
  source 1..20: mol_type = other RNA
gtgaatcgtcctctcagggt

SEQ ID NO: 9774 - RNA, 20 nt, synthetic construct
  misc_feature 1..20: note = antisense sequence
  source 1..20: mol_type = other RNA
tgtgaatcgtcctctcaggg

SEQ ID NO: 9775 - RNA, 20 nt, synthetic construct
  misc_feature 1..20: note = antisense sequence
  source 1..20: mol_type = other RNA
atgtgaatcgtcctctcagg

SEQ ID NO: 9776 - RNA, 20 nt, synthetic construct
  misc_feature 1..20: note = antisense sequence
  source 1..20: mol_type = other RNA
catgtgaatcgtcctctcag

SEQ ID NO: 9777 - RNA, 20 nt, synthetic construct
  misc_feature 1..20: note = antisense sequence
  source 1..20: mol_type = other RNA
tcatgtgaatcgtcctctca

SEQ ID NO: 9778 - RNA, 20 nt, synthetic construct
  misc_feature 1..20: note = antisense sequence
  source 1..20: mol_type = other RNA
atcatgtgaatcgtcctctc

SEQ ID NO: 9779 - RNA, 20 nt, synthetic construct
  misc_feature 1..20: note = antisense sequence
  source 1..20: mol_type = other RNA
tatcatgtgaatcgtcctct

SEQ ID NO: 9780 - RNA, 20 nt, synthetic construct
  misc_feature 1..20: note = antisense sequence
  source 1..20: mol_type = other RNA
ctatcatgtgaatcgtcctc

SEQ ID NO: 9781 - RNA, 20 nt, synthetic construct
  misc_feature 1..20: note = antisense sequence
  source 1..20: mol_type = other RNA
actatcatgtgaatcgtcct

SEQ ID NO: 9782 - RNA, 20 nt, synthetic construct
  misc_feature 1..20: note = antisense sequence
  source 1..20: mol_type = other RNA
cactatcatgtgaatcgtcc

SEQ ID NO: 9783 - RNA, 20 nt, synthetic construct
  misc_feature 1..20: note = antisense sequence
  source 1..20: mol_type = other RNA
gataccttgttttgcttccc

SEQ ID NO: 9784 - RNA, 20 nt, synthetic construct
  misc_feature 1..20: note = antisense sequence
  source 1..20: mol_type = other RNA
tgataccttgttttgcttcc

SEQ ID NO: 9785 - RNA, 20 nt, synthetic construct
  misc_feature 1..20: note = antisense sequence
  source 1..20: mol_type = other RNA
cctctgttgataccttgttt

SEQ ID NO: 9786 - RNA, 20 nt, synthetic construct
  misc_feature 1..20: note = antisense sequence
  source 1..20: mol_type = other RNA
tcctctgttgataccttgtt

SEQ ID NO: 9787 - RNA, 20 nt, synthetic construct
  misc_feature 1..20: note = antisense sequence
  source 1..20: mol_type = other RNA
gtcctctgttgataccttgt

SEQ ID NO: 9788 - RNA, 20 nt, synthetic construct
  misc_feature 1..20: note = antisense sequence
  source 1..20: mol_type = other RNA
ttgtcctctgttgatacctt

SEQ ID NO: 9789 - RNA, 20 nt, synthetic construct
  misc_feature 1..20: note = antisense sequence
  source 1..20: mol_type = other RNA
tttgtcctctgttgatacct

SEQ ID NO: 9790 - RNA, 20 nt, synthetic construct
  misc_feature 1..20: note = antisense sequence
  source 1..20: mol_type = other RNA
ctttgtcctctgttgatacc

SEQ ID NO: 9791 - RNA, 20 nt, synthetic construct
  misc_feature 1..20: note = antisense sequence
  source 1..20: mol_type = other RNA
cctttgtcctctgttgatac

SEQ ID NO: 9792 - RNA, 20 nt, synthetic construct
  misc_feature 1..20: note = antisense sequence
  source 1..20: mol_type = other RNA
ctttcctttgtcctctgttg

SEQ ID NO: 9793 - RNA, 20 nt, synthetic construct
  misc_feature 1..20: note = antisense sequence
  source 1..20: mol_type = other RNA
cctggattccacttgaaatt

SEQ ID NO: 9794 - RNA, 20 nt, synthetic construct
  misc_feature 1..20: note = antisense sequence
  source 1..20: mol_type = other RNA
gcctggattccacttgaaat

SEQ ID NO: 9795 - RNA, 20 nt, synthetic construct
  misc_feature 1..20: note = antisense sequence
  source 1..20: mol_type = other RNA
tgactcaagtagaaactccc

SEQ ID NO: 9796 - RNA, 20 nt, synthetic construct
  misc_feature 1..20: note = antisense sequence
  source 1..20: mol_type = other RNA
ttgactcaagtagaaactcc

SEQ ID NO: 9797 - RNA, 20 nt, synthetic construct
  misc_feature 1..20: note = antisense sequence
  source 1..20: mol_type = other RNA
cagggaatgagaaatcagcc

SEQ ID NO: 9798 - RNA, 20 nt, synthetic construct
  misc_feature 1..20: note = antisense sequence
  source 1..20: mol_type = other RNA
gcagggaatgagaaatcagc

SEQ ID NO: 9799 - RNA, 20 nt, synthetic construct
  misc_feature 1..20: note = antisense sequence
  source 1..20: mol_type = other RNA
tgcagggaatgagaaatcag

SEQ ID NO: 9800 - RNA, 20 nt, synthetic construct
  misc_feature 1..20: note = antisense sequence
  source 1..20: mol_type = other RNA
agtgcagggaatgagaaatc

SEQ ID NO: 9801 - RNA, 20 nt, synthetic construct
  misc_feature 1..20: note = antisense sequence
  source 1..20: mol_type = other RNA
gagtgcagggaatgagaaat

SEQ ID NO: 9802 - RNA, 20 nt, synthetic construct
  misc_feature 1..20: note = antisense sequence
  source 1..20: mol_type = other RNA
tgagctactagactgcttta

SEQ ID NO: 9803 - RNA, 20 nt, synthetic construct
  misc_feature 1..20: note = antisense sequence
  source 1..20: mol_type = other RNA
tgcacttgagctactagact

SEQ ID NO: 9804 - RNA, 20 nt, synthetic construct
  misc_feature 1..20: note = antisense sequence
  source 1..20: mol_type = other RNA
ctgcacttgagctactagac

SEQ ID NO: 9805 - RNA, 20 nt, synthetic construct
  misc_feature 1..20: note = antisense sequence
  source 1..20: mol_type = other RNA
actgcacttgagctactaga

SEQ ID NO: 9806 - RNA, 20 nt, synthetic construct
  misc_feature 1..20: note = antisense sequence
  source 1..20: mol_type = other RNA
gactgcacttgagctactag

SEQ ID NO: 9807 - RNA, 20 nt, synthetic construct
  misc_feature 1..20: note = antisense sequence
  source 1..20: mol_type = other RNA
tgactgcacttgagctacta

SEQ ID NO: 9808 - RNA, 20 nt, synthetic construct
  misc_feature 1..20: note = antisense sequence
  source 1..20: mol_type = other RNA
gatgactgcacttgagctac

SEQ ID NO: 9809 - RNA, 20 nt, synthetic construct
  misc_feature 1..20: note = antisense sequence
  source 1..20: mol_type = other RNA
agatgactgcacttgagcta

SEQ ID NO: 9810 - RNA, 20 nt, synthetic construct
  misc_feature 1..20: note = antisense sequence
  source 1..20: mol_type = other RNA
tctcttcagatgactgcact

SEQ ID NO: 9811 - RNA, 20 nt, synthetic construct
  misc_feature 1..20: note = antisense sequence
  source 1..20: mol_type = other RNA
gactctcttcagatgactgc

SEQ ID NO: 9812 - RNA, 20 nt, synthetic construct
  misc_feature 1..20: note = antisense sequence
  source 1..20: mol_type = other RNA
tgagactctcttcagatgac

SEQ ID NO: 9813 - RNA, 20 nt, synthetic construct
  misc_feature 1..20: note = antisense sequence
  source 1..20: mol_type = other RNA
aactctacctgagactctct

SEQ ID NO: 9814 - RNA, 20 nt, synthetic construct
  misc_feature 1..20: note = antisense sequence
  source 1..20: mol_type = other RNA
caactctacctgagactctc

SEQ ID NO: 9815 - RNA, 20 nt, synthetic construct
  misc_feature 1..20: note = antisense sequence
  source 1..20: mol_type = other RNA
acaactctacctgagactct

SEQ ID NO: 9816 - RNA, 20 nt, synthetic construct
  misc_feature 1..20: note = antisense sequence
  source 1..20: mol_type = other RNA
aacaactctacctgagactc

SEQ ID NO: 9817 - RNA, 20 nt, synthetic construct
  misc_feature 1..20: note = antisense sequence
  source 1..20: mol_type = other RNA
taacaactctacctgagact

SEQ ID NO: 9818 - RNA, 20 nt, synthetic construct
  misc_feature 1..20: note = antisense sequence
  source 1..20: mol_type = other RNA
ctaacaactctacctgagac

SEQ ID NO: 9819 - RNA, 20 nt, synthetic construct
  misc_feature 1..20: note = antisense sequence
  source 1..20: mol_type = other RNA
ttctaacaactctacctgag

SEQ ID NO: 9820 - RNA, 20 nt, synthetic construct
  misc_feature 1..20: note = antisense sequence
  source 1..20: mol_type = other RNA
gcttctaacaactctacctg

SEQ ID NO: 9821 - RNA, 20 nt, synthetic construct
  misc_feature 1..20: note = antisense sequence
  source 1..20: mol_type = other RNA
ctctggatactttgcttcta

SEQ ID NO: 9822 - RNA, 20 nt, synthetic construct
  misc_feature 1..20: note = antisense sequence
  source 1..20: mol_type = other RNA
tgctctggatactttgcttc

SEQ ID NO: 9823 - RNA, 20 nt, synthetic construct
  misc_feature 1..20: note = antisense sequence
  source 1..20: mol_type = other RNA
ctgctctggatactttgctt

SEQ ID NO: 9824 - RNA, 20 nt, synthetic construct
  misc_feature 1..20: note = antisense sequence
  source 1..20: mol_type = other RNA
tctgctctggatactttgct

SEQ ID NO: 9825 - RNA, 20 nt, synthetic construct
  misc_feature 1..20: note = antisense sequence
  source 1..20: mol_type = other RNA
atctgctctggatactttgc

SEQ ID NO: 9826 - RNA, 20 nt, synthetic construct
  misc_feature 1..20: note = antisense sequence
  source 1..20: mol_type = other RNA
tattcccttatctgctctgg

SEQ ID NO: 9827 - RNA, 20 nt, synthetic construct
  misc_feature 1..20: note = antisense sequence
  source 1..20: mol_type = other RNA
gcctattcccttatctgctc

SEQ ID NO: 9828 - RNA, 20 nt, synthetic construct
  misc_feature 1..20: note = antisense sequence
  source 1..20: mol_type = other RNA
tgcctattcccttatctgct

SEQ ID NO: 9829 - RNA, 20 nt, synthetic construct
  misc_feature 1..20: note = antisense sequence
  source 1..20: mol_type = other RNA
ctgcctattcccttatctgc

SEQ ID NO: 9830 - RNA, 20 nt, synthetic construct
  misc_feature 1..20: note = antisense sequence
  source 1..20: mol_type = other RNA
actgcctattcccttatctg

SEQ ID NO: 9831 - RNA, 20 nt, synthetic construct
  misc_feature 1..20: note = antisense sequence
  source 1..20: mol_type = other RNA
aactgcctattcccttatct

SEQ ID NO: 9832 - RNA, 20 nt, synthetic construct
  misc_feature 1..20: note = antisense sequence
  source 1..20: mol_type = other RNA
taactgcctattcccttatc

SEQ ID NO: 9833 - RNA, 20 nt, synthetic construct
  misc_feature 1..20: note = antisense sequence
  source 1..20: mol_type = other RNA
atccacctccaatatgtgcc

SEQ ID NO: 9834 - RNA, 20 nt, synthetic construct
  misc_feature 1..20: note = antisense sequence
  source 1..20: mol_type = other RNA
tctatccacctccaatatgt

SEQ ID NO: 9835 - RNA, 20 nt, synthetic construct
  misc_feature 1..20: note = antisense sequence
  source 1..20: mol_type = other RNA
catctatccacctccaatat

SEQ ID NO: 9836 - RNA, 20 nt, synthetic construct
  misc_feature 1..20: note = antisense sequence
  source 1..20: mol_type = other RNA
ccatctatccacctccaata

SEQ ID NO: 9837 - RNA, 20 nt, synthetic construct
  misc_feature 1..20: note = antisense sequence
  source 1..20: mol_type = other RNA
tccatctatccacctccaat

SEQ ID NO: 9838 - RNA, 20 nt, synthetic construct
  misc_feature 1..20: note = antisense sequence
  source 1..20: mol_type = other RNA
gtaagtcagaaatcagtgct

SEQ ID NO: 9839 - RNA, 20 nt, synthetic construct
  misc_feature 1..20: note = antisense sequence
  source 1..20: mol_type = other RNA
gttggtaagtcagaaatcag

SEQ ID NO: 9840 - RNA, 20 nt, synthetic construct
  misc_feature 1..20: note = antisense sequence
  source 1..20: mol_type = other RNA
ccaacttaacaagactgctt

SEQ ID NO: 9841 - RNA, 20 nt, synthetic construct
  misc_feature 1..20: note = antisense sequence
  source 1..20: mol_type = other RNA
gccaacttaacaagactgct

SEQ ID NO: 9842 - RNA, 20 nt, synthetic construct
  misc_feature 1..20: note = antisense sequence
  source 1..20: mol_type = other RNA
tgccaacttaacaagactgc

SEQ ID NO: 9843 - RNA, 20 nt, synthetic construct
  misc_feature 1..20: note = antisense sequence
  source 1..20: mol_type = other RNA
atgccaacttaacaagactg

SEQ ID NO: 9844 - RNA, 20 nt, synthetic construct
  misc_feature 1..20: note = antisense sequence
  source 1..20: mol_type = other RNA
gatgccaacttaacaagact

SEQ ID NO: 9845 - RNA, 20 nt, synthetic construct
  misc_feature 1..20: note = antisense sequence
  source 1..20: mol_type = other RNA
agatgccaacttaacaagac

SEQ ID NO: 9846 - RNA, 20 nt, synthetic construct
  misc_feature 1..20: note = antisense sequence
  source 1..20: mol_type = other RNA
gagatgccaacttaacaaga

SEQ ID NO: 9847 - RNA, 20 nt, synthetic construct
  misc_feature 1..20: note = antisense sequence
  source 1..20: mol_type = other RNA
tgaagagatgccaacttaac

SEQ ID NO: 9848 - RNA, 20 nt, synthetic construct
  misc_feature 1..20: note = antisense sequence
  source 1..20: mol_type = other RNA
gtcgtaaactgccaactcct

SEQ ID NO: 9849 - RNA, 20 nt, synthetic construct
  misc_feature 1..20: note = antisense sequence
  source 1..20: mol_type = other RNA
tgtcgtaaactgccaactcc

SEQ ID NO: 9850 - RNA, 20 nt, synthetic construct
  misc_feature 1..20: note = antisense sequence
  source 1..20: mol_type = other RNA
ttgtcgtaaactgccaactc

SEQ ID NO: 9851 - RNA, 20 nt, synthetic construct
  misc_feature 1..20: note = antisense sequence
  source 1..20: mol_type = other RNA
attgtcgtaaactgccaact

SEQ ID NO: 9852 - RNA, 20 nt, synthetic construct
  misc_feature 1..20: note = antisense sequence
  source 1..20: mol_type = other RNA
aattgtcgtaaactgccaac

SEQ ID NO: 9853 - RNA, 20 nt, synthetic construct
  misc_feature 1..20: note = antisense sequence
  source 1..20: mol_type = other RNA
ctaattgtcgtaaactgcca

SEQ ID NO: 9854 - RNA, 20 nt, synthetic construct
  misc_feature 1..20: note = antisense sequence
  source 1..20: mol_type = other RNA
tctaattgtcgtaaactgcc

SEQ ID NO: 9855 - RNA, 20 nt, synthetic construct
  misc_feature 1..20: note = antisense sequence
  source 1..20: mol_type = other RNA
gtccacgttgttctcattta

SEQ ID NO: 9856 - RNA, 20 nt, synthetic construct
  misc_feature 1..20: note = antisense sequence
  source 1..20: mol_type = other RNA
agtccacgttgttctcattt

SEQ ID NO: 9857 - RNA, 20 nt, synthetic construct
  misc_feature 1..20: note = antisense sequence
  source 1..20: mol_type = other RNA
gagtccacgttgttctcatt

SEQ ID NO: 9858 - RNA, 20 nt, synthetic construct
  misc_feature 1..20: note = antisense sequence
  source 1..20: mol_type = other RNA
aatgagtccacgttgttctc

SEQ ID NO: 9859 - RNA, 20 nt, synthetic construct
  misc_feature 1..20: note = antisense sequence
  source 1..20: mol_type = other RNA
taatgagtccacgttgttct

SEQ ID NO: 9860 - RNA, 20 nt, synthetic construct
  misc_feature 1..20: note = antisense sequence
  source 1..20: mol_type = other RNA
actaatgagtccacgttgtt

SEQ ID NO: 9861 - RNA, 20 nt, synthetic construct
  misc_feature 1..20: note = antisense sequence
  source 1..20: mol_type = other RNA
tactaatgagtccacgttgt

SEQ ID NO: 9862 - RNA, 20 nt, synthetic construct
  misc_feature 1..20: note = antisense sequence
  source 1..20: mol_type = other RNA
ttactaatgagtccacgttg

SEQ ID NO: 9863 - RNA, 20 nt, synthetic construct
  misc_feature 1..20: note = antisense sequence
  source 1..20: mol_type = other RNA
atctcaaaggaggttgcata

SEQ ID NO: 9864 - RNA, 20 nt, synthetic construct
  misc_feature 1..20: note = antisense sequence
  source 1..20: mol_type = other RNA
aatctcaaaggaggttgcat

SEQ ID NO: 9865 - RNA, 20 nt, synthetic construct
  misc_feature 1..20: note = antisense sequence
  source 1..20: mol_type = other RNA
tgctagacacaagtcacaca

SEQ ID NO: 9866 - RNA, 20 nt, synthetic construct
  misc_feature 1..20: note = antisense sequence
  source 1..20: mol_type = other RNA
ctgctagacacaagtcacac

SEQ ID NO: 9867 - RNA, 20 nt, synthetic construct
  misc_feature 1..20: note = antisense sequence
  source 1..20: mol_type = other RNA
gctgctagacacaagtcaca

SEQ ID NO: 9868 - RNA, 20 nt, synthetic construct
  misc_feature 1..20: note = antisense sequence
  source 1..20: mol_type = other RNA
tgctgctagacacaagtcac

SEQ ID NO: 9869 - RNA, 20 nt, synthetic construct
  misc_feature 1..20: note = antisense sequence
  source 1..20: mol_type = other RNA
atgctgctagacacaagtca

SEQ ID NO: 9870 - RNA, 20 nt, synthetic construct
  misc_feature 1..20: note = antisense sequence
  source 1..20: mol_type = other RNA
aatgctgctagacacaagtc

SEQ ID NO: 9871 - RNA, 20 nt, synthetic construct
  misc_feature 1..20: note = antisense sequence
  source 1..20: mol_type = other RNA
gaatgctgctagacacaagt

SEQ ID NO: 9872 - RNA, 20 nt, synthetic construct
  misc_feature 1..20: note = antisense sequence
  source 1..20: mol_type = other RNA
ttgaatgctgctagacacaa

SEQ ID NO: 9873 - RNA, 20 nt, synthetic construct
  misc_feature 1..20: note = antisense sequence
  source 1..20: mol_type = other RNA
tttgaatgctgctagacaca

SEQ ID NO: 9874 - RNA, 20 nt, synthetic construct
  misc_feature 1..20: note = antisense sequence
  source 1..20: mol_type = other RNA
ctttgaatgctgctagacac

SEQ ID NO: 9875 - RNA, 20 nt, synthetic construct
  misc_feature 1..20: note = antisense sequence
  source 1..20: mol_type = other RNA
gctttgaatgctgctagaca

SEQ ID NO: 9876 - RNA, 20 nt, synthetic construct
  misc_feature 1..20: note = antisense sequence
  source 1..20: mol_type = other RNA
ggctttgaatgctgctagac

SEQ ID NO: 9877 - RNA, 20 nt, synthetic construct
  misc_feature 1..20: note = antisense sequence
  source 1..20: mol_type = other RNA
gtggctttgaatgctgctag

SEQ ID NO: 9878 - RNA, 20 nt, synthetic construct
  misc_feature 1..20: note = antisense sequence
  source 1..20: mol_type = other RNA
ttctgtggctttgaatgctg

SEQ ID NO: 9879 - RNA, 20 nt, synthetic construct
  misc_feature 1..20: note = antisense sequence
  source 1..20: mol_type = other RNA
cttctgtggctttgaatgct

SEQ ID NO: 9880 - RNA, 20 nt, synthetic construct
  misc_feature 1..20: note = antisense sequence
  source 1..20: mol_type = other RNA
gcttctgtggctttgaatgc

SEQ ID NO: 9881 - RNA, 20 nt, synthetic construct
  misc_feature 1..20: note = antisense sequence
  source 1..20: mol_type = other RNA
atatgcttctgtggctttga

SEQ ID NO: 9882 - RNA, 20 nt, synthetic construct
  misc_feature 1..20: note = antisense sequence
  source 1..20: mol_type = other RNA
aatccaattatctcctcctc

SEQ ID NO: 9883 - RNA, 20 nt, synthetic construct
  misc_feature 1..20: note = antisense sequence
  source 1..20: mol_type = other RNA
caactcgggttaaatccaat

SEQ ID NO: 9884 - RNA, 20 nt, synthetic construct
  misc_feature 1..20: note = antisense sequence
  source 1..20: mol_type = other RNA
ccaactcgggttaaatccaa

SEQ ID NO: 9885 - RNA, 20 nt, synthetic construct
  misc_feature 1..20: note = antisense sequence
  source 1..20: mol_type = other RNA
tccaactcgggttaaatcca

SEQ ID NO: 9886 - RNA, 20 nt, synthetic construct
  misc_feature 1..20: note = antisense sequence
  source 1..20: mol_type = other RNA
cttccaactcgggttaaatc

SEQ ID NO: 9887 - RNA, 20 nt, synthetic construct
  misc_feature 1..20: note = antisense sequence
  source 1..20: mol_type = other RNA
acttccaactcgggttaaat

SEQ ID NO: 9888 - RNA, 20 nt, synthetic construct
  misc_feature 1..20: note = antisense sequence
  source 1..20: mol_type = other RNA
aacttccaactcgggttaaa

SEQ ID NO: 9889 - RNA, 20 nt, synthetic construct
  misc_feature 1..20: note = antisense sequence
  source 1..20: mol_type = other RNA
gctaacttccaactcgggtt

SEQ ID NO: 9890 - RNA, 20 nt, synthetic construct
  misc_feature 1..20: note = antisense sequence
  source 1..20: mol_type = other RNA
gactcacttggctaacttcc

SEQ ID NO: 9891 - RNA, 20 nt, synthetic construct
  misc_feature 1..20: note = antisense sequence
  source 1..20: mol_type = other RNA
atgactcacttggctaactt

SEQ ID NO: 9892 - RNA, 20 nt, synthetic construct
  misc_feature 1..20: note = antisense sequence
  source 1..20: mol_type = other RNA
aatgactcacttggctaact

SEQ ID NO: 9893 - RNA, 20 nt, synthetic construct
  misc_feature 1..20: note = antisense sequence
  source 1..20: mol_type = other RNA
caatgactcacttggctaac

SEQ ID NO: 9894 - RNA, 20 nt, synthetic construct
  misc_feature 1..20: note = antisense sequence
  source 1..20: mol_type = other RNA
tccctccaatgactcacttg

SEQ ID NO: 9895 - RNA, 20 nt, synthetic construct
  misc_feature 1..20: note = antisense sequence
  source 1..20: mol_type = other RNA
ttccctccaatgactcactt

SEQ ID NO: 9896 - RNA, 20 nt, synthetic construct
  misc_feature 1..20: note = antisense sequence
  source 1..20: mol_type = other RNA
tttccctccaatgactcact

SEQ ID NO: 9897 - RNA, 20 nt, synthetic construct
  misc_feature 1..20: note = antisense sequence
  source 1..20: mol_type = other RNA
ttttccctccaatgactcac

SEQ ID NO: 9898 - RNA, 20 nt, synthetic construct
  misc_feature 1..20: note = antisense sequence
  source 1..20: mol_type = other RNA
ggtacttagactagattcca

SEQ ID NO: 9899 - RNA, 20 nt, synthetic construct
  misc_feature 1..20: note = antisense sequence
  source 1..20: mol_type = other RNA
caagacctccaactaattca

SEQ ID NO: 9900 - RNA, 20 nt, synthetic construct
  misc_feature 1..20: note = antisense sequence
  source 1..20: mol_type = other RNA
tcaagacctccaactaattc

SEQ ID NO: 9901 - RNA, 20 nt, synthetic construct
  misc_feature 1..20: note = antisense sequence
  source 1..20: mol_type = other RNA
ccatatcaagacctccaact

SEQ ID NO: 9902 - RNA, 20 nt, synthetic construct
  misc_feature 1..20: note = antisense sequence
  source 1..20: mol_type = other RNA
accatatcaagacctccaac

SEQ ID NO: 9903 - RNA, 20 nt, synthetic construct
  misc_feature 1..20: note = antisense sequence
  source 1..20: mol_type = other RNA
gaccatatcaagacctccaa

SEQ ID NO: 9904 - RNA, 20 nt, synthetic construct
  misc_feature 1..20: note = antisense sequence
  source 1..20: mol_type = other RNA
tgaccatatcaagacctcca

SEQ ID NO: 9905 - RNA, 20 nt, synthetic construct
  misc_feature 1..20: note = antisense sequence
  source 1..20: mol_type = other RNA
ctgaccatatcaagacctcc

SEQ ID NO: 9906 - RNA, 20 nt, synthetic construct
  misc_feature 1..20: note = antisense sequence
  source 1..20: mol_type = other RNA
cctgaccatatcaagacctc

SEQ ID NO: 9907 - RNA, 20 nt, synthetic construct
  misc_feature 1..20: note = antisense sequence
  source 1..20: mol_type = other RNA
ccctgaccatatcaagacct

SEQ ID NO: 9908 - RNA, 20 nt, synthetic construct
  misc_feature 1..20: note = antisense sequence
  source 1..20: mol_type = other RNA
tccctgaccatatcaagacc

SEQ ID NO: 9909 - RNA, 20 nt, synthetic construct
  misc_feature 1..20: note = antisense sequence
  source 1..20: mol_type = other RNA
ttccctgaccatatcaagac

SEQ ID NO: 9910 - RNA, 20 nt, synthetic construct
  misc_feature 1..20: note = antisense sequence
  source 1..20: mol_type = other RNA
tcactaattccctgaccata

SEQ ID NO: 9911 - RNA, 20 nt, synthetic construct
  misc_feature 1..20: note = antisense sequence
  source 1..20: mol_type = other RNA
tttcactaattccctgacca

SEQ ID NO: 9912 - RNA, 20 nt, synthetic construct
  misc_feature 1..20: note = antisense sequence
  source 1..20: mol_type = other RNA
atttcactaattccctgacc

SEQ ID NO: 9913 - RNA, 20 nt, synthetic construct
  misc_feature 1..20: note = antisense sequence
  source 1..20: mol_type = other RNA
tggctcatttcactaattcc

SEQ ID NO: 9914 - RNA, 20 nt, synthetic construct
  misc_feature 1..20: note = antisense sequence
  source 1..20: mol_type = other RNA
gcaggtcaatcccaatttca

SEQ ID NO: 9915 - RNA, 20 nt, synthetic construct
  misc_feature 1..20: note = antisense sequence
  source 1..20: mol_type = other RNA
agcaggtcaatcccaatttc

SEQ ID NO: 9916 - RNA, 20 nt, synthetic construct
  misc_feature 1..20: note = antisense sequence
  source 1..20: mol_type = other RNA
cagcaggtcaatcccaattt

SEQ ID NO: 9917 - RNA, 20 nt, synthetic construct
  misc_feature 1..20: note = antisense sequence
  source 1..20: mol_type = other RNA
ttgtcatttggaagaccttg

SEQ ID NO: 9918 - RNA, 20 nt, synthetic construct
  misc_feature 1..20: note = antisense sequence
  source 1..20: mol_type = other RNA
cttgtcatttggaagacctt

SEQ ID NO: 9919 - RNA, 20 nt, synthetic construct
  misc_feature 1..20: note = antisense sequence
  source 1..20: mol_type = other RNA
accttgtcatttggaagacc

SEQ ID NO: 9920 - RNA, 20 nt, synthetic construct
  misc_feature 1..20: note = antisense sequence
  source 1..20: mol_type = other RNA
gaccttgtcatttggaagac

SEQ ID NO: 9921 - RNA, 20 nt, synthetic construct
  misc_feature 1..20: note = antisense sequence
  source 1..20: mol_type = other RNA
gtcttatccttgaccttgtc

SEQ ID NO: 9922 - RNA, 20 nt, synthetic construct
  misc_feature 1..20: note = antisense sequence
  source 1..20: mol_type = other RNA
atcttctcccaaggtcttat

SEQ ID NO: 9923 - RNA, 20 nt, synthetic construct
  misc_feature 1..20: note = antisense sequence
  source 1..20: mol_type = other RNA
ccatcttctcccaaggtctt

SEQ ID NO: 9924 - RNA, 20 nt, synthetic construct
  misc_feature 1..20: note = antisense sequence
  source 1..20: mol_type = other RNA
agccatcttctcccaaggtc

SEQ ID NO: 9925 - RNA, 20 nt, synthetic construct
  misc_feature 1..20: note = antisense sequence
  source 1..20: mol_type = other RNA
ctagccatcttctcccaagg

SEQ ID NO: 9926 - RNA, 20 nt, synthetic construct
  misc_feature 1..20: note = antisense sequence
  source 1..20: mol_type = other RNA
cagtaatctttcctctagcc

SEQ ID NO: 9927 - RNA, 20 nt, synthetic construct
  misc_feature 1..20: note = antisense sequence
  source 1..20: mol_type = other RNA
gcatcagtaatctttcctct

SEQ ID NO: 9928 - RNA, 20 nt, synthetic construct
  misc_feature 1..20: note = antisense sequence
  source 1..20: mol_type = other RNA
agcatcagtaatctttcctc

SEQ ID NO: 9929 - RNA, 20 nt, synthetic construct
  misc_feature 1..20: note = antisense sequence
  source 1..20: mol_type = other RNA
cagcatcagtaatctttcct

SEQ ID NO: 9930 - RNA, 20 nt, synthetic construct
  misc_feature 1..20: note = antisense sequence
  source 1..20: mol_type = other RNA
ccagcatcagtaatctttcc

SEQ ID NO: 9931 - RNA, 20 nt, synthetic construct
  misc_feature 1..20: note = antisense sequence
  source 1..20: mol_type = other RNA
cccagcatcagtaatctttc

SEQ ID NO: 9932 - RNA, 20 nt, synthetic construct
  misc_feature 1..20: note = antisense sequence
  source 1..20: mol_type = other RNA
ctgtggaataccctagtctc

SEQ ID NO: 9933 - RNA, 20 nt, synthetic construct
  misc_feature 1..20: note = antisense sequence
  source 1..20: mol_type = other RNA
gataatctgtggaataccct

SEQ ID NO: 9934 - RNA, 20 nt, synthetic construct
  misc_feature 1..20: note = antisense sequence
  source 1..20: mol_type = other RNA
ctgataatctgtggaatacc

SEQ ID NO: 9935 - RNA, 20 nt, synthetic construct
  misc_feature 1..20: note = antisense sequence
  source 1..20: mol_type = other RNA
tccctcctactcctgttgtt

SEQ ID NO: 9936 - RNA, 20 nt, synthetic construct
  misc_feature 1..20: note = antisense sequence
  source 1..20: mol_type = other RNA
ggacatcttacagtttgctt

SEQ ID NO: 9937 - RNA, 20 nt, synthetic construct
  misc_feature 1..20: note = antisense sequence
  source 1..20: mol_type = other RNA
aggacatcttacagtttgct

SEQ ID NO: 9938 - RNA, 20 nt, synthetic construct
  misc_feature 1..20: note = antisense sequence
  source 1..20: mol_type = other RNA
aaggacatcttacagtttgc

SEQ ID NO: 9939 - RNA, 20 nt, synthetic construct
  misc_feature 1..20: note = antisense sequence
  source 1..20: mol_type = other RNA
gtggaagttaattgctcatc

SEQ ID NO: 9940 - RNA, 20 nt, synthetic construct
  misc_feature 1..20: note = antisense sequence
  source 1..20: mol_type = other RNA
gttgtggaagttaattgctc

SEQ ID NO: 9941 - RNA, 20 nt, synthetic construct
  misc_feature 1..20: note = antisense sequence
  source 1..20: mol_type = other RNA
ctgttgtggaagttaattgc

SEQ ID NO: 9942 - RNA, 20 nt, synthetic construct
  misc_feature 1..20: note = antisense sequence
  source 1..20: mol_type = other RNA
agtaatccttggaaacactg

SEQ ID NO: 9943 - RNA, 20 nt, synthetic construct
  misc_feature 1..20: note = antisense sequence
  source 1..20: mol_type = other RNA
atctatgactgcaattcagg

SEQ ID NO: 9944 - RNA, 20 nt, synthetic construct
  misc_feature 1..20: note = antisense sequence
  source 1..20: mol_type = other RNA
cacatctatgactgcaattc

SEQ ID NO: 9945 - RNA, 20 nt, synthetic construct
  misc_feature 1..20: note = antisense sequence
  source 1..20: mol_type = other RNA
gataggatacagccaactaa

SEQ ID NO: 9946 - RNA, 20 nt, synthetic construct
  misc_feature 1..20: note = antisense sequence
  source 1..20: mol_type = other RNA
aagataggatacagccaact

SEQ ID NO: 9947 - RNA, 20 nt, synthetic construct
  misc_feature 1..20: note = antisense sequence
  source 1..20: mol_type = other RNA
caagataggatacagccaac

SEQ ID NO: 9948 - RNA, 20 nt, synthetic construct
  misc_feature 1..20: note = antisense sequence
  source 1..20: mol_type = other RNA
acaagataggatacagccaa

SEQ ID NO: 9949 - RNA, 20 nt, synthetic construct
  misc_feature 1..20: note = antisense sequence
  source 1..20: mol_type = other RNA
aacaagataggatacagcca

SEQ ID NO: 9950 - RNA, 20 nt, synthetic construct
  misc_feature 1..20: note = antisense sequence
  source 1..20: mol_type = other RNA
gaacaagataggatacagcc

SEQ ID NO: 9951 - RNA, 20 nt, synthetic construct
  misc_feature 1..20: note = antisense sequence
  source 1..20: mol_type = other RNA
ggaacaagataggatacagc

SEQ ID NO: 9952 - RNA, 20 nt, synthetic construct
  misc_feature 1..20: note = antisense sequence
  source 1..20: mol_type = other RNA
gggaacaagataggatacag

SEQ ID NO: 9953 - RNA, 20 nt, synthetic construct
  misc_feature 1..20: note = antisense sequence
  source 1..20: mol_type = other RNA
ttgggaacaagataggatac

SEQ ID NO: 9954 - RNA, 20 nt, synthetic construct
  misc_feature 1..20: note = antisense sequence
  source 1..20: mol_type = other RNA
ctttgggaacaagataggat

SEQ ID NO: 9955 - RNA, 20 nt, synthetic construct
  misc_feature 1..20: note = antisense sequence
  source 1..20: mol_type = other RNA
cctttgggaacaagatagga

SEQ ID NO: 9956 - RNA, 20 nt, synthetic construct
  misc_feature 1..20: note = antisense sequence
  source 1..20: mol_type = other RNA
agaccctttgggaacaagat

SEQ ID NO: 9957 - RNA, 20 nt, synthetic construct
  misc_feature 1..20: note = antisense sequence
  source 1..20: mol_type = other RNA
aagaccctttgggaacaaga

SEQ ID NO: 9958 - RNA, 20 nt, synthetic construct
  misc_feature 1..20: note = antisense sequence
  source 1..20: mol_type = other RNA
gagagagctactatatttgg

SEQ ID NO: 9959 - RNA, 20 nt, synthetic construct
  misc_feature 1..20: note = antisense sequence
  source 1..20: mol_type = other RNA
cacctattctgagagagcta

SEQ ID NO: 9960 - RNA, 20 nt, synthetic construct
  misc_feature 1..20: note = antisense sequence
  source 1..20: mol_type = other RNA
ccacctattctgagagagct

SEQ ID NO: 9961 - RNA, 20 nt, synthetic construct
  misc_feature 1..20: note = antisense sequence
  source 1..20: mol_type = other RNA
accacctattctgagagagc

SEQ ID NO: 9962 - RNA, 20 nt, synthetic construct
  misc_feature 1..20: note = antisense sequence
  source 1..20: mol_type = other RNA
tttaccacctattctgagag

SEQ ID NO: 9963 - RNA, 20 nt, synthetic construct
  misc_feature 1..20: note = antisense sequence
  source 1..20: mol_type = other RNA
ctttaccacctattctgaga

SEQ ID NO: 9964 - RNA, 20 nt, synthetic construct
  misc_feature 1..20: note = antisense sequence
  source 1..20: mol_type = other RNA
cctttaccacctattctgag

SEQ ID NO: 9965 - RNA, 20 nt, synthetic construct
  misc_feature 1..20: note = antisense sequence
  source 1..20: mol_type = other RNA
ccttgttctgtgagtttatc

SEQ ID NO: 9966 - RNA, 20 nt, synthetic construct
  misc_feature 1..20: note = antisense sequence
  source 1..20: mol_type = other RNA
tagccttgttctgtgagttt

SEQ ID NO: 9967 - RNA, 20 nt, synthetic construct
  misc_feature 1..20: note = antisense sequence
  source 1..20: mol_type = other RNA
ccaggttagccttgttctgt

SEQ ID NO: 9968 - RNA, 20 nt, synthetic construct
  misc_feature 1..20: note = antisense sequence
  source 1..20: mol_type = other RNA
tccaggttagccttgttctg

SEQ ID NO: 9969 - RNA, 20 nt, synthetic construct
  misc_feature 1..20: note = antisense sequence
  source 1..20: mol_type = other RNA
gtccaggttagccttgttct

SEQ ID NO: 9970 - RNA, 20 nt, synthetic construct
  misc_feature 1..20: note = antisense sequence
  source 1..20: mol_type = other RNA
atgtccaggttagccttgtt

SEQ ID NO: 9971 - RNA, 20 nt, synthetic construct
  misc_feature 1..20: note = antisense sequence
  source 1..20: mol_type = other RNA
catgtccaggttagccttgt

SEQ ID NO: 9972 - RNA, 20 nt, synthetic construct
  misc_feature 1..20: note = antisense sequence
  source 1..20: mol_type = other RNA
tcatgtccaggttagccttg

SEQ ID NO: 9973 - RNA, 20 nt, synthetic construct
  misc_feature 1..20: note = antisense sequence
  source 1..20: mol_type = other RNA
ttcatgtccaggttagcctt

SEQ ID NO: 9974 - RNA, 20 nt, synthetic construct
  misc_feature 1..20: note = antisense sequence
  source 1..20: mol_type = other RNA
aattcatgtccaggttagcc

SEQ ID NO: 9975 - RNA, 20 nt, synthetic construct
  misc_feature 1..20: note = antisense sequence
  source 1..20: mol_type = other RNA
caattcatgtccaggttagc

SEQ ID NO: 9976 - RNA, 20 nt, synthetic construct
  misc_feature 1..20: note = antisense sequence
  source 1..20: mol_type = other RNA
tcaattcatgtccaggttag

SEQ ID NO: 9977 - RNA, 20 nt, synthetic construct
  misc_feature 1..20: note = antisense sequence
  source 1..20: mol_type = other RNA
ctcaattcatgtccaggtta

SEQ ID NO: 9978 - RNA, 20 nt, synthetic construct
  misc_feature 1..20: note = antisense sequence
  source 1..20: mol_type = other RNA
tgctcaattcatgtccaggt

SEQ ID NO: 9979 - RNA, 20 nt, synthetic construct
  misc_feature 1..20: note = antisense sequence
  source 1..20: mol_type = other RNA
ctgctcaattcatgtccagg

SEQ ID NO: 9980 - RNA, 20 nt, synthetic construct
  misc_feature 1..20: note = antisense sequence
  source 1..20: mol_type = other RNA
tctgctcaattcatgtccag

SEQ ID NO: 9981 - RNA, 20 nt, synthetic construct
  misc_feature 1..20: note = antisense sequence
  source 1..20: mol_type = other RNA
ctctgctcaattcatgtcca

SEQ ID NO: 9982 - RNA, 20 nt, synthetic construct
  misc_feature 1..20: note = antisense sequence
  source 1..20: mol_type = other RNA
cactctgctcaattcatgtc

SEQ ID NO: 9983 - RNA, 20 nt, synthetic construct
  misc_feature 1..20: note = antisense sequence
  source 1..20: mol_type = other RNA
gcactctgctcaattcatgt

SEQ ID NO: 9984 - RNA, 20 nt, synthetic construct
  misc_feature 1..20: note = antisense sequence
  source 1..20: mol_type = other RNA
tgcactctgctcaattcatg

SEQ ID NO: 9985 - RNA, 20 nt, synthetic construct
  misc_feature 1..20: note = antisense sequence
  source 1..20: mol_type = other RNA
acatgcactctgctcaattc

SEQ ID NO: 9986 - RNA, 20 nt, synthetic construct
  misc_feature 1..20: note = antisense sequence
  source 1..20: mol_type = other RNA
gaacatgcactctgctcaat

SEQ ID NO: 9987 - RNA, 20 nt, synthetic construct
  misc_feature 1..20: note = antisense sequence
  source 1..20: mol_type = other RNA
tgaacatgcactctgctcaa

SEQ ID NO: 9988 - RNA, 20 nt, synthetic construct
  misc_feature 1..20: note = antisense sequence
  source 1..20: mol_type = other RNA
aatgaacatgcactctgctc

SEQ ID NO: 9989 - RNA, 20 nt, synthetic construct
  misc_feature 1..20: note = antisense sequence
  source 1..20: mol_type = other RNA
agctgaatgaacatgcactc

SEQ ID NO: 9990 - RNA, 20 nt, synthetic construct
  misc_feature 1..20: note = antisense sequence
  source 1..20: mol_type = other RNA
tggctactcaatgaatttgc

SEQ ID NO: 9991 - RNA, 20 nt, synthetic construct
  misc_feature 1..20: note = antisense sequence
  source 1..20: mol_type = other RNA
agcttctgctgagtgccact

SEQ ID NO: 9992 - RNA, 20 nt, synthetic construct
  misc_feature 1..20: note = antisense sequence
  source 1..20: mol_type = other RNA
tagcttctgctgagtgccac

SEQ ID NO: 9993 - RNA, 20 nt, synthetic construct
  misc_feature 1..20: note = antisense sequence
  source 1..20: mol_type = other RNA
ctagcttctgctgagtgcca

SEQ ID NO: 9994 - RNA, 20 nt, synthetic construct
  misc_feature 1..20: note = antisense sequence
  source 1..20: mol_type = other RNA
tagtcacctcaacctgctag

SEQ ID NO: 9995 - RNA, 20 nt, synthetic construct
  misc_feature 1..20: note = antisense sequence
  source 1..20: mol_type = other RNA
ttagtcacctcaacctgcta

SEQ ID NO: 9996 - RNA, 20 nt, synthetic construct
  misc_feature 1..20: note = antisense sequence
  source 1..20: mol_type = other RNA
ctttagtcacctcaacctgc

SEQ ID NO: 9997 - RNA, 20 nt, synthetic construct
  misc_feature 1..20: note = antisense sequence
  source 1..20: mol_type = other RNA
tctttagtcacctcaacctg

SEQ ID NO: 9998 - RNA, 20 nt, synthetic construct
  misc_feature 1..20: note = antisense sequence
  source 1..20: mol_type = other RNA
tccattctttagtcacctca

SEQ ID NO: 9999 - RNA, 20 nt, synthetic construct
  misc_feature 1..20: note = antisense sequence
  source 1..20: mol_type = other RNA
cctccattctttagtcacct

SEQ ID NO: 10000 - RNA, 20 nt, synthetic construct
  misc_feature 1..20: note = antisense sequence
  source 1..20: mol_type = other RNA
gcatctatctaaaatcctcc

SEQ ID NO: 10001 - RNA, 20 nt, synthetic construct
  misc_feature 1..20: note = antisense sequence
  source 1..20: mol_type = other RNA
ggcatctatctaaaatcctc

SEQ ID NO: 10002 - RNA, 20 nt, synthetic construct
  misc_feature 1..20: note = antisense sequence
  source 1..20: mol_type = other RNA
ccctatttcctctcagtaaa

SEQ ID NO: 10003 - RNA, 20 nt, synthetic construct
  misc_feature 1..20: note = antisense sequence
  source 1..20: mol_type = other RNA
atcaccctatttcctctcag

SEQ ID NO: 10004 - RNA, 20 nt, synthetic construct
  misc_feature 1..20: note = antisense sequence
  source 1..20: mol_type = other RNA
aatcaccctatttcctctca

SEQ ID NO: 10005 - RNA, 20 nt, synthetic construct
  misc_feature 1..20: note = antisense sequence
  source 1..20: mol_type = other RNA
tcaatcaccctatttcctct

SEQ ID NO: 10006 - RNA, 20 nt, synthetic construct
  misc_feature 1..20: note = antisense sequence
  source 1..20: mol_type = other RNA
gaaaacacccaatccctata

SEQ ID NO: 10007 - RNA, 20 nt, synthetic construct
  misc_feature 1..20: note = antisense sequence
  source 1..20: mol_type = other RNA
gttgaaaacacccaatccct

SEQ ID NO: 10008 - RNA, 20 nt, synthetic construct
  misc_feature 1..20: note = antisense sequence
  source 1..20: mol_type = other RNA
agttgaaaacacccaatccc

SEQ ID NO: 10009 - RNA, 20 nt, synthetic construct
  misc_feature 1..20: note = antisense sequence
  source 1..20: mol_type = other RNA
tgagttgaaaacacccaatc

SEQ ID NO: 10010 - RNA, 20 nt, synthetic construct
  misc_feature 1..20: note = antisense sequence
  source 1..20: mol_type = other RNA
gaggaaactgagttgaaaac

SEQ ID NO: 10011 - RNA, 20 nt, synthetic construct
  misc_feature 1..20: note = antisense sequence
  source 1..20: mol_type = other RNA
ggagcaattatgtccttatg

SEQ ID NO: 10012 - RNA, 20 nt, synthetic construct
  misc_feature 1..20: note = antisense sequence
  source 1..20: mol_type = other RNA
ctggttatgttggagcaatt

SEQ ID NO: 10013 - RNA, 20 nt, synthetic construct
  misc_feature 1..20: note = antisense sequence
  source 1..20: mol_type = other RNA
actggttatgttggagcaat

SEQ ID NO: 10014 - RNA, 20 nt, synthetic construct
  misc_feature 1..20: note = antisense sequence
  source 1..20: mol_type = other RNA
cactggttatgttggagcaa

SEQ ID NO: 10015 - RNA, 20 nt, synthetic construct
  misc_feature 1..20: note = antisense sequence
  source 1..20: mol_type = other RNA
acactggttatgttggagca

SEQ ID NO: 10016 - RNA, 20 nt, synthetic construct
  misc_feature 1..20: note = antisense sequence
  source 1..20: mol_type = other RNA
atctttgagttaccctctag

SEQ ID NO: 10017 - RNA, 20 nt, synthetic construct
  misc_feature 1..20: note = antisense sequence
  source 1..20: mol_type = other RNA
catctttgagttaccctcta

SEQ ID NO: 10018 - RNA, 20 nt, synthetic construct
  misc_feature 1..20: note = antisense sequence
  source 1..20: mol_type = other RNA
tcatctttgagttaccctct

SEQ ID NO: 10019 - RNA, 20 nt, synthetic construct
  misc_feature 1..20: note = antisense sequence
  source 1..20: mol_type = other RNA
atcactgatgtcagaaagct

SEQ ID NO: 10020 - RNA, 20 nt, synthetic construct
  misc_feature 1..20: note = antisense sequence
  source 1..20: mol_type = other RNA
aatcactgatgtcagaaagc

SEQ ID NO: 10021 - RNA, 20 nt, synthetic construct
  misc_feature 1..20: note = antisense sequence
  source 1..20: mol_type = other RNA
tgctgaaatcactgatgtca

SEQ ID NO: 10022 - RNA, 20 nt, synthetic construct
  misc_feature 1..20: note = antisense sequence
  source 1..20: mol_type = other RNA
ctgctgaaatcactgatgtc

SEQ ID NO: 10023 - RNA, 20 nt, synthetic construct
  misc_feature 1..20: note = antisense sequence
  source 1..20: mol_type = other RNA
tcctctgctgaaatcactga

SEQ ID NO: 10024 - RNA, 20 nt, synthetic construct
  misc_feature 1..20: note = antisense sequence
  source 1..20: mol_type = other RNA
ctcctctgctgaaatcactg

SEQ ID NO: 10025 - RNA, 20 nt, synthetic construct
  misc_feature 1..20: note = antisense sequence
  source 1..20: mol_type = other RNA
tttccaggctcctctgctga

SEQ ID NO: 10026 - RNA, 20 nt, synthetic construct
  misc_feature 1..20: note = antisense sequence
  source 1..20: mol_type = other RNA
tctgttacttgctttagagc

SEQ ID NO: 10027 - RNA, 20 nt, synthetic construct
  misc_feature 1..20: note = antisense sequence
  source 1..20: mol_type = other RNA
cctctgttacttgctttaga

SEQ ID NO: 10028 - RNA, 20 nt, synthetic construct
  misc_feature 1..20: note = antisense sequence
  source 1..20: mol_type = other RNA
ttgcctctgttacttgcttt

SEQ ID NO: 10029 - RNA, 20 nt, synthetic construct
  misc_feature 1..20: note = antisense sequence
  source 1..20: mol_type = other RNA
gttgcctctgttacttgctt

SEQ ID NO: 10030 - RNA, 20 nt, synthetic construct
  misc_feature 1..20: note = antisense sequence
  source 1..20: mol_type = other RNA
gtgaagttgcctctgttact

SEQ ID NO: 10031 - RNA, 20 nt, synthetic construct
  misc_feature 1..20: note = antisense sequence
  source 1..20: mol_type = other RNA
tggtgaagttgcctctgtta

SEQ ID NO: 10032 - RNA, 20 nt, synthetic construct
  misc_feature 1..20: note = antisense sequence
  source 1..20: mol_type = other RNA
ttggtgaagttgcctctgtt

SEQ ID NO: 10033 - RNA, 20 nt, synthetic construct
  misc_feature 1..20: note = antisense sequence
  source 1..20: mol_type = other RNA
gttggtgaagttgcctctgt

SEQ ID NO: 10034 - RNA, 20 nt, synthetic construct
  misc_feature 1..20: note = antisense sequence
  source 1..20: mol_type = other RNA
tgttggtgaagttgcctctg

SEQ ID NO: 10035 - RNA, 20 nt, synthetic construct
  misc_feature 1..20: note = antisense sequence
  source 1..20: mol_type = other RNA
ctgttggtgaagttgcctct

SEQ ID NO: 10036 - RNA, 20 nt, synthetic construct
  misc_feature 1..20: note = antisense sequence
  source 1..20: mol_type = other RNA
cctgttggtgaagttgcctc

SEQ ID NO: 10037 - RNA, 20 nt, synthetic construct
  misc_feature 1..20: note = antisense sequence
  source 1..20: mol_type = other RNA
gcctgttggtgaagttgcct

SEQ ID NO: 10038 - RNA, 20 nt, synthetic construct
  misc_feature 1..20: note = antisense sequence
  source 1..20: mol_type = other RNA
ttgcctgttggtgaagttgc

SEQ ID NO: 10039 - RNA, 20 nt, synthetic construct
  misc_feature 1..20: note = antisense sequence
  source 1..20: mol_type = other RNA
tttgcctgttggtgaagttg

SEQ ID NO: 10040 - RNA, 20 nt, synthetic construct
  misc_feature 1..20: note = antisense sequence
  source 1..20: mol_type = other RNA
ctttgcctgttggtgaagtt

SEQ ID NO: 10041 - RNA, 20 nt, synthetic construct
  misc_feature 1..20: note = antisense sequence
  source 1..20: mol_type = other RNA
cctactttgcctgttggtga

SEQ ID NO: 10042 - RNA, 20 nt, synthetic construct
  misc_feature 1..20: note = antisense sequence
  source 1..20: mol_type = other RNA
gcctactttgcctgttggtg

SEQ ID NO: 10043 - RNA, 20 nt, synthetic construct
  misc_feature 1..20: note = antisense sequence
  source 1..20: mol_type = other RNA
tgcctactttgcctgttggt

SEQ ID NO: 10044 - RNA, 20 nt, synthetic construct
  misc_feature 1..20: note = antisense sequence
  source 1..20: mol_type = other RNA
aattgcctactttgcctgtt

SEQ ID NO: 10045 - RNA, 20 nt, synthetic construct
  misc_feature 1..20: note = antisense sequence
  source 1..20: mol_type = other RNA
tacttgggtaagggaggtaa

SEQ ID NO: 10046 - RNA, 20 nt, synthetic construct
  misc_feature 1..20: note = antisense sequence
  source 1..20: mol_type = other RNA
ggtgattcattacttgggta

SEQ ID NO: 10047 - RNA, 20 nt, synthetic construct
  misc_feature 1..20: note = antisense sequence
  source 1..20: mol_type = other RNA
aggtgattcattacttgggt

SEQ ID NO: 10048 - RNA, 20 nt, synthetic construct
  misc_feature 1..20: note = antisense sequence
  source 1..20: mol_type = other RNA
caggtgattcattacttggg

SEQ ID NO: 10049 - RNA, 20 nt, synthetic construct
  misc_feature 1..20: note = antisense sequence
  source 1..20: mol_type = other RNA
ccaggtgattcattacttgg

SEQ ID NO: 10050 - RNA, 20 nt, synthetic construct
  misc_feature 1..20: note = antisense sequence
  source 1..20: mol_type = other RNA
atctcaaaatccagactcag

SEQ ID NO: 10051 - RNA, 20 nt, synthetic construct
  misc_feature 1..20: note = antisense sequence
  source 1..20: mol_type = other RNA
cctatctcaaaatccagact

SEQ ID NO: 10052 - RNA, 20 nt, synthetic construct
  misc_feature 1..20: note = antisense sequence
  source 1..20: mol_type = other RNA
gctatctctcctacactttt

SEQ ID NO: 10053 - RNA, 20 nt, synthetic construct
  misc_feature 1..20: note = antisense sequence
  source 1..20: mol_type = other RNA
ggctatctctcctacacttt

SEQ ID NO: 10054 - RNA, 20 nt, synthetic construct
  misc_feature 1..20: note = antisense sequence
  source 1..20: mol_type = other RNA
tggctatctctcctacactt

SEQ ID NO: 10055 - RNA, 20 nt, synthetic construct
  misc_feature 1..20: note = antisense sequence
  source 1..20: mol_type = other RNA
atggctatctctcctacact

SEQ ID NO: 10056 - RNA, 20 nt, synthetic construct
  misc_feature 1..20: note = antisense sequence
  source 1..20: mol_type = other RNA
aatggctatctctcctacac

SEQ ID NO: 10057 - RNA, 20 nt, synthetic construct
  misc_feature 1..20: note = antisense sequence
  source 1..20: mol_type = other RNA
gtaatggctatctctcctac

SEQ ID NO: 10058 - RNA, 20 nt, synthetic construct
  misc_feature 1..20: note = antisense sequence
  source 1..20: mol_type = other RNA
cagtaatggctatctctcct

SEQ ID NO: 10059 - RNA, 20 nt, synthetic construct
  misc_feature 1..20: note = antisense sequence
  source 1..20: mol_type = other RNA
ccagtaatggctatctctcc

SEQ ID NO: 10060 - RNA, 20 nt, synthetic construct
  misc_feature 1..20: note = antisense sequence
  source 1..20: mol_type = other RNA
cccagtaatggctatctctc

SEQ ID NO: 10061 - RNA, 20 nt, synthetic construct
  misc_feature 1..20: note = antisense sequence
  source 1..20: mol_type = other RNA
ccttgctccatattcttcct

SEQ ID NO: 10062 - RNA, 20 nt, synthetic construct
  misc_feature 1..20: note = antisense sequence
  source 1..20: mol_type = other RNA
cagatttgatttcccttgct

SEQ ID NO: 10063 - RNA, 20 nt, synthetic construct
  misc_feature 1..20: note = antisense sequence
  source 1..20: mol_type = other RNA
cccagatttgatttcccttg

SEQ ID NO: 10064 - RNA, 20 nt, synthetic construct
  misc_feature 1..20: note = antisense sequence
  source 1..20: mol_type = other RNA
ataacgcaggcagctaactg

SEQ ID NO: 10065 - RNA, 20 nt, synthetic construct
  misc_feature 1..20: note = antisense sequence
  source 1..20: mol_type = other RNA
gataacgcaggcagctaact

SEQ ID NO: 10066 - RNA, 20 nt, synthetic construct
  misc_feature 1..20: note = antisense sequence
  source 1..20: mol_type = other RNA
ggataacgcaggcagctaac

SEQ ID NO: 10067 - RNA, 20 nt, synthetic construct
  misc_feature 1..20: note = antisense sequence
  source 1..20: mol_type = other RNA
tggataacgcaggcagctaa

SEQ ID NO: 10068 - RNA, 20 nt, synthetic construct
  misc_feature 1..20: note = antisense sequence
  source 1..20: mol_type = other RNA
ttggataacgcaggcagcta

SEQ ID NO: 10069 - RNA, 20 nt, synthetic construct
  misc_feature 1..20: note = antisense sequence
  source 1..20: mol_type = other RNA
attggataacgcaggcagct

SEQ ID NO: 10070 - RNA, 20 nt, synthetic construct
  misc_feature 1..20: note = antisense sequence
  source 1..20: mol_type = other RNA
gattggataacgcaggcagc

SEQ ID NO: 10071 - RNA, 20 nt, synthetic construct
  misc_feature 1..20: note = antisense sequence
  source 1..20: mol_type = other RNA
agattggataacgcaggcag

SEQ ID NO: 10072 - RNA, 20 nt, synthetic construct
  misc_feature 1..20: note = antisense sequence
  source 1..20: mol_type = other RNA
cagattggataacgcaggca

SEQ ID NO: 10073 - RNA, 20 nt, synthetic construct
  misc_feature 1..20: note = antisense sequence
  source 1..20: mol_type = other RNA
acagattggataacgcaggc

SEQ ID NO: 10074 - RNA, 20 nt, synthetic construct
  misc_feature 1..20: note = antisense sequence
  source 1..20: mol_type = other RNA
cacagattggataacgcagg

SEQ ID NO: 10075 - RNA, 20 nt, synthetic construct
  misc_feature 1..20: note = antisense sequence
  source 1..20: mol_type = other RNA
ccacagattggataacgcag

SEQ ID NO: 10076 - RNA, 20 nt, synthetic construct
  misc_feature 1..20: note = antisense sequence
  source 1..20: mol_type = other RNA
attccctttagtccacagat

SEQ ID NO: 10077 - RNA, 20 nt, synthetic construct
  misc_feature 1..20: note = antisense sequence
  source 1..20: mol_type = other RNA
tcctttcattccctttagtc

SEQ ID NO: 10078 - RNA, 20 nt, synthetic construct
  misc_feature 1..20: note = antisense sequence
  source 1..20: mol_type = other RNA
ctactgccttcctcctttca

SEQ ID NO: 10079 - RNA, 20 nt, synthetic construct
  misc_feature 1..20: note = antisense sequence
  source 1..20: mol_type = other RNA
atcagcccttcccaactcca

SEQ ID NO: 10080 - RNA, 20 nt, synthetic construct
  misc_feature 1..20: note = antisense sequence
  source 1..20: mol_type = other RNA
aatcagcccttcccaactcc

SEQ ID NO: 10081 - RNA, 20 nt, synthetic construct
  misc_feature 1..20: note = antisense sequence
  source 1..20: mol_type = other RNA
caaatcagcccttcccaact

SEQ ID NO: 10082 - RNA, 20 nt, synthetic construct
  misc_feature 1..20: note = antisense sequence
  source 1..20: mol_type = other RNA
ccaaatcagcccttcccaac

SEQ ID NO: 10083 - RNA, 20 nt, synthetic construct
  misc_feature 1..20: note = antisense sequence
  source 1..20: mol_type = other RNA
tttctcccaaatcagccctt

SEQ ID NO: 10084 - RNA, 20 nt, synthetic construct
  misc_feature 1..20: note = antisense sequence
  source 1..20: mol_type = other RNA
ctttgtctaaccttgctgca

SEQ ID NO: 10085 - RNA, 20 nt, synthetic construct
  misc_feature 1..20: note = antisense sequence
  source 1..20: mol_type = other RNA
gctttgtctaaccttgctgc

SEQ ID NO: 10086 - RNA, 20 nt, synthetic construct
  misc_feature 1..20: note = antisense sequence
  source 1..20: mol_type = other RNA
agctttgtctaaccttgctg

SEQ ID NO: 10087 - RNA, 20 nt, synthetic construct
  misc_feature 1..20: note = antisense sequence
  source 1..20: mol_type = other RNA
gagctttgtctaaccttgct

SEQ ID NO: 10088 - RNA, 20 nt, synthetic construct
  misc_feature 1..20: note = antisense sequence
  source 1..20: mol_type = other RNA
tgagctttgtctaaccttgc

SEQ ID NO: 10089 - RNA, 20 nt, synthetic construct
  misc_feature 1..20: note = antisense sequence
  source 1..20: mol_type = other RNA
agtgagctttgtctaacctt

SEQ ID NO: 10090 - RNA, 20 nt, synthetic construct
  misc_feature 1..20: note = antisense sequence
  source 1..20: mol_type = other RNA
cagtgagctttgtctaacct

SEQ ID NO: 10091 - RNA, 20 nt, synthetic construct
  misc_feature 1..20: note = antisense sequence
  source 1..20: mol_type = other RNA
gcagtgagctttgtctaacc

SEQ ID NO: 10092 - RNA, 20 nt, synthetic construct
  misc_feature 1..20: note = antisense sequence
  source 1..20: mol_type = other RNA
agcagtgagctttgtctaac

SEQ ID NO: 10093 - RNA, 20 nt, synthetic construct
  misc_feature 1..20: note = antisense sequence
  source 1..20: mol_type = other RNA
tgagcagtgagctttgtcta

SEQ ID NO: 10094 - RNA, 20 nt, synthetic construct
  misc_feature 1..20: note = antisense sequence
  source 1..20: mol_type = other RNA
ttgagcagtgagctttgtct

SEQ ID NO: 10095 - RNA, 20 nt, synthetic construct
  misc_feature 1..20: note = antisense sequence
  source 1..20: mol_type = other RNA
gggttacacacttgagcagt

SEQ ID NO: 10096 - RNA, 20 nt, synthetic construct
  misc_feature 1..20: note = antisense sequence
  source 1..20: mol_type = other RNA
agggttacacacttgagcag

SEQ ID NO: 10097 - RNA, 20 nt, synthetic construct
  misc_feature 1..20: note = antisense sequence
  source 1..20: mol_type = other RNA
cagggttacacacttgagca

SEQ ID NO: 10098 - RNA, 20 nt, synthetic construct
  misc_feature 1..20: note = antisense sequence
  source 1..20: mol_type = other RNA
gcagggttacacacttgagc

SEQ ID NO: 10099 - RNA, 20 nt, synthetic construct
  misc_feature 1..20: note = antisense sequence
  source 1..20: mol_type = other RNA
ctggaggaataatcaggtta

SEQ ID NO: 10100 - RNA, 20 nt, synthetic construct
  misc_feature 1..20: note = antisense sequence
  source 1..20: mol_type = other RNA
gctggaggaataatcaggtt

SEQ ID NO: 10101 - RNA, 20 nt, synthetic construct
  misc_feature 1..20: note = antisense sequence
  source 1..20: mol_type = other RNA
gaaagaagagggcaccatga

SEQ ID NO: 10102 - RNA, 20 nt, synthetic construct
  misc_feature 1..20: note = antisense sequence
  source 1..20: mol_type = other RNA
aatggaaagaaaggcagtga

SEQ ID NO: 10103 - RNA, 20 nt, synthetic construct
  misc_feature 1..20: note = antisense sequence
  source 1..20: mol_type = other RNA
ctaccctaagaatggaaaga

SEQ ID NO: 10104 - RNA, 20 nt, synthetic construct
  misc_feature 1..20: note = antisense sequence
  source 1..20: mol_type = other RNA
tctaccctaagaatggaaag

SEQ ID NO: 10105 - RNA, 20 nt, synthetic construct
  misc_feature 1..20: note = antisense sequence
  source 1..20: mol_type = other RNA
gaagaagaccaggatgggaa

SEQ ID NO: 10106 - RNA, 20 nt, synthetic construct
  misc_feature 1..20: note = antisense sequence
  source 1..20: mol_type = other RNA
tgaagaagaccaggatggga

SEQ ID NO: 10107 - RNA, 20 nt, synthetic construct
  misc_feature 1..20: note = antisense sequence
  source 1..20: mol_type = other RNA
gtgaagaagaccaggatggg

SEQ ID NO: 10108 - RNA, 20 nt, synthetic construct
  misc_feature 1..20: note = antisense sequence
  source 1..20: mol_type = other RNA
actgtgtatgtgaagaagac

SEQ ID NO: 10109 - RNA, 20 nt, synthetic construct
  misc_feature 1..20: note = antisense sequence
  source 1..20: mol_type = other RNA
ggaaactgtgtatgtgaaga

SEQ ID NO: 10110 - RNA, 20 nt, synthetic construct
  misc_feature 1..20: note = antisense sequence
  source 1..20: mol_type = other RNA
tagaagggcagagcgtccat

SEQ ID NO: 10111 - RNA, 20 nt, synthetic construct
  misc_feature 1..20: note = antisense sequence
  source 1..20: mol_type = other RNA
ctagaagggcagagcgtcca

SEQ ID NO: 10112 - RNA, 20 nt, synthetic construct
  misc_feature 1..20: note = antisense sequence
  source 1..20: mol_type = other RNA
agtgctagaagggcagagcg

SEQ ID NO: 10113 - RNA, 20 nt, synthetic construct
  misc_feature 1..20: note = antisense sequence
  source 1..20: mol_type = other RNA
gagtgctagaagggcagagc

SEQ ID NO: 10114 - RNA, 20 nt, synthetic construct
  misc_feature 1..20: note = antisense sequence
  source 1..20: mol_type = other RNA
gagtgagtgctagaagggca

SEQ ID NO: 10115 - RNA, 20 nt, synthetic construct
  misc_feature 1..20: note = antisense sequence
  source 1..20: mol_type = other RNA
agagtgagtgctagaagggc

SEQ ID NO: 10116 - RNA, 20 nt, synthetic construct
  misc_feature 1..20: note = antisense sequence
  source 1..20: mol_type = other RNA
caagagtgagtgctagaagg

SEQ ID NO: 10117 - RNA, 20 nt, synthetic construct
  misc_feature 1..20: note = antisense sequence
  source 1..20: mol_type = other RNA
tcaagagtgagtgctagaag

SEQ ID NO: 10118 - RNA, 20 nt, synthetic construct
  misc_feature 1..20: note = antisense sequence
  source 1..20: mol_type = other RNA
ttcaagagtgagtgctagaa

SEQ ID NO: 10119 - RNA, 20 nt, synthetic construct
  misc_feature 1..20: note = antisense sequence
  source 1..20: mol_type = other RNA
cttcaagagtgagtgctaga

SEQ ID NO: 10120 - RNA, 20 nt, synthetic construct
  misc_feature 1..20: note = antisense sequence
  source 1..20: mol_type = other RNA
acttcaagagtgagtgctag

SEQ ID NO: 10121 - RNA, 20 nt, synthetic construct
  misc_feature 1..20: note = antisense sequence
  source 1..20: mol_type = other RNA
gacttcaagagtgagtgcta

SEQ ID NO: 10122 - RNA, 20 nt, synthetic construct
  misc_feature 1..20: note = antisense sequence
  source 1..20: mol_type = other RNA
tgagacttcaagagtgagtg

SEQ ID NO: 10123 - RNA, 20 nt, synthetic construct
  misc_feature 1..20: note = antisense sequence
  source 1..20: mol_type = other RNA
ctgagacttcaagagtgagt

SEQ ID NO: 10124 - RNA, 20 nt, synthetic construct
  misc_feature 1..20: note = antisense sequence
  source 1..20: mol_type = other RNA
gaaaatccctaatcagccaa

SEQ ID NO: 10125 - RNA, 20 nt, synthetic construct
  misc_feature 1..20: note = antisense sequence
  source 1..20: mol_type = other RNA
ggaaaatccctaatcagcca

SEQ ID NO: 10126 - RNA, 20 nt, synthetic construct
  misc_feature 1..20: note = antisense sequence
  source 1..20: mol_type = other RNA
aggactgtatgggaaaatcc

SEQ ID NO: 10127 - RNA, 20 nt, synthetic construct
  misc_feature 1..20: note = antisense sequence
  source 1..20: mol_type = other RNA
aaggactgtatgggaaaatc

SEQ ID NO: 10128 - RNA, 20 nt, synthetic construct
  misc_feature 1..20: note = antisense sequence
  source 1..20: mol_type = other RNA
actgtggaaaggactgtatg

SEQ ID NO: 10129 - RNA, 20 nt, synthetic construct
  misc_feature 1..20: note = antisense sequence
  source 1..20: mol_type = other RNA
aactgtggaaaggactgtat

SEQ ID NO: 10130 - RNA, 20 nt, synthetic construct
  misc_feature 1..20: note = antisense sequence
  source 1..20: mol_type = other RNA
aaactgtggaaaggactgta

SEQ ID NO: 10131 - RNA, 20 nt, synthetic construct
  misc_feature 1..20: note = antisense sequence
  source 1..20: mol_type = other RNA
gagagagagattaaacacgt

SEQ ID NO: 10132 - RNA, 20 nt, synthetic construct
  misc_feature 1..20: note = antisense sequence
  source 1..20: mol_type = other RNA
ggagagagagattaaacacg

SEQ ID NO: 10133 - RNA, 20 nt, synthetic construct
  misc_feature 1..20: note = antisense sequence
  source 1..20: mol_type = other RNA
ctaaagctagaaggagagag

SEQ ID NO: 10134 - RNA, 20 nt, synthetic construct
  misc_feature 1..20: note = antisense sequence
  source 1..20: mol_type = other RNA
gtgggtagaatatgaaacac

SEQ ID NO: 10135 - RNA, 20 nt, synthetic construct
  misc_feature 1..20: note = antisense sequence
  source 1..20: mol_type = other RNA
ggtgggtagaatatgaaaca

SEQ ID NO: 10136 - RNA, 20 nt, synthetic construct
  misc_feature 1..20: note = antisense sequence
  source 1..20: mol_type = other RNA
tggtgggtagaatatgaaac

SEQ ID NO: 10137 - RNA, 20 nt, synthetic construct
  misc_feature 1..20: note = antisense sequence
  source 1..20: mol_type = other RNA
cttggtgggtagaatatgaa

SEQ ID NO: 10138 - RNA, 20 nt, synthetic construct
  misc_feature 1..20: note = antisense sequence
  source 1..20: mol_type = other RNA
ccttggtgggtagaatatga

SEQ ID NO: 10139 - RNA, 20 nt, synthetic construct
  misc_feature 1..20: note = antisense sequence
  source 1..20: mol_type = other RNA
ggccttggtgggtagaatat

SEQ ID NO: 10140 - RNA, 20 nt, synthetic construct
  misc_feature 1..20: note = antisense sequence
  source 1..20: mol_type = other RNA
acctatcagtacacaaatgc

SEQ ID NO: 10141 - RNA, 20 nt, synthetic construct
  misc_feature 1..20: note = antisense sequence
  source 1..20: mol_type = other RNA
gcaaacctatcagtacacaa

SEQ ID NO: 10142 - RNA, 20 nt, synthetic construct
  misc_feature 1..20: note = antisense sequence
  source 1..20: mol_type = other RNA
tgcaaacctatcagtacaca

SEQ ID NO: 10143 - RNA, 20 nt, synthetic construct
  misc_feature 1..20: note = antisense sequence
  source 1..20: mol_type = other RNA
gtgagttatacgtcaatcca

SEQ ID NO: 10144 - RNA, 20 nt, synthetic construct
  misc_feature 1..20: note = antisense sequence
  source 1..20: mol_type = other RNA
tgtgagttatacgtcaatcc

SEQ ID NO: 10145 - RNA, 20 nt, synthetic construct
  misc_feature 1..20: note = antisense sequence
  source 1..20: mol_type = other RNA
ctgtgagttatacgtcaatc

SEQ ID NO: 10146 - RNA, 20 nt, synthetic construct
  misc_feature 1..20: note = antisense sequence
  source 1..20: mol_type = other RNA
cactgtgagttatacgtcaa

SEQ ID NO: 10147 - RNA, 20 nt, synthetic construct
  misc_feature 1..20: note = antisense sequence
  source 1..20: mol_type = other RNA
ccactgtgagttatacgtca

SEQ ID NO: 10148 - RNA, 20 nt, synthetic construct
  misc_feature 1..20: note = antisense sequence
  source 1..20: mol_type = other RNA
gccactgtgagttatacgtc

SEQ ID NO: 10149 - RNA, 20 nt, synthetic construct
  misc_feature 1..20: note = antisense sequence
  source 1..20: mol_type = other RNA
agccactgtgagttatacgt

SEQ ID NO: 10150 - RNA, 20 nt, synthetic construct
  misc_feature 1..20: note = antisense sequence
  source 1..20: mol_type = other RNA
aagccactgtgagttatacg

SEQ ID NO: 10151 - RNA, 20 nt, synthetic construct
  misc_feature 1..20: note = antisense sequence
  source 1..20: mol_type = other RNA
caagccactgtgagttatac

SEQ ID NO: 10152 - RNA, 20 nt, synthetic construct
  misc_feature 1..20: note = antisense sequence
  source 1..20: mol_type = other RNA
accaagccactgtgagttat

SEQ ID NO: 10153 - RNA, 20 nt, synthetic construct
  misc_feature 1..20: note = antisense sequence
  source 1..20: mol_type = other RNA
taccaagccactgtgagtta

SEQ ID NO: 10154 - RNA, 20 nt, synthetic construct
  misc_feature 1..20: note = antisense sequence
  source 1..20: mol_type = other RNA
ataccaagccactgtgagtt

SEQ ID NO: 10155 - RNA, 20 nt, synthetic construct
  misc_feature 1..20: note = antisense sequence
  source 1..20: mol_type = other RNA
aataccaagccactgtgagt

SEQ ID NO: 10156 - RNA, 20 nt, synthetic construct
  misc_feature 1..20: note = antisense sequence
  source 1..20: mol_type = other RNA
aaataccaagccactgtgag

SEQ ID NO: 10157 - RNA, 20 nt, synthetic construct
  misc_feature 1..20: note = antisense sequence
  source 1..20: mol_type = other RNA
ctgaaataccaagccactgt

SEQ ID NO: 10158 - RNA, 20 nt, synthetic construct
  misc_feature 1..20: note = antisense sequence
  source 1..20: mol_type = other RNA
caacctgaaataccaagcca

SEQ ID NO: 10159 - RNA, 20 nt, synthetic construct
  misc_feature 1..20: note = antisense sequence
  source 1..20: mol_type = other RNA
tccaacctgaaataccaagc

SEQ ID NO: 10160 - RNA, 20 nt, synthetic construct
  misc_feature 1..20: note = antisense sequence
  source 1..20: mol_type = other RNA
ttccaacctgaaataccaag

SEQ ID NO: 10161 - RNA, 20 nt, synthetic construct
  misc_feature 1..20: note = antisense sequence
  source 1..20: mol_type = other RNA
acgttttctccatactgtac

SEQ ID NO: 10162 - RNA, 20 nt, synthetic construct
  misc_feature 1..20: note = antisense sequence
  source 1..20: mol_type = other RNA
gtcacgttttctccatactg

SEQ ID NO: 10163 - RNA, 20 nt, synthetic construct
  misc_feature 1..20: note = antisense sequence
  source 1..20: mol_type = other RNA
ggtcacgttttctccatact

SEQ ID NO: 10164 - RNA, 20 nt, synthetic construct
  misc_feature 1..20: note = antisense sequence
  source 1..20: mol_type = other RNA
gggtcacgttttctccatac

SEQ ID NO: 10165 - RNA, 20 nt, synthetic construct
  misc_feature 1..20: note = antisense sequence
  source 1..20: mol_type = other RNA
tgggtcacgttttctccata

SEQ ID NO: 10166 - RNA, 20 nt, synthetic construct
  misc_feature 1..20: note = antisense sequence
  source 1..20: mol_type = other RNA
catgggtcacgttttctcca

SEQ ID NO: 10167 - RNA, 20 nt, synthetic construct
  misc_feature 1..20: note = antisense sequence
  source 1..20: mol_type = other RNA
tcatgggtcacgttttctcc

SEQ ID NO: 10168 - RNA, 20 nt, synthetic construct
  misc_feature 1..20: note = antisense sequence
  source 1..20: mol_type = other RNA
caagtacctcttcggtggaa

SEQ ID NO: 10169 - RNA, 20 nt, synthetic construct
  misc_feature 1..20: note = antisense sequence
  source 1..20: mol_type = other RNA
acaagtacctcttcggtgga

SEQ ID NO: 10170 - RNA, 20 nt, synthetic construct
  misc_feature 1..20: note = antisense sequence
  source 1..20: mol_type = other RNA
aacaagtacctcttcggtgg

SEQ ID NO: 10171 - RNA, 20 nt, synthetic construct
  misc_feature 1..20: note = antisense sequence
  source 1..20: mol_type = other RNA
tgcaacaagtacctcttcgg

SEQ ID NO: 10172 - RNA, 20 nt, synthetic construct
  misc_feature 1..20: note = antisense sequence
  source 1..20: mol_type = other RNA
ctgcaacaagtacctcttcg

SEQ ID NO: 10173 - RNA, 20 nt, synthetic construct
  misc_feature 1..20: note = antisense sequence
  source 1..20: mol_type = other RNA
gctgcaacaagtacctcttc

SEQ ID NO: 10174 - RNA, 20 nt, synthetic construct
  misc_feature 1..20: note = antisense sequence
  source 1..20: mol_type = other RNA
tgctgcaacaagtacctctt

SEQ ID NO: 10175 - RNA, 20 nt, synthetic construct
  misc_feature 1..20: note = antisense sequence
  source 1..20: mol_type = other RNA
ttgctgcaacaagtacctct

SEQ ID NO: 10176 - RNA, 20 nt, synthetic construct
  misc_feature 1..20: note = antisense sequence
  source 1..20: mol_type = other RNA
tctttgctgcaacaagtacc

SEQ ID NO: 10177 - RNA, 20 nt, synthetic construct
  misc_feature 1..20: note = antisense sequence
  source 1..20: mol_type = other RNA
ttctttgctgcaacaagtac

SEQ ID NO: 10178 - RNA, 20 nt, synthetic construct
  misc_feature 1..20: note = antisense sequence
  source 1..20: mol_type = other RNA
cggccacctctctggactat

SEQ ID NO: 10179 - RNA, 20 nt, synthetic construct
  misc_feature 1..20: note = antisense sequence
  source 1..20: mol_type = other RNA
gagctgtcatagtctggcgg

SEQ ID NO: 10180 - RNA, 20 nt, synthetic construct
  misc_feature 1..20: note = antisense sequence
  source 1..20: mol_type = other RNA
agagctgtcatagtctggcg

SEQ ID NO: 10181 - RNA, 20 nt, synthetic construct
  misc_feature 1..20: note = antisense sequence
  source 1..20: mol_type = other RNA
aagagctgtcatagtctggc

SEQ ID NO: 10182 - RNA, 20 nt, synthetic construct
  misc_feature 1..20: note = antisense sequence
  source 1..20: mol_type = other RNA
caagagctgtcatagtctgg

SEQ ID NO: 10183 - RNA, 20 nt, synthetic construct
  misc_feature 1..20: note = antisense sequence
  source 1..20: mol_type = other RNA
ccaagagctgtcatagtctg

SEQ ID NO: 10184 - RNA, 20 nt, synthetic construct
  misc_feature 1..20: note = antisense sequence
  source 1..20: mol_type = other RNA
tccaagagctgtcatagtct

SEQ ID NO: 10185 - RNA, 20 nt, synthetic construct
  misc_feature 1..20: note = antisense sequence
  source 1..20: mol_type = other RNA
tattccaagagctgtcatag

SEQ ID NO: 10186 - RNA, 20 nt, synthetic construct
  misc_feature 1..20: note = antisense sequence
  source 1..20: mol_type = other RNA
gtgtctattccaagagctgt

SEQ ID NO: 10187 - RNA, 20 nt, synthetic construct
  misc_feature 1..20: note = antisense sequence
  source 1..20: mol_type = other RNA
tgtgtctattccaagagctg

SEQ ID NO: 10188 - RNA, 20 nt, synthetic construct
  misc_feature 1..20: note = antisense sequence
  source 1..20: mol_type = other RNA
gctgtgtctattccaagagc

SEQ ID NO: 10189 - RNA, 20 nt, synthetic construct
  misc_feature 1..20: note = antisense sequence
  source 1..20: mol_type = other RNA
accttgctgtgtctattcca

SEQ ID NO: 10190 - RNA, 20 nt, synthetic construct
  misc_feature 1..20: note = antisense sequence
  source 1..20: mol_type = other RNA
taccttgctgtgtctattcc

SEQ ID NO: 10191 - RNA, 20 nt, synthetic construct
  misc_feature 1..20: note = antisense sequence
  source 1..20: mol_type = other RNA
catataccttgctgtgtcta

SEQ ID NO: 10192 - RNA, 20 nt, synthetic construct
  misc_feature 1..20: note = antisense sequence
  source 1..20: mol_type = other RNA
ccatataccttgctgtgtct

SEQ ID NO: 10193 - RNA, 20 nt, synthetic construct
  misc_feature 1..20: note = antisense sequence
  source 1..20: mol_type = other RNA
atggtgagattgtgtcatac

SEQ ID NO: 10194 - RNA, 20 nt, synthetic construct
  misc_feature 1..20: note = antisense sequence
  source 1..20: mol_type = other RNA
gatggtgagattgtgtcata

SEQ ID NO: 10195 - RNA, 20 nt, synthetic construct
  misc_feature 1..20: note = antisense sequence
  source 1..20: mol_type = other RNA
taagaaggatggtgagattg

SEQ ID NO: 10196 - RNA, 20 nt, synthetic construct
  misc_feature 1..20: note = antisense sequence
  source 1..20: mol_type = other RNA
aggataagaaggatggtgag

SEQ ID NO: 10197 - RNA, 20 nt, synthetic construct
  misc_feature 1..20: note = antisense sequence
  source 1..20: mol_type = other RNA
ccgttcttttagattgagac

SEQ ID NO: 10198 - RNA, 20 nt, synthetic construct
  misc_feature 1..20: note = antisense sequence
  source 1..20: mol_type = other RNA
gagtagaggtagacctattt

SEQ ID NO: 10199 - RNA, 20 nt, synthetic construct
  misc_feature 1..20: note = antisense sequence
  source 1..20: mol_type = other RNA
tgagtagaggtagacctatt

SEQ ID NO: 10200 - RNA, 20 nt, synthetic construct
  misc_feature 1..20: note = antisense sequence
  source 1..20: mol_type = other RNA
ttgagtagaggtagacctat

SEQ ID NO: 10201 - RNA, 20 nt, synthetic construct
  misc_feature 1..20: note = antisense sequence
  source 1..20: mol_type = other RNA
attgagtagaggtagaccta

SEQ ID NO: 10202 - RNA, 20 nt, synthetic construct
  misc_feature 1..20: note = antisense sequence
  source 1..20: mol_type = other RNA
atattgagtagaggtagacc

SEQ ID NO: 10203 - RNA, 20 nt, synthetic construct
  misc_feature 1..20: note = antisense sequence
  source 1..20: mol_type = other RNA
gcttcgataacggtaaatca

SEQ ID NO: 10204 - RNA, 20 nt, synthetic construct
  misc_feature 1..20: note = antisense sequence
  source 1..20: mol_type = other RNA
agcttcgataacggtaaatc

SEQ ID NO: 10205 - RNA, 20 nt, synthetic construct
  misc_feature 1..20: note = antisense sequence
  source 1..20: mol_type = other RNA
gtagcttcgataacggtaaa

SEQ ID NO: 10206 - RNA, 20 nt, synthetic construct
  misc_feature 1..20: note = antisense sequence
  source 1..20: mol_type = other RNA
agtagcttcgataacggtaa

SEQ ID NO: 10207 - RNA, 20 nt, synthetic construct
  misc_feature 1..20: note = antisense sequence
  source 1..20: mol_type = other RNA
tagtagcttcgataacggta

SEQ ID NO: 10208 - RNA, 20 nt, synthetic construct
  misc_feature 1..20: note = antisense sequence
  source 1..20: mol_type = other RNA
ctagtagcttcgataacggt

SEQ ID NO: 10209 - RNA, 20 nt, synthetic construct
  misc_feature 1..20: note = antisense sequence
  source 1..20: mol_type = other RNA
ggagagaggattacaaatga

SEQ ID NO: 10210 - RNA, 20 nt, synthetic construct
  misc_feature 1..20: note = antisense sequence
  source 1..20: mol_type = other RNA
tggagggaatctaaagaaag

SEQ ID NO: 10211 - RNA, 20 nt, synthetic construct
  misc_feature 1..20: note = antisense sequence
  source 1..20: mol_type = other RNA
agggttgtaaattggaggga

SEQ ID NO: 10212 - RNA, 20 nt, synthetic construct
  misc_feature 1..20: note = antisense sequence
  source 1..20: mol_type = other RNA
aagggttgtaaattggaggg

SEQ ID NO: 10213 - RNA, 20 nt, synthetic construct
  misc_feature 1..20: note = antisense sequence
  source 1..20: mol_type = other RNA
ggaagggttgtaaattggag

SEQ ID NO: 10214 - RNA, 20 nt, synthetic construct
  misc_feature 1..20: note = antisense sequence
  source 1..20: mol_type = other RNA
aggaagggttgtaaattgga

SEQ ID NO: 10215 - RNA, 20 nt, synthetic construct
  misc_feature 1..20: note = antisense sequence
  source 1..20: mol_type = other RNA
ttcaccataaggaaaactgc

SEQ ID NO: 10216 - RNA, 20 nt, synthetic construct
  misc_feature 1..20: note = antisense sequence
  source 1..20: mol_type = other RNA
gtgttcaccataaggaaaac

SEQ ID NO: 10217 - RNA, 20 nt, synthetic construct
  misc_feature 1..20: note = antisense sequence
  source 1..20: mol_type = other RNA
ctgagttatgtgttcaccat

SEQ ID NO: 10218 - RNA, 20 nt, synthetic construct
  misc_feature 1..20: note = antisense sequence
  source 1..20: mol_type = other RNA
gactgagttatgtgttcacc

SEQ ID NO: 10219 - RNA, 20 nt, synthetic construct
  misc_feature 1..20: note = antisense sequence
  source 1..20: mol_type = other RNA
agactgagttatgtgttcac

SEQ ID NO: 10220 - RNA, 20 nt, synthetic construct
  misc_feature 1..20: note = antisense sequence
  source 1..20: mol_type = other RNA
cagactgagttatgtgttca

SEQ ID NO: 10221 - RNA, 20 nt, synthetic construct
  misc_feature 1..20: note = antisense sequence
  source 1..20: mol_type = other RNA
acagactgagttatgtgttc

SEQ ID NO: 10222 - RNA, 20 nt, synthetic construct
  misc_feature 1..20: note = antisense sequence
  source 1..20: mol_type = other RNA
caaccacagactgagttatg

SEQ ID NO: 10223 - RNA, 20 nt, synthetic construct
  misc_feature 1..20: note = antisense sequence
  source 1..20: mol_type = other RNA
tcaaccacagactgagttat

SEQ ID NO: 10224 - RNA, 20 nt, synthetic construct
  misc_feature 1..20: note = antisense sequence
  source 1..20: mol_type = other RNA
attcaaccacagactgagtt

SEQ ID NO: 10225 - RNA, 20 nt, synthetic construct
  misc_feature 1..20: note = antisense sequence
  source 1..20: mol_type = other RNA
aattcaaccacagactgagt

SEQ ID NO: 10226 - RNA, 20 nt, synthetic construct
  misc_feature 1..20: note = antisense sequence
  source 1..20: mol_type = other RNA
aaattcaaccacagactgag

SEQ ID NO: 10227 - RNA, 20 nt, synthetic construct
  misc_feature 1..20: note = antisense sequence
  source 1..20: mol_type = other RNA
ctacatttgtaagagaggac

SEQ ID NO: 10228 - RNA, 20 nt, synthetic construct
  misc_feature 1..20: note = antisense sequence
  source 1..20: mol_type = other RNA
gataagagaacacacaggaa

SEQ ID NO: 10229 - RNA, 20 nt, synthetic construct
  misc_feature 1..20: note = antisense sequence
  source 1..20: mol_type = other RNA
tgagataagagaacacacag

SEQ ID NO: 10230 - RNA, 20 nt, synthetic construct
  misc_feature 1..20: note = antisense sequence
  source 1..20: mol_type = other RNA
cacctaaggcaagagttcag

SEQ ID NO: 10231 - RNA, 20 nt, synthetic construct
  misc_feature 1..20: note = antisense sequence
  source 1..20: mol_type = other RNA
tccacctaaggcaagagttc

SEQ ID NO: 10232 - RNA, 20 nt, synthetic construct
  misc_feature 1..20: note = antisense sequence
  source 1..20: mol_type = other RNA
ttccacctaaggcaagagtt

SEQ ID NO: 10233 - RNA, 20 nt, synthetic construct
  misc_feature 1..20: note = antisense sequence
  source 1..20: mol_type = other RNA
tttccacctaaggcaagagt

SEQ ID NO: 10234 - RNA, 20 nt, synthetic construct
  misc_feature 1..20: note = antisense sequence
  source 1..20: mol_type = other RNA
ctttccacctaaggcaagag

SEQ ID NO: 10235 - RNA, 20 nt, synthetic construct
  misc_feature 1..20: note = antisense sequence
  source 1..20: mol_type = other RNA
gctttccacctaaggcaaga

SEQ ID NO: 10236 - RNA, 20 nt, synthetic construct
  misc_feature 1..20: note = antisense sequence
  source 1..20: mol_type = other RNA
agctttccacctaaggcaag

SEQ ID NO: 10237 - RNA, 20 nt, synthetic construct
  misc_feature 1..20: note = antisense sequence
  source 1..20: mol_type = other RNA
tagctttccacctaaggcaa

SEQ ID NO: 10238 - RNA, 20 nt, synthetic construct
  misc_feature 1..20: note = antisense sequence
  source 1..20: mol_type = other RNA
cagtcatcttagcaggcaga

SEQ ID NO: 10239 - RNA, 20 nt, synthetic construct
  misc_feature 1..20: note = antisense sequence
  source 1..20: mol_type = other RNA
acagtcatcttagcaggcag

SEQ ID NO: 10240 - RNA, 20 nt, synthetic construct
  misc_feature 1..20: note = antisense sequence
  source 1..20: mol_type = other RNA
aacagtcatcttagcaggca

SEQ ID NO: 10241 - RNA, 20 nt, synthetic construct
  misc_feature 1..20: note = antisense sequence
  source 1..20: mol_type = other RNA
aaaacagtcatcttagcagg

SEQ ID NO: 10242 - RNA, 20 nt, synthetic construct
  misc_feature 1..20: note = antisense sequence
  source 1..20: mol_type = other RNA
atccaatccattctttgcag

SEQ ID NO: 10243 - RNA, 20 nt, synthetic construct
  misc_feature 1..20: note = antisense sequence
  source 1..20: mol_type = other RNA
ctagagccagatgattttct

SEQ ID NO: 10244 - RNA, 20 nt, synthetic construct
  misc_feature 1..20: note = antisense sequence
  source 1..20: mol_type = other RNA
actagagccagatgattttc

SEQ ID NO: 10245 - RNA, 20 nt, synthetic construct
  misc_feature 1..20: note = antisense sequence
  source 1..20: mol_type = other RNA
catataactagagccagatg

SEQ ID NO: 10246 - RNA, 20 nt, synthetic construct
  misc_feature 1..20: note = antisense sequence
  source 1..20: mol_type = other RNA
ccatataactagagccagat

SEQ ID NO: 10247 - RNA, 20 nt, synthetic construct
  misc_feature 1..20: note = antisense sequence
  source 1..20: mol_type = other RNA
cccatataactagagccaga

SEQ ID NO: 10248 - RNA, 20 nt, synthetic construct
  misc_feature 1..20: note = antisense sequence
  source 1..20: mol_type = other RNA
tacctccatctgtttgtggt

SEQ ID NO: 10249 - RNA, 20 nt, synthetic construct
  misc_feature 1..20: note = antisense sequence
  source 1..20: mol_type = other RNA
caataggtaggtaaatgtcc

SEQ ID NO: 10250 - RNA, 20 nt, synthetic construct
  misc_feature 1..20: note = antisense sequence
  source 1..20: mol_type = other RNA
ccaataggtaggtaaatgtc

SEQ ID NO: 10251 - RNA, 20 nt, synthetic construct
  misc_feature 1..20: note = antisense sequence
  source 1..20: mol_type = other RNA
gtgatccaataggtaggtaa

SEQ ID NO: 10252 - RNA, 20 nt, synthetic construct
  misc_feature 1..20: note = antisense sequence
  source 1..20: mol_type = other RNA
ggtgatccaataggtaggta

SEQ ID NO: 10253 - RNA, 20 nt, synthetic construct
  misc_feature 1..20: note = antisense sequence
  source 1..20: mol_type = other RNA
aggtgatccaataggtaggt

SEQ ID NO: 10254 - RNA, 20 nt, synthetic construct
  misc_feature 1..20: note = antisense sequence
  source 1..20: mol_type = other RNA
taggtgatccaataggtagg

SEQ ID NO: 10255 - RNA, 20 nt, synthetic construct
  misc_feature 1..20: note = antisense sequence
  source 1..20: mol_type = other RNA
ataggtgatccaataggtag

SEQ ID NO: 10256 - RNA, 20 nt, synthetic construct
  misc_feature 1..20: note = antisense sequence
  source 1..20: mol_type = other RNA
caataggtgatccaataggt

SEQ ID NO: 10257 - RNA, 20 nt, synthetic construct
  misc_feature 1..20: note = antisense sequence
  source 1..20: mol_type = other RNA
ccaataggtgatccaatagg

SEQ ID NO: 10258 - RNA, 20 nt, synthetic construct
  misc_feature 1..20: note = antisense sequence
  source 1..20: mol_type = other RNA
tccaataggtgatccaatag

SEQ ID NO: 10259 - RNA, 20 nt, synthetic construct
  misc_feature 1..20: note = antisense sequence
  source 1..20: mol_type = other RNA
caggctcagaggtttcaaag

SEQ ID NO: 10260 - RNA, 20 nt, synthetic construct
  misc_feature 1..20: note = antisense sequence
  source 1..20: mol_type = other RNA
acaggctcagaggtttcaaa

SEQ ID NO: 10261 - RNA, 20 nt, synthetic construct
  misc_feature 1..20: note = antisense sequence
  source 1..20: mol_type = other RNA
cctacaggctcagaggtttc

SEQ ID NO: 10262 - RNA, 20 nt, synthetic construct
  misc_feature 1..20: note = antisense sequence
  source 1..20: mol_type = other RNA
ctccctacaggctcagaggt

SEQ ID NO: 10263 - RNA, 20 nt, synthetic construct
  misc_feature 1..20: note = antisense sequence
  source 1..20: mol_type = other RNA
agctccctacaggctcagag

SEQ ID NO: 10264 - RNA, 20 nt, synthetic construct
  misc_feature 1..20: note = antisense sequence
  source 1..20: mol_type = other RNA
tatgcagaagcaaaagcagc

SEQ ID NO: 10265 - RNA, 20 nt, synthetic construct
  misc_feature 1..20: note = antisense sequence
  source 1..20: mol_type = other RNA
ttatgcagaagcaaaagcag

SEQ ID NO: 10266 - RNA, 20 nt, synthetic construct
  misc_feature 1..20: note = antisense sequence
  source 1..20: mol_type = other RNA
ccgtatttatgcagaagcaa

SEQ ID NO: 10267 - RNA, 20 nt, synthetic construct
  misc_feature 1..20: note = antisense sequence
  source 1..20: mol_type = other RNA
gccgtatttatgcagaagca

SEQ ID NO: 10268 - RNA, 20 nt, synthetic construct
  misc_feature 1..20: note = antisense sequence
  source 1..20: mol_type = other RNA
agccgtatttatgcagaagc

SEQ ID NO: 10269 - RNA, 20 nt, synthetic construct
  misc_feature 1..20: note = antisense sequence
  source 1..20: mol_type = other RNA
gagccgtatttatgcagaag

SEQ ID NO: 10270 - RNA, 20 nt, synthetic construct
  misc_feature 1..20: note = antisense sequence
  source 1..20: mol_type = other RNA
agagccgtatttatgcagaa

SEQ ID NO: 10271 - RNA, 20 nt, synthetic construct
  misc_feature 1..20: note = antisense sequence
  source 1..20: mol_type = other RNA
tagagccgtatttatgcaga

SEQ ID NO: 10272 - RNA, 20 nt, synthetic construct
  misc_feature 1..20: note = antisense sequence
  source 1..20: mol_type = other RNA
catggtatttagagccgtat

SEQ ID NO: 10273 - RNA, 20 nt, synthetic construct
  misc_feature 1..20: note = antisense sequence
  source 1..20: mol_type = other RNA
acatggtatttagagccgta

SEQ ID NO: 10274 - RNA, 20 nt, synthetic construct
  misc_feature 1..20: note = antisense sequence
  source 1..20: mol_type = other RNA
gacatggtatttagagccgt

SEQ ID NO: 10275 - RNA, 20 nt, synthetic construct
  misc_feature 1..20: note = antisense sequence
  source 1..20: mol_type = other RNA
ggacatggtatttagagccg

SEQ ID NO: 10276 - RNA, 20 nt, synthetic construct
  misc_feature 1..20: note = antisense sequence
  source 1..20: mol_type = other RNA
gggacatggtatttagagcc

SEQ ID NO: 10277 - RNA, 20 nt, synthetic construct
  misc_feature 1..20: note = antisense sequence
  source 1..20: mol_type = other RNA
agggacatggtatttagagc

SEQ ID NO: 10278 - RNA, 20 nt, synthetic construct
  misc_feature 1..20: note = antisense sequence
  source 1..20: mol_type = other RNA
tagggacatggtatttagag

SEQ ID NO: 10279 - RNA, 20 nt, synthetic construct
  misc_feature 1..20: note = antisense sequence
  source 1..20: mol_type = other RNA
catagggacatggtatttag

SEQ ID NO: 10280 - RNA, 20 nt, synthetic construct
  misc_feature 1..20: note = antisense sequence
  source 1..20: mol_type = other RNA
cacatagggacatggtattt

SEQ ID NO: 10281 - RNA, 20 nt, synthetic construct
  misc_feature 1..20: note = antisense sequence
  source 1..20: mol_type = other RNA
acacatagggacatggtatt

SEQ ID NO: 10282 - RNA, 20 nt, synthetic construct
  misc_feature 1..20: note = antisense sequence
  source 1..20: mol_type = other RNA
aacacatagggacatggtat

SEQ ID NO: 10283 - RNA, 20 nt, synthetic construct
  misc_feature 1..20: note = antisense sequence
  source 1..20: mol_type = other RNA
aaacacatagggacatggta

SEQ ID NO: 10284 - RNA, 20 nt, synthetic construct
  misc_feature 1..20: note = antisense sequence
  source 1..20: mol_type = other RNA
aaaacacatagggacatggt

SEQ ID NO: 10285 - RNA, 20 nt, synthetic construct
  misc_feature 1..20: note = antisense sequence
  source 1..20: mol_type = other RNA
aagacaggagaatccaggcc

SEQ ID NO: 10286 - RNA, 20 nt, synthetic construct
  misc_feature 1..20: note = antisense sequence
  source 1..20: mol_type = other RNA
caagacaggagaatccaggc

SEQ ID NO: 10287 - RNA, 20 nt, synthetic construct
  misc_feature 1..20: note = antisense sequence
  source 1..20: mol_type = other RNA
ttcaagacaggagaatccag

SEQ ID NO: 10288 - RNA, 20 nt, synthetic construct
  misc_feature 1..20: note = antisense sequence
  source 1..20: mol_type = other RNA
cttcaagacaggagaatcca

SEQ ID NO: 10289 - RNA, 20 nt, synthetic construct
  misc_feature 1..20: note = antisense sequence
  source 1..20: mol_type = other RNA
cctttcttcaagacaggaga

SEQ ID NO: 10290 - RNA, 20 nt, synthetic construct
  misc_feature 1..20: note = antisense sequence
  source 1..20: mol_type = other RNA
ccctttcttcaagacaggag

SEQ ID NO: 10291 - RNA, 20 nt, synthetic construct
  misc_feature 1..20: note = antisense sequence
  source 1..20: mol_type = other RNA
tccctttcttcaagacagga

SEQ ID NO: 10292 - RNA, 20 nt, synthetic construct
  misc_feature 1..20: note = antisense sequence
  source 1..20: mol_type = other RNA
gagtgtccctttcttcaaga

SEQ ID NO: 10293 - RNA, 20 nt, synthetic construct
  misc_feature 1..20: note = antisense sequence
  source 1..20: mol_type = other RNA
agagtgtccctttcttcaag

SEQ ID NO: 10294 - RNA, 20 nt, synthetic construct
  misc_feature 1..20: note = antisense sequence
  source 1..20: mol_type = other RNA
tatcaagagtgtccctttct

SEQ ID NO: 10295 - RNA, 20 nt, synthetic construct
  misc_feature 1..20: note = antisense sequence
  source 1..20: mol_type = other RNA
atatcaagagtgtccctttc

SEQ ID NO: 10296 - RNA, 20 nt, synthetic construct
  misc_feature 1..20: note = antisense sequence
  source 1..20: mol_type = other RNA
ctaagcattgactttcctgc

SEQ ID NO: 10297 - RNA, 20 nt, synthetic construct
  misc_feature 1..20: note = antisense sequence
  source 1..20: mol_type = other RNA
actaagcattgactttcctg

SEQ ID NO: 10298 - RNA, 20 nt, synthetic construct
  misc_feature 1..20: note = antisense sequence
  source 1..20: mol_type = other RNA
gcactaagcattgactttcc

SEQ ID NO: 10299 - RNA, 20 nt, synthetic construct
  misc_feature 1..20: note = antisense sequence
  source 1..20: mol_type = other RNA
tggcactaagcattgacttt

SEQ ID NO: 10300 - RNA, 20 nt, synthetic construct
  misc_feature 1..20: note = antisense sequence
  source 1..20: mol_type = other RNA
ttggcactaagcattgactt

SEQ ID NO: 10301 - RNA, 20 nt, synthetic construct
  misc_feature 1..20: note = antisense sequence
  source 1..20: mol_type = other RNA
cttggcactaagcattgact

SEQ ID NO: 10302 - RNA, 20 nt, synthetic construct
  misc_feature 1..20: note = antisense sequence
  source 1..20: mol_type = other RNA
tcttggcactaagcattgac

SEQ ID NO: 10303 - RNA, 20 nt, synthetic construct
  misc_feature 1..20: note = antisense sequence
  source 1..20: mol_type = other RNA
ctttcttggcactaagcatt

SEQ ID NO: 10304 - RNA, 20 nt, synthetic construct
  misc_feature 1..20: note = antisense sequence
  source 1..20: mol_type = other RNA
tcctttcttggcactaagca

SEQ ID NO: 10305 - RNA, 20 nt, synthetic construct
  misc_feature 1..20: note = antisense sequence
  source 1..20: mol_type = other RNA
gtatccagtgtcctttcttg

SEQ ID NO: 10306 - RNA, 20 nt, synthetic construct
  misc_feature 1..20: note = antisense sequence
  source 1..20: mol_type = other RNA
ccagtatccagtgtcctttc

SEQ ID NO: 10307 - RNA, 20 nt, synthetic construct
  misc_feature 1..20: note = antisense sequence
  source 1..20: mol_type = other RNA
gtaccagtatccagtgtcct

SEQ ID NO: 10308 - RNA, 20 nt, synthetic construct
  misc_feature 1..20: note = antisense sequence
  source 1..20: mol_type = other RNA
caaagtaccagtatccagtg

SEQ ID NO: 10309 - RNA, 20 nt, synthetic construct
  misc_feature 1..20: note = antisense sequence
  source 1..20: mol_type = other RNA
tcaaagtaccagtatccagt

SEQ ID NO: 10310 - RNA, 20 nt, synthetic construct
  misc_feature 1..20: note = antisense sequence
  source 1..20: mol_type = other RNA
ctcaaagtaccagtatccag

SEQ ID NO: 10311 - RNA, 20 nt, synthetic construct
  misc_feature 1..20: note = antisense sequence
  source 1..20: mol_type = other RNA
cctcaaagtaccagtatcca

SEQ ID NO: 10312 - RNA, 20 nt, synthetic construct
  misc_feature 1..20: note = antisense sequence
  source 1..20: mol_type = other RNA
tcctcaaagtaccagtatcc

SEQ ID NO: 10313 - RNA, 20 nt, synthetic construct
  misc_feature 1..20: note = antisense sequence
  source 1..20: mol_type = other RNA
tgtcctcaaagtaccagtat

SEQ ID NO: 10314 - RNA, 20 nt, synthetic construct
  misc_feature 1..20: note = antisense sequence
  source 1..20: mol_type = other RNA
ttgtcctcaaagtaccagta

SEQ ID NO: 10315 - RNA, 20 nt, synthetic construct
  misc_feature 1..20: note = antisense sequence
  source 1..20: mol_type = other RNA
attgtcctcaaagtaccagt

SEQ ID NO: 10316 - RNA, 20 nt, synthetic construct
  misc_feature 1..20: note = antisense sequence
  source 1..20: mol_type = other RNA
cattgtcctcaaagtaccag

SEQ ID NO: 10317 - RNA, 20 nt, synthetic construct
  misc_feature 1..20: note = antisense sequence
  source 1..20: mol_type = other RNA
tcattgtcctcaaagtacca

SEQ ID NO: 10318 - RNA, 20 nt, synthetic construct
  misc_feature 1..20: note = antisense sequence
  source 1..20: mol_type = other RNA
gtcattgtcctcaaagtacc

SEQ ID NO: 10319 - RNA, 20 nt, synthetic construct
  misc_feature 1..20: note = antisense sequence
  source 1..20: mol_type = other RNA
tgtcattgtcctcaaagtac

SEQ ID NO: 10320 - RNA, 20 nt, synthetic construct
  misc_feature 1..20: note = antisense sequence
  source 1..20: mol_type = other RNA
tcctgtttcaactacattcc

SEQ ID NO: 10321 - RNA, 20 nt, synthetic construct
  misc_feature 1..20: note = antisense sequence
  source 1..20: mol_type = other RNA
tacacctttcctgtttcaac

SEQ ID NO: 10322 - RNA, 20 nt, synthetic construct
  misc_feature 1..20: note = antisense sequence
  source 1..20: mol_type = other RNA
tgagtacacctttcctgttt

SEQ ID NO: 10323 - RNA, 20 nt, synthetic construct
  misc_feature 1..20: note = antisense sequence
  source 1..20: mol_type = other RNA
ctgagtacacctttcctgtt

SEQ ID NO: 10324 - RNA, 20 nt, synthetic construct
  misc_feature 1..20: note = antisense sequence
  source 1..20: mol_type = other RNA
cctgagtacacctttcctgt

SEQ ID NO: 10325 - RNA, 20 nt, synthetic construct
  misc_feature 1..20: note = antisense sequence
  source 1..20: mol_type = other RNA
tcctgagtacacctttcctg

SEQ ID NO: 10326 - RNA, 20 nt, synthetic construct
  misc_feature 1..20: note = antisense sequence
  source 1..20: mol_type = other RNA
ctcctgagtacacctttcct

SEQ ID NO: 10327 - RNA, 20 nt, synthetic construct
  misc_feature 1..20: note = antisense sequence
  source 1..20: mol_type = other RNA
actcctgagtacacctttcc

SEQ ID NO: 10328 - RNA, 20 nt, synthetic construct
  misc_feature 1..20: note = antisense sequence
  source 1..20: mol_type = other RNA
aactcctgagtacacctttc

SEQ ID NO: 10329 - RNA, 20 nt, synthetic construct
  misc_feature 1..20: note = antisense sequence
  source 1..20: mol_type = other RNA
gaactcctgagtacaccttt

SEQ ID NO: 10330 - RNA, 20 nt, synthetic construct
  misc_feature 1..20: note = antisense sequence
  source 1..20: mol_type = other RNA
agaactcctgagtacacctt

SEQ ID NO: 10331 - RNA, 20 nt, synthetic construct
  misc_feature 1..20: note = antisense sequence
  source 1..20: mol_type = other RNA
cagaactcctgagtacacct

SEQ ID NO: 10332 - RNA, 20 nt, synthetic construct
  misc_feature 1..20: note = antisense sequence
  source 1..20: mol_type = other RNA
cattgacagaactcctgagt

SEQ ID NO: 10333 - RNA, 20 nt, synthetic construct
  misc_feature 1..20: note = antisense sequence
  source 1..20: mol_type = other RNA
acattgacagaactcctgag

SEQ ID NO: 10334 - RNA, 20 nt, synthetic construct
  misc_feature 1..20: note = antisense sequence
  source 1..20: mol_type = other RNA
ttagacattgacagaactcc

SEQ ID NO: 10335 - RNA, 20 nt, synthetic construct
  misc_feature 1..20: note = antisense sequence
  source 1..20: mol_type = other RNA
ggaagattagacattgacag

SEQ ID NO: 10336 - RNA, 20 nt, synthetic construct
  misc_feature 1..20: note = antisense sequence
  source 1..20: mol_type = other RNA
cagggctggctttatgtaat

SEQ ID NO: 10337 - RNA, 20 nt, synthetic construct
  misc_feature 1..20: note = antisense sequence
  source 1..20: mol_type = other RNA
tcagggctggctttatgtaa

SEQ ID NO: 10338 - RNA, 20 nt, synthetic construct
  misc_feature 1..20: note = antisense sequence
  source 1..20: mol_type = other RNA
ttctaaactcagggctggct

SEQ ID NO: 10339 - RNA, 20 nt, synthetic construct
  misc_feature 1..20: note = antisense sequence
  source 1..20: mol_type = other RNA
gttctaaactcagggctggc

SEQ ID NO: 10340 - RNA, 20 nt, synthetic construct
  misc_feature 1..20: note = antisense sequence
  source 1..20: mol_type = other RNA
tgttctaaactcagggctgg

SEQ ID NO: 10341 - RNA, 20 nt, synthetic construct
  misc_feature 1..20: note = antisense sequence
  source 1..20: mol_type = other RNA
ctgttctaaactcagggctg

SEQ ID NO: 10342 - RNA, 20 nt, synthetic construct
  misc_feature 1..20: note = antisense sequence
  source 1..20: mol_type = other RNA
gactgttctaaactcagggc

SEQ ID NO: 10343 - RNA, 20 nt, synthetic construct
  misc_feature 1..20: note = antisense sequence
  source 1..20: mol_type = other RNA
tgactgttctaaactcaggg

SEQ ID NO: 10344 - RNA, 20 nt, synthetic construct
  misc_feature 1..20: note = antisense sequence
  source 1..20: mol_type = other RNA
gtgactgttctaaactcagg

SEQ ID NO: 10345 - RNA, 20 nt, synthetic construct
  misc_feature 1..20: note = antisense sequence
  source 1..20: mol_type = other RNA
tgtgactgttctaaactcag

SEQ ID NO: 10346 - RNA, 20 nt, synthetic construct
  misc_feature 1..20: note = antisense sequence
  source 1..20: mol_type = other RNA
cagccgattttctgactttt

SEQ ID NO: 10347 - RNA, 20 nt, synthetic construct
  misc_feature 1..20: note = antisense sequence
  source 1..20: mol_type = other RNA
ccagccgattttctgacttt

SEQ ID NO: 10348 - RNA, 20 nt, synthetic construct
  misc_feature 1..20: note = antisense sequence
  source 1..20: mol_type = other RNA
aagtgctgggattacaggca

SEQ ID NO: 10349 - RNA, 20 nt, synthetic construct
  misc_feature 1..20: note = antisense sequence
  source 1..20: mol_type = other RNA
aaagtgctgggattacaggc

SEQ ID NO: 10350 - RNA, 20 nt, synthetic construct
  misc_feature 1..20: note = antisense sequence
  source 1..20: mol_type = other RNA
caaagtgctgggattacagg

SEQ ID NO: 10351 - RNA, 20 nt, synthetic construct
  misc_feature 1..20: note = antisense sequence
  source 1..20: mol_type = other RNA
ccaaagtgctgggattacag

SEQ ID NO: 10352 - RNA, 20 nt, synthetic construct
  misc_feature 1..20: note = antisense sequence
  source 1..20: mol_type = other RNA
tcagactcccaaagtgctgg

SEQ ID NO: 10353 - RNA, 20 nt, synthetic construct
  misc_feature 1..20: note = antisense sequence
  source 1..20: mol_type = other RNA
tgacctcaggtgatccagcc

SEQ ID NO: 10354 - RNA, 20 nt, synthetic construct
  misc_feature 1..20: note = antisense sequence
  source 1..20: mol_type = other RNA
ctgacctcaggtgatccagc

SEQ ID NO: 10355 - RNA, 20 nt, synthetic construct
  misc_feature 1..20: note = antisense sequence
  source 1..20: mol_type = other RNA
tctcgaactcctgacctcag

SEQ ID NO: 10356 - RNA, 20 nt, synthetic construct
  misc_feature 1..20: note = antisense sequence
  source 1..20: mol_type = other RNA
ctctcgaactcctgacctca

SEQ ID NO: 10357 - RNA, 20 nt, synthetic construct
  misc_feature 1..20: note = antisense sequence
  source 1..20: mol_type = other RNA
gctctcgaactcctgacctc

SEQ ID NO: 10358 - RNA, 20 nt, synthetic construct
  misc_feature 1..20: note = antisense sequence
  source 1..20: mol_type = other RNA
tgctctcgaactcctgacct

SEQ ID NO: 10359 - RNA, 20 nt, synthetic construct
  misc_feature 1..20: note = antisense sequence
  source 1..20: mol_type = other RNA
ctgctctcgaactcctgacc

SEQ ID NO: 10360 - RNA, 20 nt, synthetic construct
  misc_feature 1..20: note = antisense sequence
  source 1..20: mol_type = other RNA
gctgctctcgaactcctgac

SEQ ID NO: 10361 - RNA, 20 nt, synthetic construct
  misc_feature 1..20: note = antisense sequence
  source 1..20: mol_type = other RNA
gtagctgggattacaggcgc

SEQ ID NO: 10362 - RNA, 20 nt, synthetic construct
  misc_feature 1..20: note = antisense sequence
  source 1..20: mol_type = other RNA
agtagctgggattacaggcg

SEQ ID NO: 10363 - RNA, 20 nt, synthetic construct
  misc_feature 1..20: note = antisense sequence
  source 1..20: mol_type = other RNA
gagtagctgggattacaggc

SEQ ID NO: 10364 - RNA, 20 nt, synthetic construct
  misc_feature 1..20: note = antisense sequence
  source 1..20: mol_type = other RNA
tgagtagctgggattacagg

SEQ ID NO: 10365 - RNA, 20 nt, synthetic construct
  misc_feature 1..20: note = antisense sequence
  source 1..20: mol_type = other RNA
ctgagtagctgggattacag

SEQ ID NO: 10366 - RNA, 20 nt, synthetic construct
  misc_feature 1..20: note = antisense sequence
  source 1..20: mol_type = other RNA
cctgagtagctgggattaca

SEQ ID NO: 10367 - RNA, 20 nt, synthetic construct
  misc_feature 1..20: note = antisense sequence
  source 1..20: mol_type = other RNA
tcctgagtagctgggattac

SEQ ID NO: 10368 - RNA, 20 nt, synthetic construct
  misc_feature 1..20: note = antisense sequence
  source 1..20: mol_type = other RNA
ctcctgagtagctgggatta

SEQ ID NO: 10369 - RNA, 20 nt, synthetic construct
  misc_feature 1..20: note = antisense sequence
  source 1..20: mol_type = other RNA
cctcctgagtagctgggatt

SEQ ID NO: 10370 - RNA, 20 nt, synthetic construct
  misc_feature 1..20: note = antisense sequence
  source 1..20: mol_type = other RNA
gcctcctgagtagctgggat

SEQ ID NO: 10371 - RNA, 20 nt, synthetic construct
  misc_feature 1..20: note = antisense sequence
  source 1..20: mol_type = other RNA
agcctcctgagtagctggga

SEQ ID NO: 10372 - RNA, 20 nt, synthetic construct
  misc_feature 1..20: note = antisense sequence
  source 1..20: mol_type = other RNA
ttctcctgcctcagcctcct

SEQ ID NO: 10373 - RNA, 20 nt, synthetic construct
  misc_feature 1..20: note = antisense sequence
  source 1..20: mol_type = other RNA
ttggctcactgcaacctccg

SEQ ID NO: 10374 - RNA, 20 nt, synthetic construct
  misc_feature 1..20: note = antisense sequence
  source 1..20: mol_type = other RNA
cttggctcactgcaacctcc

SEQ ID NO: 10375 - RNA, 20 nt, synthetic construct
  misc_feature 1..20: note = antisense sequence
  source 1..20: mol_type = other RNA
tcttggctcactgcaacctc

SEQ ID NO: 10376 - RNA, 20 nt, synthetic construct
  misc_feature 1..20: note = antisense sequence
  source 1..20: mol_type = other RNA
atcttggctcactgcaacct

SEQ ID NO: 10377 - RNA, 20 nt, synthetic construct
  misc_feature 1..20: note = antisense sequence
  source 1..20: mol_type = other RNA
gatcttggctcactgcaacc

SEQ ID NO: 10378 - RNA, 20 nt, synthetic construct
  misc_feature 1..20: note = antisense sequence
  source 1..20: mol_type = other RNA
cgatcttggctcactgcaac

SEQ ID NO: 10379 - RNA, 20 nt, synthetic construct
  misc_feature 1..20: note = antisense sequence
  source 1..20: mol_type = other RNA
acgatcttggctcactgcaa

SEQ ID NO: 10380 - RNA, 20 nt, synthetic construct
  misc_feature 1..20: note = antisense sequence
  source 1..20: mol_type = other RNA
cacgatcttggctcactgca

SEQ ID NO: 10381 - RNA, 20 nt, synthetic construct
  misc_feature 1..20: note = antisense sequence
  source 1..20: mol_type = other RNA
gcacgatcttggctcactgc

SEQ ID NO: 10382 - RNA, 20 nt, synthetic construct
  misc_feature 1..20: note = antisense sequence
  source 1..20: mol_type = other RNA
ggcacgatcttggctcactg

SEQ ID NO: 10383 - RNA, 20 nt, synthetic construct
  misc_feature 1..20: note = antisense sequence
  source 1..20: mol_type = other RNA
tggcacgatcttggctcact

SEQ ID NO: 10384 - RNA, 20 nt, synthetic construct
  misc_feature 1..20: note = antisense sequence
  source 1..20: mol_type = other RNA
gtggcacgatcttggctcac

SEQ ID NO: 10385 - RNA, 20 nt, synthetic construct
  misc_feature 1..20: note = antisense sequence
  source 1..20: mol_type = other RNA
agtggcacgatcttggctca

SEQ ID NO: 10386 - RNA, 20 nt, synthetic construct
  misc_feature 1..20: note = antisense sequence
  source 1..20: mol_type = other RNA
cagtggcacgatcttggctc

SEQ ID NO: 10387 - RNA, 20 nt, synthetic construct
  misc_feature 1..20: note = antisense sequence
  source 1..20: mol_type = other RNA
gcagtggcacgatcttggct

SEQ ID NO: 10388 - RNA, 20 nt, synthetic construct
  misc_feature 1..20: note = antisense sequence
  source 1..20: mol_type = other RNA
tgcagtggcacgatcttggc

SEQ ID NO: 10389 - RNA, 20 nt, synthetic construct
  misc_feature 1..20: note = antisense sequence
  source 1..20: mol_type = other RNA
ttgttgcccaggctgaagtg

SEQ ID NO: 10390 - RNA, 20 nt, synthetic construct
  misc_feature 1..20: note = antisense sequence
  source 1..20: mol_type = other RNA
cttgttgcccaggctgaagt

SEQ ID NO: 10391 - RNA, 20 nt, synthetic construct
  misc_feature 1..20: note = antisense sequence
  source 1..20: mol_type = other RNA
tcttgttgcccaggctgaag

SEQ ID NO: 10392 - RNA, 20 nt, synthetic construct
  misc_feature 1..20: note = antisense sequence
  source 1..20: mol_type = other RNA
ctcttgttgcccaggctgaa

SEQ ID NO: 10393 - RNA, 20 nt, synthetic construct
  misc_feature 1..20: note = antisense sequence
  source 1..20: mol_type = other RNA
gctcttgttgcccaggctga

SEQ ID NO: 10394 - RNA, 20 nt, synthetic construct
  misc_feature 1..20: note = antisense sequence
  source 1..20: mol_type = other RNA
tgctcttgttgcccaggctg

SEQ ID NO: 10395 - RNA, 20 nt, synthetic construct
  misc_feature 1..20: note = antisense sequence
  source 1..20: mol_type = other RNA
ttgctcttgttgcccaggct

SEQ ID NO: 10396 - RNA, 20 nt, synthetic construct
  misc_feature 1..20: note = antisense sequence
  source 1..20: mol_type = other RNA
tttgctcttgttgcccaggc

SEQ ID NO: 10397 - RNA, 20 nt, synthetic construct
  misc_feature 1..20: note = antisense sequence
  source 1..20: mol_type = other RNA
ttttgctcttgttgcccagg

SEQ ID NO: 10398 - RNA, 20 nt, synthetic construct
  misc_feature 1..20: note = antisense sequence
  source 1..20: mol_type = other RNA
gttttgctcttgttgcccag

SEQ ID NO: 10399 - RNA, 20 nt, synthetic construct
  misc_feature 1..20: note = antisense sequence
  source 1..20: mol_type = other RNA
agttttgctcttgttgccca

SEQ ID NO: 10400 - RNA, 20 nt, synthetic construct
  misc_feature 1..20: note = antisense sequence
  source 1..20: mol_type = other RNA
gagttttgctcttgttgccc

SEQ ID NO: 10401 - RNA, 20 nt, synthetic construct
  misc_feature 1..20: note = antisense sequence
  source 1..20: mol_type = other RNA
gtgatgtcttccttacaatc

SEQ ID NO: 10402 - RNA, 20 nt, synthetic construct
  misc_feature 1..20: note = antisense sequence
  source 1..20: mol_type = other RNA
tcttgagtgatgtcttcctt

SEQ ID NO: 10403 - RNA, 20 nt, synthetic construct
  misc_feature 1..20: note = antisense sequence
  source 1..20: mol_type = other RNA
cctcttgagtgatgtcttcc

SEQ ID NO: 10404 - RNA, 20 nt, synthetic construct
  misc_feature 1..20: note = antisense sequence
  source 1..20: mol_type = other RNA
tcctcttgagtgatgtcttc

SEQ ID NO: 10405 - RNA, 20 nt, synthetic construct
  misc_feature 1..20: note = antisense sequence
  source 1..20: mol_type = other RNA
gttcctcttgagtgatgtct

SEQ ID NO: 10406 - RNA, 20 nt, synthetic construct
  misc_feature 1..20: note = antisense sequence
  source 1..20: mol_type = other RNA
ggttcctcttgagtgatgtc

SEQ ID NO: 10407 - RNA, 20 nt, synthetic construct
  misc_feature 1..20: note = antisense sequence
  source 1..20: mol_type = other RNA
aggttcctcttgagtgatgt

SEQ ID NO: 10408 - RNA, 20 nt, synthetic construct
  misc_feature 1..20: note = antisense sequence
  source 1..20: mol_type = other RNA
aaggttcctcttgagtgatg

SEQ ID NO: 10409 - RNA, 20 nt, synthetic construct
  misc_feature 1..20: note = antisense sequence
  source 1..20: mol_type = other RNA
aaaggttcctcttgagtgat

SEQ ID NO: 10410 - RNA, 20 nt, synthetic construct
  misc_feature 1..20: note = antisense sequence
  source 1..20: mol_type = other RNA
taaaggttcctcttgagtga

SEQ ID NO: 10411 - RNA, 20 nt, synthetic construct
  misc_feature 1..20: note = antisense sequence
  source 1..20: mol_type = other RNA
ataaaggttcctcttgagtg

SEQ ID NO: 10412 - RNA, 20 nt, synthetic construct
  misc_feature 1..20: note = antisense sequence
  source 1..20: mol_type = other RNA
cataaaggttcctcttgagt

SEQ ID NO: 10413 - RNA, 20 nt, synthetic construct
  misc_feature 1..20: note = antisense sequence
  source 1..20: mol_type = other RNA
tcataaaggttcctcttgag

SEQ ID NO: 10414 - RNA, 20 nt, synthetic construct
  misc_feature 1..20: note = antisense sequence
  source 1..20: mol_type = other RNA
cttcatcataaaggttcctc

SEQ ID NO: 10415 - RNA, 20 nt, synthetic construct
  misc_feature 1..20: note = antisense sequence
  source 1..20: mol_type = other RNA
cttactgcaataccttcatc

SEQ ID NO: 10416 - RNA, 20 nt, synthetic construct
  misc_feature 1..20: note = antisense sequence
  source 1..20: mol_type = other RNA
ccttactgcaataccttcat

SEQ ID NO: 10417 - RNA, 20 nt, synthetic construct
  misc_feature 1..20: note = antisense sequence
  source 1..20: mol_type = other RNA
tccttactgcaataccttca

SEQ ID NO: 10418 - RNA, 20 nt, synthetic construct
  misc_feature 1..20: note = antisense sequence
  source 1..20: mol_type = other RNA
ttccttactgcaataccttc

SEQ ID NO: 10419 - RNA, 20 nt, synthetic construct
  misc_feature 1..20: note = antisense sequence
  source 1..20: mol_type = other RNA
cttccttactgcaatacctt

SEQ ID NO: 10420 - RNA, 20 nt, synthetic construct
  misc_feature 1..20: note = antisense sequence
  source 1..20: mol_type = other RNA
tcttccttactgcaatacct

SEQ ID NO: 10421 - RNA, 20 nt, synthetic construct
  misc_feature 1..20: note = antisense sequence
  source 1..20: mol_type = other RNA
tctcttccttactgcaatac

SEQ ID NO: 10422 - RNA, 20 nt, synthetic construct
  misc_feature 1..20: note = antisense sequence
  source 1..20: mol_type = other RNA
ctgtagtcaaagctgagccc

SEQ ID NO: 10423 - RNA, 20 nt, synthetic construct
  misc_feature 1..20: note = antisense sequence
  source 1..20: mol_type = other RNA
actgtagtcaaagctgagcc

SEQ ID NO: 10424 - RNA, 20 nt, synthetic construct
  misc_feature 1..20: note = antisense sequence
  source 1..20: mol_type = other RNA
cactgtagtcaaagctgagc

SEQ ID NO: 10425 - RNA, 20 nt, synthetic construct
  misc_feature 1..20: note = antisense sequence
  source 1..20: mol_type = other RNA
tcactgtagtcaaagctgag

SEQ ID NO: 10426 - RNA, 20 nt, synthetic construct
  misc_feature 1..20: note = antisense sequence
  source 1..20: mol_type = other RNA
tgtcctcactgtagtcaaag

SEQ ID NO: 10427 - RNA, 20 nt, synthetic construct
  misc_feature 1..20: note = antisense sequence
  source 1..20: mol_type = other RNA
cttgtcctcactgtagtcaa

SEQ ID NO: 10428 - RNA, 20 nt, synthetic construct
  misc_feature 1..20: note = antisense sequence
  source 1..20: mol_type = other RNA
cacttgtcctcactgtagtc

SEQ ID NO: 10429 - RNA, 20 nt, synthetic construct
  misc_feature 1..20: note = antisense sequence
  source 1..20: mol_type = other RNA
ccacttgtcctcactgtagt

SEQ ID NO: 10430 - RNA, 20 nt, synthetic construct
  misc_feature 1..20: note = antisense sequence
  source 1..20: mol_type = other RNA
gcccacttgtcctcactgta

SEQ ID NO: 10431 - RNA, 20 nt, synthetic construct
  misc_feature 1..20: note = antisense sequence
  source 1..20: mol_type = other RNA
aatgcccacttgtcctcact

SEQ ID NO: 10432 - RNA, 20 nt, synthetic construct
  misc_feature 1..20: note = antisense sequence
  source 1..20: mol_type = other RNA
aaatgcccacttgtcctcac

SEQ ID NO: 10433 - RNA, 20 nt, synthetic construct
  misc_feature 1..20: note = antisense sequence
  source 1..20: mol_type = other RNA
taaatgcccacttgtcctca

SEQ ID NO: 10434 - RNA, 20 nt, synthetic construct
  misc_feature 1..20: note = antisense sequence
  source 1..20: mol_type = other RNA
actgccaatccctgccctgt

SEQ ID NO: 10435 - RNA, 20 nt, synthetic construct
  misc_feature 1..20: note = antisense sequence
  source 1..20: mol_type = other RNA
tactgccaatccctgccctg

SEQ ID NO: 10436 - RNA, 20 nt, synthetic construct
  misc_feature 1..20: note = antisense sequence
  source 1..20: mol_type = other RNA
tgttactgccaatccctgcc

SEQ ID NO: 10437 - RNA, 20 nt, synthetic construct
  misc_feature 1..20: note = antisense sequence
  source 1..20: mol_type = other RNA
tgagccagtctagcaagaat

SEQ ID NO: 10438 - RNA, 20 nt, synthetic construct
  misc_feature 1..20: note = antisense sequence
  source 1..20: mol_type = other RNA
ttgagccagtctagcaagaa

SEQ ID NO: 10439 - RNA, 20 nt, synthetic construct
  misc_feature 1..20: note = antisense sequence
  source 1..20: mol_type = other RNA
gttgagccagtctagcaaga

SEQ ID NO: 10440 - RNA, 20 nt, synthetic construct
  misc_feature 1..20: note = antisense sequence
  source 1..20: mol_type = other RNA
tgttgagccagtctagcaag

SEQ ID NO: 10441 - RNA, 20 nt, synthetic construct
  misc_feature 1..20: note = antisense sequence
  source 1..20: mol_type = other RNA
cctgttgagccagtctagca

SEQ ID NO: 10442 - RNA, 20 nt, synthetic construct
  misc_feature 1..20: note = antisense sequence
  source 1..20: mol_type = other RNA
atcctgttgagccagtctag

SEQ ID NO: 10443 - RNA, 20 nt, synthetic construct
  misc_feature 1..20: note = antisense sequence
  source 1..20: mol_type = other RNA
aatcctgttgagccagtcta

SEQ ID NO: 10444 - RNA, 20 nt, synthetic construct
  misc_feature 1..20: note = antisense sequence
  source 1..20: mol_type = other RNA
gaatcctgttgagccagtct

SEQ ID NO: 10445 - RNA, 20 nt, synthetic construct
  misc_feature 1..20: note = antisense sequence
  source 1..20: mol_type = other RNA
agaatcctgttgagccagtc

SEQ ID NO: 10446 - RNA, 20 nt, synthetic construct
  misc_feature 1..20: note = antisense sequence
  source 1..20: mol_type = other RNA
aagaatcctgttgagccagt

SEQ ID NO: 10447 - RNA, 20 nt, synthetic construct
  misc_feature 1..20: note = antisense sequence
  source 1..20: mol_type = other RNA
aactggtcgatgtgggaaaa

SEQ ID NO: 10448 - RNA, 20 nt, synthetic construct
  misc_feature 1..20: note = antisense sequence
  source 1..20: mol_type = other RNA
taactggtcgatgtgggaaa

SEQ ID NO: 10449 - RNA, 20 nt, synthetic construct
  misc_feature 1..20: note = antisense sequence
  source 1..20: mol_type = other RNA
ataactggtcgatgtgggaa

SEQ ID NO: 10450 - RNA, 20 nt, synthetic construct
  misc_feature 1..20: note = antisense sequence
  source 1..20: mol_type = other RNA
agataactggtcgatgtggg

SEQ ID NO: 10451 - RNA, 20 nt, synthetic construct
  misc_feature 1..20: note = antisense sequence
  source 1..20: mol_type = other RNA
cagataactggtcgatgtgg

SEQ ID NO: 10452 - RNA, 20 nt, synthetic construct
  misc_feature 1..20: note = antisense sequence
  source 1..20: mol_type = other RNA
tcagataactggtcgatgtg

SEQ ID NO: 10453 - RNA, 20 nt, synthetic construct
  misc_feature 1..20: note = antisense sequence
  source 1..20: mol_type = other RNA
gtcagataactggtcgatgt

SEQ ID NO: 10454 - RNA, 20 nt, synthetic construct
  misc_feature 1..20: note = antisense sequence
  source 1..20: mol_type = other RNA
tgtcagataactggtcgatg

SEQ ID NO: 10455 - RNA, 20 nt, synthetic construct
  misc_feature 1..20: note = antisense sequence
  source 1..20: mol_type = other RNA
atgtcagataactggtcgat

SEQ ID NO: 10456 - RNA, 20 nt, synthetic construct
  misc_feature 1..20: note = antisense sequence
  source 1..20: mol_type = other RNA
gatgtcagataactggtcga

SEQ ID NO: 10457 - RNA, 20 nt, synthetic construct
  misc_feature 1..20: note = antisense sequence
  source 1..20: mol_type = other RNA
tgatgtcagataactggtcg

SEQ ID NO: 10458 - RNA, 20 nt, synthetic construct
  misc_feature 1..20: note = antisense sequence
  source 1..20: mol_type = other RNA
ctgatgtcagataactggtc

SEQ ID NO: 10459 - RNA, 20 nt, synthetic construct
  misc_feature 1..20: note = antisense sequence
  source 1..20: mol_type = other RNA
ctgtgggaggtttgcataaa

SEQ ID NO: 10460 - RNA, 20 nt, synthetic construct
  misc_feature 1..20: note = antisense sequence
  source 1..20: mol_type = other RNA
taatctgtgggaggtttgca

SEQ ID NO: 10461 - RNA, 20 nt, synthetic construct
  misc_feature 1..20: note = antisense sequence
  source 1..20: mol_type = other RNA
ttaatctgtgggaggtttgc

SEQ ID NO: 10462 - RNA, 20 nt, synthetic construct
  misc_feature 1..20: note = antisense sequence
  source 1..20: mol_type = other RNA
aattcttgaaggactgagcc

SEQ ID NO: 10463 - RNA, 20 nt, synthetic construct
  misc_feature 1..20: note = antisense sequence
  source 1..20: mol_type = other RNA
ctggctctaaattggaatga

SEQ ID NO: 10464 - RNA, 20 nt, synthetic construct
  misc_feature 1..20: note = antisense sequence
  source 1..20: mol_type = other RNA
actggctctaaattggaatg

SEQ ID NO: 10465 - RNA, 20 nt, synthetic construct
  misc_feature 1..20: note = antisense sequence
  source 1..20: mol_type = other RNA
cctactggctctaaattgga

SEQ ID NO: 10466 - RNA, 20 nt, synthetic construct
  misc_feature 1..20: note = antisense sequence
  source 1..20: mol_type = other RNA
acctactggctctaaattgg

SEQ ID NO: 10467 - RNA, 20 nt, synthetic construct
  misc_feature 1..20: note = antisense sequence
  source 1..20: mol_type = other RNA
aacctactggctctaaattg

SEQ ID NO: 10468 - RNA, 20 nt, synthetic construct
  misc_feature 1..20: note = antisense sequence
  source 1..20: mol_type = other RNA
acctggaaacctactggctc

SEQ ID NO: 10469 - RNA, 20 nt, synthetic construct
  misc_feature 1..20: note = antisense sequence
  source 1..20: mol_type = other RNA
tacctggaaacctactggct

SEQ ID NO: 10470 - RNA, 20 nt, synthetic construct
  misc_feature 1..20: note = antisense sequence
  source 1..20: mol_type = other RNA
gtacctggaaacctactggc

SEQ ID NO: 10471 - RNA, 20 nt, synthetic construct
  misc_feature 1..20: note = antisense sequence
  source 1..20: mol_type = other RNA
gttggacaaatcgtgggtac

SEQ ID NO: 10472 - RNA, 20 nt, synthetic construct
  misc_feature 1..20: note = antisense sequence
  source 1..20: mol_type = other RNA
cgttggacaaatcgtgggta

SEQ ID NO: 10473 - RNA, 20 nt, synthetic construct
  misc_feature 1..20: note = antisense sequence
  source 1..20: mol_type = other RNA
acgttggacaaatcgtgggt

SEQ ID NO: 10474 - RNA, 20 nt, synthetic construct
  misc_feature 1..20: note = antisense sequence
  source 1..20: mol_type = other RNA
agccacgttggacaaatcgt

SEQ ID NO: 10475 - RNA, 20 nt, synthetic construct
  misc_feature 1..20: note = antisense sequence
  source 1..20: mol_type = other RNA
tagccacgttggacaaatcg

SEQ ID NO: 10476 - RNA, 20 nt, synthetic construct
  misc_feature 1..20: note = antisense sequence
  source 1..20: mol_type = other RNA
gtagccacgttggacaaatc

SEQ ID NO: 10477 - RNA, 20 nt, synthetic construct
  misc_feature 1..20: note = antisense sequence
  source 1..20: mol_type = other RNA
taatttgtagccacgttgga

SEQ ID NO: 10478 - RNA, 20 nt, synthetic construct
  misc_feature 1..20: note = antisense sequence
  source 1..20: mol_type = other RNA
ctaatttgtagccacgttgg

SEQ ID NO: 10479 - RNA, 20 nt, synthetic construct
  misc_feature 1..20: note = antisense sequence
  source 1..20: mol_type = other RNA
tctaatttgtagccacgttg

SEQ ID NO: 10480 - RNA, 20 nt, synthetic construct
  misc_feature 1..20: note = antisense sequence
  source 1..20: mol_type = other RNA
gggtctaatttgtagccacg

SEQ ID NO: 10481 - RNA, 20 nt, synthetic construct
  misc_feature 1..20: note = antisense sequence
  source 1..20: mol_type = other RNA
ctgtgatccactctagcata

SEQ ID NO: 10482 - RNA, 20 nt, synthetic construct
  misc_feature 1..20: note = antisense sequence
  source 1..20: mol_type = other RNA
ctcttgctgttcctgagttg

SEQ ID NO: 10483 - RNA, 20 nt, synthetic construct
  misc_feature 1..20: note = antisense sequence
  source 1..20: mol_type = other RNA
tctcttgctgttcctgagtt

SEQ ID NO: 10484 - RNA, 20 nt, synthetic construct
  misc_feature 1..20: note = antisense sequence
  source 1..20: mol_type = other RNA
ctacatatctcttgctgttc

SEQ ID NO: 10485 - RNA, 20 nt, synthetic construct
  misc_feature 1..20: note = antisense sequence
  source 1..20: mol_type = other RNA
cactacatatctcttgctgt

SEQ ID NO: 10486 - RNA, 20 nt, synthetic construct
  misc_feature 1..20: note = antisense sequence
  source 1..20: mol_type = other RNA
gcactacatatctcttgctg

SEQ ID NO: 10487 - RNA, 20 nt, synthetic construct
  misc_feature 1..20: note = antisense sequence
  source 1..20: mol_type = other RNA
ctcatagcttgcactacata

SEQ ID NO: 10488 - RNA, 20 nt, synthetic construct
  misc_feature 1..20: note = antisense sequence
  source 1..20: mol_type = other RNA
cctcatagcttgcactacat

SEQ ID NO: 10489 - RNA, 20 nt, synthetic construct
  misc_feature 1..20: note = antisense sequence
  source 1..20: mol_type = other RNA
ccctcatagcttgcactaca

SEQ ID NO: 10490 - RNA, 20 nt, synthetic construct
  misc_feature 1..20: note = antisense sequence
  source 1..20: mol_type = other RNA
tccctcatagcttgcactac

SEQ ID NO: 10491 - RNA, 20 nt, synthetic construct
  misc_feature 1..20: note = antisense sequence
  source 1..20: mol_type = other RNA
ttccctcatagcttgcacta

SEQ ID NO: 10492 - RNA, 20 nt, synthetic construct
  misc_feature 1..20: note = antisense sequence
  source 1..20: mol_type = other RNA
cctttccctcatagcttgca

SEQ ID NO: 10493 - RNA, 20 nt, synthetic construct
  misc_feature 1..20: note = antisense sequence
  source 1..20: mol_type = other RNA
acctttccctcatagcttgc

SEQ ID NO: 10494 - RNA, 20 nt, synthetic construct
  misc_feature 1..20: note = antisense sequence
  source 1..20: mol_type = other RNA
cacctttccctcatagcttg

SEQ ID NO: 10495 - RNA, 20 nt, synthetic construct
  misc_feature 1..20: note = antisense sequence
  source 1..20: mol_type = other RNA
acacctttccctcatagctt

SEQ ID NO: 10496 - RNA, 20 nt, synthetic construct
  misc_feature 1..20: note = antisense sequence
  source 1..20: mol_type = other RNA
tgacacctttccctcatagc

SEQ ID NO: 10497 - RNA, 20 nt, synthetic construct
  misc_feature 1..20: note = antisense sequence
  source 1..20: mol_type = other RNA
gtacaccatgagagggaatg

SEQ ID NO: 10498 - RNA, 20 nt, synthetic construct
  misc_feature 1..20: note = antisense sequence
  source 1..20: mol_type = other RNA
ggtacaccatgagagggaat

SEQ ID NO: 10499 - RNA, 20 nt, synthetic construct
  misc_feature 1..20: note = antisense sequence
  source 1..20: mol_type = other RNA
aggtacaccatgagagggaa

SEQ ID NO: 10500 - RNA, 20 nt, synthetic construct
  misc_feature 1..20: note = antisense sequence
  source 1..20: mol_type = other RNA
gaggtacaccatgagaggga

SEQ ID NO: 10501 - RNA, 20 nt, synthetic construct
  misc_feature 1..20: note = antisense sequence
  source 1..20: mol_type = other RNA
ggaggtacaccatgagaggg

SEQ ID NO: 10502 - RNA, 20 nt, synthetic construct
  misc_feature 1..20: note = antisense sequence
  source 1..20: mol_type = other RNA
aggaggtacaccatgagagg

SEQ ID NO: 10503 - RNA, 20 nt, synthetic construct
  misc_feature 1..20: note = antisense sequence
  source 1..20: mol_type = other RNA
aaggaggtacaccatgagag

SEQ ID NO: 10504 - RNA, 20 nt, synthetic construct
  misc_feature 1..20: note = antisense sequence
  source 1..20: mol_type = other RNA
gaaggaggtacaccatgaga

SEQ ID NO: 10505 - RNA, 20 nt, synthetic construct
  misc_feature 1..20: note = antisense sequence
  source 1..20: mol_type = other RNA
ggaaggaggtacaccatgag

SEQ ID NO: 10506 - RNA, 20 nt, synthetic construct
  misc_feature 1..20: note = antisense sequence
  source 1..20: mol_type = other RNA
tggaaggaggtacaccatga

SEQ ID NO: 10507 - RNA, 20 nt, synthetic construct
  misc_feature 1..20: note = antisense sequence
  source 1..20: mol_type = other RNA
acaggtggaaggaggtacac

SEQ ID NO: 10508 - RNA, 20 nt, synthetic construct
  misc_feature 1..20: note = antisense sequence
  source 1..20: mol_type = other RNA
ctgaacaggtggaaggaggt

SEQ ID NO: 10509 - RNA, 20 nt, synthetic construct
  misc_feature 1..20: note = antisense sequence
  source 1..20: mol_type = other RNA
caagcctctgtaaaactttc

SEQ ID NO: 10510 - RNA, 20 nt, synthetic construct
  misc_feature 1..20: note = antisense sequence
  source 1..20: mol_type = other RNA
tctccaggaaagattgaggg

SEQ ID NO: 10511 - RNA, 20 nt, synthetic construct
  misc_feature 1..20: note = antisense sequence
  source 1..20: mol_type = other RNA
ctcattctccaggaaagatt

SEQ ID NO: 10512 - RNA, 20 nt, synthetic construct
  misc_feature 1..20: note = antisense sequence
  source 1..20: mol_type = other RNA
cccagctctcattctccagg

SEQ ID NO: 10513 - RNA, 20 nt, synthetic construct
  misc_feature 1..20: note = antisense sequence
  source 1..20: mol_type = other RNA
agaaggaccaggccatgatc

SEQ ID NO: 10514 - RNA, 20 nt, synthetic construct
  misc_feature 1..20: note = antisense sequence
  source 1..20: mol_type = other RNA
tagaaggaccaggccatgat

SEQ ID NO: 10515 - RNA, 20 nt, synthetic construct
  misc_feature 1..20: note = antisense sequence
  source 1..20: mol_type = other RNA
ctagaaggaccaggccatga

SEQ ID NO: 10516 - RNA, 20 nt, synthetic construct
  misc_feature 1..20: note = antisense sequence
  source 1..20: mol_type = other RNA
actagaaggaccaggccatg

SEQ ID NO: 10517 - RNA, 20 nt, synthetic construct
  misc_feature 1..20: note = antisense sequence
  source 1..20: mol_type = other RNA
cactagaaggaccaggccat

SEQ ID NO: 10518 - RNA, 20 nt, synthetic construct
  misc_feature 1..20: note = antisense sequence
  source 1..20: mol_type = other RNA
tggtgggctcctaaatggga

SEQ ID NO: 10519 - RNA, 20 nt, synthetic construct
  misc_feature 1..20: note = antisense sequence
  source 1..20: mol_type = other RNA
ttggtgggctcctaaatggg

SEQ ID NO: 10520 - RNA, 20 nt, synthetic construct
  misc_feature 1..20: note = antisense sequence
  source 1..20: mol_type = other RNA
cttggtgggctcctaaatgg

SEQ ID NO: 10521 - RNA, 20 nt, synthetic construct
  misc_feature 1..20: note = antisense sequence
  source 1..20: mol_type = other RNA
ctttaacctgggtttctgac

SEQ ID NO: 10522 - RNA, 20 nt, synthetic construct
  misc_feature 1..20: note = antisense sequence
  source 1..20: mol_type = other RNA
tctttaacctgggtttctga

SEQ ID NO: 10523 - RNA, 20 nt, synthetic construct
  misc_feature 1..20: note = antisense sequence
  source 1..20: mol_type = other RNA
gtctttaacctgggtttctg

SEQ ID NO: 10524 - RNA, 20 nt, synthetic construct
  misc_feature 1..20: note = antisense sequence
  source 1..20: mol_type = other RNA
tatatggtctttaacctggg

SEQ ID NO: 10525 - RNA, 20 nt, synthetic construct
  misc_feature 1..20: note = antisense sequence
  source 1..20: mol_type = other RNA
gtgagaggtgtatcttttgt

SEQ ID NO: 10526 - RNA, 20 nt, synthetic construct
  misc_feature 1..20: note = antisense sequence
  source 1..20: mol_type = other RNA
ggtgagaggtgtatcttttg

SEQ ID NO: 10527 - RNA, 20 nt, synthetic construct
  misc_feature 1..20: note = antisense sequence
  source 1..20: mol_type = other RNA
ctggtgagaggtgtatcttt

SEQ ID NO: 10528 - RNA, 20 nt, synthetic construct
  misc_feature 1..20: note = antisense sequence
  source 1..20: mol_type = other RNA
actggtgagaggtgtatctt

SEQ ID NO: 10529 - RNA, 20 nt, synthetic construct
  misc_feature 1..20: note = antisense sequence
  source 1..20: mol_type = other RNA
tactggtgagaggtgtatct

SEQ ID NO: 10530 - RNA, 20 nt, synthetic construct
  misc_feature 1..20: note = antisense sequence
  source 1..20: mol_type = other RNA
caatactggtgagaggtgta

SEQ ID NO: 10531 - RNA, 20 nt, synthetic construct
  misc_feature 1..20: note = antisense sequence
  source 1..20: mol_type = other RNA
gcaatactggtgagaggtgt

SEQ ID NO: 10532 - RNA, 20 nt, synthetic construct
  misc_feature 1..20: note = antisense sequence
  source 1..20: mol_type = other RNA
gagcaatactggtgagaggt

SEQ ID NO: 10533 - RNA, 20 nt, synthetic construct
  misc_feature 1..20: note = antisense sequence
  source 1..20: mol_type = other RNA
tgagcaatactggtgagagg

SEQ ID NO: 10534 - RNA, 20 nt, synthetic construct
  misc_feature 1..20: note = antisense sequence
  source 1..20: mol_type = other RNA
ctgagcaatactggtgagag

SEQ ID NO: 10535 - RNA, 20 nt, synthetic construct
  misc_feature 1..20: note = antisense sequence
  source 1..20: mol_type = other RNA
cctgagcaatactggtgaga

SEQ ID NO: 10536 - RNA, 20 nt, synthetic construct
  misc_feature 1..20: note = antisense sequence
  source 1..20: mol_type = other RNA
tcctgagcaatactggtgag

SEQ ID NO: 10537 - RNA, 20 nt, synthetic construct
  misc_feature 1..20: note = antisense sequence
  source 1..20: mol_type = other RNA
ttcctgagcaatactggtga

SEQ ID NO: 10538 - RNA, 20 nt, synthetic construct
  misc_feature 1..20: note = antisense sequence
  source 1..20: mol_type = other RNA
cataacttcctgagcaatac

SEQ ID NO: 10539 - RNA, 20 nt, synthetic construct
  misc_feature 1..20: note = antisense sequence
  source 1..20: mol_type = other RNA
tggtgcagaactcctaaaac

SEQ ID NO: 10540 - RNA, 20 nt, synthetic construct
  misc_feature 1..20: note = antisense sequence
  source 1..20: mol_type = other RNA
atggttctgactgctgcctg

SEQ ID NO: 10541 - RNA, 20 nt, synthetic construct
  misc_feature 1..20: note = antisense sequence
  source 1..20: mol_type = other RNA
tatggttctgactgctgcct

SEQ ID NO: 10542 - RNA, 20 nt, synthetic construct
  misc_feature 1..20: note = antisense sequence
  source 1..20: mol_type = other RNA
ttcttatggttctgactgct

SEQ ID NO: 10543 - RNA, 20 nt, synthetic construct
  misc_feature 1..20: note = antisense sequence
  source 1..20: mol_type = other RNA
cttcttatggttctgactgc

SEQ ID NO: 10544 - RNA, 20 nt, synthetic construct
  misc_feature 1..20: note = antisense sequence
  source 1..20: mol_type = other RNA
acttcttatggttctgactg

SEQ ID NO: 10545 - RNA, 20 nt, synthetic construct
  misc_feature 1..20: note = antisense sequence
  source 1..20: mol_type = other RNA
ctttccgaacttcttatggt

SEQ ID NO: 10546 - RNA, 20 nt, synthetic construct
  misc_feature 1..20: note = antisense sequence
  source 1..20: mol_type = other RNA
tctttccgaacttcttatgg

SEQ ID NO: 10547 - RNA, 20 nt, synthetic construct
  misc_feature 1..20: note = antisense sequence
  source 1..20: mol_type = other RNA
ggatctttccgaacttctta

SEQ ID NO: 10548 - RNA, 20 nt, synthetic construct
  misc_feature 1..20: note = antisense sequence
  source 1..20: mol_type = other RNA
tggatctttccgaacttctt

SEQ ID NO: 10549 - RNA, 20 nt, synthetic construct
  misc_feature 1..20: note = antisense sequence
  source 1..20: mol_type = other RNA
atggatctttccgaacttct

SEQ ID NO: 10550 - RNA, 20 nt, synthetic construct
  misc_feature 1..20: note = antisense sequence
  source 1..20: mol_type = other RNA
aatggatctttccgaacttc

SEQ ID NO: 10551 - RNA, 20 nt, synthetic construct
  misc_feature 1..20: note = antisense sequence
  source 1..20: mol_type = other RNA
ctgctaaaatggatctttcc

SEQ ID NO: 10552 - RNA, 20 nt, synthetic construct
  misc_feature 1..20: note = antisense sequence
  source 1..20: mol_type = other RNA
cacactgctaaaatggatct

SEQ ID NO: 10553 - RNA, 20 nt, synthetic construct
  misc_feature 1..20: note = antisense sequence
  source 1..20: mol_type = other RNA
tgctcacactgctaaaatgg

SEQ ID NO: 10554 - RNA, 20 nt, synthetic construct
  misc_feature 1..20: note = antisense sequence
  source 1..20: mol_type = other RNA
cattgctcacactgctaaaa

SEQ ID NO: 10555 - RNA, 20 nt, synthetic construct
  misc_feature 1..20: note = antisense sequence
  source 1..20: mol_type = other RNA
cccattgctcacactgctaa

SEQ ID NO: 10556 - RNA, 20 nt, synthetic construct
  misc_feature 1..20: note = antisense sequence
  source 1..20: mol_type = other RNA
aaaagcccattgctcacact

SEQ ID NO: 10557 - RNA, 20 nt, synthetic construct
  misc_feature 1..20: note = antisense sequence
  source 1..20: mol_type = other RNA
taaaagcccattgctcacac

SEQ ID NO: 10558 - RNA, 20 nt, synthetic construct
  misc_feature 1..20: note = antisense sequence
  source 1..20: mol_type = other RNA
ctaactttccaccagatcat

SEQ ID NO: 10559 - RNA, 20 nt, synthetic construct
  misc_feature 1..20: note = antisense sequence
  source 1..20: mol_type = other RNA
ctctaactttccaccagatc

SEQ ID NO: 10560 - RNA, 20 nt, synthetic construct
  misc_feature 1..20: note = antisense sequence
  source 1..20: mol_type = other RNA
taacctctaactttccacca

SEQ ID NO: 10561 - RNA, 20 nt, synthetic construct
  misc_feature 1..20: note = antisense sequence
  source 1..20: mol_type = other RNA
gtaacctctaactttccacc

SEQ ID NO: 10562 - RNA, 20 nt, synthetic construct
  misc_feature 1..20: note = antisense sequence
  source 1..20: mol_type = other RNA
agtaacctctaactttccac

SEQ ID NO: 10563 - RNA, 20 nt, synthetic construct
  misc_feature 1..20: note = antisense sequence
  source 1..20: mol_type = other RNA
ctggcaagtaacctctaact

SEQ ID NO: 10564 - RNA, 20 nt, synthetic construct
  misc_feature 1..20: note = antisense sequence
  source 1..20: mol_type = other RNA
cctggcaagtaacctctaac

SEQ ID NO: 10565 - RNA, 20 nt, synthetic construct
  misc_feature 1..20: note = antisense sequence
  source 1..20: mol_type = other RNA
acctggcaagtaacctctaa

SEQ ID NO: 10566 - RNA, 20 nt, synthetic construct
  misc_feature 1..20: note = antisense sequence
  source 1..20: mol_type = other RNA
aacctggcaagtaacctcta

SEQ ID NO: 10567 - RNA, 20 nt, synthetic construct
  misc_feature 1..20: note = antisense sequence
  source 1..20: mol_type = other RNA
gaacctggcaagtaacctct

SEQ ID NO: 10568 - RNA, 20 nt, synthetic construct
  misc_feature 1..20: note = antisense sequence
  source 1..20: mol_type = other RNA
agtgccgtatgttcctatat

SEQ ID NO: 10569 - RNA, 20 nt, synthetic construct
  misc_feature 1..20: note = antisense sequence
  source 1..20: mol_type = other RNA
cagtgccgtatgttcctata

SEQ ID NO: 10570 - RNA, 20 nt, synthetic construct
  misc_feature 1..20: note = antisense sequence
  source 1..20: mol_type = other RNA
ccagtgccgtatgttcctat

SEQ ID NO: 10571 - RNA, 20 nt, synthetic construct
  misc_feature 1..20: note = antisense sequence
  source 1..20: mol_type = other RNA
tccagtgccgtatgttccta

SEQ ID NO: 10572 - RNA, 20 nt, synthetic construct
  misc_feature 1..20: note = antisense sequence
  source 1..20: mol_type = other RNA
ctccagtgccgtatgttcct

SEQ ID NO: 10573 - RNA, 20 nt, synthetic construct
  misc_feature 1..20: note = antisense sequence
  source 1..20: mol_type = other RNA
gctccagtgccgtatgttcc

SEQ ID NO: 10574 - RNA, 20 nt, synthetic construct
  misc_feature 1..20: note = antisense sequence
  source 1..20: mol_type = other RNA
acagctccagtgccgtatgt

SEQ ID NO: 10575 - RNA, 20 nt, synthetic construct
  misc_feature 1..20: note = antisense sequence
  source 1..20: mol_type = other RNA
gacagctccagtgccgtatg

SEQ ID NO: 10576 - RNA, 20 nt, synthetic construct
  misc_feature 1..20: note = antisense sequence
  source 1..20: mol_type = other RNA
agacagctccagtgccgtat

SEQ ID NO: 10577 - RNA, 20 nt, synthetic construct
  misc_feature 1..20: note = antisense sequence
  source 1..20: mol_type = other RNA
gagacagctccagtgccgta

SEQ ID NO: 10578 - RNA, 20 nt, synthetic construct
  misc_feature 1..20: note = antisense sequence
  source 1..20: mol_type = other RNA
tgagacagctccagtgccgt

SEQ ID NO: 10579 - RNA, 20 nt, synthetic construct
  misc_feature 1..20: note = antisense sequence
  source 1..20: mol_type = other RNA
aggcaattaggctgagacag

SEQ ID NO: 10580 - RNA, 20 nt, synthetic construct
  misc_feature 1..20: note = antisense sequence
  source 1..20: mol_type = other RNA
taggcaattaggctgagaca

SEQ ID NO: 10581 - RNA, 20 nt, synthetic construct
  misc_feature 1..20: note = antisense sequence
  source 1..20: mol_type = other RNA
ataggcaattaggctgagac

SEQ ID NO: 10582 - RNA, 20 nt, synthetic construct
  misc_feature 1..20: note = antisense sequence
  source 1..20: mol_type = other RNA
tataggcaattaggctgaga

SEQ ID NO: 10583 - RNA, 20 nt, synthetic construct
  misc_feature 1..20: note = antisense sequence
  source 1..20: mol_type = other RNA
ttataggcaattaggctgag

SEQ ID NO: 10584 - RNA, 20 nt, synthetic construct
  misc_feature 1..20: note = antisense sequence
  source 1..20: mol_type = other RNA
cgctgttccatgatattatc

SEQ ID NO: 10585 - RNA, 20 nt, synthetic construct
  misc_feature 1..20: note = antisense sequence
  source 1..20: mol_type = other RNA
tccctcatccttggtatctg

SEQ ID NO: 10586 - RNA, 20 nt, synthetic construct
  misc_feature 1..20: note = antisense sequence
  source 1..20: mol_type = other RNA
atccctcatccttggtatct

SEQ ID NO: 10587 - RNA, 20 nt, synthetic construct
  misc_feature 1..20: note = antisense sequence
  source 1..20: mol_type = other RNA
aatccctcatccttggtatc

SEQ ID NO: 10588 - RNA, 20 nt, synthetic construct
  misc_feature 1..20: note = antisense sequence
  source 1..20: mol_type = other RNA
aaatccctcatccttggtat

SEQ ID NO: 10589 - RNA, 20 nt, synthetic construct
  misc_feature 1..20: note = antisense sequence
  source 1..20: mol_type = other RNA
gaaatccctcatccttggta

SEQ ID NO: 10590 - RNA, 20 nt, synthetic construct
  misc_feature 1..20: note = antisense sequence
  source 1..20: mol_type = other RNA
ggaaatccctcatccttggt

SEQ ID NO: 10591 - RNA, 20 nt, synthetic construct
  misc_feature 1..20: note = antisense sequence
  source 1..20: mol_type = other RNA
agtggaaatccctcatcctt

SEQ ID NO: 10592 - RNA, 20 nt, synthetic construct
  misc_feature 1..20: note = antisense sequence
  source 1..20: mol_type = other RNA
tagtggaaatccctcatcct

SEQ ID NO: 10593 - RNA, 20 nt, synthetic construct
  misc_feature 1..20: note = antisense sequence
  source 1..20: mol_type = other RNA
tttagtggaaatccctcatc

SEQ ID NO: 10594 - RNA, 20 nt, synthetic construct
  misc_feature 1..20: note = antisense sequence
  source 1..20: mol_type = other RNA
gcaagaatctggcttaatca

SEQ ID NO: 10595 - RNA, 20 nt, synthetic construct
  misc_feature 1..20: note = antisense sequence
  source 1..20: mol_type = other RNA
agcaagaatctggcttaatc

SEQ ID NO: 10596 - RNA, 20 nt, synthetic construct
  misc_feature 1..20: note = antisense sequence
  source 1..20: mol_type = other RNA
gtttaagcaagaatctggct

SEQ ID NO: 10597 - RNA, 20 nt, synthetic construct
  misc_feature 1..20: note = antisense sequence
  source 1..20: mol_type = other RNA
ggctgtgttctttacccact

SEQ ID NO: 10598 - RNA, 20 nt, synthetic construct
  misc_feature 1..20: note = antisense sequence
  source 1..20: mol_type = other RNA
gggctgtgttctttacccac

SEQ ID NO: 10599 - RNA, 20 nt, synthetic construct
  misc_feature 1..20: note = antisense sequence
  source 1..20: mol_type = other RNA
agtcaggctcctttacatct

SEQ ID NO: 10600 - RNA, 20 nt, synthetic construct
  misc_feature 1..20: note = antisense sequence
  source 1..20: mol_type = other RNA
gaccctctccttgaccaaaa

SEQ ID NO: 10601 - RNA, 20 nt, synthetic construct
  misc_feature 1..20: note = antisense sequence
  source 1..20: mol_type = other RNA
atacttgacaaagaccctct

SEQ ID NO: 10602 - RNA, 20 nt, synthetic construct
  misc_feature 1..20: note = antisense sequence
  source 1..20: mol_type = other RNA
ctatacttgacaaagaccct

SEQ ID NO: 10603 - RNA, 20 nt, synthetic construct
  misc_feature 1..20: note = antisense sequence
  source 1..20: mol_type = other RNA
tctatacttgacaaagaccc

SEQ ID NO: 10604 - RNA, 20 nt, synthetic construct
  misc_feature 1..20: note = antisense sequence
  source 1..20: mol_type = other RNA
ctctatacttgacaaagacc

SEQ ID NO: 10605 - RNA, 20 nt, synthetic construct
  misc_feature 1..20: note = antisense sequence
  source 1..20: mol_type = other RNA
cctctatacttgacaaagac

SEQ ID NO: 10606 - RNA, 20 nt, synthetic construct
  misc_feature 1..20: note = antisense sequence
  source 1..20: mol_type = other RNA
gccctctatacttgacaaag

SEQ ID NO: 10607 - RNA, 20 nt, synthetic construct
  misc_feature 1..20: note = antisense sequence
  source 1..20: mol_type = other RNA
tgccctctatacttgacaaa

SEQ ID NO: 10608 - RNA, 20 nt, synthetic construct
  misc_feature 1..20: note = antisense sequence
  source 1..20: mol_type = other RNA
ctgccctctatacttgacaa

SEQ ID NO: 10609 - RNA, 20 nt, synthetic construct
  misc_feature 1..20: note = antisense sequence
  source 1..20: mol_type = other RNA
tctgccctctatacttgaca

SEQ ID NO: 10610 - RNA, 20 nt, synthetic construct
  misc_feature 1..20: note = antisense sequence
  source 1..20: mol_type = other RNA
ctctgccctctatacttgac

SEQ ID NO: 10611 - RNA, 20 nt, synthetic construct
  misc_feature 1..20: note = antisense sequence
  source 1..20: mol_type = other RNA
tctctgccctctatacttga

SEQ ID NO: 10612 - RNA, 20 nt, synthetic construct
  misc_feature 1..20: note = antisense sequence
  source 1..20: mol_type = other RNA
tctctctgccctctatactt

SEQ ID NO: 10613 - RNA, 20 nt, synthetic construct
  misc_feature 1..20: note = antisense sequence
  source 1..20: mol_type = other RNA
gtctctctgccctctatact

SEQ ID NO: 10614 - RNA, 20 nt, synthetic construct
  misc_feature 1..20: note = antisense sequence
  source 1..20: mol_type = other RNA
agtctctctgccctctatac

SEQ ID NO: 10615 - RNA, 20 nt, synthetic construct
  misc_feature 1..20: note = antisense sequence
  source 1..20: mol_type = other RNA
gagtctctctgccctctata

SEQ ID NO: 10616 - RNA, 20 nt, synthetic construct
  misc_feature 1..20: note = antisense sequence
  source 1..20: mol_type = other RNA
ttgagtctctctgccctcta

SEQ ID NO: 10617 - RNA, 20 nt, synthetic construct
  misc_feature 1..20: note = antisense sequence
  source 1..20: mol_type = other RNA
tttgagtctctctgccctct

SEQ ID NO: 10618 - RNA, 20 nt, synthetic construct
  misc_feature 1..20: note = antisense sequence
  source 1..20: mol_type = other RNA
tctttgagtctctctgccct

SEQ ID NO: 10619 - RNA, 20 nt, synthetic construct
  misc_feature 1..20: note = antisense sequence
  source 1..20: mol_type = other RNA
ttctttgagtctctctgccc

SEQ ID NO: 10620 - RNA, 20 nt, synthetic construct
  misc_feature 1..20: note = antisense sequence
  source 1..20: mol_type = other RNA
acaagatgttgacaactgtc

SEQ ID NO: 10621 - RNA, 20 nt, synthetic construct
  misc_feature 1..20: note = antisense sequence
  source 1..20: mol_type = other RNA
gacaagatgttgacaactgt

SEQ ID NO: 10622 - RNA, 20 nt, synthetic construct
  misc_feature 1..20: note = antisense sequence
  source 1..20: mol_type = other RNA
gagaggattctggtgaaatg

SEQ ID NO: 10623 - RNA, 20 nt, synthetic construct
  misc_feature 1..20: note = antisense sequence
  source 1..20: mol_type = other RNA
agagaggattctggtgaaat

SEQ ID NO: 10624 - RNA, 20 nt, synthetic construct
  misc_feature 1..20: note = antisense sequence
  source 1..20: mol_type = other RNA
aagagaggattctggtgaaa

SEQ ID NO: 10625 - RNA, 20 nt, synthetic construct
  misc_feature 1..20: note = antisense sequence
  source 1..20: mol_type = other RNA
ttgcacaacagatacacact

SEQ ID NO: 10626 - RNA, 20 nt, synthetic construct
  misc_feature 1..20: note = antisense sequence
  source 1..20: mol_type = other RNA
agtttgcacaacagatacac

SEQ ID NO: 10627 - RNA, 20 nt, synthetic construct
  misc_feature 1..20: note = antisense sequence
  source 1..20: mol_type = other RNA
agagtttgcacaacagatac

SEQ ID NO: 10628 - RNA, 20 nt, synthetic construct
  misc_feature 1..20: note = antisense sequence
  source 1..20: mol_type = other RNA
caaggaaacgcctgtcttaa

SEQ ID NO: 10629 - RNA, 20 nt, synthetic construct
  misc_feature 1..20: note = antisense sequence
  source 1..20: mol_type = other RNA
ccaaggaaacgcctgtctta

SEQ ID NO: 10630 - RNA, 20 nt, synthetic construct
  misc_feature 1..20: note = antisense sequence
  source 1..20: mol_type = other RNA
gccaaggaaacgcctgtctt

SEQ ID NO: 10631 - RNA, 20 nt, synthetic construct
  misc_feature 1..20: note = antisense sequence
  source 1..20: mol_type = other RNA
tgccaaggaaacgcctgtct

SEQ ID NO: 10632 - RNA, 20 nt, synthetic construct
  misc_feature 1..20: note = antisense sequence
  source 1..20: mol_type = other RNA
ttgccaaggaaacgcctgtc

SEQ ID NO: 10633 - RNA, 20 nt, synthetic construct
  misc_feature 1..20: note = antisense sequence
  source 1..20: mol_type = other RNA
tttgccaaggaaacgcctgt

SEQ ID NO: 10634 - RNA, 20 nt, synthetic construct
  misc_feature 1..20: note = antisense sequence
  source 1..20: mol_type = other RNA
atttgccaaggaaacgcctg

SEQ ID NO: 10635 - RNA, 20 nt, synthetic construct
  misc_feature 1..20: note = antisense sequence
  source 1..20: mol_type = other RNA
gatttgccaaggaaacgcct

SEQ ID NO: 10636 - RNA, 20 nt, synthetic construct
  misc_feature 1..20: note = antisense sequence
  source 1..20: mol_type = other RNA
tagatttgccaaggaaacgc

SEQ ID NO: 10637 - RNA, 20 nt, synthetic construct
  misc_feature 1..20: note = antisense sequence
  source 1..20: mol_type = other RNA
ttttcgctctggagtcttgg

SEQ ID NO: 10638 - RNA, 20 nt, synthetic construct
  misc_feature 1..20: note = antisense sequence
  source 1..20: mol_type = other RNA
cttttcgctctggagtcttg

SEQ ID NO: 10639 - RNA, 20 nt, synthetic construct
  misc_feature 1..20: note = antisense sequence
  source 1..20: mol_type = other RNA
ccttttcgctctggagtctt

SEQ ID NO: 10640 - RNA, 20 nt, synthetic construct
  misc_feature 1..20: note = antisense sequence
  source 1..20: mol_type = other RNA
accttttcgctctggagtct

SEQ ID NO: 10641 - RNA, 20 nt, synthetic construct
  misc_feature 1..20: note = antisense sequence
  source 1..20: mol_type = other RNA
aaccttttcgctctggagtc

SEQ ID NO: 10642 - RNA, 20 nt, synthetic construct
  misc_feature 1..20: note = antisense sequence
  source 1..20: mol_type = other RNA
aaaccttttcgctctggagt

SEQ ID NO: 10643 - RNA, 20 nt, synthetic construct
  misc_feature 1..20: note = antisense sequence
  source 1..20: mol_type = other RNA
caaaccttttcgctctggag

SEQ ID NO: 10644 - RNA, 20 nt, synthetic construct
  misc_feature 1..20: note = antisense sequence
  source 1..20: mol_type = other RNA
tcaaaccttttcgctctgga

SEQ ID NO: 10645 - RNA, 20 nt, synthetic construct
  misc_feature 1..20: note = antisense sequence
  source 1..20: mol_type = other RNA
ctcaaaccttttcgctctgg

SEQ ID NO: 10646 - RNA, 20 nt, synthetic construct
  misc_feature 1..20: note = antisense sequence
  source 1..20: mol_type = other RNA
actcaaaccttttcgctctg

SEQ ID NO: 10647 - RNA, 20 nt, synthetic construct
  misc_feature 1..20: note = antisense sequence
  source 1..20: mol_type = other RNA
tactcaaaccttttcgctct

SEQ ID NO: 10648 - RNA, 20 nt, synthetic construct
  misc_feature 1..20: note = antisense sequence
  source 1..20: mol_type = other RNA
ttactcaaaccttttcgctc

SEQ ID NO: 10649 - RNA, 20 nt, synthetic construct
  misc_feature 1..20: note = antisense sequence
  source 1..20: mol_type = other RNA
cagcacttatggaaagaaac

SEQ ID NO: 10650 - RNA, 20 nt, synthetic construct
  misc_feature 1..20: note = antisense sequence
  source 1..20: mol_type = other RNA
attccagcctgggcgacaga

SEQ ID NO: 10651 - RNA, 20 nt, synthetic construct
  misc_feature 1..20: note = antisense sequence
  source 1..20: mol_type = other RNA
aggagaatggcgtgaacccg

SEQ ID NO: 10652 - RNA, 20 nt, synthetic construct
  misc_feature 1..20: note = antisense sequence
  source 1..20: mol_type = other RNA
caggagaatggcgtgaaccc

SEQ ID NO: 10653 - RNA, 20 nt, synthetic construct
  misc_feature 1..20: note = antisense sequence
  source 1..20: mol_type = other RNA
gcaggagaatggcgtgaacc

SEQ ID NO: 10654 - RNA, 20 nt, synthetic construct
  misc_feature 1..20: note = antisense sequence
  source 1..20: mol_type = other RNA
ggcaggagaatggcgtgaac

SEQ ID NO: 10655 - RNA, 20 nt, synthetic construct
  misc_feature 1..20: note = antisense sequence
  source 1..20: mol_type = other RNA
aggcaggagaatggcgtgaa

SEQ ID NO: 10656 - RNA, 20 nt, synthetic construct
  misc_feature 1..20: note = antisense sequence
  source 1..20: mol_type = other RNA
gaggcaggagaatggcgtga

SEQ ID NO: 10657 - RNA, 20 nt, synthetic construct
  misc_feature 1..20: note = antisense sequence
  source 1..20: mol_type = other RNA
tgaggcaggagaatggcgtg

SEQ ID NO: 10658 - RNA, 20 nt, synthetic construct
  misc_feature 1..20: note = antisense sequence
  source 1..20: mol_type = other RNA
ctgaggcaggagaatggcgt

SEQ ID NO: 10659 - RNA, 20 nt, synthetic construct
  misc_feature 1..20: note = antisense sequence
  source 1..20: mol_type = other RNA
aggctgaggcaggagaatgg

SEQ ID NO: 10660 - RNA, 20 nt, synthetic construct
  misc_feature 1..20: note = antisense sequence
  source 1..20: mol_type = other RNA
gaggctgaggcaggagaatg

SEQ ID NO: 10661 - RNA, 20 nt, synthetic construct
  misc_feature 1..20: note = antisense sequence
  source 1..20: mol_type = other RNA
ggaggctgaggcaggagaat

SEQ ID NO: 10662 - RNA, 20 nt, synthetic construct
  misc_feature 1..20: note = antisense sequence
  source 1..20: mol_type = other RNA
cccgtctctactaaaataca

SEQ ID NO: 10663 - RNA, 20 nt, synthetic construct
  misc_feature 1..20: note = antisense sequence
  source 1..20: mol_type = other RNA
tatcctggctaagaaggtga

SEQ ID NO: 10664 - RNA, 20 nt, synthetic construct
  misc_feature 1..20: note = antisense sequence
  source 1..20: mol_type = other RNA
ctatcctggctaagaaggtg

SEQ ID NO: 10665 - RNA, 20 nt, synthetic construct
  misc_feature 1..20: note = antisense sequence
  source 1..20: mol_type = other RNA
aatttcagggaggccgaggc

SEQ ID NO: 10666 - RNA, 20 nt, synthetic construct
  misc_feature 1..20: note = antisense sequence
  source 1..20: mol_type = other RNA
gaagatggcaatggagagga

SEQ ID NO: 10667 - RNA, 20 nt, synthetic construct
  misc_feature 1..20: note = antisense sequence
  source 1..20: mol_type = other RNA
agaagatggcaatggagagg

SEQ ID NO: 10668 - RNA, 20 nt, synthetic construct
  misc_feature 1..20: note = antisense sequence
  source 1..20: mol_type = other RNA
gagaagatggcaatggagag

SEQ ID NO: 10669 - RNA, 20 nt, synthetic construct
  misc_feature 1..20: note = antisense sequence
  source 1..20: mol_type = other RNA
gcaggatgggagaagatggc

SEQ ID NO: 10670 - RNA, 20 nt, synthetic construct
  misc_feature 1..20: note = antisense sequence
  source 1..20: mol_type = other RNA
cctgaactatgtgttagcac

SEQ ID NO: 10671 - RNA, 20 nt, synthetic construct
  misc_feature 1..20: note = antisense sequence
  source 1..20: mol_type = other RNA
gcctgaactatgtgttagca

SEQ ID NO: 10672 - RNA, 20 nt, synthetic construct
  misc_feature 1..20: note = antisense sequence
  source 1..20: mol_type = other RNA
ggcctgaactatgtgttagc

SEQ ID NO: 10673 - RNA, 20 nt, synthetic construct
  misc_feature 1..20: note = antisense sequence
  source 1..20: mol_type = other RNA
tggcctgaactatgtgttag

SEQ ID NO: 10674 - RNA, 20 nt, synthetic construct
  misc_feature 1..20: note = antisense sequence
  source 1..20: mol_type = other RNA
aagtggttgaaggagttaca

SEQ ID NO: 10675 - RNA, 20 nt, synthetic construct
  misc_feature 1..20: note = antisense sequence
  source 1..20: mol_type = other RNA
catgggagtaatagactgca

SEQ ID NO: 10676 - RNA, 20 nt, synthetic construct
  misc_feature 1..20: note = antisense sequence
  source 1..20: mol_type = other RNA
acatgggagtaatagactgc

SEQ ID NO: 10677 - RNA, 20 nt, synthetic construct
  misc_feature 1..20: note = antisense sequence
  source 1..20: mol_type = other RNA
cacatgggagtaatagactg

SEQ ID NO: 10678 - RNA, 20 nt, synthetic construct
  misc_feature 1..20: note = antisense sequence
  source 1..20: mol_type = other RNA
ctttcacatgggagtaatag

SEQ ID NO: 10679 - RNA, 20 nt, synthetic construct
  misc_feature 1..20: note = antisense sequence
  source 1..20: mol_type = other RNA
agtctttcacatgggagtaa

SEQ ID NO: 10680 - RNA, 20 nt, synthetic construct
  misc_feature 1..20: note = antisense sequence
  source 1..20: mol_type = other RNA
gtgcttgagagtgtcctggg

SEQ ID NO: 10681 - RNA, 20 nt, synthetic construct
  misc_feature 1..20: note = antisense sequence
  source 1..20: mol_type = other RNA
agtgcttgagagtgtcctgg

SEQ ID NO: 10682 - RNA, 20 nt, synthetic construct
  misc_feature 1..20: note = antisense sequence
  source 1..20: mol_type = other RNA
gagtgcttgagagtgtcctg

SEQ ID NO: 10683 - RNA, 20 nt, synthetic construct
  misc_feature 1..20: note = antisense sequence
  source 1..20: mol_type = other RNA
gtgagtgcttgagagtgtcc

SEQ ID NO: 10684 - RNA, 20 nt, synthetic construct
  misc_feature 1..20: note = antisense sequence
  source 1..20: mol_type = other RNA
tgtgagtgcttgagagtgtc

SEQ ID NO: 10685 - RNA, 20 nt, synthetic construct
  misc_feature 1..20: note = antisense sequence
  source 1..20: mol_type = other RNA
ctgtgagtgcttgagagtgt

SEQ ID NO: 10686 - RNA, 20 nt, synthetic construct
  misc_feature 1..20: note = antisense sequence
  source 1..20: mol_type = other RNA
gctgtgagtgcttgagagtg

SEQ ID NO: 10687 - RNA, 20 nt, synthetic construct
  misc_feature 1..20: note = antisense sequence
  source 1..20: mol_type = other RNA
ggctgtgagtgcttgagagt

SEQ ID NO: 10688 - RNA, 20 nt, synthetic construct
  misc_feature 1..20: note = antisense sequence
  source 1..20: mol_type = other RNA
gggctgtgagtgcttgagag

SEQ ID NO: 10689 - RNA, 20 nt, synthetic construct
  misc_feature 1..20: note = antisense sequence
  source 1..20: mol_type = other RNA
agagaacagagtattagtgg

SEQ ID NO: 10690 - RNA, 20 nt, synthetic construct
  misc_feature 1..20: note = antisense sequence
  source 1..20: mol_type = other RNA
cgtctagcagaaacttttgc

SEQ ID NO: 10691 - RNA, 20 nt, synthetic construct
  misc_feature 1..20: note = antisense sequence
  source 1..20: mol_type = other RNA
gcgtctagcagaaacttttg

SEQ ID NO: 10692 - RNA, 20 nt, synthetic construct
  misc_feature 1..20: note = antisense sequence
  source 1..20: mol_type = other RNA
tcttttcttctgcgtctagc

SEQ ID NO: 10693 - RNA, 20 nt, synthetic construct
  misc_feature 1..20: note = antisense sequence
  source 1..20: mol_type = other RNA
ctcttttcttctgcgtctag

SEQ ID NO: 10694 - RNA, 20 nt, synthetic construct
  misc_feature 1..20: note = antisense sequence
  source 1..20: mol_type = other RNA
cctcttttcttctgcgtcta

SEQ ID NO: 10695 - RNA, 20 nt, synthetic construct
  misc_feature 1..20: note = antisense sequence
  source 1..20: mol_type = other RNA
cttctctcatttaacaggcc

SEQ ID NO: 10696 - RNA, 20 nt, synthetic construct
  misc_feature 1..20: note = antisense sequence
  source 1..20: mol_type = other RNA
aggtgctcctttctctgtaa

SEQ ID NO: 10697 - RNA, 20 nt, synthetic construct
  misc_feature 1..20: note = antisense sequence
  source 1..20: mol_type = other RNA
acatcatggtcagagaaggc

SEQ ID NO: 10698 - RNA, 20 nt, synthetic construct
  misc_feature 1..20: note = antisense sequence
  source 1..20: mol_type = other RNA
tacatcatggtcagagaagg

SEQ ID NO: 10699 - RNA, 20 nt, synthetic construct
  misc_feature 1..20: note = antisense sequence
  source 1..20: mol_type = other RNA
atacatcatggtcagagaag

SEQ ID NO: 10700 - RNA, 20 nt, synthetic construct
  misc_feature 1..20: note = antisense sequence
  source 1..20: mol_type = other RNA
ggcatacatcatggtcagag

SEQ ID NO: 10701 - RNA, 20 nt, synthetic construct
  misc_feature 1..20: note = antisense sequence
  source 1..20: mol_type = other RNA
aggcatacatcatggtcaga

SEQ ID NO: 10702 - RNA, 20 nt, synthetic construct
  misc_feature 1..20: note = antisense sequence
  source 1..20: mol_type = other RNA
gaggcatacatcatggtcag

SEQ ID NO: 10703 - RNA, 20 nt, synthetic construct
  misc_feature 1..20: note = antisense sequence
  source 1..20: mol_type = other RNA
tgaggcatacatcatggtca

SEQ ID NO: 10704 - RNA, 20 nt, synthetic construct
  misc_feature 1..20: note = antisense sequence
  source 1..20: mol_type = other RNA
ctgaggcatacatcatggtc

SEQ ID NO: 10705 - RNA, 20 nt, synthetic construct
  misc_feature 1..20: note = antisense sequence
  source 1..20: mol_type = other RNA
actgaggcatacatcatggt

SEQ ID NO: 10706 - RNA, 20 nt, synthetic construct
  misc_feature 1..20: note = antisense sequence
  source 1..20: mol_type = other RNA
gactgaggcatacatcatgg

SEQ ID NO: 10707 - RNA, 20 nt, synthetic construct
  misc_feature 1..20: note = antisense sequence
  source 1..20: mol_type = other RNA
tgactgaggcatacatcatg

SEQ ID NO: 10708 - RNA, 20 nt, synthetic construct
  misc_feature 1..20: note = antisense sequence
  source 1..20: mol_type = other RNA
gtgactgaggcatacatcat

SEQ ID NO: 10709 - RNA, 20 nt, synthetic construct
  misc_feature 1..20: note = antisense sequence
  source 1..20: mol_type = other RNA
tgtgactgaggcatacatca

SEQ ID NO: 10710 - RNA, 20 nt, synthetic construct
  misc_feature 1..20: note = antisense sequence
  source 1..20: mol_type = other RNA
gtgtgactgaggcatacatc

SEQ ID NO: 10711 - RNA, 20 nt, synthetic construct
  misc_feature 1..20: note = antisense sequence
  source 1..20: mol_type = other RNA
ggtgtgactgaggcatacat

SEQ ID NO: 10712 - RNA, 20 nt, synthetic construct
  misc_feature 1..20: note = antisense sequence
  source 1..20: mol_type = other RNA
gggtgtgactgaggcataca

SEQ ID NO: 10713 - RNA, 20 nt, synthetic construct
  misc_feature 1..20: note = antisense sequence
  source 1..20: mol_type = other RNA
agggtgtgactgaggcatac

SEQ ID NO: 10714 - RNA, 20 nt, synthetic construct
  misc_feature 1..20: note = antisense sequence
  source 1..20: mol_type = other RNA
gagggtgtgactgaggcata

SEQ ID NO: 10715 - RNA, 20 nt, synthetic construct
  misc_feature 1..20: note = antisense sequence
  source 1..20: mol_type = other RNA
aagggagggtgtgactgagg

SEQ ID NO: 10716 - RNA, 20 nt, synthetic construct
  misc_feature 1..20: note = antisense sequence
  source 1..20: mol_type = other RNA
aaagggagggtgtgactgag

SEQ ID NO: 10717 - RNA, 20 nt, synthetic construct
  misc_feature 1..20: note = antisense sequence
  source 1..20: mol_type = other RNA
caaagggagggtgtgactga

SEQ ID NO: 10718 - RNA, 20 nt, synthetic construct
  misc_feature 1..20: note = antisense sequence
  source 1..20: mol_type = other RNA
tcaaagggagggtgtgactg

SEQ ID NO: 10719 - RNA, 20 nt, synthetic construct
  misc_feature 1..20: note = antisense sequence
  source 1..20: mol_type = other RNA
ttcaaagggagggtgtgact

SEQ ID NO: 10720 - RNA, 20 nt, synthetic construct
  misc_feature 1..20: note = antisense sequence
  source 1..20: mol_type = other RNA
tttcaaagggagggtgtgac

SEQ ID NO: 10721 - RNA, 20 nt, synthetic construct
  misc_feature 1..20: note = antisense sequence
  source 1..20: mol_type = other RNA
atttcaaagggagggtgtga

SEQ ID NO: 10722 - RNA, 20 nt, synthetic construct
  misc_feature 1..20: note = antisense sequence
  source 1..20: mol_type = other RNA
gagaggtctccgttttgcta

SEQ ID NO: 10723 - RNA, 20 nt, synthetic construct
  misc_feature 1..20: note = antisense sequence
  source 1..20: mol_type = other RNA
tcagatgatggagaggtctc

SEQ ID NO: 10724 - RNA, 20 nt, synthetic construct
  misc_feature 1..20: note = antisense sequence
  source 1..20: mol_type = other RNA
ttcagatgatggagaggtct

SEQ ID NO: 10725 - RNA, 20 nt, synthetic construct
  misc_feature 1..20: note = antisense sequence
  source 1..20: mol_type = other RNA
tttcagatgatggagaggtc

SEQ ID NO: 10726 - RNA, 20 nt, synthetic construct
  misc_feature 1..20: note = antisense sequence
  source 1..20: mol_type = other RNA
gcataatgagccttgtttgt

SEQ ID NO: 10727 - RNA, 20 nt, synthetic construct
  misc_feature 1..20: note = antisense sequence
  source 1..20: mol_type = other RNA
agttgggaggcataatgagc

SEQ ID NO: 10728 - RNA, 20 nt, synthetic construct
  misc_feature 1..20: note = antisense sequence
  source 1..20: mol_type = other RNA
aagttgggaggcataatgag

SEQ ID NO: 10729 - RNA, 20 nt, synthetic construct
  misc_feature 1..20: note = antisense sequence
  source 1..20: mol_type = other RNA
tcaagttgggaggcataatg

SEQ ID NO: 10730 - RNA, 20 nt, synthetic construct
  misc_feature 1..20: note = antisense sequence
  source 1..20: mol_type = other RNA
ttcaagttgggaggcataat

SEQ ID NO: 10731 - RNA, 20 nt, synthetic construct
  misc_feature 1..20: note = antisense sequence
  source 1..20: mol_type = other RNA
attcaagttgggaggcataa

SEQ ID NO: 10732 - RNA, 20 nt, synthetic construct
  misc_feature 1..20: note = antisense sequence
  source 1..20: mol_type = other RNA
cattcaagttgggaggcata

SEQ ID NO: 10733 - RNA, 20 nt, synthetic construct
  misc_feature 1..20: note = antisense sequence
  source 1..20: mol_type = other RNA
tcattcaagttgggaggcat

SEQ ID NO: 10734 - RNA, 20 nt, synthetic construct
  misc_feature 1..20: note = antisense sequence
  source 1..20: mol_type = other RNA
catcattcaagttgggaggc

SEQ ID NO: 10735 - RNA, 20 nt, synthetic construct
  misc_feature 1..20: note = antisense sequence
  source 1..20: mol_type = other RNA
ccatcattcaagttgggagg

SEQ ID NO: 10736 - RNA, 20 nt, synthetic construct
  misc_feature 1..20: note = antisense sequence
  source 1..20: mol_type = other RNA
atgcccatcattcaagttgg

SEQ ID NO: 10737 - RNA, 20 nt, synthetic construct
  misc_feature 1..20: note = antisense sequence
  source 1..20: mol_type = other RNA
ttagcatcaatgcccatcat

SEQ ID NO: 10738 - RNA, 20 nt, synthetic construct
  misc_feature 1..20: note = antisense sequence
  source 1..20: mol_type = other RNA
attagcatcaatgcccatca

SEQ ID NO: 10739 - RNA, 20 nt, synthetic construct
  misc_feature 1..20: note = antisense sequence
  source 1..20: mol_type = other RNA
aattagcatcaatgcccatc

SEQ ID NO: 10740 - RNA, 20 nt, synthetic construct
  misc_feature 1..20: note = antisense sequence
  source 1..20: mol_type = other RNA
caaaattagcatcaatgccc

SEQ ID NO: 10741 - RNA, 20 nt, synthetic construct
  misc_feature 1..20: note = antisense sequence
  source 1..20: mol_type = other RNA
cttccctccaaaattagcat

SEQ ID NO: 10742 - RNA, 20 nt, synthetic construct
  misc_feature 1..20: note = antisense sequence
  source 1..20: mol_type = other RNA
gtgcttccctccaaaattag

SEQ ID NO: 10743 - RNA, 20 nt, synthetic construct
  misc_feature 1..20: note = antisense sequence
  source 1..20: mol_type = other RNA
ggtgcttccctccaaaatta

SEQ ID NO: 10744 - RNA, 20 nt, synthetic construct
  misc_feature 1..20: note = antisense sequence
  source 1..20: mol_type = other RNA
aggtagcctggtgcttccct

SEQ ID NO: 10745 - RNA, 20 nt, synthetic construct
  misc_feature 1..20: note = antisense sequence
  source 1..20: mol_type = other RNA
taggtagcctggtgcttccc

SEQ ID NO: 10746 - RNA, 20 nt, synthetic construct
  misc_feature 1..20: note = antisense sequence
  source 1..20: mol_type = other RNA
ctaggtagcctggtgcttcc

SEQ ID NO: 10747 - RNA, 20 nt, synthetic construct
  misc_feature 1..20: note = antisense sequence
  source 1..20: mol_type = other RNA
ctctaggtagcctggtgctt

SEQ ID NO: 10748 - RNA, 20 nt, synthetic construct
  misc_feature 1..20: note = antisense sequence
  source 1..20: mol_type = other RNA
actctaggtagcctggtgct

SEQ ID NO: 10749 - RNA, 20 nt, synthetic construct
  misc_feature 1..20: note = antisense sequence
  source 1..20: mol_type = other RNA
tactctaggtagcctggtgc

SEQ ID NO: 10750 - RNA, 20 nt, synthetic construct
  misc_feature 1..20: note = antisense sequence
  source 1..20: mol_type = other RNA
ggttgataagacaccacttt

SEQ ID NO: 10751 - RNA, 20 nt, synthetic construct
  misc_feature 1..20: note = antisense sequence
  source 1..20: mol_type = other RNA
aggttgataagacaccactt

SEQ ID NO: 10752 - RNA, 20 nt, synthetic construct
  misc_feature 1..20: note = antisense sequence
  source 1..20: mol_type = other RNA
gaggttgataagacaccact

SEQ ID NO: 10753 - RNA, 20 nt, synthetic construct
  misc_feature 1..20: note = antisense sequence
  source 1..20: mol_type = other RNA
gagaggttgataagacacca

SEQ ID NO: 10754 - RNA, 20 nt, synthetic construct
  misc_feature 1..20: note = antisense sequence
  source 1..20: mol_type = other RNA
agagaggttgataagacacc

SEQ ID NO: 10755 - RNA, 20 nt, synthetic construct
  misc_feature 1..20: note = antisense sequence
  source 1..20: mol_type = other RNA
aagagaggttgataagacac

SEQ ID NO: 10756 - RNA, 20 nt, synthetic construct
  misc_feature 1..20: note = antisense sequence
  source 1..20: mol_type = other RNA
gcctcctttctaaagtaatc

SEQ ID NO: 10757 - RNA, 20 nt, synthetic construct
  misc_feature 1..20: note = antisense sequence
  source 1..20: mol_type = other RNA
ccgtgaatgcctcctttcta

SEQ ID NO: 10758 - RNA, 20 nt, synthetic construct
  misc_feature 1..20: note = antisense sequence
  source 1..20: mol_type = other RNA
ttccgtgaatgcctcctttc

SEQ ID NO: 10759 - RNA, 20 nt, synthetic construct
  misc_feature 1..20: note = antisense sequence
  source 1..20: mol_type = other RNA
cttccgtgaatgcctccttt

SEQ ID NO: 10760 - RNA, 20 nt, synthetic construct
  misc_feature 1..20: note = antisense sequence
  source 1..20: mol_type = other RNA
gcttccgtgaatgcctcctt

SEQ ID NO: 10761 - RNA, 20 nt, synthetic construct
  misc_feature 1..20: note = antisense sequence
  source 1..20: mol_type = other RNA
ggcttccgtgaatgcctcct

SEQ ID NO: 10762 - RNA, 20 nt, synthetic construct
  misc_feature 1..20: note = antisense sequence
  source 1..20: mol_type = other RNA
taactcctcttcgggcaccc

SEQ ID NO: 10763 - RNA, 20 nt, synthetic construct
  misc_feature 1..20: note = antisense sequence
  source 1..20: mol_type = other RNA
ttaactcctcttcgggcacc

SEQ ID NO: 10764 - RNA, 20 nt, synthetic construct
  misc_feature 1..20: note = antisense sequence
  source 1..20: mol_type = other RNA
tttaactcctcttcgggcac

SEQ ID NO: 10765 - RNA, 20 nt, synthetic construct
  misc_feature 1..20: note = antisense sequence
  source 1..20: mol_type = other RNA
ttttaactcctcttcgggca

SEQ ID NO: 10766 - RNA, 20 nt, synthetic construct
  misc_feature 1..20: note = antisense sequence
  source 1..20: mol_type = other RNA
tccatctgtcacaataacca

SEQ ID NO: 10767 - RNA, 20 nt, synthetic construct
  misc_feature 1..20: note = antisense sequence
  source 1..20: mol_type = other RNA
ctccatctgtcacaataacc

SEQ ID NO: 10768 - RNA, 20 nt, synthetic construct
  misc_feature 1..20: note = antisense sequence
  source 1..20: mol_type = other RNA
tctccatctgtcacaataac

SEQ ID NO: 10769 - RNA, 20 nt, synthetic construct
  misc_feature 1..20: note = antisense sequence
  source 1..20: mol_type = other RNA
ctctccatctgtcacaataa

SEQ ID NO: 10770 - RNA, 20 nt, synthetic construct
  misc_feature 1..20: note = antisense sequence
  source 1..20: mol_type = other RNA
agactctccatctgtcacaa

SEQ ID NO: 10771 - RNA, 20 nt, synthetic construct
  misc_feature 1..20: note = antisense sequence
  source 1..20: mol_type = other RNA
tgagactctccatctgtcac

SEQ ID NO: 10772 - RNA, 20 nt, synthetic construct
  misc_feature 1..20: note = antisense sequence
  source 1..20: mol_type = other RNA
atgagactctccatctgtca

SEQ ID NO: 10773 - RNA, 20 nt, synthetic construct
  misc_feature 1..20: note = antisense sequence
  source 1..20: mol_type = other RNA
catgagactctccatctgtc

SEQ ID NO: 10774 - RNA, 20 nt, synthetic construct
  misc_feature 1..20: note = antisense sequence
  source 1..20: mol_type = other RNA
tcttcagtcgatgattgtca

SEQ ID NO: 10775 - RNA, 20 nt, synthetic construct
  misc_feature 1..20: note = antisense sequence
  source 1..20: mol_type = other RNA
ttcttcagtcgatgattgtc

SEQ ID NO: 10776 - RNA, 20 nt, synthetic construct
  misc_feature 1..20: note = antisense sequence
  source 1..20: mol_type = other RNA
cttcttcagtcgatgattgt

SEQ ID NO: 10777 - RNA, 20 nt, synthetic construct
  misc_feature 1..20: note = antisense sequence
  source 1..20: mol_type = other RNA
ccttcttcagtcgatgattg

SEQ ID NO: 10778 - RNA, 20 nt, synthetic construct
  misc_feature 1..20: note = antisense sequence
  source 1..20: mol_type = other RNA
accttcttcagtcgatgatt

SEQ ID NO: 10779 - RNA, 20 nt, synthetic construct
  misc_feature 1..20: note = antisense sequence
  source 1..20: mol_type = other RNA
gaccttcttcagtcgatgat

SEQ ID NO: 10780 - RNA, 20 nt, synthetic construct
  misc_feature 1..20: note = antisense sequence
  source 1..20: mol_type = other RNA
tgaccttcttcagtcgatga

SEQ ID NO: 10781 - RNA, 20 nt, synthetic construct
  misc_feature 1..20: note = antisense sequence
  source 1..20: mol_type = other RNA
gatgaccttcttcagtcgat

SEQ ID NO: 10782 - RNA, 20 nt, synthetic construct
  misc_feature 1..20: note = antisense sequence
  source 1..20: mol_type = other RNA
ggatgaccttcttcagtcga

SEQ ID NO: 10783 - RNA, 20 nt, synthetic construct
  misc_feature 1..20: note = antisense sequence
  source 1..20: mol_type = other RNA
tggatgaccttcttcagtcg

SEQ ID NO: 10784 - RNA, 20 nt, synthetic construct
  misc_feature 1..20: note = antisense sequence
  source 1..20: mol_type = other RNA
cttggatgaccttcttcagt

SEQ ID NO: 10785 - RNA, 20 nt, synthetic construct
  misc_feature 1..20: note = antisense sequence
  source 1..20: mol_type = other RNA
tcttggatgaccttcttcag

SEQ ID NO: 10786 - RNA, 20 nt, synthetic construct
  misc_feature 1..20: note = antisense sequence
  source 1..20: mol_type = other RNA
acagtcttggatgaccttct

SEQ ID NO: 10787 - RNA, 20 nt, synthetic construct
  misc_feature 1..20: note = antisense sequence
  source 1..20: mol_type = other RNA
tcacagtcttggatgacctt

SEQ ID NO: 10788 - RNA, 20 nt, synthetic construct
  misc_feature 1..20: note = antisense sequence
  source 1..20: mol_type = other RNA
ctatggaaaaccgttgaatg

SEQ ID NO: 10789 - RNA, 20 nt, synthetic construct
  misc_feature 1..20: note = antisense sequence
  source 1..20: mol_type = other RNA
gctatggaaaaccgttgaat

SEQ ID NO: 10790 - RNA, 20 nt, synthetic construct
  misc_feature 1..20: note = antisense sequence
  source 1..20: mol_type = other RNA
agctatggaaaaccgttgaa

SEQ ID NO: 10791 - RNA, 20 nt, synthetic construct
  misc_feature 1..20: note = antisense sequence
  source 1..20: mol_type = other RNA
cagctatggaaaaccgttga

SEQ ID NO: 10792 - RNA, 20 nt, synthetic construct
  misc_feature 1..20: note = antisense sequence
  source 1..20: mol_type = other RNA
acagctatggaaaaccgttg

SEQ ID NO: 10793 - RNA, 20 nt, synthetic construct
  misc_feature 1..20: note = antisense sequence
  source 1..20: mol_type = other RNA
cacttacagctatggaaaac

SEQ ID NO: 10794 - RNA, 20 nt, synthetic construct
  misc_feature 1..20: note = antisense sequence
  source 1..20: mol_type = other RNA
acacacttacagctatggaa

SEQ ID NO: 10795 - RNA, 20 nt, synthetic construct
  misc_feature 1..20: note = antisense sequence
  source 1..20: mol_type = other RNA
aacacacttacagctatgga

SEQ ID NO: 10796 - RNA, 20 nt, synthetic construct
  misc_feature 1..20: note = antisense sequence
  source 1..20: mol_type = other RNA
caacacacttacagctatgg

SEQ ID NO: 10797 - RNA, 20 nt, synthetic construct
  misc_feature 1..20: note = antisense sequence
  source 1..20: mol_type = other RNA
gcaacacacttacagctatg

SEQ ID NO: 10798 - RNA, 20 nt, synthetic construct
  misc_feature 1..20: note = antisense sequence
  source 1..20: mol_type = other RNA
cggcaacacacttacagcta

SEQ ID NO: 10799 - RNA, 20 nt, synthetic construct
  misc_feature 1..20: note = antisense sequence
  source 1..20: mol_type = other RNA
tccggcaacacacttacagc

SEQ ID NO: 10800 - RNA, 20 nt, synthetic construct
  misc_feature 1..20: note = antisense sequence
  source 1..20: mol_type = other RNA
ctccggcaacacacttacag

SEQ ID NO: 10801 - RNA, 20 nt, synthetic construct
  misc_feature 1..20: note = antisense sequence
  source 1..20: mol_type = other RNA
tctccggcaacacacttaca

SEQ ID NO: 10802 - RNA, 20 nt, synthetic construct
  misc_feature 1..20: note = antisense sequence
  source 1..20: mol_type = other RNA
atctccggcaacacacttac

SEQ ID NO: 10803 - RNA, 20 nt, synthetic construct
  misc_feature 1..20: note = antisense sequence
  source 1..20: mol_type = other RNA
tatctccggcaacacactta

SEQ ID NO: 10804 - RNA, 20 nt, synthetic construct
  misc_feature 1..20: note = antisense sequence
  source 1..20: mol_type = other RNA
atatctccggcaacacactt

SEQ ID NO: 10805 - RNA, 20 nt, synthetic construct
  misc_feature 1..20: note = antisense sequence
  source 1..20: mol_type = other RNA
aatatctccggcaacacact

SEQ ID NO: 10806 - RNA, 20 nt, synthetic construct
  misc_feature 1..20: note = antisense sequence
  source 1..20: mol_type = other RNA
aaatatctccggcaacacac

SEQ ID NO: 10807 - RNA, 20 nt, synthetic construct
  misc_feature 1..20: note = antisense sequence
  source 1..20: mol_type = other RNA
aaaatatctccggcaacaca

SEQ ID NO: 10808 - RNA, 20 nt, synthetic construct
  misc_feature 1..20: note = antisense sequence
  source 1..20: mol_type = other RNA
gaaaatatctccggcaacac

SEQ ID NO: 10809 - RNA, 20 nt, synthetic construct
  misc_feature 1..20: note = antisense sequence
  source 1..20: mol_type = other RNA
tgaaaatatctccggcaaca

SEQ ID NO: 10810 - RNA, 20 nt, synthetic construct
  misc_feature 1..20: note = antisense sequence
  source 1..20: mol_type = other RNA
ttgaaaatatctccggcaac

SEQ ID NO: 10811 - RNA, 20 nt, synthetic construct
  misc_feature 1..20: note = antisense sequence
  source 1..20: mol_type = other RNA
gtttgaaaatatctccggca

SEQ ID NO: 10812 - RNA, 20 nt, synthetic construct
  misc_feature 1..20: note = antisense sequence
  source 1..20: mol_type = other RNA
gagtttgaaaatatctccgg

SEQ ID NO: 10813 - RNA, 20 nt, synthetic construct
  misc_feature 1..20: note = antisense sequence
  source 1..20: mol_type = other RNA
agctcttctctacacctaag

SEQ ID NO: 10814 - RNA, 20 nt, synthetic construct
  misc_feature 1..20: note = antisense sequence
  source 1..20: mol_type = other RNA
cagctcttctctacacctaa

SEQ ID NO: 10815 - RNA, 20 nt, synthetic construct
  misc_feature 1..20: note = antisense sequence
  source 1..20: mol_type = other RNA
acagctcttctctacaccta

SEQ ID NO: 10816 - RNA, 20 nt, synthetic construct
  misc_feature 1..20: note = antisense sequence
  source 1..20: mol_type = other RNA
atgcacacagctcttctcta

SEQ ID NO: 10817 - RNA, 20 nt, synthetic construct
  misc_feature 1..20: note = antisense sequence
  source 1..20: mol_type = other RNA
atatgcacacagctcttctc

SEQ ID NO: 10818 - RNA, 20 nt, synthetic construct
  misc_feature 1..20: note = antisense sequence
  source 1..20: mol_type = other RNA
aatatgcacacagctcttct

SEQ ID NO: 10819 - RNA, 20 nt, synthetic construct
  misc_feature 1..20: note = antisense sequence
  source 1..20: mol_type = other RNA
caatatgcacacagctcttc

SEQ ID NO: 10820 - RNA, 20 nt, synthetic construct
  misc_feature 1..20: note = antisense sequence
  source 1..20: mol_type = other RNA
ccaatatgcacacagctctt

SEQ ID NO: 10821 - RNA, 20 nt, synthetic construct
  misc_feature 1..20: note = antisense sequence
  source 1..20: mol_type = other RNA
attacccaatatgcacacag

SEQ ID NO: 10822 - RNA, 20 nt, synthetic construct
  misc_feature 1..20: note = antisense sequence
  source 1..20: mol_type = other RNA
ctggtttgtgtgactttcat

SEQ ID NO: 10823 - RNA, 20 nt, synthetic construct
  misc_feature 1..20: note = antisense sequence
  source 1..20: mol_type = other RNA
ccaacctggtttgtgtgact

SEQ ID NO: 10824 - RNA, 20 nt, synthetic construct
  misc_feature 1..20: note = antisense sequence
  source 1..20: mol_type = other RNA
tccaacctggtttgtgtgac

SEQ ID NO: 10825 - RNA, 20 nt, synthetic construct
  misc_feature 1..20: note = antisense sequence
  source 1..20: mol_type = other RNA
ttccaacctggtttgtgtga

SEQ ID NO: 10826 - RNA, 20 nt, synthetic construct
  misc_feature 1..20: note = antisense sequence
  source 1..20: mol_type = other RNA
tttccaacctggtttgtgtg

SEQ ID NO: 10827 - RNA, 20 nt, synthetic construct
  misc_feature 1..20: note = antisense sequence
  source 1..20: mol_type = other RNA
tcttttccaacctggtttgt

SEQ ID NO: 10828 - RNA, 20 nt, synthetic construct
  misc_feature 1..20: note = antisense sequence
  source 1..20: mol_type = other RNA
ctttctcttttccaacctgg

SEQ ID NO: 10829 - RNA, 20 nt, synthetic construct
  misc_feature 1..20: note = antisense sequence
  source 1..20: mol_type = other RNA
cttcaaatggagacctttct

SEQ ID NO: 10830 - RNA, 20 nt, synthetic construct
  misc_feature 1..20: note = antisense sequence
  source 1..20: mol_type = other RNA
accttcaaatggagaccttt

SEQ ID NO: 10831 - RNA, 20 nt, synthetic construct
  misc_feature 1..20: note = antisense sequence
  source 1..20: mol_type = other RNA
gcttaccttcaaatggagac

SEQ ID NO: 10832 - RNA, 20 nt, synthetic construct
  misc_feature 1..20: note = antisense sequence
  source 1..20: mol_type = other RNA
ggcttaccttcaaatggaga

SEQ ID NO: 10833 - RNA, 20 nt, synthetic construct
  misc_feature 1..20: note = antisense sequence
  source 1..20: mol_type = other RNA
gggcttaccttcaaatggag

SEQ ID NO: 10834 - RNA, 20 nt, synthetic construct
  misc_feature 1..20: note = antisense sequence
  source 1..20: mol_type = other RNA
cagggcttaccttcaaatgg

SEQ ID NO: 10835 - RNA, 20 nt, synthetic construct
  misc_feature 1..20: note = antisense sequence
  source 1..20: mol_type = other RNA
ccagggcttaccttcaaatg

SEQ ID NO: 10836 - RNA, 20 nt, synthetic construct
  misc_feature 1..20: note = antisense sequence
  source 1..20: mol_type = other RNA
cccagggcttaccttcaaat

SEQ ID NO: 10837 - RNA, 20 nt, synthetic construct
  misc_feature 1..20: note = antisense sequence
  source 1..20: mol_type = other RNA
tcccagggcttaccttcaaa

SEQ ID NO: 10838 - RNA, 20 nt, synthetic construct
  misc_feature 1..20: note = antisense sequence
  source 1..20: mol_type = other RNA
ctcccagggcttaccttcaa

SEQ ID NO: 10839 - RNA, 20 nt, synthetic construct
  misc_feature 1..20: note = antisense sequence
  source 1..20: mol_type = other RNA
cctcccagggcttaccttca

SEQ ID NO: 10840 - RNA, 20 nt, synthetic construct
  misc_feature 1..20: note = antisense sequence
  source 1..20: mol_type = other RNA
gtctgtcctcccagggctta

SEQ ID NO: 10841 - RNA, 20 nt, synthetic construct
  misc_feature 1..20: note = antisense sequence
  source 1..20: mol_type = other RNA
agtctgtcctcccagggctt

SEQ ID NO: 10842 - RNA, 20 nt, synthetic construct
  misc_feature 1..20: note = antisense sequence
  source 1..20: mol_type = other RNA
atccaagtctgtcctcccag

SEQ ID NO: 10843 - RNA, 20 nt, synthetic construct
  misc_feature 1..20: note = antisense sequence
  source 1..20: mol_type = other RNA
gatccaagtctgtcctccca

SEQ ID NO: 10844 - RNA, 20 nt, synthetic construct
  misc_feature 1..20: note = antisense sequence
  source 1..20: mol_type = other RNA
agatccaagtctgtcctccc

SEQ ID NO: 10845 - RNA, 20 nt, synthetic construct
  misc_feature 1..20: note = antisense sequence
  source 1..20: mol_type = other RNA
caagatccaagtctgtcctc

SEQ ID NO: 10846 - RNA, 20 nt, synthetic construct
  misc_feature 1..20: note = antisense sequence
  source 1..20: mol_type = other RNA
gcaagatccaagtctgtcct

SEQ ID NO: 10847 - RNA, 20 nt, synthetic construct
  misc_feature 1..20: note = antisense sequence
  source 1..20: mol_type = other RNA
gagcaagatccaagtctgtc

SEQ ID NO: 10848 - RNA, 20 nt, synthetic construct
  misc_feature 1..20: note = antisense sequence
  source 1..20: mol_type = other RNA
ggagcaagatccaagtctgt

SEQ ID NO: 10849 - RNA, 20 nt, synthetic construct
  misc_feature 1..20: note = antisense sequence
  source 1..20: mol_type = other RNA
gggagcaagatccaagtctg

SEQ ID NO: 10850 - RNA, 20 nt, synthetic construct
  misc_feature 1..20: note = antisense sequence
  source 1..20: mol_type = other RNA
agggagcaagatccaagtct

SEQ ID NO: 10851 - RNA, 20 nt, synthetic construct
  misc_feature 1..20: note = antisense sequence
  source 1..20: mol_type = other RNA
gagggagcaagatccaagtc

SEQ ID NO: 10852 - RNA, 20 nt, synthetic construct
  misc_feature 1..20: note = antisense sequence
  source 1..20: mol_type = other RNA
cagagggagcaagatccaag

SEQ ID NO: 10853 - RNA, 20 nt, synthetic construct
  misc_feature 1..20: note = antisense sequence
  source 1..20: mol_type = other RNA
acccagagggagcaagatcc

SEQ ID NO: 10854 - RNA, 20 nt, synthetic construct
  misc_feature 1..20: note = antisense sequence
  source 1..20: mol_type = other RNA
gacccagagggagcaagatc

SEQ ID NO: 10855 - RNA, 20 nt, synthetic construct
  misc_feature 1..20: note = antisense sequence
  source 1..20: mol_type = other RNA
taaggacccagagggagcaa

SEQ ID NO: 10856 - RNA, 20 nt, synthetic construct
  misc_feature 1..20: note = antisense sequence
  source 1..20: mol_type = other RNA
gtactaaggacccagaggga

SEQ ID NO: 10857 - RNA, 20 nt, synthetic construct
  misc_feature 1..20: note = antisense sequence
  source 1..20: mol_type = other RNA
ggtactaaggacccagaggg

SEQ ID NO: 10858 - RNA, 20 nt, synthetic construct
  misc_feature 1..20: note = antisense sequence
  source 1..20: mol_type = other RNA
tgtgctgggtactaaggacc

SEQ ID NO: 10859 - RNA, 20 nt, synthetic construct
  misc_feature 1..20: note = antisense sequence
  source 1..20: mol_type = other RNA
ttgtgctgggtactaaggac

SEQ ID NO: 10860 - RNA, 20 nt, synthetic construct
  misc_feature 1..20: note = antisense sequence
  source 1..20: mol_type = other RNA
attgtgctgggtactaagga

SEQ ID NO: 10861 - RNA, 20 nt, synthetic construct
  misc_feature 1..20: note = antisense sequence
  source 1..20: mol_type = other RNA
tggcattgtgctgggtacta

SEQ ID NO: 10862 - RNA, 20 nt, synthetic construct
  misc_feature 1..20: note = antisense sequence
  source 1..20: mol_type = other RNA
gtttggcctggcattgtgct

SEQ ID NO: 10863 - RNA, 20 nt, synthetic construct
  misc_feature 1..20: note = antisense sequence
  source 1..20: mol_type = other RNA
tgtttggcctggcattgtgc

SEQ ID NO: 10864 - RNA, 20 nt, synthetic construct
  misc_feature 1..20: note = antisense sequence
  source 1..20: mol_type = other RNA
gtctgtttggcctggcattg

SEQ ID NO: 10865 - RNA, 20 nt, synthetic construct
  misc_feature 1..20: note = antisense sequence
  source 1..20: mol_type = other RNA
tgtctgtttggcctggcatt

SEQ ID NO: 10866 - RNA, 20 nt, synthetic construct
  misc_feature 1..20: note = antisense sequence
  source 1..20: mol_type = other RNA
gtgtctgtttggcctggcat

SEQ ID NO: 10867 - RNA, 20 nt, synthetic construct
  misc_feature 1..20: note = antisense sequence
  source 1..20: mol_type = other RNA
agtgtctgtttggcctggca

SEQ ID NO: 10868 - RNA, 20 nt, synthetic construct
  misc_feature 1..20: note = antisense sequence
  source 1..20: mol_type = other RNA
gagtgtctgtttggcctggc

SEQ ID NO: 10869 - RNA, 20 nt, synthetic construct
  misc_feature 1..20: note = antisense sequence
  source 1..20: mol_type = other RNA
tgagtgtctgtttggcctgg

SEQ ID NO: 10870 - RNA, 20 nt, synthetic construct
  misc_feature 1..20: note = antisense sequence
  source 1..20: mol_type = other RNA
ccttccttcctttcaatgat

SEQ ID NO: 10871 - RNA, 20 nt, synthetic construct
  misc_feature 1..20: note = antisense sequence
  source 1..20: mol_type = other RNA
ttccttccttcctttcaatg

SEQ ID NO: 10872 - RNA, 20 nt, synthetic construct
  misc_feature 1..20: note = antisense sequence
  source 1..20: mol_type = other RNA
cttccttccttcctttcaat

SEQ ID NO: 10873 - RNA, 20 nt, synthetic construct
  misc_feature 1..20: note = antisense sequence
  source 1..20: mol_type = other RNA
ccttccttccttcctttcaa

SEQ ID NO: 10874 - RNA, 20 nt, synthetic construct
  misc_feature 1..20: note = antisense sequence
  source 1..20: mol_type = other RNA
tccttccttccttcctttca

SEQ ID NO: 10875 - RNA, 20 nt, synthetic construct
  misc_feature 1..20: note = antisense sequence
  source 1..20: mol_type = other RNA
ttccttccttccttcctttc

SEQ ID NO: 10876 - RNA, 20 nt, synthetic construct
  misc_feature 1..20: note = antisense sequence
  source 1..20: mol_type = other RNA
cttccttccttccttccttt

SEQ ID NO: 10877 - RNA, 20 nt, synthetic construct
  misc_feature 1..20: note = antisense sequence
  source 1..20: mol_type = other RNA
tcttccttccttccttcctt

SEQ ID NO: 10878 - RNA, 20 nt, synthetic construct
  misc_feature 1..20: note = antisense sequence
  source 1..20: mol_type = other RNA
ttcttccttccttccttcct

SEQ ID NO: 10879 - RNA, 20 nt, synthetic construct
  misc_feature 1..20: note = antisense sequence
  source 1..20: mol_type = other RNA
tttcttccttccttccttcc

SEQ ID NO: 10880 - RNA, 20 nt, synthetic construct
  misc_feature 1..20: note = antisense sequence
  source 1..20: mol_type = other RNA
ttttcttccttccttccttc

SEQ ID NO: 10881 - RNA, 20 nt, synthetic construct
  misc_feature 1..20: note = antisense sequence
  source 1..20: mol_type = other RNA
cttcctcttttcatgtttcc

SEQ ID NO: 10882 - RNA, 20 nt, synthetic construct
  misc_feature 1..20: note = antisense sequence
  source 1..20: mol_type = other RNA
ccttcttcctcttttcatgt

SEQ ID NO: 10883 - RNA, 20 nt, synthetic construct
  misc_feature 1..20: note = antisense sequence
  source 1..20: mol_type = other RNA
cccttccttccttcttatgt

SEQ ID NO: 10884 - RNA, 20 nt, synthetic construct
  misc_feature 1..20: note = antisense sequence
  source 1..20: mol_type = other RNA
acccttccttccttcttatg

SEQ ID NO: 10885 - RNA, 20 nt, synthetic construct
  misc_feature 1..20: note = antisense sequence
  source 1..20: mol_type = other RNA
cacccttccttccttcttat

SEQ ID NO: 10886 - RNA, 20 nt, synthetic construct
  misc_feature 1..20: note = antisense sequence
  source 1..20: mol_type = other RNA
tcacccttccttccttctta

SEQ ID NO: 10887 - RNA, 20 nt, synthetic construct
  misc_feature 1..20: note = antisense sequence
  source 1..20: mol_type = other RNA
tttctcacccttccttcctt

SEQ ID NO: 10888 - RNA, 20 nt, synthetic construct
  misc_feature 1..20: note = antisense sequence
  source 1..20: mol_type = other RNA
tcgaaaattgctcagacggg

SEQ ID NO: 10889 - RNA, 20 nt, synthetic construct
  misc_feature 1..20: note = antisense sequence
  source 1..20: mol_type = other RNA
gtcgaaaattgctcagacgg

SEQ ID NO: 10890 - RNA, 20 nt, synthetic construct
  misc_feature 1..20: note = antisense sequence
  source 1..20: mol_type = other RNA
agtcgaaaattgctcagacg

SEQ ID NO: 10891 - RNA, 20 nt, synthetic construct
  misc_feature 1..20: note = antisense sequence
  source 1..20: mol_type = other RNA
acagagacaactggcacttt

SEQ ID NO: 10892 - RNA, 20 nt, synthetic construct
  misc_feature 1..20: note = antisense sequence
  source 1..20: mol_type = other RNA
aacagagacaactggcactt

SEQ ID NO: 10893 - RNA, 20 nt, synthetic construct
  misc_feature 1..20: note = antisense sequence
  source 1..20: mol_type = other RNA
gtcaaacgtcagaagttgtt

SEQ ID NO: 10894 - RNA, 20 nt, synthetic construct
  misc_feature 1..20: note = antisense sequence
  source 1..20: mol_type = other RNA
tgtcaaacgtcagaagttgt

SEQ ID NO: 10895 - RNA, 20 nt, synthetic construct
  misc_feature 1..20: note = antisense sequence
  source 1..20: mol_type = other RNA
agtgtcaaacgtcagaagtt

SEQ ID NO: 10896 - RNA, 20 nt, synthetic construct
  misc_feature 1..20: note = antisense sequence
  source 1..20: mol_type = other RNA
aagtgtcaaacgtcagaagt

SEQ ID NO: 10897 - RNA, 20 nt, synthetic construct
  misc_feature 1..20: note = antisense sequence
  source 1..20: mol_type = other RNA
caagtgtcaaacgtcagaag

SEQ ID NO: 10898 - RNA, 20 nt, synthetic construct
  misc_feature 1..20: note = antisense sequence
  source 1..20: mol_type = other RNA
gcaagtgtcaaacgtcagaa

SEQ ID NO: 10899 - RNA, 20 nt, synthetic construct
  misc_feature 1..20: note = antisense sequence
  source 1..20: mol_type = other RNA
agcaagtgtcaaacgtcaga

SEQ ID NO: 10900 - RNA, 20 nt, synthetic construct
  misc_feature 1..20: note = antisense sequence
  source 1..20: mol_type = other RNA
aagcaagtgtcaaacgtcag

SEQ ID NO: 10901 - RNA, 20 nt, synthetic construct
  misc_feature 1..20: note = antisense sequence
  source 1..20: mol_type = other RNA
aaagcaagtgtcaaacgtca

SEQ ID NO: 10902 - RNA, 20 nt, synthetic construct
  misc_feature 1..20: note = antisense sequence
  source 1..20: mol_type = other RNA
ctgaaaagcaagtgtcaaac

SEQ ID NO: 10903 - RNA, 20 nt, synthetic construct
  misc_feature 1..20: note = antisense sequence
  source 1..20: mol_type = other RNA
tcgctgaaaagcaagtgtca

SEQ ID NO: 10904 - RNA, 20 nt, synthetic construct
  misc_feature 1..20: note = antisense sequence
  source 1..20: mol_type = other RNA
ctacttcgctgaaaagcaag

SEQ ID NO: 10905 - RNA, 20 nt, synthetic construct
  misc_feature 1..20: note = antisense sequence
  source 1..20: mol_type = other RNA
tctacttcgctgaaaagcaa

SEQ ID NO: 10906 - RNA, 20 nt, synthetic construct
  misc_feature 1..20: note = antisense sequence
  source 1..20: mol_type = other RNA
gtctacttcgctgaaaagca

SEQ ID NO: 10907 - RNA, 20 nt, synthetic construct
  misc_feature 1..20: note = antisense sequence
  source 1..20: mol_type = other RNA
tgtctacttcgctgaaaagc

SEQ ID NO: 10908 - RNA, 20 nt, synthetic construct
  misc_feature 1..20: note = antisense sequence
  source 1..20: mol_type = other RNA
ctgtctacttcgctgaaaag

SEQ ID NO: 10909 - RNA, 20 nt, synthetic construct
  misc_feature 1..20: note = antisense sequence
  source 1..20: mol_type = other RNA
cctgtctacttcgctgaaaa

SEQ ID NO: 10910 - RNA, 20 nt, synthetic construct
  misc_feature 1..20: note = antisense sequence
  source 1..20: mol_type = other RNA
tcctgtctacttcgctgaaa

SEQ ID NO: 10911 - RNA, 20 nt, synthetic construct
  misc_feature 1..20: note = antisense sequence
  source 1..20: mol_type = other RNA
ttcctgtctacttcgctgaa

SEQ ID NO: 10912 - RNA, 20 nt, synthetic construct
  misc_feature 1..20: note = antisense sequence
  source 1..20: mol_type = other RNA
attcctgtctacttcgctga

SEQ ID NO: 10913 - RNA, 20 nt, synthetic construct
  misc_feature 1..20: note = antisense sequence
  source 1..20: mol_type = other RNA
aattcctgtctacttcgctg

SEQ ID NO: 10914 - RNA, 20 nt, synthetic construct
  misc_feature 1..20: note = antisense sequence
  source 1..20: mol_type = other RNA
caattcctgtctacttcgct

SEQ ID NO: 10915 - RNA, 20 nt, synthetic construct
  misc_feature 1..20: note = antisense sequence
  source 1..20: mol_type = other RNA
tcaattcctgtctacttcgc

SEQ ID NO: 10916 - RNA, 20 nt, synthetic construct
  misc_feature 1..20: note = antisense sequence
  source 1..20: mol_type = other RNA
ttcaattcctgtctacttcg

SEQ ID NO: 10917 - RNA, 20 nt, synthetic construct
  misc_feature 1..20: note = antisense sequence
  source 1..20: mol_type = other RNA
aaaggtctataccaggagct

SEQ ID NO: 10918 - RNA, 20 nt, synthetic construct
  misc_feature 1..20: note = antisense sequence
  source 1..20: mol_type = other RNA
gaaaggtctataccaggagc

SEQ ID NO: 10919 - RNA, 20 nt, synthetic construct
  misc_feature 1..20: note = antisense sequence
  source 1..20: mol_type = other RNA
cgaaaggtctataccaggag

SEQ ID NO: 10920 - RNA, 20 nt, synthetic construct
  misc_feature 1..20: note = antisense sequence
  source 1..20: mol_type = other RNA
tcgaaaggtctataccagga

SEQ ID NO: 10921 - RNA, 20 nt, synthetic construct
  misc_feature 1..20: note = antisense sequence
  source 1..20: mol_type = other RNA
gtcgaaaggtctataccagg

SEQ ID NO: 10922 - RNA, 20 nt, synthetic construct
  misc_feature 1..20: note = antisense sequence
  source 1..20: mol_type = other RNA
ggtcgaaaggtctataccag

SEQ ID NO: 10923 - RNA, 20 nt, synthetic construct
  misc_feature 1..20: note = antisense sequence
  source 1..20: mol_type = other RNA
aggtcgaaaggtctatacca

SEQ ID NO: 10924 - RNA, 20 nt, synthetic construct
  misc_feature 1..20: note = antisense sequence
  source 1..20: mol_type = other RNA
taggtcgaaaggtctatacc

SEQ ID NO: 10925 - RNA, 20 nt, synthetic construct
  misc_feature 1..20: note = antisense sequence
  source 1..20: mol_type = other RNA
ttaggtcgaaaggtctatac

SEQ ID NO: 10926 - RNA, 20 nt, synthetic construct
  misc_feature 1..20: note = antisense sequence
  source 1..20: mol_type = other RNA
cattttaggtcgaaaggtct

SEQ ID NO: 10927 - RNA, 20 nt, synthetic construct
  misc_feature 1..20: note = antisense sequence
  source 1..20: mol_type = other RNA
ctacattttaggtcgaaagg

SEQ ID NO: 10928 - RNA, 20 nt, synthetic construct
  misc_feature 1..20: note = antisense sequence
  source 1..20: mol_type = other RNA
cacactgttaaaactagagc

SEQ ID NO: 10929 - RNA, 20 nt, synthetic construct
  misc_feature 1..20: note = antisense sequence
  source 1..20: mol_type = other RNA
gcacactgttaaaactagag

SEQ ID NO: 10930 - RNA, 20 nt, synthetic construct
  misc_feature 1..20: note = antisense sequence
  source 1..20: mol_type = other RNA
atgcactaatgtctgagaag

SEQ ID NO: 10931 - RNA, 20 nt, synthetic construct
  misc_feature 1..20: note = antisense sequence
  source 1..20: mol_type = other RNA
gtaatgcactaatgtctgag

SEQ ID NO: 10932 - RNA, 20 nt, synthetic construct
  misc_feature 1..20: note = antisense sequence
  source 1..20: mol_type = other RNA
gagtaatgcactaatgtctg

SEQ ID NO: 10933 - RNA, 20 nt, synthetic construct
  misc_feature 1..20: note = antisense sequence
  source 1..20: mol_type = other RNA
ggagtaatgcactaatgtct

SEQ ID NO: 10934 - RNA, 20 nt, synthetic construct
  misc_feature 1..20: note = antisense sequence
  source 1..20: mol_type = other RNA
aggagtaatgcactaatgtc

SEQ ID NO: 10935 - RNA, 20 nt, synthetic construct
  misc_feature 1..20: note = antisense sequence
  source 1..20: mol_type = other RNA
caggagtaatgcactaatgt

SEQ ID NO: 10936 - RNA, 20 nt, synthetic construct
  misc_feature 1..20: note = antisense sequence
  source 1..20: mol_type = other RNA
acaggagtaatgcactaatg

SEQ ID NO: 10937 - RNA, 20 nt, synthetic construct
  misc_feature 1..20: note = antisense sequence
  source 1..20: mol_type = other RNA
gaataatgaggttacaggag

SEQ ID NO: 10938 - RNA, 20 nt, synthetic construct
  misc_feature 1..20: note = antisense sequence
  source 1..20: mol_type = other RNA
aggaataatgaggttacagg

SEQ ID NO: 10939 - RNA, 20 nt, synthetic construct
  misc_feature 1..20: note = antisense sequence
  source 1..20: mol_type = other RNA
ctcacctgctgttccatgaa

SEQ ID NO: 10940 - RNA, 20 nt, synthetic construct
  misc_feature 1..20: note = antisense sequence
  source 1..20: mol_type = other RNA
cctcacctgctgttccatga

SEQ ID NO: 10941 - RNA, 20 nt, synthetic construct
  misc_feature 1..20: note = antisense sequence
  source 1..20: mol_type = other RNA
ctctttctcagctccctcac

SEQ ID NO: 10942 - RNA, 20 nt, synthetic construct
  misc_feature 1..20: note = antisense sequence
  source 1..20: mol_type = other RNA
tgggtgcccttgcctctttc

SEQ ID NO: 10943 - RNA, 20 nt, synthetic construct
  misc_feature 1..20: note = antisense sequence
  source 1..20: mol_type = other RNA
ctgggtgcccttgcctcttt

SEQ ID NO: 10944 - RNA, 20 nt, synthetic construct
  misc_feature 1..20: note = antisense sequence
  source 1..20: mol_type = other RNA
gactttaagccactttgccc

SEQ ID NO: 10945 - RNA, 20 nt, synthetic construct
  misc_feature 1..20: note = antisense sequence
  source 1..20: mol_type = other RNA
ggactttaagccactttgcc

SEQ ID NO: 10946 - RNA, 20 nt, synthetic construct
  misc_feature 1..20: note = antisense sequence
  source 1..20: mol_type = other RNA
aggactttaagccactttgc

SEQ ID NO: 10947 - RNA, 20 nt, synthetic construct
  misc_feature 1..20: note = antisense sequence
  source 1..20: mol_type = other RNA
gaggactttaagccactttg

SEQ ID NO: 10948 - RNA, 20 nt, synthetic construct
  misc_feature 1..20: note = antisense sequence
  source 1..20: mol_type = other RNA
cagaggactttaagccactt

SEQ ID NO: 10949 - RNA, 20 nt, synthetic construct
  misc_feature 1..20: note = antisense sequence
  source 1..20: mol_type = other RNA
tcagaggactttaagccact

SEQ ID NO: 10950 - RNA, 20 nt, synthetic construct
  misc_feature 1..20: note = antisense sequence
  source 1..20: mol_type = other RNA
atcagaggactttaagccac

SEQ ID NO: 10951 - RNA, 20 nt, synthetic construct
  misc_feature 1..20: note = antisense sequence
  source 1..20: mol_type = other RNA
tcatcagaggactttaagcc

SEQ ID NO: 10952 - RNA, 20 nt, synthetic construct
  misc_feature 1..20: note = antisense sequence
  source 1..20: mol_type = other RNA
ctcatcagaggactttaagc

SEQ ID NO: 10953 - RNA, 20 nt, synthetic construct
  misc_feature 1..20: note = antisense sequence
  source 1..20: mol_type = other RNA
tctcatcagaggactttaag

SEQ ID NO: 10954 - RNA, 20 nt, synthetic construct
  misc_feature 1..20: note = antisense sequence
  source 1..20: mol_type = other RNA
gtctcatcagaggactttaa

SEQ ID NO: 10955 - RNA, 20 nt, synthetic construct
  misc_feature 1..20: note = antisense sequence
  source 1..20: mol_type = other RNA
cgtctcatcagaggacttta

SEQ ID NO: 10956 - RNA, 20 nt, synthetic construct
  misc_feature 1..20: note = antisense sequence
  source 1..20: mol_type = other RNA
cacgtctcatcagaggactt

SEQ ID NO: 10957 - RNA, 20 nt, synthetic construct
  misc_feature 1..20: note = antisense sequence
  source 1..20: mol_type = other RNA
acacgtctcatcagaggact

SEQ ID NO: 10958 - RNA, 20 nt, synthetic construct
  misc_feature 1..20: note = antisense sequence
  source 1..20: mol_type = other RNA
cacacgtctcatcagaggac

SEQ ID NO: 10959 - RNA, 20 nt, synthetic construct
  misc_feature 1..20: note = antisense sequence
  source 1..20: mol_type = other RNA
ccacacgtctcatcagagga

SEQ ID NO: 10960 - RNA, 20 nt, synthetic construct
  misc_feature 1..20: note = antisense sequence
  source 1..20: mol_type = other RNA
accacacgtctcatcagagg

SEQ ID NO: 10961 - RNA, 20 nt, synthetic construct
  misc_feature 1..20: note = antisense sequence
  source 1..20: mol_type = other RNA
taccacacgtctcatcagag

SEQ ID NO: 10962 - RNA, 20 nt, synthetic construct
  misc_feature 1..20: note = antisense sequence
  source 1..20: mol_type = other RNA
ataccacacgtctcatcaga

SEQ ID NO: 10963 - RNA, 20 nt, synthetic construct
  misc_feature 1..20: note = antisense sequence
  source 1..20: mol_type = other RNA
aataccacacgtctcatcag

SEQ ID NO: 10964 - RNA, 20 nt, synthetic construct
  misc_feature 1..20: note = antisense sequence
  source 1..20: mol_type = other RNA
aaataccacacgtctcatca

SEQ ID NO: 10965 - RNA, 20 nt, synthetic construct
  misc_feature 1..20: note = antisense sequence
  source 1..20: mol_type = other RNA
gaaataccacacgtctcatc

SEQ ID NO: 10966 - RNA, 20 nt, synthetic construct
  misc_feature 1..20: note = antisense sequence
  source 1..20: mol_type = other RNA
ggaaataccacacgtctcat

SEQ ID NO: 10967 - RNA, 20 nt, synthetic construct
  misc_feature 1..20: note = antisense sequence
  source 1..20: mol_type = other RNA
aggaaataccacacgtctca

SEQ ID NO: 10968 - RNA, 20 nt, synthetic construct
  misc_feature 1..20: note = antisense sequence
  source 1..20: mol_type = other RNA
gaggaaataccacacgtctc

SEQ ID NO: 10969 - RNA, 20 nt, synthetic construct
  misc_feature 1..20: note = antisense sequence
  source 1..20: mol_type = other RNA
agaggaaataccacacgtct

SEQ ID NO: 10970 - RNA, 20 nt, synthetic construct
  misc_feature 1..20: note = antisense sequence
  source 1..20: mol_type = other RNA
cagaggaaataccacacgtc

SEQ ID NO: 10971 - RNA, 20 nt, synthetic construct
  misc_feature 1..20: note = antisense sequence
  source 1..20: mol_type = other RNA
ccagaggaaataccacacgt

SEQ ID NO: 10972 - RNA, 20 nt, synthetic construct
  misc_feature 1..20: note = antisense sequence
  source 1..20: mol_type = other RNA
cccagaggaaataccacacg

SEQ ID NO: 10973 - RNA, 20 nt, synthetic construct
  misc_feature 1..20: note = antisense sequence
  source 1..20: mol_type = other RNA
gaccatcccagaggaaatac

SEQ ID NO: 10974 - RNA, 20 nt, synthetic construct
  misc_feature 1..20: note = antisense sequence
  source 1..20: mol_type = other RNA
tgaccatcccagaggaaata

SEQ ID NO: 10975 - RNA, 20 nt, synthetic construct
  misc_feature 1..20: note = antisense sequence
  source 1..20: mol_type = other RNA
gtgaccatcccagaggaaat

SEQ ID NO: 10976 - RNA, 20 nt, synthetic construct
  misc_feature 1..20: note = antisense sequence
  source 1..20: mol_type = other RNA
agtatcagtgaccatcccag

SEQ ID NO: 10977 - RNA, 20 nt, synthetic construct
  misc_feature 1..20: note = antisense sequence
  source 1..20: mol_type = other RNA
gggagtatcagtgaccatcc

SEQ ID NO: 10978 - RNA, 20 nt, synthetic construct
  misc_feature 1..20: note = antisense sequence
  source 1..20: mol_type = other RNA
gaatgttccttactagagag

SEQ ID NO: 10979 - RNA, 20 nt, synthetic construct
  misc_feature 1..20: note = antisense sequence
  source 1..20: mol_type = other RNA
tgcagtggcttttgaatgtt

SEQ ID NO: 10980 - RNA, 20 nt, synthetic construct
  misc_feature 1..20: note = antisense sequence
  source 1..20: mol_type = other RNA
cagtgcagtggcttttgaat

SEQ ID NO: 10981 - RNA, 20 nt, synthetic construct
  misc_feature 1..20: note = antisense sequence
  source 1..20: mol_type = other RNA
ggcagtgcagtggcttttga

SEQ ID NO: 10982 - RNA, 20 nt, synthetic construct
  misc_feature 1..20: note = antisense sequence
  source 1..20: mol_type = other RNA
aggcagtgcagtggcttttg

SEQ ID NO: 10983 - RNA, 20 nt, synthetic construct
  misc_feature 1..20: note = antisense sequence
  source 1..20: mol_type = other RNA
aaggcagtgcagtggctttt

SEQ ID NO: 10984 - RNA, 20 nt, synthetic construct
  misc_feature 1..20: note = antisense sequence
  source 1..20: mol_type = other RNA
ttgaaggcagtgcagtggct

SEQ ID NO: 10985 - RNA, 20 nt, synthetic construct
  misc_feature 1..20: note = antisense sequence
  source 1..20: mol_type = other RNA
cttgaaggcagtgcagtggc

SEQ ID NO: 10986 - RNA, 20 nt, synthetic construct
  misc_feature 1..20: note = antisense sequence
  source 1..20: mol_type = other RNA
gtcttgaaggcagtgcagtg

SEQ ID NO: 10987 - RNA, 20 nt, synthetic construct
  misc_feature 1..20: note = antisense sequence
  source 1..20: mol_type = other RNA
agtcttgaaggcagtgcagt

SEQ ID NO: 10988 - RNA, 20 nt, synthetic construct
  misc_feature 1..20: note = antisense sequence
  source 1..20: mol_type = other RNA
aagtgagtcttgaaggcagt

SEQ ID NO: 10989 - RNA, 20 nt, synthetic construct
  misc_feature 1..20: note = antisense sequence
  source 1..20: mol_type = other RNA
agaaagtgagtcttgaaggc

SEQ ID NO: 10990 - RNA, 20 nt, synthetic construct
  misc_feature 1..20: note = antisense sequence
  source 1..20: mol_type = other RNA
gagaaagtgagtcttgaagg

SEQ ID NO: 10991 - RNA, 20 nt, synthetic construct
  misc_feature 1..20: note = antisense sequence
  source 1..20: mol_type = other RNA
tgacagagcgagactccatt

SEQ ID NO: 10992 - RNA, 20 nt, synthetic construct
  misc_feature 1..20: note = antisense sequence
  source 1..20: mol_type = other RNA
gtgacagagcgagactccat

SEQ ID NO: 10993 - RNA, 20 nt, synthetic construct
  misc_feature 1..20: note = antisense sequence
  source 1..20: mol_type = other RNA
ggtgacagagcgagactcca

SEQ ID NO: 10994 - RNA, 20 nt, synthetic construct
  misc_feature 1..20: note = antisense sequence
  source 1..20: mol_type = other RNA
tgggtgacagagcgagactc

SEQ ID NO: 10995 - RNA, 20 nt, synthetic construct
  misc_feature 1..20: note = antisense sequence
  source 1..20: mol_type = other RNA
ctgggtgacagagcgagact

SEQ ID NO: 10996 - RNA, 20 nt, synthetic construct
  misc_feature 1..20: note = antisense sequence
  source 1..20: mol_type = other RNA
actccagcctgggtgacaga

SEQ ID NO: 10997 - RNA, 20 nt, synthetic construct
  misc_feature 1..20: note = antisense sequence
  source 1..20: mol_type = other RNA
acttcactccagcctgggtg

SEQ ID NO: 10998 - RNA, 20 nt, synthetic construct
  misc_feature 1..20: note = antisense sequence
  source 1..20: mol_type = other RNA
cacttcactccagcctgggt

SEQ ID NO: 10999 - RNA, 20 nt, synthetic construct
  misc_feature 1..20: note = antisense sequence
  source 1..20: mol_type = other RNA
gttgcagtgagccgagatcg

SEQ ID NO: 11000 - RNA, 20 nt, synthetic construct
  misc_feature 1..20: note = antisense sequence
  source 1..20: mol_type = other RNA
ggttgcagtgagccgagatc

SEQ ID NO: 11001 - RNA, 20 nt, synthetic construct
  misc_feature 1..20: note = antisense sequence
  source 1..20: mol_type = other RNA
aggttgcagtgagccgagat

SEQ ID NO: 11002 - RNA, 20 nt, synthetic construct
  misc_feature 1..20: note = antisense sequence
  source 1..20: mol_type = other RNA
gaggttgcagtgagccgaga

SEQ ID NO: 11003 - RNA, 20 nt, synthetic construct
  misc_feature 1..20: note = antisense sequence
  source 1..20: mol_type = other RNA
tggaggttgcagtgagccga

SEQ ID NO: 11004 - RNA, 20 nt, synthetic construct
  misc_feature 1..20: note = antisense sequence
  source 1..20: mol_type = other RNA
ttggaggttgcagtgagccg

SEQ ID NO: 11005 - RNA, 20 nt, synthetic construct
  misc_feature 1..20: note = antisense sequence
  source 1..20: mol_type = other RNA
gttggaggttgcagtgagcc

SEQ ID NO: 11006 - RNA, 20 nt, synthetic construct
  misc_feature 1..20: note = antisense sequence
  source 1..20: mol_type = other RNA
ggttggaggttgcagtgagc

SEQ ID NO: 11007 - RNA, 20 nt, synthetic construct
  misc_feature 1..20: note = antisense sequence
  source 1..20: mol_type = other RNA
aggttggaggttgcagtgag

SEQ ID NO: 11008 - RNA, 20 nt, synthetic construct
  misc_feature 1..20: note = antisense sequence
  source 1..20: mol_type = other RNA
gaggttggaggttgcagtga

SEQ ID NO: 11009 - RNA, 20 nt, synthetic construct
  misc_feature 1..20: note = antisense sequence
  source 1..20: mol_type = other RNA
gcaggagaattgcttgatcc

SEQ ID NO: 11010 - RNA, 20 nt, synthetic construct
  misc_feature 1..20: note = antisense sequence
  source 1..20: mol_type = other RNA
ggcaggagaattgcttgatc

SEQ ID NO: 11011 - RNA, 20 nt, synthetic construct
  misc_feature 1..20: note = antisense sequence
  source 1..20: mol_type = other RNA
aggcaggagaattgcttgat

SEQ ID NO: 11012 - RNA, 20 nt, synthetic construct
  misc_feature 1..20: note = antisense sequence
  source 1..20: mol_type = other RNA
gaggcaggagaattgcttga

SEQ ID NO: 11013 - RNA, 20 nt, synthetic construct
  misc_feature 1..20: note = antisense sequence
  source 1..20: mol_type = other RNA
tgaggcaggagaattgcttg

SEQ ID NO: 11014 - RNA, 20 nt, synthetic construct
  misc_feature 1..20: note = antisense sequence
  source 1..20: mol_type = other RNA
ctgaggcaggagaattgctt

SEQ ID NO: 11015 - RNA, 20 nt, synthetic construct
  misc_feature 1..20: note = antisense sequence
  source 1..20: mol_type = other RNA
gctgaggcaggagaattgct

SEQ ID NO: 11016 - RNA, 20 nt, synthetic construct
  misc_feature 1..20: note = antisense sequence
  source 1..20: mol_type = other RNA
ggctgaggcaggagaattgc

SEQ ID NO: 11017 - RNA, 20 nt, synthetic construct
  misc_feature 1..20: note = antisense sequence
  source 1..20: mol_type = other RNA
aggctgaggcaggagaattg

SEQ ID NO: 11018 - RNA, 20 nt, synthetic construct
  misc_feature 1..20: note = antisense sequence
  source 1..20: mol_type = other RNA
gaggctgaggcaggagaatt

SEQ ID NO: 11019 - RNA, 20 nt, synthetic construct
  misc_feature 1..20: note = antisense sequence
  source 1..20: mol_type = other RNA
ggaggctgaggcaggagaat

SEQ ID NO: 11020 - RNA, 20 nt, synthetic construct
  misc_feature 1..20: note = antisense sequence
  source 1..20: mol_type = other RNA
tacttgggaggctgaggcag

SEQ ID NO: 11021 - RNA, 20 nt, synthetic construct
  misc_feature 1..20: note = antisense sequence
  source 1..20: mol_type = other RNA
ctacttgggaggctgaggca

SEQ ID NO: 11022 - RNA, 20 nt, synthetic construct
  misc_feature 1..20: note = antisense sequence
  source 1..20: mol_type = other RNA
agctacttgggaggctgagg

SEQ ID NO: 11023 - RNA, 20 nt, synthetic construct
  misc_feature 1..20: note = antisense sequence
  source 1..20: mol_type = other RNA
ctgtggtcccagctacttgg

SEQ ID NO: 11024 - RNA, 20 nt, synthetic construct
  misc_feature 1..20: note = antisense sequence
  source 1..20: mol_type = other RNA
cctgtggtcccagctacttg

SEQ ID NO: 11025 - RNA, 20 nt, synthetic construct
  misc_feature 1..20: note = antisense sequence
  source 1..20: mol_type = other RNA
gcctgtggtcccagctactt

SEQ ID NO: 11026 - RNA, 20 nt, synthetic construct
  misc_feature 1..20: note = antisense sequence
  source 1..20: mol_type = other RNA
gaggtcaaggcaggtggatc

SEQ ID NO: 11027 - RNA, 20 nt, synthetic construct
  misc_feature 1..20: note = antisense sequence
  source 1..20: mol_type = other RNA
ggaggtcaaggcaggtggat

SEQ ID NO: 11028 - RNA, 20 nt, synthetic construct
  misc_feature 1..20: note = antisense sequence
  source 1..20: mol_type = other RNA
gcactttgggaggtcaaggc

SEQ ID NO: 11029 - RNA, 20 nt, synthetic construct
  misc_feature 1..20: note = antisense sequence
  source 1..20: mol_type = other RNA
agcactttgggaggtcaagg

SEQ ID NO: 11030 - RNA, 20 nt, synthetic construct
  misc_feature 1..20: note = antisense sequence
  source 1..20: mol_type = other RNA
cagcactttgggaggtcaag

SEQ ID NO: 11031 - RNA, 20 nt, synthetic construct
  misc_feature 1..20: note = antisense sequence
  source 1..20: mol_type = other RNA
ccagcactttgggaggtcaa

SEQ ID NO: 11032 - RNA, 20 nt, synthetic construct
  misc_feature 1..20: note = antisense sequence
  source 1..20: mol_type = other RNA
ctgtaatcccagcactttgg

SEQ ID NO: 11033 - RNA, 20 nt, synthetic construct
  misc_feature 1..20: note = antisense sequence
  source 1..20: mol_type = other RNA
cctgtaatcccagcactttg

SEQ ID NO: 11034 - RNA, 20 nt, synthetic construct
  misc_feature 1..20: note = antisense sequence
  source 1..20: mol_type = other RNA
gcctgtaatcccagcacttt

SEQ ID NO: 11035 - RNA, 20 nt, synthetic construct
  misc_feature 1..20: note = antisense sequence
  source 1..20: mol_type = other RNA
cgcctgtaatcccagcactt

SEQ ID NO: 11036 - RNA, 20 nt, synthetic construct
  misc_feature 1..20: note = antisense sequence
  source 1..20: mol_type = other RNA
acgcctgtaatcccagcact

SEQ ID NO: 11037 - RNA, 20 nt, synthetic construct
  misc_feature 1..20: note = antisense sequence
  source 1..20: mol_type = other RNA
cacgcctgtaatcccagcac

SEQ ID NO: 11038 - RNA, 20 nt, synthetic construct
  misc_feature 1..20: note = antisense sequence
  source 1..20: mol_type = other RNA
tcacgcctgtaatcccagca

SEQ ID NO: 11039 - RNA, 20 nt, synthetic construct
  misc_feature 1..20: note = antisense sequence
  source 1..20: mol_type = other RNA
ctcacgcctgtaatcccagc

SEQ ID NO: 11040 - RNA, 20 nt, synthetic construct
  misc_feature 1..20: note = antisense sequence
  source 1..20: mol_type = other RNA
gctcacgcctgtaatcccag

SEQ ID NO: 11041 - RNA, 20 nt, synthetic construct
  misc_feature 1..20: note = antisense sequence
  source 1..20: mol_type = other RNA
ggctcacgcctgtaatccca

SEQ ID NO: 11042 - RNA, 20 nt, synthetic construct
  misc_feature 1..20: note = antisense sequence
  source 1..20: mol_type = other RNA
tggctcacgcctgtaatccc

SEQ ID NO: 11043 - RNA, 20 nt, synthetic construct
  misc_feature 1..20: note = antisense sequence
  source 1..20: mol_type = other RNA
gtggctcacgcctgtaatcc

SEQ ID NO: 11044 - RNA, 20 nt, synthetic construct
  misc_feature 1..20: note = antisense sequence
  source 1..20: mol_type = other RNA
ggtggctcacgcctgtaatc

SEQ ID NO: 11045 - RNA, 20 nt, synthetic construct
  misc_feature 1..20: note = antisense sequence
  source 1..20: mol_type = other RNA
cggtggctcacgcctgtaat

SEQ ID NO: 11046 - RNA, 20 nt, synthetic construct
  misc_feature 1..20: note = antisense sequence
  source 1..20: mol_type = other RNA
acggtggctcacgcctgtaa

SEQ ID NO: 11047 - RNA, 20 nt, synthetic construct
  misc_feature 1..20: note = antisense sequence
  source 1..20: mol_type = other RNA
aagggcaatgggcttgaggg

SEQ ID NO: 11048 - RNA, 20 nt, synthetic construct
  misc_feature 1..20: note = antisense sequence
  source 1..20: mol_type = other RNA
ggcacaagggcaatgggctt

SEQ ID NO: 11049 - RNA, 20 nt, synthetic construct
  misc_feature 1..20: note = antisense sequence
  source 1..20: mol_type = other RNA
agtgggcacaagggcaatgg

SEQ ID NO: 11050 - RNA, 20 nt, synthetic construct
  misc_feature 1..20: note = antisense sequence
  source 1..20: mol_type = other RNA
tagtgggcacaagggcaatg

SEQ ID NO: 11051 - RNA, 20 nt, synthetic construct
  misc_feature 1..20: note = antisense sequence
  source 1..20: mol_type = other RNA
atagtgggcacaagggcaat

SEQ ID NO: 11052 - RNA, 20 nt, synthetic construct
  misc_feature 1..20: note = antisense sequence
  source 1..20: mol_type = other RNA
ggatagtgggcacaagggca

SEQ ID NO: 11053 - RNA, 20 nt, synthetic construct
  misc_feature 1..20: note = antisense sequence
  source 1..20: mol_type = other RNA
aggatagtgggcacaagggc

SEQ ID NO: 11054 - RNA, 20 nt, synthetic construct
  misc_feature 1..20: note = antisense sequence
  source 1..20: mol_type = other RNA
tgggaggatagtgggcacaa

SEQ ID NO: 11055 - RNA, 20 nt, synthetic construct
  misc_feature 1..20: note = antisense sequence
  source 1..20: mol_type = other RNA
tgtggcctgggaggatagtg

SEQ ID NO: 11056 - RNA, 20 nt, synthetic construct
  misc_feature 1..20: note = antisense sequence
  source 1..20: mol_type = other RNA
actgtggcctgggaggatag

SEQ ID NO: 11057 - RNA, 20 nt, synthetic construct
  misc_feature 1..20: note = antisense sequence
  source 1..20: mol_type = other RNA
caagcacccttccgaccatg

SEQ ID NO: 11058 - RNA, 20 nt, synthetic construct
  misc_feature 1..20: note = antisense sequence
  source 1..20: mol_type = other RNA
tcaagcacccttccgaccat

SEQ ID NO: 11059 - RNA, 20 nt, synthetic construct
  misc_feature 1..20: note = antisense sequence
  source 1..20: mol_type = other RNA
ctcaagcacccttccgacca

SEQ ID NO: 11060 - RNA, 20 nt, synthetic construct
  misc_feature 1..20: note = antisense sequence
  source 1..20: mol_type = other RNA
acctcaagcacccttccgac

SEQ ID NO: 11061 - RNA, 20 nt, synthetic construct
  misc_feature 1..20: note = antisense sequence
  source 1..20: mol_type = other RNA
agacctcaagcacccttccg

SEQ ID NO: 11062 - RNA, 20 nt, synthetic construct
  misc_feature 1..20: note = antisense sequence
  source 1..20: mol_type = other RNA
aaacagacctcaagcaccct

SEQ ID NO: 11063 - RNA, 20 nt, synthetic construct
  misc_feature 1..20: note = antisense sequence
  source 1..20: mol_type = other RNA
aaaacagacctcaagcaccc

SEQ ID NO: 11064 - RNA, 20 nt, synthetic construct
  misc_feature 1..20: note = antisense sequence
  source 1..20: mol_type = other RNA
caaaacagacctcaagcacc

SEQ ID NO: 11065 - RNA, 20 nt, synthetic construct
  misc_feature 1..20: note = antisense sequence
  source 1..20: mol_type = other RNA
tacaaaacagacctcaagca

SEQ ID NO: 11066 - RNA, 20 nt, synthetic construct
  misc_feature 1..20: note = antisense sequence
  source 1..20: mol_type = other RNA
ttacaaaacagacctcaagc

SEQ ID NO: 11067 - RNA, 20 nt, synthetic construct
  misc_feature 1..20: note = antisense sequence
  source 1..20: mol_type = other RNA
gttacaaaacagacctcaag

SEQ ID NO: 11068 - RNA, 20 nt, synthetic construct
  misc_feature 1..20: note = antisense sequence
  source 1..20: mol_type = other RNA
ggtgctgccttcaaagtcct

SEQ ID NO: 11069 - RNA, 20 nt, synthetic construct
  misc_feature 1..20: note = antisense sequence
  source 1..20: mol_type = other RNA
catggtgctgccttcaaagt

SEQ ID NO: 11070 - RNA, 20 nt, synthetic construct
  misc_feature 1..20: note = antisense sequence
  source 1..20: mol_type = other RNA
ccttgtctggcatcattaaa

SEQ ID NO: 11071 - RNA, 20 nt, synthetic construct
  misc_feature 1..20: note = antisense sequence
  source 1..20: mol_type = other RNA
gccttgtctggcatcattaa

SEQ ID NO: 11072 - RNA, 20 nt, synthetic construct
  misc_feature 1..20: note = antisense sequence
  source 1..20: mol_type = other RNA
agccttgtctggcatcatta

SEQ ID NO: 11073 - RNA, 20 nt, synthetic construct
  misc_feature 1..20: note = antisense sequence
  source 1..20: mol_type = other RNA
tagccttgtctggcatcatt

SEQ ID NO: 11074 - RNA, 20 nt, synthetic construct
  misc_feature 1..20: note = antisense sequence
  source 1..20: mol_type = other RNA
atagccttgtctggcatcat

SEQ ID NO: 11075 - RNA, 20 nt, synthetic construct
  misc_feature 1..20: note = antisense sequence
  source 1..20: mol_type = other RNA
aatagccttgtctggcatca

SEQ ID NO: 11076 - RNA, 20 nt, synthetic construct
  misc_feature 1..20: note = antisense sequence
  source 1..20: mol_type = other RNA
taatagccttgtctggcatc

SEQ ID NO: 11077 - RNA, 20 nt, synthetic construct
  misc_feature 1..20: note = antisense sequence
  source 1..20: mol_type = other RNA
ataatagccttgtctggcat

SEQ ID NO: 11078 - RNA, 20 nt, synthetic construct
  misc_feature 1..20: note = antisense sequence
  source 1..20: mol_type = other RNA
caataatagccttgtctggc

SEQ ID NO: 11079 - RNA, 20 nt, synthetic construct
  misc_feature 1..20: note = antisense sequence
  source 1..20: mol_type = other RNA
ccaataatagccttgtctgg

SEQ ID NO: 11080 - RNA, 20 nt, synthetic construct
  misc_feature 1..20: note = antisense sequence
  source 1..20: mol_type = other RNA
tccaataatagccttgtctg

SEQ ID NO: 11081 - RNA, 20 nt, synthetic construct
  misc_feature 1..20: note = antisense sequence
  source 1..20: mol_type = other RNA
tgaccatgaaggtacaggaa

SEQ ID NO: 11082 - RNA, 20 nt, synthetic construct
  misc_feature 1..20: note = antisense sequence
  source 1..20: mol_type = other RNA
agtgaccatgaaggtacagg

SEQ ID NO: 11083 - RNA, 20 nt, synthetic construct
  misc_feature 1..20: note = antisense sequence
  source 1..20: mol_type = other RNA
cagtgaccatgaaggtacag

SEQ ID NO: 11084 - RNA, 20 nt, synthetic construct
  misc_feature 1..20: note = antisense sequence
  source 1..20: mol_type = other RNA
ccagtgaccatgaaggtaca

SEQ ID NO: 11085 - RNA, 20 nt, synthetic construct
  misc_feature 1..20: note = antisense sequence
  source 1..20: mol_type = other RNA
tccagtgaccatgaaggtac

SEQ ID NO: 11086 - RNA, 20 nt, synthetic construct
  misc_feature 1..20: note = antisense sequence
  source 1..20: mol_type = other RNA
ggcctccagtgaccatgaag

SEQ ID NO: 11087 - RNA, 20 nt, synthetic construct
  misc_feature 1..20: note = antisense sequence
  source 1..20: mol_type = other RNA
ccaaatcctctaagaagaag

SEQ ID NO: 11088 - RNA, 20 nt, synthetic construct
  misc_feature 1..20: note = antisense sequence
  source 1..20: mol_type = other RNA
gccctttgctattgcttgat

SEQ ID NO: 11089 - RNA, 20 nt, synthetic construct
  misc_feature 1..20: note = antisense sequence
  source 1..20: mol_type = other RNA
agccctttgctattgcttga

SEQ ID NO: 11090 - RNA, 20 nt, synthetic construct
  misc_feature 1..20: note = antisense sequence
  source 1..20: mol_type = other RNA
gagccctttgctattgcttg

SEQ ID NO: 11091 - RNA, 20 nt, synthetic construct
  misc_feature 1..20: note = antisense sequence
  source 1..20: mol_type = other RNA
tgagccctttgctattgctt

SEQ ID NO: 11092 - RNA, 20 nt, synthetic construct
  misc_feature 1..20: note = antisense sequence
  source 1..20: mol_type = other RNA
actgagccctttgctattgc

SEQ ID NO: 11093 - RNA, 20 nt, synthetic construct
  misc_feature 1..20: note = antisense sequence
  source 1..20: mol_type = other RNA
taaaggaaagacactgagcc

SEQ ID NO: 11094 - RNA, 20 nt, synthetic construct
  misc_feature 1..20: note = antisense sequence
  source 1..20: mol_type = other RNA
ctatgctcctggaatccaaa

SEQ ID NO: 11095 - RNA, 20 nt, synthetic construct
  misc_feature 1..20: note = antisense sequence
  source 1..20: mol_type = other RNA
gctatgctcctggaatccaa

SEQ ID NO: 11096 - RNA, 20 nt, synthetic construct
  misc_feature 1..20: note = antisense sequence
  source 1..20: mol_type = other RNA
aaggctatgctcctggaatc

SEQ ID NO: 11097 - RNA, 20 nt, synthetic construct
  misc_feature 1..20: note = antisense sequence
  source 1..20: mol_type = other RNA
caaggctatgctcctggaat

SEQ ID NO: 11098 - RNA, 20 nt, synthetic construct
  misc_feature 1..20: note = antisense sequence
  source 1..20: mol_type = other RNA
tcaaggctatgctcctggaa

SEQ ID NO: 11099 - RNA, 20 nt, synthetic construct
  misc_feature 1..20: note = antisense sequence
  source 1..20: mol_type = other RNA
ttcaaggctatgctcctgga

SEQ ID NO: 11100 - RNA, 20 nt, synthetic construct
  misc_feature 1..20: note = antisense sequence
  source 1..20: mol_type = other RNA
attcaaggctatgctcctgg

SEQ ID NO: 11101 - RNA, 20 nt, synthetic construct
  misc_feature 1..20: note = antisense sequence
  source 1..20: mol_type = other RNA
aattcaaggctatgctcctg

SEQ ID NO: 11102 - RNA, 20 nt, synthetic construct
  misc_feature 1..20: note = antisense sequence
  source 1..20: mol_type = other RNA
taattcaaggctatgctcct

SEQ ID NO: 11103 - RNA, 20 nt, synthetic construct
  misc_feature 1..20: note = antisense sequence
  source 1..20: mol_type = other RNA
ttaattcaaggctatgctcc

SEQ ID NO: 11104 - RNA, 20 nt, synthetic construct
  misc_feature 1..20: note = antisense sequence
  source 1..20: mol_type = other RNA
cgaagcaaggatcggattaa

SEQ ID NO: 11105 - RNA, 20 nt, synthetic construct
  misc_feature 1..20: note = antisense sequence
  source 1..20: mol_type = other RNA
acgaagcaaggatcggatta

SEQ ID NO: 11106 - RNA, 20 nt, synthetic construct
  misc_feature 1..20: note = antisense sequence
  source 1..20: mol_type = other RNA
aacgaagcaaggatcggatt

SEQ ID NO: 11107 - RNA, 20 nt, synthetic construct
  misc_feature 1..20: note = antisense sequence
  source 1..20: mol_type = other RNA
gaacgaagcaaggatcggat

SEQ ID NO: 11108 - RNA, 20 nt, synthetic construct
  misc_feature 1..20: note = antisense sequence
  source 1..20: mol_type = other RNA
tgaacgaagcaaggatcgga

SEQ ID NO: 11109 - RNA, 20 nt, synthetic construct
  misc_feature 1..20: note = antisense sequence
  source 1..20: mol_type = other RNA
ctgaacgaagcaaggatcgg

SEQ ID NO: 11110 - RNA, 20 nt, synthetic construct
  misc_feature 1..20: note = antisense sequence
  source 1..20: mol_type = other RNA
cctgaacgaagcaaggatcg

SEQ ID NO: 11111 - RNA, 20 nt, synthetic construct
  misc_feature 1..20: note = antisense sequence
  source 1..20: mol_type = other RNA
gcctgaacgaagcaaggatc

SEQ ID NO: 11112 - RNA, 20 nt, synthetic construct
  misc_feature 1..20: note = antisense sequence
  source 1..20: mol_type = other RNA
ggcctgaacgaagcaaggat

SEQ ID NO: 11113 - RNA, 20 nt, synthetic construct
  misc_feature 1..20: note = antisense sequence
  source 1..20: mol_type = other RNA
tggcctgaacgaagcaagga

SEQ ID NO: 11114 - RNA, 20 nt, synthetic construct
  misc_feature 1..20: note = antisense sequence
  source 1..20: mol_type = other RNA
ttggcctgaacgaagcaagg

SEQ ID NO: 11115 - RNA, 20 nt, synthetic construct
  misc_feature 1..20: note = antisense sequence
  source 1..20: mol_type = other RNA
tttggcctgaacgaagcaag

SEQ ID NO: 11116 - RNA, 20 nt, synthetic construct
  misc_feature 1..20: note = antisense sequence
  source 1..20: mol_type = other RNA
atttggcctgaacgaagcaa

SEQ ID NO: 11117 - RNA, 20 nt, synthetic construct
  misc_feature 1..20: note = antisense sequence
  source 1..20: mol_type = other RNA
aatttggcctgaacgaagca

SEQ ID NO: 11118 - RNA, 20 nt, synthetic construct
  misc_feature 1..20: note = antisense sequence
  source 1..20: mol_type = other RNA
caatttggcctgaacgaagc

SEQ ID NO: 11119 - RNA, 20 nt, synthetic construct
  misc_feature 1..20: note = antisense sequence
  source 1..20: mol_type = other RNA
acaatttggcctgaacgaag

SEQ ID NO: 11120 - RNA, 20 nt, synthetic construct
  misc_feature 1..20: note = antisense sequence
  source 1..20: mol_type = other RNA
tacaatttggcctgaacgaa

SEQ ID NO: 11121 - RNA, 20 nt, synthetic construct
  misc_feature 1..20: note = antisense sequence
  source 1..20: mol_type = other RNA
ttacaatttggcctgaacga

SEQ ID NO: 11122 - RNA, 20 nt, synthetic construct
  misc_feature 1..20: note = antisense sequence
  source 1..20: mol_type = other RNA
attacaatttggcctgaacg

SEQ ID NO: 11123 - RNA, 20 nt, synthetic construct
  misc_feature 1..20: note = antisense sequence
  source 1..20: mol_type = other RNA
gattacaatttggcctgaac

SEQ ID NO: 11124 - RNA, 20 nt, synthetic construct
  misc_feature 1..20: note = antisense sequence
  source 1..20: mol_type = other RNA
atttgggtggtaggtccatg

SEQ ID NO: 11125 - RNA, 20 nt, synthetic construct
  misc_feature 1..20: note = antisense sequence
  source 1..20: mol_type = other RNA
ggtggtaaatgtgctcagat

SEQ ID NO: 11126 - RNA, 20 nt, synthetic construct
  misc_feature 1..20: note = antisense sequence
  source 1..20: mol_type = other RNA
aggtggtaaatgtgctcaga

SEQ ID NO: 11127 - RNA, 20 nt, synthetic construct
  misc_feature 1..20: note = antisense sequence
  source 1..20: mol_type = other RNA
tggttacccaggtggaggaa

SEQ ID NO: 11128 - RNA, 20 nt, synthetic construct
  misc_feature 1..20: note = antisense sequence
  source 1..20: mol_type = other RNA
atggttacccaggtggagga

SEQ ID NO: 11129 - RNA, 20 nt, synthetic construct
  misc_feature 1..20: note = antisense sequence
  source 1..20: mol_type = other RNA
ctgatggttacccaggtgga

SEQ ID NO: 11130 - RNA, 20 nt, synthetic construct
  misc_feature 1..20: note = antisense sequence
  source 1..20: mol_type = other RNA
actgatggttacccaggtgg

SEQ ID NO: 11131 - RNA, 20 nt, synthetic construct
  misc_feature 1..20: note = antisense sequence
  source 1..20: mol_type = other RNA
gactgatggttacccaggtg

SEQ ID NO: 11132 - RNA, 20 nt, synthetic construct
  misc_feature 1..20: note = antisense sequence
  source 1..20: mol_type = other RNA
ggactgatggttacccaggt

SEQ ID NO: 11133 - RNA, 20 nt, synthetic construct
  misc_feature 1..20: note = antisense sequence
  source 1..20: mol_type = other RNA
tggactgatggttacccagg

SEQ ID NO: 11134 - RNA, 20 nt, synthetic construct
  misc_feature 1..20: note = antisense sequence
  source 1..20: mol_type = other RNA
gtggactgatggttacccag

SEQ ID NO: 11135 - RNA, 20 nt, synthetic construct
  misc_feature 1..20: note = antisense sequence
  source 1..20: mol_type = other RNA
agtggactgatggttaccca

SEQ ID NO: 11136 - RNA, 20 nt, synthetic construct
  misc_feature 1..20: note = antisense sequence
  source 1..20: mol_type = other RNA
aagtggactgatggttaccc

SEQ ID NO: 11137 - RNA, 20 nt, synthetic construct
  misc_feature 1..20: note = antisense sequence
  source 1..20: mol_type = other RNA
gtagaaagtggactgatggt

SEQ ID NO: 11138 - RNA, 20 nt, synthetic construct
  misc_feature 1..20: note = antisense sequence
  source 1..20: mol_type = other RNA
tgtagaaagtggactgatgg

SEQ ID NO: 11139 - RNA, 20 nt, synthetic construct
  misc_feature 1..20: note = antisense sequence
  source 1..20: mol_type = other RNA
ggaatgtagaaagtggactg

SEQ ID NO: 11140 - RNA, 20 nt, synthetic construct
  misc_feature 1..20: note = antisense sequence
  source 1..20: mol_type = other RNA
aggaatgtagaaagtggact

SEQ ID NO: 11141 - RNA, 20 nt, synthetic construct
  misc_feature 1..20: note = antisense sequence
  source 1..20: mol_type = other RNA
gaggaatgtagaaagtggac

SEQ ID NO: 11142 - RNA, 20 nt, synthetic construct
  misc_feature 1..20: note = antisense sequence
  source 1..20: mol_type = other RNA
tgaggaatgtagaaagtgga

SEQ ID NO: 11143 - RNA, 20 nt, synthetic construct
  misc_feature 1..20: note = antisense sequence
  source 1..20: mol_type = other RNA
ttgaggaatgtagaaagtgg

SEQ ID NO: 11144 - RNA, 20 nt, synthetic construct
  misc_feature 1..20: note = antisense sequence
  source 1..20: mol_type = other RNA
gatatgtatgggtgcctaaa

SEQ ID NO: 11145 - RNA, 20 nt, synthetic construct
  misc_feature 1..20: note = antisense sequence
  source 1..20: mol_type = other RNA
ggatatgtatgggtgcctaa

SEQ ID NO: 11146 - RNA, 20 nt, synthetic construct
  misc_feature 1..20: note = antisense sequence
  source 1..20: mol_type = other RNA
tggatatgtatgggtgccta

SEQ ID NO: 11147 - RNA, 20 nt, synthetic construct
  misc_feature 1..20: note = antisense sequence
  source 1..20: mol_type = other RNA
tcacactgaaaccttgcatt

SEQ ID NO: 11148 - RNA, 20 nt, synthetic construct
  misc_feature 1..20: note = antisense sequence
  source 1..20: mol_type = other RNA
caaattgttcacttcgtgca

SEQ ID NO: 11149 - RNA, 20 nt, synthetic construct
  misc_feature 1..20: note = antisense sequence
  source 1..20: mol_type = other RNA
cgtaattgtcaaaactcacc

SEQ ID NO: 11150 - RNA, 20 nt, synthetic construct
  misc_feature 1..20: note = antisense sequence
  source 1..20: mol_type = other RNA
ttaagtcttatgtgggtgca

SEQ ID NO: 11151 - RNA, 20 nt, synthetic construct
  misc_feature 1..20: note = antisense sequence
  source 1..20: mol_type = other RNA
attaagtcttatgtgggtgc

SEQ ID NO: 11152 - RNA, 20 nt, synthetic construct
  misc_feature 1..20: note = antisense sequence
  source 1..20: mol_type = other RNA
ggagtgatgaaattgctcta

SEQ ID NO: 11153 - RNA, 20 nt, synthetic construct
  misc_feature 1..20: note = antisense sequence
  source 1..20: mol_type = other RNA
ggaaactttctgggagtgat

SEQ ID NO: 11154 - RNA, 20 nt, synthetic construct
  misc_feature 1..20: note = antisense sequence
  source 1..20: mol_type = other RNA
caggaaactttctgggagtg

SEQ ID NO: 11155 - RNA, 20 nt, synthetic construct
  misc_feature 1..20: note = antisense sequence
  source 1..20: mol_type = other RNA
acaggaaactttctgggagt

SEQ ID NO: 11156 - RNA, 20 nt, synthetic construct
  misc_feature 1..20: note = antisense sequence
  source 1..20: mol_type = other RNA
cacaggaaactttctgggag

SEQ ID NO: 11157 - RNA, 20 nt, synthetic construct
  misc_feature 1..20: note = antisense sequence
  source 1..20: mol_type = other RNA
gatcattagccactgtatgc

SEQ ID NO: 11158 - RNA, 20 nt, synthetic construct
  misc_feature 1..20: note = antisense sequence
  source 1..20: mol_type = other RNA
gaaatgataagtgtctgagg

SEQ ID NO: 11159 - RNA, 20 nt, synthetic construct
  misc_feature 1..20: note = antisense sequence
  source 1..20: mol_type = other RNA
aagagcagggatgaagaggg

SEQ ID NO: 11160 - RNA, 20 nt, synthetic construct
  misc_feature 1..20: note = antisense sequence
  source 1..20: mol_type = other RNA
gaagagcagggatgaagagg

SEQ ID NO: 11161 - RNA, 20 nt, synthetic construct
  misc_feature 1..20: note = antisense sequence
  source 1..20: mol_type = other RNA
ctacgttctcactcaaatgt

SEQ ID NO: 11162 - RNA, 20 nt, synthetic construct
  misc_feature 1..20: note = antisense sequence
  source 1..20: mol_type = other RNA
actacgttctcactcaaatg

SEQ ID NO: 11163 - RNA, 20 nt, synthetic construct
  misc_feature 1..20: note = antisense sequence
  source 1..20: mol_type = other RNA
cactacgttctcactcaaat

SEQ ID NO: 11164 - RNA, 20 nt, synthetic construct
  misc_feature 1..20: note = antisense sequence
  source 1..20: mol_type = other RNA
tcactacgttctcactcaaa

SEQ ID NO: 11165 - RNA, 20 nt, synthetic construct
  misc_feature 1..20: note = antisense sequence
  source 1..20: mol_type = other RNA
atcactacgttctcactcaa

SEQ ID NO: 11166 - RNA, 20 nt, synthetic construct
  misc_feature 1..20: note = antisense sequence
  source 1..20: mol_type = other RNA
tatcactacgttctcactca

SEQ ID NO: 11167 - RNA, 20 nt, synthetic construct
  misc_feature 1..20: note = antisense sequence
  source 1..20: mol_type = other RNA
atatcactacgttctcactc

SEQ ID NO: 11168 - RNA, 20 nt, synthetic construct
  misc_feature 1..20: note = antisense sequence
  source 1..20: mol_type = other RNA
ggacaaatatcactacgttc

SEQ ID NO: 11169 - RNA, 20 nt, synthetic construct
  misc_feature 1..20: note = antisense sequence
  source 1..20: mol_type = other RNA
ggttactacaggaggtgtgt

SEQ ID NO: 11170 - RNA, 20 nt, synthetic construct
  misc_feature 1..20: note = antisense sequence
  source 1..20: mol_type = other RNA
gtggttactacaggaggtgt

SEQ ID NO: 11171 - RNA, 20 nt, synthetic construct
  misc_feature 1..20: note = antisense sequence
  source 1..20: mol_type = other RNA
agtggttactacaggaggtg

SEQ ID NO: 11172 - RNA, 20 nt, synthetic construct
  misc_feature 1..20: note = antisense sequence
  source 1..20: mol_type = other RNA
cagtggttactacaggaggt

SEQ ID NO: 11173 - RNA, 20 nt, synthetic construct
  misc_feature 1..20: note = antisense sequence
  source 1..20: mol_type = other RNA
tcagtggttactacaggagg

SEQ ID NO: 11174 - RNA, 20 nt, synthetic construct
  misc_feature 1..20: note = antisense sequence
  source 1..20: mol_type = other RNA
atcagtggttactacaggag

SEQ ID NO: 11175 - RNA, 20 nt, synthetic construct
  misc_feature 1..20: note = antisense sequence
  source 1..20: mol_type = other RNA
tcacatcagtggttactaca

SEQ ID NO: 11176 - RNA, 20 nt, synthetic construct
  misc_feature 1..20: note = antisense sequence
  source 1..20: mol_type = other RNA
tgtcacatcagtggttacta

SEQ ID NO: 11177 - RNA, 20 nt, synthetic construct
  misc_feature 1..20: note = antisense sequence
  source 1..20: mol_type = other RNA
atgtcacatcagtggttact

SEQ ID NO: 11178 - RNA, 20 nt, synthetic construct
  misc_feature 1..20: note = antisense sequence
  source 1..20: mol_type = other RNA
tatgtcacatcagtggttac

SEQ ID NO: 11179 - RNA, 20 nt, synthetic construct
  misc_feature 1..20: note = antisense sequence
  source 1..20: mol_type = other RNA
gtatgtcacatcagtggtta

SEQ ID NO: 11180 - RNA, 20 nt, synthetic construct
  misc_feature 1..20: note = antisense sequence
  source 1..20: mol_type = other RNA
ggtatgtcacatcagtggtt

SEQ ID NO: 11181 - RNA, 20 nt, synthetic construct
  misc_feature 1..20: note = antisense sequence
  source 1..20: mol_type = other RNA
gtggtatgtcacatcagtgg

SEQ ID NO: 11182 - RNA, 20 nt, synthetic construct
  misc_feature 1..20: note = antisense sequence
  source 1..20: mol_type = other RNA
ggtggtatgtcacatcagtg

SEQ ID NO: 11183 - RNA, 20 nt, synthetic construct
  misc_feature 1..20: note = antisense sequence
  source 1..20: mol_type = other RNA
tggtggtatgtcacatcagt

SEQ ID NO: 11184 - RNA, 20 nt, synthetic construct
  misc_feature 1..20: note = antisense sequence
  source 1..20: mol_type = other RNA
tatggtggtatgtcacatca

SEQ ID NO: 11185 - RNA, 20 nt, synthetic construct
  misc_feature 1..20: note = antisense sequence
  source 1..20: mol_type = other RNA
ctatggtggtatgtcacatc

SEQ ID NO: 11186 - RNA, 20 nt, synthetic construct
  misc_feature 1..20: note = antisense sequence
  source 1..20: mol_type = other RNA
gctatggtggtatgtcacat

SEQ ID NO: 11187 - RNA, 20 nt, synthetic construct
  misc_feature 1..20: note = antisense sequence
  source 1..20: mol_type = other RNA
agctatggtggtatgtcaca

SEQ ID NO: 11188 - RNA, 20 nt, synthetic construct
  misc_feature 1..20: note = antisense sequence
  source 1..20: mol_type = other RNA
gagctatggtggtatgtcac

SEQ ID NO: 11189 - RNA, 20 nt, synthetic construct
  misc_feature 1..20: note = antisense sequence
  source 1..20: mol_type = other RNA
tgagctatggtggtatgtca

SEQ ID NO: 11190 - RNA, 20 nt, synthetic construct
  misc_feature 1..20: note = antisense sequence
  source 1..20: mol_type = other RNA
taagtgagctatggtggtat

SEQ ID NO: 11191 - RNA, 20 nt, synthetic construct
  misc_feature 1..20: note = antisense sequence
  source 1..20: mol_type = other RNA
ctaagtgagctatggtggta

SEQ ID NO: 11192 - RNA, 20 nt, synthetic construct
  misc_feature 1..20: note = antisense sequence
  source 1..20: mol_type = other RNA
tctaagtgagctatggtggt

SEQ ID NO: 11193 - RNA, 20 nt, synthetic construct
  misc_feature 1..20: note = antisense sequence
  source 1..20: mol_type = other RNA
atctaagtgagctatggtgg

SEQ ID NO: 11194 - RNA, 20 nt, synthetic construct
  misc_feature 1..20: note = antisense sequence
  source 1..20: mol_type = other RNA
cccagtacacaaaatatcac

SEQ ID NO: 11195 - RNA, 20 nt, synthetic construct
  misc_feature 1..20: note = antisense sequence
  source 1..20: mol_type = other RNA
gtagagtacaaattgtggtc

SEQ ID NO: 11196 - RNA, 20 nt, synthetic construct
  misc_feature 1..20: note = antisense sequence
  source 1..20: mol_type = other RNA
actggacacaagcaaaatgt

SEQ ID NO: 11197 - RNA, 20 nt, synthetic construct
  misc_feature 1..20: note = antisense sequence
  source 1..20: mol_type = other RNA
tcaaactggacacaagcaaa

SEQ ID NO: 11198 - RNA, 20 nt, synthetic construct
  misc_feature 1..20: note = antisense sequence
  source 1..20: mol_type = other RNA
aactcaaactggacacaagc

SEQ ID NO: 11199 - RNA, 20 nt, synthetic construct
  misc_feature 1..20: note = antisense sequence
  source 1..20: mol_type = other RNA
taactcaaactggacacaag

SEQ ID NO: 11200 - RNA, 20 nt, synthetic construct
  misc_feature 1..20: note = antisense sequence
  source 1..20: mol_type = other RNA
caataactcaaactggacac

SEQ ID NO: 11201 - RNA, 20 nt, synthetic construct
  misc_feature 1..20: note = antisense sequence
  source 1..20: mol_type = other RNA
cctgaagattatcactttgg

SEQ ID NO: 11202 - RNA, 20 nt, synthetic construct
  misc_feature 1..20: note = antisense sequence
  source 1..20: mol_type = other RNA
gcaagtgttacctgaagatt

SEQ ID NO: 11203 - RNA, 20 nt, synthetic construct
  misc_feature 1..20: note = antisense sequence
  source 1..20: mol_type = other RNA
tgcaagtgttacctgaagat

SEQ ID NO: 11204 - RNA, 20 nt, synthetic construct
  misc_feature 1..20: note = antisense sequence
  source 1..20: mol_type = other RNA
tcacataagtacatgggcat

SEQ ID NO: 11205 - RNA, 20 nt, synthetic construct
  misc_feature 1..20: note = antisense sequence
  source 1..20: mol_type = other RNA
atcacataagtacatgggca

SEQ ID NO: 11206 - RNA, 20 nt, synthetic construct
  misc_feature 1..20: note = antisense sequence
  source 1..20: mol_type = other RNA
aatcacataagtacatgggc

SEQ ID NO: 11207 - RNA, 20 nt, synthetic construct
  misc_feature 1..20: note = antisense sequence
  source 1..20: mol_type = other RNA
tgtcatctgaagagtagaag

SEQ ID NO: 11208 - RNA, 20 nt, synthetic construct
  misc_feature 1..20: note = antisense sequence
  source 1..20: mol_type = other RNA
gtgtcatctgaagagtagaa

SEQ ID NO: 11209 - RNA, 20 nt, synthetic construct
  misc_feature 1..20: note = antisense sequence
  source 1..20: mol_type = other RNA
cagtgtcatctgaagagtag

SEQ ID NO: 11210 - RNA, 20 nt, synthetic construct
  misc_feature 1..20: note = antisense sequence
  source 1..20: mol_type = other RNA
caacagtgtcatctgaagag

SEQ ID NO: 11211 - RNA, 20 nt, synthetic construct
  misc_feature 1..20: note = antisense sequence
  source 1..20: mol_type = other RNA
attctcaacagtgtcatctg

SEQ ID NO: 11212 - RNA, 20 nt, synthetic construct
  misc_feature 1..20: note = antisense sequence
  source 1..20: mol_type = other RNA
tcccgtctgtagattgtctt

SEQ ID NO: 11213 - RNA, 20 nt, synthetic construct
  misc_feature 1..20: note = antisense sequence
  source 1..20: mol_type = other RNA
ttcccgtctgtagattgtct

SEQ ID NO: 11214 - RNA, 20 nt, synthetic construct
  misc_feature 1..20: note = antisense sequence
  source 1..20: mol_type = other RNA
cttcccgtctgtagattgtc

SEQ ID NO: 11215 - RNA, 20 nt, synthetic construct
  misc_feature 1..20: note = antisense sequence
  source 1..20: mol_type = other RNA
tcttcccgtctgtagattgt

SEQ ID NO: 11216 - RNA, 20 nt, synthetic construct
  misc_feature 1..20: note = antisense sequence
  source 1..20: mol_type = other RNA
ttcttcccgtctgtagattg

SEQ ID NO: 11217 - RNA, 20 nt, synthetic construct
  misc_feature 1..20: note = antisense sequence
  source 1..20: mol_type = other RNA
tttcttcccgtctgtagatt

SEQ ID NO: 11218 - RNA, 20 nt, synthetic construct
  misc_feature 1..20: note = antisense sequence
  source 1..20: mol_type = other RNA
cagatgttttcttcccgtct

SEQ ID NO: 11219 - RNA, 20 nt, synthetic construct
  misc_feature 1..20: note = antisense sequence
  source 1..20: mol_type = other RNA
gtgtagttagtgtctgttca

SEQ ID NO: 11220 - RNA, 20 nt, synthetic construct
  misc_feature 1..20: note = antisense sequence
  source 1..20: mol_type = other RNA
catgcgtgtcaatacttgtt

SEQ ID NO: 11221 - RNA, 20 nt, synthetic construct
  misc_feature 1..20: note = antisense sequence
  source 1..20: mol_type = other RNA
aatgtctaagagatccagct

SEQ ID NO: 11222 - RNA, 20 nt, synthetic construct
  misc_feature 1..20: note = antisense sequence
  source 1..20: mol_type = other RNA
aaatgtctaagagatccagc

SEQ ID NO: 11223 - RNA, 20 nt, synthetic construct
  misc_feature 1..20: note = antisense sequence
  source 1..20: mol_type = other RNA
cagaaatgtctaagagatcc

SEQ ID NO: 11224 - RNA, 20 nt, synthetic construct
  misc_feature 1..20: note = antisense sequence
  source 1..20: mol_type = other RNA
cccatcagaaatgtctaaga

SEQ ID NO: 11225 - RNA, 20 nt, synthetic construct
  misc_feature 1..20: note = antisense sequence
  source 1..20: mol_type = other RNA
tcccatcagaaatgtctaag

SEQ ID NO: 11226 - RNA, 20 nt, synthetic construct
  misc_feature 1..20: note = antisense sequence
  source 1..20: mol_type = other RNA
tgaaagtgctgggtcataca

SEQ ID NO: 11227 - RNA, 20 nt, synthetic construct
  misc_feature 1..20: note = antisense sequence
  source 1..20: mol_type = other RNA
actagaaatgaaagtgctgg

SEQ ID NO: 11228 - RNA, 20 nt, synthetic construct
  misc_feature 1..20: note = antisense sequence
  source 1..20: mol_type = other RNA
catgtaggtctctgtaatag

SEQ ID NO: 11229 - RNA, 20 nt, synthetic construct
  misc_feature 1..20: note = antisense sequence
  source 1..20: mol_type = other RNA
ttgagttgtttgcagcttca

SEQ ID NO: 11230 - RNA, 20 nt, synthetic construct
  misc_feature 1..20: note = antisense sequence
  source 1..20: mol_type = other RNA
ctttctattgcagagtagca

SEQ ID NO: 11231 - RNA, 20 nt, synthetic construct
  misc_feature 1..20: note = antisense sequence
  source 1..20: mol_type = other RNA
cctttctattgcagagtagc

SEQ ID NO: 11232 - RNA, 20 nt, synthetic construct
  misc_feature 1..20: note = antisense sequence
  source 1..20: mol_type = other RNA
gggtcctttctattgcagag

SEQ ID NO: 11233 - RNA, 20 nt, synthetic construct
  misc_feature 1..20: note = antisense sequence
  source 1..20: mol_type = other RNA
ttgggtcctttctattgcag

SEQ ID NO: 11234 - RNA, 20 nt, synthetic construct
  misc_feature 1..20: note = antisense sequence
  source 1..20: mol_type = other RNA
agttgggtcctttctattgc

SEQ ID NO: 11235 - RNA, 20 nt, synthetic construct
  misc_feature 1..20: note = antisense sequence
  source 1..20: mol_type = other RNA
tagttgggtcctttctattg

SEQ ID NO: 11236 - RNA, 20 nt, synthetic construct
  misc_feature 1..20: note = antisense sequence
  source 1..20: mol_type = other RNA
gcagtagttgggtcctttct

SEQ ID NO: 11237 - RNA, 20 nt, synthetic construct
  misc_feature 1..20: note = antisense sequence
  source 1..20: mol_type = other RNA
agcagtagttgggtcctttc

SEQ ID NO: 11238 - RNA, 20 nt, synthetic construct
  misc_feature 1..20: note = antisense sequence
  source 1..20: mol_type = other RNA
ccagaatgtcagatttaagg

SEQ ID NO: 11239 - RNA, 20 nt, synthetic construct
  misc_feature 1..20: note = antisense sequence
  source 1..20: mol_type = other RNA
caccgataaataatctgtcc

SEQ ID NO: 11240 - RNA, 20 nt, synthetic construct
  misc_feature 1..20: note = antisense sequence
  source 1..20: mol_type = other RNA
ccaccgataaataatctgtc

SEQ ID NO: 11241 - RNA, 20 nt, synthetic construct
  misc_feature 1..20: note = antisense sequence
  source 1..20: mol_type = other RNA
gcaaccaccgataaataatc

SEQ ID NO: 11242 - RNA, 20 nt, synthetic construct
  misc_feature 1..20: note = antisense sequence
  source 1..20: mol_type = other RNA
tggcaaccaccgataaataa

SEQ ID NO: 11243 - RNA, 20 nt, synthetic construct
  misc_feature 1..20: note = antisense sequence
  source 1..20: mol_type = other RNA
ctggcaaccaccgataaata

SEQ ID NO: 11244 - RNA, 20 nt, synthetic construct
  misc_feature 1..20: note = antisense sequence
  source 1..20: mol_type = other RNA
ttcaaccctggcaaccaccg

SEQ ID NO: 11245 - RNA, 20 nt, synthetic construct
  misc_feature 1..20: note = antisense sequence
  source 1..20: mol_type = other RNA
ctcgttcaaccctggcaacc

SEQ ID NO: 11246 - RNA, 20 nt, synthetic construct
  misc_feature 1..20: note = antisense sequence
  source 1..20: mol_type = other RNA
ccctcgttcaaccctggcaa

SEQ ID NO: 11247 - RNA, 20 nt, synthetic construct
  misc_feature 1..20: note = antisense sequence
  source 1..20: mol_type = other RNA
tatagtcaatcccttcctcc

SEQ ID NO: 11248 - RNA, 20 nt, synthetic construct
  misc_feature 1..20: note = antisense sequence
  source 1..20: mol_type = other RNA
gccacatcaaggtgtagaat

SEQ ID NO: 11249 - RNA, 20 nt, synthetic construct
  misc_feature 1..20: note = antisense sequence
  source 1..20: mol_type = other RNA
actgccacatcaaggtgtag

SEQ ID NO: 11250 - RNA, 20 nt, synthetic construct
  misc_feature 1..20: note = antisense sequence
  source 1..20: mol_type = other RNA
gtgttactgccacatcaagg

SEQ ID NO: 11251 - RNA, 20 nt, synthetic construct
  misc_feature 1..20: note = antisense sequence
  source 1..20: mol_type = other RNA
tatagttgtgttactgccac

SEQ ID NO: 11252 - RNA, 20 nt, synthetic construct
  misc_feature 1..20: note = antisense sequence
  source 1..20: mol_type = other RNA
ctatgagtgtgacaaaccaa

SEQ ID NO: 11253 - RNA, 20 nt, synthetic construct
  misc_feature 1..20: note = antisense sequence
  source 1..20: mol_type = other RNA
ttcaccctgtttagatgtac

SEQ ID NO: 11254 - RNA, 20 nt, synthetic construct
  misc_feature 1..20: note = antisense sequence
  source 1..20: mol_type = other RNA
gagagaagcaggagttatat

SEQ ID NO: 11255 - RNA, 20 nt, synthetic construct
  misc_feature 1..20: note = antisense sequence
  source 1..20: mol_type = other RNA
ttgaaaccaaatgctggaga

SEQ ID NO: 11256 - RNA, 20 nt, synthetic construct
  misc_feature 1..20: note = antisense sequence
  source 1..20: mol_type = other RNA
ctggactaagtggtaatcta

SEQ ID NO: 11257 - RNA, 20 nt, synthetic construct
  misc_feature 1..20: note = antisense sequence
  source 1..20: mol_type = other RNA
actggactaagtggtaatct

SEQ ID NO: 11258 - RNA, 20 nt, synthetic construct
  misc_feature 1..20: note = antisense sequence
  source 1..20: mol_type = other RNA
acatactggactaagtggta

SEQ ID NO: 11259 - RNA, 20 nt, synthetic construct
  misc_feature 1..20: note = antisense sequence
  source 1..20: mol_type = other RNA
cacatactggactaagtggt

SEQ ID NO: 11260 - RNA, 20 nt, synthetic construct
  misc_feature 1..20: note = antisense sequence
  source 1..20: mol_type = other RNA
acacatactggactaagtgg

SEQ ID NO: 11261 - RNA, 20 nt, synthetic construct
  misc_feature 1..20: note = antisense sequence
  source 1..20: mol_type = other RNA
ccaaggcacagtccagcaca

SEQ ID NO: 11262 - RNA, 20 nt, synthetic construct
  misc_feature 1..20: note = antisense sequence
  source 1..20: mol_type = other RNA
taccaaggcacagtccagca

SEQ ID NO: 11263 - RNA, 20 nt, synthetic construct
  misc_feature 1..20: note = antisense sequence
  source 1..20: mol_type = other RNA
ttaccaaggcacagtccagc

SEQ ID NO: 11264 - RNA, 20 nt, synthetic construct
  misc_feature 1..20: note = antisense sequence
  source 1..20: mol_type = other RNA
attaccaaggcacagtccag

SEQ ID NO: 11265 - RNA, 20 nt, synthetic construct
  misc_feature 1..20: note = antisense sequence
  source 1..20: mol_type = other RNA
tattaccaaggcacagtcca

SEQ ID NO: 11266 - RNA, 20 nt, synthetic construct
  misc_feature 1..20: note = antisense sequence
  source 1..20: mol_type = other RNA
ctattaccaaggcacagtcc

SEQ ID NO: 11267 - RNA, 20 nt, synthetic construct
  misc_feature 1..20: note = antisense sequence
  source 1..20: mol_type = other RNA
actattaccaaggcacagtc

SEQ ID NO: 11268 - RNA, 20 nt, synthetic construct
  misc_feature 1..20: note = antisense sequence
  source 1..20: mol_type = other RNA
aactattaccaaggcacagt

SEQ ID NO: 11269 - RNA, 20 nt, synthetic construct
  misc_feature 1..20: note = antisense sequence
  source 1..20: mol_type = other RNA
aaactattaccaaggcacag

SEQ ID NO: 11270 - RNA, 20 nt, synthetic construct
  misc_feature 1..20: note = antisense sequence
  source 1..20: mol_type = other RNA
gaaactattaccaaggcaca

SEQ ID NO: 11271 - RNA, 20 nt, synthetic construct
  misc_feature 1..20: note = antisense sequence
  source 1..20: mol_type = other RNA
tgaaactattaccaaggcac

SEQ ID NO: 11272 - RNA, 20 nt, synthetic construct
  misc_feature 1..20: note = antisense sequence
  source 1..20: mol_type = other RNA
cctgaaactattaccaaggc

SEQ ID NO: 11273 - RNA, 20 nt, synthetic construct
  misc_feature 1..20: note = antisense sequence
  source 1..20: mol_type = other RNA
tgagcaattcttcctgaaac

SEQ ID NO: 11274 - RNA, 20 nt, synthetic construct
  misc_feature 1..20: note = antisense sequence
  source 1..20: mol_type = other RNA
gttgcctgcttttgaatgag

SEQ ID NO: 11275 - RNA, 20 nt, synthetic construct
  misc_feature 1..20: note = antisense sequence
  source 1..20: mol_type = other RNA
gagttgcctgcttttgaatg

SEQ ID NO: 11276 - RNA, 20 nt, synthetic construct
  misc_feature 1..20: note = antisense sequence
  source 1..20: mol_type = other RNA
gtgagttgcctgcttttgaa

SEQ ID NO: 11277 - RNA, 20 nt, synthetic construct
  misc_feature 1..20: note = antisense sequence
  source 1..20: mol_type = other RNA
ggcaatcagcaagtgagttg

SEQ ID NO: 11278 - RNA, 20 nt, synthetic construct
  misc_feature 1..20: note = antisense sequence
  source 1..20: mol_type = other RNA
aaaggcaatcagcaagtgag

SEQ ID NO: 11279 - RNA, 20 nt, synthetic construct
  misc_feature 1..20: note = antisense sequence
  source 1..20: mol_type = other RNA
ggcaaaggcaatcagcaagt

SEQ ID NO: 11280 - RNA, 20 nt, synthetic construct
  misc_feature 1..20: note = antisense sequence
  source 1..20: mol_type = other RNA
tggcaaaggcaatcagcaag

SEQ ID NO: 11281 - RNA, 20 nt, synthetic construct
  misc_feature 1..20: note = antisense sequence
  source 1..20: mol_type = other RNA
ctggcaaaggcaatcagcaa

SEQ ID NO: 11282 - RNA, 20 nt, synthetic construct
  misc_feature 1..20: note = antisense sequence
  source 1..20: mol_type = other RNA
ttatctgctggcaaaggcaa

SEQ ID NO: 11283 - RNA, 20 nt, synthetic construct
  misc_feature 1..20: note = antisense sequence
  source 1..20: mol_type = other RNA
gtcattatctgctggcaaag

SEQ ID NO: 11284 - RNA, 20 nt, synthetic construct
  misc_feature 1..20: note = antisense sequence
  source 1..20: mol_type = other RNA
tgtcattatctgctggcaaa

SEQ ID NO: 11285 - RNA, 20 nt, synthetic construct
  misc_feature 1..20: note = antisense sequence
  source 1..20: mol_type = other RNA
atgtcattatctgctggcaa

SEQ ID NO: 11286 - RNA, 20 nt, synthetic construct
  misc_feature 1..20: note = antisense sequence
  source 1..20: mol_type = other RNA
gatgtcattatctgctggca

SEQ ID NO: 11287 - RNA, 20 nt, synthetic construct
  misc_feature 1..20: note = antisense sequence
  source 1..20: mol_type = other RNA
tgatgtcattatctgctggc

SEQ ID NO: 11288 - RNA, 20 nt, synthetic construct
  misc_feature 1..20: note = antisense sequence
  source 1..20: mol_type = other RNA
agtgatgtcattatctgctg

SEQ ID NO: 11289 - RNA, 20 nt, synthetic construct
  misc_feature 1..20: note = antisense sequence
  source 1..20: mol_type = other RNA
tattccagctagtgatgtca

SEQ ID NO: 11290 - RNA, 20 nt, synthetic construct
  misc_feature 1..20: note = antisense sequence
  source 1..20: mol_type = other RNA
ctctgtgtccctgttactaa

SEQ ID NO: 11291 - RNA, 20 nt, synthetic construct
  misc_feature 1..20: note = antisense sequence
  source 1..20: mol_type = other RNA
actctgtgtccctgttacta

SEQ ID NO: 11292 - RNA, 20 nt, synthetic construct
  misc_feature 1..20: note = antisense sequence
  source 1..20: mol_type = other RNA
gtactctgtgtccctgttac

SEQ ID NO: 11293 - RNA, 20 nt, synthetic construct
  misc_feature 1..20: note = antisense sequence
  source 1..20: mol_type = other RNA
tgtactctgtgtccctgtta

SEQ ID NO: 11294 - RNA, 20 nt, synthetic construct
  misc_feature 1..20: note = antisense sequence
  source 1..20: mol_type = other RNA
ttgtactctgtgtccctgtt

SEQ ID NO: 11295 - RNA, 20 nt, synthetic construct
  misc_feature 1..20: note = antisense sequence
  source 1..20: mol_type = other RNA
tcttgtactctgtgtccctg

SEQ ID NO: 11296 - RNA, 20 nt, synthetic construct
  misc_feature 1..20: note = antisense sequence
  source 1..20: mol_type = other RNA
agggcaattttgtatgtctg

SEQ ID NO: 11297 - RNA, 20 nt, synthetic construct
  misc_feature 1..20: note = antisense sequence
  source 1..20: mol_type = other RNA
gagtaccttagcataatgga

SEQ ID NO: 11298 - RNA, 20 nt, synthetic construct
  misc_feature 1..20: note = antisense sequence
  source 1..20: mol_type = other RNA
gtgtagagtaccttagcata

SEQ ID NO: 11299 - RNA, 20 nt, synthetic construct
  misc_feature 1..20: note = antisense sequence
  source 1..20: mol_type = other RNA
aacagtgtagagtaccttag

SEQ ID NO: 11300 - RNA, 20 nt, synthetic construct
  misc_feature 1..20: note = antisense sequence
  source 1..20: mol_type = other RNA
caacagtgtagagtacctta

SEQ ID NO: 11301 - RNA, 20 nt, synthetic construct
  misc_feature 1..20: note = antisense sequence
  source 1..20: mol_type = other RNA
acaacagtgtagagtacctt

SEQ ID NO: 11302 - RNA, 20 nt, synthetic construct
  misc_feature 1..20: note = antisense sequence
  source 1..20: mol_type = other RNA
aacaacagtgtagagtacct

SEQ ID NO: 11303 - RNA, 20 nt, synthetic construct
  misc_feature 1..20: note = antisense sequence
  source 1..20: mol_type = other RNA
aaacaacagtgtagagtacc

SEQ ID NO: 11304 - RNA, 20 nt, synthetic construct
  misc_feature 1..20: note = antisense sequence
  source 1..20: mol_type = other RNA
gtcagtaaacaacagtgtag

SEQ ID NO: 11305 - RNA, 20 nt, synthetic construct
  misc_feature 1..20: note = antisense sequence
  source 1..20: mol_type = other RNA
ggatctcaagcattttgtca

SEQ ID NO: 11306 - RNA, 20 nt, synthetic construct
  misc_feature 1..20: note = antisense sequence
  source 1..20: mol_type = other RNA
gccaagaatctaagacacaa

SEQ ID NO: 11307 - RNA, 20 nt, synthetic construct
  misc_feature 1..20: note = antisense sequence
  source 1..20: mol_type = other RNA
tgccaagaatctaagacaca

SEQ ID NO: 11308 - RNA, 20 nt, synthetic construct
  misc_feature 1..20: note = antisense sequence
  source 1..20: mol_type = other RNA
ctgccaagaatctaagacac

SEQ ID NO: 11309 - RNA, 20 nt, synthetic construct
  misc_feature 1..20: note = antisense sequence
  source 1..20: mol_type = other RNA
agctgccaagaatctaagac

SEQ ID NO: 11310 - RNA, 20 nt, synthetic construct
  misc_feature 1..20: note = antisense sequence
  source 1..20: mol_type = other RNA
gttatagctgccaagaatct

SEQ ID NO: 11311 - RNA, 20 nt, synthetic construct
  misc_feature 1..20: note = antisense sequence
  source 1..20: mol_type = other RNA
ggttatagctgccaagaatc

SEQ ID NO: 11312 - RNA, 20 nt, synthetic construct
  misc_feature 1..20: note = antisense sequence
  source 1..20: mol_type = other RNA
cggttatagctgccaagaat

SEQ ID NO: 11313 - RNA, 20 nt, synthetic construct
  misc_feature 1..20: note = antisense sequence
  source 1..20: mol_type = other RNA
tcggttatagctgccaagaa

SEQ ID NO: 11314 - RNA, 20 nt, synthetic construct
  misc_feature 1..20: note = antisense sequence
  source 1..20: mol_type = other RNA
ctcggttatagctgccaaga

SEQ ID NO: 11315 - RNA, 20 nt, synthetic construct
  misc_feature 1..20: note = antisense sequence
  source 1..20: mol_type = other RNA
cctcggttatagctgccaag

SEQ ID NO: 11316 - RNA, 20 nt, synthetic construct
  misc_feature 1..20: note = antisense sequence
  source 1..20: mol_type = other RNA
tcctcggttatagctgccaa

SEQ ID NO: 11317 - RNA, 20 nt, synthetic construct
  misc_feature 1..20: note = antisense sequence
  source 1..20: mol_type = other RNA
ttcctcggttatagctgcca

SEQ ID NO: 11318 - RNA, 20 nt, synthetic construct
  misc_feature 1..20: note = antisense sequence
  source 1..20: mol_type = other RNA
tttcctcggttatagctgcc

SEQ ID NO: 11319 - RNA, 20 nt, synthetic construct
  misc_feature 1..20: note = antisense sequence
  source 1..20: mol_type = other RNA
aatttcctcggttatagctg

SEQ ID NO: 11320 - RNA, 20 nt, synthetic construct
  misc_feature 1..20: note = antisense sequence
  source 1..20: mol_type = other RNA
aaatgcttttcagtgggttc

SEQ ID NO: 11321 - RNA, 20 nt, synthetic construct
  misc_feature 1..20: note = antisense sequence
  source 1..20: mol_type = other RNA
gagccaattcatcagagaca

SEQ ID NO: 11322 - RNA, 20 nt, synthetic construct
  misc_feature 1..20: note = antisense sequence
  source 1..20: mol_type = other RNA
tagagccaattcatcagaga

SEQ ID NO: 11323 - RNA, 20 nt, synthetic construct
  misc_feature 1..20: note = antisense sequence
  source 1..20: mol_type = other RNA
actagagccaattcatcaga

SEQ ID NO: 11324 - RNA, 20 nt, synthetic construct
  misc_feature 1..20: note = antisense sequence
  source 1..20: mol_type = other RNA
gactagagccaattcatcag

SEQ ID NO: 11325 - RNA, 20 nt, synthetic construct
  misc_feature 1..20: note = antisense sequence
  source 1..20: mol_type = other RNA
tgactagagccaattcatca

SEQ ID NO: 11326 - RNA, 20 nt, synthetic construct
  misc_feature 1..20: note = antisense sequence
  source 1..20: mol_type = other RNA
gtgactagagccaattcatc

SEQ ID NO: 11327 - RNA, 20 nt, synthetic construct
  misc_feature 1..20: note = antisense sequence
  source 1..20: mol_type = other RNA
ggtgactagagccaattcat

SEQ ID NO: 11328 - RNA, 20 nt, synthetic construct
  misc_feature 1..20: note = antisense sequence
  source 1..20: mol_type = other RNA
tggtgactagagccaattca

SEQ ID NO: 11329 - RNA, 20 nt, synthetic construct
  misc_feature 1..20: note = antisense sequence
  source 1..20: mol_type = other RNA
aatggtgactagagccaatt

SEQ ID NO: 11330 - RNA, 20 nt, synthetic construct
  misc_feature 1..20: note = antisense sequence
  source 1..20: mol_type = other RNA
caatggtgactagagccaat

SEQ ID NO: 11331 - RNA, 20 nt, synthetic construct
  misc_feature 1..20: note = antisense sequence
  source 1..20: mol_type = other RNA
acaatggtgactagagccaa

SEQ ID NO: 11332 - RNA, 20 nt, synthetic construct
  misc_feature 1..20: note = antisense sequence
  source 1..20: mol_type = other RNA
aacaatggtgactagagcca

SEQ ID NO: 11333 - RNA, 20 nt, synthetic construct
  misc_feature 1..20: note = antisense sequence
  source 1..20: mol_type = other RNA
ccagagttttaacaatggtg

SEQ ID NO: 11334 - RNA, 20 nt, synthetic construct
  misc_feature 1..20: note = antisense sequence
  source 1..20: mol_type = other RNA
ctcccagagttttaacaatg

SEQ ID NO: 11335 - RNA, 20 nt, synthetic construct
  misc_feature 1..20: note = antisense sequence
  source 1..20: mol_type = other RNA
ctttctcccagagttttaac

SEQ ID NO: 11336 - RNA, 20 nt, synthetic construct
  misc_feature 1..20: note = antisense sequence
  source 1..20: mol_type = other RNA
ataccttccagggcaaatat

SEQ ID NO: 11337 - RNA, 20 nt, synthetic construct
  misc_feature 1..20: note = antisense sequence
  source 1..20: mol_type = other RNA
cataccttccagggcaaata

SEQ ID NO: 11338 - RNA, 20 nt, synthetic construct
  misc_feature 1..20: note = antisense sequence
  source 1..20: mol_type = other RNA
agacataccttccagggcaa

SEQ ID NO: 11339 - RNA, 20 nt, synthetic construct
  misc_feature 1..20: note = antisense sequence
  source 1..20: mol_type = other RNA
tagacataccttccagggca

SEQ ID NO: 11340 - RNA, 20 nt, synthetic construct
  misc_feature 1..20: note = antisense sequence
  source 1..20: mol_type = other RNA
aaatagacataccttccagg

SEQ ID NO: 11341 - RNA, 20 nt, synthetic construct
  misc_feature 1..20: note = antisense sequence
  source 1..20: mol_type = other RNA
agagaacatgcagcaataag

SEQ ID NO: 11342 - RNA, 20 nt, synthetic construct
  misc_feature 1..20: note = antisense sequence
  source 1..20: mol_type = other RNA
ctctagcagacacagtgttg

SEQ ID NO: 11343 - RNA, 20 nt, synthetic construct
  misc_feature 1..20: note = antisense sequence
  source 1..20: mol_type = other RNA
tctctagcagacacagtgtt

SEQ ID NO: 11344 - RNA, 20 nt, synthetic construct
  misc_feature 1..20: note = antisense sequence
  source 1..20: mol_type = other RNA
gcccttacaaagagagtctc

SEQ ID NO: 11345 - RNA, 20 nt, synthetic construct
  misc_feature 1..20: note = antisense sequence
  source 1..20: mol_type = other RNA
tgcccttacaaagagagtct

SEQ ID NO: 11346 - RNA, 20 nt, synthetic construct
  misc_feature 1..20: note = antisense sequence
  source 1..20: mol_type = other RNA
catgcccttacaaagagagt

SEQ ID NO: 11347 - RNA, 20 nt, synthetic construct
  misc_feature 1..20: note = antisense sequence
  source 1..20: mol_type = other RNA
ccatgcccttacaaagagag

SEQ ID NO: 11348 - RNA, 20 nt, synthetic construct
  misc_feature 1..20: note = antisense sequence
  source 1..20: mol_type = other RNA
accatgcccttacaaagaga

SEQ ID NO: 11349 - RNA, 20 nt, synthetic construct
  misc_feature 1..20: note = antisense sequence
  source 1..20: mol_type = other RNA
ttcatcggctgtcccatcag

SEQ ID NO: 11350 - RNA, 20 nt, synthetic construct
  misc_feature 1..20: note = antisense sequence
  source 1..20: mol_type = other RNA
cttcatcggctgtcccatca

SEQ ID NO: 11351 - RNA, 20 nt, synthetic construct
  misc_feature 1..20: note = antisense sequence
  source 1..20: mol_type = other RNA
tcttcatcggctgtcccatc

SEQ ID NO: 11352 - RNA, 20 nt, synthetic construct
  misc_feature 1..20: note = antisense sequence
  source 1..20: mol_type = other RNA
gtcttcatcggctgtcccat

SEQ ID NO: 11353 - RNA, 20 nt, synthetic construct
  misc_feature 1..20: note = antisense sequence
  source 1..20: mol_type = other RNA
tgtcttcatcggctgtccca

SEQ ID NO: 11354 - RNA, 20 nt, synthetic construct
  misc_feature 1..20: note = antisense sequence
  source 1..20: mol_type = other RNA
ttgtcttcatcggctgtccc

SEQ ID NO: 11355 - RNA, 20 nt, synthetic construct
  misc_feature 1..20: note = antisense sequence
  source 1..20: mol_type = other RNA
attgtcttcatcggctgtcc

SEQ ID NO: 11356 - RNA, 20 nt, synthetic construct
  misc_feature 1..20: note = antisense sequence
  source 1..20: mol_type = other RNA
cattgtcttcatcggctgtc

SEQ ID NO: 11357 - RNA, 20 nt, synthetic construct
  misc_feature 1..20: note = antisense sequence
  source 1..20: mol_type = other RNA
ccattgtcttcatcggctgt

SEQ ID NO: 11358 - RNA, 20 nt, synthetic construct
  misc_feature 1..20: note = antisense sequence
  source 1..20: mol_type = other RNA
accattgtcttcatcggctg

SEQ ID NO: 11359 - RNA, 20 nt, synthetic construct
  misc_feature 1..20: note = antisense sequence
  source 1..20: mol_type = other RNA
gaccattgtcttcatcggct

SEQ ID NO: 11360 - RNA, 20 nt, synthetic construct
  misc_feature 1..20: note = antisense sequence
  source 1..20: mol_type = other RNA
tgaccattgtcttcatcggc

SEQ ID NO: 11361 - RNA, 20 nt, synthetic construct
  misc_feature 1..20: note = antisense sequence
  source 1..20: mol_type = other RNA
ttgaccattgtcttcatcgg

SEQ ID NO: 11362 - RNA, 20 nt, synthetic construct
  misc_feature 1..20: note = antisense sequence
  source 1..20: mol_type = other RNA
ctacattgaccattgtcttc

SEQ ID NO: 11363 - RNA, 20 nt, synthetic construct
  misc_feature 1..20: note = antisense sequence
  source 1..20: mol_type = other RNA
catctacattgaccattgtc

SEQ ID NO: 11364 - RNA, 20 nt, synthetic construct
  misc_feature 1..20: note = antisense sequence
  source 1..20: mol_type = other RNA
cacatctacattgaccattg

SEQ ID NO: 11365 - RNA, 20 nt, synthetic construct
  misc_feature 1..20: note = antisense sequence
  source 1..20: mol_type = other RNA
gcacatctacattgaccatt

SEQ ID NO: 11366 - RNA, 20 nt, synthetic construct
  misc_feature 1..20: note = antisense sequence
  source 1..20: mol_type = other RNA
ggcacatctacattgaccat

SEQ ID NO: 11367 - RNA, 20 nt, synthetic construct
  misc_feature 1..20: note = antisense sequence
  source 1..20: mol_type = other RNA
tggcacatctacattgacca

SEQ ID NO: 11368 - RNA, 20 nt, synthetic construct
  misc_feature 1..20: note = antisense sequence
  source 1..20: mol_type = other RNA
ctggcacatctacattgacc

SEQ ID NO: 11369 - RNA, 20 nt, synthetic construct
  misc_feature 1..20: note = antisense sequence
  source 1..20: mol_type = other RNA
tcctggcacatctacattga

SEQ ID NO: 11370 - RNA, 20 nt, synthetic construct
  misc_feature 1..20: note = antisense sequence
  source 1..20: mol_type = other RNA
gtcctggcacatctacattg

SEQ ID NO: 11371 - RNA, 20 nt, synthetic construct
  misc_feature 1..20: note = antisense sequence
  source 1..20: mol_type = other RNA
tgtcctggcacatctacatt

SEQ ID NO: 11372 - RNA, 20 nt, synthetic construct
  misc_feature 1..20: note = antisense sequence
  source 1..20: mol_type = other RNA
tttgtcctggcacatctaca

SEQ ID NO: 11373 - RNA, 20 nt, synthetic construct
  misc_feature 1..20: note = antisense sequence
  source 1..20: mol_type = other RNA
ccaaaccagaggtagtaccc

SEQ ID NO: 11374 - RNA, 20 nt, synthetic construct
  misc_feature 1..20: note = antisense sequence
  source 1..20: mol_type = other RNA
cccaaaccagaggtagtacc

SEQ ID NO: 11375 - RNA, 20 nt, synthetic construct
  misc_feature 1..20: note = antisense sequence
  source 1..20: mol_type = other RNA
acccaaaccagaggtagtac

SEQ ID NO: 11376 - RNA, 20 nt, synthetic construct
  misc_feature 1..20: note = antisense sequence
  source 1..20: mol_type = other RNA
aacccaaaccagaggtagta

SEQ ID NO: 11377 - RNA, 20 nt, synthetic construct
  misc_feature 1..20: note = antisense sequence
  source 1..20: mol_type = other RNA
aaacccaaaccagaggtagt

SEQ ID NO: 11378 - RNA, 20 nt, synthetic construct
  misc_feature 1..20: note = antisense sequence
  source 1..20: mol_type = other RNA
cactcttgtagtagctcaat

SEQ ID NO: 11379 - RNA, 20 nt, synthetic construct
  misc_feature 1..20: note = antisense sequence
  source 1..20: mol_type = other RNA
gcactcttgtagtagctcaa

SEQ ID NO: 11380 - RNA, 20 nt, synthetic construct
  misc_feature 1..20: note = antisense sequence
  source 1..20: mol_type = other RNA
agcactcttgtagtagctca

SEQ ID NO: 11381 - RNA, 20 nt, synthetic construct
  misc_feature 1..20: note = antisense sequence
  source 1..20: mol_type = other RNA
agagcactcttgtagtagct

SEQ ID NO: 11382 - RNA, 20 nt, synthetic construct
  misc_feature 1..20: note = antisense sequence
  source 1..20: mol_type = other RNA
atgggcaaggagcaaaatac

SEQ ID NO: 11383 - RNA, 20 nt, synthetic construct
  misc_feature 1..20: note = antisense sequence
  source 1..20: mol_type = other RNA
cagtcaccattgaaaactca

SEQ ID NO: 11384 - RNA, 20 nt, synthetic construct
  misc_feature 1..20: note = antisense sequence
  source 1..20: mol_type = other RNA
ccagtcaccattgaaaactc

SEQ ID NO: 11385 - RNA, 20 nt, synthetic construct
  misc_feature 1..20: note = antisense sequence
  source 1..20: mol_type = other RNA
gccagtcaccattgaaaact

SEQ ID NO: 11386 - RNA, 20 nt, synthetic construct
  misc_feature 1..20: note = antisense sequence
  source 1..20: mol_type = other RNA
agccagtcaccattgaaaac

SEQ ID NO: 11387 - RNA, 20 nt, synthetic construct
  misc_feature 1..20: note = antisense sequence
  source 1..20: mol_type = other RNA
cagccagtcaccattgaaaa

SEQ ID NO: 11388 - RNA, 20 nt, synthetic construct
  misc_feature 1..20: note = antisense sequence
  source 1..20: mol_type = other RNA
acagccagtcaccattgaaa

SEQ ID NO: 11389 - RNA, 20 nt, synthetic construct
  misc_feature 1..20: note = antisense sequence
  source 1..20: mol_type = other RNA
aacagccagtcaccattgaa

SEQ ID NO: 11390 - RNA, 20 nt, synthetic construct
  misc_feature 1..20: note = antisense sequence
  source 1..20: mol_type = other RNA
caacagccagtcaccattga

SEQ ID NO: 11391 - RNA, 20 nt, synthetic construct
  misc_feature 1..20: note = antisense sequence
  source 1..20: mol_type = other RNA
tcaacagccagtcaccattg

SEQ ID NO: 11392 - RNA, 20 nt, synthetic construct
  misc_feature 1..20: note = antisense sequence
  source 1..20: mol_type = other RNA
ctcaacagccagtcaccatt

SEQ ID NO: 11393 - RNA, 20 nt, synthetic construct
  misc_feature 1..20: note = antisense sequence
  source 1..20: mol_type = other RNA
cctcaacagccagtcaccat

SEQ ID NO: 11394 - RNA, 20 nt, synthetic construct
  misc_feature 1..20: note = antisense sequence
  source 1..20: mol_type = other RNA
tcctcaacagccagtcacca

SEQ ID NO: 11395 - RNA, 20 nt, synthetic construct
  misc_feature 1..20: note = antisense sequence
  source 1..20: mol_type = other RNA
atcctcaacagccagtcacc

SEQ ID NO: 11396 - RNA, 20 nt, synthetic construct
  misc_feature 1..20: note = antisense sequence
  source 1..20: mol_type = other RNA
tatcctcaacagccagtcac

SEQ ID NO: 11397 - RNA, 20 nt, synthetic construct
  misc_feature 1..20: note = antisense sequence
  source 1..20: mol_type = other RNA
ttatcctcaacagccagtca

SEQ ID NO: 11398 - RNA, 20 nt, synthetic construct
  misc_feature 1..20: note = antisense sequence
  source 1..20: mol_type = other RNA
gttatcctcaacagccagtc

SEQ ID NO: 11399 - RNA, 20 nt, synthetic construct
  misc_feature 1..20: note = antisense sequence
  source 1..20: mol_type = other RNA
cgttatcctcaacagccagt

SEQ ID NO: 11400 - RNA, 20 nt, synthetic construct
  misc_feature 1..20: note = antisense sequence
  source 1..20: mol_type = other RNA
ctcgttatcctcaacagcca

SEQ ID NO: 11401 - RNA, 20 nt, synthetic construct
  misc_feature 1..20: note = antisense sequence
  source 1..20: mol_type = other RNA
actcgttatcctcaacagcc

SEQ ID NO: 11402 - RNA, 20 nt, synthetic construct
  misc_feature 1..20: note = antisense sequence
  source 1..20: mol_type = other RNA
aactcgttatcctcaacagc

SEQ ID NO: 11403 - RNA, 20 nt, synthetic construct
  misc_feature 1..20: note = antisense sequence
  source 1..20: mol_type = other RNA
taactcgttatcctcaacag

SEQ ID NO: 11404 - RNA, 20 nt, synthetic construct
  misc_feature 1..20: note = antisense sequence
  source 1..20: mol_type = other RNA
gggaatgccataactcgtta

SEQ ID NO: 11405 - RNA, 20 nt, synthetic construct
  misc_feature 1..20: note = antisense sequence
  source 1..20: mol_type = other RNA
agggaatgccataactcgtt

SEQ ID NO: 11406 - RNA, 20 nt, synthetic construct
  misc_feature 1..20: note = antisense sequence
  source 1..20: mol_type = other RNA
tagggaatgccataactcgt

SEQ ID NO: 11407 - RNA, 20 nt, synthetic construct
  misc_feature 1..20: note = antisense sequence
  source 1..20: mol_type = other RNA
atagggaatgccataactcg

SEQ ID NO: 11408 - RNA, 20 nt, synthetic construct
  misc_feature 1..20: note = antisense sequence
  source 1..20: mol_type = other RNA
aatagggaatgccataactc

SEQ ID NO: 11409 - RNA, 20 nt, synthetic construct
  misc_feature 1..20: note = antisense sequence
  source 1..20: mol_type = other RNA
agaatagggaatgccataac

SEQ ID NO: 11410 - RNA, 20 nt, synthetic construct
  misc_feature 1..20: note = antisense sequence
  source 1..20: mol_type = other RNA
cagaatagggaatgccataa

SEQ ID NO: 11411 - RNA, 20 nt, synthetic construct
  misc_feature 1..20: note = antisense sequence
  source 1..20: mol_type = other RNA
gcagaatagggaatgccata

SEQ ID NO: 11412 - RNA, 20 nt, synthetic construct
  misc_feature 1..20: note = antisense sequence
  source 1..20: mol_type = other RNA
taaggcagaatagggaatgc

SEQ ID NO: 11413 - RNA, 20 nt, synthetic construct
  misc_feature 1..20: note = antisense sequence
  source 1..20: mol_type = other RNA
ctaaggcagaatagggaatg

SEQ ID NO: 11414 - RNA, 20 nt, synthetic construct
  misc_feature 1..20: note = antisense sequence
  source 1..20: mol_type = other RNA
ctctacctaaggcagaatag

SEQ ID NO: 11415 - RNA, 20 nt, synthetic construct
  misc_feature 1..20: note = antisense sequence
  source 1..20: mol_type = other RNA
tcctctacctaaggcagaat

SEQ ID NO: 11416 - RNA, 20 nt, synthetic construct
  misc_feature 1..20: note = antisense sequence
  source 1..20: mol_type = other RNA
atcctctacctaaggcagaa

SEQ ID NO: 11417 - RNA, 20 nt, synthetic construct
  misc_feature 1..20: note = antisense sequence
  source 1..20: mol_type = other RNA
catcctctacctaaggcaga

SEQ ID NO: 11418 - RNA, 20 nt, synthetic construct
  misc_feature 1..20: note = antisense sequence
  source 1..20: mol_type = other RNA
acatcctctacctaaggcag

SEQ ID NO: 11419 - RNA, 20 nt, synthetic construct
  misc_feature 1..20: note = antisense sequence
  source 1..20: mol_type = other RNA
gacatcctctacctaaggca

SEQ ID NO: 11420 - RNA, 20 nt, synthetic construct
  misc_feature 1..20: note = antisense sequence
  source 1..20: mol_type = other RNA
tgacatcctctacctaaggc

SEQ ID NO: 11421 - RNA, 20 nt, synthetic construct
  misc_feature 1..20: note = antisense sequence
  source 1..20: mol_type = other RNA
ttgacatcctctacctaagg

SEQ ID NO: 11422 - RNA, 20 nt, synthetic construct
  misc_feature 1..20: note = antisense sequence
  source 1..20: mol_type = other RNA
cttgacatcctctacctaag

SEQ ID NO: 11423 - RNA, 20 nt, synthetic construct
  misc_feature 1..20: note = antisense sequence
  source 1..20: mol_type = other RNA
acttgacatcctctacctaa

SEQ ID NO: 11424 - RNA, 20 nt, synthetic construct
  misc_feature 1..20: note = antisense sequence
  source 1..20: mol_type = other RNA
tacttgacatcctctaccta

SEQ ID NO: 11425 - RNA, 20 nt, synthetic construct
  misc_feature 1..20: note = antisense sequence
  source 1..20: mol_type = other RNA
gctacttgacatcctctacc

SEQ ID NO: 11426 - RNA, 20 nt, synthetic construct
  misc_feature 1..20: note = antisense sequence
  source 1..20: mol_type = other RNA
agctacttgacatcctctac

SEQ ID NO: 11427 - RNA, 20 nt, synthetic construct
  misc_feature 1..20: note = antisense sequence
  source 1..20: mol_type = other RNA
gaaagatcgagttccaaagt

SEQ ID NO: 11428 - RNA, 20 nt, synthetic construct
  misc_feature 1..20: note = antisense sequence
  source 1..20: mol_type = other RNA
gcctggcataacaattctga

SEQ ID NO: 11429 - RNA, 20 nt, synthetic construct
  misc_feature 1..20: note = antisense sequence
  source 1..20: mol_type = other RNA
tttgcctggcataacaattc

SEQ ID NO: 11430 - RNA, 20 nt, synthetic construct
  misc_feature 1..20: note = antisense sequence
  source 1..20: mol_type = other RNA
gtttgcctggcataacaatt

SEQ ID NO: 11431 - RNA, 20 nt, synthetic construct
  misc_feature 1..20: note = antisense sequence
  source 1..20: mol_type = other RNA
agtttgcctggcataacaat

SEQ ID NO: 11432 - RNA, 20 nt, synthetic construct
  misc_feature 1..20: note = antisense sequence
  source 1..20: mol_type = other RNA
cagtttgcctggcataacaa

SEQ ID NO: 11433 - RNA, 20 nt, synthetic construct
  misc_feature 1..20: note = antisense sequence
  source 1..20: mol_type = other RNA
ccctgagactagagatcatc

SEQ ID NO: 11434 - RNA, 20 nt, synthetic construct
  misc_feature 1..20: note = antisense sequence
  source 1..20: mol_type = other RNA
ttccctgagactagagatca

SEQ ID NO: 11435 - RNA, 20 nt, synthetic construct
  misc_feature 1..20: note = antisense sequence
  source 1..20: mol_type = other RNA
gttccctgagactagagatc

SEQ ID NO: 11436 - RNA, 20 nt, synthetic construct
  misc_feature 1..20: note = antisense sequence
  source 1..20: mol_type = other RNA
tgttccctgagactagagat

SEQ ID NO: 11437 - RNA, 20 nt, synthetic construct
  misc_feature 1..20: note = antisense sequence
  source 1..20: mol_type = other RNA
atgttccctgagactagaga

SEQ ID NO: 11438 - RNA, 20 nt, synthetic construct
  misc_feature 1..20: note = antisense sequence
  source 1..20: mol_type = other RNA
catgttccctgagactagag

SEQ ID NO: 11439 - RNA, 20 nt, synthetic construct
  misc_feature 1..20: note = antisense sequence
  source 1..20: mol_type = other RNA
gcatgttccctgagactaga

SEQ ID NO: 11440 - RNA, 20 nt, synthetic construct
  misc_feature 1..20: note = antisense sequence
  source 1..20: mol_type = other RNA
gcgcatgttccctgagacta

SEQ ID NO: 11441 - RNA, 20 nt, synthetic construct
  misc_feature 1..20: note = antisense sequence
  source 1..20: mol_type = other RNA
ggcgcatgttccctgagact

SEQ ID NO: 11442 - RNA, 20 nt, synthetic construct
  misc_feature 1..20: note = antisense sequence
  source 1..20: mol_type = other RNA
aggcgcatgttccctgagac

SEQ ID NO: 11443 - RNA, 20 nt, synthetic construct
  misc_feature 1..20: note = antisense sequence
  source 1..20: mol_type = other RNA
aaggcgcatgttccctgaga

SEQ ID NO: 11444 - RNA, 20 nt, synthetic construct
  misc_feature 1..20: note = antisense sequence
  source 1..20: mol_type = other RNA
aaaggcgcatgttccctgag

SEQ ID NO: 11445 - RNA, 20 nt, synthetic construct
  misc_feature 1..20: note = antisense sequence
  source 1..20: mol_type = other RNA
aaaaggcgcatgttccctga

SEQ ID NO: 11446 - RNA, 20 nt, synthetic construct
  misc_feature 1..20: note = antisense sequence
  source 1..20: mol_type = other RNA
gaaaaggcgcatgttccctg

SEQ ID NO: 11447 - RNA, 20 nt, synthetic construct
  misc_feature 1..20: note = antisense sequence
  source 1..20: mol_type = other RNA
agaaaaggcgcatgttccct

SEQ ID NO: 11448 - RNA, 20 nt, synthetic construct
  misc_feature 1..20: note = antisense sequence
  source 1..20: mol_type = other RNA
gagaaaaggcgcatgttccc

SEQ ID NO: 11449 - RNA, 20 nt, synthetic construct
  misc_feature 1..20: note = antisense sequence
  source 1..20: mol_type = other RNA
ggagaaaaggcgcatgttcc

SEQ ID NO: 11450 - RNA, 20 nt, synthetic construct
  misc_feature 1..20: note = antisense sequence
  source 1..20: mol_type = other RNA
tggagaaaaggcgcatgttc

SEQ ID NO: 11451 - RNA, 20 nt, synthetic construct
  misc_feature 1..20: note = antisense sequence
  source 1..20: mol_type = other RNA
gttggagaaaaggcgcatgt

SEQ ID NO: 11452 - RNA, 20 nt, synthetic construct
  misc_feature 1..20: note = antisense sequence
  source 1..20: mol_type = other RNA
agttggagaaaaggcgcatg

SEQ ID NO: 11453 - RNA, 20 nt, synthetic construct
  misc_feature 1..20: note = antisense sequence
  source 1..20: mol_type = other RNA
tagttggagaaaaggcgcat

SEQ ID NO: 11454 - RNA, 20 nt, synthetic construct
  misc_feature 1..20: note = antisense sequence
  source 1..20: mol_type = other RNA
ctagttggagaaaaggcgca

SEQ ID NO: 11455 - RNA, 20 nt, synthetic construct
  misc_feature 1..20: note = antisense sequence
  source 1..20: mol_type = other RNA
cctagttggagaaaaggcgc

SEQ ID NO: 11456 - RNA, 20 nt, synthetic construct
  misc_feature 1..20: note = antisense sequence
  source 1..20: mol_type = other RNA
ccctagttggagaaaaggcg

SEQ ID NO: 11457 - RNA, 20 nt, synthetic construct
  misc_feature 1..20: note = antisense sequence
  source 1..20: mol_type = other RNA
tggtggtttctctccctagt

SEQ ID NO: 11458 - RNA, 20 nt, synthetic construct
  misc_feature 1..20: note = antisense sequence
  source 1..20: mol_type = other RNA
atttggatgtagcctaaggg

SEQ ID NO: 11459 - RNA, 20 nt, synthetic construct
  misc_feature 1..20: note = antisense sequence
  source 1..20: mol_type = other RNA
gatttggatgtagcctaagg

SEQ ID NO: 11460 - RNA, 20 nt, synthetic construct
  misc_feature 1..20: note = antisense sequence
  source 1..20: mol_type = other RNA
ggatttggatgtagcctaag

SEQ ID NO: 11461 - RNA, 20 nt, synthetic construct
  misc_feature 1..20: note = antisense sequence
  source 1..20: mol_type = other RNA
actggatttggatgtagcct

SEQ ID NO: 11462 - RNA, 20 nt, synthetic construct
  misc_feature 1..20: note = antisense sequence
  source 1..20: mol_type = other RNA
aactggatttggatgtagcc

SEQ ID NO: 11463 - RNA, 20 nt, synthetic construct
  misc_feature 1..20: note = antisense sequence
  source 1..20: mol_type = other RNA
caactggatttggatgtagc

SEQ ID NO: 11464 - RNA, 20 nt, synthetic construct
  misc_feature 1..20: note = antisense sequence
  source 1..20: mol_type = other RNA
ggtcaactggatttggatgt

SEQ ID NO: 11465 - RNA, 20 nt, synthetic construct
  misc_feature 1..20: note = antisense sequence
  source 1..20: mol_type = other RNA
cagggtcaactggatttgga

SEQ ID NO: 11466 - RNA, 20 nt, synthetic construct
  misc_feature 1..20: note = antisense sequence
  source 1..20: mol_type = other RNA
acagggtcaactggatttgg

SEQ ID NO: 11467 - RNA, 20 nt, synthetic construct
  misc_feature 1..20: note = antisense sequence
  source 1..20: mol_type = other RNA
ggacagggtcaactggattt

SEQ ID NO: 11468 - RNA, 20 nt, synthetic construct
  misc_feature 1..20: note = antisense sequence
  source 1..20: mol_type = other RNA
aggacagggtcaactggatt

SEQ ID NO: 11469 - RNA, 20 nt, synthetic construct
  misc_feature 1..20: note = antisense sequence
  source 1..20: mol_type = other RNA
aaggacagggtcaactggat

SEQ ID NO: 11470 - RNA, 20 nt, synthetic construct
  misc_feature 1..20: note = antisense sequence
  source 1..20: mol_type = other RNA
caaggacagggtcaactgga

SEQ ID NO: 11471 - RNA, 20 nt, synthetic construct
  misc_feature 1..20: note = antisense sequence
  source 1..20: mol_type = other RNA
ctcacaaggacagggtcaac

SEQ ID NO: 11472 - RNA, 20 nt, synthetic construct
  misc_feature 1..20: note = antisense sequence
  source 1..20: mol_type = other RNA
acagtctttcagtgtgtcct

SEQ ID NO: 11473 - RNA, 20 nt, synthetic construct
  misc_feature 1..20: note = antisense sequence
  source 1..20: mol_type = other RNA
aacagtctttcagtgtgtcc

SEQ ID NO: 11474 - RNA, 20 nt, synthetic construct
  misc_feature 1..20: note = antisense sequence
  source 1..20: mol_type = other RNA
caacagtctttcagtgtgtc

SEQ ID NO: 11475 - RNA, 20 nt, synthetic construct
  misc_feature 1..20: note = antisense sequence
  source 1..20: mol_type = other RNA
cagggaaactgagaaagtgc

SEQ ID NO: 11476 - RNA, 20 nt, synthetic construct
  misc_feature 1..20: note = antisense sequence
  source 1..20: mol_type = other RNA
cgctcaatcaaaatggtcta

SEQ ID NO: 11477 - RNA, 20 nt, synthetic construct
  misc_feature 1..20: note = antisense sequence
  source 1..20: mol_type = other RNA
gacgctcaatcaaaatggtc

SEQ ID NO: 11478 - RNA, 20 nt, synthetic construct
  misc_feature 1..20: note = antisense sequence
  source 1..20: mol_type = other RNA
tgacgctcaatcaaaatggt

SEQ ID NO: 11479 - RNA, 20 nt, synthetic construct
  misc_feature 1..20: note = antisense sequence
  source 1..20: mol_type = other RNA
gttattatcgtgagtcacac

SEQ ID NO: 11480 - RNA, 20 nt, synthetic construct
  misc_feature 1..20: note = antisense sequence
  source 1..20: mol_type = other RNA
ccatcacagtgcatcacatg

SEQ ID NO: 11481 - RNA, 20 nt, synthetic construct
  misc_feature 1..20: note = antisense sequence
  source 1..20: mol_type = other RNA
aaccatcacagtgcatcaca

SEQ ID NO: 11482 - RNA, 20 nt, synthetic construct
  misc_feature 1..20: note = antisense sequence
  source 1..20: mol_type = other RNA
aaaccatcacagtgcatcac

SEQ ID NO: 11483 - RNA, 20 nt, synthetic construct
  misc_feature 1..20: note = antisense sequence
  source 1..20: mol_type = other RNA
ggtagaatggaattgatgag

SEQ ID NO: 11484 - RNA, 20 nt, synthetic construct
  misc_feature 1..20: note = antisense sequence
  source 1..20: mol_type = other RNA
gggtagaatggaattgatga

SEQ ID NO: 11485 - RNA, 20 nt, synthetic construct
  misc_feature 1..20: note = antisense sequence
  source 1..20: mol_type = other RNA
agggtagaatggaattgatg

SEQ ID NO: 11486 - RNA, 20 nt, synthetic construct
  misc_feature 1..20: note = antisense sequence
  source 1..20: mol_type = other RNA
gagattagggtagaatggaa

SEQ ID NO: 11487 - RNA, 20 nt, synthetic construct
  misc_feature 1..20: note = antisense sequence
  source 1..20: mol_type = other RNA
aagagattagggtagaatgg

SEQ ID NO: 11488 - RNA, 20 nt, synthetic construct
  misc_feature 1..20: note = antisense sequence
  source 1..20: mol_type = other RNA
agactgagtatagccagcat

SEQ ID NO: 11489 - RNA, 20 nt, synthetic construct
  misc_feature 1..20: note = antisense sequence
  source 1..20: mol_type = other RNA
cagactgagtatagccagca

SEQ ID NO: 11490 - RNA, 20 nt, synthetic construct
  misc_feature 1..20: note = antisense sequence
  source 1..20: mol_type = other RNA
acagactgagtatagccagc

SEQ ID NO: 11491 - RNA, 20 nt, synthetic construct
  misc_feature 1..20: note = antisense sequence
  source 1..20: mol_type = other RNA
aacagactgagtatagccag

SEQ ID NO: 11492 - RNA, 20 nt, synthetic construct
  misc_feature 1..20: note = antisense sequence
  source 1..20: mol_type = other RNA
caacagactgagtatagcca

SEQ ID NO: 11493 - RNA, 20 nt, synthetic construct
  misc_feature 1..20: note = antisense sequence
  source 1..20: mol_type = other RNA
tcaacagactgagtatagcc

SEQ ID NO: 11494 - RNA, 20 nt, synthetic construct
  misc_feature 1..20: note = antisense sequence
  source 1..20: mol_type = other RNA
catgaaatcaacagactgag

SEQ ID NO: 11495 - RNA, 20 nt, synthetic construct
  misc_feature 1..20: note = antisense sequence
  source 1..20: mol_type = other RNA
gtacggattgtgacccagtc

SEQ ID NO: 11496 - RNA, 20 nt, synthetic construct
  misc_feature 1..20: note = antisense sequence
  source 1..20: mol_type = other RNA
agtacggattgtgacccagt

SEQ ID NO: 11497 - RNA, 20 nt, synthetic construct
  misc_feature 1..20: note = antisense sequence
  source 1..20: mol_type = other RNA
aagtacggattgtgacccag

SEQ ID NO: 11498 - RNA, 20 nt, synthetic construct
  misc_feature 1..20: note = antisense sequence
  source 1..20: mol_type = other RNA
taagtacggattgtgaccca

SEQ ID NO: 11499 - RNA, 20 nt, synthetic construct
  misc_feature 1..20: note = antisense sequence
  source 1..20: mol_type = other RNA
ctaagtacggattgtgaccc

SEQ ID NO: 11500 - RNA, 20 nt, synthetic construct
  misc_feature 1..20: note = antisense sequence
  source 1..20: mol_type = other RNA
tctaagtacggattgtgacc

SEQ ID NO: 11501 - RNA, 20 nt, synthetic construct
  misc_feature 1..20: note = antisense sequence
  source 1..20: mol_type = other RNA
ttctaagtacggattgtgac

SEQ ID NO: 11502 - RNA, 20 nt, synthetic construct
  misc_feature 1..20: note = antisense sequence
  source 1..20: mol_type = other RNA
tgtagattcctatcacctct

SEQ ID NO: 11503 - RNA, 20 nt, synthetic construct
  misc_feature 1..20: note = antisense sequence
  source 1..20: mol_type = other RNA
cctgtagattcctatcacct

SEQ ID NO: 11504 - RNA, 20 nt, synthetic construct
  misc_feature 1..20: note = antisense sequence
  source 1..20: mol_type = other RNA
gcctgtagattcctatcacc

SEQ ID NO: 11505 - RNA, 20 nt, synthetic construct
  misc_feature 1..20: note = antisense sequence
  source 1..20: mol_type = other RNA
ggcctgtagattcctatcac

SEQ ID NO: 11506 - RNA, 20 nt, synthetic construct
  misc_feature 1..20: note = antisense sequence
  source 1..20: mol_type = other RNA
tggcctgtagattcctatca

SEQ ID NO: 11507 - RNA, 20 nt, synthetic construct
  misc_feature 1..20: note = antisense sequence
  source 1..20: mol_type = other RNA
gctggcctgtagattcctat

SEQ ID NO: 11508 - RNA, 20 nt, synthetic construct
  misc_feature 1..20: note = antisense sequence
  source 1..20: mol_type = other RNA
tggctggcctgtagattcct

SEQ ID NO: 11509 - RNA, 20 nt, synthetic construct
  misc_feature 1..20: note = antisense sequence
  source 1..20: mol_type = other RNA
gtctggctggcctgtagatt

SEQ ID NO: 11510 - RNA, 20 nt, synthetic construct
  misc_feature 1..20: note = antisense sequence
  source 1..20: mol_type = other RNA
agtctggctggcctgtagat

SEQ ID NO: 11511 - RNA, 20 nt, synthetic construct
  misc_feature 1..20: note = antisense sequence
  source 1..20: mol_type = other RNA
tcagtctggctggcctgtag

SEQ ID NO: 11512 - RNA, 20 nt, synthetic construct
  misc_feature 1..20: note = antisense sequence
  source 1..20: mol_type = other RNA
attcagtctggctggcctgt

SEQ ID NO: 11513 - RNA, 20 nt, synthetic construct
  misc_feature 1..20: note = antisense sequence
  source 1..20: mol_type = other RNA
gaaattcagtctggctggcc

SEQ ID NO: 11514 - RNA, 20 nt, synthetic construct
  misc_feature 1..20: note = antisense sequence
  source 1..20: mol_type = other RNA
agaaattcagtctggctggc

SEQ ID NO: 11515 - RNA, 20 nt, synthetic construct
  misc_feature 1..20: note = antisense sequence
  source 1..20: mol_type = other RNA
gaggcacagaaattcagtct

SEQ ID NO: 11516 - RNA, 20 nt, synthetic construct
  misc_feature 1..20: note = antisense sequence
  source 1..20: mol_type = other RNA
gggaggcacagaaattcagt

SEQ ID NO: 11517 - RNA, 20 nt, synthetic construct
  misc_feature 1..20: note = antisense sequence
  source 1..20: mol_type = other RNA
ggactccagactcataaaca

SEQ ID NO: 11518 - RNA, 20 nt, synthetic construct
  misc_feature 1..20: note = antisense sequence
  source 1..20: mol_type = other RNA
ggagagctgttgagagacca

SEQ ID NO: 11519 - RNA, 20 nt, synthetic construct
  misc_feature 1..20: note = antisense sequence
  source 1..20: mol_type = other RNA
gggagagctgttgagagacc

SEQ ID NO: 11520 - RNA, 20 nt, synthetic construct
  misc_feature 1..20: note = antisense sequence
  source 1..20: mol_type = other RNA
cgggagagctgttgagagac

SEQ ID NO: 11521 - RNA, 20 nt, synthetic construct
  misc_feature 1..20: note = antisense sequence
  source 1..20: mol_type = other RNA
caccgggagagctgttgaga

SEQ ID NO: 11522 - RNA, 20 nt, synthetic construct
  misc_feature 1..20: note = antisense sequence
  source 1..20: mol_type = other RNA
acaccgggagagctgttgag

SEQ ID NO: 11523 - RNA, 20 nt, synthetic construct
  misc_feature 1..20: note = antisense sequence
  source 1..20: mol_type = other RNA
gacaccgggagagctgttga

SEQ ID NO: 11524 - RNA, 20 nt, synthetic construct
  misc_feature 1..20: note = antisense sequence
  source 1..20: mol_type = other RNA
tgacaccgggagagctgttg

SEQ ID NO: 11525 - RNA, 20 nt, synthetic construct
  misc_feature 1..20: note = antisense sequence
  source 1..20: mol_type = other RNA
atgacaccgggagagctgtt

SEQ ID NO: 11526 - RNA, 20 nt, synthetic construct
  misc_feature 1..20: note = antisense sequence
  source 1..20: mol_type = other RNA
aatgacaccgggagagctgt

SEQ ID NO: 11527 - RNA, 20 nt, synthetic construct
  misc_feature 1..20: note = antisense sequence
  source 1..20: mol_type = other RNA
taaatgacaccgggagagct

SEQ ID NO: 11528 - RNA, 20 nt, synthetic construct
  misc_feature 1..20: note = antisense sequence
  source 1..20: mol_type = other RNA
gtaaatgacaccgggagagc

SEQ ID NO: 11529 - RNA, 20 nt, synthetic construct
  misc_feature 1..20: note = antisense sequence
  source 1..20: mol_type = other RNA
ggtaaatgacaccgggagag

SEQ ID NO: 11530 - RNA, 20 nt, synthetic construct
  misc_feature 1..20: note = antisense sequence
  source 1..20: mol_type = other RNA
tggtaaatgacaccgggaga

SEQ ID NO: 11531 - RNA, 20 nt, synthetic construct
  misc_feature 1..20: note = antisense sequence
  source 1..20: mol_type = other RNA
ttggtaaatgacaccgggag

SEQ ID NO: 11532 - RNA, 20 nt, synthetic construct
  misc_feature 1..20: note = antisense sequence
  source 1..20: mol_type = other RNA
attggtaaatgacaccggga

SEQ ID NO: 11533 - RNA, 20 nt, synthetic construct
  misc_feature 1..20: note = antisense sequence
  source 1..20: mol_type = other RNA
tattggtaaatgacaccggg

SEQ ID NO: 11534 - RNA, 20 nt, synthetic construct
  misc_feature 1..20: note = antisense sequence
  source 1..20: mol_type = other RNA
ttattggtaaatgacaccgg

SEQ ID NO: 11535 - RNA, 20 nt, synthetic construct
  misc_feature 1..20: note = antisense sequence
  source 1..20: mol_type = other RNA
ccaagctcataatctggttt

SEQ ID NO: 11536 - RNA, 20 nt, synthetic construct
  misc_feature 1..20: note = antisense sequence
  source 1..20: mol_type = other RNA
gccaagctcataatctggtt

SEQ ID NO: 11537 - RNA, 20 nt, synthetic construct
  misc_feature 1..20: note = antisense sequence
  source 1..20: mol_type = other RNA
agccaagctcataatctggt

SEQ ID NO: 11538 - RNA, 20 nt, synthetic construct
  misc_feature 1..20: note = antisense sequence
  source 1..20: mol_type = other RNA
cagccaagctcataatctgg

SEQ ID NO: 11539 - RNA, 20 nt, synthetic construct
  misc_feature 1..20: note = antisense sequence
  source 1..20: mol_type = other RNA
gccagccaagctcataatct

SEQ ID NO: 11540 - RNA, 20 nt, synthetic construct
  misc_feature 1..20: note = antisense sequence
  source 1..20: mol_type = other RNA
aggccagccaagctcataat

SEQ ID NO: 11541 - RNA, 20 nt, synthetic construct
  misc_feature 1..20: note = antisense sequence
  source 1..20: mol_type = other RNA
taaggccagccaagctcata

SEQ ID NO: 11542 - RNA, 20 nt, synthetic construct
  misc_feature 1..20: note = antisense sequence
  source 1..20: mol_type = other RNA
ttaaggccagccaagctcat

SEQ ID NO: 11543 - RNA, 20 nt, synthetic construct
  misc_feature 1..20: note = antisense sequence
  source 1..20: mol_type = other RNA
acacaattagttggaagacc

SEQ ID NO: 11544 - RNA, 20 nt, synthetic construct
  misc_feature 1..20: note = antisense sequence
  source 1..20: mol_type = other RNA
ctatcatatcttagcccatg

SEQ ID NO: 11545 - RNA, 20 nt, synthetic construct
  misc_feature 1..20: note = antisense sequence
  source 1..20: mol_type = other RNA
cctgtcacctttaatccatg

SEQ ID NO: 11546 - RNA, 20 nt, synthetic construct
  misc_feature 1..20: note = antisense sequence
  source 1..20: mol_type = other RNA
gggctcttcaacctgtcacc

SEQ ID NO: 11547 - RNA, 20 nt, synthetic construct
  misc_feature 1..20: note = antisense sequence
  source 1..20: mol_type = other RNA
tttgggctcttcaacctgtc

SEQ ID NO: 11548 - RNA, 20 nt, synthetic construct
  misc_feature 1..20: note = antisense sequence
  source 1..20: mol_type = other RNA
gtttgggctcttcaacctgt

SEQ ID NO: 11549 - RNA, 20 nt, synthetic construct
  misc_feature 1..20: note = antisense sequence
  source 1..20: mol_type = other RNA
gtgtttgggctcttcaacct

SEQ ID NO: 11550 - RNA, 20 nt, synthetic construct
  misc_feature 1..20: note = antisense sequence
  source 1..20: mol_type = other RNA
agtgtttgggctcttcaacc

SEQ ID NO: 11551 - RNA, 20 nt, synthetic construct
  misc_feature 1..20: note = antisense sequence
  source 1..20: mol_type = other RNA
gagtgtttgggctcttcaac

SEQ ID NO: 11552 - RNA, 20 nt, synthetic construct
  misc_feature 1..20: note = antisense sequence
  source 1..20: mol_type = other RNA
ggagtgtttgggctcttcaa

SEQ ID NO: 11553 - RNA, 20 nt, synthetic construct
  misc_feature 1..20: note = antisense sequence
  source 1..20: mol_type = other RNA
tggagtgtttgggctcttca

SEQ ID NO: 11554 - RNA, 20 nt, synthetic construct
  misc_feature 1..20: note = antisense sequence
  source 1..20: mol_type = other RNA
cttggagtgtttgggctctt

SEQ ID NO: 11555 - RNA, 20 nt, synthetic construct
  misc_feature 1..20: note = antisense sequence
  source 1..20: mol_type = other RNA
tcttggagtgtttgggctct

SEQ ID NO: 11556 - RNA, 20 nt, synthetic construct
  misc_feature 1..20: note = antisense sequence
  source 1..20: mol_type = other RNA
agagacttcttggagtgttt

SEQ ID NO: 11557 - RNA, 20 nt, synthetic construct
  misc_feature 1..20: note = antisense sequence
  source 1..20: mol_type = other RNA
atagagacttcttggagtgt

SEQ ID NO: 11558 - RNA, 20 nt, synthetic construct
  misc_feature 1..20: note = antisense sequence
  source 1..20: mol_type = other RNA
tatagagacttcttggagtg

SEQ ID NO: 11559 - RNA, 20 nt, synthetic construct
  misc_feature 1..20: note = antisense sequence
  source 1..20: mol_type = other RNA
gtagtgtagcaacaaagatg

SEQ ID NO: 11560 - RNA, 20 nt, synthetic construct
  misc_feature 1..20: note = antisense sequence
  source 1..20: mol_type = other RNA
gtgtagtgtagcaacaaaga

SEQ ID NO: 11561 - RNA, 20 nt, synthetic construct
  misc_feature 1..20: note = antisense sequence
  source 1..20: mol_type = other RNA
ggtgtagtgtagcaacaaag

SEQ ID NO: 11562 - RNA, 20 nt, synthetic construct
  misc_feature 1..20: note = antisense sequence
  source 1..20: mol_type = other RNA
ttggtgtagtgtagcaacaa

SEQ ID NO: 11563 - RNA, 20 nt, synthetic construct
  misc_feature 1..20: note = antisense sequence
  source 1..20: mol_type = other RNA
tttggtgtagtgtagcaaca

SEQ ID NO: 11564 - RNA, 20 nt, synthetic construct
  misc_feature 1..20: note = antisense sequence
  source 1..20: mol_type = other RNA
ttttggtgtagtgtagcaac

SEQ ID NO: 11565 - RNA, 20 nt, synthetic construct
  misc_feature 1..20: note = antisense sequence
  source 1..20: mol_type = other RNA
gcttttggtgtagtgtagca

SEQ ID NO: 11566 - RNA, 20 nt, synthetic construct
  misc_feature 1..20: note = antisense sequence
  source 1..20: mol_type = other RNA
tgcttttggtgtagtgtagc

SEQ ID NO: 11567 - RNA, 20 nt, synthetic construct
  misc_feature 1..20: note = antisense sequence
  source 1..20: mol_type = other RNA
agtctagtcaaaacactgct

SEQ ID NO: 11568 - RNA, 20 nt, synthetic construct
  misc_feature 1..20: note = antisense sequence
  source 1..20: mol_type = other RNA
tagtctagtcaaaacactgc

SEQ ID NO: 11569 - RNA, 20 nt, synthetic construct
  misc_feature 1..20: note = antisense sequence
  source 1..20: mol_type = other RNA
tcccgagcaacaaagaaata

SEQ ID NO: 11570 - RNA, 20 nt, synthetic construct
  misc_feature 1..20: note = antisense sequence
  source 1..20: mol_type = other RNA
ttcccgagcaacaaagaaat

SEQ ID NO: 11571 - RNA, 20 nt, synthetic construct
  misc_feature 1..20: note = antisense sequence
  source 1..20: mol_type = other RNA
atttcccgagcaacaaagaa

SEQ ID NO: 11572 - RNA, 20 nt, synthetic construct
  misc_feature 1..20: note = antisense sequence
  source 1..20: mol_type = other RNA
gatttcccgagcaacaaaga

SEQ ID NO: 11573 - RNA, 20 nt, synthetic construct
  misc_feature 1..20: note = antisense sequence
  source 1..20: mol_type = other RNA
agatttcccgagcaacaaag

SEQ ID NO: 11574 - RNA, 20 nt, synthetic construct
  misc_feature 1..20: note = antisense sequence
  source 1..20: mol_type = other RNA
gagatttcccgagcaacaaa

SEQ ID NO: 11575 - RNA, 20 nt, synthetic construct
  misc_feature 1..20: note = antisense sequence
  source 1..20: mol_type = other RNA
ggagatttcccgagcaacaa

SEQ ID NO: 11576 - RNA, 20 nt, synthetic construct
  misc_feature 1..20: note = antisense sequence
  source 1..20: mol_type = other RNA
tggagatttcccgagcaaca

SEQ ID NO: 11577 - RNA, 20 nt, synthetic construct
  misc_feature 1..20: note = antisense sequence
  source 1..20: mol_type = other RNA
aatggagatttcccgagcaa

SEQ ID NO: 11578 - RNA, 20 nt, synthetic construct
  misc_feature 1..20: note = antisense sequence
  source 1..20: mol_type = other RNA
cacagctacttgtcatctta

SEQ ID NO: 11579 - RNA, 20 nt, synthetic construct
  misc_feature 1..20: note = antisense sequence
  source 1..20: mol_type = other RNA
tcacagctacttgtcatctt

SEQ ID NO: 11580 - RNA, 20 nt, synthetic construct
  misc_feature 1..20: note = antisense sequence
  source 1..20: mol_type = other RNA
atcacagctacttgtcatct

SEQ ID NO: 11581 - RNA, 20 nt, synthetic construct
  misc_feature 1..20: note = antisense sequence
  source 1..20: mol_type = other RNA
aatcacagctacttgtcatc

SEQ ID NO: 11582 - RNA, 20 nt, synthetic construct
  misc_feature 1..20: note = antisense sequence
  source 1..20: mol_type = other RNA
aagcaagtccttggcatact

SEQ ID NO: 11583 - RNA, 20 nt, synthetic construct
  misc_feature 1..20: note = antisense sequence
  source 1..20: mol_type = other RNA
ctaagcaagtccttggcata

SEQ ID NO: 11584 - RNA, 20 nt, synthetic construct
  misc_feature 1..20: note = antisense sequence
  source 1..20: mol_type = other RNA
tgtactaagcaagtccttgg

SEQ ID NO: 11585 - RNA, 20 nt, synthetic construct
  misc_feature 1..20: note = antisense sequence
  source 1..20: mol_type = other RNA
gatgtactaagcaagtcctt

SEQ ID NO: 11586 - RNA, 20 nt, synthetic construct
  misc_feature 1..20: note = antisense sequence
  source 1..20: mol_type = other RNA
tgatgtactaagcaagtcct

SEQ ID NO: 11587 - RNA, 20 nt, synthetic construct
  misc_feature 1..20: note = antisense sequence
  source 1..20: mol_type = other RNA
ctgatgtactaagcaagtcc

SEQ ID NO: 11588 - RNA, 20 nt, synthetic construct
  misc_feature 1..20: note = antisense sequence
  source 1..20: mol_type = other RNA
tctgatgtactaagcaagtc

SEQ ID NO: 11589 - RNA, 20 nt, synthetic construct
  misc_feature 1..20: note = antisense sequence
  source 1..20: mol_type = other RNA
ggagacagtagactattttc

SEQ ID NO: 11590 - RNA, 20 nt, synthetic construct
  misc_feature 1..20: note = antisense sequence
  source 1..20: mol_type = other RNA
gaaatggagacagtagacta

SEQ ID NO: 11591 - RNA, 20 nt, synthetic construct
  misc_feature 1..20: note = antisense sequence
  source 1..20: mol_type = other RNA
gcattttctcccagtgctca

SEQ ID NO: 11592 - RNA, 20 nt, synthetic construct
  misc_feature 1..20: note = antisense sequence
  source 1..20: mol_type = other RNA
tgcagcctctggttagaaat

SEQ ID NO: 11593 - RNA, 20 nt, synthetic construct
  misc_feature 1..20: note = antisense sequence
  source 1..20: mol_type = other RNA
gtgcagcctctggttagaaa

SEQ ID NO: 11594 - RNA, 20 nt, synthetic construct
  misc_feature 1..20: note = antisense sequence
  source 1..20: mol_type = other RNA
ctgtgcagcctctggttaga

SEQ ID NO: 11595 - RNA, 20 nt, synthetic construct
  misc_feature 1..20: note = antisense sequence
  source 1..20: mol_type = other RNA
actgtgcagcctctggttag

SEQ ID NO: 11596 - RNA, 20 nt, synthetic construct
  misc_feature 1..20: note = antisense sequence
  source 1..20: mol_type = other RNA
cactgtgcagcctctggtta

SEQ ID NO: 11597 - RNA, 20 nt, synthetic construct
  misc_feature 1..20: note = antisense sequence
  source 1..20: mol_type = other RNA
tctaaccactgtgcagcctc

SEQ ID NO: 11598 - RNA, 20 nt, synthetic construct
  misc_feature 1..20: note = antisense sequence
  source 1..20: mol_type = other RNA
agccactctaaccactgtgc

SEQ ID NO: 11599 - RNA, 20 nt, synthetic construct
  misc_feature 1..20: note = antisense sequence
  source 1..20: mol_type = other RNA
cagccactctaaccactgtg

SEQ ID NO: 11600 - RNA, 20 nt, synthetic construct
  misc_feature 1..20: note = antisense sequence
  source 1..20: mol_type = other RNA
actgttcatgggtgtttggg

SEQ ID NO: 11601 - RNA, 20 nt, synthetic construct
  misc_feature 1..20: note = antisense sequence
  source 1..20: mol_type = other RNA
ctggactgttcatgggtgtt

SEQ ID NO: 11602 - RNA, 20 nt, synthetic construct
  misc_feature 1..20: note = antisense sequence
  source 1..20: mol_type = other RNA
cctggactgttcatgggtgt

SEQ ID NO: 11603 - RNA, 20 nt, synthetic construct
  misc_feature 1..20: note = antisense sequence
  source 1..20: mol_type = other RNA
tccctggactgttcatgggt

SEQ ID NO: 11604 - RNA, 20 nt, synthetic construct
  misc_feature 1..20: note = antisense sequence
  source 1..20: mol_type = other RNA
ctccctggactgttcatggg

SEQ ID NO: 11605 - RNA, 20 nt, synthetic construct
  misc_feature 1..20: note = antisense sequence
  source 1..20: mol_type = other RNA
tctccctggactgttcatgg

SEQ ID NO: 11606 - RNA, 20 nt, synthetic construct
  misc_feature 1..20: note = antisense sequence
  source 1..20: mol_type = other RNA
ttctccctggactgttcatg

SEQ ID NO: 11607 - RNA, 20 nt, synthetic construct
  misc_feature 1..20: note = antisense sequence
  source 1..20: mol_type = other RNA
cttctccctggactgttcat

SEQ ID NO: 11608 - RNA, 20 nt, synthetic construct
  misc_feature 1..20: note = antisense sequence
  source 1..20: mol_type = other RNA
tcaaacttctccctggactg

SEQ ID NO: 11609 - RNA, 20 nt, synthetic construct
  misc_feature 1..20: note = antisense sequence
  source 1..20: mol_type = other RNA
ttgcttcaaacttctccctg

SEQ ID NO: 11610 - RNA, 20 nt, synthetic construct
  misc_feature 1..20: note = antisense sequence
  source 1..20: mol_type = other RNA
cttgcttcaaacttctccct

SEQ ID NO: 11611 - RNA, 20 nt, synthetic construct
  misc_feature 1..20: note = antisense sequence
  source 1..20: mol_type = other RNA
tcttgcttcaaacttctccc

SEQ ID NO: 11612 - RNA, 20 nt, synthetic construct
  misc_feature 1..20: note = antisense sequence
  source 1..20: mol_type = other RNA
gaccactatattctcctggg

SEQ ID NO: 11613 - RNA, 20 nt, synthetic construct
  misc_feature 1..20: note = antisense sequence
  source 1..20: mol_type = other RNA
agaccactatattctcctgg

SEQ ID NO: 11614 - RNA, 20 nt, synthetic construct
  misc_feature 1..20: note = antisense sequence
  source 1..20: mol_type = other RNA
tagaccactatattctcctg

SEQ ID NO: 11615 - RNA, 20 nt, synthetic construct
  misc_feature 1..20: note = antisense sequence
  source 1..20: mol_type = other RNA
tggcatcatggtaatagacc

SEQ ID NO: 11616 - RNA, 20 nt, synthetic construct
  misc_feature 1..20: note = antisense sequence
  source 1..20: mol_type = other RNA
agtggcatcatggtaataga

SEQ ID NO: 11617 - RNA, 20 nt, synthetic construct
  misc_feature 1..20: note = antisense sequence
  source 1..20: mol_type = other RNA
cagtggcatcatggtaatag

SEQ ID NO: 11618 - RNA, 20 nt, synthetic construct
  misc_feature 1..20: note = antisense sequence
  source 1..20: mol_type = other RNA
gcagtggcatcatggtaata

SEQ ID NO: 11619 - RNA, 20 nt, synthetic construct
  misc_feature 1..20: note = antisense sequence
  source 1..20: mol_type = other RNA
tgcagtggcatcatggtaat

SEQ ID NO: 11620 - RNA, 20 nt, synthetic construct
  misc_feature 1..20: note = antisense sequence
  source 1..20: mol_type = other RNA
tgtgatgttcttcctgctgc

SEQ ID NO: 11621 - RNA, 20 nt, synthetic construct
  misc_feature 1..20: note = antisense sequence
  source 1..20: mol_type = other RNA
gctatgtgatgttcttcctg

SEQ ID NO: 11622 - RNA, 20 nt, synthetic construct
  misc_feature 1..20: note = antisense sequence
  source 1..20: mol_type = other RNA
cgctatgtgatgttcttcct

SEQ ID NO: 11623 - RNA, 20 nt, synthetic construct
  misc_feature 1..20: note = antisense sequence
  source 1..20: mol_type = other RNA
acgctatgtgatgttcttcc

SEQ ID NO: 11624 - RNA, 20 nt, synthetic construct
  misc_feature 1..20: note = antisense sequence
  source 1..20: mol_type = other RNA
gacgctatgtgatgttcttc

SEQ ID NO: 11625 - RNA, 20 nt, synthetic construct
  misc_feature 1..20: note = antisense sequence
  source 1..20: mol_type = other RNA
ggacgctatgtgatgttctt

SEQ ID NO: 11626 - RNA, 20 nt, synthetic construct
  misc_feature 1..20: note = antisense sequence
  source 1..20: mol_type = other RNA
aggacgctatgtgatgttct

SEQ ID NO: 11627 - RNA, 20 nt, synthetic construct
  misc_feature 1..20: note = antisense sequence
  source 1..20: mol_type = other RNA
aaggacgctatgtgatgttc

SEQ ID NO: 11628 - RNA, 20 nt, synthetic construct
  misc_feature 1..20: note = antisense sequence
  source 1..20: mol_type = other RNA
gaaggacgctatgtgatgtt

SEQ ID NO: 11629 - RNA, 20 nt, synthetic construct
  misc_feature 1..20: note = antisense sequence
  source 1..20: mol_type = other RNA
agaaggacgctatgtgatgt

SEQ ID NO: 11630 - RNA, 20 nt, synthetic construct
  misc_feature 1..20: note = antisense sequence
  source 1..20: mol_type = other RNA
cagaaggacgctatgtgatg

SEQ ID NO: 11631 - RNA, 20 nt, synthetic construct
  misc_feature 1..20: note = antisense sequence
  source 1..20: mol_type = other RNA
acagaaggacgctatgtgat

SEQ ID NO: 11632 - RNA, 20 nt, synthetic construct
  misc_feature 1..20: note = antisense sequence
  source 1..20: mol_type = other RNA
gacagaaggacgctatgtga

SEQ ID NO: 11633 - RNA, 20 nt, synthetic construct
  misc_feature 1..20: note = antisense sequence
  source 1..20: mol_type = other RNA
agacagaaggacgctatgtg

SEQ ID NO: 11634 - RNA, 20 nt, synthetic construct
  misc_feature 1..20: note = antisense sequence
  source 1..20: mol_type = other RNA
cagacagaaggacgctatgt

SEQ ID NO: 11635 - RNA, 20 nt, synthetic construct
  misc_feature 1..20: note = antisense sequence
  source 1..20: mol_type = other RNA
acagacagaaggacgctatg

SEQ ID NO: 11636 - RNA, 20 nt, synthetic construct
  misc_feature 1..20: note = antisense sequence
  source 1..20: mol_type = other RNA
gaacagacagaaggacgcta

SEQ ID NO: 11637 - RNA, 20 nt, synthetic construct
  misc_feature 1..20: note = antisense sequence
  source 1..20: mol_type = other RNA
gctgagaacagacagaagga

SEQ ID NO: 11638 - RNA, 20 nt, synthetic construct
  misc_feature 1..20: note = antisense sequence
  source 1..20: mol_type = other RNA
caacggaaacctgcattatt

SEQ ID NO: 11639 - RNA, 20 nt, synthetic construct
  misc_feature 1..20: note = antisense sequence
  source 1..20: mol_type = other RNA
gcaacggaaacctgcattat

SEQ ID NO: 11640 - RNA, 20 nt, synthetic construct
  misc_feature 1..20: note = antisense sequence
  source 1..20: mol_type = other RNA
agcaacggaaacctgcatta

SEQ ID NO: 11641 - RNA, 20 nt, synthetic construct
  misc_feature 1..20: note = antisense sequence
  source 1..20: mol_type = other RNA
cagcaacggaaacctgcatt

SEQ ID NO: 11642 - RNA, 20 nt, synthetic construct
  misc_feature 1..20: note = antisense sequence
  source 1..20: mol_type = other RNA
aatgcagcaacggaaacctg

SEQ ID NO: 11643 - RNA, 20 nt, synthetic construct
  misc_feature 1..20: note = antisense sequence
  source 1..20: mol_type = other RNA
gaatgcagcaacggaaacct

SEQ ID NO: 11644 - RNA, 20 nt, synthetic construct
  misc_feature 1..20: note = antisense sequence
  source 1..20: mol_type = other RNA
agaatgcagcaacggaaacc

SEQ ID NO: 11645 - RNA, 20 nt, synthetic construct
  misc_feature 1..20: note = antisense sequence
  source 1..20: mol_type = other RNA
aagaatgcagcaacggaaac

SEQ ID NO: 11646 - RNA, 20 nt, synthetic construct
  misc_feature 1..20: note = antisense sequence
  source 1..20: mol_type = other RNA
taagaatgcagcaacggaaa

SEQ ID NO: 11647 - RNA, 20 nt, synthetic construct
  misc_feature 1..20: note = antisense sequence
  source 1..20: mol_type = other RNA
ataagaatgcagcaacggaa

SEQ ID NO: 11648 - RNA, 20 nt, synthetic construct
  misc_feature 1..20: note = antisense sequence
  source 1..20: mol_type = other RNA
aataagaatgcagcaacgga

SEQ ID NO: 11649 - RNA, 20 nt, synthetic construct
  misc_feature 1..20: note = antisense sequence
  source 1..20: mol_type = other RNA
tcaataagaatgcagcaacg

SEQ ID NO: 11650 - RNA, 20 nt, synthetic construct
  misc_feature 1..20: note = antisense sequence
  source 1..20: mol_type = other RNA
agtccacaatgctttcaggt

SEQ ID NO: 11651 - RNA, 20 nt, synthetic construct
  misc_feature 1..20: note = antisense sequence
  source 1..20: mol_type = other RNA
tcagtccacaatgctttcag

SEQ ID NO: 11652 - RNA, 20 nt, synthetic construct
  misc_feature 1..20: note = antisense sequence
  source 1..20: mol_type = other RNA
ttcagtccacaatgctttca

SEQ ID NO: 11653 - RNA, 20 nt, synthetic construct
  misc_feature 1..20: note = antisense sequence
  source 1..20: mol_type = other RNA
gtattttcagtccacaatgc

SEQ ID NO: 11654 - RNA, 20 nt, synthetic construct
  misc_feature 1..20: note = antisense sequence
  source 1..20: mol_type = other RNA
tgtgtgaattgccctgtaat

SEQ ID NO: 11655 - RNA, 20 nt, synthetic construct
  misc_feature 1..20: note = antisense sequence
  source 1..20: mol_type = other RNA
ctcttgtgtgaattgccctg

SEQ ID NO: 11656 - RNA, 20 nt, synthetic construct
  misc_feature 1..20: note = antisense sequence
  source 1..20: mol_type = other RNA
tctcttgtgtgaattgccct

SEQ ID NO: 11657 - RNA, 20 nt, synthetic construct
  misc_feature 1..20: note = antisense sequence
  source 1..20: mol_type = other RNA
atctcttgtgtgaattgccc

SEQ ID NO: 11658 - RNA, 20 nt, synthetic construct
  misc_feature 1..20: note = antisense sequence
  source 1..20: mol_type = other RNA
cgttgaggcaagagaataat

SEQ ID NO: 11659 - RNA, 20 nt, synthetic construct
  misc_feature 1..20: note = antisense sequence
  source 1..20: mol_type = other RNA
tcgttgaggcaagagaataa

SEQ ID NO: 11660 - RNA, 20 nt, synthetic construct
  misc_feature 1..20: note = antisense sequence
  source 1..20: mol_type = other RNA
ctttcgttgaggcaagagaa

SEQ ID NO: 11661 - RNA, 20 nt, synthetic construct
  misc_feature 1..20: note = antisense sequence
  source 1..20: mol_type = other RNA
cctttcgttgaggcaagaga

SEQ ID NO: 11662 - RNA, 20 nt, synthetic construct
  misc_feature 1..20: note = antisense sequence
  source 1..20: mol_type = other RNA
ccctttcgttgaggcaagag

SEQ ID NO: 11663 - RNA, 20 nt, synthetic construct
  misc_feature 1..20: note = antisense sequence
  source 1..20: mol_type = other RNA
gtctgccctttcgttgaggc

SEQ ID NO: 11664 - RNA, 20 nt, synthetic construct
  misc_feature 1..20: note = antisense sequence
  source 1..20: mol_type = other RNA
agtcagtctgccctttcgtt

SEQ ID NO: 11665 - RNA, 20 nt, synthetic construct
  misc_feature 1..20: note = antisense sequence
  source 1..20: mol_type = other RNA
ttaagaaagtcagtctgccc

SEQ ID NO: 11666 - RNA, 20 nt, synthetic construct
  misc_feature 1..20: note = antisense sequence
  source 1..20: mol_type = other RNA
ggccttgcagataagttaaa

SEQ ID NO: 11667 - RNA, 20 nt, synthetic construct
  misc_feature 1..20: note = antisense sequence
  source 1..20: mol_type = other RNA
ttggccttgcagataagtta

SEQ ID NO: 11668 - RNA, 20 nt, synthetic construct
  misc_feature 1..20: note = antisense sequence
  source 1..20: mol_type = other RNA
tttggccttgcagataagtt

SEQ ID NO: 11669 - RNA, 20 nt, synthetic construct
  misc_feature 1..20: note = antisense sequence
  source 1..20: mol_type = other RNA
atttggccttgcagataagt

SEQ ID NO: 11670 - RNA, 20 nt, synthetic construct
  misc_feature 1..20: note = antisense sequence
  source 1..20: mol_type = other RNA
gatttatttggccttgcaga

SEQ ID NO: 11671 - RNA, 20 nt, synthetic construct
  misc_feature 1..20: note = antisense sequence
  source 1..20: mol_type = other RNA
agggaattgatggaatgttg

SEQ ID NO: 11672 - RNA, 20 nt, synthetic construct
  misc_feature 1..20: note = antisense sequence
  source 1..20: mol_type = other RNA
ctgagggaattgatggaatg

SEQ ID NO: 11673 - RNA, 20 nt, synthetic construct
  misc_feature 1..20: note = antisense sequence
  source 1..20: mol_type = other RNA
cctgagggaattgatggaat

SEQ ID NO: 11674 - RNA, 20 nt, synthetic construct
  misc_feature 1..20: note = antisense sequence
  source 1..20: mol_type = other RNA
tcctgagggaattgatggaa

SEQ ID NO: 11675 - RNA, 20 nt, synthetic construct
  misc_feature 1..20: note = antisense sequence
  source 1..20: mol_type = other RNA
tcacaaacccaaagccacaa

SEQ ID NO: 11676 - RNA, 20 nt, synthetic construct
  misc_feature 1..20: note = antisense sequence
  source 1..20: mol_type = other RNA
attcacaaacccaaagccac

SEQ ID NO: 11677 - RNA, 20 nt, synthetic construct
  misc_feature 1..20: note = antisense sequence
  source 1..20: mol_type = other RNA
ggcagtctgctactctcaaa

SEQ ID NO: 11678 - RNA, 20 nt, synthetic construct
  misc_feature 1..20: note = antisense sequence
  source 1..20: mol_type = other RNA
gagataattcagagcattcc

SEQ ID NO: 11679 - RNA, 20 nt, synthetic construct
  misc_feature 1..20: note = antisense sequence
  source 1..20: mol_type = other RNA
gaagctctttactgaaatgc

SEQ ID NO: 11680 - RNA, 20 nt, synthetic construct
  misc_feature 1..20: note = antisense sequence
  source 1..20: mol_type = other RNA
tgtacccattttgaagctct

SEQ ID NO: 11681 - RNA, 20 nt, synthetic construct
  misc_feature 1..20: note = antisense sequence
  source 1..20: mol_type = other RNA
ctgtacccattttgaagctc

SEQ ID NO: 11682 - RNA, 20 nt, synthetic construct
  misc_feature 1..20: note = antisense sequence
  source 1..20: mol_type = other RNA
cctgtacccattttgaagct

SEQ ID NO: 11683 - RNA, 20 nt, synthetic construct
  misc_feature 1..20: note = antisense sequence
  source 1..20: mol_type = other RNA
tcctgtacccattttgaagc

SEQ ID NO: 11684 - RNA, 20 nt, synthetic construct
  misc_feature 1..20: note = antisense sequence
  source 1..20: mol_type = other RNA
ccacatgccattcaatcata

SEQ ID NO: 11685 - RNA, 20 nt, synthetic construct
  misc_feature 1..20: note = antisense sequence
  source 1..20: mol_type = other RNA
cccacatgccattcaatcat

SEQ ID NO: 11686 - RNA, 20 nt, synthetic construct
  misc_feature 1..20: note = antisense sequence
  source 1..20: mol_type = other RNA
gcccacatgccattcaatca

SEQ ID NO: 11687 - RNA, 20 nt, synthetic construct
  misc_feature 1..20: note = antisense sequence
  source 1..20: mol_type = other RNA
tgcccacatgccattcaatc

SEQ ID NO: 11688 - RNA, 20 nt, synthetic construct
  misc_feature 1..20: note = antisense sequence
  source 1..20: mol_type = other RNA
ggctgcccacatgccattca

SEQ ID NO: 11689 - RNA, 20 nt, synthetic construct
  misc_feature 1..20: note = antisense sequence
  source 1..20: mol_type = other RNA
agggctgcccacatgccatt

SEQ ID NO: 11690 - RNA, 20 nt, synthetic construct
  misc_feature 1..20: note = antisense sequence
  source 1..20: mol_type = other RNA
atagggctgcccacatgcca

SEQ ID NO: 11691 - RNA, 20 nt, synthetic construct
  misc_feature 1..20: note = antisense sequence
  source 1..20: mol_type = other RNA
tgatagggctgcccacatgc

SEQ ID NO: 11692 - RNA, 20 nt, synthetic construct
  misc_feature 1..20: note = antisense sequence
  source 1..20: mol_type = other RNA
gtgatagggctgcccacatg

SEQ ID NO: 11693 - RNA, 20 nt, synthetic construct
  misc_feature 1..20: note = antisense sequence
  source 1..20: mol_type = other RNA
tttgtgatagggctgcccac

SEQ ID NO: 11694 - RNA, 20 nt, synthetic construct
  misc_feature 1..20: note = antisense sequence
  source 1..20: mol_type = other RNA
ctttgtgatagggctgccca

SEQ ID NO: 11695 - RNA, 20 nt, synthetic construct
  misc_feature 1..20: note = antisense sequence
  source 1..20: mol_type = other RNA
gtctttgtgatagggctgcc

SEQ ID NO: 11696 - RNA, 20 nt, synthetic construct
  misc_feature 1..20: note = antisense sequence
  source 1..20: mol_type = other RNA
ggtctttgtgatagggctgc

SEQ ID NO: 11697 - RNA, 20 nt, synthetic construct
  misc_feature 1..20: note = antisense sequence
  source 1..20: mol_type = other RNA
gtatcactcacagatccaga

SEQ ID NO: 11698 - RNA, 20 nt, synthetic construct
  misc_feature 1..20: note = antisense sequence
  source 1..20: mol_type = other RNA
aagtatcactcacagatcca

SEQ ID NO: 11699 - RNA, 20 nt, synthetic construct
  misc_feature 1..20: note = antisense sequence
  source 1..20: mol_type = other RNA
taagtatcactcacagatcc

SEQ ID NO: 11700 - RNA, 20 nt, synthetic construct
  misc_feature 1..20: note = antisense sequence
  source 1..20: mol_type = other RNA
gtaagtatcactcacagatc

SEQ ID NO: 11701 - RNA, 20 nt, synthetic construct
  misc_feature 1..20: note = antisense sequence
  source 1..20: mol_type = other RNA
ggtaagtatcactcacagat

SEQ ID NO: 11702 - RNA, 20 nt, synthetic construct
  misc_feature 1..20: note = antisense sequence
  source 1..20: mol_type = other RNA
tggtaagtatcactcacaga

SEQ ID NO: 11703 - RNA, 20 nt, synthetic construct
  misc_feature 1..20: note = antisense sequence
  source 1..20: mol_type = other RNA
gtggtaagtatcactcacag

SEQ ID NO: 11704 - RNA, 20 nt, synthetic construct
  misc_feature 1..20: note = antisense sequence
  source 1..20: mol_type = other RNA
ggtggtaagtatcactcaca

SEQ ID NO: 11705 - RNA, 20 nt, synthetic construct
  misc_feature 1..20: note = antisense sequence
  source 1..20: mol_type = other RNA
tggtggtaagtatcactcac

SEQ ID NO: 11706 - RNA, 20 nt, synthetic construct
  misc_feature 1..20: note = antisense sequence
  source 1..20: mol_type = other RNA
ctggtggtaagtatcactca

SEQ ID NO: 11707 - RNA, 20 nt, synthetic construct
  misc_feature 1..20: note = antisense sequence
  source 1..20: mol_type = other RNA
actggtggtaagtatcactc

SEQ ID NO: 11708 - RNA, 20 nt, synthetic construct
  misc_feature 1..20: note = antisense sequence
  source 1..20: mol_type = other RNA
aggccatagattctgtcaga

SEQ ID NO: 11709 - RNA, 20 nt, synthetic construct
  misc_feature 1..20: note = antisense sequence
  source 1..20: mol_type = other RNA
caggccatagattctgtcag

SEQ ID NO: 11710 - RNA, 20 nt, synthetic construct
  misc_feature 1..20: note = antisense sequence
  source 1..20: mol_type = other RNA
tcaggccatagattctgtca

SEQ ID NO: 11711 - RNA, 20 nt, synthetic construct
  misc_feature 1..20: note = antisense sequence
  source 1..20: mol_type = other RNA
attcaggccatagattctgt

SEQ ID NO: 11712 - RNA, 20 nt, synthetic construct
  misc_feature 1..20: note = antisense sequence
  source 1..20: mol_type = other RNA
ccatattcaggccatagatt

SEQ ID NO: 11713 - RNA, 20 nt, synthetic construct
  misc_feature 1..20: note = antisense sequence
  source 1..20: mol_type = other RNA
tcccacccatattcaggcca

SEQ ID NO: 11714 - RNA, 20 nt, synthetic construct
  misc_feature 1..20: note = antisense sequence
  source 1..20: mol_type = other RNA
gtcccacccatattcaggcc

SEQ ID NO: 11715 - RNA, 20 nt, synthetic construct
  misc_feature 1..20: note = antisense sequence
  source 1..20: mol_type = other RNA
agtcccacccatattcaggc

SEQ ID NO: 11716 - RNA, 20 nt, synthetic construct
  misc_feature 1..20: note = antisense sequence
  source 1..20: mol_type = other RNA
cagtcccacccatattcagg

SEQ ID NO: 11717 - RNA, 20 nt, synthetic construct
  misc_feature 1..20: note = antisense sequence
  source 1..20: mol_type = other RNA
atcagtcccacccatattca

SEQ ID NO: 11718 - RNA, 20 nt, synthetic construct
  misc_feature 1..20: note = antisense sequence
  source 1..20: mol_type = other RNA
catcagtcccacccatattc

SEQ ID NO: 11719 - RNA, 20 nt, synthetic construct
  misc_feature 1..20: note = antisense sequence
  source 1..20: mol_type = other RNA
ccatcagtcccacccatatt

SEQ ID NO: 11720 - RNA, 20 nt, synthetic construct
  misc_feature 1..20: note = antisense sequence
  source 1..20: mol_type = other RNA
tccatcagtcccacccatat

SEQ ID NO: 11721 - RNA, 20 nt, synthetic construct
  misc_feature 1..20: note = antisense sequence
  source 1..20: mol_type = other RNA
ctccatcagtcccacccata

SEQ ID NO: 11722 - RNA, 20 nt, synthetic construct
  misc_feature 1..20: note = antisense sequence
  source 1..20: mol_type = other RNA
caactccatcagtcccaccc

SEQ ID NO: 11723 - RNA, 20 nt, synthetic construct
  misc_feature 1..20: note = antisense sequence
  source 1..20: mol_type = other RNA
tcaactccatcagtcccacc

SEQ ID NO: 11724 - RNA, 20 nt, synthetic construct
  misc_feature 1..20: note = antisense sequence
  source 1..20: mol_type = other RNA
ctcaactccatcagtcccac

SEQ ID NO: 11725 - RNA, 20 nt, synthetic construct
  misc_feature 1..20: note = antisense sequence
  source 1..20: mol_type = other RNA
tctcaactccatcagtccca

SEQ ID NO: 11726 - RNA, 20 nt, synthetic construct
  misc_feature 1..20: note = antisense sequence
  source 1..20: mol_type = other RNA
aagaggtttctcaactccat

SEQ ID NO: 11727 - RNA, 20 nt, synthetic construct
  misc_feature 1..20: note = antisense sequence
  source 1..20: mol_type = other RNA
aaagaggtttctcaactcca

SEQ ID NO: 11728 - RNA, 20 nt, synthetic construct
  misc_feature 1..20: note = antisense sequence
  source 1..20: mol_type = other RNA
taaagaggtttctcaactcc

SEQ ID NO: 11729 - RNA, 20 nt, synthetic construct
  misc_feature 1..20: note = antisense sequence
  source 1..20: mol_type = other RNA
cccttaatatgttatgggac

SEQ ID NO: 11730 - RNA, 20 nt, synthetic construct
  misc_feature 1..20: note = antisense sequence
  source 1..20: mol_type = other RNA
ctcccttaatatgttatggg

SEQ ID NO: 11731 - RNA, 20 nt, synthetic construct
  misc_feature 1..20: note = antisense sequence
  source 1..20: mol_type = other RNA
ggctaaactcccttaatatg

SEQ ID NO: 11732 - RNA, 20 nt, synthetic construct
  misc_feature 1..20: note = antisense sequence
  source 1..20: mol_type = other RNA
cttaggctaaactcccttaa

SEQ ID NO: 11733 - RNA, 20 nt, synthetic construct
  misc_feature 1..20: note = antisense sequence
  source 1..20: mol_type = other RNA
ccttaggctaaactccctta

SEQ ID NO: 11734 - RNA, 20 nt, synthetic construct
  misc_feature 1..20: note = antisense sequence
  source 1..20: mol_type = other RNA
cccttaggctaaactccctt

SEQ ID NO: 11735 - RNA, 20 nt, synthetic construct
  misc_feature 1..20: note = antisense sequence
  source 1..20: mol_type = other RNA
gcccttaggctaaactccct

SEQ ID NO: 11736 - RNA, 20 nt, synthetic construct
  misc_feature 1..20: note = antisense sequence
  source 1..20: mol_type = other RNA
aaccctgctgagcccttagg

SEQ ID NO: 11737 - RNA, 20 nt, synthetic construct
  misc_feature 1..20: note = antisense sequence
  source 1..20: mol_type = other RNA
tgccttgggaaccctgctga

SEQ ID NO: 11738 - RNA, 20 nt, synthetic construct
  misc_feature 1..20: note = antisense sequence
  source 1..20: mol_type = other RNA
atgccttgggaaccctgctg

SEQ ID NO: 11739 - RNA, 20 nt, synthetic construct
  misc_feature 1..20: note = antisense sequence
  source 1..20: mol_type = other RNA
catgccttgggaaccctgct

SEQ ID NO: 11740 - RNA, 20 nt, synthetic construct
  misc_feature 1..20: note = antisense sequence
  source 1..20: mol_type = other RNA
tcatgccttgggaaccctgc

SEQ ID NO: 11741 - RNA, 20 nt, synthetic construct
  misc_feature 1..20: note = antisense sequence
  source 1..20: mol_type = other RNA
aattcatgccttgggaaccc

SEQ ID NO: 11742 - RNA, 20 nt, synthetic construct
  misc_feature 1..20: note = antisense sequence
  source 1..20: mol_type = other RNA
aaattcatgccttgggaacc

SEQ ID NO: 11743 - RNA, 20 nt, synthetic construct
  misc_feature 1..20: note = antisense sequence
  source 1..20: mol_type = other RNA
attcctgtccaaattcatgc

SEQ ID NO: 11744 - RNA, 20 nt, synthetic construct
  misc_feature 1..20: note = antisense sequence
  source 1..20: mol_type = other RNA
ggatgtactacagtaggaaa

SEQ ID NO: 11745 - RNA, 20 nt, synthetic construct
  misc_feature 1..20: note = antisense sequence
  source 1..20: mol_type = other RNA
tggatgtactacagtaggaa

SEQ ID NO: 11746 - RNA, 20 nt, synthetic construct
  misc_feature 1..20: note = antisense sequence
  source 1..20: mol_type = other RNA
ttggatgtactacagtagga

SEQ ID NO: 11747 - RNA, 20 nt, synthetic construct
  misc_feature 1..20: note = antisense sequence
  source 1..20: mol_type = other RNA
agttggatgtactacagtag

SEQ ID NO: 11748 - RNA, 20 nt, synthetic construct
  misc_feature 1..20: note = antisense sequence
  source 1..20: mol_type = other RNA
tcaagttggatgtactacag

SEQ ID NO: 11749 - RNA, 20 nt, synthetic construct
  misc_feature 1..20: note = antisense sequence
  source 1..20: mol_type = other RNA
gctcaagttggatgtactac

SEQ ID NO: 11750 - RNA, 20 nt, synthetic construct
  misc_feature 1..20: note = antisense sequence
  source 1..20: mol_type = other RNA
ggctcaagttggatgtacta

SEQ ID NO: 11751 - RNA, 20 nt, synthetic construct
  misc_feature 1..20: note = antisense sequence
  source 1..20: mol_type = other RNA
aggctcaagttggatgtact

SEQ ID NO: 11752 - RNA, 20 nt, synthetic construct
  misc_feature 1..20: note = antisense sequence
  source 1..20: mol_type = other RNA
aaggctcaagttggatgtac

SEQ ID NO: 11753 - RNA, 20 nt, synthetic construct
  misc_feature 1..20: note = antisense sequence
  source 1..20: mol_type = other RNA
caaggctcaagttggatgta

SEQ ID NO: 11754 - RNA, 20 nt, synthetic construct
  misc_feature 1..20: note = antisense sequence
  source 1..20: mol_type = other RNA
cacaaggctcaagttggatg

SEQ ID NO: 11755 - RNA, 20 nt, synthetic construct
  misc_feature 1..20: note = antisense sequence
  source 1..20: mol_type = other RNA
ccacaaggctcaagttggat

SEQ ID NO: 11756 - RNA, 20 nt, synthetic construct
  misc_feature 1..20: note = antisense sequence
  source 1..20: mol_type = other RNA
gtccacaaggctcaagttgg

SEQ ID NO: 11757 - RNA, 20 nt, synthetic construct
  misc_feature 1..20: note = antisense sequence
  source 1..20: mol_type = other RNA
ggtccacaaggctcaagttg

SEQ ID NO: 11758 - RNA, 20 nt, synthetic construct
  misc_feature 1..20: note = antisense sequence
  source 1..20: mol_type = other RNA
gggtccacaaggctcaagtt

SEQ ID NO: 11759 - RNA, 20 nt, synthetic construct
  misc_feature 1..20: note = antisense sequence
  source 1..20: mol_type = other RNA
tgggtccacaaggctcaagt

SEQ ID NO: 11760 - RNA, 20 nt, synthetic construct
  misc_feature 1..20: note = antisense sequence
  source 1..20: mol_type = other RNA
ttgggtccacaaggctcaag

SEQ ID NO: 11761 - RNA, 20 nt, synthetic construct
  misc_feature 1..20: note = antisense sequence
  source 1..20: mol_type = other RNA
tttgggtccacaaggctcaa

SEQ ID NO: 11762 - RNA, 20 nt, synthetic construct
  misc_feature 1..20: note = antisense sequence
  source 1..20: mol_type = other RNA
ctttgggtccacaaggctca

SEQ ID NO: 11763 - RNA, 20 nt, synthetic construct
  misc_feature 1..20: note = antisense sequence
  source 1..20: mol_type = other RNA
gctttgggtccacaaggctc

SEQ ID NO: 11764 - RNA, 20 nt, synthetic construct
  misc_feature 1..20: note = antisense sequence
  source 1..20: mol_type = other RNA
tggtgctttgggtccacaag

SEQ ID NO: 11765 - RNA, 20 nt, synthetic construct
  misc_feature 1..20: note = antisense sequence
  source 1..20: mol_type = other RNA
atggtgctttgggtccacaa

SEQ ID NO: 11766 - RNA, 20 nt, synthetic construct
  misc_feature 1..20: note = antisense sequence
  source 1..20: mol_type = other RNA
atcctatggtgctttgggtc

SEQ ID NO: 11767 - RNA, 20 nt, synthetic construct
  misc_feature 1..20: note = antisense sequence
  source 1..20: mol_type = other RNA
actgtagcatgttgtggatc

SEQ ID NO: 11768 - RNA, 20 nt, synthetic construct
  misc_feature 1..20: note = antisense sequence
  source 1..20: mol_type = other RNA
tactgtagcatgttgtggat

SEQ ID NO: 11769 - RNA, 20 nt, synthetic construct
  misc_feature 1..20: note = antisense sequence
  source 1..20: mol_type = other RNA
atactgtagcatgttgtgga

SEQ ID NO: 11770 - RNA, 20 nt, synthetic construct
  misc_feature 1..20: note = antisense sequence
  source 1..20: mol_type = other RNA
tatactgtagcatgttgtgg

SEQ ID NO: 11771 - RNA, 20 nt, synthetic construct
  misc_feature 1..20: note = antisense sequence
  source 1..20: mol_type = other RNA
ctccattcttatactgtagc

SEQ ID NO: 11772 - RNA, 20 nt, synthetic construct
  misc_feature 1..20: note = antisense sequence
  source 1..20: mol_type = other RNA
tgttcattagcagccctgtc

SEQ ID NO: 11773 - RNA, 20 nt, synthetic construct
  misc_feature 1..20: note = antisense sequence
  source 1..20: mol_type = other RNA
ttgttcattagcagccctgt

SEQ ID NO: 11774 - RNA, 20 nt, synthetic construct
  misc_feature 1..20: note = antisense sequence
  source 1..20: mol_type = other RNA
tcttgttcattagcagccct

SEQ ID NO: 11775 - RNA, 20 nt, synthetic construct
  misc_feature 1..20: note = antisense sequence
  source 1..20: mol_type = other RNA
ttcttgttcattagcagccc

SEQ ID NO: 11776 - RNA, 20 nt, synthetic construct
  misc_feature 1..20: note = antisense sequence
  source 1..20: mol_type = other RNA
attcttgttcattagcagcc

SEQ ID NO: 11777 - RNA, 20 nt, synthetic construct
  misc_feature 1..20: note = antisense sequence
  source 1..20: mol_type = other RNA
ggctcatgtctcaaattctt

SEQ ID NO: 11778 - RNA, 20 nt, synthetic construct
  misc_feature 1..20: note = antisense sequence
  source 1..20: mol_type = other RNA
aagggctcatgtctcaaatt

SEQ ID NO: 11779 - RNA, 20 nt, synthetic construct
  misc_feature 1..20: note = antisense sequence
  source 1..20: mol_type = other RNA
aaagggctcatgtctcaaat

SEQ ID NO: 11780 - RNA, 20 nt, synthetic construct
  misc_feature 1..20: note = antisense sequence
  source 1..20: mol_type = other RNA
caaagggctcatgtctcaaa

SEQ ID NO: 11781 - RNA, 20 nt, synthetic construct
  misc_feature 1..20: note = antisense sequence
  source 1..20: mol_type = other RNA
tcaaagggctcatgtctcaa

SEQ ID NO: 11782 - RNA, 20 nt, synthetic construct
  misc_feature 1..20: note = antisense sequence
  source 1..20: mol_type = other RNA
gtcaaagggctcatgtctca

SEQ ID NO: 11783 - RNA, 20 nt, synthetic construct
  misc_feature 1..20: note = antisense sequence
  source 1..20: mol_type = other RNA
tagtcaaagggctcatgtct

SEQ ID NO: 11784 - RNA, 20 nt, synthetic construct
  misc_feature 1..20: note = antisense sequence
  source 1..20: mol_type = other RNA
aatagtcaaagggctcatgt

SEQ ID NO: 11785 - RNA, 20 nt, synthetic construct
  misc_feature 1..20: note = antisense sequence
  source 1..20: mol_type = other RNA
ttagggcattttcagccata

SEQ ID NO: 11786 - RNA, 20 nt, synthetic construct
  misc_feature 1..20: note = antisense sequence
  source 1..20: mol_type = other RNA
cttagggcattttcagccat

SEQ ID NO: 11787 - RNA, 20 nt, synthetic construct
  misc_feature 1..20: note = antisense sequence
  source 1..20: mol_type = other RNA
tcttagggcattttcagcca

SEQ ID NO: 11788 - RNA, 20 nt, synthetic construct
  misc_feature 1..20: note = antisense sequence
  source 1..20: mol_type = other RNA
catcttagggcattttcagc

SEQ ID NO: 11789 - RNA, 20 nt, synthetic construct
  misc_feature 1..20: note = antisense sequence
  source 1..20: mol_type = other RNA
acatcttagggcattttcag

SEQ ID NO: 11790 - RNA, 20 nt, synthetic construct
  misc_feature 1..20: note = antisense sequence
  source 1..20: mol_type = other RNA
aacttcaaacatcttagggc

SEQ ID NO: 11791 - RNA, 20 nt, synthetic construct
  misc_feature 1..20: note = antisense sequence
  source 1..20: mol_type = other RNA
gaacttcaaacatcttaggg

SEQ ID NO: 11792 - RNA, 20 nt, synthetic construct
  misc_feature 1..20: note = antisense sequence
  source 1..20: mol_type = other RNA
ccaaccagaacttcaaacat

SEQ ID NO: 11793 - RNA, 20 nt, synthetic construct
  misc_feature 1..20: note = antisense sequence
  source 1..20: mol_type = other RNA
accaaccagaacttcaaaca

SEQ ID NO: 11794 - RNA, 20 nt, synthetic construct
  misc_feature 1..20: note = antisense sequence
  source 1..20: mol_type = other RNA
taccaaccagaacttcaaac

SEQ ID NO: 11795 - RNA, 20 nt, synthetic construct
  misc_feature 1..20: note = antisense sequence
  source 1..20: mol_type = other RNA
cttaccaaccagaacttcaa

SEQ ID NO: 11796 - RNA, 20 nt, synthetic construct
  misc_feature 1..20: note = antisense sequence
  source 1..20: mol_type = other RNA
tcttaccaaccagaacttca

SEQ ID NO: 11797 - RNA, 20 nt, synthetic construct
  misc_feature 1..20: note = antisense sequence
  source 1..20: mol_type = other RNA
gtcttaccaaccagaacttc

SEQ ID NO: 11798 - RNA, 20 nt, synthetic construct
  misc_feature 1..20: note = antisense sequence
  source 1..20: mol_type = other RNA
gtagagcttgtggtcttacc

SEQ ID NO: 11799 - RNA, 20 nt, synthetic construct
  misc_feature 1..20: note = antisense sequence
  source 1..20: mol_type = other RNA
ggtagagcttgtggtcttac

SEQ ID NO: 11800 - RNA, 20 nt, synthetic construct
  misc_feature 1..20: note = antisense sequence
  source 1..20: mol_type = other RNA
ctggtagagcttgtggtctt

SEQ ID NO: 11801 - RNA, 20 nt, synthetic construct
  misc_feature 1..20: note = antisense sequence
  source 1..20: mol_type = other RNA
cctggtagagcttgtggtct

SEQ ID NO: 11802 - RNA, 20 nt, synthetic construct
  misc_feature 1..20: note = antisense sequence
  source 1..20: mol_type = other RNA
acctggtagagcttgtggtc

SEQ ID NO: 11803 - RNA, 20 nt, synthetic construct
  misc_feature 1..20: note = antisense sequence
  source 1..20: mol_type = other RNA
atacctggtagagcttgtgg

SEQ ID NO: 11804 - RNA, 20 nt, synthetic construct
  misc_feature 1..20: note = antisense sequence
  source 1..20: mol_type = other RNA
cagatacctggtagagcttg

SEQ ID NO: 11805 - RNA, 20 nt, synthetic construct
  misc_feature 1..20: note = antisense sequence
  source 1..20: mol_type = other RNA
atacagatacctggtagagc

SEQ ID NO: 11806 - RNA, 20 nt, synthetic construct
  misc_feature 1..20: note = antisense sequence
  source 1..20: mol_type = other RNA
gaatacagatacctggtaga

SEQ ID NO: 11807 - RNA, 20 nt, synthetic construct
  misc_feature 1..20: note = antisense sequence
  source 1..20: mol_type = other RNA
agaatacagatacctggtag

SEQ ID NO: 11808 - RNA, 20 nt, synthetic construct
  misc_feature 1..20: note = antisense sequence
  source 1..20: mol_type = other RNA
gcagaatacagatacctggt

SEQ ID NO: 11809 - RNA, 20 nt, synthetic construct
  misc_feature 1..20: note = antisense sequence
  source 1..20: mol_type = other RNA
tgcagaatacagatacctgg

SEQ ID NO: 11810 - RNA, 20 nt, synthetic construct
  misc_feature 1..20: note = antisense sequence
  source 1..20: mol_type = other RNA
ttgcagaatacagatacctg

SEQ ID NO: 11811 - RNA, 20 nt, synthetic construct
  misc_feature 1..20: note = antisense sequence
  source 1..20: mol_type = other RNA
gacttgcagaatacagatac

SEQ ID NO: 11812 - RNA, 20 nt, synthetic construct
  misc_feature 1..20: note = antisense sequence
  source 1..20: mol_type = other RNA
tactgacttgcagaatacag

SEQ ID NO: 11813 - RNA, 20 nt, synthetic construct
  misc_feature 1..20: note = antisense sequence
  source 1..20: mol_type = other RNA
ctactgacttgcagaataca

SEQ ID NO: 11814 - RNA, 20 nt, synthetic construct
  misc_feature 1..20: note = antisense sequence
  source 1..20: mol_type = other RNA
cactactgacttgcagaata

SEQ ID NO: 11815 - RNA, 20 nt, synthetic construct
  misc_feature 1..20: note = antisense sequence
  source 1..20: mol_type = other RNA
atgaagctgctgactggtca

SEQ ID NO: 11816 - RNA, 20 nt, synthetic construct
  misc_feature 1..20: note = antisense sequence
  source 1..20: mol_type = other RNA
aatgaagctgctgactggtc

SEQ ID NO: 11817 - RNA, 20 nt, synthetic construct
  misc_feature 1..20: note = antisense sequence
  source 1..20: mol_type = other RNA
caaatgaagctgctgactgg

SEQ ID NO: 11818 - RNA, 20 nt, synthetic construct
  misc_feature 1..20: note = antisense sequence
  source 1..20: mol_type = other RNA
ttcaaatgaagctgctgact

SEQ ID NO: 11819 - RNA, 20 nt, synthetic construct
  misc_feature 1..20: note = antisense sequence
  source 1..20: mol_type = other RNA
gtctgagacatttccatttc

SEQ ID NO: 11820 - RNA, 20 nt, synthetic construct
  misc_feature 1..20: note = antisense sequence
  source 1..20: mol_type = other RNA
agccagtctgagacatttcc

SEQ ID NO: 11821 - RNA, 20 nt, synthetic construct
  misc_feature 1..20: note = antisense sequence
  source 1..20: mol_type = other RNA
aagccagtctgagacatttc

SEQ ID NO: 11822 - RNA, 20 nt, synthetic construct
  misc_feature 1..20: note = antisense sequence
  source 1..20: mol_type = other RNA
gaagccagtctgagacattt

SEQ ID NO: 11823 - RNA, 20 nt, synthetic construct
  misc_feature 1..20: note = antisense sequence
  source 1..20: mol_type = other RNA
ctgtgaataatgagcactga

SEQ ID NO: 11824 - RNA, 20 nt, synthetic construct
  misc_feature 1..20: note = antisense sequence
  source 1..20: mol_type = other RNA
cctgtgaataatgagcactg

SEQ ID NO: 11825 - RNA, 20 nt, synthetic construct
  misc_feature 1..20: note = antisense sequence
  source 1..20: mol_type = other RNA
tggtcaacatacctgtgaat

SEQ ID NO: 11826 - RNA, 20 nt, synthetic construct
  misc_feature 1..20: note = antisense sequence
  source 1..20: mol_type = other RNA
ctggtcaacatacctgtgaa

SEQ ID NO: 11827 - RNA, 20 nt, synthetic construct
  misc_feature 1..20: note = antisense sequence
  source 1..20: mol_type = other RNA
actggtcaacatacctgtga

SEQ ID NO: 11828 - RNA, 20 nt, synthetic construct
  misc_feature 1..20: note = antisense sequence
  source 1..20: mol_type = other RNA
aactggtcaacatacctgtg

SEQ ID NO: 11829 - RNA, 20 nt, synthetic construct
  misc_feature 1..20: note = antisense sequence
  source 1..20: mol_type = other RNA
caactggtcaacatacctgt

SEQ ID NO: 11830 - RNA, 20 nt, synthetic construct
  misc_feature 1..20: note = antisense sequence
  source 1..20: mol_type = other RNA
ccaactggtcaacatacctg

SEQ ID NO: 11831 - RNA, 20 nt, synthetic construct
  misc_feature 1..20: note = antisense sequence
  source 1..20: mol_type = other RNA
accaactggtcaacatacct

SEQ ID NO: 11832 - RNA, 20 nt, synthetic construct
  misc_feature 1..20: note = antisense sequence
  source 1..20: mol_type = other RNA
caccaactggtcaacatacc

SEQ ID NO: 11833 - RNA, 20 nt, synthetic construct
  misc_feature 1..20: note = antisense sequence
  source 1..20: mol_type = other RNA
tcaccaactggtcaacatac

SEQ ID NO: 11834 - RNA, 20 nt, synthetic construct
  misc_feature 1..20: note = antisense sequence
  source 1..20: mol_type = other RNA
tttcaccaactggtcaacat

SEQ ID NO: 11835 - RNA, 20 nt, synthetic construct
  misc_feature 1..20: note = antisense sequence
  source 1..20: mol_type = other RNA
ttttcaccaactggtcaaca

SEQ ID NO: 11836 - RNA, 20 nt, synthetic construct
  misc_feature 1..20: note = antisense sequence
  source 1..20: mol_type = other RNA
ttttgggaagggaagtcttg

SEQ ID NO: 11837 - RNA, 20 nt, synthetic construct
  misc_feature 1..20: note = antisense sequence
  source 1..20: mol_type = other RNA
ttggttttgggaagggaagt

SEQ ID NO: 11838 - RNA, 20 nt, synthetic construct
  misc_feature 1..20: note = antisense sequence
  source 1..20: mol_type = other RNA
tgttggttttgggaagggaa

SEQ ID NO: 11839 - RNA, 20 nt, synthetic construct
  misc_feature 1..20: note = antisense sequence
  source 1..20: mol_type = other RNA
gatgttggttttgggaaggg

SEQ ID NO: 11840 - RNA, 20 nt, synthetic construct
  misc_feature 1..20: note = antisense sequence
  source 1..20: mol_type = other RNA
tagatgttggttttgggaag

SEQ ID NO: 11841 - RNA, 20 nt, synthetic construct
  misc_feature 1..20: note = antisense sequence
  source 1..20: mol_type = other RNA
ctagatgttggttttgggaa

SEQ ID NO: 11842 - RNA, 20 nt, synthetic construct
  misc_feature 1..20: note = antisense sequence
  source 1..20: mol_type = other RNA
atggctagatgttggttttg

SEQ ID NO: 11843 - RNA, 20 nt, synthetic construct
  misc_feature 1..20: note = antisense sequence
  source 1..20: mol_type = other RNA
gatggctagatgttggtttt

SEQ ID NO: 11844 - RNA, 20 nt, synthetic construct
  misc_feature 1..20: note = antisense sequence
  source 1..20: mol_type = other RNA
tgatggctagatgttggttt

SEQ ID NO: 11845 - RNA, 20 nt, synthetic construct
  misc_feature 1..20: note = antisense sequence
  source 1..20: mol_type = other RNA
tactgatggctagatgttgg

SEQ ID NO: 11846 - RNA, 20 nt, synthetic construct
  misc_feature 1..20: note = antisense sequence
  source 1..20: mol_type = other RNA
atactgatggctagatgttg

SEQ ID NO: 11847 - RNA, 20 nt, synthetic construct
  misc_feature 1..20: note = antisense sequence
  source 1..20: mol_type = other RNA
catactgatggctagatgtt

SEQ ID NO: 11848 - RNA, 20 nt, synthetic construct
  misc_feature 1..20: note = antisense sequence
  source 1..20: mol_type = other RNA
tacatactgatggctagatg

SEQ ID NO: 11849 - RNA, 20 nt, synthetic construct
  misc_feature 1..20: note = antisense sequence
  source 1..20: mol_type = other RNA
agctatgaactgcacgttgc

SEQ ID NO: 11850 - RNA, 20 nt, synthetic construct
  misc_feature 1..20: note = antisense sequence
  source 1..20: mol_type = other RNA
aagctatgaactgcacgttg

SEQ ID NO: 11851 - RNA, 20 nt, synthetic construct
  misc_feature 1..20: note = antisense sequence
  source 1..20: mol_type = other RNA
cctgcataattgttcaagct

SEQ ID NO: 11852 - RNA, 20 nt, synthetic construct
  misc_feature 1..20: note = antisense sequence
  source 1..20: mol_type = other RNA
gcctgcataattgttcaagc

SEQ ID NO: 11853 - RNA, 20 nt, synthetic construct
  misc_feature 1..20: note = antisense sequence
  source 1..20: mol_type = other RNA
agcctgcataattgttcaag

SEQ ID NO: 11854 - RNA, 20 nt, synthetic construct
  misc_feature 1..20: note = antisense sequence
  source 1..20: mol_type = other RNA
catagcctgcataattgttc

SEQ ID NO: 11855 - RNA, 20 nt, synthetic construct
  misc_feature 1..20: note = antisense sequence
  source 1..20: mol_type = other RNA
catcatcatagcctgcataa

SEQ ID NO: 11856 - RNA, 20 nt, synthetic construct
  misc_feature 1..20: note = antisense sequence
  source 1..20: mol_type = other RNA
acatcatcatagcctgcata

SEQ ID NO: 11857 - RNA, 20 nt, synthetic construct
  misc_feature 1..20: note = antisense sequence
  source 1..20: mol_type = other RNA
aacatcatcatagcctgcat

SEQ ID NO: 11858 - RNA, 20 nt, synthetic construct
  misc_feature 1..20: note = antisense sequence
  source 1..20: mol_type = other RNA
aaacatcatcatagcctgca

SEQ ID NO: 11859 - RNA, 20 nt, synthetic construct
  misc_feature 1..20: note = antisense sequence
  source 1..20: mol_type = other RNA
aaaacatcatcatagcctgc

SEQ ID NO: 11860 - RNA, 20 nt, synthetic construct
  misc_feature 1..20: note = antisense sequence
  source 1..20: mol_type = other RNA
gaaaacatcatcatagcctg

SEQ ID NO: 11861 - RNA, 20 nt, synthetic construct
  misc_feature 1..20: note = antisense sequence
  source 1..20: mol_type = other RNA
gaactgtgtgagagaacata

SEQ ID NO: 11862 - RNA, 20 nt, synthetic construct
  misc_feature 1..20: note = antisense sequence
  source 1..20: mol_type = other RNA
tgaactgtgtgagagaacat

SEQ ID NO: 11863 - RNA, 20 nt, synthetic construct
  misc_feature 1..20: note = antisense sequence
  source 1..20: mol_type = other RNA
gtgaactgtgtgagagaaca

SEQ ID NO: 11864 - RNA, 20 nt, synthetic construct
  misc_feature 1..20: note = antisense sequence
  source 1..20: mol_type = other RNA
atgtagtgaactgtgtgaga

SEQ ID NO: 11865 - RNA, 20 nt, synthetic construct
  misc_feature 1..20: note = antisense sequence
  source 1..20: mol_type = other RNA
caatgtagtgaactgtgtga

SEQ ID NO: 11866 - RNA, 20 nt, synthetic construct
  misc_feature 1..20: note = antisense sequence
  source 1..20: mol_type = other RNA
acaatgtagtgaactgtgtg

SEQ ID NO: 11867 - RNA, 20 nt, synthetic construct
  misc_feature 1..20: note = antisense sequence
  source 1..20: mol_type = other RNA
gtacaatgtagtgaactgtg

SEQ ID NO: 11868 - RNA, 20 nt, synthetic construct
  misc_feature 1..20: note = antisense sequence
  source 1..20: mol_type = other RNA
cacactgtctgattcacaac

SEQ ID NO: 11869 - RNA, 20 nt, synthetic construct
  misc_feature 1..20: note = antisense sequence
  source 1..20: mol_type = other RNA
tcacactgtctgattcacaa

SEQ ID NO: 11870 - RNA, 20 nt, synthetic construct
  misc_feature 1..20: note = antisense sequence
  source 1..20: mol_type = other RNA
agctcacactgtctgattca

SEQ ID NO: 11871 - RNA, 20 nt, synthetic construct
  misc_feature 1..20: note = antisense sequence
  source 1..20: mol_type = other RNA
aagctcacactgtctgattc

SEQ ID NO: 11872 - RNA, 20 nt, synthetic construct
  misc_feature 1..20: note = antisense sequence
  source 1..20: mol_type = other RNA
aggcaaagctcacactgtct

SEQ ID NO: 11873 - RNA, 20 nt, synthetic construct
  misc_feature 1..20: note = antisense sequence
  source 1..20: mol_type = other RNA
aaggcaaagctcacactgtc

SEQ ID NO: 11874 - RNA, 20 nt, synthetic construct
  misc_feature 1..20: note = antisense sequence
  source 1..20: mol_type = other RNA
caaggcaaagctcacactgt

SEQ ID NO: 11875 - RNA, 20 nt, synthetic construct
  misc_feature 1..20: note = antisense sequence
  source 1..20: mol_type = other RNA
acaaggcaaagctcacactg

SEQ ID NO: 11876 - RNA, 20 nt, synthetic construct
  misc_feature 1..20: note = antisense sequence
  source 1..20: mol_type = other RNA
attacaaggcaaagctcaca

SEQ ID NO: 11877 - RNA, 20 nt, synthetic construct
  misc_feature 1..20: note = antisense sequence
  source 1..20: mol_type = other RNA
aattacaaggcaaagctcac

SEQ ID NO: 11878 - RNA, 20 nt, synthetic construct
  misc_feature 1..20: note = antisense sequence
  source 1..20: mol_type = other RNA
ccacatctgtagcaaatatg

SEQ ID NO: 11879 - RNA, 20 nt, synthetic construct
  misc_feature 1..20: note = antisense sequence
  source 1..20: mol_type = other RNA
aggaccattatgccttttct

SEQ ID NO: 11880 - RNA, 20 nt, synthetic construct
  misc_feature 1..20: note = antisense sequence
  source 1..20: mol_type = other RNA
gctaccatacctgttttaca

SEQ ID NO: 11881 - RNA, 20 nt, synthetic construct
  misc_feature 1..20: note = antisense sequence
  source 1..20: mol_type = other RNA
tgctaccatacctgttttac

SEQ ID NO: 11882 - RNA, 20 nt, synthetic construct
  misc_feature 1..20: note = antisense sequence
  source 1..20: mol_type = other RNA
ctattgctaccatacctgtt

SEQ ID NO: 11883 - RNA, 20 nt, synthetic construct
  misc_feature 1..20: note = antisense sequence
  source 1..20: mol_type = other RNA
gctattgctaccatacctgt

SEQ ID NO: 11884 - RNA, 20 nt, synthetic construct
  misc_feature 1..20: note = antisense sequence
  source 1..20: mol_type = other RNA
atgctattgctaccatacct

SEQ ID NO: 11885 - RNA, 20 nt, synthetic construct
  misc_feature 1..20: note = antisense sequence
  source 1..20: mol_type = other RNA
gatgctattgctaccatacc

SEQ ID NO: 11886 - RNA, 20 nt, synthetic construct
  misc_feature 1..20: note = antisense sequence
  source 1..20: mol_type = other RNA
agatgctattgctaccatac

SEQ ID NO: 11887 - RNA, 20 nt, synthetic construct
  misc_feature 1..20: note = antisense sequence
  source 1..20: mol_type = other RNA
gttagatgctattgctacca

SEQ ID NO: 11888 - RNA, 20 nt, synthetic construct
  misc_feature 1..20: note = antisense sequence
  source 1..20: mol_type = other RNA
agttagatgctattgctacc

SEQ ID NO: 11889 - RNA, 20 nt, synthetic construct
  misc_feature 1..20: note = antisense sequence
  source 1..20: mol_type = other RNA
gagttagatgctattgctac

SEQ ID NO: 11890 - RNA, 20 nt, synthetic construct
  misc_feature 1..20: note = antisense sequence
  source 1..20: mol_type = other RNA
ccagtccttacatgcaaata

SEQ ID NO: 11891 - RNA, 20 nt, synthetic construct
  misc_feature 1..20: note = antisense sequence
  source 1..20: mol_type = other RNA
cccagtccttacatgcaaat

SEQ ID NO: 11892 - RNA, 20 nt, synthetic construct
  misc_feature 1..20: note = antisense sequence
  source 1..20: mol_type = other RNA
acccagtccttacatgcaaa

SEQ ID NO: 11893 - RNA, 20 nt, synthetic construct
  misc_feature 1..20: note = antisense sequence
  source 1..20: mol_type = other RNA
gacccagtccttacatgcaa

SEQ ID NO: 11894 - RNA, 20 nt, synthetic construct
  misc_feature 1..20: note = antisense sequence
  source 1..20: mol_type = other RNA
tgacccagtccttacatgca

SEQ ID NO: 11895 - RNA, 20 nt, synthetic construct
  misc_feature 1..20: note = antisense sequence
  source 1..20: mol_type = other RNA
atgacccagtccttacatgc

SEQ ID NO: 11896 - RNA, 20 nt, synthetic construct
  misc_feature 1..20: note = antisense sequence
  source 1..20: mol_type = other RNA
agcatgacccagtccttaca

SEQ ID NO: 11897 - RNA, 20 nt, synthetic construct
  misc_feature 1..20: note = antisense sequence
  source 1..20: mol_type = other RNA
aagcatgacccagtccttac

SEQ ID NO: 11898 - RNA, 20 nt, synthetic construct
  misc_feature 1..20: note = antisense sequence
  source 1..20: mol_type = other RNA
ccaagcatgacccagtcctt

SEQ ID NO: 11899 - RNA, 20 nt, synthetic construct
  misc_feature 1..20: note = antisense sequence
  source 1..20: mol_type = other RNA
ctccaagcatgacccagtcc

SEQ ID NO: 11900 - RNA, 20 nt, synthetic construct
  misc_feature 1..20: note = antisense sequence
  source 1..20: mol_type = other RNA
gctccaagcatgacccagtc

SEQ ID NO: 11901 - RNA, 20 nt, synthetic construct
  misc_feature 1..20: note = antisense sequence
  source 1..20: mol_type = other RNA
taggctcctactgctccaag

SEQ ID NO: 11902 - RNA, 20 nt, synthetic construct
  misc_feature 1..20: note = antisense sequence
  source 1..20: mol_type = other RNA
cataggctcctactgctcca

SEQ ID NO: 11903 - RNA, 20 nt, synthetic construct
  misc_feature 1..20: note = antisense sequence
  source 1..20: mol_type = other RNA
atcataggctcctactgctc

SEQ ID NO: 11904 - RNA, 20 nt, synthetic construct
  misc_feature 1..20: note = antisense sequence
  source 1..20: mol_type = other RNA
aatcataggctcctactgct

SEQ ID NO: 11905 - RNA, 20 nt, synthetic construct
  misc_feature 1..20: note = antisense sequence
  source 1..20: mol_type = other RNA
caatcataggctcctactgc

SEQ ID NO: 11906 - RNA, 20 nt, synthetic construct
  misc_feature 1..20: note = antisense sequence
  source 1..20: mol_type = other RNA
ccaatcataggctcctactg

SEQ ID NO: 11907 - RNA, 20 nt, synthetic construct
  misc_feature 1..20: note = antisense sequence
  source 1..20: mol_type = other RNA
tccaatcataggctcctact

SEQ ID NO: 11908 - RNA, 20 nt, synthetic construct
  misc_feature 1..20: note = antisense sequence
  source 1..20: mol_type = other RNA
ttccaatcataggctcctac

SEQ ID NO: 11909 - RNA, 20 nt, synthetic construct
  misc_feature 1..20: note = antisense sequence
  source 1..20: mol_type = other RNA
attccaatcataggctccta

SEQ ID NO: 11910 - RNA, 20 nt, synthetic construct
  misc_feature 1..20: note = antisense sequence
  source 1..20: mol_type = other RNA
cattccaatcataggctcct

SEQ ID NO: 11911 - RNA, 20 nt, synthetic construct
  misc_feature 1..20: note = antisense sequence
  source 1..20: mol_type = other RNA
ccattccaatcataggctcc

SEQ ID NO: 11912 - RNA, 20 nt, synthetic construct
  misc_feature 1..20: note = antisense sequence
  source 1..20: mol_type = other RNA
tccattccaatcataggctc

SEQ ID NO: 11913 - RNA, 20 nt, synthetic construct
  misc_feature 1..20: note = antisense sequence
  source 1..20: mol_type = other RNA
ttccattccaatcataggct

SEQ ID NO: 11914 - RNA, 20 nt, synthetic construct
  misc_feature 1..20: note = antisense sequence
  source 1..20: mol_type = other RNA
gttccattccaatcataggc

SEQ ID NO: 11915 - RNA, 20 nt, synthetic construct
  misc_feature 1..20: note = antisense sequence
  source 1..20: mol_type = other RNA
tgttccattccaatcatagg

SEQ ID NO: 11916 - RNA, 20 nt, synthetic construct
  misc_feature 1..20: note = antisense sequence
  source 1..20: mol_type = other RNA
gacaactgttccattccaat

SEQ ID NO: 11917 - RNA, 20 nt, synthetic construct
  misc_feature 1..20: note = antisense sequence
  source 1..20: mol_type = other RNA
tgacaactgttccattccaa

SEQ ID NO: 11918 - RNA, 20 nt, synthetic construct
  misc_feature 1..20: note = antisense sequence
  source 1..20: mol_type = other RNA
atgacaactgttccattcca

SEQ ID NO: 11919 - RNA, 20 nt, synthetic construct
  misc_feature 1..20: note = antisense sequence
  source 1..20: mol_type = other RNA
catgacaactgttccattcc

SEQ ID NO: 11920 - RNA, 20 nt, synthetic construct
  misc_feature 1..20: note = antisense sequence
  source 1..20: mol_type = other RNA
cttctgcatgacaactgttc

SEQ ID NO: 11921 - RNA, 20 nt, synthetic construct
  misc_feature 1..20: note = antisense sequence
  source 1..20: mol_type = other RNA
ccttctgcatgacaactgtt

SEQ ID NO: 11922 - RNA, 20 nt, synthetic construct
  misc_feature 1..20: note = antisense sequence
  source 1..20: mol_type = other RNA
actagccttctgcatgacaa

SEQ ID NO: 11923 - RNA, 20 nt, synthetic construct
  misc_feature 1..20: note = antisense sequence
  source 1..20: mol_type = other RNA
gactagccttctgcatgaca

SEQ ID NO: 11924 - RNA, 20 nt, synthetic construct
  misc_feature 1..20: note = antisense sequence
  source 1..20: mol_type = other RNA
tgactagccttctgcatgac

SEQ ID NO: 11925 - RNA, 20 nt, synthetic construct
  misc_feature 1..20: note = antisense sequence
  source 1..20: mol_type = other RNA
atttgactagccttctgcat

SEQ ID NO: 11926 - RNA, 20 nt, synthetic construct
  misc_feature 1..20: note = antisense sequence
  source 1..20: mol_type = other RNA
gatttgactagccttctgca

SEQ ID NO: 11927 - RNA, 20 nt, synthetic construct
  misc_feature 1..20: note = antisense sequence
  source 1..20: mol_type = other RNA
tgatttgactagccttctgc

SEQ ID NO: 11928 - RNA, 20 nt, synthetic construct
  misc_feature 1..20: note = antisense sequence
  source 1..20: mol_type = other RNA
atgatttgactagccttctg

SEQ ID NO: 11929 - RNA, 20 nt, synthetic construct
  misc_feature 1..20: note = antisense sequence
  source 1..20: mol_type = other RNA
ggattatgatttgactagcc

SEQ ID NO: 11930 - RNA, 20 nt, synthetic construct
  misc_feature 1..20: note = antisense sequence
  source 1..20: mol_type = other RNA
cgagggattatgatttgact

SEQ ID NO: 11931 - RNA, 20 nt, synthetic construct
  misc_feature 1..20: note = antisense sequence
  source 1..20: mol_type = other RNA
gtgtttcgagggattatgat

SEQ ID NO: 11932 - RNA, 20 nt, synthetic construct
  misc_feature 1..20: note = antisense sequence
  source 1..20: mol_type = other RNA
tgtgtttcgagggattatga

SEQ ID NO: 11933 - RNA, 20 nt, synthetic construct
  misc_feature 1..20: note = antisense sequence
  source 1..20: mol_type = other RNA
ttgtgtttcgagggattatg

SEQ ID NO: 11934 - RNA, 20 nt, synthetic construct
  misc_feature 1..20: note = antisense sequence
  source 1..20: mol_type = other RNA
gttgtgtttcgagggattat

SEQ ID NO: 11935 - RNA, 20 nt, synthetic construct
  misc_feature 1..20: note = antisense sequence
  source 1..20: mol_type = other RNA
ggttgtgtttcgagggatta

SEQ ID NO: 11936 - RNA, 20 nt, synthetic construct
  misc_feature 1..20: note = antisense sequence
  source 1..20: mol_type = other RNA
aggttgtgtttcgagggatt

SEQ ID NO: 11937 - RNA, 20 nt, synthetic construct
  misc_feature 1..20: note = antisense sequence
  source 1..20: mol_type = other RNA
aaggttgtgtttcgagggat

SEQ ID NO: 11938 - RNA, 20 nt, synthetic construct
  misc_feature 1..20: note = antisense sequence
  source 1..20: mol_type = other RNA
aaaggttgtgtttcgaggga

SEQ ID NO: 11939 - RNA, 20 nt, synthetic construct
  misc_feature 1..20: note = antisense sequence
  source 1..20: mol_type = other RNA
taaaggttgtgtttcgaggg

SEQ ID NO: 11940 - RNA, 20 nt, synthetic construct
  misc_feature 1..20: note = antisense sequence
  source 1..20: mol_type = other RNA
ttaaaggttgtgtttcgagg

SEQ ID NO: 11941 - RNA, 20 nt, synthetic construct
  misc_feature 1..20: note = antisense sequence
  source 1..20: mol_type = other RNA
agcaagcggttcattctttt

SEQ ID NO: 11942 - RNA, 20 nt, synthetic construct
  misc_feature 1..20: note = antisense sequence
  source 1..20: mol_type = other RNA
aagcaagcggttcattcttt

SEQ ID NO: 11943 - RNA, 20 nt, synthetic construct
  misc_feature 1..20: note = antisense sequence
  source 1..20: mol_type = other RNA
gaagcaagcggttcattctt

SEQ ID NO: 11944 - RNA, 20 nt, synthetic construct
  misc_feature 1..20: note = antisense sequence
  source 1..20: mol_type = other RNA
aagaagcaagcggttcattc

SEQ ID NO: 11945 - RNA, 20 nt, synthetic construct
  misc_feature 1..20: note = antisense sequence
  source 1..20: mol_type = other RNA
taagaagcaagcggttcatt

SEQ ID NO: 11946 - RNA, 20 nt, synthetic construct
  misc_feature 1..20: note = antisense sequence
  source 1..20: mol_type = other RNA
ataagaagcaagcggttcat

SEQ ID NO: 11947 - RNA, 20 nt, synthetic construct
  misc_feature 1..20: note = antisense sequence
  source 1..20: mol_type = other RNA
aataagaagcaagcggttca

SEQ ID NO: 11948 - RNA, 20 nt, synthetic construct
  misc_feature 1..20: note = antisense sequence
  source 1..20: mol_type = other RNA
aaataagaagcaagcggttc

SEQ ID NO: 11949 - RNA, 20 nt, synthetic construct
  misc_feature 1..20: note = antisense sequence
  source 1..20: mol_type = other RNA
cctaaataagaagcaagcgg

SEQ ID NO: 11950 - RNA, 20 nt, synthetic construct
  misc_feature 1..20: note = antisense sequence
  source 1..20: mol_type = other RNA
aatcctgctatatggttgca

SEQ ID NO: 11951 - RNA, 20 nt, synthetic construct
  misc_feature 1..20: note = antisense sequence
  source 1..20: mol_type = other RNA
taatcctgctatatggttgc

SEQ ID NO: 11952 - RNA, 20 nt, synthetic construct
  misc_feature 1..20: note = antisense sequence
  source 1..20: mol_type = other RNA
ggttctggaaaatacccaac

SEQ ID NO: 11953 - RNA, 20 nt, synthetic construct
  misc_feature 1..20: note = antisense sequence
  source 1..20: mol_type = other RNA
catgggttctggaaaatacc

SEQ ID NO: 11954 - RNA, 20 nt, synthetic construct
  misc_feature 1..20: note = antisense sequence
  source 1..20: mol_type = other RNA
gcatgggttctggaaaatac

SEQ ID NO: 11955 - RNA, 20 nt, synthetic construct
  misc_feature 1..20: note = antisense sequence
  source 1..20: mol_type = other RNA
ttgcatgggttctggaaaat

SEQ ID NO: 11956 - RNA, 20 nt, synthetic construct
  misc_feature 1..20: note = antisense sequence
  source 1..20: mol_type = other RNA
tttgcatgggttctggaaaa

SEQ ID NO: 11957 - RNA, 20 nt, synthetic construct
  misc_feature 1..20: note = antisense sequence
  source 1..20: mol_type = other RNA
actttgcatgggttctggaa

SEQ ID NO: 11958 - RNA, 20 nt, synthetic construct
  misc_feature 1..20: note = antisense sequence
  source 1..20: mol_type = other RNA
aactttgcatgggttctgga

SEQ ID NO: 11959 - RNA, 20 nt, synthetic construct
  misc_feature 1..20: note = antisense sequence
  source 1..20: mol_type = other RNA
aaaactttgcatgggttctg

SEQ ID NO: 11960 - RNA, 20 nt, synthetic construct
  misc_feature 1..20: note = antisense sequence
  source 1..20: mol_type = other RNA
ctaaaactttgcatgggttc

SEQ ID NO: 11961 - RNA, 20 nt, synthetic construct
  misc_feature 1..20: note = antisense sequence
  source 1..20: mol_type = other RNA
cctaaaactttgcatgggtt

SEQ ID NO: 11962 - RNA, 20 nt, synthetic construct
  misc_feature 1..20: note = antisense sequence
  source 1..20: mol_type = other RNA
gcctaaaactttgcatgggt

SEQ ID NO: 11963 - RNA, 20 nt, synthetic construct
  misc_feature 1..20: note = antisense sequence
  source 1..20: mol_type = other RNA
actaaagctgctcagaggcc

SEQ ID NO: 11964 - RNA, 20 nt, synthetic construct
  misc_feature 1..20: note = antisense sequence
  source 1..20: mol_type = other RNA
actaactaaagctgctcaga

SEQ ID NO: 11965 - RNA, 20 nt, synthetic construct
  misc_feature 1..20: note = antisense sequence
  source 1..20: mol_type = other RNA
gactaactaaagctgctcag

SEQ ID NO: 11966 - RNA, 20 nt, synthetic construct
  misc_feature 1..20: note = antisense sequence
  source 1..20: mol_type = other RNA
tgactaactaaagctgctca

SEQ ID NO: 11967 - RNA, 20 nt, synthetic construct
  misc_feature 1..20: note = antisense sequence
  source 1..20: mol_type = other RNA
ttgactaactaaagctgctc

SEQ ID NO: 11968 - RNA, 20 nt, synthetic construct
  misc_feature 1..20: note = antisense sequence
  source 1..20: mol_type = other RNA
agacagccctactaacaaaa

SEQ ID NO: 11969 - RNA, 20 nt, synthetic construct
  misc_feature 1..20: note = antisense sequence
  source 1..20: mol_type = other RNA
tagacagccctactaacaaa

SEQ ID NO: 11970 - RNA, 20 nt, synthetic construct
  misc_feature 1..20: note = antisense sequence
  source 1..20: mol_type = other RNA
ctgcattagacagccctact

SEQ ID NO: 11971 - RNA, 20 nt, synthetic construct
  misc_feature 1..20: note = antisense sequence
  source 1..20: mol_type = other RNA
cctgcattagacagccctac

SEQ ID NO: 11972 - RNA, 20 nt, synthetic construct
  misc_feature 1..20: note = antisense sequence
  source 1..20: mol_type = other RNA
ccctgcattagacagcccta

SEQ ID NO: 11973 - RNA, 20 nt, synthetic construct
  misc_feature 1..20: note = antisense sequence
  source 1..20: mol_type = other RNA
tccctgcattagacagccct

SEQ ID NO: 11974 - RNA, 20 nt, synthetic construct
  misc_feature 1..20: note = antisense sequence
  source 1..20: mol_type = other RNA
attccctgcattagacagcc

SEQ ID NO: 11975 - RNA, 20 nt, synthetic construct
  misc_feature 1..20: note = antisense sequence
  source 1..20: mol_type = other RNA
taaaccattccctgcattag

SEQ ID NO: 11976 - RNA, 20 nt, synthetic construct
  misc_feature 1..20: note = antisense sequence
  source 1..20: mol_type = other RNA
ctaaaccattccctgcatta

SEQ ID NO: 11977 - RNA, 20 nt, synthetic construct
  misc_feature 1..20: note = antisense sequence
  source 1..20: mol_type = other RNA
cctaaaccattccctgcatt

SEQ ID NO: 11978 - RNA, 20 nt, synthetic construct
  misc_feature 1..20: note = antisense sequence
  source 1..20: mol_type = other RNA
acctaaaccattccctgcat

SEQ ID NO: 11979 - RNA, 20 nt, synthetic construct
  misc_feature 1..20: note = antisense sequence
  source 1..20: mol_type = other RNA
aacctaaaccattccctgca

SEQ ID NO: 11980 - RNA, 20 nt, synthetic construct
  misc_feature 1..20: note = antisense sequence
  source 1..20: mol_type = other RNA
gcacatatcaacctaaacca

SEQ ID NO: 11981 - RNA, 20 nt, synthetic construct
  misc_feature 1..20: note = antisense sequence
  source 1..20: mol_type = other RNA
ggcacatatcaacctaaacc

SEQ ID NO: 11982 - RNA, 20 nt, synthetic construct
  misc_feature 1..20: note = antisense sequence
  source 1..20: mol_type = other RNA
gggcacatatcaacctaaac

SEQ ID NO: 11983 - RNA, 20 nt, synthetic construct
  misc_feature 1..20: note = antisense sequence
  source 1..20: mol_type = other RNA
agggcacatatcaacctaaa

SEQ ID NO: 11984 - RNA, 20 nt, synthetic construct
  misc_feature 1..20: note = antisense sequence
  source 1..20: mol_type = other RNA
aagggcacatatcaacctaa

SEQ ID NO: 11985 - RNA, 20 nt, synthetic construct
  misc_feature 1..20: note = antisense sequence
  source 1..20: mol_type = other RNA
gaaagggcacatatcaacct

SEQ ID NO: 11986 - RNA, 20 nt, synthetic construct
  misc_feature 1..20: note = antisense sequence
  source 1..20: mol_type = other RNA
agaaagggcacatatcaacc

SEQ ID NO: 11987 - RNA, 20 nt, synthetic construct
  misc_feature 1..20: note = antisense sequence
  source 1..20: mol_type = other RNA
cagaaagggcacatatcaac

SEQ ID NO: 11988 - RNA, 20 nt, synthetic construct
  misc_feature 1..20: note = antisense sequence
  source 1..20: mol_type = other RNA
tcagaaagggcacatatcaa

SEQ ID NO: 11989 - RNA, 20 nt, synthetic construct
  misc_feature 1..20: note = antisense sequence
  source 1..20: mol_type = other RNA
tatcagaaagggcacatatc

SEQ ID NO: 11990 - RNA, 20 nt, synthetic construct
  misc_feature 1..20: note = antisense sequence
  source 1..20: mol_type = other RNA
catatcagaaagggcacata

SEQ ID NO: 11991 - RNA, 20 nt, synthetic construct
  misc_feature 1..20: note = antisense sequence
  source 1..20: mol_type = other RNA
acatatcagaaagggcacat

SEQ ID NO: 11992 - RNA, 20 nt, synthetic construct
  misc_feature 1..20: note = antisense sequence
  source 1..20: mol_type = other RNA
aacatatcagaaagggcaca

SEQ ID NO: 11993 - RNA, 20 nt, synthetic construct
  misc_feature 1..20: note = antisense sequence
  source 1..20: mol_type = other RNA
gaacatatcagaaagggcac

SEQ ID NO: 11994 - RNA, 20 nt, synthetic construct
  misc_feature 1..20: note = antisense sequence
  source 1..20: mol_type = other RNA
agttgataccagacacagag

SEQ ID NO: 11995 - RNA, 20 nt, synthetic construct
  misc_feature 1..20: note = antisense sequence
  source 1..20: mol_type = other RNA
aagttgataccagacacaga

SEQ ID NO: 11996 - RNA, 20 nt, synthetic construct
  misc_feature 1..20: note = antisense sequence
  source 1..20: mol_type = other RNA
tccaccaggttcaaagttct

SEQ ID NO: 11997 - RNA, 20 nt, synthetic construct
  misc_feature 1..20: note = antisense sequence
  source 1..20: mol_type = other RNA
gtccaccaggttcaaagttc

SEQ ID NO: 11998 - RNA, 20 nt, synthetic construct
  misc_feature 1..20: note = antisense sequence
  source 1..20: mol_type = other RNA
tgtccaccaggttcaaagtt

SEQ ID NO: 11999 - RNA, 20 nt, synthetic construct
  misc_feature 1..20: note = antisense sequence
  source 1..20: mol_type = other RNA
ttgtccaccaggttcaaagt

SEQ ID NO: 12000 - RNA, 20 nt, synthetic construct
  misc_feature 1..20: note = antisense sequence
  source 1..20: mol_type = other RNA
cttgtccaccaggttcaaag

SEQ ID NO: 12001 - RNA, 20 nt, synthetic construct
  misc_feature 1..20: note = antisense sequence
  source 1..20: mol_type = other RNA
tcttgtccaccaggttcaaa

SEQ ID NO: 12002 - RNA, 20 nt, synthetic construct
  misc_feature 1..20: note = antisense sequence
  source 1..20: mol_type = other RNA
ttcttgtccaccaggttcaa

SEQ ID NO: 12003 - RNA, 20 nt, synthetic construct
  misc_feature 1..20: note = antisense sequence
  source 1..20: mol_type = other RNA
tttcttgtccaccaggttca

SEQ ID NO: 12004 - RNA, 20 nt, synthetic construct
  misc_feature 1..20: note = antisense sequence
  source 1..20: mol_type = other RNA
tcatttcttgtccaccaggt

SEQ ID NO: 12005 - RNA, 20 nt, synthetic construct
  misc_feature 1..20: note = antisense sequence
  source 1..20: mol_type = other RNA
ctctcatttcttgtccacca

SEQ ID NO: 12006 - RNA, 20 nt, synthetic construct
  misc_feature 1..20: note = antisense sequence
  source 1..20: mol_type = other RNA
actctcatttcttgtccacc

SEQ ID NO: 12007 - RNA, 20 nt, synthetic construct
  misc_feature 1..20: note = antisense sequence
  source 1..20: mol_type = other RNA
ggtttccttttctactctca

SEQ ID NO: 12008 - RNA, 20 nt, synthetic construct
  misc_feature 1..20: note = antisense sequence
  source 1..20: mol_type = other RNA
aggtttccttttctactctc

SEQ ID NO: 12009 - RNA, 20 nt, synthetic construct
  misc_feature 1..20: note = antisense sequence
  source 1..20: mol_type = other RNA
gaggtttccttttctactct

SEQ ID NO: 12010 - RNA, 20 nt, synthetic construct
  misc_feature 1..20: note = antisense sequence
  source 1..20: mol_type = other RNA
cgaggtttccttttctactc

SEQ ID NO: 12011 - RNA, 20 nt, synthetic construct
  misc_feature 1..20: note = antisense sequence
  source 1..20: mol_type = other RNA
tcgaggtttccttttctact

SEQ ID NO: 12012 - RNA, 20 nt, synthetic construct
  misc_feature 1..20: note = antisense sequence
  source 1..20: mol_type = other RNA
gtcgaggtttccttttctac

SEQ ID NO: 12013 - RNA, 20 nt, synthetic construct
  misc_feature 1..20: note = antisense sequence
  source 1..20: mol_type = other RNA
agtcgaggtttccttttcta

SEQ ID NO: 12014 - RNA, 20 nt, synthetic construct
  misc_feature 1..20: note = antisense sequence
  source 1..20: mol_type = other RNA
aagtcgaggtttccttttct

SEQ ID NO: 12015 - RNA, 20 nt, synthetic construct
  misc_feature 1..20: note = antisense sequence
  source 1..20: mol_type = other RNA
gaagtcgaggtttccttttc

SEQ ID NO: 12016 - RNA, 20 nt, synthetic construct
  misc_feature 1..20: note = antisense sequence
  source 1..20: mol_type = other RNA
agaagtcgaggtttcctttt

SEQ ID NO: 12017 - RNA, 20 nt, synthetic construct
  misc_feature 1..20: note = antisense sequence
  source 1..20: mol_type = other RNA
gagaagtcgaggtttccttt

SEQ ID NO: 12018 - RNA, 20 nt, synthetic construct
  misc_feature 1..20: note = antisense sequence
  source 1..20: mol_type = other RNA
ggagaagtcgaggtttcctt

SEQ ID NO: 12019 - RNA, 20 nt, synthetic construct
  misc_feature 1..20: note = antisense sequence
  source 1..20: mol_type = other RNA
taggagaagtcgaggtttcc

SEQ ID NO: 12020 - RNA, 20 nt, synthetic construct
  misc_feature 1..20: note = antisense sequence
  source 1..20: mol_type = other RNA
ataggagaagtcgaggtttc

SEQ ID NO: 12021 - RNA, 20 nt, synthetic construct
  misc_feature 1..20: note = antisense sequence
  source 1..20: mol_type = other RNA
tataggagaagtcgaggttt

SEQ ID NO: 12022 - RNA, 20 nt, synthetic construct
  misc_feature 1..20: note = antisense sequence
  source 1..20: mol_type = other RNA
atataggagaagtcgaggtt

SEQ ID NO: 12023 - RNA, 20 nt, synthetic construct
  misc_feature 1..20: note = antisense sequence
  source 1..20: mol_type = other RNA
gatataggagaagtcgaggt

SEQ ID NO: 12024 - RNA, 20 nt, synthetic construct
  misc_feature 1..20: note = antisense sequence
  source 1..20: mol_type = other RNA
ggatataggagaagtcgagg

SEQ ID NO: 12025 - RNA, 20 nt, synthetic construct
  misc_feature 1..20: note = antisense sequence
  source 1..20: mol_type = other RNA
aggatataggagaagtcgag

SEQ ID NO: 12026 - RNA, 20 nt, synthetic construct
  misc_feature 1..20: note = antisense sequence
  source 1..20: mol_type = other RNA
ggttttcaggatataggaga

SEQ ID NO: 12027 - RNA, 20 nt, synthetic construct
  misc_feature 1..20: note = antisense sequence
  source 1..20: mol_type = other RNA
ggacccatagagagaaatta

SEQ ID NO: 12028 - RNA, 20 nt, synthetic construct
  misc_feature 1..20: note = antisense sequence
  source 1..20: mol_type = other RNA
aggacccatagagagaaatt

SEQ ID NO: 12029 - RNA, 20 nt, synthetic construct
  misc_feature 1..20: note = antisense sequence
  source 1..20: mol_type = other RNA
taggacccatagagagaaat

SEQ ID NO: 12030 - RNA, 20 nt, synthetic construct
  misc_feature 1..20: note = antisense sequence
  source 1..20: mol_type = other RNA
attaggacccatagagagaa

SEQ ID NO: 12031 - RNA, 20 nt, synthetic construct
  misc_feature 1..20: note = antisense sequence
  source 1..20: mol_type = other RNA
aattaggacccatagagaga

SEQ ID NO: 12032 - RNA, 20 nt, synthetic construct
  misc_feature 1..20: note = antisense sequence
  source 1..20: mol_type = other RNA
gtctgattgtgaatggagct

SEQ ID NO: 12033 - RNA, 20 nt, synthetic construct
  misc_feature 1..20: note = antisense sequence
  source 1..20: mol_type = other RNA
tgtctgattgtgaatggagc

SEQ ID NO: 12034 - RNA, 20 nt, synthetic construct
  misc_feature 1..20: note = antisense sequence
  source 1..20: mol_type = other RNA
ttgtctgattgtgaatggag

SEQ ID NO: 12035 - RNA, 20 nt, synthetic construct
  misc_feature 1..20: note = antisense sequence
  source 1..20: mol_type = other RNA
actgggaaacaagatcatgt

SEQ ID NO: 12036 - RNA, 20 nt, synthetic construct
  misc_feature 1..20: note = antisense sequence
  source 1..20: mol_type = other RNA
cactgggaaacaagatcatg

SEQ ID NO: 12037 - RNA, 20 nt, synthetic construct
  misc_feature 1..20: note = antisense sequence
  source 1..20: mol_type = other RNA
acactgggaaacaagatcat

SEQ ID NO: 12038 - RNA, 20 nt, synthetic construct
  misc_feature 1..20: note = antisense sequence
  source 1..20: mol_type = other RNA
agacactgggaaacaagatc

SEQ ID NO: 12039 - RNA, 20 nt, synthetic construct
  misc_feature 1..20: note = antisense sequence
  source 1..20: mol_type = other RNA
caagacactgggaaacaaga

SEQ ID NO: 12040 - RNA, 20 nt, synthetic construct
  misc_feature 1..20: note = antisense sequence
  source 1..20: mol_type = other RNA
ctcctcatttctggcaagac

SEQ ID NO: 12041 - RNA, 20 nt, synthetic construct
  misc_feature 1..20: note = antisense sequence
  source 1..20: mol_type = other RNA
caactcctcatttctggcaa

SEQ ID NO: 12042 - RNA, 20 nt, synthetic construct
  misc_feature 1..20: note = antisense sequence
  source 1..20: mol_type = other RNA
acaactcctcatttctggca

SEQ ID NO: 12043 - RNA, 20 nt, synthetic construct
  misc_feature 1..20: note = antisense sequence
  source 1..20: mol_type = other RNA
catacaactcctcatttctg

SEQ ID NO: 12044 - RNA, 20 nt, synthetic construct
  misc_feature 1..20: note = antisense sequence
  source 1..20: mol_type = other RNA
ccagacatacaactcctcat

SEQ ID NO: 12045 - RNA, 20 nt, synthetic construct
  misc_feature 1..20: note = antisense sequence
  source 1..20: mol_type = other RNA
taccagacatacaactcctc

SEQ ID NO: 12046 - RNA, 20 nt, synthetic construct
  misc_feature 1..20: note = antisense sequence
  source 1..20: mol_type = other RNA
gtaccagacatacaactcct

SEQ ID NO: 12047 - RNA, 20 nt, synthetic construct
  misc_feature 1..20: note = antisense sequence
  source 1..20: mol_type = other RNA
tcagcttggtatagatccca

SEQ ID NO: 12048 - RNA, 20 nt, synthetic construct
  misc_feature 1..20: note = antisense sequence
  source 1..20: mol_type = other RNA
ctcagcttggtatagatccc

SEQ ID NO: 12049 - RNA, 20 nt, synthetic construct
  misc_feature 1..20: note = antisense sequence
  source 1..20: mol_type = other RNA
gctcagcttggtatagatcc

SEQ ID NO: 12050 - RNA, 20 nt, synthetic construct
  misc_feature 1..20: note = antisense sequence
  source 1..20: mol_type = other RNA
tgctcagcttggtatagatc

SEQ ID NO: 12051 - RNA, 20 nt, synthetic construct
  misc_feature 1..20: note = antisense sequence
  source 1..20: mol_type = other RNA
ttgctcagcttggtatagat

SEQ ID NO: 12052 - RNA, 20 nt, synthetic construct
  misc_feature 1..20: note = antisense sequence
  source 1..20: mol_type = other RNA
gttgctcagcttggtataga

SEQ ID NO: 12053 - RNA, 20 nt, synthetic construct
  misc_feature 1..20: note = antisense sequence
  source 1..20: mol_type = other RNA
gtgttgctcagcttggtata

SEQ ID NO: 12054 - RNA, 20 nt, synthetic construct
  misc_feature 1..20: note = antisense sequence
  source 1..20: mol_type = other RNA
ggtgttgctcagcttggtat

SEQ ID NO: 12055 - RNA, 20 nt, synthetic construct
  misc_feature 1..20: note = antisense sequence
  source 1..20: mol_type = other RNA
aggtgttgctcagcttggta

SEQ ID NO: 12056 - RNA, 20 nt, synthetic construct
  misc_feature 1..20: note = antisense sequence
  source 1..20: mol_type = other RNA
caggtgttgctcagcttggt

SEQ ID NO: 12057 - RNA, 20 nt, synthetic construct
  misc_feature 1..20: note = antisense sequence
  source 1..20: mol_type = other RNA
ttaggtcctcccaactgttg

SEQ ID NO: 12058 - RNA, 20 nt, synthetic construct
  misc_feature 1..20: note = antisense sequence
  source 1..20: mol_type = other RNA
attttaggtcctcccaactg

SEQ ID NO: 12059 - RNA, 20 nt, synthetic construct
  misc_feature 1..20: note = antisense sequence
  source 1..20: mol_type = other RNA
tgggaagccatatcctgatg

SEQ ID NO: 12060 - RNA, 20 nt, synthetic construct
  misc_feature 1..20: note = antisense sequence
  source 1..20: mol_type = other RNA
ctgggaagccatatcctgat

SEQ ID NO: 12061 - RNA, 20 nt, synthetic construct
  misc_feature 1..20: note = antisense sequence
  source 1..20: mol_type = other RNA
gctgggaagccatatcctga

SEQ ID NO: 12062 - RNA, 20 nt, synthetic construct
  misc_feature 1..20: note = antisense sequence
  source 1..20: mol_type = other RNA
gagctgggaagccatatcct

SEQ ID NO: 12063 - RNA, 20 nt, synthetic construct
  misc_feature 1..20: note = antisense sequence
  source 1..20: mol_type = other RNA
aagagctgggaagccatatc

SEQ ID NO: 12064 - RNA, 20 nt, synthetic construct
  misc_feature 1..20: note = antisense sequence
  source 1..20: mol_type = other RNA
tgagtaagagctgggaagcc

SEQ ID NO: 12065 - RNA, 20 nt, synthetic construct
  misc_feature 1..20: note = antisense sequence
  source 1..20: mol_type = other RNA
gtgagtaagagctgggaagc

SEQ ID NO: 12066 - RNA, 20 nt, synthetic construct
  misc_feature 1..20: note = antisense sequence
  source 1..20: mol_type = other RNA
agtgagtaagagctgggaag

SEQ ID NO: 12067 - RNA, 20 nt, synthetic construct
  misc_feature 1..20: note = antisense sequence
  source 1..20: mol_type = other RNA
gagtgagtaagagctgggaa

SEQ ID NO: 12068 - RNA, 20 nt, synthetic construct
  misc_feature 1..20: note = antisense sequence
  source 1..20: mol_type = other RNA
tgagtgagtaagagctggga

SEQ ID NO: 12069 - RNA, 20 nt, synthetic construct
  misc_feature 1..20: note = antisense sequence
  source 1..20: mol_type = other RNA
gttgagtgagtaagagctgg

SEQ ID NO: 12070 - RNA, 20 nt, synthetic construct
  misc_feature 1..20: note = antisense sequence
  source 1..20: mol_type = other RNA
tgttgagtgagtaagagctg

SEQ ID NO: 12071 - RNA, 20 nt, synthetic construct
  misc_feature 1..20: note = antisense sequence
  source 1..20: mol_type = other RNA
ttgttgagtgagtaagagct

SEQ ID NO: 12072 - RNA, 20 nt, synthetic construct
  misc_feature 1..20: note = antisense sequence
  source 1..20: mol_type = other RNA
cactaagatcaatgcctggg

SEQ ID NO: 12073 - RNA, 20 nt, synthetic construct
  misc_feature 1..20: note = antisense sequence
  source 1..20: mol_type = other RNA
gcactaagatcaatgcctgg

SEQ ID NO: 12074 - RNA, 20 nt, synthetic construct
  misc_feature 1..20: note = antisense sequence
  source 1..20: mol_type = other RNA
agcactaagatcaatgcctg

SEQ ID NO: 12075 - RNA, 20 nt, synthetic construct
  misc_feature 1..20: note = antisense sequence
  source 1..20: mol_type = other RNA
cagcactaagatcaatgcct

SEQ ID NO: 12076 - RNA, 20 nt, synthetic construct
  misc_feature 1..20: note = antisense sequence
  source 1..20: mol_type = other RNA
ccagcactaagatcaatgcc

SEQ ID NO: 12077 - RNA, 20 nt, synthetic construct
  misc_feature 1..20: note = antisense sequence
  source 1..20: mol_type = other RNA
cccagcactaagatcaatgc

SEQ ID NO: 12078 - RNA, 20 nt, synthetic construct
  misc_feature 1..20: note = antisense sequence
  source 1..20: mol_type = other RNA
tcccagcactaagatcaatg

SEQ ID NO: 12079 - RNA, 20 nt, synthetic construct
  misc_feature 1..20: note = antisense sequence
  source 1..20: mol_type = other RNA
ttcccagcactaagatcaat

SEQ ID NO: 12080 - RNA, 20 nt, synthetic construct
  misc_feature 1..20: note = antisense sequence
  source 1..20: mol_type = other RNA
attcccagcactaagatcaa

SEQ ID NO: 12081 - RNA, 20 nt, synthetic construct
  misc_feature 1..20: note = antisense sequence
  source 1..20: mol_type = other RNA
ttattcccagcactaagatc

SEQ ID NO: 12082 - RNA, 20 nt, synthetic construct
  misc_feature 1..20: note = antisense sequence
  source 1..20: mol_type = other RNA
actttattcccagcactaag

SEQ ID NO: 12083 - RNA, 20 nt, synthetic construct
  misc_feature 1..20: note = antisense sequence
  source 1..20: mol_type = other RNA
gccaaggtatgtgttttctt

SEQ ID NO: 12084 - RNA, 20 nt, synthetic construct
  misc_feature 1..20: note = antisense sequence
  source 1..20: mol_type = other RNA
ggccaaggtatgtgttttct

SEQ ID NO: 12085 - RNA, 20 nt, synthetic construct
  misc_feature 1..20: note = antisense sequence
  source 1..20: mol_type = other RNA
tccaggccaaggtatgtgtt

SEQ ID NO: 12086 - RNA, 20 nt, synthetic construct
  misc_feature 1..20: note = antisense sequence
  source 1..20: mol_type = other RNA
ttccaggccaaggtatgtgt

SEQ ID NO: 12087 - RNA, 20 nt, synthetic construct
  misc_feature 1..20: note = antisense sequence
  source 1..20: mol_type = other RNA
ccagagaggaaggctaacac

SEQ ID NO: 12088 - RNA, 20 nt, synthetic construct
  misc_feature 1..20: note = antisense sequence
  source 1..20: mol_type = other RNA
tcccagagaggaaggctaac

SEQ ID NO: 12089 - RNA, 20 nt, synthetic construct
  misc_feature 1..20: note = antisense sequence
  source 1..20: mol_type = other RNA
cagaaagatcccagagagga

SEQ ID NO: 12090 - RNA, 20 nt, synthetic construct
  misc_feature 1..20: note = antisense sequence
  source 1..20: mol_type = other RNA
tctccgggacagaaagatcc

SEQ ID NO: 12091 - RNA, 20 nt, synthetic construct
  misc_feature 1..20: note = antisense sequence
  source 1..20: mol_type = other RNA
gtctccgggacagaaagatc

SEQ ID NO: 12092 - RNA, 20 nt, synthetic construct
  misc_feature 1..20: note = antisense sequence
  source 1..20: mol_type = other RNA
aaaagacttgtctccgggac

SEQ ID NO: 12093 - RNA, 20 nt, synthetic construct
  misc_feature 1..20: note = antisense sequence
  source 1..20: mol_type = other RNA
caactgggacagagagaaaa

SEQ ID NO: 12094 - RNA, 20 nt, synthetic construct
  misc_feature 1..20: note = antisense sequence
  source 1..20: mol_type = other RNA
aaagcaactgggacagagag

SEQ ID NO: 12095 - RNA, 20 nt, synthetic construct
  misc_feature 1..20: note = antisense sequence
  source 1..20: mol_type = other RNA
gaaagcaactgggacagaga

SEQ ID NO: 12096 - RNA, 20 nt, synthetic construct
  misc_feature 1..20: note = antisense sequence
  source 1..20: mol_type = other RNA
agaaagcaactgggacagag

SEQ ID NO: 12097 - RNA, 20 nt, synthetic construct
  misc_feature 1..20: note = antisense sequence
  source 1..20: mol_type = other RNA
aatagaaagcaactgggaca

SEQ ID NO: 12098 - RNA, 20 nt, synthetic construct
  misc_feature 1..20: note = antisense sequence
  source 1..20: mol_type = other RNA
gtaaagacctgccaccttcc

SEQ ID NO: 12099 - RNA, 20 nt, synthetic construct
  misc_feature 1..20: note = antisense sequence
  source 1..20: mol_type = other RNA
agtaaagacctgccaccttc

SEQ ID NO: 12100 - RNA, 20 nt, synthetic construct
  misc_feature 1..20: note = antisense sequence
  source 1..20: mol_type = other RNA
cagtaaagacctgccacctt

SEQ ID NO: 12101 - RNA, 20 nt, synthetic construct
  misc_feature 1..20: note = antisense sequence
  source 1..20: mol_type = other RNA
aaacaccgcagtaaagacct

SEQ ID NO: 12102 - RNA, 20 nt, synthetic construct
  misc_feature 1..20: note = antisense sequence
  source 1..20: mol_type = other RNA
taaacaccgcagtaaagacc

SEQ ID NO: 12103 - RNA, 20 nt, synthetic construct
  misc_feature 1..20: note = antisense sequence
  source 1..20: mol_type = other RNA
ataaacaccgcagtaaagac

SEQ ID NO: 12104 - RNA, 20 nt, synthetic construct
  misc_feature 1..20: note = antisense sequence
  source 1..20: mol_type = other RNA
gtataaacaccgcagtaaag

SEQ ID NO: 12105 - RNA, 20 nt, synthetic construct
  misc_feature 1..20: note = antisense sequence
  source 1..20: mol_type = other RNA
agatgtataaacaccgcagt

SEQ ID NO: 12106 - RNA, 20 nt, synthetic construct
  misc_feature 1..20: note = antisense sequence
  source 1..20: mol_type = other RNA
gagatgtataaacaccgcag

SEQ ID NO: 12107 - RNA, 20 nt, synthetic construct
  misc_feature 1..20: note = antisense sequence
  source 1..20: mol_type = other RNA
aggagatgtataaacaccgc

SEQ ID NO: 12108 - RNA, 20 nt, synthetic construct
  misc_feature 1..20: note = antisense sequence
  source 1..20: mol_type = other RNA
gctttaataggtgtccttca

SEQ ID NO: 12109 - RNA, 20 nt, synthetic construct
  misc_feature 1..20: note = antisense sequence
  source 1..20: mol_type = other RNA
agctttaataggtgtccttc

SEQ ID NO: 12110 - RNA, 20 nt, synthetic construct
  misc_feature 1..20: note = antisense sequence
  source 1..20: mol_type = other RNA
cagctttaataggtgtcctt

SEQ ID NO: 12111 - RNA, 20 nt, synthetic construct
  misc_feature 1..20: note = antisense sequence
  source 1..20: mol_type = other RNA
acagctttaataggtgtcct

SEQ ID NO: 12112 - RNA, 20 nt, synthetic construct
  misc_feature 1..20: note = antisense sequence
  source 1..20: mol_type = other RNA
ctacagctttaataggtgtc

SEQ ID NO: 12113 - RNA, 20 nt, synthetic construct
  misc_feature 1..20: note = antisense sequence
  source 1..20: mol_type = other RNA
tgctcctacagctttaatag

SEQ ID NO: 12114 - RNA, 20 nt, synthetic construct
  misc_feature 1..20: note = antisense sequence
  source 1..20: mol_type = other RNA
ctgctcctacagctttaata

SEQ ID NO: 12115 - RNA, 20 nt, synthetic construct
  misc_feature 1..20: note = antisense sequence
  source 1..20: mol_type = other RNA
aagtcctgctgctcctacag

SEQ ID NO: 12116 - RNA, 20 nt, synthetic construct
  misc_feature 1..20: note = antisense sequence
  source 1..20: mol_type = other RNA
gtcatctaaaactctagtcc

SEQ ID NO: 12117 - RNA, 20 nt, synthetic construct
  misc_feature 1..20: note = antisense sequence
  source 1..20: mol_type = other RNA
ctgctgttgactgttacatt

SEQ ID NO: 12118 - RNA, 20 nt, synthetic construct
  misc_feature 1..20: note = antisense sequence
  source 1..20: mol_type = other RNA
gctgctgttgactgttacat

SEQ ID NO: 12119 - RNA, 20 nt, synthetic construct
  misc_feature 1..20: note = antisense sequence
  source 1..20: mol_type = other RNA
agctgctgttgactgttaca

SEQ ID NO: 12120 - RNA, 20 nt, synthetic construct
  misc_feature 1..20: note = antisense sequence
  source 1..20: mol_type = other RNA
ttagcagtcacagtgcagct

SEQ ID NO: 12121 - RNA, 20 nt, synthetic construct
  misc_feature 1..20: note = antisense sequence
  source 1..20: mol_type = other RNA
attttagcagtcacagtgca

SEQ ID NO: 12122 - RNA, 20 nt, synthetic construct
  misc_feature 1..20: note = antisense sequence
  source 1..20: mol_type = other RNA
gattttagcagtcacagtgc

SEQ ID NO: 12123 - RNA, 20 nt, synthetic construct
  misc_feature 1..20: note = antisense sequence
  source 1..20: mol_type = other RNA
agattttagcagtcacagtg

SEQ ID NO: 12124 - RNA, 20 nt, synthetic construct
  misc_feature 1..20: note = antisense sequence
  source 1..20: mol_type = other RNA
gagattttagcagtcacagt

SEQ ID NO: 12125 - RNA, 20 nt, synthetic construct
  misc_feature 1..20: note = antisense sequence
  source 1..20: mol_type = other RNA
agagattttagcagtcacag

SEQ ID NO: 12126 - RNA, 20 nt, synthetic construct
  misc_feature 1..20: note = antisense sequence
  source 1..20: mol_type = other RNA
gactttcattcatgcagttc

SEQ ID NO: 12127 - RNA, 20 nt, synthetic construct
  misc_feature 1..20: note = antisense sequence
  source 1..20: mol_type = other RNA
actggactttcattcatgca

SEQ ID NO: 12128 - RNA, 20 nt, synthetic construct
  misc_feature 1..20: note = antisense sequence
  source 1..20: mol_type = other RNA
gactggactttcattcatgc

SEQ ID NO: 12129 - RNA, 20 nt, synthetic construct
  misc_feature 1..20: note = antisense sequence
  source 1..20: mol_type = other RNA
cagactggactttcattcat

SEQ ID NO: 12130 - RNA, 20 nt, synthetic construct
  misc_feature 1..20: note = antisense sequence
  source 1..20: mol_type = other RNA
acagactggactttcattca

SEQ ID NO: 12131 - RNA, 20 nt, synthetic construct
  misc_feature 1..20: note = antisense sequence
  source 1..20: mol_type = other RNA
gagtggaatgtaacaggatt

SEQ ID NO: 12132 - RNA, 20 nt, synthetic construct
  misc_feature 1..20: note = antisense sequence
  source 1..20: mol_type = other RNA
agagtggaatgtaacaggat

SEQ ID NO: 12133 - RNA, 20 nt, synthetic construct
  misc_feature 1..20: note = antisense sequence
  source 1..20: mol_type = other RNA
cagagtggaatgtaacagga

SEQ ID NO: 12134 - RNA, 20 nt, synthetic construct
  misc_feature 1..20: note = antisense sequence
  source 1..20: mol_type = other RNA
tgttgtctgaccagagtgga

SEQ ID NO: 12135 - RNA, 20 nt, synthetic construct
  misc_feature 1..20: note = antisense sequence
  source 1..20: mol_type = other RNA
ctgttgtctgaccagagtgg

SEQ ID NO: 12136 - RNA, 20 nt, synthetic construct
  misc_feature 1..20: note = antisense sequence
  source 1..20: mol_type = other RNA
gctgttgtctgaccagagtg

SEQ ID NO: 12137 - RNA, 20 nt, synthetic construct
  misc_feature 1..20: note = antisense sequence
  source 1..20: mol_type = other RNA
agctgttgtctgaccagagt

SEQ ID NO: 12138 - RNA, 20 nt, synthetic construct
  misc_feature 1..20: note = antisense sequence
  source 1..20: mol_type = other RNA
ctagctgttgtctgaccaga

SEQ ID NO: 12139 - RNA, 20 nt, synthetic construct
  misc_feature 1..20: note = antisense sequence
  source 1..20: mol_type = other RNA
tactctagctgttgtctgac

SEQ ID NO: 12140 - RNA, 20 nt, synthetic construct
  misc_feature 1..20: note = antisense sequence
  source 1..20: mol_type = other RNA
atactctagctgttgtctga

SEQ ID NO: 12141 - RNA, 20 nt, synthetic construct
  misc_feature 1..20: note = antisense sequence
  source 1..20: mol_type = other RNA
gatactctagctgttgtctg

SEQ ID NO: 12142 - RNA, 20 nt, synthetic construct
  misc_feature 1..20: note = antisense sequence
  source 1..20: mol_type = other RNA
agatactctagctgttgtct

SEQ ID NO: 12143 - RNA, 20 nt, synthetic construct
  misc_feature 1..20: note = antisense sequence
  source 1..20: mol_type = other RNA
cagatactctagctgttgtc

SEQ ID NO: 12144 - RNA, 20 nt, synthetic construct
  misc_feature 1..20: note = antisense sequence
  source 1..20: mol_type = other RNA
ccagatactctagctgttgt

SEQ ID NO: 12145 - RNA, 20 nt, synthetic construct
  misc_feature 1..20: note = antisense sequence
  source 1..20: mol_type = other RNA
accagatactctagctgttg

SEQ ID NO: 12146 - RNA, 20 nt, synthetic construct
  misc_feature 1..20: note = antisense sequence
  source 1..20: mol_type = other RNA
aaccagatactctagctgtt

SEQ ID NO: 12147 - RNA, 20 nt, synthetic construct
  misc_feature 1..20: note = antisense sequence
  source 1..20: mol_type = other RNA
caaccagatactctagctgt

SEQ ID NO: 12148 - RNA, 20 nt, synthetic construct
  misc_feature 1..20: note = antisense sequence
  source 1..20: mol_type = other RNA
acaaccagatactctagctg

SEQ ID NO: 12149 - RNA, 20 nt, synthetic construct
  misc_feature 1..20: note = antisense sequence
  source 1..20: mol_type = other RNA
aacaaccagatactctagct

SEQ ID NO: 12150 - RNA, 20 nt, synthetic construct
  misc_feature 1..20: note = antisense sequence
  source 1..20: mol_type = other RNA
gaacaaccagatactctagc

SEQ ID NO: 12151 - RNA, 20 nt, synthetic construct
  misc_feature 1..20: note = antisense sequence
  source 1..20: mol_type = other RNA
agaacaaccagatactctag

SEQ ID NO: 12152 - RNA, 20 nt, synthetic construct
  misc_feature 1..20: note = antisense sequence
  source 1..20: mol_type = other RNA
cttagaacaaccagatactc

SEQ ID NO: 12153 - RNA, 20 nt, synthetic construct
  misc_feature 1..20: note = antisense sequence
  source 1..20: mol_type = other RNA
gtgatacttagaacaaccag

SEQ ID NO: 12154 - RNA, 20 nt, synthetic construct
  misc_feature 1..20: note = antisense sequence
  source 1..20: mol_type = other RNA
ggcacatcctagtttgtcat

SEQ ID NO: 12155 - RNA, 20 nt, synthetic construct
  misc_feature 1..20: note = antisense sequence
  source 1..20: mol_type = other RNA
tggcacatcctagtttgtca

SEQ ID NO: 12156 - RNA, 20 nt, synthetic construct
  misc_feature 1..20: note = antisense sequence
  source 1..20: mol_type = other RNA
ctggcacatcctagtttgtc

SEQ ID NO: 12157 - RNA, 20 nt, synthetic construct
  misc_feature 1..20: note = antisense sequence
  source 1..20: mol_type = other RNA
actggcacatcctagtttgt

SEQ ID NO: 12158 - RNA, 20 nt, synthetic construct
  misc_feature 1..20: note = antisense sequence
  source 1..20: mol_type = other RNA
tttactggcacatcctagtt

SEQ ID NO: 12159 - RNA, 20 nt, synthetic construct
  misc_feature 1..20: note = antisense sequence
  source 1..20: mol_type = other RNA
ttttactggcacatcctagt

SEQ ID NO: 12160 - RNA, 20 nt, synthetic construct
  misc_feature 1..20: note = antisense sequence
  source 1..20: mol_type = other RNA
attttactggcacatcctag

SEQ ID NO: 12161 - RNA, 20 nt, synthetic construct
  misc_feature 1..20: note = antisense sequence
  source 1..20: mol_type = other RNA
gcacactttgttttctaacc

SEQ ID NO: 12162 - RNA, 20 nt, synthetic construct
  misc_feature 1..20: note = antisense sequence
  source 1..20: mol_type = other RNA
tacatgcaatgcacactttg

SEQ ID NO: 12163 - RNA, 20 nt, synthetic construct
  misc_feature 1..20: note = antisense sequence
  source 1..20: mol_type = other RNA
cacaatcctccaaataccta

SEQ ID NO: 12164 - RNA, 20 nt, synthetic construct
  misc_feature 1..20: note = antisense sequence
  source 1..20: mol_type = other RNA
tcacaatcctccaaatacct

SEQ ID NO: 12165 - RNA, 20 nt, synthetic construct
  misc_feature 1..20: note = antisense sequence
  source 1..20: mol_type = other RNA
atcacaatcctccaaatacc

SEQ ID NO: 12166 - RNA, 20 nt, synthetic construct
  misc_feature 1..20: note = antisense sequence
  source 1..20: mol_type = other RNA
gctccataggatctctttta

SEQ ID NO: 12167 - RNA, 20 nt, synthetic construct
  misc_feature 1..20: note = antisense sequence
  source 1..20: mol_type = other RNA
tgctccataggatctctttt

SEQ ID NO: 12168 - RNA, 20 nt, synthetic construct
  misc_feature 1..20: note = antisense sequence
  source 1..20: mol_type = other RNA
atgctccataggatctcttt

SEQ ID NO: 12169 - RNA, 20 nt, synthetic construct
  misc_feature 1..20: note = antisense sequence
  source 1..20: mol_type = other RNA
catgctccataggatctctt

SEQ ID NO: 12170 - RNA, 20 nt, synthetic construct
  misc_feature 1..20: note = antisense sequence
  source 1..20: mol_type = other RNA
acatgctccataggatctct

SEQ ID NO: 12171 - RNA, 20 nt, synthetic construct
  misc_feature 1..20: note = antisense sequence
  source 1..20: mol_type = other RNA
tacatgctccataggatctc

SEQ ID NO: 12172 - RNA, 20 nt, synthetic construct
  misc_feature 1..20: note = antisense sequence
  source 1..20: mol_type = other RNA
ctacatgctccataggatct

SEQ ID NO: 12173 - RNA, 20 nt, synthetic construct
  misc_feature 1..20: note = antisense sequence
  source 1..20: mol_type = other RNA
actacatgctccataggatc

SEQ ID NO: 12174 - RNA, 20 nt, synthetic construct
  misc_feature 1..20: note = antisense sequence
  source 1..20: mol_type = other RNA
gactacatgctccataggat

SEQ ID NO: 12175 - RNA, 20 nt, synthetic construct
  misc_feature 1..20: note = antisense sequence
  source 1..20: mol_type = other RNA
agactacatgctccatagga

SEQ ID NO: 12176 - RNA, 20 nt, synthetic construct
  misc_feature 1..20: note = antisense sequence
  source 1..20: mol_type = other RNA
aagactacatgctccatagg

SEQ ID NO: 12177 - RNA, 20 nt, synthetic construct
  misc_feature 1..20: note = antisense sequence
  source 1..20: mol_type = other RNA
taagactacatgctccatag

SEQ ID NO: 12178 - RNA, 20 nt, synthetic construct
  misc_feature 1..20: note = antisense sequence
  source 1..20: mol_type = other RNA
gctgggacataattgttcta

SEQ ID NO: 12179 - RNA, 20 nt, synthetic construct
  misc_feature 1..20: note = antisense sequence
  source 1..20: mol_type = other RNA
agctgggacataattgttct

SEQ ID NO: 12180 - RNA, 20 nt, synthetic construct
  misc_feature 1..20: note = antisense sequence
  source 1..20: mol_type = other RNA
gtttcacacctgccataggc

SEQ ID NO: 12181 - RNA, 20 nt, synthetic construct
  misc_feature 1..20: note = antisense sequence
  source 1..20: mol_type = other RNA
ggtttcacacctgccatagg

SEQ ID NO: 12182 - RNA, 20 nt, synthetic construct
  misc_feature 1..20: note = antisense sequence
  source 1..20: mol_type = other RNA
tggtttcacacctgccatag

SEQ ID NO: 12183 - RNA, 20 nt, synthetic construct
  misc_feature 1..20: note = antisense sequence
  source 1..20: mol_type = other RNA
gtggtttcacacctgccata

SEQ ID NO: 12184 - RNA, 20 nt, synthetic construct
  misc_feature 1..20: note = antisense sequence
  source 1..20: mol_type = other RNA
cttaatcaacccagaatcag

SEQ ID NO: 12185 - RNA, 20 nt, synthetic construct
  misc_feature 1..20: note = antisense sequence
  source 1..20: mol_type = other RNA
gctttcttaatcaacccaga

SEQ ID NO: 12186 - RNA, 20 nt, synthetic construct
  misc_feature 1..20: note = antisense sequence
  source 1..20: mol_type = other RNA
tgctttcttaatcaacccag

SEQ ID NO: 12187 - RNA, 20 nt, synthetic construct
  misc_feature 1..20: note = antisense sequence
  source 1..20: mol_type = other RNA
agtgctttcttaatcaaccc

SEQ ID NO: 12188 - RNA, 20 nt, synthetic construct
  misc_feature 1..20: note = antisense sequence
  source 1..20: mol_type = other RNA
gcagtgctttcttaatcaac

SEQ ID NO: 12189 - RNA, 20 nt, synthetic construct
  misc_feature 1..20: note = antisense sequence
  source 1..20: mol_type = other RNA
gtgcagtgctttcttaatca

SEQ ID NO: 12190 - RNA, 20 nt, synthetic construct
  misc_feature 1..20: note = antisense sequence
  source 1..20: mol_type = other RNA
tgtgcagtgctttcttaatc

SEQ ID NO: 12191 - RNA, 20 nt, synthetic construct
  misc_feature 1..20: note = antisense sequence
  source 1..20: mol_type = other RNA
ttggcacattgctggtactc

SEQ ID NO: 12192 - RNA, 20 nt, synthetic construct
  misc_feature 1..20: note = antisense sequence
  source 1..20: mol_type = other RNA
gtgtaggaactgacctgccc

SEQ ID NO: 12193 - RNA, 20 nt, synthetic construct
  misc_feature 1..20: note = antisense sequence
  source 1..20: mol_type = other RNA
agtgtaggaactgacctgcc

SEQ ID NO: 12194 - RNA, 20 nt, synthetic construct
  misc_feature 1..20: note = antisense sequence
  source 1..20: mol_type = other RNA
ggtttatcagtgtaggaact

SEQ ID NO: 12195 - RNA, 20 nt, synthetic construct
  misc_feature 1..20: note = antisense sequence
  source 1..20: mol_type = other RNA
aggtttatcagtgtaggaac

SEQ ID NO: 12196 - RNA, 20 nt, synthetic construct
  misc_feature 1..20: note = antisense sequence
  source 1..20: mol_type = other RNA
gtaaggtttatcagtgtagg

SEQ ID NO: 12197 - RNA, 20 nt, synthetic construct
  misc_feature 1..20: note = antisense sequence
  source 1..20: mol_type = other RNA
ggtattctgtgtcatagcac

SEQ ID NO: 12198 - RNA, 20 nt, synthetic construct
  misc_feature 1..20: note = antisense sequence
  source 1..20: mol_type = other RNA
aggtattctgtgtcatagca

SEQ ID NO: 12199 - RNA, 20 nt, synthetic construct
  misc_feature 1..20: note = antisense sequence
  source 1..20: mol_type = other RNA
taggtattctgtgtcatagc

SEQ ID NO: 12200 - RNA, 20 nt, synthetic construct
  misc_feature 1..20: note = antisense sequence
  source 1..20: mol_type = other RNA
ctcatagaaccttaggatgt

SEQ ID NO: 12201 - RNA, 20 nt, synthetic construct
  misc_feature 1..20: note = antisense sequence
  source 1..20: mol_type = other RNA
tctcatagaaccttaggatg

SEQ ID NO: 12202 - RNA, 20 nt, synthetic construct
  misc_feature 1..20: note = antisense sequence
  source 1..20: mol_type = other RNA
taagctggttcttgattcca

SEQ ID NO: 12203 - RNA, 20 nt, synthetic construct
  misc_feature 1..20: note = antisense sequence
  source 1..20: mol_type = other RNA
ttaagctggttcttgattcc

SEQ ID NO: 12204 - RNA, 20 nt, synthetic construct
  misc_feature 1..20: note = antisense sequence
  source 1..20: mol_type = other RNA
gttaagctggttcttgattc

SEQ ID NO: 12205 - RNA, 20 nt, synthetic construct
  misc_feature 1..20: note = antisense sequence
  source 1..20: mol_type = other RNA
aggttaagctggttcttgat

SEQ ID NO: 12206 - RNA, 20 nt, synthetic construct
  misc_feature 1..20: note = antisense sequence
  source 1..20: mol_type = other RNA
tcaggttaagctggttcttg

SEQ ID NO: 12207 - RNA, 20 nt, synthetic construct
  misc_feature 1..20: note = antisense sequence
  source 1..20: mol_type = other RNA
ctcaggttaagctggttctt

SEQ ID NO: 12208 - RNA, 20 nt, synthetic construct
  misc_feature 1..20: note = antisense sequence
  source 1..20: mol_type = other RNA
cctcaggttaagctggttct

SEQ ID NO: 12209 - RNA, 20 nt, synthetic construct
  misc_feature 1..20: note = antisense sequence
  source 1..20: mol_type = other RNA
gcctcaggttaagctggttc

SEQ ID NO: 12210 - RNA, 20 nt, synthetic construct
  misc_feature 1..20: note = antisense sequence
  source 1..20: mol_type = other RNA
gaagcctcaggttaagctgg

SEQ ID NO: 12211 - RNA, 20 nt, synthetic construct
  misc_feature 1..20: note = antisense sequence
  source 1..20: mol_type = other RNA
agaagcctcaggttaagctg

SEQ ID NO: 12212 - RNA, 20 nt, synthetic construct
  misc_feature 1..20: note = antisense sequence
  source 1..20: mol_type = other RNA
acagaagcctcaggttaagc

SEQ ID NO: 12213 - RNA, 20 nt, synthetic construct
  misc_feature 1..20: note = antisense sequence
  source 1..20: mol_type = other RNA
atataacagaagcctcaggt

SEQ ID NO: 12214 - RNA, 20 nt, synthetic construct
  misc_feature 1..20: note = antisense sequence
  source 1..20: mol_type = other RNA
catataacagaagcctcagg

SEQ ID NO: 12215 - RNA, 20 nt, synthetic construct
  misc_feature 1..20: note = antisense sequence
  source 1..20: mol_type = other RNA
acatataacagaagcctcag

SEQ ID NO: 12216 - RNA, 20 nt, synthetic construct
  misc_feature 1..20: note = antisense sequence
  source 1..20: mol_type = other RNA
ctacatataacagaagcctc

SEQ ID NO: 12217 - RNA, 20 nt, synthetic construct
  misc_feature 1..20: note = antisense sequence
  source 1..20: mol_type = other RNA
ggaaatcattgttcacttgg

SEQ ID NO: 12218 - RNA, 20 nt, synthetic construct
  misc_feature 1..20: note = antisense sequence
  source 1..20: mol_type = other RNA
catattttcgggcatttagg

SEQ ID NO: 12219 - RNA, 20 nt, synthetic construct
  misc_feature 1..20: note = antisense sequence
  source 1..20: mol_type = other RNA
gcatattttcgggcatttag

SEQ ID NO: 12220 - RNA, 20 nt, synthetic construct
  misc_feature 1..20: note = antisense sequence
  source 1..20: mol_type = other RNA
ctgcatattttcgggcattt

SEQ ID NO: 12221 - RNA, 20 nt, synthetic construct
  misc_feature 1..20: note = antisense sequence
  source 1..20: mol_type = other RNA
cctgcatattttcgggcatt

SEQ ID NO: 12222 - RNA, 20 nt, synthetic construct
  misc_feature 1..20: note = antisense sequence
  source 1..20: mol_type = other RNA
acctgcatattttcgggcat

SEQ ID NO: 12223 - RNA, 20 nt, synthetic construct
  misc_feature 1..20: note = antisense sequence
  source 1..20: mol_type = other RNA
ctacctgcatattttcgggc

SEQ ID NO: 12224 - RNA, 20 nt, synthetic construct
  misc_feature 1..20: note = antisense sequence
  source 1..20: mol_type = other RNA
ccataactgcttcaagtctt

SEQ ID NO: 12225 - RNA, 20 nt, synthetic construct
  misc_feature 1..20: note = antisense sequence
  source 1..20: mol_type = other RNA
accataactgcttcaagtct

SEQ ID NO: 12226 - RNA, 20 nt, synthetic construct
  misc_feature 1..20: note = antisense sequence
  source 1..20: mol_type = other RNA
gtaccataactgcttcaagt

SEQ ID NO: 12227 - RNA, 20 nt, synthetic construct
  misc_feature 1..20: note = antisense sequence
  source 1..20: mol_type = other RNA
tgtaccataactgcttcaag

SEQ ID NO: 12228 - RNA, 20 nt, synthetic construct
  misc_feature 1..20: note = antisense sequence
  source 1..20: mol_type = other RNA
cttgtaccataactgcttca

SEQ ID NO: 12229 - RNA, 20 nt, synthetic construct
  misc_feature 1..20: note = antisense sequence
  source 1..20: mol_type = other RNA
ccttgtaccataactgcttc

SEQ ID NO: 12230 - RNA, 20 nt, synthetic construct
  misc_feature 1..20: note = antisense sequence
  source 1..20: mol_type = other RNA
accttgtaccataactgctt

SEQ ID NO: 12231 - RNA, 20 nt, synthetic construct
  misc_feature 1..20: note = antisense sequence
  source 1..20: mol_type = other RNA
caccttgtaccataactgct

SEQ ID NO: 12232 - RNA, 20 nt, synthetic construct
  misc_feature 1..20: note = antisense sequence
  source 1..20: mol_type = other RNA
acaccttgtaccataactgc

SEQ ID NO: 12233 - RNA, 20 nt, synthetic construct
  misc_feature 1..20: note = antisense sequence
  source 1..20: mol_type = other RNA
ctctatgacctcatcgctat

SEQ ID NO: 12234 - RNA, 20 nt, synthetic construct
  misc_feature 1..20: note = antisense sequence
  source 1..20: mol_type = other RNA
tctctatgacctcatcgcta

SEQ ID NO: 12235 - RNA, 20 nt, synthetic construct
  misc_feature 1..20: note = antisense sequence
  source 1..20: mol_type = other RNA
ctcaagtctctatgacctca

SEQ ID NO: 12236 - RNA, 20 nt, synthetic construct
  misc_feature 1..20: note = antisense sequence
  source 1..20: mol_type = other RNA
gctcaagtctctatgacctc

SEQ ID NO: 12237 - RNA, 20 nt, synthetic construct
  misc_feature 1..20: note = antisense sequence
  source 1..20: mol_type = other RNA
agctcaagtctctatgacct

SEQ ID NO: 12238 - RNA, 20 nt, synthetic construct
  misc_feature 1..20: note = antisense sequence
  source 1..20: mol_type = other RNA
aagctcaagtctctatgacc

SEQ ID NO: 12239 - RNA, 20 nt, synthetic construct
  misc_feature 1..20: note = antisense sequence
  source 1..20: mol_type = other RNA
caagctcaagtctctatgac

SEQ ID NO: 12240 - RNA, 20 nt, synthetic construct
  misc_feature 1..20: note = antisense sequence
  source 1..20: mol_type = other RNA
tgcctaaagccatagccagg

SEQ ID NO: 12241 - RNA, 20 nt, synthetic construct
  misc_feature 1..20: note = antisense sequence
  source 1..20: mol_type = other RNA
ttgcctaaagccatagccag

SEQ ID NO: 12242 - RNA, 20 nt, synthetic construct
  misc_feature 1..20: note = antisense sequence
  source 1..20: mol_type = other RNA
atttgcctaaagccatagcc

SEQ ID NO: 12243 - RNA, 20 nt, synthetic construct
  misc_feature 1..20: note = antisense sequence
  source 1..20: mol_type = other RNA
gggagagtaatttgcctaaa

SEQ ID NO: 12244 - RNA, 20 nt, synthetic construct
  misc_feature 1..20: note = antisense sequence
  source 1..20: mol_type = other RNA
ggaaaattgaggctttgagg

SEQ ID NO: 12245 - RNA, 20 nt, synthetic construct
  misc_feature 1..20: note = antisense sequence
  source 1..20: mol_type = other RNA
tagacaacacccattgagtg

SEQ ID NO: 12246 - RNA, 20 nt, synthetic construct
  misc_feature 1..20: note = antisense sequence
  source 1..20: mol_type = other RNA
agtatgggtccagggattag

SEQ ID NO: 12247 - RNA, 20 nt, synthetic construct
  misc_feature 1..20: note = antisense sequence
  source 1..20: mol_type = other RNA
aaagtatgggtccagggatt

SEQ ID NO: 12248 - RNA, 20 nt, synthetic construct
  misc_feature 1..20: note = antisense sequence
  source 1..20: mol_type = other RNA
caaagtatgggtccagggat

SEQ ID NO: 12249 - RNA, 20 nt, synthetic construct
  misc_feature 1..20: note = antisense sequence
  source 1..20: mol_type = other RNA
gcaaagtatgggtccaggga

SEQ ID NO: 12250 - RNA, 20 nt, synthetic construct
  misc_feature 1..20: note = antisense sequence
  source 1..20: mol_type = other RNA
atgcaaagtatgggtccagg

SEQ ID NO: 12251 - RNA, 20 nt, synthetic construct
  misc_feature 1..20: note = antisense sequence
  source 1..20: mol_type = other RNA
catgcaaagtatgggtccag

SEQ ID NO: 12252 - RNA, 20 nt, synthetic construct
  misc_feature 1..20: note = antisense sequence
  source 1..20: mol_type = other RNA
taatcttccaactcgggatc

SEQ ID NO: 12253 - RNA, 20 nt, synthetic construct
  misc_feature 1..20: note = antisense sequence
  source 1..20: mol_type = other RNA
ataatcttccaactcgggat

SEQ ID NO: 12254 - RNA, 20 nt, synthetic construct
  misc_feature 1..20: note = antisense sequence
  source 1..20: mol_type = other RNA
gataatcttccaactcggga

SEQ ID NO: 12255 - RNA, 20 nt, synthetic construct
  misc_feature 1..20: note = antisense sequence
  source 1..20: mol_type = other RNA
ggataatcttccaactcggg

SEQ ID NO: 12256 - RNA, 20 nt, synthetic construct
  misc_feature 1..20: note = antisense sequence
  source 1..20: mol_type = other RNA
aggataatcttccaactcgg

SEQ ID NO: 12257 - RNA, 20 nt, synthetic construct
  misc_feature 1..20: note = antisense sequence
  source 1..20: mol_type = other RNA
gaggataatcttccaactcg

SEQ ID NO: 12258 - RNA, 20 nt, synthetic construct
  misc_feature 1..20: note = antisense sequence
  source 1..20: mol_type = other RNA
tgaggataatcttccaactc

SEQ ID NO: 12259 - RNA, 20 nt, synthetic construct
  misc_feature 1..20: note = antisense sequence
  source 1..20: mol_type = other RNA
ctgaggataatcttccaact

SEQ ID NO: 12260 - RNA, 20 nt, synthetic construct
  misc_feature 1..20: note = antisense sequence
  source 1..20: mol_type = other RNA
tctgaggataatcttccaac

SEQ ID NO: 12261 - RNA, 20 nt, synthetic construct
  misc_feature 1..20: note = antisense sequence
  source 1..20: mol_type = other RNA
tagttctgtctccctctggc

SEQ ID NO: 12262 - RNA, 20 nt, synthetic construct
  misc_feature 1..20: note = antisense sequence
  source 1..20: mol_type = other RNA
ccatagttctgtctccctct

SEQ ID NO: 12263 - RNA, 20 nt, synthetic construct
  misc_feature 1..20: note = antisense sequence
  source 1..20: mol_type = other RNA
tccatagttctgtctccctc

SEQ ID NO: 12264 - RNA, 20 nt, synthetic construct
  misc_feature 1..20: note = antisense sequence
  source 1..20: mol_type = other RNA
ttttccatagttctgtctcc

SEQ ID NO: 12265 - RNA, 20 nt, synthetic construct
  misc_feature 1..20: note = antisense sequence
  source 1..20: mol_type = other RNA
caacaacactgcatctctct

SEQ ID NO: 12266 - RNA, 20 nt, synthetic construct
  misc_feature 1..20: note = antisense sequence
  source 1..20: mol_type = other RNA
taaagccaacaacactgcat

SEQ ID NO: 12267 - RNA, 20 nt, synthetic construct
  misc_feature 1..20: note = antisense sequence
  source 1..20: mol_type = other RNA
ttaaagccaacaacactgca

SEQ ID NO: 12268 - RNA, 20 nt, synthetic construct
  misc_feature 1..20: note = antisense sequence
  source 1..20: mol_type = other RNA
ctatcaaggagaatcggttt

SEQ ID NO: 12269 - RNA, 20 nt, synthetic construct
  misc_feature 1..20: note = antisense sequence
  source 1..20: mol_type = other RNA
cctatcaaggagaatcggtt

SEQ ID NO: 12270 - RNA, 20 nt, synthetic construct
  misc_feature 1..20: note = antisense sequence
  source 1..20: mol_type = other RNA
gcctatcaaggagaatcggt

SEQ ID NO: 12271 - RNA, 20 nt, synthetic construct
  misc_feature 1..20: note = antisense sequence
  source 1..20: mol_type = other RNA
agcctatcaaggagaatcgg

SEQ ID NO: 12272 - RNA, 20 nt, synthetic construct
  misc_feature 1..20: note = antisense sequence
  source 1..20: mol_type = other RNA
cgggagcctatcaaggagaa

SEQ ID NO: 12273 - RNA, 20 nt, synthetic construct
  misc_feature 1..20: note = antisense sequence
  source 1..20: mol_type = other RNA
tcgggagcctatcaaggaga

SEQ ID NO: 12274 - RNA, 20 nt, synthetic construct
  misc_feature 1..20: note = antisense sequence
  source 1..20: mol_type = other RNA
ctttcgggagcctatcaagg

SEQ ID NO: 12275 - RNA, 20 nt, synthetic construct
  misc_feature 1..20: note = antisense sequence
  source 1..20: mol_type = other RNA
cctttcgggagcctatcaag

SEQ ID NO: 12276 - RNA, 20 nt, synthetic construct
  misc_feature 1..20: note = antisense sequence
  source 1..20: mol_type = other RNA
tcctttcgggagcctatcaa

SEQ ID NO: 12277 - RNA, 20 nt, synthetic construct
  misc_feature 1..20: note = antisense sequence
  source 1..20: mol_type = other RNA
ttcctttcgggagcctatca

SEQ ID NO: 12278 - RNA, 20 nt, synthetic construct
  misc_feature 1..20: note = antisense sequence
  source 1..20: mol_type = other RNA
gttcctttcgggagcctatc

SEQ ID NO: 12279 - RNA, 20 nt, synthetic construct
  misc_feature 1..20: note = antisense sequence
  source 1..20: mol_type = other RNA
tgttcctttcgggagcctat

SEQ ID NO: 12280 - RNA, 20 nt, synthetic construct
  misc_feature 1..20: note = antisense sequence
  source 1..20: mol_type = other RNA
agtgttcctttcgggagcct

SEQ ID NO: 12281 - RNA, 20 nt, synthetic construct
  misc_feature 1..20: note = antisense sequence
  source 1..20: mol_type = other RNA
cagtgttcctttcgggagcc

SEQ ID NO: 12282 - RNA, 20 nt, synthetic construct
  misc_feature 1..20: note = antisense sequence
  source 1..20: mol_type = other RNA
tcagtgttcctttcgggagc

SEQ ID NO: 12283 - RNA, 20 nt, synthetic construct
  misc_feature 1..20: note = antisense sequence
  source 1..20: mol_type = other RNA
gtcagtgttcctttcgggag

SEQ ID NO: 12284 - RNA, 20 nt, synthetic construct
  misc_feature 1..20: note = antisense sequence
  source 1..20: mol_type = other RNA
ggtcagtgttcctttcggga

SEQ ID NO: 12285 - RNA, 20 nt, synthetic construct
  misc_feature 1..20: note = antisense sequence
  source 1..20: mol_type = other RNA
caggtcagtgttcctttcgg

SEQ ID NO: 12286 - RNA, 20 nt, synthetic construct
  misc_feature 1..20: note = antisense sequence
  source 1..20: mol_type = other RNA
gcaggtcagtgttcctttcg

SEQ ID NO: 12287 - RNA, 20 nt, synthetic construct
  misc_feature 1..20: note = antisense sequence
  source 1..20: mol_type = other RNA
tggcaggtcagtgttccttt

SEQ ID NO: 12288 - RNA, 20 nt, synthetic construct
  misc_feature 1..20: note = antisense sequence
  source 1..20: mol_type = other RNA
tattggcaggtcagtgttcc

SEQ ID NO: 12289 - RNA, 20 nt, synthetic construct
  misc_feature 1..20: note = antisense sequence
  source 1..20: mol_type = other RNA
atattggcaggtcagtgttc

SEQ ID NO: 12290 - RNA, 20 nt, synthetic construct
  misc_feature 1..20: note = antisense sequence
  source 1..20: mol_type = other RNA
gatattggcaggtcagtgtt

SEQ ID NO: 12291 - RNA, 20 nt, synthetic construct
  misc_feature 1..20: note = antisense sequence
  source 1..20: mol_type = other RNA
ggatattggcaggtcagtgt

SEQ ID NO: 12292 - RNA, 20 nt, synthetic construct
  misc_feature 1..20: note = antisense sequence
  source 1..20: mol_type = other RNA
aggatattggcaggtcagtg

SEQ ID NO: 12293 - RNA, 20 nt, synthetic construct
  misc_feature 1..20: note = antisense sequence
  source 1..20: mol_type = other RNA
tcaggatattggcaggtcag

SEQ ID NO: 12294 - RNA, 20 nt, synthetic construct
  misc_feature 1..20: note = antisense sequence
  source 1..20: mol_type = other RNA
atcaggatattggcaggtca

SEQ ID NO: 12295 - RNA, 20 nt, synthetic construct
  misc_feature 1..20: note = antisense sequence
  source 1..20: mol_type = other RNA
cttcctggactaaacatcag

SEQ ID NO: 12296 - RNA, 20 nt, synthetic construct
  misc_feature 1..20: note = antisense sequence
  source 1..20: mol_type = other RNA
gcttcctggactaaacatca

SEQ ID NO: 12297 - RNA, 20 nt, synthetic construct
  misc_feature 1..20: note = antisense sequence
  source 1..20: mol_type = other RNA
agcttcctggactaaacatc

SEQ ID NO: 12298 - RNA, 20 nt, synthetic construct
  misc_feature 1..20: note = antisense sequence
  source 1..20: mol_type = other RNA
gagcttcctggactaaacat

SEQ ID NO: 12299 - RNA, 20 nt, synthetic construct
  misc_feature 1..20: note = antisense sequence
  source 1..20: mol_type = other RNA
agagcttcctggactaaaca

SEQ ID NO: 12300 - RNA, 20 nt, synthetic construct
  misc_feature 1..20: note = antisense sequence
  source 1..20: mol_type = other RNA
tagagcttcctggactaaac

SEQ ID NO: 12301 - RNA, 20 nt, synthetic construct
  misc_feature 1..20: note = antisense sequence
  source 1..20: mol_type = other RNA
ggcatagagcttcctggact

SEQ ID NO: 12302 - RNA, 20 nt, synthetic construct
  misc_feature 1..20: note = antisense sequence
  source 1..20: mol_type = other RNA
tggcatagagcttcctggac

SEQ ID NO: 12303 - RNA, 20 nt, synthetic construct
  misc_feature 1..20: note = antisense sequence
  source 1..20: mol_type = other RNA
agaagtctggcatagagctt

SEQ ID NO: 12304 - RNA, 20 nt, synthetic construct
  misc_feature 1..20: note = antisense sequence
  source 1..20: mol_type = other RNA
tagaagtctggcatagagct

SEQ ID NO: 12305 - RNA, 20 nt, synthetic construct
  misc_feature 1..20: note = antisense sequence
  source 1..20: mol_type = other RNA
ttagaagtctggcatagagc

SEQ ID NO: 12306 - RNA, 20 nt, synthetic construct
  misc_feature 1..20: note = antisense sequence
  source 1..20: mol_type = other RNA
ctgtttattagaagtctggc

SEQ ID NO: 12307 - RNA, 20 nt, synthetic construct
  misc_feature 1..20: note = antisense sequence
  source 1..20: mol_type = other RNA
tggtggcttaaagcatcatg

SEQ ID NO: 12308 - RNA, 20 nt, synthetic construct
  misc_feature 1..20: note = antisense sequence
  source 1..20: mol_type = other RNA
gttggtggcttaaagcatca

SEQ ID NO: 12309 - RNA, 20 nt, synthetic construct
  misc_feature 1..20: note = antisense sequence
  source 1..20: mol_type = other RNA
agttggtggcttaaagcatc

SEQ ID NO: 12310 - RNA, 20 nt, synthetic construct
  misc_feature 1..20: note = antisense sequence
  source 1..20: mol_type = other RNA
cacaagttggtggcttaaag

SEQ ID NO: 12311 - RNA, 20 nt, synthetic construct
  misc_feature 1..20: note = antisense sequence
  source 1..20: mol_type = other RNA
gacttcacacagtgtcttta

SEQ ID NO: 12312 - RNA, 20 nt, synthetic construct
  misc_feature 1..20: note = antisense sequence
  source 1..20: mol_type = other RNA
gtggacttcacacagtgtct

SEQ ID NO: 12313 - RNA, 20 nt, synthetic construct
  misc_feature 1..20: note = antisense sequence
  source 1..20: mol_type = other RNA
gtggcaacaatatcatacac

SEQ ID NO: 12314 - RNA, 20 nt, synthetic construct
  misc_feature 1..20: note = antisense sequence
  source 1..20: mol_type = other RNA
gagtggcaacaatatcatac

SEQ ID NO: 12315 - RNA, 20 nt, synthetic construct
  misc_feature 1..20: note = antisense sequence
  source 1..20: mol_type = other RNA
ctaagagtggcaacaatatc

SEQ ID NO: 12316 - RNA, 20 nt, synthetic construct
  misc_feature 1..20: note = antisense sequence
  source 1..20: mol_type = other RNA
cctaagagtggcaacaatat

SEQ ID NO: 12317 - RNA, 20 nt, synthetic construct
  misc_feature 1..20: note = antisense sequence
  source 1..20: mol_type = other RNA
tcctaagagtggcaacaata

SEQ ID NO: 12318 - RNA, 20 nt, synthetic construct
  misc_feature 1..20: note = antisense sequence
  source 1..20: mol_type = other RNA
ttcctaagagtggcaacaat

SEQ ID NO: 12319 - RNA, 20 nt, synthetic construct
  misc_feature 1..20: note = antisense sequence
  source 1..20: mol_type = other RNA
cttcctaagagtggcaacaa

SEQ ID NO: 12320 - RNA, 20 nt, synthetic construct
  misc_feature 1..20: note = antisense sequence
  source 1..20: mol_type = other RNA
gggcttcctaagagtggcaa

SEQ ID NO: 12321 - RNA, 20 nt, synthetic construct
  misc_feature 1..20: note = antisense sequence
  source 1..20: mol_type = other RNA
tgggcttcctaagagtggca

SEQ ID NO: 12322 - RNA, 20 nt, synthetic construct
  misc_feature 1..20: note = antisense sequence
  source 1..20: mol_type = other RNA
gtgggcttcctaagagtggc

SEQ ID NO: 12323 - RNA, 20 nt, synthetic construct
  misc_feature 1..20: note = antisense sequence
  source 1..20: mol_type = other RNA
tgtgggcttcctaagagtgg

SEQ ID NO: 12324 - RNA, 20 nt, synthetic construct
  misc_feature 1..20: note = antisense sequence
  source 1..20: mol_type = other RNA
gtgtgggcttcctaagagtg

SEQ ID NO: 12325 - RNA, 20 nt, synthetic construct
  misc_feature 1..20: note = antisense sequence
  source 1..20: mol_type = other RNA
tgtgtgggcttcctaagagt

SEQ ID NO: 12326 - RNA, 20 nt, synthetic construct
  misc_feature 1..20: note = antisense sequence
  source 1..20: mol_type = other RNA
atgtgtgggcttcctaagag

SEQ ID NO: 12327 - RNA, 20 nt, synthetic construct
  misc_feature 1..20: note = antisense sequence
  source 1..20: mol_type = other RNA
aatgtgtgggcttcctaaga

SEQ ID NO: 12328 - RNA, 20 nt, synthetic construct
  misc_feature 1..20: note = antisense sequence
  source 1..20: mol_type = other RNA
aaatgtgtgggcttcctaag

SEQ ID NO: 12329 - RNA, 20 nt, synthetic construct
  misc_feature 1..20: note = antisense sequence
  source 1..20: mol_type = other RNA
aaaatgtgtgggcttcctaa

SEQ ID NO: 12330 - RNA, 20 nt, synthetic construct
  misc_feature 1..20: note = antisense sequence
  source 1..20: mol_type = other RNA
taaaatgtgtgggcttccta

SEQ ID NO: 12331 - RNA, 20 nt, synthetic construct
  misc_feature 1..20: note = antisense sequence
  source 1..20: mol_type = other RNA
ttaaaatgtgtgggcttcct

SEQ ID NO: 12332 - RNA, 20 nt, synthetic construct
  misc_feature 1..20: note = antisense sequence
  source 1..20: mol_type = other RNA
attaaaatgtgtgggcttcc

SEQ ID NO: 12333 - RNA, 20 nt, synthetic construct
  misc_feature 1..20: note = antisense sequence
  source 1..20: mol_type = other RNA
ttctccacatctgctttaag

SEQ ID NO: 12334 - RNA, 20 nt, synthetic construct
  misc_feature 1..20: note = antisense sequence
  source 1..20: mol_type = other RNA
cagtggcatctttaagttga

SEQ ID NO: 12335 - RNA, 20 nt, synthetic construct
  misc_feature 1..20: note = antisense sequence
  source 1..20: mol_type = other RNA
gcagtggcatctttaagttg

SEQ ID NO: 12336 - RNA, 20 nt, synthetic construct
  misc_feature 1..20: note = antisense sequence
  source 1..20: mol_type = other RNA
tgcagtggcatctttaagtt

SEQ ID NO: 12337 - RNA, 20 nt, synthetic construct
  misc_feature 1..20: note = antisense sequence
  source 1..20: mol_type = other RNA
ttgcagtggcatctttaagt

SEQ ID NO: 12338 - RNA, 20 nt, synthetic construct
  misc_feature 1..20: note = antisense sequence
  source 1..20: mol_type = other RNA
acttgcagtggcatctttaa

SEQ ID NO: 12339 - RNA, 20 nt, synthetic construct
  misc_feature 1..20: note = antisense sequence
  source 1..20: mol_type = other RNA
tacttgcagtggcatcttta

SEQ ID NO: 12340 - RNA, 20 nt, synthetic construct
  misc_feature 1..20: note = antisense sequence
  source 1..20: mol_type = other RNA
ttacttgcagtggcatcttt

SEQ ID NO: 12341 - RNA, 20 nt, synthetic construct
  misc_feature 1..20: note = antisense sequence
  source 1..20: mol_type = other RNA
cttacttgcagtggcatctt

SEQ ID NO: 12342 - RNA, 20 nt, synthetic construct
  misc_feature 1..20: note = antisense sequence
  source 1..20: mol_type = other RNA
ttcttacttgcagtggcatc

SEQ ID NO: 12343 - RNA, 20 nt, synthetic construct
  misc_feature 1..20: note = antisense sequence
  source 1..20: mol_type = other RNA
tttcttacttgcagtggcat

SEQ ID NO: 12344 - RNA, 20 nt, synthetic construct
  misc_feature 1..20: note = antisense sequence
  source 1..20: mol_type = other RNA
ttttcttacttgcagtggca

SEQ ID NO: 12345 - RNA, 20 nt, synthetic construct
  misc_feature 1..20: note = antisense sequence
  source 1..20: mol_type = other RNA
cactgtagaaaacataccca

SEQ ID NO: 12346 - RNA, 20 nt, synthetic construct
  misc_feature 1..20: note = antisense sequence
  source 1..20: mol_type = other RNA
acactgtagaaaacataccc

SEQ ID NO: 12347 - RNA, 20 nt, synthetic construct
  misc_feature 1..20: note = antisense sequence
  source 1..20: mol_type = other RNA
cagcacactgtagaaaacat

SEQ ID NO: 12348 - RNA, 20 nt, synthetic construct
  misc_feature 1..20: note = antisense sequence
  source 1..20: mol_type = other RNA
ctcagcacactgtagaaaac

SEQ ID NO: 12349 - RNA, 20 nt, synthetic construct
  misc_feature 1..20: note = antisense sequence
  source 1..20: mol_type = other RNA
aagaaaatctcagcacactg

SEQ ID NO: 12350 - RNA, 20 nt, synthetic construct
  misc_feature 1..20: note = antisense sequence
  source 1..20: mol_type = other RNA
cacttgtgagtaagctaatg

SEQ ID NO: 12351 - RNA, 20 nt, synthetic construct
  misc_feature 1..20: note = antisense sequence
  source 1..20: mol_type = other RNA
tgtcatataccctcacttgt

SEQ ID NO: 12352 - RNA, 20 nt, synthetic construct
  misc_feature 1..20: note = antisense sequence
  source 1..20: mol_type = other RNA
atgtcatataccctcacttg

SEQ ID NO: 12353 - RNA, 20 nt, synthetic construct
  misc_feature 1..20: note = antisense sequence
  source 1..20: mol_type = other RNA
ggcaaaatgtcatataccct

SEQ ID NO: 12354 - RNA, 20 nt, synthetic construct
  misc_feature 1..20: note = antisense sequence
  source 1..20: mol_type = other RNA
tggcaaaatgtcatataccc

SEQ ID NO: 12355 - RNA, 20 nt, synthetic construct
  misc_feature 1..20: note = antisense sequence
  source 1..20: mol_type = other RNA
tcatagccttacaacttgca

SEQ ID NO: 12356 - RNA, 20 nt, synthetic construct
  misc_feature 1..20: note = antisense sequence
  source 1..20: mol_type = other RNA
ttcatagccttacaacttgc

SEQ ID NO: 12357 - RNA, 20 nt, synthetic construct
  misc_feature 1..20: note = antisense sequence
  source 1..20: mol_type = other RNA
cttacagtttcctgatcctt

SEQ ID NO: 12358 - RNA, 20 nt, synthetic construct
  misc_feature 1..20: note = antisense sequence
  source 1..20: mol_type = other RNA
tcttacagtttcctgatcct

SEQ ID NO: 12359 - RNA, 20 nt, synthetic construct
  misc_feature 1..20: note = antisense sequence
  source 1..20: mol_type = other RNA
gttcttacagtttcctgatc

SEQ ID NO: 12360 - RNA, 20 nt, synthetic construct
  misc_feature 1..20: note = antisense sequence
  source 1..20: mol_type = other RNA
cttgagttcttacagtttcc

SEQ ID NO: 12361 - RNA, 20 nt, synthetic construct
  misc_feature 1..20: note = antisense sequence
  source 1..20: mol_type = other RNA
gcttgagttcttacagtttc

SEQ ID NO: 12362 - RNA, 20 nt, synthetic construct
  misc_feature 1..20: note = antisense sequence
  source 1..20: mol_type = other RNA
cagcttgagttcttacagtt

SEQ ID NO: 12363 - RNA, 20 nt, synthetic construct
  misc_feature 1..20: note = antisense sequence
  source 1..20: mol_type = other RNA
acagcttgagttcttacagt

SEQ ID NO: 12364 - RNA, 20 nt, synthetic construct
  misc_feature 1..20: note = antisense sequence
  source 1..20: mol_type = other RNA
gacagcttgagttcttacag

SEQ ID NO: 12365 - RNA, 20 nt, synthetic construct
  misc_feature 1..20: note = antisense sequence
  source 1..20: mol_type = other RNA
tgacagcttgagttcttaca

SEQ ID NO: 12366 - RNA, 20 nt, synthetic construct
  misc_feature 1..20: note = antisense sequence
  source 1..20: mol_type = other RNA
ttgacagcttgagttcttac

SEQ ID NO: 12367 - RNA, 20 nt, synthetic construct
  misc_feature 1..20: note = antisense sequence
  source 1..20: mol_type = other RNA
gtttgacagcttgagttctt

SEQ ID NO: 12368 - RNA, 20 nt, synthetic construct
  misc_feature 1..20: note = antisense sequence
  source 1..20: mol_type = other RNA
acagatgtttgacagcttga

SEQ ID NO: 12369 - RNA, 20 nt, synthetic construct
  misc_feature 1..20: note = antisense sequence
  source 1..20: mol_type = other RNA
agacagatgtttgacagctt

SEQ ID NO: 12370 - RNA, 20 nt, synthetic construct
  misc_feature 1..20: note = antisense sequence
  source 1..20: mol_type = other RNA
tcctgagacagatgtttgac

SEQ ID NO: 12371 - RNA, 20 nt, synthetic construct
  misc_feature 1..20: note = antisense sequence
  source 1..20: mol_type = other RNA
gtcctgagacagatgtttga

SEQ ID NO: 12372 - RNA, 20 nt, synthetic construct
  misc_feature 1..20: note = antisense sequence
  source 1..20: mol_type = other RNA
aggcagtttgggtaatagaa

SEQ ID NO: 12373 - RNA, 20 nt, synthetic construct
  misc_feature 1..20: note = antisense sequence
  source 1..20: mol_type = other RNA
taaggcagtttgggtaatag

SEQ ID NO: 12374 - RNA, 20 nt, synthetic construct
  misc_feature 1..20: note = antisense sequence
  source 1..20: mol_type = other RNA
ggcataaggcagtttgggta

SEQ ID NO: 12375 - RNA, 20 nt, synthetic construct
  misc_feature 1..20: note = antisense sequence
  source 1..20: mol_type = other RNA
attggcataaggcagtttgg

SEQ ID NO: 12376 - RNA, 20 nt, synthetic construct
  misc_feature 1..20: note = antisense sequence
  source 1..20: mol_type = other RNA
tattggcataaggcagtttg

SEQ ID NO: 12377 - RNA, 20 nt, synthetic construct
  misc_feature 1..20: note = antisense sequence
  source 1..20: mol_type = other RNA
ctgtattggcataaggcagt

SEQ ID NO: 12378 - RNA, 20 nt, synthetic construct
  misc_feature 1..20: note = antisense sequence
  source 1..20: mol_type = other RNA
cctgtattggcataaggcag

SEQ ID NO: 12379 - RNA, 20 nt, synthetic construct
  misc_feature 1..20: note = antisense sequence
  source 1..20: mol_type = other RNA
ttcaccaccaaattcacttg

SEQ ID NO: 12380 - RNA, 20 nt, synthetic construct
  misc_feature 1..20: note = antisense sequence
  source 1..20: mol_type = other RNA
agcaaactgtgggtggagga

SEQ ID NO: 12381 - RNA, 20 nt, synthetic construct
  misc_feature 1..20: note = antisense sequence
  source 1..20: mol_type = other RNA
aattcagcaaactgtgggtg

SEQ ID NO: 12382 - RNA, 20 nt, synthetic construct
  misc_feature 1..20: note = antisense sequence
  source 1..20: mol_type = other RNA
ctgtatggcaggaatagaat

SEQ ID NO: 12383 - RNA, 20 nt, synthetic construct
  misc_feature 1..20: note = antisense sequence
  source 1..20: mol_type = other RNA
agctgtatggcaggaataga

SEQ ID NO: 12384 - RNA, 20 nt, synthetic construct
  misc_feature 1..20: note = antisense sequence
  source 1..20: mol_type = other RNA
aagctgtatggcaggaatag

SEQ ID NO: 12385 - RNA, 20 nt, synthetic construct
  misc_feature 1..20: note = antisense sequence
  source 1..20: mol_type = other RNA
tggaagctgtatggcaggaa

SEQ ID NO: 12386 - RNA, 20 nt, synthetic construct
  misc_feature 1..20: note = antisense sequence
  source 1..20: mol_type = other RNA
ttggaagctgtatggcagga

SEQ ID NO: 12387 - RNA, 20 nt, synthetic construct
  misc_feature 1..20: note = antisense sequence
  source 1..20: mol_type = other RNA
tttggaagctgtatggcagg

SEQ ID NO: 12388 - RNA, 20 nt, synthetic construct
  misc_feature 1..20: note = antisense sequence
  source 1..20: mol_type = other RNA
ctttggaagctgtatggcag

SEQ ID NO: 12389 - RNA, 20 nt, synthetic construct
  misc_feature 1..20: note = antisense sequence
  source 1..20: mol_type = other RNA
cctttggaagctgtatggca

SEQ ID NO: 12390 - RNA, 20 nt, synthetic construct
  misc_feature 1..20: note = antisense sequence
  source 1..20: mol_type = other RNA
tcctttggaagctgtatggc

SEQ ID NO: 12391 - RNA, 20 nt, synthetic construct
  misc_feature 1..20: note = antisense sequence
  source 1..20: mol_type = other RNA
gcctcacatctttccttctc

SEQ ID NO: 12392 - RNA, 20 nt, synthetic construct
  misc_feature 1..20: note = antisense sequence
  source 1..20: mol_type = other RNA
tgcctcacatctttccttct

SEQ ID NO: 12393 - RNA, 20 nt, synthetic construct
  misc_feature 1..20: note = antisense sequence
  source 1..20: mol_type = other RNA
attgcctcacatctttcctt

SEQ ID NO: 12394 - RNA, 20 nt, synthetic construct
  misc_feature 1..20: note = antisense sequence
  source 1..20: mol_type = other RNA
gacattgcctcacatctttc

SEQ ID NO: 12395 - RNA, 20 nt, synthetic construct
  misc_feature 1..20: note = antisense sequence
  source 1..20: mol_type = other RNA
atgacattgcctcacatctt

SEQ ID NO: 12396 - RNA, 20 nt, synthetic construct
  misc_feature 1..20: note = antisense sequence
  source 1..20: mol_type = other RNA
tgccatgacattgcctcaca

SEQ ID NO: 12397 - RNA, 20 nt, synthetic construct
  misc_feature 1..20: note = antisense sequence
  source 1..20: mol_type = other RNA
gatgccatgacattgcctca

SEQ ID NO: 12398 - RNA, 20 nt, synthetic construct
  misc_feature 1..20: note = antisense sequence
  source 1..20: mol_type = other RNA
gtcttgatgccatgacattg

SEQ ID NO: 12399 - RNA, 20 nt, synthetic construct
  misc_feature 1..20: note = antisense sequence
  source 1..20: mol_type = other RNA
tgatctgtcttgatgccatg

SEQ ID NO: 12400 - RNA, 20 nt, synthetic construct
  misc_feature 1..20: note = antisense sequence
  source 1..20: mol_type = other RNA
atgatctgtcttgatgccat

SEQ ID NO: 12401 - RNA, 20 nt, synthetic construct
  misc_feature 1..20: note = antisense sequence
  source 1..20: mol_type = other RNA
tatgatctgtcttgatgcca

SEQ ID NO: 12402 - RNA, 20 nt, synthetic construct
  misc_feature 1..20: note = antisense sequence
  source 1..20: mol_type = other RNA
gaggtaatgggaaacaggta

SEQ ID NO: 12403 - RNA, 20 nt, synthetic construct
  misc_feature 1..20: note = antisense sequence
  source 1..20: mol_type = other RNA
tgaggtaatgggaaacaggt

SEQ ID NO: 12404 - RNA, 20 nt, synthetic construct
  misc_feature 1..20: note = antisense sequence
  source 1..20: mol_type = other RNA
tagtgaggtaatgggaaaca

SEQ ID NO: 12405 - RNA, 20 nt, synthetic construct
  misc_feature 1..20: note = antisense sequence
  source 1..20: mol_type = other RNA
ctagtgaggtaatgggaaac

SEQ ID NO: 12406 - RNA, 20 nt, synthetic construct
  misc_feature 1..20: note = antisense sequence
  source 1..20: mol_type = other RNA
tctagtgaggtaatgggaaa

SEQ ID NO: 12407 - RNA, 20 nt, synthetic construct
  misc_feature 1..20: note = antisense sequence
  source 1..20: mol_type = other RNA
atctagtgaggtaatgggaa

SEQ ID NO: 12408 - RNA, 20 nt, synthetic construct
  misc_feature 1..20: note = antisense sequence
  source 1..20: mol_type = other RNA
gatctagtgaggtaatggga

SEQ ID NO: 12409 - RNA, 20 nt, synthetic construct
  misc_feature 1..20: note = antisense sequence
  source 1..20: mol_type = other RNA
gccaggatctagtgaggtaa

SEQ ID NO: 12410 - RNA, 20 nt, synthetic construct
  misc_feature 1..20: note = antisense sequence
  source 1..20: mol_type = other RNA
ggccaggatctagtgaggta

SEQ ID NO: 12411 - RNA, 20 nt, synthetic construct
  misc_feature 1..20: note = antisense sequence
  source 1..20: mol_type = other RNA
aagggccaggatctagtgag

SEQ ID NO: 12412 - RNA, 20 nt, synthetic construct
  misc_feature 1..20: note = antisense sequence
  source 1..20: mol_type = other RNA
aaagggccaggatctagtga

SEQ ID NO: 12413 - RNA, 20 nt, synthetic construct
  misc_feature 1..20: note = antisense sequence
  source 1..20: mol_type = other RNA
aaaagggccaggatctagtg

SEQ ID NO: 12414 - RNA, 20 nt, synthetic construct
  misc_feature 1..20: note = antisense sequence
  source 1..20: mol_type = other RNA
gaaaagggccaggatctagt

SEQ ID NO: 12415 - RNA, 20 nt, synthetic construct
  misc_feature 1..20: note = antisense sequence
  source 1..20: mol_type = other RNA
tgggaaaagggccaggatct

SEQ ID NO: 12416 - RNA, 20 nt, synthetic construct
  misc_feature 1..20: note = antisense sequence
  source 1..20: mol_type = other RNA
cagctctcataattcacttc

SEQ ID NO: 12417 - RNA, 20 nt, synthetic construct
  misc_feature 1..20: note = antisense sequence
  source 1..20: mol_type = other RNA
gtcagctctcataattcact

SEQ ID NO: 12418 - RNA, 20 nt, synthetic construct
  misc_feature 1..20: note = antisense sequence
  source 1..20: mol_type = other RNA
tctgtcagctctcataattc

SEQ ID NO: 12419 - RNA, 20 nt, synthetic construct
  misc_feature 1..20: note = antisense sequence
  source 1..20: mol_type = other RNA
tagccctttgcatggattta

SEQ ID NO: 12420 - RNA, 20 nt, synthetic construct
  misc_feature 1..20: note = antisense sequence
  source 1..20: mol_type = other RNA
gcatagccctttgcatggat

SEQ ID NO: 12421 - RNA, 20 nt, synthetic construct
  misc_feature 1..20: note = antisense sequence
  source 1..20: mol_type = other RNA
ggcatagccctttgcatgga

SEQ ID NO: 12422 - RNA, 20 nt, synthetic construct
  misc_feature 1..20: note = antisense sequence
  source 1..20: mol_type = other RNA
tggcatagccctttgcatgg

SEQ ID NO: 12423 - RNA, 20 nt, synthetic construct
  misc_feature 1..20: note = antisense sequence
  source 1..20: mol_type = other RNA
atggcatagccctttgcatg

SEQ ID NO: 12424 - RNA, 20 nt, synthetic construct
  misc_feature 1..20: note = antisense sequence
  source 1..20: mol_type = other RNA
tggatggcatagccctttgc

SEQ ID NO: 12425 - RNA, 20 nt, synthetic construct
  misc_feature 1..20: note = antisense sequence
  source 1..20: mol_type = other RNA
atggatggcatagccctttg

SEQ ID NO: 12426 - RNA, 20 nt, synthetic construct
  misc_feature 1..20: note = antisense sequence
  source 1..20: mol_type = other RNA
aatggatggcatagcccttt

SEQ ID NO: 12427 - RNA, 20 nt, synthetic construct
  misc_feature 1..20: note = antisense sequence
  source 1..20: mol_type = other RNA
aaatggatggcatagccctt

SEQ ID NO: 12428 - RNA, 20 nt, synthetic construct
  misc_feature 1..20: note = antisense sequence
  source 1..20: mol_type = other RNA
aaaatggatggcatagccct

SEQ ID NO: 12429 - RNA, 20 nt, synthetic construct
  misc_feature 1..20: note = antisense sequence
  source 1..20: mol_type = other RNA
taaaatggatggcatagccc

SEQ ID NO: 12430 - RNA, 20 nt, synthetic construct
  misc_feature 1..20: note = antisense sequence
  source 1..20: mol_type = other RNA
ctaaaatggatggcatagcc

SEQ ID NO: 12431 - RNA, 20 nt, synthetic construct
  misc_feature 1..20: note = antisense sequence
  source 1..20: mol_type = other RNA
ggctaaaatggatggcatag

SEQ ID NO: 12432 - RNA, 20 nt, synthetic construct
  misc_feature 1..20: note = antisense sequence
  source 1..20: mol_type = other RNA
aggctaaaatggatggcata

SEQ ID NO: 12433 - RNA, 20 nt, synthetic construct
  misc_feature 1..20: note = antisense sequence
  source 1..20: mol_type = other RNA
aaggctaaaatggatggcat

SEQ ID NO: 12434 - RNA, 20 nt, synthetic construct
  misc_feature 1..20: note = antisense sequence
  source 1..20: mol_type = other RNA
aaaggctaaaatggatggca

SEQ ID NO: 12435 - RNA, 20 nt, synthetic construct
  misc_feature 1..20: note = antisense sequence
  source 1..20: mol_type = other RNA
aaaaggctaaaatggatggc

SEQ ID NO: 12436 - RNA, 20 nt, synthetic construct
  misc_feature 1..20: note = antisense sequence
  source 1..20: mol_type = other RNA
ccagcctgggcaataagaga

SEQ ID NO: 12437 - RNA, 20 nt, synthetic construct
  misc_feature 1..20: note = antisense sequence
  source 1..20: mol_type = other RNA
tccagcctgggcaataagag

SEQ ID NO: 12438 - RNA, 20 nt, synthetic construct
  misc_feature 1..20: note = antisense sequence
  source 1..20: mol_type = other RNA
ctccagcctgggcaataaga

SEQ ID NO: 12439 - RNA, 20 nt, synthetic construct
  misc_feature 1..20: note = antisense sequence
  source 1..20: mol_type = other RNA
actccagcctgggcaataag

SEQ ID NO: 12440 - RNA, 20 nt, synthetic construct
  misc_feature 1..20: note = antisense sequence
  source 1..20: mol_type = other RNA
cactccagcctgggcaataa

SEQ ID NO: 12441 - RNA, 20 nt, synthetic construct
  misc_feature 1..20: note = antisense sequence
  source 1..20: mol_type = other RNA
gcactccagcctgggcaata

SEQ ID NO: 12442 - RNA, 20 nt, synthetic construct
  misc_feature 1..20: note = antisense sequence
  source 1..20: mol_type = other RNA
tgcactccagcctgggcaat

SEQ ID NO: 12443 - RNA, 20 nt, synthetic construct
  misc_feature 1..20: note = antisense sequence
  source 1..20: mol_type = other RNA
atgccactgcactccagcct

SEQ ID NO: 12444 - RNA, 20 nt, synthetic construct
  misc_feature 1..20: note = antisense sequence
  source 1..20: mol_type = other RNA
tcatgccactgcactccagc

SEQ ID NO: 12445 - RNA, 20 nt, synthetic construct
  misc_feature 1..20: note = antisense sequence
  source 1..20: mol_type = other RNA
atcatgccactgcactccag

SEQ ID NO: 12446 - RNA, 20 nt, synthetic construct
  misc_feature 1..20: note = antisense sequence
  source 1..20: mol_type = other RNA
gatcatgccactgcactcca

SEQ ID NO: 12447 - RNA, 20 nt, synthetic construct
  misc_feature 1..20: note = antisense sequence
  source 1..20: mol_type = other RNA
agatcatgccactgcactcc

SEQ ID NO: 12448 - RNA, 20 nt, synthetic construct
  misc_feature 1..20: note = antisense sequence
  source 1..20: mol_type = other RNA
gagatcatgccactgcactc

SEQ ID NO: 12449 - RNA, 20 nt, synthetic construct
  misc_feature 1..20: note = antisense sequence
  source 1..20: mol_type = other RNA
agagatcatgccactgcact

SEQ ID NO: 12450 - RNA, 20 nt, synthetic construct
  misc_feature 1..20: note = antisense sequence
  source 1..20: mol_type = other RNA
cagagatcatgccactgcac

SEQ ID NO: 12451 - RNA, 20 nt, synthetic construct
  misc_feature 1..20: note = antisense sequence
  source 1..20: mol_type = other RNA
gagcagagatcatgccactg

SEQ ID NO: 12452 - RNA, 20 nt, synthetic construct
  misc_feature 1..20: note = antisense sequence
  source 1..20: mol_type = other RNA
aggttgcagtgagcagagat

SEQ ID NO: 12453 - RNA, 20 nt, synthetic construct
  misc_feature 1..20: note = antisense sequence
  source 1..20: mol_type = other RNA
gaggttgcagtgagcagaga

SEQ ID NO: 12454 - RNA, 20 nt, synthetic construct
  misc_feature 1..20: note = antisense sequence
  source 1..20: mol_type = other RNA
ggaggttgcagtgagcagag

SEQ ID NO: 12455 - RNA, 20 nt, synthetic construct
  misc_feature 1..20: note = antisense sequence
  source 1..20: mol_type = other RNA
tggaggttgcagtgagcaga

SEQ ID NO: 12456 - RNA, 20 nt, synthetic construct
  misc_feature 1..20: note = antisense sequence
  source 1..20: mol_type = other RNA
gtggaggttgcagtgagcag

SEQ ID NO: 12457 - RNA, 20 nt, synthetic construct
  misc_feature 1..20: note = antisense sequence
  source 1..20: mol_type = other RNA
ggtggaggttgcagtgagca

SEQ ID NO: 12458 - RNA, 20 nt, synthetic construct
  misc_feature 1..20: note = antisense sequence
  source 1..20: mol_type = other RNA
aggtggaggttgcagtgagc

SEQ ID NO: 12459 - RNA, 20 nt, synthetic construct
  misc_feature 1..20: note = antisense sequence
  source 1..20: mol_type = other RNA
gaggtggaggttgcagtgag

SEQ ID NO: 12460 - RNA, 20 nt, synthetic construct
  misc_feature 1..20: note = antisense sequence
  source 1..20: mol_type = other RNA
ggaggtggaggttgcagtga

SEQ ID NO: 12461 - RNA, 20 nt, synthetic construct
  misc_feature 1..20: note = antisense sequence
  source 1..20: mol_type = other RNA
aggaggtggaggttgcagtg

SEQ ID NO: 12462 - RNA, 20 nt, synthetic construct
  misc_feature 1..20: note = antisense sequence
  source 1..20: mol_type = other RNA
caggaggtggaggttgcagt

SEQ ID NO: 12463 - RNA, 20 nt, synthetic construct
  misc_feature 1..20: note = antisense sequence
  source 1..20: mol_type = other RNA
tgaacccaggaggtggaggt

SEQ ID NO: 12464 - RNA, 20 nt, synthetic construct
  misc_feature 1..20: note = antisense sequence
  source 1..20: mol_type = other RNA
ttgaacccaggaggtggagg

SEQ ID NO: 12465 - RNA, 20 nt, synthetic construct
  misc_feature 1..20: note = antisense sequence
  source 1..20: mol_type = other RNA
cttgaacccaggaggtggag

SEQ ID NO: 12466 - RNA, 20 nt, synthetic construct
  misc_feature 1..20: note = antisense sequence
  source 1..20: mol_type = other RNA
acttgaacccaggaggtgga

SEQ ID NO: 12467 - RNA, 20 nt, synthetic construct
  misc_feature 1..20: note = antisense sequence
  source 1..20: mol_type = other RNA
cacttgaacccaggaggtgg

SEQ ID NO: 12468 - RNA, 20 nt, synthetic construct
  misc_feature 1..20: note = antisense sequence
  source 1..20: mol_type = other RNA
tcacttgaacccaggaggtg

SEQ ID NO: 12469 - RNA, 20 nt, synthetic construct
  misc_feature 1..20: note = antisense sequence
  source 1..20: mol_type = other RNA
atcacttgaacccaggaggt

SEQ ID NO: 12470 - RNA, 20 nt, synthetic construct
  misc_feature 1..20: note = antisense sequence
  source 1..20: mol_type = other RNA
aatcacttgaacccaggagg

SEQ ID NO: 12471 - RNA, 20 nt, synthetic construct
  misc_feature 1..20: note = antisense sequence
  source 1..20: mol_type = other RNA
gaatcacttgaacccaggag

SEQ ID NO: 12472 - RNA, 20 nt, synthetic construct
  misc_feature 1..20: note = antisense sequence
  source 1..20: mol_type = other RNA
agaatcacttgaacccagga

SEQ ID NO: 12473 - RNA, 20 nt, synthetic construct
  misc_feature 1..20: note = antisense sequence
  source 1..20: mol_type = other RNA
gagaatcacttgaacccagg

SEQ ID NO: 12474 - RNA, 20 nt, synthetic construct
  misc_feature 1..20: note = antisense sequence
  source 1..20: mol_type = other RNA
ggagaatcacttgaacccag

SEQ ID NO: 12475 - RNA, 20 nt, synthetic construct
  misc_feature 1..20: note = antisense sequence
  source 1..20: mol_type = other RNA
aggagaatcacttgaaccca

SEQ ID NO: 12476 - RNA, 20 nt, synthetic construct
  misc_feature 1..20: note = antisense sequence
  source 1..20: mol_type = other RNA
caggagaatcacttgaaccc

SEQ ID NO: 12477 - RNA, 20 nt, synthetic construct
  misc_feature 1..20: note = antisense sequence
  source 1..20: mol_type = other RNA
gcaggagaatcacttgaacc

SEQ ID NO: 12478 - RNA, 20 nt, synthetic construct
  misc_feature 1..20: note = antisense sequence
  source 1..20: mol_type = other RNA
ggcaggagaatcacttgaac

SEQ ID NO: 12479 - RNA, 20 nt, synthetic construct
  misc_feature 1..20: note = antisense sequence
  source 1..20: mol_type = other RNA
aggcaggagaatcacttgaa

SEQ ID NO: 12480 - RNA, 20 nt, synthetic construct
  misc_feature 1..20: note = antisense sequence
  source 1..20: mol_type = other RNA
gaggcaggagaatcacttga

SEQ ID NO: 12481 - RNA, 20 nt, synthetic construct
  misc_feature 1..20: note = antisense sequence
  source 1..20: mol_type = other RNA
tgaggcaggagaatcacttg

SEQ ID NO: 12482 - RNA, 20 nt, synthetic construct
  misc_feature 1..20: note = antisense sequence
  source 1..20: mol_type = other RNA
ctgaggcaggagaatcactt

SEQ ID NO: 12483 - RNA, 20 nt, synthetic construct
  misc_feature 1..20: note = antisense sequence
  source 1..20: mol_type = other RNA
gctgaggcaggagaatcact

SEQ ID NO: 12484 - RNA, 20 nt, synthetic construct
  misc_feature 1..20: note = antisense sequence
  source 1..20: mol_type = other RNA
ggctgaggcaggagaatcac

SEQ ID NO: 12485 - RNA, 20 nt, synthetic construct
  misc_feature 1..20: note = antisense sequence
  source 1..20: mol_type = other RNA
aggctgaggcaggagaatca

SEQ ID NO: 12486 - RNA, 20 nt, synthetic construct
  misc_feature 1..20: note = antisense sequence
  source 1..20: mol_type = other RNA
gaggctgaggcaggagaatc

SEQ ID NO: 12487 - RNA, 20 nt, synthetic construct
  misc_feature 1..20: note = antisense sequence
  source 1..20: mol_type = other RNA
ggaggctgaggcaggagaat

SEQ ID NO: 12488 - RNA, 20 nt, synthetic construct
  misc_feature 1..20: note = antisense sequence
  source 1..20: mol_type = other RNA
aggaggctgaggcaggagaa

SEQ ID NO: 12489 - RNA, 20 nt, synthetic construct
  misc_feature 1..20: note = antisense sequence
  source 1..20: mol_type = other RNA
ggagttcgagaccagtctgg

SEQ ID NO: 12490 - RNA, 20 nt, synthetic construct
  misc_feature 1..20: note = antisense sequence
  source 1..20: mol_type = other RNA
aggagttcgagaccagtctg

SEQ ID NO: 12491 - RNA, 20 nt, synthetic construct
  misc_feature 1..20: note = antisense sequence
  source 1..20: mol_type = other RNA
caggagttcgagaccagtct

SEQ ID NO: 12492 - RNA, 20 nt, synthetic construct
  misc_feature 1..20: note = antisense sequence
  source 1..20: mol_type = other RNA
tcaggagttcgagaccagtc

SEQ ID NO: 12493 - RNA, 20 nt, synthetic construct
  misc_feature 1..20: note = antisense sequence
  source 1..20: mol_type = other RNA
gtcaggagttcgagaccagt

SEQ ID NO: 12494 - RNA, 20 nt, synthetic construct
  misc_feature 1..20: note = antisense sequence
  source 1..20: mol_type = other RNA
tgaggtcaggagttcgagac

SEQ ID NO: 12495 - RNA, 20 nt, synthetic construct
  misc_feature 1..20: note = antisense sequence
  source 1..20: mol_type = other RNA
ctgaggtcaggagttcgaga

SEQ ID NO: 12496 - RNA, 20 nt, synthetic construct
  misc_feature 1..20: note = antisense sequence
  source 1..20: mol_type = other RNA
ccagcactttgggaatccga

SEQ ID NO: 12497 - RNA, 20 nt, synthetic construct
  misc_feature 1..20: note = antisense sequence
  source 1..20: mol_type = other RNA
ctgtaatcccagcactttgg

SEQ ID NO: 12498 - RNA, 20 nt, synthetic construct
  misc_feature 1..20: note = antisense sequence
  source 1..20: mol_type = other RNA
cctgtaatcccagcactttg

SEQ ID NO: 12499 - RNA, 20 nt, synthetic construct
  misc_feature 1..20: note = antisense sequence
  source 1..20: mol_type = other RNA
gcctgtaatcccagcacttt

SEQ ID NO: 12500 - RNA, 20 nt, synthetic construct
  misc_feature 1..20: note = antisense sequence
  source 1..20: mol_type = other RNA
tgcctgtaatcccagcactt

SEQ ID NO: 12501 - RNA, 20 nt, synthetic construct
  misc_feature 1..20: note = antisense sequence
  source 1..20: mol_type = other RNA
atgcctgtaatcccagcact

SEQ ID NO: 12502 - RNA, 20 nt, synthetic construct
  misc_feature 1..20: note = antisense sequence
  source 1..20: mol_type = other RNA
catgcctgtaatcccagcac

SEQ ID NO: 12503 - RNA, 20 nt, synthetic construct
  misc_feature 1..20: note = antisense sequence
  source 1..20: mol_type = other RNA
gagccaagtaaagcctaatt

SEQ ID NO: 12504 - RNA, 20 nt, synthetic construct
  misc_feature 1..20: note = antisense sequence
  source 1..20: mol_type = other RNA
ccagagccaagtaaagccta

SEQ ID NO: 12505 - RNA, 20 nt, synthetic construct
  misc_feature 1..20: note = antisense sequence
  source 1..20: mol_type = other RNA
gccagagccaagtaaagcct

SEQ ID NO: 12506 - RNA, 20 nt, synthetic construct
  misc_feature 1..20: note = antisense sequence
  source 1..20: mol_type = other RNA
gaggcttgggtgtctaaaga

SEQ ID NO: 12507 - RNA, 20 nt, synthetic construct
  misc_feature 1..20: note = antisense sequence
  source 1..20: mol_type = other RNA
tgaggcttgggtgtctaaag

SEQ ID NO: 12508 - RNA, 20 nt, synthetic construct
  misc_feature 1..20: note = antisense sequence
  source 1..20: mol_type = other RNA
ttgaggcttgggtgtctaaa

SEQ ID NO: 12509 - RNA, 20 nt, synthetic construct
  misc_feature 1..20: note = antisense sequence
  source 1..20: mol_type = other RNA
aattgaggcttgggtgtcta

SEQ ID NO: 12510 - RNA, 20 nt, synthetic construct
  misc_feature 1..20: note = antisense sequence
  source 1..20: mol_type = other RNA
ctaattgaggcttgggtgtc

SEQ ID NO: 12511 - RNA, 20 nt, synthetic construct
  misc_feature 1..20: note = antisense sequence
  source 1..20: mol_type = other RNA
actaattgaggcttgggtgt

SEQ ID NO: 12512 - RNA, 20 nt, synthetic construct
  misc_feature 1..20: note = antisense sequence
  source 1..20: mol_type = other RNA
tactaattgaggcttgggtg

SEQ ID NO: 12513 - RNA, 20 nt, synthetic construct
  misc_feature 1..20: note = antisense sequence
  source 1..20: mol_type = other RNA
cagggacagtaactaccagt

SEQ ID NO: 12514 - RNA, 20 nt, synthetic construct
  misc_feature 1..20: note = antisense sequence
  source 1..20: mol_type = other RNA
tcagggacagtaactaccag

SEQ ID NO: 12515 - RNA, 20 nt, synthetic construct
  misc_feature 1..20: note = antisense sequence
  source 1..20: mol_type = other RNA
atctcagggacagtaactac

SEQ ID NO: 12516 - RNA, 20 nt, synthetic construct
  misc_feature 1..20: note = antisense sequence
  source 1..20: mol_type = other RNA
aatctcagggacagtaacta

SEQ ID NO: 12517 - RNA, 20 nt, synthetic construct
  misc_feature 1..20: note = antisense sequence
  source 1..20: mol_type = other RNA
ataatctcagggacagtaac

SEQ ID NO: 12518 - RNA, 20 nt, synthetic construct
  misc_feature 1..20: note = antisense sequence
  source 1..20: mol_type = other RNA
gaaataatctcagggacagt

SEQ ID NO: 12519 - RNA, 20 nt, synthetic construct
  misc_feature 1..20: note = antisense sequence
  source 1..20: mol_type = other RNA
gctaggagttgtgagattat

SEQ ID NO: 12520 - RNA, 20 nt, synthetic construct
  misc_feature 1..20: note = antisense sequence
  source 1..20: mol_type = other RNA
aggctaggagttgtgagatt

SEQ ID NO: 12521 - RNA, 20 nt, synthetic construct
  misc_feature 1..20: note = antisense sequence
  source 1..20: mol_type = other RNA
gaggctaggagttgtgagat

SEQ ID NO: 12522 - RNA, 20 nt, synthetic construct
  misc_feature 1..20: note = antisense sequence
  source 1..20: mol_type = other RNA
agagctgtgaatgtaacttg

SEQ ID NO: 12523 - RNA, 20 nt, synthetic construct
  misc_feature 1..20: note = antisense sequence
  source 1..20: mol_type = other RNA
gcagagctgtgaatgtaact

SEQ ID NO: 12524 - RNA, 20 nt, synthetic construct
  misc_feature 1..20: note = antisense sequence
  source 1..20: mol_type = other RNA
tgcagagctgtgaatgtaac

SEQ ID NO: 12525 - RNA, 20 nt, synthetic construct
  misc_feature 1..20: note = antisense sequence
  source 1..20: mol_type = other RNA
atttgcagagctgtgaatgt

SEQ ID NO: 12526 - RNA, 20 nt, synthetic construct
  misc_feature 1..20: note = antisense sequence
  source 1..20: mol_type = other RNA
tgtgtgtgtgtaatttgcag

SEQ ID NO: 12527 - RNA, 20 nt, synthetic construct
  misc_feature 1..20: note = antisense sequence
  source 1..20: mol_type = other RNA
gtgtgtgtgtgtaatttgca

SEQ ID NO: 12528 - RNA, 20 nt, synthetic construct
  misc_feature 1..20: note = antisense sequence
  source 1..20: mol_type = other RNA
tgtgtgtgtgtgtaatttgc

SEQ ID NO: 12529 - RNA, 20 nt, synthetic construct
  misc_feature 1..20: note = antisense sequence
  source 1..20: mol_type = other RNA
gtgtgtgtgtgtgtaatttg

SEQ ID NO: 12530 - RNA, 20 nt, synthetic construct
  misc_feature 1..20: note = antisense sequence
  source 1..20: mol_type = other RNA
gtgtgtgtgtgtgtgtaatt

SEQ ID NO: 12531 - RNA, 20 nt, synthetic construct
  misc_feature 1..20: note = antisense sequence
  source 1..20: mol_type = other RNA
tgtgtgtgtgtgtgtgtaat

SEQ ID NO: 12532 - RNA, 20 nt, synthetic construct
  misc_feature 1..20: note = antisense sequence
  source 1..20: mol_type = other RNA
gtgtgtgtgtgtgtgtgtaa

SEQ ID NO: 12533 - RNA, 20 nt, synthetic construct
  misc_feature 1..20: note = antisense sequence
  source 1..20: mol_type = other RNA
tgtgtgtgtgtgtgtgtgta

SEQ ID NO: 12534 - RNA, 20 nt, synthetic construct
  misc_feature 1..20: note = antisense sequence
  source 1..20: mol_type = other RNA
gtgtgtgtgtgtgtgtgtgt

SEQ ID NO: 12535 - RNA, 20 nt, synthetic construct
  misc_feature 1..20: note = antisense sequence
  source 1..20: mol_type = other RNA
tgtgtgtgtgtgtgtgtgtg

SEQ ID NO: 12536 - RNA, 20 nt, synthetic construct
  misc_feature 1..20: note = antisense sequence
  source 1..20: mol_type = other RNA
gtgtgtgtgtgtgtgtgtgt

SEQ ID NO: 12537 - RNA, 20 nt, synthetic construct
  misc_feature 1..20: note = antisense sequence
  source 1..20: mol_type = other RNA
tgtgtgtgtgtgtgtgtgtg

SEQ ID NO: 12538 - RNA, 20 nt, synthetic construct
  misc_feature 1..20: note = antisense sequence
  source 1..20: mol_type = other RNA
agagtgttagtacgtgtgtg

SEQ ID NO: 12539 - RNA, 20 nt, synthetic construct
  misc_feature 1..20: note = antisense sequence
  source 1..20: mol_type = other RNA
tgagagtgttagtacgtgtg

SEQ ID NO: 12540 - RNA, 20 nt, synthetic construct
  misc_feature 1..20: note = antisense sequence
  source 1..20: mol_type = other RNA
aatgagagtgttagtacgtg

SEQ ID NO: 12541 - RNA, 20 nt, synthetic construct
  misc_feature 1..20: note = antisense sequence
  source 1..20: mol_type = other RNA
gaatgagagtgttagtacgt

SEQ ID NO: 12542 - RNA, 20 nt, synthetic construct
  misc_feature 1..20: note = antisense sequence
  source 1..20: mol_type = other RNA
agaatgagagtgttagtacg

SEQ ID NO: 12543 - RNA, 20 nt, synthetic construct
  misc_feature 1..20: note = antisense sequence
  source 1..20: mol_type = other RNA
gggagtagaatgagagtgtt

SEQ ID NO: 12544 - RNA, 20 nt, synthetic construct
  misc_feature 1..20: note = antisense sequence
  source 1..20: mol_type = other RNA
agggagtagaatgagagtgt

SEQ ID NO: 12545 - RNA, 20 nt, synthetic construct
  misc_feature 1..20: note = antisense sequence
  source 1..20: mol_type = other RNA
aagggagtagaatgagagtg

SEQ ID NO: 12546 - RNA, 20 nt, synthetic construct
  misc_feature 1..20: note = antisense sequence
  source 1..20: mol_type = other RNA
gaatgtgcaaaatgaaggct

SEQ ID NO: 12547 - RNA, 20 nt, synthetic construct
  misc_feature 1..20: note = antisense sequence
  source 1..20: mol_type = other RNA
ttcctcaggcatattatcct

SEQ ID NO: 12548 - RNA, 20 nt, synthetic construct
  misc_feature 1..20: note = antisense sequence
  source 1..20: mol_type = other RNA
attcctcaggcatattatcc

SEQ ID NO: 12549 - RNA, 20 nt, synthetic construct
  misc_feature 1..20: note = antisense sequence
  source 1..20: mol_type = other RNA
acactattcctcaggcatat

SEQ ID NO: 12550 - RNA, 20 nt, synthetic construct
  misc_feature 1..20: note = antisense sequence
  source 1..20: mol_type = other RNA
gtgctaaaggaacactattc

SEQ ID NO: 12551 - RNA, 20 nt, synthetic construct
  misc_feature 1..20: note = antisense sequence
  source 1..20: mol_type = other RNA
tacaagtgctaaaggaacac

SEQ ID NO: 12552 - RNA, 20 nt, synthetic construct
  misc_feature 1..20: note = antisense sequence
  source 1..20: mol_type = other RNA
cttacaagtgctaaaggaac

SEQ ID NO: 12553 - RNA, 20 nt, synthetic construct
  misc_feature 1..20: note = antisense sequence
  source 1..20: mol_type = other RNA
gaatagcacttctcactgag

SEQ ID NO: 12554 - RNA, 20 nt, synthetic construct
  misc_feature 1..20: note = antisense sequence
  source 1..20: mol_type = other RNA
gatttcttcagtggagcaga

SEQ ID NO: 12555 - RNA, 20 nt, synthetic construct
  misc_feature 1..20: note = antisense sequence
  source 1..20: mol_type = other RNA
taaccagatttcttcagtgg

SEQ ID NO: 12556 - RNA, 20 nt, synthetic construct
  misc_feature 1..20: note = antisense sequence
  source 1..20: mol_type = other RNA
gaagagagccatatcaatga

SEQ ID NO: 12557 - RNA, 20 nt, synthetic construct
  misc_feature 1..20: note = antisense sequence
  source 1..20: mol_type = other RNA
agaagagagccatatcaatg

SEQ ID NO: 12558 - RNA, 20 nt, synthetic construct
  misc_feature 1..20: note = antisense sequence
  source 1..20: mol_type = other RNA
gttttgagaagagagccata

SEQ ID NO: 12559 - RNA, 20 nt, synthetic construct
  misc_feature 1..20: note = antisense sequence
  source 1..20: mol_type = other RNA
ggaagagcataaattgtgtc

SEQ ID NO: 12560 - RNA, 20 nt, synthetic construct
  misc_feature 1..20: note = antisense sequence
  source 1..20: mol_type = other RNA
gcttacaggaagagcataaa

SEQ ID NO: 12561 - RNA, 20 nt, synthetic construct
  misc_feature 1..20: note = antisense sequence
  source 1..20: mol_type = other RNA
aggctgcttacaggaagagc

SEQ ID NO: 12562 - RNA, 20 nt, synthetic construct
  misc_feature 1..20: note = antisense sequence
  source 1..20: mol_type = other RNA
caggctgcttacaggaagag

SEQ ID NO: 12563 - RNA, 20 nt, synthetic construct
  misc_feature 1..20: note = antisense sequence
  source 1..20: mol_type = other RNA
tcaggctgcttacaggaaga

SEQ ID NO: 12564 - RNA, 20 nt, synthetic construct
  misc_feature 1..20: note = antisense sequence
  source 1..20: mol_type = other RNA
ggtcaagtgaatagtaaacc

SEQ ID NO: 12565 - RNA, 20 nt, synthetic construct
  misc_feature 1..20: note = antisense sequence
  source 1..20: mol_type = other RNA
ttgggttgttctgggtcaag

SEQ ID NO: 12566 - RNA, 20 nt, synthetic construct
  misc_feature 1..20: note = antisense sequence
  source 1..20: mol_type = other RNA
ggtagcttcatggatgttct

SEQ ID NO: 12567 - RNA, 20 nt, synthetic construct
  misc_feature 1..20: note = antisense sequence
  source 1..20: mol_type = other RNA
gggtagcttcatggatgttc

SEQ ID NO: 12568 - RNA, 20 nt, synthetic construct
  misc_feature 1..20: note = antisense sequence
  source 1..20: mol_type = other RNA
ctgggtagcttcatggatgt

SEQ ID NO: 12569 - RNA, 20 nt, synthetic construct
  misc_feature 1..20: note = antisense sequence
  source 1..20: mol_type = other RNA
cctgggtagcttcatggatg

SEQ ID NO: 12570 - RNA, 20 nt, synthetic construct
  misc_feature 1..20: note = antisense sequence
  source 1..20: mol_type = other RNA
gcctgggtagcttcatggat

SEQ ID NO: 12571 - RNA, 20 nt, synthetic construct
  misc_feature 1..20: note = antisense sequence
  source 1..20: mol_type = other RNA
ttgattgcctgggtagcttc

SEQ ID NO: 12572 - RNA, 20 nt, synthetic construct
  misc_feature 1..20: note = antisense sequence
  source 1..20: mol_type = other RNA
cttgattgcctgggtagctt

SEQ ID NO: 12573 - RNA, 20 nt, synthetic construct
  misc_feature 1..20: note = antisense sequence
  source 1..20: mol_type = other RNA
ccttgattgcctgggtagct

SEQ ID NO: 12574 - RNA, 20 nt, synthetic construct
  misc_feature 1..20: note = antisense sequence
  source 1..20: mol_type = other RNA
ataacccttgattgcctggg

SEQ ID NO: 12575 - RNA, 20 nt, synthetic construct
  misc_feature 1..20: note = antisense sequence
  source 1..20: mol_type = other RNA
cataacccttgattgcctgg

SEQ ID NO: 12576 - RNA, 20 nt, synthetic construct
  misc_feature 1..20: note = antisense sequence
  source 1..20: mol_type = other RNA
tgcttctgtaaagtcacatc

SEQ ID NO: 12577 - RNA, 20 nt, synthetic construct
  misc_feature 1..20: note = antisense sequence
  source 1..20: mol_type = other RNA
actgcttctgtaaagtcaca

SEQ ID NO: 12578 - RNA, 20 nt, synthetic construct
  misc_feature 1..20: note = antisense sequence
  source 1..20: mol_type = other RNA
cactgcttctgtaaagtcac

SEQ ID NO: 12579 - RNA, 20 nt, synthetic construct
  misc_feature 1..20: note = antisense sequence
  source 1..20: mol_type = other RNA
acactgcttctgtaaagtca

SEQ ID NO: 12580 - RNA, 20 nt, synthetic construct
  misc_feature 1..20: note = antisense sequence
  source 1..20: mol_type = other RNA
cacactgcttctgtaaagtc

SEQ ID NO: 12581 - RNA, 20 nt, synthetic construct
  misc_feature 1..20: note = antisense sequence
  source 1..20: mol_type = other RNA
aacggcacacactgcttctg

SEQ ID NO: 12582 - RNA, 20 nt, synthetic construct
  misc_feature 1..20: note = antisense sequence
  source 1..20: mol_type = other RNA
gaacggcacacactgcttct

SEQ ID NO: 12583 - RNA, 20 nt, synthetic construct
  misc_feature 1..20: note = antisense sequence
  source 1..20: mol_type = other RNA
tggaacggcacacactgctt

SEQ ID NO: 12584 - RNA, 20 nt, synthetic construct
  misc_feature 1..20: note = antisense sequence
  source 1..20: mol_type = other RNA
atggaacggcacacactgct

SEQ ID NO: 12585 - RNA, 20 nt, synthetic construct
  misc_feature 1..20: note = antisense sequence
  source 1..20: mol_type = other RNA
gatggaacggcacacactgc

SEQ ID NO: 12586 - RNA, 20 nt, synthetic construct
  misc_feature 1..20: note = antisense sequence
  source 1..20: mol_type = other RNA
atgatggaacggcacacact

SEQ ID NO: 12587 - RNA, 20 nt, synthetic construct
  misc_feature 1..20: note = antisense sequence
  source 1..20: mol_type = other RNA
aatgatggaacggcacacac

SEQ ID NO: 12588 - RNA, 20 nt, synthetic construct
  misc_feature 1..20: note = antisense sequence
  source 1..20: mol_type = other RNA
caatgatggaacggcacaca

SEQ ID NO: 12589 - RNA, 20 nt, synthetic construct
  misc_feature 1..20: note = antisense sequence
  source 1..20: mol_type = other RNA
gcaatgatggaacggcacac

SEQ ID NO: 12590 - RNA, 20 nt, synthetic construct
  misc_feature 1..20: note = antisense sequence
  source 1..20: mol_type = other RNA
tgcaatgatggaacggcaca

SEQ ID NO: 12591 - RNA, 20 nt, synthetic construct
  misc_feature 1..20: note = antisense sequence
  source 1..20: mol_type = other RNA
atctaccagctccaccattg

SEQ ID NO: 12592 - RNA, 20 nt, synthetic construct
  misc_feature 1..20: note = antisense sequence
  source 1..20: mol_type = other RNA
cacatctaccagctccacca

SEQ ID NO: 12593 - RNA, 20 nt, synthetic construct
  misc_feature 1..20: note = antisense sequence
  source 1..20: mol_type = other RNA
acacatctaccagctccacc

SEQ ID NO: 12594 - RNA, 20 nt, synthetic construct
  misc_feature 1..20: note = antisense sequence
  source 1..20: mol_type = other RNA
tggacacatctaccagctcc

SEQ ID NO: 12595 - RNA, 20 nt, synthetic construct
  misc_feature 1..20: note = antisense sequence
  source 1..20: mol_type = other RNA
ttggacacatctaccagctc

SEQ ID NO: 12596 - RNA, 20 nt, synthetic construct
  misc_feature 1..20: note = antisense sequence
  source 1..20: mol_type = other RNA
gctttggacacatctaccag

SEQ ID NO: 12597 - RNA, 20 nt, synthetic construct
  misc_feature 1..20: note = antisense sequence
  source 1..20: mol_type = other RNA
ttggctttggacacatctac

SEQ ID NO: 12598 - RNA, 20 nt, synthetic construct
  misc_feature 1..20: note = antisense sequence
  source 1..20: mol_type = other RNA
tttggctttggacacatcta

SEQ ID NO: 12599 - RNA, 20 nt, synthetic construct
  misc_feature 1..20: note = antisense sequence
  source 1..20: mol_type = other RNA
ggtttggctttggacacatc

SEQ ID NO: 12600 - RNA, 20 nt, synthetic construct
  misc_feature 1..20: note = antisense sequence
  source 1..20: mol_type = other RNA
cacggtttggctttggacac

SEQ ID NO: 12601 - RNA, 20 nt, synthetic construct
  misc_feature 1..20: note = antisense sequence
  source 1..20: mol_type = other RNA
ccacggtttggctttggaca

SEQ ID NO: 12602 - RNA, 20 nt, synthetic construct
  misc_feature 1..20: note = antisense sequence
  source 1..20: mol_type = other RNA
gctccacggtttggctttgg

SEQ ID NO: 12603 - RNA, 20 nt, synthetic construct
  misc_feature 1..20: note = antisense sequence
  source 1..20: mol_type = other RNA
agctccacggtttggctttg

SEQ ID NO: 12604 - RNA, 20 nt, synthetic construct
  misc_feature 1..20: note = antisense sequence
  source 1..20: mol_type = other RNA
cagctccacggtttggcttt

SEQ ID NO: 12605 - RNA, 20 nt, synthetic construct
  misc_feature 1..20: note = antisense sequence
  source 1..20: mol_type = other RNA
ccagctccacggtttggctt

SEQ ID NO: 12606 - RNA, 20 nt, synthetic construct
  misc_feature 1..20: note = antisense sequence
  source 1..20: mol_type = other RNA
tgtccagctccacggtttgg

SEQ ID NO: 12607 - RNA, 20 nt, synthetic construct
  misc_feature 1..20: note = antisense sequence
  source 1..20: mol_type = other RNA
ctgtccagctccacggtttg

SEQ ID NO: 12608 - RNA, 20 nt, synthetic construct
  misc_feature 1..20: note = antisense sequence
  source 1..20: mol_type = other RNA
tctgtccagctccacggttt

SEQ ID NO: 12609 - RNA, 20 nt, synthetic construct
  misc_feature 1..20: note = antisense sequence
  source 1..20: mol_type = other RNA
caacaaactttcagcactct

SEQ ID NO: 12610 - RNA, 20 nt, synthetic construct
  misc_feature 1..20: note = antisense sequence
  source 1..20: mol_type = other RNA
gcaacaaactttcagcactc

SEQ ID NO: 12611 - RNA, 20 nt, synthetic construct
  misc_feature 1..20: note = antisense sequence
  source 1..20: mol_type = other RNA
atgtgcaacaaactttcagc

SEQ ID NO: 12612 - RNA, 20 nt, synthetic construct
  misc_feature 1..20: note = antisense sequence
  source 1..20: mol_type = other RNA
gcatgtgcaacaaactttca

SEQ ID NO: 12613 - RNA, 20 nt, synthetic construct
  misc_feature 1..20: note = antisense sequence
  source 1..20: mol_type = other RNA
tgcatgtgcaacaaactttc

SEQ ID NO: 12614 - RNA, 20 nt, synthetic construct
  misc_feature 1..20: note = antisense sequence
  source 1..20: mol_type = other RNA
ctttaagatcagcactgctt

SEQ ID NO: 12615 - RNA, 20 nt, synthetic construct
  misc_feature 1..20: note = antisense sequence
  source 1..20: mol_type = other RNA
cctttaagatcagcactgct

SEQ ID NO: 12616 - RNA, 20 nt, synthetic construct
  misc_feature 1..20: note = antisense sequence
  source 1..20: mol_type = other RNA
aacctttaagatcagcactg

SEQ ID NO: 12617 - RNA, 20 nt, synthetic construct
  misc_feature 1..20: note = antisense sequence
  source 1..20: mol_type = other RNA
caaacctttaagatcagcac

SEQ ID NO: 12618 - RNA, 20 nt, synthetic construct
  misc_feature 1..20: note = antisense sequence
  source 1..20: mol_type = other RNA
gatcaagagactctacatac

SEQ ID NO: 12619 - RNA, 20 nt, synthetic construct
  misc_feature 1..20: note = antisense sequence
  source 1..20: mol_type = other RNA
cttcgcccacctagatgtac

SEQ ID NO: 12620 - RNA, 20 nt, synthetic construct
  misc_feature 1..20: note = antisense sequence
  source 1..20: mol_type = other RNA
gcttcgcccacctagatgta

SEQ ID NO: 12621 - RNA, 20 nt, synthetic construct
  misc_feature 1..20: note = antisense sequence
  source 1..20: mol_type = other RNA
tgcttcgcccacctagatgt

SEQ ID NO: 12622 - RNA, 20 nt, synthetic construct
  misc_feature 1..20: note = antisense sequence
  source 1..20: mol_type = other RNA
gtgcttcgcccacctagatg

SEQ ID NO: 12623 - RNA, 20 nt, synthetic construct
  misc_feature 1..20: note = antisense sequence
  source 1..20: mol_type = other RNA
gtatcttgggtgcttcgccc

SEQ ID NO: 12624 - RNA, 20 nt, synthetic construct
  misc_feature 1..20: note = antisense sequence
  source 1..20: mol_type = other RNA
ccagtgtatcttgggtgctt

SEQ ID NO: 12625 - RNA, 20 nt, synthetic construct
  misc_feature 1..20: note = antisense sequence
  source 1..20: mol_type = other RNA
agccagtgtatcttgggtgc

SEQ ID NO: 12626 - RNA, 20 nt, synthetic construct
  misc_feature 1..20: note = antisense sequence
  source 1..20: mol_type = other RNA
agagccagtgtatcttgggt

SEQ ID NO: 12627 - RNA, 20 nt, synthetic construct
  misc_feature 1..20: note = antisense sequence
  source 1..20: mol_type = other RNA
acagagccagtgtatcttgg

SEQ ID NO: 12628 - RNA, 20 nt, synthetic construct
  misc_feature 1..20: note = antisense sequence
  source 1..20: mol_type = other RNA
aacagagccagtgtatcttg

SEQ ID NO: 12629 - RNA, 20 nt, synthetic construct
  misc_feature 1..20: note = antisense sequence
  source 1..20: mol_type = other RNA
ctgtaaacagagccagtgta

SEQ ID NO: 12630 - RNA, 20 nt, synthetic construct
  misc_feature 1..20: note = antisense sequence
  source 1..20: mol_type = other RNA
gccctgtaaacagagccagt

SEQ ID NO: 12631 - RNA, 20 nt, synthetic construct
  misc_feature 1..20: note = antisense sequence
  source 1..20: mol_type = other RNA
agccctgtaaacagagccag

SEQ ID NO: 12632 - RNA, 20 nt, synthetic construct
  misc_feature 1..20: note = antisense sequence
  source 1..20: mol_type = other RNA
gagccctgtaaacagagcca

SEQ ID NO: 12633 - RNA, 20 nt, synthetic construct
  misc_feature 1..20: note = antisense sequence
  source 1..20: mol_type = other RNA
tgagccctgtaaacagagcc

SEQ ID NO: 12634 - RNA, 20 nt, synthetic construct
  misc_feature 1..20: note = antisense sequence
  source 1..20: mol_type = other RNA
catgagccctgtaaacagag

SEQ ID NO: 12635 - RNA, 20 nt, synthetic construct
  misc_feature 1..20: note = antisense sequence
  source 1..20: mol_type = other RNA
ctgaccatgagccctgtaaa

SEQ ID NO: 12636 - RNA, 20 nt, synthetic construct
  misc_feature 1..20: note = antisense sequence
  source 1..20: mol_type = other RNA
tctgaccatgagccctgtaa

SEQ ID NO: 12637 - RNA, 20 nt, synthetic construct
  misc_feature 1..20: note = antisense sequence
  source 1..20: mol_type = other RNA
atctgaccatgagccctgta

SEQ ID NO: 12638 - RNA, 20 nt, synthetic construct
  misc_feature 1..20: note = antisense sequence
  source 1..20: mol_type = other RNA
aatctgaccatgagccctgt

SEQ ID NO: 12639 - RNA, 20 nt, synthetic construct
  misc_feature 1..20: note = antisense sequence
  source 1..20: mol_type = other RNA
taatctgaccatgagccctg

SEQ ID NO: 12640 - RNA, 20 nt, synthetic construct
  misc_feature 1..20: note = antisense sequence
  source 1..20: mol_type = other RNA
catttcagtgcggtgggtgc

SEQ ID NO: 12641 - RNA, 20 nt, synthetic construct
  misc_feature 1..20: note = antisense sequence
  source 1..20: mol_type = other RNA
tcatttcagtgcggtgggtg

SEQ ID NO: 12642 - RNA, 20 nt, synthetic construct
  misc_feature 1..20: note = antisense sequence
  source 1..20: mol_type = other RNA
atcatttcagtgcggtgggt

SEQ ID NO: 12643 - RNA, 20 nt, synthetic construct
  misc_feature 1..20: note = antisense sequence
  source 1..20: mol_type = other RNA
catcatttcagtgcggtggg

SEQ ID NO: 12644 - RNA, 20 nt, synthetic construct
  misc_feature 1..20: note = antisense sequence
  source 1..20: mol_type = other RNA
gcatcatttcagtgcggtgg

SEQ ID NO: 12645 - RNA, 20 nt, synthetic construct
  misc_feature 1..20: note = antisense sequence
  source 1..20: mol_type = other RNA
gtaagcatcatttcagtgcg

SEQ ID NO: 12646 - RNA, 20 nt, synthetic construct
  misc_feature 1..20: note = antisense sequence
  source 1..20: mol_type = other RNA
agtaagcatcatttcagtgc

SEQ ID NO: 12647 - RNA, 20 nt, synthetic construct
  misc_feature 1..20: note = antisense sequence
  source 1..20: mol_type = other RNA
ctcctcctctggcttagaaa

SEQ ID NO: 12648 - RNA, 20 nt, synthetic construct
  misc_feature 1..20: note = antisense sequence
  source 1..20: mol_type = other RNA
cttctatgcaacctcctcct

SEQ ID NO: 12649 - RNA, 20 nt, synthetic construct
  misc_feature 1..20: note = antisense sequence
  source 1..20: mol_type = other RNA
ttcttctatgcaacctcctc

SEQ ID NO: 12650 - RNA, 20 nt, synthetic construct
  misc_feature 1..20: note = antisense sequence
  source 1..20: mol_type = other RNA
tcttcggtttcttctggaat

SEQ ID NO: 12651 - RNA, 20 nt, synthetic construct
  misc_feature 1..20: note = antisense sequence
  source 1..20: mol_type = other RNA
gggattacaggcgtgagcca

SEQ ID NO: 12652 - RNA, 20 nt, synthetic construct
  misc_feature 1..20: note = antisense sequence
  source 1..20: mol_type = other RNA
tgggattacaggcgtgagcc

SEQ ID NO: 12653 - RNA, 20 nt, synthetic construct
  misc_feature 1..20: note = antisense sequence
  source 1..20: mol_type = other RNA
ctgggattacaggcgtgagc

SEQ ID NO: 12654 - RNA, 20 nt, synthetic construct
  misc_feature 1..20: note = antisense sequence
  source 1..20: mol_type = other RNA
gctgggattacaggcgtgag

SEQ ID NO: 12655 - RNA, 20 nt, synthetic construct
  misc_feature 1..20: note = antisense sequence
  source 1..20: mol_type = other RNA
tgctgggattacaggcgtga

SEQ ID NO: 12656 - RNA, 20 nt, synthetic construct
  misc_feature 1..20: note = antisense sequence
  source 1..20: mol_type = other RNA
gtgctgggattacaggcgtg

SEQ ID NO: 12657 - RNA, 20 nt, synthetic construct
  misc_feature 1..20: note = antisense sequence
  source 1..20: mol_type = other RNA
agtgctgggattacaggcgt

SEQ ID NO: 12658 - RNA, 20 nt, synthetic construct
  misc_feature 1..20: note = antisense sequence
  source 1..20: mol_type = other RNA
aagtgctgggattacaggcg

SEQ ID NO: 12659 - RNA, 20 nt, synthetic construct
  misc_feature 1..20: note = antisense sequence
  source 1..20: mol_type = other RNA
gaagtgctgggattacaggc

SEQ ID NO: 12660 - RNA, 20 nt, synthetic construct
  misc_feature 1..20: note = antisense sequence
  source 1..20: mol_type = other RNA
cgaagtgctgggattacagg

SEQ ID NO: 12661 - RNA, 20 nt, synthetic construct
  misc_feature 1..20: note = antisense sequence
  source 1..20: mol_type = other RNA
ccgaagtgctgggattacag

SEQ ID NO: 12662 - RNA, 20 nt, synthetic construct
  misc_feature 1..20: note = antisense sequence
  source 1..20: mol_type = other RNA
cccgaagtgctgggattaca

SEQ ID NO: 12663 - RNA, 20 nt, synthetic construct
  misc_feature 1..20: note = antisense sequence
  source 1..20: mol_type = other RNA
acctcctgatgcactcgcct

SEQ ID NO: 12664 - RNA, 20 nt, synthetic construct
  misc_feature 1..20: note = antisense sequence
  source 1..20: mol_type = other RNA
gtctcaatctcctgacctcc

SEQ ID NO: 12665 - RNA, 20 nt, synthetic construct
  misc_feature 1..20: note = antisense sequence
  source 1..20: mol_type = other RNA
gatggtctcaatctcctgac

SEQ ID NO: 12666 - RNA, 20 nt, synthetic construct
  misc_feature 1..20: note = antisense sequence
  source 1..20: mol_type = other RNA
ggatggtctcaatctcctga

SEQ ID NO: 12667 - RNA, 20 nt, synthetic construct
  misc_feature 1..20: note = antisense sequence
  source 1..20: mol_type = other RNA
caccacgcctggctaatttt

SEQ ID NO: 12668 - RNA, 20 nt, synthetic construct
  misc_feature 1..20: note = antisense sequence
  source 1..20: mol_type = other RNA
ccaccacgcctggctaattt

SEQ ID NO: 12669 - RNA, 20 nt, synthetic construct
  misc_feature 1..20: note = antisense sequence
  source 1..20: mol_type = other RNA
attctcctgcctcagcctcc

SEQ ID NO: 12670 - RNA, 20 nt, synthetic construct
  misc_feature 1..20: note = antisense sequence
  source 1..20: mol_type = other RNA
cattctcctgcctcagcctc

SEQ ID NO: 12671 - RNA, 20 nt, synthetic construct
  misc_feature 1..20: note = antisense sequence
  source 1..20: mol_type = other RNA
ccattctcctgcctcagcct

SEQ ID NO: 12672 - RNA, 20 nt, synthetic construct
  misc_feature 1..20: note = antisense sequence
  source 1..20: mol_type = other RNA
acgccattctcctgcctcag

SEQ ID NO: 12673 - RNA, 20 nt, synthetic construct
  misc_feature 1..20: note = antisense sequence
  source 1..20: mol_type = other RNA
cacgccattctcctgcctca

SEQ ID NO: 12674 - RNA, 20 nt, synthetic construct
  misc_feature 1..20: note = antisense sequence
  source 1..20: mol_type = other RNA
tcacgccattctcctgcctc

SEQ ID NO: 12675 - RNA, 20 nt, synthetic construct
  misc_feature 1..20: note = antisense sequence
  source 1..20: mol_type = other RNA
ttcacgccattctcctgcct

SEQ ID NO: 12676 - RNA, 20 nt, synthetic construct
  misc_feature 1..20: note = antisense sequence
  source 1..20: mol_type = other RNA
gttcacgccattctcctgcc

SEQ ID NO: 12677 - RNA, 20 nt, synthetic construct
  misc_feature 1..20: note = antisense sequence
  source 1..20: mol_type = other RNA
ggttcacgccattctcctgc

SEQ ID NO: 12678 - RNA, 20 nt, synthetic construct
  misc_feature 1..20: note = antisense sequence
  source 1..20: mol_type = other RNA
gggttcacgccattctcctg

SEQ ID NO: 12679 - RNA, 20 nt, synthetic construct
  misc_feature 1..20: note = antisense sequence
  source 1..20: mol_type = other RNA
cgggttcacgccattctcct

SEQ ID NO: 12680 - RNA, 20 nt, synthetic construct
  misc_feature 1..20: note = antisense sequence
  source 1..20: mol_type = other RNA
cgatctcggctcactgcaag

SEQ ID NO: 12681 - RNA, 20 nt, synthetic construct
  misc_feature 1..20: note = antisense sequence
  source 1..20: mol_type = other RNA
gcgatctcggctcactgcaa

SEQ ID NO: 12682 - RNA, 20 nt, synthetic construct
  misc_feature 1..20: note = antisense sequence
  source 1..20: mol_type = other RNA
gtcttgctctgttgtccagg

SEQ ID NO: 12683 - RNA, 20 nt, synthetic construct
  misc_feature 1..20: note = antisense sequence
  source 1..20: mol_type = other RNA
agtcttgctctgttgtccag

SEQ ID NO: 12684 - RNA, 20 nt, synthetic construct
  misc_feature 1..20: note = antisense sequence
  source 1..20: mol_type = other RNA
gagtcttgctctgttgtcca

SEQ ID NO: 12685 - RNA, 20 nt, synthetic construct
  misc_feature 1..20: note = antisense sequence
  source 1..20: mol_type = other RNA
ggagtcttgctctgttgtcc

SEQ ID NO: 12686 - RNA, 20 nt, synthetic construct
  misc_feature 1..20: note = antisense sequence
  source 1..20: mol_type = other RNA
tggagtcttgctctgttgtc

SEQ ID NO: 12687 - RNA, 20 nt, synthetic construct
  misc_feature 1..20: note = antisense sequence
  source 1..20: mol_type = other RNA
atggagtcttgctctgttgt

SEQ ID NO: 12688 - RNA, 20 nt, synthetic construct
  misc_feature 1..20: note = antisense sequence
  source 1..20: mol_type = other RNA
gatggagtcttgctctgttg

SEQ ID NO: 12689 - RNA, 20 nt, synthetic construct
  misc_feature 1..20: note = antisense sequence
  source 1..20: mol_type = other RNA
agatggagtcttgctctgtt

SEQ ID NO: 12690 - RNA, 20 nt, synthetic construct
  misc_feature 1..20: note = antisense sequence
  source 1..20: mol_type = other RNA
gagatggagtcttgctctgt

SEQ ID NO: 12691 - RNA, 20 nt, synthetic construct
  misc_feature 1..20: note = antisense sequence
  source 1..20: mol_type = other RNA
tgagatggagtcttgctctg

SEQ ID NO: 12692 - RNA, 20 nt, synthetic construct
  misc_feature 1..20: note = antisense sequence
  source 1..20: mol_type = other RNA
ttgagatggagtcttgctct

SEQ ID NO: 12693 - RNA, 20 nt, synthetic construct
  misc_feature 1..20: note = antisense sequence
  source 1..20: mol_type = other RNA
tttgagatggagtcttgctc

SEQ ID NO: 12694 - RNA, 20 nt, synthetic construct
  misc_feature 1..20: note = antisense sequence
  source 1..20: mol_type = other RNA
ttttgagatggagtcttgct

SEQ ID NO: 12695 - RNA, 20 nt, synthetic construct
  misc_feature 1..20: note = antisense sequence
  source 1..20: mol_type = other RNA
gtatctgatctttcctcctt

SEQ ID NO: 12696 - RNA, 20 nt, synthetic construct
  misc_feature 1..20: note = antisense sequence
  source 1..20: mol_type = other RNA
cgtatctgatctttcctcct

SEQ ID NO: 12697 - RNA, 20 nt, synthetic construct
  misc_feature 1..20: note = antisense sequence
  source 1..20: mol_type = other RNA
acgtatctgatctttcctcc

SEQ ID NO: 12698 - RNA, 20 nt, synthetic construct
  misc_feature 1..20: note = antisense sequence
  source 1..20: mol_type = other RNA
tcacgtatctgatctttcct

SEQ ID NO: 12699 - RNA, 20 nt, synthetic construct
  misc_feature 1..20: note = antisense sequence
  source 1..20: mol_type = other RNA
ttcacgtatctgatctttcc

SEQ ID NO: 12700 - RNA, 20 nt, synthetic construct
  misc_feature 1..20: note = antisense sequence
  source 1..20: mol_type = other RNA
caacacagagcttgaatcat

SEQ ID NO: 12701 - RNA, 20 nt, synthetic construct
  misc_feature 1..20: note = antisense sequence
  source 1..20: mol_type = other RNA
gactttattcaacacagagc

SEQ ID NO: 12702 - RNA, 20 nt, synthetic construct
  misc_feature 1..20: note = antisense sequence
  source 1..20: mol_type = other RNA
ggctttgtgtatcatcacta

SEQ ID NO: 12703 - RNA, 20 nt, synthetic construct
  misc_feature 1..20: note = antisense sequence
  source 1..20: mol_type = other RNA
aggctttgtgtatcatcact

SEQ ID NO: 12704 - RNA, 20 nt, synthetic construct
  misc_feature 1..20: note = antisense sequence
  source 1..20: mol_type = other RNA
caggctttgtgtatcatcac

SEQ ID NO: 12705 - RNA, 20 nt, synthetic construct
  misc_feature 1..20: note = antisense sequence
  source 1..20: mol_type = other RNA
cccaggctttgtgtatcatc

SEQ ID NO: 12706 - RNA, 20 nt, synthetic construct
  misc_feature 1..20: note = antisense sequence
  source 1..20: mol_type = other RNA
tcccaggctttgtgtatcat

SEQ ID NO: 12707 - RNA, 20 nt, synthetic construct
  misc_feature 1..20: note = antisense sequence
  source 1..20: mol_type = other RNA
tgtcccaggctttgtgtatc

SEQ ID NO: 12708 - RNA, 20 nt, synthetic construct
  misc_feature 1..20: note = antisense sequence
  source 1..20: mol_type = other RNA
ctgtcccaggctttgtgtat

SEQ ID NO: 12709 - RNA, 20 nt, synthetic construct
  misc_feature 1..20: note = antisense sequence
  source 1..20: mol_type = other RNA
actgtcccaggctttgtgta

SEQ ID NO: 12710 - RNA, 20 nt, synthetic construct
  misc_feature 1..20: note = antisense sequence
  source 1..20: mol_type = other RNA
catgaaactgtcccaggctt

SEQ ID NO: 12711 - RNA, 20 nt, synthetic construct
  misc_feature 1..20: note = antisense sequence
  source 1..20: mol_type = other RNA
tcaaggaatagatcactgga

SEQ ID NO: 12712 - RNA, 20 nt, synthetic construct
  misc_feature 1..20: note = antisense sequence
  source 1..20: mol_type = other RNA
agacaccttggagcatttaa

SEQ ID NO: 12713 - RNA, 20 nt, synthetic construct
  misc_feature 1..20: note = antisense sequence
  source 1..20: mol_type = other RNA
aagacaccttggagcattta

SEQ ID NO: 12714 - RNA, 20 nt, synthetic construct
  misc_feature 1..20: note = antisense sequence
  source 1..20: mol_type = other RNA
aaagacaccttggagcattt

SEQ ID NO: 12715 - RNA, 20 nt, synthetic construct
  misc_feature 1..20: note = antisense sequence
  source 1..20: mol_type = other RNA
caaagacaccttggagcatt

SEQ ID NO: 12716 - RNA, 20 nt, synthetic construct
  misc_feature 1..20: note = antisense sequence
  source 1..20: mol_type = other RNA
tttcaaagacaccttggagc

SEQ ID NO: 12717 - RNA, 20 nt, synthetic construct
  misc_feature 1..20: note = antisense sequence
  source 1..20: mol_type = other RNA
gatttcaaagacaccttgga

SEQ ID NO: 12718 - RNA, 20 nt, synthetic construct
  misc_feature 1..20: note = antisense sequence
  source 1..20: mol_type = other RNA
ccatttcccgataaaacact

SEQ ID NO: 12719 - RNA, 20 nt, synthetic construct
  misc_feature 1..20: note = antisense sequence
  source 1..20: mol_type = other RNA
gccatttcccgataaaacac

SEQ ID NO: 12720 - RNA, 20 nt, synthetic construct
  misc_feature 1..20: note = antisense sequence
  source 1..20: mol_type = other RNA
ggccatttcccgataaaaca

SEQ ID NO: 12721 - RNA, 20 nt, synthetic construct
  misc_feature 1..20: note = antisense sequence
  source 1..20: mol_type = other RNA
tgtgctgctactagctttta

SEQ ID NO: 12722 - RNA, 20 nt, synthetic construct
  misc_feature 1..20: note = antisense sequence
  source 1..20: mol_type = other RNA
ctgtgctgctactagctttt

SEQ ID NO: 12723 - RNA, 20 nt, synthetic construct
  misc_feature 1..20: note = antisense sequence
  source 1..20: mol_type = other RNA
ttctgtgctgctactagctt

SEQ ID NO: 12724 - RNA, 20 nt, synthetic construct
  misc_feature 1..20: note = antisense sequence
  source 1..20: mol_type = other RNA
tttctgtgctgctactagct

SEQ ID NO: 12725 - RNA, 20 nt, synthetic construct
  misc_feature 1..20: note = antisense sequence
  source 1..20: mol_type = other RNA
ccttttctgtgctgctacta

SEQ ID NO: 12726 - RNA, 20 nt, synthetic construct
  misc_feature 1..20: note = antisense sequence
  source 1..20: mol_type = other RNA
gtaaaccttttctgtgctgc

SEQ ID NO: 12727 - RNA, 20 nt, synthetic construct
  misc_feature 1..20: note = antisense sequence
  source 1..20: mol_type = other RNA
tgtaaaccttttctgtgctg

SEQ ID NO: 12728 - RNA, 20 nt, synthetic construct
  misc_feature 1..20: note = antisense sequence
  source 1..20: mol_type = other RNA
tatatgtgtctgcactacag

SEQ ID NO: 12729 - RNA, 20 nt, synthetic construct
  misc_feature 1..20: note = antisense sequence
  source 1..20: mol_type = other RNA
tcctgagaagttattttccc

SEQ ID NO: 12730 - RNA, 20 nt, synthetic construct
  misc_feature 1..20: note = antisense sequence
  source 1..20: mol_type = other RNA
ctcctgagaagttattttcc

SEQ ID NO: 12731 - RNA, 20 nt, synthetic construct
  misc_feature 1..20: note = antisense sequence
  source 1..20: mol_type = other RNA
cacaactgctttctcctgag

SEQ ID NO: 12732 - RNA, 20 nt, synthetic construct
  misc_feature 1..20: note = antisense sequence
  source 1..20: mol_type = other RNA
ccacaactgctttctcctga

SEQ ID NO: 12733 - RNA, 20 nt, synthetic construct
  misc_feature 1..20: note = antisense sequence
  source 1..20: mol_type = other RNA
accacaactgctttctcctg

SEQ ID NO: 12734 - RNA, 20 nt, synthetic construct
  misc_feature 1..20: note = antisense sequence
  source 1..20: mol_type = other RNA
taccacaactgctttctcct

SEQ ID NO: 12735 - RNA, 20 nt, synthetic construct
  misc_feature 1..20: note = antisense sequence
  source 1..20: mol_type = other RNA
ctaccacaactgctttctcc

SEQ ID NO: 12736 - RNA, 20 nt, synthetic construct
  misc_feature 1..20: note = antisense sequence
  source 1..20: mol_type = other RNA
atctaccacaactgctttct

SEQ ID NO: 12737 - RNA, 20 nt, synthetic construct
  misc_feature 1..20: note = antisense sequence
  source 1..20: mol_type = other RNA
tatctaccacaactgctttc

SEQ ID NO: 12738 - RNA, 20 nt, synthetic construct
  misc_feature 1..20: note = antisense sequence
  source 1..20: mol_type = other RNA
ctatctaccacaactgcttt

SEQ ID NO: 12739 - RNA, 20 nt, synthetic construct
  misc_feature 1..20: note = antisense sequence
  source 1..20: mol_type = other RNA
tctatctaccacaactgctt

SEQ ID NO: 12740 - RNA, 20 nt, synthetic construct
  misc_feature 1..20: note = antisense sequence
  source 1..20: mol_type = other RNA
ctctatctaccacaactgct

SEQ ID NO: 12741 - RNA, 20 nt, synthetic construct
  misc_feature 1..20: note = antisense sequence
  source 1..20: mol_type = other RNA
ctctctatctaccacaactg

SEQ ID NO: 12742 - RNA, 20 nt, synthetic construct
  misc_feature 1..20: note = antisense sequence
  source 1..20: mol_type = other RNA
gctctctatctaccacaact

SEQ ID NO: 12743 - RNA, 20 nt, synthetic construct
  misc_feature 1..20: note = antisense sequence
  source 1..20: mol_type = other RNA
tgctctctatctaccacaac

SEQ ID NO: 12744 - RNA, 20 nt, synthetic construct
  misc_feature 1..20: note = antisense sequence
  source 1..20: mol_type = other RNA
atgctctctatctaccacaa

SEQ ID NO: 12745 - RNA, 20 nt, synthetic construct
  misc_feature 1..20: note = antisense sequence
  source 1..20: mol_type = other RNA
tatgctctctatctaccaca

SEQ ID NO: 12746 - RNA, 20 nt, synthetic construct
  misc_feature 1..20: note = antisense sequence
  source 1..20: mol_type = other RNA
atatgctctctatctaccac

SEQ ID NO: 12747 - RNA, 20 nt, synthetic construct
  misc_feature 1..20: note = antisense sequence
  source 1..20: mol_type = other RNA
cccttaaaggcttcatgtaa

SEQ ID NO: 12748 - RNA, 20 nt, synthetic construct
  misc_feature 1..20: note = antisense sequence
  source 1..20: mol_type = other RNA
acccttaaaggcttcatgta

SEQ ID NO: 12749 - RNA, 20 nt, synthetic construct
  misc_feature 1..20: note = antisense sequence
  source 1..20: mol_type = other RNA
gacccttaaaggcttcatgt

SEQ ID NO: 12750 - RNA, 20 nt, synthetic construct
  misc_feature 1..20: note = antisense sequence
  source 1..20: mol_type = other RNA
ggacccttaaaggcttcatg

SEQ ID NO: 12751 - RNA, 20 nt, synthetic construct
  misc_feature 1..20: note = antisense sequence
  source 1..20: mol_type = other RNA
tggacccttaaaggcttcat

SEQ ID NO: 12752 - RNA, 20 nt, synthetic construct
  misc_feature 1..20: note = antisense sequence
  source 1..20: mol_type = other RNA
ctggacccttaaaggcttca

SEQ ID NO: 12753 - RNA, 20 nt, synthetic construct
  misc_feature 1..20: note = antisense sequence
  source 1..20: mol_type = other RNA
acctggacccttaaaggctt

SEQ ID NO: 12754 - RNA, 20 nt, synthetic construct
  misc_feature 1..20: note = antisense sequence
  source 1..20: mol_type = other RNA
cacctggacccttaaaggct

SEQ ID NO: 12755 - RNA, 20 nt, synthetic construct
  misc_feature 1..20: note = antisense sequence
  source 1..20: mol_type = other RNA
accacctggacccttaaagg

SEQ ID NO: 12756 - RNA, 20 nt, synthetic construct
  misc_feature 1..20: note = antisense sequence
  source 1..20: mol_type = other RNA
taccacctggacccttaaag

SEQ ID NO: 12757 - RNA, 20 nt, synthetic construct
  misc_feature 1..20: note = antisense sequence
  source 1..20: mol_type = other RNA
ataccacctggacccttaaa

SEQ ID NO: 12758 - RNA, 20 nt, synthetic construct
  misc_feature 1..20: note = antisense sequence
  source 1..20: mol_type = other RNA
agtagcagagtttacagtgt

SEQ ID NO: 12759 - RNA, 20 nt, synthetic construct
  misc_feature 1..20: note = antisense sequence
  source 1..20: mol_type = other RNA
gaagcagtagcagagtttac

SEQ ID NO: 12760 - RNA, 20 nt, synthetic construct
  misc_feature 1..20: note = antisense sequence
  source 1..20: mol_type = other RNA
agaagaagcagtagcagagt

SEQ ID NO: 12761 - RNA, 20 nt, synthetic construct
  misc_feature 1..20: note = antisense sequence
  source 1..20: mol_type = other RNA
tctccagaagaagcagtagc

SEQ ID NO: 12762 - RNA, 20 nt, synthetic construct
  misc_feature 1..20: note = antisense sequence
  source 1..20: mol_type = other RNA
catctccagaagaagcagta

SEQ ID NO: 12763 - RNA, 20 nt, synthetic construct
  misc_feature 1..20: note = antisense sequence
  source 1..20: mol_type = other RNA
tagagcacatctccagaaga

SEQ ID NO: 12764 - RNA, 20 nt, synthetic construct
  misc_feature 1..20: note = antisense sequence
  source 1..20: mol_type = other RNA
atagagcacatctccagaag

SEQ ID NO: 12765 - RNA, 20 nt, synthetic construct
  misc_feature 1..20: note = antisense sequence
  source 1..20: mol_type = other RNA
tatagagcacatctccagaa

SEQ ID NO: 12766 - RNA, 20 nt, synthetic construct
  misc_feature 1..20: note = antisense sequence
  source 1..20: mol_type = other RNA
aatatagagcacatctccag

SEQ ID NO: 12767 - RNA, 20 nt, synthetic construct
  misc_feature 1..20: note = antisense sequence
  source 1..20: mol_type = other RNA
gcaatatagagcacatctcc

SEQ ID NO: 12768 - RNA, 20 nt, synthetic construct
  misc_feature 1..20: note = antisense sequence
  source 1..20: mol_type = other RNA
agcaatatagagcacatctc

SEQ ID NO: 12769 - RNA, 20 nt, synthetic construct
  misc_feature 1..20: note = antisense sequence
  source 1..20: mol_type = other RNA
tccagcaatatagagcacat

SEQ ID NO: 12770 - RNA, 20 nt, synthetic construct
  misc_feature 1..20: note = antisense sequence
  source 1..20: mol_type = other RNA
gtccagcaatatagagcaca

SEQ ID NO: 12771 - RNA, 20 nt, synthetic construct
  misc_feature 1..20: note = antisense sequence
  source 1..20: mol_type = other RNA
tgtccagcaatatagagcac

SEQ ID NO: 12772 - RNA, 20 nt, synthetic construct
  misc_feature 1..20: note = antisense sequence
  source 1..20: mol_type = other RNA
ctgtccagcaatatagagca

SEQ ID NO: 12773 - RNA, 20 nt, synthetic construct
  misc_feature 1..20: note = antisense sequence
  source 1..20: mol_type = other RNA
gctgtccagcaatatagagc

SEQ ID NO: 12774 - RNA, 20 nt, synthetic construct
  misc_feature 1..20: note = antisense sequence
  source 1..20: mol_type = other RNA
aggctgtccagcaatataga

SEQ ID NO: 12775 - RNA, 20 nt, synthetic construct
  misc_feature 1..20: note = antisense sequence
  source 1..20: mol_type = other RNA
gaggctgtccagcaatatag

SEQ ID NO: 12776 - RNA, 20 nt, synthetic construct
  misc_feature 1..20: note = antisense sequence
  source 1..20: mol_type = other RNA
ccgaggctgtccagcaatat

SEQ ID NO: 12777 - RNA, 20 nt, synthetic construct
  misc_feature 1..20: note = antisense sequence
  source 1..20: mol_type = other RNA
accgaggctgtccagcaata

SEQ ID NO: 12778 - RNA, 20 nt, synthetic construct
  misc_feature 1..20: note = antisense sequence
  source 1..20: mol_type = other RNA
taccgaggctgtccagcaat

SEQ ID NO: 12779 - RNA, 20 nt, synthetic construct
  misc_feature 1..20: note = antisense sequence
  source 1..20: mol_type = other RNA
gtaccgaggctgtccagcaa

SEQ ID NO: 12780 - RNA, 20 nt, synthetic construct
  misc_feature 1..20: note = antisense sequence
  source 1..20: mol_type = other RNA
tgtaccgaggctgtccagca

SEQ ID NO: 12781 - RNA, 20 nt, synthetic construct
  misc_feature 1..20: note = antisense sequence
  source 1..20: mol_type = other RNA
ttgtaccgaggctgtccagc

SEQ ID NO: 12782 - RNA, 20 nt, synthetic construct
  misc_feature 1..20: note = antisense sequence
  source 1..20: mol_type = other RNA
attgtaccgaggctgtccag

SEQ ID NO: 12783 - RNA, 20 nt, synthetic construct
  misc_feature 1..20: note = antisense sequence
  source 1..20: mol_type = other RNA
gattgtaccgaggctgtcca

SEQ ID NO: 12784 - RNA, 20 nt, synthetic construct
  misc_feature 1..20: note = antisense sequence
  source 1..20: mol_type = other RNA
tgattgtaccgaggctgtcc

SEQ ID NO: 12785 - RNA, 20 nt, synthetic construct
  misc_feature 1..20: note = antisense sequence
  source 1..20: mol_type = other RNA
atgattgtaccgaggctgtc

SEQ ID NO: 12786 - RNA, 20 nt, synthetic construct
  misc_feature 1..20: note = antisense sequence
  source 1..20: mol_type = other RNA
tatgattgtaccgaggctgt

SEQ ID NO: 12787 - RNA, 20 nt, synthetic construct
  misc_feature 1..20: note = antisense sequence
  source 1..20: mol_type = other RNA
gtatgattgtaccgaggctg

SEQ ID NO: 12788 - RNA, 20 nt, synthetic construct
  misc_feature 1..20: note = antisense sequence
  source 1..20: mol_type = other RNA
tgtatgattgtaccgaggct

SEQ ID NO: 12789 - RNA, 20 nt, synthetic construct
  misc_feature 1..20: note = antisense sequence
  source 1..20: mol_type = other RNA
ctgtatgattgtaccgaggc

SEQ ID NO: 12790 - RNA, 20 nt, synthetic construct
  misc_feature 1..20: note = antisense sequence
  source 1..20: mol_type = other RNA
cctgtatgattgtaccgagg

SEQ ID NO: 12791 - RNA, 20 nt, synthetic construct
  misc_feature 1..20: note = antisense sequence
  source 1..20: mol_type = other RNA
gcctgtatgattgtaccgag

SEQ ID NO: 12792 - RNA, 20 nt, synthetic construct
  misc_feature 1..20: note = antisense sequence
  source 1..20: mol_type = other RNA
ggcctgtatgattgtaccga

SEQ ID NO: 12793 - RNA, 20 nt, synthetic construct
  misc_feature 1..20: note = antisense sequence
  source 1..20: mol_type = other RNA
tggcctgtatgattgtaccg

SEQ ID NO: 12794 - RNA, 20 nt, synthetic construct
  misc_feature 1..20: note = antisense sequence
  source 1..20: mol_type = other RNA
ctggcctgtatgattgtacc

SEQ ID NO: 12795 - RNA, 20 nt, synthetic construct
  misc_feature 1..20: note = antisense sequence
  source 1..20: mol_type = other RNA
taatgacctggcctgtatga

SEQ ID NO: 12796 - RNA, 20 nt, synthetic construct
  misc_feature 1..20: note = antisense sequence
  source 1..20: mol_type = other RNA
ataatgacctggcctgtatg

SEQ ID NO: 12797 - RNA, 20 nt, synthetic construct
  misc_feature 1..20: note = antisense sequence
  source 1..20: mol_type = other RNA
gataatgacctggcctgtat

SEQ ID NO: 12798 - RNA, 20 nt, synthetic construct
  misc_feature 1..20: note = antisense sequence
  source 1..20: mol_type = other RNA
gtagataatgacctggcctg

SEQ ID NO: 12799 - RNA, 20 nt, synthetic construct
  misc_feature 1..20: note = antisense sequence
  source 1..20: mol_type = other RNA
tgtagataatgacctggcct

SEQ ID NO: 12800 - RNA, 20 nt, synthetic construct
  misc_feature 1..20: note = antisense sequence
  source 1..20: mol_type = other RNA
ctgtagataatgacctggcc

SEQ ID NO: 12801 - RNA, 20 nt, synthetic construct
  misc_feature 1..20: note = antisense sequence
  source 1..20: mol_type = other RNA
cctgtagataatgacctggc

SEQ ID NO: 12802 - RNA, 20 nt, synthetic construct
  misc_feature 1..20: note = antisense sequence
  source 1..20: mol_type = other RNA
tcctgtagataatgacctgg

SEQ ID NO: 12803 - RNA, 20 nt, synthetic construct
  misc_feature 1..20: note = antisense sequence
  source 1..20: mol_type = other RNA
atcctgtagataatgacctg

SEQ ID NO: 12804 - RNA, 20 nt, synthetic construct
  misc_feature 1..20: note = antisense sequence
  source 1..20: mol_type = other RNA
catcctgtagataatgacct

SEQ ID NO: 12805 - RNA, 20 nt, synthetic construct
  misc_feature 1..20: note = antisense sequence
  source 1..20: mol_type = other RNA
tccatcctgtagataatgac

SEQ ID NO: 12806 - RNA, 20 nt, synthetic construct
  misc_feature 1..20: note = antisense sequence
  source 1..20: mol_type = other RNA
cttccatcctgtagataatg

SEQ ID NO: 12807 - RNA, 20 nt, synthetic construct
  misc_feature 1..20: note = antisense sequence
  source 1..20: mol_type = other RNA
gtttacctgttctccactga

SEQ ID NO: 12808 - RNA, 20 nt, synthetic construct
  misc_feature 1..20: note = antisense sequence
  source 1..20: mol_type = other RNA
gttgttactgaatatgtggg

SEQ ID NO: 12809 - RNA, 20 nt, synthetic construct
  misc_feature 1..20: note = antisense sequence
  source 1..20: mol_type = other RNA
gccctgttcccagttgttac

SEQ ID NO: 12810 - RNA, 20 nt, synthetic construct
  misc_feature 1..20: note = antisense sequence
  source 1..20: mol_type = other RNA
ggccctgttcccagttgtta

SEQ ID NO: 12811 - RNA, 20 nt, synthetic construct
  misc_feature 1..20: note = antisense sequence
  source 1..20: mol_type = other RNA
aaagaacctaacacagggcc

SEQ ID NO: 12812 - RNA, 20 nt, synthetic construct
  misc_feature 1..20: note = antisense sequence
  source 1..20: mol_type = other RNA
caaagaacctaacacagggc

SEQ ID NO: 12813 - RNA, 20 nt, synthetic construct
  misc_feature 1..20: note = antisense sequence
  source 1..20: mol_type = other RNA
ccaaagaacctaacacaggg

SEQ ID NO: 12814 - RNA, 20 nt, synthetic construct
  misc_feature 1..20: note = antisense sequence
  source 1..20: mol_type = other RNA
tccaaagaacctaacacagg

SEQ ID NO: 12815 - RNA, 20 nt, synthetic construct
  misc_feature 1..20: note = antisense sequence
  source 1..20: mol_type = other RNA
ttccaaagaacctaacacag

SEQ ID NO: 12816 - RNA, 20 nt, synthetic construct
  misc_feature 1..20: note = antisense sequence
  source 1..20: mol_type = other RNA
ccttccaaagaacctaacac

SEQ ID NO: 12817 - RNA, 20 nt, synthetic construct
  misc_feature 1..20: note = antisense sequence
  source 1..20: mol_type = other RNA
cactatacatccttccaaag

SEQ ID NO: 12818 - RNA, 20 nt, synthetic construct
  misc_feature 1..20: note = antisense sequence
  source 1..20: mol_type = other RNA
gacactatacatccttccaa

SEQ ID NO: 12819 - RNA, 20 nt, synthetic construct
  misc_feature 1..20: note = antisense sequence
  source 1..20: mol_type = other RNA
agacactatacatccttcca

SEQ ID NO: 12820 - RNA, 20 nt, synthetic construct
  misc_feature 1..20: note = antisense sequence
  source 1..20: mol_type = other RNA
catccaacatgaagacaaag

SEQ ID NO: 12821 - RNA, 20 nt, synthetic construct
  misc_feature 1..20: note = antisense sequence
  source 1..20: mol_type = other RNA
cccatccaacatgaagacaa

SEQ ID NO: 12822 - RNA, 20 nt, synthetic construct
  misc_feature 1..20: note = antisense sequence
  source 1..20: mol_type = other RNA
cacccatccaacatgaagac

SEQ ID NO: 12823 - RNA, 20 nt, synthetic construct
  misc_feature 1..20: note = antisense sequence
  source 1..20: mol_type = other RNA
gtacatctgtatccacatct

SEQ ID NO: 12824 - RNA, 20 nt, synthetic construct
  misc_feature 1..20: note = antisense sequence
  source 1..20: mol_type = other RNA
ctggtaatttcatgcctctt

SEQ ID NO: 12825 - RNA, 20 nt, synthetic construct
  misc_feature 1..20: note = antisense sequence
  source 1..20: mol_type = other RNA
actggtaatttcatgcctct

SEQ ID NO: 12826 - RNA, 20 nt, synthetic construct
  misc_feature 1..20: note = antisense sequence
  source 1..20: mol_type = other RNA
cactggtaatttcatgcctc

SEQ ID NO: 12827 - RNA, 20 nt, synthetic construct
  misc_feature 1..20: note = antisense sequence
  source 1..20: mol_type = other RNA
ccactggtaatttcatgcct

SEQ ID NO: 12828 - RNA, 20 nt, synthetic construct
  misc_feature 1..20: note = antisense sequence
  source 1..20: mol_type = other RNA
ctgggccactggtaatttca

SEQ ID NO: 12829 - RNA, 20 nt, synthetic construct
  misc_feature 1..20: note = antisense sequence
  source 1..20: mol_type = other RNA
tctgggccactggtaatttc

SEQ ID NO: 12830 - RNA, 20 nt, synthetic construct
  misc_feature 1..20: note = antisense sequence
  source 1..20: mol_type = other RNA
ttgtctgggccactggtaat

SEQ ID NO: 12831 - RNA, 20 nt, synthetic construct
  misc_feature 1..20: note = antisense sequence
  source 1..20: mol_type = other RNA
attgtctgggccactggtaa

SEQ ID NO: 12832 - RNA, 20 nt, synthetic construct
  misc_feature 1..20: note = antisense sequence
  source 1..20: mol_type = other RNA
tattgtctgggccactggta

SEQ ID NO: 12833 - RNA, 20 nt, synthetic construct
  misc_feature 1..20: note = antisense sequence
  source 1..20: mol_type = other RNA
gtattgtctgggccactggt

SEQ ID NO: 12834 - RNA, 20 nt, synthetic construct
  misc_feature 1..20: note = antisense sequence
  source 1..20: mol_type = other RNA
tgtattgtctgggccactgg

SEQ ID NO: 12835 - RNA, 20 nt, synthetic construct
  misc_feature 1..20: note = antisense sequence
  source 1..20: mol_type = other RNA
ctgtattgtctgggccactg

SEQ ID NO: 12836 - RNA, 20 nt, synthetic construct
  misc_feature 1..20: note = antisense sequence
  source 1..20: mol_type = other RNA
actgtattgtctgggccact

SEQ ID NO: 12837 - RNA, 20 nt, synthetic construct
  misc_feature 1..20: note = antisense sequence
  source 1..20: mol_type = other RNA
gactgtattgtctgggccac

SEQ ID NO: 12838 - RNA, 20 nt, synthetic construct
  misc_feature 1..20: note = antisense sequence
  source 1..20: mol_type = other RNA
tgactgtattgtctgggcca

SEQ ID NO: 12839 - RNA, 20 nt, synthetic construct
  misc_feature 1..20: note = antisense sequence
  source 1..20: mol_type = other RNA
ctgactgtattgtctgggcc

SEQ ID NO: 12840 - RNA, 20 nt, synthetic construct
  misc_feature 1..20: note = antisense sequence
  source 1..20: mol_type = other RNA
tctgactgtattgtctgggc

SEQ ID NO: 12841 - RNA, 20 nt, synthetic construct
  misc_feature 1..20: note = antisense sequence
  source 1..20: mol_type = other RNA
ttctgactgtattgtctggg

SEQ ID NO: 12842 - RNA, 20 nt, synthetic construct
  misc_feature 1..20: note = antisense sequence
  source 1..20: mol_type = other RNA
attctgactgtattgtctgg

SEQ ID NO: 12843 - RNA, 20 nt, synthetic construct
  misc_feature 1..20: note = antisense sequence
  source 1..20: mol_type = other RNA
accaatcctagcttaaagca

SEQ ID NO: 12844 - RNA, 20 nt, synthetic construct
  misc_feature 1..20: note = antisense sequence
  source 1..20: mol_type = other RNA
caccaatcctagcttaaagc

SEQ ID NO: 12845 - RNA, 20 nt, synthetic construct
  misc_feature 1..20: note = antisense sequence
  source 1..20: mol_type = other RNA
gcaccaatcctagcttaaag

SEQ ID NO: 12846 - RNA, 20 nt, synthetic construct
  misc_feature 1..20: note = antisense sequence
  source 1..20: mol_type = other RNA
tctgcaccaatcctagctta

SEQ ID NO: 12847 - RNA, 20 nt, synthetic construct
  misc_feature 1..20: note = antisense sequence
  source 1..20: mol_type = other RNA
ttctgcaccaatcctagctt

SEQ ID NO: 12848 - RNA, 20 nt, synthetic construct
  misc_feature 1..20: note = antisense sequence
  source 1..20: mol_type = other RNA
tttctgcaccaatcctagct

SEQ ID NO: 12849 - RNA, 20 nt, synthetic construct
  misc_feature 1..20: note = antisense sequence
  source 1..20: mol_type = other RNA
ttttctgcaccaatcctagc

SEQ ID NO: 12850 - RNA, 20 nt, synthetic construct
  misc_feature 1..20: note = antisense sequence
  source 1..20: mol_type = other RNA
gcttttctgcaccaatccta

SEQ ID NO: 12851 - RNA, 20 nt, synthetic construct
  misc_feature 1..20: note = antisense sequence
  source 1..20: mol_type = other RNA
agcttttctgcaccaatcct

SEQ ID NO: 12852 - RNA, 20 nt, synthetic construct
  misc_feature 1..20: note = antisense sequence
  source 1..20: mol_type = other RNA
gcccgaatttcatcttctaa

SEQ ID NO: 12853 - RNA, 20 nt, synthetic construct
  misc_feature 1..20: note = antisense sequence
  source 1..20: mol_type = other RNA
agcccgaatttcatcttcta

SEQ ID NO: 12854 - RNA, 20 nt, synthetic construct
  misc_feature 1..20: note = antisense sequence
  source 1..20: mol_type = other RNA
cagcccgaatttcatcttct

SEQ ID NO: 12855 - RNA, 20 nt, synthetic construct
  misc_feature 1..20: note = antisense sequence
  source 1..20: mol_type = other RNA
tcagcccgaatttcatcttc

SEQ ID NO: 12856 - RNA, 20 nt, synthetic construct
  misc_feature 1..20: note = antisense sequence
  source 1..20: mol_type = other RNA
ttcagcccgaatttcatctt

SEQ ID NO: 12857 - RNA, 20 nt, synthetic construct
  misc_feature 1..20: note = antisense sequence
  source 1..20: mol_type = other RNA
tcccttgtagattcagcccg

SEQ ID NO: 12858 - RNA, 20 nt, synthetic construct
  misc_feature 1..20: note = antisense sequence
  source 1..20: mol_type = other RNA
atcccttgtagattcagccc

SEQ ID NO: 12859 - RNA, 20 nt, synthetic construct
  misc_feature 1..20: note = antisense sequence
  source 1..20: mol_type = other RNA
catcccttgtagattcagcc

SEQ ID NO: 12860 - RNA, 20 nt, synthetic construct
  misc_feature 1..20: note = antisense sequence
  source 1..20: mol_type = other RNA
tcatcccttgtagattcagc

SEQ ID NO: 12861 - RNA, 20 nt, synthetic construct
  misc_feature 1..20: note = antisense sequence
  source 1..20: mol_type = other RNA
atcatcccttgtagattcag

SEQ ID NO: 12862 - RNA, 20 nt, synthetic construct
  misc_feature 1..20: note = antisense sequence
  source 1..20: mol_type = other RNA
ctatcatcccttgtagattc

SEQ ID NO: 12863 - RNA, 20 nt, synthetic construct
  misc_feature 1..20: note = antisense sequence
  source 1..20: mol_type = other RNA
cattctatcatcccttgtag

SEQ ID NO: 12864 - RNA, 20 nt, synthetic construct
  misc_feature 1..20: note = antisense sequence
  source 1..20: mol_type = other RNA
tccacattctatcatccctt

SEQ ID NO: 12865 - RNA, 20 nt, synthetic construct
  misc_feature 1..20: note = antisense sequence
  source 1..20: mol_type = other RNA
atccacattctatcatccct

SEQ ID NO: 12866 - RNA, 20 nt, synthetic construct
  misc_feature 1..20: note = antisense sequence
  source 1..20: mol_type = other RNA
ctatccacattctatcatcc

SEQ ID NO: 12867 - RNA, 20 nt, synthetic construct
  misc_feature 1..20: note = antisense sequence
  source 1..20: mol_type = other RNA
cctatccacattctatcatc

SEQ ID NO: 12868 - RNA, 20 nt, synthetic construct
  misc_feature 1..20: note = antisense sequence
  source 1..20: mol_type = other RNA
ctacctatccacattctatc

SEQ ID NO: 12869 - RNA, 20 nt, synthetic construct
  misc_feature 1..20: note = antisense sequence
  source 1..20: mol_type = other RNA
ctttctacctatccacattc

SEQ ID NO: 12870 - RNA, 20 nt, synthetic construct
  misc_feature 1..20: note = antisense sequence
  source 1..20: mol_type = other RNA
ctctttctacctatccacat

SEQ ID NO: 12871 - RNA, 20 nt, synthetic construct
  misc_feature 1..20: note = antisense sequence
  source 1..20: mol_type = other RNA
gctctttctacctatccaca

SEQ ID NO: 12872 - RNA, 20 nt, synthetic construct
  misc_feature 1..20: note = antisense sequence
  source 1..20: mol_type = other RNA
tttcactgctctttctacct

SEQ ID NO: 12873 - RNA, 20 nt, synthetic construct
  misc_feature 1..20: note = antisense sequence
  source 1..20: mol_type = other RNA
ctttcactgctctttctacc

SEQ ID NO: 12874 - RNA, 20 nt, synthetic construct
  misc_feature 1..20: note = antisense sequence
  source 1..20: mol_type = other RNA
ccattcaaaacctcacatca

SEQ ID NO: 12875 - RNA, 20 nt, synthetic construct
  misc_feature 1..20: note = antisense sequence
  source 1..20: mol_type = other RNA
tgccattcaaaacctcacat

SEQ ID NO: 12876 - RNA, 20 nt, synthetic construct
  misc_feature 1..20: note = antisense sequence
  source 1..20: mol_type = other RNA
ccaagctcttaatttgccat

SEQ ID NO: 12877 - RNA, 20 nt, synthetic construct
  misc_feature 1..20: note = antisense sequence
  source 1..20: mol_type = other RNA
ccattacctccaggataaaa

SEQ ID NO: 12878 - RNA, 20 nt, synthetic construct
  misc_feature 1..20: note = antisense sequence
  source 1..20: mol_type = other RNA
ttcccattacctccaggata

SEQ ID NO: 12879 - RNA, 20 nt, synthetic construct
  misc_feature 1..20: note = antisense sequence
  source 1..20: mol_type = other RNA
tttcccattacctccaggat

SEQ ID NO: 12880 - RNA, 20 nt, synthetic construct
  misc_feature 1..20: note = antisense sequence
  source 1..20: mol_type = other RNA
cccaagctatcacaattcaa

SEQ ID NO: 12881 - RNA, 20 nt, synthetic construct
  misc_feature 1..20: note = antisense sequence
  source 1..20: mol_type = other RNA
tcccaagctatcacaattca

SEQ ID NO: 12882 - RNA, 20 nt, synthetic construct
  misc_feature 1..20: note = antisense sequence
  source 1..20: mol_type = other RNA
ttcccaagctatcacaattc

SEQ ID NO: 12883 - RNA, 20 nt, synthetic construct
  misc_feature 1..20: note = antisense sequence
  source 1..20: mol_type = other RNA
gttcccaagctatcacaatt

SEQ ID NO: 12884 - RNA, 20 nt, synthetic construct
  misc_feature 1..20: note = antisense sequence
  source 1..20: mol_type = other RNA
agttcccaagctatcacaat

SEQ ID NO: 12885 - RNA, 20 nt, synthetic construct
  misc_feature 1..20: note = antisense sequence
  source 1..20: mol_type = other RNA
aagttcccaagctatcacaa

SEQ ID NO: 12886 - RNA, 20 nt, synthetic construct
  misc_feature 1..20: note = antisense sequence
  source 1..20: mol_type = other RNA
aaagttcccaagctatcaca

SEQ ID NO: 12887 - RNA, 20 nt, synthetic construct
  misc_feature 1..20: note = antisense sequence
  source 1..20: mol_type = other RNA
caaaagttcccaagctatca

SEQ ID NO: 12888 - RNA, 20 nt, synthetic construct
  misc_feature 1..20: note = antisense sequence
  source 1..20: mol_type = other RNA
acaaaagttcccaagctatc

SEQ ID NO: 12889 - RNA, 20 nt, synthetic construct
  misc_feature 1..20: note = antisense sequence
  source 1..20: mol_type = other RNA
ctccttgtagaactgttgaa

SEQ ID NO: 12890 - RNA, 20 nt, synthetic construct
  misc_feature 1..20: note = antisense sequence
  source 1..20: mol_type = other RNA
tcctccttgtagaactgttg

SEQ ID NO: 12891 - RNA, 20 nt, synthetic construct
  misc_feature 1..20: note = antisense sequence
  source 1..20: mol_type = other RNA
atcctccttgtagaactgtt

SEQ ID NO: 12892 - RNA, 20 nt, synthetic construct
  misc_feature 1..20: note = antisense sequence
  source 1..20: mol_type = other RNA
aatcctccttgtagaactgt

SEQ ID NO: 12893 - RNA, 20 nt, synthetic construct
  misc_feature 1..20: note = antisense sequence
  source 1..20: mol_type = other RNA
ctgtaaaaggactgtggaat

SEQ ID NO: 12894 - RNA, 20 nt, synthetic construct
  misc_feature 1..20: note = antisense sequence
  source 1..20: mol_type = other RNA
ctctgtaaaaggactgtgga

SEQ ID NO: 12895 - RNA, 20 nt, synthetic construct
  misc_feature 1..20: note = antisense sequence
  source 1..20: mol_type = other RNA
ccctctgtaaaaggactgtg

SEQ ID NO: 12896 - RNA, 20 nt, synthetic construct
  misc_feature 1..20: note = antisense sequence
  source 1..20: mol_type = other RNA
tcccaccctctgtaaaagga

SEQ ID NO: 12897 - RNA, 20 nt, synthetic construct
  misc_feature 1..20: note = antisense sequence
  source 1..20: mol_type = other RNA
ctcccaccctctgtaaaagg

SEQ ID NO: 12898 - RNA, 20 nt, synthetic construct
  misc_feature 1..20: note = antisense sequence
  source 1..20: mol_type = other RNA
tctcccaccctctgtaaaag

SEQ ID NO: 12899 - RNA, 20 nt, synthetic construct
  misc_feature 1..20: note = antisense sequence
  source 1..20: mol_type = other RNA
tagtgaaggctaagaagaac

SEQ ID NO: 12900 - RNA, 20 nt, synthetic construct
  misc_feature 1..20: note = antisense sequence
  source 1..20: mol_type = other RNA
agcaggagggctgatgcagt

SEQ ID NO: 12901 - RNA, 20 nt, synthetic construct
  misc_feature 1..20: note = antisense sequence
  source 1..20: mol_type = other RNA
tttactgctgcgctgggctg

SEQ ID NO: 12902 - RNA, 20 nt, synthetic construct
  misc_feature 1..20: note = antisense sequence
  source 1..20: mol_type = other RNA
ctttactgctgcgctgggct

SEQ ID NO: 12903 - RNA, 20 nt, synthetic construct
  misc_feature 1..20: note = antisense sequence
  source 1..20: mol_type = other RNA
agctttactgctgcgctggg

SEQ ID NO: 12904 - RNA, 20 nt, synthetic construct
  misc_feature 1..20: note = antisense sequence
  source 1..20: mol_type = other RNA
gagctttactgctgcgctgg

SEQ ID NO: 12905 - RNA, 20 nt, synthetic construct
  misc_feature 1..20: note = antisense sequence
  source 1..20: mol_type = other RNA
tgagctttactgctgcgctg

SEQ ID NO: 12906 - RNA, 20 nt, synthetic construct
  misc_feature 1..20: note = antisense sequence
  source 1..20: mol_type = other RNA
ctgagctttactgctgcgct

SEQ ID NO: 12907 - RNA, 20 nt, synthetic construct
  misc_feature 1..20: note = antisense sequence
  source 1..20: mol_type = other RNA
cctgagctttactgctgcgc

SEQ ID NO: 12908 - RNA, 20 nt, synthetic construct
  misc_feature 1..20: note = antisense sequence
  source 1..20: mol_type = other RNA
acctgagctttactgctgcg

SEQ ID NO: 12909 - RNA, 20 nt, synthetic construct
  misc_feature 1..20: note = antisense sequence
  source 1..20: mol_type = other RNA
cacctgagctttactgctgc

SEQ ID NO: 12910 - RNA, 20 nt, synthetic construct
  misc_feature 1..20: note = antisense sequence
  source 1..20: mol_type = other RNA
ctgcacctgagctttactgc

SEQ ID NO: 12911 - RNA, 20 nt, synthetic construct
  misc_feature 1..20: note = antisense sequence
  source 1..20: mol_type = other RNA
cctgcacctgagctttactg

SEQ ID NO: 12912 - RNA, 20 nt, synthetic construct
  misc_feature 1..20: note = antisense sequence
  source 1..20: mol_type = other RNA
tatccctgcacctgagcttt

SEQ ID NO: 12913 - RNA, 20 nt, synthetic construct
  misc_feature 1..20: note = antisense sequence
  source 1..20: mol_type = other RNA
agtatccctgcacctgagct

SEQ ID NO: 12914 - RNA, 20 nt, synthetic construct
  misc_feature 1..20: note = antisense sequence
  source 1..20: mol_type = other RNA
gagtatccctgcacctgagc

SEQ ID NO: 12915 - RNA, 20 nt, synthetic construct
  misc_feature 1..20: note = antisense sequence
  source 1..20: mol_type = other RNA
tgagtatccctgcacctgag

SEQ ID NO: 12916 - RNA, 20 nt, synthetic construct
  misc_feature 1..20: note = antisense sequence
  source 1..20: mol_type = other RNA
gtgagtatccctgcacctga

SEQ ID NO: 12917 - RNA, 20 nt, synthetic construct
  misc_feature 1..20: note = antisense sequence
  source 1..20: mol_type = other RNA
tgtgagtatccctgcacctg

SEQ ID NO: 12918 - RNA, 20 nt, synthetic construct
  misc_feature 1..20: note = antisense sequence
  source 1..20: mol_type = other RNA
atgtgagtatccctgcacct

SEQ ID NO: 12919 - RNA, 20 nt, synthetic construct
  misc_feature 1..20: note = antisense sequence
  source 1..20: mol_type = other RNA
ctaatgtgagtatccctgca

SEQ ID NO: 12920 - RNA, 20 nt, synthetic construct
  misc_feature 1..20: note = antisense sequence
  source 1..20: mol_type = other RNA
gcctaatgtgagtatccctg

SEQ ID NO: 12921 - RNA, 20 nt, synthetic construct
  misc_feature 1..20: note = antisense sequence
  source 1..20: mol_type = other RNA
ctgcctaatgtgagtatccc

SEQ ID NO: 12922 - RNA, 20 nt, synthetic construct
  misc_feature 1..20: note = antisense sequence
  source 1..20: mol_type = other RNA
acctgcctaatgtgagtatc

SEQ ID NO: 12923 - RNA, 20 nt, synthetic construct
  misc_feature 1..20: note = antisense sequence
  source 1..20: mol_type = other RNA
gacctgcctaatgtgagtat

SEQ ID NO: 12924 - RNA, 20 nt, synthetic construct
  misc_feature 1..20: note = antisense sequence
  source 1..20: mol_type = other RNA
gtggacctgcctaatgtgag

SEQ ID NO: 12925 - RNA, 20 nt, synthetic construct
  misc_feature 1..20: note = antisense sequence
  source 1..20: mol_type = other RNA
tgtggacctgcctaatgtga

SEQ ID NO: 12926 - RNA, 20 nt, synthetic construct
  misc_feature 1..20: note = antisense sequence
  source 1..20: mol_type = other RNA
ttgtggacctgcctaatgtg

SEQ ID NO: 12927 - RNA, 20 nt, synthetic construct
  misc_feature 1..20: note = antisense sequence
  source 1..20: mol_type = other RNA
tttgtggacctgcctaatgt

SEQ ID NO: 12928 - RNA, 20 nt, synthetic construct
  misc_feature 1..20: note = antisense sequence
  source 1..20: mol_type = other RNA
gtttgtggacctgcctaatg

SEQ ID NO: 12929 - RNA, 20 nt, synthetic construct
  misc_feature 1..20: note = antisense sequence
  source 1..20: mol_type = other RNA
agtttgtggacctgcctaat

SEQ ID NO: 12930 - RNA, 20 nt, synthetic construct
  misc_feature 1..20: note = antisense sequence
  source 1..20: mol_type = other RNA
cagtttgtggacctgcctaa

SEQ ID NO: 12931 - RNA, 20 nt, synthetic construct
  misc_feature 1..20: note = antisense sequence
  source 1..20: mol_type = other RNA
cgagtgcagtttgtggacct

SEQ ID NO: 12932 - RNA, 20 nt, synthetic construct
  misc_feature 1..20: note = antisense sequence
  source 1..20: mol_type = other RNA
gcgagtgcagtttgtggacc

SEQ ID NO: 12933 - RNA, 20 nt, synthetic construct
  misc_feature 1..20: note = antisense sequence
  source 1..20: mol_type = other RNA
agcgagtgcagtttgtggac

SEQ ID NO: 12934 - RNA, 20 nt, synthetic construct
  misc_feature 1..20: note = antisense sequence
  source 1..20: mol_type = other RNA
aagcgagtgcagtttgtgga

SEQ ID NO: 12935 - RNA, 20 nt, synthetic construct
  misc_feature 1..20: note = antisense sequence
  source 1..20: mol_type = other RNA
aaagcgagtgcagtttgtgg

SEQ ID NO: 12936 - RNA, 20 nt, synthetic construct
  misc_feature 1..20: note = antisense sequence
  source 1..20: mol_type = other RNA
taaagcgagtgcagtttgtg

SEQ ID NO: 12937 - RNA, 20 nt, synthetic construct
  misc_feature 1..20: note = antisense sequence
  source 1..20: mol_type = other RNA
ttaaagcgagtgcagtttgt

SEQ ID NO: 12938 - RNA, 20 nt, synthetic construct
  misc_feature 1..20: note = antisense sequence
  source 1..20: mol_type = other RNA
taaaagatactgctcctgca

SEQ ID NO: 12939 - RNA, 20 nt, synthetic construct
  misc_feature 1..20: note = antisense sequence
  source 1..20: mol_type = other RNA
ataaaagatactgctcctgc

SEQ ID NO: 12940 - RNA, 20 nt, synthetic construct
  misc_feature 1..20: note = antisense sequence
  source 1..20: mol_type = other RNA
cataaaagatactgctcctg

SEQ ID NO: 12941 - RNA, 20 nt, synthetic construct
  misc_feature 1..20: note = antisense sequence
  source 1..20: mol_type = other RNA
gtcataaaagatactgctcc

SEQ ID NO: 12942 - RNA, 20 nt, synthetic construct
  misc_feature 1..20: note = antisense sequence
  source 1..20: mol_type = other RNA
agctatgtctatggtgttgt

SEQ ID NO: 12943 - RNA, 20 nt, synthetic construct
  misc_feature 1..20: note = antisense sequence
  source 1..20: mol_type = other RNA
aagctatgtctatggtgttg

SEQ ID NO: 12944 - RNA, 20 nt, synthetic construct
  misc_feature 1..20: note = antisense sequence
  source 1..20: mol_type = other RNA
gaagctatgtctatggtgtt

SEQ ID NO: 12945 - RNA, 20 nt, synthetic construct
  misc_feature 1..20: note = antisense sequence
  source 1..20: mol_type = other RNA
ggaagctatgtctatggtgt

SEQ ID NO: 12946 - RNA, 20 nt, synthetic construct
  misc_feature 1..20: note = antisense sequence
  source 1..20: mol_type = other RNA
tggaagctatgtctatggtg

SEQ ID NO: 12947 - RNA, 20 nt, synthetic construct
  misc_feature 1..20: note = antisense sequence
  source 1..20: mol_type = other RNA
ctggaagctatgtctatggt

SEQ ID NO: 12948 - RNA, 20 nt, synthetic construct
  misc_feature 1..20: note = antisense sequence
  source 1..20: mol_type = other RNA
cctggaagctatgtctatgg

SEQ ID NO: 12949 - RNA, 20 nt, synthetic construct
  misc_feature 1..20: note = antisense sequence
  source 1..20: mol_type = other RNA
ccctggaagctatgtctatg

SEQ ID NO: 12950 - RNA, 20 nt, synthetic construct
  misc_feature 1..20: note = antisense sequence
  source 1..20: mol_type = other RNA
caccctggaagctatgtcta

SEQ ID NO: 12951 - RNA, 20 nt, synthetic construct
  misc_feature 1..20: note = antisense sequence
  source 1..20: mol_type = other RNA
acaccctggaagctatgtct

SEQ ID NO: 12952 - RNA, 20 nt, synthetic construct
  misc_feature 1..20: note = antisense sequence
  source 1..20: mol_type = other RNA
gtagacaccctggaagctat

SEQ ID NO: 12953 - RNA, 20 nt, synthetic construct
  misc_feature 1..20: note = antisense sequence
  source 1..20: mol_type = other RNA
ttgtagacaccctggaagct

SEQ ID NO: 12954 - RNA, 20 nt, synthetic construct
  misc_feature 1..20: note = antisense sequence
  source 1..20: mol_type = other RNA
tttgtagacaccctggaagc

SEQ ID NO: 12955 - RNA, 20 nt, synthetic construct
  misc_feature 1..20: note = antisense sequence
  source 1..20: mol_type = other RNA
ctttgtagacaccctggaag

SEQ ID NO: 12956 - RNA, 20 nt, synthetic construct
  misc_feature 1..20: note = antisense sequence
  source 1..20: mol_type = other RNA
tgccctttgtagacaccctg

SEQ ID NO: 12957 - RNA, 20 nt, synthetic construct
  misc_feature 1..20: note = antisense sequence
  source 1..20: mol_type = other RNA
ctgccctttgtagacaccct

SEQ ID NO: 12958 - RNA, 20 nt, synthetic construct
  misc_feature 1..20: note = antisense sequence
  source 1..20: mol_type = other RNA
ggcctgccctttgtagacac

SEQ ID NO: 12959 - RNA, 20 nt, synthetic construct
  misc_feature 1..20: note = antisense sequence
  source 1..20: mol_type = other RNA
cggcctgccctttgtagaca

SEQ ID NO: 12960 - RNA, 20 nt, synthetic construct
  misc_feature 1..20: note = antisense sequence
  source 1..20: mol_type = other RNA
gcagttactcttgtagccgg

SEQ ID NO: 12961 - RNA, 20 nt, synthetic construct
  misc_feature 1..20: note = antisense sequence
  source 1..20: mol_type = other RNA
agtgcagttactcttgtagc

SEQ ID NO: 12962 - RNA, 20 nt, synthetic construct
  misc_feature 1..20: note = antisense sequence
  source 1..20: mol_type = other RNA
gacttcccagagtgcagtta

SEQ ID NO: 12963 - RNA, 20 nt, synthetic construct
  misc_feature 1..20: note = antisense sequence
  source 1..20: mol_type = other RNA
gtacctgatgaagatgacat

SEQ ID NO: 12964 - RNA, 20 nt, synthetic construct
  misc_feature 1..20: note = antisense sequence
  source 1..20: mol_type = other RNA
agtacctgatgaagatgaca

SEQ ID NO: 12965 - RNA, 20 nt, synthetic construct
  misc_feature 1..20: note = antisense sequence
  source 1..20: mol_type = other RNA
ggctgtgtggaactataaat

SEQ ID NO: 12966 - RNA, 20 nt, synthetic construct
  misc_feature 1..20: note = antisense sequence
  source 1..20: mol_type = other RNA
caggctgtgtggaactataa

SEQ ID NO: 12967 - RNA, 20 nt, synthetic construct
  misc_feature 1..20: note = antisense sequence
  source 1..20: mol_type = other RNA
tcaggctgtgtggaactata

SEQ ID NO: 12968 - RNA, 20 nt, synthetic construct
  misc_feature 1..20: note = antisense sequence
  source 1..20: mol_type = other RNA
ttcaggctgtgtggaactat

SEQ ID NO: 12969 - RNA, 20 nt, synthetic construct
  misc_feature 1..20: note = antisense sequence
  source 1..20: mol_type = other RNA
attcaggctgtgtggaacta

SEQ ID NO: 12970 - RNA, 20 nt, synthetic construct
  misc_feature 1..20: note = antisense sequence
  source 1..20: mol_type = other RNA
tattcaggctgtgtggaact

SEQ ID NO: 12971 - RNA, 20 nt, synthetic construct
  misc_feature 1..20: note = antisense sequence
  source 1..20: mol_type = other RNA
gtattcaggctgtgtggaac

SEQ ID NO: 12972 - RNA, 20 nt, synthetic construct
  misc_feature 1..20: note = antisense sequence
  source 1..20: mol_type = other RNA
ttgtattcaggctgtgtgga

SEQ ID NO: 12973 - RNA, 20 nt, synthetic construct
  misc_feature 1..20: note = antisense sequence
  source 1..20: mol_type = other RNA
attgtattcaggctgtgtgg

SEQ ID NO: 12974 - RNA, 20 nt, synthetic construct
  misc_feature 1..20: note = antisense sequence
  source 1..20: mol_type = other RNA
tattgtattcaggctgtgtg

SEQ ID NO: 12975 - RNA, 20 nt, synthetic construct
  misc_feature 1..20: note = antisense sequence
  source 1..20: mol_type = other RNA
gctaagcaacgctgacaggg

SEQ ID NO: 12976 - RNA, 20 nt, synthetic construct
  misc_feature 1..20: note = antisense sequence
  source 1..20: mol_type = other RNA
ggctaagcaacgctgacagg

SEQ ID NO: 12977 - RNA, 20 nt, synthetic construct
  misc_feature 1..20: note = antisense sequence
  source 1..20: mol_type = other RNA
aggctaagcaacgctgacag

SEQ ID NO: 12978 - RNA, 20 nt, synthetic construct
  misc_feature 1..20: note = antisense sequence
  source 1..20: mol_type = other RNA
aaggctaagcaacgctgaca

SEQ ID NO: 12979 - RNA, 20 nt, synthetic construct
  misc_feature 1..20: note = antisense sequence
  source 1..20: mol_type = other RNA
taaggctaagcaacgctgac

SEQ ID NO: 12980 - RNA, 20 nt, synthetic construct
  misc_feature 1..20: note = antisense sequence
  source 1..20: mol_type = other RNA
ctaaggctaagcaacgctga

SEQ ID NO: 12981 - RNA, 20 nt, synthetic construct
  misc_feature 1..20: note = antisense sequence
  source 1..20: mol_type = other RNA
actaaggctaagcaacgctg

SEQ ID NO: 12982 - RNA, 20 nt, synthetic construct
  misc_feature 1..20: note = antisense sequence
  source 1..20: mol_type = other RNA
ccactaaggctaagcaacgc

SEQ ID NO: 12983 - RNA, 20 nt, synthetic construct
  misc_feature 1..20: note = antisense sequence
  source 1..20: mol_type = other RNA
accactaaggctaagcaacg

SEQ ID NO: 12984 - RNA, 20 nt, synthetic construct
  misc_feature 1..20: note = antisense sequence
  source 1..20: mol_type = other RNA
taccactaaggctaagcaac

SEQ ID NO: 12985 - RNA, 20 nt, synthetic construct
  misc_feature 1..20: note = antisense sequence
  source 1..20: mol_type = other RNA
ttaccactaaggctaagcaa

SEQ ID NO: 12986 - RNA, 20 nt, synthetic construct
  misc_feature 1..20: note = antisense sequence
  source 1..20: mol_type = other RNA
tttaccactaaggctaagca

SEQ ID NO: 12987 - RNA, 20 nt, synthetic construct
  misc_feature 1..20: note = antisense sequence
  source 1..20: mol_type = other RNA
ctttaccactaaggctaagc

SEQ ID NO: 12988 - RNA, 20 nt, synthetic construct
  misc_feature 1..20: note = antisense sequence
  source 1..20: mol_type = other RNA
actttaccactaaggctaag

SEQ ID NO: 12989 - RNA, 20 nt, synthetic construct
  misc_feature 1..20: note = antisense sequence
  source 1..20: mol_type = other RNA
caactttaccactaaggcta

SEQ ID NO: 12990 - RNA, 20 nt, synthetic construct
  misc_feature 1..20: note = antisense sequence
  source 1..20: mol_type = other RNA
gggatttcaactttaccact

SEQ ID NO: 12991 - RNA, 20 nt, synthetic construct
  misc_feature 1..20: note = antisense sequence
  source 1..20: mol_type = other RNA
tgggatttcaactttaccac

SEQ ID NO: 12992 - RNA, 20 nt, synthetic construct
  misc_feature 1..20: note = antisense sequence
  source 1..20: mol_type = other RNA
ggctgggatttcaactttac

SEQ ID NO: 12993 - RNA, 20 nt, synthetic construct
  misc_feature 1..20: note = antisense sequence
  source 1..20: mol_type = other RNA
tggctgggatttcaacttta

SEQ ID NO: 12994 - RNA, 20 nt, synthetic construct
  misc_feature 1..20: note = antisense sequence
  source 1..20: mol_type = other RNA
tgtggctgggatttcaactt

SEQ ID NO: 12995 - RNA, 20 nt, synthetic construct
  misc_feature 1..20: note = antisense sequence
  source 1..20: mol_type = other RNA
tgctgtggctgggatttcaa

SEQ ID NO: 12996 - RNA, 20 nt, synthetic construct
  misc_feature 1..20: note = antisense sequence
  source 1..20: mol_type = other RNA
cctgggaatctgctgtggct

SEQ ID NO: 12997 - RNA, 20 nt, synthetic construct
  misc_feature 1..20: note = antisense sequence
  source 1..20: mol_type = other RNA
ctgttgccctgggaatctgc

SEQ ID NO: 12998 - RNA, 20 nt, synthetic construct
  misc_feature 1..20: note = antisense sequence
  source 1..20: mol_type = other RNA
tctgttgccctgggaatctg

SEQ ID NO: 12999 - RNA, 20 nt, synthetic construct
  misc_feature 1..20: note = antisense sequence
  source 1..20: mol_type = other RNA
ctctgttgccctgggaatct

SEQ ID NO: 13000 - RNA, 20 nt, synthetic construct
  misc_feature 1..20: note = antisense sequence
  source 1..20: mol_type = other RNA
actctgttgccctgggaatc

SEQ ID NO: 13001 - RNA, 20 nt, synthetic construct
  misc_feature 1..20: note = antisense sequence
  source 1..20: mol_type = other RNA
aactctgttgccctgggaat

SEQ ID NO: 13002 - RNA, 20 nt, synthetic construct
  misc_feature 1..20: note = antisense sequence
  source 1..20: mol_type = other RNA
taactctgttgccctgggaa

SEQ ID NO: 13003 - RNA, 20 nt, synthetic construct
  misc_feature 1..20: note = antisense sequence
  source 1..20: mol_type = other RNA
ctaactctgttgccctggga

SEQ ID NO: 13004 - RNA, 20 nt, synthetic construct
  misc_feature 1..20: note = antisense sequence
  source 1..20: mol_type = other RNA
tctaactctgttgccctggg

SEQ ID NO: 13005 - RNA, 20 nt, synthetic construct
  misc_feature 1..20: note = antisense sequence
  source 1..20: mol_type = other RNA
actctaactctgttgccctg

SEQ ID NO: 13006 - RNA, 20 nt, synthetic construct
  misc_feature 1..20: note = antisense sequence
  source 1..20: mol_type = other RNA
tactctaactctgttgccct

SEQ ID NO: 13007 - RNA, 20 nt, synthetic construct
  misc_feature 1..20: note = antisense sequence
  source 1..20: mol_type = other RNA
ctactctaactctgttgccc

SEQ ID NO: 13008 - RNA, 20 nt, synthetic construct
  misc_feature 1..20: note = antisense sequence
  source 1..20: mol_type = other RNA
gctactctaactctgttgcc

SEQ ID NO: 13009 - RNA, 20 nt, synthetic construct
  misc_feature 1..20: note = antisense sequence
  source 1..20: mol_type = other RNA
agctactctaactctgttgc

SEQ ID NO: 13010 - RNA, 20 nt, synthetic construct
  misc_feature 1..20: note = antisense sequence
  source 1..20: mol_type = other RNA
ttgaggagctgacctttagc

SEQ ID NO: 13011 - RNA, 20 nt, synthetic construct
  misc_feature 1..20: note = antisense sequence
  source 1..20: mol_type = other RNA
cttgaggagctgacctttag

SEQ ID NO: 13012 - RNA, 20 nt, synthetic construct
  misc_feature 1..20: note = antisense sequence
  source 1..20: mol_type = other RNA
acttgaggagctgaccttta

SEQ ID NO: 13013 - RNA, 20 nt, synthetic construct
  misc_feature 1..20: note = antisense sequence
  source 1..20: mol_type = other RNA
atacttgaggagctgacctt

SEQ ID NO: 13014 - RNA, 20 nt, synthetic construct
  misc_feature 1..20: note = antisense sequence
  source 1..20: mol_type = other RNA
tgatacttgaggagctgacc

SEQ ID NO: 13015 - RNA, 20 nt, synthetic construct
  misc_feature 1..20: note = antisense sequence
  source 1..20: mol_type = other RNA
ctgatacttgaggagctgac

SEQ ID NO: 13016 - RNA, 20 nt, synthetic construct
  misc_feature 1..20: note = antisense sequence
  source 1..20: mol_type = other RNA
cctgatacttgaggagctga

SEQ ID NO: 13017 - RNA, 20 nt, synthetic construct
  misc_feature 1..20: note = antisense sequence
  source 1..20: mol_type = other RNA
acctgatacttgaggagctg

SEQ ID NO: 13018 - RNA, 20 nt, synthetic construct
  misc_feature 1..20: note = antisense sequence
  source 1..20: mol_type = other RNA
cacctgatacttgaggagct

SEQ ID NO: 13019 - RNA, 20 nt, synthetic construct
  misc_feature 1..20: note = antisense sequence
  source 1..20: mol_type = other RNA
tcacctgatacttgaggagc

SEQ ID NO: 13020 - RNA, 20 nt, synthetic construct
  misc_feature 1..20: note = antisense sequence
  source 1..20: mol_type = other RNA
ttcacctgatacttgaggag

SEQ ID NO: 13021 - RNA, 20 nt, synthetic construct
  misc_feature 1..20: note = antisense sequence
  source 1..20: mol_type = other RNA
ctttcacctgatacttgagg

SEQ ID NO: 13022 - RNA, 20 nt, synthetic construct
  misc_feature 1..20: note = antisense sequence
  source 1..20: mol_type = other RNA
ccctttcacctgatacttga

SEQ ID NO: 13023 - RNA, 20 nt, synthetic construct
  misc_feature 1..20: note = antisense sequence
  source 1..20: mol_type = other RNA
aaaaccctttcacctgatac

SEQ ID NO: 13024 - RNA, 20 nt, synthetic construct
  misc_feature 1..20: note = antisense sequence
  source 1..20: mol_type = other RNA
ctgttatgcgttttccaagc

SEQ ID NO: 13025 - RNA, 20 nt, synthetic construct
  misc_feature 1..20: note = antisense sequence
  source 1..20: mol_type = other RNA
actgttatgcgttttccaag

SEQ ID NO: 13026 - RNA, 20 nt, synthetic construct
  misc_feature 1..20: note = antisense sequence
  source 1..20: mol_type = other RNA
ctaactgttatgcgttttcc

SEQ ID NO: 13027 - RNA, 20 nt, synthetic construct
  misc_feature 1..20: note = antisense sequence
  source 1..20: mol_type = other RNA
ccagtttgagctacaacaat

SEQ ID NO: 13028 - RNA, 20 nt, synthetic construct
  misc_feature 1..20: note = antisense sequence
  source 1..20: mol_type = other RNA
tccagtttgagctacaacaa

SEQ ID NO: 13029 - RNA, 20 nt, synthetic construct
  misc_feature 1..20: note = antisense sequence
  source 1..20: mol_type = other RNA
ctccagtttgagctacaaca

SEQ ID NO: 13030 - RNA, 20 nt, synthetic construct
  misc_feature 1..20: note = antisense sequence
  source 1..20: mol_type = other RNA
acctccagtttgagctacaa

SEQ ID NO: 13031 - RNA, 20 nt, synthetic construct
  misc_feature 1..20: note = antisense sequence
  source 1..20: mol_type = other RNA
tacctccagtttgagctaca

SEQ ID NO: 13032 - RNA, 20 nt, synthetic construct
  misc_feature 1..20: note = antisense sequence
  source 1..20: mol_type = other RNA
ttacctccagtttgagctac

SEQ ID NO: 13033 - RNA, 20 nt, synthetic construct
  misc_feature 1..20: note = antisense sequence
  source 1..20: mol_type = other RNA
tcttacctccagtttgagct

SEQ ID NO: 13034 - RNA, 20 nt, synthetic construct
  misc_feature 1..20: note = antisense sequence
  source 1..20: mol_type = other RNA
tctcttacctccagtttgag

SEQ ID NO: 13035 - RNA, 20 nt, synthetic construct
  misc_feature 1..20: note = antisense sequence
  source 1..20: mol_type = other RNA
ttctcttacctccagtttga

SEQ ID NO: 13036 - RNA, 20 nt, synthetic construct
  misc_feature 1..20: note = antisense sequence
  source 1..20: mol_type = other RNA
gttctcttacctccagtttg

SEQ ID NO: 13037 - RNA, 20 nt, synthetic construct
  misc_feature 1..20: note = antisense sequence
  source 1..20: mol_type = other RNA
tacgttctcttacctccagt

SEQ ID NO: 13038 - RNA, 20 nt, synthetic construct
  misc_feature 1..20: note = antisense sequence
  source 1..20: mol_type = other RNA
ttttacgttctcttacctcc

SEQ ID NO: 13039 - RNA, 20 nt, synthetic construct
  misc_feature 1..20: note = antisense sequence
  source 1..20: mol_type = other RNA
ccaggcttgaaactgaaatc

SEQ ID NO: 13040 - RNA, 20 nt, synthetic construct
  misc_feature 1..20: note = antisense sequence
  source 1..20: mol_type = other RNA
cccaggcttgaaactgaaat

SEQ ID NO: 13041 - RNA, 20 nt, synthetic construct
  misc_feature 1..20: note = antisense sequence
  source 1..20: mol_type = other RNA
attcccaggcttgaaactga

SEQ ID NO: 13042 - RNA, 20 nt, synthetic construct
  misc_feature 1..20: note = antisense sequence
  source 1..20: mol_type = other RNA
cagattcccaggcttgaaac

SEQ ID NO: 13043 - RNA, 20 nt, synthetic construct
  misc_feature 1..20: note = antisense sequence
  source 1..20: mol_type = other RNA
tttctttcagattcccaggc

SEQ ID NO: 13044 - RNA, 20 nt, synthetic construct
  misc_feature 1..20: note = antisense sequence
  source 1..20: mol_type = other RNA
ctttctttcagattcccagg

SEQ ID NO: 13045 - RNA, 20 nt, synthetic construct
  misc_feature 1..20: note = antisense sequence
  source 1..20: mol_type = other RNA
atggagccacctttctttca

SEQ ID NO: 13046 - RNA, 20 nt, synthetic construct
  misc_feature 1..20: note = antisense sequence
  source 1..20: mol_type = other RNA
atcatggagccacctttctt

SEQ ID NO: 13047 - RNA, 20 nt, synthetic construct
  misc_feature 1..20: note = antisense sequence
  source 1..20: mol_type = other RNA
aatcatggagccacctttct

SEQ ID NO: 13048 - RNA, 20 nt, synthetic construct
  misc_feature 1..20: note = antisense sequence
  source 1..20: mol_type = other RNA
ctaatcatggagccaccttt

SEQ ID NO: 13049 - RNA, 20 nt, synthetic construct
  misc_feature 1..20: note = antisense sequence
  source 1..20: mol_type = other RNA
tctaatcatggagccacctt

SEQ ID NO: 13050 - RNA, 20 nt, synthetic construct
  misc_feature 1..20: note = antisense sequence
  source 1..20: mol_type = other RNA
ttctaatcatggagccacct

SEQ ID NO: 13051 - RNA, 20 nt, synthetic construct
  misc_feature 1..20: note = antisense sequence
  source 1..20: mol_type = other RNA
attctaatcatggagccacc

SEQ ID NO: 13052 - RNA, 20 nt, synthetic construct
  misc_feature 1..20: note = antisense sequence
  source 1..20: mol_type = other RNA
cattctaatcatggagccac

SEQ ID NO: 13053 - RNA, 20 nt, synthetic construct
  misc_feature 1..20: note = antisense sequence
  source 1..20: mol_type = other RNA
gacattctaatcatggagcc

SEQ ID NO: 13054 - RNA, 20 nt, synthetic construct
  misc_feature 1..20: note = antisense sequence
  source 1..20: mol_type = other RNA
tgacattctaatcatggagc

SEQ ID NO: 13055 - RNA, 20 nt, synthetic construct
  misc_feature 1..20: note = antisense sequence
  source 1..20: mol_type = other RNA
gaggtgttgacattctaatc

SEQ ID NO: 13056 - RNA, 20 nt, synthetic construct
  misc_feature 1..20: note = antisense sequence
  source 1..20: mol_type = other RNA
gcttgaggtgttgacattct

SEQ ID NO: 13057 - RNA, 20 nt, synthetic construct
  misc_feature 1..20: note = antisense sequence
  source 1..20: mol_type = other RNA
tgcttgaggtgttgacattc

SEQ ID NO: 13058 - RNA, 20 nt, synthetic construct
  misc_feature 1..20: note = antisense sequence
  source 1..20: mol_type = other RNA
attgcttgaggtgttgacat

SEQ ID NO: 13059 - RNA, 20 nt, synthetic construct
  misc_feature 1..20: note = antisense sequence
  source 1..20: mol_type = other RNA
aattgcttgaggtgttgaca

SEQ ID NO: 13060 - RNA, 20 nt, synthetic construct
  misc_feature 1..20: note = antisense sequence
  source 1..20: mol_type = other RNA
ctaaaagccaaacgtcattg

SEQ ID NO: 13061 - RNA, 20 nt, synthetic construct
  misc_feature 1..20: note = antisense sequence
  source 1..20: mol_type = other RNA
gtctaaaagccaaacgtcat

SEQ ID NO: 13062 - RNA, 20 nt, synthetic construct
  misc_feature 1..20: note = antisense sequence
  source 1..20: mol_type = other RNA
tgtctaaaagccaaacgtca

SEQ ID NO: 13063 - RNA, 20 nt, synthetic construct
  misc_feature 1..20: note = antisense sequence
  source 1..20: mol_type = other RNA
atgtctaaaagccaaacgtc

SEQ ID NO: 13064 - RNA, 20 nt, synthetic construct
  misc_feature 1..20: note = antisense sequence
  source 1..20: mol_type = other RNA
catgtctaaaagccaaacgt

SEQ ID NO: 13065 - RNA, 20 nt, synthetic construct
  misc_feature 1..20: note = antisense sequence
  source 1..20: mol_type = other RNA
tgcttactgttacaaggaac

SEQ ID NO: 13066 - RNA, 20 nt, synthetic construct
  misc_feature 1..20: note = antisense sequence
  source 1..20: mol_type = other RNA
gtgcttactgttacaaggaa

SEQ ID NO: 13067 - RNA, 20 nt, synthetic construct
  misc_feature 1..20: note = antisense sequence
  source 1..20: mol_type = other RNA
ctggcaccttcaaatatctg

SEQ ID NO: 13068 - RNA, 20 nt, synthetic construct
  misc_feature 1..20: note = antisense sequence
  source 1..20: mol_type = other RNA
actggcaccttcaaatatct

SEQ ID NO: 13069 - RNA, 20 nt, synthetic construct
  misc_feature 1..20: note = antisense sequence
  source 1..20: mol_type = other RNA
tactggcaccttcaaatatc

SEQ ID NO: 13070 - RNA, 20 nt, synthetic construct
  misc_feature 1..20: note = antisense sequence
  source 1..20: mol_type = other RNA
actttactggcaccttcaaa

SEQ ID NO: 13071 - RNA, 20 nt, synthetic construct
  misc_feature 1..20: note = antisense sequence
  source 1..20: mol_type = other RNA
gattttactttactggcacc

SEQ ID NO: 13072 - RNA, 20 nt, synthetic construct
  misc_feature 1..20: note = antisense sequence
  source 1..20: mol_type = other RNA
gcagctttactcattgactt

SEQ ID NO: 13073 - RNA, 20 nt, synthetic construct
  misc_feature 1..20: note = antisense sequence
  source 1..20: mol_type = other RNA
agcagctttactcattgact

SEQ ID NO: 13074 - RNA, 20 nt, synthetic construct
  misc_feature 1..20: note = antisense sequence
  source 1..20: mol_type = other RNA
ccagcagctttactcattga

SEQ ID NO: 13075 - RNA, 20 nt, synthetic construct
  misc_feature 1..20: note = antisense sequence
  source 1..20: mol_type = other RNA
cccagcagctttactcattg

SEQ ID NO: 13076 - RNA, 20 nt, synthetic construct
  misc_feature 1..20: note = antisense sequence
  source 1..20: mol_type = other RNA
gcccagcagctttactcatt

SEQ ID NO: 13077 - RNA, 20 nt, synthetic construct
  misc_feature 1..20: note = antisense sequence
  source 1..20: mol_type = other RNA
ttttgcccagcagctttact

SEQ ID NO: 13078 - RNA, 20 nt, synthetic construct
  misc_feature 1..20: note = antisense sequence
  source 1..20: mol_type = other RNA
ctcagtggaagctcacaagc

SEQ ID NO: 13079 - RNA, 20 nt, synthetic construct
  misc_feature 1..20: note = antisense sequence
  source 1..20: mol_type = other RNA
gctcagtggaagctcacaag

SEQ ID NO: 13080 - RNA, 20 nt, synthetic construct
  misc_feature 1..20: note = antisense sequence
  source 1..20: mol_type = other RNA
ggcaaccgtcaactggagct

SEQ ID NO: 13081 - RNA, 20 nt, synthetic construct
  misc_feature 1..20: note = antisense sequence
  source 1..20: mol_type = other RNA
tggcaaccgtcaactggagc

SEQ ID NO: 13082 - RNA, 20 nt, synthetic construct
  misc_feature 1..20: note = antisense sequence
  source 1..20: mol_type = other RNA
atggcaaccgtcaactggag

SEQ ID NO: 13083 - RNA, 20 nt, synthetic construct
  misc_feature 1..20: note = antisense sequence
  source 1..20: mol_type = other RNA
catggcaaccgtcaactgga

SEQ ID NO: 13084 - RNA, 20 nt, synthetic construct
  misc_feature 1..20: note = antisense sequence
  source 1..20: mol_type = other RNA
acatggcaaccgtcaactgg

SEQ ID NO: 13085 - RNA, 20 nt, synthetic construct
  misc_feature 1..20: note = antisense sequence
  source 1..20: mol_type = other RNA
cacatggcaaccgtcaactg

SEQ ID NO: 13086 - RNA, 20 nt, synthetic construct
  misc_feature 1..20: note = antisense sequence
  source 1..20: mol_type = other RNA
ccacatggcaaccgtcaact

SEQ ID NO: 13087 - RNA, 20 nt, synthetic construct
  misc_feature 1..20: note = antisense sequence
  source 1..20: mol_type = other RNA
cccacatggcaaccgtcaac

SEQ ID NO: 13088 - RNA, 20 nt, synthetic construct
  misc_feature 1..20: note = antisense sequence
  source 1..20: mol_type = other RNA
tgagggccttgagaggtttt

SEQ ID NO: 13089 - RNA, 20 nt, synthetic construct
  misc_feature 1..20: note = antisense sequence
  source 1..20: mol_type = other RNA
ttgagggccttgagaggttt

SEQ ID NO: 13090 - RNA, 20 nt, synthetic construct
  misc_feature 1..20: note = antisense sequence
  source 1..20: mol_type = other RNA
gcttttgagggccttgagag

SEQ ID NO: 13091 - RNA, 20 nt, synthetic construct
  misc_feature 1..20: note = antisense sequence
  source 1..20: mol_type = other RNA
cttttctcacaggcttttga

SEQ ID NO: 13092 - RNA, 20 nt, synthetic construct
  misc_feature 1..20: note = antisense sequence
  source 1..20: mol_type = other RNA
acttttctcacaggcttttg

SEQ ID NO: 13093 - RNA, 20 nt, synthetic construct
  misc_feature 1..20: note = antisense sequence
  source 1..20: mol_type = other RNA
acactgacttttgaatgcac

SEQ ID NO: 13094 - RNA, 20 nt, synthetic construct
  misc_feature 1..20: note = antisense sequence
  source 1..20: mol_type = other RNA
cagtcctagacattgcttct

SEQ ID NO: 13095 - RNA, 20 nt, synthetic construct
  misc_feature 1..20: note = antisense sequence
  source 1..20: mol_type = other RNA
acagtcctagacattgcttc

SEQ ID NO: 13096 - RNA, 20 nt, synthetic construct
  misc_feature 1..20: note = antisense sequence
  source 1..20: mol_type = other RNA
tacagtcctagacattgctt

SEQ ID NO: 13097 - RNA, 20 nt, synthetic construct
  misc_feature 1..20: note = antisense sequence
  source 1..20: mol_type = other RNA
ctacagtcctagacattgct

SEQ ID NO: 13098 - RNA, 20 nt, synthetic construct
  misc_feature 1..20: note = antisense sequence
  source 1..20: mol_type = other RNA
cttcagttctacagtcctag

SEQ ID NO: 13099 - RNA, 20 nt, synthetic construct
  misc_feature 1..20: note = antisense sequence
  source 1..20: mol_type = other RNA
ggcttcagttctacagtcct

SEQ ID NO: 13100 - RNA, 20 nt, synthetic construct
  misc_feature 1..20: note = antisense sequence
  source 1..20: mol_type = other RNA
aggcttcagttctacagtcc

SEQ ID NO: 13101 - RNA, 20 nt, synthetic construct
  misc_feature 1..20: note = antisense sequence
  source 1..20: mol_type = other RNA
ctcaaggcttcagttctaca

SEQ ID NO: 13102 - RNA, 20 nt, synthetic construct
  misc_feature 1..20: note = antisense sequence
  source 1..20: mol_type = other RNA
cttctcaaggcttcagttct

SEQ ID NO: 13103 - RNA, 20 nt, synthetic construct
  misc_feature 1..20: note = antisense sequence
  source 1..20: mol_type = other RNA
caaacatcattctgtcttcc

SEQ ID NO: 13104 - RNA, 20 nt, synthetic construct
  misc_feature 1..20: note = antisense sequence
  source 1..20: mol_type = other RNA
gcaaacatcattctgtcttc

SEQ ID NO: 13105 - RNA, 20 nt, synthetic construct
  misc_feature 1..20: note = antisense sequence
  source 1..20: mol_type = other RNA
ccctagatgaccaatccttc

SEQ ID NO: 13106 - RNA, 20 nt, synthetic construct
  misc_feature 1..20: note = antisense sequence
  source 1..20: mol_type = other RNA
accctagatgaccaatcctt

SEQ ID NO: 13107 - RNA, 20 nt, synthetic construct
  misc_feature 1..20: note = antisense sequence
  source 1..20: mol_type = other RNA
taccctagatgaccaatcct

SEQ ID NO: 13108 - RNA, 20 nt, synthetic construct
  misc_feature 1..20: note = antisense sequence
  source 1..20: mol_type = other RNA
cttaccctagatgaccaatc

SEQ ID NO: 13109 - RNA, 20 nt, synthetic construct
  misc_feature 1..20: note = antisense sequence
  source 1..20: mol_type = other RNA
tcttaccctagatgaccaat

SEQ ID NO: 13110 - RNA, 20 nt, synthetic construct
  misc_feature 1..20: note = antisense sequence
  source 1..20: mol_type = other RNA
ctcttaccctagatgaccaa

SEQ ID NO: 13111 - RNA, 20 nt, synthetic construct
  misc_feature 1..20: note = antisense sequence
  source 1..20: mol_type = other RNA
tctcttaccctagatgacca

SEQ ID NO: 13112 - RNA, 20 nt, synthetic construct
  misc_feature 1..20: note = antisense sequence
  source 1..20: mol_type = other RNA
ttctcttaccctagatgacc

SEQ ID NO: 13113 - RNA, 20 nt, synthetic construct
  misc_feature 1..20: note = antisense sequence
  source 1..20: mol_type = other RNA
attctcttaccctagatgac

SEQ ID NO: 13114 - RNA, 20 nt, synthetic construct
  misc_feature 1..20: note = antisense sequence
  source 1..20: mol_type = other RNA
cattctcttaccctagatga

SEQ ID NO: 13115 - RNA, 20 nt, synthetic construct
  misc_feature 1..20: note = antisense sequence
  source 1..20: mol_type = other RNA
ccattctcttaccctagatg

SEQ ID NO: 13116 - RNA, 20 nt, synthetic construct
  misc_feature 1..20: note = antisense sequence
  source 1..20: mol_type = other RNA
agctcagacctgtagccttt

SEQ ID NO: 13117 - RNA, 20 nt, synthetic construct
  misc_feature 1..20: note = antisense sequence
  source 1..20: mol_type = other RNA
aagctcagacctgtagcctt

SEQ ID NO: 13118 - RNA, 20 nt, synthetic construct
  misc_feature 1..20: note = antisense sequence
  source 1..20: mol_type = other RNA
aaagctcagacctgtagcct

SEQ ID NO: 13119 - RNA, 20 nt, synthetic construct
  misc_feature 1..20: note = antisense sequence
  source 1..20: mol_type = other RNA
taaagctcagacctgtagcc

SEQ ID NO: 13120 - RNA, 20 nt, synthetic construct
  misc_feature 1..20: note = antisense sequence
  source 1..20: mol_type = other RNA
ctaaagctcagacctgtagc

SEQ ID NO: 13121 - RNA, 20 nt, synthetic construct
  misc_feature 1..20: note = antisense sequence
  source 1..20: mol_type = other RNA
tctaaagctcagacctgtag

SEQ ID NO: 13122 - RNA, 20 nt, synthetic construct
  misc_feature 1..20: note = antisense sequence
  source 1..20: mol_type = other RNA
cttctaaagctcagacctgt

SEQ ID NO: 13123 - RNA, 20 nt, synthetic construct
  misc_feature 1..20: note = antisense sequence
  source 1..20: mol_type = other RNA
tcttctaaagctcagacctg

SEQ ID NO: 13124 - RNA, 20 nt, synthetic construct
  misc_feature 1..20: note = antisense sequence
  source 1..20: mol_type = other RNA
gcctcttctaaagctcagac

SEQ ID NO: 13125 - RNA, 20 nt, synthetic construct
  misc_feature 1..20: note = antisense sequence
  source 1..20: mol_type = other RNA
ggcctcttctaaagctcaga

SEQ ID NO: 13126 - RNA, 20 nt, synthetic construct
  misc_feature 1..20: note = antisense sequence
  source 1..20: mol_type = other RNA
tggcctcttctaaagctcag

SEQ ID NO: 13127 - RNA, 20 nt, synthetic construct
  misc_feature 1..20: note = antisense sequence
  source 1..20: mol_type = other RNA
attttggcctcttctaaagc

SEQ ID NO: 13128 - RNA, 20 nt, synthetic construct
  misc_feature 1..20: note = antisense sequence
  source 1..20: mol_type = other RNA
ctgaattttggcctcttcta

SEQ ID NO: 13129 - RNA, 20 nt, synthetic construct
  misc_feature 1..20: note = antisense sequence
  source 1..20: mol_type = other RNA
tctgaattttggcctcttct

SEQ ID NO: 13130 - RNA, 20 nt, synthetic construct
  misc_feature 1..20: note = antisense sequence
  source 1..20: mol_type = other RNA
catatttactggcttcttcc

SEQ ID NO: 13131 - RNA, 20 nt, synthetic construct
  misc_feature 1..20: note = antisense sequence
  source 1..20: mol_type = other RNA
cccttttcatatttactggc

SEQ ID NO: 13132 - RNA, 20 nt, synthetic construct
  misc_feature 1..20: note = antisense sequence
  source 1..20: mol_type = other RNA
actggcttctgcaattttac

SEQ ID NO: 13133 - RNA, 20 nt, synthetic construct
  misc_feature 1..20: note = antisense sequence
  source 1..20: mol_type = other RNA
ctgtactggcttctgcaatt

SEQ ID NO: 13134 - RNA, 20 nt, synthetic construct
  misc_feature 1..20: note = antisense sequence
  source 1..20: mol_type = other RNA
cctgtactggcttctgcaat

SEQ ID NO: 13135 - RNA, 20 nt, synthetic construct
  misc_feature 1..20: note = antisense sequence
  source 1..20: mol_type = other RNA
tccctgtactggcttctgca

SEQ ID NO: 13136 - RNA, 20 nt, synthetic construct
  misc_feature 1..20: note = antisense sequence
  source 1..20: mol_type = other RNA
ctccctgtactggcttctgc

SEQ ID NO: 13137 - RNA, 20 nt, synthetic construct
  misc_feature 1..20: note = antisense sequence
  source 1..20: mol_type = other RNA
tctccctgtactggcttctg

SEQ ID NO: 13138 - RNA, 20 nt, synthetic construct
  misc_feature 1..20: note = antisense sequence
  source 1..20: mol_type = other RNA
atctccctgtactggcttct

SEQ ID NO: 13139 - RNA, 20 nt, synthetic construct
  misc_feature 1..20: note = antisense sequence
  source 1..20: mol_type = other RNA
catctccctgtactggcttc

SEQ ID NO: 13140 - RNA, 20 nt, synthetic construct
  misc_feature 1..20: note = antisense sequence
  source 1..20: mol_type = other RNA
acatctccctgtactggctt

SEQ ID NO: 13141 - RNA, 20 nt, synthetic construct
  misc_feature 1..20: note = antisense sequence
  source 1..20: mol_type = other RNA
cttatggtacatctccctgt

SEQ ID NO: 13142 - RNA, 20 nt, synthetic construct
  misc_feature 1..20: note = antisense sequence
  source 1..20: mol_type = other RNA
tcttatggtacatctccctg

SEQ ID NO: 13143 - RNA, 20 nt, synthetic construct
  misc_feature 1..20: note = antisense sequence
  source 1..20: mol_type = other RNA
atcttatggtacatctccct

SEQ ID NO: 13144 - RNA, 20 nt, synthetic construct
  misc_feature 1..20: note = antisense sequence
  source 1..20: mol_type = other RNA
tatcttatggtacatctccc

SEQ ID NO: 13145 - RNA, 20 nt, synthetic construct
  misc_feature 1..20: note = antisense sequence
  source 1..20: mol_type = other RNA
catcccttgtagcaatatgt

SEQ ID NO: 13146 - RNA, 20 nt, synthetic construct
  misc_feature 1..20: note = antisense sequence
  source 1..20: mol_type = other RNA
tcatcccttgtagcaatatg

SEQ ID NO: 13147 - RNA, 20 nt, synthetic construct
  misc_feature 1..20: note = antisense sequence
  source 1..20: mol_type = other RNA
gtatcatcccttgtagcaat

SEQ ID NO: 13148 - RNA, 20 nt, synthetic construct
  misc_feature 1..20: note = antisense sequence
  source 1..20: mol_type = other RNA
ggtatcatcccttgtagcaa

SEQ ID NO: 13149 - RNA, 20 nt, synthetic construct
  misc_feature 1..20: note = antisense sequence
  source 1..20: mol_type = other RNA
gggtatcatcccttgtagca

SEQ ID NO: 13150 - RNA, 20 nt, synthetic construct
  misc_feature 1..20: note = antisense sequence
  source 1..20: mol_type = other RNA
aatatggaaggattgcaggg

SEQ ID NO: 13151 - RNA, 20 nt, synthetic construct
  misc_feature 1..20: note = antisense sequence
  source 1..20: mol_type = other RNA
aaatatggaaggattgcagg

SEQ ID NO: 13152 - RNA, 20 nt, synthetic construct
  misc_feature 1..20: note = antisense sequence
  source 1..20: mol_type = other RNA
gccttatcccagcagctatg

SEQ ID NO: 13153 - RNA, 20 nt, synthetic construct
  misc_feature 1..20: note = antisense sequence
  source 1..20: mol_type = other RNA
agccttatcccagcagctat

SEQ ID NO: 13154 - RNA, 20 nt, synthetic construct
  misc_feature 1..20: note = antisense sequence
  source 1..20: mol_type = other RNA
aagccttatcccagcagcta

SEQ ID NO: 13155 - RNA, 20 nt, synthetic construct
  misc_feature 1..20: note = antisense sequence
  source 1..20: mol_type = other RNA
taagccttatcccagcagct

SEQ ID NO: 13156 - RNA, 20 nt, synthetic construct
  misc_feature 1..20: note = antisense sequence
  source 1..20: mol_type = other RNA
ttaagccttatcccagcagc

SEQ ID NO: 13157 - RNA, 20 nt, synthetic construct
  misc_feature 1..20: note = antisense sequence
  source 1..20: mol_type = other RNA
gttaagccttatcccagcag

SEQ ID NO: 13158 - RNA, 20 nt, synthetic construct
  misc_feature 1..20: note = antisense sequence
  source 1..20: mol_type = other RNA
ggttaagccttatcccagca

SEQ ID NO: 13159 - RNA, 20 nt, synthetic construct
  misc_feature 1..20: note = antisense sequence
  source 1..20: mol_type = other RNA
tggttaagccttatcccagc

SEQ ID NO: 13160 - RNA, 20 nt, synthetic construct
  misc_feature 1..20: note = antisense sequence
  source 1..20: mol_type = other RNA
atggttaagccttatcccag

SEQ ID NO: 13161 - RNA, 20 nt, synthetic construct
  misc_feature 1..20: note = antisense sequence
  source 1..20: mol_type = other RNA
aatggttaagccttatccca

SEQ ID NO: 13162 - RNA, 20 nt, synthetic construct
  misc_feature 1..20: note = antisense sequence
  source 1..20: mol_type = other RNA
aaatggttaagccttatccc

SEQ ID NO: 13163 - RNA, 20 nt, synthetic construct
  misc_feature 1..20: note = antisense sequence
  source 1..20: mol_type = other RNA
ctcaatgaaatggttaagcc

SEQ ID NO: 13164 - RNA, 20 nt, synthetic construct
  misc_feature 1..20: note = antisense sequence
  source 1..20: mol_type = other RNA
catagtcttggaagattgtc

SEQ ID NO: 13165 - RNA, 20 nt, synthetic construct
  misc_feature 1..20: note = antisense sequence
  source 1..20: mol_type = other RNA
ctcatagtcttggaagattg

SEQ ID NO: 13166 - RNA, 20 nt, synthetic construct
  misc_feature 1..20: note = antisense sequence
  source 1..20: mol_type = other RNA
cctcatagtcttggaagatt

SEQ ID NO: 13167 - RNA, 20 nt, synthetic construct
  misc_feature 1..20: note = antisense sequence
  source 1..20: mol_type = other RNA
acctcatagtcttggaagat

SEQ ID NO: 13168 - RNA, 20 nt, synthetic construct
  misc_feature 1..20: note = antisense sequence
  source 1..20: mol_type = other RNA
cacctcatagtcttggaaga

SEQ ID NO: 13169 - RNA, 20 nt, synthetic construct
  misc_feature 1..20: note = antisense sequence
  source 1..20: mol_type = other RNA
tcacctcatagtcttggaag

SEQ ID NO: 13170 - RNA, 20 nt, synthetic construct
  misc_feature 1..20: note = antisense sequence
  source 1..20: mol_type = other RNA
ttcacctcatagtcttggaa

SEQ ID NO: 13171 - RNA, 20 nt, synthetic construct
  misc_feature 1..20: note = antisense sequence
  source 1..20: mol_type = other RNA
tttcacctcatagtcttgga

SEQ ID NO: 13172 - RNA, 20 nt, synthetic construct
  misc_feature 1..20: note = antisense sequence
  source 1..20: mol_type = other RNA
atttcacctcatagtcttgg

SEQ ID NO: 13173 - RNA, 20 nt, synthetic construct
  misc_feature 1..20: note = antisense sequence
  source 1..20: mol_type = other RNA
gcatatttcacctcatagtc

SEQ ID NO: 13174 - RNA, 20 nt, synthetic construct
  misc_feature 1..20: note = antisense sequence
  source 1..20: mol_type = other RNA
tactggtgtggcatatttca

SEQ ID NO: 13175 - RNA, 20 nt, synthetic construct
  misc_feature 1..20: note = antisense sequence
  source 1..20: mol_type = other RNA
atactggtgtggcatatttc

SEQ ID NO: 13176 - RNA, 20 nt, synthetic construct
  misc_feature 1..20: note = antisense sequence
  source 1..20: mol_type = other RNA
ggaatactggtgtggcatat

SEQ ID NO: 13177 - RNA, 20 nt, synthetic construct
  misc_feature 1..20: note = antisense sequence
  source 1..20: mol_type = other RNA
tggaatactggtgtggcata

SEQ ID NO: 13178 - RNA, 20 nt, synthetic construct
  misc_feature 1..20: note = antisense sequence
  source 1..20: mol_type = other RNA
ctggaatactggtgtggcat

SEQ ID NO: 13179 - RNA, 20 nt, synthetic construct
  misc_feature 1..20: note = antisense sequence
  source 1..20: mol_type = other RNA
cctggaatactggtgtggca

SEQ ID NO: 13180 - RNA, 20 nt, synthetic construct
  misc_feature 1..20: note = antisense sequence
  source 1..20: mol_type = other RNA
tcctggaatactggtgtggc

SEQ ID NO: 13181 - RNA, 20 nt, synthetic construct
  misc_feature 1..20: note = antisense sequence
  source 1..20: mol_type = other RNA
tgtcctggaatactggtgtg

SEQ ID NO: 13182 - RNA, 20 nt, synthetic construct
  misc_feature 1..20: note = antisense sequence
  source 1..20: mol_type = other RNA
agttgtcctggaatactggt

SEQ ID NO: 13183 - RNA, 20 nt, synthetic construct
  misc_feature 1..20: note = antisense sequence
  source 1..20: mol_type = other RNA
gagttgtcctggaatactgg

SEQ ID NO: 13184 - RNA, 20 nt, synthetic construct
  misc_feature 1..20: note = antisense sequence
  source 1..20: mol_type = other RNA
ctgagttgtcctggaatact

SEQ ID NO: 13185 - RNA, 20 nt, synthetic construct
  misc_feature 1..20: note = antisense sequence
  source 1..20: mol_type = other RNA
gctgagttgtcctggaatac

SEQ ID NO: 13186 - RNA, 20 nt, synthetic construct
  misc_feature 1..20: note = antisense sequence
  source 1..20: mol_type = other RNA
agctgagttgtcctggaata

SEQ ID NO: 13187 - RNA, 20 nt, synthetic construct
  misc_feature 1..20: note = antisense sequence
  source 1..20: mol_type = other RNA
gagctgagttgtcctggaat

SEQ ID NO: 13188 - RNA, 20 nt, synthetic construct
  misc_feature 1..20: note = antisense sequence
  source 1..20: mol_type = other RNA
ggagctgagttgtcctggaa

SEQ ID NO: 13189 - RNA, 20 nt, synthetic construct
  misc_feature 1..20: note = antisense sequence
  source 1..20: mol_type = other RNA
tataaggagctgagttgtcc

SEQ ID NO: 13190 - RNA, 20 nt, synthetic construct
  misc_feature 1..20: note = antisense sequence
  source 1..20: mol_type = other RNA
atgctgcaatggctgaatat

SEQ ID NO: 13191 - RNA, 20 nt, synthetic construct
  misc_feature 1..20: note = antisense sequence
  source 1..20: mol_type = other RNA
cacaaatcagaaaaggtcag

SEQ ID NO: 13192 - RNA, 20 nt, synthetic construct
  misc_feature 1..20: note = antisense sequence
  source 1..20: mol_type = other RNA
ctccacaaatcagaaaaggt

SEQ ID NO: 13193 - RNA, 20 nt, synthetic construct
  misc_feature 1..20: note = antisense sequence
  source 1..20: mol_type = other RNA
taacctctctttcttctcca

SEQ ID NO: 13194 - RNA, 20 nt, synthetic construct
  misc_feature 1..20: note = antisense sequence
  source 1..20: mol_type = other RNA
gatttcactctaacctctct

SEQ ID NO: 13195 - RNA, 20 nt, synthetic construct
  misc_feature 1..20: note = antisense sequence
  source 1..20: mol_type = other RNA
agatttcactctaacctctc

SEQ ID NO: 13196 - RNA, 20 nt, synthetic construct
  misc_feature 1..20: note = antisense sequence
  source 1..20: mol_type = other RNA
catcgcttgacagtaacaaa

SEQ ID NO: 13197 - RNA, 20 nt, synthetic construct
  misc_feature 1..20: note = antisense sequence
  source 1..20: mol_type = other RNA
tcatcgcttgacagtaacaa

SEQ ID NO: 13198 - RNA, 20 nt, synthetic construct
  misc_feature 1..20: note = antisense sequence
  source 1..20: mol_type = other RNA
ttcatcgcttgacagtaaca

SEQ ID NO: 13199 - RNA, 20 nt, synthetic construct
  misc_feature 1..20: note = antisense sequence
  source 1..20: mol_type = other RNA
tttcatcgcttgacagtaac

SEQ ID NO: 13200 - RNA, 20 nt, synthetic construct
  misc_feature 1..20: note = antisense sequence
  source 1..20: mol_type = other RNA
gatttcatcgcttgacagta

SEQ ID NO: 13201 - RNA, 20 nt, synthetic construct
  misc_feature 1..20: note = antisense sequence
  source 1..20: mol_type = other RNA
agatttcatcgcttgacagt

SEQ ID NO: 13202 - RNA, 20 nt, synthetic construct
  misc_feature 1..20: note = antisense sequence
  source 1..20: mol_type = other RNA
cagatttcatcgcttgacag

SEQ ID NO: 13203 - RNA, 20 nt, synthetic construct
  misc_feature 1..20: note = antisense sequence
  source 1..20: mol_type = other RNA
acagatttcatcgcttgaca

SEQ ID NO: 13204 - RNA, 20 nt, synthetic construct
  misc_feature 1..20: note = antisense sequence
  source 1..20: mol_type = other RNA
tacagatttcatcgcttgac

SEQ ID NO: 13205 - RNA, 20 nt, synthetic construct
  misc_feature 1..20: note = antisense sequence
  source 1..20: mol_type = other RNA
gttacagatttcatcgcttg

SEQ ID NO: 13206 - RNA, 20 nt, synthetic construct
  misc_feature 1..20: note = antisense sequence
  source 1..20: mol_type = other RNA
gctgttacagatttcatcgc

SEQ ID NO: 13207 - RNA, 20 nt, synthetic construct
  misc_feature 1..20: note = antisense sequence
  source 1..20: mol_type = other RNA
agctgttacagatttcatcg

SEQ ID NO: 13208 - RNA, 20 nt, synthetic construct
  misc_feature 1..20: note = antisense sequence
  source 1..20: mol_type = other RNA
cagtcggttccatctttgag

SEQ ID NO: 13209 - RNA, 20 nt, synthetic construct
  misc_feature 1..20: note = antisense sequence
  source 1..20: mol_type = other RNA
tcagtcggttccatctttga

SEQ ID NO: 13210 - RNA, 20 nt, synthetic construct
  misc_feature 1..20: note = antisense sequence
  source 1..20: mol_type = other RNA
atcagtcggttccatctttg

SEQ ID NO: 13211 - RNA, 20 nt, synthetic construct
  misc_feature 1..20: note = antisense sequence
  source 1..20: mol_type = other RNA
tatcagtcggttccatcttt

SEQ ID NO: 13212 - RNA, 20 nt, synthetic construct
  misc_feature 1..20: note = antisense sequence
  source 1..20: mol_type = other RNA
aatatcagtcggttccatct

SEQ ID NO: 13213 - RNA, 20 nt, synthetic construct
  misc_feature 1..20: note = antisense sequence
  source 1..20: mol_type = other RNA
gaatatcagtcggttccatc

SEQ ID NO: 13214 - RNA, 20 nt, synthetic construct
  misc_feature 1..20: note = antisense sequence
  source 1..20: mol_type = other RNA
agaatatcagtcggttccat

SEQ ID NO: 13215 - RNA, 20 nt, synthetic construct
  misc_feature 1..20: note = antisense sequence
  source 1..20: mol_type = other RNA
aagaatatcagtcggttcca

SEQ ID NO: 13216 - RNA, 20 nt, synthetic construct
  misc_feature 1..20: note = antisense sequence
  source 1..20: mol_type = other RNA
aaagaatatcagtcggttcc

SEQ ID NO: 13217 - RNA, 20 nt, synthetic construct
  misc_feature 1..20: note = antisense sequence
  source 1..20: mol_type = other RNA
gatgctccctgaaagttatt

SEQ ID NO: 13218 - RNA, 20 nt, synthetic construct
  misc_feature 1..20: note = antisense sequence
  source 1..20: mol_type = other RNA
gagctagttggcaaaggaaa

SEQ ID NO: 13219 - RNA, 20 nt, synthetic construct
  misc_feature 1..20: note = antisense sequence
  source 1..20: mol_type = other RNA
ggagctagttggcaaaggaa

SEQ ID NO: 13220 - RNA, 20 nt, synthetic construct
  misc_feature 1..20: note = antisense sequence
  source 1..20: mol_type = other RNA
gaggagctagttggcaaagg

SEQ ID NO: 13221 - RNA, 20 nt, synthetic construct
  misc_feature 1..20: note = antisense sequence
  source 1..20: mol_type = other RNA
agaggagctagttggcaaag

SEQ ID NO: 13222 - RNA, 20 nt, synthetic construct
  misc_feature 1..20: note = antisense sequence
  source 1..20: mol_type = other RNA
aagaggagctagttggcaaa

SEQ ID NO: 13223 - RNA, 20 nt, synthetic construct
  misc_feature 1..20: note = antisense sequence
  source 1..20: mol_type = other RNA
agcccaatgaacaacagaaa

SEQ ID NO: 13224 - RNA, 20 nt, synthetic construct
  misc_feature 1..20: note = antisense sequence
  source 1..20: mol_type = other RNA
cagcccaatgaacaacagaa

SEQ ID NO: 13225 - RNA, 20 nt, synthetic construct
  misc_feature 1..20: note = antisense sequence
  source 1..20: mol_type = other RNA
acagcccaatgaacaacaga

SEQ ID NO: 13226 - RNA, 20 nt, synthetic construct
  misc_feature 1..20: note = antisense sequence
  source 1..20: mol_type = other RNA
aaacagcccaatgaacaaca

SEQ ID NO: 13227 - RNA, 20 nt, synthetic construct
  misc_feature 1..20: note = antisense sequence
  source 1..20: mol_type = other RNA
aaaacagcccaatgaacaac

SEQ ID NO: 13228 - RNA, 20 nt, synthetic construct
  misc_feature 1..20: note = antisense sequence
  source 1..20: mol_type = other RNA
aacaaaacagcccaatgaac

SEQ ID NO: 13229 - RNA, 20 nt, synthetic construct
  misc_feature 1..20: note = antisense sequence
  source 1..20: mol_type = other RNA
tgaaacaaaacagcccaatg

SEQ ID NO: 13230 - RNA, 20 nt, synthetic construct
  misc_feature 1..20: note = antisense sequence
  source 1..20: mol_type = other RNA
ccaatctaggacacaaaatg

SEQ ID NO: 13231 - RNA, 20 nt, synthetic construct
  misc_feature 1..20: note = antisense sequence
  source 1..20: mol_type = other RNA
gaaccaatctaggacacaaa

SEQ ID NO: 13232 - RNA, 20 nt, synthetic construct
  misc_feature 1..20: note = antisense sequence
  source 1..20: mol_type = other RNA
ggaaccaatctaggacacaa

SEQ ID NO: 13233 - RNA, 20 nt, synthetic construct
  misc_feature 1..20: note = antisense sequence
  source 1..20: mol_type = other RNA
aggaaccaatctaggacaca

SEQ ID NO: 13234 - RNA, 20 nt, synthetic construct
  misc_feature 1..20: note = antisense sequence
  source 1..20: mol_type = other RNA
taggaaccaatctaggacac

SEQ ID NO: 13235 - RNA, 20 nt, synthetic construct
  misc_feature 1..20: note = antisense sequence
  source 1..20: mol_type = other RNA
aagtaggaaccaatctagga

SEQ ID NO: 13236 - RNA, 20 nt, synthetic construct
  misc_feature 1..20: note = antisense sequence
  source 1..20: mol_type = other RNA
aaagtaggaaccaatctagg

SEQ ID NO: 13237 - RNA, 20 nt, synthetic construct
  misc_feature 1..20: note = antisense sequence
  source 1..20: mol_type = other RNA
caaagtaggaaccaatctag

SEQ ID NO: 13238 - RNA, 20 nt, synthetic construct
  misc_feature 1..20: note = antisense sequence
  source 1..20: mol_type = other RNA
ccaaagtaggaaccaatcta

SEQ ID NO: 13239 - RNA, 20 nt, synthetic construct
  misc_feature 1..20: note = antisense sequence
  source 1..20: mol_type = other RNA
tgccaaagtaggaaccaatc

SEQ ID NO: 13240 - RNA, 20 nt, synthetic construct
  misc_feature 1..20: note = antisense sequence
  source 1..20: mol_type = other RNA
actgccaaagtaggaaccaa

SEQ ID NO: 13241 - RNA, 20 nt, synthetic construct
  misc_feature 1..20: note = antisense sequence
  source 1..20: mol_type = other RNA
cttgtcaatgtcagttgttg

SEQ ID NO: 13242 - RNA, 20 nt, synthetic construct
  misc_feature 1..20: note = antisense sequence
  source 1..20: mol_type = other RNA
ccgactagaagaatgtcagt

SEQ ID NO: 13243 - RNA, 20 nt, synthetic construct
  misc_feature 1..20: note = antisense sequence
  source 1..20: mol_type = other RNA
tccgactagaagaatgtcag

SEQ ID NO: 13244 - RNA, 20 nt, synthetic construct
  misc_feature 1..20: note = antisense sequence
  source 1..20: mol_type = other RNA
gctccgactagaagaatgtc

SEQ ID NO: 13245 - RNA, 20 nt, synthetic construct
  misc_feature 1..20: note = antisense sequence
  source 1..20: mol_type = other RNA
ggctccgactagaagaatgt

SEQ ID NO: 13246 - RNA, 20 nt, synthetic construct
  misc_feature 1..20: note = antisense sequence
  source 1..20: mol_type = other RNA
gggctccgactagaagaatg

SEQ ID NO: 13247 - RNA, 20 nt, synthetic construct
  misc_feature 1..20: note = antisense sequence
  source 1..20: mol_type = other RNA
acacatacacttttccttgc

SEQ ID NO: 13248 - RNA, 20 nt, synthetic construct
  misc_feature 1..20: note = antisense sequence
  source 1..20: mol_type = other RNA
gagagcatacacatacactt

SEQ ID NO: 13249 - RNA, 20 nt, synthetic construct
  misc_feature 1..20: note = antisense sequence
  source 1..20: mol_type = other RNA
tgagagcatacacatacact

SEQ ID NO: 13250 - RNA, 20 nt, synthetic construct
  misc_feature 1..20: note = antisense sequence
  source 1..20: mol_type = other RNA
ttgagagcatacacatacac

SEQ ID NO: 13251 - RNA, 20 nt, synthetic construct
  misc_feature 1..20: note = antisense sequence
  source 1..20: mol_type = other RNA
acctgattgagagcatacac

SEQ ID NO: 13252 - RNA, 20 nt, synthetic construct
  misc_feature 1..20: note = antisense sequence
  source 1..20: mol_type = other RNA
tacctgattgagagcataca

SEQ ID NO: 13253 - RNA, 20 nt, synthetic construct
  misc_feature 1..20: note = antisense sequence
  source 1..20: mol_type = other RNA
ttacctgattgagagcatac

SEQ ID NO: 13254 - RNA, 20 nt, synthetic construct
  misc_feature 1..20: note = antisense sequence
  source 1..20: mol_type = other RNA
cattacctgattgagagcat

SEQ ID NO: 13255 - RNA, 20 nt, synthetic construct
  misc_feature 1..20: note = antisense sequence
  source 1..20: mol_type = other RNA
accattacctgattgagagc

SEQ ID NO: 13256 - RNA, 20 nt, synthetic construct
  misc_feature 1..20: note = antisense sequence
  source 1..20: mol_type = other RNA
gacaccattacctgattgag

SEQ ID NO: 13257 - RNA, 20 nt, synthetic construct
  misc_feature 1..20: note = antisense sequence
  source 1..20: mol_type = other RNA
ccaaactcagacaccattac

SEQ ID NO: 13258 - RNA, 20 nt, synthetic construct
  misc_feature 1..20: note = antisense sequence
  source 1..20: mol_type = other RNA
accaaactcagacaccatta

SEQ ID NO: 13259 - RNA, 20 nt, synthetic construct
  misc_feature 1..20: note = antisense sequence
  source 1..20: mol_type = other RNA
taccaaactcagacaccatt

SEQ ID NO: 13260 - RNA, 20 nt, synthetic construct
  misc_feature 1..20: note = antisense sequence
  source 1..20: mol_type = other RNA
tttctaccaaactcagacac

SEQ ID NO: 13261 - RNA, 20 nt, synthetic construct
  misc_feature 1..20: note = antisense sequence
  source 1..20: mol_type = other RNA
gatttctaccaaactcagac

SEQ ID NO: 13262 - RNA, 20 nt, synthetic construct
  misc_feature 1..20: note = antisense sequence
  source 1..20: mol_type = other RNA
ggatttctaccaaactcaga

SEQ ID NO: 13263 - RNA, 20 nt, synthetic construct
  misc_feature 1..20: note = antisense sequence
  source 1..20: mol_type = other RNA
ctggatttctaccaaactca

SEQ ID NO: 13264 - RNA, 20 nt, synthetic construct
  misc_feature 1..20: note = antisense sequence
  source 1..20: mol_type = other RNA
cctggatttctaccaaactc

SEQ ID NO: 13265 - RNA, 20 nt, synthetic construct
  misc_feature 1..20: note = antisense sequence
  source 1..20: mol_type = other RNA
gatagcttctttgctctgtt

SEQ ID NO: 13266 - RNA, 20 nt, synthetic construct
  misc_feature 1..20: note = antisense sequence
  source 1..20: mol_type = other RNA
ctgatagcttctttgctctg

SEQ ID NO: 13267 - RNA, 20 nt, synthetic construct
  misc_feature 1..20: note = antisense sequence
  source 1..20: mol_type = other RNA
cctgatagcttctttgctct

SEQ ID NO: 13268 - RNA, 20 nt, synthetic construct
  misc_feature 1..20: note = antisense sequence
  source 1..20: mol_type = other RNA
tcctgatagcttctttgctc

SEQ ID NO: 13269 - RNA, 20 nt, synthetic construct
  misc_feature 1..20: note = antisense sequence
  source 1..20: mol_type = other RNA
gaatcctgatagcttctttg

SEQ ID NO: 13270 - RNA, 20 nt, synthetic construct
  misc_feature 1..20: note = antisense sequence
  source 1..20: mol_type = other RNA
gaatgaatcctgatagcttc

SEQ ID NO: 13271 - RNA, 20 nt, synthetic construct
  misc_feature 1..20: note = antisense sequence
  source 1..20: mol_type = other RNA
gtgaatgaatcctgatagct

SEQ ID NO: 13272 - RNA, 20 nt, synthetic construct
  misc_feature 1..20: note = antisense sequence
  source 1..20: mol_type = other RNA
agtgaatgaatcctgatagc

SEQ ID NO: 13273 - RNA, 20 nt, synthetic construct
  misc_feature 1..20: note = antisense sequence
  source 1..20: mol_type = other RNA
ggtggagtgaatgaatcctg

SEQ ID NO: 13274 - RNA, 20 nt, synthetic construct
  misc_feature 1..20: note = antisense sequence
  source 1..20: mol_type = other RNA
tggtggagtgaatgaatcct

SEQ ID NO: 13275 - RNA, 20 nt, synthetic construct
  misc_feature 1..20: note = antisense sequence
  source 1..20: mol_type = other RNA
ggtcatttcaaaactgaggg

SEQ ID NO: 13276 - RNA, 20 nt, synthetic construct
  misc_feature 1..20: note = antisense sequence
  source 1..20: mol_type = other RNA
atctaagagttggagctact

SEQ ID NO: 13277 - RNA, 20 nt, synthetic construct
  misc_feature 1..20: note = antisense sequence
  source 1..20: mol_type = other RNA
tatctaagagttggagctac

SEQ ID NO: 13278 - RNA, 20 nt, synthetic construct
  misc_feature 1..20: note = antisense sequence
  source 1..20: mol_type = other RNA
agccttgtgggtttatttag

SEQ ID NO: 13279 - RNA, 20 nt, synthetic construct
  misc_feature 1..20: note = antisense sequence
  source 1..20: mol_type = other RNA
ctaaataagccttgtgggtt

SEQ ID NO: 13280 - RNA, 20 nt, synthetic construct
  misc_feature 1..20: note = antisense sequence
  source 1..20: mol_type = other RNA
cctaaataagccttgtgggt

SEQ ID NO: 13281 - RNA, 20 nt, synthetic construct
  misc_feature 1..20: note = antisense sequence
  source 1..20: mol_type = other RNA
agcctaaataagccttgtgg

SEQ ID NO: 13282 - RNA, 20 nt, synthetic construct
  misc_feature 1..20: note = antisense sequence
  source 1..20: mol_type = other RNA
cagcctaaataagccttgtg

SEQ ID NO: 13283 - RNA, 20 nt, synthetic construct
  misc_feature 1..20: note = antisense sequence
  source 1..20: mol_type = other RNA
cccagcctaaataagccttg

SEQ ID NO: 13284 - RNA, 20 nt, synthetic construct
  misc_feature 1..20: note = antisense sequence
  source 1..20: mol_type = other RNA
aagcctcccagcctaaataa

SEQ ID NO: 13285 - RNA, 20 nt, synthetic construct
  misc_feature 1..20: note = antisense sequence
  source 1..20: mol_type = other RNA
ctgataagcctcccagccta

SEQ ID NO: 13286 - RNA, 20 nt, synthetic construct
  misc_feature 1..20: note = antisense sequence
  source 1..20: mol_type = other RNA
agagctgataagcctcccag

SEQ ID NO: 13287 - RNA, 20 nt, synthetic construct
  misc_feature 1..20: note = antisense sequence
  source 1..20: mol_type = other RNA
cagagctgataagcctccca

SEQ ID NO: 13288 - RNA, 20 nt, synthetic construct
  misc_feature 1..20: note = antisense sequence
  source 1..20: mol_type = other RNA
gccagagctgataagcctcc

SEQ ID NO: 13289 - RNA, 20 nt, synthetic construct
  misc_feature 1..20: note = antisense sequence
  source 1..20: mol_type = other RNA
atctccaagccagagctgat

SEQ ID NO: 13290 - RNA, 20 nt, synthetic construct
  misc_feature 1..20: note = antisense sequence
  source 1..20: mol_type = other RNA
atctatctccaagccagagc

SEQ ID NO: 13291 - RNA, 20 nt, synthetic construct
  misc_feature 1..20: note = antisense sequence
  source 1..20: mol_type = other RNA
tatctatctccaagccagag

SEQ ID NO: 13292 - RNA, 20 nt, synthetic construct
  misc_feature 1..20: note = antisense sequence
  source 1..20: mol_type = other RNA
ttatctatctccaagccaga

SEQ ID NO: 13293 - RNA, 20 nt, synthetic construct
  misc_feature 1..20: note = antisense sequence
  source 1..20: mol_type = other RNA
attatctatctccaagccag

SEQ ID NO: 13294 - RNA, 20 nt, synthetic construct
  misc_feature 1..20: note = antisense sequence
  source 1..20: mol_type = other RNA
tatccgatttaactgctgag

SEQ ID NO: 13295 - RNA, 20 nt, synthetic construct
  misc_feature 1..20: note = antisense sequence
  source 1..20: mol_type = other RNA
ctatccgatttaactgctga

SEQ ID NO: 13296 - RNA, 20 nt, synthetic construct
  misc_feature 1..20: note = antisense sequence
  source 1..20: mol_type = other RNA
cctatccgatttaactgctg

SEQ ID NO: 13297 - RNA, 20 nt, synthetic construct
  misc_feature 1..20: note = antisense sequence
  source 1..20: mol_type = other RNA
ccctatccgatttaactgct

SEQ ID NO: 13298 - RNA, 20 nt, synthetic construct
  misc_feature 1..20: note = antisense sequence
  source 1..20: mol_type = other RNA
accctatccgatttaactgc

SEQ ID NO: 13299 - RNA, 20 nt, synthetic construct
  misc_feature 1..20: note = antisense sequence
  source 1..20: mol_type = other RNA
caccctatccgatttaactg

SEQ ID NO: 13300 - RNA, 20 nt, synthetic construct
  misc_feature 1..20: note = antisense sequence
  source 1..20: mol_type = other RNA
ccaccctatccgatttaact

SEQ ID NO: 13301 - RNA, 20 nt, synthetic construct
  misc_feature 1..20: note = antisense sequence
  source 1..20: mol_type = other RNA
tccaccctatccgatttaac

SEQ ID NO: 13302 - RNA, 20 nt, synthetic construct
  misc_feature 1..20: note = antisense sequence
  source 1..20: mol_type = other RNA
ctccaccctatccgatttaa

SEQ ID NO: 13303 - RNA, 20 nt, synthetic construct
  misc_feature 1..20: note = antisense sequence
  source 1..20: mol_type = other RNA
cctccaccctatccgattta

SEQ ID NO: 13304 - RNA, 20 nt, synthetic construct
  misc_feature 1..20: note = antisense sequence
  source 1..20: mol_type = other RNA
ccctccaccctatccgattt

SEQ ID NO: 13305 - RNA, 20 nt, synthetic construct
  misc_feature 1..20: note = antisense sequence
  source 1..20: mol_type = other RNA
tgttgctgccttgaaactca

SEQ ID NO: 13306 - RNA, 20 nt, synthetic construct
  misc_feature 1..20: note = antisense sequence
  source 1..20: mol_type = other RNA
gtgttgctgccttgaaactc

SEQ ID NO: 13307 - RNA, 20 nt, synthetic construct
  misc_feature 1..20: note = antisense sequence
  source 1..20: mol_type = other RNA
cagtgttgctgccttgaaac

SEQ ID NO: 13308 - RNA, 20 nt, synthetic construct
  misc_feature 1..20: note = antisense sequence
  source 1..20: mol_type = other RNA
gaagtatttcctggaagcct

SEQ ID NO: 13309 - RNA, 20 nt, synthetic construct
  misc_feature 1..20: note = antisense sequence
  source 1..20: mol_type = other RNA
gtgaagtatttcctggaagc

SEQ ID NO: 13310 - RNA, 20 nt, synthetic construct
  misc_feature 1..20: note = antisense sequence
  source 1..20: mol_type = other RNA
agtgaagtatttcctggaag

SEQ ID NO: 13311 - RNA, 20 nt, synthetic construct
  misc_feature 1..20: note = antisense sequence
  source 1..20: mol_type = other RNA
gcccagtgaagtatttcctg

SEQ ID NO: 13312 - RNA, 20 nt, synthetic construct
  misc_feature 1..20: note = antisense sequence
  source 1..20: mol_type = other RNA
cagcccagtgaagtatttcc

SEQ ID NO: 13313 - RNA, 20 nt, synthetic construct
  misc_feature 1..20: note = antisense sequence
  source 1..20: mol_type = other RNA
ccagcccagtgaagtatttc

SEQ ID NO: 13314 - RNA, 20 nt, synthetic construct
  misc_feature 1..20: note = antisense sequence
  source 1..20: mol_type = other RNA
tccagcccagtgaagtattt

SEQ ID NO: 13315 - RNA, 20 nt, synthetic construct
  misc_feature 1..20: note = antisense sequence
  source 1..20: mol_type = other RNA
ctccagcccagtgaagtatt

SEQ ID NO: 13316 - RNA, 20 nt, synthetic construct
  misc_feature 1..20: note = antisense sequence
  source 1..20: mol_type = other RNA
aaatctcactccagcccagt

SEQ ID NO: 13317 - RNA, 20 nt, synthetic construct
  misc_feature 1..20: note = antisense sequence
  source 1..20: mol_type = other RNA
caaaatctcactccagccca

SEQ ID NO: 13318 - RNA, 20 nt, synthetic construct
  misc_feature 1..20: note = antisense sequence
  source 1..20: mol_type = other RNA
ctaaagtcaggaacagaaga

SEQ ID NO: 13319 - RNA, 20 nt, synthetic construct
  misc_feature 1..20: note = antisense sequence
  source 1..20: mol_type = other RNA
gtctaaagtcaggaacagaa

SEQ ID NO: 13320 - RNA, 20 nt, synthetic construct
  misc_feature 1..20: note = antisense sequence
  source 1..20: mol_type = other RNA
tgtctaaagtcaggaacaga

SEQ ID NO: 13321 - RNA, 20 nt, synthetic construct
  misc_feature 1..20: note = antisense sequence
  source 1..20: mol_type = other RNA
atgtctaaagtcaggaacag

SEQ ID NO: 13322 - RNA, 20 nt, synthetic construct
  misc_feature 1..20: note = antisense sequence
  source 1..20: mol_type = other RNA
tgatgtctaaagtcaggaac

SEQ ID NO: 13323 - RNA, 20 nt, synthetic construct
  misc_feature 1..20: note = antisense sequence
  source 1..20: mol_type = other RNA
tagataaacactggctttgc

SEQ ID NO: 13324 - RNA, 20 nt, synthetic construct
  misc_feature 1..20: note = antisense sequence
  source 1..20: mol_type = other RNA
gataggaagaaagacacatg

SEQ ID NO: 13325 - RNA, 20 nt, synthetic construct
  misc_feature 1..20: note = antisense sequence
  source 1..20: mol_type = other RNA
agttgacaggaggaagccaa

SEQ ID NO: 13326 - RNA, 20 nt, synthetic construct
  misc_feature 1..20: note = antisense sequence
  source 1..20: mol_type = other RNA
aaaagttgacaggaggaagc

SEQ ID NO: 13327 - RNA, 20 nt, synthetic construct
  misc_feature 1..20: note = antisense sequence
  source 1..20: mol_type = other RNA
ggacaaaacagcccaggaca

SEQ ID NO: 13328 - RNA, 20 nt, synthetic construct
  misc_feature 1..20: note = antisense sequence
  source 1..20: mol_type = other RNA
aaggacaaaacagcccagga

SEQ ID NO: 13329 - RNA, 20 nt, synthetic construct
  misc_feature 1..20: note = antisense sequence
  source 1..20: mol_type = other RNA
agctgcctagagtggaagga

SEQ ID NO: 13330 - RNA, 20 nt, synthetic construct
  misc_feature 1..20: note = antisense sequence
  source 1..20: mol_type = other RNA
aagctgcctagagtggaagg

SEQ ID NO: 13331 - RNA, 20 nt, synthetic construct
  misc_feature 1..20: note = antisense sequence
  source 1..20: mol_type = other RNA
aaagctgcctagagtggaag

SEQ ID NO: 13332 - RNA, 20 nt, synthetic construct
  misc_feature 1..20: note = antisense sequence
  source 1..20: mol_type = other RNA
ctaaagctgcctagagtgga

SEQ ID NO: 13333 - RNA, 20 nt, synthetic construct
  misc_feature 1..20: note = antisense sequence
  source 1..20: mol_type = other RNA
tatcccttcttcacccaata

SEQ ID NO: 13334 - RNA, 20 nt, synthetic construct
  misc_feature 1..20: note = antisense sequence
  source 1..20: mol_type = other RNA
ctatcccttcttcacccaat

SEQ ID NO: 13335 - RNA, 20 nt, synthetic construct
  misc_feature 1..20: note = antisense sequence
  source 1..20: mol_type = other RNA
gccactatcccttcttcacc

SEQ ID NO: 13336 - RNA, 20 nt, synthetic construct
  misc_feature 1..20: note = antisense sequence
  source 1..20: mol_type = other RNA
tgccactatcccttcttcac

SEQ ID NO: 13337 - RNA, 20 nt, synthetic construct
  misc_feature 1..20: note = antisense sequence
  source 1..20: mol_type = other RNA
tgtgccactatcccttcttc

SEQ ID NO: 13338 - RNA, 20 nt, synthetic construct
  misc_feature 1..20: note = antisense sequence
  source 1..20: mol_type = other RNA
tttgtgccactatcccttct

SEQ ID NO: 13339 - RNA, 20 nt, synthetic construct
  misc_feature 1..20: note = antisense sequence
  source 1..20: mol_type = other RNA
atttgtgccactatcccttc

SEQ ID NO: 13340 - RNA, 20 nt, synthetic construct
  misc_feature 1..20: note = antisense sequence
  source 1..20: mol_type = other RNA
aatttgtgccactatccctt

SEQ ID NO: 13341 - RNA, 20 nt, synthetic construct
  misc_feature 1..20: note = antisense sequence
  source 1..20: mol_type = other RNA
taatttgtgccactatccct

SEQ ID NO: 13342 - RNA, 20 nt, synthetic construct
  misc_feature 1..20: note = antisense sequence
  source 1..20: mol_type = other RNA
ccttaatttgtgccactatc

SEQ ID NO: 13343 - RNA, 20 nt, synthetic construct
  misc_feature 1..20: note = antisense sequence
  source 1..20: mol_type = other RNA
gtagaagtgtgggagacata

SEQ ID NO: 13344 - RNA, 20 nt, synthetic construct
  misc_feature 1..20: note = antisense sequence
  source 1..20: mol_type = other RNA
atggtagaagtgtgggagac

SEQ ID NO: 13345 - RNA, 20 nt, synthetic construct
  misc_feature 1..20: note = antisense sequence
  source 1..20: mol_type = other RNA
gatggtagaagtgtgggaga

SEQ ID NO: 13346 - RNA, 20 nt, synthetic construct
  misc_feature 1..20: note = antisense sequence
  source 1..20: mol_type = other RNA
agatggtagaagtgtgggag

SEQ ID NO: 13347 - RNA, 20 nt, synthetic construct
  misc_feature 1..20: note = antisense sequence
  source 1..20: mol_type = other RNA
cagatggtagaagtgtggga

SEQ ID NO: 13348 - RNA, 20 nt, synthetic construct
  misc_feature 1..20: note = antisense sequence
  source 1..20: mol_type = other RNA
gcagatggtagaagtgtggg

SEQ ID NO: 13349 - RNA, 20 nt, synthetic construct
  misc_feature 1..20: note = antisense sequence
  source 1..20: mol_type = other RNA
agcagatggtagaagtgtgg

SEQ ID NO: 13350 - RNA, 20 nt, synthetic construct
  misc_feature 1..20: note = antisense sequence
  source 1..20: mol_type = other RNA
gagcagatggtagaagtgtg

SEQ ID NO: 13351 - RNA, 20 nt, synthetic construct
  misc_feature 1..20: note = antisense sequence
  source 1..20: mol_type = other RNA
agagcagatggtagaagtgt

SEQ ID NO: 13352 - RNA, 20 nt, synthetic construct
  misc_feature 1..20: note = antisense sequence
  source 1..20: mol_type = other RNA
tccaaagagcagatggtaga

SEQ ID NO: 13353 - RNA, 20 nt, synthetic construct
  misc_feature 1..20: note = antisense sequence
  source 1..20: mol_type = other RNA
agggattccaaagagcagat

SEQ ID NO: 13354 - RNA, 20 nt, synthetic construct
  misc_feature 1..20: note = antisense sequence
  source 1..20: mol_type = other RNA
gttagggattccaaagagca

SEQ ID NO: 13355 - RNA, 20 nt, synthetic construct
  misc_feature 1..20: note = antisense sequence
  source 1..20: mol_type = other RNA
agttagggattccaaagagc

SEQ ID NO: 13356 - RNA, 20 nt, synthetic construct
  misc_feature 1..20: note = antisense sequence
  source 1..20: mol_type = other RNA
aagttagggattccaaagag

SEQ ID NO: 13357 - RNA, 20 nt, synthetic construct
  misc_feature 1..20: note = antisense sequence
  source 1..20: mol_type = other RNA
gagtaaagttagggattcca

SEQ ID NO: 13358 - RNA, 20 nt, synthetic construct
  misc_feature 1..20: note = antisense sequence
  source 1..20: mol_type = other RNA
tctgagagtaaagttaggga

SEQ ID NO: 13359 - RNA, 20 nt, synthetic construct
  misc_feature 1..20: note = antisense sequence
  source 1..20: mol_type = other RNA
atctgagagtaaagttaggg

SEQ ID NO: 13360 - RNA, 20 nt, synthetic construct
  misc_feature 1..20: note = antisense sequence
  source 1..20: mol_type = other RNA
gcctatctgagagtaaagtt

SEQ ID NO: 13361 - RNA, 20 nt, synthetic construct
  misc_feature 1..20: note = antisense sequence
  source 1..20: mol_type = other RNA
gtgcctatctgagagtaaag

SEQ ID NO: 13362 - RNA, 20 nt, synthetic construct
  misc_feature 1..20: note = antisense sequence
  source 1..20: mol_type = other RNA
gtgtgcctatctgagagtaa

SEQ ID NO: 13363 - RNA, 20 nt, synthetic construct
  misc_feature 1..20: note = antisense sequence
  source 1..20: mol_type = other RNA
agtgtgcctatctgagagta

SEQ ID NO: 13364 - RNA, 20 nt, synthetic construct
  misc_feature 1..20: note = antisense sequence
  source 1..20: mol_type = other RNA
aagtgtgcctatctgagagt

SEQ ID NO: 13365 - RNA, 20 nt, synthetic construct
  misc_feature 1..20: note = antisense sequence
  source 1..20: mol_type = other RNA
aaagtgtgcctatctgagag

SEQ ID NO: 13366 - RNA, 20 nt, synthetic construct
  misc_feature 1..20: note = antisense sequence
  source 1..20: mol_type = other RNA
aaaagtgtgcctatctgaga

SEQ ID NO: 13367 - RNA, 20 nt, synthetic construct
  misc_feature 1..20: note = antisense sequence
  source 1..20: mol_type = other RNA
gtgctattaacagccatttg

SEQ ID NO: 13368 - RNA, 20 nt, synthetic construct
  misc_feature 1..20: note = antisense sequence
  source 1..20: mol_type = other RNA
cagtgctattaacagccatt

SEQ ID NO: 13369 - RNA, 20 nt, synthetic construct
  misc_feature 1..20: note = antisense sequence
  source 1..20: mol_type = other RNA
catcattactacagcagagt

SEQ ID NO: 13370 - RNA, 20 nt, synthetic construct
  misc_feature 1..20: note = antisense sequence
  source 1..20: mol_type = other RNA
ccatcattactacagcagag

SEQ ID NO: 13371 - RNA, 20 nt, synthetic construct
  misc_feature 1..20: note = antisense sequence
  source 1..20: mol_type = other RNA
tccatcattactacagcaga

SEQ ID NO: 13372 - RNA, 20 nt, synthetic construct
  misc_feature 1..20: note = antisense sequence
  source 1..20: mol_type = other RNA
ttccatcattactacagcag

SEQ ID NO: 13373 - RNA, 20 nt, synthetic construct
  misc_feature 1..20: note = antisense sequence
  source 1..20: mol_type = other RNA
ccttgtctggaagaaagata

SEQ ID NO: 13374 - RNA, 20 nt, synthetic construct
  misc_feature 1..20: note = antisense sequence
  source 1..20: mol_type = other RNA
accttgtctggaagaaagat

SEQ ID NO: 13375 - RNA, 20 nt, synthetic construct
  misc_feature 1..20: note = antisense sequence
  source 1..20: mol_type = other RNA
ttcaaaccttgtctggaaga

SEQ ID NO: 13376 - RNA, 20 nt, synthetic construct
  misc_feature 1..20: note = antisense sequence
  source 1..20: mol_type = other RNA
attcaaaccttgtctggaag

SEQ ID NO: 13377 - RNA, 20 nt, synthetic construct
  misc_feature 1..20: note = antisense sequence
  source 1..20: mol_type = other RNA
gatattcaaaccttgtctgg

SEQ ID NO: 13378 - RNA, 20 nt, synthetic construct
  misc_feature 1..20: note = antisense sequence
  source 1..20: mol_type = other RNA
ccaggctcatttgatattca

SEQ ID NO: 13379 - RNA, 20 nt, synthetic construct
  misc_feature 1..20: note = antisense sequence
  source 1..20: mol_type = other RNA
gttccaggctcatttgatat

SEQ ID NO: 13380 - RNA, 20 nt, synthetic construct
  misc_feature 1..20: note = antisense sequence
  source 1..20: mol_type = other RNA
ggttccaggctcatttgata

SEQ ID NO: 13381 - RNA, 20 nt, synthetic construct
  misc_feature 1..20: note = antisense sequence
  source 1..20: mol_type = other RNA
ataggttccaggctcatttg

SEQ ID NO: 13382 - RNA, 20 nt, synthetic construct
  misc_feature 1..20: note = antisense sequence
  source 1..20: mol_type = other RNA
aataggttccaggctcattt

SEQ ID NO: 13383 - RNA, 20 nt, synthetic construct
  misc_feature 1..20: note = antisense sequence
  source 1..20: mol_type = other RNA
taataggttccaggctcatt

SEQ ID NO: 13384 - RNA, 20 nt, synthetic construct
  misc_feature 1..20: note = antisense sequence
  source 1..20: mol_type = other RNA
ttaataggttccaggctcat

SEQ ID NO: 13385 - RNA, 20 nt, synthetic construct
  misc_feature 1..20: note = antisense sequence
  source 1..20: mol_type = other RNA
cttaataggttccaggctca

SEQ ID NO: 13386 - RNA, 20 nt, synthetic construct
  misc_feature 1..20: note = antisense sequence
  source 1..20: mol_type = other RNA
gcttaataggttccaggctc

SEQ ID NO: 13387 - RNA, 20 nt, synthetic construct
  misc_feature 1..20: note = antisense sequence
  source 1..20: mol_type = other RNA
tgcttaataggttccaggct

SEQ ID NO: 13388 - RNA, 20 nt, synthetic construct
  misc_feature 1..20: note = antisense sequence
  source 1..20: mol_type = other RNA
gtctgcttaataggttccag

SEQ ID NO: 13389 - RNA, 20 nt, synthetic construct
  misc_feature 1..20: note = antisense sequence
  source 1..20: mol_type = other RNA
cgtctgcttaataggttcca

SEQ ID NO: 13390 - RNA, 20 nt, synthetic construct
  misc_feature 1..20: note = antisense sequence
  source 1..20: mol_type = other RNA
acgtctgcttaataggttcc

SEQ ID NO: 13391 - RNA, 20 nt, synthetic construct
  misc_feature 1..20: note = antisense sequence
  source 1..20: mol_type = other RNA
cacgtctgcttaataggttc

SEQ ID NO: 13392 - RNA, 20 nt, synthetic construct
  misc_feature 1..20: note = antisense sequence
  source 1..20: mol_type = other RNA
gcacgtctgcttaataggtt

SEQ ID NO: 13393 - RNA, 20 nt, synthetic construct
  misc_feature 1..20: note = antisense sequence
  source 1..20: mol_type = other RNA
gagatgaacagcacgtctgc

SEQ ID NO: 13394 - RNA, 20 nt, synthetic construct
  misc_feature 1..20: note = antisense sequence
  source 1..20: mol_type = other RNA
cgagatgaacagcacgtctg

SEQ ID NO: 13395 - RNA, 20 nt, synthetic construct
  misc_feature 1..20: note = antisense sequence
  source 1..20: mol_type = other RNA
ccgagatgaacagcacgtct

SEQ ID NO: 13396 - RNA, 20 nt, synthetic construct
  misc_feature 1..20: note = antisense sequence
  source 1..20: mol_type = other RNA
gccgagatgaacagcacgtc

SEQ ID NO: 13397 - RNA, 20 nt, synthetic construct
  misc_feature 1..20: note = antisense sequence
  source 1..20: mol_type = other RNA
tgccgagatgaacagcacgt

SEQ ID NO: 13398 - RNA, 20 nt, synthetic construct
  misc_feature 1..20: note = antisense sequence
  source 1..20: mol_type = other RNA
ctgccgagatgaacagcacg

SEQ ID NO: 13399 - RNA, 20 nt, synthetic construct
  misc_feature 1..20: note = antisense sequence
  source 1..20: mol_type = other RNA
tgtgctgccgagatgaacag

SEQ ID NO: 13400 - RNA, 20 nt, synthetic construct
  misc_feature 1..20: note = antisense sequence
  source 1..20: mol_type = other RNA
ttgtgctgccgagatgaaca

SEQ ID NO: 13401 - RNA, 20 nt, synthetic construct
  misc_feature 1..20: note = antisense sequence
  source 1..20: mol_type = other RNA
attgtgctgccgagatgaac

SEQ ID NO: 13402 - RNA, 20 nt, synthetic construct
  misc_feature 1..20: note = antisense sequence
  source 1..20: mol_type = other RNA
aattgtgctgccgagatgaa

SEQ ID NO: 13403 - RNA, 20 nt, synthetic construct
  misc_feature 1..20: note = antisense sequence
  source 1..20: mol_type = other RNA
gaattgtgctgccgagatga

SEQ ID NO: 13404 - RNA, 20 nt, synthetic construct
  misc_feature 1..20: note = antisense sequence
  source 1..20: mol_type = other RNA
tgaattgtgctgccgagatg

SEQ ID NO: 13405 - RNA, 20 nt, synthetic construct
  misc_feature 1..20: note = antisense sequence
  source 1..20: mol_type = other RNA
atgaattgtgctgccgagat

SEQ ID NO: 13406 - RNA, 20 nt, synthetic construct
  misc_feature 1..20: note = antisense sequence
  source 1..20: mol_type = other RNA
catgaattgtgctgccgaga

SEQ ID NO: 13407 - RNA, 20 nt, synthetic construct
  misc_feature 1..20: note = antisense sequence
  source 1..20: mol_type = other RNA
gcatgaattgtgctgccgag

SEQ ID NO: 13408 - RNA, 20 nt, synthetic construct
  misc_feature 1..20: note = antisense sequence
  source 1..20: mol_type = other RNA
tgcatgaattgtgctgccga

SEQ ID NO: 13409 - RNA, 20 nt, synthetic construct
  misc_feature 1..20: note = antisense sequence
  source 1..20: mol_type = other RNA
gtgcatgaattgtgctgccg

SEQ ID NO: 13410 - RNA, 20 nt, synthetic construct
  misc_feature 1..20: note = antisense sequence
  source 1..20: mol_type = other RNA
tgtgcatgaattgtgctgcc

SEQ ID NO: 13411 - RNA, 20 nt, synthetic construct
  misc_feature 1..20: note = antisense sequence
  source 1..20: mol_type = other RNA
ttgtgcatgaattgtgctgc

SEQ ID NO: 13412 - RNA, 20 nt, synthetic construct
  misc_feature 1..20: note = antisense sequence
  source 1..20: mol_type = other RNA
tgttgtgcatgaattgtgct

SEQ ID NO: 13413 - RNA, 20 nt, synthetic construct
  misc_feature 1..20: note = antisense sequence
  source 1..20: mol_type = other RNA
tgcagttccaaaacgagccc

SEQ ID NO: 13414 - RNA, 20 nt, synthetic construct
  misc_feature 1..20: note = antisense sequence
  source 1..20: mol_type = other RNA
ttgcagttccaaaacgagcc

SEQ ID NO: 13415 - RNA, 20 nt, synthetic construct
  misc_feature 1..20: note = antisense sequence
  source 1..20: mol_type = other RNA
attgcagttccaaaacgagc

SEQ ID NO: 13416 - RNA, 20 nt, synthetic construct
  misc_feature 1..20: note = antisense sequence
  source 1..20: mol_type = other RNA
aattgcagttccaaaacgag

SEQ ID NO: 13417 - RNA, 20 nt, synthetic construct
  misc_feature 1..20: note = antisense sequence
  source 1..20: mol_type = other RNA
ttgaggtcttttacagcagc

SEQ ID NO: 13418 - RNA, 20 nt, synthetic construct
  misc_feature 1..20: note = antisense sequence
  source 1..20: mol_type = other RNA
attgaggtcttttacagcag

SEQ ID NO: 13419 - RNA, 20 nt, synthetic construct
  misc_feature 1..20: note = antisense sequence
  source 1..20: mol_type = other RNA
gattgaggtcttttacagca

SEQ ID NO: 13420 - RNA, 20 nt, synthetic construct
  misc_feature 1..20: note = antisense sequence
  source 1..20: mol_type = other RNA
agattgaggtcttttacagc

SEQ ID NO: 13421 - RNA, 20 nt, synthetic construct
  misc_feature 1..20: note = antisense sequence
  source 1..20: mol_type = other RNA
ctcctatcacgatgtcatta

SEQ ID NO: 13422 - RNA, 20 nt, synthetic construct
  misc_feature 1..20: note = antisense sequence
  source 1..20: mol_type = other RNA
gctcctatcacgatgtcatt

SEQ ID NO: 13423 - RNA, 20 nt, synthetic construct
  misc_feature 1..20: note = antisense sequence
  source 1..20: mol_type = other RNA
agctcctatcacgatgtcat

SEQ ID NO: 13424 - RNA, 20 nt, synthetic construct
  misc_feature 1..20: note = antisense sequence
  source 1..20: mol_type = other RNA
gatcatcttccagcggagct

SEQ ID NO: 13425 - RNA, 20 nt, synthetic construct
  misc_feature 1..20: note = antisense sequence
  source 1..20: mol_type = other RNA
tgccacttccatgataaatg

SEQ ID NO: 13426 - RNA, 20 nt, synthetic construct
  misc_feature 1..20: note = antisense sequence
  source 1..20: mol_type = other RNA
agtcttgccacttccatgat

SEQ ID NO: 13427 - RNA, 20 nt, synthetic construct
  misc_feature 1..20: note = antisense sequence
  source 1..20: mol_type = other RNA
atagtcttgccacttccatg

SEQ ID NO: 13428 - RNA, 20 nt, synthetic construct
  misc_feature 1..20: note = antisense sequence
  source 1..20: mol_type = other RNA
cttatagtcttgccacttcc

SEQ ID NO: 13429 - RNA, 20 nt, synthetic construct
  misc_feature 1..20: note = antisense sequence
  source 1..20: mol_type = other RNA
ccttatagtcttgccacttc

SEQ ID NO: 13430 - RNA, 20 nt, synthetic construct
  misc_feature 1..20: note = antisense sequence
  source 1..20: mol_type = other RNA
ttccttatagtcttgccact

SEQ ID NO: 13431 - RNA, 20 nt, synthetic construct
  misc_feature 1..20: note = antisense sequence
  source 1..20: mol_type = other RNA
tttccttatagtcttgccac

SEQ ID NO: 13432 - RNA, 20 nt, synthetic construct
  misc_feature 1..20: note = antisense sequence
  source 1..20: mol_type = other RNA
tctttccttatagtcttgcc

SEQ ID NO: 13433 - RNA, 20 nt, synthetic construct
  misc_feature 1..20: note = antisense sequence
  source 1..20: mol_type = other RNA
ctctttccttatagtcttgc

SEQ ID NO: 13434 - RNA, 20 nt, synthetic construct
  misc_feature 1..20: note = antisense sequence
  source 1..20: mol_type = other RNA
acttgtgcatactctttcct

SEQ ID NO: 13435 - RNA, 20 nt, synthetic construct
  misc_feature 1..20: note = antisense sequence
  source 1..20: mol_type = other RNA
tacttgtgcatactctttcc

SEQ ID NO: 13436 - RNA, 20 nt, synthetic construct
  misc_feature 1..20: note = antisense sequence
  source 1..20: mol_type = other RNA
tgggaatctgtaggtttcaa

SEQ ID NO: 13437 - RNA, 20 nt, synthetic construct
  misc_feature 1..20: note = antisense sequence
  source 1..20: mol_type = other RNA
gtgggaatctgtaggtttca

SEQ ID NO: 13438 - RNA, 20 nt, synthetic construct
  misc_feature 1..20: note = antisense sequence
  source 1..20: mol_type = other RNA
ggtgggaatctgtaggtttc

SEQ ID NO: 13439 - RNA, 20 nt, synthetic construct
  misc_feature 1..20: note = antisense sequence
  source 1..20: mol_type = other RNA
gggtgggaatctgtaggttt

SEQ ID NO: 13440 - RNA, 20 nt, synthetic construct
  misc_feature 1..20: note = antisense sequence
  source 1..20: mol_type = other RNA
agggtgggaatctgtaggtt

SEQ ID NO: 13441 - RNA, 20 nt, synthetic construct
  misc_feature 1..20: note = antisense sequence
  source 1..20: mol_type = other RNA
aagggtgggaatctgtaggt

SEQ ID NO: 13442 - RNA, 20 nt, synthetic construct
  misc_feature 1..20: note = antisense sequence
  source 1..20: mol_type = other RNA
gaagggtgggaatctgtagg

SEQ ID NO: 13443 - RNA, 20 nt, synthetic construct
  misc_feature 1..20: note = antisense sequence
  source 1..20: mol_type = other RNA
cttatcactgaagggtggga

SEQ ID NO: 13444 - RNA, 20 nt, synthetic construct
  misc_feature 1..20: note = antisense sequence
  source 1..20: mol_type = other RNA
acttatcactgaagggtggg

SEQ ID NO: 13445 - RNA, 20 nt, synthetic construct
  misc_feature 1..20: note = antisense sequence
  source 1..20: mol_type = other RNA
gacttatcactgaagggtgg

SEQ ID NO: 13446 - RNA, 20 nt, synthetic construct
  misc_feature 1..20: note = antisense sequence
  source 1..20: mol_type = other RNA
cgacttatcactgaagggtg

SEQ ID NO: 13447 - RNA, 20 nt, synthetic construct
  misc_feature 1..20: note = antisense sequence
  source 1..20: mol_type = other RNA
aaccgacttatcactgaagg

SEQ ID NO: 13448 - RNA, 20 nt, synthetic construct
  misc_feature 1..20: note = antisense sequence
  source 1..20: mol_type = other RNA
gaaccgacttatcactgaag

SEQ ID NO: 13449 - RNA, 20 nt, synthetic construct
  misc_feature 1..20: note = antisense sequence
  source 1..20: mol_type = other RNA
tgaaccgacttatcactgaa

SEQ ID NO: 13450 - RNA, 20 nt, synthetic construct
  misc_feature 1..20: note = antisense sequence
  source 1..20: mol_type = other RNA
attgaaccgacttatcactg

SEQ ID NO: 13451 - RNA, 20 nt, synthetic construct
  misc_feature 1..20: note = antisense sequence
  source 1..20: mol_type = other RNA
cattgaaccgacttatcact

SEQ ID NO: 13452 - RNA, 20 nt, synthetic construct
  misc_feature 1..20: note = antisense sequence
  source 1..20: mol_type = other RNA
gcattgaaccgacttatcac

SEQ ID NO: 13453 - RNA, 20 nt, synthetic construct
  misc_feature 1..20: note = antisense sequence
  source 1..20: mol_type = other RNA
ggcattgaaccgacttatca

SEQ ID NO: 13454 - RNA, 20 nt, synthetic construct
  misc_feature 1..20: note = antisense sequence
  source 1..20: mol_type = other RNA
tggcattgaaccgacttatc

SEQ ID NO: 13455 - RNA, 20 nt, synthetic construct
  misc_feature 1..20: note = antisense sequence
  source 1..20: mol_type = other RNA
ctggcattgaaccgacttat

SEQ ID NO: 13456 - RNA, 20 nt, synthetic construct
  misc_feature 1..20: note = antisense sequence
  source 1..20: mol_type = other RNA
cctggcattgaaccgactta

SEQ ID NO: 13457 - RNA, 20 nt, synthetic construct
  misc_feature 1..20: note = antisense sequence
  source 1..20: mol_type = other RNA
gcctggcattgaaccgactt

SEQ ID NO: 13458 - RNA, 20 nt, synthetic construct
  misc_feature 1..20: note = antisense sequence
  source 1..20: mol_type = other RNA
tgcctggcattgaaccgact

SEQ ID NO: 13459 - RNA, 20 nt, synthetic construct
  misc_feature 1..20: note = antisense sequence
  source 1..20: mol_type = other RNA
aagttagacaggtaatgcct

SEQ ID NO: 13460 - RNA, 20 nt, synthetic construct
  misc_feature 1..20: note = antisense sequence
  source 1..20: mol_type = other RNA
gaagttagacaggtaatgcc

SEQ ID NO: 13461 - RNA, 20 nt, synthetic construct
  misc_feature 1..20: note = antisense sequence
  source 1..20: mol_type = other RNA
aggtcaggaggaagaaatta

SEQ ID NO: 13462 - RNA, 20 nt, synthetic construct
  misc_feature 1..20: note = antisense sequence
  source 1..20: mol_type = other RNA
aaggtcaggaggaagaaatt

SEQ ID NO: 13463 - RNA, 20 nt, synthetic construct
  misc_feature 1..20: note = antisense sequence
  source 1..20: mol_type = other RNA
ataaggtcaggaggaagaaa

SEQ ID NO: 13464 - RNA, 20 nt, synthetic construct
  misc_feature 1..20: note = antisense sequence
  source 1..20: mol_type = other RNA
caataaggtcaggaggaaga

SEQ ID NO: 13465 - RNA, 20 nt, synthetic construct
  misc_feature 1..20: note = antisense sequence
  source 1..20: mol_type = other RNA
ccaataaggtcaggaggaag

SEQ ID NO: 13466 - RNA, 20 nt, synthetic construct
  misc_feature 1..20: note = antisense sequence
  source 1..20: mol_type = other RNA
cccaataaggtcaggaggaa

SEQ ID NO: 13467 - RNA, 20 nt, synthetic construct
  misc_feature 1..20: note = antisense sequence
  source 1..20: mol_type = other RNA
tcccaataaggtcaggagga

SEQ ID NO: 13468 - RNA, 20 nt, synthetic construct
  misc_feature 1..20: note = antisense sequence
  source 1..20: mol_type = other RNA
ttcccaataaggtcaggagg

SEQ ID NO: 13469 - RNA, 20 nt, synthetic construct
  misc_feature 1..20: note = antisense sequence
  source 1..20: mol_type = other RNA
cagtttcccaataaggtcag

SEQ ID NO: 13470 - RNA, 20 nt, synthetic construct
  misc_feature 1..20: note = antisense sequence
  source 1..20: mol_type = other RNA
aatccagtttcccaataagg

SEQ ID NO: 13471 - RNA, 20 nt, synthetic construct
  misc_feature 1..20: note = antisense sequence
  source 1..20: mol_type = other RNA
cacacacacacacactatat

SEQ ID NO: 13472 - RNA, 20 nt, synthetic construct
  misc_feature 1..20: note = antisense sequence
  source 1..20: mol_type = other RNA
acacacacacacacactata

SEQ ID NO: 13473 - RNA, 20 nt, synthetic construct
  misc_feature 1..20: note = antisense sequence
  source 1..20: mol_type = other RNA
cacacacacacacacactat

SEQ ID NO: 13474 - RNA, 20 nt, synthetic construct
  misc_feature 1..20: note = antisense sequence
  source 1..20: mol_type = other RNA
acacacacacacacacacta

SEQ ID NO: 13475 - RNA, 20 nt, synthetic construct
  misc_feature 1..20: note = antisense sequence
  source 1..20: mol_type = other RNA
cacacacacacacacacact

SEQ ID NO: 13476 - RNA, 20 nt, synthetic construct
  misc_feature 1..20: note = antisense sequence
  source 1..20: mol_type = other RNA
acacacacacacacacacac

SEQ ID NO: 13477 - RNA, 20 nt, synthetic construct
  misc_feature 1..20: note = antisense sequence
  source 1..20: mol_type = other RNA
cacacacacacacacacaca

SEQ ID NO: 13478 - RNA, 20 nt, synthetic construct
  misc_feature 1..20: note = antisense sequence
  source 1..20: mol_type = other RNA
acacacacacacacacacac

SEQ ID NO: 13479 - RNA, 20 nt, synthetic construct
  misc_feature 1..20: note = antisense sequence
  source 1..20: mol_type = other RNA
cacacacacacacacacaca

SEQ ID NO: 13480 - RNA, 20 nt, synthetic construct
  misc_feature 1..20: note = antisense sequence
  source 1..20: mol_type = other RNA
acacacacacacacacacac

SEQ ID NO: 13481 - RNA, 20 nt, synthetic construct
  misc_feature 1..20: note = antisense sequence
  source 1..20: mol_type = other RNA
cacacacacacacacacaca

SEQ ID NO: 13482 - RNA, 20 nt, synthetic construct
  misc_feature 1..20: note = antisense sequence
  source 1..20: mol_type = other RNA
acacacacacacacacacac

SEQ ID NO: 13483 - RNA, 20 nt, synthetic construct
  misc_feature 1..20: note = antisense sequence
  source 1..20: mol_type = other RNA
aagctgagatcgtgccactg

SEQ ID NO: 13484 - RNA, 20 nt, synthetic construct
  misc_feature 1..20: note = antisense sequence
  source 1..20: mol_type = other RNA
ggagcgtgcagtaagctgag

SEQ ID NO: 13485 - RNA, 20 nt, synthetic construct
  misc_feature 1..20: note = antisense sequence
  source 1..20: mol_type = other RNA
tggagcgtgcagtaagctga

SEQ ID NO: 13486 - RNA, 20 nt, synthetic construct
  misc_feature 1..20: note = antisense sequence
  source 1..20: mol_type = other RNA
ggtggagcgtgcagtaagct

SEQ ID NO: 13487 - RNA, 20 nt, synthetic construct
  misc_feature 1..20: note = antisense sequence
  source 1..20: mol_type = other RNA
tggctaacacggtgaaaccc

SEQ ID NO: 13488 - RNA, 20 nt, synthetic construct
  misc_feature 1..20: note = antisense sequence
  source 1..20: mol_type = other RNA
ctggctaacacggtgaaacc

SEQ ID NO: 13489 - RNA, 20 nt, synthetic construct
  misc_feature 1..20: note = antisense sequence
  source 1..20: mol_type = other RNA
cctggctaacacggtgaaac

SEQ ID NO: 13490 - RNA, 20 nt, synthetic construct
  misc_feature 1..20: note = antisense sequence
  source 1..20: mol_type = other RNA
acactttgggaggccgaggt

SEQ ID NO: 13491 - RNA, 20 nt, synthetic construct
  misc_feature 1..20: note = antisense sequence
  source 1..20: mol_type = other RNA
aacactttgggaggccgagg

SEQ ID NO: 13492 - RNA, 20 nt, synthetic construct
  misc_feature 1..20: note = antisense sequence
  source 1..20: mol_type = other RNA
caacactttgggaggccgag

SEQ ID NO: 13493 - RNA, 20 nt, synthetic construct
  misc_feature 1..20: note = antisense sequence
  source 1..20: mol_type = other RNA
cctgtaatcccaacactttg

SEQ ID NO: 13494 - RNA, 20 nt, synthetic construct
  misc_feature 1..20: note = antisense sequence
  source 1..20: mol_type = other RNA
gcctgtaatcccaacacttt

SEQ ID NO: 13495 - RNA, 20 nt, synthetic construct
  misc_feature 1..20: note = antisense sequence
  source 1..20: mol_type = other RNA
cgcctgtaatcccaacactt

SEQ ID NO: 13496 - RNA, 20 nt, synthetic construct
  misc_feature 1..20: note = antisense sequence
  source 1..20: mol_type = other RNA
acgcctgtaatcccaacact

SEQ ID NO: 13497 - RNA, 20 nt, synthetic construct
  misc_feature 1..20: note = antisense sequence
  source 1..20: mol_type = other RNA
cacgcctgtaatcccaacac

SEQ ID NO: 13498 - RNA, 20 nt, synthetic construct
  misc_feature 1..20: note = antisense sequence
  source 1..20: mol_type = other RNA
tcacgcctgtaatcccaaca

SEQ ID NO: 13499 - RNA, 20 nt, synthetic construct
  misc_feature 1..20: note = antisense sequence
  source 1..20: mol_type = other RNA
ctcacgcctgtaatcccaac

SEQ ID NO: 13500 - RNA, 20 nt, synthetic construct
  misc_feature 1..20: note = antisense sequence
  source 1..20: mol_type = other RNA
gctcacgcctgtaatcccaa

SEQ ID NO: 13501 - RNA, 20 nt, synthetic construct
  misc_feature 1..20: note = antisense sequence
  source 1..20: mol_type = other RNA
ggctcacgcctgtaatccca

SEQ ID NO: 13502 - RNA, 20 nt, synthetic construct
  misc_feature 1..20: note = antisense sequence
  source 1..20: mol_type = other RNA
tggctcacgcctgtaatccc

SEQ ID NO: 13503 - RNA, 20 nt, synthetic construct
  misc_feature 1..20: note = antisense sequence
  source 1..20: mol_type = other RNA
gtggctcacgcctgtaatcc

SEQ ID NO: 13504 - RNA, 20 nt, synthetic construct
  misc_feature 1..20: note = antisense sequence
  source 1..20: mol_type = other RNA
ggtggctcacgcctgtaatc

SEQ ID NO: 13505 - RNA, 20 nt, synthetic construct
  misc_feature 1..20: note = antisense sequence
  source 1..20: mol_type = other RNA
cggtggctcacgcctgtaat

SEQ ID NO: 13506 - RNA, 20 nt, synthetic construct
  misc_feature 1..20: note = antisense sequence
  source 1..20: mol_type = other RNA
agtcaaatcctggagatatg

SEQ ID NO: 13507 - RNA, 20 nt, synthetic construct
  misc_feature 1..20: note = antisense sequence
  source 1..20: mol_type = other RNA
gaacgggacacactaaatgt

SEQ ID NO: 13508 - RNA, 20 nt, synthetic construct
  misc_feature 1..20: note = antisense sequence
  source 1..20: mol_type = other RNA
agaacgggacacactaaatg

SEQ ID NO: 13509 - RNA, 20 nt, synthetic construct
  misc_feature 1..20: note = antisense sequence
  source 1..20: mol_type = other RNA
tagaacgggacacactaaat

SEQ ID NO: 13510 - RNA, 20 nt, synthetic construct
  misc_feature 1..20: note = antisense sequence
  source 1..20: mol_type = other RNA
atttagaacgggacacacta

SEQ ID NO: 13511 - RNA, 20 nt, synthetic construct
  misc_feature 1..20: note = antisense sequence
  source 1..20: mol_type = other RNA
tatttagaacgggacacact

SEQ ID NO: 13512 - RNA, 20 nt, synthetic construct
  misc_feature 1..20: note = antisense sequence
  source 1..20: mol_type = other RNA
ctatttagaacgggacacac

SEQ ID NO: 13513 - RNA, 20 nt, synthetic construct
  misc_feature 1..20: note = antisense sequence
  source 1..20: mol_type = other RNA
tctatttagaacgggacaca

SEQ ID NO: 13514 - RNA, 20 nt, synthetic construct
  misc_feature 1..20: note = antisense sequence
  source 1..20: mol_type = other RNA
ctctatttagaacgggacac

SEQ ID NO: 13515 - RNA, 20 nt, synthetic construct
  misc_feature 1..20: note = antisense sequence
  source 1..20: mol_type = other RNA
cctctatttagaacgggaca

SEQ ID NO: 13516 - RNA, 20 nt, synthetic construct
  misc_feature 1..20: note = antisense sequence
  source 1..20: mol_type = other RNA
ccctctatttagaacgggac

SEQ ID NO: 13517 - RNA, 20 nt, synthetic construct
  misc_feature 1..20: note = antisense sequence
  source 1..20: mol_type = other RNA
gccctctatttagaacggga

SEQ ID NO: 13518 - RNA, 20 nt, synthetic construct
  misc_feature 1..20: note = antisense sequence
  source 1..20: mol_type = other RNA
tgccctctatttagaacggg

SEQ ID NO: 13519 - RNA, 20 nt, synthetic construct
  misc_feature 1..20: note = antisense sequence
  source 1..20: mol_type = other RNA
gtgccctctatttagaacgg

SEQ ID NO: 13520 - RNA, 20 nt, synthetic construct
  misc_feature 1..20: note = antisense sequence
  source 1..20: mol_type = other RNA
agtgccctctatttagaacg

SEQ ID NO: 13521 - RNA, 20 nt, synthetic construct
  misc_feature 1..20: note = antisense sequence
  source 1..20: mol_type = other RNA
cagtgccctctatttagaac

SEQ ID NO: 13522 - RNA, 20 nt, synthetic construct
  misc_feature 1..20: note = antisense sequence
  source 1..20: mol_type = other RNA
gcagtgccctctatttagaa

SEQ ID NO: 13523 - RNA, 20 nt, synthetic construct
  misc_feature 1..20: note = antisense sequence
  source 1..20: mol_type = other RNA
agcagtgccctctatttaga

SEQ ID NO: 13524 - RNA, 20 nt, synthetic construct
  misc_feature 1..20: note = antisense sequence
  source 1..20: mol_type = other RNA
aagcagtgccctctatttag

SEQ ID NO: 13525 - RNA, 20 nt, synthetic construct
  misc_feature 1..20: note = antisense sequence
  source 1..20: mol_type = other RNA
aaagcagtgccctctattta

SEQ ID NO: 13526 - RNA, 20 nt, synthetic construct
  misc_feature 1..20: note = antisense sequence
  source 1..20: mol_type = other RNA
gaaagcagtgccctctattt

SEQ ID NO: 13527 - RNA, 20 nt, synthetic construct
  misc_feature 1..20: note = antisense sequence
  source 1..20: mol_type = other RNA
attcagaaagcagtgccctc

SEQ ID NO: 13528 - RNA, 20 nt, synthetic construct
  misc_feature 1..20: note = antisense sequence
  source 1..20: mol_type = other RNA
ttgccttattcagaaagcag

SEQ ID NO: 13529 - RNA, 20 nt, synthetic construct
  misc_feature 1..20: note = antisense sequence
  source 1..20: mol_type = other RNA
ctaaggattacttgcgagaa

SEQ ID NO: 13530 - RNA, 20 nt, synthetic construct
  misc_feature 1..20: note = antisense sequence
  source 1..20: mol_type = other RNA
tctaaggattacttgcgaga

SEQ ID NO: 13531 - RNA, 20 nt, synthetic construct
  misc_feature 1..20: note = antisense sequence
  source 1..20: mol_type = other RNA
ttctaaggattacttgcgag

SEQ ID NO: 13532 - RNA, 20 nt, synthetic construct
  misc_feature 1..20: note = antisense sequence
  source 1..20: mol_type = other RNA
gaataacagaagttccctgc

SEQ ID NO: 13533 - RNA, 20 nt, synthetic construct
  misc_feature 1..20: note = antisense sequence
  source 1..20: mol_type = other RNA
cacttatggattagagctgt

SEQ ID NO: 13534 - RNA, 20 nt, synthetic construct
  misc_feature 1..20: note = antisense sequence
  source 1..20: mol_type = other RNA
acacttatggattagagctg

SEQ ID NO: 13535 - RNA, 20 nt, synthetic construct
  misc_feature 1..20: note = antisense sequence
  source 1..20: mol_type = other RNA
gagagcagacaattacattc

SEQ ID NO: 13536 - RNA, 20 nt, synthetic construct
  misc_feature 1..20: note = antisense sequence
  source 1..20: mol_type = other RNA
gattacttgagagcagacaa

SEQ ID NO: 13537 - RNA, 20 nt, synthetic construct
  misc_feature 1..20: note = antisense sequence
  source 1..20: mol_type = other RNA
tgattacttgagagcagaca

SEQ ID NO: 13538 - RNA, 20 nt, synthetic construct
  misc_feature 1..20: note = antisense sequence
  source 1..20: mol_type = other RNA
atgattacttgagagcagac

SEQ ID NO: 13539 - RNA, 20 nt, synthetic construct
  misc_feature 1..20: note = antisense sequence
  source 1..20: mol_type = other RNA
ctatgattacttgagagcag

SEQ ID NO: 13540 - RNA, 20 nt, synthetic construct
  misc_feature 1..20: note = antisense sequence
  source 1..20: mol_type = other RNA
tgactacagaaccaaagaga

SEQ ID NO: 13541 - RNA, 20 nt, synthetic construct
  misc_feature 1..20: note = antisense sequence
  source 1..20: mol_type = other RNA
ttgactacagaaccaaagag

SEQ ID NO: 13542 - RNA, 20 nt, synthetic construct
  misc_feature 1..20: note = antisense sequence
  source 1..20: mol_type = other RNA
caaatggatacaagtgctct

SEQ ID NO: 13543 - RNA, 20 nt, synthetic construct
  misc_feature 1..20: note = antisense sequence
  source 1..20: mol_type = other RNA
tcaaatggatacaagtgctc

SEQ ID NO: 13544 - RNA, 20 nt, synthetic construct
  misc_feature 1..20: note = antisense sequence
  source 1..20: mol_type = other RNA
gcctgtctcttgttaagtaa

SEQ ID NO: 13545 - RNA, 20 nt, synthetic construct
  misc_feature 1..20: note = antisense sequence
  source 1..20: mol_type = other RNA
tcctgcatttcctaattcca

SEQ ID NO: 13546 - RNA, 20 nt, synthetic construct
  misc_feature 1..20: note = antisense sequence
  source 1..20: mol_type = other RNA
ttcctgcatttcctaattcc

SEQ ID NO: 13547 - RNA, 20 nt, synthetic construct
  misc_feature 1..20: note = antisense sequence
  source 1..20: mol_type = other RNA
ggattgatgctgaaggaata

SEQ ID NO: 13548 - RNA, 20 nt, synthetic construct
  misc_feature 1..20: note = antisense sequence
  source 1..20: mol_type = other RNA
acaggattgatgctgaagga

SEQ ID NO: 13549 - RNA, 20 nt, synthetic construct
  misc_feature 1..20: note = antisense sequence
  source 1..20: mol_type = other RNA
tacaggattgatgctgaagg

SEQ ID NO: 13550 - RNA, 20 nt, synthetic construct
  misc_feature 1..20: note = antisense sequence
  source 1..20: mol_type = other RNA
ttacaggattgatgctgaag

SEQ ID NO: 13551 - RNA, 20 nt, synthetic construct
  misc_feature 1..20: note = antisense sequence
  source 1..20: mol_type = other RNA
tcttcacctattccttggaa

SEQ ID NO: 13552 - RNA, 20 nt, synthetic construct
  misc_feature 1..20: note = antisense sequence
  source 1..20: mol_type = other RNA
tgagtaagcacatcttcacc

SEQ ID NO: 13553 - RNA, 20 nt, synthetic construct
  misc_feature 1..20: note = antisense sequence
  source 1..20: mol_type = other RNA
ggaaatgagtaagcacatct

SEQ ID NO: 13554 - RNA, 20 nt, synthetic construct
  misc_feature 1..20: note = antisense sequence
  source 1..20: mol_type = other RNA
tggaaatgagtaagcacatc

SEQ ID NO: 13555 - RNA, 20 nt, synthetic construct
  misc_feature 1..20: note = antisense sequence
  source 1..20: mol_type = other RNA
catctctggttctcatggaa

SEQ ID NO: 13556 - RNA, 20 nt, synthetic construct
  misc_feature 1..20: note = antisense sequence
  source 1..20: mol_type = other RNA
aagcagcatctctggttctc

SEQ ID NO: 13557 - RNA, 20 nt, synthetic construct
  misc_feature 1..20: note = antisense sequence
  source 1..20: mol_type = other RNA
acataagcagcatctctggt

SEQ ID NO: 13558 - RNA, 20 nt, synthetic construct
  misc_feature 1..20: note = antisense sequence
  source 1..20: mol_type = other RNA
atacataagcagcatctctg

SEQ ID NO: 13559 - RNA, 20 nt, synthetic construct
  misc_feature 1..20: note = antisense sequence
  source 1..20: mol_type = other RNA
ccatacataagcagcatctc

SEQ ID NO: 13560 - RNA, 20 nt, synthetic construct
  misc_feature 1..20: note = antisense sequence
  source 1..20: mol_type = other RNA
cccatacataagcagcatct

SEQ ID NO: 13561 - RNA, 20 nt, synthetic construct
  misc_feature 1..20: note = antisense sequence
  source 1..20: mol_type = other RNA
tccttggttctatgggcttg

SEQ ID NO: 13562 - RNA, 20 nt, synthetic construct
  misc_feature 1..20: note = antisense sequence
  source 1..20: mol_type = other RNA
ctccttggttctatgggctt

SEQ ID NO: 13563 - RNA, 20 nt, synthetic construct
  misc_feature 1..20: note = antisense sequence
  source 1..20: mol_type = other RNA
gactccttggttctatgggc

SEQ ID NO: 13564 - RNA, 20 nt, synthetic construct
  misc_feature 1..20: note = antisense sequence
  source 1..20: mol_type = other RNA
tgactccttggttctatggg

SEQ ID NO: 13565 - RNA, 20 nt, synthetic construct
  misc_feature 1..20: note = antisense sequence
  source 1..20: mol_type = other RNA
tctgactccttggttctatg

SEQ ID NO: 13566 - RNA, 20 nt, synthetic construct
  misc_feature 1..20: note = antisense sequence
  source 1..20: mol_type = other RNA
atctgactccttggttctat

SEQ ID NO: 13567 - RNA, 20 nt, synthetic construct
  misc_feature 1..20: note = antisense sequence
  source 1..20: mol_type = other RNA
atatctgactccttggttct

SEQ ID NO: 13568 - RNA, 20 nt, synthetic construct
  misc_feature 1..20: note = antisense sequence
  source 1..20: mol_type = other RNA
ccagcaatcctcctcatttt

SEQ ID NO: 13569 - RNA, 20 nt, synthetic construct
  misc_feature 1..20: note = antisense sequence
  source 1..20: mol_type = other RNA
acccagcaatcctcctcatt

SEQ ID NO: 13570 - RNA, 20 nt, synthetic construct
  misc_feature 1..20: note = antisense sequence
  source 1..20: mol_type = other RNA
cacccagcaatcctcctcat

SEQ ID NO: 13571 - RNA, 20 nt, synthetic construct
  misc_feature 1..20: note = antisense sequence
  source 1..20: mol_type = other RNA
gcacccagcaatcctcctca

SEQ ID NO: 13572 - RNA, 20 nt, synthetic construct
  misc_feature 1..20: note = antisense sequence
  source 1..20: mol_type = other RNA
tacaggcatgagccaccgca

SEQ ID NO: 13573 - RNA, 20 nt, synthetic construct
  misc_feature 1..20: note = antisense sequence
  source 1..20: mol_type = other RNA
ttacaggcatgagccaccgc

SEQ ID NO: 13574 - RNA, 20 nt, synthetic construct
  misc_feature 1..20: note = antisense sequence
  source 1..20: mol_type = other RNA
attacaggcatgagccaccg

SEQ ID NO: 13575 - RNA, 20 nt, synthetic construct
  misc_feature 1..20: note = antisense sequence
  source 1..20: mol_type = other RNA
gattacaggcatgagccacc

SEQ ID NO: 13576 - RNA, 20 nt, synthetic construct
  misc_feature 1..20: note = antisense sequence
  source 1..20: mol_type = other RNA
ggattacaggcatgagccac

SEQ ID NO: 13577 - RNA, 20 nt, synthetic construct
  misc_feature 1..20: note = antisense sequence
  source 1..20: mol_type = other RNA
gggattacaggcatgagcca

SEQ ID NO: 13578 - RNA, 20 nt, synthetic construct
  misc_feature 1..20: note = antisense sequence
  source 1..20: mol_type = other RNA
tgggattacaggcatgagcc

SEQ ID NO: 13579 - RNA, 20 nt, synthetic construct
  misc_feature 1..20: note = antisense sequence
  source 1..20: mol_type = other RNA
ctgggattacaggcatgagc

SEQ ID NO: 13580 - RNA, 20 nt, synthetic construct
  misc_feature 1..20: note = antisense sequence
  source 1..20: mol_type = other RNA
gctgggattacaggcatgag

SEQ ID NO: 13581 - RNA, 20 nt, synthetic construct
  misc_feature 1..20: note = antisense sequence
  source 1..20: mol_type = other RNA
tgctgggattacaggcatga

SEQ ID NO: 13582 - RNA, 20 nt, synthetic construct
  misc_feature 1..20: note = antisense sequence
  source 1..20: mol_type = other RNA
gtgctgggattacaggcatg

SEQ ID NO: 13583 - RNA, 20 nt, synthetic construct
  misc_feature 1..20: note = antisense sequence
  source 1..20: mol_type = other RNA
agtgctgggattacaggcat

SEQ ID NO: 13584 - RNA, 20 nt, synthetic construct
  misc_feature 1..20: note = antisense sequence
  source 1..20: mol_type = other RNA
aagtgctgggattacaggca

SEQ ID NO: 13585 - RNA, 20 nt, synthetic construct
  misc_feature 1..20: note = antisense sequence
  source 1..20: mol_type = other RNA
aaagtgctgggattacaggc

SEQ ID NO: 13586 - RNA, 20 nt, synthetic construct
  misc_feature 1..20: note = antisense sequence
  source 1..20: mol_type = other RNA
caaagtgctgggattacagg

SEQ ID NO: 13587 - RNA, 20 nt, synthetic construct
  misc_feature 1..20: note = antisense sequence
  source 1..20: mol_type = other RNA
ccaaagtgctgggattacag

SEQ ID NO: 13588 - RNA, 20 nt, synthetic construct
  misc_feature 1..20: note = antisense sequence
  source 1..20: mol_type = other RNA
ctcgaactcctggcctcatg

SEQ ID NO: 13589 - RNA, 20 nt, synthetic construct
  misc_feature 1..20: note = antisense sequence
  source 1..20: mol_type = other RNA
tctcgaactcctggcctcat

SEQ ID NO: 13590 - RNA, 20 nt, synthetic construct
  misc_feature 1..20: note = antisense sequence
  source 1..20: mol_type = other RNA
gtctcgaactcctggcctca

SEQ ID NO: 13591 - RNA, 20 nt, synthetic construct
  misc_feature 1..20: note = antisense sequence
  source 1..20: mol_type = other RNA
tggtctcgaactcctggcct

SEQ ID NO: 13592 - RNA, 20 nt, synthetic construct
  misc_feature 1..20: note = antisense sequence
  source 1..20: mol_type = other RNA
aggctggtctcgaactcctg

SEQ ID NO: 13593 - RNA, 20 nt, synthetic construct
  misc_feature 1..20: note = antisense sequence
  source 1..20: mol_type = other RNA
caggctggtctcgaactcct

SEQ ID NO: 13594 - RNA, 20 nt, synthetic construct
  misc_feature 1..20: note = antisense sequence
  source 1..20: mol_type = other RNA
agctgggattacaggtgcgc

SEQ ID NO: 13595 - RNA, 20 nt, synthetic construct
  misc_feature 1..20: note = antisense sequence
  source 1..20: mol_type = other RNA
tagctgggattacaggtgcg

SEQ ID NO: 13596 - RNA, 20 nt, synthetic construct
  misc_feature 1..20: note = antisense sequence
  source 1..20: mol_type = other RNA
atagctgggattacaggtgc

SEQ ID NO: 13597 - RNA, 20 nt, synthetic construct
  misc_feature 1..20: note = antisense sequence
  source 1..20: mol_type = other RNA
aatagctgggattacaggtg

SEQ ID NO: 13598 - RNA, 20 nt, synthetic construct
  misc_feature 1..20: note = antisense sequence
  source 1..20: mol_type = other RNA
gaatagctgggattacaggt

SEQ ID NO: 13599 - RNA, 20 nt, synthetic construct
  misc_feature 1..20: note = antisense sequence
  source 1..20: mol_type = other RNA
attctcctgcctctgcctcc

SEQ ID NO: 13600 - RNA, 20 nt, synthetic construct
  misc_feature 1..20: note = antisense sequence
  source 1..20: mol_type = other RNA
gattctcctgcctctgcctc

SEQ ID NO: 13601 - RNA, 20 nt, synthetic construct
  misc_feature 1..20: note = antisense sequence
  source 1..20: mol_type = other RNA
tgattctcctgcctctgcct

SEQ ID NO: 13602 - RNA, 20 nt, synthetic construct
  misc_feature 1..20: note = antisense sequence
  source 1..20: mol_type = other RNA
gtgattctcctgcctctgcc

SEQ ID NO: 13603 - RNA, 20 nt, synthetic construct
  misc_feature 1..20: note = antisense sequence
  source 1..20: mol_type = other RNA
agtgattctcctgcctctgc

SEQ ID NO: 13604 - RNA, 20 nt, synthetic construct
  misc_feature 1..20: note = antisense sequence
  source 1..20: mol_type = other RNA
aagtgattctcctgcctctg

SEQ ID NO: 13605 - RNA, 20 nt, synthetic construct
  misc_feature 1..20: note = antisense sequence
  source 1..20: mol_type = other RNA
caagtgattctcctgcctct

SEQ ID NO: 13606 - RNA, 20 nt, synthetic construct
  misc_feature 1..20: note = antisense sequence
  source 1..20: mol_type = other RNA
tcaagtgattctcctgcctc

SEQ ID NO: 13607 - RNA, 20 nt, synthetic construct
  misc_feature 1..20: note = antisense sequence
  source 1..20: mol_type = other RNA
ttcaagtgattctcctgcct

SEQ ID NO: 13608 - RNA, 20 nt, synthetic construct
  misc_feature 1..20: note = antisense sequence
  source 1..20: mol_type = other RNA
gttcaagtgattctcctgcc

SEQ ID NO: 13609 - RNA, 20 nt, synthetic construct
  misc_feature 1..20: note = antisense sequence
  source 1..20: mol_type = other RNA
ggttcaagtgattctcctgc

SEQ ID NO: 13610 - RNA, 20 nt, synthetic construct
  misc_feature 1..20: note = antisense sequence
  source 1..20: mol_type = other RNA
aggttcaagtgattctcctg

SEQ ID NO: 13611 - RNA, 20 nt, synthetic construct
  misc_feature 1..20: note = antisense sequence
  source 1..20: mol_type = other RNA
caggttcaagtgattctcct

SEQ ID NO: 13612 - RNA, 20 nt, synthetic construct
  misc_feature 1..20: note = antisense sequence
  source 1..20: mol_type = other RNA
ccaggttcaagtgattctcc

SEQ ID NO: 13613 - RNA, 20 nt, synthetic construct
  misc_feature 1..20: note = antisense sequence
  source 1..20: mol_type = other RNA
cccaggttcaagtgattctc

SEQ ID NO: 13614 - RNA, 20 nt, synthetic construct
  misc_feature 1..20: note = antisense sequence
  source 1..20: mol_type = other RNA
tcccaggttcaagtgattct

SEQ ID NO: 13615 - RNA, 20 nt, synthetic construct
  misc_feature 1..20: note = antisense sequence
  source 1..20: mol_type = other RNA
ttcccaggttcaagtgattc

SEQ ID NO: 13616 - RNA, 20 nt, synthetic construct
  misc_feature 1..20: note = antisense sequence
  source 1..20: mol_type = other RNA
cttcccaggttcaagtgatt

SEQ ID NO: 13617 - RNA, 20 nt, synthetic construct
  misc_feature 1..20: note = antisense sequence
  source 1..20: mol_type = other RNA
gaggctcgtttgaaagtatt

SEQ ID NO: 13618 - RNA, 20 nt, synthetic construct
  misc_feature 1..20: note = antisense sequence
  source 1..20: mol_type = other RNA
aaggcaaaccaaatggaaac

SEQ ID NO: 13619 - RNA, 20 nt, synthetic construct
  misc_feature 1..20: note = antisense sequence
  source 1..20: mol_type = other RNA
actaaggcaaaccaaatgga

SEQ ID NO: 13620 - RNA, 20 nt, synthetic construct
  misc_feature 1..20: note = antisense sequence
  source 1..20: mol_type = other RNA
tactaaggcaaaccaaatgg

SEQ ID NO: 13621 - RNA, 20 nt, synthetic construct
  misc_feature 1..20: note = antisense sequence
  source 1..20: mol_type = other RNA
aacttcaagtcttctgagcc

SEQ ID NO: 13622 - RNA, 20 nt, synthetic construct
  misc_feature 1..20: note = antisense sequence
  source 1..20: mol_type = other RNA
cctaaacttcaagtcttctg

SEQ ID NO: 13623 - RNA, 20 nt, synthetic construct
  misc_feature 1..20: note = antisense sequence
  source 1..20: mol_type = other RNA
tccctaaacttcaagtcttc

SEQ ID NO: 13624 - RNA, 20 nt, synthetic construct
  misc_feature 1..20: note = antisense sequence
  source 1..20: mol_type = other RNA
ccctccctaaacttcaagtc

SEQ ID NO: 13625 - RNA, 20 nt, synthetic construct
  misc_feature 1..20: note = antisense sequence
  source 1..20: mol_type = other RNA
accctccctaaacttcaagt

SEQ ID NO: 13626 - RNA, 20 nt, synthetic construct
  misc_feature 1..20: note = antisense sequence
  source 1..20: mol_type = other RNA
aaccctccctaaacttcaag

SEQ ID NO: 13627 - RNA, 20 nt, synthetic construct
  misc_feature 1..20: note = antisense sequence
  source 1..20: mol_type = other RNA
ttacaaaccctccctaaact

SEQ ID NO: 13628 - RNA, 20 nt, synthetic construct
  misc_feature 1..20: note = antisense sequence
  source 1..20: mol_type = other RNA
cttacaaaccctccctaaac

SEQ ID NO: 13629 - RNA, 20 nt, synthetic construct
  misc_feature 1..20: note = antisense sequence
  source 1..20: mol_type = other RNA
acttacaaaccctccctaaa

SEQ ID NO: 13630 - RNA, 20 nt, synthetic construct
  misc_feature 1..20: note = antisense sequence
  source 1..20: mol_type = other RNA
gacttacaaaccctccctaa

SEQ ID NO: 13631 - RNA, 20 nt, synthetic construct
  misc_feature 1..20: note = antisense sequence
  source 1..20: mol_type = other RNA
ggacttacaaaccctcccta

SEQ ID NO: 13632 - RNA, 20 nt, synthetic construct
  misc_feature 1..20: note = antisense sequence
  source 1..20: mol_type = other RNA
aggacttacaaaccctccct

SEQ ID NO: 13633 - RNA, 20 nt, synthetic construct
  misc_feature 1..20: note = antisense sequence
  source 1..20: mol_type = other RNA
caggacttacaaaccctccc

SEQ ID NO: 13634 - RNA, 20 nt, synthetic construct
  misc_feature 1..20: note = antisense sequence
  source 1..20: mol_type = other RNA
tcaggacttacaaaccctcc

SEQ ID NO: 13635 - RNA, 20 nt, synthetic construct
  misc_feature 1..20: note = antisense sequence
  source 1..20: mol_type = other RNA
gtcaggacttacaaaccctc

SEQ ID NO: 13636 - RNA, 20 nt, synthetic construct
  misc_feature 1..20: note = antisense sequence
  source 1..20: mol_type = other RNA
agtcaggacttacaaaccct

SEQ ID NO: 13637 - RNA, 20 nt, synthetic construct
  misc_feature 1..20: note = antisense sequence
  source 1..20: mol_type = other RNA
cagtcaggacttacaaaccc

SEQ ID NO: 13638 - RNA, 20 nt, synthetic construct
  misc_feature 1..20: note = antisense sequence
  source 1..20: mol_type = other RNA
agcagtcaggacttacaaac

SEQ ID NO: 13639 - RNA, 20 nt, synthetic construct
  misc_feature 1..20: note = antisense sequence
  source 1..20: mol_type = other RNA
caagcagtcaggacttacaa

SEQ ID NO: 13640 - RNA, 20 nt, synthetic construct
  misc_feature 1..20: note = antisense sequence
  source 1..20: mol_type = other RNA
gcaagcagtcaggacttaca

SEQ ID NO: 13641 - RNA, 20 nt, synthetic construct
  misc_feature 1..20: note = antisense sequence
  source 1..20: mol_type = other RNA
ggcaagcagtcaggacttac

SEQ ID NO: 13642 - RNA, 20 nt, synthetic construct
  misc_feature 1..20: note = antisense sequence
  source 1..20: mol_type = other RNA
acttagcattggttcaagct

SEQ ID NO: 13643 - RNA, 20 nt, synthetic construct
  misc_feature 1..20: note = antisense sequence
  source 1..20: mol_type = other RNA
gacttagcattggttcaagc

SEQ ID NO: 13644 - RNA, 20 nt, synthetic construct
  misc_feature 1..20: note = antisense sequence
  source 1..20: mol_type = other RNA
tgacttagcattggttcaag

SEQ ID NO: 13645 - RNA, 20 nt, synthetic construct
  misc_feature 1..20: note = antisense sequence
  source 1..20: mol_type = other RNA
cctgacttagcattggttca

SEQ ID NO: 13646 - RNA, 20 nt, synthetic construct
  misc_feature 1..20: note = antisense sequence
  source 1..20: mol_type = other RNA
acttcctgacttagcattgg

SEQ ID NO: 13647 - RNA, 20 nt, synthetic construct
  misc_feature 1..20: note = antisense sequence
  source 1..20: mol_type = other RNA
tacttcctgacttagcattg

SEQ ID NO: 13648 - RNA, 20 nt, synthetic construct
  misc_feature 1..20: note = antisense sequence
  source 1..20: mol_type = other RNA
tctgtacttcctgacttagc

SEQ ID NO: 13649 - RNA, 20 nt, synthetic construct
  misc_feature 1..20: note = antisense sequence
  source 1..20: mol_type = other RNA
cttgaagactgatctgtgca

SEQ ID NO: 13650 - RNA, 20 nt, synthetic construct
  misc_feature 1..20: note = antisense sequence
  source 1..20: mol_type = other RNA
tcttgaagactgatctgtgc

SEQ ID NO: 13651 - RNA, 20 nt, synthetic construct
  misc_feature 1..20: note = antisense sequence
  source 1..20: mol_type = other RNA
gcacaaatgagtatgtcttg

SEQ ID NO: 13652 - RNA, 20 nt, synthetic construct
  misc_feature 1..20: note = antisense sequence
  source 1..20: mol_type = other RNA
gatggcacaaatgagtatgt

SEQ ID NO: 13653 - RNA, 20 nt, synthetic construct
  misc_feature 1..20: note = antisense sequence
  source 1..20: mol_type = other RNA
agatggcacaaatgagtatg

SEQ ID NO: 13654 - RNA, 20 nt, synthetic construct
  misc_feature 1..20: note = antisense sequence
  source 1..20: mol_type = other RNA
ttgagatggcacaaatgagt

SEQ ID NO: 13655 - RNA, 20 nt, synthetic construct
  misc_feature 1..20: note = antisense sequence
  source 1..20: mol_type = other RNA
gttgagatggcacaaatgag

SEQ ID NO: 13656 - RNA, 20 nt, synthetic construct
  misc_feature 1..20: note = antisense sequence
  source 1..20: mol_type = other RNA
cgttgagatggcacaaatga

SEQ ID NO: 13657 - RNA, 20 nt, synthetic construct
  misc_feature 1..20: note = antisense sequence
  source 1..20: mol_type = other RNA
acgttgagatggcacaaatg

SEQ ID NO: 13658 - RNA, 20 nt, synthetic construct
  misc_feature 1..20: note = antisense sequence
  source 1..20: mol_type = other RNA
ctcagatgtattcacaacgt

SEQ ID NO: 13659 - RNA, 20 nt, synthetic construct
  misc_feature 1..20: note = antisense sequence
  source 1..20: mol_type = other RNA
cactcagatgtattcacaac

SEQ ID NO: 13660 - RNA, 20 nt, synthetic construct
  misc_feature 1..20: note = antisense sequence
  source 1..20: mol_type = other RNA
ccactcagatgtattcacaa

SEQ ID NO: 13661 - RNA, 20 nt, synthetic construct
  misc_feature 1..20: note = antisense sequence
  source 1..20: mol_type = other RNA
tccactcagatgtattcaca

SEQ ID NO: 13662 - RNA, 20 nt, synthetic construct
  misc_feature 1..20: note = antisense sequence
  source 1..20: mol_type = other RNA
ttccactcagatgtattcac

SEQ ID NO: 13663 - RNA, 20 nt, synthetic construct
  misc_feature 1..20: note = antisense sequence
  source 1..20: mol_type = other RNA
ctcaattccactcagatgta

SEQ ID NO: 13664 - RNA, 20 nt, synthetic construct
  misc_feature 1..20: note = antisense sequence
  source 1..20: mol_type = other RNA
actcaattccactcagatgt

SEQ ID NO: 13665 - RNA, 20 nt, synthetic construct
  misc_feature 1..20: note = antisense sequence
  source 1..20: mol_type = other RNA
agactcaattccactcagat

SEQ ID NO: 13666 - RNA, 20 nt, synthetic construct
  misc_feature 1..20: note = antisense sequence
  source 1..20: mol_type = other RNA
ggcacaagagactcaattcc

SEQ ID NO: 13667 - RNA, 20 nt, synthetic construct
  misc_feature 1..20: note = antisense sequence
  source 1..20: mol_type = other RNA
gggcacaagagactcaattc

SEQ ID NO: 13668 - RNA, 20 nt, synthetic construct
  misc_feature 1..20: note = antisense sequence
  source 1..20: mol_type = other RNA
agggcacaagagactcaatt

SEQ ID NO: 13669 - RNA, 20 nt, synthetic construct
  misc_feature 1..20: note = antisense sequence
  source 1..20: mol_type = other RNA
gagggcacaagagactcaat

SEQ ID NO: 13670 - RNA, 20 nt, synthetic construct
  misc_feature 1..20: note = antisense sequence
  source 1..20: mol_type = other RNA
gttgagggcacaagagactc

SEQ ID NO: 13671 - RNA, 20 nt, synthetic construct
  misc_feature 1..20: note = antisense sequence
  source 1..20: mol_type = other RNA
agttgagggcacaagagact

SEQ ID NO: 13672 - RNA, 20 nt, synthetic construct
  misc_feature 1..20: note = antisense sequence
  source 1..20: mol_type = other RNA
aagttgagggcacaagagac

SEQ ID NO: 13673 - RNA, 20 nt, synthetic construct
  misc_feature 1..20: note = antisense sequence
  source 1..20: mol_type = other RNA
aaagttgagggcacaagaga

SEQ ID NO: 13674 - RNA, 20 nt, synthetic construct
  misc_feature 1..20: note = antisense sequence
  source 1..20: mol_type = other RNA
ctaaaagttgagggcacaag

SEQ ID NO: 13675 - RNA, 20 nt, synthetic construct
  misc_feature 1..20: note = antisense sequence
  source 1..20: mol_type = other RNA
cctaaaagttgagggcacaa

SEQ ID NO: 13676 - RNA, 20 nt, synthetic construct
  misc_feature 1..20: note = antisense sequence
  source 1..20: mol_type = other RNA
tcctaaaagttgagggcaca

SEQ ID NO: 13677 - RNA, 20 nt, synthetic construct
  misc_feature 1..20: note = antisense sequence
  source 1..20: mol_type = other RNA
gtcctaaaagttgagggcac

SEQ ID NO: 13678 - RNA, 20 nt, synthetic construct
  misc_feature 1..20: note = antisense sequence
  source 1..20: mol_type = other RNA
ggctgggtataaataacaca

SEQ ID NO: 13679 - RNA, 20 nt, synthetic construct
  misc_feature 1..20: note = antisense sequence
  source 1..20: mol_type = other RNA
tggctgggtataaataacac

SEQ ID NO: 13680 - RNA, 20 nt, synthetic construct
  misc_feature 1..20: note = antisense sequence
  source 1..20: mol_type = other RNA
tgtggctgggtataaataac

SEQ ID NO: 13681 - RNA, 20 nt, synthetic construct
  misc_feature 1..20: note = antisense sequence
  source 1..20: mol_type = other RNA
ctttgtggctgggtataaat

SEQ ID NO: 13682 - RNA, 20 nt, synthetic construct
  misc_feature 1..20: note = antisense sequence
  source 1..20: mol_type = other RNA
actttgtggctgggtataaa

SEQ ID NO: 13683 - RNA, 20 nt, synthetic construct
  misc_feature 1..20: note = antisense sequence
  source 1..20: mol_type = other RNA
aactttgtggctgggtataa

SEQ ID NO: 13684 - RNA, 20 nt, synthetic construct
  misc_feature 1..20: note = antisense sequence
  source 1..20: mol_type = other RNA
gaactttgtggctgggtata

SEQ ID NO: 13685 - RNA, 20 nt, synthetic construct
  misc_feature 1..20: note = antisense sequence
  source 1..20: mol_type = other RNA
tgaactttgtggctgggtat

SEQ ID NO: 13686 - RNA, 20 nt, synthetic construct
  misc_feature 1..20: note = antisense sequence
  source 1..20: mol_type = other RNA
ctgaactttgtggctgggta

SEQ ID NO: 13687 - RNA, 20 nt, synthetic construct
  misc_feature 1..20: note = antisense sequence
  source 1..20: mol_type = other RNA
cactgaactttgtggctggg

SEQ ID NO: 13688 - RNA, 20 nt, synthetic construct
  misc_feature 1..20: note = antisense sequence
  source 1..20: mol_type = other RNA
tcactgaactttgtggctgg

SEQ ID NO: 13689 - RNA, 20 nt, synthetic construct
  misc_feature 1..20: note = antisense sequence
  source 1..20: mol_type = other RNA
ttcactgaactttgtggctg

SEQ ID NO: 13690 - RNA, 20 nt, synthetic construct
  misc_feature 1..20: note = antisense sequence
  source 1..20: mol_type = other RNA
catatcatatcagcaaaggg

SEQ ID NO: 13691 - RNA, 20 nt, synthetic construct
  misc_feature 1..20: note = antisense sequence
  source 1..20: mol_type = other RNA
ccatcacacagacatatcta

SEQ ID NO: 13692 - RNA, 20 nt, synthetic construct
  misc_feature 1..20: note = antisense sequence
  source 1..20: mol_type = other RNA
atcccatcacacagacatat

SEQ ID NO: 13693 - RNA, 20 nt, synthetic construct
  misc_feature 1..20: note = antisense sequence
  source 1..20: mol_type = other RNA
ccaatcccatcacacagaca

SEQ ID NO: 13694 - RNA, 20 nt, synthetic construct
  misc_feature 1..20: note = antisense sequence
  source 1..20: mol_type = other RNA
gccaatcccatcacacagac

SEQ ID NO: 13695 - RNA, 20 nt, synthetic construct
  misc_feature 1..20: note = antisense sequence
  source 1..20: mol_type = other RNA
agccaatcccatcacacaga

SEQ ID NO: 13696 - RNA, 20 nt, synthetic construct
  misc_feature 1..20: note = antisense sequence
  source 1..20: mol_type = other RNA
tagccaatcccatcacacag

SEQ ID NO: 13697 - RNA, 20 nt, synthetic construct
  misc_feature 1..20: note = antisense sequence
  source 1..20: mol_type = other RNA
ctagccaatcccatcacaca

SEQ ID NO: 13698 - RNA, 20 nt, synthetic construct
  misc_feature 1..20: note = antisense sequence
  source 1..20: mol_type = other RNA
cctagccaatcccatcacac

SEQ ID NO: 13699 - RNA, 20 nt, synthetic construct
  misc_feature 1..20: note = antisense sequence
  source 1..20: mol_type = other RNA
tcctagccaatcccatcaca

SEQ ID NO: 13700 - RNA, 20 nt, synthetic construct
  misc_feature 1..20: note = antisense sequence
  source 1..20: mol_type = other RNA
gcttcctagccaatcccatc

SEQ ID NO: 13701 - RNA, 20 nt, synthetic construct
  misc_feature 1..20: note = antisense sequence
  source 1..20: mol_type = other RNA
tgcttcctagccaatcccat

SEQ ID NO: 13702 - RNA, 20 nt, synthetic construct
  misc_feature 1..20: note = antisense sequence
  source 1..20: mol_type = other RNA
ctgcttcctagccaatccca

SEQ ID NO: 13703 - RNA, 20 nt, synthetic construct
  misc_feature 1..20: note = antisense sequence
  source 1..20: mol_type = other RNA
tctgcttcctagccaatccc

SEQ ID NO: 13704 - RNA, 20 nt, synthetic construct
  misc_feature 1..20: note = antisense sequence
  source 1..20: mol_type = other RNA
ttctgcttcctagccaatcc

SEQ ID NO: 13705 - RNA, 20 nt, synthetic construct
  misc_feature 1..20: note = antisense sequence
  source 1..20: mol_type = other RNA
tttctgcttcctagccaatc

SEQ ID NO: 13706 - RNA, 20 nt, synthetic construct
  misc_feature 1..20: note = antisense sequence
  source 1..20: mol_type = other RNA
ctttctgcttcctagccaat

SEQ ID NO: 13707 - RNA, 20 nt, synthetic construct
  misc_feature 1..20: note = antisense sequence
  source 1..20: mol_type = other RNA
gctttctgcttcctagccaa

SEQ ID NO: 13708 - RNA, 20 nt, synthetic construct
  misc_feature 1..20: note = antisense sequence
  source 1..20: mol_type = other RNA
gtgctttctgcttcctagcc

SEQ ID NO: 13709 - RNA, 20 nt, synthetic construct
  misc_feature 1..20: note = antisense sequence
  source 1..20: mol_type = other RNA
ctgtgctttctgcttcctag

SEQ ID NO: 13710 - RNA, 20 nt, synthetic construct
  misc_feature 1..20: note = antisense sequence
  source 1..20: mol_type = other RNA
attggttctgtgctttctgc

SEQ ID NO: 13711 - RNA, 20 nt, synthetic construct
  misc_feature 1..20: note = antisense sequence
  source 1..20: mol_type = other RNA
aattggttctgtgctttctg

SEQ ID NO: 13712 - RNA, 20 nt, synthetic construct
  misc_feature 1..20: note = antisense sequence
  source 1..20: mol_type = other RNA
gtaattggttctgtgctttc

SEQ ID NO: 13713 - RNA, 20 nt, synthetic construct
  misc_feature 1..20: note = antisense sequence
  source 1..20: mol_type = other RNA
gagtaattggttctgtgctt

SEQ ID NO: 13714 - RNA, 20 nt, synthetic construct
  misc_feature 1..20: note = antisense sequence
  source 1..20: mol_type = other RNA
tgagtaattggttctgtgct

SEQ ID NO: 13715 - RNA, 20 nt, synthetic construct
  misc_feature 1..20: note = antisense sequence
  source 1..20: mol_type = other RNA
ttgtgtctaatcctcaaagg

SEQ ID NO: 13716 - RNA, 20 nt, synthetic construct
  misc_feature 1..20: note = antisense sequence
  source 1..20: mol_type = other RNA
gtcattgtgtctaatcctca

SEQ ID NO: 13717 - RNA, 20 nt, synthetic construct
  misc_feature 1..20: note = antisense sequence
  source 1..20: mol_type = other RNA
gtgtcattgtgtctaatcct

SEQ ID NO: 13718 - RNA, 20 nt, synthetic construct
  misc_feature 1..20: note = antisense sequence
  source 1..20: mol_type = other RNA
agtgtcattgtgtctaatcc

SEQ ID NO: 13719 - RNA, 20 nt, synthetic construct
  misc_feature 1..20: note = antisense sequence
  source 1..20: mol_type = other RNA
aaggtcactgacaccagaga

SEQ ID NO: 13720 - RNA, 20 nt, synthetic construct
  misc_feature 1..20: note = antisense sequence
  source 1..20: mol_type = other RNA
caaggtcactgacaccagag

SEQ ID NO: 13721 - RNA, 20 nt, synthetic construct
  misc_feature 1..20: note = antisense sequence
  source 1..20: mol_type = other RNA
acaaggtcactgacaccaga

SEQ ID NO: 13722 - RNA, 20 nt, synthetic construct
  misc_feature 1..20: note = antisense sequence
  source 1..20: mol_type = other RNA
tacaaggtcactgacaccag

SEQ ID NO: 13723 - RNA, 20 nt, synthetic construct
  misc_feature 1..20: note = antisense sequence
  source 1..20: mol_type = other RNA
ttacaaggtcactgacacca

SEQ ID NO: 13724 - RNA, 20 nt, synthetic construct
  misc_feature 1..20: note = antisense sequence
  source 1..20: mol_type = other RNA
attacaaggtcactgacacc

SEQ ID NO: 13725 - RNA, 20 nt, synthetic construct
  misc_feature 1..20: note = antisense sequence
  source 1..20: mol_type = other RNA
cattacaaggtcactgacac

SEQ ID NO: 13726 - RNA, 20 nt, synthetic construct
  misc_feature 1..20: note = antisense sequence
  source 1..20: mol_type = other RNA
atcattacaaggtcactgac

SEQ ID NO: 13727 - RNA, 20 nt, synthetic construct
  misc_feature 1..20: note = antisense sequence
  source 1..20: mol_type = other RNA
gttcccagaggatattgctg

SEQ ID NO: 13728 - RNA, 20 nt, synthetic construct
  misc_feature 1..20: note = antisense sequence
  source 1..20: mol_type = other RNA
tgttcccagaggatattgct

SEQ ID NO: 13729 - RNA, 20 nt, synthetic construct
  misc_feature 1..20: note = antisense sequence
  source 1..20: mol_type = other RNA
agatgttcccagaggatatt

SEQ ID NO: 13730 - RNA, 20 nt, synthetic construct
  misc_feature 1..20: note = antisense sequence
  source 1..20: mol_type = other RNA
cagatgttcccagaggatat

SEQ ID NO: 13731 - RNA, 20 nt, synthetic construct
  misc_feature 1..20: note = antisense sequence
  source 1..20: mol_type = other RNA
ctcagatgttcccagaggat

SEQ ID NO: 13732 - RNA, 20 nt, synthetic construct
  misc_feature 1..20: note = antisense sequence
  source 1..20: mol_type = other RNA
atactcagatgttcccagag

SEQ ID NO: 13733 - RNA, 20 nt, synthetic construct
  misc_feature 1..20: note = antisense sequence
  source 1..20: mol_type = other RNA
aatactcagatgttcccaga

SEQ ID NO: 13734 - RNA, 20 nt, synthetic construct
  misc_feature 1..20: note = antisense sequence
  source 1..20: mol_type = other RNA
gaaatactcagatgttccca

SEQ ID NO: 13735 - RNA, 20 nt, synthetic construct
  misc_feature 1..20: note = antisense sequence
  source 1..20: mol_type = other RNA
gaggaaatactcagatgttc

SEQ ID NO: 13736 - RNA, 20 nt, synthetic construct
  misc_feature 1..20: note = antisense sequence
  source 1..20: mol_type = other RNA
ccaagaggtccctcatgtgg

SEQ ID NO: 13737 - RNA, 20 nt, synthetic construct
  misc_feature 1..20: note = antisense sequence
  source 1..20: mol_type = other RNA
tgttaatttgggaatccgcc

SEQ ID NO: 13738 - RNA, 20 nt, synthetic construct
  misc_feature 1..20: note = antisense sequence
  source 1..20: mol_type = other RNA
atacgctgtgagaatccaaa

SEQ ID NO: 13739 - RNA, 20 nt, synthetic construct
  misc_feature 1..20: note = antisense sequence
  source 1..20: mol_type = other RNA
aatacgctgtgagaatccaa

SEQ ID NO: 13740 - RNA, 20 nt, synthetic construct
  misc_feature 1..20: note = antisense sequence
  source 1..20: mol_type = other RNA
gaatacgctgtgagaatcca

SEQ ID NO: 13741 - RNA, 20 nt, synthetic construct
  misc_feature 1..20: note = antisense sequence
  source 1..20: mol_type = other RNA
ggaatacgctgtgagaatcc

SEQ ID NO: 13742 - RNA, 20 nt, synthetic construct
  misc_feature 1..20: note = antisense sequence
  source 1..20: mol_type = other RNA
tggaatacgctgtgagaatc

SEQ ID NO: 13743 - RNA, 20 nt, synthetic construct
  misc_feature 1..20: note = antisense sequence
  source 1..20: mol_type = other RNA
atggaatacgctgtgagaat

SEQ ID NO: 13744 - RNA, 20 nt, synthetic construct
  misc_feature 1..20: note = antisense sequence
  source 1..20: mol_type = other RNA
gatggaatacgctgtgagaa

SEQ ID NO: 13745 - RNA, 20 nt, synthetic construct
  misc_feature 1..20: note = antisense sequence
  source 1..20: mol_type = other RNA
tgatggaatacgctgtgaga

SEQ ID NO: 13746 - RNA, 20 nt, synthetic construct
  misc_feature 1..20: note = antisense sequence
  source 1..20: mol_type = other RNA
ctgatggaatacgctgtgag

SEQ ID NO: 13747 - RNA, 20 nt, synthetic construct
  misc_feature 1..20: note = antisense sequence
  source 1..20: mol_type = other RNA
cctgatggaatacgctgtga

SEQ ID NO: 13748 - RNA, 20 nt, synthetic construct
  misc_feature 1..20: note = antisense sequence
  source 1..20: mol_type = other RNA
acctgatggaatacgctgtg

SEQ ID NO: 13749 - RNA, 20 nt, synthetic construct
  misc_feature 1..20: note = antisense sequence
  source 1..20: mol_type = other RNA
cacctgatggaatacgctgt

SEQ ID NO: 13750 - RNA, 20 nt, synthetic construct
  misc_feature 1..20: note = antisense sequence
  source 1..20: mol_type = other RNA
ccacctgatggaatacgctg

SEQ ID NO: 13751 - RNA, 20 nt, synthetic construct
  misc_feature 1..20: note = antisense sequence
  source 1..20: mol_type = other RNA
cccacctgatggaatacgct

SEQ ID NO: 13752 - RNA, 20 nt, synthetic construct
  misc_feature 1..20: note = antisense sequence
  source 1..20: mol_type = other RNA
tttcagtgtcttaccatccc

SEQ ID NO: 13753 - RNA, 20 nt, synthetic construct
  misc_feature 1..20: note = antisense sequence
  source 1..20: mol_type = other RNA
tctccgtggatagactggcc

SEQ ID NO: 13754 - RNA, 20 nt, synthetic construct
  misc_feature 1..20: note = antisense sequence
  source 1..20: mol_type = other RNA
ttctccgtggatagactggc

SEQ ID NO: 13755 - RNA, 20 nt, synthetic construct
  misc_feature 1..20: note = antisense sequence
  source 1..20: mol_type = other RNA
tttctccgtggatagactgg

SEQ ID NO: 13756 - RNA, 20 nt, synthetic construct
  misc_feature 1..20: note = antisense sequence
  source 1..20: mol_type = other RNA
atttctccgtggatagactg

SEQ ID NO: 13757 - RNA, 20 nt, synthetic construct
  misc_feature 1..20: note = antisense sequence
  source 1..20: mol_type = other RNA
catttctccgtggatagact

SEQ ID NO: 13758 - RNA, 20 nt, synthetic construct
  misc_feature 1..20: note = antisense sequence
  source 1..20: mol_type = other RNA
ccatttctccgtggatagac

SEQ ID NO: 13759 - RNA, 20 nt, synthetic construct
  misc_feature 1..20: note = antisense sequence
  source 1..20: mol_type = other RNA
gtcagaccgtcaccatttaa

SEQ ID NO: 13760 - RNA, 20 nt, synthetic construct
  misc_feature 1..20: note = antisense sequence
  source 1..20: mol_type = other RNA
tgtcagaccgtcaccattta

SEQ ID NO: 13761 - RNA, 20 nt, synthetic construct
  misc_feature 1..20: note = antisense sequence
  source 1..20: mol_type = other RNA
ctgtcagaccgtcaccattt

SEQ ID NO: 13762 - RNA, 20 nt, synthetic construct
  misc_feature 1..20: note = antisense sequence
  source 1..20: mol_type = other RNA
tctgtcagaccgtcaccatt

SEQ ID NO: 13763 - RNA, 20 nt, synthetic construct
  misc_feature 1..20: note = antisense sequence
  source 1..20: mol_type = other RNA
atctgtcagaccgtcaccat

SEQ ID NO: 13764 - RNA, 20 nt, synthetic construct
  misc_feature 1..20: note = antisense sequence
  source 1..20: mol_type = other RNA
catctgtcagaccgtcacca

SEQ ID NO: 13765 - RNA, 20 nt, synthetic construct
  misc_feature 1..20: note = antisense sequence
  source 1..20: mol_type = other RNA
acatctgtcagaccgtcacc

SEQ ID NO: 13766 - RNA, 20 nt, synthetic construct
  misc_feature 1..20: note = antisense sequence
  source 1..20: mol_type = other RNA
cacatctgtcagaccgtcac

SEQ ID NO: 13767 - RNA, 20 nt, synthetic construct
  misc_feature 1..20: note = antisense sequence
  source 1..20: mol_type = other RNA
gtcacatctgtcagaccgtc

SEQ ID NO: 13768 - RNA, 20 nt, synthetic construct
  misc_feature 1..20: note = antisense sequence
  source 1..20: mol_type = other RNA
agtcacatctgtcagaccgt

SEQ ID NO: 13769 - RNA, 20 nt, synthetic construct
  misc_feature 1..20: note = antisense sequence
  source 1..20: mol_type = other RNA
tagtcacatctgtcagaccg

SEQ ID NO: 13770 - RNA, 20 nt, synthetic construct
  misc_feature 1..20: note = antisense sequence
  source 1..20: mol_type = other RNA
caatagtcacatctgtcaga

SEQ ID NO: 13771 - RNA, 20 nt, synthetic construct
  misc_feature 1..20: note = antisense sequence
  source 1..20: mol_type = other RNA
ccaatagtcacatctgtcag

SEQ ID NO: 13772 - RNA, 20 nt, synthetic construct
  misc_feature 1..20: note = antisense sequence
  source 1..20: mol_type = other RNA
cccaatagtcacatctgtca

SEQ ID NO: 13773 - RNA, 20 nt, synthetic construct
  misc_feature 1..20: note = antisense sequence
  source 1..20: mol_type = other RNA
accagaagagggcagcacca

SEQ ID NO: 13774 - RNA, 20 nt, synthetic construct
  misc_feature 1..20: note = antisense sequence
  source 1..20: mol_type = other RNA
taccagaagagggcagcacc

SEQ ID NO: 13775 - RNA, 20 nt, synthetic construct
  misc_feature 1..20: note = antisense sequence
  source 1..20: mol_type = other RNA
ataccagaagagggcagcac

SEQ ID NO: 13776 - RNA, 20 nt, synthetic construct
  misc_feature 1..20: note = antisense sequence
  source 1..20: mol_type = other RNA
atacataccagaagagggca

SEQ ID NO: 13777 - RNA, 20 nt, synthetic construct
  misc_feature 1..20: note = antisense sequence
  source 1..20: mol_type = other RNA
aatacataccagaagagggc

SEQ ID NO: 13778 - RNA, 20 nt, synthetic construct
  misc_feature 1..20: note = antisense sequence
  source 1..20: mol_type = other RNA
aaatacataccagaagaggg

SEQ ID NO: 13779 - RNA, 20 nt, synthetic construct
  misc_feature 1..20: note = antisense sequence
  source 1..20: mol_type = other RNA
gtctcagattaacaggatgt

SEQ ID NO: 13780 - RNA, 20 nt, synthetic construct
  misc_feature 1..20: note = antisense sequence
  source 1..20: mol_type = other RNA
agtctcagattaacaggatg

SEQ ID NO: 13781 - RNA, 20 nt, synthetic construct
  misc_feature 1..20: note = antisense sequence
  source 1..20: mol_type = other RNA
cagtctcagattaacaggat

SEQ ID NO: 13782 - RNA, 20 nt, synthetic construct
  misc_feature 1..20: note = antisense sequence
  source 1..20: mol_type = other RNA
ccagtctcagattaacagga

SEQ ID NO: 13783 - RNA, 20 nt, synthetic construct
  misc_feature 1..20: note = antisense sequence
  source 1..20: mol_type = other RNA
cccagtctcagattaacagg

SEQ ID NO: 13784 - RNA, 20 nt, synthetic construct
  misc_feature 1..20: note = antisense sequence
  source 1..20: mol_type = other RNA
tctgcaagtgacccagtctc

SEQ ID NO: 13785 - RNA, 20 nt, synthetic construct
  misc_feature 1..20: note = antisense sequence
  source 1..20: mol_type = other RNA
gtatttgcatagtggaacac

SEQ ID NO: 13786 - RNA, 20 nt, synthetic construct
  misc_feature 1..20: note = antisense sequence
  source 1..20: mol_type = other RNA
gctcactcaactgaataact

SEQ ID NO: 13787 - RNA, 20 nt, synthetic construct
  misc_feature 1..20: note = antisense sequence
  source 1..20: mol_type = other RNA
agctcactcaactgaataac

SEQ ID NO: 13788 - RNA, 20 nt, synthetic construct
  misc_feature 1..20: note = antisense sequence
  source 1..20: mol_type = other RNA
actcttccagctcactcaac

SEQ ID NO: 13789 - RNA, 20 nt, synthetic construct
  misc_feature 1..20: note = antisense sequence
  source 1..20: mol_type = other RNA
gatgtattgactcttccagc

SEQ ID NO: 13790 - RNA, 20 nt, synthetic construct
  misc_feature 1..20: note = antisense sequence
  source 1..20: mol_type = other RNA
ctaaaaccttgtaagcaacc

SEQ ID NO: 13791 - RNA, 20 nt, synthetic construct
  misc_feature 1..20: note = antisense sequence
  source 1..20: mol_type = other RNA
aacagagtcagagagtgcta

SEQ ID NO: 13792 - RNA, 20 nt, synthetic construct
  misc_feature 1..20: note = antisense sequence
  source 1..20: mol_type = other RNA
ctaggcttgaccaacaatat

SEQ ID NO: 13793 - RNA, 20 nt, synthetic construct
  misc_feature 1..20: note = antisense sequence
  source 1..20: mol_type = other RNA
tctaggcttgaccaacaata

SEQ ID NO: 13794 - RNA, 20 nt, synthetic construct
  misc_feature 1..20: note = antisense sequence
  source 1..20: mol_type = other RNA
ctctaggcttgaccaacaat

SEQ ID NO: 13795 - RNA, 20 nt, synthetic construct
  misc_feature 1..20: note = antisense sequence
  source 1..20: mol_type = other RNA
tgcctctaggcttgaccaac

SEQ ID NO: 13796 - RNA, 20 nt, synthetic construct
  misc_feature 1..20: note = antisense sequence
  source 1..20: mol_type = other RNA
atgcctctaggcttgaccaa

SEQ ID NO: 13797 - RNA, 20 nt, synthetic construct
  misc_feature 1..20: note = antisense sequence
  source 1..20: mol_type = other RNA
gatgcctctaggcttgacca

SEQ ID NO: 13798 - RNA, 20 nt, synthetic construct
  misc_feature 1..20: note = antisense sequence
  source 1..20: mol_type = other RNA
agatgcctctaggcttgacc

SEQ ID NO: 13799 - RNA, 20 nt, synthetic construct
  misc_feature 1..20: note = antisense sequence
  source 1..20: mol_type = other RNA
aagatgcctctaggcttgac

SEQ ID NO: 13800 - RNA, 20 nt, synthetic construct
  misc_feature 1..20: note = antisense sequence
  source 1..20: mol_type = other RNA
taagatgcctctaggcttga

SEQ ID NO: 13801 - RNA, 20 nt, synthetic construct
  misc_feature 1..20: note = antisense sequence
  source 1..20: mol_type = other RNA
ttaagatgcctctaggcttg

SEQ ID NO: 13802 - RNA, 20 nt, synthetic construct
  misc_feature 1..20: note = antisense sequence
  source 1..20: mol_type = other RNA
aagaactgggccaatttggg

SEQ ID NO: 13803 - RNA, 20 nt, synthetic construct
  misc_feature 1..20: note = antisense sequence
  source 1..20: mol_type = other RNA
aaagaactgggccaatttgg

SEQ ID NO: 13804 - RNA, 20 nt, synthetic construct
  misc_feature 1..20: note = antisense sequence
  source 1..20: mol_type = other RNA
gaaagaactgggccaatttg

SEQ ID NO: 13805 - RNA, 20 nt, synthetic construct
  misc_feature 1..20: note = antisense sequence
  source 1..20: mol_type = other RNA
tgaaagaactgggccaattt

SEQ ID NO: 13806 - RNA, 20 nt, synthetic construct
  misc_feature 1..20: note = antisense sequence
  source 1..20: mol_type = other RNA
atctgaaagaactgggccaa

SEQ ID NO: 13807 - RNA, 20 nt, synthetic construct
  misc_feature 1..20: note = antisense sequence
  source 1..20: mol_type = other RNA
tatctgaaagaactgggcca

SEQ ID NO: 13808 - RNA, 20 nt, synthetic construct
  misc_feature 1..20: note = antisense sequence
  source 1..20: mol_type = other RNA
gtatctgaaagaactgggcc

SEQ ID NO: 13809 - RNA, 20 nt, synthetic construct
  misc_feature 1..20: note = antisense sequence
  source 1..20: mol_type = other RNA
tgtatctgaaagaactgggc

SEQ ID NO: 13810 - RNA, 20 nt, synthetic construct
  misc_feature 1..20: note = antisense sequence
  source 1..20: mol_type = other RNA
gttgattcttgacttcctag

SEQ ID NO: 13811 - RNA, 20 nt, synthetic construct
  misc_feature 1..20: note = antisense sequence
  source 1..20: mol_type = other RNA
agtcacctggcataaataga

SEQ ID NO: 13812 - RNA, 20 nt, synthetic construct
  misc_feature 1..20: note = antisense sequence
  source 1..20: mol_type = other RNA
tcccataaagtcacctggca

SEQ ID NO: 13813 - RNA, 20 nt, synthetic construct
  misc_feature 1..20: note = antisense sequence
  source 1..20: mol_type = other RNA
ttcccataaagtcacctggc

SEQ ID NO: 13814 - RNA, 20 nt, synthetic construct
  misc_feature 1..20: note = antisense sequence
  source 1..20: mol_type = other RNA
cttcccataaagtcacctgg

SEQ ID NO: 13815 - RNA, 20 nt, synthetic construct
  misc_feature 1..20: note = antisense sequence
  source 1..20: mol_type = other RNA
cccgaattacagtaaaccaa

SEQ ID NO: 13816 - RNA, 20 nt, synthetic construct
  misc_feature 1..20: note = antisense sequence
  source 1..20: mol_type = other RNA
cacccgaattacagtaaacc

SEQ ID NO: 13817 - RNA, 20 nt, synthetic construct
  misc_feature 1..20: note = antisense sequence
  source 1..20: mol_type = other RNA
ccacccgaattacagtaaac

SEQ ID NO: 13818 - RNA, 20 nt, synthetic construct
  misc_feature 1..20: note = antisense sequence
  source 1..20: mol_type = other RNA
tccacccgaattacagtaaa

SEQ ID NO: 13819 - RNA, 20 nt, synthetic construct
  misc_feature 1..20: note = antisense sequence
  source 1..20: mol_type = other RNA
ttccacccgaattacagtaa

SEQ ID NO: 13820 - RNA, 20 nt, synthetic construct
  misc_feature 1..20: note = antisense sequence
  source 1..20: mol_type = other RNA
tttccacccgaattacagta

SEQ ID NO: 13821 - RNA, 20 nt, synthetic construct
  misc_feature 1..20: note = antisense sequence
  source 1..20: mol_type = other RNA
gtttccacccgaattacagt

SEQ ID NO: 13822 - RNA, 20 nt, synthetic construct
  misc_feature 1..20: note = antisense sequence
  source 1..20: mol_type = other RNA
tgtttccacccgaattacag

SEQ ID NO: 13823 - RNA, 20 nt, synthetic construct
  misc_feature 1..20: note = antisense sequence
  source 1..20: mol_type = other RNA
atgtttccacccgaattaca

SEQ ID NO: 13824 - RNA, 20 nt, synthetic construct
  misc_feature 1..20: note = antisense sequence
  source 1..20: mol_type = other RNA
atgtatgtttccacccgaat

SEQ ID NO: 13825 - RNA, 20 nt, synthetic construct
  misc_feature 1..20: note = antisense sequence
  source 1..20: mol_type = other RNA
attgatgtatgtttccaccc

SEQ ID NO: 13826 - RNA, 20 nt, synthetic construct
  misc_feature 1..20: note = antisense sequence
  source 1..20: mol_type = other RNA
gcattgatgtatgtttccac

SEQ ID NO: 13827 - RNA, 20 nt, synthetic construct
  misc_feature 1..20: note = antisense sequence
  source 1..20: mol_type = other RNA
atcacccttcagtcttcttt

SEQ ID NO: 13828 - RNA, 20 nt, synthetic construct
  misc_feature 1..20: note = antisense sequence
  source 1..20: mol_type = other RNA
tatcacccttcagtcttctt

SEQ ID NO: 13829 - RNA, 20 nt, synthetic construct
  misc_feature 1..20: note = antisense sequence
  source 1..20: mol_type = other RNA
gtatcacccttcagtcttct

SEQ ID NO: 13830 - RNA, 20 nt, synthetic construct
  misc_feature 1..20: note = antisense sequence
  source 1..20: mol_type = other RNA
ggtatcacccttcagtcttc

SEQ ID NO: 13831 - RNA, 20 nt, synthetic construct
  misc_feature 1..20: note = antisense sequence
  source 1..20: mol_type = other RNA
aggtatcacccttcagtctt

SEQ ID NO: 13832 - RNA, 20 nt, synthetic construct
  misc_feature 1..20: note = antisense sequence
  source 1..20: mol_type = other RNA
taggtatcacccttcagtct

SEQ ID NO: 13833 - RNA, 20 nt, synthetic construct
  misc_feature 1..20: note = antisense sequence
  source 1..20: mol_type = other RNA
ttaggtatcacccttcagtc

SEQ ID NO: 13834 - RNA, 20 nt, synthetic construct
  misc_feature 1..20: note = antisense sequence
  source 1..20: mol_type = other RNA
cttaggtatcacccttcagt

SEQ ID NO: 13835 - RNA, 20 nt, synthetic construct
  misc_feature 1..20: note = antisense sequence
  source 1..20: mol_type = other RNA
tcttaggtatcacccttcag

SEQ ID NO: 13836 - RNA, 20 nt, synthetic construct
  misc_feature 1..20: note = antisense sequence
  source 1..20: mol_type = other RNA
tttcttaggtatcacccttc

SEQ ID NO: 13837 - RNA, 20 nt, synthetic construct
  misc_feature 1..20: note = antisense sequence
  source 1..20: mol_type = other RNA
cttttcttaggtatcaccct

SEQ ID NO: 13838 - RNA, 20 nt, synthetic construct
  misc_feature 1..20: note = antisense sequence
  source 1..20: mol_type = other RNA
ccttttcttaggtatcaccc

SEQ ID NO: 13839 - RNA, 20 nt, synthetic construct
  misc_feature 1..20: note = antisense sequence
  source 1..20: mol_type = other RNA
tcccttttcttaggtatcac

SEQ ID NO: 13840 - RNA, 20 nt, synthetic construct
  misc_feature 1..20: note = antisense sequence
  source 1..20: mol_type = other RNA
tgacactgctgacttctggt

SEQ ID NO: 13841 - RNA, 20 nt, synthetic construct
  misc_feature 1..20: note = antisense sequence
  source 1..20: mol_type = other RNA
gtatatccattgtccctgac

SEQ ID NO: 13842 - RNA, 20 nt, synthetic construct
  misc_feature 1..20: note = antisense sequence
  source 1..20: mol_type = other RNA
gaagtatatccattgtccct

SEQ ID NO: 13843 - RNA, 20 nt, synthetic construct
  misc_feature 1..20: note = antisense sequence
  source 1..20: mol_type = other RNA
tgaagtatatccattgtccc

SEQ ID NO: 13844 - RNA, 20 nt, synthetic construct
  misc_feature 1..20: note = antisense sequence
  source 1..20: mol_type = other RNA
gagctaaagggagcataata

SEQ ID NO: 13845 - RNA, 20 nt, synthetic construct
  misc_feature 1..20: note = antisense sequence
  source 1..20: mol_type = other RNA
ttgtgagctaaagggagcat

SEQ ID NO: 13846 - RNA, 20 nt, synthetic construct
  misc_feature 1..20: note = antisense sequence
  source 1..20: mol_type = other RNA
tttgtgagctaaagggagca

SEQ ID NO: 13847 - RNA, 20 nt, synthetic construct
  misc_feature 1..20: note = antisense sequence
  source 1..20: mol_type = other RNA
tatttgtgagctaaagggag

SEQ ID NO: 13848 - RNA, 20 nt, synthetic construct
  misc_feature 1..20: note = antisense sequence
  source 1..20: mol_type = other RNA
cttgaaacaaaactggagca

SEQ ID NO: 13849 - RNA, 20 nt, synthetic construct
  misc_feature 1..20: note = antisense sequence
  source 1..20: mol_type = other RNA
aagccttgaaacaaaactgg

SEQ ID NO: 13850 - RNA, 20 nt, synthetic construct
  misc_feature 1..20: note = antisense sequence
  source 1..20: mol_type = other RNA
gaggccataaataagtttgc

SEQ ID NO: 13851 - RNA, 20 nt, synthetic construct
  misc_feature 1..20: note = antisense sequence
  source 1..20: mol_type = other RNA
aggagaggccataaataagt

SEQ ID NO: 13852 - RNA, 20 nt, synthetic construct
  misc_feature 1..20: note = antisense sequence
  source 1..20: mol_type = other RNA
caggagaggccataaataag

SEQ ID NO: 13853 - RNA, 20 nt, synthetic construct
  misc_feature 1..20: note = antisense sequence
  source 1..20: mol_type = other RNA
gcaggagaggccataaataa

SEQ ID NO: 13854 - RNA, 20 nt, synthetic construct
  misc_feature 1..20: note = antisense sequence
  source 1..20: mol_type = other RNA
gggcaggagaggccataaat

SEQ ID NO: 13855 - RNA, 20 nt, synthetic construct
  misc_feature 1..20: note = antisense sequence
  source 1..20: mol_type = other RNA
attttgggccatcaatgcct

SEQ ID NO: 13856 - RNA, 20 nt, synthetic construct
  misc_feature 1..20: note = antisense sequence
  source 1..20: mol_type = other RNA
ctatcattttgggccatcaa

SEQ ID NO: 13857 - RNA, 20 nt, synthetic construct
  misc_feature 1..20: note = antisense sequence
  source 1..20: mol_type = other RNA
actatcattttgggccatca

SEQ ID NO: 13858 - RNA, 20 nt, synthetic construct
  misc_feature 1..20: note = antisense sequence
  source 1..20: mol_type = other RNA
gactatcattttgggccatc

SEQ ID NO: 13859 - RNA, 20 nt, synthetic construct
  misc_feature 1..20: note = antisense sequence
  source 1..20: mol_type = other RNA
tgactatcattttgggccat

SEQ ID NO: 13860 - RNA, 20 nt, synthetic construct
  misc_feature 1..20: note = antisense sequence
  source 1..20: mol_type = other RNA
tggactatgatagggaaatg

SEQ ID NO: 13861 - RNA, 20 nt, synthetic construct
  misc_feature 1..20: note = antisense sequence
  source 1..20: mol_type = other RNA
cctggactatgatagggaaa

SEQ ID NO: 13862 - RNA, 20 nt, synthetic construct
  misc_feature 1..20: note = antisense sequence
  source 1..20: mol_type = other RNA
gcctggactatgatagggaa

SEQ ID NO: 13863 - RNA, 20 nt, synthetic construct
  misc_feature 1..20: note = antisense sequence
  source 1..20: mol_type = other RNA
agcctggactatgataggga

SEQ ID NO: 13864 - RNA, 20 nt, synthetic construct
  misc_feature 1..20: note = antisense sequence
  source 1..20: mol_type = other RNA
gagcctggactatgataggg

SEQ ID NO: 13865 - RNA, 20 nt, synthetic construct
  misc_feature 1..20: note = antisense sequence
  source 1..20: mol_type = other RNA
ggagcctggactatgatagg

SEQ ID NO: 13866 - RNA, 20 nt, synthetic construct
  misc_feature 1..20: note = antisense sequence
  source 1..20: mol_type = other RNA
tggagcctggactatgatag

SEQ ID NO: 13867 - RNA, 20 nt, synthetic construct
  misc_feature 1..20: note = antisense sequence
  source 1..20: mol_type = other RNA
gtggagcctggactatgata

SEQ ID NO: 13868 - RNA, 20 nt, synthetic construct
  misc_feature 1..20: note = antisense sequence
  source 1..20: mol_type = other RNA
agtggagcctggactatgat

SEQ ID NO: 13869 - RNA, 20 nt, synthetic construct
  misc_feature 1..20: note = antisense sequence
  source 1..20: mol_type = other RNA
tcagtggagcctggactatg

SEQ ID NO: 13870 - RNA, 20 nt, synthetic construct
  misc_feature 1..20: note = antisense sequence
  source 1..20: mol_type = other RNA
gtcttcgtgtcccagtatat

SEQ ID NO: 13871 - RNA, 20 nt, synthetic construct
  misc_feature 1..20: note = antisense sequence
  source 1..20: mol_type = other RNA
agtcttcgtgtcccagtata

SEQ ID NO: 13872 - RNA, 20 nt, synthetic construct
  misc_feature 1..20: note = antisense sequence
  source 1..20: mol_type = other RNA
tagtcttcgtgtcccagtat

SEQ ID NO: 13873 - RNA, 20 nt, synthetic construct
  misc_feature 1..20: note = antisense sequence
  source 1..20: mol_type = other RNA
ttagtcttcgtgtcccagta

SEQ ID NO: 13874 - RNA, 20 nt, synthetic construct
  misc_feature 1..20: note = antisense sequence
  source 1..20: mol_type = other RNA
cttagtcttcgtgtcccagt

SEQ ID NO: 13875 - RNA, 20 nt, synthetic construct
  misc_feature 1..20: note = antisense sequence
  source 1..20: mol_type = other RNA
tcttagtcttcgtgtcccag

SEQ ID NO: 13876 - RNA, 20 nt, synthetic construct
  misc_feature 1..20: note = antisense sequence
  source 1..20: mol_type = other RNA
atcttagtcttcgtgtccca

SEQ ID NO: 13877 - RNA, 20 nt, synthetic construct
  misc_feature 1..20: note = antisense sequence
  source 1..20: mol_type = other RNA
aatcttagtcttcgtgtccc

SEQ ID NO: 13878 - RNA, 20 nt, synthetic construct
  misc_feature 1..20: note = antisense sequence
  source 1..20: mol_type = other RNA
gaatcttagtcttcgtgtcc

SEQ ID NO: 13879 - RNA, 20 nt, synthetic construct
  misc_feature 1..20: note = antisense sequence
  source 1..20: mol_type = other RNA
tgaatcttagtcttcgtgtc

SEQ ID NO: 13880 - RNA, 20 nt, synthetic construct
  misc_feature 1..20: note = antisense sequence
  source 1..20: mol_type = other RNA
gtgaatcttagtcttcgtgt

SEQ ID NO: 13881 - RNA, 20 nt, synthetic construct
  misc_feature 1..20: note = antisense sequence
  source 1..20: mol_type = other RNA
tgtgaatcttagtcttcgtg

SEQ ID NO: 13882 - RNA, 20 nt, synthetic construct
  misc_feature 1..20: note = antisense sequence
  source 1..20: mol_type = other RNA
ggcattgtgaatcttagtct

SEQ ID NO: 13883 - RNA, 20 nt, synthetic construct
  misc_feature 1..20: note = antisense sequence
  source 1..20: mol_type = other RNA
aggcattgtgaatcttagtc

SEQ ID NO: 13884 - RNA, 20 nt, synthetic construct
  misc_feature 1..20: note = antisense sequence
  source 1..20: mol_type = other RNA
cttcttgttaggcattgtga

SEQ ID NO: 13885 - RNA, 20 nt, synthetic construct
  misc_feature 1..20: note = antisense sequence
  source 1..20: mol_type = other RNA
acttcttgttaggcattgtg

SEQ ID NO: 13886 - RNA, 20 nt, synthetic construct
  misc_feature 1..20: note = antisense sequence
  source 1..20: mol_type = other RNA
tcacttcttgttaggcattg

SEQ ID NO: 13887 - RNA, 20 nt, synthetic construct
  misc_feature 1..20: note = antisense sequence
  source 1..20: mol_type = other RNA
tctcacttcttgttaggcat

SEQ ID NO: 13888 - RNA, 20 nt, synthetic construct
  misc_feature 1..20: note = antisense sequence
  source 1..20: mol_type = other RNA
actctcacttcttgttaggc

SEQ ID NO: 13889 - RNA, 20 nt, synthetic construct
  misc_feature 1..20: note = antisense sequence
  source 1..20: mol_type = other RNA
cactctcacttcttgttagg

SEQ ID NO: 13890 - RNA, 20 nt, synthetic construct
  misc_feature 1..20: note = antisense sequence
  source 1..20: mol_type = other RNA
ccactctcacttcttgttag

SEQ ID NO: 13891 - RNA, 20 nt, synthetic construct
  misc_feature 1..20: note = antisense sequence
  source 1..20: mol_type = other RNA
tccactctcacttcttgtta

SEQ ID NO: 13892 - RNA, 20 nt, synthetic construct
  misc_feature 1..20: note = antisense sequence
  source 1..20: mol_type = other RNA
atccactctcacttcttgtt

SEQ ID NO: 13893 - RNA, 20 nt, synthetic construct
  misc_feature 1..20: note = antisense sequence
  source 1..20: mol_type = other RNA
tatccactctcacttcttgt

SEQ ID NO: 13894 - RNA, 20 nt, synthetic construct
  misc_feature 1..20: note = antisense sequence
  source 1..20: mol_type = other RNA
cttgtatccactctcacttc

SEQ ID NO: 13895 - RNA, 20 nt, synthetic construct
  misc_feature 1..20: note = antisense sequence
  source 1..20: mol_type = other RNA
acttgtatccactctcactt

SEQ ID NO: 13896 - RNA, 20 nt, synthetic construct
  misc_feature 1..20: note = antisense sequence
  source 1..20: mol_type = other RNA
cacttgtatccactctcact

SEQ ID NO: 13897 - RNA, 20 nt, synthetic construct
  misc_feature 1..20: note = antisense sequence
  source 1..20: mol_type = other RNA
tcacttgtatccactctcac

SEQ ID NO: 13898 - RNA, 20 nt, synthetic construct
  misc_feature 1..20: note = antisense sequence
  source 1..20: mol_type = other RNA
gtcacttgtatccactctca

SEQ ID NO: 13899 - RNA, 20 nt, synthetic construct
  misc_feature 1..20: note = antisense sequence
  source 1..20: mol_type = other RNA
tgtcacttgtatccactctc

SEQ ID NO: 13900 - RNA, 20 nt, synthetic construct
  misc_feature 1..20: note = antisense sequence
  source 1..20: mol_type = other RNA
ctgtcacttgtatccactct

SEQ ID NO: 13901 - RNA, 20 nt, synthetic construct
  misc_feature 1..20: note = antisense sequence
  source 1..20: mol_type = other RNA
atctgtcacttgtatccact

SEQ ID NO: 13902 - RNA, 20 nt, synthetic construct
  misc_feature 1..20: note = antisense sequence
  source 1..20: mol_type = other RNA
tcatctgtcacttgtatcca

SEQ ID NO: 13903 - RNA, 20 nt, synthetic construct
  misc_feature 1..20: note = antisense sequence
  source 1..20: mol_type = other RNA
ctctcactatttgcttccaa

SEQ ID NO: 13904 - RNA, 20 nt, synthetic construct
  misc_feature 1..20: note = antisense sequence
  source 1..20: mol_type = other RNA
actctcactatttgcttcca

SEQ ID NO: 13905 - RNA, 20 nt, synthetic construct
  misc_feature 1..20: note = antisense sequence
  source 1..20: mol_type = other RNA
gactctcactatttgcttcc

SEQ ID NO: 13906 - RNA, 20 nt, synthetic construct
  misc_feature 1..20: note = antisense sequence
  source 1..20: mol_type = other RNA
acaagactctcactatttgc

SEQ ID NO: 13907 - RNA, 20 nt, synthetic construct
  misc_feature 1..20: note = antisense sequence
  source 1..20: mol_type = other RNA
gacaagactctcactatttg

SEQ ID NO: 13908 - RNA, 20 nt, synthetic construct
  misc_feature 1..20: note = antisense sequence
  source 1..20: mol_type = other RNA
ggagtcagtccaggtctcat

SEQ ID NO: 13909 - RNA, 20 nt, synthetic construct
  misc_feature 1..20: note = antisense sequence
  source 1..20: mol_type = other RNA
tgggagtcagtccaggtctc

SEQ ID NO: 13910 - RNA, 20 nt, synthetic construct
  misc_feature 1..20: note = antisense sequence
  source 1..20: mol_type = other RNA
cttgggagtcagtccaggtc

SEQ ID NO: 13911 - RNA, 20 nt, synthetic construct
  misc_feature 1..20: note = antisense sequence
  source 1..20: mol_type = other RNA
tcttgggagtcagtccaggt

SEQ ID NO: 13912 - RNA, 20 nt, synthetic construct
  misc_feature 1..20: note = antisense sequence
  source 1..20: mol_type = other RNA
ttcttgggagtcagtccagg

SEQ ID NO: 13913 - RNA, 20 nt, synthetic construct
  misc_feature 1..20: note = antisense sequence
  source 1..20: mol_type = other RNA
tttcttgggagtcagtccag

SEQ ID NO: 13914 - RNA, 20 nt, synthetic construct
  misc_feature 1..20: note = antisense sequence
  source 1..20: mol_type = other RNA
atctttcttgggagtcagtc

SEQ ID NO: 13915 - RNA, 20 nt, synthetic construct
  misc_feature 1..20: note = antisense sequence
  source 1..20: mol_type = other RNA
gatctttcttgggagtcagt

SEQ ID NO: 13916 - RNA, 20 nt, synthetic construct
  misc_feature 1..20: note = antisense sequence
  source 1..20: mol_type = other RNA
tgcctcgaccattgtccacc

SEQ ID NO: 13917 - RNA, 20 nt, synthetic construct
  misc_feature 1..20: note = antisense sequence
  source 1..20: mol_type = other RNA
ctgcctcgaccattgtccac

SEQ ID NO: 13918 - RNA, 20 nt, synthetic construct
  misc_feature 1..20: note = antisense sequence
  source 1..20: mol_type = other RNA
gctgcctcgaccattgtcca

SEQ ID NO: 13919 - RNA, 20 nt, synthetic construct
  misc_feature 1..20: note = antisense sequence
  source 1..20: mol_type = other RNA
agctgcctcgaccattgtcc

SEQ ID NO: 13920 - RNA, 20 nt, synthetic construct
  misc_feature 1..20: note = antisense sequence
  source 1..20: mol_type = other RNA
aagctgcctcgaccattgtc

SEQ ID NO: 13921 - RNA, 20 nt, synthetic construct
  misc_feature 1..20: note = antisense sequence
  source 1..20: mol_type = other RNA
gaagctgcctcgaccattgt

SEQ ID NO: 13922 - RNA, 20 nt, synthetic construct
  misc_feature 1..20: note = antisense sequence
  source 1..20: mol_type = other RNA
tgaagctgcctcgaccattg

SEQ ID NO: 13923 - RNA, 20 nt, synthetic construct
  misc_feature 1..20: note = antisense sequence
  source 1..20: mol_type = other RNA
atgaagctgcctcgaccatt

SEQ ID NO: 13924 - RNA, 20 nt, synthetic construct
  misc_feature 1..20: note = antisense sequence
  source 1..20: mol_type = other RNA
catgaagctgcctcgaccat

SEQ ID NO: 13925 - RNA, 20 nt, synthetic construct
  misc_feature 1..20: note = antisense sequence
  source 1..20: mol_type = other RNA
gcatgaagctgcctcgacca

SEQ ID NO: 13926 - RNA, 20 nt, synthetic construct
  misc_feature 1..20: note = antisense sequence
  source 1..20: mol_type = other RNA
cctagtttcctgcttagtaa

SEQ ID NO: 13927 - RNA, 20 nt, synthetic construct
  misc_feature 1..20: note = antisense sequence
  source 1..20: mol_type = other RNA
atgcctagtttcctgcttag

SEQ ID NO: 13928 - RNA, 20 nt, synthetic construct
  misc_feature 1..20: note = antisense sequence
  source 1..20: mol_type = other RNA
acatgcctagtttcctgctt

SEQ ID NO: 13929 - RNA, 20 nt, synthetic construct
  misc_feature 1..20: note = antisense sequence
  source 1..20: mol_type = other RNA
aacatgcctagtttcctgct

SEQ ID NO: 13930 - RNA, 20 nt, synthetic construct
  misc_feature 1..20: note = antisense sequence
  source 1..20: mol_type = other RNA
gaacatgcctagtttcctgc

SEQ ID NO: 13931 - RNA, 20 nt, synthetic construct
  misc_feature 1..20: note = antisense sequence
  source 1..20: mol_type = other RNA
tgaacatgcctagtttcctg

SEQ ID NO: 13932 - RNA, 20 nt, synthetic construct
  misc_feature 1..20: note = antisense sequence
  source 1..20: mol_type = other RNA
atgaacatgcctagtttcct

SEQ ID NO: 13933 - RNA, 20 nt, synthetic construct
  misc_feature 1..20: note = antisense sequence
  source 1..20: mol_type = other RNA
aatgaacatgcctagtttcc

SEQ ID NO: 13934 - RNA, 20 nt, synthetic construct
  misc_feature 1..20: note = antisense sequence
  source 1..20: mol_type = other RNA
gaatgaacatgcctagtttc

SEQ ID NO: 13935 - RNA, 20 nt, synthetic construct
  misc_feature 1..20: note = antisense sequence
  source 1..20: mol_type = other RNA
gcaatgaatgaacatgccta

SEQ ID NO: 13936 - RNA, 20 nt, synthetic construct
  misc_feature 1..20: note = antisense sequence
  source 1..20: mol_type = other RNA
agcaatgaatgaacatgcct

SEQ ID NO: 13937 - RNA, 20 nt, synthetic construct
  misc_feature 1..20: note = antisense sequence
  source 1..20: mol_type = other RNA
ttaccctttcatcagcaatg

SEQ ID NO: 13938 - RNA, 20 nt, synthetic construct
  misc_feature 1..20: note = antisense sequence
  source 1..20: mol_type = other RNA
cagtttaccctttcatcagc

SEQ ID NO: 13939 - RNA, 20 nt, synthetic construct
  misc_feature 1..20: note = antisense sequence
  source 1..20: mol_type = other RNA
agccagtttaccctttcatc

SEQ ID NO: 13940 - RNA, 20 nt, synthetic construct
  misc_feature 1..20: note = antisense sequence
  source 1..20: mol_type = other RNA
tttagccagtttaccctttc

SEQ ID NO: 13941 - RNA, 20 nt, synthetic construct
  misc_feature 1..20: note = antisense sequence
  source 1..20: mol_type = other RNA
agttttagccagtttaccct

SEQ ID NO: 13942 - RNA, 20 nt, synthetic construct
  misc_feature 1..20: note = antisense sequence
  source 1..20: mol_type = other RNA
gagttttagccagtttaccc

SEQ ID NO: 13943 - RNA, 20 nt, synthetic construct
  misc_feature 1..20: note = antisense sequence
  source 1..20: mol_type = other RNA
tgagttttagccagtttacc

SEQ ID NO: 13944 - RNA, 20 nt, synthetic construct
  misc_feature 1..20: note = antisense sequence
  source 1..20: mol_type = other RNA
cgaatgagttttagccagtt

SEQ ID NO: 13945 - RNA, 20 nt, synthetic construct
  misc_feature 1..20: note = antisense sequence
  source 1..20: mol_type = other RNA
gtaggaacattggaatgctt

SEQ ID NO: 13946 - RNA, 20 nt, synthetic construct
  misc_feature 1..20: note = antisense sequence
  source 1..20: mol_type = other RNA
tgctgtgatgacacctttaa

SEQ ID NO: 13947 - RNA, 20 nt, synthetic construct
  misc_feature 1..20: note = antisense sequence
  source 1..20: mol_type = other RNA
cagtgctgtgatgacacctt

SEQ ID NO: 13948 - RNA, 20 nt, synthetic construct
  misc_feature 1..20: note = antisense sequence
  source 1..20: mol_type = other RNA
acagtgctgtgatgacacct

SEQ ID NO: 13949 - RNA, 20 nt, synthetic construct
  misc_feature 1..20: note = antisense sequence
  source 1..20: mol_type = other RNA
ggtttctgagtatagtggta

SEQ ID NO: 13950 - RNA, 20 nt, synthetic construct
  misc_feature 1..20: note = antisense sequence
  source 1..20: mol_type = other RNA
aggtttctgagtatagtggt

SEQ ID NO: 13951 - RNA, 20 nt, synthetic construct
  misc_feature 1..20: note = antisense sequence
  source 1..20: mol_type = other RNA
aaggtttctgagtatagtgg

SEQ ID NO: 13952 - RNA, 20 nt, synthetic construct
  misc_feature 1..20: note = antisense sequence
  source 1..20: mol_type = other RNA
agcagactataccagcatat

SEQ ID NO: 13953 - RNA, 20 nt, synthetic construct
  misc_feature 1..20: note = antisense sequence
  source 1..20: mol_type = other RNA
aagcagactataccagcata

SEQ ID NO: 13954 - RNA, 20 nt, synthetic construct
  misc_feature 1..20: note = antisense sequence
  source 1..20: mol_type = other RNA
tggaagcagactataccagc

SEQ ID NO: 13955 - RNA, 20 nt, synthetic construct
  misc_feature 1..20: note = antisense sequence
  source 1..20: mol_type = other RNA
atggaagcagactataccag

SEQ ID NO: 13956 - RNA, 20 nt, synthetic construct
  misc_feature 1..20: note = antisense sequence
  source 1..20: mol_type = other RNA
aatggaagcagactatacca

SEQ ID NO: 13957 - RNA, 20 nt, synthetic construct
  misc_feature 1..20: note = antisense sequence
  source 1..20: mol_type = other RNA
taatggaagcagactatacc

SEQ ID NO: 13958 - RNA, 20 nt, synthetic construct
  misc_feature 1..20: note = antisense sequence
  source 1..20: mol_type = other RNA
catttagtacactcagtggt

SEQ ID NO: 13959 - RNA, 20 nt, synthetic construct
  misc_feature 1..20: note = antisense sequence
  source 1..20: mol_type = other RNA
gttatactaccactcagcaa

SEQ ID NO: 13960 - RNA, 20 nt, synthetic construct
  misc_feature 1..20: note = antisense sequence
  source 1..20: mol_type = other RNA
ggtcactacttatgcttttg

SEQ ID NO: 13961 - RNA, 20 nt, synthetic construct
  misc_feature 1..20: note = antisense sequence
  source 1..20: mol_type = other RNA
gaggtcactacttatgcttt

SEQ ID NO: 13962 - RNA, 20 nt, synthetic construct
  misc_feature 1..20: note = antisense sequence
  source 1..20: mol_type = other RNA
tgaggtcactacttatgctt

SEQ ID NO: 13963 - RNA, 20 nt, synthetic construct
  misc_feature 1..20: note = antisense sequence
  source 1..20: mol_type = other RNA
atgaggtcactacttatgct

SEQ ID NO: 13964 - RNA, 20 nt, synthetic construct
  misc_feature 1..20: note = antisense sequence
  source 1..20: mol_type = other RNA
cggaacaattactgcacatt

SEQ ID NO: 13965 - RNA, 20 nt, synthetic construct
  misc_feature 1..20: note = antisense sequence
  source 1..20: mol_type = other RNA
ccggaacaattactgcacat

SEQ ID NO: 13966 - RNA, 20 nt, synthetic construct
  misc_feature 1..20: note = antisense sequence
  source 1..20: mol_type = other RNA
gccggaacaattactgcaca

SEQ ID NO: 13967 - RNA, 20 nt, synthetic construct
  misc_feature 1..20: note = antisense sequence
  source 1..20: mol_type = other RNA
aagccggaacaattactgca

SEQ ID NO: 13968 - RNA, 20 nt, synthetic construct
  misc_feature 1..20: note = antisense sequence
  source 1..20: mol_type = other RNA
caagccggaacaattactgc

SEQ ID NO: 13969 - RNA, 20 nt, synthetic construct
  misc_feature 1..20: note = antisense sequence
  source 1..20: mol_type = other RNA
ccaagccggaacaattactg

SEQ ID NO: 13970 - RNA, 20 nt, synthetic construct
  misc_feature 1..20: note = antisense sequence
  source 1..20: mol_type = other RNA
tccaagccggaacaattact

SEQ ID NO: 13971 - RNA, 20 nt, synthetic construct
  misc_feature 1..20: note = antisense sequence
  source 1..20: mol_type = other RNA
atccaagccggaacaattac

SEQ ID NO: 13972 - RNA, 20 nt, synthetic construct
  misc_feature 1..20: note = antisense sequence
  source 1..20: mol_type = other RNA
gatccaagccggaacaatta

SEQ ID NO: 13973 - RNA, 20 nt, synthetic construct
  misc_feature 1..20: note = antisense sequence
  source 1..20: mol_type = other RNA
agatccaagccggaacaatt

SEQ ID NO: 13974 - RNA, 20 nt, synthetic construct
  misc_feature 1..20: note = antisense sequence
  source 1..20: mol_type = other RNA
tagatccaagccggaacaat

SEQ ID NO: 13975 - RNA, 20 nt, synthetic construct
  misc_feature 1..20: note = antisense sequence
  source 1..20: mol_type = other RNA
ttagatccaagccggaacaa

SEQ ID NO: 13976 - RNA, 20 nt, synthetic construct
  misc_feature 1..20: note = antisense sequence
  source 1..20: mol_type = other RNA
cttagatccaagccggaaca

SEQ ID NO: 13977 - RNA, 20 nt, synthetic construct
  misc_feature 1..20: note = antisense sequence
  source 1..20: mol_type = other RNA
tcttagatccaagccggaac

SEQ ID NO: 13978 - RNA, 20 nt, synthetic construct
  misc_feature 1..20: note = antisense sequence
  source 1..20: mol_type = other RNA
gtcttagatccaagccggaa

SEQ ID NO: 13979 - RNA, 20 nt, synthetic construct
  misc_feature 1..20: note = antisense sequence
  source 1..20: mol_type = other RNA
tgtcttagatccaagccgga

SEQ ID NO: 13980 - RNA, 20 nt, synthetic construct
  misc_feature 1..20: note = antisense sequence
  source 1..20: mol_type = other RNA
ttgtcttagatccaagccgg

SEQ ID NO: 13981 - RNA, 20 nt, synthetic construct
  misc_feature 1..20: note = antisense sequence
  source 1..20: mol_type = other RNA
attgtcttagatccaagccg

SEQ ID NO: 13982 - RNA, 20 nt, synthetic construct
  misc_feature 1..20: note = antisense sequence
  source 1..20: mol_type = other RNA
cattgtcttagatccaagcc

SEQ ID NO: 13983 - RNA, 20 nt, synthetic construct
  misc_feature 1..20: note = antisense sequence
  source 1..20: mol_type = other RNA
gtcattgtcttagatccaag

SEQ ID NO: 13984 - RNA, 20 nt, synthetic construct
  misc_feature 1..20: note = antisense sequence
  source 1..20: mol_type = other RNA
ggtcattgtcttagatccaa

SEQ ID NO: 13985 - RNA, 20 nt, synthetic construct
  misc_feature 1..20: note = antisense sequence
  source 1..20: mol_type = other RNA
tgaggtcattgtcttagatc

SEQ ID NO: 13986 - RNA, 20 nt, synthetic construct
  misc_feature 1..20: note = antisense sequence
  source 1..20: mol_type = other RNA
ctgaggtcattgtcttagat

SEQ ID NO: 13987 - RNA, 20 nt, synthetic construct
  misc_feature 1..20: note = antisense sequence
  source 1..20: mol_type = other RNA
gaaagcccagtaatgtctac

SEQ ID NO: 13988 - RNA, 20 nt, synthetic construct
  misc_feature 1..20: note = antisense sequence
  source 1..20: mol_type = other RNA
ctcgaaagcccagtaatgtc

SEQ ID NO: 13989 - RNA, 20 nt, synthetic construct
  misc_feature 1..20: note = antisense sequence
  source 1..20: mol_type = other RNA
actcgaaagcccagtaatgt

SEQ ID NO: 13990 - RNA, 20 nt, synthetic construct
  misc_feature 1..20: note = antisense sequence
  source 1..20: mol_type = other RNA
aactcgaaagcccagtaatg

SEQ ID NO: 13991 - RNA, 20 nt, synthetic construct
  misc_feature 1..20: note = antisense sequence
  source 1..20: mol_type = other RNA
taactcgaaagcccagtaat

SEQ ID NO: 13992 - RNA, 20 nt, synthetic construct
  misc_feature 1..20: note = antisense sequence
  source 1..20: mol_type = other RNA
ttaactcgaaagcccagtaa

SEQ ID NO: 13993 - RNA, 20 nt, synthetic construct
  misc_feature 1..20: note = antisense sequence
  source 1..20: mol_type = other RNA
tttaactcgaaagcccagta

SEQ ID NO: 13994 - RNA, 20 nt, synthetic construct
  misc_feature 1..20: note = antisense sequence
  source 1..20: mol_type = other RNA
gttttaactcgaaagcccag

SEQ ID NO: 13995 - RNA, 20 nt, synthetic construct
  misc_feature 1..20: note = antisense sequence
  source 1..20: mol_type = other RNA
cgttttaactcgaaagccca

SEQ ID NO: 13996 - RNA, 20 nt, synthetic construct
  misc_feature 1..20: note = antisense sequence
  source 1..20: mol_type = other RNA
tcgttttaactcgaaagccc

SEQ ID NO: 13997 - RNA, 20 nt, synthetic construct
  misc_feature 1..20: note = antisense sequence
  source 1..20: mol_type = other RNA
gtcgttttaactcgaaagcc

SEQ ID NO: 13998 - RNA, 20 nt, synthetic construct
  misc_feature 1..20: note = antisense sequence
  source 1..20: mol_type = other RNA
agtcgttttaactcgaaagc

SEQ ID NO: 13999 - RNA, 20 nt, synthetic construct
  misc_feature 1..20: note = antisense sequence
  source 1..20: mol_type = other RNA
cagtcgttttaactcgaaag

SEQ ID NO: 14000 - RNA, 20 nt, synthetic construct
  misc_feature 1..20: note = antisense sequence
  source 1..20: mol_type = other RNA
ctcagtcgttttaactcgaa

SEQ ID NO: 14001 - RNA, 20 nt, synthetic construct
  misc_feature 1..20: note = antisense sequence
  source 1..20: mol_type = other RNA
actcagtcgttttaactcga

SEQ ID NO: 14002 - RNA, 20 nt, synthetic construct
  misc_feature 1..20: note = antisense sequence
  source 1..20: mol_type = other RNA
aactcagtcgttttaactcg

SEQ ID NO: 14003 - RNA, 20 nt, synthetic construct
  misc_feature 1..20: note = antisense sequence
  source 1..20: mol_type = other RNA
ggtcaaaagctattaagagg

SEQ ID NO: 14004 - RNA, 20 nt, synthetic construct
  misc_feature 1..20: note = antisense sequence
  source 1..20: mol_type = other RNA
tatgccaggtcaaaagctat

SEQ ID NO: 14005 - RNA, 20 nt, synthetic construct
  misc_feature 1..20: note = antisense sequence
  source 1..20: mol_type = other RNA
ttatgccaggtcaaaagcta

SEQ ID NO: 14006 - RNA, 20 nt, synthetic construct
  misc_feature 1..20: note = antisense sequence
  source 1..20: mol_type = other RNA
tttatgccaggtcaaaagct

SEQ ID NO: 14007 - RNA, 20 nt, synthetic construct
  misc_feature 1..20: note = antisense sequence
  source 1..20: mol_type = other RNA
ctagacatggatgctatttc

SEQ ID NO: 14008 - RNA, 20 nt, synthetic construct
  misc_feature 1..20: note = antisense sequence
  source 1..20: mol_type = other RNA
gtgctagacatggatgctat

SEQ ID NO: 14009 - RNA, 20 nt, synthetic construct
  misc_feature 1..20: note = antisense sequence
  source 1..20: mol_type = other RNA
attgtgctagacatggatgc

SEQ ID NO: 14010 - RNA, 20 nt, synthetic construct
  misc_feature 1..20: note = antisense sequence
  source 1..20: mol_type = other RNA
cattgtgctagacatggatg

SEQ ID NO: 14011 - RNA, 20 nt, synthetic construct
  misc_feature 1..20: note = antisense sequence
  source 1..20: mol_type = other RNA
gcattgtgctagacatggat

SEQ ID NO: 14012 - RNA, 20 nt, synthetic construct
  misc_feature 1..20: note = antisense sequence
  source 1..20: mol_type = other RNA
gaggcattgtgctagacatg

SEQ ID NO: 14013 - RNA, 20 nt, synthetic construct
  misc_feature 1..20: note = antisense sequence
  source 1..20: mol_type = other RNA
acatttgaggcattgtgcta

SEQ ID NO: 14014 - RNA, 20 nt, synthetic construct
  misc_feature 1..20: note = antisense sequence
  source 1..20: mol_type = other RNA
aacatttgaggcattgtgct

SEQ ID NO: 14015 - RNA, 20 nt, synthetic construct
  misc_feature 1..20: note = antisense sequence
  source 1..20: mol_type = other RNA
cagctcttcctctatttcta

SEQ ID NO: 14016 - RNA, 20 nt, synthetic construct
  misc_feature 1..20: note = antisense sequence
  source 1..20: mol_type = other RNA
tcagctcttcctctatttct

SEQ ID NO: 14017 - RNA, 20 nt, synthetic construct
  misc_feature 1..20: note = antisense sequence
  source 1..20: mol_type = other RNA
tgagttcagctcttcctcta

SEQ ID NO: 14018 - RNA, 20 nt, synthetic construct
  misc_feature 1..20: note = antisense sequence
  source 1..20: mol_type = other RNA
gtgagttcagctcttcctct

SEQ ID NO: 14019 - RNA, 20 nt, synthetic construct
  misc_feature 1..20: note = antisense sequence
  source 1..20: mol_type = other RNA
tgtgagttcagctcttcctc

SEQ ID NO: 14020 - RNA, 20 nt, synthetic construct
  misc_feature 1..20: note = antisense sequence
  source 1..20: mol_type = other RNA
cttgtgagttcagctcttcc

SEQ ID NO: 14021 - RNA, 20 nt, synthetic construct
  misc_feature 1..20: note = antisense sequence
  source 1..20: mol_type = other RNA
tccttgtgagttcagctctt

SEQ ID NO: 14022 - RNA, 20 nt, synthetic construct
  misc_feature 1..20: note = antisense sequence
  source 1..20: mol_type = other RNA
gtccttgtgagttcagctct

SEQ ID NO: 14023 - RNA, 20 nt, synthetic construct
  misc_feature 1..20: note = antisense sequence
  source 1..20: mol_type = other RNA
tgtctgtccttgtgagttca

SEQ ID NO: 14024 - RNA, 20 nt, synthetic construct
  misc_feature 1..20: note = antisense sequence
  source 1..20: mol_type = other RNA
attgtctgtccttgtgagtt

SEQ ID NO: 14025 - RNA, 20 nt, synthetic construct
  misc_feature 1..20: note = antisense sequence
  source 1..20: mol_type = other RNA
ctatctcttgtctggactgt

SEQ ID NO: 14026 - RNA, 20 nt, synthetic construct
  misc_feature 1..20: note = antisense sequence
  source 1..20: mol_type = other RNA
tgctatctcttgtctggact

SEQ ID NO: 14027 - RNA, 20 nt, synthetic construct
  misc_feature 1..20: note = antisense sequence
  source 1..20: mol_type = other RNA
ctgctatctcttgtctggac

SEQ ID NO: 14028 - RNA, 20 nt, synthetic construct
  misc_feature 1..20: note = antisense sequence
  source 1..20: mol_type = other RNA
cctgctatctcttgtctgga

SEQ ID NO: 14029 - RNA, 20 nt, synthetic construct
  misc_feature 1..20: note = antisense sequence
  source 1..20: mol_type = other RNA
ccctgctatctcttgtctgg

SEQ ID NO: 14030 - RNA, 20 nt, synthetic construct
  misc_feature 1..20: note = antisense sequence
  source 1..20: mol_type = other RNA
aggtccctgaacagcccgta

SEQ ID NO: 14031 - RNA, 20 nt, synthetic construct
  misc_feature 1..20: note = antisense sequence
  source 1..20: mol_type = other RNA
aaggtccctgaacagcccgt

SEQ ID NO: 14032 - RNA, 20 nt, synthetic construct
  misc_feature 1..20: note = antisense sequence
  source 1..20: mol_type = other RNA
aaaggtccctgaacagcccg

SEQ ID NO: 14033 - RNA, 20 nt, synthetic construct
  misc_feature 1..20: note = antisense sequence
  source 1..20: mol_type = other RNA
taaaggtccctgaacagccc

SEQ ID NO: 14034 - RNA, 20 nt, synthetic construct
  misc_feature 1..20: note = antisense sequence
  source 1..20: mol_type = other RNA
ctaaaggtccctgaacagcc

SEQ ID NO: 14035 - RNA, 20 nt, synthetic construct
  misc_feature 1..20: note = antisense sequence
  source 1..20: mol_type = other RNA
tctaaaggtccctgaacagc

SEQ ID NO: 14036 - RNA, 20 nt, synthetic construct
  misc_feature 1..20: note = antisense sequence
  source 1..20: mol_type = other RNA
agtctaaaggtccctgaaca

SEQ ID NO: 14037 - RNA, 20 nt, synthetic construct
  misc_feature 1..20: note = antisense sequence
  source 1..20: mol_type = other RNA
aagtctaaaggtccctgaac

SEQ ID NO: 14038 - RNA, 20 nt, synthetic construct
  misc_feature 1..20: note = antisense sequence
  source 1..20: mol_type = other RNA
gaagtctaaaggtccctgaa

SEQ ID NO: 14039 - RNA, 20 nt, synthetic construct
  misc_feature 1..20: note = antisense sequence
  source 1..20: mol_type = other RNA
agaagtctaaaggtccctga

SEQ ID NO: 14040 - RNA, 20 nt, synthetic construct
  misc_feature 1..20: note = antisense sequence
  source 1..20: mol_type = other RNA
aagaagtctaaaggtccctg

SEQ ID NO: 14041 - RNA, 20 nt, synthetic construct
  misc_feature 1..20: note = antisense sequence
  source 1..20: mol_type = other RNA
aaagaagtctaaaggtccct

SEQ ID NO: 14042 - RNA, 20 nt, synthetic construct
  misc_feature 1..20: note = antisense sequence
  source 1..20: mol_type = other RNA
gaaagaagtctaaaggtccc

SEQ ID NO: 14043 - RNA, 20 nt, synthetic construct
  misc_feature 1..20: note = antisense sequence
  source 1..20: mol_type = other RNA
tgaaagaagtctaaaggtcc

SEQ ID NO: 14044 - RNA, 20 nt, synthetic construct
  misc_feature 1..20: note = antisense sequence
  source 1..20: mol_type = other RNA
ggatttacgagtttgttcca

SEQ ID NO: 14045 - RNA, 20 nt, synthetic construct
  misc_feature 1..20: note = antisense sequence
  source 1..20: mol_type = other RNA
gggatttacgagtttgttcc

SEQ ID NO: 14046 - RNA, 20 nt, synthetic construct
  misc_feature 1..20: note = antisense sequence
  source 1..20: mol_type = other RNA
gaatcaagtgtccaggtgaa

SEQ ID NO: 14047 - RNA, 20 nt, synthetic construct
  misc_feature 1..20: note = antisense sequence
  source 1..20: mol_type = other RNA
ggaatcaagtgtccaggtga

SEQ ID NO: 14048 - RNA, 20 nt, synthetic construct
  misc_feature 1..20: note = antisense sequence
  source 1..20: mol_type = other RNA
agagatggaatcaagtgtcc

SEQ ID NO: 14049 - RNA, 20 nt, synthetic construct
  misc_feature 1..20: note = antisense sequence
  source 1..20: mol_type = other RNA
ggaaaagagatggaatcaag

SEQ ID NO: 14050 - RNA, 20 nt, synthetic construct
  misc_feature 1..20: note = antisense sequence
  source 1..20: mol_type = other RNA
ctcaggactccatttcttta

SEQ ID NO: 14051 - RNA, 20 nt, synthetic construct
  misc_feature 1..20: note = antisense sequence
  source 1..20: mol_type = other RNA
cgctcaggactccatttctt

SEQ ID NO: 14052 - RNA, 20 nt, synthetic construct
  misc_feature 1..20: note = antisense sequence
  source 1..20: mol_type = other RNA
gcgctcaggactccatttct

SEQ ID NO: 14053 - RNA, 20 nt, synthetic construct
  misc_feature 1..20: note = antisense sequence
  source 1..20: mol_type = other RNA
gggttctgcttcatgtataa

SEQ ID NO: 14054 - RNA, 20 nt, synthetic construct
  misc_feature 1..20: note = antisense sequence
  source 1..20: mol_type = other RNA
agggttctgcttcatgtata

SEQ ID NO: 14055 - RNA, 20 nt, synthetic construct
  misc_feature 1..20: note = antisense sequence
  source 1..20: mol_type = other RNA
agagggttctgcttcatgta

SEQ ID NO: 14056 - RNA, 20 nt, synthetic construct
  misc_feature 1..20: note = antisense sequence
  source 1..20: mol_type = other RNA
aagagggttctgcttcatgt

SEQ ID NO: 14057 - RNA, 20 nt, synthetic construct
  misc_feature 1..20: note = antisense sequence
  source 1..20: mol_type = other RNA
gcatggaagagggttctgct

SEQ ID NO: 14058 - RNA, 20 nt, synthetic construct
  misc_feature 1..20: note = antisense sequence
  source 1..20: mol_type = other RNA
agtgcatggaagagggttct

SEQ ID NO: 14059 - RNA, 20 nt, synthetic construct
  misc_feature 1..20: note = antisense sequence
  source 1..20: mol_type = other RNA
tgagtgcatggaagagggtt

SEQ ID NO: 14060 - RNA, 20 nt, synthetic construct
  misc_feature 1..20: note = antisense sequence
  source 1..20: mol_type = other RNA
aagtgagtgcatggaagagg

SEQ ID NO: 14061 - RNA, 20 nt, synthetic construct
  misc_feature 1..20: note = antisense sequence
  source 1..20: mol_type = other RNA
aaagtgagtgcatggaagag

SEQ ID NO: 14062 - RNA, 20 nt, synthetic construct
  misc_feature 1..20: note = antisense sequence
  source 1..20: mol_type = other RNA
caaagtgagtgcatggaaga

SEQ ID NO: 14063 - RNA, 20 nt, synthetic construct
  misc_feature 1..20: note = antisense sequence
  source 1..20: mol_type = other RNA
gcaaagtgagtgcatggaag

SEQ ID NO: 14064 - RNA, 20 nt, synthetic construct
  misc_feature 1..20: note = antisense sequence
  source 1..20: mol_type = other RNA
tgggagtgcaaagtgagtgc

SEQ ID NO: 14065 - RNA, 20 nt, synthetic construct
  misc_feature 1..20: note = antisense sequence
  source 1..20: mol_type = other RNA
ttgggagtgcaaagtgagtg

SEQ ID NO: 14066 - RNA, 20 nt, synthetic construct
  misc_feature 1..20: note = antisense sequence
  source 1..20: mol_type = other RNA
cttgggagtgcaaagtgagt

SEQ ID NO: 14067 - RNA, 20 nt, synthetic construct
  misc_feature 1..20: note = antisense sequence
  source 1..20: mol_type = other RNA
atcaacttgggagtgcaaag

SEQ ID NO: 14068 - RNA, 20 nt, synthetic construct
  misc_feature 1..20: note = antisense sequence
  source 1..20: mol_type = other RNA
catcaacttgggagtgcaaa

SEQ ID NO: 14069 - RNA, 20 nt, synthetic construct
  misc_feature 1..20: note = antisense sequence
  source 1..20: mol_type = other RNA
tcatcaacttgggagtgcaa

SEQ ID NO: 14070 - RNA, 20 nt, synthetic construct
  misc_feature 1..20: note = antisense sequence
  source 1..20: mol_type = other RNA
gtcatcaacttgggagtgca

SEQ ID NO: 14071 - RNA, 20 nt, synthetic construct
  misc_feature 1..20: note = antisense sequence
  source 1..20: mol_type = other RNA
atgtcatcaacttgggagtg

SEQ ID NO: 14072 - RNA, 20 nt, synthetic construct
  misc_feature 1..20: note = antisense sequence
  source 1..20: mol_type = other RNA
tgaatgtcatcaacttggga

SEQ ID NO: 14073 - RNA, 20 nt, synthetic construct
  misc_feature 1..20: note = antisense sequence
  source 1..20: mol_type = other RNA
caatgggattactcacacat

SEQ ID NO: 14074 - RNA, 20 nt, synthetic construct
  misc_feature 1..20: note = antisense sequence
  source 1..20: mol_type = other RNA
aacaatgggattactcacac

SEQ ID NO: 14075 - RNA, 20 nt, synthetic construct
  misc_feature 1..20: note = antisense sequence
  source 1..20: mol_type = other RNA
tctcgggacctacaaacaaa

SEQ ID NO: 14076 - RNA, 20 nt, synthetic construct
  misc_feature 1..20: note = antisense sequence
  source 1..20: mol_type = other RNA
atctcgggacctacaaacaa

SEQ ID NO: 14077 - RNA, 20 nt, synthetic construct
  misc_feature 1..20: note = antisense sequence
  source 1..20: mol_type = other RNA
catctcgggacctacaaaca

SEQ ID NO: 14078 - RNA, 20 nt, synthetic construct
  misc_feature 1..20: note = antisense sequence
  source 1..20: mol_type = other RNA
acatctcgggacctacaaac

SEQ ID NO: 14079 - RNA, 20 nt, synthetic construct
  misc_feature 1..20: note = antisense sequence
  source 1..20: mol_type = other RNA
cacatctcgggacctacaaa

SEQ ID NO: 14080 - RNA, 20 nt, synthetic construct
  misc_feature 1..20: note = antisense sequence
  source 1..20: mol_type = other RNA
ccacatctcgggacctacaa

SEQ ID NO: 14081 - RNA, 20 nt, synthetic construct
  misc_feature 1..20: note = antisense sequence
  source 1..20: mol_type = other RNA
gccacatctcgggacctaca

SEQ ID NO: 14082 - RNA, 20 nt, synthetic construct
  misc_feature 1..20: note = antisense sequence
  source 1..20: mol_type = other RNA
gctcaaaattcatggtcact

SEQ ID NO: 14083 - RNA, 20 nt, synthetic construct
  misc_feature 1..20: note = antisense sequence
  source 1..20: mol_type = other RNA
ggctcaaaattcatggtcac

SEQ ID NO: 14084 - RNA, 20 nt, synthetic construct
  misc_feature 1..20: note = antisense sequence
  source 1..20: mol_type = other RNA
tggctcaaaattcatggtca

SEQ ID NO: 14085 - RNA, 20 nt, synthetic construct
  misc_feature 1..20: note = antisense sequence
  source 1..20: mol_type = other RNA
ttggctcaaaattcatggtc

SEQ ID NO: 14086 - RNA, 20 nt, synthetic construct
  misc_feature 1..20: note = antisense sequence
  source 1..20: mol_type = other RNA
tgtttcctttccctccatat

SEQ ID NO: 14087 - RNA, 20 nt, synthetic construct
  misc_feature 1..20: note = antisense sequence
  source 1..20: mol_type = other RNA
cacactgtagcatttatgca

SEQ ID NO: 14088 - RNA, 20 nt, synthetic construct
  misc_feature 1..20: note = antisense sequence
  source 1..20: mol_type = other RNA
acacactgtagcatttatgc

SEQ ID NO: 14089 - RNA, 20 nt, synthetic construct
  misc_feature 1..20: note = antisense sequence
  source 1..20: mol_type = other RNA
gcttcataaatcgtgtcttc

SEQ ID NO: 14090 - RNA, 20 nt, synthetic construct
  misc_feature 1..20: note = antisense sequence
  source 1..20: mol_type = other RNA
cagcttcataaatcgtgtct

SEQ ID NO: 14091 - RNA, 20 nt, synthetic construct
  misc_feature 1..20: note = antisense sequence
  source 1..20: mol_type = other RNA
ccagcttcataaatcgtgtc

SEQ ID NO: 14092 - RNA, 20 nt, synthetic construct
  misc_feature 1..20: note = antisense sequence
  source 1..20: mol_type = other RNA
accagcttcataaatcgtgt

SEQ ID NO: 14093 - RNA, 20 nt, synthetic construct
  misc_feature 1..20: note = antisense sequence
  source 1..20: mol_type = other RNA
cttaccagcttcataaatcg

SEQ ID NO: 14094 - RNA, 20 nt, synthetic construct
  misc_feature 1..20: note = antisense sequence
  source 1..20: mol_type = other RNA
tgtcctctacccaaaagtac

SEQ ID NO: 14095 - RNA, 20 nt, synthetic construct
  misc_feature 1..20: note = antisense sequence
  source 1..20: mol_type = other RNA
ttgtcctctacccaaaagta

SEQ ID NO: 14096 - RNA, 20 nt, synthetic construct
  misc_feature 1..20: note = antisense sequence
  source 1..20: mol_type = other RNA
attgtcctctacccaaaagt

SEQ ID NO: 14097 - RNA, 20 nt, synthetic construct
  misc_feature 1..20: note = antisense sequence
  source 1..20: mol_type = other RNA
cttcatcatgctagagcaaa

SEQ ID NO: 14098 - RNA, 20 nt, synthetic construct
  misc_feature 1..20: note = antisense sequence
  source 1..20: mol_type = other RNA
gacttcatcatgctagagca

SEQ ID NO: 14099 - RNA, 20 nt, synthetic construct
  misc_feature 1..20: note = antisense sequence
  source 1..20: mol_type = other RNA
ggacttcatcatgctagagc

SEQ ID NO: 14100 - RNA, 20 nt, synthetic construct
  misc_feature 1..20: note = antisense sequence
  source 1..20: mol_type = other RNA
tggacttcatcatgctagag

SEQ ID NO: 14101 - RNA, 20 nt, synthetic construct
  misc_feature 1..20: note = antisense sequence
  source 1..20: mol_type = other RNA
acgtgcagctcaccatgtgg

SEQ ID NO: 14102 - RNA, 20 nt, synthetic construct
  misc_feature 1..20: note = antisense sequence
  source 1..20: mol_type = other RNA
gacgtgcagctcaccatgtg

SEQ ID NO: 14103 - RNA, 20 nt, synthetic construct
  misc_feature 1..20: note = antisense sequence
  source 1..20: mol_type = other RNA
tgacgtgcagctcaccatgt

SEQ ID NO: 14104 - RNA, 20 nt, synthetic construct
  misc_feature 1..20: note = antisense sequence
  source 1..20: mol_type = other RNA
atgacgtgcagctcaccatg

SEQ ID NO: 14105 - RNA, 20 nt, synthetic construct
  misc_feature 1..20: note = antisense sequence
  source 1..20: mol_type = other RNA
atatgacgtgcagctcacca

SEQ ID NO: 14106 - RNA, 20 nt, synthetic construct
  misc_feature 1..20: note = antisense sequence
  source 1..20: mol_type = other RNA
aatatgacgtgcagctcacc

SEQ ID NO: 14107 - RNA, 20 nt, synthetic construct
  misc_feature 1..20: note = antisense sequence
  source 1..20: mol_type = other RNA
aaatatgacgtgcagctcac

SEQ ID NO: 14108 - RNA, 20 nt, synthetic construct
  misc_feature 1..20: note = antisense sequence
  source 1..20: mol_type = other RNA
caaatatgacgtgcagctca

SEQ ID NO: 14109 - RNA, 20 nt, synthetic construct
  misc_feature 1..20: note = antisense sequence
  source 1..20: mol_type = other RNA
gcaaatatgacgtgcagctc

SEQ ID NO: 14110 - RNA, 20 nt, synthetic construct
  misc_feature 1..20: note = antisense sequence
  source 1..20: mol_type = other RNA
ccataacctattccttttgc

SEQ ID NO: 14111 - RNA, 20 nt, synthetic construct
  misc_feature 1..20: note = antisense sequence
  source 1..20: mol_type = other RNA
aattgactgggttccataac

SEQ ID NO: 14112 - RNA, 20 nt, synthetic construct
  misc_feature 1..20: note = antisense sequence
  source 1..20: mol_type = other RNA
gaattgactgggttccataa

SEQ ID NO: 14113 - RNA, 20 nt, synthetic construct
  misc_feature 1..20: note = antisense sequence
  source 1..20: mol_type = other RNA
agaattgactgggttccata

SEQ ID NO: 14114 - RNA, 20 nt, synthetic construct
  misc_feature 1..20: note = antisense sequence
  source 1..20: mol_type = other RNA
cagaattgactgggttccat

SEQ ID NO: 14115 - RNA, 20 nt, synthetic construct
  misc_feature 1..20: note = antisense sequence
  source 1..20: mol_type = other RNA
gggcactgcatacaaacatg

SEQ ID NO: 14116 - RNA, 20 nt, synthetic construct
  misc_feature 1..20: note = antisense sequence
  source 1..20: mol_type = other RNA
gagggcactgcatacaaaca

SEQ ID NO: 14117 - RNA, 20 nt, synthetic construct
  misc_feature 1..20: note = antisense sequence
  source 1..20: mol_type = other RNA
tgagggcactgcatacaaac

SEQ ID NO: 14118 - RNA, 20 nt, synthetic construct
  misc_feature 1..20: note = antisense sequence
  source 1..20: mol_type = other RNA
ttgagggcactgcatacaaa

SEQ ID NO: 14119 - RNA, 20 nt, synthetic construct
  misc_feature 1..20: note = antisense sequence
  source 1..20: mol_type = other RNA
gttgagggcactgcatacaa

SEQ ID NO: 14120 - RNA, 20 nt, synthetic construct
  misc_feature 1..20: note = antisense sequence
  source 1..20: mol_type = other RNA
tgttgagggcactgcataca

SEQ ID NO: 14121 - RNA, 20 nt, synthetic construct
  misc_feature 1..20: note = antisense sequence
  source 1..20: mol_type = other RNA
gtgttgagggcactgcatac

SEQ ID NO: 14122 - RNA, 20 nt, synthetic construct
  misc_feature 1..20: note = antisense sequence
  source 1..20: mol_type = other RNA
aactatggagtgttgagggc

SEQ ID NO: 14123 - RNA, 20 nt, synthetic construct
  misc_feature 1..20: note = antisense sequence
  source 1..20: mol_type = other RNA
gaaactatggagtgttgagg

SEQ ID NO: 14124 - RNA, 20 nt, synthetic construct
  misc_feature 1..20: note = antisense sequence
  source 1..20: mol_type = other RNA
agaaactatggagtgttgag

SEQ ID NO: 14125 - RNA, 20 nt, synthetic construct
  misc_feature 1..20: note = antisense sequence
  source 1..20: mol_type = other RNA
gacagaaactatggagtgtt

SEQ ID NO: 14126 - RNA, 20 nt, synthetic construct
  misc_feature 1..20: note = antisense sequence
  source 1..20: mol_type = other RNA
cagacagaaactatggagtg

SEQ ID NO: 14127 - RNA, 20 nt, synthetic construct
  misc_feature 1..20: note = antisense sequence
  source 1..20: mol_type = other RNA
gccagacagaaactatggag

SEQ ID NO: 14128 - RNA, 20 nt, synthetic construct
  misc_feature 1..20: note = antisense sequence
  source 1..20: mol_type = other RNA
gagagccagacagaaactat

SEQ ID NO: 14129 - RNA, 20 nt, synthetic construct
  misc_feature 1..20: note = antisense sequence
  source 1..20: mol_type = other RNA
gtaggagagccagacagaaa

SEQ ID NO: 14130 - RNA, 20 nt, synthetic construct
  misc_feature 1..20: note = antisense sequence
  source 1..20: mol_type = other RNA
agtaggagagccagacagaa

SEQ ID NO: 14131 - RNA, 20 nt, synthetic construct
  misc_feature 1..20: note = antisense sequence
  source 1..20: mol_type = other RNA
gcaagtaggagagccagaca

SEQ ID NO: 14132 - RNA, 20 nt, synthetic construct
  misc_feature 1..20: note = antisense sequence
  source 1..20: mol_type = other RNA
atagcaagtaggagagccag

SEQ ID NO: 14133 - RNA, 20 nt, synthetic construct
  misc_feature 1..20: note = antisense sequence
  source 1..20: mol_type = other RNA
catagcaagtaggagagcca

SEQ ID NO: 14134 - RNA, 20 nt, synthetic construct
  misc_feature 1..20: note = antisense sequence
  source 1..20: mol_type = other RNA
acatagcaagtaggagagcc

SEQ ID NO: 14135 - RNA, 20 nt, synthetic construct
  misc_feature 1..20: note = antisense sequence
  source 1..20: mol_type = other RNA
tacatagcaagtaggagagc

SEQ ID NO: 14136 - RNA, 20 nt, synthetic construct
  misc_feature 1..20: note = antisense sequence
  source 1..20: mol_type = other RNA
gtacatagcaagtaggagag

SEQ ID NO: 14137 - RNA, 20 nt, synthetic construct
  misc_feature 1..20: note = antisense sequence
  source 1..20: mol_type = other RNA
cccatttgtagctcaatttc

SEQ ID NO: 14138 - RNA, 20 nt, synthetic construct
  misc_feature 1..20: note = antisense sequence
  source 1..20: mol_type = other RNA
gcccatttgtagctcaattt

SEQ ID NO: 14139 - RNA, 20 nt, synthetic construct
  misc_feature 1..20: note = antisense sequence
  source 1..20: mol_type = other RNA
ggcccatttgtagctcaatt

SEQ ID NO: 14140 - RNA, 20 nt, synthetic construct
  misc_feature 1..20: note = antisense sequence
  source 1..20: mol_type = other RNA
tagaaacctacaggaaggaa

SEQ ID NO: 14141 - RNA, 20 nt, synthetic construct
  misc_feature 1..20: note = antisense sequence
  source 1..20: mol_type = other RNA
agagtcatggtagaaaccta

SEQ ID NO: 14142 - RNA, 20 nt, synthetic construct
  misc_feature 1..20: note = antisense sequence
  source 1..20: mol_type = other RNA
aagagtcatggtagaaacct

SEQ ID NO: 14143 - RNA, 20 nt, synthetic construct
  misc_feature 1..20: note = antisense sequence
  source 1..20: mol_type = other RNA
gaagagtcatggtagaaacc

SEQ ID NO: 14144 - RNA, 20 nt, synthetic construct
  misc_feature 1..20: note = antisense sequence
  source 1..20: mol_type = other RNA
agaagagtcatggtagaaac

SEQ ID NO: 14145 - RNA, 20 nt, synthetic construct
  misc_feature 1..20: note = antisense sequence
  source 1..20: mol_type = other RNA
caatatcagtctttcccaag

SEQ ID NO: 14146 - RNA, 20 nt, synthetic construct
  misc_feature 1..20: note = antisense sequence
  source 1..20: mol_type = other RNA
ctgcaatatcagtctttccc

SEQ ID NO: 14147 - RNA, 20 nt, synthetic construct
  misc_feature 1..20: note = antisense sequence
  source 1..20: mol_type = other RNA
tctgcaatatcagtctttcc

SEQ ID NO: 14148 - RNA, 20 nt, synthetic construct
  misc_feature 1..20: note = antisense sequence
  source 1..20: mol_type = other RNA
ctctgcaatatcagtctttc

SEQ ID NO: 14149 - RNA, 20 nt, synthetic construct
  misc_feature 1..20: note = antisense sequence
  source 1..20: mol_type = other RNA
gttctctgcaatatcagtct

SEQ ID NO: 14150 - RNA, 20 nt, synthetic construct
  misc_feature 1..20: note = antisense sequence
  source 1..20: mol_type = other RNA
agggttctctgcaatatcag

SEQ ID NO: 14151 - RNA, 20 nt, synthetic construct
  misc_feature 1..20: note = antisense sequence
  source 1..20: mol_type = other RNA
ttagggttctctgcaatatc

SEQ ID NO: 14152 - RNA, 20 nt, synthetic construct
  misc_feature 1..20: note = antisense sequence
  source 1..20: mol_type = other RNA
aaagtattagggttctctgc

SEQ ID NO: 14153 - RNA, 20 nt, synthetic construct
  misc_feature 1..20: note = antisense sequence
  source 1..20: mol_type = other RNA
ggaatggtaaagtattaggg

SEQ ID NO: 14154 - RNA, 20 nt, synthetic construct
  misc_feature 1..20: note = antisense sequence
  source 1..20: mol_type = other RNA
gggaatggtaaagtattagg

SEQ ID NO: 14155 - RNA, 20 nt, synthetic construct
  misc_feature 1..20: note = antisense sequence
  source 1..20: mol_type = other RNA
tcaatggaacaaaggatctc

SEQ ID NO: 14156 - RNA, 20 nt, synthetic construct
  misc_feature 1..20: note = antisense sequence
  source 1..20: mol_type = other RNA
gtcacctcaatggaacaaag

SEQ ID NO: 14157 - RNA, 20 nt, synthetic construct
  misc_feature 1..20: note = antisense sequence
  source 1..20: mol_type = other RNA
ggtcacctcaatggaacaaa

SEQ ID NO: 14158 - RNA, 20 nt, synthetic construct
  misc_feature 1..20: note = antisense sequence
  source 1..20: mol_type = other RNA
gggtcacctcaatggaacaa

SEQ ID NO: 14159 - RNA, 20 nt, synthetic construct
  misc_feature 1..20: note = antisense sequence
  source 1..20: mol_type = other RNA
agggtcacctcaatggaaca

SEQ ID NO: 14160 - RNA, 20 nt, synthetic construct
  misc_feature 1..20: note = antisense sequence
  source 1..20: mol_type = other RNA
tagggtcacctcaatggaac

SEQ ID NO: 14161 - RNA, 20 nt, synthetic construct
  misc_feature 1..20: note = antisense sequence
  source 1..20: mol_type = other RNA
ctagggtcacctcaatggaa

SEQ ID NO: 14162 - RNA, 20 nt, synthetic construct
  misc_feature 1..20: note = antisense sequence
  source 1..20: mol_type = other RNA
actagggtcacctcaatgga

SEQ ID NO: 14163 - RNA, 20 nt, synthetic construct
  misc_feature 1..20: note = antisense sequence
  source 1..20: mol_type = other RNA
aactagggtcacctcaatgg

SEQ ID NO: 14164 - RNA, 20 nt, synthetic construct
  misc_feature 1..20: note = antisense sequence
  source 1..20: mol_type = other RNA
aaactagggtcacctcaatg

SEQ ID NO: 14165 - RNA, 20 nt, synthetic construct
  misc_feature 1..20: note = antisense sequence
  source 1..20: mol_type = other RNA
ggaaactagggtcacctcaa

SEQ ID NO: 14166 - RNA, 20 nt, synthetic construct
  misc_feature 1..20: note = antisense sequence
  source 1..20: mol_type = other RNA
cggaaactagggtcacctca

SEQ ID NO: 14167 - RNA, 20 nt, synthetic construct
  misc_feature 1..20: note = antisense sequence
  source 1..20: mol_type = other RNA
tcggaaactagggtcacctc

SEQ ID NO: 14168 - RNA, 20 nt, synthetic construct
  misc_feature 1..20: note = antisense sequence
  source 1..20: mol_type = other RNA
tctcggaaactagggtcacc

SEQ ID NO: 14169 - RNA, 20 nt, synthetic construct
  misc_feature 1..20: note = antisense sequence
  source 1..20: mol_type = other RNA
ctctcggaaactagggtcac

SEQ ID NO: 14170 - RNA, 20 nt, synthetic construct
  misc_feature 1..20: note = antisense sequence
  source 1..20: mol_type = other RNA
actctcggaaactagggtca

SEQ ID NO: 14171 - RNA, 20 nt, synthetic construct
  misc_feature 1..20: note = antisense sequence
  source 1..20: mol_type = other RNA
gactctcggaaactagggtc

SEQ ID NO: 14172 - RNA, 20 nt, synthetic construct
  misc_feature 1..20: note = antisense sequence
  source 1..20: mol_type = other RNA
tgactctcggaaactagggt

SEQ ID NO: 14173 - RNA, 20 nt, synthetic construct
  misc_feature 1..20: note = antisense sequence
  source 1..20: mol_type = other RNA
tctgactctcggaaactagg

SEQ ID NO: 14174 - RNA, 20 nt, synthetic construct
  misc_feature 1..20: note = antisense sequence
  source 1..20: mol_type = other RNA
gtctgactctcggaaactag

SEQ ID NO: 14175 - RNA, 20 nt, synthetic construct
  misc_feature 1..20: note = antisense sequence
  source 1..20: mol_type = other RNA
agtctgactctcggaaacta

SEQ ID NO: 14176 - RNA, 20 nt, synthetic construct
  misc_feature 1..20: note = antisense sequence
  source 1..20: mol_type = other RNA
caagtctgactctcggaaac

SEQ ID NO: 14177 - RNA, 20 nt, synthetic construct
  misc_feature 1..20: note = antisense sequence
  source 1..20: mol_type = other RNA
acaagtctgactctcggaaa

SEQ ID NO: 14178 - RNA, 20 nt, synthetic construct
  misc_feature 1..20: note = antisense sequence
  source 1..20: mol_type = other RNA
aacaagtctgactctcggaa

SEQ ID NO: 14179 - RNA, 20 nt, synthetic construct
  misc_feature 1..20: note = antisense sequence
  source 1..20: mol_type = other RNA
gaacaagtctgactctcgga

SEQ ID NO: 14180 - RNA, 20 nt, synthetic construct
  misc_feature 1..20: note = antisense sequence
  source 1..20: mol_type = other RNA
agaacaagtctgactctcgg

SEQ ID NO: 14181 - RNA, 20 nt, synthetic construct
  misc_feature 1..20: note = antisense sequence
  source 1..20: mol_type = other RNA
cacacacacagaacaagtct

SEQ ID NO: 14182 - RNA, 20 nt, synthetic construct
  misc_feature 1..20: note = antisense sequence
  source 1..20: mol_type = other RNA
acacacacacagaacaagtc

SEQ ID NO: 14183 - RNA, 20 nt, synthetic construct
  misc_feature 1..20: note = antisense sequence
  source 1..20: mol_type = other RNA
aacacacacacagaacaagt

SEQ ID NO: 14184 - RNA, 20 nt, synthetic construct
  misc_feature 1..20: note = antisense sequence
  source 1..20: mol_type = other RNA
gagaacacacacacagaaca

SEQ ID NO: 14185 - RNA, 20 nt, synthetic construct
  misc_feature 1..20: note = antisense sequence
  source 1..20: mol_type = other RNA
tgagaacacacacacagaac

SEQ ID NO: 14186 - RNA, 20 nt, synthetic construct
  misc_feature 1..20: note = antisense sequence
  source 1..20: mol_type = other RNA
ctgagaacacacacacagaa

SEQ ID NO: 14187 - RNA, 20 nt, synthetic construct
  misc_feature 1..20: note = antisense sequence
  source 1..20: mol_type = other RNA
cctgagaacacacacacaga

SEQ ID NO: 14188 - RNA, 20 nt, synthetic construct
  misc_feature 1..20: note = antisense sequence
  source 1..20: mol_type = other RNA
gcacctgagaacacacacac

SEQ ID NO: 14189 - RNA, 20 nt, synthetic construct
  misc_feature 1..20: note = antisense sequence
  source 1..20: mol_type = other RNA
gatgcacctgagaacacaca

SEQ ID NO: 14190 - RNA, 20 nt, synthetic construct
  misc_feature 1..20: note = antisense sequence
  source 1..20: mol_type = other RNA
tgatgcacctgagaacacac

SEQ ID NO: 14191 - RNA, 20 nt, synthetic construct
  misc_feature 1..20: note = antisense sequence
  source 1..20: mol_type = other RNA
ctgatgcacctgagaacaca

SEQ ID NO: 14192 - RNA, 20 nt, synthetic construct
  misc_feature 1..20: note = antisense sequence
  source 1..20: mol_type = other RNA
cctgatgcacctgagaacac

SEQ ID NO: 14193 - RNA, 20 nt, synthetic construct
  misc_feature 1..20: note = antisense sequence
  source 1..20: mol_type = other RNA
acctgatgcacctgagaaca

SEQ ID NO: 14194 - RNA, 20 nt, synthetic construct
  misc_feature 1..20: note = antisense sequence
  source 1..20: mol_type = other RNA
gacctgatgcacctgagaac

SEQ ID NO: 14195 - RNA, 20 nt, synthetic construct
  misc_feature 1..20: note = antisense sequence
  source 1..20: mol_type = other RNA
ctgacctgatgcacctgaga

SEQ ID NO: 14196 - RNA, 20 nt, synthetic construct
  misc_feature 1..20: note = antisense sequence
  source 1..20: mol_type = other RNA
ggctgacctgatgcacctga

SEQ ID NO: 14197 - RNA, 20 nt, synthetic construct
  misc_feature 1..20: note = antisense sequence
  source 1..20: mol_type = other RNA
aggctgacctgatgcacctg

SEQ ID NO: 14198 - RNA, 20 nt, synthetic construct
  misc_feature 1..20: note = antisense sequence
  source 1..20: mol_type = other RNA
gaggaagcacaggctgacct

SEQ ID NO: 14199 - RNA, 20 nt, synthetic construct
  misc_feature 1..20: note = antisense sequence
  source 1..20: mol_type = other RNA
agtggagaacggagggagga

SEQ ID NO: 14200 - RNA, 20 nt, synthetic construct
  misc_feature 1..20: note = antisense sequence
  source 1..20: mol_type = other RNA
aagtggagaacggagggagg

SEQ ID NO: 14201 - RNA, 20 nt, synthetic construct
  misc_feature 1..20: note = antisense sequence
  source 1..20: mol_type = other RNA
aaagtggagaacggagggag

SEQ ID NO: 14202 - RNA, 20 nt, synthetic construct
  misc_feature 1..20: note = antisense sequence
  source 1..20: mol_type = other RNA
gaaagtggagaacggaggga

SEQ ID NO: 14203 - RNA, 20 nt, synthetic construct
  misc_feature 1..20: note = antisense sequence
  source 1..20: mol_type = other RNA
agaaagtggagaacggaggg

SEQ ID NO: 14204 - RNA, 20 nt, synthetic construct
  misc_feature 1..20: note = antisense sequence
  source 1..20: mol_type = other RNA
ccttagaaagtggagaacgg

SEQ ID NO: 14205 - RNA, 20 nt, synthetic construct
  misc_feature 1..20: note = antisense sequence
  source 1..20: mol_type = other RNA
gccttagaaagtggagaacg

SEQ ID NO: 14206 - RNA, 20 nt, synthetic construct
  misc_feature 1..20: note = antisense sequence
  source 1..20: mol_type = other RNA
gctgccttagaaagtggaga

SEQ ID NO: 14207 - RNA, 20 nt, synthetic construct
  misc_feature 1..20: note = antisense sequence
  source 1..20: mol_type = other RNA
aaagctgccttagaaagtgg

SEQ ID NO: 14208 - RNA, 20 nt, synthetic construct
  misc_feature 1..20: note = antisense sequence
  source 1..20: mol_type = other RNA
cttctttagccaatggcctt

SEQ ID NO: 14209 - RNA, 20 nt, synthetic construct
  misc_feature 1..20: note = antisense sequence
  source 1..20: mol_type = other RNA
ctcttctttagccaatggcc

SEQ ID NO: 14210 - RNA, 20 nt, synthetic construct
  misc_feature 1..20: note = antisense sequence
  source 1..20: mol_type = other RNA
tctcttctttagccaatggc

SEQ ID NO: 14211 - RNA, 20 nt, synthetic construct
  misc_feature 1..20: note = antisense sequence
  source 1..20: mol_type = other RNA
gcttttctcattctgcttgt

SEQ ID NO: 14212 - RNA, 20 nt, synthetic construct
  misc_feature 1..20: note = antisense sequence
  source 1..20: mol_type = other RNA
ggcttttctcattctgcttg

SEQ ID NO: 14213 - RNA, 20 nt, synthetic construct
  misc_feature 1..20: note = antisense sequence
  source 1..20: mol_type = other RNA
ggctatttcagagcatatac

SEQ ID NO: 14214 - RNA, 20 nt, synthetic construct
  misc_feature 1..20: note = antisense sequence
  source 1..20: mol_type = other RNA
gaggctatttcagagcatat

SEQ ID NO: 14215 - RNA, 20 nt, synthetic construct
  misc_feature 1..20: note = antisense sequence
  source 1..20: mol_type = other RNA
tcaggaggctatttcagagc

SEQ ID NO: 14216 - RNA, 20 nt, synthetic construct
  misc_feature 1..20: note = antisense sequence
  source 1..20: mol_type = other RNA
tctagtcaggaggctatttc

SEQ ID NO: 14217 - RNA, 20 nt, synthetic construct
  misc_feature 1..20: note = antisense sequence
  source 1..20: mol_type = other RNA
ttctagtcaggaggctattt

SEQ ID NO: 14218 - RNA, 20 nt, synthetic construct
  misc_feature 1..20: note = antisense sequence
  source 1..20: mol_type = other RNA
tttctagtcaggaggctatt

SEQ ID NO: 14219 - RNA, 20 nt, synthetic construct
  misc_feature 1..20: note = antisense sequence
  source 1..20: mol_type = other RNA
ctttctagtcaggaggctat

SEQ ID NO: 14220 - RNA, 20 nt, synthetic construct
  misc_feature 1..20: note = antisense sequence
  source 1..20: mol_type = other RNA
tctttctagtcaggaggcta

SEQ ID NO: 14221 - RNA, 20 nt, synthetic construct
  misc_feature 1..20: note = antisense sequence
  source 1..20: mol_type = other RNA
atctttctagtcaggaggct

SEQ ID NO: 14222 - RNA, 20 nt, synthetic construct
  misc_feature 1..20: note = antisense sequence
  source 1..20: mol_type = other RNA
cattgatctttctagtcagg

SEQ ID NO: 14223 - RNA, 20 nt, synthetic construct
  misc_feature 1..20: note = antisense sequence
  source 1..20: mol_type = other RNA
acactgtatatgaaggctac

SEQ ID NO: 14224 - RNA, 20 nt, synthetic construct
  misc_feature 1..20: note = antisense sequence
  source 1..20: mol_type = other RNA
cttacactgtatatgaaggc

SEQ ID NO: 14225 - RNA, 20 nt, synthetic construct
  misc_feature 1..20: note = antisense sequence
  source 1..20: mol_type = other RNA
tctcagcttatggtcaaacc

SEQ ID NO: 14226 - RNA, 20 nt, synthetic construct
  misc_feature 1..20: note = antisense sequence
  source 1..20: mol_type = other RNA
atctcagcttatggtcaaac

SEQ ID NO: 14227 - RNA, 20 nt, synthetic construct
  misc_feature 1..20: note = antisense sequence
  source 1..20: mol_type = other RNA
cattatctcagcttatggtc

SEQ ID NO: 14228 - RNA, 20 nt, synthetic construct
  misc_feature 1..20: note = antisense sequence
  source 1..20: mol_type = other RNA
tggaaccctgcttagaatat

SEQ ID NO: 14229 - RNA, 20 nt, synthetic construct
  misc_feature 1..20: note = antisense sequence
  source 1..20: mol_type = other RNA
ttggaaccctgcttagaata

SEQ ID NO: 14230 - RNA, 20 nt, synthetic construct
  misc_feature 1..20: note = antisense sequence
  source 1..20: mol_type = other RNA
tgttggaaccctgcttagaa

SEQ ID NO: 14231 - RNA, 20 nt, synthetic construct
  misc_feature 1..20: note = antisense sequence
  source 1..20: mol_type = other RNA
atgttggaaccctgcttaga

SEQ ID NO: 14232 - RNA, 20 nt, synthetic construct
  misc_feature 1..20: note = antisense sequence
  source 1..20: mol_type = other RNA
aatgttggaaccctgcttag

SEQ ID NO: 14233 - RNA, 20 nt, synthetic construct
  misc_feature 1..20: note = antisense sequence
  source 1..20: mol_type = other RNA
aaatgttggaaccctgctta

SEQ ID NO: 14234 - RNA, 20 nt, synthetic construct
  misc_feature 1..20: note = antisense sequence
  source 1..20: mol_type = other RNA
agaaatgttggaaccctgct

SEQ ID NO: 14235 - RNA, 20 nt, synthetic construct
  misc_feature 1..20: note = antisense sequence
  source 1..20: mol_type = other RNA
tagaaatgttggaaccctgc

SEQ ID NO: 14236 - RNA, 20 nt, synthetic construct
  misc_feature 1..20: note = antisense sequence
  source 1..20: mol_type = other RNA
gtttagaaatgttggaaccc

SEQ ID NO: 14237 - RNA, 20 nt, synthetic construct
  misc_feature 1..20: note = antisense sequence
  source 1..20: mol_type = other RNA
ccaggccaccactgtattta

SEQ ID NO: 14238 - RNA, 20 nt, synthetic construct
  misc_feature 1..20: note = antisense sequence
  source 1..20: mol_type = other RNA
gccaggccaccactgtattt

SEQ ID NO: 14239 - RNA, 20 nt, synthetic construct
  misc_feature 1..20: note = antisense sequence
  source 1..20: mol_type = other RNA
ttgccaggccaccactgtat

SEQ ID NO: 14240 - RNA, 20 nt, synthetic construct
  misc_feature 1..20: note = antisense sequence
  source 1..20: mol_type = other RNA
aattgccaggccaccactgt

SEQ ID NO: 14241 - RNA, 20 nt, synthetic construct
  misc_feature 1..20: note = antisense sequence
  source 1..20: mol_type = other RNA
ctaattgccaggccaccact

SEQ ID NO: 14242 - RNA, 20 nt, synthetic construct
  misc_feature 1..20: note = antisense sequence
  source 1..20: mol_type = other RNA
tctaattgccaggccaccac

SEQ ID NO: 14243 - RNA, 20 nt, synthetic construct
  misc_feature 1..20: note = antisense sequence
  source 1..20: mol_type = other RNA
atctaattgccaggccacca

SEQ ID NO: 14244 - RNA, 20 nt, synthetic construct
  misc_feature 1..20: note = antisense sequence
  source 1..20: mol_type = other RNA
catctaattgccaggccacc

SEQ ID NO: 14245 - RNA, 20 nt, synthetic construct
  misc_feature 1..20: note = antisense sequence
  source 1..20: mol_type = other RNA
tcatctaattgccaggccac

SEQ ID NO: 14246 - RNA, 20 nt, synthetic construct
  misc_feature 1..20: note = antisense sequence
  source 1..20: mol_type = other RNA
atcatctaattgccaggcca

SEQ ID NO: 14247 - RNA, 20 nt, synthetic construct
  misc_feature 1..20: note = antisense sequence
  source 1..20: mol_type = other RNA
ctatcatctaattgccaggc

SEQ ID NO: 14248 - RNA, 20 nt, synthetic construct
  misc_feature 1..20: note = antisense sequence
  source 1..20: mol_type = other RNA
cctatcatctaattgccagg

SEQ ID NO: 14249 - RNA, 20 nt, synthetic construct
  misc_feature 1..20: note = antisense sequence
  source 1..20: mol_type = other RNA
gcctatcatctaattgccag

SEQ ID NO: 14250 - RNA, 20 nt, synthetic construct
  misc_feature 1..20: note = antisense sequence
  source 1..20: mol_type = other RNA
tgcctatcatctaattgcca

SEQ ID NO: 14251 - RNA, 20 nt, synthetic construct
  misc_feature 1..20: note = antisense sequence
  source 1..20: mol_type = other RNA
ctgcctatcatctaattgcc

SEQ ID NO: 14252 - RNA, 20 nt, synthetic construct
  misc_feature 1..20: note = antisense sequence
  source 1..20: mol_type = other RNA
cacctgcctatcatctaatt

SEQ ID NO: 14253 - RNA, 20 nt, synthetic construct
  misc_feature 1..20: note = antisense sequence
  source 1..20: mol_type = other RNA
acacctgcctatcatctaat

SEQ ID NO: 14254 - RNA, 20 nt, synthetic construct
  misc_feature 1..20: note = antisense sequence
  source 1..20: mol_type = other RNA
cacacctgcctatcatctaa

SEQ ID NO: 14255 - RNA, 20 nt, synthetic construct
  misc_feature 1..20: note = antisense sequence
  source 1..20: mol_type = other RNA
tgcacacctgcctatcatct

SEQ ID NO: 14256 - RNA, 20 nt, synthetic construct
  misc_feature 1..20: note = antisense sequence
  source 1..20: mol_type = other RNA
atgcacacctgcctatcatc

SEQ ID NO: 14257 - RNA, 20 nt, synthetic construct
  misc_feature 1..20: note = antisense sequence
  source 1..20: mol_type = other RNA
acatgcacacctgcctatca

SEQ ID NO: 14258 - RNA, 20 nt, synthetic construct
  misc_feature 1..20: note = antisense sequence
  source 1..20: mol_type = other RNA
cacatgcacacctgcctatc

SEQ ID NO: 14259 - RNA, 20 nt, synthetic construct
  misc_feature 1..20: note = antisense sequence
  source 1..20: mol_type = other RNA
acacatgcacacctgcctat

SEQ ID NO: 14260 - RNA, 20 nt, synthetic construct
  misc_feature 1..20: note = antisense sequence
  source 1..20: mol_type = other RNA
tcttatacacacatgcacac

SEQ ID NO: 14261 - RNA, 20 nt, synthetic construct
  misc_feature 1..20: note = antisense sequence
  source 1..20: mol_type = other RNA
ctctgagttcactgtgcttt

SEQ ID NO: 14262 - RNA, 20 nt, synthetic construct
  misc_feature 1..20: note = antisense sequence
  source 1..20: mol_type = other RNA
tggtctctgagttcactgtg

SEQ ID NO: 14263 - RNA, 20 nt, synthetic construct
  misc_feature 1..20: note = antisense sequence
  source 1..20: mol_type = other RNA
tatagaactggtctctgagt

SEQ ID NO: 14264 - RNA, 20 nt, synthetic construct
  misc_feature 1..20: note = antisense sequence
  source 1..20: mol_type = other RNA
gataaccttgaggaactcta

SEQ ID NO: 14265 - RNA, 20 nt, synthetic construct
  misc_feature 1..20: note = antisense sequence
  source 1..20: mol_type = other RNA
agataaccttgaggaactct

SEQ ID NO: 14266 - RNA, 20 nt, synthetic construct
  misc_feature 1..20: note = antisense sequence
  source 1..20: mol_type = other RNA
gaagataaccttgaggaact

SEQ ID NO: 14267 - RNA, 20 nt, synthetic construct
  misc_feature 1..20: note = antisense sequence
  source 1..20: mol_type = other RNA
tgaagataaccttgaggaac

SEQ ID NO: 14268 - RNA, 20 nt, synthetic construct
  misc_feature 1..20: note = antisense sequence
  source 1..20: mol_type = other RNA
cggtactgcaaatctacaaa

SEQ ID NO: 14269 - RNA, 20 nt, synthetic construct
  misc_feature 1..20: note = antisense sequence
  source 1..20: mol_type = other RNA
acggtactgcaaatctacaa

SEQ ID NO: 14270 - RNA, 20 nt, synthetic construct
  misc_feature 1..20: note = antisense sequence
  source 1..20: mol_type = other RNA
acacggtactgcaaatctac

SEQ ID NO: 14271 - RNA, 20 nt, synthetic construct
  misc_feature 1..20: note = antisense sequence
  source 1..20: mol_type = other RNA
gacacggtactgcaaatcta

SEQ ID NO: 14272 - RNA, 20 nt, synthetic construct
  misc_feature 1..20: note = antisense sequence
  source 1..20: mol_type = other RNA
tgacacggtactgcaaatct

SEQ ID NO: 14273 - RNA, 20 nt, synthetic construct
  misc_feature 1..20: note = antisense sequence
  source 1..20: mol_type = other RNA
gtgacacggtactgcaaatc

SEQ ID NO: 14274 - RNA, 20 nt, synthetic construct
  misc_feature 1..20: note = antisense sequence
  source 1..20: mol_type = other RNA
ggtgacacggtactgcaaat

SEQ ID NO: 14275 - RNA, 20 nt, synthetic construct
  misc_feature 1..20: note = antisense sequence
  source 1..20: mol_type = other RNA
gggtgacacggtactgcaaa

SEQ ID NO: 14276 - RNA, 20 nt, synthetic construct
  misc_feature 1..20: note = antisense sequence
  source 1..20: mol_type = other RNA
agggtgacacggtactgcaa

SEQ ID NO: 14277 - RNA, 20 nt, synthetic construct
  misc_feature 1..20: note = antisense sequence
  source 1..20: mol_type = other RNA
tagggtgacacggtactgca

SEQ ID NO: 14278 - RNA, 20 nt, synthetic construct
  misc_feature 1..20: note = antisense sequence
  source 1..20: mol_type = other RNA
ctagggtgacacggtactgc

SEQ ID NO: 14279 - RNA, 20 nt, synthetic construct
  misc_feature 1..20: note = antisense sequence
  source 1..20: mol_type = other RNA
tctagggtgacacggtactg

SEQ ID NO: 14280 - RNA, 20 nt, synthetic construct
  misc_feature 1..20: note = antisense sequence
  source 1..20: mol_type = other RNA
atctagggtgacacggtact

SEQ ID NO: 14281 - RNA, 20 nt, synthetic construct
  misc_feature 1..20: note = antisense sequence
  source 1..20: mol_type = other RNA
aatctagggtgacacggtac

SEQ ID NO: 14282 - RNA, 20 nt, synthetic construct
  misc_feature 1..20: note = antisense sequence
  source 1..20: mol_type = other RNA
gaatctagggtgacacggta

SEQ ID NO: 14283 - RNA, 20 nt, synthetic construct
  misc_feature 1..20: note = antisense sequence
  source 1..20: mol_type = other RNA
agtgaatctagggtgacacg

SEQ ID NO: 14284 - RNA, 20 nt, synthetic construct
  misc_feature 1..20: note = antisense sequence
  source 1..20: mol_type = other RNA
tagtgaatctagggtgacac

SEQ ID NO: 14285 - RNA, 20 nt, synthetic construct
  misc_feature 1..20: note = antisense sequence
  source 1..20: mol_type = other RNA
ctttctctcttgagttccag

SEQ ID NO: 14286 - RNA, 20 nt, synthetic construct
  misc_feature 1..20: note = antisense sequence
  source 1..20: mol_type = other RNA
aacctttctctcttgagttc

SEQ ID NO: 14287 - RNA, 20 nt, synthetic construct
  misc_feature 1..20: note = antisense sequence
  source 1..20: mol_type = other RNA
ctttgaacctttctctcttg

SEQ ID NO: 14288 - RNA, 20 nt, synthetic construct
  misc_feature 1..20: note = antisense sequence
  source 1..20: mol_type = other RNA
tcctttgaacctttctctct

SEQ ID NO: 14289 - RNA, 20 nt, synthetic construct
  misc_feature 1..20: note = antisense sequence
  source 1..20: mol_type = other RNA
ttcctttgaacctttctctc

SEQ ID NO: 14290 - RNA, 20 nt, synthetic construct
  misc_feature 1..20: note = antisense sequence
  source 1..20: mol_type = other RNA
gtgcttagtgcattctgatt

SEQ ID NO: 14291 - RNA, 20 nt, synthetic construct
  misc_feature 1..20: note = antisense sequence
  source 1..20: mol_type = other RNA
aaggagtgcttagtgcattc

SEQ ID NO: 14292 - RNA, 20 nt, synthetic construct
  misc_feature 1..20: note = antisense sequence
  source 1..20: mol_type = other RNA
gaaggagtgcttagtgcatt

SEQ ID NO: 14293 - RNA, 20 nt, synthetic construct
  misc_feature 1..20: note = antisense sequence
  source 1..20: mol_type = other RNA
agaaggagtgcttagtgcat

SEQ ID NO: 14294 - RNA, 20 nt, synthetic construct
  misc_feature 1..20: note = antisense sequence
  source 1..20: mol_type = other RNA
tagaaggagtgcttagtgca

SEQ ID NO: 14295 - RNA, 20 nt, synthetic construct
  misc_feature 1..20: note = antisense sequence
  source 1..20: mol_type = other RNA
gtagaaggagtgcttagtgc

SEQ ID NO: 14296 - RNA, 20 nt, synthetic construct
  misc_feature 1..20: note = antisense sequence
  source 1..20: mol_type = other RNA
tgtagaaggagtgcttagtg

SEQ ID NO: 14297 - RNA, 20 nt, synthetic construct
  misc_feature 1..20: note = antisense sequence
  source 1..20: mol_type = other RNA
atgtagaaggagtgcttagt

SEQ ID NO: 14298 - RNA, 20 nt, synthetic construct
  misc_feature 1..20: note = antisense sequence
  source 1..20: mol_type = other RNA
gaataaggcagcaacgatat

SEQ ID NO: 14299 - RNA, 20 nt, synthetic construct
  misc_feature 1..20: note = antisense sequence
  source 1..20: mol_type = other RNA
ggaataaggcagcaacgata

SEQ ID NO: 14300 - RNA, 20 nt, synthetic construct
  misc_feature 1..20: note = antisense sequence
  source 1..20: mol_type = other RNA
tggaataaggcagcaacgat

SEQ ID NO: 14301 - RNA, 20 nt, synthetic construct
  misc_feature 1..20: note = antisense sequence
  source 1..20: mol_type = other RNA
ttggaataaggcagcaacga

SEQ ID NO: 14302 - RNA, 20 nt, synthetic construct
  misc_feature 1..20: note = antisense sequence
  source 1..20: mol_type = other RNA
tttggaataaggcagcaacg

SEQ ID NO: 14303 - RNA, 20 nt, synthetic construct
  misc_feature 1..20: note = antisense sequence
  source 1..20: mol_type = other RNA
tgatttggaataaggcagca

SEQ ID NO: 14304 - RNA, 20 nt, synthetic construct
  misc_feature 1..20: note = antisense sequence
  source 1..20: mol_type = other RNA
atgagaaaattagacctgcg

SEQ ID NO: 14305 - RNA, 20 nt, synthetic construct
  misc_feature 1..20: note = antisense sequence
  source 1..20: mol_type = other RNA
tcctgccgttccataatata

SEQ ID NO: 14306 - RNA, 20 nt, synthetic construct
  misc_feature 1..20: note = antisense sequence
  source 1..20: mol_type = other RNA
ttcctgccgttccataatat

SEQ ID NO: 14307 - RNA, 20 nt, synthetic construct
  misc_feature 1..20: note = antisense sequence
  source 1..20: mol_type = other RNA
tttcctgccgttccataata

SEQ ID NO: 14308 - RNA, 20 nt, synthetic construct
  misc_feature 1..20: note = antisense sequence
  source 1..20: mol_type = other RNA
ttttcctgccgttccataat

SEQ ID NO: 14309 - RNA, 20 nt, synthetic construct
  misc_feature 1..20: note = antisense sequence
  source 1..20: mol_type = other RNA
cttttcctgccgttccataa

SEQ ID NO: 14310 - RNA, 20 nt, synthetic construct
  misc_feature 1..20: note = antisense sequence
  source 1..20: mol_type = other RNA
tcttttcctgccgttccata

SEQ ID NO: 14311 - RNA, 20 nt, synthetic construct
  misc_feature 1..20: note = antisense sequence
  source 1..20: mol_type = other RNA
gtcttttcctgccgttccat

SEQ ID NO: 14312 - RNA, 20 nt, synthetic construct
  misc_feature 1..20: note = antisense sequence
  source 1..20: mol_type = other RNA
tgtcttttcctgccgttcca

SEQ ID NO: 14313 - RNA, 20 nt, synthetic construct
  misc_feature 1..20: note = antisense sequence
  source 1..20: mol_type = other RNA
gtgtcttttcctgccgttcc

SEQ ID NO: 14314 - RNA, 20 nt, synthetic construct
  misc_feature 1..20: note = antisense sequence
  source 1..20: mol_type = other RNA
ctgtgtcttttcctgccgtt

SEQ ID NO: 14315 - RNA, 20 nt, synthetic construct
  misc_feature 1..20: note = antisense sequence
  source 1..20: mol_type = other RNA
actgtgtcttttcctgccgt

SEQ ID NO: 14316 - RNA, 20 nt, synthetic construct
  misc_feature 1..20: note = antisense sequence
  source 1..20: mol_type = other RNA
cactgtgtcttttcctgccg

SEQ ID NO: 14317 - RNA, 20 nt, synthetic construct
  misc_feature 1..20: note = antisense sequence
  source 1..20: mol_type = other RNA
acactgtgtcttttcctgcc

SEQ ID NO: 14318 - RNA, 20 nt, synthetic construct
  misc_feature 1..20: note = antisense sequence
  source 1..20: mol_type = other RNA
tagaacactgtgtcttttcc

SEQ ID NO: 14319 - RNA, 20 nt, synthetic construct
  misc_feature 1..20: note = antisense sequence
  source 1..20: mol_type = other RNA
ctagaacactgtgtcttttc

SEQ ID NO: 14320 - RNA, 20 nt, synthetic construct
  misc_feature 1..20: note = antisense sequence
  source 1..20: mol_type = other RNA
caactagaacactgtgtctt

SEQ ID NO: 14321 - RNA, 20 nt, synthetic construct
  misc_feature 1..20: note = antisense sequence
  source 1..20: mol_type = other RNA
tcaactagaacactgtgtct

SEQ ID NO: 14322 - RNA, 20 nt, synthetic construct
  misc_feature 1..20: note = antisense sequence
  source 1..20: mol_type = other RNA
gtcaactagaacactgtgtc

SEQ ID NO: 14323 - RNA, 20 nt, synthetic construct
  misc_feature 1..20: note = antisense sequence
  source 1..20: mol_type = other RNA
ttgtcaactagaacactgtg

SEQ ID NO: 14324 - RNA, 20 nt, synthetic construct
  misc_feature 1..20: note = antisense sequence
  source 1..20: mol_type = other RNA
cttgtcaactagaacactgt

SEQ ID NO: 14325 - RNA, 20 nt, synthetic construct
  misc_feature 1..20: note = antisense sequence
  source 1..20: mol_type = other RNA
tcttgtcaactagaacactg

SEQ ID NO: 14326 - RNA, 20 nt, synthetic construct
  misc_feature 1..20: note = antisense sequence
  source 1..20: mol_type = other RNA
cacaactgacagacaaggcc

SEQ ID NO: 14327 - RNA, 20 nt, synthetic construct
  misc_feature 1..20: note = antisense sequence
  source 1..20: mol_type = other RNA
ccacaactgacagacaaggc

SEQ ID NO: 14328 - RNA, 20 nt, synthetic construct
  misc_feature 1..20: note = antisense sequence
  source 1..20: mol_type = other RNA
aaccacaactgacagacaag

SEQ ID NO: 14329 - RNA, 20 nt, synthetic construct
  misc_feature 1..20: note = antisense sequence
  source 1..20: mol_type = other RNA
caaccacaactgacagacaa

SEQ ID NO: 14330 - RNA, 20 nt, synthetic construct
  misc_feature 1..20: note = antisense sequence
  source 1..20: mol_type = other RNA
ccaaccacaactgacagaca

SEQ ID NO: 14331 - RNA, 20 nt, synthetic construct
  misc_feature 1..20: note = antisense sequence
  source 1..20: mol_type = other RNA
accaaccacaactgacagac

SEQ ID NO: 14332 - RNA, 20 nt, synthetic construct
  misc_feature 1..20: note = antisense sequence
  source 1..20: mol_type = other RNA
taccaaccacaactgacaga

SEQ ID NO: 14333 - RNA, 20 nt, synthetic construct
  misc_feature 1..20: note = antisense sequence
  source 1..20: mol_type = other RNA
ttaccaaccacaactgacag

SEQ ID NO: 14334 - RNA, 20 nt, synthetic construct
  misc_feature 1..20: note = antisense sequence
  source 1..20: mol_type = other RNA
cttaccaaccacaactgaca

SEQ ID NO: 14335 - RNA, 20 nt, synthetic construct
  misc_feature 1..20: note = antisense sequence
  source 1..20: mol_type = other RNA
cacttaccaaccacaactga

SEQ ID NO: 14336 - RNA, 20 nt, synthetic construct
  misc_feature 1..20: note = antisense sequence
  source 1..20: mol_type = other RNA
aatcacttaccaaccacaac

SEQ ID NO: 14337 - RNA, 20 nt, synthetic construct
  misc_feature 1..20: note = antisense sequence
  source 1..20: mol_type = other RNA
gttaatcacttaccaaccac

SEQ ID NO: 14338 - RNA, 20 nt, synthetic construct
  misc_feature 1..20: note = antisense sequence
  source 1..20: mol_type = other RNA
cagttaatcacttaccaacc

SEQ ID NO: 14339 - RNA, 20 nt, synthetic construct
  misc_feature 1..20: note = antisense sequence
  source 1..20: mol_type = other RNA
gcagttaatcacttaccaac

SEQ ID NO: 14340 - RNA, 20 nt, synthetic construct
  misc_feature 1..20: note = antisense sequence
  source 1..20: mol_type = other RNA
gagcagttaatcacttacca

SEQ ID NO: 14341 - RNA, 20 nt, synthetic construct
  misc_feature 1..20: note = antisense sequence
  source 1..20: mol_type = other RNA
gaaagcatacagcccagcag

SEQ ID NO: 14342 - RNA, 20 nt, synthetic construct
  misc_feature 1..20: note = antisense sequence
  source 1..20: mol_type = other RNA
agaaagcatacagcccagca

SEQ ID NO: 14343 - RNA, 20 nt, synthetic construct
  misc_feature 1..20: note = antisense sequence
  source 1..20: mol_type = other RNA
cagaaagcatacagcccagc

SEQ ID NO: 14344 - RNA, 20 nt, synthetic construct
  misc_feature 1..20: note = antisense sequence
  source 1..20: mol_type = other RNA
cccagaaagcatacagccca

SEQ ID NO: 14345 - RNA, 20 nt, synthetic construct
  misc_feature 1..20: note = antisense sequence
  source 1..20: mol_type = other RNA
tcccagaaagcatacagccc

SEQ ID NO: 14346 - RNA, 20 nt, synthetic construct
  misc_feature 1..20: note = antisense sequence
  source 1..20: mol_type = other RNA
cccttcgctctaaaatcaaa

SEQ ID NO: 14347 - RNA, 20 nt, synthetic construct
  misc_feature 1..20: note = antisense sequence
  source 1..20: mol_type = other RNA
caaagcctacagatgataga

SEQ ID NO: 14348 - RNA, 20 nt, synthetic construct
  misc_feature 1..20: note = antisense sequence
  source 1..20: mol_type = other RNA
gcacaaagcctacagatgat

SEQ ID NO: 14349 - RNA, 20 nt, synthetic construct
  misc_feature 1..20: note = antisense sequence
  source 1..20: mol_type = other RNA
agcacaaagcctacagatga

SEQ ID NO: 14350 - RNA, 20 nt, synthetic construct
  misc_feature 1..20: note = antisense sequence
  source 1..20: mol_type = other RNA
tagcacaaagcctacagatg

SEQ ID NO: 14351 - RNA, 20 nt, synthetic construct
  misc_feature 1..20: note = antisense sequence
  source 1..20: mol_type = other RNA
aactgaagtagcacaaagcc

SEQ ID NO: 14352 - RNA, 20 nt, synthetic construct
  misc_feature 1..20: note = antisense sequence
  source 1..20: mol_type = other RNA
aaactgaagtagcacaaagc

SEQ ID NO: 14353 - RNA, 20 nt, synthetic construct
  misc_feature 1..20: note = antisense sequence
  source 1..20: mol_type = other RNA
ctccctcatccactaaaatt

SEQ ID NO: 14354 - RNA, 20 nt, synthetic construct
  misc_feature 1..20: note = antisense sequence
  source 1..20: mol_type = other RNA
aactccctcatccactaaaa

SEQ ID NO: 14355 - RNA, 20 nt, synthetic construct
  misc_feature 1..20: note = antisense sequence
  source 1..20: mol_type = other RNA
aaactccctcatccactaaa

SEQ ID NO: 14356 - RNA, 20 nt, synthetic construct
  misc_feature 1..20: note = antisense sequence
  source 1..20: mol_type = other RNA
caaaactccctcatccacta

SEQ ID NO: 14357 - RNA, 20 nt, synthetic construct
  misc_feature 1..20: note = antisense sequence
  source 1..20: mol_type = other RNA
ccaaaactccctcatccact

SEQ ID NO: 14358 - RNA, 20 nt, synthetic construct
  misc_feature 1..20: note = antisense sequence
  source 1..20: mol_type = other RNA
tccaaaactccctcatccac

SEQ ID NO: 14359 - RNA, 20 nt, synthetic construct
  misc_feature 1..20: note = antisense sequence
  source 1..20: mol_type = other RNA
ttgatttccaaaactccctc

SEQ ID NO: 14360 - RNA, 20 nt, synthetic construct
  misc_feature 1..20: note = antisense sequence
  source 1..20: mol_type = other RNA
taccagccatctctaaacat

SEQ ID NO: 14361 - RNA, 20 nt, synthetic construct
  misc_feature 1..20: note = antisense sequence
  source 1..20: mol_type = other RNA
ttaccagccatctctaaaca

SEQ ID NO: 14362 - RNA, 20 nt, synthetic construct
  misc_feature 1..20: note = antisense sequence
  source 1..20: mol_type = other RNA
cttaccagccatctctaaac

SEQ ID NO: 14363 - RNA, 20 nt, synthetic construct
  misc_feature 1..20: note = antisense sequence
  source 1..20: mol_type = other RNA
atgattcacactggcttacc

SEQ ID NO: 14364 - RNA, 20 nt, synthetic construct
  misc_feature 1..20: note = antisense sequence
  source 1..20: mol_type = other RNA
aatgattcacactggcttac

SEQ ID NO: 14365 - RNA, 20 nt, synthetic construct
  misc_feature 1..20: note = antisense sequence
  source 1..20: mol_type = other RNA
cagtgtcccaacaaaataca

SEQ ID NO: 14366 - RNA, 20 nt, synthetic construct
  misc_feature 1..20: note = antisense sequence
  source 1..20: mol_type = other RNA
acagtgtcccaacaaaatac

SEQ ID NO: 14367 - RNA, 20 nt, synthetic construct
  misc_feature 1..20: note = antisense sequence
  source 1..20: mol_type = other RNA
cacagtgtcccaacaaaata

SEQ ID NO: 14368 - RNA, 20 nt, synthetic construct
  misc_feature 1..20: note = antisense sequence
  source 1..20: mol_type = other RNA
acacagtgtcccaacaaaat

SEQ ID NO: 14369 - RNA, 20 nt, synthetic construct
  misc_feature 1..20: note = antisense sequence
  source 1..20: mol_type = other RNA
tacacagtgtcccaacaaaa

SEQ ID NO: 14370 - RNA, 20 nt, synthetic construct
  misc_feature 1..20: note = antisense sequence
  source 1..20: mol_type = other RNA
atacacagtgtcccaacaaa

SEQ ID NO: 14371 - RNA, 20 nt, synthetic construct
  misc_feature 1..20: note = antisense sequence
  source 1..20: mol_type = other RNA
tatacacagtgtcccaacaa

SEQ ID NO: 14372 - RNA, 20 nt, synthetic construct
  misc_feature 1..20: note = antisense sequence
  source 1..20: mol_type = other RNA
atatacacagtgtcccaaca

SEQ ID NO: 14373 - RNA, 20 nt, synthetic construct
  misc_feature 1..20: note = antisense sequence
  source 1..20: mol_type = other RNA
ccatatacacagtgtcccaa

SEQ ID NO: 14374 - RNA, 20 nt, synthetic construct
  misc_feature 1..20: note = antisense sequence
  source 1..20: mol_type = other RNA
cccatatacacagtgtccca

SEQ ID NO: 14375 - RNA, 20 nt, synthetic construct
  misc_feature 1..20: note = antisense sequence
  source 1..20: mol_type = other RNA
tcctgccctctgttgggaac

SEQ ID NO: 14376 - RNA, 20 nt, synthetic construct
  misc_feature 1..20: note = antisense sequence
  source 1..20: mol_type = other RNA
aactcctgccctctgttggg

SEQ ID NO: 14377 - RNA, 20 nt, synthetic construct
  misc_feature 1..20: note = antisense sequence
  source 1..20: mol_type = other RNA
aaactcctgccctctgttgg

SEQ ID NO: 14378 - RNA, 20 nt, synthetic construct
  misc_feature 1..20: note = antisense sequence
  source 1..20: mol_type = other RNA
cttcatgctgcttcttgttt

SEQ ID NO: 14379 - RNA, 20 nt, synthetic construct
  misc_feature 1..20: note = antisense sequence
  source 1..20: mol_type = other RNA
ccttcatgctgcttcttgtt

SEQ ID NO: 14380 - RNA, 20 nt, synthetic construct
  misc_feature 1..20: note = antisense sequence
  source 1..20: mol_type = other RNA
taccttcatgctgcttcttg

SEQ ID NO: 14381 - RNA, 20 nt, synthetic construct
  misc_feature 1..20: note = antisense sequence
  source 1..20: mol_type = other RNA
cattaccttcatgctgcttc

SEQ ID NO: 14382 - RNA, 20 nt, synthetic construct
  misc_feature 1..20: note = antisense sequence
  source 1..20: mol_type = other RNA
ttcctcattaccttcatgct

SEQ ID NO: 14383 - RNA, 20 nt, synthetic construct
  misc_feature 1..20: note = antisense sequence
  source 1..20: mol_type = other RNA
cgtcaagtctctaagtctta

SEQ ID NO: 14384 - RNA, 20 nt, synthetic construct
  misc_feature 1..20: note = antisense sequence
  source 1..20: mol_type = other RNA
ccgtcaagtctctaagtctt

SEQ ID NO: 14385 - RNA, 20 nt, synthetic construct
  misc_feature 1..20: note = antisense sequence
  source 1..20: mol_type = other RNA
accgtcaagtctctaagtct

SEQ ID NO: 14386 - RNA, 20 nt, synthetic construct
  misc_feature 1..20: note = antisense sequence
  source 1..20: mol_type = other RNA
taccgtcaagtctctaagtc

SEQ ID NO: 14387 - RNA, 20 nt, synthetic construct
  misc_feature 1..20: note = antisense sequence
  source 1..20: mol_type = other RNA
ttaccgtcaagtctctaagt

SEQ ID NO: 14388 - RNA, 20 nt, synthetic construct
  misc_feature 1..20: note = antisense sequence
  source 1..20: mol_type = other RNA
tttaccgtcaagtctctaag

SEQ ID NO: 14389 - RNA, 20 nt, synthetic construct
  misc_feature 1..20: note = antisense sequence
  source 1..20: mol_type = other RNA
gtttaccgtcaagtctctaa

SEQ ID NO: 14390 - RNA, 20 nt, synthetic construct
  misc_feature 1..20: note = antisense sequence
  source 1..20: mol_type = other RNA
agtttaccgtcaagtctcta

SEQ ID NO: 14391 - RNA, 20 nt, synthetic construct
  misc_feature 1..20: note = antisense sequence
  source 1..20: mol_type = other RNA
aagtttaccgtcaagtctct

SEQ ID NO: 14392 - RNA, 20 nt, synthetic construct
  misc_feature 1..20: note = antisense sequence
  source 1..20: mol_type = other RNA
caagtttaccgtcaagtctc

SEQ ID NO: 14393 - RNA, 20 nt, synthetic construct
  misc_feature 1..20: note = antisense sequence
  source 1..20: mol_type = other RNA
ccaagtttaccgtcaagtct

SEQ ID NO: 14394 - RNA, 20 nt, synthetic construct
  misc_feature 1..20: note = antisense sequence
  source 1..20: mol_type = other RNA
tccaagtttaccgtcaagtc

SEQ ID NO: 14395 - RNA, 20 nt, synthetic construct
  misc_feature 1..20: note = antisense sequence
  source 1..20: mol_type = other RNA
ctccaagtttaccgtcaagt

SEQ ID NO: 14396 - RNA, 20 nt, synthetic construct
  misc_feature 1..20: note = antisense sequence
  source 1..20: mol_type = other RNA
gctccaagtttaccgtcaag

SEQ ID NO: 14397 - RNA, 20 nt, synthetic construct
  misc_feature 1..20: note = antisense sequence
  source 1..20: mol_type = other RNA
agctccaagtttaccgtcaa

SEQ ID NO: 14398 - RNA, 20 nt, synthetic construct
  misc_feature 1..20: note = antisense sequence
  source 1..20: mol_type = other RNA
aagctccaagtttaccgtca

SEQ ID NO: 14399 - RNA, 20 nt, synthetic construct
  misc_feature 1..20: note = antisense sequence
  source 1..20: mol_type = other RNA
aaagctccaagtttaccgtc

SEQ ID NO: 14400 - RNA, 20 nt, synthetic construct
  misc_feature 1..20: note = antisense sequence
  source 1..20: mol_type = other RNA
aaaattggcctggttccttt

SEQ ID NO: 14401 - RNA, 20 nt, synthetic construct
  misc_feature 1..20: note = antisense sequence
  source 1..20: mol_type = other RNA
gaaaattggcctggttcctt

SEQ ID NO: 14402 - RNA, 20 nt, synthetic construct
  misc_feature 1..20: note = antisense sequence
  source 1..20: mol_type = other RNA
gtaggaaaattggcctggtt

SEQ ID NO: 14403 - RNA, 20 nt, synthetic construct
  misc_feature 1..20: note = antisense sequence
  source 1..20: mol_type = other RNA
gaagtaggaaaattggcctg

SEQ ID NO: 14404 - RNA, 20 nt, synthetic construct
  misc_feature 1..20: note = antisense sequence
  source 1..20: mol_type = other RNA
gtcagaagtaggaaaattgg

SEQ ID NO: 14405 - RNA, 20 nt, synthetic construct
  misc_feature 1..20: note = antisense sequence
  source 1..20: mol_type = other RNA
aaatgtggcacaaaagggtg

SEQ ID NO: 14406 - RNA, 20 nt, synthetic construct
  misc_feature 1..20: note = antisense sequence
  source 1..20: mol_type = other RNA
caaatgtggcacaaaagggt

SEQ ID NO: 14407 - RNA, 20 nt, synthetic construct
  misc_feature 1..20: note = antisense sequence
  source 1..20: mol_type = other RNA
aacaaatgtggcacaaaagg

SEQ ID NO: 14408 - RNA, 20 nt, synthetic construct
  misc_feature 1..20: note = antisense sequence
  source 1..20: mol_type = other RNA
gaacaaatgtggcacaaaag

SEQ ID NO: 14409 - RNA, 20 nt, synthetic construct
  misc_feature 1..20: note = antisense sequence
  source 1..20: mol_type = other RNA
gaaaatcactgaggaagaac

SEQ ID NO: 14410 - RNA, 20 nt, synthetic construct
  misc_feature 1..20: note = antisense sequence
  source 1..20: mol_type = other RNA
ttggtcctgacagaataagc

SEQ ID NO: 14411 - RNA, 20 nt, synthetic construct
  misc_feature 1..20: note = antisense sequence
  source 1..20: mol_type = other RNA
cttggtcctgacagaataag

SEQ ID NO: 14412 - RNA, 20 nt, synthetic construct
  misc_feature 1..20: note = antisense sequence
  source 1..20: mol_type = other RNA
tcttggtcctgacagaataa

SEQ ID NO: 14413 - RNA, 20 nt, synthetic construct
  misc_feature 1..20: note = antisense sequence
  source 1..20: mol_type = other RNA
atcttggtcctgacagaata

SEQ ID NO: 14414 - RNA, 20 nt, synthetic construct
  misc_feature 1..20: note = antisense sequence
  source 1..20: mol_type = other RNA
gatcttggtcctgacagaat

SEQ ID NO: 14415 - RNA, 20 nt, synthetic construct
  misc_feature 1..20: note = antisense sequence
  source 1..20: mol_type = other RNA
ttgatcttggtcctgacaga

SEQ ID NO: 14416 - RNA, 20 nt, synthetic construct
  misc_feature 1..20: note = antisense sequence
  source 1..20: mol_type = other RNA
attgatcttggtcctgacag

SEQ ID NO: 14417 - RNA, 20 nt, synthetic construct
  misc_feature 1..20: note = antisense sequence
  source 1..20: mol_type = other RNA
gattgatcttggtcctgaca

SEQ ID NO: 14418 - RNA, 20 nt, synthetic construct
  misc_feature 1..20: note = antisense sequence
  source 1..20: mol_type = other RNA
agattgatcttggtcctgac

SEQ ID NO: 14419 - RNA, 20 nt, synthetic construct
  misc_feature 1..20: note = antisense sequence
  source 1..20: mol_type = other RNA
atagattgatcttggtcctg

SEQ ID NO: 14420 - RNA, 20 nt, synthetic construct
  misc_feature 1..20: note = antisense sequence
  source 1..20: mol_type = other RNA
ctggtttcatacccattcaa

SEQ ID NO: 14421 - RNA, 20 nt, synthetic construct
  misc_feature 1..20: note = antisense sequence
  source 1..20: mol_type = other RNA
tctggtttcatacccattca

SEQ ID NO: 14422 - RNA, 20 nt, synthetic construct
  misc_feature 1..20: note = antisense sequence
  source 1..20: mol_type = other RNA
atctggtttcatacccattc

SEQ ID NO: 14423 - RNA, 20 nt, synthetic construct
  misc_feature 1..20: note = antisense sequence
  source 1..20: mol_type = other RNA
ccatatctggtttcataccc

SEQ ID NO: 14424 - RNA, 20 nt, synthetic construct
  misc_feature 1..20: note = antisense sequence
  source 1..20: mol_type = other RNA
gccatatctggtttcatacc

SEQ ID NO: 14425 - RNA, 20 nt, synthetic construct
  misc_feature 1..20: note = antisense sequence
  source 1..20: mol_type = other RNA
tgccatatctggtttcatac

SEQ ID NO: 14426 - RNA, 20 nt, synthetic construct
  misc_feature 1..20: note = antisense sequence
  source 1..20: mol_type = other RNA
caatgccatatctggtttca

SEQ ID NO: 14427 - RNA, 20 nt, synthetic construct
  misc_feature 1..20: note = antisense sequence
  source 1..20: mol_type = other RNA
gacaatgccatatctggttt

SEQ ID NO: 14428 - RNA, 20 nt, synthetic construct
  misc_feature 1..20: note = antisense sequence
  source 1..20: mol_type = other RNA
agacaatgccatatctggtt

SEQ ID NO: 14429 - RNA, 20 nt, synthetic construct
  misc_feature 1..20: note = antisense sequence
  source 1..20: mol_type = other RNA
gagacaatgccatatctggt

SEQ ID NO: 14430 - RNA, 20 nt, synthetic construct
  misc_feature 1..20: note = antisense sequence
  source 1..20: mol_type = other RNA
ggagacaatgccatatctgg

SEQ ID NO: 14431 - RNA, 20 nt, synthetic construct
  misc_feature 1..20: note = antisense sequence
  source 1..20: mol_type = other RNA
tggagacaatgccatatctg

SEQ ID NO: 14432 - RNA, 20 nt, synthetic construct
  misc_feature 1..20: note = antisense sequence
  source 1..20: mol_type = other RNA
tagcaggttggagacaatgc

SEQ ID NO: 14433 - RNA, 20 nt, synthetic construct
  misc_feature 1..20: note = antisense sequence
  source 1..20: mol_type = other RNA
tggacaaacatagactgaga

SEQ ID NO: 14434 - RNA, 20 nt, synthetic construct
  misc_feature 1..20: note = antisense sequence
  source 1..20: mol_type = other RNA
gtggacaaacatagactgag

SEQ ID NO: 14435 - RNA, 20 nt, synthetic construct
  misc_feature 1..20: note = antisense sequence
  source 1..20: mol_type = other RNA
ttgtggacaaacatagactg

SEQ ID NO: 14436 - RNA, 20 nt, synthetic construct
  misc_feature 1..20: note = antisense sequence
  source 1..20: mol_type = other RNA
tagacactgaatttgtggac

SEQ ID NO: 14437 - RNA, 20 nt, synthetic construct
  misc_feature 1..20: note = antisense sequence
  source 1..20: mol_type = other RNA
tggacataacttagacactg

SEQ ID NO: 14438 - RNA, 20 nt, synthetic construct
  misc_feature 1..20: note = antisense sequence
  source 1..20: mol_type = other RNA
tacctggacataacttagac

SEQ ID NO: 14439 - RNA, 20 nt, synthetic construct
  misc_feature 1..20: note = antisense sequence
  source 1..20: mol_type = other RNA
gtacctggacataacttaga

SEQ ID NO: 14440 - RNA, 20 nt, synthetic construct
  misc_feature 1..20: note = antisense sequence
  source 1..20: mol_type = other RNA
agtacctggacataacttag

SEQ ID NO: 14441 - RNA, 20 nt, synthetic construct
  misc_feature 1..20: note = antisense sequence
  source 1..20: mol_type = other RNA
tacaaattctacactggctg

SEQ ID NO: 14442 - RNA, 20 nt, synthetic construct
  misc_feature 1..20: note = antisense sequence
  source 1..20: mol_type = other RNA
gatacaaattctacactggc

SEQ ID NO: 14443 - RNA, 20 nt, synthetic construct
  misc_feature 1..20: note = antisense sequence
  source 1..20: mol_type = other RNA
ggatacaaattctacactgg

SEQ ID NO: 14444 - RNA, 20 nt, synthetic construct
  misc_feature 1..20: note = antisense sequence
  source 1..20: mol_type = other RNA
aagtctctcagaatgtggaa

SEQ ID NO: 14445 - RNA, 20 nt, synthetic construct
  misc_feature 1..20: note = antisense sequence
  source 1..20: mol_type = other RNA
aaagtctctcagaatgtgga

SEQ ID NO: 14446 - RNA, 20 nt, synthetic construct
  misc_feature 1..20: note = antisense sequence
  source 1..20: mol_type = other RNA
caaagtctctcagaatgtgg

SEQ ID NO: 14447 - RNA, 20 nt, synthetic construct
  misc_feature 1..20: note = antisense sequence
  source 1..20: mol_type = other RNA
ttgccaaagtctctcagaat

SEQ ID NO: 14448 - RNA, 20 nt, synthetic construct
  misc_feature 1..20: note = antisense sequence
  source 1..20: mol_type = other RNA
gttgccaaagtctctcagaa

SEQ ID NO: 14449 - RNA, 20 nt, synthetic construct
  misc_feature 1..20: note = antisense sequence
  source 1..20: mol_type = other RNA
acgttgccaaagtctctcag

SEQ ID NO: 14450 - RNA, 20 nt, synthetic construct
  misc_feature 1..20: note = antisense sequence
  source 1..20: mol_type = other RNA
gacgttgccaaagtctctca

SEQ ID NO: 14451 - RNA, 20 nt, synthetic construct
  misc_feature 1..20: note = antisense sequence
  source 1..20: mol_type = other RNA
cgacgttgccaaagtctctc

SEQ ID NO: 14452 - RNA, 20 nt, synthetic construct
  misc_feature 1..20: note = antisense sequence
  source 1..20: mol_type = other RNA
aacgacgttgccaaagtctc

SEQ ID NO: 14453 - RNA, 20 nt, synthetic construct
  misc_feature 1..20: note = antisense sequence
  source 1..20: mol_type = other RNA
aaacgacgttgccaaagtct

SEQ ID NO: 14454 - RNA, 20 nt, synthetic construct
  misc_feature 1..20: note = antisense sequence
  source 1..20: mol_type = other RNA
caaacgacgttgccaaagtc

SEQ ID NO: 14455 - RNA, 20 nt, synthetic construct
  misc_feature 1..20: note = antisense sequence
  source 1..20: mol_type = other RNA
ccaaacgacgttgccaaagt

SEQ ID NO: 14456 - RNA, 20 nt, synthetic construct
  misc_feature 1..20: note = antisense sequence
  source 1..20: mol_type = other RNA
accaaacgacgttgccaaag

SEQ ID NO: 14457 - RNA, 20 nt, synthetic construct
  misc_feature 1..20: note = antisense sequence
  source 1..20: mol_type = other RNA
gaccaaacgacgttgccaaa

SEQ ID NO: 14458 - RNA, 20 nt, synthetic construct
  misc_feature 1..20: note = antisense sequence
  source 1..20: mol_type = other RNA
agaccaaacgacgttgccaa

SEQ ID NO: 14459 - RNA, 20 nt, synthetic construct
  misc_feature 1..20: note = antisense sequence
  source 1..20: mol_type = other RNA
gagaccaaacgacgttgcca

SEQ ID NO: 14460 - RNA, 20 nt, synthetic construct
  misc_feature 1..20: note = antisense sequence
  source 1..20: mol_type = other RNA
agagaccaaacgacgttgcc

SEQ ID NO: 14461 - RNA, 20 nt, synthetic construct
  misc_feature 1..20: note = antisense sequence
  source 1..20: mol_type = other RNA
aagagaccaaacgacgttgc

SEQ ID NO: 14462 - RNA, 20 nt, synthetic construct
  misc_feature 1..20: note = antisense sequence
  source 1..20: mol_type = other RNA
taagagaccaaacgacgttg

SEQ ID NO: 14463 - RNA, 20 nt, synthetic construct
  misc_feature 1..20: note = antisense sequence
  source 1..20: mol_type = other RNA
ctaagagaccaaacgacgtt

SEQ ID NO: 14464 - RNA, 20 nt, synthetic construct
  misc_feature 1..20: note = antisense sequence
  source 1..20: mol_type = other RNA
tctaagagaccaaacgacgt

SEQ ID NO: 14465 - RNA, 20 nt, synthetic construct
  misc_feature 1..20: note = antisense sequence
  source 1..20: mol_type = other RNA
ctctaagagaccaaacgacg

SEQ ID NO: 14466 - RNA, 20 nt, synthetic construct
  misc_feature 1..20: note = antisense sequence
  source 1..20: mol_type = other RNA
ccctctaagagaccaaacga

SEQ ID NO: 14467 - RNA, 20 nt, synthetic construct
  misc_feature 1..20: note = antisense sequence
  source 1..20: mol_type = other RNA
accctctaagagaccaaacg

SEQ ID NO: 14468 - RNA, 20 nt, synthetic construct
  misc_feature 1..20: note = antisense sequence
  source 1..20: mol_type = other RNA
gaccctctaagagaccaaac

SEQ ID NO: 14469 - RNA, 20 nt, synthetic construct
  misc_feature 1..20: note = antisense sequence
  source 1..20: mol_type = other RNA
tgaccctctaagagaccaaa

SEQ ID NO: 14470 - RNA, 20 nt, synthetic construct
  misc_feature 1..20: note = antisense sequence
  source 1..20: mol_type = other RNA
ttgaccctctaagagaccaa

SEQ ID NO: 14471 - RNA, 20 nt, synthetic construct
  misc_feature 1..20: note = antisense sequence
  source 1..20: mol_type = other RNA
attgaccctctaagagacca

SEQ ID NO: 14472 - RNA, 20 nt, synthetic construct
  misc_feature 1..20: note = antisense sequence
  source 1..20: mol_type = other RNA
gattgaccctctaagagacc

SEQ ID NO: 14473 - RNA, 20 nt, synthetic construct
  misc_feature 1..20: note = antisense sequence
  source 1..20: mol_type = other RNA
agattgaccctctaagagac

SEQ ID NO: 14474 - RNA, 20 nt, synthetic construct
  misc_feature 1..20: note = antisense sequence
  source 1..20: mol_type = other RNA
aagattgaccctctaagaga

SEQ ID NO: 14475 - RNA, 20 nt, synthetic construct
  misc_feature 1..20: note = antisense sequence
  source 1..20: mol_type = other RNA
aaagattgaccctctaagag

SEQ ID NO: 14476 - RNA, 20 nt, synthetic construct
  misc_feature 1..20: note = antisense sequence
  source 1..20: mol_type = other RNA
gaaagattgaccctctaaga

SEQ ID NO: 14477 - RNA, 20 nt, synthetic construct
  misc_feature 1..20: note = antisense sequence
  source 1..20: mol_type = other RNA
tgaaagattgaccctctaag

SEQ ID NO: 14478 - RNA, 20 nt, synthetic construct
  misc_feature 1..20: note = antisense sequence
  source 1..20: mol_type = other RNA
gatgaaagattgaccctcta

SEQ ID NO: 14479 - RNA, 20 nt, synthetic construct
  misc_feature 1..20: note = antisense sequence
  source 1..20: mol_type = other RNA
cagatgaaagattgaccctc

SEQ ID NO: 14480 - RNA, 20 nt, synthetic construct
  misc_feature 1..20: note = antisense sequence
  source 1..20: mol_type = other RNA
acagatgaaagattgaccct

SEQ ID NO: 14481 - RNA, 20 nt, synthetic construct
  misc_feature 1..20: note = antisense sequence
  source 1..20: mol_type = other RNA
gtcctctaagatgagtaact

SEQ ID NO: 14482 - RNA, 20 nt, synthetic construct
  misc_feature 1..20: note = antisense sequence
  source 1..20: mol_type = other RNA
acagtcctctaagatgagta

SEQ ID NO: 14483 - RNA, 20 nt, synthetic construct
  misc_feature 1..20: note = antisense sequence
  source 1..20: mol_type = other RNA
tcaacagtcctctaagatga

SEQ ID NO: 14484 - RNA, 20 nt, synthetic construct
  misc_feature 1..20: note = antisense sequence
  source 1..20: mol_type = other RNA
tacaggcgtgagccaccatg

SEQ ID NO: 14485 - RNA, 20 nt, synthetic construct
  misc_feature 1..20: note = antisense sequence
  source 1..20: mol_type = other RNA
ttacaggcgtgagccaccat

SEQ ID NO: 14486 - RNA, 20 nt, synthetic construct
  misc_feature 1..20: note = antisense sequence
  source 1..20: mol_type = other RNA
attacaggcgtgagccacca

SEQ ID NO: 14487 - RNA, 20 nt, synthetic construct
  misc_feature 1..20: note = antisense sequence
  source 1..20: mol_type = other RNA
gattacaggcgtgagccacc

SEQ ID NO: 14488 - RNA, 20 nt, synthetic construct
  misc_feature 1..20: note = antisense sequence
  source 1..20: mol_type = other RNA
ggattacaggcgtgagccac

SEQ ID NO: 14489 - RNA, 20 nt, synthetic construct
  misc_feature 1..20: note = antisense sequence
  source 1..20: mol_type = other RNA
gggattacaggcgtgagcca

SEQ ID NO: 14490 - RNA, 20 nt, synthetic construct
  misc_feature 1..20: note = antisense sequence
  source 1..20: mol_type = other RNA
tgggattacaggcgtgagcc

SEQ ID NO: 14491 - RNA, 20 nt, synthetic construct
  misc_feature 1..20: note = antisense sequence
  source 1..20: mol_type = other RNA
ctgggattacaggcgtgagc

SEQ ID NO: 14492 - RNA, 20 nt, synthetic construct
  misc_feature 1..20: note = antisense sequence
  source 1..20: mol_type = other RNA
gctgggattacaggcgtgag

SEQ ID NO: 14493 - RNA, 20 nt, synthetic construct
  misc_feature 1..20: note = antisense sequence
  source 1..20: mol_type = other RNA
tgctgggattacaggcgtga

SEQ ID NO: 14494 - RNA, 20 nt, synthetic construct
  misc_feature 1..20: note = antisense sequence
  source 1..20: mol_type = other RNA
gtgctgggattacaggcgtg

SEQ ID NO: 14495 - RNA, 20 nt, synthetic construct
  misc_feature 1..20: note = antisense sequence
  source 1..20: mol_type = other RNA
agtgctgggattacaggcgt

SEQ ID NO: 14496 - RNA, 20 nt, synthetic construct
  misc_feature 1..20: note = antisense sequence
  source 1..20: mol_type = other RNA
aagtgctgggattacaggcg

SEQ ID NO: 14497 - RNA, 20 nt, synthetic construct
  misc_feature 1..20: note = antisense sequence
  source 1..20: mol_type = other RNA
aaagtgctgggattacaggc

SEQ ID NO: 14498 - RNA, 20 nt, synthetic construct
  misc_feature 1..20: note = antisense sequence
  source 1..20: mol_type = other RNA
caaagtgctgggattacagg

SEQ ID NO: 14499 - RNA, 20 nt, synthetic construct
  misc_feature 1..20: note = antisense sequence
  source 1..20: mol_type = other RNA
ccaaagtgctgggattacag

SEQ ID NO: 14500 - RNA, 20 nt, synthetic construct
  misc_feature 1..20: note = antisense sequence
  source 1..20: mol_type = other RNA
cctcagcctcccaaagtgct

SEQ ID NO: 14501 - RNA, 20 nt, synthetic construct
  misc_feature 1..20: note = antisense sequence
  source 1..20: mol_type = other RNA
acctcagcctcccaaagtgc

SEQ ID NO: 14502 - RNA, 20 nt, synthetic construct
  misc_feature 1..20: note = antisense sequence
  source 1..20: mol_type = other RNA
cacctcagcctcccaaagtg

SEQ ID NO: 14503 - RNA, 20 nt, synthetic construct
  misc_feature 1..20: note = antisense sequence
  source 1..20: mol_type = other RNA
tcacctcagcctcccaaagt

SEQ ID NO: 14504 - RNA, 20 nt, synthetic construct
  misc_feature 1..20: note = antisense sequence
  source 1..20: mol_type = other RNA
ctcacctcagcctcccaaag

SEQ ID NO: 14505 - RNA, 20 nt, synthetic construct
  misc_feature 1..20: note = antisense sequence
  source 1..20: mol_type = other RNA
actcacctcagcctcccaaa

SEQ ID NO: 14506 - RNA, 20 nt, synthetic construct
  misc_feature 1..20: note = antisense sequence
  source 1..20: mol_type = other RNA
cactcacctcagcctcccaa

SEQ ID NO: 14507 - RNA, 20 nt, synthetic construct
  misc_feature 1..20: note = antisense sequence
  source 1..20: mol_type = other RNA
gacctcaggtgatccactca

SEQ ID NO: 14508 - RNA, 20 nt, synthetic construct
  misc_feature 1..20: note = antisense sequence
  source 1..20: mol_type = other RNA
tgacctcaggtgatccactc

SEQ ID NO: 14509 - RNA, 20 nt, synthetic construct
  misc_feature 1..20: note = antisense sequence
  source 1..20: mol_type = other RNA
ctgacctcaggtgatccact

SEQ ID NO: 14510 - RNA, 20 nt, synthetic construct
  misc_feature 1..20: note = antisense sequence
  source 1..20: mol_type = other RNA
tctcgaactcctgacctcag

SEQ ID NO: 14511 - RNA, 20 nt, synthetic construct
  misc_feature 1..20: note = antisense sequence
  source 1..20: mol_type = other RNA
gtctcgaactcctgacctca

SEQ ID NO: 14512 - RNA, 20 nt, synthetic construct
  misc_feature 1..20: note = antisense sequence
  source 1..20: mol_type = other RNA
gctggtctcgaactcctgac

SEQ ID NO: 14513 - RNA, 20 nt, synthetic construct
  misc_feature 1..20: note = antisense sequence
  source 1..20: mol_type = other RNA
ggctggtctcgaactcctga

SEQ ID NO: 14514 - RNA, 20 nt, synthetic construct
  misc_feature 1..20: note = antisense sequence
  source 1..20: mol_type = other RNA
aggctggtctcgaactcctg

SEQ ID NO: 14515 - RNA, 20 nt, synthetic construct
  misc_feature 1..20: note = antisense sequence
  source 1..20: mol_type = other RNA
caggctggtctcgaactcct

SEQ ID NO: 14516 - RNA, 20 nt, synthetic construct
  misc_feature 1..20: note = antisense sequence
  source 1..20: mol_type = other RNA
caccacacccagctaatttt

SEQ ID NO: 14517 - RNA, 20 nt, synthetic construct
  misc_feature 1..20: note = antisense sequence
  source 1..20: mol_type = other RNA
ccaccacacccagctaattt

SEQ ID NO: 14518 - RNA, 20 nt, synthetic construct
  misc_feature 1..20: note = antisense sequence
  source 1..20: mol_type = other RNA
gccaccacacccagctaatt

SEQ ID NO: 14519 - RNA, 20 nt, synthetic construct
  misc_feature 1..20: note = antisense sequence
  source 1..20: mol_type = other RNA
tgccaccacacccagctaat

SEQ ID NO: 14520 - RNA, 20 nt, synthetic construct
  misc_feature 1..20: note = antisense sequence
  source 1..20: mol_type = other RNA
gtgccaccacacccagctaa

SEQ ID NO: 14521 - RNA, 20 nt, synthetic construct
  misc_feature 1..20: note = antisense sequence
  source 1..20: mol_type = other RNA
ttacaggcatgtgccaccac

SEQ ID NO: 14522 - RNA, 20 nt, synthetic construct
  misc_feature 1..20: note = antisense sequence
  source 1..20: mol_type = other RNA
attacaggcatgtgccacca

SEQ ID NO: 14523 - RNA, 20 nt, synthetic construct
  misc_feature 1..20: note = antisense sequence
  source 1..20: mol_type = other RNA
gattacaggcatgtgccacc

SEQ ID NO: 14524 - RNA, 20 nt, synthetic construct
  misc_feature 1..20: note = antisense sequence
  source 1..20: mol_type = other RNA
ggattacaggcatgtgccac

SEQ ID NO: 14525 - RNA, 20 nt, synthetic construct
  misc_feature 1..20: note = antisense sequence
  source 1..20: mol_type = other RNA
gggattacaggcatgtgcca

SEQ ID NO: 14526 - RNA, 20 nt, synthetic construct
  misc_feature 1..20: note = antisense sequence
  source 1..20: mol_type = other RNA
tgggattacaggcatgtgcc

SEQ ID NO: 14527 - RNA, 20 nt, synthetic construct
  misc_feature 1..20: note = antisense sequence
  source 1..20: mol_type = other RNA
ctgggattacaggcatgtgc

SEQ ID NO: 14528 - RNA, 20 nt, synthetic construct
  misc_feature 1..20: note = antisense sequence
  source 1..20: mol_type = other RNA
gctgggattacaggcatgtg

SEQ ID NO: 14529 - RNA, 20 nt, synthetic construct
  misc_feature 1..20: note = antisense sequence
  source 1..20: mol_type = other RNA
agctgggattacaggcatgt

SEQ ID NO: 14530 - RNA, 20 nt, synthetic construct
  misc_feature 1..20: note = antisense sequence
  source 1..20: mol_type = other RNA
tagctgggattacaggcatg

SEQ ID NO: 14531 - RNA, 20 nt, synthetic construct
  misc_feature 1..20: note = antisense sequence
  source 1..20: mol_type = other RNA
ctagctgggattacaggcat

SEQ ID NO: 14532 - RNA, 20 nt, synthetic construct
  misc_feature 1..20: note = antisense sequence
  source 1..20: mol_type = other RNA
actagctgggattacaggca

SEQ ID NO: 14533 - RNA, 20 nt, synthetic construct
  misc_feature 1..20: note = antisense sequence
  source 1..20: mol_type = other RNA
gactagctgggattacaggc

SEQ ID NO: 14534 - RNA, 20 nt, synthetic construct
  misc_feature 1..20: note = antisense sequence
  source 1..20: mol_type = other RNA
cgactagctgggattacagg

SEQ ID NO: 14535 - RNA, 20 nt, synthetic construct
  misc_feature 1..20: note = antisense sequence
  source 1..20: mol_type = other RNA
ccgactagctgggattacag

SEQ ID NO: 14536 - RNA, 20 nt, synthetic construct
  misc_feature 1..20: note = antisense sequence
  source 1..20: mol_type = other RNA
attctcctgcctcagcctcc

SEQ ID NO: 14537 - RNA, 20 nt, synthetic construct
  misc_feature 1..20: note = antisense sequence
  source 1..20: mol_type = other RNA
gattctcctgcctcagcctc

SEQ ID NO: 14538 - RNA, 20 nt, synthetic construct
  misc_feature 1..20: note = antisense sequence
  source 1..20: mol_type = other RNA
tgattctcctgcctcagcct

SEQ ID NO: 14539 - RNA, 20 nt, synthetic construct
  misc_feature 1..20: note = antisense sequence
  source 1..20: mol_type = other RNA
gtgattctcctgcctcagcc

SEQ ID NO: 14540 - RNA, 20 nt, synthetic construct
  misc_feature 1..20: note = antisense sequence
  source 1..20: mol_type = other RNA
agtgattctcctgcctcagc

SEQ ID NO: 14541 - RNA, 20 nt, synthetic construct
  misc_feature 1..20: note = antisense sequence
  source 1..20: mol_type = other RNA
aagtgattctcctgcctcag

SEQ ID NO: 14542 - RNA, 20 nt, synthetic construct
  misc_feature 1..20: note = antisense sequence
  source 1..20: mol_type = other RNA
caagtgattctcctgcctca

SEQ ID NO: 14543 - RNA, 20 nt, synthetic construct
  misc_feature 1..20: note = antisense sequence
  source 1..20: mol_type = other RNA
tcaagtgattctcctgcctc

SEQ ID NO: 14544 - RNA, 20 nt, synthetic construct
  misc_feature 1..20: note = antisense sequence
  source 1..20: mol_type = other RNA
ttcaagtgattctcctgcct

SEQ ID NO: 14545 - RNA, 20 nt, synthetic construct
  misc_feature 1..20: note = antisense sequence
  source 1..20: mol_type = other RNA
gttcaagtgattctcctgcc

SEQ ID NO: 14546 - RNA, 20 nt, synthetic construct
  misc_feature 1..20: note = antisense sequence
  source 1..20: mol_type = other RNA
ggttcaagtgattctcctgc

SEQ ID NO: 14547 - RNA, 20 nt, synthetic construct
  misc_feature 1..20: note = antisense sequence
  source 1..20: mol_type = other RNA
aggttcaagtgattctcctg

SEQ ID NO: 14548 - RNA, 20 nt, synthetic construct
  misc_feature 1..20: note = antisense sequence
  source 1..20: mol_type = other RNA
caggttcaagtgattctcct

SEQ ID NO: 14549 - RNA, 20 nt, synthetic construct
  misc_feature 1..20: note = antisense sequence
  source 1..20: mol_type = other RNA
ccaggttcaagtgattctcc

SEQ ID NO: 14550 - RNA, 20 nt, synthetic construct
  misc_feature 1..20: note = antisense sequence
  source 1..20: mol_type = other RNA
cccaggttcaagtgattctc

SEQ ID NO: 14551 - RNA, 20 nt, synthetic construct
  misc_feature 1..20: note = antisense sequence
  source 1..20: mol_type = other RNA
tcccaggttcaagtgattct

SEQ ID NO: 14552 - RNA, 20 nt, synthetic construct
  misc_feature 1..20: note = antisense sequence
  source 1..20: mol_type = other RNA
ttcccaggttcaagtgattc

SEQ ID NO: 14553 - RNA, 20 nt, synthetic construct
  misc_feature 1..20: note = antisense sequence
  source 1..20: mol_type = other RNA
cttcccaggttcaagtgatt

SEQ ID NO: 14554 - RNA, 20 nt, synthetic construct
  misc_feature 1..20: note = antisense sequence
  source 1..20: mol_type = other RNA
cactgcaacctccacttccc

SEQ ID NO: 14555 - RNA, 20 nt, synthetic construct
  misc_feature 1..20: note = antisense sequence
  source 1..20: mol_type = other RNA
tcactgcaacctccacttcc

SEQ ID NO: 14556 - RNA, 20 nt, synthetic construct
  misc_feature 1..20: note = antisense sequence
  source 1..20: mol_type = other RNA
ctcactgcaacctccacttc

SEQ ID NO: 14557 - RNA, 20 nt, synthetic construct
  misc_feature 1..20: note = antisense sequence
  source 1..20: mol_type = other RNA
gctcactgcaacctccactt

SEQ ID NO: 14558 - RNA, 20 nt, synthetic construct
  misc_feature 1..20: note = antisense sequence
  source 1..20: mol_type = other RNA
ggctcactgcaacctccact

SEQ ID NO: 14559 - RNA, 20 nt, synthetic construct
  misc_feature 1..20: note = antisense sequence
  source 1..20: mol_type = other RNA
tcggctcactgcaacctcca

SEQ ID NO: 14560 - RNA, 20 nt, synthetic construct
  misc_feature 1..20: note = antisense sequence
  source 1..20: mol_type = other RNA
tctcggctcactgcaacctc

SEQ ID NO: 14561 - RNA, 20 nt, synthetic construct
  misc_feature 1..20: note = antisense sequence
  source 1..20: mol_type = other RNA
atctcggctcactgcaacct

SEQ ID NO: 14562 - RNA, 20 nt, synthetic construct
  misc_feature 1..20: note = antisense sequence
  source 1..20: mol_type = other RNA
gatctcggctcactgcaacc

SEQ ID NO: 14563 - RNA, 20 nt, synthetic construct
  misc_feature 1..20: note = antisense sequence
  source 1..20: mol_type = other RNA
cgatctcggctcactgcaac

SEQ ID NO: 14564 - RNA, 20 nt, synthetic construct
  misc_feature 1..20: note = antisense sequence
  source 1..20: mol_type = other RNA
acgatctcggctcactgcaa

SEQ ID NO: 14565 - RNA, 20 nt, synthetic construct
  misc_feature 1..20: note = antisense sequence
  source 1..20: mol_type = other RNA
cacgatctcggctcactgca

SEQ ID NO: 14566 - RNA, 20 nt, synthetic construct
  misc_feature 1..20: note = antisense sequence
  source 1..20: mol_type = other RNA
tctctctgtcacccaggctg

SEQ ID NO: 14567 - RNA, 20 nt, synthetic construct
  misc_feature 1..20: note = antisense sequence
  source 1..20: mol_type = other RNA
ctctctctgtcacccaggct

SEQ ID NO: 14568 - RNA, 20 nt, synthetic construct
  misc_feature 1..20: note = antisense sequence
  source 1..20: mol_type = other RNA
tctctctctgtcacccaggc

SEQ ID NO: 14569 - RNA, 20 nt, synthetic construct
  misc_feature 1..20: note = antisense sequence
  source 1..20: mol_type = other RNA
tcccaacttcagaagggcaa

SEQ ID NO: 14570 - RNA, 20 nt, synthetic construct
  misc_feature 1..20: note = antisense sequence
  source 1..20: mol_type = other RNA
aacacttccgggaacatttc

SEQ ID NO: 14571 - RNA, 20 nt, synthetic construct
  misc_feature 1..20: note = antisense sequence
  source 1..20: mol_type = other RNA
taacacttccgggaacattt

SEQ ID NO: 14572 - RNA, 20 nt, synthetic construct
  misc_feature 1..20: note = antisense sequence
  source 1..20: mol_type = other RNA
gtaacacttccgggaacatt

SEQ ID NO: 14573 - RNA, 20 nt, synthetic construct
  misc_feature 1..20: note = antisense sequence
  source 1..20: mol_type = other RNA
tgtaacacttccgggaacat

SEQ ID NO: 14574 - RNA, 20 nt, synthetic construct
  misc_feature 1..20: note = antisense sequence
  source 1..20: mol_type = other RNA
atgtaacacttccgggaaca

SEQ ID NO: 14575 - RNA, 20 nt, synthetic construct
  misc_feature 1..20: note = antisense sequence
  source 1..20: mol_type = other RNA
tatgtaacacttccgggaac

SEQ ID NO: 14576 - RNA, 20 nt, synthetic construct
  misc_feature 1..20: note = antisense sequence
  source 1..20: mol_type = other RNA
ttatgtaacacttccgggaa

SEQ ID NO: 14577 - RNA, 20 nt, synthetic construct
  misc_feature 1..20: note = antisense sequence
  source 1..20: mol_type = other RNA
attatgtaacacttccggga

SEQ ID NO: 14578 - RNA, 20 nt, synthetic construct
  misc_feature 1..20: note = antisense sequence
  source 1..20: mol_type = other RNA
cattatgtaacacttccggg

SEQ ID NO: 14579 - RNA, 20 nt, synthetic construct
  misc_feature 1..20: note = antisense sequence
  source 1..20: mol_type = other RNA
tcattatgtaacacttccgg

SEQ ID NO: 14580 - RNA, 20 nt, synthetic construct
  misc_feature 1..20: note = antisense sequence
  source 1..20: mol_type = other RNA
cctcaagccaaagatcatta

SEQ ID NO: 14581 - RNA, 20 nt, synthetic construct
  misc_feature 1..20: note = antisense sequence
  source 1..20: mol_type = other RNA
agacctcaagccaaagatca

SEQ ID NO: 14582 - RNA, 20 nt, synthetic construct
  misc_feature 1..20: note = antisense sequence
  source 1..20: mol_type = other RNA
ctacctgcatcacaatatag

SEQ ID NO: 14583 - RNA, 20 nt, synthetic construct
  misc_feature 1..20: note = antisense sequence
  source 1..20: mol_type = other RNA
gctacctgcatcacaatata

SEQ ID NO: 14584 - RNA, 20 nt, synthetic construct
  misc_feature 1..20: note = antisense sequence
  source 1..20: mol_type = other RNA
agctacctgcatcacaatat

SEQ ID NO: 14585 - RNA, 20 nt, synthetic construct
  misc_feature 1..20: note = antisense sequence
  source 1..20: mol_type = other RNA
aggagctacctgcatcacaa

SEQ ID NO: 14586 - RNA, 20 nt, synthetic construct
  misc_feature 1..20: note = antisense sequence
  source 1..20: mol_type = other RNA
taggagctacctgcatcaca

SEQ ID NO: 14587 - RNA, 20 nt, synthetic construct
  misc_feature 1..20: note = antisense sequence
  source 1..20: mol_type = other RNA
ataggagctacctgcatcac

SEQ ID NO: 14588 - RNA, 20 nt, synthetic construct
  misc_feature 1..20: note = antisense sequence
  source 1..20: mol_type = other RNA
caacataggagctacctgca

SEQ ID NO: 14589 - RNA, 20 nt, synthetic construct
  misc_feature 1..20: note = antisense sequence
  source 1..20: mol_type = other RNA
gtcaacataggagctacctg

SEQ ID NO: 14590 - RNA, 20 nt, synthetic construct
  misc_feature 1..20: note = antisense sequence
  source 1..20: mol_type = other RNA
tgtcaacataggagctacct

SEQ ID NO: 14591 - RNA, 20 nt, synthetic construct
  misc_feature 1..20: note = antisense sequence
  source 1..20: mol_type = other RNA
gtgtcaacataggagctacc

SEQ ID NO: 14592 - RNA, 20 nt, synthetic construct
  misc_feature 1..20: note = antisense sequence
  source 1..20: mol_type = other RNA
tgtgtcaacataggagctac

SEQ ID NO: 14593 - RNA, 20 nt, synthetic construct
  misc_feature 1..20: note = antisense sequence
  source 1..20: mol_type = other RNA
ctgtgtcaacataggagcta

SEQ ID NO: 14594 - RNA, 20 nt, synthetic construct
  misc_feature 1..20: note = antisense sequence
  source 1..20: mol_type = other RNA
ggctgtgtcaacataggagc

SEQ ID NO: 14595 - RNA, 20 nt, synthetic construct
  misc_feature 1..20: note = antisense sequence
  source 1..20: mol_type = other RNA
tggctgtgtcaacataggag

SEQ ID NO: 14596 - RNA, 20 nt, synthetic construct
  misc_feature 1..20: note = antisense sequence
  source 1..20: mol_type = other RNA
tgctggagtgatggcaacat

SEQ ID NO: 14597 - RNA, 20 nt, synthetic construct
  misc_feature 1..20: note = antisense sequence
  source 1..20: mol_type = other RNA
ctgctggagtgatggcaaca

SEQ ID NO: 14598 - RNA, 20 nt, synthetic construct
  misc_feature 1..20: note = antisense sequence
  source 1..20: mol_type = other RNA
tcacttccagttcctcagag

SEQ ID NO: 14599 - RNA, 20 nt, synthetic construct
  misc_feature 1..20: note = antisense sequence
  source 1..20: mol_type = other RNA
gactcacttccagttcctca

SEQ ID NO: 14600 - RNA, 20 nt, synthetic construct
  misc_feature 1..20: note = antisense sequence
  source 1..20: mol_type = other RNA
tgactcacttccagttcctc

SEQ ID NO: 14601 - RNA, 20 nt, synthetic construct
  misc_feature 1..20: note = antisense sequence
  source 1..20: mol_type = other RNA
ttgactcacttccagttcct

SEQ ID NO: 14602 - RNA, 20 nt, synthetic construct
  misc_feature 1..20: note = antisense sequence
  source 1..20: mol_type = other RNA
acctgttgactcacttccag

SEQ ID NO: 14603 - RNA, 20 nt, synthetic construct
  misc_feature 1..20: note = antisense sequence
  source 1..20: mol_type = other RNA
gacctgttgactcacttcca

SEQ ID NO: 14604 - RNA, 20 nt, synthetic construct
  misc_feature 1..20: note = antisense sequence
  source 1..20: mol_type = other RNA
tgacctgttgactcacttcc

SEQ ID NO: 14605 - RNA, 20 nt, synthetic construct
  misc_feature 1..20: note = antisense sequence
  source 1..20: mol_type = other RNA
atgacctgttgactcacttc

SEQ ID NO: 14606 - RNA, 20 nt, synthetic construct
  misc_feature 1..20: note = antisense sequence
  source 1..20: mol_type = other RNA
tatgacctgttgactcactt

SEQ ID NO: 14607 - RNA, 20 nt, synthetic construct
  misc_feature 1..20: note = antisense sequence
  source 1..20: mol_type = other RNA
gtatgacctgttgactcact

SEQ ID NO: 14608 - RNA, 20 nt, synthetic construct
  misc_feature 1..20: note = antisense sequence
  source 1..20: mol_type = other RNA
agtatgacctgttgactcac

SEQ ID NO: 14609 - RNA, 20 nt, synthetic construct
  misc_feature 1..20: note = antisense sequence
  source 1..20: mol_type = other RNA
cagagtatgacctgttgact

SEQ ID NO: 14610 - RNA, 20 nt, synthetic construct
  misc_feature 1..20: note = antisense sequence
  source 1..20: mol_type = other RNA
gtttcagagtatgacctgtt

SEQ ID NO: 14611 - RNA, 20 nt, synthetic construct
  misc_feature 1..20: note = antisense sequence
  source 1..20: mol_type = other RNA
ggtttcagagtatgacctgt

SEQ ID NO: 14612 - RNA, 20 nt, synthetic construct
  misc_feature 1..20: note = antisense sequence
  source 1..20: mol_type = other RNA
tgtggaggtttcagagtatg

SEQ ID NO: 14613 - RNA, 20 nt, synthetic construct
  misc_feature 1..20: note = antisense sequence
  source 1..20: mol_type = other RNA
atgtggaggtttcagagtat

SEQ ID NO: 14614 - RNA, 20 nt, synthetic construct
  misc_feature 1..20: note = antisense sequence
  source 1..20: mol_type = other RNA
aatgtggaggtttcagagta

SEQ ID NO: 14615 - RNA, 20 nt, synthetic construct
  misc_feature 1..20: note = antisense sequence
  source 1..20: mol_type = other RNA
gaatgtggaggtttcagagt

SEQ ID NO: 14616 - RNA, 20 nt, synthetic construct
  misc_feature 1..20: note = antisense sequence
  source 1..20: mol_type = other RNA
gattggcattctgacaaggg

SEQ ID NO: 14617 - RNA, 20 nt, synthetic construct
  misc_feature 1..20: note = antisense sequence
  source 1..20: mol_type = other RNA
ggattggcattctgacaagg

SEQ ID NO: 14618 - RNA, 20 nt, synthetic construct
  misc_feature 1..20: note = antisense sequence
  source 1..20: mol_type = other RNA
gggattggcattctgacaag

SEQ ID NO: 14619 - RNA, 20 nt, synthetic construct
  misc_feature 1..20: note = antisense sequence
  source 1..20: mol_type = other RNA
agggattggcattctgacaa

SEQ ID NO: 14620 - RNA, 20 nt, synthetic construct
  misc_feature 1..20: note = antisense sequence
  source 1..20: mol_type = other RNA
gagggattggcattctgaca

SEQ ID NO: 14621 - RNA, 20 nt, synthetic construct
  misc_feature 1..20: note = antisense sequence
  source 1..20: mol_type = other RNA
agagggattggcattctgac

SEQ ID NO: 14622 - RNA, 20 nt, synthetic construct
  misc_feature 1..20: note = antisense sequence
  source 1..20: mol_type = other RNA
gagagggattggcattctga

SEQ ID NO: 14623 - RNA, 20 nt, synthetic construct
  misc_feature 1..20: note = antisense sequence
  source 1..20: mol_type = other RNA
ggagagggattggcattctg

SEQ ID NO: 14624 - RNA, 20 nt, synthetic construct
  misc_feature 1..20: note = antisense sequence
  source 1..20: mol_type = other RNA
tggagagggattggcattct

SEQ ID NO: 14625 - RNA, 20 nt, synthetic construct
  misc_feature 1..20: note = antisense sequence
  source 1..20: mol_type = other RNA
ctggagagggattggcattc

SEQ ID NO: 14626 - RNA, 20 nt, synthetic construct
  misc_feature 1..20: note = antisense sequence
  source 1..20: mol_type = other RNA
cctggagagggattggcatt

SEQ ID NO: 14627 - RNA, 20 nt, synthetic construct
  misc_feature 1..20: note = antisense sequence
  source 1..20: mol_type = other RNA
ggcttttgcttccctggaga

SEQ ID NO: 14628 - RNA, 20 nt, synthetic construct
  misc_feature 1..20: note = antisense sequence
  source 1..20: mol_type = other RNA
atctcatcaggcttttgctt

SEQ ID NO: 14629 - RNA, 20 nt, synthetic construct
  misc_feature 1..20: note = antisense sequence
  source 1..20: mol_type = other RNA
cttgtgcatctaatctgaca

SEQ ID NO: 14630 - RNA, 20 nt, synthetic construct
  misc_feature 1..20: note = antisense sequence
  source 1..20: mol_type = other RNA
gcattcttgtgcatctaatc

SEQ ID NO: 14631 - RNA, 20 nt, synthetic construct
  misc_feature 1..20: note = antisense sequence
  source 1..20: mol_type = other RNA
cagcattcttgtgcatctaa

SEQ ID NO: 14632 - RNA, 20 nt, synthetic construct
  misc_feature 1..20: note = antisense sequence
  source 1..20: mol_type = other RNA
gcagcattcttgtgcatcta

SEQ ID NO: 14633 - RNA, 20 nt, synthetic construct
  misc_feature 1..20: note = antisense sequence
  source 1..20: mol_type = other RNA
caagggtcaggcttactgca

SEQ ID NO: 14634 - RNA, 20 nt, synthetic construct
  misc_feature 1..20: note = antisense sequence
  source 1..20: mol_type = other RNA
ccaagggtcaggcttactgc

SEQ ID NO: 14635 - RNA, 20 nt, synthetic construct
  misc_feature 1..20: note = antisense sequence
  source 1..20: mol_type = other RNA
cccaagggtcaggcttactg

SEQ ID NO: 14636 - RNA, 20 nt, synthetic construct
  misc_feature 1..20: note = antisense sequence
  source 1..20: mol_type = other RNA
tcccaagggtcaggcttact

SEQ ID NO: 14637 - RNA, 20 nt, synthetic construct
  misc_feature 1..20: note = antisense sequence
  source 1..20: mol_type = other RNA
ttcccaagggtcaggcttac

SEQ ID NO: 14638 - RNA, 20 nt, synthetic construct
  misc_feature 1..20: note = antisense sequence
  source 1..20: mol_type = other RNA
ctgttcccaagggtcaggct

SEQ ID NO: 14639 - RNA, 20 nt, synthetic construct
  misc_feature 1..20: note = antisense sequence
  source 1..20: mol_type = other RNA
ttcttctgttcccaagggtc

SEQ ID NO: 14640 - RNA, 20 nt, synthetic construct
  misc_feature 1..20: note = antisense sequence
  source 1..20: mol_type = other RNA
tctccttcttctgttcccaa

SEQ ID NO: 14641 - RNA, 20 nt, synthetic construct
  misc_feature 1..20: note = antisense sequence
  source 1..20: mol_type = other RNA
gatcttgttatgtctccttc

SEQ ID NO: 14642 - RNA, 20 nt, synthetic construct
  misc_feature 1..20: note = antisense sequence
  source 1..20: mol_type = other RNA
ggtgttctgatcttgttatg

SEQ ID NO: 14643 - RNA, 20 nt, synthetic construct
  misc_feature 1..20: note = antisense sequence
  source 1..20: mol_type = other RNA
gggtgttctgatcttgttat

SEQ ID NO: 14644 - RNA, 20 nt, synthetic construct
  misc_feature 1..20: note = antisense sequence
  source 1..20: mol_type = other RNA
cgggtgttctgatcttgtta

SEQ ID NO: 14645 - RNA, 20 nt, synthetic construct
  misc_feature 1..20: note = antisense sequence
  source 1..20: mol_type = other RNA
accgggtgttctgatcttgt

SEQ ID NO: 14646 - RNA, 20 nt, synthetic construct
  misc_feature 1..20: note = antisense sequence
  source 1..20: mol_type = other RNA
taccgggtgttctgatcttg

SEQ ID NO: 14647 - RNA, 20 nt, synthetic construct
  misc_feature 1..20: note = antisense sequence
  source 1..20: mol_type = other RNA
ttaccgggtgttctgatctt

SEQ ID NO: 14648 - RNA, 20 nt, synthetic construct
  misc_feature 1..20: note = antisense sequence
  source 1..20: mol_type = other RNA
tttaccgggtgttctgatct

SEQ ID NO: 14649 - RNA, 20 nt, synthetic construct
  misc_feature 1..20: note = antisense sequence
  source 1..20: mol_type = other RNA
atttaccgggtgttctgatc

SEQ ID NO: 14650 - RNA, 20 nt, synthetic construct
  misc_feature 1..20: note = antisense sequence
  source 1..20: mol_type = other RNA
tatttaccgggtgttctgat

SEQ ID NO: 14651 - RNA, 20 nt, synthetic construct
  misc_feature 1..20: note = antisense sequence
  source 1..20: mol_type = other RNA
atatttaccgggtgttctga

SEQ ID NO: 14652 - RNA, 20 nt, synthetic construct
  misc_feature 1..20: note = antisense sequence
  source 1..20: mol_type = other RNA
catatttaccgggtgttctg

SEQ ID NO: 14653 - RNA, 20 nt, synthetic construct
  misc_feature 1..20: note = antisense sequence
  source 1..20: mol_type = other RNA
tcatatttaccgggtgttct

SEQ ID NO: 14654 - RNA, 20 nt, synthetic construct
  misc_feature 1..20: note = antisense sequence
  source 1..20: mol_type = other RNA
atcatatttaccgggtgttc

SEQ ID NO: 14655 - RNA, 20 nt, synthetic construct
  misc_feature 1..20: note = antisense sequence
  source 1..20: mol_type = other RNA
gtatcatatttaccgggtgt

SEQ ID NO: 14656 - RNA, 20 nt, synthetic construct
  misc_feature 1..20: note = antisense sequence
  source 1..20: mol_type = other RNA
cctagagggtgaaacataaa

SEQ ID NO: 14657 - RNA, 20 nt, synthetic construct
  misc_feature 1..20: note = antisense sequence
  source 1..20: mol_type = other RNA
tcctagagggtgaaacataa

SEQ ID NO: 14658 - RNA, 20 nt, synthetic construct
  misc_feature 1..20: note = antisense sequence
  source 1..20: mol_type = other RNA
gtcctagagggtgaaacata

SEQ ID NO: 14659 - RNA, 20 nt, synthetic construct
  misc_feature 1..20: note = antisense sequence
  source 1..20: mol_type = other RNA
tgtcctagagggtgaaacat

SEQ ID NO: 14660 - RNA, 20 nt, synthetic construct
  misc_feature 1..20: note = antisense sequence
  source 1..20: mol_type = other RNA
ttgtcctagagggtgaaaca

SEQ ID NO: 14661 - RNA, 20 nt, synthetic construct
  misc_feature 1..20: note = antisense sequence
  source 1..20: mol_type = other RNA
cttgtcctagagggtgaaac

SEQ ID NO: 14662 - RNA, 20 nt, synthetic construct
  misc_feature 1..20: note = antisense sequence
  source 1..20: mol_type = other RNA
gcttgtcctagagggtgaaa

SEQ ID NO: 14663 - RNA, 20 nt, synthetic construct
  misc_feature 1..20: note = antisense sequence
  source 1..20: mol_type = other RNA
tgcttgtcctagagggtgaa

SEQ ID NO: 14664 - RNA, 20 nt, synthetic construct
  misc_feature 1..20: note = antisense sequence
  source 1..20: mol_type = other RNA
catgcttgtcctagagggtg

SEQ ID NO: 14665 - RNA, 20 nt, synthetic construct
  misc_feature 1..20: note = antisense sequence
  source 1..20: mol_type = other RNA
tcatgcttgtcctagagggt

SEQ ID NO: 14666 - RNA, 20 nt, synthetic construct
  misc_feature 1..20: note = antisense sequence
  source 1..20: mol_type = other RNA
gtcatgcttgtcctagaggg

SEQ ID NO: 14667 - RNA, 20 nt, synthetic construct
  misc_feature 1..20: note = antisense sequence
  source 1..20: mol_type = other RNA
agtcatgcttgtcctagagg

SEQ ID NO: 14668 - RNA, 20 nt, synthetic construct
  misc_feature 1..20: note = antisense sequence
  source 1..20: mol_type = other RNA
aagtcatgcttgtcctagag

SEQ ID NO: 14669 - RNA, 20 nt, synthetic construct
  misc_feature 1..20: note = antisense sequence
  source 1..20: mol_type = other RNA
aaagtcatgcttgtcctaga

SEQ ID NO: 14670 - RNA, 20 nt, synthetic construct
  misc_feature 1..20: note = antisense sequence
  source 1..20: mol_type = other RNA
gaaagtcatgcttgtcctag

SEQ ID NO: 14671 - RNA, 20 nt, synthetic construct
  misc_feature 1..20: note = antisense sequence
  source 1..20: mol_type = other RNA
tgaaagtcatgcttgtccta

SEQ ID NO: 14672 - RNA, 20 nt, synthetic construct
  misc_feature 1..20: note = antisense sequence
  source 1..20: mol_type = other RNA
tcctgaaagtcatgcttgtc

SEQ ID NO: 14673 - RNA, 20 nt, synthetic construct
  misc_feature 1..20: note = antisense sequence
  source 1..20: mol_type = other RNA
gtcctgaaagtcatgcttgt

SEQ ID NO: 14674 - RNA, 20 nt, synthetic construct
  misc_feature 1..20: note = antisense sequence
  source 1..20: mol_type = other RNA
agagtcctgaaagtcatgct

SEQ ID NO: 14675 - RNA, 20 nt, synthetic construct
  misc_feature 1..20: note = antisense sequence
  source 1..20: mol_type = other RNA
cagagtcctgaaagtcatgc

SEQ ID NO: 14676 - RNA, 20 nt, synthetic construct
  misc_feature 1..20: note = antisense sequence
  source 1..20: mol_type = other RNA
acagagtcctgaaagtcatg

SEQ ID NO: 14677 - RNA, 20 nt, synthetic construct
  misc_feature 1..20: note = antisense sequence
  source 1..20: mol_type = other RNA
cacagagtcctgaaagtcat

SEQ ID NO: 14678 - RNA, 20 nt, synthetic construct
  misc_feature 1..20: note = antisense sequence
  source 1..20: mol_type = other RNA
ctcacagagtcctgaaagtc

SEQ ID NO: 14679 - RNA, 20 nt, synthetic construct
  misc_feature 1..20: note = antisense sequence
  source 1..20: mol_type = other RNA
ttctcacagagtcctgaaag

SEQ ID NO: 14680 - RNA, 20 nt, synthetic construct
  misc_feature 1..20: note = antisense sequence
  source 1..20: mol_type = other RNA
tattctcacagagtcctgaa

SEQ ID NO: 14681 - RNA, 20 nt, synthetic construct
  misc_feature 1..20: note = antisense sequence
  source 1..20: mol_type = other RNA
ttattctcacagagtcctga

SEQ ID NO: 14682 - RNA, 20 nt, synthetic construct
  misc_feature 1..20: note = antisense sequence
  source 1..20: mol_type = other RNA
gttattctcacagagtcctg

SEQ ID NO: 14683 - RNA, 20 nt, synthetic construct
  misc_feature 1..20: note = antisense sequence
  source 1..20: mol_type = other RNA
cgttattctcacagagtcct

SEQ ID NO: 14684 - RNA, 20 nt, synthetic construct
  misc_feature 1..20: note = antisense sequence
  source 1..20: mol_type = other RNA
acgttattctcacagagtcc

SEQ ID NO: 14685 - RNA, 20 nt, synthetic construct
  misc_feature 1..20: note = antisense sequence
  source 1..20: mol_type = other RNA
cggtaagattaaagtccaac

SEQ ID NO: 14686 - RNA, 20 nt, synthetic construct
  misc_feature 1..20: note = antisense sequence
  source 1..20: mol_type = other RNA
gatcggtaagattaaagtcc

SEQ ID NO: 14687 - RNA, 20 nt, synthetic construct
  misc_feature 1..20: note = antisense sequence
  source 1..20: mol_type = other RNA
ggatcggtaagattaaagtc

SEQ ID NO: 14688 - RNA, 20 nt, synthetic construct
  misc_feature 1..20: note = antisense sequence
  source 1..20: mol_type = other RNA
ctggatcggtaagattaaag

SEQ ID NO: 14689 - RNA, 20 nt, synthetic construct
  misc_feature 1..20: note = antisense sequence
  source 1..20: mol_type = other RNA
cattttctggatcggtaaga

SEQ ID NO: 14690 - RNA, 20 nt, synthetic construct
  misc_feature 1..20: note = antisense sequence
  source 1..20: mol_type = other RNA
ccattttctggatcggtaag

SEQ ID NO: 14691 - RNA, 20 nt, synthetic construct
  misc_feature 1..20: note = antisense sequence
  source 1..20: mol_type = other RNA
cccattttctggatcggtaa

SEQ ID NO: 14692 - RNA, 20 nt, synthetic construct
  misc_feature 1..20: note = antisense sequence
  source 1..20: mol_type = other RNA
gcccattttctggatcggta

SEQ ID NO: 14693 - RNA, 20 nt, synthetic construct
  misc_feature 1..20: note = antisense sequence
  source 1..20: mol_type = other RNA
aggcccattttctggatcgg

SEQ ID NO: 14694 - RNA, 20 nt, synthetic construct
  misc_feature 1..20: note = antisense sequence
  source 1..20: mol_type = other RNA
aacaggcccattttctggat

SEQ ID NO: 14695 - RNA, 20 nt, synthetic construct
  misc_feature 1..20: note = antisense sequence
  source 1..20: mol_type = other RNA
tcaagaacaggcccattttc

SEQ ID NO: 14696 - RNA, 20 nt, synthetic construct
  misc_feature 1..20: note = antisense sequence
  source 1..20: mol_type = other RNA
atcaagaacaggcccatttt

SEQ ID NO: 14697 - RNA, 20 nt, synthetic construct
  misc_feature 1..20: note = antisense sequence
  source 1..20: mol_type = other RNA
catcaagaacaggcccattt

SEQ ID NO: 14698 - RNA, 20 nt, synthetic construct
  misc_feature 1..20: note = antisense sequence
  source 1..20: mol_type = other RNA
tcatcaagaacaggcccatt

SEQ ID NO: 14699 - RNA, 20 nt, synthetic construct
  misc_feature 1..20: note = antisense sequence
  source 1..20: mol_type = other RNA
atcatcaagaacaggcccat

SEQ ID NO: 14700 - RNA, 20 nt, synthetic construct
  misc_feature 1..20: note = antisense sequence
  source 1..20: mol_type = other RNA
aatcatcaagaacaggccca

SEQ ID NO: 14701 - RNA, 20 nt, synthetic construct
  misc_feature 1..20: note = antisense sequence
  source 1..20: mol_type = other RNA
gaatcatcaagaacaggccc

SEQ ID NO: 14702 - RNA, 20 nt, synthetic construct
  misc_feature 1..20: note = antisense sequence
  source 1..20: mol_type = other RNA
agaatcatcaagaacaggcc

SEQ ID NO: 14703 - RNA, 20 nt, synthetic construct
  misc_feature 1..20: note = antisense sequence
  source 1..20: mol_type = other RNA
gatcaatgcagagtagtgaa

SEQ ID NO: 14704 - RNA, 20 nt, synthetic construct
  misc_feature 1..20: note = antisense sequence
  source 1..20: mol_type = other RNA
gttgttcgttctttgtgatc

SEQ ID NO: 14705 - RNA, 20 nt, synthetic construct
  misc_feature 1..20: note = antisense sequence
  source 1..20: mol_type = other RNA
ccagttagttgttcgttctt

SEQ ID NO: 14706 - RNA, 20 nt, synthetic construct
  misc_feature 1..20: note = antisense sequence
  source 1..20: mol_type = other RNA
tccagttagttgttcgttct

SEQ ID NO: 14707 - RNA, 20 nt, synthetic construct
  misc_feature 1..20: note = antisense sequence
  source 1..20: mol_type = other RNA
ttccagttagttgttcgttc

SEQ ID NO: 14708 - RNA, 20 nt, synthetic construct
  misc_feature 1..20: note = antisense sequence
  source 1..20: mol_type = other RNA
cttccagttagttgttcgtt

SEQ ID NO: 14709 - RNA, 20 nt, synthetic construct
  misc_feature 1..20: note = antisense sequence
  source 1..20: mol_type = other RNA
tcttccagttagttgttcgt

SEQ ID NO: 14710 - RNA, 20 nt, synthetic construct
  misc_feature 1..20: note = antisense sequence
  source 1..20: mol_type = other RNA
ttcttccagttagttgttcg

SEQ ID NO: 14711 - RNA, 20 nt, synthetic construct
  misc_feature 1..20: note = antisense sequence
  source 1..20: mol_type = other RNA
tcacagcttgaagagaaggt

SEQ ID NO: 14712 - RNA, 20 nt, synthetic construct
  misc_feature 1..20: note = antisense sequence
  source 1..20: mol_type = other RNA
cccaggttttcacagcttga

SEQ ID NO: 14713 - RNA, 20 nt, synthetic construct
  misc_feature 1..20: note = antisense sequence
  source 1..20: mol_type = other RNA
gttcctctctggacatgctt

SEQ ID NO: 14714 - RNA, 20 nt, synthetic construct
  misc_feature 1..20: note = antisense sequence
  source 1..20: mol_type = other RNA
tggagttcctctctggacat

SEQ ID NO: 14715 - RNA, 20 nt, synthetic construct
  misc_feature 1..20: note = antisense sequence
  source 1..20: mol_type = other RNA
gaagcatgtttatgagctgt

SEQ ID NO: 14716 - RNA, 20 nt, synthetic construct
  misc_feature 1..20: note = antisense sequence
  source 1..20: mol_type = other RNA
ggaagcatgtttatgagctg

SEQ ID NO: 14717 - RNA, 20 nt, synthetic construct
  misc_feature 1..20: note = antisense sequence
  source 1..20: mol_type = other RNA
agtccctgccatagaagaaa

SEQ ID NO: 14718 - RNA, 20 nt, synthetic construct
  misc_feature 1..20: note = antisense sequence
  source 1..20: mol_type = other RNA
aagtccctgccatagaagaa

SEQ ID NO: 14719 - RNA, 20 nt, synthetic construct
  misc_feature 1..20: note = antisense sequence
  source 1..20: mol_type = other RNA
aaagtccctgccatagaaga

SEQ ID NO: 14720 - RNA, 20 nt, synthetic construct
  misc_feature 1..20: note = antisense sequence
  source 1..20: mol_type = other RNA
taaagtccctgccatagaag

SEQ ID NO: 14721 - RNA, 20 nt, synthetic construct
  misc_feature 1..20: note = antisense sequence
  source 1..20: mol_type = other RNA
ctaaagtccctgccatagaa

SEQ ID NO: 14722 - RNA, 20 nt, synthetic construct
  misc_feature 1..20: note = antisense sequence
  source 1..20: mol_type = other RNA
gctaaagtccctgccataga

SEQ ID NO: 14723 - RNA, 20 nt, synthetic construct
  misc_feature 1..20: note = antisense sequence
  source 1..20: mol_type = other RNA
tgctaaagtccctgccatag

SEQ ID NO: 14724 - RNA, 20 nt, synthetic construct
  misc_feature 1..20: note = antisense sequence
  source 1..20: mol_type = other RNA
aatgctaaagtccctgccat

SEQ ID NO: 14725 - RNA, 20 nt, synthetic construct
  misc_feature 1..20: note = antisense sequence
  source 1..20: mol_type = other RNA
taatgctaaagtccctgcca

SEQ ID NO: 14726 - RNA, 20 nt, synthetic construct
  misc_feature 1..20: note = antisense sequence
  source 1..20: mol_type = other RNA
ataatgctaaagtccctgcc

SEQ ID NO: 14727 - RNA, 20 nt, synthetic construct
  misc_feature 1..20: note = antisense sequence
  source 1..20: mol_type = other RNA
tataatgctaaagtccctgc

SEQ ID NO: 14728 - RNA, 20 nt, synthetic construct
  misc_feature 1..20: note = antisense sequence
  source 1..20: mol_type = other RNA
caaacaagaaccagcaaccc

SEQ ID NO: 14729 - RNA, 20 nt, synthetic construct
  misc_feature 1..20: note = antisense sequence
  source 1..20: mol_type = other RNA
gcaaacaagaaccagcaacc

SEQ ID NO: 14730 - RNA, 20 nt, synthetic construct
  misc_feature 1..20: note = antisense sequence
  source 1..20: mol_type = other RNA
acggagcaaacaagaaccag

SEQ ID NO: 14731 - RNA, 20 nt, synthetic construct
  misc_feature 1..20: note = antisense sequence
  source 1..20: mol_type = other RNA
aacggagcaaacaagaacca

SEQ ID NO: 14732 - RNA, 20 nt, synthetic construct
  misc_feature 1..20: note = antisense sequence
  source 1..20: mol_type = other RNA
aaacggagcaaacaagaacc

SEQ ID NO: 14733 - RNA, 20 nt, synthetic construct
  misc_feature 1..20: note = antisense sequence
  source 1..20: mol_type = other RNA
aaaacggagcaaacaagaac

SEQ ID NO: 14734 - RNA, 20 nt, synthetic construct
  misc_feature 1..20: note = antisense sequence
  source 1..20: mol_type = other RNA
gaaaacggagcaaacaagaa

SEQ ID NO: 14735 - RNA, 20 nt, synthetic construct
  misc_feature 1..20: note = antisense sequence
  source 1..20: mol_type = other RNA
agaaaacggagcaaacaaga

SEQ ID NO: 14736 - RNA, 20 nt, synthetic construct
  misc_feature 1..20: note = antisense sequence
  source 1..20: mol_type = other RNA
ttgagaaaacggagcaaaca

SEQ ID NO: 14737 - RNA, 20 nt, synthetic construct
  misc_feature 1..20: note = antisense sequence
  source 1..20: mol_type = other RNA
attgagaaaacggagcaaac

SEQ ID NO: 14738 - RNA, 20 nt, synthetic construct
  misc_feature 1..20: note = antisense sequence
  source 1..20: mol_type = other RNA
ccattgagaaaacggagcaa

SEQ ID NO: 14739 - RNA, 20 nt, synthetic construct
  misc_feature 1..20: note = antisense sequence
  source 1..20: mol_type = other RNA
gccattgagaaaacggagca

SEQ ID NO: 14740 - RNA, 20 nt, synthetic construct
  misc_feature 1..20: note = antisense sequence
  source 1..20: mol_type = other RNA
agccattgagaaaacggagc

SEQ ID NO: 14741 - RNA, 20 nt, synthetic construct
  misc_feature 1..20: note = antisense sequence
  source 1..20: mol_type = other RNA
ggaagataaagccattgaga

SEQ ID NO: 14742 - RNA, 20 nt, synthetic construct
  misc_feature 1..20: note = antisense sequence
  source 1..20: mol_type = other RNA
aggaagataaagccattgag

SEQ ID NO: 14743 - RNA, 20 nt, synthetic construct
  misc_feature 1..20: note = antisense sequence
  source 1..20: mol_type = other RNA
gaggaagataaagccattga

SEQ ID NO: 14744 - RNA, 20 nt, synthetic construct
  misc_feature 1..20: note = antisense sequence
  source 1..20: mol_type = other RNA
ttgccaattaccagaggaag

SEQ ID NO: 14745 - RNA, 20 nt, synthetic construct
  misc_feature 1..20: note = antisense sequence
  source 1..20: mol_type = other RNA
tttgccaattaccagaggaa

SEQ ID NO: 14746 - RNA, 20 nt, synthetic construct
  misc_feature 1..20: note = antisense sequence
  source 1..20: mol_type = other RNA
ctttgccaattaccagagga

SEQ ID NO: 14747 - RNA, 20 nt, synthetic construct
  misc_feature 1..20: note = antisense sequence
  source 1..20: mol_type = other RNA
cctttgccaattaccagagg

SEQ ID NO: 14748 - RNA, 20 nt, synthetic construct
  misc_feature 1..20: note = antisense sequence
  source 1..20: mol_type = other RNA
accctttgccaattaccaga

SEQ ID NO: 14749 - RNA, 20 nt, synthetic construct
  misc_feature 1..20: note = antisense sequence
  source 1..20: mol_type = other RNA
gatagctgagaaagtgcatt

SEQ ID NO: 14750 - RNA, 20 nt, synthetic construct
  misc_feature 1..20: note = antisense sequence
  source 1..20: mol_type = other RNA
tagatagctgagaaagtgca

SEQ ID NO: 14751 - RNA, 20 nt, synthetic construct
  misc_feature 1..20: note = antisense sequence
  source 1..20: mol_type = other RNA
gtagatagctgagaaagtgc

SEQ ID NO: 14752 - RNA, 20 nt, synthetic construct
  misc_feature 1..20: note = antisense sequence
  source 1..20: mol_type = other RNA
agtagatagctgagaaagtg

SEQ ID NO: 14753 - RNA, 20 nt, synthetic construct
  misc_feature 1..20: note = antisense sequence
  source 1..20: mol_type = other RNA
tggagatatggctgagaaag

SEQ ID NO: 14754 - RNA, 20 nt, synthetic construct
  misc_feature 1..20: note = antisense sequence
  source 1..20: mol_type = other RNA
ctggagatatggctgagaaa

SEQ ID NO: 14755 - RNA, 20 nt, synthetic construct
  misc_feature 1..20: note = antisense sequence
  source 1..20: mol_type = other RNA
cctggagatatggctgagaa

SEQ ID NO: 14756 - RNA, 20 nt, synthetic construct
  misc_feature 1..20: note = antisense sequence
  source 1..20: mol_type = other RNA
acctggagatatggctgaga

SEQ ID NO: 14757 - RNA, 20 nt, synthetic construct
  misc_feature 1..20: note = antisense sequence
  source 1..20: mol_type = other RNA
aacctggagatatggctgag

SEQ ID NO: 14758 - RNA, 20 nt, synthetic construct
  misc_feature 1..20: note = antisense sequence
  source 1..20: mol_type = other RNA
gcaaacctggagatatggct

SEQ ID NO: 14759 - RNA, 20 nt, synthetic construct
  misc_feature 1..20: note = antisense sequence
  source 1..20: mol_type = other RNA
ggcaaacctggagatatggc

SEQ ID NO: 14760 - RNA, 20 nt, synthetic construct
  misc_feature 1..20: note = antisense sequence
  source 1..20: mol_type = other RNA
agggcaaacctggagatatg

SEQ ID NO: 14761 - RNA, 20 nt, synthetic construct
  misc_feature 1..20: note = antisense sequence
  source 1..20: mol_type = other RNA
aatgttaccagggcaaacct

SEQ ID NO: 14762 - RNA, 20 nt, synthetic construct
  misc_feature 1..20: note = antisense sequence
  source 1..20: mol_type = other RNA
taatgttaccagggcaaacc

SEQ ID NO: 14763 - RNA, 20 nt, synthetic construct
  misc_feature 1..20: note = antisense sequence
  source 1..20: mol_type = other RNA
ctaatgttaccagggcaaac

SEQ ID NO: 14764 - RNA, 20 nt, synthetic construct
  misc_feature 1..20: note = antisense sequence
  source 1..20: mol_type = other RNA
cctaatgttaccagggcaaa

SEQ ID NO: 14765 - RNA, 20 nt, synthetic construct
  misc_feature 1..20: note = antisense sequence
  source 1..20: mol_type = other RNA
tcctaatgttaccagggcaa

SEQ ID NO: 14766 - RNA, 20 nt, synthetic construct
  misc_feature 1..20: note = antisense sequence
  source 1..20: mol_type = other RNA
ttcctaatgttaccagggca

SEQ ID NO: 14767 - RNA, 20 nt, synthetic construct
  misc_feature 1..20: note = antisense sequence
  source 1..20: mol_type = other RNA
tttcctaatgttaccagggc

SEQ ID NO: 14768 - RNA, 20 nt, synthetic construct
  misc_feature 1..20: note = antisense sequence
  source 1..20: mol_type = other RNA
ttttcctaatgttaccaggg

SEQ ID NO: 14769 - RNA, 20 nt, synthetic construct
  misc_feature 1..20: note = antisense sequence
  source 1..20: mol_type = other RNA
atgtgtgcatgggtttcaag

SEQ ID NO: 14770 - RNA, 20 nt, synthetic construct
  misc_feature 1..20: note = antisense sequence
  source 1..20: mol_type = other RNA
tatgtgtgcatgggtttcaa

SEQ ID NO: 14771 - RNA, 20 nt, synthetic construct
  misc_feature 1..20: note = antisense sequence
  source 1..20: mol_type = other RNA
ttatgtgtgcatgggtttca

SEQ ID NO: 14772 - RNA, 20 nt, synthetic construct
  misc_feature 1..20: note = antisense sequence
  source 1..20: mol_type = other RNA
agggttatgtgtgcatgggt

SEQ ID NO: 14773 - RNA, 20 nt, synthetic construct
  misc_feature 1..20: note = antisense sequence
  source 1..20: mol_type = other RNA
tagggttatgtgtgcatggg

SEQ ID NO: 14774 - RNA, 20 nt, synthetic construct
  misc_feature 1..20: note = antisense sequence
  source 1..20: mol_type = other RNA
ttagggttatgtgtgcatgg

SEQ ID NO: 14775 - RNA, 20 nt, synthetic construct
  misc_feature 1..20: note = antisense sequence
  source 1..20: mol_type = other RNA
gatttagggttatgtgtgca

SEQ ID NO: 14776 - RNA, 20 nt, synthetic construct
  misc_feature 1..20: note = antisense sequence
  source 1..20: mol_type = other RNA
gcaatccagtgcttattaga

SEQ ID NO: 14777 - RNA, 20 nt, synthetic construct
  misc_feature 1..20: note = antisense sequence
  source 1..20: mol_type = other RNA
ctgcaatccagtgcttatta

SEQ ID NO: 14778 - RNA, 20 nt, synthetic construct
  misc_feature 1..20: note = antisense sequence
  source 1..20: mol_type = other RNA
taaaccatacactgcaatcc

SEQ ID NO: 14779 - RNA, 20 nt, synthetic construct
  misc_feature 1..20: note = antisense sequence
  source 1..20: mol_type = other RNA
ctaaaccatacactgcaatc

SEQ ID NO: 14780 - RNA, 20 nt, synthetic construct
  misc_feature 1..20: note = antisense sequence
  source 1..20: mol_type = other RNA
cctaaaccatacactgcaat

SEQ ID NO: 14781 - RNA, 20 nt, synthetic construct
  misc_feature 1..20: note = antisense sequence
  source 1..20: mol_type = other RNA
acctaaaccatacactgcaa

SEQ ID NO: 14782 - RNA, 20 nt, synthetic construct
  misc_feature 1..20: note = antisense sequence
  source 1..20: mol_type = other RNA
tacctaaaccatacactgca

SEQ ID NO: 14783 - RNA, 20 nt, synthetic construct
  misc_feature 1..20: note = antisense sequence
  source 1..20: mol_type = other RNA
atacctaaaccatacactgc

SEQ ID NO: 14784 - RNA, 20 nt, synthetic construct
  misc_feature 1..20: note = antisense sequence
  source 1..20: mol_type = other RNA
tgaggacaccctttatacct

SEQ ID NO: 14785 - RNA, 20 nt, synthetic construct
  misc_feature 1..20: note = antisense sequence
  source 1..20: mol_type = other RNA
gtgaggacaccctttatacc

SEQ ID NO: 14786 - RNA, 20 nt, synthetic construct
  misc_feature 1..20: note = antisense sequence
  source 1..20: mol_type = other RNA
ggtctaagtccatgcttcag

SEQ ID NO: 14787 - RNA, 20 nt, synthetic construct
  misc_feature 1..20: note = antisense sequence
  source 1..20: mol_type = other RNA
tggtctaagtccatgcttca

SEQ ID NO: 14788 - RNA, 20 nt, synthetic construct
  misc_feature 1..20: note = antisense sequence
  source 1..20: mol_type = other RNA
gtggtctaagtccatgcttc

SEQ ID NO: 14789 - RNA, 20 nt, synthetic construct
  misc_feature 1..20: note = antisense sequence
  source 1..20: mol_type = other RNA
ggtggtctaagtccatgctt

SEQ ID NO: 14790 - RNA, 20 nt, synthetic construct
  misc_feature 1..20: note = antisense sequence
  source 1..20: mol_type = other RNA
actggtggtctaagtccatg

SEQ ID NO: 14791 - RNA, 20 nt, synthetic construct
  misc_feature 1..20: note = antisense sequence
  source 1..20: mol_type = other RNA
tactggtggtctaagtccat

SEQ ID NO: 14792 - RNA, 20 nt, synthetic construct
  misc_feature 1..20: note = antisense sequence
  source 1..20: mol_type = other RNA
ttactggtggtctaagtcca

SEQ ID NO: 14793 - RNA, 20 nt, synthetic construct
  misc_feature 1..20: note = antisense sequence
  source 1..20: mol_type = other RNA
gttactggtggtctaagtcc

SEQ ID NO: 14794 - RNA, 20 nt, synthetic construct
  misc_feature 1..20: note = antisense sequence
  source 1..20: mol_type = other RNA
ggttactggtggtctaagtc

SEQ ID NO: 14795 - RNA, 20 nt, synthetic construct
  misc_feature 1..20: note = antisense sequence
  source 1..20: mol_type = other RNA
tggttactggtggtctaagt

SEQ ID NO: 14796 - RNA, 20 nt, synthetic construct
  misc_feature 1..20: note = antisense sequence
  source 1..20: mol_type = other RNA
gtggttactggtggtctaag

SEQ ID NO: 14797 - RNA, 20 nt, synthetic construct
  misc_feature 1..20: note = antisense sequence
  source 1..20: mol_type = other RNA
ggtggttactggtggtctaa

SEQ ID NO: 14798 - RNA, 20 nt, synthetic construct
  misc_feature 1..20: note = antisense sequence
  source 1..20: mol_type = other RNA
aggtggttactggtggtcta

SEQ ID NO: 14799 - RNA, 20 nt, synthetic construct
  misc_feature 1..20: note = antisense sequence
  source 1..20: mol_type = other RNA
agagatggatcagcactgct

SEQ ID NO: 14800 - RNA, 20 nt, synthetic construct
  misc_feature 1..20: note = antisense sequence
  source 1..20: mol_type = other RNA
cagagatggatcagcactgc

SEQ ID NO: 14801 - RNA, 20 nt, synthetic construct
  misc_feature 1..20: note = antisense sequence
  source 1..20: mol_type = other RNA
acagagatggatcagcactg

SEQ ID NO: 14802 - RNA, 20 nt, synthetic construct
  misc_feature 1..20: note = antisense sequence
  source 1..20: mol_type = other RNA
gacagagatggatcagcact

SEQ ID NO: 14803 - RNA, 20 nt, synthetic construct
  misc_feature 1..20: note = antisense sequence
  source 1..20: mol_type = other RNA
ggacagagatggatcagcac

SEQ ID NO: 14804 - RNA, 20 nt, synthetic construct
  misc_feature 1..20: note = antisense sequence
  source 1..20: mol_type = other RNA
aggacagagatggatcagca

SEQ ID NO: 14805 - RNA, 20 nt, synthetic construct
  misc_feature 1..20: note = antisense sequence
  source 1..20: mol_type = other RNA
aaggacagagatggatcagc

SEQ ID NO: 14806 - RNA, 20 nt, synthetic construct
  misc_feature 1..20: note = antisense sequence
  source 1..20: mol_type = other RNA
tacaaggtgggctccatgaa

SEQ ID NO: 14807 - RNA, 20 nt, synthetic construct
  misc_feature 1..20: note = antisense sequence
  source 1..20: mol_type = other RNA
ttacaaggtgggctccatga

SEQ ID NO: 14808 - RNA, 20 nt, synthetic construct
  misc_feature 1..20: note = antisense sequence
  source 1..20: mol_type = other RNA
tttacaaggtgggctccatg

SEQ ID NO: 14809 - RNA, 20 nt, synthetic construct
  misc_feature 1..20: note = antisense sequence
  source 1..20: mol_type = other RNA
ttttacaaggtgggctccat

SEQ ID NO: 14810 - RNA, 20 nt, synthetic construct
  misc_feature 1..20: note = antisense sequence
  source 1..20: mol_type = other RNA
agttttacaaggtgggctcc

SEQ ID NO: 14811 - RNA, 20 nt, synthetic construct
  misc_feature 1..20: note = antisense sequence
  source 1..20: mol_type = other RNA
gacaagttttacaaggtggg

SEQ ID NO: 14812 - RNA, 20 nt, synthetic construct
  misc_feature 1..20: note = antisense sequence
  source 1..20: mol_type = other RNA
ttggctctactccatttgac

SEQ ID NO: 14813 - RNA, 20 nt, synthetic construct
  misc_feature 1..20: note = antisense sequence
  source 1..20: mol_type = other RNA
tttggctctactccatttga

SEQ ID NO: 14814 - RNA, 20 nt, synthetic construct
  misc_feature 1..20: note = antisense sequence
  source 1..20: mol_type = other RNA
atttggctctactccatttg

SEQ ID NO: 14815 - RNA, 20 nt, synthetic construct
  misc_feature 1..20: note = antisense sequence
  source 1..20: mol_type = other RNA
catttggctctactccattt

SEQ ID NO: 14816 - RNA, 20 nt, synthetic construct
  misc_feature 1..20: note = antisense sequence
  source 1..20: mol_type = other RNA
cacatttggctctactccat

SEQ ID NO: 14817 - RNA, 20 nt, synthetic construct
  misc_feature 1..20: note = antisense sequence
  source 1..20: mol_type = other RNA
cacacatttggctctactcc

SEQ ID NO: 14818 - RNA, 20 nt, synthetic construct
  misc_feature 1..20: note = antisense sequence
  source 1..20: mol_type = other RNA
gcacacatttggctctactc

SEQ ID NO: 14819 - RNA, 20 nt, synthetic construct
  misc_feature 1..20: note = antisense sequence
  source 1..20: mol_type = other RNA
agcacacatttggctctact

SEQ ID NO: 14820 - RNA, 20 nt, synthetic construct
  misc_feature 1..20: note = antisense sequence
  source 1..20: mol_type = other RNA
aagcacacatttggctctac

SEQ ID NO: 14821 - RNA, 20 nt, synthetic construct
  misc_feature 1..20: note = antisense sequence
  source 1..20: mol_type = other RNA
gaagcacacatttggctcta

SEQ ID NO: 14822 - RNA, 20 nt, synthetic construct
  misc_feature 1..20: note = antisense sequence
  source 1..20: mol_type = other RNA
ggaagcacacatttggctct

SEQ ID NO: 14823 - RNA, 20 nt, synthetic construct
  misc_feature 1..20: note = antisense sequence
  source 1..20: mol_type = other RNA
caggaagcacacatttggct

SEQ ID NO: 14824 - RNA, 20 nt, synthetic construct
  misc_feature 1..20: note = antisense sequence
  source 1..20: mol_type = other RNA
cacaggaagcacacatttgg

SEQ ID NO: 14825 - RNA, 20 nt, synthetic construct
  misc_feature 1..20: note = antisense sequence
  source 1..20: mol_type = other RNA
ccacaggaagcacacatttg

SEQ ID NO: 14826 - RNA, 20 nt, synthetic construct
  misc_feature 1..20: note = antisense sequence
  source 1..20: mol_type = other RNA
tgtacccacaggaagcacac

SEQ ID NO: 14827 - RNA, 20 nt, synthetic construct
  misc_feature 1..20: note = antisense sequence
  source 1..20: mol_type = other RNA
aactcagtccctttctctca

SEQ ID NO: 14828 - RNA, 20 nt, synthetic construct
  misc_feature 1..20: note = antisense sequence
  source 1..20: mol_type = other RNA
acacaactcagtccctttct

SEQ ID NO: 14829 - RNA, 20 nt, synthetic construct
  misc_feature 1..20: note = antisense sequence
  source 1..20: mol_type = other RNA
aacacaactcagtccctttc

SEQ ID NO: 14830 - RNA, 20 nt, synthetic construct
  misc_feature 1..20: note = antisense sequence
  source 1..20: mol_type = other RNA
gaacacaactcagtcccttt

SEQ ID NO: 14831 - RNA, 20 nt, synthetic construct
  misc_feature 1..20: note = antisense sequence
  source 1..20: mol_type = other RNA
gtgaacacaactcagtccct

SEQ ID NO: 14832 - RNA, 20 nt, synthetic construct
  misc_feature 1..20: note = antisense sequence
  source 1..20: mol_type = other RNA
taagtgaacacaactcagtc

SEQ ID NO: 14833 - RNA, 20 nt, synthetic construct
  misc_feature 1..20: note = antisense sequence
  source 1..20: mol_type = other RNA
actaagtgaacacaactcag

SEQ ID NO: 14834 - RNA, 20 nt, synthetic construct
  misc_feature 1..20: note = antisense sequence
  source 1..20: mol_type = other RNA
gaactaagtgaacacaactc

SEQ ID NO: 14835 - RNA, 20 nt, synthetic construct
  misc_feature 1..20: note = antisense sequence
  source 1..20: mol_type = other RNA
ggaactaagtgaacacaact

SEQ ID NO: 14836 - RNA, 20 nt, synthetic construct
  misc_feature 1..20: note = antisense sequence
  source 1..20: mol_type = other RNA
caggaactaagtgaacacaa

SEQ ID NO: 14837 - RNA, 20 nt, synthetic construct
  misc_feature 1..20: note = antisense sequence
  source 1..20: mol_type = other RNA
aacaggaactaagtgaacac

SEQ ID NO: 14838 - RNA, 20 nt, synthetic construct
  misc_feature 1..20: note = antisense sequence
  source 1..20: mol_type = other RNA
gaacaggaactaagtgaaca

SEQ ID NO: 14839 - RNA, 20 nt, synthetic construct
  misc_feature 1..20: note = antisense sequence
  source 1..20: mol_type = other RNA
ggaacaggaactaagtgaac

SEQ ID NO: 14840 - RNA, 20 nt, synthetic construct
  misc_feature 1..20: note = antisense sequence
  source 1..20: mol_type = other RNA
ttgggaacaggaactaagtg

SEQ ID NO: 14841 - RNA, 20 nt, synthetic construct
  misc_feature 1..20: note = antisense sequence
  source 1..20: mol_type = other RNA
tttgggaacaggaactaagt

SEQ ID NO: 14842 - RNA, 20 nt, synthetic construct
  misc_feature 1..20: note = antisense sequence
  source 1..20: mol_type = other RNA
ctttgggaacaggaactaag

SEQ ID NO: 14843 - RNA, 20 nt, synthetic construct
  misc_feature 1..20: note = antisense sequence
  source 1..20: mol_type = other RNA
aactttgggaacaggaacta

SEQ ID NO: 14844 - RNA, 20 nt, synthetic construct
  misc_feature 1..20: note = antisense sequence
  source 1..20: mol_type = other RNA
ctaactttgggaacaggaac

SEQ ID NO: 14845 - RNA, 20 nt, synthetic construct
  misc_feature 1..20: note = antisense sequence
  source 1..20: mol_type = other RNA
tctaactttgggaacaggaa

SEQ ID NO: 14846 - RNA, 20 nt, synthetic construct
  misc_feature 1..20: note = antisense sequence
  source 1..20: mol_type = other RNA
ggactctaactttgggaaca

SEQ ID NO: 14847 - RNA, 20 nt, synthetic construct
  misc_feature 1..20: note = antisense sequence
  source 1..20: mol_type = other RNA
tggactctaactttgggaac

SEQ ID NO: 14848 - RNA, 20 nt, synthetic construct
  misc_feature 1..20: note = antisense sequence
  source 1..20: mol_type = other RNA
atggactctaactttgggaa

SEQ ID NO: 14849 - RNA, 20 nt, synthetic construct
  misc_feature 1..20: note = antisense sequence
  source 1..20: mol_type = other RNA
acatggactctaactttggg

SEQ ID NO: 14850 - RNA, 20 nt, synthetic construct
  misc_feature 1..20: note = antisense sequence
  source 1..20: mol_type = other RNA
cacatggactctaactttgg

SEQ ID NO: 14851 - RNA, 20 nt, synthetic construct
  misc_feature 1..20: note = antisense sequence
  source 1..20: mol_type = other RNA
gcacatggactctaactttg

SEQ ID NO: 14852 - RNA, 20 nt, synthetic construct
  misc_feature 1..20: note = antisense sequence
  source 1..20: mol_type = other RNA
ggcacatggactctaacttt

SEQ ID NO: 14853 - RNA, 20 nt, synthetic construct
  misc_feature 1..20: note = antisense sequence
  source 1..20: mol_type = other RNA
tggcacatggactctaactt

SEQ ID NO: 14854 - RNA, 20 nt, synthetic construct
  misc_feature 1..20: note = antisense sequence
  source 1..20: mol_type = other RNA
gtggcacatggactctaact

SEQ ID NO: 14855 - RNA, 20 nt, synthetic construct
  misc_feature 1..20: note = antisense sequence
  source 1..20: mol_type = other RNA
ggtggcacatggactctaac

SEQ ID NO: 14856 - RNA, 20 nt, synthetic construct
  misc_feature 1..20: note = antisense sequence
  source 1..20: mol_type = other RNA
gggtggcacatggactctaa

SEQ ID NO: 14857 - RNA, 20 nt, synthetic construct
  misc_feature 1..20: note = antisense sequence
  source 1..20: mol_type = other RNA
tgacaccctccctcttctct

SEQ ID NO: 14858 - RNA, 20 nt, synthetic construct
  misc_feature 1..20: note = antisense sequence
  source 1..20: mol_type = other RNA
gtgacaccctccctcttctc

SEQ ID NO: 14859 - RNA, 20 nt, synthetic construct
  misc_feature 1..20: note = antisense sequence
  source 1..20: mol_type = other RNA
tagtgacaccctccctcttc

SEQ ID NO: 14860 - RNA, 20 nt, synthetic construct
  misc_feature 1..20: note = antisense sequence
  source 1..20: mol_type = other RNA
ctagtgacaccctccctctt

SEQ ID NO: 14861 - RNA, 20 nt, synthetic construct
  misc_feature 1..20: note = antisense sequence
  source 1..20: mol_type = other RNA
gctagtgacaccctccctct

SEQ ID NO: 14862 - RNA, 20 nt, synthetic construct
  misc_feature 1..20: note = antisense sequence
  source 1..20: mol_type = other RNA
acgctagtgacaccctccct

SEQ ID NO: 14863 - RNA, 20 nt, synthetic construct
  misc_feature 1..20: note = antisense sequence
  source 1..20: mol_type = other RNA
agccacgctagtgacaccct

SEQ ID NO: 14864 - RNA, 20 nt, synthetic construct
  misc_feature 1..20: note = antisense sequence
  source 1..20: mol_type = other RNA
tggagccacgctagtgacac

SEQ ID NO: 14865 - RNA, 20 nt, synthetic construct
  misc_feature 1..20: note = antisense sequence
  source 1..20: mol_type = other RNA
ttggagccacgctagtgaca

SEQ ID NO: 14866 - RNA, 20 nt, synthetic construct
  misc_feature 1..20: note = antisense sequence
  source 1..20: mol_type = other RNA
attggagccacgctagtgac

SEQ ID NO: 14867 - RNA, 20 nt, synthetic construct
  misc_feature 1..20: note = antisense sequence
  source 1..20: mol_type = other RNA
cattggagccacgctagtga

SEQ ID NO: 14868 - RNA, 20 nt, synthetic construct
  misc_feature 1..20: note = antisense sequence
  source 1..20: mol_type = other RNA
ccattggagccacgctagtg

SEQ ID NO: 14869 - RNA, 20 nt, synthetic construct
  misc_feature 1..20: note = antisense sequence
  source 1..20: mol_type = other RNA
tccattggagccacgctagt

SEQ ID NO: 14870 - RNA, 20 nt, synthetic construct
  misc_feature 1..20: note = antisense sequence
  source 1..20: mol_type = other RNA
ttccattggagccacgctag

SEQ ID NO: 14871 - RNA, 20 nt, synthetic construct
  misc_feature 1..20: note = antisense sequence
  source 1..20: mol_type = other RNA
cttccattggagccacgcta

SEQ ID NO: 14872 - RNA, 20 nt, synthetic construct
  misc_feature 1..20: note = antisense sequence
  source 1..20: mol_type = other RNA
tcttccattggagccacgct

SEQ ID NO: 14873 - RNA, 20 nt, synthetic construct
  misc_feature 1..20: note = antisense sequence
  source 1..20: mol_type = other RNA
tatctcttccattggagcca

SEQ ID NO: 14874 - RNA, 20 nt, synthetic construct
  misc_feature 1..20: note = antisense sequence
  source 1..20: mol_type = other RNA
atatctcttccattggagcc

SEQ ID NO: 14875 - RNA, 20 nt, synthetic construct
  misc_feature 1..20: note = antisense sequence
  source 1..20: mol_type = other RNA
catatctcttccattggagc

SEQ ID NO: 14876 - RNA, 20 nt, synthetic construct
  misc_feature 1..20: note = antisense sequence
  source 1..20: mol_type = other RNA
ctcatatctcttccattgga

SEQ ID NO: 14877 - RNA, 20 nt, synthetic construct
  misc_feature 1..20: note = antisense sequence
  source 1..20: mol_type = other RNA
cctcatatctcttccattgg

SEQ ID NO: 14878 - RNA, 20 nt, synthetic construct
  misc_feature 1..20: note = antisense sequence
  source 1..20: mol_type = other RNA
atccctcatatctcttccat

SEQ ID NO: 14879 - RNA, 20 nt, synthetic construct
  misc_feature 1..20: note = antisense sequence
  source 1..20: mol_type = other RNA
ccatccctcatatctcttcc

SEQ ID NO: 14880 - RNA, 20 nt, synthetic construct
  misc_feature 1..20: note = antisense sequence
  source 1..20: mol_type = other RNA
atggaagataggtgtatggg

SEQ ID NO: 14881 - RNA, 20 nt, synthetic construct
  misc_feature 1..20: note = antisense sequence
  source 1..20: mol_type = other RNA
aatggaagataggtgtatgg

SEQ ID NO: 14882 - RNA, 20 nt, synthetic construct
  misc_feature 1..20: note = antisense sequence
  source 1..20: mol_type = other RNA
gagaatggaagataggtgta

SEQ ID NO: 14883 - RNA, 20 nt, synthetic construct
  misc_feature 1..20: note = antisense sequence
  source 1..20: mol_type = other RNA
gggagaatggaagataggtg

SEQ ID NO: 14884 - RNA, 20 nt, synthetic construct
  misc_feature 1..20: note = antisense sequence
  source 1..20: mol_type = other RNA
tatctggtaggaaggaaggg

SEQ ID NO: 14885 - RNA, 20 nt, synthetic construct
  misc_feature 1..20: note = antisense sequence
  source 1..20: mol_type = other RNA
atatctggtaggaaggaagg

SEQ ID NO: 14886 - RNA, 20 nt, synthetic construct
  misc_feature 1..20: note = antisense sequence
  source 1..20: mol_type = other RNA
tgcctggtatgtataagaca

SEQ ID NO: 14887 - RNA, 20 nt, synthetic construct
  misc_feature 1..20: note = antisense sequence
  source 1..20: mol_type = other RNA
atgcctggtatgtataagac

SEQ ID NO: 14888 - RNA, 20 nt, synthetic construct
  misc_feature 1..20: note = antisense sequence
  source 1..20: mol_type = other RNA
ccaatgcctggtatgtataa

SEQ ID NO: 14889 - RNA, 20 nt, synthetic construct
  misc_feature 1..20: note = antisense sequence
  source 1..20: mol_type = other RNA
tccaatgcctggtatgtata

SEQ ID NO: 14890 - RNA, 20 nt, synthetic construct
  misc_feature 1..20: note = antisense sequence
  source 1..20: mol_type = other RNA
ctccaatgcctggtatgtat

SEQ ID NO: 14891 - RNA, 20 nt, synthetic construct
  misc_feature 1..20: note = antisense sequence
  source 1..20: mol_type = other RNA
ctgtaagctccaatgcctgg

SEQ ID NO: 14892 - RNA, 20 nt, synthetic construct
  misc_feature 1..20: note = antisense sequence
  source 1..20: mol_type = other RNA
acctgtttccagtgttagac

SEQ ID NO: 14893 - RNA, 20 nt, synthetic construct
  misc_feature 1..20: note = antisense sequence
  source 1..20: mol_type = other RNA
gaaatcctcctccatagcat

SEQ ID NO: 14894 - RNA, 20 nt, synthetic construct
  misc_feature 1..20: note = antisense sequence
  source 1..20: mol_type = other RNA
tgaaatcctcctccatagca

SEQ ID NO: 14895 - RNA, 20 nt, synthetic construct
  misc_feature 1..20: note = antisense sequence
  source 1..20: mol_type = other RNA
ctgaaatcctcctccatagc

SEQ ID NO: 14896 - RNA, 20 nt, synthetic construct
  misc_feature 1..20: note = antisense sequence
  source 1..20: mol_type = other RNA
tctgaaatcctcctccatag

SEQ ID NO: 14897 - RNA, 20 nt, synthetic construct
  misc_feature 1..20: note = antisense sequence
  source 1..20: mol_type = other RNA
ctctgaaatcctcctccata

SEQ ID NO: 14898 - RNA, 20 nt, synthetic construct
  misc_feature 1..20: note = antisense sequence
  source 1..20: mol_type = other RNA
gctctgaaatcctcctccat

SEQ ID NO: 14899 - RNA, 20 nt, synthetic construct
  misc_feature 1..20: note = antisense sequence
  source 1..20: mol_type = other RNA
agctctgaaatcctcctcca

SEQ ID NO: 14900 - RNA, 20 nt, synthetic construct
  misc_feature 1..20: note = antisense sequence
  source 1..20: mol_type = other RNA
ggtggaagttcctagagagc

SEQ ID NO: 14901 - RNA, 20 nt, synthetic construct
  misc_feature 1..20: note = antisense sequence
  source 1..20: mol_type = other RNA
caacttcaggagggctgtcc

SEQ ID NO: 14902 - RNA, 20 nt, synthetic construct
  misc_feature 1..20: note = antisense sequence
  source 1..20: mol_type = other RNA
acaacttcaggagggctgtc

SEQ ID NO: 14903 - RNA, 20 nt, synthetic construct
  misc_feature 1..20: note = antisense sequence
  source 1..20: mol_type = other RNA
gcacaacttcaggagggctg

SEQ ID NO: 14904 - RNA, 20 nt, synthetic construct
  misc_feature 1..20: note = antisense sequence
  source 1..20: mol_type = other RNA
ggcacaacttcaggagggct

SEQ ID NO: 14905 - RNA, 20 nt, synthetic construct
  misc_feature 1..20: note = antisense sequence
  source 1..20: mol_type = other RNA
cactgaaatggcacaacttc

SEQ ID NO: 14906 - RNA, 20 nt, synthetic construct
  misc_feature 1..20: note = antisense sequence
  source 1..20: mol_type = other RNA
gggctccactgaaatggcac

SEQ ID NO: 14907 - RNA, 20 nt, synthetic construct
  misc_feature 1..20: note = antisense sequence
  source 1..20: mol_type = other RNA
agggctccactgaaatggca

SEQ ID NO: 14908 - RNA, 20 nt, synthetic construct
  misc_feature 1..20: note = antisense sequence
  source 1..20: mol_type = other RNA
ctatccttcagggctccact

SEQ ID NO: 14909 - RNA, 20 nt, synthetic construct
  misc_feature 1..20: note = antisense sequence
  source 1..20: mol_type = other RNA
cctatccttcagggctccac

SEQ ID NO: 14910 - RNA, 20 nt, synthetic construct
  misc_feature 1..20: note = antisense sequence
  source 1..20: mol_type = other RNA
aaatcaccctatccttcagg

SEQ ID NO: 14911 - RNA, 20 nt, synthetic construct
  misc_feature 1..20: note = antisense sequence
  source 1..20: mol_type = other RNA
gaaatcaccctatccttcag

SEQ ID NO: 14912 - RNA, 20 nt, synthetic construct
  misc_feature 1..20: note = antisense sequence
  source 1..20: mol_type = other RNA
tggaaatcaccctatccttc

SEQ ID NO: 14913 - RNA, 20 nt, synthetic construct
  misc_feature 1..20: note = antisense sequence
  source 1..20: mol_type = other RNA
gtggaaatcaccctatcctt

SEQ ID NO: 14914 - RNA, 20 nt, synthetic construct
  misc_feature 1..20: note = antisense sequence
  source 1..20: mol_type = other RNA
cctaaatagggtggaaatca

SEQ ID NO: 14915 - RNA, 20 nt, synthetic construct
  misc_feature 1..20: note = antisense sequence
  source 1..20: mol_type = other RNA
ggactttcacacttagcatc

SEQ ID NO: 14916 - RNA, 20 nt, synthetic construct
  misc_feature 1..20: note = antisense sequence
  source 1..20: mol_type = other RNA
aggactttcacacttagcat

SEQ ID NO: 14917 - RNA, 20 nt, synthetic construct
  misc_feature 1..20: note = antisense sequence
  source 1..20: mol_type = other RNA
caggactttcacacttagca

SEQ ID NO: 14918 - RNA, 20 nt, synthetic construct
  misc_feature 1..20: note = antisense sequence
  source 1..20: mol_type = other RNA
tcaggactttcacacttagc

SEQ ID NO: 14919 - RNA, 20 nt, synthetic construct
  misc_feature 1..20: note = antisense sequence
  source 1..20: mol_type = other RNA
ctcaggactttcacacttag

SEQ ID NO: 14920 - RNA, 20 nt, synthetic construct
  misc_feature 1..20: note = antisense sequence
  source 1..20: mol_type = other RNA
gctcaggactttcacactta

SEQ ID NO: 14921 - RNA, 20 nt, synthetic construct
  misc_feature 1..20: note = antisense sequence
  source 1..20: mol_type = other RNA
tgctcaggactttcacactt

SEQ ID NO: 14922 - RNA, 20 nt, synthetic construct
  misc_feature 1..20: note = antisense sequence
  source 1..20: mol_type = other RNA
atgctcaggactttcacact

SEQ ID NO: 14923 - RNA, 20 nt, synthetic construct
  misc_feature 1..20: note = antisense sequence
  source 1..20: mol_type = other RNA
catgctcaggactttcacac

SEQ ID NO: 14924 - RNA, 20 nt, synthetic construct
  misc_feature 1..20: note = antisense sequence
  source 1..20: mol_type = other RNA
cttcatgctcaggactttca

SEQ ID NO: 14925 - RNA, 20 nt, synthetic construct
  misc_feature 1..20: note = antisense sequence
  source 1..20: mol_type = other RNA
ttgtttccttcatgctcagg

SEQ ID NO: 14926 - RNA, 20 nt, synthetic construct
  misc_feature 1..20: note = antisense sequence
  source 1..20: mol_type = other RNA
tcgttgtttccttcatgctc

SEQ ID NO: 14927 - RNA, 20 nt, synthetic construct
  misc_feature 1..20: note = antisense sequence
  source 1..20: mol_type = other RNA
gaatgtcgttgtttccttca

SEQ ID NO: 14928 - RNA, 20 nt, synthetic construct
  misc_feature 1..20: note = antisense sequence
  source 1..20: mol_type = other RNA
cgaatgtcgttgtttccttc

SEQ ID NO: 14929 - RNA, 20 nt, synthetic construct
  misc_feature 1..20: note = antisense sequence
  source 1..20: mol_type = other RNA
ctagcgaatgtcgttgtttc

SEQ ID NO: 14930 - RNA, 20 nt, synthetic construct
  misc_feature 1..20: note = antisense sequence
  source 1..20: mol_type = other RNA
actagcgaatgtcgttgttt

SEQ ID NO: 14931 - RNA, 20 nt, synthetic construct
  misc_feature 1..20: note = antisense sequence
  source 1..20: mol_type = other RNA
cactagcgaatgtcgttgtt

SEQ ID NO: 14932 - RNA, 20 nt, synthetic construct
  misc_feature 1..20: note = antisense sequence
  source 1..20: mol_type = other RNA
acactagcgaatgtcgttgt

SEQ ID NO: 14933 - RNA, 20 nt, synthetic construct
  misc_feature 1..20: note = antisense sequence
  source 1..20: mol_type = other RNA
cacactagcgaatgtcgttg

SEQ ID NO: 14934 - RNA, 20 nt, synthetic construct
  misc_feature 1..20: note = antisense sequence
  source 1..20: mol_type = other RNA
ccacactagcgaatgtcgtt

SEQ ID NO: 14935 - RNA, 20 nt, synthetic construct
  misc_feature 1..20: note = antisense sequence
  source 1..20: mol_type = other RNA
gccacactagcgaatgtcgt

SEQ ID NO: 14936 - RNA, 20 nt, synthetic construct
  misc_feature 1..20: note = antisense sequence
  source 1..20: mol_type = other RNA
agccacactagcgaatgtcg

SEQ ID NO: 14937 - RNA, 20 nt, synthetic construct
  misc_feature 1..20: note = antisense sequence
  source 1..20: mol_type = other RNA
cagccacactagcgaatgtc

SEQ ID NO: 14938 - RNA, 20 nt, synthetic construct
  misc_feature 1..20: note = antisense sequence
  source 1..20: mol_type = other RNA
tcagccacactagcgaatgt

SEQ ID NO: 14939 - RNA, 20 nt, synthetic construct
  misc_feature 1..20: note = antisense sequence
  source 1..20: mol_type = other RNA
acctcctttcttgctcttta

SEQ ID NO: 14940 - RNA, 20 nt, synthetic construct
  misc_feature 1..20: note = antisense sequence
  source 1..20: mol_type = other RNA
cgtcacctcctttcttgctc

SEQ ID NO: 14941 - RNA, 20 nt, synthetic construct
  misc_feature 1..20: note = antisense sequence
  source 1..20: mol_type = other RNA
ctcacgtcacctcctttctt

SEQ ID NO: 14942 - RNA, 20 nt, synthetic construct
  misc_feature 1..20: note = antisense sequence
  source 1..20: mol_type = other RNA
cctcacgtcacctcctttct

SEQ ID NO: 14943 - RNA, 20 nt, synthetic construct
  misc_feature 1..20: note = antisense sequence
  source 1..20: mol_type = other RNA
tcacctcacgtcacctcctt

SEQ ID NO: 14944 - RNA, 20 nt, synthetic construct
  misc_feature 1..20: note = antisense sequence
  source 1..20: mol_type = other RNA
accaagtcccgaatgacccg

SEQ ID NO: 14945 - RNA, 20 nt, synthetic construct
  misc_feature 1..20: note = antisense sequence
  source 1..20: mol_type = other RNA
caccaagtcccgaatgaccc

SEQ ID NO: 14946 - RNA, 20 nt, synthetic construct
  misc_feature 1..20: note = antisense sequence
  source 1..20: mol_type = other RNA
gcaccaagtcccgaatgacc

SEQ ID NO: 14947 - RNA, 20 nt, synthetic construct
  misc_feature 1..20: note = antisense sequence
  source 1..20: mol_type = other RNA
ggcaccaagtcccgaatgac

SEQ ID NO: 14948 - RNA, 20 nt, synthetic construct
  misc_feature 1..20: note = antisense sequence
  source 1..20: mol_type = other RNA
tggcaccaagtcccgaatga

SEQ ID NO: 14949 - RNA, 20 nt, synthetic construct
  misc_feature 1..20: note = antisense sequence
  source 1..20: mol_type = other RNA
gtggcaccaagtcccgaatg

SEQ ID NO: 14950 - RNA, 20 nt, synthetic construct
  misc_feature 1..20: note = antisense sequence
  source 1..20: mol_type = other RNA
ttagaatttgtgcagtggca

SEQ ID NO: 14951 - RNA, 20 nt, synthetic construct
  misc_feature 1..20: note = antisense sequence
  source 1..20: mol_type = other RNA
gtttagaatttgtgcagtgg

SEQ ID NO: 14952 - RNA, 20 nt, synthetic construct
  misc_feature 1..20: note = antisense sequence
  source 1..20: mol_type = other RNA
cactgcactgctctttcaaa

SEQ ID NO: 14953 - RNA, 20 nt, synthetic construct
  misc_feature 1..20: note = antisense sequence
  source 1..20: mol_type = other RNA
cgtgtggctgaaccaaataa

SEQ ID NO: 14954 - RNA, 20 nt, synthetic construct
  misc_feature 1..20: note = antisense sequence
  source 1..20: mol_type = other RNA
tcgtgtggctgaaccaaata

SEQ ID NO: 14955 - RNA, 20 nt, synthetic construct
  misc_feature 1..20: note = antisense sequence
  source 1..20: mol_type = other RNA
gtcgtgtggctgaaccaaat

SEQ ID NO: 14956 - RNA, 20 nt, synthetic construct
  misc_feature 1..20: note = antisense sequence
  source 1..20: mol_type = other RNA
tgtcgtgtggctgaaccaaa

SEQ ID NO: 14957 - RNA, 20 nt, synthetic construct
  misc_feature 1..20: note = antisense sequence
  source 1..20: mol_type = other RNA
ctgtcgtgtggctgaaccaa

SEQ ID NO: 14958 - RNA, 20 nt, synthetic construct
  misc_feature 1..20: note = antisense sequence
  source 1..20: mol_type = other RNA
cctgtcgtgtggctgaacca

SEQ ID NO: 14959 - RNA, 20 nt, synthetic construct
  misc_feature 1..20: note = antisense sequence
  source 1..20: mol_type = other RNA
tcctgtcgtgtggctgaacc

SEQ ID NO: 14960 - RNA, 20 nt, synthetic construct
  misc_feature 1..20: note = antisense sequence
  source 1..20: mol_type = other RNA
atcctgtcgtgtggctgaac

SEQ ID NO: 14961 - RNA, 20 nt, synthetic construct
  misc_feature 1..20: note = antisense sequence
  source 1..20: mol_type = other RNA
catcctgtcgtgtggctgaa

SEQ ID NO: 14962 - RNA, 20 nt, synthetic construct
  misc_feature 1..20: note = antisense sequence
  source 1..20: mol_type = other RNA
gcatcctgtcgtgtggctga

SEQ ID NO: 14963 - RNA, 20 nt, synthetic construct
  misc_feature 1..20: note = antisense sequence
  source 1..20: mol_type = other RNA
ctgcatcctgtcgtgtggct

SEQ ID NO: 14964 - RNA, 20 nt, synthetic construct
  misc_feature 1..20: note = antisense sequence
  source 1..20: mol_type = other RNA
tgctgcatcctgtcgtgtgg

SEQ ID NO: 14965 - RNA, 20 nt, synthetic construct
  misc_feature 1..20: note = antisense sequence
  source 1..20: mol_type = other RNA
ctgctgcatcctgtcgtgtg

SEQ ID NO: 14966 - RNA, 20 nt, synthetic construct
  misc_feature 1..20: note = antisense sequence
  source 1..20: mol_type = other RNA
tctgctgcatcctgtcgtgt

SEQ ID NO: 14967 - RNA, 20 nt, synthetic construct
  misc_feature 1..20: note = antisense sequence
  source 1..20: mol_type = other RNA
actctgctgcatcctgtcgt

SEQ ID NO: 14968 - RNA, 20 nt, synthetic construct
  misc_feature 1..20: note = antisense sequence
  source 1..20: mol_type = other RNA
tcactctgctgcatcctgtc

SEQ ID NO: 14969 - RNA, 20 nt, synthetic construct
  misc_feature 1..20: note = antisense sequence
  source 1..20: mol_type = other RNA
tcttcactctgctgcatcct

SEQ ID NO: 14970 - RNA, 20 nt, synthetic construct
  misc_feature 1..20: note = antisense sequence
  source 1..20: mol_type = other RNA
ctcttcactctgctgcatcc

SEQ ID NO: 14971 - RNA, 20 nt, synthetic construct
  misc_feature 1..20: note = antisense sequence
  source 1..20: mol_type = other RNA
actcttcactctgctgcatc

SEQ ID NO: 14972 - RNA, 20 nt, synthetic construct
  misc_feature 1..20: note = antisense sequence
  source 1..20: mol_type = other RNA
tccaaccactcttcactctg

SEQ ID NO: 14973 - RNA, 20 nt, synthetic construct
  misc_feature 1..20: note = antisense sequence
  source 1..20: mol_type = other RNA
cctccaaccactcttcactc

SEQ ID NO: 14974 - RNA, 20 nt, synthetic construct
  misc_feature 1..20: note = antisense sequence
  source 1..20: mol_type = other RNA
ccctccaaccactcttcact

SEQ ID NO: 14975 - RNA, 20 nt, synthetic construct
  misc_feature 1..20: note = antisense sequence
  source 1..20: mol_type = other RNA
tccctccaaccactcttcac

SEQ ID NO: 14976 - RNA, 20 nt, synthetic construct
  misc_feature 1..20: note = antisense sequence
  source 1..20: mol_type = other RNA
ttccctccaaccactcttca

SEQ ID NO: 14977 - RNA, 20 nt, synthetic construct
  misc_feature 1..20: note = antisense sequence
  source 1..20: mol_type = other RNA
ccacctgtttccctccaacc

SEQ ID NO: 14978 - RNA, 20 nt, synthetic construct
  misc_feature 1..20: note = antisense sequence
  source 1..20: mol_type = other RNA
atccacctgtttccctccaa

SEQ ID NO: 14979 - RNA, 20 nt, synthetic construct
  misc_feature 1..20: note = antisense sequence
  source 1..20: mol_type = other RNA
catccacctgtttccctcca

SEQ ID NO: 14980 - RNA, 20 nt, synthetic construct
  misc_feature 1..20: note = antisense sequence
  source 1..20: mol_type = other RNA
cacatccacctgtttccctc

SEQ ID NO: 14981 - RNA, 20 nt, synthetic construct
  misc_feature 1..20: note = antisense sequence
  source 1..20: mol_type = other RNA
aaagtaatagcttcccacgg

SEQ ID NO: 14982 - RNA, 20 nt, synthetic construct
  misc_feature 1..20: note = antisense sequence
  source 1..20: mol_type = other RNA
taaagtaatagcttcccacg

SEQ ID NO: 14983 - RNA, 20 nt, synthetic construct
  misc_feature 1..20: note = antisense sequence
  source 1..20: mol_type = other RNA
ctaaagtaatagcttcccac

SEQ ID NO: 14984 - RNA, 20 nt, synthetic construct
  misc_feature 1..20: note = antisense sequence
  source 1..20: mol_type = other RNA
cctccctgaactaaagtaat

SEQ ID NO: 14985 - RNA, 20 nt, synthetic construct
  misc_feature 1..20: note = antisense sequence
  source 1..20: mol_type = other RNA
tttcctccctgaactaaagt

SEQ ID NO: 14986 - RNA, 20 nt, synthetic construct
  misc_feature 1..20: note = antisense sequence
  source 1..20: mol_type = other RNA
atttcctccctgaactaaag

SEQ ID NO: 14987 - RNA, 20 nt, synthetic construct
  misc_feature 1..20: note = antisense sequence
  source 1..20: mol_type = other RNA
catttcctccctgaactaaa

SEQ ID NO: 14988 - RNA, 20 nt, synthetic construct
  misc_feature 1..20: note = antisense sequence
  source 1..20: mol_type = other RNA
tcatttcctccctgaactaa

SEQ ID NO: 14989 - RNA, 20 nt, synthetic construct
  misc_feature 1..20: note = antisense sequence
  source 1..20: mol_type = other RNA
gcattctcatttcctccctg

SEQ ID NO: 14990 - RNA, 20 nt, synthetic construct
  misc_feature 1..20: note = antisense sequence
  source 1..20: mol_type = other RNA
ccaagcattctcatttcctc

SEQ ID NO: 14991 - RNA, 20 nt, synthetic construct
  misc_feature 1..20: note = antisense sequence
  source 1..20: mol_type = other RNA
cccaagcattctcatttcct

SEQ ID NO: 14992 - RNA, 20 nt, synthetic construct
  misc_feature 1..20: note = antisense sequence
  source 1..20: mol_type = other RNA
cacccaagcattctcatttc

SEQ ID NO: 14993 - RNA, 20 nt, synthetic construct
  misc_feature 1..20: note = antisense sequence
  source 1..20: mol_type = other RNA
acacccaagcattctcattt

SEQ ID NO: 14994 - RNA, 20 nt, synthetic construct
  misc_feature 1..20: note = antisense sequence
  source 1..20: mol_type = other RNA
cacacccaagcattctcatt

SEQ ID NO: 14995 - RNA, 20 nt, synthetic construct
  misc_feature 1..20: note = antisense sequence
  source 1..20: mol_type = other RNA
ctcacacccaagcattctca

SEQ ID NO: 14996 - RNA, 20 nt, synthetic construct
  misc_feature 1..20: note = antisense sequence
  source 1..20: mol_type = other RNA
cctcacacccaagcattctc

SEQ ID NO: 14997 - RNA, 20 nt, synthetic construct
  misc_feature 1..20: note = antisense sequence
  source 1..20: mol_type = other RNA
acctcacacccaagcattct

SEQ ID NO: 14998 - RNA, 20 nt, synthetic construct
  misc_feature 1..20: note = antisense sequence
  source 1..20: mol_type = other RNA
agtcccaccaccacctcaca

SEQ ID NO: 14999 - RNA, 20 nt, synthetic construct
  misc_feature 1..20: note = antisense sequence
  source 1..20: mol_type = other RNA
tatgtaactcaccaagccct

SEQ ID NO: 15000 - RNA, 20 nt, synthetic construct
  misc_feature 1..20: note = antisense sequence
  source 1..20: mol_type = other RNA
atatgtaactcaccaagccc

SEQ ID NO: 15001 - RNA, 20 nt, synthetic construct
  misc_feature 1..20: note = antisense sequence
  source 1..20: mol_type = other RNA
cctctccaccaccaccatat

SEQ ID NO: 15002 - RNA, 20 nt, synthetic construct
  misc_feature 1..20: note = antisense sequence
  source 1..20: mol_type = other RNA
attgaccgcctctccaccac

SEQ ID NO: 15003 - RNA, 20 nt, synthetic construct
  misc_feature 1..20: note = antisense sequence
  source 1..20: mol_type = other RNA
cattgaccgcctctccacca

SEQ ID NO: 15004 - RNA, 20 nt, synthetic construct
  misc_feature 1..20: note = antisense sequence
  source 1..20: mol_type = other RNA
tcattgaccgcctctccacc

SEQ ID NO: 15005 - RNA, 20 nt, synthetic construct
  misc_feature 1..20: note = antisense sequence
  source 1..20: mol_type = other RNA
ttcattgaccgcctctccac

SEQ ID NO: 15006 - RNA, 20 nt, synthetic construct
  misc_feature 1..20: note = antisense sequence
  source 1..20: mol_type = other RNA
cttcattgaccgcctctcca

SEQ ID NO: 15007 - RNA, 20 nt, synthetic construct
  misc_feature 1..20: note = antisense sequence
  source 1..20: mol_type = other RNA
tcttcattgaccgcctctcc

SEQ ID NO: 15008 - RNA, 20 nt, synthetic construct
  misc_feature 1..20: note = antisense sequence
  source 1..20: mol_type = other RNA
ttcttcattgaccgcctctc

SEQ ID NO: 15009 - RNA, 20 nt, synthetic construct
  misc_feature 1..20: note = antisense sequence
  source 1..20: mol_type = other RNA
cttcttcattgaccgcctct

SEQ ID NO: 15010 - RNA, 20 nt, synthetic construct
  misc_feature 1..20: note = antisense sequence
  source 1..20: mol_type = other RNA
tcttcttcattgaccgcctc

SEQ ID NO: 15011 - RNA, 20 nt, synthetic construct
  misc_feature 1..20: note = antisense sequence
  source 1..20: mol_type = other RNA
ttcttcttcattgaccgcct

SEQ ID NO: 15012 - RNA, 20 nt, synthetic construct
  misc_feature 1..20: note = antisense sequence
  source 1..20: mol_type = other RNA
attcttcttcattgaccgcc

SEQ ID NO: 15013 - RNA, 20 nt, synthetic construct
  misc_feature 1..20: note = antisense sequence
  source 1..20: mol_type = other RNA
gattcttcttcattgaccgc

SEQ ID NO: 15014 - RNA, 20 nt, synthetic construct
  misc_feature 1..20: note = antisense sequence
  source 1..20: mol_type = other RNA
aagccacaaatctaggagtt

SEQ ID NO: 15015 - RNA, 20 nt, synthetic construct
  misc_feature 1..20: note = antisense sequence
  source 1..20: mol_type = other RNA
caagccacaaatctaggagt

SEQ ID NO: 15016 - RNA, 20 nt, synthetic construct
  misc_feature 1..20: note = antisense sequence
  source 1..20: mol_type = other RNA
cggtcaagccacaaatctag

SEQ ID NO: 15017 - RNA, 20 nt, synthetic construct
  misc_feature 1..20: note = antisense sequence
  source 1..20: mol_type = other RNA
acggtcaagccacaaatcta

SEQ ID NO: 15018 - RNA, 20 nt, synthetic construct
  misc_feature 1..20: note = antisense sequence
  source 1..20: mol_type = other RNA
aacggtcaagccacaaatct

SEQ ID NO: 15019 - RNA, 20 nt, synthetic construct
  misc_feature 1..20: note = antisense sequence
  source 1..20: mol_type = other RNA
aaacggtcaagccacaaatc

SEQ ID NO: 15020 - RNA, 20 nt, synthetic construct
  misc_feature 1..20: note = antisense sequence
  source 1..20: mol_type = other RNA
aaaacggtcaagccacaaat

SEQ ID NO: 15021 - RNA, 20 nt, synthetic construct
  misc_feature 1..20: note = antisense sequence
  source 1..20: mol_type = other RNA
ggaaaacggtcaagccacaa

SEQ ID NO: 15022 - RNA, 20 nt, synthetic construct
  misc_feature 1..20: note = antisense sequence
  source 1..20: mol_type = other RNA
tggaaaacggtcaagccaca

SEQ ID NO: 15023 - RNA, 20 nt, synthetic construct
  misc_feature 1..20: note = antisense sequence
  source 1..20: mol_type = other RNA
ggtggaaaacggtcaagcca

SEQ ID NO: 15024 - RNA, 20 nt, synthetic construct
  misc_feature 1..20: note = antisense sequence
  source 1..20: mol_type = other RNA
gggtggaaaacggtcaagcc

SEQ ID NO: 15025 - RNA, 20 nt, synthetic construct
  misc_feature 1..20: note = antisense sequence
  source 1..20: mol_type = other RNA
agggtggaaaacggtcaagc

SEQ ID NO: 15026 - RNA, 20 nt, synthetic construct
  misc_feature 1..20: note = antisense sequence
  source 1..20: mol_type = other RNA
gagggtggaaaacggtcaag

SEQ ID NO: 15027 - RNA, 20 nt, synthetic construct
  misc_feature 1..20: note = antisense sequence
  source 1..20: mol_type = other RNA
agagggtggaaaacggtcaa

SEQ ID NO: 15028 - RNA, 20 nt, synthetic construct
  misc_feature 1..20: note = antisense sequence
  source 1..20: mol_type = other RNA
gagagggtggaaaacggtca

SEQ ID NO: 15029 - RNA, 20 nt, synthetic construct
  misc_feature 1..20: note = antisense sequence
  source 1..20: mol_type = other RNA
tgagagggtggaaaacggtc

SEQ ID NO: 15030 - RNA, 20 nt, synthetic construct
  misc_feature 1..20: note = antisense sequence
  source 1..20: mol_type = other RNA
gttgagagggtggaaaacgg

SEQ ID NO: 15031 - RNA, 20 nt, synthetic construct
  misc_feature 1..20: note = antisense sequence
  source 1..20: mol_type = other RNA
ctcagttgagagggtggaaa

SEQ ID NO: 15032 - RNA, 20 nt, synthetic construct
  misc_feature 1..20: note = antisense sequence
  source 1..20: mol_type = other RNA
gctcagttgagagggtggaa

SEQ ID NO: 15033 - RNA, 20 nt, synthetic construct
  misc_feature 1..20: note = antisense sequence
  source 1..20: mol_type = other RNA
agctcagttgagagggtgga

SEQ ID NO: 15034 - RNA, 20 nt, synthetic construct
  misc_feature 1..20: note = antisense sequence
  source 1..20: mol_type = other RNA
aagctcagttgagagggtgg

SEQ ID NO: 15035 - RNA, 20 nt, synthetic construct
  misc_feature 1..20: note = antisense sequence
  source 1..20: mol_type = other RNA
taaagctcagttgagagggt

SEQ ID NO: 15036 - RNA, 20 nt, synthetic construct
  misc_feature 1..20: note = antisense sequence
  source 1..20: mol_type = other RNA
ataaagctcagttgagaggg

SEQ ID NO: 15037 - RNA, 20 nt, synthetic construct
  misc_feature 1..20: note = antisense sequence
  source 1..20: mol_type = other RNA
cataaagctcagttgagagg

SEQ ID NO: 15038 - RNA, 20 nt, synthetic construct
  misc_feature 1..20: note = antisense sequence
  source 1..20: mol_type = other RNA
tttgtctgccagggaaggac

SEQ ID NO: 15039 - RNA, 20 nt, synthetic construct
  misc_feature 1..20: note = antisense sequence
  source 1..20: mol_type = other RNA
gcttttgtctgccagggaag

SEQ ID NO: 15040 - RNA, 20 nt, synthetic construct
  misc_feature 1..20: note = antisense sequence
  source 1..20: mol_type = other RNA
tgcactggcttttgtctgcc

SEQ ID NO: 15041 - RNA, 20 nt, synthetic construct
  misc_feature 1..20: note = antisense sequence
  source 1..20: mol_type = other RNA
ttgcactggcttttgtctgc

SEQ ID NO: 15042 - RNA, 20 nt, synthetic construct
  misc_feature 1..20: note = antisense sequence
  source 1..20: mol_type = other RNA
cacaattttcatgggtgctt

SEQ ID NO: 15043 - RNA, 20 nt, synthetic construct
  misc_feature 1..20: note = antisense sequence
  source 1..20: mol_type = other RNA
aacgcacaattttcatgggt

SEQ ID NO: 15044 - RNA, 20 nt, synthetic construct
  misc_feature 1..20: note = antisense sequence
  source 1..20: mol_type = other RNA
gaacgcacaattttcatggg

SEQ ID NO: 15045 - RNA, 20 nt, synthetic construct
  misc_feature 1..20: note = antisense sequence
  source 1..20: mol_type = other RNA
agaacgcacaattttcatgg

SEQ ID NO: 15046 - RNA, 20 nt, synthetic construct
  misc_feature 1..20: note = antisense sequence
  source 1..20: mol_type = other RNA
gtccttttaagaacgcacaa

SEQ ID NO: 15047 - RNA, 20 nt, synthetic construct
  misc_feature 1..20: note = antisense sequence
  source 1..20: mol_type = other RNA
ttgtccttttaagaacgcac

SEQ ID NO: 15048 - RNA, 20 nt, synthetic construct
  misc_feature 1..20: note = antisense sequence
  source 1..20: mol_type = other RNA
cttgtccttttaagaacgca

SEQ ID NO: 15049 - RNA, 20 nt, synthetic construct
  misc_feature 1..20: note = antisense sequence
  source 1..20: mol_type = other RNA
gcttgtccttttaagaacgc

SEQ ID NO: 15050 - RNA, 20 nt, synthetic construct
  misc_feature 1..20: note = antisense sequence
  source 1..20: mol_type = other RNA
aaggagaatttccctgcaaa

SEQ ID NO: 15051 - RNA, 20 nt, synthetic construct
  misc_feature 1..20: note = antisense sequence
  source 1..20: mol_type = other RNA
cataaggagaatttccctgc

SEQ ID NO: 15052 - RNA, 20 nt, synthetic construct
  misc_feature 1..20: note = antisense sequence
  source 1..20: mol_type = other RNA
ctgaggtctgagatacattt

SEQ ID NO: 15053 - RNA, 20 nt, synthetic construct
  misc_feature 1..20: note = antisense sequence
  source 1..20: mol_type = other RNA
gctgaggtctgagatacatt

SEQ ID NO: 15054 - RNA, 20 nt, synthetic construct
  misc_feature 1..20: note = antisense sequence
  source 1..20: mol_type = other RNA
caggctgaggtctgagatac

SEQ ID NO: 15055 - RNA, 20 nt, synthetic construct
  misc_feature 1..20: note = antisense sequence
  source 1..20: mol_type = other RNA
cgacatgcaggctgaggtct

SEQ ID NO: 15056 - RNA, 20 nt, synthetic construct
  misc_feature 1..20: note = antisense sequence
  source 1..20: mol_type = other RNA
tcagtggtggcgacatgcag

SEQ ID NO: 15057 - RNA, 20 nt, synthetic construct
  misc_feature 1..20: note = antisense sequence
  source 1..20: mol_type = other RNA
ttcagtggtggcgacatgca

SEQ ID NO: 15058 - RNA, 20 nt, synthetic construct
  misc_feature 1..20: note = antisense sequence
  source 1..20: mol_type = other RNA
tttcagtggtggcgacatgc

SEQ ID NO: 15059 - RNA, 20 nt, synthetic construct
  misc_feature 1..20: note = antisense sequence
  source 1..20: mol_type = other RNA
ttttcagtggtggcgacatg

SEQ ID NO: 15060 - RNA, 20 nt, synthetic construct
  misc_feature 1..20: note = antisense sequence
  source 1..20: mol_type = other RNA
cttttcagtggtggcgacat

SEQ ID NO: 15061 - RNA, 20 nt, synthetic construct
  misc_feature 1..20: note = antisense sequence
  source 1..20: mol_type = other RNA
tccttttcagtggtggcgac

SEQ ID NO: 15062 - RNA, 20 nt, synthetic construct
  misc_feature 1..20: note = antisense sequence
  source 1..20: mol_type = other RNA
aggtccttttcagtggtggc

SEQ ID NO: 15063 - RNA, 20 nt, synthetic construct
  misc_feature 1..20: note = antisense sequence
  source 1..20: mol_type = other RNA
caggtccttttcagtggtgg

SEQ ID NO: 15064 - RNA, 20 nt, synthetic construct
  misc_feature 1..20: note = antisense sequence
  source 1..20: mol_type = other RNA
gcaggtccttttcagtggtg

SEQ ID NO: 15065 - RNA, 20 nt, synthetic construct
  misc_feature 1..20: note = antisense sequence
  source 1..20: mol_type = other RNA
atcagcaggtccttttcagt

SEQ ID NO: 15066 - RNA, 20 nt, synthetic construct
  misc_feature 1..20: note = antisense sequence
  source 1..20: mol_type = other RNA
acaatcagcaggtccttttc

SEQ ID NO: 15067 - RNA, 20 nt, synthetic construct
  misc_feature 1..20: note = antisense sequence
  source 1..20: mol_type = other RNA
gatcggacaatcagcaggtc

SEQ ID NO: 15068 - RNA, 20 nt, synthetic construct
  misc_feature 1..20: note = antisense sequence
  source 1..20: mol_type = other RNA
ggatcggacaatcagcaggt

SEQ ID NO: 15069 - RNA, 20 nt, synthetic construct
  misc_feature 1..20: note = antisense sequence
  source 1..20: mol_type = other RNA
gggatcggacaatcagcagg

SEQ ID NO: 15070 - RNA, 20 nt, synthetic construct
  misc_feature 1..20: note = antisense sequence
  source 1..20: mol_type = other RNA
tgggatcggacaatcagcag

SEQ ID NO: 15071 - RNA, 20 nt, synthetic construct
  misc_feature 1..20: note = antisense sequence
  source 1..20: mol_type = other RNA
ctgggatcggacaatcagca

SEQ ID NO: 15072 - RNA, 20 nt, synthetic construct
  misc_feature 1..20: note = antisense sequence
  source 1..20: mol_type = other RNA
tctgggatcggacaatcagc

SEQ ID NO: 15073 - RNA, 20 nt, synthetic construct
  misc_feature 1..20: note = antisense sequence
  source 1..20: mol_type = other RNA
ttctgggatcggacaatcag

SEQ ID NO: 15074 - RNA, 20 nt, synthetic construct
  misc_feature 1..20: note = antisense sequence
  source 1..20: mol_type = other RNA
cattctgggatcggacaatc

SEQ ID NO: 15075 - RNA, 20 nt, synthetic construct
  misc_feature 1..20: note = antisense sequence
  source 1..20: mol_type = other RNA
atcattctgggatcggacaa

SEQ ID NO: 15076 - RNA, 20 nt, synthetic construct
  misc_feature 1..20: note = antisense sequence
  source 1..20: mol_type = other RNA
tatcattctgggatcggaca

SEQ ID NO: 15077 - RNA, 20 nt, synthetic construct
  misc_feature 1..20: note = antisense sequence
  source 1..20: mol_type = other RNA
ttatcattctgggatcggac

SEQ ID NO: 15078 - RNA, 20 nt, synthetic construct
  misc_feature 1..20: note = antisense sequence
  source 1..20: mol_type = other RNA
cttatcattctgggatcgga

SEQ ID NO: 15079 - RNA, 20 nt, synthetic construct
  misc_feature 1..20: note = antisense sequence
  source 1..20: mol_type = other RNA
acttatcattctgggatcgg

SEQ ID NO: 15080 - RNA, 20 nt, synthetic construct
  misc_feature 1..20: note = antisense sequence
  source 1..20: mol_type = other RNA
aacttatcattctgggatcg

SEQ ID NO: 15081 - RNA, 20 nt, synthetic construct
  misc_feature 1..20: note = antisense sequence
  source 1..20: mol_type = other RNA
cgttgaacttatcattctgg

SEQ ID NO: 15082 - RNA, 20 nt, synthetic construct
  misc_feature 1..20: note = antisense sequence
  source 1..20: mol_type = other RNA
ttttgactgtgaggctaacg

SEQ ID NO: 15083 - RNA, 20 nt, synthetic construct
  misc_feature 1..20: note = antisense sequence
  source 1..20: mol_type = other RNA
aggcactgtcctttgtattt

SEQ ID NO: 15084 - RNA, 20 nt, synthetic construct
  misc_feature 1..20: note = antisense sequence
  source 1..20: mol_type = other RNA
tataggcactgtcctttgta

SEQ ID NO: 15085 - RNA, 20 nt, synthetic construct
  misc_feature 1..20: note = antisense sequence
  source 1..20: mol_type = other RNA
tggtgttataggcactgtcc

SEQ ID NO: 15086 - RNA, 20 nt, synthetic construct
  misc_feature 1..20: note = antisense sequence
  source 1..20: mol_type = other RNA
ctggtgttataggcactgtc

SEQ ID NO: 15087 - RNA, 20 nt, synthetic construct
  misc_feature 1..20: note = antisense sequence
  source 1..20: mol_type = other RNA
gtcctggtgttataggcact

SEQ ID NO: 15088 - RNA, 20 nt, synthetic construct
  misc_feature 1..20: note = antisense sequence
  source 1..20: mol_type = other RNA
attgtcctggtgttataggc

SEQ ID NO: 15089 - RNA, 20 nt, synthetic construct
  misc_feature 1..20: note = antisense sequence
  source 1..20: mol_type = other RNA
tattgtcctggtgttatagg

SEQ ID NO: 15090 - RNA, 20 nt, synthetic construct
  misc_feature 1..20: note = antisense sequence
  source 1..20: mol_type = other RNA
cactattgtcctggtgttat

SEQ ID NO: 15091 - RNA, 20 nt, synthetic construct
  misc_feature 1..20: note = antisense sequence
  source 1..20: mol_type = other RNA
gcactattgtcctggtgtta

SEQ ID NO: 15092 - RNA, 20 nt, synthetic construct
  misc_feature 1..20: note = antisense sequence
  source 1..20: mol_type = other RNA
tgcactattgtcctggtgtt

SEQ ID NO: 15093 - RNA, 20 nt, synthetic construct
  misc_feature 1..20: note = antisense sequence
  source 1..20: mol_type = other RNA
aatgcactattgtcctggtg

SEQ ID NO: 15094 - RNA, 20 nt, synthetic construct
  misc_feature 1..20: note = antisense sequence
  source 1..20: mol_type = other RNA
taatgcactattgtcctggt

SEQ ID NO: 15095 - RNA, 20 nt, synthetic construct
  misc_feature 1..20: note = antisense sequence
  source 1..20: mol_type = other RNA
gccaggtaaatgatgttaag

SEQ ID NO: 15096 - RNA, 20 nt, synthetic construct
  misc_feature 1..20: note = antisense sequence
  source 1..20: mol_type = other RNA
ggccaggtaaatgatgttaa

SEQ ID NO: 15097 - RNA, 20 nt, synthetic construct
  misc_feature 1..20: note = antisense sequence
  source 1..20: mol_type = other RNA
aggccaggtaaatgatgtta

SEQ ID NO: 15098 - RNA, 20 nt, synthetic construct
  misc_feature 1..20: note = antisense sequence
  source 1..20: mol_type = other RNA
taggccaggtaaatgatgtt

SEQ ID NO: 15099 - RNA, 20 nt, synthetic construct
  misc_feature 1..20: note = antisense sequence
  source 1..20: mol_type = other RNA
aaagtaggccaggtaaatga

SEQ ID NO: 15100 - RNA, 20 nt, synthetic construct
  misc_feature 1..20: note = antisense sequence
  source 1..20: mol_type = other RNA
aaaagtaggccaggtaaatg

SEQ ID NO: 15101 - RNA, 20 nt, synthetic construct
  misc_feature 1..20: note = antisense sequence
  source 1..20: mol_type = other RNA
atgaaaagtaggccaggtaa

SEQ ID NO: 15102 - RNA, 20 nt, synthetic construct
  misc_feature 1..20: note = antisense sequence
  source 1..20: mol_type = other RNA
gcatgaaaagtaggccaggt

SEQ ID NO: 15103 - RNA, 20 nt, synthetic construct
  misc_feature 1..20: note = antisense sequence
  source 1..20: mol_type = other RNA
ctcagtagcatgaaaagtag

SEQ ID NO: 15104 - RNA, 20 nt, synthetic construct
  misc_feature 1..20: note = antisense sequence
  source 1..20: mol_type = other RNA
gcaattatctcagtagcatg

SEQ ID NO: 15105 - RNA, 20 nt, synthetic construct
  misc_feature 1..20: note = antisense sequence
  source 1..20: mol_type = other RNA
cagtttcagtggtttaagga

SEQ ID NO: 15106 - RNA, 20 nt, synthetic construct
  misc_feature 1..20: note = antisense sequence
  source 1..20: mol_type = other RNA
tcagtttcagtggtttaagg

SEQ ID NO: 15107 - RNA, 20 nt, synthetic construct
  misc_feature 1..20: note = antisense sequence
  source 1..20: mol_type = other RNA
ctgtttcagtttcagtggtt

SEQ ID NO: 15108 - RNA, 20 nt, synthetic construct
  misc_feature 1..20: note = antisense sequence
  source 1..20: mol_type = other RNA
tttgcttaacacagaggtac

SEQ ID NO: 15109 - RNA, 20 nt, synthetic construct
  misc_feature 1..20: note = antisense sequence
  source 1..20: mol_type = other RNA
tggtatcttgattttcctgc

SEQ ID NO: 15110 - RNA, 20 nt, synthetic construct
  misc_feature 1..20: note = antisense sequence
  source 1..20: mol_type = other RNA
gattttgcatagaaagggag

SEQ ID NO: 15111 - RNA, 20 nt, synthetic construct
  misc_feature 1..20: note = antisense sequence
  source 1..20: mol_type = other RNA
ctgattacctctgatatagc

SEQ ID NO: 15112 - RNA, 20 nt, synthetic construct
  misc_feature 1..20: note = antisense sequence
  source 1..20: mol_type = other RNA
ggaaacactgattacctctg

SEQ ID NO: 15113 - RNA, 20 nt, synthetic construct
  misc_feature 1..20: note = antisense sequence
  source 1..20: mol_type = other RNA
tggaaacactgattacctct

SEQ ID NO: 15114 - RNA, 20 nt, synthetic construct
  misc_feature 1..20: note = antisense sequence
  source 1..20: mol_type = other RNA
ttggaaacactgattacctc

SEQ ID NO: 15115 - RNA, 20 nt, synthetic construct
  misc_feature 1..20: note = antisense sequence
  source 1..20: mol_type = other RNA
gttcacatttggaaacactg

SEQ ID NO: 15116 - RNA, 20 nt, synthetic construct
  misc_feature 1..20: note = antisense sequence
  source 1..20: mol_type = other RNA
ggagatcagaattaagagca

SEQ ID NO: 15117 - RNA, 20 nt, synthetic construct
  misc_feature 1..20: note = antisense sequence
  source 1..20: mol_type = other RNA
cgtccatgaaatctgagttt

SEQ ID NO: 15118 - RNA, 20 nt, synthetic construct
  misc_feature 1..20: note = antisense sequence
  source 1..20: mol_type = other RNA
acgtccatgaaatctgagtt

SEQ ID NO: 15119 - RNA, 20 nt, synthetic construct
  misc_feature 1..20: note = antisense sequence
  source 1..20: mol_type = other RNA
gagagaaacgtccatgaaat

SEQ ID NO: 15120 - RNA, 20 nt, synthetic construct
  misc_feature 1..20: note = antisense sequence
  source 1..20: mol_type = other RNA
agagagaaacgtccatgaaa

SEQ ID NO: 15121 - RNA, 20 nt, synthetic construct
  misc_feature 1..20: note = antisense sequence
  source 1..20: mol_type = other RNA
tagagagaaacgtccatgaa

SEQ ID NO: 15122 - RNA, 20 nt, synthetic construct
  misc_feature 1..20: note = antisense sequence
  source 1..20: mol_type = other RNA
atagagagaaacgtccatga

SEQ ID NO: 15123 - RNA, 20 nt, synthetic construct
  misc_feature 1..20: note = antisense sequence
  source 1..20: mol_type = other RNA
gatagagagaaacgtccatg

SEQ ID NO: 15124 - RNA, 20 nt, synthetic construct
  misc_feature 1..20: note = antisense sequence
  source 1..20: mol_type = other RNA
agatagagagaaacgtccat

SEQ ID NO: 15125 - RNA, 20 nt, synthetic construct
  misc_feature 1..20: note = antisense sequence
  source 1..20: mol_type = other RNA
ccaccatgcccagcctgtaa

SEQ ID NO: 15126 - RNA, 20 nt, synthetic construct
  misc_feature 1..20: note = antisense sequence
  source 1..20: mol_type = other RNA
ttacaggcatgagccaccat

SEQ ID NO: 15127 - RNA, 20 nt, synthetic construct
  misc_feature 1..20: note = antisense sequence
  source 1..20: mol_type = other RNA
attacaggcatgagccacca

SEQ ID NO: 15128 - RNA, 20 nt, synthetic construct
  misc_feature 1..20: note = antisense sequence
  source 1..20: mol_type = other RNA
gattacaggcatgagccacc

SEQ ID NO: 15129 - RNA, 20 nt, synthetic construct
  misc_feature 1..20: note = antisense sequence
  source 1..20: mol_type = other RNA
ggattacaggcatgagccac

SEQ ID NO: 15130 - RNA, 20 nt, synthetic construct
  misc_feature 1..20: note = antisense sequence
  source 1..20: mol_type = other RNA
gggattacaggcatgagcca

SEQ ID NO: 15131 - RNA, 20 nt, synthetic construct
  misc_feature 1..20: note = antisense sequence
  source 1..20: mol_type = other RNA
tgggattacaggcatgagcc

SEQ ID NO: 15132 - RNA, 20 nt, synthetic construct
  misc_feature 1..20: note = antisense sequence
  source 1..20: mol_type = other RNA
ctgggattacaggcatgagc

SEQ ID NO: 15133 - RNA, 20 nt, synthetic construct
  misc_feature 1..20: note = antisense sequence
  source 1..20: mol_type = other RNA
gctgggattacaggcatgag

SEQ ID NO: 15134 - RNA, 20 nt, synthetic construct
  misc_feature 1..20: note = antisense sequence
  source 1..20: mol_type = other RNA
tgctgggattacaggcatga

SEQ ID NO: 15135 - RNA, 20 nt, synthetic construct
  misc_feature 1..20: note = antisense sequence
  source 1..20: mol_type = other RNA
gtgctgggattacaggcatg

SEQ ID NO: 15136 - RNA, 20 nt, synthetic construct
  misc_feature 1..20: note = antisense sequence
  source 1..20: mol_type = other RNA
agtgctgggattacaggcat

SEQ ID NO: 15137 - RNA, 20 nt, synthetic construct
  misc_feature 1..20: note = antisense sequence
  source 1..20: mol_type = other RNA
aagtgctgggattacaggca

SEQ ID NO: 15138 - RNA, 20 nt, synthetic construct
  misc_feature 1..20: note = antisense sequence
  source 1..20: mol_type = other RNA
aaagtgctgggattacaggc

SEQ ID NO: 15139 - RNA, 20 nt, synthetic construct
  misc_feature 1..20: note = antisense sequence
  source 1..20: mol_type = other RNA
caaagtgctgggattacagg

SEQ ID NO: 15140 - RNA, 20 nt, synthetic construct
  misc_feature 1..20: note = antisense sequence
  source 1..20: mol_type = other RNA
ccaaagtgctgggattacag

SEQ ID NO: 15141 - RNA, 20 nt, synthetic construct
  misc_feature 1..20: note = antisense sequence
  source 1..20: mol_type = other RNA
gatggtctcgatctcctgac

SEQ ID NO: 15142 - RNA, 20 nt, synthetic construct
  misc_feature 1..20: note = antisense sequence
  source 1..20: mol_type = other RNA
ggatggtctcgatctcctga

SEQ ID NO: 15143 - RNA, 20 nt, synthetic construct
  misc_feature 1..20: note = antisense sequence
  source 1..20: mol_type = other RNA
tggatggtctcgatctcctg

SEQ ID NO: 15144 - RNA, 20 nt, synthetic construct
  misc_feature 1..20: note = antisense sequence
  source 1..20: mol_type = other RNA
ctggatggtctcgatctcct

SEQ ID NO: 15145 - RNA, 20 nt, synthetic construct
  misc_feature 1..20: note = antisense sequence
  source 1..20: mol_type = other RNA
cctggatggtctcgatctcc

SEQ ID NO: 15146 - RNA, 20 nt, synthetic construct
  misc_feature 1..20: note = antisense sequence
  source 1..20: mol_type = other RNA
gcctggatggtctcgatctc

SEQ ID NO: 15147 - RNA, 20 nt, synthetic construct
  misc_feature 1..20: note = antisense sequence
  source 1..20: mol_type = other RNA
agcctggatggtctcgatct

SEQ ID NO: 15148 - RNA, 20 nt, synthetic construct
  misc_feature 1..20: note = antisense sequence
  source 1..20: mol_type = other RNA
ttcaccgtgttagcctggat

SEQ ID NO: 15149 - RNA, 20 nt, synthetic construct
  misc_feature 1..20: note = antisense sequence
  source 1..20: mol_type = other RNA
tttcaccgtgttagcctgga

SEQ ID NO: 15150 - RNA, 20 nt, synthetic construct
  misc_feature 1..20: note = antisense sequence
  source 1..20: mol_type = other RNA
gtttcaccgtgttagcctgg

SEQ ID NO: 15151 - RNA, 20 nt, synthetic construct
  misc_feature 1..20: note = antisense sequence
  source 1..20: mol_type = other RNA
ggtttcaccgtgttagcctg

SEQ ID NO: 15152 - RNA, 20 nt, synthetic construct
  misc_feature 1..20: note = antisense sequence
  source 1..20: mol_type = other RNA
gggtttcaccgtgttagcct

SEQ ID NO: 15153 - RNA, 20 nt, synthetic construct
  misc_feature 1..20: note = antisense sequence
  source 1..20: mol_type = other RNA
ctcctgagtagctgggacta

SEQ ID NO: 15154 - RNA, 20 nt, synthetic construct
  misc_feature 1..20: note = antisense sequence
  source 1..20: mol_type = other RNA
cctcctgagtagctgggact

SEQ ID NO: 15155 - RNA, 20 nt, synthetic construct
  misc_feature 1..20: note = antisense sequence
  source 1..20: mol_type = other RNA
agcctcctgagtagctggga

SEQ ID NO: 15156 - RNA, 20 nt, synthetic construct
  misc_feature 1..20: note = antisense sequence
  source 1..20: mol_type = other RNA
ttctcctgcctcagcctcct

SEQ ID NO: 15157 - RNA, 20 nt, synthetic construct
  misc_feature 1..20: note = antisense sequence
  source 1..20: mol_type = other RNA
attctcctgcctcagcctcc

SEQ ID NO: 15158 - RNA, 20 nt, synthetic construct
  misc_feature 1..20: note = antisense sequence
  source 1..20: mol_type = other RNA
gattctcctgcctcagcctc

SEQ ID NO: 15159 - RNA, 20 nt, synthetic construct
  misc_feature 1..20: note = antisense sequence
  source 1..20: mol_type = other RNA
tgattctcctgcctcagcct

SEQ ID NO: 15160 - RNA, 20 nt, synthetic construct
  misc_feature 1..20: note = antisense sequence
  source 1..20: mol_type = other RNA
gtgattctcctgcctcagcc

SEQ ID NO: 15161 - RNA, 20 nt, synthetic construct
  misc_feature 1..20: note = antisense sequence
  source 1..20: mol_type = other RNA
agtgattctcctgcctcagc

SEQ ID NO: 15162 - RNA, 20 nt, synthetic construct
  misc_feature 1..20: note = antisense sequence
  source 1..20: mol_type = other RNA
aagtgattctcctgcctcag

SEQ ID NO: 15163 - RNA, 20 nt, synthetic construct
  misc_feature 1..20: note = antisense sequence
  source 1..20: mol_type = other RNA
caagtgattctcctgcctca

SEQ ID NO: 15164 - RNA, 20 nt, synthetic construct
  misc_feature 1..20: note = antisense sequence
  source 1..20: mol_type = other RNA
tcaagtgattctcctgcctc

SEQ ID NO: 15165 - RNA, 20 nt, synthetic construct
  misc_feature 1..20: note = antisense sequence
  source 1..20: mol_type = other RNA
ttcaagtgattctcctgcct

SEQ ID NO: 15166 - RNA, 20 nt, synthetic construct
  misc_feature 1..20: note = antisense sequence
  source 1..20: mol_type = other RNA
gttcaagtgattctcctgcc

SEQ ID NO: 15167 - RNA, 20 nt, synthetic construct
  misc_feature 1..20: note = antisense sequence
  source 1..20: mol_type = other RNA
ggttcaagtgattctcctgc

SEQ ID NO: 15168 - RNA, 20 nt, synthetic construct
  misc_feature 1..20: note = antisense sequence
  source 1..20: mol_type = other RNA
tcactgcaacctccacctcc

SEQ ID NO: 15169 - RNA, 20 nt, synthetic construct
  misc_feature 1..20: note = antisense sequence
  source 1..20: mol_type = other RNA
ctcactgcaacctccacctc

SEQ ID NO: 15170 - RNA, 20 nt, synthetic construct
  misc_feature 1..20: note = antisense sequence
  source 1..20: mol_type = other RNA
gctcactgcaacctccacct

SEQ ID NO: 15171 - RNA, 20 nt, synthetic construct
  misc_feature 1..20: note = antisense sequence
  source 1..20: mol_type = other RNA
tcggctcactgcaacctcca

SEQ ID NO: 15172 - RNA, 20 nt, synthetic construct
  misc_feature 1..20: note = antisense sequence
  source 1..20: mol_type = other RNA
tctcggctcactgcaacctc

SEQ ID NO: 15173 - RNA, 20 nt, synthetic construct
  misc_feature 1..20: note = antisense sequence
  source 1..20: mol_type = other RNA
atctcggctcactgcaacct

SEQ ID NO: 15174 - RNA, 20 nt, synthetic construct
  misc_feature 1..20: note = antisense sequence
  source 1..20: mol_type = other RNA
aatctcggctcactgcaacc

SEQ ID NO: 15175 - RNA, 20 nt, synthetic construct
  misc_feature 1..20: note = antisense sequence
  source 1..20: mol_type = other RNA
caatctcggctcactgcaac

SEQ ID NO: 15176 - RNA, 20 nt, synthetic construct
  misc_feature 1..20: note = antisense sequence
  source 1..20: mol_type = other RNA
gcaatctcggctcactgcaa

SEQ ID NO: 15177 - RNA, 20 nt, synthetic construct
  misc_feature 1..20: note = antisense sequence
  source 1..20: mol_type = other RNA
gtgcaatctcggctcactgc

SEQ ID NO: 15178 - RNA, 20 nt, synthetic construct
  misc_feature 1..20: note = antisense sequence
  source 1..20: mol_type = other RNA
ggtgcaatctcggctcactg

SEQ ID NO: 15179 - RNA, 20 nt, synthetic construct
  misc_feature 1..20: note = antisense sequence
  source 1..20: mol_type = other RNA
tggtgcaatctcggctcact

SEQ ID NO: 15180 - RNA, 20 nt, synthetic construct
  misc_feature 1..20: note = antisense sequence
  source 1..20: mol_type = other RNA
gtggtgcaatctcggctcac

SEQ ID NO: 15181 - RNA, 20 nt, synthetic construct
  misc_feature 1..20: note = antisense sequence
  source 1..20: mol_type = other RNA
agtggtgcaatctcggctca

SEQ ID NO: 15182 - RNA, 20 nt, synthetic construct
  misc_feature 1..20: note = antisense sequence
  source 1..20: mol_type = other RNA
cagtggtgcaatctcggctc

SEQ ID NO: 15183 - RNA, 20 nt, synthetic construct
  misc_feature 1..20: note = antisense sequence
  source 1..20: mol_type = other RNA
gcagtggtgcaatctcggct

SEQ ID NO: 15184 - RNA, 20 nt, synthetic construct
  misc_feature 1..20: note = antisense sequence
  source 1..20: mol_type = other RNA
acagagtcttgttctccctc

SEQ ID NO: 15185 - RNA, 20 nt, synthetic construct
  misc_feature 1..20: note = antisense sequence
  source 1..20: mol_type = other RNA
gacagagtcttgttctccct

SEQ ID NO: 15186 - RNA, 20 nt, synthetic construct
  misc_feature 1..20: note = antisense sequence
  source 1..20: mol_type = other RNA
aggaggatacaggcaataat

SEQ ID NO: 15187 - RNA, 20 nt, synthetic construct
  misc_feature 1..20: note = antisense sequence
  source 1..20: mol_type = other RNA
cataggaggatacaggcaat

SEQ ID NO: 15188 - RNA, 20 nt, synthetic construct
  misc_feature 1..20: note = antisense sequence
  source 1..20: mol_type = other RNA
gagatgcactgtcagatttt

SEQ ID NO: 15189 - RNA, 20 nt, synthetic construct
  misc_feature 1..20: note = antisense sequence
  source 1..20: mol_type = other RNA
gaagagatgcactgtcagat

SEQ ID NO: 15190 - RNA, 20 nt, synthetic construct
  misc_feature 1..20: note = antisense sequence
  source 1..20: mol_type = other RNA
agaagagatgcactgtcaga

SEQ ID NO: 15191 - RNA, 20 nt, synthetic construct
  misc_feature 1..20: note = antisense sequence
  source 1..20: mol_type = other RNA
tacacagaagagatgcactg

SEQ ID NO: 15192 - RNA, 20 nt, synthetic construct
  misc_feature 1..20: note = antisense sequence
  source 1..20: mol_type = other RNA
tgactcaagaaatggttgcc

SEQ ID NO: 15193 - RNA, 20 nt, synthetic construct
  misc_feature 1..20: note = antisense sequence
  source 1..20: mol_type = other RNA
gatgtgactcaagaaatggt

SEQ ID NO: 15194 - RNA, 20 nt, synthetic construct
  misc_feature 1..20: note = antisense sequence
  source 1..20: mol_type = other RNA
ccatgatgtgactcaagaaa

SEQ ID NO: 15195 - RNA, 20 nt, synthetic construct
  misc_feature 1..20: note = antisense sequence
  source 1..20: mol_type = other RNA
accatgatgtgactcaagaa

SEQ ID NO: 15196 - RNA, 20 nt, synthetic construct
  misc_feature 1..20: note = antisense sequence
  source 1..20: mol_type = other RNA
gcctaaaccatgatgtgact

SEQ ID NO: 15197 - RNA, 20 nt, synthetic construct
  misc_feature 1..20: note = antisense sequence
  source 1..20: mol_type = other RNA
ggcctaaaccatgatgtgac

SEQ ID NO: 15198 - RNA, 20 nt, synthetic construct
  misc_feature 1..20: note = antisense sequence
  source 1..20: mol_type = other RNA
agggcctaaaccatgatgtg

SEQ ID NO: 15199 - RNA, 20 nt, synthetic construct
  misc_feature 1..20: note = antisense sequence
  source 1..20: mol_type = other RNA
cagggcctaaaccatgatgt

SEQ ID NO: 15200 - RNA, 20 nt, synthetic construct
  misc_feature 1..20: note = antisense sequence
  source 1..20: mol_type = other RNA
acagggcctaaaccatgatg

SEQ ID NO: 15201 - RNA, 20 nt, synthetic construct
  misc_feature 1..20: note = antisense sequence
  source 1..20: mol_type = other RNA
tacagggcctaaaccatgat

SEQ ID NO: 15202 - RNA, 20 nt, synthetic construct
  misc_feature 1..20: note = antisense sequence
  source 1..20: mol_type = other RNA
gtacagggcctaaaccatga

SEQ ID NO: 15203 - RNA, 20 nt, synthetic construct
  misc_feature 1..20: note = antisense sequence
  source 1..20: mol_type = other RNA
agtacagggcctaaaccatg

SEQ ID NO: 15204 - RNA, 20 nt, synthetic construct
  misc_feature 1..20: note = antisense sequence
  source 1..20: mol_type = other RNA
tagtacagggcctaaaccat

SEQ ID NO: 15205 - RNA, 20 nt, synthetic construct
  misc_feature 1..20: note = antisense sequence
  source 1..20: mol_type = other RNA
aatccttagtacagggccta

SEQ ID NO: 15206 - RNA, 20 nt, synthetic construct
  misc_feature 1..20: note = antisense sequence
  source 1..20: mol_type = other RNA
gtacagtcatacctacttac

SEQ ID NO: 15207 - RNA, 20 nt, synthetic construct
  misc_feature 1..20: note = antisense sequence
  source 1..20: mol_type = other RNA
ctgccacgtaaataaacatg

SEQ ID NO: 15208 - RNA, 20 nt, synthetic construct
  misc_feature 1..20: note = antisense sequence
  source 1..20: mol_type = other RNA
tctgggactgattttctatc

SEQ ID NO: 15209 - RNA, 20 nt, synthetic construct
  misc_feature 1..20: note = antisense sequence
  source 1..20: mol_type = other RNA
ctctgggactgattttctat

SEQ ID NO: 15210 - RNA, 20 nt, synthetic construct
  misc_feature 1..20: note = antisense sequence
  source 1..20: mol_type = other RNA
tctctgggactgattttcta

SEQ ID NO: 15211 - RNA, 20 nt, synthetic construct
  misc_feature 1..20: note = antisense sequence
  source 1..20: mol_type = other RNA
tgttaagattcctcacctct

SEQ ID NO: 15212 - RNA, 20 nt, synthetic construct
  misc_feature 1..20: note = antisense sequence
  source 1..20: mol_type = other RNA
ttgttaagattcctcacctc

SEQ ID NO: 15213 - RNA, 20 nt, synthetic construct
  misc_feature 1..20: note = antisense sequence
  source 1..20: mol_type = other RNA
ccttgttaagattcctcacc

SEQ ID NO: 15214 - RNA, 20 nt, synthetic construct
  misc_feature 1..20: note = antisense sequence
  source 1..20: mol_type = other RNA
cactgttagctttatccttg

SEQ ID NO: 15215 - RNA, 20 nt, synthetic construct
  misc_feature 1..20: note = antisense sequence
  source 1..20: mol_type = other RNA
tgcaccactgttagctttat

SEQ ID NO: 15216 - RNA, 20 nt, synthetic construct
  misc_feature 1..20: note = antisense sequence
  source 1..20: mol_type = other RNA
ctgcaccactgttagcttta

SEQ ID NO: 15217 - RNA, 20 nt, synthetic construct
  misc_feature 1..20: note = antisense sequence
  source 1..20: mol_type = other RNA
ccgtgaccaccagaatttaa

SEQ ID NO: 15218 - RNA, 20 nt, synthetic construct
  misc_feature 1..20: note = antisense sequence
  source 1..20: mol_type = other RNA
cccgtgaccaccagaattta

SEQ ID NO: 15219 - RNA, 20 nt, synthetic construct
  misc_feature 1..20: note = antisense sequence
  source 1..20: mol_type = other RNA
acccgtgaccaccagaattt

SEQ ID NO: 15220 - RNA, 20 nt, synthetic construct
  misc_feature 1..20: note = antisense sequence
  source 1..20: mol_type = other RNA
gacccgtgaccaccagaatt

SEQ ID NO: 15221 - RNA, 20 nt, synthetic construct
  misc_feature 1..20: note = antisense sequence
  source 1..20: mol_type = other RNA
tgacccgtgaccaccagaat

SEQ ID NO: 15222 - RNA, 20 nt, synthetic construct
  misc_feature 1..20: note = antisense sequence
  source 1..20: mol_type = other RNA
ctgacccgtgaccaccagaa

SEQ ID NO: 15223 - RNA, 20 nt, synthetic construct
  misc_feature 1..20: note = antisense sequence
  source 1..20: mol_type = other RNA
taggctctgacccgtgacca

SEQ ID NO: 15224 - RNA, 20 nt, synthetic construct
  misc_feature 1..20: note = antisense sequence
  source 1..20: mol_type = other RNA
ataggctctgacccgtgacc

SEQ ID NO: 15225 - RNA, 20 nt, synthetic construct
  misc_feature 1..20: note = antisense sequence
  source 1..20: mol_type = other RNA
cataggctctgacccgtgac

SEQ ID NO: 15226 - RNA, 20 nt, synthetic construct
  misc_feature 1..20: note = antisense sequence
  source 1..20: mol_type = other RNA
gcataggctctgacccgtga

SEQ ID NO: 15227 - RNA, 20 nt, synthetic construct
  misc_feature 1..20: note = antisense sequence
  source 1..20: mol_type = other RNA
agcataggctctgacccgtg

SEQ ID NO: 15228 - RNA, 20 nt, synthetic construct
  misc_feature 1..20: note = antisense sequence
  source 1..20: mol_type = other RNA
tgcagtggataagagcatag

SEQ ID NO: 15229 - RNA, 20 nt, synthetic construct
  misc_feature 1..20: note = antisense sequence
  source 1..20: mol_type = other RNA
gtttagtgcagtggataaga

SEQ ID NO: 15230 - RNA, 20 nt, synthetic construct
  misc_feature 1..20: note = antisense sequence
  source 1..20: mol_type = other RNA
agtttagtgcagtggataag

SEQ ID NO: 15231 - RNA, 20 nt, synthetic construct
  misc_feature 1..20: note = antisense sequence
  source 1..20: mol_type = other RNA
gagtttagtgcagtggataa

SEQ ID NO: 15232 - RNA, 20 nt, synthetic construct
  misc_feature 1..20: note = antisense sequence
  source 1..20: mol_type = other RNA
ggagtttagtgcagtggata

SEQ ID NO: 15233 - RNA, 20 nt, synthetic construct
  misc_feature 1..20: note = antisense sequence
  source 1..20: mol_type = other RNA
aggagtttagtgcagtggat

SEQ ID NO: 15234 - RNA, 20 nt, synthetic construct
  misc_feature 1..20: note = antisense sequence
  source 1..20: mol_type = other RNA
gaggagtttagtgcagtgga

SEQ ID NO: 15235 - RNA, 20 nt, synthetic construct
  misc_feature 1..20: note = antisense sequence
  source 1..20: mol_type = other RNA
ttggaggagtttagtgcagt

SEQ ID NO: 15236 - RNA, 20 nt, synthetic construct
  misc_feature 1..20: note = antisense sequence
  source 1..20: mol_type = other RNA
attggaggagtttagtgcag

SEQ ID NO: 15237 - RNA, 20 nt, synthetic construct
  misc_feature 1..20: note = antisense sequence
  source 1..20: mol_type = other RNA
tcattggaggagtttagtgc

SEQ ID NO: 15238 - RNA, 20 nt, synthetic construct
  misc_feature 1..20: note = antisense sequence
  source 1..20: mol_type = other RNA
gtcattggaggagtttagtg

SEQ ID NO: 15239 - RNA, 20 nt, synthetic construct
  misc_feature 1..20: note = antisense sequence
  source 1..20: mol_type = other RNA
agtcattggaggagtttagt

SEQ ID NO: 15240 - RNA, 20 nt, synthetic construct
  misc_feature 1..20: note = antisense sequence
  source 1..20: mol_type = other RNA
tagtcattggaggagtttag

SEQ ID NO: 15241 - RNA, 20 nt, synthetic construct
  misc_feature 1..20: note = antisense sequence
  source 1..20: mol_type = other RNA
tgctagtcattggaggagtt

SEQ ID NO: 15242 - RNA, 20 nt, synthetic construct
  misc_feature 1..20: note = antisense sequence
  source 1..20: mol_type = other RNA
cttcagtgaatgctagtcat

SEQ ID NO: 15243 - RNA, 20 nt, synthetic construct
  misc_feature 1..20: note = antisense sequence
  source 1..20: mol_type = other RNA
gcagtcttcagtgaatgcta

SEQ ID NO: 15244 - RNA, 20 nt, synthetic construct
  misc_feature 1..20: note = antisense sequence
  source 1..20: mol_type = other RNA
gagcagtcttcagtgaatgc

SEQ ID NO: 15245 - RNA, 20 nt, synthetic construct
  misc_feature 1..20: note = antisense sequence
  source 1..20: mol_type = other RNA
agagcagtcttcagtgaatg

SEQ ID NO: 15246 - RNA, 20 nt, synthetic construct
  misc_feature 1..20: note = antisense sequence
  source 1..20: mol_type = other RNA
tgcagagcagtcttcagtga

SEQ ID NO: 15247 - RNA, 20 nt, synthetic construct
  misc_feature 1..20: note = antisense sequence
  source 1..20: mol_type = other RNA
gtgcagagcagtcttcagtg

SEQ ID NO: 15248 - RNA, 20 nt, synthetic construct
  misc_feature 1..20: note = antisense sequence
  source 1..20: mol_type = other RNA
ccaagactggtgcagagcag

SEQ ID NO: 15249 - RNA, 20 nt, synthetic construct
  misc_feature 1..20: note = antisense sequence
  source 1..20: mol_type = other RNA
cccaagactggtgcagagca

SEQ ID NO: 15250 - RNA, 20 nt, synthetic construct
  misc_feature 1..20: note = antisense sequence
  source 1..20: mol_type = other RNA
acccaagactggtgcagagc

SEQ ID NO: 15251 - RNA, 20 nt, synthetic construct
  misc_feature 1..20: note = antisense sequence
  source 1..20: mol_type = other RNA
aatccagacacccaagactg

SEQ ID NO: 15252 - RNA, 20 nt, synthetic construct
  misc_feature 1..20: note = antisense sequence
  source 1..20: mol_type = other RNA
taatccagacacccaagact

SEQ ID NO: 15253 - RNA, 20 nt, synthetic construct
  misc_feature 1..20: note = antisense sequence
  source 1..20: mol_type = other RNA
ggtggctggataaaataatc

SEQ ID NO: 15254 - RNA, 20 nt, synthetic construct
  misc_feature 1..20: note = antisense sequence
  source 1..20: mol_type = other RNA
gcggtggctggataaaataa

SEQ ID NO: 15255 - RNA, 20 nt, synthetic construct
  misc_feature 1..20: note = antisense sequence
  source 1..20: mol_type = other RNA
tgcggtggctggataaaata

SEQ ID NO: 15256 - RNA, 20 nt, synthetic construct
  misc_feature 1..20: note = antisense sequence
  source 1..20: mol_type = other RNA
attgcggtggctggataaaa

SEQ ID NO: 15257 - RNA, 20 nt, synthetic construct
  misc_feature 1..20: note = antisense sequence
  source 1..20: mol_type = other RNA
gattgcggtggctggataaa

SEQ ID NO: 15258 - RNA, 20 nt, synthetic construct
  misc_feature 1..20: note = antisense sequence
  source 1..20: mol_type = other RNA
tgattgcggtggctggataa

SEQ ID NO: 15259 - RNA, 20 nt, synthetic construct
  misc_feature 1..20: note = antisense sequence
  source 1..20: mol_type = other RNA
gtgattgcggtggctggata

SEQ ID NO: 15260 - RNA, 20 nt, synthetic construct
  misc_feature 1..20: note = antisense sequence
  source 1..20: mol_type = other RNA
agtgattgcggtggctggat

SEQ ID NO: 15261 - RNA, 20 nt, synthetic construct
  misc_feature 1..20: note = antisense sequence
  source 1..20: mol_type = other RNA
gagtgattgcggtggctgga

SEQ ID NO: 15262 - RNA, 20 nt, synthetic construct
  misc_feature 1..20: note = antisense sequence
  source 1..20: mol_type = other RNA
agagtgattgcggtggctgg

SEQ ID NO: 15263 - RNA, 20 nt, synthetic construct
  misc_feature 1..20: note = antisense sequence
  source 1..20: mol_type = other RNA
catatctcacaatcctacct

SEQ ID NO: 15264 - RNA, 20 nt, synthetic construct
  misc_feature 1..20: note = antisense sequence
  source 1..20: mol_type = other RNA
gcatatctcacaatcctacc

SEQ ID NO: 15265 - RNA, 20 nt, synthetic construct
  misc_feature 1..20: note = antisense sequence
  source 1..20: mol_type = other RNA
caaagcatatctcacaatcc

SEQ ID NO: 15266 - RNA, 20 nt, synthetic construct
  misc_feature 1..20: note = antisense sequence
  source 1..20: mol_type = other RNA
tgggtgcctgaaagacaaag

SEQ ID NO: 15267 - RNA, 20 nt, synthetic construct
  misc_feature 1..20: note = antisense sequence
  source 1..20: mol_type = other RNA
gtgggtgcctgaaagacaaa

SEQ ID NO: 15268 - RNA, 20 nt, synthetic construct
  misc_feature 1..20: note = antisense sequence
  source 1..20: mol_type = other RNA
cttgtgggtgcctgaaagac

SEQ ID NO: 15269 - RNA, 20 nt, synthetic construct
  misc_feature 1..20: note = antisense sequence
  source 1..20: mol_type = other RNA
acttgtgggtgcctgaaaga

SEQ ID NO: 15270 - RNA, 20 nt, synthetic construct
  misc_feature 1..20: note = antisense sequence
  source 1..20: mol_type = other RNA
tcacttgtgggtgcctgaaa

SEQ ID NO: 15271 - RNA, 20 nt, synthetic construct
  misc_feature 1..20: note = antisense sequence
  source 1..20: mol_type = other RNA
catcacttgtgggtgcctga

SEQ ID NO: 15272 - RNA, 20 nt, synthetic construct
  misc_feature 1..20: note = antisense sequence
  source 1..20: mol_type = other RNA
acatcacttgtgggtgcctg

SEQ ID NO: 15273 - RNA, 20 nt, synthetic construct
  misc_feature 1..20: note = antisense sequence
  source 1..20: mol_type = other RNA
aacatcacttgtgggtgcct

SEQ ID NO: 15274 - RNA, 20 nt, synthetic construct
  misc_feature 1..20: note = antisense sequence
  source 1..20: mol_type = other RNA
ctaaaacatcacttgtgggt

SEQ ID NO: 15275 - RNA, 20 nt, synthetic construct
  misc_feature 1..20: note = antisense sequence
  source 1..20: mol_type = other RNA
ctgttctacactcatggaaa

SEQ ID NO: 15276 - RNA, 20 nt, synthetic construct
  misc_feature 1..20: note = antisense sequence
  source 1..20: mol_type = other RNA
gctgttctacactcatggaa

SEQ ID NO: 15277 - RNA, 20 nt, synthetic construct
  misc_feature 1..20: note = antisense sequence
  source 1..20: mol_type = other RNA
gctggaagaggcacagaatt

SEQ ID NO: 15278 - RNA, 20 nt, synthetic construct
  misc_feature 1..20: note = antisense sequence
  source 1..20: mol_type = other RNA
gatttagctggaagaggcac

SEQ ID NO: 15279 - RNA, 20 nt, synthetic construct
  misc_feature 1..20: note = antisense sequence
  source 1..20: mol_type = other RNA
gactgccttgccactatttt

SEQ ID NO: 15280 - RNA, 20 nt, synthetic construct
  misc_feature 1..20: note = antisense sequence
  source 1..20: mol_type = other RNA
tgactgccttgccactattt

SEQ ID NO: 15281 - RNA, 20 nt, synthetic construct
  misc_feature 1..20: note = antisense sequence
  source 1..20: mol_type = other RNA
tgtcttggtgactgccttgc

SEQ ID NO: 15282 - RNA, 20 nt, synthetic construct
  misc_feature 1..20: note = antisense sequence
  source 1..20: mol_type = other RNA
tgtgtcttggtgactgcctt

SEQ ID NO: 15283 - RNA, 20 nt, synthetic construct
  misc_feature 1..20: note = antisense sequence
  source 1..20: mol_type = other RNA
gatgtgtcttggtgactgcc

SEQ ID NO: 15284 - RNA, 20 nt, synthetic construct
  misc_feature 1..20: note = antisense sequence
  source 1..20: mol_type = other RNA
agatgtgtcttggtgactgc

SEQ ID NO: 15285 - RNA, 20 nt, synthetic construct
  misc_feature 1..20: note = antisense sequence
  source 1..20: mol_type = other RNA
cagatgtgtcttggtgactg

SEQ ID NO: 15286 - RNA, 20 nt, synthetic construct
  misc_feature 1..20: note = antisense sequence
  source 1..20: mol_type = other RNA
ccagatgtgtcttggtgact

SEQ ID NO: 15287 - RNA, 20 nt, synthetic construct
  misc_feature 1..20: note = antisense sequence
  source 1..20: mol_type = other RNA
cccagatgtgtcttggtgac

SEQ ID NO: 15288 - RNA, 20 nt, synthetic construct
  misc_feature 1..20: note = antisense sequence
  source 1..20: mol_type = other RNA
attttcccagatgtgtcttg

SEQ ID NO: 15289 - RNA, 20 nt, synthetic construct
  misc_feature 1..20: note = antisense sequence
  source 1..20: mol_type = other RNA
gaattttcccagatgtgtct

SEQ ID NO: 15290 - RNA, 20 nt, synthetic construct
  misc_feature 1..20: note = antisense sequence
  source 1..20: mol_type = other RNA
agaattttcccagatgtgtc

SEQ ID NO: 15291 - RNA, 20 nt, synthetic construct
  misc_feature 1..20: note = antisense sequence
  source 1..20: mol_type = other RNA
gtggacaagcaggtgaaata

SEQ ID NO: 15292 - RNA, 20 nt, synthetic construct
  misc_feature 1..20: note = antisense sequence
  source 1..20: mol_type = other RNA
agtggacaagcaggtgaaat

SEQ ID NO: 15293 - RNA, 20 nt, synthetic construct
  misc_feature 1..20: note = antisense sequence
  source 1..20: mol_type = other RNA
tcagagtggacaagcaggtg

SEQ ID NO: 15294 - RNA, 20 nt, synthetic construct
  misc_feature 1..20: note = antisense sequence
  source 1..20: mol_type = other RNA
aatcagagtggacaagcagg

SEQ ID NO: 15295 - RNA, 20 nt, synthetic construct
  misc_feature 1..20: note = antisense sequence
  source 1..20: mol_type = other RNA
gaatcagagtggacaagcag

SEQ ID NO: 15296 - RNA, 20 nt, synthetic construct
  misc_feature 1..20: note = antisense sequence
  source 1..20: mol_type = other RNA
agaatcagagtggacaagca

SEQ ID NO: 15297 - RNA, 20 nt, synthetic construct
  misc_feature 1..20: note = antisense sequence
  source 1..20: mol_type = other RNA
cagaatcagagtggacaagc

SEQ ID NO: 15298 - RNA, 20 nt, synthetic construct
  misc_feature 1..20: note = antisense sequence
  source 1..20: mol_type = other RNA
acagaatcagagtggacaag

SEQ ID NO: 15299 - RNA, 20 nt, synthetic construct
  misc_feature 1..20: note = antisense sequence
  source 1..20: mol_type = other RNA
aaacagaatcagagtggaca

SEQ ID NO: 15300 - RNA, 20 nt, synthetic construct
  misc_feature 1..20: note = antisense sequence
  source 1..20: mol_type = other RNA
gaaagcaaacagaatcagag

SEQ ID NO: 15301 - RNA, 20 nt, synthetic construct
  misc_feature 1..20: note = antisense sequence
  source 1..20: mol_type = other RNA
tctgctcaccatctctcctc

SEQ ID NO: 15302 - RNA, 20 nt, synthetic construct
  misc_feature 1..20: note = antisense sequence
  source 1..20: mol_type = other RNA
atctgctcaccatctctcct

SEQ ID NO: 15303 - RNA, 20 nt, synthetic construct
  misc_feature 1..20: note = antisense sequence
  source 1..20: mol_type = other RNA
gatctgctcaccatctctcc

SEQ ID NO: 15304 - RNA, 20 nt, synthetic construct
  misc_feature 1..20: note = antisense sequence
  source 1..20: mol_type = other RNA
tgatctgctcaccatctctc

SEQ ID NO: 15305 - RNA, 20 nt, synthetic construct
  misc_feature 1..20: note = antisense sequence
  source 1..20: mol_type = other RNA
atgatctgctcaccatctct

SEQ ID NO: 15306 - RNA, 20 nt, synthetic construct
  misc_feature 1..20: note = antisense sequence
  source 1..20: mol_type = other RNA
tatgatctgctcaccatctc

SEQ ID NO: 15307 - RNA, 20 nt, synthetic construct
  misc_feature 1..20: note = antisense sequence
  source 1..20: mol_type = other RNA
gtatgatctgctcaccatct

SEQ ID NO: 15308 - RNA, 20 nt, synthetic construct
  misc_feature 1..20: note = antisense sequence
  source 1..20: mol_type = other RNA
tgtatgatctgctcaccatc

SEQ ID NO: 15309 - RNA, 20 nt, synthetic construct
  misc_feature 1..20: note = antisense sequence
  source 1..20: mol_type = other RNA
ttgtatgatctgctcaccat

SEQ ID NO: 15310 - RNA, 20 nt, synthetic construct
  misc_feature 1..20: note = antisense sequence
  source 1..20: mol_type = other RNA
tttgtatgatctgctcacca

SEQ ID NO: 15311 - RNA, 20 nt, synthetic construct
  misc_feature 1..20: note = antisense sequence
  source 1..20: mol_type = other RNA
ttttgtatgatctgctcacc

SEQ ID NO: 15312 - RNA, 20 nt, synthetic construct
  misc_feature 1..20: note = antisense sequence
  source 1..20: mol_type = other RNA
ctaaactaccattggaagga

SEQ ID NO: 15313 - RNA, 20 nt, synthetic construct
  misc_feature 1..20: note = antisense sequence
  source 1..20: mol_type = other RNA
cctaaactaccattggaagg

SEQ ID NO: 15314 - RNA, 20 nt, synthetic construct
  misc_feature 1..20: note = antisense sequence
  source 1..20: mol_type = other RNA
tcctaaactaccattggaag

SEQ ID NO: 15315 - RNA, 20 nt, synthetic construct
  misc_feature 1..20: note = antisense sequence
  source 1..20: mol_type = other RNA
gcatattccaatctgtcaca

SEQ ID NO: 15316 - RNA, 20 nt, synthetic construct
  misc_feature 1..20: note = antisense sequence
  source 1..20: mol_type = other RNA
agcatattccaatctgtcac

SEQ ID NO: 15317 - RNA, 20 nt, synthetic construct
  misc_feature 1..20: note = antisense sequence
  source 1..20: mol_type = other RNA
cccagttctcatagatggca

SEQ ID NO: 15318 - RNA, 20 nt, synthetic construct
  misc_feature 1..20: note = antisense sequence
  source 1..20: mol_type = other RNA
acccagttctcatagatggc

SEQ ID NO: 15319 - RNA, 20 nt, synthetic construct
  misc_feature 1..20: note = antisense sequence
  source 1..20: mol_type = other RNA
cacccagttctcatagatgg

SEQ ID NO: 15320 - RNA, 20 nt, synthetic construct
  misc_feature 1..20: note = antisense sequence
  source 1..20: mol_type = other RNA
acacccagttctcatagatg

SEQ ID NO: 15321 - RNA, 20 nt, synthetic construct
  misc_feature 1..20: note = antisense sequence
  source 1..20: mol_type = other RNA
aacacccagttctcatagat

SEQ ID NO: 15322 - RNA, 20 nt, synthetic construct
  misc_feature 1..20: note = antisense sequence
  source 1..20: mol_type = other RNA
aaacacccagttctcataga

SEQ ID NO: 15323 - RNA, 20 nt, synthetic construct
  misc_feature 1..20: note = antisense sequence
  source 1..20: mol_type = other RNA
gaaacacccagttctcatag

SEQ ID NO: 15324 - RNA, 20 nt, synthetic construct
  misc_feature 1..20: note = antisense sequence
  source 1..20: mol_type = other RNA
ggaaacacccagttctcata

SEQ ID NO: 15325 - RNA, 20 nt, synthetic construct
  misc_feature 1..20: note = antisense sequence
  source 1..20: mol_type = other RNA
gtttgcctgtgtaagaattg

SEQ ID NO: 15326 - RNA, 20 nt, synthetic construct
  misc_feature 1..20: note = antisense sequence
  source 1..20: mol_type = other RNA
gagtttgcctgtgtaagaat

SEQ ID NO: 15327 - RNA, 20 nt, synthetic construct
  misc_feature 1..20: note = antisense sequence
  source 1..20: mol_type = other RNA
tcgagtttgcctgtgtaaga

SEQ ID NO: 15328 - RNA, 20 nt, synthetic construct
  misc_feature 1..20: note = antisense sequence
  source 1..20: mol_type = other RNA
ttcgagtttgcctgtgtaag

SEQ ID NO: 15329 - RNA, 20 nt, synthetic construct
  misc_feature 1..20: note = antisense sequence
  source 1..20: mol_type = other RNA
tgttcgagtttgcctgtgta

SEQ ID NO: 15330 - RNA, 20 nt, synthetic construct
  misc_feature 1..20: note = antisense sequence
  source 1..20: mol_type = other RNA
gtgttcgagtttgcctgtgt

SEQ ID NO: 15331 - RNA, 20 nt, synthetic construct
  misc_feature 1..20: note = antisense sequence
  source 1..20: mol_type = other RNA
ggtgttcgagtttgcctgtg

SEQ ID NO: 15332 - RNA, 20 nt, synthetic construct
  misc_feature 1..20: note = antisense sequence
  source 1..20: mol_type = other RNA
tggtgttcgagtttgcctgt

SEQ ID NO: 15333 - RNA, 20 nt, synthetic construct
  misc_feature 1..20: note = antisense sequence
  source 1..20: mol_type = other RNA
ttggtgttcgagtttgcctg

SEQ ID NO: 15334 - RNA, 20 nt, synthetic construct
  misc_feature 1..20: note = antisense sequence
  source 1..20: mol_type = other RNA
cttggtgttcgagtttgcct

SEQ ID NO: 15335 - RNA, 20 nt, synthetic construct
  misc_feature 1..20: note = antisense sequence
  source 1..20: mol_type = other RNA
tcttggtgttcgagtttgcc

SEQ ID NO: 15336 - RNA, 20 nt, synthetic construct
  misc_feature 1..20: note = antisense sequence
  source 1..20: mol_type = other RNA
gtcttggtgttcgagtttgc

SEQ ID NO: 15337 - RNA, 20 nt, synthetic construct
  misc_feature 1..20: note = antisense sequence
  source 1..20: mol_type = other RNA
tgtcttggtgttcgagtttg

SEQ ID NO: 15338 - RNA, 20 nt, synthetic construct
  misc_feature 1..20: note = antisense sequence
  source 1..20: mol_type = other RNA
ttgtcttggtgttcgagttt

SEQ ID NO: 15339 - RNA, 20 nt, synthetic construct
  misc_feature 1..20: note = antisense sequence
  source 1..20: mol_type = other RNA
cttgtcttggtgttcgagtt

SEQ ID NO: 15340 - RNA, 20 nt, synthetic construct
  misc_feature 1..20: note = antisense sequence
  source 1..20: mol_type = other RNA
atcttgtcttggtgttcgag

SEQ ID NO: 15341 - RNA, 20 nt, synthetic construct
  misc_feature 1..20: note = antisense sequence
  source 1..20: mol_type = other RNA
aatcttgtcttggtgttcga

SEQ ID NO: 15342 - RNA, 20 nt, synthetic construct
  misc_feature 1..20: note = antisense sequence
  source 1..20: mol_type = other RNA
aaatcttgtcttggtgttcg

SEQ ID NO: 15343 - RNA, 20 nt, synthetic construct
  misc_feature 1..20: note = antisense sequence
  source 1..20: mol_type = other RNA
ccagctccattttatcagat

SEQ ID NO: 15344 - RNA, 20 nt, synthetic construct
  misc_feature 1..20: note = antisense sequence
  source 1..20: mol_type = other RNA
cccagctccattttatcaga

SEQ ID NO: 15345 - RNA, 20 nt, synthetic construct
  misc_feature 1..20: note = antisense sequence
  source 1..20: mol_type = other RNA
tcccagctccattttatcag

SEQ ID NO: 15346 - RNA, 20 nt, synthetic construct
  misc_feature 1..20: note = antisense sequence
  source 1..20: mol_type = other RNA
aacagaatttcccagctcca

SEQ ID NO: 15347 - RNA, 20 nt, synthetic construct
  misc_feature 1..20: note = antisense sequence
  source 1..20: mol_type = other RNA
taacagaatttcccagctcc

SEQ ID NO: 15348 - RNA, 20 nt, synthetic construct
  misc_feature 1..20: note = antisense sequence
  source 1..20: mol_type = other RNA
caataacagaatttcccagc

SEQ ID NO: 15349 - RNA, 20 nt, synthetic construct
  misc_feature 1..20: note = antisense sequence
  source 1..20: mol_type = other RNA
aggagactccaataacagaa

SEQ ID NO: 15350 - RNA, 20 nt, synthetic construct
  misc_feature 1..20: note = antisense sequence
  source 1..20: mol_type = other RNA
taggagactccaataacaga

SEQ ID NO: 15351 - RNA, 20 nt, synthetic construct
  misc_feature 1..20: note = antisense sequence
  source 1..20: mol_type = other RNA
ctaggagactccaataacag

SEQ ID NO: 15352 - RNA, 20 nt, synthetic construct
  misc_feature 1..20: note = antisense sequence
  source 1..20: mol_type = other RNA
cagagacacctactacctag

SEQ ID NO: 15353 - RNA, 20 nt, synthetic construct
  misc_feature 1..20: note = antisense sequence
  source 1..20: mol_type = other RNA
ccagagacacctactaccta

SEQ ID NO: 15354 - RNA, 20 nt, synthetic construct
  misc_feature 1..20: note = antisense sequence
  source 1..20: mol_type = other RNA
ggccagagacacctactacc

SEQ ID NO: 15355 - RNA, 20 nt, synthetic construct
  misc_feature 1..20: note = antisense sequence
  source 1..20: mol_type = other RNA
aggccagagacacctactac

SEQ ID NO: 15356 - RNA, 20 nt, synthetic construct
  misc_feature 1..20: note = antisense sequence
  source 1..20: mol_type = other RNA
aaggccagagacacctacta

SEQ ID NO: 15357 - RNA, 20 nt, synthetic construct
  misc_feature 1..20: note = antisense sequence
  source 1..20: mol_type = other RNA
gaaggccagagacacctact

SEQ ID NO: 15358 - RNA, 20 nt, synthetic construct
  misc_feature 1..20: note = antisense sequence
  source 1..20: mol_type = other RNA
ttgaaggccagagacaccta

SEQ ID NO: 15359 - RNA, 20 nt, synthetic construct
  misc_feature 1..20: note = antisense sequence
  source 1..20: mol_type = other RNA
ttcttgaaggccagagacac

SEQ ID NO: 15360 - RNA, 20 nt, synthetic construct
  misc_feature 1..20: note = antisense sequence
  source 1..20: mol_type = other RNA
actccatgctacgtgaatta

SEQ ID NO: 15361 - RNA, 20 nt, synthetic construct
  misc_feature 1..20: note = antisense sequence
  source 1..20: mol_type = other RNA
aactccatgctacgtgaatt

SEQ ID NO: 15362 - RNA, 20 nt, synthetic construct
  misc_feature 1..20: note = antisense sequence
  source 1..20: mol_type = other RNA
gaactccatgctacgtgaat

SEQ ID NO: 15363 - RNA, 20 nt, synthetic construct
  misc_feature 1..20: note = antisense sequence
  source 1..20: mol_type = other RNA
tgaactccatgctacgtgaa

SEQ ID NO: 15364 - RNA, 20 nt, synthetic construct
  misc_feature 1..20: note = antisense sequence
  source 1..20: mol_type = other RNA
gtgaactccatgctacgtga

SEQ ID NO: 15365 - RNA, 20 nt, synthetic construct
  misc_feature 1..20: note = antisense sequence
  source 1..20: mol_type = other RNA
tgtggtgtgtgaaaatgttc

SEQ ID NO: 15366 - RNA, 20 nt, synthetic construct
  misc_feature 1..20: note = antisense sequence
  source 1..20: mol_type = other RNA
agaaaggctgttgaggaaaa

SEQ ID NO: 15367 - RNA, 20 nt, synthetic construct
  misc_feature 1..20: note = antisense sequence
  source 1..20: mol_type = other RNA
tgggagaaaggctgttgagg

SEQ ID NO: 15368 - RNA, 20 nt, synthetic construct
  misc_feature 1..20: note = antisense sequence
  source 1..20: mol_type = other RNA
ttgggagaaaggctgttgag

SEQ ID NO: 15369 - RNA, 20 nt, synthetic construct
  misc_feature 1..20: note = antisense sequence
  source 1..20: mol_type = other RNA
cttgggagaaaggctgttga

SEQ ID NO: 15370 - RNA, 20 nt, synthetic construct
  misc_feature 1..20: note = antisense sequence
  source 1..20: mol_type = other RNA
ctgggcttgggagaaaggct

SEQ ID NO: 15371 - RNA, 20 nt, synthetic construct
  misc_feature 1..20: note = antisense sequence
  source 1..20: mol_type = other RNA
agaataaggtgttgcctgat

SEQ ID NO: 15372 - RNA, 20 nt, synthetic construct
  misc_feature 1..20: note = antisense sequence
  source 1..20: mol_type = other RNA
cagaataaggtgttgcctga

SEQ ID NO: 15373 - RNA, 20 nt, synthetic construct
  misc_feature 1..20: note = antisense sequence
  source 1..20: mol_type = other RNA
tacagaataaggtgttgcct

SEQ ID NO: 15374 - RNA, 20 nt, synthetic construct
  misc_feature 1..20: note = antisense sequence
  source 1..20: mol_type = other RNA
gctcatccaccattcatttt

SEQ ID NO: 15375 - RNA, 20 nt, synthetic construct
  misc_feature 1..20: note = antisense sequence
  source 1..20: mol_type = other RNA
tcagctcatccaccattcat

SEQ ID NO: 15376 - RNA, 20 nt, synthetic construct
  misc_feature 1..20: note = antisense sequence
  source 1..20: mol_type = other RNA
cctcagctcatccaccattc

SEQ ID NO: 15377 - RNA, 20 nt, synthetic construct
  misc_feature 1..20: note = antisense sequence
  source 1..20: mol_type = other RNA
tcctcagctcatccaccatt

SEQ ID NO: 15378 - RNA, 20 nt, synthetic construct
  misc_feature 1..20: note = antisense sequence
  source 1..20: mol_type = other RNA
tcctctcctcagctcatcca

SEQ ID NO: 15379 - RNA, 20 nt, synthetic construct
  misc_feature 1..20: note = antisense sequence
  source 1..20: mol_type = other RNA
agtcaacttcctctcctcag

SEQ ID NO: 15380 - RNA, 20 nt, synthetic construct
  misc_feature 1..20: note = antisense sequence
  source 1..20: mol_type = other RNA
ccctctgctttcacttttac

SEQ ID NO: 15381 - RNA, 20 nt, synthetic construct
  misc_feature 1..20: note = antisense sequence
  source 1..20: mol_type = other RNA
agccagtttcaaacagcatg

SEQ ID NO: 15382 - RNA, 20 nt, synthetic construct
  misc_feature 1..20: note = antisense sequence
  source 1..20: mol_type = other RNA
caagccagtttcaaacagca

SEQ ID NO: 15383 - RNA, 20 nt, synthetic construct
  misc_feature 1..20: note = antisense sequence
  source 1..20: mol_type = other RNA
ccaatcaagccagtttcaaa

SEQ ID NO: 15384 - RNA, 20 nt, synthetic construct
  misc_feature 1..20: note = antisense sequence
  source 1..20: mol_type = other RNA
cccaatcaagccagtttcaa

SEQ ID NO: 15385 - RNA, 20 nt, synthetic construct
  misc_feature 1..20: note = antisense sequence
  source 1..20: mol_type = other RNA
ctctaggcccaacagactaa

SEQ ID NO: 15386 - RNA, 20 nt, synthetic construct
  misc_feature 1..20: note = antisense sequence
  source 1..20: mol_type = other RNA
gctctaggcccaacagacta

SEQ ID NO: 15387 - RNA, 20 nt, synthetic construct
  misc_feature 1..20: note = antisense sequence
  source 1..20: mol_type = other RNA
tgctctaggcccaacagact

SEQ ID NO: 15388 - RNA, 20 nt, synthetic construct
  misc_feature 1..20: note = antisense sequence
  source 1..20: mol_type = other RNA
ttgctctaggcccaacagac

SEQ ID NO: 15389 - RNA, 20 nt, synthetic construct
  misc_feature 1..20: note = antisense sequence
  source 1..20: mol_type = other RNA
cttgctctaggcccaacaga

SEQ ID NO: 15390 - RNA, 20 nt, synthetic construct
  misc_feature 1..20: note = antisense sequence
  source 1..20: mol_type = other RNA
tcttgctctaggcccaacag

SEQ ID NO: 15391 - RNA, 20 nt, synthetic construct
  misc_feature 1..20: note = antisense sequence
  source 1..20: mol_type = other RNA
gctcttgctctaggcccaac

SEQ ID NO: 15392 - RNA, 20 nt, synthetic construct
  misc_feature 1..20: note = antisense sequence
  source 1..20: mol_type = other RNA
agctcttgctctaggcccaa

SEQ ID NO: 15393 - RNA, 20 nt, synthetic construct
  misc_feature 1..20: note = antisense sequence
  source 1..20: mol_type = other RNA
gacagctcttgctctaggcc

SEQ ID NO: 15394 - RNA, 20 nt, synthetic construct
  misc_feature 1..20: note = antisense sequence
  source 1..20: mol_type = other RNA
ggacagctcttgctctaggc

SEQ ID NO: 15395 - RNA, 20 nt, synthetic construct
  misc_feature 1..20: note = antisense sequence
  source 1..20: mol_type = other RNA
tggacagctcttgctctagg

SEQ ID NO: 15396 - RNA, 20 nt, synthetic construct
  misc_feature 1..20: note = antisense sequence
  source 1..20: mol_type = other RNA
tttggacagctcttgctcta

SEQ ID NO: 15397 - RNA, 20 nt, synthetic construct
  misc_feature 1..20: note = antisense sequence
  source 1..20: mol_type = other RNA
ggtttggacagctcttgctc

SEQ ID NO: 15398 - RNA, 20 nt, synthetic construct
  misc_feature 1..20: note = antisense sequence
  source 1..20: mol_type = other RNA
tggtttggacagctcttgct

SEQ ID NO: 15399 - RNA, 20 nt, synthetic construct
  misc_feature 1..20: note = antisense sequence
  source 1..20: mol_type = other RNA
ttggtttggacagctcttgc

SEQ ID NO: 15400 - RNA, 20 nt, synthetic construct
  misc_feature 1..20: note = antisense sequence
  source 1..20: mol_type = other RNA
aggtcattggtttggacagc

SEQ ID NO: 15401 - RNA, 20 nt, synthetic construct
  misc_feature 1..20: note = antisense sequence
  source 1..20: mol_type = other RNA
gaggtcattggtttggacag

SEQ ID NO: 15402 - RNA, 20 nt, synthetic construct
  misc_feature 1..20: note = antisense sequence
  source 1..20: mol_type = other RNA
ctggcttttaagctactcag

SEQ ID NO: 15403 - RNA, 20 nt, synthetic construct
  misc_feature 1..20: note = antisense sequence
  source 1..20: mol_type = other RNA
tctggcttttaagctactca

SEQ ID NO: 15404 - RNA, 20 nt, synthetic construct
  misc_feature 1..20: note = antisense sequence
  source 1..20: mol_type = other RNA
cttctggcttttaagctact

SEQ ID NO: 15405 - RNA, 20 nt, synthetic construct
  misc_feature 1..20: note = antisense sequence
  source 1..20: mol_type = other RNA
acttctggcttttaagctac

SEQ ID NO: 15406 - RNA, 20 nt, synthetic construct
  misc_feature 1..20: note = antisense sequence
  source 1..20: mol_type = other RNA
gtgtttactttggacttccc

SEQ ID NO: 15407 - RNA, 20 nt, synthetic construct
  misc_feature 1..20: note = antisense sequence
  source 1..20: mol_type = other RNA
tgtgtttactttggacttcc

SEQ ID NO: 15408 - RNA, 20 nt, synthetic construct
  misc_feature 1..20: note = antisense sequence
  source 1..20: mol_type = other RNA
gtgtgtttactttggacttc

SEQ ID NO: 15409 - RNA, 20 nt, synthetic construct
  misc_feature 1..20: note = antisense sequence
  source 1..20: mol_type = other RNA
accagtgtgtttactttgga

SEQ ID NO: 15410 - RNA, 20 nt, synthetic construct
  misc_feature 1..20: note = antisense sequence
  source 1..20: mol_type = other RNA
ctaccagtgtgtttactttg

SEQ ID NO: 15411 - RNA, 20 nt, synthetic construct
  misc_feature 1..20: note = antisense sequence
  source 1..20: mol_type = other RNA
gttctgctatctcaggatgc

SEQ ID NO: 15412 - RNA, 20 nt, synthetic construct
  misc_feature 1..20: note = antisense sequence
  source 1..20: mol_type = other RNA
tggttctgctatctcaggat

SEQ ID NO: 15413 - RNA, 20 nt, synthetic construct
  misc_feature 1..20: note = antisense sequence
  source 1..20: mol_type = other RNA
ctggttctgctatctcagga

SEQ ID NO: 15414 - RNA, 20 nt, synthetic construct
  misc_feature 1..20: note = antisense sequence
  source 1..20: mol_type = other RNA
tcctggttctgctatctcag

SEQ ID NO: 15415 - RNA, 20 nt, synthetic construct
  misc_feature 1..20: note = antisense sequence
  source 1..20: mol_type = other RNA
tgctgccttcctggttctgc

SEQ ID NO: 15416 - RNA, 20 nt, synthetic construct
  misc_feature 1..20: note = antisense sequence
  source 1..20: mol_type = other RNA
agaatgctgccttcctggtt

SEQ ID NO: 15417 - RNA, 20 nt, synthetic construct
  misc_feature 1..20: note = antisense sequence
  source 1..20: mol_type = other RNA
cagaatgctgccttcctggt

SEQ ID NO: 15418 - RNA, 20 nt, synthetic construct
  misc_feature 1..20: note = antisense sequence
  source 1..20: mol_type = other RNA
taactcagaatgctgccttc

SEQ ID NO: 15419 - RNA, 20 nt, synthetic construct
  misc_feature 1..20: note = antisense sequence
  source 1..20: mol_type = other RNA
gtaactcagaatgctgcctt

SEQ ID NO: 15420 - RNA, 20 nt, synthetic construct
  misc_feature 1..20: note = antisense sequence
  source 1..20: mol_type = other RNA
tgtaactcagaatgctgcct

SEQ ID NO: 15421 - RNA, 20 nt, synthetic construct
  misc_feature 1..20: note = antisense sequence
  source 1..20: mol_type = other RNA
ttgtaactcagaatgctgcc

SEQ ID NO: 15422 - RNA, 20 nt, synthetic construct
  misc_feature 1..20: note = antisense sequence
  source 1..20: mol_type = other RNA
cttgtaactcagaatgctgc

SEQ ID NO: 15423 - RNA, 20 nt, synthetic construct
  misc_feature 1..20: note = antisense sequence
  source 1..20: mol_type = other RNA
ccttgtaactcagaatgctg

SEQ ID NO: 15424 - RNA, 20 nt, synthetic construct
  misc_feature 1..20: note = antisense sequence
  source 1..20: mol_type = other RNA
cccttgtaactcagaatgct

SEQ ID NO: 15425 - RNA, 20 nt, synthetic construct
  misc_feature 1..20: note = antisense sequence
  source 1..20: mol_type = other RNA
acccttgtaactcagaatgc

SEQ ID NO: 15426 - RNA, 20 nt, synthetic construct
  misc_feature 1..20: note = antisense sequence
  source 1..20: mol_type = other RNA
tacccttgtaactcagaatg

SEQ ID NO: 15427 - RNA, 20 nt, synthetic construct
  misc_feature 1..20: note = antisense sequence
  source 1..20: mol_type = other RNA
gtacccttgtaactcagaat

SEQ ID NO: 15428 - RNA, 20 nt, synthetic construct
  misc_feature 1..20: note = antisense sequence
  source 1..20: mol_type = other RNA
agtacccttgtaactcagaa

SEQ ID NO: 15429 - RNA, 20 nt, synthetic construct
  misc_feature 1..20: note = antisense sequence
  source 1..20: mol_type = other RNA
tagtacccttgtaactcaga

SEQ ID NO: 15430 - RNA, 20 nt, synthetic construct
  misc_feature 1..20: note = antisense sequence
  source 1..20: mol_type = other RNA
ttagtacccttgtaactcag

SEQ ID NO: 15431 - RNA, 20 nt, synthetic construct
  misc_feature 1..20: note = antisense sequence
  source 1..20: mol_type = other RNA
tttgggcaggtgatgagatc

SEQ ID NO: 15432 - RNA, 20 nt, synthetic construct
  misc_feature 1..20: note = antisense sequence
  source 1..20: mol_type = other RNA
ctttgggcaggtgatgagat

SEQ ID NO: 15433 - RNA, 20 nt, synthetic construct
  misc_feature 1..20: note = antisense sequence
  source 1..20: mol_type = other RNA
gcctttgggcaggtgatgag

SEQ ID NO: 15434 - RNA, 20 nt, synthetic construct
  misc_feature 1..20: note = antisense sequence
  source 1..20: mol_type = other RNA
caatgtgaatgtctaccatg

SEQ ID NO: 15435 - RNA, 20 nt, synthetic construct
  misc_feature 1..20: note = antisense sequence
  source 1..20: mol_type = other RNA
ccatgagataggatgtgtta

SEQ ID NO: 15436 - RNA, 20 nt, synthetic construct
  misc_feature 1..20: note = antisense sequence
  source 1..20: mol_type = other RNA
cacattttccatgagatagg

SEQ ID NO: 15437 - RNA, 20 nt, synthetic construct
  misc_feature 1..20: note = antisense sequence
  source 1..20: mol_type = other RNA
gacatacacagaagaagcaa

SEQ ID NO: 15438 - RNA, 20 nt, synthetic construct
  misc_feature 1..20: note = antisense sequence
  source 1..20: mol_type = other RNA
tcgacatacacagaagaagc

SEQ ID NO: 15439 - RNA, 20 nt, synthetic construct
  misc_feature 1..20: note = antisense sequence
  source 1..20: mol_type = other RNA
gtcagtgagtttatagagca

SEQ ID NO: 15440 - RNA, 20 nt, synthetic construct
  misc_feature 1..20: note = antisense sequence
  source 1..20: mol_type = other RNA
tgtcagtgagtttatagagc

SEQ ID NO: 15441 - RNA, 20 nt, synthetic construct
  misc_feature 1..20: note = antisense sequence
  source 1..20: mol_type = other RNA
ctgtcagtgagtttatagag

SEQ ID NO: 15442 - RNA, 20 nt, synthetic construct
  misc_feature 1..20: note = antisense sequence
  source 1..20: mol_type = other RNA
tggaagaaactgtcagtgag

SEQ ID NO: 15443 - RNA, 20 nt, synthetic construct
  misc_feature 1..20: note = antisense sequence
  source 1..20: mol_type = other RNA
cctggaagaaactgtcagtg

SEQ ID NO: 15444 - RNA, 20 nt, synthetic construct
  misc_feature 1..20: note = antisense sequence
  source 1..20: mol_type = other RNA
atctcctacaacctggaaga

SEQ ID NO: 15445 - RNA, 20 nt, synthetic construct
  misc_feature 1..20: note = antisense sequence
  source 1..20: mol_type = other RNA
tgatctcctacaacctggaa

SEQ ID NO: 15446 - RNA, 20 nt, synthetic construct
  misc_feature 1..20: note = antisense sequence
  source 1..20: mol_type = other RNA
ctactgatctcctacaacct

SEQ ID NO: 15447 - RNA, 20 nt, synthetic construct
  misc_feature 1..20: note = antisense sequence
  source 1..20: mol_type = other RNA
tctactgatctcctacaacc

SEQ ID NO: 15448 - RNA, 20 nt, synthetic construct
  misc_feature 1..20: note = antisense sequence
  source 1..20: mol_type = other RNA
cacttctactgatctcctac

SEQ ID NO: 15449 - RNA, 20 nt, synthetic construct
  misc_feature 1..20: note = antisense sequence
  source 1..20: mol_type = other RNA
tccacttctactgatctcct

SEQ ID NO: 15450 - RNA, 20 nt, synthetic construct
  misc_feature 1..20: note = antisense sequence
  source 1..20: mol_type = other RNA
ttccacttctactgatctcc

SEQ ID NO: 15451 - RNA, 20 nt, synthetic construct
  misc_feature 1..20: note = antisense sequence
  source 1..20: mol_type = other RNA
aagtggttaattgccttcca

SEQ ID NO: 15452 - RNA, 20 nt, synthetic construct
  misc_feature 1..20: note = antisense sequence
  source 1..20: mol_type = other RNA
aaagtggttaattgccttcc

SEQ ID NO: 15453 - RNA, 20 nt, synthetic construct
  misc_feature 1..20: note = antisense sequence
  source 1..20: mol_type = other RNA
caaagtggttaattgccttc

SEQ ID NO: 15454 - RNA, 20 nt, synthetic construct
  misc_feature 1..20: note = antisense sequence
  source 1..20: mol_type = other RNA
ccattgctttaatctaggtg

SEQ ID NO: 15455 - RNA, 20 nt, synthetic construct
  misc_feature 1..20: note = antisense sequence
  source 1..20: mol_type = other RNA
gctcatagaaccattgcttt

SEQ ID NO: 15456 - RNA, 20 nt, synthetic construct
  misc_feature 1..20: note = antisense sequence
  source 1..20: mol_type = other RNA
agctcatagaaccattgctt

SEQ ID NO: 15457 - RNA, 20 nt, synthetic construct
  misc_feature 1..20: note = antisense sequence
  source 1..20: mol_type = other RNA
atagctcatagaaccattgc

SEQ ID NO: 15458 - RNA, 20 nt, synthetic construct
  misc_feature 1..20: note = antisense sequence
  source 1..20: mol_type = other RNA
cttgatgggcagccagtgaa

SEQ ID NO: 15459 - RNA, 20 nt, synthetic construct
  misc_feature 1..20: note = antisense sequence
  source 1..20: mol_type = other RNA
accttgatgggcagccagtg

SEQ ID NO: 15460 - RNA, 20 nt, synthetic construct
  misc_feature 1..20: note = antisense sequence
  source 1..20: mol_type = other RNA
gaccttgatgggcagccagt

SEQ ID NO: 15461 - RNA, 20 nt, synthetic construct
  misc_feature 1..20: note = antisense sequence
  source 1..20: mol_type = other RNA
tttgaccttgatgggcagcc

SEQ ID NO: 15462 - RNA, 20 nt, synthetic construct
  misc_feature 1..20: note = antisense sequence
  source 1..20: mol_type = other RNA
atttgaccttgatgggcagc

SEQ ID NO: 15463 - RNA, 20 nt, synthetic construct
  misc_feature 1..20: note = antisense sequence
  source 1..20: mol_type = other RNA
catttgaccttgatgggcag

SEQ ID NO: 15464 - RNA, 20 nt, synthetic construct
  misc_feature 1..20: note = antisense sequence
  source 1..20: mol_type = other RNA
gtctgtgtgttctatgatac

SEQ ID NO: 15465 - RNA, 20 nt, synthetic construct
  misc_feature 1..20: note = antisense sequence
  source 1..20: mol_type = other RNA
gttagtctgtgtgttctatg

SEQ ID NO: 15466 - RNA, 20 nt, synthetic construct
  misc_feature 1..20: note = antisense sequence
  source 1..20: mol_type = other RNA
gttgttagtctgtgtgttct

SEQ ID NO: 15467 - RNA, 20 nt, synthetic construct
  misc_feature 1..20: note = antisense sequence
  source 1..20: mol_type = other RNA
tgttgttagtctgtgtgttc

SEQ ID NO: 15468 - RNA, 20 nt, synthetic construct
  misc_feature 1..20: note = antisense sequence
  source 1..20: mol_type = other RNA
ctgttgttagtctgtgtgtt

SEQ ID NO: 15469 - RNA, 20 nt, synthetic construct
  misc_feature 1..20: note = antisense sequence
  source 1..20: mol_type = other RNA
gctgttgttagtctgtgtgt

SEQ ID NO: 15470 - RNA, 20 nt, synthetic construct
  misc_feature 1..20: note = antisense sequence
  source 1..20: mol_type = other RNA
tgctgttgttagtctgtgtg

SEQ ID NO: 15471 - RNA, 20 nt, synthetic construct
  misc_feature 1..20: note = antisense sequence
  source 1..20: mol_type = other RNA
tttgctgttgttagtctgtg

SEQ ID NO: 15472 - RNA, 20 nt, synthetic construct
  misc_feature 1..20: note = antisense sequence
  source 1..20: mol_type = other RNA
ctttgctgttgttagtctgt

SEQ ID NO: 15473 - RNA, 20 nt, synthetic construct
  misc_feature 1..20: note = antisense sequence
  source 1..20: mol_type = other RNA
cctttgctgttgttagtctg

SEQ ID NO: 15474 - RNA, 20 nt, synthetic construct
  misc_feature 1..20: note = antisense sequence
  source 1..20: mol_type = other RNA
gcctttgctgttgttagtct

SEQ ID NO: 15475 - RNA, 20 nt, synthetic construct
  misc_feature 1..20: note = antisense sequence
  source 1..20: mol_type = other RNA
ttgagcctttgctgttgtta

SEQ ID NO: 15476 - RNA, 20 nt, synthetic construct
  misc_feature 1..20: note = antisense sequence
  source 1..20: mol_type = other RNA
tattgagcctttgctgttgt

SEQ ID NO: 15477 - RNA, 20 nt, synthetic construct
  misc_feature 1..20: note = antisense sequence
  source 1..20: mol_type = other RNA
cttattgagcctttgctgtt

SEQ ID NO: 15478 - RNA, 20 nt, synthetic construct
  misc_feature 1..20: note = antisense sequence
  source 1..20: mol_type = other RNA
tttccttattgagcctttgc

SEQ ID NO: 15479 - RNA, 20 nt, synthetic construct
  misc_feature 1..20: note = antisense sequence
  source 1..20: mol_type = other RNA
acaatgctagtcactgtgaa

SEQ ID NO: 15480 - RNA, 20 nt, synthetic construct
  misc_feature 1..20: note = antisense sequence
  source 1..20: mol_type = other RNA
ggcacaatgctagtcactgt

SEQ ID NO: 15481 - RNA, 20 nt, synthetic construct
  misc_feature 1..20: note = antisense sequence
  source 1..20: mol_type = other RNA
ggcaggcacaatgctagtca

SEQ ID NO: 15482 - RNA, 20 nt, synthetic construct
  misc_feature 1..20: note = antisense sequence
  source 1..20: mol_type = other RNA
tggcaggcacaatgctagtc

SEQ ID NO: 15483 - RNA, 20 nt, synthetic construct
  misc_feature 1..20: note = antisense sequence
  source 1..20: mol_type = other RNA
atggcaggcacaatgctagt

SEQ ID NO: 15484 - RNA, 20 nt, synthetic construct
  misc_feature 1..20: note = antisense sequence
  source 1..20: mol_type = other RNA
ccttacagtgactaactcaa

SEQ ID NO: 15485 - RNA, 20 nt, synthetic construct
  misc_feature 1..20: note = antisense sequence
  source 1..20: mol_type = other RNA
tccttacagtgactaactca

SEQ ID NO: 15486 - RNA, 20 nt, synthetic construct
  misc_feature 1..20: note = antisense sequence
  source 1..20: mol_type = other RNA
ttccttacagtgactaactc

SEQ ID NO: 15487 - RNA, 20 nt, synthetic construct
  misc_feature 1..20: note = antisense sequence
  source 1..20: mol_type = other RNA
gaggagtttcatgcccttag

SEQ ID NO: 15488 - RNA, 20 nt, synthetic construct
  misc_feature 1..20: note = antisense sequence
  source 1..20: mol_type = other RNA
tgaggagtttcatgccctta

SEQ ID NO: 15489 - RNA, 20 nt, synthetic construct
  misc_feature 1..20: note = antisense sequence
  source 1..20: mol_type = other RNA
ttaccctatgaggagtttca

SEQ ID NO: 15490 - RNA, 20 nt, synthetic construct
  misc_feature 1..20: note = antisense sequence
  source 1..20: mol_type = other RNA
aatacttaccctatgaggag

SEQ ID NO: 15491 - RNA, 20 nt, synthetic construct
  misc_feature 1..20: note = antisense sequence
  source 1..20: mol_type = other RNA
cccattgccaagtagatatt

SEQ ID NO: 15492 - RNA, 20 nt, synthetic construct
  misc_feature 1..20: note = antisense sequence
  source 1..20: mol_type = other RNA
ttcttgggttcccattgcca

SEQ ID NO: 15493 - RNA, 20 nt, synthetic construct
  misc_feature 1..20: note = antisense sequence
  source 1..20: mol_type = other RNA
tttcttgggttcccattgcc

SEQ ID NO: 15494 - RNA, 20 nt, synthetic construct
  misc_feature 1..20: note = antisense sequence
  source 1..20: mol_type = other RNA
ctttcttgggttcccattgc

SEQ ID NO: 15495 - RNA, 20 nt, synthetic construct
  misc_feature 1..20: note = antisense sequence
  source 1..20: mol_type = other RNA
gctttcttgggttcccattg

SEQ ID NO: 15496 - RNA, 20 nt, synthetic construct
  misc_feature 1..20: note = antisense sequence
  source 1..20: mol_type = other RNA
tacccttcaaggtctttctc

SEQ ID NO: 15497 - RNA, 20 nt, synthetic construct
  misc_feature 1..20: note = antisense sequence
  source 1..20: mol_type = other RNA
atgctatctacccttcaagg

SEQ ID NO: 15498 - RNA, 20 nt, synthetic construct
  misc_feature 1..20: note = antisense sequence
  source 1..20: mol_type = other RNA
aatgctatctacccttcaag

SEQ ID NO: 15499 - RNA, 20 nt, synthetic construct
  misc_feature 1..20: note = antisense sequence
  source 1..20: mol_type = other RNA
gaaatgctatctacccttca

SEQ ID NO: 15500 - RNA, 20 nt, synthetic construct
  misc_feature 1..20: note = antisense sequence
  source 1..20: mol_type = other RNA
tgaaatgctatctacccttc

SEQ ID NO: 15501 - RNA, 20 nt, synthetic construct
  misc_feature 1..20: note = antisense sequence
  source 1..20: mol_type = other RNA
gtgaaatgctatctaccctt

SEQ ID NO: 15502 - RNA, 20 nt, synthetic construct
  misc_feature 1..20: note = antisense sequence
  source 1..20: mol_type = other RNA
ctctgtgaaatgctatctac

SEQ ID NO: 15503 - RNA, 20 nt, synthetic construct
  misc_feature 1..20: note = antisense sequence
  source 1..20: mol_type = other RNA
ctctctgtgaaatgctatct

SEQ ID NO: 15504 - RNA, 20 nt, synthetic construct
  misc_feature 1..20: note = antisense sequence
  source 1..20: mol_type = other RNA
cctctctgtgaaatgctatc

SEQ ID NO: 15505 - RNA, 20 nt, synthetic construct
  misc_feature 1..20: note = antisense sequence
  source 1..20: mol_type = other RNA
gacctctctgtgaaatgcta

SEQ ID NO: 15506 - RNA, 20 nt, synthetic construct
  misc_feature 1..20: note = antisense sequence
  source 1..20: mol_type = other RNA
gtgacctctctgtgaaatgc

SEQ ID NO: 15507 - RNA, 20 nt, synthetic construct
  misc_feature 1..20: note = antisense sequence
  source 1..20: mol_type = other RNA
agtgacctctctgtgaaatg

SEQ ID NO: 15508 - RNA, 20 nt, synthetic construct
  misc_feature 1..20: note = antisense sequence
  source 1..20: mol_type = other RNA
cagtgacctctctgtgaaat

SEQ ID NO: 15509 - RNA, 20 nt, synthetic construct
  misc_feature 1..20: note = antisense sequence
  source 1..20: mol_type = other RNA
tcagtgacctctctgtgaaa

SEQ ID NO: 15510 - RNA, 20 nt, synthetic construct
  misc_feature 1..20: note = antisense sequence
  source 1..20: mol_type = other RNA
attcagtgacctctctgtga

SEQ ID NO: 15511 - RNA, 20 nt, synthetic construct
  misc_feature 1..20: note = antisense sequence
  source 1..20: mol_type = other RNA
tattcagtgacctctctgtg

SEQ ID NO: 15512 - RNA, 20 nt, synthetic construct
  misc_feature 1..20: note = antisense sequence
  source 1..20: mol_type = other RNA
gctattcagtgacctctctg

SEQ ID NO: 15513 - RNA, 20 nt, synthetic construct
  misc_feature 1..20: note = antisense sequence
  source 1..20: mol_type = other RNA
tgctattcagtgacctctct

SEQ ID NO: 15514 - RNA, 20 nt, synthetic construct
  misc_feature 1..20: note = antisense sequence
  source 1..20: mol_type = other RNA
gtgctattcagtgacctctc

SEQ ID NO: 15515 - RNA, 20 nt, synthetic construct
  misc_feature 1..20: note = antisense sequence
  source 1..20: mol_type = other RNA
acctggtgctattcagtgac

SEQ ID NO: 15516 - RNA, 20 nt, synthetic construct
  misc_feature 1..20: note = antisense sequence
  source 1..20: mol_type = other RNA
cacctggtgctattcagtga

SEQ ID NO: 15517 - RNA, 20 nt, synthetic construct
  misc_feature 1..20: note = antisense sequence
  source 1..20: mol_type = other RNA
ccacctggtgctattcagtg

SEQ ID NO: 15518 - RNA, 20 nt, synthetic construct
  misc_feature 1..20: note = antisense sequence
  source 1..20: mol_type = other RNA
tccacctggtgctattcagt

SEQ ID NO: 15519 - RNA, 20 nt, synthetic construct
  misc_feature 1..20: note = antisense sequence
  source 1..20: mol_type = other RNA
ctccacctggtgctattcag

SEQ ID NO: 15520 - RNA, 20 nt, synthetic construct
  misc_feature 1..20: note = antisense sequence
  source 1..20: mol_type = other RNA
gctccacctggtgctattca

SEQ ID NO: 15521 - RNA, 20 nt, synthetic construct
  misc_feature 1..20: note = antisense sequence
  source 1..20: mol_type = other RNA
tgcctgaaatgctccacctg

SEQ ID NO: 15522 - RNA, 20 nt, synthetic construct
  misc_feature 1..20: note = antisense sequence
  source 1..20: mol_type = other RNA
ttgcctgaaatgctccacct

SEQ ID NO: 15523 - RNA, 20 nt, synthetic construct
  misc_feature 1..20: note = antisense sequence
  source 1..20: mol_type = other RNA
tttgcctgaaatgctccacc

SEQ ID NO: 15524 - RNA, 20 nt, synthetic construct
  misc_feature 1..20: note = antisense sequence
  source 1..20: mol_type = other RNA
tgcacactccctgtttattt

SEQ ID NO: 15525 - RNA, 20 nt, synthetic construct
  misc_feature 1..20: note = antisense sequence
  source 1..20: mol_type = other RNA
gaatgcacactccctgttta

SEQ ID NO: 15526 - RNA, 20 nt, synthetic construct
  misc_feature 1..20: note = antisense sequence
  source 1..20: mol_type = other RNA
tagaatgcacactccctgtt

SEQ ID NO: 15527 - RNA, 20 nt, synthetic construct
  misc_feature 1..20: note = antisense sequence
  source 1..20: mol_type = other RNA
atagaatgcacactccctgt

SEQ ID NO: 15528 - RNA, 20 nt, synthetic construct
  misc_feature 1..20: note = antisense sequence
  source 1..20: mol_type = other RNA
atgatagaatgcacactccc

SEQ ID NO: 15529 - RNA, 20 nt, synthetic construct
  misc_feature 1..20: note = antisense sequence
  source 1..20: mol_type = other RNA
tatgatagaatgcacactcc

SEQ ID NO: 15530 - RNA, 20 nt, synthetic construct
  misc_feature 1..20: note = antisense sequence
  source 1..20: mol_type = other RNA
tctccataagcagcagctct

SEQ ID NO: 15531 - RNA, 20 nt, synthetic construct
  misc_feature 1..20: note = antisense sequence
  source 1..20: mol_type = other RNA
tcatctccataagcagcagc

SEQ ID NO: 15532 - RNA, 20 nt, synthetic construct
  misc_feature 1..20: note = antisense sequence
  source 1..20: mol_type = other RNA
ttcatctccataagcagcag

SEQ ID NO: 15533 - RNA, 20 nt, synthetic construct
  misc_feature 1..20: note = antisense sequence
  source 1..20: mol_type = other RNA
attcatctccataagcagca

SEQ ID NO: 15534 - RNA, 20 nt, synthetic construct
  misc_feature 1..20: note = antisense sequence
  source 1..20: mol_type = other RNA
tctctcacccattccacact

SEQ ID NO: 15535 - RNA, 20 nt, synthetic construct
  misc_feature 1..20: note = antisense sequence
  source 1..20: mol_type = other RNA
ctcttagcatgaatggtccc

SEQ ID NO: 15536 - RNA, 20 nt, synthetic construct
  misc_feature 1..20: note = antisense sequence
  source 1..20: mol_type = other RNA
gctcttagcatgaatggtcc

SEQ ID NO: 15537 - RNA, 20 nt, synthetic construct
  misc_feature 1..20: note = antisense sequence
  source 1..20: mol_type = other RNA
agctcttagcatgaatggtc

SEQ ID NO: 15538 - RNA, 20 nt, synthetic construct
  misc_feature 1..20: note = antisense sequence
  source 1..20: mol_type = other RNA
cagctcttagcatgaatggt

SEQ ID NO: 15539 - RNA, 20 nt, synthetic construct
  misc_feature 1..20: note = antisense sequence
  source 1..20: mol_type = other RNA
tcagctcttagcatgaatgg

SEQ ID NO: 15540 - RNA, 20 nt, synthetic construct
  misc_feature 1..20: note = antisense sequence
  source 1..20: mol_type = other RNA
gactcagctcttagcatgaa

SEQ ID NO: 15541 - RNA, 20 nt, synthetic construct
  misc_feature 1..20: note = antisense sequence
  source 1..20: mol_type = other RNA
tgactcagctcttagcatga

SEQ ID NO: 15542 - RNA, 20 nt, synthetic construct
  misc_feature 1..20: note = antisense sequence
  source 1..20: mol_type = other RNA
tgtgactcagctcttagcat

SEQ ID NO: 15543 - RNA, 20 nt, synthetic construct
  misc_feature 1..20: note = antisense sequence
  source 1..20: mol_type = other RNA
gtgtgactcagctcttagca

SEQ ID NO: 15544 - RNA, 20 nt, synthetic construct
  misc_feature 1..20: note = antisense sequence
  source 1..20: mol_type = other RNA
tgtgtgactcagctcttagc

SEQ ID NO: 15545 - RNA, 20 nt, synthetic construct
  misc_feature 1..20: note = antisense sequence
  source 1..20: mol_type = other RNA
ttgtgtgactcagctcttag

SEQ ID NO: 15546 - RNA, 20 nt, synthetic construct
  misc_feature 1..20: note = antisense sequence
  source 1..20: mol_type = other RNA
gtatttgtgtgactcagctc

SEQ ID NO: 15547 - RNA, 20 nt, synthetic construct
  misc_feature 1..20: note = antisense sequence
  source 1..20: mol_type = other RNA
aggtatttgtgtgactcagc

SEQ ID NO: 15548 - RNA, 20 nt, synthetic construct
  misc_feature 1..20: note = antisense sequence
  source 1..20: mol_type = other RNA
taggtatttgtgtgactcag

SEQ ID NO: 15549 - RNA, 20 nt, synthetic construct
  misc_feature 1..20: note = antisense sequence
  source 1..20: mol_type = other RNA
gctgccttggattataggta

SEQ ID NO: 15550 - RNA, 20 nt, synthetic construct
  misc_feature 1..20: note = antisense sequence
  source 1..20: mol_type = other RNA
tgctgccttggattataggt

SEQ ID NO: 15551 - RNA, 20 nt, synthetic construct
  misc_feature 1..20: note = antisense sequence
  source 1..20: mol_type = other RNA
cataagcagcaggacagaga

SEQ ID NO: 15552 - RNA, 20 nt, synthetic construct
  misc_feature 1..20: note = antisense sequence
  source 1..20: mol_type = other RNA
tcataagcagcaggacagag

SEQ ID NO: 15553 - RNA, 20 nt, synthetic construct
  misc_feature 1..20: note = antisense sequence
  source 1..20: mol_type = other RNA
ctcataagcagcaggacaga

SEQ ID NO: 15554 - RNA, 20 nt, synthetic construct
  misc_feature 1..20: note = antisense sequence
  source 1..20: mol_type = other RNA
agtggctcataagcagcagg

SEQ ID NO: 15555 - RNA, 20 nt, synthetic construct
  misc_feature 1..20: note = antisense sequence
  source 1..20: mol_type = other RNA
taaagtggctcataagcagc

SEQ ID NO: 15556 - RNA, 20 nt, synthetic construct
  misc_feature 1..20: note = antisense sequence
  source 1..20: mol_type = other RNA
ataaagtggctcataagcag

SEQ ID NO: 15557 - RNA, 20 nt, synthetic construct
  misc_feature 1..20: note = antisense sequence
  source 1..20: mol_type = other RNA
gtataaagtggctcataagc

SEQ ID NO: 15558 - RNA, 20 nt, synthetic construct
  misc_feature 1..20: note = antisense sequence
  source 1..20: mol_type = other RNA
ggctctgcttattcccaaat

SEQ ID NO: 15559 - RNA, 20 nt, synthetic construct
  misc_feature 1..20: note = antisense sequence
  source 1..20: mol_type = other RNA
atggctctgcttattcccaa

SEQ ID NO: 15560 - RNA, 20 nt, synthetic construct
  misc_feature 1..20: note = antisense sequence
  source 1..20: mol_type = other RNA
taatggctctgcttattccc

SEQ ID NO: 15561 - RNA, 20 nt, synthetic construct
  misc_feature 1..20: note = antisense sequence
  source 1..20: mol_type = other RNA
ttgtctcacagaatgggcat

SEQ ID NO: 15562 - RNA, 20 nt, synthetic construct
  misc_feature 1..20: note = antisense sequence
  source 1..20: mol_type = other RNA
attgtctcacagaatgggca

SEQ ID NO: 15563 - RNA, 20 nt, synthetic construct
  misc_feature 1..20: note = antisense sequence
  source 1..20: mol_type = other RNA
atattgtctcacagaatggg

SEQ ID NO: 15564 - RNA, 20 nt, synthetic construct
  misc_feature 1..20: note = antisense sequence
  source 1..20: mol_type = other RNA
catattgtctcacagaatgg

SEQ ID NO: 15565 - RNA, 20 nt, synthetic construct
  misc_feature 1..20: note = antisense sequence
  source 1..20: mol_type = other RNA
ccaagcacctaacatattgt

SEQ ID NO: 15566 - RNA, 20 nt, synthetic construct
  misc_feature 1..20: note = antisense sequence
  source 1..20: mol_type = other RNA
accaagcacctaacatattg

SEQ ID NO: 15567 - RNA, 20 nt, synthetic construct
  misc_feature 1..20: note = antisense sequence
  source 1..20: mol_type = other RNA
ctgaccaagcacctaacata

SEQ ID NO: 15568 - RNA, 20 nt, synthetic construct
  misc_feature 1..20: note = antisense sequence
  source 1..20: mol_type = other RNA
actgaccaagcacctaacat

SEQ ID NO: 15569 - RNA, 20 nt, synthetic construct
  misc_feature 1..20: note = antisense sequence
  source 1..20: mol_type = other RNA
aactgaccaagcacctaaca

SEQ ID NO: 15570 - RNA, 20 nt, synthetic construct
  misc_feature 1..20: note = antisense sequence
  source 1..20: mol_type = other RNA
caactgaccaagcacctaac

SEQ ID NO: 15571 - RNA, 20 nt, synthetic construct
  misc_feature 1..20: note = antisense sequence
  source 1..20: mol_type = other RNA
ccaactgaccaagcacctaa

SEQ ID NO: 15572 - RNA, 20 nt, synthetic construct
  misc_feature 1..20: note = antisense sequence
  source 1..20: mol_type = other RNA
caccaactgaccaagcacct

SEQ ID NO: 15573 - RNA, 20 nt, synthetic construct
  misc_feature 1..20: note = antisense sequence
  source 1..20: mol_type = other RNA
ccaccaactgaccaagcacc

SEQ ID NO: 15574 - RNA, 20 nt, synthetic construct
  misc_feature 1..20: note = antisense sequence
  source 1..20: mol_type = other RNA
ccctccaccaactgaccaag

SEQ ID NO: 15575 - RNA, 20 nt, synthetic construct
  misc_feature 1..20: note = antisense sequence
  source 1..20: mol_type = other RNA
cactgatacactttggtcaa

SEQ ID NO: 15576 - RNA, 20 nt, synthetic construct
  misc_feature 1..20: note = antisense sequence
  source 1..20: mol_type = other RNA
acactgatacactttggtca

SEQ ID NO: 15577 - RNA, 20 nt, synthetic construct
  misc_feature 1..20: note = antisense sequence
  source 1..20: mol_type = other RNA
ggacactgatacactttggt

SEQ ID NO: 15578 - RNA, 20 nt, synthetic construct
  misc_feature 1..20: note = antisense sequence
  source 1..20: mol_type = other RNA
tggacactgatacactttgg

SEQ ID NO: 15579 - RNA, 20 nt, synthetic construct
  misc_feature 1..20: note = antisense sequence
  source 1..20: mol_type = other RNA
tcttggacactgatacactt

SEQ ID NO: 15580 - RNA, 20 nt, synthetic construct
  misc_feature 1..20: note = antisense sequence
  source 1..20: mol_type = other RNA
ttcttggacactgatacact

SEQ ID NO: 15581 - RNA, 20 nt, synthetic construct
  misc_feature 1..20: note = antisense sequence
  source 1..20: mol_type = other RNA
gttcttggacactgatacac

SEQ ID NO: 15582 - RNA, 20 nt, synthetic construct
  misc_feature 1..20: note = antisense sequence
  source 1..20: mol_type = other RNA
tgttcttggacactgataca

SEQ ID NO: 15583 - RNA, 20 nt, synthetic construct
  misc_feature 1..20: note = antisense sequence
  source 1..20: mol_type = other RNA
ttgttcttggacactgatac

SEQ ID NO: 15584 - RNA, 20 nt, synthetic construct
  misc_feature 1..20: note = antisense sequence
  source 1..20: mol_type = other RNA
gattgttcttggacactgat

SEQ ID NO: 15585 - RNA, 20 nt, synthetic construct
  misc_feature 1..20: note = antisense sequence
  source 1..20: mol_type = other RNA
gaatgagattgttcttggac

SEQ ID NO: 15586 - RNA, 20 nt, synthetic construct
  misc_feature 1..20: note = antisense sequence
  source 1..20: mol_type = other RNA
ggccagagaatgagattgtt

SEQ ID NO: 15587 - RNA, 20 nt, synthetic construct
  misc_feature 1..20: note = antisense sequence
  source 1..20: mol_type = other RNA
taatgaacactggctctggg

SEQ ID NO: 15588 - RNA, 20 nt, synthetic construct
  misc_feature 1..20: note = antisense sequence
  source 1..20: mol_type = other RNA
agtaatgaacactggctctg

SEQ ID NO: 15589 - RNA, 20 nt, synthetic construct
  misc_feature 1..20: note = antisense sequence
  source 1..20: mol_type = other RNA
gagtaatgaacactggctct

SEQ ID NO: 15590 - RNA, 20 nt, synthetic construct
  misc_feature 1..20: note = antisense sequence
  source 1..20: mol_type = other RNA
cgagtaatgaacactggctc

SEQ ID NO: 15591 - RNA, 20 nt, synthetic construct
  misc_feature 1..20: note = antisense sequence
  source 1..20: mol_type = other RNA
aacgagtaatgaacactggc

SEQ ID NO: 15592 - RNA, 20 nt, synthetic construct
  misc_feature 1..20: note = antisense sequence
  source 1..20: mol_type = other RNA
taacgagtaatgaacactgg

SEQ ID NO: 15593 - RNA, 20 nt, synthetic construct
  misc_feature 1..20: note = antisense sequence
  source 1..20: mol_type = other RNA
cacatatacatacttcctcg

SEQ ID NO: 15594 - RNA, 20 nt, synthetic construct
  misc_feature 1..20: note = antisense sequence
  source 1..20: mol_type = other RNA
cagatgaggacttagtaaag

SEQ ID NO: 15595 - RNA, 20 nt, synthetic construct
  misc_feature 1..20: note = antisense sequence
  source 1..20: mol_type = other RNA
cacagatgaggacttagtaa

SEQ ID NO: 15596 - RNA, 20 nt, synthetic construct
  misc_feature 1..20: note = antisense sequence
  source 1..20: mol_type = other RNA
tcacagatgaggacttagta

SEQ ID NO: 15597 - RNA, 20 nt, synthetic construct
  misc_feature 1..20: note = antisense sequence
  source 1..20: mol_type = other RNA
tatcacagatgaggacttag

SEQ ID NO: 15598 - RNA, 20 nt, synthetic construct
  misc_feature 1..20: note = antisense sequence
  source 1..20: mol_type = other RNA
ccaggtgatgcttatttatc

SEQ ID NO: 15599 - RNA, 20 nt, synthetic construct
  misc_feature 1..20: note = antisense sequence
  source 1..20: mol_type = other RNA
ggtgcaggaatttctgtttt

SEQ ID NO: 15600 - RNA, 20 nt, synthetic construct
  misc_feature 1..20: note = antisense sequence
  source 1..20: mol_type = other RNA
gggtgcaggaatttctgttt

SEQ ID NO: 15601 - RNA, 20 nt, synthetic construct
  misc_feature 1..20: note = antisense sequence
  source 1..20: mol_type = other RNA
gcttcccttagaaatatgga

SEQ ID NO: 15602 - RNA, 20 nt, synthetic construct
  misc_feature 1..20: note = antisense sequence
  source 1..20: mol_type = other RNA
ggcttcccttagaaatatgg

SEQ ID NO: 15603 - RNA, 20 nt, synthetic construct
  misc_feature 1..20: note = antisense sequence
  source 1..20: mol_type = other RNA
actgggcttcccttagaaat

SEQ ID NO: 15604 - RNA, 20 nt, synthetic construct
  misc_feature 1..20: note = antisense sequence
  source 1..20: mol_type = other RNA
gttactgggcttcccttaga

SEQ ID NO: 15605 - RNA, 20 nt, synthetic construct
  misc_feature 1..20: note = antisense sequence
  source 1..20: mol_type = other RNA
tacaaaggttactgggcttc

SEQ ID NO: 15606 - RNA, 20 nt, synthetic construct
  misc_feature 1..20: note = antisense sequence
  source 1..20: mol_type = other RNA
atacaaaggttactgggctt

SEQ ID NO: 15607 - RNA, 20 nt, synthetic construct
  misc_feature 1..20: note = antisense sequence
  source 1..20: mol_type = other RNA
aatacaaaggttactgggct

SEQ ID NO: 15608 - RNA, 20 nt, synthetic construct
  misc_feature 1..20: note = antisense sequence
  source 1..20: mol_type = other RNA
aaatacaaaggttactgggc

SEQ ID NO: 15609 - RNA, 20 nt, synthetic construct
  misc_feature 1..20: note = antisense sequence
  source 1..20: mol_type = other RNA
agacttgacaatcacactga

SEQ ID NO: 15610 - RNA, 20 nt, synthetic construct
  misc_feature 1..20: note = antisense sequence
  source 1..20: mol_type = other RNA
tagacttgacaatcacactg

SEQ ID NO: 15611 - RNA, 20 nt, synthetic construct
  misc_feature 1..20: note = antisense sequence
  source 1..20: mol_type = other RNA
ctagacttgacaatcacact

SEQ ID NO: 15612 - RNA, 20 nt, synthetic construct
  misc_feature 1..20: note = antisense sequence
  source 1..20: mol_type = other RNA
actagacttgacaatcacac

SEQ ID NO: 15613 - RNA, 20 nt, synthetic construct
  misc_feature 1..20: note = antisense sequence
  source 1..20: mol_type = other RNA
cgactagacttgacaatcac

SEQ ID NO: 15614 - RNA, 20 nt, synthetic construct
  misc_feature 1..20: note = antisense sequence
  source 1..20: mol_type = other RNA
gcgactagacttgacaatca

SEQ ID NO: 15615 - RNA, 20 nt, synthetic construct
  misc_feature 1..20: note = antisense sequence
  source 1..20: mol_type = other RNA
tgcgactagacttgacaatc

SEQ ID NO: 15616 - RNA, 20 nt, synthetic construct
  misc_feature 1..20: note = antisense sequence
  source 1..20: mol_type = other RNA
tgtgcgactagacttgacaa

SEQ ID NO: 15617 - RNA, 20 nt, synthetic construct
  misc_feature 1..20: note = antisense sequence
  source 1..20: mol_type = other RNA
atgtgcgactagacttgaca

SEQ ID NO: 15618 - RNA, 20 nt, synthetic construct
  misc_feature 1..20: note = antisense sequence
  source 1..20: mol_type = other RNA
gatgtgcgactagacttgac

SEQ ID NO: 15619 - RNA, 20 nt, synthetic construct
  misc_feature 1..20: note = antisense sequence
  source 1..20: mol_type = other RNA
tgatgtgcgactagacttga

SEQ ID NO: 15620 - RNA, 20 nt, synthetic construct
  misc_feature 1..20: note = antisense sequence
  source 1..20: mol_type = other RNA
ctgatgtgcgactagacttg

SEQ ID NO: 15621 - RNA, 20 nt, synthetic construct
  misc_feature 1..20: note = antisense sequence
  source 1..20: mol_type = other RNA
tctgatgtgcgactagactt

SEQ ID NO: 15622 - RNA, 20 nt, synthetic construct
  misc_feature 1..20: note = antisense sequence
  source 1..20: mol_type = other RNA
ttctgatgtgcgactagact

SEQ ID NO: 15623 - RNA, 20 nt, synthetic construct
  misc_feature 1..20: note = antisense sequence
  source 1..20: mol_type = other RNA
attctgatgtgcgactagac

SEQ ID NO: 15624 - RNA, 20 nt, synthetic construct
  misc_feature 1..20: note = antisense sequence
  source 1..20: mol_type = other RNA
gattctgatgtgcgactaga

SEQ ID NO: 15625 - RNA, 20 nt, synthetic construct
  misc_feature 1..20: note = antisense sequence
  source 1..20: mol_type = other RNA
tgattctgatgtgcgactag

SEQ ID NO: 15626 - RNA, 20 nt, synthetic construct
  misc_feature 1..20: note = antisense sequence
  source 1..20: mol_type = other RNA
ttgattctgatgtgcgacta

SEQ ID NO: 15627 - RNA, 20 nt, synthetic construct
  misc_feature 1..20: note = antisense sequence
  source 1..20: mol_type = other RNA
aagttgattctgatgtgcga

SEQ ID NO: 15628 - RNA, 20 nt, synthetic construct
  misc_feature 1..20: note = antisense sequence
  source 1..20: mol_type = other RNA
caagttgattctgatgtgcg

SEQ ID NO: 15629 - RNA, 20 nt, synthetic construct
  misc_feature 1..20: note = antisense sequence
  source 1..20: mol_type = other RNA
ccaagttgattctgatgtgc

SEQ ID NO: 15630 - RNA, 20 nt, synthetic construct
  misc_feature 1..20: note = antisense sequence
  source 1..20: mol_type = other RNA
tcccaagttgattctgatgt

SEQ ID NO: 15631 - RNA, 20 nt, synthetic construct
  misc_feature 1..20: note = antisense sequence
  source 1..20: mol_type = other RNA
agttcccaagttgattctga

SEQ ID NO: 15632 - RNA, 20 nt, synthetic construct
  misc_feature 1..20: note = antisense sequence
  source 1..20: mol_type = other RNA
aagttcccaagttgattctg

SEQ ID NO: 15633 - RNA, 20 nt, synthetic construct
  misc_feature 1..20: note = antisense sequence
  source 1..20: mol_type = other RNA
tggttgaaagttcccaagtt

SEQ ID NO: 15634 - RNA, 20 nt, synthetic construct
  misc_feature 1..20: note = antisense sequence
  source 1..20: mol_type = other RNA
tatggttgaaagttcccaag

SEQ ID NO: 15635 - RNA, 20 nt, synthetic construct
  misc_feature 1..20: note = antisense sequence
  source 1..20: mol_type = other RNA
gagatgattggtatggttga

SEQ ID NO: 15636 - RNA, 20 nt, synthetic construct
  misc_feature 1..20: note = antisense sequence
  source 1..20: mol_type = other RNA
agagatgattggtatggttg

SEQ ID NO: 15637 - RNA, 20 nt, synthetic construct
  misc_feature 1..20: note = antisense sequence
  source 1..20: mol_type = other RNA
cagagatgattggtatggtt

SEQ ID NO: 15638 - RNA, 20 nt, synthetic construct
  misc_feature 1..20: note = antisense sequence
  source 1..20: mol_type = other RNA
tgaagaaggagatcagagat

SEQ ID NO: 15639 - RNA, 20 nt, synthetic construct
  misc_feature 1..20: note = antisense sequence
  source 1..20: mol_type = other RNA
ggtgaagaaggagatcagag

SEQ ID NO: 15640 - RNA, 20 nt, synthetic construct
  misc_feature 1..20: note = antisense sequence
  source 1..20: mol_type = other RNA
cctggcaactaaataaaagc

SEQ ID NO: 15641 - RNA, 20 nt, synthetic construct
  misc_feature 1..20: note = antisense sequence
  source 1..20: mol_type = other RNA
gcacattcagacaaaccatt

SEQ ID NO: 15642 - RNA, 20 nt, synthetic construct
  misc_feature 1..20: note = antisense sequence
  source 1..20: mol_type = other RNA
ggcacattcagacaaaccat

SEQ ID NO: 15643 - RNA, 20 nt, synthetic construct
  misc_feature 1..20: note = antisense sequence
  source 1..20: mol_type = other RNA
acacggcacattcagacaaa

SEQ ID NO: 15644 - RNA, 20 nt, synthetic construct
  misc_feature 1..20: note = antisense sequence
  source 1..20: mol_type = other RNA
tacacggcacattcagacaa

SEQ ID NO: 15645 - RNA, 20 nt, synthetic construct
  misc_feature 1..20: note = antisense sequence
  source 1..20: mol_type = other RNA
atacacggcacattcagaca

SEQ ID NO: 15646 - RNA, 20 nt, synthetic construct
  misc_feature 1..20: note = antisense sequence
  source 1..20: mol_type = other RNA
aatacacggcacattcagac

SEQ ID NO: 15647 - RNA, 20 nt, synthetic construct
  misc_feature 1..20: note = antisense sequence
  source 1..20: mol_type = other RNA
aaatacacggcacattcaga

SEQ ID NO: 15648 - RNA, 20 nt, synthetic construct
  misc_feature 1..20: note = antisense sequence
  source 1..20: mol_type = other RNA
gaaaatacacggcacattca

SEQ ID NO: 15649 - RNA, 20 nt, synthetic construct
  misc_feature 1..20: note = antisense sequence
  source 1..20: mol_type = other RNA
agaaaatacacggcacattc

SEQ ID NO: 15650 - RNA, 20 nt, synthetic construct
  misc_feature 1..20: note = antisense sequence
  source 1..20: mol_type = other RNA
ctagaaaatacacggcacat

SEQ ID NO: 15651 - RNA, 20 nt, synthetic construct
  misc_feature 1..20: note = antisense sequence
  source 1..20: mol_type = other RNA
actagaaaatacacggcaca

SEQ ID NO: 15652 - RNA, 20 nt, synthetic construct
  misc_feature 1..20: note = antisense sequence
  source 1..20: mol_type = other RNA
cactagaaaatacacggcac

SEQ ID NO: 15653 - RNA, 20 nt, synthetic construct
  misc_feature 1..20: note = antisense sequence
  source 1..20: mol_type = other RNA
tcactagaaaatacacggca

SEQ ID NO: 15654 - RNA, 20 nt, synthetic construct
  misc_feature 1..20: note = antisense sequence
  source 1..20: mol_type = other RNA
ctgtcactagaaaatacacg

SEQ ID NO: 15655 - RNA, 20 nt, synthetic construct
  misc_feature 1..20: note = antisense sequence
  source 1..20: mol_type = other RNA
gctgtcactagaaaatacac

SEQ ID NO: 15656 - RNA, 20 nt, synthetic construct
  misc_feature 1..20: note = antisense sequence
  source 1..20: mol_type = other RNA
cgctgtcactagaaaataca

SEQ ID NO: 15657 - RNA, 20 nt, synthetic construct
  misc_feature 1..20: note = antisense sequence
  source 1..20: mol_type = other RNA
tcgctgtcactagaaaatac

SEQ ID NO: 15658 - RNA, 20 nt, synthetic construct
  misc_feature 1..20: note = antisense sequence
  source 1..20: mol_type = other RNA
cttcgctgtcactagaaaat

SEQ ID NO: 15659 - RNA, 20 nt, synthetic construct
  misc_feature 1..20: note = antisense sequence
  source 1..20: mol_type = other RNA
tcttcgctgtcactagaaaa

SEQ ID NO: 15660 - RNA, 20 nt, synthetic construct
  misc_feature 1..20: note = antisense sequence
  source 1..20: mol_type = other RNA
ggttcttcgctgtcactaga

SEQ ID NO: 15661 - RNA, 20 nt, synthetic construct
  misc_feature 1..20: note = antisense sequence
  source 1..20: mol_type = other RNA
aggttcttcgctgtcactag

SEQ ID NO: 15662 - RNA, 20 nt, synthetic construct
  misc_feature 1..20: note = antisense sequence
  source 1..20: mol_type = other RNA
gaggttcttcgctgtcacta

SEQ ID NO: 15663 - RNA, 20 nt, synthetic construct
  misc_feature 1..20: note = antisense sequence
  source 1..20: mol_type = other RNA
ggaggttcttcgctgtcact

SEQ ID NO: 15664 - RNA, 20 nt, synthetic construct
  misc_feature 1..20: note = antisense sequence
  source 1..20: mol_type = other RNA
aggaggttcttcgctgtcac

SEQ ID NO: 15665 - RNA, 20 nt, synthetic construct
  misc_feature 1..20: note = antisense sequence
  source 1..20: mol_type = other RNA
caggaggttcttcgctgtca

SEQ ID NO: 15666 - RNA, 20 nt, synthetic construct
  misc_feature 1..20: note = antisense sequence
  source 1..20: mol_type = other RNA
tcaggaggttcttcgctgtc

SEQ ID NO: 15667 - RNA, 20 nt, synthetic construct
  misc_feature 1..20: note = antisense sequence
  source 1..20: mol_type = other RNA
ttcaggaggttcttcgctgt

SEQ ID NO: 15668 - RNA, 20 nt, synthetic construct
  misc_feature 1..20: note = antisense sequence
  source 1..20: mol_type = other RNA
tttcaggaggttcttcgctg

SEQ ID NO: 15669 - RNA, 20 nt, synthetic construct
  misc_feature 1..20: note = antisense sequence
  source 1..20: mol_type = other RNA
gtttcaggaggttcttcgct

SEQ ID NO: 15670 - RNA, 20 nt, synthetic construct
  misc_feature 1..20: note = antisense sequence
  source 1..20: mol_type = other RNA
ctgtaaaactgtagtccaac

SEQ ID NO: 15671 - RNA, 20 nt, synthetic construct
  misc_feature 1..20: note = antisense sequence
  source 1..20: mol_type = other RNA
ttctcctacctgtaaaactg

SEQ ID NO: 15672 - RNA, 20 nt, synthetic construct
  misc_feature 1..20: note = antisense sequence
  source 1..20: mol_type = other RNA
gttaatagaaaggcatccac

SEQ ID NO: 15673 - RNA, 20 nt, synthetic construct
  misc_feature 1..20: note = antisense sequence
  source 1..20: mol_type = other RNA
ggttaatagaaaggcatcca

SEQ ID NO: 15674 - RNA, 20 nt, synthetic construct
  misc_feature 1..20: note = antisense sequence
  source 1..20: mol_type = other RNA
gggttaatagaaaggcatcc

SEQ ID NO: 15675 - RNA, 20 nt, synthetic construct
  misc_feature 1..20: note = antisense sequence
  source 1..20: mol_type = other RNA
tgggttaatagaaaggcatc

SEQ ID NO: 15676 - RNA, 20 nt, synthetic construct
  misc_feature 1..20: note = antisense sequence
  source 1..20: mol_type = other RNA
ctgggttaatagaaaggcat

SEQ ID NO: 15677 - RNA, 20 nt, synthetic construct
  misc_feature 1..20: note = antisense sequence
  source 1..20: mol_type = other RNA
actgggttaatagaaaggca

SEQ ID NO: 15678 - RNA, 20 nt, synthetic construct
  misc_feature 1..20: note = antisense sequence
  source 1..20: mol_type = other RNA
cactgggttaatagaaaggc

SEQ ID NO: 15679 - RNA, 20 nt, synthetic construct
  misc_feature 1..20: note = antisense sequence
  source 1..20: mol_type = other RNA
ccactgggttaatagaaagg

SEQ ID NO: 15680 - RNA, 20 nt, synthetic construct
  misc_feature 1..20: note = antisense sequence
  source 1..20: mol_type = other RNA
cagagaatttgcctaacaag

SEQ ID NO: 15681 - RNA, 20 nt, synthetic construct
  misc_feature 1..20: note = antisense sequence
  source 1..20: mol_type = other RNA
gccagagaatttgcctaaca

SEQ ID NO: 15682 - RNA, 20 nt, synthetic construct
  misc_feature 1..20: note = antisense sequence
  source 1..20: mol_type = other RNA
ggccagagaatttgcctaac

SEQ ID NO: 15683 - RNA, 20 nt, synthetic construct
  misc_feature 1..20: note = antisense sequence
  source 1..20: mol_type = other RNA
gggccagagaatttgcctaa

SEQ ID NO: 15684 - RNA, 20 nt, synthetic construct
  misc_feature 1..20: note = antisense sequence
  source 1..20: mol_type = other RNA
atcctccgagtttctgattt

SEQ ID NO: 15685 - RNA, 20 nt, synthetic construct
  misc_feature 1..20: note = antisense sequence
  source 1..20: mol_type = other RNA
catcctccgagtttctgatt

SEQ ID NO: 15686 - RNA, 20 nt, synthetic construct
  misc_feature 1..20: note = antisense sequence
  source 1..20: mol_type = other RNA
ccatcctccgagtttctgat

SEQ ID NO: 15687 - RNA, 20 nt, synthetic construct
  misc_feature 1..20: note = antisense sequence
  source 1..20: mol_type = other RNA
cccatcctccgagtttctga

SEQ ID NO: 15688 - RNA, 20 nt, synthetic construct
  misc_feature 1..20: note = antisense sequence
  source 1..20: mol_type = other RNA
ctaacacctaacactttggg

SEQ ID NO: 15689 - RNA, 20 nt, synthetic construct
  misc_feature 1..20: note = antisense sequence
  source 1..20: mol_type = other RNA
actaacacctaacactttgg

SEQ ID NO: 15690 - RNA, 20 nt, synthetic construct
  misc_feature 1..20: note = antisense sequence
  source 1..20: mol_type = other RNA
cactaacacctaacactttg

SEQ ID NO: 15691 - RNA, 20 nt, synthetic construct
  misc_feature 1..20: note = antisense sequence
  source 1..20: mol_type = other RNA
ggtatcactaacacctaaca

SEQ ID NO: 15692 - RNA, 20 nt, synthetic construct
  misc_feature 1..20: note = antisense sequence
  source 1..20: mol_type = other RNA
cggtatcactaacacctaac

SEQ ID NO: 15693 - RNA, 20 nt, synthetic construct
  misc_feature 1..20: note = antisense sequence
  source 1..20: mol_type = other RNA
ccggtatcactaacacctaa

SEQ ID NO: 15694 - RNA, 20 nt, synthetic construct
  misc_feature 1..20: note = antisense sequence
  source 1..20: mol_type = other RNA
atccggtatcactaacacct

SEQ ID NO: 15695 - RNA, 20 nt, synthetic construct
  misc_feature 1..20: note = antisense sequence
  source 1..20: mol_type = other RNA
aatccggtatcactaacacc

SEQ ID NO: 15696 - RNA, 20 nt, synthetic construct
  misc_feature 1..20: note = antisense sequence
  source 1..20: mol_type = other RNA
caatccggtatcactaacac

SEQ ID NO: 15697 - RNA, 20 nt, synthetic construct
  misc_feature 1..20: note = antisense sequence
  source 1..20: mol_type = other RNA
gcaatccggtatcactaaca

SEQ ID NO: 15698 - RNA, 20 nt, synthetic construct
  misc_feature 1..20: note = antisense sequence
  source 1..20: mol_type = other RNA
tgcaatccggtatcactaac

SEQ ID NO: 15699 - RNA, 20 nt, synthetic construct
  misc_feature 1..20: note = antisense sequence
  source 1..20: mol_type = other RNA
atgcaatccggtatcactaa

SEQ ID NO: 15700 - RNA, 20 nt, synthetic construct
  misc_feature 1..20: note = antisense sequence
  source 1..20: mol_type = other RNA
aatgcaatccggtatcacta

SEQ ID NO: 15701 - RNA, 20 nt, synthetic construct
  misc_feature 1..20: note = antisense sequence
  source 1..20: mol_type = other RNA
aaatgcaatccggtatcact

SEQ ID NO: 15702 - RNA, 20 nt, synthetic construct
  misc_feature 1..20: note = antisense sequence
  source 1..20: mol_type = other RNA
caaatgcaatccggtatcac

SEQ ID NO: 15703 - RNA, 20 nt, synthetic construct
  misc_feature 1..20: note = antisense sequence
  source 1..20: mol_type = other RNA
gcaaatgcaatccggtatca

SEQ ID NO: 15704 - RNA, 20 nt, synthetic construct
  misc_feature 1..20: note = antisense sequence
  source 1..20: mol_type = other RNA
agcaaatgcaatccggtatc

SEQ ID NO: 15705 - RNA, 20 nt, synthetic construct
  misc_feature 1..20: note = antisense sequence
  source 1..20: mol_type = other RNA
cagcaaatgcaatccggtat

SEQ ID NO: 15706 - RNA, 20 nt, synthetic construct
  misc_feature 1..20: note = antisense sequence
  source 1..20: mol_type = other RNA
gacagcaaatgcaatccggt

SEQ ID NO: 15707 - RNA, 20 nt, synthetic construct
  misc_feature 1..20: note = antisense sequence
  source 1..20: mol_type = other RNA
ggacagcaaatgcaatccgg

SEQ ID NO: 15708 - RNA, 20 nt, synthetic construct
  misc_feature 1..20: note = antisense sequence
  source 1..20: mol_type = other RNA
taagactggacagcaaatgc

SEQ ID NO: 15709 - RNA, 20 nt, synthetic construct
  misc_feature 1..20: note = antisense sequence
  source 1..20: mol_type = other RNA
ttaagactggacagcaaatg

SEQ ID NO: 15710 - RNA, 20 nt, synthetic construct
  misc_feature 1..20: note = antisense sequence
  source 1..20: mol_type = other RNA
gggaattaagactggacagc

SEQ ID NO: 15711 - RNA, 20 nt, synthetic construct
  misc_feature 1..20: note = antisense sequence
  source 1..20: mol_type = other RNA
cgggaattaagactggacag

SEQ ID NO: 15712 - RNA, 20 nt, synthetic construct
  misc_feature 1..20: note = antisense sequence
  source 1..20: mol_type = other RNA
tcgggaattaagactggaca

SEQ ID NO: 15713 - RNA, 20 nt, synthetic construct
  misc_feature 1..20: note = antisense sequence
  source 1..20: mol_type = other RNA
ttcgggaattaagactggac

SEQ ID NO: 15714 - RNA, 20 nt, synthetic construct
  misc_feature 1..20: note = antisense sequence
  source 1..20: mol_type = other RNA
attcgggaattaagactgga

SEQ ID NO: 15715 - RNA, 20 nt, synthetic construct
  misc_feature 1..20: note = antisense sequence
  source 1..20: mol_type = other RNA
cattcgggaattaagactgg

SEQ ID NO: 15716 - RNA, 20 nt, synthetic construct
  misc_feature 1..20: note = antisense sequence
  source 1..20: mol_type = other RNA
gcattcgggaattaagactg

SEQ ID NO: 15717 - RNA, 20 nt, synthetic construct
  misc_feature 1..20: note = antisense sequence
  source 1..20: mol_type = other RNA
tgcattcgggaattaagact

SEQ ID NO: 15718 - RNA, 20 nt, synthetic construct
  misc_feature 1..20: note = antisense sequence
  source 1..20: mol_type = other RNA
acttgcattcgggaattaag

SEQ ID NO: 15719 - RNA, 20 nt, synthetic construct
  misc_feature 1..20: note = antisense sequence
  source 1..20: mol_type = other RNA
caacttgcattcgggaatta

SEQ ID NO: 15720 - RNA, 20 nt, synthetic construct
  misc_feature 1..20: note = antisense sequence
  source 1..20: mol_type = other RNA
tcaacttgcattcgggaatt

SEQ ID NO: 15721 - RNA, 20 nt, synthetic construct
  misc_feature 1..20: note = antisense sequence
  source 1..20: mol_type = other RNA
ttcaacttgcattcgggaat

SEQ ID NO: 15722 - RNA, 20 nt, synthetic construct
  misc_feature 1..20: note = antisense sequence
  source 1..20: mol_type = other RNA
cttcaacttgcattcgggaa

SEQ ID NO: 15723 - RNA, 20 nt, synthetic construct
  misc_feature 1..20: note = antisense sequence
  source 1..20: mol_type = other RNA
tcttcaacttgcattcggga

SEQ ID NO: 15724 - RNA, 20 nt, synthetic construct
  misc_feature 1..20: note = antisense sequence
  source 1..20: mol_type = other RNA
gtcttcaacttgcattcggg

SEQ ID NO: 15725 - RNA, 20 nt, synthetic construct
  misc_feature 1..20: note = antisense sequence
  source 1..20: mol_type = other RNA
ggtcttcaacttgcattcgg

SEQ ID NO: 15726 - RNA, 20 nt, synthetic construct
  misc_feature 1..20: note = antisense sequence
  source 1..20: mol_type = other RNA
gggtcttcaacttgcattcg

SEQ ID NO: 15727 - RNA, 20 nt, synthetic construct
  misc_feature 1..20: note = antisense sequence
  source 1..20: mol_type = other RNA
tgggtcttcaacttgcattc

SEQ ID NO: 15728 - RNA, 20 nt, synthetic construct
  misc_feature 1..20: note = antisense sequence
  source 1..20: mol_type = other RNA
ctgggtcttcaacttgcatt

SEQ ID NO: 15729 - RNA, 20 nt, synthetic construct
  misc_feature 1..20: note = antisense sequence
  source 1..20: mol_type = other RNA
cttctgggtcttcaacttgc

SEQ ID NO: 15730 - RNA, 20 nt, synthetic construct
  misc_feature 1..20: note = antisense sequence
  source 1..20: mol_type = other RNA
acttctgggtcttcaacttg

SEQ ID NO: 15731 - RNA, 20 nt, synthetic construct
  misc_feature 1..20: note = antisense sequence
  source 1..20: mol_type = other RNA
gacttctgggtcttcaactt

SEQ ID NO: 15732 - RNA, 20 nt, synthetic construct
  misc_feature 1..20: note = antisense sequence
  source 1..20: mol_type = other RNA
ggacttctgggtcttcaact

SEQ ID NO: 15733 - RNA, 20 nt, synthetic construct
  misc_feature 1..20: note = antisense sequence
  source 1..20: mol_type = other RNA
aaggacttctgggtcttcaa

SEQ ID NO: 15734 - RNA, 20 nt, synthetic construct
  misc_feature 1..20: note = antisense sequence
  source 1..20: mol_type = other RNA
tgcgaaggacttctgggtct

SEQ ID NO: 15735 - RNA, 20 nt, synthetic construct
  misc_feature 1..20: note = antisense sequence
  source 1..20: mol_type = other RNA
ttgcgaaggacttctgggtc

SEQ ID NO: 15736 - RNA, 20 nt, synthetic construct
  misc_feature 1..20: note = antisense sequence
  source 1..20: mol_type = other RNA
tttgcgaaggacttctgggt

SEQ ID NO: 15737 - RNA, 20 nt, synthetic construct
  misc_feature 1..20: note = antisense sequence
  source 1..20: mol_type = other RNA
ttttgcgaaggacttctggg

SEQ ID NO: 15738 - RNA, 20 nt, synthetic construct
  misc_feature 1..20: note = antisense sequence
  source 1..20: mol_type = other RNA
gttttgcgaaggacttctgg

SEQ ID NO: 15739 - RNA, 20 nt, synthetic construct
  misc_feature 1..20: note = antisense sequence
  source 1..20: mol_type = other RNA
tgttttgcgaaggacttctg

SEQ ID NO: 15740 - RNA, 20 nt, synthetic construct
  misc_feature 1..20: note = antisense sequence
  source 1..20: mol_type = other RNA
gtgttttgcgaaggacttct

SEQ ID NO: 15741 - RNA, 20 nt, synthetic construct
  misc_feature 1..20: note = antisense sequence
  source 1..20: mol_type = other RNA
cgtgttttgcgaaggacttc

SEQ ID NO: 15742 - RNA, 20 nt, synthetic construct
  misc_feature 1..20: note = antisense sequence
  source 1..20: mol_type = other RNA
tcgtgttttgcgaaggactt

SEQ ID NO: 15743 - RNA, 20 nt, synthetic construct
  misc_feature 1..20: note = antisense sequence
  source 1..20: mol_type = other RNA
atcgtgttttgcgaaggact

SEQ ID NO: 15744 - RNA, 20 nt, synthetic construct
  misc_feature 1..20: note = antisense sequence
  source 1..20: mol_type = other RNA
tatcgtgttttgcgaaggac

SEQ ID NO: 15745 - RNA, 20 nt, synthetic construct
  misc_feature 1..20: note = antisense sequence
  source 1..20: mol_type = other RNA
atatcgtgttttgcgaagga

SEQ ID NO: 15746 - RNA, 20 nt, synthetic construct
  misc_feature 1..20: note = antisense sequence
  source 1..20: mol_type = other RNA
aatatcgtgttttgcgaagg

SEQ ID NO: 15747 - RNA, 20 nt, synthetic construct
  misc_feature 1..20: note = antisense sequence
  source 1..20: mol_type = other RNA
accaagaaatatgctggcgg

SEQ ID NO: 15748 - RNA, 20 nt, synthetic construct
  misc_feature 1..20: note = antisense sequence
  source 1..20: mol_type = other RNA
gaccaagaaatatgctggcg

SEQ ID NO: 15749 - RNA, 20 nt, synthetic construct
  misc_feature 1..20: note = antisense sequence
  source 1..20: mol_type = other RNA
tgaccaagaaatatgctggc

SEQ ID NO: 15750 - RNA, 20 nt, synthetic construct
  misc_feature 1..20: note = antisense sequence
  source 1..20: mol_type = other RNA
atgaccaagaaatatgctgg

SEQ ID NO: 15751 - RNA, 20 nt, synthetic construct
  misc_feature 1..20: note = antisense sequence
  source 1..20: mol_type = other RNA
gatgaccaagaaatatgctg

SEQ ID NO: 15752 - RNA, 20 nt, synthetic construct
  misc_feature 1..20: note = antisense sequence
  source 1..20: mol_type = other RNA
cgatgaccaagaaatatgct

SEQ ID NO: 15753 - RNA, 20 nt, synthetic construct
  misc_feature 1..20: note = antisense sequence
  source 1..20: mol_type = other RNA
gagaacgatgaccaagaaat

SEQ ID NO: 15754 - RNA, 20 nt, synthetic construct
  misc_feature 1..20: note = antisense sequence
  source 1..20: mol_type = other RNA
tgagaacgatgaccaagaaa

SEQ ID NO: 15755 - RNA, 20 nt, synthetic construct
  misc_feature 1..20: note = antisense sequence
  source 1..20: mol_type = other RNA
ggatgagaacgatgaccaag

SEQ ID NO: 15756 - RNA, 20 nt, synthetic construct
  misc_feature 1..20: note = antisense sequence
  source 1..20: mol_type = other RNA
aggatgagaacgatgaccaa

SEQ ID NO: 15757 - RNA, 20 nt, synthetic construct
  misc_feature 1..20: note = antisense sequence
  source 1..20: mol_type = other RNA
caggatgagaacgatgacca

SEQ ID NO: 15758 - RNA, 20 nt, synthetic construct
  misc_feature 1..20: note = antisense sequence
  source 1..20: mol_type = other RNA
acaggatgagaacgatgacc

SEQ ID NO: 15759 - RNA, 20 nt, synthetic construct
  misc_feature 1..20: note = antisense sequence
  source 1..20: mol_type = other RNA
ttccacaggatgagaacgat

SEQ ID NO: 15760 - RNA, 20 nt, synthetic construct
  misc_feature 1..20: note = antisense sequence
  source 1..20: mol_type = other RNA
cttccacaggatgagaacga

SEQ ID NO: 15761 - RNA, 20 nt, synthetic construct
  misc_feature 1..20: note = antisense sequence
  source 1..20: mol_type = other RNA
gcttccacaggatgagaacg

SEQ ID NO: 15762 - RNA, 20 nt, synthetic construct
  misc_feature 1..20: note = antisense sequence
  source 1..20: mol_type = other RNA
agcttccacaggatgagaac

SEQ ID NO: 15763 - RNA, 20 nt, synthetic construct
  misc_feature 1..20: note = antisense sequence
  source 1..20: mol_type = other RNA
cagcttccacaggatgagaa

SEQ ID NO: 15764 - RNA, 20 nt, synthetic construct
  misc_feature 1..20: note = antisense sequence
  source 1..20: mol_type = other RNA
gtgtccagattgagaagact

SEQ ID NO: 15765 - RNA, 20 nt, synthetic construct
  misc_feature 1..20: note = antisense sequence
  source 1..20: mol_type = other RNA
tgtgtccagattgagaagac

SEQ ID NO: 15766 - RNA, 20 nt, synthetic construct
  misc_feature 1..20: note = antisense sequence
  source 1..20: mol_type = other RNA
gtgtgtccagattgagaaga

SEQ ID NO: 15767 - RNA, 20 nt, synthetic construct
  misc_feature 1..20: note = antisense sequence
  source 1..20: mol_type = other RNA
tgtgtgtccagattgagaag

SEQ ID NO: 15768 - RNA, 20 nt, synthetic construct
  misc_feature 1..20: note = antisense sequence
  source 1..20: mol_type = other RNA
ggtttatgaatggtggaaga

SEQ ID NO: 15769 - RNA, 20 nt, synthetic construct
  misc_feature 1..20: note = antisense sequence
  source 1..20: mol_type = other RNA
tggtttatgaatggtggaag

SEQ ID NO: 15770 - RNA, 20 nt, synthetic construct
  misc_feature 1..20: note = antisense sequence
  source 1..20: mol_type = other RNA
gaatggtttatgaatggtgg

SEQ ID NO: 15771 - RNA, 20 nt, synthetic construct
  misc_feature 1..20: note = antisense sequence
  source 1..20: mol_type = other RNA
gtgttgggatagataagaag

SEQ ID NO: 15772 - RNA, 20 nt, synthetic construct
  misc_feature 1..20: note = antisense sequence
  source 1..20: mol_type = other RNA
ggtttgtgttgggatagata

SEQ ID NO: 15773 - RNA, 20 nt, synthetic construct
  misc_feature 1..20: note = antisense sequence
  source 1..20: mol_type = other RNA
tggtttgtgttgggatagat

SEQ ID NO: 15774 - RNA, 20 nt, synthetic construct
  misc_feature 1..20: note = antisense sequence
  source 1..20: mol_type = other RNA
atggtttgtgttgggataga

SEQ ID NO: 15775 - RNA, 20 nt, synthetic construct
  misc_feature 1..20: note = antisense sequence
  source 1..20: mol_type = other RNA
gtttgtcaacatggtttgtg

SEQ ID NO: 15776 - RNA, 20 nt, synthetic construct
  misc_feature 1..20: note = antisense sequence
  source 1..20: mol_type = other RNA
ggaaagtttgtcaacatggt

SEQ ID NO: 15777 - RNA, 20 nt, synthetic construct
  misc_feature 1..20: note = antisense sequence
  source 1..20: mol_type = other RNA
agggaaagtttgtcaacatg

SEQ ID NO: 15778 - RNA, 20 nt, synthetic construct
  misc_feature 1..20: note = antisense sequence
  source 1..20: mol_type = other RNA
gagggaaagtttgtcaacat

SEQ ID NO: 15779 - RNA, 20 nt, synthetic construct
  misc_feature 1..20: note = antisense sequence
  source 1..20: mol_type = other RNA
agagggaaagtttgtcaaca

SEQ ID NO: 15780 - RNA, 20 nt, synthetic construct
  misc_feature 1..20: note = antisense sequence
  source 1..20: mol_type = other RNA
cttgccactgattcttatcc

SEQ ID NO: 15781 - RNA, 20 nt, synthetic construct
  misc_feature 1..20: note = antisense sequence
  source 1..20: mol_type = other RNA
acttgccactgattcttatc

SEQ ID NO: 15782 - RNA, 20 nt, synthetic construct
  misc_feature 1..20: note = antisense sequence
  source 1..20: mol_type = other RNA
ctacttgccactgattctta

SEQ ID NO: 15783 - RNA, 20 nt, synthetic construct
  misc_feature 1..20: note = antisense sequence
  source 1..20: mol_type = other RNA
cctacttgccactgattctt

SEQ ID NO: 15784 - RNA, 20 nt, synthetic construct
  misc_feature 1..20: note = antisense sequence
  source 1..20: mol_type = other RNA
acctacttgccactgattct

SEQ ID NO: 15785 - RNA, 20 nt, synthetic construct
  misc_feature 1..20: note = antisense sequence
  source 1..20: mol_type = other RNA
aacctacttgccactgattc

SEQ ID NO: 15786 - RNA, 20 nt, synthetic construct
  misc_feature 1..20: note = antisense sequence
  source 1..20: mol_type = other RNA
aaacctacttgccactgatt

SEQ ID NO: 15787 - RNA, 20 nt, synthetic construct
  misc_feature 1..20: note = antisense sequence
  source 1..20: mol_type = other RNA
ataaacctacttgccactga

SEQ ID NO: 15788 - RNA, 20 nt, synthetic construct
  misc_feature 1..20: note = antisense sequence
  source 1..20: mol_type = other RNA
aataaacctacttgccactg

SEQ ID NO: 15789 - RNA, 20 nt, synthetic construct
  misc_feature 1..20: note = antisense sequence
  source 1..20: mol_type = other RNA
gaataaacctacttgccact

SEQ ID NO: 15790 - RNA, 20 nt, synthetic construct
  misc_feature 1..20: note = antisense sequence
  source 1..20: mol_type = other RNA
agaataaacctacttgccac

SEQ ID NO: 15791 - RNA, 20 nt, synthetic construct
  misc_feature 1..20: note = antisense sequence
  source 1..20: mol_type = other RNA
cagaacacaaaggctcaata

SEQ ID NO: 15792 - RNA, 20 nt, synthetic construct
  misc_feature 1..20: note = antisense sequence
  source 1..20: mol_type = other RNA
aagacagaacacaaaggctc

SEQ ID NO: 15793 - RNA, 20 nt, synthetic construct
  misc_feature 1..20: note = antisense sequence
  source 1..20: mol_type = other RNA
cataagacagaacacaaagg

SEQ ID NO: 15794 - RNA, 20 nt, synthetic construct
  misc_feature 1..20: note = antisense sequence
  source 1..20: mol_type = other RNA
ggatcacataagacagaaca

SEQ ID NO: 15795 - RNA, 20 nt, synthetic construct
  misc_feature 1..20: note = antisense sequence
  source 1..20: mol_type = other RNA
aggatcacataagacagaac

SEQ ID NO: 15796 - RNA, 20 nt, synthetic construct
  misc_feature 1..20: note = antisense sequence
  source 1..20: mol_type = other RNA
cctcaaattcttcaactgga

SEQ ID NO: 15797 - RNA, 20 nt, synthetic construct
  misc_feature 1..20: note = antisense sequence
  source 1..20: mol_type = other RNA
acctcaaattcttcaactgg

SEQ ID NO: 15798 - RNA, 20 nt, synthetic construct
  misc_feature 1..20: note = antisense sequence
  source 1..20: mol_type = other RNA
tgggtaaattagcctctctg

SEQ ID NO: 15799 - RNA, 20 nt, synthetic construct
  misc_feature 1..20: note = antisense sequence
  source 1..20: mol_type = other RNA
acgtctccaagcgccttata

SEQ ID NO: 15800 - RNA, 20 nt, synthetic construct
  misc_feature 1..20: note = antisense sequence
  source 1..20: mol_type = other RNA
aacgtctccaagcgccttat

SEQ ID NO: 15801 - RNA, 20 nt, synthetic construct
  misc_feature 1..20: note = antisense sequence
  source 1..20: mol_type = other RNA
caacgtctccaagcgcctta

SEQ ID NO: 15802 - RNA, 20 nt, synthetic construct
  misc_feature 1..20: note = antisense sequence
  source 1..20: mol_type = other RNA
acaacgtctccaagcgcctt

SEQ ID NO: 15803 - RNA, 20 nt, synthetic construct
  misc_feature 1..20: note = antisense sequence
  source 1..20: mol_type = other RNA
atcacaacgtctccaagcgc

SEQ ID NO: 15804 - RNA, 20 nt, synthetic construct
  misc_feature 1..20: note = antisense sequence
  source 1..20: mol_type = other RNA
catcacaacgtctccaagcg

SEQ ID NO: 15805 - RNA, 20 nt, synthetic construct
  misc_feature 1..20: note = antisense sequence
  source 1..20: mol_type = other RNA
gcatcacaacgtctccaagc

SEQ ID NO: 15806 - RNA, 20 nt, synthetic construct
  misc_feature 1..20: note = antisense sequence
  source 1..20: mol_type = other RNA
tgcatcacaacgtctccaag

SEQ ID NO: 15807 - RNA, 20 nt, synthetic construct
  misc_feature 1..20: note = antisense sequence
  source 1..20: mol_type = other RNA
ttgcatcacaacgtctccaa

SEQ ID NO: 15808 - RNA, 20 nt, synthetic construct
  misc_feature 1..20: note = antisense sequence
  source 1..20: mol_type = other RNA
cttgcatcacaacgtctcca

SEQ ID NO: 15809 - RNA, 20 nt, synthetic construct
  misc_feature 1..20: note = antisense sequence
  source 1..20: mol_type = other RNA
acttgcatcacaacgtctcc

SEQ ID NO: 15810 - RNA, 20 nt, synthetic construct
  misc_feature 1..20: note = antisense sequence
  source 1..20: mol_type = other RNA
tacttgcatcacaacgtctc

SEQ ID NO: 15811 - RNA, 20 nt, synthetic construct
  misc_feature 1..20: note = antisense sequence
  source 1..20: mol_type = other RNA
ttacttgcatcacaacgtct

SEQ ID NO: 15812 - RNA, 20 nt, synthetic construct
  misc_feature 1..20: note = antisense sequence
  source 1..20: mol_type = other RNA
attacttgcatcacaacgtc

SEQ ID NO: 15813 - RNA, 20 nt, synthetic construct
  misc_feature 1..20: note = antisense sequence
  source 1..20: mol_type = other RNA
gttccaattaccctgtttag

SEQ ID NO: 15814 - RNA, 20 nt, synthetic construct
  misc_feature 1..20: note = antisense sequence
  source 1..20: mol_type = other RNA
gtttgagacaatggatgttc

SEQ ID NO: 15815 - RNA, 20 nt, synthetic construct
  misc_feature 1..20: note = antisense sequence
  source 1..20: mol_type = other RNA
gagagagtgccatagataat

SEQ ID NO: 15816 - RNA, 20 nt, synthetic construct
  misc_feature 1..20: note = antisense sequence
  source 1..20: mol_type = other RNA
agagagagtgccatagataa

SEQ ID NO: 15817 - RNA, 20 nt, synthetic construct
  misc_feature 1..20: note = antisense sequence
  source 1..20: mol_type = other RNA
aagagagagtgccatagata

SEQ ID NO: 15818 - RNA, 20 nt, synthetic construct
  misc_feature 1..20: note = antisense sequence
  source 1..20: mol_type = other RNA
taaagagagagtgccataga

SEQ ID NO: 15819 - RNA, 20 nt, synthetic construct
  misc_feature 1..20: note = antisense sequence
  source 1..20: mol_type = other RNA
gtaaagagagagtgccatag

SEQ ID NO: 15820 - RNA, 20 nt, synthetic construct
  misc_feature 1..20: note = antisense sequence
  source 1..20: mol_type = other RNA
agtaaagagagagtgccata

SEQ ID NO: 15821 - RNA, 20 nt, synthetic construct
  misc_feature 1..20: note = antisense sequence
  source 1..20: mol_type = other RNA
tttagtaaagagagagtgcc

SEQ ID NO: 15822 - RNA, 20 nt, synthetic construct
  misc_feature 1..20: note = antisense sequence
  source 1..20: mol_type = other RNA
gtatgtcctataatcatgcc

SEQ ID NO: 15823 - RNA, 20 nt, synthetic construct
  misc_feature 1..20: note = antisense sequence
  source 1..20: mol_type = other RNA
tgcaccaatagaagtggata

SEQ ID NO: 15824 - RNA, 20 nt, synthetic construct
  misc_feature 1..20: note = antisense sequence
  source 1..20: mol_type = other RNA
ttcagtcaagggaagacaaa

SEQ ID NO: 15825 - RNA, 20 nt, synthetic construct
  misc_feature 1..20: note = antisense sequence
  source 1..20: mol_type = other RNA
cagcacttcagtcaagggaa

SEQ ID NO: 15826 - RNA, 20 nt, synthetic construct
  misc_feature 1..20: note = antisense sequence
  source 1..20: mol_type = other RNA
gcagcacttcagtcaaggga

SEQ ID NO: 15827 - RNA, 20 nt, synthetic construct
  misc_feature 1..20: note = antisense sequence
  source 1..20: mol_type = other RNA
agcagcacttcagtcaaggg

SEQ ID NO: 15828 - RNA, 20 nt, synthetic construct
  misc_feature 1..20: note = antisense sequence
  source 1..20: mol_type = other RNA
ttaagcagcacttcagtcaa

SEQ ID NO: 15829 - RNA, 20 nt, synthetic construct
  misc_feature 1..20: note = antisense sequence
  source 1..20: mol_type = other RNA
ttttaagcagcacttcagtc

SEQ ID NO: 15830 - RNA, 20 nt, synthetic construct
  misc_feature 1..20: note = antisense sequence
  source 1..20: mol_type = other RNA
cacagcttcatcatgttctt

SEQ ID NO: 15831 - RNA, 20 nt, synthetic construct
  misc_feature 1..20: note = antisense sequence
  source 1..20: mol_type = other RNA
acacagcttcatcatgttct

SEQ ID NO: 15832 - RNA, 20 nt, synthetic construct
  misc_feature 1..20: note = antisense sequence
  source 1..20: mol_type = other RNA
tctacacagcttcatcatgt

SEQ ID NO: 15833 - RNA, 20 nt, synthetic construct
  misc_feature 1..20: note = antisense sequence
  source 1..20: mol_type = other RNA
ctctacacagcttcatcatg

SEQ ID NO: 15834 - RNA, 20 nt, synthetic construct
  misc_feature 1..20: note = antisense sequence
  source 1..20: mol_type = other RNA
ttctctacacagcttcatca

SEQ ID NO: 15835 - RNA, 20 nt, synthetic construct
  misc_feature 1..20: note = antisense sequence
  source 1..20: mol_type = other RNA
cttctctacacagcttcatc

SEQ ID NO: 15836 - RNA, 20 nt, synthetic construct
  misc_feature 1..20: note = antisense sequence
  source 1..20: mol_type = other RNA
tcttctctacacagcttcat

SEQ ID NO: 15837 - RNA, 20 nt, synthetic construct
  misc_feature 1..20: note = antisense sequence
  source 1..20: mol_type = other RNA
aatcttctctacacagcttc

SEQ ID NO: 15838 - RNA, 20 nt, synthetic construct
  misc_feature 1..20: note = antisense sequence
  source 1..20: mol_type = other RNA
caatcttctctacacagctt

SEQ ID NO: 15839 - RNA, 20 nt, synthetic construct
  misc_feature 1..20: note = antisense sequence
  source 1..20: mol_type = other RNA
cactgatgcttatttgaccc

SEQ ID NO: 15840 - RNA, 20 nt, synthetic construct
  misc_feature 1..20: note = antisense sequence
  source 1..20: mol_type = other RNA
tcactgatgcttatttgacc

SEQ ID NO: 15841 - RNA, 20 nt, synthetic construct
  misc_feature 1..20: note = antisense sequence
  source 1..20: mol_type = other RNA
gttcaatagtcactgatgct

SEQ ID NO: 15842 - RNA, 20 nt, synthetic construct
  misc_feature 1..20: note = antisense sequence
  source 1..20: mol_type = other RNA
agttcaatagtcactgatgc

SEQ ID NO: 15843 - RNA, 20 nt, synthetic construct
  misc_feature 1..20: note = antisense sequence
  source 1..20: mol_type = other RNA
atctttgaggagagtgagaa

SEQ ID NO: 15844 - RNA, 20 nt, synthetic construct
  misc_feature 1..20: note = antisense sequence
  source 1..20: mol_type = other RNA
aatctttgaggagagtgaga

SEQ ID NO: 15845 - RNA, 20 nt, synthetic construct
  misc_feature 1..20: note = antisense sequence
  source 1..20: mol_type = other RNA
gtattcacttgcagagctta

SEQ ID NO: 15846 - RNA, 20 nt, synthetic construct
  misc_feature 1..20: note = antisense sequence
  source 1..20: mol_type = other RNA
tggtattcacttgcagagct

SEQ ID NO: 15847 - RNA, 20 nt, synthetic construct
  misc_feature 1..20: note = antisense sequence
  source 1..20: mol_type = other RNA
gtggtattcacttgcagagc

SEQ ID NO: 15848 - RNA, 20 nt, synthetic construct
  misc_feature 1..20: note = antisense sequence
  source 1..20: mol_type = other RNA
atgtggtattcacttgcaga

SEQ ID NO: 15849 - RNA, 20 nt, synthetic construct
  misc_feature 1..20: note = antisense sequence
  source 1..20: mol_type = other RNA
gactgtctcattggcagcaa

SEQ ID NO: 15850 - RNA, 20 nt, synthetic construct
  misc_feature 1..20: note = antisense sequence
  source 1..20: mol_type = other RNA
agggactgtctcattggcag

SEQ ID NO: 15851 - RNA, 20 nt, synthetic construct
  misc_feature 1..20: note = antisense sequence
  source 1..20: mol_type = other RNA
tcagggactgtctcattggc

SEQ ID NO: 15852 - RNA, 20 nt, synthetic construct
  misc_feature 1..20: note = antisense sequence
  source 1..20: mol_type = other RNA
aacttcagggactgtctcat

SEQ ID NO: 15853 - RNA, 20 nt, synthetic construct
  misc_feature 1..20: note = antisense sequence
  source 1..20: mol_type = other RNA
ataacttcagggactgtctc

SEQ ID NO: 15854 - RNA, 20 nt, synthetic construct
  misc_feature 1..20: note = antisense sequence
  source 1..20: mol_type = other RNA
tttccaatgtcctcagtaga

SEQ ID NO: 15855 - RNA, 20 nt, synthetic construct
  misc_feature 1..20: note = antisense sequence
  source 1..20: mol_type = other RNA
atttccaatgtcctcagtag

SEQ ID NO: 15856 - RNA, 20 nt, synthetic construct
  misc_feature 1..20: note = antisense sequence
  source 1..20: mol_type = other RNA
tgaggaaattagaggcttag

SEQ ID NO: 15857 - RNA, 20 nt, synthetic construct
  misc_feature 1..20: note = antisense sequence
  source 1..20: mol_type = other RNA
tagcatctatctagtcccat

SEQ ID NO: 15858 - RNA, 20 nt, synthetic construct
  misc_feature 1..20: note = antisense sequence
  source 1..20: mol_type = other RNA
gtagcatctatctagtccca

SEQ ID NO: 15859 - RNA, 20 nt, synthetic construct
  misc_feature 1..20: note = antisense sequence
  source 1..20: mol_type = other RNA
ggtagcatctatctagtccc

SEQ ID NO: 15860 - RNA, 20 nt, synthetic construct
  misc_feature 1..20: note = antisense sequence
  source 1..20: mol_type = other RNA
cggtagcatctatctagtcc

SEQ ID NO: 15861 - RNA, 20 nt, synthetic construct
  misc_feature 1..20: note = antisense sequence
  source 1..20: mol_type = other RNA
tcggtagcatctatctagtc

SEQ ID NO: 15862 - RNA, 20 nt, synthetic construct
  misc_feature 1..20: note = antisense sequence
  source 1..20: mol_type = other RNA
atcggtagcatctatctagt

SEQ ID NO: 15863 - RNA, 20 nt, synthetic construct
  misc_feature 1..20: note = antisense sequence
  source 1..20: mol_type = other RNA
tatcggtagcatctatctag

SEQ ID NO: 15864 - RNA, 20 nt, synthetic construct
  misc_feature 1..20: note = antisense sequence
  source 1..20: mol_type = other RNA
gtttatcggtagcatctatc

SEQ ID NO: 15865 - RNA, 20 nt, synthetic construct
  misc_feature 1..20: note = antisense sequence
  source 1..20: mol_type = other RNA
ggtttatcggtagcatctat

SEQ ID NO: 15866 - RNA, 20 nt, synthetic construct
  misc_feature 1..20: note = antisense sequence
  source 1..20: mol_type = other RNA
caggtttatcggtagcatct

SEQ ID NO: 15867 - RNA, 20 nt, synthetic construct
  misc_feature 1..20: note = antisense sequence
  source 1..20: mol_type = other RNA
acaggtttatcggtagcatc

SEQ ID NO: 15868 - RNA, 20 nt, synthetic construct
  misc_feature 1..20: note = antisense sequence
  source 1..20: mol_type = other RNA
tacaggtttatcggtagcat

SEQ ID NO: 15869 - RNA, 20 nt, synthetic construct
  misc_feature 1..20: note = antisense sequence
  source 1..20: mol_type = other RNA
agtctacaggtttatcggta

SEQ ID NO: 15870 - RNA, 20 nt, synthetic construct
  misc_feature 1..20: note = antisense sequence
  source 1..20: mol_type = other RNA
aaagtctacaggtttatcgg

SEQ ID NO: 15871 - RNA, 20 nt, synthetic construct
  misc_feature 1..20: note = antisense sequence
  source 1..20: mol_type = other RNA
agtgcttttctcagtcacac

SEQ ID NO: 15872 - RNA, 20 nt, synthetic construct
  misc_feature 1..20: note = antisense sequence
  source 1..20: mol_type = other RNA
ggtagtaccaacatgagtaa

SEQ ID NO: 15873 - RNA, 20 nt, synthetic construct
  misc_feature 1..20: note = antisense sequence
  source 1..20: mol_type = other RNA
tttaaggaggtggtagtacc

SEQ ID NO: 15874 - RNA, 20 nt, synthetic construct
  misc_feature 1..20: note = antisense sequence
  source 1..20: mol_type = other RNA
catttaaggaggtggtagta

SEQ ID NO: 15875 - RNA, 20 nt, synthetic construct
  misc_feature 1..20: note = antisense sequence
  source 1..20: mol_type = other RNA
tcatttaaggaggtggtagt

SEQ ID NO: 15876 - RNA, 20 nt, synthetic construct
  misc_feature 1..20: note = antisense sequence
  source 1..20: mol_type = other RNA
atcatttaaggaggtggtag

SEQ ID NO: 15877 - RNA, 20 nt, synthetic construct
  misc_feature 1..20: note = antisense sequence
  source 1..20: mol_type = other RNA
catcatttaaggaggtggta

SEQ ID NO: 15878 - RNA, 20 nt, synthetic construct
  misc_feature 1..20: note = antisense sequence
  source 1..20: mol_type = other RNA
acatcatttaaggaggtggt

SEQ ID NO: 15879 - RNA, 20 nt, synthetic construct
  misc_feature 1..20: note = antisense sequence
  source 1..20: mol_type = other RNA
aacatcatttaaggaggtgg

SEQ ID NO: 15880 - RNA, 20 nt, synthetic construct
  misc_feature 1..20: note = antisense sequence
  source 1..20: mol_type = other RNA
gtgtcagtaactaggcatta

SEQ ID NO: 15881 - RNA, 20 nt, synthetic construct
  misc_feature 1..20: note = antisense sequence
  source 1..20: mol_type = other RNA
tgtgtcagtaactaggcatt

SEQ ID NO: 15882 - RNA, 20 nt, synthetic construct
  misc_feature 1..20: note = antisense sequence
  source 1..20: mol_type = other RNA
gtctgtgtcagtaactaggc

SEQ ID NO: 15883 - RNA, 20 nt, synthetic construct
  misc_feature 1..20: note = antisense sequence
  source 1..20: mol_type = other RNA
agtctgtgtcagtaactagg

SEQ ID NO: 15884 - RNA, 20 nt, synthetic construct
  misc_feature 1..20: note = antisense sequence
  source 1..20: mol_type = other RNA
gagtctgtgtcagtaactag

SEQ ID NO: 15885 - RNA, 20 nt, synthetic construct
  misc_feature 1..20: note = antisense sequence
  source 1..20: mol_type = other RNA
tgagtctgtgtcagtaacta

SEQ ID NO: 15886 - RNA, 20 nt, synthetic construct
  misc_feature 1..20: note = antisense sequence
  source 1..20: mol_type = other RNA
ttgagtctgtgtcagtaact

SEQ ID NO: 15887 - RNA, 20 nt, synthetic construct
  misc_feature 1..20: note = antisense sequence
  source 1..20: mol_type = other RNA
taacttgagtctgtgtcagt

SEQ ID NO: 15888 - RNA, 20 nt, synthetic construct
  misc_feature 1..20: note = antisense sequence
  source 1..20: mol_type = other RNA
ttaacttgagtctgtgtcag

SEQ ID NO: 15889 - RNA, 20 nt, synthetic construct
  misc_feature 1..20: note = antisense sequence
  source 1..20: mol_type = other RNA
aaaaggattgaggctgtctt

SEQ ID NO: 15890 - RNA, 20 nt, synthetic construct
  misc_feature 1..20: note = antisense sequence
  source 1..20: mol_type = other RNA
caaaaggattgaggctgtct

SEQ ID NO: 15891 - RNA, 20 nt, synthetic construct
  misc_feature 1..20: note = antisense sequence
  source 1..20: mol_type = other RNA
ttttgtggttggcaattccc

SEQ ID NO: 15892 - RNA, 20 nt, synthetic construct
  misc_feature 1..20: note = antisense sequence
  source 1..20: mol_type = other RNA
atctgtcctagaatccagta

SEQ ID NO: 15893 - RNA, 20 nt, synthetic construct
  misc_feature 1..20: note = antisense sequence
  source 1..20: mol_type = other RNA
aatctgtcctagaatccagt

SEQ ID NO: 15894 - RNA, 20 nt, synthetic construct
  misc_feature 1..20: note = antisense sequence
  source 1..20: mol_type = other RNA
ggagaaatctgatagcctga

SEQ ID NO: 15895 - RNA, 20 nt, synthetic construct
  misc_feature 1..20: note = antisense sequence
  source 1..20: mol_type = other RNA
tggagaaatctgatagcctg

SEQ ID NO: 15896 - RNA, 20 nt, synthetic construct
  misc_feature 1..20: note = antisense sequence
  source 1..20: mol_type = other RNA
gggctggagaaatctgatag

SEQ ID NO: 15897 - RNA, 20 nt, synthetic construct
  misc_feature 1..20: note = antisense sequence
  source 1..20: mol_type = other RNA
tagggctggagaaatctgat

SEQ ID NO: 15898 - RNA, 20 nt, synthetic construct
  misc_feature 1..20: note = antisense sequence
  source 1..20: mol_type = other RNA
tgaatagggctggagaaatc

SEQ ID NO: 15899 - RNA, 20 nt, synthetic construct
  misc_feature 1..20: note = antisense sequence
  source 1..20: mol_type = other RNA
gtgaatagggctggagaaat

SEQ ID NO: 15900 - RNA, 20 nt, synthetic construct
  misc_feature 1..20: note = antisense sequence
  source 1..20: mol_type = other RNA
cagggaaagtgaatagggct

SEQ ID NO: 15901 - RNA, 20 nt, synthetic construct
  misc_feature 1..20: note = antisense sequence
  source 1..20: mol_type = other RNA
tcagggaaagtgaatagggc

SEQ ID NO: 15902 - RNA, 20 nt, synthetic construct
  misc_feature 1..20: note = antisense sequence
  source 1..20: mol_type = other RNA
ctggaccctaataagttaca

SEQ ID NO: 15903 - RNA, 20 nt, synthetic construct
  misc_feature 1..20: note = antisense sequence
  source 1..20: mol_type = other RNA
tctggaccctaataagttac

SEQ ID NO: 15904 - RNA, 20 nt, synthetic construct
  misc_feature 1..20: note = antisense sequence
  source 1..20: mol_type = other RNA
ctatttcaaatctggaccct

SEQ ID NO: 15905 - RNA, 20 nt, synthetic construct
  misc_feature 1..20: note = antisense sequence
  source 1..20: mol_type = other RNA
cctatttcaaatctggaccc

SEQ ID NO: 15906 - RNA, 20 nt, synthetic construct
  misc_feature 1..20: note = antisense sequence
  source 1..20: mol_type = other RNA
acctatttcaaatctggacc

SEQ ID NO: 15907 - RNA, 20 nt, synthetic construct
  misc_feature 1..20: note = antisense sequence
  source 1..20: mol_type = other RNA
taccgggtttcaccttaaaa

SEQ ID NO: 15908 - RNA, 20 nt, synthetic construct
  misc_feature 1..20: note = antisense sequence
  source 1..20: mol_type = other RNA
ttaccgggtttcaccttaaa

SEQ ID NO: 15909 - RNA, 20 nt, synthetic construct
  misc_feature 1..20: note = antisense sequence
  source 1..20: mol_type = other RNA
cttaccgggtttcaccttaa

SEQ ID NO: 15910 - RNA, 20 nt, synthetic construct
  misc_feature 1..20: note = antisense sequence
  source 1..20: mol_type = other RNA
acttaccgggtttcacctta

SEQ ID NO: 15911 - RNA, 20 nt, synthetic construct
  misc_feature 1..20: note = antisense sequence
  source 1..20: mol_type = other RNA
aacttaccgggtttcacctt

SEQ ID NO: 15912 - RNA, 20 nt, synthetic construct
  misc_feature 1..20: note = antisense sequence
  source 1..20: mol_type = other RNA
agcagtaaacttaccgggtt

SEQ ID NO: 15913 - RNA, 20 nt, synthetic construct
  misc_feature 1..20: note = antisense sequence
  source 1..20: mol_type = other RNA
gagcagtaaacttaccgggt

SEQ ID NO: 15914 - RNA, 20 nt, synthetic construct
  misc_feature 1..20: note = antisense sequence
  source 1..20: mol_type = other RNA
cgagcagtaaacttaccggg

SEQ ID NO: 15915 - RNA, 20 nt, synthetic construct
  misc_feature 1..20: note = antisense sequence
  source 1..20: mol_type = other RNA
ccgagcagtaaacttaccgg

SEQ ID NO: 15916 - RNA, 20 nt, synthetic construct
  misc_feature 1..20: note = antisense sequence
  source 1..20: mol_type = other RNA
tccgagcagtaaacttaccg

SEQ ID NO: 15917 - RNA, 20 nt, synthetic construct
  misc_feature 1..20: note = antisense sequence
  source 1..20: mol_type = other RNA
ttccgagcagtaaacttacc

SEQ ID NO: 15918 - RNA, 20 nt, synthetic construct
  misc_feature 1..20: note = antisense sequence
  source 1..20: mol_type = other RNA
attccgagcagtaaacttac

SEQ ID NO: 15919 - RNA, 20 nt, synthetic construct
  misc_feature 1..20: note = antisense sequence
  source 1..20: mol_type = other RNA
gaaaattccgagcagtaaac

SEQ ID NO: 15920 - RNA, 20 nt, synthetic construct
  misc_feature 1..20: note = antisense sequence
  source 1..20: mol_type = other RNA
ggaaaattccgagcagtaaa

SEQ ID NO: 15921 - RNA, 20 nt, synthetic construct
  misc_feature 1..20: note = antisense sequence
  source 1..20: mol_type = other RNA
gggaaaattccgagcagtaa

SEQ ID NO: 15922 - RNA, 20 nt, synthetic construct
  misc_feature 1..20: note = antisense sequence
  source 1..20: mol_type = other RNA
agggaaaattccgagcagta

SEQ ID NO: 15923 - RNA, 20 nt, synthetic construct
  misc_feature 1..20: note = antisense sequence
  source 1..20: mol_type = other RNA
tagggaaaattccgagcagt

SEQ ID NO: 15924 - RNA, 20 nt, synthetic construct
  misc_feature 1..20: note = antisense sequence
  source 1..20: mol_type = other RNA
attgtgcccaggctttaatt

SEQ ID NO: 15925 - RNA, 20 nt, synthetic construct
  misc_feature 1..20: note = antisense sequence
  source 1..20: mol_type = other RNA
gattgtgcccaggctttaat

SEQ ID NO: 15926 - RNA, 20 nt, synthetic construct
  misc_feature 1..20: note = antisense sequence
  source 1..20: mol_type = other RNA
tttagattgtgcccaggctt

SEQ ID NO: 15927 - RNA, 20 nt, synthetic construct
  misc_feature 1..20: note = antisense sequence
  source 1..20: mol_type = other RNA
gtgtttagattgtgcccagg

SEQ ID NO: 15928 - RNA, 20 nt, synthetic construct
  misc_feature 1..20: note = antisense sequence
  source 1..20: mol_type = other RNA
agtgtttagattgtgcccag

SEQ ID NO: 15929 - RNA, 20 nt, synthetic construct
  misc_feature 1..20: note = antisense sequence
  source 1..20: mol_type = other RNA
cgttgtctctccattgaata

SEQ ID NO: 15930 - RNA, 20 nt, synthetic construct
  misc_feature 1..20: note = antisense sequence
  source 1..20: mol_type = other RNA
attacgttgtctctccattg

SEQ ID NO: 15931 - RNA, 20 nt, synthetic construct
  misc_feature 1..20: note = antisense sequence
  source 1..20: mol_type = other RNA
ttactccaaaatgtgccttc

SEQ ID NO: 15932 - RNA, 20 nt, synthetic construct
  misc_feature 1..20: note = antisense sequence
  source 1..20: mol_type = other RNA
gcattatggtttcttactcc

SEQ ID NO: 15933 - RNA, 20 nt, synthetic construct
  misc_feature 1..20: note = antisense sequence
  source 1..20: mol_type = other RNA
gcagcattatggtttcttac

SEQ ID NO: 15934 - RNA, 20 nt, synthetic construct
  misc_feature 1..20: note = antisense sequence
  source 1..20: mol_type = other RNA
gaacttccaagatcacaaag

SEQ ID NO: 15935 - RNA, 20 nt, synthetic construct
  misc_feature 1..20: note = antisense sequence
  source 1..20: mol_type = other RNA
ggaagcagatcctcatatta

SEQ ID NO: 15936 - RNA, 20 nt, synthetic construct
  misc_feature 1..20: note = antisense sequence
  source 1..20: mol_type = other RNA
tattgttgactatgtgccac

SEQ ID NO: 15937 - RNA, 20 nt, synthetic construct
  misc_feature 1..20: note = antisense sequence
  source 1..20: mol_type = other RNA
gtaccctgtctgtaaaatgt

SEQ ID NO: 15938 - RNA, 20 nt, synthetic construct
  misc_feature 1..20: note = antisense sequence
  source 1..20: mol_type = other RNA
tgtaccctgtctgtaaaatg

SEQ ID NO: 15939 - RNA, 20 nt, synthetic construct
  misc_feature 1..20: note = antisense sequence
  source 1..20: mol_type = other RNA
gttttgtaccctgtctgtaa

SEQ ID NO: 15940 - RNA, 20 nt, synthetic construct
  misc_feature 1..20: note = antisense sequence
  source 1..20: mol_type = other RNA
agttttgtaccctgtctgta

SEQ ID NO: 15941 - RNA, 20 nt, synthetic construct
  misc_feature 1..20: note = antisense sequence
  source 1..20: mol_type = other RNA
gttacctgtcctatttgcat

SEQ ID NO: 15942 - RNA, 20 nt, synthetic construct
  misc_feature 1..20: note = antisense sequence
  source 1..20: mol_type = other RNA
ggttacctgtcctatttgca

SEQ ID NO: 15943 - RNA, 20 nt, synthetic construct
  misc_feature 1..20: note = antisense sequence
  source 1..20: mol_type = other RNA
tagtgtaggttacctgtcct

SEQ ID NO: 15944 - RNA, 20 nt, synthetic construct
  misc_feature 1..20: note = antisense sequence
  source 1..20: mol_type = other RNA
tttagtgtaggttacctgtc

SEQ ID NO: 15945 - RNA, 20 nt, synthetic construct
  misc_feature 1..20: note = antisense sequence
  source 1..20: mol_type = other RNA
cttcaactaccttggtaaca

SEQ ID NO: 15946 - RNA, 20 nt, synthetic construct
  misc_feature 1..20: note = antisense sequence
  source 1..20: mol_type = other RNA
acttcaactaccttggtaac

SEQ ID NO: 15947 - RNA, 20 nt, synthetic construct
  misc_feature 1..20: note = antisense sequence
  source 1..20: mol_type = other RNA
ctatacttcaactaccttgg

SEQ ID NO: 15948 - RNA, 20 nt, synthetic construct
  misc_feature 1..20: note = antisense sequence
  source 1..20: mol_type = other RNA
cctatacttcaactaccttg

SEQ ID NO: 15949 - RNA, 20 nt, synthetic construct
  misc_feature 1..20: note = antisense sequence
  source 1..20: mol_type = other RNA
ttgcagtgagccgagatccc

SEQ ID NO: 15950 - RNA, 20 nt, synthetic construct
  misc_feature 1..20: note = antisense sequence
  source 1..20: mol_type = other RNA
cttgcagtgagccgagatcc

SEQ ID NO: 15951 - RNA, 20 nt, synthetic construct
  misc_feature 1..20: note = antisense sequence
  source 1..20: mol_type = other RNA
gcttgcagtgagccgagatc

SEQ ID NO: 15952 - RNA, 20 nt, synthetic construct
  misc_feature 1..20: note = antisense sequence
  source 1..20: mol_type = other RNA
agcttgcagtgagccgagat

SEQ ID NO: 15953 - RNA, 20 nt, synthetic construct
  misc_feature 1..20: note = antisense sequence
  source 1..20: mol_type = other RNA
gagcttgcagtgagccgaga

SEQ ID NO: 15954 - RNA, 20 nt, synthetic construct
  misc_feature 1..20: note = antisense sequence
  source 1..20: mol_type = other RNA
aggagaatggcgtgaacccg

SEQ ID NO: 15955 - RNA, 20 nt, synthetic construct
  misc_feature 1..20: note = antisense sequence
  source 1..20: mol_type = other RNA
caggagaatggcgtgaaccc

SEQ ID NO: 15956 - RNA, 20 nt, synthetic construct
  misc_feature 1..20: note = antisense sequence
  source 1..20: mol_type = other RNA
gcaggagaatggcgtgaacc

SEQ ID NO: 15957 - RNA, 20 nt, synthetic construct
  misc_feature 1..20: note = antisense sequence
  source 1..20: mol_type = other RNA
ggcaggagaatggcgtgaac

SEQ ID NO: 15958 - RNA, 20 nt, synthetic construct
  misc_feature 1..20: note = antisense sequence
  source 1..20: mol_type = other RNA
aggcaggagaatggcgtgaa

SEQ ID NO: 15959 - RNA, 20 nt, synthetic construct
  misc_feature 1..20: note = antisense sequence
  source 1..20: mol_type = other RNA
gaggcaggagaatggcgtga

SEQ ID NO: 15960 - RNA, 20 nt, synthetic construct
  misc_feature 1..20: note = antisense sequence
  source 1..20: mol_type = other RNA
tgaggcaggagaatggcgtg

SEQ ID NO: 15961 - RNA, 20 nt, synthetic construct
  misc_feature 1..20: note = antisense sequence
  source 1..20: mol_type = other RNA
ctgaggcaggagaatggcgt

SEQ ID NO: 15962 - RNA, 20 nt, synthetic construct
  misc_feature 1..20: note = antisense sequence
  source 1..20: mol_type = other RNA
aggctgaggcaggagaatgg

SEQ ID NO: 15963 - RNA, 20 nt, synthetic construct
  misc_feature 1..20: note = antisense sequence
  source 1..20: mol_type = other RNA
gaggctgaggcaggagaatg

SEQ ID NO: 15964 - RNA, 20 nt, synthetic construct
  misc_feature 1..20: note = antisense sequence
  source 1..20: mol_type = other RNA
ggaggctgaggcaggagaat

SEQ ID NO: 15965 - RNA, 20 nt, synthetic construct
  misc_feature 1..20: note = antisense sequence
  source 1..20: mol_type = other RNA
tacttgggaggctgaggcag

SEQ ID NO: 15966 - RNA, 20 nt, synthetic construct
  misc_feature 1..20: note = antisense sequence
  source 1..20: mol_type = other RNA
ctacttgggaggctgaggca

SEQ ID NO: 15967 - RNA, 20 nt, synthetic construct
  misc_feature 1..20: note = antisense sequence
  source 1..20: mol_type = other RNA
agctacttgggaggctgagg

SEQ ID NO: 15968 - RNA, 20 nt, synthetic construct
  misc_feature 1..20: note = antisense sequence
  source 1..20: mol_type = other RNA
ctgtggtcccagctacttgg

SEQ ID NO: 15969 - RNA, 20 nt, synthetic construct
  misc_feature 1..20: note = antisense sequence
  source 1..20: mol_type = other RNA
cctgtggtcccagctacttg

SEQ ID NO: 15970 - RNA, 20 nt, synthetic construct
  misc_feature 1..20: note = antisense sequence
  source 1..20: mol_type = other RNA
gcctgtggtcccagctactt

SEQ ID NO: 15971 - RNA, 20 nt, synthetic construct
  misc_feature 1..20: note = antisense sequence
  source 1..20: mol_type = other RNA
aggagatcgagaccatcccg

SEQ ID NO: 15972 - RNA, 20 nt, synthetic construct
  misc_feature 1..20: note = antisense sequence
  source 1..20: mol_type = other RNA
caggagatcgagaccatccc

SEQ ID NO: 15973 - RNA, 20 nt, synthetic construct
  misc_feature 1..20: note = antisense sequence
  source 1..20: mol_type = other RNA
tcaggagatcgagaccatcc

SEQ ID NO: 15974 - RNA, 20 nt, synthetic construct
  misc_feature 1..20: note = antisense sequence
  source 1..20: mol_type = other RNA
gtcaggagatcgagaccatc

SEQ ID NO: 15975 - RNA, 20 nt, synthetic construct
  misc_feature 1..20: note = antisense sequence
  source 1..20: mol_type = other RNA
cgaggtcaggagatcgagac

SEQ ID NO: 15976 - RNA, 20 nt, synthetic construct
  misc_feature 1..20: note = antisense sequence
  source 1..20: mol_type = other RNA
acgaggtcaggagatcgaga

SEQ ID NO: 15977 - RNA, 20 nt, synthetic construct
  misc_feature 1..20: note = antisense sequence
  source 1..20: mol_type = other RNA
cacgaggtcaggagatcgag

SEQ ID NO: 15978 - RNA, 20 nt, synthetic construct
  misc_feature 1..20: note = antisense sequence
  source 1..20: mol_type = other RNA
tcacgaggtcaggagatcga

SEQ ID NO: 15979 - RNA, 20 nt, synthetic construct
  misc_feature 1..20: note = antisense sequence
  source 1..20: mol_type = other RNA
atcacgaggtcaggagatcg

SEQ ID NO: 15980 - RNA, 20 nt, synthetic construct
  misc_feature 1..20: note = antisense sequence
  source 1..20: mol_type = other RNA
ggatcacgaggtcaggagat

SEQ ID NO: 15981 - RNA, 20 nt, synthetic construct
  misc_feature 1..20: note = antisense sequence
  source 1..20: mol_type = other RNA
cggatcacgaggtcaggaga

SEQ ID NO: 15982 - RNA, 20 nt, synthetic construct
  misc_feature 1..20: note = antisense sequence
  source 1..20: mol_type = other RNA
ctgtaatcccagcactttgg

SEQ ID NO: 15983 - RNA, 20 nt, synthetic construct
  misc_feature 1..20: note = antisense sequence
  source 1..20: mol_type = other RNA
cctgtaatcccagcactttg

SEQ ID NO: 15984 - RNA, 20 nt, synthetic construct
  misc_feature 1..20: note = antisense sequence
  source 1..20: mol_type = other RNA
gcctgtaatcccagcacttt

SEQ ID NO: 15985 - RNA, 20 nt, synthetic construct
  misc_feature 1..20: note = antisense sequence
  source 1..20: mol_type = other RNA
cgcctgtaatcccagcactt

SEQ ID NO: 15986 - RNA, 20 nt, synthetic construct
  misc_feature 1..20: note = antisense sequence
  source 1..20: mol_type = other RNA
acgcctgtaatcccagcact

SEQ ID NO: 15987 - RNA, 20 nt, synthetic construct
  misc_feature 1..20: note = antisense sequence
  source 1..20: mol_type = other RNA
cacgcctgtaatcccagcac

SEQ ID NO: 15988 - RNA, 20 nt, synthetic construct
  misc_feature 1..20: note = antisense sequence
  source 1..20: mol_type = other RNA
tcacgcctgtaatcccagca

SEQ ID NO: 15989 - RNA, 20 nt, synthetic construct
  misc_feature 1..20: note = antisense sequence
  source 1..20: mol_type = other RNA
ctcacgcctgtaatcccagc

SEQ ID NO: 15990 - RNA, 20 nt, synthetic construct
  misc_feature 1..20: note = antisense sequence
  source 1..20: mol_type = other RNA
gctcacgcctgtaatcccag

SEQ ID NO: 15991 - RNA, 20 nt, synthetic construct
  misc_feature 1..20: note = antisense sequence
  source 1..20: mol_type = other RNA
ggctcacgcctgtaatccca

SEQ ID NO: 15992 - RNA, 20 nt, synthetic construct
  misc_feature 1..20: note = antisense sequence
  source 1..20: mol_type = other RNA
tggctcacgcctgtaatccc

SEQ ID NO: 15993 - RNA, 20 nt, synthetic construct
  misc_feature 1..20: note = antisense sequence
  source 1..20: mol_type = other RNA
gtggctcacgcctgtaatcc

SEQ ID NO: 15994 - RNA, 20 nt, synthetic construct
  misc_feature 1..20: note = antisense sequence
  source 1..20: mol_type = other RNA
ggtggctcacgcctgtaatc

SEQ ID NO: 15995 - RNA, 20 nt, synthetic construct
  misc_feature 1..20: note = antisense sequence
  source 1..20: mol_type = other RNA
cggtggctcacgcctgtaat

SEQ ID NO: 15996 - RNA, 20 nt, synthetic construct
  misc_feature 1..20: note = antisense sequence
  source 1..20: mol_type = other RNA
ccagtcaaattctgtttcct

SEQ ID NO: 15997 - RNA, 20 nt, synthetic construct
  misc_feature 1..20: note = antisense sequence
  source 1..20: mol_type = other RNA
tccagtcaaattctgtttcc

SEQ ID NO: 15998 - RNA, 20 nt, synthetic construct
  misc_feature 1..20: note = antisense sequence
  source 1..20: mol_type = other RNA
gacccttaaacatgctccct

SEQ ID NO: 15999 - RNA, 20 nt, synthetic construct
  misc_feature 1..20: note = antisense sequence
  source 1..20: mol_type = other RNA
ggacccttaaacatgctccc

SEQ ID NO: 16000 - RNA, 20 nt, synthetic construct
  misc_feature 1..20: note = antisense sequence
  source 1..20: mol_type = other RNA
cctggacccttaaacatgct

SEQ ID NO: 16001 - RNA, 20 nt, synthetic construct
  misc_feature 1..20: note = antisense sequence
  source 1..20: mol_type = other RNA
acctggacccttaaacatgc

SEQ ID NO: 16002 - RNA, 20 nt, synthetic construct
  misc_feature 1..20: note = antisense sequence
  source 1..20: mol_type = other RNA
cacctggacccttaaacatg

SEQ ID NO: 16003 - RNA, 20 nt, synthetic construct
  misc_feature 1..20: note = antisense sequence
  source 1..20: mol_type = other RNA
gcacctggacccttaaacat

SEQ ID NO: 16004 - RNA, 20 nt, synthetic construct
  misc_feature 1..20: note = antisense sequence
  source 1..20: mol_type = other RNA
tgcacctggacccttaaaca

SEQ ID NO: 16005 - RNA, 20 nt, synthetic construct
  misc_feature 1..20: note = antisense sequence
  source 1..20: mol_type = other RNA
ctgcacctggacccttaaac

SEQ ID NO: 16006 - RNA, 20 nt, synthetic construct
  misc_feature 1..20: note = antisense sequence
  source 1..20: mol_type = other RNA
gctgcacctggacccttaaa

SEQ ID NO: 16007 - RNA, 20 nt, synthetic construct
  misc_feature 1..20: note = antisense sequence
  source 1..20: mol_type = other RNA
agctgcacctggacccttaa

SEQ ID NO: 16008 - RNA, 20 nt, synthetic construct
  misc_feature 1..20: note = antisense sequence
  source 1..20: mol_type = other RNA
attctggaggttcctgacca

SEQ ID NO: 16009 - RNA, 20 nt, synthetic construct
  misc_feature 1..20: note = antisense sequence
  source 1..20: mol_type = other RNA
ctgggtttgtaaagacgaaa

SEQ ID NO: 16010 - RNA, 20 nt, synthetic construct
  misc_feature 1..20: note = antisense sequence
  source 1..20: mol_type = other RNA
cctgggtttgtaaagacgaa

SEQ ID NO: 16011 - RNA, 20 nt, synthetic construct
  misc_feature 1..20: note = antisense sequence
  source 1..20: mol_type = other RNA
tcctgggtttgtaaagacga

SEQ ID NO: 16012 - RNA, 20 nt, synthetic construct
  misc_feature 1..20: note = antisense sequence
  source 1..20: mol_type = other RNA
ttcctgggtttgtaaagacg

SEQ ID NO: 16013 - RNA, 20 nt, synthetic construct
  misc_feature 1..20: note = antisense sequence
  source 1..20: mol_type = other RNA
tttcctgggtttgtaaagac

SEQ ID NO: 16014 - RNA, 20 nt, synthetic construct
  misc_feature 1..20: note = antisense sequence
  source 1..20: mol_type = other RNA
gcagtttcctgggtttgtaa

SEQ ID NO: 16015 - RNA, 20 nt, synthetic construct
  misc_feature 1..20: note = antisense sequence
  source 1..20: mol_type = other RNA
aagcagtttcctgggtttgt

SEQ ID NO: 16016 - RNA, 20 nt, synthetic construct
  misc_feature 1..20: note = antisense sequence
  source 1..20: mol_type = other RNA
gaagcagtttcctgggtttg

SEQ ID NO: 16017 - RNA, 20 nt, synthetic construct
  misc_feature 1..20: note = antisense sequence
  source 1..20: mol_type = other RNA
tgaagcagtttcctgggttt

SEQ ID NO: 16018 - RNA, 20 nt, synthetic construct
  misc_feature 1..20: note = antisense sequence
  source 1..20: mol_type = other RNA
agccttccagactgagagct

SEQ ID NO: 16019 - RNA, 20 nt, synthetic construct
  misc_feature 1..20: note = antisense sequence
  source 1..20: mol_type = other RNA
gagccttccagactgagagc

SEQ ID NO: 16020 - RNA, 20 nt, synthetic construct
  misc_feature 1..20: note = antisense sequence
  source 1..20: mol_type = other RNA
tgagccttccagactgagag

SEQ ID NO: 16021 - RNA, 20 nt, synthetic construct
  misc_feature 1..20: note = antisense sequence
  source 1..20: mol_type = other RNA
acccaactgagccttccaga

SEQ ID NO: 16022 - RNA, 20 nt, synthetic construct
  misc_feature 1..20: note = antisense sequence
  source 1..20: mol_type = other RNA
gatctacccaactgagcctt

SEQ ID NO: 16023 - RNA, 20 nt, synthetic construct
  misc_feature 1..20: note = antisense sequence
  source 1..20: mol_type = other RNA
tgatctacccaactgagcct

SEQ ID NO: 16024 - RNA, 20 nt, synthetic construct
  misc_feature 1..20: note = antisense sequence
  source 1..20: mol_type = other RNA
agctgggtagggaacgcctt

SEQ ID NO: 16025 - RNA, 20 nt, synthetic construct
  misc_feature 1..20: note = antisense sequence
  source 1..20: mol_type = other RNA
tagctgggtagggaacgcct

SEQ ID NO: 16026 - RNA, 20 nt, synthetic construct
  misc_feature 1..20: note = antisense sequence
  source 1..20: mol_type = other RNA
ttagctgggtagggaacgcc

SEQ ID NO: 16027 - RNA, 20 nt, synthetic construct
  misc_feature 1..20: note = antisense sequence
  source 1..20: mol_type = other RNA
tttagctgggtagggaacgc

SEQ ID NO: 16028 - RNA, 20 nt, synthetic construct
  misc_feature 1..20: note = antisense sequence
  source 1..20: mol_type = other RNA
ctttagctgggtagggaacg

SEQ ID NO: 16029 - RNA, 20 nt, synthetic construct
  misc_feature 1..20: note = antisense sequence
  source 1..20: mol_type = other RNA
tctttagctgggtagggaac

SEQ ID NO: 16030 - RNA, 20 nt, synthetic construct
  misc_feature 1..20: note = antisense sequence
  source 1..20: mol_type = other RNA
ttctttagctgggtagggaa

SEQ ID NO: 16031 - RNA, 20 nt, synthetic construct
  misc_feature 1..20: note = antisense sequence
  source 1..20: mol_type = other RNA
cttctttagctgggtaggga

SEQ ID NO: 16032 - RNA, 20 nt, synthetic construct
  misc_feature 1..20: note = antisense sequence
  source 1..20: mol_type = other RNA
gcttctttagctgggtaggg

SEQ ID NO: 16033 - RNA, 20 nt, synthetic construct
  misc_feature 1..20: note = antisense sequence
  source 1..20: mol_type = other RNA
ccctgtgcagcttctttagc

SEQ ID NO: 16034 - RNA, 20 nt, synthetic construct
  misc_feature 1..20: note = antisense sequence
  source 1..20: mol_type = other RNA
atggcatccctgtgcagctt

SEQ ID NO: 16035 - RNA, 20 nt, synthetic construct
  misc_feature 1..20: note = antisense sequence
  source 1..20: mol_type = other RNA
tatggcatccctgtgcagct

SEQ ID NO: 16036 - RNA, 20 nt, synthetic construct
  misc_feature 1..20: note = antisense sequence
  source 1..20: mol_type = other RNA
cctatggcatccctgtgcag

SEQ ID NO: 16037 - RNA, 20 nt, synthetic construct
  misc_feature 1..20: note = antisense sequence
  source 1..20: mol_type = other RNA
acctatggcatccctgtgca

SEQ ID NO: 16038 - RNA, 20 nt, synthetic construct
  misc_feature 1..20: note = antisense sequence
  source 1..20: mol_type = other RNA
gaaacctatggcatccctgt

SEQ ID NO: 16039 - RNA, 20 nt, synthetic construct
  misc_feature 1..20: note = antisense sequence
  source 1..20: mol_type = other RNA
tgaaacctatggcatccctg

SEQ ID NO: 16040 - RNA, 20 nt, synthetic construct
  misc_feature 1..20: note = antisense sequence
  source 1..20: mol_type = other RNA
ctgaaacctatggcatccct

SEQ ID NO: 16041 - RNA, 20 nt, synthetic construct
  misc_feature 1..20: note = antisense sequence
  source 1..20: mol_type = other RNA
cctgaaacctatggcatccc

SEQ ID NO: 16042 - RNA, 20 nt, synthetic construct
  misc_feature 1..20: note = antisense sequence
  source 1..20: mol_type = other RNA
ggcctgaaacctatggcatc

SEQ ID NO: 16043 - RNA, 20 nt, synthetic construct
  misc_feature 1..20: note = antisense sequence
  source 1..20: mol_type = other RNA
actgctgaagcataatctgc

SEQ ID NO: 16044 - RNA, 20 nt, synthetic construct
  misc_feature 1..20: note = antisense sequence
  source 1..20: mol_type = other RNA
tactgctgaagcataatctg

SEQ ID NO: 16045 - RNA, 20 nt, synthetic construct
  misc_feature 1..20: note = antisense sequence
  source 1..20: mol_type = other RNA
ctactgctgaagcataatct

SEQ ID NO: 16046 - RNA, 20 nt, synthetic construct
  misc_feature 1..20: note = antisense sequence
  source 1..20: mol_type = other RNA
cctactgctgaagcataatc

SEQ ID NO: 16047 - RNA, 20 nt, synthetic construct
  misc_feature 1..20: note = antisense sequence
  source 1..20: mol_type = other RNA
tcctactgctgaagcataat

SEQ ID NO: 16048 - RNA, 20 nt, synthetic construct
  misc_feature 1..20: note = antisense sequence
  source 1..20: mol_type = other RNA
ttcctactgctgaagcataa

SEQ ID NO: 16049 - RNA, 20 nt, synthetic construct
  misc_feature 1..20: note = antisense sequence
  source 1..20: mol_type = other RNA
tacaactgaactgggacaac

SEQ ID NO: 16050 - RNA, 20 nt, synthetic construct
  misc_feature 1..20: note = antisense sequence
  source 1..20: mol_type = other RNA
gtacaactgaactgggacaa

SEQ ID NO: 16051 - RNA, 20 nt, synthetic construct
  misc_feature 1..20: note = antisense sequence
  source 1..20: mol_type = other RNA
aggtacaactgaactgggac

SEQ ID NO: 16052 - RNA, 20 nt, synthetic construct
  misc_feature 1..20: note = antisense sequence
  source 1..20: mol_type = other RNA
aaggtacaactgaactggga

SEQ ID NO: 16053 - RNA, 20 nt, synthetic construct
  misc_feature 1..20: note = antisense sequence
  source 1..20: mol_type = other RNA
aaaggtacaactgaactggg

SEQ ID NO: 16054 - RNA, 20 nt, synthetic construct
  misc_feature 1..20: note = antisense sequence
  source 1..20: mol_type = other RNA
aaaaggtacaactgaactgg

SEQ ID NO: 16055 - RNA, 20 nt, synthetic construct
  misc_feature 1..20: note = antisense sequence
  source 1..20: mol_type = other RNA
ctgcttaaaaggtacaactg

SEQ ID NO: 16056 - RNA, 20 nt, synthetic construct
  misc_feature 1..20: note = antisense sequence
  source 1..20: mol_type = other RNA
cctgcttaaaaggtacaact

SEQ ID NO: 16057 - RNA, 20 nt, synthetic construct
  misc_feature 1..20: note = antisense sequence
  source 1..20: mol_type = other RNA
ccctgcttaaaaggtacaac

SEQ ID NO: 16058 - RNA, 20 nt, synthetic construct
  misc_feature 1..20: note = antisense sequence
  source 1..20: mol_type = other RNA
tccctgcttaaaaggtacaa

SEQ ID NO: 16059 - RNA, 20 nt, synthetic construct
  misc_feature 1..20: note = antisense sequence
  source 1..20: mol_type = other RNA
ttccctgcttaaaaggtaca

SEQ ID NO: 16060 - RNA, 20 nt, synthetic construct
  misc_feature 1..20: note = antisense sequence
  source 1..20: mol_type = other RNA
ggtccttccctgcttaaaag

SEQ ID NO: 16061 - RNA, 20 nt, synthetic construct
  misc_feature 1..20: note = antisense sequence
  source 1..20: mol_type = other RNA
cagaggtccttccctgctta

SEQ ID NO: 16062 - RNA, 20 nt, synthetic construct
  misc_feature 1..20: note = antisense sequence
  source 1..20: mol_type = other RNA
actatccagaggtccttccc

SEQ ID NO: 16063 - RNA, 20 nt, synthetic construct
  misc_feature 1..20: note = antisense sequence
  source 1..20: mol_type = other RNA
cactatccagaggtccttcc

SEQ ID NO: 16064 - RNA, 20 nt, synthetic construct
  misc_feature 1..20: note = antisense sequence
  source 1..20: mol_type = other RNA
tcactatccagaggtccttc

SEQ ID NO: 16065 - RNA, 20 nt, synthetic construct
  misc_feature 1..20: note = antisense sequence
  source 1..20: mol_type = other RNA
aactcactatccagaggtcc

SEQ ID NO: 16066 - RNA, 20 nt, synthetic construct
  misc_feature 1..20: note = antisense sequence
  source 1..20: mol_type = other RNA
gaactcactatccagaggtc

SEQ ID NO: 16067 - RNA, 20 nt, synthetic construct
  misc_feature 1..20: note = antisense sequence
  source 1..20: mol_type = other RNA
tgaactcactatccagaggt

SEQ ID NO: 16068 - RNA, 20 nt, synthetic construct
  misc_feature 1..20: note = antisense sequence
  source 1..20: mol_type = other RNA
actgaactcactatccagag

SEQ ID NO: 16069 - RNA, 20 nt, synthetic construct
  misc_feature 1..20: note = antisense sequence
  source 1..20: mol_type = other RNA
aggaaactgaactcactatc

SEQ ID NO: 16070 - RNA, 20 nt, synthetic construct
  misc_feature 1..20: note = antisense sequence
  source 1..20: mol_type = other RNA
aacaggaaactgaactcact

SEQ ID NO: 16071 - RNA, 20 nt, synthetic construct
  misc_feature 1..20: note = antisense sequence
  source 1..20: mol_type = other RNA
caacaggaaactgaactcac

SEQ ID NO: 16072 - RNA, 20 nt, synthetic construct
  misc_feature 1..20: note = antisense sequence
  source 1..20: mol_type = other RNA
gggcaggataaagttcaaca

SEQ ID NO: 16073 - RNA, 20 nt, synthetic construct
  misc_feature 1..20: note = antisense sequence
  source 1..20: mol_type = other RNA
gtgggcaggataaagttcaa

SEQ ID NO: 16074 - RNA, 20 nt, synthetic construct
  misc_feature 1..20: note = antisense sequence
  source 1..20: mol_type = other RNA
aaaggtgggcaggataaagt

SEQ ID NO: 16075 - RNA, 20 nt, synthetic construct
  misc_feature 1..20: note = antisense sequence
  source 1..20: mol_type = other RNA
gtagctcagagggaaaggtg

SEQ ID NO: 16076 - RNA, 20 nt, synthetic construct
  misc_feature 1..20: note = antisense sequence
  source 1..20: mol_type = other RNA
gtgtagctcagagggaaagg

SEQ ID NO: 16077 - RNA, 20 nt, synthetic construct
  misc_feature 1..20: note = antisense sequence
  source 1..20: mol_type = other RNA
tagtatcatgttctgctacc

SEQ ID NO: 16078 - RNA, 20 nt, synthetic construct
  misc_feature 1..20: note = antisense sequence
  source 1..20: mol_type = other RNA
cacttagtatcatgttctgc

SEQ ID NO: 16079 - RNA, 20 nt, synthetic construct
  misc_feature 1..20: note = antisense sequence
  source 1..20: mol_type = other RNA
ccacttagtatcatgttctg

SEQ ID NO: 16080 - RNA, 20 nt, synthetic construct
  misc_feature 1..20: note = antisense sequence
  source 1..20: mol_type = other RNA
cactaacccaaagtttccac

SEQ ID NO: 16081 - RNA, 20 nt, synthetic construct
  misc_feature 1..20: note = antisense sequence
  source 1..20: mol_type = other RNA
ccactaacccaaagtttcca

SEQ ID NO: 16082 - RNA, 20 nt, synthetic construct
  misc_feature 1..20: note = antisense sequence
  source 1..20: mol_type = other RNA
tccactaacccaaagtttcc

SEQ ID NO: 16083 - RNA, 20 nt, synthetic construct
  misc_feature 1..20: note = antisense sequence
  source 1..20: mol_type = other RNA
atccactaacccaaagtttc

SEQ ID NO: 16084 - RNA, 20 nt, synthetic construct
  misc_feature 1..20: note = antisense sequence
  source 1..20: mol_type = other RNA
ctccattcgattttatccac

SEQ ID NO: 16085 - RNA, 20 nt, synthetic construct
  misc_feature 1..20: note = antisense sequence
  source 1..20: mol_type = other RNA
gtctccattcgattttatcc

SEQ ID NO: 16086 - RNA, 20 nt, synthetic construct
  misc_feature 1..20: note = antisense sequence
  source 1..20: mol_type = other RNA
ctcagtctccattcgatttt

SEQ ID NO: 16087 - RNA, 20 nt, synthetic construct
  misc_feature 1..20: note = antisense sequence
  source 1..20: mol_type = other RNA
tctcagtctccattcgattt

SEQ ID NO: 16088 - RNA, 20 nt, synthetic construct
  misc_feature 1..20: note = antisense sequence
  source 1..20: mol_type = other RNA
atctcagtctccattcgatt

SEQ ID NO: 16089 - RNA, 20 nt, synthetic construct
  misc_feature 1..20: note = antisense sequence
  source 1..20: mol_type = other RNA
ttcatctcagtctccattcg

SEQ ID NO: 16090 - RNA, 20 nt, synthetic construct
  misc_feature 1..20: note = antisense sequence
  source 1..20: mol_type = other RNA
ctggttttatgagagtcaga

SEQ ID NO: 16091 - RNA, 20 nt, synthetic construct
  misc_feature 1..20: note = antisense sequence
  source 1..20: mol_type = other RNA
tggctgttgataatctggtt

SEQ ID NO: 16092 - RNA, 20 nt, synthetic construct
  misc_feature 1..20: note = antisense sequence
  source 1..20: mol_type = other RNA
ctggctgttgataatctggt

SEQ ID NO: 16093 - RNA, 20 nt, synthetic construct
  misc_feature 1..20: note = antisense sequence
  source 1..20: mol_type = other RNA
cactggctgttgataatctg

SEQ ID NO: 16094 - RNA, 20 nt, synthetic construct
  misc_feature 1..20: note = antisense sequence
  source 1..20: mol_type = other RNA
gacactggctgttgataatc

SEQ ID NO: 16095 - RNA, 20 nt, synthetic construct
  misc_feature 1..20: note = antisense sequence
  source 1..20: mol_type = other RNA
gtgacactggctgttgataa

SEQ ID NO: 16096 - RNA, 20 nt, synthetic construct
  misc_feature 1..20: note = antisense sequence
  source 1..20: mol_type = other RNA
cgtgacactggctgttgata

SEQ ID NO: 16097 - RNA, 20 nt, synthetic construct
  misc_feature 1..20: note = antisense sequence
  source 1..20: mol_type = other RNA
accgtgacactggctgttga

SEQ ID NO: 16098 - RNA, 20 nt, synthetic construct
  misc_feature 1..20: note = antisense sequence
  source 1..20: mol_type = other RNA
taccgtgacactggctgttg

SEQ ID NO: 16099 - RNA, 20 nt, synthetic construct
  misc_feature 1..20: note = antisense sequence
  source 1..20: mol_type = other RNA
ctaccgtgacactggctgtt

SEQ ID NO: 16100 - RNA, 20 nt, synthetic construct
  misc_feature 1..20: note = antisense sequence
  source 1..20: mol_type = other RNA
gctaccgtgacactggctgt

SEQ ID NO: 16101 - RNA, 20 nt, synthetic construct
  misc_feature 1..20: note = antisense sequence
  source 1..20: mol_type = other RNA
tagggctaccgtgacactgg

SEQ ID NO: 16102 - RNA, 20 nt, synthetic construct
  misc_feature 1..20: note = antisense sequence
  source 1..20: mol_type = other RNA
ctagggctaccgtgacactg

SEQ ID NO: 16103 - RNA, 20 nt, synthetic construct
  misc_feature 1..20: note = antisense sequence
  source 1..20: mol_type = other RNA
gctagggctaccgtgacact

SEQ ID NO: 16104 - RNA, 20 nt, synthetic construct
  misc_feature 1..20: note = antisense sequence
  source 1..20: mol_type = other RNA
agctagggctaccgtgacac

SEQ ID NO: 16105 - RNA, 20 nt, synthetic construct
  misc_feature 1..20: note = antisense sequence
  source 1..20: mol_type = other RNA
cagctagggctaccgtgaca

SEQ ID NO: 16106 - RNA, 20 nt, synthetic construct
  misc_feature 1..20: note = antisense sequence
  source 1..20: mol_type = other RNA
atctgcttcccttcacaatt

SEQ ID NO: 16107 - RNA, 20 nt, synthetic construct
  misc_feature 1..20: note = antisense sequence
  source 1..20: mol_type = other RNA
ggaaaaccagactcccatct

SEQ ID NO: 16108 - RNA, 20 nt, synthetic construct
  misc_feature 1..20: note = antisense sequence
  source 1..20: mol_type = other RNA
aggaaaaccagactcccatc

SEQ ID NO: 16109 - RNA, 20 nt, synthetic construct
  misc_feature 1..20: note = antisense sequence
  source 1..20: mol_type = other RNA
caggaaaaccagactcccat

SEQ ID NO: 16110 - RNA, 20 nt, synthetic construct
  misc_feature 1..20: note = antisense sequence
  source 1..20: mol_type = other RNA
actatacaggaaaaccagac

SEQ ID NO: 16111 - RNA, 20 nt, synthetic construct
  misc_feature 1..20: note = antisense sequence
  source 1..20: mol_type = other RNA
ccactatacaggaaaaccag

SEQ ID NO: 16112 - RNA, 20 nt, synthetic construct
  misc_feature 1..20: note = antisense sequence
  source 1..20: mol_type = other RNA
caccactatacaggaaaacc

SEQ ID NO: 16113 - RNA, 20 nt, synthetic construct
  misc_feature 1..20: note = antisense sequence
  source 1..20: mol_type = other RNA
ctgccaccactatacaggaa

SEQ ID NO: 16114 - RNA, 20 nt, synthetic construct
  misc_feature 1..20: note = antisense sequence
  source 1..20: mol_type = other RNA
tctgccaccactatacagga

SEQ ID NO: 16115 - RNA, 20 nt, synthetic construct
  misc_feature 1..20: note = antisense sequence
  source 1..20: mol_type = other RNA
atctgccaccactatacagg

SEQ ID NO: 16116 - RNA, 20 nt, synthetic construct
  misc_feature 1..20: note = antisense sequence
  source 1..20: mol_type = other RNA
ggatctgccaccactataca

SEQ ID NO: 16117 - RNA, 20 nt, synthetic construct
  misc_feature 1..20: note = antisense sequence
  source 1..20: mol_type = other RNA
gggatctgccaccactatac

SEQ ID NO: 16118 - RNA, 20 nt, synthetic construct
  misc_feature 1..20: note = antisense sequence
  source 1..20: mol_type = other RNA
tgggatctgccaccactata

SEQ ID NO: 16119 - RNA, 20 nt, synthetic construct
  misc_feature 1..20: note = antisense sequence
  source 1..20: mol_type = other RNA
atgggatctgccaccactat

SEQ ID NO: 16120 - RNA, 20 nt, synthetic construct
  misc_feature 1..20: note = antisense sequence
  source 1..20: mol_type = other RNA
gatgggatctgccaccacta

SEQ ID NO: 16121 - RNA, 20 nt, synthetic construct
  misc_feature 1..20: note = antisense sequence
  source 1..20: mol_type = other RNA
ctaatcctggctagatggga

SEQ ID NO: 16122 - RNA, 20 nt, synthetic construct
  misc_feature 1..20: note = antisense sequence
  source 1..20: mol_type = other RNA
tcatctctaatcctggctag

SEQ ID NO: 16123 - RNA, 20 nt, synthetic construct
  misc_feature 1..20: note = antisense sequence
  source 1..20: mol_type = other RNA
aatcatctctaatcctggct

SEQ ID NO: 16124 - RNA, 20 nt, synthetic construct
  misc_feature 1..20: note = antisense sequence
  source 1..20: mol_type = other RNA
gcctttacccagtttgccat

SEQ ID NO: 16125 - RNA, 20 nt, synthetic construct
  misc_feature 1..20: note = antisense sequence
  source 1..20: mol_type = other RNA
ttgcctttacccagtttgcc

SEQ ID NO: 16126 - RNA, 20 nt, synthetic construct
  misc_feature 1..20: note = antisense sequence
  source 1..20: mol_type = other RNA
gttgcctttacccagtttgc

SEQ ID NO: 16127 - RNA, 20 nt, synthetic construct
  misc_feature 1..20: note = antisense sequence
  source 1..20: mol_type = other RNA
ggttgcctttacccagtttg

SEQ ID NO: 16128 - RNA, 20 nt, synthetic construct
  misc_feature 1..20: note = antisense sequence
  source 1..20: mol_type = other RNA
tggttgcctttacccagttt

SEQ ID NO: 16129 - RNA, 20 nt, synthetic construct
  misc_feature 1..20: note = antisense sequence
  source 1..20: mol_type = other RNA
ttggttgcctttacccagtt

SEQ ID NO: 16130 - RNA, 20 nt, synthetic construct
  misc_feature 1..20: note = antisense sequence
  source 1..20: mol_type = other RNA
gaagaccagaattggaagtt

SEQ ID NO: 16131 - RNA, 20 nt, synthetic construct
  misc_feature 1..20: note = antisense sequence
  source 1..20: mol_type = other RNA
ggattaacagaagaccagaa

SEQ ID NO: 16132 - RNA, 20 nt, synthetic construct
  misc_feature 1..20: note = antisense sequence
  source 1..20: mol_type = other RNA
aggattaacagaagaccaga

SEQ ID NO: 16133 - RNA, 20 nt, synthetic construct
  misc_feature 1..20: note = antisense sequence
  source 1..20: mol_type = other RNA
ctaggattaacagaagacca

SEQ ID NO: 16134 - RNA, 20 nt, synthetic construct
  misc_feature 1..20: note = antisense sequence
  source 1..20: mol_type = other RNA
tcatattgttcctccatccc

SEQ ID NO: 16135 - RNA, 20 nt, synthetic construct
  misc_feature 1..20: note = antisense sequence
  source 1..20: mol_type = other RNA
atcatattgttcctccatcc

SEQ ID NO: 16136 - RNA, 20 nt, synthetic construct
  misc_feature 1..20: note = antisense sequence
  source 1..20: mol_type = other RNA
gacacttaatggtcagtagc

SEQ ID NO: 16137 - RNA, 20 nt, synthetic construct
  misc_feature 1..20: note = antisense sequence
  source 1..20: mol_type = other RNA
ggacacttaatggtcagtag

SEQ ID NO: 16138 - RNA, 20 nt, synthetic construct
  misc_feature 1..20: note = antisense sequence
  source 1..20: mol_type = other RNA
cataattcagccagcagaaa

SEQ ID NO: 16139 - RNA, 20 nt, synthetic construct
  misc_feature 1..20: note = antisense sequence
  source 1..20: mol_type = other RNA
ggcataattcagccagcaga

SEQ ID NO: 16140 - RNA, 20 nt, synthetic construct
  misc_feature 1..20: note = antisense sequence
  source 1..20: mol_type = other RNA
tagatcctttatggtgctgt

SEQ ID NO: 16141 - RNA, 20 nt, synthetic construct
  misc_feature 1..20: note = antisense sequence
  source 1..20: mol_type = other RNA
gtagatcctttatggtgctg

SEQ ID NO: 16142 - RNA, 20 nt, synthetic construct
  misc_feature 1..20: note = antisense sequence
  source 1..20: mol_type = other RNA
tgtagatcctttatggtgct

SEQ ID NO: 16143 - RNA, 20 nt, synthetic construct
  misc_feature 1..20: note = antisense sequence
  source 1..20: mol_type = other RNA
atgtagatcctttatggtgc

SEQ ID NO: 16144 - RNA, 20 nt, synthetic construct
  misc_feature 1..20: note = antisense sequence
  source 1..20: mol_type = other RNA
gtcttatgtagggctttgtt

SEQ ID NO: 16145 - RNA, 20 nt, synthetic construct
  misc_feature 1..20: note = antisense sequence
  source 1..20: mol_type = other RNA
tgtcttatgtagggctttgt

SEQ ID NO: 16146 - RNA, 20 nt, synthetic construct
  misc_feature 1..20: note = antisense sequence
  source 1..20: mol_type = other RNA
ctgtcttatgtagggctttg

SEQ ID NO: 16147 - RNA, 20 nt, synthetic construct
  misc_feature 1..20: note = antisense sequence
  source 1..20: mol_type = other RNA
ttctgtcttatgtagggctt

SEQ ID NO: 16148 - RNA, 20 nt, synthetic construct
  misc_feature 1..20: note = antisense sequence
  source 1..20: mol_type = other RNA
cttctgtcttatgtagggct

SEQ ID NO: 16149 - RNA, 20 nt, synthetic construct
  misc_feature 1..20: note = antisense sequence
  source 1..20: mol_type = other RNA
ttaagctctggcattggaaa

SEQ ID NO: 16150 - RNA, 20 nt, synthetic construct
  misc_feature 1..20: note = antisense sequence
  source 1..20: mol_type = other RNA
ccatttgatgtcatattggg

SEQ ID NO: 16151 - RNA, 20 nt, synthetic construct
  misc_feature 1..20: note = antisense sequence
  source 1..20: mol_type = other RNA
gggtaaccatttgatgtcat

SEQ ID NO: 16152 - RNA, 20 nt, synthetic construct
  misc_feature 1..20: note = antisense sequence
  source 1..20: mol_type = other RNA
agggtaaccatttgatgtca

SEQ ID NO: 16153 - RNA, 20 nt, synthetic construct
  misc_feature 1..20: note = antisense sequence
  source 1..20: mol_type = other RNA
cagggtaaccatttgatgtc

SEQ ID NO: 16154 - RNA, 20 nt, synthetic construct
  misc_feature 1..20: note = antisense sequence
  source 1..20: mol_type = other RNA
acagggtaaccatttgatgt

SEQ ID NO: 16155 - RNA, 20 nt, synthetic construct
  misc_feature 1..20: note = antisense sequence
  source 1..20: mol_type = other RNA
gcacagggtaaccatttgat

SEQ ID NO: 16156 - RNA, 20 nt, synthetic construct
  misc_feature 1..20: note = antisense sequence
  source 1..20: mol_type = other RNA
agcacagggtaaccatttga

SEQ ID NO: 16157 - RNA, 20 nt, synthetic construct
  misc_feature 1..20: note = antisense sequence
  source 1..20: mol_type = other RNA
cagcacagggtaaccatttg

SEQ ID NO: 16158 - RNA, 20 nt, synthetic construct
  misc_feature 1..20: note = antisense sequence
  source 1..20: mol_type = other RNA
acagcacagggtaaccattt

SEQ ID NO: 16159 - RNA, 20 nt, synthetic construct
  misc_feature 1..20: note = antisense sequence
  source 1..20: mol_type = other RNA
tacagcacagggtaaccatt

SEQ ID NO: 16160 - RNA, 20 nt, synthetic construct
  misc_feature 1..20: note = antisense sequence
  source 1..20: mol_type = other RNA
gtacagcacagggtaaccat

SEQ ID NO: 16161 - RNA, 20 nt, synthetic construct
  misc_feature 1..20: note = antisense sequence
  source 1..20: mol_type = other RNA
ggtacagcacagggtaacca

SEQ ID NO: 16162 - RNA, 20 nt, synthetic construct
  misc_feature 1..20: note = antisense sequence
  source 1..20: mol_type = other RNA
gggtacagcacagggtaacc

SEQ ID NO: 16163 - RNA, 20 nt, synthetic construct
  misc_feature 1..20: note = antisense sequence
  source 1..20: mol_type = other RNA
ttgggtacagcacagggtaa

SEQ ID NO: 16164 - RNA, 20 nt, synthetic construct
  misc_feature 1..20: note = antisense sequence
  source 1..20: mol_type = other RNA
cagttgggtacagcacaggg

SEQ ID NO: 16165 - RNA, 20 nt, synthetic construct
  misc_feature 1..20: note = antisense sequence
  source 1..20: mol_type = other RNA
tccagttgggtacagcacag

SEQ ID NO: 16166 - RNA, 20 nt, synthetic construct
  misc_feature 1..20: note = antisense sequence
  source 1..20: mol_type = other RNA
atccagttgggtacagcaca

SEQ ID NO: 16167 - RNA, 20 nt, synthetic construct
  misc_feature 1..20: note = antisense sequence
  source 1..20: mol_type = other RNA
aatccagttgggtacagcac

SEQ ID NO: 16168 - RNA, 20 nt, synthetic construct
  misc_feature 1..20: note = antisense sequence
  source 1..20: mol_type = other RNA
caatccagttgggtacagca

SEQ ID NO: 16169 - RNA, 20 nt, synthetic construct
  misc_feature 1..20: note = antisense sequence
  source 1..20: mol_type = other RNA
gacaatccagttgggtacag

SEQ ID NO: 16170 - RNA, 20 nt, synthetic construct
  misc_feature 1..20: note = antisense sequence
  source 1..20: mol_type = other RNA
atgacaatccagttgggtac

SEQ ID NO: 16171 - RNA, 20 nt, synthetic construct
  misc_feature 1..20: note = antisense sequence
  source 1..20: mol_type = other RNA
agaagatgacaatccagttg

SEQ ID NO: 16172 - RNA, 20 nt, synthetic construct
  misc_feature 1..20: note = antisense sequence
  source 1..20: mol_type = other RNA
tcagaagatgacaatccagt

SEQ ID NO: 16173 - RNA, 20 nt, synthetic construct
  misc_feature 1..20: note = antisense sequence
  source 1..20: mol_type = other RNA
ctcagaagatgacaatccag

SEQ ID NO: 16174 - RNA, 20 nt, synthetic construct
  misc_feature 1..20: note = antisense sequence
  source 1..20: mol_type = other RNA
cctcagaagatgacaatcca

SEQ ID NO: 16175 - RNA, 20 nt, synthetic construct
  misc_feature 1..20: note = antisense sequence
  source 1..20: mol_type = other RNA
acctcagaagatgacaatcc

SEQ ID NO: 16176 - RNA, 20 nt, synthetic construct
  misc_feature 1..20: note = antisense sequence
  source 1..20: mol_type = other RNA
tacctcagaagatgacaatc

SEQ ID NO: 16177 - RNA, 20 nt, synthetic construct
  misc_feature 1..20: note = antisense sequence
  source 1..20: mol_type = other RNA
gacttacctcagaagatgac

SEQ ID NO: 16178 - RNA, 20 nt, synthetic construct
  misc_feature 1..20: note = antisense sequence
  source 1..20: mol_type = other RNA
tgacttacctcagaagatga

SEQ ID NO: 16179 - RNA, 20 nt, synthetic construct
  misc_feature 1..20: note = antisense sequence
  source 1..20: mol_type = other RNA
atgacttacctcagaagatg

SEQ ID NO: 16180 - RNA, 20 nt, synthetic construct
  misc_feature 1..20: note = antisense sequence
  source 1..20: mol_type = other RNA
acatgacttacctcagaaga

SEQ ID NO: 16181 - RNA, 20 nt, synthetic construct
  misc_feature 1..20: note = antisense sequence
  source 1..20: mol_type = other RNA
cacatgacttacctcagaag

SEQ ID NO: 16182 - RNA, 20 nt, synthetic construct
  misc_feature 1..20: note = antisense sequence
  source 1..20: mol_type = other RNA
acacatgacttacctcagaa

SEQ ID NO: 16183 - RNA, 20 nt, synthetic construct
  misc_feature 1..20: note = antisense sequence
  source 1..20: mol_type = other RNA
cacacatgacttacctcaga

SEQ ID NO: 16184 - RNA, 20 nt, synthetic construct
  misc_feature 1..20: note = antisense sequence
  source 1..20: mol_type = other RNA
gcacacatgacttacctcag

SEQ ID NO: 16185 - RNA, 20 nt, synthetic construct
  misc_feature 1..20: note = antisense sequence
  source 1..20: mol_type = other RNA
ggcacacatgacttacctca

SEQ ID NO: 16186 - RNA, 20 nt, synthetic construct
  misc_feature 1..20: note = antisense sequence
  source 1..20: mol_type = other RNA
aggcacacatgacttacctc

SEQ ID NO: 16187 - RNA, 20 nt, synthetic construct
  misc_feature 1..20: note = antisense sequence
  source 1..20: mol_type = other RNA
aaggcacacatgacttacct

SEQ ID NO: 16188 - RNA, 20 nt, synthetic construct
  misc_feature 1..20: note = antisense sequence
  source 1..20: mol_type = other RNA
caaggcacacatgacttacc

SEQ ID NO: 16189 - RNA, 20 nt, synthetic construct
  misc_feature 1..20: note = antisense sequence
  source 1..20: mol_type = other RNA
ccaaggcacacatgacttac

SEQ ID NO: 16190 - RNA, 20 nt, synthetic construct
  misc_feature 1..20: note = antisense sequence
  source 1..20: mol_type = other RNA
tccaaggcacacatgactta

SEQ ID NO: 16191 - RNA, 20 nt, synthetic construct
  misc_feature 1..20: note = antisense sequence
  source 1..20: mol_type = other RNA
ttccaaggcacacatgactt

SEQ ID NO: 16192 - RNA, 20 nt, synthetic construct
  misc_feature 1..20: note = antisense sequence
  source 1..20: mol_type = other RNA
aattccaaggcacacatgac

SEQ ID NO: 16193 - RNA, 20 nt, synthetic construct
  misc_feature 1..20: note = antisense sequence
  source 1..20: mol_type = other RNA
taattccaaggcacacatga

SEQ ID NO: 16194 - RNA, 20 nt, synthetic construct
  misc_feature 1..20: note = antisense sequence
  source 1..20: mol_type = other RNA
ataattccaaggcacacatg

SEQ ID NO: 16195 - RNA, 20 nt, synthetic construct
  misc_feature 1..20: note = antisense sequence
  source 1..20: mol_type = other RNA
gacataattccaaggcacac

SEQ ID NO: 16196 - RNA, 20 nt, synthetic construct
  misc_feature 1..20: note = antisense sequence
  source 1..20: mol_type = other RNA
atgacataattccaaggcac

SEQ ID NO: 16197 - RNA, 20 nt, synthetic construct
  misc_feature 1..20: note = antisense sequence
  source 1..20: mol_type = other RNA
gtatcatgcagaacaaaagg

SEQ ID NO: 16198 - RNA, 20 nt, synthetic construct
  misc_feature 1..20: note = antisense sequence
  source 1..20: mol_type = other RNA
acagcagctctagggaataa

SEQ ID NO: 16199 - RNA, 20 nt, synthetic construct
  misc_feature 1..20: note = antisense sequence
  source 1..20: mol_type = other RNA
tacagcagctctagggaata

SEQ ID NO: 16200 - RNA, 20 nt, synthetic construct
  misc_feature 1..20: note = antisense sequence
  source 1..20: mol_type = other RNA
gaattaacactgtcaacacc

SEQ ID NO: 16201 - RNA, 20 nt, synthetic construct
  misc_feature 1..20: note = antisense sequence
  source 1..20: mol_type = other RNA
gggaattaacactgtcaaca

SEQ ID NO: 16202 - RNA, 20 nt, synthetic construct
  misc_feature 1..20: note = antisense sequence
  source 1..20: mol_type = other RNA
agggaattaacactgtcaac

SEQ ID NO: 16203 - RNA, 20 nt, synthetic construct
  misc_feature 1..20: note = antisense sequence
  source 1..20: mol_type = other RNA
gagggaattaacactgtcaa

SEQ ID NO: 16204 - RNA, 20 nt, synthetic construct
  misc_feature 1..20: note = antisense sequence
  source 1..20: mol_type = other RNA
agagggaattaacactgtca

SEQ ID NO: 16205 - RNA, 20 nt, synthetic construct
  misc_feature 1..20: note = antisense sequence
  source 1..20: mol_type = other RNA
cagagggaattaacactgtc

SEQ ID NO: 16206 - RNA, 20 nt, synthetic construct
  misc_feature 1..20: note = antisense sequence
  source 1..20: mol_type = other RNA
ccagagggaattaacactgt

SEQ ID NO: 16207 - RNA, 20 nt, synthetic construct
  misc_feature 1..20: note = antisense sequence
  source 1..20: mol_type = other RNA
tccagagggaattaacactg

SEQ ID NO: 16208 - RNA, 20 nt, synthetic construct
  misc_feature 1..20: note = antisense sequence
  source 1..20: mol_type = other RNA
ctccagagggaattaacact

SEQ ID NO: 16209 - RNA, 20 nt, synthetic construct
  misc_feature 1..20: note = antisense sequence
  source 1..20: mol_type = other RNA
cctccagagggaattaacac

SEQ ID NO: 16210 - RNA, 20 nt, synthetic construct
  misc_feature 1..20: note = antisense sequence
  source 1..20: mol_type = other RNA
gcctccagagggaattaaca

SEQ ID NO: 16211 - RNA, 20 nt, synthetic construct
  misc_feature 1..20: note = antisense sequence
  source 1..20: mol_type = other RNA
agcctccagagggaattaac

SEQ ID NO: 16212 - RNA, 20 nt, synthetic construct
  misc_feature 1..20: note = antisense sequence
  source 1..20: mol_type = other RNA
cagttgtcaccagaagctag

SEQ ID NO: 16213 - RNA, 20 nt, synthetic construct
  misc_feature 1..20: note = antisense sequence
  source 1..20: mol_type = other RNA
ttgccagttgtcaccagaag

SEQ ID NO: 16214 - RNA, 20 nt, synthetic construct
  misc_feature 1..20: note = antisense sequence
  source 1..20: mol_type = other RNA
gggttgccagttgtcaccag

SEQ ID NO: 16215 - RNA, 20 nt, synthetic construct
  misc_feature 1..20: note = antisense sequence
  source 1..20: mol_type = other RNA
agggttgccagttgtcacca

SEQ ID NO: 16216 - RNA, 20 nt, synthetic construct
  misc_feature 1..20: note = antisense sequence
  source 1..20: mol_type = other RNA
ctagggttgccagttgtcac

SEQ ID NO: 16217 - RNA, 20 nt, synthetic construct
  misc_feature 1..20: note = antisense sequence
  source 1..20: mol_type = other RNA
aggagctatgctgccgcaag

SEQ ID NO: 16218 - RNA, 20 nt, synthetic construct
  misc_feature 1..20: note = antisense sequence
  source 1..20: mol_type = other RNA
cagaggcagagataggagct

SEQ ID NO: 16219 - RNA, 20 nt, synthetic construct
  misc_feature 1..20: note = antisense sequence
  source 1..20: mol_type = other RNA
agagaaggagaacacataga

SEQ ID NO: 16220 - RNA, 20 nt, synthetic construct
  misc_feature 1..20: note = antisense sequence
  source 1..20: mol_type = other RNA
aaagagagaaggagaacaca

SEQ ID NO: 16221 - RNA, 20 nt, synthetic construct
  misc_feature 1..20: note = antisense sequence
  source 1..20: mol_type = other RNA
atggtgagtgtgcagaaaca

SEQ ID NO: 16222 - RNA, 20 nt, synthetic construct
  misc_feature 1..20: note = antisense sequence
  source 1..20: mol_type = other RNA
ctaatggtgagtgtgcagaa

SEQ ID NO: 16223 - RNA, 20 nt, synthetic construct
  misc_feature 1..20: note = antisense sequence
  source 1..20: mol_type = other RNA
tctaatggtgagtgtgcaga

SEQ ID NO: 16224 - RNA, 20 nt, synthetic construct
  misc_feature 1..20: note = antisense sequence
  source 1..20: mol_type = other RNA
atctaatggtgagtgtgcag

SEQ ID NO: 16225 - RNA, 20 nt, synthetic construct
  misc_feature 1..20: note = antisense sequence
  source 1..20: mol_type = other RNA
aatctaatggtgagtgtgca

SEQ ID NO: 16226 - RNA, 20 nt, synthetic construct
  misc_feature 1..20: note = antisense sequence
  source 1..20: mol_type = other RNA
accctaaatctaatggtgag

SEQ ID NO: 16227 - RNA, 20 nt, synthetic construct
  misc_feature 1..20: note = antisense sequence
  source 1..20: mol_type = other RNA
tcactctggatttagggtgg

SEQ ID NO: 16228 - RNA, 20 nt, synthetic construct
  misc_feature 1..20: note = antisense sequence
  source 1..20: mol_type = other RNA
atcactctggatttagggtg

SEQ ID NO: 16229 - RNA, 20 nt, synthetic construct
  misc_feature 1..20: note = antisense sequence
  source 1..20: mol_type = other RNA
agatcactctggatttaggg

SEQ ID NO: 16230 - RNA, 20 nt, synthetic construct
  misc_feature 1..20: note = antisense sequence
  source 1..20: mol_type = other RNA
ctaaatctccctagaactag

SEQ ID NO: 16231 - RNA, 20 nt, synthetic construct
  misc_feature 1..20: note = antisense sequence
  source 1..20: mol_type = other RNA
cctaaatctccctagaacta

SEQ ID NO: 16232 - RNA, 20 nt, synthetic construct
  misc_feature 1..20: note = antisense sequence
  source 1..20: mol_type = other RNA
tgcctaaatctccctagaac

SEQ ID NO: 16233 - RNA, 20 nt, synthetic construct
  misc_feature 1..20: note = antisense sequence
  source 1..20: mol_type = other RNA
atgcctaaatctccctagaa

SEQ ID NO: 16234 - RNA, 20 nt, synthetic construct
  misc_feature 1..20: note = antisense sequence
  source 1..20: mol_type = other RNA
atatgcctaaatctccctag

SEQ ID NO: 16235 - RNA, 20 nt, synthetic construct
  misc_feature 1..20: note = antisense sequence
  source 1..20: mol_type = other RNA
gatatgcctaaatctcccta

SEQ ID NO: 16236 - RNA, 20 nt, synthetic construct
  misc_feature 1..20: note = antisense sequence
  source 1..20: mol_type = other RNA
gtggattgaatagtggtccc

SEQ ID NO: 16237 - RNA, 20 nt, synthetic construct
  misc_feature 1..20: note = antisense sequence
  source 1..20: mol_type = other RNA
gctattatttgggatgtgag

SEQ ID NO: 16238 - RNA, 20 nt, synthetic construct
  misc_feature 1..20: note = antisense sequence
  source 1..20: mol_type = other RNA
gcactaaaccataatgaacc

SEQ ID NO: 16239 - RNA, 20 nt, synthetic construct
  misc_feature 1..20: note = antisense sequence
  source 1..20: mol_type = other RNA
ggcactaaaccataatgaac

SEQ ID NO: 16240 - RNA, 20 nt, synthetic construct
  misc_feature 1..20: note = antisense sequence
  source 1..20: mol_type = other RNA
ctgacatcatgcacacatta

SEQ ID NO: 16241 - RNA, 20 nt, synthetic construct
  misc_feature 1..20: note = antisense sequence
  source 1..20: mol_type = other RNA
tctgacatcatgcacacatt

SEQ ID NO: 16242 - RNA, 20 nt, synthetic construct
  misc_feature 1..20: note = antisense sequence
  source 1..20: mol_type = other RNA
aattctgacatcatgcacac

SEQ ID NO: 16243 - RNA, 20 nt, synthetic construct
  misc_feature 1..20: note = antisense sequence
  source 1..20: mol_type = other RNA
caaattctgacatcatgcac

SEQ ID NO: 16244 - RNA, 20 nt, synthetic construct
  misc_feature 1..20: note = antisense sequence
  source 1..20: mol_type = other RNA
tccaaattctgacatcatgc

SEQ ID NO: 16245 - RNA, 20 nt, synthetic construct
  misc_feature 1..20: note = antisense sequence
  source 1..20: mol_type = other RNA
cttgatttctgggaacactt

SEQ ID NO: 16246 - RNA, 20 nt, synthetic construct
  misc_feature 1..20: note = antisense sequence
  source 1..20: mol_type = other RNA
gatcacaagccaattagcat

SEQ ID NO: 16247 - RNA, 20 nt, synthetic construct
  misc_feature 1..20: note = antisense sequence
  source 1..20: mol_type = other RNA
ccttgcccttaggaaaacat

SEQ ID NO: 16248 - RNA, 20 nt, synthetic construct
  misc_feature 1..20: note = antisense sequence
  source 1..20: mol_type = other RNA
tagagggaaattccaaaggc

SEQ ID NO: 16249 - RNA, 20 nt, synthetic construct
  misc_feature 1..20: note = antisense sequence
  source 1..20: mol_type = other RNA
ggattagagggaaattccaa

SEQ ID NO: 16250 - RNA, 20 nt, synthetic construct
  misc_feature 1..20: note = antisense sequence
  source 1..20: mol_type = other RNA
ttggattagagggaaattcc

SEQ ID NO: 16251 - RNA, 20 nt, synthetic construct
  misc_feature 1..20: note = antisense sequence
  source 1..20: mol_type = other RNA
tagtaaaccttttgcttccc

SEQ ID NO: 16252 - RNA, 20 nt, synthetic construct
  misc_feature 1..20: note = antisense sequence
  source 1..20: mol_type = other RNA
ctagtaaaccttttgcttcc

SEQ ID NO: 16253 - RNA, 20 nt, synthetic construct
  misc_feature 1..20: note = antisense sequence
  source 1..20: mol_type = other RNA
cctagtaaaccttttgcttc

SEQ ID NO: 16254 - RNA, 20 nt, synthetic construct
  misc_feature 1..20: note = antisense sequence
  source 1..20: mol_type = other RNA
ctcagtctacatgggaggta

SEQ ID NO: 16255 - RNA, 20 nt, synthetic construct
  misc_feature 1..20: note = antisense sequence
  source 1..20: mol_type = other RNA
cactcagtctacatgggagg

SEQ ID NO: 16256 - RNA, 20 nt, synthetic construct
  misc_feature 1..20: note = antisense sequence
  source 1..20: mol_type = other RNA
acactcagtctacatgggag

SEQ ID NO: 16257 - RNA, 20 nt, synthetic construct
  misc_feature 1..20: note = antisense sequence
  source 1..20: mol_type = other RNA
gacactcagtctacatggga

SEQ ID NO: 16258 - RNA, 20 nt, synthetic construct
  misc_feature 1..20: note = antisense sequence
  source 1..20: mol_type = other RNA
cgagagaccttcatctgtat

SEQ ID NO: 16259 - RNA, 20 nt, synthetic construct
  misc_feature 1..20: note = antisense sequence
  source 1..20: mol_type = other RNA
agcgagagaccttcatctgt

SEQ ID NO: 16260 - RNA, 20 nt, synthetic construct
  misc_feature 1..20: note = antisense sequence
  source 1..20: mol_type = other RNA
aagcgagagaccttcatctg

SEQ ID NO: 16261 - RNA, 20 nt, synthetic construct
  misc_feature 1..20: note = antisense sequence
  source 1..20: mol_type = other RNA
aaagcgagagaccttcatct

SEQ ID NO: 16262 - RNA, 20 nt, synthetic construct
  misc_feature 1..20: note = antisense sequence
  source 1..20: mol_type = other RNA
aaaagcgagagaccttcatc

SEQ ID NO: 16263 - RNA, 20 nt, synthetic construct
  misc_feature 1..20: note = antisense sequence
  source 1..20: mol_type = other RNA
gaaaagcgagagaccttcat

SEQ ID NO: 16264 - RNA, 20 nt, synthetic construct
  misc_feature 1..20: note = antisense sequence
  source 1..20: mol_type = other RNA
ttgaaaagcgagagaccttc

SEQ ID NO: 16265 - RNA, 20 nt, synthetic construct
  misc_feature 1..20: note = antisense sequence
  source 1..20: mol_type = other RNA
attgaaaagcgagagacctt

SEQ ID NO: 16266 - RNA, 20 nt, synthetic construct
  misc_feature 1..20: note = antisense sequence
  source 1..20: mol_type = other RNA
aattgaaaagcgagagacct

SEQ ID NO: 16267 - RNA, 20 nt, synthetic construct
  misc_feature 1..20: note = antisense sequence
  source 1..20: mol_type = other RNA
gcctgggtgacagagagaga

SEQ ID NO: 16268 - RNA, 20 nt, synthetic construct
  misc_feature 1..20: note = antisense sequence
  source 1..20: mol_type = other RNA
agcctgggtgacagagagag

SEQ ID NO: 16269 - RNA, 20 nt, synthetic construct
  misc_feature 1..20: note = antisense sequence
  source 1..20: mol_type = other RNA
cagcctgggtgacagagaga

SEQ ID NO: 16270 - RNA, 20 nt, synthetic construct
  misc_feature 1..20: note = antisense sequence
  source 1..20: mol_type = other RNA
tccagcctgggtgacagaga

SEQ ID NO: 16271 - RNA, 20 nt, synthetic construct
  misc_feature 1..20: note = antisense sequence
  source 1..20: mol_type = other RNA
actccagcctgggtgacaga

SEQ ID NO: 16272 - RNA, 20 nt, synthetic construct
  misc_feature 1..20: note = antisense sequence
  source 1..20: mol_type = other RNA
atcatttggacatgggagga

SEQ ID NO: 16273 - RNA, 20 nt, synthetic construct
  misc_feature 1..20: note = antisense sequence
  source 1..20: mol_type = other RNA
gaggcaggagaatcatttgg

SEQ ID NO: 16274 - RNA, 20 nt, synthetic construct
  misc_feature 1..20: note = antisense sequence
  source 1..20: mol_type = other RNA
tgaggcaggagaatcatttg

SEQ ID NO: 16275 - RNA, 20 nt, synthetic construct
  misc_feature 1..20: note = antisense sequence
  source 1..20: mol_type = other RNA
ctgaggcaggagaatcattt

SEQ ID NO: 16276 - RNA, 20 nt, synthetic construct
  misc_feature 1..20: note = antisense sequence
  source 1..20: mol_type = other RNA
tctgaggcaggagaatcatt

SEQ ID NO: 16277 - RNA, 20 nt, synthetic construct
  misc_feature 1..20: note = antisense sequence
  source 1..20: mol_type = other RNA
gtctgaggcaggagaatcat

SEQ ID NO: 16278 - RNA, 20 nt, synthetic construct
  misc_feature 1..20: note = antisense sequence
  source 1..20: mol_type = other RNA
agtctgaggcaggagaatca

SEQ ID NO: 16279 - RNA, 20 nt, synthetic construct
  misc_feature 1..20: note = antisense sequence
  source 1..20: mol_type = other RNA
gagtctgaggcaggagaatc

SEQ ID NO: 16280 - RNA, 20 nt, synthetic construct
  misc_feature 1..20: note = antisense sequence
  source 1..20: mol_type = other RNA
ggagtctgaggcaggagaat

SEQ ID NO: 16281 - RNA, 20 nt, synthetic construct
  misc_feature 1..20: note = antisense sequence
  source 1..20: mol_type = other RNA
ccagctacttgggagtctga

SEQ ID NO: 16282 - RNA, 20 nt, synthetic construct
  misc_feature 1..20: note = antisense sequence
  source 1..20: mol_type = other RNA
gctcacacctgtaattctag

SEQ ID NO: 16283 - RNA, 20 nt, synthetic construct
  misc_feature 1..20: note = antisense sequence
  source 1..20: mol_type = other RNA
ggctcacacctgtaattcta

SEQ ID NO: 16284 - RNA, 20 nt, synthetic construct
  misc_feature 1..20: note = antisense sequence
  source 1..20: mol_type = other RNA
tggctcacacctgtaattct

SEQ ID NO: 16285 - RNA, 20 nt, synthetic construct
  misc_feature 1..20: note = antisense sequence
  source 1..20: mol_type = other RNA
gtggctcacacctgtaattc

SEQ ID NO: 16286 - RNA, 20 nt, synthetic construct
  misc_feature 1..20: note = antisense sequence
  source 1..20: mol_type = other RNA
agtggctcacacctgtaatt

SEQ ID NO: 16287 - RNA, 20 nt, synthetic construct
  misc_feature 1..20: note = antisense sequence
  source 1..20: mol_type = other RNA
cagtggctcacacctgtaat

SEQ ID NO: 16288 - RNA, 20 nt, synthetic construct
  misc_feature 1..20: note = antisense sequence
  source 1..20: mol_type = other RNA
tactacagagagagaaaagc

SEQ ID NO: 16289 - RNA, 20 nt, synthetic construct
  misc_feature 1..20: note = antisense sequence
  source 1..20: mol_type = other RNA
gtgaggttgtaatggaaaag

SEQ ID NO: 16290 - RNA, 20 nt, synthetic construct
  misc_feature 1..20: note = antisense sequence
  source 1..20: mol_type = other RNA
ctagtgaggttgtaatggaa

SEQ ID NO: 16291 - RNA, 20 nt, synthetic construct
  misc_feature 1..20: note = antisense sequence
  source 1..20: mol_type = other RNA
gtactcttaccatgctactt

SEQ ID NO: 16292 - RNA, 20 nt, synthetic construct
  misc_feature 1..20: note = antisense sequence
  source 1..20: mol_type = other RNA
caccagccatacatacatat

SEQ ID NO: 16293 - RNA, 20 nt, synthetic construct
  misc_feature 1..20: note = antisense sequence
  source 1..20: mol_type = other RNA
gcaccagccatacatacata

SEQ ID NO: 16294 - RNA, 20 nt, synthetic construct
  misc_feature 1..20: note = antisense sequence
  source 1..20: mol_type = other RNA
ggttgttatgcaccagccat

SEQ ID NO: 16295 - RNA, 20 nt, synthetic construct
  misc_feature 1..20: note = antisense sequence
  source 1..20: mol_type = other RNA
aggttgttatgcaccagcca

SEQ ID NO: 16296 - RNA, 20 nt, synthetic construct
  misc_feature 1..20: note = antisense sequence
  source 1..20: mol_type = other RNA
aaggttgttatgcaccagcc

SEQ ID NO: 16297 - RNA, 20 nt, synthetic construct
  misc_feature 1..20: note = antisense sequence
  source 1..20: mol_type = other RNA
aaaggttgttatgcaccagc

SEQ ID NO: 16298 - RNA, 20 nt, synthetic construct
  misc_feature 1..20: note = antisense sequence
  source 1..20: mol_type = other RNA
gaaaggttgttatgcaccag

SEQ ID NO: 16299 - RNA, 20 nt, synthetic construct
  misc_feature 1..20: note = antisense sequence
  source 1..20: mol_type = other RNA
ggaaaggttgttatgcacca

SEQ ID NO: 16300 - RNA, 20 nt, synthetic construct
  misc_feature 1..20: note = antisense sequence
  source 1..20: mol_type = other RNA
gtatgggaaaggttgttatg

SEQ ID NO: 16301 - RNA, 20 nt, synthetic construct
  misc_feature 1..20: note = antisense sequence
  source 1..20: mol_type = other RNA
gctgtatgggaaaggttgtt

SEQ ID NO: 16302 - RNA, 20 nt, synthetic construct
  misc_feature 1..20: note = antisense sequence
  source 1..20: mol_type = other RNA
aagtgtgctgtatgggaaag

SEQ ID NO: 16303 - RNA, 20 nt, synthetic construct
  misc_feature 1..20: note = antisense sequence
  source 1..20: mol_type = other RNA
gtaagtgtgctgtatgggaa

SEQ ID NO: 16304 - RNA, 20 nt, synthetic construct
  misc_feature 1..20: note = antisense sequence
  source 1..20: mol_type = other RNA
tgtaagtgtgctgtatggga

SEQ ID NO: 16305 - RNA, 20 nt, synthetic construct
  misc_feature 1..20: note = antisense sequence
  source 1..20: mol_type = other RNA
ttgtaagtgtgctgtatggg

SEQ ID NO: 16306 - RNA, 20 nt, synthetic construct
  misc_feature 1..20: note = antisense sequence
  source 1..20: mol_type = other RNA
tttgtaagtgtgctgtatgg

SEQ ID NO: 16307 - RNA, 20 nt, synthetic construct
  misc_feature 1..20: note = antisense sequence
  source 1..20: mol_type = other RNA
ctttgtaagtgtgctgtatg

SEQ ID NO: 16308 - RNA, 20 nt, synthetic construct
  misc_feature 1..20: note = antisense sequence
  source 1..20: mol_type = other RNA
gatccatctttgtaagtgtg

SEQ ID NO: 16309 - RNA, 20 nt, synthetic construct
  misc_feature 1..20: note = antisense sequence
  source 1..20: mol_type = other RNA
gagatccatctttgtaagtg

SEQ ID NO: 16310 - RNA, 20 nt, synthetic construct
  misc_feature 1..20: note = antisense sequence
  source 1..20: mol_type = other RNA
atgacagccattgccatata

SEQ ID NO: 16311 - RNA, 20 nt, synthetic construct
  misc_feature 1..20: note = antisense sequence
  source 1..20: mol_type = other RNA
gcagtagtgtaaagaatctg

SEQ ID NO: 16312 - RNA, 20 nt, synthetic construct
  misc_feature 1..20: note = antisense sequence
  source 1..20: mol_type = other RNA
gagttgatactgaaaggatc

SEQ ID NO: 16313 - RNA, 20 nt, synthetic construct
  misc_feature 1..20: note = antisense sequence
  source 1..20: mol_type = other RNA
ctttccagagttgatactga

SEQ ID NO: 16314 - RNA, 20 nt, synthetic construct
  misc_feature 1..20: note = antisense sequence
  source 1..20: mol_type = other RNA
tctttccagagttgatactg

SEQ ID NO: 16315 - RNA, 20 nt, synthetic construct
  misc_feature 1..20: note = antisense sequence
  source 1..20: mol_type = other RNA
ggtcagttgatgtagtcatt

SEQ ID NO: 16316 - RNA, 20 nt, synthetic construct
  misc_feature 1..20: note = antisense sequence
  source 1..20: mol_type = other RNA
atggtcagttgatgtagtca

SEQ ID NO: 16317 - RNA, 20 nt, synthetic construct
  misc_feature 1..20: note = antisense sequence
  source 1..20: mol_type = other RNA
gatggtcagttgatgtagtc

SEQ ID NO: 16318 - RNA, 20 nt, synthetic construct
  misc_feature 1..20: note = antisense sequence
  source 1..20: mol_type = other RNA
agatggtcagttgatgtagt

SEQ ID NO: 16319 - RNA, 20 nt, synthetic construct
  misc_feature 1..20: note = antisense sequence
  source 1..20: mol_type = other RNA
gagatggtcagttgatgtag

SEQ ID NO: 16320 - RNA, 20 nt, synthetic construct
  misc_feature 1..20: note = antisense sequence
  source 1..20: mol_type = other RNA
tgagatggtcagttgatgta

SEQ ID NO: 16321 - RNA, 20 nt, synthetic construct
  misc_feature 1..20: note = antisense sequence
  source 1..20: mol_type = other RNA
ttgagatggtcagttgatgt

SEQ ID NO: 16322 - RNA, 20 nt, synthetic construct
  misc_feature 1..20: note = antisense sequence
  source 1..20: mol_type = other RNA
gtttgagatggtcagttgat

SEQ ID NO: 16323 - RNA, 20 nt, synthetic construct
  misc_feature 1..20: note = antisense sequence
  source 1..20: mol_type = other RNA
cgtttgagatggtcagttga

SEQ ID NO: 16324 - RNA, 20 nt, synthetic construct
  misc_feature 1..20: note = antisense sequence
  source 1..20: mol_type = other RNA
ctcgtttgagatggtcagtt

SEQ ID NO: 16325 - RNA, 20 nt, synthetic construct
  misc_feature 1..20: note = antisense sequence
  source 1..20: mol_type = other RNA
cctcgtttgagatggtcagt

SEQ ID NO: 16326 - RNA, 20 nt, synthetic construct
  misc_feature 1..20: note = antisense sequence
  source 1..20: mol_type = other RNA
gcctcgtttgagatggtcag

SEQ ID NO: 16327 - RNA, 20 nt, synthetic construct
  misc_feature 1..20: note = antisense sequence
  source 1..20: mol_type = other RNA
tgcctcgtttgagatggtca

SEQ ID NO: 16328 - RNA, 20 nt, synthetic construct
  misc_feature 1..20: note = antisense sequence
  source 1..20: mol_type = other RNA
gtgcctcgtttgagatggtc

SEQ ID NO: 16329 - RNA, 20 nt, synthetic construct
  misc_feature 1..20: note = antisense sequence
  source 1..20: mol_type = other RNA
tgtgcctcgtttgagatggt

SEQ ID NO: 16330 - RNA, 20 nt, synthetic construct
  misc_feature 1..20: note = antisense sequence
  source 1..20: mol_type = other RNA
ttgtgcctcgtttgagatgg

SEQ ID NO: 16331 - RNA, 20 nt, synthetic construct
  misc_feature 1..20: note = antisense sequence
  source 1..20: mol_type = other RNA
attgtgcctcgtttgagatg

SEQ ID NO: 16332 - RNA, 20 nt, synthetic construct
  misc_feature 1..20: note = antisense sequence
  source 1..20: mol_type = other RNA
agaattgtgcctcgtttgag

SEQ ID NO: 16333 - RNA, 20 nt, synthetic construct
  misc_feature 1..20: note = antisense sequence
  source 1..20: mol_type = other RNA
cagaattgtgcctcgtttga

SEQ ID NO: 16334 - RNA, 20 nt, synthetic construct
  misc_feature 1..20: note = antisense sequence
  source 1..20: mol_type = other RNA
ccagaattgtgcctcgtttg

SEQ ID NO: 16335 - RNA, 20 nt, synthetic construct
  misc_feature 1..20: note = antisense sequence
  source 1..20: mol_type = other RNA
accagaattgtgcctcgttt

SEQ ID NO: 16336 - RNA, 20 nt, synthetic construct
  misc_feature 1..20: note = antisense sequence
  source 1..20: mol_type = other RNA
tttaccagaattgtgcctcg

SEQ ID NO: 16337 - RNA, 20 nt, synthetic construct
  misc_feature 1..20: note = antisense sequence
  source 1..20: mol_type = other RNA
catgtattgcagtcctgttt

SEQ ID NO: 16338 - RNA, 20 nt, synthetic construct
  misc_feature 1..20: note = antisense sequence
  source 1..20: mol_type = other RNA
gatgtcagaagaagtgagat

SEQ ID NO: 16339 - RNA, 20 nt, synthetic construct
  misc_feature 1..20: note = antisense sequence
  source 1..20: mol_type = other RNA
acttggctgatgtcagaaga

SEQ ID NO: 16340 - RNA, 20 nt, synthetic construct
  misc_feature 1..20: note = antisense sequence
  source 1..20: mol_type = other RNA
gacttggctgatgtcagaag

SEQ ID NO: 16341 - RNA, 20 nt, synthetic construct
  misc_feature 1..20: note = antisense sequence
  source 1..20: mol_type = other RNA
gaaacattgacttggctgat

SEQ ID NO: 16342 - RNA, 20 nt, synthetic construct
  misc_feature 1..20: note = antisense sequence
  source 1..20: mol_type = other RNA
cgaaacattgacttggctga

SEQ ID NO: 16343 - RNA, 20 nt, synthetic construct
  misc_feature 1..20: note = antisense sequence
  source 1..20: mol_type = other RNA
gcgaaacattgacttggctg

SEQ ID NO: 16344 - RNA, 20 nt, synthetic construct
  misc_feature 1..20: note = antisense sequence
  source 1..20: mol_type = other RNA
agcgaaacattgacttggct

SEQ ID NO: 16345 - RNA, 20 nt, synthetic construct
  misc_feature 1..20: note = antisense sequence
  source 1..20: mol_type = other RNA
aagcgaaacattgacttggc

SEQ ID NO: 16346 - RNA, 20 nt, synthetic construct
  misc_feature 1..20: note = antisense sequence
  source 1..20: mol_type = other RNA
taagcgaaacattgacttgg

SEQ ID NO: 16347 - RNA, 20 nt, synthetic construct
  misc_feature 1..20: note = antisense sequence
  source 1..20: mol_type = other RNA
ccacaagataagcgaaacat

SEQ ID NO: 16348 - RNA, 20 nt, synthetic construct
  misc_feature 1..20: note = antisense sequence
  source 1..20: mol_type = other RNA
tccacaagataagcgaaaca

SEQ ID NO: 16349 - RNA, 20 nt, synthetic construct
  misc_feature 1..20: note = antisense sequence
  source 1..20: mol_type = other RNA
ttccacaagataagcgaaac

SEQ ID NO: 16350 - RNA, 20 nt, synthetic construct
  misc_feature 1..20: note = antisense sequence
  source 1..20: mol_type = other RNA
gtttccacaagataagcgaa

SEQ ID NO: 16351 - RNA, 20 nt, synthetic construct
  misc_feature 1..20: note = antisense sequence
  source 1..20: mol_type = other RNA
ggtttccacaagataagcga

SEQ ID NO: 16352 - RNA, 20 nt, synthetic construct
  misc_feature 1..20: note = antisense sequence
  source 1..20: mol_type = other RNA
gttggtttccacaagataag

SEQ ID NO: 16353 - RNA, 20 nt, synthetic construct
  misc_feature 1..20: note = antisense sequence
  source 1..20: mol_type = other RNA
acatcctcttatacttccag

SEQ ID NO: 16354 - RNA, 20 nt, synthetic construct
  misc_feature 1..20: note = antisense sequence
  source 1..20: mol_type = other RNA
cacatcctcttatacttcca

SEQ ID NO: 16355 - RNA, 20 nt, synthetic construct
  misc_feature 1..20: note = antisense sequence
  source 1..20: mol_type = other RNA
tcacatcctcttatacttcc

SEQ ID NO: 16356 - RNA, 20 nt, synthetic construct
  misc_feature 1..20: note = antisense sequence
  source 1..20: mol_type = other RNA
gtcacatcctcttatacttc

SEQ ID NO: 16357 - RNA, 20 nt, synthetic construct
  misc_feature 1..20: note = antisense sequence
  source 1..20: mol_type = other RNA
ggtcacatcctcttatactt

SEQ ID NO: 16358 - RNA, 20 nt, synthetic construct
  misc_feature 1..20: note = antisense sequence
  source 1..20: mol_type = other RNA
cttggtcacatcctcttata

SEQ ID NO: 16359 - RNA, 20 nt, synthetic construct
  misc_feature 1..20: note = antisense sequence
  source 1..20: mol_type = other RNA
gctggttaagtagagctggg

SEQ ID NO: 16360 - RNA, 20 nt, synthetic construct
  misc_feature 1..20: note = antisense sequence
  source 1..20: mol_type = other RNA
catagctggttaagtagagc

SEQ ID NO: 16361 - RNA, 20 nt, synthetic construct
  misc_feature 1..20: note = antisense sequence
  source 1..20: mol_type = other RNA
acatagctggttaagtagag

SEQ ID NO: 16362 - RNA, 20 nt, synthetic construct
  misc_feature 1..20: note = antisense sequence
  source 1..20: mol_type = other RNA
tgagacacacatagctggtt

SEQ ID NO: 16363 - RNA, 20 nt, synthetic construct
  misc_feature 1..20: note = antisense sequence
  source 1..20: mol_type = other RNA
aagatgagacacacatagct

SEQ ID NO: 16364 - RNA, 20 nt, synthetic construct
  misc_feature 1..20: note = antisense sequence
  source 1..20: mol_type = other RNA
gaagatgagacacacatagc

SEQ ID NO: 16365 - RNA, 20 nt, synthetic construct
  misc_feature 1..20: note = antisense sequence
  source 1..20: mol_type = other RNA
ggaccttggtaatatcttag

SEQ ID NO: 16366 - RNA, 20 nt, synthetic construct
  misc_feature 1..20: note = antisense sequence
  source 1..20: mol_type = other RNA
aagtatatctctccagaggg

SEQ ID NO: 16367 - RNA, 20 nt, synthetic construct
  misc_feature 1..20: note = antisense sequence
  source 1..20: mol_type = other RNA
gggttgccactttattatac

SEQ ID NO: 16368 - RNA, 20 nt, synthetic construct
  misc_feature 1..20: note = antisense sequence
  source 1..20: mol_type = other RNA
caagggttgccactttatta

SEQ ID NO: 16369 - RNA, 20 nt, synthetic construct
  misc_feature 1..20: note = antisense sequence
  source 1..20: mol_type = other RNA
agctctttcctttgttactg

SEQ ID NO: 16370 - RNA, 20 nt, synthetic construct
  misc_feature 1..20: note = antisense sequence
  source 1..20: mol_type = other RNA
ggtatatgttagctctttcc

SEQ ID NO: 16371 - RNA, 20 nt, synthetic construct
  misc_feature 1..20: note = antisense sequence
  source 1..20: mol_type = other RNA
aggtggagcttgcagtgagc

SEQ ID NO: 16372 - RNA, 20 nt, synthetic construct
  misc_feature 1..20: note = antisense sequence
  source 1..20: mol_type = other RNA
gaggtggagcttgcagtgag

SEQ ID NO: 16373 - RNA, 20 nt, synthetic construct
  misc_feature 1..20: note = antisense sequence
  source 1..20: mol_type = other RNA
aggctgaggcaggagaatgg

SEQ ID NO: 16374 - RNA, 20 nt, synthetic construct
  misc_feature 1..20: note = antisense sequence
  source 1..20: mol_type = other RNA
gaggctgaggcaggagaatg

SEQ ID NO: 16375 - RNA, 20 nt, synthetic construct
  misc_feature 1..20: note = antisense sequence
  source 1..20: mol_type = other RNA
ggaggctgaggcaggagaat

SEQ ID NO: 16376 - RNA, 20 nt, synthetic construct
  misc_feature 1..20: note = antisense sequence
  source 1..20: mol_type = other RNA
tattgtcagacagatttggc

SEQ ID NO: 16377 - RNA, 20 nt, synthetic construct
  misc_feature 1..20: note = antisense sequence
  source 1..20: mol_type = other RNA
gtagcttattgtcagacaga

SEQ ID NO: 16378 - RNA, 20 nt, synthetic construct
  misc_feature 1..20: note = antisense sequence
  source 1..20: mol_type = other RNA
agtagcttattgtcagacag

SEQ ID NO: 16379 - RNA, 20 nt, synthetic construct
  misc_feature 1..20: note = antisense sequence
  source 1..20: mol_type = other RNA
gtaacaaactcgtgcatgta

SEQ ID NO: 16380 - RNA, 20 nt, synthetic construct
  misc_feature 1..20: note = antisense sequence
  source 1..20: mol_type = other RNA
tgtaacaaactcgtgcatgt

SEQ ID NO: 16381 - RNA, 20 nt, synthetic construct
  misc_feature 1..20: note = antisense sequence
  source 1..20: mol_type = other RNA
atgtaacaaactcgtgcatg

SEQ ID NO: 16382 - RNA, 20 nt, synthetic construct
  misc_feature 1..20: note = antisense sequence
  source 1..20: mol_type = other RNA
catgtaacaaactcgtgcat

SEQ ID NO: 16383 - RNA, 20 nt, synthetic construct
  misc_feature 1..20: note = antisense sequence
  source 1..20: mol_type = other RNA
ctaaacctcaatatcctgca

SEQ ID NO: 16384 - RNA, 20 nt, synthetic construct
  misc_feature 1..20: note = antisense sequence
  source 1..20: mol_type = other RNA
cctaaacctcaatatcctgc

SEQ ID NO: 16385 - RNA, 20 nt, synthetic construct
  misc_feature 1..20: note = antisense sequence
  source 1..20: mol_type = other RNA
gtaccctaaacctcaatatc

SEQ ID NO: 16386 - RNA, 20 nt, synthetic construct
  misc_feature 1..20: note = antisense sequence
  source 1..20: mol_type = other RNA
gatggaatctgtaccctaaa

SEQ ID NO: 16387 - RNA, 20 nt, synthetic construct
  misc_feature 1..20: note = antisense sequence
  source 1..20: mol_type = other RNA
gcgatggaatctgtacccta

SEQ ID NO: 16388 - RNA, 20 nt, synthetic construct
  misc_feature 1..20: note = antisense sequence
  source 1..20: mol_type = other RNA
agcgatggaatctgtaccct

SEQ ID NO: 16389 - RNA, 20 nt, synthetic construct
  misc_feature 1..20: note = antisense sequence
  source 1..20: mol_type = other RNA
gagcgatggaatctgtaccc

SEQ ID NO: 16390 - RNA, 20 nt, synthetic construct
  misc_feature 1..20: note = antisense sequence
  source 1..20: mol_type = other RNA
tgagcgatggaatctgtacc

SEQ ID NO: 16391 - RNA, 20 nt, synthetic construct
  misc_feature 1..20: note = antisense sequence
  source 1..20: mol_type = other RNA
ctgagcgatggaatctgtac

SEQ ID NO: 16392 - RNA, 20 nt, synthetic construct
  misc_feature 1..20: note = antisense sequence
  source 1..20: mol_type = other RNA
cctgagcgatggaatctgta

SEQ ID NO: 16393 - RNA, 20 nt, synthetic construct
  misc_feature 1..20: note = antisense sequence
  source 1..20: mol_type = other RNA
acctgagcgatggaatctgt

SEQ ID NO: 16394 - RNA, 20 nt, synthetic construct
  misc_feature 1..20: note = antisense sequence
  source 1..20: mol_type = other RNA
tacctgagcgatggaatctg

SEQ ID NO: 16395 - RNA, 20 nt, synthetic construct
  misc_feature 1..20: note = antisense sequence
  source 1..20: mol_type = other RNA
ctacctgagcgatggaatct

SEQ ID NO: 16396 - RNA, 20 nt, synthetic construct
  misc_feature 1..20: note = antisense sequence
  source 1..20: mol_type = other RNA
actacctgagcgatggaatc

SEQ ID NO: 16397 - RNA, 20 nt, synthetic construct
  misc_feature 1..20: note = antisense sequence
  source 1..20: mol_type = other RNA
cactacctgagcgatggaat

SEQ ID NO: 16398 - RNA, 20 nt, synthetic construct
  misc_feature 1..20: note = antisense sequence
  source 1..20: mol_type = other RNA
ccactacctgagcgatggaa

SEQ ID NO: 16399 - RNA, 20 nt, synthetic construct
  misc_feature 1..20: note = antisense sequence
  source 1..20: mol_type = other RNA
cccactacctgagcgatgga

SEQ ID NO: 16400 - RNA, 20 nt, synthetic construct
  misc_feature 1..20: note = antisense sequence
  source 1..20: mol_type = other RNA
tgcccactacctgagcgatg

SEQ ID NO: 16401 - RNA, 20 nt, synthetic construct
  misc_feature 1..20: note = antisense sequence
  source 1..20: mol_type = other RNA
atgcccactacctgagcgat

SEQ ID NO: 16402 - RNA, 20 nt, synthetic construct
  misc_feature 1..20: note = antisense sequence
  source 1..20: mol_type = other RNA
tatgcccactacctgagcga

SEQ ID NO: 16403 - RNA, 20 nt, synthetic construct
  misc_feature 1..20: note = antisense sequence
  source 1..20: mol_type = other RNA
attatgcccactacctgagc

SEQ ID NO: 16404 - RNA, 20 nt, synthetic construct
  misc_feature 1..20: note = antisense sequence
  source 1..20: mol_type = other RNA
gaggagctgacaaactacct

SEQ ID NO: 16405 - RNA, 20 nt, synthetic construct
  misc_feature 1..20: note = antisense sequence
  source 1..20: mol_type = other RNA
ggaggagctgacaaactacc

SEQ ID NO: 16406 - RNA, 20 nt, synthetic construct
  misc_feature 1..20: note = antisense sequence
  source 1..20: mol_type = other RNA
acttggaggagctgacaaac

SEQ ID NO: 16407 - RNA, 20 nt, synthetic construct
  misc_feature 1..20: note = antisense sequence
  source 1..20: mol_type = other RNA
actacttggaggagctgaca

SEQ ID NO: 16408 - RNA, 20 nt, synthetic construct
  misc_feature 1..20: note = antisense sequence
  source 1..20: mol_type = other RNA
gactacttggaggagctgac

SEQ ID NO: 16409 - RNA, 20 nt, synthetic construct
  misc_feature 1..20: note = antisense sequence
  source 1..20: mol_type = other RNA
atggactacttggaggagct

SEQ ID NO: 16410 - RNA, 20 nt, synthetic construct
  misc_feature 1..20: note = antisense sequence
  source 1..20: mol_type = other RNA
catggactacttggaggagc

SEQ ID NO: 16411 - RNA, 20 nt, synthetic construct
  misc_feature 1..20: note = antisense sequence
  source 1..20: mol_type = other RNA
gttaagccttgggtactcat

SEQ ID NO: 16412 - RNA, 20 nt, synthetic construct
  misc_feature 1..20: note = antisense sequence
  source 1..20: mol_type = other RNA
agttaagccttgggtactca

SEQ ID NO: 16413 - RNA, 20 nt, synthetic construct
  misc_feature 1..20: note = antisense sequence
  source 1..20: mol_type = other RNA
tgagagttaagccttgggta

SEQ ID NO: 16414 - RNA, 20 nt, synthetic construct
  misc_feature 1..20: note = antisense sequence
  source 1..20: mol_type = other RNA
gtgagagttaagccttgggt

SEQ ID NO: 16415 - RNA, 20 nt, synthetic construct
  misc_feature 1..20: note = antisense sequence
  source 1..20: mol_type = other RNA
aagtgagagttaagccttgg

SEQ ID NO: 16416 - RNA, 20 nt, synthetic construct
  misc_feature 1..20: note = antisense sequence
  source 1..20: mol_type = other RNA
gtataagtgagagttaagcc

SEQ ID NO: 16417 - RNA, 20 nt, synthetic construct
  misc_feature 1..20: note = antisense sequence
  source 1..20: mol_type = other RNA
cgtataagtgagagttaagc

SEQ ID NO: 16418 - RNA, 20 nt, synthetic construct
  misc_feature 1..20: note = antisense sequence
  source 1..20: mol_type = other RNA
ggaacagaaaaccaaatacc

SEQ ID NO: 16419 - RNA, 20 nt, synthetic construct
  misc_feature 1..20: note = antisense sequence
  source 1..20: mol_type = other RNA
cacaggaacagaaaaccaaa

SEQ ID NO: 16420 - RNA, 20 nt, synthetic construct
  misc_feature 1..20: note = antisense sequence
  source 1..20: mol_type = other RNA
ccacaggaacagaaaaccaa

SEQ ID NO: 16421 - RNA, 20 nt, synthetic construct
  misc_feature 1..20: note = antisense sequence
  source 1..20: mol_type = other RNA
tccacaggaacagaaaacca

SEQ ID NO: 16422 - RNA, 20 nt, synthetic construct
  misc_feature 1..20: note = antisense sequence
  source 1..20: mol_type = other RNA
tcctaagcaaattccacagg

SEQ ID NO: 16423 - RNA, 20 nt, synthetic construct
  misc_feature 1..20: note = antisense sequence
  source 1..20: mol_type = other RNA
atcctaagcaaattccacag

SEQ ID NO: 16424 - RNA, 20 nt, synthetic construct
  misc_feature 1..20: note = antisense sequence
  source 1..20: mol_type = other RNA
gcaacatacatgcagatgga

SEQ ID NO: 16425 - RNA, 20 nt, synthetic construct
  misc_feature 1..20: note = antisense sequence
  source 1..20: mol_type = other RNA
ccgaaagaaactgtttacca

SEQ ID NO: 16426 - RNA, 20 nt, synthetic construct
  misc_feature 1..20: note = antisense sequence
  source 1..20: mol_type = other RNA
cccgaaagaaactgtttacc

SEQ ID NO: 16427 - RNA, 20 nt, synthetic construct
  misc_feature 1..20: note = antisense sequence
  source 1..20: mol_type = other RNA
acccgaaagaaactgtttac

SEQ ID NO: 16428 - RNA, 20 nt, synthetic construct
  misc_feature 1..20: note = antisense sequence
  source 1..20: mol_type = other RNA
gcttatacactgttggtggg

SEQ ID NO: 16429 - RNA, 20 nt, synthetic construct
  misc_feature 1..20: note = antisense sequence
  source 1..20: mol_type = other RNA
cagaaaatggtgaggcagca

SEQ ID NO: 16430 - RNA, 20 nt, synthetic construct
  misc_feature 1..20: note = antisense sequence
  source 1..20: mol_type = other RNA
acagaaaatggtgaggcagc

SEQ ID NO: 16431 - RNA, 20 nt, synthetic construct
  misc_feature 1..20: note = antisense sequence
  source 1..20: mol_type = other RNA
ataacagaaaatggtgaggc

SEQ ID NO: 16432 - RNA, 20 nt, synthetic construct
  misc_feature 1..20: note = antisense sequence
  source 1..20: mol_type = other RNA
agccaaaatgaggtaggtac

SEQ ID NO: 16433 - RNA, 20 nt, synthetic construct
  misc_feature 1..20: note = antisense sequence
  source 1..20: mol_type = other RNA
aagccaaaatgaggtaggta

SEQ ID NO: 16434 - RNA, 20 nt, synthetic construct
  misc_feature 1..20: note = antisense sequence
  source 1..20: mol_type = other RNA
acatgacatacaggtgacca

SEQ ID NO: 16435 - RNA, 20 nt, synthetic construct
  misc_feature 1..20: note = antisense sequence
  source 1..20: mol_type = other RNA
aacatgacatacaggtgacc

SEQ ID NO: 16436 - RNA, 20 nt, synthetic construct
  misc_feature 1..20: note = antisense sequence
  source 1..20: mol_type = other RNA
ggacatgaatagactcctta

SEQ ID NO: 16437 - RNA, 20 nt, synthetic construct
  misc_feature 1..20: note = antisense sequence
  source 1..20: mol_type = other RNA
cagcaagcaatcaatcaaca

SEQ ID NO: 16438 - RNA, 20 nt, synthetic construct
  misc_feature 1..20: note = antisense sequence
  source 1..20: mol_type = other RNA
tcagcaagcaatcaatcaac

SEQ ID NO: 16439 - RNA, 20 nt, synthetic construct
  misc_feature 1..20: note = antisense sequence
  source 1..20: mol_type = other RNA
ctcagcaagcaatcaatcaa

SEQ ID NO: 16440 - RNA, 20 nt, synthetic construct
  misc_feature 1..20: note = antisense sequence
  source 1..20: mol_type = other RNA
aactcagcaagcaatcaatc

SEQ ID NO: 16441 - RNA, 20 nt, synthetic construct
  misc_feature 1..20: note = antisense sequence
  source 1..20: mol_type = other RNA
acaactcagcaagcaatcaa

SEQ ID NO: 16442 - RNA, 20 nt, synthetic construct
  misc_feature 1..20: note = antisense sequence
  source 1..20: mol_type = other RNA
gaacaactcagcaagcaatc

SEQ ID NO: 16443 - RNA, 20 nt, synthetic construct
  misc_feature 1..20: note = antisense sequence
  source 1..20: mol_type = other RNA
tgaacaactcagcaagcaat

SEQ ID NO: 16444 - RNA, 20 nt, synthetic construct
  misc_feature 1..20: note = antisense sequence
  source 1..20: mol_type = other RNA
cctacagaatgggagaaaat

SEQ ID NO: 16445 - RNA, 20 nt, synthetic construct
  misc_feature 1..20: note = antisense sequence
  source 1..20: mol_type = other RNA
acctacagaatgggagaaaa

SEQ ID NO: 16446 - RNA, 20 nt, synthetic construct
  misc_feature 1..20: note = antisense sequence
  source 1..20: mol_type = other RNA
aacctacagaatgggagaaa

SEQ ID NO: 16447 - RNA, 20 nt, synthetic construct
  misc_feature 1..20: note = antisense sequence
  source 1..20: mol_type = other RNA
aagagcttctgcacaacaaa

SEQ ID NO: 16448 - RNA, 20 nt, synthetic construct
  misc_feature 1..20: note = antisense sequence
  source 1..20: mol_type = other RNA
aaagagcttctgcacaacaa

SEQ ID NO: 16449 - RNA, 20 nt, synthetic construct
  misc_feature 1..20: note = antisense sequence
  source 1..20: mol_type = other RNA
taaagagcttctgcacaaca

SEQ ID NO: 16450 - RNA, 20 nt, synthetic construct
  misc_feature 1..20: note = antisense sequence
  source 1..20: mol_type = other RNA
ctaaagagcttctgcacaac

SEQ ID NO: 16451 - RNA, 20 nt, synthetic construct
  misc_feature 1..20: note = antisense sequence
  source 1..20: mol_type = other RNA
actaaagagcttctgcacaa

SEQ ID NO: 16452 - RNA, 20 nt, synthetic construct
  misc_feature 1..20: note = antisense sequence
  source 1..20: mol_type = other RNA
aactaaagagcttctgcaca

SEQ ID NO: 16453 - RNA, 20 nt, synthetic construct
  misc_feature 1..20: note = antisense sequence
  source 1..20: mol_type = other RNA
aaactaaagagcttctgcac

SEQ ID NO: 16454 - RNA, 20 nt, synthetic construct
  misc_feature 1..20: note = antisense sequence
  source 1..20: mol_type = other RNA
ccctctctgacattggtctt

SEQ ID NO: 16455 - RNA, 20 nt, synthetic construct
  misc_feature 1..20: note = antisense sequence
  source 1..20: mol_type = other RNA
accctctctgacattggtct

SEQ ID NO: 16456 - RNA, 20 nt, synthetic construct
  misc_feature 1..20: note = antisense sequence
  source 1..20: mol_type = other RNA
taccctctctgacattggtc

SEQ ID NO: 16457 - RNA, 20 nt, synthetic construct
  misc_feature 1..20: note = antisense sequence
  source 1..20: mol_type = other RNA
ataccctctctgacattggt

SEQ ID NO: 16458 - RNA, 20 nt, synthetic construct
  misc_feature 1..20: note = antisense sequence
  source 1..20: mol_type = other RNA
aggaaataccctctctgaca

SEQ ID NO: 16459 - RNA, 20 nt, synthetic construct
  misc_feature 1..20: note = antisense sequence
  source 1..20: mol_type = other RNA
taggaaataccctctctgac

SEQ ID NO: 16460 - RNA, 20 nt, synthetic construct
  misc_feature 1..20: note = antisense sequence
  source 1..20: mol_type = other RNA
gaaaggaatccctagtcaaa

SEQ ID NO: 16461 - RNA, 20 nt, synthetic construct
  misc_feature 1..20: note = antisense sequence
  source 1..20: mol_type = other RNA
gccgtctgatctttgataaa

SEQ ID NO: 16462 - RNA, 20 nt, synthetic construct
  misc_feature 1..20: note = antisense sequence
  source 1..20: mol_type = other RNA
cagccgtctgatctttgata

SEQ ID NO: 16463 - RNA, 20 nt, synthetic construct
  misc_feature 1..20: note = antisense sequence
  source 1..20: mol_type = other RNA
acagccgtctgatctttgat

SEQ ID NO: 16464 - RNA, 20 nt, synthetic construct
  misc_feature 1..20: note = antisense sequence
  source 1..20: mol_type = other RNA
tacctacagccgtctgatct

SEQ ID NO: 16465 - RNA, 20 nt, synthetic construct
  misc_feature 1..20: note = antisense sequence
  source 1..20: mol_type = other RNA
atacctacagccgtctgatc

SEQ ID NO: 16466 - RNA, 20 nt, synthetic construct
  misc_feature 1..20: note = antisense sequence
  source 1..20: mol_type = other RNA
catacctacagccgtctgat

SEQ ID NO: 16467 - RNA, 20 nt, synthetic construct
  misc_feature 1..20: note = antisense sequence
  source 1..20: mol_type = other RNA
acatacctacagccgtctga

SEQ ID NO: 16468 - RNA, 20 nt, synthetic construct
  misc_feature 1..20: note = antisense sequence
  source 1..20: mol_type = other RNA
cacatacctacagccgtctg

SEQ ID NO: 16469 - RNA, 20 nt, synthetic construct
  misc_feature 1..20: note = antisense sequence
  source 1..20: mol_type = other RNA
agccacatggaccagtgaaa

SEQ ID NO: 16470 - RNA, 20 nt, synthetic construct
  misc_feature 1..20: note = antisense sequence
  source 1..20: mol_type = other RNA
aagagccacatggaccagtg

SEQ ID NO: 16471 - RNA, 20 nt, synthetic construct
  misc_feature 1..20: note = antisense sequence
  source 1..20: mol_type = other RNA
acagaagagccacatggacc

SEQ ID NO: 16472 - RNA, 20 nt, synthetic construct
  misc_feature 1..20: note = antisense sequence
  source 1..20: mol_type = other RNA
tacagaagagccacatggac

SEQ ID NO: 16473 - RNA, 20 nt, synthetic construct
  misc_feature 1..20: note = antisense sequence
  source 1..20: mol_type = other RNA
ctggtacagaagagccacat

SEQ ID NO: 16474 - RNA, 20 nt, synthetic construct
  misc_feature 1..20: note = antisense sequence
  source 1..20: mol_type = other RNA
actggtacagaagagccaca

SEQ ID NO: 16475 - RNA, 20 nt, synthetic construct
  misc_feature 1..20: note = antisense sequence
  source 1..20: mol_type = other RNA
tactggtacagaagagccac

SEQ ID NO: 16476 - RNA, 20 nt, synthetic construct
  misc_feature 1..20: note = antisense sequence
  source 1..20: mol_type = other RNA
atactggtacagaagagcca

SEQ ID NO: 16477 - RNA, 20 nt, synthetic construct
  misc_feature 1..20: note = antisense sequence
  source 1..20: mol_type = other RNA
gatactggtacagaagagcc

SEQ ID NO: 16478 - RNA, 20 nt, synthetic construct
  misc_feature 1..20: note = antisense sequence
  source 1..20: mol_type = other RNA
tcgaactctactataaggct

SEQ ID NO: 16479 - RNA, 20 nt, synthetic construct
  misc_feature 1..20: note = antisense sequence
  source 1..20: mol_type = other RNA
agacccatcacactgcctga

SEQ ID NO: 16480 - RNA, 20 nt, synthetic construct
  misc_feature 1..20: note = antisense sequence
  source 1..20: mol_type = other RNA
ccagacccatcacactgcct

SEQ ID NO: 16481 - RNA, 20 nt, synthetic construct
  misc_feature 1..20: note = antisense sequence
  source 1..20: mol_type = other RNA
agccagacccatcacactgc

SEQ ID NO: 16482 - RNA, 20 nt, synthetic construct
  misc_feature 1..20: note = antisense sequence
  source 1..20: mol_type = other RNA
caaagccagacccatcacac

SEQ ID NO: 16483 - RNA, 20 nt, synthetic construct
  misc_feature 1..20: note = antisense sequence
  source 1..20: mol_type = other RNA
acaaagccagacccatcaca

SEQ ID NO: 16484 - RNA, 20 nt, synthetic construct
  misc_feature 1..20: note = antisense sequence
  source 1..20: mol_type = other RNA
ctcaggtagccaaagcaatc

SEQ ID NO: 16485 - RNA, 20 nt, synthetic construct
  misc_feature 1..20: note = antisense sequence
  source 1..20: mol_type = other RNA
actgttgctcttaaagtacc

SEQ ID NO: 16486 - RNA, 20 nt, synthetic construct
  misc_feature 1..20: note = antisense sequence
  source 1..20: mol_type = other RNA
cactgttgctcttaaagtac

SEQ ID NO: 16487 - RNA, 20 nt, synthetic construct
  misc_feature 1..20: note = antisense sequence
  source 1..20: mol_type = other RNA
ctccatttacagaagctaca

SEQ ID NO: 16488 - RNA, 20 nt, synthetic construct
  misc_feature 1..20: note = antisense sequence
  source 1..20: mol_type = other RNA
ttgcagtgagccaaggtcgc

SEQ ID NO: 16489 - RNA, 20 nt, synthetic construct
  misc_feature 1..20: note = antisense sequence
  source 1..20: mol_type = other RNA
cggagcttgcagtgagccaa

SEQ ID NO: 16490 - RNA, 20 nt, synthetic construct
  misc_feature 1..20: note = antisense sequence
  source 1..20: mol_type = other RNA
caagagaatggcgtgaaccc

SEQ ID NO: 16491 - RNA, 20 nt, synthetic construct
  misc_feature 1..20: note = antisense sequence
  source 1..20: mol_type = other RNA
tcaagagaatggcgtgaacc

SEQ ID NO: 16492 - RNA, 20 nt, synthetic construct
  misc_feature 1..20: note = antisense sequence
  source 1..20: mol_type = other RNA
gtcaagagaatggcgtgaac

SEQ ID NO: 16493 - RNA, 20 nt, synthetic construct
  misc_feature 1..20: note = antisense sequence
  source 1..20: mol_type = other RNA
ggagatcgagaccatcctgg

SEQ ID NO: 16494 - RNA, 20 nt, synthetic construct
  misc_feature 1..20: note = antisense sequence
  source 1..20: mol_type = other RNA
tcaggagatcgagaccatcc

SEQ ID NO: 16495 - RNA, 20 nt, synthetic construct
  misc_feature 1..20: note = antisense sequence
  source 1..20: mol_type = other RNA
gtcaggagatcgagaccatc

SEQ ID NO: 16496 - RNA, 20 nt, synthetic construct
  misc_feature 1..20: note = antisense sequence
  source 1..20: mol_type = other RNA
tgaggtcaggagatcgagac

SEQ ID NO: 16497 - RNA, 20 nt, synthetic construct
  misc_feature 1..20: note = antisense sequence
  source 1..20: mol_type = other RNA
atgaggtcaggagatcgaga

SEQ ID NO: 16498 - RNA, 20 nt, synthetic construct
  misc_feature 1..20: note = antisense sequence
  source 1..20: mol_type = other RNA
catgaggtcaggagatcgag

SEQ ID NO: 16499 - RNA, 20 nt, synthetic construct
  misc_feature 1..20: note = antisense sequence
  source 1..20: mol_type = other RNA
gctgaggtgggcagatcatg

SEQ ID NO: 16500 - RNA, 20 nt, synthetic construct
  misc_feature 1..20: note = antisense sequence
  source 1..20: mol_type = other RNA
ggctgaggtgggcagatcat

SEQ ID NO: 16501 - RNA, 20 nt, synthetic construct
  misc_feature 1..20: note = antisense sequence
  source 1..20: mol_type = other RNA
aggctgaggtgggcagatca

SEQ ID NO: 16502 - RNA, 20 nt, synthetic construct
  misc_feature 1..20: note = antisense sequence
  source 1..20: mol_type = other RNA
actttgggaggctgaggtgg

SEQ ID NO: 16503 - RNA, 20 nt, synthetic construct
  misc_feature 1..20: note = antisense sequence
  source 1..20: mol_type = other RNA
cactttgggaggctgaggtg

SEQ ID NO: 16504 - RNA, 20 nt, synthetic construct
  misc_feature 1..20: note = antisense sequence
  source 1..20: mol_type = other RNA
gcactttgggaggctgaggt

SEQ ID NO: 16505 - RNA, 20 nt, synthetic construct
  misc_feature 1..20: note = antisense sequence
  source 1..20: mol_type = other RNA
agcactttgggaggctgagg

SEQ ID NO: 16506 - RNA, 20 nt, synthetic construct
  misc_feature 1..20: note = antisense sequence
  source 1..20: mol_type = other RNA
ctgtaatcccagcactttgg

SEQ ID NO: 16507 - RNA, 20 nt, synthetic construct
  misc_feature 1..20: note = antisense sequence
  source 1..20: mol_type = other RNA
cctgtaatcccagcactttg

SEQ ID NO: 16508 - RNA, 20 nt, synthetic construct
  misc_feature 1..20: note = antisense sequence
  source 1..20: mol_type = other RNA
gcctgtaatcccagcacttt

SEQ ID NO: 16509 - RNA, 20 nt, synthetic construct
  misc_feature 1..20: note = antisense sequence
  source 1..20: mol_type = other RNA
cgcctgtaatcccagcactt

SEQ ID NO: 16510 - RNA, 20 nt, synthetic construct
  misc_feature 1..20: note = antisense sequence
  source 1..20: mol_type = other RNA
acgcctgtaatcccagcact

SEQ ID NO: 16511 - RNA, 20 nt, synthetic construct
  misc_feature 1..20: note = antisense sequence
  source 1..20: mol_type = other RNA
cacgcctgtaatcccagcac

SEQ ID NO: 16512 - RNA, 20 nt, synthetic construct
  misc_feature 1..20: note = antisense sequence
  source 1..20: mol_type = other RNA
tcacgcctgtaatcccagca

SEQ ID NO: 16513 - RNA, 20 nt, synthetic construct
  misc_feature 1..20: note = antisense sequence
  source 1..20: mol_type = other RNA
ctcacgcctgtaatcccagc

SEQ ID NO: 16514 - RNA, 20 nt, synthetic construct
  misc_feature 1..20: note = antisense sequence
  source 1..20: mol_type = other RNA
gctcacgcctgtaatcccag

SEQ ID NO: 16515 - RNA, 20 nt, synthetic construct
  misc_feature 1..20: note = antisense sequence
  source 1..20: mol_type = other RNA
ggctcacgcctgtaatccca

SEQ ID NO: 16516 - RNA, 20 nt, synthetic construct
  misc_feature 1..20: note = antisense sequence
  source 1..20: mol_type = other RNA
tggctcacgcctgtaatccc

SEQ ID NO: 16517 - RNA, 20 nt, synthetic construct
  misc_feature 1..20: note = antisense sequence
  source 1..20: mol_type = other RNA
gtggctcacgcctgtaatcc

SEQ ID NO: 16518 - RNA, 20 nt, synthetic construct
  misc_feature 1..20: note = antisense sequence
  source 1..20: mol_type = other RNA
ggtggctcacgcctgtaatc

SEQ ID NO: 16519 - RNA, 20 nt, synthetic construct
  misc_feature 1..20: note = antisense sequence
  source 1..20: mol_type = other RNA
cggtggctcacgcctgtaat

SEQ ID NO: 16520 - RNA, 20 nt, synthetic construct
  misc_feature 1..20: note = antisense sequence
  source 1..20: mol_type = other RNA
acaacacaactcagggctgg

SEQ ID NO: 16521 - RNA, 20 nt, synthetic construct
  misc_feature 1..20: note = antisense sequence
  source 1..20: mol_type = other RNA
aacaacacaactcagggctg

SEQ ID NO: 16522 - RNA, 20 nt, synthetic construct
  misc_feature 1..20: note = antisense sequence
  source 1..20: mol_type = other RNA
aaacaacacaactcagggct

SEQ ID NO: 16523 - RNA, 20 nt, synthetic construct
  misc_feature 1..20: note = antisense sequence
  source 1..20: mol_type = other RNA
taaacaacacaactcagggc

SEQ ID NO: 16524 - RNA, 20 nt, synthetic construct
  misc_feature 1..20: note = antisense sequence
  source 1..20: mol_type = other RNA
ccactggtaatatgatccta

SEQ ID NO: 16525 - RNA, 20 nt, synthetic construct
  misc_feature 1..20: note = antisense sequence
  source 1..20: mol_type = other RNA
ctgtaactaatcctagccaa

SEQ ID NO: 16526 - RNA, 20 nt, synthetic construct
  misc_feature 1..20: note = antisense sequence
  source 1..20: mol_type = other RNA
tctgtaactaatcctagcca

SEQ ID NO: 16527 - RNA, 20 nt, synthetic construct
  misc_feature 1..20: note = antisense sequence
  source 1..20: mol_type = other RNA
atctgtaactaatcctagcc

SEQ ID NO: 16528 - RNA, 20 nt, synthetic construct
  misc_feature 1..20: note = antisense sequence
  source 1..20: mol_type = other RNA
gtagagacaggcatcaaaga

SEQ ID NO: 16529 - RNA, 20 nt, synthetic construct
  misc_feature 1..20: note = antisense sequence
  source 1..20: mol_type = other RNA
ggtagagacaggcatcaaag

SEQ ID NO: 16530 - RNA, 20 nt, synthetic construct
  misc_feature 1..20: note = antisense sequence
  source 1..20: mol_type = other RNA
aggtagagacaggcatcaaa

SEQ ID NO: 16531 - RNA, 20 nt, synthetic construct
  misc_feature 1..20: note = antisense sequence
  source 1..20: mol_type = other RNA
taggtagagacaggcatcaa

SEQ ID NO: 16532 - RNA, 20 nt, synthetic construct
  misc_feature 1..20: note = antisense sequence
  source 1..20: mol_type = other RNA
ctaggtagagacaggcatca

SEQ ID NO: 16533 - RNA, 20 nt, synthetic construct
  misc_feature 1..20: note = antisense sequence
  source 1..20: mol_type = other RNA
agttgaagaacatcagtccc

SEQ ID NO: 16534 - RNA, 20 nt, synthetic construct
  misc_feature 1..20: note = antisense sequence
  source 1..20: mol_type = other RNA
cagttgaagaacatcagtcc

SEQ ID NO: 16535 - RNA, 20 nt, synthetic construct
  misc_feature 1..20: note = antisense sequence
  source 1..20: mol_type = other RNA
ttacaccacagttgaagaac

SEQ ID NO: 16536 - RNA, 20 nt, synthetic construct
  misc_feature 1..20: note = antisense sequence
  source 1..20: mol_type = other RNA
cttacaccacagttgaagaa

SEQ ID NO: 16537 - RNA, 20 nt, synthetic construct
  misc_feature 1..20: note = antisense sequence
  source 1..20: mol_type = other RNA
cccaaatgactacactcaac

SEQ ID NO: 16538 - RNA, 20 nt, synthetic construct
  misc_feature 1..20: note = antisense sequence
  source 1..20: mol_type = other RNA
aaacccaaatgactacactc

SEQ ID NO: 16539 - RNA, 20 nt, synthetic construct
  misc_feature 1..20: note = antisense sequence
  source 1..20: mol_type = other RNA
caaacccaaatgactacact

SEQ ID NO: 16540 - RNA, 20 nt, synthetic construct
  misc_feature 1..20: note = antisense sequence
  source 1..20: mol_type = other RNA
gagcatacacccacaaataa

SEQ ID NO: 16541 - RNA, 20 nt, synthetic construct
  misc_feature 1..20: note = antisense sequence
  source 1..20: mol_type = other RNA
gtgagcatacacccacaaat

SEQ ID NO: 16542 - RNA, 20 nt, synthetic construct
  misc_feature 1..20: note = antisense sequence
  source 1..20: mol_type = other RNA
ctcctgtgagcatacaccca

SEQ ID NO: 16543 - RNA, 20 nt, synthetic construct
  misc_feature 1..20: note = antisense sequence
  source 1..20: mol_type = other RNA
actcctgtgagcatacaccc

SEQ ID NO: 16544 - RNA, 20 nt, synthetic construct
  misc_feature 1..20: note = antisense sequence
  source 1..20: mol_type = other RNA
cactcctgtgagcatacacc

SEQ ID NO: 16545 - RNA, 20 nt, synthetic construct
  misc_feature 1..20: note = antisense sequence
  source 1..20: mol_type = other RNA
aacactcctgtgagcataca

SEQ ID NO: 16546 - RNA, 20 nt, synthetic construct
  misc_feature 1..20: note = antisense sequence
  source 1..20: mol_type = other RNA
aaacactcctgtgagcatac

SEQ ID NO: 16547 - RNA, 20 nt, synthetic construct
  misc_feature 1..20: note = antisense sequence
  source 1..20: mol_type = other RNA
agctcaaacaacaacaccaa

SEQ ID NO: 16548 - RNA, 20 nt, synthetic construct
  misc_feature 1..20: note = antisense sequence
  source 1..20: mol_type = other RNA
cagctcaaacaacaacacca

SEQ ID NO: 16549 - RNA, 20 nt, synthetic construct
  misc_feature 1..20: note = antisense sequence
  source 1..20: mol_type = other RNA
acagctcaaacaacaacacc

SEQ ID NO: 16550 - RNA, 20 nt, synthetic construct
  misc_feature 1..20: note = antisense sequence
  source 1..20: mol_type = other RNA
atcacagctcaaacaacaac

SEQ ID NO: 16551 - RNA, 20 nt, synthetic construct
  misc_feature 1..20: note = antisense sequence
  source 1..20: mol_type = other RNA
ggatcacagctcaaacaaca

SEQ ID NO: 16552 - RNA, 20 nt, synthetic construct
  misc_feature 1..20: note = antisense sequence
  source 1..20: mol_type = other RNA
tggatcacagctcaaacaac

SEQ ID NO: 16553 - RNA, 20 nt, synthetic construct
  misc_feature 1..20: note = antisense sequence
  source 1..20: mol_type = other RNA
ttgccctctactggatcaca

SEQ ID NO: 16554 - RNA, 20 nt, synthetic construct
  misc_feature 1..20: note = antisense sequence
  source 1..20: mol_type = other RNA
attgccctctactggatcac

SEQ ID NO: 16555 - RNA, 20 nt, synthetic construct
  misc_feature 1..20: note = antisense sequence
  source 1..20: mol_type = other RNA
cttaattgccctctactgga

SEQ ID NO: 16556 - RNA, 20 nt, synthetic construct
  misc_feature 1..20: note = antisense sequence
  source 1..20: mol_type = other RNA
ccttaattgccctctactgg

SEQ ID NO: 16557 - RNA, 20 nt, synthetic construct
  misc_feature 1..20: note = antisense sequence
  source 1..20: mol_type = other RNA
cccttaattgccctctactg

SEQ ID NO: 16558 - RNA, 20 nt, synthetic construct
  misc_feature 1..20: note = antisense sequence
  source 1..20: mol_type = other RNA
tacccttaattgccctctac

SEQ ID NO: 16559 - RNA, 20 nt, synthetic construct
  misc_feature 1..20: note = antisense sequence
  source 1..20: mol_type = other RNA
ggcaagactaagagcctatc

SEQ ID NO: 16560 - RNA, 20 nt, synthetic construct
  misc_feature 1..20: note = antisense sequence
  source 1..20: mol_type = other RNA
gtggcaagactaagagccta

SEQ ID NO: 16561 - RNA, 20 nt, synthetic construct
  misc_feature 1..20: note = antisense sequence
  source 1..20: mol_type = other RNA
agtggcaagactaagagcct

SEQ ID NO: 16562 - RNA, 20 nt, synthetic construct
  misc_feature 1..20: note = antisense sequence
  source 1..20: mol_type = other RNA
gagtggcaagactaagagcc

SEQ ID NO: 16563 - RNA, 20 nt, synthetic construct
  misc_feature 1..20: note = antisense sequence
  source 1..20: mol_type = other RNA
agagtggcaagactaagagc

SEQ ID NO: 16564 - RNA, 20 nt, synthetic construct
  misc_feature 1..20: note = antisense sequence
  source 1..20: mol_type = other RNA
aagagtggcaagactaagag

SEQ ID NO: 16565 - RNA, 20 nt, synthetic construct
  misc_feature 1..20: note = antisense sequence
  source 1..20: mol_type = other RNA
tacaagagtggcaagactaa

SEQ ID NO: 16566 - RNA, 20 nt, synthetic construct
  misc_feature 1..20: note = antisense sequence
  source 1..20: mol_type = other RNA
atacaagagtggcaagacta

SEQ ID NO: 16567 - RNA, 20 nt, synthetic construct
  misc_feature 1..20: note = antisense sequence
  source 1..20: mol_type = other RNA
aatacaagagtggcaagact

SEQ ID NO: 16568 - RNA, 20 nt, synthetic construct
  misc_feature 1..20: note = antisense sequence
  source 1..20: mol_type = other RNA
caaatacaagagtggcaaga

SEQ ID NO: 16569 - RNA, 20 nt, synthetic construct
  misc_feature 1..20: note = antisense sequence
  source 1..20: mol_type = other RNA
gcaaatacaagagtggcaag

SEQ ID NO: 16570 - RNA, 20 nt, synthetic construct
  misc_feature 1..20: note = antisense sequence
  source 1..20: mol_type = other RNA
tgagcaaatacaagagtggc

SEQ ID NO: 16571 - RNA, 20 nt, synthetic construct
  misc_feature 1..20: note = antisense sequence
  source 1..20: mol_type = other RNA
atgagcaaatacaagagtgg

SEQ ID NO: 16572 - RNA, 20 nt, synthetic construct
  misc_feature 1..20: note = antisense sequence
  source 1..20: mol_type = other RNA
catgagcaaatacaagagtg

SEQ ID NO: 16573 - RNA, 20 nt, synthetic construct
  misc_feature 1..20: note = antisense sequence
  source 1..20: mol_type = other RNA
acatgggtacagtgccagtg

SEQ ID NO: 16574 - RNA, 20 nt, synthetic construct
  misc_feature 1..20: note = antisense sequence
  source 1..20: mol_type = other RNA
aacatgggtacagtgccagt

SEQ ID NO: 16575 - RNA, 20 nt, synthetic construct
  misc_feature 1..20: note = antisense sequence
  source 1..20: mol_type = other RNA
aaacatgggtacagtgccag

SEQ ID NO: 16576 - RNA, 20 nt, synthetic construct
  misc_feature 1..20: note = antisense sequence
  source 1..20: mol_type = other RNA
gaaacatgggtacagtgcca

SEQ ID NO: 16577 - RNA, 20 nt, synthetic construct
  misc_feature 1..20: note = antisense sequence
  source 1..20: mol_type = other RNA
agaaacatgggtacagtgcc

SEQ ID NO: 16578 - RNA, 20 nt, synthetic construct
  misc_feature 1..20: note = antisense sequence
  source 1..20: mol_type = other RNA
gtcacctatctacctgccat

SEQ ID NO: 16579 - RNA, 20 nt, synthetic construct
  misc_feature 1..20: note = antisense sequence
  source 1..20: mol_type = other RNA
tgtcacctatctacctgcca

SEQ ID NO: 16580 - RNA, 20 nt, synthetic construct
  misc_feature 1..20: note = antisense sequence
  source 1..20: mol_type = other RNA
gtgtcacctatctacctgcc

SEQ ID NO: 16581 - RNA, 20 nt, synthetic construct
  misc_feature 1..20: note = antisense sequence
  source 1..20: mol_type = other RNA
ggtgtcacctatctacctgc

SEQ ID NO: 16582 - RNA, 20 nt, synthetic construct
  misc_feature 1..20: note = antisense sequence
  source 1..20: mol_type = other RNA
ggttcggaaaaggtgtcacc

SEQ ID NO: 16583 - RNA, 20 nt, synthetic construct
  misc_feature 1..20: note = antisense sequence
  source 1..20: mol_type = other RNA
tggttcggaaaaggtgtcac

SEQ ID NO: 16584 - RNA, 20 nt, synthetic construct
  misc_feature 1..20: note = antisense sequence
  source 1..20: mol_type = other RNA
ctggttcggaaaaggtgtca

SEQ ID NO: 16585 - RNA, 20 nt, synthetic construct
  misc_feature 1..20: note = antisense sequence
  source 1..20: mol_type = other RNA
gctggttcggaaaaggtgtc

SEQ ID NO: 16586 - RNA, 20 nt, synthetic construct
  misc_feature 1..20: note = antisense sequence
  source 1..20: mol_type = other RNA
ggctggttcggaaaaggtgt

SEQ ID NO: 16587 - RNA, 20 nt, synthetic construct
  misc_feature 1..20: note = antisense sequence
  source 1..20: mol_type = other RNA
gggctggttcggaaaaggtg

SEQ ID NO: 16588 - RNA, 20 nt, synthetic construct
  misc_feature 1..20: note = antisense sequence
  source 1..20: mol_type = other RNA
agggctggttcggaaaaggt

SEQ ID NO: 16589 - RNA, 20 nt, synthetic construct
  misc_feature 1..20: note = antisense sequence
  source 1..20: mol_type = other RNA
cagggctggttcggaaaagg

SEQ ID NO: 16590 - RNA, 20 nt, synthetic construct
  misc_feature 1..20: note = antisense sequence
  source 1..20: mol_type = other RNA
acagggctggttcggaaaag

SEQ ID NO: 16591 - RNA, 20 nt, synthetic construct
  misc_feature 1..20: note = antisense sequence
  source 1..20: mol_type = other RNA
gcactggagtagggcatgac

SEQ ID NO: 16592 - RNA, 20 nt, synthetic construct
  misc_feature 1..20: note = antisense sequence
  source 1..20: mol_type = other RNA
agcactggagtagggcatga

SEQ ID NO: 16593 - RNA, 20 nt, synthetic construct
  misc_feature 1..20: note = antisense sequence
  source 1..20: mol_type = other RNA
cagcactggagtagggcatg

SEQ ID NO: 16594 - RNA, 20 nt, synthetic construct
  misc_feature 1..20: note = antisense sequence
  source 1..20: mol_type = other RNA
ccagcactggagtagggcat

SEQ ID NO: 16595 - RNA, 20 nt, synthetic construct
  misc_feature 1..20: note = antisense sequence
  source 1..20: mol_type = other RNA
aaacatggattcgtgggcca

SEQ ID NO: 16596 - RNA, 20 nt, synthetic construct
  misc_feature 1..20: note = antisense sequence
  source 1..20: mol_type = other RNA
caaacatggattcgtgggcc

SEQ ID NO: 16597 - RNA, 20 nt, synthetic construct
  misc_feature 1..20: note = antisense sequence
  source 1..20: mol_type = other RNA
acaaacatggattcgtgggc

SEQ ID NO: 16598 - RNA, 20 nt, synthetic construct
  misc_feature 1..20: note = antisense sequence
  source 1..20: mol_type = other RNA
aacaaacatggattcgtggg

SEQ ID NO: 16599 - RNA, 20 nt, synthetic construct
  misc_feature 1..20: note = antisense sequence
  source 1..20: mol_type = other RNA
gtaacaaacatggattcgtg

SEQ ID NO: 16600 - RNA, 20 nt, synthetic construct
  misc_feature 1..20: note = antisense sequence
  source 1..20: mol_type = other RNA
ggtaacaaacatggattcgt

SEQ ID NO: 16601 - RNA, 20 nt, synthetic construct
  misc_feature 1..20: note = antisense sequence
  source 1..20: mol_type = other RNA
gggtaacaaacatggattcg

SEQ ID NO: 16602 - RNA, 20 nt, synthetic construct
  misc_feature 1..20: note = antisense sequence
  source 1..20: mol_type = other RNA
tgggtaacaaacatggattc

SEQ ID NO: 16603 - RNA, 20 nt, synthetic construct
  misc_feature 1..20: note = antisense sequence
  source 1..20: mol_type = other RNA
gatgggtaacaaacatggat

SEQ ID NO: 16604 - RNA, 20 nt, synthetic construct
  misc_feature 1..20: note = antisense sequence
  source 1..20: mol_type = other RNA
ctgagatgggtaacaaacat

SEQ ID NO: 16605 - RNA, 20 nt, synthetic construct
  misc_feature 1..20: note = antisense sequence
  source 1..20: mol_type = other RNA
actgagatgggtaacaaaca

SEQ ID NO: 16606 - RNA, 20 nt, synthetic construct
  misc_feature 1..20: note = antisense sequence
  source 1..20: mol_type = other RNA
cactgagatgggtaacaaac

SEQ ID NO: 16607 - RNA, 20 nt, synthetic construct
  misc_feature 1..20: note = antisense sequence
  source 1..20: mol_type = other RNA
gcactgagatgggtaacaaa

SEQ ID NO: 16608 - RNA, 20 nt, synthetic construct
  misc_feature 1..20: note = antisense sequence
  source 1..20: mol_type = other RNA
agcactgagatgggtaacaa

SEQ ID NO: 16609 - RNA, 20 nt, synthetic construct
  misc_feature 1..20: note = antisense sequence
  source 1..20: mol_type = other RNA
gagcactgagatgggtaaca

SEQ ID NO: 16610 - RNA, 20 nt, synthetic construct
  misc_feature 1..20: note = antisense sequence
  source 1..20: mol_type = other RNA
agagcactgagatgggtaac

SEQ ID NO: 16611 - RNA, 20 nt, synthetic construct
  misc_feature 1..20: note = antisense sequence
  source 1..20: mol_type = other RNA
atggctggcactcaagtagg

SEQ ID NO: 16612 - RNA, 20 nt, synthetic construct
  misc_feature 1..20: note = antisense sequence
  source 1..20: mol_type = other RNA
tatggctggcactcaagtag

SEQ ID NO: 16613 - RNA, 20 nt, synthetic construct
  misc_feature 1..20: note = antisense sequence
  source 1..20: mol_type = other RNA
ctatggctggcactcaagta

SEQ ID NO: 16614 - RNA, 20 nt, synthetic construct
  misc_feature 1..20: note = antisense sequence
  source 1..20: mol_type = other RNA
tctatggctggcactcaagt

SEQ ID NO: 16615 - RNA, 20 nt, synthetic construct
  misc_feature 1..20: note = antisense sequence
  source 1..20: mol_type = other RNA
atctatggctggcactcaag

SEQ ID NO: 16616 - RNA, 20 nt, synthetic construct
  misc_feature 1..20: note = antisense sequence
  source 1..20: mol_type = other RNA
agacccagagatggcatgtc

SEQ ID NO: 16617 - RNA, 20 nt, synthetic construct
  misc_feature 1..20: note = antisense sequence
  source 1..20: mol_type = other RNA
aaagcaaccagagcctgact

SEQ ID NO: 16618 - RNA, 20 nt, synthetic construct
  misc_feature 1..20: note = antisense sequence
  source 1..20: mol_type = other RNA
tccaaagcaaccagagcctg

SEQ ID NO: 16619 - RNA, 20 nt, synthetic construct
  misc_feature 1..20: note = antisense sequence
  source 1..20: mol_type = other RNA
tcctccaaagcaaccagagc

SEQ ID NO: 16620 - RNA, 20 nt, synthetic construct
  misc_feature 1..20: note = antisense sequence
  source 1..20: mol_type = other RNA
atcctccaaagcaaccagag

SEQ ID NO: 16621 - RNA, 20 nt, synthetic construct
  misc_feature 1..20: note = antisense sequence
  source 1..20: mol_type = other RNA
gatcctccaaagcaaccaga

SEQ ID NO: 16622 - RNA, 20 nt, synthetic construct
  misc_feature 1..20: note = antisense sequence
  source 1..20: mol_type = other RNA
cagagtccctgcctaactgc

SEQ ID NO: 16623 - RNA, 20 nt, synthetic construct
  misc_feature 1..20: note = antisense sequence
  source 1..20: mol_type = other RNA
cccagagtccctgcctaact

SEQ ID NO: 16624 - RNA, 20 nt, synthetic construct
  misc_feature 1..20: note = antisense sequence
  source 1..20: mol_type = other RNA
ccaggagaaagcaggcattc

SEQ ID NO: 16625 - RNA, 20 nt, synthetic construct
  misc_feature 1..20: note = antisense sequence
  source 1..20: mol_type = other RNA
ttcccagggagcaggtagag

SEQ ID NO: 16626 - RNA, 20 nt, synthetic construct
  misc_feature 1..20: note = antisense sequence
  source 1..20: mol_type = other RNA
tggattttcccagggagcag

SEQ ID NO: 16627 - RNA, 20 nt, synthetic construct
  misc_feature 1..20: note = antisense sequence
  source 1..20: mol_type = other RNA
aggtggattttcccagggag

SEQ ID NO: 16628 - RNA, 20 nt, synthetic construct
  misc_feature 1..20: note = antisense sequence
  source 1..20: mol_type = other RNA
gcaggtggattttcccaggg

SEQ ID NO: 16629 - RNA, 20 nt, synthetic construct
  misc_feature 1..20: note = antisense sequence
  source 1..20: mol_type = other RNA
ggcaggtggattttcccagg

SEQ ID NO: 16630 - RNA, 20 nt, synthetic construct
  misc_feature 1..20: note = antisense sequence
  source 1..20: mol_type = other RNA
tggcaggtggattttcccag

SEQ ID NO: 16631 - RNA, 20 nt, synthetic construct
  misc_feature 1..20: note = antisense sequence
  source 1..20: mol_type = other RNA
ctggcaggtggattttccca

SEQ ID NO: 16632 - RNA, 20 nt, synthetic construct
  misc_feature 1..20: note = antisense sequence
  source 1..20: mol_type = other RNA
gctggcaggtggattttccc

SEQ ID NO: 16633 - RNA, 20 nt, synthetic construct
  misc_feature 1..20: note = antisense sequence
  source 1..20: mol_type = other RNA
tgagctggcaggtggatttt

SEQ ID NO: 16634 - RNA, 20 nt, synthetic construct
  misc_feature 1..20: note = antisense sequence
  source 1..20: mol_type = other RNA
gtgagctggcaggtggattt

SEQ ID NO: 16635 - RNA, 20 nt, synthetic construct
  misc_feature 1..20: note = antisense sequence
  source 1..20: mol_type = other RNA
ctccaatggatgtgtgagct

SEQ ID NO: 16636 - RNA, 20 nt, synthetic construct
  misc_feature 1..20: note = antisense sequence
  source 1..20: mol_type = other RNA
tctccaatggatgtgtgagc

SEQ ID NO: 16637 - RNA, 20 nt, synthetic construct
  misc_feature 1..20: note = antisense sequence
  source 1..20: mol_type = other RNA
taagctacagagtacccaac

SEQ ID NO: 16638 - RNA, 20 nt, synthetic construct
  misc_feature 1..20: note = antisense sequence
  source 1..20: mol_type = other RNA
ctaagctacagagtacccaa

SEQ ID NO: 16639 - RNA, 20 nt, synthetic construct
  misc_feature 1..20: note = antisense sequence
  source 1..20: mol_type = other RNA
tctaagctacagagtaccca

SEQ ID NO: 16640 - RNA, 20 nt, synthetic construct
  misc_feature 1..20: note = antisense sequence
  source 1..20: mol_type = other RNA
atctaagctacagagtaccc

SEQ ID NO: 16641 - RNA, 20 nt, synthetic construct
  misc_feature 1..20: note = antisense sequence
  source 1..20: mol_type = other RNA
gatctaagctacagagtacc

SEQ ID NO: 16642 - RNA, 20 nt, synthetic construct
  misc_feature 1..20: note = antisense sequence
  source 1..20: mol_type = other RNA
gggatctaagctacagagta

SEQ ID NO: 16643 - RNA, 20 nt, synthetic construct
  misc_feature 1..20: note = antisense sequence
  source 1..20: mol_type = other RNA
tgggatctaagctacagagt

SEQ ID NO: 16644 - RNA, 20 nt, synthetic construct
  misc_feature 1..20: note = antisense sequence
  source 1..20: mol_type = other RNA
atctgggatctaagctacag

SEQ ID NO: 16645 - RNA, 20 nt, synthetic construct
  misc_feature 1..20: note = antisense sequence
  source 1..20: mol_type = other RNA
catctgggatctaagctaca

SEQ ID NO: 16646 - RNA, 20 nt, synthetic construct
  misc_feature 1..20: note = antisense sequence
  source 1..20: mol_type = other RNA
acatctgggatctaagctac

SEQ ID NO: 16647 - RNA, 20 nt, synthetic construct
  misc_feature 1..20: note = antisense sequence
  source 1..20: mol_type = other RNA
acagacatctgggatctaag

SEQ ID NO: 16648 - RNA, 20 nt, synthetic construct
  misc_feature 1..20: note = antisense sequence
  source 1..20: mol_type = other RNA
cacagacatctgggatctaa

SEQ ID NO: 16649 - RNA, 20 nt, synthetic construct
  misc_feature 1..20: note = antisense sequence
  source 1..20: mol_type = other RNA
ccacagacatctgggatcta

SEQ ID NO: 16650 - RNA, 20 nt, synthetic construct
  misc_feature 1..20: note = antisense sequence
  source 1..20: mol_type = other RNA
gccacagacatctgggatct

SEQ ID NO: 16651 - RNA, 20 nt, synthetic construct
  misc_feature 1..20: note = antisense sequence
  source 1..20: mol_type = other RNA
tgccacagacatctgggatc

SEQ ID NO: 16652 - RNA, 20 nt, synthetic construct
  misc_feature 1..20: note = antisense sequence
  source 1..20: mol_type = other RNA
ttgccacagacatctgggat

SEQ ID NO: 16653 - RNA, 20 nt, synthetic construct
  misc_feature 1..20: note = antisense sequence
  source 1..20: mol_type = other RNA
ctcactcttgccacagacat

SEQ ID NO: 16654 - RNA, 20 nt, synthetic construct
  misc_feature 1..20: note = antisense sequence
  source 1..20: mol_type = other RNA
gctcactcttgccacagaca

SEQ ID NO: 16655 - RNA, 20 nt, synthetic construct
  misc_feature 1..20: note = antisense sequence
  source 1..20: mol_type = other RNA
ctaaatggctcctggagaag

SEQ ID NO: 16656 - RNA, 20 nt, synthetic construct
  misc_feature 1..20: note = antisense sequence
  source 1..20: mol_type = other RNA
ggccctaaatggctcctgga

SEQ ID NO: 16657 - RNA, 20 nt, synthetic construct
  misc_feature 1..20: note = antisense sequence
  source 1..20: mol_type = other RNA
acttcctggccctaaatggc

SEQ ID NO: 16658 - RNA, 20 nt, synthetic construct
  misc_feature 1..20: note = antisense sequence
  source 1..20: mol_type = other RNA
tacttcctggccctaaatgg

SEQ ID NO: 16659 - RNA, 20 nt, synthetic construct
  misc_feature 1..20: note = antisense sequence
  source 1..20: mol_type = other RNA
tgcttgggctacttcctggc

SEQ ID NO: 16660 - RNA, 20 nt, synthetic construct
  misc_feature 1..20: note = antisense sequence
  source 1..20: mol_type = other RNA
atgcttgggctacttcctgg

SEQ ID NO: 16661 - RNA, 20 nt, synthetic construct
  misc_feature 1..20: note = antisense sequence
  source 1..20: mol_type = other RNA
aatgcttgggctacttcctg

SEQ ID NO: 16662 - RNA, 20 nt, synthetic construct
  misc_feature 1..20: note = antisense sequence
  source 1..20: mol_type = other RNA
gaatgcttgggctacttcct

SEQ ID NO: 16663 - RNA, 20 nt, synthetic construct
  misc_feature 1..20: note = antisense sequence
  source 1..20: mol_type = other RNA
tgaatgcttgggctacttcc

SEQ ID NO: 16664 - RNA, 20 nt, synthetic construct
  misc_feature 1..20: note = antisense sequence
  source 1..20: mol_type = other RNA
ctgaatgcttgggctacttc

SEQ ID NO: 16665 - RNA, 20 nt, synthetic construct
  misc_feature 1..20: note = antisense sequence
  source 1..20: mol_type = other RNA
gtacctgaatgcttgggcta

SEQ ID NO: 16666 - RNA, 20 nt, synthetic construct
  misc_feature 1..20: note = antisense sequence
  source 1..20: mol_type = other RNA
aggcaacacagatgctgagg

SEQ ID NO: 16667 - RNA, 20 nt, synthetic construct
  misc_feature 1..20: note = antisense sequence
  source 1..20: mol_type = other RNA
agaggcaacacagatgctga

SEQ ID NO: 16668 - RNA, 20 nt, synthetic construct
  misc_feature 1..20: note = antisense sequence
  source 1..20: mol_type = other RNA
gagaggcaacacagatgctg

SEQ ID NO: 16669 - RNA, 20 nt, synthetic construct
  misc_feature 1..20: note = antisense sequence
  source 1..20: mol_type = other RNA
ggagaggcaacacagatgct

SEQ ID NO: 16670 - RNA, 20 nt, synthetic construct
  misc_feature 1..20: note = antisense sequence
  source 1..20: mol_type = other RNA
tggagaggcaacacagatgc

SEQ ID NO: 16671 - RNA, 20 nt, synthetic construct
  misc_feature 1..20: note = antisense sequence
  source 1..20: mol_type = other RNA
gtggagaggcaacacagatg

SEQ ID NO: 16672 - RNA, 20 nt, synthetic construct
  misc_feature 1..20: note = antisense sequence
  source 1..20: mol_type = other RNA
aagtgtgtggagaggcaaca

SEQ ID NO: 16673 - RNA, 20 nt, synthetic construct
  misc_feature 1..20: note = antisense sequence
  source 1..20: mol_type = other RNA
gggagaaaacaccgcaagtg

SEQ ID NO: 16674 - RNA, 20 nt, synthetic construct
  misc_feature 1..20: note = antisense sequence
  source 1..20: mol_type = other RNA
agggagaaaacaccgcaagt

SEQ ID NO: 16675 - RNA, 20 nt, synthetic construct
  misc_feature 1..20: note = antisense sequence
  source 1..20: mol_type = other RNA
tagggagaaaacaccgcaag

SEQ ID NO: 16676 - RNA, 20 nt, synthetic construct
  misc_feature 1..20: note = antisense sequence
  source 1..20: mol_type = other RNA
ctagggagaaaacaccgcaa

SEQ ID NO: 16677 - RNA, 20 nt, synthetic construct
  misc_feature 1..20: note = antisense sequence
  source 1..20: mol_type = other RNA
tctagggagaaaacaccgca

SEQ ID NO: 16678 - RNA, 20 nt, synthetic construct
  misc_feature 1..20: note = antisense sequence
  source 1..20: mol_type = other RNA
ctctagggagaaaacaccgc

SEQ ID NO: 16679 - RNA, 20 nt, synthetic construct
  misc_feature 1..20: note = antisense sequence
  source 1..20: mol_type = other RNA
cccactaagagatcccaaat

SEQ ID NO: 16680 - RNA, 20 nt, synthetic construct
  misc_feature 1..20: note = antisense sequence
  source 1..20: mol_type = other RNA
tcccactaagagatcccaaa

SEQ ID NO: 16681 - RNA, 20 nt, synthetic construct
  misc_feature 1..20: note = antisense sequence
  source 1..20: mol_type = other RNA
ctcccactaagagatcccaa

SEQ ID NO: 16682 - RNA, 20 nt, synthetic construct
  misc_feature 1..20: note = antisense sequence
  source 1..20: mol_type = other RNA
acacagccatctctcccact

SEQ ID NO: 16683 - RNA, 20 nt, synthetic construct
  misc_feature 1..20: note = antisense sequence
  source 1..20: mol_type = other RNA
gacacagccatctctcccac

SEQ ID NO: 16684 - RNA, 20 nt, synthetic construct
  misc_feature 1..20: note = antisense sequence
  source 1..20: mol_type = other RNA
gatgaagtttatctaggcac

SEQ ID NO: 16685 - RNA, 20 nt, synthetic construct
  misc_feature 1..20: note = antisense sequence
  source 1..20: mol_type = other RNA
gtgatgaagtttatctaggc

SEQ ID NO: 16686 - RNA, 20 nt, synthetic construct
  misc_feature 1..20: note = antisense sequence
  source 1..20: mol_type = other RNA
ggtgatgaagtttatctagg

SEQ ID NO: 16687 - RNA, 20 nt, synthetic construct
  misc_feature 1..20: note = antisense sequence
  source 1..20: mol_type = other RNA
ctacattctggtgatgaagt

SEQ ID NO: 16688 - RNA, 20 nt, synthetic construct
  misc_feature 1..20: note = antisense sequence
  source 1..20: mol_type = other RNA
caactacattctggtgatga

SEQ ID NO: 16689 - RNA, 20 nt, synthetic construct
  misc_feature 1..20: note = antisense sequence
  source 1..20: mol_type = other RNA
acaactacattctggtgatg

SEQ ID NO: 16690 - RNA, 20 nt, synthetic construct
  misc_feature 1..20: note = antisense sequence
  source 1..20: mol_type = other RNA
gatcctcgttatggaatgaa

SEQ ID NO: 16691 - RNA, 20 nt, synthetic construct
  misc_feature 1..20: note = antisense sequence
  source 1..20: mol_type = other RNA
agatcctcgttatggaatga

SEQ ID NO: 16692 - RNA, 20 nt, synthetic construct
  misc_feature 1..20: note = antisense sequence
  source 1..20: mol_type = other RNA
tagatcctcgttatggaatg

SEQ ID NO: 16693 - RNA, 20 nt, synthetic construct
  misc_feature 1..20: note = antisense sequence
  source 1..20: mol_type = other RNA
cttagatcctcgttatggaa

SEQ ID NO: 16694 - RNA, 20 nt, synthetic construct
  misc_feature 1..20: note = antisense sequence
  source 1..20: mol_type = other RNA
acttagatcctcgttatgga

SEQ ID NO: 16695 - RNA, 20 nt, synthetic construct
  misc_feature 1..20: note = antisense sequence
  source 1..20: mol_type = other RNA
tacttagatcctcgttatgg

SEQ ID NO: 16696 - RNA, 20 nt, synthetic construct
  misc_feature 1..20: note = antisense sequence
  source 1..20: mol_type = other RNA
ccttacttagatcctcgtta

SEQ ID NO: 16697 - RNA, 20 nt, synthetic construct
  misc_feature 1..20: note = antisense sequence
  source 1..20: mol_type = other RNA
tccttacttagatcctcgtt

SEQ ID NO: 16698 - RNA, 20 nt, synthetic construct
  misc_feature 1..20: note = antisense sequence
  source 1..20: mol_type = other RNA
atccttacttagatcctcgt

SEQ ID NO: 16699 - RNA, 20 nt, synthetic construct
  misc_feature 1..20: note = antisense sequence
  source 1..20: mol_type = other RNA
aatccttacttagatcctcg

SEQ ID NO: 16700 - RNA, 20 nt, synthetic construct
  misc_feature 1..20: note = antisense sequence
  source 1..20: mol_type = other RNA
tgccactgaaaatccttact

SEQ ID NO: 16701 - RNA, 20 nt, synthetic construct
  misc_feature 1..20: note = antisense sequence
  source 1..20: mol_type = other RNA
ttgccactgaaaatccttac

SEQ ID NO: 16702 - RNA, 20 nt, synthetic construct
  misc_feature 1..20: note = antisense sequence
  source 1..20: mol_type = other RNA
acttgtcctccctcatttgc

SEQ ID NO: 16703 - RNA, 20 nt, synthetic construct
  misc_feature 1..20: note = antisense sequence
  source 1..20: mol_type = other RNA
gcacttgtcctccctcattt

SEQ ID NO: 16704 - RNA, 20 nt, synthetic construct
  misc_feature 1..20: note = antisense sequence
  source 1..20: mol_type = other RNA
caaatggaactggtagtatc

SEQ ID NO: 16705 - RNA, 20 nt, synthetic construct
  misc_feature 1..20: note = antisense sequence
  source 1..20: mol_type = other RNA
ccaaatggaactggtagtat

SEQ ID NO: 16706 - RNA, 20 nt, synthetic construct
  misc_feature 1..20: note = antisense sequence
  source 1..20: mol_type = other RNA
tccaaatggaactggtagta

SEQ ID NO: 16707 - RNA, 20 nt, synthetic construct
  misc_feature 1..20: note = antisense sequence
  source 1..20: mol_type = other RNA
gctagtcatgtttgagtagg

SEQ ID NO: 16708 - RNA, 20 nt, synthetic construct
  misc_feature 1..20: note = antisense sequence
  source 1..20: mol_type = other RNA
agctagtcatgtttgagtag

SEQ ID NO: 16709 - RNA, 20 nt, synthetic construct
  misc_feature 1..20: note = antisense sequence
  source 1..20: mol_type = other RNA
gagctagtcatgtttgagta

SEQ ID NO: 16710 - RNA, 20 nt, synthetic construct
  misc_feature 1..20: note = antisense sequence
  source 1..20: mol_type = other RNA
gagagctagtcatgtttgag

SEQ ID NO: 16711 - RNA, 20 nt, synthetic construct
  misc_feature 1..20: note = antisense sequence
  source 1..20: mol_type = other RNA
tgagagctagtcatgtttga

SEQ ID NO: 16712 - RNA, 20 nt, synthetic construct
  misc_feature 1..20: note = antisense sequence
  source 1..20: mol_type = other RNA
gctacttaaaaccagagatg

SEQ ID NO: 16713 - RNA, 20 nt, synthetic construct
  misc_feature 1..20: note = antisense sequence
  source 1..20: mol_type = other RNA
atgttgcacttacctctctt

SEQ ID NO: 16714 - RNA, 20 nt, synthetic construct
  misc_feature 1..20: note = antisense sequence
  source 1..20: mol_type = other RNA
tcatgttgcacttacctctc

SEQ ID NO: 16715 - RNA, 20 nt, synthetic construct
  misc_feature 1..20: note = antisense sequence
  source 1..20: mol_type = other RNA
ctcatgttgcacttacctct

SEQ ID NO: 16716 - RNA, 20 nt, synthetic construct
  misc_feature 1..20: note = antisense sequence
  source 1..20: mol_type = other RNA
actcatgttgcacttacctc

SEQ ID NO: 16717 - RNA, 20 nt, synthetic construct
  misc_feature 1..20: note = antisense sequence
  source 1..20: mol_type = other RNA
aaactcatgttgcacttacc

SEQ ID NO: 16718 - RNA, 20 nt, synthetic construct
  misc_feature 1..20: note = antisense sequence
  source 1..20: mol_type = other RNA
gcaataccagtcactgctta

SEQ ID NO: 16719 - RNA, 20 nt, synthetic construct
  misc_feature 1..20: note = antisense sequence
  source 1..20: mol_type = other RNA
gagagcaataccagtcactg

SEQ ID NO: 16720 - RNA, 20 nt, synthetic construct
  misc_feature 1..20: note = antisense sequence
  source 1..20: mol_type = other RNA
ccgagagcaataccagtcac

SEQ ID NO: 16721 - RNA, 20 nt, synthetic construct
  misc_feature 1..20: note = antisense sequence
  source 1..20: mol_type = other RNA
accgagagcaataccagtca

SEQ ID NO: 16722 - RNA, 20 nt, synthetic construct
  misc_feature 1..20: note = antisense sequence
  source 1..20: mol_type = other RNA
taccgagagcaataccagtc

SEQ ID NO: 16723 - RNA, 20 nt, synthetic construct
  misc_feature 1..20: note = antisense sequence
  source 1..20: mol_type = other RNA
ttaccgagagcaataccagt

SEQ ID NO: 16724 - RNA, 20 nt, synthetic construct
  misc_feature 1..20: note = antisense sequence
  source 1..20: mol_type = other RNA
cttaccgagagcaataccag

SEQ ID NO: 16725 - RNA, 20 nt, synthetic construct
  misc_feature 1..20: note = antisense sequence
  source 1..20: mol_type = other RNA
acttaccgagagcaatacca

SEQ ID NO: 16726 - RNA, 20 nt, synthetic construct
  misc_feature 1..20: note = antisense sequence
  source 1..20: mol_type = other RNA
cacttaccgagagcaatacc

SEQ ID NO: 16727 - RNA, 20 nt, synthetic construct
  misc_feature 1..20: note = antisense sequence
  source 1..20: mol_type = other RNA
tcacttaccgagagcaatac

SEQ ID NO: 16728 - RNA, 20 nt, synthetic construct
  misc_feature 1..20: note = antisense sequence
  source 1..20: mol_type = other RNA
gtcacttaccgagagcaata

SEQ ID NO: 16729 - RNA, 20 nt, synthetic construct
  misc_feature 1..20: note = antisense sequence
  source 1..20: mol_type = other RNA
tgtcacttaccgagagcaat

SEQ ID NO: 16730 - RNA, 20 nt, synthetic construct
  misc_feature 1..20: note = antisense sequence
  source 1..20: mol_type = other RNA
tctgtcacttaccgagagca

SEQ ID NO: 16731 - RNA, 20 nt, synthetic construct
  misc_feature 1..20: note = antisense sequence
  source 1..20: mol_type = other RNA
gtctgtcacttaccgagagc

SEQ ID NO: 16732 - RNA, 20 nt, synthetic construct
  misc_feature 1..20: note = antisense sequence
  source 1..20: mol_type = other RNA
tgtctgtcacttaccgagag

SEQ ID NO: 16733 - RNA, 20 nt, synthetic construct
  misc_feature 1..20: note = antisense sequence
  source 1..20: mol_type = other RNA
aagcaaatagtgtctgtcac

SEQ ID NO: 16734 - RNA, 20 nt, synthetic construct
  misc_feature 1..20: note = antisense sequence
  source 1..20: mol_type = other RNA
tgaagcaaatagtgtctgtc

SEQ ID NO: 16735 - RNA, 20 nt, synthetic construct
  misc_feature 1..20: note = antisense sequence
  source 1..20: mol_type = other RNA
cagtgtcttacaaggatgaa

SEQ ID NO: 16736 - RNA, 20 nt, synthetic construct
  misc_feature 1..20: note = antisense sequence
  source 1..20: mol_type = other RNA
ccagtgtcttacaaggatga

SEQ ID NO: 16737 - RNA, 20 nt, synthetic construct
  misc_feature 1..20: note = antisense sequence
  source 1..20: mol_type = other RNA
tgattttcccagtgtcttac

SEQ ID NO: 16738 - RNA, 20 nt, synthetic construct
  misc_feature 1..20: note = antisense sequence
  source 1..20: mol_type = other RNA
atgcggcatgtgaattgtaa

SEQ ID NO: 16739 - RNA, 20 nt, synthetic construct
  misc_feature 1..20: note = antisense sequence
  source 1..20: mol_type = other RNA
aatgcggcatgtgaattgta

SEQ ID NO: 16740 - RNA, 20 nt, synthetic construct
  misc_feature 1..20: note = antisense sequence
  source 1..20: mol_type = other RNA
aaatgcggcatgtgaattgt

SEQ ID NO: 16741 - RNA, 20 nt, synthetic construct
  misc_feature 1..20: note = antisense sequence
  source 1..20: mol_type = other RNA
tcaaatgcggcatgtgaatt

SEQ ID NO: 16742 - RNA, 20 nt, synthetic construct
  misc_feature 1..20: note = antisense sequence
  source 1..20: mol_type = other RNA
gtcaaatgcggcatgtgaat

SEQ ID NO: 16743 - RNA, 20 nt, synthetic construct
  misc_feature 1..20: note = antisense sequence
  source 1..20: mol_type = other RNA
agtcaaatgcggcatgtgaa

SEQ ID NO: 16744 - RNA, 20 nt, synthetic construct
  misc_feature 1..20: note = antisense sequence
  source 1..20: mol_type = other RNA
aagtcaaatgcggcatgtga

SEQ ID NO: 16745 - RNA, 20 nt, synthetic construct
  misc_feature 1..20: note = antisense sequence
  source 1..20: mol_type = other RNA
aaagtcaaatgcggcatgtg

SEQ ID NO: 16746 - RNA, 20 nt, synthetic construct
  misc_feature 1..20: note = antisense sequence
  source 1..20: mol_type = other RNA
taaagtcaaatgcggcatgt

SEQ ID NO: 16747 - RNA, 20 nt, synthetic construct
  misc_feature 1..20: note = antisense sequence
  source 1..20: mol_type = other RNA
ataaagtcaaatgcggcatg

SEQ ID NO: 16748 - RNA, 20 nt, synthetic construct
  misc_feature 1..20: note = antisense sequence
  source 1..20: mol_type = other RNA
gataaagtcaaatgcggcat

SEQ ID NO: 16749 - RNA, 20 nt, synthetic construct
  misc_feature 1..20: note = antisense sequence
  source 1..20: mol_type = other RNA
tgataaagtcaaatgcggca

SEQ ID NO: 16750 - RNA, 20 nt, synthetic construct
  misc_feature 1..20: note = antisense sequence
  source 1..20: mol_type = other RNA
catccatttaccgtgatagt

SEQ ID NO: 16751 - RNA, 20 nt, synthetic construct
  misc_feature 1..20: note = antisense sequence
  source 1..20: mol_type = other RNA
acatccatttaccgtgatag

SEQ ID NO: 16752 - RNA, 20 nt, synthetic construct
  misc_feature 1..20: note = antisense sequence
  source 1..20: mol_type = other RNA
ggaaagttacaactgcatca

SEQ ID NO: 16753 - RNA, 20 nt, synthetic construct
  misc_feature 1..20: note = antisense sequence
  source 1..20: mol_type = other RNA
aggaggaaagttacaactgc

SEQ ID NO: 16754 - RNA, 20 nt, synthetic construct
  misc_feature 1..20: note = antisense sequence
  source 1..20: mol_type = other RNA
aaggaggaaagttacaactg

SEQ ID NO: 16755 - RNA, 20 nt, synthetic construct
  misc_feature 1..20: note = antisense sequence
  source 1..20: mol_type = other RNA
ttttgcggctgctcttcaga

SEQ ID NO: 16756 - RNA, 20 nt, synthetic construct
  misc_feature 1..20: note = antisense sequence
  source 1..20: mol_type = other RNA
aggactcaagtctgaatttg

SEQ ID NO: 16757 - RNA, 20 nt, synthetic construct
  misc_feature 1..20: note = antisense sequence
  source 1..20: mol_type = other RNA
tgaggactcaagtctgaatt

SEQ ID NO: 16758 - RNA, 20 nt, synthetic construct
  misc_feature 1..20: note = antisense sequence
  source 1..20: mol_type = other RNA
ctgaggactcaagtctgaat

SEQ ID NO: 16759 - RNA, 20 nt, synthetic construct
  misc_feature 1..20: note = antisense sequence
  source 1..20: mol_type = other RNA
actgaggactcaagtctgaa

SEQ ID NO: 16760 - RNA, 20 nt, synthetic construct
  misc_feature 1..20: note = antisense sequence
  source 1..20: mol_type = other RNA
tactgaggactcaagtctga

SEQ ID NO: 16761 - RNA, 20 nt, synthetic construct
  misc_feature 1..20: note = antisense sequence
  source 1..20: mol_type = other RNA
ttactgaggactcaagtctg

SEQ ID NO: 16762 - RNA, 20 nt, synthetic construct
  misc_feature 1..20: note = antisense sequence
  source 1..20: mol_type = other RNA
tttactgaggactcaagtct

SEQ ID NO: 16763 - RNA, 20 nt, synthetic construct
  misc_feature 1..20: note = antisense sequence
  source 1..20: mol_type = other RNA
ttttactgaggactcaagtc

SEQ ID NO: 16764 - RNA, 20 nt, synthetic construct
  misc_feature 1..20: note = antisense sequence
  source 1..20: mol_type = other RNA
gtgcctgcatgtgtaacaag

SEQ ID NO: 16765 - RNA, 20 nt, synthetic construct
  misc_feature 1..20: note = antisense sequence
  source 1..20: mol_type = other RNA
agtgcctgcatgtgtaacaa

SEQ ID NO: 16766 - RNA, 20 nt, synthetic construct
  misc_feature 1..20: note = antisense sequence
  source 1..20: mol_type = other RNA
gaagtgcctgcatgtgtaac

SEQ ID NO: 16767 - RNA, 20 nt, synthetic construct
  misc_feature 1..20: note = antisense sequence
  source 1..20: mol_type = other RNA
tgaagtgcctgcatgtgtaa

SEQ ID NO: 16768 - RNA, 20 nt, synthetic construct
  misc_feature 1..20: note = antisense sequence
  source 1..20: mol_type = other RNA
tgctgaagtgcctgcatgtg

SEQ ID NO: 16769 - RNA, 20 nt, synthetic construct
  misc_feature 1..20: note = antisense sequence
  source 1..20: mol_type = other RNA
gatcatgctgaagtgcctgc

SEQ ID NO: 16770 - RNA, 20 nt, synthetic construct
  misc_feature 1..20: note = antisense sequence
  source 1..20: mol_type = other RNA
agatcatgctgaagtgcctg

SEQ ID NO: 16771 - RNA, 20 nt, synthetic construct
  misc_feature 1..20: note = antisense sequence
  source 1..20: mol_type = other RNA
gagatcatgctgaagtgcct

SEQ ID NO: 16772 - RNA, 20 nt, synthetic construct
  misc_feature 1..20: note = antisense sequence
  source 1..20: mol_type = other RNA
ggagatcatgctgaagtgcc

SEQ ID NO: 16773 - RNA, 20 nt, synthetic construct
  misc_feature 1..20: note = antisense sequence
  source 1..20: mol_type = other RNA
gggagatcatgctgaagtgc

SEQ ID NO: 16774 - RNA, 20 nt, synthetic construct
  misc_feature 1..20: note = antisense sequence
  source 1..20: mol_type = other RNA
ctgaaagttagggagcttcc

SEQ ID NO: 16775 - RNA, 20 nt, synthetic construct
  misc_feature 1..20: note = antisense sequence
  source 1..20: mol_type = other RNA
tctgaaagttagggagcttc

SEQ ID NO: 16776 - RNA, 20 nt, synthetic construct
  misc_feature 1..20: note = antisense sequence
  source 1..20: mol_type = other RNA
gaacatctgaaagttaggga

SEQ ID NO: 16777 - RNA, 20 nt, synthetic construct
  misc_feature 1..20: note = antisense sequence
  source 1..20: mol_type = other RNA
agaacatctgaaagttaggg

SEQ ID NO: 16778 - RNA, 20 nt, synthetic construct
  misc_feature 1..20: note = antisense sequence
  source 1..20: mol_type = other RNA
ggctattctatgtaaggaac

SEQ ID NO: 16779 - RNA, 20 nt, synthetic construct
  misc_feature 1..20: note = antisense sequence
  source 1..20: mol_type = other RNA
ggttttagtgaaatgttggc

SEQ ID NO: 16780 - RNA, 20 nt, synthetic construct
  misc_feature 1..20: note = antisense sequence
  source 1..20: mol_type = other RNA
gactttcctcagatcacaca

SEQ ID NO: 16781 - RNA, 20 nt, synthetic construct
  misc_feature 1..20: note = antisense sequence
  source 1..20: mol_type = other RNA
atcagtgactttcctcagat

SEQ ID NO: 16782 - RNA, 20 nt, synthetic construct
  misc_feature 1..20: note = antisense sequence
  source 1..20: mol_type = other RNA
gatcagtgactttcctcaga

SEQ ID NO: 16783 - RNA, 20 nt, synthetic construct
  misc_feature 1..20: note = antisense sequence
  source 1..20: mol_type = other RNA
aagatcagtgactttcctca

SEQ ID NO: 16784 - RNA, 20 nt, synthetic construct
  misc_feature 1..20: note = antisense sequence
  source 1..20: mol_type = other RNA
taagatcagtgactttcctc

SEQ ID NO: 16785 - RNA, 20 nt, synthetic construct
  misc_feature 1..20: note = antisense sequence
  source 1..20: mol_type = other RNA
gataagatcagtgactttcc

SEQ ID NO: 16786 - RNA, 20 nt, synthetic construct
  misc_feature 1..20: note = antisense sequence
  source 1..20: mol_type = other RNA
caattccctgaacttacaga

SEQ ID NO: 16787 - RNA, 20 nt, synthetic construct
  misc_feature 1..20: note = antisense sequence
  source 1..20: mol_type = other RNA
agcccagcaaggcagatttt

SEQ ID NO: 16788 - RNA, 20 nt, synthetic construct
  misc_feature 1..20: note = antisense sequence
  source 1..20: mol_type = other RNA
cactaagcccagcaaggcag

SEQ ID NO: 16789 - RNA, 20 nt, synthetic construct
  misc_feature 1..20: note = antisense sequence
  source 1..20: mol_type = other RNA
cgagtaggctgggatgacag

SEQ ID NO: 16790 - RNA, 20 nt, synthetic construct
  misc_feature 1..20: note = antisense sequence
  source 1..20: mol_type = other RNA
ccgagtaggctgggatgaca

SEQ ID NO: 16791 - RNA, 20 nt, synthetic construct
  misc_feature 1..20: note = antisense sequence
  source 1..20: mol_type = other RNA
tcaaactcctgggctaaagt

SEQ ID NO: 16792 - RNA, 20 nt, synthetic construct
  misc_feature 1..20: note = antisense sequence
  source 1..20: mol_type = other RNA
ctcaaactcctgggctaaag

SEQ ID NO: 16793 - RNA, 20 nt, synthetic construct
  misc_feature 1..20: note = antisense sequence
  source 1..20: mol_type = other RNA
tctcaaactcctgggctaaa

SEQ ID NO: 16794 - RNA, 20 nt, synthetic construct
  misc_feature 1..20: note = antisense sequence
  source 1..20: mol_type = other RNA
atctcaaactcctgggctaa

SEQ ID NO: 16795 - RNA, 20 nt, synthetic construct
  misc_feature 1..20: note = antisense sequence
  source 1..20: mol_type = other RNA
gatctcaaactcctgggcta

SEQ ID NO: 16796 - RNA, 20 nt, synthetic construct
  misc_feature 1..20: note = antisense sequence
  source 1..20: mol_type = other RNA
tgatctcaaactcctgggct

SEQ ID NO: 16797 - RNA, 20 nt, synthetic construct
  misc_feature 1..20: note = antisense sequence
  source 1..20: mol_type = other RNA
ctgatctcaaactcctgggc

SEQ ID NO: 16798 - RNA, 20 nt, synthetic construct
  misc_feature 1..20: note = antisense sequence
  source 1..20: mol_type = other RNA
gctgatctcaaactcctggg

SEQ ID NO: 16799 - RNA, 20 nt, synthetic construct
  misc_feature 1..20: note = antisense sequence
  source 1..20: mol_type = other RNA
cagaccattatgacagtttc

SEQ ID NO: 16800 - RNA, 20 nt, synthetic construct
  misc_feature 1..20: note = antisense sequence
  source 1..20: mol_type = other RNA
catcagaccattatgacagt

SEQ ID NO: 16801 - RNA, 20 nt, synthetic construct
  misc_feature 1..20: note = antisense sequence
  source 1..20: mol_type = other RNA
gcatcagaccattatgacag

SEQ ID NO: 16802 - RNA, 20 nt, synthetic construct
  misc_feature 1..20: note = antisense sequence
  source 1..20: mol_type = other RNA
agcatcagaccattatgaca

SEQ ID NO: 16803 - RNA, 20 nt, synthetic construct
  misc_feature 1..20: note = antisense sequence
  source 1..20: mol_type = other RNA
cagcatcagaccattatgac

SEQ ID NO: 16804 - RNA, 20 nt, synthetic construct
  misc_feature 1..20: note = antisense sequence
  source 1..20: mol_type = other RNA
acagcatcagaccattatga

SEQ ID NO: 16805 - RNA, 20 nt, synthetic construct
  misc_feature 1..20: note = antisense sequence
  source 1..20: mol_type = other RNA
tacagcatcagaccattatg

SEQ ID NO: 16806 - RNA, 20 nt, synthetic construct
  misc_feature 1..20: note = antisense sequence
  source 1..20: mol_type = other RNA
catatacagcatcagaccat

SEQ ID NO: 16807 - RNA, 20 nt, synthetic construct
  misc_feature 1..20: note = antisense sequence
  source 1..20: mol_type = other RNA
acatatacagcatcagacca

SEQ ID NO: 16808 - RNA, 20 nt, synthetic construct
  misc_feature 1..20: note = antisense sequence
  source 1..20: mol_type = other RNA
gacatatacagcatcagacc

SEQ ID NO: 16809 - RNA, 20 nt, synthetic construct
  misc_feature 1..20: note = antisense sequence
  source 1..20: mol_type = other RNA
agacatatacagcatcagac

SEQ ID NO: 16810 - RNA, 20 nt, synthetic construct
  misc_feature 1..20: note = antisense sequence
  source 1..20: mol_type = other RNA
agctggcaagaatgtagaca

SEQ ID NO: 16811 - RNA, 20 nt, synthetic construct
  misc_feature 1..20: note = antisense sequence
  source 1..20: mol_type = other RNA
gagctggcaagaatgtagac

SEQ ID NO: 16812 - RNA, 20 nt, synthetic construct
  misc_feature 1..20: note = antisense sequence
  source 1..20: mol_type = other RNA
gacagagctggcaagaatgt

SEQ ID NO: 16813 - RNA, 20 nt, synthetic construct
  misc_feature 1..20: note = antisense sequence
  source 1..20: mol_type = other RNA
tgacagagctggcaagaatg

SEQ ID NO: 16814 - RNA, 20 nt, synthetic construct
  misc_feature 1..20: note = antisense sequence
  source 1..20: mol_type = other RNA
gtgacagagctggcaagaat

SEQ ID NO: 16815 - RNA, 20 nt, synthetic construct
  misc_feature 1..20: note = antisense sequence
  source 1..20: mol_type = other RNA
taggtgacagagctggcaag

SEQ ID NO: 16816 - RNA, 20 nt, synthetic construct
  misc_feature 1..20: note = antisense sequence
  source 1..20: mol_type = other RNA
aggtaggtgacagagctggc

SEQ ID NO: 16817 - RNA, 20 nt, synthetic construct
  misc_feature 1..20: note = antisense sequence
  source 1..20: mol_type = other RNA
ctccaggtaggtgacagagc

SEQ ID NO: 16818 - RNA, 20 nt, synthetic construct
  misc_feature 1..20: note = antisense sequence
  source 1..20: mol_type = other RNA
caaatcactccaggtaggtg

SEQ ID NO: 16819 - RNA, 20 nt, synthetic construct
  misc_feature 1..20: note = antisense sequence
  source 1..20: mol_type = other RNA
tcaaatcactccaggtaggt

SEQ ID NO: 16820 - RNA, 20 nt, synthetic construct
  misc_feature 1..20: note = antisense sequence
  source 1..20: mol_type = other RNA
ctcaaatcactccaggtagg

SEQ ID NO: 16821 - RNA, 20 nt, synthetic construct
  misc_feature 1..20: note = antisense sequence
  source 1..20: mol_type = other RNA
tctcaaatcactccaggtag

SEQ ID NO: 16822 - RNA, 20 nt, synthetic construct
  misc_feature 1..20: note = antisense sequence
  source 1..20: mol_type = other RNA
caaaacctctcaaatcactc

SEQ ID NO: 16823 - RNA, 20 nt, synthetic construct
  misc_feature 1..20: note = antisense sequence
  source 1..20: mol_type = other RNA
gggagagatttgtatatgca

SEQ ID NO: 16824 - RNA, 20 nt, synthetic construct
  misc_feature 1..20: note = antisense sequence
  source 1..20: mol_type = other RNA
gggaagattagggtagaaaa

SEQ ID NO: 16825 - RNA, 20 nt, synthetic construct
  misc_feature 1..20: note = antisense sequence
  source 1..20: mol_type = other RNA
agggaagattagggtagaaa

SEQ ID NO: 16826 - RNA, 20 nt, synthetic construct
  misc_feature 1..20: note = antisense sequence
  source 1..20: mol_type = other RNA
gagggaagattagggtagaa

SEQ ID NO: 16827 - RNA, 20 nt, synthetic construct
  misc_feature 1..20: note = antisense sequence
  source 1..20: mol_type = other RNA
agagggaagattagggtaga

SEQ ID NO: 16828 - RNA, 20 nt, synthetic construct
  misc_feature 1..20: note = antisense sequence
  source 1..20: mol_type = other RNA
ctagagggaagattagggta

SEQ ID NO: 16829 - RNA, 20 nt, synthetic construct
  misc_feature 1..20: note = antisense sequence
  source 1..20: mol_type = other RNA
ttacctagagggaagattag

SEQ ID NO: 16830 - RNA, 20 nt, synthetic construct
  misc_feature 1..20: note = antisense sequence
  source 1..20: mol_type = other RNA
caagccctgtatttgccttt

SEQ ID NO: 16831 - RNA, 20 nt, synthetic construct
  misc_feature 1..20: note = antisense sequence
  source 1..20: mol_type = other RNA
gttcaagccctgtatttgcc

SEQ ID NO: 16832 - RNA, 20 nt, synthetic construct
  misc_feature 1..20: note = antisense sequence
  source 1..20: mol_type = other RNA
agttcaagccctgtatttgc

SEQ ID NO: 16833 - RNA, 20 nt, synthetic construct
  misc_feature 1..20: note = antisense sequence
  source 1..20: mol_type = other RNA
gtaatagttcaagccctgta

SEQ ID NO: 16834 - RNA, 20 nt, synthetic construct
  misc_feature 1..20: note = antisense sequence
  source 1..20: mol_type = other RNA
agtaatagttcaagccctgt

SEQ ID NO: 16835 - RNA, 20 nt, synthetic construct
  misc_feature 1..20: note = antisense sequence
  source 1..20: mol_type = other RNA
gctagtaatagttcaagccc

SEQ ID NO: 16836 - RNA, 20 nt, synthetic construct
  misc_feature 1..20: note = antisense sequence
  source 1..20: mol_type = other RNA
tggctagtaatagttcaagc

SEQ ID NO: 16837 - RNA, 20 nt, synthetic construct
  misc_feature 1..20: note = antisense sequence
  source 1..20: mol_type = other RNA
ctatctgctctgtgtctcat

SEQ ID NO: 16838 - RNA, 20 nt, synthetic construct
  misc_feature 1..20: note = antisense sequence
  source 1..20: mol_type = other RNA
cctatctgctctgtgtctca

SEQ ID NO: 16839 - RNA, 20 nt, synthetic construct
  misc_feature 1..20: note = antisense sequence
  source 1..20: mol_type = other RNA
acctatctgctctgtgtctc

SEQ ID NO: 16840 - RNA, 20 nt, synthetic construct
  misc_feature 1..20: note = antisense sequence
  source 1..20: mol_type = other RNA
aacctatctgctctgtgtct

SEQ ID NO: 16841 - RNA, 20 nt, synthetic construct
  misc_feature 1..20: note = antisense sequence
  source 1..20: mol_type = other RNA
aaacctatctgctctgtgtc

SEQ ID NO: 16842 - RNA, 20 nt, synthetic construct
  misc_feature 1..20: note = antisense sequence
  source 1..20: mol_type = other RNA
gaaacctatctgctctgtgt

SEQ ID NO: 16843 - RNA, 20 nt, synthetic construct
  misc_feature 1..20: note = antisense sequence
  source 1..20: mol_type = other RNA
tgaaacctatctgctctgtg

SEQ ID NO: 16844 - RNA, 20 nt, synthetic construct
  misc_feature 1..20: note = antisense sequence
  source 1..20: mol_type = other RNA
atgaaacctatctgctctgt

SEQ ID NO: 16845 - RNA, 20 nt, synthetic construct
  misc_feature 1..20: note = antisense sequence
  source 1..20: mol_type = other RNA
aatgaaacctatctgctctg

SEQ ID NO: 16846 - RNA, 20 nt, synthetic construct
  misc_feature 1..20: note = antisense sequence
  source 1..20: mol_type = other RNA
caatgaaacctatctgctct

SEQ ID NO: 16847 - RNA, 20 nt, synthetic construct
  misc_feature 1..20: note = antisense sequence
  source 1..20: mol_type = other RNA
tcaatgaaacctatctgctc

SEQ ID NO: 16848 - RNA, 20 nt, synthetic construct
  misc_feature 1..20: note = antisense sequence
  source 1..20: mol_type = other RNA
ctcaatgaaacctatctgct

SEQ ID NO: 16849 - RNA, 20 nt, synthetic construct
  misc_feature 1..20: note = antisense sequence
  source 1..20: mol_type = other RNA
cctcaatgaaacctatctgc

SEQ ID NO: 16850 - RNA, 20 nt, synthetic construct
  misc_feature 1..20: note = antisense sequence
  source 1..20: mol_type = other RNA
acctcaatgaaacctatctg

SEQ ID NO: 16851 - RNA, 20 nt, synthetic construct
  misc_feature 1..20: note = antisense sequence
  source 1..20: mol_type = other RNA
ctcaaacctcaatgaaacct

SEQ ID NO: 16852 - RNA, 20 nt, synthetic construct
  misc_feature 1..20: note = antisense sequence
  source 1..20: mol_type = other RNA
actcaaacctcaatgaaacc

SEQ ID NO: 16853 - RNA, 20 nt, synthetic construct
  misc_feature 1..20: note = antisense sequence
  source 1..20: mol_type = other RNA
agggtggcactcaaacctca

SEQ ID NO: 16854 - RNA, 20 nt, synthetic construct
  misc_feature 1..20: note = antisense sequence
  source 1..20: mol_type = other RNA
cagggtggcactcaaacctc

SEQ ID NO: 16855 - RNA, 20 nt, synthetic construct
  misc_feature 1..20: note = antisense sequence
  source 1..20: mol_type = other RNA
tcagggtggcactcaaacct

SEQ ID NO: 16856 - RNA, 20 nt, synthetic construct
  misc_feature 1..20: note = antisense sequence
  source 1..20: mol_type = other RNA
ctcagggtggcactcaaacc

SEQ ID NO: 16857 - RNA, 20 nt, synthetic construct
  misc_feature 1..20: note = antisense sequence
  source 1..20: mol_type = other RNA
tctcagggtggcactcaaac

SEQ ID NO: 16858 - RNA, 20 nt, synthetic construct
  misc_feature 1..20: note = antisense sequence
  source 1..20: mol_type = other RNA
ctctcagggtggcactcaaa

SEQ ID NO: 16859 - RNA, 20 nt, synthetic construct
  misc_feature 1..20: note = antisense sequence
  source 1..20: mol_type = other RNA
ctctctcagggtggcactca

SEQ ID NO: 16860 - RNA, 20 nt, synthetic construct
  misc_feature 1..20: note = antisense sequence
  source 1..20: mol_type = other RNA
tcaagctctctcagggtggc

SEQ ID NO: 16861 - RNA, 20 nt, synthetic construct
  misc_feature 1..20: note = antisense sequence
  source 1..20: mol_type = other RNA
actcaagctctctcagggtg

SEQ ID NO: 16862 - RNA, 20 nt, synthetic construct
  misc_feature 1..20: note = antisense sequence
  source 1..20: mol_type = other RNA
tactcaagctctctcagggt

SEQ ID NO: 16863 - RNA, 20 nt, synthetic construct
  misc_feature 1..20: note = antisense sequence
  source 1..20: mol_type = other RNA
ctactcaagctctctcaggg

SEQ ID NO: 16864 - RNA, 20 nt, synthetic construct
  misc_feature 1..20: note = antisense sequence
  source 1..20: mol_type = other RNA
ttagtgttccagctactcaa

SEQ ID NO: 16865 - RNA, 20 nt, synthetic construct
  misc_feature 1..20: note = antisense sequence
  source 1..20: mol_type = other RNA
tttagtgttccagctactca

SEQ ID NO: 16866 - RNA, 20 nt, synthetic construct
  misc_feature 1..20: note = antisense sequence
  source 1..20: mol_type = other RNA
ttttagtgttccagctactc

SEQ ID NO: 16867 - RNA, 20 nt, synthetic construct
  misc_feature 1..20: note = antisense sequence
  source 1..20: mol_type = other RNA
cttttagtgttccagctact

SEQ ID NO: 16868 - RNA, 20 nt, synthetic construct
  misc_feature 1..20: note = antisense sequence
  source 1..20: mol_type = other RNA
gcttttagtgttccagctac

SEQ ID NO: 16869 - RNA, 20 nt, synthetic construct
  misc_feature 1..20: note = antisense sequence
  source 1..20: mol_type = other RNA
cgcttttagtgttccagcta

SEQ ID NO: 16870 - RNA, 20 nt, synthetic construct
  misc_feature 1..20: note = antisense sequence
  source 1..20: mol_type = other RNA
ccgcttttagtgttccagct

SEQ ID NO: 16871 - RNA, 20 nt, synthetic construct
  misc_feature 1..20: note = antisense sequence
  source 1..20: mol_type = other RNA
accgcttttagtgttccagc

SEQ ID NO: 16872 - RNA, 20 nt, synthetic construct
  misc_feature 1..20: note = antisense sequence
  source 1..20: mol_type = other RNA
gaccgcttttagtgttccag

SEQ ID NO: 16873 - RNA, 20 nt, synthetic construct
  misc_feature 1..20: note = antisense sequence
  source 1..20: mol_type = other RNA
ggaccgcttttagtgttcca

SEQ ID NO: 16874 - RNA, 20 nt, synthetic construct
  misc_feature 1..20: note = antisense sequence
  source 1..20: mol_type = other RNA
tggaccgcttttagtgttcc

SEQ ID NO: 16875 - RNA, 20 nt, synthetic construct
  misc_feature 1..20: note = antisense sequence
  source 1..20: mol_type = other RNA
atggaccgcttttagtgttc

SEQ ID NO: 16876 - RNA, 20 nt, synthetic construct
  misc_feature 1..20: note = antisense sequence
  source 1..20: mol_type = other RNA
aatggaccgcttttagtgtt

SEQ ID NO: 16877 - RNA, 20 nt, synthetic construct
  misc_feature 1..20: note = antisense sequence
  source 1..20: mol_type = other RNA
aaatggaccgcttttagtgt

SEQ ID NO: 16878 - RNA, 20 nt, synthetic construct
  misc_feature 1..20: note = antisense sequence
  source 1..20: mol_type = other RNA
gctgtaaaatggaccgcttt

SEQ ID NO: 16879 - RNA, 20 nt, synthetic construct
  misc_feature 1..20: note = antisense sequence
  source 1..20: mol_type = other RNA
agctgtaaaatggaccgctt

SEQ ID NO: 16880 - RNA, 20 nt, synthetic construct
  misc_feature 1..20: note = antisense sequence
  source 1..20: mol_type = other RNA
aagctgtaaaatggaccgct

SEQ ID NO: 16881 - RNA, 20 nt, synthetic construct
  misc_feature 1..20: note = antisense sequence
  source 1..20: mol_type = other RNA
aaagctgtaaaatggaccgc

SEQ ID NO: 16882 - RNA, 20 nt, synthetic construct
  misc_feature 1..20: note = antisense sequence
  source 1..20: mol_type = other RNA
caaagctgtaaaatggaccg

SEQ ID NO: 16883 - RNA, 20 nt, synthetic construct
  misc_feature 1..20: note = antisense sequence
  source 1..20: mol_type = other RNA
gaagcaaagctgtaaaatgg

SEQ ID NO: 16884 - RNA, 20 nt, synthetic construct
  misc_feature 1..20: note = antisense sequence
  source 1..20: mol_type = other RNA
ggttttaactgaagcaaagc

SEQ ID NO: 16885 - RNA, 20 nt, synthetic construct
  misc_feature 1..20: note = antisense sequence
  source 1..20: mol_type = other RNA
acttatcactgggtccacat

SEQ ID NO: 16886 - RNA, 20 nt, synthetic construct
  misc_feature 1..20: note = antisense sequence
  source 1..20: mol_type = other RNA
gacttatcactgggtccaca

SEQ ID NO: 16887 - RNA, 20 nt, synthetic construct
  misc_feature 1..20: note = antisense sequence
  source 1..20: mol_type = other RNA
tgacttatcactgggtccac

SEQ ID NO: 16888 - RNA, 20 nt, synthetic construct
  misc_feature 1..20: note = antisense sequence
  source 1..20: mol_type = other RNA
ttgacttatcactgggtcca

SEQ ID NO: 16889 - RNA, 20 nt, synthetic construct
  misc_feature 1..20: note = antisense sequence
  source 1..20: mol_type = other RNA
cttgacttatcactgggtcc

SEQ ID NO: 16890 - RNA, 20 nt, synthetic construct
  misc_feature 1..20: note = antisense sequence
  source 1..20: mol_type = other RNA
acttgacttatcactgggtc

SEQ ID NO: 16891 - RNA, 20 nt, synthetic construct
  misc_feature 1..20: note = antisense sequence
  source 1..20: mol_type = other RNA
tacttgacttatcactgggt

SEQ ID NO: 16892 - RNA, 20 nt, synthetic construct
  misc_feature 1..20: note = antisense sequence
  source 1..20: mol_type = other RNA
ctacttgacttatcactggg

SEQ ID NO: 16893 - RNA, 20 nt, synthetic construct
  misc_feature 1..20: note = antisense sequence
  source 1..20: mol_type = other RNA
tctacttgacttatcactgg

SEQ ID NO: 16894 - RNA, 20 nt, synthetic construct
  misc_feature 1..20: note = antisense sequence
  source 1..20: mol_type = other RNA
gtgctcttcattataccaca

SEQ ID NO: 16895 - RNA, 20 nt, synthetic construct
  misc_feature 1..20: note = antisense sequence
  source 1..20: mol_type = other RNA
tgtgctcttcattataccac

SEQ ID NO: 16896 - RNA, 20 nt, synthetic construct
  misc_feature 1..20: note = antisense sequence
  source 1..20: mol_type = other RNA
gtgtgctcttcattatacca

SEQ ID NO: 16897 - RNA, 20 nt, synthetic construct
  misc_feature 1..20: note = antisense sequence
  source 1..20: mol_type = other RNA
agtgtgctcttcattatacc

SEQ ID NO: 16898 - RNA, 20 nt, synthetic construct
  misc_feature 1..20: note = antisense sequence
  source 1..20: mol_type = other RNA
cagtgtgctcttcattatac

SEQ ID NO: 16899 - RNA, 20 nt, synthetic construct
  misc_feature 1..20: note = antisense sequence
  source 1..20: mol_type = other RNA
tcccagtgtgctcttcatta

SEQ ID NO: 16900 - RNA, 20 nt, synthetic construct
  misc_feature 1..20: note = antisense sequence
  source 1..20: mol_type = other RNA
actcccagtgtgctcttcat

SEQ ID NO: 16901 - RNA, 20 nt, synthetic construct
  misc_feature 1..20: note = antisense sequence
  source 1..20: mol_type = other RNA
gggtaagtgaatgtttgcat

SEQ ID NO: 16902 - RNA, 20 nt, synthetic construct
  misc_feature 1..20: note = antisense sequence
  source 1..20: mol_type = other RNA
tgggtaagtgaatgtttgca

SEQ ID NO: 16903 - RNA, 20 nt, synthetic construct
  misc_feature 1..20: note = antisense sequence
  source 1..20: mol_type = other RNA
atgggtaagtgaatgtttgc

SEQ ID NO: 16904 - RNA, 20 nt, synthetic construct
  misc_feature 1..20: note = antisense sequence
  source 1..20: mol_type = other RNA
gtgtatgggtaagtgaatgt

SEQ ID NO: 16905 - RNA, 20 nt, synthetic construct
  misc_feature 1..20: note = antisense sequence
  source 1..20: mol_type = other RNA
cataagaacctgagaaagtc

SEQ ID NO: 16906 - RNA, 20 nt, synthetic construct
  misc_feature 1..20: note = antisense sequence
  source 1..20: mol_type = other RNA
gttgtcataagaacctgaga

SEQ ID NO: 16907 - RNA, 20 nt, synthetic construct
  misc_feature 1..20: note = antisense sequence
  source 1..20: mol_type = other RNA
tgttgtcataagaacctgag

SEQ ID NO: 16908 - RNA, 20 nt, synthetic construct
  misc_feature 1..20: note = antisense sequence
  source 1..20: mol_type = other RNA
cgcagtttgttgtcataaga

SEQ ID NO: 16909 - RNA, 20 nt, synthetic construct
  misc_feature 1..20: note = antisense sequence
  source 1..20: mol_type = other RNA
gtcgcagtttgttgtcataa

SEQ ID NO: 16910 - RNA, 20 nt, synthetic construct
  misc_feature 1..20: note = antisense sequence
  source 1..20: mol_type = other RNA
atgtcgcagtttgttgtcat

SEQ ID NO: 16911 - RNA, 20 nt, synthetic construct
  misc_feature 1..20: note = antisense sequence
  source 1..20: mol_type = other RNA
aatgtcgcagtttgttgtca

SEQ ID NO: 16912 - RNA, 20 nt, synthetic construct
  misc_feature 1..20: note = antisense sequence
  source 1..20: mol_type = other RNA
gaatgtcgcagtttgttgtc

SEQ ID NO: 16913 - RNA, 20 nt, synthetic construct
  misc_feature 1..20: note = antisense sequence
  source 1..20: mol_type = other RNA
ggaatgtcgcagtttgttgt

SEQ ID NO: 16914 - RNA, 20 nt, synthetic construct
  misc_feature 1..20: note = antisense sequence
  source 1..20: mol_type = other RNA
tggaatgtcgcagtttgttg

SEQ ID NO: 16915 - RNA, 20 nt, synthetic construct
  misc_feature 1..20: note = antisense sequence
  source 1..20: mol_type = other RNA
ttggaatgtcgcagtttgtt

SEQ ID NO: 16916 - RNA, 20 nt, synthetic construct
  misc_feature 1..20: note = antisense sequence
  source 1..20: mol_type = other RNA
attggaatgtcgcagtttgt

SEQ ID NO: 16917 - RNA, 20 nt, synthetic construct
  misc_feature 1..20: note = antisense sequence
  source 1..20: mol_type = other RNA
gattggaatgtcgcagtttg

SEQ ID NO: 16918 - RNA, 20 nt, synthetic construct
  misc_feature 1..20: note = antisense sequence
  source 1..20: mol_type = other RNA
agattggaatgtcgcagttt

SEQ ID NO: 16919 - RNA, 20 nt, synthetic construct
  misc_feature 1..20: note = antisense sequence
  source 1..20: mol_type = other RNA
tagattggaatgtcgcagtt

SEQ ID NO: 16920 - RNA, 20 nt, synthetic construct
  misc_feature 1..20: note = antisense sequence
  source 1..20: mol_type = other RNA
ttagattggaatgtcgcagt

SEQ ID NO: 16921 - RNA, 20 nt, synthetic construct
  misc_feature 1..20: note = antisense sequence
  source 1..20: mol_type = other RNA
tttagattggaatgtcgcag

SEQ ID NO: 16922 - RNA, 20 nt, synthetic construct
  misc_feature 1..20: note = antisense sequence
  source 1..20: mol_type = other RNA
gtttagattggaatgtcgca

SEQ ID NO: 16923 - RNA, 20 nt, synthetic construct
  misc_feature 1..20: note = antisense sequence
  source 1..20: mol_type = other RNA
agtttagattggaatgtcgc

SEQ ID NO: 16924 - RNA, 20 nt, synthetic construct
  misc_feature 1..20: note = antisense sequence
  source 1..20: mol_type = other RNA
cagggagaaccaaagtatta

SEQ ID NO: 16925 - RNA, 20 nt, synthetic construct
  misc_feature 1..20: note = antisense sequence
  source 1..20: mol_type = other RNA
actcagggagaaccaaagta

SEQ ID NO: 16926 - RNA, 20 nt, synthetic construct
  misc_feature 1..20: note = antisense sequence
  source 1..20: mol_type = other RNA
tttaactcagggagaaccaa

SEQ ID NO: 16927 - RNA, 20 nt, synthetic construct
  misc_feature 1..20: note = antisense sequence
  source 1..20: mol_type = other RNA
tgtttaactcagggagaacc

SEQ ID NO: 16928 - RNA, 20 nt, synthetic construct
  misc_feature 1..20: note = antisense sequence
  source 1..20: mol_type = other RNA
ctgtttaactcagggagaac

SEQ ID NO: 16929 - RNA, 20 nt, synthetic construct
  misc_feature 1..20: note = antisense sequence
  source 1..20: mol_type = other RNA
caattctctaccagtgcatt

SEQ ID NO: 16930 - RNA, 20 nt, synthetic construct
  misc_feature 1..20: note = antisense sequence
  source 1..20: mol_type = other RNA
ctacaattctctaccagtgc

SEQ ID NO: 16931 - RNA, 20 nt, synthetic construct
  misc_feature 1..20: note = antisense sequence
  source 1..20: mol_type = other RNA
gctacaattctctaccagtg

SEQ ID NO: 16932 - RNA, 20 nt, synthetic construct
  misc_feature 1..20: note = antisense sequence
  source 1..20: mol_type = other RNA
ggctacaattctctaccagt

SEQ ID NO: 16933 - RNA, 20 nt, synthetic construct
  misc_feature 1..20: note = antisense sequence
  source 1..20: mol_type = other RNA
aggctacaattctctaccag

SEQ ID NO: 16934 - RNA, 20 nt, synthetic construct
  misc_feature 1..20: note = antisense sequence
  source 1..20: mol_type = other RNA
caggctacaattctctacca

SEQ ID NO: 16935 - RNA, 20 nt, synthetic construct
  misc_feature 1..20: note = antisense sequence
  source 1..20: mol_type = other RNA
gcaggctacaattctctacc

SEQ ID NO: 16936 - RNA, 20 nt, synthetic construct
  misc_feature 1..20: note = antisense sequence
  source 1..20: mol_type = other RNA
tgcaggctacaattctctac

SEQ ID NO: 16937 - RNA, 20 nt, synthetic construct
  misc_feature 1..20: note = antisense sequence
  source 1..20: mol_type = other RNA
ttgcaggctacaattctcta

SEQ ID NO: 16938 - RNA, 20 nt, synthetic construct
  misc_feature 1..20: note = antisense sequence
  source 1..20: mol_type = other RNA
cttgcaggctacaattctct

SEQ ID NO: 16939 - RNA, 20 nt, synthetic construct
  misc_feature 1..20: note = antisense sequence
  source 1..20: mol_type = other RNA
tcttgcaggctacaattctc

SEQ ID NO: 16940 - RNA, 20 nt, synthetic construct
  misc_feature 1..20: note = antisense sequence
  source 1..20: mol_type = other RNA
ttcttgcaggctacaattct

SEQ ID NO: 16941 - RNA, 20 nt, synthetic construct
  misc_feature 1..20: note = antisense sequence
  source 1..20: mol_type = other RNA
tagaactcctggaacattga

SEQ ID NO: 16942 - RNA, 20 nt, synthetic construct
  misc_feature 1..20: note = antisense sequence
  source 1..20: mol_type = other RNA
ttagaactcctggaacattg

SEQ ID NO: 16943 - RNA, 20 nt, synthetic construct
  misc_feature 1..20: note = antisense sequence
  source 1..20: mol_type = other RNA
ctattagaactcctggaaca

SEQ ID NO: 16944 - RNA, 20 nt, synthetic construct
  misc_feature 1..20: note = antisense sequence
  source 1..20: mol_type = other RNA
cctattagaactcctggaac

SEQ ID NO: 16945 - RNA, 20 nt, synthetic construct
  misc_feature 1..20: note = antisense sequence
  source 1..20: mol_type = other RNA
acacctattagaactcctgg

SEQ ID NO: 16946 - RNA, 20 nt, synthetic construct
  misc_feature 1..20: note = antisense sequence
  source 1..20: mol_type = other RNA
gtagcccatctttggatatt

SEQ ID NO: 16947 - RNA, 20 nt, synthetic construct
  misc_feature 1..20: note = antisense sequence
  source 1..20: mol_type = other RNA
ggtagcccatctttggatat

SEQ ID NO: 16948 - RNA, 20 nt, synthetic construct
  misc_feature 1..20: note = antisense sequence
  source 1..20: mol_type = other RNA
cggtagcccatctttggata

SEQ ID NO: 16949 - RNA, 20 nt, synthetic construct
  misc_feature 1..20: note = antisense sequence
  source 1..20: mol_type = other RNA
ccggtagcccatctttggat

SEQ ID NO: 16950 - RNA, 20 nt, synthetic construct
  misc_feature 1..20: note = antisense sequence
  source 1..20: mol_type = other RNA
cccggtagcccatctttgga

SEQ ID NO: 16951 - RNA, 20 nt, synthetic construct
  misc_feature 1..20: note = antisense sequence
  source 1..20: mol_type = other RNA
gacccataatggcactctgc

SEQ ID NO: 16952 - RNA, 20 nt, synthetic construct
  misc_feature 1..20: note = antisense sequence
  source 1..20: mol_type = other RNA
tgacccataatggcactctg

SEQ ID NO: 16953 - RNA, 20 nt, synthetic construct
  misc_feature 1..20: note = antisense sequence
  source 1..20: mol_type = other RNA
atgacccataatggcactct

SEQ ID NO: 16954 - RNA, 20 nt, synthetic construct
  misc_feature 1..20: note = antisense sequence
  source 1..20: mol_type = other RNA
gatgacccataatggcactc

SEQ ID NO: 16955 - RNA, 20 nt, synthetic construct
  misc_feature 1..20: note = antisense sequence
  source 1..20: mol_type = other RNA
ggatgacccataatggcact

SEQ ID NO: 16956 - RNA, 20 nt, synthetic construct
  misc_feature 1..20: note = antisense sequence
  source 1..20: mol_type = other RNA
aggatgacccataatggcac

SEQ ID NO: 16957 - RNA, 20 nt, synthetic construct
  misc_feature 1..20: note = antisense sequence
  source 1..20: mol_type = other RNA
caggatgacccataatggca

SEQ ID NO: 16958 - RNA, 20 nt, synthetic construct
  misc_feature 1..20: note = antisense sequence
  source 1..20: mol_type = other RNA
gcaggatgacccataatggc

SEQ ID NO: 16959 - RNA, 20 nt, synthetic construct
  misc_feature 1..20: note = antisense sequence
  source 1..20: mol_type = other RNA
agcaggatgacccataatgg

SEQ ID NO: 16960 - RNA, 20 nt, synthetic construct
  misc_feature 1..20: note = antisense sequence
  source 1..20: mol_type = other RNA
cagcaggatgacccataatg

SEQ ID NO: 16961 - RNA, 20 nt, synthetic construct
  misc_feature 1..20: note = antisense sequence
  source 1..20: mol_type = other RNA
tcagcaggatgacccataat

SEQ ID NO: 16962 - RNA, 20 nt, synthetic construct
  misc_feature 1..20: note = antisense sequence
  source 1..20: mol_type = other RNA
ctcagcaggatgacccataa

SEQ ID NO: 16963 - RNA, 20 nt, synthetic construct
  misc_feature 1..20: note = antisense sequence
  source 1..20: mol_type = other RNA
actcagcaggatgacccata

SEQ ID NO: 16964 - RNA, 20 nt, synthetic construct
  misc_feature 1..20: note = antisense sequence
  source 1..20: mol_type = other RNA
cactcagcaggatgacccat

SEQ ID NO: 16965 - RNA, 20 nt, synthetic construct
  misc_feature 1..20: note = antisense sequence
  source 1..20: mol_type = other RNA
agcactcagcaggatgaccc

SEQ ID NO: 16966 - RNA, 20 nt, synthetic construct
  misc_feature 1..20: note = antisense sequence
  source 1..20: mol_type = other RNA
ggcaaaagcactcagcagga

SEQ ID NO: 16967 - RNA, 20 nt, synthetic construct
  misc_feature 1..20: note = antisense sequence
  source 1..20: mol_type = other RNA
tccggcaaaagcactcagca

SEQ ID NO: 16968 - RNA, 20 nt, synthetic construct
  misc_feature 1..20: note = antisense sequence
  source 1..20: mol_type = other RNA
atccggcaaaagcactcagc

SEQ ID NO: 16969 - RNA, 20 nt, synthetic construct
  misc_feature 1..20: note = antisense sequence
  source 1..20: mol_type = other RNA
aatccggcaaaagcactcag

SEQ ID NO: 16970 - RNA, 20 nt, synthetic construct
  misc_feature 1..20: note = antisense sequence
  source 1..20: mol_type = other RNA
caatccggcaaaagcactca

SEQ ID NO: 16971 - RNA, 20 nt, synthetic construct
  misc_feature 1..20: note = antisense sequence
  source 1..20: mol_type = other RNA
acaatccggcaaaagcactc

SEQ ID NO: 16972 - RNA, 20 nt, synthetic construct
  misc_feature 1..20: note = antisense sequence
  source 1..20: mol_type = other RNA
aacaatccggcaaaagcact

SEQ ID NO: 16973 - RNA, 20 nt, synthetic construct
  misc_feature 1..20: note = antisense sequence
  source 1..20: mol_type = other RNA
caacaatccggcaaaagcac

SEQ ID NO: 16974 - RNA, 20 nt, synthetic construct
  misc_feature 1..20: note = antisense sequence
  source 1..20: mol_type = other RNA
gcaacaatccggcaaaagca

SEQ ID NO: 16975 - RNA, 20 nt, synthetic construct
  misc_feature 1..20: note = antisense sequence
  source 1..20: mol_type = other RNA
agcaacaatccggcaaaagc

SEQ ID NO: 16976 - RNA, 20 nt, synthetic construct
  misc_feature 1..20: note = antisense sequence
  source 1..20: mol_type = other RNA
cagcaacaatccggcaaaag

SEQ ID NO: 16977 - RNA, 20 nt, synthetic construct
  misc_feature 1..20: note = antisense sequence
  source 1..20: mol_type = other RNA
acagcaacaatccggcaaaa

SEQ ID NO: 16978 - RNA, 20 nt, synthetic construct
  misc_feature 1..20: note = antisense sequence
  source 1..20: mol_type = other RNA
aacagcaacaatccggcaaa

SEQ ID NO: 16979 - RNA, 20 nt, synthetic construct
  misc_feature 1..20: note = antisense sequence
  source 1..20: mol_type = other RNA
taacagcaacaatccggcaa

SEQ ID NO: 16980 - RNA, 20 nt, synthetic construct
  misc_feature 1..20: note = antisense sequence
  source 1..20: mol_type = other RNA
ttaacagcaacaatccggca

SEQ ID NO: 16981 - RNA, 20 nt, synthetic construct
  misc_feature 1..20: note = antisense sequence
  source 1..20: mol_type = other RNA
attaacagcaacaatccggc

SEQ ID NO: 16982 - RNA, 20 nt, synthetic construct
  misc_feature 1..20: note = antisense sequence
  source 1..20: mol_type = other RNA
gcagcattaacagcaacaat

SEQ ID NO: 16983 - RNA, 20 nt, synthetic construct
  misc_feature 1..20: note = antisense sequence
  source 1..20: mol_type = other RNA
atgagcagcattaacagcaa

SEQ ID NO: 16984 - RNA, 20 nt, synthetic construct
  misc_feature 1..20: note = antisense sequence
  source 1..20: mol_type = other RNA
tccacagtgctaaaatgagc

SEQ ID NO: 16985 - RNA, 20 nt, synthetic construct
  misc_feature 1..20: note = antisense sequence
  source 1..20: mol_type = other RNA
ttccacagtgctaaaatgag

SEQ ID NO: 16986 - RNA, 20 nt, synthetic construct
  misc_feature 1..20: note = antisense sequence
  source 1..20: mol_type = other RNA
cttccacagtgctaaaatga

SEQ ID NO: 16987 - RNA, 20 nt, synthetic construct
  misc_feature 1..20: note = antisense sequence
  source 1..20: mol_type = other RNA
ttaccttccacagtgctaaa

SEQ ID NO: 16988 - RNA, 20 nt, synthetic construct
  misc_feature 1..20: note = antisense sequence
  source 1..20: mol_type = other RNA
gtgtttaccttccacagtgc

SEQ ID NO: 16989 - RNA, 20 nt, synthetic construct
  misc_feature 1..20: note = antisense sequence
  source 1..20: mol_type = other RNA
ggtgtttaccttccacagtg

SEQ ID NO: 16990 - RNA, 20 nt, synthetic construct
  misc_feature 1..20: note = antisense sequence
  source 1..20: mol_type = other RNA
ttggtgtttaccttccacag

SEQ ID NO: 16991 - RNA, 20 nt, synthetic construct
  misc_feature 1..20: note = antisense sequence
  source 1..20: mol_type = other RNA
tttggtgtttaccttccaca

SEQ ID NO: 16992 - RNA, 20 nt, synthetic construct
  misc_feature 1..20: note = antisense sequence
  source 1..20: mol_type = other RNA
ttttggtgtttaccttccac

SEQ ID NO: 16993 - RNA, 20 nt, synthetic construct
  misc_feature 1..20: note = antisense sequence
  source 1..20: mol_type = other RNA
tgaagtagagagtcaaagga

SEQ ID NO: 16994 - RNA, 20 nt, synthetic construct
  misc_feature 1..20: note = antisense sequence
  source 1..20: mol_type = other RNA
gatgattgaagtagagagtc

SEQ ID NO: 16995 - RNA, 20 nt, synthetic construct
  misc_feature 1..20: note = antisense sequence
  source 1..20: mol_type = other RNA
gctgttgatgattgaagtag

SEQ ID NO: 16996 - RNA, 20 nt, synthetic construct
  misc_feature 1..20: note = antisense sequence
  source 1..20: mol_type = other RNA
tctccagtttgctgttgatg

SEQ ID NO: 16997 - RNA, 20 nt, synthetic construct
  misc_feature 1..20: note = antisense sequence
  source 1..20: mol_type = other RNA
gcttatttctccagtttgct

SEQ ID NO: 16998 - RNA, 20 nt, synthetic construct
  misc_feature 1..20: note = antisense sequence
  source 1..20: mol_type = other RNA
atcagagcttatttctccag

SEQ ID NO: 16999 - RNA, 20 nt, synthetic construct
  misc_feature 1..20: note = antisense sequence
  source 1..20: mol_type = other RNA
ccttagtcatcatttcaacg

SEQ ID NO: 17000 - RNA, 20 nt, synthetic construct
  misc_feature 1..20: note = antisense sequence
  source 1..20: mol_type = other RNA
cccttagtcatcatttcaac

SEQ ID NO: 17001 - RNA, 20 nt, synthetic construct
  misc_feature 1..20: note = antisense sequence
  source 1..20: mol_type = other RNA
gcagtgtttgaaatacgcat

SEQ ID NO: 17002 - RNA, 20 nt, synthetic construct
  misc_feature 1..20: note = antisense sequence
  source 1..20: mol_type = other RNA
gtgcagtgtttgaaatacgc

SEQ ID NO: 17003 - RNA, 20 nt, synthetic construct
  misc_feature 1..20: note = antisense sequence
  source 1..20: mol_type = other RNA
aagttgtgtgcagtgtttga

SEQ ID NO: 17004 - RNA, 20 nt, synthetic construct
  misc_feature 1..20: note = antisense sequence
  source 1..20: mol_type = other RNA
caagttgtgtgcagtgtttg

SEQ ID NO: 17005 - RNA, 20 nt, synthetic construct
  misc_feature 1..20: note = antisense sequence
  source 1..20: mol_type = other RNA
ggtcaagttgtgtgcagtgt

SEQ ID NO: 17006 - RNA, 20 nt, synthetic construct
  misc_feature 1..20: note = antisense sequence
  source 1..20: mol_type = other RNA
gggtcaagttgtgtgcagtg

SEQ ID NO: 17007 - RNA, 20 nt, synthetic construct
  misc_feature 1..20: note = antisense sequence
  source 1..20: mol_type = other RNA
tgggtcaagttgtgtgcagt

SEQ ID NO: 17008 - RNA, 20 nt, synthetic construct
  misc_feature 1..20: note = antisense sequence
  source 1..20: mol_type = other RNA
ttgggtcaagttgtgtgcag

SEQ ID NO: 17009 - RNA, 20 nt, synthetic construct
  misc_feature 1..20: note = antisense sequence
  source 1..20: mol_type = other RNA
attgggtcaagttgtgtgca

SEQ ID NO: 17010 - RNA, 20 nt, synthetic construct
  misc_feature 1..20: note = antisense sequence
  source 1..20: mol_type = other RNA
aattgggtcaagttgtgtgc

SEQ ID NO: 17011 - RNA, 20 nt, synthetic construct
  misc_feature 1..20: note = antisense sequence
  source 1..20: mol_type = other RNA
aaattgggtcaagttgtgtg

SEQ ID NO: 17012 - RNA, 20 nt, synthetic construct
  misc_feature 1..20: note = antisense sequence
  source 1..20: mol_type = other RNA
tcctccactcaggcacacaa

SEQ ID NO: 17013 - RNA, 20 nt, synthetic construct
  misc_feature 1..20: note = antisense sequence
  source 1..20: mol_type = other RNA
cttatcctccactcaggcac

SEQ ID NO: 17014 - RNA, 20 nt, synthetic construct
  misc_feature 1..20: note = antisense sequence
  source 1..20: mol_type = other RNA
ccttatcctccactcaggca

SEQ ID NO: 17015 - RNA, 20 nt, synthetic construct
  misc_feature 1..20: note = antisense sequence
  source 1..20: mol_type = other RNA
cccttatcctccactcaggc

SEQ ID NO: 17016 - RNA, 20 nt, synthetic construct
  misc_feature 1..20: note = antisense sequence
  source 1..20: mol_type = other RNA
tcccttatcctccactcagg

SEQ ID NO: 17017 - RNA, 20 nt, synthetic construct
  misc_feature 1..20: note = antisense sequence
  source 1..20: mol_type = other RNA
atcccttatcctccactcag

SEQ ID NO: 17018 - RNA, 20 nt, synthetic construct
  misc_feature 1..20: note = antisense sequence
  source 1..20: mol_type = other RNA
gatcccttatcctccactca

SEQ ID NO: 17019 - RNA, 20 nt, synthetic construct
  misc_feature 1..20: note = antisense sequence
  source 1..20: mol_type = other RNA
tgatcccttatcctccactc

SEQ ID NO: 17020 - RNA, 20 nt, synthetic construct
  misc_feature 1..20: note = antisense sequence
  source 1..20: mol_type = other RNA
gctgatcccttatcctccac

SEQ ID NO: 17021 - RNA, 20 nt, synthetic construct
  misc_feature 1..20: note = antisense sequence
  source 1..20: mol_type = other RNA
agctgatcccttatcctcca

SEQ ID NO: 17022 - RNA, 20 nt, synthetic construct
  misc_feature 1..20: note = antisense sequence
  source 1..20: mol_type = other RNA
gaaataggagtctgtgaaac

SEQ ID NO: 17023 - RNA, 20 nt, synthetic construct
  misc_feature 1..20: note = antisense sequence
  source 1..20: mol_type = other RNA
ggtggttactcacatttacc

SEQ ID NO: 17024 - RNA, 20 nt, synthetic construct
  misc_feature 1..20: note = antisense sequence
  source 1..20: mol_type = other RNA
aggtggttactcacatttac

SEQ ID NO: 17025 - RNA, 20 nt, synthetic construct
  misc_feature 1..20: note = antisense sequence
  source 1..20: mol_type = other RNA
cacaaaataggtggttactc

SEQ ID NO: 17026 - RNA, 20 nt, synthetic construct
  misc_feature 1..20: note = antisense sequence
  source 1..20: mol_type = other RNA
gacacaaaataggtggttac

SEQ ID NO: 17027 - RNA, 20 nt, synthetic construct
  misc_feature 1..20: note = antisense sequence
  source 1..20: mol_type = other RNA
ccagagttacttgacacaaa

SEQ ID NO: 17028 - RNA, 20 nt, synthetic construct
  misc_feature 1..20: note = antisense sequence
  source 1..20: mol_type = other RNA
tccagagttacttgacacaa

SEQ ID NO: 17029 - RNA, 20 nt, synthetic construct
  misc_feature 1..20: note = antisense sequence
  source 1..20: mol_type = other RNA
atccagagttacttgacaca

SEQ ID NO: 17030 - RNA, 20 nt, synthetic construct
  misc_feature 1..20: note = antisense sequence
  source 1..20: mol_type = other RNA
tatccagagttacttgacac

SEQ ID NO: 17031 - RNA, 20 nt, synthetic construct
  misc_feature 1..20: note = antisense sequence
  source 1..20: mol_type = other RNA
gctgtcatctcaattctact

SEQ ID NO: 17032 - RNA, 20 nt, synthetic construct
  misc_feature 1..20: note = antisense sequence
  source 1..20: mol_type = other RNA
ccaaaagctgtcatctcaat

SEQ ID NO: 17033 - RNA, 20 nt, synthetic construct
  misc_feature 1..20: note = antisense sequence
  source 1..20: mol_type = other RNA
tatcccaaaagctgtcatct

SEQ ID NO: 17034 - RNA, 20 nt, synthetic construct
  misc_feature 1..20: note = antisense sequence
  source 1..20: mol_type = other RNA
cttatcccaaaagctgtcat

SEQ ID NO: 17035 - RNA, 20 nt, synthetic construct
  misc_feature 1..20: note = antisense sequence
  source 1..20: mol_type = other RNA
caacttatcccaaaagctgt

SEQ ID NO: 17036 - RNA, 20 nt, synthetic construct
  misc_feature 1..20: note = antisense sequence
  source 1..20: mol_type = other RNA
tcaacttatcccaaaagctg

SEQ ID NO: 17037 - RNA, 20 nt, synthetic construct
  misc_feature 1..20: note = antisense sequence
  source 1..20: mol_type = other RNA
ctgtatgggatgttattctc

SEQ ID NO: 17038 - RNA, 20 nt, synthetic construct
  misc_feature 1..20: note = antisense sequence
  source 1..20: mol_type = other RNA
ctctgtatgggatgttattc

SEQ ID NO: 17039 - RNA, 20 nt, synthetic construct
  misc_feature 1..20: note = antisense sequence
  source 1..20: mol_type = other RNA
caactctgtatgggatgtta

SEQ ID NO: 17040 - RNA, 20 nt, synthetic construct
  misc_feature 1..20: note = antisense sequence
  source 1..20: mol_type = other RNA
tcaactctgtatgggatgtt

SEQ ID NO: 17041 - RNA, 20 nt, synthetic construct
  misc_feature 1..20: note = antisense sequence
  source 1..20: mol_type = other RNA
ttcaactctgtatgggatgt

SEQ ID NO: 17042 - RNA, 20 nt, synthetic construct
  misc_feature 1..20: note = antisense sequence
  source 1..20: mol_type = other RNA
attcaactctgtatgggatg

SEQ ID NO: 17043 - RNA, 20 nt, synthetic construct
  misc_feature 1..20: note = antisense sequence
  source 1..20: mol_type = other RNA
cattcaactctgtatgggat

SEQ ID NO: 17044 - RNA, 20 nt, synthetic construct
  misc_feature 1..20: note = antisense sequence
  source 1..20: mol_type = other RNA
acattcaactctgtatggga

SEQ ID NO: 17045 - RNA, 20 nt, synthetic construct
  misc_feature 1..20: note = antisense sequence
  source 1..20: mol_type = other RNA
aacattcaactctgtatggg

SEQ ID NO: 17046 - RNA, 20 nt, synthetic construct
  misc_feature 1..20: note = antisense sequence
  source 1..20: mol_type = other RNA
gttgctcaggtaatagaaca

SEQ ID NO: 17047 - RNA, 20 nt, synthetic construct
  misc_feature 1..20: note = antisense sequence
  source 1..20: mol_type = other RNA
ttggtatttcagtgggagag

SEQ ID NO: 17048 - RNA, 20 nt, synthetic construct
  misc_feature 1..20: note = antisense sequence
  source 1..20: mol_type = other RNA
gaacagttggtatttcagtg

SEQ ID NO: 17049 - RNA, 20 nt, synthetic construct
  misc_feature 1..20: note = antisense sequence
  source 1..20: mol_type = other RNA
aggaacagttggtatttcag

SEQ ID NO: 17050 - RNA, 20 nt, synthetic construct
  misc_feature 1..20: note = antisense sequence
  source 1..20: mol_type = other RNA
ggataggaacagttggtatt

SEQ ID NO: 17051 - RNA, 20 nt, synthetic construct
  misc_feature 1..20: note = antisense sequence
  source 1..20: mol_type = other RNA
aggataggaacagttggtat

SEQ ID NO: 17052 - RNA, 20 nt, synthetic construct
  misc_feature 1..20: note = antisense sequence
  source 1..20: mol_type = other RNA
aaggataggaacagttggta

SEQ ID NO: 17053 - RNA, 20 nt, synthetic construct
  misc_feature 1..20: note = antisense sequence
  source 1..20: mol_type = other RNA
aaaggataggaacagttggt

SEQ ID NO: 17054 - RNA, 20 nt, synthetic construct
  misc_feature 1..20: note = antisense sequence
  source 1..20: mol_type = other RNA
gaaaggataggaacagttgg

SEQ ID NO: 17055 - RNA, 20 nt, synthetic construct
  misc_feature 1..20: note = antisense sequence
  source 1..20: mol_type = other RNA
gtaagaaaggataggaacag

SEQ ID NO: 17056 - RNA, 20 nt, synthetic construct
  misc_feature 1..20: note = antisense sequence
  source 1..20: mol_type = other RNA
gagagtaagaaaggatagga

SEQ ID NO: 17057 - RNA, 20 nt, synthetic construct
  misc_feature 1..20: note = antisense sequence
  source 1..20: mol_type = other RNA
aggagagtaagaaaggatag

SEQ ID NO: 17058 - RNA, 20 nt, synthetic construct
  misc_feature 1..20: note = antisense sequence
  source 1..20: mol_type = other RNA
gagtcataggagagtaagaa

SEQ ID NO: 17059 - RNA, 20 nt, synthetic construct
  misc_feature 1..20: note = antisense sequence
  source 1..20: mol_type = other RNA
tgagtcataggagagtaaga

SEQ ID NO: 17060 - RNA, 20 nt, synthetic construct
  misc_feature 1..20: note = antisense sequence
  source 1..20: mol_type = other RNA
gtgagtcataggagagtaag

SEQ ID NO: 17061 - RNA, 20 nt, synthetic construct
  misc_feature 1..20: note = antisense sequence
  source 1..20: mol_type = other RNA
agtgagtcataggagagtaa

SEQ ID NO: 17062 - RNA, 20 nt, synthetic construct
  misc_feature 1..20: note = antisense sequence
  source 1..20: mol_type = other RNA
tgttcaccatctcctctgag

SEQ ID NO: 17063 - RNA, 20 nt, synthetic construct
  misc_feature 1..20: note = antisense sequence
  source 1..20: mol_type = other RNA
ggctttgttcaccatctcct

SEQ ID NO: 17064 - RNA, 20 nt, synthetic construct
  misc_feature 1..20: note = antisense sequence
  source 1..20: mol_type = other RNA
tggctttgttcaccatctcc

SEQ ID NO: 17065 - RNA, 20 nt, synthetic construct
  misc_feature 1..20: note = antisense sequence
  source 1..20: mol_type = other RNA
ctggctttgttcaccatctc

SEQ ID NO: 17066 - RNA, 20 nt, synthetic construct
  misc_feature 1..20: note = antisense sequence
  source 1..20: mol_type = other RNA
tctggctttgttcaccatct

SEQ ID NO: 17067 - RNA, 20 nt, synthetic construct
  misc_feature 1..20: note = antisense sequence
  source 1..20: mol_type = other RNA
tacatctggctttgttcacc

SEQ ID NO: 17068 - RNA, 20 nt, synthetic construct
  misc_feature 1..20: note = antisense sequence
  source 1..20: mol_type = other RNA
ctacatctggctttgttcac

SEQ ID NO: 17069 - RNA, 20 nt, synthetic construct
  misc_feature 1..20: note = antisense sequence
  source 1..20: mol_type = other RNA
acctacatctggctttgttc

SEQ ID NO: 17070 - RNA, 20 nt, synthetic construct
  misc_feature 1..20: note = antisense sequence
  source 1..20: mol_type = other RNA
gacctacatctggctttgtt

SEQ ID NO: 17071 - RNA, 20 nt, synthetic construct
  misc_feature 1..20: note = antisense sequence
  source 1..20: mol_type = other RNA
tgacctacatctggctttgt

SEQ ID NO: 17072 - RNA, 20 nt, synthetic construct
  misc_feature 1..20: note = antisense sequence
  source 1..20: mol_type = other RNA
actgacctacatctggcttt

SEQ ID NO: 17073 - RNA, 20 nt, synthetic construct
  misc_feature 1..20: note = antisense sequence
  source 1..20: mol_type = other RNA
cactgacctacatctggctt

SEQ ID NO: 17074 - RNA, 20 nt, synthetic construct
  misc_feature 1..20: note = antisense sequence
  source 1..20: mol_type = other RNA
ccactgacctacatctggct

SEQ ID NO: 17075 - RNA, 20 nt, synthetic construct
  misc_feature 1..20: note = antisense sequence
  source 1..20: mol_type = other RNA
aatgccactgacctacatct

SEQ ID NO: 17076 - RNA, 20 nt, synthetic construct
  misc_feature 1..20: note = antisense sequence
  source 1..20: mol_type = other RNA
aaatgccactgacctacatc

SEQ ID NO: 17077 - RNA, 20 nt, synthetic construct
  misc_feature 1..20: note = antisense sequence
  source 1..20: mol_type = other RNA
gaattaaatgccactgacct

SEQ ID NO: 17078 - RNA, 20 nt, synthetic construct
  misc_feature 1..20: note = antisense sequence
  source 1..20: mol_type = other RNA
tttgctagagaaaagccatg

SEQ ID NO: 17079 - RNA, 20 nt, synthetic construct
  misc_feature 1..20: note = antisense sequence
  source 1..20: mol_type = other RNA
agagctggacattggctata

SEQ ID NO: 17080 - RNA, 20 nt, synthetic construct
  misc_feature 1..20: note = antisense sequence
  source 1..20: mol_type = other RNA
aagagctggacattggctat

SEQ ID NO: 17081 - RNA, 20 nt, synthetic construct
  misc_feature 1..20: note = antisense sequence
  source 1..20: mol_type = other RNA
gaagagctggacattggcta

SEQ ID NO: 17082 - RNA, 20 nt, synthetic construct
  misc_feature 1..20: note = antisense sequence
  source 1..20: mol_type = other RNA
ggaagagctggacattggct

SEQ ID NO: 17083 - RNA, 20 nt, synthetic construct
  misc_feature 1..20: note = antisense sequence
  source 1..20: mol_type = other RNA
gagaacactgatcccttata

SEQ ID NO: 17084 - RNA, 20 nt, synthetic construct
  misc_feature 1..20: note = antisense sequence
  source 1..20: mol_type = other RNA
agagaacactgatcccttat

SEQ ID NO: 17085 - RNA, 20 nt, synthetic construct
  misc_feature 1..20: note = antisense sequence
  source 1..20: mol_type = other RNA
gagagaacactgatccctta

SEQ ID NO: 17086 - RNA, 20 nt, synthetic construct
  misc_feature 1..20: note = antisense sequence
  source 1..20: mol_type = other RNA
agagagaacactgatccctt

SEQ ID NO: 17087 - RNA, 20 nt, synthetic construct
  misc_feature 1..20: note = antisense sequence
  source 1..20: mol_type = other RNA
gtattacagagagaacactg

SEQ ID NO: 17088 - RNA, 20 nt, synthetic construct
  misc_feature 1..20: note = antisense sequence
  source 1..20: mol_type = other RNA
ctaggtattacagagagaac

SEQ ID NO: 17089 - RNA, 20 nt, synthetic construct
  misc_feature 1..20: note = antisense sequence
  source 1..20: mol_type = other RNA
gctaggtattacagagagaa

SEQ ID NO: 17090 - RNA, 20 nt, synthetic construct
  misc_feature 1..20: note = antisense sequence
  source 1..20: mol_type = other RNA
aagctaggtattacagagag

SEQ ID NO: 17091 - RNA, 20 nt, synthetic construct
  misc_feature 1..20: note = antisense sequence
  source 1..20: mol_type = other RNA
caaagctaggtattacagag

SEQ ID NO: 17092 - RNA, 20 nt, synthetic construct
  misc_feature 1..20: note = antisense sequence
  source 1..20: mol_type = other RNA
gcaaagctaggtattacaga

SEQ ID NO: 17093 - RNA, 20 nt, synthetic construct
  misc_feature 1..20: note = antisense sequence
  source 1..20: mol_type = other RNA
ggcaaagctaggtattacag

SEQ ID NO: 17094 - RNA, 20 nt, synthetic construct
  misc_feature 1..20: note = antisense sequence
  source 1..20: mol_type = other RNA
tggcaaagctaggtattaca

SEQ ID NO: 17095 - RNA, 20 nt, synthetic construct
  misc_feature 1..20: note = antisense sequence
  source 1..20: mol_type = other RNA
gtggcaaagctaggtattac

SEQ ID NO: 17096 - RNA, 20 nt, synthetic construct
  misc_feature 1..20: note = antisense sequence
  source 1..20: mol_type = other RNA
cagtgtggcaaagctaggta

SEQ ID NO: 17097 - RNA, 20 nt, synthetic construct
  misc_feature 1..20: note = antisense sequence
  source 1..20: mol_type = other RNA
tgacaccaataagccaggcc

SEQ ID NO: 17098 - RNA, 20 nt, synthetic construct
  misc_feature 1..20: note = antisense sequence
  source 1..20: mol_type = other RNA
ttgacaccaataagccaggc

SEQ ID NO: 17099 - RNA, 20 nt, synthetic construct
  misc_feature 1..20: note = antisense sequence
  source 1..20: mol_type = other RNA
cttgacaccaataagccagg

SEQ ID NO: 17100 - RNA, 20 nt, synthetic construct
  misc_feature 1..20: note = antisense sequence
  source 1..20: mol_type = other RNA
ccttgacaccaataagccag

SEQ ID NO: 17101 - RNA, 20 nt, synthetic construct
  misc_feature 1..20: note = antisense sequence
  source 1..20: mol_type = other RNA
caaccttgacaccaataagc

SEQ ID NO: 17102 - RNA, 20 nt, synthetic construct
  misc_feature 1..20: note = antisense sequence
  source 1..20: mol_type = other RNA
acaaccttgacaccaataag

SEQ ID NO: 17103 - RNA, 20 nt, synthetic construct
  misc_feature 1..20: note = antisense sequence
  source 1..20: mol_type = other RNA
gagaacagaagactatgctg

SEQ ID NO: 17104 - RNA, 20 nt, synthetic construct
  misc_feature 1..20: note = antisense sequence
  source 1..20: mol_type = other RNA
tgagaacagaagactatgct

SEQ ID NO: 17105 - RNA, 20 nt, synthetic construct
  misc_feature 1..20: note = antisense sequence
  source 1..20: mol_type = other RNA
ctgagaacagaagactatgc

SEQ ID NO: 17106 - RNA, 20 nt, synthetic construct
  misc_feature 1..20: note = antisense sequence
  source 1..20: mol_type = other RNA
gctgagaacagaagactatg

SEQ ID NO: 17107 - RNA, 20 nt, synthetic construct
  misc_feature 1..20: note = antisense sequence
  source 1..20: mol_type = other RNA
tgctgagaacagaagactat

SEQ ID NO: 17108 - RNA, 20 nt, synthetic construct
  misc_feature 1..20: note = antisense sequence
  source 1..20: mol_type = other RNA
aggtaagtgcagtgctgaga

SEQ ID NO: 17109 - RNA, 20 nt, synthetic construct
  misc_feature 1..20: note = antisense sequence
  source 1..20: mol_type = other RNA
gaggtaagtgcagtgctgag

SEQ ID NO: 17110 - RNA, 20 nt, synthetic construct
  misc_feature 1..20: note = antisense sequence
  source 1..20: mol_type = other RNA
agaggtaagtgcagtgctga

SEQ ID NO: 17111 - RNA, 20 nt, synthetic construct
  misc_feature 1..20: note = antisense sequence
  source 1..20: mol_type = other RNA
tagaggtaagtgcagtgctg

SEQ ID NO: 17112 - RNA, 20 nt, synthetic construct
  misc_feature 1..20: note = antisense sequence
  source 1..20: mol_type = other RNA
atagaggtaagtgcagtgct

SEQ ID NO: 17113 - RNA, 20 nt, synthetic construct
  misc_feature 1..20: note = antisense sequence
  source 1..20: mol_type = other RNA
ccatagaggtaagtgcagtg

SEQ ID NO: 17114 - RNA, 20 nt, synthetic construct
  misc_feature 1..20: note = antisense sequence
  source 1..20: mol_type = other RNA
aaccatagaggtaagtgcag

SEQ ID NO: 17115 - RNA, 20 nt, synthetic construct
  misc_feature 1..20: note = antisense sequence
  source 1..20: mol_type = other RNA
aaaccatagaggtaagtgca

SEQ ID NO: 17116 - RNA, 20 nt, synthetic construct
  misc_feature 1..20: note = antisense sequence
  source 1..20: mol_type = other RNA
gcggtgttctaaaaccatag

SEQ ID NO: 17117 - RNA, 20 nt, synthetic construct
  misc_feature 1..20: note = antisense sequence
  source 1..20: mol_type = other RNA
agcggtgttctaaaaccata

SEQ ID NO: 17118 - RNA, 20 nt, synthetic construct
  misc_feature 1..20: note = antisense sequence
  source 1..20: mol_type = other RNA
cagcggtgttctaaaaccat

SEQ ID NO: 17119 - RNA, 20 nt, synthetic construct
  misc_feature 1..20: note = antisense sequence
  source 1..20: mol_type = other RNA
ccagcggtgttctaaaacca

SEQ ID NO: 17120 - RNA, 20 nt, synthetic construct
  misc_feature 1..20: note = antisense sequence
  source 1..20: mol_type = other RNA
gccagcggtgttctaaaacc

SEQ ID NO: 17121 - RNA, 20 nt, synthetic construct
  misc_feature 1..20: note = antisense sequence
  source 1..20: mol_type = other RNA
tgccagcggtgttctaaaac

SEQ ID NO: 17122 - RNA, 20 nt, synthetic construct
  misc_feature 1..20: note = antisense sequence
  source 1..20: mol_type = other RNA
ctgccagcggtgttctaaaa

SEQ ID NO: 17123 - RNA, 20 nt, synthetic construct
  misc_feature 1..20: note = antisense sequence
  source 1..20: mol_type = other RNA
cctgccagcggtgttctaaa

SEQ ID NO: 17124 - RNA, 20 nt, synthetic construct
  misc_feature 1..20: note = antisense sequence
  source 1..20: mol_type = other RNA
tcctgccagcggtgttctaa

SEQ ID NO: 17125 - RNA, 20 nt, synthetic construct
  misc_feature 1..20: note = antisense sequence
  source 1..20: mol_type = other RNA
ctcctgccagcggtgttcta

SEQ ID NO: 17126 - RNA, 20 nt, synthetic construct
  misc_feature 1..20: note = antisense sequence
  source 1..20: mol_type = other RNA
ttctcctgccagcggtgttc

SEQ ID NO: 17127 - RNA, 20 nt, synthetic construct
  misc_feature 1..20: note = antisense sequence
  source 1..20: mol_type = other RNA
tcttctcctgccagcggtgt

SEQ ID NO: 17128 - RNA, 20 nt, synthetic construct
  misc_feature 1..20: note = antisense sequence
  source 1..20: mol_type = other RNA
atcagctctggttttcctct

SEQ ID NO: 17129 - RNA, 20 nt, synthetic construct
  misc_feature 1..20: note = antisense sequence
  source 1..20: mol_type = other RNA
atatcagctctggttttcct

SEQ ID NO: 17130 - RNA, 20 nt, synthetic construct
  misc_feature 1..20: note = antisense sequence
  source 1..20: mol_type = other RNA
aatatcagctctggttttcc

SEQ ID NO: 17131 - RNA, 20 nt, synthetic construct
  misc_feature 1..20: note = antisense sequence
  source 1..20: mol_type = other RNA
tatccaaatatcagctctgg

SEQ ID NO: 17132 - RNA, 20 nt, synthetic construct
  misc_feature 1..20: note = antisense sequence
  source 1..20: mol_type = other RNA
ctatccaaatatcagctctg

SEQ ID NO: 17133 - RNA, 20 nt, synthetic construct
  misc_feature 1..20: note = antisense sequence
  source 1..20: mol_type = other RNA
cctatccaaatatcagctct

SEQ ID NO: 17134 - RNA, 20 nt, synthetic construct
  misc_feature 1..20: note = antisense sequence
  source 1..20: mol_type = other RNA
acctatccaaatatcagctc

SEQ ID NO: 17135 - RNA, 20 nt, synthetic construct
  misc_feature 1..20: note = antisense sequence
  source 1..20: mol_type = other RNA
cctgaaagaacctatccaaa

SEQ ID NO: 17136 - RNA, 20 nt, synthetic construct
  misc_feature 1..20: note = antisense sequence
  source 1..20: mol_type = other RNA
gcctgaaagaacctatccaa

SEQ ID NO: 17137 - RNA, 20 nt, synthetic construct
  misc_feature 1..20: note = antisense sequence
  source 1..20: mol_type = other RNA
ggcctgaaagaacctatcca

SEQ ID NO: 17138 - RNA, 20 nt, synthetic construct
  misc_feature 1..20: note = antisense sequence
  source 1..20: mol_type = other RNA
ctgaaacagaggtacaaggc

SEQ ID NO: 17139 - RNA, 20 nt, synthetic construct
  misc_feature 1..20: note = antisense sequence
  source 1..20: mol_type = other RNA
ggatgaaacaatgagcttag

SEQ ID NO: 17140 - RNA, 20 nt, synthetic construct
  misc_feature 1..20: note = antisense sequence
  source 1..20: mol_type = other RNA
atctggatgaaacaatgagc

SEQ ID NO: 17141 - RNA, 20 nt, synthetic construct
  misc_feature 1..20: note = antisense sequence
  source 1..20: mol_type = other RNA
agctgtcagaatgtatcaac

SEQ ID NO: 17142 - RNA, 20 nt, synthetic construct
  misc_feature 1..20: note = antisense sequence
  source 1..20: mol_type = other RNA
gaagctgtcagaatgtatca

SEQ ID NO: 17143 - RNA, 20 nt, synthetic construct
  misc_feature 1..20: note = antisense sequence
  source 1..20: mol_type = other RNA
taacctaagaagctgtcaga

SEQ ID NO: 17144 - RNA, 20 nt, synthetic construct
  misc_feature 1..20: note = antisense sequence
  source 1..20: mol_type = other RNA
ataacctaagaagctgtcag

SEQ ID NO: 17145 - RNA, 20 nt, synthetic construct
  misc_feature 1..20: note = antisense sequence
  source 1..20: mol_type = other RNA
cttttgggcctgcaataata

SEQ ID NO: 17146 - RNA, 20 nt, synthetic construct
  misc_feature 1..20: note = antisense sequence
  source 1..20: mol_type = other RNA
tcttttgggcctgcaataat

SEQ ID NO: 17147 - RNA, 20 nt, synthetic construct
  misc_feature 1..20: note = antisense sequence
  source 1..20: mol_type = other RNA
ttcttttgggcctgcaataa

SEQ ID NO: 17148 - RNA, 20 nt, synthetic construct
  misc_feature 1..20: note = antisense sequence
  source 1..20: mol_type = other RNA
cttcttttgggcctgcaata

SEQ ID NO: 17149 - RNA, 20 nt, synthetic construct
  misc_feature 1..20: note = antisense sequence
  source 1..20: mol_type = other RNA
atcttcttttgggcctgcaa

SEQ ID NO: 17150 - RNA, 20 nt, synthetic construct
  misc_feature 1..20: note = antisense sequence
  source 1..20: mol_type = other RNA
gatcttcttttgggcctgca

SEQ ID NO: 17151 - RNA, 20 nt, synthetic construct
  misc_feature 1..20: note = antisense sequence
  source 1..20: mol_type = other RNA
tgatcttcttttgggcctgc

SEQ ID NO: 17152 - RNA, 20 nt, synthetic construct
  misc_feature 1..20: note = antisense sequence
  source 1..20: mol_type = other RNA
gcccaaagtttgtcaaatga

SEQ ID NO: 17153 - RNA, 20 nt, synthetic construct
  misc_feature 1..20: note = antisense sequence
  source 1..20: mol_type = other RNA
agcccaaagtttgtcaaatg

SEQ ID NO: 17154 - RNA, 20 nt, synthetic construct
  misc_feature 1..20: note = antisense sequence
  source 1..20: mol_type = other RNA
cagcccaaagtttgtcaaat

SEQ ID NO: 17155 - RNA, 20 nt, synthetic construct
  misc_feature 1..20: note = antisense sequence
  source 1..20: mol_type = other RNA
taagacagcccaaagtttgt

SEQ ID NO: 17156 - RNA, 20 nt, synthetic construct
  misc_feature 1..20: note = antisense sequence
  source 1..20: mol_type = other RNA
gtaagacagcccaaagtttg

SEQ ID NO: 17157 - RNA, 20 nt, synthetic construct
  misc_feature 1..20: note = antisense sequence
  source 1..20: mol_type = other RNA
ggtaagacagcccaaagttt

SEQ ID NO: 17158 - RNA, 20 nt, synthetic construct
  misc_feature 1..20: note = antisense sequence
  source 1..20: mol_type = other RNA
gggtaagacagcccaaagtt

SEQ ID NO: 17159 - RNA, 20 nt, synthetic construct
  misc_feature 1..20: note = antisense sequence
  source 1..20: mol_type = other RNA
cgggtaagacagcccaaagt

SEQ ID NO: 17160 - RNA, 20 nt, synthetic construct
  misc_feature 1..20: note = antisense sequence
  source 1..20: mol_type = other RNA
ccgggtaagacagcccaaag

SEQ ID NO: 17161 - RNA, 20 nt, synthetic construct
  misc_feature 1..20: note = antisense sequence
  source 1..20: mol_type = other RNA
accgggtaagacagcccaaa

SEQ ID NO: 17162 - RNA, 20 nt, synthetic construct
  misc_feature 1..20: note = antisense sequence
  source 1..20: mol_type = other RNA
taccgggtaagacagcccaa

SEQ ID NO: 17163 - RNA, 20 nt, synthetic construct
  misc_feature 1..20: note = antisense sequence
  source 1..20: mol_type = other RNA
ctaccgggtaagacagccca

SEQ ID NO: 17164 - RNA, 20 nt, synthetic construct
  misc_feature 1..20: note = antisense sequence
  source 1..20: mol_type = other RNA
tctaccgggtaagacagccc

SEQ ID NO: 17165 - RNA, 20 nt, synthetic construct
  misc_feature 1..20: note = antisense sequence
  source 1..20: mol_type = other RNA
ttctaccgggtaagacagcc

SEQ ID NO: 17166 - RNA, 20 nt, synthetic construct
  misc_feature 1..20: note = antisense sequence
  source 1..20: mol_type = other RNA
tttctaccgggtaagacagc

SEQ ID NO: 17167 - RNA, 20 nt, synthetic construct
  misc_feature 1..20: note = antisense sequence
  source 1..20: mol_type = other RNA
atttctaccgggtaagacag

SEQ ID NO: 17168 - RNA, 20 nt, synthetic construct
  misc_feature 1..20: note = antisense sequence
  source 1..20: mol_type = other RNA
tatttctaccgggtaagaca

SEQ ID NO: 17169 - RNA, 20 nt, synthetic construct
  misc_feature 1..20: note = antisense sequence
  source 1..20: mol_type = other RNA
ctatttctaccgggtaagac

SEQ ID NO: 17170 - RNA, 20 nt, synthetic construct
  misc_feature 1..20: note = antisense sequence
  source 1..20: mol_type = other RNA
actatttctaccgggtaaga

SEQ ID NO: 17171 - RNA, 20 nt, synthetic construct
  misc_feature 1..20: note = antisense sequence
  source 1..20: mol_type = other RNA
aactatttctaccgggtaag

SEQ ID NO: 17172 - RNA, 20 nt, synthetic construct
  misc_feature 1..20: note = antisense sequence
  source 1..20: mol_type = other RNA
gaactatttctaccgggtaa

SEQ ID NO: 17173 - RNA, 20 nt, synthetic construct
  misc_feature 1..20: note = antisense sequence
  source 1..20: mol_type = other RNA
tgaactatttctaccgggta

SEQ ID NO: 17174 - RNA, 20 nt, synthetic construct
  misc_feature 1..20: note = antisense sequence
  source 1..20: mol_type = other RNA
ctgaactatttctaccgggt

SEQ ID NO: 17175 - RNA, 20 nt, synthetic construct
  misc_feature 1..20: note = antisense sequence
  source 1..20: mol_type = other RNA
gctgaactatttctaccggg

SEQ ID NO: 17176 - RNA, 20 nt, synthetic construct
  misc_feature 1..20: note = antisense sequence
  source 1..20: mol_type = other RNA
ggctgaactatttctaccgg

SEQ ID NO: 17177 - RNA, 20 nt, synthetic construct
  misc_feature 1..20: note = antisense sequence
  source 1..20: mol_type = other RNA
tggctgaactatttctaccg

SEQ ID NO: 17178 - RNA, 20 nt, synthetic construct
  misc_feature 1..20: note = antisense sequence
  source 1..20: mol_type = other RNA
gaagtggctgaactatttct

SEQ ID NO: 17179 - RNA, 20 nt, synthetic construct
  misc_feature 1..20: note = antisense sequence
  source 1..20: mol_type = other RNA
ctaccttagaatcacagttc

SEQ ID NO: 17180 - RNA, 20 nt, synthetic construct
  misc_feature 1..20: note = antisense sequence
  source 1..20: mol_type = other RNA
agctagtttcttcccttcta

SEQ ID NO: 17181 - RNA, 20 nt, synthetic construct
  misc_feature 1..20: note = antisense sequence
  source 1..20: mol_type = other RNA
gcattcgataagagctagtt

SEQ ID NO: 17182 - RNA, 20 nt, synthetic construct
  misc_feature 1..20: note = antisense sequence
  source 1..20: mol_type = other RNA
agcattcgataagagctagt

SEQ ID NO: 17183 - RNA, 20 nt, synthetic construct
  misc_feature 1..20: note = antisense sequence
  source 1..20: mol_type = other RNA
aagcattcgataagagctag

SEQ ID NO: 17184 - RNA, 20 nt, synthetic construct
  misc_feature 1..20: note = antisense sequence
  source 1..20: mol_type = other RNA
gtaagcattcgataagagct

SEQ ID NO: 17185 - RNA, 20 nt, synthetic construct
  misc_feature 1..20: note = antisense sequence
  source 1..20: mol_type = other RNA
agtaagcattcgataagagc

SEQ ID NO: 17186 - RNA, 20 nt, synthetic construct
  misc_feature 1..20: note = antisense sequence
  source 1..20: mol_type = other RNA
agctccctgcacatagtaag

SEQ ID NO: 17187 - RNA, 20 nt, synthetic construct
  misc_feature 1..20: note = antisense sequence
  source 1..20: mol_type = other RNA
atagctccctgcacatagta

SEQ ID NO: 17188 - RNA, 20 nt, synthetic construct
  misc_feature 1..20: note = antisense sequence
  source 1..20: mol_type = other RNA
aatagctccctgcacatagt

SEQ ID NO: 17189 - RNA, 20 nt, synthetic construct
  misc_feature 1..20: note = antisense sequence
  source 1..20: mol_type = other RNA
aaatagctccctgcacatag

SEQ ID NO: 17190 - RNA, 20 nt, synthetic construct
  misc_feature 1..20: note = antisense sequence
  source 1..20: mol_type = other RNA
aaaatagctccctgcacata

SEQ ID NO: 17191 - RNA, 20 nt, synthetic construct
  misc_feature 1..20: note = antisense sequence
  source 1..20: mol_type = other RNA
taaaatagctccctgcacat

SEQ ID NO: 17192 - RNA, 20 nt, synthetic construct
  misc_feature 1..20: note = antisense sequence
  source 1..20: mol_type = other RNA
ttaaaatagctccctgcaca

SEQ ID NO: 17193 - RNA, 20 nt, synthetic construct
  misc_feature 1..20: note = antisense sequence
  source 1..20: mol_type = other RNA
gttcatacgacctcataagg

SEQ ID NO: 17194 - RNA, 20 nt, synthetic construct
  misc_feature 1..20: note = antisense sequence
  source 1..20: mol_type = other RNA
ggttcatacgacctcataag

SEQ ID NO: 17195 - RNA, 20 nt, synthetic construct
  misc_feature 1..20: note = antisense sequence
  source 1..20: mol_type = other RNA
aagaggaggttcatacgacc

SEQ ID NO: 17196 - RNA, 20 nt, synthetic construct
  misc_feature 1..20: note = antisense sequence
  source 1..20: mol_type = other RNA
aaagaggaggttcatacgac

SEQ ID NO: 17197 - RNA, 20 nt, synthetic construct
  misc_feature 1..20: note = antisense sequence
  source 1..20: mol_type = other RNA
aaaagaggaggttcatacga

SEQ ID NO: 17198 - RNA, 20 nt, synthetic construct
  misc_feature 1..20: note = antisense sequence
  source 1..20: mol_type = other RNA
taaaagaggaggttcatacg

SEQ ID NO: 17199 - RNA, 20 nt, synthetic construct
  misc_feature 1..20: note = antisense sequence
  source 1..20: mol_type = other RNA
cactatgtgtctttgggaaa

SEQ ID NO: 17200 - RNA, 20 nt, synthetic construct
  misc_feature 1..20: note = antisense sequence
  source 1..20: mol_type = other RNA
atctcactatgtgtctttgg

SEQ ID NO: 17201 - RNA, 20 nt, synthetic construct
  misc_feature 1..20: note = antisense sequence
  source 1..20: mol_type = other RNA
ctgaatctcactatgtgtct

SEQ ID NO: 17202 - RNA, 20 nt, synthetic construct
  misc_feature 1..20: note = antisense sequence
  source 1..20: mol_type = other RNA
tctgaatctcactatgtgtc

SEQ ID NO: 17203 - RNA, 20 nt, synthetic construct
  misc_feature 1..20: note = antisense sequence
  source 1..20: mol_type = other RNA
ctctgaatctcactatgtgt

SEQ ID NO: 17204 - RNA, 20 nt, synthetic construct
  misc_feature 1..20: note = antisense sequence
  source 1..20: mol_type = other RNA
actctgaatctcactatgtg

SEQ ID NO: 17205 - RNA, 20 nt, synthetic construct
  misc_feature 1..20: note = antisense sequence
  source 1..20: mol_type = other RNA
tccttactctgaatctcact

SEQ ID NO: 17206 - RNA, 20 nt, synthetic construct
  misc_feature 1..20: note = antisense sequence
  source 1..20: mol_type = other RNA
atccttactctgaatctcac

SEQ ID NO: 17207 - RNA, 20 nt, synthetic construct
  misc_feature 1..20: note = antisense sequence
  source 1..20: mol_type = other RNA
gatccttactctgaatctca

SEQ ID NO: 17208 - RNA, 20 nt, synthetic construct
  misc_feature 1..20: note = antisense sequence
  source 1..20: mol_type = other RNA
tcagtggttttggcacagaa

SEQ ID NO: 17209 - RNA, 20 nt, synthetic construct
  misc_feature 1..20: note = antisense sequence
  source 1..20: mol_type = other RNA
tagtcagtggttttggcaca

SEQ ID NO: 17210 - RNA, 20 nt, synthetic construct
  misc_feature 1..20: note = antisense sequence
  source 1..20: mol_type = other RNA
atagtcagtggttttggcac

SEQ ID NO: 17211 - RNA, 20 nt, synthetic construct
  misc_feature 1..20: note = antisense sequence
  source 1..20: mol_type = other RNA
aatagtcagtggttttggca

SEQ ID NO: 17212 - RNA, 20 nt, synthetic construct
  misc_feature 1..20: note = antisense sequence
  source 1..20: mol_type = other RNA
gagtgataatagtcagtggt

SEQ ID NO: 17213 - RNA, 20 nt, synthetic construct
  misc_feature 1..20: note = antisense sequence
  source 1..20: mol_type = other RNA
agagtgataatagtcagtgg

SEQ ID NO: 17214 - RNA, 20 nt, synthetic construct
  misc_feature 1..20: note = antisense sequence
  source 1..20: mol_type = other RNA
cagagtgataatagtcagtg

SEQ ID NO: 17215 - RNA, 20 nt, synthetic construct
  misc_feature 1..20: note = antisense sequence
  source 1..20: mol_type = other RNA
aggacaccagagtgaatgga

SEQ ID NO: 17216 - RNA, 20 nt, synthetic construct
  misc_feature 1..20: note = antisense sequence
  source 1..20: mol_type = other RNA
ttggtcgaaaagattgttgc

SEQ ID NO: 17217 - RNA, 20 nt, synthetic construct
  misc_feature 1..20: note = antisense sequence
  source 1..20: mol_type = other RNA
cttggtcgaaaagattgttg

SEQ ID NO: 17218 - RNA, 20 nt, synthetic construct
  misc_feature 1..20: note = antisense sequence
  source 1..20: mol_type = other RNA
ctttaatgtcctcaggtgta

SEQ ID NO: 17219 - RNA, 20 nt, synthetic construct
  misc_feature 1..20: note = antisense sequence
  source 1..20: mol_type = other RNA
gctttaatgtcctcaggtgt

SEQ ID NO: 17220 - RNA, 20 nt, synthetic construct
  misc_feature 1..20: note = antisense sequence
  source 1..20: mol_type = other RNA
tgctttaatgtcctcaggtg

SEQ ID NO: 17221 - RNA, 20 nt, synthetic construct
  misc_feature 1..20: note = antisense sequence
  source 1..20: mol_type = other RNA
ctttgctttaatgtcctcag

SEQ ID NO: 17222 - RNA, 20 nt, synthetic construct
  misc_feature 1..20: note = antisense sequence
  source 1..20: mol_type = other RNA
ccctttgctttaatgtcctc

SEQ ID NO: 17223 - RNA, 20 nt, synthetic construct
  misc_feature 1..20: note = antisense sequence
  source 1..20: mol_type = other RNA
ctccctttgctttaatgtcc

SEQ ID NO: 17224 - RNA, 20 nt, synthetic construct
  misc_feature 1..20: note = antisense sequence
  source 1..20: mol_type = other RNA
acctccctttgctttaatgt

SEQ ID NO: 17225 - RNA, 20 nt, synthetic construct
  misc_feature 1..20: note = antisense sequence
  source 1..20: mol_type = other RNA
tacctccctttgctttaatg

SEQ ID NO: 17226 - RNA, 20 nt, synthetic construct
  misc_feature 1..20: note = antisense sequence
  source 1..20: mol_type = other RNA
gtcactttacctccctttgc

SEQ ID NO: 17227 - RNA, 20 nt, synthetic construct
  misc_feature 1..20: note = antisense sequence
  source 1..20: mol_type = other RNA
tgggagagtcactttacctc

SEQ ID NO: 17228 - RNA, 20 nt, synthetic construct
  misc_feature 1..20: note = antisense sequence
  source 1..20: mol_type = other RNA
atgggagagtcactttacct

SEQ ID NO: 17229 - RNA, 20 nt, synthetic construct
  misc_feature 1..20: note = antisense sequence
  source 1..20: mol_type = other RNA
tcatgggagagtcactttac

SEQ ID NO: 17230 - RNA, 20 nt, synthetic construct
  misc_feature 1..20: note = antisense sequence
  source 1..20: mol_type = other RNA
taatcatgggagagtcactt

SEQ ID NO: 17231 - RNA, 20 nt, synthetic construct
  misc_feature 1..20: note = antisense sequence
  source 1..20: mol_type = other RNA
gtaatcatgggagagtcact

SEQ ID NO: 17232 - RNA, 20 nt, synthetic construct
  misc_feature 1..20: note = antisense sequence
  source 1..20: mol_type = other RNA
agtaatcatgggagagtcac

SEQ ID NO: 17233 - RNA, 20 nt, synthetic construct
  misc_feature 1..20: note = antisense sequence
  source 1..20: mol_type = other RNA
tagtaatcatgggagagtca

SEQ ID NO: 17234 - RNA, 20 nt, synthetic construct
  misc_feature 1..20: note = antisense sequence
  source 1..20: mol_type = other RNA
ctagtaatcatgggagagtc

SEQ ID NO: 17235 - RNA, 20 nt, synthetic construct
  misc_feature 1..20: note = antisense sequence
  source 1..20: mol_type = other RNA
gctagtaatcatgggagagt

SEQ ID NO: 17236 - RNA, 20 nt, synthetic construct
  misc_feature 1..20: note = antisense sequence
  source 1..20: mol_type = other RNA
agctagtaatcatgggagag

SEQ ID NO: 17237 - RNA, 20 nt, synthetic construct
  misc_feature 1..20: note = antisense sequence
  source 1..20: mol_type = other RNA
gaatccagtcatttactagc

SEQ ID NO: 17238 - RNA, 20 nt, synthetic construct
  misc_feature 1..20: note = antisense sequence
  source 1..20: mol_type = other RNA
ccttgaatccagtcatttac

SEQ ID NO: 17239 - RNA, 20 nt, synthetic construct
  misc_feature 1..20: note = antisense sequence
  source 1..20: mol_type = other RNA
gctctgtagatcattccttg

SEQ ID NO: 17240 - RNA, 20 nt, synthetic construct
  misc_feature 1..20: note = antisense sequence
  source 1..20: mol_type = other RNA
agctctgtagatcattcctt

SEQ ID NO: 17241 - RNA, 20 nt, synthetic construct
  misc_feature 1..20: note = antisense sequence
  source 1..20: mol_type = other RNA
gtaaagagccctaccctata

SEQ ID NO: 17242 - RNA, 20 nt, synthetic construct
  misc_feature 1..20: note = antisense sequence
  source 1..20: mol_type = other RNA
agtaaagagccctaccctat

SEQ ID NO: 17243 - RNA, 20 nt, synthetic construct
  misc_feature 1..20: note = antisense sequence
  source 1..20: mol_type = other RNA
gagtaaagagccctacccta

SEQ ID NO: 17244 - RNA, 20 nt, synthetic construct
  misc_feature 1..20: note = antisense sequence
  source 1..20: mol_type = other RNA
cagagtaaagagccctaccc

SEQ ID NO: 17245 - RNA, 20 nt, synthetic construct
  misc_feature 1..20: note = antisense sequence
  source 1..20: mol_type = other RNA
ccagagtaaagagccctacc

SEQ ID NO: 17246 - RNA, 20 nt, synthetic construct
  misc_feature 1..20: note = antisense sequence
  source 1..20: mol_type = other RNA
tccagagtaaagagccctac

SEQ ID NO: 17247 - RNA, 20 nt, synthetic construct
  misc_feature 1..20: note = antisense sequence
  source 1..20: mol_type = other RNA
actctcttgaacaaaaccca

SEQ ID NO: 17248 - RNA, 20 nt, synthetic construct
  misc_feature 1..20: note = antisense sequence
  source 1..20: mol_type = other RNA
gactctcttgaacaaaaccc

SEQ ID NO: 17249 - RNA, 20 nt, synthetic construct
  misc_feature 1..20: note = antisense sequence
  source 1..20: mol_type = other RNA
tgactctcttgaacaaaacc

SEQ ID NO: 17250 - RNA, 20 nt, synthetic construct
  misc_feature 1..20: note = antisense sequence
  source 1..20: mol_type = other RNA
accctcattccaaaaccaaa

SEQ ID NO: 17251 - RNA, 20 nt, synthetic construct
  misc_feature 1..20: note = antisense sequence
  source 1..20: mol_type = other RNA
agggaccctcattccaaaac

SEQ ID NO: 17252 - RNA, 20 nt, synthetic construct
  misc_feature 1..20: note = antisense sequence
  source 1..20: mol_type = other RNA
ccagggaccctcattccaaa

SEQ ID NO: 17253 - RNA, 20 nt, synthetic construct
  misc_feature 1..20: note = antisense sequence
  source 1..20: mol_type = other RNA
accagggaccctcattccaa

SEQ ID NO: 17254 - RNA, 20 nt, synthetic construct
  misc_feature 1..20: note = antisense sequence
  source 1..20: mol_type = other RNA
aaccagggaccctcattcca

SEQ ID NO: 17255 - RNA, 20 nt, synthetic construct
  misc_feature 1..20: note = antisense sequence
  source 1..20: mol_type = other RNA
tccaaccagggaccctcatt

SEQ ID NO: 17256 - RNA, 20 nt, synthetic construct
  misc_feature 1..20: note = antisense sequence
  source 1..20: mol_type = other RNA
gggattagccttcttgatat

SEQ ID NO: 17257 - RNA, 20 nt, synthetic construct
  misc_feature 1..20: note = antisense sequence
  source 1..20: mol_type = other RNA
gtgggattagccttcttgat

SEQ ID NO: 17258 - RNA, 20 nt, synthetic construct
  misc_feature 1..20: note = antisense sequence
  source 1..20: mol_type = other RNA
aagtgggattagccttcttg

SEQ ID NO: 17259 - RNA, 20 nt, synthetic construct
  misc_feature 1..20: note = antisense sequence
  source 1..20: mol_type = other RNA
cagcttccaacagaacttta

SEQ ID NO: 17260 - RNA, 20 nt, synthetic construct
  misc_feature 1..20: note = antisense sequence
  source 1..20: mol_type = other RNA
gcagcttccaacagaacttt

SEQ ID NO: 17261 - RNA, 20 nt, synthetic construct
  misc_feature 1..20: note = antisense sequence
  source 1..20: mol_type = other RNA
ggcagcttccaacagaactt

SEQ ID NO: 17262 - RNA, 20 nt, synthetic construct
  misc_feature 1..20: note = antisense sequence
  source 1..20: mol_type = other RNA
tcaggcagcttccaacagaa

SEQ ID NO: 17263 - RNA, 20 nt, synthetic construct
  misc_feature 1..20: note = antisense sequence
  source 1..20: mol_type = other RNA
tcatgcttcaggcagcttcc

SEQ ID NO: 17264 - RNA, 20 nt, synthetic construct
  misc_feature 1..20: note = antisense sequence
  source 1..20: mol_type = other RNA
ctcatgcttcaggcagcttc

SEQ ID NO: 17265 - RNA, 20 nt, synthetic construct
  misc_feature 1..20: note = antisense sequence
  source 1..20: mol_type = other RNA
actcatgcttcaggcagctt

SEQ ID NO: 17266 - RNA, 20 nt, synthetic construct
  misc_feature 1..20: note = antisense sequence
  source 1..20: mol_type = other RNA
aactcatgcttcaggcagct

SEQ ID NO: 17267 - RNA, 20 nt, synthetic construct
  misc_feature 1..20: note = antisense sequence
  source 1..20: mol_type = other RNA
gaactcatgcttcaggcagc

SEQ ID NO: 17268 - RNA, 20 nt, synthetic construct
  misc_feature 1..20: note = antisense sequence
  source 1..20: mol_type = other RNA
ctgcaactgaactcatgctt

SEQ ID NO: 17269 - RNA, 20 nt, synthetic construct
  misc_feature 1..20: note = antisense sequence
  source 1..20: mol_type = other RNA
actgcaactgaactcatgct

SEQ ID NO: 17270 - RNA, 20 nt, synthetic construct
  misc_feature 1..20: note = antisense sequence
  source 1..20: mol_type = other RNA
tactgcaactgaactcatgc

SEQ ID NO: 17271 - RNA, 20 nt, synthetic construct
  misc_feature 1..20: note = antisense sequence
  source 1..20: mol_type = other RNA
ctactgcaactgaactcatg

SEQ ID NO: 17272 - RNA, 20 nt, synthetic construct
  misc_feature 1..20: note = antisense sequence
  source 1..20: mol_type = other RNA
cctactgcaactgaactcat

SEQ ID NO: 17273 - RNA, 20 nt, synthetic construct
  misc_feature 1..20: note = antisense sequence
  source 1..20: mol_type = other RNA
acctactgcaactgaactca

SEQ ID NO: 17274 - RNA, 20 nt, synthetic construct
  misc_feature 1..20: note = antisense sequence
  source 1..20: mol_type = other RNA
aacctactgcaactgaactc

SEQ ID NO: 17275 - RNA, 20 nt, synthetic construct
  misc_feature 1..20: note = antisense sequence
  source 1..20: mol_type = other RNA
gaacctactgcaactgaact

SEQ ID NO: 17276 - RNA, 20 nt, synthetic construct
  misc_feature 1..20: note = antisense sequence
  source 1..20: mol_type = other RNA
tgaacctactgcaactgaac

SEQ ID NO: 17277 - RNA, 20 nt, synthetic construct
  misc_feature 1..20: note = antisense sequence
  source 1..20: mol_type = other RNA
ctgaacctactgcaactgaa

SEQ ID NO: 17278 - RNA, 20 nt, synthetic construct
  misc_feature 1..20: note = antisense sequence
  source 1..20: mol_type = other RNA
tagctcttctgaacctactg

SEQ ID NO: 17279 - RNA, 20 nt, synthetic construct
  misc_feature 1..20: note = antisense sequence
  source 1..20: mol_type = other RNA
gagtagctcttctgaaccta

SEQ ID NO: 17280 - RNA, 20 nt, synthetic construct
  misc_feature 1..20: note = antisense sequence
  source 1..20: mol_type = other RNA
gtctgggataagagtagctc

SEQ ID NO: 17281 - RNA, 20 nt, synthetic construct
  misc_feature 1..20: note = antisense sequence
  source 1..20: mol_type = other RNA
tgtctgggataagagtagct

SEQ ID NO: 17282 - RNA, 20 nt, synthetic construct
  misc_feature 1..20: note = antisense sequence
  source 1..20: mol_type = other RNA
atgtctgggataagagtagc

SEQ ID NO: 17283 - RNA, 20 nt, synthetic construct
  misc_feature 1..20: note = antisense sequence
  source 1..20: mol_type = other RNA
gatgtctgggataagagtag

SEQ ID NO: 17284 - RNA, 20 nt, synthetic construct
  misc_feature 1..20: note = antisense sequence
  source 1..20: mol_type = other RNA
aaagatgtctgggataagag

SEQ ID NO: 17285 - RNA, 20 nt, synthetic construct
  misc_feature 1..20: note = antisense sequence
  source 1..20: mol_type = other RNA
gtcctgaggtgtctgatcca

SEQ ID NO: 17286 - RNA, 20 nt, synthetic construct
  misc_feature 1..20: note = antisense sequence
  source 1..20: mol_type = other RNA
agtcctgaggtgtctgatcc

SEQ ID NO: 17287 - RNA, 20 nt, synthetic construct
  misc_feature 1..20: note = antisense sequence
  source 1..20: mol_type = other RNA
atagtcctgaggtgtctgat

SEQ ID NO: 17288 - RNA, 20 nt, synthetic construct
  misc_feature 1..20: note = antisense sequence
  source 1..20: mol_type = other RNA
ggatagtcctgaggtgtctg

SEQ ID NO: 17289 - RNA, 20 nt, synthetic construct
  misc_feature 1..20: note = antisense sequence
  source 1..20: mol_type = other RNA
gggatagtcctgaggtgtct

SEQ ID NO: 17290 - RNA, 20 nt, synthetic construct
  misc_feature 1..20: note = antisense sequence
  source 1..20: mol_type = other RNA
agggatagtcctgaggtgtc

SEQ ID NO: 17291 - RNA, 20 nt, synthetic construct
  misc_feature 1..20: note = antisense sequence
  source 1..20: mol_type = other RNA
aagggatagtcctgaggtgt

SEQ ID NO: 17292 - RNA, 20 nt, synthetic construct
  misc_feature 1..20: note = antisense sequence
  source 1..20: mol_type = other RNA
gaagggatagtcctgaggtg

SEQ ID NO: 17293 - RNA, 20 nt, synthetic construct
  misc_feature 1..20: note = antisense sequence
  source 1..20: mol_type = other RNA
aagaagggatagtcctgagg

SEQ ID NO: 17294 - RNA, 20 nt, synthetic construct
  misc_feature 1..20: note = antisense sequence
  source 1..20: mol_type = other RNA
gaagaagggatagtcctgag

SEQ ID NO: 17295 - RNA, 20 nt, synthetic construct
  misc_feature 1..20: note = antisense sequence
  source 1..20: mol_type = other RNA
ggaagaagggatagtcctga

SEQ ID NO: 17296 - RNA, 20 nt, synthetic construct
  misc_feature 1..20: note = antisense sequence
  source 1..20: mol_type = other RNA
aatgaactccaaactggtgg

SEQ ID NO: 17297 - RNA, 20 nt, synthetic construct
  misc_feature 1..20: note = antisense sequence
  source 1..20: mol_type = other RNA
caatgaactccaaactggtg

SEQ ID NO: 17298 - RNA, 20 nt, synthetic construct
  misc_feature 1..20: note = antisense sequence
  source 1..20: mol_type = other RNA
tccaatgaactccaaactgg

SEQ ID NO: 17299 - RNA, 20 nt, synthetic construct
  misc_feature 1..20: note = antisense sequence
  source 1..20: mol_type = other RNA
acttttggcctgtctcttac

SEQ ID NO: 17300 - RNA, 20 nt, synthetic construct
  misc_feature 1..20: note = antisense sequence
  source 1..20: mol_type = other RNA
aaacttttggcctgtctctt

SEQ ID NO: 17301 - RNA, 20 nt, synthetic construct
  misc_feature 1..20: note = antisense sequence
  source 1..20: mol_type = other RNA
gaaacttttggcctgtctct

SEQ ID NO: 17302 - RNA, 20 nt, synthetic construct
  misc_feature 1..20: note = antisense sequence
  source 1..20: mol_type = other RNA
gagaaacttttggcctgtct

SEQ ID NO: 17303 - RNA, 20 nt, synthetic construct
  misc_feature 1..20: note = antisense sequence
  source 1..20: mol_type = other RNA
agtgaatctctgctctaaga

SEQ ID NO: 17304 - RNA, 20 nt, synthetic construct
  misc_feature 1..20: note = antisense sequence
  source 1..20: mol_type = other RNA
aagtgaatctctgctctaag

SEQ ID NO: 17305 - RNA, 20 nt, synthetic construct
  misc_feature 1..20: note = antisense sequence
  source 1..20: mol_type = other RNA
gccatgtgtatgatgaagac

SEQ ID NO: 17306 - RNA, 20 nt, synthetic construct
  misc_feature 1..20: note = antisense sequence
  source 1..20: mol_type = other RNA
tgccatgtgtatgatgaaga

SEQ ID NO: 17307 - RNA, 20 nt, synthetic construct
  misc_feature 1..20: note = antisense sequence
  source 1..20: mol_type = other RNA
ttgccatgtgtatgatgaag

SEQ ID NO: 17308 - RNA, 20 nt, synthetic construct
  misc_feature 1..20: note = antisense sequence
  source 1..20: mol_type = other RNA
gctactaacactttgtcaag

SEQ ID NO: 17309 - RNA, 20 nt, synthetic construct
  misc_feature 1..20: note = antisense sequence
  source 1..20: mol_type = other RNA
cagctactaacactttgtca

SEQ ID NO: 17310 - RNA, 20 nt, synthetic construct
  misc_feature 1..20: note = antisense sequence
  source 1..20: mol_type = other RNA
gcagctactaacactttgtc

SEQ ID NO: 17311 - RNA, 20 nt, synthetic construct
  misc_feature 1..20: note = antisense sequence
  source 1..20: mol_type = other RNA
aagcagctactaacactttg

SEQ ID NO: 17312 - RNA, 20 nt, synthetic construct
  misc_feature 1..20: note = antisense sequence
  source 1..20: mol_type = other RNA
catgaagtgtattaagcagc

SEQ ID NO: 17313 - RNA, 20 nt, synthetic construct
  misc_feature 1..20: note = antisense sequence
  source 1..20: mol_type = other RNA
tacaagattcctcccatcaa

SEQ ID NO: 17314 - RNA, 20 nt, synthetic construct
  misc_feature 1..20: note = antisense sequence
  source 1..20: mol_type = other RNA
ctacaagattcctcccatca

SEQ ID NO: 17315 - RNA, 20 nt, synthetic construct
  misc_feature 1..20: note = antisense sequence
  source 1..20: mol_type = other RNA
cctacaagattcctcccatc

SEQ ID NO: 17316 - RNA, 20 nt, synthetic construct
  misc_feature 1..20: note = antisense sequence
  source 1..20: mol_type = other RNA
ccctacaagattcctcccat

SEQ ID NO: 17317 - RNA, 20 nt, synthetic construct
  misc_feature 1..20: note = antisense sequence
  source 1..20: mol_type = other RNA
tcaggacaagtttctccacc

SEQ ID NO: 17318 - RNA, 20 nt, synthetic construct
  misc_feature 1..20: note = antisense sequence
  source 1..20: mol_type = other RNA
ttcaggacaagtttctccac

SEQ ID NO: 17319 - RNA, 20 nt, synthetic construct
  misc_feature 1..20: note = antisense sequence
  source 1..20: mol_type = other RNA
acagttcaggacaagtttct

SEQ ID NO: 17320 - RNA, 20 nt, synthetic construct
  misc_feature 1..20: note = antisense sequence
  source 1..20: mol_type = other RNA
cacagttcaggacaagtttc

SEQ ID NO: 17321 - RNA, 20 nt, synthetic construct
  misc_feature 1..20: note = antisense sequence
  source 1..20: mol_type = other RNA
accacagttcaggacaagtt

SEQ ID NO: 17322 - RNA, 20 nt, synthetic construct
  misc_feature 1..20: note = antisense sequence
  source 1..20: mol_type = other RNA
gtaccacagttcaggacaag

SEQ ID NO: 17323 - RNA, 20 nt, synthetic construct
  misc_feature 1..20: note = antisense sequence
  source 1..20: mol_type = other RNA
gtctctcatggctcctggtg

SEQ ID NO: 17324 - RNA, 20 nt, synthetic construct
  misc_feature 1..20: note = antisense sequence
  source 1..20: mol_type = other RNA
agagaggaatgttctgagtc

SEQ ID NO: 17325 - RNA, 20 nt, synthetic construct
  misc_feature 1..20: note = antisense sequence
  source 1..20: mol_type = other RNA
gagagaggaatgttctgagt

SEQ ID NO: 17326 - RNA, 20 nt, synthetic construct
  misc_feature 1..20: note = antisense sequence
  source 1..20: mol_type = other RNA
ggagagaggaatgttctgag

SEQ ID NO: 17327 - RNA, 20 nt, synthetic construct
  misc_feature 1..20: note = antisense sequence
  source 1..20: mol_type = other RNA
aggagagaggaatgttctga

SEQ ID NO: 17328 - RNA, 20 nt, synthetic construct
  misc_feature 1..20: note = antisense sequence
  source 1..20: mol_type = other RNA
taggagagaggaatgttctg

SEQ ID NO: 17329 - RNA, 20 nt, synthetic construct
  misc_feature 1..20: note = antisense sequence
  source 1..20: mol_type = other RNA
ttaggagagaggaatgttct

SEQ ID NO: 17330 - RNA, 20 nt, synthetic construct
  misc_feature 1..20: note = antisense sequence
  source 1..20: mol_type = other RNA
agttaggagagaggaatgtt

SEQ ID NO: 17331 - RNA, 20 nt, synthetic construct
  misc_feature 1..20: note = antisense sequence
  source 1..20: mol_type = other RNA
aagttaggagagaggaatgt

SEQ ID NO: 17332 - RNA, 20 nt, synthetic construct
  misc_feature 1..20: note = antisense sequence
  source 1..20: mol_type = other RNA
catcaagttaggagagagga

SEQ ID NO: 17333 - RNA, 20 nt, synthetic construct
  misc_feature 1..20: note = antisense sequence
  source 1..20: mol_type = other RNA
acatcaagttaggagagagg

SEQ ID NO: 17334 - RNA, 20 nt, synthetic construct
  misc_feature 1..20: note = antisense sequence
  source 1..20: mol_type = other RNA
gacatcaagttaggagagag

SEQ ID NO: 17335 - RNA, 20 nt, synthetic construct
  misc_feature 1..20: note = antisense sequence
  source 1..20: mol_type = other RNA
tgacatcaagttaggagaga

SEQ ID NO: 17336 - RNA, 20 nt, synthetic construct
  misc_feature 1..20: note = antisense sequence
  source 1..20: mol_type = other RNA
atgacatcaagttaggagag

SEQ ID NO: 17337 - RNA, 20 nt, synthetic construct
  misc_feature 1..20: note = antisense sequence
  source 1..20: mol_type = other RNA
ggcatcattatgacatcaag

SEQ ID NO: 17338 - RNA, 20 nt, synthetic construct
  misc_feature 1..20: note = antisense sequence
  source 1..20: mol_type = other RNA
cttcaggcatcattatgaca

SEQ ID NO: 17339 - RNA, 20 nt, synthetic construct
  misc_feature 1..20: note = antisense sequence
  source 1..20: mol_type = other RNA
gaacttcaggcatcattatg

SEQ ID NO: 17340 - RNA, 20 nt, synthetic construct
  misc_feature 1..20: note = antisense sequence
  source 1..20: mol_type = other RNA
ggaacttcaggcatcattat

SEQ ID NO: 17341 - RNA, 20 nt, synthetic construct
  misc_feature 1..20: note = antisense sequence
  source 1..20: mol_type = other RNA
ttgaggaacttcaggcatca

SEQ ID NO: 17342 - RNA, 20 nt, synthetic construct
  misc_feature 1..20: note = antisense sequence
  source 1..20: mol_type = other RNA
ctgtcagaaaagtaagtgct

SEQ ID NO: 17343 - RNA, 20 nt, synthetic construct
  misc_feature 1..20: note = antisense sequence
  source 1..20: mol_type = other RNA
atgaggtgataactgtcaga

SEQ ID NO: 17344 - RNA, 20 nt, synthetic construct
  misc_feature 1..20: note = antisense sequence
  source 1..20: mol_type = other RNA
ctaatgaggtgataactgtc

SEQ ID NO: 17345 - RNA, 20 nt, synthetic construct
  misc_feature 1..20: note = antisense sequence
  source 1..20: mol_type = other RNA
ctctaatgaggtgataactg

SEQ ID NO: 17346 - RNA, 20 nt, synthetic construct
  misc_feature 1..20: note = antisense sequence
  source 1..20: mol_type = other RNA
gctctaatgaggtgataact

SEQ ID NO: 17347 - RNA, 20 nt, synthetic construct
  misc_feature 1..20: note = antisense sequence
  source 1..20: mol_type = other RNA
ggctctaatgaggtgataac

SEQ ID NO: 17348 - RNA, 20 nt, synthetic construct
  misc_feature 1..20: note = antisense sequence
  source 1..20: mol_type = other RNA
aggctctaatgaggtgataa

SEQ ID NO: 17349 - RNA, 20 nt, synthetic construct
  misc_feature 1..20: note = antisense sequence
  source 1..20: mol_type = other RNA
caaaggctctaatgaggtga

SEQ ID NO: 17350 - RNA, 20 nt, synthetic construct
  misc_feature 1..20: note = antisense sequence
  source 1..20: mol_type = other RNA
gcaaaggctctaatgaggtg

SEQ ID NO: 17351 - RNA, 20 nt, synthetic construct
  misc_feature 1..20: note = antisense sequence
  source 1..20: mol_type = other RNA
ggcaaaggctctaatgaggt

SEQ ID NO: 17352 - RNA, 20 nt, synthetic construct
  misc_feature 1..20: note = antisense sequence
  source 1..20: mol_type = other RNA
gttcaaaaccctatggcaaa

SEQ ID NO: 17353 - RNA, 20 nt, synthetic construct
  misc_feature 1..20: note = antisense sequence
  source 1..20: mol_type = other RNA
tgttcaaaaccctatggcaa

SEQ ID NO: 17354 - RNA, 20 nt, synthetic construct
  misc_feature 1..20: note = antisense sequence
  source 1..20: mol_type = other RNA
cttgttcaaaaccctatggc

SEQ ID NO: 17355 - RNA, 20 nt, synthetic construct
  misc_feature 1..20: note = antisense sequence
  source 1..20: mol_type = other RNA
atcccttgttcaaaacccta

SEQ ID NO: 17356 - RNA, 20 nt, synthetic construct
  misc_feature 1..20: note = antisense sequence
  source 1..20: mol_type = other RNA
tgatcccttgttcaaaaccc

SEQ ID NO: 17357 - RNA, 20 nt, synthetic construct
  misc_feature 1..20: note = antisense sequence
  source 1..20: mol_type = other RNA
atgatcccttgttcaaaacc

SEQ ID NO: 17358 - RNA, 20 nt, synthetic construct
  misc_feature 1..20: note = antisense sequence
  source 1..20: mol_type = other RNA
catgatcccttgttcaaaac

SEQ ID NO: 17359 - RNA, 20 nt, synthetic construct
  misc_feature 1..20: note = antisense sequence
  source 1..20: mol_type = other RNA
aacactttctttgcagcact

SEQ ID NO: 17360 - RNA, 20 nt, synthetic construct
  misc_feature 1..20: note = antisense sequence
  source 1..20: mol_type = other RNA
ggccaatcctagcccaaatt

SEQ ID NO: 17361 - RNA, 20 nt, synthetic construct
  misc_feature 1..20: note = antisense sequence
  source 1..20: mol_type = other RNA
tggactgggccaatcctagc

SEQ ID NO: 17362 - RNA, 20 nt, synthetic construct
  misc_feature 1..20: note = antisense sequence
  source 1..20: mol_type = other RNA
atggactgggccaatcctag

SEQ ID NO: 17363 - RNA, 20 nt, synthetic construct
  misc_feature 1..20: note = antisense sequence
  source 1..20: mol_type = other RNA
gatggactgggccaatccta

SEQ ID NO: 17364 - RNA, 20 nt, synthetic construct
  misc_feature 1..20: note = antisense sequence
  source 1..20: mol_type = other RNA
agatggactgggccaatcct

SEQ ID NO: 17365 - RNA, 20 nt, synthetic construct
  misc_feature 1..20: note = antisense sequence
  source 1..20: mol_type = other RNA
aagatggactgggccaatcc

SEQ ID NO: 17366 - RNA, 20 nt, synthetic construct
  misc_feature 1..20: note = antisense sequence
  source 1..20: mol_type = other RNA
tcaagatggactgggccaat

SEQ ID NO: 17367 - RNA, 20 nt, synthetic construct
  misc_feature 1..20: note = antisense sequence
  source 1..20: mol_type = other RNA
cttcaagatggactgggcca

SEQ ID NO: 17368 - RNA, 20 nt, synthetic construct
  misc_feature 1..20: note = antisense sequence
  source 1..20: mol_type = other RNA
agcttcaagatggactgggc

SEQ ID NO: 17369 - RNA, 20 nt, synthetic construct
  misc_feature 1..20: note = antisense sequence
  source 1..20: mol_type = other RNA
tagcttcaagatggactggg

SEQ ID NO: 17370 - RNA, 20 nt, synthetic construct
  misc_feature 1..20: note = antisense sequence
  source 1..20: mol_type = other RNA
tatagcttcaagatggactg

SEQ ID NO: 17371 - RNA, 20 nt, synthetic construct
  misc_feature 1..20: note = antisense sequence
  source 1..20: mol_type = other RNA
agagtggagattaggagaaa

SEQ ID NO: 17372 - RNA, 20 nt, synthetic construct
  misc_feature 1..20: note = antisense sequence
  source 1..20: mol_type = other RNA
caaagagtggagattaggag

SEQ ID NO: 17373 - RNA, 20 nt, synthetic construct
  misc_feature 1..20: note = antisense sequence
  source 1..20: mol_type = other RNA
gcaaagagtggagattagga

SEQ ID NO: 17374 - RNA, 20 nt, synthetic construct
  misc_feature 1..20: note = antisense sequence
  source 1..20: mol_type = other RNA
gtggcaaagagtggagatta

SEQ ID NO: 17375 - RNA, 20 nt, synthetic construct
  misc_feature 1..20: note = antisense sequence
  source 1..20: mol_type = other RNA
agtggcaaagagtggagatt

SEQ ID NO: 17376 - RNA, 20 nt, synthetic construct
  misc_feature 1..20: note = antisense sequence
  source 1..20: mol_type = other RNA
aagttgagtggcaaagagtg

SEQ ID NO: 17377 - RNA, 20 nt, synthetic construct
  misc_feature 1..20: note = antisense sequence
  source 1..20: mol_type = other RNA
gaagttgagtggcaaagagt

SEQ ID NO: 17378 - RNA, 20 nt, synthetic construct
  misc_feature 1..20: note = antisense sequence
  source 1..20: mol_type = other RNA
aagagaagttgagtggcaaa

SEQ ID NO: 17379 - RNA, 20 nt, synthetic construct
  misc_feature 1..20: note = antisense sequence
  source 1..20: mol_type = other RNA
taagagaagttgagtggcaa

SEQ ID NO: 17380 - RNA, 20 nt, synthetic construct
  misc_feature 1..20: note = antisense sequence
  source 1..20: mol_type = other RNA
taagcactccacccaaccaa

SEQ ID NO: 17381 - RNA, 20 nt, synthetic construct
  misc_feature 1..20: note = antisense sequence
  source 1..20: mol_type = other RNA
ctaagcactccacccaacca

SEQ ID NO: 17382 - RNA, 20 nt, synthetic construct
  misc_feature 1..20: note = antisense sequence
  source 1..20: mol_type = other RNA
tctaagcactccacccaacc

SEQ ID NO: 17383 - RNA, 20 nt, synthetic construct
  misc_feature 1..20: note = antisense sequence
  source 1..20: mol_type = other RNA
atctaagcactccacccaac

SEQ ID NO: 17384 - RNA, 20 nt, synthetic construct
  misc_feature 1..20: note = antisense sequence
  source 1..20: mol_type = other RNA
tatctaagcactccacccaa

SEQ ID NO: 17385 - RNA, 20 nt, synthetic construct
  misc_feature 1..20: note = antisense sequence
  source 1..20: mol_type = other RNA
ctgttatctaagcactccac

SEQ ID NO: 17386 - RNA, 20 nt, synthetic construct
  misc_feature 1..20: note = antisense sequence
  source 1..20: mol_type = other RNA
cttctgttatctaagcactc

SEQ ID NO: 17387 - RNA, 20 nt, synthetic construct
  misc_feature 1..20: note = antisense sequence
  source 1..20: mol_type = other RNA
tccttggcttctacacatta

SEQ ID NO: 17388 - RNA, 20 nt, synthetic construct
  misc_feature 1..20: note = antisense sequence
  source 1..20: mol_type = other RNA
ctccttggcttctacacatt

SEQ ID NO: 17389 - RNA, 20 nt, synthetic construct
  misc_feature 1..20: note = antisense sequence
  source 1..20: mol_type = other RNA
atgctccttggcttctacac

SEQ ID NO: 17390 - RNA, 20 nt, synthetic construct
  misc_feature 1..20: note = antisense sequence
  source 1..20: mol_type = other RNA
acaatgctccttggcttcta

SEQ ID NO: 17391 - RNA, 20 nt, synthetic construct
  misc_feature 1..20: note = antisense sequence
  source 1..20: mol_type = other RNA
tacaatgctccttggcttct

SEQ ID NO: 17392 - RNA, 20 nt, synthetic construct
  misc_feature 1..20: note = antisense sequence
  source 1..20: mol_type = other RNA
tttacaatgctccttggctt

SEQ ID NO: 17393 - RNA, 20 nt, synthetic construct
  misc_feature 1..20: note = antisense sequence
  source 1..20: mol_type = other RNA
ctttacaatgctccttggct

SEQ ID NO: 17394 - RNA, 20 nt, synthetic construct
  misc_feature 1..20: note = antisense sequence
  source 1..20: mol_type = other RNA
tctttacaatgctccttggc

SEQ ID NO: 17395 - RNA, 20 nt, synthetic construct
  misc_feature 1..20: note = antisense sequence
  source 1..20: mol_type = other RNA
tgatctctcacagctctttt

SEQ ID NO: 17396 - RNA, 20 nt, synthetic construct
  misc_feature 1..20: note = antisense sequence
  source 1..20: mol_type = other RNA
cttctgatctctcacagctc

SEQ ID NO: 17397 - RNA, 20 nt, synthetic construct
  misc_feature 1..20: note = antisense sequence
  source 1..20: mol_type = other RNA
ttgcttctgatctctcacag

SEQ ID NO: 17398 - RNA, 20 nt, synthetic construct
  misc_feature 1..20: note = antisense sequence
  source 1..20: mol_type = other RNA
gtggtggattctaagacttt

SEQ ID NO: 17399 - RNA, 20 nt, synthetic construct
  misc_feature 1..20: note = antisense sequence
  source 1..20: mol_type = other RNA
aggtggtggattctaagact

SEQ ID NO: 17400 - RNA, 20 nt, synthetic construct
  misc_feature 1..20: note = antisense sequence
  source 1..20: mol_type = other RNA
caggtggtggattctaagac

SEQ ID NO: 17401 - RNA, 20 nt, synthetic construct
  misc_feature 1..20: note = antisense sequence
  source 1..20: mol_type = other RNA
gcaggtggtggattctaaga

SEQ ID NO: 17402 - RNA, 20 nt, synthetic construct
  misc_feature 1..20: note = antisense sequence
  source 1..20: mol_type = other RNA
agcaggtggtggattctaag

SEQ ID NO: 17403 - RNA, 20 nt, synthetic construct
  misc_feature 1..20: note = antisense sequence
  source 1..20: mol_type = other RNA
aagcaggtggtggattctaa

SEQ ID NO: 17404 - RNA, 20 nt, synthetic construct
  misc_feature 1..20: note = antisense sequence
  source 1..20: mol_type = other RNA
cacaaaagcaggtggtggat

SEQ ID NO: 17405 - RNA, 20 nt, synthetic construct
  misc_feature 1..20: note = antisense sequence
  source 1..20: mol_type = other RNA
tcacaaaagcaggtggtgga

SEQ ID NO: 17406 - RNA, 20 nt, synthetic construct
  misc_feature 1..20: note = antisense sequence
  source 1..20: mol_type = other RNA
aacagacaaggctttcacaa

SEQ ID NO: 17407 - RNA, 20 nt, synthetic construct
  misc_feature 1..20: note = antisense sequence
  source 1..20: mol_type = other RNA
ctgcatgtcctgagtcaaaa

SEQ ID NO: 17408 - RNA, 20 nt, synthetic construct
  misc_feature 1..20: note = antisense sequence
  source 1..20: mol_type = other RNA
cctgcatgtcctgagtcaaa

SEQ ID NO: 17409 - RNA, 20 nt, synthetic construct
  misc_feature 1..20: note = antisense sequence
  source 1..20: mol_type = other RNA
gcctgcatgtcctgagtcaa

SEQ ID NO: 17410 - RNA, 20 nt, synthetic construct
  misc_feature 1..20: note = antisense sequence
  source 1..20: mol_type = other RNA
cttaacttgtgcctgcatgt

SEQ ID NO: 17411 - RNA, 20 nt, synthetic construct
  misc_feature 1..20: note = antisense sequence
  source 1..20: mol_type = other RNA
tcttaacttgtgcctgcatg

SEQ ID NO: 17412 - RNA, 20 nt, synthetic construct
  misc_feature 1..20: note = antisense sequence
  source 1..20: mol_type = other RNA
ttcttaacttgtgcctgcat

SEQ ID NO: 17413 - RNA, 20 nt, synthetic construct
  misc_feature 1..20: note = antisense sequence
  source 1..20: mol_type = other RNA
cttcttaacttgtgcctgca

SEQ ID NO: 17414 - RNA, 20 nt, synthetic construct
  misc_feature 1..20: note = antisense sequence
  source 1..20: mol_type = other RNA
ggcttcttaacttgtgcctg

SEQ ID NO: 17415 - RNA, 20 nt, synthetic construct
  misc_feature 1..20: note = antisense sequence
  source 1..20: mol_type = other RNA
gccaagtataaaagttccag

SEQ ID NO: 17416 - RNA, 20 nt, synthetic construct
  misc_feature 1..20: note = antisense sequence
  source 1..20: mol_type = other RNA
cctacacgtctcaggctttt

SEQ ID NO: 17417 - RNA, 20 nt, synthetic construct
  misc_feature 1..20: note = antisense sequence
  source 1..20: mol_type = other RNA
tcctacacgtctcaggcttt

SEQ ID NO: 17418 - RNA, 20 nt, synthetic construct
  misc_feature 1..20: note = antisense sequence
  source 1..20: mol_type = other RNA
ctcctacacgtctcaggctt

SEQ ID NO: 17419 - RNA, 20 nt, synthetic construct
  misc_feature 1..20: note = antisense sequence
  source 1..20: mol_type = other RNA
tctcctacacgtctcaggct

SEQ ID NO: 17420 - RNA, 20 nt, synthetic construct
  misc_feature 1..20: note = antisense sequence
  source 1..20: mol_type = other RNA
ctctcctacacgtctcaggc

SEQ ID NO: 17421 - RNA, 20 nt, synthetic construct
  misc_feature 1..20: note = antisense sequence
  source 1..20: mol_type = other RNA
gctctcctacacgtctcagg

SEQ ID NO: 17422 - RNA, 20 nt, synthetic construct
  misc_feature 1..20: note = antisense sequence
  source 1..20: mol_type = other RNA
agctctcctacacgtctcag

SEQ ID NO: 17423 - RNA, 20 nt, synthetic construct
  misc_feature 1..20: note = antisense sequence
  source 1..20: mol_type = other RNA
cagctctcctacacgtctca

SEQ ID NO: 17424 - RNA, 20 nt, synthetic construct
  misc_feature 1..20: note = antisense sequence
  source 1..20: mol_type = other RNA
ccagctctcctacacgtctc

SEQ ID NO: 17425 - RNA, 20 nt, synthetic construct
  misc_feature 1..20: note = antisense sequence
  source 1..20: mol_type = other RNA
gccagctctcctacacgtct

SEQ ID NO: 17426 - RNA, 20 nt, synthetic construct
  misc_feature 1..20: note = antisense sequence
  source 1..20: mol_type = other RNA
aatgccagctctcctacacg

SEQ ID NO: 17427 - RNA, 20 nt, synthetic construct
  misc_feature 1..20: note = antisense sequence
  source 1..20: mol_type = other RNA
ccaaatgccagctctcctac

SEQ ID NO: 17428 - RNA, 20 nt, synthetic construct
  misc_feature 1..20: note = antisense sequence
  source 1..20: mol_type = other RNA
ggtaacggaacaaatacaca

SEQ ID NO: 17429 - RNA, 20 nt, synthetic construct
  misc_feature 1..20: note = antisense sequence
  source 1..20: mol_type = other RNA
cggtaacggaacaaatacac

SEQ ID NO: 17430 - RNA, 20 nt, synthetic construct
  misc_feature 1..20: note = antisense sequence
  source 1..20: mol_type = other RNA
gcggtaacggaacaaataca

SEQ ID NO: 17431 - RNA, 20 nt, synthetic construct
  misc_feature 1..20: note = antisense sequence
  source 1..20: mol_type = other RNA
ggcggtaacggaacaaatac

SEQ ID NO: 17432 - RNA, 20 nt, synthetic construct
  misc_feature 1..20: note = antisense sequence
  source 1..20: mol_type = other RNA
aggcggtaacggaacaaata

SEQ ID NO: 17433 - RNA, 20 nt, synthetic construct
  misc_feature 1..20: note = antisense sequence
  source 1..20: mol_type = other RNA
aaggcggtaacggaacaaat

SEQ ID NO: 17434 - RNA, 20 nt, synthetic construct
  misc_feature 1..20: note = antisense sequence
  source 1..20: mol_type = other RNA
aaaggcggtaacggaacaaa

SEQ ID NO: 17435 - RNA, 20 nt, synthetic construct
  misc_feature 1..20: note = antisense sequence
  source 1..20: mol_type = other RNA
aaaaggcggtaacggaacaa

SEQ ID NO: 17436 - RNA, 20 nt, synthetic construct
  misc_feature 1..20: note = antisense sequence
  source 1..20: mol_type = other RNA
gaaaaggcggtaacggaaca

SEQ ID NO: 17437 - RNA, 20 nt, synthetic construct
  misc_feature 1..20: note = antisense sequence
  source 1..20: mol_type = other RNA
agaaaaggcggtaacggaac

SEQ ID NO: 17438 - RNA, 20 nt, synthetic construct
  misc_feature 1..20: note = antisense sequence
  source 1..20: mol_type = other RNA
aagaaaaggcggtaacggaa

SEQ ID NO: 17439 - RNA, 20 nt, synthetic construct
  misc_feature 1..20: note = antisense sequence
  source 1..20: mol_type = other RNA
gaagaaaaggcggtaacgga

SEQ ID NO: 17440 - RNA, 20 nt, synthetic construct
  misc_feature 1..20: note = antisense sequence
  source 1..20: mol_type = other RNA
tgaagaaaaggcggtaacgg

SEQ ID NO: 17441 - RNA, 20 nt, synthetic construct
  misc_feature 1..20: note = antisense sequence
  source 1..20: mol_type = other RNA
atgaagaaaaggcggtaacg

SEQ ID NO: 17442 - RNA, 20 nt, synthetic construct
  misc_feature 1..20: note = antisense sequence
  source 1..20: mol_type = other RNA
gatgaagaaaaggcggtaac

SEQ ID NO: 17443 - RNA, 20 nt, synthetic construct
  misc_feature 1..20: note = antisense sequence
  source 1..20: mol_type = other RNA
agatgaagaaaaggcggtaa

SEQ ID NO: 17444 - RNA, 20 nt, synthetic construct
  misc_feature 1..20: note = antisense sequence
  source 1..20: mol_type = other RNA
ggtagatgaagaaaaggcgg

SEQ ID NO: 17445 - RNA, 20 nt, synthetic construct
  misc_feature 1..20: note = antisense sequence
  source 1..20: mol_type = other RNA
tggtagatgaagaaaaggcg

SEQ ID NO: 17446 - RNA, 20 nt, synthetic construct
  misc_feature 1..20: note = antisense sequence
  source 1..20: mol_type = other RNA
ctagttggtggtagatgaag

SEQ ID NO: 17447 - RNA, 20 nt, synthetic construct
  misc_feature 1..20: note = antisense sequence
  source 1..20: mol_type = other RNA
catcatctagttggtggtag

SEQ ID NO: 17448 - RNA, 20 nt, synthetic construct
  misc_feature 1..20: note = antisense sequence
  source 1..20: mol_type = other RNA
ccatcatctagttggtggta

SEQ ID NO: 17449 - RNA, 20 nt, synthetic construct
  misc_feature 1..20: note = antisense sequence
  source 1..20: mol_type = other RNA
gccatcatctagttggtggt

SEQ ID NO: 17450 - RNA, 20 nt, synthetic construct
  misc_feature 1..20: note = antisense sequence
  source 1..20: mol_type = other RNA
tgccatcatctagttggtgg

SEQ ID NO: 17451 - RNA, 20 nt, synthetic construct
  misc_feature 1..20: note = antisense sequence
  source 1..20: mol_type = other RNA
atgccatcatctagttggtg

SEQ ID NO: 17452 - RNA, 20 nt, synthetic construct
  misc_feature 1..20: note = antisense sequence
  source 1..20: mol_type = other RNA
ttatgccatcatctagttgg

SEQ ID NO: 17453 - RNA, 20 nt, synthetic construct
  misc_feature 1..20: note = antisense sequence
  source 1..20: mol_type = other RNA
ggctcatgtcttctattatg

SEQ ID NO: 17454 - RNA, 20 nt, synthetic construct
  misc_feature 1..20: note = antisense sequence
  source 1..20: mol_type = other RNA
cagggctcatgtcttctatt

SEQ ID NO: 17455 - RNA, 20 nt, synthetic construct
  misc_feature 1..20: note = antisense sequence
  source 1..20: mol_type = other RNA
tcagggctcatgtcttctat

SEQ ID NO: 17456 - RNA, 20 nt, synthetic construct
  misc_feature 1..20: note = antisense sequence
  source 1..20: mol_type = other RNA
attcagggctcatgtcttct

SEQ ID NO: 17457 - RNA, 20 nt, synthetic construct
  misc_feature 1..20: note = antisense sequence
  source 1..20: mol_type = other RNA
ttattcagggctcatgtctt

SEQ ID NO: 17458 - RNA, 20 nt, synthetic construct
  misc_feature 1..20: note = antisense sequence
  source 1..20: mol_type = other RNA
ttttattcagggctcatgtc

SEQ ID NO: 17459 - RNA, 20 nt, synthetic construct
  misc_feature 1..20: note = antisense sequence
  source 1..20: mol_type = other RNA
aacaactgagggcttagagg

SEQ ID NO: 17460 - RNA, 20 nt, synthetic construct
  misc_feature 1..20: note = antisense sequence
  source 1..20: mol_type = other RNA
aaacaactgagggcttagag

SEQ ID NO: 17461 - RNA, 20 nt, synthetic construct
  misc_feature 1..20: note = antisense sequence
  source 1..20: mol_type = other RNA
taaacaactgagggcttaga

SEQ ID NO: 17462 - RNA, 20 nt, synthetic construct
  misc_feature 1..20: note = antisense sequence
  source 1..20: mol_type = other RNA
ttaaacaactgagggcttag

SEQ ID NO: 17463 - RNA, 20 nt, synthetic construct
  misc_feature 1..20: note = antisense sequence
  source 1..20: mol_type = other RNA
ccagggaactatgtgtttat

SEQ ID NO: 17464 - RNA, 20 nt, synthetic construct
  misc_feature 1..20: note = antisense sequence
  source 1..20: mol_type = other RNA
gccagggaactatgtgttta

SEQ ID NO: 17465 - RNA, 20 nt, synthetic construct
  misc_feature 1..20: note = antisense sequence
  source 1..20: mol_type = other RNA
tgccagggaactatgtgttt

SEQ ID NO: 17466 - RNA, 20 nt, synthetic construct
  misc_feature 1..20: note = antisense sequence
  source 1..20: mol_type = other RNA
atgccagggaactatgtgtt

SEQ ID NO: 17467 - RNA, 20 nt, synthetic construct
  misc_feature 1..20: note = antisense sequence
  source 1..20: mol_type = other RNA
tatgccagggaactatgtgt

SEQ ID NO: 17468 - RNA, 20 nt, synthetic construct
  misc_feature 1..20: note = antisense sequence
  source 1..20: mol_type = other RNA
ttatgccagggaactatgtg

SEQ ID NO: 17469 - RNA, 20 nt, synthetic construct
  misc_feature 1..20: note = antisense sequence
  source 1..20: mol_type = other RNA
attatgccagggaactatgt

SEQ ID NO: 17470 - RNA, 20 nt, synthetic construct
  misc_feature 1..20: note = antisense sequence
  source 1..20: mol_type = other RNA
caaattatgccagggaacta

SEQ ID NO: 17471 - RNA, 20 nt, synthetic construct
  misc_feature 1..20: note = antisense sequence
  source 1..20: mol_type = other RNA
gcaaattatgccagggaact

SEQ ID NO: 17472 - RNA, 20 nt, synthetic construct
  misc_feature 1..20: note = antisense sequence
  source 1..20: mol_type = other RNA
ggcacctctacatcatttta

SEQ ID NO: 17473 - RNA, 20 nt, synthetic construct
  misc_feature 1..20: note = antisense sequence
  source 1..20: mol_type = other RNA
tggcacctctacatcatttt

SEQ ID NO: 17474 - RNA, 20 nt, synthetic construct
  misc_feature 1..20: note = antisense sequence
  source 1..20: mol_type = other RNA
gtggcacctctacatcattt

SEQ ID NO: 17475 - RNA, 20 nt, synthetic construct
  misc_feature 1..20: note = antisense sequence
  source 1..20: mol_type = other RNA
tgtggcacctctacatcatt

SEQ ID NO: 17476 - RNA, 20 nt, synthetic construct
  misc_feature 1..20: note = antisense sequence
  source 1..20: mol_type = other RNA
gtgtggcacctctacatcat

SEQ ID NO: 17477 - RNA, 20 nt, synthetic construct
  misc_feature 1..20: note = antisense sequence
  source 1..20: mol_type = other RNA
aagtgtggcacctctacatc

SEQ ID NO: 17478 - RNA, 20 nt, synthetic construct
  misc_feature 1..20: note = antisense sequence
  source 1..20: mol_type = other RNA
cgagcaaaggcaatgagtta

SEQ ID NO: 17479 - RNA, 20 nt, synthetic construct
  misc_feature 1..20: note = antisense sequence
  source 1..20: mol_type = other RNA
tcgagcaaaggcaatgagtt

SEQ ID NO: 17480 - RNA, 20 nt, synthetic construct
  misc_feature 1..20: note = antisense sequence
  source 1..20: mol_type = other RNA
agatcgagcaaaggcaatga

SEQ ID NO: 17481 - RNA, 20 nt, synthetic construct
  misc_feature 1..20: note = antisense sequence
  source 1..20: mol_type = other RNA
tagatcgagcaaaggcaatg

SEQ ID NO: 17482 - RNA, 20 nt, synthetic construct
  misc_feature 1..20: note = antisense sequence
  source 1..20: mol_type = other RNA
atagatcgagcaaaggcaat

SEQ ID NO: 17483 - RNA, 20 nt, synthetic construct
  misc_feature 1..20: note = antisense sequence
  source 1..20: mol_type = other RNA
aatagatcgagcaaaggcaa

SEQ ID NO: 17484 - RNA, 20 nt, synthetic construct
  misc_feature 1..20: note = antisense sequence
  source 1..20: mol_type = other RNA
taatagatcgagcaaaggca

SEQ ID NO: 17485 - RNA, 20 nt, synthetic construct
  misc_feature 1..20: note = antisense sequence
  source 1..20: mol_type = other RNA
ataatagatcgagcaaaggc

SEQ ID NO: 17486 - RNA, 20 nt, synthetic construct
  misc_feature 1..20: note = antisense sequence
  source 1..20: mol_type = other RNA
ggctataatagatcgagcaa

SEQ ID NO: 17487 - RNA, 20 nt, synthetic construct
  misc_feature 1..20: note = antisense sequence
  source 1..20: mol_type = other RNA
gggctataatagatcgagca

SEQ ID NO: 17488 - RNA, 20 nt, synthetic construct
  misc_feature 1..20: note = antisense sequence
  source 1..20: mol_type = other RNA
gggtcataggtaagtgattt

SEQ ID NO: 17489 - RNA, 20 nt, synthetic construct
  misc_feature 1..20: note = antisense sequence
  source 1..20: mol_type = other RNA
agggtcataggtaagtgatt

SEQ ID NO: 17490 - RNA, 20 nt, synthetic construct
  misc_feature 1..20: note = antisense sequence
  source 1..20: mol_type = other RNA
aagggtcataggtaagtgat

SEQ ID NO: 17491 - RNA, 20 nt, synthetic construct
  misc_feature 1..20: note = antisense sequence
  source 1..20: mol_type = other RNA
tcgtggtggatggtgagcca

SEQ ID NO: 17492 - RNA, 20 nt, synthetic construct
  misc_feature 1..20: note = antisense sequence
  source 1..20: mol_type = other RNA
atcgtggtggatggtgagcc

SEQ ID NO: 17493 - RNA, 20 nt, synthetic construct
  misc_feature 1..20: note = antisense sequence
  source 1..20: mol_type = other RNA
aatttcacatcgtggtggat

SEQ ID NO: 17494 - RNA, 20 nt, synthetic construct
  misc_feature 1..20: note = antisense sequence
  source 1..20: mol_type = other RNA
aagcctcttgaaaacacact

SEQ ID NO: 17495 - RNA, 20 nt, synthetic construct
  misc_feature 1..20: note = antisense sequence
  source 1..20: mol_type = other RNA
ggcgttagggagatttctga

SEQ ID NO: 17496 - RNA, 20 nt, synthetic construct
  misc_feature 1..20: note = antisense sequence
  source 1..20: mol_type = other RNA
gggcgttagggagatttctg

SEQ ID NO: 17497 - RNA, 20 nt, synthetic construct
  misc_feature 1..20: note = antisense sequence
  source 1..20: mol_type = other RNA
agggcgttagggagatttct

SEQ ID NO: 17498 - RNA, 20 nt, synthetic construct
  misc_feature 1..20: note = antisense sequence
  source 1..20: mol_type = other RNA
tagggcgttagggagatttc

SEQ ID NO: 17499 - RNA, 20 nt, synthetic construct
  misc_feature 1..20: note = antisense sequence
  source 1..20: mol_type = other RNA
ctagggcgttagggagattt

SEQ ID NO: 17500 - RNA, 20 nt, synthetic construct
  misc_feature 1..20: note = antisense sequence
  source 1..20: mol_type = other RNA
gctagggcgttagggagatt

SEQ ID NO: 17501 - RNA, 20 nt, synthetic construct
  misc_feature 1..20: note = antisense sequence
  source 1..20: mol_type = other RNA
ggctagggcgttagggagat

SEQ ID NO: 17502 - RNA, 20 nt, synthetic construct
  misc_feature 1..20: note = antisense sequence
  source 1..20: mol_type = other RNA
tggctagggcgttagggaga

SEQ ID NO: 17503 - RNA, 20 nt, synthetic construct
  misc_feature 1..20: note = antisense sequence
  source 1..20: mol_type = other RNA
atggctagggcgttagggag

SEQ ID NO: 17504 - RNA, 20 nt, synthetic construct
  misc_feature 1..20: note = antisense sequence
  source 1..20: mol_type = other RNA
tatggctagggcgttaggga

SEQ ID NO: 17505 - RNA, 20 nt, synthetic construct
  misc_feature 1..20: note = antisense sequence
  source 1..20: mol_type = other RNA
ttatggctagggcgttaggg

SEQ ID NO: 17506 - RNA, 20 nt, synthetic construct
  misc_feature 1..20: note = antisense sequence
  source 1..20: mol_type = other RNA
attatggctagggcgttagg

SEQ ID NO: 17507 - RNA, 20 nt, synthetic construct
  misc_feature 1..20: note = antisense sequence
  source 1..20: mol_type = other RNA
tattatggctagggcgttag

SEQ ID NO: 17508 - RNA, 20 nt, synthetic construct
  misc_feature 1..20: note = antisense sequence
  source 1..20: mol_type = other RNA
atattatggctagggcgtta

SEQ ID NO: 17509 - RNA, 20 nt, synthetic construct
  misc_feature 1..20: note = antisense sequence
  source 1..20: mol_type = other RNA
tatattatggctagggcgtt

SEQ ID NO: 17510 - RNA, 20 nt, synthetic construct
  misc_feature 1..20: note = antisense sequence
  source 1..20: mol_type = other RNA
gtatattatggctagggcgt

SEQ ID NO: 17511 - RNA, 20 nt, synthetic construct
  misc_feature 1..20: note = antisense sequence
  source 1..20: mol_type = other RNA
ggtatattatggctagggcg

SEQ ID NO: 17512 - RNA, 20 nt, synthetic construct
  misc_feature 1..20: note = antisense sequence
  source 1..20: mol_type = other RNA
aggtatattatggctagggc

SEQ ID NO: 17513 - RNA, 20 nt, synthetic construct
  misc_feature 1..20: note = antisense sequence
  source 1..20: mol_type = other RNA
caggtatattatggctaggg

SEQ ID NO: 17514 - RNA, 20 nt, synthetic construct
  misc_feature 1..20: note = antisense sequence
  source 1..20: mol_type = other RNA
gacaggtatattatggctag

SEQ ID NO: 17515 - RNA, 20 nt, synthetic construct
  misc_feature 1..20: note = antisense sequence
  source 1..20: mol_type = other RNA
tctgacaggtatattatggc

SEQ ID NO: 17516 - RNA, 20 nt, synthetic construct
  misc_feature 1..20: note = antisense sequence
  source 1..20: mol_type = other RNA
gggaatctgacaggtatatt

SEQ ID NO: 17517 - RNA, 20 nt, synthetic construct
  misc_feature 1..20: note = antisense sequence
  source 1..20: mol_type = other RNA
agggaatctgacaggtatat

SEQ ID NO: 17518 - RNA, 20 nt, synthetic construct
  misc_feature 1..20: note = antisense sequence
  source 1..20: mol_type = other RNA
tagggaatctgacaggtata

SEQ ID NO: 17519 - RNA, 20 nt, synthetic construct
  misc_feature 1..20: note = antisense sequence
  source 1..20: mol_type = other RNA
gtagggaatctgacaggtat

SEQ ID NO: 17520 - RNA, 20 nt, synthetic construct
  misc_feature 1..20: note = antisense sequence
  source 1..20: mol_type = other RNA
ggtagggaatctgacaggta

SEQ ID NO: 17521 - RNA, 20 nt, synthetic construct
  misc_feature 1..20: note = antisense sequence
  source 1..20: mol_type = other RNA
atggtagggaatctgacagg

SEQ ID NO: 17522 - RNA, 20 nt, synthetic construct
  misc_feature 1..20: note = antisense sequence
  source 1..20: mol_type = other RNA
gatggtagggaatctgacag

SEQ ID NO: 17523 - RNA, 20 nt, synthetic construct
  misc_feature 1..20: note = antisense sequence
  source 1..20: mol_type = other RNA
attagagatggtagggaatc

SEQ ID NO: 17524 - RNA, 20 nt, synthetic construct
  misc_feature 1..20: note = antisense sequence
  source 1..20: mol_type = other RNA
cattagagatggtagggaat

SEQ ID NO: 17525 - RNA, 20 nt, synthetic construct
  misc_feature 1..20: note = antisense sequence
  source 1..20: mol_type = other RNA
aggtcattagagatggtagg

SEQ ID NO: 17526 - RNA, 20 nt, synthetic construct
  misc_feature 1..20: note = antisense sequence
  source 1..20: mol_type = other RNA
ttgaggtcattagagatggt

SEQ ID NO: 17527 - RNA, 20 nt, synthetic construct
  misc_feature 1..20: note = antisense sequence
  source 1..20: mol_type = other RNA
gttgaggtcattagagatgg

SEQ ID NO: 17528 - RNA, 20 nt, synthetic construct
  misc_feature 1..20: note = antisense sequence
  source 1..20: mol_type = other RNA
cagggatgtggcagagaaat

SEQ ID NO: 17529 - RNA, 20 nt, synthetic construct
  misc_feature 1..20: note = antisense sequence
  source 1..20: mol_type = other RNA
ttcagggatgtggcagagaa

SEQ ID NO: 17530 - RNA, 20 nt, synthetic construct
  misc_feature 1..20: note = antisense sequence
  source 1..20: mol_type = other RNA
tttcagggatgtggcagaga

SEQ ID NO: 17531 - RNA, 20 nt, synthetic construct
  misc_feature 1..20: note = antisense sequence
  source 1..20: mol_type = other RNA
ctagcattgtctcttctttg

SEQ ID NO: 17532 - RNA, 20 nt, synthetic construct
  misc_feature 1..20: note = antisense sequence
  source 1..20: mol_type = other RNA
gagacaaactgcaattagct

SEQ ID NO: 17533 - RNA, 20 nt, synthetic construct
  misc_feature 1..20: note = antisense sequence
  source 1..20: mol_type = other RNA
ggagacaaactgcaattagc

SEQ ID NO: 17534 - RNA, 20 nt, synthetic construct
  misc_feature 1..20: note = antisense sequence
  source 1..20: mol_type = other RNA
gggagacaaactgcaattag

SEQ ID NO: 17535 - RNA, 20 nt, synthetic construct
  misc_feature 1..20: note = antisense sequence
  source 1..20: mol_type = other RNA
tgggagacaaactgcaatta

SEQ ID NO: 17536 - RNA, 20 nt, synthetic construct
  misc_feature 1..20: note = antisense sequence
  source 1..20: mol_type = other RNA
ttgggagacaaactgcaatt

SEQ ID NO: 17537 - RNA, 20 nt, synthetic construct
  misc_feature 1..20: note = antisense sequence
  source 1..20: mol_type = other RNA
ctgggattacaggcgtgagc

SEQ ID NO: 17538 - RNA, 20 nt, synthetic construct
  misc_feature 1..20: note = antisense sequence
  source 1..20: mol_type = other RNA
gctgggattacaggcgtgag

SEQ ID NO: 17539 - RNA, 20 nt, synthetic construct
  misc_feature 1..20: note = antisense sequence
  source 1..20: mol_type = other RNA
tgctgggattacaggcgtga

SEQ ID NO: 17540 - RNA, 20 nt, synthetic construct
  misc_feature 1..20: note = antisense sequence
  source 1..20: mol_type = other RNA
gtgctgggattacaggcgtg

SEQ ID NO: 17541 - RNA, 20 nt, synthetic construct
  misc_feature 1..20: note = antisense sequence
  source 1..20: mol_type = other RNA
agtgctgggattacaggcgt

SEQ ID NO: 17542 - RNA, 20 nt, synthetic construct
  misc_feature 1..20: note = antisense sequence
  source 1..20: mol_type = other RNA
aagtgctgggattacaggcg

SEQ ID NO: 17543 - RNA, 20 nt, synthetic construct
  misc_feature 1..20: note = antisense sequence
  source 1..20: mol_type = other RNA
aaagtgctgggattacaggc

SEQ ID NO: 17544 - RNA, 20 nt, synthetic construct
  misc_feature 1..20: note = antisense sequence
  source 1..20: mol_type = other RNA
caaagtgctgggattacagg

SEQ ID NO: 17545 - RNA, 20 nt, synthetic construct
  misc_feature 1..20: note = antisense sequence
  source 1..20: mol_type = other RNA
ccaaagtgctgggattacag

SEQ ID NO: 17546 - RNA, 20 nt, synthetic construct
  misc_feature 1..20: note = antisense sequence
  source 1..20: mol_type = other RNA
ggccaggatggtctctatct

SEQ ID NO: 17547 - RNA, 20 nt, synthetic construct
  misc_feature 1..20: note = antisense sequence
  source 1..20: mol_type = other RNA
caccatgcccagctaatttt

SEQ ID NO: 17548 - RNA, 20 nt, synthetic construct
  misc_feature 1..20: note = antisense sequence
  source 1..20: mol_type = other RNA
ccaccatgcccagctaattt

SEQ ID NO: 17549 - RNA, 20 nt, synthetic construct
  misc_feature 1..20: note = antisense sequence
  source 1..20: mol_type = other RNA
accaccatgcccagctaatt

SEQ ID NO: 17550 - RNA, 20 nt, synthetic construct
  misc_feature 1..20: note = antisense sequence
  source 1..20: mol_type = other RNA
caccaccatgcccagctaat

SEQ ID NO: 17551 - RNA, 20 nt, synthetic construct
  misc_feature 1..20: note = antisense sequence
  source 1..20: mol_type = other RNA
gcaccaccatgcccagctaa

SEQ ID NO: 17552 - RNA, 20 nt, synthetic construct
  misc_feature 1..20: note = antisense sequence
  source 1..20: mol_type = other RNA
tgcaccaccatgcccagcta

SEQ ID NO: 17553 - RNA, 20 nt, synthetic construct
  misc_feature 1..20: note = antisense sequence
  source 1..20: mol_type = other RNA
atgcaccaccatgcccagct

SEQ ID NO: 17554 - RNA, 20 nt, synthetic construct
  misc_feature 1..20: note = antisense sequence
  source 1..20: mol_type = other RNA
ttctcctgcctcagcctcct

SEQ ID NO: 17555 - RNA, 20 nt, synthetic construct
  misc_feature 1..20: note = antisense sequence
  source 1..20: mol_type = other RNA
attctcctgcctcagcctcc

SEQ ID NO: 17556 - RNA, 20 nt, synthetic construct
  misc_feature 1..20: note = antisense sequence
  source 1..20: mol_type = other RNA
gattctcctgcctcagcctc

SEQ ID NO: 17557 - RNA, 20 nt, synthetic construct
  misc_feature 1..20: note = antisense sequence
  source 1..20: mol_type = other RNA
tgattctcctgcctcagcct

SEQ ID NO: 17558 - RNA, 20 nt, synthetic construct
  misc_feature 1..20: note = antisense sequence
  source 1..20: mol_type = other RNA
gtgattctcctgcctcagcc

SEQ ID NO: 17559 - RNA, 20 nt, synthetic construct
  misc_feature 1..20: note = antisense sequence
  source 1..20: mol_type = other RNA
agtgattctcctgcctcagc

SEQ ID NO: 17560 - RNA, 20 nt, synthetic construct
  misc_feature 1..20: note = antisense sequence
  source 1..20: mol_type = other RNA
aagtgattctcctgcctcag

SEQ ID NO: 17561 - RNA, 20 nt, synthetic construct
  misc_feature 1..20: note = antisense sequence
  source 1..20: mol_type = other RNA
caagtgattctcctgcctca

SEQ ID NO: 17562 - RNA, 20 nt, synthetic construct
  misc_feature 1..20: note = antisense sequence
  source 1..20: mol_type = other RNA
tcaagtgattctcctgcctc

SEQ ID NO: 17563 - RNA, 20 nt, synthetic construct
  misc_feature 1..20: note = antisense sequence
  source 1..20: mol_type = other RNA
ttcaagtgattctcctgcct

SEQ ID NO: 17564 - RNA, 20 nt, synthetic construct
  misc_feature 1..20: note = antisense sequence
  source 1..20: mol_type = other RNA
gttcaagtgattctcctgcc

SEQ ID NO: 17565 - RNA, 20 nt, synthetic construct
  misc_feature 1..20: note = antisense sequence
  source 1..20: mol_type = other RNA
ggttcaagtgattctcctgc

SEQ ID NO: 17566 - RNA, 20 nt, synthetic construct
  misc_feature 1..20: note = antisense sequence
  source 1..20: mol_type = other RNA
gggttcaagtgattctcctg

SEQ ID NO: 17567 - RNA, 20 nt, synthetic construct
  misc_feature 1..20: note = antisense sequence
  source 1..20: mol_type = other RNA
cgggttcaagtgattctcct

SEQ ID NO: 17568 - RNA, 20 nt, synthetic construct
  misc_feature 1..20: note = antisense sequence
  source 1..20: mol_type = other RNA
ccgggttcaagtgattctcc

SEQ ID NO: 17569 - RNA, 20 nt, synthetic construct
  misc_feature 1..20: note = antisense sequence
  source 1..20: mol_type = other RNA
tctccgctcactgcaacctc

SEQ ID NO: 17570 - RNA, 20 nt, synthetic construct
  misc_feature 1..20: note = antisense sequence
  source 1..20: mol_type = other RNA
agtgcagtggcgtgatctcc

SEQ ID NO: 17571 - RNA, 20 nt, synthetic construct
  misc_feature 1..20: note = antisense sequence
  source 1..20: mol_type = other RNA
gagtgcagtggcgtgatctc

SEQ ID NO: 17572 - RNA, 20 nt, synthetic construct
  misc_feature 1..20: note = antisense sequence
  source 1..20: mol_type = other RNA
ggagtgcagtggcgtgatct

SEQ ID NO: 17573 - RNA, 20 nt, synthetic construct
  misc_feature 1..20: note = antisense sequence
  source 1..20: mol_type = other RNA
tggagtgcagtggcgtgatc

SEQ ID NO: 17574 - RNA, 20 nt, synthetic construct
  misc_feature 1..20: note = antisense sequence
  source 1..20: mol_type = other RNA
ctggagtgcagtggcgtgat

SEQ ID NO: 17575 - RNA, 20 nt, synthetic construct
  misc_feature 1..20: note = antisense sequence
  source 1..20: mol_type = other RNA
tcaccaggctggagtgcagt

SEQ ID NO: 17576 - RNA, 20 nt, synthetic construct
  misc_feature 1..20: note = antisense sequence
  source 1..20: mol_type = other RNA
tgtcaccaggctggagtgca

SEQ ID NO: 17577 - RNA, 20 nt, synthetic construct
  misc_feature 1..20: note = antisense sequence
  source 1..20: mol_type = other RNA
tctcactctgtcaccaggct

SEQ ID NO: 17578 - RNA, 20 nt, synthetic construct
  misc_feature 1..20: note = antisense sequence
  source 1..20: mol_type = other RNA
gtctcactctgtcaccaggc

SEQ ID NO: 17579 - RNA, 20 nt, synthetic construct
  misc_feature 1..20: note = antisense sequence
  source 1..20: mol_type = other RNA
agtctcactctgtcaccagg

SEQ ID NO: 17580 - RNA, 20 nt, synthetic construct
  misc_feature 1..20: note = antisense sequence
  source 1..20: mol_type = other RNA
cagtctcactctgtcaccag

SEQ ID NO: 17581 - RNA, 20 nt, synthetic construct
  misc_feature 1..20: note = antisense sequence
  source 1..20: mol_type = other RNA
ctgggcacacaactaatata

SEQ ID NO: 17582 - RNA, 20 nt, synthetic construct
  misc_feature 1..20: note = antisense sequence
  source 1..20: mol_type = other RNA
tgctgggcacacaactaata

SEQ ID NO: 17583 - RNA, 20 nt, synthetic construct
  misc_feature 1..20: note = antisense sequence
  source 1..20: mol_type = other RNA
atgctgggcacacaactaat

SEQ ID NO: 17584 - RNA, 20 nt, synthetic construct
  misc_feature 1..20: note = antisense sequence
  source 1..20: mol_type = other RNA
gcaatgctgggcacacaact

SEQ ID NO: 17585 - RNA, 20 nt, synthetic construct
  misc_feature 1..20: note = antisense sequence
  source 1..20: mol_type = other RNA
ggcaatgctgggcacacaac

SEQ ID NO: 17586 - RNA, 20 nt, synthetic construct
  misc_feature 1..20: note = antisense sequence
  source 1..20: mol_type = other RNA
gtatattggcaatgctgggc

SEQ ID NO: 17587 - RNA, 20 nt, synthetic construct
  misc_feature 1..20: note = antisense sequence
  source 1..20: mol_type = other RNA
agtatattggcaatgctggg

SEQ ID NO: 17588 - RNA, 20 nt, synthetic construct
  misc_feature 1..20: note = antisense sequence
  source 1..20: mol_type = other RNA
tagtatattggcaatgctgg

SEQ ID NO: 17589 - RNA, 20 nt, synthetic construct
  misc_feature 1..20: note = antisense sequence
  source 1..20: mol_type = other RNA
ggcaaacctgaggatagatt

SEQ ID NO: 17590 - RNA, 20 nt, synthetic construct
  misc_feature 1..20: note = antisense sequence
  source 1..20: mol_type = other RNA
aggcaaacctgaggatagat

SEQ ID NO: 17591 - RNA, 20 nt, synthetic construct
  misc_feature 1..20: note = antisense sequence
  source 1..20: mol_type = other RNA
gaggcaaacctgaggataga

SEQ ID NO: 17592 - RNA, 20 nt, synthetic construct
  misc_feature 1..20: note = antisense sequence
  source 1..20: mol_type = other RNA
ttgaggcaaacctgaggata

SEQ ID NO: 17593 - RNA, 20 nt, synthetic construct
  misc_feature 1..20: note = antisense sequence
  source 1..20: mol_type = other RNA
cttgtcacatatttgaggca

SEQ ID NO: 17594 - RNA, 20 nt, synthetic construct
  misc_feature 1..20: note = antisense sequence
  source 1..20: mol_type = other RNA
tcttgtcacatatttgaggc

SEQ ID NO: 17595 - RNA, 20 nt, synthetic construct
  misc_feature 1..20: note = antisense sequence
  source 1..20: mol_type = other RNA
ccctgatggattacatagtt

SEQ ID NO: 17596 - RNA, 20 nt, synthetic construct
  misc_feature 1..20: note = antisense sequence
  source 1..20: mol_type = other RNA
tccctgatggattacatagt

SEQ ID NO: 17597 - RNA, 20 nt, synthetic construct
  misc_feature 1..20: note = antisense sequence
  source 1..20: mol_type = other RNA
agtaatgaatccctgatgga

SEQ ID NO: 17598 - RNA, 20 nt, synthetic construct
  misc_feature 1..20: note = antisense sequence
  source 1..20: mol_type = other RNA
aagtaatgaatccctgatgg

SEQ ID NO: 17599 - RNA, 20 nt, synthetic construct
  misc_feature 1..20: note = antisense sequence
  source 1..20: mol_type = other RNA
caagtaatgaatccctgatg

SEQ ID NO: 17600 - RNA, 20 nt, synthetic construct
  misc_feature 1..20: note = antisense sequence
  source 1..20: mol_type = other RNA
ccaagtaatgaatccctgat

SEQ ID NO: 17601 - RNA, 20 nt, synthetic construct
  misc_feature 1..20: note = antisense sequence
  source 1..20: mol_type = other RNA
tccaagtaatgaatccctga

SEQ ID NO: 17602 - RNA, 20 nt, synthetic construct
  misc_feature 1..20: note = antisense sequence
  source 1..20: mol_type = other RNA
ttccaagtaatgaatccctg

SEQ ID NO: 17603 - RNA, 20 nt, synthetic construct
  misc_feature 1..20: note = antisense sequence
  source 1..20: mol_type = other RNA
gacctgtcattttccaagta

SEQ ID NO: 17604 - RNA, 20 nt, synthetic construct
  misc_feature 1..20: note = antisense sequence
  source 1..20: mol_type = other RNA
ctgactgtcatgctgaacat

SEQ ID NO: 17605 - RNA, 20 nt, synthetic construct
  misc_feature 1..20: note = antisense sequence
  source 1..20: mol_type = other RNA
gctgactgtcatgctgaaca

SEQ ID NO: 17606 - RNA, 20 nt, synthetic construct
  misc_feature 1..20: note = antisense sequence
  source 1..20: mol_type = other RNA
tgctgactgtcatgctgaac

SEQ ID NO: 17607 - RNA, 20 nt, synthetic construct
  misc_feature 1..20: note = antisense sequence
  source 1..20: mol_type = other RNA
gtgctgactgtcatgctgaa

SEQ ID NO: 17608 - RNA, 20 nt, synthetic construct
  misc_feature 1..20: note = antisense sequence
  source 1..20: mol_type = other RNA
cccaacacaaagatgctaaa

SEQ ID NO: 17609 - RNA, 20 nt, synthetic construct
  misc_feature 1..20: note = antisense sequence
  source 1..20: mol_type = other RNA
aacccaacacaaagatgcta

SEQ ID NO: 17610 - RNA, 20 nt, synthetic construct
  misc_feature 1..20: note = antisense sequence
  source 1..20: mol_type = other RNA
agaacccaacacaaagatgc

SEQ ID NO: 17611 - RNA, 20 nt, synthetic construct
  misc_feature 1..20: note = antisense sequence
  source 1..20: mol_type = other RNA
tagaacccaacacaaagatg

SEQ ID NO: 17612 - RNA, 20 nt, synthetic construct
  misc_feature 1..20: note = antisense sequence
  source 1..20: mol_type = other RNA
gtatagaacccaacacaaag

SEQ ID NO: 17613 - RNA, 20 nt, synthetic construct
  misc_feature 1..20: note = antisense sequence
  source 1..20: mol_type = other RNA
taggtatagaacccaacaca

SEQ ID NO: 17614 - RNA, 20 nt, synthetic construct
  misc_feature 1..20: note = antisense sequence
  source 1..20: mol_type = other RNA
ttaggtatagaacccaacac

SEQ ID NO: 17615 - RNA, 20 nt, synthetic construct
  misc_feature 1..20: note = antisense sequence
  source 1..20: mol_type = other RNA
gaagccattttagcatgtcc

SEQ ID NO: 17616 - RNA, 20 nt, synthetic construct
  misc_feature 1..20: note = antisense sequence
  source 1..20: mol_type = other RNA
tcagaagccattttagcatg

SEQ ID NO: 17617 - RNA, 20 nt, synthetic construct
  misc_feature 1..20: note = antisense sequence
  source 1..20: mol_type = other RNA
gtcgtatttcattcagaagc

SEQ ID NO: 17618 - RNA, 20 nt, synthetic construct
  misc_feature 1..20: note = antisense sequence
  source 1..20: mol_type = other RNA
gctgtcgtatttcattcaga

SEQ ID NO: 17619 - RNA, 20 nt, synthetic construct
  misc_feature 1..20: note = antisense sequence
  source 1..20: mol_type = other RNA
tgctgtcgtatttcattcag

SEQ ID NO: 17620 - RNA, 20 nt, synthetic construct
  misc_feature 1..20: note = antisense sequence
  source 1..20: mol_type = other RNA
ctgctgtcgtatttcattca

SEQ ID NO: 17621 - RNA, 20 nt, synthetic construct
  misc_feature 1..20: note = antisense sequence
  source 1..20: mol_type = other RNA
tctgctgtcgtatttcattc

SEQ ID NO: 17622 - RNA, 20 nt, synthetic construct
  misc_feature 1..20: note = antisense sequence
  source 1..20: mol_type = other RNA
ctctgctgtcgtatttcatt

SEQ ID NO: 17623 - RNA, 20 nt, synthetic construct
  misc_feature 1..20: note = antisense sequence
  source 1..20: mol_type = other RNA
ttctctgctgtcgtatttca

SEQ ID NO: 17624 - RNA, 20 nt, synthetic construct
  misc_feature 1..20: note = antisense sequence
  source 1..20: mol_type = other RNA
tttctctgctgtcgtatttc

SEQ ID NO: 17625 - RNA, 20 nt, synthetic construct
  misc_feature 1..20: note = antisense sequence
  source 1..20: mol_type = other RNA
tctttctctgctgtcgtatt

SEQ ID NO: 17626 - RNA, 20 nt, synthetic construct
  misc_feature 1..20: note = antisense sequence
  source 1..20: mol_type = other RNA
gcatctttctctgctgtcgt

SEQ ID NO: 17627 - RNA, 20 nt, synthetic construct
  misc_feature 1..20: note = antisense sequence
  source 1..20: mol_type = other RNA
ggcatctttctctgctgtcg

SEQ ID NO: 17628 - RNA, 20 nt, synthetic construct
  misc_feature 1..20: note = antisense sequence
  source 1..20: mol_type = other RNA
agctgctcagcaaagataat

SEQ ID NO: 17629 - RNA, 20 nt, synthetic construct
  misc_feature 1..20: note = antisense sequence
  source 1..20: mol_type = other RNA
aagctgctcagcaaagataa

SEQ ID NO: 17630 - RNA, 20 nt, synthetic construct
  misc_feature 1..20: note = antisense sequence
  source 1..20: mol_type = other RNA
tcaaaagctgctcagcaaag

SEQ ID NO: 17631 - RNA, 20 nt, synthetic construct
  misc_feature 1..20: note = antisense sequence
  source 1..20: mol_type = other RNA
tttgggtcacatactggaac

SEQ ID NO: 17632 - RNA, 20 nt, synthetic construct
  misc_feature 1..20: note = antisense sequence
  source 1..20: mol_type = other RNA
tctttgggtcacatactgga

SEQ ID NO: 17633 - RNA, 20 nt, synthetic construct
  misc_feature 1..20: note = antisense sequence
  source 1..20: mol_type = other RNA
ttctttgggtcacatactgg

SEQ ID NO: 17634 - RNA, 20 nt, synthetic construct
  misc_feature 1..20: note = antisense sequence
  source 1..20: mol_type = other RNA
tgtaccaaggagttgagaca

SEQ ID NO: 17635 - RNA, 20 nt, synthetic construct
  misc_feature 1..20: note = antisense sequence
  source 1..20: mol_type = other RNA
cctgtaccaaggagttgaga

SEQ ID NO: 17636 - RNA, 20 nt, synthetic construct
  misc_feature 1..20: note = antisense sequence
  source 1..20: mol_type = other RNA
ccctgtaccaaggagttgag

SEQ ID NO: 17637 - RNA, 20 nt, synthetic construct
  misc_feature 1..20: note = antisense sequence
  source 1..20: mol_type = other RNA
aaccctgtaccaaggagttg

SEQ ID NO: 17638 - RNA, 20 nt, synthetic construct
  misc_feature 1..20: note = antisense sequence
  source 1..20: mol_type = other RNA
tgaatgaaccctgtaccaag

SEQ ID NO: 17639 - RNA, 20 nt, synthetic construct
  misc_feature 1..20: note = antisense sequence
  source 1..20: mol_type = other RNA
ttgaatgaaccctgtaccaa

SEQ ID NO: 17640 - RNA, 20 nt, synthetic construct
  misc_feature 1..20: note = antisense sequence
  source 1..20: mol_type = other RNA
tttgaatgaaccctgtacca

SEQ ID NO: 17641 - RNA, 20 nt, synthetic construct
  misc_feature 1..20: note = antisense sequence
  source 1..20: mol_type = other RNA
gtttgaatgaaccctgtacc

SEQ ID NO: 17642 - RNA, 20 nt, synthetic construct
  misc_feature 1..20: note = antisense sequence
  source 1..20: mol_type = other RNA
aacacactctcacagcttgg

SEQ ID NO: 17643 - RNA, 20 nt, synthetic construct
  misc_feature 1..20: note = antisense sequence
  source 1..20: mol_type = other RNA
aaacacactctcacagcttg

SEQ ID NO: 17644 - RNA, 20 nt, synthetic construct
  misc_feature 1..20: note = antisense sequence
  source 1..20: mol_type = other RNA
gcagtgacttcttggtaaaa

SEQ ID NO: 17645 - RNA, 20 nt, synthetic construct
  misc_feature 1..20: note = antisense sequence
  source 1..20: mol_type = other RNA
agcagtgacttcttggtaaa

SEQ ID NO: 17646 - RNA, 20 nt, synthetic construct
  misc_feature 1..20: note = antisense sequence
  source 1..20: mol_type = other RNA
aagcagtgacttcttggtaa

SEQ ID NO: 17647 - RNA, 20 nt, synthetic construct
  misc_feature 1..20: note = antisense sequence
  source 1..20: mol_type = other RNA
acagtagattccaatgaacc

SEQ ID NO: 17648 - RNA, 20 nt, synthetic construct
  misc_feature 1..20: note = antisense sequence
  source 1..20: mol_type = other RNA
gctacagtagattccaatga

SEQ ID NO: 17649 - RNA, 20 nt, synthetic construct
  misc_feature 1..20: note = antisense sequence
  source 1..20: mol_type = other RNA
tgctacagtagattccaatg

SEQ ID NO: 17650 - RNA, 20 nt, synthetic construct
  misc_feature 1..20: note = antisense sequence
  source 1..20: mol_type = other RNA
cttatgctacagtagattcc

SEQ ID NO: 17651 - RNA, 20 nt, synthetic construct
  misc_feature 1..20: note = antisense sequence
  source 1..20: mol_type = other RNA
gcttatgctacagtagattc

SEQ ID NO: 17652 - RNA, 20 nt, synthetic construct
  misc_feature 1..20: note = antisense sequence
  source 1..20: mol_type = other RNA
gagcttatgctacagtagat

SEQ ID NO: 17653 - RNA, 20 nt, synthetic construct
  misc_feature 1..20: note = antisense sequence
  source 1..20: mol_type = other RNA
ggagcttatgctacagtaga

SEQ ID NO: 17654 - RNA, 20 nt, synthetic construct
  misc_feature 1..20: note = antisense sequence
  source 1..20: mol_type = other RNA
ctaggagcttatgctacagt

SEQ ID NO: 17655 - RNA, 20 nt, synthetic construct
  misc_feature 1..20: note = antisense sequence
  source 1..20: mol_type = other RNA
ttacagcagtagttcacaca

SEQ ID NO: 17656 - RNA, 20 nt, synthetic construct
  misc_feature 1..20: note = antisense sequence
  source 1..20: mol_type = other RNA
tttacagcagtagttcacac

SEQ ID NO: 17657 - RNA, 20 nt, synthetic construct
  misc_feature 1..20: note = antisense sequence
  source 1..20: mol_type = other RNA
ctttacagcagtagttcaca

SEQ ID NO: 17658 - RNA, 20 nt, synthetic construct
  misc_feature 1..20: note = antisense sequence
  source 1..20: mol_type = other RNA
actttacagcagtagttcac

SEQ ID NO: 17659 - RNA, 20 nt, synthetic construct
  misc_feature 1..20: note = antisense sequence
  source 1..20: mol_type = other RNA
agcaaactttacagcagtag

SEQ ID NO: 17660 - RNA, 20 nt, synthetic construct
  misc_feature 1..20: note = antisense sequence
  source 1..20: mol_type = other RNA
cagcaaactttacagcagta

SEQ ID NO: 17661 - RNA, 20 nt, synthetic construct
  misc_feature 1..20: note = antisense sequence
  source 1..20: mol_type = other RNA
atgtcagcaaactttacagc

SEQ ID NO: 17662 - RNA, 20 nt, synthetic construct
  misc_feature 1..20: note = antisense sequence
  source 1..20: mol_type = other RNA
ggagaaatgttgttgcagaa

SEQ ID NO: 17663 - RNA, 20 nt, synthetic construct
  misc_feature 1..20: note = antisense sequence
  source 1..20: mol_type = other RNA
tggagaaatgttgttgcaga

SEQ ID NO: 17664 - RNA, 20 nt, synthetic construct
  misc_feature 1..20: note = antisense sequence
  source 1..20: mol_type = other RNA
tacaggttctggtaaatcag

SEQ ID NO: 17665 - RNA, 20 nt, synthetic construct
  misc_feature 1..20: note = antisense sequence
  source 1..20: mol_type = other RNA
tcttgttacaggttctggta

SEQ ID NO: 17666 - RNA, 20 nt, synthetic construct
  misc_feature 1..20: note = antisense sequence
  source 1..20: mol_type = other RNA
gtcttgttacaggttctggt

SEQ ID NO: 17667 - RNA, 20 nt, synthetic construct
  misc_feature 1..20: note = antisense sequence
  source 1..20: mol_type = other RNA
ggtcttgttacaggttctgg

SEQ ID NO: 17668 - RNA, 20 nt, synthetic construct
  misc_feature 1..20: note = antisense sequence
  source 1..20: mol_type = other RNA
tggtcttgttacaggttctg

SEQ ID NO: 17669 - RNA, 20 nt, synthetic construct
  misc_feature 1..20: note = antisense sequence
  source 1..20: mol_type = other RNA
ctggtcttgttacaggttct

SEQ ID NO: 17670 - RNA, 20 nt, synthetic construct
  misc_feature 1..20: note = antisense sequence
  source 1..20: mol_type = other RNA
tctggtcttgttacaggttc

SEQ ID NO: 17671 - RNA, 20 nt, synthetic construct
  misc_feature 1..20: note = antisense sequence
  source 1..20: mol_type = other RNA
agcagagcccaggagtttct

SEQ ID NO: 17672 - RNA, 20 nt, synthetic construct
  misc_feature 1..20: note = antisense sequence
  source 1..20: mol_type = other RNA
aaagcagagcccaggagttt

SEQ ID NO: 17673 - RNA, 20 nt, synthetic construct
  misc_feature 1..20: note = antisense sequence
  source 1..20: mol_type = other RNA
caaagcagagcccaggagtt

SEQ ID NO: 17674 - RNA, 20 nt, synthetic construct
  misc_feature 1..20: note = antisense sequence
  source 1..20: mol_type = other RNA
acaaagcagagcccaggagt

SEQ ID NO: 17675 - RNA, 20 nt, synthetic construct
  misc_feature 1..20: note = antisense sequence
  source 1..20: mol_type = other RNA
aacaaagcagagcccaggag

SEQ ID NO: 17676 - RNA, 20 nt, synthetic construct
  misc_feature 1..20: note = antisense sequence
  source 1..20: mol_type = other RNA
tgaacaaagcagagcccagg

SEQ ID NO: 17677 - RNA, 20 nt, synthetic construct
  misc_feature 1..20: note = antisense sequence
  source 1..20: mol_type = other RNA
gtggatttgctcctctttga

SEQ ID NO: 17678 - RNA, 20 nt, synthetic construct
  misc_feature 1..20: note = antisense sequence
  source 1..20: mol_type = other RNA
atgtggatttgctcctcttt

SEQ ID NO: 17679 - RNA, 20 nt, synthetic construct
  misc_feature 1..20: note = antisense sequence
  source 1..20: mol_type = other RNA
tatgtggatttgctcctctt

SEQ ID NO: 17680 - RNA, 20 nt, synthetic construct
  misc_feature 1..20: note = antisense sequence
  source 1..20: mol_type = other RNA
ttctatgtggatttgctcct

SEQ ID NO: 17681 - RNA, 20 nt, synthetic construct
  misc_feature 1..20: note = antisense sequence
  source 1..20: mol_type = other RNA
gaggtaggctgactctgagt

SEQ ID NO: 17682 - RNA, 20 nt, synthetic construct
  misc_feature 1..20: note = antisense sequence
  source 1..20: mol_type = other RNA
gagagtcaagaggtaggctg

SEQ ID NO: 17683 - RNA, 20 nt, synthetic construct
  misc_feature 1..20: note = antisense sequence
  source 1..20: mol_type = other RNA
ggagagtcaagaggtaggct

SEQ ID NO: 17684 - RNA, 20 nt, synthetic construct
  misc_feature 1..20: note = antisense sequence
  source 1..20: mol_type = other RNA
tggagagtcaagaggtaggc

SEQ ID NO: 17685 - RNA, 20 nt, synthetic construct
  misc_feature 1..20: note = antisense sequence
  source 1..20: mol_type = other RNA
tgtggagagtcaagaggtag

SEQ ID NO: 17686 - RNA, 20 nt, synthetic construct
  misc_feature 1..20: note = antisense sequence
  source 1..20: mol_type = other RNA
gatgtggagagtcaagaggt

SEQ ID NO: 17687 - RNA, 20 nt, synthetic construct
  misc_feature 1..20: note = antisense sequence
  source 1..20: mol_type = other RNA
ttggccttcaggatcttaga

SEQ ID NO: 17688 - RNA, 20 nt, synthetic construct
  misc_feature 1..20: note = antisense sequence
  source 1..20: mol_type = other RNA
tttggccttcaggatcttag

SEQ ID NO: 17689 - RNA, 20 nt, synthetic construct
  misc_feature 1..20: note = antisense sequence
  source 1..20: mol_type = other RNA
ctttggccttcaggatctta

SEQ ID NO: 17690 - RNA, 20 nt, synthetic construct
  misc_feature 1..20: note = antisense sequence
  source 1..20: mol_type = other RNA
tggctttggcatcccacagg

SEQ ID NO: 17691 - RNA, 20 nt, synthetic construct
  misc_feature 1..20: note = antisense sequence
  source 1..20: mol_type = other RNA
atggctttggcatcccacag

SEQ ID NO: 17692 - RNA, 20 nt, synthetic construct
  misc_feature 1..20: note = antisense sequence
  source 1..20: mol_type = other RNA
cagctactgatggctttggc

SEQ ID NO: 17693 - RNA, 20 nt, synthetic construct
  misc_feature 1..20: note = antisense sequence
  source 1..20: mol_type = other RNA
ccagctactgatggctttgg

SEQ ID NO: 17694 - RNA, 20 nt, synthetic construct
  misc_feature 1..20: note = antisense sequence
  source 1..20: mol_type = other RNA
tccagctactgatggctttg

SEQ ID NO: 17695 - RNA, 20 nt, synthetic construct
  misc_feature 1..20: note = antisense sequence
  source 1..20: mol_type = other RNA
ttctttcttccagctactga

SEQ ID NO: 17696 - RNA, 20 nt, synthetic construct
  misc_feature 1..20: note = antisense sequence
  source 1..20: mol_type = other RNA
cagcaagaggacaccaaacc

SEQ ID NO: 17697 - RNA, 20 nt, synthetic construct
  misc_feature 1..20: note = antisense sequence
  source 1..20: mol_type = other RNA
ccagcaagaggacaccaaac

SEQ ID NO: 17698 - RNA, 20 nt, synthetic construct
  misc_feature 1..20: note = antisense sequence
  source 1..20: mol_type = other RNA
gacaggccagcaagaggaca

SEQ ID NO: 17699 - RNA, 20 nt, synthetic construct
  misc_feature 1..20: note = antisense sequence
  source 1..20: mol_type = other RNA
aatgacaggccagcaagagg

SEQ ID NO: 17700 - RNA, 20 nt, synthetic construct
  misc_feature 1..20: note = antisense sequence
  source 1..20: mol_type = other RNA
ataatgacaggccagcaaga

SEQ ID NO: 17701 - RNA, 20 nt, synthetic construct
  misc_feature 1..20: note = antisense sequence
  source 1..20: mol_type = other RNA
aataatgacaggccagcaag

SEQ ID NO: 17702 - RNA, 20 nt, synthetic construct
  misc_feature 1..20: note = antisense sequence
  source 1..20: mol_type = other RNA
tccaaataatgacaggccag

SEQ ID NO: 17703 - RNA, 20 nt, synthetic construct
  misc_feature 1..20: note = antisense sequence
  source 1..20: mol_type = other RNA
ttccaaataatgacaggcca

SEQ ID NO: 17704 - RNA, 20 nt, synthetic construct
  misc_feature 1..20: note = antisense sequence
  source 1..20: mol_type = other RNA
tttccaaataatgacaggcc

SEQ ID NO: 17705 - RNA, 20 nt, synthetic construct
  misc_feature 1..20: note = antisense sequence
  source 1..20: mol_type = other RNA
ggaaatagcgaaaatgaagg

SEQ ID NO: 17706 - RNA, 20 nt, synthetic construct
  misc_feature 1..20: note = antisense sequence
  source 1..20: mol_type = other RNA
cctggaaatagcgaaaatga

SEQ ID NO: 17707 - RNA, 20 nt, synthetic construct
  misc_feature 1..20: note = antisense sequence
  source 1..20: mol_type = other RNA
acctggaaatagcgaaaatg

SEQ ID NO: 17708 - RNA, 20 nt, synthetic construct
  misc_feature 1..20: note = antisense sequence
  source 1..20: mol_type = other RNA
gaacctggaaatagcgaaaa

SEQ ID NO: 17709 - RNA, 20 nt, synthetic construct
  misc_feature 1..20: note = antisense sequence
  source 1..20: mol_type = other RNA
tgaacctggaaatagcgaaa

SEQ ID NO: 17710 - RNA, 20 nt, synthetic construct
  misc_feature 1..20: note = antisense sequence
  source 1..20: mol_type = other RNA
ctgaacctggaaatagcgaa

SEQ ID NO: 17711 - RNA, 20 nt, synthetic construct
  misc_feature 1..20: note = antisense sequence
  source 1..20: mol_type = other RNA
tctgaacctggaaatagcga

SEQ ID NO: 17712 - RNA, 20 nt, synthetic construct
  misc_feature 1..20: note = antisense sequence
  source 1..20: mol_type = other RNA
ggtaggtatgatttctgaac

SEQ ID NO: 17713 - RNA, 20 nt, synthetic construct
  misc_feature 1..20: note = antisense sequence
  source 1..20: mol_type = other RNA
agtggtaggtatgatttctg

SEQ ID NO: 17714 - RNA, 20 nt, synthetic construct
  misc_feature 1..20: note = antisense sequence
  source 1..20: mol_type = other RNA
caagtggtaggtatgatttc

SEQ ID NO: 17715 - RNA, 20 nt, synthetic construct
  misc_feature 1..20: note = antisense sequence
  source 1..20: mol_type = other RNA
gaacaagtggtaggtatgat

SEQ ID NO: 17716 - RNA, 20 nt, synthetic construct
  misc_feature 1..20: note = antisense sequence
  source 1..20: mol_type = other RNA
agaacaagtggtaggtatga

SEQ ID NO: 17717 - RNA, 20 nt, synthetic construct
  misc_feature 1..20: note = antisense sequence
  source 1..20: mol_type = other RNA
aagaacaagtggtaggtatg

SEQ ID NO: 17718 - RNA, 20 nt, synthetic construct
  misc_feature 1..20: note = antisense sequence
  source 1..20: mol_type = other RNA
aagaaagaacaagtggtagg

SEQ ID NO: 17719 - RNA, 20 nt, synthetic construct
  misc_feature 1..20: note = antisense sequence
  source 1..20: mol_type = other RNA
gttttactgggcaaagaaag

SEQ ID NO: 17720 - RNA, 20 nt, synthetic construct
  misc_feature 1..20: note = antisense sequence
  source 1..20: mol_type = other RNA
tgagttttactgggcaaaga

SEQ ID NO: 17721 - RNA, 20 nt, synthetic construct
  misc_feature 1..20: note = antisense sequence
  source 1..20: mol_type = other RNA
ctgagttttactgggcaaag

SEQ ID NO: 17722 - RNA, 20 nt, synthetic construct
  misc_feature 1..20: note = antisense sequence
  source 1..20: mol_type = other RNA
ccctgagttttactgggcaa

SEQ ID NO: 17723 - RNA, 20 nt, synthetic construct
  misc_feature 1..20: note = antisense sequence
  source 1..20: mol_type = other RNA
aaccctgagttttactgggc

SEQ ID NO: 17724 - RNA, 20 nt, synthetic construct
  misc_feature 1..20: note = antisense sequence
  source 1..20: mol_type = other RNA
ctgaataagagaaaccctga

SEQ ID NO: 17725 - RNA, 20 nt, synthetic construct
  misc_feature 1..20: note = antisense sequence
  source 1..20: mol_type = other RNA
tctgaataagagaaaccctg

SEQ ID NO: 17726 - RNA, 20 nt, synthetic construct
  misc_feature 1..20: note = antisense sequence
  source 1..20: mol_type = other RNA
tgcaacatggtaactctgaa

SEQ ID NO: 17727 - RNA, 20 nt, synthetic construct
  misc_feature 1..20: note = antisense sequence
  source 1..20: mol_type = other RNA
gtgcaacatggtaactctga

SEQ ID NO: 17728 - RNA, 20 nt, synthetic construct
  misc_feature 1..20: note = antisense sequence
  source 1..20: mol_type = other RNA
gtgtgcaacatggtaactct

SEQ ID NO: 17729 - RNA, 20 nt, synthetic construct
  misc_feature 1..20: note = antisense sequence
  source 1..20: mol_type = other RNA
ggtgtgcaacatggtaactc

SEQ ID NO: 17730 - RNA, 20 nt, synthetic construct
  misc_feature 1..20: note = antisense sequence
  source 1..20: mol_type = other RNA
gggtgtgcaacatggtaact

SEQ ID NO: 17731 - RNA, 20 nt, synthetic construct
  misc_feature 1..20: note = antisense sequence
  source 1..20: mol_type = other RNA
cttgctgagatcagagaagg

SEQ ID NO: 17732 - RNA, 20 nt, synthetic construct
  misc_feature 1..20: note = antisense sequence
  source 1..20: mol_type = other RNA
tcttgctgagatcagagaag

SEQ ID NO: 17733 - RNA, 20 nt, synthetic construct
  misc_feature 1..20: note = antisense sequence
  source 1..20: mol_type = other RNA
cacagatgctgagtatgaat

SEQ ID NO: 17734 - RNA, 20 nt, synthetic construct
  misc_feature 1..20: note = antisense sequence
  source 1..20: mol_type = other RNA
tagtcacagatgctgagtat

SEQ ID NO: 17735 - RNA, 20 nt, synthetic construct
  misc_feature 1..20: note = antisense sequence
  source 1..20: mol_type = other RNA
gtagtcacagatgctgagta

SEQ ID NO: 17736 - RNA, 20 nt, synthetic construct
  misc_feature 1..20: note = antisense sequence
  source 1..20: mol_type = other RNA
agtagtcacagatgctgagt

SEQ ID NO: 17737 - RNA, 20 nt, synthetic construct
  misc_feature 1..20: note = antisense sequence
  source 1..20: mol_type = other RNA
ctagtagtcacagatgctga

SEQ ID NO: 17738 - RNA, 20 nt, synthetic construct
  misc_feature 1..20: note = antisense sequence
  source 1..20: mol_type = other RNA
tctagtagtcacagatgctg

SEQ ID NO: 17739 - RNA, 20 nt, synthetic construct
  misc_feature 1..20: note = antisense sequence
  source 1..20: mol_type = other RNA
gtctagtagtcacagatgct

SEQ ID NO: 17740 - RNA, 20 nt, synthetic construct
  misc_feature 1..20: note = antisense sequence
  source 1..20: mol_type = other RNA
tgtctagtagtcacagatgc

SEQ ID NO: 17741 - RNA, 20 nt, synthetic construct
  misc_feature 1..20: note = antisense sequence
  source 1..20: mol_type = other RNA
ctttgtctagtagtcacaga

SEQ ID NO: 17742 - RNA, 20 nt, synthetic construct
  misc_feature 1..20: note = antisense sequence
  source 1..20: mol_type = other RNA
gggctttgtctagtagtcac

SEQ ID NO: 17743 - RNA, 20 nt, synthetic construct
  misc_feature 1..20: note = antisense sequence
  source 1..20: mol_type = other RNA
tgggctttgtctagtagtca

SEQ ID NO: 17744 - RNA, 20 nt, synthetic construct
  misc_feature 1..20: note = antisense sequence
  source 1..20: mol_type = other RNA
atgggctttgtctagtagtc

SEQ ID NO: 17745 - RNA, 20 nt, synthetic construct
  misc_feature 1..20: note = antisense sequence
  source 1..20: mol_type = other RNA
gtaaatgggctttgtctagt

SEQ ID NO: 17746 - RNA, 20 nt, synthetic construct
  misc_feature 1..20: note = antisense sequence
  source 1..20: mol_type = other RNA
agtaaatgggctttgtctag

SEQ ID NO: 17747 - RNA, 20 nt, synthetic construct
  misc_feature 1..20: note = antisense sequence
  source 1..20: mol_type = other RNA
cagtaaatgggctttgtcta

SEQ ID NO: 17748 - RNA, 20 nt, synthetic construct
  misc_feature 1..20: note = antisense sequence
  source 1..20: mol_type = other RNA
tcagtaaatgggctttgtct

SEQ ID NO: 17749 - RNA, 20 nt, synthetic construct
  misc_feature 1..20: note = antisense sequence
  source 1..20: mol_type = other RNA
agtatctctttgatctggcc

SEQ ID NO: 17750 - RNA, 20 nt, synthetic construct
  misc_feature 1..20: note = antisense sequence
  source 1..20: mol_type = other RNA
aagtatctctttgatctggc

SEQ ID NO: 17751 - RNA, 20 nt, synthetic construct
  misc_feature 1..20: note = antisense sequence
  source 1..20: mol_type = other RNA
tagccaggaatgacttatgt

SEQ ID NO: 17752 - RNA, 20 nt, synthetic construct
  misc_feature 1..20: note = antisense sequence
  source 1..20: mol_type = other RNA
atagccaggaatgacttatg

SEQ ID NO: 17753 - RNA, 20 nt, synthetic construct
  misc_feature 1..20: note = antisense sequence
  source 1..20: mol_type = other RNA
cttaatagccaggaatgact

SEQ ID NO: 17754 - RNA, 20 nt, synthetic construct
  misc_feature 1..20: note = antisense sequence
  source 1..20: mol_type = other RNA
acttaatagccaggaatgac

SEQ ID NO: 17755 - RNA, 20 nt, synthetic construct
  misc_feature 1..20: note = antisense sequence
  source 1..20: mol_type = other RNA
gaaacaggacttctggttca

SEQ ID NO: 17756 - RNA, 20 nt, synthetic construct
  misc_feature 1..20: note = antisense sequence
  source 1..20: mol_type = other RNA
cacacacacaaacctcaaca

SEQ ID NO: 17757 - RNA, 20 nt, synthetic construct
  misc_feature 1..20: note = antisense sequence
  source 1..20: mol_type = other RNA
acacacacacaaacctcaac

SEQ ID NO: 17758 - RNA, 20 nt, synthetic construct
  misc_feature 1..20: note = antisense sequence
  source 1..20: mol_type = other RNA
acacacacacacaaacctca

SEQ ID NO: 17759 - RNA, 20 nt, synthetic construct
  misc_feature 1..20: note = antisense sequence
  source 1..20: mol_type = other RNA
cacacacacacacaaacctc

SEQ ID NO: 17760 - RNA, 20 nt, synthetic construct
  misc_feature 1..20: note = antisense sequence
  source 1..20: mol_type = other RNA
acacacacacacacaaacct

SEQ ID NO: 17761 - RNA, 20 nt, synthetic construct
  misc_feature 1..20: note = antisense sequence
  source 1..20: mol_type = other RNA
cacacacacacacacaaacc

SEQ ID NO: 17762 - RNA, 20 nt, synthetic construct
  misc_feature 1..20: note = antisense sequence
  source 1..20: mol_type = other RNA
acacacacacacacacaaac

SEQ ID NO: 17763 - RNA, 20 nt, synthetic construct
  misc_feature 1..20: note = antisense sequence
  source 1..20: mol_type = other RNA
cacacacacacacacacaaa

SEQ ID NO: 17764 - RNA, 20 nt, synthetic construct
  misc_feature 1..20: note = antisense sequence
  source 1..20: mol_type = other RNA
gcacacacacacacacacaa

SEQ ID NO: 17765 - RNA, 20 nt, synthetic construct
  misc_feature 1..20: note = antisense sequence
  source 1..20: mol_type = other RNA
tgcacacacacacacacaca

SEQ ID NO: 17766 - RNA, 20 nt, synthetic construct
  misc_feature 1..20: note = antisense sequence
  source 1..20: mol_type = other RNA
atgcacacacacacacacac

SEQ ID NO: 17767 - RNA, 20 nt, synthetic construct
  misc_feature 1..20: note = antisense sequence
  source 1..20: mol_type = other RNA
catgcacacacacacacaca

SEQ ID NO: 17768 - RNA, 20 nt, synthetic construct
  misc_feature 1..20: note = antisense sequence
  source 1..20: mol_type = other RNA
acatgcacacacacacacac

SEQ ID NO: 17769 - RNA, 20 nt, synthetic construct
  misc_feature 1..20: note = antisense sequence
  source 1..20: mol_type = other RNA
cacatgcacacacacacaca

SEQ ID NO: 17770 - RNA, 20 nt, synthetic construct
  misc_feature 1..20: note = antisense sequence
  source 1..20: mol_type = other RNA
gcacatgcacacacacacac

SEQ ID NO: 17771 - RNA, 20 nt, synthetic construct
  misc_feature 1..20: note = antisense sequence
  source 1..20: mol_type = other RNA
tgcacatgcacacacacaca

SEQ ID NO: 17772 - RNA, 20 nt, synthetic construct
  misc_feature 1..20: note = antisense sequence
  source 1..20: mol_type = other RNA
ctgcacatgcacacacacac

SEQ ID NO: 17773 - RNA, 20 nt, synthetic construct
  misc_feature 1..20: note = antisense sequence
  source 1..20: mol_type = other RNA
tctgcacatgcacacacaca

SEQ ID NO: 17774 - RNA, 20 nt, synthetic construct
  misc_feature 1..20: note = antisense sequence
  source 1..20: mol_type = other RNA
gtctgcacatgcacacacac

SEQ ID NO: 17775 - RNA, 20 nt, synthetic construct
  misc_feature 1..20: note = antisense sequence
  source 1..20: mol_type = other RNA
cttgtcttgcagatatagct

SEQ ID NO: 17776 - RNA, 20 nt, synthetic construct
  misc_feature 1..20: note = antisense sequence
  source 1..20: mol_type = other RNA
acttgtcttgcagatatagc

SEQ ID NO: 17777 - RNA, 20 nt, synthetic construct
  misc_feature 1..20: note = antisense sequence
  source 1..20: mol_type = other RNA
gaatcaaacttgtcttgcag

SEQ ID NO: 17778 - RNA, 20 nt, synthetic construct
  misc_feature 1..20: note = antisense sequence
  source 1..20: mol_type = other RNA
tcaaacgctctgtacttgtt

SEQ ID NO: 17779 - RNA, 20 nt, synthetic construct
  misc_feature 1..20: note = antisense sequence
  source 1..20: mol_type = other RNA
atcaaacgctctgtacttgt

SEQ ID NO: 17780 - RNA, 20 nt, synthetic construct
  misc_feature 1..20: note = antisense sequence
  source 1..20: mol_type = other RNA
aatcaaacgctctgtacttg

SEQ ID NO: 17781 - RNA, 20 nt, synthetic construct
  misc_feature 1..20: note = antisense sequence
  source 1..20: mol_type = other RNA
cagtttacaatgggagcaat

SEQ ID NO: 17782 - RNA, 20 nt, synthetic construct
  misc_feature 1..20: note = antisense sequence
  source 1..20: mol_type = other RNA
tcagtttacaatgggagcaa

SEQ ID NO: 17783 - RNA, 20 nt, synthetic construct
  misc_feature 1..20: note = antisense sequence
  source 1..20: mol_type = other RNA
catggttcagtttacaatgg

SEQ ID NO: 17784 - RNA, 20 nt, synthetic construct
  misc_feature 1..20: note = antisense sequence
  source 1..20: mol_type = other RNA
gcatacatggttcagtttac

SEQ ID NO: 17785 - RNA, 20 nt, synthetic construct
  misc_feature 1..20: note = antisense sequence
  source 1..20: mol_type = other RNA
gtgcatacatggttcagttt

SEQ ID NO: 17786 - RNA, 20 nt, synthetic construct
  misc_feature 1..20: note = antisense sequence
  source 1..20: mol_type = other RNA
agtgcatacatggttcagtt

SEQ ID NO: 17787 - RNA, 20 nt, synthetic construct
  misc_feature 1..20: note = antisense sequence
  source 1..20: mol_type = other RNA
gagtgcatacatggttcagt

SEQ ID NO: 17788 - RNA, 20 nt, synthetic construct
  misc_feature 1..20: note = antisense sequence
  source 1..20: mol_type = other RNA
agagtgcatacatggttcag

SEQ ID NO: 17789 - RNA, 20 nt, synthetic construct
  misc_feature 1..20: note = antisense sequence
  source 1..20: mol_type = other RNA
agagagtgcatacatggttc

SEQ ID NO: 17790 - RNA, 20 nt, synthetic construct
  misc_feature 1..20: note = antisense sequence
  source 1..20: mol_type = other RNA
gaaaagagagtgcatacatg

SEQ ID NO: 17791 - RNA, 20 nt, synthetic construct
  misc_feature 1..20: note = antisense sequence
  source 1..20: mol_type = other RNA
tcagaaaagagagtgcatac

SEQ ID NO: 17792 - RNA, 20 nt, synthetic construct
  misc_feature 1..20: note = antisense sequence
  source 1..20: mol_type = other RNA
ttggtcagaaaagagagtgc

SEQ ID NO: 17793 - RNA, 20 nt, synthetic construct
  misc_feature 1..20: note = antisense sequence
  source 1..20: mol_type = other RNA
ccattgtagtttggtcagaa

SEQ ID NO: 17794 - RNA, 20 nt, synthetic construct
  misc_feature 1..20: note = antisense sequence
  source 1..20: mol_type = other RNA
ccctcctggacagtgtgttg

SEQ ID NO: 17795 - RNA, 20 nt, synthetic construct
  misc_feature 1..20: note = antisense sequence
  source 1..20: mol_type = other RNA
tccctcctggacagtgtgtt

SEQ ID NO: 17796 - RNA, 20 nt, synthetic construct
  misc_feature 1..20: note = antisense sequence
  source 1..20: mol_type = other RNA
ttttccctcctggacagtgt

SEQ ID NO: 17797 - RNA, 20 nt, synthetic construct
  misc_feature 1..20: note = antisense sequence
  source 1..20: mol_type = other RNA
ggtcactttggtagtttgaa

SEQ ID NO: 17798 - RNA, 20 nt, synthetic construct
  misc_feature 1..20: note = antisense sequence
  source 1..20: mol_type = other RNA
tagggtcactttggtagttt

SEQ ID NO: 17799 - RNA, 20 nt, synthetic construct
  misc_feature 1..20: note = antisense sequence
  source 1..20: mol_type = other RNA
ttagggtcactttggtagtt

SEQ ID NO: 17800 - RNA, 20 nt, synthetic construct
  misc_feature 1..20: note = antisense sequence
  source 1..20: mol_type = other RNA
attagggtcactttggtagt

SEQ ID NO: 17801 - RNA, 20 nt, synthetic construct
  misc_feature 1..20: note = antisense sequence
  source 1..20: mol_type = other RNA
gattagggtcactttggtag

SEQ ID NO: 17802 - RNA, 20 nt, synthetic construct
  misc_feature 1..20: note = antisense sequence
  source 1..20: mol_type = other RNA
tgattagggtcactttggta

SEQ ID NO: 17803 - RNA, 20 nt, synthetic construct
  misc_feature 1..20: note = antisense sequence
  source 1..20: mol_type = other RNA
ctgattagggtcactttggt

SEQ ID NO: 17804 - RNA, 20 nt, synthetic construct
  misc_feature 1..20: note = antisense sequence
  source 1..20: mol_type = other RNA
gctgattagggtcactttgg

SEQ ID NO: 17805 - RNA, 20 nt, synthetic construct
  misc_feature 1..20: note = antisense sequence
  source 1..20: mol_type = other RNA
agctgattagggtcactttg

SEQ ID NO: 17806 - RNA, 20 nt, synthetic construct
  misc_feature 1..20: note = antisense sequence
  source 1..20: mol_type = other RNA
aagctgattagggtcacttt

SEQ ID NO: 17807 - RNA, 20 nt, synthetic construct
  misc_feature 1..20: note = antisense sequence
  source 1..20: mol_type = other RNA
gtaagctgattagggtcact

SEQ ID NO: 17808 - RNA, 20 nt, synthetic construct
  misc_feature 1..20: note = antisense sequence
  source 1..20: mol_type = other RNA
tgtaagctgattagggtcac

SEQ ID NO: 17809 - RNA, 20 nt, synthetic construct
  misc_feature 1..20: note = antisense sequence
  source 1..20: mol_type = other RNA
ttgtaagctgattagggtca

SEQ ID NO: 17810 - RNA, 20 nt, synthetic construct
  misc_feature 1..20: note = antisense sequence
  source 1..20: mol_type = other RNA
gaggtggcagatacatttcc

SEQ ID NO: 17811 - RNA, 20 nt, synthetic construct
  misc_feature 1..20: note = antisense sequence
  source 1..20: mol_type = other RNA
aagaggtggcagatacattt

SEQ ID NO: 17812 - RNA, 20 nt, synthetic construct
  misc_feature 1..20: note = antisense sequence
  source 1..20: mol_type = other RNA
taagaggtggcagatacatt

SEQ ID NO: 17813 - RNA, 20 nt, synthetic construct
  misc_feature 1..20: note = antisense sequence
  source 1..20: mol_type = other RNA
ttggtaagaggtggcagata

SEQ ID NO: 17814 - RNA, 20 nt, synthetic construct
  misc_feature 1..20: note = antisense sequence
  source 1..20: mol_type = other RNA
gttggtaagaggtggcagat

SEQ ID NO: 17815 - RNA, 20 nt, synthetic construct
  misc_feature 1..20: note = antisense sequence
  source 1..20: mol_type = other RNA
ctggttggtaagaggtggca

SEQ ID NO: 17816 - RNA, 20 nt, synthetic construct
  misc_feature 1..20: note = antisense sequence
  source 1..20: mol_type = other RNA
actggttggtaagaggtggc

SEQ ID NO: 17817 - RNA, 20 nt, synthetic construct
  misc_feature 1..20: note = antisense sequence
  source 1..20: mol_type = other RNA
acactggttggtaagaggtg

SEQ ID NO: 17818 - RNA, 20 nt, synthetic construct
  misc_feature 1..20: note = antisense sequence
  source 1..20: mol_type = other RNA
cacactggttggtaagaggt

SEQ ID NO: 17819 - RNA, 20 nt, synthetic construct
  misc_feature 1..20: note = antisense sequence
  source 1..20: mol_type = other RNA
tcacactggttggtaagagg

SEQ ID NO: 17820 - RNA, 20 nt, synthetic construct
  misc_feature 1..20: note = antisense sequence
  source 1..20: mol_type = other RNA
ctcacactggttggtaagag

SEQ ID NO: 17821 - RNA, 20 nt, synthetic construct
  misc_feature 1..20: note = antisense sequence
  source 1..20: mol_type = other RNA
gctcacactggttggtaaga

SEQ ID NO: 17822 - RNA, 20 nt, synthetic construct
  misc_feature 1..20: note = antisense sequence
  source 1..20: mol_type = other RNA
agctcacactggttggtaag

SEQ ID NO: 17823 - RNA, 20 nt, synthetic construct
  misc_feature 1..20: note = antisense sequence
  source 1..20: mol_type = other RNA
cagctcacactggttggtaa

SEQ ID NO: 17824 - RNA, 20 nt, synthetic construct
  misc_feature 1..20: note = antisense sequence
  source 1..20: mol_type = other RNA
tcagctcacactggttggta

SEQ ID NO: 17825 - RNA, 20 nt, synthetic construct
  misc_feature 1..20: note = antisense sequence
  source 1..20: mol_type = other RNA
gtcagctcacactggttggt

SEQ ID NO: 17826 - RNA, 20 nt, synthetic construct
  misc_feature 1..20: note = antisense sequence
  source 1..20: mol_type = other RNA
agtcagctcacactggttgg

SEQ ID NO: 17827 - RNA, 20 nt, synthetic construct
  misc_feature 1..20: note = antisense sequence
  source 1..20: mol_type = other RNA
aagtcagctcacactggttg

SEQ ID NO: 17828 - RNA, 20 nt, synthetic construct
  misc_feature 1..20: note = antisense sequence
  source 1..20: mol_type = other RNA
gaagtcagctcacactggtt

SEQ ID NO: 17829 - RNA, 20 nt, synthetic construct
  misc_feature 1..20: note = antisense sequence
  source 1..20: mol_type = other RNA
tgaagtcagctcacactggt

SEQ ID NO: 17830 - RNA, 20 nt, synthetic construct
  misc_feature 1..20: note = antisense sequence
  source 1..20: mol_type = other RNA
aatctgtctcagtggtgtgc

SEQ ID NO: 17831 - RNA, 20 nt, synthetic construct
  misc_feature 1..20: note = antisense sequence
  source 1..20: mol_type = other RNA
taatctgtctcagtggtgtg

SEQ ID NO: 17832 - RNA, 20 nt, synthetic construct
  misc_feature 1..20: note = antisense sequence
  source 1..20: mol_type = other RNA
tgtaatctgtctcagtggtg

SEQ ID NO: 17833 - RNA, 20 nt, synthetic construct
  misc_feature 1..20: note = antisense sequence
  source 1..20: mol_type = other RNA
gtgtaatctgtctcagtggt

SEQ ID NO: 17834 - RNA, 20 nt, synthetic construct
  misc_feature 1..20: note = antisense sequence
  source 1..20: mol_type = other RNA
cgtgtaatctgtctcagtgg

SEQ ID NO: 17835 - RNA, 20 nt, synthetic construct
  misc_feature 1..20: note = antisense sequence
  source 1..20: mol_type = other RNA
tcgtgtaatctgtctcagtg

SEQ ID NO: 17836 - RNA, 20 nt, synthetic construct
  misc_feature 1..20: note = antisense sequence
  source 1..20: mol_type = other RNA
atcgtgtaatctgtctcagt

SEQ ID NO: 17837 - RNA, 20 nt, synthetic construct
  misc_feature 1..20: note = antisense sequence
  source 1..20: mol_type = other RNA
tatcgtgtaatctgtctcag

SEQ ID NO: 17838 - RNA, 20 nt, synthetic construct
  misc_feature 1..20: note = antisense sequence
  source 1..20: mol_type = other RNA
ctatcgtgtaatctgtctca

SEQ ID NO: 17839 - RNA, 20 nt, synthetic construct
  misc_feature 1..20: note = antisense sequence
  source 1..20: mol_type = other RNA
tctatcgtgtaatctgtctc

SEQ ID NO: 17840 - RNA, 20 nt, synthetic construct
  misc_feature 1..20: note = antisense sequence
  source 1..20: mol_type = other RNA
gtctatcgtgtaatctgtct

SEQ ID NO: 17841 - RNA, 20 nt, synthetic construct
  misc_feature 1..20: note = antisense sequence
  source 1..20: mol_type = other RNA
tgtctatcgtgtaatctgtc

SEQ ID NO: 17842 - RNA, 20 nt, synthetic construct
  misc_feature 1..20: note = antisense sequence
  source 1..20: mol_type = other RNA
ctgtctatcgtgtaatctgt

SEQ ID NO: 17843 - RNA, 20 nt, synthetic construct
  misc_feature 1..20: note = antisense sequence
  source 1..20: mol_type = other RNA
tctgtctatcgtgtaatctg

SEQ ID NO: 17844 - RNA, 20 nt, synthetic construct
  misc_feature 1..20: note = antisense sequence
  source 1..20: mol_type = other RNA
cattatgtttactgggcttg

SEQ ID NO: 17845 - RNA, 20 nt, synthetic construct
  misc_feature 1..20: note = antisense sequence
  source 1..20: mol_type = other RNA
gcattatgtttactgggctt

SEQ ID NO: 17846 - RNA, 20 nt, synthetic construct
  misc_feature 1..20: note = antisense sequence
  source 1..20: mol_type = other RNA
agcattatgtttactgggct

SEQ ID NO: 17847 - RNA, 20 nt, synthetic construct
  misc_feature 1..20: note = antisense sequence
  source 1..20: mol_type = other RNA
gtagcattatgtttactggg

SEQ ID NO: 17848 - RNA, 20 nt, synthetic construct
  misc_feature 1..20: note = antisense sequence
  source 1..20: mol_type = other RNA
aagaatgggtgctgtgtagc

SEQ ID NO: 17849 - RNA, 20 nt, synthetic construct
  misc_feature 1..20: note = antisense sequence
  source 1..20: mol_type = other RNA
attaaagaatgggtgctgtg

SEQ ID NO: 17850 - RNA, 20 nt, synthetic construct
  misc_feature 1..20: note = antisense sequence
  source 1..20: mol_type = other RNA
ccttctcctgcaagttcata

SEQ ID NO: 17851 - RNA, 20 nt, synthetic construct
  misc_feature 1..20: note = antisense sequence
  source 1..20: mol_type = other RNA
ttccttctcctgcaagttca

SEQ ID NO: 17852 - RNA, 20 nt, synthetic construct
  misc_feature 1..20: note = antisense sequence
  source 1..20: mol_type = other RNA
tccttccttctcctgcaagt

SEQ ID NO: 17853 - RNA, 20 nt, synthetic construct
  misc_feature 1..20: note = antisense sequence
  source 1..20: mol_type = other RNA
aactccttccttctcctgca

SEQ ID NO: 17854 - RNA, 20 nt, synthetic construct
  misc_feature 1..20: note = antisense sequence
  source 1..20: mol_type = other RNA
tttcaactccttccttctcc

SEQ ID NO: 17855 - RNA, 20 nt, synthetic construct
  misc_feature 1..20: note = antisense sequence
  source 1..20: mol_type = other RNA
taggtctgattttcactgtg

SEQ ID NO: 17856 - RNA, 20 nt, synthetic construct
  misc_feature 1..20: note = antisense sequence
  source 1..20: mol_type = other RNA
gtgtaggtctgattttcact

SEQ ID NO: 17857 - RNA, 20 nt, synthetic construct
  misc_feature 1..20: note = antisense sequence
  source 1..20: mol_type = other RNA
gcttgtgtaggtctgatttt

SEQ ID NO: 17858 - RNA, 20 nt, synthetic construct
  misc_feature 1..20: note = antisense sequence
  source 1..20: mol_type = other RNA
ggcttgtgtaggtctgattt

SEQ ID NO: 17859 - RNA, 20 nt, synthetic construct
  misc_feature 1..20: note = antisense sequence
  source 1..20: mol_type = other RNA
tggcttgtgtaggtctgatt

SEQ ID NO: 17860 - RNA, 20 nt, synthetic construct
  misc_feature 1..20: note = antisense sequence
  source 1..20: mol_type = other RNA
tgtggcttgtgtaggtctga

SEQ ID NO: 17861 - RNA, 20 nt, synthetic construct
  misc_feature 1..20: note = antisense sequence
  source 1..20: mol_type = other RNA
ttgtggcttgtgtaggtctg

SEQ ID NO: 17862 - RNA, 20 nt, synthetic construct
  misc_feature 1..20: note = antisense sequence
  source 1..20: mol_type = other RNA
tttgtggcttgtgtaggtct

SEQ ID NO: 17863 - RNA, 20 nt, synthetic construct
  misc_feature 1..20: note = antisense sequence
  source 1..20: mol_type = other RNA
ttttgtggcttgtgtaggtc

SEQ ID NO: 17864 - RNA, 20 nt, synthetic construct
  misc_feature 1..20: note = antisense sequence
  source 1..20: mol_type = other RNA
ccttgggaaaatgagacaat

SEQ ID NO: 17865 - RNA, 20 nt, synthetic construct
  misc_feature 1..20: note = antisense sequence
  source 1..20: mol_type = other RNA
gtgtatcacaggactttgaa

SEQ ID NO: 17866 - RNA, 20 nt, synthetic construct
  misc_feature 1..20: note = antisense sequence
  source 1..20: mol_type = other RNA
catgaatctagtgctcagag

SEQ ID NO: 17867 - RNA, 20 nt, synthetic construct
  misc_feature 1..20: note = antisense sequence
  source 1..20: mol_type = other RNA
ccatgaatctagtgctcaga

SEQ ID NO: 17868 - RNA, 20 nt, synthetic construct
  misc_feature 1..20: note = antisense sequence
  source 1..20: mol_type = other RNA
cccatgaatctagtgctcag

SEQ ID NO: 17869 - RNA, 20 nt, synthetic construct
  misc_feature 1..20: note = antisense sequence
  source 1..20: mol_type = other RNA
gcccatgaatctagtgctca

SEQ ID NO: 17870 - RNA, 20 nt, synthetic construct
  misc_feature 1..20: note = antisense sequence
  source 1..20: mol_type = other RNA
tgcccatgaatctagtgctc

SEQ ID NO: 17871 - RNA, 20 nt, synthetic construct
  misc_feature 1..20: note = antisense sequence
  source 1..20: mol_type = other RNA
ttgcccatgaatctagtgct

SEQ ID NO: 17872 - RNA, 20 nt, synthetic construct
  misc_feature 1..20: note = antisense sequence
  source 1..20: mol_type = other RNA
attgcccatgaatctagtgc

SEQ ID NO: 17873 - RNA, 20 nt, synthetic construct
  misc_feature 1..20: note = antisense sequence
  source 1..20: mol_type = other RNA
aattgcccatgaatctagtg

SEQ ID NO: 17874 - RNA, 20 nt, synthetic construct
  misc_feature 1..20: note = antisense sequence
  source 1..20: mol_type = other RNA
tacaagcctcttttcaagca

SEQ ID NO: 17875 - RNA, 20 nt, synthetic construct
  misc_feature 1..20: note = antisense sequence
  source 1..20: mol_type = other RNA
ctacaagcctcttttcaagc

SEQ ID NO: 17876 - RNA, 20 nt, synthetic construct
  misc_feature 1..20: note = antisense sequence
  source 1..20: mol_type = other RNA
ctgtttactacaagcctctt

SEQ ID NO: 17877 - RNA, 20 nt, synthetic construct
  misc_feature 1..20: note = antisense sequence
  source 1..20: mol_type = other RNA
ggttgcagaagcatcaaatt

SEQ ID NO: 17878 - RNA, 20 nt, synthetic construct
  misc_feature 1..20: note = antisense sequence
  source 1..20: mol_type = other RNA
tggttgcagaagcatcaaat

SEQ ID NO: 17879 - RNA, 20 nt, synthetic construct
  misc_feature 1..20: note = antisense sequence
  source 1..20: mol_type = other RNA
atggttgcagaagcatcaaa

SEQ ID NO: 17880 - RNA, 20 nt, synthetic construct
  misc_feature 1..20: note = antisense sequence
  source 1..20: mol_type = other RNA
tatggttgcagaagcatcaa

SEQ ID NO: 17881 - RNA, 20 nt, synthetic construct
  misc_feature 1..20: note = antisense sequence
  source 1..20: mol_type = other RNA
ttatggttgcagaagcatca

SEQ ID NO: 17882 - RNA, 20 nt, synthetic construct
  misc_feature 1..20: note = antisense sequence
  source 1..20: mol_type = other RNA
tggagagaacatgggcaggg

SEQ ID NO: 17883 - RNA, 20 nt, synthetic construct
  misc_feature 1..20: note = antisense sequence
  source 1..20: mol_type = other RNA
ttggagagaacatgggcagg

SEQ ID NO: 17884 - RNA, 20 nt, synthetic construct
  misc_feature 1..20: note = antisense sequence
  source 1..20: mol_type = other RNA
cttggagagaacatgggcag

SEQ ID NO: 17885 - RNA, 20 nt, synthetic construct
  misc_feature 1..20: note = antisense sequence
  source 1..20: mol_type = other RNA
tcacggtgtgcaagctgtgg

SEQ ID NO: 17886 - RNA, 20 nt, synthetic construct
  misc_feature 1..20: note = antisense sequence
  source 1..20: mol_type = other RNA
ttcacggtgtgcaagctgtg

SEQ ID NO: 17887 - RNA, 20 nt, synthetic construct
  misc_feature 1..20: note = antisense sequence
  source 1..20: mol_type = other RNA
attcacggtgtgcaagctgt

SEQ ID NO: 17888 - RNA, 20 nt, synthetic construct
  misc_feature 1..20: note = antisense sequence
  source 1..20: mol_type = other RNA
cattcacggtgtgcaagctg

SEQ ID NO: 17889 - RNA, 20 nt, synthetic construct
  misc_feature 1..20: note = antisense sequence
  source 1..20: mol_type = other RNA
ccattcacggtgtgcaagct

SEQ ID NO: 17890 - RNA, 20 nt, synthetic construct
  misc_feature 1..20: note = antisense sequence
  source 1..20: mol_type = other RNA
accattcacggtgtgcaagc

SEQ ID NO: 17891 - RNA, 20 nt, synthetic construct
  misc_feature 1..20: note = antisense sequence
  source 1..20: mol_type = other RNA
gcgtgttggacaaggacatt

SEQ ID NO: 17892 - RNA, 20 nt, synthetic construct
  misc_feature 1..20: note = antisense sequence
  source 1..20: mol_type = other RNA
agcgtgttggacaaggacat

SEQ ID NO: 17893 - RNA, 20 nt, synthetic construct
  misc_feature 1..20: note = antisense sequence
  source 1..20: mol_type = other RNA
cagcgtgttggacaaggaca

SEQ ID NO: 17894 - RNA, 20 nt, synthetic construct
  misc_feature 1..20: note = antisense sequence
  source 1..20: mol_type = other RNA
acagcgtgttggacaaggac

SEQ ID NO: 17895 - RNA, 20 nt, synthetic construct
  misc_feature 1..20: note = antisense sequence
  source 1..20: mol_type = other RNA
tacagcgtgttggacaagga

SEQ ID NO: 17896 - RNA, 20 nt, synthetic construct
  misc_feature 1..20: note = antisense sequence
  source 1..20: mol_type = other RNA
ttacagcgtgttggacaagg

SEQ ID NO: 17897 - RNA, 20 nt, synthetic construct
  misc_feature 1..20: note = antisense sequence
  source 1..20: mol_type = other RNA
attacagcgtgttggacaag

SEQ ID NO: 17898 - RNA, 20 nt, synthetic construct
  misc_feature 1..20: note = antisense sequence
  source 1..20: mol_type = other RNA
gattacagcgtgttggacaa

SEQ ID NO: 17899 - RNA, 20 nt, synthetic construct
  misc_feature 1..20: note = antisense sequence
  source 1..20: mol_type = other RNA
agattacagcgtgttggaca

SEQ ID NO: 17900 - RNA, 20 nt, synthetic construct
  misc_feature 1..20: note = antisense sequence
  source 1..20: mol_type = other RNA
tagattacagcgtgttggac

SEQ ID NO: 17901 - RNA, 20 nt, synthetic construct
  misc_feature 1..20: note = antisense sequence
  source 1..20: mol_type = other RNA
gtagattacagcgtgttgga

SEQ ID NO: 17902 - RNA, 20 nt, synthetic construct
  misc_feature 1..20: note = antisense sequence
  source 1..20: mol_type = other RNA
agtagattacagcgtgttgg

SEQ ID NO: 17903 - RNA, 20 nt, synthetic construct
  misc_feature 1..20: note = antisense sequence
  source 1..20: mol_type = other RNA
gagtagattacagcgtgttg

SEQ ID NO: 17904 - RNA, 20 nt, synthetic construct
  misc_feature 1..20: note = antisense sequence
  source 1..20: mol_type = other RNA
ggagtagattacagcgtgtt

SEQ ID NO: 17905 - RNA, 20 nt, synthetic construct
  misc_feature 1..20: note = antisense sequence
  source 1..20: mol_type = other RNA
tggagtagattacagcgtgt

SEQ ID NO: 17906 - RNA, 20 nt, synthetic construct
  misc_feature 1..20: note = antisense sequence
  source 1..20: mol_type = other RNA
atggagtagattacagcgtg

SEQ ID NO: 17907 - RNA, 20 nt, synthetic construct
  misc_feature 1..20: note = antisense sequence
  source 1..20: mol_type = other RNA
catggagtagattacagcgt

SEQ ID NO: 17908 - RNA, 20 nt, synthetic construct
  misc_feature 1..20: note = antisense sequence
  source 1..20: mol_type = other RNA
gcaggacagtcagttcccat

SEQ ID NO: 17909 - RNA, 20 nt, synthetic construct
  misc_feature 1..20: note = antisense sequence
  source 1..20: mol_type = other RNA
agcaggacagtcagttccca

SEQ ID NO: 17910 - RNA, 20 nt, synthetic construct
  misc_feature 1..20: note = antisense sequence
  source 1..20: mol_type = other RNA
tgttgtgaaaagcaggacag

SEQ ID NO: 17911 - RNA, 20 nt, synthetic construct
  misc_feature 1..20: note = antisense sequence
  source 1..20: mol_type = other RNA
aatgttgtgaaaagcaggac

SEQ ID NO: 17912 - RNA, 20 nt, synthetic construct
  misc_feature 1..20: note = antisense sequence
  source 1..20: mol_type = other RNA
tctgggcctgtttctcaatg

SEQ ID NO: 17913 - RNA, 20 nt, synthetic construct
  misc_feature 1..20: note = antisense sequence
  source 1..20: mol_type = other RNA
gctctgggcctgtttctcaa

SEQ ID NO: 17914 - RNA, 20 nt, synthetic construct
  misc_feature 1..20: note = antisense sequence
  source 1..20: mol_type = other RNA
tggcacatgagacaggctct

SEQ ID NO: 17915 - RNA, 20 nt, synthetic construct
  misc_feature 1..20: note = antisense sequence
  source 1..20: mol_type = other RNA
tgcacctggcacatgagaca

SEQ ID NO: 17916 - RNA, 20 nt, synthetic construct
  misc_feature 1..20: note = antisense sequence
  source 1..20: mol_type = other RNA
ctgcacctggcacatgagac

SEQ ID NO: 17917 - RNA, 20 nt, synthetic construct
  misc_feature 1..20: note = antisense sequence
  source 1..20: mol_type = other RNA
actgcacctggcacatgaga

SEQ ID NO: 17918 - RNA, 20 nt, synthetic construct
  misc_feature 1..20: note = antisense sequence
  source 1..20: mol_type = other RNA
gtgactgcacctggcacatg

SEQ ID NO: 17919 - RNA, 20 nt, synthetic construct
  misc_feature 1..20: note = antisense sequence
  source 1..20: mol_type = other RNA
aatgtgactgcacctggcac

SEQ ID NO: 17920 - RNA, 20 nt, synthetic construct
  misc_feature 1..20: note = antisense sequence
  source 1..20: mol_type = other RNA
ataatgtgactgcacctggc

SEQ ID NO: 17921 - RNA, 20 nt, synthetic construct
  misc_feature 1..20: note = antisense sequence
  source 1..20: mol_type = other RNA
aacaataatgtgactgcacc

SEQ ID NO: 17922 - RNA, 20 nt, synthetic construct
  misc_feature 1..20: note = antisense sequence
  source 1..20: mol_type = other RNA
ctgagggttgttggaagaaa

SEQ ID NO: 17923 - RNA, 20 nt, synthetic construct
  misc_feature 1..20: note = antisense sequence
  source 1..20: mol_type = other RNA
ggcctgagggttgttggaag

SEQ ID NO: 17924 - RNA, 20 nt, synthetic construct
  misc_feature 1..20: note = antisense sequence
  source 1..20: mol_type = other RNA
cagtagtcttgaaaatctcc

SEQ ID NO: 17925 - RNA, 20 nt, synthetic construct
  misc_feature 1..20: note = antisense sequence
  source 1..20: mol_type = other RNA
ctccagtagtcttgaaaatc

SEQ ID NO: 17926 - RNA, 20 nt, synthetic construct
  misc_feature 1..20: note = antisense sequence
  source 1..20: mol_type = other RNA
ggtactcagagcaaatgttt

SEQ ID NO: 17927 - RNA, 20 nt, synthetic construct
  misc_feature 1..20: note = antisense sequence
  source 1..20: mol_type = other RNA
ctggtactcagagcaaatgt

SEQ ID NO: 17928 - RNA, 20 nt, synthetic construct
  misc_feature 1..20: note = antisense sequence
  source 1..20: mol_type = other RNA
agctggtactcagagcaaat

SEQ ID NO: 17929 - RNA, 20 nt, synthetic construct
  misc_feature 1..20: note = antisense sequence
  source 1..20: mol_type = other RNA
aagctggtactcagagcaaa

SEQ ID NO: 17930 - RNA, 20 nt, synthetic construct
  misc_feature 1..20: note = antisense sequence
  source 1..20: mol_type = other RNA
gaagctggtactcagagcaa

SEQ ID NO: 17931 - RNA, 20 nt, synthetic construct
  misc_feature 1..20: note = antisense sequence
  source 1..20: mol_type = other RNA
tgaagctggtactcagagca

SEQ ID NO: 17932 - RNA, 20 nt, synthetic construct
  misc_feature 1..20: note = antisense sequence
  source 1..20: mol_type = other RNA
agtcactgaagctggtactc

SEQ ID NO: 17933 - RNA, 20 nt, synthetic construct
  misc_feature 1..20: note = antisense sequence
  source 1..20: mol_type = other RNA
gagtcactgaagctggtact

SEQ ID NO: 17934 - RNA, 20 nt, synthetic construct
  misc_feature 1..20: note = antisense sequence
  source 1..20: mol_type = other RNA
tgagtcactgaagctggtac

SEQ ID NO: 17935 - RNA, 20 nt, synthetic construct
  misc_feature 1..20: note = antisense sequence
  source 1..20: mol_type = other RNA
ttgagtcactgaagctggta

SEQ ID NO: 17936 - RNA, 20 nt, synthetic construct
  misc_feature 1..20: note = antisense sequence
  source 1..20: mol_type = other RNA
attgagtcactgaagctggt

SEQ ID NO: 17937 - RNA, 20 nt, synthetic construct
  misc_feature 1..20: note = antisense sequence
  source 1..20: mol_type = other RNA
ccctttagaacaccgctgca

SEQ ID NO: 17938 - RNA, 20 nt, synthetic construct
  misc_feature 1..20: note = antisense sequence
  source 1..20: mol_type = other RNA
accctttagaacaccgctgc

SEQ ID NO: 17939 - RNA, 20 nt, synthetic construct
  misc_feature 1..20: note = antisense sequence
  source 1..20: mol_type = other RNA
aaccctttagaacaccgctg

SEQ ID NO: 17940 - RNA, 20 nt, synthetic construct
  misc_feature 1..20: note = antisense sequence
  source 1..20: mol_type = other RNA
gaaccctttagaacaccgct

SEQ ID NO: 17941 - RNA, 20 nt, synthetic construct
  misc_feature 1..20: note = antisense sequence
  source 1..20: mol_type = other RNA
tgaaccctttagaacaccgc

SEQ ID NO: 17942 - RNA, 20 nt, synthetic construct
  misc_feature 1..20: note = antisense sequence
  source 1..20: mol_type = other RNA
gtgaaccctttagaacaccg

SEQ ID NO: 17943 - RNA, 20 nt, synthetic construct
  misc_feature 1..20: note = antisense sequence
  source 1..20: mol_type = other RNA
tgtgaaccctttagaacacc

SEQ ID NO: 17944 - RNA, 20 nt, synthetic construct
  misc_feature 1..20: note = antisense sequence
  source 1..20: mol_type = other RNA
atgtgaaccctttagaacac

SEQ ID NO: 17945 - RNA, 20 nt, synthetic construct
  misc_feature 1..20: note = antisense sequence
  source 1..20: mol_type = other RNA
ctatgtgaaccctttagaac

SEQ ID NO: 17946 - RNA, 20 nt, synthetic construct
  misc_feature 1..20: note = antisense sequence
  source 1..20: mol_type = other RNA
ccattatactatgtgaaccc

SEQ ID NO: 17947 - RNA, 20 nt, synthetic construct
  misc_feature 1..20: note = antisense sequence
  source 1..20: mol_type = other RNA
gcttggaagtatattctgct

SEQ ID NO: 17948 - RNA, 20 nt, synthetic construct
  misc_feature 1..20: note = antisense sequence
  source 1..20: mol_type = other RNA
cagcttggaagtatattctg

SEQ ID NO: 17949 - RNA, 20 nt, synthetic construct
  misc_feature 1..20: note = antisense sequence
  source 1..20: mol_type = other RNA
cttaaagatgttccagcttg

SEQ ID NO: 17950 - RNA, 20 nt, synthetic construct
  misc_feature 1..20: note = antisense sequence
  source 1..20: mol_type = other RNA
gtgtcccataacagtttgta

SEQ ID NO: 17951 - RNA, 20 nt, synthetic construct
  misc_feature 1..20: note = antisense sequence
  source 1..20: mol_type = other RNA
agtgtcccataacagtttgt

SEQ ID NO: 17952 - RNA, 20 nt, synthetic construct
  misc_feature 1..20: note = antisense sequence
  source 1..20: mol_type = other RNA
tagtgtcccataacagtttg

SEQ ID NO: 17953 - RNA, 20 nt, synthetic construct
  misc_feature 1..20: note = antisense sequence
  source 1..20: mol_type = other RNA
gatagtgtcccataacagtt

SEQ ID NO: 17954 - RNA, 20 nt, synthetic construct
  misc_feature 1..20: note = antisense sequence
  source 1..20: mol_type = other RNA
tgatagtgtcccataacagt

SEQ ID NO: 17955 - RNA, 20 nt, synthetic construct
  misc_feature 1..20: note = antisense sequence
  source 1..20: mol_type = other RNA
ctgatagtgtcccataacag

SEQ ID NO: 17956 - RNA, 20 nt, synthetic construct
  misc_feature 1..20: note = antisense sequence
  source 1..20: mol_type = other RNA
gctgatagtgtcccataaca

SEQ ID NO: 17957 - RNA, 20 nt, synthetic construct
  misc_feature 1..20: note = antisense sequence
  source 1..20: mol_type = other RNA
tgctgatagtgtcccataac

SEQ ID NO: 17958 - RNA, 20 nt, synthetic construct
  misc_feature 1..20: note = antisense sequence
  source 1..20: mol_type = other RNA
gttgctgatagtgtcccata

SEQ ID NO: 17959 - RNA, 20 nt, synthetic construct
  misc_feature 1..20: note = antisense sequence
  source 1..20: mol_type = other RNA
agttgctgatagtgtcccat

SEQ ID NO: 17960 - RNA, 20 nt, synthetic construct
  misc_feature 1..20: note = antisense sequence
  source 1..20: mol_type = other RNA
gtagttgctgatagtgtccc

SEQ ID NO: 17961 - RNA, 20 nt, synthetic construct
  misc_feature 1..20: note = antisense sequence
  source 1..20: mol_type = other RNA
gaagagctaaatcctgctag

SEQ ID NO: 17962 - RNA, 20 nt, synthetic construct
  misc_feature 1..20: note = antisense sequence
  source 1..20: mol_type = other RNA
tgaagagctaaatcctgcta

SEQ ID NO: 17963 - RNA, 20 nt, synthetic construct
  misc_feature 1..20: note = antisense sequence
  source 1..20: mol_type = other RNA
ttgaagagctaaatcctgct

SEQ ID NO: 17964 - RNA, 20 nt, synthetic construct
  misc_feature 1..20: note = antisense sequence
  source 1..20: mol_type = other RNA
attgaagagctaaatcctgc

SEQ ID NO: 17965 - RNA, 20 nt, synthetic construct
  misc_feature 1..20: note = antisense sequence
  source 1..20: mol_type = other RNA
cattgaagagctaaatcctg

SEQ ID NO: 17966 - RNA, 20 nt, synthetic construct
  misc_feature 1..20: note = antisense sequence
  source 1..20: mol_type = other RNA
ccattgaagagctaaatcct

SEQ ID NO: 17967 - RNA, 20 nt, synthetic construct
  misc_feature 1..20: note = antisense sequence
  source 1..20: mol_type = other RNA
gccattgaagagctaaatcc

SEQ ID NO: 17968 - RNA, 20 nt, synthetic construct
  misc_feature 1..20: note = antisense sequence
  source 1..20: mol_type = other RNA
ggccattgaagagctaaatc

SEQ ID NO: 17969 - RNA, 20 nt, synthetic construct
  misc_feature 1..20: note = antisense sequence
  source 1..20: mol_type = other RNA
agggccattgaagagctaaa

SEQ ID NO: 17970 - RNA, 20 nt, synthetic construct
  misc_feature 1..20: note = antisense sequence
  source 1..20: mol_type = other RNA
ggagggccattgaagagcta

SEQ ID NO: 17971 - RNA, 20 nt, synthetic construct
  misc_feature 1..20: note = antisense sequence
  source 1..20: mol_type = other RNA
tggagggccattgaagagct

SEQ ID NO: 17972 - RNA, 20 nt, synthetic construct
  misc_feature 1..20: note = antisense sequence
  source 1..20: mol_type = other RNA
ttggagggccattgaagagc

SEQ ID NO: 17973 - RNA, 20 nt, synthetic construct
  misc_feature 1..20: note = antisense sequence
  source 1..20: mol_type = other RNA
catttggagggccattgaag

SEQ ID NO: 17974 - RNA, 20 nt, synthetic construct
  misc_feature 1..20: note = antisense sequence
  source 1..20: mol_type = other RNA
gcatttggagggccattgaa

SEQ ID NO: 17975 - RNA, 20 nt, synthetic construct
  misc_feature 1..20: note = antisense sequence
  source 1..20: mol_type = other RNA
tgcatttggagggccattga

SEQ ID NO: 17976 - RNA, 20 nt, synthetic construct
  misc_feature 1..20: note = antisense sequence
  source 1..20: mol_type = other RNA
gtgcatttggagggccattg

SEQ ID NO: 17977 - RNA, 20 nt, synthetic construct
  misc_feature 1..20: note = antisense sequence
  source 1..20: mol_type = other RNA
ggtgcatttggagggccatt

SEQ ID NO: 17978 - RNA, 20 nt, synthetic construct
  misc_feature 1..20: note = antisense sequence
  source 1..20: mol_type = other RNA
ttgggtgcatttggagggcc

SEQ ID NO: 17979 - RNA, 20 nt, synthetic construct
  misc_feature 1..20: note = antisense sequence
  source 1..20: mol_type = other RNA
gttgggtgcatttggagggc

SEQ ID NO: 17980 - RNA, 20 nt, synthetic construct
  misc_feature 1..20: note = antisense sequence
  source 1..20: mol_type = other RNA
tgttgggtgcatttggaggg

SEQ ID NO: 17981 - RNA, 20 nt, synthetic construct
  misc_feature 1..20: note = antisense sequence
  source 1..20: mol_type = other RNA
cgattgttgggtgcatttgg

SEQ ID NO: 17982 - RNA, 20 nt, synthetic construct
  misc_feature 1..20: note = antisense sequence
  source 1..20: mol_type = other RNA
gcgattgttgggtgcatttg

SEQ ID NO: 17983 - RNA, 20 nt, synthetic construct
  misc_feature 1..20: note = antisense sequence
  source 1..20: mol_type = other RNA
ttggcgattgttgggtgcat

SEQ ID NO: 17984 - RNA, 20 nt, synthetic construct
  misc_feature 1..20: note = antisense sequence
  source 1..20: mol_type = other RNA
gttggcgattgttgggtgca

SEQ ID NO: 17985 - RNA, 20 nt, synthetic construct
  misc_feature 1..20: note = antisense sequence
  source 1..20: mol_type = other RNA
ggttggcgattgttgggtgc

SEQ ID NO: 17986 - RNA, 20 nt, synthetic construct
  misc_feature 1..20: note = antisense sequence
  source 1..20: mol_type = other RNA
aggttggcgattgttgggtg

SEQ ID NO: 17987 - RNA, 20 nt, synthetic construct
  misc_feature 1..20: note = antisense sequence
  source 1..20: mol_type = other RNA
gaggttggcgattgttgggt

SEQ ID NO: 17988 - RNA, 20 nt, synthetic construct
  misc_feature 1..20: note = antisense sequence
  source 1..20: mol_type = other RNA
tgaggttggcgattgttggg

SEQ ID NO: 17989 - RNA, 20 nt, synthetic construct
  misc_feature 1..20: note = antisense sequence
  source 1..20: mol_type = other RNA
gtgaggttggcgattgttgg

SEQ ID NO: 17990 - RNA, 20 nt, synthetic construct
  misc_feature 1..20: note = antisense sequence
  source 1..20: mol_type = other RNA
ggtgaggttggcgattgttg

SEQ ID NO: 17991 - RNA, 20 nt, synthetic construct
  misc_feature 1..20: note = antisense sequence
  source 1..20: mol_type = other RNA
gggtgaggttggcgattgtt

SEQ ID NO: 17992 - RNA, 20 nt, synthetic construct
  misc_feature 1..20: note = antisense sequence
  source 1..20: mol_type = other RNA
tgggtgaggttggcgattgt

SEQ ID NO: 17993 - RNA, 20 nt, synthetic construct
  misc_feature 1..20: note = antisense sequence
  source 1..20: mol_type = other RNA
atgggtgaggttggcgattg

SEQ ID NO: 17994 - RNA, 20 nt, synthetic construct
  misc_feature 1..20: note = antisense sequence
  source 1..20: mol_type = other RNA
ctttaaggcccttcttttca

SEQ ID NO: 17995 - RNA, 20 nt, synthetic construct
  misc_feature 1..20: note = antisense sequence
  source 1..20: mol_type = other RNA
gactttaaggcccttctttt

SEQ ID NO: 17996 - RNA, 20 nt, synthetic construct
  misc_feature 1..20: note = antisense sequence
  source 1..20: mol_type = other RNA
ggactttaaggcccttcttt

SEQ ID NO: 17997 - RNA, 20 nt, synthetic construct
  misc_feature 1..20: note = antisense sequence
  source 1..20: mol_type = other RNA
aggactttaaggcccttctt

SEQ ID NO: 17998 - RNA, 20 nt, synthetic construct
  misc_feature 1..20: note = antisense sequence
  source 1..20: mol_type = other RNA
gaggactttaaggcccttct

SEQ ID NO: 17999 - RNA, 20 nt, synthetic construct
  misc_feature 1..20: note = antisense sequence
  source 1..20: mol_type = other RNA
tgaggactttaaggcccttc

SEQ ID NO: 18000 - RNA, 20 nt, synthetic construct
  misc_feature 1..20: note = antisense sequence
  source 1..20: mol_type = other RNA
gtgaggactttaaggccctt

SEQ ID NO: 18001 - RNA, 20 nt, synthetic construct
  misc_feature 1..20: note = antisense sequence
  source 1..20: mol_type = other RNA
atgtgaggactttaaggccc

SEQ ID NO: 18002 - RNA, 20 nt, synthetic construct
  misc_feature 1..20: note = antisense sequence
  source 1..20: mol_type = other RNA
catgtgaggactttaaggcc

SEQ ID NO: 18003 - RNA, 20 nt, synthetic construct
  misc_feature 1..20: note = antisense sequence
  source 1..20: mol_type = other RNA
ccatgtgaggactttaaggc

SEQ ID NO: 18004 - RNA, 20 nt, synthetic construct
  misc_feature 1..20: note = antisense sequence
  source 1..20: mol_type = other RNA
tccatgtgaggactttaagg

SEQ ID NO: 18005 - RNA, 20 nt, synthetic construct
  misc_feature 1..20: note = antisense sequence
  source 1..20: mol_type = other RNA
gcatccatgtgaggacttta

SEQ ID NO: 18006 - RNA, 20 nt, synthetic construct
  misc_feature 1..20: note = antisense sequence
  source 1..20: mol_type = other RNA
agcatccatgtgaggacttt

SEQ ID NO: 18007 - RNA, 20 nt, synthetic construct
  misc_feature 1..20: note = antisense sequence
  source 1..20: mol_type = other RNA
cagcatccatgtgaggactt

SEQ ID NO: 18008 - RNA, 20 nt, synthetic construct
  misc_feature 1..20: note = antisense sequence
  source 1..20: mol_type = other RNA
acagcatccatgtgaggact

SEQ ID NO: 18009 - RNA, 20 nt, synthetic construct
  misc_feature 1..20: note = antisense sequence
  source 1..20: mol_type = other RNA
tacagcatccatgtgaggac

SEQ ID NO: 18010 - RNA, 20 nt, synthetic construct
  misc_feature 1..20: note = antisense sequence
  source 1..20: mol_type = other RNA
atacagcatccatgtgagga

SEQ ID NO: 18011 - RNA, 20 nt, synthetic construct
  misc_feature 1..20: note = antisense sequence
  source 1..20: mol_type = other RNA
ctggaagctgtttgcattta

SEQ ID NO: 18012 - RNA, 20 nt, synthetic construct
  misc_feature 1..20: note = antisense sequence
  source 1..20: mol_type = other RNA
cacctggaagctgtttgcat

SEQ ID NO: 18013 - RNA, 20 nt, synthetic construct
  misc_feature 1..20: note = antisense sequence
  source 1..20: mol_type = other RNA
tcacctggaagctgtttgca

SEQ ID NO: 18014 - RNA, 20 nt, synthetic construct
  misc_feature 1..20: note = antisense sequence
  source 1..20: mol_type = other RNA
ctcacctggaagctgtttgc

SEQ ID NO: 18015 - RNA, 20 nt, synthetic construct
  misc_feature 1..20: note = antisense sequence
  source 1..20: mol_type = other RNA
ggactcacctggaagctgtt

SEQ ID NO: 18016 - RNA, 20 nt, synthetic construct
  misc_feature 1..20: note = antisense sequence
  source 1..20: mol_type = other RNA
aggactcacctggaagctgt

SEQ ID NO: 18017 - RNA, 20 nt, synthetic construct
  misc_feature 1..20: note = antisense sequence
  source 1..20: mol_type = other RNA
agaggactcacctggaagct

SEQ ID NO: 18018 - RNA, 20 nt, synthetic construct
  misc_feature 1..20: note = antisense sequence
  source 1..20: mol_type = other RNA
gcagtctgattggcagccag

SEQ ID NO: 18019 - RNA, 20 nt, synthetic construct
  misc_feature 1..20: note = antisense sequence
  source 1..20: mol_type = other RNA
agcagtctgattggcagcca

SEQ ID NO: 18020 - RNA, 20 nt, synthetic construct
  misc_feature 1..20: note = antisense sequence
  source 1..20: mol_type = other RNA
ggtttagaatcagcagtctg

SEQ ID NO: 18021 - RNA, 20 nt, synthetic construct
  misc_feature 1..20: note = antisense sequence
  source 1..20: mol_type = other RNA
tggtttagaatcagcagtct

SEQ ID NO: 18022 - RNA, 20 nt, synthetic construct
  misc_feature 1..20: note = antisense sequence
  source 1..20: mol_type = other RNA
tctgtgtgagaatggtttag

SEQ ID NO: 18023 - RNA, 20 nt, synthetic construct
  misc_feature 1..20: note = antisense sequence
  source 1..20: mol_type = other RNA
atacctggtgttggtttcag

SEQ ID NO: 18024 - RNA, 20 nt, synthetic construct
  misc_feature 1..20: note = antisense sequence
  source 1..20: mol_type = other RNA
aatacctggtgttggtttca

SEQ ID NO: 18025 - RNA, 20 nt, synthetic construct
  misc_feature 1..20: note = antisense sequence
  source 1..20: mol_type = other RNA
taatacctggtgttggtttc

SEQ ID NO: 18026 - RNA, 20 nt, synthetic construct
  misc_feature 1..20: note = antisense sequence
  source 1..20: mol_type = other RNA
cttggtttcctttcactgca

SEQ ID NO: 18027 - RNA, 20 nt, synthetic construct
  misc_feature 1..20: note = antisense sequence
  source 1..20: mol_type = other RNA
ccttggtttcctttcactgc

SEQ ID NO: 18028 - RNA, 20 nt, synthetic construct
  misc_feature 1..20: note = antisense sequence
  source 1..20: mol_type = other RNA
ttgtaatgtgccttggtttc

SEQ ID NO: 18029 - RNA, 20 nt, synthetic construct
  misc_feature 1..20: note = antisense sequence
  source 1..20: mol_type = other RNA
gccttttgtaatgtgccttg

SEQ ID NO: 18030 - RNA, 20 nt, synthetic construct
  misc_feature 1..20: note = antisense sequence
  source 1..20: mol_type = other RNA
agcagcatttagccttttgt

SEQ ID NO: 18031 - RNA, 20 nt, synthetic construct
  misc_feature 1..20: note = antisense sequence
  source 1..20: mol_type = other RNA
acagcagcatttagcctttt

SEQ ID NO: 18032 - RNA, 20 nt, synthetic construct
  misc_feature 1..20: note = antisense sequence
  source 1..20: mol_type = other RNA
aaacagcagcatttagcctt

SEQ ID NO: 18033 - RNA, 20 nt, synthetic construct
  misc_feature 1..20: note = antisense sequence
  source 1..20: mol_type = other RNA
tagaaacagcagcatttagc

SEQ ID NO: 18034 - RNA, 20 nt, synthetic construct
  misc_feature 1..20: note = antisense sequence
  source 1..20: mol_type = other RNA
ccacttagaaacagcagcat

SEQ ID NO: 18035 - RNA, 20 nt, synthetic construct
  misc_feature 1..20: note = antisense sequence
  source 1..20: mol_type = other RNA
tccacttagaaacagcagca

SEQ ID NO: 18036 - RNA, 20 nt, synthetic construct
  misc_feature 1..20: note = antisense sequence
  source 1..20: mol_type = other RNA
tgcttccacttagaaacagc

SEQ ID NO: 18037 - RNA, 20 nt, synthetic construct
  misc_feature 1..20: note = antisense sequence
  source 1..20: mol_type = other RNA
ttgttcaacagtgcttccac

SEQ ID NO: 18038 - RNA, 20 nt, synthetic construct
  misc_feature 1..20: note = antisense sequence
  source 1..20: mol_type = other RNA
gttgttcaacagtgcttcca

SEQ ID NO: 18039 - RNA, 20 nt, synthetic construct
  misc_feature 1..20: note = antisense sequence
  source 1..20: mol_type = other RNA
acctaagagtgttgttcaac

SEQ ID NO: 18040 - RNA, 20 nt, synthetic construct
  misc_feature 1..20: note = antisense sequence
  source 1..20: mol_type = other RNA
cacctaagagtgttgttcaa

SEQ ID NO: 18041 - RNA, 20 nt, synthetic construct
  misc_feature 1..20: note = antisense sequence
  source 1..20: mol_type = other RNA
ccacctaagagtgttgttca

SEQ ID NO: 18042 - RNA, 20 nt, synthetic construct
  misc_feature 1..20: note = antisense sequence
  source 1..20: mol_type = other RNA
tccacctaagagtgttgttc

SEQ ID NO: 18043 - RNA, 20 nt, synthetic construct
  misc_feature 1..20: note = antisense sequence
  source 1..20: mol_type = other RNA
ttccacctaagagtgttgtt

SEQ ID NO: 18044 - RNA, 20 nt, synthetic construct
  misc_feature 1..20: note = antisense sequence
  source 1..20: mol_type = other RNA
attccacctaagagtgttgt

SEQ ID NO: 18045 - RNA, 20 nt, synthetic construct
  misc_feature 1..20: note = antisense sequence
  source 1..20: mol_type = other RNA
tattccacctaagagtgttg

SEQ ID NO: 18046 - RNA, 20 nt, synthetic construct
  misc_feature 1..20: note = antisense sequence
  source 1..20: mol_type = other RNA
gatttgttcgtccgattaca

SEQ ID NO: 18047 - RNA, 20 nt, synthetic construct
  misc_feature 1..20: note = antisense sequence
  source 1..20: mol_type = other RNA
tgatttgttcgtccgattac

SEQ ID NO: 18048 - RNA, 20 nt, synthetic construct
  misc_feature 1..20: note = antisense sequence
  source 1..20: mol_type = other RNA
ctgatttgttcgtccgatta

SEQ ID NO: 18049 - RNA, 20 nt, synthetic construct
  misc_feature 1..20: note = antisense sequence
  source 1..20: mol_type = other RNA
gctgatttgttcgtccgatt

SEQ ID NO: 18050 - RNA, 20 nt, synthetic construct
  misc_feature 1..20: note = antisense sequence
  source 1..20: mol_type = other RNA
tgctgatttgttcgtccgat

SEQ ID NO: 18051 - RNA, 20 nt, synthetic construct
  misc_feature 1..20: note = antisense sequence
  source 1..20: mol_type = other RNA
atgctgatttgttcgtccga

SEQ ID NO: 18052 - RNA, 20 nt, synthetic construct
  misc_feature 1..20: note = antisense sequence
  source 1..20: mol_type = other RNA
gatgctgatttgttcgtccg

SEQ ID NO: 18053 - RNA, 20 nt, synthetic construct
  misc_feature 1..20: note = antisense sequence
  source 1..20: mol_type = other RNA
cctgaggatcaaagatgctg

SEQ ID NO: 18054 - RNA, 20 nt, synthetic construct
  misc_feature 1..20: note = antisense sequence
  source 1..20: mol_type = other RNA
gatgctacttcacattttcc

SEQ ID NO: 18055 - RNA, 20 nt, synthetic construct
  misc_feature 1..20: note = antisense sequence
  source 1..20: mol_type = other RNA
tccagatgctacttcacatt

SEQ ID NO: 18056 - RNA, 20 nt, synthetic construct
  misc_feature 1..20: note = antisense sequence
  source 1..20: mol_type = other RNA
ctccagatgctacttcacat

SEQ ID NO: 18057 - RNA, 20 nt, synthetic construct
  misc_feature 1..20: note = antisense sequence
  source 1..20: mol_type = other RNA
actccagatgctacttcaca

SEQ ID NO: 18058 - RNA, 20 nt, synthetic construct
  misc_feature 1..20: note = antisense sequence
  source 1..20: mol_type = other RNA
agactccagatgctacttca

SEQ ID NO: 18059 - RNA, 20 nt, synthetic construct
  misc_feature 1..20: note = antisense sequence
  source 1..20: mol_type = other RNA
gagactccagatgctacttc

SEQ ID NO: 18060 - RNA, 20 nt, synthetic construct
  misc_feature 1..20: note = antisense sequence
  source 1..20: mol_type = other RNA
agagactccagatgctactt

SEQ ID NO: 18061 - RNA, 20 nt, synthetic construct
  misc_feature 1..20: note = antisense sequence
  source 1..20: mol_type = other RNA
taagagactccagatgctac

SEQ ID NO: 18062 - RNA, 20 nt, synthetic construct
  misc_feature 1..20: note = antisense sequence
  source 1..20: mol_type = other RNA
ttaagagactccagatgcta

SEQ ID NO: 18063 - RNA, 20 nt, synthetic construct
  misc_feature 1..20: note = antisense sequence
  source 1..20: mol_type = other RNA
tgggtggagatgctgtaggg

SEQ ID NO: 18064 - RNA, 20 nt, synthetic construct
  misc_feature 1..20: note = antisense sequence
  source 1..20: mol_type = other RNA
ctgggtggagatgctgtagg

SEQ ID NO: 18065 - RNA, 20 nt, synthetic construct
  misc_feature 1..20: note = antisense sequence
  source 1..20: mol_type = other RNA
cctgggtggagatgctgtag

SEQ ID NO: 18066 - RNA, 20 nt, synthetic construct
  misc_feature 1..20: note = antisense sequence
  source 1..20: mol_type = other RNA
tcctgggtggagatgctgta

SEQ ID NO: 18067 - RNA, 20 nt, synthetic construct
  misc_feature 1..20: note = antisense sequence
  source 1..20: mol_type = other RNA
atccattcccattagttagg

SEQ ID NO: 18068 - RNA, 20 nt, synthetic construct
  misc_feature 1..20: note = antisense sequence
  source 1..20: mol_type = other RNA
gatccattcccattagttag

SEQ ID NO: 18069 - RNA, 20 nt, synthetic construct
  misc_feature 1..20: note = antisense sequence
  source 1..20: mol_type = other RNA
tcaagggttaagcatcggcc

SEQ ID NO: 18070 - RNA, 20 nt, synthetic construct
  misc_feature 1..20: note = antisense sequence
  source 1..20: mol_type = other RNA
ttcaagggttaagcatcggc

SEQ ID NO: 18071 - RNA, 20 nt, synthetic construct
  misc_feature 1..20: note = antisense sequence
  source 1..20: mol_type = other RNA
gttcaagggttaagcatcgg

SEQ ID NO: 18072 - RNA, 20 nt, synthetic construct
  misc_feature 1..20: note = antisense sequence
  source 1..20: mol_type = other RNA
ggttcaagggttaagcatcg

SEQ ID NO: 18073 - RNA, 20 nt, synthetic construct
  misc_feature 1..20: note = antisense sequence
  source 1..20: mol_type = other RNA
gggttcaagggttaagcatc

SEQ ID NO: 18074 - RNA, 20 nt, synthetic construct
  misc_feature 1..20: note = antisense sequence
  source 1..20: mol_type = other RNA
tagtgggttcaagggttaag

SEQ ID NO: 18075 - RNA, 20 nt, synthetic construct
  misc_feature 1..20: note = antisense sequence
  source 1..20: mol_type = other RNA
gtagtgggttcaagggttaa

SEQ ID NO: 18076 - RNA, 20 nt, synthetic construct
  misc_feature 1..20: note = antisense sequence
  source 1..20: mol_type = other RNA
agtagtgggttcaagggtta

SEQ ID NO: 18077 - RNA, 20 nt, synthetic construct
  misc_feature 1..20: note = antisense sequence
  source 1..20: mol_type = other RNA
cagtagtgggttcaagggtt

SEQ ID NO: 18078 - RNA, 20 nt, synthetic construct
  misc_feature 1..20: note = antisense sequence
  source 1..20: mol_type = other RNA
acagtagtgggttcaagggt

SEQ ID NO: 18079 - RNA, 20 nt, synthetic construct
  misc_feature 1..20: note = antisense sequence
  source 1..20: mol_type = other RNA
aacagtagtgggttcaaggg

SEQ ID NO: 18080 - RNA, 20 nt, synthetic construct
  misc_feature 1..20: note = antisense sequence
  source 1..20: mol_type = other RNA
cataagaacagtagtgggtt

SEQ ID NO: 18081 - RNA, 20 nt, synthetic construct
  misc_feature 1..20: note = antisense sequence
  source 1..20: mol_type = other RNA
gcataagaacagtagtgggt

SEQ ID NO: 18082 - RNA, 20 nt, synthetic construct
  misc_feature 1..20: note = antisense sequence
  source 1..20: mol_type = other RNA
ggcataagaacagtagtggg

SEQ ID NO: 18083 - RNA, 20 nt, synthetic construct
  misc_feature 1..20: note = antisense sequence
  source 1..20: mol_type = other RNA
cctgatgtaaggtgcagatc

SEQ ID NO: 18084 - RNA, 20 nt, synthetic construct
  misc_feature 1..20: note = antisense sequence
  source 1..20: mol_type = other RNA
gcctgatgtaaggtgcagat

SEQ ID NO: 18085 - RNA, 20 nt, synthetic construct
  misc_feature 1..20: note = antisense sequence
  source 1..20: mol_type = other RNA
tgcctgatgtaaggtgcaga

SEQ ID NO: 18086 - RNA, 20 nt, synthetic construct
  misc_feature 1..20: note = antisense sequence
  source 1..20: mol_type = other RNA
gtgcctgatgtaaggtgcag

SEQ ID NO: 18087 - RNA, 20 nt, synthetic construct
  misc_feature 1..20: note = antisense sequence
  source 1..20: mol_type = other RNA
ggtgcctgatgtaaggtgca

SEQ ID NO: 18088 - RNA, 20 nt, synthetic construct
  misc_feature 1..20: note = antisense sequence
  source 1..20: mol_type = other RNA
gggtgcctgatgtaaggtgc

SEQ ID NO: 18089 - RNA, 20 nt, synthetic construct
  misc_feature 1..20: note = antisense sequence
  source 1..20: mol_type = other RNA
cgggtgcctgatgtaaggtg

SEQ ID NO: 18090 - RNA, 20 nt, synthetic construct
  misc_feature 1..20: note = antisense sequence
  source 1..20: mol_type = other RNA
ccgggtgcctgatgtaaggt

SEQ ID NO: 18091 - RNA, 20 nt, synthetic construct
  misc_feature 1..20: note = antisense sequence
  source 1..20: mol_type = other RNA
gatgagtcacccttacatat

SEQ ID NO: 18092 - RNA, 20 nt, synthetic construct
  misc_feature 1..20: note = antisense sequence
  source 1..20: mol_type = other RNA
tgatgagtcacccttacata

SEQ ID NO: 18093 - RNA, 20 nt, synthetic construct
  misc_feature 1..20: note = antisense sequence
  source 1..20: mol_type = other RNA
gcaaggagtccaaagttagg

SEQ ID NO: 18094 - RNA, 20 nt, synthetic construct
  misc_feature 1..20: note = antisense sequence
  source 1..20: mol_type = other RNA
agcaaggagtccaaagttag

SEQ ID NO: 18095 - RNA, 20 nt, synthetic construct
  misc_feature 1..20: note = antisense sequence
  source 1..20: mol_type = other RNA
aagcaaggagtccaaagtta

SEQ ID NO: 18096 - RNA, 20 nt, synthetic construct
  misc_feature 1..20: note = antisense sequence
  source 1..20: mol_type = other RNA
ctcaaagcaaggagtccaaa

SEQ ID NO: 18097 - RNA, 20 nt, synthetic construct
  misc_feature 1..20: note = antisense sequence
  source 1..20: mol_type = other RNA
ccgatctcaaagcaaggagt

SEQ ID NO: 18098 - RNA, 20 nt, synthetic construct
  misc_feature 1..20: note = antisense sequence
  source 1..20: mol_type = other RNA
accgatctcaaagcaaggag

SEQ ID NO: 18099 - RNA, 20 nt, synthetic construct
  misc_feature 1..20: note = antisense sequence
  source 1..20: mol_type = other RNA
taccgatctcaaagcaagga

SEQ ID NO: 18100 - RNA, 20 nt, synthetic construct
  misc_feature 1..20: note = antisense sequence
  source 1..20: mol_type = other RNA
ataccgatctcaaagcaagg

SEQ ID NO: 18101 - RNA, 20 nt, synthetic construct
  misc_feature 1..20: note = antisense sequence
  source 1..20: mol_type = other RNA
aataccgatctcaaagcaag

SEQ ID NO: 18102 - RNA, 20 nt, synthetic construct
  misc_feature 1..20: note = antisense sequence
  source 1..20: mol_type = other RNA
taaattcatcagctactggg

SEQ ID NO: 18103 - RNA, 20 nt, synthetic construct
  misc_feature 1..20: note = antisense sequence
  source 1..20: mol_type = other RNA
ctaaattcatcagctactgg

SEQ ID NO: 18104 - RNA, 20 nt, synthetic construct
  misc_feature 1..20: note = antisense sequence
  source 1..20: mol_type = other RNA
gggagtcttgtataaagttc

SEQ ID NO: 18105 - RNA, 20 nt, synthetic construct
  misc_feature 1..20: note = antisense sequence
  source 1..20: mol_type = other RNA
ctagggagtcttgtataaag

SEQ ID NO: 18106 - RNA, 20 nt, synthetic construct
  misc_feature 1..20: note = antisense sequence
  source 1..20: mol_type = other RNA
gctagggagtcttgtataaa

SEQ ID NO: 18107 - RNA, 20 nt, synthetic construct
  misc_feature 1..20: note = antisense sequence
  source 1..20: mol_type = other RNA
tgctagggagtcttgtataa

SEQ ID NO: 18108 - RNA, 20 nt, synthetic construct
  misc_feature 1..20: note = antisense sequence
  source 1..20: mol_type = other RNA
atgctagggagtcttgtata

SEQ ID NO: 18109 - RNA, 20 nt, synthetic construct
  misc_feature 1..20: note = antisense sequence
  source 1..20: mol_type = other RNA
aatgctagggagtcttgtat

SEQ ID NO: 18110 - RNA, 20 nt, synthetic construct
  misc_feature 1..20: note = antisense sequence
  source 1..20: mol_type = other RNA
aaaatgctagggagtcttgt

SEQ ID NO: 18111 - RNA, 20 nt, synthetic construct
  misc_feature 1..20: note = antisense sequence
  source 1..20: mol_type = other RNA
gaaaatgctagggagtcttg

SEQ ID NO: 18112 - RNA, 20 nt, synthetic construct
  misc_feature 1..20: note = antisense sequence
  source 1..20: mol_type = other RNA
ggaaaatgctagggagtctt

SEQ ID NO: 18113 - RNA, 20 nt, synthetic construct
  misc_feature 1..20: note = antisense sequence
  source 1..20: mol_type = other RNA
ggaggaaaatgctagggagt

SEQ ID NO: 18114 - RNA, 20 nt, synthetic construct
  misc_feature 1..20: note = antisense sequence
  source 1..20: mol_type = other RNA
gcctgtgggaggaggaaaat

SEQ ID NO: 18115 - RNA, 20 nt, synthetic construct
  misc_feature 1..20: note = antisense sequence
  source 1..20: mol_type = other RNA
cagcctgtgggaggaggaaa

SEQ ID NO: 18116 - RNA, 20 nt, synthetic construct
  misc_feature 1..20: note = antisense sequence
  source 1..20: mol_type = other RNA
aaattctccagcctgtggga

SEQ ID NO: 18117 - RNA, 20 nt, synthetic construct
  misc_feature 1..20: note = antisense sequence
  source 1..20: mol_type = other RNA
agcactgaaattctccagcc

SEQ ID NO: 18118 - RNA, 20 nt, synthetic construct
  misc_feature 1..20: note = antisense sequence
  source 1..20: mol_type = other RNA
tagcactgaaattctccagc

SEQ ID NO: 18119 - RNA, 20 nt, synthetic construct
  misc_feature 1..20: note = antisense sequence
  source 1..20: mol_type = other RNA
attggctctggctcctactg

SEQ ID NO: 18120 - RNA, 20 nt, synthetic construct
  misc_feature 1..20: note = antisense sequence
  source 1..20: mol_type = other RNA
aattggctctggctcctact

SEQ ID NO: 18121 - RNA, 20 nt, synthetic construct
  misc_feature 1..20: note = antisense sequence
  source 1..20: mol_type = other RNA
aaattggctctggctcctac

SEQ ID NO: 18122 - RNA, 20 nt, synthetic construct
  misc_feature 1..20: note = antisense sequence
  source 1..20: mol_type = other RNA
caaattggctctggctccta

SEQ ID NO: 18123 - RNA, 20 nt, synthetic construct
  misc_feature 1..20: note = antisense sequence
  source 1..20: mol_type = other RNA
gcaaattggctctggctcct

SEQ ID NO: 18124 - RNA, 20 nt, synthetic construct
  misc_feature 1..20: note = antisense sequence
  source 1..20: mol_type = other RNA
tgcaaattggctctggctcc

SEQ ID NO: 18125 - RNA, 20 nt, synthetic construct
  misc_feature 1..20: note = antisense sequence
  source 1..20: mol_type = other RNA
agagatcctgcaaattggct

SEQ ID NO: 18126 - RNA, 20 nt, synthetic construct
  misc_feature 1..20: note = antisense sequence
  source 1..20: mol_type = other RNA
ggaaaagagatcctgcaaat

SEQ ID NO: 18127 - RNA, 20 nt, synthetic construct
  misc_feature 1..20: note = antisense sequence
  source 1..20: mol_type = other RNA
gaagccaactggaaggcaga

SEQ ID NO: 18128 - RNA, 20 nt, synthetic construct
  misc_feature 1..20: note = antisense sequence
  source 1..20: mol_type = other RNA
gagaagagaagccaactgga

SEQ ID NO: 18129 - RNA, 20 nt, synthetic construct
  misc_feature 1..20: note = antisense sequence
  source 1..20: mol_type = other RNA
gctgagaagagaagccaact

SEQ ID NO: 18130 - RNA, 20 nt, synthetic construct
  misc_feature 1..20: note = antisense sequence
  source 1..20: mol_type = other RNA
cagagaatggccttgctgag

SEQ ID NO: 18131 - RNA, 20 nt, synthetic construct
  misc_feature 1..20: note = antisense sequence
  source 1..20: mol_type = other RNA
gcagagaatggccttgctga

SEQ ID NO: 18132 - RNA, 20 nt, synthetic construct
  misc_feature 1..20: note = antisense sequence
  source 1..20: mol_type = other RNA
atgggcacaaggcagagaat

SEQ ID NO: 18133 - RNA, 20 nt, synthetic construct
  misc_feature 1..20: note = antisense sequence
  source 1..20: mol_type = other RNA
tatgggcacaaggcagagaa

SEQ ID NO: 18134 - RNA, 20 nt, synthetic construct
  misc_feature 1..20: note = antisense sequence
  source 1..20: mol_type = other RNA
accacccaaggccctgctat

SEQ ID NO: 18135 - RNA, 20 nt, synthetic construct
  misc_feature 1..20: note = antisense sequence
  source 1..20: mol_type = other RNA
tgctcaccaacaaagataac

SEQ ID NO: 18136 - RNA, 20 nt, synthetic construct
  misc_feature 1..20: note = antisense sequence
  source 1..20: mol_type = other RNA
ctgctcaccaacaaagataa

SEQ ID NO: 18137 - RNA, 20 nt, synthetic construct
  misc_feature 1..20: note = antisense sequence
  source 1..20: mol_type = other RNA
agtgtctgctcaccaacaaa

SEQ ID NO: 18138 - RNA, 20 nt, synthetic construct
  misc_feature 1..20: note = antisense sequence
  source 1..20: mol_type = other RNA
ggatctctgagtgtctgctc

SEQ ID NO: 18139 - RNA, 20 nt, synthetic construct
  misc_feature 1..20: note = antisense sequence
  source 1..20: mol_type = other RNA
aggatctctgagtgtctgct

SEQ ID NO: 18140 - RNA, 20 nt, synthetic construct
  misc_feature 1..20: note = antisense sequence
  source 1..20: mol_type = other RNA
aaggatctctgagtgtctgc

SEQ ID NO: 18141 - RNA, 20 nt, synthetic construct
  misc_feature 1..20: note = antisense sequence
  source 1..20: mol_type = other RNA
aaaggatctctgagtgtctg

SEQ ID NO: 18142 - RNA, 20 nt, synthetic construct
  misc_feature 1..20: note = antisense sequence
  source 1..20: mol_type = other RNA
ccctggtgtgtcagataatt

SEQ ID NO: 18143 - RNA, 20 nt, synthetic construct
  misc_feature 1..20: note = antisense sequence
  source 1..20: mol_type = other RNA
tttccctggtgtgtcagata

SEQ ID NO: 18144 - RNA, 20 nt, synthetic construct
  misc_feature 1..20: note = antisense sequence
  source 1..20: mol_type = other RNA
atttccctggtgtgtcagat

SEQ ID NO: 18145 - RNA, 20 nt, synthetic construct
  misc_feature 1..20: note = antisense sequence
  source 1..20: mol_type = other RNA
gatttccctggtgtgtcaga

SEQ ID NO: 18146 - RNA, 20 nt, synthetic construct
  misc_feature 1..20: note = antisense sequence
  source 1..20: mol_type = other RNA
ccaagatttccctggtgtgt

SEQ ID NO: 18147 - RNA, 20 nt, synthetic construct
  misc_feature 1..20: note = antisense sequence
  source 1..20: mol_type = other RNA
gccaagatttccctggtgtg

SEQ ID NO: 18148 - RNA, 20 nt, synthetic construct
  misc_feature 1..20: note = antisense sequence
  source 1..20: mol_type = other RNA
tgccaagatttccctggtgt

SEQ ID NO: 18149 - RNA, 20 nt, synthetic construct
  misc_feature 1..20: note = antisense sequence
  source 1..20: mol_type = other RNA
ttgccaagatttccctggtg

SEQ ID NO: 18150 - RNA, 20 nt, synthetic construct
  misc_feature 1..20: note = antisense sequence
  source 1..20: mol_type = other RNA
attgccaagatttccctggt

SEQ ID NO: 18151 - RNA, 20 nt, synthetic construct
  misc_feature 1..20: note = antisense sequence
  source 1..20: mol_type = other RNA
tgattgccaagatttccctg

SEQ ID NO: 18152 - RNA, 20 nt, synthetic construct
  misc_feature 1..20: note = antisense sequence
  source 1..20: mol_type = other RNA
ttgattgccaagatttccct

SEQ ID NO: 18153 - RNA, 20 nt, synthetic construct
  misc_feature 1..20: note = antisense sequence
  source 1..20: mol_type = other RNA
ccttagttgattgccaagat

SEQ ID NO: 18154 - RNA, 20 nt, synthetic construct
  misc_feature 1..20: note = antisense sequence
  source 1..20: mol_type = other RNA
gtccttagttgattgccaag

SEQ ID NO: 18155 - RNA, 20 nt, synthetic construct
  misc_feature 1..20: note = antisense sequence
  source 1..20: mol_type = other RNA
ggtccttagttgattgccaa

SEQ ID NO: 18156 - RNA, 20 nt, synthetic construct
  misc_feature 1..20: note = antisense sequence
  source 1..20: mol_type = other RNA
aggtccttagttgattgcca

SEQ ID NO: 18157 - RNA, 20 nt, synthetic construct
  misc_feature 1..20: note = antisense sequence
  source 1..20: mol_type = other RNA
caggtccttagttgattgcc

SEQ ID NO: 18158 - RNA, 20 nt, synthetic construct
  misc_feature 1..20: note = antisense sequence
  source 1..20: mol_type = other RNA
cacaggtccttagttgattg

SEQ ID NO: 18159 - RNA, 20 nt, synthetic construct
  misc_feature 1..20: note = antisense sequence
  source 1..20: mol_type = other RNA
tcacaggtccttagttgatt

SEQ ID NO: 18160 - RNA, 20 nt, synthetic construct
  misc_feature 1..20: note = antisense sequence
  source 1..20: mol_type = other RNA
gtcacaggtccttagttgat

SEQ ID NO: 18161 - RNA, 20 nt, synthetic construct
  misc_feature 1..20: note = antisense sequence
  source 1..20: mol_type = other RNA
tgtcacaggtccttagttga

SEQ ID NO: 18162 - RNA, 20 nt, synthetic construct
  misc_feature 1..20: note = antisense sequence
  source 1..20: mol_type = other RNA
gtgtcacaggtccttagttg

SEQ ID NO: 18163 - RNA, 20 nt, synthetic construct
  misc_feature 1..20: note = antisense sequence
  source 1..20: mol_type = other RNA
agtgtcacaggtccttagtt

SEQ ID NO: 18164 - RNA, 20 nt, synthetic construct
  misc_feature 1..20: note = antisense sequence
  source 1..20: mol_type = other RNA
gagtgtcacaggtccttagt

SEQ ID NO: 18165 - RNA, 20 nt, synthetic construct
  misc_feature 1..20: note = antisense sequence
  source 1..20: mol_type = other RNA
tgagtgtcacaggtccttag

SEQ ID NO: 18166 - RNA, 20 nt, synthetic construct
  misc_feature 1..20: note = antisense sequence
  source 1..20: mol_type = other RNA
atgagtgtcacaggtcctta

SEQ ID NO: 18167 - RNA, 20 nt, synthetic construct
  misc_feature 1..20: note = antisense sequence
  source 1..20: mol_type = other RNA
ttatgagtgtcacaggtcct

SEQ ID NO: 18168 - RNA, 20 nt, synthetic construct
  misc_feature 1..20: note = antisense sequence
  source 1..20: mol_type = other RNA
gttatgagtgtcacaggtcc

SEQ ID NO: 18169 - RNA, 20 nt, synthetic construct
  misc_feature 1..20: note = antisense sequence
  source 1..20: mol_type = other RNA
agttatgagtgtcacaggtc

SEQ ID NO: 18170 - RNA, 20 nt, synthetic construct
  misc_feature 1..20: note = antisense sequence
  source 1..20: mol_type = other RNA
tagttatgagtgtcacaggt

SEQ ID NO: 18171 - RNA, 20 nt, synthetic construct
  misc_feature 1..20: note = antisense sequence
  source 1..20: mol_type = other RNA
atagttatgagtgtcacagg

SEQ ID NO: 18172 - RNA, 20 nt, synthetic construct
  misc_feature 1..20: note = antisense sequence
  source 1..20: mol_type = other RNA
catagttatgagtgtcacag

SEQ ID NO: 18173 - RNA, 20 nt, synthetic construct
  misc_feature 1..20: note = antisense sequence
  source 1..20: mol_type = other RNA
ttggatctcagtctattgca

SEQ ID NO: 18174 - RNA, 20 nt, synthetic construct
  misc_feature 1..20: note = antisense sequence
  source 1..20: mol_type = other RNA
attggatctcagtctattgc

SEQ ID NO: 18175 - RNA, 20 nt, synthetic construct
  misc_feature 1..20: note = antisense sequence
  source 1..20: mol_type = other RNA
cattggatctcagtctattg

SEQ ID NO: 18176 - RNA, 20 nt, synthetic construct
  misc_feature 1..20: note = antisense sequence
  source 1..20: mol_type = other RNA
tcaagaccacaactggcttt

SEQ ID NO: 18177 - RNA, 20 nt, synthetic construct
  misc_feature 1..20: note = antisense sequence
  source 1..20: mol_type = other RNA
ttcaagaccacaactggctt

SEQ ID NO: 18178 - RNA, 20 nt, synthetic construct
  misc_feature 1..20: note = antisense sequence
  source 1..20: mol_type = other RNA
ttttcaagaccacaactggc

SEQ ID NO: 18179 - RNA, 20 nt, synthetic construct
  misc_feature 1..20: note = antisense sequence
  source 1..20: mol_type = other RNA
gggtgaggataagtaatgca

SEQ ID NO: 18180 - RNA, 20 nt, synthetic construct
  misc_feature 1..20: note = antisense sequence
  source 1..20: mol_type = other RNA
agggtgaggataagtaatgc

SEQ ID NO: 18181 - RNA, 20 nt, synthetic construct
  misc_feature 1..20: note = antisense sequence
  source 1..20: mol_type = other RNA
ccagtaatctctctctacct

SEQ ID NO: 18182 - RNA, 20 nt, synthetic construct
  misc_feature 1..20: note = antisense sequence
  source 1..20: mol_type = other RNA
cccagtaatctctctctacc

SEQ ID NO: 18183 - RNA, 20 nt, synthetic construct
  misc_feature 1..20: note = antisense sequence
  source 1..20: mol_type = other RNA
tcccagtaatctctctctac

SEQ ID NO: 18184 - RNA, 20 nt, synthetic construct
  misc_feature 1..20: note = antisense sequence
  source 1..20: mol_type = other RNA
ttcccagtaatctctctcta

SEQ ID NO: 18185 - RNA, 20 nt, synthetic construct
  misc_feature 1..20: note = antisense sequence
  source 1..20: mol_type = other RNA
agctattctgtagaggaaag

SEQ ID NO: 18186 - RNA, 20 nt, synthetic construct
  misc_feature 1..20: note = antisense sequence
  source 1..20: mol_type = other RNA
cagctattctgtagaggaaa

SEQ ID NO: 18187 - RNA, 20 nt, synthetic construct
  misc_feature 1..20: note = antisense sequence
  source 1..20: mol_type = other RNA
ccttctgcacagctattctg

SEQ ID NO: 18188 - RNA, 20 nt, synthetic construct
  misc_feature 1..20: note = antisense sequence
  source 1..20: mol_type = other RNA
gtcctaagtgtggtggtccc

SEQ ID NO: 18189 - RNA, 20 nt, synthetic construct
  misc_feature 1..20: note = antisense sequence
  source 1..20: mol_type = other RNA
ggtcctaagtgtggtggtcc

SEQ ID NO: 18190 - RNA, 20 nt, synthetic construct
  misc_feature 1..20: note = antisense sequence
  source 1..20: mol_type = other RNA
tggtcctaagtgtggtggtc

SEQ ID NO: 18191 - RNA, 20 nt, synthetic construct
  misc_feature 1..20: note = antisense sequence
  source 1..20: mol_type = other RNA
ctggtcctaagtgtggtggt

SEQ ID NO: 18192 - RNA, 20 nt, synthetic construct
  misc_feature 1..20: note = antisense sequence
  source 1..20: mol_type = other RNA
acctggcactggtcctaagt

SEQ ID NO: 18193 - RNA, 20 nt, synthetic construct
  misc_feature 1..20: note = antisense sequence
  source 1..20: mol_type = other RNA
cacctggcactggtcctaag

SEQ ID NO: 18194 - RNA, 20 nt, synthetic construct
  misc_feature 1..20: note = antisense sequence
  source 1..20: mol_type = other RNA
gtcacctggcactggtccta

SEQ ID NO: 18195 - RNA, 20 nt, synthetic construct
  misc_feature 1..20: note = antisense sequence
  source 1..20: mol_type = other RNA
gattgtcacctggcactggt

SEQ ID NO: 18196 - RNA, 20 nt, synthetic construct
  misc_feature 1..20: note = antisense sequence
  source 1..20: mol_type = other RNA
aagattgtcacctggcactg

SEQ ID NO: 18197 - RNA, 20 nt, synthetic construct
  misc_feature 1..20: note = antisense sequence
  source 1..20: mol_type = other RNA
aaagattgtcacctggcact

SEQ ID NO: 18198 - RNA, 20 nt, synthetic construct
  misc_feature 1..20: note = antisense sequence
  source 1..20: mol_type = other RNA
tctctcaaggtgcaaaatgc

SEQ ID NO: 18199 - RNA, 20 nt, synthetic construct
  misc_feature 1..20: note = antisense sequence
  source 1..20: mol_type = other RNA
ttttcctgtctctcaaggtg

SEQ ID NO: 18200 - RNA, 20 nt, synthetic construct
  misc_feature 1..20: note = antisense sequence
  source 1..20: mol_type = other RNA
tttcatcatcttccactccc

SEQ ID NO: 18201 - RNA, 20 nt, synthetic construct
  misc_feature 1..20: note = antisense sequence
  source 1..20: mol_type = other RNA
agtttcatcatcttccactc

SEQ ID NO: 18202 - RNA, 20 nt, synthetic construct
  misc_feature 1..20: note = antisense sequence
  source 1..20: mol_type = other RNA
aggagtaaggatgtagacat

SEQ ID NO: 18203 - RNA, 20 nt, synthetic construct
  misc_feature 1..20: note = antisense sequence
  source 1..20: mol_type = other RNA
gaggagtaaggatgtagaca

SEQ ID NO: 18204 - RNA, 20 nt, synthetic construct
  misc_feature 1..20: note = antisense sequence
  source 1..20: mol_type = other RNA
ggtctgagtgagcttaaagt

SEQ ID NO: 18205 - RNA, 20 nt, synthetic construct
  misc_feature 1..20: note = antisense sequence
  source 1..20: mol_type = other RNA
gggtctgagtgagcttaaag

SEQ ID NO: 18206 - RNA, 20 nt, synthetic construct
  misc_feature 1..20: note = antisense sequence
  source 1..20: mol_type = other RNA
ttgtgggcagggtatatggg

SEQ ID NO: 18207 - RNA, 20 nt, synthetic construct
  misc_feature 1..20: note = antisense sequence
  source 1..20: mol_type = other RNA
attgtgggcagggtatatgg

SEQ ID NO: 18208 - RNA, 20 nt, synthetic construct
  misc_feature 1..20: note = antisense sequence
  source 1..20: mol_type = other RNA
gtattgtgggcagggtatat

SEQ ID NO: 18209 - RNA, 20 nt, synthetic construct
  misc_feature 1..20: note = antisense sequence
  source 1..20: mol_type = other RNA
agtattgtgggcagggtata

SEQ ID NO: 18210 - RNA, 20 nt, synthetic construct
  misc_feature 1..20: note = antisense sequence
  source 1..20: mol_type = other RNA
tagtattgtgggcagggtat

SEQ ID NO: 18211 - RNA, 20 nt, synthetic construct
  misc_feature 1..20: note = antisense sequence
  source 1..20: mol_type = other RNA
ttagtattgtgggcagggta

SEQ ID NO: 18212 - RNA, 20 nt, synthetic construct
  misc_feature 1..20: note = antisense sequence
  source 1..20: mol_type = other RNA
gttagtattgtgggcagggt

SEQ ID NO: 18213 - RNA, 20 nt, synthetic construct
  misc_feature 1..20: note = antisense sequence
  source 1..20: mol_type = other RNA
tgttagtattgtgggcaggg

SEQ ID NO: 18214 - RNA, 20 nt, synthetic construct
  misc_feature 1..20: note = antisense sequence
  source 1..20: mol_type = other RNA
atgtgttagtattgtgggca

SEQ ID NO: 18215 - RNA, 20 nt, synthetic construct
  misc_feature 1..20: note = antisense sequence
  source 1..20: mol_type = other RNA
catgtgttagtattgtgggc

SEQ ID NO: 18216 - RNA, 20 nt, synthetic construct
  misc_feature 1..20: note = antisense sequence
  source 1..20: mol_type = other RNA
tagccttggttaatctacac

SEQ ID NO: 18217 - RNA, 20 nt, synthetic construct
  misc_feature 1..20: note = antisense sequence
  source 1..20: mol_type = other RNA
caggaaattagccttggtta

SEQ ID NO: 18218 - RNA, 20 nt, synthetic construct
  misc_feature 1..20: note = antisense sequence
  source 1..20: mol_type = other RNA
ccaggaaattagccttggtt

SEQ ID NO: 18219 - RNA, 20 nt, synthetic construct
  misc_feature 1..20: note = antisense sequence
  source 1..20: mol_type = other RNA
tccaggaaattagccttggt

SEQ ID NO: 18220 - RNA, 20 nt, synthetic construct
  misc_feature 1..20: note = antisense sequence
  source 1..20: mol_type = other RNA
ctccaggaaattagccttgg

SEQ ID NO: 18221 - RNA, 20 nt, synthetic construct
  misc_feature 1..20: note = antisense sequence
  source 1..20: mol_type = other RNA
actccaggaaattagccttg

SEQ ID NO: 18222 - RNA, 20 nt, synthetic construct
  misc_feature 1..20: note = antisense sequence
  source 1..20: mol_type = other RNA
gttgctgcattaagtgattg

SEQ ID NO: 18223 - RNA, 20 nt, synthetic construct
  misc_feature 1..20: note = antisense sequence
  source 1..20: mol_type = other RNA
gatgttgctgcattaagtga

SEQ ID NO: 18224 - RNA, 20 nt, synthetic construct
  misc_feature 1..20: note = antisense sequence
  source 1..20: mol_type = other RNA
ctgagatgttgctgcattaa

SEQ ID NO: 18225 - RNA, 20 nt, synthetic construct
  misc_feature 1..20: note = antisense sequence
  source 1..20: mol_type = other RNA
gtctgagatgttgctgcatt

SEQ ID NO: 18226 - RNA, 20 nt, synthetic construct
  misc_feature 1..20: note = antisense sequence
  source 1..20: mol_type = other RNA
gggtctgagatgttgctgca

SEQ ID NO: 18227 - RNA, 20 nt, synthetic construct
  misc_feature 1..20: note = antisense sequence
  source 1..20: mol_type = other RNA
agggtctgagatgttgctgc

SEQ ID NO: 18228 - RNA, 20 nt, synthetic construct
  misc_feature 1..20: note = antisense sequence
  source 1..20: mol_type = other RNA
agagggtctgagatgttgct

SEQ ID NO: 18229 - RNA, 20 nt, synthetic construct
  misc_feature 1..20: note = antisense sequence
  source 1..20: mol_type = other RNA
aagagggtctgagatgttgc

SEQ ID NO: 18230 - RNA, 20 nt, synthetic construct
  misc_feature 1..20: note = antisense sequence
  source 1..20: mol_type = other RNA
gaagagggtctgagatgttg

SEQ ID NO: 18231 - RNA, 20 nt, synthetic construct
  misc_feature 1..20: note = antisense sequence
  source 1..20: mol_type = other RNA
gagtgaagagggtctgagat

SEQ ID NO: 18232 - RNA, 20 nt, synthetic construct
  misc_feature 1..20: note = antisense sequence
  source 1..20: mol_type = other RNA
tagagtgaagagggtctgag

SEQ ID NO: 18233 - RNA, 20 nt, synthetic construct
  misc_feature 1..20: note = antisense sequence
  source 1..20: mol_type = other RNA
ctagagtgaagagggtctga

SEQ ID NO: 18234 - RNA, 20 nt, synthetic construct
  misc_feature 1..20: note = antisense sequence
  source 1..20: mol_type = other RNA
taatggcaggcaatatcaga

SEQ ID NO: 18235 - RNA, 20 nt, synthetic construct
  misc_feature 1..20: note = antisense sequence
  source 1..20: mol_type = other RNA
gtaatggcaggcaatatcag

SEQ ID NO: 18236 - RNA, 20 nt, synthetic construct
  misc_feature 1..20: note = antisense sequence
  source 1..20: mol_type = other RNA
agtaatggcaggcaatatca

SEQ ID NO: 18237 - RNA, 20 nt, synthetic construct
  misc_feature 1..20: note = antisense sequence
  source 1..20: mol_type = other RNA
gagtaatggcaggcaatatc

SEQ ID NO: 18238 - RNA, 20 nt, synthetic construct
  misc_feature 1..20: note = antisense sequence
  source 1..20: mol_type = other RNA
tgagtaatggcaggcaatat

SEQ ID NO: 18239 - RNA, 20 nt, synthetic construct
  misc_feature 1..20: note = antisense sequence
  source 1..20: mol_type = other RNA
ctgagtaatggcaggcaata

SEQ ID NO: 18240 - RNA, 20 nt, synthetic construct
  misc_feature 1..20: note = antisense sequence
  source 1..20: mol_type = other RNA
tgcatcctgagtaatggcag

SEQ ID NO: 18241 - RNA, 20 nt, synthetic construct
  misc_feature 1..20: note = antisense sequence
  source 1..20: mol_type = other RNA
ttgcatcctgagtaatggca

SEQ ID NO: 18242 - RNA, 20 nt, synthetic construct
  misc_feature 1..20: note = antisense sequence
  source 1..20: mol_type = other RNA
cttgcatcctgagtaatggc

SEQ ID NO: 18243 - RNA, 20 nt, synthetic construct
  misc_feature 1..20: note = antisense sequence
  source 1..20: mol_type = other RNA
tctcttgcatcctgagtaat

SEQ ID NO: 18244 - RNA, 20 nt, synthetic construct
  misc_feature 1..20: note = antisense sequence
  source 1..20: mol_type = other RNA
atctcttgcatcctgagtaa

SEQ ID NO: 18245 - RNA, 20 nt, synthetic construct
  misc_feature 1..20: note = antisense sequence
  source 1..20: mol_type = other RNA
catctcttgcatcctgagta

SEQ ID NO: 18246 - RNA, 20 nt, synthetic construct
  misc_feature 1..20: note = antisense sequence
  source 1..20: mol_type = other RNA
gcatctcttgcatcctgagt

SEQ ID NO: 18247 - RNA, 20 nt, synthetic construct
  misc_feature 1..20: note = antisense sequence
  source 1..20: mol_type = other RNA
gagcatctcttgcatcctga

SEQ ID NO: 18248 - RNA, 20 nt, synthetic construct
  misc_feature 1..20: note = antisense sequence
  source 1..20: mol_type = other RNA
cctaataaggaatgcagagc

SEQ ID NO: 18249 - RNA, 20 nt, synthetic construct
  misc_feature 1..20: note = antisense sequence
  source 1..20: mol_type = other RNA
gcagtagttcttgtatgcaa

SEQ ID NO: 18250 - RNA, 20 nt, synthetic construct
  misc_feature 1..20: note = antisense sequence
  source 1..20: mol_type = other RNA
agggcagtagttcttgtatg

SEQ ID NO: 18251 - RNA, 20 nt, synthetic construct
  misc_feature 1..20: note = antisense sequence
  source 1..20: mol_type = other RNA
cagggcagtagttcttgtat

SEQ ID NO: 18252 - RNA, 20 nt, synthetic construct
  misc_feature 1..20: note = antisense sequence
  source 1..20: mol_type = other RNA
tcagggcagtagttcttgta

SEQ ID NO: 18253 - RNA, 20 nt, synthetic construct
  misc_feature 1..20: note = antisense sequence
  source 1..20: mol_type = other RNA
ttcagggcagtagttcttgt

SEQ ID NO: 18254 - RNA, 20 nt, synthetic construct
  misc_feature 1..20: note = antisense sequence
  source 1..20: mol_type = other RNA
tttcagggcagtagttcttg

SEQ ID NO: 18255 - RNA, 20 nt, synthetic construct
  misc_feature 1..20: note = antisense sequence
  source 1..20: mol_type = other RNA
atttcagggcagtagttctt

SEQ ID NO: 18256 - RNA, 20 nt, synthetic construct
  misc_feature 1..20: note = antisense sequence
  source 1..20: mol_type = other RNA
atatttcagggcagtagttc

SEQ ID NO: 18257 - RNA, 20 nt, synthetic construct
  misc_feature 1..20: note = antisense sequence
  source 1..20: mol_type = other RNA
tggatatttcagggcagtag

SEQ ID NO: 18258 - RNA, 20 nt, synthetic construct
  misc_feature 1..20: note = antisense sequence
  source 1..20: mol_type = other RNA
agtgatggatatttcagggc

SEQ ID NO: 18259 - RNA, 20 nt, synthetic construct
  misc_feature 1..20: note = antisense sequence
  source 1..20: mol_type = other RNA
gttcattggagtgatggata

SEQ ID NO: 18260 - RNA, 20 nt, synthetic construct
  misc_feature 1..20: note = antisense sequence
  source 1..20: mol_type = other RNA
agttcattggagtgatggat

SEQ ID NO: 18261 - RNA, 20 nt, synthetic construct
  misc_feature 1..20: note = antisense sequence
  source 1..20: mol_type = other RNA
cagttcattggagtgatgga

SEQ ID NO: 18262 - RNA, 20 nt, synthetic construct
  misc_feature 1..20: note = antisense sequence
  source 1..20: mol_type = other RNA
aacagttcattggagtgatg

SEQ ID NO: 18263 - RNA, 20 nt, synthetic construct
  misc_feature 1..20: note = antisense sequence
  source 1..20: mol_type = other RNA
gaacagttcattggagtgat

SEQ ID NO: 18264 - RNA, 20 nt, synthetic construct
  misc_feature 1..20: note = antisense sequence
  source 1..20: mol_type = other RNA
agaacagttcattggagtga

SEQ ID NO: 18265 - RNA, 20 nt, synthetic construct
  misc_feature 1..20: note = antisense sequence
  source 1..20: mol_type = other RNA
cagaacagttcattggagtg

SEQ ID NO: 18266 - RNA, 20 nt, synthetic construct
  misc_feature 1..20: note = antisense sequence
  source 1..20: mol_type = other RNA
gcagaacagttcattggagt

SEQ ID NO: 18267 - RNA, 20 nt, synthetic construct
  misc_feature 1..20: note = antisense sequence
  source 1..20: mol_type = other RNA
ggcagaacagttcattggag

SEQ ID NO: 18268 - RNA, 20 nt, synthetic construct
  misc_feature 1..20: note = antisense sequence
  source 1..20: mol_type = other RNA
caggcagaacagttcattgg

SEQ ID NO: 18269 - RNA, 20 nt, synthetic construct
  misc_feature 1..20: note = antisense sequence
  source 1..20: mol_type = other RNA
tcaggcagaacagttcattg

SEQ ID NO: 18270 - RNA, 20 nt, synthetic construct
  misc_feature 1..20: note = antisense sequence
  source 1..20: mol_type = other RNA
atcaggcagaacagttcatt

SEQ ID NO: 18271 - RNA, 20 nt, synthetic construct
  misc_feature 1..20: note = antisense sequence
  source 1..20: mol_type = other RNA
gatcaggcagaacagttcat

SEQ ID NO: 18272 - RNA, 20 nt, synthetic construct
  misc_feature 1..20: note = antisense sequence
  source 1..20: mol_type = other RNA
agatcaggcagaacagttca

SEQ ID NO: 18273 - RNA, 20 nt, synthetic construct
  misc_feature 1..20: note = antisense sequence
  source 1..20: mol_type = other RNA
tagatcaggcagaacagttc

SEQ ID NO: 18274 - RNA, 20 nt, synthetic construct
  misc_feature 1..20: note = antisense sequence
  source 1..20: mol_type = other RNA
ttagatcaggcagaacagtt

SEQ ID NO: 18275 - RNA, 20 nt, synthetic construct
  misc_feature 1..20: note = antisense sequence
  source 1..20: mol_type = other RNA
gttagatcaggcagaacagt

SEQ ID NO: 18276 - RNA, 20 nt, synthetic construct
  misc_feature 1..20: note = antisense sequence
  source 1..20: mol_type = other RNA
gttagtcattttagtgaggc

SEQ ID NO: 18277 - RNA, 20 nt, synthetic construct
  misc_feature 1..20: note = antisense sequence
  source 1..20: mol_type = other RNA
cctgaatgcaatcgaaacat

SEQ ID NO: 18278 - RNA, 20 nt, synthetic construct
  misc_feature 1..20: note = antisense sequence
  source 1..20: mol_type = other RNA
tcctgaatgcaatcgaaaca

SEQ ID NO: 18279 - RNA, 20 nt, synthetic construct
  misc_feature 1..20: note = antisense sequence
  source 1..20: mol_type = other RNA
ttcctgaatgcaatcgaaac

SEQ ID NO: 18280 - RNA, 20 nt, synthetic construct
  misc_feature 1..20: note = antisense sequence
  source 1..20: mol_type = other RNA
gttcctgaatgcaatcgaaa

SEQ ID NO: 18281 - RNA, 20 nt, synthetic construct
  misc_feature 1..20: note = antisense sequence
  source 1..20: mol_type = other RNA
tgttcctgaatgcaatcgaa

SEQ ID NO: 18282 - RNA, 20 nt, synthetic construct
  misc_feature 1..20: note = antisense sequence
  source 1..20: mol_type = other RNA
ttgttcctgaatgcaatcga

SEQ ID NO: 18283 - RNA, 20 nt, synthetic construct
  misc_feature 1..20: note = antisense sequence
  source 1..20: mol_type = other RNA
ctttgttcctgaatgcaatc

SEQ ID NO: 18284 - RNA, 20 nt, synthetic construct
  misc_feature 1..20: note = antisense sequence
  source 1..20: mol_type = other RNA
cttctttgttcctgaatgca

SEQ ID NO: 18285 - RNA, 20 nt, synthetic construct
  misc_feature 1..20: note = antisense sequence
  source 1..20: mol_type = other RNA
gtacaggatatgccatacat

SEQ ID NO: 18286 - RNA, 20 nt, synthetic construct
  misc_feature 1..20: note = antisense sequence
  source 1..20: mol_type = other RNA
ccaaagctctgaccttcaat

SEQ ID NO: 18287 - RNA, 20 nt, synthetic construct
  misc_feature 1..20: note = antisense sequence
  source 1..20: mol_type = other RNA
ataccaaagctctgaccttc

SEQ ID NO: 18288 - RNA, 20 nt, synthetic construct
  misc_feature 1..20: note = antisense sequence
  source 1..20: mol_type = other RNA
aaataccaaagctctgacct

SEQ ID NO: 18289 - RNA, 20 nt, synthetic construct
  misc_feature 1..20: note = antisense sequence
  source 1..20: mol_type = other RNA
atgcaccagataagacagaa

SEQ ID NO: 18290 - RNA, 20 nt, synthetic construct
  misc_feature 1..20: note = antisense sequence
  source 1..20: mol_type = other RNA
gatgcaccagataagacaga

SEQ ID NO: 18291 - RNA, 20 nt, synthetic construct
  misc_feature 1..20: note = antisense sequence
  source 1..20: mol_type = other RNA
tgatgcaccagataagacag

SEQ ID NO: 18292 - RNA, 20 nt, synthetic construct
  misc_feature 1..20: note = antisense sequence
  source 1..20: mol_type = other RNA
ctgatgcaccagataagaca

SEQ ID NO: 18293 - RNA, 20 nt, synthetic construct
  misc_feature 1..20: note = antisense sequence
  source 1..20: mol_type = other RNA
gctgatgcaccagataagac

SEQ ID NO: 18294 - RNA, 20 nt, synthetic construct
  misc_feature 1..20: note = antisense sequence
  source 1..20: mol_type = other RNA
agctgatgcaccagataaga

SEQ ID NO: 18295 - RNA, 20 nt, synthetic construct
  misc_feature 1..20: note = antisense sequence
  source 1..20: mol_type = other RNA
cttgacgtaaaatacacagc

SEQ ID NO: 18296 - RNA, 20 nt, synthetic construct
  misc_feature 1..20: note = antisense sequence
  source 1..20: mol_type = other RNA
ccttgacgtaaaatacacag

SEQ ID NO: 18297 - RNA, 20 nt, synthetic construct
  misc_feature 1..20: note = antisense sequence
  source 1..20: mol_type = other RNA
tgctcatttaccttgacgta

SEQ ID NO: 18298 - RNA, 20 nt, synthetic construct
  misc_feature 1..20: note = antisense sequence
  source 1..20: mol_type = other RNA
atgctcatttaccttgacgt

SEQ ID NO: 18299 - RNA, 20 nt, synthetic construct
  misc_feature 1..20: note = antisense sequence
  source 1..20: mol_type = other RNA
aacaggatgctcatttacct

SEQ ID NO: 18300 - RNA, 19 nt, synthetic construct
  misc_feature 1..19: note = siRNA sense sequence
  source 1..19: mol_type = other RNA
agatcaccctctcaatgaa

SEQ ID NO: 18301 - RNA, 19 nt, synthetic construct
  misc_feature 1..19: note = siRNA antisense sequence
  source 1..19: mol_type = other RNA
ttcattgagagggtgatct

SEQ ID NO: 18302 - RNA, 19 nt, synthetic construct
  misc_feature 1..19: note = siRNA sense sequence
  source 1..19: mol_type = other RNA
aggcagatgtccctttaag

SEQ ID NO: 18303 - RNA, 19 nt, synthetic construct
  misc_feature 1..19: note = siRNA antisense sequence
  source 1..19: mol_type = other RNA
cttaaagggacatctgcct

SEQ ID NO: 18304 - RNA, 19 nt, synthetic construct
  misc_feature 1..19: note = siRNA sense sequence
  source 1..19: mol_type = other RNA
ggcagatgtccctttaagg

SEQ ID NO: 18305 - RNA, 19 nt, synthetic construct
  misc_feature 1..19: note = siRNA antisense sequence
  source 1..19: mol_type = other RNA
ccttaaagggacatctgcc

SEQ ID NO: 18306 - RNA, 19 nt, synthetic construct
  misc_feature 1..19: note = siRNA sense sequence
  source 1..19: mol_type = other RNA
cagatgtccctttaaggtt

SEQ ID NO: 18307 - RNA, 19 nt, synthetic construct
  misc_feature 1..19: note = siRNA antisense sequence
  source 1..19: mol_type = other RNA
aaccttaaagggacatctg

SEQ ID NO: 18308 - RNA, 19 nt, synthetic construct
  misc_feature 1..19: note = siRNA sense sequence
  source 1..19: mol_type = other RNA
agatgtccctttaaggttt

SEQ ID NO: 18309 - RNA, 19 nt, synthetic construct
  misc_feature 1..19: note = siRNA antisense sequence
  source 1..19: mol_type = other RNA
aaaccttaaagggacatct

SEQ ID NO: 18310 - RNA, 19 nt, synthetic construct
  misc_feature 1..19: note = siRNA sense sequence
  source 1..19: mol_type = other RNA
gtccctttaaggtttgctt

SEQ ID NO: 18311 - RNA, 19 nt, synthetic construct
  misc_feature 1..19: note = siRNA antisense sequence
  source 1..19: mol_type = other RNA
aagcaaaccttaaagggac

SEQ ID NO: 18312 - RNA, 19 nt, synthetic construct
  misc_feature 1..19: note = siRNA sense sequence
  source 1..19: mol_type = other RNA
ccctttaaggtttgcttct

SEQ ID NO: 18313 - RNA, 19 nt, synthetic construct
  misc_feature 1..19: note = siRNA antisense sequence
  source 1..19: mol_type = other RNA
agaagcaaaccttaaaggg

SEQ ID NO: 18314 - RNA, 19 nt, synthetic construct
  misc_feature 1..19: note = siRNA sense sequence
  source 1..19: mol_type = other RNA
cctttaaggtttgcttcta

SEQ ID NO: 18315 - RNA, 19 nt, synthetic construct
  misc_feature 1..19: note = siRNA antisense sequence
  source 1..19: mol_type = other RNA
tagaagcaaaccttaaagg

SEQ ID NO: 18316 - RNA, 19 nt, synthetic construct
  misc_feature 1..19: note = siRNA sense sequence
  source 1..19: mol_type = other RNA
ctttaaggtttgcttctac

SEQ ID NO: 18317 - RNA, 19 nt, synthetic construct
  misc_feature 1..19: note = siRNA antisense sequence
  source 1..19: mol_type = other RNA
gtagaagcaaaccttaaag

SEQ ID NO: 18318 - RNA, 19 nt, synthetic construct
  misc_feature 1..19: note = siRNA sense sequence
  source 1..19: mol_type = other RNA
tttaaggtttgcttctaca

SEQ ID NO: 18319 - RNA, 19 nt, synthetic construct
  misc_feature 1..19: note = siRNA antisense sequence
  source 1..19: mol_type = other RNA
tgtagaagcaaaccttaaa

SEQ ID NO: 18320 - RNA, 19 nt, synthetic construct
  misc_feature 1..19: note = siRNA sense sequence
  source 1..19: mol_type = other RNA
ttaaggtttgcttctacag

SEQ ID NO: 18321 - RNA, 19 nt, synthetic construct
  misc_feature 1..19: note = siRNA antisense sequence
  source 1..19: mol_type = other RNA
ctgtagaagcaaaccttaa

SEQ ID NO: 18322 - RNA, 19 nt, synthetic construct
  misc_feature 1..19: note = siRNA sense sequence
  source 1..19: mol_type = other RNA
taaggtttgcttctacagc

SEQ ID NO: 18323 - RNA, 19 nt, synthetic construct
  misc_feature 1..19: note = siRNA antisense sequence
  source 1..19: mol_type = other RNA
gctgtagaagcaaacctta

SEQ ID NO: 18324 - RNA, 19 nt, synthetic construct
  misc_feature 1..19: note = siRNA sense sequence
  source 1..19: mol_type = other RNA
gtttgcttctacagcccgt

SEQ ID NO: 18325 - RNA, 19 nt, synthetic construct
  misc_feature 1..19: note = siRNA antisense sequence
  source 1..19: mol_type = other RNA
acgggctgtagaagcaaac

SEQ ID NO: 18326 - RNA, 19 nt, synthetic construct
  misc_feature 1..19: note = siRNA sense sequence
  source 1..19: mol_type = other RNA
tttgcttctacagcccgtg

SEQ ID NO: 18327 - RNA, 19 nt, synthetic construct
  misc_feature 1..19: note = siRNA antisense sequence
  source 1..19: mol_type = other RNA
cacgggctgtagaagcaaa

SEQ ID NO: 18328 - RNA, 19 nt, synthetic construct
  misc_feature 1..19: note = siRNA sense sequence
  source 1..19: mol_type = other RNA
ttgcttctacagcccgtgg

SEQ ID NO: 18329 - RNA, 19 nt, synthetic construct
  misc_feature 1..19: note = siRNA antisense sequence
  source 1..19: mol_type = other RNA
ccacgggctgtagaagcaa

SEQ ID NO: 18330 - RNA, 19 nt, synthetic construct
  misc_feature 1..19: note = siRNA sense sequence
  source 1..19: mol_type = other RNA
tgcttctacagcccgtgga

SEQ ID NO: 18331 - RNA, 19 nt, synthetic construct
  misc_feature 1..19: note = siRNA antisense sequence
  source 1..19: mol_type = other RNA
tccacgggctgtagaagca

SEQ ID NO: 18332 - RNA, 19 nt, synthetic construct
  misc_feature 1..19: note = siRNA sense sequence
  source 1..19: mol_type = other RNA
gcttctacagcccgtggac

SEQ ID NO: 18333 - RNA, 19 nt, synthetic construct
  misc_feature 1..19: note = siRNA antisense sequence
  source 1..19: mol_type = other RNA
gtccacgggctgtagaagc

SEQ ID NO: 18334 - RNA, 19 nt, synthetic construct
  misc_feature 1..19: note = siRNA sense sequence
  source 1..19: mol_type = other RNA
cttctacagcccgtggact

SEQ ID NO: 18335 - RNA, 19 nt, synthetic construct
  misc_feature 1..19: note = siRNA antisense sequence
  source 1..19: mol_type = other RNA
agtccacgggctgtagaag

SEQ ID NO: 18336 - RNA, 19 nt, synthetic construct
  misc_feature 1..19: note = siRNA sense sequence
  source 1..19: mol_type = other RNA
ttctacagcccgtggactt

SEQ ID NO: 18337 - RNA, 19 nt, synthetic construct
  misc_feature 1..19: note = siRNA antisense sequence
  source 1..19: mol_type = other RNA
aagtccacgggctgtagaa

SEQ ID NO: 18338 - RNA, 19 nt, synthetic construct
  misc_feature 1..19: note = siRNA sense sequence
  source 1..19: mol_type = other RNA
tctacagcccgtggacttt

SEQ ID NO: 18339 - RNA, 19 nt, synthetic construct
  misc_feature 1..19: note = siRNA antisense sequence
  source 1..19: mol_type = other RNA
aaagtccacgggctgtaga

SEQ ID NO: 18340 - RNA, 19 nt, synthetic construct
  misc_feature 1..19: note = siRNA sense sequence
  source 1..19: mol_type = other RNA
ctacagcccgtggacttta

SEQ ID NO: 18341 - RNA, 19 nt, synthetic construct
  misc_feature 1..19: note = siRNA antisense sequence
  source 1..19: mol_type = other RNA
taaagtccacgggctgtag

SEQ ID NO: 18342 - RNA, 19 nt, synthetic construct
  misc_feature 1..19: note = siRNA sense sequence
  source 1..19: mol_type = other RNA
tacagcccgtggactttag

SEQ ID NO: 18343 - RNA, 19 nt, synthetic construct
  misc_feature 1..19: note = siRNA antisense sequence
  source 1..19: mol_type = other RNA
ctaaagtccacgggctgta

SEQ ID NO: 18344 - RNA, 19 nt, synthetic construct
  misc_feature 1..19: note = siRNA sense sequence
  source 1..19: mol_type = other RNA
acagcccgtggactttagc

SEQ ID NO: 18345 - RNA, 19 nt, synthetic construct
  misc_feature 1..19: note = siRNA antisense sequence
  source 1..19: mol_type = other RNA
gctaaagtccacgggctgt

SEQ ID NO: 18346 - RNA, 19 nt, synthetic construct
  misc_feature 1..19: note = siRNA sense sequence
  source 1..19: mol_type = other RNA
cagcccgtggactttagcc

SEQ ID NO: 18347 - RNA, 19 nt, synthetic construct
  misc_feature 1..19: note = siRNA antisense sequence
  source 1..19: mol_type = other RNA
ggctaaagtccacgggctg

SEQ ID NO: 18348 - RNA, 19 nt, synthetic construct
  misc_feature 1..19: note = siRNA sense sequence
  source 1..19: mol_type = other RNA
agcccgtggactttagcct

SEQ ID NO: 18349 - RNA, 19 nt, synthetic construct
  misc_feature 1..19: note = siRNA antisense sequence
  source 1..19: mol_type = other RNA
aggctaaagtccacgggct

SEQ ID NO: 18350 - RNA, 19 nt, synthetic construct
  misc_feature 1..19: note = siRNA sense sequence
  source 1..19: mol_type = other RNA
gcccgtggactttagccta

SEQ ID NO: 18351 - RNA, 19 nt, synthetic construct
  misc_feature 1..19: note = siRNA antisense sequence
  source 1..19: mol_type = other RNA
taggctaaagtccacgggc

SEQ ID NO: 18352 - RNA, 19 nt, synthetic construct
  misc_feature 1..19: note = siRNA sense sequence
  source 1..19: mol_type = other RNA
cccgtggactttagcctaa

SEQ ID NO: 18353 - RNA, 19 nt, synthetic construct
  misc_feature 1..19: note = siRNA antisense sequence
  source 1..19: mol_type = other RNA
ttaggctaaagtccacggg

SEQ ID NO: 18354 - RNA, 19 nt, synthetic construct
  misc_feature 1..19: note = siRNA sense sequence
  source 1..19: mol_type = other RNA
gcgaagctggctttatttg

SEQ ID NO: 18355 - RNA, 19 nt, synthetic construct
  misc_feature 1..19: note = siRNA antisense sequence
  source 1..19: mol_type = other RNA
caaataaagccagcttcgc

SEQ ID NO: 18356 - RNA, 19 nt, synthetic construct
  misc_feature 1..19: note = siRNA sense sequence
  source 1..19: mol_type = other RNA
cgaagctggctttatttgt

SEQ ID NO: 18357 - RNA, 19 nt, synthetic construct
  misc_feature 1..19: note = siRNA antisense sequence
  source 1..19: mol_type = other RNA
acaaataaagccagcttcg

SEQ ID NO: 18358 - RNA, 19 nt, synthetic construct
  misc_feature 1..19: note = siRNA sense sequence
  source 1..19: mol_type = other RNA
gaagctggctttatttgtc

SEQ ID NO: 18359 - RNA, 19 nt, synthetic construct
  misc_feature 1..19: note = siRNA antisense sequence
  source 1..19: mol_type = other RNA
gacaaataaagccagcttc

SEQ ID NO: 18360 - RNA, 19 nt, synthetic construct
  misc_feature 1..19: note = siRNA sense sequence
  source 1..19: mol_type = other RNA
aagctggctttatttgtcc

SEQ ID NO: 18361 - RNA, 19 nt, synthetic construct
  misc_feature 1..19: note = siRNA antisense sequence
  source 1..19: mol_type = other RNA
ggacaaataaagccagctt

SEQ ID NO: 18362 - RNA, 19 nt, synthetic construct
  misc_feature 1..19: note = siRNA sense sequence
  source 1..19: mol_type = other RNA
agctggctttatttgtcca

SEQ ID NO: 18363 - RNA, 19 nt, synthetic construct
  misc_feature 1..19: note = siRNA antisense sequence
  source 1..19: mol_type = other RNA
tggacaaataaagccagct

SEQ ID NO: 18364 - RNA, 19 nt, synthetic construct
  misc_feature 1..19: note = siRNA sense sequence
  source 1..19: mol_type = other RNA
gctggctttatttgtccat

SEQ ID NO: 18365 - RNA, 19 nt, synthetic construct
  misc_feature 1..19: note = siRNA antisense sequence
  source 1..19: mol_type = other RNA
atggacaaataaagccagc

SEQ ID NO: 18366 - RNA, 19 nt, synthetic construct
  misc_feature 1..19: note = siRNA sense sequence
  source 1..19: mol_type = other RNA
ctttatttgtccatgtctc

SEQ ID NO: 18367 - RNA, 19 nt, synthetic construct
  misc_feature 1..19: note = siRNA antisense sequence
  source 1..19: mol_type = other RNA
gagacatggacaaataaag

SEQ ID NO: 18368 - RNA, 19 nt, synthetic construct
  misc_feature 1..19: note = siRNA sense sequence
  source 1..19: mol_type = other RNA
ttatttgtccatgtctcgg

SEQ ID NO: 18369 - RNA, 19 nt, synthetic construct
  misc_feature 1..19: note = siRNA antisense sequence
  source 1..19: mol_type = other RNA
ccgagacatggacaaataa

SEQ ID NO: 18370 - RNA, 19 nt, synthetic construct
  misc_feature 1..19: note = siRNA sense sequence
  source 1..19: mol_type = other RNA
tatttgtccatgtctcgga

SEQ ID NO: 18371 - RNA, 19 nt, synthetic construct
  misc_feature 1..19: note = siRNA antisense sequence
  source 1..19: mol_type = other RNA
tccgagacatggacaaata

SEQ ID NO: 18372 - RNA, 19 nt, synthetic construct
  misc_feature 1..19: note = siRNA sense sequence
  source 1..19: mol_type = other RNA
tctcggacagagcctggga

SEQ ID NO: 18373 - RNA, 19 nt, synthetic construct
  misc_feature 1..19: note = siRNA antisense sequence
  source 1..19: mol_type = other RNA
tcccaggctctgtccgaga

SEQ ID NO: 18374 - RNA, 19 nt, synthetic construct
  misc_feature 1..19: note = siRNA sense sequence
  source 1..19: mol_type = other RNA
ctcggacagagcctgggaa

SEQ ID NO: 18375 - RNA, 19 nt, synthetic construct
  misc_feature 1..19: note = siRNA antisense sequence
  source 1..19: mol_type = other RNA
ttcccaggctctgtccgag

SEQ ID NO: 18376 - RNA, 19 nt, synthetic construct
  misc_feature 1..19: note = siRNA sense sequence
  source 1..19: mol_type = other RNA
tcggacagagcctgggaag

SEQ ID NO: 18377 - RNA, 19 nt, synthetic construct
  misc_feature 1..19: note = siRNA antisense sequence
  source 1..19: mol_type = other RNA
cttcccaggctctgtccga

SEQ ID NO: 18378 - RNA, 19 nt, synthetic construct
  misc_feature 1..19: note = siRNA sense sequence
  source 1..19: mol_type = other RNA
agagcctgggaagctgcca

SEQ ID NO: 18379 - RNA, 19 nt, synthetic construct
  misc_feature 1..19: note = siRNA antisense sequence
  source 1..19: mol_type = other RNA
tggcagcttcccaggctct

SEQ ID NO: 18380 - RNA, 19 nt, synthetic construct
  misc_feature 1..19: note = siRNA sense sequence
  source 1..19: mol_type = other RNA
agaccaagagcgcgaaggg

SEQ ID NO: 18381 - RNA, 19 nt, synthetic construct
  misc_feature 1..19: note = siRNA antisense sequence
  source 1..19: mol_type = other RNA
cccttcgcgctcttggtct

SEQ ID NO: 18382 - RNA, 19 nt, synthetic construct
  misc_feature 1..19: note = siRNA sense sequence
  source 1..19: mol_type = other RNA
gggcgatgtggcaatccgt

SEQ ID NO: 18383 - RNA, 19 nt, synthetic construct
  misc_feature 1..19: note = siRNA antisense sequence
  source 1..19: mol_type = other RNA
acggattgccacatcgccc

SEQ ID NO: 18384 - RNA, 19 nt, synthetic construct
  misc_feature 1..19: note = siRNA sense sequence
  source 1..19: mol_type = other RNA
ggcgatgtggcaatccgtc

SEQ ID NO: 18385 - RNA, 19 nt, synthetic construct
  misc_feature 1..19: note = siRNA antisense sequence
  source 1..19: mol_type = other RNA
gacggattgccacatcgcc

SEQ ID NO: 18386 - RNA, 19 nt, synthetic construct
  misc_feature 1..19: note = siRNA sense sequence
  source 1..19: mol_type = other RNA
atgtggcaatccgtctggg

SEQ ID NO: 18387 - RNA, 19 nt, synthetic construct
  misc_feature 1..19: note = siRNA antisense sequence
  source 1..19: mol_type = other RNA
cccagacggattgccacat

SEQ ID NO: 18388 - RNA, 19 nt, synthetic construct
  misc_feature 1..19: note = siRNA sense sequence
  source 1..19: mol_type = other RNA
tgtggcaatccgtctggga

SEQ ID NO: 18389 - RNA, 19 nt, synthetic construct
  misc_feature 1..19: note = siRNA antisense sequence
  source 1..19: mol_type = other RNA
tcccagacggattgccaca

SEQ ID NO: 18390 - RNA, 19 nt, synthetic construct
  misc_feature 1..19: note = siRNA sense sequence
  source 1..19: mol_type = other RNA
aaaagcgtggagcgcattt

SEQ ID NO: 18391 - RNA, 19 nt, synthetic construct
  misc_feature 1..19: note = siRNA antisense sequence
  source 1..19: mol_type = other RNA
aaatgcgctccacgctttt

SEQ ID NO: 18392 - RNA, 19 nt, synthetic construct
  misc_feature 1..19: note = siRNA sense sequence
  source 1..19: mol_type = other RNA
aaagcgtggagcgcattta

SEQ ID NO: 18393 - RNA, 19 nt, synthetic construct
  misc_feature 1..19: note = siRNA antisense sequence
  source 1..19: mol_type = other RNA
taaatgcgctccacgcttt

SEQ ID NO: 18394 - RNA, 19 nt, synthetic construct
  misc_feature 1..19: note = siRNA sense sequence
  source 1..19: mol_type = other RNA
aagcgtggagcgcatttag

SEQ ID NO: 18395 - RNA, 19 nt, synthetic construct
  misc_feature 1..19: note = siRNA antisense sequence
  source 1..19: mol_type = other RNA
ctaaatgcgctccacgctt

SEQ ID NO: 18396 - RNA, 19 nt, synthetic construct
  misc_feature 1..19: note = siRNA sense sequence
  source 1..19: mol_type = other RNA
agcgtggagcgcatttaga

SEQ ID NO: 18397 - RNA, 19 nt, synthetic construct
  misc_feature 1..19: note = siRNA antisense sequence
  source 1..19: mol_type = other RNA
tctaaatgcgctccacgct

SEQ ID NO: 18398 - RNA, 19 nt, synthetic construct
  misc_feature 1..19: note = siRNA sense sequence
  source 1..19: mol_type = other RNA
gcgtggagcgcatttagag

SEQ ID NO: 18399 - RNA, 19 nt, synthetic construct
  misc_feature 1..19: note = siRNA antisense sequence
  source 1..19: mol_type = other RNA
ctctaaatgcgctccacgc

SEQ ID NO: 18400 - RNA, 19 nt, synthetic construct
  misc_feature 1..19: note = siRNA sense sequence
  source 1..19: mol_type = other RNA
cgtggagcgcatttagagg

SEQ ID NO: 18401 - RNA, 19 nt, synthetic construct
  misc_feature 1..19: note = siRNA antisense sequence
  source 1..19: mol_type = other RNA
cctctaaatgcgctccacg

SEQ ID NO: 18402 - RNA, 19 nt, synthetic construct
  misc_feature 1..19: note = siRNA sense sequence
  source 1..19: mol_type = other RNA
aatcactcctctcccgctc

SEQ ID NO: 18403 - RNA, 19 nt, synthetic construct
  misc_feature 1..19: note = siRNA antisense sequence
  source 1..19: mol_type = other RNA
gagcgggagaggagtgatt

SEQ ID NO: 18404 - RNA, 19 nt, synthetic construct
  misc_feature 1..19: note = siRNA sense sequence
  source 1..19: mol_type = other RNA
atcactcctctcccgctcc

SEQ ID NO: 18405 - RNA, 19 nt, synthetic construct
  misc_feature 1..19: note = siRNA antisense sequence
  source 1..19: mol_type = other RNA
ggagcgggagaggagtgat

SEQ ID NO: 18406 - RNA, 19 nt, synthetic construct
  misc_feature 1..19: note = siRNA sense sequence
  source 1..19: mol_type = other RNA
cagcgggataagtggccca

SEQ ID NO: 18407 - RNA, 19 nt, synthetic construct
  misc_feature 1..19: note = siRNA antisense sequence
  source 1..19: mol_type = other RNA
tgggccacttatcccgctg

SEQ ID NO: 18408 - RNA, 19 nt, synthetic construct
  misc_feature 1..19: note = siRNA sense sequence
  source 1..19: mol_type = other RNA
agcgggataagtggcccag

SEQ ID NO: 18409 - RNA, 19 nt, synthetic construct
  misc_feature 1..19: note = siRNA antisense sequence
  source 1..19: mol_type = other RNA
ctgggccacttatcccgct

SEQ ID NO: 18410 - RNA, 19 nt, synthetic construct
  misc_feature 1..19: note = siRNA sense sequence
  source 1..19: mol_type = other RNA
gctggctcctcactggtga

SEQ ID NO: 18411 - RNA, 19 nt, synthetic construct
  misc_feature 1..19: note = siRNA antisense sequence
  source 1..19: mol_type = other RNA
tcaccagtgaggagccagc

SEQ ID NO: 18412 - RNA, 19 nt, synthetic construct
  misc_feature 1..19: note = siRNA sense sequence
  source 1..19: mol_type = other RNA
tcactggtgagcgactcgc

SEQ ID NO: 18413 - RNA, 19 nt, synthetic construct
  misc_feature 1..19: note = siRNA antisense sequence
  source 1..19: mol_type = other RNA
gcgagtcgctcaccagtga

SEQ ID NO: 18414 - RNA, 19 nt, synthetic construct
  misc_feature 1..19: note = siRNA sense sequence
  source 1..19: mol_type = other RNA
gcgactcgcttttctctga

SEQ ID NO: 18415 - RNA, 19 nt, synthetic construct
  misc_feature 1..19: note = siRNA antisense sequence
  source 1..19: mol_type = other RNA
tcagagaaaagcgagtcgc

SEQ ID NO: 18416 - RNA, 19 nt, synthetic construct
  misc_feature 1..19: note = siRNA sense sequence
  source 1..19: mol_type = other RNA
cgactcgcttttctctgag

SEQ ID NO: 18417 - RNA, 19 nt, synthetic construct
  misc_feature 1..19: note = siRNA antisense sequence
  source 1..19: mol_type = other RNA
ctcagagaaaagcgagtcg

SEQ ID NO: 18418 - RNA, 19 nt, synthetic construct
  misc_feature 1..19: note = siRNA sense sequence
  source 1..19: mol_type = other RNA
gactcgcttttctctgagc

SEQ ID NO: 18419 - RNA, 19 nt, synthetic construct
  misc_feature 1..19: note = siRNA antisense sequence
  source 1..19: mol_type = other RNA
gctcagagaaaagcgagtc

SEQ ID NO: 18420 - RNA, 19 nt, synthetic construct
  misc_feature 1..19: note = siRNA sense sequence
  source 1..19: mol_type = other RNA
actcgcttttctctgagca

SEQ ID NO: 18421 - RNA, 19 nt, synthetic construct
  misc_feature 1..19: note = siRNA antisense sequence
  source 1..19: mol_type = other RNA
tgctcagagaaaagcgagt

SEQ ID NO: 18422 - RNA, 19 nt, synthetic construct
  misc_feature 1..19: note = siRNA sense sequence
  source 1..19: mol_type = other RNA
ctcgcttttctctgagcat

SEQ ID NO: 18423 - RNA, 19 nt, synthetic construct
  misc_feature 1..19: note = siRNA antisense sequence
  source 1..19: mol_type = other RNA
atgctcagagaaaagcgag

SEQ ID NO: 18424 - RNA, 19 nt, synthetic construct
  misc_feature 1..19: note = siRNA sense sequence
  source 1..19: mol_type = other RNA
tcgcttttctctgagcatc

SEQ ID NO: 18425 - RNA, 19 nt, synthetic construct
  misc_feature 1..19: note = siRNA antisense sequence
  source 1..19: mol_type = other RNA
gatgctcagagaaaagcga

SEQ ID NO: 18426 - RNA, 19 nt, synthetic construct
  misc_feature 1..19: note = siRNA sense sequence
  source 1..19: mol_type = other RNA
cgcttttctctgagcatct

SEQ ID NO: 18427 - RNA, 19 nt, synthetic construct
  misc_feature 1..19: note = siRNA antisense sequence
  source 1..19: mol_type = other RNA
agatgctcagagaaaagcg

SEQ ID NO: 18428 - RNA, 19 nt, synthetic construct
  misc_feature 1..19: note = siRNA sense sequence
  source 1..19: mol_type = other RNA
tttctctgagcatctcctg

SEQ ID NO: 18429 - RNA, 19 nt, synthetic construct
  misc_feature 1..19: note = siRNA antisense sequence
  source 1..19: mol_type = other RNA
caggagatgctcagagaaa

SEQ ID NO: 18430 - RNA, 19 nt, synthetic construct
  misc_feature 1..19: note = siRNA sense sequence
  source 1..19: mol_type = other RNA
ttctctgagcatctcctgc

SEQ ID NO: 18431 - RNA, 19 nt, synthetic construct
  misc_feature 1..19: note = siRNA antisense sequence
  source 1..19: mol_type = other RNA
gcaggagatgctcagagaa

SEQ ID NO: 18432 - RNA, 19 nt, synthetic construct
  misc_feature 1..19: note = siRNA sense sequence
  source 1..19: mol_type = other RNA
aggtcctcagagccatggg

SEQ ID NO: 18433 - RNA, 19 nt, synthetic construct
  misc_feature 1..19: note = siRNA antisense sequence
  source 1..19: mol_type = other RNA
cccatggctctgaggacct

SEQ ID NO: 18434 - RNA, 19 nt, synthetic construct
  misc_feature 1..19: note = siRNA sense sequence
  source 1..19: mol_type = other RNA
tcagagccatgggccagat

SEQ ID NO: 18435 - RNA, 19 nt, synthetic construct
  misc_feature 1..19: note = siRNA antisense sequence
  source 1..19: mol_type = other RNA
atctggcccatggctctga

SEQ ID NO: 18436 - RNA, 19 nt, synthetic construct
  misc_feature 1..19: note = siRNA sense sequence
  source 1..19: mol_type = other RNA
cagagccatgggccagata

SEQ ID NO: 18437 - RNA, 19 nt, synthetic construct
  misc_feature 1..19: note = siRNA antisense sequence
  source 1..19: mol_type = other RNA
tatctggcccatggctctg

SEQ ID NO: 18438 - RNA, 19 nt, synthetic construct
  misc_feature 1..19: note = siRNA sense sequence
  source 1..19: mol_type = other RNA
agagccatgggccagatag

SEQ ID NO: 18439 - RNA, 19 nt, synthetic construct
  misc_feature 1..19: note = siRNA antisense sequence
  source 1..19: mol_type = other RNA
ctatctggcccatggctct

SEQ ID NO: 18440 - RNA, 19 nt, synthetic construct
  misc_feature 1..19: note = siRNA sense sequence
  source 1..19: mol_type = other RNA
gagccatgggccagatagg

SEQ ID NO: 18441 - RNA, 19 nt, synthetic construct
  misc_feature 1..19: note = siRNA antisense sequence
  source 1..19: mol_type = other RNA
cctatctggcccatggctc

SEQ ID NO: 18442 - RNA, 19 nt, synthetic construct
  misc_feature 1..19: note = siRNA sense sequence
  source 1..19: mol_type = other RNA
atgggccagataggaagag

SEQ ID NO: 18443 - RNA, 19 nt, synthetic construct
  misc_feature 1..19: note = siRNA antisense sequence
  source 1..19: mol_type = other RNA
ctcttcctatctggcccat

SEQ ID NO: 18444 - RNA, 19 nt, synthetic construct
  misc_feature 1..19: note = siRNA sense sequence
  source 1..19: mol_type = other RNA
aggtactcaggccaggcta

SEQ ID NO: 18445 - RNA, 19 nt, synthetic construct
  misc_feature 1..19: note = siRNA antisense sequence
  source 1..19: mol_type = other RNA
tagcctggcctgagtacct

SEQ ID NO: 18446 - RNA, 19 nt, synthetic construct
  misc_feature 1..19: note = siRNA sense sequence
  source 1..19: mol_type = other RNA
ggtactcaggccaggctac

SEQ ID NO: 18447 - RNA, 19 nt, synthetic construct
  misc_feature 1..19: note = siRNA antisense sequence
  source 1..19: mol_type = other RNA
gtagcctggcctgagtacc

SEQ ID NO: 18448 - RNA, 19 nt, synthetic construct
  misc_feature 1..19: note = siRNA sense sequence
  source 1..19: mol_type = other RNA
gtactcaggccaggctacg

SEQ ID NO: 18449 - RNA, 19 nt, synthetic construct
  misc_feature 1..19: note = siRNA antisense sequence
  source 1..19: mol_type = other RNA
cgtagcctggcctgagtac

SEQ ID NO: 18450 - RNA, 19 nt, synthetic construct
  misc_feature 1..19: note = siRNA sense sequence
  source 1..19: mol_type = other RNA
tactcaggccaggctacgg

SEQ ID NO: 18451 - RNA, 19 nt, synthetic construct
  misc_feature 1..19: note = siRNA antisense sequence
  source 1..19: mol_type = other RNA
ccgtagcctggcctgagta

SEQ ID NO: 18452 - RNA, 19 nt, synthetic construct
  misc_feature 1..19: note = siRNA sense sequence
  source 1..19: mol_type = other RNA
gcaggcaggagtttcgcgt

SEQ ID NO: 18453 - RNA, 19 nt, synthetic construct
  misc_feature 1..19: note = siRNA antisense sequence
  source 1..19: mol_type = other RNA
acgcgaaactcctgcctgc

SEQ ID NO: 18454 - RNA, 19 nt, synthetic construct
  misc_feature 1..19: note = siRNA sense sequence
  source 1..19: mol_type = other RNA
caggcaggagtttcgcgtt

SEQ ID NO: 18455 - RNA, 19 nt, synthetic construct
  misc_feature 1..19: note = siRNA antisense sequence
  source 1..19: mol_type = other RNA
aacgcgaaactcctgcctg

SEQ ID NO: 18456 - RNA, 19 nt, synthetic construct
  misc_feature 1..19: note = siRNA sense sequence
  source 1..19: mol_type = other RNA
aggcaggagtttcgcgttc

SEQ ID NO: 18457 - RNA, 19 nt, synthetic construct
  misc_feature 1..19: note = siRNA antisense sequence
  source 1..19: mol_type = other RNA
gaacgcgaaactcctgcct

SEQ ID NO: 18458 - RNA, 19 nt, synthetic construct
  misc_feature 1..19: note = siRNA sense sequence
  source 1..19: mol_type = other RNA
ggcaggagtttcgcgttct

SEQ ID NO: 18459 - RNA, 19 nt, synthetic construct
  misc_feature 1..19: note = siRNA antisense sequence
  source 1..19: mol_type = other RNA
agaacgcgaaactcctgcc

SEQ ID NO: 18460 - RNA, 19 nt, synthetic construct
  misc_feature 1..19: note = siRNA sense sequence
  source 1..19: mol_type = other RNA
gcaggagtttcgcgttctg

SEQ ID NO: 18461 - RNA, 19 nt, synthetic construct
  misc_feature 1..19: note = siRNA antisense sequence
  source 1..19: mol_type = other RNA
cagaacgcgaaactcctgc

SEQ ID NO: 18462 - RNA, 19 nt, synthetic construct
  misc_feature 1..19: note = siRNA sense sequence
  source 1..19: mol_type = other RNA
caggagtttcgcgttctgg

SEQ ID NO: 18463 - RNA, 19 nt, synthetic construct
  misc_feature 1..19: note = siRNA antisense sequence
  source 1..19: mol_type = other RNA
ccagaacgcgaaactcctg

SEQ ID NO: 18464 - RNA, 19 nt, synthetic construct
  misc_feature 1..19: note = siRNA sense sequence
  source 1..19: mol_type = other RNA
aggagtttcgcgttctggt

SEQ ID NO: 18465 - RNA, 19 nt, synthetic construct
  misc_feature 1..19: note = siRNA antisense sequence
  source 1..19: mol_type = other RNA
accagaacgcgaaactcct

SEQ ID NO: 18466 - RNA, 19 nt, synthetic construct
  misc_feature 1..19: note = siRNA sense sequence
  source 1..19: mol_type = other RNA
ggagtttcgcgttctggtt

SEQ ID NO: 18467 - RNA, 19 nt, synthetic construct
  misc_feature 1..19: note = siRNA antisense sequence
  source 1..19: mol_type = other RNA
aaccagaacgcgaaactcc

SEQ ID NO: 18468 - RNA, 19 nt, synthetic construct
  misc_feature 1..19: note = siRNA sense sequence
  source 1..19: mol_type = other RNA
gagtttcgcgttctggttt

SEQ ID NO: 18469 - RNA, 19 nt, synthetic construct
  misc_feature 1..19: note = siRNA antisense sequence
  source 1..19: mol_type = other RNA
aaaccagaacgcgaaactc

SEQ ID NO: 18470 - RNA, 19 nt, synthetic construct
  misc_feature 1..19: note = siRNA sense sequence
  source 1..19: mol_type = other RNA
agtttcgcgttctggtttt

SEQ ID NO: 18471 - RNA, 19 nt, synthetic construct
  misc_feature 1..19: note = siRNA antisense sequence
  source 1..19: mol_type = other RNA
aaaaccagaacgcgaaact

SEQ ID NO: 18472 - RNA, 19 nt, synthetic construct
  misc_feature 1..19: note = siRNA sense sequence
  source 1..19: mol_type = other RNA
gtttcgcgttctggttttg

SEQ ID NO: 18473 - RNA, 19 nt, synthetic construct
  misc_feature 1..19: note = siRNA antisense sequence
  source 1..19: mol_type = other RNA
caaaaccagaacgcgaaac

SEQ ID NO: 18474 - RNA, 19 nt, synthetic construct
  misc_feature 1..19: note = siRNA sense sequence
  source 1..19: mol_type = other RNA
tttcgcgttctggttttga

SEQ ID NO: 18475 - RNA, 19 nt, synthetic construct
  misc_feature 1..19: note = siRNA antisense sequence
  source 1..19: mol_type = other RNA
tcaaaaccagaacgcgaaa

SEQ ID NO: 18476 - RNA, 19 nt, synthetic construct
  misc_feature 1..19: note = siRNA sense sequence
  source 1..19: mol_type = other RNA
ttcgcgttctggttttgat

SEQ ID NO: 18477 - RNA, 19 nt, synthetic construct
  misc_feature 1..19: note = siRNA antisense sequence
  source 1..19: mol_type = other RNA
atcaaaaccagaacgcgaa

SEQ ID NO: 18478 - RNA, 19 nt, synthetic construct
  misc_feature 1..19: note = siRNA sense sequence
  source 1..19: mol_type = other RNA
tcgcgttctggttttgata

SEQ ID NO: 18479 - RNA, 19 nt, synthetic construct
  misc_feature 1..19: note = siRNA antisense sequence
  source 1..19: mol_type = other RNA
tatcaaaaccagaacgcga

SEQ ID NO: 18480 - RNA, 19 nt, synthetic construct
  misc_feature 1..19: note = siRNA sense sequence
  source 1..19: mol_type = other RNA
gtgtctctccaaagtcctt

SEQ ID NO: 18481 - RNA, 19 nt, synthetic construct
  misc_feature 1..19: note = siRNA antisense sequence
  source 1..19: mol_type = other RNA
aaggactttggagagacac

SEQ ID NO: 18482 - RNA, 19 nt, synthetic construct
  misc_feature 1..19: note = siRNA sense sequence
  source 1..19: mol_type = other RNA
tgtctctccaaagtccttc

SEQ ID NO: 18483 - RNA, 19 nt, synthetic construct
  misc_feature 1..19: note = siRNA antisense sequence
  source 1..19: mol_type = other RNA
gaaggactttggagagaca

SEQ ID NO: 18484 - RNA, 19 nt, synthetic construct
  misc_feature 1..19: note = siRNA sense sequence
  source 1..19: mol_type = other RNA
gtctctccaaagtccttca

SEQ ID NO: 18485 - RNA, 19 nt, synthetic construct
  misc_feature 1..19: note = siRNA antisense sequence
  source 1..19: mol_type = other RNA
tgaaggactttggagagac

SEQ ID NO: 18486 - RNA, 19 nt, synthetic construct
  misc_feature 1..19: note = siRNA sense sequence
  source 1..19: mol_type = other RNA
tctctccaaagtccttcac

SEQ ID NO: 18487 - RNA, 19 nt, synthetic construct
  misc_feature 1..19: note = siRNA antisense sequence
  source 1..19: mol_type = other RNA
gtgaaggactttggagaga

SEQ ID NO: 18488 - RNA, 19 nt, synthetic construct
  misc_feature 1..19: note = siRNA sense sequence
  source 1..19: mol_type = other RNA
ctctccaaagtccttcacc

SEQ ID NO: 18489 - RNA, 19 nt, synthetic construct
  misc_feature 1..19: note = siRNA antisense sequence
  source 1..19: mol_type = other RNA
ggtgaaggactttggagag

SEQ ID NO: 18490 - RNA, 19 nt, synthetic construct
  misc_feature 1..19: note = siRNA sense sequence
  source 1..19: mol_type = other RNA
tctccaaagtccttcaccc

SEQ ID NO: 18491 - RNA, 19 nt, synthetic construct
  misc_feature 1..19: note = siRNA antisense sequence
  source 1..19: mol_type = other RNA
gggtgaaggactttggaga

SEQ ID NO: 18492 - RNA, 19 nt, synthetic construct
  misc_feature 1..19: note = siRNA sense sequence
  source 1..19: mol_type = other RNA
ctccaaagtccttcaccct

SEQ ID NO: 18493 - RNA, 19 nt, synthetic construct
  misc_feature 1..19: note = siRNA antisense sequence
  source 1..19: mol_type = other RNA
agggtgaaggactttggag

SEQ ID NO: 18494 - RNA, 19 nt, synthetic construct
  misc_feature 1..19: note = siRNA sense sequence
  source 1..19: mol_type = other RNA
ccaaagtccttcaccctag

SEQ ID NO: 18495 - RNA, 19 nt, synthetic construct
  misc_feature 1..19: note = siRNA antisense sequence
  source 1..19: mol_type = other RNA
ctagggtgaaggactttgg

SEQ ID NO: 18496 - RNA, 19 nt, synthetic construct
  misc_feature 1..19: note = siRNA sense sequence
  source 1..19: mol_type = other RNA
caaagtccttcaccctagg

SEQ ID NO: 18497 - RNA, 19 nt, synthetic construct
  misc_feature 1..19: note = siRNA antisense sequence
  source 1..19: mol_type = other RNA
cctagggtgaaggactttg

SEQ ID NO: 18498 - RNA, 19 nt, synthetic construct
  misc_feature 1..19: note = siRNA sense sequence
  source 1..19: mol_type = other RNA
ctaggagtaggagtgaggc

SEQ ID NO: 18499 - RNA, 19 nt, synthetic construct
  misc_feature 1..19: note = siRNA antisense sequence
  source 1..19: mol_type = other RNA
gcctcactcctactcctag

SEQ ID NO: 18500 - RNA, 19 nt, synthetic construct
  misc_feature 1..19: note = siRNA sense sequence
  source 1..19: mol_type = other RNA
taggagtaggagtgaggca

SEQ ID NO: 18501 - RNA, 19 nt, synthetic construct
  misc_feature 1..19: note = siRNA antisense sequence
  source 1..19: mol_type = other RNA
tgcctcactcctactccta

SEQ ID NO: 18502 - RNA, 19 nt, synthetic construct
  misc_feature 1..19: note = siRNA sense sequence
  source 1..19: mol_type = other RNA
aggagtaggagtgaggcag

SEQ ID NO: 18503 - RNA, 19 nt, synthetic construct
  misc_feature 1..19: note = siRNA antisense sequence
  source 1..19: mol_type = other RNA
ctgcctcactcctactcct

SEQ ID NO: 18504 - RNA, 19 nt, synthetic construct
  misc_feature 1..19: note = siRNA sense sequence
  source 1..19: mol_type = other RNA
agtaggagtgaggcagcac

SEQ ID NO: 18505 - RNA, 19 nt, synthetic construct
  misc_feature 1..19: note = siRNA antisense sequence
  source 1..19: mol_type = other RNA
gtgctgcctcactcctact

SEQ ID NO: 18506 - RNA, 19 nt, synthetic construct
  misc_feature 1..19: note = siRNA sense sequence
  source 1..19: mol_type = other RNA
ttgtatattaggactttgc

SEQ ID NO: 18507 - RNA, 19 nt, synthetic construct
  misc_feature 1..19: note = siRNA antisense sequence
  source 1..19: mol_type = other RNA
gcaaagtcctaatatacaa

SEQ ID NO: 18508 - RNA, 19 nt, synthetic construct
  misc_feature 1..19: note = siRNA sense sequence
  source 1..19: mol_type = other RNA
tgtatattaggactttgct

SEQ ID NO: 18509 - RNA, 19 nt, synthetic construct
  misc_feature 1..19: note = siRNA antisense sequence
  source 1..19: mol_type = other RNA
agcaaagtcctaatataca

SEQ ID NO: 18510 - RNA, 19 nt, synthetic construct
  misc_feature 1..19: note = siRNA sense sequence
  source 1..19: mol_type = other RNA
gtatattaggactttgctg

SEQ ID NO: 18511 - RNA, 19 nt, synthetic construct
  misc_feature 1..19: note = siRNA antisense sequence
  source 1..19: mol_type = other RNA
cagcaaagtcctaatatac

SEQ ID NO: 18512 - RNA, 19 nt, synthetic construct
  misc_feature 1..19: note = siRNA sense sequence
  source 1..19: mol_type = other RNA
tatattaggactttgctga

SEQ ID NO: 18513 - RNA, 19 nt, synthetic construct
  misc_feature 1..19: note = siRNA antisense sequence
  source 1..19: mol_type = other RNA
tcagcaaagtcctaatata

SEQ ID NO: 18514 - RNA, 19 nt, synthetic construct
  misc_feature 1..19: note = siRNA sense sequence
  source 1..19: mol_type = other RNA
ttttatggcatgggatggg

SEQ ID NO: 18515 - RNA, 19 nt, synthetic construct
  misc_feature 1..19: note = siRNA antisense sequence
  source 1..19: mol_type = other RNA
cccatcccatgccataaaa

SEQ ID NO: 18516 - RNA, 19 nt, synthetic construct
  misc_feature 1..19: note = siRNA sense sequence
  source 1..19: mol_type = other RNA
tttatggcatgggatggga

SEQ ID NO: 18517 - RNA, 19 nt, synthetic construct
  misc_feature 1..19: note = siRNA antisense sequence
  source 1..19: mol_type = other RNA
tcccatcccatgccataaa

SEQ ID NO: 18518 - RNA, 19 nt, synthetic construct
  misc_feature 1..19: note = siRNA sense sequence
  source 1..19: mol_type = other RNA
tggcatgggatgggagggt

SEQ ID NO: 18519 - RNA, 19 nt, synthetic construct
  misc_feature 1..19: note = siRNA antisense sequence
  source 1..19: mol_type = other RNA
accctcccatcccatgcca

SEQ ID NO: 18520 - RNA, 19 nt, synthetic construct
  misc_feature 1..19: note = siRNA sense sequence
  source 1..19: mol_type = other RNA
atgggatgggagggtgatg

SEQ ID NO: 18521 - RNA, 19 nt, synthetic construct
  misc_feature 1..19: note = siRNA antisense sequence
  source 1..19: mol_type = other RNA
catcaccctcccatcccat

SEQ ID NO: 18522 - RNA, 19 nt, synthetic construct
  misc_feature 1..19: note = siRNA sense sequence
  source 1..19: mol_type = other RNA
tgggatgggagggtgatgc

SEQ ID NO: 18523 - RNA, 19 nt, synthetic construct
  misc_feature 1..19: note = siRNA antisense sequence
  source 1..19: mol_type = other RNA
gcatcaccctcccatccca

SEQ ID NO: 18524 - RNA, 19 nt, synthetic construct
  misc_feature 1..19: note = siRNA sense sequence
  source 1..19: mol_type = other RNA
gggatgggagggtgatgct

SEQ ID NO: 18525 - RNA, 19 nt, synthetic construct
  misc_feature 1..19: note = siRNA antisense sequence
  source 1..19: mol_type = other RNA
agcatcaccctcccatccc

SEQ ID NO: 18526 - RNA, 19 nt, synthetic construct
  misc_feature 1..19: note = siRNA sense sequence
  source 1..19: mol_type = other RNA
ggatgggagggtgatgctt

SEQ ID NO: 18527 - RNA, 19 nt, synthetic construct
  misc_feature 1..19: note = siRNA antisense sequence
  source 1..19: mol_type = other RNA
aagcatcaccctcccatcc

SEQ ID NO: 18528 - RNA, 19 nt, synthetic construct
  misc_feature 1..19: note = siRNA sense sequence
  source 1..19: mol_type = other RNA
gatgggagggtgatgctta

SEQ ID NO: 18529 - RNA, 19 nt, synthetic construct
  misc_feature 1..19: note = siRNA antisense sequence
  source 1..19: mol_type = other RNA
taagcatcaccctcccatc

SEQ ID NO: 18530 - RNA, 19 nt, synthetic construct
  misc_feature 1..19: note = siRNA sense sequence
  source 1..19: mol_type = other RNA
atgggagggtgatgcttat

SEQ ID NO: 18531 - RNA, 19 nt, synthetic construct
  misc_feature 1..19: note = siRNA antisense sequence
  source 1..19: mol_type = other RNA
ataagcatcaccctcccat

SEQ ID NO: 18532 - RNA, 19 nt, synthetic construct
  misc_feature 1..19: note = siRNA sense sequence
  source 1..19: mol_type = other RNA
tgggagggtgatgcttata

SEQ ID NO: 18533 - RNA, 19 nt, synthetic construct
  misc_feature 1..19: note = siRNA antisense sequence
  source 1..19: mol_type = other RNA
tataagcatcaccctccca

SEQ ID NO: 18534 - RNA, 19 nt, synthetic construct
  misc_feature 1..19: note = siRNA sense sequence
  source 1..19: mol_type = other RNA
gggagggtgatgcttatag

SEQ ID NO: 18535 - RNA, 19 nt, synthetic construct
  misc_feature 1..19: note = siRNA antisense sequence
  source 1..19: mol_type = other RNA
ctataagcatcaccctccc

SEQ ID NO: 18536 - RNA, 19 nt, synthetic construct
  misc_feature 1..19: note = siRNA sense sequence
  source 1..19: mol_type = other RNA
ggagggtgatgcttatagg

SEQ ID NO: 18537 - RNA, 19 nt, synthetic construct
  misc_feature 1..19: note = siRNA antisense sequence
  source 1..19: mol_type = other RNA
cctataagcatcaccctcc

SEQ ID NO: 18538 - RNA, 19 nt, synthetic construct
  misc_feature 1..19: note = siRNA sense sequence
  source 1..19: mol_type = other RNA
gagggtgatgcttataggg

SEQ ID NO: 18539 - RNA, 19 nt, synthetic construct
  misc_feature 1..19: note = siRNA antisense sequence
  source 1..19: mol_type = other RNA
ccctataagcatcaccctc

SEQ ID NO: 18540 - RNA, 19 nt, synthetic construct
  misc_feature 1..19: note = siRNA sense sequence
  source 1..19: mol_type = other RNA
agggtgatgcttatagggc

SEQ ID NO: 18541 - RNA, 19 nt, synthetic construct
  misc_feature 1..19: note = siRNA antisense sequence
  source 1..19: mol_type = other RNA
gccctataagcatcaccct

SEQ ID NO: 18542 - RNA, 19 nt, synthetic construct
  misc_feature 1..19: note = siRNA sense sequence
  source 1..19: mol_type = other RNA
gcctgatacatatgcaaaa

SEQ ID NO: 18543 - RNA, 19 nt, synthetic construct
  misc_feature 1..19: note = siRNA antisense sequence
  source 1..19: mol_type = other RNA
ttttgcatatgtatcaggc

SEQ ID NO: 18544 - RNA, 19 nt, synthetic construct
  misc_feature 1..19: note = siRNA sense sequence
  source 1..19: mol_type = other RNA
acatatgcaaaattcctac

SEQ ID NO: 18545 - RNA, 19 nt, synthetic construct
  misc_feature 1..19: note = siRNA antisense sequence
  source 1..19: mol_type = other RNA
gtaggaattttgcatatgt

SEQ ID NO: 18546 - RNA, 19 nt, synthetic construct
  misc_feature 1..19: note = siRNA sense sequence
  source 1..19: mol_type = other RNA
atatgcaaaattcctaccc

SEQ ID NO: 18547 - RNA, 19 nt, synthetic construct
  misc_feature 1..19: note = siRNA antisense sequence
  source 1..19: mol_type = other RNA
gggtaggaattttgcatat

SEQ ID NO: 18548 - RNA, 19 nt, synthetic construct
  misc_feature 1..19: note = siRNA sense sequence
  source 1..19: mol_type = other RNA
tatgcaaaattcctaccct

SEQ ID NO: 18549 - RNA, 19 nt, synthetic construct
  misc_feature 1..19: note = siRNA antisense sequence
  source 1..19: mol_type = other RNA
agggtaggaattttgcata

SEQ ID NO: 18550 - RNA, 19 nt, synthetic construct
  misc_feature 1..19: note = siRNA sense sequence
  source 1..19: mol_type = other RNA
atgcaaaattcctaccctc

SEQ ID NO: 18551 - RNA, 19 nt, synthetic construct
  misc_feature 1..19: note = siRNA antisense sequence
  source 1..19: mol_type = other RNA
gagggtaggaattttgcat

SEQ ID NO: 18552 - RNA, 19 nt, synthetic construct
  misc_feature 1..19: note = siRNA sense sequence
  source 1..19: mol_type = other RNA
tgcaaaattcctaccctcg

SEQ ID NO: 18553 - RNA, 19 nt, synthetic construct
  misc_feature 1..19: note = siRNA antisense sequence
  source 1..19: mol_type = other RNA
cgagggtaggaattttgca

SEQ ID NO: 18554 - RNA, 19 nt, synthetic construct
  misc_feature 1..19: note = siRNA sense sequence
  source 1..19: mol_type = other RNA
gcaaaattcctaccctcgg

SEQ ID NO: 18555 - RNA, 19 nt, synthetic construct
  misc_feature 1..19: note = siRNA antisense sequence
  source 1..19: mol_type = other RNA
ccgagggtaggaattttgc

SEQ ID NO: 18556 - RNA, 19 nt, synthetic construct
  misc_feature 1..19: note = siRNA sense sequence
  source 1..19: mol_type = other RNA
caaaattcctaccctcggg

SEQ ID NO: 18557 - RNA, 19 nt, synthetic construct
  misc_feature 1..19: note = siRNA antisense sequence
  source 1..19: mol_type = other RNA
cccgagggtaggaattttg

SEQ ID NO: 18558 - RNA, 19 nt, synthetic construct
  misc_feature 1..19: note = siRNA sense sequence
  source 1..19: mol_type = other RNA
aaaattcctaccctcgggt

SEQ ID NO: 18559 - RNA, 19 nt, synthetic construct
  misc_feature 1..19: note = siRNA antisense sequence
  source 1..19: mol_type = other RNA
acccgagggtaggaatttt

SEQ ID NO: 18560 - RNA, 19 nt, synthetic construct
  misc_feature 1..19: note = siRNA sense sequence
  source 1..19: mol_type = other RNA
aaattcctaccctcgggtt

SEQ ID NO: 18561 - RNA, 19 nt, synthetic construct
  misc_feature 1..19: note = siRNA antisense sequence
  source 1..19: mol_type = other RNA
aacccgagggtaggaattt

SEQ ID NO: 18562 - RNA, 19 nt, synthetic construct
  misc_feature 1..19: note = siRNA sense sequence
  source 1..19: mol_type = other RNA
aattcctaccctcgggttg

SEQ ID NO: 18563 - RNA, 19 nt, synthetic construct
  misc_feature 1..19: note = siRNA antisense sequence
  source 1..19: mol_type = other RNA
caacccgagggtaggaatt

SEQ ID NO: 18564 - RNA, 19 nt, synthetic construct
  misc_feature 1..19: note = siRNA sense sequence
  source 1..19: mol_type = other RNA
attcctaccctcgggttgt

SEQ ID NO: 18565 - RNA, 19 nt, synthetic construct
  misc_feature 1..19: note = siRNA antisense sequence
  source 1..19: mol_type = other RNA
acaacccgagggtaggaat

SEQ ID NO: 18566 - RNA, 19 nt, synthetic construct
  misc_feature 1..19: note = siRNA sense sequence
  source 1..19: mol_type = other RNA
ttcctaccctcgggttgtt

SEQ ID NO: 18567 - RNA, 19 nt, synthetic construct
  misc_feature 1..19: note = siRNA antisense sequence
  source 1..19: mol_type = other RNA
aacaacccgagggtaggaa

SEQ ID NO: 18568 - RNA, 19 nt, synthetic construct
  misc_feature 1..19: note = siRNA sense sequence
  source 1..19: mol_type = other RNA
tcctaccctcgggttgttc

SEQ ID NO: 18569 - RNA, 19 nt, synthetic construct
  misc_feature 1..19: note = siRNA antisense sequence
  source 1..19: mol_type = other RNA
gaacaacccgagggtagga

SEQ ID NO: 18570 - RNA, 19 nt, synthetic construct
  misc_feature 1..19: note = siRNA sense sequence
  source 1..19: mol_type = other RNA
cctaccctcgggttgttcc

SEQ ID NO: 18571 - RNA, 19 nt, synthetic construct
  misc_feature 1..19: note = siRNA antisense sequence
  source 1..19: mol_type = other RNA
ggaacaacccgagggtagg

SEQ ID NO: 18572 - RNA, 19 nt, synthetic construct
  misc_feature 1..19: note = siRNA sense sequence
  source 1..19: mol_type = other RNA
ctaccctcgggttgttcca

SEQ ID NO: 18573 - RNA, 19 nt, synthetic construct
  misc_feature 1..19: note = siRNA antisense sequence
  source 1..19: mol_type = other RNA
tggaacaacccgagggtag

SEQ ID NO: 18574 - RNA, 19 nt, synthetic construct
  misc_feature 1..19: note = siRNA sense sequence
  source 1..19: mol_type = other RNA
taccctcgggttgttccag

SEQ ID NO: 18575 - RNA, 19 nt, synthetic construct
  misc_feature 1..19: note = siRNA antisense sequence
  source 1..19: mol_type = other RNA
ctggaacaacccgagggta

SEQ ID NO: 18576 - RNA, 19 nt, synthetic construct
  misc_feature 1..19: note = siRNA sense sequence
  source 1..19: mol_type = other RNA
accctcgggttgttccaga

SEQ ID NO: 18577 - RNA, 19 nt, synthetic construct
  misc_feature 1..19: note = siRNA antisense sequence
  source 1..19: mol_type = other RNA
tctggaacaacccgagggt

SEQ ID NO: 18578 - RNA, 19 nt, synthetic construct
  misc_feature 1..19: note = siRNA sense sequence
  source 1..19: mol_type = other RNA
tcgggttgttccagagtgg

SEQ ID NO: 18579 - RNA, 19 nt, synthetic construct
  misc_feature 1..19: note = siRNA antisense sequence
  source 1..19: mol_type = other RNA
ccactctggaacaacccga

SEQ ID NO: 18580 - RNA, 19 nt, synthetic construct
  misc_feature 1..19: note = siRNA sense sequence
  source 1..19: mol_type = other RNA
ccagagtggacattattga

SEQ ID NO: 18581 - RNA, 19 nt, synthetic construct
  misc_feature 1..19: note = siRNA antisense sequence
  source 1..19: mol_type = other RNA
tcaataatgtccactctgg

SEQ ID NO: 18582 - RNA, 19 nt, synthetic construct
  misc_feature 1..19: note = siRNA sense sequence
  source 1..19: mol_type = other RNA
cagagtggacattattgaa

SEQ ID NO: 18583 - RNA, 19 nt, synthetic construct
  misc_feature 1..19: note = siRNA antisense sequence
  source 1..19: mol_type = other RNA
ttcaataatgtccactctg

SEQ ID NO: 18584 - RNA, 19 nt, synthetic construct
  misc_feature 1..19: note = siRNA sense sequence
  source 1..19: mol_type = other RNA
agagtggacattattgaat

SEQ ID NO: 18585 - RNA, 19 nt, synthetic construct
  misc_feature 1..19: note = siRNA antisense sequence
  source 1..19: mol_type = other RNA
attcaataatgtccactct

SEQ ID NO: 18586 - RNA, 19 nt, synthetic construct
  misc_feature 1..19: note = siRNA sense sequence
  source 1..19: mol_type = other RNA
attgaattttcttgctgtc

SEQ ID NO: 18587 - RNA, 19 nt, synthetic construct
  misc_feature 1..19: note = siRNA antisense sequence
  source 1..19: mol_type = other RNA
gacagcaagaaaattcaat

SEQ ID NO: 18588 - RNA, 19 nt, synthetic construct
  misc_feature 1..19: note = siRNA sense sequence
  source 1..19: mol_type = other RNA
gaattttcttgctgtctac

SEQ ID NO: 18589 - RNA, 19 nt, synthetic construct
  misc_feature 1..19: note = siRNA antisense sequence
  source 1..19: mol_type = other RNA
gtagacagcaagaaaattc

SEQ ID NO: 18590 - RNA, 19 nt, synthetic construct
  misc_feature 1..19: note = siRNA sense sequence
  source 1..19: mol_type = other RNA
cttgctgtctactatttag

SEQ ID NO: 18591 - RNA, 19 nt, synthetic construct
  misc_feature 1..19: note = siRNA antisense sequence
  source 1..19: mol_type = other RNA
ctaaatagtagacagcaag

SEQ ID NO: 18592 - RNA, 19 nt, synthetic construct
  misc_feature 1..19: note = siRNA sense sequence
  source 1..19: mol_type = other RNA
ttgctgtctactatttagg

SEQ ID NO: 18593 - RNA, 19 nt, synthetic construct
  misc_feature 1..19: note = siRNA antisense sequence
  source 1..19: mol_type = other RNA
cctaaatagtagacagcaa

SEQ ID NO: 18594 - RNA, 19 nt, synthetic construct
  misc_feature 1..19: note = siRNA sense sequence
  source 1..19: mol_type = other RNA
tgctgtctactatttaggc

SEQ ID NO: 18595 - RNA, 19 nt, synthetic construct
  misc_feature 1..19: note = siRNA antisense sequence
  source 1..19: mol_type = other RNA
gcctaaatagtagacagca

SEQ ID NO: 18596 - RNA, 19 nt, synthetic construct
  misc_feature 1..19: note = siRNA sense sequence
  source 1..19: mol_type = other RNA
gctgtctactatttaggct

SEQ ID NO: 18597 - RNA, 19 nt, synthetic construct
  misc_feature 1..19: note = siRNA antisense sequence
  source 1..19: mol_type = other RNA
agcctaaatagtagacagc

SEQ ID NO: 18598 - RNA, 19 nt, synthetic construct
  misc_feature 1..19: note = siRNA sense sequence
  source 1..19: mol_type = other RNA
ctgtctactatttaggctt

SEQ ID NO: 18599 - RNA, 19 nt, synthetic construct
  misc_feature 1..19: note = siRNA antisense sequence
  source 1..19: mol_type = other RNA
aagcctaaatagtagacag

SEQ ID NO: 18600 - RNA, 19 nt, synthetic construct
  misc_feature 1..19: note = siRNA sense sequence
  source 1..19: mol_type = other RNA
tgtctactatttaggcttt

SEQ ID NO: 18601 - RNA, 19 nt, synthetic construct
  misc_feature 1..19: note = siRNA antisense sequence
  source 1..19: mol_type = other RNA
aaagcctaaatagtagaca

SEQ ID NO: 18602 - RNA, 19 nt, synthetic construct
  misc_feature 1..19: note = siRNA sense sequence
  source 1..19: mol_type = other RNA
gtctactatttaggctttt

SEQ ID NO: 18603 - RNA, 19 nt, synthetic construct
  misc_feature 1..19: note = siRNA antisense sequence
  source 1..19: mol_type = other RNA
aaaagcctaaatagtagac

SEQ ID NO: 18604 - RNA, 19 nt, synthetic construct
  misc_feature 1..19: note = siRNA sense sequence
  source 1..19: mol_type = other RNA
aaaaggcagggatgcaaga

SEQ ID NO: 18605 - RNA, 19 nt, synthetic construct
  misc_feature 1..19: note = siRNA antisense sequence
  source 1..19: mol_type = other RNA
tcttgcatccctgcctttt

SEQ ID NO: 18606 - RNA, 19 nt, synthetic construct
  misc_feature 1..19: note = siRNA sense sequence
  source 1..19: mol_type = other RNA
ggcagggatgcaagacgaa

SEQ ID NO: 18607 - RNA, 19 nt, synthetic construct
  misc_feature 1..19: note = siRNA antisense sequence
  source 1..19: mol_type = other RNA
ttcgtcttgcatccctgcc

SEQ ID NO: 18608 - RNA, 19 nt, synthetic construct
  misc_feature 1..19: note = siRNA sense sequence
  source 1..19: mol_type = other RNA
aactgccacttgttccaaa

SEQ ID NO: 18609 - RNA, 19 nt, synthetic construct
  misc_feature 1..19: note = siRNA antisense sequence
  source 1..19: mol_type = other RNA
tttggaacaagtggcagtt

SEQ ID NO: 18610 - RNA, 19 nt, synthetic construct
  misc_feature 1..19: note = siRNA sense sequence
  source 1..19: mol_type = other RNA
actgccacttgttccaaaa

SEQ ID NO: 18611 - RNA, 19 nt, synthetic construct
  misc_feature 1..19: note = siRNA antisense sequence
  source 1..19: mol_type = other RNA
ttttggaacaagtggcagt

SEQ ID NO: 18612 - RNA, 19 nt, synthetic construct
  misc_feature 1..19: note = siRNA sense sequence
  source 1..19: mol_type = other RNA
tgccacttgttccaaaatg

SEQ ID NO: 18613 - RNA, 19 nt, synthetic construct
  misc_feature 1..19: note = siRNA antisense sequence
  source 1..19: mol_type = other RNA
cattttggaacaagtggca

SEQ ID NO: 18614 - RNA, 19 nt, synthetic construct
  misc_feature 1..19: note = siRNA sense sequence
  source 1..19: mol_type = other RNA
tttctatgtcagcacccaa

SEQ ID NO: 18615 - RNA, 19 nt, synthetic construct
  misc_feature 1..19: note = siRNA antisense sequence
  source 1..19: mol_type = other RNA
ttgggtgctgacatagaaa

SEQ ID NO: 18616 - RNA, 19 nt, synthetic construct
  misc_feature 1..19: note = siRNA sense sequence
  source 1..19: mol_type = other RNA
ttctatgtcagcacccaag

SEQ ID NO: 18617 - RNA, 19 nt, synthetic construct
  misc_feature 1..19: note = siRNA antisense sequence
  source 1..19: mol_type = other RNA
cttgggtgctgacatagaa

SEQ ID NO: 18618 - RNA, 19 nt, synthetic construct
  misc_feature 1..19: note = siRNA sense sequence
  source 1..19: mol_type = other RNA
tctatgtcagcacccaaga

SEQ ID NO: 18619 - RNA, 19 nt, synthetic construct
  misc_feature 1..19: note = siRNA antisense sequence
  source 1..19: mol_type = other RNA
tcttgggtgctgacataga

SEQ ID NO: 18620 - RNA, 19 nt, synthetic construct
  misc_feature 1..19: note = siRNA sense sequence
  source 1..19: mol_type = other RNA
ctatgtcagcacccaagag

SEQ ID NO: 18621 - RNA, 19 nt, synthetic construct
  misc_feature 1..19: note = siRNA antisense sequence
  source 1..19: mol_type = other RNA
ctcttgggtgctgacatag

SEQ ID NO: 18622 - RNA, 19 nt, synthetic construct
  misc_feature 1..19: note = siRNA sense sequence
  source 1..19: mol_type = other RNA
tatgtcagcacccaagagg

SEQ ID NO: 18623 - RNA, 19 nt, synthetic construct
  misc_feature 1..19: note = siRNA antisense sequence
  source 1..19: mol_type = other RNA
cctcttgggtgctgacata

SEQ ID NO: 18624 - RNA, 19 nt, synthetic construct
  misc_feature 1..19: note = siRNA sense sequence
  source 1..19: mol_type = other RNA
atgtcagcacccaagagga

SEQ ID NO: 18625 - RNA, 19 nt, synthetic construct
  misc_feature 1..19: note = siRNA antisense sequence
  source 1..19: mol_type = other RNA
tcctcttgggtgctgacat

SEQ ID NO: 18626 - RNA, 19 nt, synthetic construct
  misc_feature 1..19: note = siRNA sense sequence
  source 1..19: mol_type = other RNA
tgtcagcacccaagaggag

SEQ ID NO: 18627 - RNA, 19 nt, synthetic construct
  misc_feature 1..19: note = siRNA antisense sequence
  source 1..19: mol_type = other RNA
ctcctcttgggtgctgaca

SEQ ID NO: 18628 - RNA, 19 nt, synthetic construct
  misc_feature 1..19: note = siRNA sense sequence
  source 1..19: mol_type = other RNA
cagcacccaagaggaggga

SEQ ID NO: 18629 - RNA, 19 nt, synthetic construct
  misc_feature 1..19: note = siRNA antisense sequence
  source 1..19: mol_type = other RNA
tccctcctcttgggtgctg

SEQ ID NO: 18630 - RNA, 19 nt, synthetic construct
  misc_feature 1..19: note = siRNA sense sequence
  source 1..19: mol_type = other RNA
cccaagaggagggatattt

SEQ ID NO: 18631 - RNA, 19 nt, synthetic construct
  misc_feature 1..19: note = siRNA antisense sequence
  source 1..19: mol_type = other RNA
aaatatccctcctcttggg

SEQ ID NO: 18632 - RNA, 19 nt, synthetic construct
  misc_feature 1..19: note = siRNA sense sequence
  source 1..19: mol_type = other RNA
ccaagaggagggatatttt

SEQ ID NO: 18633 - RNA, 19 nt, synthetic construct
  misc_feature 1..19: note = siRNA antisense sequence
  source 1..19: mol_type = other RNA
aaaatatccctcctcttgg

SEQ ID NO: 18634 - RNA, 19 nt, synthetic construct
  misc_feature 1..19: note = siRNA sense sequence
  source 1..19: mol_type = other RNA
caagaggagggatattttg

SEQ ID NO: 18635 - RNA, 19 nt, synthetic construct
  misc_feature 1..19: note = siRNA antisense sequence
  source 1..19: mol_type = other RNA
caaaatatccctcctcttg

SEQ ID NO: 18636 - RNA, 19 nt, synthetic construct
  misc_feature 1..19: note = siRNA sense sequence
  source 1..19: mol_type = other RNA
cacagggcagtctactttt

SEQ ID NO: 18637 - RNA, 19 nt, synthetic construct
  misc_feature 1..19: note = siRNA antisense sequence
  source 1..19: mol_type = other RNA
aaaagtagactgccctgtg

SEQ ID NO: 18638 - RNA, 19 nt, synthetic construct
  misc_feature 1..19: note = siRNA sense sequence
  source 1..19: mol_type = other RNA
acagggcagtctactttta

SEQ ID NO: 18639 - RNA, 19 nt, synthetic construct
  misc_feature 1..19: note = siRNA antisense sequence
  source 1..19: mol_type = other RNA
taaaagtagactgccctgt

SEQ ID NO: 18640 - RNA, 19 nt, synthetic construct
  misc_feature 1..19: note = siRNA sense sequence
  source 1..19: mol_type = other RNA
gggcagtctacttttaaga

SEQ ID NO: 18641 - RNA, 19 nt, synthetic construct
  misc_feature 1..19: note = siRNA antisense sequence
  source 1..19: mol_type = other RNA
tcttaaaagtagactgccc

SEQ ID NO: 18642 - RNA, 19 nt, synthetic construct
  misc_feature 1..19: note = siRNA sense sequence
  source 1..19: mol_type = other RNA
gtctacttttaagatgcaa

SEQ ID NO: 18643 - RNA, 19 nt, synthetic construct
  misc_feature 1..19: note = siRNA antisense sequence
  source 1..19: mol_type = other RNA
ttgcatcttaaaagtagac

SEQ ID NO: 18644 - RNA, 19 nt, synthetic construct
  misc_feature 1..19: note = siRNA sense sequence
  source 1..19: mol_type = other RNA
tgcaaagttgtatccaatt

SEQ ID NO: 18645 - RNA, 19 nt, synthetic construct
  misc_feature 1..19: note = siRNA antisense sequence
  source 1..19: mol_type = other RNA
aattggatacaactttgca

SEQ ID NO: 18646 - RNA, 19 nt, synthetic construct
  misc_feature 1..19: note = siRNA sense sequence
  source 1..19: mol_type = other RNA
gcaaagttgtatccaattt

SEQ ID NO: 18647 - RNA, 19 nt, synthetic construct
  misc_feature 1..19: note = siRNA antisense sequence
  source 1..19: mol_type = other RNA
aaattggatacaactttgc

SEQ ID NO: 18648 - RNA, 19 nt, synthetic construct
  misc_feature 1..19: note = siRNA sense sequence
  source 1..19: mol_type = other RNA
gcattttgtaagattttcc

SEQ ID NO: 18649 - RNA, 19 nt, synthetic construct
  misc_feature 1..19: note = siRNA antisense sequence
  source 1..19: mol_type = other RNA
ggaaaatcttacaaaatgc

SEQ ID NO: 18650 - RNA, 19 nt, synthetic construct
  misc_feature 1..19: note = siRNA sense sequence
  source 1..19: mol_type = other RNA
aactcatggtcagatcttt

SEQ ID NO: 18651 - RNA, 19 nt, synthetic construct
  misc_feature 1..19: note = siRNA antisense sequence
  source 1..19: mol_type = other RNA
aaagatctgaccatgagtt

SEQ ID NO: 18652 - RNA, 19 nt, synthetic construct
  misc_feature 1..19: note = siRNA sense sequence
  source 1..19: mol_type = other RNA
actcatggtcagatctttt

SEQ ID NO: 18653 - RNA, 19 nt, synthetic construct
  misc_feature 1..19: note = siRNA antisense sequence
  source 1..19: mol_type = other RNA
aaaagatctgaccatgagt

SEQ ID NO: 18654 - RNA, 19 nt, synthetic construct
  misc_feature 1..19: note = siRNA sense sequence
  source 1..19: mol_type = other RNA
ttttaccagttactgattg

SEQ ID NO: 18655 - RNA, 19 nt, synthetic construct
  misc_feature 1..19: note = siRNA antisense sequence
  source 1..19: mol_type = other RNA
caatcagtaactggtaaaa

SEQ ID NO: 18656 - RNA, 19 nt, synthetic construct
  misc_feature 1..19: note = siRNA sense sequence
  source 1..19: mol_type = other RNA
tttaccagttactgattgg

SEQ ID NO: 18657 - RNA, 19 nt, synthetic construct
  misc_feature 1..19: note = siRNA antisense sequence
  source 1..19: mol_type = other RNA
ccaatcagtaactggtaaa

SEQ ID NO: 18658 - RNA, 19 nt, synthetic construct
  misc_feature 1..19: note = siRNA sense sequence
  source 1..19: mol_type = other RNA
ttaccagttactgattggg

SEQ ID NO: 18659 - RNA, 19 nt, synthetic construct
  misc_feature 1..19: note = siRNA antisense sequence
  source 1..19: mol_type = other RNA
cccaatcagtaactggtaa

SEQ ID NO: 18660 - RNA, 19 nt, synthetic construct
  misc_feature 1..19: note = siRNA sense sequence
  source 1..19: mol_type = other RNA
aaagtgtatcgatagaatc

SEQ ID NO: 18661 - RNA, 19 nt, synthetic construct
  misc_feature 1..19: note = siRNA antisense sequence
  source 1..19: mol_type = other RNA
gattctatcgatacacttt

SEQ ID NO: 18662 - RNA, 19 nt, synthetic construct
  misc_feature 1..19: note = siRNA sense sequence
  source 1..19: mol_type = other RNA
aagtgtatcgatagaatct

SEQ ID NO: 18663 - RNA, 19 nt, synthetic construct
  misc_feature 1..19: note = siRNA antisense sequence
  source 1..19: mol_type = other RNA
agattctatcgatacactt

SEQ ID NO: 18664 - RNA, 19 nt, synthetic construct
  misc_feature 1..19: note = siRNA sense sequence
  source 1..19: mol_type = other RNA
agtgtatcgatagaatctc

SEQ ID NO: 18665 - RNA, 19 nt, synthetic construct
  misc_feature 1..19: note = siRNA antisense sequence
  source 1..19: mol_type = other RNA
gagattctatcgatacact

SEQ ID NO: 18666 - RNA, 19 nt, synthetic construct
  misc_feature 1..19: note = siRNA sense sequence
  source 1..19: mol_type = other RNA
gtgtatcgatagaatctct

SEQ ID NO: 18667 - RNA, 19 nt, synthetic construct
  misc_feature 1..19: note = siRNA antisense sequence
  source 1..19: mol_type = other RNA
agagattctatcgatacac

SEQ ID NO: 18668 - RNA, 19 nt, synthetic construct
  misc_feature 1..19: note = siRNA sense sequence
  source 1..19: mol_type = other RNA
tgtatcgatagaatctctg

SEQ ID NO: 18669 - RNA, 19 nt, synthetic construct
  misc_feature 1..19: note = siRNA antisense sequence
  source 1..19: mol_type = other RNA
cagagattctatcgataca

SEQ ID NO: 18670 - RNA, 19 nt, synthetic construct
  misc_feature 1..19: note = siRNA sense sequence
  source 1..19: mol_type = other RNA
gtatcgatagaatctctgt

SEQ ID NO: 18671 - RNA, 19 nt, synthetic construct
  misc_feature 1..19: note = siRNA antisense sequence
  source 1..19: mol_type = other RNA
acagagattctatcgatac

SEQ ID NO: 18672 - RNA, 19 nt, synthetic construct
  misc_feature 1..19: note = siRNA sense sequence
  source 1..19: mol_type = other RNA
tatcgatagaatctctgtg

SEQ ID NO: 18673 - RNA, 19 nt, synthetic construct
  misc_feature 1..19: note = siRNA antisense sequence
  source 1..19: mol_type = other RNA
cacagagattctatcgata

SEQ ID NO: 18674 - RNA, 19 nt, synthetic construct
  misc_feature 1..19: note = siRNA sense sequence
  source 1..19: mol_type = other RNA
atcgatagaatctctgtgt

SEQ ID NO: 18675 - RNA, 19 nt, synthetic construct
  misc_feature 1..19: note = siRNA antisense sequence
  source 1..19: mol_type = other RNA
acacagagattctatcgat

SEQ ID NO: 18676 - RNA, 19 nt, synthetic construct
  misc_feature 1..19: note = siRNA sense sequence
  source 1..19: mol_type = other RNA
tcgatagaatctctgtgtg

SEQ ID NO: 18677 - RNA, 19 nt, synthetic construct
  misc_feature 1..19: note = siRNA antisense sequence
  source 1..19: mol_type = other RNA
cacacagagattctatcga

SEQ ID NO: 18678 - RNA, 19 nt, synthetic construct
  misc_feature 1..19: note = siRNA sense sequence
  source 1..19: mol_type = other RNA
cgatagaatctctgtgtga

SEQ ID NO: 18679 - RNA, 19 nt, synthetic construct
  misc_feature 1..19: note = siRNA antisense sequence
  source 1..19: mol_type = other RNA
tcacacagagattctatcg

SEQ ID NO: 18680 - RNA, 19 nt, synthetic construct
  misc_feature 1..19: note = siRNA sense sequence
  source 1..19: mol_type = other RNA
gatagaatctctgtgtgaa

SEQ ID NO: 18681 - RNA, 19 nt, synthetic construct
  misc_feature 1..19: note = siRNA antisense sequence
  source 1..19: mol_type = other RNA
ttcacacagagattctatc

SEQ ID NO: 18682 - RNA, 19 nt, synthetic construct
  misc_feature 1..19: note = siRNA sense sequence
  source 1..19: mol_type = other RNA
aaatcaccttattaatggg

SEQ ID NO: 18683 - RNA, 19 nt, synthetic construct
  misc_feature 1..19: note = siRNA antisense sequence
  source 1..19: mol_type = other RNA
cccattaataaggtgattt

SEQ ID NO: 18684 - RNA, 19 nt, synthetic construct
  misc_feature 1..19: note = siRNA sense sequence
  source 1..19: mol_type = other RNA
aatcaccttattaatgggt

SEQ ID NO: 18685 - RNA, 19 nt, synthetic construct
  misc_feature 1..19: note = siRNA antisense sequence
  source 1..19: mol_type = other RNA
acccattaataaggtgatt

SEQ ID NO: 18686 - RNA, 19 nt, synthetic construct
  misc_feature 1..19: note = siRNA sense sequence
  source 1..19: mol_type = other RNA
atcaccttattaatgggtt

SEQ ID NO: 18687 - RNA, 19 nt, synthetic construct
  misc_feature 1..19: note = siRNA antisense sequence
  source 1..19: mol_type = other RNA
aacccattaataaggtgat

SEQ ID NO: 18688 - RNA, 19 nt, synthetic construct
  misc_feature 1..19: note = siRNA sense sequence
  source 1..19: mol_type = other RNA
tcaccttattaatgggtta

SEQ ID NO: 18689 - RNA, 19 nt, synthetic construct
  misc_feature 1..19: note = siRNA antisense sequence
  source 1..19: mol_type = other RNA
taacccattaataaggtga

SEQ ID NO: 18690 - RNA, 19 nt, synthetic construct
  misc_feature 1..19: note = siRNA sense sequence
  source 1..19: mol_type = other RNA
gatattcaattgttcagtg

SEQ ID NO: 18691 - RNA, 19 nt, synthetic construct
  misc_feature 1..19: note = siRNA antisense sequence
  source 1..19: mol_type = other RNA
cactgaacaattgaatatc

SEQ ID NO: 18692 - RNA, 19 nt, synthetic construct
  misc_feature 1..19: note = siRNA sense sequence
  source 1..19: mol_type = other RNA
agctagtttagacctgcct

SEQ ID NO: 18693 - RNA, 19 nt, synthetic construct
  misc_feature 1..19: note = siRNA antisense sequence
  source 1..19: mol_type = other RNA
aggcaggtctaaactagct

SEQ ID NO: 18694 - RNA, 19 nt, synthetic construct
  misc_feature 1..19: note = siRNA sense sequence
  source 1..19: mol_type = other RNA
agtttagacctgccttaga

SEQ ID NO: 18695 - RNA, 19 nt, synthetic construct
  misc_feature 1..19: note = siRNA antisense sequence
  source 1..19: mol_type = other RNA
tctaaggcaggtctaaact

SEQ ID NO: 18696 - RNA, 19 nt, synthetic construct
  misc_feature 1..19: note = siRNA sense sequence
  source 1..19: mol_type = other RNA
gtttagacctgccttagat

SEQ ID NO: 18697 - RNA, 19 nt, synthetic construct
  misc_feature 1..19: note = siRNA antisense sequence
  source 1..19: mol_type = other RNA
atctaaggcaggtctaaac

SEQ ID NO: 18698 - RNA, 19 nt, synthetic construct
  misc_feature 1..19: note = siRNA sense sequence
  source 1..19: mol_type = other RNA
tttagacctgccttagatg

SEQ ID NO: 18699 - RNA, 19 nt, synthetic construct
  misc_feature 1..19: note = siRNA antisense sequence
  source 1..19: mol_type = other RNA
catctaaggcaggtctaaa

SEQ ID NO: 18700 - RNA, 19 nt, synthetic construct
  misc_feature 1..19: note = siRNA sense sequence
  source 1..19: mol_type = other RNA
ttagacctgccttagatgg

SEQ ID NO: 18701 - RNA, 19 nt, synthetic construct
  misc_feature 1..19: note = siRNA antisense sequence
  source 1..19: mol_type = other RNA
ccatctaaggcaggtctaa

SEQ ID NO: 18702 - RNA, 19 nt, synthetic construct
  misc_feature 1..19: note = siRNA sense sequence
  source 1..19: mol_type = other RNA
tagacctgccttagatggc

SEQ ID NO: 18703 - RNA, 19 nt, synthetic construct
  misc_feature 1..19: note = siRNA antisense sequence
  source 1..19: mol_type = other RNA
gccatctaaggcaggtcta

SEQ ID NO: 18704 - RNA, 19 nt, synthetic construct
  misc_feature 1..19: note = siRNA sense sequence
  source 1..19: mol_type = other RNA
agacctgccttagatggcc

SEQ ID NO: 18705 - RNA, 19 nt, synthetic construct
  misc_feature 1..19: note = siRNA antisense sequence
  source 1..19: mol_type = other RNA
ggccatctaaggcaggtct

SEQ ID NO: 18706 - RNA, 19 nt, synthetic construct
  misc_feature 1..19: note = siRNA sense sequence
  source 1..19: mol_type = other RNA
gacctgccttagatggcca

SEQ ID NO: 18707 - RNA, 19 nt, synthetic construct
  misc_feature 1..19: note = siRNA antisense sequence
  source 1..19: mol_type = other RNA
tggccatctaaggcaggtc

SEQ ID NO: 18708 - RNA, 19 nt, synthetic construct
  misc_feature 1..19: note = siRNA sense sequence
  source 1..19: mol_type = other RNA
acctgccttagatggccaa

SEQ ID NO: 18709 - RNA, 19 nt, synthetic construct
  misc_feature 1..19: note = siRNA antisense sequence
  source 1..19: mol_type = other RNA
ttggccatctaaggcaggt

SEQ ID NO: 18710 - RNA, 19 nt, synthetic construct
  misc_feature 1..19: note = siRNA sense sequence
  source 1..19: mol_type = other RNA
cctgccttagatggccaag

SEQ ID NO: 18711 - RNA, 19 nt, synthetic construct
  misc_feature 1..19: note = siRNA antisense sequence
  source 1..19: mol_type = other RNA
cttggccatctaaggcagg

SEQ ID NO: 18712 - RNA, 19 nt, synthetic construct
  misc_feature 1..19: note = siRNA sense sequence
  source 1..19: mol_type = other RNA
ctgccttagatggccaagc

SEQ ID NO: 18713 - RNA, 19 nt, synthetic construct
  misc_feature 1..19: note = siRNA antisense sequence
  source 1..19: mol_type = other RNA
gcttggccatctaaggcag

SEQ ID NO: 18714 - RNA, 19 nt, synthetic construct
  misc_feature 1..19: note = siRNA sense sequence
  source 1..19: mol_type = other RNA
gccttagatggccaagcat

SEQ ID NO: 18715 - RNA, 19 nt, synthetic construct
  misc_feature 1..19: note = siRNA antisense sequence
  source 1..19: mol_type = other RNA
atgcttggccatctaaggc

SEQ ID NO: 18716 - RNA, 19 nt, synthetic construct
  misc_feature 1..19: note = siRNA sense sequence
  source 1..19: mol_type = other RNA
ccttagatggccaagcatt

SEQ ID NO: 18717 - RNA, 19 nt, synthetic construct
  misc_feature 1..19: note = siRNA antisense sequence
  source 1..19: mol_type = other RNA
aatgcttggccatctaagg

SEQ ID NO: 18718 - RNA, 19 nt, synthetic construct
  misc_feature 1..19: note = siRNA sense sequence
  source 1..19: mol_type = other RNA
cttagatggccaagcattg

SEQ ID NO: 18719 - RNA, 19 nt, synthetic construct
  misc_feature 1..19: note = siRNA antisense sequence
  source 1..19: mol_type = other RNA
caatgcttggccatctaag

SEQ ID NO: 18720 - RNA, 19 nt, synthetic construct
  misc_feature 1..19: note = siRNA sense sequence
  source 1..19: mol_type = other RNA
ttagatggccaagcattgt

SEQ ID NO: 18721 - RNA, 19 nt, synthetic construct
  misc_feature 1..19: note = siRNA antisense sequence
  source 1..19: mol_type = other RNA
acaatgcttggccatctaa

SEQ ID NO: 18722 - RNA, 19 nt, synthetic construct
  misc_feature 1..19: note = siRNA sense sequence
  source 1..19: mol_type = other RNA
tagatggccaagcattgtt

SEQ ID NO: 18723 - RNA, 19 nt, synthetic construct
  misc_feature 1..19: note = siRNA antisense sequence
  source 1..19: mol_type = other RNA
aacaatgcttggccatcta

SEQ ID NO: 18724 - RNA, 19 nt, synthetic construct
  misc_feature 1..19: note = siRNA sense sequence
  source 1..19: mol_type = other RNA
agatggccaagcattgtta

SEQ ID NO: 18725 - RNA, 19 nt, synthetic construct
  misc_feature 1..19: note = siRNA antisense sequence
  source 1..19: mol_type = other RNA
taacaatgcttggccatct

SEQ ID NO: 18726 - RNA, 19 nt, synthetic construct
  misc_feature 1..19: note = siRNA sense sequence
  source 1..19: mol_type = other RNA
gatggccaagcattgttaa

SEQ ID NO: 18727 - RNA, 19 nt, synthetic construct
  misc_feature 1..19: note = siRNA antisense sequence
  source 1..19: mol_type = other RNA
ttaacaatgcttggccatc

SEQ ID NO: 18728 - RNA, 19 nt, synthetic construct
  misc_feature 1..19: note = siRNA sense sequence
  source 1..19: mol_type = other RNA
atggccaagcattgttaag

SEQ ID NO: 18729 - RNA, 19 nt, synthetic construct
  misc_feature 1..19: note = siRNA antisense sequence
  source 1..19: mol_type = other RNA
cttaacaatgcttggccat

SEQ ID NO: 18730 - RNA, 19 nt, synthetic construct
  misc_feature 1..19: note = siRNA sense sequence
  source 1..19: mol_type = other RNA
tggccaagcattgttaagt

SEQ ID NO: 18731 - RNA, 19 nt, synthetic construct
  misc_feature 1..19: note = siRNA antisense sequence
  source 1..19: mol_type = other RNA
acttaacaatgcttggcca

SEQ ID NO: 18732 - RNA, 19 nt, synthetic construct
  misc_feature 1..19: note = siRNA sense sequence
  source 1..19: mol_type = other RNA
ggccaagcattgttaagtt

SEQ ID NO: 18733 - RNA, 19 nt, synthetic construct
  misc_feature 1..19: note = siRNA antisense sequence
  source 1..19: mol_type = other RNA
aacttaacaatgcttggcc

SEQ ID NO: 18734 - RNA, 19 nt, synthetic construct
  misc_feature 1..19: note = siRNA sense sequence
  source 1..19: mol_type = other RNA
gccaagcattgttaagttt

SEQ ID NO: 18735 - RNA, 19 nt, synthetic construct
  misc_feature 1..19: note = siRNA antisense sequence
  source 1..19: mol_type = other RNA
aaacttaacaatgcttggc

SEQ ID NO: 18736 - RNA, 19 nt, synthetic construct
  misc_feature 1..19: note = siRNA sense sequence
  source 1..19: mol_type = other RNA
ccaagcattgttaagtttt

SEQ ID NO: 18737 - RNA, 19 nt, synthetic construct
  misc_feature 1..19: note = siRNA antisense sequence
  source 1..19: mol_type = other RNA
aaaacttaacaatgcttgg

SEQ ID NO: 18738 - RNA, 19 nt, synthetic construct
  misc_feature 1..19: note = siRNA sense sequence
  source 1..19: mol_type = other RNA
ttagaagttgattatcagc

SEQ ID NO: 18739 - RNA, 19 nt, synthetic construct
  misc_feature 1..19: note = siRNA antisense sequence
  source 1..19: mol_type = other RNA
gctgataatcaacttctaa

SEQ ID NO: 18740 - RNA, 19 nt, synthetic construct
  misc_feature 1..19: note = siRNA sense sequence
  source 1..19: mol_type = other RNA
aagttgattatcagcaagc

SEQ ID NO: 18741 - RNA, 19 nt, synthetic construct
  misc_feature 1..19: note = siRNA antisense sequence
  source 1..19: mol_type = other RNA
gcttgctgataatcaactt

SEQ ID NO: 18742 - RNA, 19 nt, synthetic construct
  misc_feature 1..19: note = siRNA sense sequence
  source 1..19: mol_type = other RNA
agttgattatcagcaagca

SEQ ID NO: 18743 - RNA, 19 nt, synthetic construct
  misc_feature 1..19: note = siRNA antisense sequence
  source 1..19: mol_type = other RNA
tgcttgctgataatcaact

SEQ ID NO: 18744 - RNA, 19 nt, synthetic construct
  misc_feature 1..19: note = siRNA sense sequence
  source 1..19: mol_type = other RNA
gttgattatcagcaagcag

SEQ ID NO: 18745 - RNA, 19 nt, synthetic construct
  misc_feature 1..19: note = siRNA antisense sequence
  source 1..19: mol_type = other RNA
ctgcttgctgataatcaac

SEQ ID NO: 18746 - RNA, 19 nt, synthetic construct
  misc_feature 1..19: note = siRNA sense sequence
  source 1..19: mol_type = other RNA
ttgattatcagcaagcaga

SEQ ID NO: 18747 - RNA, 19 nt, synthetic construct
  misc_feature 1..19: note = siRNA antisense sequence
  source 1..19: mol_type = other RNA
tctgcttgctgataatcaa

SEQ ID NO: 18748 - RNA, 19 nt, synthetic construct
  misc_feature 1..19: note = siRNA sense sequence
  source 1..19: mol_type = other RNA
tgattatcagcaagcagag

SEQ ID NO: 18749 - RNA, 19 nt, synthetic construct
  misc_feature 1..19: note = siRNA antisense sequence
  source 1..19: mol_type = other RNA
ctctgcttgctgataatca

SEQ ID NO: 18750 - RNA, 19 nt, synthetic construct
  misc_feature 1..19: note = siRNA sense sequence
  source 1..19: mol_type = other RNA
gattatcagcaagcagagc

SEQ ID NO: 18751 - RNA, 19 nt, synthetic construct
  misc_feature 1..19: note = siRNA antisense sequence
  source 1..19: mol_type = other RNA
gctctgcttgctgataatc

SEQ ID NO: 18752 - RNA, 19 nt, synthetic construct
  misc_feature 1..19: note = siRNA sense sequence
  source 1..19: mol_type = other RNA
attatcagcaagcagagct

SEQ ID NO: 18753 - RNA, 19 nt, synthetic construct
  misc_feature 1..19: note = siRNA antisense sequence
  source 1..19: mol_type = other RNA
agctctgcttgctgataat

SEQ ID NO: 18754 - RNA, 19 nt, synthetic construct
  misc_feature 1..19: note = siRNA sense sequence
  source 1..19: mol_type = other RNA
tttcagaagggaggtaatg

SEQ ID NO: 18755 - RNA, 19 nt, synthetic construct
  misc_feature 1..19: note = siRNA antisense sequence
  source 1..19: mol_type = other RNA
cattacctcccttctgaaa

SEQ ID NO: 18756 - RNA, 19 nt, synthetic construct
  misc_feature 1..19: note = siRNA sense sequence
  source 1..19: mol_type = other RNA
gaagggaggtaatgtaaag

SEQ ID NO: 18757 - RNA, 19 nt, synthetic construct
  misc_feature 1..19: note = siRNA antisense sequence
  source 1..19: mol_type = other RNA
ctttacattacctcccttc

SEQ ID NO: 18758 - RNA, 19 nt, synthetic construct
  misc_feature 1..19: note = siRNA sense sequence
  source 1..19: mol_type = other RNA
aagggaggtaatgtaaaga

SEQ ID NO: 18759 - RNA, 19 nt, synthetic construct
  misc_feature 1..19: note = siRNA antisense sequence
  source 1..19: mol_type = other RNA
tctttacattacctccctt

SEQ ID NO: 18760 - RNA, 19 nt, synthetic construct
  misc_feature 1..19: note = siRNA sense sequence
  source 1..19: mol_type = other RNA
acagcattatagccggtga

SEQ ID NO: 18761 - RNA, 19 nt, synthetic construct
  misc_feature 1..19: note = siRNA antisense sequence
  source 1..19: mol_type = other RNA
tcaccggctataatgctgt

SEQ ID NO: 18762 - RNA, 19 nt, synthetic construct
  misc_feature 1..19: note = siRNA sense sequence
  source 1..19: mol_type = other RNA
cagcattatagccggtgag

SEQ ID NO: 18763 - RNA, 19 nt, synthetic construct
  misc_feature 1..19: note = siRNA antisense sequence
  source 1..19: mol_type = other RNA
ctcaccggctataatgctg

SEQ ID NO: 18764 - RNA, 19 nt, synthetic construct
  misc_feature 1..19: note = siRNA sense sequence
  source 1..19: mol_type = other RNA
attatagccggtgagtggt

SEQ ID NO: 18765 - RNA, 19 nt, synthetic construct
  misc_feature 1..19: note = siRNA antisense sequence
  source 1..19: mol_type = other RNA
accactcaccggctataat

SEQ ID NO: 18766 - RNA, 19 nt, synthetic construct
  misc_feature 1..19: note = siRNA sense sequence
  source 1..19: mol_type = other RNA
ttatagccggtgagtggtt

SEQ ID NO: 18767 - RNA, 19 nt, synthetic construct
  misc_feature 1..19: note = siRNA antisense sequence
  source 1..19: mol_type = other RNA
aaccactcaccggctataa

SEQ ID NO: 18768 - RNA, 19 nt, synthetic construct
  misc_feature 1..19: note = siRNA sense sequence
  source 1..19: mol_type = other RNA
tatagccggtgagtggttt

SEQ ID NO: 18769 - RNA, 19 nt, synthetic construct
  misc_feature 1..19: note = siRNA antisense sequence
  source 1..19: mol_type = other RNA
aaaccactcaccggctata

SEQ ID NO: 18770 - RNA, 19 nt, synthetic construct
  misc_feature 1..19: note = siRNA sense sequence
  source 1..19: mol_type = other RNA
atagccggtgagtggttta

SEQ ID NO: 18771 - RNA, 19 nt, synthetic construct
  misc_feature 1..19: note = siRNA antisense sequence
  source 1..19: mol_type = other RNA
taaaccactcaccggctat

SEQ ID NO: 18772 - RNA, 19 nt, synthetic construct
  misc_feature 1..19: note = siRNA sense sequence
  source 1..19: mol_type = other RNA
tagccggtgagtggtttaa

SEQ ID NO: 18773 - RNA, 19 nt, synthetic construct
  misc_feature 1..19: note = siRNA antisense sequence
  source 1..19: mol_type = other RNA
ttaaaccactcaccggcta

SEQ ID NO: 18774 - RNA, 19 nt, synthetic construct
  misc_feature 1..19: note = siRNA sense sequence
  source 1..19: mol_type = other RNA
agccggtgagtggtttaac

SEQ ID NO: 18775 - RNA, 19 nt, synthetic construct
  misc_feature 1..19: note = siRNA antisense sequence
  source 1..19: mol_type = other RNA
gttaaaccactcaccggct

SEQ ID NO: 18776 - RNA, 19 nt, synthetic construct
  misc_feature 1..19: note = siRNA sense sequence
  source 1..19: mol_type = other RNA
gccggtgagtggtttaact

SEQ ID NO: 18777 - RNA, 19 nt, synthetic construct
  misc_feature 1..19: note = siRNA antisense sequence
  source 1..19: mol_type = other RNA
agttaaaccactcaccggc

SEQ ID NO: 18778 - RNA, 19 nt, synthetic construct
  misc_feature 1..19: note = siRNA sense sequence
  source 1..19: mol_type = other RNA
ccggtgagtggtttaactt

SEQ ID NO: 18779 - RNA, 19 nt, synthetic construct
  misc_feature 1..19: note = siRNA antisense sequence
  source 1..19: mol_type = other RNA
aagttaaaccactcaccgg

SEQ ID NO: 18780 - RNA, 19 nt, synthetic construct
  misc_feature 1..19: note = siRNA sense sequence
  source 1..19: mol_type = other RNA
cggtgagtggtttaactta

SEQ ID NO: 18781 - RNA, 19 nt, synthetic construct
  misc_feature 1..19: note = siRNA antisense sequence
  source 1..19: mol_type = other RNA
taagttaaaccactcaccg

SEQ ID NO: 18782 - RNA, 19 nt, synthetic construct
  misc_feature 1..19: note = siRNA sense sequence
  source 1..19: mol_type = other RNA
ggtgagtggtttaacttac

SEQ ID NO: 18783 - RNA, 19 nt, synthetic construct
  misc_feature 1..19: note = siRNA antisense sequence
  source 1..19: mol_type = other RNA
gtaagttaaaccactcacc

SEQ ID NO: 18784 - RNA, 19 nt, synthetic construct
  misc_feature 1..19: note = siRNA sense sequence
  source 1..19: mol_type = other RNA
gtgagtggtttaacttacc

SEQ ID NO: 18785 - RNA, 19 nt, synthetic construct
  misc_feature 1..19: note = siRNA antisense sequence
  source 1..19: mol_type = other RNA
ggtaagttaaaccactcac

SEQ ID NO: 18786 - RNA, 19 nt, synthetic construct
  misc_feature 1..19: note = siRNA sense sequence
  source 1..19: mol_type = other RNA
ggtttaacttaccagctac

SEQ ID NO: 18787 - RNA, 19 nt, synthetic construct
  misc_feature 1..19: note = siRNA antisense sequence
  source 1..19: mol_type = other RNA
gtagctggtaagttaaacc

SEQ ID NO: 18788 - RNA, 19 nt, synthetic construct
  misc_feature 1..19: note = siRNA sense sequence
  source 1..19: mol_type = other RNA
gtttaacttaccagctact

SEQ ID NO: 18789 - RNA, 19 nt, synthetic construct
  misc_feature 1..19: note = siRNA antisense sequence
  source 1..19: mol_type = other RNA
agtagctggtaagttaaac

SEQ ID NO: 18790 - RNA, 19 nt, synthetic construct
  misc_feature 1..19: note = siRNA sense sequence
  source 1..19: mol_type = other RNA
cttaccagctactgccact

SEQ ID NO: 18791 - RNA, 19 nt, synthetic construct
  misc_feature 1..19: note = siRNA antisense sequence
  source 1..19: mol_type = other RNA
agtggcagtagctggtaag

SEQ ID NO: 18792 - RNA, 19 nt, synthetic construct
  misc_feature 1..19: note = siRNA sense sequence
  source 1..19: mol_type = other RNA
cagctactgccactacttt

SEQ ID NO: 18793 - RNA, 19 nt, synthetic construct
  misc_feature 1..19: note = siRNA antisense sequence
  source 1..19: mol_type = other RNA
aaagtagtggcagtagctg

SEQ ID NO: 18794 - RNA, 19 nt, synthetic construct
  misc_feature 1..19: note = siRNA sense sequence
  source 1..19: mol_type = other RNA
agctactgccactactttt

SEQ ID NO: 18795 - RNA, 19 nt, synthetic construct
  misc_feature 1..19: note = siRNA antisense sequence
  source 1..19: mol_type = other RNA
aaaagtagtggcagtagct

SEQ ID NO: 18796 - RNA, 19 nt, synthetic construct
  misc_feature 1..19: note = siRNA sense sequence
  source 1..19: mol_type = other RNA
atttgacctatgattcttc

SEQ ID NO: 18797 - RNA, 19 nt, synthetic construct
  misc_feature 1..19: note = siRNA antisense sequence
  source 1..19: mol_type = other RNA
gaagaatcataggtcaaat

SEQ ID NO: 18798 - RNA, 19 nt, synthetic construct
  misc_feature 1..19: note = siRNA sense sequence
  source 1..19: mol_type = other RNA
tttgacctatgattcttct

SEQ ID NO: 18799 - RNA, 19 nt, synthetic construct
  misc_feature 1..19: note = siRNA antisense sequence
  source 1..19: mol_type = other RNA
agaagaatcataggtcaaa

SEQ ID NO: 18800 - RNA, 19 nt, synthetic construct
  misc_feature 1..19: note = siRNA sense sequence
  source 1..19: mol_type = other RNA
ttgacctatgattcttctc

SEQ ID NO: 18801 - RNA, 19 nt, synthetic construct
  misc_feature 1..19: note = siRNA antisense sequence
  source 1..19: mol_type = other RNA
gagaagaatcataggtcaa

SEQ ID NO: 18802 - RNA, 19 nt, synthetic construct
  misc_feature 1..19: note = siRNA sense sequence
  source 1..19: mol_type = other RNA
tgacctatgattcttctcc

SEQ ID NO: 18803 - RNA, 19 nt, synthetic construct
  misc_feature 1..19: note = siRNA antisense sequence
  source 1..19: mol_type = other RNA
ggagaagaatcataggtca

SEQ ID NO: 18804 - RNA, 19 nt, synthetic construct
  misc_feature 1..19: note = siRNA sense sequence
  source 1..19: mol_type = other RNA
gacctatgattcttctcca

SEQ ID NO: 18805 - RNA, 19 nt, synthetic construct
  misc_feature 1..19: note = siRNA antisense sequence
  source 1..19: mol_type = other RNA
tggagaagaatcataggtc

SEQ ID NO: 18806 - RNA, 19 nt, synthetic construct
  misc_feature 1..19: note = siRNA sense sequence
  source 1..19: mol_type = other RNA
acctatgattcttctccaa

SEQ ID NO: 18807 - RNA, 19 nt, synthetic construct
  misc_feature 1..19: note = siRNA antisense sequence
  source 1..19: mol_type = other RNA
ttggagaagaatcataggt

SEQ ID NO: 18808 - RNA, 19 nt, synthetic construct
  misc_feature 1..19: note = siRNA sense sequence
  source 1..19: mol_type = other RNA
cctatgattcttctccaac

SEQ ID NO: 18809 - RNA, 19 nt, synthetic construct
  misc_feature 1..19: note = siRNA antisense sequence
  source 1..19: mol_type = other RNA
gttggagaagaatcatagg

SEQ ID NO: 18810 - RNA, 19 nt, synthetic construct
  misc_feature 1..19: note = siRNA sense sequence
  source 1..19: mol_type = other RNA
ctatgattcttctccaact

SEQ ID NO: 18811 - RNA, 19 nt, synthetic construct
  misc_feature 1..19: note = siRNA antisense sequence
  source 1..19: mol_type = other RNA
agttggagaagaatcatag

SEQ ID NO: 18812 - RNA, 19 nt, synthetic construct
  misc_feature 1..19: note = siRNA sense sequence
  source 1..19: mol_type = other RNA
gattcttctccaactcaaa

SEQ ID NO: 18813 - RNA, 19 nt, synthetic construct
  misc_feature 1..19: note = siRNA antisense sequence
  source 1..19: mol_type = other RNA
tttgagttggagaagaatc

SEQ ID NO: 18814 - RNA, 19 nt, synthetic construct
  misc_feature 1..19: note = siRNA sense sequence
  source 1..19: mol_type = other RNA
attcttctccaactcaaat

SEQ ID NO: 18815 - RNA, 19 nt, synthetic construct
  misc_feature 1..19: note = siRNA antisense sequence
  source 1..19: mol_type = other RNA
atttgagttggagaagaat

SEQ ID NO: 18816 - RNA, 19 nt, synthetic construct
  misc_feature 1..19: note = siRNA sense sequence
  source 1..19: mol_type = other RNA
ttcttctccaactcaaatt

SEQ ID NO: 18817 - RNA, 19 nt, synthetic construct
  misc_feature 1..19: note = siRNA antisense sequence
  source 1..19: mol_type = other RNA
aatttgagttggagaagaa

SEQ ID NO: 18818 - RNA, 19 nt, synthetic construct
  misc_feature 1..19: note = siRNA sense sequence
  source 1..19: mol_type = other RNA
tcttctccaactcaaattt

SEQ ID NO: 18819 - RNA, 19 nt, synthetic construct
  misc_feature 1..19: note = siRNA antisense sequence
  source 1..19: mol_type = other RNA
aaatttgagttggagaaga

SEQ ID NO: 18820 - RNA, 19 nt, synthetic construct
  misc_feature 1..19: note = siRNA sense sequence
  source 1..19: mol_type = other RNA
cttctccaactcaaatttt

SEQ ID NO: 18821 - RNA, 19 nt, synthetic construct
  misc_feature 1..19: note = siRNA antisense sequence
  source 1..19: mol_type = other RNA
aaaatttgagttggagaag

SEQ ID NO: 18822 - RNA, 19 nt, synthetic construct
  misc_feature 1..19: note = siRNA sense sequence
  source 1..19: mol_type = other RNA
tgtgcaaaatctgaataca

SEQ ID NO: 18823 - RNA, 19 nt, synthetic construct
  misc_feature 1..19: note = siRNA antisense sequence
  source 1..19: mol_type = other RNA
tgtattcagattttgcaca

SEQ ID NO: 18824 - RNA, 19 nt, synthetic construct
  misc_feature 1..19: note = siRNA sense sequence
  source 1..19: mol_type = other RNA
gtgcaaaatctgaatacag

SEQ ID NO: 18825 - RNA, 19 nt, synthetic construct
  misc_feature 1..19: note = siRNA antisense sequence
  source 1..19: mol_type = other RNA
ctgtattcagattttgcac

SEQ ID NO: 18826 - RNA, 19 nt, synthetic construct
  misc_feature 1..19: note = siRNA sense sequence
  source 1..19: mol_type = other RNA
tagtttactatccaagttg

SEQ ID NO: 18827 - RNA, 19 nt, synthetic construct
  misc_feature 1..19: note = siRNA antisense sequence
  source 1..19: mol_type = other RNA
caacttggatagtaaacta

SEQ ID NO: 18828 - RNA, 19 nt, synthetic construct
  misc_feature 1..19: note = siRNA sense sequence
  source 1..19: mol_type = other RNA
agtttactatccaagttgt

SEQ ID NO: 18829 - RNA, 19 nt, synthetic construct
  misc_feature 1..19: note = siRNA antisense sequence
  source 1..19: mol_type = other RNA
acaacttggatagtaaact

SEQ ID NO: 18830 - RNA, 19 nt, synthetic construct
  misc_feature 1..19: note = siRNA sense sequence
  source 1..19: mol_type = other RNA
gtttactatccaagttgta

SEQ ID NO: 18831 - RNA, 19 nt, synthetic construct
  misc_feature 1..19: note = siRNA antisense sequence
  source 1..19: mol_type = other RNA
tacaacttggatagtaaac

SEQ ID NO: 18832 - RNA, 19 nt, synthetic construct
  misc_feature 1..19: note = siRNA sense sequence
  source 1..19: mol_type = other RNA
tttactatccaagttgtac

SEQ ID NO: 18833 - RNA, 19 nt, synthetic construct
  misc_feature 1..19: note = siRNA antisense sequence
  source 1..19: mol_type = other RNA
gtacaacttggatagtaaa

SEQ ID NO: 18834 - RNA, 19 nt, synthetic construct
  misc_feature 1..19: note = siRNA sense sequence
  source 1..19: mol_type = other RNA
ttactatccaagttgtact

SEQ ID NO: 18835 - RNA, 19 nt, synthetic construct
  misc_feature 1..19: note = siRNA antisense sequence
  source 1..19: mol_type = other RNA
agtacaacttggatagtaa

SEQ ID NO: 18836 - RNA, 19 nt, synthetic construct
  misc_feature 1..19: note = siRNA sense sequence
  source 1..19: mol_type = other RNA
tcattctaccaaataagca

SEQ ID NO: 18837 - RNA, 19 nt, synthetic construct
  misc_feature 1..19: note = siRNA antisense sequence
  source 1..19: mol_type = other RNA
tgcttatttggtagaatga

SEQ ID NO: 18838 - RNA, 19 nt, synthetic construct
  misc_feature 1..19: note = siRNA sense sequence
  source 1..19: mol_type = other RNA
cattctaccaaataagcag

SEQ ID NO: 18839 - RNA, 19 nt, synthetic construct
  misc_feature 1..19: note = siRNA antisense sequence
  source 1..19: mol_type = other RNA
ctgcttatttggtagaatg

SEQ ID NO: 18840 - RNA, 19 nt, synthetic construct
  misc_feature 1..19: note = siRNA sense sequence
  source 1..19: mol_type = other RNA
attctaccaaataagcagt

SEQ ID NO: 18841 - RNA, 19 nt, synthetic construct
  misc_feature 1..19: note = siRNA antisense sequence
  source 1..19: mol_type = other RNA
actgcttatttggtagaat

SEQ ID NO: 18842 - RNA, 19 nt, synthetic construct
  misc_feature 1..19: note = siRNA sense sequence
  source 1..19: mol_type = other RNA
ccaaataagcagtctctag

SEQ ID NO: 18843 - RNA, 19 nt, synthetic construct
  misc_feature 1..19: note = siRNA antisense sequence
  source 1..19: mol_type = other RNA
ctagagactgcttatttgg

SEQ ID NO: 18844 - RNA, 19 nt, synthetic construct
  misc_feature 1..19: note = siRNA sense sequence
  source 1..19: mol_type = other RNA
caaataagcagtctctaga

SEQ ID NO: 18845 - RNA, 19 nt, synthetic construct
  misc_feature 1..19: note = siRNA antisense sequence
  source 1..19: mol_type = other RNA
tctagagactgcttatttg

SEQ ID NO: 18846 - RNA, 19 nt, synthetic construct
  misc_feature 1..19: note = siRNA sense sequence
  source 1..19: mol_type = other RNA
aaataagcagtctctagag

SEQ ID NO: 18847 - RNA, 19 nt, synthetic construct
  misc_feature 1..19: note = siRNA antisense sequence
  source 1..19: mol_type = other RNA
ctctagagactgcttattt

SEQ ID NO: 18848 - RNA, 19 nt, synthetic construct
  misc_feature 1..19: note = siRNA sense sequence
  source 1..19: mol_type = other RNA
aataagcagtctctagagt

SEQ ID NO: 18849 - RNA, 19 nt, synthetic construct
  misc_feature 1..19: note = siRNA antisense sequence
  source 1..19: mol_type = other RNA
actctagagactgcttatt

SEQ ID NO: 18850 - RNA, 19 nt, synthetic construct
  misc_feature 1..19: note = siRNA sense sequence
  source 1..19: mol_type = other RNA
ataagcagtctctagagta

SEQ ID NO: 18851 - RNA, 19 nt, synthetic construct
  misc_feature 1..19: note = siRNA antisense sequence
  source 1..19: mol_type = other RNA
tactctagagactgcttat

SEQ ID NO: 18852 - RNA, 19 nt, synthetic construct
  misc_feature 1..19: note = siRNA sense sequence
  source 1..19: mol_type = other RNA
taagcagtctctagagtag

SEQ ID NO: 18853 - RNA, 19 nt, synthetic construct
  misc_feature 1..19: note = siRNA antisense sequence
  source 1..19: mol_type = other RNA
ctactctagagactgctta

SEQ ID NO: 18854 - RNA, 19 nt, synthetic construct
  misc_feature 1..19: note = siRNA sense sequence
  source 1..19: mol_type = other RNA
aaatgaggtttgcgtatcc

SEQ ID NO: 18855 - RNA, 19 nt, synthetic construct
  misc_feature 1..19: note = siRNA antisense sequence
  source 1..19: mol_type = other RNA
ggatacgcaaacctcattt

SEQ ID NO: 18856 - RNA, 19 nt, synthetic construct
  misc_feature 1..19: note = siRNA sense sequence
  source 1..19: mol_type = other RNA
aatgaggtttgcgtatcct

SEQ ID NO: 18857 - RNA, 19 nt, synthetic construct
  misc_feature 1..19: note = siRNA antisense sequence
  source 1..19: mol_type = other RNA
aggatacgcaaacctcatt

SEQ ID NO: 18858 - RNA, 19 nt, synthetic construct
  misc_feature 1..19: note = siRNA sense sequence
  source 1..19: mol_type = other RNA
gtttgcgtatcctctaaaa

SEQ ID NO: 18859 - RNA, 19 nt, synthetic construct
  misc_feature 1..19: note = siRNA antisense sequence
  source 1..19: mol_type = other RNA
ttttagaggatacgcaaac

SEQ ID NO: 18860 - RNA, 19 nt, synthetic construct
  misc_feature 1..19: note = siRNA sense sequence
  source 1..19: mol_type = other RNA
aatatacattggtgaatcc

SEQ ID NO: 18861 - RNA, 19 nt, synthetic construct
  misc_feature 1..19: note = siRNA antisense sequence
  source 1..19: mol_type = other RNA
ggattcaccaatgtatatt

SEQ ID NO: 18862 - RNA, 19 nt, synthetic construct
  misc_feature 1..19: note = siRNA sense sequence
  source 1..19: mol_type = other RNA
atatacattggtgaatcca

SEQ ID NO: 18863 - RNA, 19 nt, synthetic construct
  misc_feature 1..19: note = siRNA antisense sequence
  source 1..19: mol_type = other RNA
tggattcaccaatgtatat

SEQ ID NO: 18864 - RNA, 19 nt, synthetic construct
  misc_feature 1..19: note = siRNA sense sequence
  source 1..19: mol_type = other RNA
tatacattggtgaatccag

SEQ ID NO: 18865 - RNA, 19 nt, synthetic construct
  misc_feature 1..19: note = siRNA antisense sequence
  source 1..19: mol_type = other RNA
ctggattcaccaatgtata

SEQ ID NO: 18866 - RNA, 19 nt, synthetic construct
  misc_feature 1..19: note = siRNA sense sequence
  source 1..19: mol_type = other RNA
atacattggtgaatccagg

SEQ ID NO: 18867 - RNA, 19 nt, synthetic construct
  misc_feature 1..19: note = siRNA antisense sequence
  source 1..19: mol_type = other RNA
cctggattcaccaatgtat

SEQ ID NO: 18868 - RNA, 19 nt, synthetic construct
  misc_feature 1..19: note = siRNA sense sequence
  source 1..19: mol_type = other RNA
acattggtgaatccaggaa

SEQ ID NO: 18869 - RNA, 19 nt, synthetic construct
  misc_feature 1..19: note = siRNA antisense sequence
  source 1..19: mol_type = other RNA
ttcctggattcaccaatgt

SEQ ID NO: 18870 - RNA, 19 nt, synthetic construct
  misc_feature 1..19: note = siRNA sense sequence
  source 1..19: mol_type = other RNA
cattggtgaatccaggaag

SEQ ID NO: 18871 - RNA, 19 nt, synthetic construct
  misc_feature 1..19: note = siRNA antisense sequence
  source 1..19: mol_type = other RNA
cttcctggattcaccaatg

SEQ ID NO: 18872 - RNA, 19 nt, synthetic construct
  misc_feature 1..19: note = siRNA sense sequence
  source 1..19: mol_type = other RNA
attggtgaatccaggaaga

SEQ ID NO: 18873 - RNA, 19 nt, synthetic construct
  misc_feature 1..19: note = siRNA antisense sequence
  source 1..19: mol_type = other RNA
tcttcctggattcaccaat

SEQ ID NO: 18874 - RNA, 19 nt, synthetic construct
  misc_feature 1..19: note = siRNA sense sequence
  source 1..19: mol_type = other RNA
ttggtgaatccaggaagag

SEQ ID NO: 18875 - RNA, 19 nt, synthetic construct
  misc_feature 1..19: note = siRNA antisense sequence
  source 1..19: mol_type = other RNA
ctcttcctggattcaccaa

SEQ ID NO: 18876 - RNA, 19 nt, synthetic construct
  misc_feature 1..19: note = siRNA sense sequence
  source 1..19: mol_type = other RNA
aaccttgtgtgcactatat

SEQ ID NO: 18877 - RNA, 19 nt, synthetic construct
  misc_feature 1..19: note = siRNA antisense sequence
  source 1..19: mol_type = other RNA
atatagtgcacacaaggtt

SEQ ID NO: 18878 - RNA, 19 nt, synthetic construct
  misc_feature 1..19: note = siRNA sense sequence
  source 1..19: mol_type = other RNA
accttgtgtgcactatatt

SEQ ID NO: 18879 - RNA, 19 nt, synthetic construct
  misc_feature 1..19: note = siRNA antisense sequence
  source 1..19: mol_type = other RNA
aatatagtgcacacaaggt

SEQ ID NO: 18880 - RNA, 19 nt, synthetic construct
  misc_feature 1..19: note = siRNA sense sequence
  source 1..19: mol_type = other RNA
ccttgtgtgcactatattt

SEQ ID NO: 18881 - RNA, 19 nt, synthetic construct
  misc_feature 1..19: note = siRNA antisense sequence
  source 1..19: mol_type = other RNA
aaatatagtgcacacaagg

SEQ ID NO: 18882 - RNA, 19 nt, synthetic construct
  misc_feature 1..19: note = siRNA sense sequence
  source 1..19: mol_type = other RNA
cttgtgtgcactatattta

SEQ ID NO: 18883 - RNA, 19 nt, synthetic construct
  misc_feature 1..19: note = siRNA antisense sequence
  source 1..19: mol_type = other RNA
taaatatagtgcacacaag

SEQ ID NO: 18884 - RNA, 19 nt, synthetic construct
  misc_feature 1..19: note = siRNA sense sequence
  source 1..19: mol_type = other RNA
tgtgtgcactatatttatg

SEQ ID NO: 18885 - RNA, 19 nt, synthetic construct
  misc_feature 1..19: note = siRNA antisense sequence
  source 1..19: mol_type = other RNA
cataaatatagtgcacaca

SEQ ID NO: 18886 - RNA, 19 nt, synthetic construct
  misc_feature 1..19: note = siRNA sense sequence
  source 1..19: mol_type = other RNA
gtgtgcactatatttatgc

SEQ ID NO: 18887 - RNA, 19 nt, synthetic construct
  misc_feature 1..19: note = siRNA antisense sequence
  source 1..19: mol_type = other RNA
gcataaatatagtgcacac

SEQ ID NO: 18888 - RNA, 19 nt, synthetic construct
  misc_feature 1..19: note = siRNA sense sequence
  source 1..19: mol_type = other RNA
tgtgcactatatttatgcc

SEQ ID NO: 18889 - RNA, 19 nt, synthetic construct
  misc_feature 1..19: note = siRNA antisense sequence
  source 1..19: mol_type = other RNA
ggcataaatatagtgcaca

SEQ ID NO: 18890 - RNA, 19 nt, synthetic construct
  misc_feature 1..19: note = siRNA sense sequence
  source 1..19: mol_type = other RNA
gtgcactatatttatgccc

SEQ ID NO: 18891 - RNA, 19 nt, synthetic construct
  misc_feature 1..19: note = siRNA antisense sequence
  source 1..19: mol_type = other RNA
gggcataaatatagtgcac

SEQ ID NO: 18892 - RNA, 19 nt, synthetic construct
  misc_feature 1..19: note = siRNA sense sequence
  source 1..19: mol_type = other RNA
tgcactatatttatgccca

SEQ ID NO: 18893 - RNA, 19 nt, synthetic construct
  misc_feature 1..19: note = siRNA antisense sequence
  source 1..19: mol_type = other RNA
tgggcataaatatagtgca

SEQ ID NO: 18894 - RNA, 19 nt, synthetic construct
  misc_feature 1..19: note = siRNA sense sequence
  source 1..19: mol_type = other RNA
gcactatatttatgcccat

SEQ ID NO: 18895 - RNA, 19 nt, synthetic construct
  misc_feature 1..19: note = siRNA antisense sequence
  source 1..19: mol_type = other RNA
atgggcataaatatagtgc

SEQ ID NO: 18896 - RNA, 19 nt, synthetic construct
  misc_feature 1..19: note = siRNA sense sequence
  source 1..19: mol_type = other RNA
cactatatttatgcccatt

SEQ ID NO: 18897 - RNA, 19 nt, synthetic construct
  misc_feature 1..19: note = siRNA antisense sequence
  source 1..19: mol_type = other RNA
aatgggcataaatatagtg

SEQ ID NO: 18898 - RNA, 19 nt, synthetic construct
  misc_feature 1..19: note = siRNA sense sequence
  source 1..19: mol_type = other RNA
ctatatttatgcccatttc

SEQ ID NO: 18899 - RNA, 19 nt, synthetic construct
  misc_feature 1..19: note = siRNA antisense sequence
  source 1..19: mol_type = other RNA
gaaatgggcataaatatag

SEQ ID NO: 18900 - RNA, 19 nt, synthetic construct
  misc_feature 1..19: note = siRNA sense sequence
  source 1..19: mol_type = other RNA
tatatttatgcccatttcg

SEQ ID NO: 18901 - RNA, 19 nt, synthetic construct
  misc_feature 1..19: note = siRNA antisense sequence
  source 1..19: mol_type = other RNA
cgaaatgggcataaatata

SEQ ID NO: 18902 - RNA, 19 nt, synthetic construct
  misc_feature 1..19: note = siRNA sense sequence
  source 1..19: mol_type = other RNA
atatttatgcccatttcgc

SEQ ID NO: 18903 - RNA, 19 nt, synthetic construct
  misc_feature 1..19: note = siRNA antisense sequence
  source 1..19: mol_type = other RNA
gcgaaatgggcataaatat

SEQ ID NO: 18904 - RNA, 19 nt, synthetic construct
  misc_feature 1..19: note = siRNA sense sequence
  source 1..19: mol_type = other RNA
tatttatgcccatttcgca

SEQ ID NO: 18905 - RNA, 19 nt, synthetic construct
  misc_feature 1..19: note = siRNA antisense sequence
  source 1..19: mol_type = other RNA
tgcgaaatgggcataaata

SEQ ID NO: 18906 - RNA, 19 nt, synthetic construct
  misc_feature 1..19: note = siRNA sense sequence
  source 1..19: mol_type = other RNA
atttatgcccatttcgcaa

SEQ ID NO: 18907 - RNA, 19 nt, synthetic construct
  misc_feature 1..19: note = siRNA antisense sequence
  source 1..19: mol_type = other RNA
ttgcgaaatgggcataaat

SEQ ID NO: 18908 - RNA, 19 nt, synthetic construct
  misc_feature 1..19: note = siRNA sense sequence
  source 1..19: mol_type = other RNA
tttatgcccatttcgcaac

SEQ ID NO: 18909 - RNA, 19 nt, synthetic construct
  misc_feature 1..19: note = siRNA antisense sequence
  source 1..19: mol_type = other RNA
gttgcgaaatgggcataaa

SEQ ID NO: 18910 - RNA, 19 nt, synthetic construct
  misc_feature 1..19: note = siRNA sense sequence
  source 1..19: mol_type = other RNA
ttggactgctttcccatca

SEQ ID NO: 18911 - RNA, 19 nt, synthetic construct
  misc_feature 1..19: note = siRNA antisense sequence
  source 1..19: mol_type = other RNA
tgatgggaaagcagtccaa

SEQ ID NO: 18912 - RNA, 19 nt, synthetic construct
  misc_feature 1..19: note = siRNA sense sequence
  source 1..19: mol_type = other RNA
ttatattctgtaggctctt

SEQ ID NO: 18913 - RNA, 19 nt, synthetic construct
  misc_feature 1..19: note = siRNA antisense sequence
  source 1..19: mol_type = other RNA
aagagcctacagaatataa

SEQ ID NO: 18914 - RNA, 19 nt, synthetic construct
  misc_feature 1..19: note = siRNA sense sequence
  source 1..19: mol_type = other RNA
atattctgtaggctcttct

SEQ ID NO: 18915 - RNA, 19 nt, synthetic construct
  misc_feature 1..19: note = siRNA antisense sequence
  source 1..19: mol_type = other RNA
agaagagcctacagaatat

SEQ ID NO: 18916 - RNA, 19 nt, synthetic construct
  misc_feature 1..19: note = siRNA sense sequence
  source 1..19: mol_type = other RNA
tattctgtaggctcttctt

SEQ ID NO: 18917 - RNA, 19 nt, synthetic construct
  misc_feature 1..19: note = siRNA antisense sequence
  source 1..19: mol_type = other RNA
aagaagagcctacagaata

SEQ ID NO: 18918 - RNA, 19 nt, synthetic construct
  misc_feature 1..19: note = siRNA sense sequence
  source 1..19: mol_type = other RNA
ctgtaggctcttctttagc

SEQ ID NO: 18919 - RNA, 19 nt, synthetic construct
  misc_feature 1..19: note = siRNA antisense sequence
  source 1..19: mol_type = other RNA
gctaaagaagagcctacag

SEQ ID NO: 18920 - RNA, 19 nt, synthetic construct
  misc_feature 1..19: note = siRNA sense sequence
  source 1..19: mol_type = other RNA
gtaggctcttctttagcaa

SEQ ID NO: 18921 - RNA, 19 nt, synthetic construct
  misc_feature 1..19: note = siRNA antisense sequence
  source 1..19: mol_type = other RNA
ttgctaaagaagagcctac

SEQ ID NO: 18922 - RNA, 19 nt, synthetic construct
  misc_feature 1..19: note = siRNA sense sequence
  source 1..19: mol_type = other RNA
taggctcttctttagcaat

SEQ ID NO: 18923 - RNA, 19 nt, synthetic construct
  misc_feature 1..19: note = siRNA antisense sequence
  source 1..19: mol_type = other RNA
attgctaaagaagagccta

SEQ ID NO: 18924 - RNA, 19 nt, synthetic construct
  misc_feature 1..19: note = siRNA sense sequence
  source 1..19: mol_type = other RNA
aggctcttctttagcaatc

SEQ ID NO: 18925 - RNA, 19 nt, synthetic construct
  misc_feature 1..19: note = siRNA antisense sequence
  source 1..19: mol_type = other RNA
gattgctaaagaagagcct

SEQ ID NO: 18926 - RNA, 19 nt, synthetic construct
  misc_feature 1..19: note = siRNA sense sequence
  source 1..19: mol_type = other RNA
ggctcttctttagcaatct

SEQ ID NO: 18927 - RNA, 19 nt, synthetic construct
  misc_feature 1..19: note = siRNA antisense sequence
  source 1..19: mol_type = other RNA
agattgctaaagaagagcc

SEQ ID NO: 18928 - RNA, 19 nt, synthetic construct
  misc_feature 1..19: note = siRNA sense sequence
  source 1..19: mol_type = other RNA
gctcttctttagcaatctc

SEQ ID NO: 18929 - RNA, 19 nt, synthetic construct
  misc_feature 1..19: note = siRNA antisense sequence
  source 1..19: mol_type = other RNA
gagattgctaaagaagagc

SEQ ID NO: 18930 - RNA, 19 nt, synthetic construct
  misc_feature 1..19: note = siRNA sense sequence
  source 1..19: mol_type = other RNA
ctcttctttagcaatctct

SEQ ID NO: 18931 - RNA, 19 nt, synthetic construct
  misc_feature 1..19: note = siRNA antisense sequence
  source 1..19: mol_type = other RNA
agagattgctaaagaagag

SEQ ID NO: 18932 - RNA, 19 nt, synthetic construct
  misc_feature 1..19: note = siRNA sense sequence
  source 1..19: mol_type = other RNA
tcttctttagcaatctctt

SEQ ID NO: 18933 - RNA, 19 nt, synthetic construct
  misc_feature 1..19: note = siRNA antisense sequence
  source 1..19: mol_type = other RNA
aagagattgctaaagaaga

SEQ ID NO: 18934 - RNA, 19 nt, synthetic construct
  misc_feature 1..19: note = siRNA sense sequence
  source 1..19: mol_type = other RNA
cttctttagcaatctcttt

SEQ ID NO: 18935 - RNA, 19 nt, synthetic construct
  misc_feature 1..19: note = siRNA antisense sequence
  source 1..19: mol_type = other RNA
aaagagattgctaaagaag

SEQ ID NO: 18936 - RNA, 19 nt, synthetic construct
  misc_feature 1..19: note = siRNA sense sequence
  source 1..19: mol_type = other RNA
ttctttagcaatctctttc

SEQ ID NO: 18937 - RNA, 19 nt, synthetic construct
  misc_feature 1..19: note = siRNA antisense sequence
  source 1..19: mol_type = other RNA
gaaagagattgctaaagaa

SEQ ID NO: 18938 - RNA, 19 nt, synthetic construct
  misc_feature 1..19: note = siRNA sense sequence
  source 1..19: mol_type = other RNA
aacttctcatcaattcaga

SEQ ID NO: 18939 - RNA, 19 nt, synthetic construct
  misc_feature 1..19: note = siRNA antisense sequence
  source 1..19: mol_type = other RNA
tctgaattgatgagaagtt

SEQ ID NO: 18940 - RNA, 19 nt, synthetic construct
  misc_feature 1..19: note = siRNA sense sequence
  source 1..19: mol_type = other RNA
tctcatcaattcagagtcc

SEQ ID NO: 18941 - RNA, 19 nt, synthetic construct
  misc_feature 1..19: note = siRNA antisense sequence
  source 1..19: mol_type = other RNA
ggactctgaattgatgaga

SEQ ID NO: 18942 - RNA, 19 nt, synthetic construct
  misc_feature 1..19: note = siRNA sense sequence
  source 1..19: mol_type = other RNA
ctcatcaattcagagtccg

SEQ ID NO: 18943 - RNA, 19 nt, synthetic construct
  misc_feature 1..19: note = siRNA antisense sequence
  source 1..19: mol_type = other RNA
cggactctgaattgatgag

SEQ ID NO: 18944 - RNA, 19 nt, synthetic construct
  misc_feature 1..19: note = siRNA sense sequence
  source 1..19: mol_type = other RNA
tcatcaattcagagtccgt

SEQ ID NO: 18945 - RNA, 19 nt, synthetic construct
  misc_feature 1..19: note = siRNA antisense sequence
  source 1..19: mol_type = other RNA
acggactctgaattgatga

SEQ ID NO: 18946 - RNA, 19 nt, synthetic construct
  misc_feature 1..19: note = siRNA sense sequence
  source 1..19: mol_type = other RNA
caattcagagtccgtttgt

SEQ ID NO: 18947 - RNA, 19 nt, synthetic construct
  misc_feature 1..19: note = siRNA antisense sequence
  source 1..19: mol_type = other RNA
acaaacggactctgaattg

SEQ ID NO: 18948 - RNA, 19 nt, synthetic construct
  misc_feature 1..19: note = siRNA sense sequence
  source 1..19: mol_type = other RNA
aattcagagtccgtttgta

SEQ ID NO: 18949 - RNA, 19 nt, synthetic construct
  misc_feature 1..19: note = siRNA antisense sequence
  source 1..19: mol_type = other RNA
tacaaacggactctgaatt

SEQ ID NO: 18950 - RNA, 19 nt, synthetic construct
  misc_feature 1..19: note = siRNA sense sequence
  source 1..19: mol_type = other RNA
attcagagtccgtttgtaa

SEQ ID NO: 18951 - RNA, 19 nt, synthetic construct
  misc_feature 1..19: note = siRNA antisense sequence
  source 1..19: mol_type = other RNA
ttacaaacggactctgaat

SEQ ID NO: 18952 - RNA, 19 nt, synthetic construct
  misc_feature 1..19: note = siRNA sense sequence
  source 1..19: mol_type = other RNA
ttcagagtccgtttgtaac

SEQ ID NO: 18953 - RNA, 19 nt, synthetic construct
  misc_feature 1..19: note = siRNA antisense sequence
  source 1..19: mol_type = other RNA
gttacaaacggactctgaa

SEQ ID NO: 18954 - RNA, 19 nt, synthetic construct
  misc_feature 1..19: note = siRNA sense sequence
  source 1..19: mol_type = other RNA
cactactgtagagcttatc

SEQ ID NO: 18955 - RNA, 19 nt, synthetic construct
  misc_feature 1..19: note = siRNA antisense sequence
  source 1..19: mol_type = other RNA
gataagctctacagtagtg

SEQ ID NO: 18956 - RNA, 19 nt, synthetic construct
  misc_feature 1..19: note = siRNA sense sequence
  source 1..19: mol_type = other RNA
actactgtagagcttatct

SEQ ID NO: 18957 - RNA, 19 nt, synthetic construct
  misc_feature 1..19: note = siRNA antisense sequence
  source 1..19: mol_type = other RNA
agataagctctacagtagt

SEQ ID NO: 18958 - RNA, 19 nt, synthetic construct
  misc_feature 1..19: note = siRNA sense sequence
  source 1..19: mol_type = other RNA
ctactgtagagcttatctt

SEQ ID NO: 18959 - RNA, 19 nt, synthetic construct
  misc_feature 1..19: note = siRNA antisense sequence
  source 1..19: mol_type = other RNA
aagataagctctacagtag

SEQ ID NO: 18960 - RNA, 19 nt, synthetic construct
  misc_feature 1..19: note = siRNA sense sequence
  source 1..19: mol_type = other RNA
tactgtagagcttatcttt

SEQ ID NO: 18961 - RNA, 19 nt, synthetic construct
  misc_feature 1..19: note = siRNA antisense sequence
  source 1..19: mol_type = other RNA
aaagataagctctacagta

SEQ ID NO: 18962 - RNA, 19 nt, synthetic construct
  misc_feature 1..19: note = siRNA sense sequence
  source 1..19: mol_type = other RNA
actgtagagcttatctttc

SEQ ID NO: 18963 - RNA, 19 nt, synthetic construct
  misc_feature 1..19: note = siRNA antisense sequence
  source 1..19: mol_type = other RNA
gaaagataagctctacagt

SEQ ID NO: 18964 - RNA, 19 nt, synthetic construct
  misc_feature 1..19: note = siRNA sense sequence
  source 1..19: mol_type = other RNA
ctgtagagcttatctttct

SEQ ID NO: 18965 - RNA, 19 nt, synthetic construct
  misc_feature 1..19: note = siRNA antisense sequence
  source 1..19: mol_type = other RNA
agaaagataagctctacag

SEQ ID NO: 18966 - RNA, 19 nt, synthetic construct
  misc_feature 1..19: note = siRNA sense sequence
  source 1..19: mol_type = other RNA
tgtagagcttatctttctg

SEQ ID NO: 18967 - RNA, 19 nt, synthetic construct
  misc_feature 1..19: note = siRNA antisense sequence
  source 1..19: mol_type = other RNA
cagaaagataagctctaca

SEQ ID NO: 18968 - RNA, 19 nt, synthetic construct
  misc_feature 1..19: note = siRNA sense sequence
  source 1..19: mol_type = other RNA
gtagagcttatctttctgt

SEQ ID NO: 18969 - RNA, 19 nt, synthetic construct
  misc_feature 1..19: note = siRNA antisense sequence
  source 1..19: mol_type = other RNA
acagaaagataagctctac

SEQ ID NO: 18970 - RNA, 19 nt, synthetic construct
  misc_feature 1..19: note = siRNA sense sequence
  source 1..19: mol_type = other RNA
tagagcttatctttctgtc

SEQ ID NO: 18971 - RNA, 19 nt, synthetic construct
  misc_feature 1..19: note = siRNA antisense sequence
  source 1..19: mol_type = other RNA
gacagaaagataagctcta

SEQ ID NO: 18972 - RNA, 19 nt, synthetic construct
  misc_feature 1..19: note = siRNA sense sequence
  source 1..19: mol_type = other RNA
agagcttatctttctgtct

SEQ ID NO: 18973 - RNA, 19 nt, synthetic construct
  misc_feature 1..19: note = siRNA antisense sequence
  source 1..19: mol_type = other RNA
agacagaaagataagctct

SEQ ID NO: 18974 - RNA, 19 nt, synthetic construct
  misc_feature 1..19: note = siRNA sense sequence
  source 1..19: mol_type = other RNA
gagcttatctttctgtctt

SEQ ID NO: 18975 - RNA, 19 nt, synthetic construct
  misc_feature 1..19: note = siRNA antisense sequence
  source 1..19: mol_type = other RNA
aagacagaaagataagctc

SEQ ID NO: 18976 - RNA, 19 nt, synthetic construct
  misc_feature 1..19: note = siRNA sense sequence
  source 1..19: mol_type = other RNA
tctttctgtcttcaatttg

SEQ ID NO: 18977 - RNA, 19 nt, synthetic construct
  misc_feature 1..19: note = siRNA antisense sequence
  source 1..19: mol_type = other RNA
caaattgaagacagaaaga

SEQ ID NO: 18978 - RNA, 19 nt, synthetic construct
  misc_feature 1..19: note = siRNA sense sequence
  source 1..19: mol_type = other RNA
caacttccagtctaccctc

SEQ ID NO: 18979 - RNA, 19 nt, synthetic construct
  misc_feature 1..19: note = siRNA antisense sequence
  source 1..19: mol_type = other RNA
gagggtagactggaagttg

SEQ ID NO: 18980 - RNA, 19 nt, synthetic construct
  misc_feature 1..19: note = siRNA sense sequence
  source 1..19: mol_type = other RNA
aacttccagtctaccctcc

SEQ ID NO: 18981 - RNA, 19 nt, synthetic construct
  misc_feature 1..19: note = siRNA antisense sequence
  source 1..19: mol_type = other RNA
ggagggtagactggaagtt

SEQ ID NO: 18982 - RNA, 19 nt, synthetic construct
  misc_feature 1..19: note = siRNA sense sequence
  source 1..19: mol_type = other RNA
tccagtctaccctcctaat

SEQ ID NO: 18983 - RNA, 19 nt, synthetic construct
  misc_feature 1..19: note = siRNA antisense sequence
  source 1..19: mol_type = other RNA
attaggagggtagactgga

SEQ ID NO: 18984 - RNA, 19 nt, synthetic construct
  misc_feature 1..19: note = siRNA sense sequence
  source 1..19: mol_type = other RNA
cagtctaccctcctaatac

SEQ ID NO: 18985 - RNA, 19 nt, synthetic construct
  misc_feature 1..19: note = siRNA antisense sequence
  source 1..19: mol_type = other RNA
gtattaggagggtagactg

SEQ ID NO: 18986 - RNA, 19 nt, synthetic construct
  misc_feature 1..19: note = siRNA sense sequence
  source 1..19: mol_type = other RNA
agtctaccctcctaataca

SEQ ID NO: 18987 - RNA, 19 nt, synthetic construct
  misc_feature 1..19: note = siRNA antisense sequence
  source 1..19: mol_type = other RNA
tgtattaggagggtagact

SEQ ID NO: 18988 - RNA, 19 nt, synthetic construct
  misc_feature 1..19: note = siRNA sense sequence
  source 1..19: mol_type = other RNA
gtctaccctcctaatacat

SEQ ID NO: 18989 - RNA, 19 nt, synthetic construct
  misc_feature 1..19: note = siRNA antisense sequence
  source 1..19: mol_type = other RNA
atgtattaggagggtagac

SEQ ID NO: 18990 - RNA, 19 nt, synthetic construct
  misc_feature 1..19: note = siRNA sense sequence
  source 1..19: mol_type = other RNA
tctaccctcctaatacatc

SEQ ID NO: 18991 - RNA, 19 nt, synthetic construct
  misc_feature 1..19: note = siRNA antisense sequence
  source 1..19: mol_type = other RNA
gatgtattaggagggtaga

SEQ ID NO: 18992 - RNA, 19 nt, synthetic construct
  misc_feature 1..19: note = siRNA sense sequence
  source 1..19: mol_type = other RNA
ctaccctcctaatacatca

SEQ ID NO: 18993 - RNA, 19 nt, synthetic construct
  misc_feature 1..19: note = siRNA antisense sequence
  source 1..19: mol_type = other RNA
tgatgtattaggagggtag

SEQ ID NO: 18994 - RNA, 19 nt, synthetic construct
  misc_feature 1..19: note = siRNA sense sequence
  source 1..19: mol_type = other RNA
taccctcctaatacatcat

SEQ ID NO: 18995 - RNA, 19 nt, synthetic construct
  misc_feature 1..19: note = siRNA antisense sequence
  source 1..19: mol_type = other RNA
atgatgtattaggagggta

SEQ ID NO: 18996 - RNA, 19 nt, synthetic construct
  misc_feature 1..19: note = siRNA sense sequence
  source 1..19: mol_type = other RNA
accctcctaatacatcatt

SEQ ID NO: 18997 - RNA, 19 nt, synthetic construct
  misc_feature 1..19: note = siRNA antisense sequence
  source 1..19: mol_type = other RNA
aatgatgtattaggagggt

SEQ ID NO: 18998 - RNA, 19 nt, synthetic construct
  misc_feature 1..19: note = siRNA sense sequence
  source 1..19: mol_type = other RNA
ccctcctaatacatcattt

SEQ ID NO: 18999 - RNA, 19 nt, synthetic construct
  misc_feature 1..19: note = siRNA antisense sequence
  source 1..19: mol_type = other RNA
aaatgatgtattaggaggg

SEQ ID NO: 19000 - RNA, 19 nt, synthetic construct
  misc_feature 1..19: note = siRNA sense sequence
  source 1..19: mol_type = other RNA
cctcctaatacatcatttt

SEQ ID NO: 19001 - RNA, 19 nt, synthetic construct
  misc_feature 1..19: note = siRNA antisense sequence
  source 1..19: mol_type = other RNA
aaaatgatgtattaggagg

SEQ ID NO: 19002 - RNA, 19 nt, synthetic construct
  misc_feature 1..19: note = siRNA sense sequence
  source 1..19: mol_type = other RNA
tggtggttctttgttgcct

SEQ ID NO: 19003 - RNA, 19 nt, synthetic construct
  misc_feature 1..19: note = siRNA antisense sequence
  source 1..19: mol_type = other RNA
aggcaacaaagaaccacca

SEQ ID NO: 19004 - RNA, 19 nt, synthetic construct
  misc_feature 1..19: note = siRNA sense sequence
  source 1..19: mol_type = other RNA
tctcaactgactgccctaa

SEQ ID NO: 19005 - RNA, 19 nt, synthetic construct
  misc_feature 1..19: note = siRNA antisense sequence
  source 1..19: mol_type = other RNA
ttagggcagtcagttgaga

SEQ ID NO: 19006 - RNA, 19 nt, synthetic construct
  misc_feature 1..19: note = siRNA sense sequence
  source 1..19: mol_type = other RNA
ctcaactgactgccctaat

SEQ ID NO: 19007 - RNA, 19 nt, synthetic construct
  misc_feature 1..19: note = siRNA antisense sequence
  source 1..19: mol_type = other RNA
attagggcagtcagttgag

SEQ ID NO: 19008 - RNA, 19 nt, synthetic construct
  misc_feature 1..19: note = siRNA sense sequence
  source 1..19: mol_type = other RNA
caactgactgccctaatcc

SEQ ID NO: 19009 - RNA, 19 nt, synthetic construct
  misc_feature 1..19: note = siRNA antisense sequence
  source 1..19: mol_type = other RNA
ggattagggcagtcagttg

SEQ ID NO: 19010 - RNA, 19 nt, synthetic construct
  misc_feature 1..19: note = siRNA sense sequence
  source 1..19: mol_type = other RNA
aactgactgccctaatcca

SEQ ID NO: 19011 - RNA, 19 nt, synthetic construct
  misc_feature 1..19: note = siRNA antisense sequence
  source 1..19: mol_type = other RNA
tggattagggcagtcagtt

SEQ ID NO: 19012 - RNA, 19 nt, synthetic construct
  misc_feature 1..19: note = siRNA sense sequence
  source 1..19: mol_type = other RNA
actgactgccctaatccaa

SEQ ID NO: 19013 - RNA, 19 nt, synthetic construct
  misc_feature 1..19: note = siRNA antisense sequence
  source 1..19: mol_type = other RNA
ttggattagggcagtcagt

SEQ ID NO: 19014 - RNA, 19 nt, synthetic construct
  misc_feature 1..19: note = siRNA sense sequence
  source 1..19: mol_type = other RNA
ctgactgccctaatccaac

SEQ ID NO: 19015 - RNA, 19 nt, synthetic construct
  misc_feature 1..19: note = siRNA antisense sequence
  source 1..19: mol_type = other RNA
gttggattagggcagtcag

SEQ ID NO: 19016 - RNA, 19 nt, synthetic construct
  misc_feature 1..19: note = siRNA sense sequence
  source 1..19: mol_type = other RNA
tatctcctactactcctat

SEQ ID NO: 19017 - RNA, 19 nt, synthetic construct
  misc_feature 1..19: note = siRNA antisense sequence
  source 1..19: mol_type = other RNA
ataggagtagtaggagata

SEQ ID NO: 19018 - RNA, 19 nt, synthetic construct
  misc_feature 1..19: note = siRNA sense sequence
  source 1..19: mol_type = other RNA
atctcctactactcctatg

SEQ ID NO: 19019 - RNA, 19 nt, synthetic construct
  misc_feature 1..19: note = siRNA antisense sequence
  source 1..19: mol_type = other RNA
cataggagtagtaggagat

SEQ ID NO: 19020 - RNA, 19 nt, synthetic construct
  misc_feature 1..19: note = siRNA sense sequence
  source 1..19: mol_type = other RNA
cctactactcctatgtcag

SEQ ID NO: 19021 - RNA, 19 nt, synthetic construct
  misc_feature 1..19: note = siRNA antisense sequence
  source 1..19: mol_type = other RNA
ctgacataggagtagtagg

SEQ ID NO: 19022 - RNA, 19 nt, synthetic construct
  misc_feature 1..19: note = siRNA sense sequence
  source 1..19: mol_type = other RNA
ctactactcctatgtcagt

SEQ ID NO: 19023 - RNA, 19 nt, synthetic construct
  misc_feature 1..19: note = siRNA antisense sequence
  source 1..19: mol_type = other RNA
actgacataggagtagtag

SEQ ID NO: 19024 - RNA, 19 nt, synthetic construct
  misc_feature 1..19: note = siRNA sense sequence
  source 1..19: mol_type = other RNA
tactactcctatgtcagtt

SEQ ID NO: 19025 - RNA, 19 nt, synthetic construct
  misc_feature 1..19: note = siRNA antisense sequence
  source 1..19: mol_type = other RNA
aactgacataggagtagta

SEQ ID NO: 19026 - RNA, 19 nt, synthetic construct
  misc_feature 1..19: note = siRNA sense sequence
  source 1..19: mol_type = other RNA
actactcctatgtcagttt

SEQ ID NO: 19027 - RNA, 19 nt, synthetic construct
  misc_feature 1..19: note = siRNA antisense sequence
  source 1..19: mol_type = other RNA
aaactgacataggagtagt

SEQ ID NO: 19028 - RNA, 19 nt, synthetic construct
  misc_feature 1..19: note = siRNA sense sequence
  source 1..19: mol_type = other RNA
ctactcctatgtcagtttc

SEQ ID NO: 19029 - RNA, 19 nt, synthetic construct
  misc_feature 1..19: note = siRNA antisense sequence
  source 1..19: mol_type = other RNA
gaaactgacataggagtag

SEQ ID NO: 19030 - RNA, 19 nt, synthetic construct
  misc_feature 1..19: note = siRNA sense sequence
  source 1..19: mol_type = other RNA
actcctatgtcagtttctt

SEQ ID NO: 19031 - RNA, 19 nt, synthetic construct
  misc_feature 1..19: note = siRNA antisense sequence
  source 1..19: mol_type = other RNA
aagaaactgacataggagt

SEQ ID NO: 19032 - RNA, 19 nt, synthetic construct
  misc_feature 1..19: note = siRNA sense sequence
  source 1..19: mol_type = other RNA
ctcctatgtcagtttctta

SEQ ID NO: 19033 - RNA, 19 nt, synthetic construct
  misc_feature 1..19: note = siRNA antisense sequence
  source 1..19: mol_type = other RNA
taagaaactgacataggag

SEQ ID NO: 19034 - RNA, 19 nt, synthetic construct
  misc_feature 1..19: note = siRNA sense sequence
  source 1..19: mol_type = other RNA
tcctatgtcagtttcttat

SEQ ID NO: 19035 - RNA, 19 nt, synthetic construct
  misc_feature 1..19: note = siRNA antisense sequence
  source 1..19: mol_type = other RNA
ataagaaactgacatagga

SEQ ID NO: 19036 - RNA, 19 nt, synthetic construct
  misc_feature 1..19: note = siRNA sense sequence
  source 1..19: mol_type = other RNA
ctatgtcagtttcttattg

SEQ ID NO: 19037 - RNA, 19 nt, synthetic construct
  misc_feature 1..19: note = siRNA antisense sequence
  source 1..19: mol_type = other RNA
caataagaaactgacatag

SEQ ID NO: 19038 - RNA, 19 nt, synthetic construct
  misc_feature 1..19: note = siRNA sense sequence
  source 1..19: mol_type = other RNA
tatgtcagtttcttattgc

SEQ ID NO: 19039 - RNA, 19 nt, synthetic construct
  misc_feature 1..19: note = siRNA antisense sequence
  source 1..19: mol_type = other RNA
gcaataagaaactgacata

SEQ ID NO: 19040 - RNA, 19 nt, synthetic construct
  misc_feature 1..19: note = siRNA sense sequence
  source 1..19: mol_type = other RNA
ctgtaggtcagaagtatca

SEQ ID NO: 19041 - RNA, 19 nt, synthetic construct
  misc_feature 1..19: note = siRNA antisense sequence
  source 1..19: mol_type = other RNA
tgatacttctgacctacag

SEQ ID NO: 19042 - RNA, 19 nt, synthetic construct
  misc_feature 1..19: note = siRNA sense sequence
  source 1..19: mol_type = other RNA
tgtaggtcagaagtatcac

SEQ ID NO: 19043 - RNA, 19 nt, synthetic construct
  misc_feature 1..19: note = siRNA antisense sequence
  source 1..19: mol_type = other RNA
gtgatacttctgacctaca

SEQ ID NO: 19044 - RNA, 19 nt, synthetic construct
  misc_feature 1..19: note = siRNA sense sequence
  source 1..19: mol_type = other RNA
gtaggtcagaagtatcact

SEQ ID NO: 19045 - RNA, 19 nt, synthetic construct
  misc_feature 1..19: note = siRNA antisense sequence
  source 1..19: mol_type = other RNA
agtgatacttctgacctac

SEQ ID NO: 19046 - RNA, 19 nt, synthetic construct
  misc_feature 1..19: note = siRNA sense sequence
  source 1..19: mol_type = other RNA
taggtcagaagtatcactg

SEQ ID NO: 19047 - RNA, 19 nt, synthetic construct
  misc_feature 1..19: note = siRNA antisense sequence
  source 1..19: mol_type = other RNA
cagtgatacttctgaccta

SEQ ID NO: 19048 - RNA, 19 nt, synthetic construct
  misc_feature 1..19: note = siRNA sense sequence
  source 1..19: mol_type = other RNA
tcagaagtatcactgggct

SEQ ID NO: 19049 - RNA, 19 nt, synthetic construct
  misc_feature 1..19: note = siRNA antisense sequence
  source 1..19: mol_type = other RNA
agcccagtgatacttctga

SEQ ID NO: 19050 - RNA, 19 nt, synthetic construct
  misc_feature 1..19: note = siRNA sense sequence
  source 1..19: mol_type = other RNA
cagaagtatcactgggcta

SEQ ID NO: 19051 - RNA, 19 nt, synthetic construct
  misc_feature 1..19: note = siRNA antisense sequence
  source 1..19: mol_type = other RNA
tagcccagtgatacttctg

SEQ ID NO: 19052 - RNA, 19 nt, synthetic construct
  misc_feature 1..19: note = siRNA sense sequence
  source 1..19: mol_type = other RNA
agaagtatcactgggctag

SEQ ID NO: 19053 - RNA, 19 nt, synthetic construct
  misc_feature 1..19: note = siRNA antisense sequence
  source 1..19: mol_type = other RNA
ctagcccagtgatacttct

SEQ ID NO: 19054 - RNA, 19 nt, synthetic construct
  misc_feature 1..19: note = siRNA sense sequence
  source 1..19: mol_type = other RNA
gtatcactgggctagaatc

SEQ ID NO: 19055 - RNA, 19 nt, synthetic construct
  misc_feature 1..19: note = siRNA antisense sequence
  source 1..19: mol_type = other RNA
gattctagcccagtgatac

SEQ ID NO: 19056 - RNA, 19 nt, synthetic construct
  misc_feature 1..19: note = siRNA sense sequence
  source 1..19: mol_type = other RNA
tatcactgggctagaatca

SEQ ID NO: 19057 - RNA, 19 nt, synthetic construct
  misc_feature 1..19: note = siRNA antisense sequence
  source 1..19: mol_type = other RNA
tgattctagcccagtgata

SEQ ID NO: 19058 - RNA, 19 nt, synthetic construct
  misc_feature 1..19: note = siRNA sense sequence
  source 1..19: mol_type = other RNA
atcactgggctagaatcaa

SEQ ID NO: 19059 - RNA, 19 nt, synthetic construct
  misc_feature 1..19: note = siRNA antisense sequence
  source 1..19: mol_type = other RNA
ttgattctagcccagtgat

SEQ ID NO: 19060 - RNA, 19 nt, synthetic construct
  misc_feature 1..19: note = siRNA sense sequence
  source 1..19: mol_type = other RNA
ctgggctagaatcaagatg

SEQ ID NO: 19061 - RNA, 19 nt, synthetic construct
  misc_feature 1..19: note = siRNA antisense sequence
  source 1..19: mol_type = other RNA
catcttgattctagcccag

SEQ ID NO: 19062 - RNA, 19 nt, synthetic construct
  misc_feature 1..19: note = siRNA sense sequence
  source 1..19: mol_type = other RNA
tgggctagaatcaagatgt

SEQ ID NO: 19063 - RNA, 19 nt, synthetic construct
  misc_feature 1..19: note = siRNA antisense sequence
  source 1..19: mol_type = other RNA
acatcttgattctagccca

SEQ ID NO: 19064 - RNA, 19 nt, synthetic construct
  misc_feature 1..19: note = siRNA sense sequence
  source 1..19: mol_type = other RNA
gggctagaatcaagatgtc

SEQ ID NO: 19065 - RNA, 19 nt, synthetic construct
  misc_feature 1..19: note = siRNA antisense sequence
  source 1..19: mol_type = other RNA
gacatcttgattctagccc

SEQ ID NO: 19066 - RNA, 19 nt, synthetic construct
  misc_feature 1..19: note = siRNA sense sequence
  source 1..19: mol_type = other RNA
ggctagaatcaagatgtca

SEQ ID NO: 19067 - RNA, 19 nt, synthetic construct
  misc_feature 1..19: note = siRNA antisense sequence
  source 1..19: mol_type = other RNA
tgacatcttgattctagcc

SEQ ID NO: 19068 - RNA, 19 nt, synthetic construct
  misc_feature 1..19: note = siRNA sense sequence
  source 1..19: mol_type = other RNA
agaatcaagatgtcaccag

SEQ ID NO: 19069 - RNA, 19 nt, synthetic construct
  misc_feature 1..19: note = siRNA antisense sequence
  source 1..19: mol_type = other RNA
ctggtgacatcttgattct

SEQ ID NO: 19070 - RNA, 19 nt, synthetic construct
  misc_feature 1..19: note = siRNA sense sequence
  source 1..19: mol_type = other RNA
gaatcaagatgtcaccagg

SEQ ID NO: 19071 - RNA, 19 nt, synthetic construct
  misc_feature 1..19: note = siRNA antisense sequence
  source 1..19: mol_type = other RNA
cctggtgacatcttgattc

SEQ ID NO: 19072 - RNA, 19 nt, synthetic construct
  misc_feature 1..19: note = siRNA sense sequence
  source 1..19: mol_type = other RNA
gatgtcaccagggctgcat

SEQ ID NO: 19073 - RNA, 19 nt, synthetic construct
  misc_feature 1..19: note = siRNA antisense sequence
  source 1..19: mol_type = other RNA
atgcagccctggtgacatc

SEQ ID NO: 19074 - RNA, 19 nt, synthetic construct
  misc_feature 1..19: note = siRNA sense sequence
  source 1..19: mol_type = other RNA
aaaatcagtttccctgttt

SEQ ID NO: 19075 - RNA, 19 nt, synthetic construct
  misc_feature 1..19: note = siRNA antisense sequence
  source 1..19: mol_type = other RNA
aaacagggaaactgatttt

SEQ ID NO: 19076 - RNA, 19 nt, synthetic construct
  misc_feature 1..19: note = siRNA sense sequence
  source 1..19: mol_type = other RNA
aaatcagtttccctgtttt

SEQ ID NO: 19077 - RNA, 19 nt, synthetic construct
  misc_feature 1..19: note = siRNA antisense sequence
  source 1..19: mol_type = other RNA
aaaacagggaaactgattt

SEQ ID NO: 19078 - RNA, 19 nt, synthetic construct
  misc_feature 1..19: note = siRNA sense sequence
  source 1..19: mol_type = other RNA
aatcagtttccctgttttc

SEQ ID NO: 19079 - RNA, 19 nt, synthetic construct
  misc_feature 1..19: note = siRNA antisense sequence
  source 1..19: mol_type = other RNA
gaaaacagggaaactgatt

SEQ ID NO: 19080 - RNA, 19 nt, synthetic construct
  misc_feature 1..19: note = siRNA sense sequence
  source 1..19: mol_type = other RNA
atcagtttccctgttttca

SEQ ID NO: 19081 - RNA, 19 nt, synthetic construct
  misc_feature 1..19: note = siRNA antisense sequence
  source 1..19: mol_type = other RNA
tgaaaacagggaaactgat

SEQ ID NO: 19082 - RNA, 19 nt, synthetic construct
  misc_feature 1..19: note = siRNA sense sequence
  source 1..19: mol_type = other RNA
tcagtttccctgttttcac

SEQ ID NO: 19083 - RNA, 19 nt, synthetic construct
  misc_feature 1..19: note = siRNA antisense sequence
  source 1..19: mol_type = other RNA
gtgaaaacagggaaactga

SEQ ID NO: 19084 - RNA, 19 nt, synthetic construct
  misc_feature 1..19: note = siRNA sense sequence
  source 1..19: mol_type = other RNA
cagtttccctgttttcacc

SEQ ID NO: 19085 - RNA, 19 nt, synthetic construct
  misc_feature 1..19: note = siRNA antisense sequence
  source 1..19: mol_type = other RNA
ggtgaaaacagggaaactg

SEQ ID NO: 19086 - RNA, 19 nt, synthetic construct
  misc_feature 1..19: note = siRNA sense sequence
  source 1..19: mol_type = other RNA
gtttccctgttttcaccag

SEQ ID NO: 19087 - RNA, 19 nt, synthetic construct
  misc_feature 1..19: note = siRNA antisense sequence
  source 1..19: mol_type = other RNA
ctggtgaaaacagggaaac

SEQ ID NO: 19088 - RNA, 19 nt, synthetic construct
  misc_feature 1..19: note = siRNA sense sequence
  source 1..19: mol_type = other RNA
ctctggccaccacctgcat

SEQ ID NO: 19089 - RNA, 19 nt, synthetic construct
  misc_feature 1..19: note = siRNA antisense sequence
  source 1..19: mol_type = other RNA
atgcaggtggtggccagag

SEQ ID NO: 19090 - RNA, 19 nt, synthetic construct
  misc_feature 1..19: note = siRNA sense sequence
  source 1..19: mol_type = other RNA
tctggccaccacctgcatt

SEQ ID NO: 19091 - RNA, 19 nt, synthetic construct
  misc_feature 1..19: note = siRNA antisense sequence
  source 1..19: mol_type = other RNA
aatgcaggtggtggccaga

SEQ ID NO: 19092 - RNA, 19 nt, synthetic construct
  misc_feature 1..19: note = siRNA sense sequence
  source 1..19: mol_type = other RNA
ctggccaccacctgcattc

SEQ ID NO: 19093 - RNA, 19 nt, synthetic construct
  misc_feature 1..19: note = siRNA antisense sequence
  source 1..19: mol_type = other RNA
gaatgcaggtggtggccag

SEQ ID NO: 19094 - RNA, 19 nt, synthetic construct
  misc_feature 1..19: note = siRNA sense sequence
  source 1..19: mol_type = other RNA
tggccaccacctgcattct

SEQ ID NO: 19095 - RNA, 19 nt, synthetic construct
  misc_feature 1..19: note = siRNA antisense sequence
  source 1..19: mol_type = other RNA
agaatgcaggtggtggcca

SEQ ID NO: 19096 - RNA, 19 nt, synthetic construct
  misc_feature 1..19: note = siRNA sense sequence
  source 1..19: mol_type = other RNA
ggccaccacctgcattctt

SEQ ID NO: 19097 - RNA, 19 nt, synthetic construct
  misc_feature 1..19: note = siRNA antisense sequence
  source 1..19: mol_type = other RNA
aagaatgcaggtggtggcc

SEQ ID NO: 19098 - RNA, 19 nt, synthetic construct
  misc_feature 1..19: note = siRNA sense sequence
  source 1..19: mol_type = other RNA
gccaccacctgcattcttg

SEQ ID NO: 19099 - RNA, 19 nt, synthetic construct
  misc_feature 1..19: note = siRNA antisense sequence
  source 1..19: mol_type = other RNA
caagaatgcaggtggtggc

SEQ ID NO: 19100 - RNA, 19 nt, synthetic construct
  misc_feature 1..19: note = siRNA sense sequence
  source 1..19: mol_type = other RNA
ccaccacctgcattcttgg

SEQ ID NO: 19101 - RNA, 19 nt, synthetic construct
  misc_feature 1..19: note = siRNA antisense sequence
  source 1..19: mol_type = other RNA
ccaagaatgcaggtggtgg

SEQ ID NO: 19102 - RNA, 19 nt, synthetic construct
  misc_feature 1..19: note = siRNA sense sequence
  source 1..19: mol_type = other RNA
ccacctgcattcttggcct

SEQ ID NO: 19103 - RNA, 19 nt, synthetic construct
  misc_feature 1..19: note = siRNA antisense sequence
  source 1..19: mol_type = other RNA
aggccaagaatgcaggtgg

SEQ ID NO: 19104 - RNA, 19 nt, synthetic construct
  misc_feature 1..19: note = siRNA sense sequence
  source 1..19: mol_type = other RNA
cacctgcattcttggcctg

SEQ ID NO: 19105 - RNA, 19 nt, synthetic construct
  misc_feature 1..19: note = siRNA antisense sequence
  source 1..19: mol_type = other RNA
caggccaagaatgcaggtg

SEQ ID NO: 19106 - RNA, 19 nt, synthetic construct
  misc_feature 1..19: note = siRNA sense sequence
  source 1..19: mol_type = other RNA
acctgcattcttggcctgt

SEQ ID NO: 19107 - RNA, 19 nt, synthetic construct
  misc_feature 1..19: note = siRNA antisense sequence
  source 1..19: mol_type = other RNA
acaggccaagaatgcaggt

SEQ ID NO: 19108 - RNA, 19 nt, synthetic construct
  misc_feature 1..19: note = siRNA sense sequence
  source 1..19: mol_type = other RNA
tgcattcttggcctgtggc

SEQ ID NO: 19109 - RNA, 19 nt, synthetic construct
  misc_feature 1..19: note = siRNA antisense sequence
  source 1..19: mol_type = other RNA
gccacaggccaagaatgca

SEQ ID NO: 19110 - RNA, 19 nt, synthetic construct
  misc_feature 1..19: note = siRNA sense sequence
  source 1..19: mol_type = other RNA
agggtagaatcttcagatc

SEQ ID NO: 19111 - RNA, 19 nt, synthetic construct
  misc_feature 1..19: note = siRNA antisense sequence
  source 1..19: mol_type = other RNA
gatctgaagattctaccct

SEQ ID NO: 19112 - RNA, 19 nt, synthetic construct
  misc_feature 1..19: note = siRNA sense sequence
  source 1..19: mol_type = other RNA
gggtagaatcttcagatct

SEQ ID NO: 19113 - RNA, 19 nt, synthetic construct
  misc_feature 1..19: note = siRNA antisense sequence
  source 1..19: mol_type = other RNA
agatctgaagattctaccc

SEQ ID NO: 19114 - RNA, 19 nt, synthetic construct
  misc_feature 1..19: note = siRNA sense sequence
  source 1..19: mol_type = other RNA
ggtagaatcttcagatctt

SEQ ID NO: 19115 - RNA, 19 nt, synthetic construct
  misc_feature 1..19: note = siRNA antisense sequence
  source 1..19: mol_type = other RNA
aagatctgaagattctacc

SEQ ID NO: 19116 - RNA, 19 nt, synthetic construct
  misc_feature 1..19: note = siRNA sense sequence
  source 1..19: mol_type = other RNA
gtagaatcttcagatcttc

SEQ ID NO: 19117 - RNA, 19 nt, synthetic construct
  misc_feature 1..19: note = siRNA antisense sequence
  source 1..19: mol_type = other RNA
gaagatctgaagattctac

SEQ ID NO: 19118 - RNA, 19 nt, synthetic construct
  misc_feature 1..19: note = siRNA sense sequence
  source 1..19: mol_type = other RNA
tgactctgctttatcatca

SEQ ID NO: 19119 - RNA, 19 nt, synthetic construct
  misc_feature 1..19: note = siRNA antisense sequence
  source 1..19: mol_type = other RNA
tgatgataaagcagagtca

SEQ ID NO: 19120 - RNA, 19 nt, synthetic construct
  misc_feature 1..19: note = siRNA sense sequence
  source 1..19: mol_type = other RNA
gactctgctttatcatcac

SEQ ID NO: 19121 - RNA, 19 nt, synthetic construct
  misc_feature 1..19: note = siRNA antisense sequence
  source 1..19: mol_type = other RNA
gtgatgataaagcagagtc

SEQ ID NO: 19122 - RNA, 19 nt, synthetic construct
  misc_feature 1..19: note = siRNA sense sequence
  source 1..19: mol_type = other RNA
actctgctttatcatcaca

SEQ ID NO: 19123 - RNA, 19 nt, synthetic construct
  misc_feature 1..19: note = siRNA antisense sequence
  source 1..19: mol_type = other RNA
tgtgatgataaagcagagt

SEQ ID NO: 19124 - RNA, 19 nt, synthetic construct
  misc_feature 1..19: note = siRNA sense sequence
  source 1..19: mol_type = other RNA
ctctgctttatcatcacat

SEQ ID NO: 19125 - RNA, 19 nt, synthetic construct
  misc_feature 1..19: note = siRNA antisense sequence
  source 1..19: mol_type = other RNA
atgtgatgataaagcagag

SEQ ID NO: 19126 - RNA, 19 nt, synthetic construct
  misc_feature 1..19: note = siRNA sense sequence
  source 1..19: mol_type = other RNA
tctgctttatcatcacatc

SEQ ID NO: 19127 - RNA, 19 nt, synthetic construct
  misc_feature 1..19: note = siRNA antisense sequence
  source 1..19: mol_type = other RNA
gatgtgatgataaagcaga

SEQ ID NO: 19128 - RNA, 19 nt, synthetic construct
  misc_feature 1..19: note = siRNA sense sequence
  source 1..19: mol_type = other RNA
ctgctttatcatcacatct

SEQ ID NO: 19129 - RNA, 19 nt, synthetic construct
  misc_feature 1..19: note = siRNA antisense sequence
  source 1..19: mol_type = other RNA
agatgtgatgataaagcag

SEQ ID NO: 19130 - RNA, 19 nt, synthetic construct
  misc_feature 1..19: note = siRNA sense sequence
  source 1..19: mol_type = other RNA
tcacatctccttctcagac

SEQ ID NO: 19131 - RNA, 19 nt, synthetic construct
  misc_feature 1..19: note = siRNA antisense sequence
  source 1..19: mol_type = other RNA
gtctgagaaggagatgtga

SEQ ID NO: 19132 - RNA, 19 nt, synthetic construct
  misc_feature 1..19: note = siRNA sense sequence
  source 1..19: mol_type = other RNA
cagactctgaccctactac

SEQ ID NO: 19133 - RNA, 19 nt, synthetic construct
  misc_feature 1..19: note = siRNA antisense sequence
  source 1..19: mol_type = other RNA
gtagtagggtcagagtctg

SEQ ID NO: 19134 - RNA, 19 nt, synthetic construct
  misc_feature 1..19: note = siRNA sense sequence
  source 1..19: mol_type = other RNA
agactctgaccctactacc

SEQ ID NO: 19135 - RNA, 19 nt, synthetic construct
  misc_feature 1..19: note = siRNA antisense sequence
  source 1..19: mol_type = other RNA
ggtagtagggtcagagtct

SEQ ID NO: 19136 - RNA, 19 nt, synthetic construct
  misc_feature 1..19: note = siRNA sense sequence
  source 1..19: mol_type = other RNA
tgaccctactaccttccta

SEQ ID NO: 19137 - RNA, 19 nt, synthetic construct
  misc_feature 1..19: note = siRNA antisense sequence
  source 1..19: mol_type = other RNA
taggaaggtagtagggtca

SEQ ID NO: 19138 - RNA, 19 nt, synthetic construct
  misc_feature 1..19: note = siRNA sense sequence
  source 1..19: mol_type = other RNA
gaccctactaccttcctaa

SEQ ID NO: 19139 - RNA, 19 nt, synthetic construct
  misc_feature 1..19: note = siRNA antisense sequence
  source 1..19: mol_type = other RNA
ttaggaaggtagtagggtc

SEQ ID NO: 19140 - RNA, 19 nt, synthetic construct
  misc_feature 1..19: note = siRNA sense sequence
  source 1..19: mol_type = other RNA
accctactaccttcctaag

SEQ ID NO: 19141 - RNA, 19 nt, synthetic construct
  misc_feature 1..19: note = siRNA antisense sequence
  source 1..19: mol_type = other RNA
cttaggaaggtagtagggt

SEQ ID NO: 19142 - RNA, 19 nt, synthetic construct
  misc_feature 1..19: note = siRNA sense sequence
  source 1..19: mol_type = other RNA
cttcctaaggatccttgta

SEQ ID NO: 19143 - RNA, 19 nt, synthetic construct
  misc_feature 1..19: note = siRNA antisense sequence
  source 1..19: mol_type = other RNA
tacaaggatccttaggaag

SEQ ID NO: 19144 - RNA, 19 nt, synthetic construct
  misc_feature 1..19: note = siRNA sense sequence
  source 1..19: mol_type = other RNA
ttcctaaggatccttgtaa

SEQ ID NO: 19145 - RNA, 19 nt, synthetic construct
  misc_feature 1..19: note = siRNA antisense sequence
  source 1..19: mol_type = other RNA
ttacaaggatccttaggaa

SEQ ID NO: 19146 - RNA, 19 nt, synthetic construct
  misc_feature 1..19: note = siRNA sense sequence
  source 1..19: mol_type = other RNA
tcctaaggatccttgtaat

SEQ ID NO: 19147 - RNA, 19 nt, synthetic construct
  misc_feature 1..19: note = siRNA antisense sequence
  source 1..19: mol_type = other RNA
attacaaggatccttagga

SEQ ID NO: 19148 - RNA, 19 nt, synthetic construct
  misc_feature 1..19: note = siRNA sense sequence
  source 1..19: mol_type = other RNA
tgcctaccagaataatctc

SEQ ID NO: 19149 - RNA, 19 nt, synthetic construct
  misc_feature 1..19: note = siRNA antisense sequence
  source 1..19: mol_type = other RNA
gagattattctggtaggca

SEQ ID NO: 19150 - RNA, 19 nt, synthetic construct
  misc_feature 1..19: note = siRNA sense sequence
  source 1..19: mol_type = other RNA
gcctaccagaataatctcc

SEQ ID NO: 19151 - RNA, 19 nt, synthetic construct
  misc_feature 1..19: note = siRNA antisense sequence
  source 1..19: mol_type = other RNA
ggagattattctggtaggc

SEQ ID NO: 19152 - RNA, 19 nt, synthetic construct
  misc_feature 1..19: note = siRNA sense sequence
  source 1..19: mol_type = other RNA
cctaccagaataatctcct

SEQ ID NO: 19153 - RNA, 19 nt, synthetic construct
  misc_feature 1..19: note = siRNA antisense sequence
  source 1..19: mol_type = other RNA
aggagattattctggtagg

SEQ ID NO: 19154 - RNA, 19 nt, synthetic construct
  misc_feature 1..19: note = siRNA sense sequence
  source 1..19: mol_type = other RNA
ctaccagaataatctcctc

SEQ ID NO: 19155 - RNA, 19 nt, synthetic construct
  misc_feature 1..19: note = siRNA antisense sequence
  source 1..19: mol_type = other RNA
gaggagattattctggtag

SEQ ID NO: 19156 - RNA, 19 nt, synthetic construct
  misc_feature 1..19: note = siRNA sense sequence
  source 1..19: mol_type = other RNA
aattacatcttccaagtcc

SEQ ID NO: 19157 - RNA, 19 nt, synthetic construct
  misc_feature 1..19: note = siRNA antisense sequence
  source 1..19: mol_type = other RNA
ggacttggaagatgtaatt

SEQ ID NO: 19158 - RNA, 19 nt, synthetic construct
  misc_feature 1..19: note = siRNA sense sequence
  source 1..19: mol_type = other RNA
ttacatcttccaagtccct

SEQ ID NO: 19159 - RNA, 19 nt, synthetic construct
  misc_feature 1..19: note = siRNA antisense sequence
  source 1..19: mol_type = other RNA
agggacttggaagatgtaa

SEQ ID NO: 19160 - RNA, 19 nt, synthetic construct
  misc_feature 1..19: note = siRNA sense sequence
  source 1..19: mol_type = other RNA
tacatcttccaagtccctt

SEQ ID NO: 19161 - RNA, 19 nt, synthetic construct
  misc_feature 1..19: note = siRNA antisense sequence
  source 1..19: mol_type = other RNA
aagggacttggaagatgta

SEQ ID NO: 19162 - RNA, 19 nt, synthetic construct
  misc_feature 1..19: note = siRNA sense sequence
  source 1..19: mol_type = other RNA
atcttccaagtccctttta

SEQ ID NO: 19163 - RNA, 19 nt, synthetic construct
  misc_feature 1..19: note = siRNA antisense sequence
  source 1..19: mol_type = other RNA
taaaagggacttggaagat

SEQ ID NO: 19164 - RNA, 19 nt, synthetic construct
  misc_feature 1..19: note = siRNA sense sequence
  source 1..19: mol_type = other RNA
tcttccaagtcccttttac

SEQ ID NO: 19165 - RNA, 19 nt, synthetic construct
  misc_feature 1..19: note = siRNA antisense sequence
  source 1..19: mol_type = other RNA
gtaaaagggacttggaaga

SEQ ID NO: 19166 - RNA, 19 nt, synthetic construct
  misc_feature 1..19: note = siRNA sense sequence
  source 1..19: mol_type = other RNA
cttccaagtcccttttacc

SEQ ID NO: 19167 - RNA, 19 nt, synthetic construct
  misc_feature 1..19: note = siRNA antisense sequence
  source 1..19: mol_type = other RNA
ggtaaaagggacttggaag

SEQ ID NO: 19168 - RNA, 19 nt, synthetic construct
  misc_feature 1..19: note = siRNA sense sequence
  source 1..19: mol_type = other RNA
tcccttttaccatctaaga

SEQ ID NO: 19169 - RNA, 19 nt, synthetic construct
  misc_feature 1..19: note = siRNA antisense sequence
  source 1..19: mol_type = other RNA
tcttagatggtaaaaggga

SEQ ID NO: 19170 - RNA, 19 nt, synthetic construct
  misc_feature 1..19: note = siRNA sense sequence
  source 1..19: mol_type = other RNA
tccaggcattaggtcatgg

SEQ ID NO: 19171 - RNA, 19 nt, synthetic construct
  misc_feature 1..19: note = siRNA antisense sequence
  source 1..19: mol_type = other RNA
ccatgacctaatgcctgga

SEQ ID NO: 19172 - RNA, 19 nt, synthetic construct
  misc_feature 1..19: note = siRNA sense sequence
  source 1..19: mol_type = other RNA
ccaggcattaggtcatgga

SEQ ID NO: 19173 - RNA, 19 nt, synthetic construct
  misc_feature 1..19: note = siRNA antisense sequence
  source 1..19: mol_type = other RNA
tccatgacctaatgcctgg

SEQ ID NO: 19174 - RNA, 19 nt, synthetic construct
  misc_feature 1..19: note = siRNA sense sequence
  source 1..19: mol_type = other RNA
caggcattaggtcatggat

SEQ ID NO: 19175 - RNA, 19 nt, synthetic construct
  misc_feature 1..19: note = siRNA antisense sequence
  source 1..19: mol_type = other RNA
atccatgacctaatgcctg

SEQ ID NO: 19176 - RNA, 19 nt, synthetic construct
  misc_feature 1..19: note = siRNA sense sequence
  source 1..19: mol_type = other RNA
aggcattaggtcatggata

SEQ ID NO: 19177 - RNA, 19 nt, synthetic construct
  misc_feature 1..19: note = siRNA antisense sequence
  source 1..19: mol_type = other RNA
tatccatgacctaatgcct

SEQ ID NO: 19178 - RNA, 19 nt, synthetic construct
  misc_feature 1..19: note = siRNA sense sequence
  source 1..19: mol_type = other RNA
ggcattaggtcatggatat

SEQ ID NO: 19179 - RNA, 19 nt, synthetic construct
  misc_feature 1..19: note = siRNA antisense sequence
  source 1..19: mol_type = other RNA
atatccatgacctaatgcc

SEQ ID NO: 19180 - RNA, 19 nt, synthetic construct
  misc_feature 1..19: note = siRNA sense sequence
  source 1..19: mol_type = other RNA
ttaggtcatggatatcttt

SEQ ID NO: 19181 - RNA, 19 nt, synthetic construct
  misc_feature 1..19: note = siRNA antisense sequence
  source 1..19: mol_type = other RNA
aaagatatccatgacctaa

SEQ ID NO: 19182 - RNA, 19 nt, synthetic construct
  misc_feature 1..19: note = siRNA sense sequence
  source 1..19: mol_type = other RNA
gtcatggatatctttggga

SEQ ID NO: 19183 - RNA, 19 nt, synthetic construct
  misc_feature 1..19: note = siRNA antisense sequence
  source 1..19: mol_type = other RNA
tcccaaagatatccatgac

SEQ ID NO: 19184 - RNA, 19 nt, synthetic construct
  misc_feature 1..19: note = siRNA sense sequence
  source 1..19: mol_type = other RNA
aactgtccattatagccaa

SEQ ID NO: 19185 - RNA, 19 nt, synthetic construct
  misc_feature 1..19: note = siRNA antisense sequence
  source 1..19: mol_type = other RNA
ttggctataatggacagtt

SEQ ID NO: 19186 - RNA, 19 nt, synthetic construct
  misc_feature 1..19: note = siRNA sense sequence
  source 1..19: mol_type = other RNA
actgtccattatagccaat

SEQ ID NO: 19187 - RNA, 19 nt, synthetic construct
  misc_feature 1..19: note = siRNA antisense sequence
  source 1..19: mol_type = other RNA
attggctataatggacagt

SEQ ID NO: 19188 - RNA, 19 nt, synthetic construct
  misc_feature 1..19: note = siRNA sense sequence
  source 1..19: mol_type = other RNA
ctgtccattatagccaatc

SEQ ID NO: 19189 - RNA, 19 nt, synthetic construct
  misc_feature 1..19: note = siRNA antisense sequence
  source 1..19: mol_type = other RNA
gattggctataatggacag

SEQ ID NO: 19190 - RNA, 19 nt, synthetic construct
  misc_feature 1..19: note = siRNA sense sequence
  source 1..19: mol_type = other RNA
tgtccattatagccaatca

SEQ ID NO: 19191 - RNA, 19 nt, synthetic construct
  misc_feature 1..19: note = siRNA antisense sequence
  source 1..19: mol_type = other RNA
tgattggctataatggaca

SEQ ID NO: 19192 - RNA, 19 nt, synthetic construct
  misc_feature 1..19: note = siRNA sense sequence
  source 1..19: mol_type = other RNA
gtccattatagccaatcac

SEQ ID NO: 19193 - RNA, 19 nt, synthetic construct
  misc_feature 1..19: note = siRNA antisense sequence
  source 1..19: mol_type = other RNA
gtgattggctataatggac

SEQ ID NO: 19194 - RNA, 19 nt, synthetic construct
  misc_feature 1..19: note = siRNA sense sequence
  source 1..19: mol_type = other RNA
tccattatagccaatcact

SEQ ID NO: 19195 - RNA, 19 nt, synthetic construct
  misc_feature 1..19: note = siRNA antisense sequence
  source 1..19: mol_type = other RNA
agtgattggctataatgga

SEQ ID NO: 19196 - RNA, 19 nt, synthetic construct
  misc_feature 1..19: note = siRNA sense sequence
  source 1..19: mol_type = other RNA
ccattatagccaatcactt

SEQ ID NO: 19197 - RNA, 19 nt, synthetic construct
  misc_feature 1..19: note = siRNA antisense sequence
  source 1..19: mol_type = other RNA
aagtgattggctataatgg

SEQ ID NO: 19198 - RNA, 19 nt, synthetic construct
  misc_feature 1..19: note = siRNA sense sequence
  source 1..19: mol_type = other RNA
tatagccaatcacttttct

SEQ ID NO: 19199 - RNA, 19 nt, synthetic construct
  misc_feature 1..19: note = siRNA antisense sequence
  source 1..19: mol_type = other RNA
agaaaagtgattggctata

SEQ ID NO: 19200 - RNA, 19 nt, synthetic construct
  misc_feature 1..19: note = siRNA sense sequence
  source 1..19: mol_type = other RNA
atagccaatcacttttctt

SEQ ID NO: 19201 - RNA, 19 nt, synthetic construct
  misc_feature 1..19: note = siRNA antisense sequence
  source 1..19: mol_type = other RNA
aagaaaagtgattggctat

SEQ ID NO: 19202 - RNA, 19 nt, synthetic construct
  misc_feature 1..19: note = siRNA sense sequence
  source 1..19: mol_type = other RNA
ccaatcacttttctttact

SEQ ID NO: 19203 - RNA, 19 nt, synthetic construct
  misc_feature 1..19: note = siRNA antisense sequence
  source 1..19: mol_type = other RNA
agtaaagaaaagtgattgg

SEQ ID NO: 19204 - RNA, 19 nt, synthetic construct
  misc_feature 1..19: note = siRNA sense sequence
  source 1..19: mol_type = other RNA
ctttactttctccataatc

SEQ ID NO: 19205 - RNA, 19 nt, synthetic construct
  misc_feature 1..19: note = siRNA antisense sequence
  source 1..19: mol_type = other RNA
gattatggagaaagtaaag

SEQ ID NO: 19206 - RNA, 19 nt, synthetic construct
  misc_feature 1..19: note = siRNA sense sequence
  source 1..19: mol_type = other RNA
tttactttctccataatcc

SEQ ID NO: 19207 - RNA, 19 nt, synthetic construct
  misc_feature 1..19: note = siRNA antisense sequence
  source 1..19: mol_type = other RNA
ggattatggagaaagtaaa

SEQ ID NO: 19208 - RNA, 19 nt, synthetic construct
  misc_feature 1..19: note = siRNA sense sequence
  source 1..19: mol_type = other RNA
ttactttctccataatcct

SEQ ID NO: 19209 - RNA, 19 nt, synthetic construct
  misc_feature 1..19: note = siRNA antisense sequence
  source 1..19: mol_type = other RNA
aggattatggagaaagtaa

SEQ ID NO: 19210 - RNA, 19 nt, synthetic construct
  misc_feature 1..19: note = siRNA sense sequence
  source 1..19: mol_type = other RNA
ctccataatcctcatgttc

SEQ ID NO: 19211 - RNA, 19 nt, synthetic construct
  misc_feature 1..19: note = siRNA antisense sequence
  source 1..19: mol_type = other RNA
gaacatgaggattatggag

SEQ ID NO: 19212 - RNA, 19 nt, synthetic construct
  misc_feature 1..19: note = siRNA sense sequence
  source 1..19: mol_type = other RNA
aatcctcatgttcattttg

SEQ ID NO: 19213 - RNA, 19 nt, synthetic construct
  misc_feature 1..19: note = siRNA antisense sequence
  source 1..19: mol_type = other RNA
caaaatgaacatgaggatt

SEQ ID NO: 19214 - RNA, 19 nt, synthetic construct
  misc_feature 1..19: note = siRNA sense sequence
  source 1..19: mol_type = other RNA
atcctcatgttcattttgc

SEQ ID NO: 19215 - RNA, 19 nt, synthetic construct
  misc_feature 1..19: note = siRNA antisense sequence
  source 1..19: mol_type = other RNA
gcaaaatgaacatgaggat

SEQ ID NO: 19216 - RNA, 19 nt, synthetic construct
  misc_feature 1..19: note = siRNA sense sequence
  source 1..19: mol_type = other RNA
tcctcatgttcattttgcc

SEQ ID NO: 19217 - RNA, 19 nt, synthetic construct
  misc_feature 1..19: note = siRNA antisense sequence
  source 1..19: mol_type = other RNA
ggcaaaatgaacatgagga

SEQ ID NO: 19218 - RNA, 19 nt, synthetic construct
  misc_feature 1..19: note = siRNA sense sequence
  source 1..19: mol_type = other RNA
cctcatgttcattttgcca

SEQ ID NO: 19219 - RNA, 19 nt, synthetic construct
  misc_feature 1..19: note = siRNA antisense sequence
  source 1..19: mol_type = other RNA
tggcaaaatgaacatgagg

SEQ ID NO: 19220 - RNA, 19 nt, synthetic construct
  misc_feature 1..19: note = siRNA sense sequence
  source 1..19: mol_type = other RNA
ctcatgttcattttgccac

SEQ ID NO: 19221 - RNA, 19 nt, synthetic construct
  misc_feature 1..19: note = siRNA antisense sequence
  source 1..19: mol_type = other RNA
gtggcaaaatgaacatgag

SEQ ID NO: 19222 - RNA, 19 nt, synthetic construct
  misc_feature 1..19: note = siRNA sense sequence
  source 1..19: mol_type = other RNA
attttgccactgaagatat

SEQ ID NO: 19223 - RNA, 19 nt, synthetic construct
  misc_feature 1..19: note = siRNA antisense sequence
  source 1..19: mol_type = other RNA
atatcttcagtggcaaaat

SEQ ID NO: 19224 - RNA, 19 nt, synthetic construct
  misc_feature 1..19: note = siRNA sense sequence
  source 1..19: mol_type = other RNA
ttttgccactgaagatatg

SEQ ID NO: 19225 - RNA, 19 nt, synthetic construct
  misc_feature 1..19: note = siRNA antisense sequence
  source 1..19: mol_type = other RNA
catatcttcagtggcaaaa

SEQ ID NO: 19226 - RNA, 19 nt, synthetic construct
  misc_feature 1..19: note = siRNA sense sequence
  source 1..19: mol_type = other RNA
tttgccactgaagatatga

SEQ ID NO: 19227 - RNA, 19 nt, synthetic construct
  misc_feature 1..19: note = siRNA antisense sequence
  source 1..19: mol_type = other RNA
tcatatcttcagtggcaaa

SEQ ID NO: 19228 - RNA, 19 nt, synthetic construct
  misc_feature 1..19: note = siRNA sense sequence
  source 1..19: mol_type = other RNA
ttgccactgaagatatgac

SEQ ID NO: 19229 - RNA, 19 nt, synthetic construct
  misc_feature 1..19: note = siRNA antisense sequence
  source 1..19: mol_type = other RNA
gtcatatcttcagtggcaa

SEQ ID NO: 19230 - RNA, 19 nt, synthetic construct
  misc_feature 1..19: note = siRNA sense sequence
  source 1..19: mol_type = other RNA
tgccactgaagatatgacc

SEQ ID NO: 19231 - RNA, 19 nt, synthetic construct
  misc_feature 1..19: note = siRNA antisense sequence
  source 1..19: mol_type = other RNA
ggtcatatcttcagtggca

SEQ ID NO: 19232 - RNA, 19 nt, synthetic construct
  misc_feature 1..19: note = siRNA sense sequence
  source 1..19: mol_type = other RNA
agaattccacctttccatc

SEQ ID NO: 19233 - RNA, 19 nt, synthetic construct
  misc_feature 1..19: note = siRNA antisense sequence
  source 1..19: mol_type = other RNA
gatggaaaggtggaattct

SEQ ID NO: 19234 - RNA, 19 nt, synthetic construct
  misc_feature 1..19: note = siRNA sense sequence
  source 1..19: mol_type = other RNA
gaattccacctttccatcc

SEQ ID NO: 19235 - RNA, 19 nt, synthetic construct
  misc_feature 1..19: note = siRNA antisense sequence
  source 1..19: mol_type = other RNA
ggatggaaaggtggaattc

SEQ ID NO: 19236 - RNA, 19 nt, synthetic construct
  misc_feature 1..19: note = siRNA sense sequence
  source 1..19: mol_type = other RNA
aattccacctttccatcct

SEQ ID NO: 19237 - RNA, 19 nt, synthetic construct
  misc_feature 1..19: note = siRNA antisense sequence
  source 1..19: mol_type = other RNA
aggatggaaaggtggaatt

SEQ ID NO: 19238 - RNA, 19 nt, synthetic construct
  misc_feature 1..19: note = siRNA sense sequence
  source 1..19: mol_type = other RNA
attccacctttccatccta

SEQ ID NO: 19239 - RNA, 19 nt, synthetic construct
  misc_feature 1..19: note = siRNA antisense sequence
  source 1..19: mol_type = other RNA
taggatggaaaggtggaat

SEQ ID NO: 19240 - RNA, 19 nt, synthetic construct
  misc_feature 1..19: note = siRNA sense sequence
  source 1..19: mol_type = other RNA
ttccacctttccatcctac

SEQ ID NO: 19241 - RNA, 19 nt, synthetic construct
  misc_feature 1..19: note = siRNA antisense sequence
  source 1..19: mol_type = other RNA
gtaggatggaaaggtggaa

SEQ ID NO: 19242 - RNA, 19 nt, synthetic construct
  misc_feature 1..19: note = siRNA sense sequence
  source 1..19: mol_type = other RNA
tccacctttccatcctacc

SEQ ID NO: 19243 - RNA, 19 nt, synthetic construct
  misc_feature 1..19: note = siRNA antisense sequence
  source 1..19: mol_type = other RNA
ggtaggatggaaaggtgga

SEQ ID NO: 19244 - RNA, 19 nt, synthetic construct
  misc_feature 1..19: note = siRNA sense sequence
  source 1..19: mol_type = other RNA
ccacctttccatcctacca

SEQ ID NO: 19245 - RNA, 19 nt, synthetic construct
  misc_feature 1..19: note = siRNA antisense sequence
  source 1..19: mol_type = other RNA
tggtaggatggaaaggtgg

SEQ ID NO: 19246 - RNA, 19 nt, synthetic construct
  misc_feature 1..19: note = siRNA sense sequence
  source 1..19: mol_type = other RNA
tccatcctaccaccctctg

SEQ ID NO: 19247 - RNA, 19 nt, synthetic construct
  misc_feature 1..19: note = siRNA antisense sequence
  source 1..19: mol_type = other RNA
cagagggtggtaggatgga

SEQ ID NO: 19248 - RNA, 19 nt, synthetic construct
  misc_feature 1..19: note = siRNA sense sequence
  source 1..19: mol_type = other RNA
ccatcctaccaccctctga

SEQ ID NO: 19249 - RNA, 19 nt, synthetic construct
  misc_feature 1..19: note = siRNA antisense sequence
  source 1..19: mol_type = other RNA
tcagagggtggtaggatgg

SEQ ID NO: 19250 - RNA, 19 nt, synthetic construct
  misc_feature 1..19: note = siRNA sense sequence
  source 1..19: mol_type = other RNA
atcctaccaccctctgaca

SEQ ID NO: 19251 - RNA, 19 nt, synthetic construct
  misc_feature 1..19: note = siRNA antisense sequence
  source 1..19: mol_type = other RNA
tgtcagagggtggtaggat

SEQ ID NO: 19252 - RNA, 19 nt, synthetic construct
  misc_feature 1..19: note = siRNA sense sequence
  source 1..19: mol_type = other RNA
accaccctctgacatctaa

SEQ ID NO: 19253 - RNA, 19 nt, synthetic construct
  misc_feature 1..19: note = siRNA antisense sequence
  source 1..19: mol_type = other RNA
ttagatgtcagagggtggt

SEQ ID NO: 19254 - RNA, 19 nt, synthetic construct
  misc_feature 1..19: note = siRNA sense sequence
  source 1..19: mol_type = other RNA
ccaccctctgacatctaaa

SEQ ID NO: 19255 - RNA, 19 nt, synthetic construct
  misc_feature 1..19: note = siRNA antisense sequence
  source 1..19: mol_type = other RNA
tttagatgtcagagggtgg

SEQ ID NO: 19256 - RNA, 19 nt, synthetic construct
  misc_feature 1..19: note = siRNA sense sequence
  source 1..19: mol_type = other RNA
caccctctgacatctaaat

SEQ ID NO: 19257 - RNA, 19 nt, synthetic construct
  misc_feature 1..19: note = siRNA antisense sequence
  source 1..19: mol_type = other RNA
atttagatgtcagagggtg

SEQ ID NO: 19258 - RNA, 19 nt, synthetic construct
  misc_feature 1..19: note = siRNA sense sequence
  source 1..19: mol_type = other RNA
accctctgacatctaaata

SEQ ID NO: 19259 - RNA, 19 nt, synthetic construct
  misc_feature 1..19: note = siRNA antisense sequence
  source 1..19: mol_type = other RNA
tatttagatgtcagagggt

SEQ ID NO: 19260 - RNA, 19 nt, synthetic construct
  misc_feature 1..19: note = siRNA sense sequence
  source 1..19: mol_type = other RNA
ccctctgacatctaaataa

SEQ ID NO: 19261 - RNA, 19 nt, synthetic construct
  misc_feature 1..19: note = siRNA antisense sequence
  source 1..19: mol_type = other RNA
ttatttagatgtcagaggg

SEQ ID NO: 19262 - RNA, 19 nt, synthetic construct
  misc_feature 1..19: note = siRNA sense sequence
  source 1..19: mol_type = other RNA
cctctgacatctaaataaa

SEQ ID NO: 19263 - RNA, 19 nt, synthetic construct
  misc_feature 1..19: note = siRNA antisense sequence
  source 1..19: mol_type = other RNA
tttatttagatgtcagagg

SEQ ID NO: 19264 - RNA, 19 nt, synthetic construct
  misc_feature 1..19: note = siRNA sense sequence
  source 1..19: mol_type = other RNA
aactctctacagccttcca

SEQ ID NO: 19265 - RNA, 19 nt, synthetic construct
  misc_feature 1..19: note = siRNA antisense sequence
  source 1..19: mol_type = other RNA
tggaaggctgtagagagtt

SEQ ID NO: 19266 - RNA, 19 nt, synthetic construct
  misc_feature 1..19: note = siRNA sense sequence
  source 1..19: mol_type = other RNA
ctctctacagccttccaaa

SEQ ID NO: 19267 - RNA, 19 nt, synthetic construct
  misc_feature 1..19: note = siRNA antisense sequence
  source 1..19: mol_type = other RNA
tttggaaggctgtagagag

SEQ ID NO: 19268 - RNA, 19 nt, synthetic construct
  misc_feature 1..19: note = siRNA sense sequence
  source 1..19: mol_type = other RNA
agccaccagcatcccaata

SEQ ID NO: 19269 - RNA, 19 nt, synthetic construct
  misc_feature 1..19: note = siRNA antisense sequence
  source 1..19: mol_type = other RNA
tattgggatgctggtggct

SEQ ID NO: 19270 - RNA, 19 nt, synthetic construct
  misc_feature 1..19: note = siRNA sense sequence
  source 1..19: mol_type = other RNA
gccaccagcatcccaataa

SEQ ID NO: 19271 - RNA, 19 nt, synthetic construct
  misc_feature 1..19: note = siRNA antisense sequence
  source 1..19: mol_type = other RNA
ttattgggatgctggtggc

SEQ ID NO: 19272 - RNA, 19 nt, synthetic construct
  misc_feature 1..19: note = siRNA sense sequence
  source 1..19: mol_type = other RNA
ccaccagcatcccaataaa

SEQ ID NO: 19273 - RNA, 19 nt, synthetic construct
  misc_feature 1..19: note = siRNA antisense sequence
  source 1..19: mol_type = other RNA
tttattgggatgctggtgg

SEQ ID NO: 19274 - RNA, 19 nt, synthetic construct
  misc_feature 1..19: note = siRNA sense sequence
  source 1..19: mol_type = other RNA
tcttatattagctccttac

SEQ ID NO: 19275 - RNA, 19 nt, synthetic construct
  misc_feature 1..19: note = siRNA antisense sequence
  source 1..19: mol_type = other RNA
gtaaggagctaatataaga

SEQ ID NO: 19276 - RNA, 19 nt, synthetic construct
  misc_feature 1..19: note = siRNA sense sequence
  source 1..19: mol_type = other RNA
cttatattagctccttaca

SEQ ID NO: 19277 - RNA, 19 nt, synthetic construct
  misc_feature 1..19: note = siRNA antisense sequence
  source 1..19: mol_type = other RNA
tgtaaggagctaatataag

SEQ ID NO: 19278 - RNA, 19 nt, synthetic construct
  misc_feature 1..19: note = siRNA sense sequence
  source 1..19: mol_type = other RNA
aaaagatgtccttatgtcc

SEQ ID NO: 19279 - RNA, 19 nt, synthetic construct
  misc_feature 1..19: note = siRNA antisense sequence
  source 1..19: mol_type = other RNA
ggacataaggacatctttt

SEQ ID NO: 19280 - RNA, 19 nt, synthetic construct
  misc_feature 1..19: note = siRNA sense sequence
  source 1..19: mol_type = other RNA
aaagatgtccttatgtcca

SEQ ID NO: 19281 - RNA, 19 nt, synthetic construct
  misc_feature 1..19: note = siRNA antisense sequence
  source 1..19: mol_type = other RNA
tggacataaggacatcttt

SEQ ID NO: 19282 - RNA, 19 nt, synthetic construct
  misc_feature 1..19: note = siRNA sense sequence
  source 1..19: mol_type = other RNA
aagatgtccttatgtccaa

SEQ ID NO: 19283 - RNA, 19 nt, synthetic construct
  misc_feature 1..19: note = siRNA antisense sequence
  source 1..19: mol_type = other RNA
ttggacataaggacatctt

SEQ ID NO: 19284 - RNA, 19 nt, synthetic construct
  misc_feature 1..19: note = siRNA sense sequence
  source 1..19: mol_type = other RNA
agatgtccttatgtccaaa

SEQ ID NO: 19285 - RNA, 19 nt, synthetic construct
  misc_feature 1..19: note = siRNA antisense sequence
  source 1..19: mol_type = other RNA
tttggacataaggacatct

SEQ ID NO: 19286 - RNA, 19 nt, synthetic construct
  misc_feature 1..19: note = siRNA sense sequence
  source 1..19: mol_type = other RNA
cttatgtccaaaggattgt

SEQ ID NO: 19287 - RNA, 19 nt, synthetic construct
  misc_feature 1..19: note = siRNA antisense sequence
  source 1..19: mol_type = other RNA
acaatcctttggacataag

SEQ ID NO: 19288 - RNA, 19 nt, synthetic construct
  misc_feature 1..19: note = siRNA sense sequence
  source 1..19: mol_type = other RNA
ttatgtccaaaggattgtt

SEQ ID NO: 19289 - RNA, 19 nt, synthetic construct
  misc_feature 1..19: note = siRNA antisense sequence
  source 1..19: mol_type = other RNA
aacaatcctttggacataa

SEQ ID NO: 19290 - RNA, 19 nt, synthetic construct
  misc_feature 1..19: note = siRNA sense sequence
  source 1..19: mol_type = other RNA
tatgtccaaaggattgtta

SEQ ID NO: 19291 - RNA, 19 nt, synthetic construct
  misc_feature 1..19: note = siRNA antisense sequence
  source 1..19: mol_type = other RNA
taacaatcctttggacata

SEQ ID NO: 19292 - RNA, 19 nt, synthetic construct
  misc_feature 1..19: note = siRNA sense sequence
  source 1..19: mol_type = other RNA
atgtccaaaggattgttat

SEQ ID NO: 19293 - RNA, 19 nt, synthetic construct
  misc_feature 1..19: note = siRNA antisense sequence
  source 1..19: mol_type = other RNA
ataacaatcctttggacat

SEQ ID NO: 19294 - RNA, 19 nt, synthetic construct
  misc_feature 1..19: note = siRNA sense sequence
  source 1..19: mol_type = other RNA
tgtccaaaggattgttatt

SEQ ID NO: 19295 - RNA, 19 nt, synthetic construct
  misc_feature 1..19: note = siRNA antisense sequence
  source 1..19: mol_type = other RNA
aataacaatcctttggaca

SEQ ID NO: 19296 - RNA, 19 nt, synthetic construct
  misc_feature 1..19: note = siRNA sense sequence
  source 1..19: mol_type = other RNA
gtccaaaggattgttattt

SEQ ID NO: 19297 - RNA, 19 nt, synthetic construct
  misc_feature 1..19: note = siRNA antisense sequence
  source 1..19: mol_type = other RNA
aaataacaatcctttggac

SEQ ID NO: 19298 - RNA, 19 nt, synthetic construct
  misc_feature 1..19: note = siRNA sense sequence
  source 1..19: mol_type = other RNA
ttatgtatgtcaaagtctc

SEQ ID NO: 19299 - RNA, 19 nt, synthetic construct
  misc_feature 1..19: note = siRNA antisense sequence
  source 1..19: mol_type = other RNA
gagactttgacatacataa

SEQ ID NO: 19300 - RNA, 19 nt, synthetic construct
  misc_feature 1..19: note = siRNA sense sequence
  source 1..19: mol_type = other RNA
tatgtatgtcaaagtctca

SEQ ID NO: 19301 - RNA, 19 nt, synthetic construct
  misc_feature 1..19: note = siRNA antisense sequence
  source 1..19: mol_type = other RNA
tgagactttgacatacata

SEQ ID NO: 19302 - RNA, 19 nt, synthetic construct
  misc_feature 1..19: note = siRNA sense sequence
  source 1..19: mol_type = other RNA
atgtatgtcaaagtctcag

SEQ ID NO: 19303 - RNA, 19 nt, synthetic construct
  misc_feature 1..19: note = siRNA antisense sequence
  source 1..19: mol_type = other RNA
ctgagactttgacatacat

SEQ ID NO: 19304 - RNA, 19 nt, synthetic construct
  misc_feature 1..19: note = siRNA sense sequence
  source 1..19: mol_type = other RNA
tgtcaaagtctcagcataa

SEQ ID NO: 19305 - RNA, 19 nt, synthetic construct
  misc_feature 1..19: note = siRNA antisense sequence
  source 1..19: mol_type = other RNA
ttatgctgagactttgaca

SEQ ID NO: 19306 - RNA, 19 nt, synthetic construct
  misc_feature 1..19: note = siRNA sense sequence
  source 1..19: mol_type = other RNA
gtcaaagtctcagcataaa

SEQ ID NO: 19307 - RNA, 19 nt, synthetic construct
  misc_feature 1..19: note = siRNA antisense sequence
  source 1..19: mol_type = other RNA
tttatgctgagactttgac

SEQ ID NO: 19308 - RNA, 19 nt, synthetic construct
  misc_feature 1..19: note = siRNA sense sequence
  source 1..19: mol_type = other RNA
ctgatgtcacatataaagg

SEQ ID NO: 19309 - RNA, 19 nt, synthetic construct
  misc_feature 1..19: note = siRNA antisense sequence
  source 1..19: mol_type = other RNA
cctttatatgtgacatcag

SEQ ID NO: 19310 - RNA, 19 nt, synthetic construct
  misc_feature 1..19: note = siRNA sense sequence
  source 1..19: mol_type = other RNA
tgatgtcacatataaagga

SEQ ID NO: 19311 - RNA, 19 nt, synthetic construct
  misc_feature 1..19: note = siRNA antisense sequence
  source 1..19: mol_type = other RNA
tcctttatatgtgacatca

SEQ ID NO: 19312 - RNA, 19 nt, synthetic construct
  misc_feature 1..19: note = siRNA sense sequence
  source 1..19: mol_type = other RNA
aaaggatttaactgaagac

SEQ ID NO: 19313 - RNA, 19 nt, synthetic construct
  misc_feature 1..19: note = siRNA antisense sequence
  source 1..19: mol_type = other RNA
gtcttcagttaaatccttt

SEQ ID NO: 19314 - RNA, 19 nt, synthetic construct
  misc_feature 1..19: note = siRNA sense sequence
  source 1..19: mol_type = other RNA
aaggatttaactgaagaca

SEQ ID NO: 19315 - RNA, 19 nt, synthetic construct
  misc_feature 1..19: note = siRNA antisense sequence
  source 1..19: mol_type = other RNA
tgtcttcagttaaatcctt

SEQ ID NO: 19316 - RNA, 19 nt, synthetic construct
  misc_feature 1..19: note = siRNA sense sequence
  source 1..19: mol_type = other RNA
aggatttaactgaagacag

SEQ ID NO: 19317 - RNA, 19 nt, synthetic construct
  misc_feature 1..19: note = siRNA antisense sequence
  source 1..19: mol_type = other RNA
ctgtcttcagttaaatcct

SEQ ID NO: 19318 - RNA, 19 nt, synthetic construct
  misc_feature 1..19: note = siRNA sense sequence
  source 1..19: mol_type = other RNA
gaagacagtttcataaagt

SEQ ID NO: 19319 - RNA, 19 nt, synthetic construct
  misc_feature 1..19: note = siRNA antisense sequence
  source 1..19: mol_type = other RNA
actttatgaaactgtcttc

SEQ ID NO: 19320 - RNA, 19 nt, synthetic construct
  misc_feature 1..19: note = siRNA sense sequence
  source 1..19: mol_type = other RNA
agtttcataaagtgacagt

SEQ ID NO: 19321 - RNA, 19 nt, synthetic construct
  misc_feature 1..19: note = siRNA antisense sequence
  source 1..19: mol_type = other RNA
actgtcactttatgaaact

SEQ ID NO: 19322 - RNA, 19 nt, synthetic construct
  misc_feature 1..19: note = siRNA sense sequence
  source 1..19: mol_type = other RNA
aggaggtggcagtgttagt

SEQ ID NO: 19323 - RNA, 19 nt, synthetic construct
  misc_feature 1..19: note = siRNA antisense sequence
  source 1..19: mol_type = other RNA
actaacactgccacctcct

SEQ ID NO: 19324 - RNA, 19 nt, synthetic construct
  misc_feature 1..19: note = siRNA sense sequence
  source 1..19: mol_type = other RNA
ggaggtggcagtgttagtt

SEQ ID NO: 19325 - RNA, 19 nt, synthetic construct
  misc_feature 1..19: note = siRNA antisense sequence
  source 1..19: mol_type = other RNA
aactaacactgccacctcc

SEQ ID NO: 19326 - RNA, 19 nt, synthetic construct
  misc_feature 1..19: note = siRNA sense sequence
  source 1..19: mol_type = other RNA
gaggtggcagtgttagttt

SEQ ID NO: 19327 - RNA, 19 nt, synthetic construct
  misc_feature 1..19: note = siRNA antisense sequence
  source 1..19: mol_type = other RNA
aaactaacactgccacctc

SEQ ID NO: 19328 - RNA, 19 nt, synthetic construct
  misc_feature 1..19: note = siRNA sense sequence
  source 1..19: mol_type = other RNA
ggtggcagtgttagtttga

SEQ ID NO: 19329 - RNA, 19 nt, synthetic construct
  misc_feature 1..19: note = siRNA antisense sequence
  source 1..19: mol_type = other RNA
tcaaactaacactgccacc

SEQ ID NO: 19330 - RNA, 19 nt, synthetic construct
  misc_feature 1..19: note = siRNA sense sequence
  source 1..19: mol_type = other RNA
gtggcagtgttagtttgat

SEQ ID NO: 19331 - RNA, 19 nt, synthetic construct
  misc_feature 1..19: note = siRNA antisense sequence
  source 1..19: mol_type = other RNA
atcaaactaacactgccac

SEQ ID NO: 19332 - RNA, 19 nt, synthetic construct
  misc_feature 1..19: note = siRNA sense sequence
  source 1..19: mol_type = other RNA
tggcagtgttagtttgatt

SEQ ID NO: 19333 - RNA, 19 nt, synthetic construct
  misc_feature 1..19: note = siRNA antisense sequence
  source 1..19: mol_type = other RNA
aatcaaactaacactgcca

SEQ ID NO: 19334 - RNA, 19 nt, synthetic construct
  misc_feature 1..19: note = siRNA sense sequence
  source 1..19: mol_type = other RNA
cagtgttagtttgattatg

SEQ ID NO: 19335 - RNA, 19 nt, synthetic construct
  misc_feature 1..19: note = siRNA antisense sequence
  source 1..19: mol_type = other RNA
cataatcaaactaacactg

SEQ ID NO: 19336 - RNA, 19 nt, synthetic construct
  misc_feature 1..19: note = siRNA sense sequence
  source 1..19: mol_type = other RNA
actctagttatgggagggt

SEQ ID NO: 19337 - RNA, 19 nt, synthetic construct
  misc_feature 1..19: note = siRNA antisense sequence
  source 1..19: mol_type = other RNA
accctcccataactagagt

SEQ ID NO: 19338 - RNA, 19 nt, synthetic construct
  misc_feature 1..19: note = siRNA sense sequence
  source 1..19: mol_type = other RNA
tagttatgggagggtggcc

SEQ ID NO: 19339 - RNA, 19 nt, synthetic construct
  misc_feature 1..19: note = siRNA antisense sequence
  source 1..19: mol_type = other RNA
ggccaccctcccataacta

SEQ ID NO: 19340 - RNA, 19 nt, synthetic construct
  misc_feature 1..19: note = siRNA sense sequence
  source 1..19: mol_type = other RNA
agttatgggagggtggcca

SEQ ID NO: 19341 - RNA, 19 nt, synthetic construct
  misc_feature 1..19: note = siRNA antisense sequence
  source 1..19: mol_type = other RNA
tggccaccctcccataact

SEQ ID NO: 19342 - RNA, 19 nt, synthetic construct
  misc_feature 1..19: note = siRNA sense sequence
  source 1..19: mol_type = other RNA
tgggagggtggccattaga

SEQ ID NO: 19343 - RNA, 19 nt, synthetic construct
  misc_feature 1..19: note = siRNA antisense sequence
  source 1..19: mol_type = other RNA
tctaatggccaccctccca

SEQ ID NO: 19344 - RNA, 19 nt, synthetic construct
  misc_feature 1..19: note = siRNA sense sequence
  source 1..19: mol_type = other RNA
gggagggtggccattagac

SEQ ID NO: 19345 - RNA, 19 nt, synthetic construct
  misc_feature 1..19: note = siRNA antisense sequence
  source 1..19: mol_type = other RNA
gtctaatggccaccctccc

SEQ ID NO: 19346 - RNA, 19 nt, synthetic construct
  misc_feature 1..19: note = siRNA sense sequence
  source 1..19: mol_type = other RNA
ggagggtggccattagact

SEQ ID NO: 19347 - RNA, 19 nt, synthetic construct
  misc_feature 1..19: note = siRNA antisense sequence
  source 1..19: mol_type = other RNA
agtctaatggccaccctcc

SEQ ID NO: 19348 - RNA, 19 nt, synthetic construct
  misc_feature 1..19: note = siRNA sense sequence
  source 1..19: mol_type = other RNA
gccattagactggagttgt

SEQ ID NO: 19349 - RNA, 19 nt, synthetic construct
  misc_feature 1..19: note = siRNA antisense sequence
  source 1..19: mol_type = other RNA
acaactccagtctaatggc

SEQ ID NO: 19350 - RNA, 19 nt, synthetic construct
  misc_feature 1..19: note = siRNA sense sequence
  source 1..19: mol_type = other RNA
ccattagactggagttgtg

SEQ ID NO: 19351 - RNA, 19 nt, synthetic construct
  misc_feature 1..19: note = siRNA antisense sequence
  source 1..19: mol_type = other RNA
cacaactccagtctaatgg

SEQ ID NO: 19352 - RNA, 19 nt, synthetic construct
  misc_feature 1..19: note = siRNA sense sequence
  source 1..19: mol_type = other RNA
cattagactggagttgtgg

SEQ ID NO: 19353 - RNA, 19 nt, synthetic construct
  misc_feature 1..19: note = siRNA antisense sequence
  source 1..19: mol_type = other RNA
ccacaactccagtctaatg

SEQ ID NO: 19354 - RNA, 19 nt, synthetic construct
  misc_feature 1..19: note = siRNA sense sequence
  source 1..19: mol_type = other RNA
aaaaggaatgcagctagtg

SEQ ID NO: 19355 - RNA, 19 nt, synthetic construct
  misc_feature 1..19: note = siRNA antisense sequence
  source 1..19: mol_type = other RNA
cactagctgcattcctttt

SEQ ID NO: 19356 - RNA, 19 nt, synthetic construct
  misc_feature 1..19: note = siRNA sense sequence
  source 1..19: mol_type = other RNA
aaaggaatgcagctagtga

SEQ ID NO: 19357 - RNA, 19 nt, synthetic construct
  misc_feature 1..19: note = siRNA antisense sequence
  source 1..19: mol_type = other RNA
tcactagctgcattccttt

SEQ ID NO: 19358 - RNA, 19 nt, synthetic construct
  misc_feature 1..19: note = siRNA sense sequence
  source 1..19: mol_type = other RNA
ttcctcccaccctctgatg

SEQ ID NO: 19359 - RNA, 19 nt, synthetic construct
  misc_feature 1..19: note = siRNA antisense sequence
  source 1..19: mol_type = other RNA
catcagagggtgggaggaa

SEQ ID NO: 19360 - RNA, 19 nt, synthetic construct
  misc_feature 1..19: note = siRNA sense sequence
  source 1..19: mol_type = other RNA
tcccaccctctgatgtctt

SEQ ID NO: 19361 - RNA, 19 nt, synthetic construct
  misc_feature 1..19: note = siRNA antisense sequence
  source 1..19: mol_type = other RNA
aagacatcagagggtggga

SEQ ID NO: 19362 - RNA, 19 nt, synthetic construct
  misc_feature 1..19: note = siRNA sense sequence
  source 1..19: mol_type = other RNA
cccaccctctgatgtcttg

SEQ ID NO: 19363 - RNA, 19 nt, synthetic construct
  misc_feature 1..19: note = siRNA antisense sequence
  source 1..19: mol_type = other RNA
caagacatcagagggtggg

SEQ ID NO: 19364 - RNA, 19 nt, synthetic construct
  misc_feature 1..19: note = siRNA sense sequence
  source 1..19: mol_type = other RNA
ccaccctctgatgtcttgc

SEQ ID NO: 19365 - RNA, 19 nt, synthetic construct
  misc_feature 1..19: note = siRNA antisense sequence
  source 1..19: mol_type = other RNA
gcaagacatcagagggtgg

SEQ ID NO: 19366 - RNA, 19 nt, synthetic construct
  misc_feature 1..19: note = siRNA sense sequence
  source 1..19: mol_type = other RNA
caccctctgatgtcttgct

SEQ ID NO: 19367 - RNA, 19 nt, synthetic construct
  misc_feature 1..19: note = siRNA antisense sequence
  source 1..19: mol_type = other RNA
agcaagacatcagagggtg

SEQ ID NO: 19368 - RNA, 19 nt, synthetic construct
  misc_feature 1..19: note = siRNA sense sequence
  source 1..19: mol_type = other RNA
accctctgatgtcttgctc

SEQ ID NO: 19369 - RNA, 19 nt, synthetic construct
  misc_feature 1..19: note = siRNA antisense sequence
  source 1..19: mol_type = other RNA
gagcaagacatcagagggt

SEQ ID NO: 19370 - RNA, 19 nt, synthetic construct
  misc_feature 1..19: note = siRNA sense sequence
  source 1..19: mol_type = other RNA
ccctctgatgtcttgctca

SEQ ID NO: 19371 - RNA, 19 nt, synthetic construct
  misc_feature 1..19: note = siRNA antisense sequence
  source 1..19: mol_type = other RNA
tgagcaagacatcagaggg

SEQ ID NO: 19372 - RNA, 19 nt, synthetic construct
  misc_feature 1..19: note = siRNA sense sequence
  source 1..19: mol_type = other RNA
atgtcttgctcagccttcc

SEQ ID NO: 19373 - RNA, 19 nt, synthetic construct
  misc_feature 1..19: note = siRNA antisense sequence
  source 1..19: mol_type = other RNA
ggaaggctgagcaagacat

SEQ ID NO: 19374 - RNA, 19 nt, synthetic construct
  misc_feature 1..19: note = siRNA sense sequence
  source 1..19: mol_type = other RNA
tgtcttgctcagccttccc

SEQ ID NO: 19375 - RNA, 19 nt, synthetic construct
  misc_feature 1..19: note = siRNA antisense sequence
  source 1..19: mol_type = other RNA
gggaaggctgagcaagaca

SEQ ID NO: 19376 - RNA, 19 nt, synthetic construct
  misc_feature 1..19: note = siRNA sense sequence
  source 1..19: mol_type = other RNA
gtcttgctcagccttccca

SEQ ID NO: 19377 - RNA, 19 nt, synthetic construct
  misc_feature 1..19: note = siRNA antisense sequence
  source 1..19: mol_type = other RNA
tgggaaggctgagcaagac

SEQ ID NO: 19378 - RNA, 19 nt, synthetic construct
  misc_feature 1..19: note = siRNA sense sequence
  source 1..19: mol_type = other RNA
tcttgctcagccttcccat

SEQ ID NO: 19379 - RNA, 19 nt, synthetic construct
  misc_feature 1..19: note = siRNA antisense sequence
  source 1..19: mol_type = other RNA
atgggaaggctgagcaaga

SEQ ID NO: 19380 - RNA, 19 nt, synthetic construct
  misc_feature 1..19: note = siRNA sense sequence
  source 1..19: mol_type = other RNA
cttgctcagccttcccatt

SEQ ID NO: 19381 - RNA, 19 nt, synthetic construct
  misc_feature 1..19: note = siRNA antisense sequence
  source 1..19: mol_type = other RNA
aatgggaaggctgagcaag

SEQ ID NO: 19382 - RNA, 19 nt, synthetic construct
  misc_feature 1..19: note = siRNA sense sequence
  source 1..19: mol_type = other RNA
ttgctcagccttcccattg

SEQ ID NO: 19383 - RNA, 19 nt, synthetic construct
  misc_feature 1..19: note = siRNA antisense sequence
  source 1..19: mol_type = other RNA
caatgggaaggctgagcaa

SEQ ID NO: 19384 - RNA, 19 nt, synthetic construct
  misc_feature 1..19: note = siRNA sense sequence
  source 1..19: mol_type = other RNA
tgctcagccttcccattgg

SEQ ID NO: 19385 - RNA, 19 nt, synthetic construct
  misc_feature 1..19: note = siRNA antisense sequence
  source 1..19: mol_type = other RNA
ccaatgggaaggctgagca

SEQ ID NO: 19386 - RNA, 19 nt, synthetic construct
  misc_feature 1..19: note = siRNA sense sequence
  source 1..19: mol_type = other RNA
gctcagccttcccattggc

SEQ ID NO: 19387 - RNA, 19 nt, synthetic construct
  misc_feature 1..19: note = siRNA antisense sequence
  source 1..19: mol_type = other RNA
gccaatgggaaggctgagc

SEQ ID NO: 19388 - RNA, 19 nt, synthetic construct
  misc_feature 1..19: note = siRNA sense sequence
  source 1..19: mol_type = other RNA
ctcagccttcccattggcc

SEQ ID NO: 19389 - RNA, 19 nt, synthetic construct
  misc_feature 1..19: note = siRNA antisense sequence
  source 1..19: mol_type = other RNA
ggccaatgggaaggctgag

SEQ ID NO: 19390 - RNA, 19 nt, synthetic construct
  misc_feature 1..19: note = siRNA sense sequence
  source 1..19: mol_type = other RNA
tcagccttcccattggcca

SEQ ID NO: 19391 - RNA, 19 nt, synthetic construct
  misc_feature 1..19: note = siRNA antisense sequence
  source 1..19: mol_type = other RNA
tggccaatgggaaggctga

SEQ ID NO: 19392 - RNA, 19 nt, synthetic construct
  misc_feature 1..19: note = siRNA sense sequence
  source 1..19: mol_type = other RNA
cagccttcccattggccat

SEQ ID NO: 19393 - RNA, 19 nt, synthetic construct
  misc_feature 1..19: note = siRNA antisense sequence
  source 1..19: mol_type = other RNA
atggccaatgggaaggctg

SEQ ID NO: 19394 - RNA, 19 nt, synthetic construct
  misc_feature 1..19: note = siRNA sense sequence
  source 1..19: mol_type = other RNA
agccttcccattggccatc

SEQ ID NO: 19395 - RNA, 19 nt, synthetic construct
  misc_feature 1..19: note = siRNA antisense sequence
  source 1..19: mol_type = other RNA
gatggccaatgggaaggct

SEQ ID NO: 19396 - RNA, 19 nt, synthetic construct
  misc_feature 1..19: note = siRNA sense sequence
  source 1..19: mol_type = other RNA
gccttcccattggccatcc

SEQ ID NO: 19397 - RNA, 19 nt, synthetic construct
  misc_feature 1..19: note = siRNA antisense sequence
  source 1..19: mol_type = other RNA
ggatggccaatgggaaggc

SEQ ID NO: 19398 - RNA, 19 nt, synthetic construct
  misc_feature 1..19: note = siRNA sense sequence
  source 1..19: mol_type = other RNA
ccttcccattggccatccc

SEQ ID NO: 19399 - RNA, 19 nt, synthetic construct
  misc_feature 1..19: note = siRNA antisense sequence
  source 1..19: mol_type = other RNA
gggatggccaatgggaagg

SEQ ID NO: 19400 - RNA, 19 nt, synthetic construct
  misc_feature 1..19: note = siRNA sense sequence
  source 1..19: mol_type = other RNA
cccaaatggcaagatccaa

SEQ ID NO: 19401 - RNA, 19 nt, synthetic construct
  misc_feature 1..19: note = siRNA antisense sequence
  source 1..19: mol_type = other RNA
ttggatcttgccatttggg

SEQ ID NO: 19402 - RNA, 19 nt, synthetic construct
  misc_feature 1..19: note = siRNA sense sequence
  source 1..19: mol_type = other RNA
ccaaatggcaagatccaac

SEQ ID NO: 19403 - RNA, 19 nt, synthetic construct
  misc_feature 1..19: note = siRNA antisense sequence
  source 1..19: mol_type = other RNA
gttggatcttgccatttgg

SEQ ID NO: 19404 - RNA, 19 nt, synthetic construct
  misc_feature 1..19: note = siRNA sense sequence
  source 1..19: mol_type = other RNA
aatgtattatgtgcaaggc

SEQ ID NO: 19405 - RNA, 19 nt, synthetic construct
  misc_feature 1..19: note = siRNA antisense sequence
  source 1..19: mol_type = other RNA
gccttgcacataatacatt

SEQ ID NO: 19406 - RNA, 19 nt, synthetic construct
  misc_feature 1..19: note = siRNA sense sequence
  source 1..19: mol_type = other RNA
gtgccaagggctttgcatg

SEQ ID NO: 19407 - RNA, 19 nt, synthetic construct
  misc_feature 1..19: note = siRNA antisense sequence
  source 1..19: mol_type = other RNA
catgcaaagcccttggcac

SEQ ID NO: 19408 - RNA, 19 nt, synthetic construct
  misc_feature 1..19: note = siRNA sense sequence
  source 1..19: mol_type = other RNA
caagcagtcacagatttct

SEQ ID NO: 19409 - RNA, 19 nt, synthetic construct
  misc_feature 1..19: note = siRNA antisense sequence
  source 1..19: mol_type = other RNA
agaaatctgtgactgcttg

SEQ ID NO: 19410 - RNA, 19 nt, synthetic construct
  misc_feature 1..19: note = siRNA sense sequence
  source 1..19: mol_type = other RNA
aagcagtcacagatttctt

SEQ ID NO: 19411 - RNA, 19 nt, synthetic construct
  misc_feature 1..19: note = siRNA antisense sequence
  source 1..19: mol_type = other RNA
aagaaatctgtgactgctt

SEQ ID NO: 19412 - RNA, 19 nt, synthetic construct
  misc_feature 1..19: note = siRNA sense sequence
  source 1..19: mol_type = other RNA
ttttcactccctcagcttg

SEQ ID NO: 19413 - RNA, 19 nt, synthetic construct
  misc_feature 1..19: note = siRNA antisense sequence
  source 1..19: mol_type = other RNA
caagctgagggagtgaaaa

SEQ ID NO: 19414 - RNA, 19 nt, synthetic construct
  misc_feature 1..19: note = siRNA sense sequence
  source 1..19: mol_type = other RNA
tttcactccctcagcttgt

SEQ ID NO: 19415 - RNA, 19 nt, synthetic construct
  misc_feature 1..19: note = siRNA antisense sequence
  source 1..19: mol_type = other RNA
acaagctgagggagtgaaa

SEQ ID NO: 19416 - RNA, 19 nt, synthetic construct
  misc_feature 1..19: note = siRNA sense sequence
  source 1..19: mol_type = other RNA
ttcactccctcagcttgtt

SEQ ID NO: 19417 - RNA, 19 nt, synthetic construct
  misc_feature 1..19: note = siRNA antisense sequence
  source 1..19: mol_type = other RNA
aacaagctgagggagtgaa

SEQ ID NO: 19418 - RNA, 19 nt, synthetic construct
  misc_feature 1..19: note = siRNA sense sequence
  source 1..19: mol_type = other RNA
tccctcagcttgttgatta

SEQ ID NO: 19419 - RNA, 19 nt, synthetic construct
  misc_feature 1..19: note = siRNA antisense sequence
  source 1..19: mol_type = other RNA
taatcaacaagctgaggga

SEQ ID NO: 19420 - RNA, 19 nt, synthetic construct
  misc_feature 1..19: note = siRNA sense sequence
  source 1..19: mol_type = other RNA
ccctcagcttgttgattag

SEQ ID NO: 19421 - RNA, 19 nt, synthetic construct
  misc_feature 1..19: note = siRNA antisense sequence
  source 1..19: mol_type = other RNA
ctaatcaacaagctgaggg

SEQ ID NO: 19422 - RNA, 19 nt, synthetic construct
  misc_feature 1..19: note = siRNA sense sequence
  source 1..19: mol_type = other RNA
cctcagcttgttgattagc

SEQ ID NO: 19423 - RNA, 19 nt, synthetic construct
  misc_feature 1..19: note = siRNA antisense sequence
  source 1..19: mol_type = other RNA
gctaatcaacaagctgagg

SEQ ID NO: 19424 - RNA, 19 nt, synthetic construct
  misc_feature 1..19: note = siRNA sense sequence
  source 1..19: mol_type = other RNA
ctcagcttgttgattagcc

SEQ ID NO: 19425 - RNA, 19 nt, synthetic construct
  misc_feature 1..19: note = siRNA antisense sequence
  source 1..19: mol_type = other RNA
ggctaatcaacaagctgag

SEQ ID NO: 19426 - RNA, 19 nt, synthetic construct
  misc_feature 1..19: note = siRNA sense sequence
  source 1..19: mol_type = other RNA
tcagcttgttgattagcct

SEQ ID NO: 19427 - RNA, 19 nt, synthetic construct
  misc_feature 1..19: note = siRNA antisense sequence
  source 1..19: mol_type = other RNA
aggctaatcaacaagctga

SEQ ID NO: 19428 - RNA, 19 nt, synthetic construct
  misc_feature 1..19: note = siRNA sense sequence
  source 1..19: mol_type = other RNA
cagcttgttgattagcctt

SEQ ID NO: 19429 - RNA, 19 nt, synthetic construct
  misc_feature 1..19: note = siRNA antisense sequence
  source 1..19: mol_type = other RNA
aaggctaatcaacaagctg

SEQ ID NO: 19430 - RNA, 19 nt, synthetic construct
  misc_feature 1..19: note = siRNA sense sequence
  source 1..19: mol_type = other RNA
agcttgttgattagccttg

SEQ ID NO: 19431 - RNA, 19 nt, synthetic construct
  misc_feature 1..19: note = siRNA antisense sequence
  source 1..19: mol_type = other RNA
caaggctaatcaacaagct

SEQ ID NO: 19432 - RNA, 19 nt, synthetic construct
  misc_feature 1..19: note = siRNA sense sequence
  source 1..19: mol_type = other RNA
gcttgttgattagccttga

SEQ ID NO: 19433 - RNA, 19 nt, synthetic construct
  misc_feature 1..19: note = siRNA antisense sequence
  source 1..19: mol_type = other RNA
tcaaggctaatcaacaagc

SEQ ID NO: 19434 - RNA, 19 nt, synthetic construct
  misc_feature 1..19: note = siRNA sense sequence
  source 1..19: mol_type = other RNA
ctactcaattcatatctct

SEQ ID NO: 19435 - RNA, 19 nt, synthetic construct
  misc_feature 1..19: note = siRNA antisense sequence
  source 1..19: mol_type = other RNA
agagatatgaattgagtag

SEQ ID NO: 19436 - RNA, 19 nt, synthetic construct
  misc_feature 1..19: note = siRNA sense sequence
  source 1..19: mol_type = other RNA
tactcaattcatatctctg

SEQ ID NO: 19437 - RNA, 19 nt, synthetic construct
  misc_feature 1..19: note = siRNA antisense sequence
  source 1..19: mol_type = other RNA
cagagatatgaattgagta

SEQ ID NO: 19438 - RNA, 19 nt, synthetic construct
  misc_feature 1..19: note = siRNA sense sequence
  source 1..19: mol_type = other RNA
actcaattcatatctctga

SEQ ID NO: 19439 - RNA, 19 nt, synthetic construct
  misc_feature 1..19: note = siRNA antisense sequence
  source 1..19: mol_type = other RNA
tcagagatatgaattgagt

SEQ ID NO: 19440 - RNA, 19 nt, synthetic construct
  misc_feature 1..19: note = siRNA sense sequence
  source 1..19: mol_type = other RNA
ctcaattcatatctctgac

SEQ ID NO: 19441 - RNA, 19 nt, synthetic construct
  misc_feature 1..19: note = siRNA antisense sequence
  source 1..19: mol_type = other RNA
gtcagagatatgaattgag

SEQ ID NO: 19442 - RNA, 19 nt, synthetic construct
  misc_feature 1..19: note = siRNA sense sequence
  source 1..19: mol_type = other RNA
tcatatctctgacctcaaa

SEQ ID NO: 19443 - RNA, 19 nt, synthetic construct
  misc_feature 1..19: note = siRNA antisense sequence
  source 1..19: mol_type = other RNA
tttgaggtcagagatatga

SEQ ID NO: 19444 - RNA, 19 nt, synthetic construct
  misc_feature 1..19: note = siRNA sense sequence
  source 1..19: mol_type = other RNA
catatctctgacctcaaat

SEQ ID NO: 19445 - RNA, 19 nt, synthetic construct
  misc_feature 1..19: note = siRNA antisense sequence
  source 1..19: mol_type = other RNA
atttgaggtcagagatatg

SEQ ID NO: 19446 - RNA, 19 nt, synthetic construct
  misc_feature 1..19: note = siRNA sense sequence
  source 1..19: mol_type = other RNA
atatctctgacctcaaatt

SEQ ID NO: 19447 - RNA, 19 nt, synthetic construct
  misc_feature 1..19: note = siRNA antisense sequence
  source 1..19: mol_type = other RNA
aatttgaggtcagagatat

SEQ ID NO: 19448 - RNA, 19 nt, synthetic construct
  misc_feature 1..19: note = siRNA sense sequence
  source 1..19: mol_type = other RNA
tatctctgacctcaaatta

SEQ ID NO: 19449 - RNA, 19 nt, synthetic construct
  misc_feature 1..19: note = siRNA antisense sequence
  source 1..19: mol_type = other RNA
taatttgaggtcagagata

SEQ ID NO: 19450 - RNA, 19 nt, synthetic construct
  misc_feature 1..19: note = siRNA sense sequence
  source 1..19: mol_type = other RNA
atctctgacctcaaattaa

SEQ ID NO: 19451 - RNA, 19 nt, synthetic construct
  misc_feature 1..19: note = siRNA antisense sequence
  source 1..19: mol_type = other RNA
ttaatttgaggtcagagat

SEQ ID NO: 19452 - RNA, 19 nt, synthetic construct
  misc_feature 1..19: note = siRNA sense sequence
  source 1..19: mol_type = other RNA
tctctgacctcaaattaaa

SEQ ID NO: 19453 - RNA, 19 nt, synthetic construct
  misc_feature 1..19: note = siRNA antisense sequence
  source 1..19: mol_type = other RNA
tttaatttgaggtcagaga

SEQ ID NO: 19454 - RNA, 19 nt, synthetic construct
  misc_feature 1..19: note = siRNA sense sequence
  source 1..19: mol_type = other RNA
ctgacctcaaattaaatgc

SEQ ID NO: 19455 - RNA, 19 nt, synthetic construct
  misc_feature 1..19: note = siRNA antisense sequence
  source 1..19: mol_type = other RNA
gcatttaatttgaggtcag

SEQ ID NO: 19456 - RNA, 19 nt, synthetic construct
  misc_feature 1..19: note = siRNA sense sequence
  source 1..19: mol_type = other RNA
tgacctcaaattaaatgct

SEQ ID NO: 19457 - RNA, 19 nt, synthetic construct
  misc_feature 1..19: note = siRNA antisense sequence
  source 1..19: mol_type = other RNA
agcatttaatttgaggtca

SEQ ID NO: 19458 - RNA, 19 nt, synthetic construct
  misc_feature 1..19: note = siRNA sense sequence
  source 1..19: mol_type = other RNA
gacctcaaattaaatgctc

SEQ ID NO: 19459 - RNA, 19 nt, synthetic construct
  misc_feature 1..19: note = siRNA antisense sequence
  source 1..19: mol_type = other RNA
gagcatttaatttgaggtc

SEQ ID NO: 19460 - RNA, 19 nt, synthetic construct
  misc_feature 1..19: note = siRNA sense sequence
  source 1..19: mol_type = other RNA
acctcaaattaaatgctct

SEQ ID NO: 19461 - RNA, 19 nt, synthetic construct
  misc_feature 1..19: note = siRNA antisense sequence
  source 1..19: mol_type = other RNA
agagcatttaatttgaggt

SEQ ID NO: 19462 - RNA, 19 nt, synthetic construct
  misc_feature 1..19: note = siRNA sense sequence
  source 1..19: mol_type = other RNA
cctcaaattaaatgctcta

SEQ ID NO: 19463 - RNA, 19 nt, synthetic construct
  misc_feature 1..19: note = siRNA antisense sequence
  source 1..19: mol_type = other RNA
tagagcatttaatttgagg

SEQ ID NO: 19464 - RNA, 19 nt, synthetic construct
  misc_feature 1..19: note = siRNA sense sequence
  source 1..19: mol_type = other RNA
tatgctatattggctgcct

SEQ ID NO: 19465 - RNA, 19 nt, synthetic construct
  misc_feature 1..19: note = siRNA antisense sequence
  source 1..19: mol_type = other RNA
aggcagccaatatagcata

SEQ ID NO: 19466 - RNA, 19 nt, synthetic construct
  misc_feature 1..19: note = siRNA sense sequence
  source 1..19: mol_type = other RNA
atgctatattggctgccta

SEQ ID NO: 19467 - RNA, 19 nt, synthetic construct
  misc_feature 1..19: note = siRNA antisense sequence
  source 1..19: mol_type = other RNA
taggcagccaatatagcat

SEQ ID NO: 19468 - RNA, 19 nt, synthetic construct
  misc_feature 1..19: note = siRNA sense sequence
  source 1..19: mol_type = other RNA
tgctatattggctgcctaa

SEQ ID NO: 19469 - RNA, 19 nt, synthetic construct
  misc_feature 1..19: note = siRNA antisense sequence
  source 1..19: mol_type = other RNA
ttaggcagccaatatagca

SEQ ID NO: 19470 - RNA, 19 nt, synthetic construct
  misc_feature 1..19: note = siRNA sense sequence
  source 1..19: mol_type = other RNA
gctatattggctgcctaaa

SEQ ID NO: 19471 - RNA, 19 nt, synthetic construct
  misc_feature 1..19: note = siRNA antisense sequence
  source 1..19: mol_type = other RNA
tttaggcagccaatatagc

SEQ ID NO: 19472 - RNA, 19 nt, synthetic construct
  misc_feature 1..19: note = siRNA sense sequence
  source 1..19: mol_type = other RNA
ctatattggctgcctaaag

SEQ ID NO: 19473 - RNA, 19 nt, synthetic construct
  misc_feature 1..19: note = siRNA antisense sequence
  source 1..19: mol_type = other RNA
ctttaggcagccaatatag

SEQ ID NO: 19474 - RNA, 19 nt, synthetic construct
  misc_feature 1..19: note = siRNA sense sequence
  source 1..19: mol_type = other RNA
tatattggctgcctaaaga

SEQ ID NO: 19475 - RNA, 19 nt, synthetic construct
  misc_feature 1..19: note = siRNA antisense sequence
  source 1..19: mol_type = other RNA
tctttaggcagccaatata

SEQ ID NO: 19476 - RNA, 19 nt, synthetic construct
  misc_feature 1..19: note = siRNA sense sequence
  source 1..19: mol_type = other RNA
atattggctgcctaaagat

SEQ ID NO: 19477 - RNA, 19 nt, synthetic construct
  misc_feature 1..19: note = siRNA antisense sequence
  source 1..19: mol_type = other RNA
atctttaggcagccaatat

SEQ ID NO: 19478 - RNA, 19 nt, synthetic construct
  misc_feature 1..19: note = siRNA sense sequence
  source 1..19: mol_type = other RNA
tattggctgcctaaagata

SEQ ID NO: 19479 - RNA, 19 nt, synthetic construct
  misc_feature 1..19: note = siRNA antisense sequence
  source 1..19: mol_type = other RNA
tatctttaggcagccaata

SEQ ID NO: 19480 - RNA, 19 nt, synthetic construct
  misc_feature 1..19: note = siRNA sense sequence
  source 1..19: mol_type = other RNA
attggctgcctaaagataa

SEQ ID NO: 19481 - RNA, 19 nt, synthetic construct
  misc_feature 1..19: note = siRNA antisense sequence
  source 1..19: mol_type = other RNA
ttatctttaggcagccaat

SEQ ID NO: 19482 - RNA, 19 nt, synthetic construct
  misc_feature 1..19: note = siRNA sense sequence
  source 1..19: mol_type = other RNA
ttggctgcctaaagataag

SEQ ID NO: 19483 - RNA, 19 nt, synthetic construct
  misc_feature 1..19: note = siRNA antisense sequence
  source 1..19: mol_type = other RNA
cttatctttaggcagccaa

SEQ ID NO: 19484 - RNA, 19 nt, synthetic construct
  misc_feature 1..19: note = siRNA sense sequence
  source 1..19: mol_type = other RNA
tggctgcctaaagataagt

SEQ ID NO: 19485 - RNA, 19 nt, synthetic construct
  misc_feature 1..19: note = siRNA antisense sequence
  source 1..19: mol_type = other RNA
acttatctttaggcagcca

SEQ ID NO: 19486 - RNA, 19 nt, synthetic construct
  misc_feature 1..19: note = siRNA sense sequence
  source 1..19: mol_type = other RNA
ggctgcctaaagataagtt

SEQ ID NO: 19487 - RNA, 19 nt, synthetic construct
  misc_feature 1..19: note = siRNA antisense sequence
  source 1..19: mol_type = other RNA
aacttatctttaggcagcc

SEQ ID NO: 19488 - RNA, 19 nt, synthetic construct
  misc_feature 1..19: note = siRNA sense sequence
  source 1..19: mol_type = other RNA
gctgcctaaagataagttc

SEQ ID NO: 19489 - RNA, 19 nt, synthetic construct
  misc_feature 1..19: note = siRNA antisense sequence
  source 1..19: mol_type = other RNA
gaacttatctttaggcagc

SEQ ID NO: 19490 - RNA, 19 nt, synthetic construct
  misc_feature 1..19: note = siRNA sense sequence
  source 1..19: mol_type = other RNA
cctaaagataagttcattc

SEQ ID NO: 19491 - RNA, 19 nt, synthetic construct
  misc_feature 1..19: note = siRNA antisense sequence
  source 1..19: mol_type = other RNA
gaatgaacttatctttagg

SEQ ID NO: 19492 - RNA, 19 nt, synthetic construct
  misc_feature 1..19: note = siRNA sense sequence
  source 1..19: mol_type = other RNA
aagataagttcattctctc

SEQ ID NO: 19493 - RNA, 19 nt, synthetic construct
  misc_feature 1..19: note = siRNA antisense sequence
  source 1..19: mol_type = other RNA
gagagaatgaacttatctt

SEQ ID NO: 19494 - RNA, 19 nt, synthetic construct
  misc_feature 1..19: note = siRNA sense sequence
  source 1..19: mol_type = other RNA
agataagttcattctctct

SEQ ID NO: 19495 - RNA, 19 nt, synthetic construct
  misc_feature 1..19: note = siRNA antisense sequence
  source 1..19: mol_type = other RNA
agagagaatgaacttatct

SEQ ID NO: 19496 - RNA, 19 nt, synthetic construct
  misc_feature 1..19: note = siRNA sense sequence
  source 1..19: mol_type = other RNA
agttcattctctcttgctc

SEQ ID NO: 19497 - RNA, 19 nt, synthetic construct
  misc_feature 1..19: note = siRNA antisense sequence
  source 1..19: mol_type = other RNA
gagcaagagagaatgaact

SEQ ID NO: 19498 - RNA, 19 nt, synthetic construct
  misc_feature 1..19: note = siRNA sense sequence
  source 1..19: mol_type = other RNA
gttcattctctcttgctca

SEQ ID NO: 19499 - RNA, 19 nt, synthetic construct
  misc_feature 1..19: note = siRNA antisense sequence
  source 1..19: mol_type = other RNA
tgagcaagagagaatgaac

SEQ ID NO: 19500 - RNA, 19 nt, synthetic construct
  misc_feature 1..19: note = siRNA sense sequence
  source 1..19: mol_type = other RNA
ttcattctctcttgctcac

SEQ ID NO: 19501 - RNA, 19 nt, synthetic construct
  misc_feature 1..19: note = siRNA antisense sequence
  source 1..19: mol_type = other RNA
gtgagcaagagagaatgaa

SEQ ID NO: 19502 - RNA, 19 nt, synthetic construct
  misc_feature 1..19: note = siRNA sense sequence
  source 1..19: mol_type = other RNA
tcattctctcttgctcact

SEQ ID NO: 19503 - RNA, 19 nt, synthetic construct
  misc_feature 1..19: note = siRNA antisense sequence
  source 1..19: mol_type = other RNA
agtgagcaagagagaatga

SEQ ID NO: 19504 - RNA, 19 nt, synthetic construct
  misc_feature 1..19: note = siRNA sense sequence
  source 1..19: mol_type = other RNA
cttgctcactcctctaaat

SEQ ID NO: 19505 - RNA, 19 nt, synthetic construct
  misc_feature 1..19: note = siRNA antisense sequence
  source 1..19: mol_type = other RNA
atttagaggagtgagcaag

SEQ ID NO: 19506 - RNA, 19 nt, synthetic construct
  misc_feature 1..19: note = siRNA sense sequence
  source 1..19: mol_type = other RNA
ttgctcactcctctaaatg

SEQ ID NO: 19507 - RNA, 19 nt, synthetic construct
  misc_feature 1..19: note = siRNA antisense sequence
  source 1..19: mol_type = other RNA
catttagaggagtgagcaa

SEQ ID NO: 19508 - RNA, 19 nt, synthetic construct
  misc_feature 1..19: note = siRNA sense sequence
  source 1..19: mol_type = other RNA
tgctcactcctctaaatgt

SEQ ID NO: 19509 - RNA, 19 nt, synthetic construct
  misc_feature 1..19: note = siRNA antisense sequence
  source 1..19: mol_type = other RNA
acatttagaggagtgagca

SEQ ID NO: 19510 - RNA, 19 nt, synthetic construct
  misc_feature 1..19: note = siRNA sense sequence
  source 1..19: mol_type = other RNA
gctcactcctctaaatgtg

SEQ ID NO: 19511 - RNA, 19 nt, synthetic construct
  misc_feature 1..19: note = siRNA antisense sequence
  source 1..19: mol_type = other RNA
cacatttagaggagtgagc

SEQ ID NO: 19512 - RNA, 19 nt, synthetic construct
  misc_feature 1..19: note = siRNA sense sequence
  source 1..19: mol_type = other RNA
acttggataaagacctaat

SEQ ID NO: 19513 - RNA, 19 nt, synthetic construct
  misc_feature 1..19: note = siRNA antisense sequence
  source 1..19: mol_type = other RNA
attaggtctttatccaagt

SEQ ID NO: 19514 - RNA, 19 nt, synthetic construct
  misc_feature 1..19: note = siRNA sense sequence
  source 1..19: mol_type = other RNA
taggtgtacagcattaagt

SEQ ID NO: 19515 - RNA, 19 nt, synthetic construct
  misc_feature 1..19: note = siRNA antisense sequence
  source 1..19: mol_type = other RNA
acttaatgctgtacaccta

SEQ ID NO: 19516 - RNA, 19 nt, synthetic construct
  misc_feature 1..19: note = siRNA sense sequence
  source 1..19: mol_type = other RNA
aggtgtacagcattaagtg

SEQ ID NO: 19517 - RNA, 19 nt, synthetic construct
  misc_feature 1..19: note = siRNA antisense sequence
  source 1..19: mol_type = other RNA
cacttaatgctgtacacct

SEQ ID NO: 19518 - RNA, 19 nt, synthetic construct
  misc_feature 1..19: note = siRNA sense sequence
  source 1..19: mol_type = other RNA
ggtgtacagcattaagtgt

SEQ ID NO: 19519 - RNA, 19 nt, synthetic construct
  misc_feature 1..19: note = siRNA antisense sequence
  source 1..19: mol_type = other RNA
acacttaatgctgtacacc

SEQ ID NO: 19520 - RNA, 19 nt, synthetic construct
  misc_feature 1..19: note = siRNA sense sequence
  source 1..19: mol_type = other RNA
aagactactatttctcgtt

SEQ ID NO: 19521 - RNA, 19 nt, synthetic construct
  misc_feature 1..19: note = siRNA antisense sequence
  source 1..19: mol_type = other RNA
aacgagaaatagtagtctt

SEQ ID NO: 19522 - RNA, 19 nt, synthetic construct
  misc_feature 1..19: note = siRNA sense sequence
  source 1..19: mol_type = other RNA
agactactatttctcgtta

SEQ ID NO: 19523 - RNA, 19 nt, synthetic construct
  misc_feature 1..19: note = siRNA antisense sequence
  source 1..19: mol_type = other RNA
taacgagaaatagtagtct

SEQ ID NO: 19524 - RNA, 19 nt, synthetic construct
  misc_feature 1..19: note = siRNA sense sequence
  source 1..19: mol_type = other RNA
gactactatttctcgttat

SEQ ID NO: 19525 - RNA, 19 nt, synthetic construct
  misc_feature 1..19: note = siRNA antisense sequence
  source 1..19: mol_type = other RNA
ataacgagaaatagtagtc

SEQ ID NO: 19526 - RNA, 19 nt, synthetic construct
  misc_feature 1..19: note = siRNA sense sequence
  source 1..19: mol_type = other RNA
acattttggttggcctaga

SEQ ID NO: 19527 - RNA, 19 nt, synthetic construct
  misc_feature 1..19: note = siRNA antisense sequence
  source 1..19: mol_type = other RNA
tctaggccaaccaaaatgt

SEQ ID NO: 19528 - RNA, 19 nt, synthetic construct
  misc_feature 1..19: note = siRNA sense sequence
  source 1..19: mol_type = other RNA
cattttggttggcctagaa

SEQ ID NO: 19529 - RNA, 19 nt, synthetic construct
  misc_feature 1..19: note = siRNA antisense sequence
  source 1..19: mol_type = other RNA
ttctaggccaaccaaaatg

SEQ ID NO: 19530 - RNA, 19 nt, synthetic construct
  misc_feature 1..19: note = siRNA sense sequence
  source 1..19: mol_type = other RNA
attttggttggcctagaag

SEQ ID NO: 19531 - RNA, 19 nt, synthetic construct
  misc_feature 1..19: note = siRNA antisense sequence
  source 1..19: mol_type = other RNA
cttctaggccaaccaaaat

SEQ ID NO: 19532 - RNA, 19 nt, synthetic construct
  misc_feature 1..19: note = siRNA sense sequence
  source 1..19: mol_type = other RNA
tggttggcctagaagcaag

SEQ ID NO: 19533 - RNA, 19 nt, synthetic construct
  misc_feature 1..19: note = siRNA antisense sequence
  source 1..19: mol_type = other RNA
cttgcttctaggccaacca

SEQ ID NO: 19534 - RNA, 19 nt, synthetic construct
  misc_feature 1..19: note = siRNA sense sequence
  source 1..19: mol_type = other RNA
ggttggcctagaagcaagg

SEQ ID NO: 19535 - RNA, 19 nt, synthetic construct
  misc_feature 1..19: note = siRNA antisense sequence
  source 1..19: mol_type = other RNA
ccttgcttctaggccaacc

SEQ ID NO: 19536 - RNA, 19 nt, synthetic construct
  misc_feature 1..19: note = siRNA sense sequence
  source 1..19: mol_type = other RNA
gttggcctagaagcaaggg

SEQ ID NO: 19537 - RNA, 19 nt, synthetic construct
  misc_feature 1..19: note = siRNA antisense sequence
  source 1..19: mol_type = other RNA
cccttgcttctaggccaac

SEQ ID NO: 19538 - RNA, 19 nt, synthetic construct
  misc_feature 1..19: note = siRNA sense sequence
  source 1..19: mol_type = other RNA
ttggcctagaagcaagggt

SEQ ID NO: 19539 - RNA, 19 nt, synthetic construct
  misc_feature 1..19: note = siRNA antisense sequence
  source 1..19: mol_type = other RNA
acccttgcttctaggccaa

SEQ ID NO: 19540 - RNA, 19 nt, synthetic construct
  misc_feature 1..19: note = siRNA sense sequence
  source 1..19: mol_type = other RNA
gcaagggtcttcttttcac

SEQ ID NO: 19541 - RNA, 19 nt, synthetic construct
  misc_feature 1..19: note = siRNA antisense sequence
  source 1..19: mol_type = other RNA
gtgaaaagaagacccttgc

SEQ ID NO: 19542 - RNA, 19 nt, synthetic construct
  misc_feature 1..19: note = siRNA sense sequence
  source 1..19: mol_type = other RNA
caagggtcttcttttcaca

SEQ ID NO: 19543 - RNA, 19 nt, synthetic construct
  misc_feature 1..19: note = siRNA antisense sequence
  source 1..19: mol_type = other RNA
tgtgaaaagaagacccttg

SEQ ID NO: 19544 - RNA, 19 nt, synthetic construct
  misc_feature 1..19: note = siRNA sense sequence
  source 1..19: mol_type = other RNA
aagggtcttcttttcacag

SEQ ID NO: 19545 - RNA, 19 nt, synthetic construct
  misc_feature 1..19: note = siRNA antisense sequence
  source 1..19: mol_type = other RNA
ctgtgaaaagaagaccctt

SEQ ID NO: 19546 - RNA, 19 nt, synthetic construct
  misc_feature 1..19: note = siRNA sense sequence
  source 1..19: mol_type = other RNA
agggtcttcttttcacagg

SEQ ID NO: 19547 - RNA, 19 nt, synthetic construct
  misc_feature 1..19: note = siRNA antisense sequence
  source 1..19: mol_type = other RNA
cctgtgaaaagaagaccct

SEQ ID NO: 19548 - RNA, 19 nt, synthetic construct
  misc_feature 1..19: note = siRNA sense sequence
  source 1..19: mol_type = other RNA
gggtcttcttttcacaggc

SEQ ID NO: 19549 - RNA, 19 nt, synthetic construct
  misc_feature 1..19: note = siRNA antisense sequence
  source 1..19: mol_type = other RNA
gcctgtgaaaagaagaccc

SEQ ID NO: 19550 - RNA, 19 nt, synthetic construct
  misc_feature 1..19: note = siRNA sense sequence
  source 1..19: mol_type = other RNA
cttttcacaggcaagattt

SEQ ID NO: 19551 - RNA, 19 nt, synthetic construct
  misc_feature 1..19: note = siRNA antisense sequence
  source 1..19: mol_type = other RNA
aaatcttgcctgtgaaaag

SEQ ID NO: 19552 - RNA, 19 nt, synthetic construct
  misc_feature 1..19: note = siRNA sense sequence
  source 1..19: mol_type = other RNA
ttttcacaggcaagatttc

SEQ ID NO: 19553 - RNA, 19 nt, synthetic construct
  misc_feature 1..19: note = siRNA antisense sequence
  source 1..19: mol_type = other RNA
gaaatcttgcctgtgaaaa

SEQ ID NO: 19554 - RNA, 19 nt, synthetic construct
  misc_feature 1..19: note = siRNA sense sequence
  source 1..19: mol_type = other RNA
tttcacaggcaagatttcc

SEQ ID NO: 19555 - RNA, 19 nt, synthetic construct
  misc_feature 1..19: note = siRNA antisense sequence
  source 1..19: mol_type = other RNA
ggaaatcttgcctgtgaaa

SEQ ID NO: 19556 - RNA, 19 nt, synthetic construct
  misc_feature 1..19: note = siRNA sense sequence
  source 1..19: mol_type = other RNA
acaggcaagatttcctatt

SEQ ID NO: 19557 - RNA, 19 nt, synthetic construct
  misc_feature 1..19: note = siRNA antisense sequence
  source 1..19: mol_type = other RNA
aataggaaatcttgcctgt

SEQ ID NO: 19558 - RNA, 19 nt, synthetic construct
  misc_feature 1..19: note = siRNA sense sequence
  source 1..19: mol_type = other RNA
caggcaagatttcctattc

SEQ ID NO: 19559 - RNA, 19 nt, synthetic construct
  misc_feature 1..19: note = siRNA antisense sequence
  source 1..19: mol_type = other RNA
gaataggaaatcttgcctg

SEQ ID NO: 19560 - RNA, 19 nt, synthetic construct
  misc_feature 1..19: note = siRNA sense sequence
  source 1..19: mol_type = other RNA
aggcaagatttcctattca

SEQ ID NO: 19561 - RNA, 19 nt, synthetic construct
  misc_feature 1..19: note = siRNA antisense sequence
  source 1..19: mol_type = other RNA
tgaataggaaatcttgcct

SEQ ID NO: 19562 - RNA, 19 nt, synthetic construct
  misc_feature 1..19: note = siRNA sense sequence
  source 1..19: mol_type = other RNA
ggcaagatttcctattcaa

SEQ ID NO: 19563 - RNA, 19 nt, synthetic construct
  misc_feature 1..19: note = siRNA antisense sequence
  source 1..19: mol_type = other RNA
ttgaataggaaatcttgcc

SEQ ID NO: 19564 - RNA, 19 nt, synthetic construct
  misc_feature 1..19: note = siRNA sense sequence
  source 1..19: mol_type = other RNA
gcaagatttcctattcaaa

SEQ ID NO: 19565 - RNA, 19 nt, synthetic construct
  misc_feature 1..19: note = siRNA antisense sequence
  source 1..19: mol_type = other RNA
tttgaataggaaatcttgc

SEQ ID NO: 19566 - RNA, 19 nt, synthetic construct
  misc_feature 1..19: note = siRNA sense sequence
  source 1..19: mol_type = other RNA
agtcagccacttattcaaa

SEQ ID NO: 19567 - RNA, 19 nt, synthetic construct
  misc_feature 1..19: note = siRNA antisense sequence
  source 1..19: mol_type = other RNA
tttgaataagtggctgact

SEQ ID NO: 19568 - RNA, 19 nt, synthetic construct
  misc_feature 1..19: note = siRNA sense sequence
  source 1..19: mol_type = other RNA
gtcagccacttattcaaaa

SEQ ID NO: 19569 - RNA, 19 nt, synthetic construct
  misc_feature 1..19: note = siRNA antisense sequence
  source 1..19: mol_type = other RNA
ttttgaataagtggctgac

SEQ ID NO: 19570 - RNA, 19 nt, synthetic construct
  misc_feature 1..19: note = siRNA sense sequence
  source 1..19: mol_type = other RNA
caaagaatgactcccaatg

SEQ ID NO: 19571 - RNA, 19 nt, synthetic construct
  misc_feature 1..19: note = siRNA antisense sequence
  source 1..19: mol_type = other RNA
cattgggagtcattctttg

SEQ ID NO: 19572 - RNA, 19 nt, synthetic construct
  misc_feature 1..19: note = siRNA sense sequence
  source 1..19: mol_type = other RNA
aaagaatgactcccaatgg

SEQ ID NO: 19573 - RNA, 19 nt, synthetic construct
  misc_feature 1..19: note = siRNA antisense sequence
  source 1..19: mol_type = other RNA
ccattgggagtcattcttt

SEQ ID NO: 19574 - RNA, 19 nt, synthetic construct
  misc_feature 1..19: note = siRNA sense sequence
  source 1..19: mol_type = other RNA
aagaatgactcccaatggc

SEQ ID NO: 19575 - RNA, 19 nt, synthetic construct
  misc_feature 1..19: note = siRNA antisense sequence
  source 1..19: mol_type = other RNA
gccattgggagtcattctt

SEQ ID NO: 19576 - RNA, 19 nt, synthetic construct
  misc_feature 1..19: note = siRNA sense sequence
  source 1..19: mol_type = other RNA
agaatgactcccaatggca

SEQ ID NO: 19577 - RNA, 19 nt, synthetic construct
  misc_feature 1..19: note = siRNA antisense sequence
  source 1..19: mol_type = other RNA
tgccattgggagtcattct

SEQ ID NO: 19578 - RNA, 19 nt, synthetic construct
  misc_feature 1..19: note = siRNA sense sequence
  source 1..19: mol_type = other RNA
gaatgactcccaatggcag

SEQ ID NO: 19579 - RNA, 19 nt, synthetic construct
  misc_feature 1..19: note = siRNA antisense sequence
  source 1..19: mol_type = other RNA
ctgccattgggagtcattc

SEQ ID NO: 19580 - RNA, 19 nt, synthetic construct
  misc_feature 1..19: note = siRNA sense sequence
  source 1..19: mol_type = other RNA
caatgtattgtcaggaatt

SEQ ID NO: 19581 - RNA, 19 nt, synthetic construct
  misc_feature 1..19: note = siRNA antisense sequence
  source 1..19: mol_type = other RNA
aattcctgacaatacattg

SEQ ID NO: 19582 - RNA, 19 nt, synthetic construct
  misc_feature 1..19: note = siRNA sense sequence
  source 1..19: mol_type = other RNA
aatgtattgtcaggaattg

SEQ ID NO: 19583 - RNA, 19 nt, synthetic construct
  misc_feature 1..19: note = siRNA antisense sequence
  source 1..19: mol_type = other RNA
caattcctgacaatacatt

SEQ ID NO: 19584 - RNA, 19 nt, synthetic construct
  misc_feature 1..19: note = siRNA sense sequence
  source 1..19: mol_type = other RNA
atgtattgtcaggaattgc

SEQ ID NO: 19585 - RNA, 19 nt, synthetic construct
  misc_feature 1..19: note = siRNA antisense sequence
  source 1..19: mol_type = other RNA
gcaattcctgacaatacat

SEQ ID NO: 19586 - RNA, 19 nt, synthetic construct
  misc_feature 1..19: note = siRNA sense sequence
  source 1..19: mol_type = other RNA
tgtattgtcaggaattgct

SEQ ID NO: 19587 - RNA, 19 nt, synthetic construct
  misc_feature 1..19: note = siRNA antisense sequence
  source 1..19: mol_type = other RNA
agcaattcctgacaataca

SEQ ID NO: 19588 - RNA, 19 nt, synthetic construct
  misc_feature 1..19: note = siRNA sense sequence
  source 1..19: mol_type = other RNA
gtattgtcaggaattgctg

SEQ ID NO: 19589 - RNA, 19 nt, synthetic construct
  misc_feature 1..19: note = siRNA antisense sequence
  source 1..19: mol_type = other RNA
cagcaattcctgacaatac

SEQ ID NO: 19590 - RNA, 19 nt, synthetic construct
  misc_feature 1..19: note = siRNA sense sequence
  source 1..19: mol_type = other RNA
ggaattgctgaagatggtg

SEQ ID NO: 19591 - RNA, 19 nt, synthetic construct
  misc_feature 1..19: note = siRNA antisense sequence
  source 1..19: mol_type = other RNA
caccatcttcagcaattcc

SEQ ID NO: 19592 - RNA, 19 nt, synthetic construct
  misc_feature 1..19: note = siRNA sense sequence
  source 1..19: mol_type = other RNA
gaattgctgaagatggtga

SEQ ID NO: 19593 - RNA, 19 nt, synthetic construct
  misc_feature 1..19: note = siRNA antisense sequence
  source 1..19: mol_type = other RNA
tcaccatcttcagcaattc

SEQ ID NO: 19594 - RNA, 19 nt, synthetic construct
  misc_feature 1..19: note = siRNA sense sequence
  source 1..19: mol_type = other RNA
aattgctgaagatggtgaa

SEQ ID NO: 19595 - RNA, 19 nt, synthetic construct
  misc_feature 1..19: note = siRNA antisense sequence
  source 1..19: mol_type = other RNA
ttcaccatcttcagcaatt

SEQ ID NO: 19596 - RNA, 19 nt, synthetic construct
  misc_feature 1..19: note = siRNA sense sequence
  source 1..19: mol_type = other RNA
aattgtcttactcattgtg

SEQ ID NO: 19597 - RNA, 19 nt, synthetic construct
  misc_feature 1..19: note = siRNA antisense sequence
  source 1..19: mol_type = other RNA
cacaatgagtaagacaatt

SEQ ID NO: 19598 - RNA, 19 nt, synthetic construct
  misc_feature 1..19: note = siRNA sense sequence
  source 1..19: mol_type = other RNA
gtcttactcattgtgatgt

SEQ ID NO: 19599 - RNA, 19 nt, synthetic construct
  misc_feature 1..19: note = siRNA antisense sequence
  source 1..19: mol_type = other RNA
acatcacaatgagtaagac

SEQ ID NO: 19600 - RNA, 19 nt, synthetic construct
  misc_feature 1..19: note = siRNA sense sequence
  source 1..19: mol_type = other RNA
cttactcattgtgatgttt

SEQ ID NO: 19601 - RNA, 19 nt, synthetic construct
  misc_feature 1..19: note = siRNA antisense sequence
  source 1..19: mol_type = other RNA
aaacatcacaatgagtaag

SEQ ID NO: 19602 - RNA, 19 nt, synthetic construct
  misc_feature 1..19: note = siRNA sense sequence
  source 1..19: mol_type = other RNA
ttactcattgtgatgtttg

SEQ ID NO: 19603 - RNA, 19 nt, synthetic construct
  misc_feature 1..19: note = siRNA antisense sequence
  source 1..19: mol_type = other RNA
caaacatcacaatgagtaa

SEQ ID NO: 19604 - RNA, 19 nt, synthetic construct
  misc_feature 1..19: note = siRNA sense sequence
  source 1..19: mol_type = other RNA
tactcattgtgatgtttgt

SEQ ID NO: 19605 - RNA, 19 nt, synthetic construct
  misc_feature 1..19: note = siRNA antisense sequence
  source 1..19: mol_type = other RNA
acaaacatcacaatgagta

SEQ ID NO: 19606 - RNA, 19 nt, synthetic construct
  misc_feature 1..19: note = siRNA sense sequence
  source 1..19: mol_type = other RNA
actcattgtgatgtttgta

SEQ ID NO: 19607 - RNA, 19 nt, synthetic construct
  misc_feature 1..19: note = siRNA antisense sequence
  source 1..19: mol_type = other RNA
tacaaacatcacaatgagt

SEQ ID NO: 19608 - RNA, 19 nt, synthetic construct
  misc_feature 1..19: note = siRNA sense sequence
  source 1..19: mol_type = other RNA
ctcattgtgatgtttgtaa

SEQ ID NO: 19609 - RNA, 19 nt, synthetic construct
  misc_feature 1..19: note = siRNA antisense sequence
  source 1..19: mol_type = other RNA
ttacaaacatcacaatgag

SEQ ID NO: 19610 - RNA, 19 nt, synthetic construct
  misc_feature 1..19: note = siRNA sense sequence
  source 1..19: mol_type = other RNA
cattgtgatgtttgtaaag

SEQ ID NO: 19611 - RNA, 19 nt, synthetic construct
  misc_feature 1..19: note = siRNA antisense sequence
  source 1..19: mol_type = other RNA
ctttacaaacatcacaatg

SEQ ID NO: 19612 - RNA, 19 nt, synthetic construct
  misc_feature 1..19: note = siRNA sense sequence
  source 1..19: mol_type = other RNA
attgtgatgtttgtaaagg

SEQ ID NO: 19613 - RNA, 19 nt, synthetic construct
  misc_feature 1..19: note = siRNA antisense sequence
  source 1..19: mol_type = other RNA
cctttacaaacatcacaat

SEQ ID NO: 19614 - RNA, 19 nt, synthetic construct
  misc_feature 1..19: note = siRNA sense sequence
  source 1..19: mol_type = other RNA
ttgtgatgtttgtaaaggc

SEQ ID NO: 19615 - RNA, 19 nt, synthetic construct
  misc_feature 1..19: note = siRNA antisense sequence
  source 1..19: mol_type = other RNA
gcctttacaaacatcacaa

SEQ ID NO: 19616 - RNA, 19 nt, synthetic construct
  misc_feature 1..19: note = siRNA sense sequence
  source 1..19: mol_type = other RNA
tgtgatgtttgtaaaggca

SEQ ID NO: 19617 - RNA, 19 nt, synthetic construct
  misc_feature 1..19: note = siRNA antisense sequence
  source 1..19: mol_type = other RNA
tgcctttacaaacatcaca

SEQ ID NO: 19618 - RNA, 19 nt, synthetic construct
  misc_feature 1..19: note = siRNA sense sequence
  source 1..19: mol_type = other RNA
gtgatgtttgtaaaggcag

SEQ ID NO: 19619 - RNA, 19 nt, synthetic construct
  misc_feature 1..19: note = siRNA antisense sequence
  source 1..19: mol_type = other RNA
ctgcctttacaaacatcac

SEQ ID NO: 19620 - RNA, 19 nt, synthetic construct
  misc_feature 1..19: note = siRNA sense sequence
  source 1..19: mol_type = other RNA
tgatgtttgtaaaggcagc

SEQ ID NO: 19621 - RNA, 19 nt, synthetic construct
  misc_feature 1..19: note = siRNA antisense sequence
  source 1..19: mol_type = other RNA
gctgcctttacaaacatca

SEQ ID NO: 19622 - RNA, 19 nt, synthetic construct
  misc_feature 1..19: note = siRNA sense sequence
  source 1..19: mol_type = other RNA
gatgtttgtaaaggcagca

SEQ ID NO: 19623 - RNA, 19 nt, synthetic construct
  misc_feature 1..19: note = siRNA antisense sequence
  source 1..19: mol_type = other RNA
tgctgcctttacaaacatc

SEQ ID NO: 19624 - RNA, 19 nt, synthetic construct
  misc_feature 1..19: note = siRNA sense sequence
  source 1..19: mol_type = other RNA
tgtttgtaaaggcagcaat

SEQ ID NO: 19625 - RNA, 19 nt, synthetic construct
  misc_feature 1..19: note = siRNA antisense sequence
  source 1..19: mol_type = other RNA
attgctgcctttacaaaca

SEQ ID NO: 19626 - RNA, 19 nt, synthetic construct
  misc_feature 1..19: note = siRNA sense sequence
  source 1..19: mol_type = other RNA
gtttgtaaaggcagcaatg

SEQ ID NO: 19627 - RNA, 19 nt, synthetic construct
  misc_feature 1..19: note = siRNA antisense sequence
  source 1..19: mol_type = other RNA
cattgctgcctttacaaac

SEQ ID NO: 19628 - RNA, 19 nt, synthetic construct
  misc_feature 1..19: note = siRNA sense sequence
  source 1..19: mol_type = other RNA
tttgtaaaggcagcaatga

SEQ ID NO: 19629 - RNA, 19 nt, synthetic construct
  misc_feature 1..19: note = siRNA antisense sequence
  source 1..19: mol_type = other RNA
tcattgctgcctttacaaa

SEQ ID NO: 19630 - RNA, 19 nt, synthetic construct
  misc_feature 1..19: note = siRNA sense sequence
  source 1..19: mol_type = other RNA
ttgtaaaggcagcaatgaa

SEQ ID NO: 19631 - RNA, 19 nt, synthetic construct
  misc_feature 1..19: note = siRNA antisense sequence
  source 1..19: mol_type = other RNA
ttcattgctgcctttacaa

SEQ ID NO: 19632 - RNA, 19 nt, synthetic construct
  misc_feature 1..19: note = siRNA sense sequence
  source 1..19: mol_type = other RNA
aaaggcagcaatgaattca

SEQ ID NO: 19633 - RNA, 19 nt, synthetic construct
  misc_feature 1..19: note = siRNA antisense sequence
  source 1..19: mol_type = other RNA
tgaattcattgctgccttt

SEQ ID NO: 19634 - RNA, 19 nt, synthetic construct
  misc_feature 1..19: note = siRNA sense sequence
  source 1..19: mol_type = other RNA
gcagcaatgaattcacggg

SEQ ID NO: 19635 - RNA, 19 nt, synthetic construct
  misc_feature 1..19: note = siRNA antisense sequence
  source 1..19: mol_type = other RNA
cccgtgaattcattgctgc

SEQ ID NO: 19636 - RNA, 19 nt, synthetic construct
  misc_feature 1..19: note = siRNA sense sequence
  source 1..19: mol_type = other RNA
cagcaatgaattcacggga

SEQ ID NO: 19637 - RNA, 19 nt, synthetic construct
  misc_feature 1..19: note = siRNA antisense sequence
  source 1..19: mol_type = other RNA
tcccgtgaattcattgctg

SEQ ID NO: 19638 - RNA, 19 nt, synthetic construct
  misc_feature 1..19: note = siRNA sense sequence
  source 1..19: mol_type = other RNA
agcaatgaattcacgggat

SEQ ID NO: 19639 - RNA, 19 nt, synthetic construct
  misc_feature 1..19: note = siRNA antisense sequence
  source 1..19: mol_type = other RNA
atcccgtgaattcattgct

SEQ ID NO: 19640 - RNA, 19 nt, synthetic construct
  misc_feature 1..19: note = siRNA sense sequence
  source 1..19: mol_type = other RNA
gcaatgaattcacgggatt

SEQ ID NO: 19641 - RNA, 19 nt, synthetic construct
  misc_feature 1..19: note = siRNA antisense sequence
  source 1..19: mol_type = other RNA
aatcccgtgaattcattgc

SEQ ID NO: 19642 - RNA, 19 nt, synthetic construct
  misc_feature 1..19: note = siRNA sense sequence
  source 1..19: mol_type = other RNA
caatgaattcacgggattt

SEQ ID NO: 19643 - RNA, 19 nt, synthetic construct
  misc_feature 1..19: note = siRNA antisense sequence
  source 1..19: mol_type = other RNA
aaatcccgtgaattcattg

SEQ ID NO: 19644 - RNA, 19 nt, synthetic construct
  misc_feature 1..19: note = siRNA sense sequence
  source 1..19: mol_type = other RNA
aatgaattcacgggatttt

SEQ ID NO: 19645 - RNA, 19 nt, synthetic construct
  misc_feature 1..19: note = siRNA antisense sequence
  source 1..19: mol_type = other RNA
aaaatcccgtgaattcatt

SEQ ID NO: 19646 - RNA, 19 nt, synthetic construct
  misc_feature 1..19: note = siRNA sense sequence
  source 1..19: mol_type = other RNA
acacttacccagctatttt

SEQ ID NO: 19647 - RNA, 19 nt, synthetic construct
  misc_feature 1..19: note = siRNA antisense sequence
  source 1..19: mol_type = other RNA
aaaatagctgggtaagtgt

SEQ ID NO: 19648 - RNA, 19 nt, synthetic construct
  misc_feature 1..19: note = siRNA sense sequence
  source 1..19: mol_type = other RNA
cacttacccagctattttg

SEQ ID NO: 19649 - RNA, 19 nt, synthetic construct
  misc_feature 1..19: note = siRNA antisense sequence
  source 1..19: mol_type = other RNA
caaaatagctgggtaagtg

SEQ ID NO: 19650 - RNA, 19 nt, synthetic construct
  misc_feature 1..19: note = siRNA sense sequence
  source 1..19: mol_type = other RNA
acttacccagctattttga

SEQ ID NO: 19651 - RNA, 19 nt, synthetic construct
  misc_feature 1..19: note = siRNA antisense sequence
  source 1..19: mol_type = other RNA
tcaaaatagctgggtaagt

SEQ ID NO: 19652 - RNA, 19 nt, synthetic construct
  misc_feature 1..19: note = siRNA sense sequence
  source 1..19: mol_type = other RNA
cttacccagctattttgaa

SEQ ID NO: 19653 - RNA, 19 nt, synthetic construct
  misc_feature 1..19: note = siRNA antisense sequence
  source 1..19: mol_type = other RNA
ttcaaaatagctgggtaag

SEQ ID NO: 19654 - RNA, 19 nt, synthetic construct
  misc_feature 1..19: note = siRNA sense sequence
  source 1..19: mol_type = other RNA
ttacccagctattttgaag

SEQ ID NO: 19655 - RNA, 19 nt, synthetic construct
  misc_feature 1..19: note = siRNA antisense sequence
  source 1..19: mol_type = other RNA
cttcaaaatagctgggtaa

SEQ ID NO: 19656 - RNA, 19 nt, synthetic construct
  misc_feature 1..19: note = siRNA sense sequence
  source 1..19: mol_type = other RNA
tacccagctattttgaagc

SEQ ID NO: 19657 - RNA, 19 nt, synthetic construct
  misc_feature 1..19: note = siRNA antisense sequence
  source 1..19: mol_type = other RNA
gcttcaaaatagctgggta

SEQ ID NO: 19658 - RNA, 19 nt, synthetic construct
  misc_feature 1..19: note = siRNA sense sequence
  source 1..19: mol_type = other RNA
acccagctattttgaagca

SEQ ID NO: 19659 - RNA, 19 nt, synthetic construct
  misc_feature 1..19: note = siRNA antisense sequence
  source 1..19: mol_type = other RNA
tgcttcaaaatagctgggt

SEQ ID NO: 19660 - RNA, 19 nt, synthetic construct
  misc_feature 1..19: note = siRNA sense sequence
  source 1..19: mol_type = other RNA
cccagctattttgaagcat

SEQ ID NO: 19661 - RNA, 19 nt, synthetic construct
  misc_feature 1..19: note = siRNA antisense sequence
  source 1..19: mol_type = other RNA
atgcttcaaaatagctggg

SEQ ID NO: 19662 - RNA, 19 nt, synthetic construct
  misc_feature 1..19: note = siRNA sense sequence
  source 1..19: mol_type = other RNA
ccagctattttgaagcatg

SEQ ID NO: 19663 - RNA, 19 nt, synthetic construct
  misc_feature 1..19: note = siRNA antisense sequence
  source 1..19: mol_type = other RNA
catgcttcaaaatagctgg

SEQ ID NO: 19664 - RNA, 19 nt, synthetic construct
  misc_feature 1..19: note = siRNA sense sequence
  source 1..19: mol_type = other RNA
cagctattttgaagcatga

SEQ ID NO: 19665 - RNA, 19 nt, synthetic construct
  misc_feature 1..19: note = siRNA antisense sequence
  source 1..19: mol_type = other RNA
tcatgcttcaaaatagctg

SEQ ID NO: 19666 - RNA, 19 nt, synthetic construct
  misc_feature 1..19: note = siRNA sense sequence
  source 1..19: mol_type = other RNA
agctattttgaagcatgag

SEQ ID NO: 19667 - RNA, 19 nt, synthetic construct
  misc_feature 1..19: note = siRNA antisense sequence
  source 1..19: mol_type = other RNA
ctcatgcttcaaaatagct

SEQ ID NO: 19668 - RNA, 19 nt, synthetic construct
  misc_feature 1..19: note = siRNA sense sequence
  source 1..19: mol_type = other RNA
attttgaagcatgagctct

SEQ ID NO: 19669 - RNA, 19 nt, synthetic construct
  misc_feature 1..19: note = siRNA antisense sequence
  source 1..19: mol_type = other RNA
agagctcatgcttcaaaat

SEQ ID NO: 19670 - RNA, 19 nt, synthetic construct
  misc_feature 1..19: note = siRNA sense sequence
  source 1..19: mol_type = other RNA
ttttgaagcatgagctctt

SEQ ID NO: 19671 - RNA, 19 nt, synthetic construct
  misc_feature 1..19: note = siRNA antisense sequence
  source 1..19: mol_type = other RNA
aagagctcatgcttcaaaa

SEQ ID NO: 19672 - RNA, 19 nt, synthetic construct
  misc_feature 1..19: note = siRNA sense sequence
  source 1..19: mol_type = other RNA
gaagcatgagctcttgggc

SEQ ID NO: 19673 - RNA, 19 nt, synthetic construct
  misc_feature 1..19: note = siRNA antisense sequence
  source 1..19: mol_type = other RNA
gcccaagagctcatgcttc

SEQ ID NO: 19674 - RNA, 19 nt, synthetic construct
  misc_feature 1..19: note = siRNA sense sequence
  source 1..19: mol_type = other RNA
aagcatgagctcttgggcc

SEQ ID NO: 19675 - RNA, 19 nt, synthetic construct
  misc_feature 1..19: note = siRNA antisense sequence
  source 1..19: mol_type = other RNA
ggcccaagagctcatgctt

SEQ ID NO: 19676 - RNA, 19 nt, synthetic construct
  misc_feature 1..19: note = siRNA sense sequence
  source 1..19: mol_type = other RNA
gctcttgggccacagctta

SEQ ID NO: 19677 - RNA, 19 nt, synthetic construct
  misc_feature 1..19: note = siRNA antisense sequence
  source 1..19: mol_type = other RNA
taagctgtggcccaagagc

SEQ ID NO: 19678 - RNA, 19 nt, synthetic construct
  misc_feature 1..19: note = siRNA sense sequence
  source 1..19: mol_type = other RNA
ctcttgggccacagcttat

SEQ ID NO: 19679 - RNA, 19 nt, synthetic construct
  misc_feature 1..19: note = siRNA antisense sequence
  source 1..19: mol_type = other RNA
ataagctgtggcccaagag

SEQ ID NO: 19680 - RNA, 19 nt, synthetic construct
  misc_feature 1..19: note = siRNA sense sequence
  source 1..19: mol_type = other RNA
tcttgggccacagcttatc

SEQ ID NO: 19681 - RNA, 19 nt, synthetic construct
  misc_feature 1..19: note = siRNA antisense sequence
  source 1..19: mol_type = other RNA
gataagctgtggcccaaga

SEQ ID NO: 19682 - RNA, 19 nt, synthetic construct
  misc_feature 1..19: note = siRNA sense sequence
  source 1..19: mol_type = other RNA
cttgggccacagcttatca

SEQ ID NO: 19683 - RNA, 19 nt, synthetic construct
  misc_feature 1..19: note = siRNA antisense sequence
  source 1..19: mol_type = other RNA
tgataagctgtggcccaag

SEQ ID NO: 19684 - RNA, 19 nt, synthetic construct
  misc_feature 1..19: note = siRNA sense sequence
  source 1..19: mol_type = other RNA
ttgggccacagcttatcac

SEQ ID NO: 19685 - RNA, 19 nt, synthetic construct
  misc_feature 1..19: note = siRNA antisense sequence
  source 1..19: mol_type = other RNA
gtgataagctgtggcccaa

SEQ ID NO: 19686 - RNA, 19 nt, synthetic construct
  misc_feature 1..19: note = siRNA sense sequence
  source 1..19: mol_type = other RNA
tgggccacagcttatcact

SEQ ID NO: 19687 - RNA, 19 nt, synthetic construct
  misc_feature 1..19: note = siRNA antisense sequence
  source 1..19: mol_type = other RNA
agtgataagctgtggccca

SEQ ID NO: 19688 - RNA, 19 nt, synthetic construct
  misc_feature 1..19: note = siRNA sense sequence
  source 1..19: mol_type = other RNA
gggccacagcttatcactg

SEQ ID NO: 19689 - RNA, 19 nt, synthetic construct
  misc_feature 1..19: note = siRNA antisense sequence
  source 1..19: mol_type = other RNA
cagtgataagctgtggccc

SEQ ID NO: 19690 - RNA, 19 nt, synthetic construct
  misc_feature 1..19: note = siRNA sense sequence
  source 1..19: mol_type = other RNA
ggccacagcttatcactga

SEQ ID NO: 19691 - RNA, 19 nt, synthetic construct
  misc_feature 1..19: note = siRNA antisense sequence
  source 1..19: mol_type = other RNA
tcagtgataagctgtggcc

SEQ ID NO: 19692 - RNA, 19 nt, synthetic construct
  misc_feature 1..19: note = siRNA sense sequence
  source 1..19: mol_type = other RNA
gccacagcttatcactgat

SEQ ID NO: 19693 - RNA, 19 nt, synthetic construct
  misc_feature 1..19: note = siRNA antisense sequence
  source 1..19: mol_type = other RNA
atcagtgataagctgtggc

SEQ ID NO: 19694 - RNA, 19 nt, synthetic construct
  misc_feature 1..19: note = siRNA sense sequence
  source 1..19: mol_type = other RNA
ccacagcttatcactgatg

SEQ ID NO: 19695 - RNA, 19 nt, synthetic construct
  misc_feature 1..19: note = siRNA antisense sequence
  source 1..19: mol_type = other RNA
catcagtgataagctgtgg

SEQ ID NO: 19696 - RNA, 19 nt, synthetic construct
  misc_feature 1..19: note = siRNA sense sequence
  source 1..19: mol_type = other RNA
cacagcttatcactgatgt

SEQ ID NO: 19697 - RNA, 19 nt, synthetic construct
  misc_feature 1..19: note = siRNA antisense sequence
  source 1..19: mol_type = other RNA
acatcagtgataagctgtg

SEQ ID NO: 19698 - RNA, 19 nt, synthetic construct
  misc_feature 1..19: note = siRNA sense sequence
  source 1..19: mol_type = other RNA
acagcttatcactgatgtt

SEQ ID NO: 19699 - RNA, 19 nt, synthetic construct
  misc_feature 1..19: note = siRNA antisense sequence
  source 1..19: mol_type = other RNA
aacatcagtgataagctgt

SEQ ID NO: 19700 - RNA, 19 nt, synthetic construct
  misc_feature 1..19: note = siRNA sense sequence
  source 1..19: mol_type = other RNA
cagcttatcactgatgttc

SEQ ID NO: 19701 - RNA, 19 nt, synthetic construct
  misc_feature 1..19: note = siRNA antisense sequence
  source 1..19: mol_type = other RNA
gaacatcagtgataagctg

SEQ ID NO: 19702 - RNA, 19 nt, synthetic construct
  misc_feature 1..19: note = siRNA sense sequence
  source 1..19: mol_type = other RNA
agcttatcactgatgttct

SEQ ID NO: 19703 - RNA, 19 nt, synthetic construct
  misc_feature 1..19: note = siRNA antisense sequence
  source 1..19: mol_type = other RNA
agaacatcagtgataagct

SEQ ID NO: 19704 - RNA, 19 nt, synthetic construct
  misc_feature 1..19: note = siRNA sense sequence
  source 1..19: mol_type = other RNA
gcttatcactgatgttctg

SEQ ID NO: 19705 - RNA, 19 nt, synthetic construct
  misc_feature 1..19: note = siRNA antisense sequence
  source 1..19: mol_type = other RNA
cagaacatcagtgataagc

SEQ ID NO: 19706 - RNA, 19 nt, synthetic construct
  misc_feature 1..19: note = siRNA sense sequence
  source 1..19: mol_type = other RNA
cttatcactgatgttctga

SEQ ID NO: 19707 - RNA, 19 nt, synthetic construct
  misc_feature 1..19: note = siRNA antisense sequence
  source 1..19: mol_type = other RNA
tcagaacatcagtgataag

SEQ ID NO: 19708 - RNA, 19 nt, synthetic construct
  misc_feature 1..19: note = siRNA sense sequence
  source 1..19: mol_type = other RNA
ttatcactgatgttctgac

SEQ ID NO: 19709 - RNA, 19 nt, synthetic construct
  misc_feature 1..19: note = siRNA antisense sequence
  source 1..19: mol_type = other RNA
gtcagaacatcagtgataa

SEQ ID NO: 19710 - RNA, 19 nt, synthetic construct
  misc_feature 1..19: note = siRNA sense sequence
  source 1..19: mol_type = other RNA
tatcactgatgttctgact

SEQ ID NO: 19711 - RNA, 19 nt, synthetic construct
  misc_feature 1..19: note = siRNA antisense sequence
  source 1..19: mol_type = other RNA
agtcagaacatcagtgata

SEQ ID NO: 19712 - RNA, 19 nt, synthetic construct
  misc_feature 1..19: note = siRNA sense sequence
  source 1..19: mol_type = other RNA
atcactgatgttctgactt

SEQ ID NO: 19713 - RNA, 19 nt, synthetic construct
  misc_feature 1..19: note = siRNA antisense sequence
  source 1..19: mol_type = other RNA
aagtcagaacatcagtgat

SEQ ID NO: 19714 - RNA, 19 nt, synthetic construct
  misc_feature 1..19: note = siRNA sense sequence
  source 1..19: mol_type = other RNA
tccacttccaacccaataa

SEQ ID NO: 19715 - RNA, 19 nt, synthetic construct
  misc_feature 1..19: note = siRNA antisense sequence
  source 1..19: mol_type = other RNA
ttattgggttggaagtgga

SEQ ID NO: 19716 - RNA, 19 nt, synthetic construct
  misc_feature 1..19: note = siRNA sense sequence
  source 1..19: mol_type = other RNA
ccacttccaacccaataaa

SEQ ID NO: 19717 - RNA, 19 nt, synthetic construct
  misc_feature 1..19: note = siRNA antisense sequence
  source 1..19: mol_type = other RNA
tttattgggttggaagtgg

SEQ ID NO: 19718 - RNA, 19 nt, synthetic construct
  misc_feature 1..19: note = siRNA sense sequence
  source 1..19: mol_type = other RNA
aacttcccactagatttag

SEQ ID NO: 19719 - RNA, 19 nt, synthetic construct
  misc_feature 1..19: note = siRNA antisense sequence
  source 1..19: mol_type = other RNA
ctaaatctagtgggaagtt

SEQ ID NO: 19720 - RNA, 19 nt, synthetic construct
  misc_feature 1..19: note = siRNA sense sequence
  source 1..19: mol_type = other RNA
acttcccactagatttaga

SEQ ID NO: 19721 - RNA, 19 nt, synthetic construct
  misc_feature 1..19: note = siRNA antisense sequence
  source 1..19: mol_type = other RNA
tctaaatctagtgggaagt

SEQ ID NO: 19722 - RNA, 19 nt, synthetic construct
  misc_feature 1..19: note = siRNA sense sequence
  source 1..19: mol_type = other RNA
cttcccactagatttagaa

SEQ ID NO: 19723 - RNA, 19 nt, synthetic construct
  misc_feature 1..19: note = siRNA antisense sequence
  source 1..19: mol_type = other RNA
ttctaaatctagtgggaag

SEQ ID NO: 19724 - RNA, 19 nt, synthetic construct
  misc_feature 1..19: note = siRNA sense sequence
  source 1..19: mol_type = other RNA
aacttgctgaatttccaca

SEQ ID NO: 19725 - RNA, 19 nt, synthetic construct
  misc_feature 1..19: note = siRNA antisense sequence
  source 1..19: mol_type = other RNA
tgtggaaattcagcaagtt

SEQ ID NO: 19726 - RNA, 19 nt, synthetic construct
  misc_feature 1..19: note = siRNA sense sequence
  source 1..19: mol_type = other RNA
ctgaatttccacatcttaa

SEQ ID NO: 19727 - RNA, 19 nt, synthetic construct
  misc_feature 1..19: note = siRNA antisense sequence
  source 1..19: mol_type = other RNA
ttaagatgtggaaattcag

SEQ ID NO: 19728 - RNA, 19 nt, synthetic construct
  misc_feature 1..19: note = siRNA sense sequence
  source 1..19: mol_type = other RNA
tagtagaataaagtagctc

SEQ ID NO: 19729 - RNA, 19 nt, synthetic construct
  misc_feature 1..19: note = siRNA antisense sequence
  source 1..19: mol_type = other RNA
gagctactttattctacta

SEQ ID NO: 19730 - RNA, 19 nt, synthetic construct
  misc_feature 1..19: note = siRNA sense sequence
  source 1..19: mol_type = other RNA
agtagaataaagtagctca

SEQ ID NO: 19731 - RNA, 19 nt, synthetic construct
  misc_feature 1..19: note = siRNA antisense sequence
  source 1..19: mol_type = other RNA
tgagctactttattctact

SEQ ID NO: 19732 - RNA, 19 nt, synthetic construct
  misc_feature 1..19: note = siRNA sense sequence
  source 1..19: mol_type = other RNA
gtagaataaagtagctcat

SEQ ID NO: 19733 - RNA, 19 nt, synthetic construct
  misc_feature 1..19: note = siRNA antisense sequence
  source 1..19: mol_type = other RNA
atgagctactttattctac

SEQ ID NO: 19734 - RNA, 19 nt, synthetic construct
  misc_feature 1..19: note = siRNA sense sequence
  source 1..19: mol_type = other RNA
tagaataaagtagctcatg

SEQ ID NO: 19735 - RNA, 19 nt, synthetic construct
  misc_feature 1..19: note = siRNA antisense sequence
  source 1..19: mol_type = other RNA
catgagctactttattcta

SEQ ID NO: 19736 - RNA, 19 nt, synthetic construct
  misc_feature 1..19: note = siRNA sense sequence
  source 1..19: mol_type = other RNA
agaataaagtagctcatgt

SEQ ID NO: 19737 - RNA, 19 nt, synthetic construct
  misc_feature 1..19: note = siRNA antisense sequence
  source 1..19: mol_type = other RNA
acatgagctactttattct

SEQ ID NO: 19738 - RNA, 19 nt, synthetic construct
  misc_feature 1..19: note = siRNA sense sequence
  source 1..19: mol_type = other RNA
ggactaaaatgctattctt

SEQ ID NO: 19739 - RNA, 19 nt, synthetic construct
  misc_feature 1..19: note = siRNA antisense sequence
  source 1..19: mol_type = other RNA
aagaatagcattttagtcc

SEQ ID NO: 19740 - RNA, 19 nt, synthetic construct
  misc_feature 1..19: note = siRNA sense sequence
  source 1..19: mol_type = other RNA
aatgctattctttacctac

SEQ ID NO: 19741 - RNA, 19 nt, synthetic construct
  misc_feature 1..19: note = siRNA antisense sequence
  source 1..19: mol_type = other RNA
gtaggtaaagaatagcatt

SEQ ID NO: 19742 - RNA, 19 nt, synthetic construct
  misc_feature 1..19: note = siRNA sense sequence
  source 1..19: mol_type = other RNA
ctattctttacctacactt

SEQ ID NO: 19743 - RNA, 19 nt, synthetic construct
  misc_feature 1..19: note = siRNA antisense sequence
  source 1..19: mol_type = other RNA
aagtgtaggtaaagaatag

SEQ ID NO: 19744 - RNA, 19 nt, synthetic construct
  misc_feature 1..19: note = siRNA sense sequence
  source 1..19: mol_type = other RNA
tattctttacctacacttc

SEQ ID NO: 19745 - RNA, 19 nt, synthetic construct
  misc_feature 1..19: note = siRNA antisense sequence
  source 1..19: mol_type = other RNA
gaagtgtaggtaaagaata

SEQ ID NO: 19746 - RNA, 19 nt, synthetic construct
  misc_feature 1..19: note = siRNA sense sequence
  source 1..19: mol_type = other RNA
tttacctacacttctcttc

SEQ ID NO: 19747 - RNA, 19 nt, synthetic construct
  misc_feature 1..19: note = siRNA antisense sequence
  source 1..19: mol_type = other RNA
gaagagaagtgtaggtaaa

SEQ ID NO: 19748 - RNA, 19 nt, synthetic construct
  misc_feature 1..19: note = siRNA sense sequence
  source 1..19: mol_type = other RNA
acctacacttctcttctgt

SEQ ID NO: 19749 - RNA, 19 nt, synthetic construct
  misc_feature 1..19: note = siRNA antisense sequence
  source 1..19: mol_type = other RNA
acagaagagaagtgtaggt

SEQ ID NO: 19750 - RNA, 19 nt, synthetic construct
  misc_feature 1..19: note = siRNA sense sequence
  source 1..19: mol_type = other RNA
cctacacttctcttctgtt

SEQ ID NO: 19751 - RNA, 19 nt, synthetic construct
  misc_feature 1..19: note = siRNA antisense sequence
  source 1..19: mol_type = other RNA
aacagaagagaagtgtagg

SEQ ID NO: 19752 - RNA, 19 nt, synthetic construct
  misc_feature 1..19: note = siRNA sense sequence
  source 1..19: mol_type = other RNA
ctacacttctcttctgttg

SEQ ID NO: 19753 - RNA, 19 nt, synthetic construct
  misc_feature 1..19: note = siRNA antisense sequence
  source 1..19: mol_type = other RNA
caacagaagagaagtgtag

SEQ ID NO: 19754 - RNA, 19 nt, synthetic construct
  misc_feature 1..19: note = siRNA sense sequence
  source 1..19: mol_type = other RNA
tacacttctcttctgttgt

SEQ ID NO: 19755 - RNA, 19 nt, synthetic construct
  misc_feature 1..19: note = siRNA antisense sequence
  source 1..19: mol_type = other RNA
acaacagaagagaagtgta

SEQ ID NO: 19756 - RNA, 19 nt, synthetic construct
  misc_feature 1..19: note = siRNA sense sequence
  source 1..19: mol_type = other RNA
acacttctcttctgttgtg

SEQ ID NO: 19757 - RNA, 19 nt, synthetic construct
  misc_feature 1..19: note = siRNA antisense sequence
  source 1..19: mol_type = other RNA
cacaacagaagagaagtgt

SEQ ID NO: 19758 - RNA, 19 nt, synthetic construct
  misc_feature 1..19: note = siRNA sense sequence
  source 1..19: mol_type = other RNA
cacttctcttctgttgtgt

SEQ ID NO: 19759 - RNA, 19 nt, synthetic construct
  misc_feature 1..19: note = siRNA antisense sequence
  source 1..19: mol_type = other RNA
acacaacagaagagaagtg

SEQ ID NO: 19760 - RNA, 19 nt, synthetic construct
  misc_feature 1..19: note = siRNA sense sequence
  source 1..19: mol_type = other RNA
acttctcttctgttgtgtg

SEQ ID NO: 19761 - RNA, 19 nt, synthetic construct
  misc_feature 1..19: note = siRNA antisense sequence
  source 1..19: mol_type = other RNA
cacacaacagaagagaagt

SEQ ID NO: 19762 - RNA, 19 nt, synthetic construct
  misc_feature 1..19: note = siRNA sense sequence
  source 1..19: mol_type = other RNA
cttctcttctgttgtgtga

SEQ ID NO: 19763 - RNA, 19 nt, synthetic construct
  misc_feature 1..19: note = siRNA antisense sequence
  source 1..19: mol_type = other RNA
tcacacaacagaagagaag

SEQ ID NO: 19764 - RNA, 19 nt, synthetic construct
  misc_feature 1..19: note = siRNA sense sequence
  source 1..19: mol_type = other RNA
ttctcttctgttgtgtgaa

SEQ ID NO: 19765 - RNA, 19 nt, synthetic construct
  misc_feature 1..19: note = siRNA antisense sequence
  source 1..19: mol_type = other RNA
ttcacacaacagaagagaa

SEQ ID NO: 19766 - RNA, 19 nt, synthetic construct
  misc_feature 1..19: note = siRNA sense sequence
  source 1..19: mol_type = other RNA
tagtgtactcaaattcatg

SEQ ID NO: 19767 - RNA, 19 nt, synthetic construct
  misc_feature 1..19: note = siRNA antisense sequence
  source 1..19: mol_type = other RNA
catgaatttgagtacacta

SEQ ID NO: 19768 - RNA, 19 nt, synthetic construct
  misc_feature 1..19: note = siRNA sense sequence
  source 1..19: mol_type = other RNA
agtgtactcaaattcatgt

SEQ ID NO: 19769 - RNA, 19 nt, synthetic construct
  misc_feature 1..19: note = siRNA antisense sequence
  source 1..19: mol_type = other RNA
acatgaatttgagtacact

SEQ ID NO: 19770 - RNA, 19 nt, synthetic construct
  misc_feature 1..19: note = siRNA sense sequence
  source 1..19: mol_type = other RNA
gtgtactcaaattcatgtt

SEQ ID NO: 19771 - RNA, 19 nt, synthetic construct
  misc_feature 1..19: note = siRNA antisense sequence
  source 1..19: mol_type = other RNA
aacatgaatttgagtacac

SEQ ID NO: 19772 - RNA, 19 nt, synthetic construct
  misc_feature 1..19: note = siRNA sense sequence
  source 1..19: mol_type = other RNA
tgttgccacagtgctaaag

SEQ ID NO: 19773 - RNA, 19 nt, synthetic construct
  misc_feature 1..19: note = siRNA antisense sequence
  source 1..19: mol_type = other RNA
ctttagcactgtggcaaca

SEQ ID NO: 19774 - RNA, 19 nt, synthetic construct
  misc_feature 1..19: note = siRNA sense sequence
  source 1..19: mol_type = other RNA
gttgccacagtgctaaagt

SEQ ID NO: 19775 - RNA, 19 nt, synthetic construct
  misc_feature 1..19: note = siRNA antisense sequence
  source 1..19: mol_type = other RNA
actttagcactgtggcaac

SEQ ID NO: 19776 - RNA, 19 nt, synthetic construct
  misc_feature 1..19: note = siRNA sense sequence
  source 1..19: mol_type = other RNA
ttgccacagtgctaaagtc

SEQ ID NO: 19777 - RNA, 19 nt, synthetic construct
  misc_feature 1..19: note = siRNA antisense sequence
  source 1..19: mol_type = other RNA
gactttagcactgtggcaa

SEQ ID NO: 19778 - RNA, 19 nt, synthetic construct
  misc_feature 1..19: note = siRNA sense sequence
  source 1..19: mol_type = other RNA
tgccacagtgctaaagtca

SEQ ID NO: 19779 - RNA, 19 nt, synthetic construct
  misc_feature 1..19: note = siRNA antisense sequence
  source 1..19: mol_type = other RNA
tgactttagcactgtggca

SEQ ID NO: 19780 - RNA, 19 nt, synthetic construct
  misc_feature 1..19: note = siRNA sense sequence
  source 1..19: mol_type = other RNA
acagtgctaaagtcagaat

SEQ ID NO: 19781 - RNA, 19 nt, synthetic construct
  misc_feature 1..19: note = siRNA antisense sequence
  source 1..19: mol_type = other RNA
attctgactttagcactgt

SEQ ID NO: 19782 - RNA, 19 nt, synthetic construct
  misc_feature 1..19: note = siRNA sense sequence
  source 1..19: mol_type = other RNA
cagtgctaaagtcagaata

SEQ ID NO: 19783 - RNA, 19 nt, synthetic construct
  misc_feature 1..19: note = siRNA antisense sequence
  source 1..19: mol_type = other RNA
tattctgactttagcactg

SEQ ID NO: 19784 - RNA, 19 nt, synthetic construct
  misc_feature 1..19: note = siRNA sense sequence
  source 1..19: mol_type = other RNA
gctaaagtcagaatagatt

SEQ ID NO: 19785 - RNA, 19 nt, synthetic construct
  misc_feature 1..19: note = siRNA antisense sequence
  source 1..19: mol_type = other RNA
aatctattctgactttagc

SEQ ID NO: 19786 - RNA, 19 nt, synthetic construct
  misc_feature 1..19: note = siRNA sense sequence
  source 1..19: mol_type = other RNA
ctaaagtcagaatagattg

SEQ ID NO: 19787 - RNA, 19 nt, synthetic construct
  misc_feature 1..19: note = siRNA antisense sequence
  source 1..19: mol_type = other RNA
caatctattctgactttag

SEQ ID NO: 19788 - RNA, 19 nt, synthetic construct
  misc_feature 1..19: note = siRNA sense sequence
  source 1..19: mol_type = other RNA
taaagtcagaatagattgc

SEQ ID NO: 19789 - RNA, 19 nt, synthetic construct
  misc_feature 1..19: note = siRNA antisense sequence
  source 1..19: mol_type = other RNA
gcaatctattctgacttta

SEQ ID NO: 19790 - RNA, 19 nt, synthetic construct
  misc_feature 1..19: note = siRNA sense sequence
  source 1..19: mol_type = other RNA
aaagtcagaatagattgcc

SEQ ID NO: 19791 - RNA, 19 nt, synthetic construct
  misc_feature 1..19: note = siRNA antisense sequence
  source 1..19: mol_type = other RNA
ggcaatctattctgacttt

SEQ ID NO: 19792 - RNA, 19 nt, synthetic construct
  misc_feature 1..19: note = siRNA sense sequence
  source 1..19: mol_type = other RNA
aagtcagaatagattgcct

SEQ ID NO: 19793 - RNA, 19 nt, synthetic construct
  misc_feature 1..19: note = siRNA antisense sequence
  source 1..19: mol_type = other RNA
aggcaatctattctgactt

SEQ ID NO: 19794 - RNA, 19 nt, synthetic construct
  misc_feature 1..19: note = siRNA sense sequence
  source 1..19: mol_type = other RNA
agtcagaatagattgccta

SEQ ID NO: 19795 - RNA, 19 nt, synthetic construct
  misc_feature 1..19: note = siRNA antisense sequence
  source 1..19: mol_type = other RNA
taggcaatctattctgact

SEQ ID NO: 19796 - RNA, 19 nt, synthetic construct
  misc_feature 1..19: note = siRNA sense sequence
  source 1..19: mol_type = other RNA
gattgcctattcagagcag

SEQ ID NO: 19797 - RNA, 19 nt, synthetic construct
  misc_feature 1..19: note = siRNA antisense sequence
  source 1..19: mol_type = other RNA
ctgctctgaataggcaatc

SEQ ID NO: 19798 - RNA, 19 nt, synthetic construct
  misc_feature 1..19: note = siRNA sense sequence
  source 1..19: mol_type = other RNA
attgcctattcagagcagt

SEQ ID NO: 19799 - RNA, 19 nt, synthetic construct
  misc_feature 1..19: note = siRNA antisense sequence
  source 1..19: mol_type = other RNA
actgctctgaataggcaat

SEQ ID NO: 19800 - RNA, 19 nt, synthetic construct
  misc_feature 1..19: note = siRNA sense sequence
  source 1..19: mol_type = other RNA
ttgcctattcagagcagtc

SEQ ID NO: 19801 - RNA, 19 nt, synthetic construct
  misc_feature 1..19: note = siRNA antisense sequence
  source 1..19: mol_type = other RNA
gactgctctgaataggcaa

SEQ ID NO: 19802 - RNA, 19 nt, synthetic construct
  misc_feature 1..19: note = siRNA sense sequence
  source 1..19: mol_type = other RNA
aattgtattcgccctcaaa

SEQ ID NO: 19803 - RNA, 19 nt, synthetic construct
  misc_feature 1..19: note = siRNA antisense sequence
  source 1..19: mol_type = other RNA
tttgagggcgaatacaatt

SEQ ID NO: 19804 - RNA, 19 nt, synthetic construct
  misc_feature 1..19: note = siRNA sense sequence
  source 1..19: mol_type = other RNA
attgtattcgccctcaaag

SEQ ID NO: 19805 - RNA, 19 nt, synthetic construct
  misc_feature 1..19: note = siRNA antisense sequence
  source 1..19: mol_type = other RNA
ctttgagggcgaatacaat

SEQ ID NO: 19806 - RNA, 19 nt, synthetic construct
  misc_feature 1..19: note = siRNA sense sequence
  source 1..19: mol_type = other RNA
ttgtattcgccctcaaagc

SEQ ID NO: 19807 - RNA, 19 nt, synthetic construct
  misc_feature 1..19: note = siRNA antisense sequence
  source 1..19: mol_type = other RNA
gctttgagggcgaatacaa

SEQ ID NO: 19808 - RNA, 19 nt, synthetic construct
  misc_feature 1..19: note = siRNA sense sequence
  source 1..19: mol_type = other RNA
tgtattcgccctcaaagca

SEQ ID NO: 19809 - RNA, 19 nt, synthetic construct
  misc_feature 1..19: note = siRNA antisense sequence
  source 1..19: mol_type = other RNA
tgctttgagggcgaataca

SEQ ID NO: 19810 - RNA, 19 nt, synthetic construct
  misc_feature 1..19: note = siRNA sense sequence
  source 1..19: mol_type = other RNA
gtattcgccctcaaagcaa

SEQ ID NO: 19811 - RNA, 19 nt, synthetic construct
  misc_feature 1..19: note = siRNA antisense sequence
  source 1..19: mol_type = other RNA
ttgctttgagggcgaatac

SEQ ID NO: 19812 - RNA, 19 nt, synthetic construct
  misc_feature 1..19: note = siRNA sense sequence
  source 1..19: mol_type = other RNA
tattcgccctcaaagcaag

SEQ ID NO: 19813 - RNA, 19 nt, synthetic construct
  misc_feature 1..19: note = siRNA antisense sequence
  source 1..19: mol_type = other RNA
cttgctttgagggcgaata

SEQ ID NO: 19814 - RNA, 19 nt, synthetic construct
  misc_feature 1..19: note = siRNA sense sequence
  source 1..19: mol_type = other RNA
attcgccctcaaagcaagt

SEQ ID NO: 19815 - RNA, 19 nt, synthetic construct
  misc_feature 1..19: note = siRNA antisense sequence
  source 1..19: mol_type = other RNA
acttgctttgagggcgaat

SEQ ID NO: 19816 - RNA, 19 nt, synthetic construct
  misc_feature 1..19: note = siRNA sense sequence
  source 1..19: mol_type = other RNA
ttcgccctcaaagcaagta

SEQ ID NO: 19817 - RNA, 19 nt, synthetic construct
  misc_feature 1..19: note = siRNA antisense sequence
  source 1..19: mol_type = other RNA
tacttgctttgagggcgaa

SEQ ID NO: 19818 - RNA, 19 nt, synthetic construct
  misc_feature 1..19: note = siRNA sense sequence
  source 1..19: mol_type = other RNA
tcgccctcaaagcaagtac

SEQ ID NO: 19819 - RNA, 19 nt, synthetic construct
  misc_feature 1..19: note = siRNA antisense sequence
  source 1..19: mol_type = other RNA
gtacttgctttgagggcga

SEQ ID NO: 19820 - RNA, 19 nt, synthetic construct
  misc_feature 1..19: note = siRNA sense sequence
  source 1..19: mol_type = other RNA
cgccctcaaagcaagtaca

SEQ ID NO: 19821 - RNA, 19 nt, synthetic construct
  misc_feature 1..19: note = siRNA antisense sequence
  source 1..19: mol_type = other RNA
tgtacttgctttgagggcg

SEQ ID NO: 19822 - RNA, 19 nt, synthetic construct
  misc_feature 1..19: note = siRNA sense sequence
  source 1..19: mol_type = other RNA
gccctcaaagcaagtacag

SEQ ID NO: 19823 - RNA, 19 nt, synthetic construct
  misc_feature 1..19: note = siRNA antisense sequence
  source 1..19: mol_type = other RNA
ctgtacttgctttgagggc

SEQ ID NO: 19824 - RNA, 19 nt, synthetic construct
  misc_feature 1..19: note = siRNA sense sequence
  source 1..19: mol_type = other RNA
ccctcaaagcaagtacagt

SEQ ID NO: 19825 - RNA, 19 nt, synthetic construct
  misc_feature 1..19: note = siRNA antisense sequence
  source 1..19: mol_type = other RNA
actgtacttgctttgaggg

SEQ ID NO: 19826 - RNA, 19 nt, synthetic construct
  misc_feature 1..19: note = siRNA sense sequence
  source 1..19: mol_type = other RNA
cctcaaagcaagtacagta

SEQ ID NO: 19827 - RNA, 19 nt, synthetic construct
  misc_feature 1..19: note = siRNA antisense sequence
  source 1..19: mol_type = other RNA
tactgtacttgctttgagg

SEQ ID NO: 19828 - RNA, 19 nt, synthetic construct
  misc_feature 1..19: note = siRNA sense sequence
  source 1..19: mol_type = other RNA
ctcaaagcaagtacagtag

SEQ ID NO: 19829 - RNA, 19 nt, synthetic construct
  misc_feature 1..19: note = siRNA antisense sequence
  source 1..19: mol_type = other RNA
ctactgtacttgctttgag

SEQ ID NO: 19830 - RNA, 19 nt, synthetic construct
  misc_feature 1..19: note = siRNA sense sequence
  source 1..19: mol_type = other RNA
tcaaagcaagtacagtaga

SEQ ID NO: 19831 - RNA, 19 nt, synthetic construct
  misc_feature 1..19: note = siRNA antisense sequence
  source 1..19: mol_type = other RNA
tctactgtacttgctttga

SEQ ID NO: 19832 - RNA, 19 nt, synthetic construct
  misc_feature 1..19: note = siRNA sense sequence
  source 1..19: mol_type = other RNA
caaagcaagtacagtagag

SEQ ID NO: 19833 - RNA, 19 nt, synthetic construct
  misc_feature 1..19: note = siRNA antisense sequence
  source 1..19: mol_type = other RNA
ctctactgtacttgctttg

SEQ ID NO: 19834 - RNA, 19 nt, synthetic construct
  misc_feature 1..19: note = siRNA sense sequence
  source 1..19: mol_type = other RNA
aaagcaagtacagtagagt

SEQ ID NO: 19835 - RNA, 19 nt, synthetic construct
  misc_feature 1..19: note = siRNA antisense sequence
  source 1..19: mol_type = other RNA
actctactgtacttgcttt

SEQ ID NO: 19836 - RNA, 19 nt, synthetic construct
  misc_feature 1..19: note = siRNA sense sequence
  source 1..19: mol_type = other RNA
aagcaagtacagtagagta

SEQ ID NO: 19837 - RNA, 19 nt, synthetic construct
  misc_feature 1..19: note = siRNA antisense sequence
  source 1..19: mol_type = other RNA
tactctactgtacttgctt

SEQ ID NO: 19838 - RNA, 19 nt, synthetic construct
  misc_feature 1..19: note = siRNA sense sequence
  source 1..19: mol_type = other RNA
agcaagtacagtagagtat

SEQ ID NO: 19839 - RNA, 19 nt, synthetic construct
  misc_feature 1..19: note = siRNA antisense sequence
  source 1..19: mol_type = other RNA
atactctactgtacttgct

SEQ ID NO: 19840 - RNA, 19 nt, synthetic construct
  misc_feature 1..19: note = siRNA sense sequence
  source 1..19: mol_type = other RNA
gcaagtacagtagagtatc

SEQ ID NO: 19841 - RNA, 19 nt, synthetic construct
  misc_feature 1..19: note = siRNA antisense sequence
  source 1..19: mol_type = other RNA
gatactctactgtacttgc

SEQ ID NO: 19842 - RNA, 19 nt, synthetic construct
  misc_feature 1..19: note = siRNA sense sequence
  source 1..19: mol_type = other RNA
caagtacagtagagtatca

SEQ ID NO: 19843 - RNA, 19 nt, synthetic construct
  misc_feature 1..19: note = siRNA antisense sequence
  source 1..19: mol_type = other RNA
tgatactctactgtacttg

SEQ ID NO: 19844 - RNA, 19 nt, synthetic construct
  misc_feature 1..19: note = siRNA sense sequence
  source 1..19: mol_type = other RNA
aagtacagtagagtatcaa

SEQ ID NO: 19845 - RNA, 19 nt, synthetic construct
  misc_feature 1..19: note = siRNA antisense sequence
  source 1..19: mol_type = other RNA
ttgatactctactgtactt

SEQ ID NO: 19846 - RNA, 19 nt, synthetic construct
  misc_feature 1..19: note = siRNA sense sequence
  source 1..19: mol_type = other RNA
agtacagtagagtatcaag

SEQ ID NO: 19847 - RNA, 19 nt, synthetic construct
  misc_feature 1..19: note = siRNA antisense sequence
  source 1..19: mol_type = other RNA
cttgatactctactgtact

SEQ ID NO: 19848 - RNA, 19 nt, synthetic construct
  misc_feature 1..19: note = siRNA sense sequence
  source 1..19: mol_type = other RNA
gtacagtagagtatcaaga

SEQ ID NO: 19849 - RNA, 19 nt, synthetic construct
  misc_feature 1..19: note = siRNA antisense sequence
  source 1..19: mol_type = other RNA
tcttgatactctactgtac

SEQ ID NO: 19850 - RNA, 19 nt, synthetic construct
  misc_feature 1..19: note = siRNA sense sequence
  source 1..19: mol_type = other RNA
tacagtagagtatcaagag

SEQ ID NO: 19851 - RNA, 19 nt, synthetic construct
  misc_feature 1..19: note = siRNA antisense sequence
  source 1..19: mol_type = other RNA
ctcttgatactctactgta

SEQ ID NO: 19852 - RNA, 19 nt, synthetic construct
  misc_feature 1..19: note = siRNA sense sequence
  source 1..19: mol_type = other RNA
gactgcatatatttctatc

SEQ ID NO: 19853 - RNA, 19 nt, synthetic construct
  misc_feature 1..19: note = siRNA antisense sequence
  source 1..19: mol_type = other RNA
gatagaaatatatgcagtc

SEQ ID NO: 19854 - RNA, 19 nt, synthetic construct
  misc_feature 1..19: note = siRNA sense sequence
  source 1..19: mol_type = other RNA
tcagctcctttattatgcc

SEQ ID NO: 19855 - RNA, 19 nt, synthetic construct
  misc_feature 1..19: note = siRNA antisense sequence
  source 1..19: mol_type = other RNA
ggcataataaaggagctga

SEQ ID NO: 19856 - RNA, 19 nt, synthetic construct
  misc_feature 1..19: note = siRNA sense sequence
  source 1..19: mol_type = other RNA
cagctcctttattatgcca

SEQ ID NO: 19857 - RNA, 19 nt, synthetic construct
  misc_feature 1..19: note = siRNA antisense sequence
  source 1..19: mol_type = other RNA
tggcataataaaggagctg

SEQ ID NO: 19858 - RNA, 19 nt, synthetic construct
  misc_feature 1..19: note = siRNA sense sequence
  source 1..19: mol_type = other RNA
agctcctttattatgccag

SEQ ID NO: 19859 - RNA, 19 nt, synthetic construct
  misc_feature 1..19: note = siRNA antisense sequence
  source 1..19: mol_type = other RNA
ctggcataataaaggagct

SEQ ID NO: 19860 - RNA, 19 nt, synthetic construct
  misc_feature 1..19: note = siRNA sense sequence
  source 1..19: mol_type = other RNA
gctcctttattatgccagc

SEQ ID NO: 19861 - RNA, 19 nt, synthetic construct
  misc_feature 1..19: note = siRNA antisense sequence
  source 1..19: mol_type = other RNA
gctggcataataaaggagc

SEQ ID NO: 19862 - RNA, 19 nt, synthetic construct
  misc_feature 1..19: note = siRNA sense sequence
  source 1..19: mol_type = other RNA
tcctttattatgccagcta

SEQ ID NO: 19863 - RNA, 19 nt, synthetic construct
  misc_feature 1..19: note = siRNA antisense sequence
  source 1..19: mol_type = other RNA
tagctggcataataaagga

SEQ ID NO: 19864 - RNA, 19 nt, synthetic construct
  misc_feature 1..19: note = siRNA sense sequence
  source 1..19: mol_type = other RNA
cctttattatgccagctac

SEQ ID NO: 19865 - RNA, 19 nt, synthetic construct
  misc_feature 1..19: note = siRNA antisense sequence
  source 1..19: mol_type = other RNA
gtagctggcataataaagg

SEQ ID NO: 19866 - RNA, 19 nt, synthetic construct
  misc_feature 1..19: note = siRNA sense sequence
  source 1..19: mol_type = other RNA
ctttattatgccagctact

SEQ ID NO: 19867 - RNA, 19 nt, synthetic construct
  misc_feature 1..19: note = siRNA antisense sequence
  source 1..19: mol_type = other RNA
agtagctggcataataaag

SEQ ID NO: 19868 - RNA, 19 nt, synthetic construct
  misc_feature 1..19: note = siRNA sense sequence
  source 1..19: mol_type = other RNA
tttattatgccagctactc

SEQ ID NO: 19869 - RNA, 19 nt, synthetic construct
  misc_feature 1..19: note = siRNA antisense sequence
  source 1..19: mol_type = other RNA
gagtagctggcataataaa

SEQ ID NO: 19870 - RNA, 19 nt, synthetic construct
  misc_feature 1..19: note = siRNA sense sequence
  source 1..19: mol_type = other RNA
ttattatgccagctactct

SEQ ID NO: 19871 - RNA, 19 nt, synthetic construct
  misc_feature 1..19: note = siRNA antisense sequence
  source 1..19: mol_type = other RNA
agagtagctggcataataa

SEQ ID NO: 19872 - RNA, 19 nt, synthetic construct
  misc_feature 1..19: note = siRNA sense sequence
  source 1..19: mol_type = other RNA
attatgccagctactctaa

SEQ ID NO: 19873 - RNA, 19 nt, synthetic construct
  misc_feature 1..19: note = siRNA antisense sequence
  source 1..19: mol_type = other RNA
ttagagtagctggcataat

SEQ ID NO: 19874 - RNA, 19 nt, synthetic construct
  misc_feature 1..19: note = siRNA sense sequence
  source 1..19: mol_type = other RNA
tatgccagctactctaaag

SEQ ID NO: 19875 - RNA, 19 nt, synthetic construct
  misc_feature 1..19: note = siRNA antisense sequence
  source 1..19: mol_type = other RNA
ctttagagtagctggcata

SEQ ID NO: 19876 - RNA, 19 nt, synthetic construct
  misc_feature 1..19: note = siRNA sense sequence
  source 1..19: mol_type = other RNA
atgccagctactctaaagt

SEQ ID NO: 19877 - RNA, 19 nt, synthetic construct
  misc_feature 1..19: note = siRNA antisense sequence
  source 1..19: mol_type = other RNA
actttagagtagctggcat

SEQ ID NO: 19878 - RNA, 19 nt, synthetic construct
  misc_feature 1..19: note = siRNA sense sequence
  source 1..19: mol_type = other RNA
tgccagctactctaaagtc

SEQ ID NO: 19879 - RNA, 19 nt, synthetic construct
  misc_feature 1..19: note = siRNA antisense sequence
  source 1..19: mol_type = other RNA
gactttagagtagctggca

SEQ ID NO: 19880 - RNA, 19 nt, synthetic construct
  misc_feature 1..19: note = siRNA sense sequence
  source 1..19: mol_type = other RNA
gccagctactctaaagtct

SEQ ID NO: 19881 - RNA, 19 nt, synthetic construct
  misc_feature 1..19: note = siRNA antisense sequence
  source 1..19: mol_type = other RNA
agactttagagtagctggc

SEQ ID NO: 19882 - RNA, 19 nt, synthetic construct
  misc_feature 1..19: note = siRNA sense sequence
  source 1..19: mol_type = other RNA
ccagctactctaaagtctc

SEQ ID NO: 19883 - RNA, 19 nt, synthetic construct
  misc_feature 1..19: note = siRNA antisense sequence
  source 1..19: mol_type = other RNA
gagactttagagtagctgg

SEQ ID NO: 19884 - RNA, 19 nt, synthetic construct
  misc_feature 1..19: note = siRNA sense sequence
  source 1..19: mol_type = other RNA
ctactctaaagtctccttg

SEQ ID NO: 19885 - RNA, 19 nt, synthetic construct
  misc_feature 1..19: note = siRNA antisense sequence
  source 1..19: mol_type = other RNA
caaggagactttagagtag

SEQ ID NO: 19886 - RNA, 19 nt, synthetic construct
  misc_feature 1..19: note = siRNA sense sequence
  source 1..19: mol_type = other RNA
tactctaaagtctccttgg

SEQ ID NO: 19887 - RNA, 19 nt, synthetic construct
  misc_feature 1..19: note = siRNA antisense sequence
  source 1..19: mol_type = other RNA
ccaaggagactttagagta

SEQ ID NO: 19888 - RNA, 19 nt, synthetic construct
  misc_feature 1..19: note = siRNA sense sequence
  source 1..19: mol_type = other RNA
actctaaagtctccttggg

SEQ ID NO: 19889 - RNA, 19 nt, synthetic construct
  misc_feature 1..19: note = siRNA antisense sequence
  source 1..19: mol_type = other RNA
cccaaggagactttagagt

SEQ ID NO: 19890 - RNA, 19 nt, synthetic construct
  misc_feature 1..19: note = siRNA sense sequence
  source 1..19: mol_type = other RNA
ctttgcataagtagttact

SEQ ID NO: 19891 - RNA, 19 nt, synthetic construct
  misc_feature 1..19: note = siRNA antisense sequence
  source 1..19: mol_type = other RNA
agtaactacttatgcaaag

SEQ ID NO: 19892 - RNA, 19 nt, synthetic construct
  misc_feature 1..19: note = siRNA sense sequence
  source 1..19: mol_type = other RNA
tttgcataagtagttactc

SEQ ID NO: 19893 - RNA, 19 nt, synthetic construct
  misc_feature 1..19: note = siRNA antisense sequence
  source 1..19: mol_type = other RNA
gagtaactacttatgcaaa

SEQ ID NO: 19894 - RNA, 19 nt, synthetic construct
  misc_feature 1..19: note = siRNA sense sequence
  source 1..19: mol_type = other RNA
ttgcataagtagttactcc

SEQ ID NO: 19895 - RNA, 19 nt, synthetic construct
  misc_feature 1..19: note = siRNA antisense sequence
  source 1..19: mol_type = other RNA
ggagtaactacttatgcaa

SEQ ID NO: 19896 - RNA, 19 nt, synthetic construct
  misc_feature 1..19: note = siRNA sense sequence
  source 1..19: mol_type = other RNA
tgcataagtagttactccc

SEQ ID NO: 19897 - RNA, 19 nt, synthetic construct
  misc_feature 1..19: note = siRNA antisense sequence
  source 1..19: mol_type = other RNA
gggagtaactacttatgca

SEQ ID NO: 19898 - RNA, 19 nt, synthetic construct
  misc_feature 1..19: note = siRNA sense sequence
  source 1..19: mol_type = other RNA
gtagttactcccactgcta

SEQ ID NO: 19899 - RNA, 19 nt, synthetic construct
  misc_feature 1..19: note = siRNA antisense sequence
  source 1..19: mol_type = other RNA
tagcagtgggagtaactac

SEQ ID NO: 19900 - RNA, 19 nt, synthetic construct
  misc_feature 1..19: note = siRNA sense sequence
  source 1..19: mol_type = other RNA
tagttactcccactgctac

SEQ ID NO: 19901 - RNA, 19 nt, synthetic construct
  misc_feature 1..19: note = siRNA antisense sequence
  source 1..19: mol_type = other RNA
gtagcagtgggagtaacta

SEQ ID NO: 19902 - RNA, 19 nt, synthetic construct
  misc_feature 1..19: note = siRNA sense sequence
  source 1..19: mol_type = other RNA
agttactcccactgctact

SEQ ID NO: 19903 - RNA, 19 nt, synthetic construct
  misc_feature 1..19: note = siRNA antisense sequence
  source 1..19: mol_type = other RNA
agtagcagtgggagtaact

SEQ ID NO: 19904 - RNA, 19 nt, synthetic construct
  misc_feature 1..19: note = siRNA sense sequence
  source 1..19: mol_type = other RNA
cccactgctactgatctca

SEQ ID NO: 19905 - RNA, 19 nt, synthetic construct
  misc_feature 1..19: note = siRNA antisense sequence
  source 1..19: mol_type = other RNA
tgagatcagtagcagtggg

SEQ ID NO: 19906 - RNA, 19 nt, synthetic construct
  misc_feature 1..19: note = siRNA sense sequence
  source 1..19: mol_type = other RNA
ccactgctactgatctcaa

SEQ ID NO: 19907 - RNA, 19 nt, synthetic construct
  misc_feature 1..19: note = siRNA antisense sequence
  source 1..19: mol_type = other RNA
ttgagatcagtagcagtgg

SEQ ID NO: 19908 - RNA, 19 nt, synthetic construct
  misc_feature 1..19: note = siRNA sense sequence
  source 1..19: mol_type = other RNA
cactgctactgatctcaat

SEQ ID NO: 19909 - RNA, 19 nt, synthetic construct
  misc_feature 1..19: note = siRNA antisense sequence
  source 1..19: mol_type = other RNA
attgagatcagtagcagtg

SEQ ID NO: 19910 - RNA, 19 nt, synthetic construct
  misc_feature 1..19: note = siRNA sense sequence
  source 1..19: mol_type = other RNA
actgctactgatctcaatc

SEQ ID NO: 19911 - RNA, 19 nt, synthetic construct
  misc_feature 1..19: note = siRNA antisense sequence
  source 1..19: mol_type = other RNA
gattgagatcagtagcagt

SEQ ID NO: 19912 - RNA, 19 nt, synthetic construct
  misc_feature 1..19: note = siRNA sense sequence
  source 1..19: mol_type = other RNA
ctgctactgatctcaatcc

SEQ ID NO: 19913 - RNA, 19 nt, synthetic construct
  misc_feature 1..19: note = siRNA antisense sequence
  source 1..19: mol_type = other RNA
ggattgagatcagtagcag

SEQ ID NO: 19914 - RNA, 19 nt, synthetic construct
  misc_feature 1..19: note = siRNA sense sequence
  source 1..19: mol_type = other RNA
tgctactgatctcaatccc

SEQ ID NO: 19915 - RNA, 19 nt, synthetic construct
  misc_feature 1..19: note = siRNA antisense sequence
  source 1..19: mol_type = other RNA
gggattgagatcagtagca

SEQ ID NO: 19916 - RNA, 19 nt, synthetic construct
  misc_feature 1..19: note = siRNA sense sequence
  source 1..19: mol_type = other RNA
actgatctcaatccctgaa

SEQ ID NO: 19917 - RNA, 19 nt, synthetic construct
  misc_feature 1..19: note = siRNA antisense sequence
  source 1..19: mol_type = other RNA
ttcagggattgagatcagt

SEQ ID NO: 19918 - RNA, 19 nt, synthetic construct
  misc_feature 1..19: note = siRNA sense sequence
  source 1..19: mol_type = other RNA
atctcaatccctgaataaa

SEQ ID NO: 19919 - RNA, 19 nt, synthetic construct
  misc_feature 1..19: note = siRNA antisense sequence
  source 1..19: mol_type = other RNA
tttattcagggattgagat

SEQ ID NO: 19920 - RNA, 19 nt, synthetic construct
  misc_feature 1..19: note = siRNA sense sequence
  source 1..19: mol_type = other RNA
agataccctgaagtagatt

SEQ ID NO: 19921 - RNA, 19 nt, synthetic construct
  misc_feature 1..19: note = siRNA antisense sequence
  source 1..19: mol_type = other RNA
aatctacttcagggtatct

SEQ ID NO: 19922 - RNA, 19 nt, synthetic construct
  misc_feature 1..19: note = siRNA sense sequence
  source 1..19: mol_type = other RNA
gataccctgaagtagattg

SEQ ID NO: 19923 - RNA, 19 nt, synthetic construct
  misc_feature 1..19: note = siRNA antisense sequence
  source 1..19: mol_type = other RNA
caatctacttcagggtatc

SEQ ID NO: 19924 - RNA, 19 nt, synthetic construct
  misc_feature 1..19: note = siRNA sense sequence
  source 1..19: mol_type = other RNA
ataccctgaagtagattgg

SEQ ID NO: 19925 - RNA, 19 nt, synthetic construct
  misc_feature 1..19: note = siRNA antisense sequence
  source 1..19: mol_type = other RNA
ccaatctacttcagggtat

SEQ ID NO: 19926 - RNA, 19 nt, synthetic construct
  misc_feature 1..19: note = siRNA sense sequence
  source 1..19: mol_type = other RNA
taccctgaagtagattgga

SEQ ID NO: 19927 - RNA, 19 nt, synthetic construct
  misc_feature 1..19: note = siRNA antisense sequence
  source 1..19: mol_type = other RNA
tccaatctacttcagggta

SEQ ID NO: 19928 - RNA, 19 nt, synthetic construct
  misc_feature 1..19: note = siRNA sense sequence
  source 1..19: mol_type = other RNA
accctgaagtagattggac

SEQ ID NO: 19929 - RNA, 19 nt, synthetic construct
  misc_feature 1..19: note = siRNA antisense sequence
  source 1..19: mol_type = other RNA
gtccaatctacttcagggt

SEQ ID NO: 19930 - RNA, 19 nt, synthetic construct
  misc_feature 1..19: note = siRNA sense sequence
  source 1..19: mol_type = other RNA
ccctgaagtagattggacc

SEQ ID NO: 19931 - RNA, 19 nt, synthetic construct
  misc_feature 1..19: note = siRNA antisense sequence
  source 1..19: mol_type = other RNA
ggtccaatctacttcaggg

SEQ ID NO: 19932 - RNA, 19 nt, synthetic construct
  misc_feature 1..19: note = siRNA sense sequence
  source 1..19: mol_type = other RNA
cctgaagtagattggaccc

SEQ ID NO: 19933 - RNA, 19 nt, synthetic construct
  misc_feature 1..19: note = siRNA antisense sequence
  source 1..19: mol_type = other RNA
gggtccaatctacttcagg

SEQ ID NO: 19934 - RNA, 19 nt, synthetic construct
  misc_feature 1..19: note = siRNA sense sequence
  source 1..19: mol_type = other RNA
ctgaagtagattggaccct

SEQ ID NO: 19935 - RNA, 19 nt, synthetic construct
  misc_feature 1..19: note = siRNA antisense sequence
  source 1..19: mol_type = other RNA
agggtccaatctacttcag

SEQ ID NO: 19936 - RNA, 19 nt, synthetic construct
  misc_feature 1..19: note = siRNA sense sequence
  source 1..19: mol_type = other RNA
tgaagtagattggacccta

SEQ ID NO: 19937 - RNA, 19 nt, synthetic construct
  misc_feature 1..19: note = siRNA antisense sequence
  source 1..19: mol_type = other RNA
tagggtccaatctacttca

SEQ ID NO: 19938 - RNA, 19 nt, synthetic construct
  misc_feature 1..19: note = siRNA sense sequence
  source 1..19: mol_type = other RNA
agattggaccctaccttag

SEQ ID NO: 19939 - RNA, 19 nt, synthetic construct
  misc_feature 1..19: note = siRNA antisense sequence
  source 1..19: mol_type = other RNA
ctaaggtagggtccaatct

SEQ ID NO: 19940 - RNA, 19 nt, synthetic construct
  misc_feature 1..19: note = siRNA sense sequence
  source 1..19: mol_type = other RNA
ctaccttaggacatgtgta

SEQ ID NO: 19941 - RNA, 19 nt, synthetic construct
  misc_feature 1..19: note = siRNA antisense sequence
  source 1..19: mol_type = other RNA
tacacatgtcctaaggtag

SEQ ID NO: 19942 - RNA, 19 nt, synthetic construct
  misc_feature 1..19: note = siRNA sense sequence
  source 1..19: mol_type = other RNA
taccttaggacatgtgtat

SEQ ID NO: 19943 - RNA, 19 nt, synthetic construct
  misc_feature 1..19: note = siRNA antisense sequence
  source 1..19: mol_type = other RNA
atacacatgtcctaaggta

SEQ ID NO: 19944 - RNA, 19 nt, synthetic construct
  misc_feature 1..19: note = siRNA sense sequence
  source 1..19: mol_type = other RNA
accttaggacatgtgtatc

SEQ ID NO: 19945 - RNA, 19 nt, synthetic construct
  misc_feature 1..19: note = siRNA antisense sequence
  source 1..19: mol_type = other RNA
gatacacatgtcctaaggt

SEQ ID NO: 19946 - RNA, 19 nt, synthetic construct
  misc_feature 1..19: note = siRNA sense sequence
  source 1..19: mol_type = other RNA
ccttaggacatgtgtatcc

SEQ ID NO: 19947 - RNA, 19 nt, synthetic construct
  misc_feature 1..19: note = siRNA antisense sequence
  source 1..19: mol_type = other RNA
ggatacacatgtcctaagg

SEQ ID NO: 19948 - RNA, 19 nt, synthetic construct
  misc_feature 1..19: note = siRNA sense sequence
  source 1..19: mol_type = other RNA
cttaggacatgtgtatccc

SEQ ID NO: 19949 - RNA, 19 nt, synthetic construct
  misc_feature 1..19: note = siRNA antisense sequence
  source 1..19: mol_type = other RNA
gggatacacatgtcctaag

SEQ ID NO: 19950 - RNA, 19 nt, synthetic construct
  misc_feature 1..19: note = siRNA sense sequence
  source 1..19: mol_type = other RNA
gacatgtgtatcccagcac

SEQ ID NO: 19951 - RNA, 19 nt, synthetic construct
  misc_feature 1..19: note = siRNA antisense sequence
  source 1..19: mol_type = other RNA
gtgctgggatacacatgtc

SEQ ID NO: 19952 - RNA, 19 nt, synthetic construct
  misc_feature 1..19: note = siRNA sense sequence
  source 1..19: mol_type = other RNA
tgtatcccagcacctttgc

SEQ ID NO: 19953 - RNA, 19 nt, synthetic construct
  misc_feature 1..19: note = siRNA antisense sequence
  source 1..19: mol_type = other RNA
gcaaaggtgctgggataca

SEQ ID NO: 19954 - RNA, 19 nt, synthetic construct
  misc_feature 1..19: note = siRNA sense sequence
  source 1..19: mol_type = other RNA
ctattatataatgcaccac

SEQ ID NO: 19955 - RNA, 19 nt, synthetic construct
  misc_feature 1..19: note = siRNA antisense sequence
  source 1..19: mol_type = other RNA
gtggtgcattatataatag

SEQ ID NO: 19956 - RNA, 19 nt, synthetic construct
  misc_feature 1..19: note = siRNA sense sequence
  source 1..19: mol_type = other RNA
tattatataatgcaccacg

SEQ ID NO: 19957 - RNA, 19 nt, synthetic construct
  misc_feature 1..19: note = siRNA antisense sequence
  source 1..19: mol_type = other RNA
cgtggtgcattatataata

SEQ ID NO: 19958 - RNA, 19 nt, synthetic construct
  misc_feature 1..19: note = siRNA sense sequence
  source 1..19: mol_type = other RNA
atataatgcaccacggtat

SEQ ID NO: 19959 - RNA, 19 nt, synthetic construct
  misc_feature 1..19: note = siRNA antisense sequence
  source 1..19: mol_type = other RNA
ataccgtggtgcattatat

SEQ ID NO: 19960 - RNA, 19 nt, synthetic construct
  misc_feature 1..19: note = siRNA sense sequence
  source 1..19: mol_type = other RNA
tataatgcaccacggtatt

SEQ ID NO: 19961 - RNA, 19 nt, synthetic construct
  misc_feature 1..19: note = siRNA antisense sequence
  source 1..19: mol_type = other RNA
aataccgtggtgcattata

SEQ ID NO: 19962 - RNA, 19 nt, synthetic construct
  misc_feature 1..19: note = siRNA sense sequence
  source 1..19: mol_type = other RNA
gcaccacggtattataatt

SEQ ID NO: 19963 - RNA, 19 nt, synthetic construct
  misc_feature 1..19: note = siRNA antisense sequence
  source 1..19: mol_type = other RNA
aattataataccgtggtgc

SEQ ID NO: 19964 - RNA, 19 nt, synthetic construct
  misc_feature 1..19: note = siRNA sense sequence
  source 1..19: mol_type = other RNA
caccacggtattataatta

SEQ ID NO: 19965 - RNA, 19 nt, synthetic construct
  misc_feature 1..19: note = siRNA antisense sequence
  source 1..19: mol_type = other RNA
taattataataccgtggtg

SEQ ID NO: 19966 - RNA, 19 nt, synthetic construct
  misc_feature 1..19: note = siRNA sense sequence
  source 1..19: mol_type = other RNA
ccacggtattataattaac

SEQ ID NO: 19967 - RNA, 19 nt, synthetic construct
  misc_feature 1..19: note = siRNA antisense sequence
  source 1..19: mol_type = other RNA
gttaattataataccgtgg

SEQ ID NO: 19968 - RNA, 19 nt, synthetic construct
  misc_feature 1..19: note = siRNA sense sequence
  source 1..19: mol_type = other RNA
ttaactatctaattgcctg

SEQ ID NO: 19969 - RNA, 19 nt, synthetic construct
  misc_feature 1..19: note = siRNA antisense sequence
  source 1..19: mol_type = other RNA
caggcaattagatagttaa

SEQ ID NO: 19970 - RNA, 19 nt, synthetic construct
  misc_feature 1..19: note = siRNA sense sequence
  source 1..19: mol_type = other RNA
taactatctaattgcctgt

SEQ ID NO: 19971 - RNA, 19 nt, synthetic construct
  misc_feature 1..19: note = siRNA antisense sequence
  source 1..19: mol_type = other RNA
acaggcaattagatagtta

SEQ ID NO: 19972 - RNA, 19 nt, synthetic construct
  misc_feature 1..19: note = siRNA sense sequence
  source 1..19: mol_type = other RNA
aactatctaattgcctgtc

SEQ ID NO: 19973 - RNA, 19 nt, synthetic construct
  misc_feature 1..19: note = siRNA antisense sequence
  source 1..19: mol_type = other RNA
gacaggcaattagatagtt

SEQ ID NO: 19974 - RNA, 19 nt, synthetic construct
  misc_feature 1..19: note = siRNA sense sequence
  source 1..19: mol_type = other RNA
actatctaattgcctgtct

SEQ ID NO: 19975 - RNA, 19 nt, synthetic construct
  misc_feature 1..19: note = siRNA antisense sequence
  source 1..19: mol_type = other RNA
agacaggcaattagatagt

SEQ ID NO: 19976 - RNA, 19 nt, synthetic construct
  misc_feature 1..19: note = siRNA sense sequence
  source 1..19: mol_type = other RNA
ctatctaattgcctgtctt

SEQ ID NO: 19977 - RNA, 19 nt, synthetic construct
  misc_feature 1..19: note = siRNA antisense sequence
  source 1..19: mol_type = other RNA
aagacaggcaattagatag

SEQ ID NO: 19978 - RNA, 19 nt, synthetic construct
  misc_feature 1..19: note = siRNA sense sequence
  source 1..19: mol_type = other RNA
ctaattgcctgtctttcca

SEQ ID NO: 19979 - RNA, 19 nt, synthetic construct
  misc_feature 1..19: note = siRNA antisense sequence
  source 1..19: mol_type = other RNA
tggaaagacaggcaattag

SEQ ID NO: 19980 - RNA, 19 nt, synthetic construct
  misc_feature 1..19: note = siRNA sense sequence
  source 1..19: mol_type = other RNA
aattgcctgtctttccagc

SEQ ID NO: 19981 - RNA, 19 nt, synthetic construct
  misc_feature 1..19: note = siRNA antisense sequence
  source 1..19: mol_type = other RNA
gctggaaagacaggcaatt

SEQ ID NO: 19982 - RNA, 19 nt, synthetic construct
  misc_feature 1..19: note = siRNA sense sequence
  source 1..19: mol_type = other RNA
attgcctgtctttccagct

SEQ ID NO: 19983 - RNA, 19 nt, synthetic construct
  misc_feature 1..19: note = siRNA antisense sequence
  source 1..19: mol_type = other RNA
agctggaaagacaggcaat

SEQ ID NO: 19984 - RNA, 19 nt, synthetic construct
  misc_feature 1..19: note = siRNA sense sequence
  source 1..19: mol_type = other RNA
gcctgtctttccagcttgc

SEQ ID NO: 19985 - RNA, 19 nt, synthetic construct
  misc_feature 1..19: note = siRNA antisense sequence
  source 1..19: mol_type = other RNA
gcaagctggaaagacaggc

SEQ ID NO: 19986 - RNA, 19 nt, synthetic construct
  misc_feature 1..19: note = siRNA sense sequence
  source 1..19: mol_type = other RNA
ctgtctttccagcttgctg

SEQ ID NO: 19987 - RNA, 19 nt, synthetic construct
  misc_feature 1..19: note = siRNA antisense sequence
  source 1..19: mol_type = other RNA
cagcaagctggaaagacag

SEQ ID NO: 19988 - RNA, 19 nt, synthetic construct
  misc_feature 1..19: note = siRNA sense sequence
  source 1..19: mol_type = other RNA
ctctgtgagggtaggatct

SEQ ID NO: 19989 - RNA, 19 nt, synthetic construct
  misc_feature 1..19: note = siRNA antisense sequence
  source 1..19: mol_type = other RNA
agatcctaccctcacagag

SEQ ID NO: 19990 - RNA, 19 nt, synthetic construct
  misc_feature 1..19: note = siRNA sense sequence
  source 1..19: mol_type = other RNA
tctgtgagggtaggatctt

SEQ ID NO: 19991 - RNA, 19 nt, synthetic construct
  misc_feature 1..19: note = siRNA antisense sequence
  source 1..19: mol_type = other RNA
aagatcctaccctcacaga

SEQ ID NO: 19992 - RNA, 19 nt, synthetic construct
  misc_feature 1..19: note = siRNA sense sequence
  source 1..19: mol_type = other RNA
ctgtgagggtaggatcttt

SEQ ID NO: 19993 - RNA, 19 nt, synthetic construct
  misc_feature 1..19: note = siRNA antisense sequence
  source 1..19: mol_type = other RNA
aaagatcctaccctcacag

SEQ ID NO: 19994 - RNA, 19 nt, synthetic construct
  misc_feature 1..19: note = siRNA sense sequence
  source 1..19: mol_type = other RNA
tgtgagggtaggatcttta

SEQ ID NO: 19995 - RNA, 19 nt, synthetic construct
  misc_feature 1..19: note = siRNA antisense sequence
  source 1..19: mol_type = other RNA
taaagatcctaccctcaca

SEQ ID NO: 19996 - RNA, 19 nt, synthetic construct
  misc_feature 1..19: note = siRNA sense sequence
  source 1..19: mol_type = other RNA
gtgagggtaggatctttaa

SEQ ID NO: 19997 - RNA, 19 nt, synthetic construct
  misc_feature 1..19: note = siRNA antisense sequence
  source 1..19: mol_type = other RNA
ttaaagatcctaccctcac

SEQ ID NO: 19998 - RNA, 19 nt, synthetic construct
  misc_feature 1..19: note = siRNA sense sequence
  source 1..19: mol_type = other RNA
tgagggtaggatctttaac

SEQ ID NO: 19999 - RNA, 19 nt, synthetic construct
  misc_feature 1..19: note = siRNA antisense sequence
  source 1..19: mol_type = other RNA
gttaaagatcctaccctca

SEQ ID NO: 20000 - RNA, 19 nt, synthetic construct
  misc_feature 1..19: note = siRNA sense sequence
  source 1..19: mol_type = other RNA
gagggtaggatctttaacc

SEQ ID NO: 20001 - RNA, 19 nt, synthetic construct
  misc_feature 1..19: note = siRNA antisense sequence
  source 1..19: mol_type = other RNA
ggttaaagatcctaccctc

SEQ ID NO: 20002 - RNA, 19 nt, synthetic construct
  misc_feature 1..19: note = siRNA sense sequence
  source 1..19: mol_type = other RNA
agggtaggatctttaacca

SEQ ID NO: 20003 - RNA, 19 nt, synthetic construct
  misc_feature 1..19: note = siRNA antisense sequence
  source 1..19: mol_type = other RNA
tggttaaagatcctaccct

SEQ ID NO: 20004 - RNA, 19 nt, synthetic construct
  misc_feature 1..19: note = siRNA sense sequence
  source 1..19: mol_type = other RNA
atacttaagggatcagatt

SEQ ID NO: 20005 - RNA, 19 nt, synthetic construct
  misc_feature 1..19: note = siRNA antisense sequence
  source 1..19: mol_type = other RNA
aatctgatcccttaagtat

SEQ ID NO: 20006 - RNA, 19 nt, synthetic construct
  misc_feature 1..19: note = siRNA sense sequence
  source 1..19: mol_type = other RNA
tacttaagggatcagattg

SEQ ID NO: 20007 - RNA, 19 nt, synthetic construct
  misc_feature 1..19: note = siRNA antisense sequence
  source 1..19: mol_type = other RNA
caatctgatcccttaagta

SEQ ID NO: 20008 - RNA, 19 nt, synthetic construct
  misc_feature 1..19: note = siRNA sense sequence
  source 1..19: mol_type = other RNA
acttaagggatcagattgt

SEQ ID NO: 20009 - RNA, 19 nt, synthetic construct
  misc_feature 1..19: note = siRNA antisense sequence
  source 1..19: mol_type = other RNA
acaatctgatcccttaagt

SEQ ID NO: 20010 - RNA, 19 nt, synthetic construct
  misc_feature 1..19: note = siRNA sense sequence
  source 1..19: mol_type = other RNA
cttaagggatcagattgtc

SEQ ID NO: 20011 - RNA, 19 nt, synthetic construct
  misc_feature 1..19: note = siRNA antisense sequence
  source 1..19: mol_type = other RNA
gacaatctgatcccttaag

SEQ ID NO: 20012 - RNA, 19 nt, synthetic construct
  misc_feature 1..19: note = siRNA sense sequence
  source 1..19: mol_type = other RNA
ttaagggatcagattgtcc

SEQ ID NO: 20013 - RNA, 19 nt, synthetic construct
  misc_feature 1..19: note = siRNA antisense sequence
  source 1..19: mol_type = other RNA
ggacaatctgatcccttaa

SEQ ID NO: 20014 - RNA, 19 nt, synthetic construct
  misc_feature 1..19: note = siRNA sense sequence
  source 1..19: mol_type = other RNA
tgtccctttattatatacc

SEQ ID NO: 20015 - RNA, 19 nt, synthetic construct
  misc_feature 1..19: note = siRNA antisense sequence
  source 1..19: mol_type = other RNA
ggtatataataaagggaca

SEQ ID NO: 20016 - RNA, 19 nt, synthetic construct
  misc_feature 1..19: note = siRNA sense sequence
  source 1..19: mol_type = other RNA
gtccctttattatatacct

SEQ ID NO: 20017 - RNA, 19 nt, synthetic construct
  misc_feature 1..19: note = siRNA antisense sequence
  source 1..19: mol_type = other RNA
aggtatataataaagggac

SEQ ID NO: 20018 - RNA, 19 nt, synthetic construct
  misc_feature 1..19: note = siRNA sense sequence
  source 1..19: mol_type = other RNA
tatatacctctgccttatt

SEQ ID NO: 20019 - RNA, 19 nt, synthetic construct
  misc_feature 1..19: note = siRNA antisense sequence
  source 1..19: mol_type = other RNA
aataaggcagaggtatata

SEQ ID NO: 20020 - RNA, 19 nt, synthetic construct
  misc_feature 1..19: note = siRNA sense sequence
  source 1..19: mol_type = other RNA
atatacctctgccttattt

SEQ ID NO: 20021 - RNA, 19 nt, synthetic construct
  misc_feature 1..19: note = siRNA antisense sequence
  source 1..19: mol_type = other RNA
aaataaggcagaggtatat

SEQ ID NO: 20022 - RNA, 19 nt, synthetic construct
  misc_feature 1..19: note = siRNA sense sequence
  source 1..19: mol_type = other RNA
tatacctctgccttatttt

SEQ ID NO: 20023 - RNA, 19 nt, synthetic construct
  misc_feature 1..19: note = siRNA antisense sequence
  source 1..19: mol_type = other RNA
aaaataaggcagaggtata

SEQ ID NO: 20024 - RNA, 19 nt, synthetic construct
  misc_feature 1..19: note = siRNA sense sequence
  source 1..19: mol_type = other RNA
aaataatggaatggaagac

SEQ ID NO: 20025 - RNA, 19 nt, synthetic construct
  misc_feature 1..19: note = siRNA antisense sequence
  source 1..19: mol_type = other RNA
gtcttccattccattattt

SEQ ID NO: 20026 - RNA, 19 nt, synthetic construct
  misc_feature 1..19: note = siRNA sense sequence
  source 1..19: mol_type = other RNA
aataatggaatggaagaca

SEQ ID NO: 20027 - RNA, 19 nt, synthetic construct
  misc_feature 1..19: note = siRNA antisense sequence
  source 1..19: mol_type = other RNA
tgtcttccattccattatt

SEQ ID NO: 20028 - RNA, 19 nt, synthetic construct
  misc_feature 1..19: note = siRNA sense sequence
  source 1..19: mol_type = other RNA
ataatggaatggaagacac

SEQ ID NO: 20029 - RNA, 19 nt, synthetic construct
  misc_feature 1..19: note = siRNA antisense sequence
  source 1..19: mol_type = other RNA
gtgtcttccattccattat

SEQ ID NO: 20030 - RNA, 19 nt, synthetic construct
  misc_feature 1..19: note = siRNA sense sequence
  source 1..19: mol_type = other RNA
tggaagacaccatcagttg

SEQ ID NO: 20031 - RNA, 19 nt, synthetic construct
  misc_feature 1..19: note = siRNA antisense sequence
  source 1..19: mol_type = other RNA
caactgatggtgtcttcca

SEQ ID NO: 20032 - RNA, 19 nt, synthetic construct
  misc_feature 1..19: note = siRNA sense sequence
  source 1..19: mol_type = other RNA
ggaagacaccatcagttga

SEQ ID NO: 20033 - RNA, 19 nt, synthetic construct
  misc_feature 1..19: note = siRNA antisense sequence
  source 1..19: mol_type = other RNA
tcaactgatggtgtcttcc

SEQ ID NO: 20034 - RNA, 19 nt, synthetic construct
  misc_feature 1..19: note = siRNA sense sequence
  source 1..19: mol_type = other RNA
gaagacaccatcagttgaa

SEQ ID NO: 20035 - RNA, 19 nt, synthetic construct
  misc_feature 1..19: note = siRNA antisense sequence
  source 1..19: mol_type = other RNA
ttcaactgatggtgtcttc

SEQ ID NO: 20036 - RNA, 19 nt, synthetic construct
  misc_feature 1..19: note = siRNA sense sequence
  source 1..19: mol_type = other RNA
caagccactcccaatccaa

SEQ ID NO: 20037 - RNA, 19 nt, synthetic construct
  misc_feature 1..19: note = siRNA antisense sequence
  source 1..19: mol_type = other RNA
ttggattgggagtggcttg

SEQ ID NO: 20038 - RNA, 19 nt, synthetic construct
  misc_feature 1..19: note = siRNA sense sequence
  source 1..19: mol_type = other RNA
aagccactcccaatccaat

SEQ ID NO: 20039 - RNA, 19 nt, synthetic construct
  misc_feature 1..19: note = siRNA antisense sequence
  source 1..19: mol_type = other RNA
attggattgggagtggctt

SEQ ID NO: 20040 - RNA, 19 nt, synthetic construct
  misc_feature 1..19: note = siRNA sense sequence
  source 1..19: mol_type = other RNA
agccactcccaatccaatt

SEQ ID NO: 20041 - RNA, 19 nt, synthetic construct
  misc_feature 1..19: note = siRNA antisense sequence
  source 1..19: mol_type = other RNA
aattggattgggagtggct

SEQ ID NO: 20042 - RNA, 19 nt, synthetic construct
  misc_feature 1..19: note = siRNA sense sequence
  source 1..19: mol_type = other RNA
gccactcccaatccaatta

SEQ ID NO: 20043 - RNA, 19 nt, synthetic construct
  misc_feature 1..19: note = siRNA antisense sequence
  source 1..19: mol_type = other RNA
taattggattgggagtggc

SEQ ID NO: 20044 - RNA, 19 nt, synthetic construct
  misc_feature 1..19: note = siRNA sense sequence
  source 1..19: mol_type = other RNA
ccactcccaatccaattat

SEQ ID NO: 20045 - RNA, 19 nt, synthetic construct
  misc_feature 1..19: note = siRNA antisense sequence
  source 1..19: mol_type = other RNA
ataattggattgggagtgg

SEQ ID NO: 20046 - RNA, 19 nt, synthetic construct
  misc_feature 1..19: note = siRNA sense sequence
  source 1..19: mol_type = other RNA
ttgctagattgttagatag

SEQ ID NO: 20047 - RNA, 19 nt, synthetic construct
  misc_feature 1..19: note = siRNA antisense sequence
  source 1..19: mol_type = other RNA
ctatctaacaatctagcaa

SEQ ID NO: 20048 - RNA, 19 nt, synthetic construct
  misc_feature 1..19: note = siRNA sense sequence
  source 1..19: mol_type = other RNA
tgctagattgttagatagt

SEQ ID NO: 20049 - RNA, 19 nt, synthetic construct
  misc_feature 1..19: note = siRNA antisense sequence
  source 1..19: mol_type = other RNA
actatctaacaatctagca

SEQ ID NO: 20050 - RNA, 19 nt, synthetic construct
  misc_feature 1..19: note = siRNA sense sequence
  source 1..19: mol_type = other RNA
gctagattgttagatagtt

SEQ ID NO: 20051 - RNA, 19 nt, synthetic construct
  misc_feature 1..19: note = siRNA antisense sequence
  source 1..19: mol_type = other RNA
aactatctaacaatctagc

SEQ ID NO: 20052 - RNA, 19 nt, synthetic construct
  misc_feature 1..19: note = siRNA sense sequence
  source 1..19: mol_type = other RNA
ctagattgttagatagttc

SEQ ID NO: 20053 - RNA, 19 nt, synthetic construct
  misc_feature 1..19: note = siRNA antisense sequence
  source 1..19: mol_type = other RNA
gaactatctaacaatctag

SEQ ID NO: 20054 - RNA, 19 nt, synthetic construct
  misc_feature 1..19: note = siRNA sense sequence
  source 1..19: mol_type = other RNA
tagattgttagatagttcc

SEQ ID NO: 20055 - RNA, 19 nt, synthetic construct
  misc_feature 1..19: note = siRNA antisense sequence
  source 1..19: mol_type = other RNA
ggaactatctaacaatcta

SEQ ID NO: 20056 - RNA, 19 nt, synthetic construct
  misc_feature 1..19: note = siRNA sense sequence
  source 1..19: mol_type = other RNA
agattgttagatagttcct

SEQ ID NO: 20057 - RNA, 19 nt, synthetic construct
  misc_feature 1..19: note = siRNA antisense sequence
  source 1..19: mol_type = other RNA
aggaactatctaacaatct

SEQ ID NO: 20058 - RNA, 19 nt, synthetic construct
  misc_feature 1..19: note = siRNA sense sequence
  source 1..19: mol_type = other RNA
gattgttagatagttccta

SEQ ID NO: 20059 - RNA, 19 nt, synthetic construct
  misc_feature 1..19: note = siRNA antisense sequence
  source 1..19: mol_type = other RNA
taggaactatctaacaatc

SEQ ID NO: 20060 - RNA, 19 nt, synthetic construct
  misc_feature 1..19: note = siRNA sense sequence
  source 1..19: mol_type = other RNA
attgttagatagttcctag

SEQ ID NO: 20061 - RNA, 19 nt, synthetic construct
  misc_feature 1..19: note = siRNA antisense sequence
  source 1..19: mol_type = other RNA
ctaggaactatctaacaat

SEQ ID NO: 20062 - RNA, 19 nt, synthetic construct
  misc_feature 1..19: note = siRNA sense sequence
  source 1..19: mol_type = other RNA
ttgttagatagttcctagt

SEQ ID NO: 20063 - RNA, 19 nt, synthetic construct
  misc_feature 1..19: note = siRNA antisense sequence
  source 1..19: mol_type = other RNA
actaggaactatctaacaa

SEQ ID NO: 20064 - RNA, 19 nt, synthetic construct
  misc_feature 1..19: note = siRNA sense sequence
  source 1..19: mol_type = other RNA
tagatagttcctagtttca

SEQ ID NO: 20065 - RNA, 19 nt, synthetic construct
  misc_feature 1..19: note = siRNA antisense sequence
  source 1..19: mol_type = other RNA
tgaaactaggaactatcta

SEQ ID NO: 20066 - RNA, 19 nt, synthetic construct
  misc_feature 1..19: note = siRNA sense sequence
  source 1..19: mol_type = other RNA
agatagttcctagtttcag

SEQ ID NO: 20067 - RNA, 19 nt, synthetic construct
  misc_feature 1..19: note = siRNA antisense sequence
  source 1..19: mol_type = other RNA
ctgaaactaggaactatct

SEQ ID NO: 20068 - RNA, 19 nt, synthetic construct
  misc_feature 1..19: note = siRNA sense sequence
  source 1..19: mol_type = other RNA
ttttaccatggtacttttc

SEQ ID NO: 20069 - RNA, 19 nt, synthetic construct
  misc_feature 1..19: note = siRNA antisense sequence
  source 1..19: mol_type = other RNA
gaaaagtaccatggtaaaa

SEQ ID NO: 20070 - RNA, 19 nt, synthetic construct
  misc_feature 1..19: note = siRNA sense sequence
  source 1..19: mol_type = other RNA
tttaccatggtacttttct

SEQ ID NO: 20071 - RNA, 19 nt, synthetic construct
  misc_feature 1..19: note = siRNA antisense sequence
  source 1..19: mol_type = other RNA
agaaaagtaccatggtaaa

SEQ ID NO: 20072 - RNA, 19 nt, synthetic construct
  misc_feature 1..19: note = siRNA sense sequence
  source 1..19: mol_type = other RNA
ttaccatggtacttttcta

SEQ ID NO: 20073 - RNA, 19 nt, synthetic construct
  misc_feature 1..19: note = siRNA antisense sequence
  source 1..19: mol_type = other RNA
tagaaaagtaccatggtaa

SEQ ID NO: 20074 - RNA, 19 nt, synthetic construct
  misc_feature 1..19: note = siRNA sense sequence
  source 1..19: mol_type = other RNA
taccatggtacttttctat

SEQ ID NO: 20075 - RNA, 19 nt, synthetic construct
  misc_feature 1..19: note = siRNA antisense sequence
  source 1..19: mol_type = other RNA
atagaaaagtaccatggta

SEQ ID NO: 20076 - RNA, 19 nt, synthetic construct
  misc_feature 1..19: note = siRNA sense sequence
  source 1..19: mol_type = other RNA
accatggtacttttctatt

SEQ ID NO: 20077 - RNA, 19 nt, synthetic construct
  misc_feature 1..19: note = siRNA antisense sequence
  source 1..19: mol_type = other RNA
aatagaaaagtaccatggt

SEQ ID NO: 20078 - RNA, 19 nt, synthetic construct
  misc_feature 1..19: note = siRNA sense sequence
  source 1..19: mol_type = other RNA
ccatggtacttttctattt

SEQ ID NO: 20079 - RNA, 19 nt, synthetic construct
  misc_feature 1..19: note = siRNA antisense sequence
  source 1..19: mol_type = other RNA
aaatagaaaagtaccatgg

SEQ ID NO: 20080 - RNA, 19 nt, synthetic construct
  misc_feature 1..19: note = siRNA sense sequence
  source 1..19: mol_type = other RNA
catggtacttttctatttg

SEQ ID NO: 20081 - RNA, 19 nt, synthetic construct
  misc_feature 1..19: note = siRNA antisense sequence
  source 1..19: mol_type = other RNA
caaatagaaaagtaccatg

SEQ ID NO: 20082 - RNA, 19 nt, synthetic construct
  misc_feature 1..19: note = siRNA sense sequence
  source 1..19: mol_type = other RNA
tttctatttgtttggacac

SEQ ID NO: 20083 - RNA, 19 nt, synthetic construct
  misc_feature 1..19: note = siRNA antisense sequence
  source 1..19: mol_type = other RNA
gtgtccaaacaaatagaaa

SEQ ID NO: 20084 - RNA, 19 nt, synthetic construct
  misc_feature 1..19: note = siRNA sense sequence
  source 1..19: mol_type = other RNA
ttctatttgtttggacact

SEQ ID NO: 20085 - RNA, 19 nt, synthetic construct
  misc_feature 1..19: note = siRNA antisense sequence
  source 1..19: mol_type = other RNA
agtgtccaaacaaatagaa

SEQ ID NO: 20086 - RNA, 19 nt, synthetic construct
  misc_feature 1..19: note = siRNA sense sequence
  source 1..19: mol_type = other RNA
tctatttgtttggacactt

SEQ ID NO: 20087 - RNA, 19 nt, synthetic construct
  misc_feature 1..19: note = siRNA antisense sequence
  source 1..19: mol_type = other RNA
aagtgtccaaacaaataga

SEQ ID NO: 20088 - RNA, 19 nt, synthetic construct
  misc_feature 1..19: note = siRNA sense sequence
  source 1..19: mol_type = other RNA
ctatttgtttggacactta

SEQ ID NO: 20089 - RNA, 19 nt, synthetic construct
  misc_feature 1..19: note = siRNA antisense sequence
  source 1..19: mol_type = other RNA
taagtgtccaaacaaatag

SEQ ID NO: 20090 - RNA, 19 nt, synthetic construct
  misc_feature 1..19: note = siRNA sense sequence
  source 1..19: mol_type = other RNA
gtgtcataagattttgaag

SEQ ID NO: 20091 - RNA, 19 nt, synthetic construct
  misc_feature 1..19: note = siRNA antisense sequence
  source 1..19: mol_type = other RNA
cttcaaaatcttatgacac

SEQ ID NO: 20092 - RNA, 19 nt, synthetic construct
  misc_feature 1..19: note = siRNA sense sequence
  source 1..19: mol_type = other RNA
gtcataagattttgaagag

SEQ ID NO: 20093 - RNA, 19 nt, synthetic construct
  misc_feature 1..19: note = siRNA antisense sequence
  source 1..19: mol_type = other RNA
ctcttcaaaatcttatgac

SEQ ID NO: 20094 - RNA, 19 nt, synthetic construct
  misc_feature 1..19: note = siRNA sense sequence
  source 1..19: mol_type = other RNA
cataagattttgaagaggc

SEQ ID NO: 20095 - RNA, 19 nt, synthetic construct
  misc_feature 1..19: note = siRNA antisense sequence
  source 1..19: mol_type = other RNA
gcctcttcaaaatcttatg

SEQ ID NO: 20096 - RNA, 19 nt, synthetic construct
  misc_feature 1..19: note = siRNA sense sequence
  source 1..19: mol_type = other RNA
ataagattttgaagaggct

SEQ ID NO: 20097 - RNA, 19 nt, synthetic construct
  misc_feature 1..19: note = siRNA antisense sequence
  source 1..19: mol_type = other RNA
agcctcttcaaaatcttat

SEQ ID NO: 20098 - RNA, 19 nt, synthetic construct
  misc_feature 1..19: note = siRNA sense sequence
  source 1..19: mol_type = other RNA
taagattttgaagaggcta

SEQ ID NO: 20099 - RNA, 19 nt, synthetic construct
  misc_feature 1..19: note = siRNA antisense sequence
  source 1..19: mol_type = other RNA
tagcctcttcaaaatctta

SEQ ID NO: 20100 - RNA, 19 nt, synthetic construct
  misc_feature 1..19: note = siRNA sense sequence
  source 1..19: mol_type = other RNA
aagattttgaagaggctag

SEQ ID NO: 20101 - RNA, 19 nt, synthetic construct
  misc_feature 1..19: note = siRNA antisense sequence
  source 1..19: mol_type = other RNA
ctagcctcttcaaaatctt

SEQ ID NO: 20102 - RNA, 19 nt, synthetic construct
  misc_feature 1..19: note = siRNA sense sequence
  source 1..19: mol_type = other RNA
agattttgaagaggctagt

SEQ ID NO: 20103 - RNA, 19 nt, synthetic construct
  misc_feature 1..19: note = siRNA antisense sequence
  source 1..19: mol_type = other RNA
actagcctcttcaaaatct

SEQ ID NO: 20104 - RNA, 19 nt, synthetic construct
  misc_feature 1..19: note = siRNA sense sequence
  source 1..19: mol_type = other RNA
attttgaagaggctagtat

SEQ ID NO: 20105 - RNA, 19 nt, synthetic construct
  misc_feature 1..19: note = siRNA antisense sequence
  source 1..19: mol_type = other RNA
atactagcctcttcaaaat

SEQ ID NO: 20106 - RNA, 19 nt, synthetic construct
  misc_feature 1..19: note = siRNA sense sequence
  source 1..19: mol_type = other RNA
tttgaagaggctagtatgt

SEQ ID NO: 20107 - RNA, 19 nt, synthetic construct
  misc_feature 1..19: note = siRNA antisense sequence
  source 1..19: mol_type = other RNA
acatactagcctcttcaaa

SEQ ID NO: 20108 - RNA, 19 nt, synthetic construct
  misc_feature 1..19: note = siRNA sense sequence
  source 1..19: mol_type = other RNA
acattgttcctctcagttc

SEQ ID NO: 20109 - RNA, 19 nt, synthetic construct
  misc_feature 1..19: note = siRNA antisense sequence
  source 1..19: mol_type = other RNA
gaactgagaggaacaatgt

SEQ ID NO: 20110 - RNA, 19 nt, synthetic construct
  misc_feature 1..19: note = siRNA sense sequence
  source 1..19: mol_type = other RNA
cattgttcctctcagttct

SEQ ID NO: 20111 - RNA, 19 nt, synthetic construct
  misc_feature 1..19: note = siRNA antisense sequence
  source 1..19: mol_type = other RNA
agaactgagaggaacaatg

SEQ ID NO: 20112 - RNA, 19 nt, synthetic construct
  misc_feature 1..19: note = siRNA sense sequence
  source 1..19: mol_type = other RNA
gttcctctcagttctcttc

SEQ ID NO: 20113 - RNA, 19 nt, synthetic construct
  misc_feature 1..19: note = siRNA antisense sequence
  source 1..19: mol_type = other RNA
gaagagaactgagaggaac

SEQ ID NO: 20114 - RNA, 19 nt, synthetic construct
  misc_feature 1..19: note = siRNA sense sequence
  source 1..19: mol_type = other RNA
tctcagttctcttcaagtg

SEQ ID NO: 20115 - RNA, 19 nt, synthetic construct
  misc_feature 1..19: note = siRNA antisense sequence
  source 1..19: mol_type = other RNA
cacttgaagagaactgaga

SEQ ID NO: 20116 - RNA, 19 nt, synthetic construct
  misc_feature 1..19: note = siRNA sense sequence
  source 1..19: mol_type = other RNA
ctcagttctcttcaagtgc

SEQ ID NO: 20117 - RNA, 19 nt, synthetic construct
  misc_feature 1..19: note = siRNA antisense sequence
  source 1..19: mol_type = other RNA
gcacttgaagagaactgag

SEQ ID NO: 20118 - RNA, 19 nt, synthetic construct
  misc_feature 1..19: note = siRNA sense sequence
  source 1..19: mol_type = other RNA
tcagttctcttcaagtgcc

SEQ ID NO: 20119 - RNA, 19 nt, synthetic construct
  misc_feature 1..19: note = siRNA antisense sequence
  source 1..19: mol_type = other RNA
ggcacttgaagagaactga

SEQ ID NO: 20120 - RNA, 19 nt, synthetic construct
  misc_feature 1..19: note = siRNA sense sequence
  source 1..19: mol_type = other RNA
cagttctcttcaagtgcca

SEQ ID NO: 20121 - RNA, 19 nt, synthetic construct
  misc_feature 1..19: note = siRNA antisense sequence
  source 1..19: mol_type = other RNA
tggcacttgaagagaactg

SEQ ID NO: 20122 - RNA, 19 nt, synthetic construct
  misc_feature 1..19: note = siRNA sense sequence
  source 1..19: mol_type = other RNA
tctcttcaagtgccaagtt

SEQ ID NO: 20123 - RNA, 19 nt, synthetic construct
  misc_feature 1..19: note = siRNA antisense sequence
  source 1..19: mol_type = other RNA
aacttggcacttgaagaga

SEQ ID NO: 20124 - RNA, 19 nt, synthetic construct
  misc_feature 1..19: note = siRNA sense sequence
  source 1..19: mol_type = other RNA
ctcttcaagtgccaagttt

SEQ ID NO: 20125 - RNA, 19 nt, synthetic construct
  misc_feature 1..19: note = siRNA antisense sequence
  source 1..19: mol_type = other RNA
aaacttggcacttgaagag

SEQ ID NO: 20126 - RNA, 19 nt, synthetic construct
  misc_feature 1..19: note = siRNA sense sequence
  source 1..19: mol_type = other RNA
tcttcaagtgccaagttta

SEQ ID NO: 20127 - RNA, 19 nt, synthetic construct
  misc_feature 1..19: note = siRNA antisense sequence
  source 1..19: mol_type = other RNA
taaacttggcacttgaaga

SEQ ID NO: 20128 - RNA, 19 nt, synthetic construct
  misc_feature 1..19: note = siRNA sense sequence
  source 1..19: mol_type = other RNA
cttcaagtgccaagtttat

SEQ ID NO: 20129 - RNA, 19 nt, synthetic construct
  misc_feature 1..19: note = siRNA antisense sequence
  source 1..19: mol_type = other RNA
ataaacttggcacttgaag

SEQ ID NO: 20130 - RNA, 19 nt, synthetic construct
  misc_feature 1..19: note = siRNA sense sequence
  source 1..19: mol_type = other RNA
agtgccaagtttatatctg

SEQ ID NO: 20131 - RNA, 19 nt, synthetic construct
  misc_feature 1..19: note = siRNA antisense sequence
  source 1..19: mol_type = other RNA
cagatataaacttggcact

SEQ ID NO: 20132 - RNA, 19 nt, synthetic construct
  misc_feature 1..19: note = siRNA sense sequence
  source 1..19: mol_type = other RNA
gtgccaagtttatatctga

SEQ ID NO: 20133 - RNA, 19 nt, synthetic construct
  misc_feature 1..19: note = siRNA antisense sequence
  source 1..19: mol_type = other RNA
tcagatataaacttggcac

SEQ ID NO: 20134 - RNA, 19 nt, synthetic construct
  misc_feature 1..19: note = siRNA sense sequence
  source 1..19: mol_type = other RNA
tgccaagtttatatctgat

SEQ ID NO: 20135 - RNA, 19 nt, synthetic construct
  misc_feature 1..19: note = siRNA antisense sequence
  source 1..19: mol_type = other RNA
atcagatataaacttggca

SEQ ID NO: 20136 - RNA, 19 nt, synthetic construct
  misc_feature 1..19: note = siRNA sense sequence
  source 1..19: mol_type = other RNA
gccaagtttatatctgatt

SEQ ID NO: 20137 - RNA, 19 nt, synthetic construct
  misc_feature 1..19: note = siRNA antisense sequence
  source 1..19: mol_type = other RNA
aatcagatataaacttggc

SEQ ID NO: 20138 - RNA, 19 nt, synthetic construct
  misc_feature 1..19: note = siRNA sense sequence
  source 1..19: mol_type = other RNA
gtttatatctgatttaggg

SEQ ID NO: 20139 - RNA, 19 nt, synthetic construct
  misc_feature 1..19: note = siRNA antisense sequence
  source 1..19: mol_type = other RNA
ccctaaatcagatataaac

SEQ ID NO: 20140 - RNA, 19 nt, synthetic construct
  misc_feature 1..19: note = siRNA sense sequence
  source 1..19: mol_type = other RNA
gggataattgctcctctgg

SEQ ID NO: 20141 - RNA, 19 nt, synthetic construct
  misc_feature 1..19: note = siRNA antisense sequence
  source 1..19: mol_type = other RNA
ccagaggagcaattatccc

SEQ ID NO: 20142 - RNA, 19 nt, synthetic construct
  misc_feature 1..19: note = siRNA sense sequence
  source 1..19: mol_type = other RNA
gataattgctcctctggca

SEQ ID NO: 20143 - RNA, 19 nt, synthetic construct
  misc_feature 1..19: note = siRNA antisense sequence
  source 1..19: mol_type = other RNA
tgccagaggagcaattatc

SEQ ID NO: 20144 - RNA, 19 nt, synthetic construct
  misc_feature 1..19: note = siRNA sense sequence
  source 1..19: mol_type = other RNA
ataattgctcctctggcac

SEQ ID NO: 20145 - RNA, 19 nt, synthetic construct
  misc_feature 1..19: note = siRNA antisense sequence
  source 1..19: mol_type = other RNA
gtgccagaggagcaattat

SEQ ID NO: 20146 - RNA, 19 nt, synthetic construct
  misc_feature 1..19: note = siRNA sense sequence
  source 1..19: mol_type = other RNA
taattgctcctctggcacc

SEQ ID NO: 20147 - RNA, 19 nt, synthetic construct
  misc_feature 1..19: note = siRNA antisense sequence
  source 1..19: mol_type = other RNA
ggtgccagaggagcaatta

SEQ ID NO: 20148 - RNA, 19 nt, synthetic construct
  misc_feature 1..19: note = siRNA sense sequence
  source 1..19: mol_type = other RNA
aattgctcctctggcacca

SEQ ID NO: 20149 - RNA, 19 nt, synthetic construct
  misc_feature 1..19: note = siRNA antisense sequence
  source 1..19: mol_type = other RNA
tggtgccagaggagcaatt

SEQ ID NO: 20150 - RNA, 19 nt, synthetic construct
  misc_feature 1..19: note = siRNA sense sequence
  source 1..19: mol_type = other RNA
attgctcctctggcaccaa

SEQ ID NO: 20151 - RNA, 19 nt, synthetic construct
  misc_feature 1..19: note = siRNA antisense sequence
  source 1..19: mol_type = other RNA
ttggtgccagaggagcaat

SEQ ID NO: 20152 - RNA, 19 nt, synthetic construct
  misc_feature 1..19: note = siRNA sense sequence
  source 1..19: mol_type = other RNA
gcctcaccagatcccaaaa

SEQ ID NO: 20153 - RNA, 19 nt, synthetic construct
  misc_feature 1..19: note = siRNA antisense sequence
  source 1..19: mol_type = other RNA
ttttgggatctggtgaggc

SEQ ID NO: 20154 - RNA, 19 nt, synthetic construct
  misc_feature 1..19: note = siRNA sense sequence
  source 1..19: mol_type = other RNA
acagagctccctccaaatg

SEQ ID NO: 20155 - RNA, 19 nt, synthetic construct
  misc_feature 1..19: note = siRNA antisense sequence
  source 1..19: mol_type = other RNA
catttggagggagctctgt

SEQ ID NO: 20156 - RNA, 19 nt, synthetic construct
  misc_feature 1..19: note = siRNA sense sequence
  source 1..19: mol_type = other RNA
cagagctccctccaaatgc

SEQ ID NO: 20157 - RNA, 19 nt, synthetic construct
  misc_feature 1..19: note = siRNA antisense sequence
  source 1..19: mol_type = other RNA
gcatttggagggagctctg

SEQ ID NO: 20158 - RNA, 19 nt, synthetic construct
  misc_feature 1..19: note = siRNA sense sequence
  source 1..19: mol_type = other RNA
agagctccctccaaatgct

SEQ ID NO: 20159 - RNA, 19 nt, synthetic construct
  misc_feature 1..19: note = siRNA antisense sequence
  source 1..19: mol_type = other RNA
agcatttggagggagctct

SEQ ID NO: 20160 - RNA, 19 nt, synthetic construct
  misc_feature 1..19: note = siRNA sense sequence
  source 1..19: mol_type = other RNA
agctccctccaaatgctct

SEQ ID NO: 20161 - RNA, 19 nt, synthetic construct
  misc_feature 1..19: note = siRNA antisense sequence
  source 1..19: mol_type = other RNA
agagcatttggagggagct

SEQ ID NO: 20162 - RNA, 19 nt, synthetic construct
  misc_feature 1..19: note = siRNA sense sequence
  source 1..19: mol_type = other RNA
gctccctccaaatgctcta

SEQ ID NO: 20163 - RNA, 19 nt, synthetic construct
  misc_feature 1..19: note = siRNA antisense sequence
  source 1..19: mol_type = other RNA
tagagcatttggagggagc

SEQ ID NO: 20164 - RNA, 19 nt, synthetic construct
  misc_feature 1..19: note = siRNA sense sequence
  source 1..19: mol_type = other RNA
ctccctccaaatgctctat

SEQ ID NO: 20165 - RNA, 19 nt, synthetic construct
  misc_feature 1..19: note = siRNA antisense sequence
  source 1..19: mol_type = other RNA
atagagcatttggagggag

SEQ ID NO: 20166 - RNA, 19 nt, synthetic construct
  misc_feature 1..19: note = siRNA sense sequence
  source 1..19: mol_type = other RNA
tccctccaaatgctctatc

SEQ ID NO: 20167 - RNA, 19 nt, synthetic construct
  misc_feature 1..19: note = siRNA antisense sequence
  source 1..19: mol_type = other RNA
gatagagcatttggaggga

SEQ ID NO: 20168 - RNA, 19 nt, synthetic construct
  misc_feature 1..19: note = siRNA sense sequence
  source 1..19: mol_type = other RNA
ccctccaaatgctctatct

SEQ ID NO: 20169 - RNA, 19 nt, synthetic construct
  misc_feature 1..19: note = siRNA antisense sequence
  source 1..19: mol_type = other RNA
agatagagcatttggaggg

SEQ ID NO: 20170 - RNA, 19 nt, synthetic construct
  misc_feature 1..19: note = siRNA sense sequence
  source 1..19: mol_type = other RNA
cctccaaatgctctatctt

SEQ ID NO: 20171 - RNA, 19 nt, synthetic construct
  misc_feature 1..19: note = siRNA antisense sequence
  source 1..19: mol_type = other RNA
aagatagagcatttggagg

SEQ ID NO: 20172 - RNA, 19 nt, synthetic construct
  misc_feature 1..19: note = siRNA sense sequence
  source 1..19: mol_type = other RNA
ctccaaatgctctatcttt

SEQ ID NO: 20173 - RNA, 19 nt, synthetic construct
  misc_feature 1..19: note = siRNA antisense sequence
  source 1..19: mol_type = other RNA
aaagatagagcatttggag

SEQ ID NO: 20174 - RNA, 19 nt, synthetic construct
  misc_feature 1..19: note = siRNA sense sequence
  source 1..19: mol_type = other RNA
ccaaatgctctatctttag

SEQ ID NO: 20175 - RNA, 19 nt, synthetic construct
  misc_feature 1..19: note = siRNA antisense sequence
  source 1..19: mol_type = other RNA
ctaaagatagagcatttgg

SEQ ID NO: 20176 - RNA, 19 nt, synthetic construct
  misc_feature 1..19: note = siRNA sense sequence
  source 1..19: mol_type = other RNA
tcatataatgttccagttg

SEQ ID NO: 20177 - RNA, 19 nt, synthetic construct
  misc_feature 1..19: note = siRNA antisense sequence
  source 1..19: mol_type = other RNA
caactggaacattatatga

SEQ ID NO: 20178 - RNA, 19 nt, synthetic construct
  misc_feature 1..19: note = siRNA sense sequence
  source 1..19: mol_type = other RNA
catataatgttccagttgc

SEQ ID NO: 20179 - RNA, 19 nt, synthetic construct
  misc_feature 1..19: note = siRNA antisense sequence
  source 1..19: mol_type = other RNA
gcaactggaacattatatg

SEQ ID NO: 20180 - RNA, 19 nt, synthetic construct
  misc_feature 1..19: note = siRNA sense sequence
  source 1..19: mol_type = other RNA
atataatgttccagttgca

SEQ ID NO: 20181 - RNA, 19 nt, synthetic construct
  misc_feature 1..19: note = siRNA antisense sequence
  source 1..19: mol_type = other RNA
tgcaactggaacattatat

SEQ ID NO: 20182 - RNA, 19 nt, synthetic construct
  misc_feature 1..19: note = siRNA sense sequence
  source 1..19: mol_type = other RNA
aatgttccagttgcacagg

SEQ ID NO: 20183 - RNA, 19 nt, synthetic construct
  misc_feature 1..19: note = siRNA antisense sequence
  source 1..19: mol_type = other RNA
cctgtgcaactggaacatt

SEQ ID NO: 20184 - RNA, 19 nt, synthetic construct
  misc_feature 1..19: note = siRNA sense sequence
  source 1..19: mol_type = other RNA
atgttccagttgcacagga

SEQ ID NO: 20185 - RNA, 19 nt, synthetic construct
  misc_feature 1..19: note = siRNA antisense sequence
  source 1..19: mol_type = other RNA
tcctgtgcaactggaacat

SEQ ID NO: 20186 - RNA, 19 nt, synthetic construct
  misc_feature 1..19: note = siRNA sense sequence
  source 1..19: mol_type = other RNA
tgttccagttgcacaggat

SEQ ID NO: 20187 - RNA, 19 nt, synthetic construct
  misc_feature 1..19: note = siRNA antisense sequence
  source 1..19: mol_type = other RNA
atcctgtgcaactggaaca

SEQ ID NO: 20188 - RNA, 19 nt, synthetic construct
  misc_feature 1..19: note = siRNA sense sequence
  source 1..19: mol_type = other RNA
gttccagttgcacaggatt

SEQ ID NO: 20189 - RNA, 19 nt, synthetic construct
  misc_feature 1..19: note = siRNA antisense sequence
  source 1..19: mol_type = other RNA
aatcctgtgcaactggaac

SEQ ID NO: 20190 - RNA, 19 nt, synthetic construct
  misc_feature 1..19: note = siRNA sense sequence
  source 1..19: mol_type = other RNA
ttccagttgcacaggatta

SEQ ID NO: 20191 - RNA, 19 nt, synthetic construct
  misc_feature 1..19: note = siRNA antisense sequence
  source 1..19: mol_type = other RNA
taatcctgtgcaactggaa

SEQ ID NO: 20192 - RNA, 19 nt, synthetic construct
  misc_feature 1..19: note = siRNA sense sequence
  source 1..19: mol_type = other RNA
tccagttgcacaggattaa

SEQ ID NO: 20193 - RNA, 19 nt, synthetic construct
  misc_feature 1..19: note = siRNA antisense sequence
  source 1..19: mol_type = other RNA
ttaatcctgtgcaactgga

SEQ ID NO: 20194 - RNA, 19 nt, synthetic construct
  misc_feature 1..19: note = siRNA sense sequence
  source 1..19: mol_type = other RNA
ccagttgcacaggattaat

SEQ ID NO: 20195 - RNA, 19 nt, synthetic construct
  misc_feature 1..19: note = siRNA antisense sequence
  source 1..19: mol_type = other RNA
attaatcctgtgcaactgg

SEQ ID NO: 20196 - RNA, 19 nt, synthetic construct
  misc_feature 1..19: note = siRNA sense sequence
  source 1..19: mol_type = other RNA
cagttgcacaggattaatg

SEQ ID NO: 20197 - RNA, 19 nt, synthetic construct
  misc_feature 1..19: note = siRNA antisense sequence
  source 1..19: mol_type = other RNA
cattaatcctgtgcaactg

SEQ ID NO: 20198 - RNA, 19 nt, synthetic construct
  misc_feature 1..19: note = siRNA sense sequence
  source 1..19: mol_type = other RNA
agttgcacaggattaatga

SEQ ID NO: 20199 - RNA, 19 nt, synthetic construct
  misc_feature 1..19: note = siRNA antisense sequence
  source 1..19: mol_type = other RNA
tcattaatcctgtgcaact

SEQ ID NO: 20200 - RNA, 19 nt, synthetic construct
  misc_feature 1..19: note = siRNA sense sequence
  source 1..19: mol_type = other RNA
gttgcacaggattaatgac

SEQ ID NO: 20201 - RNA, 19 nt, synthetic construct
  misc_feature 1..19: note = siRNA antisense sequence
  source 1..19: mol_type = other RNA
gtcattaatcctgtgcaac

SEQ ID NO: 20202 - RNA, 19 nt, synthetic construct
  misc_feature 1..19: note = siRNA sense sequence
  source 1..19: mol_type = other RNA
ttgcacaggattaatgact

SEQ ID NO: 20203 - RNA, 19 nt, synthetic construct
  misc_feature 1..19: note = siRNA antisense sequence
  source 1..19: mol_type = other RNA
agtcattaatcctgtgcaa

SEQ ID NO: 20204 - RNA, 19 nt, synthetic construct
  misc_feature 1..19: note = siRNA sense sequence
  source 1..19: mol_type = other RNA
tgcacaggattaatgactc

SEQ ID NO: 20205 - RNA, 19 nt, synthetic construct
  misc_feature 1..19: note = siRNA antisense sequence
  source 1..19: mol_type = other RNA
gagtcattaatcctgtgca

SEQ ID NO: 20206 - RNA, 19 nt, synthetic construct
  misc_feature 1..19: note = siRNA sense sequence
  source 1..19: mol_type = other RNA
gcacaggattaatgactct

SEQ ID NO: 20207 - RNA, 19 nt, synthetic construct
  misc_feature 1..19: note = siRNA antisense sequence
  source 1..19: mol_type = other RNA
agagtcattaatcctgtgc

SEQ ID NO: 20208 - RNA, 19 nt, synthetic construct
  misc_feature 1..19: note = siRNA sense sequence
  source 1..19: mol_type = other RNA
cacaggattaatgactcta

SEQ ID NO: 20209 - RNA, 19 nt, synthetic construct
  misc_feature 1..19: note = siRNA antisense sequence
  source 1..19: mol_type = other RNA
tagagtcattaatcctgtg

SEQ ID NO: 20210 - RNA, 19 nt, synthetic construct
  misc_feature 1..19: note = siRNA sense sequence
  source 1..19: mol_type = other RNA
acaggattaatgactctag

SEQ ID NO: 20211 - RNA, 19 nt, synthetic construct
  misc_feature 1..19: note = siRNA antisense sequence
  source 1..19: mol_type = other RNA
ctagagtcattaatcctgt

SEQ ID NO: 20212 - RNA, 19 nt, synthetic construct
  misc_feature 1..19: note = siRNA sense sequence
  source 1..19: mol_type = other RNA
caggattaatgactctagc

SEQ ID NO: 20213 - RNA, 19 nt, synthetic construct
  misc_feature 1..19: note = siRNA antisense sequence
  source 1..19: mol_type = other RNA
gctagagtcattaatcctg

SEQ ID NO: 20214 - RNA, 19 nt, synthetic construct
  misc_feature 1..19: note = siRNA sense sequence
  source 1..19: mol_type = other RNA
ggattaatgactctagctt

SEQ ID NO: 20215 - RNA, 19 nt, synthetic construct
  misc_feature 1..19: note = siRNA antisense sequence
  source 1..19: mol_type = other RNA
aagctagagtcattaatcc

SEQ ID NO: 20216 - RNA, 19 nt, synthetic construct
  misc_feature 1..19: note = siRNA sense sequence
  source 1..19: mol_type = other RNA
aatgactctagctttggca

SEQ ID NO: 20217 - RNA, 19 nt, synthetic construct
  misc_feature 1..19: note = siRNA antisense sequence
  source 1..19: mol_type = other RNA
tgccaaagctagagtcatt

SEQ ID NO: 20218 - RNA, 19 nt, synthetic construct
  misc_feature 1..19: note = siRNA sense sequence
  source 1..19: mol_type = other RNA
atgactctagctttggcaa

SEQ ID NO: 20219 - RNA, 19 nt, synthetic construct
  misc_feature 1..19: note = siRNA antisense sequence
  source 1..19: mol_type = other RNA
ttgccaaagctagagtcat

SEQ ID NO: 20220 - RNA, 19 nt, synthetic construct
  misc_feature 1..19: note = siRNA sense sequence
  source 1..19: mol_type = other RNA
tgactctagctttggcaaa

SEQ ID NO: 20221 - RNA, 19 nt, synthetic construct
  misc_feature 1..19: note = siRNA antisense sequence
  source 1..19: mol_type = other RNA
tttgccaaagctagagtca

SEQ ID NO: 20222 - RNA, 19 nt, synthetic construct
  misc_feature 1..19: note = siRNA sense sequence
  source 1..19: mol_type = other RNA
ttttgtcatgttggtggta

SEQ ID NO: 20223 - RNA, 19 nt, synthetic construct
  misc_feature 1..19: note = siRNA antisense sequence
  source 1..19: mol_type = other RNA
taccaccaacatgacaaaa

SEQ ID NO: 20224 - RNA, 19 nt, synthetic construct
  misc_feature 1..19: note = siRNA sense sequence
  source 1..19: mol_type = other RNA
ttgtcatgttggtggtaag

SEQ ID NO: 20225 - RNA, 19 nt, synthetic construct
  misc_feature 1..19: note = siRNA antisense sequence
  source 1..19: mol_type = other RNA
cttaccaccaacatgacaa

SEQ ID NO: 20226 - RNA, 19 nt, synthetic construct
  misc_feature 1..19: note = siRNA sense sequence
  source 1..19: mol_type = other RNA
tgtcatgttggtggtaagc

SEQ ID NO: 20227 - RNA, 19 nt, synthetic construct
  misc_feature 1..19: note = siRNA antisense sequence
  source 1..19: mol_type = other RNA
gcttaccaccaacatgaca

SEQ ID NO: 20228 - RNA, 19 nt, synthetic construct
  misc_feature 1..19: note = siRNA sense sequence
  source 1..19: mol_type = other RNA
tgttggtggtaagctccag

SEQ ID NO: 20229 - RNA, 19 nt, synthetic construct
  misc_feature 1..19: note = siRNA antisense sequence
  source 1..19: mol_type = other RNA
ctggagcttaccaccaaca

SEQ ID NO: 20230 - RNA, 19 nt, synthetic construct
  misc_feature 1..19: note = siRNA sense sequence
  source 1..19: mol_type = other RNA
gttggtggtaagctccagg

SEQ ID NO: 20231 - RNA, 19 nt, synthetic construct
  misc_feature 1..19: note = siRNA antisense sequence
  source 1..19: mol_type = other RNA
cctggagcttaccaccaac

SEQ ID NO: 20232 - RNA, 19 nt, synthetic construct
  misc_feature 1..19: note = siRNA sense sequence
  source 1..19: mol_type = other RNA
ttggtggtaagctccaggg

SEQ ID NO: 20233 - RNA, 19 nt, synthetic construct
  misc_feature 1..19: note = siRNA antisense sequence
  source 1..19: mol_type = other RNA
ccctggagcttaccaccaa

SEQ ID NO: 20234 - RNA, 19 nt, synthetic construct
  misc_feature 1..19: note = siRNA sense sequence
  source 1..19: mol_type = other RNA
tggtaagctccagggttgt

SEQ ID NO: 20235 - RNA, 19 nt, synthetic construct
  misc_feature 1..19: note = siRNA antisense sequence
  source 1..19: mol_type = other RNA
acaaccctggagcttacca

SEQ ID NO: 20236 - RNA, 19 nt, synthetic construct
  misc_feature 1..19: note = siRNA sense sequence
  source 1..19: mol_type = other RNA
ggtaagctccagggttgtg

SEQ ID NO: 20237 - RNA, 19 nt, synthetic construct
  misc_feature 1..19: note = siRNA antisense sequence
  source 1..19: mol_type = other RNA
cacaaccctggagcttacc

SEQ ID NO: 20238 - RNA, 19 nt, synthetic construct
  misc_feature 1..19: note = siRNA sense sequence
  source 1..19: mol_type = other RNA
gtaagctccagggttgtgt

SEQ ID NO: 20239 - RNA, 19 nt, synthetic construct
  misc_feature 1..19: note = siRNA antisense sequence
  source 1..19: mol_type = other RNA
acacaaccctggagcttac

SEQ ID NO: 20240 - RNA, 19 nt, synthetic construct
  misc_feature 1..19: note = siRNA sense sequence
  source 1..19: mol_type = other RNA
taagctccagggttgtgta

SEQ ID NO: 20241 - RNA, 19 nt, synthetic construct
  misc_feature 1..19: note = siRNA antisense sequence
  source 1..19: mol_type = other RNA
tacacaaccctggagctta

SEQ ID NO: 20242 - RNA, 19 nt, synthetic construct
  misc_feature 1..19: note = siRNA sense sequence
  source 1..19: mol_type = other RNA
aagctccagggttgtgtat

SEQ ID NO: 20243 - RNA, 19 nt, synthetic construct
  misc_feature 1..19: note = siRNA antisense sequence
  source 1..19: mol_type = other RNA
atacacaaccctggagctt

SEQ ID NO: 20244 - RNA, 19 nt, synthetic construct
  misc_feature 1..19: note = siRNA sense sequence
  source 1..19: mol_type = other RNA
tccagggttgtgtatatag

SEQ ID NO: 20245 - RNA, 19 nt, synthetic construct
  misc_feature 1..19: note = siRNA antisense sequence
  source 1..19: mol_type = other RNA
ctatatacacaaccctgga

SEQ ID NO: 20246 - RNA, 19 nt, synthetic construct
  misc_feature 1..19: note = siRNA sense sequence
  source 1..19: mol_type = other RNA
ccagggttgtgtatatagg

SEQ ID NO: 20247 - RNA, 19 nt, synthetic construct
  misc_feature 1..19: note = siRNA antisense sequence
  source 1..19: mol_type = other RNA
cctatatacacaaccctgg

SEQ ID NO: 20248 - RNA, 19 nt, synthetic construct
  misc_feature 1..19: note = siRNA sense sequence
  source 1..19: mol_type = other RNA
gttgtgtatataggaagaa

SEQ ID NO: 20249 - RNA, 19 nt, synthetic construct
  misc_feature 1..19: note = siRNA antisense sequence
  source 1..19: mol_type = other RNA
ttcttcctatatacacaac

SEQ ID NO: 20250 - RNA, 19 nt, synthetic construct
  misc_feature 1..19: note = siRNA sense sequence
  source 1..19: mol_type = other RNA
tgtgtatataggaagaaga

SEQ ID NO: 20251 - RNA, 19 nt, synthetic construct
  misc_feature 1..19: note = siRNA antisense sequence
  source 1..19: mol_type = other RNA
tcttcttcctatatacaca

SEQ ID NO: 20252 - RNA, 19 nt, synthetic construct
  misc_feature 1..19: note = siRNA sense sequence
  source 1..19: mol_type = other RNA
tgtatataggaagaagact

SEQ ID NO: 20253 - RNA, 19 nt, synthetic construct
  misc_feature 1..19: note = siRNA antisense sequence
  source 1..19: mol_type = other RNA
agtcttcttcctatataca

SEQ ID NO: 20254 - RNA, 19 nt, synthetic construct
  misc_feature 1..19: note = siRNA sense sequence
  source 1..19: mol_type = other RNA
gtatataggaagaagacta

SEQ ID NO: 20255 - RNA, 19 nt, synthetic construct
  misc_feature 1..19: note = siRNA antisense sequence
  source 1..19: mol_type = other RNA
tagtcttcttcctatatac

SEQ ID NO: 20256 - RNA, 19 nt, synthetic construct
  misc_feature 1..19: note = siRNA sense sequence
  source 1..19: mol_type = other RNA
aaatgcatatgctggttgg

SEQ ID NO: 20257 - RNA, 19 nt, synthetic construct
  misc_feature 1..19: note = siRNA antisense sequence
  source 1..19: mol_type = other RNA
ccaaccagcatatgcattt

SEQ ID NO: 20258 - RNA, 19 nt, synthetic construct
  misc_feature 1..19: note = siRNA sense sequence
  source 1..19: mol_type = other RNA
aatgcatatgctggttggt

SEQ ID NO: 20259 - RNA, 19 nt, synthetic construct
  misc_feature 1..19: note = siRNA antisense sequence
  source 1..19: mol_type = other RNA
accaaccagcatatgcatt

SEQ ID NO: 20260 - RNA, 19 nt, synthetic construct
  misc_feature 1..19: note = siRNA sense sequence
  source 1..19: mol_type = other RNA
atgcatatgctggttggtg

SEQ ID NO: 20261 - RNA, 19 nt, synthetic construct
  misc_feature 1..19: note = siRNA antisense sequence
  source 1..19: mol_type = other RNA
caccaaccagcatatgcat

SEQ ID NO: 20262 - RNA, 19 nt, synthetic construct
  misc_feature 1..19: note = siRNA sense sequence
  source 1..19: mol_type = other RNA
tgcatatgctggttggtgt

SEQ ID NO: 20263 - RNA, 19 nt, synthetic construct
  misc_feature 1..19: note = siRNA antisense sequence
  source 1..19: mol_type = other RNA
acaccaaccagcatatgca

SEQ ID NO: 20264 - RNA, 19 nt, synthetic construct
  misc_feature 1..19: note = siRNA sense sequence
  source 1..19: mol_type = other RNA
catatgctggttggtgtta

SEQ ID NO: 20265 - RNA, 19 nt, synthetic construct
  misc_feature 1..19: note = siRNA antisense sequence
  source 1..19: mol_type = other RNA
taacaccaaccagcatatg

SEQ ID NO: 20266 - RNA, 19 nt, synthetic construct
  misc_feature 1..19: note = siRNA sense sequence
  source 1..19: mol_type = other RNA
atatgctggttggtgttag

SEQ ID NO: 20267 - RNA, 19 nt, synthetic construct
  misc_feature 1..19: note = siRNA antisense sequence
  source 1..19: mol_type = other RNA
ctaacaccaaccagcatat

SEQ ID NO: 20268 - RNA, 19 nt, synthetic construct
  misc_feature 1..19: note = siRNA sense sequence
  source 1..19: mol_type = other RNA
tatgctggttggtgttagg

SEQ ID NO: 20269 - RNA, 19 nt, synthetic construct
  misc_feature 1..19: note = siRNA antisense sequence
  source 1..19: mol_type = other RNA
cctaacaccaaccagcata

SEQ ID NO: 20270 - RNA, 19 nt, synthetic construct
  misc_feature 1..19: note = siRNA sense sequence
  source 1..19: mol_type = other RNA
atgctggttggtgttagga

SEQ ID NO: 20271 - RNA, 19 nt, synthetic construct
  misc_feature 1..19: note = siRNA antisense sequence
  source 1..19: mol_type = other RNA
tcctaacaccaaccagcat

SEQ ID NO: 20272 - RNA, 19 nt, synthetic construct
  misc_feature 1..19: note = siRNA sense sequence
  source 1..19: mol_type = other RNA
tggttggtgttaggaattc

SEQ ID NO: 20273 - RNA, 19 nt, synthetic construct
  misc_feature 1..19: note = siRNA antisense sequence
  source 1..19: mol_type = other RNA
gaattcctaacaccaacca

SEQ ID NO: 20274 - RNA, 19 nt, synthetic construct
  misc_feature 1..19: note = siRNA sense sequence
  source 1..19: mol_type = other RNA
ggttggtgttaggaattca

SEQ ID NO: 20275 - RNA, 19 nt, synthetic construct
  misc_feature 1..19: note = siRNA antisense sequence
  source 1..19: mol_type = other RNA
tgaattcctaacaccaacc

SEQ ID NO: 20276 - RNA, 19 nt, synthetic construct
  misc_feature 1..19: note = siRNA sense sequence
  source 1..19: mol_type = other RNA
tcaaatatgcaaaggagtg

SEQ ID NO: 20277 - RNA, 19 nt, synthetic construct
  misc_feature 1..19: note = siRNA antisense sequence
  source 1..19: mol_type = other RNA
cactcctttgcatatttga

SEQ ID NO: 20278 - RNA, 19 nt, synthetic construct
  misc_feature 1..19: note = siRNA sense sequence
  source 1..19: mol_type = other RNA
caaatatgcaaaggagtgg

SEQ ID NO: 20279 - RNA, 19 nt, synthetic construct
  misc_feature 1..19: note = siRNA antisense sequence
  source 1..19: mol_type = other RNA
ccactcctttgcatatttg

SEQ ID NO: 20280 - RNA, 19 nt, synthetic construct
  misc_feature 1..19: note = siRNA sense sequence
  source 1..19: mol_type = other RNA
aaatatgcaaaggagtgga

SEQ ID NO: 20281 - RNA, 19 nt, synthetic construct
  misc_feature 1..19: note = siRNA antisense sequence
  source 1..19: mol_type = other RNA
tccactcctttgcatattt

SEQ ID NO: 20282 - RNA, 19 nt, synthetic construct
  misc_feature 1..19: note = siRNA sense sequence
  source 1..19: mol_type = other RNA
aatatgcaaaggagtggat

SEQ ID NO: 20283 - RNA, 19 nt, synthetic construct
  misc_feature 1..19: note = siRNA antisense sequence
  source 1..19: mol_type = other RNA
atccactcctttgcatatt

SEQ ID NO: 20284 - RNA, 19 nt, synthetic construct
  misc_feature 1..19: note = siRNA sense sequence
  source 1..19: mol_type = other RNA
atatgcaaaggagtggata

SEQ ID NO: 20285 - RNA, 19 nt, synthetic construct
  misc_feature 1..19: note = siRNA antisense sequence
  source 1..19: mol_type = other RNA
tatccactcctttgcatat

SEQ ID NO: 20286 - RNA, 19 nt, synthetic construct
  misc_feature 1..19: note = siRNA sense sequence
  source 1..19: mol_type = other RNA
tatgcaaaggagtggatac

SEQ ID NO: 20287 - RNA, 19 nt, synthetic construct
  misc_feature 1..19: note = siRNA antisense sequence
  source 1..19: mol_type = other RNA
gtatccactcctttgcata

SEQ ID NO: 20288 - RNA, 19 nt, synthetic construct
  misc_feature 1..19: note = siRNA sense sequence
  source 1..19: mol_type = other RNA
atgcaaaggagtggataca

SEQ ID NO: 20289 - RNA, 19 nt, synthetic construct
  misc_feature 1..19: note = siRNA antisense sequence
  source 1..19: mol_type = other RNA
tgtatccactcctttgcat

SEQ ID NO: 20290 - RNA, 19 nt, synthetic construct
  misc_feature 1..19: note = siRNA sense sequence
  source 1..19: mol_type = other RNA
gatctcctaaaataaatgc

SEQ ID NO: 20291 - RNA, 19 nt, synthetic construct
  misc_feature 1..19: note = siRNA antisense sequence
  source 1..19: mol_type = other RNA
gcatttattttaggagatc

SEQ ID NO: 20292 - RNA, 19 nt, synthetic construct
  misc_feature 1..19: note = siRNA sense sequence
  source 1..19: mol_type = other RNA
taaatatagcacctaagtc

SEQ ID NO: 20293 - RNA, 19 nt, synthetic construct
  misc_feature 1..19: note = siRNA antisense sequence
  source 1..19: mol_type = other RNA
gacttaggtgctatattta

SEQ ID NO: 20294 - RNA, 19 nt, synthetic construct
  misc_feature 1..19: note = siRNA sense sequence
  source 1..19: mol_type = other RNA
aaatatagcacctaagtca

SEQ ID NO: 20295 - RNA, 19 nt, synthetic construct
  misc_feature 1..19: note = siRNA antisense sequence
  source 1..19: mol_type = other RNA
tgacttaggtgctatattt

SEQ ID NO: 20296 - RNA, 19 nt, synthetic construct
  misc_feature 1..19: note = siRNA sense sequence
  source 1..19: mol_type = other RNA
gcacctaagtcactttaaa

SEQ ID NO: 20297 - RNA, 19 nt, synthetic construct
  misc_feature 1..19: note = siRNA antisense sequence
  source 1..19: mol_type = other RNA
tttaaagtgacttaggtgc

SEQ ID NO: 20298 - RNA, 19 nt, synthetic construct
  misc_feature 1..19: note = siRNA sense sequence
  source 1..19: mol_type = other RNA
cacctaagtcactttaaaa

SEQ ID NO: 20299 - RNA, 19 nt, synthetic construct
  misc_feature 1..19: note = siRNA antisense sequence
  source 1..19: mol_type = other RNA
ttttaaagtgacttaggtg

SEQ ID NO: 20300 - RNA, 19 nt, synthetic construct
  misc_feature 1..19: note = siRNA sense sequence
  source 1..19: mol_type = other RNA
aaatacatgggtactggcc

SEQ ID NO: 20301 - RNA, 19 nt, synthetic construct
  misc_feature 1..19: note = siRNA antisense sequence
  source 1..19: mol_type = other RNA
ggccagtacccatgtattt

SEQ ID NO: 20302 - RNA, 19 nt, synthetic construct
  misc_feature 1..19: note = siRNA sense sequence
  source 1..19: mol_type = other RNA
aatacatgggtactggcca

SEQ ID NO: 20303 - RNA, 19 nt, synthetic construct
  misc_feature 1..19: note = siRNA antisense sequence
  source 1..19: mol_type = other RNA
tggccagtacccatgtatt

SEQ ID NO: 20304 - RNA, 19 nt, synthetic construct
  misc_feature 1..19: note = siRNA sense sequence
  source 1..19: mol_type = other RNA
atacatgggtactggccaa

SEQ ID NO: 20305 - RNA, 19 nt, synthetic construct
  misc_feature 1..19: note = siRNA antisense sequence
  source 1..19: mol_type = other RNA
ttggccagtacccatgtat

SEQ ID NO: 20306 - RNA, 19 nt, synthetic construct
  misc_feature 1..19: note = siRNA sense sequence
  source 1..19: mol_type = other RNA
tacatgggtactggccaat

SEQ ID NO: 20307 - RNA, 19 nt, synthetic construct
  misc_feature 1..19: note = siRNA antisense sequence
  source 1..19: mol_type = other RNA
attggccagtacccatgta

SEQ ID NO: 20308 - RNA, 19 nt, synthetic construct
  misc_feature 1..19: note = siRNA sense sequence
  source 1..19: mol_type = other RNA
acatgggtactggccaatc

SEQ ID NO: 20309 - RNA, 19 nt, synthetic construct
  misc_feature 1..19: note = siRNA antisense sequence
  source 1..19: mol_type = other RNA
gattggccagtacccatgt

SEQ ID NO: 20310 - RNA, 19 nt, synthetic construct
  misc_feature 1..19: note = siRNA sense sequence
  source 1..19: mol_type = other RNA
catgggtactggccaatcc

SEQ ID NO: 20311 - RNA, 19 nt, synthetic construct
  misc_feature 1..19: note = siRNA antisense sequence
  source 1..19: mol_type = other RNA
ggattggccagtacccatg

SEQ ID NO: 20312 - RNA, 19 nt, synthetic construct
  misc_feature 1..19: note = siRNA sense sequence
  source 1..19: mol_type = other RNA
atgggtactggccaatcct

SEQ ID NO: 20313 - RNA, 19 nt, synthetic construct
  misc_feature 1..19: note = siRNA antisense sequence
  source 1..19: mol_type = other RNA
aggattggccagtacccat

SEQ ID NO: 20314 - RNA, 19 nt, synthetic construct
  misc_feature 1..19: note = siRNA sense sequence
  source 1..19: mol_type = other RNA
tgggtactggccaatcctt

SEQ ID NO: 20315 - RNA, 19 nt, synthetic construct
  misc_feature 1..19: note = siRNA antisense sequence
  source 1..19: mol_type = other RNA
aaggattggccagtaccca

SEQ ID NO: 20316 - RNA, 19 nt, synthetic construct
  misc_feature 1..19: note = siRNA sense sequence
  source 1..19: mol_type = other RNA
gggtactggccaatcctta

SEQ ID NO: 20317 - RNA, 19 nt, synthetic construct
  misc_feature 1..19: note = siRNA antisense sequence
  source 1..19: mol_type = other RNA
taaggattggccagtaccc

SEQ ID NO: 20318 - RNA, 19 nt, synthetic construct
  misc_feature 1..19: note = siRNA sense sequence
  source 1..19: mol_type = other RNA
ggtactggccaatccttaa

SEQ ID NO: 20319 - RNA, 19 nt, synthetic construct
  misc_feature 1..19: note = siRNA antisense sequence
  source 1..19: mol_type = other RNA
ttaaggattggccagtacc

SEQ ID NO: 20320 - RNA, 19 nt, synthetic construct
  misc_feature 1..19: note = siRNA sense sequence
  source 1..19: mol_type = other RNA
tactggccaatccttaaaa

SEQ ID NO: 20321 - RNA, 19 nt, synthetic construct
  misc_feature 1..19: note = siRNA antisense sequence
  source 1..19: mol_type = other RNA
ttttaaggattggccagta

SEQ ID NO: 20322 - RNA, 19 nt, synthetic construct
  misc_feature 1..19: note = siRNA sense sequence
  source 1..19: mol_type = other RNA
aaatgatcttatgccgtat

SEQ ID NO: 20323 - RNA, 19 nt, synthetic construct
  misc_feature 1..19: note = siRNA antisense sequence
  source 1..19: mol_type = other RNA
atacggcataagatcattt

SEQ ID NO: 20324 - RNA, 19 nt, synthetic construct
  misc_feature 1..19: note = siRNA sense sequence
  source 1..19: mol_type = other RNA
acttctgttcataggattt

SEQ ID NO: 20325 - RNA, 19 nt, synthetic construct
  misc_feature 1..19: note = siRNA antisense sequence
  source 1..19: mol_type = other RNA
aaatcctatgaacagaagt

SEQ ID NO: 20326 - RNA, 19 nt, synthetic construct
  misc_feature 1..19: note = siRNA sense sequence
  source 1..19: mol_type = other RNA
cttctgttcataggatttt

SEQ ID NO: 20327 - RNA, 19 nt, synthetic construct
  misc_feature 1..19: note = siRNA antisense sequence
  source 1..19: mol_type = other RNA
aaaatcctatgaacagaag

SEQ ID NO: 20328 - RNA, 19 nt, synthetic construct
  misc_feature 1..19: note = siRNA sense sequence
  source 1..19: mol_type = other RNA
ttctgttcataggattttg

SEQ ID NO: 20329 - RNA, 19 nt, synthetic construct
  misc_feature 1..19: note = siRNA antisense sequence
  source 1..19: mol_type = other RNA
caaaatcctatgaacagaa

SEQ ID NO: 20330 - RNA, 19 nt, synthetic construct
  misc_feature 1..19: note = siRNA sense sequence
  source 1..19: mol_type = other RNA
tctgttcataggattttgt

SEQ ID NO: 20331 - RNA, 19 nt, synthetic construct
  misc_feature 1..19: note = siRNA antisense sequence
  source 1..19: mol_type = other RNA
acaaaatcctatgaacaga

SEQ ID NO: 20332 - RNA, 19 nt, synthetic construct
  misc_feature 1..19: note = siRNA sense sequence
  source 1..19: mol_type = other RNA
tgtttatttggtaggaggt

SEQ ID NO: 20333 - RNA, 19 nt, synthetic construct
  misc_feature 1..19: note = siRNA antisense sequence
  source 1..19: mol_type = other RNA
acctcctaccaaataaaca

SEQ ID NO: 20334 - RNA, 19 nt, synthetic construct
  misc_feature 1..19: note = siRNA sense sequence
  source 1..19: mol_type = other RNA
gtttatttggtaggaggtt

SEQ ID NO: 20335 - RNA, 19 nt, synthetic construct
  misc_feature 1..19: note = siRNA antisense sequence
  source 1..19: mol_type = other RNA
aacctcctaccaaataaac

SEQ ID NO: 20336 - RNA, 19 nt, synthetic construct
  misc_feature 1..19: note = siRNA sense sequence
  source 1..19: mol_type = other RNA
tttatttggtaggaggttt

SEQ ID NO: 20337 - RNA, 19 nt, synthetic construct
  misc_feature 1..19: note = siRNA antisense sequence
  source 1..19: mol_type = other RNA
aaacctcctaccaaataaa

SEQ ID NO: 20338 - RNA, 19 nt, synthetic construct
  misc_feature 1..19: note = siRNA sense sequence
  source 1..19: mol_type = other RNA
ttatttggtaggaggtttt

SEQ ID NO: 20339 - RNA, 19 nt, synthetic construct
  misc_feature 1..19: note = siRNA antisense sequence
  source 1..19: mol_type = other RNA
aaaacctcctaccaaataa

SEQ ID NO: 20340 - RNA, 19 nt, synthetic construct
  misc_feature 1..19: note = siRNA sense sequence
  source 1..19: mol_type = other RNA
tatttggtaggaggttttg

SEQ ID NO: 20341 - RNA, 19 nt, synthetic construct
  misc_feature 1..19: note = siRNA antisense sequence
  source 1..19: mol_type = other RNA
caaaacctcctaccaaata

SEQ ID NO: 20342 - RNA, 19 nt, synthetic construct
  misc_feature 1..19: note = siRNA sense sequence
  source 1..19: mol_type = other RNA
atttggtaggaggttttgt

SEQ ID NO: 20343 - RNA, 19 nt, synthetic construct
  misc_feature 1..19: note = siRNA antisense sequence
  source 1..19: mol_type = other RNA
acaaaacctcctaccaaat

SEQ ID NO: 20344 - RNA, 19 nt, synthetic construct
  misc_feature 1..19: note = siRNA sense sequence
  source 1..19: mol_type = other RNA
tttggtaggaggttttgta

SEQ ID NO: 20345 - RNA, 19 nt, synthetic construct
  misc_feature 1..19: note = siRNA antisense sequence
  source 1..19: mol_type = other RNA
tacaaaacctcctaccaaa

SEQ ID NO: 20346 - RNA, 19 nt, synthetic construct
  misc_feature 1..19: note = siRNA sense sequence
  source 1..19: mol_type = other RNA
agtaagcactttccatcat

SEQ ID NO: 20347 - RNA, 19 nt, synthetic construct
  misc_feature 1..19: note = siRNA antisense sequence
  source 1..19: mol_type = other RNA
atgatggaaagtgcttact

SEQ ID NO: 20348 - RNA, 19 nt, synthetic construct
  misc_feature 1..19: note = siRNA sense sequence
  source 1..19: mol_type = other RNA
gtaagcactttccatcatg

SEQ ID NO: 20349 - RNA, 19 nt, synthetic construct
  misc_feature 1..19: note = siRNA antisense sequence
  source 1..19: mol_type = other RNA
catgatggaaagtgcttac

SEQ ID NO: 20350 - RNA, 19 nt, synthetic construct
  misc_feature 1..19: note = siRNA sense sequence
  source 1..19: mol_type = other RNA
aatttagatagtgagtgag

SEQ ID NO: 20351 - RNA, 19 nt, synthetic construct
  misc_feature 1..19: note = siRNA antisense sequence
  source 1..19: mol_type = other RNA
ctcactcactatctaaatt

SEQ ID NO: 20352 - RNA, 19 nt, synthetic construct
  misc_feature 1..19: note = siRNA sense sequence
  source 1..19: mol_type = other RNA
tagatagtgagtgagtaca

SEQ ID NO: 20353 - RNA, 19 nt, synthetic construct
  misc_feature 1..19: note = siRNA antisense sequence
  source 1..19: mol_type = other RNA
tgtactcactcactatcta

SEQ ID NO: 20354 - RNA, 19 nt, synthetic construct
  misc_feature 1..19: note = siRNA sense sequence
  source 1..19: mol_type = other RNA
actttcccttttacccttt

SEQ ID NO: 20355 - RNA, 19 nt, synthetic construct
  misc_feature 1..19: note = siRNA antisense sequence
  source 1..19: mol_type = other RNA
aaagggtaaaagggaaagt

SEQ ID NO: 20356 - RNA, 19 nt, synthetic construct
  misc_feature 1..19: note = siRNA sense sequence
  source 1..19: mol_type = other RNA
ctttcccttttaccctttt

SEQ ID NO: 20357 - RNA, 19 nt, synthetic construct
  misc_feature 1..19: note = siRNA antisense sequence
  source 1..19: mol_type = other RNA
aaaagggtaaaagggaaag

SEQ ID NO: 20358 - RNA, 19 nt, synthetic construct
  misc_feature 1..19: note = siRNA sense sequence
  source 1..19: mol_type = other RNA
acccttttgtctatattag

SEQ ID NO: 20359 - RNA, 19 nt, synthetic construct
  misc_feature 1..19: note = siRNA antisense sequence
  source 1..19: mol_type = other RNA
ctaatatagacaaaagggt

SEQ ID NO: 20360 - RNA, 19 nt, synthetic construct
  misc_feature 1..19: note = siRNA sense sequence
  source 1..19: mol_type = other RNA
ccttttgtctatattagct

SEQ ID NO: 20361 - RNA, 19 nt, synthetic construct
  misc_feature 1..19: note = siRNA antisense sequence
  source 1..19: mol_type = other RNA
agctaatatagacaaaagg

SEQ ID NO: 20362 - RNA, 19 nt, synthetic construct
  misc_feature 1..19: note = siRNA sense sequence
  source 1..19: mol_type = other RNA
taactaatcctcccagtca

SEQ ID NO: 20363 - RNA, 19 nt, synthetic construct
  misc_feature 1..19: note = siRNA antisense sequence
  source 1..19: mol_type = other RNA
tgactgggaggattagtta

SEQ ID NO: 20364 - RNA, 19 nt, synthetic construct
  misc_feature 1..19: note = siRNA sense sequence
  source 1..19: mol_type = other RNA
aactaatcctcccagtcat

SEQ ID NO: 20365 - RNA, 19 nt, synthetic construct
  misc_feature 1..19: note = siRNA antisense sequence
  source 1..19: mol_type = other RNA
atgactgggaggattagtt

SEQ ID NO: 20366 - RNA, 19 nt, synthetic construct
  misc_feature 1..19: note = siRNA sense sequence
  source 1..19: mol_type = other RNA
actaatcctcccagtcatc

SEQ ID NO: 20367 - RNA, 19 nt, synthetic construct
  misc_feature 1..19: note = siRNA antisense sequence
  source 1..19: mol_type = other RNA
gatgactgggaggattagt

SEQ ID NO: 20368 - RNA, 19 nt, synthetic construct
  misc_feature 1..19: note = siRNA sense sequence
  source 1..19: mol_type = other RNA
ctaatcctcccagtcatcc

SEQ ID NO: 20369 - RNA, 19 nt, synthetic construct
  misc_feature 1..19: note = siRNA antisense sequence
  source 1..19: mol_type = other RNA
ggatgactgggaggattag

SEQ ID NO: 20370 - RNA, 19 nt, synthetic construct
  misc_feature 1..19: note = siRNA sense sequence
  source 1..19: mol_type = other RNA
taatcctcccagtcatcca

SEQ ID NO: 20371 - RNA, 19 nt, synthetic construct
  misc_feature 1..19: note = siRNA antisense sequence
  source 1..19: mol_type = other RNA
tggatgactgggaggatta

SEQ ID NO: 20372 - RNA, 19 nt, synthetic construct
  misc_feature 1..19: note = siRNA sense sequence
  source 1..19: mol_type = other RNA
aatcctcccagtcatccac

SEQ ID NO: 20373 - RNA, 19 nt, synthetic construct
  misc_feature 1..19: note = siRNA antisense sequence
  source 1..19: mol_type = other RNA
gtggatgactgggaggatt

SEQ ID NO: 20374 - RNA, 19 nt, synthetic construct
  misc_feature 1..19: note = siRNA sense sequence
  source 1..19: mol_type = other RNA
atcctcccagtcatccact

SEQ ID NO: 20375 - RNA, 19 nt, synthetic construct
  misc_feature 1..19: note = siRNA antisense sequence
  source 1..19: mol_type = other RNA
agtggatgactgggaggat

SEQ ID NO: 20376 - RNA, 19 nt, synthetic construct
  misc_feature 1..19: note = siRNA sense sequence
  source 1..19: mol_type = other RNA
tcctcccagtcatccactt

SEQ ID NO: 20377 - RNA, 19 nt, synthetic construct
  misc_feature 1..19: note = siRNA antisense sequence
  source 1..19: mol_type = other RNA
aagtggatgactgggagga

SEQ ID NO: 20378 - RNA, 19 nt, synthetic construct
  misc_feature 1..19: note = siRNA sense sequence
  source 1..19: mol_type = other RNA
cctcccagtcatccactta

SEQ ID NO: 20379 - RNA, 19 nt, synthetic construct
  misc_feature 1..19: note = siRNA antisense sequence
  source 1..19: mol_type = other RNA
taagtggatgactgggagg

SEQ ID NO: 20380 - RNA, 19 nt, synthetic construct
  misc_feature 1..19: note = siRNA sense sequence
  source 1..19: mol_type = other RNA
ctcccagtcatccacttag

SEQ ID NO: 20381 - RNA, 19 nt, synthetic construct
  misc_feature 1..19: note = siRNA antisense sequence
  source 1..19: mol_type = other RNA
ctaagtggatgactgggag

SEQ ID NO: 20382 - RNA, 19 nt, synthetic construct
  misc_feature 1..19: note = siRNA sense sequence
  source 1..19: mol_type = other RNA
tcccagtcatccacttagc

SEQ ID NO: 20383 - RNA, 19 nt, synthetic construct
  misc_feature 1..19: note = siRNA antisense sequence
  source 1..19: mol_type = other RNA
gctaagtggatgactggga

SEQ ID NO: 20384 - RNA, 19 nt, synthetic construct
  misc_feature 1..19: note = siRNA sense sequence
  source 1..19: mol_type = other RNA
cccagtcatccacttagct

SEQ ID NO: 20385 - RNA, 19 nt, synthetic construct
  misc_feature 1..19: note = siRNA antisense sequence
  source 1..19: mol_type = other RNA
agctaagtggatgactggg

SEQ ID NO: 20386 - RNA, 19 nt, synthetic construct
  misc_feature 1..19: note = siRNA sense sequence
  source 1..19: mol_type = other RNA
ccagtcatccacttagctt

SEQ ID NO: 20387 - RNA, 19 nt, synthetic construct
  misc_feature 1..19: note = siRNA antisense sequence
  source 1..19: mol_type = other RNA
aagctaagtggatgactgg

SEQ ID NO: 20388 - RNA, 19 nt, synthetic construct
  misc_feature 1..19: note = siRNA sense sequence
  source 1..19: mol_type = other RNA
catccacttagctttgctg

SEQ ID NO: 20389 - RNA, 19 nt, synthetic construct
  misc_feature 1..19: note = siRNA antisense sequence
  source 1..19: mol_type = other RNA
cagcaaagctaagtggatg

SEQ ID NO: 20390 - RNA, 19 nt, synthetic construct
  misc_feature 1..19: note = siRNA sense sequence
  source 1..19: mol_type = other RNA
cacttagctttgctggtgg

SEQ ID NO: 20391 - RNA, 19 nt, synthetic construct
  misc_feature 1..19: note = siRNA antisense sequence
  source 1..19: mol_type = other RNA
ccaccagcaaagctaagtg

SEQ ID NO: 20392 - RNA, 19 nt, synthetic construct
  misc_feature 1..19: note = siRNA sense sequence
  source 1..19: mol_type = other RNA
acttagctttgctggtgga

SEQ ID NO: 20393 - RNA, 19 nt, synthetic construct
  misc_feature 1..19: note = siRNA antisense sequence
  source 1..19: mol_type = other RNA
tccaccagcaaagctaagt

SEQ ID NO: 20394 - RNA, 19 nt, synthetic construct
  misc_feature 1..19: note = siRNA sense sequence
  source 1..19: mol_type = other RNA
cttagctttgctggtggag

SEQ ID NO: 20395 - RNA, 19 nt, synthetic construct
  misc_feature 1..19: note = siRNA antisense sequence
  source 1..19: mol_type = other RNA
ctccaccagcaaagctaag

SEQ ID NO: 20396 - RNA, 19 nt, synthetic construct
  misc_feature 1..19: note = siRNA sense sequence
  source 1..19: mol_type = other RNA
ttagctttgctggtggagg

SEQ ID NO: 20397 - RNA, 19 nt, synthetic construct
  misc_feature 1..19: note = siRNA antisense sequence
  source 1..19: mol_type = other RNA
cctccaccagcaaagctaa

SEQ ID NO: 20398 - RNA, 19 nt, synthetic construct
  misc_feature 1..19: note = siRNA sense sequence
  source 1..19: mol_type = other RNA
tagctttgctggtggaggt

SEQ ID NO: 20399 - RNA, 19 nt, synthetic construct
  misc_feature 1..19: note = siRNA antisense sequence
  source 1..19: mol_type = other RNA
acctccaccagcaaagcta

SEQ ID NO: 20400 - RNA, 19 nt, synthetic construct
  misc_feature 1..19: note = siRNA sense sequence
  source 1..19: mol_type = other RNA
agctttgctggtggaggtc

SEQ ID NO: 20401 - RNA, 19 nt, synthetic construct
  misc_feature 1..19: note = siRNA antisense sequence
  source 1..19: mol_type = other RNA
gacctccaccagcaaagct

SEQ ID NO: 20402 - RNA, 19 nt, synthetic construct
  misc_feature 1..19: note = siRNA sense sequence
  source 1..19: mol_type = other RNA
ttgctggtggaggtcacat

SEQ ID NO: 20403 - RNA, 19 nt, synthetic construct
  misc_feature 1..19: note = siRNA antisense sequence
  source 1..19: mol_type = other RNA
atgtgacctccaccagcaa

SEQ ID NO: 20404 - RNA, 19 nt, synthetic construct
  misc_feature 1..19: note = siRNA sense sequence
  source 1..19: mol_type = other RNA
tgctggtggaggtcacatg

SEQ ID NO: 20405 - RNA, 19 nt, synthetic construct
  misc_feature 1..19: note = siRNA antisense sequence
  source 1..19: mol_type = other RNA
catgtgacctccaccagca

SEQ ID NO: 20406 - RNA, 19 nt, synthetic construct
  misc_feature 1..19: note = siRNA sense sequence
  source 1..19: mol_type = other RNA
gctggtggaggtcacatgg

SEQ ID NO: 20407 - RNA, 19 nt, synthetic construct
  misc_feature 1..19: note = siRNA antisense sequence
  source 1..19: mol_type = other RNA
ccatgtgacctccaccagc

SEQ ID NO: 20408 - RNA, 19 nt, synthetic construct
  misc_feature 1..19: note = siRNA sense sequence
  source 1..19: mol_type = other RNA
ctggtggaggtcacatggg

SEQ ID NO: 20409 - RNA, 19 nt, synthetic construct
  misc_feature 1..19: note = siRNA antisense sequence
  source 1..19: mol_type = other RNA
cccatgtgacctccaccag

SEQ ID NO: 20410 - RNA, 19 nt, synthetic construct
  misc_feature 1..19: note = siRNA sense sequence
  source 1..19: mol_type = other RNA
tctgaggtttgcacattct

SEQ ID NO: 20411 - RNA, 19 nt, synthetic construct
  misc_feature 1..19: note = siRNA antisense sequence
  source 1..19: mol_type = other RNA
agaatgtgcaaacctcaga

SEQ ID NO: 20412 - RNA, 19 nt, synthetic construct
  misc_feature 1..19: note = siRNA sense sequence
  source 1..19: mol_type = other RNA
ctgaggtttgcacattctc

SEQ ID NO: 20413 - RNA, 19 nt, synthetic construct
  misc_feature 1..19: note = siRNA antisense sequence
  source 1..19: mol_type = other RNA
gagaatgtgcaaacctcag

SEQ ID NO: 20414 - RNA, 19 nt, synthetic construct
  misc_feature 1..19: note = siRNA sense sequence
  source 1..19: mol_type = other RNA
tgaggtttgcacattctct

SEQ ID NO: 20415 - RNA, 19 nt, synthetic construct
  misc_feature 1..19: note = siRNA antisense sequence
  source 1..19: mol_type = other RNA
agagaatgtgcaaacctca

SEQ ID NO: 20416 - RNA, 19 nt, synthetic construct
  misc_feature 1..19: note = siRNA sense sequence
  source 1..19: mol_type = other RNA
gaggtttgcacattctctc

SEQ ID NO: 20417 - RNA, 19 nt, synthetic construct
  misc_feature 1..19: note = siRNA antisense sequence
  source 1..19: mol_type = other RNA
gagagaatgtgcaaacctc

SEQ ID NO: 20418 - RNA, 19 nt, synthetic construct
  misc_feature 1..19: note = siRNA sense sequence
  source 1..19: mol_type = other RNA
tttgcacattctctctaaa

SEQ ID NO: 20419 - RNA, 19 nt, synthetic construct
  misc_feature 1..19: note = siRNA antisense sequence
  source 1..19: mol_type = other RNA
tttagagagaatgtgcaaa

SEQ ID NO: 20420 - RNA, 19 nt, synthetic construct
  misc_feature 1..19: note = siRNA sense sequence
  source 1..19: mol_type = other RNA
ttgcacattctctctaaat

SEQ ID NO: 20421 - RNA, 19 nt, synthetic construct
  misc_feature 1..19: note = siRNA antisense sequence
  source 1..19: mol_type = other RNA
atttagagagaatgtgcaa

SEQ ID NO: 20422 - RNA, 19 nt, synthetic construct
  misc_feature 1..19: note = siRNA sense sequence
  source 1..19: mol_type = other RNA
gcacattctctctaaataa

SEQ ID NO: 20423 - RNA, 19 nt, synthetic construct
  misc_feature 1..19: note = siRNA antisense sequence
  source 1..19: mol_type = other RNA
ttatttagagagaatgtgc

SEQ ID NO: 20424 - RNA, 19 nt, synthetic construct
  misc_feature 1..19: note = siRNA sense sequence
  source 1..19: mol_type = other RNA
caattgcgtttatcactag

SEQ ID NO: 20425 - RNA, 19 nt, synthetic construct
  misc_feature 1..19: note = siRNA antisense sequence
  source 1..19: mol_type = other RNA
ctagtgataaacgcaattg

SEQ ID NO: 20426 - RNA, 19 nt, synthetic construct
  misc_feature 1..19: note = siRNA sense sequence
  source 1..19: mol_type = other RNA
aattgcgtttatcactaga

SEQ ID NO: 20427 - RNA, 19 nt, synthetic construct
  misc_feature 1..19: note = siRNA antisense sequence
  source 1..19: mol_type = other RNA
tctagtgataaacgcaatt

SEQ ID NO: 20428 - RNA, 19 nt, synthetic construct
  misc_feature 1..19: note = siRNA sense sequence
  source 1..19: mol_type = other RNA
attgcgtttatcactagat

SEQ ID NO: 20429 - RNA, 19 nt, synthetic construct
  misc_feature 1..19: note = siRNA antisense sequence
  source 1..19: mol_type = other RNA
atctagtgataaacgcaat

SEQ ID NO: 20430 - RNA, 19 nt, synthetic construct
  misc_feature 1..19: note = siRNA sense sequence
  source 1..19: mol_type = other RNA
tggagctctggcttcttat

SEQ ID NO: 20431 - RNA, 19 nt, synthetic construct
  misc_feature 1..19: note = siRNA antisense sequence
  source 1..19: mol_type = other RNA
ataagaagccagagctcca

SEQ ID NO: 20432 - RNA, 19 nt, synthetic construct
  misc_feature 1..19: note = siRNA sense sequence
  source 1..19: mol_type = other RNA
ggagctctggcttcttatt

SEQ ID NO: 20433 - RNA, 19 nt, synthetic construct
  misc_feature 1..19: note = siRNA antisense sequence
  source 1..19: mol_type = other RNA
aataagaagccagagctcc

SEQ ID NO: 20434 - RNA, 19 nt, synthetic construct
  misc_feature 1..19: note = siRNA sense sequence
  source 1..19: mol_type = other RNA
gagctctggcttcttattt

SEQ ID NO: 20435 - RNA, 19 nt, synthetic construct
  misc_feature 1..19: note = siRNA antisense sequence
  source 1..19: mol_type = other RNA
aaataagaagccagagctc

SEQ ID NO: 20436 - RNA, 19 nt, synthetic construct
  misc_feature 1..19: note = siRNA sense sequence
  source 1..19: mol_type = other RNA
agctctggcttcttatttt

SEQ ID NO: 20437 - RNA, 19 nt, synthetic construct
  misc_feature 1..19: note = siRNA antisense sequence
  source 1..19: mol_type = other RNA
aaaataagaagccagagct

SEQ ID NO: 20438 - RNA, 19 nt, synthetic construct
  misc_feature 1..19: note = siRNA sense sequence
  source 1..19: mol_type = other RNA
gctctggcttcttattttg

SEQ ID NO: 20439 - RNA, 19 nt, synthetic construct
  misc_feature 1..19: note = siRNA antisense sequence
  source 1..19: mol_type = other RNA
caaaataagaagccagagc

SEQ ID NO: 20440 - RNA, 19 nt, synthetic construct
  misc_feature 1..19: note = siRNA sense sequence
  source 1..19: mol_type = other RNA
tctggcttcttattttgta

SEQ ID NO: 20441 - RNA, 19 nt, synthetic construct
  misc_feature 1..19: note = siRNA antisense sequence
  source 1..19: mol_type = other RNA
tacaaaataagaagccaga

SEQ ID NO: 20442 - RNA, 19 nt, synthetic construct
  misc_feature 1..19: note = siRNA sense sequence
  source 1..19: mol_type = other RNA
ctggcttcttattttgtaa

SEQ ID NO: 20443 - RNA, 19 nt, synthetic construct
  misc_feature 1..19: note = siRNA antisense sequence
  source 1..19: mol_type = other RNA
ttacaaaataagaagccag

SEQ ID NO: 20444 - RNA, 19 nt, synthetic construct
  misc_feature 1..19: note = siRNA sense sequence
  source 1..19: mol_type = other RNA
ttgccattatgtgttattc

SEQ ID NO: 20445 - RNA, 19 nt, synthetic construct
  misc_feature 1..19: note = siRNA antisense sequence
  source 1..19: mol_type = other RNA
gaataacacataatggcaa

SEQ ID NO: 20446 - RNA, 19 nt, synthetic construct
  misc_feature 1..19: note = siRNA sense sequence
  source 1..19: mol_type = other RNA
tgccattatgtgttattct

SEQ ID NO: 20447 - RNA, 19 nt, synthetic construct
  misc_feature 1..19: note = siRNA antisense sequence
  source 1..19: mol_type = other RNA
agaataacacataatggca

SEQ ID NO: 20448 - RNA, 19 nt, synthetic construct
  misc_feature 1..19: note = siRNA sense sequence
  source 1..19: mol_type = other RNA
gccattatgtgttattcta

SEQ ID NO: 20449 - RNA, 19 nt, synthetic construct
  misc_feature 1..19: note = siRNA antisense sequence
  source 1..19: mol_type = other RNA
tagaataacacataatggc

SEQ ID NO: 20450 - RNA, 19 nt, synthetic construct
  misc_feature 1..19: note = siRNA sense sequence
  source 1..19: mol_type = other RNA
taccattttcttacctaag

SEQ ID NO: 20451 - RNA, 19 nt, synthetic construct
  misc_feature 1..19: note = siRNA antisense sequence
  source 1..19: mol_type = other RNA
cttaggtaagaaaatggta

SEQ ID NO: 20452 - RNA, 19 nt, synthetic construct
  misc_feature 1..19: note = siRNA sense sequence
  source 1..19: mol_type = other RNA
cattttcttacctaagcac

SEQ ID NO: 20453 - RNA, 19 nt, synthetic construct
  misc_feature 1..19: note = siRNA antisense sequence
  source 1..19: mol_type = other RNA
gtgcttaggtaagaaaatg

SEQ ID NO: 20454 - RNA, 19 nt, synthetic construct
  misc_feature 1..19: note = siRNA sense sequence
  source 1..19: mol_type = other RNA
ttttcttacctaagcacgg

SEQ ID NO: 20455 - RNA, 19 nt, synthetic construct
  misc_feature 1..19: note = siRNA antisense sequence
  source 1..19: mol_type = other RNA
ccgtgcttaggtaagaaaa

SEQ ID NO: 20456 - RNA, 19 nt, synthetic construct
  misc_feature 1..19: note = siRNA sense sequence
  source 1..19: mol_type = other RNA
tttcttacctaagcacggc

SEQ ID NO: 20457 - RNA, 19 nt, synthetic construct
  misc_feature 1..19: note = siRNA antisense sequence
  source 1..19: mol_type = other RNA
gccgtgcttaggtaagaaa

SEQ ID NO: 20458 - RNA, 19 nt, synthetic construct
  misc_feature 1..19: note = siRNA sense sequence
  source 1..19: mol_type = other RNA
ttcttacctaagcacggct

SEQ ID NO: 20459 - RNA, 19 nt, synthetic construct
  misc_feature 1..19: note = siRNA antisense sequence
  source 1..19: mol_type = other RNA
agccgtgcttaggtaagaa

SEQ ID NO: 20460 - RNA, 19 nt, synthetic construct
  misc_feature 1..19: note = siRNA sense sequence
  source 1..19: mol_type = other RNA
tcttacctaagcacggcta

SEQ ID NO: 20461 - RNA, 19 nt, synthetic construct
  misc_feature 1..19: note = siRNA antisense sequence
  source 1..19: mol_type = other RNA
tagccgtgcttaggtaaga

SEQ ID NO: 20462 - RNA, 19 nt, synthetic construct
  misc_feature 1..19: note = siRNA sense sequence
  source 1..19: mol_type = other RNA
cttacctaagcacggctat

SEQ ID NO: 20463 - RNA, 19 nt, synthetic construct
  misc_feature 1..19: note = siRNA antisense sequence
  source 1..19: mol_type = other RNA
atagccgtgcttaggtaag

SEQ ID NO: 20464 - RNA, 19 nt, synthetic construct
  misc_feature 1..19: note = siRNA sense sequence
  source 1..19: mol_type = other RNA
ttacctaagcacggctatc

SEQ ID NO: 20465 - RNA, 19 nt, synthetic construct
  misc_feature 1..19: note = siRNA antisense sequence
  source 1..19: mol_type = other RNA
gatagccgtgcttaggtaa

SEQ ID NO: 20466 - RNA, 19 nt, synthetic construct
  misc_feature 1..19: note = siRNA sense sequence
  source 1..19: mol_type = other RNA
tacctaagcacggctatct

SEQ ID NO: 20467 - RNA, 19 nt, synthetic construct
  misc_feature 1..19: note = siRNA antisense sequence
  source 1..19: mol_type = other RNA
agatagccgtgcttaggta

SEQ ID NO: 20468 - RNA, 19 nt, synthetic construct
  misc_feature 1..19: note = siRNA sense sequence
  source 1..19: mol_type = other RNA
acctaagcacggctatctc

SEQ ID NO: 20469 - RNA, 19 nt, synthetic construct
  misc_feature 1..19: note = siRNA antisense sequence
  source 1..19: mol_type = other RNA
gagatagccgtgcttaggt

SEQ ID NO: 20470 - RNA, 19 nt, synthetic construct
  misc_feature 1..19: note = siRNA sense sequence
  source 1..19: mol_type = other RNA
cctaagcacggctatctca

SEQ ID NO: 20471 - RNA, 19 nt, synthetic construct
  misc_feature 1..19: note = siRNA antisense sequence
  source 1..19: mol_type = other RNA
tgagatagccgtgcttagg

SEQ ID NO: 20472 - RNA, 19 nt, synthetic construct
  misc_feature 1..19: note = siRNA sense sequence
  source 1..19: mol_type = other RNA
ctaagcacggctatctcaa

SEQ ID NO: 20473 - RNA, 19 nt, synthetic construct
  misc_feature 1..19: note = siRNA antisense sequence
  source 1..19: mol_type = other RNA
ttgagatagccgtgcttag

SEQ ID NO: 20474 - RNA, 19 nt, synthetic construct
  misc_feature 1..19: note = siRNA sense sequence
  source 1..19: mol_type = other RNA
taagcacggctatctcaaa

SEQ ID NO: 20475 - RNA, 19 nt, synthetic construct
  misc_feature 1..19: note = siRNA antisense sequence
  source 1..19: mol_type = other RNA
tttgagatagccgtgctta

SEQ ID NO: 20476 - RNA, 19 nt, synthetic construct
  misc_feature 1..19: note = siRNA sense sequence
  source 1..19: mol_type = other RNA
aagcacggctatctcaaat

SEQ ID NO: 20477 - RNA, 19 nt, synthetic construct
  misc_feature 1..19: note = siRNA antisense sequence
  source 1..19: mol_type = other RNA
atttgagatagccgtgctt

SEQ ID NO: 20478 - RNA, 19 nt, synthetic construct
  misc_feature 1..19: note = siRNA sense sequence
  source 1..19: mol_type = other RNA
agcacggctatctcaaata

SEQ ID NO: 20479 - RNA, 19 nt, synthetic construct
  misc_feature 1..19: note = siRNA antisense sequence
  source 1..19: mol_type = other RNA
tatttgagatagccgtgct

SEQ ID NO: 20480 - RNA, 19 nt, synthetic construct
  misc_feature 1..19: note = siRNA sense sequence
  source 1..19: mol_type = other RNA
gcacggctatctcaaatat

SEQ ID NO: 20481 - RNA, 19 nt, synthetic construct
  misc_feature 1..19: note = siRNA antisense sequence
  source 1..19: mol_type = other RNA
atatttgagatagccgtgc

SEQ ID NO: 20482 - RNA, 19 nt, synthetic construct
  misc_feature 1..19: note = siRNA sense sequence
  source 1..19: mol_type = other RNA
cacggctatctcaaatatt

SEQ ID NO: 20483 - RNA, 19 nt, synthetic construct
  misc_feature 1..19: note = siRNA antisense sequence
  source 1..19: mol_type = other RNA
aatatttgagatagccgtg

SEQ ID NO: 20484 - RNA, 19 nt, synthetic construct
  misc_feature 1..19: note = siRNA sense sequence
  source 1..19: mol_type = other RNA
cctaattttagaatgtcag

SEQ ID NO: 20485 - RNA, 19 nt, synthetic construct
  misc_feature 1..19: note = siRNA antisense sequence
  source 1..19: mol_type = other RNA
ctgacattctaaaattagg

SEQ ID NO: 20486 - RNA, 19 nt, synthetic construct
  misc_feature 1..19: note = siRNA sense sequence
  source 1..19: mol_type = other RNA
ttagaatgtcagttacaga

SEQ ID NO: 20487 - RNA, 19 nt, synthetic construct
  misc_feature 1..19: note = siRNA antisense sequence
  source 1..19: mol_type = other RNA
tctgtaactgacattctaa

SEQ ID NO: 20488 - RNA, 19 nt, synthetic construct
  misc_feature 1..19: note = siRNA sense sequence
  source 1..19: mol_type = other RNA
tagaatgtcagttacagac

SEQ ID NO: 20489 - RNA, 19 nt, synthetic construct
  misc_feature 1..19: note = siRNA antisense sequence
  source 1..19: mol_type = other RNA
gtctgtaactgacattcta

SEQ ID NO: 20490 - RNA, 19 nt, synthetic construct
  misc_feature 1..19: note = siRNA sense sequence
  source 1..19: mol_type = other RNA
aaaatatgagtatgtgcca

SEQ ID NO: 20491 - RNA, 19 nt, synthetic construct
  misc_feature 1..19: note = siRNA antisense sequence
  source 1..19: mol_type = other RNA
tggcacatactcatatttt

SEQ ID NO: 20492 - RNA, 19 nt, synthetic construct
  misc_feature 1..19: note = siRNA sense sequence
  source 1..19: mol_type = other RNA
aaatatgagtatgtgccac

SEQ ID NO: 20493 - RNA, 19 nt, synthetic construct
  misc_feature 1..19: note = siRNA antisense sequence
  source 1..19: mol_type = other RNA
gtggcacatactcatattt

SEQ ID NO: 20494 - RNA, 19 nt, synthetic construct
  misc_feature 1..19: note = siRNA sense sequence
  source 1..19: mol_type = other RNA
aatatgagtatgtgccact

SEQ ID NO: 20495 - RNA, 19 nt, synthetic construct
  misc_feature 1..19: note = siRNA antisense sequence
  source 1..19: mol_type = other RNA
agtggcacatactcatatt

SEQ ID NO: 20496 - RNA, 19 nt, synthetic construct
  misc_feature 1..19: note = siRNA sense sequence
  source 1..19: mol_type = other RNA
atatgagtatgtgccactt

SEQ ID NO: 20497 - RNA, 19 nt, synthetic construct
  misc_feature 1..19: note = siRNA antisense sequence
  source 1..19: mol_type = other RNA
aagtggcacatactcatat

SEQ ID NO: 20498 - RNA, 19 nt, synthetic construct
  misc_feature 1..19: note = siRNA sense sequence
  source 1..19: mol_type = other RNA
tatgagtatgtgccacttg

SEQ ID NO: 20499 - RNA, 19 nt, synthetic construct
  misc_feature 1..19: note = siRNA antisense sequence
  source 1..19: mol_type = other RNA
caagtggcacatactcata

SEQ ID NO: 20500 - RNA, 19 nt, synthetic construct
  misc_feature 1..19: note = siRNA sense sequence
  source 1..19: mol_type = other RNA
atgagtatgtgccacttgt

SEQ ID NO: 20501 - RNA, 19 nt, synthetic construct
  misc_feature 1..19: note = siRNA antisense sequence
  source 1..19: mol_type = other RNA
acaagtggcacatactcat

SEQ ID NO: 20502 - RNA, 19 nt, synthetic construct
  misc_feature 1..19: note = siRNA sense sequence
  source 1..19: mol_type = other RNA
tatgtgccacttgttatgc

SEQ ID NO: 20503 - RNA, 19 nt, synthetic construct
  misc_feature 1..19: note = siRNA antisense sequence
  source 1..19: mol_type = other RNA
gcataacaagtggcacata

SEQ ID NO: 20504 - RNA, 19 nt, synthetic construct
  misc_feature 1..19: note = siRNA sense sequence
  source 1..19: mol_type = other RNA
atgtgccacttgttatgct

SEQ ID NO: 20505 - RNA, 19 nt, synthetic construct
  misc_feature 1..19: note = siRNA antisense sequence
  source 1..19: mol_type = other RNA
agcataacaagtggcacat

SEQ ID NO: 20506 - RNA, 19 nt, synthetic construct
  misc_feature 1..19: note = siRNA sense sequence
  source 1..19: mol_type = other RNA
tgtgccacttgttatgctg

SEQ ID NO: 20507 - RNA, 19 nt, synthetic construct
  misc_feature 1..19: note = siRNA antisense sequence
  source 1..19: mol_type = other RNA
cagcataacaagtggcaca

SEQ ID NO: 20508 - RNA, 19 nt, synthetic construct
  misc_feature 1..19: note = siRNA sense sequence
  source 1..19: mol_type = other RNA
gtgccacttgttatgctgt

SEQ ID NO: 20509 - RNA, 19 nt, synthetic construct
  misc_feature 1..19: note = siRNA antisense sequence
  source 1..19: mol_type = other RNA
acagcataacaagtggcac

SEQ ID NO: 20510 - RNA, 19 nt, synthetic construct
  misc_feature 1..19: note = siRNA sense sequence
  source 1..19: mol_type = other RNA
tgccacttgttatgctgtg

SEQ ID NO: 20511 - RNA, 19 nt, synthetic construct
  misc_feature 1..19: note = siRNA antisense sequence
  source 1..19: mol_type = other RNA
cacagcataacaagtggca

SEQ ID NO: 20512 - RNA, 19 nt, synthetic construct
  misc_feature 1..19: note = siRNA sense sequence
  source 1..19: mol_type = other RNA
gccacttgttatgctgtgt

SEQ ID NO: 20513 - RNA, 19 nt, synthetic construct
  misc_feature 1..19: note = siRNA antisense sequence
  source 1..19: mol_type = other RNA
acacagcataacaagtggc

SEQ ID NO: 20514 - RNA, 19 nt, synthetic construct
  misc_feature 1..19: note = siRNA sense sequence
  source 1..19: mol_type = other RNA
cacttgttatgctgtgttc

SEQ ID NO: 20515 - RNA, 19 nt, synthetic construct
  misc_feature 1..19: note = siRNA antisense sequence
  source 1..19: mol_type = other RNA
gaacacagcataacaagtg

SEQ ID NO: 20516 - RNA, 19 nt, synthetic construct
  misc_feature 1..19: note = siRNA sense sequence
  source 1..19: mol_type = other RNA
acttgttatgctgtgttcc

SEQ ID NO: 20517 - RNA, 19 nt, synthetic construct
  misc_feature 1..19: note = siRNA antisense sequence
  source 1..19: mol_type = other RNA
ggaacacagcataacaagt

SEQ ID NO: 20518 - RNA, 19 nt, synthetic construct
  misc_feature 1..19: note = siRNA sense sequence
  source 1..19: mol_type = other RNA
ttgttatgctgtgttccag

SEQ ID NO: 20519 - RNA, 19 nt, synthetic construct
  misc_feature 1..19: note = siRNA antisense sequence
  source 1..19: mol_type = other RNA
ctggaacacagcataacaa

SEQ ID NO: 20520 - RNA, 19 nt, synthetic construct
  misc_feature 1..19: note = siRNA sense sequence
  source 1..19: mol_type = other RNA
tgttatgctgtgttccagg

SEQ ID NO: 20521 - RNA, 19 nt, synthetic construct
  misc_feature 1..19: note = siRNA antisense sequence
  source 1..19: mol_type = other RNA
cctggaacacagcataaca

SEQ ID NO: 20522 - RNA, 19 nt, synthetic construct
  misc_feature 1..19: note = siRNA sense sequence
  source 1..19: mol_type = other RNA
gttatgctgtgttccagga

SEQ ID NO: 20523 - RNA, 19 nt, synthetic construct
  misc_feature 1..19: note = siRNA antisense sequence
  source 1..19: mol_type = other RNA
tcctggaacacagcataac

SEQ ID NO: 20524 - RNA, 19 nt, synthetic construct
  misc_feature 1..19: note = siRNA sense sequence
  source 1..19: mol_type = other RNA
ttatgctgtgttccaggag

SEQ ID NO: 20525 - RNA, 19 nt, synthetic construct
  misc_feature 1..19: note = siRNA antisense sequence
  source 1..19: mol_type = other RNA
ctcctggaacacagcataa

SEQ ID NO: 20526 - RNA, 19 nt, synthetic construct
  misc_feature 1..19: note = siRNA sense sequence
  source 1..19: mol_type = other RNA
ataaaaggtagtaagtctc

SEQ ID NO: 20527 - RNA, 19 nt, synthetic construct
  misc_feature 1..19: note = siRNA antisense sequence
  source 1..19: mol_type = other RNA
gagacttactaccttttat

SEQ ID NO: 20528 - RNA, 19 nt, synthetic construct
  misc_feature 1..19: note = siRNA sense sequence
  source 1..19: mol_type = other RNA
taaaaggtagtaagtctct

SEQ ID NO: 20529 - RNA, 19 nt, synthetic construct
  misc_feature 1..19: note = siRNA antisense sequence
  source 1..19: mol_type = other RNA
agagacttactacctttta

SEQ ID NO: 20530 - RNA, 19 nt, synthetic construct
  misc_feature 1..19: note = siRNA sense sequence
  source 1..19: mol_type = other RNA
aaaaggtagtaagtctctg

SEQ ID NO: 20531 - RNA, 19 nt, synthetic construct
  misc_feature 1..19: note = siRNA antisense sequence
  source 1..19: mol_type = other RNA
cagagacttactacctttt

SEQ ID NO: 20532 - RNA, 19 nt, synthetic construct
  misc_feature 1..19: note = siRNA sense sequence
  source 1..19: mol_type = other RNA
gtctctgcctttactggtg

SEQ ID NO: 20533 - RNA, 19 nt, synthetic construct
  misc_feature 1..19: note = siRNA antisense sequence
  source 1..19: mol_type = other RNA
caccagtaaaggcagagac

SEQ ID NO: 20534 - RNA, 19 nt, synthetic construct
  misc_feature 1..19: note = siRNA sense sequence
  source 1..19: mol_type = other RNA
tctctgcctttactggtgg

SEQ ID NO: 20535 - RNA, 19 nt, synthetic construct
  misc_feature 1..19: note = siRNA antisense sequence
  source 1..19: mol_type = other RNA
ccaccagtaaaggcagaga

SEQ ID NO: 20536 - RNA, 19 nt, synthetic construct
  misc_feature 1..19: note = siRNA sense sequence
  source 1..19: mol_type = other RNA
ctctgcctttactggtgga

SEQ ID NO: 20537 - RNA, 19 nt, synthetic construct
  misc_feature 1..19: note = siRNA antisense sequence
  source 1..19: mol_type = other RNA
tccaccagtaaaggcagag

SEQ ID NO: 20538 - RNA, 19 nt, synthetic construct
  misc_feature 1..19: note = siRNA sense sequence
  source 1..19: mol_type = other RNA
tctgcctttactggtggaa

SEQ ID NO: 20539 - RNA, 19 nt, synthetic construct
  misc_feature 1..19: note = siRNA antisense sequence
  source 1..19: mol_type = other RNA
ttccaccagtaaaggcaga

SEQ ID NO: 20540 - RNA, 19 nt, synthetic construct
  misc_feature 1..19: note = siRNA sense sequence
  source 1..19: mol_type = other RNA
ctgcctttactggtggaag

SEQ ID NO: 20541 - RNA, 19 nt, synthetic construct
  misc_feature 1..19: note = siRNA antisense sequence
  source 1..19: mol_type = other RNA
cttccaccagtaaaggcag

SEQ ID NO: 20542 - RNA, 19 nt, synthetic construct
  misc_feature 1..19: note = siRNA sense sequence
  source 1..19: mol_type = other RNA
tgcctttactggtggaaga

SEQ ID NO: 20543 - RNA, 19 nt, synthetic construct
  misc_feature 1..19: note = siRNA antisense sequence
  source 1..19: mol_type = other RNA
tcttccaccagtaaaggca

SEQ ID NO: 20544 - RNA, 19 nt, synthetic construct
  misc_feature 1..19: note = siRNA sense sequence
  source 1..19: mol_type = other RNA
cctttactggtggaagagg

SEQ ID NO: 20545 - RNA, 19 nt, synthetic construct
  misc_feature 1..19: note = siRNA antisense sequence
  source 1..19: mol_type = other RNA
cctcttccaccagtaaagg

SEQ ID NO: 20546 - RNA, 19 nt, synthetic construct
  misc_feature 1..19: note = siRNA sense sequence
  source 1..19: mol_type = other RNA
cccaaggtgctttataagg

SEQ ID NO: 20547 - RNA, 19 nt, synthetic construct
  misc_feature 1..19: note = siRNA antisense sequence
  source 1..19: mol_type = other RNA
ccttataaagcaccttggg

SEQ ID NO: 20548 - RNA, 19 nt, synthetic construct
  misc_feature 1..19: note = siRNA sense sequence
  source 1..19: mol_type = other RNA
ccaaggtgctttataagga

SEQ ID NO: 20549 - RNA, 19 nt, synthetic construct
  misc_feature 1..19: note = siRNA antisense sequence
  source 1..19: mol_type = other RNA
tccttataaagcaccttgg

SEQ ID NO: 20550 - RNA, 19 nt, synthetic construct
  misc_feature 1..19: note = siRNA sense sequence
  source 1..19: mol_type = other RNA
caaggtgctttataaggaa

SEQ ID NO: 20551 - RNA, 19 nt, synthetic construct
  misc_feature 1..19: note = siRNA antisense sequence
  source 1..19: mol_type = other RNA
ttccttataaagcaccttg

SEQ ID NO: 20552 - RNA, 19 nt, synthetic construct
  misc_feature 1..19: note = siRNA sense sequence
  source 1..19: mol_type = other RNA
aaggtgctttataaggaat

SEQ ID NO: 20553 - RNA, 19 nt, synthetic construct
  misc_feature 1..19: note = siRNA antisense sequence
  source 1..19: mol_type = other RNA
attccttataaagcacctt

SEQ ID NO: 20554 - RNA, 19 nt, synthetic construct
  misc_feature 1..19: note = siRNA sense sequence
  source 1..19: mol_type = other RNA
aggtgctttataaggaata

SEQ ID NO: 20555 - RNA, 19 nt, synthetic construct
  misc_feature 1..19: note = siRNA antisense sequence
  source 1..19: mol_type = other RNA
tattccttataaagcacct

SEQ ID NO: 20556 - RNA, 19 nt, synthetic construct
  misc_feature 1..19: note = siRNA sense sequence
  source 1..19: mol_type = other RNA
aaagattaggtttgtgttg

SEQ ID NO: 20557 - RNA, 19 nt, synthetic construct
  misc_feature 1..19: note = siRNA antisense sequence
  source 1..19: mol_type = other RNA
caacacaaacctaatcttt

SEQ ID NO: 20558 - RNA, 19 nt, synthetic construct
  misc_feature 1..19: note = siRNA sense sequence
  source 1..19: mol_type = other RNA
aagattaggtttgtgttgc

SEQ ID NO: 20559 - RNA, 19 nt, synthetic construct
  misc_feature 1..19: note = siRNA antisense sequence
  source 1..19: mol_type = other RNA
gcaacacaaacctaatctt

SEQ ID NO: 20560 - RNA, 19 nt, synthetic construct
  misc_feature 1..19: note = siRNA sense sequence
  source 1..19: mol_type = other RNA
agattaggtttgtgttgca

SEQ ID NO: 20561 - RNA, 19 nt, synthetic construct
  misc_feature 1..19: note = siRNA antisense sequence
  source 1..19: mol_type = other RNA
tgcaacacaaacctaatct

SEQ ID NO: 20562 - RNA, 19 nt, synthetic construct
  misc_feature 1..19: note = siRNA sense sequence
  source 1..19: mol_type = other RNA
gattaggtttgtgttgcag

SEQ ID NO: 20563 - RNA, 19 nt, synthetic construct
  misc_feature 1..19: note = siRNA antisense sequence
  source 1..19: mol_type = other RNA
ctgcaacacaaacctaatc

SEQ ID NO: 20564 - RNA, 19 nt, synthetic construct
  misc_feature 1..19: note = siRNA sense sequence
  source 1..19: mol_type = other RNA
attaggtttgtgttgcagg

SEQ ID NO: 20565 - RNA, 19 nt, synthetic construct
  misc_feature 1..19: note = siRNA antisense sequence
  source 1..19: mol_type = other RNA
cctgcaacacaaacctaat

SEQ ID NO: 20566 - RNA, 19 nt, synthetic construct
  misc_feature 1..19: note = siRNA sense sequence
  source 1..19: mol_type = other RNA
ttaggtttgtgttgcagga

SEQ ID NO: 20567 - RNA, 19 nt, synthetic construct
  misc_feature 1..19: note = siRNA antisense sequence
  source 1..19: mol_type = other RNA
tcctgcaacacaaacctaa

SEQ ID NO: 20568 - RNA, 19 nt, synthetic construct
  misc_feature 1..19: note = siRNA sense sequence
  source 1..19: mol_type = other RNA
taggtttgtgttgcaggaa

SEQ ID NO: 20569 - RNA, 19 nt, synthetic construct
  misc_feature 1..19: note = siRNA antisense sequence
  source 1..19: mol_type = other RNA
ttcctgcaacacaaaccta

SEQ ID NO: 20570 - RNA, 19 nt, synthetic construct
  misc_feature 1..19: note = siRNA sense sequence
  source 1..19: mol_type = other RNA
aagtaagccttccaaaata

SEQ ID NO: 20571 - RNA, 19 nt, synthetic construct
  misc_feature 1..19: note = siRNA antisense sequence
  source 1..19: mol_type = other RNA
tattttggaaggcttactt

SEQ ID NO: 20572 - RNA, 19 nt, synthetic construct
  misc_feature 1..19: note = siRNA sense sequence
  source 1..19: mol_type = other RNA
agtaagccttccaaaataa

SEQ ID NO: 20573 - RNA, 19 nt, synthetic construct
  misc_feature 1..19: note = siRNA antisense sequence
  source 1..19: mol_type = other RNA
ttattttggaaggcttact

SEQ ID NO: 20574 - RNA, 19 nt, synthetic construct
  misc_feature 1..19: note = siRNA sense sequence
  source 1..19: mol_type = other RNA
gtaagccttccaaaataaa

SEQ ID NO: 20575 - RNA, 19 nt, synthetic construct
  misc_feature 1..19: note = siRNA antisense sequence
  source 1..19: mol_type = other RNA
tttattttggaaggcttac

SEQ ID NO: 20576 - RNA, 19 nt, synthetic construct
  misc_feature 1..19: note = siRNA sense sequence
  source 1..19: mol_type = other RNA
tccatctttcaggagccca

SEQ ID NO: 20577 - RNA, 19 nt, synthetic construct
  misc_feature 1..19: note = siRNA antisense sequence
  source 1..19: mol_type = other RNA
tgggctcctgaaagatgga

SEQ ID NO: 20578 - RNA, 19 nt, synthetic construct
  misc_feature 1..19: note = siRNA sense sequence
  source 1..19: mol_type = other RNA
ccatctttcaggagcccat

SEQ ID NO: 20579 - RNA, 19 nt, synthetic construct
  misc_feature 1..19: note = siRNA antisense sequence
  source 1..19: mol_type = other RNA
atgggctcctgaaagatgg

SEQ ID NO: 20580 - RNA, 19 nt, synthetic construct
  misc_feature 1..19: note = siRNA sense sequence
  source 1..19: mol_type = other RNA
catctttcaggagcccata

SEQ ID NO: 20581 - RNA, 19 nt, synthetic construct
  misc_feature 1..19: note = siRNA antisense sequence
  source 1..19: mol_type = other RNA
tatgggctcctgaaagatg

SEQ ID NO: 20582 - RNA, 19 nt, synthetic construct
  misc_feature 1..19: note = siRNA sense sequence
  source 1..19: mol_type = other RNA
atctttcaggagcccataa

SEQ ID NO: 20583 - RNA, 19 nt, synthetic construct
  misc_feature 1..19: note = siRNA antisense sequence
  source 1..19: mol_type = other RNA
ttatgggctcctgaaagat

SEQ ID NO: 20584 - RNA, 19 nt, synthetic construct
  misc_feature 1..19: note = siRNA sense sequence
  source 1..19: mol_type = other RNA
tctttcaggagcccataat

SEQ ID NO: 20585 - RNA, 19 nt, synthetic construct
  misc_feature 1..19: note = siRNA antisense sequence
  source 1..19: mol_type = other RNA
attatgggctcctgaaaga

SEQ ID NO: 20586 - RNA, 19 nt, synthetic construct
  misc_feature 1..19: note = siRNA sense sequence
  source 1..19: mol_type = other RNA
ctttcaggagcccataatt

SEQ ID NO: 20587 - RNA, 19 nt, synthetic construct
  misc_feature 1..19: note = siRNA antisense sequence
  source 1..19: mol_type = other RNA
aattatgggctcctgaaag

SEQ ID NO: 20588 - RNA, 19 nt, synthetic construct
  misc_feature 1..19: note = siRNA sense sequence
  source 1..19: mol_type = other RNA
tttcaggagcccataattc

SEQ ID NO: 20589 - RNA, 19 nt, synthetic construct
  misc_feature 1..19: note = siRNA antisense sequence
  source 1..19: mol_type = other RNA
gaattatgggctcctgaaa

SEQ ID NO: 20590 - RNA, 19 nt, synthetic construct
  misc_feature 1..19: note = siRNA sense sequence
  source 1..19: mol_type = other RNA
ttcaggagcccataattcc

SEQ ID NO: 20591 - RNA, 19 nt, synthetic construct
  misc_feature 1..19: note = siRNA antisense sequence
  source 1..19: mol_type = other RNA
ggaattatgggctcctgaa

SEQ ID NO: 20592 - RNA, 19 nt, synthetic construct
  misc_feature 1..19: note = siRNA sense sequence
  source 1..19: mol_type = other RNA
tcaggagcccataattcca

SEQ ID NO: 20593 - RNA, 19 nt, synthetic construct
  misc_feature 1..19: note = siRNA antisense sequence
  source 1..19: mol_type = other RNA
tggaattatgggctcctga

SEQ ID NO: 20594 - RNA, 19 nt, synthetic construct
  misc_feature 1..19: note = siRNA sense sequence
  source 1..19: mol_type = other RNA
caggagcccataattccat

SEQ ID NO: 20595 - RNA, 19 nt, synthetic construct
  misc_feature 1..19: note = siRNA antisense sequence
  source 1..19: mol_type = other RNA
atggaattatgggctcctg

SEQ ID NO: 20596 - RNA, 19 nt, synthetic construct
  misc_feature 1..19: note = siRNA sense sequence
  source 1..19: mol_type = other RNA
aggagcccataattccatt

SEQ ID NO: 20597 - RNA, 19 nt, synthetic construct
  misc_feature 1..19: note = siRNA antisense sequence
  source 1..19: mol_type = other RNA
aatggaattatgggctcct

SEQ ID NO: 20598 - RNA, 19 nt, synthetic construct
  misc_feature 1..19: note = siRNA sense sequence
  source 1..19: mol_type = other RNA
ggagcccataattccattt

SEQ ID NO: 20599 - RNA, 19 nt, synthetic construct
  misc_feature 1..19: note = siRNA antisense sequence
  source 1..19: mol_type = other RNA
aaatggaattatgggctcc

SEQ ID NO: 20600 - RNA, 19 nt, synthetic construct
  misc_feature 1..19: note = siRNA sense sequence
  source 1..19: mol_type = other RNA
gagcccataattccatttc

SEQ ID NO: 20601 - RNA, 19 nt, synthetic construct
  misc_feature 1..19: note = siRNA antisense sequence
  source 1..19: mol_type = other RNA
gaaatggaattatgggctc

SEQ ID NO: 20602 - RNA, 19 nt, synthetic construct
  misc_feature 1..19: note = siRNA sense sequence
  source 1..19: mol_type = other RNA
ccataattccatttcatgt

SEQ ID NO: 20603 - RNA, 19 nt, synthetic construct
  misc_feature 1..19: note = siRNA antisense sequence
  source 1..19: mol_type = other RNA
acatgaaatggaattatgg

SEQ ID NO: 20604 - RNA, 19 nt, synthetic construct
  misc_feature 1..19: note = siRNA sense sequence
  source 1..19: mol_type = other RNA
cataattccatttcatgtc

SEQ ID NO: 20605 - RNA, 19 nt, synthetic construct
  misc_feature 1..19: note = siRNA antisense sequence
  source 1..19: mol_type = other RNA
gacatgaaatggaattatg

SEQ ID NO: 20606 - RNA, 19 nt, synthetic construct
  misc_feature 1..19: note = siRNA sense sequence
  source 1..19: mol_type = other RNA
gatagtaattcaactcacc

SEQ ID NO: 20607 - RNA, 19 nt, synthetic construct
  misc_feature 1..19: note = siRNA antisense sequence
  source 1..19: mol_type = other RNA
ggtgagttgaattactatc

SEQ ID NO: 20608 - RNA, 19 nt, synthetic construct
  misc_feature 1..19: note = siRNA sense sequence
  source 1..19: mol_type = other RNA
atagtaattcaactcacca

SEQ ID NO: 20609 - RNA, 19 nt, synthetic construct
  misc_feature 1..19: note = siRNA antisense sequence
  source 1..19: mol_type = other RNA
tggtgagttgaattactat

SEQ ID NO: 20610 - RNA, 19 nt, synthetic construct
  misc_feature 1..19: note = siRNA sense sequence
  source 1..19: mol_type = other RNA
tagtaattcaactcaccaa

SEQ ID NO: 20611 - RNA, 19 nt, synthetic construct
  misc_feature 1..19: note = siRNA antisense sequence
  source 1..19: mol_type = other RNA
ttggtgagttgaattacta

SEQ ID NO: 20612 - RNA, 19 nt, synthetic construct
  misc_feature 1..19: note = siRNA sense sequence
  source 1..19: mol_type = other RNA
agtaattcaactcaccaat

SEQ ID NO: 20613 - RNA, 19 nt, synthetic construct
  misc_feature 1..19: note = siRNA antisense sequence
  source 1..19: mol_type = other RNA
attggtgagttgaattact

SEQ ID NO: 20614 - RNA, 19 nt, synthetic construct
  misc_feature 1..19: note = siRNA sense sequence
  source 1..19: mol_type = other RNA
gtaattcaactcaccaatg

SEQ ID NO: 20615 - RNA, 19 nt, synthetic construct
  misc_feature 1..19: note = siRNA antisense sequence
  source 1..19: mol_type = other RNA
cattggtgagttgaattac

SEQ ID NO: 20616 - RNA, 19 nt, synthetic construct
  misc_feature 1..19: note = siRNA sense sequence
  source 1..19: mol_type = other RNA
taattcaactcaccaatga

SEQ ID NO: 20617 - RNA, 19 nt, synthetic construct
  misc_feature 1..19: note = siRNA antisense sequence
  source 1..19: mol_type = other RNA
tcattggtgagttgaatta

SEQ ID NO: 20618 - RNA, 19 nt, synthetic construct
  misc_feature 1..19: note = siRNA sense sequence
  source 1..19: mol_type = other RNA
accattttattcagtagag

SEQ ID NO: 20619 - RNA, 19 nt, synthetic construct
  misc_feature 1..19: note = siRNA antisense sequence
  source 1..19: mol_type = other RNA
ctctactgaataaaatggt

SEQ ID NO: 20620 - RNA, 19 nt, synthetic construct
  misc_feature 1..19: note = siRNA sense sequence
  source 1..19: mol_type = other RNA
ccattttattcagtagagc

SEQ ID NO: 20621 - RNA, 19 nt, synthetic construct
  misc_feature 1..19: note = siRNA antisense sequence
  source 1..19: mol_type = other RNA
gctctactgaataaaatgg

SEQ ID NO: 20622 - RNA, 19 nt, synthetic construct
  misc_feature 1..19: note = siRNA sense sequence
  source 1..19: mol_type = other RNA
cattttattcagtagagct

SEQ ID NO: 20623 - RNA, 19 nt, synthetic construct
  misc_feature 1..19: note = siRNA antisense sequence
  source 1..19: mol_type = other RNA
agctctactgaataaaatg

SEQ ID NO: 20624 - RNA, 19 nt, synthetic construct
  misc_feature 1..19: note = siRNA sense sequence
  source 1..19: mol_type = other RNA
attttattcagtagagctg

SEQ ID NO: 20625 - RNA, 19 nt, synthetic construct
  misc_feature 1..19: note = siRNA antisense sequence
  source 1..19: mol_type = other RNA
cagctctactgaataaaat

SEQ ID NO: 20626 - RNA, 19 nt, synthetic construct
  misc_feature 1..19: note = siRNA sense sequence
  source 1..19: mol_type = other RNA
aaagattatccatcagtca

SEQ ID NO: 20627 - RNA, 19 nt, synthetic construct
  misc_feature 1..19: note = siRNA antisense sequence
  source 1..19: mol_type = other RNA
tgactgatggataatcttt

SEQ ID NO: 20628 - RNA, 19 nt, synthetic construct
  misc_feature 1..19: note = siRNA sense sequence
  source 1..19: mol_type = other RNA
aagattatccatcagtcaa

SEQ ID NO: 20629 - RNA, 19 nt, synthetic construct
  misc_feature 1..19: note = siRNA antisense sequence
  source 1..19: mol_type = other RNA
ttgactgatggataatctt

SEQ ID NO: 20630 - RNA, 19 nt, synthetic construct
  misc_feature 1..19: note = siRNA sense sequence
  source 1..19: mol_type = other RNA
agattatccatcagtcaac

SEQ ID NO: 20631 - RNA, 19 nt, synthetic construct
  misc_feature 1..19: note = siRNA antisense sequence
  source 1..19: mol_type = other RNA
gttgactgatggataatct

SEQ ID NO: 20632 - RNA, 19 nt, synthetic construct
  misc_feature 1..19: note = siRNA sense sequence
  source 1..19: mol_type = other RNA
catgttaaaatgagctctt

SEQ ID NO: 20633 - RNA, 19 nt, synthetic construct
  misc_feature 1..19: note = siRNA antisense sequence
  source 1..19: mol_type = other RNA
aagagctcattttaacatg

SEQ ID NO: 20634 - RNA, 19 nt, synthetic construct
  misc_feature 1..19: note = siRNA sense sequence
  source 1..19: mol_type = other RNA
ttaaaatgagctcttgtcc

SEQ ID NO: 20635 - RNA, 19 nt, synthetic construct
  misc_feature 1..19: note = siRNA antisense sequence
  source 1..19: mol_type = other RNA
ggacaagagctcattttaa

SEQ ID NO: 20636 - RNA, 19 nt, synthetic construct
  misc_feature 1..19: note = siRNA sense sequence
  source 1..19: mol_type = other RNA
taaaatgagctcttgtccc

SEQ ID NO: 20637 - RNA, 19 nt, synthetic construct
  misc_feature 1..19: note = siRNA antisense sequence
  source 1..19: mol_type = other RNA
gggacaagagctcatttta

SEQ ID NO: 20638 - RNA, 19 nt, synthetic construct
  misc_feature 1..19: note = siRNA sense sequence
  source 1..19: mol_type = other RNA
aaaatgagctcttgtccct

SEQ ID NO: 20639 - RNA, 19 nt, synthetic construct
  misc_feature 1..19: note = siRNA antisense sequence
  source 1..19: mol_type = other RNA
agggacaagagctcatttt

SEQ ID NO: 20640 - RNA, 19 nt, synthetic construct
  misc_feature 1..19: note = siRNA sense sequence
  source 1..19: mol_type = other RNA
aaatgagctcttgtccctt

SEQ ID NO: 20641 - RNA, 19 nt, synthetic construct
  misc_feature 1..19: note = siRNA antisense sequence
  source 1..19: mol_type = other RNA
aagggacaagagctcattt

SEQ ID NO: 20642 - RNA, 19 nt, synthetic construct
  misc_feature 1..19: note = siRNA sense sequence
  source 1..19: mol_type = other RNA
aatgagctcttgtcccttg

SEQ ID NO: 20643 - RNA, 19 nt, synthetic construct
  misc_feature 1..19: note = siRNA antisense sequence
  source 1..19: mol_type = other RNA
caagggacaagagctcatt

SEQ ID NO: 20644 - RNA, 19 nt, synthetic construct
  misc_feature 1..19: note = siRNA sense sequence
  source 1..19: mol_type = other RNA
atgagctcttgtcccttgt

SEQ ID NO: 20645 - RNA, 19 nt, synthetic construct
  misc_feature 1..19: note = siRNA antisense sequence
  source 1..19: mol_type = other RNA
acaagggacaagagctcat

SEQ ID NO: 20646 - RNA, 19 nt, synthetic construct
  misc_feature 1..19: note = siRNA sense sequence
  source 1..19: mol_type = other RNA
tgagctcttgtcccttgtt

SEQ ID NO: 20647 - RNA, 19 nt, synthetic construct
  misc_feature 1..19: note = siRNA antisense sequence
  source 1..19: mol_type = other RNA
aacaagggacaagagctca

SEQ ID NO: 20648 - RNA, 19 nt, synthetic construct
  misc_feature 1..19: note = siRNA sense sequence
  source 1..19: mol_type = other RNA
gagctcttgtcccttgttt

SEQ ID NO: 20649 - RNA, 19 nt, synthetic construct
  misc_feature 1..19: note = siRNA antisense sequence
  source 1..19: mol_type = other RNA
aaacaagggacaagagctc

SEQ ID NO: 20650 - RNA, 19 nt, synthetic construct
  misc_feature 1..19: note = siRNA sense sequence
  source 1..19: mol_type = other RNA
agctcttgtcccttgtttt

SEQ ID NO: 20651 - RNA, 19 nt, synthetic construct
  misc_feature 1..19: note = siRNA antisense sequence
  source 1..19: mol_type = other RNA
aaaacaagggacaagagct

SEQ ID NO: 20652 - RNA, 19 nt, synthetic construct
  misc_feature 1..19: note = siRNA sense sequence
  source 1..19: mol_type = other RNA
gctcttgtcccttgttttg

SEQ ID NO: 20653 - RNA, 19 nt, synthetic construct
  misc_feature 1..19: note = siRNA antisense sequence
  source 1..19: mol_type = other RNA
caaaacaagggacaagagc

SEQ ID NO: 20654 - RNA, 19 nt, synthetic construct
  misc_feature 1..19: note = siRNA sense sequence
  source 1..19: mol_type = other RNA
ctcttgtcccttgttttgt

SEQ ID NO: 20655 - RNA, 19 nt, synthetic construct
  misc_feature 1..19: note = siRNA antisense sequence
  source 1..19: mol_type = other RNA
acaaaacaagggacaagag

SEQ ID NO: 20656 - RNA, 19 nt, synthetic construct
  misc_feature 1..19: note = siRNA sense sequence
  source 1..19: mol_type = other RNA
tcttgtcccttgttttgtc

SEQ ID NO: 20657 - RNA, 19 nt, synthetic construct
  misc_feature 1..19: note = siRNA antisense sequence
  source 1..19: mol_type = other RNA
gacaaaacaagggacaaga

SEQ ID NO: 20658 - RNA, 19 nt, synthetic construct
  misc_feature 1..19: note = siRNA sense sequence
  source 1..19: mol_type = other RNA
cttgtcccttgttttgtct

SEQ ID NO: 20659 - RNA, 19 nt, synthetic construct
  misc_feature 1..19: note = siRNA antisense sequence
  source 1..19: mol_type = other RNA
agacaaaacaagggacaag

SEQ ID NO: 20660 - RNA, 19 nt, synthetic construct
  misc_feature 1..19: note = siRNA sense sequence
  source 1..19: mol_type = other RNA
tgtcccttgttttgtctga

SEQ ID NO: 20661 - RNA, 19 nt, synthetic construct
  misc_feature 1..19: note = siRNA antisense sequence
  source 1..19: mol_type = other RNA
tcagacaaaacaagggaca

SEQ ID NO: 20662 - RNA, 19 nt, synthetic construct
  misc_feature 1..19: note = siRNA sense sequence
  source 1..19: mol_type = other RNA
gtcccttgttttgtctgat

SEQ ID NO: 20663 - RNA, 19 nt, synthetic construct
  misc_feature 1..19: note = siRNA antisense sequence
  source 1..19: mol_type = other RNA
atcagacaaaacaagggac

SEQ ID NO: 20664 - RNA, 19 nt, synthetic construct
  misc_feature 1..19: note = siRNA sense sequence
  source 1..19: mol_type = other RNA
ttgttttgtctgatccagt

SEQ ID NO: 20665 - RNA, 19 nt, synthetic construct
  misc_feature 1..19: note = siRNA antisense sequence
  source 1..19: mol_type = other RNA
actggatcagacaaaacaa

SEQ ID NO: 20666 - RNA, 19 nt, synthetic construct
  misc_feature 1..19: note = siRNA sense sequence
  source 1..19: mol_type = other RNA
tgttttgtctgatccagtt

SEQ ID NO: 20667 - RNA, 19 nt, synthetic construct
  misc_feature 1..19: note = siRNA antisense sequence
  source 1..19: mol_type = other RNA
aactggatcagacaaaaca

SEQ ID NO: 20668 - RNA, 19 nt, synthetic construct
  misc_feature 1..19: note = siRNA sense sequence
  source 1..19: mol_type = other RNA
gttttgtctgatccagttt

SEQ ID NO: 20669 - RNA, 19 nt, synthetic construct
  misc_feature 1..19: note = siRNA antisense sequence
  source 1..19: mol_type = other RNA
aaactggatcagacaaaac

SEQ ID NO: 20670 - RNA, 19 nt, synthetic construct
  misc_feature 1..19: note = siRNA sense sequence
  source 1..19: mol_type = other RNA
ttttgtctgatccagtttt

SEQ ID NO: 20671 - RNA, 19 nt, synthetic construct
  misc_feature 1..19: note = siRNA antisense sequence
  source 1..19: mol_type = other RNA
aaaactggatcagacaaaa

SEQ ID NO: 20672 - RNA, 19 nt, synthetic construct
  misc_feature 1..19: note = siRNA sense sequence
  source 1..19: mol_type = other RNA
tttgtctgatccagttttc

SEQ ID NO: 20673 - RNA, 19 nt, synthetic construct
  misc_feature 1..19: note = siRNA antisense sequence
  source 1..19: mol_type = other RNA
gaaaactggatcagacaaa

SEQ ID NO: 20674 - RNA, 19 nt, synthetic construct
  misc_feature 1..19: note = siRNA sense sequence
  source 1..19: mol_type = other RNA
ttgtctgatccagttttct

SEQ ID NO: 20675 - RNA, 19 nt, synthetic construct
  misc_feature 1..19: note = siRNA antisense sequence
  source 1..19: mol_type = other RNA
agaaaactggatcagacaa

SEQ ID NO: 20676 - RNA, 19 nt, synthetic construct
  misc_feature 1..19: note = siRNA sense sequence
  source 1..19: mol_type = other RNA
tgtctgatccagttttcta

SEQ ID NO: 20677 - RNA, 19 nt, synthetic construct
  misc_feature 1..19: note = siRNA antisense sequence
  source 1..19: mol_type = other RNA
tagaaaactggatcagaca

SEQ ID NO: 20678 - RNA, 19 nt, synthetic construct
  misc_feature 1..19: note = siRNA sense sequence
  source 1..19: mol_type = other RNA
gtctgatccagttttctag

SEQ ID NO: 20679 - RNA, 19 nt, synthetic construct
  misc_feature 1..19: note = siRNA antisense sequence
  source 1..19: mol_type = other RNA
ctagaaaactggatcagac

SEQ ID NO: 20680 - RNA, 19 nt, synthetic construct
  misc_feature 1..19: note = siRNA sense sequence
  source 1..19: mol_type = other RNA
gatccagttttctagcttc

SEQ ID NO: 20681 - RNA, 19 nt, synthetic construct
  misc_feature 1..19: note = siRNA antisense sequence
  source 1..19: mol_type = other RNA
gaagctagaaaactggatc

SEQ ID NO: 20682 - RNA, 19 nt, synthetic construct
  misc_feature 1..19: note = siRNA sense sequence
  source 1..19: mol_type = other RNA
cagttttctagcttcaagc

SEQ ID NO: 20683 - RNA, 19 nt, synthetic construct
  misc_feature 1..19: note = siRNA antisense sequence
  source 1..19: mol_type = other RNA
gcttgaagctagaaaactg

SEQ ID NO: 20684 - RNA, 19 nt, synthetic construct
  misc_feature 1..19: note = siRNA sense sequence
  source 1..19: mol_type = other RNA
agttttctagcttcaagcc

SEQ ID NO: 20685 - RNA, 19 nt, synthetic construct
  misc_feature 1..19: note = siRNA antisense sequence
  source 1..19: mol_type = other RNA
ggcttgaagctagaaaact

SEQ ID NO: 20686 - RNA, 19 nt, synthetic construct
  misc_feature 1..19: note = siRNA sense sequence
  source 1..19: mol_type = other RNA
gttttctagcttcaagcca

SEQ ID NO: 20687 - RNA, 19 nt, synthetic construct
  misc_feature 1..19: note = siRNA antisense sequence
  source 1..19: mol_type = other RNA
tggcttgaagctagaaaac

SEQ ID NO: 20688 - RNA, 19 nt, synthetic construct
  misc_feature 1..19: note = siRNA sense sequence
  source 1..19: mol_type = other RNA
gtatcataatatcactagg

SEQ ID NO: 20689 - RNA, 19 nt, synthetic construct
  misc_feature 1..19: note = siRNA antisense sequence
  source 1..19: mol_type = other RNA
cctagtgatattatgatac

SEQ ID NO: 20690 - RNA, 19 nt, synthetic construct
  misc_feature 1..19: note = siRNA sense sequence
  source 1..19: mol_type = other RNA
atcataatatcactaggac

SEQ ID NO: 20691 - RNA, 19 nt, synthetic construct
  misc_feature 1..19: note = siRNA antisense sequence
  source 1..19: mol_type = other RNA
gtcctagtgatattatgat

SEQ ID NO: 20692 - RNA, 19 nt, synthetic construct
  misc_feature 1..19: note = siRNA sense sequence
  source 1..19: mol_type = other RNA
tcataatatcactaggacc

SEQ ID NO: 20693 - RNA, 19 nt, synthetic construct
  misc_feature 1..19: note = siRNA antisense sequence
  source 1..19: mol_type = other RNA
ggtcctagtgatattatga

SEQ ID NO: 20694 - RNA, 19 nt, synthetic construct
  misc_feature 1..19: note = siRNA sense sequence
  source 1..19: mol_type = other RNA
cataatatcactaggacct

SEQ ID NO: 20695 - RNA, 19 nt, synthetic construct
  misc_feature 1..19: note = siRNA antisense sequence
  source 1..19: mol_type = other RNA
aggtcctagtgatattatg

SEQ ID NO: 20696 - RNA, 19 nt, synthetic construct
  misc_feature 1..19: note = siRNA sense sequence
  source 1..19: mol_type = other RNA
ataatatcactaggacctc

SEQ ID NO: 20697 - RNA, 19 nt, synthetic construct
  misc_feature 1..19: note = siRNA antisense sequence
  source 1..19: mol_type = other RNA
gaggtcctagtgatattat

SEQ ID NO: 20698 - RNA, 19 nt, synthetic construct
  misc_feature 1..19: note = siRNA sense sequence
  source 1..19: mol_type = other RNA
taatatcactaggacctca

SEQ ID NO: 20699 - RNA, 19 nt, synthetic construct
  misc_feature 1..19: note = siRNA antisense sequence
  source 1..19: mol_type = other RNA
tgaggtcctagtgatatta

SEQ ID NO: 20700 - RNA, 19 nt, synthetic construct
  misc_feature 1..19: note = siRNA sense sequence
  source 1..19: mol_type = other RNA
aatatcactaggacctcat

SEQ ID NO: 20701 - RNA, 19 nt, synthetic construct
  misc_feature 1..19: note = siRNA antisense sequence
  source 1..19: mol_type = other RNA
atgaggtcctagtgatatt

SEQ ID NO: 20702 - RNA, 19 nt, synthetic construct
  misc_feature 1..19: note = siRNA sense sequence
  source 1..19: mol_type = other RNA
atatcactaggacctcata

SEQ ID NO: 20703 - RNA, 19 nt, synthetic construct
  misc_feature 1..19: note = siRNA antisense sequence
  source 1..19: mol_type = other RNA
tatgaggtcctagtgatat

SEQ ID NO: 20704 - RNA, 19 nt, synthetic construct
  misc_feature 1..19: note = siRNA sense sequence
  source 1..19: mol_type = other RNA
tatcactaggacctcataa

SEQ ID NO: 20705 - RNA, 19 nt, synthetic construct
  misc_feature 1..19: note = siRNA antisense sequence
  source 1..19: mol_type = other RNA
ttatgaggtcctagtgata

SEQ ID NO: 20706 - RNA, 19 nt, synthetic construct
  misc_feature 1..19: note = siRNA sense sequence
  source 1..19: mol_type = other RNA
atcactaggacctcataag

SEQ ID NO: 20707 - RNA, 19 nt, synthetic construct
  misc_feature 1..19: note = siRNA antisense sequence
  source 1..19: mol_type = other RNA
cttatgaggtcctagtgat

SEQ ID NO: 20708 - RNA, 19 nt, synthetic construct
  misc_feature 1..19: note = siRNA sense sequence
  source 1..19: mol_type = other RNA
tcactaggacctcataagg

SEQ ID NO: 20709 - RNA, 19 nt, synthetic construct
  misc_feature 1..19: note = siRNA antisense sequence
  source 1..19: mol_type = other RNA
ccttatgaggtcctagtga

SEQ ID NO: 20710 - RNA, 19 nt, synthetic construct
  misc_feature 1..19: note = siRNA sense sequence
  source 1..19: mol_type = other RNA
cactaggacctcataagga

SEQ ID NO: 20711 - RNA, 19 nt, synthetic construct
  misc_feature 1..19: note = siRNA antisense sequence
  source 1..19: mol_type = other RNA
tccttatgaggtcctagtg

SEQ ID NO: 20712 - RNA, 19 nt, synthetic construct
  misc_feature 1..19: note = siRNA sense sequence
  source 1..19: mol_type = other RNA
aggacctcataaggatggt

SEQ ID NO: 20713 - RNA, 19 nt, synthetic construct
  misc_feature 1..19: note = siRNA antisense sequence
  source 1..19: mol_type = other RNA
accatccttatgaggtcct

SEQ ID NO: 20714 - RNA, 19 nt, synthetic construct
  misc_feature 1..19: note = siRNA sense sequence
  source 1..19: mol_type = other RNA
acctcataaggatggtcaa

SEQ ID NO: 20715 - RNA, 19 nt, synthetic construct
  misc_feature 1..19: note = siRNA antisense sequence
  source 1..19: mol_type = other RNA
ttgaccatccttatgaggt

SEQ ID NO: 20716 - RNA, 19 nt, synthetic construct
  misc_feature 1..19: note = siRNA sense sequence
  source 1..19: mol_type = other RNA
tcataaggatggtcaaatg

SEQ ID NO: 20717 - RNA, 19 nt, synthetic construct
  misc_feature 1..19: note = siRNA antisense sequence
  source 1..19: mol_type = other RNA
catttgaccatccttatga

SEQ ID NO: 20718 - RNA, 19 nt, synthetic construct
  misc_feature 1..19: note = siRNA sense sequence
  source 1..19: mol_type = other RNA
taattagctttattgcggt

SEQ ID NO: 20719 - RNA, 19 nt, synthetic construct
  misc_feature 1..19: note = siRNA antisense sequence
  source 1..19: mol_type = other RNA
accgcaataaagctaatta

SEQ ID NO: 20720 - RNA, 19 nt, synthetic construct
  misc_feature 1..19: note = siRNA sense sequence
  source 1..19: mol_type = other RNA
aattagctttattgcggtc

SEQ ID NO: 20721 - RNA, 19 nt, synthetic construct
  misc_feature 1..19: note = siRNA antisense sequence
  source 1..19: mol_type = other RNA
gaccgcaataaagctaatt

SEQ ID NO: 20722 - RNA, 19 nt, synthetic construct
  misc_feature 1..19: note = siRNA sense sequence
  source 1..19: mol_type = other RNA
attagctttattgcggtct

SEQ ID NO: 20723 - RNA, 19 nt, synthetic construct
  misc_feature 1..19: note = siRNA antisense sequence
  source 1..19: mol_type = other RNA
agaccgcaataaagctaat

SEQ ID NO: 20724 - RNA, 19 nt, synthetic construct
  misc_feature 1..19: note = siRNA sense sequence
  source 1..19: mol_type = other RNA
ttagctttattgcggtctg

SEQ ID NO: 20725 - RNA, 19 nt, synthetic construct
  misc_feature 1..19: note = siRNA antisense sequence
  source 1..19: mol_type = other RNA
cagaccgcaataaagctaa

SEQ ID NO: 20726 - RNA, 19 nt, synthetic construct
  misc_feature 1..19: note = siRNA sense sequence
  source 1..19: mol_type = other RNA
tagctttattgcggtctgg

SEQ ID NO: 20727 - RNA, 19 nt, synthetic construct
  misc_feature 1..19: note = siRNA antisense sequence
  source 1..19: mol_type = other RNA
ccagaccgcaataaagcta

SEQ ID NO: 20728 - RNA, 19 nt, synthetic construct
  misc_feature 1..19: note = siRNA sense sequence
  source 1..19: mol_type = other RNA
agctttattgcggtctggg

SEQ ID NO: 20729 - RNA, 19 nt, synthetic construct
  misc_feature 1..19: note = siRNA antisense sequence
  source 1..19: mol_type = other RNA
cccagaccgcaataaagct

SEQ ID NO: 20730 - RNA, 19 nt, synthetic construct
  misc_feature 1..19: note = siRNA sense sequence
  source 1..19: mol_type = other RNA
gctttattgcggtctggga

SEQ ID NO: 20731 - RNA, 19 nt, synthetic construct
  misc_feature 1..19: note = siRNA antisense sequence
  source 1..19: mol_type = other RNA
tcccagaccgcaataaagc

SEQ ID NO: 20732 - RNA, 19 nt, synthetic construct
  misc_feature 1..19: note = siRNA sense sequence
  source 1..19: mol_type = other RNA
ctttattgcggtctgggac

SEQ ID NO: 20733 - RNA, 19 nt, synthetic construct
  misc_feature 1..19: note = siRNA antisense sequence
  source 1..19: mol_type = other RNA
gtcccagaccgcaataaag

SEQ ID NO: 20734 - RNA, 19 nt, synthetic construct
  misc_feature 1..19: note = siRNA sense sequence
  source 1..19: mol_type = other RNA
tttattgcggtctgggact

SEQ ID NO: 20735 - RNA, 19 nt, synthetic construct
  misc_feature 1..19: note = siRNA antisense sequence
  source 1..19: mol_type = other RNA
agtcccagaccgcaataaa

SEQ ID NO: 20736 - RNA, 19 nt, synthetic construct
  misc_feature 1..19: note = siRNA sense sequence
  source 1..19: mol_type = other RNA
ttattgcggtctgggactt

SEQ ID NO: 20737 - RNA, 19 nt, synthetic construct
  misc_feature 1..19: note = siRNA antisense sequence
  source 1..19: mol_type = other RNA
aagtcccagaccgcaataa

SEQ ID NO: 20738 - RNA, 19 nt, synthetic construct
  misc_feature 1..19: note = siRNA sense sequence
  source 1..19: mol_type = other RNA
tattgcggtctgggactta

SEQ ID NO: 20739 - RNA, 19 nt, synthetic construct
  misc_feature 1..19: note = siRNA antisense sequence
  source 1..19: mol_type = other RNA
taagtcccagaccgcaata

SEQ ID NO: 20740 - RNA, 19 nt, synthetic construct
  misc_feature 1..19: note = siRNA sense sequence
  source 1..19: mol_type = other RNA
attgcggtctgggacttat

SEQ ID NO: 20741 - RNA, 19 nt, synthetic construct
  misc_feature 1..19: note = siRNA antisense sequence
  source 1..19: mol_type = other RNA
ataagtcccagaccgcaat

SEQ ID NO: 20742 - RNA, 19 nt, synthetic construct
  misc_feature 1..19: note = siRNA sense sequence
  source 1..19: mol_type = other RNA
ttgcggtctgggacttatt

SEQ ID NO: 20743 - RNA, 19 nt, synthetic construct
  misc_feature 1..19: note = siRNA antisense sequence
  source 1..19: mol_type = other RNA
aataagtcccagaccgcaa

SEQ ID NO: 20744 - RNA, 19 nt, synthetic construct
  misc_feature 1..19: note = siRNA sense sequence
  source 1..19: mol_type = other RNA
tgcggtctgggacttattt

SEQ ID NO: 20745 - RNA, 19 nt, synthetic construct
  misc_feature 1..19: note = siRNA antisense sequence
  source 1..19: mol_type = other RNA
aaataagtcccagaccgca

SEQ ID NO: 20746 - RNA, 19 nt, synthetic construct
  misc_feature 1..19: note = siRNA sense sequence
  source 1..19: mol_type = other RNA
gcggtctgggacttatttc

SEQ ID NO: 20747 - RNA, 19 nt, synthetic construct
  misc_feature 1..19: note = siRNA antisense sequence
  source 1..19: mol_type = other RNA
gaaataagtcccagaccgc

SEQ ID NO: 20748 - RNA, 19 nt, synthetic construct
  misc_feature 1..19: note = siRNA sense sequence
  source 1..19: mol_type = other RNA
cttatttcaagttggtaga

SEQ ID NO: 20749 - RNA, 19 nt, synthetic construct
  misc_feature 1..19: note = siRNA antisense sequence
  source 1..19: mol_type = other RNA
tctaccaacttgaaataag

SEQ ID NO: 20750 - RNA, 19 nt, synthetic construct
  misc_feature 1..19: note = siRNA sense sequence
  source 1..19: mol_type = other RNA
accatatttgaggtctgcc

SEQ ID NO: 20751 - RNA, 19 nt, synthetic construct
  misc_feature 1..19: note = siRNA antisense sequence
  source 1..19: mol_type = other RNA
ggcagacctcaaatatggt

SEQ ID NO: 20752 - RNA, 19 nt, synthetic construct
  misc_feature 1..19: note = siRNA sense sequence
  source 1..19: mol_type = other RNA
ccatatttgaggtctgcca

SEQ ID NO: 20753 - RNA, 19 nt, synthetic construct
  misc_feature 1..19: note = siRNA antisense sequence
  source 1..19: mol_type = other RNA
tggcagacctcaaatatgg

SEQ ID NO: 20754 - RNA, 19 nt, synthetic construct
  misc_feature 1..19: note = siRNA sense sequence
  source 1..19: mol_type = other RNA
tgaggtctgccaattcttg

SEQ ID NO: 20755 - RNA, 19 nt, synthetic construct
  misc_feature 1..19: note = siRNA antisense sequence
  source 1..19: mol_type = other RNA
caagaattggcagacctca

SEQ ID NO: 20756 - RNA, 19 nt, synthetic construct
  misc_feature 1..19: note = siRNA sense sequence
  source 1..19: mol_type = other RNA
gaatcagtctttcacctct

SEQ ID NO: 20757 - RNA, 19 nt, synthetic construct
  misc_feature 1..19: note = siRNA antisense sequence
  source 1..19: mol_type = other RNA
agaggtgaaagactgattc

SEQ ID NO: 20758 - RNA, 19 nt, synthetic construct
  misc_feature 1..19: note = siRNA sense sequence
  source 1..19: mol_type = other RNA
aatcagtctttcacctctg

SEQ ID NO: 20759 - RNA, 19 nt, synthetic construct
  misc_feature 1..19: note = siRNA antisense sequence
  source 1..19: mol_type = other RNA
cagaggtgaaagactgatt

SEQ ID NO: 20760 - RNA, 19 nt, synthetic construct
  misc_feature 1..19: note = siRNA sense sequence
  source 1..19: mol_type = other RNA
ttccctcaattcttcagtg

SEQ ID NO: 20761 - RNA, 19 nt, synthetic construct
  misc_feature 1..19: note = siRNA antisense sequence
  source 1..19: mol_type = other RNA
cactgaagaattgagggaa

SEQ ID NO: 20762 - RNA, 19 nt, synthetic construct
  misc_feature 1..19: note = siRNA sense sequence
  source 1..19: mol_type = other RNA
gactgagtactgccaaaag

SEQ ID NO: 20763 - RNA, 19 nt, synthetic construct
  misc_feature 1..19: note = siRNA antisense sequence
  source 1..19: mol_type = other RNA
cttttggcagtactcagtc

SEQ ID NO: 20764 - RNA, 19 nt, synthetic construct
  misc_feature 1..19: note = siRNA sense sequence
  source 1..19: mol_type = other RNA
actgagtactgccaaaagt

SEQ ID NO: 20765 - RNA, 19 nt, synthetic construct
  misc_feature 1..19: note = siRNA antisense sequence
  source 1..19: mol_type = other RNA
acttttggcagtactcagt

SEQ ID NO: 20766 - RNA, 19 nt, synthetic construct
  misc_feature 1..19: note = siRNA sense sequence
  source 1..19: mol_type = other RNA
ctgagtactgccaaaagtt

SEQ ID NO: 20767 - RNA, 19 nt, synthetic construct
  misc_feature 1..19: note = siRNA antisense sequence
  source 1..19: mol_type = other RNA
aacttttggcagtactcag

SEQ ID NO: 20768 - RNA, 19 nt, synthetic construct
  misc_feature 1..19: note = siRNA sense sequence
  source 1..19: mol_type = other RNA
caattgaagagtaagagct

SEQ ID NO: 20769 - RNA, 19 nt, synthetic construct
  misc_feature 1..19: note = siRNA antisense sequence
  source 1..19: mol_type = other RNA
agctcttactcttcaattg

SEQ ID NO: 20770 - RNA, 19 nt, synthetic construct
  misc_feature 1..19: note = siRNA sense sequence
  source 1..19: mol_type = other RNA
aattgaagagtaagagcta

SEQ ID NO: 20771 - RNA, 19 nt, synthetic construct
  misc_feature 1..19: note = siRNA antisense sequence
  source 1..19: mol_type = other RNA
tagctcttactcttcaatt

SEQ ID NO: 20772 - RNA, 19 nt, synthetic construct
  misc_feature 1..19: note = siRNA sense sequence
  source 1..19: mol_type = other RNA
attgaagagtaagagctac

SEQ ID NO: 20773 - RNA, 19 nt, synthetic construct
  misc_feature 1..19: note = siRNA antisense sequence
  source 1..19: mol_type = other RNA
gtagctcttactcttcaat

SEQ ID NO: 20774 - RNA, 19 nt, synthetic construct
  misc_feature 1..19: note = siRNA sense sequence
  source 1..19: mol_type = other RNA
ttgaagagtaagagctaca

SEQ ID NO: 20775 - RNA, 19 nt, synthetic construct
  misc_feature 1..19: note = siRNA antisense sequence
  source 1..19: mol_type = other RNA
tgtagctcttactcttcaa

SEQ ID NO: 20776 - RNA, 19 nt, synthetic construct
  misc_feature 1..19: note = siRNA sense sequence
  source 1..19: mol_type = other RNA
caatccaggatgcttgact

SEQ ID NO: 20777 - RNA, 19 nt, synthetic construct
  misc_feature 1..19: note = siRNA antisense sequence
  source 1..19: mol_type = other RNA
agtcaagcatcctggattg

SEQ ID NO: 20778 - RNA, 19 nt, synthetic construct
  misc_feature 1..19: note = siRNA sense sequence
  source 1..19: mol_type = other RNA
aatccaggatgcttgactt

SEQ ID NO: 20779 - RNA, 19 nt, synthetic construct
  misc_feature 1..19: note = siRNA antisense sequence
  source 1..19: mol_type = other RNA
aagtcaagcatcctggatt

SEQ ID NO: 20780 - RNA, 19 nt, synthetic construct
  misc_feature 1..19: note = siRNA sense sequence
  source 1..19: mol_type = other RNA
atccaggatgcttgacttc

SEQ ID NO: 20781 - RNA, 19 nt, synthetic construct
  misc_feature 1..19: note = siRNA antisense sequence
  source 1..19: mol_type = other RNA
gaagtcaagcatcctggat

SEQ ID NO: 20782 - RNA, 19 nt, synthetic construct
  misc_feature 1..19: note = siRNA sense sequence
  source 1..19: mol_type = other RNA
tccaggatgcttgacttct

SEQ ID NO: 20783 - RNA, 19 nt, synthetic construct
  misc_feature 1..19: note = siRNA antisense sequence
  source 1..19: mol_type = other RNA
agaagtcaagcatcctgga

SEQ ID NO: 20784 - RNA, 19 nt, synthetic construct
  misc_feature 1..19: note = siRNA sense sequence
  source 1..19: mol_type = other RNA
ccaggatgcttgacttcta

SEQ ID NO: 20785 - RNA, 19 nt, synthetic construct
  misc_feature 1..19: note = siRNA antisense sequence
  source 1..19: mol_type = other RNA
tagaagtcaagcatcctgg

SEQ ID NO: 20786 - RNA, 19 nt, synthetic construct
  misc_feature 1..19: note = siRNA sense sequence
  source 1..19: mol_type = other RNA
caggatgcttgacttctag

SEQ ID NO: 20787 - RNA, 19 nt, synthetic construct
  misc_feature 1..19: note = siRNA antisense sequence
  source 1..19: mol_type = other RNA
ctagaagtcaagcatcctg

SEQ ID NO: 20788 - RNA, 19 nt, synthetic construct
  misc_feature 1..19: note = siRNA sense sequence
  source 1..19: mol_type = other RNA
aggatgcttgacttctagc

SEQ ID NO: 20789 - RNA, 19 nt, synthetic construct
  misc_feature 1..19: note = siRNA antisense sequence
  source 1..19: mol_type = other RNA
gctagaagtcaagcatcct

SEQ ID NO: 20790 - RNA, 19 nt, synthetic construct
  misc_feature 1..19: note = siRNA sense sequence
  source 1..19: mol_type = other RNA
gatgcttgacttctagccc

SEQ ID NO: 20791 - RNA, 19 nt, synthetic construct
  misc_feature 1..19: note = siRNA antisense sequence
  source 1..19: mol_type = other RNA
gggctagaagtcaagcatc

SEQ ID NO: 20792 - RNA, 19 nt, synthetic construct
  misc_feature 1..19: note = siRNA sense sequence
  source 1..19: mol_type = other RNA
atgcttgacttctagccca

SEQ ID NO: 20793 - RNA, 19 nt, synthetic construct
  misc_feature 1..19: note = siRNA antisense sequence
  source 1..19: mol_type = other RNA
tgggctagaagtcaagcat

SEQ ID NO: 20794 - RNA, 19 nt, synthetic construct
  misc_feature 1..19: note = siRNA sense sequence
  source 1..19: mol_type = other RNA
tgcttgacttctagcccag

SEQ ID NO: 20795 - RNA, 19 nt, synthetic construct
  misc_feature 1..19: note = siRNA antisense sequence
  source 1..19: mol_type = other RNA
ctgggctagaagtcaagca

SEQ ID NO: 20796 - RNA, 19 nt, synthetic construct
  misc_feature 1..19: note = siRNA sense sequence
  source 1..19: mol_type = other RNA
gcttgacttctagcccagt

SEQ ID NO: 20797 - RNA, 19 nt, synthetic construct
  misc_feature 1..19: note = siRNA antisense sequence
  source 1..19: mol_type = other RNA
actgggctagaagtcaagc

SEQ ID NO: 20798 - RNA, 19 nt, synthetic construct
  misc_feature 1..19: note = siRNA sense sequence
  source 1..19: mol_type = other RNA
tgacttctagcccagttct

SEQ ID NO: 20799 - RNA, 19 nt, synthetic construct
  misc_feature 1..19: note = siRNA antisense sequence
  source 1..19: mol_type = other RNA
agaactgggctagaagtca

SEQ ID NO: 20800 - RNA, 19 nt, synthetic construct
  misc_feature 1..19: note = siRNA sense sequence
  source 1..19: mol_type = other RNA
ttctagcccagttctcttc

SEQ ID NO: 20801 - RNA, 19 nt, synthetic construct
  misc_feature 1..19: note = siRNA antisense sequence
  source 1..19: mol_type = other RNA
gaagagaactgggctagaa

SEQ ID NO: 20802 - RNA, 19 nt, synthetic construct
  misc_feature 1..19: note = siRNA sense sequence
  source 1..19: mol_type = other RNA
tctagcccagttctcttct

SEQ ID NO: 20803 - RNA, 19 nt, synthetic construct
  misc_feature 1..19: note = siRNA antisense sequence
  source 1..19: mol_type = other RNA
agaagagaactgggctaga

SEQ ID NO: 20804 - RNA, 19 nt, synthetic construct
  misc_feature 1..19: note = siRNA sense sequence
  source 1..19: mol_type = other RNA
ctagcccagttctcttctt

SEQ ID NO: 20805 - RNA, 19 nt, synthetic construct
  misc_feature 1..19: note = siRNA antisense sequence
  source 1..19: mol_type = other RNA
aagaagagaactgggctag

SEQ ID NO: 20806 - RNA, 19 nt, synthetic construct
  misc_feature 1..19: note = siRNA sense sequence
  source 1..19: mol_type = other RNA
tagcccagttctcttcttg

SEQ ID NO: 20807 - RNA, 19 nt, synthetic construct
  misc_feature 1..19: note = siRNA antisense sequence
  source 1..19: mol_type = other RNA
caagaagagaactgggcta

SEQ ID NO: 20808 - RNA, 19 nt, synthetic construct
  misc_feature 1..19: note = siRNA sense sequence
  source 1..19: mol_type = other RNA
agcccagttctcttcttga

SEQ ID NO: 20809 - RNA, 19 nt, synthetic construct
  misc_feature 1..19: note = siRNA antisense sequence
  source 1..19: mol_type = other RNA
tcaagaagagaactgggct

SEQ ID NO: 20810 - RNA, 19 nt, synthetic construct
  misc_feature 1..19: note = siRNA sense sequence
  source 1..19: mol_type = other RNA
gcccagttctcttcttgag

SEQ ID NO: 20811 - RNA, 19 nt, synthetic construct
  misc_feature 1..19: note = siRNA antisense sequence
  source 1..19: mol_type = other RNA
ctcaagaagagaactgggc

SEQ ID NO: 20812 - RNA, 19 nt, synthetic construct
  misc_feature 1..19: note = siRNA sense sequence
  source 1..19: mol_type = other RNA
ctggaagtgtctcaagagc

SEQ ID NO: 20813 - RNA, 19 nt, synthetic construct
  misc_feature 1..19: note = siRNA antisense sequence
  source 1..19: mol_type = other RNA
gctcttgagacacttccag

SEQ ID NO: 20814 - RNA, 19 nt, synthetic construct
  misc_feature 1..19: note = siRNA sense sequence
  source 1..19: mol_type = other RNA
tggaagtgtctcaagagca

SEQ ID NO: 20815 - RNA, 19 nt, synthetic construct
  misc_feature 1..19: note = siRNA antisense sequence
  source 1..19: mol_type = other RNA
tgctcttgagacacttcca

SEQ ID NO: 20816 - RNA, 19 nt, synthetic construct
  misc_feature 1..19: note = siRNA sense sequence
  source 1..19: mol_type = other RNA
ggaagtgtctcaagagcaa

SEQ ID NO: 20817 - RNA, 19 nt, synthetic construct
  misc_feature 1..19: note = siRNA antisense sequence
  source 1..19: mol_type = other RNA
ttgctcttgagacacttcc

SEQ ID NO: 20818 - RNA, 19 nt, synthetic construct
  misc_feature 1..19: note = siRNA sense sequence
  source 1..19: mol_type = other RNA
gaagtgtctcaagagcaac

SEQ ID NO: 20819 - RNA, 19 nt, synthetic construct
  misc_feature 1..19: note = siRNA antisense sequence
  source 1..19: mol_type = other RNA
gttgctcttgagacacttc

SEQ ID NO: 20820 - RNA, 19 nt, synthetic construct
  misc_feature 1..19: note = siRNA sense sequence
  source 1..19: mol_type = other RNA
taaataagacattgtaggg

SEQ ID NO: 20821 - RNA, 19 nt, synthetic construct
  misc_feature 1..19: note = siRNA antisense sequence
  source 1..19: mol_type = other RNA
ccctacaatgtcttattta

SEQ ID NO: 20822 - RNA, 19 nt, synthetic construct
  misc_feature 1..19: note = siRNA sense sequence
  source 1..19: mol_type = other RNA
aaataagacattgtaggga

SEQ ID NO: 20823 - RNA, 19 nt, synthetic construct
  misc_feature 1..19: note = siRNA antisense sequence
  source 1..19: mol_type = other RNA
tccctacaatgtcttattt

SEQ ID NO: 20824 - RNA, 19 nt, synthetic construct
  misc_feature 1..19: note = siRNA sense sequence
  source 1..19: mol_type = other RNA
aataagacattgtagggaa

SEQ ID NO: 20825 - RNA, 19 nt, synthetic construct
  misc_feature 1..19: note = siRNA antisense sequence
  source 1..19: mol_type = other RNA
ttccctacaatgtcttatt

SEQ ID NO: 20826 - RNA, 19 nt, synthetic construct
  misc_feature 1..19: note = siRNA sense sequence
  source 1..19: mol_type = other RNA
aagcaaaagagctaaaagc

SEQ ID NO: 20827 - RNA, 19 nt, synthetic construct
  misc_feature 1..19: note = siRNA antisense sequence
  source 1..19: mol_type = other RNA
gcttttagctcttttgctt

SEQ ID NO: 20828 - RNA, 19 nt, synthetic construct
  misc_feature 1..19: note = siRNA sense sequence
  source 1..19: mol_type = other RNA
agcaaaagagctaaaagcc

SEQ ID NO: 20829 - RNA, 19 nt, synthetic construct
  misc_feature 1..19: note = siRNA antisense sequence
  source 1..19: mol_type = other RNA
ggcttttagctcttttgct

SEQ ID NO: 20830 - RNA, 19 nt, synthetic construct
  misc_feature 1..19: note = siRNA sense sequence
  source 1..19: mol_type = other RNA
gagctaaaagccctggtat

SEQ ID NO: 20831 - RNA, 19 nt, synthetic construct
  misc_feature 1..19: note = siRNA antisense sequence
  source 1..19: mol_type = other RNA
ataccagggcttttagctc

SEQ ID NO: 20832 - RNA, 19 nt, synthetic construct
  misc_feature 1..19: note = siRNA sense sequence
  source 1..19: mol_type = other RNA
gctaaaagccctggtattt

SEQ ID NO: 20833 - RNA, 19 nt, synthetic construct
  misc_feature 1..19: note = siRNA antisense sequence
  source 1..19: mol_type = other RNA
aaataccagggcttttagc

SEQ ID NO: 20834 - RNA, 19 nt, synthetic construct
  misc_feature 1..19: note = siRNA sense sequence
  source 1..19: mol_type = other RNA
ttctcaatactttgctcat

SEQ ID NO: 20835 - RNA, 19 nt, synthetic construct
  misc_feature 1..19: note = siRNA antisense sequence
  source 1..19: mol_type = other RNA
atgagcaaagtattgagaa

SEQ ID NO: 20836 - RNA, 19 nt, synthetic construct
  misc_feature 1..19: note = siRNA sense sequence
  source 1..19: mol_type = other RNA
tcaatactttgctcatttg

SEQ ID NO: 20837 - RNA, 19 nt, synthetic construct
  misc_feature 1..19: note = siRNA antisense sequence
  source 1..19: mol_type = other RNA
caaatgagcaaagtattga

SEQ ID NO: 20838 - RNA, 19 nt, synthetic construct
  misc_feature 1..19: note = siRNA sense sequence
  source 1..19: mol_type = other RNA
caatactttgctcatttgg

SEQ ID NO: 20839 - RNA, 19 nt, synthetic construct
  misc_feature 1..19: note = siRNA antisense sequence
  source 1..19: mol_type = other RNA
ccaaatgagcaaagtattg

SEQ ID NO: 20840 - RNA, 19 nt, synthetic construct
  misc_feature 1..19: note = siRNA sense sequence
  source 1..19: mol_type = other RNA
atactttgctcatttggaa

SEQ ID NO: 20841 - RNA, 19 nt, synthetic construct
  misc_feature 1..19: note = siRNA antisense sequence
  source 1..19: mol_type = other RNA
ttccaaatgagcaaagtat

SEQ ID NO: 20842 - RNA, 19 nt, synthetic construct
  misc_feature 1..19: note = siRNA sense sequence
  source 1..19: mol_type = other RNA
aatgttaaaatagctgcca

SEQ ID NO: 20843 - RNA, 19 nt, synthetic construct
  misc_feature 1..19: note = siRNA antisense sequence
  source 1..19: mol_type = other RNA
tggcagctattttaacatt

SEQ ID NO: 20844 - RNA, 19 nt, synthetic construct
  misc_feature 1..19: note = siRNA sense sequence
  source 1..19: mol_type = other RNA
ttaaaatagctgccatact

SEQ ID NO: 20845 - RNA, 19 nt, synthetic construct
  misc_feature 1..19: note = siRNA antisense sequence
  source 1..19: mol_type = other RNA
agtatggcagctattttaa

SEQ ID NO: 20846 - RNA, 19 nt, synthetic construct
  misc_feature 1..19: note = siRNA sense sequence
  source 1..19: mol_type = other RNA
taaaatagctgccatactt

SEQ ID NO: 20847 - RNA, 19 nt, synthetic construct
  misc_feature 1..19: note = siRNA antisense sequence
  source 1..19: mol_type = other RNA
aagtatggcagctatttta

SEQ ID NO: 20848 - RNA, 19 nt, synthetic construct
  misc_feature 1..19: note = siRNA sense sequence
  source 1..19: mol_type = other RNA
aatagctgccatactttac

SEQ ID NO: 20849 - RNA, 19 nt, synthetic construct
  misc_feature 1..19: note = siRNA antisense sequence
  source 1..19: mol_type = other RNA
gtaaagtatggcagctatt

SEQ ID NO: 20850 - RNA, 19 nt, synthetic construct
  misc_feature 1..19: note = siRNA sense sequence
  source 1..19: mol_type = other RNA
atagctgccatactttaca

SEQ ID NO: 20851 - RNA, 19 nt, synthetic construct
  misc_feature 1..19: note = siRNA antisense sequence
  source 1..19: mol_type = other RNA
tgtaaagtatggcagctat

SEQ ID NO: 20852 - RNA, 19 nt, synthetic construct
  misc_feature 1..19: note = siRNA sense sequence
  source 1..19: mol_type = other RNA
ctgccatactttacatttg

SEQ ID NO: 20853 - RNA, 19 nt, synthetic construct
  misc_feature 1..19: note = siRNA antisense sequence
  source 1..19: mol_type = other RNA
caaatgtaaagtatggcag

SEQ ID NO: 20854 - RNA, 19 nt, synthetic construct
  misc_feature 1..19: note = siRNA sense sequence
  source 1..19: mol_type = other RNA
tgccatactttacatttga

SEQ ID NO: 20855 - RNA, 19 nt, synthetic construct
  misc_feature 1..19: note = siRNA antisense sequence
  source 1..19: mol_type = other RNA
tcaaatgtaaagtatggca

SEQ ID NO: 20856 - RNA, 19 nt, synthetic construct
  misc_feature 1..19: note = siRNA sense sequence
  source 1..19: mol_type = other RNA
gccatactttacatttgac

SEQ ID NO: 20857 - RNA, 19 nt, synthetic construct
  misc_feature 1..19: note = siRNA antisense sequence
  source 1..19: mol_type = other RNA
gtcaaatgtaaagtatggc

SEQ ID NO: 20858 - RNA, 19 nt, synthetic construct
  misc_feature 1..19: note = siRNA sense sequence
  source 1..19: mol_type = other RNA
ccatactttacatttgact

SEQ ID NO: 20859 - RNA, 19 nt, synthetic construct
  misc_feature 1..19: note = siRNA antisense sequence
  source 1..19: mol_type = other RNA
agtcaaatgtaaagtatgg

SEQ ID NO: 20860 - RNA, 19 nt, synthetic construct
  misc_feature 1..19: note = siRNA sense sequence
  source 1..19: mol_type = other RNA
catactttacatttgactc

SEQ ID NO: 20861 - RNA, 19 nt, synthetic construct
  misc_feature 1..19: note = siRNA antisense sequence
  source 1..19: mol_type = other RNA
gagtcaaatgtaaagtatg

SEQ ID NO: 20862 - RNA, 19 nt, synthetic construct
  misc_feature 1..19: note = siRNA sense sequence
  source 1..19: mol_type = other RNA
actttacatttgactcacc

SEQ ID NO: 20863 - RNA, 19 nt, synthetic construct
  misc_feature 1..19: note = siRNA antisense sequence
  source 1..19: mol_type = other RNA
ggtgagtcaaatgtaaagt

SEQ ID NO: 20864 - RNA, 19 nt, synthetic construct
  misc_feature 1..19: note = siRNA sense sequence
  source 1..19: mol_type = other RNA
ctttacatttgactcacct

SEQ ID NO: 20865 - RNA, 19 nt, synthetic construct
  misc_feature 1..19: note = siRNA antisense sequence
  source 1..19: mol_type = other RNA
aggtgagtcaaatgtaaag

SEQ ID NO: 20866 - RNA, 19 nt, synthetic construct
  misc_feature 1..19: note = siRNA sense sequence
  source 1..19: mol_type = other RNA
tttacatttgactcaccta

SEQ ID NO: 20867 - RNA, 19 nt, synthetic construct
  misc_feature 1..19: note = siRNA antisense sequence
  source 1..19: mol_type = other RNA
taggtgagtcaaatgtaaa

SEQ ID NO: 20868 - RNA, 19 nt, synthetic construct
  misc_feature 1..19: note = siRNA sense sequence
  source 1..19: mol_type = other RNA
ttacatttgactcacctag

SEQ ID NO: 20869 - RNA, 19 nt, synthetic construct
  misc_feature 1..19: note = siRNA antisense sequence
  source 1..19: mol_type = other RNA
ctaggtgagtcaaatgtaa

SEQ ID NO: 20870 - RNA, 19 nt, synthetic construct
  misc_feature 1..19: note = siRNA sense sequence
  source 1..19: mol_type = other RNA
tacatttgactcacctagc

SEQ ID NO: 20871 - RNA, 19 nt, synthetic construct
  misc_feature 1..19: note = siRNA antisense sequence
  source 1..19: mol_type = other RNA
gctaggtgagtcaaatgta

SEQ ID NO: 20872 - RNA, 19 nt, synthetic construct
  misc_feature 1..19: note = siRNA sense sequence
  source 1..19: mol_type = other RNA
acatttgactcacctagct

SEQ ID NO: 20873 - RNA, 19 nt, synthetic construct
  misc_feature 1..19: note = siRNA antisense sequence
  source 1..19: mol_type = other RNA
agctaggtgagtcaaatgt

SEQ ID NO: 20874 - RNA, 19 nt, synthetic construct
  misc_feature 1..19: note = siRNA sense sequence
  source 1..19: mol_type = other RNA
catttgactcacctagctt

SEQ ID NO: 20875 - RNA, 19 nt, synthetic construct
  misc_feature 1..19: note = siRNA antisense sequence
  source 1..19: mol_type = other RNA
aagctaggtgagtcaaatg

SEQ ID NO: 20876 - RNA, 19 nt, synthetic construct
  misc_feature 1..19: note = siRNA sense sequence
  source 1..19: mol_type = other RNA
atttgactcacctagctta

SEQ ID NO: 20877 - RNA, 19 nt, synthetic construct
  misc_feature 1..19: note = siRNA antisense sequence
  source 1..19: mol_type = other RNA
taagctaggtgagtcaaat

SEQ ID NO: 20878 - RNA, 19 nt, synthetic construct
  misc_feature 1..19: note = siRNA sense sequence
  source 1..19: mol_type = other RNA
tttgactcacctagcttat

SEQ ID NO: 20879 - RNA, 19 nt, synthetic construct
  misc_feature 1..19: note = siRNA antisense sequence
  source 1..19: mol_type = other RNA
ataagctaggtgagtcaaa

SEQ ID NO: 20880 - RNA, 19 nt, synthetic construct
  misc_feature 1..19: note = siRNA sense sequence
  source 1..19: mol_type = other RNA
ttgactcacctagcttatc

SEQ ID NO: 20881 - RNA, 19 nt, synthetic construct
  misc_feature 1..19: note = siRNA antisense sequence
  source 1..19: mol_type = other RNA
gataagctaggtgagtcaa

SEQ ID NO: 20882 - RNA, 19 nt, synthetic construct
  misc_feature 1..19: note = siRNA sense sequence
  source 1..19: mol_type = other RNA
tgactcacctagcttatca

SEQ ID NO: 20883 - RNA, 19 nt, synthetic construct
  misc_feature 1..19: note = siRNA antisense sequence
  source 1..19: mol_type = other RNA
tgataagctaggtgagtca

SEQ ID NO: 20884 - RNA, 19 nt, synthetic construct
  misc_feature 1..19: note = siRNA sense sequence
  source 1..19: mol_type = other RNA
gactcacctagcttatcat

SEQ ID NO: 20885 - RNA, 19 nt, synthetic construct
  misc_feature 1..19: note = siRNA antisense sequence
  source 1..19: mol_type = other RNA
atgataagctaggtgagtc

SEQ ID NO: 20886 - RNA, 19 nt, synthetic construct
  misc_feature 1..19: note = siRNA sense sequence
  source 1..19: mol_type = other RNA
actcacctagcttatcatt

SEQ ID NO: 20887 - RNA, 19 nt, synthetic construct
  misc_feature 1..19: note = siRNA antisense sequence
  source 1..19: mol_type = other RNA
aatgataagctaggtgagt

SEQ ID NO: 20888 - RNA, 19 nt, synthetic construct
  misc_feature 1..19: note = siRNA sense sequence
  source 1..19: mol_type = other RNA
ctcacctagcttatcatta

SEQ ID NO: 20889 - RNA, 19 nt, synthetic construct
  misc_feature 1..19: note = siRNA antisense sequence
  source 1..19: mol_type = other RNA
taatgataagctaggtgag

SEQ ID NO: 20890 - RNA, 19 nt, synthetic construct
  misc_feature 1..19: note = siRNA sense sequence
  source 1..19: mol_type = other RNA
tcacctagcttatcattaa

SEQ ID NO: 20891 - RNA, 19 nt, synthetic construct
  misc_feature 1..19: note = siRNA antisense sequence
  source 1..19: mol_type = other RNA
ttaatgataagctaggtga

SEQ ID NO: 20892 - RNA, 19 nt, synthetic construct
  misc_feature 1..19: note = siRNA sense sequence
  source 1..19: mol_type = other RNA
cacctagcttatcattaat

SEQ ID NO: 20893 - RNA, 19 nt, synthetic construct
  misc_feature 1..19: note = siRNA antisense sequence
  source 1..19: mol_type = other RNA
attaatgataagctaggtg

SEQ ID NO: 20894 - RNA, 19 nt, synthetic construct
  misc_feature 1..19: note = siRNA sense sequence
  source 1..19: mol_type = other RNA
cattaatatatgagtgcct

SEQ ID NO: 20895 - RNA, 19 nt, synthetic construct
  misc_feature 1..19: note = siRNA antisense sequence
  source 1..19: mol_type = other RNA
aggcactcatatattaatg

SEQ ID NO: 20896 - RNA, 19 nt, synthetic construct
  misc_feature 1..19: note = siRNA sense sequence
  source 1..19: mol_type = other RNA
ttaatatatgagtgcctac

SEQ ID NO: 20897 - RNA, 19 nt, synthetic construct
  misc_feature 1..19: note = siRNA antisense sequence
  source 1..19: mol_type = other RNA
gtaggcactcatatattaa

SEQ ID NO: 20898 - RNA, 19 nt, synthetic construct
  misc_feature 1..19: note = siRNA sense sequence
  source 1..19: mol_type = other RNA
taatatatgagtgcctact

SEQ ID NO: 20899 - RNA, 19 nt, synthetic construct
  misc_feature 1..19: note = siRNA antisense sequence
  source 1..19: mol_type = other RNA
agtaggcactcatatatta

SEQ ID NO: 20900 - RNA, 19 nt, synthetic construct
  misc_feature 1..19: note = siRNA sense sequence
  source 1..19: mol_type = other RNA
atatatgagtgcctactat

SEQ ID NO: 20901 - RNA, 19 nt, synthetic construct
  misc_feature 1..19: note = siRNA antisense sequence
  source 1..19: mol_type = other RNA
atagtaggcactcatatat

SEQ ID NO: 20902 - RNA, 19 nt, synthetic construct
  misc_feature 1..19: note = siRNA sense sequence
  source 1..19: mol_type = other RNA
tatatgagtgcctactatg

SEQ ID NO: 20903 - RNA, 19 nt, synthetic construct
  misc_feature 1..19: note = siRNA antisense sequence
  source 1..19: mol_type = other RNA
catagtaggcactcatata

SEQ ID NO: 20904 - RNA, 19 nt, synthetic construct
  misc_feature 1..19: note = siRNA sense sequence
  source 1..19: mol_type = other RNA
tactatgtgcaaaggacct

SEQ ID NO: 20905 - RNA, 19 nt, synthetic construct
  misc_feature 1..19: note = siRNA antisense sequence
  source 1..19: mol_type = other RNA
aggtcctttgcacatagta

SEQ ID NO: 20906 - RNA, 19 nt, synthetic construct
  misc_feature 1..19: note = siRNA sense sequence
  source 1..19: mol_type = other RNA
actatgtgcaaaggacctt

SEQ ID NO: 20907 - RNA, 19 nt, synthetic construct
  misc_feature 1..19: note = siRNA antisense sequence
  source 1..19: mol_type = other RNA
aaggtcctttgcacatagt

SEQ ID NO: 20908 - RNA, 19 nt, synthetic construct
  misc_feature 1..19: note = siRNA sense sequence
  source 1..19: mol_type = other RNA
taaagataaatccttccag

SEQ ID NO: 20909 - RNA, 19 nt, synthetic construct
  misc_feature 1..19: note = siRNA antisense sequence
  source 1..19: mol_type = other RNA
ctggaaggatttatcttta

SEQ ID NO: 20910 - RNA, 19 nt, synthetic construct
  misc_feature 1..19: note = siRNA sense sequence
  source 1..19: mol_type = other RNA
aaagataaatccttccaga

SEQ ID NO: 20911 - RNA, 19 nt, synthetic construct
  misc_feature 1..19: note = siRNA antisense sequence
  source 1..19: mol_type = other RNA
tctggaaggatttatcttt

SEQ ID NO: 20912 - RNA, 19 nt, synthetic construct
  misc_feature 1..19: note = siRNA sense sequence
  source 1..19: mol_type = other RNA
ataaatccttccagagttc

SEQ ID NO: 20913 - RNA, 19 nt, synthetic construct
  misc_feature 1..19: note = siRNA antisense sequence
  source 1..19: mol_type = other RNA
gaactctggaaggatttat

SEQ ID NO: 20914 - RNA, 19 nt, synthetic construct
  misc_feature 1..19: note = siRNA sense sequence
  source 1..19: mol_type = other RNA
ggattcaagtttacatggt

SEQ ID NO: 20915 - RNA, 19 nt, synthetic construct
  misc_feature 1..19: note = siRNA antisense sequence
  source 1..19: mol_type = other RNA
accatgtaaacttgaatcc

SEQ ID NO: 20916 - RNA, 19 nt, synthetic construct
  misc_feature 1..19: note = siRNA sense sequence
  source 1..19: mol_type = other RNA
gattcaagtttacatggtt

SEQ ID NO: 20917 - RNA, 19 nt, synthetic construct
  misc_feature 1..19: note = siRNA antisense sequence
  source 1..19: mol_type = other RNA
aaccatgtaaacttgaatc

SEQ ID NO: 20918 - RNA, 19 nt, synthetic construct
  misc_feature 1..19: note = siRNA sense sequence
  source 1..19: mol_type = other RNA
tcaagtttacatggtttca

SEQ ID NO: 20919 - RNA, 19 nt, synthetic construct
  misc_feature 1..19: note = siRNA antisense sequence
  source 1..19: mol_type = other RNA
tgaaaccatgtaaacttga

SEQ ID NO: 20920 - RNA, 19 nt, synthetic construct
  misc_feature 1..19: note = siRNA sense sequence
  source 1..19: mol_type = other RNA
caagtttacatggtttcaa

SEQ ID NO: 20921 - RNA, 19 nt, synthetic construct
  misc_feature 1..19: note = siRNA antisense sequence
  source 1..19: mol_type = other RNA
ttgaaaccatgtaaacttg

SEQ ID NO: 20922 - RNA, 19 nt, synthetic construct
  misc_feature 1..19: note = siRNA sense sequence
  source 1..19: mol_type = other RNA
aagtttacatggtttcaag

SEQ ID NO: 20923 - RNA, 19 nt, synthetic construct
  misc_feature 1..19: note = siRNA antisense sequence
  source 1..19: mol_type = other RNA
cttgaaaccatgtaaactt

SEQ ID NO: 20924 - RNA, 19 nt, synthetic construct
  misc_feature 1..19: note = siRNA sense sequence
  source 1..19: mol_type = other RNA
tacatggtttcaagtttga

SEQ ID NO: 20925 - RNA, 19 nt, synthetic construct
  misc_feature 1..19: note = siRNA antisense sequence
  source 1..19: mol_type = other RNA
tcaaacttgaaaccatgta

SEQ ID NO: 20926 - RNA, 19 nt, synthetic construct
  misc_feature 1..19: note = siRNA sense sequence
  source 1..19: mol_type = other RNA
acatttaagctggacttta

SEQ ID NO: 20927 - RNA, 19 nt, synthetic construct
  misc_feature 1..19: note = siRNA antisense sequence
  source 1..19: mol_type = other RNA
taaagtccagcttaaatgt

SEQ ID NO: 20928 - RNA, 19 nt, synthetic construct
  misc_feature 1..19: note = siRNA sense sequence
  source 1..19: mol_type = other RNA
taagctggactttaaagat

SEQ ID NO: 20929 - RNA, 19 nt, synthetic construct
  misc_feature 1..19: note = siRNA antisense sequence
  source 1..19: mol_type = other RNA
atctttaaagtccagctta

SEQ ID NO: 20930 - RNA, 19 nt, synthetic construct
  misc_feature 1..19: note = siRNA sense sequence
  source 1..19: mol_type = other RNA
aagctggactttaaagata

SEQ ID NO: 20931 - RNA, 19 nt, synthetic construct
  misc_feature 1..19: note = siRNA antisense sequence
  source 1..19: mol_type = other RNA
tatctttaaagtccagctt

SEQ ID NO: 20932 - RNA, 19 nt, synthetic construct
  misc_feature 1..19: note = siRNA sense sequence
  source 1..19: mol_type = other RNA
agctggactttaaagatag

SEQ ID NO: 20933 - RNA, 19 nt, synthetic construct
  misc_feature 1..19: note = siRNA antisense sequence
  source 1..19: mol_type = other RNA
ctatctttaaagtccagct

SEQ ID NO: 20934 - RNA, 19 nt, synthetic construct
  misc_feature 1..19: note = siRNA sense sequence
  source 1..19: mol_type = other RNA
gctggactttaaagatagg

SEQ ID NO: 20935 - RNA, 19 nt, synthetic construct
  misc_feature 1..19: note = siRNA antisense sequence
  source 1..19: mol_type = other RNA
cctatctttaaagtccagc

SEQ ID NO: 20936 - RNA, 19 nt, synthetic construct
  misc_feature 1..19: note = siRNA sense sequence
  source 1..19: mol_type = other RNA
ctggactttaaagataggc

SEQ ID NO: 20937 - RNA, 19 nt, synthetic construct
  misc_feature 1..19: note = siRNA antisense sequence
  source 1..19: mol_type = other RNA
gcctatctttaaagtccag

SEQ ID NO: 20938 - RNA, 19 nt, synthetic construct
  misc_feature 1..19: note = siRNA sense sequence
  source 1..19: mol_type = other RNA
tggactttaaagataggca

SEQ ID NO: 20939 - RNA, 19 nt, synthetic construct
  misc_feature 1..19: note = siRNA antisense sequence
  source 1..19: mol_type = other RNA
tgcctatctttaaagtcca

SEQ ID NO: 20940 - RNA, 19 nt, synthetic construct
  misc_feature 1..19: note = siRNA sense sequence
  source 1..19: mol_type = other RNA
ggactttaaagataggcag

SEQ ID NO: 20941 - RNA, 19 nt, synthetic construct
  misc_feature 1..19: note = siRNA antisense sequence
  source 1..19: mol_type = other RNA
ctgcctatctttaaagtcc

SEQ ID NO: 20942 - RNA, 19 nt, synthetic construct
  misc_feature 1..19: note = siRNA sense sequence
  source 1..19: mol_type = other RNA
gactttaaagataggcagc

SEQ ID NO: 20943 - RNA, 19 nt, synthetic construct
  misc_feature 1..19: note = siRNA antisense sequence
  source 1..19: mol_type = other RNA
gctgcctatctttaaagtc

SEQ ID NO: 20944 - RNA, 19 nt, synthetic construct
  misc_feature 1..19: note = siRNA sense sequence
  source 1..19: mol_type = other RNA
actttaaagataggcagca

SEQ ID NO: 20945 - RNA, 19 nt, synthetic construct
  misc_feature 1..19: note = siRNA antisense sequence
  source 1..19: mol_type = other RNA
tgctgcctatctttaaagt

SEQ ID NO: 20946 - RNA, 19 nt, synthetic construct
  misc_feature 1..19: note = siRNA sense sequence
  source 1..19: mol_type = other RNA
ctttaaagataggcagcac

SEQ ID NO: 20947 - RNA, 19 nt, synthetic construct
  misc_feature 1..19: note = siRNA antisense sequence
  source 1..19: mol_type = other RNA
gtgctgcctatctttaaag

SEQ ID NO: 20948 - RNA, 19 nt, synthetic construct
  misc_feature 1..19: note = siRNA sense sequence
  source 1..19: mol_type = other RNA
aaagataggcagcactaaa

SEQ ID NO: 20949 - RNA, 19 nt, synthetic construct
  misc_feature 1..19: note = siRNA antisense sequence
  source 1..19: mol_type = other RNA
tttagtgctgcctatcttt

SEQ ID NO: 20950 - RNA, 19 nt, synthetic construct
  misc_feature 1..19: note = siRNA sense sequence
  source 1..19: mol_type = other RNA
aagataggcagcactaaag

SEQ ID NO: 20951 - RNA, 19 nt, synthetic construct
  misc_feature 1..19: note = siRNA antisense sequence
  source 1..19: mol_type = other RNA
ctttagtgctgcctatctt

SEQ ID NO: 20952 - RNA, 19 nt, synthetic construct
  misc_feature 1..19: note = siRNA sense sequence
  source 1..19: mol_type = other RNA
agataggcagcactaaagg

SEQ ID NO: 20953 - RNA, 19 nt, synthetic construct
  misc_feature 1..19: note = siRNA antisense sequence
  source 1..19: mol_type = other RNA
cctttagtgctgcctatct

SEQ ID NO: 20954 - RNA, 19 nt, synthetic construct
  misc_feature 1..19: note = siRNA sense sequence
  source 1..19: mol_type = other RNA
gataggcagcactaaagga

SEQ ID NO: 20955 - RNA, 19 nt, synthetic construct
  misc_feature 1..19: note = siRNA antisense sequence
  source 1..19: mol_type = other RNA
tcctttagtgctgcctatc

SEQ ID NO: 20956 - RNA, 19 nt, synthetic construct
  misc_feature 1..19: note = siRNA sense sequence
  source 1..19: mol_type = other RNA
ataggcagcactaaaggaa

SEQ ID NO: 20957 - RNA, 19 nt, synthetic construct
  misc_feature 1..19: note = siRNA antisense sequence
  source 1..19: mol_type = other RNA
ttcctttagtgctgcctat

SEQ ID NO: 20958 - RNA, 19 nt, synthetic construct
  misc_feature 1..19: note = siRNA sense sequence
  source 1..19: mol_type = other RNA
taggcagcactaaaggaag

SEQ ID NO: 20959 - RNA, 19 nt, synthetic construct
  misc_feature 1..19: note = siRNA antisense sequence
  source 1..19: mol_type = other RNA
cttcctttagtgctgccta

SEQ ID NO: 20960 - RNA, 19 nt, synthetic construct
  misc_feature 1..19: note = siRNA sense sequence
  source 1..19: mol_type = other RNA
aggcagcactaaaggaagc

SEQ ID NO: 20961 - RNA, 19 nt, synthetic construct
  misc_feature 1..19: note = siRNA antisense sequence
  source 1..19: mol_type = other RNA
gcttcctttagtgctgcct

SEQ ID NO: 20962 - RNA, 19 nt, synthetic construct
  misc_feature 1..19: note = siRNA sense sequence
  source 1..19: mol_type = other RNA
ggcagcactaaaggaagca

SEQ ID NO: 20963 - RNA, 19 nt, synthetic construct
  misc_feature 1..19: note = siRNA antisense sequence
  source 1..19: mol_type = other RNA
tgcttcctttagtgctgcc

SEQ ID NO: 20964 - RNA, 19 nt, synthetic construct
  misc_feature 1..19: note = siRNA sense sequence
  source 1..19: mol_type = other RNA
gaagttagtatgagttaag

SEQ ID NO: 20965 - RNA, 19 nt, synthetic construct
  misc_feature 1..19: note = siRNA antisense sequence
  source 1..19: mol_type = other RNA
cttaactcatactaacttc

SEQ ID NO: 20966 - RNA, 19 nt, synthetic construct
  misc_feature 1..19: note = siRNA sense sequence
  source 1..19: mol_type = other RNA
aagttcctagcatatgtag

SEQ ID NO: 20967 - RNA, 19 nt, synthetic construct
  misc_feature 1..19: note = siRNA antisense sequence
  source 1..19: mol_type = other RNA
ctacatatgctaggaactt

SEQ ID NO: 20968 - RNA, 19 nt, synthetic construct
  misc_feature 1..19: note = siRNA sense sequence
  source 1..19: mol_type = other RNA
aggttactttcaaggtgga

SEQ ID NO: 20969 - RNA, 19 nt, synthetic construct
  misc_feature 1..19: note = siRNA antisense sequence
  source 1..19: mol_type = other RNA
tccaccttgaaagtaacct

SEQ ID NO: 20970 - RNA, 19 nt, synthetic construct
  misc_feature 1..19: note = siRNA sense sequence
  source 1..19: mol_type = other RNA
actttcaaggtggaatata

SEQ ID NO: 20971 - RNA, 19 nt, synthetic construct
  misc_feature 1..19: note = siRNA antisense sequence
  source 1..19: mol_type = other RNA
tatattccaccttgaaagt

SEQ ID NO: 20972 - RNA, 19 nt, synthetic construct
  misc_feature 1..19: note = siRNA sense sequence
  source 1..19: mol_type = other RNA
ctttcaaggtggaatatag

SEQ ID NO: 20973 - RNA, 19 nt, synthetic construct
  misc_feature 1..19: note = siRNA antisense sequence
  source 1..19: mol_type = other RNA
ctatattccaccttgaaag

SEQ ID NO: 20974 - RNA, 19 nt, synthetic construct
  misc_feature 1..19: note = siRNA sense sequence
  source 1..19: mol_type = other RNA
tttcaaggtggaatatagg

SEQ ID NO: 20975 - RNA, 19 nt, synthetic construct
  misc_feature 1..19: note = siRNA antisense sequence
  source 1..19: mol_type = other RNA
cctatattccaccttgaaa

SEQ ID NO: 20976 - RNA, 19 nt, synthetic construct
  misc_feature 1..19: note = siRNA sense sequence
  source 1..19: mol_type = other RNA
ttcaaggtggaatataggg

SEQ ID NO: 20977 - RNA, 19 nt, synthetic construct
  misc_feature 1..19: note = siRNA antisense sequence
  source 1..19: mol_type = other RNA
ccctatattccaccttgaa

SEQ ID NO: 20978 - RNA, 19 nt, synthetic construct
  misc_feature 1..19: note = siRNA sense sequence
  source 1..19: mol_type = other RNA
ggtggaatatagggtgccc

SEQ ID NO: 20979 - RNA, 19 nt, synthetic construct
  misc_feature 1..19: note = siRNA antisense sequence
  source 1..19: mol_type = other RNA
gggcaccctatattccacc

SEQ ID NO: 20980 - RNA, 19 nt, synthetic construct
  misc_feature 1..19: note = siRNA sense sequence
  source 1..19: mol_type = other RNA
gtggaatatagggtgccct

SEQ ID NO: 20981 - RNA, 19 nt, synthetic construct
  misc_feature 1..19: note = siRNA antisense sequence
  source 1..19: mol_type = other RNA
agggcaccctatattccac

SEQ ID NO: 20982 - RNA, 19 nt, synthetic construct
  misc_feature 1..19: note = siRNA sense sequence
  source 1..19: mol_type = other RNA
tggaatatagggtgccctg

SEQ ID NO: 20983 - RNA, 19 nt, synthetic construct
  misc_feature 1..19: note = siRNA antisense sequence
  source 1..19: mol_type = other RNA
cagggcaccctatattcca

SEQ ID NO: 20984 - RNA, 19 nt, synthetic construct
  misc_feature 1..19: note = siRNA sense sequence
  source 1..19: mol_type = other RNA
ggaatatagggtgccctga

SEQ ID NO: 20985 - RNA, 19 nt, synthetic construct
  misc_feature 1..19: note = siRNA antisense sequence
  source 1..19: mol_type = other RNA
tcagggcaccctatattcc

SEQ ID NO: 20986 - RNA, 19 nt, synthetic construct
  misc_feature 1..19: note = siRNA sense sequence
  source 1..19: mol_type = other RNA
gaatatagggtgccctgag

SEQ ID NO: 20987 - RNA, 19 nt, synthetic construct
  misc_feature 1..19: note = siRNA antisense sequence
  source 1..19: mol_type = other RNA
ctcagggcaccctatattc

SEQ ID NO: 20988 - RNA, 19 nt, synthetic construct
  misc_feature 1..19: note = siRNA sense sequence
  source 1..19: mol_type = other RNA
aatatagggtgccctgagg

SEQ ID NO: 20989 - RNA, 19 nt, synthetic construct
  misc_feature 1..19: note = siRNA antisense sequence
  source 1..19: mol_type = other RNA
cctcagggcaccctatatt

SEQ ID NO: 20990 - RNA, 19 nt, synthetic construct
  misc_feature 1..19: note = siRNA sense sequence
  source 1..19: mol_type = other RNA
atatagggtgccctgaggg

SEQ ID NO: 20991 - RNA, 19 nt, synthetic construct
  misc_feature 1..19: note = siRNA antisense sequence
  source 1..19: mol_type = other RNA
ccctcagggcaccctatat

SEQ ID NO: 20992 - RNA, 19 nt, synthetic construct
  misc_feature 1..19: note = siRNA sense sequence
  source 1..19: mol_type = other RNA
aaagtgggaagtaaatttg

SEQ ID NO: 20993 - RNA, 19 nt, synthetic construct
  misc_feature 1..19: note = siRNA antisense sequence
  source 1..19: mol_type = other RNA
caaatttacttcccacttt

SEQ ID NO: 20994 - RNA, 19 nt, synthetic construct
  misc_feature 1..19: note = siRNA sense sequence
  source 1..19: mol_type = other RNA
aagtgggaagtaaatttgt

SEQ ID NO: 20995 - RNA, 19 nt, synthetic construct
  misc_feature 1..19: note = siRNA antisense sequence
  source 1..19: mol_type = other RNA
acaaatttacttcccactt

SEQ ID NO: 20996 - RNA, 19 nt, synthetic construct
  misc_feature 1..19: note = siRNA sense sequence
  source 1..19: mol_type = other RNA
gtgggaagtaaatttgtaa

SEQ ID NO: 20997 - RNA, 19 nt, synthetic construct
  misc_feature 1..19: note = siRNA antisense sequence
  source 1..19: mol_type = other RNA
ttacaaatttacttcccac

SEQ ID NO: 20998 - RNA, 19 nt, synthetic construct
  misc_feature 1..19: note = siRNA sense sequence
  source 1..19: mol_type = other RNA
tgggaagtaaatttgtaag

SEQ ID NO: 20999 - RNA, 19 nt, synthetic construct
  misc_feature 1..19: note = siRNA antisense sequence
  source 1..19: mol_type = other RNA
cttacaaatttacttccca

SEQ ID NO: 21000 - RNA, 19 nt, synthetic construct
  misc_feature 1..19: note = siRNA sense sequence
  source 1..19: mol_type = other RNA
gggaagtaaatttgtaagg

SEQ ID NO: 21001 - RNA, 19 nt, synthetic construct
  misc_feature 1..19: note = siRNA antisense sequence
  source 1..19: mol_type = other RNA
ccttacaaatttacttccc

SEQ ID NO: 21002 - RNA, 19 nt, synthetic construct
  misc_feature 1..19: note = siRNA sense sequence
  source 1..19: mol_type = other RNA
ggaagtaaatttgtaaggc

SEQ ID NO: 21003 - RNA, 19 nt, synthetic construct
  misc_feature 1..19: note = siRNA antisense sequence
  source 1..19: mol_type = other RNA
gccttacaaatttacttcc

SEQ ID NO: 21004 - RNA, 19 nt, synthetic construct
  misc_feature 1..19: note = siRNA sense sequence
  source 1..19: mol_type = other RNA
gaagtaaatttgtaaggcc

SEQ ID NO: 21005 - RNA, 19 nt, synthetic construct
  misc_feature 1..19: note = siRNA antisense sequence
  source 1..19: mol_type = other RNA
ggccttacaaatttacttc

SEQ ID NO: 21006 - RNA, 19 nt, synthetic construct
  misc_feature 1..19: note = siRNA sense sequence
  source 1..19: mol_type = other RNA
aagtaaatttgtaaggcca

SEQ ID NO: 21007 - RNA, 19 nt, synthetic construct
  misc_feature 1..19: note = siRNA antisense sequence
  source 1..19: mol_type = other RNA
tggccttacaaatttactt

SEQ ID NO: 21008 - RNA, 19 nt, synthetic construct
  misc_feature 1..19: note = siRNA sense sequence
  source 1..19: mol_type = other RNA
agtaaatttgtaaggccag

SEQ ID NO: 21009 - RNA, 19 nt, synthetic construct
  misc_feature 1..19: note = siRNA antisense sequence
  source 1..19: mol_type = other RNA
ctggccttacaaatttact

SEQ ID NO: 21010 - RNA, 19 nt, synthetic construct
  misc_feature 1..19: note = siRNA sense sequence
  source 1..19: mol_type = other RNA
aatttgtaaggccagtgca

SEQ ID NO: 21011 - RNA, 19 nt, synthetic construct
  misc_feature 1..19: note = siRNA antisense sequence
  source 1..19: mol_type = other RNA
tgcactggccttacaaatt

SEQ ID NO: 21012 - RNA, 19 nt, synthetic construct
  misc_feature 1..19: note = siRNA sense sequence
  source 1..19: mol_type = other RNA
atttgtaaggccagtgcaa

SEQ ID NO: 21013 - RNA, 19 nt, synthetic construct
  misc_feature 1..19: note = siRNA antisense sequence
  source 1..19: mol_type = other RNA
ttgcactggccttacaaat

SEQ ID NO: 21014 - RNA, 19 nt, synthetic construct
  misc_feature 1..19: note = siRNA sense sequence
  source 1..19: mol_type = other RNA
ttgtaaggccagtgcaaat

SEQ ID NO: 21015 - RNA, 19 nt, synthetic construct
  misc_feature 1..19: note = siRNA antisense sequence
  source 1..19: mol_type = other RNA
atttgcactggccttacaa

SEQ ID NO: 21016 - RNA, 19 nt, synthetic construct
  misc_feature 1..19: note = siRNA sense sequence
  source 1..19: mol_type = other RNA
tgtaaggccagtgcaaatt

SEQ ID NO: 21017 - RNA, 19 nt, synthetic construct
  misc_feature 1..19: note = siRNA antisense sequence
  source 1..19: mol_type = other RNA
aatttgcactggccttaca

SEQ ID NO: 21018 - RNA, 19 nt, synthetic construct
  misc_feature 1..19: note = siRNA sense sequence
  source 1..19: mol_type = other RNA
gtaaggccagtgcaaattg

SEQ ID NO: 21019 - RNA, 19 nt, synthetic construct
  misc_feature 1..19: note = siRNA antisense sequence
  source 1..19: mol_type = other RNA
caatttgcactggccttac

SEQ ID NO: 21020 - RNA, 19 nt, synthetic construct
  misc_feature 1..19: note = siRNA sense sequence
  source 1..19: mol_type = other RNA
taaggccagtgcaaattgg

SEQ ID NO: 21021 - RNA, 19 nt, synthetic construct
  misc_feature 1..19: note = siRNA antisense sequence
  source 1..19: mol_type = other RNA
ccaatttgcactggcctta

SEQ ID NO: 21022 - RNA, 19 nt, synthetic construct
  misc_feature 1..19: note = siRNA sense sequence
  source 1..19: mol_type = other RNA
aaggccagtgcaaattggg

SEQ ID NO: 21023 - RNA, 19 nt, synthetic construct
  misc_feature 1..19: note = siRNA antisense sequence
  source 1..19: mol_type = other RNA
cccaatttgcactggcctt

SEQ ID NO: 21024 - RNA, 19 nt, synthetic construct
  misc_feature 1..19: note = siRNA sense sequence
  source 1..19: mol_type = other RNA
aggccagtgcaaattggga

SEQ ID NO: 21025 - RNA, 19 nt, synthetic construct
  misc_feature 1..19: note = siRNA antisense sequence
  source 1..19: mol_type = other RNA
tcccaatttgcactggcct

SEQ ID NO: 21026 - RNA, 19 nt, synthetic construct
  misc_feature 1..19: note = siRNA sense sequence
  source 1..19: mol_type = other RNA
ggccagtgcaaattgggat

SEQ ID NO: 21027 - RNA, 19 nt, synthetic construct
  misc_feature 1..19: note = siRNA antisense sequence
  source 1..19: mol_type = other RNA
atcccaatttgcactggcc

SEQ ID NO: 21028 - RNA, 19 nt, synthetic construct
  misc_feature 1..19: note = siRNA sense sequence
  source 1..19: mol_type = other RNA
gccagtgcaaattgggatt

SEQ ID NO: 21029 - RNA, 19 nt, synthetic construct
  misc_feature 1..19: note = siRNA antisense sequence
  source 1..19: mol_type = other RNA
aatcccaatttgcactggc

SEQ ID NO: 21030 - RNA, 19 nt, synthetic construct
  misc_feature 1..19: note = siRNA sense sequence
  source 1..19: mol_type = other RNA
ccagtgcaaattgggattg

SEQ ID NO: 21031 - RNA, 19 nt, synthetic construct
  misc_feature 1..19: note = siRNA antisense sequence
  source 1..19: mol_type = other RNA
caatcccaatttgcactgg

SEQ ID NO: 21032 - RNA, 19 nt, synthetic construct
  misc_feature 1..19: note = siRNA sense sequence
  source 1..19: mol_type = other RNA
cagtgcaaattgggattgt

SEQ ID NO: 21033 - RNA, 19 nt, synthetic construct
  misc_feature 1..19: note = siRNA antisense sequence
  source 1..19: mol_type = other RNA
acaatcccaatttgcactg

SEQ ID NO: 21034 - RNA, 19 nt, synthetic construct
  misc_feature 1..19: note = siRNA sense sequence
  source 1..19: mol_type = other RNA
agtgcaaattgggattgta

SEQ ID NO: 21035 - RNA, 19 nt, synthetic construct
  misc_feature 1..19: note = siRNA antisense sequence
  source 1..19: mol_type = other RNA
tacaatcccaatttgcact

SEQ ID NO: 21036 - RNA, 19 nt, synthetic construct
  misc_feature 1..19: note = siRNA sense sequence
  source 1..19: mol_type = other RNA
gtgcaaattgggattgtag

SEQ ID NO: 21037 - RNA, 19 nt, synthetic construct
  misc_feature 1..19: note = siRNA antisense sequence
  source 1..19: mol_type = other RNA
ctacaatcccaatttgcac

SEQ ID NO: 21038 - RNA, 19 nt, synthetic construct
  misc_feature 1..19: note = siRNA sense sequence
  source 1..19: mol_type = other RNA
tgcaaattgggattgtaga

SEQ ID NO: 21039 - RNA, 19 nt, synthetic construct
  misc_feature 1..19: note = siRNA antisense sequence
  source 1..19: mol_type = other RNA
tctacaatcccaatttgca

SEQ ID NO: 21040 - RNA, 19 nt, synthetic construct
  misc_feature 1..19: note = siRNA sense sequence
  source 1..19: mol_type = other RNA
gcaaattgggattgtagac

SEQ ID NO: 21041 - RNA, 19 nt, synthetic construct
  misc_feature 1..19: note = siRNA antisense sequence
  source 1..19: mol_type = other RNA
gtctacaatcccaatttgc

SEQ ID NO: 21042 - RNA, 19 nt, synthetic construct
  misc_feature 1..19: note = siRNA sense sequence
  source 1..19: mol_type = other RNA
caaattgggattgtagacg

SEQ ID NO: 21043 - RNA, 19 nt, synthetic construct
  misc_feature 1..19: note = siRNA antisense sequence
  source 1..19: mol_type = other RNA
cgtctacaatcccaatttg

SEQ ID NO: 21044 - RNA, 19 nt, synthetic construct
  misc_feature 1..19: note = siRNA sense sequence
  source 1..19: mol_type = other RNA
aaattgggattgtagacgt

SEQ ID NO: 21045 - RNA, 19 nt, synthetic construct
  misc_feature 1..19: note = siRNA antisense sequence
  source 1..19: mol_type = other RNA
acgtctacaatcccaattt

SEQ ID NO: 21046 - RNA, 19 nt, synthetic construct
  misc_feature 1..19: note = siRNA sense sequence
  source 1..19: mol_type = other RNA
aattgggattgtagacgtt

SEQ ID NO: 21047 - RNA, 19 nt, synthetic construct
  misc_feature 1..19: note = siRNA antisense sequence
  source 1..19: mol_type = other RNA
aacgtctacaatcccaatt

SEQ ID NO: 21048 - RNA, 19 nt, synthetic construct
  misc_feature 1..19: note = siRNA sense sequence
  source 1..19: mol_type = other RNA
attgggattgtagacgtta

SEQ ID NO: 21049 - RNA, 19 nt, synthetic construct
  misc_feature 1..19: note = siRNA antisense sequence
  source 1..19: mol_type = other RNA
taacgtctacaatcccaat

SEQ ID NO: 21050 - RNA, 19 nt, synthetic construct
  misc_feature 1..19: note = siRNA sense sequence
  source 1..19: mol_type = other RNA
ttgggattgtagacgttaa

SEQ ID NO: 21051 - RNA, 19 nt, synthetic construct
  misc_feature 1..19: note = siRNA antisense sequence
  source 1..19: mol_type = other RNA
ttaacgtctacaatcccaa

SEQ ID NO: 21052 - RNA, 19 nt, synthetic construct
  misc_feature 1..19: note = siRNA sense sequence
  source 1..19: mol_type = other RNA
tgggattgtagacgttaat

SEQ ID NO: 21053 - RNA, 19 nt, synthetic construct
  misc_feature 1..19: note = siRNA antisense sequence
  source 1..19: mol_type = other RNA
attaacgtctacaatccca

SEQ ID NO: 21054 - RNA, 19 nt, synthetic construct
  misc_feature 1..19: note = siRNA sense sequence
  source 1..19: mol_type = other RNA
gggattgtagacgttaatt

SEQ ID NO: 21055 - RNA, 19 nt, synthetic construct
  misc_feature 1..19: note = siRNA antisense sequence
  source 1..19: mol_type = other RNA
aattaacgtctacaatccc

SEQ ID NO: 21056 - RNA, 19 nt, synthetic construct
  misc_feature 1..19: note = siRNA sense sequence
  source 1..19: mol_type = other RNA
ggattgtagacgttaattc

SEQ ID NO: 21057 - RNA, 19 nt, synthetic construct
  misc_feature 1..19: note = siRNA antisense sequence
  source 1..19: mol_type = other RNA
gaattaacgtctacaatcc

SEQ ID NO: 21058 - RNA, 19 nt, synthetic construct
  misc_feature 1..19: note = siRNA sense sequence
  source 1..19: mol_type = other RNA
gattgtagacgttaattca

SEQ ID NO: 21059 - RNA, 19 nt, synthetic construct
  misc_feature 1..19: note = siRNA antisense sequence
  source 1..19: mol_type = other RNA
tgaattaacgtctacaatc

SEQ ID NO: 21060 - RNA, 19 nt, synthetic construct
  misc_feature 1..19: note = siRNA sense sequence
  source 1..19: mol_type = other RNA
tgtagacgttaattcatag

SEQ ID NO: 21061 - RNA, 19 nt, synthetic construct
  misc_feature 1..19: note = siRNA antisense sequence
  source 1..19: mol_type = other RNA
ctatgaattaacgtctaca

SEQ ID NO: 21062 - RNA, 19 nt, synthetic construct
  misc_feature 1..19: note = siRNA sense sequence
  source 1..19: mol_type = other RNA
gtagacgttaattcatagg

SEQ ID NO: 21063 - RNA, 19 nt, synthetic construct
  misc_feature 1..19: note = siRNA antisense sequence
  source 1..19: mol_type = other RNA
cctatgaattaacgtctac

SEQ ID NO: 21064 - RNA, 19 nt, synthetic construct
  misc_feature 1..19: note = siRNA sense sequence
  source 1..19: mol_type = other RNA
tagacgttaattcataggg

SEQ ID NO: 21065 - RNA, 19 nt, synthetic construct
  misc_feature 1..19: note = siRNA antisense sequence
  source 1..19: mol_type = other RNA
ccctatgaattaacgtcta

SEQ ID NO: 21066 - RNA, 19 nt, synthetic construct
  misc_feature 1..19: note = siRNA sense sequence
  source 1..19: mol_type = other RNA
agacgttaattcataggga

SEQ ID NO: 21067 - RNA, 19 nt, synthetic construct
  misc_feature 1..19: note = siRNA antisense sequence
  source 1..19: mol_type = other RNA
tccctatgaattaacgtct

SEQ ID NO: 21068 - RNA, 19 nt, synthetic construct
  misc_feature 1..19: note = siRNA sense sequence
  source 1..19: mol_type = other RNA
gacgttaattcatagggaa

SEQ ID NO: 21069 - RNA, 19 nt, synthetic construct
  misc_feature 1..19: note = siRNA antisense sequence
  source 1..19: mol_type = other RNA
ttccctatgaattaacgtc

SEQ ID NO: 21070 - RNA, 19 nt, synthetic construct
  misc_feature 1..19: note = siRNA sense sequence
  source 1..19: mol_type = other RNA
ttcatagggaatgggaatc

SEQ ID NO: 21071 - RNA, 19 nt, synthetic construct
  misc_feature 1..19: note = siRNA antisense sequence
  source 1..19: mol_type = other RNA
gattcccattccctatgaa

SEQ ID NO: 21072 - RNA, 19 nt, synthetic construct
  misc_feature 1..19: note = siRNA sense sequence
  source 1..19: mol_type = other RNA
atagggaatgggaatccaa

SEQ ID NO: 21073 - RNA, 19 nt, synthetic construct
  misc_feature 1..19: note = siRNA antisense sequence
  source 1..19: mol_type = other RNA
ttggattcccattccctat

SEQ ID NO: 21074 - RNA, 19 nt, synthetic construct
  misc_feature 1..19: note = siRNA sense sequence
  source 1..19: mol_type = other RNA
tagggaatgggaatccaaa

SEQ ID NO: 21075 - RNA, 19 nt, synthetic construct
  misc_feature 1..19: note = siRNA antisense sequence
  source 1..19: mol_type = other RNA
tttggattcccattcccta

SEQ ID NO: 21076 - RNA, 19 nt, synthetic construct
  misc_feature 1..19: note = siRNA sense sequence
  source 1..19: mol_type = other RNA
agggaatgggaatccaaaa

SEQ ID NO: 21077 - RNA, 19 nt, synthetic construct
  misc_feature 1..19: note = siRNA antisense sequence
  source 1..19: mol_type = other RNA
ttttggattcccattccct

SEQ ID NO: 21078 - RNA, 19 nt, synthetic construct
  misc_feature 1..19: note = siRNA sense sequence
  source 1..19: mol_type = other RNA
gggaatgggaatccaaaat

SEQ ID NO: 21079 - RNA, 19 nt, synthetic construct
  misc_feature 1..19: note = siRNA antisense sequence
  source 1..19: mol_type = other RNA
attttggattcccattccc

SEQ ID NO: 21080 - RNA, 19 nt, synthetic construct
  misc_feature 1..19: note = siRNA sense sequence
  source 1..19: mol_type = other RNA
ggaatgggaatccaaaatg

(The sequence listing continues in the following parts.)
